United States Patent Application Publication US 2005/0228172 A9 - sequence listing, part 120

SEQ ID NO: 556966 - DNA, 598 bp, Homo sapiens
caaaaaaaaaattagctgggcttggtggtgggtgcctgtaagcccagctactcaggaggctgaggcaggagaattgcctgaacccgggaggtggaggttacagtgagccgagatcacgccactgtactctagcctgggcaacaagtgcaaaactccatttcaaaaaaagaaaaaaagaaaaaataaggacaaatgaaattacatgaaagattagtgttaagtggaatcagttaagaacattttattgagaaagtgcaccattaggtagacatgaaatactagatttagtttgatagaaagaaggaaagagggtgtttctagttagaaacacagtaacttagagtccagaaatgggaatgaacaaggaagaagcagagatgagatttgctcagttgggcaaggatgagattagaattgaagtgrcatatcaattcagatcaagttttctatgaattgaaatacgaggctaaaaagtttagatgtttagaaaagatttgttttggtaggcaacactgacaaactctggattcaaccaaagccagaataaaaaagtgttttaagttgtaggagttttatggggtacatctaaagaagagat

SEQ ID NO: 556967 - DNA, 598 bp, Homo sapiens
caaaaaaaaaattagctgggcttggtggtgggtgcctgtaagcccagctactcaggaggctgaggcaggagaattgcctgaacccgggaggtggaggttacagtgagccgagatcacgccactgtactctagcctgggcaacaagtgcaaaactccatttcaaaaaaagaaaaaaagaaaaaataaggacaaatgaaattacatgaaagattagtgttaagtggaatcagttaagaacattttattgagaaagtgcaccattaggtagacatgaaatactagatttagtttgatagaaagaaggaaagagggtgtttctagttagaaacacagtracttagagtccagaaatgggaatgaacaaggaagaagcagagatgagatttgctcagttgggcaaggatgagattagaattgaagtggcatatcaattcagatcaagttttctatgaattgaaatacgaggctaaaaagtttagatgtttagaaaagatttgttttggtaggcaacactgacaaactctggattcaaccaaagccagaataaaaaagtgttttaagttgtaggagttttatggggtacatctaaagaagagat

SEQ ID NO: 556968 - DNA, 571 bp, Homo sapiens
cttcagatatatgttccttttttgaaacacatgaaaacatttatatatttatgctataaacaggtaaaaacaactcttaaatagatcagcagagccagatcagcaatttcttatcttgactaaatggacataccaacagcaaagtaaagccaaaaataggcatataatataattttacagctgcatctatgaggacacaagtgatattttaatattcaatcagaaatattacatacaaaagttatggaaatctaccactaaattttctggtggttaagattttagtggagtgtgtgatcactataaaattttaaaatttcaaaataatgtgccaagtktgaagggacaatgcataccaaaggggagaaagaaatgtaattgtcaacaactcagtaagaagatgtttgaaggatctattgagcttaattctttacctaccagtttcagaaatgaaatgcccaatctaatatacttctggatcatatttgaagatgatttaatttagccagtcattctgtttttcactctcctcccattttggcatactgtgtcccaccttgacattaagaag

SEQ ID NO: 556969 - DNA, 571 bp, Homo sapiens
cttcagatatatgttccttttttgaaacacatgaaaacatttatatatttatgctataaacaggtaaaaacaactcttaaatagatcagcagagccagatcagcaatttcttatcttgactaaatggacataccaacagcaaagtaaagccaaaaataggcatataatataattttacagctgcatctatgaggacacaagtgatattttaatattcaatcagaaatattacatacaaaagttatggaaatctaccactaaattttctggtggttaagattttartggagtgtgtgatcactataaaattttaaaatttcaaaataatgtgccaagtgtgaagggacaatgcataccaaaggggagaaagaaatgtaattgtcaacaactcagtaagaagatgtttgaaggatctattgagcttaattctttacctaccagtttcagaaatgaaatgcccaatctaatatacttctggatcatatttgaagatgatttaatttagccagtcattctgtttttcactctcctcccattttggcatactgtgtcccaccttgacattaagaag

SEQ ID NO: 556970 - DNA, 562 bp, Homo sapiens
aacttcttaatgtcaaggtgggacacagtatgccaaaatgggaggagagtgaaaaacagaatgactggctaaattaaatcatcttcaaatatgatccagaagtatattagattgggcatttcatttctgaaactggtaggtaaagaattaagctcaatagatccttcaaacatcttcttactgagttgttgacaattacatttctttctcccctttggtatgcattgtcccttcacacttggcacattattttgaaattttaaaattttatagtgatcacacactccactaaaatcttaaccaccagaaaatttagtggtagatttccataacttttgtatgtaatatttctgattgaatattaaaatatcacttgtgtcctcatagatgcagctgtaaaattatattatatgcctatttttggctttaytttgctgttggtatgtccatttagtcaagataagaaattgctgatctggctctgctgatctatttaagagttgtttttacctgtttatagcataaatatataaatgttttcatgtgtttcaaaaaaggaaca

SEQ ID NO: 556971 - DNA, 576 bp, Homo sapiens
tacctttggtctttgatgttggtggatggggttttggtgtggatgtcctttttgttgatgctgatgttatttctttctgtttgttagttttccttctgacagtcaggtccctcagctgccggtctgttggagtttgctggaggtccactccagaacctgtttgcctgggtatcaccagtggaggctgcagaacagcaaatattgcagaacarcagatcttgctacctgatccttcctctggaagcttcgtcccagaggggcacctgcctgtatgaagtgtctgtcagcccctactgggaggtgtctcctagttaggctacacaggtgtcagggacccacttgaggaggcggtctgtttcagagctcaaacgccatactgtgagaaccactgctctcttcagagttgtcagacggggacatttaagtctgcacaagtttctgctgccttttgttcagctatgccctgcccacagaggtggagtctatataggcagtaggccttgctgagctacagtgggctctgcccagttcgaacttcccagtcgctttgtttaactattcaagcctcagcaatgg

SEQ ID NO: 556972 - DNA, 576 bp, Homo sapiens
tacctttggtctttgatgttggtggatggggttttggtgtggatgtcctttttgttgatgctgatgttatttctttctgtttgttagttttccttctgacagtcaggtccctcagctgccggtctgttggagtttgctggaggtccactccagaacctgtttgcctgggtatcaccagtggaggctgcagaacagcaaatattgcagaacaacagatcttgctacctgatccttcctctggaagcttcgtcccagaggggcacctgcctgtatgaagtgtctgtcagcccctactgggaggtgtctcctagttaggctacacaggtgtcagggacccacttgaggaggcggtctgtttcagagctcaaacgccatactgtgagaaccactgctctcttcagagttgtcagacrgggacatttaagtctgcacaagtttctgctgccttttgttcagctatgccctgcccacagaggtggagtctatataggcagtaggccttgctgagctacagtgggctctgcccagttcgaacttcccagtcgctttgtttaactattcaagcctcagcaatgg

SEQ ID NO: 556973 - DNA, 449 bp, Homo sapiens
tctattttttgttttgtttcatttgattttggggacttagtcataaattctttgtctatgccaaagtctaaagagttttcataggtgttcttctaggattttttatagtttaaggtcttaaatttaagtatttactccgttttgagttaatttttgtatatggtgagagatatgggtccaggttcattcttctgcgtatgatgattaaatagtcccagcaccatatattgaatagactgacctttccccagtgtgtatttttgttggttgtggatacgtggctttatttctggattctcaattctcttccattgacctatgtgtccatttttataccactaccgtgctgtttttgcagtgactggtaccrgtttttcctttccatatttagtgcttccttccagagctcttgtaaggcaggcctggtggtgacagaatccctcagcatt

SEQ ID NO: 556974 - DNA, 621 bp, Homo sapiens
taaaaacaaaaatcacatgttcatttcaatagatgcagaaaagccttttgataaattkcagcatctattcatattaaaaaccctcaaaaaactaggcactgaaggaacatacctcaaaataataagagctatctatgacaaacccacagccaacatatactgaatgagcaaaactggaagcattctccttgagaactggaacaagacaaggatgcccactctcaacatactactggaagtcttggccagagcaatcaggcaaaagaaagaaaaaaaaggcatccaaataggaagaaaggaagtcaaactatctatgtttgcagacaatattattttatacatagaaaacccctttgtctctgacaaaaatctcctagatcatatcaacaacttcagcaaagtttcaggctaccaaatcaatgtacaaaaatcagtagcatttctatacatcaataatgtccaagctgagaaccaaataaaaaatgcaatcccattcacaatagacataaaaaaaataaaatacctgagaatacagctaacctgggagatgaaagatatctgcaatgagaattacaagacactgctgaaagaaatcggagatgatacaaacaaatgaaaaat

SEQ ID NO: 556975 - DNA, 593 bp, Homo sapiens
attttgatggaaaaactgagatcattttaaaatcacatagtcaaactaaaatggctttttctccattactcgcttactcccttccaataaaacacttgattccaagtagactgcaagttggacaatttccrgatattcagatggaggacattcatcgaaggcattcctaaatggttgtcaaattttgacaaacctagattggagaaataagaaaagaaatgcataattcatccccatgcacaggaaatgcagtatctaatcactgcatacccatttgcgcatatataagcacacacccacacccatacccacaacgggcctgaattatcacaactaggaagagtgcatcctcaactaagggtacttttagtttttgcttttatcccagcaggacttagtgctctactttgtgtctgaaagactatagatgttttgacccctcagcccatcgtggtactgagataactaatatttactatggcttactcttcccacctgaccttatggcatttttctgtcttatatcactattttagttgcactttaagtgaaaggtaatgatgatcctcaagaacattaaaaacttggtaaag

SEQ ID NO: 556976 - DNA, 572 bp, Homo sapiens
aaaaaaaaaaaaaaaaaaaaaagaatgaaaagtgtgcaaacagttggaagatagtttggcccttgcttacaaagttaaacatagacttaccatataacccaacagcttcacttgcttacaaatttaaacttagacttaccatataacccaacagttgcaccccttggtattaattcaactgaggtgaattctgtgtctgtacaaaaatctgcatatgattcyttgtagaagctttattcaaagtggtcaaaaactggaagcaaccaagacacccttcaataggtgaatgtataaacaaactgtggtacatccatacaatggaatatgattcagcaacaaaaaggaatgagctaattgtagaatagcacatttgttattgctgtgggttagtatattttcttagaggaggtgaatagttttctgtattaatcatatacaagcaaaatattccgtgagagaaataatttgttctgacaaaacaagaaattaagggaagacagaaatggtgggaaaaactgaagtcccataagcgatggcagcagcagcccatctggagtggctgctgcaaagac

SEQ ID NO: 556977 - DNA, 568 bp, Homo sapiens
tgactcatgtgtacatgcacacacacacaaacacacacatgcacacatgtacacacacaccctagatttcaacttcttttgggacagtgtcttattctcccttgtttccctcctaagtgtcctacagttcataagtttaccaaatatttgcccagtcgatattcatatttcccttagtcatgaaatcaaggcttagatggaccatagaagtaattgtcctgtttagacaagaagcaaaaataaggacatactatgggtataaaataaccacaaaaaaacaaaaaacacaaattttacaggtcttcagagtttccccaaggtaaaataaattaggacaatttctccaaacaycatgcctcctgctcaaagcttaaagccagacggtaacatcctggctactcccatcatctcccactgcaggattatctttttctgaagcatcatatttattctccttacccataggagattatctccctgcataatttataattttagattgtgagctcatgtcctttgggctttatctggggaaatctgtgcagcttgggctgagagtgtgtttcca

SEQ ID NO: 556978 - DNA, 539 bp, Homo sapiens
gctgtggtttgaatgtgtctcccaaagtggctgtgttggaaacttaatcctcaatgcaacggtgttgagagccgggacatttatgaggtgatcaggtcatgagggctctatgtattaatgctgttatcgcagcatttgaaccagatttgaaccaaaactttattatttgcatgatattaagaattagaaaaaaagaattacaaatatgagtggtaatggagtagatatcaggatgttaaatttttatattgcttcattgtttacatgaagtaacttagtatcctaacttagyggtaatttaatgtcctatatgatttgtatctagcttaaatactctcaagaaagctaagaaaaccatgcagttcctgggggactgcttcacagttgctgtgtaatgggctctgtggtaaattaccatacagttaatgcaggtcaatatcaaagccaaaagcagcataatttagtgattgaaagcatgagctttggagtcaggcagatttgagttcaggccctgagctcttaccttgggcaagtcactt

SEQ ID NO: 556979 - DNA, 589 bp, Homo sapiens
ttttgttggtaatttttaaattgccatttcaatctccctgcctgttattggtctgttcagggtatctaattctttctgatttaagctaggatggttgtatttttccaggaatttatccatctcttctaggttttctagtttatgtggataaaggtgttcatagtagccttgaatggtattttgtatttcagtggtgtcagttgtaatatatcctgtttcgtttcttagtgaggttatttggattttctcttttcttttcttggttaaccttgctaatggtstatcaattttatttatcttttcaaagaaccagctttttgtttcatttatcttttgtattttttgtttcaatttcatttagttctgctctgatcttggtaatttcctttcttctgctggatttgggtttgctttgttcctgtgtttctctagttccttaaggtgtgaccttagaataccagtttgtactctttatctttttgatgtaggtgcttagggctatgaactttcctcttaacattgcctttgctgtatccagaggttttgaaaggttgtgtcattattgtattcagttcaaagaacttttaaa

SEQ ID NO: 556980 - DNA, 589 bp, Homo sapiens
ttttgttggtaatttttaaattgccatttcaatctccctgcctgttattggtctgttcagggtatctaattctttctgatttaagctaggatggttgtatttttccaggaatttatccatctcttctaggttttctagtttatgtggataaaggtgttcatagtagccttgaatggtattttgtatttcagtggtgtcagttgtaatatatcctgtttcgtttcttagtgaggttatttggattttctcttttcttttcttggttaaccttgctaatggtctatcaattttatttatcttttcaaagaaccagctttttgtttcatttatcttttgtattttttgtttcaatttcatttarttctgctctgatcttggtaatttcctttcttctgctggatttgggtttgctttgttcctgtgtttctctagttccttaaggtgtgaccttagaataccagtttgtactctttatctttttgatgtaggtgcttagggctatgaactttcctcttaacattgcctttgctgtatccagaggttttgaaaggttgtgtcattattgtattcagttcaaagaacttttaaa

SEQ ID NO: 556981 - DNA, 589 bp, Homo sapiens
ttttgttggtaatttttaaattgccatttcaatctccctgcctgttattggtctgttcagggtatctaattctttctgatttaagctaggatggttgtatttttccaggaatttatccatctcttctaggttttctagtttatgtggataaaggtgttcatagtagccttgaatggtattttgtatttcagtggtgtcagttgtaatatatcctgtttcgtttcttagtgaggttatttggattttctcttttcttttcttggttaaccttgctaatggtctatcaattttatttatcttttcaaagaaccagctttttgtttcatttatcttttgtattttttgtttcaatttcatttagttctgctctgatcttggtaatttcctttcttctgctggatttgggtttgctttgttcctgtgtttctctagttccttaaggtgtgaccttagaataccagtttgtactctttatctttttgatgtaggtgcttagggctatgaactttcctcttawcattgcctttgctgtatccagaggttttgaaaggttgtgtcattattgtattcagttcaaagaacttttaaa

SEQ ID NO: 556982 - DNA, 591 bp, Homo sapiens
ggataaatttctggacatatacaccctaccaagactaagccaggaagaaattgattccctgaacagaccaataatgagctccaaaactgaatcagtaataaatagcctaccaactaaaaaaagcccaggactggatggattcacagctgaattctaccagatgtacaaagaagagctggtaacattcctaaagacactattccaaaaaattgagaagggacttctccccaactcattttatgaggccagcatcaacttgataccaaaacctggcagagacacgataaaaaaagaaaactttgccgggtgcagtggctcatgcctgtaatcccagcactttgggaggctgaggtgggcagatcacgaggtcaggagattgagaccatcctggctaacacagtgaaaygctgtctctactaaaaatacaaaaagttagccagatgtgatggcaggcacctgtagtcccagctactggggaggctgaggcaagagaatggtgtgaacctgggaggcagagcttgcagtgagccaagatcacgccactgcactccagcctgggtgacagagcaagactccatctcaaaaaaaagc

SEQ ID NO: 556983 - DNA, 549 bp, Homo sapiens
ctttgggaggccaaggtgggaggaccacctgaggtcaggagtttgagatgagcctggccaatgtggtgaaaccccatctctaataaaaatacaaaaattagctgggtgtggtggtgtgcgcctgtagtcccagctactcaagaggctgaggcaggagaattgcttgaacctgggagggggagactgcagtgagccaagatcatgccactacactccagcctgggaaacagagtaaaaaaaaaaaaaaaaaaaaaaaatcarggactgatatactgatacagtttgaatatttgtcccctccaaatctcatgttgaaatctgatctccagtcctggtgtggtggctcatggctgcaatcctagcactttggaaggctgaggtgggtggattgcttaagcccaggagtttgagaccagcctggtcaacatagcaagaccttgtctctattaaaaaaataaaagtaaagaaataaagaaatatgacctccaatattggacgtggggcctagtagcaggtatttgggtcatgggggcagatccctcatgaatg

SEQ ID NO: 556984 - DNA, 578 bp, Homo sapiens
tttaccataaactatgaacagaattctgagttatgaattgttaagtgctattgactgttgaggaaattaattgctgtttgatctttatatcatcatatgacaatcaagctatgacataaagatctgatagaagctgattttgcagccgggcatggtggctcacgcctgtaatcccagcactttgggaggctgaggtgggaagatcacttgaggtcaggagcttttagaccagcctggccaacatggtaaaacctcgtctctgttaaaatatatatatacaaaaattagccgcgcatggtggcrcatgcctgtggtctcagctactccagaggctgaggtaggggaatcacttgaaccctggaggcggaggttgcagtgagccaagatcatgcccctgcactctagcctgagtgacagagcgcgatcccgtctcaaaaaaaaaaaaaaaaaaaaaaggaaggtgattttgcttaatccagactaatttgttgcatatttcattgcccttattacctgtccacacatgcagttttcaattaccccagacaggggtggctaatttgggtcaggagagccac

SEQ ID NO: 556985 - DNA, 578 bp, Homo sapiens
tttaccataaactatgaacagaattctgagttatgaattgttaagtgctattgactgttgaggaaattaattgctgtttgatctttatatcatcatatgacaatcaagctatgacataaagatctgatagaagctgattttgcagccgggcatggtggctcacgcctgtaatcccagcactttgggaggctgaggtgggaagatcacttgaggtcaggagcttttagaccagcctggccaacatggtaaaacctcgtctctgttaaaatatatatatacaaaaattagccgcgcatggtggcgcatgcctgtggtctcagctactccagaggctgaggtakgggaatcacttgaaccctggaggcggaggttgcagtgagccaagatcatgcccctgcactctagcctgagtgacagagcgcgatcccgtctcaaaaaaaaaaaaaaaaaaaaaaggaaggtgattttgcttaatccagactaatttgttgcatatttcattgcccttattacctgtccacacatgcagttttcaattaccccagacaggggtggctaatttgggtcaggagagccac

SEQ ID NO: 556986 - DNA, 578 bp, Homo sapiens
tttaccataaactatgaacagaattctgagttatgaattgttaagtgctattgactgttgaggaaattaattgctgtttgatctttatatcatcatatgacaatcaagctatgacataaagatctgatagaagctgattttgcagccgggcatggtggctcacgcctgtaatcccagcactttgggaggctgaggtgggaagatcacttgaggtcaggagcttttagaccagcctggccaacatggtaaaacctcgtctctgttaaaatatatatatacaaaaattagccgcgcatggtggcgcatgcctgtggtctcagctactccagaggctgaggtaggggaatcacttgaaccctggaggcggaggttgcagtgagccaagatcatgcccctgcactctagcctgagtgacagagcgmgatcccgtctcaaaaaaaaaaaaaaaaaaaaaaggaaggtgattttgcttaatccagactaatttgttgcatatttcattgcccttattacctgtccacacatgcagttttcaattaccccagacaggggtggctaatttgggtcaggagagccac

SEQ ID NO: 556987 - DNA, 627 bp, Homo sapiens
gtcttggggttgatcttctcatggaatagcttactagggtctctggattttctgaatttgaatgttgrtctgtcttgttaggttgagaaagttctcctggatgatatcctgaagtatgttttccaactccattatggtgcccctgtctgtctcaggtacccagattatttgtaggtttggtctttttacataatcccatagttcttggaggttttgttcattccttttcattcttttttctctaatcttgtctgcctttcttatttcagcaagatagtcttcaagctctgaaattctttcttccacttggtcttttcagctatcagtacttgtggttgcattgtgacattcttgtgttgtgtttttcagctccatcaggtcatttatattcctttctaaactggttattctggttaacagcttctctaatagtttatcatgattcttagcttctttgcagtgtgtgggaacatgctcctttagctcagtgaagttcattattacctaccttctgaagcctaattctgtcagttcagccatctcagcctcagcccatttctgtgcccttcctggagaggtgttgcaatcgtttggaaaacgggcactcttctccaaattctggccatg

SEQ ID NO: 556988 - DNA, 627 bp, Homo sapiens
gtcttggggttgatcttctcatggaatagcttactagggtctctggattttctgaatttgaatgttgatctgtcttgttaggttgagaaagttctcctggatgatatcctgaagtatgttttccaactccattmtggtgcccctgtctgtctcaggtacccagattatttgtaggtttggtctttttacataatcccatagttcttggaggttttgttcattccttttcattcttttttctctaatcttgtctgcctttcttatttcagcaagatagtcttcaagctctgaaattctttcttccacttggtcttttcagctatcagtacttgtggttgcattgtgacattcttgtgttgtgtttttcagctccatcaggtcatttatattcctttctaaactggttattctggttaacagcttctctaatagtttatcatgattcttagcttctttgcagtgtgtgggaacatgctcctttagctcagtgaagttcattattacctaccttctgaagcctaattctgtcagttcagccatctcagcctcagcccatttctgtgcccttcctggagaggtgttgcaatcgtttggaaaacgggcactcttctccaaattctggccatg

SEQ ID NO: 556989 - DNA, 404 bp, Homo sapiens
  misc_feature 226, 246: n = A,T,C or G
tctgtgctttttgaatttttagcatattttgttgattctttctcatcttccttagtttatttagttttgatctttgaggctgctaacctttgyatggggtttttgtggggacttttttgttgatgctgttgttgttgctgtttgtttgtttttcttgtaatggtcaggccccgcttcggtagggatgctgcaggttgctggaggtccactccagaccctattagcntgggtccctcctgcacctgnaggtgtcaccagtggagtttgcagaacagcaaagatggctgcctgctccttcctgtgggcactccatcccagaggggcaccaacctgatgccagtgggaatgtttctatataaggtgtctggcaacccctgtggggggtctcaccaattcaggaggca

SEQ ID NO: 556990 - DNA, 410 bp, Homo sapiens
gctgggcatggttgtgggcacctgcaatcccagctacttgggaggctgaggcaggagaatcccttgaacacaagaggcrgaggctgcagttagtcgtgatcccaccactgcactccaacctgtgcaacagagcaaaaccccatctcaaaaaaataaaaataaaataaaggaagacaaagaaacaccaaagatatttttgcacagagaagagtccaagtgaggactcagggagaaggtgcccatctgcaaccgaagcagtctcccaggaagcctcagaagaactaacccctgtgacaccttgggtcttggacttcctgccctccagaactgtgaaaaaatacatgtctgctgtttaagccacccaccctgtggcattttgttatggtagcctgagcaaactagttcagccc

SEQ ID NO: 556991 - DNA, 555 bp, Homo sapiens
tggtgcttgaaaacaaatggatggcagtaaagtaatcctgaagaacacaggaggaaagaaataaaagaggcaataccaaatgttagcaaaatggcagcaaggcaaataagaggctcagcaatagcaaaaaactgasttctttggctgggaaaaacttataaatattaaaaatcctgacaatgttgaaaaagaaaggcagagatagggttccaggagaaatactaagaatgaaattggagctgtcactgcagttatcgtaaggatattttaaaatcataagagagcatgatgaacaatttaataccaataaatttgaaaacaggtaagatggatgatttttagaaaaatgttcccaaaattgattcaagaaatagaaaatctaaacaagctcaagcgttaaaaaaattaaataggtaaaatatgtacatcaactgggcacagtggctcacgcctgtaatcccaacactttgggaggctgaagtggacagatcacttgaggtcaggaactagagaccagcctgaccaacacggtgaaaccctgtctttactaaaaat

SEQ ID NO: 556992 - DNA, 625 bp, Homo sapiens
cagttttcccagcagcatttattgaatagggagtcctttccccgttgtttgtttttgccaattttgtcaaagatcagataattgtaggtgtgcagccttatttctgggctctctattctgttccattggtctatgtgtctgtttttgtaycagtaccatgttgttttggttactatagccctgtagtatagtttgaagtcacgtagtgtgacttcaacaccccactgacagtattagacagatcatcaaggcagaaaattaacaaagatattcaggacacactggaccagatggataagttagaaatctacagaactctacacccaaaaacaacagaatatatattcttcttatctgcacatggcacatactctaaaatcaaccaggtaatcagacataaaacaatcctcagcaaatgcaaaagaacagaaatcacaagaaccactctcttgaactacagtgcaataaaaatagaatgtaagactaagaaaatcaccccaaatcatacaatcacatgcaaattaaacaatttgctcctgaatgacttttgaataaataatgaaattaaggaagaaatcaagaaattctttgaaattaatgagaacaaagataaaacataccagaa

SEQ ID NO: 556993 - DNA, 614 bp, Homo sapiens
tccagttccattcatgtttttgcaaatgactgaatctcattcttcttatggctgagtagtrctccattgtatatatgtaccacatctttctttatccattcatctgttggtgggcacttacattaagttatttttgagtgacattttcgtataagctgagagaatttggttgagattctttttcttttaatttctctttttgtttttctctttctttttttctcttattttgatgaatgggcaattgcttcagcaccatttgctaaaaaggatatccttcctgcattaaattgcttttgaacctttgtcaaactcaaaacttgcaccttgtcaaaatggtgaacttttagttcctttgtcaaaactcatttggggccgggcgcggtggctcatgcctgtaatcccagcactttgggaggccgaagcaggcggatcatgaggtcaggagatcgagaccatcctggctaacacggtgaaaccccatctctactaaaaataaaaaaaataaaaaaaaattagccaggcgtggtcgtgggcccccatagtcccggctaatgaggaggctgaggcaggagaatggcatgaactcaggaggcagagcttgcagtgaaccg

SEQ ID NO: 556994 - DNA, 623 bp, Homo sapiens
tgaatcatgggggttgtttcacccatactgttctcatggtagtgaataagtctcacgagatctgatggttttataaggggaaacccctttgacttggttctcattctttcttgccacygccatgtaaaaattgtctttcaccttccaccatgattgtgaggcctccccagccatgaggaactgtgagtccactaaacctcttttctttataaattacatagtctcagatatgtctttatcaggagcatgaaaacagactaatacatggtttatttaagattatactttgttcacatgctgcaaatggatgtcccaattctgggtagatagtataggtgaatgtgataacatcttgtatttcaatgtgtactcttttttccttttggtcaaggccattggtgattggttgttttgttgtaagaaggcttcaaaagtcattcattttaagtatgtttctcacccatatctgttctctactctcatccctcacccttccacattttgatggccttactgtcatcaaagtggcattggatttatactgtgttgttaaaggatgaagaatcttagatttctaagctgtggggaaattaataaaatatcaaaaattgaaaccaaggatg

SEQ ID NO: 556995 - DNA, 623 bp, Homo sapiens
tgaatcatgggggttgtttcacccatactgttctcatggtagtgaataagtctcacgagatctgatggttttataaggggaaacccctttgacttggttctcattctttcttgccactgccatgtaaaaattgtctttcaccttccaccatgattgtgaggcctccccagccatgaggaactgtgagtccactaaacctcttttctttataaattacatagtctcagataygtctttatcaggagcatgaaaacagactaatacatggtttatttaagattatactttgttcacatgctgcaaatggatgtcccaattctgggtagatagtataggtgaatgtgataacatcttgtatttcaatgtgtactcttttttccttttggtcaaggccattggtgattggttgttttgttgtaagaaggcttcaaaagtcattcattttaagtatgtttctcacccatatctgttctctactctcatccctcacccttccacattttgatggccttactgtcatcaaagtggcattggatttatactgtgttgttaaaggatgaagaatcttagatttctaagctgtggggaaattaataaaatatcaaaaattgaaaccaaggatg

SEQ ID NO: 556996 - DNA, 599 bp, Homo sapiens
tactaaaattcaaaaaaaaattagctgggcatggtggcacatgcctgtagtcccagctactcagggggctgaggtgggaggatcacttgagcctgggaagttgaggctgctgtgagccctgatggtgccaccacactccaacctgggtgacagagctagaccctgtctccgaaaaacaaaatgctaggagaaggacaggaattggaaggttttagagaggttgaagaccagagtgccacaaaaactttctcttatgtcatcaggacttatagaaactggaaatactttgggcgtattcagtgttaattaatggtgtccacacaccccctaaaatcatcttggttatcaccagyagttcatttcccactgcttggaaaatgtggtctagagaaagtccaaacgttcaccacacagagagactataagtttgtctgcccatggaggttcccttcaggtggctgttattcagatgtgacttaagagaccctaagtttgaccctcttaactgtatagcttggactaaaattcaaaatgtaagctgttttattcaaatgcagtggggtcactaattgatttacacactctcagctgtgcaaaaa

SEQ ID NO: 556997 - DNA, 599 bp, Homo sapiens
tactaaaattcaaaaaaaaattagctgggcatggtggcacatgcctgtagtcccagctactcagggggctgaggtgggaggatcacttgagcctgggaagttgaggctgctgtgagccctgatggtgccaccacactccaacctgggtgacagagctagaccctgtctccgaaaaacaaaatgctaggagaaggacaggaattggaaggttttagagaggttgaagaccagagtgccacaaaaactttctcttatgtcatcaggacttatagaaactggaaatactttgggcgtattcagtgttaattaatggtgtccacacaccccctaaaatcatcttggttatcaccagcagttcatttcccactgcttggaaaatgtggtctagagaaagkccaaacgttcaccacacagagagactataagtttgtctgcccatggaggttcccttcaggtggctgttattcagatgtgacttaagagaccctaagtttgaccctcttaactgtatagcttggactaaaattcaaaatgtaagctgttttattcaaatgcagtggggtcactaattgatttacacactctcagctgtgcaaaaa

SEQ ID NO: 556998 - DNA, 623 bp, Homo sapiens
ctggtgttccactatagaacaattttgtgtcttaatagaaatatcatcctgtatttcctggccacctagaatctcatctagaatctgctgttgttggaacatgctacttcatctggggaagataccatgtctgaacaacagttgtcgcataaaaatttttttttaattttaccaatagttgttttattattattaatattattatattaacttttattttaagttcaggagcacatgtgcaggtttgttatgtaggtaaactcatgtcacaggggtttgttgtacagattatttcatcacccagctattaaacctataatcattaattatttttcctgatcctctccctcctcccaccctccatcctctgataggccccagccagtgtctgttgtcctcctctacatgtccatgtgttctcatcatttagctcccacttataagtgaaacyatgcagcatttggttttctgttcctatgttattttgctaaggaaaaaggcctccagctccatccatgttcctgcaaagaacatgatcttgtttcttttttatggatgcatagtattccaggctatatgtgcaccatattttctttatccagtctatcactgatgggcattta

SEQ ID NO: 556999 - DNA, 566 bp, Homo sapiens
gattacagccatgcaccaccaggccggctaatttttgtgcttttagtagagacagggtcttaccatgttggccaggctggtctcgaacccctgacctcaggtgatccgcccaccccagcctcccaaaaagctgggattacaggtgtgagccacagcctatatttaaaaaatatactaatgatagcttttactcaaatatttaaattcttcttyaggaaaaggtataatgaaaatcaatgaaacacacctgattcatacaacttttcttccattgatagcccaacttctcacaagtctctttcaggcattgataagatttgtctgcatccaatttggtaaagaatcgtgtcattcttttgaccaaccgctgccaggggttctacatgtcaaacagaagacaaatgaataaatccattaggactaaagacagtaatatcatagctatttagtctgacttaaaattattttgcatgaaggcctccctcctctctttcttccttgaccaaaaaagaatacatgtgatttaaaagttatatatctaagatttacacattaaaaaaggactt

SEQ ID NO: 557000 - DNA, 535 bp, Homo sapiens
tatttaatcacctgagtgcaggcagactgagtccaaaaaaggagtcagcaaaggaagacatgggtgaggcagttttatagtatttggataggtagtggaaaattacagtcaaagggggttgttctctggcggacaagggcaggggwcacaaggtgcttggtgggggagcttctgagactcattgactgggagaaggaatttcacaaggtaatgtcatcagttaaggcaggaactggccattttcacttcttttgtggttcttcagttgcctcaggccatccagatgtatacctgcaggcttggactcagagaactcacactgacatgattttactaaattacattccaacctctttcttccaattaatcccaatgagtcaagttttattgtgtttacatttcaagtgcaaggttaaagtaagtaagtcaaaaatctcaaatccaaatgtttcagagagccatagaaaaaggctttggcagattaattggaggaaaagagggctttcaaaggaggctgaaaacaattttctattga

SEQ ID NO: 557001 - DNA, 535 bp, Homo sapiens
tatttaatcacctgagtgcaggcagactgagtccaaaaaaggagtcagcaaaggaagacatgggtgaggcagttttatagtatttggataggtagtggaaaattacagtcaaagggggttgttctctggcggacaagggcaggggtcacaaggtgcttggtgggggagcttctgagactcattgactgggagaaggaatttcacaaggtaatgtcatcagttaaggcaggamctggccattttcacttcttttgtggttcttcagttgcctcaggccatccagatgtatacctgcaggcttggactcagagaactcacactgacatgattttactaaattacattccaacctctttcttccaattaatcccaatgagtcaagttttattgtgtttacatttcaagtgcaaggttaaagtaagtaagtcaaaaatctcaaatccaaatgtttcagagagccatagaaaaaggctttggcagattaattggaggaaaagagggctttcaaaggaggctgaaaacaattttctattga

SEQ ID NO: 557002 - DNA, 480 bp, Homo sapiens
gtgggaccaccagggaaaagagagccactgcaagctgatgaattgttcatagtcttatctgcttggaggggttcactgaagcattgtttatgctgctatttcctgcatatctaggctgactaatcagatgatgttaggctggggataaagggtagcaaggaatgtaaacgttgtcaagcccaggtgttgaaagcaagaatcaaaaataaatcaaatatcttgctggtgctccccggccttatgaccttgtaattcttggcttaaagtctggatccttaatgcaaatgagctaatggtctcccctggagcaaaatagcttctggtcttggtgagaaatgaataaatagctgtagtgtcctgaggcatcaggaaaggatcaacacttgggccaaattcartggttgaagcttcctggggtgagaggaaaatgaatctaggtcagcaggatttggggggcaactcagtgtttgtttattattg

SEQ ID NO: 557003 - DNA, 549 bp, Homo sapiens
tttgagggcaggaagcatccagcacgggagaaagggagggaggagaaagaaaggtggtgtcggggcaggaaagaagggaagggaaggagtctgggctttaattaaaaagaaatgaattgaagtttcagacctattgttaactaaccgtggggacttgagaaagttaaaktctttgagccacattctttttcatttataaagtggagatacttatatttaatccacaggtattttatgcagattaaatatttagagtatgtaaacaaacgttgtaaactgtcctgtagggctaagcattttaacaaaaacattgatccaatatgaaagcgtgattggtgacagtcacttggcacttcaggttaatttccaggagaaatttcagtgtggtttgggcttgaaaaacctctgccccaagatgtgacatacaagtgaaatatacactatacccctctatgataatttcaggtattgattttacacaggcagaactgaattgcagacatcttaatgaggatcatggtgcagaaggggcactagatggcagcaaag

SEQ ID NO: 557004 - DNA, 576 bp, Homo sapiens
tgagggggtcgaagatcattccttacaatgcttggacccatctgcacaccagttgtttatttgaaacgtttgccagattaacaaatacctacttgagcctcttctgggccaggaattgtctttggttaaatgccctccctgagaaaccaagcttaagggctcctgacccaggttgggttaggggtgggagacacctagaccaactgtgtggggagcgtggagcctgagagaaggatccaggaggccatatgggagaaacgaagctcagtaaagtcatgaatatgaggacactaggcagacagggaccagagggaaattaaggaaatcattgcaagtcagaagtttcaaagtcagggttggaaacagyacctggagaaattccctgatgacccgaaagagagaatctaaagctgcctgtttattcctgggcagaaagggagccagtgtggaccagtgcagcctggctgctctctacctctcctatcgctgggaagacccgttcagcagaccagcctggagctgtggcttaggcaatcctcagatgtgagtcctgcctcagacccttccacaaatgat

SEQ ID NO: 557005 - DNA, 491 bp, Homo sapiens
tataatatgatatataattaacatttgtataatttaatttttagtagagtctgtttttaacgaccagaacaaaagattcccaaatgctaaagcacactacttactttaactatgctttgattaaatcacccccctctgagaattacaggtatacctgcactcctgcccggtgatgtatacacacaattgcagcattgcttgtgatagaaggagatgaaaacaatccaaacttctatttgtgaaggattggttatataaactctggtatagcctcaaagtggaatactctgaaaaagttaaaattttttttttaaaattgagaaaactgtgtctcagtatagaaatacctccagaatgtacaactacattaaaaaaaaacatggtggggaacaattaatatttttatgtaaaaaagtagagtatgtaatttgatttcatttgcrtaaagaaacacaaaaacacatgtaaaagaaactgagaaagtagtttgc

SEQ ID NO: 557006 - DNA, 361 bp, Homo sapiens
aagctcatagaatgaaagaagacaccgcagagggtcatcgtatcacagtgtggtcatcaaagcagagttccaaaatgtcaacaagctatgggaaaatatttygtactttgccagtaaaagtcatcataaaagacaaacctaatcagtatttggtggtgcactcctcagtttgtcccagagaatgataaatactcttaattttcacttcaattgaagtatgctgcagctggcataggtcacagtgttgtgtggggttgcaaggcggatggcagaatccccttctttgtaagtaagctaaagacacattattttgtgtcttttcctcttattgtccctgcatcataatcacttctctatgcca

SEQ ID NO: 557007 - DNA, 361 bp, Homo sapiens
aagctcatagaatgaaagaagacaccgcagagggtcatcgtatcacagtgtggtcatcaaagcagagttccaaaatgtcaacaagctatgggaaaatattttgtactttgccagtaaaagtcatcataaaagacaaacctaatcagtatttggtggtgcactcctcagtttgtcccagagaatgataaatactcttaattttcacttcaattgaagtatgctgcagctggcataggtcacagtgttgtgtggggttgcaaggcggatggcagaatccccttctttgtaagtaagctaaagacacattattttgtgtcttttcctctyattgtccctgcatcataatcacttctctatgcca

SEQ ID NO: 557008 - DNA, 584 bp, Homo sapiens
gacttcaaaagcacaagcaacaacagcaaaaatagacaaacagaattaaattaagttaaaaatcttctgcatagcaaaagaaacaatccacaaaattaagaaggtgaggtgcagtggctcacacctgtaatcccaacactttaggaggctgaggcaggtggattgctggagcctaggagttcgagaccagcctgagcaacatggcaaaacctcgtctctccaaaaaatagccaggcatggtggtgcaagcctgtagtctcagctactcaggaggctgtggtgggaggatcagttgagtctggggaggttgaggctgcagtgacctgtgactgcaccactgcaccccagcccgggcaacagagtgagaccttgactcaaacaaacaaacaaacaagctaacaaagtgaagagacaatttaagaatgggagaaaaaagttaccaaccattaatccaaccaggrattaagaaccagagtataaaaggaactcaaaactcaatagcaaaataattatcataataatcaaattttaaaacgggtgaaagacttgaatagacatttctcaaaagaagatgtacaaatggc

SEQ ID NO: 557009 - DNA, 634 bp, Homo sapiens
attatgccagctggtaaacctctggtgctgaatgtgtggaaagaagctggaagtcttgtggtcaacacagcagaatgtggacttttgacttgggtgtttaaatgcaagctatccctgagggtttatcccattatggttcttcaaatgctgtttactcatcaccaagttgtggattaaaactaacagtatgaaacataacttctttgtgtagtctaggcagtagaattttcaagtaaattagatattatatgcatatattagtaaagttcttactctacagaagtaataattcacgttgcaagaattgacactgaacttcacttataatggttgattgggttctggaagatctttatggtattctggtgtaaataatgggtgatatagaaccattcaagtcagatgaatcatttggagctggctaaaaaaaaaaatctcaaaattttgatattaccagaasagtaacagagctgtacatattagatacatgtaggcacttttctgaccacattagtgcagtgaactatcagggaagttagatcagaagactggagcttaagtgccagcccttttcacttaacatctgtgatctcaaggatgctacttaacccctgtggatctcaatcccttatat

SEQ ID NO: 557010 - DNA, 585 bp, Homo sapiens
aggtttgtaaaatgcatgaatcagtgctctgtaaaaacacactaattggcgctctgtggctagctagaggtttgtaaaatagaccaatcagcactctgtaaaatggaccaatcagcactctgtaaagtggaccaatcagcaggatgtgggtgtggacaaataagggaataaaagctggcccagccagcagtggcaacccgctcaggtccccttccatgctttggaagtttgttstttcgctcttcacaataaatcttgctgctgctcactctttgggtctgcaccacctttaagagctgtaacactcactgcaaaggtctgcagcttcattcctgaagtcaatgagaccacaaatccaccagaaggaacaaactctgggcacagttgtttgttttaggggagatccaccaaattcataacatgtttgaattgaaattttaaagattacaaaaacattttaattataaacattaagaaatttgtaggtaatttatgtatttcttaagtatataaaaactttatataaataaagttttggaagaaaaaactgttatacatcataaggtccaattaataaaacagaga

SEQ ID NO: 557011 - DNA, 585 bp, Homo sapiens
aggtttgtaaaatgcatgaatcagtgctctgtaaaaacacactaattggcgctctgtggctagctagaggtttgtaaaatagaccaatcagcactctgtaaaatggaccaatcagcactctgtaaagtggaccaatcagcaggatgtgggtgtggacaaataagggaataaaagctggcccagccagcagtggcaacccgctcaggtccccttccatgctttggaagtttgttctttcgctcttcacaataaatcttgctgctgctcactctttgggtctgcaccacctttaagagctgtaacactcactgcaaaggtctgcagcttcattcctgaagtcaatgagaccacaaatccaccagaaggaacaaactctgggcacagttgtttgttttaggggagatccaccaaattcrtaacatgtttgaattgaaattttaaagattacaaaaacattttaattataaacattaagaaatttgtaggtaatttatgtatttcttaagtatataaaaactttatataaataaagttttggaagaaaaaactgttatacatcataaggtccaattaataaaacagaga

SEQ ID NO: 557012 - DNA, 405 bp, Homo sapiens
ctcttctcttttattgtgaagtctcatacttaaaaaaatccaaccatttaacagatggattactgaaaatccattctctgaaggagctgacatttcatcaatctgatgaaaatttgagctcctatatatagttccttaactgggataataacagacattttaagaagaaagcttagctgggaagcttgatagttaggaaacttaactgtgaaagaaactatttttgyacaattaactttctttgtatgaaaaaaatctgcctcctaacatgatttagaaacttctaactaatatataactattatttggaaaagtttttaaaaagtccctttgggatgtgcaacacatcttctcatagaaaatgtacaaatttttcatgtctttttcagttttattatattttta

SEQ ID NO: 557013 - DNA, 617 bp, Homo sapiens
ctttttcagttttattatatttttaattgacatataacacttgtacatatctatggggtacagtgtgatattttgacatatgtatacattatgtaatgatcaaattagggtaattagcatattcatcacctcaaatattatcatttcttagtggtgagggcatccaaaattttctcttctagttattttgaaatatacactttgttgttaactatagtcaccctactctgcaacggaacactagaacycatttctcctcctattttactgtaactttgtaatcattgaccaacatctctccaaccccctcttcttctccttttcccagcctctggtaaccactattttactctctacttctatgacataatgtttttttagattccacatatgagtgaaatcatgggggtgtttatctttcagagcatgagttattttacctaacatactgtcctctgggcttatatatgtggtcaaaaatgactggattttattctcttatagagcaaaatagtattccattgtgtaaatatattaggttttcttcattcattcctccattgatggacgcttttgttgatttcatatcttggctattgtgaatagtgctgcaataa

SEQ ID NO: 557014 - DNA, 645 bp, Homo sapiens
aaccaaacctgcttacaacttgatcttagacctgaagccttcagaactgtgaaacaacaaagttctcyggtttaggctatccagtctgtaatggtttgttagacagccctagcaaactaatacagactccaaatcataaatgggcaagaagcagataaactttaaaaataattatatcactaataaatgttttaaaattaaaatttactggtaattagaaaatgcatatttaagtaatacaattttatttttcacaaaataaattggcatttaaaatgttaatactgaatgctcttgggtgtgtatgaggaaacagcatttttcaacgtgaattaagagacttaaaaatgctcatacatttgactattttccatttctttgaatatccgtttaagaaaataggcaagcaaaagttgatgtacatgacaacacttataatagcaaataaaatgcaaatttccaaaaataagaaaagagttaaagaaattgaagtattttttataagagagactagtttacagataatggaaatgatattaaagaaaactattttcactactactggaaaaggtctaattttttatttactttttaacttttattttagattgagggggtaactgcaggtttgttacctgggtatat

SEQ ID NO: 557015 - DNA, 650 bp, Homo sapiens
tatatatgcactcaacattagagcacttaaatatataaagcaaatattgacaaaaatgaagggagaaatagcaatataataatagtagagaaccttaatactttcaacaatgtatagatattccagaaagagtataaacagcagacttgaacaacactatacaaaaaagtgaacttaacagatatatatagaatattccatccaacagcagcagaatacactttttttctcaagcacacttgggacattcatcagagtagaacacaaattgggccacaaaacaagtattagctaacttaagaggacttaaatcataccaagtatttttctgacygtaataatgtgaaactagaaaataacaagaagaatgttagaacattaaaatatgtggaaattaaacaatacactactgaaatagataaagaagaaatcgaaagaaaatcaaaaagcatcttgaaacaaaaacagaaacacaacataccaaaacttatgggatgaccaaaagcagtactaagagggaagtttaacagtaaatgcttagattgagaaaagaaaacaggccaggtacagcggctcacgtctgtaatcccagcactttgggaggccaaggcaggtggattgcttaaggccgagagttcaagaccagcctg

SEQ ID NO: 557016 - DNA, 650 bp, Homo sapiens
tatatatgcactcaacattagagcacttaaatatataaagcaaatattgacaaaaatgaagggagaaatagcaatataataatagtagagaaccttaatactttcaacaatgtatagatattccagaaagagtataaacagcagacttgaacaacactatacaaaaaagtgaacttaacagatatatatagaatattccatccaacagcagcagaatacactttttttctcaagcacacttgggacattcatcagagtagaacacaaattgggccacaaaacaagtattagctaacttaagaggacttaaatcataccaagtatttttctgaccgtaataatgtgaaactagaaaataacaagaagaatgttagaacattaaaatatgtggaaattaaacaatacactactgaaatagataaagaagaaatcgaargaaaatcaaaaagcatcttgaaacaaaaacagaaacacaacataccaaaacttatgggatgaccaaaagcagtactaagagggaagtttaacagtaaatgcttagattgagaaaagaaaacaggccaggtacagcggctcacgtctgtaatcccagcactttgggaggccaaggcaggtggattgcttaaggccgagagttcaagaccagcctg

SEQ ID NO: 557017 - DNA, 570 bp, Homo sapiens
ttccaggctcctattaatgttgatatttttacctcctctcatgagttacaaatactcttaatggcatctagaatggtgaatccttttcaggttttcaactgacttttcccaaatccatcagacgaagtactatctatggcagctatagccttacaaaatgtatttattaaataataaaacttgaaagttgaaattacttctttttttgaaattacttcttgattcatgggttgcagagtggatgttgtgttagcaggagtgaaaacattaatctccttgaacatctccagcaaaggtcttggataactaggtgcactgtcgatgaggagtaatattttgaaaggaatttttgttttytgagcagcaggtctcaacagtagtcttaaaatattcagtaaaccatgctataaccagatacactgccattcaggctttgttgtttcatttatagaacacaggcagagtagatttagcataagaaggccctgagattttaagaatggtaaatgagcactggcttcaacttagttaccagctgcattatcccctaataagagggtcagcctgttt

SEQ ID NO: 557018 - DNA, 455 bp, Homo sapiens
attctcctgggtggggaaaaagaacackgaaattcttctgggtcggggaaaagaacactgaaatttgcattattacagtcaatatgagtgactagaacctacgggctgatgaattccaaggaaattgactgcacacatttccataaagtccagattagtttgatctcctaggatatgcttcatttaccaaaaggaacacggggttttctttttctttttttttttttttttggttttggttttgttttctgatttactcctcccactcctaaatttccttgccttattcacagaccctgacctcttttgctagatgccaagggaaggatttagttagtatgtccttggatgattgtgacagtagaaaatatctttttctttgttaaatctttgctactgagacaaaatagcaacttattcttgagagatagaggacctctttcagtatacttagg

SEQ ID NO: 557019 - DNA, 502 bp, Homo sapiens
gcccatatgctagcacgaagtgaaaacgtcaacaatgataattttttactcatttggttctgaagacacttcagagaacaaaattgattaaaatccctccttattgaacctgtattccagtggaacagaaagttaagacaataaaccaagtaaatcattacagtacattgaatttaaaataagggctacagccaggtatgatggtgcatgcctgtaatcctagctactcaggaggctgaagcaggagaattacttgaacccgggagggtggaggttgcagtgagctgagattgcttcrctgcactccagtctgggcgagagagtgagactccatctaaaaaaaaaaaaggtgggggggaggggcgacagatgaaaataaacaagagatggtgtatggcctgaattatatacccccaaaattcatatgttgaaggcctaacccctagtacctcataaggtaactatatttgtagaaatggtttttaaggaggcaattaagtta

SEQ ID NO: 557020 - DNA, 522 bp, Homo sapiens
ttctaggggttccattttgttcttcttctattagttgtatttctcttsaaattccctgtcttcatttatcatatctacccttagtaagaatctttaataatttaaaatagccataaatatctttaaaattccttttctactgattccaacatctgtaggtctatttctattgatttatgacaaaggtgatgttgcagagcagtggggaaaggactttcttttccaaaaaaaacttaggtcagttggatagctacattaaaaaaaaaaaaaaaaaaaaaaaaaaactagtcctcacttcacaccatatgccaaaattaattttaggtagttagcacatctaagtgttccaagaaaaaacttaaggttccagatggtaacataagagaatgcccttgtcaccttggggtagacaatgatttctgacaggttagcgaaagcactaaccatgaacaaagagtgataaattagacctcaataaaaataaaagatttacctttatcaaaatctaaaaatgggaagtta

SEQ ID NO: 557021 - DNA, 508 bp, Homo sapiens
  misc_feature 483: n = A,T,C or G
acctgtagtcccagttacttgagagactgaggcaggagaattgcttgaacccaggaggcagaggttgcagtgagccgagatcacaccactgcactccagcctgggtgacagaacaagactctgtctcaaaaaaaaacaacaaaaaaagaaattagaagcagtaattgctcaataaatggcagcaactgttgctgctgcagctgagtccagggctgcaaatgtctatatrgggctcatcaggatacatcagggcctatcaggaatttcccacaggaggtcacaggagagtctgaagggatttcacacacagccctgctgctggcctgggacttactctgacctagtctagctccacagtcagcacaagccaacttccaggcatgccccacttcctgggggcccttgcttgtatccatcctctttaacccttgcccggactagaccccagcatggattaatttgtaggcttagtacaaagaccangaatagctgagatctagctgtgagc

SEQ ID NO: 557022 - DNA, 537 bp, Homo sapiens
cttggggttcatcttgtgaccaccttactctctgtttcccactctgccccatccccagatacagacacttcttttgtccattctgtggaccatgatgcaccacwgagggacctttgaaagctttggggaggcttcagagggtagagtggaggggaataagtggattcaaagttggagcctcccccacctttacatagaactgctgttttgtttgtttgtttgtttgttttgtttgtttgtttttaagtatctaggccaggggtggtagctcatgcctataatcccagcactttgggaggcctaagtggtagaatcacttgagcccagggtttcaagaccagtctgggcaatgtagtgaggccccatctctactaaaaattagaaaattagccaggtgttgtggcacacgcctgtagtcccaactactccagagactgaggtaggaggatcgcctgaacctgggaggttgaggctgcagtgagctgtgatcgtgccactgcactccagcctgggcaacagagcgagactgtctcccca

SEQ ID NO: 557023 - DNA, 362 bp, Homo sapiens
gggaagcttggtggccttgagctaacatgaaccggtaagtcctttcctttttaacagcactttccttggaagaatttctcgcaggccagccttacaggctcctcacatgtccastcgtgtgaggtgtaccggcagtagagttagtcccttgagaggccatatcagggcttactccacagcctctgggacgacagcccagtgtttcagcaaaggagctgcttacaatcttgtctatattaaggcccctggcctttcctttaaagaacagggatccatttaacaccaaaacattttggagccccctctctccatccctatcatcagagtcctgctttctgtgtccattcatttaaaatatccat

SEQ ID NO: 557024 - DNA, 362 bp, Homo sapiens
gggaagcttggtggccttgagctaacatgaaccggtaagtcctttcctttttaacagcactttccttggaagaatttctcgcaggccagccttacaggctcctcacatgtccactcstgtgaggtgtaccggcagtagagttagtcccttgagaggccatatcagggcttactccacagcctctgggacgacagcccagtgtttcagcaaaggagctgcttacaatcttgtctatattaaggcccctggcctttcctttaaagaacagggatccatttaacaccaaaacattttggagccccctctctccatccctatcatcagagtcctgctttctgtgtccattcatttaaaatatccat

SEQ ID NO: 557025 - DNA, 362 bp, Homo sapiens
gggaagcttggtggccttgagctaacatgaaccggtaagtcctttcctttttaacagcactttccttggaagaatttctcgcaggccagccttacaggctcctcacatgtccactcgtgtgaggtgtaccggcagtagagttagtcccttgagaggccatatcagggcttactccacagccyctgggacgacagcccagtgtttcagcaaaggagctgcttacaatcttgtctatattaaggcccctggcctttcctttaaagaacagggatccatttaacaccaaaacattttggagccccctctctccatccctatcatcagagtcctgctttctgtgtccattcatttaaaatatccat

SEQ ID NO: 557026 - DNA, 621 bp, Homo sapiens
atattggtggagatttgggggaagggagagtcaagacccccagacttccccacatgaattctaaaaatagagtctactttcttgccatgaagtacaaacattttgggaaaatgaggttaaaagtacaacttttcattctaggcaggcagaacggctttcatgtgtggccctgagctggctcttgtgctgctcccagtggtgagtgggtggaatcttgagctgcatgtccctcccaaaggcaaatactgcaatgaccaggccagggatggaactgaagccacctatggcaggagggacctgaaagttagttttaagttgcrgatcatagtggagggtggtaattccaggtctttggcacgtgtctttggtacatgtcatccacagctcaggattagccaacatctcctcctgcctttgtcttgggcaatgtgggactctggactctgtttagaaggttactaagggaggagccatacctccggagcatttaagtgaggaaggtctatgtatttccttgagaaaaaaatagaagaaaattaaaatgtctgagctattcttaataggaaattcaggaattgaatattctgaatggttaaaaattatgtctggaggccgggcaca

SEQ ID NO: 557027 - DNA, 574 bp, Homo sapiens
ccaaattaaacatcataaaatctgagatttagatcttccactgcctacagttttatcttaaaatcttgtttcatttcacataattttccacatgaaatttgggagtaacagtaacgtatgcatcgtaaaaccactttgaggtgatgatatatgttaagcttttttaaaatttttttaaaaatttttttattttagagataggctctctctctgttacctagactagaatgaagcagtgtgatcatagctcactgcagccttgaactcctgggcacaagtgatcctcttgcttcagcctcctgagtagctgggactttaggcatataccaccatgtccagctcatttaaaaatttttttgtagagatagggtcttgctatgttgcccaggctggtcttgaactcctggcctcaagtgatcccctcaccttggcttcccaaaatgctgggattacagaggtgagctactatgcccagccacattaagccttttggaaatttgcatatgacttattattatcagtataaaagtscattattccaggttctgtataatgtaggtaccaagatgacatt

SEQ ID NO: 557028 - DNA, 628 bp, Homo sapiens
tgggtgctgtaccagacgtgggaacctagagtggaaagtgtccacagaagtagttactaggaatgayccttactgtctcttcacatgtggaagagagagacatatgagagaaacgcctgtcccctagtaactcatagtctaattgtaggaatacgatgatgtcttaatctccagctatctatttaaatcaaaagtggaactgcccagactttaatgaaatcagccttaaaagaaccagacaaacttaacatccttccagaaataattgtgctccaggttctaggactctgtttatgagtttcttcttctccatgtgtatgtgacatttatattgtgtccacagtataatttttaaggctgtgaggaaggtaattactcctttgtctttctttcattcatgtattcactcatgcatgcatgtttttttgttgttttggttttggtttttttttttttttgagatggaatctcgctctgtcacccaggctggagtgcagtggcatgatctcagttcactgcagcctccacctcccgggttcaagggagtctcctgcctcagcctctcgagtagctgggattacaagcgcctgccaccacgcccagctaatttttgtgtttttagtagaga

SEQ ID NO: 557029 - DNA, 628 bp, Homo sapiens
tgggtgctgtaccagacgtgggaacctagagtggaaagtgtccacagaagtagttactaggaatgatccttactgtctcttcacatgtggaagagagagacatatgagagaaacgcctgtcccctagtaactcatagtctaattgtaggaatacgatgatgtcttaatctccagctatctatttaaatcaaaagtggaactgcccagactttaatgaaatcagccttaaaagaaccagacaaacttaacatccttccagaaataattgtgctccaggttctaggactctgtttatgagtttcttcttctccatgtgtatgtgacatttatattgtgtccacagtataatttttaaggctgtgaggaaggtaattactcctttgtctttctttcattcatgtattcactcatgcatgcatgtttttttgttgttttggttttgktttttttttttttttgagatggaatctcgctctgtcacccaggctggagtgcagtggcatgatctcagttcactgcagcctccacctcccgggttcaagggagtctcctgcctcagcctctcgagtagctgggattacaagcgcctgccaccacgcccagctaatttttgtgtttttagtagaga

SEQ ID NO: 557030 - DNA, 591 bp, Homo sapiens
ctcttttccttccttttttctcttctgcaaaacttttttccacccagccaatgcccccttccttgcctcaccaggtgaactgttggtgttcagccattcagatgccattcgaaaccctacactgctggaaacagttccttggtgtctcctgcctggattactgggttgcactcttcgtctgtgctcccctaagtgaggcttgttacattaatatcatgctgtgattgtcccttttcttgcctacttttgcatctttacggtccagtacactgtttacaactagtaggagttgaacattatttttaaaccaatatcagctaaataaataagcaacccaacttttttcttagcttaagaaagcaacagaagacatttattttttactcattacatgtttactgagtgtgggattgctatgtaaatctttctatcagcaattggctaagattctataaaatataatgaaactacatatgtatttaggtttttgctgacttttctcccctcatcacaacttaatttgcctttttcctcaagccataactgtaaaaygcacagaatattctacatcattcttttgtgtttttgaaa

SEQ ID NO: 557031 - DNA, 479 bp, Homo sapiens
ttcacctccttggttagctatattcctagatatttcattttctttgtggctattgtaaataggattggattcttgatttgacgctcagcctggctgttatcggtgtatagaaatgctactgatttttatatattgattttgtatcccaaaaccttgctaaaatcatttatcagttctagtagcatttggcagagcctgtagggttttctaagaagacaatcatgtcatgaataaagggagatagtttgatttcttctcttcttatttggaggcctcttatttctttctcttgccaaactgctctggctagcacttcctgctctattttattccaagctscctctctgctgcatctagcacagagtagaggctcagtaaacatttgttaaatgcatgaattcatttgccccacttgtaatcaccatggcaacaccatcttaattccagctgctataacaaattaccataaacttgggagg

SEQ ID NO: 557032 - DNA, 657 bp, Homo sapiens
gttatctagacagattgaatcaaaattcctgaggatagaacctagaaactttttgtaagtttgtttagtttggcttttaacctcctttgataactgtgataatcagccaggactgattttctgcaatagattgtttatttccctcaaatcaaatcttttagataaaaaacttaacactagtttttacrtatgacttattgcatcctgatatatctctatttaaattcatatgagtactaattaccatttccagccacctaggattacaatatcaaacctaagcatttttgtctctcttgtctttgcttcctcaatttccacccagtctccagaatatactgattttatgtccaccacgtttttatcatatgccttctcctttacattttcactgtgactatcctaatttaacatttttcttgctaagacttttttaagagcctattttccctgattccaagtttaaggccacataatccatccaataacttaataacaaaaccacagcttgaccttagcatgacttttttcaaacctttttttctttttttttttttttagacaaggtatcactctgttgcctgggctggagtgcagtggtgcaatcatagctcactgaagccccaaactcctgggttcaagtgatcctcccacctg

SEQ ID NO: 557033 - DNA, 543 bp, Homo sapiens
actgttcttagaatcgaaaagacttgtaaatctacttgaatagcacctgttacatggttaagggtagaaaaaaaagtaaagggcttgaaaggcaaattgatattacaaacacacacacacagtattatatttttaaaaaggtaaagtcacagctctcatctaaatataatatgaacacatttaaaatatgtagtttaactctttaatgaatgagagaacatgtaaggtgttatatctattcaacagattatcctaaaagcaagcatacatacataaacaggaatgatgaaattattgggctcaatataatagataataaactggcttcytctacagggtaaatgaaaatcaactgcgcctccacctgtcaaaatgcattgttttatatggataagaattactttcaccattgtcagtacctactacttaaaaggtgtaaaggctgggtgcagtggctcatgcctgtaatcccaacactttgggagcctgaggtgggcagatcacaaggtcaggagttcgagaccagcctggccagcatggtga

SEQ ID NO: 557034 - DNA, 516 bp, Homo sapiens
gcagataataaaactctagttgttttgaggtcaaaataatcagtattatttttctcttgagcaacacaggaagtaaagagacattttcattaatgccatctggctcacagatgtcatttactgtgaattttagaaatatatgaaaaccttatggctaatctgttttgtaacacattcatttttatggcaggataaaaggcctagtagatattatagacatatttaaagaggctatatttacatatttattaaagctaaaatattatgttactaaatgataatttttccaagtaatcattcctatctaaaatggcattcaataatatttgttcaccaaaccaaaggatgacttatgaataaaatccttttaaatttgattttgttgctaaaggatatgtggttatacacagtgcatatattagraaaaccccttattcatttagtaatgctcttgatatgttttggcttatggttcagttctttttaaattttgctacattctttgtttccacttaa

SEQ ID NO: 557035 - DNA, 622 bp, Homo sapiens
tttctcattctttctataaatgaacttgagagaaactatatttttaatatttttgatgctggaaaaaatagtctgtgatatgcattttattttgtcattatccaagtgcatttctctttctaaagttccatatccctatgatagtgtcaaaatatattgcttgtcagatacatatttacttaacttttacatccaattttcttaattgtttctttttccaagaaaataagatccactcatgtgtatacacgcttaaggtgtgatttttgtgagcttatgcaaacgcaataaaataataacatttgtttgttgaaagtgtatgggtgcctaattctggagattacctttaataggaggcaatgggcaaactaaatgtaagtggtgtggtcaagtcacaaaataacaagcccattgtatcagagatccagtttgctacttggacacttgagcatatagtccctctgaagttagtataattggttccagctgtttaactgttgggttttttttgktttttttttttgttgtttttttttagttttgaacaggagccaacttggcttgaaagctgtgctaccaaaaagaagagactgaagaatgatgccaatgtatatatatgtat

SEQ ID NO: 557036 - DNA, 622 bp, Homo sapiens
tttctcattctttctataaatgaacttgagagaaactatatttttaatatttttgatgctggaaaaaatagtctgtgatatgcattttattttgtcattatccaagtgcatttctctttctaaagttccatatccctatgatagtgtcaaaatatattgcttgtcagatacatatttacttaacttttacatccaattttcttaattgtttctttttccaagaaaataagatccactcatgtgtatacacgcttaaggtgtgatttttgtgagcttatgcaaacgcaataaaataataacatttgtttgttgaaagtgtatgggtgcctaattctggagattacctttaataggaggcaatgggcaaactaaatgtaagtggtgtggtcaagtcacaaaataacaagcccattgtatcagagatccagtttgctacttggacacttgagcatatagtccctctgaagttagtataattggttccagctgtttaactgttgggttttttttggtttttttttttgttktttttttttagttttgaacaggagccaacttggcttgaaagctgtgctaccaaaaagaagagactgaagaatgatgccaatgtatatatatgtat

SEQ ID NO: 557037 - DNA, 582 bp, Homo sapiens
ttaattatatggagcaagaaataataaagtcaatggctaaaataatgaattggtcattttcataggcttctattgtcttcttttgtcaagcttctctcttcattccccattacgcagtggttttatccttcattataatgacttttcctgcgtcactttctcctgaacctctttcaaacactaagaatgaaactaaaaattttattttggtggtagtgtcagtgactcattattgttccatttgttatcacttctaggtaacatttataatttaaacgatagttttgtgcacctctatcccaaacggtgaccaataaaaagcagtttaggctctccttggtgttactctaactaccacacctcgactctgataagaagatagattaaaacagttttttaagtcttagaattaattcaacagatatttatttatttatttatttattagaagtttgctttgtcactcaggctggagtgcagggacatgwtcatcgctcactgctctttcaaacttctaggatcaagggaccccctgcctcagcctcctgagtagttgggactacaggtgtatgccaccatacc

SEQ ID NO: 557038 - DNA, 582 bp, Homo sapiens
ttaattatatggagcaagaaataataaagtcaatggctaaaataatgaattggtcattttcataggcttctattgtcttcttttgtcaagcttctctcttcattccccattacgcagtggttttatccttcattataatgacttttcctgcgtcactttctcctgaacctctttcaaacactaagaatgaaactaaaaattttattttggtggtagtgtcagtgactcattattgttccatttgttatcacttctaggtaacatttataatttaaacgatagttttgtgcacctctatcccaaacggtgaccaataaaaagcagtttaggctctccttggtgttactctaactaccacacctcgactctgataagaagatagattaaaacagttttttaagtcttagaattaattcaacagatatttatttatttatttatttattagaagtttgctttgtcactcaggctggagtgcagggacatgatcatcgctcactgctctttcaaacttctaggatcaagggaccccstgcctcagcctcctgagtagttgggactacaggtgtatgccaccatacc

SEQ ID NO: 557039 - DNA, 472 bp, Homo sapiens
taacactcaccgcaaaggtctgcagcttcaatcctgagccagcgagaccacgaacccaccagaaagaagaaactccaaacacatccgaacatcagaaggaacaagctccggacatgctgccttaaagaactgtaacactcactgcgagggtccgyggcttcattcttaaagtcagtgagaccaagaactcagcaattccagacacacagacacagttctttcaatagtgacaacaaagattgcaaacttatctgcatgcaaaaagcttatattatggttggagacccacatatagctgacaggtcttgcatgattatctaggactaataatctactaatttcaaaataacaatagtgataatgctacctgtagaaatggagcagcacaatacagaacatcatagcaaagaaaggaaatcacattatttgggaaatttgtattattgtttttatcaaaaataccaagccacaa

SEQ ID NO: 557040 - DNA, 606 bp, Homo sapiens
atatgtgtgtgtatcatattgtataccacaaatatatacaatttttatttttcaatttaaaaaataaaaacatagcttaaaagataaattatatggcccttgtcctcaaagaacttagagtctactaagaaagatagataattcgacatattcttttttttttttttttttttttgagacggagtctcgctctgtcgcccaagctggagtgcagtggcgcaaactccgctcactgcaagctccgcctcccaggttcacgccattctcctgcctcagcctccagagtagctgggaccatgggcgcctgccactacrcccagctatttttttgtatttttagtagagacgaaggggtttcaccatgttagccaggatggtctcggtcttctgacctcatgatccacccgcctcggcctcccaaagtgctgggattacaggcgtgagccaccgcgcccggccaattcaacatattcttaaaataactgtactaccacttataagggacatcagtataagctgattgaataggtggaatggtttgtctgtatggctaagataatcagagtttatttcttacataaaccatttaaaagtgcatcataactt

SEQ ID NO: 557041 - DNA, 569 bp, Homo sapiens
gtccagttcatctcattgggacttgttggacagtgggtgaggcccacggaggggcatgacctccccagggaagtgcaaggggtcagggaattttctcccctacccaagggaagccataaggggctgagcctgagraaccatgcacactccagcccagatactgcactcgtcccatggcctttgcaacccaaaaccaggaaattccttctggtacctaccccaccagggacctgggtttcaagcacaaaactgggcggctgtttggtcagacactgaactagccacagttttttttttccataccccagtggcacctggaacaccagtgagacagaaccattcactctcctggaaaggggtgctgaagccagtgagccaagtggtctgtcggcaggtcccacccccgtggagcccagcaaactaagatccactggcttgaaattcttgctgccagcacagtagcagtctgagatcgacctgggatgctcgagcttggtggggggaggggcatcaccattgctgaggcttgactaggcggttttaggctcacagtgtaaacaaagcaatga

SEQ ID NO: 557042 - DNA, 493 bp, Homo sapiens
agagtcatgtgatgacaaacgcagagattaagagtggtgcgagccagggaataccaaggattgccagcaaatgccagaagctaaagtggtaagcaaggattcgcccctacagactcaagagggagccctgctgacacctcaatttcagactttcacactctagaactgtgaaacaataaatttctattgttttaagcaacccagtttgtggtactttgttataaaagtgctattttaagaggccgggtgcagtagctcacacctgtaatcccagcactttgggaggtggaggcaggtggatcacraggtcaggagatcgagaccatcctggctaacatggtgaaaccctgtctctactaaaaatacaaaaaaaattagctgggcgtggtggcaggcgcctgtagtcccagctacttgggaggctgaggcaggagaatggtgtgaacccaggaggtggagcttgcagtgagccaagatcccgccactgcactcc

SEQ ID NO: 557043 - DNA, 565 bp, Homo sapiens
tgagaccagcctgaccaatgtggagaaaccctgtctctactaaaaatacaaaattagccaggtgtggtggcacatgcctgtaatcccagctactcgggaggctgaggcaggagaatcacttgaacccaggaggcggaggttgcagtgagcactccatcctgggcaataagagccraactctgtctcaaaaaaataaaaagaagaaaaattttaatgaaataattcaagaaaatttcccagaaagatgctaaactgaacctaataagttcttagtataatggatgaaaagaaacccatatcattccatatttttattaaagtatcagcgaggagacacttagaattctaacaagtcaaaaccacccaaaatacttagataactctttttaaattaataaattaaattattaactatattaaatgaatttctatttcaatactttaaaaaaattcacatacttatttaaagcttaaaatcacaaagttatcaggttctcttaaacacagcaaacactttaactgacaaatacagattatcctgaacttaatgcaaaagtactaatgt

SEQ ID NO: 557044 - DNA, 565 bp, Homo sapiens
tgagaccagcctgaccaatgtggagaaaccctgtctctactaaaaatacaaaattagccaggtgtggtggcacatgcctgtaatcccagctactcgggaggctgaggcaggagaatcacttgaacccaggaggcggaggttgcagtgagcactccatcctgggcaataagagccaaactctgtctcaaaaaaataaaaagaagaaaaattttaatgaaataattcaagaaaatttcccagaaagatgctaaactgaacctaataagttcttagtataatggatgaaaagaaacccatatcattccatatttttattaaagtatcagcsaggagacacttagaattctaacaagtcaaaaccacccaaaatacttagataactctttttaaattaataaattaaattattaactatattaaatgaatttctatttcaatactttaaaaaaattcacatacttatttaaagcttaaaatcacaaagttatcaggttctcttaaacacagcaaacactttaactgacaaatacagattatcctgaacttaatgcaaaagtactaatgt

SEQ ID NO: 557045 - DNA, 480 bp, Homo sapiens
agcccttgccggctggaatgcctgggtttatatcccgatcattgtccctcccgctgtgctctcaggcaatagatgattggctatttctttacctcctgtttttgcctaattagcattttagtgaactacctttcctacctcattggtcaggtgtgtgctgagtggcaagccccatgtttaaaggtggatgcagtcaccttcccagctaggcttagggattcttagtcagcctaggaaatccagctagtcctgtctctcaccaccacagctgggaatgtgctgagtctcaccagaagtcaatatgtctcagagtctcactcaaggcccatggcatagtaactggatatcactgctggttattcagtgcttaaggtttctttagtcagcaggtaacrgatcctgccaggactaggtcctttccttcaaggtagcagtttcccttctggcccagggcgtatctagaaatgttatccaggagca

SEQ ID NO: 557046 - DNA, 599 bp, Homo sapiens
aaaataagtaaaccacagaaataagtaagctcagaaaggtgaaggggctcatgttggctttctggctgtccataggtatagtcagattcaatgggtactgtctcactttaatgtccttgctctactgtaagggtcagtctgcctctcccacatctatagcacttttcagtttgctcacagaccaactcatttctcacagacaaacccagaggagcattttgttatcctcaattgccattttgtaattggagaacttgagggacatgagaccaagggatttgcccaaggtcacacagatgactaaccaacagggctgcagggctggaagccactgtagatcctaccccatgcctgatgcccatatggcaggaaggcatgcacatacctctgcaaccctgtaccagctttggaccacccagaaaaaagtacttgtggctgggcatggtggtacacgcccattatcccagcactttgggagcccgaggtgggcagatcacctgaggtcaggagttcgagaccagcctggccaayatggcaaaaccccatctctactaaaaatacaaaaattagccagatgtggtggctggcacctgtaatcc

SEQ ID NO: 557047 - DNA, 579 bp, Homo sapiens
ttttctttgttttgtttctaaataaaaggttaaaatgagtgctgggtggagaagggagcacacaagtttttaagtcatttatagtttacatttttacggcacagcagagatcggcatccattttccatcggcaattagaagacgaagcagtctgccaagcctctgtgtaaattgtgcctattaaaagagtctatgtcgtgcaatgattgatcagcaccaaggatttattcactgagctaacagcggtttttacttttgccattacccagggtgatacataacaatttagataatgtgcccagacagatgcatttataaccctggtgtcagagtcctgccttggaggctggtcagcctagcgggaggagaagatgctattagtggtcagaccagagagcccagagcctgtctggccttgcatttgccatcccaggacagggcacaatgggaacgcatgaggacagaactgctgcctgcctccttagcagcacactgagcttgtctacagacagrtctccctcactcttctcatgtgttactggcaataacatggctgttgcaggggtagaaagagagagg

SEQ ID NO: 557048 - DNA, 599 bp, Homo sapiens
gtgtggtggtgcgtgcctgtagtcccagctactcgggaagctgaggcaggagactcgcttgaacccgggaggcagagattgctgtgagccgagatcatgccactgcactgcagcctgggtgacagagcaagactccatctcaaaaaaaaaaaatggtgaacaggatgatgtaaagcttggtcactctaagcctcaagtctggggcaccacctggcagtgtaataatgaatctcaggtaatttatctgggtcaatagttcttaataaataaataactcccctattccagaaaatagaatctaactggcataggccccatataaacatagccatttcctctcatttcaccaggatcattaatgcgttgcccaattaagcaccaaaacacaggccctaaataatttaagctgggtaatcraagaaaataaataaattatatatacttatggaaacttatttttaaaaagaaaattaaactgaggctttctccatgacccagatttaattcaactaaaagtacttaactttaaaagaaaggttgaaaagctgatctttacagaactagagtcatttgtcattcttttttcccatcttgacagg

SEQ ID NO: 557049 - DNA, 547 bp, Homo sapiens
accaaccctccccaccaagtttactctcctaccatctggagaaccagtctttcagctttcacaacggtacatatattattctctcagtgccaggctataagaacaaaggcataacgatgcaagaaaatgatggcaaacttgtattgaactcttcctatatgccaggaacctcgctgagttatttacaaacatgttatttaattcccctaacagcacatgaagaagatttattatatcattttacagatgaggaaactgaggcccagagagattaagcaattcatcaattgccacagacatggtcagtggaagggctagggtattatgccagttcctccccagatcggtgtattaggatgttattcttaactccatcattaagcaaaaccattaatgtcttgaatgaggtctttctttataactaagagcccttatttttcrttatttaaaatattttccctggacatttcttcttaatagacaaatacctcccattgcaattttggaaagcagaaaggttgcaggttcagcctgaatggagaagaga

SEQ ID NO: 557050 - DNA, 344 bp, Homo sapiens
ccttccatccacccacctccctggggcactctaagccaccctcacagccctctgatgccagtcctgctcccaggtcatgccagccccatcttacccatctggtttttgagtttggacaagctcctctccagctyctctacccgacgcatatcttgctgcttctctttctttaatgtgcaaatctgcccaaagcacaaggggaaagggccttggagagaggggctggaggctggacaggctgccctctccctctctgcccccacctccacaaagcccagacccatgaccacctctggctctactattcccattttacagatgcccagaaagatccagtgacctat

SEQ ID NO: 557051 - DNA, 512 bp, Homo sapiens
ctgctcgttcttggcacgggctctgaggtgcatgcagagaggaggaggtggagcaggagtggggggagaggtagagagaatgatcgttagggctggggtgtgtgggctgtctcagctggcagaggggcacccagtcccacctggaggaggaggttggagggttgacccgaagggtcactgcacctccgcccagagcctcttacctccagatctttcagggtagcagatgatgtagggccttccctgtggaaacctgttgctgactacaagagatgagagtgcacatggagatgttctgtcccccacagtgtctgagccctctgacttcctttcttccccatcaactgcaacattttcttttctgcctatcttggaccttttgtcccataactcctttgtgccaacttctctcatggttcttatctccccaccatcccatcctggggccccttcagtgactcctgatggcaagtggctgttctcwttgtcctggtttccccttgagactgggg

SEQ ID NO: 557052 - DNA, 537 bp, Homo sapiens
gacacaatttttccttgtgcagttgtttaatctgattattgtcctgtggctcattctttctttttgtctttgtttattccaagtccctgaggcttccttgggaacgtctgtctacctgtggttcttagacaggggattcctttgttgattctctgtcagtcttaattctatttgtgcatgtcatctgagattttctcaaactttctagtccacttttagccctcctttttgtttccaattatcatttaataaraagagcttgtattttagagactctagagggttcagaaaagtgagtgtcaagtgttcagtgtgcaatcattaaagacagaatatctcataagtttgcatctgtgttacttacacgattgtgatttacggatgctttatttctttccctttcccttttatttttccttttgtttcttttatgtattttttattattattatttttagagactcactctaaaaaaaatagggtctcactgtgttccccagactggaatgggactacaggtacatgccaccatgcctg

SEQ ID NO: 557053 - DNA, 259 bp, Homo sapiens
ccagcctgtactgcacgggggaaccctaggaaggccacttccccacagaattcagtgtcttctgtgaaatgacataatgtgacccaatctcaagtctttcctgcttgatcatttacagacccacatatttattgaatgtgggcagattacctgaggtcaggagktcgagaccagcctggccaacatggtgaaaccccttctgtacaaaactacagcaaattagctgggcgtggtggtgggcaactgtaatcccagctac

SEQ ID NO: 557054 - DNA, 573 bp, Homo sapiens
cttttaatttttatttttattccatgactttttaaaaaaraatcccgtaacttctttttcataacttttttggtaacttttcataatactgttttctactttgttcccacaagtttttttgccacaacgtttttacattttttatcccataactttttcaacccataacttttttaatcccataacttttaaaatcttgtgttcttttaagaaacacttgcatagttatatcacaactttgtaaaaatgaaacacattatctcatgccaagcatgcccagcatttgcacagtatcaatacctttaatactatagttttcaagaaacgcaaaataaaattttaagacaaaaacaacacattgaaacaacttaataatttattacattacagtggcatcacaccagcagtcaataaggccactctagggaaaaatctttcagtatttccacgacacattctctttacaataattcataaactggtaaaattcattctaagaaaacttggcaaataaaactttggactggaattggcatttctttctctgcttttcgttcccaccatttctttctt

SEQ ID NO: 557055 - DNA, 573 bp, Homo sapiens
cttttaatttttatttttattccatgactttttaaaaaagaatcccgtaacttctttttcataacttttttkgtaacttttcataatactgttttctactttgttcccacaagtttttttgccacaacgtttttacattttttatcccataactttttcaacccataacttttttaatcccataacttttaaaatcttgtgttcttttaagaaacacttgcatagttatatcacaactttgtaaaaatgaaacacattatctcatgccaagcatgcccagcatttgcacagtatcaatacctttaatactatagttttcaagaaacgcaaaataaaattttaagacaaaaacaacacattgaaacaacttaataatttattacattacagtggcatcacaccagcagtcaataaggccactctagggaaaaatctttcagtatttccacgacacattctctttacaataattcataaactggtaaaattcattctaagaaaacttggcaaataaaactttggactggaattggcatttctttctctgcttttcgttcccaccatttctttctt

SEQ ID NO: 557056 - DNA, 573 bp, Homo sapiens
cttttaatttttatttttattccatgactttttaaaaaagaatcccgtaacttctttttcataacttttttggtaacttttcataatactgttttctactttkttcccacaagtttttttgccacaacgtttttacattttttatcccataactttttcaacccataacttttttaatcccataacttttaaaatcttgtgttcttttaagaaacacttgcatagttatatcacaactttgtaaaaatgaaacacattatctcatgccaagcatgcccagcatttgcacagtatcaatacctttaatactatagttttcaagaaacgcaaaataaaattttaagacaaaaacaacacattgaaacaacttaataatttattacattacagtggcatcacaccagcagtcaataaggccactctagggaaaaatctttcagtatttccacgacacattctctttacaataattcataaactggtaaaattcattctaagaaaacttggcaaataaaactttggactggaattggcatttctttctctgcttttcgttcccaccatttctttctt

SEQ ID NO: 557057 - DNA, 565 bp, Homo sapiens
ggttccccaaataccctcatacttgataattcactagaaggattcgtggaactcatagaaagttgttatattcacagctatggtttaatacagggattaataaatccaagggaagagacatgtagagtccaggagggatccaaatgtggagcttctggtcatcctccctgcatgaagtcatggatggtgttaaatycttccagccacaatgtgagacacacatggctggccagggaagctcacacaaacctttggtaaccagagtttttactagggcttgatcacatactgcctgcatggctgaccttttgaggtcaggctgatacctgtaatctccagtcccttctggaggcaaaactgataccctgcggcccaaagccccgtcataaattacatttgtaggccatgtggtggccaaactacaccccccaccccagaacattctagaatagaatttatattaggcagaacattcatgggcctacagatcacttcctggtagttgggcaaaggccagacctctctttggaaaattctttactacatgccaagtctgtcagaattc

SEQ ID NO: 557058 - DNA, 565 bp, Homo sapiens
ggttccccaaataccctcatacttgataattcactagaaggattcgtggaactcatagaaagttgttatattcacagctatggtttaatacagggattaataaatccaagggaagagacatgtagagtccaggagggatccaaatgtggagcttctggtcatcctccctgcatgaagtcatggatggtgttaaatccttccagccacaatgtgagacacacatggctggccagggaagctcacacaaacctttggtaaccagagtttttactagggcttgatcacatactgcctgcatggctgaccttttgaggtcaggctgatacctgtaatctccagtcccttctggaggcaaaactgataccctgcggcccaaagccccgtcataaattacatttgtaggccatgtggtggccaaactacaccccccaccccagaacattctagaatagaatttwtattaggcagaacattcatgggcctacagatcacttcctggtagttgggcaaaggccagacctctctttggaaaattctttactacatgccaagtctgtcagaattc

SEQ ID NO: 557059 - DNA, 355 bp, Homo sapiens
gtctgaaaggcaaacttcagataattctttttttttttttttttgagacggagtttcgctcttgttgcccaggctggagtgcaatggcgcgatctcggctcaccgcaacctctaccacccaggttcaagcaattctcctgcctcagcctcccgagtagctgggattacaggcatgcaacaccacacctggctaattttgtactttttaaagtagagacggggtttctccatgttgaggctggtctcgaactcctracctcaggtgatccgcctgcctcagcctcccaaagtgctgggattacaggcgtgagccactgcgcccagcccagataattctttagggtagaacatttca

SEQ ID NO: 557060 - DNA, 561 bp, Homo sapiens
aaaagaaggtgttctggtcttttcctttttaagttgatttcaggaaccctggttccaggctacactgattctttcagtcacttatatttgtgtcaagataactgattaaaaattgaatagtagtccctgctctttgtaccttatgttgaatttgggcaaagtgaatgcctgaagcagactgaagtacatgactcaatttgaccttcactacatctaaacccatcaaagaaacgaactgatacataggacgaaggagtaggcggtgaccgtgtatttgaaatgaggggaggcccagaaggcagtgaaaaaaggccagtggtttcctggccctgagggggaaacgagacctccaaggagatggctggcatgttattattagggagatggsagttccacactctgaatggagactcagagttagaactaagctaacgcaatgacaatgaaaaaatgtgatactaatgacataagtgattttgtaggcatagactcattcagaagtgccaaattcagccaaacaatatttgaaaagcgcacaccaattccacctgtgccacataa

SEQ ID NO: 557061 - DNA, 561 bp, Homo sapiens
aaaagaaggtgttctggtcttttcctttttaagttgatttcaggaaccctggttccaggctacactgattctttcagtcacttatatttgtgtcaagataactgattaaaaattgaatagtagtccctgctctttgtaccttatgttgaatttgggcaaagtgaatgcctgaagcagactgaagtacatgactcaatttgaccttcactacatctaaacccatcaaagaaacgaactgatacataggacgaaggagtaggcggtgaccgtgtatttgaaatgaggggaggcccagaaggcagtgaaaaaaggccagtggtttcctggccctgagggggaaacgagacctccaaggagatggctggcatgttattattagggagatgggagttccacactcygaatggagactcagagttagaactaagctaacgcaatgacaatgaaaaaatgtgatactaatgacataagtgattttgtaggcatagactcattcagaagtgccaaattcagccaaacaatatttgaaaagcgcacaccaattccacctgtgccacataa

SEQ ID NO: 557062 - DNA, 563 bp, Homo sapiens
catatggaagcgaccttcacttaacatgcatcaaacatgtactgagagggtgtcccctatgctctgtatgtcatgggatgctcccttagatctctattctcaatcaatcaccactttacaattttttgttgtcatttgttaacatccaattgcttaattattttggggggaaacagaagtttcagacatagagacaaacactgtgcatcactggactcacctttgaggtaaagccactggaattacaggagtaacgatgccttttttcttgtcaaactccaagagctggggtcaaaaaaaacctgccacatatcccaagccaagctgtgtggagatcggtgtttacattgtgtttaagcacatataaaataaatgaygtgggaagaaggttcaccatctattttaaaatgctaccttctattttagatcaaacatgtacaatttctgtttagcaatttcagctaattgttggattaacattttggggaacagattgcaaacttcaaaatggaaaagatcattttagggagggaagctaggcagctgtcagggagtcggaatta

SEQ ID NO: 557063 - DNA, 465 bp, Homo sapiens
ctctgtcatccaggttggagtgcagcggcacaatctctgctcattgcaacctccgcctctcaggttcaagtgattctcctgcctcagcctcccgagtagctgggactccaggcatgcacccccacacccagctaatttttgtgttttcagtagagacagggattcaccatgttggccaggctggtctcaaactcctgacctcaggtgatccacccaccttggcctcccaaagtgttgggattacaggcatgagccaccgygcccagcctcaaaatgtttcaagaaagtttacgaatttgtgttgggctgcattcaaagccatcctgtgctgcatgtggctggcaggcggcagattggacaagcttgtttagatggtggtgttagatctgttatagtgactgtattagtccattctcatgctgctataaagaactgctcaagactgggtaatttgtaaaggagagt

SEQ ID NO: 557064 - DNA, 350 bp, Homo sapiens
ctcccaaagagctggaattagtggcatgatttttttaaatttcaatctttttttcttgactcagactagccccaaagtatttagcccctggtgtctctttaattaattccctttyctccaaattcagcacctcaacttctaaactgttttcctctagtcttagaactcatagacatttccctcctatgccccttctgcaagagtaatcatccattcttggaatattagtgtcttcatatatgatccccctcaattatcagatgtttaatagaaatcatatcttaatgtaaaaatgatttcatttcatataaacaatgatttcattttaggagaataattatgcaaacatt

SEQ ID NO: 557065 - DNA, 585 bp, Homo sapiens
ggctggggaggcctcaggaaacttagaatcatggtggaaggcaaaggggaagcagggacgtcttagatgggyggaacaggaggaagagagcaaagtggggaggtgttacacacttttaaacaatcagatctcttgagaactcactattgtgagaacagcaagggagaaatctgcccctatgatctaatcacctcccagcaggcccctcctccaacactggggattacaatttgacatgagatttggatgggaacacagatctaaaccatatcagctaccttcataaattatcttagctagatcttttggatagtttgctgcagcttccctatcagcacttgctgcttcaccttatacatttatgttatggagatggcttctttccttaatcctcatgaaccaacctctgctagcttcagacttcttctgcagcttcctcacctttcttagccttcatagaattgaagagaggtaggaccttgccctggattaggctttggcttgagggagtgttgagctggtttgaacttctatccagagcattcaaactttgtccatatcagcaataaggctgtttttgccctc

SEQ ID NO: 557066 - DNA, 585 bp, Homo sapiens
ggctggggaggcctcaggaaacttagaatcatggtggaaggcaaaggggaagcagggacgtcttagatgggtggaacaggaggaagagagcaaagtggggaggtgttacacacttttaaacaatcagatctcttgagaactcactattgtgagaacagcaagggagaaatctgcccctatgatctaatcacctcccagcaggcccctcctccaacactggggattacaatttgacatgagatttggatgggaacacagatctaaaccatatcagctaccttcataaattatcttagctagatcttytggatagtttgctgcagcttccctatcagcacttgctgcttcaccttatacatttatgttatggagatggcttctttccttaatcctcatgaaccaacctctgctagcttcagacttcttctgcagcttcctcacctttcttagccttcatagaattgaagagaggtaggaccttgccctggattaggctttggcttgagggagtgttgagctggtttgaacttctatccagagcattcaaactttgtccatatcagcaataaggctgtttttgccctc

SEQ ID NO: 557067 - DNA, 586 bp, Homo sapiens
ttttgttcattcctttcattcttttttctctattcttgtctgactgtcttatttcagaaagccagtcttcaagctcttagattctttccyccacttggtctattctgctattaatacttgtgattgcattacgaaattcttgtatggtgtttttcagctctctcagttcagttacacactcctatactagttatttggtctgccagttccagtattgttttataatggtttttagcttccttggactgggtttcaacatactgctatagctcaaggatcttcatttctgtccatattctgaactctgtttctgtcacttcatccatctcaacctggttcagaacacttgctggagaggcaaggtggtcatctgttggaaagaaggtgctctggctttttgagttgttagggttcttgtgctgattctttctcatctttgtgggcttatcttcctttaatcctcgaggttgctgactttttgcataattttgtttcttttatcctatttttttaatgaccttgagggcttgattctagtataaggtggattcagccaactggcttcatttatgaaagattttagggg

SEQ ID NO: 557068 - DNA, 402 bp, Homo sapiens
aaagggaccaggaaagacttacagaagaaagtgaaagatttttatctcacttcaaacagaaatttacttttaggctgtcactgtctcctcccagcttatctgagctaacaggaagcgaatgaaggcctgtgattcagctgcaggcagcgggtatgcctgagcaggtcacacccatttggtctcttttgccaggaaaataaaaaaagaacctaagagaacggkcttcacattttgaatgcgcaacattgtatctgtgaatgaaggcaagagttaacagctgtttaattgataactgctcgcatcattagttgctggctaacaactgggaaatcagaaaatgtcttgtagaaaaatgtaagaaaagttccaacaatactgacttaaacacgacaaaggtgaaaa

SEQ ID NO: 557069 - DNA, 607 bp, Homo sapiens
aggaggcggaggttacagtgagccgagattgtaccactgcactccagcctgggcgacagagtgagactccaactaaaaaaatttttttttccatttccctgtcagggcactgaccctatggatctggactactgggatgtacagagtttggaatggaaatgagtatctaccatggggtgggctctaggctcctgtttcccaggtatcaccttaaatcctggtatcctctttgccactttacagggaccttgattgtgtttgacaggaggataagctggatcacagtggtcatgagcctcaggtgacccagaaatggtgggataagtttcttaagagacccggccaaagagaagtacatgctggacccctaasagtagccccgcaaacccacagatctgaacattctgatggctgatcattgattgcctccaaagagagatgatgatgggatgtagcccagataattcagtttcctctagatcaaattctatcatttggataaaaagcggacgctacaagaggcaagtcagaaatgtctgaataaaagtatcccatgagtggtgggtagtatcctagaaagatgggaatatcaaacatggacgctcaa

SEQ ID NO: 557070 - DNA, 598 bp, Homo sapiens
attacaggcgtgagccacctcgcccggcctttaacttgtttttgttcatattgtgcctcttaattcttgttatatttgagaaactttactaatccttttagctatcctttcttgctgttcggtcatctgtaaaagaaggttgtattacttagagcttgatattgggaataaaatgtaatgacttactggcatctttagtcaccctgaccttaagtatattatatgctcatatctgtgattgttattttggtctccccaaactatccratctttcatttagaaaatttccaaaggagaaattgtaggctttaatagagttcacaatttttactgagataaaattttacgtacattctataagtacatttatttatttatttattttagttttgagacacttgctctgttgcccagctggaatatcgcggtgtgatctctgctcactgcaacctccgcctcccgggttcaagcgattcttgtgcctcagccttcccagtagctgggattacagatgtgtaccatcatgcctggctaagttttgtatttttagtagagatggggttttgccgtgttgaccaggctggtctcaaactcctgg

SEQ ID NO: 557071 - DNA, 532 bp, Homo sapiens
gcaagatgtgctttgttaaacagatgcttgaaggcagcatgctcgttaagagtcatcaccaatccctaatctcaagtaatcagggacacaaacactgcgcaaggccgcagggtcctctgcctaggaaaaccagagacctttgttcacttgtttatctgctgaccttccctccactattgtcccatgaccctgccaaatccccctctgtgagaaacacccaagaattatcaataaaaaaataaatttaaaaaaaaaaagaattaaaaaaaaaaaaaaaaactcctcaagaagctgcctatgtaaagggcagggagggaggaccgaattgtaatttgcagattactctactgactgtatgtggccaccagggggaggttaaactgtgaggctytattttagaggtggagccccctgcaacatttttcttcaggtgtaatctttgcctttgacctgctccaaacccaaatatgtatcccagttaggggaccaaattggtcagacagctcagtgatgttttccttatataatgtaa

SEQ ID NO: 557072 - DNA, 601 bp, Homo sapiens
gccatgtatgagactcttctagagccttaggtttttgtttttgtttttgtttttgagacagggtctcactctgttgcccaggctggagtgcagygggacaatcttggcacactgcagcctcggcttcgcaggctcaggtggttctcccacctcagcctcccaagtagcttagactatgggcacacactacaaagcctggctaattatcttattttttgtagagggtaggtttcaccatgttgcccaggctggtttcaaactcctgagctcaagtgatccatctaccgcagcttttcaaagttctaggattacagacatgagccaccactcccagcctagagtcttagattttaaccagaatttcctgtagtactttaaaaaaataaaagagcttgagaaccaccctagtgagagaaatgtaattctattttttattgaaatcactgtctagatacaagtctgtcaagcattatacagaagaaaattaagacaatatactatttattagtcaatgacatttcttcagtatatttgattaaagtgtatttgaatggtaatattttaattgtattgaggcttaattaggttggtataaaaataa

SEQ ID NO: 557073 - DNA, 595 bp, Homo sapiens
cttaaggtccctttgaaatatagacaatgaaataatctgaataaaaatgttcaataataaatatatcctttaatcgagtatggcatagctttccttgatagtggtttttatctttcactttaaaaatctgctagactacctattttgcaaggagatgaataaaacagttccaaaaatacactcttcagcatatgctctgttgacactataccaaatatcatgataaatacttaaattttcagtcagtcatctggatattttgtgcacatagttccaaacatctggctattggaaaatacataggaaatagcttgaacatttctttttgcttcatggttttaattatataaacccaggctaacaatatttaattcttttctaataagaatggcactgctgcctaaattctttttaggggcccccttaaaggatgttactacgcattaggcaggtctctgttttgggggtatgaagtcccattgggtgagatgctatttratcaaactgttaggaaaattctaacagaatatgcctgtgatactaactcctgtggtgattaaattggaaaggtggacatcagagagtgtagcgaaaa

SEQ ID NO: 557074 - DNA, 522 bp, Homo sapiens
atggtctaatacagagaagtttttacatacgtgatgaaagtctaagaagccagagcacatgaaggagagaacctcagagatttgtaacaagaagaagccgctaatacttttgtaagcaggtctcactgccagagcccacaggtcaggactgttcaatagcagctaggcccatgacatggggtttcccagtgtgagctgtgccaataggaggatgggctgtccagctgaacctggagccaaggaaataaaaggctttggaggagacaccgcctgtgacaataagagagaggaaaatagcctgatttctctctttctccagtctacaatcactctcttgccagtatctcccattgagtgaaccctgccagaaactaaaaaacatagtaggctgggaatgcaccttctggtgtgggggcaacatagagcatagcaagagaggtgcagagaatagctttgagatcaaataggcaaaaatgagtgcataatatctttccrttaattttaggtagaagttttcaaaaa

SEQ ID NO: 557075 - DNA, 560 bp, Homo sapiens
aatctggctctgtggttgacctgctgatgtgagtttgtgtggttctggctgtataaaatggagctgctgatttgaacagccctgttattagggtcagagaagggctctggttagaaaacaggaggaagcagctccttcctgtaatcagaagacacagcttttggcaggggctacagagaggcagaggcacatggaagatgccctgcttgcccttgaagagaactttcttagaattcctgcccctgagaatcattctggatcctgggaggataggctgtcttgcctcagagaggctgaggtcttgcctcaagaagcaggttccttccaaaccaagttaggaagcctggagccctggargtatagcaggaaataaagatagcaagggctgggcgcggtggctgatgcctgtaattccagcactttgggaggccgaggcgggcggatcatgaggtcaagagatcaaaaccatcctggccaacatggtgaaaccccgtctctactaaaagtacaaaagttagatgggcacatgcctatagtcccaggtactcgggaggctgagg

SEQ ID NO: 557076 - DNA, 560 bp, Homo sapiens
aatctggctctgtggttgacctgctgatgtgagtttgtgtggttctggctgtataaaatggagctgctgatttgaacagccctgttattagggtcagagaagggctctggttagaaaacaggaggaagcagctccttcctgtaatcagaagacacagcttttggcaggggctacagagaggcagaggcacatggaagatgccctgcttgcccttgaagagaactttcttagaattcctgcccctgagaatcattctggatcctgggaggataggctgtcttgcctcagagaggctgaggtcttgcctcaagaagcaggttccttccaaaccaagttaggaagcctggagccctggaagtatagcaggaaataaagatagcaagggctgggcgcggtggctgatgcctgtaattccagcactttgggaggcygaggcgggcggatcatgaggtcaagagatcaaaaccatcctggccaacatggtgaaaccccgtctctactaaaagtacaaaagttagatgggcacatgcctatagtcccaggtactcgggaggctgagg

SEQ ID NO: 557077 - DNA, 561 bp, Homo sapiens
catcttacatttaagtctttaatccatcttgagttaacttttatagatggtgaaaggtggagatccagttcaatccttctgcatatggttagccagttttcccagcaacattaactgaatgaggtatcctttccctattatttgtgtctcttttgctgaagattagttggttgtaggtgtgtggccttatttcaggggtctctattctgatccttttgtctgtgtgtctatttttgtagcagtaccatgctgttttgattacacagcctcatggtatagtttgaagtctgggaatgtgatacctctggatttgctctttttgcttaggattgtcttggctattctagttcttttttggttccatatgaattttagaataattctttctaattctgtgaaaaacgacattggtaacatgataggaattgtgttggatctgtagattgctttgggcagtatasacattttaacaatattgattcttccaatccatgagcacagaatgcttttccatttgtctgtgtcatctctgatctttttcagcagtgttctgtagttctt

SEQ ID NO: 557078 - DNA, 666 bp, Homo sapiens
catgcctccacttgcttcatgcatgtaccaatggccagagcaagtcccatggctgagctcagcagcagtcatgaagaggattgcacagagtataaatatcaggagtgcggtcattggggagcaccaacattgcaacctcttccatccagtcctctagtgaaggcaaaatacctcaaactaagtagacacctcgattatccttcaacatgttaatcagatggaacacattagcacaacagctcatttaaatgcaagacaatatttgttagaaagtgcttcctctgcctccttccaacttccacccattaattctattcctgctytcttaagaaacagaaaagactaatttattttctctttccaaagataacacttaaaaatccattaaaaggatgtcatgtttctccaaactctttcaagagtccatgtcttctattttctggccacagcattttcagtttcttcccactagcctggtcaaactaccaacggcaatggatagctcagttctatttaagataagcttggctgttctcttaagtgtcttgcagcagaaatactggcccattcaaaatagttgggctaacttttaaaacaacaactaagcgtcttccaagacagttataaaagactaaataaaacacagaggaaaagaaaaaagaggga

SEQ ID NO: 557079 - DNA, 666 bp, Homo sapiens
catgcctccacttgcttcatgcatgtaccaatggccagagcaagtcccatggctgagctcagcagcagtcatgaagaggattgcacagagtataaatatcaggagtgcggtcattggggagcaccaacattgcaacctcttccatccagtcctctagtgaaggcaaaatacctcaaactaagtagacacctcgattatccttcaacatgttaatcagatggaacacattagcacaacagctcatttaaatgcaagacaatatttgttagaaagtgcttcctctgcctccttccaacttccacccattaattctattcctgctctcttaagaaacagaaaagactaatttattttctctttccaaagataacacttaaaaatccattaaaaggatgtcatgtttctccaaactctttcaagagtccatgtcttctattttctggccacagcattttcagtttcttcccactagcctggtcaaactaccaacggcaatggatagctcagttctatttaagataagcttggctgttctcttaagtgtcttgcagcagaaatactggcccattcaaaatagttgggctaacttttaaaacaacaactaagcgtcttccaagacagttayaaaagactaaataaaacacagaggaaaagaaaaaagaggga

SEQ ID NO: 557080 - DNA, 454 bp, Homo sapiens
aatgtcttttagattaaagagaggtcttggaaacaatgtgagaaaatgaaaaaatgaatgttgttttattttgatttctacatctcttcttaacttctctcatgaatttgtgcttttactgtattatcatttttgtgtgcatttagctttttttccacaagctaattcaaaataaaagatcatataggggagtaatagaatcacagtattcggtagtggaatgtgatagctgtttcagaattgtctggactaatggggctatcatgagacagggcgggtgggggaagaatgggcggggtgaggggtcagtgaagggtgaggagatgtggggcaatttttgctacaaaagctcttctggtcatcagtaaatagggaaaaattatgttgcgtcttagttcatttgtgctgctayaacaaactgcctgacattggctaatttatgaagaaaaaaaat

SEQ ID NO: 557081 - DNA, 623 bp, Homo sapiens
cactgaccctttttttaccacatgtaagaatatgaaattctggcatgaacatctgcttataatgcagtcataggagagaagaagaaaagactcatggaaagaaggcctagaggaagtggaaataacaggagggaatgaaaaggcaaaacagtttaaggaagctatgaacccctgagaaatgaaacagccatatgacaacccataaaaagtggacatttaaaagattttttaaatcctggaattctggccaagcgtggtggttcacrccagtaatcccggcactttgggaggccaagacaagcggatcacctgaggtcaggagttcaagaccagcctggccaacatggcgaaaccctgtctctaccaaaaatacaaaaattagccaggtatggtggcacatgcctgtaatcccagctactcgcgaggctgaggcaggagaatcacttgaacccaggaggcagaggttgcagtgagctgagattgcaccactgcactccagcagcctgggcaacagagtgagactctgtctcaaaaaagaaaaaatcctagaatttaaccagttaatagaaccatagaagagatattatcagttacttttgcacagtgaggaagatttttttttt

SEQ ID NO: 557082 - DNA, 623 bp, Homo sapiens
cactgaccctttttttaccacatgtaagaatatgaaattctggcatgaacatctgcttataatgcagtcataggagagaagaagaaaagactcatggaaagaaggcctagaggaagtggaaataacaggagggaatgaaaaggcaaaacagtttaaggaagctatgaacccctgagaaatgaaacagccatatgacaacccataaaaagtggacatttaaaagattttttaaatcctggaattctggccaagcgtggtggttcacgccagtaatcmcggcactttgggaggccaagacaagcggatcacctgaggtcaggagttcaagaccagcctggccaacatggcgaaaccctgtctctaccaaaaatacaaaaattagccaggtatggtggcacatgcctgtaatcccagctactcgcgaggctgaggcaggagaatcacttgaacccaggaggcagaggttgcagtgagctgagattgcaccactgcactccagcagcctgggcaacagagtgagactctgtctcaaaaaagaaaaaatcctagaatttaaccagttaatagaaccatagaagagatattatcagttacttttgcacagtgaggaagatttttttttt

SEQ ID NO: 557083 - DNA, 623 bp, Homo sapiens
cactgaccctttttttaccacatgtaagaatatgaaattctggcatgaacatctgcttataatgcagtcataggagagaagaagaaaagactcatggaaagaaggcctagaggaagtggaaataacaggagggaatgaaaaggcaaaacagtttaaggaagctatgaacccctgagaaatgaaacagccatatgacaacccataaaaagtggacatttaaaagattttttaaatcctggaattctggccaagcgtggtggttcacgccagtaatcccggcactttgggaggccaagacaagcggatcacctgaggtcargagttcaagaccagcctggccaacatggcgaaaccctgtctctaccaaaaatacaaaaattagccaggtatggtggcacatgcctgtaatcccagctactcgcgaggctgaggcaggagaatcacttgaacccaggaggcagaggttgcagtgagctgagattgcaccactgcactccagcagcctgggcaacagagtgagactctgtctcaaaaaagaaaaaatcctagaatttaaccagttaatagaaccatagaagagatattatcagttacttttgcacagtgaggaagatttttttttt

SEQ ID NO: 557084 - DNA, 422 bp, Homo sapiens
cattttgcagatggagaaaacaaggcatagagaggttaatgatcttgctaaggtcacacagcagtaagtggtgaagctaagatgggaacccacaatgattattaaccattaggtatacagtctacttaatttgcccatataattaacatrcactattgattccaattaatcagaataacagggaaaagccaagagatgtgaagattaattacagaatgcctgtaagccgttttatttcttgaaaaattaaataggtataaaacacactccagtttgggagtgttacggaattcttctccatcgctatttacacatgcatgtgaatctgtaagagcagctcctgtcacttttatcataaagatagaagagttaaatgataatcatttctttgcaaccttcaggatctgctggtaagttcctgc

SEQ ID NO: 557085 - DNA, 422 bp, Homo sapiens
cattttgcagatggagaaaacaaggcatagagaggttaatgatcttgctaaggtcacacagcagtaagtggtgaagctaagatgggaacccacaatgattattaaccattaggtatacagtctacttaatttgcccatataattaacatgyactattgattccaattaatcagaataacagggaaaagccaagagatgtgaagattaattacagaatgcctgtaagccgttttatttcttgaaaaattaaataggtataaaacacactccagtttgggagtgttacggaattcttctccatcgctatttacacatgcatgtgaatctgtaagagcagctcctgtcacttttatcataaagatagaagagttaaatgataatcatttctttgcaaccttcaggatctgctggtaagttcctgc

SEQ ID NO: 557086 - DNA, 422 bp, Homo sapiens
cattttgcagatggagaaaacaaggcatagagaggttaatgatcttgctaaggtcacacagcagtaagtggtgaagctaagatgggaacccacaatgattattaaccattaggtatacagtctacttaatttgcccatataattaacatgcactattgattccaattaatcagaataacagggaaaagccaagagatgtgaagattaattacagaatgcctgtaagccgttttatttcttgaaaaattaaataggtataaaacacactccagtttgggagtgttacggaattcttctccatcgckatttacacatgcatgtgaatctgtaagagcagctcctgtcacttttatcataaagatagaagagttaaatgataatcatttctttgcaaccttcaggatctgctggtaagttcctgc

SEQ ID NO: 557087 - DNA, 555 bp, Homo sapiens
gtgtgtttcgtaatgattcccattttggttgagaaaagtctatgcactagtgcctgtgacacctcagcttggtgcctggcccatggtgaggacccatcattaaaccttaggggaagtggggtgacactggctttcacgtgccaacctgtattcaaagcaattccataactttcctgtgcttgtttcatcttctgtcaactgaggataattataataactatagctcacagggttttgcaaagttttaaaggaataaactgtacaagttacttataagggtgctgtctgtgggcaagaaccctgaatacatgtcagctattactaggtaacaagtgatgggaaagaaattgaacaatctcagagatttcagattcaaaataygtaacatataaaagccagttgtgagttatattccaagtcatgtaagtcatcctgcatatatacatataggcttaatattatcttcacaaacaggaaagaagatcatctgtgttgaacccctactgcgtgccaggcataagcgaggcgttttgccatattattccattaaattct

SEQ ID NO: 557088 - DNA, 598 bp, Homo sapiens
gggcccaccctcattacctcaatttaccttaattacctctttaaagaccctatctctaaacacagtcacattctgagatactgtgggttagggctccaacatatgaatggggagggacacaatttagcccataacccccactttgggtgtgttgcagccatttactctactggctttggcaggtccatcaggaattcaaaccatagatttgtggtaggctacggtttgaatgtgtcccttccaaaattcaggtgttgccaatatgatagtattaagaggtgaggcctttaaggggtgattagacggtgaggactcctaccaagttaatgggagtaaggtccttttaaaaaaagcttcacatagcatttaactakctggctagctttgttttctgtttttctgctgtgtgaggactttagcagctgtcactgacaactgaatctgtcagcaccttaccttggactttccagcctctggaactgtgagaaaatatgtttctgttctttttaaatatccccatctcaggtattctgttatagcaacacaaatgaactaagacaggatacaatgctggagacagaagcctgagccctattca

SEQ ID NO: 557089 - DNA, 426 bp, Homo sapiens
ggtcatggattattattcagggtttcargctgtgaacagttgttgtcactcacaattcaggtgtcacttttcactgtgcttctgaaaagaaaaacaaatgaatcagagcttggctttatgggcatgaggaactcatccttaaattagcccacagtgggatttcagctgaatgttggaagtgttccagtctcgcctttaagtctgctgaaaatccacaggagatactggaaaatccatttgcatttagcacctgtgtttgcctcataactgtatattattatgctctctagatgttgaaagtgcctggagaactttccttcctctgggcaaataaaaggcaaataaaagttgtgtataccgtattagcttcctgtagctactgtaacaaattaacataagcttagtgactgaaaacaggaggaattc

SEQ ID NO: 557090 - DNA, 220 bp, Homo sapiens
atggttagcaaagcataagtttcaagtaaagacggttattcatttccattaatagtaactagtggctgggtgcatggctcacacctgtaaccccagcactttgggaggtcgaggcaagcggatcaggaggtcaggagttcaagaccagcctgggcaacagagtraaacccagtctctgctaaaattacaaaaattagccaggcgtggtagcaggagcctg

SEQ ID NO: 557091 - DNA, 566 bp, Homo sapiens
catgggtacaggcagccctgggtcaaagtgtggcactatactagcagcccacaccccacctcacccacctaccctgagctgacttgtctgctaaatgctaaataaacctgtcaacctgtctggtttaacttagaagggcctggatgcaacaagcctgagggctgtgactgggggaagagagagcacagacggagctcctcctccttctgccactgcccaccaactgaaaaccaccaactgaagtttgcttagattctcagcctacaccttgttcccaaygaaactcatgcaatactttggctcccactataatctctggaacaaaatattctacggatctgctttttgagctgcaacttatcttactaaattccaagaagcttatgtaagagaaaaccaccagataatacaagattttcaatgtgatcatcattgctacttttaactagaaattatccagtaaatgtattgtgaactgctttgtgactatggtgatttatttagtctttctgatccttggtttgattatctcaaatatgtgagtatcaccaattttataaagttgc

SEQ ID NO: 557092 - DNA, 566 bp, Homo sapiens
catgggtacaggcagccctgggtcaaagtgtggcactatactagcagcccacaccccacctcacccacctaccctgagctgacttgtctgctaaatgctaaataaacctgtcaacctgtctggtttaacttagaagggcctggatgcaacaagcctgagggctgtgactgggggaagagagagcacagacggagctcctcctccttctgccactgcccaccaactgaaaaccaccaactgaagtttgcttagattctcagcctacaccttgttcccaacgaaactcatgcaatactttggctcccactataatctctggaacaaaatattctacggatctgctttttgagctgcaacttatcttactaaattccaagaagcttatgtaagagaaaaccaccagataatacaagattttcaatgtgatcatcattgctacttttaactagaaattatccagtaaatgtattgtgaactgctttgtgactatggtgatttatttagtctttctgatccttggtttgattatstcaaatatgtgagtatcaccaattttataaagttgc

SEQ ID NO: 557093 - DNA, 601 bp, Homo sapiens
aaataaaaagtaaatttaacttaaaaatgtttttaaaaaagtttctagttcttatttttgcattgaaaaggagaatgatgatttttaaataagttcctcctcacttttaatttctactatcacagttttattgcttttcatggcaatagattcctctggttcaacaagagggccagaacaaggaagtacagaaacatctcaatatatctcaaaaagttatttaacatggacagtgtcatttaatatctttaacatccctatcaaatggatgctattactatccctcttttacaggatattaaaatttacatactgtaaataaccagctgaaagtcatatagcatggaaaatacaataaacatacaaagaagcaatggcattagaagtggaggrgggtgaaggattaaaaggctaaacttagtttggttaagaaaaaagaaaaataggaggtggcaaactcttgttggaaagaggaaggatttgggcagagcaaggtagtggagtcgacctatccaataatcatatgcctacggacacatctatatgaacaactatccacatatgaaattacctttacaagagctaatgaaccctgaataca

SEQ ID NO: 557094 - DNA, 601 bp, Homo sapiens
aaataaaaagtaaatttaacttaaaaatgtttttaaaaaagtttctagttcttatttttgcattgaaaaggagaatgatgatttttaaataagttcctcctcacttttaatttctactatcacagttttattgcttttcatggcaatagattcctctggttcaacaagagggccagaacaaggaagtacagaaacatctcaatatatctcaaaaagttatttaacatggacagtgtcatttaatatctttaacatccctatcaaatggatgctattactatccctcttttacaggatattaaaatttacatactgtaaataaccagctgaaagtcatatagcatggaaaatacaataaacatacaaagaagcaatggcattagaagtggaggggggtgaaggattaaaaggctaaacttagtttggttaagaaaaaagaaaaataggaggtggcaaactcttgttggaaagaggaaggatttgggcagagcaaggtagtggagtcgacctmtccaataatcatatgcctacggacacatctatatgaacaactatccacatatgaaattacctttacaagagctaatgaaccctgaataca

SEQ ID NO: 557095 - DNA, 472 bp, Homo sapiens
tgggacaccatcaaaaaaacaaatctacaatgttaaagttcaactaagaatgaaaaaaagttagaagcttattcagagaaataacagacaactttttaaacttggagaaggattaagatgtttaggatggccaaagctcactaatctgatttaatctgaataagacaaccacaagatctattataattaaatcttcaaacgtcaaaaaaaagragtaggtcctgaaagcactaagaaaaaggaagcatataacacacaagagaattccaatgtgcctggcagcagacttctcagcagaaacaatatggaccaggagagagtaggataatagaatcaagtgctgaagaaaaaaattgtcaaccatgaatacagtatccagcacagctctcatttagaaatgaaggagaggttaaaacattctaagacaaacaaaagatgaaggaattcattgtaaccatacctgccttaaaat

SEQ ID NO: 557096 - DNA, 472 bp, Homo sapiens
tgggacaccatcaaaaaaacaaatctacaatgttaaagttcaactaagaatgaaaaaaagttagaagcttattcagagaaataacagacaactttttaaacttggagaaggattaagatgtttaggatggccaaagctcactaatctgatttaatctgaataagacaaccacaagatctattataattaaatcttcaaacgtcaaaaaaaagaagtaggtcctgaaagcactaagaaaaaggaarcatataacacacaagagaattccaatgtgcctggcagcagacttctcagcagaaacaatatggaccaggagagagtaggataatagaatcaagtgctgaagaaaaaaattgtcaaccatgaatacagtatccagcacagctctcatttagaaatgaaggagaggttaaaacattctaagacaaacaaaagatgaaggaattcattgtaaccatacctgccttaaaat

SEQ ID NO: 557097 - DNA, 472 bp, Homo sapiens
tgggacaccatcaaaaaaacaaatctacaatgttaaagttcaactaagaatgaaaaaaagttagaagcttattcagagaaataacagacaactttttaaacttggagaaggattaagatgtttaggatggccaaagctcactaatctgatttaatctgaataagacaaccacaagatctattataattaaatcttcaaacgtcaaaaaaaagaagtaggtcctgaaagcactaagaaaaaggaagcatataacacacaagagaattccaatgtgcctggcagcagacttctcagcagaaacaatatggaccaggagagagtaggataatagaatcaagtgctgaagaaaaaaattgtcaaccatgaatacagtatccagcacagctctcatttagaaatgaaggagaggttwaaacattctaagacaaacaaaagatgaaggaattcattgtaaccatacctgccttaaaat

SEQ ID NO: 557098 - DNA, 543 bp, Homo sapiens
ccataaaaaaaaaaaaagaaaaggtaaacgacaaatgttttgtcagactaagaaaaaaagagaaaattcacatataatcagagatgaaaaaggatatactatgatagactctagagaaatataaggaaccatgagtaagtactacaaacaattatatgccaataaattgaaaaacttagaagaaatacgtacgctcgtggacacatataccctatcaaaattgaagaaagaagaaatagaaaatgtgaacacaccaatgacaactaatgagattgaaggagcgatttaggctctcagtcaaggaaaatccaaaagacttcacacagtagctcacacctgtaatctcacagtttaggagcccaaggcaggagaatcacyagaggccaggagttcaagattagcctgggcaacacaatgagactccatctctaaaaataaaaataaaaattatccaagtatagtggtgtgtatttgtactcaggaggctgaggcaggaggatcacttaagaccaggagtttgaggctgcagtcagctatgactgc

SEQ ID NO: 557099 - DNA, 504 bp, Homo sapiens
taggattccagaactctgctcttgggttctgagtttttgtccctcaagtacgattccagaacactgctatgtgggtctaaatatttgtctgtcacatagaattccacaacactcctgctgtagtctgaatgtttttccctcagataggattccagaaaactgttgctgggattragtatttgtccctcacgtacgattccagaacaaggctacgtgagtctgcatgtttgtacctcatataggatttgagaacactgctaagaggatctgaaagtttgtcccttaaataggattccagaacactgctgctgtggtctgaatgttgtcctcacttaggattctagaaccctcctgctgtggactgaatgtttgtccctcacttaggattccagaacagtgctacgagggtctgaatgtttgtcccacacttaggattccagaacactgatgatgtggtctgtatgtttatccatcacataggattccagaacaactctacgaggt

SEQ ID NO: 557100 - DNA, 504 bp, Homo sapiens
taggattccagaactctgctcttgggttctgagtttttgtccctcaagtacgattccagaacactgctatgtgggtctaaatatttgtctgtcacatagaattccacaacactcctgctgtagtctgaatgtttttccctcagataggattccagaaaactgttgctgggattgagtatttgtccctcacgtacgattccagaacaaggctacgtgrgtctgcatgtttgtacctcatataggatttgagaacactgctaagaggatctgaaagtttgtcccttaaataggattccagaacactgctgctgtggtctgaatgttgtcctcacttaggattctagaaccctcctgctgtggactgaatgtttgtccctcacttaggattccagaacagtgctacgagggtctgaatgtttgtcccacacttaggattccagaacactgatgatgtggtctgtatgtttatccatcacataggattccagaacaactctacgaggt

SEQ ID NO: 557101 - DNA, 504 bp, Homo sapiens
taggattccagaactctgctcttgggttctgagtttttgtccctcaagtacgattccagaacactgctatgtgggtctaaatatttgtctgtcacatagaattccacaacactcctgctgtagtctgaatgtttttccctcagataggattccagaaaactgttgctgggattgagtatttgtccctcacgtacgattccagaacaaggctacgtgagtctgcrtgtttgtacctcatataggatttgagaacactgctaagaggatctgaaagtttgtcccttaaataggattccagaacactgctgctgtggtctgaatgttgtcctcacttaggattctagaaccctcctgctgtggactgaatgtttgtccctcacttaggattccagaacagtgctacgagggtctgaatgtttgtcccacacttaggattccagaacactgatgatgtggtctgtatgtttatccatcacataggattccagaacaactctacgaggt

SEQ ID NO: 557102 - DNA, 504 bp, Homo sapiens
taggattccagaactctgctcttgggttctgagtttttgtccctcaagtacgattccagaacactgctatgtgggtctaaatatttgtctgtcacatagaattccacaacactcctgctgtagtctgaatgtttttccctcagataggattccagaaaactgttgctgggattgagtatttgtccctcacgtacgattccagaacaaggctacgtgagtctgcatgtttgtacctcatataggatttgagaacactgctaagaggatctgaaagtttgtcccttaaataggattccagaacactgctgctgtggtctgaatgttgtcctcacttaggattcyagaaccctcctgctgtggactgaatgtttgtccctcacttaggattccagaacagtgctacgagggtctgaatgtttgtcccacacttaggattccagaacactgatgatgtggtctgtatgtttatccatcacataggattccagaacaactctacgaggt

SEQ ID NO: 557103 - DNA, 523 bp, Homo sapiens
taggattccagaactctgctcttgggttctgagtttttgtccctcaagtacgattccagaacactgctatgtgggtctaaatatttgtctgtcacatagaattccacaacactcctgctgtagtctgaatgtttttccctcagataggattccagaaaactgttgctgggattgagtatttgtccctcacgtacgattccagaacaaggctacgtgagtctgcatgtttgtacctcatataggatttgagaacactgctaagaggatctgaaagtttgtcccttaaataggattccagaacactgctgctgtggtctgaatgttgtcctcacttaggattctagaaccctcctgctgtggactgaatgtttgtccctcacttaggattccagaacagtgctacgagggtctgaatgtttgtcccacacttaggattccagaacactgatgatgtggtctgtatgtttatccatcacataggattccagaacaaytctacgaggttctgaattgttctccgtca

SEQ ID NO: 557104 - DNA, 538 bp, Homo sapiens
tatgataaacatcctgcactcttccaaatcttacaataaaactgcttcaatttcacttgtttagcttttatatttagtttkttagttgatatatgcttattttaaggaagctgaactactctaacagaatccacataatttttatattagccaaactgcttctttctaactctggttctaatagttataaaaagataatgataaatttatgaagtagatacagtcaaacctgaatttcttaaagtatatacttagaatcggttataatttttagatattctttgttgacagtcttttcccaaactcatgatgtcctctctaggtaattttgcacactcataaattagaaatgaagacaaaaatttgaaaactacagtaatttaagagaatataggttttctacatgccatttctattggctactgaaaacagtgaaaataagtaaataaatagaaacctgtccagaagcgtctcttgcaaaaatccatctttctgagcctttttaagaattttactgtcttctttacttattttaagt

SEQ ID NO: 557105 - DNA, 538 bp, Homo sapiens
tatgataaacatcctgcactcttccaaatcttacaataaaactgcttcaatttcacttgtttagcttttatatttagtttgttagttgatatatgcttaytttaaggaagctgaactactctaacagaatccacataatttttatattagccaaactgcttctttctaactctggttctaatagttataaaaagataatgataaatttatgaagtagatacagtcaaacctgaatttcttaaagtatatacttagaatcggttataatttttagatattctttgttgacagtcttttcccaaactcatgatgtcctctctaggtaattttgcacactcataaattagaaatgaagacaaaaatttgaaaactacagtaatttaagagaatataggttttctacatgccatttctattggctactgaaaacagtgaaaataagtaaataaatagaaacctgtccagaagcgtctcttgcaaaaatccatctttctgagcctttttaagaattttactgtcttctttacttattttaagt

SEQ ID NO: 557106 - DNA, 538 bp, Homo sapiens
tatgataaacatcctgcactcttccaaatcttacaataaaactgcttcaatttcacttgtttagcttttatatttagtttgttagttgatatatgcttattttaaggaagctgaactactctaacagaatccacataatttttatattagycaaactgcttctttctaactctggttctaatagttataaaaagataatgataaatttatgaagtagatacagtcaaacctgaatttcttaaagtatatacttagaatcggttataatttttagatattctttgttgacagtcttttcccaaactcatgatgtcctctctaggtaattttgcacactcataaattagaaatgaagacaaaaatttgaaaactacagtaatttaagagaatataggttttctacatgccatttctattggctactgaaaacagtgaaaataagtaaataaatagaaacctgtccagaagcgtctcttgcaaaaatccatctttctgagcctttttaagaattttactgtcttctttacttattttaagt

SEQ ID NO: 557107 - DNA, 538 bp, Homo sapiens
tatgataaacatcctgcactcttccaaatcttacaataaaactgcttcaatttcacttgtttagcttttatatttagtttgttagttgatatatgcttattttaaggaagctgaactactctaacagaatccacataatttttatattagccaaactgcttctttctaactctggttctaatagttataaaaagawaatgataaatttatgaagtagatacagtcaaacctgaatttcttaaagtatatacttagaatcggttataatttttagatattctttgttgacagtcttttcccaaactcatgatgtcctctctaggtaattttgcacactcataaattagaaatgaagacaaaaatttgaaaactacagtaatttaagagaatataggttttctacatgccatttctattggctactgaaaacagtgaaaataagtaaataaatagaaacctgtccagaagcgtctcttgcaaaaatccatctttctgagcctttttaagaattttactgtcttctttacttattttaagt

SEQ ID NO: 557108 - DNA, 585 bp, Homo sapiens
tccagtaattccactcctgggtatctactcagaggaaaataagtcattatatgaaaaagatacttgcacacgcatgtttatagcagcacaatatgcaattgcaagaatttgaaaccagcctaaatgcccatcaatcagtaagtggataaagaaagtgtgttataaatatttaccatggaatactactcagccataagatggaatgaagtaatgcattcacagcaacctggatgaaactggacaccattattctaagtgaagtaactttggaatggaaaaycaaaccttgtatgttctcattcataaatgggagctaagctataaggatgcaaaggcataagaatgatacaatggtcttcggggactcagggaaaggctgggagtggtgaggtgggtgcggtgagggataaaacactacatattgggtatagtgtactctgctcgggtgatgggtgcaccacaaatctcagaaatcgccactaaagaacttattcatgtaaccaaacaccacctgttcccccaaaacctattgaaataaaaaaaaacatcatattcctcaaaaacctattgaaataaaaaataaat

SEQ ID NO: 557109 - DNA, 593 bp, Homo sapiens
gaacctgaatgtttgtctgtaacataggattccagaacactcccgctgttgtttgaatgtttgtccctcacataggattccagaacactgctgcttggatcagaaagtttgtcccttacacaggattccagaacactgctacgattgtctgaatatttctccctcacataagattccagaacactgttgctggggtttaaatgtttgtctgacacataggattccagaacactgctacggggttctgaaagtttgttcctcacaggtgattccagaacactccttttgtggtctgaatgttggccctgaagcagaattccagaacagtgctgtgtgggtctgaatgattgtcccttacatcgatgccagaacactgctgcaggggtctgaatgtttgtccctcacataggattccagaaaacttctaagagggtctgaatgcttgtccctcacacagaattccagagcactgytatgagggtctgaatgattgcaaatcacataggattccagaacactgctgcgggggtctgaacatttgtcaatcacataggattccagaacactgttgctggggtctacatgcatgtcca

SEQ ID NO: 557110 - DNA, 562 bp, Homo sapiens
ctcacttaggataccagaacactcctactattgtctgaaagtttgtccttcacatagagtatcagaacacggctacgatggtctgaatgttcgtaccacacttgggattccagaacactcctgctggagtctaaatgtttgtccctcacataggattccagaacactgctacgtggatctcaatgtttgttcctcacagtagtttccacaacactcttgctgtggtctgaatatttgtcaatcacattggattccagaacactgctacaagggtctgtatgtttgtccctcacataggattccaaaacactcctgctgtgktctgaatatttgtcaatcacattggattccagaacactgctacgagggtctgtatgtttgtccctcacataggattccaaaacactcctgctgtgttctgaatgtgtgtccaacacataggattccagagcaatcctactctggtctgaatgtttgtctattacatagttttccagaacactgctgcttggttccgagtgtttattcctcacataggattccagaacactgctactaggtt

SEQ ID NO: 557111 - DNA, 539 bp, Homo sapiens
gtctcaatgtttgttcctcacacagaatcccagaacactgctatgagagtctgaatgattttycctcacatagttttccataacaatgctgtcttggtctgaatgtttgtccctcacataggattccataccactgctgctggggtatacatgtgtgtctgtcacataggattccggagcactgctgctgggttctgagtctttctccctcacatagaactccagagcactgcgacgaggttctgaaagtttgtttgcaataaaggattccagaacactcccgctgttgtttcaatgtttgtaactcacataggattccggaatacttttgctgaggtctaaatgtttgtccgtcacttaggattccagaacactgctacaagggtctgaaggtttgtccctcacacagaattccagaacactgctacgatggtctgaatgattgtccctcacatgggactccagaacactgctgctgggttctgaatgtttgtccctcacataggattccatgacacggcttcagggttctacaggta

SEQ ID NO: 557112 - DNA, 539 bp, Homo sapiens
gtctcaatgtttgttcctcacacagaatcccagaacactgctatgagagtctgaatgatttttcctcacatagttttccataacaatgctgtcttggtctgaatgtttgtccctcacataggattccataccactgctgctggggtatacatgtktgtctgtcacataggattccggagcactgctgctgggttctgagtctttctccctcacatagaactccagagcactgcgacgaggttctgaaagtttgtttgcaataaaggattccagaacactcccgctgttgtttcaatgtttgtaactcacataggattccggaatacttttgctgaggtctaaatgtttgtccgtcacttaggattccagaacactgctacaagggtctgaaggtttgtccctcacacagaattccagaacactgctacgatggtctgaatgattgtccctcacatgggactccagaacactgctgctgggttctgaatgtttgtccctcacataggattccatgacacggcttcagggttctacaggta

SEQ ID NO: 557113 - DNA, 539 bp, Homo sapiens
gtctcaatgtttgttcctcacacagaatcccagaacactgctatgagagtctgaatgatttttcctcacatagttttccataacaatgctgtcttggtctgaatgtttgtccctcacataggattccataccactgctgctggggtatacatgtgtgtctgtcacataggattccggagcactgctgctgggttctgagtctttctccctcacatagaactccagagcactgcgacgaggttctgaaagtttgtttgcaataaaggattccagaacactcccgctgttgtytcaatgtttgtaactcacataggattccggaatacttttgctgaggtctaaatgtttgtccgtcacttaggattccagaacactgctacaagggtctgaaggtttgtccctcacacagaattccagaacactgctacgatggtctgaatgattgtccctcacatgggactccagaacactgctgctgggttctgaatgtttgtccctcacataggattccatgacacggcttcagggttctacaggta

SEQ ID NO: 557114 - DNA, 539 bp, Homo sapiens
gtctcaatgtttgttcctcacacagaatcccagaacactgctatgagagtctgaatgatttttcctcacatagttttccataacaatgctgtcttggtctgaatgtttgtccctcacataggattccataccactgctgctggggtatacatgtgtgtctgtcacataggattccggagcactgctgctgggttctgagtctttctccctcacatagaactccagagcactgcgacgaggttctgaaagtttgtttgcaataaaggattccagaacactcccgctgttgtttcaatgtttgtaactcacataggattccggaatacttytgctgaggtctaaatgtttgtccgtcacttaggattccagaacactgctacaagggtctgaaggtttgtccctcacacagaattccagaacactgctacgatggtctgaatgattgtccctcacatgggactccagaacactgctgctgggttctgaatgtttgtccctcacataggattccatgacacggcttcagggttctacaggta

SEQ ID NO: 557115 - DNA, 546 bp, Homo sapiens
caaacctcagagtcttgaaacaaaaatctttgtattgtaaacttcatcatgctaatttcatcamttcaaacgaaccttcccttgtttgagtttcctgcaactgtgtgacttagggttgtcgaactctttcaaatacacaggaaaatggaaacctcttttggtgtctagtgattgtataataaaacattttcagatgctaatcacatgctttgtgctttgttaatgaatgaaaagctaaggatattcttatttgaaaggtttaaaaatataataactgtcattatatctaattctgtctacatttctggtgtgaaatgagaagtcaggagccctgccatctacacagtgcatggttctaccagctatttctgtgtcacttcaagcaaatcacttctttactgccttttctttctttttatgtaaaatgtggataactctctctctcactgaattcacagtgactgtattatgtacaacaaaatgtattgaaaagcataaagctctataattaggtagaatgtttcctgtgatttataagctttttaa

SEQ ID NO: 557116 - DNA, 546 bp, Homo sapiens
caaacctcagagtcttgaaacaaaaatctttgtattgtaaacttcatcatgctaatttcatcacttcaaacgaaccttcccttgtttgagtttcctgcaactgtgtgacttagggttgtcgaactctttcaaatacacaggaaaatggaaacctcttttggtgtctagtgattgtataataaaacattttcagatgctaatcacatgctttgtgctttgttaatgaatgaaaagctaaggatattcttatttgaaaggtttaaaaatataataactgtcattatatctaattctgtctacatttctggtgtgaaatgagaagtcaggagccctgccatctacacagtgcatggttctaccagctatttctgtgtcacttcaagcaaatcacttctttactgccttttctttctttttaygtaaaatgtggataactctctctctcactgaattcacagtgactgtattatgtacaacaaaatgtattgaaaagcataaagctctataattaggtagaatgtttcctgtgatttataagctttttaa

SEQ ID NO: 557117 - DNA, 546 bp, Homo sapiens
caaacctcagagtcttgaaacaaaaatctttgtattgtaaacttcatcatgctaatttcatcacttcaaacgaaccttcccttgtttgagtttcctgcaactgtgtgacttagggttgtcgaactctttcaaatacacaggaaaatggaaacctcttttggtgtctagtgattgtataataaaacattttcagatgctaatcacatgctttgtgctttgttaatgaatgaaaagctaaggatattcttatttgaaaggtttaaaaatataataactgtcattatatctaattctgtctacatttctggtgtgaaatgagaagtcaggagccctgccatctacacagtgcatggttctaccagctatttctgtgtcacttcaagcaaatcacttctttactgccttttctttctttttatgtaaaatgtggataactctctctctcactgaattcacagtgactgtattatgtacaacaaaatktattgaaaagcataaagctctataattaggtagaatgtttcctgtgatttataagctttttaa

SEQ ID NO: 557118 - DNA, 546 bp, Homo sapiens
caaacctcagagtcttgaaacaaaaatctttgtattgtaaacttcatcatgctaatttcatcacttcaaacgaaccttcccttgtttgagtttcctgcaactgtgtgacttagggttgtcgaactctttcaaatacacaggaaaatggaaacctcttttggtgtctagtgattgtataataaaacattttcagatgctaatcacatgctttgtgctttgttaatgaatgaaaagctaaggatattcttatttgaaaggtttaaaaatataataactgtcattatatctaattctgtctacatttctggtgtgaaatgagaagtcaggagccctgccatctacacagtgcatggttctaccagctatttctgtgtcacttcaagcaaatcacttctttactgccttttctttctttttatgtaaaatgtggataactctctctctcactgaattcacagtgactgtattatgtacaacaaaatgtattgaaaagcataaagctctataattaggtagaatgttwcctgtgatttataagctttttaa

SEQ ID NO: 557119 - DNA, 488 bp, Homo sapiens
atctcttctgagaaaaccatcacagacatacccaaaataatgctttcccagctttccagggattccttaatccagtcaagttgacacctgaaattaagtctgcaagtccaccccttgtagatttggcacccatrtggacctccttaaaccatacataacttccaaataaaaagaaaacaaagcaacagttgtacctaacatgatgcaaagaacgtggtacaactctcctgtgattgtgattttctggattttagatgttaagaatttagactttaggactgggcatggtggctcatgcctgtattcccagcactttaggaggccaagtcaggaggatcacttgagcccaggagtttgaaatcagccggggcaataaagttagaccccatgatatggcttggctgtgtctccaaccaaatctcatcttgaattttagttctcatgatactcacatatcatgatggggacccagtgggaggtaattgaat

SEQ ID NO: 557120 - DNA, 488 bp, Homo sapiens
atctcttctgagaaaaccatcacagacatacccaaaataatgctttcccagctttccagggattccttaatccagtcaagttgacacctgaaattaagtctgcaagtccaccccttgtagatttggcacccatgtggacctccttaaaccatacataayttccaaataaaaagaaaacaaagcaacagttgtacctaacatgatgcaaagaacgtggtacaactctcctgtgattgtgattttctggattttagatgttaagaatttagactttaggactgggcatggtggctcatgcctgtattcccagcactttaggaggccaagtcaggaggatcacttgagcccaggagtttgaaatcagccggggcaataaagttagaccccatgatatggcttggctgtgtctccaaccaaatctcatcttgaattttagttctcatgatactcacatatcatgatggggacccagtgggaggtaattgaat

SEQ ID NO: 557121 - DNA, 488 bp, Homo sapiens
atctcttctgagaaaaccatcacagacatacccaaaataatgctttcccagctttccagggattccttaatccagtcaagttgacacctgaaattaagtctgcaagtccaccccttgtagatttggcacccatgtggacctccttaaaccatacataacttccaaataaaaagaaaacaaagcaacagttgtacctaacaygatgcaaagaacgtggtacaactctcctgtgattgtgattttctggattttagatgttaagaatttagactttaggactgggcatggtggctcatgcctgtattcccagcactttaggaggccaagtcaggaggatcacttgagcccaggagtttgaaatcagccggggcaataaagttagaccccatgatatggcttggctgtgtctccaaccaaatctcatcttgaattttagttctcatgatactcacatatcatgatggggacccagtgggaggtaattgaat

SEQ ID NO: 557122 - DNA, 488 bp, Homo sapiens
atctcttctgagaaaaccatcacagacatacccaaaataatgctttcccagctttccagggattccttaatccagtcaagttgacacctgaaattaagtctgcaagtccaccccttgtagatttggcacccatgtggacctccttaaaccatacataacttccaaataaaaagaaaacaaagcaacagttgtacctaacatgatgcaaagaacgtggtacaactctcctgtgattgtgattttctggattttagatgttaagaatttagactttaggactggscatggtggctcatgcctgtattcccagcactttaggaggccaagtcaggaggatcacttgagcccaggagtttgaaatcagccggggcaataaagttagaccccatgatatggcttggctgtgtctccaaccaaatctcatcttgaattttagttctcatgatactcacatatcatgatggggacccagtgggaggtaattgaat

SEQ ID NO: 557123 - DNA, 620 bp, Homo sapiens
aaagtttctaaaataaaataaggtctaacttggaaaaccaaaaccaatcactgagatattttcataatctaaaaagtcagtttcaaaagaacttccaaatgttttaaaatatgactatccttaagaataatgatgtagcattccaaggttttagtgttcaaccagcatttattaccacctgctgggtgcctgaggcaggacatttgtaatgagagctayaaacatgaattgaaaatccgctgcccataggttcacagttcctgtcaaagcatagagccccctgtagatagagccccctgtataagatgtcctgtgttctgggcgagaggatacactaggtctgcaggtatatctggtgggcagaacaagaaaggtgtcactgaggaggtgctatttgagttagttgtgaaaaatgtgtacgggtttatgaggcagatatgagaggcactttgttgaagttacaactcctaccaggcactcgtttgaattttctgtttcatttgctctttggaggttgcttgttggtacacttacatcttctatgccagtcttaaaagagcggagtgtgtgtgtgtctgtgtttagtattttttgcagagtttctttgtgtttccaagctt

SEQ ID NO: 557124 - DNA, 447 bp, Homo sapiens
atacctgcagctttgttcttcctcaaaatagcttcagccactcagggatttttgtgattctatatgaattttaggatttttttttctatttctgtgagarataccattgggattttgatatggattacattaaatgtgtagattgctttgagtaatatgtacactttaataatacagtactaactctttcaatccatgggttgtctttcaatttactttgatttaaatttctgtcatcaatcttttataatttgtagtgtttaagtctttcacttctttggttagttagttccaaagtagtttatttgatactgttttttaaatttccctttcagacaattcattgttagtgtttagaaatagcaatgatttttgtaggtcaattgtgtatcctacgactttagaaaatttattatatagtcagtccttcatatcaatgggttctgc

SEQ ID NO: 557125 - DNA, 447 bp, Homo sapiens
atacctgcagctttgttcttcctcaaaatagcttcagccactcagggatttttgtgattctatatgaattttaggatttttttttctatttctgtgagaaataccattgggattttgatatggattacattaaatgtgtagattgctttgagtaatatgkacactttaataatacagtactaactctttcaatccatgggttgtctttcaatttactttgatttaaatttctgtcatcaatcttttataatttgtagtgtttaagtctttcacttctttggttagttagttccaaagtagtttatttgatactgttttttaaatttccctttcagacaattcattgttagtgtttagaaatagcaatgatttttgtaggtcaattgtgtatcctacgactttagaaaatttattatatagtcagtccttcatatcaatgggttctgc

SEQ ID NO: 557126 - DNA, 596 bp, Homo sapiens
tcaatcttttataatttgtagtgtttaagtctttcacttctttggttagttagttccaaagtagtttatttgatactgttttttaaatttccctttcagacaattcattgttagtgtttagaaatagcaatgatttttgtaggtcaattgtgtatcctacractttagaaaatttattatatagtcagtccttcatatcaatgggttctgcaaccataaactcaatcaaccatgaacctaacgtgtacatattttccatctgtggtggtttgaatccccagatgtggacccatggatacatagggccaactgtacacgattttatgtgggggagttgatcatcacagattttgttatctgagggggtcctgaaacaaatccccagcagatatgaaagactgactgtattatttctaaccattttctttggagtctttagagttttcaatgtataataatcatgtcttctgttaacagaggtaactatatctttcctttcaattttgatcccttttatttctcttgcctgattgttctggctaggacttccagtactatgttgaataggagtgatgaggttagacatccttgtcttg

SEQ ID NO: 557127 - DNA, 596 bp, Homo sapiens
tcaatcttttataatttgtagtgtttaagtctttcacttctttggttagttagttccaaagtagtttatttgatactgttttttaaatttccctttcagacaattcattgttagtgtttagaaatagcaatgatttttgtaggtcaattgtgtatcctacgactttagaaaatttattatatagtcagtccttcatatcaatgggttctgcaaccataaactcaatcaaccatgaacctaacgtgtayatattttccatctgtggtggtttgaatccccagatgtggacccatggatacatagggccaactgtacacgattttatgtgggggagttgatcatcacagattttgttatctgagggggtcctgaaacaaatccccagcagatatgaaagactgactgtattatttctaaccattttctttggagtctttagagttttcaatgtataataatcatgtcttctgttaacagaggtaactatatctttcctttcaattttgatcccttttatttctcttgcctgattgttctggctaggacttccagtactatgttgaataggagtgatgaggttagacatccttgtcttg

SEQ ID NO: 557128 - DNA, 596 bp, Homo sapiens
tcaatcttttataatttgtagtgtttaagtctttcacttctttggttagttagttccaaagtagtttatttgatactgttttttaaatttccctttcagacaattcattgttagtgtttagaaatagcaatgatttttgtaggtcaattgtgtatcctacgactttagaaaatttattatatagtcagtccttcatatcaatgggttctgcaaccataaactcaatcaaccatgaacctaacgtgtacatattttccatctgtggtggtttgaatccccagatgtggacccatggatacatagggccaactgtacacgattttatgtgggggagttgatcatcacagattttgttatctgagggggtcctgaaacaaatccccagcagatatgaaagactgactgtattatttctaaccattttctttggagtctttagagttttcartgtataataatcatgtcttctgttaacagaggtaactatatctttcctttcaattttgatcccttttatttctcttgcctgattgttctggctaggacttccagtactatgttgaataggagtgatgaggttagacatccttgtcttg

SEQ ID NO: 557129 - DNA, 489 bp, Homo sapiens
tttcagtctttccccattgattataatattagatataggtttttcatatacagcctttatagtgttgaggtaagtttcttgtatacttattttgttgagagttttatcataaaagtatattgaattttgtcaaatgtgttttctgcatctattggaatgttatttttgtctttcattctgttaatgtggtataccacattattaatttttacacactgaaacatccttgtatcccatagataaattccaattggtcatggtgtatgaccttttcaatgtgcttttgaattcagtttgttaktttgtattttattgagaatttttgcacctgtattcattaaggatactggtctgtaattatttcttattgtgttgtcttcgtctagcttttaagttatggtaacatcggcctcatgaaatgagattgggactattctctcttctattttttctgaagagtttaagacattttggtgttagttcttcttt

SEQ ID NO: 557130 - DNA, 489 bp, Homo sapiens
tttcagtctttccccattgattataatattagatataggtttttcatatacagcctttatagtgttgaggtaagtttcttgtatacttattttgttgagagttttatcataaaagtatattgaattttgtcaaatgtgttttctgcatctattggaatgttatttttgtctttcattctgttaatgtggtataccacattattaatttttacacactgaaacatccttgtatcccatagataaattccaattggtcatggtgtatgaccttttcaatgtgcttttgaattcagtttgttattttgtattttattgagaatttttgcacctgtattcattaagratactggtctgtaattatttcttattgtgttgtcttcgtctagcttttaagttatggtaacatcggcctcatgaaatgagattgggactattctctcttctattttttctgaagagtttaagacattttggtgttagttcttcttt

SEQ ID NO: 557131 - DNA, 489 bp, Homo sapiens
tttcagtctttccccattgattataatattagatataggtttttcatatacagcctttatagtgttgaggtaagtttcttgtatacttattttgttgagagttttatcataaaagtatattgaattttgtcaaatgtgttttctgcatctattggaatgttatttttgtctttcattctgttaatgtggtataccacattattaatttttacacactgaaacatccttgtatcccatagataaattccaattggtcatggtgtatgaccttttcaatgtgcttttgaattcagtttgttattttgtattttattgagaatttttgcacctgtattcattaaggatactggtctgtaattatttcttattgtgttgtcytcgtctagcttttaagttatggtaacatcggcctcatgaaatgagattgggactattctctcttctattttttctgaagagtttaagacattttggtgttagttcttcttt

SEQ ID NO: 557132 - DNA, 325 bp, Homo sapiens
ttagtgttactgatttctccccttagctttgttgatattaactttatatatttaggtgttctaatgttgggtggatatatatttataatcttcccattgaagtgaacttttatcattatataatgaccttcttagtctctagtgacagtttttgatttcaagtttaytttttctgatctaagtatagatacccttgttcttttttggttaccattggcatagagtatcttttcccatcccttcactttgagcctctatgtatctttatatctaaagtgactcccttataaatatgtactgatgagtatcttttatgcattgtgcc

SEQ ID NO: 557133 - DNA, 325 bp, Homo sapiens
ttagtgttactgatttctccccttagctttgttgatattaactttatatatttaggtgttctaatgttgggtggatatatatttataatcttcccattgaagtgaacttttatcattatataatgaccttcttagtctctagtgacagtttttgatttcaagtttactttttctgatctaagtatagatacccttgttcttttttgkttaccattggcatagagtatcttttcccatcccttcactttgagcctctatgtatctttatatctaaagtgactcccttataaatatgtactgatgagtatcttttatgcattgtgcc

SEQ ID NO: 557134 - DNA, 325 bp, Homo sapiens
ttagtgttactgatttctccccttagctttgttgatattaactttatatatttaggtgttctaatgttgggtggatatatatttataatcttcccattgaagtgaacttttatcattatataatgaccttcttagtctctagtgacagtttttgatttcaagtttactttttctgatctaagtatagatacccttgttcttttttggttaccattkgcatagagtatcttttcccatcccttcactttgagcctctatgtatctttatatctaaagtgactcccttataaatatgtactgatgagtatcttttatgcattgtgcc

SEQ ID NO: 557135 - DNA, 325 bp, Homo sapiens
ttagtgttactgatttctccccttagctttgttgatattaactttatatatttaggtgttctaatgttgggtggatatatatttataatcttcccattgaagtgaacttttatcattatataatgaccttcttagtctctagtgacagtttttgatttcaagtttactttttctgatctaagtatagatacccttgttcttttttggttaccattggcrtagagtatcttttcccatcccttcactttgagcctctatgtatctttatatctaaagtgactcccttataaatatgtactgatgagtatcttttatgcattgtgcc

SEQ ID NO: 557136 - DNA, 360 bp, Homo sapiens
aaccctgtatgagttcgtgacacaggcctggccagtgaatacacttctaatcctggcacagatgaaactagagatggacatgaaatccaagcctcacacccaaagtcaatctctagtctcttattgaaactattagaagtgtttctctttttgctttattctgaggctgtggaactaaggaaatgtaaactggaggagtgatgatggccacattgcagcacaaagggaaaacttgtctgagaataaaatcaatggggaagaaaaaagcaaggaagaggagargagccaagccctgagtctctacgttcagccattctgaagctataccctggatttttccattatacgagtccacaaatt

SEQ ID NO: 557137 - DNA, 633 bp, Homo sapiens
tattgtatggtgtccatcacacctgggacactgggagccctaccaaaaccagcagtggtgtttctttgcctttctttaatccctgcttgccttctctgttgatttttggaaaataaattggccttgatcagtacagaaaatttatcctgctcaccattttatcatagttttctagggccccacagaaacctacaagccccgctgtgcacttagcacttctgaggacgttgacagaggtttgcttgattgttggagytgcttttctctgctgattcgaagttgcattttgtgctaggtcatggaaatacagaataacaacaatggtgcattcaatttatacgtgtagggcgctttgaattctgccaaagcgttttcaaccttgcggtctgatttaactacattatgctactgggttggatcagccctccgggatcatgccaacagtgaaagaagctgccgagtctggctttacttgtacatatcttttttttttttttgagtcttcaaaacttagatgagcttttgtgcaggctttgtaaaactgttgaagaaatccaggaagcttggcattgttcccacaggcctggtccctgggaggctgtgctctcagcagagattctcagcagggattgt

SEQ ID NO: 557138 - DNA, 633 bp, Homo sapiens
tattgtatggtgtccatcacacctgggacactgggagccctaccaaaaccagcagtggtgtttctttgcctttctttaatccctgcttgccttctctgttgatttttggaaaataaattggccttgatcagtacagaaaatttatcctgctcaccattttatcatagttttctagggccccacagaaacctacaagccccgctgtgcacttagcacttctgaggacgttgacagaggtttgcttgattgttggagttgcttttctctgctsattcgaagttgcattttgtgctaggtcatggaaatacagaataacaacaatggtgcattcaatttatacgtgtagggcgctttgaattctgccaaagcgttttcaaccttgcggtctgatttaactacattatgctactgggttggatcagccctccgggatcatgccaacagtgaaagaagctgccgagtctggctttacttgtacatatcttttttttttttttgagtcttcaaaacttagatgagcttttgtgcaggctttgtaaaactgttgaagaaatccaggaagcttggcattgttcccacaggcctggtccctgggaggctgtgctctcagcagagattctcagcagggattgt

SEQ ID NO: 557139 - DNA, 605 bp, Homo sapiens
cgtacaggctttcatttctcttggctggtagggttttgacacacaaagacctaaagtcagacatccgtgatgctgacagatactgggtttgaacaatcagattttactgagcatgcagaacctgcctttttttttttttgaatttgataatgctgatcaggaataatgacagtgtggctttgccatcatgggtcttgcacaaggaatctgtgtttctgcacgtgactactgaattgaaatctaataagtgctgtttttccagctttaagatcagatctgggacgtatcactgaaaacttttataggatatgtttcacgaaatgttgttcatgtcaatgccacaggtgatttaaaatacatttccccacttagaatggttattgtttatttatttgtagtgcatttgattctgacattgtgtcagatatctgagattcttagaaaatttctagaatacgtatgtacaaccgattggtctcattgccctcttattgcttgagaaaaagccattgtcaaatgaaaattcttctgccactctccaccctggaccatattatttagaagtccccagttgacatgctctwttctgccaactttggttttat

SEQ ID NO: 557140 - DNA, 569 bp, Homo sapiens
gccacatgggcctctgcatacagcagtgcacaacatggcagcttgttttattaaaatcagtgagagagagagagagagagagtctgctagcaaaaccaaacttacatcagtgatctcatcatctttgctgtattctattatttagaagcaagtcacaagtcccatctgcactcaagggaagaggactacacaggggcatgaatacctggaggtgagaatcactgcaggtggtctaagacggagaccccagacattagtcaacccagaacctgagggggcttgcagaagggaatagacggccagtcatatttccactttcattactacatccaataaacagaattttcttcagcacagtggacagaaatagggatttattaaatagaactgtttggattcaggggtatggctaactgcttcgaatgccagcttgcctagggtgtcccaaggagtttagagacagaaatactgcacccattatccaagagcaaatagacccaatggaacttcagacccttgacaacattaarggtctttaatctattaagtatgtgtaggactttcaaatt

SEQ ID NO: 557141 - DNA, 484 bp, Homo sapiens
gaattcaagccagttgcagacatttgcataagtaatgaggagtccaatgttaatcaccaaaacaatgagaaaaatgtctccagggcatgccagaggccttcatggcaacccctcccatcacaggacctgaagcctaaaaggaaaaaatggtttcctaggccaggtctagggcccctgctgtgtgcagcctakaaacttggtgccctacaccacagctgctccagccatggctaaaaggggtcaaggtacatacagctcaggtggtggtttcagagggtgcaagacccaagccttggcagtttccatgtaatgttgagcctgcaggtacacagaagtcaagaattgaggtgtgagaacctctgcctagatttcagaggatgtatggaaacacttgtatgtccaggcagatgtttgctgcaggggcagggcactcatggagaacctctgctagggcagtacagaagggaaatgtggggtttgagcc

SEQ ID NO: 557142 - DNA, 484 bp, Homo sapiens
gaattcaagccagttgcagacatttgcataagtaatgaggagtccaatgttaatcaccaaaacaatgagaaaaatgtctccagggcatgccagaggccttcatggcaacccctcccatcacaggacctgaagcctaaaaggaaaaaatggtttcctaggccaggtctagggcccctgctgtgtgcagcctagaaacttggtgccctacaccacagctgctccagccatggctaaaaggggtcaaggtacatacagctcaggtggtggtttcagagggtgcaagacccaagccttggcagtttccatgtaatgttgagcctgcaggtacacagaagtcaagaattgaggtgtgagaacctctgcctagatttcagaggatgtatggaaacayttgtatgtccaggcagatgtttgctgcaggggcagggcactcatggagaacctctgctagggcagtacagaagggaaatgtggggtttgagcc

SEQ ID NO: 557143 - DNA, 376 bp, Homo sapiens
atttttcaagtccctcaagatacaaactaattttccactcaaaatattgcttatgtcataataaatcagactgtgtccactgacagttagtgaataatacatttcaaatgaactgaacattcaagtcattgtatatagaacagcatctttgcaatttcttaacaattcagaaaaaaatgtttttctttgacttcccttaagcttgactaayttgaccaatacaataatttactaggagtttctgtgacttatgatttggttgcaaagagttaaagaccaaatgctacattctcagaaatgattcacaaatacacttcaaggacagtttggaaaccattgaggggatgagactctttatagtaagggaattaggaca

SEQ ID NO: 557144 - DNA, 500 bp, Homo sapiens
tgaatatatatatatggcatactaytcagccataaaaaggaatgaaataatggtattcacagcaacctggatgaaattggagattattctaagtgaagtaactcaggagtggaaagccaaacatccatatgttctcactcatatggaggagctaagctatgaggatgcaaaggcataagtatgaaacactggactttggggacttggggaaaggggttaggggtggcaaggtataaaagacaacacattgggtacagtgtacaccactcgggtggtgggtccaccagaatctcagagatcaccactaaagaactttttcatgtagccaaacactacctgttcctccaaaatctactgaaataaaaaaattaaaaattggagtaaataggtacaatgtctccaatttaccctcaaatggttcagaaaaagttgtgaatgcataaatatatgggtcaaatacataaccagctagtcctcattattcaaggattccatgtttg

SEQ ID NO: 557145 - DNA, 651 bp, Homo sapiens
tctcctaccactcctactcaacatagtattggaagttctggccagggcagtcaggcaagagaaaaaaataaatgctattcaaataggaagagaggaagtcaaattatctctgtttgcagatgacatgatcctatatctagaaaaccccattgtctcagcccaagatcatgtcctttgcagggacatggataaagctgaaaggcattatcctcagcaaactaacacaggaagagaaaactaaataccatatgttctcacttataagttggagctgaatgatgagaacacatggacacatggacacatgggggaaacaacaaacactgaggcctgtcggarctgggtgcggagagaggtagaacatcaggaggaacagctaacagatgctgggcttaatacataggttgtgggatgatgtgtgcagcaaaacaccatggcacacatttgcctatgtaagaaacctgaacatctggcacatgtacccctgaacttaaaataaaagttgaagaaaaaaaaggagacagttaattcatgatgcatatgatacgaaaaattaggtacacctaactaaaaaaaaacttctacctcacgtggcacacatttagtgagtcattcttgggattaattctcaggcctctgagcccaagttaa

SEQ ID NO: 557146 - DNA, 581 bp, Homo sapiens
taaataaatagaggtcgagaaataaatatagatatgtgtgtctacacaagtttatatatacaagtatttcctcattttgtttgctgagagagcctagaaacagtgacatcccaattgcagtgagcccatctggtacaaagatctttgtttctaaataccatcctccaatcaaagatattttgagaaatggctaattttccaggtagacagaaaaaaatacaaagttaacytagattatcttgtaatgccagaaaatgagaaattgttcaaaaacataaaaacatggagtatgtcaaaagacacaaaatcaacctgaaagagttcccaatggccaaagctggaactatttgaggacgaacaaaaaccccatatggattataatgctccctcaagaaataaatatccattaatccatactgatatagataaataaataaataattagagaagacggcgcatatttcccttacagaagagtgccaaataagaaacatgaaaggtatgaagaaaatagaaagtcatcattagagcatcacagtagtaactgttgcaggtaagatccactgatatatgctaacatt

SEQ ID NO: 557147 - DNA, 406 bp, Homo sapiens
ggtgagaactttccttatgtgagccaaacattccttttgttctttaaagagcacactttcatttttcttgaaggctgtgcctccccaaaacgcagattggtatgtgtgtgtgtgtgggggggggggggtgcgggggtgggttataraaaaaaagcaagggagtggccaagattgccaactagaagcagctagtacgcatggctctcaaggaaaggaaaggaagggccaaataaatagcaacaccttcgacgataacatccaggtacttgcactgaaattaatcaggaaaacaacctgacccaaagagaatgaagaaaagcaagacaggacaacggcccacctgggagcaacacagacccaggggattctcccctgcacaaagaagcagtgagtgaatgagtgaccc

SEQ ID NO: 557148 - DNA, 527 bp, Homo sapiens
gaagagagttgtaaattcaccacccagttacataaaggagcaggcgcatttaggttttgaaaggcactagattaacataaattaaaagcacccaaagtatgcttcatctaaatttaaagcatgaagaaaggtataaatgattattttttctacaccaaataaaatgatcttaactgattactactttgggttgacaatcattatgttataacatgttaagtcagtagttctccattgtaaaactgatccctctttttactttcttgatgaactcttaaaggacatctgttgtgggaagtcagggaccctgaayggagggaccggctggagccgaggcagaagaacataaattgtgaagatttcatggacatttatcagttccccaaattaatacttttataatttcttatgcctgtctttactgcagtctctgaacataaattgtgaagatttcatggacatttatcacttccccaatcaatactcttataatttcttatgcctgtctttaatctcttaatcacgtt

SEQ ID NO: 557149 - DNA, 558 bp, Homo sapiens
aatttaaaacttcttaagagacacaccatcagcaatggctgccaaagattcccatgatttgaggtcctccaaaaataagttcacaggtgaaaattataaatcacatgaataatccaccatgaacgaacatcagcaatcataaaaacagaatcaaaaccaaaagaacttcaaataaaagaacaagatattaaaaattataaatatgtttaaaattattaatgatgtaaaggagtaaataaaaacaccaaaaaggattaaacatatatgaaataaaatagaatttctggaaattaaaaatattttcattgacatttgtctgtttctgcttaggctatagaaagtaacaagaaaacatcactcccactttaacaatgaaaatcagccagattcaactacaaaatcagttttctggagcccttcactgtactgaagtcaaaaagaaatttactgaactaaaaaccaaaataataacaaggctctttgaggagaaagcaaagcagctttcatcactaacagagcagtgagaagaggagraagctgccacagatgtgaggagaa

SEQ ID NO: 557150 - DNA, 552 bp, Homo sapiens
tacaatcaacaaaataaagagacaacccatggaatgggagaaaatatttgcaaactacccgttttcaccactgtgattcaacatagtactggaggtcctacctagagcattcagacaagagaaagaaataaagggcatctaagttggaaagaagatggcaaattatccttgtttgcatatcacataatcttatatttggaaaaacctaaagactccacaagaaaactattagaactgataaggggataataaccagaatatataaggagctcaaataactgtaggaaaaaatctaataatccatttaaaaatggggaaacagtttgaataggcacttcttgaattaagacatgcaaatggcaaasaggcatatgaaaaagtgctctatatcatgataatcagagaaatgcaaatgaaaactatagtgagatatcatctcactccagttaaaatggtttatatccaaaagaccagcaataagaaatgctgacgaggatatgaagaaaagggaacccttgtacactgttggtgggaatttaaattagtacaacc

SEQ ID NO: 557151 - DNA, 330 bp, Homo sapiens
ttaaaaattaaaaaaataaaataaaattatatcaagtatcttctctgaccacaatgaaataaaactagaaatcaataatawgagaaattttggaaactatgcaaacacatggaagttaaacaatatgctcctgaatgaccagtgggtcaaagaagaaattaaaatgcaagttaaaaaaataccttgagacaaagaaaaatggaaacaacacacaccaaaatatatgtgatgcagcatgggcaattctaagaggacaattataacaataaatgggtagatcaaaaaaagaagagagatccaaaataaacagcctaaaattacgaccaaaga

SEQ ID NO: 557152 - DNA, 539 bp, Homo sapiens
atgaataagatctactattttatgcacaacgtggtgactatagttaataattacttaattgtacagtttgaaataacttagagggtaattggattgtttgtaactcaaagaataaatgcttgagatggtggataccacattcttcaggatgtgcttatttcatgttgcatttctgtatcaaaacatatcatgtatcccataaatatatacacctactatgtatccacaaaaattaaaaacaaaaacaaaaaagagaaaaacctcaacgtgtcaccaaaaaactgttagaacttttaaacaaattcagtaaagcttcaggatacaaaaatcattatacagaaatcagtatcattaaatacagcatatctggggccatatccacgaagccccaggtgtctgcakatctttgagaaaatctcatgttttaatgccttaacattgttctttgcatgctttcttcctgtgaaactctactattgcacatccttacatgtcagaatttttaatttttttccaacaacttaccatgaaaaatttca

SEQ ID NO: 557153 - DNA, 539 bp, Homo sapiens
atgaataagatctactattttatgcacaacgtggtgactatagttaataattacttaattgtacagtttgaaataacttagagggtaattggattgtttgtaactcaaagaataaatgcttgagatggtggataccacattcttcaggatgtgcttatttcatgttgcatttctgtatcaaaacatatcatgtatcccataaatatatacacctactatgtatccacaaaaattaaaaacaaaaacaaaaaagagaaaaacctcaacgtgtcaccaaaaaactgttagaacttttaaacaaattcagtaaagcttcaggatacaaaaatcattatacagaaatcagtatcattaaatacagcatatctggggccatatccacgaagccccaggtgtctgcagatctttgagaaaatctcatgttttaatgccttaacattgttctttgcatgctttcttcctgtgaaactctactattgcacatcyttacatgtcagaatttttaatttttttccaacaacttaccatgaaaaatttca

SEQ ID NO: 557154 - DNA, 522 bp, Homo sapiens
ctgggggaggaaaaaatatgcagtgtagcatagatggttttacttgtccactcagacacatgctcatacttattagatggatgtatcagatgcttcaaaagtcctgatgtgtagtagcacaaaagctgcttgtaaaaaggaagttgcaaaatgataaaaatttctgcagcagttcaggctcctgatgacaaagctggttctgataagtagttcttttgacatgcacagcagctttcactgttaagtcctgtgttccagcggtttcatttagaccataggaagttgaaagcaaagtttaaatgttctctgctgacaaaatgtggtatatatccatcaatggacttctactcagtaatgaaaggaacaaactaccaaaacctgttatatgtcatggaccaacctcaaaaaccttagctaagtaaaaagccagacatgtgaccacatattgtataattcygttgatttgaaatgtccaaaaaaggcaagttgatagagacagaaatggtctgatttacctcaaga

SEQ ID NO: 557155 - DNA, 579 bp, Homo sapiens
aaccctccagtgactgacacccaggcaaagtgggagatgacccaggaaggggctgggtcaaccaggcagcagaggcagctgcccatcaaccactgacacccccttctcctggtcacctgcctcacataccaggtgccactctgggtccgtttgtggggaaggtggaagctccgccgcttacagcccccagagctgcagaactagggagaattccatttggttttgttcagttctcaaatgagaaaatcttcaccaaccctttstaataccattgcttaggggccagcatggctggttcttcatgtttgctgcaaacacctgcaatttttccatcctgctaacttaaaagcaagaagccctgtgtgcatagtttaatgacagcaacctagtggggctaaaaatcattcacgtggctctatcgaaggctcaagcctgcagttctcgcaggaggcttgacctgtgacctctcctgtattcacccagtggcctccacactcggcctcgagccctgcacacattctgagaaaactagcttgacatctgaaaaatgaatgtaacgatggtgcccaagccagaagg

SEQ ID NO: 557156 - DNA, 523 bp, Homo sapiens
aacggaggcagggctgaagaaaggtagagacacaactacagacaataagatatcattcaaccttaaaaaagaaggaaattctgccatttacaacatgggtgaaactaaaatacattatgctaagcgaaatgagcctggcacagaaagaaagatactgtctgacctcacatatatgtggaatctaaaatagtcatagcagcacagagtgagaayggtagttgccagggttaagggtgggtgggaaaaatgggaagatgtcagtcaaaggctacaaagtttcagttatataaaatgaataaattctagagatctaatgtacagcatagtgactatagttagtaatactgtgttgtatacttgaaatttactgagagtatatcttaagtagtttcaccacaaaaaggtaactatgttaaaaaatgtaaattaccttgatttacaaggatatgtaaattaccttgactgtagtaatcagttcagtaggtttatgtagtatatgtatgtcaaaacatcacattgtaca

SEQ ID NO: 557157 - DNA, 427 bp, Homo sapiens
agagtcttgctctgtcaccaggcgcaatctctgctcactgcaacccccgcctcctgggtttaagcgattctcctgactcagcctcccgagtagctaggactacaagtgcatgccgcctgtatgtttagtagagacccggtttaccatgttggcctggaagatctctatcttttgacctagtgatctgcccgcctcggcctcccaaartgctgggattataggcgtgggccactgtgccctgtcctatttttttattttttattctattttaagttctggaatacaagtgcagaatgcgtaggtttgttacatacgtatacatgtgcaatggtggtttgctgcacctatcaacctgtcatttaggttataagccctgcataaataagccatttgtcctaatgctctccctccccttgcccccaacccc

SEQ ID NO: 557158 - DNA, 309 bp, Homo sapiens
ccctaccatatccttaattatgttaagtgtaaacatcttaaacaccccaatttaaaggcagagattgtcaagttgggtagaaaagcaagacccaactatatgctgcctataagaaacccatttgaaaaacaaagtaacaaataacctaaaaattaaaagatggaaaaaaatcycatgctaacactaatcaaaagaatactaggatgacaatattaatttcagacagagtagatttctgagcaaagaatattgccagtgttaaaaagaatcatcctaaatccaggtacagtgatgtgtgcctgtaaccct

SEQ ID NO: 557159 - DNA, 521 bp, Homo sapiens
cttttctaattgttctcagagctgtttcctaaactgattggaaacaattgcagacagggaatggagtgggaggtaggcgaggacctggaggctggccagagcttggccgtctgatggaggcagtgtcttggcagtggtctcaaggaccgggacagaggggaccaccgggagccaggctgccccatacggttcctgtgtctgagtagcaggggtagcaagaaggaaacactcactgaggtgttggaagcttcggtttaatcaccccaaaataataaatctcccgcctgctctcgggccctagagacccagctgttttccctttctctgctgacrctggtagagctccctggggattgcaccaggcgccaacagggagcaaggtcctagcctcctggcatcggattgtttgtgctttcttaacagaacaaaaattgcaactcttgagccatccatcacccccagaaagctagggagagccagatggggagagcatagggacttcccactgatttcagcctgag

SEQ ID NO: 557160 - DNA, 504 bp, Homo sapiens
attatattaaaaatttttaattgctataataattgcacatactaatgggagacatagtgatgttgcaatacatgaaatgtatagtggtcagaaaaagtaattagcatatccatagtctcaaacatttatcttccttaggatacattcagttatcctccttctagctattttacattattgttaactatagttatcctacagtgtttaattcctatttttgaccttagtttatcttctattctcttttctgcataaccaaaacagcttgataggctaattttctgcatttccagatcttgacctttggtttgttttagttggaatacaagtctgctataacaaaagccaaaacaccagtggcttcaacaagatagggctgyatttctactttatataacagtgtgagtgtgaacagcccagagctgatactgtgcctctgtggcattgaggacctaaaattccttgctgttatcctgttctcaactaatgacttccatcttgtgt

SEQ ID NO: 557161 - DNA, 590 bp, Homo sapiens
cttggacactccagtacaataaccagactgcacatcttttatagtccagtggattttctgcctaacaacagaagaaatcagctaagctatgatatagtttggagctagataagctttcgtttaagccttgactttgtgttgttacataacagcctggctttctttatgcataacattttattgggctccaagtccagctgaaatccattcatggactttataaggaaacagagactccaggttaagaatttctactctgagcagtaaagtagaaatgggaatagagacagggaaaggataagtaatgaattaaaatagattaaaaagtatcaaggagatattcagttccttaatttcctgactyttcttgaatgctctggggcatctcttttgtcagttgtaattaattaaaagattaattattatttccataatattgattagtttgtacttggacagtaaatcaacacttattgaatatccattagtctgcacaaggtacatacctctctgttaaatacaaggaaatttacaataactcatcaatcaattaatcaaaaaatatagactgaggaaccactgtgggagga

SEQ ID NO: 557162 - DNA, 464 bp, Homo sapiens
atattttcttgagtcgtagtttgccaacctctgatctggtgcattggttagaaaccgaaagactgaaattagccattcttgattagaacgaaaattccaccatttattgtacagccttaggcaaaaagcaaaaaaaaaaaaaaaacaamcaaaaaaaaaactcttgagccttaatgtatccttttttaaaggcacgacaatgcctatttaataatgttaagagttaaataaatttaagttcttaacatgtactcattgaagtcactttattgttgtgctaaaatgttttcaggtagagaagtaaatctgtgtcaccttgtttctttctctgtgtaaacagacaatagccaattcctacctttggttaacaactttcaacaaaacttgaagcttcttcctgtcattctcttttctgcctcaaaccatgctgattcttctagctttcacttaaagagatgtttttc

SEQ ID NO: 557163 - DNA, 557 bp, Homo sapiens
cttcacagttctccccccaccaagagcttctgcaggcatctaggccgtggtcaatttatgtgaagcttttatgaccctctgcaggaatgtccatagccatgatctcagttgccttgctttcttgtcaagccttgggggtgtctgtccacagcagatgttatcttagaacctcagtctaccatacatgtgcacatcactttgaggggtcagtaatttcactttaggctgagtcacttatcataagtgactccattttgagaaatttgggatcacaaaacattatcatatatcagatgatcatgtggtttattttccttcattctgctgatatggtgtattacgttgacygggtgtttctaggaagttgtttattttatctaggttatccaatttgttggcatataactgttaatagtactctcttataatctcttatatttctgagattcgtatttttttccttagttaatctagttaaagcttagccaatttttgttaactcttttgaagagctgacttttggcttcattcattttatccaatgtttttctattctc

SEQ ID NO: 557164 - DNA, 503 bp, Homo sapiens
atattgatcttgtaaccaacaaactccacaaactatttgtatatattatctatagattttttagattttgtatacaccagacagcataatacataaataaaatcagttttgattatttatttccaagagttatatatttgaaaatatttcttgttgaagtaaacctgcatatggtwaagtcatgaatcataagtatacatcttgattaattatcacaaagagagcaatgcaaaaattaattctaggtgagaaaaacatgacctgaacatatgctgggctcgtctcatttaattaactgacttataaccctgtaggaagaatttttataatattaaatttaatataaatgggatcataaatgtattagtctgggttctctagtgaaatggaaccaataggagacagatatatctatatctacatatttatagccatctctctctatgtatatatatatatatatatatttatatatatacacacacacacacacatatagacac

SEQ ID NO: 557165 - DNA, 503 bp, Homo sapiens
atattgatcttgtaaccaacaaactccacaaactatttgtatatattatctatagattttttagattttgtatacaccagacagcataatacataaataaaatcagttttgattatttatttccaagagttatatatttgaaaatatttcttgttgaagtaaacctgcatatggtaaagtcatgaatcataagtatacatcttgattaattatcacaaagagagcaatgcaaaaattaattctaggtgagaaaaacatgacctgaacatatgctgggctcgtctcatttaattaactgacttataaccctgtaggaagaatttttataatattaaatttaatataaatgggatcataaatgtattagtctgggttctctagtgaaatggaaccaataggagacagatatatctatatctacatatttatagccatctctctctatgtayatatatatatatatatatttatatatatacacacacacacacacatatagacac

SEQ ID NO: 557166 - DNA, 565 bp, Homo sapiens
ctaaaaaacaaaaataccatttgacccagcaatcccattactgggtatatactcaaaggaatataaattattctatcacaaagacacatgagtgcacatattcattgtagcactactcacaatagcaaagacatgaaatcaacctaaatgcccatcagcagtgatagactggaaatwgaaaatgtgatacacatacaccatgcaatactatgcagccacaaaaaaacaaaaaacaaaaaacaaaaaacaagatcatgttctttacaggaacatggatagtgctgtagaccaattatccttagcaaactaatacaggaacagaaaaccaaatactgcatgctctcatttataagtgagagctaaataataatgagaacacatggacatgtagaggggagtgggaagagaaaaaggatcaggaaaaataactaatgtgtactaggcttaatacctgggtgatgaaataatctgtacaacaagcccccatgacatgagtttacctaaataacaaacctgcacataaacccctgaattttaaatacgttttaaagaaggcgagataaat

SEQ ID NO: 557167 - DNA, 573 bp, Homo sapiens
tttttgcttagaattatcttggctatgtgggctctttttaaagagttttgaagtcgttttttttcaactctgtgaagaaagtcagtggtagcttgatgaagatagcatttaatctataaatgactttgggcagtatggccattttcatgatatttattcttcctatccatgagcatggaatgttttcccatttatttatgaygtctcttatttccttgagcagtggtctatattcaagatgagttgaatttgtgatctcctaaaactttaacactccttctgtacagaaattctggattcactctctagtctccagctggaactcaaatacaagcctgagaccaaaggctttattcttaactgttaataatcttcaccttaatgctaaaattatcttaaggtgtaaatcatgttataagccagtgtctcacaaatactaaatgttctgtaactgtgaattccttcacactgccctatgaatgaggggaaaatcaaataaactagagattttaaccaattatacaaggtaattgttaaattaattagcttccaatgtatagggcaaaataatgt

SEQ ID NO: 557168 - DNA, 579 bp, Homo sapiens
gaatgaggggaaaatcaaataaactagagattttaaccaattatacaaggtaattgttaaattaattagcttccaatgtrtagggcaaaataatgtttagtttaataggtgatttgtttgttcattttatcattggttccttccttcatatgtatattaatttttatttttgagaaaatatgaggtaaaatggataagactgaatttgattttgagcatggtgttcatgttttaaaatgaacaacatagaatgtaattcaactgtgccctgtatctctcaaaactcgtgtttccttcttttttcccctgatacagaataacacaatcaaaagagatgaaactgcctgaaatctataataaaaaatttttagtaccccaacttggtagtcatgatttttactgtattgttcccaatacaaattcatccttatatcttataacaataacatattttgacaagaccctaacagacaacatctaattattacactccctatggtaataagtgggcaaggttaaaataaaattgtatcagtttttaaaaaatattttttagtggacaagataaatctccagtat

SEQ ID NO: 557169 - DNA, 552 bp, Homo sapiens
gctttattcttaactgttaataatcttcaccttaatgctaaaattatcttaaggtgtaaatcatgttataagccagtgtctcacaaatactaaatgttctgtaactgtgaattccttcacactgccctatgaatgaggggaaaatcaaataaactagagattttaaccaattatacaaggtaattgttaaattaattagcttccaatgtatagggcaaaataatgtttagtttaataggtgatttgtttgttcattttatcattggttccttccttcatatgtataktaatttttatttttgagaaaatatgaggtaaaatggataagactgaatttgattttgagcatggtgttcatgttttaaaatgaacaacatagaatgtaattcaactgtgccctgtatctctcaaaactcgtgtttccttcttttttcccctgatacagaataacacaatcaaaagagatgaaactgcctgaaatctataataaaaaatttttagtaccccaacttggtagtcatgatttttactgtattgttcccaatacaaatt

SEQ ID NO: 557170 - DNA, 579 bp, Homo sapiens
gaatgaggggaaaatcaaataaactagagattttaaccaattatacaaggtaattgttaaattaattagcttccaatgtatagggcaaaataatgtttagtttaataggtgatttgtttgttcattttatcattggttccttccttcatatgtatattaatttttatttttgagaaaatatgaggtaaaatggataagactgaatttgattttgagcatggtgttcatgttttaaaatgaacaacatagaatgtaattyaactgtgccctgtatctctcaaaactcgtgtttccttcttttttcccctgatacagaataacacaatcaaaagagatgaaactgcctgaaatctataataaaaaatttttagtaccccaacttggtagtcatgatttttactgtattgttcccaatacaaattcatccttatatcttataacaataacatattttgacaagaccctaacagacaacatctaattattacactccctatggtaataagtgggcaaggttaaaataaaattgtatcagtttttaaaaaatattttttagtggacaagataaatctccagtat

SEQ ID NO: 557171 - DNA, 662 bp, Homo sapiens
tttaactttattttttttaaaaaagaaactgtttcccaaagaggctgtaccattttgcaytcccaccagctatgtatgaaagttcagttgcttcacattctcaccaacacttgttattgtcggttggttttttgtttgttttgttttgttttgtttcttagagtctcactctgttgcccagactggagtgcagtggtgtagtcatagctcactgcagccttgaactcctgaactcaagtgatcctcccatctcagcctcccaagtagctgagactataaggtttatgccaccatacttggctaattttttatttttactttttgtgtagagacagggtcttgctatattgcctaggctagtcttgaactcctggcctcaagtgattctcccacctagtagctaggattactggcatgagctaccatgcctagccatggaattgtcagtctttctactttcagatattctagtgggtttgagtgacatttcattgtggtttgtatttgcatctctctgataaggaatgatacagcacatctttacacatgtttacttactatctctatattttctttagtgcagtgtctgttcaaatattctgcctgttttttaatttggttgtttgtcttattaatgagttgtaagcattatttacatattc

SEQ ID NO: 557172 - DNA, 610 bp, Homo sapiens
actctgcattgcaaaccatcctaggtcggtgattcaaaacagcaatcatttattttgcaggtttaagtgtgtgctacaacatggcagggccaggctggacttcaggtcttatgctgcagactaaaggttgagctccaatttttccatgtaggttggttctggggttcaagctgaagaagcagttactacctgggggaagctttgctcatgacaatgacaaaagcacaggagagaatttctaagcacatttgtagcctctgcttgtaacacatctgctaatatcccattagctaaacaagtcacatggcaaacccaaaatcaaggaatggggaaatataccctgactccagcagaatgaactgccatgtcatatggcatgaaaacaagtagggatgaagaattagagccagtaattcaacctaccatgccacttaatcccaacaactctaggagttagacacttttatttttcytattttactgaagaggaaacagaggctgtgtcaagaaggtagtagtgagagggggtggagtgacactgagacgtgctaaccccagactccagctcttaaccacttatccatttcccgatgaaacagtgctctacaga

SEQ ID NO: 557173 - DNA, 610 bp, Homo sapiens
actctgcattgcaaaccatcctaggtcggtgattcaaaacagcaatcatttattttgcaggtttaagtgtgtgctacaacatggcagggccaggctggacttcaggtcttatgctgcagactaaaggttgagctccaatttttccatgtaggttggttctggggttcaagctgaagaagcagttactacctgggggaagctttgctcatgacaatgacaaaagcacaggagagaatttctaagcacatttgtagcctctgcttgtaacacatctgctaatatcccattagctaaacaagtcacatggcaaacccaaaatcaaggaatggggaaatataccctgactccagcagaatgaactgccatgtcatatggcatgaaaacaagtagggatgaagaattagagccagtaattcaacctaccatgccacttaatcccaacaactctaggagttagacacttttatttttcttattttactgaagaggaaacagaggctgtgtcaagaaggtagtagtgagaggggrtggagtgacactgagacgtgctaaccccagactccagctcttaaccacttatccatttcccgatgaaacagtgctctacaga

SEQ ID NO: 557174 - DNA, 439 bp, Homo sapiens
gcaacagagaaagaccctatctstaaagaatgaaaaataatttaaaaattaggagctcaaagatattttgtgggatgagcaaaccctggcaataggcatgacccagtgttcattagctttcttggtttggaggacactgtccagcaatgacatcagactctggctaccatgtggggactcatgtactaagtgcatattccctcaccaaatccccataggagcccccgaaatcaaaatccatgattgtctctaagttacaggtgaggaaactgaggcactcagttggcaggtggtagagctgggatttaagcctggaaatgtctgacaccagagcccagtctcttaattataatactctatgtaaggcagcttcagccttgaatattttttaagggcaagatgcctacatatgtggggagggaatgtgggtggagagtgg

SEQ ID NO: 557175 - DNA, 439 bp, Homo sapiens
gcaacagagaaagaccctatctctaaagaatgaaaaataatttaaaaattaggagctcaaagatattttgtgggatgagcaaaccctggcaataggcatgacccagtgttcattagctttcttggtttggaggacactgtccagcaatgacatcagactctggctaccatgtggggactcatgtastaagtgcatattccctcaccaaatccccataggagcccccgaaatcaaaatccatgattgtctctaagttacaggtgaggaaactgaggcactcagttggcaggtggtagagctgggatttaagcctggaaatgtctgacaccagagcccagtctcttaattataatactctatgtaaggcagcttcagccttgaatattttttaagggcaagatgcctacatatgtggggagggaatgtgggtggagagtgg

SEQ ID NO: 557176 - DNA, 598 bp, Homo sapiens
ttgcttgaaattaagacagaccccaagattttacaagctaaaaaataagattgtcattttcctgatggcaggggtcatatcatcttcatggatgtattcacagcacctgacatacaataggtactcaataaatatttgttaactgaagatataaaaacatgccgccccccgcagtggagaatatttggctcccactgattagaatagaggtcttttcagccaaggagggagaaattttcctcagagatgatgcatttgtgcagtttgtgcaggatactctcgctgtggatagatcccttggctcaggccaggcccgtgggacaaaccttggcttgccaaatggctgtcactcaatgaakgtttgttgaatgaatggatgagctgtagtttgaatgtcgggggagggagaagtaaataggaaccagaagaaattttaaggtagtttttatttttatgttttactaagcaagagccagaggaacagaaagctcagtccacttgctctaggccacacagtcattagaatgaggttaaaagatggggacagaaagaaggaaagtttgagaccacagcttgagcctcctccaactctcacaac

SEQ ID NO: 557177 - DNA, 482 bp, Homo sapiens
gggaccccatgagctcttctctgtagggccaagggaatgatagaaaatatttcttcttctgcatcatgatgggagagaattggtttgctcttctcccctaagcaaaatctaggccattggacaggaaaatattgggagcaatgcaggttttggaatcaggcataatgtttctatcccaactctctcacctgatggctgtattgactttggccaagccactcgttctttctaggcgtctggtgcttcrtctataaaatgaagacaatcccaatctttcacaatttctggggccaccgagtgaggtaaagactagaaagcacctagcacagtgcctgttacagagtagctttttcctaatggaaactccccaattcactccgagaagcacccaattcaagtgatttgaatttccaacagcccacaggagcctttggtaatgtctaaaaatagctggcttgaattctctttggacagttaggctc

SEQ ID NO: 557178 - DNA, 482 bp, Homo sapiens
gggaccccatgagctcttctctgtagggccaagggaatgatagaaaatatttcttcttctgcatcatgatgggagagaattggtttgctcttctcccctaagcaaaatctaggccattggacaggaaaatattgggagcaatgcaggttttggaatcaggcataatgtttctatcccaactctctcacctgatggctgtattgactttggccaagccactcgttctttctaggcgtctggtgcttcgtctataaaatgaagacaatcccaatctttcacaatttctggggccacygagtgaggtaaagactagaaagcacctagcacagtgcctgttacagagtagctttttcctaatggaaactccccaattcactccgagaagcacccaattcaagtgatttgaatttccaacagcccacaggagcctttggtaatgtctaaaaatagctggcttgaattctctttggacagttaggctc

SEQ ID NO: 557179 - DNA, 585 bp, Homo sapiens
ttctctctgcagtcactcatatgtgacagatttcttcccacccaccacaggccctttgcacctacgtttcccagcacctggccctcccttcccagctctcttgagctagtaagtttctcctcatttttcagttctatgcttaagcatctcttcccccaggaaacctttctggatgccacttgactaggtcagtgattttggttgagctgactgggctgcccacctccaggctgcaggttaggaccatgtctattctatgtgtctgtcatcatctgggaccaatcccccatcccccacccccagggcatgtcctttcatggtgatagcagagctccctcatggagagtaagcagaaacatatgatgtgtcttgagactgtgctraagacctacttccgccctcattctatgggccacaggaagtcacatggccatgcccatcatcagtagggtagggacgctgactccccacaaagagcaatcacccagtatatcactgtctggcccctctcacagcacccaagccttttctcttcttttctttttttgtcaagagacagggtctcactctgtcatccaggctgga

SEQ ID NO: 557180 - DNA, 526 bp, Homo sapiens
aggagattcccttggatgcctacaccaccaggaccctgggtttgaagcacaaaactgggtggctgtttgggcagacactgagctagcggcaggatttttcatgccccagtggcgtctggaacaccagcragacagaactgttcactcccttggaaagggggctgaagccagggagccaagtggtctagctcagtggatcccacccccatggagcccagcaagctaagatccacgggtttgaaattcttgctgccagtgcagcaatctgaaattgacctgagatgcttgagcttggtggagtgaggggcatccaccattactgaggcttgagtaggcggttttcccctcacagtgtaaacaaaactgctgggaagttcgaattgggtggagcccaccaaagcttcgcaaacctgctgtagccagactgcctctctagattcctcctctctgggcatgacatcttgaaagaaaggcagcagccccagtcaggggcttatagctaaaactcccatctccctgggacaga

SEQ ID NO: 557181 - DNA, 526 bp, Homo sapiens
aggagattcccttggatgcctacaccaccaggaccctgggtttgaagcacaaaactgggtggctgtttgggcagacactgagctagcggcaggatttttcatgccccagtggcgtctggaacaccagcaagacagaactgttcactcccttggaaagggggctgaagccagggagccaagtggtctagctcagtggatcccacccccatggagcccagcaagctaagatccacgggtttgaaattcttgctgccagtgcagcaatctgaaattgacctgagatgcttgagcttggtggrgtgaggggcatccaccattactgaggcttgagtaggcggttttcccctcacagtgtaaacaaaactgctgggaagttcgaattgggtggagcccaccaaagcttcgcaaacctgctgtagccagactgcctctctagattcctcctctctgggcatgacatcttgaaagaaaggcagcagccccagtcaggggcttatagctaaaactcccatctccctgggacaga

SEQ ID NO: 557182 - DNA, 597 bp, Homo sapiens
tattctttcccatttcaagaarttgttcttactttttgaaataaattttattgtgtatgtctaagttacacaacatgatgttatggaataaggatagatagtaaaatggttactaaagtgaagcaaattaacatatttattagcttacatagttactgaatttttgctagtttttgtggtaagagtagctaaaatctacttgtttagcagaaatctcaaatacagtacacttttagcactacatagcttcattaacacagctgcatttgtctccagtatagcacaatgccacgtacatagtactctatacatatttcttgagataaaatgggtgactaaatatttaacatgggtgacataccacaatatgtttacatccttcccttatcgttgaacatttatatagcttccattattctctattaaaaatattctgtcatgaatatacttatatatgaacttttgtaggtgttctgggttattctaattaaatatttgatattcacaaaaagaaaattgttatggcaacgttttcattttacgttgtgtatggtattattgatagaaattttttatattttaataattatttataaa

SEQ ID NO: 557183 - DNA, 298 bp, Homo sapiens
ccccgcagatattggccagctggcttgggcgaccacagyccctgggagtttatctcagacaatgattgactgtcacatgtgggtcaaaggtccccaaggtggggctaactctggggtagggggatttagagctcttggttagagcttgcccatggcatcagaagcaagtctaaagctacttttagctgagacacattttcacttagctccccatctctcctgccttctccttccccctcactcctaagagtacatcctccaatcaatcttcctcaataaatcacttgggcaagaatcc

SEQ ID NO: 557184 - DNA, 506 bp, Homo sapiens
gtaaaaaaaaaaaaattacacattaaytttcgctaaatttgtcaacattttctccaatgtagtatgcaccattagtattcactgtacctaacttttcaccaatagaacatataaatgttttcatatcacattgtagttgttgcaaatattttaaaataccatttatgatcattgctatttcaatgctacagtagttacgttataagatgtgcttctagattttttttttttttaatctttttgagacagggtctcactctgtcacccaatctggaatgcagtgatgcaattatagctcactgcagccttgaccttctaggctcaagtgatcctcctgcctcagcctcatgagtagctgcagccacagaggcacaccaccatacccagctaattttttgtatttttgtagagacagggttttgccatgttgcccagctggtctcaatctcccaggctcagatgatctaccctccttggccgcccaaagtgctggcattacaagcata

SEQ ID NO: 557185 - DNA, 448 bp, Homo sapiens
acctgaattcttgacttctgtgcaactgcacwctcaacaccaagtggaagctgccaaggcttggggcttccaacctctgaagccacagcctgagccatacgttggcccctttcagccacagctggagtggctgagacacagggcaccaagtccctagactgcacacagcacagggaccctgggcccagcctacaaaaccatatcctcctgggcctccaggcctgtgatgggaggggctgacgtgaaagtctctgacatggcctggagacatcttccccttggtcttggggattaacattaggctccttgctacttatgcaaatttctgcaactggcttgaatttctcctcaaaaaatgggtttttattttctactgcattgtcaggctgcaaattttctgaacttttatgctctgcttcctttataaaactaaatgcttttaacagca

SEQ ID NO: 557186 - DNA, 468 bp, Homo sapiens
tttaatcttctttccttgggcacacgagtggttggacatatgatccagccctatcaaatctgcttatcctacccctctgaccacaaactcaaaataagccagtgagagtgagtactcccaaggattttctgccagagttctgaggaaagagaaagtctcctttttccactgaggwtgttaagctgataagatacatctggagctgagcagttctatatctgccatatttagccagtttgtttgagatctacagctcctaggttcaaacatttcagaattttctgttatgcttatgctggtttgagttgggtttctatcatgggcaaatgaaaaggggcaacaaatacatcacactatattgggtaattacttaaactctggctcattgtcctcacctgtagaatttggataatggcatctaccatgcctacgcaccagaaaggcagtgatggtcagacctaacaattt

SEQ ID NO: 557187 - DNA, 565 bp, Homo sapiens
gcacagagatgaagaaataaaagtgctctcaatggaaatattttacaagaagaaaaccttagcttggttctctttgccatacattgaatagccactatcttcctgtcactcatcttggcattttatgcttttgagaaagaaacaygcagaagaaaaatgtcagaagcagcaattatgcaattgagctgatccacatttcaaagggcctggacagggcaaatgccatgactcttcattgctccagaaccaaaaactaattgagtcagcttcacctctttgctttgaacatgccttggctgaaggttaatcacattaatttctgtgagtcaatgttttgccctgtcctggaaaaaaaaaacaaaaactatcagccatttcaatagttagatccccatgtgacgattttcaaaatttcctgaaccaccagaatcctggcaactttgtaggtatgttttgggttcttttttctatgcaacaaatatcgggctgttgagagtctagaaactattgcctttgcaaatcagggtttcttaattgaattatagggaggacaagagaaaatggg

SEQ ID NO: 557188 - DNA, 565 bp, Homo sapiens
gcacagagatgaagaaataaaagtgctctcaatggaaatattttacaagaagaaaaccttagcttggttctctttgccatacattgaatagccactatcttcctgtcactcatcttggcattttatgcttttgagaaagaaacatgcagaagaaaaatgtcagaagcagcaattatgcaattgagctgatccacatttcaaagggcctggacagggcaaatgccatgactcttcattgctccagaaccaaaaactaattgagtcagcttcacctctttgctttgaacatgccttggctgaaggttaatcacattaatttctgygagtcaatgttttgccctgtcctggaaaaaaaaaacaaaaactatcagccatttcaatagttagatccccatgtgacgattttcaaaatttcctgaaccaccagaatcctggcaactttgtaggtatgttttgggttcttttttctatgcaacaaatatcgggctgttgagagtctagaaactattgcctttgcaaatcagggtttcttaattgaattatagggaggacaagagaaaatggg

SEQ ID NO: 557189 - DNA, 530 bp, Homo sapiens
caggaagaggtgtgctccacaggtggatccctgatggagaatctctgtcatggcagtgcaggatggaaatgtgaggttgaagtccccacacagagtccccactggaacactgcctaatggagctgtgagaagatggccactgtcctccagaccccacaatagtagtcccactgacagcttgcactgtgcacctgaaaaagccatagacactcaacgccagctgtgaaagcagctgggccagggagctctaccctgcaaagccacaagggtggatctacccaaggtcatgggagcccacctcttgaatcattgtgacttggatgtcagacatagagtcaaaggaaattacttaggaactttgagatttattgactgccctgttgaattttggacttgcatggggcctgcagcccctgttatgaccaatttctcccattcggtatgggagcatttatctgatccctgtatccccattttatcttgaaagtarcaaacttgcttatgattttacaggctcataggcagaaagg

SEQ ID NO: 557190 - DNA, 583 bp, Homo sapiens
aagacggaaatatacacatacatatacatattcatatattcatacacatatacctacatatatacttgtacatatgtatatgtttctatgtatatatgtgtgtttgcatatagaatatgtgtatcatgttacagaggtaaaaactgttataaaatgggaagttttaccttggctcttaccagggagtgattttagggcaagatgcaactttctctctctctctcttcaaactctttgtgcctctctctctctttgtggctctctctcagtcattaatttatttgctaagaattgttttagcagtaaacaaaagacatgcaaaattcttcctctcataaaatttgtgtttaaaaaggagaggacagacaatacacacaaataaatctagaaagccagcagggtaaagtgatgggcagctaggcagtgaccatggggaaggtaagggtggtgatggtgtttgaggtacatttctcaggcagctcyccaaattgtgattgaaagtttcctccgatggtgggagaagcctaatgcattgtttggtttcagtatagcattttcttttacatatttattcataatgtaa

SEQ ID NO: 557191 - DNA, 583 bp, Homo sapiens
aagacggaaatatacacatacatatacatattcatatattcatacacatatacctacatatatacttgtacatatgtatatgtttctatgtatatatgtgtgtttgcatatagaatatgtgtatcatgttacagaggtaaaaactgttataaaatgggaagttttaccttggctcttaccagggagtgattttagggcaagatgcaactttctctctctctctcttcaaactctttgtgcctctctctctctttgtggctctctctcagtcattaatttatttgctaagaattgttttagcagtaaacaaaagacatgcaaaattcttcctctcataaaatttgtgtttaaaaaggagaggacagacaatacacacaaataaatctagaaagccagcagggtaaagtgatgggcagctaggcagtgaccatggggaaggtaagggtggtgatggtgtttgaggtacatttctcaggcagctccccaaattgtgattgaaagtttcctcygatggtgggagaagcctaatgcattgtttggtttcagtatagcattttcttttacatatttattcataatgtaa

SEQ ID NO: 557192 - DNA, 591 bp, Homo sapiens
aaattgaaacccttgtaaattgtgggtagaaattcaaaatggtgcatccactatagaaaacagcttggaattttctcaaaaggctaaatataagattaccatataacccagcaattccactcctaggtatatactcaaaagaattgaaaataggaacttagatatctgcacacatatggtcatggcagtgttagccacaattgccaaaaggtggggacaacctaaatgttcatcagaaaatgaacagataaaaaaagtgtggtatacaacctatacataaaccactttcatatctgcctactaatgtatggacttcagagtaaggtggcctatgtcgatttttcccggattgttctttcgtttgtcattttttctcccttcctccctgctattttctcttcacaggacatgagacttcacaatctgctaaaatgagcttttgggacctacccatctaggaataaagcatcctagccatgaaggataagatgaagcctgagaccagagactcattttcttgtaaaatgctttctccgaaagattttaacaaaaaaaagtgtgggggccgggyggtgggggaggaagtgaaag

SEQ ID NO: 557193 - DNA, 584 bp, Homo sapiens
accataaatcaaatatacctaacagacatatatagaacattccacccaacaggatcaggagtacacatggaacattctccaggatagaccatctattgggccacacagaattctcaataaatttaaaacttctgaaatcatacaaagcatcttctctgaccacaatgacttgaaactataaatcaataacagaaggaaaactggaaaattcacaaatatgtgaaaattaaacaacacactcaaagaataaatcccaagaaaattgtaaaatattttgaaaygaatgaaaacaaaaacataaaataccaaaacttatgggatgcagtgaaagccgtgctcagagagaattttatagctataaacaccttctttaaaacaaatctctaattaggctgagcgcagtgactcacgcctgtaatgccagcagtttgggagtgaagttaaggtgggtggatcacttgaggtcaggagttcaagatcagcctggccaacatggcaaactcctcctctacttaaaacacaaaaattagctgcctgtagtcccagctactcgggaggctgaggcaggagaatcgcttgaaccc

SEQ ID NO: 557194 - DNA, 438 bp, Homo sapiens
gtttctgcagctgtatatgacaattccagttgctctgtgtgtcatcacaaacacttagcatcagcatttattttatattttgagtcattctgaagggtgtgtgttgtgcacatcattatgtttttcatgtttgttacctgaatgactaataatattaagcttctttttatgtgtttatttgccatctgtatatcttctttgctgaattgtcatttcaaacattttgctattaaaaatcaggtttctttttcyttttttctgtttcttttaaacatttcctgaaaattttcagtgtaacatctatgaaatcaaaggatgaagaagatcgtgcccaggtaatacccactctctttgtcttctaaagaaatgttgctttcctgatttcctcccttctcaatttagatgtgaaaatctaacaatacacataatgtacaccat

SEQ ID NO: 557195 - DNA, 450 bp, Homo sapiens
gtcctaggtttacatgggtctacagaaatcccaaacatcgtctacaaggtggctacagtagtcacagagcttagggaaaacatcagcatttgaaactgcaagatttaacatagccattggtgataaaaggacatagaaggcccgtatacctctgatactagggacaaatacaagtttctgaatattaggaagcagcacttagaaatattcataaacactttgggatgccsaggcgggtggctcacgaggtcaagagattgagaccatcctggccaacatggtgaaatcctatctctactaaaaatacaaaaattagctgggtctggtggcatgtgcctgtagtcccagctactccagaggctgagacaggagaatcacttgaacccaggaggcggaggctgcagtgagccaagatcgcaccactgcactccagcccggtgacagagcaag

SEQ ID NO: 557196 - DNA, 595 bp, Homo sapiens
gttttaggttggtcatttggggctaggtgtcagtaagcagtggctccatagtgattggatgctgccagaatgtggggacaattatacaattaagtgtctcagcacattgtacgtaaggggaggctcactcgagtgagaataaagttctgactggtaaagaagcagcagccasccagccctccacaaggaacaaagatattggaattttggaagctgcacaggaaccttgtttttatttcacattttatcacagtctcagagtaccttgtctaatgttgatgttccgtgaggttacttatctccaataaagcgacaatgataatggcctgtttctggtcatcagacccatttctggatgtcaggggctgattttctttctcaggcctcatcattcacacatattcattcaaaaaccattgaataagcacctcccagatgccaggcctgcagcaggcactggggatacagtggtgcataagtggggcccctgggggctctcagcctagaggggaagcagggacaggaggggtgacagaaaaaggcggagtgacagaaaagcacatggagtggaaagacatcagccagtgaggaggtg

SEQ ID NO: 557197 - DNA, 468 bp, Homo sapiens
tagaatttgtgaggagggatgtgtaagggacatgtaaggatttcaattgttttgggactttgtgactatttacatagatacatcacacaaggagctttagaacacactttacaagttataaacataaccaatagacaaatggaaaataatgatgatggagctaataagagttttatggtagagacaagtgggagaattttgtgataaatagttgactttttaaaattatgaatacagaaagatgaattttaagcatgttatttagaatcttaggaagtaccagaacaactaataacagaaacaaaaactgtgcctatagcygagtgggtgtggtaggagctcttttctgtattatcttgctcttctttaaattttgaattctttgcaccacacaataaatgaacgtaccttgtattattgtaaatattcccccatcactaacatatttgtgtttggtttctgttcagc

SEQ ID NO: 557198 - DNA, 468 bp, Homo sapiens
tagaatttgtgaggagggatgtgtaagggacatgtaaggatttcaattgttttgggactttgtgactatttacatagatacatcacacaaggagctttagaacacactttacaagttataaacataaccaatagacaaatggaaaataatgatgatggagctaataagagttttatggtagagacaagtgggagaattttgtgataaatagttgactttttaaaattatgaatacagaaagatgaattttaagcatgttatttagaatcttaggaagtaccagaacaactaataacagaaacaaaaactgtgcctatagccgagtgggtgtggtaggagctcttttctgtattatcttgctcttctttaaattttgaattctttgcaccacacwataaatgaacgtaccttgtattattgtaaatattcccccatcactaacatatttgtgtttggtttctgttcagc

SEQ ID NO: 557199 - DNA, 424 bp, Homo sapiens
attttgaattctttgcaccacacaataaatgaacgtaccttgtattattgtaaatattcccccatcactaacatatttgtgtttggtttctgttcagccccgtcacctgtccttagttcctctgaactatacagaggaacaaatcaatataaatgcagaagagaaaagatgagatcagctgattttggtgttgatatgggtaatatctgatttacattcagttttcatgtgggatctctgtgcctggcttggtttaatgattcaaagtgacratacagtcaacttctgagaaaatgatctatggaaaattgaaagtttaaaatattttcttcctcctaactttgaagaggacttgtttcatatcaaatctgcctgttcatctgcctgtccgtccactcactgtttatccatggatcttggtgtt

SEQ ID NO: 557200 - DNA, 549 bp, Homo sapiens
cctgaggcttctgaagttgtagccaaaagcaaatcatccacatactgaaggaccagagtgcctggacttgagagtggcctagatcttgggccagtacctgaccaaacagatgaaagctatccctaaaccactggggcaagactgtccatgtaagttgggatatgtagcctgtgggatcctcaaaagcaaagagaaactgggagtcagagtgcagggaaatacagaagaaggcatccttgaagtccagaacaatgaaccattctgcttcctcttggcccctattatagaacaccaaggttgccaggtttaataatgcctccagattttgttcagggcccagggctagcttttggggctttctcctgatatctgcggctgattcggtaataaacttatcttttaggatcarttgacccttgagtgagtcgggtgacaggggagtatattttcttaaggcctcctttgccactcaaggaaggcagaaggattttcttcctttccctgagttatggtggacatcattgaataattcatgggctttttcctaat

SEQ ID NO: 557201 - DNA, 531 bp, Homo sapiens
gagatttctttgcttgtttccttctgggccrgggagattagaggaggcttatcattaataggaaggggagctatagagggctaggatatgggggtaagctgagaggtccttctgtgggatgtaaattgcaagctttgcatagttgtggattctccttcaatgaaaagaaagcttggacataagatatttcacttcttttgccttctctcttacagcaaaaggtcaagctgcaggatagtattgtaatttatacttccctcaggtggccattttcccccatcaaagagagaatactggggccaagccacagtgcagaaaaaaatgagccacctctttttcagggtttgcaggtcaaattggtcccaatggcttaggatgcatttcaagggtgagcctgttgatgcctgggtgtttcccatctgaaaggcaaaatcgcccacagttttggtttgtttgttttgccccctgcccaagaacccacaacggtccctggaccctgctgatgaaaatagttgcgctcactgacgcagc

SEQ ID NO: 557202 - DNA, 531 bp, Homo sapiens
gagatttctttgcttgtttccttctgggccggggagattagaggaggcttatcattaataggaagrggagctatagagggctaggatatgggggtaagctgagaggtccttctgtgggatgtaaattgcaagctttgcatagttgtggattctccttcaatgaaaagaaagcttggacataagatatttcacttcttttgccttctctcttacagcaaaaggtcaagctgcaggatagtattgtaatttatacttccctcaggtggccattttcccccatcaaagagagaatactggggccaagccacagtgcagaaaaaaatgagccacctctttttcagggtttgcaggtcaaattggtcccaatggcttaggatgcatttcaagggtgagcctgttgatgcctgggtgtttcccatctgaaaggcaaaatcgcccacagttttggtttgtttgttttgccccctgcccaagaacccacaacggtccctggaccctgctgatgaaaatagttgcgctcactgacgcagc

SEQ ID NO: 557203 - DNA, 485 bp, Homo sapiens
gatatgggggtaagctgagaggtccttctgtgggatgtaaattgcaagctttgcatagttgtggattctccttcaatgaaaagaaagcttggacataagatatttcacttcttttgccttctctcttacagcaaaaggtcaagctgcaggatagtattgtaatttatacttccctcaggtggccattttcccccatcaaagagagaatactggggccaagccacagtgcagaaaaaaatgagccacctctttttcagggtttgcaggtcaaattggtcccaatggcttaggatgcatttcaagggtgagcctgttgatgcctgggtgtttcccatctgaaaggcaaaatcgcccacagttttggtttgtttgttttgccccctgcccaagaacccacaacggtccctggaccctgctgatgaraatagttgcgctcactgacgcagcagcagaaatacctcttgcccgagaacctgcaacggtcc

SEQ ID NO: 557204 - DNA, 571 bp, Homo sapiens
gccataccctgagggagggaagggatatccagggttggaagagtaacgccttttgtcctcacttgaataggaaggatatcatttctgaagctccccatatcctagcttcaggaatagcttttgttaggcctgctggtctgagaagggatcctaaaattccagatagtcccctgcccgacggggctttgggcaaaaattatgtctttctgattggtgagtctgggtgcctaaagaaggtaacacagtcctgaaatttatactagaaatcattcttataggaggaactaggaaagmaccagagacagggagtggtttttagaagcaggactagtctcagagaaaagaggcgagaggaagtttgtctgacaggcgctaggacccaggaggcaagggtcaggataaataggatagatgggcgagtctcgcttgggcgacaaggctttgagagttctgctcatggctgcagggtcaaccaacttgttttcgggaccctggagctgaatgacttccctctctgttgatgctcggctcagcccagaagtacatgaaaagtggaagctggttctaggca

SEQ ID NO: 557205 - DNA, 571 bp, Homo sapiens
gccataccctgagggagggaagggatatccagggttggaagagtaacgccttttgtcctcacttgaataggaaggatatcatttctgaagctccccatatcctagcttcaggaatagcttttgttaggcctgctggtctgagaagggatcctaaaattccagatagtcccctgcccgacggggctttgggcaaaaattatgtctttctgattggtgagtctgggtgcctaaagaaggtaacacagtcctgaaatttatactagaaatcattcttataggaggaactaggaaagcaccagagacagggagtggtttttagaagcaggactagtctcagagaaaagaggcgagaggargtttgtctgacaggcgctaggacccaggaggcaagggtcaggataaataggatagatgggcgagtctcgcttgggcgacaaggctttgagagttctgctcatggctgcagggtcaaccaacttgttttcgggaccctggagctgaatgacttccctctctgttgatgctcggctcagcccagaagtacatgaaaagtggaagctggttctaggca

SEQ ID NO: 557206 - DNA, 571 bp, Homo sapiens
gccataccctgagggagggaagggatatccagggttggaagagtaacgccttttgtcctcacttgaataggaaggatatcatttctgaagctccccatatcctagcttcaggaatagcttttgttaggcctgctggtctgagaagggatcctaaaattccagatagtcccctgcccgacggggctttgggcaaaaattatgtctttctgattggtgagtctgggtgcctaaagaaggtaacacagtcctgaaatttatactagaaatcattcttataggaggaactaggaaagcaccagagacagggagtggtttttagaagcaggactagtctcagagaaaagaggcgagaggaagtttgtctgacaggcrctaggacccaggaggcaagggtcaggataaataggatagatgggcgagtctcgcttgggcgacaaggctttgagagttctgctcatggctgcagggtcaaccaacttgttttcgggaccctggagctgaatgacttccctctctgttgatgctcggctcagcccagaagtacatgaaaagtggaagctggttctaggca

SEQ ID NO: 557207 - DNA, 584 bp, Homo sapiens
aggtgcaggtatttagcccccaaattctaaggaaaaataggacagaatagcaagcgaaaggggtctgatggtactcactgcttggagataggcgataaccccttcgtggttgccaaaatgtgtccggaattggttccttctggtgggttcttggactcactgacttcaagcatgaagccacagacccttgmggtgagtgttacagctcttaaagatggtgtgtctggagtttgttccttcagatgttcagatgtgtccagagtttcttccttccagtgggttcgtggtctcactgacttcaggagagaagccgcagacctttgcagtgagtgttacagctcttaaaggtagtgcatccagagttgtttgttcctcccggtgggtttgtggtctcgctgacttcaggaatgaagttgcagaccctcacatcatataaaaaggtaaattctaggtggtctagagatataaatattgaaaaaaaaacataagaaatgttaaaagaaaatttagaataatatttgtaccatcttacagtggcgggaaacattgctaagcaagccaggaaatctaggagatagaagaaa

SEQ ID NO: 557208 - DNA, 584 bp, Homo sapiens
aggtgcaggtatttagcccccaaattctaaggaaaaataggacagaatagcaagcgaaaggggtctgatggtactcactgcttggagataggcgataaccccttcgtggttgccaaaatgtgtccggaattggttccttctggtgggttcttggactcactgacttcaagcatgaagccacagacccttgaggtgagtgttacagctcttaaagatggtgtgtctggagtttgttccttcagatgttcagatgtgtccagagtttcttccttccagtgggttcgtggtctcactgacttcaggagagaagccgcagacctttgcagtgagtgttacagctcttaaaggtagtgcatccagagttgtttgttcctcccggtgggtttgtggtctygctgacttcaggaatgaagttgcagaccctcacatcatataaaaaggtaaattctaggtggtctagagatataaatattgaaaaaaaaacataagaaatgttaaaagaaaatttagaataatatttgtaccatcttacagtggcgggaaacattgctaagcaagccaggaaatctaggagatagaagaaa

SEQ ID NO: 557209 - DNA, 584 bp, Homo sapiens
aggtgcaggtatttagcccccaaattctaaggaaaaataggacagaatagcaagcgaaaggggtctgatggtactcactgcttggagataggcgataaccccttcgtggttgccaaaatgtgtccggaattggttccttctggtgggttcttggactcactgacttcaagcatgaagccacagacccttgaggtgagtgttacagctcttaaagatggtgtgtctggagtttgttccttcagatgttcagatgtgtccagagtttcttccttccagtgggttcgtggtctcactgacttcaggagagaagccgcagacctttgcagtgagtgttacagctcttaaaggtagtgcatccagagttgtttgttcctcccggtgggtttgtggtctcgctgacttcaggaatgaagttgcagaccctcacatcatataaaaaggtaaattctaggtggtctagagatwtaaatattgaaaaaaaaacataagaaatgttaaaagaaaatttagaataatatttgtaccatcttacagtggcgggaaacattgctaagcaagccaggaaatctaggagatagaagaaa

SEQ ID NO: 557210 - DNA, 568 bp, Homo sapiens
cactgttcaatagacaacataacctacaaatggaaagcacatatataattctaaaatttttaataaccgtattaaaaaacagamaacactaattttaataattttaattttattttacctggcatactcaaaatgttattattttgatatggaatcaatatataaacatattagcaaggaggtattttatattctcttcttcttaagaaatctttaaagagtattttacagtatatagcacatctcagttgagactttcaagtggtcagtaactgcatgccggtagtggctactgaacagcgaaactctaatggaatcaatttcatacaattccctagacaaggtcccttaatatacacctagaggtaacatttatggaacatctggtgcatgccaggcaggatgcccgtgtcttctctcatcataactctaagaagtaaatattattattctttctattttacatacaaggaaactgagacacagacaggccaagacaaacgcaagctcatggaggttgtaaattacaaagtcagaatttaaacccaggcagtctctcattgcagct

SEQ ID NO: 557211 - DNA, 568 bp, Homo sapiens
ataggaacgtctgtccagggtggttgttataattaaattagattagatgatgcatatgaagttatattagcacactgcgtgtaacatgatgtgaattcagcaagaagagggcatcatttttgtcaatctgattctcatccatcccaaacagggcacagaggaagctctctgttaacatcggctcaattgcatgataaattaatgtttttaacacccttaaattgggtaatttgaggagagtttamtacaaaagttaatgacaccaaaacatatttaaataataaaacaaccattaaaattatacatgcatgatctatttacaaatatgtggatggggctctggaaaaacaagatgaatgctgaatgccaggaatacaccagtggggagccatggccactgtggagtcaataagagtattgttccagcactttcttttcgaaccattgcaatacctcccagtagaataggaagaatgaacctgcccatcccatttgttgtgagcttgaccatatgacttgcctgggtcaatagaatacaaagtaggaagtgattggagcagaggctaga

SEQ ID NO: 557212 - DNA, 596 bp, Homo sapiens
ccaatagcaccaaagacctcctacaaatcctcaagcaaagaaataaatgcttgctcctgtagccactgaggttttgaggttgtaatgcagtaaaaactaactcctgcccccagattataatgggtgcagggagatgaagttactggattgggttgcctcagaggagctgtggccttcaagcggggaagtcaacagctcatccacactcccttcccctccttctgtctcctcttggtgcttcccattggctgaactcaactagaagtggagaggaagggagtcaatkagagaaccactgaagaccagctccctggggcacagcacatggtagggaaggatggagagtggatgtggaagggcaaacgggaattatcttgtattagtccattcttgcattgctgtaaagaaatacctgatactgggtaatttataaaaaaaattatcatttaattggctcacagttacataggctgtacaggaatcatggtggcatctgcttctggggcagctccaggaaataatcatggtggaaggtgaaggggaagcaggcatgtcttacattgccaaagcaggagcaagagggagagtggggaggt

SEQ ID NO: 557213 - DNA, 522 bp, Homo sapiens
atgagcattgcttactgagaagtagccatctggtttcatgcctctgctgcattccccccccattrgaccacatgggctgaagaaattagatctgtggacataagacttactcattttaaatatagagaatgattccatgggggcagtggtctactaatcagacagccacgaccaccactactaccaaaatgacaatagcagctcacagtcattcagagctttcctgagcctgatgcagagcccagctgtgagacctatgggttacccaggcaggctcataatttggcactctttttatcgttatgttttaatatttattcatcatctatctgttgggtgtcaggaaaactcagttactgttaataaaattgtatgcttttttctaactccaaatgtggatcaggtgtttcactcacagtaggaatggagaaaaagtcacgtttactcattcataccctggggccagcatggaatcaatgaactgaaaacattggacaacatgtttttcccttatctgtctta

SEQ ID NO: 557214 - DNA, 613 bp, Homo sapiens
atgagtcccactgtagccaccatgagctgctttgttgggggaaacaatgcaagggaaaggtgtgaggaggtgcacactcacctgagcctctagcacaggtgtcagaagtactatgaggttgaagactctcagctgtagcacatctcagatttggtcagtattcattttattcatacatccaattcaattcaattcaattcatttattcattcattcatttgagattgattaagaacccatgatgacaaagagtgttttatgaactagccggtgaattagacaatgtccctgcacttatggcttgcattctaatatggaggtaaaagaaataaggaaaccaagaaataaaatacttttagaaaataataagcaacatgaaggaaacaaggggggttgtgacagagcaacagtgggatctgggtagagagaacagtaagggaagacctgtctgaggaggtgasagcagagctgagatatgaatggtgagaaggaggcagtgaggacaggacctggaggaggagcattccaggcacatggaagagcagatacagtgaccctgggctgggagtgagcattgcttagacaaaggagagaaaggatgcagttgaggcaa

SEQ ID NO: 557215 - DNA, 518 bp, Homo sapiens
gagtgataataagaacaagtgggagactgctgcagaagtcctactccatatagaaggcacatctgagggatttcatgtttcatttcactccagccagactggaacccttgccagttcccttaacatgccaagctctttcatgcctcagggtttcccccacctgcaatactctttcagcccctttctttagctaagtccagttcttttttaggcctaaaaagtccctcttatccaatgtcttttcatctaggaagccttctctgaccccaagtgcaggtgagcgctccttgtttcttattcccatggcaaccagctcttcctcttaatggcacccatctgccttgcaactacttaagcaagtccaccgtcccctgctgttccctttatgagccccacgaaggcaataattacatcactgcagccgcaaatagaatgcacaaagaaggctctcrgcaaatatttatttcctgaaataatattttgttgaagtccgtggcaacttgagatttatgctactg

SEQ ID NO: 557216 - DNA, 392 bp, Homo sapiens
cctgggcaccacagccagcccgaggcccaggaagccgctcccaggctacgcgcggctggcgctgggcttccagtgccggactgccagaacaggctgggagcgctggggtcttggcgctctgcagccaccagagatctggccgagtgggtctggttacccccacccctgtgctgccacagcccggcagatcgcctagcttggctgccccagctgccgcatctgtccctctgtccgcgtctctgggagcccggcggggtgggaggttgctggctgttgctgtccactccggatmctgaggccgcccagggcactcctaccccgcctgcctcggtgcccctgacctgcagtcgtcacctgcactccaggcgggcaacaacagcgaggacaccctg

SEQ ID NO: 557217 - DNA, 631 bp, Homo sapiens
caccaacaagaacatcattattaaatgcatggaaaaactggagttatatgacagcaatattcaataaaggaactaaaggagaataaaagcaaacatttaaactagatcagagaagcagccccctgcacctacagttmgcaaggaaaacccgcattcgggaggctaagagtattccaagcttgggagtcagactctgacccctcgcattgagcctggggtggaacagaccaggaacctaaggattgaactgtgagctcaacatgcttccctgaccatcctcagcgtggcaacactccctcctttagtgccttaacatccaccagcaagaagctctcacatggcatcagtttaggattctgacctgaataaactgtcaaattcataaaccctttctccagtctgaagctgtaagagtgaccttcacagattttcttcacttatgcatcaacctaatggcagaagctggggcaaaattaatagagggttcatttggcctgaggttgaggacaacttcccaggatacacttccaattggccttggggagtgctctggagaataaagcagaggcttgagttttaagaaaaaaggacaaatcacaaagaacttacaaaagttgtccaggaattctca

SEQ ID NO: 557218 - DNA, 631 bp, Homo sapiens
caccaacaagaacatcattattaaatgcatggaaaaactggagttatatgacagcaatattcaataaaggaactaaaggagaataaaagcaaacatttaaactagatcagagaagcagccccctgcacctacagttagcaaggaaaacccgcattcgggaggctaagagtattccaagcttgggagtcagactctgacccctcgcattgagcctggggtggaacagaccaggaacctaaggattgaactgtgagctcaacatgcttccctgaccatcctcagcgtggcaacactccctcctttagtgccttaacatccaccagcaagaasctctcacatggcatcagtttaggattctgacctgaataaactgtcaaattcataaaccctttctccagtctgaagctgtaagagtgaccttcacagattttcttcacttatgcatcaacctaatggcagaagctggggcaaaattaatagagggttcatttggcctgaggttgaggacaacttcccaggatacacttccaattggccttggggagtgctctggagaataaagcagaggcttgagttttaagaaaaaaggacaaatcacaaagaacttacaaaagttgtccaggaattctca

SEQ ID NO: 557219 - DNA, 250 bp, Homo sapiens
gaaaagtcctatgtcaaggagataagactaatgcaaccaaaaccatctacatacaggttatgggtgaataaacatccacccagaagttttcatttctcttgggcaaatacatggaacaggattgctgggttataagggaagcatgtctctctccacctgycctccccaccacaagagaccccgtcagaatctgtttagcccttgaggggctcttcccaattccgctggagaaagggcaggacatctcgag

SEQ ID NO: 557220 - DNA, 619 bp, Homo sapiens
  misc_feature 47, 51: n = A,T,C or G
gatggtcatttggatccatgctgtcttgctgatgttatccagccacnttcnccttttagcctcatatcttcctgctgcatgacctgcaaaatgtatcctctctcaacctcagtctcttcttcttcaaagtgcagatgataacagaatttacctctagagttgttctgaatagtacacgagtttaacatttgtaaaaattttagaacaaagtcaagtacatagtaatctatgttaaatgaaatcattctgaaactccttctcacagttatcccagttgccattgcttgtagtacttagaacaatgttcaatatcatatcaagtgatacaattttacttggcaatttagaaacagttattgacttcccattgctttcagagaaaagcctaaatttgttatcatcatatacaagaacttcarcatggcccttatgaccctctctggtctcagtcagtaagtcaataaacatttattaggcattctctgttgtccttctctatgccatgcactggggatatttttgagctactgtaaatagtaatgtttttcaaatttcagtttccagttgttcattgccagtgtgtagacatacaactaattttttaaatactggccttgtt

SEQ ID NO: 557221 - DNA, 530 bp, Homo sapiens
aaatgggtcaatgaagaaattaagaaagaaatttaaaaaattttgaaacaaatgaaaatggaaatacaacataccaaaatctatgagatacagcaaaaacagtacttagagggaggtttatagcaataaactcacagggcaaaaagtaggaaggcttcaaatcaacagcctaaggatgtacctcaagaacctaggaaaagcaagaacaaaccaaaccccaaattcaaacaataaaagaaataattaagatcagagaaaaaataagtgaaactgagattttttaaaaaatactgaagatacagaagagcaacaaaacaaaaagttgggtttttgaaaagataaaatcaacaaaccattaactgaactaaccaagaaaaaagaaagaagactcaaataactaaaaagaggaatgaaaaaagatacatgacaactgagaacatagaaataaaaagaatcattaaagmctattatgaacaactatacaacaacaaattgggagactaaaaagaaattgataaatttctgaatta

SEQ ID NO: 557222 - DNA, 431 bp, Homo sapiens
caaaacctttcctatcataccaaaagcagaaattcataaagaggaagagatacatttcaaatagaatcaaagactaggcaygtagattgttcaataaccaaattaatgaagaagaataaagtttatcaacatattgcaggattatataaagttctgatttaacataaaatgaagataacacaaaactctttacatatttatattagtgacagattgattaatgagtgtcattacctccaggagtatttaagtttaaccagttatctctgtctctctcgctctttcacacacacacacacacacacacacacacacacacacacgacccaaaatccccagaaatctgacagttcacatatgtaagaatcttgatatagggcttgcccaaatttgacaacaatccttaaaatcaacatgacattacaaataat

SEQ ID NO: 557223 - DNA, 569 bp, Homo sapiens
caagacaatattaatgggcttaaatttaagagatgagataaaaggtatttaaaaattattagaatgagcaytttacaacattgtgtatgcggttgaaaagcgaagtcaccaactttagtggaagaggaagaaaggaaggggtgggatctggcctaggaaaatttattgtctagaccattctggaaaaaaaaaatctatagaacctgttatccttcaagtccaatgtacattatttgaatgatggataccttaaaagccctcacttgaccactgtgtaatcaatgcatgtaaccaaattgcacatgtatctcataaatgtgtacacatttcttttaagttttgagaatcccttgtctaagccacgacatagacatgggtatattttgctggagatcaaaaaataaaaccaggtgtttctacatgttgtcagggctgagaatcactgatgccagaggaacatttcagtttcaggtgccagacatcagctaattaccctatggtacggagagccaattgcacgaatactttttcctcttttggtagtgggaaggggcagggtatacagattc

SEQ ID NO: 557224 - DNA, 569 bp, Homo sapiens
caagacaatattaatgggcttaaatttaagagatgagataaaaggtatttaaaaattattagaatgagcactttacaacattgtgtatgcggttgaaaagcgaagtcaccaactttagtggaagaggaagaaaggaaggggtgggatctggcctaggaaaatttattgtctagaccattctggaaaaaaaaaatctatagaacctgttatccttcaagtccaatgtacattatttgaatgatggataccttaaaagccctcacttgaccactgtgtaatcaatgcatgtaaccaaattgcacatgtatctcataaatgtgtacacatttcttttaagttttgagaatcccttgtctaagccacgacatagacaygggtatattttgctggagatcaaaaaataaaaccaggtgtttctacatgttgtcagggctgagaatcactgatgccagaggaacatttcagtttcaggtgccagacatcagctaattaccctatggtacggagagccaattgcacgaatactttttcctcttttggtagtgggaaggggcagggtatacagattc

SEQ ID NO: 557225 - DNA, 597 bp, Homo sapiens
aggagtaatcaaacactatgaaggcaaaaaataaataaatcaggaataaagcattacacacaattattttaaatgttattttttccaaattttgtgatgtcagtcacatttctcagttttcttaaattgatggcttttgcagtttctcctctaattctaaataactattcacttttgaactgaaattttacaattttttttcttaaagcagtccacaaaactgtggcagttttgaaccctataaaacatggattgacacttacagccagccatcagttcatcctkcccccatccaccgtgcctcatccaaagatataatctccttcaccccatagtctcagctgcccccaaagtactcaatacctatgtgcccaatgaacagccaaggctttttaaaaattattattaacaaaagtggagaggaagatatttctgacattttgttgaggaagttgcgatgagagtggctttgaacttataaccctgagagcagctgattttgctaacctttgggataaacttgaccatgagtactaaagaacaaggctacaagttggggataattcaggattctccacactcattttgtataagcct

SEQ ID NO: 557226 - DNA, 532 bp, Homo sapiens
gttccaaccttcagaaccaaccagctaccttctgcagattagggatgtttggagaggttgacgaggaatatgatggacagaaaatctggcagaggctcccagttggaagaggtcaggaatcagggactctggaactccatcttgagttgtcccaagattaaataccccagaaggcatctcacgggtcacccagagaagggcagcaaccctggctggcagccccttcccctggcaccaagccrggactggactgggtggagtcaggtcattcctcagatggaatgtggggctgccaccagataaaggaggtgtggttcccgggcggccaaaagcacagtgtaagttccttacactagggcttccaagaaacccttcctgctctagtccctggggaggggcctcagcagccctggtctggatgtttggacacagctcccccgcccccaacctaggcacctccaagggtatggggagcctggctgaaggacagttcagggtcccagataaatgaaaggcagagaaagggttccag

SEQ ID NO: 557227 - DNA, 522 bp, Homo sapiens
catagctgctactttgcatcctgtgacctacgtctctccattccctctccccacctccggcccatcagccctgttttattcactatttctgtataactgacttttgcgtttttagatttcacatgtgagatcatgcaatatttttttctttctgcatctgtcctagttcccttagcataattaaggactgaatttctaatcttaattcattttcatttaacaaactacatgcaactaattgttaccaaatggtgtagcacagctctagggcgctagggaaggaagccgaaaagaccttttcttgactttgaggtctatggtacagccagagaggccgatggggcagatggggccctgggractggggtttggggacagggcaggagcaggttaggtttgatgggacatggctgggatcccttcccatgggagacctcttcctctgtgacacacacaactattaaataaaggaattcactttctcaaaaacacatttcctttgtctctagccttttctccctt

SEQ ID NO: 557228 - DNA, 522 bp, Homo sapiens
catagctgctactttgcatcctgtgacctacgtctctccattccctctccccacctccggcccatcagccctgttttattcactatttctgtataactgacttttgcgtttttagatttcacatgtgagatcatgcaatatttttttctttctgcatctgtcctagttcccttagcataattaaggactgaatttctaatcttaattcattttcatttaacaaactacatgcaactaattgttaccaaatggtgtagcacagctctagggcgctagggaaggaagccgaaaagaccttttcttgactttgaggtctatggtacagccagagaggccgatggggcagatggggccctgggarctggggtttggggacagggcaggagcaggttaggtttgatgggacatggctgggatcccttcccatgggagacctcttcctctgtgacacacacaactattaaataaaggaattcactttctcaaaaacacatttcctttgtctctagccttttctccctt

SEQ ID NO: 557229 - DNA, 522 bp, Homo sapiens
catagctgctactttgcatcctgtgacctacgtctctccattccctctccccacctccggcccatcagccctgttttattcactatttctgtataactgacttttgcgtttttagatttcacatgtgagatcatgcaatatttttttctttctgcatctgtcctagttcccttagcataattaaggactgaatttctaatcttaattcattttcatttaacaaactacatgcaactaattgttaccaaatggtgtagcacagctctagggcgctagggaaggaagccgaaaagaccttttcttgactttgaggtctatggtacagccagagaggccgatggggcagatggggccctgggaactggggtttggggwcagggcaggagcaggttaggtttgatgggacatggctgggatcccttcccatgggagacctcttcctctgtgacacacacaactattaaataaaggaattcactttctcaaaaacacatttcctttgtctctagccttttctccctt

SEQ ID NO: 557230 - DNA, 607 bp, Homo sapiens
ttctcttggcccttttccccacctgctgagacacatgtattctggtgcattctctcaacagagaaatgtggagtcacgcacagcatctatggaaatatgtacacactttctttcccatcctgcatgctcgtgcaccacctatactccctctgttgagcatactcacagttgttccataagcattccatatgttttggtattttatgttttcattttcattcattcccagaatgacttatttcccttataattttttttctttgacccatcggttgtttaagagtgtattgtttaatgtctgcatgcttttttaattaactagttttgcttctggtattgattcctacctcctttcattgcgtttggagaatataattcatataatttcaatctttatgaatttgttcaaacttcttttgtagcctaacatgcctcattctggaaaatgttccatgtgcacttgaaaaaatgtgtattctgaagttgttgggtggcacgttcyagagaggtctgttaggtctagctggtttttaatgttgttcaagtcctctatttctttattgaccttctgtctggctgttctacccatcactgaaggtggaatgtt

SEQ ID NO: 557231 - DNA, 623 bp, Homo sapiens
tgagtttcttaatcctgagttctaattcgatctcactgtggtctgagaggctgtttgttatgatttccattcttttgcatttgctgaggagtgctttaataccaattatgtgatcaattttagaataagtgtaatgtggtgctgagaagaatgtatattctgttgatttggggtggagagttctgtagatgtctattaggtctgcttgttccagagctgagttcaatccctaaatatccttaataattttgtcttattgatctaatattgacagcggggtgttaaagtctcccactattattgcgtgagagtccaagtctctttgtaggtctgtaagaatttgctttatgaatgacgttgctcctgtattgggtgcatatatatttaggatagttagctcttcttgttgcatttatctctttgccattatgtaatgcccttctctgtcttttttgatctttgttggttkaaagactgttttatcagagactaggattgcaacccctgtcttttttttgctttccattttcttggtaactattcctccatccctttattttgagcctatgtgtgtctttgcacatgagatgggtctcctgaatacagcacactgatgggtctta

SEQ ID NO: 557232 - DNA, 581 bp, Homo sapiens
gtcaatttgttatgtaatgataggtaattaacacactttcttaggaagaagatggaaagatggccacacgattgacggtaaggccccactaattgctgtgaagctcaaaataggatattgtagggacaagcctggtacatagtaggctctcaataaatttcacttctcttcctctcctcataagttggcagtctcaggatgccaatcatatgggaaatattcaaactgaacccagtgccaggattaacccaggaaaatgccagcagaagtcaaaaagccaggcttcctttgtggaagataaaatcattttacatcatacaggaggctgtgcacaaagcaaaaactgtttcataatcctgccatgtgaaccagctgggattttctttcacaaaaattggattttgatttatatgtcaataaatgcccccagaaatctcatcatttgaaagttmatcaatctccactgaaactgcagatacagccctggaggaacctcccagggaaatatggcactcatttaccagctcccccacccccctgctgatgggggcatgaaaaagggagtgagcggcaggggaaat

SEQ ID NO: 557233 - DNA, 627 bp, Homo sapiens
ccccgaaagaatttgagagtgcctggacactcttaaactgacaggacgtggggtttgggttctgaagcaagagaatggcatatcagatttgaatattgtaaacagcattccagctgcaatgtgaagaacaggttggagaggcaagactgggagcaggaagaccagttaggatgctgtttcagtcctgggatgagtaataatggtgccctggatgaaggtggcaaaggggatggggagatgggaatggatgtaagagctcttggggaattcattttggcaagcttggtgattaacaagactggacagagagggctgctaggatgacactagtttgtgacttaagtaagtgagggaatagtggcaacatgcagaatggaattgtgaaagacaaacaacataaccagtggccaatcagaattctcagaatggtcccagaagagcttttcactaaagagataggaaagtctcaagtcaggagagcacagcctytagctaaaagaaaattgccccaactcagcgacttcatgcattagaccatgaaaacctctgccacagacattccctagaatatcctcttgggggacattatgacctagctacaaataagtcacaacatccctttaaacc

SEQ ID NO: 557234 - DNA, 529 bp, Homo sapiens
cttggtacaaaggagaagctcaaattttctcatcatcagcaccattgccattattaacatcatcattattattaatattgtatgaatcctatcctagcacttgcctgctcaaaagccttccatggcaccccactgcctataagatagagttcaaactcattagcttggcctttactacatgacatcatcaaaccagtccaggtttaatgtcctcagcactctaacatgtgtcctacacttcagccataaaataatgtagatatttacggtattttgccaaaggctaggggagggaactagacatgaattagatgttctggcctcacagaactcatgytgtatttgtagattaaaacaccccaagtcaatgtctagagaaggctaaatgccaggcagggggcaactttataactaactggagatgtgatgcctggctcaggatggtccctgatgagcagaagagaagcctgcagaaaatctccttggccagactcagctcagagcattatgtgggcattttatataatca

SEQ ID NO: 557235 - DNA, 599 bp, Homo sapiens
taaatcccagctctgccacttactagctgtgcgaccttaggcaatttgctgtgcctctctgagcctcagcctcctttattataaaatagggataataattatccctacttcataaggtagttgtgatcatgcaatgagttaattaatatcataaggtgcttagaacaatgcctgatgtgtgataagccccatgtaagtacttactttcttattcttcttcgtatgaattgagaatgaatgtaaagcacttggcacatagtaagtattcaatccatggcaaacatcattattattactactattacctactttttttaagttatcagtgaagaaggaaaaataaataaagtatcttttaatatgtagtgaagcagtttatatatattatcttatttaattctgattattattaaatartaactctatcattattctcactttatatttgataaaatggatccagggaagtacagtggtgtgtccatgttcagtgctggtggcagaggcaagagttgaaccccgtttgatctgatgcccaaatttgtcctcattccagctagatggtcattaccagaaggacaaggccttgcctgtttcta

SEQ ID NO: 557236 - DNA, 535 bp, Homo sapiens
gacagctagtccagaaggtactttgcttccaaaggttaaatgtacagtgactgtatcacttaacaactacacttatagttattttaccaagtgaaataaaaacatatgtccacataaaaacctgtgcacaaataatcataacagcaccattcataatatcaaaaagtgggaataatccaaatacttattaactgattaacaaataaataaaatgtggtatgtccatgcaatggaatattattcagccatcaaaaggaatgaagaactgatacatgctacaacatggatgaaccttgaaaatattatgctaaktgaaagaaagcagacaaaagactgcatattataagattccatttatacaaaatattcagaatgggcaaatctatagagacagaaagtagattagtggttgtcaggggatggaggaagttggggagtgactgttaacagcatggggtttctttatggggtgataagaatgttctaaaattgattcttgtaatggtagcacaactgtgtaaatatactaaaaata

SEQ ID NO: 557237 - DNA, 488 bp, Homo sapiens
gggaggggggagggatagcattaggagatatgcctaatgctaaatgacgagttaatgggtgcagcacaccaacatggcacatgtatacatatgtaacaaacctgcacgttgtgcacatgtaccctaaaacttaaagtataataataataataataataayaataataaaaagaatttgagcgtcatttaatttcccatcgatgccttgattagcatcttaattcaacccagtttggcctgtagctgaggccgactggcaggaaaactcaaaaaggacataaaataacatccagtcaaacttgaccagtcaaaataatccaattttgatcagtggcagtggctgcctgaagccctctactaggaaggattttaatatcacaactggtctgagcagggaatagtgtcatgatctattagtgatgtctcgcatggatgaggacatggagagcagggatctgtgttgtaaaatcacttctgctggtcctaaa

SEQ ID NO: 557238 - DNA, 582 bp, Homo sapiens
gtctcagctactcaagaggctgaggcaagaggattgcttcagtccaggagatcgaggctgcagtgagctgtgattgcaccactgcactccagcctgggtgacagagggagaccctgtctcaaataataataataataataataataataataataataataataataataataataatttggggagctttaaaaaatgttgatgcctagaccccatcctagagattctgactaagttggtctgaggtgactcarggccccttcccagtgattctaatgtgcagtcgggatcaaaaatccaccaatccacatcacaccaatccgcatcacacaccaatccgcatcacactaatctgcatcacatttaatcctctctacaatcctgcaaggtagggcttgcccactccaccttgcaggtgaagaaactgaatgtcatagacagggaatgattatctagaggcctcccagctaataagtggcaaatctgacactcaagcccagatttgtgtaacttatagtctcaaagtagctgggaaggttgctaaaatgtgcgttctggagtcccacattgcctgcaaaatca

SEQ ID NO: 557239 - DNA, 544 bp, Homo sapiens
accatcagccttctgcccattttccactggttgtcttcacccatcctccaccctcatattcaacaatccttctgctgttctttcatactgctcacttaaaaatatttatatactgagaagtaaacaatgggaaattttattctctgagctgaaccagccaagcactcccagctctgtggaagacacaagatgtgctctgcacatctcgccagctctgcccatttcactttctctgtgccttgctccagagatatcagctcagtccagaagtgcagtagctcatcatctgagacttggagagtctgctcggaaatgatgctgtcctcactcccttaatgggccctttcctccctcctgagactgcaggtgaacagctgctgtctgaagaagataaaagaacaggggagagccagaaagttactatatccctctctcactgagtttcactgactttagagagaaaggatagcattttggttcagttcactagctttgggtttaaagcccatctctgtcrcatgctagctgtgtgacttcaggaaag

SEQ ID NO: 557240 - DNA, 583 bp, Homo sapiens
gtgtgtgcatttaccaagcaccaccatgtgctgggaactgtccaagctgtgttcacctgtatttcctcatttaatccttaaaacagggctggaatacatttctttaccctcactttacaaatgaggaaactgaggccctgggacgttaaataagctgaccaagatcatgtgtgtaggaagcggtctgaaatttgaacctgtctgtttgaatccagagctgccactgtcaaccaatacactctcttgcctagtgtgaaccaaagtgtctgccaaccccagaggaagctgaagagaaggaagctttatgtcccttccacatgctgagagataagcccccaaaatacatgccattgcacccccagaatccttgagaaaacctctctcaaaccaaaatattcaccagatcctgaccaaacttgtgggtttcaagcggtagccagcaccaagtaatactactgcaagagacttaaacagctatcgaargctgcactgcttcattcattcagtgaatgggtgggtgagcaacaggagccatctaggggtatcagagacaggacagtgacaaagcagtaaccctgaggtc

SEQ ID NO: 557241 - DNA, 493 bp, Homo sapiens
aaagaggtgggagaaggtacagaatcaattaataattaatagtaatagataaatgatgttggaactggtggtagtgatgatgataataatagtaattaytattatttttccagctgttgaatgttcatagctgaactattgaggccattgacataatagtataagcgttatactctctactcacatgggttcattcaaatcccatttctaccacttaccagttgcatgaccttggccaagttctttagcctttctgtgcctcaatttctcatctgtaacagggttgttatagataatgagtgagatattgcatttacagcatttaagacagagcctaggatatagtaaggactcgataagtggaggttgctatcatcattattattaatcatagctaccaactccacctccagaataatagccacaaatgccccttattgagcacttactttaccaggtaccttgctttgcttttttataggcaggatttcat

SEQ ID NO: 557242 - DNA, 493 bp, Homo sapiens
aaagaggtgggagaaggtacagaatcaattaataattaatagtaatagataaatgatgttggaactggtggtagtgatgatgataataatagtaattactattatttttccagctgttgaatgttcatagctgaactattgaggccattgacataatagtataagcgttatactctctactcacatgggttcattcaaatcccatttctaccacttaccagttgcatgaccttggccaagttcyttagcctttctgtgcctcaatttctcatctgtaacagggttgttatagataatgagtgagatattgcatttacagcatttaagacagagcctaggatatagtaaggactcgataagtggaggttgctatcatcattattattaatcatagctaccaactccacctccagaataatagccacaaatgccccttattgagcacttactttaccaggtaccttgctttgcttttttataggcaggatttcat

SEQ ID NO: 557243 - DNA, 529 bp, Homo sapiens
  misc_feature 345, 347: n = A,T,C or G
ctcttgtctaatgaagtgaatctctgtgacatgaatgggaaatccacaaggtttctgagacttgtataccagcagaatctttgtcaccttgcactaagagggacagagagatgacaaactgaaaaaggctatctgtctctcagaattctacaggcaggaaataggctgatggtagtactcagctgaaaacatgctatcatttttttaaataaaaaaagtaaagaaaagaaaagaaatatrgctaggtgcagtggctcatgcctgtaatcccatttttttgctaggccaactcaggaggattgcctgagcccaggagttagaccagcctgggcaacatggcaagtnantgcccatctctactaaaaaaaaaaaggaagatggctcagaaagctaagccaagtgcccaaatggcagcagcaacaggaaactagtacaccttccagacttccaaacgaatacactttcacttgtccattttctgatcaccacattaaattatctgttgctgaccgaggatatgtaaactcag

SEQ ID NO: 557244 - DNA, 529 bp, Homo sapiens
  misc_feature 345, 347: n = A,T,C or G
ctcttgtctaatgaagtgaatctctgtgacatgaatgggaaatccacaaggtttctgagacttgtataccagcagaatctttgtcaccttgcactaagagggacagagagatgacaaactgaaaaaggctatctgtctctcagaattctacaggcaggaaataggctgatggtagtactcagctgaaaacatgctatcatttttttaaataaaaaaagtaaagaaaagaaaagaaatatagctaggtgcagtggctcatgcctgtaatcccatttttttgckaggccaactcaggaggattgcctgagcccaggagttagaccagcctgggcaacatggcaagtnantgcccatctctactaaaaaaaaaaaggaagatggctcagaaagctaagccaagtgcccaaatggcagcagcaacaggaaactagtacaccttccagacttccaaacgaatacactttcacttgtccattttctgatcaccacattaaattatctgttgctgaccgaggatatgtaaactcag

SEQ ID NO: 557245 - DNA, 529 bp, Homo sapiens
  misc_feature 345, 347: n = A,T,C or G
ctcttgtctaatgaagtgaatctctgtgacatgaatgggaaatccacaaggtttctgagacttgtataccagcagaatctttgtcaccttgcactaagagggacagagagatgacaaactgaaaaaggctatctgtctctcagaattctacaggcaggaaataggctgatggtagtactcagctgaaaacatgctatcatttttttaaataaaaaaagtaaagaaaagaaaagaaatatagctaggtgcagtggctcatgcctgtaatcccatttttttgctaggccaastcaggaggattgcctgagcccaggagttagaccagcctgggcaacatggcaagtnantgcccatctctactaaaaaaaaaaaggaagatggctcagaaagctaagccaagtgcccaaatggcagcagcaacaggaaactagtacaccttccagacttccaaacgaatacactttcacttgtccattttctgatcaccacattaaattatctgttgctgaccgaggatatgtaaactcag

SEQ ID NO: 557246 - DNA, 529 bp, Homo sapiens
  misc_feature 345, 347: n = A,T,C or G
ctcttgtctaatgaagtgaatctctgtgacatgaatgggaaatccacaaggtttctgagacttgtataccagcagaatctttgtcaccttgcactaagagggacagagagatgacaaactgaaaaaggctatctgtctctcagaattctacaggcaggaaataggctgatggtagtactcagctgaaaacatgctatcatttttttaaataaaaaaagtaaagaaaagaaaagaaatatagctaggtgcagtggctcatgcctgtaatcccatttttttgctaggccaackcaggaggattgcctgagcccaggagttagaccagcctgggcaacatggcaagtnantgcccatctctactaaaaaaaaaaaggaagatggctcagaaagctaagccaagtgcccaaatggcagcagcaacaggaaactagtacaccttccagacttccaaacgaatacactttcacttgtccattttctgatcaccacattaaattatctgttgctgaccgaggatatgtaaactcag

SEQ ID NO: 557247 - DNA, 586 bp, Homo sapiens
gctggggttacaggcatgagccactgtgcctggcctcaataaatgtatgtgaagttagcaaggggttgaaagagaacatttttcctcatcttggtattgggaggattaaaggagataatggaaactaaatacttaacatgtgctcaataatttttaaaaattagctgtatgatggtcttgatcttcctgcaggcttataaataaccaggtttttgggaaaagtcccaagcatagggagttgggaggggatttggggagcagaagaaaatacagtgtgaggaaattttcaacactgaattgttgagcccgggagcaaatgcacaaatcatggacycatagaaaatcaggcctggcaacaaacatttaaaaaaatgctcaacatcactaaatgatcagggaaatatacatcaaaatcacaatgtcttactcccgcaagaatggccatcatcaaaaaatttaaaaaaaatagatgctggcatagatgtggtgaaaagggaacacgtctacattgctggtgggaatgtaaactagtacaaccactatggaaaacagtgtggagattccttaaagaactagaagtagatct

SEQ ID NO: 557248 - DNA, 525 bp, Homo sapiens
tctcactatgttgcccaggctgatctcgaactcctggcctcaagtgatcctgctgcctstgccttccaaagtgctgggattatgggcataagtcaccatgtccggcccattcctttttatggagcagtagtattctgctgtatggatataccaccagtttgtttattgatttctctgtgtccatcaggacatttgtacatccattctctttttcaaaaaataaatttataattttaggatagttttagacttagaaagattgtgaagaaagtatagagacttcctatataaccccactcagtttcccttgttattaacatcttaaatggttcatttgttacaactaatgaaacaatgttgaaacattgtcatcattaactaaagtccgtacttcactgagattgccccagtttttacccaatgttctttttctgtcccaggatctatccaggatcccacattacatttagttctcaagtctcctgaggctcctcttggctgtgacagtttctcaggctttcctta

SEQ ID NO: 557249 - DNA, 525 bp, Homo sapiens
tctcactatgttgcccaggctgatctcgaactcctggcctcaagtgatcctgctgcctckgccttccaaagtgctgggattatgggcataagtcaccatgtccggcccattcctttttatggagcagtagtattctgctgtatggatataccaccagtttgtttattgatttctctgtgtccatcaggacatttgtacatccattctctttttcaaaaaataaatttataattttaggatagttttagacttagaaagattgtgaagaaagtatagagacttcctatataaccccactcagtttcccttgttattaacatcttaaatggttcatttgttacaactaatgaaacaatgttgaaacattgtcatcattaactaaagtccgtacttcactgagattgccccagtttttacccaatgttctttttctgtcccaggatctatccaggatcccacattacatttagttctcaagtctcctgaggctcctcttggctgtgacagtttctcaggctttcctta

SEQ ID NO: 557250 - DNA, 606 bp, Homo sapiens
agttgactatgtttgtgtacaatccactktaaaattaaaatttactttcagaagaaactttacagacttaccagcatctcttgccataaatataaggagattttgaaaataaaatagaaatggatattatagttaaatactctgctgtctgccatgattttggggctgggactggcagcatcattactgaagggaggtgagtgtatgtgttagagaggtgttcatgtgcatctgctctctggtccaacaattcaactcctgggtcgatatccaagagaaatgaatgcttatttgcttaaaacatgtacaaaaatatttatagtagcccaaattccactaacagggggataaaacagcaaattgttgatggaatgctatatagttataatataatattatatataaataagtatatattatatattatggtattattgtataatatagttattactgcataatacatgatatggtttgactgtgtccccacccaaatctcatcttgaattgtagctcccttaattcccatgtgttgtgggagggcctggtgagaggtaattgaatcatgggggcagttctcccatactgttctcgtggtagtgaata

SEQ ID NO: 557251 - DNA, 606 bp, Homo sapiens
agttgactatgtttgtgtacaatccactttaaaattaaaatttactttcagaagaaactttacagacttaccagcatctcttgccataaatataaggagattttgaaaataaaatagaaatggatattatagttaaatactctgctgtctgccatgattttggggctgggactggcagcatcattactgaagggaggtgagtgtatgtgttagagaggtgttcatgtgcatctgctctctggtccaacaattcaactcctgggtcgatatccaagagaaatgaatgcttatttgcttaaaacatgtacaaaaatatttatagtagcccaaattccactaacaggggrataaaacagcaaattgttgatggaatgctatatagttataatataatattatatataaataagtatatattatatattatggtattattgtataatatagttattactgcataatacatgatatggtttgactgtgtccccacccaaatctcatcttgaattgtagctcccttaattcccatgtgttgtgggagggcctggtgagaggtaattgaatcatgggggcagttctcccatactgttctcgtggtagtgaata

SEQ ID NO: 557252 - DNA, 606 bp, Homo sapiens
agttgactatgtttgtgtacaatccactttaaaattaaaatttactttcagaagaaactttacagacttaccagcatctcttgccataaatataaggagattttgaaaataaaatagaaatggatattatagttaaatactctgctgtctgccatgattttggggctgggactggcagcatcattactgaagggaggtgagtgtatgtgttagagaggtgttcatgtgcatctgctctctggtccaacaattcaactcctgggtcgatatccaagagaaatgaatgcttatttgcttaaaacatgtacaaaaatatttatagtagcccaaattccactaacagggggataaaacagcaaattgttgatggaatgctatatagttataatataatattatatataaataagtatatattatatattatggtattattgtataatatagttattactgcataatacatgatatggtttgactgtgtccccacccaaatctcatcttgaattgtagctcccttaattcycatgtgttgtgggagggcctggtgagaggtaattgaatcatgggggcagttctcccatactgttctcgtggtagtgaata

SEQ ID NO: 557253 - DNA, 384 bp, Homo sapiens
tggcatctgcttggcttctagggaggcctcaggaagcttacagtcatggcagaaggtgagcagtgagcaggcacgtcacatggtgaaagtaggagcaagcgagggtgggtcactttgaaattaccagatgtcaygataactcactatcaggaagacagcaccaaaccatgagggatccacacccatgatccaaatacattccaccaggccccagctccagcatgggggactacaattcatattgagatttgggaggagacaaatatccaaactatatcacatacaaaatggattaatctcaaaaacattacgccaagataaagaagccagaaacaggagttcaccctgtataattcaatttcaatgaaggtttagaaccaaaaa

SEQ ID NO: 557254 - DNA, 548 bp, Homo sapiens
ttgccttttgggtctcctctgagacaaatcccctgtaggaaaccttccatacccccataactcagctgtctatttcccagcagggcactgagctcacggagggctggggctggcctctacccacccctcctaccaacatccagcccagtgtctggcttatagccgatgctaaataaataaccaggggatgagttgatgcaagggtccagcaaccagtgacctcggcatttctgggagatggggagacctgtgaagtttttgtggggatttagggtttctttgcggggggtccagcttgactgaggaacagttgatgtagaataaactgcatatatttaaagtgtacaatttgatgagcgttgacatgtacatgcctgagaaactatcaaggtacacacctgacacctccccaaagtcacctcctgtccctttataatcccttcttccttctcctccctgcctccacctctgggcaaccacrgatctgtctcctgtcactgtggattagtttgcattttctaaacttttatagaaatggaatcattctg

SEQ ID NO: 557255 - DNA, 557 bp, Homo sapiens
attctcatttcttccaagtccccaagtgatgctgctgagctaggaaccacgctttgagaacgactggtctaacgcaattgaatgaacttggccgatgacaagtagctgcttccaggtgcatctttctgtgttaggagctctgggaggtataaaggaatgagtggaacaaaggtcaaaggaggcatctgtcttcaaggaattgactgtaagctttgctcttagaaataacagagtagcagttaagagaagagaaaaacttgggttcaaatctcaggcgcacccctaagctgtgtgactttgagtaagttacgtgacctctgtttttccatctgtcaaacagacgtaacaagagtagttactttataagtttgctgttgaggaaactatctatgtgtccatcaaatggtggcctggccacttctttgagagtggttatatttgcagccagcactcctggttctaggcragctcaaaggacaaagagttccctttgggtgacttgggaagttctttcacaggggataaggctatacgctaagccttaaattatggctgag

SEQ ID NO: 557256 - DNA, 566 bp, Homo sapiens
aatggtataagcaacagctcaaaggcccatggggcatgcaagaccagggagaagagcagcctgtccacaaggaatcttcagcccctcacggagcacagagaagcaaacaacctaacagtcaccatcatttacagagggcatatgctgtgctagatatttctcctgcacaatctcatttaagcctttcaacaaccctgccaaggaggggagttatttttccccttctaaccaatgaagaaacttgggttcagagaggttaagcaactatctcaagatcacatagccagtgatagagttgaaatttgaacccaaatctctgtggccccaaatcagatccttaaaaccccaactgattatcatttgaccaactttcggcagtcccgtgccaggaatcggggtttaagggcactctastgttgaggatgaagaacttcttgaaatgcatgaattggatctttcgacaccaaagaattttccccagggacttggccccctatgtggcacaattttaggactctcagtcactcctcctgcaatctttccctcatccatccactgctgaattc

SEQ ID NO: 557257 - DNA, 363 bp, Homo sapiens
gaaagaataagtgaatgcagtgccacctcccagttcttccgtccacccagggccaaaaggcaaactgatttgtccaaagtcttgaatctgtggctgagctgttagcatttcagcatcacagaaacccctctgcccagctgccagcccagcaatggtgaaattattagatcccattatgaattggattttaatctcctgtaaatagtcctgccattatagtgtcataagyagcaattaggaccccctcccttccttcttgcagctgcagagacgttctgatctccccagcagagttaggggggctgcaggcagggtggggactgacgcttaagaaatttaccagtttgggcagatcacaaccag

SEQ ID NO: 557258 - DNA, 602 bp, Homo sapiens
aaatatctcaacattgctaagtgtcctctgtgggccaaagggccccagttgagaaccacttcctgatatctatgtagagcacagagtggttcttgatcctggtgacactctagaattgggtgggcagcttttaaaaatagcagtggcagagcttcgttctggctggctgattctgatgatatcagaatctctggggtggggggcaycctgggcattggggtgttttatgcacacgcagagttgagaggcactgggccaacccagtgagatgccacccctaccttgattatttcctgattcatagggaaggaaactgaggctcagacagcccaagtgtggcaaagtctcacaccaagtgatgaagccgcataaagacccagatattgccaaaatgcctttgttaaaccaaataacaaatgtaaagaaaaaaaatccacttctcccacacaaacaaacacatgcataaactcacaccaataaaaaaaacagcaactactgctttgcaagttttgccaacctttgtttctacagaggacagggaccccaagggctactttccctcccggggctctgctttcatttttccaacccattttatgctc

SEQ ID NO: 557259 - DNA, 494 bp, Homo sapiens
gacctttgtggcaaaacttcctgtttagatctttcctgaacttagccccgtcacatcacacagcagtccctcccatcaaggtgtcaatactattgatgattctttgttgtgtggggctgtcttatgcagagtaggatgtttggcagcatccctggccactagataatgccaacagcacccccacctcctagctgtgacaatccaaatatctcaacattgctaagtgtcctctgtgggccaaagggccccagttgagaaccacttcctgatatctatgtagagcacagagtggttcttgatcctggtgacactctagaattgggtgggcagcttttaaaaatagcagtggcagagcttcgttctggctggctgattctgatgatatcagaatctctggggtggggggcatcctgggcattggggtgttttatgcacasgcagagttgagaggcactgggccaacccagtgagatgccacccctaccttgattatt

SEQ ID NO: 557260 - DNA, 539 bp, Homo sapiens
agggagtaaagggggttggggaatgaacagcctagggatccatgcagtcatttatttggcaaatatttattaagcacctactctgtgccaggcacttttctaggcatagggatacagcaaaagccctggcttcaggaggcttacattctaatggaaagagacagacaatggcaaagccccaaacaaaaatacactgtgtcagataccgatagggggtttgaggaaaggtgagacaggataaggggagagagaatggcaagaaaggggtggggggctatttattgtgttggaatattttcaacaaatcctaagcattacactgttttactcatcaagtatagcagtatggatctctaacagatwagaaaaaaattttccctgcctgggcaacatagaaagaccccatctctacaaaaaaacacgacattttagccaggtgttgtgactcatgcctgtactcctcagctacttgggaggctggggcgggaggatcacttaagcccaggagttcaaagctgcagtgagttgtgattgtgcta

SEQ ID NO: 557261 - DNA, 614 bp, Homo sapiens
ttcccaaggaacatttggcaatgcctagagacatgtttggttgacacaattgagtggtgatgctactgtagatagaggccagggatgctgctcaacaccctacaatatacagaagggtgccctgcttctcctgcagccccagaattattcagctcaaaatgtcaatagtgcagaggtgaagacaacctgcctcacatcctgtggctggtaacaagcccaggttcccctgcccagccccactgaacgtcccactgggaagggggtgtgtcactcccagccaggccccgccctctctcccctsagccagtggggatccctggctggtcagagttccagggccagctgctgcatgggcttttccaagacctctctctcctggtgggcaaatgtgaaaacctctcagaacctctttgcctttctccctctttctaggaggctttggcatttttgaggtcctgaggaaaccagacctcagaacctcaaaagttgccattgggtccctctctggtgagagctgatccagctattttgcacatagctctcagcctggccaagtgccctgtggagtctgcaggcacggtgtgcgcagaggtggccaggcggtcggggacaag

SEQ ID NO: 557262 - DNA, 614 bp, Homo sapiens
ttcccaaggaacatttggcaatgcctagagacatgtttggttgacacaattgagtggtgatgctactgtagatagaggccagggatgctgctcaacaccctacaatatacagaagggtgccctgcttctcctgcagccccagaattattcagctcaaaatgtcaatagtgcagaggtgaagacaacctgcctcacatcctgtggctggtaacaagcccaggttcccctgcccagccccactgaacgtcccactgggaagggggtgtgtcactcccagccaggccccgccctctctcccctgagccagtggggatccctggctggtcagagttccagggccagctgctgcatgggcttttccaagacctctctctcctggtgggcaaatgtgaaaacctctcagaacctctttgcctttctccctctttctaggaggctttggcatttttgaggtcctgaggaaaccagacctcagaacctcaaaagktgccattgggtccctctctggtgagagctgatccagctattttgcacatagctctcagcctggccaagtgccctgtggagtctgcaggcacggtgtgcgcagaggtggccaggcggtcggggacaag

SEQ ID NO: 557263 - DNA, 614 bp, Homo sapiens
ttcccaaggaacatttggcaatgcctagagacatgtttggttgacacaattgagtggtgatgctactgtagatagaggccagggatgctgctcaacaccctacaatatacagaagggtgccctgcttctcctgcagccccagaattattcagctcaaaatgtcaatagtgcagaggtgaagacaacctgcctcacatcctgtggctggtaacaagcccaggttcccctgcccagccccactgaacgtcccactgggaagggggtgtgtcactcccagccaggccccgccctctctcccctgagccagtggggatccctggctggtcagagttccagggccagctgctgcatgggcttttccaagacctctctctcctggtgggcaaatgtgaaaacctctcagaacctctttgcctttctccctctttctaggaggctttggcatttttgaggtcctgaggaaaccagacctcagaacctcaaaagttgccattgggtccctctctggtgagagctgatccagctattttgcacatagctctcagcctggccaagtgccctgtggagtctgcaggcrcggtgtgcgcagaggtggccaggcggtcggggacaag

SEQ ID NO: 557264 - DNA, 584 bp, Homo sapiens
caccaaaaaaaaagccataggcattcttgaattaaattttgttttaaatgtacaatttgaagggcagaccagaagaggcagtatggaatgatgaaaaggaaagggagaaagaccttacgcttagatctaaccccaaattttcactctaccattctctagcaagtgacttaattttgctgaacttagttttctcatctgtacagtgaggattacaaaacaaaagaagatgtattttaaaaaggaagaaaacccaaaccgaacgcaatgggcgattacaaagattaaatcagatacagtttataaaagcacctgccacatagtaggcactcgataataatggcttcctcaaaaaacagattattcaggctggagataacaataatacttgtgggattttgaatagtctctttcatttcagggatccccaatcacttaataaacattaattaacacaagccctcacctgtcagcacrggcttggagggtaggttggttttcaggtctcttgcttttctattgtctctgcacaaaatgcttgctcagccgttttcctgtccctaaactggtcatgctgttctgttgag

SEQ ID NO: 557265 - DNA, 579 bp, Homo sapiens
atgggtctccagttttccaggctctagtataacctgctacctgacttctaagccaatgtcacatgttttaagcagcccacttctggaactaagttctatattagttagggtaatgctagctgatgtgtcacatgaatcctaacgtcttagtggctgaacataatgaaagctgctttctcattcatgtagagtccacctgatggcaggggagagaggtgctctgtctgtggaagttgatgaaagctctgccatcttggacgcataactcccggagatgtctctgattgaggatgatagagaatgtggaggattataatacagtcctgggtgtgggtgtgtcaattccttccgcattccaatgaccagcactcagtcacatggcctccactagatgtaaggggactgaaaattatggtctctggtagggcagccacccacagccacaagtctacactatcagaggggcataagcatttaatagagctagccacctcaacaaccttacaaagcaggcrctattattatccccattttacagattaagaagttgaggaacagaaggtttaatgaatttgctta

SEQ ID NO: 557266 - DNA, 510 bp, Homo sapiens
acaactggtgacatgtgcaacaaaggagagacatacaggctattagagtctttaccacagctcttgatgtggttgggagtaaggcttcactaaggaaatggggaagtgaggcttgagtgaggctggaatgaggctgaagcatggccaagttggtggaaaaagtaggaagaatacttggtgaatgcgaactgcatgtgcaaagggcctgtggcaggggagagcatggggggaaggtagaatggccactgcagctggaatgggagaggktagggagggagcctggtagaggttagactaagcatctgccagattaagcaggcttttatagagggcactggagagcccttgaaagcttttaaggagggagatgcagtgatcagatttgtgttctaaaaagatcatgttggcattagttcagagagcagactggaagggtgaatgtgggaaggctggttaggtattgtcatcatccccatcttacccaagaagaatctgaggctgtgacacatt

SEQ ID NO: 557267 - DNA, 459 bp, Homo sapiens
tgggttaaacactttacaagcatttcttggtcactccttacacctttccaatgaggtagatattattattctgccattcagataaagaaatctgggcacacttttttttcttttgaaagcaactttactgagatataattcatataaaataaaacatccatttaaagtatactgcttgaagagttttgacaaatgaacaacttttataactatgaccccaactgagtcacagaacatttccaccacccaccaggcacgaaragatttaggttgccagctaatggtatacagctagcaaagtggatggttgaaaactgagcccaggtctgactctgatacccagactcttgactgctcggtacccactgaatctgctacccagtttctagctgtaccatcacagccatccctccttgaaggtactcttgtacctgaaccacaacttccaccctcccacct

SEQ ID NO: 557268 - DNA, 577 bp, Homo sapiens
ctggctaaggagccactaccaacatgcacactgggattcacraaattgacactcaggacctctgcagttgaaaccgtcaaactaggttattttctcattatatgaaaggaagacagtggcttaaatagagaagacctaggttaaagtctggggtccacatgtgtgctcttagggaattcattttgcctctctaagtcttgaggtctccacctgtagaattcaggtgatcattcccttacagtaggtggggaggtggaaggatcaaatgtgtttaagtgttagtcactgttatgctcattccctctacaagtgctctgtgttttggccaagctggtttacccactctctccccaaaaagaccccccttctaaatcagcctcccttacaagaggtggtccggcctgatgattaggatcccaactgtggtgccagaatgcacataattggaattcaaatccagcagcatcactttacacactgtgtgaactcaaacaacttacctaactcctctgtgccccagcttcctcatctataaagcagcaatattgatggcacccaattcactggattgcctgag

SEQ ID NO: 557269 - DNA, 577 bp, Homo sapiens
ctggctaaggagccactaccaacatgcacactgggattcacaaaattgacactcaggacctctgcagttgaaaccgtcaaactaggttattttctcattatatgaaaggaagacagtggcttaaatagagaagacctaggttaaagtctggggtccacatgtgtgctcttagggaattcattttgcctctctaagtcttgaggtctccacctgtagaattcaggtgatcattcccttacagtaggtggggaggtggaaggatcaaatgtgtttaagtgttagtcactgttatgctcattccctctacaagtgctctgtgttttggccaagctggtttacccactytctccccaaaaagaccccccttctaaatcagcctcccttacaagaggtggtccggcctgatgattaggatcccaactgtggtgccagaatgcacataattggaattcaaatccagcagcatcactttacacactgtgtgaactcaaacaacttacctaactcctctgtgccccagcttcctcatctataaagcagcaatattgatggcacccaattcactggattgcctgag

SEQ ID NO: 557270 - DNA, 568 bp, Homo sapiens
caactcaccatgtaggtatcaaattcagcaaatcttaacactgatacaatgctgttatataattacctacagtgcatttctcagttttgccaattgtttcataaatgtctctctttttttttttttttttcagacagggtctcactctgtctcccaggctgcaatgcattgaggtgatcatggtttactgcagccttgagctcctggactcaagcgattctcccacctcagactcccaaagtgctggaattataggcatgagccaccacacctggccaactttttttttttttttaagagaggagatctcagcctggccaacgtggtgaaacccagtctctgctaaaaatacaaaaattagccaggcatggkggccggggcctctaatgctagctactcaggaaaatgaggggggaggattgcttgaacctgggagatggaggttgctgtgagcccaaatcacgccactgcactccagcctgggtgacagagtgagactctatcttaaaaaataaaaataaaagagatgaggtctcgctatgttgcccagactggccattaatgtctt

SEQ ID NO: 557271 - DNA, 568 bp, Homo sapiens
caactcaccatgtaggtatcaaattcagcaaatcttaacactgatacaatgctgttatataattacctacagtgcatttctcagttttgccaattgtttcataaatgtctctctttttttttttttttttcagacagggtctcactctgtctcccaggctgcaatgcattgaggtgatcatggtttactgcagccttgagctcctggactcaagcgattctcccacctcagactcccaaagtgctggaattataggcatgagccaccacacctggccaactttttttttttttttaagagaggagatctcagcctggccaacgtggtgaaacccagtctctgctaaaaatacaaaaattagccaggcatgggggccggggcctctaatgctagctactcaggaaaatgaggkgggaggattgcttgaacctgggagatggaggttgctgtgagcccaaatcacgccactgcactccagcctgggtgacagagtgagactctatcttaaaaaataaaaataaaagagatgaggtctcgctatgttgcccagactggccattaatgtctt

SEQ ID NO: 557272 - DNA, 555 bp, Homo sapiens
cgagcctccatctcaaaaaaaaaaaatcatcataaaataaaagtatgttgcttaaattctagatattttattgttgtttatttctaatttactmcccttgtggtaatagaaaatattcagctttatcttaattctttgaaatttattgagttttgttttatagcccagcatatggtctattttggtgagaaagtctttcttgctgttatacatgaagtgtactataaatgtcaatcatatcaagttggttgatagtgttttgtaagttttctacatacatactgattttctgactactcgttgaataaatgcttgagagaagaacgttgaaatatccaactgtagtcatttcagctctatcagtttttccctcattcacttcattttgaagctctgttattgagtccacacacatttcagattgttctaccttcttgatgaatttaactcgttatcattatataaattcttatttattcctagaaaatttcttgtttggaactctattttgtcttacattaatacaaccactacagctttctttgttgttgttgt

SEQ ID NO: 557273 - DNA, 566 bp, Homo sapiens
gaattcaaaggactttcacaagtctcttatgtatttaataccacaatatcctaaaaaaggactccccccatcatcctccacccgctttcctttcagatggggcaaaagaggtaaaaagaagggaatggttaacctacaactagagtctgggtccttcactttcagtcgagtgctgtctccattagaccacagtaaagagttaacaggtcaccaatggcagtcgcatctttctctgggataaggacttaaggaagggtaagtgacttaggcaactatggagtggaaaggaaagagcataaaaggaaaaaaaatacttcccttctcttttcaaatacattttcaattttgctttatatttatattttaataagctatttgactacagtattataatatctaaaatagtccttagtatctgtaaactgagttttttcccttataaaagtaattcatgctcrccttaaaaaaacaaaaaataaaagaacagtgaaaaaagggcattcacaaccacaccatgcacaaattatcacatttctgtattgttcccttccagtatttggtttcat

SEQ ID NO: 557274 - DNA, 636 bp, Homo sapiens
gacagcagagtcaaatcagcaatcagaatagccggactcacacagacctatggcatactgtttctagaaatgcaatagataagaagcctactaaattcttacttgatcagaaaagttctaaatcaagtgaacatcagctaagtttttatcagggttattctactagtgccacaagagagttagattgggattgtaagaatgaaggggaagtgatgatgagggtaacaagagggattgagaatctcagccatccatcttattggttacaagaaatgaaactatttcaacttcccttgaatatctttcttcattttyctccatgccaaacctactctttctcatgtagagaaaccttccaaggatggtttttctgtgctgccttccaaggattctcctccgctacctttccaccttttctcttgcatgtaccttgggatatagaacaaaagtgaatatatacaagtgagtatttggctgggagatgaggctggaaaggttgattgggaaacagactgtgattgattgattactggtcattccaattttaattccataaaatgacaccaaataattttggatttatttggaataaaattccaaattaataaatttattataattataattattatttta

SEQ ID NO: 557275 - DNA, 555 bp, Homo sapiens
ttaaacaaataattttacaaatactcatatattacaaatgtgagggtactatgaagacaaaggacagagagcacatccacgtcaggggtcaaaggacaactccctgagaaaattaattctaagatgaaacctgtaggataggtagaagttaaccaggaataagtgtcaaagataatttggaggaaacaggcagagaggaaaggtatgtgcaaagctctaaagcaaagctttccacatttgtggaacagaaagaagtcatgagagatraggctggagaggtaggctggagacagactgtgtggccatcatagcccatagcaaggagtttgatcttcaccctaagttcaagggggagttactgaagggtttttaagcaaaggagtaatagaagatttgcatttcccaaagatcactcttgcagcagtgtgaaaaataggtaagaggggtaggtatggctataaggatataatggagtgctactgtagcctttcagatgagacgattcaatgtcatagattaggatggttgtagacttggaaagaaatggttatagaa

SEQ ID NO: 557276 - DNA, 606 bp, Homo sapiens
tttttctttggtttggaaaagaagccaaaactggtaaaatgggagataaaaatgtgttaagcacataatatgattccaaaataataagattaaaatcttgggtacattttgctaagtaccactcggagtatcttccaaagaagcactagtattattatttatttgcagtggcaccatcattattggaatagactatcccaaggatgttccttgtgggttccaatgtgtttggttataaaaaaaaatagtcattttactgttattttttgtcatctaacttattctttctaacatttctatgaagtaagtagtcacatccctcatggcagatgaggaaactgagacaaagggagatgaagagattggtgcacagctcaggtaagctctcctgggctatttatttatttakttattttacttatttttttttctctcctagccactggactacaggtactgggctattcttaccatccatttccatcctggacttctctctgaatcacaggcaggtgagaaaaatattgaacaatttgtgcaaatctaccttcaatttactagtagaaagcacaggcatcgattgttttgtctcctggtgagggagga

SEQ ID NO: 557277 - DNA, 549 bp, Homo sapiens
aattattcagtctggagaaggaagggaagggagttgggactcctgagtgctgagaagtgctattctctacttccaaaaggaaccgagctcaaaccacaggaaggctaactggcatagtgaataagcaataaacattttggctgaccatctgggtggcagaccatgatgagtgtctgagtgactgatagaagtattatgagacctggtcatggtgcaagttgtctctcagccactgtaagctcataagccacttaagtttytaaaaaaaaaaaaagtctgagaaaaatagatggtttctaaagttcattccagattagatttttttttttttttttttttgagacagagtcttactcttttgcccaggctggagtgcagtggcacgatctcgactcactgaagcctccacctcctaggttgaagctattctcgtgcctcagtccagcttagatttttttaaatttaatttttaatttaatttttttctagggatggggtctcattatattgcccaggctagtttcaaactcttggccttaagtgatcatc

SEQ ID NO: 557278 - DNA, 549 bp, Homo sapiens
aattattcagtctggagaaggaagggaagggagttgggactcctgagtgctgagaagtgctattctctacttccaaaaggaaccgagctcaaaccacaggaaggctaactggcatagtgaataagcaataaacattttggctgaccatctgggtggcagaccatgatgagtgtctgagtgactgatagaagtattatgagacctggtcatggtgcaagttgtctctcagccactgtaagctcataagccacttaagtttctaaaaaaaaaaaaagtctgagaaaaatagatggtttytaaagttcattccagattagatttttttttttttttttttttgagacagagtcttactcttttgcccaggctggagtgcagtggcacgatctcgactcactgaagcctccacctcctaggttgaagctattctcgtgcctcagtccagcttagatttttttaaatttaatttttaatttaatttttttctagggatggggtctcattatattgcccaggctagtttcaaactcttggccttaagtgatcatc

SEQ ID NO: 557279 - DNA, 499 bp, Homo sapiens
catgacttgtaccctcgtgggttcccagagtgggtagttttaggagaagattgatttgaatgagaaggaaatttgccttcacytgggctccctaggccaacgagatgccctgaatggaggatccctgtatggcatcctttccaagagtggagcaaaagccacagataggagagggctctgtgggcttctatcggctttgtccttcctttagagaatgcaggggtgaaacttctgagcgaggaaatatccccatagcctttctgtccaaggggaagccttgaatctacctcccaaataataatggccagagggacttgatctcagctctaggccttggagagtgagggaggtccctggagaggtccttaagcaggaggcctgttctgattctgaacgggttctccagggccaactacttctcccttgtatcattctcatttcagtgggttgcatcatcaagagggccctagggtggccaataatttcattttttcaagtc

SEQ ID NO: 557280 - DNA, 580 bp, Homo sapiens
gaggaagccaagctagccatcaggaggagyatgtaaagagagagagacccatgagcagcctgccctgctccagacatcctagcctagacacacatgtgaagaagacatttggattttccagcttcaatagacattctgtggagaagaaacaaggaacctaactgacagccccagccatgtggctccaggcaatctttcccagccatttcagctatttcatccccctcagctgagtccccagtcattgcagagcatggataaaccaccttacacttccatggccaaatttctggcctacaaaaacaaccatgaaaaaatgtttgttttacttgactaagcttgagggatggttcttttaatgtagcaataaataaaagaaaccatttaaaagaaaaagttaggagaccatgctagtctaagccacatgggtatgtaattggaggaagggatagtgatctcattagcaaatcagaacctctagtgcatttgatttagaaagagtgctcacgattatgaataataatagggggcattagttctgctgtttaccagctatgaggccttagggcatgtggcttca

SEQ ID NO: 557281 - DNA, 605 bp, Homo sapiens
tctgtggagaagaaacaaggaacctaactgacagccccagccatgtggctccaggcaatctttcccagccatttcagctatttcatccccctcagctgagtccccagtcattgcagagcatggataaaccaccttacacttccatggccaaatttctggcctacaaaaacaaccatgaaaaaatgtttgttttacttgactaagcttgagggatggttcttttaatgtagcaataaataaaagaaaccatttaaaagaaaaagttaggagaccatgctagtctaagccacatgggtatgtaattggaggaagggatagtgatytcattagcaaatcagaacctctagtgcatttgatttagaaagagtgctcacgattatgaataataatagggggcattagttctgctgtttaccagctatgaggccttagggcatgtggcttcacttctctggacattggtaaactcattagtaaatggaaaaaaatgaatgggcttgaatgaaacaaagcatctgaagcacttagcatattgcttggcacgtaggaaacattcagcaaactttaattattatcagcaccatcatgacctcagtttttccatc

SEQ ID NO: 557282 - DNA, 430 bp, Homo sapiens
tctactaaaaatacaaaattaactgggcgtggtggcacatgcctataatcccagctactcaggaggctgaggcaggagaattgcttgaacacgggaggcgtgggtttcrgtgagccgagatcgcaccattgcactccaggctgggcaagaagagcaaaattccatctccaaaaaaaaaaaaaaaaattataaatcctagttaatgttttcatgagctaacagctgttgcgcattttctctataccagctgatatggtttggctgtgtccccaccccaatctcatcttgaattgtagctcccataatccccacgtgtcctgggagggacccagtgggagataattgaatcatgggggtgggtctttcccatgctgttctcgtgatagtgaataagtctcacaagatctgatggttttataaagggcagttc

SEQ ID NO: 557283 - DNA, 430 bp, Homo sapiens
tctactaaaaatacaaaattaactgggcgtggtggcacatgcctataatcccagctactcaggaggctgaggcaggagaattgcttgaacacgggaggcgtgggtttcagtgagccgagatcgcaccattgcactccaggctgggcaagaagagcaaaattccatctccaaaaaaaaaaaaaaaaattataaatcctagttaatgttttcatgagctaacagctgttgcgcattttctctataccagctgatatggtttggctgtgtccccaccccaatctcatcttgaattgtagctcccataatccccacgtgtcctgggagggacccagtgggagataattgaatcatgggggtgggtctttcccmtgctgttctcgtgatagtgaataagtctcacaagatctgatggttttataaagggcagttc

SEQ ID NO: 557284 - DNA, 600 bp, Homo sapiens
aagaacctggctttagccagaagccaaggtgactctggaaggctctgcarctagatctgtgggctcctgcagtgctcacagctgggcagagggttctttcttgaaaggagatctggaatggggcagggctgtgactctttcacaccctaaggagggcaatgaaatgggctgaagaggtgagcagaggactcaataacccggctcttagggctgtctgagagagcgtccatgaccaggaaaatcgacagagagacctgaaggtgcagggagagtcagaggagggtgtagagtaggggtaagtgtgtgaaagttgaagccaggccgccctgggatgtgggtttaacccacactctgccacccaccaccggagaggtgagaacaggttgtatcatctatttgtgcttcagcttcctctttaatagaactaggatgatgagagtactaatcctacagctttattggaaagattgcagaaacagtactaatcctatagctacattggaagaataagagaaatagtactaaccctatagctttattggaaggattgcagaaatagcactaaccctaccactttactggaaggattacagaagttaa

SEQ ID NO: 557285 - DNA, 600 bp, Homo sapiens
aagaacctggctttagccagaagccaaggtgactctggaaggctctgcagctagatctgtgggctcctgcastgctcacagctgggcagagggttctttcttgaaaggagatctggaatggggcagggctgtgactctttcacaccctaaggagggcaatgaaatgggctgaagaggtgagcagaggactcaataacccggctcttagggctgtctgagagagcgtccatgaccaggaaaatcgacagagagacctgaaggtgcagggagagtcagaggagggtgtagagtaggggtaagtgtgtgaaagttgaagccaggccgccctgggatgtgggtttaacccacactctgccacccaccaccggagaggtgagaacaggttgtatcatctatttgtgcttcagcttcctctttaatagaactaggatgatgagagtactaatcctacagctttattggaaagattgcagaaacagtactaatcctatagctacattggaagaataagagaaatagtactaaccctatagctttattggaaggattgcagaaatagcactaaccctaccactttactggaaggattacagaagttaa

SEQ ID NO: 557286 - DNA, 600 bp, Homo sapiens
aagaacctggctttagccagaagccaaggtgactctggaaggctctgcagctagatctgtgggctcctgcagtgctcacagctgggcagagggttctttcttgaaaggagatctggaatggggcagggctgtgactctttcacaccctaaggagggcaatgaaatgggctgaagaggtgagcagaggactcaataacccggctcttagggctgtctgagagagcgtccatgaccaggaaaatcgacagagagacctgaaggtgcagggagagtcagaggagggtgtagagtaggggtaagtgtgtgaaagttgaagccaggccgccctgggatgtgggtttaacccacactctgccacccaccaccsgagaggtgagaacaggttgtatcatctatttgtgcttcagcttcctctttaatagaactaggatgatgagagtactaatcctacagctttattggaaagattgcagaaacagtactaatcctatagctacattggaagaataagagaaatagtactaaccctatagctttattggaaggattgcagaaatagcactaaccctaccactttactggaaggattacagaagttaa

SEQ ID NO: 557287 - DNA, 561 bp, Homo sapiens
gagtgactctatgacaggtatgaggagagctgctcctagaagtgtggaattgtagagatagaagggattccaggagacagcatctgatccacctgctctcttttgcagaatgggaaactgaggcccagagactcatttacttattcagcttttgatctgttgatttgtttatgcaactaaaacatttgttaagtgtttgctgtatgccaagcactaggcatacaaggatgaatcaacacacaggggaccagggtccatggatggaaacaggcccrggagctggggtccaggctgccgcgctgagcagctccagggcttttctactcgaccgaggagtgtctgtttcctcatctgtaaaaaggaagtcattacagagcctacctccaggcctgttgcaaggatgaaatgaggtaacaaaaatgtactgattattattgctgcataacaaatgactcccaagcttaagctgggttggctgggacaccctggcttccaaactatcccatctgttctctgtgtgtgatgttaaatccaggccagccaaagtggctcacctgcgac

SEQ ID NO: 557288 - DNA, 561 bp, Homo sapiens
gagtgactctatgacaggtatgaggagagctgctcctagaagtgtggaattgtagagatagaagggattccaggagacagcatctgatccacctgctctcttttgcagaatgggaaactgaggcccagagactcatttacttattcagcttttgatctgttgatttgtttatgcaactaaaacatttgttaagtgtttgctgtatgccaagcactaggcatacaaggatgaatcaacacacaggggaccagggtccatggatggaaacaggcccgggagctggggtccaggctgccgcgctgagcagctccagggcttttctactcgaccgaggagtgtctgtttcctcatctgtaaaaaggaagtcattacagagcctacctccaggcctgttgcaaggatgaaatgaggtaacaaaaatgtactgattattattgctgcataacaaatgactcccaagcttaagctgggytggctgggacaccctggcttccaaactatcccatctgttctctgtgtgtgatgttaaatccaggccagccaaagtggctcacctgcgac

SEQ ID NO: 557289 - DNA, 561 bp, Homo sapiens
gagtgactctatgacaggtatgaggagagctgctcctagaagtgtggaattgtagagatagaagggattccaggagacagcatctgatccacctgctctcttttgcagaatgggaaactgaggcccagagactcatttacttattcagcttttgatctgttgatttgtttatgcaactaaaacatttgttaagtgtttgctgtatgccaagcactaggcatacaaggatgaatcaacacacaggggaccagggtccatggatggaaacaggcccgggagctggggtccaggctgccgcgctgagcagctccagggcttttctactcgaccgaggagtgtctgtttcctcatctgtaaaaaggaagtcattacagagcctacctccaggcctgttgcaaggatgaaatgaggtaacaaaaatgtactgattattattgctgcataacaaatgactcccaagcttaagctgggttggctgggacamcctggcttccaaactatcccatctgttctctgtgtgtgatgttaaatccaggccagccaaagtggctcacctgcgac

SEQ ID NO: 557290 - DNA, 367 bp, Homo sapiens
ataggttgggtgctgtggttcatacctgtgataccagcactttgggaggctcaggctggcaaatcggttgagcccaggagttggagaccagcctgggcaacatgatgaaaccctgtctctacaaaaaatacaaaaaattagccasgcatggtggcatgcacctgtagtcctagctaccctgggaggctgaggtgggaagatgacttgagctgggaaggcggaggttgcagcaagccaagactgtgctactgcactccagcctgggcaacagtgagacctgtctcaaataacaataataataatgtataaataaattataatctattcatagaatagaatgcaaaactatagaaatgaacaagtactt

SEQ ID NO: 557291 - DNA, 367 bp, Homo sapiens
ataggttgggtgctgtggttcatacctgtgataccagcactttgggaggctcaggctggcaaatcggttgagcccaggagttggagaccagcctgggcaacatgatgaaaccctgtctctacaaaaaatacaaaaaattagccacgcatggtggcatgcacctgtagtcctagctaccctgggaggctgaggtgggaagatgacttgagctgggaaggcggaggttgcagcaagccaagactgtgctactgcactccagcctgggcaacagtgagacctgtctcaaataacaataataataatgtataaataaatyataatctattcatagaatagaatgcaaaactatagaaatgaacaagtactt

SEQ ID NO: 557292 - DNA, 535 bp, Homo sapiens
tattctttcaatcaggcctaacaggttatttttcttccccagagttggactatattgctttttgtgtgagcatcagtgaagcaatwggcttgacaaacttcggggtcatgttgtattacaataaacatctttaaactcttgagtcatactcaaacccagtgaggatcacaagaggagaggcccgtgcaaacagagagctcatcaggtccattcctcactcttgcccactctgctctcagaagttgaccacaatggcctaagaaagctggattcccttgccctctgggttctgattaaatttggccaaaaggagtcaccagcagcagaccagatgcattaagtaattcctgtctgtcttggagagtgggagggaagaagaagagagatatttgttccctctattccctgcctggtgggctgtggtttggcagtggctgccttccagtatgctgcagctctggctctctgtgggtcctggtatcactgttcccttcctgcctcttccgactgagggtagtaactgctccccattgtt

SEQ ID NO: 557293 - DNA, 535 bp, Homo sapiens
tattctttcaatcaggcctaacaggttatttttcttccccagagttggactatattgctttttgtgtgagcatcagtgaagcaattggcttgacaaacttcggggtcatgttgtattacaataaacatctttaaactcttgagtcatactcaaacccagtgaggatcacaagaggagaggcccgtgcaaacagagagctcatcaggtccattcctcactcttgcccactctgctctcagaagttgaccacaatggcctaagaaagctggattcccttgccctctggsttctgattaaatttggccaaaaggagtcaccagcagcagaccagatgcattaagtaattcctgtctgtcttggagagtgggagggaagaagaagagagatatttgttccctctattccctgcctggtgggctgtggtttggcagtggctgccttccagtatgctgcagctctggctctctgtgggtcctggtatcactgttcccttcctgcctcttccgactgagggtagtaactgctccccattgtt

SEQ ID NO: 557294 - DNA, 593 bp, Homo sapiens
gacaaaaaaatagatgggttatctcagctgaaacagaagtggttgccttaggaaagatcttcacctgcagacttcattggagccaaggattctgagtgtatcctgtgawcccactgtggactatgtgtgagagagagctgttggctggtgtgggtcacctgtagtcaacagggacacatggaagggtgcacaggtcccaggagagagcagccaaagtattgcataattcctggaggctcctgaaggcttaagcaatgagctaaggtggtgctctttgagcagaagtcaaaagagaggcaagtgaggggtccccagtgatgggacaactccaaggaacgtacataagtgcccatgagaggacaagtcagtgcagagagcttagaaccatcttaagacagtaccagtcaagcaagaacttccatactcctttcctttctcctgcctgcctggcccccacctgctcaaacccagaagccaaagttagctagttagagccaaaacgtggagaaacaagagacaggccagttggcaggtcctacctgggagagaaaaaaaaaaagattatttaattttaaagccagtttgaaagaggg

SEQ ID NO: 557295 - DNA, 379 bp, Homo sapiens
agagtctgagcgtgggggagtcagatcttttaagattcatgtgggggtaaagaattgctctttcccaagcaagaatgccaattcatgtgtctttttctcccatttrcagtgattccctcagcttttaaaataatagaagaaacacatggagcttatatggagttcatacttcatcttaggaaaaaaaaatctacagcttttgttttacaatgtcttattatttcattagcatttgcaactgaaataggaataaatcaaaattcacgaagatgtttgatccccacttcttggatgttaaacagagaatgacctgggctgtgaaatctacagctgtgcacacagttttctacaatgtatgtacttaagtgccatacagttc

SEQ ID NO: 557296 - DNA, 303 bp, Homo sapiens
tcagtgtgttcagaaccctaccctctatctctagggcttatgagtatcctggaatgatgaaaggagaggttgttccgatgggaaggtcacactgggagctggcaaatctcagggcctctgcaggctgaacatccaataggtagcatgctgattatgatggacaagagaccctggccagatgctaccaggaaagacagcaagtgtgatccccagaactttctggagcagaagctgggcaatctaatgctgctcagatccyacctagttcctgaaaaattcaccttcaggtggaggttgatccag

SEQ ID NO: 557297 - DNA, 585 bp, Homo sapiens
aattgggtcactcccatcagagtccctctctgccaggtactttggaagtagtggttagaaacatagacacyggtcgggtgcagtggctcacgcctataatcccagcactttgggaggctgaggcaggtggatcacaaggccaggagtttgagactagcctggccaacacggtgaaaccctgtttctactaaaaatacaaaaattagccggctgtggtggtgcatgcctatgatcacagctactcaggaggctaaggcaggagagttgcttgaacccgggaggcggaggttgcagtgagttgagatcgcaccactgcactccagcctgggcaacagagcaagactccgtctcaaaacaaaaaaaaaaaaaaaaaaaagaaaaggaagaagaaaaaaagaaaaagagagagagagaaagggaggaaggaagaaaggaaggaaggaagggaaaaagaaaagaaaaaagaaaagaaaagaaagaaagacactggcctcagagttctggactcatctctcagatcccccacttagtacctgagcaaccttggataaatagggataatagtggtgtttatatcatgaaatt

SEQ ID NO: 557298 - DNA, 585 bp, Homo sapiens
aattgggtcactcccatcagagtccctctctgccaggtactttggaagtagtggttagaaacatagacactggtcgggtgcagtggctcaygcctataatcccagcactttgggaggctgaggcaggtggatcacaaggccaggagtttgagactagcctggccaacacggtgaaaccctgtttctactaaaaatacaaaaattagccggctgtggtggtgcatgcctatgatcacagctactcaggaggctaaggcaggagagttgcttgaacccgggaggcggaggttgcagtgagttgagatcgcaccactgcactccagcctgggcaacagagcaagactccgtctcaaaacaaaaaaaaaaaaaaaaaaaagaaaaggaagaagaaaaaaagaaaaagagagagagagaaagggaggaaggaagaaaggaaggaaggaagggaaaaagaaaagaaaaaagaaaagaaaagaaagaaagacactggcctcagagttctggactcatctctcagatcccccacttagtacctgagcaaccttggataaatagggataatagtggtgtttatatcatgaaatt

SEQ ID NO: 557299 - DNA, 585 bp, Homo sapiens
aattgggtcactcccatcagagtccctctctgccaggtactttggaagtagtggttagaaacatagacactggtcgggtgcagtggctcacgcctataatcccagcactttgggaggctgaggcaggtggatcacaaggccaggagtttgagactagcctggccaacacggtraaaccctgtttctactaaaaatacaaaaattagccggctgtggtggtgcatgcctatgatcacagctactcaggaggctaaggcaggagagttgcttgaacccgggaggcggaggttgcagtgagttgagatcgcaccactgcactccagcctgggcaacagagcaagactccgtctcaaaacaaaaaaaaaaaaaaaaaaaagaaaaggaagaagaaaaaaagaaaaagagagagagagaaagggaggaaggaagaaaggaaggaaggaagggaaaaagaaaagaaaaaagaaaagaaaagaaagaaagacactggcctcagagttctggactcatctctcagatcccccacttagtacctgagcaaccttggataaatagggataatagtggtgtttatatcatgaaatt

SEQ ID NO: 557300 - DNA, 572 bp, Homo sapiens
tgtgagcccgtttctgcaaccagaaaaccacctggctgagcccagtacaaatwgctgacctgctgaattatgagctcagtatttggctgtatacagatacagtggctggacctttgagccattatttatgacatttgtacaggccctctgtcctgtattcagtagtcaatggataccattattctcgtcaccacggtagggttcaaatggctgggagctttaggaccagatacatctatacaaaataataaaggccggcacttaggcaatacctgttgtgtgctaggtgctattctaagagtgttgcatgtattaactcatttaatcttcctaccatttctctgtggtatgcacttattaccaaccctattttatcaatgagaaactgaggaacagggaggctaagaaacttgtccagagtcacaaagctaataaatggtacagctggaggtcaaacccaggcaatctggctccagaacttgtgctcttaaaagccaagtcacgttatgttattctgagtaagcctgctgcttactacaactggctcaacagcttactagttacatgggaac

SEQ ID NO: 557301 - DNA, 572 bp, Homo sapiens
tgtgagcccgtttctgcaaccagaaaaccacctggctgagcccagtacaaattgctgacctgctgaattatgagctcagtatttggctgtatacagatacagtggctggacctttgagccattatttatgacatttgyacaggccctctgtcctgtattcagtagtcaatggataccattattctcgtcaccacggtagggttcaaatggctgggagctttaggaccagatacatctatacaaaataataaaggccggcacttaggcaatacctgttgtgtgctaggtgctattctaagagtgttgcatgtattaactcatttaatcttcctaccatttctctgtggtatgcacttattaccaaccctattttatcaatgagaaactgaggaacagggaggctaagaaacttgtccagagtcacaaagctaataaatggtacagctggaggtcaaacccaggcaatctggctccagaacttgtgctcttaaaagccaagtcacgttatgttattctgagtaagcctgctgcttactacaactggctcaacagcttactagttacatgggaac

SEQ ID NO: 557302 - DNA, 572 bp, Homo sapiens
tgtgagcccgtttctgcaaccagaaaaccacctggctgagcccagtacaaattgctgacctgctgaattatgagctcagtatttggctgtatacagatacagtggctggacctttgagccattatttatgacatttgtacaggccctctgtcctgtattcagtagtcaatggataccattattctcgtcaccacggtagggttcaaatggctgggagctttaggaccagatacatctatacaaaataataaaggccggcacttakgcaatacctgttgtgtgctaggtgctattctaagagtgttgcatgtattaactcatttaatcttcctaccatttctctgtggtatgcacttattaccaaccctattttatcaatgagaaactgaggaacagggaggctaagaaacttgtccagagtcacaaagctaataaatggtacagctggaggtcaaacccaggcaatctggctccagaacttgtgctcttaaaagccaagtcacgttatgttattctgagtaagcctgctgcttactacaactggctcaacagcttactagttacatgggaac

SEQ ID NO: 557303 - DNA, 572 bp, Homo sapiens
tgtgagcccgtttctgcaaccagaaaaccacctggctgagcccagtacaaattgctgacctgctgaattatgagctcagtatttggctgtatacagatacagtggctggacctttgagccattatttatgacatttgtacaggccctctgtcctgtattcagtagtcaatggataccattattctcgtcaccacggtagggttcaaatggctgggagctttaggaccagatacatctatacaaaataataaaggccggcacttaggcaatacctgttgtgtgctaggtgctattctaagagtgttgcatgtattaactcatttaatcttcctaccatttctctgtggtatgcacttattrccaaccctattttatcaatgagaaactgaggaacagggaggctaagaaacttgtccagagtcacaaagctaataaatggtacagctggaggtcaaacccaggcaatctggctccagaacttgtgctcttaaaagccaagtcacgttatgttattctgagtaagcctgctgcttactacaactggctcaacagcttactagttacatgggaac

SEQ ID NO: 557304 - DNA, 605 bp, Homo sapiens
ttgggtacaaacagatataaagttaggaacaatagacactggagagaattagggagggggacaagggctgagaaaacttcctgttgggtaccatgtttgctgtctgggtaatgggatcaatagaagcccaaacctcagtatcatgcaatatacccttataacaaaccttcacatgtaccctctgaatctaaaattaaaattaaaaaaagaaaaagtctgtatctttgacgaaattattgagcagytgcaacagctctggagtttttaatcttgttaatgatattttaatatacattttactattgctatatttatttgtcttttcactgcacgtgaacacatcctgaaagatagggcatgacagggagaatggggagctcagacactgtttcattggatgctcatattggacagaggaggaaaccaaggctcagagaggggaaggggctggcacaggtcacacagtaaatcactgacagagaaaacttctgcctccttggtctcaatgggaacgtagcatatcccaggctggtactcttgtttgtgctaccataggaaggtgacaacggataacaggaacattaaaaaaatgtgcatacccactc

SEQ ID NO: 557305 - DNA, 580 bp, Homo sapiens
catttgctttcgaaccttattaacctagctggtaattaagtctgaagtgtgagcattggcagaagatatttgacatttaggcagcgcataaaccattttcttgtctmactctttttctttttttctttgttattacatatgttaaagacaatacatttttctccatgaagaagaaaattttaaaatattatctattatcttatgaccccaaaataacttctaacattttaagagatgtcttctctctagcctctgaatgtgtgtctacacacacacacacacacacacacacacttatactattttttacaaaaactagatattgctgcgtgtactgttttaccaactgctttgttttattctttaaaaaaaaaaaaacacaatcaatagacaggcctatgttctgaatctgccttttatgccctgtgtgaatttgaaggcatcacttaaataatctgagtttcaattttctcatctgtaaattaaagctcacggtagtacctgcctcataaggttatttgaggacaaacatcataccaggcaaatgcttagcaaatagtgagccctgtgtgtgtgtaca

SEQ ID NO: 557306 - DNA, 588 bp, Homo sapiens
ctcactctgttgcccaggttgaagcgctgtcagggctcactgtggcctggaccttctgggctcaagagatcctcccacctcaacctcccaaagttctgagataataggcatgagccatcatgcccagcctattttgttattatatgaactcagaaagtaccagggccaggtgtggtgacacatgcctgtagttccggctactcaggaggccaaggattgcttgatcccaggagtttgacaccagtctggacaacatagtgagacactgtctctttttttttttttttttttttaagtaaccagagcatgtccataaaggctgtactgtatcttctccatttttaaaagttaaggctgggcacagtggctcatgcctgcaatcccagtactttcagaggcagaagtgggaggatcacttgaggtcagaaatttgagaccagcctaggcaacacagcaagacgacccctcaacaacaacaacaacaamaaaatttaattagctgggcatggtggcatatacctatactcctagctactcaagaggctgaggcaagaggaatgcttgagcccaggagttcgacgctgcagt

SEQ ID NO: 557307 - DNA, 568 bp, Homo sapiens
ctcatacaggcaggtgtccctctagcacgaagcttccacagaaaggatcaggcagcaacatttgctgttctgcaatatttgcagttctgcagcctcaactggtgatacccaggcaaacagggtctggagtggacatccagcaaactccaacagacctgcagctaagggacctgttagaaggaaaactaasaaatagaaaggaatagcatcaacatcaacaaaaaggacatccacaccaaaatcccatctgtaggtcaccaacatcaaagaccaaaggtagataaaaccacaaagatgggaagaaaccagagcagaaaagctgaaaattctaaaaaccagagcgcctgttctcctccaaaagatcgcagttcctcaccagcaaaggaacaaagctggacggagaatgactttgacgagttgacagaagtaggcttcagaatgtcggtaataacaaacttctctgagctaaaagtttatgttctaatccatccaaggaaactaaaaaccttgaaaaaaggttagatgaatggctaactagaataaccagtgtagagaagaccttaaatga

SEQ ID NO: 557308 - DNA, 568 bp, Homo sapiens
ctcatacaggcaggtgtccctctagcacgaagcttccacagaaaggatcaggcagcaacatttgctgttctgcaatatttgcagttctgcagcctcaactggtgatacccaggcaaacagggtctggagtggacatccagcaaactccaacagacctgcagctaagggacctgttagaaggaaaactaagaaatagaaaggaatagcatcaacatcaacaaaaaggacatccacaccaaaatcccatctgtaggtcaccaacatcaaagaccaaaggtagataaaaccacaaagatgggaagaaaccagagcagaaaagctgaaaattctaaaaaccagagcgcctgttctcctccaaaagatcgcagttcctcaccagcaaaggaacaaagctggacggagaatgactttgacgagttgacagaagtaggcttcagaakgtcggtaataacaaacttctctgagctaaaagtttatgttctaatccatccaaggaaactaaaaaccttgaaaaaaggttagatgaatggctaactagaataaccagtgtagagaagaccttaaatga

SEQ ID NO: 557309 - DNA, 628 bp, Homo sapiens
atgagttgatgggtgcagcaaaccaacatggcacgtgtatacctatgtgtcaaacctgcacgttgtgcacgtgtaccctagaacttaaagtataaaaaaaaactacaaataaatttgatgactatatgatctttagaagtaaaaacgttttctaaatgtactagcaatagaaaacgtttcagaggaaaacatttaaatatttctatacatcaaaagtatcctaaatgtaaacaaaataccagaagatatatttgttaacaatagggcaaacaagaggtcaatacctttaatacgtggagtccagatcatctagaagataacaccaaagatctcagtggctaaagagacagaacattaatgtgcaattacaaaggaaaaaaatatgatgaccaataaccattacaaaatgccaaatctcaatagtgattaaatccactcacattaaagtgagatatgatttttcacctcttgaatgataggactcagtgtctgtgaggatgaagtacaacagtcaactactccaatacaagactattgtaattctgcactgctccagcttcstagaaggcagcttagcaattgtgtttcaagtctcaaaaatattcatatgctttaatccactaattta

SEQ ID NO: 557310 - DNA, 604 bp, Homo sapiens
gataagtgaatcatattctgggtgttaacaattcaccaaatgattcctatgcacatgaaagtttgagaagcatgggcctatcatgagatatttcttggtcctcatatctgttgagtcaagaatatctagtgcttcatctctccctttttagatactcctttatctttcaaatataattttctcctggttttccttctgtctctgtgactatttcttctcaatctgcttttttgtagtctatagctaaaatcctccattaggttttattttctcctgtttccacaccacatacttgtattgtttaagattagattcaacaggaaataatagtaagcccaccaaaacaatggtttaaacaagataaaagaccattttttctcatgtcaaatgtaggcagtccagtgatggactgctaaactgctccacaaascttttagtcactcaagctacttctattctggttcttcatacttcatagcttccatttccaaggtcactgaggtttaaataccacagatatcacatgtgcacatcagcttccaggaaggaggaagggatgcacaaaaaaagggcaaaaggcagctgccaaattctaaaatctgcc

SEQ ID NO: 557311 - DNA, 649 bp, Homo sapiens
tcatccttcttatgtcttattttctaaccttttaccatttttcatgacttctttttggacttacttcaccgctttatagaaggtatcatgggacaacttcaaacaaatgccaaaagatactcccatataaacaaaagctgcactagtcattggtgttcgtcccctaatctacaaatgatgtccctcattcctagcaaacaaattttaaaaaaccaaaagaaccagcaacaacaaaatatagaagcctttagtttagagcttaaaatccttatggtttaaaaggaaatgatggcagaacagagaccaaatacaaaaatacctgtgaacatatggagttggatagaattgttctaatttactctgaggaatgatttgaatttgtgttctcacacagcttgtcagaatgctcatgttaattttgttaagaatcgactgctttttaactacgtgatactgaaaagttttctatgattcattaaaaactgataagatttcattttgcaatcatttgtataacttgtacattgtgttcattaaatgtgattaattctcctcttcattatcrattagcacagaagctacacaattttaccacacaccactttctccttttcttctcacttttgaaaacatattttttgatacttat

SEQ ID NO: 557312 - DNA, 649 bp, Homo sapiens
tcatccttcttatgtcttattttctaaccttttaccatttttcatgacttctttttggacttacttcaccgctttatagaaggtatcatgggacaacttcaaacaaatgccaaaagatactcccatataaacaaaagctgcactagtcattggtgttcgtcccctaatctacaaatgatgtccctcattcctagcaaacaaattttaaaaaaccaaaagaaccagcaacaacaaaatatagaagcctttagtttagagcttaaaatccttatggtttaaaaggaaatgatggcagaacagagaccaaatacaaaaatacctgtgaacatatggagttggatagaattgttctaatttactctgaggaatgatttgaatttgtgttctcacacagcttgtcagaatgctcatgttaattttgttaagaatcgactgctttttaactacgtgatactgaaaagttttctatgattcattaaaaactgataagatttcattttgcaatcatttgtataacttgtacattgtgttcattaaatgtgattaattctcctcttcattatcgattagcacagaagctacrcaattttaccacacaccactttctccttttcttctcacttttgaaaacatattttttgatacttat

SEQ ID NO: 557313 - DNA, 548 bp, Homo sapiens
cgctgtaagcttctgcctacaaaaagagctgagcttaaatataatgcttgattcctctgggcaccctgttctcaaggcaccacttctacaccttctgtttgtttaccatggagacagcagtttatgtttactgtggaactgggagtacactggctaagctgatgctaaggagaaaacacagcagctatttacatgttacacaaagaagtgrccttaatgagcatcagatgtgtgaaaatctacgaagcacaagaaaatcccagattctctcccgaacatgttatgaacccataactagagaaagataatagccaggatacagaaatctgttatcaaccacacatacagggatattgtgattaacagttttcaatgccatcaatgcagtctaacaatatgactctcaataattctgtaagcgtgagactgaaaaataaaaaagtggggatttagcccaagaatctccttccagcttgggtgttctcagattcactgtgaaaacaagtctttcaataaggtaaatgtattctgtgagcccggagttccac

SEQ ID NO: 557314 - DNA, 421 bp, Homo sapiens
cctcgccctgctcacgctcagtgtgctggacccactgtcctgcacccactgtccgacactccccagtgagatgaacccggtacctcagttggaaatgcagatcacccatcttctgcattgctcatgctgggagctgtagactggagctgttcctatttggccatcttggccccacaatccttttttttttttttttgacagagtctctctctgttttccagcatagagtgcagtggcacaatctcagctcactgtaacctccatcttctgggctcaaatgaactctccacttcaccttccagagtagctaggactataggtcccagtgaccccactattttttttttgtagagatgccacagtgcmcccagtatttattttttatttttattttttgtagagatgaggtcccactatattc

SEQ ID NO: 557315 - DNA, 586 bp, Homo sapiens
gacaatttgacttcctcttgaccaatttggatgccctttatttctttctcttgtctgattgctctggctaggacttatagtactatggtgaagaggaatggtgagactaggcatccttgtcttgttcccrttctcagagggaatgctttcaacttttcccattcactattatgttggctgtgggtttgtcatagatggcttttattacattgaggtatcttccttgtatgccaattttgctgagagttttaatcataaagcgatgcaggattttgttgaatgtttttcctgcatctattgaaatgatcatgtgatttttgtttttaattctgtttatgtggtatgtcacacttattgacttgtgtatgttaaaccatccctgcatccctggtatgaaatccacttgatcacggtggattatctttttgatatgctgttggattcagttagctagtattttgttaaagattgctgcatctgtgttatattcttttgctgaattgatccctttattattgtataatgacctcctttgtctctttttacagttgttggcttagagtatattttatctgatgtaagtata

SEQ ID NO: 557316 - DNA, 586 bp, Homo sapiens
gacaatttgacttcctcttgaccaatttggatgccctttatttctttctcttgtctgattgctctggctaggacttatagtactatggtgaagaggaatggtgagactaggcatccttgtcttgttcccgttctcagagggaatgctttcaacttttcccattcactattatgttggctgtgggtttgtcatagatggcttttattacattgaggtatcttccttgtatgccaattttgctgagagttttaatcataaagcgatgcaggattttgttgaatgtttttcctgcatctattgaaatgatcatgtgatttttgtttttaattctgtttatgtggtatgtcacacttattgacttgtgtatgttaarccatccctgcatccctggtatgaaatccacttgatcacggtggattatctttttgatatgctgttggattcagttagctagtattttgttaaagattgctgcatctgtgttatattcttttgctgaattgatccctttattattgtataatgacctcctttgtctctttttacagttgttggcttagagtatattttatctgatgtaagtata

SEQ ID NO: 557317 - DNA, 586 bp, Homo sapiens
gacaatttgacttcctcttgaccaatttggatgccctttatttctttctcttgtctgattgctctggctaggacttatagtactatggtgaagaggaatggtgagactaggcatccttgtcttgttcccgttctcagagggaatgctttcaacttttcccattcactattatgttggctgtgggtttgtcatagatggcttttattacattgaggtatcttccttgtatgccaattttgctgagagttttaatcataaagcgatgcaggattttgttgaatgtttttcctgcatctattgaaatgatcatgtgatttttgtttttaattctgtttatgtggtatgtcacacttattgacttgtgtatgttaaascatccctgcatccctggtatgaaatccacttgatcacggtggattatctttttgatatgctgttggattcagttagctagtattttgttaaagattgctgcatctgtgttatattcttttgctgaattgatccctttattattgtataatgacctcctttgtctctttttacagttgttggcttagagtatattttatctgatgtaagtata

SEQ ID NO: 557318 - DNA, 540 bp, Homo sapiens
cctagtatctatggcatgtcaaactggagacagtattttccaagaatattrtgttctgtggagttttctttgtcacaaaggaggctatatcataatattttggaggaagtatatatgatttcatcaaatgctacacatttgatgaaaatggtcaccaagattctttattgagatatttaaagtagagaaatgttgtctccttgtgtgttaaataaagtaaaataaattagagaaacgtacaaagaaatttttatactcttgcctttactctactcaggattgaggttacaatgtttttcatatttgtctttttctaaattaaaggaacatagcatagcagatatagttggaatatctttcactaactgactcacagataatcatagttcagatcagagagtagtatagatgatcagcctctgtggctgtatgggaaccttgacagcagtgctggcggctggccccctggccatcctggcagccacaagggaagtcaaggctgcctcaagcctgtgggggcctctgggaccccagctgagg

SEQ ID NO: 557319 - DNA, 540 bp, Homo sapiens
cctagtatctatggcatgtcaaactggagacagtattttccaagaatattatgttctgtggagttttctttgtcacaaaggaggctatatcataatattttggaggaagtatatatgatttcatcaaatgcyacacatttgatgaaaatggtcaccaagattctttattgagatatttaaagtagagaaatgttgtctccttgtgtgttaaataaagtaaaataaattagagaaacgtacaaagaaatttttatactcttgcctttactctactcaggattgaggttacaatgtttttcatatttgtctttttctaaattaaaggaacatagcatagcagatatagttggaatatctttcactaactgactcacagataatcatagttcagatcagagagtagtatagatgatcagcctctgtggctgtatgggaaccttgacagcagtgctggcggctggccccctggccatcctggcagccacaagggaagtcaaggctgcctcaagcctgtgggggcctctgggaccccagctgagg

SEQ ID NO: 557320 - DNA, 540 bp, Homo sapiens
cctagtatctatggcatgtcaaactggagacagtattttccaagaatattatgttctgtggagttttctttgtcacaaaggaggctatatcataatattttggaggaagtatatatgatttcatcaaatgctacacatttgatgaaaatggtcaccaagattctttattgagatatttaaagtagagaaatgttgtctccttgtgtgttaaataaagtaaaataaattagagaaacgtacaaagaaatttttatactcttgcctttactctactcaggattgaggttacaatgtttttcatatttgtctttttctaaattaaaggaacatagcatagcagatatagttgraatatctttcactaactgactcacagataatcatagttcagatcagagagtagtatagatgatcagcctctgtggctgtatgggaaccttgacagcagtgctggcggctggccccctggccatcctggcagccacaagggaagtcaaggctgcctcaagcctgtgggggcctctgggaccccagctgagg

SEQ ID NO: 557321 - DNA, 543 bp, Homo sapiens
ttcaattaatgtacagacagatatgtcttatgcctcacaaaactttgtaccttctgcacagtgggctagcctcgattcttctgtgtcatcttgttctcaaattgattttgtcatttgattctcaagtgtcccttcccactagtgttcacacagacatttttgcccagcttgaggctaactttacctatagctgctcagagtgatgcatttataggcacttgtttccaatcaggtgagatcttcagagaaaccaaaactagtgggatggttcaagactaaaaccatgggattgagctgggaagggctgtgggtaaacaaaatttgccaggggctggaggaaaggagagattgtcaggtgagatggagaggtggtgtagattaggcacttagaatgcttgagtttgagatacctattasacatccaccattgaatttagtaatgtggcaagaggtccttgaccataaagattttcaacttttaagagactagaccaagcagaataaataatttctgaagttgaaaacaggtcttttgaaataaca

SEQ ID NO: 557322 - DNA, 543 bp, Homo sapiens
ttcaattaatgtacagacagatatgtcttatgcctcacaaaactttgtaccttctgcacagtgggctagcctcgattcttctgtgtcatcttgttctcaaattgattttgtcatttgattctcaagtgtcccttcccactagtgttcacacagacatttttgcccagcttgaggctaactttacctatagctgctcagagtgatgcatttataggcacttgtttccaatcaggtgagatcttcagagaaaccaaaactagtgggatggttcaagactaaaaccatgggattgagctgggaagggctgtgggtaaacaaaatttgccaggggctggaggaaaggagagattgtcaggtgagatggagaggtggtgtagattaggcacttagaatgcttgagtttgagatacctattacacatccaccaytgaatttagtaatgtggcaagaggtccttgaccataaagattttcaacttttaagagactagaccaagcagaataaataatttctgaagttgaaaacaggtcttttgaaataaca

SEQ ID NO: 557323 - DNA, 631 bp, Homo sapiens
acatttgctgaaaatggctaagatcaacaacaatccaattgtcagttctcacactttcattcttcctattaatcgctctctgcagcatttcacattgacaacaaactatgtttcttgagacatctcttcccataaatttgataggtttattgcctttcttattaacccttctgctttttaaattttaggatgaaccttagcatttaatatttaagccttttctatacatgcttttatttatgacctcatctattcccacatcatcagctactatgtacatgttaaggattgtgaaattcatagatctggttccaaattcagatgggcatttaacttacttaaaatgagaatttaacttaattcaaaactaaatttatcatctccatagctttttgttttgttttgattgaaactaatagtggtaatatttactcagtctcctyggattgaaattttgtgctcctattcacaatatttattctaccaaaatttctttctttaccccctctgaaaacatttattttctctctaacttaggttgagttattcaattgagtaactaaatagaataaaaccatattcatttcactattaacacttaacagattgcaatttatttccaagtctctcc

SEQ ID NO: 557324 - DNA, 575 bp, Homo sapiens
tatgaggcttgtgtctgaacatgagagttccagaagaggctcatagtcacagaagtaatgattcagtctgttggatgcacaaaagtcctgctgactcatcagggtgattgttggtataatagccattagcccacccagccaagagcagaaaatcagctggatgcagattctgctgctcatgatggtggtgtaatgcagaggtttgcagatggccacatagcggtcataggacatggcagccagaaggtaaaactctgtagccccaaggaacatggcaaakaaatactgagtgaagcagccagcaaagctgatactcttgttccctgttgtgatgctaatcaggacccttggaatgaagatgtttgtgaaggaaatttccaagaaggagaagttccggagaaagaaatacatgggagtctgaaggtgggagtccagcaaggtgaggatgaggatagtcagatttccaaggatgctgagtaaatacgcaaggaaaagaaaggtgaaaactgccacctggagttcagggacatctgttagacccagaaggataaactcagttaacacggttttatttt

SEQ ID NO: 557325 - DNA, 443 bp, Homo sapiens
atgagatttgggaggggccaggggcagaatgatgtggtttgggtgtgtccccaccaaaatctcaccttgaattgttgctcccataattctctcatttcgtgggagaaacccagtgggagataaytgaatcatgggagtggtttctcccatactgttcttgtagtgaatgagtctcataggatctaatgattttataaggggaaacccctttcacttggctctcattctcttctgttgtctgtggccatttgagacatgcttttcacctcctgccatgattgtgaggtctccccagccacgtggaactgtgagtccgttaaacctctttcttttgtaaattgcccagtctcaggtatgtctttatcagcagtatgacaatgggctaatacaaacatacacattcatgtgtctttatgggagaataatttatattcctgcattag

SEQ ID NO: 557326 - DNA, 556 bp, Homo sapiens
aggtaatgctgaagtgagttaagactttaggggactgttgggaaggcatgattggttttgaaatgtaaggatatgagatttgggaggggccaggggcagaatgatgtggtttgggtgtgtccccaccaaaatctcaccttgaattgttgctcccataattctctcatttcgtgggagaaacccagtgggagataactgratcatgggagtggtttctcccatactgttcttgtagtgaatgagtctcataggatctaatgattttataaggggaaacccctttcacttggctctcattctcttctgttgtctgtggccatttgagacatgcttttcacctcctgccatgattgtgaggtctccccagccacgtggaactgtgagtccgttaaacctctttcttttgtaaattgcccagtctcaggtatgtctttatcagcagtatgacaatgggctaatacaaacatacacattcatgtgtctttatgggagaataatttatattcctgcattagtgtgttcttatgctacaaagaaatacctgagactgggtaat

SEQ ID NO: 557327 - DNA, 443 bp, Homo sapiens
atgagatttgggaggggccaggggcagaatgatgtggtttgggtgtgtccccaccaaaatctcaccttgaattgttgctcccataattctctcatttcgtgggagaaacccagtgggagataactgaatcatgggagtggtttctcccatactgttcttgtagtgaatgagtctcataggatytaatgattttataaggggaaacccctttcacttggctctcattctcttctgttgtctgtggccatttgagacatgcttttcacctcctgccatgattgtgaggtctccccagccacgtggaactgtgagtccgttaaacctctttcttttgtaaattgcccagtctcaggtatgtctttatcagcagtatgacaatgggctaatacaaacatacacattcatgtgtctttatgggagaataatttatattcctgcattag

SEQ ID NO: 557328 - DNA, 428 bp, Homo sapiens
gttttccataatggctgtactaacttacattcccaccaacaatgtgcaagggattccttttttttaatggagtctcactctgtcccccatgctggagtgcagtggtgtgatctcagctcgctgcaacttccacctcccgggttgaagcaattctactccctcagactccagagtagctgggatcacaggtgcatgctaccatttccagctaatttttgtatttttagtasagatggggtttcagcatgttggccaggctggtctcaaactcctgatctcaggtgaatctcccacctctgccttccaaagtcctgggattacaggcatgagccactgtgtccagtccaaaggatttcttttatccacatccttgccaacaatttttatttttttattttttacttaaaaaatttattattattattatt

SEQ ID NO: 557329 - DNA, 428 bp, Homo sapiens
gttttccataatggctgtactaacttacattcccaccaacaatgtgcaagggattccttttttttaatggagtctcactctgtcccccatgctggagtgcagtggtgtgatctcagctcgctgcaacttccacctcccgggttgaagcaattctactccctcagactccagagtagctgggatcacaggtgcatgctaccatttccagctaatttttgtatttttagtacagatggggtttcagcatgttggccaggctggtctcaaactcctgatctcaggtgaatctcccacctctgccttccaaagtcctgggattacaggcatgagccactgtgtccagtccaaaggatttcttttrtccacatccttgccaacaatttttatttttttattttttacttaaaaaatttattattattattatt

SEQ ID NO: 557330 - DNA, 519 bp, Homo sapiens
gtggtgttttcattgtcctttgacagccctgtacttggttatttatatctttctccaggtttggaaatgtttttgctattatttctttatgcaatttttctacttctttgtctttcttttgctcctttaactctagaaactgaaagcacttgctgttttgatgcattcccataaatcctgtaatattttcttattcctttttcttttttctctgcttactttatacttacatataaactgtcttcaagtttacagawttttttcctgcttgatcaagtccactgtttatacaatctatttttatctcatatttttagctccagatttctgtttaattttttaattgttttaatctctctattaaatttcttgttctggtcatttactgttttccttgtttctttgaggaaagtatttctctgtattttattcaacattttattcaagtttactgagtttccttaaaatagttattttgaattccttgtcaggtcttttgtatatctccattttttaggg

SEQ ID NO: 557331 - DNA, 519 bp, Homo sapiens
gtggtgttttcattgtcctttgacagccctgtacttggttatttatatctttctccaggtttggaaatgtttttgctattatttctttatgcaatttttctacttctttgtctttcttttgctcctttaactctagaaactgaaagcacttgctgttttgatgcattcccataaatcctgtaatattttcttattcctttttcttttttctctgcttactttatacttacatataaactgtcttcaagtttacagaattttttcctgcttgatcaagtccactgtttatacaatctatttttatctcatatttttagctccagatttctgtttaattttttaattgttttaatctctcyattaaatttcttgttctggtcatttactgttttccttgtttctttgaggaaagtatttctctgtattttattcaacattttattcaagtttactgagtttccttaaaatagttattttgaattccttgtcaggtcttttgtatatctccattttttaggg

SEQ ID NO: 557332 - DNA, 507 bp, Homo sapiens
taaccataaactagaaaatggacatattaagttgacaaaaatcttaaaaattttctcytcatttggagaaaagtagactaaatatatattctttcattttcctcttatgaaaggagggaagttgcaatggttacatttgaaatatagatgaaaaaatggaggagaagaaaaattattcactcctcgatggaaacatagtctccagggctccatgctgaagaacaatgctgatactacattctcctcaaaacaattctgaaaatttcttgactcatgaaacccagctaactcagtagttgtaattacttacttttatgatctggtttcctttttcactctaaattcttatcctcctactcttctaaataaacaatctgttttgcttcttaaatttcaaataatttatggaaaacagaactaattctttccaactgttccttttcagatccccattcactcttctctaataacaattaaaatattattttgttttttgtaaatttatta

SEQ ID NO: 557333 - DNA, 507 bp, Homo sapiens
taaccataaactagaaaatggacatattaagttgacaaaaatcttaaaaattttctcctcatttggagaaaagtagactaaatatatattctttcattttcctcttatgaaaggagggaagttgcaatggttacatttgaaatatagatgaaaaaatggaggagaagaaaaattattcactcctsgatggaaacatagtctccagggctccatgctgaagaacaatgctgatactacattctcctcaaaacaattctgaaaatttcttgactcatgaaacccagctaactcagtagttgtaattacttacttttatgatctggtttcctttttcactctaaattcttatcctcctactcttctaaataaacaatctgttttgcttcttaaatttcaaataatttatggaaaacagaactaattctttccaactgttccttttcagatccccattcactcttctctaataacaattaaaatattattttgttttttgtaaatttatta

SEQ ID NO: 557334 - DNA, 514 bp, Homo sapiens
ttgtggagaaatgtagagcaatggatggacactccctggggatgggtgtgcctggccttgtcattatttctattatctctcctttaataatcctgtttggccagtgctccaacatgatrtaaatgaatgacaactcacagtaaatcaccataacctgaatgctgtggtatcctccatgaatctcccatgtctaaattaccaaattactgactccatcaaaccaacagctggaaaatagtttgctgttgacatattttgctaatatgttcaattcaatgcatagttcaaacagcctctcagaagcaatcagccttcacttttgaaagaaatatactttcactcacttccccacaggatatctcaacaggactaccagcacacagtctttgcatgcaagatcttaaccacattcaactttttccaggaacacacatgttgctaattacaaaccattgaaaatgtggaagcagctttaaaagtcaatacttggcagaagctgaaagaatttggaagg

SEQ ID NO: 557335 - DNA, 514 bp, Homo sapiens
ttgtggagaaatgtagagcaatggatggacactccctggggatgggtgtgcctggccttgtcattatttctattatctctcctttaataatcctgtttggccagtgctccaacatgatgtaaatgaatgacaactcacagtaaatcaccataacctgaatgctgtggtatcctccatgaatctcccatgtctaaattaccaaattactgactccatcaaaccaacagctggaaaatagtttgctgttgacatattttgctaatatgttcaattcaatgcatagttcaaacagcctctcagaagcaatcagccttcacttttgaaagaaatatactttcactcacttccccacaggatatctcaacaggactaccagcacacagtctttgcatgcaagatcttaaccacattcaactttttccaggaacacacatgttgctaattacaaaccaytgaaaatgtggaagcagctttaaaagtcaatacttggcagaagctgaaagaatttggaagg

SEQ ID NO: 557336 - DNA, 619 bp, Homo sapiens
gttccactctggcattgactgttagcwgtggccccattcttctttctttaattaaatatttcaggcatagaaaaacgtgcaaaaaataacagaacaagcttctatgaaacagaacatgaaaaacacacttaaatctctttgcaaaccctcccaaaccactttcttcccagctgtggtaacctctctcctgaatttggtgttcatcattccatcatgtttttatgattttactatatatatatatatatatatacatatatatatgcataaaaatatactgaattgcttttcaggtttttgcatgttagtaaatagtaaaattctatatgtgtcctgtggcaactcgcttttttcccccactcaacactatagtattttagatttatctgtgatgatacatagagttctagctcattaattttcactgctgcatggtactctcctttaagaatatactggaattgatccatccattctcttgttgataagcatttagattccttccagttttccaccattaaaaagtgctgcaatatatattcttctacatttgtatactgaaattctgatggatgaactctcttgatcataccagggcctctggtctgaatatgtgtgt

SEQ ID NO: 557337 - DNA, 265 bp, Homo sapiens
tcttgtcaacattagaagaaatctttagtcctattttaccgattgggcaaccaaggccagagaggctaagtcatttactttaggacatacagctggtaattatggagttaggattgcaagatgcagcaaaataaaataaaggacatccaattatatttgggttctgagtaaacaatgtaaaaaaaatagtgaaagtatatcccaygtaaaatttcagacttatactaaaaatttaactgagcatcctgtattttacctggcaact

SEQ ID NO: 557338 - DNA, 265 bp, Homo sapiens
tcttgtcaacattagaagaaatctttagtcctattttaccgattgggcaaccaaggccagagaggctaagtcatttactttaggacatacagctggtaattatggagttaggattgcaagatgcagcaaaataaaataaaggacatccaattatatttgggttctgagtaaacaatgtaaaaaaaatagtgaaagtatatcccacgtaaaatttcagacttatactaaaaatttaactgrgcatcctgtattttacctggcaact

SEQ ID NO: 557339 - DNA, 403 bp, Homo sapiens
tcatgcctcccctttttagaccatgcctgacattgccatggcatttgtaractctcatggcgccagtgggagtgtagcactgaggaagaccagagatcattctcattactatcttggttttggtggattttggcagccttctttactgcaaccagttttatcagcaaggtcttcatgacctgtaccttgtgctgatctcctatttcattgtgtgactaagaatgtcttaatctcctgggaatgcagcccagcagatcttattttacccagtccctattcaagatggagttgctctggttcaaatgcctctgacacctgcagctctcttcttggttgcattcttgcccattgactgaaatggggacatcctgcaagggagagtgggagtgagtaggatccaatc

SEQ ID NO: 557340 - DNA, 596 bp, Homo sapiens
cattcacaaacccagacatcaaattccagcagattggctgatttctagagctcctcttgaaactttatggaatttactgatcaaaaagagtattggcaagtatgtgaggccccactctatccaaatcatgactgcccatctctagaactttgctactttggaagcaaattgaaagaagtagctgctatataatttaaattctgctaatgtgtatttactatctacacccaattatcaccaatcaatttaacagttattacttaatgggtgaaaattacaattctggtgccscagatcagcatggggcattgtggctaattaggacagaacttattcagaagtataatgaaaatgtaaattcccacacattaatcaaacaattatttctataaccacaagacagctgatcctaagcctaattaggaaataaacaaagttaatcagtgagcagacaacatttaataatcatatatgtgtcacaagaagagaaatattaggcaatgattcatcaaaacatcccaaagcccaaccattctataatctataataatacagcctccctgcttcaataatgcagtattcaaatttttattaaa

SEQ ID NO: 557341 - DNA, 552 bp, Homo sapiens
agaaggcaactcagaaatacccacatggaagagatgtatgggtcaagatctgggagtcaatgcaggcggaaggagcacagagatcccataccatctcccatggaaccagggtgtggcactcttccggcacatcaatgtgttcatccacctagaagtgcccccaagccttgctgtccaagacttgttatggaggtttcattatgtaggcatgattgagtaaatcattaactatgtgattgaactaaattcccatcccmtcccctctctcctccccagaggtggggtgtggggctgaaaagttcagtcctctaattatgtgcttggttcctccagcaaccagcccctatcctgaagctacctagatccccacctctcccataagttgtctcattagcctaaattctggtatggtcaaaaggtgctcattatgaataacaaaagatacttctatcactcaggaaattccagggtattttgaaacactgtgccaggaactgcgaataaagcagatatatattattactatattacattcccttagccatgctatat

SEQ ID NO: 557342 - DNA, 529 bp, Homo sapiens
gagtggaccacagccttttctggatgtttgctggctggggactctgatcagacaaattctgagtggggcattccaggtctcctgacatcagaattatgtgtggtagatgcagaaatggtggcaatttgctgcccttctctgtatttactctttttccaatgtgcttttgcagccctctcattgaaaagtggagtctggttcctgaaaaatccttgaatctaagctggccttatcacttgtattggcctatagagtatagtggaagtgactcagagagttcctaggggttctcaggagtcaagaggactagaacacttctactttctcttttgaaatcttgcccagctactatggggacaaccccaggatatctgctagcasataagagcttgtggaggggagctcagtcatttcagacaaggtcattctatatcagcctatggccagttgaccctcaaatactgaaaaccccaccaagacaacgaagccacctacctgacctccagctgtactcagacacttaagtgag

SEQ ID NO: 557343 - DNA, 529 bp, Homo sapiens
gagtggaccacagccttttctggatgtttgctggctggggactctgatcagacaaattctgagtggggcattccaggtctcctgacatcagaattatgtgtggtagatgcagaaatggtggcaatttgctgcccttctctgtatttactctttttccaatgtgcttttgcagccctctcattgaaaagtggagtctggttcctgaaaaatccttgaatctaagctggccttatcacttgtattggcctatagagtatagtggaagtgactcagagagttcctaggggttctcaggagtcaagaggactagaacacttctactttctcttttgaaatcttgcccagctactatggggacaaccccaggatatctgctagcagataagagcttgtggaggggagctcagtcatttcagacaaggtcattctatatcagcctatggccagttgaccctcaaatactgaaaaccccaccaagacaaygaagccacctacctgacctccagctgtactcagacacttaagtgag

SEQ ID NO: 557344 - DNA, 482 bp, Homo sapiens
attattattattattttttgagacaaggtcttgctgttacccaggatggagtgcagtggtgcaattgcggcaggtcaggtctcactaacacaggtctscataacaactgttttagccctgactgagtggagaagttaaacattaaaagctgaaagagccagtgtccttatataaaggctggaatgtaacaaaagcccaccaagagttttgcccaggcctttcctgggccttgaagcctacaagacaaggaaggaattcttaacaggacccgtttaggattaaacaagttttactgggtgtctgaagaaactcgctaggcctccacaaacaagtttattgggggtctgaaggaactccccaaacctccatgatttagcaggagataagataagggtaatcattccagcacctggacccatttagattaagcaaatttactgaggctcctaaggaaggtctttaggacttagatcttagttata

SEQ ID NO: 557345 - DNA, 551 bp, Homo sapiens
atgcctgtgagcccctttattcattcataaggtggatgtaagaattgttattccatttgccttggacaatctttccccagacattgcttgactctcacagtcacatttccctagtctttgttcagatgccacttcctccgtgcagcctttcagcactgccttgttagaaactgcgactccaccccagcacttgtcattccctttccctgctctattttatttttcataacatttactactaaccayactacattacagttttatatattttatgtgttgtctctctctccccagtaagaatatcagctccaagagggcagaggttttgcccgttttgttcactgctgtattcccagaatgaagcaggtgctcaaaaaacatttgtgaaataacgtattaattaaataagcacctaacagtacctggcacagagtagggcattattattacacagacattgttcacaaatcaggccaatgccacatggttcctactttactaattcatctaaaaatatttcttgtgcatatactatatgccaaggagtgtgc

SEQ ID NO: 557346 - DNA, 597 bp, Homo sapiens
tccatcaattattattattattttttgagacaaggtcttgctgttacccaggatggagtgcagtggtgcaattgcggcaggtcaggtctcactaacacaggtctgcataacaactgttttagccctgactgagtggagaagttaaacattaaaagctgaaagagccagtgtccttatataaaggctggaatgtaacaaaagcccaccaagagttttgcccaggcctttcctgggccttgaagcctacaagacaaggaaggaattcttaacaggacccgtttaggattaaacaagttttactgggtgtctgaagaaactcgctaggcctccacaaacaagtttattgggggtctgaaggaactccccaaacctccatgatttagcaggagataagataagggtaatcattccagcacctggacccatttagattaagcaaatttactgaggctcctaaggaaggtctttaggacttagatcttagttatagattaaaagaagttaatcacttatgtctttaggtaaatkcacacttacacgtagacatatagctcagaaggtaaataagctctgaaaaactttgtaactgagttggtc

SEQ ID NO: 557347 - DNA, 546 bp, Homo sapiens
tgacaatctaatgttcaacacataaatctcctttgggcaggctttgtaggtcttatgattaatgctcaatagccacagttgactctattttatttcttttattttattgaatatatatgcaaataaactcaaagagatttttaagtagattgcatgcatgtttcccatggttttaattccctcattagttgcatcttttgactctcatgggggacttgatttcttaatgtgttctataatttttagctgtgagctcatctttagtgggatttttttcttcgggattccagggactcaagattggagaagctcatggtacaggcttgatgtttccatttatctcaggggatcttttaccaacttcagcctgaggtgatcaacccacttgtatgccatgagcctaagccagtaggtagagttttytagtgacactttcatggatggaaagccctttatggttcctgctttgagctttatagatcccttcatgtggatgcgactctgctctccaggcattggtattatgactctctaggtttataaagt

SEQ ID NO: 557348 - DNA, 548 bp, Homo sapiens
cacagtgaaaattctgggttttattctcagtaggatggaaagccagtgaaagtttttaaacagaaaatgacaagagctgactttgttcctcctaatatttgtctccttgaagacttggatggayatttatctttgcatttttttcactgcaccccatgcagagtaagtactgaaaatgtgtcttgatcactgattgctcccttgaaatcaacaaatatttataagatgcagtttctcatcttctagacaagtgttttttaattcattttgggtttaaaaccccttgaagtgtctgttcagagctgtggaccattccttagaaaatattcccatgtacacgtgcacattatgttttgcataaataattgatgaatgccctgaaggccaggttgggactttgtaccctgagataccttgctgtagaatctgctgtcttgatacttttcttctgaagatccctggtttggatggagatcattaccatcttagatttacagtccgattatcttattatttttaagtcctgcctgtaaaatgggctaataaat

SEQ ID NO: 557349 - DNA, 520 bp, Homo sapiens
caacaaatatttataagatgcagtttctcatcttctagacaagtgttttttaattcattttgggtttaaaaccccttgaagtgtctgttcagagctgtggaccattccttagaaaatattcccatgtacacgtgcacattatgttttgcataaataattgatgaatgccytgaaggccaggttgggactttgtaccctgagataccttgctgtagaatctgctgtcttgatacttttcttctgaagatccctggtttggatggagatcattaccatcttagatttacagtccgattatcttattatttttaagtcctgcctgtaaaatgggctaataaatgtatatgtcacagggggaatttaagaattaaatatgataatgtggaaaggtatccaatacctaggtataccatagatattaattacttcccctcactttttggagagaaagaaagcatttccttgtgaggcagaatcatgcaattgttaagaacttaactgtggtgatgaatagatgaga

SEQ ID NO: 557350 - DNA, 595 bp, Homo sapiens
ttgcatttttttcactgcaccccatgcagagtaagtactgaaaatgtgtcttgatcactgattgctcccttgaaatcaacaaatatttataagatgcagtttctcatcttctagacaagtgttttttaattcattttgggtttaaaaccccttgaagtgtctgttcagagctgtggaccattccttagaaaatattcccatgtacacgtgcacattatgttttgcataaataattgatgaatgccctgaaggccaggttgggactttgtaccctgagataccttgctgtagaatctgctgtcttgatacttttcttctgaagatccctggtttggatggagatcattaccatcttagatttasagtccgattatcttattatttttaagtcctgcctgtaaaatgggctaataaatgtatatgtcacagggggaatttaagaattaaatatgataatgtggaaaggtatccaatacctaggtataccatagatattaattacttcccctcactttttggagagaaagaaagcatttccttgtgaggcagaatcatgcaattgttaagaacttaactgtggtgatgaatagatgag

SEQ ID NO: 557351 - DNA, 520 bp, Homo sapiens
caacaaatatttataagatgcagtttctcatcttctagacaagtgttttttaattcattttgggtttaaaaccccttgaagtgtctgttcagagctgtggaccattccttagaaaatattcccatgtacacgtgcacattatgttttgcataaataattgatgaatgccctgaaggccaggttgggactttgtaccctgagataccttgctgtagaatctgctgtcttgatacttttcttctgaagatccctggtttggatggagatcattaccatcttagatttacagtccgattatcttawtatttttaagtcctgcctgtaaaatgggctaataaatgtatatgtcacagggggaatttaagaattaaatatgataatgtggaaaggtatccaatacctaggtataccatagatattaattacttcccctcactttttggagagaaagaaagcatttccttgtgaggcagaatcatgcaattgttaagaacttaactgtggtgatgaatagatgaga

SEQ ID NO: 557352 - DNA, 520 bp, Homo sapiens
caacaaatatttataagatgcagtttctcatcttctagacaagtgttttttaattcattttgggtttaaaaccccttgaagtgtctgttcagagctgtggaccattccttagaaaatattcccatgtacacgtgcacattatgttttgcataaataattgatgaatgccctgaaggccaggttgggactttgtaccctgagataccttgctgtagaatctgctgtcttgatacttttcttctgaagatccctggtttggatggagatcattaccatcttagatttacagtccgattatcttattatttttaagtcctgcctgtaaaatgggctaataaatgtatatgtcacagggggaatttaagaattaaatatgataatgtggaaaggtatccaatacctaggtatacmatagatattaattacttcccctcactttttggagagaaagaaagcatttccttgtgaggcagaatcatgcaattgttaagaacttaactgtggtgatgaatagatgaga

SEQ ID NO: 557353 - DNA, 520 bp, Homo sapiens
caacaaatatttataagatgcagtttctcatcttctagacaagtgttttttaattcattttgggtttaaaaccccttgaagtgtctgttcagagctgtggaccattccttagaaaatattcccatgtacacgtgcacattatgttttgcataaataattgatgaatgccctgaaggccaggttgggactttgtaccctgagataccttgctgtagaatctgctgtcttgatacttttcttctgaagatccctggtttggatggagatcattaccatcttagatttacagtccgattatcttattatttttaagtcctgcctgtaaaatgggctaataaatgtatatgtcacagggggaatttaagaattaaatatgataatgtggaaaggtatccaatacctaggtataccatagatattaattacttcccctcactttttggagagaaagaaagcatttycttgtgaggcagaatcatgcaattgttaagaacttaactgtggtgatgaatagatgaga

SEQ ID NO: 557354 - DNA, 464 bp, Homo sapiens
cgcggctctgccagctttctgaacccaagcaaatcgggggagaataaaattcctcaggtatcagaaatggaactgcttttccctgggaacacttggtaacgtggaaaagatgcaacaccaagagagggcataaaaccaacgaaatgaggccaatgcatatgcaagaggctgcttcctccccaatttaattccattttkttaagtaatgatggaataaaaattcagggtggtggaagatgagatttgcagccctatttgatcaaatgcctatcgctgttgcttcaagccaaatgggtcgcttcataaacagataaataaatcagacatcaatgggaaatgaaaagtcatggccgagaatgaaatgagatagaaatcattccccgctatgatgtttgtttggggcatctctggtggggaagtcataccaaggctgcagtgggaatcccaaagtgcccaatggagga

SEQ ID NO: 557355 - DNA, 464 bp, Homo sapiens
cgcggctctgccagctttctgaacccaagcaaatcgggggagaataaaattcctcaggtatcagaaatggaactgcttttccctgggaacacttggtaacgtggaaaagatgcaacaccaagagagggcataaaaccaacgaaatgaggccaatgcatatgcaagaggctgcttcctccccaatttaattccatttttttaagtaatgatggaataaaaattcagggtggtggaagatgagatttgcagccctatttgatcaaatgcctatcgctgttgcttcaagccaaatgggtcgcttcataaacagataaataaatcagacatcaatgggaaatgaaaagtcatggccgagaatgaaatgagatagaaatcattccccgctatgatgtttgtttggggcatctctgrtggggaagtcataccaaggctgcagtgggaatcccaaagtgcccaatggagga

SEQ ID NO: 557356 - DNA, 602 bp, Homo sapiens
ctgaactggcaagtggatcaaatttatgtgccatccctgcattagcattgcgtgatagaaggaagatgttggaatcccaggaggcaatgctaaacaatgatagaaaatgtggggaggaggagagattgacagagagagacagagagagaaagagagagacagaacaagagcaaaagagttttcagcagggagctgggtgtttctttcattttggggtcaatgtgattgagcctgcacaggactgcctgtgaatcctgcactgactggagcgtgggtaccagagtctctctgcaatgccttccagggccagacatttgggctggggttgaaccctgrctattccacccagggaagcagtttcatttagaattccaaggacccaatttatctgtgtcacactactggctcctccaaggctgataacaaatggctgatcatttcccccaccaccctgcttcccaatcatcgcgcttgctcagcccctcagtaatggagggtctcacacgggagaattgcagagccagcctatccatctcctgctgatggaggggaaatctccttacagagcctcagggcttctctcacaaagatgagagaaggag

SEQ ID NO: 557357 - DNA, 551 bp, Homo sapiens
cttcaacaacagacaattttttctcagttctggagactagaagtccgaggtcaaggtgtcagcagattgagattctctccttggcttgcagatggccaccttctcactgcatcctcacatggtcgctcctccttctgtgtgttgtctgtgtcctaatctccccttcttataaggacaccagttgtattggatgaggacccacccatgtgacctcattttagcttaatgatctctttaaaggccctatcttcaaatacagcaatattccgaggtcctrggggtcaggacttcaacatgtgaatgggttatggtgcaggcggaacaatttagcccattatagacccttctctttttccccacagccctcacgccacatgttcctctagctcggaaaccctttatcataatgtcctgtgcacttatctttctccctaactagactacacctgtgaaggcaaggaccctttccactgctgcatccccacagtgactagaaccctgcccggcacaccgttaagtactcaacagctatctgtaaagcacatgcatgt

SEQ ID NO: 557358 - DNA, 551 bp, Homo sapiens
cttcaacaacagacaattttttctcagttctggagactagaagtccgaggtcaaggtgtcagcagattgagattctctccttggcttgcagatggccaccttctcactgcatcctcacatggtcgctcctccttctgtgtgttgtctgtgtcctaatctccccttcttataaggacaccagttgtattggatgaggacccacccatgtgacctcattttagcttaatgatctctttaaaggccctatcttcaaatacagcaatattccgaggtcctaggggtcaggacttcaacatgtgaatgggttatggtgcaggcggaacaatttagcccattatagacccttctctttttccccacagccctcacgccacatgttcctctagctcggaaaccctttatcataatgtcctgtgcacttatctttctccctaactagactacacctgtgaaggcaaggaccctttccactgctgcatccccacagtgactagaaccctgcccggcacacmgttaagtactcaacagctatctgtaaagcacatgcatgt

SEQ ID NO: 557359 - DNA, 569 bp, Homo sapiens
tggagataacaatgattttcaactcatgggtttaatgaggtcattcatagaaatgtacaagtgctaaaaagaagtagctttgttatgatattcattaataagtatagcctttgtaaatctcagtctataaactcaggcaagcatgaaaatgtaactgcattttttccctataaccaaactcagttttatattgagcacctgttttaccttagaaccctcaaaaaacaccctgagatgaagattcatgtacaagtgacttataaggaagtggccccaggaaaatctgatcaaggaataggtgactgagagctcaagggatggaggcaagcaaggtctcatggaggataagctttgctcagccctgcagggagctggagacagtgatggttaccctcagagtctttcagatcagggggcatggaagctggartatttgtatatccctcccacatactatcaggcattagttaagggttgtcctgggggagtgaatacctgggcactctaggttctctaggcaattaagcctaaggggttctagtagcttgagggtggtcctcccaccacga

SEQ ID NO: 557360 - DNA, 609 bp, Homo sapiens
gcaagatgggaaaagtgaggcccaaggagattaggtagataaacctcatcctacactaaaagatgggcaaactgggattttgcccacgaccactggctagttgtcagcaaactagggctcctgggtcaaggcagcccttcttctgtttttgtaataaagttcatcagaacacaaccatattgttaaaacaatttacatattgtttacagctccttcattgctacaggcagagtggagttgacataactagcctgacaascctaaaatatgttctttctagccttttacagatcaagtttgtcctccccttcactagacagtgatgcctttgccttttgtggaagcaagtggcaatcctatggtccctgggaatatgtatcatccagttcattgtgtgtatcccagaaggaaaaggaagaagaggacaagaaggagaagaaaatgaacacatttttcagaagggagaaaacagagttttttgagagaagaaacatcccttacaagtgggcagaagatactgatatccagaaagaagcatttgattcttaggcccctggggttacctgtgatgcaaacaatatagggatggccactttaaagcataccaga

SEQ ID NO: 557361 - DNA, 486 bp, Homo sapiens
ttcttctttcctggagctgaaaggtaagcatgatggctggggctggagcacccattttgagccatgaggaggaagcctcatgttgaggtgtcagagtaacatgctaaaaggagcctgagtccctgaacttcttaactccagtttttgattccatgagagagaaataaactrgtgtcttgtttaagtgatctctaaattttgcattttctcctagagcagaattaatcctggtatactagttgtgtgggcatgagtaaattttcttaagttctctgagcctcagtaaccttatcaacaaaatcagtataaaaagccctaagccctcagaagtgttatgaagattcaaggacacaatgtggtggtcttctgctgcctcagtaacattttataatgctcttgaaatacagatcttcacaccccacatctaataccaggtcttgtgatggggccaaagaatgttcatttttgtcaagttccccaggtgac

SEQ ID NO: 557362 - DNA, 486 bp, Homo sapiens
ttcttctttcctggagctgaaaggtaagcatgatggctggggctggagcacccattttgagccatgaggaggaagcctcatgttgaggtgtcagagtaacatgctaaaaggagcctgagtccctgaacttcttaactccagtttttgattccatgagagagaaataaactagtgtcttgtttaagtgatytctaaattttgcattttctcctagagcagaattaatcctggtatactagttgtgtgggcatgagtaaattttcttaagttctctgagcctcagtaaccttatcaacaaaatcagtataaaaagccctaagccctcagaagtgttatgaagattcaaggacacaatgtggtggtcttctgctgcctcagtaacattttataatgctcttgaaatacagatcttcacaccccacatctaataccaggtcttgtgatggggccaaagaatgttcatttttgtcaagttccccaggtgac

SEQ ID NO: 557363 - DNA, 479 bp, Homo sapiens
aacaaaatcagtataaaaagccctaagccctcagaagtgttatgaagattcaaggacacaatgtggtggtcttctgctgcctcagtaacattttataatgctcttgaaatacagatcttcacaccccacatctaataccaggtcttgtgatggggccaaagaatgttcatttttgtcaagttccccaggtgacgtgacaccaaaccatgttcaggaagcttggagttgagagattcatcctttcttccttgctttcaaagttggagtgaacattaagagatgcagcctgcacatgtcccataaggagctcagcctctctaagggggscttacaatatctcctgcctgctccaaaataccctgcaacaaacatccctcagcccttgctttccttctccttactgcacgtgtgcccccagcaaccaccaactgcttcatcccatctgagcgacttactctgaaattctgtttaaaatgcag

SEQ ID NO: 557364 - DNA, 624 bp, Homo sapiens
ttaatatatcataccattctctcttttcctgtaaggtttctgcagagaaaatctattgttagtctaatggaaattctcttatatgtgacttgatgcttttctttgctgtttttgtctttgatttttgacattttgattatagtgttccttgaggtggacttttggttgattctgtttggggatttttgagcttcctggatctagatgtccatatctctccccagacatggaaagttttcagctrttatttcattaaatacatgtttcccttctcctgtttttctagaatttttgcaatacaaaaatttgtttgcttaatggtgtctcataagtctcgtaggctttcttcgctttgaaaaaatcattcttatgtcttttttttttccctgactgggcaatttcaaattacctatcttcaagttcagaagttctttcttcgcttgatcaagtctgctattgaagctctccattgtattttttacttcattcaccgaattcttcagctataggatttctgtttgattcttttatttatgatgtctatctagtttttatatttcttattcatattgtgaattgtttttctggttttcttaaattgtctatctgtattttttctcattg

SEQ ID NO: 557365 - DNA, 576 bp, Homo sapiens
aaatctattgttagtctaatggaaattctcttatatgtgacttgatgcttttctttgctgtttttgtctttgatttttgacattttgattatagtgttccttgaggtggacttttggttgattctgtttggggatttttgagcttcctggatctagatgtccatatctctccccagacatggaaagttttcagctgttatttcattaaatacatktttcccttctcctgtttttctagaatttttgcaatacaaaaatttgtttgcttaatggtgtctcataagtctcgtaggctttcttcgctttgaaaaaatcattcttatgtcttttttttttccctgactgggcaatttcaaattacctatcttcaagttcagaagttctttcttcgcttgatcaagtctgctattgaagctctccattgtattttttacttcattcaccgaattcttcagctataggatttctgtttgattcttttatttatgatgtctatctagtttttatatttcttattcatattgtgaattgtttttctggttttcttaaattgtctatctgtattttttctcattg

SEQ ID NO: 557366 - DNA, 429 bp, Homo sapiens
taaggacaaactagttgagatcctctagaaagtttagcatggctgttccccagggagyacaccacttgctgttgtaacaatagctgctgttactgtcattattacatggttgccctcaatggaagaggcaggggatcccaggagcatgaggccaggccatggaaagcagcattcctgttgcaggtggaggagcccaggaagcagaacaagaccaactggtgcattctttaggcccacagacccgtctgatctggatatgggctgatgttccaggggatggacatctcgttaaacatggtctcttggttctgaaagtcttggtggtgaagaccctggttttttggtgattgcctcagttaccttcattctagccacattggattccctaaggtgcctgaagccaggcatgtgcactctctccttcttgtt

SEQ ID NO: 557367 - DNA, 429 bp, Homo sapiens
taaggacaaactagttgagatcctctagaaagtttagcatggctgttccccagggagtacaccacttgctgttgtaacaayagctgctgttactgtcattattacatggttgccctcaatggaagaggcaggggatcccaggagcatgaggccaggccatggaaagcagcattcctgttgcaggtggaggagcccaggaagcagaacaagaccaactggtgcattctttaggcccacagacccgtctgatctggatatgggctgatgttccaggggatggacatctcgttaaacatggtctcttggttctgaaagtcttggtggtgaagaccctggttttttggtgattgcctcagttaccttcattctagccacattggattccctaaggtgcctgaagccaggcatgtgcactctctccttcttgtt

SEQ ID NO: 557368 - DNA, 583 bp, Homo sapiens
tggtgcattctttaggcccacagacccgtctgatctggatatkggctgatgttccaggggatggacatctcgttaaacatggtctcttggttctgaaagtcttggtggtgaagaccctggttttttggtgattgcctcagttaccttcattctagccacattggattccctaaggtgcctgaagccaggcatgtgcactctctccttcttgttgtttctctgtgagtcaggattctcgggaggagaagagaaacactggggtggccaggggaggtgagggaaactgaaggaatagagtaaaaattgcagaagacgtagttacagtttttttttaatctgatatttgattaggaaaatgtttaaagttaaaagaacatcccaatgatcagctgaccataaacctaaaatctactgctagcattttactgtacttgctttattatgtctcttcatccatgatgcttttccaagaaaatttcagatgtctgtaataaatatttcagcatttaaagaaaaaaaaaacttcagaatttgttgtgccggtgaaacctgccttgtcagcccagtgtgtgtggttcagatg

SEQ ID NO: 557369 - DNA, 583 bp, Homo sapiens
tggtgcattctttaggcccacagacccgtctgatctggatatgggctgatgttccaggggatggacatctcgttaaacatggtctcttggttctgaaagtcttggtggtgaagaccctggttttttggtgattgcctcagttaccttcattctagccacattggattccctaaggtgcctgaagccaggcatgtgcactctctccttcttgttgtttctctgtgagtcaggattctcgggaggagaagagaaacactggggtggccaggggaggtgagggaaactgaaggaatagagtaaaaattgcagaagacgtagttacagtttttttttaatctgatatttgattaggaaaatgtttaaagttaaaagaacatcccaatgatcagctgaccataaacctaaaatctactgctagcattttactgtacttgctttattatgtytcttcatccatgatgcttttccaagaaaatttcagatgtctgtaataaatatttcagcatttaaagaaaaaaaaaacttcagaatttgttgtgccggtgaaacctgccttgtcagcccagtgtgtgtggttcagatg

SEQ ID NO: 557370 - DNA, 447 bp, Homo sapiens
tgggtatgggaaggcttatctcaagtcatttattaattcatcaaggatctgttagaaactgactccagaattcttacacaaccgctttgataatttgataaatgtggtgaaamtttgcccagaaaagtacacatacagaggatgggtgggagtcgcagacctctgaatccattcatgtttatgatctctgaatcattaaggtccatttgtggacacttcagccatgtggtctccacaagatgctgggggcagaagttgtccctcatctggaggcccctcagactattaggccaccttgcacaaccttgctgaagagagtgtgagaggagagaggtggaaagatgactgggaacagtcgagagagagagagagaacagagagtagagaaacacatggagagagagaaagagaaacctccatcactagcagactcagggctggcaaaga

SEQ ID NO: 557371 - DNA, 654 bp, Homo sapiens
atgctgggggcagaagttgtccctcatctggaggcccctcagactattaggccaccttgcacaaccttgctgaagagagtgtgagaggagagaggtggaaagatgactgggaacagtmgagagagagagagagaacagagagtagagaaacacatggagagagagaaagagaaacctccatcactagcagactcagggctggcaaagagaagaaagactcacttggaaagcagctgcctgttggccctgccctctggcagccttctaaactgctcccatcctgccagctttctgccaatgccaaagcaaatattctcagataaatgcttggaacctagaaggtgggaaaggattgccatctccagcagcagcccagccatcactggctctcaaaagcataatcaatttcactaccttcctcctcctgctccttcatccactgtctctgaatctagagtttcccatgggagcaggctcagtgggagaggcactggcccaacacttggggactattcttcataggacaggagctggaaaagaaggggtttctaagcagccctgagtggactcttggggtgagggggttagggtagagtggcccatgattccagagagtgtgaccagatcccaaaacccagaagagcaagtgagggc

SEQ ID NO: 557372 - DNA, 654 bp, Homo sapiens
atgctgggggcagaagttgtccctcatctggaggcccctcagactattaggccaccttgcacaaccttgctgaagagagtgtgagaggagagaggtggaaagatgactgggaacagtcgagagagagagagagaacagagagtagagaaacacatggagagagagaaagagaaacctccatcactagcagactcagggctggcaaagagaagamagactcacttggaaagcagctgcctgttggccctgccctctggcagccttctaaactgctcccatcctgccagctttctgccaatgccaaagcaaatattctcagataaatgcttggaacctagaaggtgggaaaggattgccatctccagcagcagcccagccatcactggctctcaaaagcataatcaatttcactaccttcctcctcctgctccttcatccactgtctctgaatctagagtttcccatgggagcaggctcagtgggagaggcactggcccaacacttggggactattcttcataggacaggagctggaaaagaaggggtttctaagcagccctgagtggactcttggggtgagggggttagggtagagtggcccatgattccagagagtgtgaccagatcccaaaacccagaagagcaagtgagggc

SEQ ID NO: 557373 - DNA, 512 bp, Homo sapiens
aatttgtttgcttaatggtgtctcataagtctcgtaggctttcttcgctttgaaaaaatcattcttatgtcttttttttttccctgactgggcaatttcaaattacctatcttcaagttcagaagttctttcttcgcttgatcaagtctgctattgaagctctccattgtattttttacttcattcaccgaattcttcagctataggatttctgtttgattcttttatttatgatgtctatctagtttttatatttcttattcatattgtgaattgtttttctggttttcttaaattgtctatctgtattttttctcattgagtttccttaagatcattttgtattcttttggttttttttttttttttttggcaaatttttgatttctttttcattggggtctgttactagagaattatcatgttcttttagkggtgtcatatttcctttttatttcatgtttcttgtgttcctgcactgatgtctatgcatccggtaaaacaactgccta

SEQ ID NO: 557374 - DNA, 512 bp, Homo sapiens
aatttgtttgcttaatggtgtctcataagtctcgtaggctttcttcgctttgaaaaaatcattcttatgtcttttttttttccctgactgggcaatttcaaattacctatcttcaagttcagaagttctttcttcgcttgatcaagtctgctattgaagctctccattgtattttttacttcattcaccgaattcttcagctataggatttctgtttgattcttttatttatgatgtctatctagtttttatatttcttattcatattgtgaattgtttttctggttttcttaaattgtctatctgtattttttctcattgagtttccttaagatcattttgtattcttttggttttttttttttttttttggcaaatttttgatttctttttcattggggtctgttactagagaattatcatgttcttttagtggkgtcatatttcctttttatttcatgtttcttgtgttcctgcactgatgtctatgcatccggtaaaacaactgccta

SEQ ID NO: 557375 - DNA, 575 bp, Homo sapiens
acagagacagcagggacacggatctcacaacattagcaccggcgccatctcccttccagggtggctaatcgtggtgaggggacagcataatrggtcaggcaacagggcctggctttattggaactgaaagctgcacaagcagactgatgagagtggtcaactatgatttacaagaggcctcatttgcagattgtctctgcagggtctgagttacgcttagagactgttcagaattagtagctgccaagacggctgtgttcatggcctctgaagactggcaccctgttaggaaggaaaacaggggctcagagctgtctccccacttccctgtgcagaatttacttgtctctggatctgtactgatagaggatgcttactgcaggctgggcagatggtgctctgtttgtttctacttcacagatgaagaaactgagacctagagaggattacatggcagatgagcaaagctgggctttagactcagtctgacttcaggttttaaggtcttagccccttgttgttatagtttcttggtctctgttcagtgcctggcacagaggagacagatgctagat

SEQ ID NO: 557376 - DNA, 583 bp, Homo sapiens
tgtctgaatattagcagctcccagtgaaccagacctaccaatacttacacccttgtgctgtcccctccccttgaatctggtctggccctgggacttgctttaaccaacagcatatggcagaagagatgctgtgccatttccaggcataaggcttgcagagggcttgcgayctccatttttgtgtttttgggagccctgagctgcagcatcagatgtctggctatcctgctgaagaggccacatggaaaggaataaaccatggaagtacacaaagagagaaaggcctgttgccccagcatgccagctgggctcagcctctcaactgtccttgccaaggcaccaaagatgtgtgtgtaccatcttggatatttaagcccagtcgaactcccagatgacagtagccctgactgacctcgtgagccaggtcagctcagaaaattgtgagagacaacagatcacttgttttaagaccctgcattgtgaggtggtttgtcaggcatgcagccagataatggacaaaatgctgtaggccttccgagaaaagagaaggacccaggatgtgaaggagaagagttgggggtag

SEQ ID NO: 557377 - DNA, 577 bp, Homo sapiens
agcagctcccagtgaaccagacctaccaatacttacacccttgtgctgtcccctccccttgaatctggtctggccctgggacttgctttaaccaacagcatatggcagaagagatgctgtgccatttccaggcataaggcttgcagagggcttgcgacctccatttttgtgtttttgggagccctgagctgcagcatcagatgtctggctatcctgctgaagaggccacatggaaaggaataaaccatggaagtacacaaagagagaaaggcctgttgccccagcatgccagctgggctcagcctctcaactgtccttgccaaggcaccaaagatgtgtgtgtaccatcttggatatttragcccagtcgaactcccagatgacagtagccctgactgacctcgtgagccaggtcagctcagaaaattgtgagagacaacagatcacttgttttaagaccctgcattgtgaggtggtttgtcaggcatgcagccagataatggacaaaatgctgtaggccttccgagaaaagagaaggacccaggatgtgaaggagaagagttgggggtaggagggc

SEQ ID NO: 557378 - DNA, 553 bp, Homo sapiens
gttggcattttttttcatatactcggtggccatttgtatgtcttcctttgagagatgtttatttagatcatttgcccatttctaaattgaattatttgtttctttttttggtgttgagctgtttgagtttcttatatattctaaatattaattccttgttgtatacttgctaatattttctcccattctgcagtttttctcttcaccctgttgattctttcttttgctgtgcagaagcttttagtttgatataatcccatttgtctatttttgcttttgttgctttatgctttggaagtattcttcatgaaatattttcccagaccaatgtcccgaagcatttccccctatgttttcttcyagtagtttcataggttcaggtcttacatttaggtgtttaagctattttgagcaaactttttgtatggtaggagatatgggtctggtttaatttttctgcatatggatatccagttttcccaacaccatttattgaagagactatttcttccccagtgaatattcttgattaaatttatttctaggtatttta

SEQ ID NO: 557379 - DNA, 612 bp, Homo sapiens
ctccgtgggctctgctgctaaccattccttccccaaattgccttttccctctgagccctctgccacaaaccatgcatagagtaagcactcaagacttactcatgtgctctctgagaatacacatgctgttgttgccatgggagacgggccctgcgagggccccagtctattgtctgcttttgccagggtcatatagacatgaaatccaatcggcctcaaagagcgttcctgaggattaaatcaatgaccttggaagtggcatttagctccaaatctcagtttccccaccttygaggcatgagtaataaccgtataattcctcccttacagaattgctgtgggatgaaggagataacaggacttataggacttaatccttaaacaatgcttgccccatttctttcctcccataggccctcttccggtcaggtcatgtggggaaatggtgacagcatgggatttgggactgagcaaaactgaattcaaagctagctctgccacctactagctgtgtgtccccaagcaggacatgtgcagcctcattgcacctcagttgccgcacctgagaaacggggatggtgatgccctctgcacagagttgtgagaggatct

SEQ ID NO: 557380 - DNA, 505 bp, Homo sapiens
aaacaacttgacccttggtggacactcaataaatgcttgctctcattcctttcccagtggcctttgacctaattctattccagaggcatcaatagaaatcacatccttgtatttaaagactgtctttataaatatatttacatgcatgcttgtgattgttgcmtaatgcaagtgaagatgacaaattcacgcagccagcaaattcttagactgtgatttttaaaatgttggtttacttgttctgttttaaaaacatcacatacctacctattccaaaatggtaatttaccaaaggtattcatttataacatttcttaaccatgacttgggtctgatatttcacactatgatttgtccatccatctgtcaatctgtccatctctgtctgcctgtctctctatccatccatccatctatccatccctccatccatccatccatccatccatccatccatccatccacctacctacccacctatccatccatctacttaacatgtaat

SEQ ID NO: 557381 - DNA, 583 bp, Homo sapiens
tggcaatggcttggcctcaggggtggacgggaaccatggctactcacccctagaacaagacacactctagccgtggttacaactccaagatggcataatgtagtagccacatgggctacagggagtgggacacattgctggctccttttctagaggaatcccagccatgcggactccaagtactttcctcagccaggcttagtgctggtgaggactacagggaacctcagtggtgaggtctgtagtgtctaaggtattgataggagtgactgggatcctcttgattacctcctcactgcagggagaagatctttctggttcccagctgatactggttggggaatggggtggtggaggcccagaatttgtctcttttttacttggtcatcccaagtttttgtgctcaccagggtttctgtcactcctctgatgcactgtagcaatctccctcagttatttgtattaaaatatagttgtttatctattgttctggctgtgtctttgtgacaggaatgagtactaggggcttctagytgtccatcttgctgatgtcacttttcctataattattcatttttgataa

SEQ ID NO: 557382 - DNA, 601 bp, Homo sapiens
ttgggaacacaaatcagtggatgccataagaatggtcatattttcttactcatggggacaataggataaaatgtggtacctagtgaggagtactaggagaaggaccatcaagtttattttactatctgctgctgtagggatggcatctattatcttttctaatcttaggggtagaatggaggtcaaggctcatgtcttagtgccatagcccatgtccaagggcagatgaaacatttccctgggcagagactgtgggggacccttgattgaacacaccggacctccaccccttagccaagcacagtggtaygtgtgtgctttatgtgcacagttctcacaatgcacattagaaaaacctacaagccctaccttcaaaatattaggctggtgcaaaagtaattgaaatttttgccattgaaagcaatatttccagaatctcaaaacttctcaccatctccactgatactgccctgatccaggccaccatcatgtcttgtttgaatgattttaatagcctcaactgatctctttgcttctgtccgtattccaacctccatctcatcccctttcagtctaatctaaccccagccgccagaatgat

SEQ ID NO: 557383 - DNA, 523 bp, Homo sapiens
tttcttcatctccttcaggtctttgctcaaatgcaatctcatcagataagcctctcccaagcaccctatagaaaataacacacaccacattcccaggaattaccaatcctctattctgcctgatttttcttcataacacttaccaccacagatatatatttgtgtggtcttacctgcctcctcctgctaggcataaagtttatgaaagcagcagcttgggccatgmctagccacaattgtatcttcggtgtctggcatgaagtaggtactcagtatttgataaatgaataaaggcatgaggaatgagctcattaaacccactaaccagctctgtgaaggagatatcaggagtatgatcccctttcttagatggagtggtggaagctctaagtggggagaggcttgtggaagctgctgtcttactcaacacaatatttggctgcaggactgtagagaacagctcctttgtactggctgaaataaacagcaagattttacagggaggtactgcattccttataga

SEQ ID NO: 557384 - DNA, 581 bp, Homo sapiens
cccataccctccaatggggatgctgccataacatcttgcacttcctggggtagcatgcatcactttctataggattgtctgttgactggtcatgctctccaattagactgtgagttccttaagagccgaatgctgtgctggttacctcttttatatcccagctcagttccaggcacacagtgaccactcaacagattagtgattaaggaaagaaggaatgaaaagttgataggaccagtttgtgactggcctgcctgcctcctcagcctcttgagggagagctattactgttgcaataaaatataatatattcactgcaaacatgcaggatttttttaaagcagcaataattacattaccacaacccaggatggaattaaccacagcctttaaygtgagttattaaaaatgttttacttcttccactggcacttagaagtcagctctcctactgagccactctcttccttcattgacttctctttatcagggatgtcaagatcattggcatttagaaagcacattatgttagcttttttctttccaaacactgcaaaagaagtgatttgacctttcataag

SEQ ID NO: 557385 - DNA, 631 bp, Homo sapiens
ttgataaatgaataaaggcatgaggaatgagctcattaaacccactaaccagctctgtgaaggagatatcaggagtatgatcccctttcttagatggagtggtggaagctctaagtggggagaggcttgtggaagctgctgtcttactcaacacaatatttggctgcaggactgtagagaacagctcctttgtactggctgaaataaacagcaagattttacagggaggtactgcattccttatagaacttccagaaggactggaaacaggaaatgaaaggctgtcaagaactgcagtgcagggatgtcactagggtgtgygggtcccaaggtaaatgcttactgtggatctcctgtctctgtaaacaatgtgcatcagcctaaagcagcatgttggcaccattctgtggaccaattgcacccagtgccattaaggaagtaccacactggctagcagagactatcagcttactaggccacagtacccagaacaactttaatctttggagcatctggttgacccagtacatagagaaaagggtcagagagaatcatgtggggtagagcagagactggagttcacacacttggtctgagtttggggtaccctgcctggatggcactgacagac

SEQ ID NO: 557386 - DNA, 580 bp, Homo sapiens
ctcggcctccaaaactactgggattacaggcgtgagccaccacacrcagccccgtgaactttattttgatagtccttactgctagtcatgaaaaattccagctttctaccttccagccttctggtaaagttgcatttccctatcttcttgaagtcagaggtggccataagacttgctgtggccaacgaaatggtgacagaagtgatccgtcacttccaagtgaaataacttaatgaccagtgctcaacgtcaaccttcctttcccgtggctgaggtgattgtagaagcacacatggcaataaagattctggcagctgaggcactgagagatcagcaaagcaccagataccagccaacccatgttaccaagtagcatgagcaagaaataaatatctgagtattaagccactgagtttaggagacatttcttgttgcagcataacctaattttaccaactagtataaccatttttttttaaagagatgagatagaatattttaggacagtggctctcaattcttgctttacattcaaatcccttgaggatatttccaagaacaaatgctccaggcctcattc

SEQ ID NO: 557387 - DNA, 599 bp, Homo sapiens
tgttagcagaatcccgattttgtttggatatgccctagaagataaagcatgtttggtaagccaaacatttctcttcaatagatcctcactctttcagactctcttgcagccaggggagtcatgtgacacagttctgccagtgagacatagagtgaagctttctagatgctccatggtcaaaagacagagggtctcaagagagctatcttaccaccatggcttccaactccctgttgcttcttcaacccctactttctaccttttgaaagcagttgtgtgaggccatgaggtttggtgctgttgcagtcagctcaygtccatgtgttttagggggctggggagtggcagaagaattatagagccatcttgcagccctaagtcccaagtgaatcctggaacctcccccacttctttttctcaacctttattctagttacagggagtacatgtgcagacttgttacatgggtatactgcactcaggtcaggaacatagtacccaataggtagttttttgacctatgaccccttccctcctgcccacctctagtagcttacagtgtctattattcccacatttatgtttgtgagtgctcaatg

SEQ ID NO: 557388 - DNA, 595 bp, Homo sapiens
ctgtgggtgtctggcacaaaaggatgggctgggattaattttctggtttatgcttctycaaatcattgagctagtgacactgaggaaaaaaagcaatctccaaggagaaaataaatcatgtttcccatgaaatagggctgccatattaagcaaataaaaatacaggactcccagataaatttgaatttcagataaacaacaaataattttaaaatataaatatgttttggctgggtgcagtggctcacgcttgtaatcccagcactttgggaggccgaggcaggtggatcacgaggtcaggagatcaagaccatcttggctaacgcagtgaaaccccgtctctactaaaaatacaaaatattagctgggcatggtagcaggcacctgtagtcccagctacttgggaggctgaggcaggagaatggtgtgatcccgggaggcagagcttgcagtgagccgagatcgtgccactgcactccagcctgggcgacagagtgagactccgtctcaaaaaaacaaaataaaataaacaaaacaaaacaacaacatatatatatatgttttatgtaatatttgggacatactttacaaaaaa

SEQ ID NO: 557389 - DNA, 595 bp, Homo sapiens
ctgtgggtgtctggcacaaaaggatgggctgggattaattttctggtttatgcttcttcaaatcattgagctagtgacactgaggaaaaaaagcaatctccaaggagaaaataaatcatgtttcccatgaaatagggctgccatattaagcaaataaaaatacaggactcccagataaatttgaatttcagataaacaacaaataattttaaaatataaatatgttttggctgggtgcagtggctcacgcttgtaatcccagcactttgggaggccgaggcaggtggatcacgaggtcaggagatcaagaccatcttggctaacgcagygaaaccccgtctctactaaaaatacaaaatattagctgggcatggtagcaggcacctgtagtcccagctacttgggaggctgaggcaggagaatggtgtgatcccgggaggcagagcttgcagtgagccgagatcgtgccactgcactccagcctgggcgacagagtgagactccgtctcaaaaaaacaaaataaaataaacaaaacaaaacaacaacatatatatatatgttttatgtaatatttgggacatactttacaaaaaa

SEQ ID NO: 557390 - DNA, 595 bp, Homo sapiens
ctgtgggtgtctggcacaaaaggatgggctgggattaattttctggtttatgcttcttcaaatcattgagctagtgacactgaggaaaaaaagcaatctccaaggagaaaataaatcatgtttcccatgaaatagggctgccatattaagcaaataaaaatacaggactcccagataaatttgaatttcagataaacaacaaataattttaaaatataaatatgttttggctgggtgcagtggctcacgcttgtaatcccagcactttgggaggccgaggcaggtggatcacgaggtcaggagatcaagaccatcttggctaacgcagtgaaaccccgtctctaytaaaaatacaaaatattagctgggcatggtagcaggcacctgtagtcccagctacttgggaggctgaggcaggagaatggtgtgatcccgggaggcagagcttgcagtgagccgagatcgtgccactgcactccagcctgggcgacagagtgagactccgtctcaaaaaaacaaaataaaataaacaaaacaaaacaacaacatatatatatatgttttatgtaatatttgggacatactttacaaaaaa

SEQ ID NO: 557391 - DNA, 595 bp, Homo sapiens
ctgtgggtgtctggcacaaaaggatgggctgggattaattttctggtttatgcttcttcaaatcattgagctagtgacactgaggaaaaaaagcaatctccaaggagaaaataaatcatgtttcccatgaaatagggctgccatattaagcaaataaaaatacaggactcccagataaatttgaatttcagataaacaacaaataattttaaaatataaatatgttttggctgggtgcagtggctcacgcttgtaatcccagcactttgggaggccgaggcaggtggatcacgaggtcaggagatcaagaccatcttggctaacgcagtgaaaccccgtctctactaaaaatacaaaatattagctgggcatggtagcaggcacctgtagtcccagctacttgggaggctgaggcaggagaatggtgtgatcccgggaggcagagcttgcagtgagccgagatcgtgccactgcactccagcctgggcgacagagtgagactccrtctcaaaaaaacaaaataaaataaacaaaacaaaacaacaacatatatatatatgttttatgtaatatttgggacatactttacaaaaaa

SEQ ID NO: 557392 - DNA, 495 bp, Homo sapiens
ggttcaagcaattctcctgcctctgcctcccaagtagctgggattacaggtgcctgccaccacacccagctaacttttgtatttttagtagagatagggtttcaccatgttggccaggctggtctcgagctcctgatctcaggtgatctgccwgcctcagcctcccaaagtgctgggattataggcctgagtcactgcgcccagccataaagttttgttaaaagacagccagactcatttgtttgtcatttggctggggctgctttcatgctataatgctagagttgagtgtttgctatagagaccgcatggcttgaaaaacataaaatacttactgtctggacctttacagaaaaggtttgctggctgttggtctggaacatcagctgcttgctcaatggtattattgagtgctactaagtattaggcactgttctaaattcttcacatgttaactcatttagaccttgtaacaatcctgtgaagtaggggtta

SEQ ID NO: 557393 - DNA, 589 bp, Homo sapiens
tttgaagtgagacatagacaatttaaatatcaattggataatccatcaatagattaaaatttcagagtgttagagctaaaaaaagtacttcacagatcattcactcaaaccctttcattttccagatgcccaagctgagttgcatcattcattcattcattcattcatccttcattcatttacaatgtttattgagtgccacctgtttgtcagatatggttacctgacaggtagttcctgagacacagcagtgaacagaacggaactgatccatgctcttttgtagcttacgttctagtggagaaggcagacaacaaacaaataaaatagcagtggtaacatgtcctaagacaaaaatgaaacaaggtgagagtaaagaggggaagcaggcatatgtgttagtgctttgtgkgtatgcgtgctgtattagtctgttctcacactgctaataaagacatacctgagactgggtaatttatgaaggaaagaggtttaattgactcacagttccacatggctggggaggcctcacaatcatggtggaaggtgaaggaggagcaaagtcatgtcttacatggcagcaggcaaa

SEQ ID NO: 557394 - DNA, 660 bp, Homo sapiens
agggataatgtaaaacaacattttttggtcggcctaccagttgctgtaggaaaaaaagaaaaaaataaccttgttttattaacagctatatagaaatagtctggtgattataaacaaatacatagtgataatttctttcttttctccccttctctactgcagaagataacatcagctcacctcttttgagaatacgggttgggaaccaatagccaatcactttgtattccacttagcatcatcatggggcatgctatcatgcgcttcattgtatttggcgttctgcaacgagaactactctaagtggtsatgtagagcaagtgcacagctgtgggagcttggggatatagaccacagtggccctctgcaagtacatcatctctgagaagattcgggttttatcttaaaatttactgaactttagatttatttaataacataaccaggtttgttttaatacaattcattagtattaaataagattaacactctaggaataataataatatcagctgacatttctttattctgtggctttatgtacacagtgacacatggctgttgtgttagggttctctggaaaaacagaaccaatagaatatctctatctatctatctatctatctatctatctatctatctatctaatctatctatcta

SEQ ID NO: 557395 - DNA, 594 bp, Homo sapiens
agtcatcttgaagctaatcctcgtctatgtatattttcttatagtttaaaatatgttttaaacattttatttcctataagtatttagtctggtggtgttttaattttttttttttttttagctgagccttcctttaaacaaaactttacttggaaagccgagtgtgtagaagtgatacaagcatagttacttatgcaaaagtaaagggagaagcctaggatctggtatttctcctgcagtgtctccaaggtaatgctatggaataaatagaacttgactgcatggtatgaaaccactgcctaatataaaaaccacaattctataaaaaccacaattctaatctaattaatacttacagatagaatatatgatgtgaaataaggattgactttgtcttttcactccatgagtgttcagctattagagtttacttcctttatgtgttccctcagttttattttattttwtttttttttgagatggagtgtggctctgtcgcccaggctggagtacaatggtgcgatctcagctcactgcaacctccgcctcctgggttcaactgattcttctgtctcagcctcctgagtagctgtg

SEQ ID NO: 557396 - DNA, 480 bp, Homo sapiens
tatttaaaacaaatgataaaataaaagcattttatcagattcctgggcaagatggccaaataggaacagcttcattctgcagctcccagtgagaccaacacagaaggcaggtgatttctgcatttccaactgagrtacccagttcattgcattgggactggttagccagtgggtgcagcccacggagggtgagcagaagcagggtggggcattgcctcatcagggaagcacaaggggtcaggcaattcccctgaccaagggaggccatgagggactgtgctgtaagggacggtgctatccagcccagcttttcccatggtcttcataacccacagaccaggaaattccctcgggtgcctacaccacaaaggccctgggtttcaagcacaaacctgggtggcccatttgggcagacactgagatagcttcaggagtttttttttttgtttttttttttaataccccagtggcacctggaaa

SEQ ID NO: 557397 - DNA, 480 bp, Homo sapiens
tatttaaaacaaatgataaaataaaagcattttatcagattcctgggcaagatggccaaataggaacagcttcattctgcagctcccagtgagaccaacacagaaggcaggtgatttctgcatttccaactgaggtacccagttcatygcattgggactggttagccagtgggtgcagcccacggagggtgagcagaagcagggtggggcattgcctcatcagggaagcacaaggggtcaggcaattcccctgaccaagggaggccatgagggactgtgctgtaagggacggtgctatccagcccagcttttcccatggtcttcataacccacagaccaggaaattccctcgggtgcctacaccacaaaggccctgggtttcaagcacaaacctgggtggcccatttgggcagacactgagatagcttcaggagtttttttttttgtttttttttttaataccccagtggcacctggaaa

SEQ ID NO: 557398 - DNA, 480 bp, Homo sapiens
tatttaaaacaaatgataaaataaaagcattttatcagattcctgggcaagatggccaaataggaacagcttcattctgcagctcccagtgagaccaacacagaaggcaggtgatttctgcatttccaactgaggtacccagttcattkcattgggactggttagccagtgggtgcagcccacggagggtgagcagaagcagggtggggcattgcctcatcagggaagcacaaggggtcaggcaattcccctgaccaagggaggccatgagggactgtgctgtaagggacggtgctatccagcccagcttttcccatggtcttcataacccacagaccaggaaattccctcgggtgcctacaccacaaaggccctgggtttcaagcacaaacctgggtggcccatttgggcagacactgagatagcttcaggagtttttttttttgtttttttttttaataccccagtggcacctggaaa

SEQ ID NO: 557399 - DNA, 567 bp, Homo sapiens
ctgtagccagactgcctctctagattcctcctctctgggcagggcatctctgaaagaaaggcagcagtcccagtcaggggcttatagataaaactcccatctctgtgggacagagcacctggggaaaggagcaactgtgggcacagcttcagcagacttaaacattcctgcctgccagctatgaagatagcagtggatgtcccagcacagtgttcgagctctgctaagggacagactgcctcctcaagtgggtccctgactcctgtgcctcctgaagtggagacaactcccagcaggaattgacagacacytcatacaggagagctctggctggcatctggtgggtgcccctctgatacgaagcttccagaggaaggagcaggcagcaatctttgctgttatgcagtctccgctggtgatacccaggcaaacagggtctggagtggatcccagcaaactccagcagacctgcagaagaagggcctcactcttagaaggaaaactaacaaacagaaagtaatagcatcaacatgaacaaaaaggatgatcatgcaaaaacttcatctg

SEQ ID NO: 557400 - DNA, 207 bp, Homo sapiens
gcctggcgaggagcagcctggggaggaagggagaggtcagatgggtctgtagaaaaggaagattagaaagactcagtgacgcttggggttggtactgaggggacakgcgggagggagagaaggaagatttgggacgagttgcactgggcacagagactaggaagggactgatgtgtaaaagaatgcctggacgtcaggcacctcaga

SEQ ID NO: 557401 - DNA, 224 bp, Homo sapiens
gcctggcgaggagcagcctggggaggaagggagaggtcagatgggtctgtagaaaaggaagattagaaagactcagtgacgcttggggttggtactgaggggacaggcgggagggaaagaaggaagatttkggacgagttgcactgggcacagagactaggaagggaccgatgtgtaaaagaatgcctggacatcaggcacctcagaccatttgcctattttac

SEQ ID NO: 557402 - DNA, 562 bp, Homo sapiens
ggagtttgagactagactggccaacatggtgaaaccccgtctctacctaaaatacaaaaattagccaggtgttgtggcaggtgcctataaacccagctactcaggaggctgaggtaggagaatcacttgaaccaggaggcagaggttacagtgagccragatggtgccactgcactccagcctgggtgacaaagcaagactccatctcaaaaacaaaaaacaaacaaacatttagcccaatgtttagtgtatattaagcatgtaaaacatgtcagctgaggatgctataattatttgtttgttttttttattacatgagacaatatgagatagttattcaggctcaagctccgaagtcagacagaattgggtctgactcctgaatctacatttaccaattttgtttgtttccttggctaagtggcatagtctcttgtgcttattttacttactcatctgtaaaatgaagctaataacagtgcctacctcataaggtcatggtgagcactgaatgagataaaacatgcaaatcttttgtaacacccacacatagtaagtgctc

SEQ ID NO: 557403 - DNA, 582 bp, Homo sapiens
ctataaacccagctactcaggaggctgaggtaggagaatcacttgaaccaggaggcagaggttacagtgagccgagatggtgccactgcactccagcctgggtgacaaagcaagactccatctcaaaaacaaaaaacaaacaaacatttagcccaatgtttagtgtatattaagcatgtaaaacatgtcagctgaggatgytataattatttgtttgttttttttattacatgagacaatatgagatagttattcaggctcaagctccgaagtcagacagaattgggtctgactcctgaatctacatttaccaattttgtttgtttccttggctaagtggcatagtctcttgtgcttattttacttactcatctgtaaaatgaagctaataacagtgcctacctcataaggtcatggtgagcactgaatgagataaaacatgcaaatcttttgtaacacccacacatagtaagtgctcagtaagtgggagctactaaataatattgagaatggaatctgatattagggaacattgaggatttgttgatgcatttgtacttcatgcagtcactccaggaatgt

SEQ ID NO: 557404 - DNA, 605 bp, Homo sapiens
actgttttgactatcatacctaaggaaaaaggaaaataagtacctgaaatttttgaaaatatttaggtttatatttatttgagagaagaaaatgaatagcaacagatcttttctatttttattttagatttactatattttgctctgctaaaaaaggcaaaggattcaataagaagtatctctgtttctagaacattctcaagcagaagaaacaagctggttaggaggtagtttttttctgatgtgaccagtttgatgaagtggattagtgaggatcagcctctctcctctggtamaaagggactgagaaatcactgggagaaccagaaactggcctctgactagcacacttctctccttcggatgatgctttgaaaactaagtcaactctttggtttctgaatagaagcccagcaacagataagttgcagtccaaaaggcttgacggatatggcacctattggtagccagtttcattaaagaaggatacctagacagcaaacttattttaccttgagtctagaggtgaatattaagggaataagtggttggtacctctacttcaatcttggtccttcatatgcccaataagtaaataagtctct

SEQ ID NO: 557405 - DNA, 509 bp, Homo sapiens
tggataaatccaggaaacacacaatatctcaagatttaatcaggaagagattaaaactctgaatagaccaatattgaactctgcaattgaatcagtagtaaaaaacctaccaactaaaaaaaagccctggaccagatggattcacagccaaattctaccaaatgtacaaagaaaaactagtaccagwcctactaaaactattccaaaaagttgaggaggagggattcctctctaattcattctatgaagccagcatcagcctaataccaaatctaacaaatctgaaagagacatgacaaagaaagaaaacatcaggctaatatccctgattaacgttgacacaaaaatctcaacaaaatactagcaaaccaaatctagtaccacatcaaaatattaattcactaaaatcaagtaagctgtattcttggcatgcaaggttggttcaacatacagaaatcaataaatgtgattcaccacataaacagaattaaaaacaaaaaccatatgat

SEQ ID NO: 557406 - DNA, 655 bp, Homo sapiens
taatggtgtgaccttggctcactgcaacctctgcatcccgggttcaagggattctcctgcctcagcctcctaagtagctaggaatacaggcgcaygccagcacaccagctaattttttgtatctttagtagagacggggtttcaccatggtggccaggctggtcttgaactcctgatctcatgatccgcccgcctcggcctcccaaagtgctgggattacgggcgtgagctgccgcatccggcccaggttttttttttaattttgccttttgcctttaattactgtagttttccatgaaataaatttaatattttatagtaaaatttattgctctacctcctttattgctaatatctgcttagattttttttcttacttaggaaaatattacccactccaagattactttaaattttcttcatgatgccttataaaatttttttagttttgctttttatctttagagctttggtagaaattcaaaatagcaaatctagaatgtactttaatgcaaggagtgagacacagaactattttttttctaaatgactgaaaacgtctcaatgccatctattaaataatccatctttcttcactgatttaaaatgccacctttatcatagactggattccctgaagtgtttggacctactt

SEQ ID NO: 557407 - DNA, 655 bp, Homo sapiens
taatggtgtgaccttggctcactgcaacctctgcatcccgggttcaagggattctcctgcctcagcctcctaagtagctaggaatacaggcgcacgccagcacaccagctaattttttgtatctttagtagagacggggtttcaccatggtggccaggctggtcttgaactcctgatctcatgatccgcccgcctcggcctcccaaagtgctgggattaygggcgtgagctgccgcatccggcccaggttttttttttaattttgccttttgcctttaattactgtagttttccatgaaataaatttaatattttatagtaaaatttattgctctacctcctttattgctaatatctgcttagattttttttcttacttaggaaaatattacccactccaagattactttaaattttcttcatgatgccttataaaatttttttagttttgctttttatctttagagctttggtagaaattcaaaatagcaaatctagaatgtactttaatgcaaggagtgagacacagaactattttttttctaaatgactgaaaacgtctcaatgccatctattaaataatccatctttcttcactgatttaaaatgccacctttatcatagactggattccctgaagtgtttggacctactt

SEQ ID NO: 557408 - DNA, 571 bp, Homo sapiens
aaccgcaatgtgataccacctcactcctgcaaggatagtcataatcaaaaattaatagatgttggtgaggatgcagtgaaaaggaaacaatgttacagtgttggtgggaatgtaaactaatacaaccactatgaaaaacagtgtggcaattcctaaaaaactaaaagtagacctaccgtttgatccagtgaatcccactgctaggtatctacccaaaggaaaagaagtcattatacagaaaagatacttgcacacgcatgtttatagcagcacaatttgcaattgcagaaatacggaacaagcccaaatgcccaccaatcaatgagtggataaagaaaatgtgatacataataccatggaatactactcagacatacagtggaatgaaacaatggtattcacaacaacctggaggtaattggaaactattattctaaatgaagtaactcaggaatggaaaacgagacattgcatgttcycactcctatgtgggagctcaaaggcataagaatgatacattggactttggggacttgggggaatgggtggggggtggcaagggataaaagac

SEQ ID NO: 557409 - DNA, 578 bp, Homo sapiens
gagatatttaagaggcaaaattaacagatcttgataacaaaatcagatgtaggtgatgggaaagagaggctttgaggatgatgttcaggtttctgacttgggtaattctttctagctatattatagtagaaactccagaggcatgagctgtggcttggatcaaggtggtccttatacttatcaagttagagccagtcctgactttacgaggtgggcgctctgctatatcacatcactgtatcatattrccttcctgtgataagcagaataagggtcccacaaagatgtctatgttctaatcctggaaactaaatatgttagggtacctagcaaagggaattaaggttgcatgtgaaattaggttgctaaccagctaaccttaaaataggtgttgcatcctggatttatccaggtgggcccaatgtaataaaaaggccctcaaacttgaaagagggaggccgaagagtcagtcttatggtgatacaatgtgagacttgaacagcctttgctgaatttgaaaatggaagggagccagaaatggaagaacataggcaggcttcaaagctggaaaaaaaaaa

SEQ ID NO: 557410 - DNA, 493 bp, Homo sapiens
ccactatcaccactgttattaaacatagtactggaagccatagctagagcaatcagacaagagaaagaaataaagagtggtggcacttgcctgtggtcccagctgcccagggggagagggggctgaggcaggagaatcgcttgaacctgggaggcggaggttgcagtgagacgagatcacgccactgcacttgggtgacagagtgaaattcggagagaaaaggaaggggaaggggaaggggaatccaaattggaaaggaagaagttaaatttcccttgtttgcatatgatatgatcttatatttggaaaaacctaragagtccaccaaaaaactattagaagtgattaattcagtaaagttgtagaatacaaaatcaacatttgaatatcagtagcatttctatatgccaacagcaaacaatctgaacatgaaatgaaaaaaagtaatcctatttaaaatagctacaaataaatacctaggaattaaccaaag

SEQ ID NO: 557411 - DNA, 497 bp, Homo sapiens
tgccttcctcttattcaacacaaagagtagttatggcctaaaataaagataaagactatccagctatgaacacacactttattttagcaactaaaaatgttctccacagattattcctttaatccaaagatctttaaagtgtttataaaagacaacaaactaagctttgctatatactcatatatcttacaacctgctccaaagcaccttcttacaaggttttgaaacattcaaggkgagcttttaatcccactgaaaaccaaagaaaaataggctgtaccatcatgccacttatcggcagaggtgaaaagtaaatgtcctctgaagtgtacctgaaatctatttcagtaattatctgaagccttctaaagattaagagacaggcccttcctttctagccaacagaagttcatagagcagtactctgccatgtgcctgttttgtctttgattgacaagtttaaagaagttttttacatagaagactttgactacaat

SEQ ID NO: 557412 - DNA, 579 bp, Homo sapiens
aacatatggcatcttgtggaacatagatgattttcacttccctctttataatttttagttctgtttggatagttttacaaaattgccartgttctcaagattaaaacaaaataaagagtttttagtttgcataactaagccttcatctagatgaaaagttaaaataatcactacacacatgcaaacatatattggtaatttattttaaaaatttacatcattttgatagtttttaatagtaactattaaggattaaacaggctggcctttatatgtgcttataggttaacttataggtgaactcaggtataaaacatgttcaagtattattggtttattaaaaaatatcatttgtagctccctaaaaaatatgtattattaaaaatatcctatgaaataatgaaaaataaatcaagaaagatgagaatcccttctataaatataaatatgggatttcaaaatcaactattagcaaaattattttaagtgtagaagaaataaataaacctacattacaaagatgtcatactaagaaagcaatcactgcttcatattagaccactggctagtatgatcata

SEQ ID NO: 557413 - DNA, 561 bp, Homo sapiens
agaactaaaatggatgaagaaaaattagtacacacagggaagagcagtagctcattttcaaggttgacataaatttacttttcagcccagtattacaaataatttgttttaaataaaacgttatgtctacctatctagagaagtttaaggagtggtcagctaccacttttgctttttttttttttttttttttttttgactkggctgaaaagagactacacaaattgtatttttaaaatatgattcctctcaaattgcaattactaaaaacttctaattttgaccacaggttgacctttccttcttgcttttattttctctgttttccagtatattttactaagaatatggaagaaaatagcaggtcaacaatttgcgggggcaatataattttttaaaagtttgattgagatataattcacataccataaaatccatccatttaaagtgaacaattctatgacttttagtatgttcacagagttgtgcaaccatcaccacaatcaattttaggatatttaaatcaacattataaagaagtcctgcattcagtagcaatca

SEQ ID NO: 557414 - DNA, 561 bp, Homo sapiens
agaactaaaatggatgaagaaaaattagtacacacagggaagagcagtagctcattttcaaggttgacataaatttacttttcagcccagtattacaaataatttgttttaaataaaacgttatgtctacctatctagagaagtttaaggagtggtcagctaccacttttgctttttttttttttttttttttttttgactgggctgaraagagactacacaaattgtatttttaaaatatgattcctctcaaattgcaattactaaaaacttctaattttgaccacaggttgacctttccttcttgcttttattttctctgttttccagtatattttactaagaatatggaagaaaatagcaggtcaacaatttgcgggggcaatataattttttaaaagtttgattgagatataattcacataccataaaatccatccatttaaagtgaacaattctatgacttttagtatgttcacagagttgtgcaaccatcaccacaatcaattttaggatatttaaatcaacattataaagaagtcctgcattcagtagcaatca

SEQ ID NO: 557415 - DNA, 581 bp, Homo sapiens
ggttctgcagggtacagcacccccagttgttttcacaggctggtattgagtgcctgtagcttgtccaggtgcacagtgcaagctatgactccaccactgctgcagacttcggcgtggatatccaastggttccatacattctctgaaatctaggcagaggctcccagttttcaactcttgccttctgcacaccagtagccctaacatcacatggaagccaccaagtcttggggcttgcactctttgaaacaatggcctgagctgtaccttggccccttttagccacagctagagctggagtgaccaggatgcagggtgccatgtcctgaggctgcacagagcagcagggtcctggggctggcccatgaaaccatttttccctgctaggcttccaggccagtgatcagaggggctgccacaaaggtctctgaaatgcactggagacattttctccattgccttggctattaacatttggctcctctttatttatgcatatttctgcagctttcttgaatttctccccagaaaatgggtttttctttttcttttctaccgcatggtcaggctgcaaattttcc

SEQ ID NO: 557416 - DNA, 570 bp, Homo sapiens
atctgtttctttaataagaattcttgggtgattctaaagttttaaccagttttggagctactaaacttttccagtttctctgtgttatagaagaagaaatgagactcagcatggtataaccctaaactgtcagaaaatgttgcagaggttttcagtgatgtgctaaggtcatgcagctattcagcgacagccctgttctctggtcctggttaagagctttgcctcttcccatggcctataggaggctgaggtctctgttgcagctgcaccacaatgcagcttctctctctgcctactcctgctttcttcacttcccagccacctcctgcacacaaacctcttcctcagaataggtttttttttttgaaattcagcctgacacataggtctgctgtcagatgcacacatctctgccctgctcaagcattcatcagtatatttctccagcatgccactggaaatgttgatcccactttttcttaagttttgcaataaaactcaggggggagaaaagaagaggagagggggaggcaacatggagggcaamctggtttttacagttccagtgct

SEQ ID NO: 557417 - DNA, 541 bp, Homo sapiens
attgttcctcttcaaattacactacaaggctataattattacaacagcatattactggtacaaaaatagacctatagatcaatgaaacaaaatagagaacacagaaataaagccacttacctacaaccaactgatctttgataaagtcaacaaaaataaacaatggggaaatgatagcctattcaataaatgatgttgggaaaattggctagcaatatgcrgaagaatgagattggacccttatctctcaccatatgcaaaaattaactcaaggtggattaaaaagttaaatgtaagacccaaaattataaaaatcctagaagaaaacctggaaagaactctcgtggacattgacctagggaaagaatttatgatgaaatttcccaaaagccaatgaaacaaaaacaagaatagactaattggacttaaactaaaaagcttttgcacatttgggaggctgaggcaggcagatcacgaggtcaggaaattgagaccatcctggctaacacagtgaaaccccgtctctactgaaaatacaaaa

SEQ ID NO: 557418 - DNA, 541 bp, Homo sapiens
attgttcctcttcaaattacactacaaggctataattattacaacagcatattactggtacaaaaatagacctatagatcaatgaaacaaaatagagaacacagaaataaagccacttacctacaaccaactgatctttgataaagtcaacaaaaataaacaatggggaaatgatagcctattcaataaatgatgttgggaaaattggctagcaatatgcagaagaatgagattggacccttatctctcaccatatgcaaaaattaactcaaggtggattaaaaagttaaatgtaagwcccaaaattataaaaatcctagaagaaaacctggaaagaactctcgtggacattgacctagggaaagaatttatgatgaaatttcccaaaagccaatgaaacaaaaacaagaatagactaattggacttaaactaaaaagcttttgcacatttgggaggctgaggcaggcagatcacgaggtcaggaaattgagaccatcctggctaacacagtgaaaccccgtctctactgaaaatacaaaa

SEQ ID NO: 557419 - DNA, 504 bp, Homo sapiens
gagaactagtgccccggaagatatccacttttgaatccctggaacttgtgaatgttaaatattttttaccatgttttaccccacatggtaaaatagaaataaaaataaaaacatgtttgcaaatgggatgaagttatgggtcttgaattaggaatgakcctaaacacatgaattataagagggaggctggccaggtgcaggggctcatgcctgtaatcccagtactttaggaggccgaggggggtggatcccttaagcctgggagttcgaggccagcttgggcaacatggtgaaactctgtctctatagaaaatacaaaaattagccaggtgtggtggtacatacctatagtcccagctacttgggaggctgaggcaggaggattacttgagcccaggaggttgaggctgcacagtgagccatgatcatgctgctacactccagcttgggagacagagcaagaccctgtctaaaaaaaaaaaaaaaaaaaaaagggaggggaaa

SEQ ID NO: 557420 - DNA, 561 bp, Homo sapiens
agtgggtaatagtgaagagaatgaatgaatgaatgaatgaatgaatgagtgaatgaatggaaaatttgaccactccctgtaagacacatcacctcaaagagactcaactcctagccatagaggagattcactttcatttggaattaacttaatctttgcatgtagttcttgcctttcccagaatttagcaccctaaatagtcaagaggaagccaactggtccctcagccacaaggcacttgaacctcaactcctccagagcagagcaatccaagctagatgaattccaaccccatcaaaggagyttggggttgcgcacagacaagggtttggggtgggattcttgaaatcctttctttttgggagaaacaagtgcaactcaagtctgggattgtcgtttcagattcccttgatgacttagcactgaggcctcaaaggatgatggagcaaagcaagagatagaaagggagggagaaggtgaaagctttcacaggaaggcaactggtaataatccaagctactactatgcacagaggcctcacctgtgccaggcactgtgccc

SEQ ID NO: 557421 - DNA, 507 bp, Homo sapiens
cctacaattcccagggcagcaccccacaacaaagtattattacctggccccgaatgacaatagcaccaagagagaacccttgctttagaagttggaatagagagagactcttgaactaaaaagtcatgtcagaaactcaggaacagcctttgtagtcttgcccttgtgttaccattgccctttgccagctctcagaggagaaacaagcccctgcggcctgtcctgggttkcacggtcagcatcccacttaaaactcctcatggatccagatcatcacacaccaggtatgtactcaagattgcctttcaacttggagaagctcttcaaaagtcttggcatcctccagtgctggaagtgtttataagagacttcctcaggaaagaaaggccacgcagggaaaagcagaaacagatttcattctctggctaacttccaccgggcacctcaaagaggttcactagcaccttagtcatggaaaaggaacgtttgagagaagggaagggggaa

SEQ ID NO: 557422 - DNA, 531 bp, Homo sapiens
agaaggaagggagggagaaaagaagcaagggagcaaggagagagcaagcagggggagggaggatagatagatgaatgaaaagatagatgactgggagggtagatggactaatgtatgaatgggtcagtggggaggtaggcgaataaatgaatggatggctgcaaggatggatggatggatgggtggatggatgcatggaaaattgaatgagagaaaggaaggaaagatgaatgaatgaatsaatcaatcaatcaatcaatcaataatatatgggagggtggatggatatgtgggtaggtagttgatgagtggatgaatgggtggattcatctcaatcaaagccattatatctccagataagattgcaaactggtgactccttagctacatatggcagctagcatgcttttttgcctttactgggctcaatcagtacttttacacaaggctgtttgtcttggctacacactagaatcacctgggaaacttacaaaactcctgctgctcaggtgccatctcccataccagtca

SEQ ID NO: 557423 - DNA, 539 bp, Homo sapiens
ccactttcccattctgcctcctgggataaacatcaagctggggctttttcatgtaggcaaacaagatcgcaagcaggagagtctaacatcagagtctctcacggaatttagcaacagccaaagctggacgctgaagctcagtccaagctaatctcgcctttggctggttctgccccatgctgctccttgggcagccgacagacaaacccacacaccacagggtcccaggacaagttggtcacagcggcatcccagctgtcttcccagagtgtatcctttctcactggttccatatttaccaggaggccctattcttctccctatcttgggtctttcttggggagggcatttttttttaaacttgttagctcaggggtataagtgcagatttgttacataggtaaacttgtgtcatggggatttgttgtacaaattatttcatcactcaggtattaagcctagtacccattagttatttttcctgatcccctccctcctcccactttccaccctscaataggccccagtgtatgttgttc

SEQ ID NO: 557424 - DNA, 572 bp, Homo sapiens
ttttacattcatgtctgtcacccctctctgctgtctctaggacaagttcagtagagaggtgggagggggttcaaacatgaggctggtgtccctggcaatcatgaaacttccaccttccacatcagctggctgttcatccctctcccacaccaatcaatgaggcttgaggctctgaaagtttggagaaatcatttaaacattctgaccctcagcttcctcatctagactgtggaagaaatgatgagtacctacttcataaggttgttgacagaattaaatgagataatgaataataagagcttagcatagcatctggcatataataagtgcttgttagtttattatttctatcatgcattattaattattataattacctgggaatctgatcttccacctacaaatactttgtttctaaaatgaaaatcaggacattacctrtgacagagtctaacaacaaaaggcaataaggaaaataagacaaattcacacttaatttcccttgatggtctaccataccggggaagctacaagctgacctgtatatgcgtctttatggaaggggagaagga

SEQ ID NO: 557425 - DNA, 515 bp, Homo sapiens
acattatgctgagtgaaataagccaggcacagaaggacaaatgtttcattatttcacttataggcagtatataaaatagtccacctcatagaagcagaaagtcaaatggggaatgctaggggctgagatgagggagaaatgaggagttattgttcaaaaggtagagttctggttatgcaaatttaaaaagttytagagatctgcttcacaacaatgtacatcctttaaccatactatactgtacacttcaaaatttgttaagagcatagataatgtagggtttttttaaaccacaatttaaaaaagaaaaaaaaattgctaagcccattaccaggtcaccaaactgagtattgttccatctcataatttcaacccatgttgaaatttttctggtccttgagaacacccatgttggtctcaccactgggtatcaggattttgacaatggtgttaggattcactgggctccctcttcatcaagggtgcacaaactcatctttcagggaataattcat

SEQ ID NO: 557426 - DNA, 511 bp, Homo sapiens
aaaaagaggaatattccaataagaacaatttatgcactgctgatcttaaagacaccttaggcgccaggtgcagaggttcatgcctgtaatcctagcactttaggaggccaaggcaagcagatcacttaagctcacgagttccagaacagcctgggcaacatggtaaagccctgtctctacaacaaaattacaaaaaattagctgggtgtggtggcatgcacctgtagtcccagcttctcaggaggctgaggtgggagaatcacctgagcccagggagctgaggctgtagtgcattctagcctgggtgatggagtgaggccttgtctcaaaaaaaaaaaaaaaaaaaaaaaaaaaaaggaccctttaggatcttgaaacatttaaatgttttcactataaaagaaaaattttccttatcccagactaactgttcataaaggttcacctgcttaatatgcctaraattcctccactgaggctggtatgggtggcagtgcagtacagggacagc

SEQ ID NO: 557427 - DNA, 531 bp, Homo sapiens
actcttgacctcaagtgatctgcccacctctgcttcccaaagtgctgggattacaggcatgagccaccatacccttcattcctttttatgactaaaaatattatttgaatatgccacattttgtttatcagttgatggacacttggatattcatactttttggcaattatgaataatgtgactatgaatttgcatgtacaagttttggtrtagacacatatttttctttgtcttaggtatatacctaggagtatacactcaagtgtatttaaacattttacagagttcagtgcacatctcctcagtcctgagccttatgagttatctgactgttaaccccgaaaggtacacactggatctccttcactcattttttaaccctgactgggacaccagagacatgctgcatcttgtattaggtgtttcatcttgcagaatggctgtgctcctgaaatatttcctgtgaagaaaattgttacaatcccattacatcactggcttttattattaaattggaaattgttggctgga

SEQ ID NO: 557428 - DNA, 529 bp, Homo sapiens
aacgatatttttacgtatgacaccaaaagtaaaggcaacaaaagcaamaacaaataagtgggactacatcaaacaaaaaaatttctgcacagcaaaggaaacaacaaaatgaaaaggcaacctatggaatgagcaaaaaatattttcaagtcatatatctgataaggggtaaatacctaaaatatacaagatattcatgcaactcaatagcaaagaaatcccaaataatctcttctaaaaagtgttacaaagaacttgaattgatacttttccaaaggagacatacaaatggctaacaggtacatgaaaaagtactcagtatcactaatcatcagggacatgcaagtcaaaactacagtgagatgtcacctcacacctgttaggatggctattatcaaaaagatgaagtaagtgttgttgaggatgtggaggaagaggaatccttgtatacagtgggagggaatgtaaattagtacagccattatggaaaacaatatggaggttcctcaaaaaactaaaactagaacta

SEQ ID NO: 557429 - DNA, 529 bp, Homo sapiens
aacgatatttttacgtatgacaccaaaagtaaaggcaacaaaagcaaaaacaaataagtgggactacatcaaacaaaaaaatttctgcacagcaaaggaaacaacaaaatgaaaaggcaacctatggaatgagcaaaaaatattttcaagtcatatatctgataaggggtaaatacctaaaatatacaagatattcatgcaactcaatagcaaagaaatcccaaataatctcttctaaaaagtgttacaaagaacttgaattgatacttttccaaaggagacatacaaatggctaacaggtacatgaaaaagtactcagtatcactaatcatcagggacatgcaagtcaaaactacagtgagatgtcacctcacacctgttaggatggctattatcaaaaagatgaagtaagtgttgttgaggatgtggaggaagaggaatccttgtatacagtgggagggaatgtaaattagtacagccattatggaaaacaatatggagkttcctcaaaaaactaaaactagaacta

SEQ ID NO: 557430 - DNA, 433 bp, Homo sapiens
tgtgggtgtgtgtgtgtgtgtgtgagtttgtgtacaggagtgtacaggtgccctgcaaaccatggagaaccataatattttggttaaacaaatgatacttakgtatggggagaacgatatctgtgcatataagggaatgtgtgtgtacatgtgcatgtgtttgagagagaccccaactggccatgtctgtagtgaaggtactgccactgttcacccactcacagaagcacagctgggatctcaagtcatcttttccagattgttggatggaatttccattcacatatggctgtgtaatttccacaatgagggtgtgctctctccctgtgactatctcactccgctcctaaccccattaaatacccaaattcaattttattttccaactttatacccatttagcaaaaggtcatccttttgtttgcttgttcct

SEQ ID NO: 557431 - DNA, 508 bp, Homo sapiens
caagtacctgggactgcaggcatgcaccaccatgccttgctaatttttgtatcttttttagacacagggtttcgccatgtttcccaggctggccttgaactcctgagctcaagcgatctgcccacctcggcctcccaaatgctgggattgcaggcatgagccaatgcacctcagtttcttgtctgccaaatggagtgaaaataattatcctgaatcttgatatgaatgttatatatttccaraatcccaagcacattatgtgtgctaattaaatgctagttactacagtaataaggagaaaaatgtagaccaaaacatataaaaataatcaaaaagtaccagattgtaagctcaagggcagagactctgtctcatttatctttgcacccctagcacactacagattcttggcatatagtaggcagccccttgaatgttttttgcattaaactgagctgatttgttgagtatcacctatgtgtagaaattgtttcagtgctgcttagtc

SEQ ID NO: 557432 - DNA, 572 bp, Homo sapiens
tgaggtggggtatcagggaggacaggagggataaatagatggaacatatgagatttttaggatgatgaaactgtgctgtgtggtggatataaggcatgcattagtcaaaacctatagaagagtaccacacaaaaaaagtaaaccttaatataaactaccaacttcacttaataataatgtaatagtattggctcattaattgtaacaaatgcatcattctatactatgcaaaatgttaatagaggaaattatatgggagtgggggagtattatctgcacaatatttttgctctaaartgttgaggtagatttgtacctgatttgttgagaggttttatcatgaagggatgtcaaattttgtcaaatccttcttctggcttattgagatggtcatatgatttttactctttattctattaatacgttacatttatgatttgcatacattaaaccattcttgcatccttgggatcgatcttacttgttcatggtgaataatctttttaatgtgctgttgacttttgtttgctagtgttttgttatttttgcatctatgttcattagcaatatta

SEQ ID NO: 557433 - DNA, 572 bp, Homo sapiens
tgaggtggggtatcagggaggacaggagggataaatagatggaacatatgagatttttaggatgatgaaactgtgctgtgtggtggatataaggcatgcattagtcaaaacctatagaagagtaccacacaaaaaaagtaaaccttaatataaactaccaacttcacttaataataatgtaatagtattggctcattaattgtaacaaatgcatcattctatactatgcaaaatgttaatagaggaaattatatgggagtgggggagtattatctgcacaatatttttgctctaaaatgttgaggtagatttgtacctgatttgttgagaggttttatcatgaagggatgtcaaattttgtcaaatccttcttctggcttattgagatggtcatatgatttttactctttattctattaatacgttacatttatgatttgcatacattaaaccattcttgcatccttgggatcgatcttacttgttcatggtgaataatctttttaatgtgctrttgacttttgtttgctagtgttttgttatttttgcatctatgttcattagcaatatta

SEQ ID NO: 557434 - DNA, 514 bp, Homo sapiens
ttccatgtctgtataatcatatatatatgattacatataagttgtacatcatgtaggtgttgtacatcatatatattatacatcattacatcatatatatatatatatatatatatatatatatatatatgttgcataccattacatcatacatatgtatcagtctttcctcagtacctgtgggggatctgttttagaaccaccaccaccaccacccacyttggatatcaaaatcctcagatgctcaagtccgttatataaaaaggtgtagtgtttgcatataacctacacacatcctgctgtatacttcattatctctacattacctataatacctaatacaatgtaaatgctatgtaaatagttgttatactgtattgtttagggagtaatgacaaggaaaaaggtatatatgtgttcagtacagaggcaaccgtccatttttttcctcaatgttttcaattcatggttgtttgaattcacagacatagaggactggtgtgtgtctgagcac

SEQ ID NO: 557435 - DNA, 514 bp, Homo sapiens
ttccatgtctgtataatcatatatatatgattacatataagttgtacatcatgtaggtgttgtacatcatatatattatacatcattacatcatatatatatatatatatatatatatatatatatatatgttgcataccattacatcatacatatgtatcagtctttcctcagtacctgtgggggatctgttttagaaccaccaccaccaccacccactttggatatcaaaatcctcagatgctcaagtccgttatataaaaaggtgtagtgtttgcatataacctacacacatcctgctgtatacttcattatctctacattacctataatacctaatacaatgtaaatgctatgtaaatagttgttatactgtattgtttagggagtaatgacaaggaaaaaggtatatatgtgttcagtacagaggcaaccgtccatttttttcctcaatgttttcarttcatggttgtttgaattcacagacatagaggactggtgtgtgtctgagcac

SEQ ID NO: 557436 - DNA, 435 bp, Homo sapiens
gaattcagcaggactagtttccaagacaagagagacagtaaacaacaggtcagaagaccccaccgataagcgaggatacagtaaagaaaccagccagaaccaagatggcaacaaaagcaaccttcaccactatcatacacaaatcataatgcatgcgcacgctaaaaaccacccccaccagcaccacgacagtttacaaatgccatggcaatatctagaagttaccccgtatggtctggactggggactcctggttccacagaatccctgcctcttttccagaaaactcacgaataatccaccccttgtttaacatatactcaagaaatggccataaaatagccagttagcaggcccgcctgcttcccaccctccccacyccactctgcctatggggtagccacccttttattccctcatttttaataaacttgc

SEQ ID NO: 557437 - DNA, 616 bp, Homo sapiens
tagacttttttaggccaagagtcgaaatcaagaatattatgtgggcaattacatgagaagataagaaaacaaatttcgataaatatttattggcaacaaatgcagaattagttgataatagttcaagtataattttctataaaatagtgttgtaccaatatagaaaaattgaatttcttttattgtrtgagagtgatatcatttcacttaattggggttcaaagttagtgcttcctatcatcagagtcaatgcccaatgcccatctgttaatgctgattcataatgaggttttacatattttgtctttgaaaatatcttttcacacaaatagatactgtcaaatactaatatctgttgatgaacatatgattttaatttagcacaatcattacttaaaaagcacttaaagaattctattagattcttctcttggtatttgccttttagcatgtcattatattaattacttccaattgaagggtaggtggaagctcctcaattgcacagttaaatggattttgaaataaggaaatttcatttgcacttgcatcaaagtccaaaaaaatccactgctggaattgtagtttgaactcaaaagatatatctgctgcacgt

SEQ ID NO: 557438 - DNA, 616 bp, Homo sapiens
tagacttttttaggccaagagtcgaaatcaagaatattatgtgggcaattacatgagaagataagaaaacaaatttcgataaatatttattggcaacaaatgcagaattagttgataatagttcaagtataattttctataaaatagtgttgtaccaatatagaaaaattgaatttcttttattgtakgagagtgatatcatttcacttaattggggttcaaagttagtgcttcctatcatcagagtcaatgcccaatgcccatctgttaatgctgattcataatgaggttttacatattttgtctttgaaaatatcttttcacacaaatagatactgtcaaatactaatatctgttgatgaacatatgattttaatttagcacaatcattacttaaaaagcacttaaagaattctattagattcttctcttggtatttgccttttagcatgtcattatattaattacttccaattgaagggtaggtggaagctcctcaattgcacagttaaatggattttgaaataaggaaatttcatttgcacttgcatcaaagtccaaaaaaatccactgctggaattgtagtttgaactcaaaagatatatctgctgcacgt

SEQ ID NO: 557439 - DNA, 616 bp, Homo sapiens
tagacttttttaggccaagagtcgaaatcaagaatattatgtgggcaattacatgagaagataagaaaacaaatttcgataaatatttattggcaacaaatgcagaattagttgataatagttcaagtataattttctataaaatagtgttgtaccaatatagaaaaattgaatttcttttattgtatgagagtgatawcatttcacttaattggggttcaaagttagtgcttcctatcatcagagtcaatgcccaatgcccatctgttaatgctgattcataatgaggttttacatattttgtctttgaaaatatcttttcacacaaatagatactgtcaaatactaatatctgttgatgaacatatgattttaatttagcacaatcattacttaaaaagcacttaaagaattctattagattcttctcttggtatttgccttttagcatgtcattatattaattacttccaattgaagggtaggtggaagctcctcaattgcacagttaaatggattttgaaataaggaaatttcatttgcacttgcatcaaagtccaaaaaaatccactgctggaattgtagtttgaactcaaaagatatatctgctgcacgt

SEQ ID NO: 557440 - DNA, 616 bp, Homo sapiens
tagacttttttaggccaagagtcgaaatcaagaatattatgtgggcaattacatgagaagataagaaaacaaatttcgataaatatttattggcaacaaatgcagaattagttgataatagttcaagtataattttctataaaatagtgttgtaccaatatagaaaaattgaatttcttttattgtatgagagtgatatcatttcacttaattggggttcaaagttagtgcttcctatcatcagartcaatgcccaatgcccatctgttaatgctgattcataatgaggttttacatattttgtctttgaaaatatcttttcacacaaatagatactgtcaaatactaatatctgttgatgaacatatgattttaatttagcacaatcattacttaaaaagcacttaaagaattctattagattcttctcttggtatttgccttttagcatgtcattatattaattacttccaattgaagggtaggtggaagctcctcaattgcacagttaaatggattttgaaataaggaaatttcatttgcacttgcatcaaagtccaaaaaaatccactgctggaattgtagtttgaactcaaaagatatatctgctgcacgt

SEQ ID NO: 557441 - DNA, 583 bp, Homo sapiens
acacatcattatcacccagagtctatagtttacatcagagtaccctcttggtgttatacattctatggatttggacaaatgtataatgacagttatccaccattgtagtgtcacacagagtagttccattgccctaaaaatcctctgtgctctgcctattcatccctctgtcccctcaccctctggcaaccacttatctttgtactttctccatagttttgccttttcyagaatgtcatacagttggagccatgcagtgtgtgaccttttcacattggcttctttcacttagtaatatgcatttacatttcctccatgtcttttcatagcgtggtacctcataccttccgagcactgaatagcattccattgtctggacgtatcataatttatgtattcattcacgtactgaaggatattctggttgcttccaagttttagcaattacaaataaagctgttgtaacatccaagtgcaggtttttatgtagagataagttttcaattcatttgggtaaatactgtgatatgttcttttttttttttgagatggagtctggctctgtcacccaggctggagtgca

SEQ ID NO: 557442 - DNA, 524 bp, Homo sapiens
gcagtgagccgagatcatgccactgcactccagcctgggcaacagggcgagactccacctcaaaaaaaaaaaaatgtgtaattaactgttccccatgtcaataaatattctcttctaatattcttttaaatgattttctagtatgccatcctaacgatatgtcatcacgaatttatataattccttgtcattgaacaattaggtttttcaaagattttttctttgcttttgtaaataatgttgcaatgaacacagytgcagctaaatcttcgcacacataagtgattatccccttatcataaattattagaaggccaattgttgggtcaatgggcatgcacatctcttaaatctcttatacatattgttcaattacgctccaggaaagctgtaaaaaatttatattcctaccagtagcatatgaatgcatctgacccaaggagtttttttactgattctgccagacgttggagaccacatttctactgtctgctatatgtctggtatacagtaggcactcaata

SEQ ID NO: 557443 - DNA, 524 bp, Homo sapiens
gcagtgagccgagatcatgccactgcactccagcctgggcaacagggcgagactccacctcaaaaaaaaaaaaatgtgtaattaactgttccccatgtcaataaatattctcttctaatattcttttaaatgattttctagtatgccatcctaacgatatgtcatcacgaatttatataattccttgtcattgaacaattaggtttttcaaagattttttctttgcttttgtaaataatgttgcaatgaacacagttgcagctaaatcttygcacacataagtgattatccccttatcataaattattagaaggccaattgttgggtcaatgggcatgcacatctcttaaatctcttatacatattgttcaattacgctccaggaaagctgtaaaaaatttatattcctaccagtagcatatgaatgcatctgacccaaggagtttttttactgattctgccagacgttggagaccacatttctactgtctgctatatgtctggtatacagtaggcactcaata

SEQ ID NO: 557444 - DNA, 555 bp, Homo sapiens
gttcactcattgtggaagacagtatggcaattcctcaaagagctaaagacagaaatactatttgacccagcaatcccattcctgggtatatacccaaaggtgtaaaaatcattctgttataaggacacatgcacacatatgttcactgcagyactgttcacaatagcaaagacatggaatcaacctaaatgctcatcaataataaactggataaagaaaatgtggtacatatacatcacggaatatttgcaaccataaaaaagaacaagatcatgccctttgtagggacatggatggagctggaggccattatccttagcaaactaatgaaggaacagaaaactaaatacgcgttttcacttataagtgggagctaaataataagaacacatggatacacagaggggaacaacatatactggggcatattggatggtggagggtagaagggtgagaggagagagatcaggaaaaataactaacaggtactaggcttaatacctggatgatgaaataatctatacaacaatcctccatgacacaagtttatctatg

SEQ ID NO: 557445 - DNA, 555 bp, Homo sapiens
gttcactcattgtggaagacagtatggcaattcctcaaagagctaaagacagaaatactatttgacccagcaatcccattcctgggtatatacccaaaggtgtaaaaatcattctgttataaggacacatgcacacatatgttcactgcagtactgttcacaatagcaaagacatggaatcaacctaaatgctcatcaataataaactggataaagaaaatgtggtacatatacatcacggaatatttgcaaccataaaaaagaacaagatcatgccctttgtagggacatggayggagctggaggccattatccttagcaaactaatgaaggaacagaaaactaaatacgcgttttcacttataagtgggagctaaataataagaacacatggatacacagaggggaacaacatatactggggcatattggatggtggagggtagaagggtgagaggagagagatcaggaaaaataactaacaggtactaggcttaatacctggatgatgaaataatctatacaacaatcctccatgacacaagtttatctatg

SEQ ID NO: 557446 - DNA, 595 bp, Homo sapiens
aggaacagaaaaccaaatactgcatgttctcatttatatgtgggagctaaatgagaacacattgacatgtagagaagaacaacacatactggggcctattggaggctggaaggggggatgagggagaggatcaggaaaaattactaatgggtgctaggcttaatacctgggtgataaagtctgtwcaataaagccccatcatacaagtttccctatataacaaaacctgcacatgtacccctgaatttaaaataaaagttaatttaaaaaacctcatagtggtctataaattcaatgagaactactggtagtttacaaacaaacagtcctcatttttgtgctattcccaatgatgttgcaacagataggtttaatttgaattattaatattttcttaaacttacaaagtcaacaaagcaataaatagagccctagtaaaagatagcacattctatggtgtaaatatttcaactacatttaattttaacaaagcactgaacagagttaggaaaggatgcacagtaacagatttatgcagtatttttatcagaaatgaaatagacataaataacctcaagagcaaagttaacagtaa

SEQ ID NO: 557447 - DNA, 595 bp, Homo sapiens
aggaacagaaaaccaaatactgcatgttctcatttatatgtgggagctaaatgagaacacattgacatgtagagaagaacaacacatactggggcctattggaggctggaaggggggatgagggagaggatcaggaaaaattactaatgggtgctaggcttaatacctgggtgataaagtctgtacaataaagccccatcatacaagtttccctatataacaaaacctgcacatgtacccctgaatttaaaataaaagttmatttaaaaaacctcatagtggtctataaattcaatgagaactactggtagtttacaaacaaacagtcctcatttttgtgctattcccaatgatgttgcaacagataggtttaatttgaattattaatattttcttaaacttacaaagtcaacaaagcaataaatagagccctagtaaaagatagcacattctatggtgtaaatatttcaactacatttaattttaacaaagcactgaacagagttaggaaaggatgcacagtaacagatttatgcagtatttttatcagaaatgaaatagacataaataacctcaagagcaaagttaacagtaa

SEQ ID NO: 557448 - DNA, 559 bp, Homo sapiens
agttgtaatgtctcctttttcacctctgattttatttatttggatcctctctccctctctttttagtctaactaattaaaggcttgttagttttgtttcacttttcaaaaaaacaactttttgttatgttgatcttttgtatcttcttcattttatttctgcgctgatcattattatttcttttcttctactaatactgggtttatgttgttcttgattttctggttatttaagatgtaccattaagttgtttatttgaagtttttttttgatgtaggcacttatggcaataaaattccctcttagtaccgcttttgctggattctataggttttggtatgttgtgttttcactatcatttatttsaaaaatgttttgattttcttaattctttactcaggagcatatagtttaatgtgcatgtatttgtatagttccccaaattcctcattattgatttctagttttattccactgtagcaggagatgcttgatattatttcaatttattttgaatattttaagacttgttttgtgacctaacatgtggtctatcctt

SEQ ID NO: 557449 - DNA, 649 bp, Homo sapiens
ggacagcacaacctacacaaatctataaatataatacaccacatcaacagaataaaggacaaaaacatatgagcatctcaataaataagaaaaaacatttggcagtatttaacttctttcataatcaacactcttaacacattaaatatagaagtatcccacattcttaattttgtatgtgtgttttcagcagaggcaccgtaacacaagtagaaaaattgtacccgacattatgaactcaggacttttccttcacctgggaaaaaatcatgataattaaaaagaagcagaaacctatttaatttcttctsaagtccagtatagttaaatgattggtacttcatccatttgacatagtggaaaagaaaaaactagattagagtttggtagacacagtatggcatctgcctttgatcaattttgttgcatgatttgaaatgagtcacctctttctaaatgtcatctcatttgaataagtaattttaaactatttgcagcaaaacattcagtaactcatttcactatttctgatgcagtgaatgcaaataaacaaaagccattgcttttcttgacacatcctcttcacacaattaagaaatggttacaacctgagaaaactgcgaactatattgctattaattcagaacaa

SEQ ID NO: 557450 - DNA, 578 bp, Homo sapiens
gggtttcacagtgttagccaggatggtctcgatctcaagacctggtgatccgcccaccttggcctcccaaagtgctgggattacagatgtgagccactgtgcccagcctatacatccccatttttaccccatctcccaattatccccttctcctaaaacattcttctgtacctgtagaactcacaggcacaaatcarcataaccacctagagtcccaacacctcctcaaaatgttcccttcttgctgtaacagaaatttaatctttctttgaagatactacttctgcagcctactcaaatagtgaatgttttctctaccatataccctgaaaatagaatgggtgcccttctgactgttgactcttccaatcactttcattttcttattcttgaaaagctgtaccattgtagagattttctatgactcttacttgttgaaatcatctacaaaacctacatcacccctttatcttttaaaaattagttcctgattttttttattactatccccaacactcctgtcatatttttgggttacttcgctatttgtgtagatcatagaactatggttgacttct

SEQ ID NO: 557451 - DNA, 560 bp, Homo sapiens
atccatgtcatgccctctagaacaccagcagcgtcagcaaaccatgtacatgatcaaattttcattaactctcaatcccataatgtcttctcttttctccttaacctagataagtctcatcatccaatcaaagaaatctctttcatcttaagtttctttttcccattttcatttaatgtctttaacttggaacttttaaaatttaatctcttgcctattctgatttgtacttgtgtaattgaatagggctggaaatgtacacacattccatgcattgtatcatgaaaaatttatgacatcaaacatcaagtgtgcctgtagagctgcacagaatcmtgtaatctttttaccaggccagttgctcagtctcctggataattatttcataccttctcatttttcctgtaaatcctaatgccttctggttcattttcattctaacattacttctcatctcattgagaataatgcaaacattaaaaatgtctaccccacatttacatatctacctaccttttttcccctctcattattactggcatgctttgttcatatgcaag

SEQ ID NO: 557452 - DNA, 623 bp, Homo sapiens
atgtatttcattttacgctccctgggatagccatatgagaccaactactttattagtaatgcaaaaaggttttatgtgttcatatttcaacacataagaagacttccatattgtgcttggaaattattaaactatctcttggtatattatagaaaagtaagtttcaagttgaaattaaatctgttaatttctgtaaatcaggaaaaggcacaaaagcatttccctstcctgcaaaaatctttgaaatgtttcctaaaggaaaaattatatatttaccctctgtctgatttgtttttttgtatgtgtgtgtgttgccacctctgaatctctatagattgtgtgtatatccttattaatctaatttgttttactaatgtctttatggaggattaaaaacacaataaaacctaacttcttacttcttctttccatataattcacactatctcccaaggtgtcagacttttatttagccttcttaaaactcatgtctaccatctgtaaaaatggtgataattcctcaatgggttgttgaattaaatgagatatattttattttcaacatctataatgattcctgaacatttcaagaatgaaaactgtgaatatactgagaacatttc

SEQ ID NO: 557453 - DNA, 596 bp, Homo sapiens
aaatgtcaatagtattttgtagcttttattgtacagtgtggcacaactttattttttaaataattttaatctttttgatgctattttaaatggattttttaaaattttaatctttgattatttgtttttaatgtatagcaatgccagtgatttttgtatatcatgtattgcatgttttgtggtttgagacatcatgaggcttgtaaatactatcttataacttattttaaccttctaataatactatttgcataaacaaacaagaaataagaaaactaataaaaacttgccttgtgttttttctattttattgtawtatgtcttgaaaagtagtcctagtcattatttttgatctgtttagtccttctacttaggagaagactagtttacacaccacagttacagtgttataattttctgtgactttctgtgtacttactattatctgtaagttttgtactttcagatgattattgctcatgagtttccttttctgattgaaatactccatttagcatttattgtggaacaggtcaagtatagataaaccctcagcttttgtttgtctggcaaagtctttatttcatgtttgaacc

SEQ ID NO: 557454 - DNA, 596 bp, Homo sapiens
aaatgtcaatagtattttgtagcttttattgtacagtgtggcacaactttattttttaaataattttaatctttttgatgctattttaaatggattttttaaaattttaatctttgattatttgtttttaatgtatagcaatgccagtgatttttgtatatcatgtattgcatgttttgtggtttgagacatcatgaggcttgtaaatactatcttataacttattttaaccttctaataatactatttgcataaacaaacaagaaataagaaaactaataaaaacttgccttgtgttttttctattttattgtattatgtcttgaaaagtagtcctagtcattatttttgatctgtttagtccttctacttaggagaagactagtttacacaccacagttacagtgttataattttctgtgactttctgtgtacttactattatctgtaagttttgtactttcagatgattattgytcatgagtttccttttctgattgaaatactccatttagcatttattgtggaacaggtcaagtatagataaaccctcagcttttgtttgtctggcaaagtctttatttcatgtttgaacc

SEQ ID NO: 557455 - DNA, 475 bp, Homo sapiens
gaattcagctgtgaatccataagctcctgggcttttttgtggttaggctatttattactggctcaatttcagagcccattattggtctcttcagggtttcaatttcttcctggttcattcttgggagggtgcagttgtccaggaatgtattcattttctccacctctttattttgagcttatgtgtgtcattgtatgtgagatgggtctgttgaagacagcataccaatgggtcttgatcctttatccagctcaccactctgtctttgaattgggacatttagcctatttatttacatgtaaggtttgtattgatgtgtgtatatttgatcctggcatcatgatgttagctggttattttgcacacttacgtggttgctttatagtgacactggtctgtgtacttcagtgtgcttttgtactggctggtaatggtctttcctttccatatttartgcttgcttcatgacctcttg

SEQ ID NO: 557456 - DNA, 592 bp, Homo sapiens
agatctgacttaaaccaaactactctacggacaccccaccagaaaaaattgtattacgaaatcacttcagaaatgaggccaaagttcaaatcagccaacccaatagcaaagaaagaagatacaatttacttttaagagctatccatatttgttgtcaattaaaaattaaacttcctacttattcttctattaaaaatagtacatttgaagagatatactattactaatgaaacaaactggtaagtataagtttgtttaaaattactttcacttttgggatgataccaaattgatcagtacacttttgacagtgacctaagctaatattactatatgcaaagtatacattctaagcatgtattacttgtgcttagtaattaaatagtaatcttcatagaayaatgtttcataaagttttcataaataataataacaaatagtaacatacggttgaagatgcttggcatgcccggtttaattccctttgtttgtacagaagctcctggttgaggtacagcaactctataaaggataagaagagtataaccaatccttataaaaagagtctcaaatgaaaaacaatcaactggtt

SEQ ID NO: 557457 - DNA, 584 bp, Homo sapiens
ttagagtctaaggcaagggtcagsaggcagcagggtatggcccatgggatgagtcccatacccctcctgtttttgaacagctatgagttaagaagggcttttacatttttaaatggttgagcaaaaacacaaaagaataatatttcctaacatgtgaaaattacatgaaattcaaatttcaatgtttataaataaagtattacaggaacgcagtcaagctcattcttttatgtattgtctgtggctgcttttgagtcacaacagctgagttgaatacttggggcagagatgacatgaaccacaaagcccaaaatatttacccacccctgacctaagagggggactgacacaagagacaagcaagtgacatatgaaattacagaggtaaaaatgcactccagcatatttttggagcattgaggagaggatgataaaagaagcacaatttccaccttccttaaggtcatagaacaaatgtataaccaacataagagaatttaaaaacatttctttctgccatcacctaaacaagaagccaaaagatgattaaaaaaaatgaaatatgttattacatttccaggtta

SEQ ID NO: 557458 - DNA, 420 bp, Homo sapiens
attcctagccaagggcagccttgaragactgtaccgggaggaacagtgcactgcggcccaaatattgcacttttcccatggtcttcacaaccggcagaccatgaaattccctccagtgcctggctcggcaggtcccacccccatagagccgagcaagctaagatccactggcttgaaattcttgctgctagcacagcagtctgaggtcgacttagaatgctcaagctttgtagggggaggggcatccaccattgctaaggatggagtaggtggttttgccctcacagtgtaaacaaagcctctcgtaagtctgaactgggcggagcccaccacagctcagcaaggctgctgtggccagactgcctctctaggcagggcatctctgaaaaaaaggcaacagcctcagtcagggacttacag

SEQ ID NO: 557459 - DNA, 492 bp, Homo sapiens
atagtatcatcattttttatgtttttaatttaaaatttttgtgggtacattggtatatatatttrtaggtacatgagctattttgatataggtatgcaatgtgtaataatcatatcatggaaaattgggtatccgtctccttaagcatttatcctttgtgttataaacaatccaattatactcttgtagttattttaaaatgtacaggtcagttgttattgactatagtccccctgttgtgctattaaatactaggtatttaaaaacattaaaaaaagttttttagaatttattttgatttttaaactttgcaggtacatagcaggtatatatatttttatggggtacatgagatgttttgatacaggcatgcaatgtgaaataagcacatcacagagaatgggttatccatccccttaagtgcatatcctttgagttatacaatcaaattgtattctctaagttattttgaaatgtacaattaagttatta

SEQ ID NO: 557460 - DNA, 492 bp, Homo sapiens
atagtatcatcattttttatgtttttaatttaaaatttttgtgggtacattggtatatatatttataggtacatgagctattttgatataggtatgcaatgtgtaataatcatatcatggaaaattgggtatccgtctccttaagcatttatcctttgtgttataaacaatccaattatactcttgtagttattttaaaatgtacaggtcagttgttattgactatagtccccctgttgtgctattaaatactaggtatttaaaaacattaaaaaaakttttttagaatttattttgatttttaaactttgcaggtacatagcaggtatatatatttttatggggtacatgagatgttttgatacaggcatgcaatgtgaaataagcacatcacagagaatgggttatccatccccttaagtgcatatcctttgagttatacaatcaaattgtattctctaagttattttgaaatgtacaattaagttatta

SEQ ID NO: 557461 - DNA, 492 bp, Homo sapiens
atagtatcatcattttttatgtttttaatttaaaatttttgtgggtacattggtatatatatttataggtacatgagctattttgatataggtatgcaatgtgtaataatcatatcatggaaaattgggtatccgtctccttaagcatttatcctttgtgttataaacaatccaattatactcttgtagttattttaaaatgtacaggtcagttgttattgactatagtccccctgttgtgctattaaatactaggtatttaaaaacattaaaaaaagttttttagaatttattttgatttttaaactttgcaggtacatagcaggtatatatatttttatggsgtacatgagatgttttgatacaggcatgcaatgtgaaataagcacatcacagagaatgggttatccatccccttaagtgcatatcctttgagttatacaatcaaattgtattctctaagttattttgaaatgtacaattaagttatta

SEQ ID NO: 557462 - DNA, 599 bp, Homo sapiens
aaactgtacattagatctcactagaaaggaacacactaagaagcaatcaaatcttcagctttttagaacattcacatgtttccccatctactccccaacaccccaagatatctagtattaccattgttgtggacaaactgcaacctaacttaataggcagacaagattgaaaacctaacttagtagtatgtacctgtaacaatagctgagtcttggccaatcccagcagccatacttcaaagactcatacgctgctgagtgttcaaactgtgttcaaataaggcaaatgccaagctataaccaatccagttgtttctgtmtctcactttcaattcctgtgtgtcatttccctgtttttgtctataaatttattctgaccaaaaggcatccctggagtctccctaaatttactgtgattctgggggctgcccaattcacaaatcatttattgctcaatcacactcctttaaattcggttaaagttttccttttaacagatggtgtcagaagcggggtccaaagtagagcttctaatgaccccaggaatgctgagtgaacaagcaaggtagctgcaaggaccctgcaaggacccacttgtg

SEQ ID NO: 557463 - DNA, 595 bp, Homo sapiens
attcagagtataaattaacccttgcttatgtgtgctacatatatatgtggagatgactttggcaacatttggttatatttatcattgaaaacacaagcaatgggagaaatggtgtttcgttgatttaattttataggacatatggatttgaaaactttcattgagatcagcagtgacctattaatgttatggaagggtgttatgtaaataataggtgttccagttgggtagctatccacactctgatttgttcatggaaaacatttgataatcagcagtgaaactactagacaagaggaatgatgatagcatgatgggagaataggagtttccaatgcacactcctctgtattagtctgttttcacagtgctataaagatactacatgaaactaggtattttataaagcaaagaagttggtaaggagccaagatgtctgaataggaacagctccggtctacagctcccagcgtgagtgacacagaagacaggtgatttctgcatttccatctgaggtaccaggttcatctcactagggagtgccagacagtgggtgcaggacagtgggtgcagcgmactgtgcgcaggccgaagc

SEQ ID NO: 557464 - DNA, 465 bp, Homo sapiens
agtgtctgttgttcccttctttgtgttcatgagttctcatcacttagctcccacttatatgtgaggacaaacagaatttggttttctgttcctgcattagtttgctaaggataatgacctccagctacaatttacctctcctcccctcacaatatatgctattgctgtcaaattttacatatatttgttatgtatatattagcataatttagttaccattgtctttaatactttttaacttttatagtagaattaaaagtgatttactcatcactattatagtaatatacyactttcttttgatctatgtatttacctttaccaacaagtttcatactttcctacactcttgtgtttctgtttagcatcctttcatctcaactttaaaaattctctttagcaatttggtcacaacagtgacagaaattgctggataagcgaagtgccactgggttctttgccctc

SEQ ID NO: 557465 - DNA, 337 bp, Homo sapiens
ttttgttttaatttgttgagactttttttgtggcctatcatatggcctaccttggagaatgtttcatgcattgatgaacagaacgtatattctgcagttgttgggtagaatgctctgtaaatatctgttaagtccattcgttgtagggtatagtttaactctattgcctcccctatcccctagggatgtggcttcctgagacctgagctgcagtgattattgtttctcttccagatctagccacccggcagagataytgaactccaggctggtacaggggagtatgtgcaaagcgatgtgacccatcttcaggtctctcagccatgaataccagcac

SEQ ID NO: 557466 - DNA, 597 bp, Homo sapiens
gtataattatagctcactgcagcctcaacctcctgagctcaagtggtcctcccaacccagcctcccaaagagctgggaccacaggtatgcaccaccacacctggataattgtggtttttttgtaaagatgggggtctcactttgttgcccaggctagtcttgaactcctggcctcccaaattgttggtattataggcgtgagtygacaggctccggcataggccattttcaaactcccagattctctcccttttgatgctttttgctgataattatagaaattttactttcctttttccctcctaaatggagcagtattctggtttggaggatggctgctattcaagtagtccttgtcagaagcaagcctatgttgttgtatctaaaggtaaattgcacatctctggcaattttccttgccagcgcgtatactgaagccatccccagcgctcgcctttgccaggtggccaggcctcagggtggggcttgcttgtctttcccctctgctaagacctgcatacttagtgctctgagaacctttcctcgcctcacctgctctccttggtttttctgtttttgagaatggaaaaagttcat

SEQ ID NO: 557467 - DNA, 597 bp, Homo sapiens
gtataattatagctcactgcagcctcaacctcctgagctcaagtggtcctcccaacccagcctcccaaagagctgggaccacaggtatgcaccaccacacctggataattgtggtttttttgtaaagatgggggtctcactttgttgcccaggctagtcttgaactcctggcctcccaaattgttggtattataggcgtgagtcgacaggctccggcataggccattttcaaactcccagattctctcccttttgatgctttttgctgataattatagaaattttactttcctttttccctcctaaatggagcagtattctggtttggaggatggctgctattcaagtagtccttgtcagaagcaagcctatgttgttgtatctaaaggtaaattgcacatctctggcaattttccttgccarcgcgtatactgaagccatccccagcgctcgcctttgccaggtggccaggcctcagggtggggcttgcttgtctttcccctctgctaagacctgcatacttagtgctctgagaacctttcctcgcctcacctgctctccttggtttttctgtttttgagaatggaaaaagttcat

SEQ ID NO: 557468 - DNA, 588 bp, Homo sapiens
tttttttttttttcctggaagatctgaaatttcaacagatttcagattttcattgaacctaggaagcaagaaagtctaagccccaaaaagagtggggagagctaaagaaatactcattaataataaaaatttctttctccttatagttctcttatcttttgaaaatgctggtgcaaattatagagaaggcagtcagaatatgggaaaaagaaaactgggcttagtgtcagaaataaaaaaatgttatcaaggcaacatcacctttctttctttctttctttctttttgagacgcagtctcgcrctgtcgcccaggctggaatacaatggtgcgagctcagctcactgcaaccagggcctcgggggttcaagcaattctcctgcctcagcctccctagtagctgggattacaggcaccagccaccaggcttagctaatttttgtgcatttttagtagagactggatttcaatatgttggccaggctggtcttgaactcctgacctcatgatcaacctgccttggcctcccaaagtgctgggattacaggcatgagccactgcgcctggccttttttttctatttgatat

SEQ ID NO: 557469 - DNA, 559 bp, Homo sapiens
gaggagtctggattttacctccactcaacattaataatatgcccctctccctccatgataagacgtgtcagaatgagggctagcagagtcaggtcatccaccatcactgagctatgataggtccatccccttctccacatgcattattaatagagaccacatggggctcgaattcccacccctgcccagcagtcagtaatgagggccgctatctcaaatgtcaatgcaggctgagtggggaatttagcctttacctctttacctccatctgggattaacaaggtagcactactattcccctactggagtggtattgcaaaaaaaaaaaaaaaaaaaaaaaaaaacccagaagtaaaatggggaaataaaaaggttaaattgtctcataacatatcacaaaaaaaattataggttttaataaaataaacctactcattccaaaacaaagtttcacacccttccccccacacaaaaaaatagtttaaaaaaacacctgaaataaaaatactatgatgatgggacaattttaaagcasccattatcaatggtttcaacaagc

SEQ ID NO: 557470 - DNA, 620 bp, Homo sapiens
accttttttttttctttagacaaagtttcactcttgttgcccaggctggaatgcagtggcgcaatcttggcaacctccaccccccgggttcaagcaattctgctgcctcagcctcctgagtagctggaattacaggcatgtgccaccatgcctggctaatttttgtatttttagtagacgtgggggtttcaccatgttggtcatgctggtcttgaactgctgacttgaggtgttccacctgcctcagcctcccaaaatgctgggattacaggcgtgagccaccatgcccagcgttgttcttccaacttcctgtgcattcggtgcctcttctgaatctgtgtttgatgccataaaatgtaatatggctattaagctgtttgttctgggctggtggatttagcagtgtttgggcatggtaggtgactgagtgagagctacaacarcttgagaagttcgggacactcactcaggagacccgtaatagctcgacctcttattttctgttttgttttgtttgtttgttttgttttctctcttcaggaatcatgtttacaaagcattcccttggcaagaggctgtctataggatccagatggtctgaccccaagtcagatgtcctt

SEQ ID NO: 557471 - DNA, 515 bp, Homo sapiens
cctgctttaccctcctgagtagctgtgattacaggygtgtgccaccacgtccagctaatttttgtatttttagtagagacttggtcaggctggtctcgaactcctgacctcatgatcctccagccttggcctcccaaagtgctgggattacaggcgtgaaccaccgtgcctggccttttttttttttttttttttgagatggagtcttgctctgtcatccaggctggagtgtaatggtaagatctcagctcactgcgacctctgcctcccaggttcaaatgattctcatgcctcagcctcctgagtagctggtactataggcatgcaccacaacactggactaatttttgtagttttagtggacggggtttcaccccattgtccaggctggtctcgaactcctgacctcaagtgatcctcccacctcaacatcccaaagtgctgggattacaggcatgagccactgcgcctgaccctgaaagatgattattaatatgtgtgcatgtcttctatag

SEQ ID NO: 557472 - DNA, 588 bp, Homo sapiens
ctctgcctccagggttcaagcgattctcctgcctcagcctcccaagtagctgggattacaggtgcacaccaccaaacccagctaaatttttttttgtattttagtagaggcagrgtttcactatattggccaggctggtttcgaactcttgacctcaagtgacccacttgcctcagcctcccaaaaagctgggattacaggcataagccactgcgcccggccaataacaccctctttattgcctttctttccttccctgtctcctttcccatttcccccttaatgtttcctggggtaaccttccaaatgaactcttgtactcaaatccttgttgtggagcatgcttctggggaacccaaactaagacatccatctcacggactgctctgtgaatgtgactgaaaagtcgccaatgtcacccttacctctgcttcctaaaaacaagaataatatagttggaagaagggtgacagctaactcacacatcattggattagtacctaaccctatcaaagcgcataatcaccaggtcttattgctgagcaatgtggtggctgacagtgttgaccctcctgccgtcagcaactc

SEQ ID NO: 557473 - DNA, 506 bp, Homo sapiens
gtaaacaaaaatgcccattaacgcctaaggctatcagacaaatgcccattatactgaccttgattgaccctttttttttttcaacaactgcacaccttttagaaataatttgttgagctgcaatcccagtcagcaactacaatgtcagttttcagcaagctcttgctgagtaagaaatcagaagatttaaccacattggtgagaaagtcagatgatttacacataggccacagggttgcgttgctgccttccttctttagagaaactccaggcaaacatatttcctttcttgagagaatcaaactcctacagatccacactctctcctcagttcacagtgcagtcaggtgaaatagctcacggatgagttaggaaaattctttaacagagaagggtaagcagakgctatttcacacaaaataacagtgaagtcaagcactgtgatgtcttaaagggagtgtacaccaataaattaaaccaaataattagaagatgaagctctgttt

SEQ ID NO: 557474 - DNA, 410 bp, Homo sapiens
ttttacttttattaaaaattggctttattatcaatacataagttcgctaaattgaacagaatatatatagaaagaaaaatamctgcacagtcaatgaatgtgcccattctacaatatttggccctatcctaataagttggcatgtacaggctaatttctaccataatataaatagtcatagtaataattaaaaacaactgaaaacatttgagcattttcacaaaagttaacttttatattaagaaaaggttggatataggggtggaaggagtgtcagaatggagtaattcaatcggcaatagaagatcagattcattaataaaccacagggaacataacacaggtataaatgcaacccaataacatggcatgatggagaagctgattttgcgttgcacagaaagagaatc

SEQ ID NO: 557475 - DNA, 575 bp, Homo sapiens
aaacatgcagaattgggaaggtaaggatgtctcacagtggtgctgtgagatatattatgagacgtatcacatgcaatgatatatatcaccggttgagctcctaggggagggcagcactctaaaaaaaaaaaaaatggagcttagtaaatgcttttcagctgatgtagactgcagcctttccaggggatttctcaaaatgtaagatcackgaggctggggaccctgcttttgtatgttgtattctgttattcaatacccagaacttgacagttgctcagaaaagatgtgttgtgagtggtctatgggtaagagtgggctttagaaaaatgtgctgagagtggccaggcgcaagtggctcatgcctggaatcctagcactttgggaggctgaggcaggaggatcacttgaagccaggagcttgagaccagcctgggcgacatagtgagaccccccatctctacaaaaaaattaaaaaatagctaaatgttgtggtgcaggcctgtagtcccacttatttggatgggtgaggtaggaggattgcttgagcccatgagtttgagcctgcagtgaactat

SEQ ID NO: 557476 - DNA, 433 bp, Homo sapiens
cttcatgtatttgtgtaacattgtttttctttgtttaccctagatagttggtacttgtaattattttattagcatccaattgcattttccctttcttgactaagaagcagaaatatttcaaacatcaaagtttatttaaataggatacaacccttgggaaattaaaaggggatgcagttcactgccaggattatttgaraaatattgcaaaacttggttgctgtattgctttatagaagtaaattgatggtgcatcttggcagatggaacaatgaggggtggggagcaatgcttttcagctacatcacatctttcagcttgaagagatcaacataacacacaaagcaaatgtgtaatctaaatacaagttatattttgcattctcatttttagatggaaaacattacagcacaaaagccaggagaaaaaaatt

SEQ ID NO: 557477 - DNA, 534 bp, Homo sapiens
ccctggtatgaaacccacttgatcatggtggattatctttttgatgtgttgtytgatttgttagttagtattttgttaaggattttggcatccatgttcatcagggataccagtctgtagttttcttttttggttacgtcctttcctggttttggtattagggtgatgatggcttcatagaatgaattagggaggattctctctttatcttgtggaatagtgtcaatagcattggtaccagttctttgaatgtctggtagaattctgccgtgaatctctctggtcctggacatttttgtgttggtaattttaaaattactatttcaatattgctgcttgttattagtctgtttagggtatctaattcttcctgatttaagctaggaggtttgtatttttccaggaatttatccatctcttctaggttttcaagtttaggtgcataaaggtgttcataatagccttgaatgatcttttgtatttctgtggtgtcaattgtattatttcctctttcgtttcttattgaggttattt

SEQ ID NO: 557478 - DNA, 534 bp, Homo sapiens
ccctggtatgaaacccacttgatcatggtggattatctttttgatgtgttgtctgatttgttagttagtattttgttaaggattttggcatccatgttcatcagggataccagtctgtagttttcttttttggttacgtcctttcctggttttggtattagggtgatgatggcttcatagaatgaattagggaggattctctctttatcttgtggaatagtgtcaatagcattggtaccagttctttgaatgtctggtagaattctgccgtgaatctctctggtcctggacatttttgtgttggtaattttaaaattactatttcaatattgctgcttgttattagtctgtttagggtatctaattcttcctgatttaagctaggaggtttgtatttttccaggaatttatccatctcttctaggttttcaagtttaggtgcataaaggtgttcataatagccttgaatgatcttttktatttctgtggtgtcaattgtattatttcctctttcgtttcttattgaggttattt

SEQ ID NO: 557479 - DNA, 632 bp, Homo sapiens
agatcaatagaacgagataggaaacccagaaatagactgataccaatatagccaactgttttttgacaaagatgcaaaagcagttcgatggaggaaagatagccttttcaacagttggttttgaggcaattggacacccataggccaaaaaattaaccctgacgaaaagtatcatcccttatacacaaaatgaactcraaatagatcatgaatgtaaatataaaacataacaatcaacaataatgggagtcaatctttaggatctagggtgaggcaatgattttttaagacttaatcccaaaagcacagtacataaaaggaaaagttgttaagttggactttaagattttttaagcttgctctgccttattacgaggatgaaaagaagctccaggatggaaaaaaagatttgccaggcacgtatttgacaaaggacaggtatcttgaatatattaaatataaagaactccaaacactcaaaagtaaaataacagacagtccaattagaatgggcaaaaaaatgaagaggcattcctttgaagatgatatacagagggcaaataagcacagtgaaagattttctctgtcattcattagtcattagagaaatgcaaagtaaaaccaaaatggga

SEQ ID NO: 557480 - DNA, 568 bp, Homo sapiens
agtcatttaactcttttttataaatgtaccaacccacttaatacacccattcccagtctttttgtgaatcatttgtttcatttcatattttaaccctgttgagtttaagtatgataaagaaaaccacatagaagatgaaattcagacttgaggtgaatgtttagaatcatgcacttacttatcaaatacgtatggagttgcttactatgtgctaggaactgttttaagagcctcatgtcatgtaattaagtctttcttgagtagttatgaagtacatctgagaaagaactaagcactaaagtataaaagttgatacaggaaatactaggaaagttacgattcaaaaaaataatgcaagcartatgttaacaactggcaactttattttactcatcttacttctacagagcggctcctctcctgaacattttgttcctttgttcttggtattttggtgaggaaaagaactctgtgtctcaaggcttgcctagctttagtactttgtctctccaaggggatgcttgcattaatgattttctcactgctgcgattataaagaaaaaaattg

SEQ ID NO: 557481 - DNA, 645 bp, Homo sapiens
ggaggcagagtttgcagtgagctgagattgtgccactgcactccagcctgggtgacagaccgagaccccatctcccaaaacaaataataaaaaataaaatcatgtatataaagcacttaacccagtgtctggcaggtggtaagcactcaacagtgagctataattatacygcttctttgctgtacttttaaaaatttactgccagaaggatgtcagctacttataactaagcactggcagcaccttccaatcaccgtcacaagagtgtctcttaaatatctttcctgggatctttatctctctctgctagtcacttgattggtttccccaccagctggcactaggatacaagaccccatcattggcatcttctcaggcacattatatcatgggtgttcttaaagagaaaattatatttgtctgttcaagtttcttctatagtcctgaacatcgtaagtgtcttcccaccccatcctttggcacatttgttacttccccactgctgtcttgaacctctgcagcatccatgccatggcctctgctgttctttgcagctttgcagcaagttcgtcttgaaacctcttggaacgatgtttaaaacatcagcagcttccaaagtctaattttcttttgcttaagtgaaaa

SEQ ID NO: 557482 - DNA, 631 bp, Homo sapiens
tattgtttttctttttttaacccctgttttgacacataagaaaagagggaacttttaaagccaccagatgcattacacctttggaaaaaccactttattagtaattaccagaagttgctctaaagacaaaaaagaagggtggtcactgatgtgtatttaatcaaggtattatayagttgtaccacaaggaagaataaagctaagcaaaggaaagttgctataggactacaggctagagctacaaaataagagacgtatgaaaaaatatttttaaagggccagataactacactacagatgtaaggcctacatcttaaccaatcacagcttctaattctatatcccaaataaccctcgaatctattcaattattgtctctgtcaaatcttcattcatgctatcattatgataactcttccctggttgactgcattagattccaaacaaaactcccttccaaagcattcttctaaacctgccaaagtgatcatttttaaagtcctatataatctcaccttcaaccaccttgagtgactcttccacttactgggtttagatgcactggcctctgggtcccctaaaaagtcaagctctttcctgcctcaaaagcttcacatgtccctcttgctaa

SEQ ID NO: 557483 - DNA, 543 bp, Homo sapiens
gcaaaacttcatgtaatttctgaatttctgaattcctcatgacgtgcactttacctgttacctgttaatatttctggtactgaggggcaaaagaaaaaagtaaaaaaaaattcatggtacaggagatgtggtccattacaatgacacaatgttatgggaaaaaacacactaaaaccaagcatacttttttttttttttttgagacagagtttcgctcctgttgcccaagctggaatgcaatggcgctatcttggcttattgcaacctttgcctctctggctcaagcgattctcctgcctcagcctcccgagtagctgggattacaagcgcgcaccaccacgcccagctaattttttgtatttttagtaraaatggggtttcaccgcgttagccaggctggtctcaaactcttgacctcaggtgatcggcccgcctccacctccccaagtgctgggactgcaggcgtgagccactgtgcctggccaaaccaagtgaacttaaccaagatccaatctattttcgtttgaacagcaaacattaaaa

SEQ ID NO: 557484 - DNA, 567 bp, Homo sapiens
ttaacagcagatttctcagcagaaaccctacaagctagaaaggattggggacttatcttcagactcctcaaacaaaacaattatcagccaagaattttgtgtccagcaaaactaggcatcatatatgaaggaaagatacagttgttttcagacaaacaaatgctgagagaattcaccattaccaaaccccccccaccctccacaagaactgctaaagggagccctaaatcttgaaacaaatcctggaaacacatcaaaacagaacctctttaaagcataaatcacacaggacttataaaacaaaactacaagttaaaaagcaaaaacaaaacaaaacaaaaaaaaacaaagtacacaggcaacaaagagcamaataaatgcaatggtatctcacatttcaatattaacattgaaggtgaatggcctaaatgctccacttaaaagatacagaaccacagaatggataagaacctaccaatcaactatctgctgctttcaggagactcacctaacacataaggactcacataaacttacagtaatggggtggaaagaggtgtttcatgc

SEQ ID NO: 557485 - DNA, 468 bp, Homo sapiens
ctttaaagcataaatcacacaggacttataaaacaaaactacaagttaaaaagcaaaaacaaaacaaaacaaaaaaaaacaaagtacacaggcaacaaagagcacaataaatgcaatggtatctcacatttcaatattaacattgaaggtgaatggcctaaatgctccacttaaaagatacagaaccacagaatggataagaacctaccaatcaactatctgctgctttcaggagactcacctaacacataaggactcacataaacttacagtaatggggtggaaaraggtgtttcatgcaaatggacacaaaaagtgagcaggtgtagctattcttatatcagacaaaacaaactttaaagcaacagtggttaaaagagatgaagagagacagcatagaatggtaaaaggccttgttcaacaggaaaatatcacaatcctaaatacatatgcacctaacactagagc

SEQ ID NO: 557486 - DNA, 464 bp, Homo sapiens
gaaggttgttgaattttgtcaaaggccttttctgcatctattgagataatcatgcagtttttgtcgttggttctgtttatatgctggattacgtttattgatttgcatgtgttgaagcaggtctctgtcttaataactcaattctgccaatgcagcatgcaagcagccacagactacatctaaatgaatgaacatggctatttgcaataaaatgctatttgtgcacgctgaaatttgaatttcatataattttcacwtcacaaaatattattcttttacaattccttttcaacaagtaaaaaacgtgaaaactattctcagctcatgggctaaacaggcagtaggccacatttggtctgtgggctgtagtttgcaaacccccggtgttgatgaaacagactcatgatacattgatcactactgaagctgagaggtgggtacagggagatctattgtagtagcct

SEQ ID NO: 557487 - DNA, 609 bp, Homo sapiens
tgcaaatactacaccattttgtatacagtacgtgaacatcacatgaattttgatatgtgtgggggtcctgggaacaatcctccrtggatactgagggacaactgtagttgtgtcttgctttttttaaaaaatacattcagccattttatatcttttaattggggattttaatccatttacattcaagattattattgatagatataaactgactcatgccattttgtttattgtttattgttgttttgtagatctttttttccttccttctatcttgcttttttttggtttttattttttatttcaataggtttttgggaacagatggggtttggtaacatgagtaagttatttagtggtgatttctccgattttggtgcacccaccactcaagcaatgcatactgtatgcactgtgtagtcttttatcccttagtgccctcccactctttccaccaagtccccaaagtccattgtatcattactatgcctttgcgtccccatagtgagaacacacaatgtttgatttttcattcttgagttacttcgcttagaataatggtctccaattcaatccaggttgctgtgaatgccattattttattccttt

SEQ ID NO: 557488 - DNA, 477 bp, Homo sapiens
ctactttttcctgcattctatagagatgtgtgtatgtcagtcccttctgctcccagagccaagagatttagcatgcagttcctaggtaggggctgcagtagtgagtgaaaattcttcccatgcttgtggtgagttattaattgactgtccatttaactctccaatgcaagttagttaaaagtcattctgcctgatttgccactgtaggagtgttttataaaccccttctggggagaaaacagcagaggcctgtgttttctaagccccttctctgcactgctccaggggaatgaggtccctggaagtacttgggtgcctgtataaacccaattttcttayagtctaaggtacctgcatgtgtccaatcccctctgttcttggagctggtgaattaagaatcaacacctggggaaattccaggtttgagcctgatatgtgaagtccagatgctcctctccacagggagaaactgggtgt

SEQ ID NO: 557489 - DNA, 496 bp, Homo sapiens
cgaacatagtgaaaccccgtctctactaaaaatacaaaaagaaaaaagaaaaattagcttggcttggtggtgggcacttgtaatctcagctactcgggaggctgaggcaggagaattgcttgaacctgagaggcagaggttgcagtgagctgagatcacaccactgcactccagcctggcagcctaggtgacagagtgagactctgtctcaaaacaaaacaaaacaaaacaaaacaaaacaaaacaaaaacaaaaaaaaaagaatagaaaagctacatcgatgagtaaaggatttcaggttttatatgacagcatctgtactgtggttaatcaaaatggatragtgtgtattaggagtaaaagcccatggtaacataagccatagacaaaaggcaaatctcatattaaagtttgaaaagaacaaacatcttactacatattgttactaatattgctagagattttttgttttttaaaaaagaattatcccaggatg

SEQ ID NO: 557490 - DNA, 632 bp, Homo sapiens
atggtactcatacaaaaacaggcacatagaccaatgaaacagaatagagagctcagaaataaagctgcacacctacaaccatctgatcttcaacaaagttgacaaaaacaagcaacaggtaaaggactttctattcaataaatggtacctggataacagcctggccatatgcagaagattgaaactggaacccttccttacaccatatacaaaaaacaactaaagaagcattaaacacttaaatgtaaaacctaaaactataaaaatccttgaagaaaacctaggcaatacgattctgtacataggacctggcaaagattttatgatgaagacatcaaaaacaactgcaacaagacaaaaattgacaaatgcgacctaattaaactaaagagcttctgcacagaaaaagaaaccatcaacagagtaaacagacatcctacataatgagagaagatatttgcaaagtatgcaactgacaaaggtataatatccaaaatttataaggaacttaaattaacaagcaaaaacaagacaactccatttaaaagtgggcaaagtatatgaatagacatttttcaaaagaagacatrcatgccaccaacaagcatataagaaaatgcttaacatcacta

SEQ ID NO: 557491 - DNA, 539 bp, Homo sapiens
gtgataaaagaaggtaataaaggtaatgccagaaattaaataaaatacaaaaaaaatgctccattaacttaaatgttgattcccagaaggattataaaataaatgagcctcaggcaaaactaattttataaaatagaaagaaggtataaatattgctatcgaaaacatagaaagaaacataactaggaacatagaagaaaactgcatataaatatttgctagaaaatgaaaataagaattggacaattttgtagaaaatatgaatttgaaaattgacaggtaataaayagaaaactggtataaattagtaactattaaagatattatactagcaatccaacatcactaatctaactcccaacaacgaacacaaagagcttaaattgctttgaaaaaaagatttgtcaaattctaaggagcaaattttcttaacatatagtagtgttccaaaagaaaaaatatattaaaaacatcaaccaatttctttaatgaaatgaaattaacttgaaattaaactgaaaaattatattaaagttagt

SEQ ID NO: 557492 - DNA, 597 bp, Homo sapiens
attgcttgaaccggggaggcagaggttgcagtgagctgagatcatgccactgcactccagcccgggcaayagagcaagactccctctcaaagaaaaaaaaagaatagaacatgccattttgctaacatttaaaaaaattaactaattaatggggggaaaataactcttagaagcccaggaataaaagattaatttaacaacaaaatcagacaataccaaatttaataataaactctacattggaacaagagaaagattccagatattaattataatgtttaatatatttctggaatttttagccagtgtattgagacaagaaaaatcaatacaagttataaaaattggaagtgatgatattattatttttatgaacaaaaataaaaataaagtaattttctatatatcaaatccaacagaatctataggcatattttatgaccaataagagagttccaccctagttttcagaaagaaaatcaatgcagaaatattagagcattcctatttacccatattaactatgtgaaaatatagtggaaaacatgctatttaaataacagcaaaagttttatagtacttcagtataaatttaat

SEQ ID NO: 557493 - DNA, 594 bp, Homo sapiens
cttctcagagttagcaatacttgagcaaagacttgaatgaaatgaggagtgagccatatgaagatatggggggaaggatattcacagagacaaaagggcaactgcaaaggccctgaggagcgagtgagtttggtgaatttgatgaacaaaaagcctgtgtgaccagagtagatggaacaaggaagacattggcaggaaatgaagtcagagatttaagcaaggagccagatcgtacagggcccttgtgggcagaggaaatagtatggaaatgtagcggggatggcattgagggtttctttctttctttttttttttttttctgagacagagtctcactctgtcgcccaggctggagtgcaatggcgcgatctcggctcactgcaagctccgcctcccaggttcacgccattctcctgcctcagcctcccragtagctgggactacaggcgcccgccaccacgcccggctaattttctgtatttttagtagaaacggggtttcaccacgttagccaggatggtctcgatctcctgacctcgtgatctgcccacctcggcctcccaaagtgctgggattacaggcgtgggccactgc

SEQ ID NO: 557494 - DNA, 594 bp, Homo sapiens
cttctcagagttagcaatacttgagcaaagacttgaatgaaatgaggagtgagccatatgaagatatggggggaaggatattcacagagacaaaagggcaactgcaaaggccctgaggagcgagtgagtttggtgaatttgatgaacaaaaagcctgtgtgaccagagtagatggaacaaggaagacattggcaggaaatgaagtcagagatttaagcaaggagccagatcgtacagggcccttgtgggcagaggaaatagtatggaaatgtagcggggatggcattgagggtttctttctttctttttttttttttttctgagacagagtctcactctgtcgcccaggctggagtgcaatggcgcgatctcggctcactgcaagctccgcctcccaggttcacgccattctcctgcctcagcctcccaagtagctgggactacaggcrcccgccaccacgcccggctaattttctgtatttttagtagaaacggggtttcaccacgttagccaggatggtctcgatctcctgacctcgtgatctgcccacctcggcctcccaaagtgctgggattacaggcgtgggccactgc

SEQ ID NO: 557495 - DNA, 586 bp, Homo sapiens
aataaaatatattttttccattttaaaatgcagactcttagttgattgagctcttgccttattaatgatgaagagacaagcttctgaccacaatggagtaagaaggactgaattcaacttcctatcataaacaactggacaaactagacaaaatatatgaaacagctgctttcagtcattagacaactggcagtgtggaactgtgatcagtgaaagaaaagaaacaaatgatgtaaaccctatgacttcctccaaatcttgcctggtgcacattaccaaacaagaatcaggaaggaaaagtctgagagtgccattttgttaaactgggaagctggagattgtatttcacagattttgtggcacttgaaagttgaagagctaaattccagaaaggaggagytgaatagtcctactttcaaaaaagttccagaaatttccattccttatccctgtgattcttgattgactactgaattagtcagacttctctaaaaaaacacagccaatgagagagacagagggaaagagagacattttaaggaattggctggcagacagaaatctcaagtagttgttggtgctacag

SEQ ID NO: 557496 - DNA, 519 bp, Homo sapiens
gggacttacactgttggcttccttgattgttcaggctttgggcttggactggaattataccaccagcattcttgagcctccaccttgcagatggcaggttgtgggacttcccagcctccrtaatattgtgggccaatcccttataagaaatctctttctatatatctatctatatcccattggttctacctccctggagaacattgactaattatcataaattagctattttcagtagtgtaataatagtagtagaagcagtaatttgtgcccatcaactatttatctataataataataatagagatgtgatttaggattcacaattattaagctttttattcgaaaaaatattagttgatatgtagcattttaaaaaatcttctatatactttgcactatgccataaacaatagataagtgtacaaagtaaaacacggtttttgcctcaaacttttattcttactgttttattgctatagtactttcactccctcagttatatgacttcttgagaac

SEQ ID NO: 557497 - DNA, 634 bp, Homo sapiens
aaaaaataaaatctagttgcaaataacttatcctcaaaagtcacttaatcgtaaccattattaagtatttgttatgtagctgagttgttatttagcagaattgggttggctatcttctctgcctgaagattattttctctatctctctgaaagttccttgataaaatgatatccccaatgagcaattattactagtttccaagacagtaaacatagcttagactcaaacttagattgcaactatacagcaaaaagataatctgttgaaggatgtaattgyagtggtcaaagaaggaaaagaaagaaaaaaacaaaacgataaacaatgaacctttcaacgacatgaaagcaataggtggcaaataaaaaccaggattcagcaggggcttataacttaatatccatgaatacataactacaaagtacctgcataggaaaaaatattttctataaacttttaatgaaatttagtaattcttttaactaagtatataggcaaaaaaagagtacaattaagagcacctgttactactttgttactaatagaaacagtagataattttatgtcacaaaacagttgattcagaaatctcaaaatattaacactaatcactactttgaagttatgaaagtt

SEQ ID NO: 557498 - DNA, 604 bp, Homo sapiens
tcagataaaaaacggtgaggtagtttgttaccgctagacctgctctgcaggaaatgctaaaaggagatggcaagttgaaatgaaagaacagtagagagtaactggaaactttatgaagcaaacaaatctaattacaggtaaattattgcaattataaaagctctatatggtgtatccatttctagtactggttcttgtccgaaaattgggtccagaaattacttctggcaacctagtgactaactaggtgacagaagtgtagtagcaataaaagtaacaaagtaatgagaaaatgaactataagcatcttcaggactgatagcagggacagctaataatagtatggcaacaataatgccagaagtttggggatggcaatgcctacagctggggtataggaagagagaaaaactaatagattattttttctgtgaggctgccatattttttattgtttttgaactgtgaggtggaaatagatgctttctacaatttgatttgtgtgtgtgtgtgtatgtgtgtgtcctatggtgacattttatgatatatcatatatttatgacastttttctttttatctttttatatttctagagatgggctt

SEQ ID NO: 557499 - DNA, 566 bp, Homo sapiens
gaaagccttattatttttcaatactcatttttctgtccatgagagtggcacacactagctgcttctagtcagctatcttggccctctgtgttgatgaactgtatgttggttttgaatcctgcaaatttactgcattcatttattagctctaatagctttgtggtggagcgtttaggtttttctaaatatragatcatgttgtctgcatacgaggctaacttgacttctccccttcccatttgtatgccttgtatttccttttcttgcctaattactctggccaggacttccagtattatgttgaataaatgttgtgaaagtagacatccctgtcatgcttcagattatgcaggaaaggctttcatttcttctcttttcagtataatgttggctgtgggtctgtcatatatggcctctattttgttgtattttccttctatacccagtttgattagggtttttaacatctgttaaaatgattatatggtttttgctcttatttttcttaatgtcacgtctcatgttttttgaattgcatataaaaaaccatgcttgtatactgggat

SEQ ID NO: 557500 - DNA, 470 bp, Homo sapiens
tactatagctttgtagtagattttgaagttaaatagtggtttatgtgtccagttttgttcttttttgctcaagaccgttttggctattcagggtcattcatggtcccatacaaattttaggactttattttctatttctgtgaagaatgccattggtattttgataaagattgctttgaatccatagatcattttgggtgatatgcttattctagcaatatgaattcttccaatctatgaacatgggctgtcgtatatttttgcatccttttcatttttgtaatcartattttatagtttcttatacagatctttcatctctttggttaaatttatttctgggtaatttttgtagctattgtaaatgggattgctttcttgatttctttttcaaattgttcactgttggtataaattttgtttcttttttcttttttttttcttcaatttttattttaagttccagggta

SEQ ID NO: 557501 - DNA, 623 bp, Homo sapiens
ctctgtcatttctaagtgtgtttatttgtttcttttctcttcttttggtctagctagcagtatatccatcttatttattctttcaaataactgacttttggttttgttgatcttttgtatgatttctcatgtctcaattttgttttgtctagctctgattttggctcttttcttctgttagttttgaggttgttttacccttgtttttctagttcctctaggtgtgatattaggttgttaatttgagatctttctaacttcctgatgtgtgcctttagcactacatacttttgtcttaacactgctttagttgtgtcccagagattctggtatattgtatcattgttttcattagtttcaaagaatttcttgatttctrcctctatttaattgtctacccaaaagtcattcaggagcaggtttttaaatttccataaaattgtgtggttttgagaactctccttagtattgacttccgtatttattgaactgcggtccaggaatgtagttggtatgatttcagtttcttttaatttgctaagaattgttttatgtccagctgtaaaatgtaggaccctgcaaggtatgtgagtggtgattgacttttagggatagtcgtggaa

SEQ ID NO: 557502 - DNA, 623 bp, Homo sapiens
ctctgtcatttctaagtgtgtttatttgtttcttttctcttcttttggtctagctagcagtatatccatcttatttattctttcaaataactgacttttggttttgttgatcttttgtatgatttctcatgtctcaattttgttttgtctagctctgattttggctcttttcttctgttagttttgaggttgttttacccttgtttttctagttcctctaggtgtgatattaggttgttaatttgagatctttctaacttcctgatgtgtgcctttagcactacatacttttgtcttaacactgctttagttgtgtcccagagattctggtatattgtatcattgttttcattagtttcaaagaatttcttgatttctgcctctatttaattgtctacccaaaagtcattcaggagcaggtttttaaatttccataaaattgtgtggttttgagaactctccttagtattgacttccgtatttattgaactgyggtccaggaatgtagttggtatgatttcagtttcttttaatttgctaagaattgttttatgtccagctgtaaaatgtaggaccctgcaaggtatgtgagtggtgattgacttttagggatagtcgtggaa

SEQ ID NO: 557503 - DNA, 485 bp, Homo sapiens
aacagtacaaaagatcaatgaagcaaagatgggcacagtggctcatgcctgtaatcccagcattttgggaggctgaagcgggtggattacctcagaaatttgagaccagcctggtcaacatggaaaaaccccttctctattaaaaacgcaaaaattaaccgggtgtgatggcttgcgcctgtagtcccagctactgggaagactgaggcaggagaattgcttgaacctgggaggtggaggttgcagtgagccaggatcacgccactgcactccagcatgggtgatggagcaaggctctatctcaaaaaaaaaagatmaatgaaacaaaaagttgattttttgaaaagttaagcaaaattgacaaacattagcagagtaagaaaaaagagagaagacccaaataaataaaatcagagatgaaaaaggagacattaccaaatgatactgcagaaattcaaaggattattagtgactactataagcaa

SEQ ID NO: 557504 - DNA, 608 bp, Homo sapiens
ggatatttgcaaactctgcatccaacaaaggatgtaatatayaaaaaatctgtaaggaacttaaaccacaagcaacaaacaaacaaccctattagaaagtggacaaaggacctgaaagacacttttcaaaaaagataaacacactgccaacaagcatatgaaaaaatggtcaacatcactaatacttaaagaaatgcaaatcataaccacaatgagataatatctcacattaggttacaatggctaatattaaacattcaaataataaaagatgctggcaaggctgtagagaaaaggtaatgcttatacacttttgatgggaatgcaaattagttcagccactgtggaaagcaattgggtgatttctcaaagaacttaaaacaggactatcattctaaccagcaatctcattattagatgtacacccaaaggagtataaatcattgtaccataaagacacgtacatgtatatgttcactgatgcattattcacaatagcaaagacacgtaatcaacctaaatgaccatcaacattagactggattaaaaaaatgtggtacatatgcaccatggaatactatacagccataaaaaagagcaagaccatg

SEQ ID NO: 557505 - DNA, 466 bp, Homo sapiens
  misc_feature 413, 415: n = A,T,C or G
tcatcaaacatttgtaggaagtctacaatggcagtgctctaaatacataaataaaactaactgatcttatgcaggaayaataggaggtgatagctaaattaatataattaccacaagatagggacatttgaagtattatgggatacacagaaggagtttatttatatcatctgaaaataagaaagagaaaagaaaatattatgatgtaaattcagctggcctcctttttaactcttaagctgaaaataggacatgagaaaatgagaatttggatatgaaatggaacacaggaattattttagttatttggacattgcctggtgaagacagggcttggtaaaggtgctagttatgtctacttttatatatatatatatatatatatatatatatatatatatatatatatatananttttttttttttttttttttttttttttctcatggttagattcagctccgt

SEQ ID NO: 557506 - DNA, 497 bp, Homo sapiens
tcaggcagaagtttgcttcaggggcagagttctcatggaaaacctctgctagggcagtgcagaagggacatttttgggtcagagcctccacatagagtccctactgaggcactgactagtggagctgtgagaagagagcctccagaccccggagtcaccacctgctggagctgtgagaactgtcctccagaccccagaatggtatatccacctacagcttgcactgtgtgcctggaaaagccacagacactcaatggcagcccatgaaagcagcagacagggaggctgttccctgcaaaaccacaggggtggagctgcccaaggccttgggagcctacctctttcatcaktgtgacctggatatgagacatggagtcaaaggagattattttggagctttaaggtttgactgcctcgctggatttcaaacttgcatggggcctgtaacccctttgttttggccaatttctcccatttggaatggctgtatttaccca

SEQ ID NO: 557507 - DNA, 598 bp, Homo sapiens
gctgggactacaggtgcccccccaccacgcccagctaattttttttttgtatgtttagtagagrtggggtttcaccatgttagccaggatggtcttgatctcctgacctcatgatccacctgcctcccaaagtgctgggattacaggcgtgagccaccgtgcccggcctattttcatcttttaaaaagagcatatagttggttttgctttggaataatccttgtagtttaaccagagaatttagtctattcataattaatataatttccatgtaagtttgataactagtatcatactttgtgctttttatatgtcttgcctattctatatttctttttctcttcttttttcctttatttgggtttactgaacattttcaaattcattctctcctcatccacaatatagaatgtatttactctattattatcactttagttatctgataaattatgatacacaaatccccttaccaaaatgtaaaattaatcaatcatgtccttctcctcctaaactagagaagactctcagaatactgctatataactcactttcctggctgacatgtaactgttgtcatataatttaattcttattt

SEQ ID NO: 557508 - DNA, 583 bp, Homo sapiens
aagtttaatatcattgcaaagccaagagactctttaagtctgaccacagtaaggtgatctttagtttcacactagacagtatgaagtagcttgcaaaagagctgaattttcgaaagctacttagtggccgtgagtattatcccagatgattatccacaaaactagaacagggaattttggctatcttttttctatagaatttaatatatgttataaaaaccattctactaagcaagcaaaattcctgagggcctaagtacctctatttttattttccctcatttcttcaaaattagtgggactgtctctgcttttgaamctagatgtgaactcagaaaagcccactcccttttctggctgtttgtataatatctcaaaatccaacaaaacccagtttcatgtagaaatcaaaacttttaacttttctttttaggctcctttttaacttttctttttaggctcccttagctcaggccaaatataaatggtaagcctgccttgctcattgcagtttaggatgcctctgggagttggaggttagggtagaggtgggtaagaaattatcgatgccatcattctgtgt

SEQ ID NO: 557509 - DNA, 587 bp, Homo sapiens
ccttaaaaaatcttctcatgaaaaactttaaaagcagattaatgagaagttacctaaatccattagaagtcaaattttaaaaaataatatttctttgtttatcttaagatttcttttcattattttgtgtagggattttttcttagttacatgatcatatttatatatttttaaattagtttttcatttaatatctcagtcattatatattttatcttataatctttgtagacaatgctttgttggataaatgatattccattaatggaaatacctcggtttacttagtcattccatttttgtttggtcaaaattttaaataatatttttgctattatcattttgttataataactttttctgtgtttaagattatatcctaacagtttttttcagtggatttaataggttgaagttttgaacatttaaaaaatcttaacacattttacgtattcaggaaacaattcaggataaaaatacactaaggaaaagctctcctgcctcattyctcctcccatgtctccagggtagttaccagaggctgggaagggaaggaggagggagggatgaagagaagttggttaatg

SEQ ID NO: 557510 - DNA, 397 bp, Homo sapiens
gaattcctaggatcaagagatcctcctgccttgacctcccaaagtgctgggagcacctggcctgagacactgtgcctggtcaatttttttttctgtagagacaggggtctcactatattgcccaggctgtcaaatcatttttcatttcattgctgctgccaggacccaggcctcaatgacctcttattcctgactatccttccagctctcccagtctccgctctgcctactccaaagctatgcaccattgccattctagagcagtgcttatttatgtggatagtccactgaaacaccacatggaayagagtctagagtccttgacctggaactccaggtcctacgctcccactctggttttccattcttttctcttaacgttctcatgtgtgaacct

SEQ ID NO: 557511 - DNA, 510 bp, Homo sapiens
aagaaaagaaaagaaaagaaactttaaaaataaaataaaataaaaatacaaaccagtgctatttcattaagaaactgaagaaactgctagtgaattaagaaaatgtaaaggcagacccaaccctgagaaacatgttgaaagaattaagaaacaagcaaaaatattgtgaaactttatcaaattccatgtatatgtttctgaaatatattaaaactcaattttttgacaaagagaaagaaatagtgcatgctatttctgcactgagccctgtaaagtgtgcttttgtgacaattggtactgtaataaattctaracagataatttatcttccactatttcaagaaagatttctggacatttcaaagtgaactaagcctttgagttgaagattaacttgtttagaagactttgtgctgccaaaaataccaaaagataacaaaaaataataaagaaataagcagctcaaactttgctgatctttatgataagctaattctctcctggttatct

SEQ ID NO: 557512 - DNA, 584 bp, Homo sapiens
agaaataggcaaataattatggcaaaatgttaataatttttacatctagataaagagattatatgccacttgttatattgctaatttctgtaggctagacatttttcaaaataaaaattagaaaaaatatcctatgattttaagttagctatccaaaggataaaataatttttatatcttgaagtgagcttaaatgtttgaaagttgtttaattaacagagtgtcttctctaaagtatctaaatatcttaattcaacattctataataattccrtaatttatatataagcactaaagaaaaaattatccttagaagaatatgtttcaggcaatgtaggagacaatacataatatgataatatcagtatgtattagataaaataatttttttcatttttccagttatatatgagaacttttcaacatgagaaattttaaagggaaatgagtcatctatggcaatatgtgttttattcttccatgtctttcctaaacattggtgctcgcctacaaaacaaagtatgagattactgatgattttcactaaaatgtctacaacctagcagaatgcagtttcagtgtag

SEQ ID NO: 557513 - DNA, 553 bp, Homo sapiens
ggtggggttttaaagcactttactatgtagcttaagttttaaaatactcaagaggttgatcagagatattttccatttgagtatttcttatcttatcctatcccatatggtaaaaaggaattctcttataactgagtatgccattgtaagtcctaattacagaaagcctgtaactatttggaaatttataaagttaattgtatggtttctcaaagccagttattataaagggaaagatraagaaaacatatcatccaaataaattacttgatatgttctaaaacaatgtgtattaaaaataatatttaccttccatacttcatctcttagagttgaaagatatactcaggggccaaatagcagagatcccttatttcaaagttcagacaaatgaagcccagaaagtatccacaatttgcccacaatctacaatgaattgataagaaaaattaagacagcagttgaaaaactaatgattagaaaactaatatggaaaactctaaagaaaacgtgtttcatctacttgttacatacagtaaaccaccctagaact

SEQ ID NO: 557514 - DNA, 595 bp, Homo sapiens
atacatctgacaaaggactaatatccagaatctacaacaaactcaaacaaatcagtaagaaaaaaacaaataatctaatcaaaaagtgagctaaggacatgaatagacaattctcaaaagaagatatacaaatagccaacaaacttatgaaaaaatgttcaacatcactaatgatcagggaaatgcaaattgaaaccataatgcgataccaccttactcctgcaagaatggccataatcaaagaatcaagaaacagtagatgttggcgtggatatggtgaacagggaacacttctacactgcgggtgggaatgtaaactagtacagccattatggaaaacagtgtgcagattccttaaagaacgaaaagtagaactaccatttgatccagcartcccagtactgggtatctacccagaggaaaagaagttattattcgaaaaagatacatgcacatgcatgtttataacagcacaattcacaactgcaaattcgtggaaccaacccaaatgcccaccaatcaatgagtggataaagaaactgtggtatatatatagcatgtatatatatatatatacacacacacacacatatat

SEQ ID NO: 557515 - DNA, 582 bp, Homo sapiens
ggcatggtgggtgttcatttggttctgacaagcctcaactgtttttgaatactccagattgccagtaacacatctgctaactgtttgcttctttggggacttagtgttgaacaatctattaagttgcaaatgtttcatttttaaccttaagatgttaaaaccattgaaattcccaattctactttactttttctcaaaatatttgataatttgaattttcacaaagtttcagcacacttaccattctaagtaggcctttctatttgtataatcctttacatttgttagaatttatagcctagtagacataaattcagtaacatatgggggaaatttgttaggagaggccaagagataacttaaagacatcgcaggaaaaaaatccttcatgtctgtacacagtgaatctggatcctcaaattcctgaggattcttgacctacactacctaacttaaaacgactttcctcattcaagtgattaaagttagtaaagaagaattttgaaattttacctcttrtgctatataatattgaaacaggtaatcttgacaaatacagcacaatctttcacaacataaaac

SEQ ID NO: 557516 - DNA, 472 bp, Homo sapiens
aattgtggctattgtaaatggaattactttttaatttctttttcagattgttcactgttggcatatagaaatgctactgactttttgtatgttgattttgtatcctgaaactgtagtgaatttgttcatcagttctaattttttttgtgtgtggagtcttgaggtttttccagatataagatcatatcacatgctaacaaggataatttgacttcttcctttccaatatgtatgccccttatttctgtttgattcctctagctaggacctccagcactatgttgagtaacagcggtgaaagtgggaatccttgttgtgttccaggtcttagaggaaaggctttcagtttttccccattcagtatgatactaaatgtttgtctgtcatatatgggytttattatattgaggtttgttccttctatacccagatttttgagggtttttatcatgaagggatgttgaattttatt

SEQ ID NO: 557517 - DNA, 565 bp, Homo sapiens
ggtatttcatcatggttttagtttgcatttctccaatgactaatgatattgagcaacttttcaagtgcttattggccatttgtatttctctgtggtagaagagtctattgaaatcctttgcccatttttaaattagttcatttgtgttyttattatggagttatgacagttctttatatattccagatatgagtacttttagatacagtatttgcagatgttttcttccattctgtgggttgtctattcactttcttgctgatgttgagtcacaagagttttaaactttaatactgcaatttatctaattttgttgtgcttttggtgtcatatctaaaaatccttcaaatacaaggttgtaaatatttatcctatgtttctgctaagagttgtacagctttaactcttatgtttagatctttggtctatttttggttaattttggcatatggtgtgaggtaagggtccattttcattctttttcatgacaattcaactgttctcacaccacttactgaaaagaccattctaatttttctgattttattttctgaattgtttgttg

SEQ ID NO: 557518 - DNA, 640 bp, Homo sapiens
attatcctcagcaaactaatacaggaacagaaaaccaaatgccacatattctcactcataagtgggaggtgaacaatgagaacacatggacacagggaggggaacaacacataccagggcctggcagggaataggagggaagggagagcatcaggataaatagctaacgtatgtggggcttaacacctaggtgatgggttgataggtatagcaaactatcatggcacacgtttacctatgtaacaaacctgcatgtccttcacatgtatcccagaagtttaaataaaataaaataaaaaggtaaattggtagaagaaatgcctcaggtcattttgcagattcctcttggtttatcagactgtaatgctatagctaatgttggacagagtaatgagaagcttctgaagcatcattctttgtcctgtggtgggccagggtatggcacagattgatttgattttaaaatcttttgaaaacctggraattgcaaatgttacaagcagcatcgtgactattacttttgaatataattaaattggatctctctaattcgactttattatacacttcttagagttagccttttgagtgctatatttacatttgtacatatcaatatttgaaataaataatttaaaaa

SEQ ID NO: 557519 - DNA, 575 bp, Homo sapiens
ttttagaacaaaatggaaagaatgtcctaatgtctctaccttataataacccttttcattccttagaccataacaggtttgcttttgtttctgaagttatgtatacagcagaaattcttaaccaccctccaattaaccaactccaggatgtctcacaaggtgacacaagttacccgggaagacatgctggctgatgcccattcatacctgctgctcacagctggtgacagataaagaaacagaatgaaaaaatcagtacctggcgctcaggctgtggtcttaagactacagcaagctcatgaaattctgcccacatgactgaggtggcgattaccaagaatcagttgtgtttgcacctgaatggatttgtcctggttgtacttgctaccaaaattatgtaacttaaatattatgtaaaacaaacatargcataatgagagagagaggtgtattgctaaatggaatgctttagaaagaagccattaaatggccacaagagaattctactgacaaattttttattttaaaattattttttactaaacagaggcaaaataaaactttacaaaatattt

SEQ ID NO: 557520 - DNA, 519 bp, Homo sapiens
tgctggaatgtcctgagtggttccgaactgcctaattttccccagagaggcacaaaagatcctgygtctaccactgctctcaactcgctcaaagccagtggcctcctttttacatccaagccacccttttacttattttgaaactcaaaggaagtagattataaacaaggtggcatagatttgttcacagggctatatttcaggaactataattatttgtgtggccttcaggtcagactttttgcttttacagctctaaaatgttatttgtttaaatcccagccctaaaatatttaatataaactattaaaacaccatttgcatgaccaacttattcttcactgaatctcggctcataaaaaggttcattcatgttaaaaagctatttttaaatgcggctaactcattgcttagaatatgctaacaattaagcattatacttcactggaatttttatagtttaaaattatatttctcccatctcatttcctcccccaccaattctgccatcccaaatag

SEQ ID NO: 557521 - DNA, 519 bp, Homo sapiens
tgctggaatgtcctgagtggttccgaactgcctaattttccccagagaggcacaaaagatcctgcgtctaccactgctctcaactcrctcaaagccagtggcctcctttttacatccaagccacccttttacttattttgaaactcaaaggaagtagattataaacaaggtggcatagatttgttcacagggctatatttcaggaactataattatttgtgtggccttcaggtcagactttttgcttttacagctctaaaatgttatttgtttaaatcccagccctaaaatatttaatataaactattaaaacaccatttgcatgaccaacttattcttcactgaatctcggctcataaaaaggttcattcatgttaaaaagctatttttaaatgcggctaactcattgcttagaatatgctaacaattaagcattatacttcactggaatttttatagtttaaaattatatttctcccatctcatttcctcccccaccaattctgccatcccaaatag

SEQ ID NO: 557522 - DNA, 519 bp, Homo sapiens
tgctggaatgtcctgagtggttccgaactgcctaattttccccagagaggcacaaaagatcctgcgtctaccactgctctcaactcgctcaaagccagtggcctccwttttacatccaagccacccttttacttattttgaaactcaaaggaagtagattataaacaaggtggcatagatttgttcacagggctatatttcaggaactataattatttgtgtggccttcaggtcagactttttgcttttacagctctaaaatgttatttgtttaaatcccagccctaaaatatttaatataaactattaaaacaccatttgcatgaccaacttattcttcactgaatctcggctcataaaaaggttcattcatgttaaaaagctatttttaaatgcggctaactcattgcttagaatatgctaacaattaagcattatacttcactggaatttttatagtttaaaattatatttctcccatctcatttcctcccccaccaattctgccatcccaaatag

SEQ ID NO: 557523 - DNA, 519 bp, Homo sapiens
tgctggaatgtcctgagtggttccgaactgcctaattttccccagagaggcacaaaagatcctgcgtctaccactgctctcaactcgctcaaagccagtggcctcctttttacatccaagccacccttttacttattttgaaactcaaaggaagtagattataaacaaggtggcatagatttgttcacagggctatatttcaggaactataattatttgtgtggccttcaggtcagactttttgcttttacagctctaaaatgttatttgtttaaatcccagccctaaaatatttaatayaaactattaaaacaccatttgcatgaccaacttattcttcactgaatctcggctcataaaaaggttcattcatgttaaaaagctatttttaaatgcggctaactcattgcttagaatatgctaacaattaagcattatacttcactggaatttttatagtttaaaattatatttctcccatctcatttcctcccccaccaattctgccatcccaaatag

SEQ ID NO: 557524 - DNA, 449 bp, Homo sapiens
aattattaaaaataaaactatccaataaaaccacgaagacagttcacaaaaaaagaaatacaaatgcccaataaagatacattgtataaccttattattaaataaattacaaattacattgaaatactatttttcaccaattaaaaattgtagcatctgtgatacccaggactagaaaggtacagtgacacaggcaatttcatacccttgtggtaggagtatatgtggacattactaatgtttaccaataccaaggctttctccatctctgacccccttgaagctgggaatatgtagttagcagtagycaagttccaaaagggtccaaatcacagatttcacttactacatgacacaagaactatttaacctcattatgtcttaatgtcttcaaaggtaaaacagggataataacaataatctacctcatagggatattttgagaattc

SEQ ID NO: 557525 - DNA, 522 bp, Homo sapiens
taatcccagcactttgggaggccaaggtggatggatcacctgaggtcaggagttcaagaccagccagtccaacatcgtgaaaccctgtctatactaaaaatacaaaaattagctgagtgtgrtggtgcacaccagtagtcccagctacttgggaggctaaggcaggagaattgcttgaaccccggagcagaggttgcagtgaaccaaaatcatgccattgcacttcagccagggtgacggagcaagactccatcaaaaacaaaaaaacaaaaacccagaaagaaagaaaaagaaaaagaaaagtaaaaaagtaatatccgaattgtgaaagctttgaatgtttggactttatttcttacagtcagtaaagggaaaattttaaggagaatatgatatgaaaccaagagattcacaagacaatagaaaaagttgacaagggacctgtatatccctctcatatatctctcattttgaatttaacaaaagtgttaagggaggtgagactgacagtagccagccgcc

SEQ ID NO: 557526 - DNA, 523 bp, Homo sapiens
taatcccagcactttgggaggccaaggtggatggatcacctgaggtcaggagttcaagaccagccagtccaacatcgtgaaaccctgtctatactaaaaatacaaaaattagctgagtgtggtggtgcacaccagtagtcccagctacttgggaggctaaggcaggagaattgcttgaaccccrgaggcagaggttgcagtgaaccaaaatcatgccattgcacttcagccagggtgacggagcaagactccatcaaaaacaaaaaaacaaaaacccagaaagaaagaaaaagaaaaagaaaagtaaaaaagtaatatccgaattgtgaaagctttgaatgtttggactttatttcttacagtcagtaaagggaaaattttaaggagaatatgatatgaaaccaagagattcacaagacaatagaaaaagttgacaagggacctgtatatccctctcatatatctctcattttgaatttaacaaaagtgttaagggaggtgagactgacagtagccagccgcc

SEQ ID NO: 557527 - DNA, 522 bp, Homo sapiens
taatcccagcactttgggaggccaaggtggatggatcacctgaggtcaggagttcaagaccagccagtccaacatcgtgaaaccctgtctatactaaaaatacaaaaattagctgagtgtggtggtgcacaccagtagtcccagctacttgggaggctaaggcaggagaattgcttgaaccccggagcagaggttgcagtgaaccaaaatcatgccattgcacttcagccrgggtgacggagcaagactccatcaaaaacaaaaaaacaaaaacccagaaagaaagaaaaagaaaaagaaaagtaaaaaagtaatatccgaattgtgaaagctttgaatgtttggactttatttcttacagtcagtaaagggaaaattttaaggagaatatgatatgaaaccaagagattcacaagacaatagaaaaagttgacaagggacctgtatatccctctcatatatctctcattttgaatttaacaaaagtgttaagggaggtgagactgacagtagccagccgcc

SEQ ID NO: 557528 - DNA, 522 bp, Homo sapiens
taatcccagcactttgggaggccaaggtggatggatcacctgaggtcaggagttcaagaccagccagtccaacatcgtgaaaccctgtctatactaaaaatacaaaaattagctgagtgtggtggtgcacaccagtagtcccagctacttgggaggctaaggcaggagaattgcttgaaccccggagcagaggttgcagtgaaccaaaatcatgccattgcacttcagccagggtgacggagcaagactccatcaaaaacaaaaaaacaaaaacccagaaagaaagaaaaagaaaaagaaaartaaaaaagtaatatccgaattgtgaaagctttgaatgtttggactttatttcttacagtcagtaaagggaaaattttaaggagaatatgatatgaaaccaagagattcacaagacaatagaaaaagttgacaagggacctgtatatccctctcatatatctctcattttgaatttaacaaaagtgttaagggaggtgagactgacagtagccagccgcc

SEQ ID NO: 557529 - DNA, 488 bp, Homo sapiens
agaacagaatgaaattgagactcaaaaaatacatacaaagtatcaatgaaagcaaatgtcggttctttgaaagaatgaacaagatcaatagacaacaagctaaattaacaaagaaaaaaagggagaagatccaaaaaagcccaatcagaaatgacaaaggtgacattacaactgatcccacagaaatacaaaagattatcagagactgttattaacacttctttgcaaacacactagaaaatttagaggaaatgaataaattcctggaaacacacaatctgccaakattgaatcagaaaggaattaaaaccctgaatagaccaataatgacttccaaaattgaatgagtaataaagaaacctaccaaccaaaaagttgcaggccagatggattcacagccaaattctaccagacatacaaaaaagacttggtatcaatcctactaaaactatttcaaaaaatcaggaagcgtctcctccctaactcat

SEQ ID NO: 557530 - DNA, 542 bp, Homo sapiens
gaattcatttattgaaatacaatgaaaatattaagtaaaggggtgtcttgagccctgttgtcagtagcaggagaggtatcaatctgcatgacccttctttcaggtctctcatccttgccccaaatcacacaagtcaataagcacttttaacatactgagattgtaatactatttccttcttcagttaaaaaaattgactttttggggaggtttagaattaaatatagaaatagttaagtatataaaatctatagtattaaggctctggtattaaaataagagcaatatgttcatatttggttatatactatttataatgtktaatatctatctatattagttgtctattgttataaaacaaattatcccaaaatgtattgacttaaagtaacaaaactttattatttcatagtttctgtgggttaggaataaaggaaaagatttgttggatgcctctgccttaatgtctcttcaaggctgcagtcaaggtgttggctggggctgctgtttcatctgaagactcaactgggaaaggatctgtt

SEQ ID NO: 557531 - DNA, 327 bp, Homo sapiens
cgatgccacagccagacaaagatgtcacaagaaaagtcaaatacagaccaatatcccttatgaacatggattcaaattgaatccaacaatatattgaaaagacaaatatattatgactaagtgagatttagctcaggaatgcaaagctagtttcacattcaaaattcaattaatgcaattttctatatgaacagactcaaatcgaaaggaaattgggaaactcacagcgtggactgggaaggatggaaagccagatctagaaaaaaaaaaaaaaaaaaamcagacaagaacaacaacaacaacaacaaattcaaggcagcagaacca

SEQ ID NO: 557532 - DNA, 538 bp, Homo sapiens
ctgggactacaggtgccatgctcagctaatttttgtattttttgtagagatggagttttgctatgttgcccaggctggttttaaactcctgagctcaagaaatctgcctgtctcagcctcccaaagtgttgggattacaggcatgagctgtcactgcacccagccccaataatatattttaaaagatagtacatcatgaccaagtaaggtttattccaggaatgcagggttggctgaatattcaaacatcawtcaaggtaattcacagcatcaacaggctaaaaaaaaaaaaaaaagaactttataagcgtctcaatagttgcaaaaagtatttgacaaaattcaattcaatttatgacttttaaaaaattatcagcaaactaatagaagtgaacaaagagatttctcaacctgattagggtatctattaagaacctacagctaaactaataccattggtgaaaaactgaagcctttgccccaagaatggaaataaaaatattcactctcagcacttctattcaacgtcatagtagag

SEQ ID NO: 557533 - DNA, 537 bp, Homo sapiens
ccccaacggtccccccaaaatcttaaatcatttcagcattcacacaaactccatagtcaaaagtcccatctgagacaagacaagttttcaaaactaaccatgccttcccaacaattccctgaagtgttaactcattccagtattaactgaagagttcacagagtaaagacaaggcaagtcccttctacttatcagcctgtaatatcaaaggcaagttaattacttcttagatacaatgaggataaaggcacaaaaccttttttccctcctaggcctctgggcctgtgatgggaggggctgtcatgaggtctgtaacataccctggagacattttccccaacgtcttggaagttaacatttgggctcttcattacttatgcaaatttccacagagggcttaaattttcccccagaaaatgggtttttcttttctactgcattgtcaggctgcatattttccaaactttaatgctctgctttctcctgaacactttgccacttagaaatttcttaygccagatgccccaaatcatcttt

SEQ ID NO: 557534 - DNA, 522 bp, Homo sapiens
tatgatgaacataatttattctacacaccaggacacgtttaagtttgaaaggaggtaccatacagcagttagcaacagcctcttcctggaggcttgcaaggaattaatttgtgctttcactgacaactccaagttcagtcatgtcatattaatagcttgaaatcagccaacattaagtcattcaccccacaaaaatttccaagtgctaccagtcaggacttttacttctgaagagccagccacacttttaccagaacactggtggttattcaggacaatagtgcaatgtgagactgtctcaggaaaagtccgtcatatagtcaccctgtatggaatttatataactcagctatcaaaatttcatttaagggtcgggtgcagtggcttacgcctgtaatcccagcacttcgggaggccaaggtgggaagattccttggggtcaggagttagagrccagcctgggtaacatggtaaaacactgtctctacaaaaaatacagaaattagctgggcatggtggcag

SEQ ID NO: 557535 - DNA, 362 bp, Homo sapiens
aagtctcattcgcctttgtcttgtacttctgtgttcattttttttttctttttttggctagagtttctgctatcccaatcaaagaatatacagtacacatccccagaatccataaatgtgttcctggcccactctgtaatagttcagtagaattaccattaattacatacaaattttacccatccacaatagtcaaaaaamaacttggcatttctatactttacaggaaaaaaaaattctgttgttccattgtatgcaggagcatattttgctggtttgaaagattatgatgcatacagttttctagcaattttctttgtttctttttacagcattgtctttgctgtactcttcctgatggc

SEQ ID NO: 557536 - DNA, 494 bp, Homo sapiens
aataacttcaaggcctaagatagatttacttgaaacagaaaatattgaaaacagaatactcaagcattcaattcaataaatcagaaaaatgacaataagtacatataaaaaagaaaagcagaaaaaggaatttaaaaatataaaaatatttaattgattcaaactaaaactggttctaagtaaaataaaaaaaaatatagtaggaaaacaaatgactgttcagaatatttaaataaaaaagaaggaaaaacacaaaaaggcaacattaggtattaaatgatatgtctatgtaaagggaaaattttgtaygaatacaaaatgtaacaaaagcgagttctgttgatttagaatattagagaacaattttcatacaaaaattagaaaattagtcaaatattttgagtcagaaaagtctccatgactaggcaatttcatggtggaattaaatcatacctttaagaacaagtaatcctatgttattaaaattgatgtaa

SEQ ID NO: 557537 - DNA, 561 bp, Homo sapiens
aaataaattaatagatttcaccacattagtagaatacactagaaaaaaattatttttataggtacaggaaaaatgtctgataaaagttatgataaaaagtctttatcaaactaggaataagtataaacttccttgtaatgaagggtaatctttctgataaagagtatgtacaagaaccacatctttaataattctttcatagaaatgttgacagattttgtttttgagattatgactaagaccaaggtactcamtattatcatttctattgaacattatattgcatgtcctaggcaatgcatcaagaaaagttgaaaaataaatattatttgaattggaaagcaagagataaaattgtaagtatttatatattggttatattattttgtatgtaaaaatatctcaacaaatttacagataagttactagcatttacaagtgagtttagcacttttttaaataaacggtattcaaaaaccaattgatttttaaataccaggtataaataattacaaaataaaatttaaaatatagcacttattatagcatcaaaatataaca

SEQ ID NO: 557538 - DNA, 585 bp, Homo sapiens
attaaatccactcaacccagtaacaatttgatgtcatttargctgtgtttctaagataaaatgttgttaaaattgtaacttaaatattctctaaataatctaactgtaccctctgaactcttggttgtagcaatcctcaccatttatttatttttaaaaagcaagtcttatgagaaaccctttaaaatctatgaaggatttatgaccacttcataacatgcaagtctaaattagccaaactaatttgtagacatcaaatatttctacataagaaaatgaatcagtaaacttgacatgcataagctctcactcatgggaaagaactaaccttaagtgatgtttcagaatcacatataaaacaaacaaagctttgggaggtgcattaatgtacacagccagcactgtttccttattgttaccagtactgttttcaaggaacatgaatttagttttgttttgtcttgtttttttaattttactctaagttctgggacacgtgtgctgaacatgcaggtgtgttgcataggtatacatgtgcgatgatagtttgcttcacctatcaacctgtcatctaggttttaagtc

SEQ ID NO: 557539 - DNA, 533 bp, Homo sapiens
tgtgtatattttctggtttgtgtgtttgtttgtttctttgttttgagacagagtctctctctgttgcccaagctggagtgcagtggcgtgatcttggctcaccacaacctccatctcccaagttcaagcaattctcctgcctcagcctcccgagtagctgggattacaggcacccaccaccacgcctggctaatttttgtattttagtagagatgaggtttcaccatgttggccagagtggtctctaactcctgacatcaggtgatmcgcccacctcggcctcccaaagtgctgggattacaggtgtgagccactgtgccaggcctgtattttctgttttattgtcctacttaacttcatgcatttaattttggtgacccaaatgtttccatgcatttccagacatgggataaattaagtcacagttatattaataataaaagtctactggctttatatcagcctctgcatagctgcaataccttgccactccctcacaatctctcccagctgcttctgggagtcccaaaaag

SEQ ID NO: 557540 - DNA, 611 bp, Homo sapiens
ccattttacttaaactagtcagagttacttgtctcaaaacaaaatgatttctgacacagttattttatttcattcaaaaaatttttaacagcatttttgacattattttaaacttagtgggtttttaaagtttttaaatcatgagtttagtacatatgccagcctgtgggaaaactagccagttggttcataaacctgcatcacagtttatctgtaactgcaacttgaatttttagtatggttcctggatttctctactgctttcaataacttccrtgattcttttcaagaaaggaagtaagctgtgtaaatggaaatagcatgtattggttttctattgctgctataacaaattaacatgaacctggtggctggaaacaacacaagtgtattatcttatatttctggtagtcagaaatttgaaataagatttatggactaaaatcaaaatgttggcagggctttgttccttctggaggcttttgggaagaatctgcttcttggccttttctagcttctcaaggctacttgtattccttggctgtggcccctttctcatcctcaaagcacatcactgagctccgtttccatcatcacatcttctctctgct

SEQ ID NO: 557541 - DNA, 595 bp, Homo sapiens
tatcattgcaagtgtgaagtccacaagccatgtgttgcaataaggttatctccttttctaatgttagttttgaggcaacgtgtcaatagtttatgcatacagtgacacagaaaatctggggagtaactaagatagttcatagtagaggcaaytacactggcagatggtgaatgcccttcgacagtgttcaagtacaggctacaaagtaagagatgcttgcttggagtgggcaattggcctatctaatgtccatgttccctccaagtctaatattttattattcttattttttaaacttcaatttcaatcaattaattaaccctttaactatttttagaaagtaaatgctatgagcagtaatgcctaaatcctataaaatggagattgtcatctccattttacagatggggaaaataattcttaaaaagataaaagtacccttttctaactccgtgtcaaagcagagatttaagcccaggtccagctgactacagcgactaccctaaagtaggggactaggagtcaaagcatatgatgaatttttagctgagacataatacacaagccagagatttttgccacacacacaaaaaaa

SEQ ID NO: 557542 - DNA, 594 bp, Homo sapiens
tactgaactaaaatctaaagattctgtttttttattaaggaaagaaaatgtacagatattggaaacaatctacagttattgccacaaagaaacatacctgcaatatatgtacacagaaatgttgatagtacaagaatgaatgtgactaaaaaattgaagtaactagaagtagctatagtaatacaaaacaaaaagaaataaaacttttgagaattaaggtgacactatataattatatatggtttatcatatcaggaaatataaatttttttcaactcatttgtatttagcaatatagcctaaaatatatatatataaaaacctatcaaaaatataaaattagtctaatcattaggaacaattatataaatcaaaattaaggattgtcttgcaaacatatagcaatggctcttcaaaatatcagtgtcatgaaagacaaaattttctgggaactcttccagattaaagaagactraagagacagtggcaactaagtgtcattcatgaccctttattgttttctgaatgaaaaaaaaactataaaattttaaaaactataaagcccattaccagtgtaattgtggaaattctaat

SEQ ID NO: 557543 - DNA, 469 bp, Homo sapiens
gtgcagtgtgcctttttctgcgtatcccagaggctagctcttccttgcgaccagcaatcataaggcatcaagtcttcctctgaggggactgtaggctttgctgtctgttttctgcatcaaagtatctctaaatatttgagagtgtggagagcaccaaccagtaaatggcttctattagagtgatatcagtagtgccaccactgaacctacctcaagcaataggaggtaagatggaattcctcacaagttgtgagcatggtaaaaggcaagtgcctaaggtgtccttgataataaagtctcaacttctttcttcactctgtcctgtctgctgtcaacctaagatttatactcccaatgcatagattgaattatgttagtcccwgccctaaactcttcactacctctctcaaacctaacaagatggatgcctctgctgttcacaatattgcttcatgttttagtagttgag

SEQ ID NO: 557544 - DNA, 527 bp, Homo sapiens
caccatagtaagatatgcttgctcctctgtcgccttccaccatgattgtaagttttctgaggygtcccagtcatacttcctgtaaagcctgcagaacgttgagtaaattaaaccttttttcttcataaattacccagtgtcaggtagttatttagagcagtgtgatatgatttggctgtgtctccactcaaatctcatcttaaattatagctcccacaattcccatgttcatgggagggacccagtgggaggtaattgaatcatgggggcagaactttcctgtgctgttcttgtgatagtgaataagtctcataagatctgatggttttataaaagggagtttctctgcacaaactctctcttgtctgccaccatgtaagatgtgccttttgccttctaccatgattgtgaggcttccccagccatatggagctgtgagtccattaaacctctttgtatttataaattactcagtatcaggtatgtccttataagcagcatgaaaacagactaatacacagtgtgag

SEQ ID NO: 557545 - DNA, 527 bp, Homo sapiens
caccatagtaagatatgcttgctcctctgtcgccttccaccatgattgtaagttttctgaggcgtcccagtcatacttcctrtaaagcctgcagaacgttgagtaaattaaaccttttttcttcataaattacccagtgtcaggtagttatttagagcagtgtgatatgatttggctgtgtctccactcaaatctcatcttaaattatagctcccacaattcccatgttcatgggagggacccagtgggaggtaattgaatcatgggggcagaactttcctgtgctgttcttgtgatagtgaataagtctcataagatctgatggttttataaaagggagtttctctgcacaaactctctcttgtctgccaccatgtaagatgtgccttttgccttctaccatgattgtgaggcttccccagccatatggagctgtgagtccattaaacctctttgtatttataaattactcagtatcaggtatgtccttataagcagcatgaaaacagactaatacacagtgtgag

SEQ ID NO: 557546 - DNA, 527 bp, Homo sapiens
caccatagtaagatatgcttgctcctctgtcgccttccaccatgattgtaagttttctgaggcgtcccagtcatacttcctgtaaagcctgcagaacgttgagtaaattaaaccttttttcttcataaattacccagtgtcaggtagttatttagagcagtgtgatatgatttggctgtgtctccactcaaatctcatcttaaattatagctcccacaattcccatgttcatgggagggacccagtgggaggtaattgaatcatgggggcagaactktcctgtgctgttcttgtgatagtgaataagtctcataagatctgatggttttataaaagggagtttctctgcacaaactctctcttgtctgccaccatgtaagatgtgccttttgccttctaccatgattgtgaggcttccccagccatatggagctgtgagtccattaaacctctttgtatttataaattactcagtatcaggtatgtccttataagcagcatgaaaacagactaatacacagtgtgag

SEQ ID NO: 557547 - DNA, 527 bp, Homo sapiens
caccatagtaagatatgcttgctcctctgtcgccttccaccatgattgtaagttttctgaggcgtcccagtcatacttcctgtaaagcctgcagaacgttgagtaaattaaaccttttttcttcataaattacccagtgtcaggtagttatttagagcagtgtgatatgatttggctgtgtctccactcaaatctcatcttaaattatagctcccacaattcccatgttcatgggagggacccagtgggaggtaattgaatcatgggggcagaactttcctgtgctgttcttgtgatagtgaataagtctcataagatctgatggttttataaaagggagtytctctgcacaaactctctcttgtctgccaccatgtaagatgtgccttttgccttctaccatgattgtgaggcttccccagccatatggagctgtgagtccattaaacctctttgtatttataaattactcagtatcaggtatgtccttataagcagcatgaaaacagactaatacacagtgtgag

SEQ ID NO: 557548 - DNA, 625 bp, Homo sapiens
aattgaatcatgggggcggttacggttatgcttttctcatgatagtgagtgagttctcatgagatctcatggttttataatgggcttttccccctttttgctgggcacttcttgttgtcaccatgtaagacatgcctttgttccttctttgtcttctgccaagattgtgaggcctccttagccatatggaactgtgagttcattaaacctcttttgctttataaattacccagtcttgggtatttcttcacaactgtatgaaaatgaactaatatacacattatattttctttgcattctatatattttatacatgctaaatttctctatctttattaaagcatgtattgctttatggcagttgtatactcattctattatcccttgcactggctagctaatgcatccactrgacaattagcacaataaaattgtatggcgtaacccctcttcctccctcatattaaaattaacatacatacagattcagctaaatgccaactaaagaaagcatgagaagaaagtcagtcaaaatgatgcaggaaggaatgataagctttacccttaggagaatttgcatatgaagaaccatcttcttaactcctaaacctgtatatatggtcaa

SEQ ID NO: 557549 - DNA, 517 bp, Homo sapiens
aaataaataaaaggcacccaaatagaaaaagaagaagtcaaattatctattttggtggaaaacagaattctatatctaaagaaacctaaagattctcccaaagggctcctggaactgataaacaacttcagtaaaattttgggatacaaaaatcaatgtgcaaaaatcagtagcayttctatacaccaataacattcaagctgagagccaaatcaagaacttgatcccatctacaatagccacagaaacaataaaatacctaggaatacatctaacccagaaggcaaaagatccccatacagagcaccacaaaacactgctgaaagaaatcatagatgatacaaacaaatggaaaaacattccatgcttatgtattggaagaatcaatatagttcaaatggccatactgcccaaagcaatctacagattcaatgctatttctgtcaaactgccaatgtcttttttcacagaattagaaaaaaactattctcaaattcatgtggaaccaaaaaaggcc

SEQ ID NO: 557550 - DNA, 517 bp, Homo sapiens
aaataaataaaaggcacccaaatagaaaaagaagaagtcaaattatctattttggtggaaaacagaattctatatctaaagaaacctaaagattctcccaaagggctcctggaactgataaacaacttcagtaaaattttgggatacaaaaatcaatgtgcaaaaatcagtagcatttctayacaccaataacattcaagctgagagccaaatcaagaacttgatcccatctacaatagccacagaaacaataaaatacctaggaatacatctaacccagaaggcaaaagatccccatacagagcaccacaaaacactgctgaaagaaatcatagatgatacaaacaaatggaaaaacattccatgcttatgtattggaagaatcaatatagttcaaatggccatactgcccaaagcaatctacagattcaatgctatttctgtcaaactgccaatgtcttttttcacagaattagaaaaaaactattctcaaattcatgtggaaccaaaaaaggcc

SEQ ID NO: 557551 - DNA, 517 bp, Homo sapiens
aaataaataaaaggcacccaaatagaaaaagaagaagtcaaattatctattttggtggaaaacagaattctatatctaaagaaacctaaagattctcccaaagggctcctggaactgataaacaacttcagtaaaattttgggatacaaaaatcaatgtgcaaaaatcagtagcatttctatacaccaataacattcaagctgagagccaaatcaagaacttgatcccatctacaatagccacagaaacaataaaatacctaggaatacatctaacccagaaggcaaaagatcccyatacagagcaccacaaaacactgctgaaagaaatcatagatgatacaaacaaatggaaaaacattccatgcttatgtattggaagaatcaatatagttcaaatggccatactgcccaaagcaatctacagattcaatgctatttctgtcaaactgccaatgtcttttttcacagaattagaaaaaaactattctcaaattcatgtggaaccaaaaaaggcc

SEQ ID NO: 557552 - DNA, 517 bp, Homo sapiens
aaataaataaaaggcacccaaatagaaaaagaagaagtcaaattatctattttggtggaaaacagaattctatatctaaagaaacctaaagattctcccaaagggctcctggaactgataaacaacttcagtaaaattttgggatacaaaaatcaatgtgcaaaaatcagtagcatttctatacaccaataacattcaagctgagagccaaatcaagaacttgatcccatctacaatagccacagaaacaataaaatacctaggaatacatctaacccagaaggcaaaagatccccatacagagcacyacaaaacactgctgaaagaaatcatagatgatacaaacaaatggaaaaacattccatgcttatgtattggaagaatcaatatagttcaaatggccatactgcccaaagcaatctacagattcaatgctatttctgtcaaactgccaatgtcttttttcacagaattagaaaaaaactattctcaaattcatgtggaaccaaaaaaggcc

SEQ ID NO: 557553 - DNA, 561 bp, Homo sapiens
actggcctgtctggaacaactatgcccagagaatgtagaaatagctatgaggataatcgatctgtatgctaaccctacctcagaaaccaattcacactgaccttgttcaagttacttaactgttcttaagctttcccatctgaagcaataaagaccttatctagcggtgagttgtgggtattgattagcaaatgttctgagagttctgtgcagatggaagaaacaggacrtaaaggataaatgaaaattttatagacaaggaggcttcagttaaggctttcaatgatcatatacacgttcatctcactattaaaaataaataaattgggccgggtgtggtggctaacgtctgtaatcccagcaatttggggggccaaggcaggtggatcacctgagatcgggagtttgagaccagcctgaccaccaatatggagaaaccccgtctctactaaaagtacaaaaatagctgggcttggtggtgcatacctgtaatcccagctacttgggaggctgaggcagaattgattgaacctgggaggtagagattgtggtgagccaaga

SEQ ID NO: 557554 - DNA, 607 bp, Homo sapiens
agaataaacaaaaataaaattatgtaaatgcagaaacacttgtaaaagtaacagccaaaagacacagtccgggtaaaagattgacacggaattagaagaatatagagagcatcctctctcccatactgtattgctgcacaaaccagtctctaccataatacagtgccttacaactgaatatatttcatgacacagactctctgtgggcagtaatatgtatgagaattcaaagttaagaggggagacaaaagcaagaacgtgaggaacatgaagcatctsactccattgataaaggagtttagaagaaattacttaggtagattgtgagggtatggaagtccttggtaaggttttccttttaatgaaaagtagccccaaattatttttccttctaacacagagcagcttgtaaattcgagctgcagacatagatgcctgcagtcgtgccaatcatactcaagatggtggctccttttttcctcctctttgtcagccacctgtagagtaaggagcagacaagatggcccatgccaaagggaaaatttatatgcataataaaattagagtggggcagccagtcttccccatgcactatgtaaacgtcata

SEQ ID NO: 557555 - DNA, 607 bp, Homo sapiens
agaataaacaaaaataaaattatgtaaatgcagaaacacttgtaaaagtaacagccaaaagacacagtccgggtaaaagattgacacggaattagaagaatatagagagcatcctctctcccatactgtattgctgcacaaaccagtctctaccataatacagtgccttacaactgaatatatttcatgacacagactctctgtgggcagtaatatgtatgagaattcaaagttaagaggggagacaaaagcaagaacgtgaggaacatgaagcatctgactccattgataaaggagtttagaagaaattacttaggtagattgtgagggtatggaagtccttggtaaggttttccttttaatgaaaagtagccccaaattatttttccttctaacacagagcagcttgtaaattcgagctgcagacatagatgcctgcagtcgtgccaatcatactcaagatggtggctccttttttcctcctctttgtcagccacctgtagagtaaggagcagacaagatggcccatgccaaagggaaaatttatatgcataataaaattagagtggggcagccagtcytccccatgcactatgtaaacgtcata

SEQ ID NO: 557556 - DNA, 462 bp, Homo sapiens
gagaggcctcagactcatggtggaaggtgaaagagcaaagacaaatcttacacggcagcaggcaagagtgcgtgttcaggggaactgmcctttataaaaccgtatctcctgagatttattcactatcacaagaacagcatggggaaaacctgcccccatgattcaattatctcccaccaggtccctcctacaacatgtggggaatatgggagctacaattgaagatgagattcggggttgtgggggaacacagccaaatcatattaaagaacaaactaagcccaaatttagttgaataatagaaatataataattagggttgaaataaatttttaaaatagacaaacaatagaaaaaattggtgacactaagatatgtttttttgaaaaattaatgaaaatggcaaacattaagttaatgacaggagagttaaataaagaaaacagaaataaaaagggatcc

SEQ ID NO: 557557 - DNA, 607 bp, Homo sapiens
gaagagacaacccacagaatgggagaaaatgtttgcaaactacccccctgacaagggattaatcaccrgaatacataaggagcactaacaactctatagaaaaaaatctagaagttcaatcaaaatgggcaaaagattcaaatagacatttttcaagagaacacatacaaatggcaaacaagcatatgcaaaagtgcccaaaatcaatgattgtaagagaaatgcaaatcacaacttcaaaaagatatgatatcacctgagttaaaatggtctatatccaaatgacaggcaataatgaatgctgatgagtatgtggagaaaagggaacacttgtacactgttgatggaaatgaaatttagcacaactactatggataatagtttggaggttcctcaaaatctaaaaattgagctaacatatggttcagaaataccactgctgggtacataccccaaagaaaggaaatcatcatattgaagagctatctgcagtcatatttgctgcagcactgtttacaatagctaagatttggaagcaacctaagtgtccatgaacagatgaatgtataaaggaaatatggtacatatacacagtagagtactattc

SEQ ID NO: 557558 - DNA, 437 bp, Homo sapiens
acagtggctcatgcctgtaatcccagcactttcagaggtcgaggtgggcagatcatgaagtgaagagatcaaaactaccctggccaacatggtgagaccccatctctattaaaaaatacaaaaaatttctgggcttggtggcacacacctgtagtcccagctacttgggaggctgaggcaggagaattacttkaacctgggaagtgaaggttgcaaatgaaccgagatcgccccactgcactccagcttggtgacagagcaagactgtgtctcaaacaaacaaaaaaacaaaaacaaaacaaacaaaaaaacagtgagtcagatcatggtagtctcttttcaaaatcctacaatagtttccggtttaactcagaaaaaaagtcattaaaaagactacaatacggccgggcgcggtggctcacgcctgtaatcccagc

SEQ ID NO: 557559 - DNA, 437 bp, Homo sapiens
acagtggctcatgcctgtaatcccagcactttcagaggtcgaggtgggcagatcatgaagtgaagagatcaaaactaccctggccaacatggtgagaccccatctctattaaaaaatacaaaaaatttctgggcttggtggcacacacctgtagtcccagctacttgggaggctgaggcaggagaattacttgaacctgggaagtgaaggttgcaaatgaaccragatcgccccactgcactccagcttggtgacagagcaagactgtgtctcaaacaaacaaaaaaacaaaaacaaaacaaacaaaaaaacagtgagtcagatcatggtagtctcttttcaaaatcctacaatagtttccggtttaactcagaaaaaaagtcattaaaaagactacaatacggccgggcgcggtggctcacgcctgtaatcccagc

SEQ ID NO: 557560 - DNA, 535 bp, Homo sapiens
ggtgcaatgtgagaaatgtataaactagaacattaaagtttctaaatttctcatyctctagggtgaccattgttaatttggtatctcccttgacagatttttgtttctatgcatgcacagcaacattttccaaagtgaaatatggagtactagaccggaaatattccaaaaaattatgcaaaaaaacacaaaataattttagcaagtaatttgacctaaacaaaattgttttgtggccagatttttcagtgcctgtaatatactcatatgccttgtgactctctaaaaaaaggataaaatatgcatcattttccaaacaatttgattatacagattgcataactcttttttgtggaagttatattccactaacatgctttgaaaaaacactgcttacgttttgctctatatattcttctgtaatccatttttcacgcttaacttatcattgatattccatatcaatgcattctaacctaaatatttaatacagttgcatattatgccagtgaatgagcacttcataatttaacaa

SEQ ID NO: 557561 - DNA, 572 bp, Homo sapiens
atctctggtatttccttttgaatatttctaagaatgtccatctctttgcttacatcatctatctgttactttgctgtttactttttcctttaatgcttttgtcatattcatcatagtgatgatttttctttaaaaaaatttggtctgctatagtcaacagtcttgttgtgttctacctggttcataggtttgttcagtctcttcaaattatgggttttgtttgttttatttatttatttatttatttatttttggcattttagtctgccttttaatttttttgttgtaaggtgaacattttttactaggtaaaagaaactatggtaaataagccttcattaatgtaatggtaaggtttgtggggagaagaagcattctgcagtcctgtgattaggtctcagtcttttgtagacctgtaccctccgatgrtaaacttcataactgcttcttaatccttcccgctttaggtgggaaaggaagcccagagggggttggagtttgttatttcccattctccacatgaaaggctagagcctgatggaggtgggtattttccctcccctagttaggtc

SEQ ID NO: 557562 - DNA, 556 bp, Homo sapiens
  misc_feature 159, 160: n = A,T,C or G
attaggtatttaatgtcttctagaaaattttctaagcaatttacatgcattgtgtcatttatagtcacaacaactgtatgagatcascattcttaaattcccattttctagataagtaaactggagataataacccctgcctgtcgtatttattggcannacagagaaaataaattaagttaatgaaaataaaaatgccttttcagggccaacacataaaacatgatgaaagttattattattttttcctcctcctggccctcttctcagctttaaaacacttgtcatattcatgaattgattgacatgtacatttatgtgcttaacctctgaaacaatgttacttttcagagagaaacacaggattgaggcattttagcagccccattttgcaataatttttgcaaagcattttaggaatatgagaaaaagttaaataatttaaggaaagaatcgtttggaccctccaagagaagagggaaaatatggagcttttctaatttgcaaaaggagcaaagatatacagcagcgccactctcctcaaatacacccattc

SEQ ID NO: 557563 - DNA, 565 bp, Homo sapiens
atgttatacacaagattatatgcaattttttctttgtcaattacaaaagtatttagttaaaaataaaaatttaataattttttccactcgaggccttcytttaacttctgaaacttttttccttgtaggaagtgtttttttttctagagcatttctgatatggaggattaatatttcatgaaataattataaatgcctgacttgcagcagcttttaacaaggaaaggacacacaatgatggaatattaatgtataagcaccactcatattaaagttcttgtcagaaaaatttgggtttggagtgaaaatatgtgtttctttttctagtttatacagcacttttattatggtgcttttatttattaaagtacctcgatgtaaaagacttaggcaatctttctatttgttttattgctactctgtcagggagagaaaaattataatcaacttttttcaaagtagagaagtgaaaattgcaaataaacttctaatgtgggtcaaaatcaagaactttggatttttatgatatcaatgacatagtagttaaaacctcagatacacctgt

SEQ ID NO: 557564 - DNA, 567 bp, Homo sapiens
gcagccatggtaatgaatagcattcagaattcgttgtaaatgtatttaattatgcaacaactagtcycagcaagcttgatgttttaggctaccaattaatgctagctccttgttcctgaaagcaaactaatcaggagcaaaatcataccaataaccatgtcttagattgccaaccagtgaacaatattctcacctgagtaaccatgcatctacaggtgatgtcaacctacttacatctctggaagtgtatgaattcttaaactccagtcttcccaaagaccccgtatatgatgagcagtttgctctgcttgaagatacaattcctaatcatttcttaattataatatattcagaacaagtaaagctttactcccttttggagaagtatattattaagtcttcagaaaaaaattttaaaagcctgtataccctgagtctattcttataataagctttatttttactttaataaatttagtacatacattttttgaagacattaaagacagcttgttccacataattgcctatcatggtgaaagatgctcttggttttccaagtaaaaa

SEQ ID NO: 557565 - DNA, 365 bp, Homo sapiens
gagagagaaagtaaatgaggaagaaatattggcactataaaattccaccattttagctagtacagaagagattcatttttttaagtgctgctgaatgatggtccataatgtggttttatcataatttgatcaagtgtatttctattggtgtgcatttattatgtttccgcttatgccaccactaataatgctgtaataaacaaaaacaaatgtaaaactgttatgtgtaaaccagtttttgctaaaggycaaatgatggtcatctttaacaaaagaaattatgagttattttgcaaaatatccttcttttaatgccttatttatataatctaaaattgtttagactttaacagtgaagtgtttaa

SEQ ID NO: 557566 - DNA, 493 bp, Homo sapiens
gactttttgacccacaaagactgtgagatagtaaatgttatttgatttaaaatgctaagattttggtaatgtgctacacagcaataaaaacccaataaaaattcttaaaaaaaaaaaaawaacatcactgttgttgttagctagtcttagacagcatcttatgtaacactccagggaagtaacttttggcaaaatgttgtaaatgtgtttccatacaatatttaaagcaacaaatttctattttcatttacttgctaattgtattttgattatataatattggtactttttctaaataattacataaaatacaaacatacattgattataaataattcatatgatctcataactgttgcatacttatggtgactttctgttgaaaataattttgtcatgttaatacaatattccaaaatgttagattgccagtaaattataaataattctatactttcctcagactcatcttccaaataacttataaactaca

SEQ ID NO: 557567 - DNA, 453 bp, Homo sapiens
cctgttccataccctggctctcaaatgacattcttagacacaccctggcccagataggaactttgctgccttgaagagaaagacctggtcctgggaggcttcattacctcttaactgaagagcccctgggtcctgaataacaagtaacaatagccaggtactacattgagagccatgggagagatgctgagacttgctggcctcaggtgagcttcagcacattccaagctgtggtggctatggggcaagaatactgcttgagaaagcagagggaaaagtaaagaagtctttttattgcacctggtaccagcttggccacaggtgggtagagcaccaagtgggctcttaargtccctgattccaggacatgactcttttacagcatttttggacctgccctgtgtcagaggggagaccccttccctgaaaggtgagacctaggtcaggtagttt

SEQ ID NO: 557568 - DNA, 604 bp, Homo sapiens
tgttcccaaatacaaagaaagatatgatttatcgactctacatatttcttatcatcctttacactttttctaaaaaaaaaacacaaaacttaccttttgaaatattttctctcagattccataatattatcagcattttttcattaattcacctattgtttagtcaacaaaaattaattttaggattagtaaacatttccttctctcaagtggaatgtagaggaataaatgtattataaattggtatcattactcccatgatagagataagtatcccgtactaatagaacagtgagtcagacacaatacagttggtgattagagtaatggttatgggtgtaagtacagttttccygaggaggactatacatgacataagcattaaaagtgagttggcattagccgaatgaaatgaaaataaaggaaaaagctaggtaaggtagaaaggacagtcttatcaaaagaatagcaataaacaatgtagtccagtgtcttactgttactggaaatcacaaagataatttgctggagcataaatatgaaataaaaaattaaagaaagaagttctcaacaatttttttcagaaggaaatatttctcattag

SEQ ID NO: 557569 - DNA, 598 bp, Homo sapiens
ctgaaactgaaaatagaaattaataaattagtaaacaatagagattttaagtatcttactctgaaaaaaatcaarcagatctatttgatttaccttaaagtaaaacagaaaacacaatattcaagtacatgctattaagaattaaatgttatgtaattctataccaagaagatatgaatatttactcaaatctataataattaaattcagaactcaaagaactctatttttttctcagaaaataaaatggaaaaaaccagttcaacatttggcctgaaatgaagtgatagaaacctttgaaggaaatgataaaaaattgcaataattttttttttttttatgagttggaatctcactctgttacccaggctggagtgcagtggcgcgatctcagctcactgcaacctccatctcctggactcaagtgattctcctgcatcagcctccccaataggtgggataacaggtgcctgccaccacacctggctagttttgttttttaatagagacggggtttcaccatgttgtccaggcaggtgcaataaactgtttttatgactttgcattgttatggtagtttttagtaatggtaaaaaag

SEQ ID NO: 557570 - DNA, 598 bp, Homo sapiens
ctgaaactgaaaatagaaattaataaattagtaaacaatagagattttaagtatcttactctgaaaaaaatcaagcagatctatttgatttaccttaaagtaaaayagaaaacacaatattcaagtacatgctattaagaattaaatgttatgtaattctataccaagaagatatgaatatttactcaaatctataataattaaattcagaactcaaagaactctatttttttctcagaaaataaaatggaaaaaaccagttcaacatttggcctgaaatgaagtgatagaaacctttgaaggaaatgataaaaaattgcaataattttttttttttttatgagttggaatctcactctgttacccaggctggagtgcagtggcgcgatctcagctcactgcaacctccatctcctggactcaagtgattctcctgcatcagcctccccaataggtgggataacaggtgcctgccaccacacctggctagttttgttttttaatagagacggggtttcaccatgttgtccaggcaggtgcaataaactgtttttatgactttgcattgttatggtagtttttagtaatggtaaaaaag

SEQ ID NO: 557571 - DNA, 598 bp, Homo sapiens
ctgaaactgaaaatagaaattaataaattagtaaacaatagagattttaagtatcttactctgaaaaaaatcaagcagatctatttgatttaccttaaagtaaaacagaaaacacaatattcaagtacatgctattaagaattaaatgttatgtaattctataccaagaagatatgaatatttactcaaatctataataattaaattcagaactcaaagaactctatttttttctcagaaaataaaatggaaaaaaccagttcaacatttggcctgaaatgaagtgatagaaacctttgaaggraatgataaaaaattgcaataattttttttttttttatgagttggaatctcactctgttacccaggctggagtgcagtggcgcgatctcagctcactgcaacctccatctcctggactcaagtgattctcctgcatcagcctccccaataggtgggataacaggtgcctgccaccacacctggctagttttgttttttaatagagacggggtttcaccatgttgtccaggcaggtgcaataaactgtttttatgactttgcattgttatggtagtttttagtaatggtaaaaaag

SEQ ID NO: 557572 - DNA, 510 bp, Homo sapiens
tctttttttcctcactatagcatgtgcttaacggagaacaaggacaccgtctgtcatgttctctcttgcaccctatcaattcgcacagtatgcggtacatctgtacattggtacaataaatattgggtgatgtattgattaatgagaagaaaagtacctgaaatatattgaaattaaggctctgagaatggggaaattgtgcccttttgcttccatatycacagtcaacctgtctgaagttttagatggcgttagaagagtcgctcctgtaatatatgggaaaaaaaagtgtgtgcgtctgtgtgtgtgtgtgtgtgcatgtaaaaggagaaaagaaatagaataggtatatttaaataattatgagatagtctaaattgcctttctaaacattcctagttcaccaaacattacttctggggtttctggagggaatgtgagcctcccgagctgtaagagaatgaataaacgaagtttttgcctttgaccccataaatacagacaaaaaca

SEQ ID NO: 557573 - DNA, 473 bp, Homo sapiens
aactgataatcttcacttacagcaaaaacatcagatactctgcatggttgtttcraagtagtaattagaccccaacctgccagtaaaaaaccatgaaaaaagagtgatatttccctacattgttggcctggtggtttttatctgcaacaattcttttaagttttaatgatcatctaagaatggtatttcatttatttgactactaccctattgcccatatattaacctcactgaatttttggtccattgcgtagaagaatttatctactaataaaaatacaactcattaaagattaacttgcccccaggacagtctctctggaaacaaattccaagcattataatcaccaatttgcactctgaatacttaaaggcagataatcttatttatcctgatttaaattggaaacctgtacctattttaagtcaattgtaaatagaaaaatagcacacccaaattcacaataattgaa

SEQ ID NO: 557574 - DNA, 473 bp, Homo sapiens
aactgataatcttcacttacagcaaaaacatcagatactctgcatggttgtttcgaagtagtaattagaccccaacctgccagtaaaaaaccatgaaaaaagagtgatatttccctacattgttggcctggtggtttttatctgcaacaattcttttaagtttyaatgatcatctaagaatggtatttcatttatttgactactaccctattgcccatatattaacctcactgaatttttggtccattgcgtagaagaatttatctactaataaaaatacaactcattaaagattaacttgcccccaggacagtctctctggaaacaaattccaagcattataatcaccaatttgcactctgaatacttaaaggcagataatcttatttatcctgatttaaattggaaacctgtacctattttaagtcaattgtaaatagaaaaatagcacacccaaattcacaataattgaa

SEQ ID NO: 557575 - DNA, 473 bp, Homo sapiens
aactgataatcttcacttacagcaaaaacatcagatactctgcatggttgtttcgaagtagtaattagaccccaacctgccagtaaaaaaccatgaaaaaagagtgatatttccctacattgttggcctggtggtttttatctgcaacaattcttttaagttttaatgatcatctaagaatggtatttcatttatttgactactaccctattgcccatatattaacctcactgaatttttggtccattgcgtagaagaatttmtctactaataaaaatacaactcattaaagattaacttgcccccaggacagtctctctggaaacaaattccaagcattataatcaccaatttgcactctgaatacttaaaggcagataatcttatttatcctgatttaaattggaaacctgtacctattttaagtcaattgtaaatagaaaaatagcacacccaaattcacaataattgaa

SEQ ID NO: 557576 - DNA, 473 bp, Homo sapiens
aactgataatcttcacttacagcaaaaacatcagatactctgcatggttgtttcgaagtagtaattagaccccaacctgccagtaaaaaaccatgaaaaaagagtgatatttccctacattgttggcctggtggtttttatctgcaacaattcttttaagttttaatgatcatctaagaatggtatttcatttatttgactactaccctattgcccatatattaacctcactgaatttttggtccattgcgtagaagaatttatctactaataaaaayacaactcattaaagattaacttgcccccaggacagtctctctggaaacaaattccaagcattataatcaccaatttgcactctgaatacttaaaggcagataatcttatttatcctgatttaaattggaaacctgtacctattttaagtcaattgtaaatagaaaaatagcacacccaaattcacaataattgaa

SEQ ID NO: 557577 - DNA, 589 bp, Homo sapiens
attatttgtgattgaatttcttctttaaatatctttcagttactgccacattttaattcctagctaaaattctaccaacagtcacacagttcaatattatctggttacagcgggtacttggtgaaaacaaatggaatctggatttaagtcctatattaaaattgcttttgcatagtataatttgcattttataaggccaaaggcaaaatggctaaaataacattcaacaggagcctgtgattggctaaactgaagaggaaatgatacattacaaaatctcaaagccagacataagcttagcctgtctttgaytgtttttttttcaatgccaagaaattgagtacagtaaattgctcaaaccaacaatataaaaatttgctcttcttggcaaagatcttcatatttctgaatgttttcttctttcttttggctttgatatccagtagttttgttcttactcttaaatggaggcaatatctatgacatttccacatacaatatctgaacctcaaaaaaagggagggtgtattagtctgttttcacactgctgattaaaacatacccaagactgggcacaaaagaaagaggt

SEQ ID NO: 557578 - DNA, 548 bp, Homo sapiens
gcacttacattttctacatttttatatgggtaaatattcatactttgaatttcaaaacaaataagagggaaaaactaaatgggataatcaataattattcatgttatttgtgtatctgttattttcccactgagaaaccagttcctaagaaccagatggcattaaccatggtattcttcatatcacctggcaaagcaaccgcttatagaagacacttaacaaagttttgtgaatccagaagttgaggtcaaagggagcagggaaaaggcaggaggcttttggaatcatggktccctctcctctttgggcaggtactagtttaatgataaaccagttctctggatgggagagagggaagccctgatttgtagtgtttactgatttccatggtgtaaatactcacacatgggcaatttcaagcttccaatgttacatcattgaatatagagtttagaaaaagtgcttgtaattgattctcatgagctggtacaaattggctccagcatatcatggcttggccctcactgaacccttgcatcctctgcctc

SEQ ID NO: 557579 - DNA, 431 bp, Homo sapiens
tgaaagaattccaatataggaataatgtaaaatgtcagaagaaatattagggcaaaaataatatggatataaatttaagaataaattaagtacaaatttaacttattcttttaaaacccttcaatttttaaaaccccttattttggaaaagcttgttaatgagctagaaataaagtgtctcaatttgggatacaaataaaatagtaaagctcaggaaatacacttttttctacctgaatatttcgtgcggaaactttagttttgaatatgtgtaataaaatgtggctgggcatgatggctcatgcctgtaatcccagcactttgggacgccgaggcaggtggatcwtttgaggtcagaagttcaagaccagcctggcccacatggtgaaaccccttctctactaataatacaaaaattagatgggcgtggt

SEQ ID NO: 557580 - DNA, 530 bp, Homo sapiens
catctcagcaatcctatgaagtagatattactttcattttgtaattatcgggaaaatgatgcttacagaacttaactcacctgcccataagcacacagaattggtaacagtcagaattgaaaactagatctgtctgatatcaatatgctcacacatccatttgatttttgtttgtttatttatttatttattttgagacagggtctcattctgtcacccaggctggaacgcagtggtacaatcttggctcactgaaggctcacagcaacttccgccgcccaggttcaagcaattctcccacctctgccttccaagtagctaggattacaggtgcatgccactcactatgctaggctaactttttttttttttttttttttggkagagatggagtttaaccatgttggccaggctggtctcgaactccagacctcaggtgatccgctcacctcagccttgcaaagtgctgggattacaggcatgagccactcacacatccatttgaaaagcactttcacataaattttatt

SEQ ID NO: 557581 - DNA, 555 bp, Homo sapiens
gaatacggtcaatatcaatcagaattttagagactgttgagatctgaagatatctcaccaccaatctagtgttcaactgagacctagagaaattataactttcctaagatcacttggctagatagtttcagaaacaggactttaactcaatttccttatttctggtcaaaatactatatgacatagcacaaacaaaaaagttcactacggtgtgtttaagaaataagaataacctgtaatcccagaactttgggacgccgaggcgggtggatcacaaggtcaggagatggagaccatcctggctaacacggtgaaaccccatctcttctaaaaatacaaaaaattagctgggtgtggtggcrggcacctgtagtcccagctactcaggaggctgaggcaggagaatggcatgaacccgggaggcggagcttgcagtgagccaagatcacaccactgcactccagcctgggtgacagtgcaagactccatctcaaaaataaataaataaataaaataataaaaaaagaaataagaataaaatgtaattacagtttg

SEQ ID NO: 557582 - DNA, 361 bp, Homo sapiens
taaaatactacattaagaattgaaaaaaaaggatttaacaccagattaggcacagcaaaagaacagttaactggaagacagttcaatagagaatatccaaattgaagtcgagaggagaaaaataaattttaaaagagaaaattttaaagtagtaagagcctaagtgacactttaaggcattctcaaaaagtctaccatatgaacaattgaaatccatttttgaatgggactgaaacaatattttaagtaataatgcccaagagtgtcaaataacaggcattattgcatcaaataatgtccatgagtgtcaaaacccgatgatgacattacartacaaatcatagaagctctataaacctca

SEQ ID NO: 557583 - DNA, 578 bp, Homo sapiens
gccactgcgcccagccccctagttytcaagatttattttcagactatagtaaataaatcagagtagggttgccacaggcatagcttccctcccatatggtatagggaatgcacactgacaagagtattagaaaaagagaccaaaagggaatataaaaggagtattagacaggtttttattttccctcatcaaatggtgtctctctgactatgtatgaacacagtcatgcaatgcataacaatggagatgcattctgagaaatgcattgttaggtgattttgtcattatgtgaatataaaagaggtcatacacaaacctagatgctatagcctactacacacctaggctatacggtatagcctattattctaggctactaagctgcaaagaatgttactgtactgaatactgtagccagttgtaacacaattgtatttgtgtatctaaacataatctacatatggaaaatatacaataaaaatatggtataaaaaatcaaaaatagtacacctgtataggacacttaccataaatggaagttgctctgcgtgagtcagtgcgtgagtagtgagggaatg

SEQ ID NO: 557584 - DNA, 654 bp, Homo sapiens
ggctcatgtttctaaggtaaattcctatatatccatccattgtagatctggaaaatgattgtgactatttcaataggctttccatggataggcgacttatcaacaaaattcagattttatgtatttattcatgatgtcatcgtgggaactaagaaacatacttggaaaactgctctttgcagaaatcctaggtgccttatttgaaataaatttttgttgctattagtcagtgtgatttacgtttcaaatacagacwctcatcattttcagtaggttataggatgataaatcttggggactggaagttgctgaaagcaaatatttaggcagtatccatataatcaattggaagaaacatttgcattgtttaatcaagcataactatacagaaagaaaaaaattgaaaaacaatttttctggttaagtagaaaaaaacagttataagagacatagttcaggcataaatatgcataatctacttttatttttttctcaggctatcctatattaccattaaagtccatattattgattctgttcttttattcttgtttcttttttgtctaattcactgcttatgaacacattacccagaaaatgtttaggggaaataaaagcatgtaaaatttagatcagaaaatatactttagatca

SEQ ID NO: 557585 - DNA, 591 bp, Homo sapiens
tctttggaaatttccttttttttgaaagaaatttttccacatctctacgcgaaataatgcccttagggtgttttggacaaccttccactttcactgtcaaaatctgaaagattcgagtcataaataatcactaraatttattttctgaaatgttgcaaatttaaagcattttatgtctctttgctcagtgaaagtagtcagaaagattttagtgttttcaagtgcaacacagtacctaatttctctagcaaccatgtggcctagaagcccagaggggcattcactctcaaaaaaaaaaaaaaaattgttaaattaagggagttaattcggataggaaatcattgaacttcactgaaacaatgaacatcagtatttccctagctacaatggaaagatcaatccaatacctcacatctgttttgcagtctcatcaataatatattcccaggaaaattatcttccagacagttatcaatacaggtttgaaatagaaatattacttcacatttatatactaggagaggacttccatgaataggaagacagactgtgtagcagagtttcatgattctcaaagtaactactgcattt

SEQ ID NO: 557586 - DNA, 591 bp, Homo sapiens
tctttggaaatttccttttttttgaaagaaatttttccacatctctacgcgaaataatgcccttagggtgttttggacaaccttccactttcactgtcaaaatctgaaagattcgagtcataaataatcactaaaatttattttctgaaatgttgcaaatttaaagcattttatgtctctttgctcagtgaaagtagtcagaaagattttagtgttttcaagtgcaacacagtacctaatttctctagcaaccatgtggcctagaagcccagaggggcattcactctcaaaaaaaaaraaaaaattgttaaattaagggagttaattcggataggaaatcattgaacttcactgaaacaatgaacatcagtatttccctagctacaatggaaagatcaatccaatacctcacatctgttttgcagtctcatcaataatatattcccaggaaaattatcttccagacagttatcaatacaggtttgaaatagaaatattacttcacatttatatactaggagaggacttccatgaataggaagacagactgtgtagcagagtttcatgattctcaaagtaactactgcattt

SEQ ID NO: 557587 - DNA, 591 bp, Homo sapiens
tctttggaaatttccttttttttgaaagaaatttttccacatctctacgcgaaataatgcccttagggtgttttggacaaccttccactttcactgtcaaaatctgaaagattcgagtcataaataatcactaaaatttattttctgaaatgttgcaaatttaaagcattttatgtctctttgctcagtgaaagtagtcagaaagattttagtgttttcaagtgcaacacagtacctaatttctctagcaaccatgtggcctagaagcccagaggggcattcactctcaaaaaaaaaaaaaaaattgttaaattaagggagttaattcggatmggaaatcattgaacttcactgaaacaatgaacatcagtatttccctagctacaatggaaagatcaatccaatacctcacatctgttttgcagtctcatcaataatatattcccaggaaaattatcttccagacagttatcaatacaggtttgaaatagaaatattacttcacatttatatactaggagaggacttccatgaataggaagacagactgtgtagcagagtttcatgattctcaaagtaactactgcattt

SEQ ID NO: 557588 - DNA, 417 bp, Homo sapiens
gacacaatactaagaaatcataaaatttagaatacgaatgagaaatttaccaaagacagatatcatagggctaggctcacatctgtaatcccagcactgtgggaggctgaggcaggtggatcgtttcaacccaggagtttgagaccagcctgggcaacacggcaaaaccccatytctaaaaaaaaaaaaaaaaaaaattagcccagcatattggcgtgaacctgtagtcccaactactcaggtggttgaggtgggaggatcgcttcagcccagaaggcagaggttgcagtgagccaagatcgcatcaatgtactctagcctgggcaacagagtgagaccttgtctcaaaaaaaaaaaaaaaagatagacagatatcataaaaaagaacgaaatgcaactactggaagtaaagaattc

SEQ ID NO: 557589 - DNA, 421 bp, Homo sapiens
ataatatttaaaaagctaagtgaggtacaatatacagacacaatactaagaaatcataaaatttagaatacgaatgagaaatttaccaaagacagatatcatagggctaggctcacatctgtaatcccagcactgtgggaggctgaggcaggtggatcgtttcaacccaggagtttgagaccagcctgggcaacacggcaaaaccccatctctaaaaaaaaaaaaaaaaaaaattagcccagcatattggcgtgaacctgtagtcccaactactcaggtggttgaggtgggaggatcgcttcagcccaraaggcagaggttgcagtgagccaagatcgcatcaatgtactctagcctgggcaacagagtgagaccttgtctcaaaaaaaaaaaaaaaagatagacagatatcataaaaaag

SEQ ID NO: 557590 - DNA, 623 bp, Homo sapiens
ttgctctgttgcccaagctggaatgcagtggtgcaatcacggctcactgcagccttgccctcctgggctgtggtgatcctcctgagtagctgggactacaaggtacatgccgccacaccctgcgaattcatttatttatttatttgcacacacaggtcttgctagattgtccaggttggtcttcaactgctagtctccagcaattttccctcctcaacctcccaaagtgctaagattaaaggtataagctacygtacctggcctatagatttaaataaagagccatacgagtacacgctatggcagtaagagaggcagattggagacagaaagcccagatttagtagtggttaaaactgtagaaaacaaaggtaaaaagaacctagtcgcagtttagatcaacagatgtataataaaatatggcactcaagcccttcagaacttccagttccttctagcacagtgttcctggctttcttctaaattttttcaggtaactatgtatctcacaagcccaatgcttgagatgttttagtgccaatgatagtagcttttgtgaatttagcgtgtggggaaatggaacatggcaatagacaaaagacagtaagaaaaactaaacaaaa

SEQ ID NO: 557591 - DNA, 530 bp, Homo sapiens
tttctttattcttttactcaaaattattcacaaagggcctaagatatgccggtcagtggggattctcttggattctrtacctttatgggagccagcctgggaagagatcttgtcccagctcccaaacatgaattaggacatgaggctcactgctttggaaagccctctaatttttctgcttgttcccagcatgcctcaatcttggggtttggcctagaaggaaagtcatatctgcctgcttgcacttcccctccctggcctcttcttcctagttccccaccccactgcctccctaggctggaggaaacatactctctgtcatttgctgagtgttcactaccaatgacttataggaaaacttgacattcagacctccaaagttttcttttgataggtacaggtaatttttggaatttataaattcctctttgctcccaacaaatactgtgcttcaagattttgtctaagcttgccaaaatggccccaactgagcagtggcttctcaattctagcaagcatctgccctcccc

SEQ ID NO: 557592 - DNA, 530 bp, Homo sapiens
tttctttattcttttactcaaaattattcacaaagggcctaagatatgccggtcagtggggattctcttggattctgtacctttatgggagccagcctgggaagagatcttgtcccagctcccaaacatgaattaggacatgaggctcactgctttggaaakccctctaatttttctgcttgttcccagcatgcctcaatcttggggtttggcctagaaggaaagtcatatctgcctgcttgcacttcccctccctggcctcttcttcctagttccccaccccactgcctccctaggctggaggaaacatactctctgtcatttgctgagtgttcactaccaatgacttataggaaaacttgacattcagacctccaaagttttcttttgataggtacaggtaatttttggaatttataaattcctctttgctcccaacaaatactgtgcttcaagattttgtctaagcttgccaaaatggccccaactgagcagtggcttctcaattctagcaagcatctgccctcccc

SEQ ID NO: 557593 - DNA, 599 bp, Homo sapiens
tctgtacatactagggtgggatatgctgtttgtgcctgcatagaagggcttgctcttatgcagttagccttggtttcaaagcttcttaaactttagatccatgtctcccatcttttatctgaggagtttgtggatgtcctggtaggggaacttgtgggtcaaatacatttgagaattattgatttaatcaaagttacatagaattctttttttttttttttttcgagatggagtcttgctctgtcacccaggctggagtgcagtggtgcgatctcggctcactgcaacctccacctcctgggttcaagcaattctcctgcctcagcctcccaagtagctgggattacaggttcccgccaccacatctggctaatttttgtatttttagtagagatggggtttcaccatgttggccaggatggtctcaaactcctgaccttgtgatccacccatctcagcctcccaaagtgctgggattacaggcgtgagccaccgagcctggcccaaagttacacagatttctatagtgcagyggtgcaatcatagctcaccgcagccttgaactcctgggctcaagcaagtctccagcctcagcctcc

SEQ ID NO: 557594 - DNA, 599 bp, Homo sapiens
taaaactaacaaaatacctgcagaattcttctaattgtgagacaaacaagactacaataactcagtgtagttcacttttgttctaccatagactggacaatagatatggcttaggcttcagagatttgggggaccactcaaggtgccagattcaggatgtatcttactgtgtgtctggagagcaagtacttgagagaaaagacgtttagaagaaaataggtttgattgtgcaaagctgtagcagcgtttttaaataaataaatacatagatacatacgtaaaccatcaagcatctgagcttggtaacgattttaaagaagaaaacaacgcatgggttatatttctccgtagtcaccaaggtggtgacacccgcacatgggcttttagaacaacaaagcaaaattcttaatgctgatgtaacacttacaatgtttgtgttcccagggtctgaagagtatgcagaccaaaaagccaagcacatttcagaggcaaattatttgtatttttaagtatgtgtttgtacctgttttcctggagctgagcagattcacaagacatgggattccyggggctaaaaccggtaaagttcagggtgagta

SEQ ID NO: 557595 - DNA, 525 bp, Homo sapiens
tctaaggcagggcataaagcttttctgtaaaggaccaggtaataaatattttaatttttggggacgtgtaatctctgttgcagcttctcagctctgccactatagcaagataactgccatagacaataagaaaacacatgggcgtggctgtattccaataaaactatatttgcaaacccaaatmtggccatctggccctttgcctatctttgctgtaaagtaggatagcctgttgtgcatatttgatgaacagtggggatgtcagatttgagaatggctagtagagataattaaatcacatcagtatacattttaaaaacattttgatagtaaccacagaaaattcaacatctttaaaccaattaatttcatggcacttggtgtttttaaaatgaagtttgtgtgttacagttatccccctcaaggacctaaatgtgtatacatttactccaaagggagagaaatctataatctattgggaaaaaagtgttgaagtagattcaattctagatctaatgtgaatga

SEQ ID NO: 557596 - DNA, 525 bp, Homo sapiens
tctaaggcagggcataaagcttttctgtaaaggaccaggtaataaatattttaatttttggggacgtgtaatctctgttgcagcttctcagctctgccactatagcaagataactgccatagacaataagaaaacacatgggcgtggctgtattccaataaaactatatttgcaaacccaaatatggccatctggccctttgcctatctttgctgtaaagtaggatagcctgttgtgcatatttgatgaacagtggggatgtcagatttgagaatggctagtagagataattaaatcacatcagtatacattttaaaaacattttgatagtaaccacagaaaattcaacatctttaaaccaattaatttcatggcacttggtrtttttaaaatgaagtttgtgtgttacagttatccccctcaaggacctaaatgtgtatacatttactccaaagggagagaaatctataatctattgggaaaaaagtgttgaagtagattcaattctagatctaatgtgaatga

SEQ ID NO: 557597 - DNA, 611 bp, Homo sapiens
ctctgtcgcccaggctggagtgcaatgatgcaatctctgttcactgcaacctccgcctcctgggttcaagcgatttccctgcctcagcctctgagcagctgggattacaggtgcacactaccacacctggataacttttttgtatttttagtagagatggggtttcattatattggccaggttggtcacgaactcctgacttcgtgatcctcccaccttggcctccgaaagtgctgggatcacaggcgtgagctaccacaccgggcctactcaatccaattccttttactcaacacggactcctcagcagggtgccaaagacccagcctgaggtgatatgctgcctctactcactcactgactacagtatgagcctctgacataagatttaacttgctttctgatagaagctactttgcttctaaaartcttgaaatggtgaaattcctggtcatacaagactttttcatgacacaaaaacaagagtcaatggtctaatttttttatctatgaaatcttttctattacttcacaatcatgtgagtagttttatttaaaaaatgatcttatggacaaagaaatgtagttttgtaggaatgggttaatgtaaa

SEQ ID NO: 557598 - DNA, 600 bp, Homo sapiens
atggaattgaacaagtaaaacaaataaattcagatctcaaagacaaggtatttgagttaaaccaacccaacaaagacaaagaaaaaagaataagaaaatatgaacaaagtctccaagaagtctaggattatgttaaacgaccgaaactaagaataattggtrttcctgaggaagaagagaattctaaaagcttggaaaacatatttagggaactaatcaaggaaaactttcctggccttgctagagacctagacatgcaaatacaagaagcacaaagaacacctgggaaattcatcacaaaaaggtcatcacctaggcacattgtcatcaggttatccaaagttaagacgaaggaacaaattttaaaagctgtgagacagaagcaccaggtaacctataaaggaaaacatatcagattaacagcagatttctcagcagacaccctacaagctagaagggattgaggctctgtcttcaccctcctcaaacaaaacaattttcagccaagaattttgtattcggtgaaactaagcctcatatatgaatgaaaaatacagtctttttcaggaaaacaaatgctaagagaatttgccactacca

SEQ ID NO: 557599 - DNA, 407 bp, Homo sapiens
cgtggatgcggtgaacagggaacacttctgcactgctggtgggaatgtaaactagtacagtcactatggaaaatagtgtggagattccttaaagaactaaaagtagaactaccatttgatccagcaatcccactactgagtatctgtctacccagaggaagtcattatacaaattattatacattatacttgcacacatatgtttatagcagcacaattcacaattgcaaaattgcaaatgcccatctatcaatgagtggataaagaaaactgtggaatatatatatatgatggaatactactcggccrtaaaaaggaatgaattaacagcatttgaagagacctggacgagactagagactactattctaggtgaagtaattcaggaatgaaaaaccaaacattgt

SEQ ID NO: 557600 - DNA, 419 bp, Homo sapiens
agagctatacaaatcttcctttcacttgaacacttaaaactcattgtagtattattaagtggcctaacttcaatagtgttgtgtctcagggaatagaaaagctcgaagagagggagagagatggragaatgacaggtcaatggagcagtgagaaaacacacatttattgattaagtttgccatattttatgggcacagtctgtggcaccccccaaaaattaaaataataatatcaaagatcactgattacagatgattatatccaatataataataatgaaaaaggtttgaaatattgcaggcattaccaaaatgtgactcagagacatgaagtgagcacattgtcttgataaaatgccactaacagacttgacatacagatctgccaaagaccttgaatatatatttttagaaagcca

SEQ ID NO: 557601 - DNA, 484 bp, Homo sapiens
aaataataaaggccatatatgacaaacccacagctaacatcttcttgaacattatactaaatagaaaaaatctgaaatcctttcctctaagaattggaacaagaatgcccacgttcaccagtcttattcagcatgatattggcaatccaagccagagcaatcaggcaagagacacaaattaaaagcaccyaaattggaaaataagaagtccaattgtccctttttgcagataatatgatcttagatctagaaaaacctaaagacttgaccaaaaccactcatagatctgatagataaataaattcagtaaagttgcaagatataaaatcaacacacaaaaatcattagcatttctacacaccgataattaattagctgagaaagaaatcaagaaggcaatgtcatgtataatagctacaaaaaatgcataggaataaatttaaccatgaaggtgaaaaaatctctacaaggaaaactacgaaac

SEQ ID NO: 557602 - DNA, 572 bp, Homo sapiens
aattgttccaaacacagaaataataaacactcaagatgaatacccctaatacattgacttgatcattactttccatgcatgtaacaaaataaaacatgtaatgcataaatatgtaaaatatgtagycatttttaaaaaaacatccttagagtaactttcatctatctgaaaagtactactgggaactgccctactacacagtgccccagatcttcctgaggtctgaacgaaggatctaataatcctatcctggatttgatctttggcttgaagccctttcttgagagttgtctggccacctggagaagctgggaatgagaaatgccttatttttaattccaataagtcctggctttttatatttagtagtttattctttagctcttctatctcctctcactttttattatagagagtgagaagaaaccaggcagcacttccaacattcttcctgaaaatttccttagctagagcattcattaagtgcattttttatttgtcacattacttcaggcaacattgctaccaagatttccaccactacatgagtccactttcctccagcatccatt

SEQ ID NO: 557603 - DNA, 450 bp, Homo sapiens
actgtggcttcctgtgagcaaggtcatacccaaaaccaagagcaatcccaagtctcccctctgtgagaaagatgagaataggaggattcataaagcccttgtcctaataatatacatagccactgtcactgccacagactcagcctataatactgaagcaactgcagtcatcactgatgtagattataaactgaagaagctgtatagagacaataccacatggaaccagagccaccatgtsctgctcaatcagcaccctcaggcccatctgcaagtgaaagtcatcccctatgaaagccactctgtaaagtttgggagaggagactgtgccacaagatgtatagacaacaatacaaggacataaggaacatgaaaaatgaaggaaacatgacaccaccaaaggaacacagtaattctccagtaactaaccccaaacccagtggaaattaa

SEQ ID NO: 557604 - DNA, 520 bp, Homo sapiens
ggcaactatatgccaggcactttctrggtgctggaaacaactgtgaacaaaacaggcacagtccttgctccagtggagttgatattctagtaggcatatttactcacctattcctttccctggaccacactctttgggaagcaggagccacctcatctcttcttgtgtctcttgtaacccttgtagcttgtgccttgctgggggtttaaaatgcttgttgaatgaatacatgctccttagcagaagcatatgtagaggccgccaattcagaagatcctgggacaggaaaggaatgaaacaggctgagtgtctgggatgcacaggggaatggtagtgacattgacaaaccagagaatgtgggctctggatgacagccactgctgtcatttcagttggatgtggccatctgggaatgtgagccctgtttgccaaaatgtgctgattttgcaagagaagccagaaatgaaaattttaatgtgaaatctcatttttaaatgttggaatttagtgcaaaaaccca

SEQ ID NO: 557605 - DNA, 484 bp, Homo sapiens
agcctcatgatcatgcctgtcaggatgagcagtatccctaaatatattacagtgtaacagctctgaaatgatgatacaaaatctattggtagaatggggcaagacttgggtagaggtaacctcaaaattgctagggagagacttctgagtatagatcaagaagtaaaggagaaagcggggrgaaaaaacttcaaaatttccttctacataaaatgagcctgctaatctaaattccaatactgtaagttttaccataagagaaataccatatgttttactataagagaaaatcttatggtaaaatttatcataagagaaaattaccgtaagagaaaatcttatggcaaaacagctatcaaaattaataatcagaacactagtttactataaaaaataattttatacaagtctgacagattttaaaagtcagtgtttaagtgtttaagatgttcaaagaaataaagaattcaaattcatcaaaaga

SEQ ID NO: 557606 - DNA, 467 bp, Homo sapiens
cccaaaccagttcctctttctgcttaggactgcccctctcattttatcttctccaagatcttccattaatgattccctctccccactgcatcatcaactkctctctgtccattatttttgtttttgtttttgtttttttcatctcagcttctaaacttgtgaacctctttctctcccctttagaaaaaaaccctttttcaacccttctttcccctctggctatggcccagcccctttcctttctgtctccatcatacttctcgaaatctcatgttcctcatctcctaatttccctttcaattttttttttttttttttttttttttttgagacagagtcttgctctgtcacccaggctggaatgcaatggtacgatctcagctcactgcagcctctgcctcctgggttcaagagagtctcccgcctcagcttcccaagtagctgggattacaagcatgcaccaccac

SEQ ID NO: 557607 - DNA, 714 bp, Homo sapiens
tacctacataacaaacctgcacattctgcacatgtaccccagaacttaaagtataataaaaaataaaatataaagaaataaaaattaaaaagtatgaggacatatacagtatgaagcactttacagtgaattccagtatttatcgttaagtgaagaaagcaagttggagaaaaatgtagtatagtatgtcaccattcatctaaatatttacctattttttaactgaaaggataaattaaaacctttaaaaaaacatggttacctaaaaggagsaagggagcagagtagtaaaaataggaacagtacagtatgtgggtatctcataaaacctgtattgtagatgtgaatttggaaccatataaagtcatttacattattataataaaagagaaacaaagttaaaaagcaggccagttgcactggcttgcatctgtaatcccagtgctttgggaagccaaggcaggaggattgcttgagcccaggagttcaaggctgcagtgggctatgaccatgccactacatttcagcctgggcaagagagtgagactgcatctcaaaaaaaccaaaaaaacaaaatacaatcccataaaagtgaaacccaaaaaaataaatgaacttacttgtatgtgaagttggtggcataaccatagagaattattccaagtgactttaaaacacaacaactaaaacacactaagttaacagtatatagta

SEQ ID NO: 557608 - DNA, 579 bp, Homo sapiens
cctgggccaaaagggaatccactaccttcaagggaaggacctagtcctgggaagattcatcacctgctgactaaagagtccttgggccctgaataaccagcagcaatacctggggagtacacagtgggcctcagactctgagatgtactggcttcaggtgggacccagcacaatcccagctatggtggctatggtggaagactccttctgtttgagaaaagtagaggaaaaagtaaaggggactttgtcttgcaccttaggtaccagcttgtacacagtggggtagagcaacaagcaggctctaagggtccctaagtccaggcctaggctcttggacagaatttctggacctgccctgggagggstccagaggggagcccactgtcctgagtgtgagtcccaggcctggcagcattcaccataagctgataaaagagtctttgggcttgaactgaacatcagctgtggcctggcagaacctgccatggactgttggtggtgctggccacaagaagaagctccgctgcctgtggaaaggagaggaaacactggggaaggcctctatattgtggtttgagt

SEQ ID NO: 557609 - DNA, 484 bp, Homo sapiens
acttattgaagaggctgtccttttgccaatgtatattcttgatgtctttgttgaaaatcagttggctgtagatacatgtatttatttctgggttctctattctgtttcagtagtctatgtacctgtttttatgccagtactgtgcttttctggttactatcttgyactatattttgaggtcaggtagtgtgatgcctccagcttggttctttttctcaggtttgctttggctagtccaagtcttttgtggttccatatgaattttaggattgtttttatttctgcaaagaatatcattgatattttgatagagattgtacttaatctgtagatcatttggaatagtgtggtcattttaacaatattaattcttccaacccatgaacatggaatgtcttttcatttttaggtcctcttcaatttttttcatcagtcttttattgttttcattgtagaggtctttcacctccttggttaaatttat

SEQ ID NO: 557610 - DNA, 484 bp, Homo sapiens
acttattgaagaggctgtccttttgccaatgtatattcttgatgtctttgttgaaaatcagttggctgtagatacatgtatttatttctgggttctctattctgtttcagtagtctatgtacctgtttttatgccagtactgtgcttttctggttactatcttgcactatattttgaggtcaggtagtgtgatgcctccagcttggttctttttctcaggtttgctttggctagtccaagtcttttgtggttccatatgaattttaggattgtttttatttctgcaaagaatatcattgatattttgatagagattgyacttaatctgtagatcatttggaatagtgtggtcattttaacaatattaattcttccaacccatgaacatggaatgtcttttcatttttaggtcctcttcaatttttttcatcagtcttttattgttttcattgtagaggtctttcacctccttggttaaatttat

SEQ ID NO: 557611 - DNA, 484 bp, Homo sapiens
acttattgaagaggctgtccttttgccaatgtatattcttgatgtctttgttgaaaatcagttggctgtagatacatgtatttatttctgggttctctattctgtttcagtagtctatgtacctgtttttatgccagtactgtgcttttctggttactatcttgcactatattttgaggtcaggtagtgtgatgcctccagcttggttctttttctcaggtttgctttggctagtccaagtcttttgtggttccatatgaattttaggattgtttttatttctgcaaagaatatcattgatattttgatagagattgtacttaatctgtagatcatttggaatagtgtggtcattttaacaatattaattcttccaacccatgaacatggaatgtcttttcatttttaggtcctcttcaatttttttcatcagtcttttattgttttcattgtaraggtctttcacctccttggttaaatttat

SEQ ID NO: 557612 - DNA, 580 bp, Homo sapiens
gtgcactaatctctgtcctgagggtagagccctcgtaacctgattgactcccaaagcccacctcagtactatcacattgaggattaagttcaatataacttttgaggagacacaacattcagaccatagctttatctatcatgaatttggggaaattttcagtcactgttgcttcaaatgtttcttctgtttctttctctttttttttttttttttttttgagacagagtcttgytctgttgcccaggctggagtgcagtggcatgatctcagctcactgcaagctcctcctcccaggttcacgccattctcctgcctcagtctcccaagtagctgggactacaggcgcctgccaccacgccctgctaattttttgtatttttagtagagacagggtttcaccgtgttagccaggatggtctcgatctcctgaccttgcgatctgcccgcctcggcctcccaaattgctgggattataggtgtaagccaccacgcctggctttctttctctttttcttctctttctggtatttccaaaaagtctccatgttccaccttttgtaattgtctcacagttctt

SEQ ID NO: 557613 - DNA, 580 bp, Homo sapiens
gtgcactaatctctgtcctgagggtagagccctcgtaacctgattgactcccaaagcccacctcagtactatcacattgaggattaagttcaatataacttttgaggagacacaacattcagaccatagctttatctatcatgaatttggggaaattttcagtcactgttgcttcaaatgtttcttctgtttctttctctttttttttttttttttttttgagacagagtcttgttctgttgcccaggctggagtgcagtggcaygatctcagctcactgcaagctcctcctcccaggttcacgccattctcctgcctcagtctcccaagtagctgggactacaggcgcctgccaccacgccctgctaattttttgtatttttagtagagacagggtttcaccgtgttagccaggatggtctcgatctcctgaccttgcgatctgcccgcctcggcctcccaaattgctgggattataggtgtaagccaccacgcctggctttctttctctttttcttctctttctggtatttccaaaaagtctccatgttccaccttttgtaattgtctcacagttctt

SEQ ID NO: 557614 - DNA, 648 bp, Homo sapiens
tataggaattttctgtaggtatataagtaataatttgaaggtcacaactagatgccttttcgtgtaaccgtatcttgaatggaacaaacattttctttctacgtaattatacataaataacycaatgctttttaatacccatgaaaagccattagctcaaagacacttgcaaacttgtatcaggttgttttccttggtgtgtattaagtttgaagcaaaggggattttcacataccaagacgaagcagaagtcttccaccaagttgaaatcatcacgttgcaatttaatcatgtgatacaaccaattttttgatgtgttatgccattcgccaaataccaaaaattttttaggggaaactttacatcctcaatactatacacttccagctacaccaccacctaacagggactttaaaaagaatacaaagtacggtatgccttctcagtgccttgttagtaattcagttacagttctgctgaactttctttaaaggaatacaattctcaatcttacactgttcagagcacaagcatagcttattgtatacaagagatgtgcatcagttcccactcctcagggactgtatgaatttggctttatttttatttatttttttgacggagtctcactctgtcaccaggctggag

SEQ ID NO: 557615 - DNA, 648 bp, Homo sapiens
tataggaattttctgtaggtatataagtaataatttgaaggtcacaactagatgccttttcgtgtaaccgtatcttgaatggaacaaacattttctttctacgtaattatacataaataactcaatgctttttaatacccaygaaaagccattagctcaaagacacttgcaaacttgtatcaggttgttttccttggtgtgtattaagtttgaagcaaaggggattttcacataccaagacgaagcagaagtcttccaccaagttgaaatcatcacgttgcaatttaatcatgtgatacaaccaattttttgatgtgttatgccattcgccaaataccaaaaattttttaggggaaactttacatcctcaatactatacacttccagctacaccaccacctaacagggactttaaaaagaatacaaagtacggtatgccttctcagtgccttgttagtaattcagttacagttctgctgaactttctttaaaggaatacaattctcaatcttacactgttcagagcacaagcatagcttattgtatacaagagatgtgcatcagttcccactcctcagggactgtatgaatttggctttatttttatttatttttttgacggagtctcactctgtcaccaggctggag

SEQ ID NO: 557616 - DNA, 584 bp, Homo sapiens
acttcagagagcatactatgtgattaatacataaatattaaaaattatccaatttttgatttaagaacaacacagtttggatctagtcattaaaacatatgcagaggtgtcaaaggcaagtaacactaccacctaaggttattcagaggaactgtgaagatgtagcacggacctctaaggtgtctaaaatcccttctgatggaaagcttatggaacactatctgccaaaaacactgaaagcaccacttttatatttagatccaatgctgagtgatatagtcactgttgggataggtttttatttgggaaaatggagaggattctcaaaacagattcatggcttgcatgcagtgacaccctatcaagagcctggaaagacaccatgaaatcacctcaactcaagtggtgggcccacctactcatagtcagtgttacaytagccagctctagggctctgacaacataatgagttttgagatagtatactttaaagaaaaaaagaagagtttattttaaagcaaataactaaactgtattttaacttagcacaattaactgcagcatatttacttcatagcccctta

SEQ ID NO: 557617 - DNA, 474 bp, Homo sapiens
gttttatctgcgtgttatttacaatctgctgcgtaacaaattactacaaacttagtaccttaacacatatttatttcacagtttctgtgggtcaggagatcagaaatggttctatttcaaggtctctcacagggctgcaatcaagatgttggcatggctggggtctcatctgaaggctggactggagaatctacttccaaacttatgtggtagttggaagartttagttcctcaaggctgctaaactgatggcctgtgttccttgcctctgggatggtagcttgcttcaacaaagtgtgcaagcagagaagacagagagagtccactagcaagatagaagccacaatctcttgtaatctatcatttttgctgtattctactggttaaaaataactcattaggttagcctactggctctgaaggggaagagattatacaaaggcatgaatttctggaggagggaatgagggcaaa

SEQ ID NO: 557618 - DNA, 474 bp, Homo sapiens
gttttatctgcgtgttatttacaatctgctgcgtaacaaattactacaaacttagtaccttaacacatatttatttcacagtttctgtgggtcaggagatcagaaatggttctatttcaaggtctctcacagggctgcaatcaagatgttggcatggctggggtctcatctgaaggctggactggagaatctacttccaaacttatgtggtagttggaagagtttagttcctcaaggctgctaaactgatggcctgtgttccttgcctctgggatggtagcttgcttcaacaaagtgtgcaagcagagaagacagagagagtccrctagcaagatagaagccacaatctcttgtaatctatcatttttgctgtattctactggttaaaaataactcattaggttagcctactggctctgaaggggaagagattatacaaaggcatgaatttctggaggagggaatgagggcaaa

SEQ ID NO: 557619 - DNA, 523 bp, Homo sapiens
actactgctacactctaagtcattttaccttataacgcagagttgtaacaygctactctgagcagctcatgacatctgcttgaaatttaagttgggcccctagtatgtgtttattataaagattttgatgctgcttttcagagttgggtaacctactttaccccctaagctaatgtttcccaaatacacccaaacccacagaaaggaaaactattcatcattaactcacagccaacatcataaacattttatatctagagctgatgatacagtcaggtatttaccaacactcatgtatatatgtagagtgtcaagaaataattgcttatccttactagattcaacattagccttactagattcaacatattctaatgtttcacatattatttttatttcttaattttttttaaagatggggttttactctgttgcccaggctgaaatgcagtggcgtgaccaggatttcgaccagaagttcgactgcagcctcgaactccttataacaaagaatcctgctgcc

SEQ ID NO: 557620 - DNA, 509 bp, Homo sapiens
cagagttgtaacacgctactctgagcagctcatgacatctgcttgaaatttaagttgggcccctagtatgtgtttattataaagattttgatgctgcttttcagagttgggtaacctactttaccccctwagctaatgtttcccaaatacacccaaacccacagaaaggaaaactattcatcattaactcacagccaacatcataaacattttatatctagagctgatgatacagtcaggtatttaccaacactcatgtatatatgtagagtgtcaagaaataattgcttatccttactagattcaacattagccttactagattcaacatattctaatgtttcacatattatttttatttcttaattttttttaaagatggggttttactctgttgcccaggctgaaatgcagtggcgtgaccaggatttcgaccagaagttcgactgcagcctcgaactccttataacaaagaatcctgctgccttagcctcccgagtagctaggac

SEQ ID NO: 557621 - DNA, 410 bp, Homo sapiens
ttataaagattttgatgctgcttttcagagttgggtaacctactttaccccctaagctaatgtttcccaaatacacccaaacccacagaaaggaaaactattcmtcattaactcacagccaacatcataaacattttatatctagagctgatgatacagtcaggtatttaccaacactcatgtatatatgtagagtgtcaagaaataattgcttatccttactagattcaacattagccttactagattcaacatattctaatgtttcacatattatttttatttcttaattttttttaaagatggggttttactctgttgcccaggctgaaatgcagtggcgtgaccaggatttcgaccagaagttcgactgcagcctcgaactccttataacaaagaatcctgctgcc

SEQ ID NO: 557622 - DNA, 509 bp, Homo sapiens
cagagttgtaacacgctactctgagcagctcatgacatctgcttgaaatttaagttgggcccctagtatgtgtttattataaagattttgatgctgcttttcagagttgggtaacctactttaccccctaagctaatgtttcccaaatacacccaaacccacagaaaggaaaactattcatcattaactcacagccaacatcataaacattttatatctagagctgatgatacagtcaggtatttaccaacactcatgtatatatgtagagtktcaagaaataattgcttatccttactagattcaacattagccttactagattcaacatattctaatgtttcacatattatttttatttcttaattttttttaaagatggggttttactctgttgcccaggctgaaatgcagtggcgtgaccaggatttcgaccagaagttcgactgcagcctcgaactccttataacaaagaatcctgctgccttagcctcccgagtagctaggac

SEQ ID NO: 557623 - DNA, 410 bp, Homo sapiens
ttataaagattttgatgctgcttttcagagttgggtaacctactttaccccctaagctaatgtttcccaaatacacccaaacccacagaaaggaaaactattcatcattaactcacagccaacatcataaacattttatatctagagctgatgatacagtcaggtatttaccaacactcatgtatatatgtagagtgtcaagaaataattgcttatccttactagattcaacattagccttactagattcaacatattctaatgtttcacatattatttttatttcttaattttttttaaagatggggttttactctgttgcccaggctgaaatgcagtggcgtgaccaggatttcgaccagaagttcgactgcagcctcraactccttataacaaagaatcctgctgcc

SEQ ID NO: 557624 - DNA, 461 bp, Homo sapiens
cccaggctgattctgaactcctgttctcaagcaatcctcctgcctggtcttctcaaactgttgggcttacaggtgtgagtcactgagcccagcttgtattcttttgattttaaaaaaatattctgaatgtgatccaccaaattaatttcaccatccactaataggtagcaacctgaatgaaaaatactrttataaactttacacaaaaccagagattataaacatttgcttccaaggagatgagagaggtaaaaggtacttgtttgctctgatgggccctgtttccttcagtgccaggaagagtggctctcagacctttcttctagcatccctcatgtatgcagtgttggttattattttcaaggccttggtaacaaaatgcccccctagtgtgaccagtcagactgacagtccatatctgtaatatggtggtaagtttcctttgcatgtctttctttctg

SEQ ID NO: 557625 - DNA, 461 bp, Homo sapiens
cccaggctgattctgaactcctgttctcaagcaatcctcctgcctggtcttctcaaactgttgggcttacaggtgtgagtcactgagcccagcttgtattcttttgattttaaaaaaatattctgaatgtgatccaccaaattaatttcaccatccactaataggtagcaacctgaatgaaaaatactattataaactttacacaaaaccagagattataaacatttgcttccaaggagatgagagaggtaaaaggtacttgtttgctctgatgggccctgtttccttcagtgccaggaagagtggctctcagacctttcttctrgcatccctcatgtatgcagtgttggttattattttcaaggccttggtaacaaaatgcccccctagtgtgaccagtcagactgacagtccatatctgtaatatggtggtaagtttcctttgcatgtctttctttctg

SEQ ID NO: 557626 - DNA, 593 bp, Homo sapiens
tgactaacaacggagaacaagaaacaaatctggtgaataccagaattargacatgtgtcagccaggcgcagtggctcatgcctgtaatcccagcactttgggaggccgaggcgggtggatcacgaggtcaggagaccgagactatctgagggagaatcttcaggttttttcttctcttttgctgtaacaccagtcaaaaaaattgacaaagatgaggtattaagtattgacgttaatactctacctgaaaataaaaaccatggaacctatctataggttaaaacagcatactgataaaaaacacatatactttgatgcagagatgtacgataatcatgaattagaattagcatcctgatttagtgttctaccaaaaaccctaagtgaacacagaatctatttaaaaccaaagaaaacaaaaaaatcttgtgtttacttaatagtcattgaaaagaattactacaaatttctagaatttaaaaaggttaaaaattttaaagtgttgcctaactatacttagcatacaatagtttaccaaaatatccatgcatttgcagcaattgaaaaaaatcttaaaacataagcaagtatta

SEQ ID NO: 557627 - DNA, 593 bp, Homo sapiens
tgactaacaacggagaacaagaaacaaatctggtgaataccagaattaggacatgtgtcagccaggcgcagtggctcatgcctgtaatcccagcactttgggaggccgaggcgggtggatcacgaggtcaggagaccgagactatctgagggagaatcttcaggttttttcttctcttttgctgtaacaccagtcaaaaaaattgacaaagatraggtattaagtattgacgttaatactctacctgaaaataaaaaccatggaacctatctataggttaaaacagcatactgataaaaaacacatatactttgatgcagagatgtacgataatcatgaattagaattagcatcctgatttagtgttctaccaaaaaccctaagtgaacacagaatctatttaaaaccaaagaaaacaaaaaaatcttgtgtttacttaatagtcattgaaaagaattactacaaatttctagaatttaaaaaggttaaaaattttaaagtgttgcctaactatacttagcatacaatagtttaccaaaatatccatgcatttgcagcaattgaaaaaaatcttaaaacataagcaagtatta

SEQ ID NO: 557628 - DNA, 651 bp, Homo sapiens
taggttaaaacagcatactgataaaaaacacatatactttgatgcagagatgtacgataatcatgaattagaattagcatcctgatttagttttctaccaaaaaccctaagtgaacacagaatctatttaaaaccaaagaaaacaaaaaaatcttgtgtttacttaatagtcattgaaaagaattactacaaatttctagaatttaaaaaggttaaaaattttaaagtgttgcctaactatacttagcatacaatagtttaccaaaatatccatgcatttgcagcaaytgaaaaaaatcttaaaacataagcaagtattagtatacatatgaaactaatccaaagccaactgtgattagttcctgtaaggaaagttaacaattgccaagaatggaaggtgactagagttgcatctagtttgcctgtgttcaagcatgatactagataaaattaaataaaaactgttactctatgggtagctaacactataaaatctaagaccattcatatggctgaaaacaacccatccccagccaccatcaatgcaaagggcaaaaaattagaaacagaaaaaacttctatatgcaacctgttctgatctattaatgtaaagaacaacttctggctaaaggagtttaataaagtaagcca

SEQ ID NO: 557629 - DNA, 647 bp, Homo sapiens
ttaaaacagcatactgataaaaaacacatatactttgatgcagagatgtacgataatcatgaattagaattagcatcctgatttagtgttctaccaaaaaccctaagtgaacacagaatctatttaaaaccaaagaaaacaaaaaaatcttgtgtttacttaatagtcattgaaaagaattactacaaatttctagaatttaaaaaggttaaaaattttaaagtgttgcctaactatacttagcatacaatagtttaccaaaatatccatgcatttgcagcaattgaaaaaaatcttaaaacataagcaagtattagtatacatatgaaactaatccaaagccaactgtgattagttcctgtaaggaaagttaacaattgccaagaatggaaggtgactagagttgcatctagtttgcctgtgttcaagmatgatactagataaaattaaataaaaactgttactctatgggtagctaacactataaaatctaagaccattcatatggctgaaaacaacccatccccagccaccattaatgcaaagcgcaaaaaattagaaacagaaaaaacttctatatgcaacctgttctgatctactaatgtaaagaagaacttctggctaaaggagtttaataaagtaagcca

SEQ ID NO: 557630 - DNA, 647 bp, Homo sapiens
ttaaaacagcatactgataaaaaacacatatactttgatgcagagatgtacgataatcatgaattagaattagcatcctgatttagtgttctaccaaaaaccctaagtgaacacagaatctatttaaaaccaaagaaaacaaaaaaatcttgtgtttacttaatagtcattgaaaagaattactacaaatttctagaatttaaaaaggttaaaaattttaaagtgttgcctaactatacttagcatacaatagtttaccaaaatatccatgcatttgcagcaattgaaaaaaatcttaaaacataagcaagtattagtatacatatgaaactaatccaaagccaactgtgattagttcctgtaaggaaagttaacaattgccaagaatggaaggtgactagagttgcatctagtttgcctgtgttcaagcatgatactagataaaattaaataaaaactgttactctatgggtagctaacactataaaatctaagaccattcatatggctgaaaacaacccatccccagccaccattaatgcaaagsgcaaaaaattagaaacagaaaaaacttctatatgcaacctgttctgatctactaatgtaaagaagaacttctggctaaaggagtttaataaagtaagcca

SEQ ID NO: 557631 - DNA, 553 bp, Homo sapiens
tacacttgcctacattaacctttctgacgttcacctccagccaagacaattccctgctcaaaaaaacaagtacctacaaactaaacttctttccccaactttcacagtcctctaacattacastgaccatcctttcagtgtgttctttctacactgcaatctggactacctgacattccaaatcacctccccaaattagcttttcacttaaccctgtgttcaaacaaaatacaactaattctcaaggtgatgttcaaatgctccaccaggaaagggaaaaaagtagtagctgcagagaatttattatgtatataataatacgtccaatgcacttaaactcttaatttttatactatctacactgttaggtaaacaatattagctcctatcttaaaatgagagaaagggatgcagggaataacagctggaatttgaaccacatctgactccaaaaatgttttcttaacacaactctgctgccttgacaagatggcagatagatacaatgccgtctagtgtagctatgtggctacctgatctctgctgaagaaaa

SEQ ID NO: 557632 - DNA, 553 bp, Homo sapiens
tacacttgcctacattaacctttctgacgttcacctccagccaagacaattccctgctcaaaaaaacaagtacctacaaactaaacttctttccccaactttcacagtcctctaacattacagtgaccatcctttcagtgtgttctttctacactgcaatctggactacctgacattccaaatcacctccccaaattagcttttcacttaaccctgtgttcaaacaraatacaactaattctcaaggtgatgttcaaatgctccaccaggaaagggaaaaaagtagtagctgcagagaatttattatgtatataataatacgtccaatgcacttaaactcttaatttttatactatctacactgttaggtaaacaatattagctcctatcttaaaatgagagaaagggatgcagggaataacagctggaatttgaaccacatctgactccaaaaatgttttcttaacacaactctgctgccttgacaagatggcagatagatacaatgccgtctagtgtagctatgtggctacctgatctctgctgaagaaaa

SEQ ID NO: 557633 - DNA, 612 bp, Homo sapiens
aactgtaatttttaacattcagtgtgatgagaactggcttcgataattctctcattttaaagataagaagccaaacggtcacaaaggaagtgactggcccaagatcattaattaatggcagagtcagtactagtaccaagcttttcaagctcatggaccrgtgctccactatacttccacagaatacaatgttgggagcctgaaacctgtatgttaagtcaaaattgtatgtaattgtcataggccatgactacacagaattaacattcaagatttttgtgcaaattcaaaaatgtcttccccaccaaatagtattctcttaatttgcaaatactgctgatcacactgtaataatcgccacacatcagcatatccttgatgtaactttagcagtataatttagttcttgcctgataaacatgaaagaacctacttttatttccaattccaaaaaagtcaagctcctttgaaccctattgttaaaatacgatatatatacataactatttccttacataattaagtcaaattcatatggaagtattaaaatatagtaagactttttgaagctcagaccacttttcaattcctagctatacatttgaaacacat

SEQ ID NO: 557634 - DNA, 581 bp, Homo sapiens
ccagcactttgggaggctgaagcaggaggattgtttgagccaggagttcaaggccaccctgggcaacatggaaaaatcccatctctacaaaaaatacaattagctgggcctagtggcgtgtgactgtctgtagtcctggcttcgtggcaggctaagccaagaggctctcttgagctaggaggtcgaagccgcagtaagctgtgatcataccactgtactccagcctgcacaacaagaccctgccttaaaaaaaaaaaaaaaaaagaccaaaatgtccccttgccatactatttggatggcaaggggacattctgaccagcttcagaaaaaaagtgagagagtggccagggaaggaatcttggaataaaaagtacagctagagaaattaagtgacttaccwtaatggcctttacttcttggcgaatcattttcagtaaagaattctgatcttctgcccatcgaggtggtgttttgggagaatactaaaaaaaaaataaaaatcacaaaagagcatttaaaacacttagaaacaatttcacaatgaaatgattccattctttcctgtttaccttgtaactttt

SEQ ID NO: 557635 - DNA, 377 bp, Homo sapiens
gatgataaattaccctctttaagtgaagataactaaaatcattgatgtttttacgaactttgaaagataagtttccaaaatgacttttgtgagaggaattatttgtagaagttaaggcaaaaatataaatacaaacccactgatagctaatcagatttggaagtacttttttctgactcttctcatcccctccactatgtggcctcctctgtgacaccttaaacaacttkgactcctattccacatgaactgatcctcctaatcacactctgatttgtccatatattccttttctaacactggcatagatacatacatgtacacacacatatgtgtgtatatatatatatagatagatatatctgtatatatataca

SEQ ID NO: 557636 - DNA, 638 bp, Homo sapiens
cgataaaatgagatattcctgttctcctatgagttaygtttaccactatccccatttttccaggtggaggaactgggatacatagaggttaagtgatccacccgaggtcacaaagctaggaagtggtaaagccagaatacatgaacttgagtgaactgtctcaagtccatatctttaagtagagttagctcaacacctctgttgacttttccttttttagatgaaagcaagagcagagaatgttgttttatgtgtgtctagggtacttattcagatgcattttgaagtttctaaagaactggtcttttttgtcattttctaaccatgtgtaaaaagttaaaactattgtcacttgctattttctgaaaattgtctagattcagggtggtggtgggatggatcaagcaaagataattgctaaagaaacactcatggtctaaagcagaggttggcaaacgttttctgaaaaggaccagagagtaaataatttaggctatgggccatatgttatctgttgtaacttttcagctctgctcttgtagcatgaaagcagacatagacaaaacataaacgaatgattaaggatgtgttccaacaaaactttagttacaaaaccagtttgtgggctaggtttggcc

SEQ ID NO: 557637 - DNA, 539 bp, Homo sapiens
tcattaaaacatatttattaagtgtacttaaaaagtgccaaggtgaaatgcaaatgcaataaaagtcacaaaacaaatgtgtatacaaaacacaataatttaaaatctgtcaaaataagatagtggatcttattcattttcagaagacagctaagtaaatgtgaaaaagatgaaatcttaatacttccctagcactttaagttttaaatattgtgaaattataggttttcttcaaagcagagcaggacttacatcattaggatctggaaagtagcactgtcctttcattttttactagagtggagcattcttacagttttttcacagtttgtggacttattaataatgccctagagggtagkcataaaagctaaagcttcagttttcttttcttgttcaatgttcttccaaccttatacatattgtatatgccttgccacctggctggtagtgctaatcccaatcattggcaaggtaagaggcagccgagactggaatatctactctggctcaaatgcagggaaaggccttatgtagtg

SEQ ID NO: 557638 - DNA, 539 bp, Homo sapiens
tcattaaaacatatttattaagtgtacttaaaaagtgccaaggtgaaatgcaaatgcaataaaagtcacaaaacaaatgtgtatacaaaacacaataatttaaaatctgtcaaaataagatagtggatcttattcattttcagaagacagctaagtaaatgtgaaaaagatgaaatcttaatacttccctagcactttaagttttaaatattgtgaaattataggttttcttcaaagcagagcaggacttacatcattaggatctggaaagtagcactgtcctttcattttttactagagtggagcattcttacagttttttcacagtttgtggacttattaataatgccctagagggtagtcataaaagctaaagcttcagttttcttttcttgttcaatgttcttccaaccttatacrtattgtatatgccttgccacctggctggtagtgctaatcccaatcattggcaaggtaagaggcagccgagactggaatatctactctggctcaaatgcagggaaaggccttatgtagtg

SEQ ID NO: 557639 - DNA, 597 bp, Homo sapiens
ctagcagaagaaaagaaacaattaaaattagagaagaactggataatattgcaaagcaaaaatgcaaacaaaagaccaatgaaaccaaaagtttgttctttgaaaaaattagatgaatagaccactagctagattaacaaaaaaagagaagatacaaatcagtacaatcaggtataacaaatatgagattacaactgatcccacagaaatacaaaagatcctcagaaaatactgtgagtaattctgttccacaaattagaaaatttagaggaaatatatcttactagaaccaaataatctcccaagattgaaccaggaacagattaaaatcctgaataggtaaatatcaaaatctgaaattgaatacagaaaaaaacccaaaaagccatggataagttatatttacagctgaattctaacagatatagaaagaagaacaggtactattccaaaaattgaggaccaggkgctgctccctaactcattccatgaagctagcattagcctaatatgaaaacatggcagagaaacaaaaataaaaaaaggatctttgggtcagtatccctgatgaatatagacacaaaaattcccaacaaa

SEQ ID NO: 557640 - DNA, 539 bp, Homo sapiens
aaatacttaggaaaatacagctaaccaaggagatgagatatctctataaagagaactacaaaacaatgctgaaacaaatcacagacaacacaaagtaacattccatgctcatggattgggagagtcaatatcattaaaatgaccatactgcccaaagcaayttacagattcaatgccattcctatcaaactacaaacatcattcttcacagaattaggaaaaaactattcaaaaattcatgcggaaccaaaaaagagccttaacaggtcattcaaacaaagaagagcaaagcctgaggcatcacattatctgacttcaaactatactgaacagctacagtaaccaaatggcatggcactgctacaaaaagagacatagactaatgcatcaaaatagagaacccagaaataaagtcacacacctactgccatctgattttcaacaaagctgacaaaaatatgcgatggggaaaggactctctatgtaataaatggtgctgcaatagctggctagttatatgcacaagaatgaaactggac

SEQ ID NO: 557641 - DNA, 539 bp, Homo sapiens
aaatacttaggaaaatacagctaaccaaggagatgagatatctctataaagagaactacaaaacaatgctgaaacaaatcacagacaacacaaagtaacattccatgctcatggattgggagagtcaatatcattaaaatgaccatactgcccaaagcaatttacagattcaatgccattcctatcaaactacaaacatcattcttcacagaattagraaaaaactattcaaaaattcatgcggaaccaaaaaagagccttaacaggtcattcaaacaaagaagagcaaagcctgaggcatcacattatctgacttcaaactatactgaacagctacagtaaccaaatggcatggcactgctacaaaaagagacatagactaatgcatcaaaatagagaacccagaaataaagtcacacacctactgccatctgattttcaacaaagctgacaaaaatatgcgatggggaaaggactctctatgtaataaatggtgctgcaatagctggctagttatatgcacaagaatgaaactggac

SEQ ID NO: 557642 - DNA, 539 bp, Homo sapiens
aaatacttaggaaaatacagctaaccaaggagatgagatatctctataaagagaactacaaaacaatgctgaaacaaatcacagacaacacaaagtaacattccatgctcatggattgggagagtcaatatcattaaaatgaccatactgcccaaagcaatttacagattcaatgccattcctatcaaactacaaacatcattcttcacagaattaggaaaaaactattcaaaaattcatgcggaaccaaaaaagagccttaacaggtcattcaaacaaagaagagcaaagcctgaggcatcacattatctgacttcaaactatactgaacagctacagtaaccaaatggcatggcactgctacaaaaagagacatagactaatgcatcaaaatagagaacccagaaataaagtcacacacctactgccatctgattttcaacaaagctgacaaaaatatgcgatggggaaaggactctctatgtaatraatggtgctgcaatagctggctagttatatgcacaagaatgaaactggac

SEQ ID NO: 557643 - DNA, 626 bp, Homo sapiens
agaccattagtcagatgacaatagtttttcagtgccataaggtgttggaaatacataagtggatattatggtatcctcatcctctccctaagttcacaacccagtagagaacacaggcattcataaaaaatgccttatgtggatgggagtggtggcacatgcctataatcccagaattttgggaggctaagacagcaggatcacttgaactcaagagtttgggattagcttgcacaatatagtgagatctcatctcaacaaaaaatatgattttttaattagytgggtgtggtagcgtgtgactgtggtcccagctttttggggagctgaggtggaagaatcacttgatgttgggaggttgaggctgtagtgagccaagatcacaccaccacactcctgactacacagcaaagtgagaccttgtctcaaaaataaaaacaaacaaaaaaacccatgtatcataattctgataaagacatataaacagaaaaacttatctgggaaattatcttaaataataatttaagggttggggaaagatatccttaataagtggatttgaaagctcagccctgaagacacattaaaaaggatgaagaaaagagtttggggtatattctaagcag

SEQ ID NO: 557644 - DNA, 626 bp, Homo sapiens
agaccattagtcagatgacaatagtttttcagtgccataaggtgttggaaatacataagtggatattatggtatcctcatcctctccctaagttcacaacccagtagagaacacaggcattcataaaaaatgccttatgtggatgggagtggtggcacatgcctataatcccagaattttgggaggctaagacagcaggatcacttgaactcaagagtttgggattagcttgcacaatatagtgagatctcatctcaacaaaaaatatgattttttaattagttgggtgtggtagcgtgtgactgtggtcccagctttttggggagctgaggtggaagaatcacttgatgttgggaggttgaggctgtagtgagccaagatcacaccaccacactcctgactacacarcaaagtgagaccttgtctcaaaaataaaaacaaacaaaaaaacccatgtatcataattctgataaagacatataaacagaaaaacttatctgggaaattatcttaaataataatttaagggttggggaaagatatccttaataagtggatttgaaagctcagccctgaagacacattaaaaaggatgaagaaaagagtttggggtatattctaagcag

SEQ ID NO: 557645 - DNA, 389 bp, Homo sapiens
tcaaataactaaaagttatgtacctacatttcaaatgcaggttttgtcatttaaaaaatttaatgtcatttactgccattaagtctgcatttgcttatagttggaaactttcacgcaatgtcaaatctgcaatgcttttyacagtaaactctctactggggaaactggtattttcttattttcttcatcaaagttaggacaattgtcaaacatatcttggcaagtcttttagttgctgtgtttaatatatatactaaggttttggatcaggttgagatgtcacagcttcccaaatgtttcaaaataatgttctggttaatatttaatgtaactacagtaagtcttattgagttttgcatcaatcaaagacatcaaatacgtgaaggaaa

SEQ ID NO: 557646 - DNA, 389 bp, Homo sapiens
tcaaataactaaaagttatgtacctacatttcaaatgcaggttttgtcatttaaaaaatttaatgtcatttactgccattaagtctgcatttgcttatagttggaaactttcacgcaatgtcaaatctgcaatgcttttcacagtaaactctctactggggaaaytggtattttcttattttcttcatcaaagttaggacaattgtcaaacatatcttggcaagtcttttagttgctgtgtttaatatatatactaaggttttggatcaggttgagatgtcacagcttcccaaatgtttcaaaataatgttctggttaatatttaatgtaactacagtaagtcttattgagttttgcatcaatcaaagacatcaaatacgtgaaggaaa

SEQ ID NO: 557647 - DNA, 353 bp, Homo sapiens
gctggtctggaactcctgagctcaagtgatccagctgcttaggcctctcaaagggctggtattacaggcatgaaccactgcactgagccaactctctggtctttgttattcaattgctgtgtgcctcactaatctgattcttagtactcccaaactctgaccttagtgatataaccatattctaaattcatcatcatrgaatgcccatccatcctcatttctgttctgtctagccaaacctgcagttggagtcactacaaaactggtggcacagaattccaacaaaggacttccccatagcatcccaagatggggctgattgagattccaaagaaggaggtactagatgccag

SEQ ID NO: 557648 - DNA, 584 bp, Homo sapiens
aaatctgtgttgtttttagcaaaatttgtggtaatttattacagcagcaacaggaaactaacacagcaatgaagctcctgtgatagttaatattgagtgtcaacttgattggattgaaggttgcaaagtattgttcctaggtgtgtctgtgagggtgatgccaaaggagattagcatttgagttactsaactgggagtcgcagacccatcctcaatctgggaaccatagctgccagcacgactaggataaaagcaggcagaggaacgtgagaggactagactggctaagtcttctggcctccatctttctcgcgtgctgagtgcttcctttcctctaacattggactccaagttcttcagctttttgactcttggacctacaccagtggtttgccaggggctctcgggcctttggccacagactgaaggctacactgtctgcttccctactttcaaggttttaggacttggactggcttccttgctcctcagcttgcagacagcctattgtgggacttctccttgtgattgtatgagtcaacactccttaataaaccccccttcctatatacatctgtcctatt

SEQ ID NO: 557649 - DNA, 576 bp, Homo sapiens
tttttagcaaaatttgtggtaatttattacagcagcaacaggaaactaacacagcaatgaagctcctgtgatagttaatattgagtgtcaacttgattggattgaaggttgcaaagtattgttcctaggtgtgtctgtgagggtgatgccaaaggagattagcatttgagttactgaactgggagtcgcagacccatcctcaatctgggaaccatagctgccagcacgactaggataaaagcagrcagaggaacgtgagaggactagactggctaagtcttctggcctccatctttctcgcgtgctgagtgcttcctttcctctaacattggactccaagttcttcagctttttgactcttggacctacaccagtggtttgccaggggctctcgggcctttggccacagactgaaggctacactgtctgcttccctactttcaaggttttaggacttggactggcttccttgctcctcagcttgcagacagcctattgtgggacttctccttgtgattgtatgagtcaacactccttaataaaccccccttcctatatacatctgtcctattaatc

SEQ ID NO: 557650 - DNA, 535 bp, Homo sapiens
ataacttctgaaaaagctgagaagtctcacttcagattatggacagtaggtaggtcagaaaagacaaactagtcaccagcaaggctgcagcttgaatagaaaataggggctgcagatcttggctcaaaatacagaggaactttttaacagttggaacttcctccaagtgaaataggttcagaaactaaacacattgggaatattccagaagaggctgtctggctagatatggtagaagagatttctgcatttgggttctaagatccttttcagagatagtcctaggatttgtccttgactgggtagacctctgcacaaagcaggagctccaagagctattcagatcaatcaatcaatcaatcaacctatcaatcaacattttagtagattgaagtttaatatgctttcctaaaggtaagatttaataatgggaagaagaggattaaatgctatggkgtacctgaggtgtataaagagaggtattcacaggggttagattatacattatggaaaatgcgaaagagaaagaagagaa

SEQ ID NO: 557651 - DNA, 583 bp, Homo sapiens
gaagttaagttgttcccggttactatagtaactgccaacatactagcatttttctgtcattattatacttgaaaaagcaaacaatctgttttaaattctaaagcatggagaggactgtgcctctaaaataggtccctacctggctgaggaggaggcacaacagatatttgccacacttgggattggggctccactttcctagactgaaatatagtttctgaagggctaagcaagggtaagttgtttatgctgttgcaggaaccacartgatgggaaagaaaaatgatatggtatttccatcccgggccttaaaataagtaaaaaaaatttcaaaactgctttcacacggtgaaacgtaactaaatgtgatttttttcgtattctaggagcacagtccatgtgtctcactgtacatattcagtctctgccctttattaccatttaccaccatcatctgcaagggataatttattttattcataaaagaaaagactttctcttcctttcaatgaattctccctctattcgcttttttcccgtttaaaacctttccttttgcacagaaagaaagctgaaaataaat

SEQ ID NO: 557652 - DNA, 583 bp, Homo sapiens
gaagttaagttgttcccggttactatagtaactgccaacatactagcatttttctgtcattattatacttgaaaaagcaaacaatctgttttaaattctaaagcatggagaggactgtgcctctaaaataggtccctacctggctgaggaggaggcacaacagatatttgccacacttgggattggggctccactttcctagactgaaatatagtttctgaagggctaagcaagggtaagttgtttatgctgttgcaggaaccacagtgatgggaaagaaaaatgatatggtatttccatcccgggccttaaaataagtaaaaaaaatttcaaaactgctttcacacggtgaaacgtaactaaatgtgatttttttcgtattctaggagcacagtccatgtgtctcactgtacatattcagtctctgccctytattaccatttaccaccatcatctgcaagggataatttattttattcataaaagaaaagactttctcttcctttcaatgaattctccctctattcgcttttttcccgtttaaaacctttccttttgcacagaaagaaagctgaaaataaat

SEQ ID NO: 557653 - DNA, 592 bp, Homo sapiens
ggggttgttctctggcaggcagagtgggggtcacaaggtgctcagtaggggagcttttgagccaggatgagccaggagaaggaacttcacaagacaatgtcatcagttaaggcaggaattggccatctggatgtgtatgtgcaggtcacaggggatatgatggcttagcttaggctcagaggcctgacaatatgtttctgtagtgtccagtctggacagtttctcagtctagacttcacggccttgacacttttgaagattagaagcagktgttttgtagaacatcccttgtttgggtcagtctgatgtttcttcatgattaaaatcaggttcttcatctttggcagaaataacacagaagtgacattgcactcttttaattgcatcctatcaggcagctcacagtttcgatttgttacattactgataatgttcattgtcatcacttgactaaggtggtgtgtgtcaaccttctccaccacaaagtaattcttgtcccctttatattttaataaagattttatgggaaagtactttgaaactttgtaaatcttctgttccttgtgaaaaattttatttatttgttcgttta

SEQ ID NO: 557654 - DNA, 592 bp, Homo sapiens
ggggttgttctctggcaggcagagtgggggtcacaaggtgctcagtaggggagcttttgagccaggatgagccaggagaaggaacttcacaagacaatgtcatcagttaaggcaggaattggccatctggatgtgtatgtgcaggtcacaggggatatgatggcttagcttaggctcagaggcctgacaatatgtttctgtagtgtccagtctggacagtttctcagtctagacttcacggccttgacacttttgaagattagaagcaggtgttttgtagaacatcccttgtttgggtcagtctgatgtttcttcatgattaaaatyaggttcttcatctttggcagaaataacacagaagtgacattgcactcttttaattgcatcctatcaggcagctcacagtttcgatttgttacattactgataatgttcattgtcatcacttgactaaggtggtgtgtgtcaaccttctccaccacaaagtaattcttgtcccctttatattttaataaagattttatgggaaagtactttgaaactttgtaaatcttctgttccttgtgaaaaattttatttatttgttcgttta

SEQ ID NO: 557655 - DNA, 516 bp, Homo sapiens
aaaaggattaaaatgataaattttatgttgtatataatttaccacaatgaaaaacataaaaatctttaaaatatcaagcaagtgcatcaaggcctttgcctgggcccctcatcccccaggtgtccgcatggctcatgctctcactgtattcaggtgctttgcccaaatgtcacctcctcagaaatgcttgccccccaccccctatctgaaatggcacttccatgcacacttctccatcactttatctgcctcatttttctttgcagcatttagcatcctgagtgctgaaccygctggcctttcaaagtgtctggtgcttagctggagctgcgcataggaacagcagggtcttatgcatttggggttcaaaggtggccgtattcttggaggtcccagtagtaggaagtagtaggtcctcacctgggggtgcagggctgttccctggatgtgcagactggatcatatggagggtaaatgagatacagggagacagtagttctagaacaagaaggcgag

SEQ ID NO: 557656 - DNA, 494 bp, Homo sapiens
taattttcccagcatgaattattgataacacatgtgaaacattgccaaccagggaagctcattagagactcagtgcccagggcttttattagggactgatcatgtaggcaattccctttctgacacatacccaaattctagactcccagtaggaaaacaggtgttcagcataaacagtgttaggcacagtcagtcactattattaagggagtagggagtgggaggcttcccaaaatctaagttcccagtctccagacaagggccaaactaagcaggcctttctaaggataagcagccaggcctgctgtgaactcttttctgcacagcttggcataacatgaattttttttttaattatacyttaagttctagggtacatgtgcacaacatgcaggttacatacgtagacatgtgccatgttggtttgctgcacccatcaacttgtcatttacattaggtatttctcctaatgctatctctccgccagcccccca

SEQ ID NO: 557657 - DNA, 499 bp, Homo sapiens
aacttttatgtctagctagaggattgtaaatgcaccagtcagcactctgtgtctagctcagggattgtaaacgcaccaatcagcaccctgtcaaaacagaccaatcagctctctgtaaaacagaccaatcagctctctgtaaaatggaccaatcagcaggatgcaggtasggccagataagataataaaagcaggcctccccgtcaagcagcggcaacgtgctcgggtcaggaagctttgttgttttgttctttgcaataaatcttgctgctgttcactctttgggtccgcactgctcttaagagctgtaacacttaaccgtgaaggtctgcagctttactcttgaggccagtgagaccacgaacgcactgggaggaatgaacaactccggatgggaggaacgaacaacttcagacacactgccttaagaactgtaacaccacaaaggtctgtagcttcacttctgaagccagtgaaaccacgaactcaccaggagaga

SEQ ID NO: 557658 - DNA, 499 bp, Homo sapiens
aacttttatgtctagctagaggattgtaaatgcaccagtcagcactctgtgtctagctcagggattgtaaacgcaccaatcagcaccctgtcaaaacagaccaatcagctctctgtaaaacagaccaatcagctctctgtaaaatggaccaatcagcaggatgcaggtagggccagataagataataaaagcaggcctccccgkcaagcagcggcaacgtgctcgggtcaggaagctttgttgttttgttctttgcaataaatcttgctgctgttcactctttgggtccgcactgctcttaagagctgtaacacttaaccgtgaaggtctgcagctttactcttgaggccagtgagaccacgaacgcactgggaggaatgaacaactccggatgggaggaacgaacaacttcagacacactgccttaagaactgtaacaccacaaaggtctgtagcttcacttctgaagccagtgaaaccacgaactcaccaggagaga

SEQ ID NO: 557659 - DNA, 499 bp, Homo sapiens
aacttttatgtctagctagaggattgtaaatgcaccagtcagcactctgtgtctagctcagggattgtaaacgcaccaatcagcaccctgtcaaaacagaccaatcagctctctgtaaaacagaccaatcagctctctgtaaaatggaccaatcagcaggatgcaggtagggccagataagataataaaagcaggcctccccgtcaagcagcggcaacgtgctcgggtcaggaagstttgttgttttgttctttgcaataaatcttgctgctgttcactctttgggtccgcactgctcttaagagctgtaacacttaaccgtgaaggtctgcagctttactcttgaggccagtgagaccacgaacgcactgggaggaatgaacaactccggatgggaggaacgaacaacttcagacacactgccttaagaactgtaacaccacaaaggtctgtagcttcacttctgaagccagtgaaaccacgaactcaccaggagaga

SEQ ID NO: 557660 - DNA, 587 bp, Homo sapiens
acctgtaatcccagcactttgggaggccggggcaggaggatcacctgaggtcaggagttcaagatcagtttggacaacacagtgaaaccccgtctctactaaaaatacaaaattagccgggcatggtaatacatgcctgtaatctcagctactcgggaggctgaggcaggagatcgcttgaacctgggaggcagaagatgcagtgagccgagatcgcgccattgcattccagcccgggcaacaagagtaaatctccgtctcaccaaaaaaagaaaaaagaaaaaaaaaaaaaagaaagaaatkctcccctcagttctccaggctgggctgactgcccacgtcaaaacaccctaggcatcatcactccgtgttgagagccaagtggccaggtaggacccaacactacgcaggcacagacgttttccatgttaagaacccaaatccatacagtccttagcacccaaataggttcagaaaaggcagtccacacaaatctgccaaataaatgaagttcagatattgcatttacgctaaataccttggaaattgagagggaatctggagaggaagatggatgtaggaaaaac

SEQ ID NO: 557661 - DNA, 587 bp, Homo sapiens
acctgtaatcccagcactttgggaggccggggcaggaggatcacctgaggtcaggagttcaagatcagtttggacaacacagtgaaaccccgtctctactaaaaatacaaaattagccgggcatggtaatacatgcctgtaatctcagctactcgggaggctgaggcaggagatcgcttgaacctgggaggcagaagatgcagtgagccgagatcgcgccattgcattccagcccgggcaacaagagtaaatctccgtctcaccaaaaaaagaaaaaagaaaaaaaaaaaaaagaaagaaatgctcccctcagttctccaggctgggctgactgcccacgtcaaaacaccctaggcatcatcactccgtgttgagagccaagtggccaggtaggacccaacactacgcaggcacagacgttttccatgttaagaacccaaatccatacagtccttagcacccaaataggttcagaaaaggcagtccacacaaatctgccaaataaatgaagttcagatattgcatttaygctaaataccttggaaattgagagggaatctggagaggaagatggatgtaggaaaaac

SEQ ID NO: 557662 - DNA, 596 bp, Homo sapiens
ctgggccatttatggaatgcaagccctgaccacacagacttacttacatgccaggacagccaccaggtagcctttcccactctaggttccactgtgagtgctctctctctctctctctctcactatgctcccaagaggagtcttacatcaaccccttcctcaaatctccctcactggatgtcacagtcataggcctgaaaagcagcatgcaaactgaatttttgtaaagcaggacccatttccccatggacagtcataagagatgagtgaacacaaygtagcacttaatttctgtcttcacgattacttcacgataaatctggattccaaagggactataagctctcacatggaaggaagcaagatctctactcctcccccagtgttgagtggacagggagtacaccgcagacacctgttggccaaccaattctaattccctttagctagcatcccctaagctagagctagagctagagctatttccttgcagccttccttttctctagcaaagtccttccatgcagtagctaatgacctgtaaacacttaatgagctagagaaacattccattgaaaggaataccactgtgcatc

SEQ ID NO: 557663 - DNA, 596 bp, Homo sapiens
ctgggccatttatggaatgcaagccctgaccacacagacttacttacatgccaggacagccaccaggtagcctttcccactctaggttccactgtgagtgctctctctctctctctctctcactatgctcccaagaggagtcttacatcaaccccttcctcaaatctccctcactggatgtcacagtcataggcctgaaaagcagcatgcaaactgaatttttgtaaagcaggacccatttccccatggacagtcataagagatgagtgaacacaatktagcacttaatttctgtcttcacgattacttcacgataaatctggattccaaagggactataagctctcacatggaaggaagcaagatctctactcctcccccagtgttgagtggacagggagtacaccgcagacacctgttggccaaccaattctaattccctttagctagcatcccctaagctagagctagagctagagctatttccttgcagccttccttttctctagcaaagtccttccatgcagtagctaatgacctgtaaacacttaatgagctagagaaacattccattgaaaggaataccactgtgcatc

SEQ ID NO: 557664 - DNA, 428 bp, Homo sapiens
tccaaactgccaggaggccactcaatgccatatctataaaactgtcaggcagcccaacctgggggcactttagctttggatcttgggtttgagccagattccattttccccacaggccctgagacccacagggaagagcttttgcattataatgtaaatggaggggttgagctggtttgggggaacccttgacaggagccagttaaaaccaaacgaaagtctttcctaaggcttaggtggagcctctagaaagaggggctgagagcctggggaagagccaaccaccagcagttcctcagagttcttcccactggggctgtgcagccaactgcgtttccaggcacactgagatgcccatactyatatccaatactgtgcaggggcactggccaggcacaaatcccagctgcctccacggcattactctc

SEQ ID NO: 557665 - DNA, 609 bp, Homo sapiens
ttatttaatatgaagtcataaaggaataaggtgggtccctaagccaatatgactkatgactgatatggcttggttctgtgtccccaccccaatcttatctcaaattgtaatccccatatgtcagtggaaggacctggtgggaggtgactggattatgggggcagatttccccgttgttctcgtgatagtgaggtttcacaagatctggtagtttaaaactgtgtggcacttcctcctgctctctgtttgtctctcctgccatcatgtaagatgtgccttgcttcccccttgccttccaccatgattggaagtttctgaggtctccacagctatgcagaactgtcagtcaattaaacctcttttctttataaattacccagtcttgggtacttctttttttttttttttttttttgagacggagtctctgttgcccaggctggagtgcagtggcatgatctcagctcactgcaacctccacttcctggggtcaagtgattctactgcctcagcctctcgagtagctaggattacaggcacgcaccaccacactcagataatgtttgtatttttagtagatacggggtttcaccatgttggccaggctggt

SEQ ID NO: 557666 - DNA, 609 bp, Homo sapiens
ttatttaatatgaagtcataaaggaataaggtgggtccctaagccaatatgactgatgactgatatggcttggttctgtgtccccaccccaatcttatctcaaattgtaatccccatatgtcagtggarggacctggtgggaggtgactggattatgggggcagatttccccgttgttctcgtgatagtgaggtttcacaagatctggtagtttaaaactgtgtggcacttcctcctgctctctgtttgtctctcctgccatcatgtaagatgtgccttgcttcccccttgccttccaccatgattggaagtttctgaggtctccacagctatgcagaactgtcagtcaattaaacctcttttctttataaattacccagtcttgggtacttctttttttttttttttttttttgagacggagtctctgttgcccaggctggagtgcagtggcatgatctcagctcactgcaacctccacttcctggggtcaagtgattctactgcctcagcctctcgagtagctaggattacaggcacgcaccaccacactcagataatgtttgtatttttagtagatacggggtttcaccatgttggccaggctggt

SEQ ID NO: 557667 - DNA, 609 bp, Homo sapiens
ttatttaatatgaagtcataaaggaataaggtgggtccctaagccaatatgactgatgactgatatggcttggttctgtgtccccaccccaatcttatctcaaattgtaatccccatatgtcagtggaaggacctggtgggaggtgactggattatgggggcagatttccccgttgttctcgtgatagtgaggtttcacaagatctggtagtttaaaactgtgtggcacttcctcctgctctctgtttgtctctcctgccatcatgtaagatgtgccttgcttcccccttgccttccaccatgattggaagtttctgaggtctccacagctatgcagaactgtcagtcaattaaacctcttttctttataaattacccagtcttgggtacttctttttttttttttttttttttgagacggagtctctgttgcccaggctggagtgcagtggcatgatctcagctcactgcaacctccacttcctggggtcaagtgattctactgcctcagccyctcgagtagctaggattacaggcacgcaccaccacactcagataatgtttgtatttttagtagatacggggtttcaccatgttggccaggctggt

SEQ ID NO: 557668 - DNA, 569 bp, Homo sapiens
cgctctgtgtgttctagaggtttggagttcatgatgattggggagggcgggagacaagaaaaacagactttgatggtgaacaaacagtatgttttccattagcttaatattaagagcacttagaagtgttgttgttgtactctaggatagcaggtctcaagtgtaaaatacatcctgttctccttatatagagcacactgccaagcacagccaaggcagttgggacaagatttcctttcgcaaggagcctggtgggtaacgatggtgtgctgctgagaaggctcttacacagacagcataggtctgctgttaccaggcctgcagagggaagccctggtggaagcaccacctagcctgagaacatctacagagacatttcatcctctctgacccaaaacaaaataaacaccacaaagtgaaccaacacaagcaggaagaccggacttaacaaacaagtatgtctacatttgactgtttmcgtcaagtgaattgagagtgtggcgtaaaattactacagattttgtcatggtatttttcaatgagaaatctgagaatccatctttgcactt

SEQ ID NO: 557669 - DNA, 569 bp, Homo sapiens
cgctctgtgtgttctagaggtttggagttcatgatgattggggagggcgggagacaagaaaaacagactttgatggtgaacaaacagtatgttttccattagcttaatattaagagcacttagaagtgttgttgttgtactctaggatagcaggtctcaagtgtaaaatacatcctgttctccttatatagagcacactgccaagcacagccaaggcagttgggacaagatttcctttcgcaaggagcctggtgggtaacgatggtgtgctgctgagaaggctcttacacagacagcataggtctgctgttaccaggcctgcagagggaagccctggtggaagcaccacctagcctgagaacatctacagagacatttcatcctctctgacccaaaacaaaataaacaccacaaagtgaaccaacacaagcaggaagaccggacttaacaaacaagtatgtctacatttgactgtttaygtcaagtgaattgagagtgtggcgtaaaattactacagattttgtcatggtatttttcaatgagaaatctgagaatccatctttgcactt

SEQ ID NO: 557670 - DNA, 601 bp, Homo sapiens
taagaccaaaaactatagcaawtaaagatgttgagactcttctcagaaatcaaagaaattctcttaactgaaaaaacatcttcaatgagccttcagtgtactcttgtgcatattaggtttatctgtgtttaaattaatcagattttctcaaagtaattcctgaataatatgaaactgattgcatatacagtgatgaaaatgtctttcctacattggctgacatgaatcagctttttctttcacttcattgcttaagataattacttgtatttgtgaagaatgcctctcttacttagacatttccaaggcagaacttcaaaatgggtatgatagaattacccccaagtttcacacagaacattaggatttattcagtttaaattaagaagtctgactcaacatttattttttaaaaaaatggaaatccctgccctttccacttttctttctctttctttttgttttccatttctttttttccttcctggtttaaattcagcatggcaggtgaacaattttataagtactgtattaggggtactgagagccaagtttctcagtgccagagaagacaattacaaatgtggaaagaagaaggcta

SEQ ID NO: 557671 - DNA, 468 bp, Homo sapiens
tgagaatcttctttgaaccgagaatagtgtataagaaatcaccaaaaacccagtccctgtcattaaagagctcacagtctagtgaaggatacatcatccaatttcattacaatgtcattgctrtgacagaagcacacatatcttatggaattacatctaaggcccagatctcttgcctggcatccagatccatgtcatcaaggtcctattgaacatttttatttggatattgtttctattacctattactgactagtgtaacacctgaagcttagtggcttaaaacaacaatgatttgttatttttcatcaatttgaggattgactgggctcagctgagtggttcttctgctgaggtcactcctgtgtctatcttcagataggtgtttggctgtggctgaaacatgcaagatggactctcagaggccaggtgcggtggctcacatctgtaatcccagtgctttgaaaa

SEQ ID NO: 557672 - DNA, 468 bp, Homo sapiens
tgagaatcttctttgaaccgagaatagtgtataagaaatcaccaaaaacccagtccctgtcattaaagagctcacagtctagtgaaggatacatcatccaatttcattacaatgtcattgctatgacagaagcacacatatcttatggaattacatctaaggcccagatctcttgcctggcatccagatccatgtcatcaaggtcctattgaacatttttatttggatattgtttctattacctattactgactagtgtaacaccygaagcttagtggcttaaaacaacaatgatttgttatttttcatcaatttgaggattgactgggctcagctgagtggttcttctgctgaggtcactcctgtgtctatcttcagataggtgtttggctgtggctgaaacatgcaagatggactctcagaggccaggtgcggtggctcacatctgtaatcccagtgctttgaaaa

SEQ ID NO: 557673 - DNA, 580 bp, Homo sapiens
accaataaatatggcaacagtaatgagatgtcaactttgtgataatgttttattacataagaatctgtcctagtaaaatggggagagcttgtcctttgaagaaggacactgccataatttttacagctgagtaataatgagtactgccaacaacyttcacagcttggaagccatttctttcccacttgagcctctgatgacacctcagccccagccaacccctccattgcttaactccaaaccagttaagccatgctcagattatgacacacagaaactgagataataaagcatggtgggtttttttgtttgttggcactggagtgccgtggtgcaatctccactcactgcaacctccgccccctgggttcaagcaattctcctacctcagcctcccaggtagctgggattacaggcatctgctaccacacccagctaatttttgtatttttattagagatgggggtttccatgttggccaggatggtctcaaactcctgacctcatgatcagcccatctcggcctcccaaagtgctgggattacaggcatgaaccactgcccccagacaaagcatgttg

SEQ ID NO: 557674 - DNA, 595 bp, Homo sapiens
acccaaaaccttatgaggaaaaggcaattgttatttctaaaatgacactgctattggacctctaaaaaaccagagaaactagcaatttagcctaatccaaagaataattgagtgaaatcattcttatgactggcttctatgggaaggtagacataagagttcatattgtaaattccatttataagttcagatataagaaagatgattatttagtgaaagtaattaaagtattggtyacatcttgggcagaggtgtgaaggagccttctgagtggctggaaatgcttgtatcttgatctggttagttgttacaatggccatagatatatgtaaacattcaccaagctatctgcttagaatttgtgcatgttgctgtatgcatattatacctcaatttaaaaaaccttccttggcttagttgacaaaagattcaaccaaaaaagttaactagacaacactgatgctgtagcttctaaaagtacccagaagcaaattgctttataaaacattaaataaaaaccatgtcatcagtgtcatcagttgtgccactggcatcacataattttagacatatacactttggacaaatgtatata

SEQ ID NO: 557675 - DNA, 385 bp, Homo sapiens
aagcacaggtaaccaaagcaaaaatggacaattgggatgacatcaagttaaaaagctttcgtatggcaaaggatacaatcaacaaagtgaagagacaacccacaaaatgaaaggaagtacttgcaaactacccattcggcaaggaattaataaccagaatatataaagarctcaaacaactctataggaaaaaaaatctaataatccaatttaaaaatggacagaagatctgaatagacatttcacaaaagaagacataaatggcagacaggcatatgaaaaggtgctcaacatcactgatcatcagagaaatgcaaatcaaaactacagtgagacatcatctcaccccagttaaaatggcttatatccaaaagacaggcaataa

SEQ ID NO: 557676 - DNA, 576 bp, Homo sapiens
ctgggattacaggcgtgagccactgtgcccagccccaggtaatattttaaagtagaaatgtgtcctgagcactttcatgttaaggaagaattccaamagaggaatgcacaagaacgcacaatgcaagcatgaggtcccctcccccataggctctggactaattttcaacaaataaaagcatacaaatggcaactgcttcctttacttgtttgccttatcaagatggatggagagcagccacttcctagaattatcattggcctatttgtgtcacataccaggaaacagatttttcaagaataaaagaaagaaagcagttaaccaaaattacagcaactcagagtggggaaagcttgcactggggatatatattttgaacactaggatattacacttgatcctcatatctaaaaccatatttctatcacagcttacaaagcagaaaacataaatcactagcagagatatctttctgaggtatgcttaggcttcttttttcctcctataacacaggatttagctttggaatttacacttccctaacattagagaacaactttcagcaaagacaggggt

SEQ ID NO: 557677 - DNA, 576 bp, Homo sapiens
ctgggattacaggcgtgagccactgtgcccagccccaggtaatattttaaagtagaaatgtgtcctgagcactttcatgttaaggaagaattccaacagaggaatgcacaagaacgcacaatgcaagcatgaggtcccctcccccataggctctggactaattttcaacaaataaaagcatacaaatggcaactgcttcctttacttgtttgccttatcaagatggatggagagcagccacttcctagaattatcattggcctatttgtgtcacataccaggaaacagatttttcaagaataaaagaaagaaagcagttaaccaaaattacagcaactcagagtggggaaagcttgcactggggatatatattttgaacactaggatattacacttgatcctcatatctaaaaccatatttctatcacagcttacaaagcagaaaacataaatcactagcagagatatctttctgaggtatgcttaggcttcytttttcctcctataacacaggatttagctttggaatttacacttccctaacattagagaacaactttcagcaaagacaggggt

SEQ ID NO: 557678 - DNA, 511 bp, Homo sapiens
taatctttctttagttatagaggcctcagccatgaacttagcaatgggtgagaaaaagaaatcatttctctcctataggagcttatactgaaaagcaagatagggacctacatgaccatggtggagaagaaaggacattgtgaaggataaggcggcaagaatggagaaggagttagagataaggttgatttatggatatgagtaaagataaagaatctctgggatggagaaatgaacaagggtcttgagaagtaatgaattaattaattaaagggatgataatcagaaaaaattatatttgtagaaagtggccagagaacacagggagcccatggagaagactggtcaggattggagaaatgagagatcagcaagtgatacttcatgctgcatgttcccaataaaggttatttacctctttcaagggctamatttctcagctgctaattaggtcaaactactgggattcttggtctccctttagaaaattgtgttttatccagcttttgta

SEQ ID NO: 557679 - DNA, 539 bp, Homo sapiens
aaatcatgtgccacacatcctttatgtcagtaagattcataataagtttgtgctgtgtgtgtgtgtgtgtgtgtgtttgtgtatgtacatgttataggacatataagagagatgattgttatagaatatataagagagatggttgtaccacaaacccagtaaagacagagcagatattaccaaatgtaaaatttccaaagacagaaaattagacatgatgagtccagatttccatatttaaaatttgtaagtataggtgtaaatctgggtcacaggaaatctttacaaatgaaagaattaacagatgctgatcaaagcagatggaattgaccagtgttttacattttwaaaaaaattacctatagtcattgtttatacttttcttctcttcacaggaagtattaactcaagcaactaatattcgctaggttttatatatatatagggagaatatatacacatacacgcacatacacacatatagatcagatgctgtactaaacatactacatggaacattcatttagtgaccacaatac

SEQ ID NO: 557680 - DNA, 634 bp, Homo sapiens
gtctctggatgtctgagggtascagaagatggatgttccaggttaaggaaagatagataaaattcaccctttctccacctttttgttctaattcggccatcaatagattagatgatgcctgcccacactggggagtgaggttggatcttatttactcagtctactgatttgaatactaatctattccagaaacaccctcacagacacactcagaaataatgttttaccaactatctgggtatctgggtgaagacccagtcaagttgaccaatcatagtccaaaccataatagtactcttaaccattatagtactcattttttctggggattctctcagtgtatattcgaatatttgctgactgcataaggataaagttatagcaccaggcttactagacattaaaagagactcagttcaacaattgtgtacttcaggtcttctttgtccaggcacagttctaggcactgtagatactgaaagaaaaaaagcatgttctgagggcactgagcaggatgacttgccttttcccctcacagtcacctcatagccaggattactgaagagagctgcccaaggttgtgggttgagaagacaatagcaacctgttgacctgagtcttacgagaagtaggt

SEQ ID NO: 557681 - DNA, 412 bp, Homo sapiens
aaggtgtagttcttgatgctgcagttcaaggtagcaaaggtccttgattggagactttccaccattcatccccctcacatgtcaggctcttatcgaactgagtacctagcctgatgmagagcagagggataaaaggaagaagagatgttctttcttccttttagatttttgtaacttttggggaaaagggagtggagagggagagacaagttcatgggtcattacaatgttgagtgataagtattttaacataaataagtacagagcactgagagaaggggcttttaattcatactcaggataggaaggctttctggcatgaaaaacggttaatagaaagagctaaagggagtgggggacatggggcgaggaaaacatttcagggagtgggagacgcgtgtgcaaagccaca

SEQ ID NO: 557682 - DNA, 558 bp, Homo sapiens
aacaggtttagtgattgcattcatctcctagagctgcccccaacaaatgaccaccaacaggtggcttaaaatgagagaaatgtattcttccacagtcctagaggccagaagtctagaatcaaggtgtcatcaaagccacactccctccgaaggctccagggaggaatccttccttgcttcttccagcttctgatggccccaggcattcttggctcatgcctgcatcactccaatctctgttcccatgttcacatggctttctcgatatgtatcaaatctccctctcctttctctgatagggacacttgtccttgggcttagggtccaccctaaattaaggatgatctcatcctaagattcttacatctgcaaagaccctatttccaaataaagccacattcacagttacgtgrtgggggatgttaggacttgggcttaggtatttgggagacaccattaaacctactacagtgatcatagagtgcttctcaacaatgccacatgtggaagtcaattaaaagcaacctggagcaacacagctggagaaacgcttggtgc

SEQ ID NO: 557683 - DNA, 602 bp, Homo sapiens
gaggcctctgcttcctttgggaaggcattgggaggcttcaagtgggggaatagttaatcagatttatactgtaagtcaaactctgtgccttccacaggaggataggctgacggagataaaatgagacaagcaaggaagctgttgccattgtctggcgaaaaagatggaagaaggcacagaattgagctagcatgagaaaaatctgtccttggacagtgatgggctgtagggtcaataatgaagtaagactttcatccatgtctctggatccagaaacttcatgtttactgggataggaagcacaaaaaaacaaggcaagattcattatgagtacaagaaatcccaagaacattcttaaaagagaaagggaagaggagaagaagaaagaagcctaactcytgagcacgttaacaagcaccatctcattgaattctcccaatgagcccatgtggttggcattatatcccttttttttacagatgtaaaaagtaaacttcaggaaagttaagtaatttgtccaagggcacacagctgtggatccaaaccatctttccagctccagcgtctgttgacctttttatctctatcagagacacacaaac

SEQ ID NO: 557684 - DNA, 526 bp, Homo sapiens
tttcaggctgttatgcagtgcagggcctggttggcatttgggaaaatgaatccttctggaaggaaatgaggcagggcagccaagttcctaggattatatctctctcacctggaagccttctgccaaatgaccccagggaagagtcagtccaatgaaagataggtttcgtctctaagtaaaacttgcttctagggcaccatcaagccccaggaggctgagaagagccaccttgagggaggcagaagcggtgagagggaagtaacaagcataataacagctcatctctgtggcccctttcatctagggatctcagagtcatttaccaccacccarttaattttctcaacatccactacaccatcagctcccaaagaaggtgtcattatcgtccttttatgagcaagaaaacttagaggttagttggctggctcaatgccacaaaacagttgtaaggcagaaaccaaatttaagataactgccttcctctgatcacaaggaacaggagagaaaagacccatttgtagga

SEQ ID NO: 557685 - DNA, 573 bp, Homo sapiens
ggtttatttgggatgtgatcccgggaagcaaccgcagggatggggaagtgagatacggaaggagagaaaaccaatgaaggctgcactgtagtgaaggctgcaccaccagggcaagggaagccctattcctccctgttcacacgcacaggcacacatacacatacacacgccctattgggtctgtttctctggagaactctgaaaaatacaaaaagtaaatattctttgtatgtaagtcctctgaatacagaaatggtcacatgacacaagcctagacaatcagagtcctgcactggctcctctgccctttgcatcctttaatctctcccactggtgccatcagagcccgygctgagtctggctttgaagaggattgaagaattgggttagaactccatctgatgctgacctggcctgacctccaaacactgcttctcccactgcgcctaagattaaggaactacctccgtgtgtgggggagagctgtcccacctacctgaatgctcactgtagagggtttaactcttgtttttgtttcttcataattcattctctcattctttgtcttgattc

SEQ ID NO: 557686 - DNA, 580 bp, Homo sapiens
gtataggctcaaagaagaactaaatgaagagtcttcgggttgtagaagagtctacaacacaaagaactaaatgaaaactccattgtcaggctgttaactgcaaatggcaccacacgtaaacatttactgagcacttcctctgggccaagaacttcacgtaaattattcctttccatcttcctatcccaagaagtagatgctattatttcacccccattttacatttgaggaagttgaggtacacacaggctaagttatttgctcaagtttcccttgctcgtgaagtgcrggagctgtaattacgagcccaaacagatgacaaaacaaccctttgtgtaaaaagagatagttcatgcattgtccagaaaagtttagagggtgtagactccagcctttaattccctttttctaagaattgttgtccaagcaaaataaacggaactcgtaatagctcattgtgctgttggccctgctatctcacatgtccggcattccattatcccacctggcagctgctcccttcactaaagggagctggggacattagcaacggaatattttttttaattatagaaggggg

SEQ ID NO: 557687 - DNA, 572 bp, Homo sapiens
ggtgccttgtagggacttggaggacctggctaaaacccagttcagtgaagacttaactgggctgcctacagatggcctctcccaagcacagagaccccagtgtacttgagcttcttccatggcagccgaagcctcacrgaaaaaggaacattttctctagaggcccacgtggaactcaaaagtccttttatgacttagtctcagaagtttgagaacgtcccttctgccacattccattggtcaaccaagtcactaaagtcagttaagattctaagggaaggaattaggttgcatttctcaatgagaggattagcaaagaatttgtggtcagctttaatctaccacacctcatttttgaaaatctttataaaattattgcatcttctttcttggccggtgatgatcacaattgaaatcttcctttggtgattgagtacctgggggacacttgggggtcagcatttatcctgccaatatttattgcactcttactaagtgtcatgcactctgttagactctagggatgcagcaacaaacagaaaaatgtggccccaacctcatgaaattggcag

SEQ ID NO: 557688 - DNA, 567 bp, Homo sapiens
gggaattttaaaaatccactttatggaagtataattgacctacaaaaagctgtggatatctaatgcatacagcttgatgrgtttggagatatgtatgtgaaaccatcaccatctatgtggtaaacatattcatcacctattaaagtttcctcccaccttctttattattattattattatgataagaacacttaacataagtttttattcttaccaaattaaaaaatatacaatacagtattgctaattatagacactatgctatatagtagttctttaagacttactcatcttgcacagctaaaactttttactctttaataattactccccattttccacccattcctccatcccccagcttgggcagccagcattctactttgtacttctatgaatttgattgctttaggttatttgtataagtgggatggtgtagtatttgtcctactgtgcccggcttatgtcacttagcataatgtcctctagtttcattcatgttattgaaaatggcaggattttcttcttttgcaaggctgaataatatttcgttgtgtatctgtacca

SEQ ID NO: 557689 - DNA, 567 bp, Homo sapiens
gggaattttaaaaatccactttatggaagtataattgacctacaaaaagctgtggatatctaatgcatacagcttgatgggtttggagatatgtatgtgaaaccatcaccatctatgtggtaaacatattcatcacctattaaagtttcctcccaccttctttattattattattattatgataagaacacttaacataagtttttattcttaccaaattaaaaaatatacaatacagtattgctaattatagacactatgctatatagtagttctttaagacttactcatcttgcayagctaaaactttttactctttaataattactccccattttccacccattcctccatcccccagcttgggcagccagcattctactttgtacttctatgaatttgattgctttaggttatttgtataagtgggatggtgtagtatttgtcctactgtgcccggcttatgtcacttagcataatgtcctctagtttcattcatgttattgaaaatggcaggattttcttcttttgcaaggctgaataatatttcgttgtgtatctgtacca

SEQ ID NO: 557690 - DNA, 567 bp, Homo sapiens
gggaattttaaaaatccactttatggaagtataattgacctacaaaaagctgtggatatctaatgcatacagcttgatgggtttggagatatgtatgtgaaaccatcaccatctatgtggtaaacatattcatcacctattaaagtttcctcccaccttctttattattattattattatgataagaacacttaacataagtttttattcttaccaaattaaaaaatatacaatacagtattgctaattatagacactatgctatatagtagttctttaagacttactcatcttgcacagctaaaactttttactctttaataattactccccattttccacccattcctccatcccccagcttgggcagccagcattctactttgtacttctatgaatttgattgctttaggttmtttgtataagtgggatggtgtagtatttgtcctactgtgcccggcttatgtcacttagcataatgtcctctagtttcattcatgttattgaaaatggcaggattttcttcttttgcaaggctgaataatatttcgttgtgtatctgtacca

SEQ ID NO: 557691 - DNA, 614 bp, Homo sapiens
gagaacagggaaggggacgatttaagaggatagtggagtaagaaacattttattatttattaaaatggagttctgggcccagggttaaaacataaatattatacaacatgtgaattaattctctctataaaagatttaaacaataaagaaacatattgaataacatgtacagagatcccccccccttgcctctacttcctcttctttcatgtcattagttgggtatctttgagctcttgtctctgtgataaatttttccaaggattgctgtcttatttttgtcatgaaaaacaatactgctacgtacctrttataaatatgcaagtagttttgcaggatggattcctagaggaagatacactgagtcaaaagataatacgttttacattttgatggagaactgccgatttgctttccagaaaggtgtttctaatgggaacatctaataattgggtaccatgctcaatacctgggtgatgagaccagccatactccaaacctcagcatcaagcaatatacccatggaacaaacttgcagatgtaccccctgattctgaaatatgagttgaaattataaaacaaacaaacaaacaaaaagaaatatccaatagttt

SEQ ID NO: 557692 - DNA, 629 bp, Homo sapiens
atgtttttctatgtgccaatggtttgtttcttttcattactgtgtagtattccattgtatgcatataccacaatttgtttattcactcataagttgatagacatttgggttgtttcaatagtttggattattgtaaataattatgctataaatattcatttttaggtctttgtatgaacatatgttttcatctcttctggagatggaagagaaggaatgagatttctgtcttatatttgttagtacacagttaactttataaaaactggcaactgttttctaaagtggctacaccattttgcaccccaactgtattggtttgctagggctgccataacaaaatacccagattgggtgacttaaacaacagaaattaattttctcaccattctggaggctggaagcctgagatcaaggtattggcaggttggtttctcctgagacctcygtctgtggtttgtggctggctgcctcttccagtgtcttcccatcaccttagctctgtgcatgtctgcatccagatatcctattttttgaggacactaggtatatcggattagggtccatccattctaatgacctcatttcaacatgatcacctctttaaagaccctatctccaaatacatt

SEQ ID NO: 557693 - DNA, 629 bp, Homo sapiens
atgtttttctatgtgccaatggtttgtttcttttcattactgtgtagtattccattgtatgcatataccacaatttgtttattcactcataagttgatagacatttgggttgtttcaatagtttggattattgtaaataattatgctataaatattcatttttaggtctttgtatgaacatatgttttcatctcttctggagatggaagagaaggaatgagatttctgtcttatatttgttagtacacagttaactttataaaaactggcaactgttttctaaagtggctacaccattttgcaccccaactgtattggtttgctagggctgccataacaaaatacccagattgggtgacttaaacaacagaaattaattttctcaccattctggaggctggaagcctgagatcaaggtattggcaggttggtttctcctgagacctccgtctgtggtttgtggctggctgcctcttccagtgtcttcccatcaccttakctctgtgcatgtctgcatccagatatcctattttttgaggacactaggtatatcggattagggtccatccattctaatgacctcatttcaacatgatcacctctttaaagaccctatctccaaatacatt

SEQ ID NO: 557694 - DNA, 393 bp, Homo sapiens
ctgatcaaaagttctgagaaggttggtttaaaatattccaaaatttaacctccaacctactgaattccccaggctgaggcctggggatgagcatttctaatgtcctcctccagtggctcagatgcaggcagtatggggaccagcatttacaaaccattggtttgactcaagggaatccaagatatttaagatgaaagaactggcccgttttacagacgggcaaactgagacgcggkgggacaaggaggcttgtccaaaggcacatagtgaattagagtacattccgataagccacaatacgagaactccaggcactctagctagcaggtgagtaatagtgttgtggggctagtgatattttgtagttagtgatttggtggaggtggagagaaa

SEQ ID NO: 557695 - DNA, 393 bp, Homo sapiens
ctgatcaaaagttctgagaaggttggtttaaaatattccaaaatttaacctccaacctactgaattccccaggctgaggcctggggatgagcatttctaatgtcctcctccagtggctcagatgcaggcagtatggggaccagcatttacaaaccattggtttgactcaagggaatccaagatatttaagatgaaagaactggcccgttttacagacgggcaaactgagacgcggggggacaaggaggcttgtccaaaggcacatagtgaattagagtacattccgataagccacaatacragaactccaggcactctagctagcaggtgagtaatagtgttgtggggctagtgatattttgtagttagtgatttggtggaggtggagagaaa

SEQ ID NO: 557696 - DNA, 576 bp, Homo sapiens
caacatagcacatgtatacatatgtaacaaacctaaacctgcacgctgtgtacatgtaccctagaacttaaagtataataataataataataataataagagtctgtgctttgagagactaacagtcttaggttcmtatcccagtttttgtccaagactaattgtataataataggcaagtcacttaacctaagccccttattttctttttgtttgtttgtgttttgagatggagtctcgctctgttgcctaggttggagtgcagtggcatgatctcagctcactgcaacctttgcctcctgggttcaaacaatcctcctgcctcagcctcccaagtagtggggattataggcgtccgccaccatgcctggctaatttttgtatttttagtagagatggggtttcgccatgttggccaggctggtctcgaactcctgacctcaggtgatctgcccgcctcgccctcccaaagctctgggattacaggcgtgagccaccacgcccagcctctgagccccttattggtattactgagagaaacaggaagggcactgcaggatggcgtgttaatggacc

SEQ ID NO: 557697 - DNA, 576 bp, Homo sapiens
caacatagcacatgtatacatatgtaacaaacctaaacctgcacgctgtgtacatgtaccctagaacttaaagtataataataataataataataataagagtctgtgctttgagagactaacagtcttaggttcctatcccagtttttgtccaagactaattgtataataataggcaagtcacttaacctaagccccttattttctttttgtttgtttgtgttttgagatggagtctcgctctgttgcctaggttggagtgcagtggcatgatctcagctcactgcaacctttgcctcctgggttcaaacaatcctcctgcctcagcctcccaagtagtggggattataggcgtccrccaccatgcctggctaatttttgtatttttagtagagatggggtttcgccatgttggccaggctggtctcgaactcctgacctcaggtgatctgcccgcctcgccctcccaaagctctgggattacaggcgtgagccaccacgcccagcctctgagccccttattggtattactgagagaaacaggaagggcactgcaggatggcgtgttaatggacc

SEQ ID NO: 557698 - DNA, 508 bp, Homo sapiens
aaatggaagggaccatggggaagttccataaactttgtgttcttccatttcccccaactgttaaatgaaaagtaaaaattaccttacttcctctcactgggagaagatttagaagatagtgtgagtatagtcaactgggggcaagaaggaaatgagattcttgctgaaattcaatgccttagattctcacttgagcctttaggatggagctcagaaccagggagacaagatctcagaacggggagctgagggataagtatgagggacagagcttagggagcggttaaaaggaagtcaagtaagttttgactgagccttcagccatcagcaaagagggggcctccaagaagcatggtgtcacaaggatattccaaaggacttctgttgggaggagaaagtttctgacaggaaagttgaagggggagaggggaatcttcattctgtaccaatcctcctgccccaccagtgaaccaacttgygggtggcctagctgattctagccagtcaa

SEQ ID NO: 557699 - DNA, 595 bp, Homo sapiens
atattactcatgattcctctggtttcatacttcattggccttcagttaatatcttgttaaataataataaaagctaacatttataaagctcttacgctgtgttgagcaccataatcaytgctttacatggtgcatctccttcaaccgtgacattgacaccatgaggtaggtttcattattagccccgtcttacagaaggaagggcggaagttcagaggggtttagtcacttgctcaaagtcaccagctagtgagtggtagagcatgattttaacccaggcttagaaccaccctattatactatgtctgtaaatcatgattgaatatcctaacctttgtgcctaaatctagaccaaaaaagaggagggaatgattgagactcagggaaaaaaataacttgccaggtgattcttgagtgtttttggtttggtttttggagacgaagtctcactctgtcacccaggctggagtgcaatggtgcgatctcagctcactgcaacctccacttcccaggttcaagggattcttgtgcctcaaccttccaagtagctgggattacaggcatgtgccaccaagcccagctaattttttgtatt

SEQ ID NO: 557700 - DNA, 595 bp, Homo sapiens
atattactcatgattcctctggtttcatacttcattggccttcagttaatatcttgttaaataataataaaagctaacatttataaagctcttacgctgtgttgagcaccataatcactgctttacayggtgcatctccttcaaccgtgacattgacaccatgaggtaggtttcattattagccccgtcttacagaaggaagggcggaagttcagaggggtttagtcacttgctcaaagtcaccagctagtgagtggtagagcatgattttaacccaggcttagaaccaccctattatactatgtctgtaaatcatgattgaatatcctaacctttgtgcctaaatctagaccaaaaaagaggagggaatgattgagactcagggaaaaaaataacttgccaggtgattcttgagtgtttttggtttggtttttggagacgaagtctcactctgtcacccaggctggagtgcaatggtgcgatctcagctcactgcaacctccacttcccaggttcaagggattcttgtgcctcaaccttccaagtagctgggattacaggcatgtgccaccaagcccagctaattttttgtatt

SEQ ID NO: 557701 - DNA, 400 bp, Homo sapiens
cgtgctttaacagaagttcccaaacatttttttcatttttgagactgggtcttgctctgttgcccaggctggagtgcagtggcatgatcacagctcactgcaccctcaaactctcaggctcaagtgatcctcttgcctcaacctcctgagtaggtgagaccacaggcatgcaccattatgcctggctaatttttttatttttgtaragacaaggtctccttatgttgcccaggctggtcataaactcctggtctcaagcgatcctcctgcctcagcctccaaaagtgctgggattacagacatgagccattgtgcccggcctcatgaaacctttaaaaagaatgagctagactggtacaagttcctccaataatttcatctttagttaataattatatac

SEQ ID NO: 557702 - DNA, 556 bp, Homo sapiens
tcttttacatctggcttcttctacctaacatcatgcgtttgaggttcatccatgttgtagcgtgtttcagtgcttccttcctttttattacccactagcgttccattgcacggctaagccacgttttatttatcagatcaccagttggtggacatttgagttcttttcacttattggctattacaaacatccatgtacaaattttatgtggatgaatgttttcatttttttttttttgattaatgcctatgagtggaattkctgggtcatgtggtaagtctatgttcaacgatttgagaaactgccacactgtttttcaaagcagctgcaccatcaactctttttcttaatttgtgaaatgtgtgagtcttcatctttgtcctcggctgattggagcaaacaggagcacatgatctaaattggaccaatcagtttttccttcctaagatcttcttatgaggacatactgatggatgtatgtttgtgtctacagtagtttgaataatagacatgtgcaagtgacatagaaaagctgaccacaaagacaggaagttga

SEQ ID NO: 557703 - DNA, 612 bp, Homo sapiens
tacaaaggtgaaggctgaccctgagcgtccttcccatccttccccacagtccacttgagatgttatctgtgaggagtaaacaggcccgtccccaaagtcttggccaccctggtgtgatatcaaacagctgctcagcggccctggaagccggctcccatatttctcctgctacacttacagcgarttgagcttcctggcggggcttctctttgaagttcaagagggccctgtgtatggtatgtgtgggaaggaaaactaagattcatctctcatggagccatcttttccatgagaacagagtgtcttttagtgtctttcaggaagaaggggtctaattcagcaccttaaataataaaaaagtggtaacaatagtaacccacatgacatttataaagcacttaccagtgtcaaaaatagcaccacgtactgtcttaagtgcttgctaggagttaacaactttaatggttccccttttataaatggggaagcagattcagagaggctaagtgacttgcccaaggtcacaataggagacgagtggtggagctaggttttagttccgctcagaactaatttatttgttcccaaactgggtgaaacagtggaaacaaa

SEQ ID NO: 557704 - DNA, 568 bp, Homo sapiens
gctaagtgacttgcccaaggtcacaataggagacgagtggtggagctaggttttagttccgctcagaactaatttatttgttcccaaactgggtgaaacagtggaaacaaaygttaactctcaaaagcgtctgagagctggaattgaggctcaggccagagacctctggacctctgccctctgtgattatatgggcattttcctcccgtagcagaatggatcatcattttgcacattcctatgcccttcatcacactagtgtaaatgtttgcttgcttgtctctttcccacactaagttgagagctccttgctgcaggcactaaggttattagcctttagcctggtggcaatgattatgatgacagctaccaattctggagagtttatcatgtgccccaccccagggctgatatcaagccaggtggtgaccattctgactgcttatgcatgggttgtgctgagtgttaaataatccagtatgatccctgccaagcactatgctaagtgtctttgcctgtcttttcttcctgaatctttacagcagctctctgaggtggctactgctgt

SEQ ID NO: 557705 - DNA, 621 bp, Homo sapiens
cttggctgtgaagcatttcaaaaggagggaatgaaagagacaagcactgtggcttacattgttactttgacattacaaataagtgtatttatgatggcattatacagttcatatattttcctctaatagtgccaataaaaagatggcattttcccagcatctgctctctctgctcatgttttatgtcttactttcctcaacaggctatgtgctcttaagcaaaaggctaatatttttttagtgaaggggaggggaagccagtattctgtctttctaccacttgattgttatttttctattagtcctcagaaagacaaaatgcagtggcttttcttttttctatcaagagatatgccacacacatgcacacattactaacagstcacatttttcagagttcttactgcctaccaggacctggactttgtgcgtatgactgcaatctaccttcaagacaagtttatgagggcaggttctctgattattcccacttttgagatgaagagactgaggttcttagagaatccaaggccactccatatgatcgaggactcaggtccctcaaagtcagtgcttctgacaacattcttttgctttttgttcttttctttcatggttgag

SEQ ID NO: 557706 - DNA, 554 bp, Homo sapiens
actactcgggaggctgaggttggaggattgcttgagcctgggaggcaraggttgcagcgagccaagattgtgccactgcactccagcctgggtgacagagccagaccctgtctcaaaaaaaaaaaaaaaatacctagaaatattttattataaatgctccactctaaaacaaaacaaaaaacttgtagaagtcaacaggacttctaccagatgatttaaggtatcaattgtggatacgggaatcaaacatgctttggggctatcataacaatgactagagattatcacatcaacaaattactactcctgtcgatcaatatctttttttataaatatatacctgcctgtctaggcatccatcagcagaaccgaaatgtgaaaaggtttgctaagtgactgccagccagagagtaaagttatttttaaggattcagcaagactgttctcttcaaggtattctcagaccctctccaccttcagtctcagtgactctgctgagtcctccaaaatagggtttctcagcctgggccctataaacattttgggccacgtaa

SEQ ID NO: 557707 - DNA, 577 bp, Homo sapiens
tggatttttctgcctgattttggggaggaggcatatttttcaaggtgaaaatctctctacaggcatttctgctctaagaattatattctcttatgaatgactagaaaagtgagtacaagaracatggccacaaagtgatataaacacaaaacaggaccattcttgaagctgaccagctagatattgagttcttttaatggatacatccacatgctccaactacaaagataatccatgtttaaaggatgatccaagacatgggaatctcaaaatgccttatgaatcatcagagatcaaacagattgagtcatccaggattatttacattttttatgttgcaatgctttgaaaattggtaatagtatagagttcactccctgttgatgctaacagcaattggccttgacaagcatttcccaaagcctgctttgtggaacactagacctgtggcattctcactaactttaggtaaaacatgtacccacatatttccagaatacgttagctcatgcacagcacagtccctgagtgcagaatcccatttatgttctttaccctagtagaatttcctttaatc

SEQ ID NO: 557708 - DNA, 577 bp, Homo sapiens
tggatttttctgcctgattttggggaggaggcatatttttcaaggtgaaaatctctctacaggcatttctgctctaagaattatattctcttatgaatgactagaaaagtgagtacaagaaacatggccacaaagtgatataaacacaaaacaggaccattcttgaagctgaccagctagatattgagttcttttaatggatacatccacatgctccaactacaaagataatccatgtttaaaggatgatccaagacatgggaatctcaaaatgccttatgaatcatcagagatcaaacagattgagtcatccaggattatttacattttttatgttgcaatgctttgaaaattggtaatagtatagagttcactccctgttgatgctaacagcaattggccttgacaagcatttcccaaagcctgctttgtggaacactagacctgtggcattctcactaactttaggtaaaacatrtacccacatatttccagaatacgttagctcatgcacagcacagtccctgagtgcagaatcccatttatgttctttaccctagtagaatttcctttaatc

SEQ ID NO: 557709 - DNA, 572 bp, Homo sapiens
gatattagagactgggaagggtaagggaagagggcttaaggacaaattaaatgtgacaaaattacagctaaataggaggaataagttctagtgtcctacagcattgtaggatgactctagttaacaataacacattatatagtatcaaatagctaaaaggaggatattgaatgctcccaacacaagaatgataaatgttggaggtaataaatatgttaattaccttgatctgattactatacgtatgtatctcataaatatgtacaattaaaaaatttaaaaaattaacagacaaacaaatacactgttctagaagaaattgtatcatagaatgtaggtgttgaatasttgaagggaacaatcaaggttgggcctgacagatttagctatgtgtattttacttcttctattcttttctttctttcttttcttttctttttttttttttttttggagacaagagtctcactctgttgcccaggctagagtgcaggggcacgatcttggctcactacaacctccaccacccaggttcaagtgattctcgtgcctcggcctccagagtagctggg

SEQ ID NO: 557710 - DNA, 484 bp, Homo sapiens
gtaggtgttgaatagttgaagggaacaatcaaggttgggcctgacagatttagctatgtgtattttacttcttctattcttttctttctttcttttcttttctttttttttttttttttggagacaagagtctcactctgttgcccaggctagagtgcaggggcaygatcttggctcactacaacctccaccacccaggttcaagtgattctcgtgcctcggcctccagagtagctgggactacaggtgtgcaccaccatgcctggctaattttgtattttttagtagagacaggtttctgccatgttggccaggctggtcttgaactcctgacctcacgtgatctgcccacctcagcctcccaaagtgttgggattacagtcgtgagcttctgtgcccagctagctaggtgcattttaaaaactataactccaaagctcatttgattgtggccctagtcattcattcttccctaattatggaa

SEQ ID NO: 557711 - DNA, 484 bp, Homo sapiens
gtaggtgttgaatagttgaagggaacaatcaaggttgggcctgacagatttagctatgtgtattttacttcttctattcttttctttctttcttttcttttctttttttttttttttttggagacaagagtctcactctgttgcccaggctagagtgcaggggcacgatcttggctcactacaacctccaccacccaggttcaagtgattctcgtgcctcggcctccagagtagctgggactacagktgtgcaccaccatgcctggctaattttgtattttttagtagagacaggtttctgccatgttggccaggctggtcttgaactcctgacctcacgtgatctgcccacctcagcctcccaaagtgttgggattacagtcgtgagcttctgtgcccagctagctaggtgcattttaaaaactataactccaaagctcatttgattgtggccctagtcattcattcttccctaattatggaa

SEQ ID NO: 557712 - DNA, 462 bp, Homo sapiens
atgtaggtgttgaatagttgaagggaacaatcaaggttgggcctgacagatttagctatgtgtattttacttcttctattcttttctttctttcttttcttttctttttttttttttttttggagacaagagtctcactctgttgcccaggctagagtgcaggggcacgatcttggctcactacaacctccaccacccaggttcaagtgattctcgtgcctcggcctccagagtagctgggactacaggtgtgcaccaccatgcctggctaattttgtattttttagtagagacaggtttctgccatgttggccaggctggtcttgaactcctgacctcacgtgatctgcccacctcagcctcccaaagtgttgggattacagtcgtgagcttytgtgcccagctagctaggtgcattttaaaaactataactccaaagctcatttgattgtggccctagtc

SEQ ID NO: 557713 - DNA, 484 bp, Homo sapiens
gtaggtgttgaatagttgaagggaacaatcaaggttgggcctgacagatttagctatgtgtattttacttcttctattcttttctttctttcttttcttttctttttttttttttttttggagacaagagtctcactctgttgcccaggctagagtgcaggggcacgatcttggctcactacaacctccaccacccaggttcaagtgattctcgtgcctcggcctccagagtagctgggactacaggtgtgcaccaccatgcctggctaattttgtattttttagtagagacaggtttctgccatgttggccaggctggtcttgaactcctgacctcacgtgatctgcccacctcagcctcccaaagtgttgggattacagtcgtgagcttctgtgcccagctagctaggtgcattttaaaaactataactccaawgctcatttgattgtggccctagtcattcattcttccctaattatggaa

SEQ ID NO: 557714 - DNA, 596 bp, Homo sapiens
cagtaaacaatcacatagccagcatgatttcaaatgagacacacaccatgaagatgatataatggagatgaagttgagagtgctggagaacgaggtggtgatggaaaagaagtcctctcatggaagaagccatttgtattgagacccagaaggcatctgaagactagcagggaggaaatcctgcctgcaagggatggcayatgcaaagacattgaggcaggagtgaaatttgtatgcttgaagaacatgaagcaagccagtgtggccagagcgtatagtaaggtagggattgaaatgtgattgaagatgtaagccgagggttacattcagctcatctgtcttctcagtgtcaaccactgtgtctggcaaagaccaggcaccatggatatatgctcaaggtccaaactaatgaaattaattaattgcatctctcaattcctgttctccataacctttggtgccactgtctgtgcatattttacaaaataaagctaattttaaaaacacagctgtatattgttgtagctattttaataagtatgaccatgcctatggagtcagtacaagaaaggatttgatattgactgccccccacc

SEQ ID NO: 557715 - DNA, 596 bp, Homo sapiens
cagtaaacaatcacatagccagcatgatttcaaatgagacacacaccatgaagatgatataatggagatgaagttgagagtgctggagaacgaggtggtgatggaaaagaagtcctctcatggaagaagccatttgtattgagacccagaaggcatctgaagactagcagggaggaaatcctgcctgcaagggatggcatatgcaaagacattgaggcaggagtgaaatttgtatgctygaagaacatgaagcaagccagtgtggccagagcgtatagtaaggtagggattgaaatgtgattgaagatgtaagccgagggttacattcagctcatctgtcttctcagtgtcaaccactgtgtctggcaaagaccaggcaccatggatatatgctcaaggtccaaactaatgaaattaattaattgcatctctcaattcctgttctccataacctttggtgccactgtctgtgcatattttacaaaataaagctaattttaaaaacacagctgtatattgttgtagctattttaataagtatgaccatgcctatggagtcagtacaagaaaggatttgatattgactgccccccacc

SEQ ID NO: 557716 - DNA, 596 bp, Homo sapiens
cagtaaacaatcacatagccagcatgatttcaaatgagacacacaccatgaagatgatataatggagatgaagttgagagtgctggagaacgaggtggtgatggaaaagaagtcctctcatggaagaagccatttgtattgagacccagaaggcatctgaagactagcagggaggaaatcctgcctgcaagggatggcatatgcaaagacattgaggcaggagtgaaatttgtatgcttgaagaacatgaagcaagccagtgtggccagagcgtatagtaaggtagggattgaaatgygattgaagatgtaagccgagggttacattcagctcatctgtcttctcagtgtcaaccactgtgtctggcaaagaccaggcaccatggatatatgctcaaggtccaaactaatgaaattaattaattgcatctctcaattcctgttctccataacctttggtgccactgtctgtgcatattttacaaaataaagctaattttaaaaacacagctgtatattgttgtagctattttaataagtatgaccatgcctatggagtcagtacaagaaaggatttgatattgactgccccccacc

SEQ ID NO: 557717 - DNA, 595 bp, Homo sapiens
ttaattaattgcatctctcaattcctgttctccataacctttggtgccactgtctgtgcatattttacaaaataaagctaattttaaaaacacagctgtatattgttgtagctattttaataagtatgaccatgcctatggagtcagtacaagaaaggatttgatattgactgccccccaccccccaaatctaagacttacttagaggatagatattgcccaattaactgactggagacacagggaaattgccgcctactacagaaaaattatctttggggaaaatagcccatggaggaccaatgacttggccaacatcacacaggggatttgatgaataccaagggtaggagcccatcttcttaccctgcaattgagctcttggatgggargattacctgatccatttaattccatctactttgacatgctcgtacttgaagattccccagtacaatgtactcagttcccaaaatatgggattttaagtgaaaccctgacgtttagctctagggctaaatagcaatacacaaatcccccaattagaagcagagatggagatgaaatggtcccaaggaatctggagacacaacag

SEQ ID NO: 557718 - DNA, 595 bp, Homo sapiens
ttaattaattgcatctctcaattcctgttctccataacctttggtgccactgtctgtgcatattttacaaaataaagctaattttaaaaacacagctgtatattgttgtagctattttaataagtatgaccatgcctatggagtcagtacaagaaaggatttgatattgactgccccccaccccccaaatctaagacttacttagaggatagatattgcccaattaactgactggagacacagggaaattgccgcctactacagaaaaattatctttggggaaaatagcccatggaggaccaatgacttggccaacatcacacaggggatttgatgaataccaagggtaggagcccatcttcttaccctgcaattgagctcttggatgggaagattacctgatccatttaattccatctactttgacatgctcgtacttgaagattccccagtacaatgtactcagttcccaaaatatgggattttaagtgaaaccctgaygtttagctctagggctaaatagcaatacacaaatcccccaattagaagcagagatggagatgaaatggtcccaaggaatctggagacacaacag

SEQ ID NO: 557719 - DNA, 610 bp, Homo sapiens
aattaataaatgaatgtaaatctgctgctgatgaagacagagctgcttgtaaaggggcctgagatggcacctacatgccaggtgctctaagtttcttacatgggctaacttatttattaaatcattagtgagtactatttaatattaccatgtttttcagggaaggcaacttgaatacagagatgctatacttagattgaccaaagacatccagatatcaggtgaaacagcctgggctttggacccagaaagcttggtttcaggatccatgctcttaatcgccatactgactcttcgctttgggatagatcaaagatacctcagtttaaagacagattaaattagaccctttcatatttgattttcagtaaaaaaaaaaatcatctttagattttcagctcttagaagagtcatttcaactaatctgatggycttccttcctccctccctttctctcttcctttactccttctttcctcccttcttcctttcttctttctttcctacctgccatttttcttttcttgtttcacagaacaacacccctccaccccattaactgttaggacatataaaacagaacacagtgaagtgtcaatggttgaaaagg

SEQ ID NO: 557720 - DNA, 593 bp, Homo sapiens
agctgactgtattgaaggggcatgttgcatgttgtatgtaaacagtcagctgtgtttaagggccatgtatatatgcccctagaatgacactcaatatagtggatgctcggactgartgaagaccaaatttaccctcccatctcactttttggggcatgtgctcacagtgaaatgttttggttctccctctctctctccctctttgtcctacagcagagagttggactttcttataataactgtatcaggcagggtgcggcggcacatgcctgtaatcccagcacttgcacttggggaggctgaggcaggcagctcacatgaggccaagagttagagaccagcctggccaacatggcaaaaccctgtctctgctaaaaatacaaaaattagtcaggcatggtggtgcgtgtctataatcctagctattcaggaggctgaggcatgagaactgcttgaacccaggaggtggaggttgcagtgaaccaagatggcaccactgcactccagtctggatgacagagcaagactctgtctcaaaaaaaaaaaaaaaagaaaaatcaaaagacaaaatcttattgatgagacgacctccc

SEQ ID NO: 557721 - DNA, 632 bp, Homo sapiens
gcagtctctgagaaactggtcaaaattattttataagtttcgagaagatcaggaaaaaaaaacatacagatggattacttcttatgtgggggttaactaaatgtacagtgatagcataaggcaatctgaacataaaataaaaagatccccaagtctcccttagactattcctgtactagagaccaatatctcatccttctataagtctaccagatgcagttttgtttccatcgttgaagatctctttctgtatttgagaaccagaaaaagtagctgactgtattgaaggggcatgttgcatgttgtatgtaaacagtcagctgtgtttaagggccatgtatatatgcccctagaatgacactcaatatagtggatgctcggactgaatgaagaccaaatttaccctcccatctcactttttggggcatgtgctcacagtgaaatgttttggttctccctctctctctccctctttgtcctacagcagagagttggactttcttataataactgtatcaggcagggtgcggcgrcacatgcctgtaatcccagcacttgcacttggggaggctgaggcaggcagctcacatgaggccaagagttagagaccagcctggccaacatggcaaaac

SEQ ID NO: 557722 - DNA, 577 bp, Homo sapiens
ttagctgattcatctgcttcagtgagtgtaaagacctttgtattctgtgtaggtcgtggcagaggacaagtagaagggggtattagcagagaaatgccacccaagaaaaggctgtgtggggtagtggaacaacccatggctagagtcccagctctgtacttatatttattcaatgtattcaacattatttggcaagctctttctatgtggcaggcactgtcctaggcactaaaaatagagcagtgctcataaacaaactcttgcattttcctttttagtcatctgtcccctgcaagttatttcacttctctgagccttgctctcctgccctataagatgaggrtattaatacctaccagatgagagcagtcaatttgttttgtcactaggaaagtgaggacattaatatccaatcttgctgggagaattaaatcaggcaaatgtagatagatccatttattgcaccaacagttatggaccatctactgtgtggcagtggctgggctgagctctgagaacacatccagtgaacgagccaaatatagtttctgctgtcttcgaccttgcactgagtaaa

SEQ ID NO: 557723 - DNA, 619 bp, Homo sapiens
  misc_feature 599: n = A,T,C or G
ctcatttgtgggagctaatgttgtttggtgttttaagaactacttagggctggggatattgccctttgaaaggattgaaccagctcctttcagaacacagcactctgatgagtctggcctagaagccatggatagtgttcctgggacccagaactctgagatcccggactctggcccccatccaggttccccagggaaaacccttcctatgcaagtcctcagtgacctcaaaggttgtctctaaaattgtcaggaatgtcgaatcagctcttgaagtcacmtatcattgtatgagtgagacaggattgttcattaattcaccattacataaaaagatgctccaggtttgaaggtagtaagggggtggcttggtgatgacaaaatagtgtgagaaacaagaaaaaaaaatgttgaggggtcattaaaaggatggaaaatatccttcaggacaagctttcccaaacgtcagtcatttctataccactctacaatgtgagccaactctgagcaccctcttattattatatatgtattttggggggtttaaatggacttactctatatacatttaaatgtttgccataaataggaagtaaccntaggaagagatgtgggtcca

SEQ ID NO: 557724 - DNA, 619 bp, Homo sapiens
  misc_feature 599: n = A,T,C or G
ctcatttgtgggagctaatgttgtttggtgttttaagaactacttagggctggggatattgccctttgaaaggattgaaccagctcctttcagaacacagcactctgatgagtctggcctagaagccatggatagtgttcctgggacccagaactctgagatcccggactctggcccccatccaggttccccagggaaaacccttcctatgcaagtcctcagtgacctcaaaggttgtctctaaaattgtcaggaatgtcgaatcagctcttgaagtcacatatcattgtatgrgtgagacaggattgttcattaattcaccattacataaaaagatgctccaggtttgaaggtagtaagggggtggcttggtgatgacaaaatagtgtgagaaacaagaaaaaaaaatgttgaggggtcattaaaaggatggaaaatatccttcaggacaagctttcccaaacgtcagtcatttctataccactctacaatgtgagccaactctgagcaccctcttattattatatatgtattttggggggtttaaatggacttactctatatacatttaaatgtttgccataaataggaagtaaccntaggaagagatgtgggtcca

SEQ ID NO: 557725 - DNA, 619 bp, Homo sapiens
  misc_feature 599: n = A,T,C or G
ctcatttgtgggagctaatgttgtttggtgttttaagaactacttagggctggggatattgccctttgaaaggattgaaccagctcctttcagaacacagcactctgatgagtctggcctagaagccatggatagtgttcctgggacccagaactctgagatcccggactctggcccccatccaggttccccagggaaaacccttcctatgcaagtcctcagtgacctcaaaggttgtctctaaaattgtcaggaatgtcgaatcagctcttgaagtcacatatcattgtatgagtgagacaggattgttcattaattcaccattacatamaaagatgctccaggtttgaaggtagtaagggggtggcttggtgatgacaaaatagtgtgagaaacaagaaaaaaaaatgttgaggggtcattaaaaggatggaaaatatccttcaggacaagctttcccaaacgtcagtcatttctataccactctacaatgtgagccaactctgagcaccctcttattattatatatgtattttggggggtttaaatggacttactctatatacatttaaatgtttgccataaataggaagtaaccntaggaagagatgtgggtcca

SEQ ID NO: 557726 - DNA, 611 bp, Homo sapiens
gcagtgcagggcggggggtactttaagtggagaggggtaaaccatgggggattaaaaaaaccctgcagcaaggactctttgctgaactctgagcttaatttcagaatatcaccccgaagtcttttgagccaacagctggaacttagagaagatgaagggctttgtttctatcaccacctgaccartttctctactctctctcacatgcttatttttattctcccattcattatttttattctctcatctcagcttcccaagcttctgcaacttctagataattcaacaggaagaacccacatcccacaggacggatattcacggaggactcagccctcccccaataaagtgcacatcacttttttagggggcctcctaacttgggtctaaattgggattagaagccacacaactcaaaggccatcatcttgctctagacattccctctgcacttttattatgtaccagaggcattgccaccttcctcctccctaatgttctggagtccttgaaatgccaaaattaagtggagggctagagagaggtgagaaaacatgtcttggcccctttctgtgttacattagcaaactgtgcccttggtctagactggc

SEQ ID NO: 557727 - DNA, 611 bp, Homo sapiens
gcagtgcagggcggggggtactttaagtggagaggggtaaaccatgggggattaaaaaaaccctgcagcaaggactctttgctgaactctgagcttaatttcagaatatcaccccgaagtcttttgagccaacagctggaacttagagaagatgaagggctttgtttctatcaccacctgaccaatttctctactctctctcacatgcttatttttattctcccattcattatttttattctctcatctcagcttcccaagcttctgcaacttctagataattcaacaggaagaacccacatcccacaggacggatattcacggaggactcagccctcccccaataaagtgcacatcacttttttagggggcctcctaacttgggtctaaattgggattagaagccacacaactcaaaggccatcatcttgctctagacattccctctgcacttttattatgtaccasaggcattgccaccttcctcctccctaatgttctggagtccttgaaatgccaaaattaagtggagggctagagagaggtgagaaaacatgtcttggcccctttctgtgttacattagcaaactgtgcccttggtctagactggc

SEQ ID NO: 557728 - DNA, 533 bp, Homo sapiens
accataccagtcaggggatctccaaaataagaagcgtgagttggggtagcaatgggtaatctgagagtgagatcaccaaccaaaatgggccaggcttatttatatagcttgggcagaggaaggagagcaaatcttggaactttccagaatgacaacatccccttactgaacccaaaccsttccttcacctccccctaccccaaaccccagagcttgttttatcatttacttagtgtacagaataaccactcaatattcagggacaagggtctctcttgggcttcctccctcctcatccctcactcaaggaattttgcagataaattaccatgttaatccacttgcctgagagttatgggctgtagtgaagcaggagaatgtcgaaatgggacttggggatggaaggaagcccttgatgacagatgaagggtgaatgtgcagatgggcagcccccagcacagatggaccttccagagaagggaaatgacacagtcatggggatggggttctctgctcaaaacaacagaagttga

SEQ ID NO: 557729 - DNA, 606 bp, Homo sapiens
gggcctcgtgatgagagcacatgttcaaattctacctataacatttacgtcctgtgtgatctttggcaagtttcttattctctctgagtcttagctccatacttatgacgttgacttaataacttctatttcttatagctccaggcctgctctgaccagggcctcacgatgagagcacatgttcaaattccacctataacatttacgtcctgtgtgatctttggcaactttcttattcyctctgagtcttagctctatatttatgatgttgacttaataacttctatttcttatagctgtgatgataatgaataggattgcatgaataatggccaatacattgtctgtaccctagtcaaataggagacattcaatgaattgcatctgctattgatcatataatcatcaacatgcttcgattttaatgtacattcaggtatttctccttagtactcgaagggctctttgcaattggaaaacatgatttagggtaccaggatgctgagatgggactctgtctcaatttcagctgatgcctcaaggaattaagaaccaataggtaagttcatcaagtggtttccttgaagtctcatcatcaggagggat

SEQ ID NO: 557730 - DNA, 606 bp, Homo sapiens
gggcctcgtgatgagagcacatgttcaaattctacctataacatttacgtcctgtgtgatctttggcaagtttcttattctctctgagtcttagctccatacttatgacgttgacttaataacttctatttcttatagctccaggcctgctctgaccagggcctcacgatgagagcacatgttcaaattccacctataacatttacgtcctgtgtgatctttggcaactttcttattctctctgagtcttagctcyatatttatgatgttgacttaataacttctatttcttatagctgtgatgataatgaataggattgcatgaataatggccaatacattgtctgtaccctagtcaaataggagacattcaatgaattgcatctgctattgatcatataatcatcaacatgcttcgattttaatgtacattcaggtatttctccttagtactcgaagggctctttgcaattggaaaacatgatttagggtaccaggatgctgagatgggactctgtctcaatttcagctgatgcctcaaggaattaagaaccaataggtaagttcatcaagtggtttccttgaagtctcatcatcaggagggat

SEQ ID NO: 557731 - DNA, 543 bp, Homo sapiens
ataatagccattctgactagagtgaggtgatatctcactgtggttttgatttgcaattccctaatgattagagatgttgagcatttcttcatatacctgttggtcatttgcatgtcttcttttgagaaatgtctttaaactcttttgctcatttttttwaaattatactttaagttctagggtacatgtgcacaacgtgcaggtttgttatatatgtatacatgtgccatgttggtgtgctgcaccaattaactcagcatttacattaggtatatctcctaaggctatccctcccctctacccccaccccactacaggcccccgtgtgtgatgttccccttcctatgtccaagtgttctcattttttaattgggttactcgtgaggacttcagggattttttttgcttttgttttgttgttgttgttgtttttgctgttgagttgtttaagttccttaagttccttatatattctggatgttaatcccttgtcagatatatagtttgcaaatgctttctcccattctgtaagttgtctcttca

SEQ ID NO: 557732 - DNA, 542 bp, Homo sapiens
gcccaaaacacagcctcccagccatgtgaaggtgcctgctaccactttgccttgtgccataagtcagagttccctgagacctccccagaatcagatggtgccatgcttcctgtacagcccagacaatcgtgagccagttaaacctattttctttataaattaaaaagaaaagaaaacaagtgtaagcaaggatatgaagaagagaacccttgtacactgttggtgaaaatgaaaatcagtgcaaccactatggaaaatagtatggagrcacctcaaaaaatttaaatcagaaataccatacgatccagcaatcctacttctggatatatattcaaaggagttgaaatcagggtcttgaagagagatctgcacttttacatttattgcagcattattcacaataggcaagatatggaatcaacttcagtgtccatcaatgaataaatggacaacgaaattgtgatattaaaaaaagtatatacttatggtatatgatacaatgttttgatatatgtataccttgtagaaagtctaaatcaagc

SEQ ID NO: 557733 - DNA, 543 bp, Homo sapiens
ataatagccattctgactagagtgaggtgatatctcactgtggttttgatttgcaattccctaatgattagagatgttgagcatttcttcatatacctgttggtcatttgcatgtcttcttttgagaaatgtctttaaactcttttgctcatttttttaaaattatactttaagttctagggtacatgtgcacaacgtgcaggtttgttatatatgtatacatgtgccatgttggtgtgctgcaccaattaactcagcatttacattaggtatatctcctaaggctatccctcccctctacccccaccccactacaggcccccgtgtgtgatgttccccttcctatgtccaagtgttctcattttttaattgggttactcgtgaggacttcagggattttttttgcttttgttttgttgttkttgttgtttttgctgttgagttgtttaagttccttaagttccttatatattctggatgttaatcccttgtcagatatatagtttgcaaatgctttctcccattctgtaagttgtctcttca

SEQ ID NO: 557734 - DNA, 617 bp, Homo sapiens
cccattccaatctcattccccacataattgactcagttggtgacctggaacaaacaatttcaactctcatgtcctcagttgcctcctgtattgtaaactgaacacaaaattatcccaaattggagatttgcccattagctgagatgaaacatggaaaagattttcaatcagtacattgaagtaaaaagaagggtatgtgcaagcagaaccagagagttgtccctcaatgtcagtttttcttttccrctgtattgacagaacaattgaattttagctgggctgcccagttcccacctcccttgcagctaggtgggaacatataactaagttctggctaatgagactgagaaaaatgtgtgtgatttctgtgtcatgctcttagagtgaaggagcctattttccctcgcatttatcttactatttccactgtttatattacaaatttgatggtgaaataactagaaaagtgtcaatgatgaaaaataccctaaggatgacaaagaaaaaaagagagaccccagccactgaacactccaagatgcagagctgccagattagcccagtctcttacgtgcaagagaaataagtgtctaccctgtttaatctatgactttggg

SEQ ID NO: 557735 - DNA, 617 bp, Homo sapiens
cccattccaatctcattccccacataattgactcagttggtgacctggaacaaacaatttcaactctcatgtcctcagttgcctcctgtattgtaaactgaacacaaaattatcccaaattggagatttgcccattagctgagatgaaacatggaaaagattttcaatcagtacattgaagtaaaaagaagggtatgtgcaagcagaaccagagagttgtccctcaatgtcagtttttcttttccgctgtattgacagaacaattgaattttagctgggctgcccagttcccacctcccttgcagctaggtgggaacatataactaagttctggctaatgagactgagaaaaatgtgtgtgatttctgtgtcatgctcttagagtgaaggagcctattttccctcrcatttatcttactatttccactgtttatattacaaatttgatggtgaaataactagaaaagtgtcaatgatgaaaaataccctaaggatgacaaagaaaaaaagagagaccccagccactgaacactccaagatgcagagctgccagattagcccagtctcttacgtgcaagagaaataagtgtctaccctgtttaatctatgactttggg

SEQ ID NO: 557736 - DNA, 562 bp, Homo sapiens
aatctacaaattggttataagaagagtagctactgctacctcatgggatcaatataaagtttaaagagataatgtatgggaagaatttagcataatggccagcacataccaagcattcaataaattttaatcatggttgttgcagggaaaggtgttttcaaggctggaaaacaccccaatgctaagttcatttgggggctctaaagttaaaatggggacttgttcatacaaactttggctcatctatgaagtagatttccttttgcaatgtggctttttttttctcttggcaagttctcaaattttgggttggaaaaaaaaggaggaacaccatcatctctcacccttcagattcagtttgggtttaggagagagtgtcaaggatatagtagagccaaggcaatagttgacacccagttttttccaagactgtaactgtccctcttgccacatgtgccaaccatacacctgctcactctcagattctttatctgytctgttctcttccaaatcttaaggagctacattttccaaactcctttgccttcttgcttccttgtac

SEQ ID NO: 557737 - DNA, 549 bp, Homo sapiens
actcctttgtgtagtccccttccacattgaatagggctgatgtgtattaccaaaagaatgttctggaattgatggtgtatgtytttgcatgagggaccacagacctaggaaatgagccatcttaagggagcaaagattcttagcctggtgtggcagattaaagatgactataaattcaatatcccatccattgagaggtgggatctatttcatttcccctgaatctgagctggcctgtgactgccatgacaaatagagtatgatagaagtgacgctatgccaattctgggtctagtcttttaagaggatttatagcatcttctttggtctgttggagggtccagatcagaccacctatcaaacaaatgccactaagcaattccaggcaacaccatgtacaacagcagaattgtccagccgagccctgcccaaattcctgtgcacaaatttgtgagatagaataaaatgctgttgttttaagccattaagtgttggggtcatttattatgcttcataagatatatccggaatatctggagtccacatatt

SEQ ID NO: 557738 - DNA, 574 bp, Homo sapiens
ggtttctaaacatgtgtgtctttgctcatcttgttcccttttgctggctgtccttccccagttcctcctacctacccccyaccgccagccctgaaaatcccttttctgtgaaggcttttctttttttttttttttttttttgagatggagtcttgctctgtcacccaggctggagtgcaatggcacaatctcagctcactgcagcctcagcctcctgggctcaagcaactctcctgcctcagcctccctagcagctgagattacaaggacccaccaccatgcctagataatttttgtatttttagtagagatggggtttcaccatgctggccaggctggtctcctgacctcaagtaatccatccgcctctgccttccaaagtgctcagattacaggcatgagccactgcacctagtcacctttccttgttccatcagaagactgtattgttctctatgtttccatgatgcttcatgcattatagattttatcatattgtgaaatttggcctatttgtctatctgactagattactcatagtattattaataataataactagctatcatttact

SEQ ID NO: 557739 - DNA, 597 bp, Homo sapiens
gacctcaagtaatccatccgcctcwgccttccaaagtgctcagattacaggcatgagccactgcacctagtcacctttccttgttccatcagaagactgtattgttctctatgtttccatgatgcttcatgcattatagattttatcatattgtgaaatttggcctatttgtctatctgactagattactcatagtattattaataataataactagctatcatttactgaacatttactaatactattccaaagacaatagctccataagataggtactactattatctctgttttacagatatggaaactaaaactccaagagttggattaacttgcccaaggtcacccagctactagtgggcagatctgggatttgaacccacatctgactctcgggctcacgttcttaaccactagattataagacagagattataccatatcattctctgctttctctgcacccagcacagggtctagccttcagtatgtgctaagtaaataattgctggatgaatgatggaataaaggcatcatctccatgtctgctgctgcatccctagctccagatccagtgcctggtacagggagaga

SEQ ID NO: 557740 - DNA, 406 bp, Homo sapiens
cagatcttcactcaataaccacttactcaaaagtccttcagctcaaggctcagtccgaaagggaccgcctggtctgttcactttgttgactctctgtctcctctctttaatgrcagttccaagagggacaggagcttgctttgttggcccttgtattcctagtgcctagaatagggcctggcacatagtaagcactttattagcatttttgttaatgaataaatcgctttttctctagaactagtatttcaatatcaccggttagtacagctcaagatgatggcttcctttcattaaaaccacactttctaaacatacagggttaggcacatcattgcattgtcatgttgctattgttgttttgttgatgttgttgttgttgctgtcactatgtgtgtgtgcattt

SEQ ID NO: 557741 - DNA, 524 bp, Homo sapiens
cgccaccagagaaatgcaaaatattcgttataattttttccttcatgagctgttttaagaagcaagtgctttttctgcttgaagcaaaggggttgggggaaaggaagagtttttgtttttgttttgttttctctgcggtttgcaaaaagcatcaccagatgaaaaagtaaggaatcctgcctgattccctaatccctcaactagcaggaataataataaaccatcccaatctcaactgttcttgcctttataaagacagtatttttcctggaaaatgggattttttcctggaaaatttgatttttgctccttaattttttcttaggcttcagccctagaatttttatatcctgggatctcattagcagaggagatattgcartcattcatgcatgcatgcacatcagcaatattaacttgccaagcactgttctaggcacttggggtacatcagtaggcaaaactgatgaaaacccctgccctggcttgccttttagtaggggaaggcaaacagaagagaattc

SEQ ID NO: 557742 - DNA, 449 bp, Homo sapiens
taaacactataagtaggcactactatttttaacatccacaaattaaagatgaaggaactgaggcacagagaggtcaagtgacttgacccaggtcagataactagtatcagagccagattccaacatgggcaacattgtaggaaaccatgccccgaaccactatgctttactgcctctggctcccctgcacactgtctcccaggctggatgagtggagtccttctcttattggtgtctgcaatgcaccatayaaactcctatcacagcactgaccactgttacagagtaatctgtttatgagtctgtcttctcctcttggctctgagatttattatttatttatttatttatttatttaagagatagggtatagctctgtcacccatgctggaggccaggggcatcattacagctcactgtagcctcgaactcctggcctcaagctcctg

SEQ ID NO: 557743 - DNA, 581 bp, Homo sapiens
agaaatccacaaagatggggaaacaccagcgcaagaaggctgaaaattcccaaaaccagaacacctgtcctcctccaaaygatcacaactcctcaccagcaagggaacaaaactggatggggaatgagtttgatgaactgacagaagtaggcttcagcaggtgggtaagaacaaactcctcggagctaaaggagcatgttttaacccaatgcaaggaagctaagaaccttgaaaaaaggatagttaaattgctaactagaataaccgatgtagagaagaacaaaaatgacctgatggagttgacaaacacagcatgagaactttgtgaagaatacacaagtatcaatagctgaatcaatcaagtggaagaaaggatatcagagattgatgatcaacttaatgaaatagagaaaacaagattagagaaaaaagaataaaaaggaatgaacaaagcctccaagaaatatgggactatgtgaatagaccaaatctacatttgattggtgtacctgaaagtgacagggaaaatggaaccaagttggaaaacactcttcaggatattatccaggagaacttccccg

SEQ ID NO: 557744 - DNA, 611 bp, Homo sapiens
gctgtcttctaattttctgcatgatgttaggcaggatactaagcgtctctggactttgtgtcatgattascaacatgaagattagttggattagatggttctaaggtccctacaactgcaatatgctatgatcccccttcccctccacacctggccaaaagaaagcatatctagataaggcagagaaagtggctcagctcagtccagaggcttctgggaactgcaataagcctgcagctcacatttggtcaactgtggccagctgtctttgggactgagagtttctcttcccaggtcaaccaaaggttgaggcctagataaaaggcttgccccatgctcagctagttgagttgctcagcccgtatccaggattaaccaaggcttctcactggctctctggtttcaaaacaaaacagaactttgaaataggactgcactcagtggaaaatcccacattaacaaggcccctgggagtgctctggaagcaccatctgtcaagtatttgttcgcacaacctgtgaccaaaacagccttttaacgtcattaccaataatgataatagcacctcatgtatttagacagctcttctgacccttcagaacccctcatct

SEQ ID NO: 557745 - DNA, 527 bp, Homo sapiens
acaacttatcactggaagctctttttaaaaaatcgctctaatgaaattcaggggatgagtagaaatggggtaggggcaggctttgtgtttgataatttggtgtgctctttcatcttccctctgcagtcttacgctcattgtttgttgctgctaaagcagtaaatgttgtttgtcttcattgcaaaaccaaggatagaaaactttgaagtgttttctgttgcttaatgtcacctactgttcctgtcagcaaactgarataaacctgatggactgaggtgtctggtctaattcctttattgacacatagtcctgtcttcaaacaccagtgtaaatgaataagtactgagatagtaatgtgtcagtaataggctgccagataaatgccattgtttacgtactgatccctgcttcctaaggcccaaacagctcaaaaatcttacaaattagcacctcgctgagatcaaagaattgtcttttctttctgcaattacctacttggagagcggtgcaagcagatgagacgagtt

SEQ ID NO: 557746 - DNA, 571 bp, Homo sapiens
gaaatggaacactgggcaatagraaacagttctgagaggggctgggggaaggaaagggcatgaaatattgttccctggagaccctgcttagcaagggtcttaattagaaggtgagaagcgtctatgattgaagatataaagcaggtaattttagtctacaatcccttctggagtgccactcaccctccactaatcacttctctacttgaaaataccacagttaccaagaaggccactagtactgcctttaggagttccacagattcaacagctcctcttcacctgcctcccaagctattagacgatggccacggcttttcttaaggtggggacagtgactgagttatggccataagagaaagagttttcatgggtcttctagtaaggtaaatgcagctagcagaatcatccttctctggaactatgattggactttactatttcctcattgacaatcactgggcctaagtacacagacacatgaatgcatataaaactaccatttgatgagaatttactgcaaaggaggatgtgcccattgtcttatgtacattatatatgattgtctaat

SEQ ID NO: 557747 - DNA, 571 bp, Homo sapiens
gaaatggaacactgggcaataggaaacagttctgagaggggctgggggaaggaaagggcatgaaatattgttccctggagaccctgcttagcaagggtcttaattagaaggtgagaagcgtctatgattgaagatataaagcaggtaattttagtctacaatcccttctggagtgccactcaccctccactaatcacttctctacttgaaaataccacagttaccaagaaggccactagtactgcctttaggagttccacagattcaacagctcctcttcacctgcctcccaagctattagacgatggccacggcttttcttaaggtggggacagtgaytgagttatggccataagagaaagagttttcatgggtcttctagtaaggtaaatgcagctagcagaatcatccttctctggaactatgattggactttactatttcctcattgacaatcactgggcctaagtacacagacacatgaatgcatataaaactaccatttgatgagaatttactgcaaaggaggatgtgcccattgtcttatgtacattatatatgattgtctaat

SEQ ID NO: 557748 - DNA, 517 bp, Homo sapiens
cctttaacaagaaacctccttttcttgttamaaagaaataaacttgttgagctgggcacaatgccttatgcctgtaatcccagcgctttgggaagccaaggcaggcagatcacttgaggccaggagttcgagaccagccctggccaacatggtgaaaccctgtctctcctaaaaatacaaaaattagctgggcatggtggcacacgcctgtagtcccagctacttggaaggctgaggcagaggttacagtgagctgagatgaagccactgcactctagtctggacagcagagtggagacactgtctcaaaaaaaaaaaaaaaaagaaagaaagaaacttttcttcttcttgttttagattttcatttgaaaggcttacatttcgcagctttttcttagaactgcaaaagttttcctcaaaatgttttgaagtctaaaataaaaggtgtcattagggaacagaatagctggaaaatttgaaaggttttttctccccttttccacttttaatttgtaat

SEQ ID NO: 557749 - DNA, 517 bp, Homo sapiens
cctttaacaagaaacctccttttcttgttacaaagaaataaacttgttgagctgggcacaatgccttatgcctgtaatcccagcgctttgggaagccaaggcaggcagatcacttgaggccaggagttcgagaccagccctggccaacatggtgaaaccctgtctctcctaaaaatacaaaaattagctgggcatggtggcacaygcctgtagtcccagctacttggaaggctgaggcagaggttacagtgagctgagatgaagccactgcactctagtctggacagcagagtggagacactgtctcaaaaaaaaaaaaaaaaagaaagaaagaaacttttcttcttcttgttttagattttcatttgaaaggcttacatttcgcagctttttcttagaactgcaaaagttttcctcaaaatgttttgaagtctaaaataaaaggtgtcattagggaacagaatagctggaaaatttgaaaggttttttctccccttttccacttttaatttgtaat

SEQ ID NO: 557750 - DNA, 410 bp, Homo sapiens
agggaggtggaggttgcagtgagccgagatcatgccactgcactccagcctgagtgacagagcaagactctgtctcagcaaaaaaaaaaaaaaaaaaaaggaaaagagattagttcccacaatcctacytcccagataagccatctagggttagattagatatgagatgttactctaagtaatttataacataccatgcatgttctgaaatatgcttttttcaaatatttgtacatagagaattccaaatgtttctccatattaatttaattattacagaatactttaataacataactgcattatctaaactgttctatactttaaacatgtaatttgttttcaatttttgctattaaaataccattgtagatggatttttatacatccatgtttctgttcttaaaata

SEQ ID NO: 557751 - DNA, 572 bp, Homo sapiens
taattctcttttgatgggaagtttagagagggaggcgagagactggcgtttagaaattagatcaggggtggagggaagagggaaatgaccatccgataatcaaaccatttaatgttgttctttgaatcagggcaatcgcggcggtagatgaacttgattaggcagacgcgtgagatcaaagtggccgggaccaaagcggacagggtccaacgtgccaggtcagtcgcctttccccggttctcccttctcagtggtgggctaatgtggagaaataaraaacccttagggcttagcgcctgacttcctcattagtatatcacatcgcaacgcttccgaatgcagggtttgctcccaagtcttaccttgcacgggaccacgcaataccctttctagggagaaaagaaacaaccttgaggagaagaagagctgaaagtgaattagaaagtgaatttgacgtcattgaaattggtgtgtggatataataaagtaaggctggtgtataagaatgatgtcatgcttataaatgggaaatgatctatttaattcaacaaaaacttattggaagcctagag

SEQ ID NO: 557752 - DNA, 572 bp, Homo sapiens
ggccttttgtactcaggttaaataagaacatcctgcaaggagtctgttcttttatgcagcctaaagatcaagtaataatcattgacactgatactgarcatgtcgattttgaagagactagcatgtaagtattaagtgcctggaaataaggtgaattacttggaccaggcgactttttaaaaagtgtgtgtgtgtgtgtgtgtatgtgtgtgtgtgtggaggttgttttcccatcacaaaattggttgtaatatttaaagctgatgttttcagctatcaccagttctccaactggtgaattgtaaaggaccttaaggtgaaaagtagaaagtaggaccttaaaaacactttagtcttgacacccagtcttagaaatgctgaagagtggaagatgtaggctattaaatagaactattaacttttggcggggaagagcaggagggatgtataattaactcgtgtaaggattcttcatcacccttaagttacaaaagtaaaataattttcagaggagtctaggagtccgtggcaggagtcacgtcagggaactacctggctggccaacctagggg

SEQ ID NO: 557753 - DNA, 572 bp, Homo sapiens
ggccttttgtactcaggttaaataagaacatcctgcaaggagtctgttcttttatgcagcctaaagatcaagtaataatcattgacactgatactgagcatgtcgattttgaagagactagcatgtaagtattaagtgcctggaaataaggtgaattacttggaccaggcgactttttaaaaagtgtgtgtgtgtgtgtgtgtatgtgtgtgtgtgtggaggttgttttcccatcacaaaattggttgtaatatttaaagctgatgttttcagctatcaccagttctccaactggtgaattgtaaaggaccttaaggtgaaaagtagaaagtaggaccttaaaaacactttagtcttgacacccagtcttagaaatgctraagagtggaagatgtaggctattaaatagaactattaacttttggcggggaagagcaggagggatgtataattaactcgtgtaaggattcttcatcacccttaagttacaaaagtaaaataattttcagaggagtctaggagtccgtggcaggagtcacgtcagggaactacctggctggccaacctagggg

SEQ ID NO: 557754 - DNA, 544 bp, Homo sapiens
tgctctgttgcccaggctgctgtgtagtggtgcaaccatagcttacttcaacctcaaactcttggactcaagtgatccacctgccccagcctcacaaagaactgggattataagcatagctagaactacagatgcacgccaccaggcccagataattaaaaatgattttttaaatagagacagcatctcactatgttgcctaagctggccttgaactcctagcctcaagagatcctccagtctcagcctcccaaaacactgggattacaggtatgagacactgcactgagccccatacagatacaattgatataaataatttcaagaggatatgcaatagtacaatgaagtaatatatttaggtagtaataagttttgagtatatattttgagtatatattttatataatttttgtaacatttatatactattattttaatgtactttagttgtaagtttatgccatttaatttttaaaaattgtagtccttgaatattgacttttatrtatatatcccttgtcccaggtggctattaaaccaa

SEQ ID NO: 557755 - DNA, 638 bp, Homo sapiens
tattttgagtatatattttatataatttttgtaacatttatatactattattttaatgtactttagttgtaagtttatgccatttaatttttaaaaattgtagtccttgaatattgacttttatatatatatcccttgtcccaggtggctattaaaccaaagctctacttcaacagactcgagaaatgttctcagagcaaataaagtttcagtggcccactttcatggttcccgtgttcccttagattttgacttggctttttcttagtatgttgccaactttttgagatttttaagagagagagagggatgtaacatacacacccacagatacatatacatatacatatacatatacatatacatatacatatgtagtagcgttttaaattttcagtaagagagttgattcaaataactgaatctgccatttcccccaaaataaaagtttctcacctaaaaaattatataaatgttgtcacactgtattatgcaattttttcatttagcrctgtttctgaaatttagccatgttaaatttaactaatgcatttatattcactttcatataatattctattgtttgaatacaccagatttaatggtctattatccaggtgatgggcagtttgacttct

SEQ ID NO: 557756 - DNA, 552 bp, Homo sapiens
gatccgccttggcctcccaaagtgctaggattacaggcatgagtcaccatgcccagcccctctctgttttatcatttgtcaaatggagatactatgaatactttcttctttggttgttgtgaggattaaataaaacataaagtgcaattaagttcttagcatacttcccagagcatagaaagttctcaattaactttcagtttttcttattttgtgctgatgttattatttccatcattatatgttttaacttcatgctataattcaatttggttcaccaagtactgtgcaatcaaagatattctagttctagtagaagacatcaaacaaatgtaagtgtacttttccaatttggaaaaatatggtatttgagaaactgctaaatagaacctaagctaaatatagtaaagtggtgagtggtcaggaataagacagttatcatacaaggtgttatggaagtaatcaagcttgtgatgaaatggaaaagccctctaactkgagtgacagtgaggtgatagccttaacaatgcatttgctttgtcatacaaaata

SEQ ID NO: 557757 - DNA, 581 bp, Homo sapiens
cagcagattatttctgtaagtgccagttattttaaaaaatactgattatagtaattaaagccttctcacagttcatataataccttaaagatggtgacttaacaatttattcgaaacaatcagttagtaaatattttctattgaatatattcagggcattcatcatacctgagtcattgggaaatacatttaaagtaataaggactaggaaatgaaatcactgtaagattataataatgtcagcagtgaatcatttatcagaagccacttttatttcaaaagcttgttccaactttttgaaatgtcagagtttaatttytaggataaagtaaaaatatctgtaataataaaaagtaatgacttaccaagagtgcacaaaaccgtcatgcaagaaatgaaacaaatacaaataagtgtcagatgttacaaaagtgttcaaaaattacagaacccaatcacaatgaagggtccataattataaaattatttacctgggaactaactatttagcattaagaaaatatttaatgtactgttaatgtattttccttaccacttctttctctaccattcccagcttg

SEQ ID NO: 557758 - DNA, 627 bp, Homo sapiens
tgaaaacaaatagcaattacttgagcagctcttacaggaggtaagctattataacatttttaaatgtacattttaaagtatccaacttgtttgccacttgcagagatcttatgaatatcattaagtttaatttgtgtcagtttttttcccatggaaactaaagaatttatgtcttctttaacccaacatattcttcactttgcttttttattttgtttaaaaaaagaaaatccaaagcatgwctaatttactcctcatgaacatagtgttcatagaattttctgagggatttacttaaaaggcagatttcctgtcctcacacccaggtattatgactcacccagaaactctggaatttacactttacataagcattttggtgattctgaaacaggaagccctctttgaagaaggctactattattattaaaaataggattgtgagatctagataaatatcatcagacaatctgatactatagtaaggactgcgtattggttcctggtagaaaaagattgtgtattccagaaaaggaatatgaatggacaataagcactttaaagaaagtttactttattaataagcaatgaaaagtgaataaaaacaatatgtgaactattttcacc

SEQ ID NO: 557759 - DNA, 559 bp, Homo sapiens
tctggaatttacactttacataagcattttggtgattctgaaacaggaagccctctttgaagaaggctactattattattaaaaataggattgtgagatctagataaatatcatcagacaatctgatactatagtaaggactgcgtattggttcctggtagaaaargattgtgtattccagaaaaggaatatgaatggacaataagcactttaaagaaagtttactttattaataagcaatgaaaagtgaataaaaacaatatgtgaactattttcacctattcattttttgaaaattaaagattggtattattaccactaggaaaaatgcaaggaattgactacctgctcaaacactgatagtaggagtataatatggcagagactattggaaggcaattagcaatatgtatcacctgttgaagtgaaagacccattagcaaaacttatatgaacacataaagaaatgtataagaatgtttagtaccacattgtttgaaaacatgcaaaattgcatgcatatgatcaatcaagatggaaatgaagaataacccaggaa

SEQ ID NO: 557760 - DNA, 416 bp, Homo sapiens
aacccattgggcagttatatggcaggggaaaaagtcacaaaatgtgattttaagagtcatcttggtcaggcgtggtggctcatgcctgtaatcccagcactttgggaagccaaggtgggcagatcacctgaggtcaggagttcgagaccagcctgactaacatggagaaaccctgtctctattaaaaatacaaaattagccagtgtggtggcgcatacctgtagtcccagctactcgggaggctgaggcaggagaatcacttgaatctgggaagcagaggttgcgatgagctgagatcacgccattgcactccagcctgggcaattaaagygaaactccgtctcaaaaaaagaaaagaaaagaaaaaaaagaatcgtcttaaactttagcttgaaacctgagcaacccagtggaga

SEQ ID NO: 557761 - DNA, 565 bp, Homo sapiens
cccctcgggcactcaaagcgattcagaaatttgccatgaaggaaatgggaactccagatgtgcacattgataccaggctcaacacagctgtctgggccaaaggaataaggaaagtcccaaaccgaatccgtgtttggttgtccaggaaatgtaatgaggatgaagattcaccaaataagctctatactttggttaccyatgtacctgttaaccactttcaaaaatctacagagagtcaatgtggaggagaactaatcgctgaccgtcaaatacctcaaataaagttataaaattgcaaaaaaaaaaaaaaaagacaagaaggaataagtaaagcatttttaaagaattctttaaatttgacgacagtagtctaaagactcaaagtgaaatttaccaggttaaagtcttggatcattttcccataaaaaatccctaccacttctgttgatgagagttgaattgcgagtcatagaaacctgtgcatctctgtcacttcttcgtattctgcttcctaccaagtagaatcatagcttgtttctcatatactgcaacctgctccccccaa

SEQ ID NO: 557762 - DNA, 565 bp, Homo sapiens
cccctcgggcactcaaagcgattcagaaatttgccatgaaggaaatgggaactccagatgtgcacattgataccaggctcaacacagctgtctgggccaaaggaataaggaaagtcccaaaccgaatccgtgtttggttgtccaggaaatgtaatgaggatgaagattcaccaaataagctctatactttggttacccatgtacctgttaaccactttcaaaaatctacagakagtcaatgtggaggagaactaatcgctgaccgtcaaatacctcaaataaagttataaaattgcaaaaaaaaaaaaaaaagacaagaaggaataagtaaagcatttttaaagaattctttaaatttgacgacagtagtctaaagactcaaagtgaaatttaccaggttaaagtcttggatcattttcccataaaaaatccctaccacttctgttgatgagagttgaattgcgagtcatagaaacctgtgcatctctgtcacttcttcgtattctgcttcctaccaagtagaatcatagcttgtttctcatatactgcaacctgctccccccaa

SEQ ID NO: 557763 - DNA, 588 bp, Homo sapiens
gcttattttcagtgttttggataaacttccctttcttattatgaatgttgctcttttcaaaatgtatcgccgtacatcacaaataccccatatttattcctcttaccttttatttgtttgttttataaatgcttcctctgcacttgggggaagacgtccaattgaacctgttaaaaactgaatgccacatgttttaaagtagctaacaatagtctcattaaaaatagtstcttcaaaatgtggaagtataggtactgaaaaagataaaaccactagctgctatatttgcaatttaaaaaaggcaaattcaagatgtgtcagatttaacaaagctactgctggggggccaatttcagagataaaagataaaaggccagcaatccactttacccccagcagttcaatgaaagttgtgtgattcctattgcttcatcaggtaactacaaagtagtttcctcccagtgaattctgtgtttttgtggattctaaaatatctgactgtggaatgagaaaggtttgtttgagtatgataaaggatatctaaaaacccttatgctcagttctgacacatagccattgacaaactaa

SEQ ID NO: 557764 - DNA, 547 bp, Homo sapiens
aagcagtgcagtggcttcttcagagtttgaaagtaagcaagactgtttttattttcctgctatttcccaggtgcatttgggaaatgcttttccttagcgtgccttggacattgcctcttctttgttctatttgctgtcattacaaaggagatcacaatcatcattttggccttcaagttaaatcacatctgttgagtcaggggtttggggcttagcatccatgtggaaagaaatgctcaggtcacagttctttcccygacatgcagtctttctaggtcaccttcatttcttctcccatcaccattgcccctcctgctggccaaaccctcacccatttgttgattcgaactttttatccacttgccctctgcacacttcccagtctagttgaattggcttcactcattttttcagcacttactgagagcctggcatgtgccaggtgctgtttaaagaaaaggtatcattagaaatgagtagggcttacaatttcatcattgagaattcagctttgcaattgagtaacaaaacccactaatatttgaag

SEQ ID NO: 557765 - DNA, 401 bp, Homo sapiens
gaattcaccagttctagttctgcaactaaccaaacartatccgggccccactaaggaacagactacctggaaagtaatggattaaacagaaacaagtgtcaagcctcagggctcctgtttttttctaagtgttaattctgactccaccttaacctccatccattaggaagtaagactctgaggctggacacaaggttccccttccatgggttgtgctcaggagtcagaaggcacattcagcccatggctttggctggcacttttggctgcacttctgcacagggggcagaggttggcaccaggatttagcatctgactctgtcccatgatggtcttgggatacccagcccccggtgagctgctctggcacagaagggtgtgagtctgtttttccttctttg

SEQ ID NO: 557766 - DNA, 401 bp, Homo sapiens
gaattcaccagttctagttctgcaactaaccaaacagtatccrggccccactaaggaacagactacctggaaagtaatggattaaacagaaacaagtgtcaagcctcagggctcctgtttttttctaagtgttaattctgactccaccttaacctccatccattaggaagtaagactctgaggctggacacaaggttccccttccatgggttgtgctcaggagtcagaaggcacattcagcccatggctttggctggcacttttggctgcacttctgcacagggggcagaggttggcaccaggatttagcatctgactctgtcccatgatggtcttgggatacccagcccccggtgagctgctctggcacagaagggtgtgagtctgtttttccttctttg

SEQ ID NO: 557767 - DNA, 401 bp, Homo sapiens
gaattcaccagttctagttctgcaactaaccaaacagtatccgggccccactaagraacagactacctggaaagtaatggattaaacagaaacaagtgtcaagcctcagggctcctgtttttttctaagtgttaattctgactccaccttaacctccatccattaggaagtaagactctgaggctggacacaaggttccccttccatgggttgtgctcaggagtcagaaggcacattcagcccatggctttggctggcacttttggctgcacttctgcacagggggcagaggttggcaccaggatttagcatctgactctgtcccatgatggtcttgggatacccagcccccggtgagctgctctggcacagaagggtgtgagtctgtttttccttctttg

SEQ ID NO: 557768 - DNA, 397 bp, Homo sapiens
accaaacagtatccgggccccactaaggaasagactacctggaaagtaatggattaaacagaaacaagtgtcaagcctcagggctcctgtttttttctaagtgttaattctgactccaccttaacctccatccattaggaagtaagactctgaggctggacacaaggttccccttccatgggttgtgctcaggagtcagaaggcacattcagcccatggctttggctggcacttttggctgcacttctgcacagggggcagaggttggcaccaggatttagcatctgactctgtcccatgatggtcttgggatacccagcccccggtgagctgctctggcacagaagggtgtgagtctgtttttccttctttggggaacctctcactcaaggaattc

SEQ ID NO: 557769 - DNA, 401 bp, Homo sapiens
gaattcaccagttctagttctgcaactaaccaaacagtatccgggccccactaaggaacagactacctggaaagtaatggattaaacagaaacaagtgtcaagcctcagggctcctgtttttttctaagtgttaattctgactccaccttaacctccatccattaggaagtaagactctgaggctggacacaaggttccccttccatgggttgtgctcaggagtcagaaggcacattcagcccayggctttggctggcacttttggctgcacttctgcacagggggcagaggttggcaccaggatttagcatctgactctgtcccatgatggtcttgggatacccagcccccggtgagctgctctggcacagaagggtgtgagtctgtttttccttctttg

SEQ ID NO: 557770 - DNA, 595 bp, Homo sapiens
agagtgaacttgccagatttagtgaacaggaggctgcttgcttttcctctccaccctcgaattcttttggattcaactcagaacccaaagggtgtgaaagactctctcccactcgatttctaaatcacataattacaccctttatcccaggctcccaacccccaggagggccctaaagagaaggagagggtgagagaagacagagggaaacatcatcttccccaaaacccagctccccacatcctgctttactgccccactgaatgcaagatggcccaacccccaggtgtccccaacctgaacacccaggtcaacagcaaagtccacctgccacctgcacagggagccaggtagcatggctctgtgtccagccaggtgggcatacttgtcctgtggctcaggggctcttccactgttaggccaggtgctgtgaggcttgttgtgttctctaccagatctccagatcctcgagccagccaagrttgcaatacactagccttgggttgtgtatctctcaagccagcttgctctaactggagcactccccacatgtgttagccagaaagaaggaaaatatatattactcaatcagttt

SEQ ID NO: 557771 - DNA, 645 bp, Homo sapiens
atctctgccttcgtgttcacacggcactcaccctgtgtgtgtgtctctgtccaagtttctgcctttatgagaacaccaatagtacggaattaggggaccgccttactccattatgacctgatttgtatctgaaacaatcgtatttctaagtaggatcacattccgacactaggggttaggacttcaacatgtgaatttttgggggagatgcaattcaaccctcaatgggggccatgacaaaaggaagccaagtcgtgctctgtcaacacctgagcccaataacccctcactgtagggctttctgccagaactgagcaggagatagggccttacactggagacttctgctctgcgagctgcctgcctcccacgtcccgtcctgagaccatccactaactttgactgtggagggggaaaggcattaaataaactgacaacacggaggaggagaggctccctttagcacactgtgaccctgcccactastgacatgtgactgggcagaattgtaatgcccctttcctggagggaagggcacaaggaaggggtgagcagagctagatctggcaggaaaacatggactgaattgtccctctctaaaaggtcatctggaagggatctggtgctcatccagatgcctgcccg

SEQ ID NO: 557772 - DNA, 531 bp, Homo sapiens
ctaattgttggagctcagtaaaggtaggaggaaggtggctggttggtcctcccttccccctgtttgtgacctgaatttacaggaagtgtttcaacttgtcttatgcatcttatctggcatgtcctgggagatggatgggcaagaactggcctgagcagggatttttgccttgattttaagtcactgggttccattgtcctggcacctccatttccttagtttctgtaagcctgttaacagaaagtagaggctattcaaggttatcaagaaagtgccctgtgctaatgatgagacagtgaattttttttttttttcgagatgggagtttcactcttattgcccaggctagagtgcaatggtgcgatctaggctcaccrcaacctctgccttccaggttcaagtgattagagacagtgaaatttttatggaatactgcacctataaaacacatgccaatctgttagcagtcctgacttgatttaataaaaaccaaggagagccacccctgctttctggccatctcttctttgt

SEQ ID NO: 557773 - DNA, 564 bp, Homo sapiens
acttgcttgacttcactccagggtgagacttgacctttaaggcccaaactctggtgaactgttggactgggtagaaatctttcaagaagcttgaaaataaggccataaaggaggggctttcaaattcctaaatccacatatagggctgagttcctagtcctacacaatcagaatttgcctttttaagtcacsctgcaactattccggctttttatatggcacctttctgagggaggggattttacagccgagggacctccaaagggaacgtccatttgcatgtgtgccctggtatttagggtttgtctcatggtcagctcgcctctcaaagatggctcaccaatcacctgcctgtttttacttagaaagcaggcttgggcaggaggggaaatggatttgaaccatctcagaccaactctatctcttctagcactcagctcagcctcctgtccccatgagcaataaaactctctccttatgtctgtgaaattcgttttctttttcatggtgcctttctttctaagaaaagatagaaagaatggggccaggttcatgtcccagttg

SEQ ID NO: 557774 - DNA, 564 bp, Homo sapiens
acttgcttgacttcactccagggtgagacttgacctttaaggcccaaactctggtgaactgttggactgggtagaaatctttcaagaagcttgaaaataaggccataaaggaggggctttcaaattcctaaatccacatatagggctgagttcctagtcctacacaatcagaatttgcctttttaagtcacgctgcaactattccggctttttatatggcacctttctgagggaggggattttacagccgagggacctccaaagggaacgtccatttgcatgtgtgccctggtatttagggtttgtctcatggtcagctcgcctctcaaagatggctcaccaatcacctgcctgtttttacttagaaagcaggcttgggcaggaggggaaatggatttgaaccatctcagaccaactctatctcttctagsactcagctcagcctcctgtccccatgagcaataaaactctctccttatgtctgtgaaattcgttttctttttcatggtgcctttctttctaagaaaagatagaaagaatggggccaggttcatgtcccagttg

SEQ ID NO: 557775 - DNA, 542 bp, Homo sapiens
atagtgtctttgcagtgactccaggcatgggaataaagggtgaagggtttgcttttcatcagctttattaaataataccaattcttttccaaagttattgcaacttgtacctccttcagccaagcccacatatttaaaataagtaaaacttttgccaaactgagggatgctgtcttattctttccatttttgttttattatatgtgttgaggctttatgactgggtgcatataagttcagaattgttatttcttctcagggaagtttttatcttaccattatgcactgatcttctttatccctattttttttgtcttaaagttaattttgtttaaaactaatatagctacccagctctctttttatgaatattttcctgatagatcttttttcccctttcttattactttcaccttttttgtaaccttatgttttatttcccactgaaaattcctaatagtttttttwaaaaaagaaaagcttttagaaatctcatttcactcagtcacaacactcaactgatatggaggaaaaatcttata

SEQ ID NO: 557776 - DNA, 559 bp, Homo sapiens
aatggtttgtgttttgtggatacatatcaaatgctgtaatatatttttatgatagaattgatggttaatacagggaaaaagtatatattgtgattctgtccaataaagcctcctgttataaaatctcttgcacacttttgatgacctgatgtaaacacattttaaggtacaggttaattgccagaaatgttagttccacgtaatttcatggtgacaccaaagtttctatttcttctctttcctgtcttccaatattgtaccccttttctctcccatttccaatgccccaggtgctcctgcccacccccgcagccttctgagtagtaggtattcatcctttgggggkccatctcttaacttgcccaaaaccacagcagccctccccttcccaaacacccctgaccagggggatgcgtattccccaccctttcaaataccttgcaatttttgccactttggcccagttcctcaggctttgctagatgactaattaacttcttggatctcagaaacagagtaggaggggcctgggagaaggaggaccagacttcttggttgc

SEQ ID NO: 557777 - DNA, 585 bp, Homo sapiens
acatgaacagcgactaagaaccagagcacacatgatcaaattaccagcattgccactaactggctgtaccacctagaattagtgacttatcctctctatgcctcagtttccttgtggataacaccggctagcatcactactgagtcatcatgcttcaggcactcagaacagcacttgacacagggttagccgcacagtcaacattgccagtcagcctcagtgctgtctttttagatagcactctgtctccatagagggggtgtaaaggcaggcatgggagagattgtggatgaggggactgggctggggatccctaaccttgttcacacccatagtgcttacaacattacagcttgatccatttctgagtgaatttgcacagcagtttcaagcctgaccctggggccaggtatttgagcaagaagatccagacgtgatgcagccgggtatcccgtggtgctcgatggcccagcacccacctgggactaatgcagctgactctaacttcactargcccgtagagaatggacattgtgtatggggcttcactcctgggaagtgaaggagtggcaggggccccacaaa

SEQ ID NO: 557778 - DNA, 410 bp, Homo sapiens
agccaggctgccatccatcttccctgtccatctctcccatatttgggacatttctttgcrctgagctgatgaagcccattggcttttagccaaacaaaaccagggcactatttctgcattctaaaagctcatttttaggtaggattctcttccactcttagagtcttagcaatcaaacactctacctcttctttgtactgatgggaaaggaacataagtcatcatttgctcagaaggggagcatatgcttccatattatcagttggttataatccttggagataagcacagtatttttctgtaaattaaaaatggattcgaaggtgtaccaagttttctaaatgatgtctgtcagtacagtgggtttgccctgtgtgggctgaccaaccagataatatagttagttaacc

SEQ ID NO: 557779 - DNA, 610 bp, Homo sapiens
tgctgcagggaaatttgtctcctgccgtgatggatatactccatgctgtaccctgtgtatatggggggtctctgtactgatcccccaagttaactacactttccaaaatttaatggcctcatattgggtatacaggagcggcgcctgtcagcagacagtcctccttacttttaactctgctgggccccttacaacctggggaaaatcatttccccctttgacattttatggccttaaaggaaatgctatgttgaaggtaataggcagcagggacttggggactgctggatgtgagggatcaagctcagctgacacatttctttgatttcgatcatgctgctggtcaagtgcactgtcaatggaacacacactcatttgaycacatggtgccagtgacgcagtggtcaagaagacagcaagaatccctgtctccacagagctgtgtgctgcttttgcagcccagcaatcacctttttctgggagcaaccccccaatattccatcgcagaagcacccactttccccattctgctccacccatgttccaccttatggcttcagctcacagatgcaccttatttgcttgtattttccagatctcatcaatctct

SEQ ID NO: 557780 - DNA, 522 bp, Homo sapiens
ctttatcctattaagtcttttctggcagttattcacgggccaggcttagagctttggtcatcttcaccaacagagtgggggcctgggtgackgtgaaagaagacccccctctggaaggcttagctggaaaccatttctctaaagtagacctcaccatttcctcctaagggcctgaaggggttattatttttaaggcttttaaaataaatagagatggggtcttgctgtgctgcccaggctggactcaaactcctggcctcaaggagtccccttgcctcagcttcccaagtagcagagtcaacagctggcaccctgatgatacaattttgagtatattgatgaaatttttctgagtatttaagttgtacgtgtgggtggtgttttttccccccgtcaaaaatgtgtcttttcttttttcttctctttttggattttggaaatatttctgagtgttttgccccctctgagttactgggaagtgctttacagagctgctatcattttctaaagaagaaatggaag

SEQ ID NO: 557781 - DNA, 546 bp, Homo sapiens
tacaattttgagtatattgatgaaatttttctgagtatttaagttgtacgtgtgggtggtgttttttccccccgtcaaaartgtgtcttttcttttttcttctctttttggattttggaaatatttctgagtgttttgccccctctgagttactgggaagtgctttacagagctgctatcattttctaaagaagaaatggaagcctttgtacattttcaggaaacactagaaaataactaaaagcatgtgatttggaatgactcagacccaggcccaaggcctggaggctcatttcctagctaagttaagcaaatcggtcaatctttatacagctcaacatactcacttataaaataaaattaaaatagtgtcaactttttttattaccttaaaattgtcctctgaagaacagtttttaattttaatgaagtccagtttatcaatttgttgcttagtgaaacctgcctttggttttgcggctaagtaatatttgcctaacctgaagtcccaaacattttcaactctgttttcttgtagaagtgtta

SEQ ID NO: 557782 - DNA, 613 bp, Homo sapiens
ggtaaataagcctatgaaaatatagtcaacatcattagtcattaggaaaatgcaaattaaaaccaactgagatgctgcaaaacaactatgagaatgacttcaattttttaaaactttaccataccaagtgttagtgaggttgtagaggagctagaattttcctayactgcggatgggaatgtaaaatggcctaacactgtgaaacagtttggtcattttttaaaaagttaaacataaacctactaaataatccagcaattctacttataggtgtttatccaggagaaatgaaaatgtatgttgataacaaagaggtgtataggaacgaatattcagaaaagctttgtttataatagccccaaactggaaagaactaatatgttcattaagaagtgaatggatagcaaaattgtgatccatccaaaccatagaatactactcagtaataagaaggaatgaactcttggtacacacagcaacctgggtggaccttaaggtcattatgtgagtgaaaaggacaagctcaaagctacgtactgtatgatttcatttacataccattattgaactgacaagcagagcttggtaagtgcttgcatactgggacttgacc

SEQ ID NO: 557783 - DNA, 579 bp, Homo sapiens
caaatcccttctttggttgagtttttttctaacatatttcttgctttataacttcctatgtaatttctccattcattttgtctttctcctccttttagaaagtaagctctataatcacagggatttttctcaggtttgttcactgatagattcatttgtgtctagaacatgtaactgtgcatcacaagtgcttgataaatttttatggactaaatgaattgtgcccagaaatataggcacaggtgacagattagctcttagttatgtccccaactcagtttcaaagctcttgaaccttttgtagtagcagacagttcctgaggctaggkatagggtgggagctggagaccaggcagataacagagcacagcatcactgctgccactcactcgggtcacctgctgctccacgtggcccagagcttctgtgctctgtgcagggcaggggcccagactgggatgttcctgcttaaagactggactcagtaaagtcatgctatgagatcatgtatgaactaggagaaaacctgcccaatagcattgaacgccatggaaacccatctacttcatacttggctcc

SEQ ID NO: 557784 - DNA, 593 bp, Homo sapiens
ctaagtactacagagataggcaatgatgagcaaaatatagacatgattcctgtctttacaacccttgctgtctaggctcatgatttttaaacatttcaactggtacacacttaccacacaatgataaagatttgatgtatctttagtacatgaygtactctgatgttttctattttattcatgttttttcctaaattaaaagggctgtcacaacctgctagttgattttatgacccatgactgctcagattattcttgcagtttgaaaaccattgacccagtgcagaggttcggaatctcttctctgtcatggattcctcaaaaacatattttacaatgcacaaaacaatgtatataggattagaaaggaaacccactaccttaaagtgcaattacaagaatattttagtaaacgaatgtgtcatatattaatatgtgtgcttcattattaatgcattcaacacaagatctgacaaccaactcatattgctgtaattttgaagtgatgagcagaaatgctatttttagaattctgcaactgtaatgtgatattaaaatatctatgattattattagtgacaaagtcataggca

SEQ ID NO: 557785 - DNA, 587 bp, Homo sapiens
actacatgatgctgtgcaatggaaagtgattatgacaggagatgttcacatcagagccagctgaggggtgtgaggaaaaccatggagctcttctcacccagaagagctgtttctgtggtaatataccagtctttaaaacctcacattctgcaaaatttgtgcactgaaagtaagggagcttctttgggaagacctcaaaaaacccaagcaactgggaaccagawcactactaaaagtgacaataatcttaataaaaatattaaggtagttaaagatgtgttatactctatattcaaatttatagagaactctttttttaacaaaaggtgaaggtagcttggaagggttgagactgctgtgtgatgcttatggagacaaggacagatgggcatcatcagtggaaggcaaggtgaggtttagcagctgtgaacgctagttcaagtgctgtgatgccagagatgaaggttcattggttcattgtcttgtgtttgtttctcttgcacaaaggcggtaactaactgtacagtaaatatttccaagggagaacacatggcaaagtgaggagagagaagaagatggggagaaca

SEQ ID NO: 557786 - DNA, 587 bp, Homo sapiens
actacatgatgctgtgcaatggaaagtgattatgacaggagatgttcacatcagagccagctgaggggtgtgaggaaaaccatggagctcttctcacccagaagagctgtttctgtggtaatataccagtctttaaaacctcacattctgcaaaatttgtgcactgaaagtaagggagcttctttgggaagacctcaaaaaacccaagcaactgggaaccagatcactactaaaagtgacaataatcttaataaaaatattaaggtagttaaagatgtgttatactctatattcaaatttatagagaactctttttttaacaaaaggtgaaggtagcttggaagggttgagactgctgtgtgatgyttatggagacaaggacagatgggcatcatcagtggaaggcaaggtgaggtttagcagctgtgaacgctagttcaagtgctgtgatgccagagatgaaggttcattggttcattgtcttgtgtttgtttctcttgcacaaaggcggtaactaactgtacagtaaatatttccaagggagaacacatggcaaagtgaggagagagaagaagatggggagaaca

SEQ ID NO: 557787 - DNA, 587 bp, Homo sapiens
actacatgatgctgtgcaatggaaagtgattatgacaggagatgttcacatcagagccagctgaggggtgtgaggaaaaccatggagctcttctcacccagaagagctgtttctgtggtaatataccagtctttaaaacctcacattctgcaaaatttgtgcactgaaagtaagggagcttctttgggaagacctcaaaaaacccaagcaactgggaaccagatcactactaaaagtgacaataatcttaataaaaatattaaggtagttaaagatgtgttatactctatattcaaatttatagagaactctttttttaacaaaaggtgaaggtagcttggaagggttgagactgctgtgtgatgcttatggagacaaggacagatgggcatcatcagtggaaggcaaggtgaggtttagcagctgtgaacgctagttcaagtgctgtgatgccagagatgaaggttcattggttcattgtcttgtgtttgtttytcttgcacaaaggcggtaactaactgtacagtaaatatttccaagggagaacacatggcaaagtgaggagagagaagaagatggggagaaca

SEQ ID NO: 557788 - DNA, 570 bp, Homo sapiens
catgatgacaataactaccatgtgttgagctactgtaatagtaagtattgttaactgtgttccctaccacatcccttgaagttaggatttatcaacttattgctacagagaaccacaaccactggaggtggcatagttaggatgtggcagagcaagtctttgagcccagttctgcctggcttgaaagtccctgatctttccaggatgccatccagcactacaggttgwctgcagcaaatctccctgcttgctctcagcacgccagctggtcttgagaatatacaactctcatggtgtggattttgctcactcagtaccatctttcatgcctgctaggaagcttctttattttcaatgaagatctctctctgtgggaatatcttttatgctgtgttagcttcaatccaggttgaaggaatggttgagcctatgatttttgtaagcatttttgacagatgaaatatttgctaactttcacagaagtcaatatttttcttcttttctaataacattctgatctccagtttttctttaaagtccatctgaaaaataacattagcacagccagca

SEQ ID NO: 557789 - DNA, 546 bp, Homo sapiens
agttctttcattggtttgggggtttctggagttggctgcttaatatgattagacccaaaaatgctaaggactctacttctaatagtatggacaacactgatagtccttgttgtgaactgtttagagaattatgcaaaatttccaggtgcagtggttcatgcctgtaatcccagcaatttgggaggctgaggtggacagatcacctgaggtcaggagttcaagaccaacttggccaacatagcaaaaccccatctctactaaaaaatacaaaaattarctgggtgtggtggtgtacacctgtagtcccagctactcggcaggttgagctgggaggatcacttgaacctggagggtggaggttgcagtgatccaagattgcaccactgcactccagcctgggctacagagtgggacctcgtctaaaaaagaaaaaagatttatgtaaaataaatacatttgacactcctaattcatcactcatgacaggcaaggagtttagtgactctatacataatacctttgaccatatgtggagaaccaagggac

SEQ ID NO: 557790 - DNA, 353 bp, Homo sapiens
ctacccttcatctcctttcaataatctattcccaggtatccctgatgtaaattcttgggagccctctggagacttaagagctcactccctcacgaagcagcctctggtgctattttcagccctgattgctaggaaggtcctcctttatcaagctgaagtctacctgctgatcttaattctttcctcttcagctatgatgactaagccttctcccgttcacgtacgattgaggcagaagaatagggtctggaagaaggaaacataaggccrattcatactgacttcctagaactaaatcaaatggaaacacttcagctatgacaggaaatatcctttccattcacagagggcat

SEQ ID NO: 557791 - DNA, 571 bp, Homo sapiens
gtgcttgttaagaaatacaattagatgatttctcctctatgaagaatctccccaaatatccacctaaaaggtagttattatctagcatacttctctgcttttggagaaaacatgaaagaaaaaaacagttttgtctctttcttaaatgtgctatcctctgcaaataccaatggaggttaagccttgcctttggctgctttacagatgacgggtattttgactcaccgtggcattttccgacagaaaccactcagggattgcaatatagtgattgggaactttcctggggacattctgtcgatcctctgcctcccagagcagcgtgtttaaatcaggaaagttgttgttgatgtcaattccatcgtgggtccagcgtcccagggaccagcctcccagctccgagccctggagacaagtgagagtgtraagaatgcacaggctgcaggacaacgcggaccctctaccatacaagatgcatctgtctccacttccccttggggaatgtctctaagcctctagatgccctttgacccaaagatggcatctaaaggagaatattgaaaaacttcct

SEQ ID NO: 557792 - DNA, 413 bp, Homo sapiens
tgtcattaggatgttaggtggaaaaacaaacaaatgaacaaaaaacaactaaaacaggttctgtgggaaacatgagagcagatttagaagatggaagactcaggggcctccctagtctcctgcccacatcagcacccttgggcatcctaactgaaccaagtggcattgccgccgtctgtyttcatcaccctactgctcacttctggagggcctggatgaccctgtactgtgagttactaaaggagcccaccctgctgctcctcctccagtacgtggcacccacatgtgctgtgctgggggctggaacgccaagggagagcagctgtcctgtctccagctcccttgaatccccagtagaagtccgatcttttgttgttgttgtttgtttgttttgagcttgcaatatacttgtc

SEQ ID NO: 557793 - DNA, 563 bp, Homo sapiens
gctaagttcaacaggcggtggatgtcctgccgcagccacctttgtgagcaccgacaagcaacgggcctctaagaaaacatggcttgttgtaattcacttcccacctcctctggagagatccagtggttgtttaccgagcagagggaagagtttctgccactggtcccgaggatcagattgccyggccctgttctctggacacctcctgaaaagcaaacttcttgtatcaatgttggagtttaagcattaacaggtgtttgcctccacatctgcatggtggtgagcaacagcaggtacctctgtccttgacatgcaaggttagttggcacaaatgctttcagaaaggatggcttcaagtcccccaggcacctgctgaaagtgggggactgggatgggagaataagattttatgcattttttgttttttgttttgttttgagacagagtctcactctgtcacccaggctggagtacagtggcatgatctcagctcactgcagtctctgtctcccgggttcaagcgattctcttgcctcagcctcctgagtagctgggattacagg

SEQ ID NO: 557794 - DNA, 624 bp, Homo sapiens
taccagcccattcttgcttgactcgtttgaaagcatgaacgttaagtcctgtttctcccataagtttcaggagaattggttcattcttattctttctactatcattttacaaggctgcttctgtcatctgacaatattctgttttccaggcagccagggtttatgagctttgcatgatcctcatggttcccaagcgtcatctgtgtaaagtggacgtggtatgaaatgtctgacattttggaagctgagattactctgaaaatgttaattgggcaggtgaaaagggtacagatgtgctgtagcagacctttggttttaaaagagaagcatcatttccccaacagggmaactgtagaaggccagctgaagagtaaaggaaaaggtctgaggactgagcctgtggctggctggaaaaaggtgaatgttgagggcccttcacttccatcacaagaaagtcattagacggtaccaattcagtgtctgttcctggcatctatttcctctgtgcaaagggaaccatgtatatgagcttataaatacatttttgtcagagtgcacagataagtaggccattttaattaaacattgaagaccacctcgcctgttgtcttggaaattcaagtt

SEQ ID NO: 557795 - DNA, 571 bp, Homo sapiens
atgggtgtgcacaacgatttatttataaagcacatttactgcattatacattataatagtgaaagacaggaaaccatctaaacgaccgacagtgaattaactaaaaataaagagccaaacaataaaatagtacacaccattaaactttcaaaaaaagttcaatgacagggaaagatgttcacaataaactaagtgaagaaaagcatatgcaaaacagtgtggtatggtgacatttttgttttaaaaaatcccaaatggtaattatatagaaaagcatctggaaatataaactccaagatgttaatggaagttatttctgaataggtggaattgtgtgatttttaaaattctgttttttccatttatttatatgatttgatttttctgcagtgatcatgtatttcttagcaagaagaaaagattattttaataataaaaatacatacacaaacaagactgggaataacatttgcagccaagagaaaatatgtcaaagatagcaaaggtagaaagagcacatataaatgcatatgraatggaaaattatataacagacctgtcaacaaagatg

SEQ ID NO: 557796 - DNA, 571 bp, Homo sapiens
atgggtgtgcacaacgatttatttataaagcacatttactgcattatacattataatagtgaaagacaggaaaccatctaaacgaccgacagtgaattaactaaaaataaagagccaaacaataaaatagtacacaccattaaactttcaaaaaaagttcaatgacagggaaagatgttcacaataaactaagtgaagaaaagcatatgcaaaacagtgtggtatggtgacatttttgttttaaaaaatcccaaatggtaattatatagaaaagcatctggaaatataaactccaagatgttaatggaagttatttctgaataggtggaattgtgtgatttttaaaattctgttttttccatttatttatatgatttgatttttctgcagtgatcatgtatttcttagcaagaagaaaagattattttaataataaaaatacatacacaaacaagactgggaataacatttgcagccaagagaaaatatgtcaaagatagcaaaggtagaaagagcacatataaatgcatatggaatggaaaattayataacagacctgtcaacaaagatg

SEQ ID NO: 557797 - DNA, 380 bp, Homo sapiens
aaagcctcagcctgccaagtagctgggactacaggtgtgcaccaccacgcccagctaattttgtatttttagtagagacagagtttcaccatgttggccaggatggtctcaatctcttgacctcgtgatctgcccaccttggcctcccaaagtgctgggattacaggagtgagccaccacgcctggcctcagcatcgttacaaatgaaaaaactgcaaaattaataaatggaaggaataattctccaatttccaattcattaaagcactcaagttttraaaacacataattttttcatggaaaagtgttatattaaattaatttttaaaaggaaatatcactcttacccctaaatatgtacaattattatgtgtcaatta

SEQ ID NO: 557798 - DNA, 618 bp, Homo sapiens
gactatgaaagatttaattcataaattagaagtaaggaataataaggctaggcatggtggttcatgcctataatcccagcagtctgggaggctgagrcaggcagatcacttgagatcaggagtttgagaccagcctggctaacatggtgaaaccccatctatattaaaaatacaaaaaattagctatggtagtgtgagcctgtagtcccagctacttgggaggctgaagcaggagaattgcttgaacctgggaggtgaaggttgcagtgagctgaaattgcaccactgcaccagcccgggtgacagaacaagactcagtctaaaaaagaaaaaaaaaaagagaagtaaggaataataaagatatgactgaacaatcaaattattggcatggaagaagtgctgaaattattcatggcaaacacacaagaaaaaggcaaagattacagtaggttagaggagatgctagttatggaggacaaagatgatccaatataattataattgatgtctctgaattaggtacccaacaaaaaaaatagggaaaaatatgttcagagatgtaggtcatcagaaataaattgcaaatttttagatcaaagggcatcaaggggaaaaaat

SEQ ID NO: 557799 - DNA, 618 bp, Homo sapiens
gactatgaaagatttaattcataaattagaagtaaggaataataaggctaggcatggtggttcatgcctataatcccagcagtctgggaggctgaggcrggcagatcacttgagatcaggagtttgagaccagcctggctaacatggtgaaaccccatctatattaaaaatacaaaaaattagctatggtagtgtgagcctgtagtcccagctacttgggaggctgaagcaggagaattgcttgaacctgggaggtgaaggttgcagtgagctgaaattgcaccactgcaccagcccgggtgacagaacaagactcagtctaaaaaagaaaaaaaaaaagagaagtaaggaataataaagatatgactgaacaatcaaattattggcatggaagaagtgctgaaattattcatggcaaacacacaagaaaaaggcaaagattacagtaggttagaggagatgctagttatggaggacaaagatgatccaatataattataattgatgtctctgaattaggtacccaacaaaaaaaatagggaaaaatatgttcagagatgtaggtcatcagaaataaattgcaaatttttagatcaaagggcatcaaggggaaaaaat

SEQ ID NO: 557800 - DNA, 618 bp, Homo sapiens
gactatgaaagatttaattcataaattagaagtaaggaataataaggctaggcatggtggttcatgcctataatcccagcagtctgggaggctgaggcaggcagatcacttgagatcaggagtttgagaccagcctggcyaacatggtgaaaccccatctatattaaaaatacaaaaaattagctatggtagtgtgagcctgtagtcccagctacttgggaggctgaagcaggagaattgcttgaacctgggaggtgaaggttgcagtgagctgaaattgcaccactgcaccagcccgggtgacagaacaagactcagtctaaaaaagaaaaaaaaaaagagaagtaaggaataataaagatatgactgaacaatcaaattattggcatggaagaagtgctgaaattattcatggcaaacacacaagaaaaaggcaaagattacagtaggttagaggagatgctagttatggaggacaaagatgatccaatataattataattgatgtctctgaattaggtacccaacaaaaaaaatagggaaaaatatgttcagagatgtaggtcatcagaaataaattgcaaatttttagatcaaagggcatcaaggggaaaaaat

SEQ ID NO: 557801 - DNA, 359 bp, Homo sapiens
ctaagtgaaagaaggtaagagtcaccctgaaatgtagtcaacaccagcaatgctctatttccttccttcaagaatgtacaggtttagaatcattcaacatcaccagaacctattaatcaatgcaggtggagataataaatggcatttcctattacactatgtgagtttccttctatggctattaatttcccacaagatcctttcaagctaactctactctgctctacctttcttatttcttatttcctccatcataaaayatagaaaacatgccccccatgtacttgttaatacattgctatgaagccgttgcttaatcattttatgtcaaatagtctattacccacaaatagattata

SEQ ID NO: 557802 - DNA, 563 bp, Homo sapiens
aataaatggaagacaggccatgtattctggtgccggagtcatcatgggctgcgcaggtcctgttgcaaagacattgagctctgtcatgttttgattttatgcagctgcctgtgatctaacctcagaacctcccccacttctgacacgtggcttcctttcttaaccagggggctcctgccctacaccttgcgtccccagaacccagggacctctcattcacccctctgtcagctcccagcacattcaaagtgcataagtagtaacagtgggtgcctcaaggcaagcaaagcgatcaaaggtatgaacactatccattgaacaaactatgacattacttacctcatcctgtctgaacataaatacagacctcctaaawatactttagattatagacattcccatcaacaaaattatcattcacctggttggttacatcaactttctaaagctcccaaatctgacatttcttttttttttctcctgtgttgccacatcaagaaggacaacttcttggtaaatatactggttgagcctggtactgatatcttatcaagaagttttga

SEQ ID NO: 557803 - DNA, 620 bp, Homo sapiens
tctttgaatttgtgggcaaaggtctagaatccaataggaaaaaaaaaagggaaagaaaaaccatggacaattcaggcacatacagttctaacactgaccctcgaacaaatttttaaaatgttcaaactcacctataattagaaaaattcaagttaaaacattcttaggcaccatttctcacttatcagactgacaaaactttctaattatgacaacatatccttttggtcaggctgtggggaaagaggcctccttgtacatttctggtgggagtacaaattcgtacaacccacctggagagaaatttggcaattcctawtaaagcaacatagacatttacctttctacccagcaatcccacttctagaaagctaccttaaagacagatactttcaacaatctgaaagtacatatgcatgagatcatttattgcagcatgtttcgtaattacaaaatattgggaacaacctaaatgtttatacacaaaagagtagctggataaaccacggtacatccatacagtggagtactatgcagctattttttttaaagatctctatatacagaatgatttccaggacatactgtcaagtagaaaaaagcaaaaagcaaaaatgtac

SEQ ID NO: 557804 - DNA, 594 bp, Homo sapiens
tgattataaataatcaatgtgattcttccccatcccaataagggatcctagactttcacaagcaaattatcttattaaaaaatcagctagtgtcaacaacctacagctttcctcttcttcctctgtgctccctgatttgtgagctacatactgtgaaaactacgcactgtgaaaaatattggcacctgtgaaaacttacagcgttttgaagcgcaagaagagagggagtcggggtgagagggtgaaccaagggaggagaacataaatgtcactgtcactcctggatttgtataacttaattaaatcagattgcattcccccaagccctagctaattgaaattgtttggactaaggacataggagttttaatatgagacaataaatgagtgtaataattttggttcagagatcattggatgaactgaagcagrctggatataatcctatagtcggggaattaggagattatgaaagcaatgagtggagcattgagcacagaaatacccaaggggggttcaaaaatggcatgagagcttcaacaaagaccaactgtgagcttcgagaaagctcctttgcttacaatccatggacat

SEQ ID NO: 557805 - DNA, 361 bp, Homo sapiens
aacatatgctccattcttcccgaagagatacttccatttttattaactatgcatcttgcaatgtgacagccagaagtgccccccttcttttgcaaacagttaaatgattcctctgagagcatctggtccctggaatatgtgaggtagcatgccctgttcacaaggggccttgatcttcaaaccttatcaaataaaacattttggagagcttgctcagaataaagatgaraaaaactggaggcctgggatggtgtggtttgaagtctgtgcactgaatcaaagtacctcagtctcagtctcacctgaaatggctgtaaaaaggcattcaactcttttgtaagctggctagcgggtctttatt

SEQ ID NO: 557806 - DNA, 660 bp, Homo sapiens
gggactgaaggaaggggttcaaaggggcattaggaaacttcttgaagcagtggatttgttgtgatgattttaagggtatatatgcatactagacatcaaagtatatactttttttattttttatttttttggagacagagtctcactctgtcacccaggctggagtgcagtggtgcaatcttggctcactgcaacctccacctccctgcttcaagcaattctcctgcctcagcctcccgagtagctgggactacaggcacatgcckccatacccggctaatttttttttattttagtagagacagggtttcaccatgttgcccaggctgctcttcaactcctgagctcaggcaacctgcccgccttggcctctcaaagtgaaattatatacttttaatgtggataatttgttatatcaattataacacaataaagctgcttagaaagaaaaatagtggtaaacatttcccagtttttatttctaatgtgataaatactgataaataccctcaaatgaaagctcttaggagtcctcaattttaagagtaaaaaggggtcttcaaactaaaaagtttgagaactgctgccctgggggatagagatcctgtcttttcttctttcttggcatcagcagcacgcaacccaacactgagtgcacag

SEQ ID NO: 557807 - DNA, 589 bp, Homo sapiens
aaacgagagccgcaagttacctaggggaaagtcactctgctgacaggccrtggatcccaaagtgtgctctcagacaagcagcagcagcatctggacacttgttagaaatgtacattttcagacctcaaatgcagacctgctgaatcagagtcgggatgagccaggacatgggcagtggtctccccacccttgactactcattggttttgcctgcagagatttaaaaccccaaacaataacacctgtgtctcaccccagagattctgatttaattgattgattgattggattggtctggggtatagcctgggcatcagaatttcaagtctgctaaagtgtcaggtacttggggagcttctgaaaaggaccattgctgagccctcccccaagacttgaggaataagaagcttcaggaggcactgagcatttccagttctagaaagtatcttccacccatgtgattccaaggtactcactggttttgcaaaccttaggagtttgtttctaagactggttcttcctagccttgccaaacaggcccaagcttctaacatagcccttgaacccattcaaccaacaagacattcac

SEQ ID NO: 557808 - DNA, 474 bp, Homo sapiens
attccatgtgcaaaagcatctgtgaatttttttttaagtttttaatttcagacatgtasatttagagaaaaccttctcatgaagttaatgttcggtgcatcagcctagcatggtcaatttaaacatgatacagaatgccatagagtaaacatttaaacccctcccttccttcttagaacgggggtggtctttggtaatatattttttttcccgttttccaagtatgaaaactccagcgagcaaatggtttctgttcaactgttccactcaaacacccttgtcattcttcagcaagagctttatttagaagttcccagagaaatgaaagtgagaaaacccggttcataaagagaatggatataaagagctccattaatacagctgctgggcctggaaagtcaacaaagcctgataatgtgttttatttggacctgtctctactgtgtgctggtgataaggaggtgcttgaagcgc

SEQ ID NO: 557809 - DNA, 474 bp, Homo sapiens
attccatgtgcaaaagcatctgtgaatttttttttaagtttttaatttcagacatgtagatttagagaaaaccttctcatgaagttaatgttcggtgcatcagcctagcatggtcaatttaaacatgatacagaatgccatagagtaaacatttaaacccctcccttccttcttagaacgggggtggtctttggtaatatattttttttcccrttttccaagtatgaaaactccagcgagcaaatggtttctgttcaactgttccactcaaacacccttgtcattcttcagcaagagctttatttagaagttcccagagaaatgaaagtgagaaaacccggttcataaagagaatggatataaagagctccattaatacagctgctgggcctggaaagtcaacaaagcctgataatgtgttttatttggacctgtctctactgtgtgctggtgataaggaggtgcttgaagcgc

SEQ ID NO: 557810 - DNA, 409 bp, Homo sapiens
aggagaacagcacaggaaaaactcacccccatgattcaattatctccacctggccctkcccttgacacatggggattattacaattcaaggtgagatgtgggggggagggacacagccagaccacatcacttgccttgcacacaggtttgcacatgtgtcacaaacagccacagaaccacatgtactcaagccacaaagtcccaggcactgcagactctctgctctcaggtattctatgttctactagccaggactccccgtcatctcccaccaatgacctcctgcctccacctctagcaaaagagactataagatgctgaagaactttctgaacctaagatgaaatgataactcgtagctgcatgaagggtgttagttaagtgtacagtatggatgctactgcttaga

SEQ ID NO: 557811 - DNA, 506 bp, Homo sapiens
agcttcacaaacattctcagacgtaatgtttaactaaatatctgggcaccccatggtccagtcaagttggcacataaaattaactatcacagggagaaattaaatgctgcgatagacagagttccaagatggccccagattcctacccccggcatacatcccctgcatagccctgtcccttgagtgtgagaacagtgaatgcratgagtcagtctcttgattagcttatactacatagtaaaaaggatgggatagtcactcctactattatgttagtctatttaagattcatcttagcagactggagggagactcctttgctggccttgaagaaattagccaccatgttggaaagaggacctctgcaggggccacatggcgaacactgtgggtggcctttgggatctgggactagcccccagctgacatccagcaagaaagcagtgacctcagccctccaaccacaaggagctgaattctgccagtaaccacatgagcatggaaga

SEQ ID NO: 557812 - DNA, 506 bp, Homo sapiens
agcttcacaaacattctcagacgtaatgtttaactaaatatctgggcaccccatggtccagtcaagttggcacataaaattaactatcacagggagaaattaaatgctgcgatagacagagttccaagatggccccagattcctacccccggcatacatcccctgcatagccctgtcccttgagtgtgagaacagtgaatgcgatgagtcastctcttgattagcttatactacatagtaaaaaggatgggatagtcactcctactattatgttagtctatttaagattcatcttagcagactggagggagactcctttgctggccttgaagaaattagccaccatgttggaaagaggacctctgcaggggccacatggcgaacactgtgggtggcctttgggatctgggactagcccccagctgacatccagcaagaaagcagtgacctcagccctccaaccacaaggagctgaattctgccagtaaccacatgagcatggaaga

SEQ ID NO: 557813 - DNA, 603 bp, Homo sapiens
tacacattattaacaagctagcagaaaaacacaacctattctgtaaacttgacaaactcttagctgtcctttcagatgcttcaattgcacttgcatgaaaaggtcactcactcaaggtcaatgtcgaaatattcaagctttggacacaggcagcaagaaccctccaaaacattagctagactgagtcagttcagaatcaagcctggggcatcattccaaagggtagaactattgggctccctatagattcttctacctgctcatgcagcagaaagatgcctgtataatatcacaggccaacccacacatattaaacatatagtttatcaatagaaagaaatttttcccatctgttatgctattagcaaaaatctctggttttgattgtaaaaatagttaatgccttgcagtagctacctcttaagagtgccctttggaataatctttcaaatatgagctgatyacccctgggtgagtcattggagcctcatatgaggtaatacacatgcaatgcttaggacagtcactggcaagcagtaagagctcagtgcacgttgactattactcaaaagccaaaagttaattcctatacattttcacatg

SEQ ID NO: 557814 - DNA, 553 bp, Homo sapiens
aggctccattgtgtgatgaattcccggcctctgtgactctgttttggtattaggcaggcatgctcctttgtgcaaatcaagggcactgagcaagctttcgtgtgttcctaaacttggagtctacacctggggctaagccaatgcagaatgtcaggtgtccattctcaccacaaagaaatagaagcaccaagtaattaacaagcaggaggtcagagctgagttagctactaacctgattgtccttaacacttcatttgtgcctaacgtaaccagaggcctcagtcctctctactagtgaatcctcraactctcagcctgttgggccattttgatgtgaccagtgcttatctaaaagcagaatatctccttttgcctgctgaagttctgatgtttagtcttccccatagctgttaagaagcaaagtggtctttggttctctgctgcccctctcccaaaggccctcctctcccgctttctgccccctgtgacccctctccacatgttcctcactggtgttatctaatctctactaggtattagcccatgaaggcgt

SEQ ID NO: 557815 - DNA, 448 bp, Homo sapiens
gttacattctccccgtctatttcttcatcttaacaatacttacatctttcactgaacaaaaaaagtgcctgtccccacctgcctctatcctcaccttcttctcctagcccatcaacctaggttcattatgttgcaaattttattttgggttgttrtgcacatcaacaatggtagttctgaggacaaacatcaatcaatctttcttctggaggcagatgacttcaaagacatttctttggggtcttccttcttcacccaagtaaatttgaaagatgtatgctagagagtgggctgctttctcctggtagagtatagtatagctgttgactcacaggcacttaacaaaaataaaccttaccacatgaataaacatcaaatcatcacaaacaacactttagccctggaaacctggtgggtgagaagggaatgtttcaccattcccaggaga

SEQ ID NO: 557816 - DNA, 613 bp, Homo sapiens
atagtgataatttcacacacatatactgcagtacaaacatacctcagtggtagttatatgtgtttctacacacaaacacacactyatatacacacatactgtctctaaacgatactttagtttgacaatacagtacttaaactcccctagactcatttttttttaacataagttccatattatcataagcactgggattcaatagcaggcaaaagctattaagcccaaggagaaccaaaacctaaaacacctaaataacccttttactgagctcccactaacagagcttcctatcagccagcgttttagcccggtcccttccttccatgtgctctttaaaatctgtctttgtctcataactggagtttccccaggcttcataagtctttggatataaatgagattatattaaattaatgcccagattctgctgactcttaaacttcacctgcttctctgcaagaaatcagccctctgccttggttttctgcagttatttccaagagaccacaggagcatgtcacctacctcctcattccagccttcctacttctccctaaggaaggcacatctgtcatgccttccccttcactgccagggtgatgtcacaccc

SEQ ID NO: 557817 - DNA, 517 bp, Homo sapiens
taatgctgccactgatctgataggaggcggagctcaggtggtaatgctcacctacctgccattcacctcctgctgtgccgcccagttcctcacagaccacggaccagtactggtctgtgactcaggggtgggggacccctggtctaaagctcaaggaggtggaacataacattccactccagtgtgcaccttacccggtggcttccttctcaggagcacagtatgtragcagggaaaggagtaacctgctttgcagcagagaggcctggcaaacactcctcagcaggcagttaatgtcaacatcaacagccatgagtcatgttgatagaatgtaccctagacacggtatgatgagaatagcaccttacctcccccaaacccataaccctaccctgagcatgaaaaaaaaaatcagaaaaaaaaaattccaattgagggacattttatgacatacttgaccagtatttcagatcaaaatgaggaaagtcattgaaaacaagggaagtctgagaaactg

SEQ ID NO: 557818 - DNA, 550 bp, Homo sapiens
ttccactccagtgtgcaccttacccggtggcttccttctcaggagcacagtatgtaagcagggaaaggagtaacctgctttgcagcagagaggcctggcaaacactcctcagcaggcagttaatgtcaacatcaacagccatgagtcatgttgatagaatgtaccctagacacggtatgatgagaatagcaccttacctcccccaaacccataaccctaccctgagcatgaaaaaaaaaatcagaaaaaaaaaattccaattgagggacattttatgacatacttgaccagtatttcagatcaaaatgaggaaagtcattgaaaacaagggaagtctgagaaactgtcactatcaaggggaaccttaggagacatgacagctaaacatgatatgagatcctgggtgggatcctsgataggatcctgaaaccaaaaaacgagattagatgaaagctacggaaatcagaatagcacatgcacttaataataacaatatactaatactaattcatttgttatgacaaatgtaccacactaataaaacatgtcg

SEQ ID NO: 557819 - DNA, 424 bp, Homo sapiens
accatgggtgacagtaagagaaattgactgtaaatgtgggaatgaaaataargttgtaaaaaaatattgaaaaaggtgccatggaggaaacagggggataaggccttactcatgccaggacgctgcactttgctgtcactgccatggaagcctctgagggggaggaagaggatcagttagtgcttcaaaaatgcctctcactgctgcttgtgtggtgaatgggaaggctgagcccctgtcaaaggtgatgatggtttgggctagggtctgttgggtccaaagacaccgagaaaagctggtgggctgatgttggacatattttgctcttgggataatgaatggattgattagacaggagggagagaaagagagatcaagggtgacttctggatttccagcttgaaaaactggatggtggtgcagc

SEQ ID NO: 557820 - DNA, 635 bp, Homo sapiens
tgtggtccaggctggggacctccacagggtctactctctatgtttatccctcaacaaaaaggtctgatcttgctttggcatccttgatagcattctagaaacasagtagaatatttctattatgatatactgacaaaaccagtggggtcaggctccaactgatattttagatttgaaaattcagttgaaggctgtgtgcagtgactcatacctgtaatcaatcccagcactttgggagggcaaggcgggtggatcacgaggtcaggagatcaaggccatcctggccaacatggtgaaaccccgtctctactaaaactacaaaaattagctgggcgtagttatgcgtgtctgtaatctccactacttgggaggctgaggcaggagaatcgcttgaacctgggagtcagaggttgcagtgagctgagattgtgccactgcactccagcctggcaacagagcgagactctgtctggggaaaaaaaaatcacttgaactattttttatttgtatgagcaggaggagttctgggtaggcattaattctgtgctaccatagttggtcctctcaacaatcctaaaaaaaagacatgactatcccatttttgctgtgagcaactgaggcacagaggctgttct

SEQ ID NO: 557821 - DNA, 567 bp, Homo sapiens
tgtatgataacttttcttcatgatatcaktgagcagaagatcatctctgagcactgtaattatagaattaggaattaggaaataagaatttcaacatttttgaaaatccctgggattatttaattgaataatcaaagaaaatagccagggcaaatgtgtcaactccagcccttggggagtgatgggaagatgatgggaaacagattgtaaccaaaaaaaaaaaaaaaaaaaaaaaaaaaagagaataaatctgcatgaagtttaaatatgatgttgttttcagtcacgtaaaccaataaagcactttgaacccttatcttattttcatttccacatattataggtccatcagcttgtgatggagagcgaaacaccaggttaggagcagctacaggtatggggcactgggagggtgcttgccacagatgggggcggacctgaggcaggtgtgaggcctcaatgtcagatattccctgtatctcaaacacgcaggagcccgccaaagctcctgcctcccagcacgacgtaatcactcaggatctgtttattgcattgatgaacaaatga

SEQ ID NO: 557822 - DNA, 567 bp, Homo sapiens
tgtatgataacttttcttcatgatatcagtgagcagaagatcatctctgagcactgtaattatagaattaggaattaggaaataagaatttcaacatttttgaaaatccctgggattatttaattgaataatcaaagaaaatagccagggcaaatgtgtcaactccagcccttggggagtgatgggaagatgatgggaaacagattgtaaccaaaaaaaaaaaaaaaaaaaaaaaaaaaagagaataaatctgcrtgaagtttaaatatgatgttgttttcagtcacgtaaaccaataaagcactttgaacccttatcttattttcatttccacatattataggtccatcagcttgtgatggagagcgaaacaccaggttaggagcagctacaggtatggggcactgggagggtgcttgccacagatgggggcggacctgaggcaggtgtgaggcctcaatgtcagatattccctgtatctcaaacacgcaggagcccgccaaagctcctgcctcccagcacgacgtaatcactcaggatctgtttattgcattgatgaacaaatga

SEQ ID NO: 557823 - DNA, 571 bp, Homo sapiens
gacatttctttggggtcttccttcttcacccaagtaaatttgaaagatgtatgctagagagtgggctgctttctcctggtagagtatagtatagctgttgactcacaggcacttaacaaaaataaaccttaccacatgaataaacatcaaatcatcacaaacaacactttagccctggaaacctggtgggtgagaagggaatgtttcaccattcccaggagacaagcaatctcacttcattgctggatgatagcccagggtgctgccccacgtcccaaaccacactcttctaaacagcagggtacctatgtttatgaagggttgtaagtgaaaggtacacattaagcaaatatgcataagccaagacatgcccatagtgataatttcacacacatatactgcagtacaaacatacctcagtggtagttatatgtgtttctacacacaaacacacactyatatacacacatactgtctctaaacgatactttagtttgacaatacagtacttaaactcccctagactcatttttttttaacataagttccatattatcataagcactgggat

SEQ ID NO: 557824 - DNA, 481 bp, Homo sapiens
gctattatgattacatggccccttgatatgatctatttgcaaaaaatagaataattcagatctttatgcttgggcctaatctttatgataaaaagaaaaaaaggccaggcacggtggctcacrcttataatcccagcactttgggaggctgaggagggtggatcagctaaggtcaggagttcgagaccagcctggccaacatggcggaatcccatctctactaaaaatctctacaaaaaaatagccgggtggggtggcgggtgcctgtaatctcagctactcaggaggctgaggcaggagaatcacctgaacctgggagacggaggttgcagtgaactgagatggcaccattgcactctagcctgggcaatgagagcaaaactccatctccaaaaaaaaaaaaaaaaaaaaagaaaggaagagaaatctagtaatctgtagtcctgtggttttctcttaaaaatgaggttccaattcaaga

SEQ ID NO: 557825 - DNA, 506 bp, Homo sapiens
acatgggtgtactggatgttcctagcctggcctcatgagacttygcgaactcagctttgtgatggaccaatggtcctaataagtcaacaccatttatttttaggggaaaaaagagaaaacgatataaatttctctagtaaataggagataaataccccttctgctttggggagagggagggatgagtaggtggagcatgggggatttttagggcagtgaaactattcggtgtaattctgcaatggcggatacacatcattagatatttgttgaaacccatagaatgtgccacattctattaacatttagttaatagcaatgaagcaatattggcatatcagttgtaaaaaatgtaccacactaatgcaaggtttaataatagggagaaatgagggcgtgcaagggagtgtatgggaattctctgtattttccaatcatttttctccaaaccaaagcagctcttaaaaatccccagaaatcactgcgtccaaaaaaaaaaaaaaagt

SEQ ID NO: 557826 - DNA, 351 bp, Homo sapiens
attggatatgcaactcccttgaactgaagcaactgccatggatcagactggctggctgggggcctgtgagctcagctttggttgtggggaaaatggacataataggactccatactgatcagcttccctgggccccctgctcagcttgttatgacaggrcacaaaggaggtggctgtgccagaggacgtgagccctatccagaagctgcctgcacttggcccagtatgagctggggtgaatgggggcagcctaactgcttttgcactctgcataaacaaggcctgatggcaagcacttactgaacagctacatggccttcggacaagggggtgttcatcctctgagtctag

SEQ ID NO: 557827 - DNA, 575 bp, Homo sapiens
acttataacagtcttccccattccaatattataatactatttttcttgtatttttatgatttcaatgtatcatttaatctttgatacagatggaatttatttggccatgtggtgtgaggtagggttgcattttctcccctagataattgagatattaatagttacttttsaggtcagatatccatttcccatagaaaataaagcaataaaagttcaatcctaacatgagggaagcctaaacccacttcattgcttggtccaggctgggaaggccatctctgcactggaaccagaggatggcctgttcttggcctttcccagatgaggaagcgtagagcagtggttaagagcaagagtccagaggcaggtggacggagtgaaagtgcttctctctcaatacctagttgtatgaccctggtcaaatgttctcacctctttaatgtgctttctcctcatctgcaaaacagggataatatcagtacctgcatcataaaatggtggtgagaagtaaacaaagtcctgaatgtgaactgcactgcacagtgcttggcaagggaacacaggggagctgctgc

SEQ ID NO: 557828 - DNA, 590 bp, Homo sapiens
agaatgagagagtcaaattcttgtggtttgggcttaaaaggagaactagatgaagagttaggttatggggtccccatgctctcaggactggggagatgccccagagaagcaagagaggttgggtttagctgggtcctccagaggggactgtgcatcctgcccaggacctggggaaatggtggtaaaaccagaaaccccaggcaggtggcggggatctgcgatccagggcatccacgcctcccatcrcccggggtctctggttctggagtagaatgatctgtccagtgatcttagggaggctgacctgaggctgctttacaggaggtctctgaatccagaggtgaatttaattgttagatgacttaaggtttaaacaatttgagaccctctttagaaaacaaaattagaaatgataaatttcagatgagatacaggcagtgtctcttttgggggtgatgaaatgttctggaatttgtgtgatcattggacacgtctgcaaatatactacaaaacaccgaattgtccactttaaaagggtgaattttatggcatgtgaattagttataattaaaaaaatatattgttaaaaa

SEQ ID NO: 557829 - DNA, 212 bp, Homo sapiens
gaatacaaaagtatggcaacataggaggaataagttttagtgtcctatagcactatagggtgactatagttcacaatattttattgtttattttmaaataactagaagagaggattttgaatgtttccaacacaaagaaataataaatgtttgaggtgatggatatgctaattaccctgatttgatcattgcacatatattgtatacatgta

SEQ ID NO: 557830 - DNA, 427 bp, Homo sapiens
gagggtgtcaaaactctacctgttgccctatcctactgtggctgagctagtatccaagttgcaagacaaartcttctttactcatccctctcctctcctcaagcagaaggaaagaatttctcccagaggtgcaagctgcactgcctggggttgggggagagttggcacaagcactcccttggcctccctggctagtgtctcactagctcacctgccccccaagtccactagttccaagcttagcacagcaccaggacttgtccaggaattgcattccttgtggccgagactgcctttcaagtttatttagatccccagggcactgcccaaagcaatctacagattcaattcaattcccatcaaaatatcaacatcatttttcacagaattaggaaagaattataaaattcatatggaaccaaaaaag

SEQ ID NO: 557831 - DNA, 619 bp, Homo sapiens
gtgacatggacatgaaagaaaaatgtaattactcaatcagaaattatatactgggaaaattctgaaaaaaaactggcaagtaaaaacaatgaaaagctgtttattttacagctttttctatatgcccaattaatgtgctcgtaaaggtaagtgacacctctgcgtgattgtccaaaatgtatattaaattactaggtcatagattacacctgtagtgagtcttattgctaaccctacaagttgctggaatgaaggtggtattcatataattgagccagtctaatctttytggattgatttttaaaagcaataggaaattaaaacataattatttgttgaaaaattttgaaaaaattacaatggctagaaataaaggagaagcatcacgtttttagtcttactacctttgtaggtgggatataacaaaatttaaataatatttatccacttcattaagttatttattggtaacaaattagcactgatgagaaagttttatgaactctttattccttaataagaggtgactcactaggtgtaaaaacaaataattaattaacacccacatactaccacccagttatagtgaaaattacaacggtccctctcattttttcaa

SEQ ID NO: 557832 - DNA, 619 bp, Homo sapiens
gtgacatggacatgaaagaaaaatgtaattactcaatcagaaattatatactgggaaaattctgaaaaaaaactggcaagtaaaaacaatgaaaagctgtttattttacagctttttctatatgcccaattaatgtgctcgtaaaggtaagtgacacctctgcgtgattgtccaaaatgtatattaaattactaggtcatagattacacctgtagtgagtcttattgctaaccctacaagttgctggaatgaaggtggtattcatataattgagccagtctaatctttttggattgatttttaaaagcaataggaaattaaaacatawttatttgttgaaaaattttgaaaaaattacaatggctagaaataaaggagaagcatcacgtttttagtcttactacctttgtaggtgggatataacaaaatttaaataatatttatccacttcattaagttatttattggtaacaaattagcactgatgagaaagttttatgaactctttattccttaataagaggtgactcactaggtgtaaaaacaaataattaattaacacccacatactaccacccagttatagtgaaaattacaacggtccctctcattttttcaa

SEQ ID NO: 557833 - DNA, 619 bp, Homo sapiens
gtgacatggacatgaaagaaaaatgtaattactcaatcagaaattatatactgggaaaattctgaaaaaaaactggcaagtaaaaacaatgaaaagctgtttattttacagctttttctatatgcccaattaatgtgctcgtaaaggtaagtgacacctctgcgtgattgtccaaaatgtatattaaattactaggtcatagattacacctgtagtgagtcttattgctaaccctacaagttgctggaatgaaggtggtattcatataattgagccagtctaatctttttggattgatttttaaaagcaataggaaattaaaacataattatttgttgaaaawttttgaaaaaattacaatggctagaaataaaggagaagcatcacgtttttagtcttactacctttgtaggtgggatataacaaaatttaaataatatttatccacttcattaagttatttattggtaacaaattagcactgatgagaaagttttatgaactctttattccttaataagaggtgactcactaggtgtaaaaacaaataattaattaacacccacatactaccacccagttatagtgaaaattacaacggtccctctcattttttcaa

SEQ ID NO: 557834 - DNA, 619 bp, Homo sapiens
gtgacatggacatgaaagaaaaatgtaattactcaatcagaaattatatactgggaaaattctgaaaaaaaactggcaagtaaaaacaatgaaaagctgtttattttacagctttttctatatgcccaattaatgtgctcgtaaaggtaagtgacacctctgcgtgattgtccaaaatgtatattaaattactaggtcatagattacacctgtagtgagtcttattgctaaccctacaagttgctggaatgaaggtggtattcatataattgagccagtctaatctttttggattgatttttaaaagcaataggaaattaaaacataattatttgttgaaaaattttgaaaaaattacaatggctagaaataaaggagaagcatcacgtttttagtcttaytacctttgtaggtgggatataacaaaatttaaataatatttatccacttcattaagttatttattggtaacaaattagcactgatgagaaagttttatgaactctttattccttaataagaggtgactcactaggtgtaaaaacaaataattaattaacacccacatactaccacccagttatagtgaaaattacaacggtccctctcattttttcaa

SEQ ID NO: 557835 - DNA, 476 bp, Homo sapiens
cccactgctaatgaagactcatttttctatctcatggagttttmctttatgtaggcacagttcagttctcactcaaggactccagagaacctctatgtaaatctccacagttctctctctgtgcagccctcttctctctgtcagtctgccttgatgattctagtcaccttggcctccataaactttgatatcttgctcttaaattcagcaaatcatgatattctctctcagattgtctcataccagcctggaggctggaaatcactttcagtaagtatgccgggcacaataaagggtatatattgttttctttctctcagaaatcacagttttgtgctgcctatttttttcatgcaataaaaacagtttatatacttgttctggatttctaaacgtttacaaaagttgcataattctggtagtcattaattcttcatcagcaacagttgaattctcagagacttgtttaactgccc

SEQ ID NO: 557836 - DNA, 429 bp, Homo sapiens
ttctatctcatggagttttcctttatgtaggcacagttcrgttctcactcaaggactccagagaacctctatgtaaatctccacagttctctctctgtgcagccctcttctctctgtcagtctgccttgatgattctagtcaccttggcctccataaactttgatatcttgctcttaaattcagcaaatcatgatattctctctcagattgtctcataccagcctggaggctggaaatcactttcagtaagtatgccgggcacaataaagggtatatattgttttctttctctcagaaatcacagttttgtgctgcctatttttttcatgcaataaaaacagtttatatacttgttctggatttctaaacgtttacaaaagttgcataattctggtagtcattaattcttcatcagcaacagttgaatt

SEQ ID NO: 557837 - DNA, 429 bp, Homo sapiens
ttctatctcatggagttttcctttatgtaggcacagttcagttctcactcaaggactccagagaacctctatgtaaatctccacagttctctctctgtgcagccctcttctctctgtcagtctgccttgatgattctagtcaccttggcctccataaactttgatatcttgctcttaaattcagcaaatcatgatattctctctcrgattgtctcataccagcctggaggctggaaatcactttcagtaagtatgccgggcacaataaagggtatatattgttttctttctctcagaaatcacagttttgtgctgcctatttttttcatgcaataaaaacagtttatatacttgttctggatttctaaacgtttacaaaagttgcataattctggtagtcattaattcttcatcagcaacagttgaatt

SEQ ID NO: 557838 - DNA, 566 bp, Homo sapiens
aatttttcaagaataatgtaaggatcattatagcttcagctgactttgatacatcctttgacagcatatccctcactgtcctgaacatgggctttgcacataaattttcagacctcatctgttcatttaaatctcacttgctaggctcagaggaaagaaggcattagcagagtataagtaggattacttacgttcagcagaaaacaagcagacagtttcaaggactctaaagagagaaaggtaataacaatggcttggttgatcttcccatttcccacctccttggtgagcaggatgggaaaagtcaatcttccctccatggatgcagagatgcaggagatggaggagatgggcaggatggctgagccmtgggctccacagtggacttcagcagagcctgactgcttgttgccttccagatggcccagagcatcatactcctccaacatcccctggtctcctcccaggagctgttaacacagctctttccacttattcaaaatgctcttccatgttgactacaccatctaagctggtagccccaaaagaaggggtgtcattgctcc

SEQ ID NO: 557839 - DNA, 603 bp, Homo sapiens
gagaaactgacacgggactggaggaagcagggctagaagggatagaagcccagcaagggtgcaatttcagatgaagggcaagtctcagcctgatcctgtggtgctctgtagtgtaaattacacaacagagtttttcctccctcaggactagtgagctagactttcatactcctgcacaagttagccattagctatgggccaccccagggtaacataactcctaactcccaggcacttccagctctctatacacatgggtgaagcagctctagtagtctaaggatagtcttctacggagttgtaagtgtgacctgctataagaaaaagaataaaaaacattcagagcctgggtgctgtgcataccaaatggtaaagggaatccaggagatctgagtgagaccaacagcatcagcattatcgtaacataattcagcagaattggtatggtggttcttagaattatgaagtaataacaatgcattctctcrgcagaaatacccctcttttcttacttttatctaaaatggtgttagctcatactgcctccttgctctgggagttttcttagaggatgggggtgtttacatatcggaagataacaag

SEQ ID NO: 557840 - DNA, 603 bp, Homo sapiens
gagaaactgacacgggactggaggaagcagggctagaagggatagaagcccagcaagggtgcaatttcagatgaagggcaagtctcagcctgatcctgtggtgctctgtagtgtaaattacacaacagagtttttcctccctcaggactagtgagctagactttcatactcctgcacaagttagccattagctatgggccaccccagggtaacataactcctaactcccaggcacttccagctctctatacacatgggtgaagcagctctagtagtctaaggatagtcttctacggagttgtaagtgtgacctgctataagaaaaagaataaaaaacattcagagcctgggtgctgtgcataccaaatggtaaagggaatccaggagatctgagtgagaccaacagcatcagcattatcgtaacataattcagcagaattggtatggtggttcttagaattatgaagtaataacaatgcattctctcagcagaaatacccytcttttcttacttttatctaaaatggtgttagctcatactgcctccttgctctgggagttttcttagaggatgggggtgtttacatatcggaagataacaag

SEQ ID NO: 557841 - DNA, 611 bp, Homo sapiens
gtatttttaccctattaaacaaaaatgggatttaaaaatctggttcgggatgttcaaagataattgctaaggcaaattttgcaatttgagaaaacctaactgtaatgatccatttattcagttatttgttaatactcaaattagtaattttcactctgaatggtaaataaaatgttaataaaaaataacaagacatataaactttccctaatgagatgcagttaataaaaacggttgtttacttcagagtatttactataaacatgtccacttatgttattttattgctatctatatactctttcagtttactgtattactgtacttttctctaaaactttaaaaatctgttatctaawatcaattctctaatgctaattttgcaggaaaactgtatttcacattattaatctcattaatataactttcctataaataagcatgaaacatttggaggatgcatatataatgagtgcttggttactatagtagcgaatgtcaaactaattgctaaaaaaagtctaaaggttttcacactttgaaaaatctagtatatcatctatcattattctccaatattgtggcaagaatagtcaccgcaagtaaaaatt

SEQ ID NO: 557842 - DNA, 480 bp, Homo sapiens
ggcaggtctattgattttaagaatttgatatcataaagtatctttctttttattattttatctagttctctttttaaaattgttctttttttgaagctttctctcaacatccatctttcccttcttcattttttgkttggttttttttttttttttttttttttggctggtttttacagtgtggcctaacatacttcaaatccaaataattcccaggatctctgtcattctaaaatttgtttcttttagtacattttcttcctgaaaaaaaatctattctgagaattttgaagatgctgctcacggggtttctacaggaaattaagcatagtatcctttatatgttagtaatttcttagtatgattttaacaataactttctcagtacacccctaaaaaagggaattcatactgttattccttaattaatccttggctttaccaagccaagttaaggcttggtaaaacagatcattttta

SEQ ID NO: 557843 - DNA, 480 bp, Homo sapiens
ggcaggtctattgattttaagaatttgatatcataaagtatctttctttttattattttatctagttctctttttaaaattgttctttttttgaagctttctctcaacatccatctttcccttcttcattttttggttgkttttttttttttttttttttttttggctggtttttacagtgtggcctaacatacttcaaatccaaataattcccaggatctctgtcattctaaaatttgtttcttttagtacattttcttcctgaaaaaaaatctattctgagaattttgaagatgctgctcacggggtttctacaggaaattaagcatagtatcctttatatgttagtaatttcttagtatgattttaacaataactttctcagtacacccctaaaaaagggaattcatactgttattccttaattaatccttggctttaccaagccaagttaaggcttggtaaaacagatcattttta

SEQ ID NO: 557844 - DNA, 584 bp, Homo sapiens
caccccaatttatttatcaatgtattttccctctttttttttttaacctataagtttctgcatgtttctgtgtgcttaaattctacataagatttcttctaagtttgaaaatcatgctgcctttttctagccagcataggtgaggttgcagcataggtgaggttgcagcataggtgaggttgcagcataggtgagaaatatgctgcctttttctagccagcataggtgaggttgatagyagattttttaaaatccagttttagagatgagaatccagcaactcagagaggctaagtaccttccccaaggtcacacaggcagtcagtggaagagtcaggactcccacttgagtgtggttgccattgcagccggagatcatgcaaatgagccactccttcttgtcacctcaccactcctgaaacagagtcaataatttatccagaaccgttaattttctaaaaaaaagtcagacatttctatcagcattagtttctttcatgttccatctgtgatgaggacaagcagaaataccatgctgcttactgacattcttatgtggctttaggggctccttggggctaagc

SEQ ID NO: 557845 - DNA, 584 bp, Homo sapiens
caccccaatttatttatcaatgtattttccctctttttttttttaacctataagtttctgcatgtttctgtgtgcttaaattctacataagatttcttctaagtttgaaaatcatgctgcctttttctagccagcataggtgaggttgcagcataggtgaggttgcagcataggtgaggttgcagcataggtgagaaatatgctgcctttttctagccagcataggtgaggttgatagtagattttttaaaatccagttttagagatgagaatccagcaactcagagaggctaagtaccttccccarggtcacacaggcagtcagtggaagagtcaggactcccacttgagtgtggttgccattgcagccggagatcatgcaaatgagccactccttcttgtcacctcaccactcctgaaacagagtcaataatttatccagaaccgttaattttctaaaaaaaagtcagacatttctatcagcattagtttctttcatgttccatctgtgatgaggacaagcagaaataccatgctgcttactgacattcttatgtggctttaggggctccttggggctaagc

SEQ ID NO: 557846 - DNA, 557 bp, Homo sapiens
gtcttaatattttaagatggcaataccggctgaatatctctaattcaaaaatccaaaatctgaaatgctccaaaatctgaaactttttgagcattgacattatgtcacaagtggaaaacaccatacctgtccttatgttatgggtcatagtcaaaacgcagacacagaacacatattcagtgtaaccaaggggaaaagacccctcagcctccttcagctgtgatagatcttttctgcacacagcatgatggtaatgccaaacaaccatagattgtccacakgagcggctgagatggtgacacctttgctttcttatggttcaatgtatacaaactttgtttcatgcacaatcttattttaaaatattgtataagaataccttcaggctgtatgtaatgtttatatggaacataaataaatttcatgtttagacttaggtcccatctctgagatatctcattatgtatatgcaaatattccaaaatcccaaagaatctgaaatctgaaacacttctggtcccaagcatttcagataagtgatactcaacctgtactac

SEQ ID NO: 557847 - DNA, 557 bp, Homo sapiens
gtcttaatattttaagatggcaataccggctgaatatctctaattcaaaaatccaaaatctgaaatgctccaaaatctgaaactttttgagcattgacattatgtcacaagtggaaaacaccatacctgtccttatgttatgggtcatagtcaaaacgcagacacagaacacatattcagtgtaaccaaggggaaaagacccctcagcctccttcagctgtgatagatcttttctgcacacagcatgatggtaatgccaaacaaccatagattgtccacatgagyggctgagatggtgacacctttgctttcttatggttcaatgtatacaaactttgtttcatgcacaatcttattttaaaatattgtataagaataccttcaggctgtatgtaatgtttatatggaacataaataaatttcatgtttagacttaggtcccatctctgagatatctcattatgtatatgcaaatattccaaaatcccaaagaatctgaaatctgaaacacttctggtcccaagcatttcagataagtgatactcaacctgtactac

SEQ ID NO: 557848 - DNA, 544 bp, Homo sapiens
tttatatgatggggggaggaggagagaacttttacctcgtaagaaaagactccccagactttgcaagatactgtccttgggtacaaagaacagtctttactttcctgtccacccaccgcttttttgaaactaaaacacacacataarccataaaacattcaggatgttgttttctgaaagctttctttgggaagataagaactctgtggcggttttcacagaccccgagccgtggctgttaccaggaagaaaggtgagtagactcatcaccagctgatagggatttctgcaccccataatgaatgctagagatgaaagaatggggaagcaggaaagagttgggtgggctgggcaggtctcggggcatttaccacagtgccatacaaaacagattcttcacaggctgcaacagggagacatccgtgcctctcacatttggtaagtatatagtgaccccttgttatgtgccaagcactgtgggtgaaggaaacaccctcaagaggcttatatgtttcatcaaaatgacaaccaatacttgtaaagc

SEQ ID NO: 557849 - DNA, 587 bp, Homo sapiens
ttgactttctaaagctgaaacatgcagagtgtttgggcggcaacagattataatctctctgctcttaaacaccaacgagtatgtgaaagtaatttgagagccattaatggatgcttgcataatgcctggctcctactaaatactgaaaacacactggctgtgattgtgattcygcaaatcctctccctcctcgagtctcagagttggaaggaagggaccttagacacaaagactggtccctgatccaaccaaaaatatggatatctattatagaattatataatcgattgtaacagctaacattgggcacttactgtgtggtaagtgctcttctagtattttgagcaaattaattctcaggacaaccctatgaggtctttgattaccccattggacagataaggaatctgcaatagagatcagtgacatatcctcttgcccaatcaggattcaaactcaggcagcttgcctcccagggagagcccttagccacgatgctattcatcctgtccaggtcctccctaatgtgctgaacaactgagtgtgtagcctttgcttgcacatcacagtaacgggtgctcactacc

SEQ ID NO: 557850 - DNA, 669 bp, Homo sapiens
actgggagctggcagacatcttgtaggggagagctttgaacttctgggtgaggaaattgtgtttgtaccagttatgattgcaattttygacaagtaagaggaaaaacctccaaagagaggtttgaacaatcaaggggctggtacagtgtctggaagttgtcaccagggtcccaggttccttttcacttgctgttctacctttgtgtgcagcttctgtcctcttggttgcatgatggctgctcctcctccagacatctcgcccatgttccaggaaagaagaacagggaggggaaaaaaggacagatgaatgaatgtatcctcttttgaaaagcttttctgggagtgccatccagtgacttctgccacatatgggtcacgtggccacacttcgtggtaagagaatctgggaaggagactattttagctgggcttattgtcttcctgaacaaaatcaagattctatcattaaagatgacttggaaaatggctgttgggtgggcaattggccgtgtctactgcaaactcatctaaactagaactaagtgggctgggagatcccaggaatcatctgggttatatgaataagacagcacttgaggacttcacaatttagaagggaagacagataagtaattggaacaacaagaacactgaattacgttttaatat

SEQ ID NO: 557851 - DNA, 590 bp, Homo sapiens
ggtttcatgagccgggcccagggtcctggtgctgtgtgcagcctagggacttggtgccctgcatcccagccactccagctgtgactaaaaggatccaaggtacagcttgggccatggcttcagagggtgcaagtcccaagccttggcagcttccacgtggtgttgagcctgtgggtgcacagaagtcaacaattgaggtttgggaacctccacctagatttcagaggatgtatagaaacgcctggatgtccaagtggaagtttactgtaggggcagggccctcatggagaacctctgctaggtcaatacagaagggaaatgtggggttggagcccccacacacagtccctactggggcaccacctagtggagctgtgataagaggtccaccgtcctccagaccccagaatggtagatccactgatagcctgyaccatgggcttgaaaaagccacagacactcaatgccagcctgtgaaagcagccaggagggaggcgttaccctgcaaagccacaggagtggagctgcccaagaccataggaacccaccttttgcatcagcatgacctggatgttagacatggagtcaaa

SEQ ID NO: 557852 - DNA, 579 bp, Homo sapiens
ggccaggcggagcaacaccctttcaagacatccagctgaggcatctcaagcccccagctgcacagcttggtgaagccagcagctcctcccaggttctgrgaattcccagagcttcccctgctgtgggatcctggggccatcaccacttcacattgaggggggccatcaccacctcacattgagtcgatggaaactccccttttccacataataaataaagaaataagccaataaataatcacacatacttgcctggtccatcacaccaacagctgaacttactgaaaacactgaggtcctgaaaagagaccacatccacaccttattgccagcaagttaaaaagcttcttagttcctgacacacggtgagtgtttctccccaaccttcatgggctcttctcttccacccttactcagcctctcttctcgctcatcctgccccaccctcaggagcagtggaaatggctcccctggccacattgcagccaagctcctgccacattccagcagggctatgtacaatcatctctcactgcaaggaccacctttggtctgctccttcaccccaatttatttatc

SEQ ID NO: 557853 - DNA, 623 bp, Homo sapiens
ggtccacattgatgagcctagagtagccagggtctctacattgtattgcttcattaaagtgcctgtacatatgaccaaaaagcatctggttgtggacccagagattctgcttgggcccagcacctattccccactagcactgggtagacattgctttctaggtagacctgagggtgataggaacccagctggggrcttttccctttgggaatctaagggtatgttgcccacctatcctcttggaagaaggtgtgacccatgagctcccattagagggtcatgttggtggggttataggggatacccaagccatagctggtcaggggctgtgggtagccagctccagggtggcttctcagaagagtcaatagcaacccctatgagaaggagtgggagggggtatgagaacaggcatggggctgagatgggtatccaagaaggcaatgaggaatgctcttctaaaataacaaatccattcacagctattgccgtacccacacccacacagatggaagggcagatttgacattgcagaagaaaagataattaaacttgaagacataataataaaaactatacaaaatgaaacacagagaaaacagactgaaaaagatgaacagaga

SEQ ID NO: 557854 - DNA, 316 bp, Homo sapiens
gtaccagatactgagccaggtgcctcyacatcaaccctgtgaaaagaatattcttaccacattttgcagatggaacaattgcagctctcagaagttaaatgtcttacgatgagtgggcccaagattcagatccagaacttattttaagcccatggtctgtcttctacacaataccgaagatattgaggcaaaggaatgagatgttagccacaaaggtatgaggatgaaaagagaatcagagagaccaggcaaccatcaattaggggtttgaggtcagccattgcccccagactacatattgacaaggaaaggaagg

SEQ ID NO: 557855 - DNA, 623 bp, Homo sapiens
ggtccacattgatgagcctagagtagccagggtctctacattgtattgcttcattaaagtgcctgtacatatgaccaaaaagcatctggttgtggacccagagattctgcttgggcccagcacctattccccactagcactgggtagacattgctttctaggtagacctgagggtgataggaacccagctgggggcttttccctttgggaatctaagggtatgttgcccacctatcctcttggaagaaggtgtgacccatgagctcccattagagggtcatgttggtggggttataggggatacccaagccatagctggtcaggggctgygggtagccagctccagggtggcttctcagaagagtcaatagcaacccctatgagaaggagtgggagggggtatgagaacaggcatggggctgagatgggtatccaagaaggcaatgaggaatgctcttctaaaataacaaatccattcacagctattgccgtacccacacccacacagatggaagggcagatttgacattgcagaagaaaagataattaaacttgaagacataataataaaaactatacaaaatgaaacacagagaaaacagactgaaaaagatgaacagaga

SEQ ID NO: 557856 - DNA, 551 bp, Homo sapiens
gggtatgttgcccacctatcctcttggaagaaggtgtgacccatgagctcccattagagggtcatgttggtggggttataggggatacccaagccatagctggtcaggggctgtgggtagccagctccagggtggcttctcagaagagtcaatagcaacccctatgagaaggagtgggagggggtatgagaacaggcatggggctgagatgggtatccaagaaggcaatgaggaatgctcttctaaaataacaaatccattcacagctattgccgtacccacacccacacagatggaagggcagatttgacattgcagaagaaaagataattaaacttgaagacataataataaaaactatacaaaatgaaacacagagaaaacagactgaaaaagatgaacagagaatcagtgactagtggaacaatattaaacagtctaacatatatgtaatcagagcctcataaggagagaakacagaaaacagaaatatttcaggaaataatgatgtgctattttccaaatttggtttaaaaactataatattacaa

SEQ ID NO: 557857 - DNA, 318 bp, Homo sapiens
ggaagtcagcacccagctgccttggccctcagcctatttcctttccccatgagaccccacttccctactcctcagcccctgcccctctggacagggccacctccagccactgtccccaggtgggatgccagactctagccaactcggcctctagggctgcagggctgggccatccagaggacctccctgcttgaaggggtacaaagcccctccctcagaatrgacctccaggttcagtatttgagcacccttgccccactatagctcagagctccaccctctgtccccttctcccattgaagaccctcagccagacgg

SEQ ID NO: 557858 - DNA, 560 bp, Homo sapiens
ctctgtctcaaaaaaaaaaaaaaattaaaatgttagtctggcatggtggctcatgcctgtaatcccagcactttgagaggccaaggcaggtggatcacttgaggtcaggagttcaagaccagccttgccaatgtggtgaaaccccatctctactaaaaatacaaaaattagccaggcgtggtggcacacacctgtaatcttaactactcgagaggctgaggcaggaggattgcttgaacccgggaggtggaggttgcagtgagccgagaaggtgcctctgcacttgagcctgggtgacagagcaagcctccatctcaggaaaaaaaaataataacaataatcaggctcttaagggcttggaggccagattgtgcctcctccagtttcatctctttgggcaattggtagatttcccctggcagccaagcctccctctaggagggccctgatggctgcaggggactgttgttttcacttttcagtgaacatgacattttgaacccaaagctggaatattaayaaagtctgcatacagactggagatcaaaatgacctgaaat

SEQ ID NO: 557859 - DNA, 408 bp, Homo sapiens
acattagtggggaaattggtgacatttgaataagatctgtagtttggttaacagtattgcaccaatgttaatttcctggttttgataactgtaayatgattatgtcagctaacaataggaaaatctgaatgaagagtatagtgaattctgtagtttaaaatatatagttttcttcttcttcttttttttttttttttttttttttgatacagggtctctgtcactgagtctggagtgcagtagcacgatcacagctcactgaagccctcaacctgctgaactcaagtgatcctcccacctcagtctcccaagtaaatgggaccacaggcacgcaacaccatgcccggttaatttttgtactttttgtagagatggagttgcaccatgttgctcaggctggtctcgaat

SEQ ID NO: 557860 - DNA, 590 bp, Homo sapiens
ggacctcgtatgcctgcaccaaggatgtaggcaccctggaaaggggcatgaccttggctgaggcagtccctgaaggctgcctgcccacaaccctccctgcatctgacagcgctgcaggcggccctcacaatgtccacccaaccttctaccacacttgccttcaagaagctaccttcctccccagccccacagctccctcagttcccatccataccgctgccaacccagaaaatgccatagatttcccctgacgcctcctcccatccttccaggccccaccgacctcctcagcaccccacgatgtccctgtaccctctcctttccccccgagccctctccctcctccctgccctagccctgaagcagcctcctgaccccatgtcctcgcttcygccctttccccttcaaaaccagtgcttctgcagcagccccagccttccttagaagacagaaacatgcccccgaagctttcctgtttaaagcccttccctgatccccatcacctcaaggccaaaccccggcttctccacatggcttcctggtcctggcacatgactccagccgcagctcccttcacattcaaccctgac

SEQ ID NO: 557861 - DNA, 562 bp, Homo sapiens
tactaacaaaggtgatttgcaactgggcatggtggctcatgcctgtgatcccagaactttgggtggccaaggtgggttgatcacctgcggtcaggagttcaagactagcctgacaaatatggtgaaaccccttctctactaaaaatacaaaaattagccaagcgtggtggcgtgtgtctgtagtcccagctacttgggagcctgagataggagaattgcttgaacctgggagaaggaggttgcagtaagccatgatcatgccaatgctgcactacagcctargtgacagagtgagaccctgtctgaaaaaaaaaaaaaaaaaaaaaaaaaagagtgatgtgctatcaacatcaataatgaagtacatgtctcaatagacatctcagtttgtattttctacacactcagttacatatcttgtaaataaaaggggaaaggtagattagtattttttatcccccgaccactgtatatcccatactcatcttagtacttaaatggctatttccaaatacattcattttcttaagcatatgggatgagttgatggtatcctagatac

SEQ ID NO: 557862 - DNA, 517 bp, Homo sapiens
tgttgattttggtgcctttaagaaaaaaaaaactttgcaaataactatttgtgctctgatttgccaaagccctgttttaaattctgctattaatgcaaaccaggctgcagacctctgaggtccatgctgattcttctctccaggcctctggtctgctgtgaacagggctgttctctaattgttacagacttcctctaaacctgaagatttgatttggagccttgctttagctgcctttagctggaagatttgattttgagtcctgtttttgcttttagattatatttatttataatatctatccctctctacttccaagaaaagattgttaattccagatttaaaatcaaattccatgctaagaaatgacacagatcatcttcagactgctccctgtaatctactcatctctggttctgtccttgattagctgccacccaaacagagtggcccagcatggtcctaaatccaagccataggayaaggatcctagaaagagaatggagttctttcccaa

SEQ ID NO: 557863 - DNA, 536 bp, Homo sapiens
atctttaggaaaagttagaccctgaaaaatattaatgttaaggcatttcactaagaaaagcaaatgaattctggggcagtcagtatcctttcaatgcaagtcattggaccaaataatacaatgagatgccctttgtataaaaaaattgagattgaagatcaaccatgaacaaaaagaggaggcacctggtaatgtccccgtttgtctctatttatgtcttcctcactgttcagcccattggctttctctaattaatccttataacactgcacttctgaggggcaaattagaaacagaaaacatctccattttgtaaataggaagcagatggagaaacttagtggttsttagtgaatcaataacagcacttcaaaatcaagtctaacttagatgccactgatttatttacatagcacagtaccaaatgcaaataataataacaacattttctttctttcttaagaaaatgaaccatcagaagtctccaaaatttatttttttctttgcgaatctaggccaaattctacaaaaatggg

SEQ ID NO: 557864 - DNA, 642 bp, Homo sapiens
ccggctttttcctgctcataaaaccttaaattactgtacgttgttcaaaggatatatttcagtctgtgcctagacaaagcctagtccagcagccagaagtcttcagttctggccccagttttgccactaactagctgcatggccaaggagaagtgacttatgagaatatatctgtccccagcttctctgtgaaacaataagcattctaaggaagattagaaaacattgtgtttgggctgggcatggtggctcacgcctgtaatcccaacagtttgggaggccaaggcaggcagatcacttgaggtgagtagttcaagaccatcctggctaacatgatgagatcctgtctctactaaaaatacaaaaattagccaggcatggtggcacacacctgtagtcccagctactagggagactgaggtgggagagttgcttgaacccgggaagtggaagttgcaatgagccaagattgtgccattgcactccagcctgggcaayagagtgagactccatctcaaagaacaaagttcagccaggcgcggtggctcatgcctgtaatcctagcactttgggaggctgaggtgagcagatcacctgaggtcaggagttcgggaccagcctggccaacatggtgaaaccccg

SEQ ID NO: 557865 - DNA, 517 bp, Homo sapiens
ttctatgaaggctgagagaggtgaggaagctgcagaagaaaagtttgaactagcaaaggttggttcatgaggtttaaggaaagaagccatctccgtaagataaaagtacaaggtamaacagcaatgctgatgtagaagctgcaagttatccagaagatctagctaacataactgagctaggttgctgcactaaacaacagggcagatgaaaaaaccttctactggaaaaagatgccatctaggactttcctagtcagagagaagtcagtggctggcttcaaaacatcaaaggacaggctgactctcttgttagacctaatgcaaccagtgactatcttgaagccaatattcattgaccattctaaaaatcctaggacccttaagaattacactaaatatactctgcacgtgatctacaaatggagcaacaagcctagatgactgcacatctgttttagcatgattgaccagatattttaagcccattcttgagacctactgctcagaaaaaaagatt

SEQ ID NO: 557866 - DNA, 517 bp, Homo sapiens
ttctatgaaggctgagagaggtgaggaagctgcagaagaaaagtttgaactagcaaaggttggttcatgaggtttaaggaaagaagccatctccgtaagataaaagtacaaggtaaaacagcaatgctgatgtagaagctgcaagttatccagaagatctagctaacataactgagstaggttgctgcactaaacaacagggcagatgaaaaaaccttctactggaaaaagatgccatctaggactttcctagtcagagagaagtcagtggctggcttcaaaacatcaaaggacaggctgactctcttgttagacctaatgcaaccagtgactatcttgaagccaatattcattgaccattctaaaaatcctaggacccttaagaattacactaaatatactctgcacgtgatctacaaatggagcaacaagcctagatgactgcacatctgttttagcatgattgaccagatattttaagcccattcttgagacctactgctcagaaaaaaagatt

SEQ ID NO: 557867 - DNA, 457 bp, Homo sapiens
atatgagattatgcaaatagataaaacctatgccatactggcattcctgagacaggagaaaaggtaaacaactcgggtaacatatttgagaatatagtccatgacagttttcccaatattgctagggaggttgacatgcaatttcaagaaattcagagaaaccctgggagatactatataagatgaccatccccaagacacatagtcatcaaactttccatgatcaatgtgaaaaaaaaaattcttaaaggcagctagaggaaaaggtcagatcmcttacaaaggtcgtcctatcaggctaacagcagacttctcagcaaaaacattacaagccagaagagataacagaactatattcagcattcttaaagaaaagaaattccaaccaacaatttcatatcctgtcagactaagcttcataagcaaaggagaaataaaagcttttccagataagcaa

SEQ ID NO: 557868 - DNA, 606 bp, Homo sapiens
aaaaagtgaactgtggaaagaggaaagaactgagaaccacatataatgaatcaaacatacttaacaagacatgtacagacactttggtgtgcatctcttttattacgttacattaatcaaatactgttaaagacatccatctgagcaaagtgtcatgatgatattctataaaaacattcttttgaaaagagtctgtcctgacagccatatcaactatattgttttaagtgattgtcagacccacacttctcagaaattaagacaatttatgtatgtgcctcttgagttctctcagccccactgaggctagctttttaaaagaaaataatgtacttggagaaaatgcacaaaatctgactaaggagtcataagactctgggtgcaaataattgaaaaaaatattttagaagcataatatcaattcatctagttttaargttttcacaaattataatagggaattctgcttatttcacaaaataattatctgaccttaagaggatttttcctaacatcacataaacctgatggctttacacagtgatgatgagctattatttcattttcatcctgataaactacataagaattgcaatttttatatgc

SEQ ID NO: 557869 - DNA, 573 bp, Homo sapiens
aaccttgttttttgtttttgtttttctttttctttttcttttttgagacagagtctcgctctgtcgcccaggctggagtgcagtggcatgatctcagctcactgcaacctccgcctcccgggttcaagcgattyttctgcctcagcctccgagtagctgggactacaggcacgccaccacgcccagctaatttttgtatttttagtagagacagggttgcaccatgttgaccaggctactctcgaactcctaacctcgtgatctgtctgcctcggcctcccaaagtgctgggattacaagcatgagtcaccacgcccagccaaccttgtaatttaagacatgagaactgtgaaggtttttgctaaacagcacagcctagctgatccttcttttactgggacacaggaaatccctaagtttttttttttttcttaattataatgattttgcagtaaaggtaaactaaataaaattgtgaagcccacagtctgggaagtaaccatatggtgtctggtagaaaatatattagaaagcgaagagaaaatatatacagagggttttgagaaaaagaaa

SEQ ID NO: 557870 - DNA, 559 bp, Homo sapiens
agcctgggtgacatagcagatcctatctctacagaaaaaaataaaaataaaaaaataaaaaaattagtcaggcatgatggtgcacacctgtggtcccagctcttggggaggctaaggcaggagcatcatttgagcccaggaggttgaagctgcagtgagccaagactgtgccactgcacttcagcctgggcaacagagcaaaaccctgtctcaaaaactaaataaacaaatgaagtaaaacagaataaaataaaatatggtaagaggaggagaaggtggaagatgatctggttttgatasctctgatccatgcacggtgctaagcctttcatacagggcttcgcctttggccttggcataacctctatgaaacaggaattattgtccccattctacagacatagaaacaggtcaagtaaattgccagagccaaacacaaaaccaaagtctatctggtttcaaagatcatcctttttaccatatcctatatgtttgtgtttttttaaagaggggagaaaaaaggagtgtatatgtatatttttaatggactaaatatagt

SEQ ID NO: 557871 - DNA, 457 bp, Homo sapiens
ccatctcaaaaaaaaaattttttttwaattaagccaggtgtgatggtgcacacctgtagtcccagatacttgggagtctgaggggacaggatcacttgagcccaggagttggaggctgcagtgaactatcatcacaccactgtactccagcttgggcaacagagcaagactccctctaaaaaaataaaaagtaaaaaattttaaaaacgtattgaagctcaggaatttcaggggaaaaaatttataacatatatactaacatattataaattgtattaatttatgtgtaattaaaactagttatgaatggtatgtatacacacacatgaatgtagtatatacattatacaacatttaaaacttttaaaggatgggagtcaaacagtatttttaagttcatttttattaataatacaaatccaaacataattttgttgttgttgttgttgtttttcaa

SEQ ID NO: 557872 - DNA, 566 bp, Homo sapiens
gctgaggtggaaggattgcatgagtccaggaggttgaggatgcagtgagccatgatcacaccagtgcagtccagcctgggcaacaaatggaaaccctttctcaaaataaaatacaaaggaggccaggcaaggtggctcacgcctgtaatcccagcactttgggaggctgaggcaggtggatcacctgaggtcaggagttcaagaccagcctggccaacatggtgaaaccccatctttactaaaaacacaaaaattagccaggcgtggtggcacatgcctgtaatcccagctactcgggaggccgaggcaggagaatcacttgaacccgggaggcaaaggttgcagtagcygagattgtaccactgtgctccagcctgggtaacagagtgagactctgtctcgaaataataaaattaaaaaatatatatatatgagggtatgcataagctatatgcaaataatacatgatttttaataagggacttaagcatttgaggattttagtatccgtgggaatcctggaaccaatcttccataggtatcaaggatggttataatgttgtaaa

SEQ ID NO: 557873 - DNA, 439 bp, Homo sapiens
ttttgatgtctgcgtgcctaatttttcctggtcgtgagacaagaacctggacctagctgagctaaggagcaaaaatcctgcatcattaaaactaaagaactaattgttcatatgctgagattgtgccactgtactccagcctgggcaacagagagagattccatctcaaaaaaaaaaaaaaagttactactttgtaacttttatttttatgtaactttattttaactttattttattgtaactttattttaaaaacaaagtatttgctattgtatttgttcaaaaaagcttacaaatcaaaatgagagaactattctgtttstcaaccctgagaaactacttaatgttttctgactcctttcgatgtatagtcagcattcgactatccatatctgaacctcctacacacactgtctctttgatgtaaaaactgcaggca

SEQ ID NO: 557874 - DNA, 570 bp, Homo sapiens
aaaatctttgcccatgcctatgtcctaactggtattgcctaggttgacttccagggtttttataattttgggttttacatttaagtctttaattcatcttgaygtaatttttttgtatggtgtaaagaagggtttcagtttcaatctcctgcatatgtctggcctgttataccagcaccatttattgcatagggaatgctcttcccattgcttgtttttgtctggtttgtcaatgatgagttagttgtaggttcatgttcttcttatttctaggtactctaatctgttccattggtctatctgtctgtttttgtaccagtcccatttgtttgggttactgtagccctatatagtagtttcaagtcaggtacagtgatgcctccagcttgtttttttctttttttctttttacttacagttgccttggccattgaggctctttttggttttatatgaattttaaaatagttttctttgtttctgtgaagaatgttaatggtgatttaataggaatagcattgactctataaattgctttgagtagtatggccatttaaaaaatattgattt

SEQ ID NO: 557875 - DNA, 570 bp, Homo sapiens
aaaatctttgcccatgcctatgtcctaactggtattgcctaggttgacttccagggtttttataattttgggttttacatttaagtctttaattcatcttgacgtaatttttttgtatggtgtaaagaagggtttcagtttcaatctcctgcatatgtctggcctgttataccagcaccatttattgcatagggartgctcttcccattgcttgtttttgtctggtttgtcaatgatgagttagttgtaggttcatgttcttcttatttctaggtactctaatctgttccattggtctatctgtctgtttttgtaccagtcccatttgtttgggttactgtagccctatatagtagtttcaagtcaggtacagtgatgcctccagcttgtttttttctttttttctttttacttacagttgccttggccattgaggctctttttggttttatatgaattttaaaatagttttctttgtttctgtgaagaatgttaatggtgatttaataggaatagcattgactctataaattgctttgagtagtatggccatttaaaaaatattgattt

SEQ ID NO: 557876 - DNA, 570 bp, Homo sapiens
aaaatctttgcccatgcctatgtcctaactggtattgcctaggttgacttccagggtttttataattttgggttttacatttaagtctttaattcatcttgacgtaatttttttgtatggtgtaaagaagggtttcagtttcaatctcctgcatatgtctggcctgttataccagcaccatttattgcatagggaatgctcttcccattgcttgtttttgtctggtttgtcaatgatgagttagttgtaggttcatgttcttcttatttctaggtactctaatctgttccattggtctatctgtctgtttttgtaccagtcccatttgtttgggttactgtagccctatatagtagtttcaagtcaggtacagtgatgcctccagcttgkttttttctttttttctttttacttacagttgccttggccattgaggctctttttggttttatatgaattttaaaatagttttctttgtttctgtgaagaatgttaatggtgatttaataggaatagcattgactctataaattgctttgagtagtatggccatttaaaaaatattgattt

SEQ ID NO: 557877 - DNA, 570 bp, Homo sapiens
aaaatctttgcccatgcctatgtcctaactggtattgcctaggttgacttccagggtttttataattttgggttttacatttaagtctttaattcatcttgacgtaatttttttgtatggtgtaaagaagggtttcagtttcaatctcctgcatatgtctggcctgttataccagcaccatttattgcatagggaatgctcttcccattgcttgtttttgtctggtttgtcaatgatgagttagttgtaggttcatgttcttcttatttctaggtactctaatctgttccattggtctatctgtctgtttttgtaccagtcccatttgtttgggttactgtagccctatatagtagtttcaagtcaggtacagtgatgcctccagcttgtttttttmtttttttctttttacttacagttgccttggccattgaggctctttttggttttatatgaattttaaaatagttttctttgtttctgtgaagaatgttaatggtgatttaataggaatagcattgactctataaattgctttgagtagtatggccatttaaaaaatattgattt

SEQ ID NO: 557878 - DNA, 475 bp, Homo sapiens
ggaattaagcctaaaaattaataatgcaataaaaaaagttcaactatttagaaatttaacaaaatacatcaaagcaatttatcaaattagaaatcataatgaaaaktaaaacattttgatttgtaaactaatgatcatacagcataacaaaacttgtggaatgcagcaagtctgtgcagagaagaaaatatatattcaaaaatttataaataagaaaagatggtaagtcaaaaatcaataaccaaatatttatatcaagaagtgagtaaaaggacatcttattgtataccaaaaatgtagaagttagaaaataaaaagagtatttattaaatacaaaataaacaatagaagttagtttattaacaaagccaaaagtggattttttgaaagattaacatttgatagacatttaaccaaattgagcaaaattaaaatacataaataattaaagacacaaatttgaaataccagggat

SEQ ID NO: 557879 - DNA, 475 bp, Homo sapiens
ggaattaagcctaaaaattaataatgcaataaaaaaagttcaactatttagaaatttaacaaaatacatcaaagcaatttatcaaattagaaatcataatgaaaattaaaacattttgatttgtaaactaatgatcatacagcatawcaaaacttgtggaatgcagcaagtctgtgcagagaagaaaatatatattcaaaaatttataaataagaaaagatggtaagtcaaaaatcaataaccaaatatttatatcaagaagtgagtaaaaggacatcttattgtataccaaaaatgtagaagttagaaaataaaaagagtatttattaaatacaaaataaacaatagaagttagtttattaacaaagccaaaagtggattttttgaaagattaacatttgatagacatttaaccaaattgagcaaaattaaaatacataaataattaaagacacaaatttgaaataccagggat

SEQ ID NO: 557880 - DNA, 475 bp, Homo sapiens
ggaattaagcctaaaaattaataatgcaataaaaaaagttcaactatttagaaatttaacaaaatacatcaaagcaatttatcaaattagaaatcataatgaaaattaaaacattttgatttgtaaactaatgatcatacagcataacaaaacttgtggaatgcagcaagtctgtgcagagaagaaaatatatattcaaaaatttataaataagaaaagatggtaagtcaaaaatcaataaccaaatatttatatcaagaagtgagtaaaaggacatcttattgtataccaaaaatgtagaagttagaaaataaaaagagtatttattaaatacaaaataaacaatagaagttagtttattaacaaagccaaaagtggattttttgaaagattaacatttgatagacatttaaccaaattgagcaaaatkaaaatacataaataattaaagacacaaatttgaaataccagggat

SEQ ID NO: 557881 - DNA, 589 bp, Homo sapiens
aagttagtgcctgccagacattaagaacaagatagggggtaaggagcagcaggaaagtggctgtaattaaaaagggcaacatgagggatcctgcagtaagtgttctgattcttgactgtgttggtggatatgtgtgtgtgtgtgtgtgtgtgtgtacaggtgtgtgtgtaaaatccagtctgggttttagaaactttctaatggactctttaaaaaagagacatgtcgtaaatatatgaatacagaaatttcaaaattaggcaatggaaagtatttatcatgcaaacactaaaacaaaatgaatagacctataatattagacaaatgggtttaaagcaaagagtttcactagaaaaaagaaagctgttacatgatattaaatgagtcaattgatgaggaatatattataattaaatatatatgcaaataaaaatcttttcaaaataaattttaagacttcaaaagaaagtcagaatcagaatgagagacttcatcataactcaattgctgacagaataatctagcataagaacattagtaataagatagaagatctgaacaatrtaattaacaaatatgacctatttaa

SEQ ID NO: 557882 - DNA, 540 bp, Homo sapiens
gaattccaccaaacatttaagaaagaatgaacatgaattattttaagctctcccctaaaaataaaagagggaacactgaaaactcacttcatgaggactgcatcactctgattccaaagccagacaaggatgatatcagaaaataaaactacagaacaatatttctgatgaacatagatgtgtttatcctaagtaaaatactttcaaaccaaattcwgcagcacattaaagggatcatatactgtaactaaaagggatttattcctagaattaaaggatgtttcaacatacaaacattaaccaattcaatatatgacattagtagaacaaaaggcaaaaacctcataattatctcaaaagattaacaaaaggcattaaacaaaatgtaacatcccttcatgacaaaaaaaaaagtcaacactataggtataaaagaaatataccacaacacaataaaggccatatgtgaaaaacccacagttaacatcaaaattcatggagaaaaaatgaaatagtttcttctaagattcagtacatggc

SEQ ID NO: 557883 - DNA, 540 bp, Homo sapiens
gaattccaccaaacatttaagaaagaatgaacatgaattattttaagctctcccctaaaaataaaagagggaacactgaaaactcacttcatgaggactgcatcactctgattccaaagccagacaaggatgatatcagaaaataaaactacagaacaatatttctgatgaacatagatgtgtttatcctaagtaaaatactttcaaaccaaattctgcagcacattaaagggatcatatactgtaactaaragggatttattcctagaattaaaggatgtttcaacatacaaacattaaccaattcaatatatgacattagtagaacaaaaggcaaaaacctcataattatctcaaaagattaacaaaaggcattaaacaaaatgtaacatcccttcatgacaaaaaaaaaagtcaacactataggtataaaagaaatataccacaacacaataaaggccatatgtgaaaaacccacagttaacatcaaaattcatggagaaaaaatgaaatagtttcttctaagattcagtacatggc

SEQ ID NO: 557884 - DNA, 540 bp, Homo sapiens
gaattccaccaaacatttaagaaagaatgaacatgaattattttaagctctcccctaaaaataaaagagggaacactgaaaactcacttcatgaggactgcatcactctgattccaaagccagacaaggatgatatcagaaaataaaactacagaacaatatttctgatgaacatagatgtgtttatcctaagtaaaatactttcaaaccaaattctgcagcacattaaagggatcatatactgtaactaaaagggatttattcctagaattaaaggatgtttcaacatacaaacattaaccaattcaatatatgacattagtagaacaaaaggcaaaaacctcataattatctcaaaagattaacaaaaggcattaaacaaaaygtaacatcccttcatgacaaaaaaaaaagtcaacactataggtataaaagaaatataccacaacacaataaaggccatatgtgaaaaacccacagttaacatcaaaattcatggagaaaaaatgaaatagtttcttctaagattcagtacatggc

SEQ ID NO: 557885 - DNA, 596 bp, Homo sapiens
tcgctccatacaatatttttctgccgtgtagaaaattaaaactacaattgaacaattcatattcttacgaactcacctagagctatgcccttggaaaactttgcacccttcaaagggtatgtttggagttgaagaaagttagaaagaaagacaatatrtgatgctgttgacatatttttcctgagttcttttgaaaccaatctcataatcttatagacagtttttttttaataaaaatagaaatttgctcttctagccttaaagcttataacttacatttgccttatctgagatccttactcaggaaacaatccttaggcctctcaaaaagcatcaaagaactaaaactcaccagatcaccacactcaagacaatgagatgccagactcattcatcatgattgcttccccctccctaaatgctgttttcctaactgaccactgcttcttgttgaccaacacctctttcttatttttttttgttttttatttttttttttttgagatggagtctcactctgtcacccaggctggagtgcagtggtgctatctcgactcactgcaagctctgcctcttgggttcaggccattctcctg

SEQ ID NO: 557886 - DNA, 596 bp, Homo sapiens
tcgctccatacaatatttttctgccgtgtagaaaattaaaactacaattgaacaattcatattcttacgaactcacctagagctatgcccttggaaaactttgcacccttcaaagggtatgtttggagttgaagaaagttagaaagaaagacaatatatgatgctgytgacatatttttcctgagttcttttgaaaccaatctcataatcttatagacagtttttttttaataaaaatagaaatttgctcttctagccttaaagcttataacttacatttgccttatctgagatccttactcaggaaacaatccttaggcctctcaaaaagcatcaaagaactaaaactcaccagatcaccacactcaagacaatgagatgccagactcattcatcatgattgcttccccctccctaaatgctgttttcctaactgaccactgcttcttgttgaccaacacctctttcttatttttttttgttttttatttttttttttttgagatggagtctcactctgtcacccaggctggagtgcagtggtgctatctcgactcactgcaagctctgcctcttgggttcaggccattctcctg

SEQ ID NO: 557887 - DNA, 596 bp, Homo sapiens
tcgctccatacaatatttttctgccgtgtagaaaattaaaactacaattgaacaattcatattcttacgaactcacctagagctatgcccttggaaaactttgcacccttcaaagggtatgtttggagttgaagaaagttagaaagaaagacaatatatgatgctgttgacatatttttcctgagttcttttgaaaccaatctcataatcttatagacagtttttttttaataaaaatagaaatttgctcttctagccttaaagcttataacttacatttgccttatctgagatccttmctcaggaaacaatccttaggcctctcaaaaagcatcaaagaactaaaactcaccagatcaccacactcaagacaatgagatgccagactcattcatcatgattgcttccccctccctaaatgctgttttcctaactgaccactgcttcttgttgaccaacacctctttcttatttttttttgttttttatttttttttttttgagatggagtctcactctgtcacccaggctggagtgcagtggtgctatctcgactcactgcaagctctgcctcttgggttcaggccattctcctg

SEQ ID NO: 557888 - DNA, 582 bp, Homo sapiens
ggaggaacacttgaagtcaggagttcaagaccagccttaccaacatggtgaaaccccgtctctactaaaaatacaaaaattagccacgcctataatcgcagatactcgggtggctgagacatgagaattgcttgaacccaggaggcagaggttgcagtgagctgagatcatgccactgcactccagcctgggagacagagcragactgtctcaaaagccaaaaaaaaaaaaaagaaactagaaaaaaagtgcaaaatccaaggcaagaaggaaataataaagaagagaaatcaatagtgttttttaaaacttaagaaaactccagacgtggtttcattggtaaaaactgctcaacatttaaagggaaaatggcaccaagtcaacaaccaagtctcttccagaaaacagcaatacagaaaatacttctcaattcattttatgataccagtattaccatttttttaagaggcggtctcactatgttgttgtccaggctggagagcagtggctatacacaggcacaatcatagcgcactgcagcctggaactcctggactcccgagcaatcctcctactcagcct

SEQ ID NO: 557889 - DNA, 582 bp, Homo sapiens
ggaggaacacttgaagtcaggagttcaagaccagccttaccaacatggtgaaaccccgtctctactaaaaatacaaaaattagccacgcctataatcgcagatactcgggtggctgagacatgagaattgcttgaacccaggaggcagaggttgcagtgagctgagatcatgccactgcactccagcctgggagacagagcgagactgtctcaaaagccaaaaaaaaaaaaaagaaactagaaaaaaagtgcaaaatccaaggcaagaaggaaataataaagaagagaaatcaatagtrttttttaaaacttaagaaaactccagacgtggtttcattggtaaaaactgctcaacatttaaagggaaaatggcaccaagtcaacaaccaagtctcttccagaaaacagcaatacagaaaatacttctcaattcattttatgataccagtattaccatttttttaagaggcggtctcactatgttgttgtccaggctggagagcagtggctatacacaggcacaatcatagcgcactgcagcctggaactcctggactcccgagcaatcctcctactcagcct

SEQ ID NO: 557890 - DNA, 591 bp, Homo sapiens
attgcattgtggttttgatttgcatttccctgatcattagtgatgctgagcatttttccatatgcttgttggccatttgtatatcttcttctgagaattgcctattcatgtccttagcccacttttttatgggattggtttttccttgctgatttgagttatttgtagattctggatattagtcccttgtcagatgaatagaatgtgaagattttctcccactctgtaggttgtctgtttattctattgattatttcttttgctgtggagaagytttttagtttaattaagtcccatctatttatcttcgtttttgtaacatttgctgttgggttcttggtcatgaagtctttgcctaagccaatgtctagaaaggctttcatgatgttattttctagaatctttatgacttcaggtcttagatttaagtctttgaaccattttgagttgatttttgtatagggtgagagatgaggatccagtttcattcttctacatgtggcttgccaattatcccagcaacatttgttgaatagcgtgtcctgtccccattttatttttttattttgttcgctttgtcaaagatcagtt

SEQ ID NO: 557891 - DNA, 450 bp, Homo sapiens
tttgtatagggtgagagatgaggatccagtttcattcttctacatgtggcttgccaattatcccagcaacatttgttgaatagcgtgtcctgtccccattttatttttttattttgttcgctttgtcaaagatcagttggctgtaagaatttgacttttatttctgggttttctattctgttccattggtctatatgcctatttttatactggtaccatgctgtttttrtaactatggccttatagtatagtttgaagtcgggtaatgtgaggctccagatttgttctttttgcttagtcttgctttggctatgtgagctcttttttggttccataaaagttttagaattttttttctagctctgtgaacaatgataatggtattttgatgggaattgcatcgaatttatagattgcttttggaagtatggtcattttcacaacagtgac

SEQ ID NO: 557892 - DNA, 609 bp, Homo sapiens
aagagtatatcttctggcctgaaggcagaaaagtgtgtgaaatatgaaataactgtcagaaggcccctgtgaatggagtagaggaaaaagccccataaaaggcaggacaattttctcaccaccaacactgtacctctgttcacagctgaagccggtatggccaattgccccttttacttttttccaggtctattgaggtataattgacaaaaactgtatatatttaagatgtacaacatgatgtgatatacacatatattgtaaaataactgtcctaatcaagctgattaacgtatctatcacctcacagagttaccattttgtgtgcgtgtgtggtaagaacacttaagatctgctcttttaaaatgcaaatcaaagccacaatgagatatcatcacatactagtaagaatggctatgattaaaaagtcaaaaaataacagatgctggtraggtttcagaggaaaaggaacatttatacactgctggtgggaatataaattagttcagccattgtggaaagcagtgtggtgatttctcaaaggacttaaaacagaattaccattcaacccagcaatctcattactgggtatacaccaaaatgaatata

SEQ ID NO: 557893 - DNA, 412 bp, Homo sapiens
tgaatattgccttttaacaaatatactttagcatgtactgagaatcccctatttatttttaatttgggctaatcaatatgattattaatattattggattaccaaatttggaaacacactttcatccccaaggkgcatatttgttttttttttttttttttttttgccaatttcttgtcttactgtttcaaatattgttggatattatttttattttatttagcattttagtatcaacatttgtaattgaggtactctacataatttttcttcaatatctggtgggttttataattactgctatattggatttgtagtagatattgacaaaaattattcctgtatgttttatacctgtatgagggaaactaatatattttacccctaaatatatttccttgatatatttcaa

SEQ ID NO: 557894 - DNA, 412 bp, Homo sapiens
tgaatattgccttttaacaaatatactttagcatgtactgagaatcccctatttatttttaatttgggctaatcaatatgattattaatattattggattaccaaatttggaaacacactttcatccccaaggggcatatttgttttttttttttttttttttttgccaatttcttgtcttactgtttcaaatattgttggatattatttttattttatttagcattttagtatcaacatttgtaattgaggtactctacataatttttcttcaatatctggkgggttttataattactgctatattggatttgtagtagatattgacaaaaattattcctgtatgttttatacctgtatgagggaaactaatatattttacccctaaatatatttccttgatatatttcaa

SEQ ID NO: 557895 - DNA, 324 bp, Homo sapiens
ggtcgttttctcacataacctttctttttttttccctgtgatccaagaccccattctttttgtaaayttcatgtggtagataagcttctgcacgcatcgtgtgtctgggtcttcgttctaagggctccagtgtacacacattgcagaaacctgtatgccttttctactatttatctgcctcctattagtgattttcagggaaacttcagaaggcaaaagggacattctcctttaacctattctcagacagaatctcccaacatttaactgattcctaatagcttaaaatcactttgaaaaatccatatatttataaccttttct

SEQ ID NO: 557896 - DNA, 552 bp, Homo sapiens
  misc_feature 93: n = A,T,C or G
cacaataaaaatctaacaattatcatgtgcagagtgtgaaaatctcatcagattaaggaacacaaagacatctttttcatatttcgaatgtanaactgttttggaaactgttatttttagaaacagttaaaaacattttttcattagtttttcatgtaaaattgtgacaaccagcatgaaataactgtcatcacagaagcatggtatattcgattccaaaacatattctttgtaagttttaatatatttacgtattatttatacttagattgtaacccataatgtacagatattatttttccttcaactcttaagaatattcttaaataataaaattaaaattaatgaattataatttttgttgcttgggaaaaagaatagacacacacgtgacagtgcatcacttcaccccatcatttcatctcatcatttcatcatttcatctcatcattttatctcatttcatctcatcccatctcatctcatcatttcatatcatctcatcatttcatctcatcatttcaycaaatctcatatcatctcatttccatt

SEQ ID NO: 557897 - DNA, 441 bp, Homo sapiens
aaatctaatagagctaaaaataaaaattaatttggaaaggtcattagatactgatacattcttacgtttatacattctttcatatattcatatattcttttaacagtatcaatggtttggagttatgtgtacaaaaccatgacctatatgtaatacaactaataacaggcatttacaattcaaggcatattatatacaaagcttaacttcttatcaaaatattttgttttttttctttctgttttggcagatactatgaacactacattcaactcacagacaccatggagyccttactaagcataaagtactgtgaaaggccagggctaggacagaactgagacagggccagggataggacagaacaggggcagggtcatggccagagaaaatccaggggcagggtcacggccagggacatgagaggaccaaggccagggc

SEQ ID NO: 557898 - DNA, 441 bp, Homo sapiens
aaatctaatagagctaaaaataaaaattaatttggaaaggtcattagatactgatacattcttacgtttatacattctttcatatattcatatattcttttaacagtatcaatggtttggagttatgtgtacaaaaccatgacctatatgtaatacaactaataacaggcatttacaattcaaggcatattatatacaaagcttaacttcttatcaaaatattttgttttttttctttctgttttggcagatactatgaacactacattcaactcacagacaccatggagtccttactaagcataaagtactgtgaaaggccagggctaggacagaactgagacagggccagggataggacagaacaggggcagggtcatggccagagaaaawccaggggcagggtcacggccagggacatgagaggaccaaggccagggc

SEQ ID NO: 557899 - DNA, 522 bp, Homo sapiens
ccagggcagggcaggaccagtgcagggccaatgcagggtgagggcaaggccagggcatggaagggcagggcaggaccaaggaagggccaggagagggccacggcagggtcacggccagaasaagggtatggctggggtcaggaatgtggtaggacgagggctgggcccaggctgggacacgcagggcagagcatgatctgtgcaaggcacggccagagccaggccatagagatgggagggcaacaccaaggcagagtcagggtagatccagggctgagcagagtcagggcaggtccagagtcgaggcagagctagggcccaagcagggccatggtagcaccagggcagaggagggcagggcaatgcaggactgggccatggcagtgcctggtcaactcccgggcagggccagaagcaggacagtgccagggccaatgctcaggccagggacagggcatgacaggaagtgccagagcagggctggaccaacgttggggcagggcaaatcagaccaggacacct

SEQ ID NO: 557900 - DNA, 522 bp, Homo sapiens
ccagggcagggcaggaccagtgcagggccaatgcagggtgagggcaaggccagggcatggaagggcagggcaggaccaaggaagggccaggagagggccacggcagggtcacggccagaacaagggtatggctggggtcaggaatrtggtaggacgagggctgggcccaggctgggacacgcagggcagagcatgatctgtgcaaggcacggccagagccaggccatagagatgggagggcaacaccaaggcagagtcagggtagatccagggctgagcagagtcagggcaggtccagagtcgaggcagagctagggcccaagcagggccatggtagcaccagggcagaggagggcagggcaatgcaggactgggccatggcagtgcctggtcaactcccgggcagggccagaagcaggacagtgccagggccaatgctcaggccagggacagggcatgacaggaagtgccagagcagggctggaccaacgttggggcagggcaaatcagaccaggacacct

SEQ ID NO: 557901 - DNA, 383 bp, Homo sapiens
gagcagagtcagggcaggtccagagtcgaggcagagctagggcccaagcagggccatggtagcaccagggcagaggagggcagggcaatgcaggactgggccatggcagtgcctggtcaactccsgggcagggccagaagcaggacagtgccagggccaatgctcaggccagggacagggcatgacaggaagtgccagagcagggctggaccaacgttggggcagggcaaatcagaccaggacacctccaagtccatctctgccctgccttggccctggccccttcctggcctgaccttgtccctggccctgccctatccatgccctgtgtgtttgaccagtgttttataaccagaatcctacaagaaacttaaattagttct

SEQ ID NO: 557902 - DNA, 383 bp, Homo sapiens
gagcagagtcagggcaggtccagagtcgaggcagagctagggcccaagcagggccatggtagcaccagggcagaggagggcagggcaatgcaggactgggccatggcagtgcctggtcaactcccgggcagggcmagaagcaggacagtgccagggccaatgctcaggccagggacagggcatgacaggaagtgccagagcagggctggaccaacgttggggcagggcaaatcagaccaggacacctccaagtccatctctgccctgccttggccctggccccttcctggcctgaccttgtccctggccctgccctatccatgccctgtgtgtttgaccagtgttttataaccagaatcctacaagaaacttaaattagttct

SEQ ID NO: 557903 - DNA, 522 bp, Homo sapiens
ccagggcagggcaggaccagtgcagggccaatgcagggtgagggcaaggccagggcatggaagggcagggcaggaccaaggaagggccaggagagggccacggcagggtcacggccagaacaagggtatggctggggtcaggaatgtggtaggacgagggctgggcccaggctgggacacgcagggcagagcatgatctgtgcaaggcacggccagagccaggccatagagatgggagggcaacaccaaggcagagtcagggtagatccagggctgagcagagtcagggcaggtccagagtcgaggcagagctagggcccaagcagggccatggtagcaccagggcagaggagggcagggcaatgcaggactgggccatggcagtgcctggtcaactcccgggcagggccagaagcaggacagtgccagggccartgctcaggccagggacagggcatgacaggaagtgccagagcagggctggaccaacgttggggcagggcaaatcagaccaggacacct

SEQ ID NO: 557904 - DNA, 494 bp, Homo sapiens
aggctagggcagggcaatggcaagaccaggccatggcagggccagcccaggatagaacagggcacaggcagggcagggccagggccacggctggggcaggacaaggaccaggactggagtccaggccagggcaagggtatggccagggcagaggtagggccagagccagggtctgggcaggaccaaggcaggtctattgcagggccagggttcagaccagggccagagcagggctgggacagggccagggccagaaccaggaaagggcaatgtcaggacaagggccgtggcaggaccagcaatggggctggggccaggacagggacagggacagggtcagggctagggccagaatagcatgccagggtagagccaggccaaattagggccaggacagggtcaggaccagggctgggccagggtatggccttaagtagcgaagggycagggccagggtccatgccagtgccagtgctggtccagggaagatgcag

SEQ ID NO: 557905 - DNA, 512 bp, Homo sapiens
tctagggcacaagcagggcaggctagggcagggcaatggcaagaccaggccatggcagggccagcccaggatagaacagggcacaggcagggcagggccagggccacggctggggcaggacaaggaccaggactggagtccaggccagggcaagggtatggccagggcagaggtagggccagagccagggtctgggcaggaccaaggcaggtctattgcagggccagggttcagaccagggccagagcagggctgggacagggccagggccagaaccaggaaagggcaatgtcaggacaagggccgtggcaggaccagcaatggggctggggccaggacagggacagggacagggtcagggctagggccagaatagcatgccagggtagagccaggccaaattagggccaggacagggtcaggaccagggctgggccagggtatggccttaagtagcgaagggtcagggccagggtccatgccagtgccagygctggtccagggaagatgca

SEQ ID NO: 557906 - DNA, 449 bp, Homo sapiens
tggcaagaccaggggcagaccaytgccagctcagggccagggaaagtccagtgcagagccaggaaagggtctgggtctgggtcagggccaggaacaaggcagagcagggccagggccatggcagagtcagggcaggtccttgacaggaccaggttccaggccagggccagggcagcagcaggggcagggcctggataagggcagggccagggatatggcaggaccagggctagggccagggccaggccatagtgagggcagggcaaaagccaagggcagggtcagggcaggtccagggcaggtccagggagtggccagcaccaagcggggccaagtcacaaccagcgcagggtaaggcagggaatggcaccactgggccatgacaaggcaaggtcagtgccaggagagggcagaacaggcaggcccatggtggagccagggcagggatg

SEQ ID NO: 557907 - DNA, 449 bp, Homo sapiens
tggcaagaccaggggcagaccattgccagctcagggccagggaaagkccagtgcagagccaggaaagggtctgggtctgggtcagggccaggaacaaggcagagcagggccagggccatggcagagtcagggcaggtccttgacaggaccaggttccaggccagggccagggcagcagcaggggcagggcctggataagggcagggccagggatatggcaggaccagggctagggccagggccaggccatagtgagggcagggcaaaagccaagggcagggtcagggcaggtccagggcaggtccagggagtggccagcaccaagcggggccaagtcacaaccagcgcagggtaaggcagggaatggcaccactgggccatgacaaggcaaggtcagtgccaggagagggcagaacaggcaggcccatggtggagccagggcagggatg

SEQ ID NO: 557908 - DNA, 449 bp, Homo sapiens
tggcaagaccaggggcagaccattgccagctcagggccagggaaagtccagtgcagagccaggaaagggtctgggtctgggtcagggccaggaacaaggcagagcagggccagggccatggcagagtcagggcaggtccttgacaggaccaggttccaggccagggccagggcagcagcaggggcagggcctggataagggcagggccagggatatggcaggaccagggctagggccagggccaggccatagtgagggcagggcaaaagccaagggcagggtcagggcaggtccagggcaggtccagggagyggccagcaccaagcggggccaagtcacaaccagcgcagggtaaggcagggaatggcaccactgggccatgacaaggcaaggtcagtgccaggagagggcagaacaggcaggcccatggtggagccagggcagggatg

SEQ ID NO: 557909 - DNA, 515 bp, Homo sapiens
aaataaataaaatcaacagattaaaaaaaggagacattacaactaatacttcagaaattcaaaggatcataactggctaytatatgccaataaattggaaagcctagtagaaattggcaaattcctagatgcatacaacctacttaggttaaacaatgaaaacatccaagaccagaacagattggtaacaagtaatgagattgaagccatcagaaaaagtctcccagtaaagaaaagcccaggaactgatgtcttcactgctgatggcttcacaccaaacaatttaaagacctagtacgaatcctgctcaaactattttgaaaaacaggagggaatacttccaaacttattctatgagaccattattactgtgataccaaaatcagacaaaagcatcaaagaaggaaactacaggccaggatctctaatattgatgcaaaaatcctcaacaaaataccagtgaatcaaattcagtaatacattaaaaagataattcatcatgatcaagtgggatg

SEQ ID NO: 557910 - DNA, 453 bp, Homo sapiens
tgggtctgacaaaagcgatttcatcctgatatctacaggtttttcagtatttgccacaattttaaaataaatgctctgttttttagaacagcgcctaattgttatatatacttttttccattcgccagtcatctaatgtagcaaaagcacatggtaagtgtccaacaggtatagaatkattaattcattgacttgcctggccaataaaatgccttaaattagaaagctaggatctccaacccaccaactaagagggatattttgaaaattcatatctgtcccagtcattcttctgcctaaagccttcagtggctccccactgccctcgaggtgaagcccaagcccctaggtggcggtcagccttgaccaagaatttgctgcacacctagccctgtgccaagtgcttttcatacacatgtgcctttaatctctacaacgagcccatgaagtagg

SEQ ID NO: 557911 - DNA, 453 bp, Homo sapiens
tgggtctgacaaaagcgatttcatcctgatatctacaggtttttcagtatttgccacaattttaaaataaatgctctgttttttagaacagcgcctaattgttatatatacttttttccattcgccagtcatctaatgtagcaaaagcacatggtaagtgtccaacaggtatagaatgattaattcattgacttgcctggccaataaaakgccttaaattagaaagctaggatctccaacccaccaactaagagggatattttgaaaattcatatctgtcccagtcattcttctgcctaaagccttcagtggctccccactgccctcgaggtgaagcccaagcccctaggtggcggtcagccttgaccaagaatttgctgcacacctagccctgtgccaagtgcttttcatacacatgtgcctttaatctctacaacgagcccatgaagtagg

SEQ ID NO: 557912 - DNA, 606 bp, Homo sapiens
acaaaagaaagagtctcagcccccaacccctgccagcctgggcaaaataaggagactctgtttctacaaaaaaaattttaaaaattagccaagcgtggtagcacatgtttgtaataccagctccttgggaagctaaggtgggaggatcgcttgagcccccaggtgrtcaaggctgcagtgagcggtgatcatgccactgtactccagcctggacaacagagtgagacactgtctcaaaaaaaaaggagtctatctcagagttcaacgaatggataattctagtgtggacaactctggtgtaaacatgactgaaaataattcacaaatagtctgttacagctccatccactgaaaattgtcataaaagacatttttcaaatgagttcatttttagaaaaaccattccagatatcttaccttcggaaatcatccaaggagtgtgataaacattataacccccataaactgggtaaacaacaacaatggagtgaaaaacgaccacacatgccataaagcaatgttgaagctgaaaagaacaagacataaacagttgacaactcaaatatgcatcaatatattttattctagaatccagatttaaagtat

SEQ ID NO: 557913 - DNA, 580 bp, Homo sapiens
accacagaaaatcctgacacagagctggcatgaaggagctgtgcctgtgggagcttcagagtcctcaggccaggctggcccctgctctgccacctcttggctggaatgccttcaggcacctactgagcctctcaggggctcagcatcctcatctgtgggacacggataataatagggttgttttgagagtaaaagcacaaaacacagagcctggctggagaaagcacaggtagctgaagtcagccaaggctgagttaagtgttcttcttagaaaarcggacaggccattccctgaaggcatcagtgcgggcaggagggaacctgcactttgcagttccaacacctcaggacacaattcctgctaacctgacccacaaaagaccaaaggacacacccaagatcctggaccaacgtcccacaaggatgccttcctggtttcttctctaagaatacgtcttaaaatgttccccaggaagctaactctatattcctaatgtatggaccatggaaagaaaacaagtgtctcagtaggtttgttcaacaaatgtgcaaatgcagagacgaacaaagatgcccaaag

SEQ ID NO: 557914 - DNA, 580 bp, Homo sapiens
accacagaaaatcctgacacagagctggcatgaaggagctgtgcctgtgggagcttcagagtcctcaggccaggctggcccctgctctgccacctcttggctggaatgccttcaggcacctactgagcctctcaggggctcagcatcctcatctgtgggacacggataataatagggttgttttgagagtaaaagcacaaaacacagagcctggctggagaaagcacaggtagctgaagtcagccaaggctgagttaagtgttcttcttagaaaagcggacaggccattccctgaaggcatcagtgcgggcaggagggaacctgcactttgcagttccaacacctcaggacacaattcctgctaacctgacccacaaaagaccaaaggacacacccaagatcctggaccaacgtcccacaaggatgccttcctggtttcttctctaagaatacgtcttaaaatgttcccyaggaagctaactctatattcctaatgtatggaccatggaaagaaaacaagtgtctcagtaggtttgttcaacaaatgtgcaaatgcagagacgaacaaagatgcccaaag

SEQ ID NO: 557915 - DNA, 300 bp, Homo sapiens
ccaagccacccagccagccaagccagccaagccaatcagccagccaggcagccagccacccaagccagccaagccagccagccagccagccaagccagccaagcctcccagccagccaagccagccaagccacccagccagccaagccagccaagacacctagccagccaggcctgccagccagccagccagcgagccaagccagccaagctagccaggcagccaagccagccaagmcagtcaagcccgccagccagccaagacaggcatgccagccaagccagccaggcagccaagcca

SEQ ID NO: 557916 - DNA, 479 bp, Homo sapiens
ccggcacccaggtcagggctccaggggaggccaggtggcgaaggccaagaaggggctggggctggtcaggaagggctcctggtgaccagagcactttgcgtgagccagcgtgggaggaaggtgggctggatgagccagggaggcgccgggaggggccttggcagaggcgaccccctccgtcacccccaggccactgaaccctgggtagcgagaaccgacaggggaggctgcagacagaggagtggaggctccccggctttgggggctctgagtagaagcatctagggggtccctcaagaggcccccaaacgcttccccatggtgagaaaagaaggygcagagaggggcacggcgctggtgcagagaggggcacggcgctggtgcagaggggcacacagcgagatttgctgtgagttcttttattgccccaagtgtacctcatcttggtagatttctattgactttaaaaatgtgtgtgt

SEQ ID NO: 557917 - DNA, 581 bp, Homo sapiens
aacccacggctaggtctttggggccctgtgaggctcaaacatgtcaaggcagcataggaaattttagatcttaaaattcagcgaagaccctctccagctctggtaaattattttgcttgaagtctacttcatgagatattaatatattcactcctgcttccttaaaaaattaatgatttcacaggatatctttctccattcttttactttcaacctacttaggtccttaagtgagtttgaagtttcttatgaacagtatttagttgggccatgtgtttattataggctctccatcaatctgtcttttggtttatttagaycatttacatttaaggtgcttattgttacataattgcttatgtctgatgtttttattatttgcttttttgtttcctttttctttccctccatcttgatctatttctgtataatgttgcgtgtatctctttgtatagtcttaaagtgtttgctctggatgttacaatatgtgtattgtaatatagtagtctactggtaccagtatttaccacttcaaagtgtggaaacctgccttgcatttatgtctctttaccttttccact

SEQ ID NO: 557918 - DNA, 375 bp, Homo sapiens
acaagctttttcatgtcatggcttattatcacgtttaatatsatggctaatttgatagccctgagtatccccaaagcatattcattacctaaatcacatttatttggtgagttgccaaagaggatagagaagatgactctattgttgtaaaaaatagatatgtagatgatagatagatagatggatacacacacacacagacagatggaaaaaacctggaaggacacaaactaaaatgtcaacaattgttatctctgggtggaaaaatgacagatgatttttaatctcttctagattttgcttccctgtattttctaaattttctctgtgaagatgatttacatgtgtgattttttaagattatttttaaaaaat

SEQ ID NO: 557919 - DNA, 375 bp, Homo sapiens
acaagctttttcatgtcatggcttattatcacgtttaatatcatggctaatttgatagccctgagtatccccaaagcatattcattacctaaatcacatttatttggtgagttgccaaagaggatagagaagatgactctattgttgtaaaaaatagatatgtagatgatagatagatagatggatacacacacacacagacagayggaaaaaacctggaaggacacaaactaaaatgtcaacaattgttatctctgggtggaaaaatgacagatgatttttaatctcttctagattttgcttccctgtattttctaaattttctctgtgaagatgatttacatgtgtgattttttaagattatttttaaaaaat

SEQ ID NO: 557920 - DNA, 375 bp, Homo sapiens
acaagctttttcatgtcatggcttattatcacgtttaatatcatggctaatttgatagccctgagtatccccaaagcatattcattacctaaatcacatttatttggtgagttgccaaagaggatagagaagatgactctattgttgtaaaaaatagatatgtagatgatagatagatagatggatacacacacacacagacagatggaaaaaacctggaaggacacaaactaaaatgtcaacaattgttatctctgggtggaaaaatgacagatgatttttaayctcttctagattttgcttccctgtattttctaaattttctctgtgaagatgatttacatgtgtgattttttaagattatttttaaaaaat

SEQ ID NO: 557921 - DNA, 595 bp, Homo sapiens
ttattcaaccttaaaaagaaggaaatggccgggcacaatggctcacgcttgtaaacccaacactttgggaggccatggtgggtggactgcttrtgcccaggagttcaagaccaactgggcaacatggcaaaacctcaactctacaaaaaaataaaaataaaaataaaaaggctgagtgtggtggctcatgcctgtaatcccagcactttgggaggctgaggcaggtggatcacctgaggtcaggaatttgagaccagcctgaccaacatggagaaaccccttctctactaaaaatgcctgtaatctcaactactcaggaggctgaggcaggataatcacttgaacccaggaggcagaggttgtgggtgagacaagatcacaccattgcactccagcctgggcaacaagagtgaaactctctctcaaaaaaaaaaaaaaattagctaaacccagtggtgtgcacctgtagtcccagctacttgggaggctgaggtaggaggatcatttgagcctgggaagtccaggtttcagtgagctgagattgtgccactgcactccagccttggtgacagagccagaccctgtctcaaaaaag

SEQ ID NO: 557922 - DNA, 595 bp, Homo sapiens
ttattcaaccttaaaaagaaggaaatggccgggcacaatggctcacgcttgtaaacccaacactttgggaggccatggtgggtggactgcttgtgcccaggagttcaagaccaactgggcaacatggcaaaacctcaactctacaaaaaaawaaaaataaaaataaaaaggctgagtgtggtggctcatgcctgtaatcccagcactttgggaggctgaggcaggtggatcacctgaggtcaggaatttgagaccagcctgaccaacatggagaaaccccttctctactaaaaatgcctgtaatctcaactactcaggaggctgaggcaggataatcacttgaacccaggaggcagaggttgtgggtgagacaagatcacaccattgcactccagcctgggcaacaagagtgaaactctctctcaaaaaaaaaaaaaaattagctaaacccagtggtgtgcacctgtagtcccagctacttgggaggctgaggtaggaggatcatttgagcctgggaagtccaggtttcagtgagctgagattgtgccactgcactccagccttggtgacagagccagaccctgtctcaaaaaag

SEQ ID NO: 557923 - DNA, 595 bp, Homo sapiens
ttattcaaccttaaaaagaaggaaatggccgggcacaatggctcacgcttgtaaacccaacactttgggaggccatggtgggtggactgcttgtgcccaggagttcaagaccaactgggcaacatggcaaaacctcaactctacaaaaaaataaaaataaaaataaaaaggctgagtgtggtggctcatgcctgtaatcccagcactttgggagrctgaggcaggtggatcacctgaggtcaggaatttgagaccagcctgaccaacatggagaaaccccttctctactaaaaatgcctgtaatctcaactactcaggaggctgaggcaggataatcacttgaacccaggaggcagaggttgtgggtgagacaagatcacaccattgcactccagcctgggcaacaagagtgaaactctctctcaaaaaaaaaaaaaaattagctaaacccagtggtgtgcacctgtagtcccagctacttgggaggctgaggtaggaggatcatttgagcctgggaagtccaggtttcagtgagctgagattgtgccactgcactccagccttggtgacagagccagaccctgtctcaaaaaag

SEQ ID NO: 557924 - DNA, 595 bp, Homo sapiens
ttattcaaccttaaaaagaaggaaatggccgggcacaatggctcacgcttgtaaacccaacactttgggaggccatggtgggtggactgcttgtgcccaggagttcaagaccaactgggcaacatggcaaaacctcaactctacaaaaaaataaaaataaaaataaaaaggctgagtgtggtggctcatgcctgtaatcccagcactttgggaggctgaggcaggtggatcacctgaggtcaggaatttgagaccagcctgaccaacatggagaaaccccttctctactaaaaatgcctgtaatcycaactactcaggaggctgaggcaggataatcacttgaacccaggaggcagaggttgtgggtgagacaagatcacaccattgcactccagcctgggcaacaagagtgaaactctctctcaaaaaaaaaaaaaaattagctaaacccagtggtgtgcacctgtagtcccagctacttgggaggctgaggtaggaggatcatttgagcctgggaagtccaggtttcagtgagctgagattgtgccactgcactccagccttggtgacagagccagaccctgtctcaaaaaag

SEQ ID NO: 557925 - DNA, 598 bp, Homo sapiens
cccttgtagatttaaaaatgtaaatggctttctcatattaggaaacatcacttttcaaaactcagataaacatagtacattgcaagagaataattattttctttattaaaaaagaaatactggatgytaagtccaaaagacataaattattttatactaataactactaatattttattcattaaaatataaaggtcaaagatttcaaaatgatctttaaatgactaataacatgttgatctttttcttctttctgtaaacctttttgagtcttaaaaatactaaactatacaagcaatattaaatagtatataaacttggattaaaatattcaaatttactagaatgtggacattggaaagaatgaaaataaacagaagcataaagcagcagatataaaattaagaaagcaactaagagtgtttaaagtacatattcatctgtagtctaatgtctaccataaacaatgactcttctcagtaaaacacaaattgttcatgaagggaaaaagcatgttgtattagagaatattcaacataatttttttagtactaacttgtgcctggagtattattggtttttctattatgaacttatg

SEQ ID NO: 557926 - DNA, 523 bp, Homo sapiens
aagagaataattattttctttattaaaaaagaaatactggatgttaagtccaaaagacataaattattttatactaataactactaatattttattcattaaaatataaaggtcaaagatttcaaaatgatctttaaatgaytaataacatgttgatctttttcttctttctgtaaacctttttgagtcttaaaaatactaaactatacaagcaatattaaatagtatataaacttggattaaaatattcaaatttactagaatgtggacattggaaagaatgaaaataaacagaagcataaagcagcagatataaaattaagaaagcaactaagagtgtttaaagtacatattcatctgtagtctaatgtctaccataaacaatgactcttctcagtaaaacacaaattgttcatgaagggaaaaagcatgttgtattagagaatattcaacataatttttttagtactaacttgtgcctggagtattattggtttttctattatgaacttatgcacttgtt

SEQ ID NO: 557927 - DNA, 558 bp, Homo sapiens
aggaaaataatttctgaagcacaaagaagtaaagaggtgtaatctttcaaaaagatattcagtgttcaaaatccaagagtgcaatatcaggctgggtgcggtggcttatgccygtaatcccagcactttgggaggccatggtgggtggatcacctgaggtcaggagttcgagaccagcctggacaacaaggtgaaactcttgactgtactaaaaatacaaaaattagccaggcatcgtggtatgcacctgtagtcctagctacttgggaggctgagacaggagaatcacttgaacctgggaggtggaggttgcagtgaaccgagatcatgccacctcactccagcatcagtaacagaatgagatgccatctcaaaaaaagaaaagagtctaatatcggtatacacagataatatactgaatgaaacaaatagaataatttgaagaggtatcttgatgaacaaggagtcattagaaaggttgtattcatgtctttgaaggaaattgcaatgtgagaaattaatactttgactactatactaaaagtttattgctaacat

SEQ ID NO: 557928 - DNA, 558 bp, Homo sapiens
aggaaaataatttctgaagcacaaagaagtaaagaggtgtaatctttcaaaaagatattcagtgttcaaaatccaagagtgcaatatcaggctgggtgcggtggcttatgcccgtaatcccagcactttgggaggccatggtgggtggatcacctgaggtcaggagttcgagaccagcctggacaacaaggtgaaactcttgactgtactaaaaatacaaaaattagccaggcatcgtggtatgcacctgtagtcctagctacttgggaggctgagacaggagaatcrcttgaacctgggaggtggaggttgcagtgaaccgagatcatgccacctcactccagcatcagtaacagaatgagatgccatctcaaaaaaagaaaagagtctaatatcggtatacacagataatatactgaatgaaacaaatagaataatttgaagaggtatcttgatgaacaaggagtcattagaaaggttgtattcatgtctttgaaggaaattgcaatgtgagaaattaatactttgactactatactaaaagtttattgctaacat

SEQ ID NO: 557929 - DNA, 558 bp, Homo sapiens
aggaaaataatttctgaagcacaaagaagtaaagaggtgtaatctttcaaaaagatattcagtgttcaaaatccaagagtgcaatatcaggctgggtgcggtggcttatgcccgtaatcccagcactttgggaggccatggtgggtggatcacctgaggtcaggagttcgagaccagcctggacaacaaggtgaaactcttgactgtactaaaaatacaaaaattagccaggcatcgtggtatgcacctgtagtcctagctacttgggaggctgagacaggagaatcacttgaacctgggaggtggaggttgcagtgaaccgagatcatgccacctcactccagcatcagtaacagaatgagatkccatctcaaaaaaagaaaagagtctaatatcggtatacacagataatatactgaatgaaacaaatagaataatttgaagaggtatcttgatgaacaaggagtcattagaaaggttgtattcatgtctttgaaggaaattgcaatgtgagaaattaatactttgactactatactaaaagtttattgctaacat

SEQ ID NO: 557930 - DNA, 558 bp, Homo sapiens
aggaaaataatttctgaagcacaaagaagtaaagaggtgtaatctttcaaaaagatattcagtgttcaaaatccaagagtgcaatatcaggctgggtgcggtggcttatgcccgtaatcccagcactttgggaggccatggtgggtggatcacctgaggtcaggagttcgagaccagcctggacaacaaggtgaaactcttgactgtactaaaaatacaaaaattagccaggcatcgtggtatgcacctgtagtcctagctacttgggaggctgagacaggagaatcacttgaacctgggaggtggaggttgcagtgaaccgagatcatgccacctcactccagcatcagtaacagaatgagatgccatctcaaaaaaagaaaagagtstaatatcggtatacacagataatatactgaatgaaacaaatagaataatttgaagaggtatcttgatgaacaaggagtcattagaaaggttgtattcatgtctttgaaggaaattgcaatgtgagaaattaatactttgactactatactaaaagtttattgctaacat

SEQ ID NO: 557931 - DNA, 648 bp, Homo sapiens
ggtttggttcgacagtttggagaatgtcttgtggaaggggtgctttttttaatgcacactcaggcaccatgggagcctgttgtcaccctggatatctagctccatgcccttgccctttcactctgcctcgacaagagtcatggcacccaaaatacatgagttcaaatctgagtttcacaggctcagggaggaacccaagctaccaaatgcacaggcccctcctgtatacggttacagcaggtaagggagtaacttactcagtgcaagctgctgtaacaaaatagcacaagctgggtggctaatcaacaacaggcatttatttctcacaggtctggaggctggaagcccaagatcagggtgccagtgctggcatggttgggttctggtgagggccctcttccaggtcacagacagctgtcttctcattgcatcctcacatgacagaaaagaagtgcacaagctctctggccccctcttacaggcgctaatcccattcacaacggtcctaccatcatgacctcattacctcccaaagacsacacctccaaataccaccacattgccattaagcttcaacatatgaatttaagggggaaacaaacatccagtccattgcagattgttctgataatatgtgtgcccagggca

SEQ ID NO: 557932 - DNA, 648 bp, Homo sapiens
ggtttggttcgacagtttggagaatgtcttgtggaaggggtgctttttttaatgcacactcaggcaccatgggagcctgttgtcaccctggatatctagctccatgcccttgccctttcactctgcctcgacaagagtcatggcacccaaaatacatgagttcaaatctgagtttcacaggctcagggaggaacccaagctaccaaatgcacaggcccctcctgtatacggttacagcaggtaagggagtaacttactcagtgcaagctgctgtaacaaaatagcacaagctgggtggctaatcaacaacaggcatttatttctcacaggtctggaggctggaagcccaagatcagggtgccagtgctggcatggttgggttctggtgagggccctcttccaggtcacagacagctgtcttctcattgcatcctcacatgacagaaaagaagtgcacaagctctctggccccctcttacaggcgctaatcccattcacaacggtcctaccatcatgacctcattacctcccaaagacgmcacctccaaataccaccacattgccattaagcttcaacatatgaatttaagggggaaacaaacatccagtccattgcagattgttctgataatatgtgtgcccagggca

SEQ ID NO: 557933 - DNA, 648 bp, Homo sapiens
ggtttggttcgacagtttggagaatgtcttgtggaaggggtgctttttttaatgcacactcaggcaccatgggagcctgttgtcaccctggatatctagctccatgcccttgccctttcactctgcctcgacaagagtcatggcacccaaaatacatgagttcaaatctgagtttcacaggctcagggaggaacccaagctaccaaatgcacaggcccctcctgtatacggttacagcaggtaagggagtaacttactcagtgcaagctgctgtaacaaaatagcacaagctgggtggctaatcaacaacaggcatttatttctcacaggtctggaggctggaagcccaagatcagggtgccagtgctggcatggttgggttctggtgagggccctcttccaggtcacagacagctgtcttctcattgcatcctcacatgacagaaaagaagtgcacaagctctctggccccctcttacaggcgctaatcccattcacaacggtcctaccatcatgacctcattacctcccaaagacgacacctccaaataccaccacattgscattaagcttcaacatatgaatttaagggggaaacaaacatccagtccattgcagattgttctgataatatgtgtgcccagggca

SEQ ID NO: 557934 - DNA, 580 bp, Homo sapiens
gtccccagttggagaaccgattctctagatgggacatgtatagatgatgctttcctttgttttttagtatatatgcctattttttagttttttctaaaataagtgtactttagtcatgttaaaaaaaaactttgtatttattactgtcccattgcctgcactgtctgaaaaaaaatacactcaaatgaaaagatacattaatacttacattaagaaaattaattttattattattttaaaatagctgtggaaaarctatacaaaggcctcccaaatgtcaatattccttaggcacctttgaaatatttctaaacttaatctttggactaggcatcctaattgtaattccatatcttaaagaagcaattctaaatataggaaatgcttcacaaatatggttgatttttgcagagttacctataaaagcaaaaagttataaacactgtaaaaccaaccataggaaactatgttaattaaggtacattcacttgatagactatcatacagcattaaaatgatatttataaagaacttataacaatatgggggcaaggtttatgccatattgttaagtaggaaa

SEQ ID NO: 557935 - DNA, 580 bp, Homo sapiens
gtccccagttggagaaccgattctctagatgggacatgtatagatgatgctttcctttgttttttagtatatatgcctattttttagttttttctaaaataagtgtactttagtcatgttaaaaaaaaactttgtatttattactgtcccattgcctgcactgtctgaaaaaaaatacactcaaatgaaaagatacattaatacttacattaagaaaattaattttattattattttaaaatagctgtggaaaagctatacaaaggcctcccaaatgtcaatattccttaggcacctttgaaatatttctaaacttaatctttggactaggcatcctaattgtaattccatatcttaaagaarcaattctaaatataggaaatgcttcacaaatatggttgatttttgcagagttacctataaaagcaaaaagttataaacactgtaaaaccaaccataggaaactatgttaattaaggtacattcacttgatagactatcatacagcattaaaatgatatttataaagaacttataacaatatgggggcaaggtttatgccatattgttaagtaggaaa

SEQ ID NO: 557936 - DNA, 532 bp, Homo sapiens
aggaactcaagtgtgaaggcaggggtcatgtttggcrtctgtcaccctttgcgagttgcaacctggagaccctggaggatgttatgatgagtgaaataacctaatcacaaaaggactaatactccacaaattcacttatatgaggagtctaggagtcaaattcctagagactgaaagaacggtggttgtcaggggctggggagaatggggagttcatatttaatgggggcagagtttcagttttgccagacgagaataacctggaaatggatggtgtgatgtttgcacaatgtgaacgtactttactccactatacacttgaaagtgggtgcaatgggaaagtttatttgatgagttttttaccacaattaaaaatataacaaaataagcatgagtcagatcccgtcactctcagtgtagacctttccatggttttctgttgcatttaggattgagtcttggctcgcaggccctgtgtggtctcccctctgccctctgctctgtgctcccaggtcatgtccagtgagccctg

SEQ ID NO: 557937 - DNA, 532 bp, Homo sapiens
aggaactcaagtgtgaaggcaggggtcatgtttggcatctgtcaccctttgcgagttgcaacctggagaccctggaggatgttatgatgagtgaaataacctaatcacaaaaggactaatactccacaaattcacttatatgaggagtctaggagtcaaattcctagagactgaaagaacggtggttgtcaggggctggggagaatggggagttcatatttaatgggggcagagtttcagttttgccagacragaataacctggaaatggatggtgtgatgtttgcacaatgtgaacgtactttactccactatacacttgaaagtgggtgcaatgggaaagtttatttgatgagttttttaccacaattaaaaatataacaaaataagcatgagtcagatcccgtcactctcagtgtagacctttccatggttttctgttgcatttaggattgagtcttggctcgcaggccctgtgtggtctcccctctgccctctgctctgtgctcccaggtcatgtccagtgagccctg

SEQ ID NO: 557938 - DNA, 461 bp, Homo sapiens
cctctgggactgttcttttccttgctccttaacagactatttcctgctttttgttttgttttgttttgctttgctttgttttttgtttttggccttctaactgtgttacaaatggtttaagtcagtggttctccaagggtggtcccagatcagcagcrttatcacctgggtacttactagaaatgcaaattcttgggccccactccagacctactgaatgagcaactctgagggtagaacctaaaaaattgtgttttaacaagtcatctgggtgattctgatggtaaagtttgatgtcaccaaatgataatgacgctttttttttaaattgagatggagtcttgctctgtcgcccagtctggagtgcagtggcgtgatcttggtttactgcaacttccacctcccaggttcaagcaattctcctgtctcagcctcctgagtagctgggactacaggcacac

SEQ ID NO: 557939 - DNA, 480 bp, Homo sapiens
tgataggaaatgtgcagccaaagagaaaaaaagatgtaagtaagcttgactcattgcagctaagaacccagatgttatcttgagggtattaactaataagcagtttaaatcagaatggcatattctgatttgttttttgtatgtttacatttggcaggcatagatactgtttgaagagagaaaagacagtagatagaggtaacaaacttaaatatgtgcgaagtctagaaacaagagaccsggggataaggacctttcaaaataaaatgcgagatttgaaaactgattggctggggcatgaggaaaaggcaggtctttaaggtcaatccctgttttgctttaagttgttaggggttggttttatcacatattgtagaacatgtcatttcagttttgaacatcttgagttaaattgtcctaacatatcttatgaatttgattttcttccctgggaagctaatatttcaaaaactgaaagag

SEQ ID NO: 557940 - DNA, 558 bp, Homo sapiens
attgtgaatctgcattctccttgcctattttaaggttttgatgttgacactaatttgtgaaatccctcctgtggtgtgatatttcgttttccttgctttstgttaggacaagaatgcttcagctcttaatttaaaattatgtttctccctcctaggttgagtgaacttagaatgcattctctgacatgtccaagtttttgttaatatgaatttcaggaaaaaagcatacttaattagctaagacttcttattctaggcttgaccctatgttcgacatcttttgaatttctagttgcatgggctgctctctgacactggttagtgacctggaagctgtattaatgttaggggaggtggtgtatgagcattagaggtatccttgcaaggaaagacttgtcttatctcaatatgtctttttttttgcacacaagaaagtcaatgtttgagtcttctaaaatcttcctatttccaagttgcagagtaccattgattcctaaacaaaaacctaatttttgactcagagacgtggcgaggtagtgaatcaccattataatttaa

SEQ ID NO: 557941 - DNA, 558 bp, Homo sapiens
attgtgaatctgcattctccttgcctattttaaggttttgatgttgacactaatttgtgaaatccctcctgtggtgtgatatttcgttttccttgctttgtgttaggacaagaatgcttcagctcttaatttaaaattatgtttctccctcctaggttgagtgaacttagaatgcattctctgacatrtccaagtttttgttaatatgaatttcaggaaaaaagcatacttaattagctaagacttcttattctaggcttgaccctatgttcgacatcttttgaatttctagttgcatgggctgctctctgacactggttagtgacctggaagctgtattaatgttaggggaggtggtgtatgagcattagaggtatccttgcaaggaaagacttgtcttatctcaatatgtctttttttttgcacacaagaaagtcaatgtttgagtcttctaaaatcttcctatttccaagttgcagagtaccattgattcctaaacaaaaacctaatttttgactcagagacgtggcgaggtagtgaatcaccattataatttaa

SEQ ID NO: 557942 - DNA, 275 bp, Homo sapiens
tgagcattagaggtatccttgcaaggaaagacttgtcttatctcaatatgtctttttttttgcacacaagaaagtcaatgtttgagtcttctaaaatcttcctatttccaagttgcagagtaccattgattcctaaacaaaaacctaatttttgactcagagacgtggcgaggtagtgaatcaccattataatttaacaatcttcmagataaaattatctctgatatttagattttgcccaattattaagatatttgggtgttttgttaagaatg

SEQ ID NO: 557943 - DNA, 497 bp, Homo sapiens
cttcctaaagcgttgaccccctttttactacaatataaatttttaaaatcctattcacatttttaatagtctatattgtgtgttgagtataatgagttcagtgttcttatgattgctctttgtaggatattttttgtcatctttttactttcaatccgttagtatccttgcatctcagcgtatattgggatcacttgttttaatccrgtctgacaatctctgcctctggaatggattttaatctgctcacatttaagattataattggtataattctatttatgtctgccattttaccgtttgttttatatatttccaaatatttttctttattgctttattttgcaatgcaagaatattttttaaaatagggaactttagattactaatgaattattttattatatatttttgagatttttattgttgttgtaagtttaccatataggtgtatggaaaattaattattcaaatcgtcttccaatttatactattaa

SEQ ID NO: 557944 - DNA, 558 bp, Homo sapiens
cagtgttcttatgattgctctttgtaggatattttttgtcatctttttactttcaatccgttagtatccttgcatctcagcgtatattgggatcacttgttttaatccagtctgacaatctctgcctctggaatggattttaatctgctcacatttaagattataattggtataattctatttatgtctgccattttaccgtttgttttatatatttccaaatatttttctttattgctttattttgcaatgcaagaatattttttaaaatagggaactttagattactaatgaattattttattatatatttttgagatttttattgttgttgtaagtttaccatataggtgtatggaaaattaattattcaaatcrtcttccaatttatactattaaacttttagtaatacatagaaacatcattcttatataaatcttttttatttcctccattttaaagtattatcactttacacattacatctattaaagttacaaagcaaacaatacattttagtaattattactttaccatctagagtgattaccttatca

SEQ ID NO: 557945 - DNA, 558 bp, Homo sapiens
cagtgttcttatgattgctctttgtaggatattttttgtcatctttttactttcaatccgttagtatccttgcatctcagcgtatattgggatcacttgttttaatccagtctgacaatctctgcctctggaatggattttaatctgctcacatttaagattataattggtataattctatttatgtctgccattttaccgtttgttttatatatttccaaatatttttctttattgctttattttgcaatgcaagaatattttttaaaatagggaactttagattactaatgaattattttattatatatttttgagatttttattgttgttgtaagtttaccatataggtgtatggaaaattaattattcaaatcgtcttccaatttatactattaaacttttagtaatacatagaaacatcattcttatataaatcwtttttatttcctccattttaaagtattatcactttacacattacatctattaaagttacaaagcaaacaatacattttagtaattattactttaccatctagagtgattaccttatca

SEQ ID NO: 557946 - DNA, 409 bp, Homo sapiens
aatcatctattgctccaactgccctttactaaaggtaatttgtctttttaacctcatcaggctccttttaagctctcaaactgaccttwttttttttttacagattcaatgcattaagtcaatttattacttatgatgaatttatttatgtatttattttcgctaacacaagtagaaaaagcctataagttgctatgccaaaaacctgcctctagatggcaaacaaaccccgcaatacacaaaagagagccaaattcttagaaaccctgggaaaggaagagggctactgtcccattaacaacttggagcccttaaggcaagaatgaggtggaacatctggaacatctgggaggagacacaagggtgcggagtagtggggaacctgctctgtgctctgagactgaaagcc

SEQ ID NO: 557947 - DNA, 569 bp, Homo sapiens
taatttgtctttttaacctcatcaggctccttttaagctctcaaactgacctttttttttttttacagattcaatgcattaagtcaatttattacttatgatgaatttatttatgtatttattttcgctawcacaagtagaaaaagcctataagttgctatgccaaaaacctgcctctagatggcaaacaaaccccgcaatacacaaaagagagccaaattcttagaaaccctgggaaaggaagagggctactgtcccattaacaacttggagcccttaaggcaagaatgaggtggaacatctggaacatctgggaggagacacaagggtgcggagtagtggggaacctgctctgtgctctgagactgaaagcccagccttgcctctcaccgctgccttgactgtgtccccatctgctgtgaagtgaatggtgtcttctaaattcgtgctgagccctaattgctgaaaactgtaagacatgcaatggggggattatgtgcatcttcccgacaccaacatgatgctcaggaaggagacttcttgttttctcttaggattcttttactaac

SEQ ID NO: 557948 - DNA, 443 bp, Homo sapiens
aaaataatcagttttttctttctacctattaaagatgttaccttagttaattacaggggtttccttcagaatgataagtggtctttcaaaatgatgtaaagagatctaaatccgtgtgctccagaagttgaatgaagctctgtctagcacgggtgccagtgactctcccagagtgctccatgcagctggacccacagagtccctctgtgctgtcatatcacccactgccttctgtgaatgagatattctgattagaatcctggtggatgctatttgagccagtgcccccacaactcctaygaaagccgaggaccacaggcccctgaagacaatcacaggtctctagactcacagctcatgaccgtcctctgcagacacagcttctcctcggatggctgagggttgtcattggctgtgttcttccttgtgcatgacaacaggag

SEQ ID NO: 557949 - DNA, 522 bp, Homo sapiens
tctgtctagcgcgggtgccagtgactctcccaaagtgctccatgcagctggacccacagagtccctctgtgctgtcatatcacccactgccttctgtgaatgagatattctgattagaatcctggtggatgctatttgagccagtgcccccacaactcctatgaaagcygaggaccacaggcccctgaagacaatcacaggtctctagactcacagctcatgaccgtcctctgcagacacagcttctccccggatggctgagggttgtcattggctgtgtccttccttgtgcatgacaacaggagacatagaaggtctgtaagcagccctgcaagccaggttctgagcaagccctcctgtgtggggccctcttacctggacataggtgtgtaaaccaaaaatgaaactctaagctccctaaccaactgaatgaactcctcctctcagccaagcacacaccaaaatcaacctgaaatacaatgcagcccatgatcggaacggatgattggatatgccttaact

SEQ ID NO: 557950 - DNA, 464 bp, Homo sapiens
tcccttgtgttgattacaggtcattagataaactctttcaaccatctatgaaatctttgaatccacctatgacctggaagtccccaacatcccccctccttcgggctgtcctgcctttycatatcaaagcaatgtacagcttacacgtattgattgatatcttatgtctccctaaaacgtgtaaaaccaacctgtagcccgacgacctttgacacacgttctcaagacctcctgaggctgtttcactgatatttctttaactttgaccaagtaaatttctaaactgattgagacttttctcagatacttatttgtttataggtatcactggatacacttaaggaattgaagagatttatgacattgagaaaaggaggaagccagggtgtgtggacatagagagagagagagagagagagagagagattgtgatgtatgtacaggactaacactgagacctggtt

SEQ ID NO: 557951 - DNA, 464 bp, Homo sapiens
tcccttgtgttgattacaggtcattagataaactctttcaaccatctatgaaatctttgaatccacctatgacctggaagtccccaacatcccccctccttcgggctgtcctgccttttcatatcaaagcaatgtacagcttacacgtattgattgatatcttatgtctccctaaaacgtgtaaaaccaacctgtagcccgacgacctttgacacacgttctcaagacctcctgaggctgtttcactgatatttctttaactttgaccaartaaatttctaaactgattgagacttttctcagatacttatttgtttataggtatcactggatacacttaaggaattgaagagatttatgacattgagaaaaggaggaagccagggtgtgtggacatagagagagagagagagagagagagagagattgtgatgtatgtacaggactaacactgagacctggtt

SEQ ID NO: 557952 - DNA, 569 bp, Homo sapiens
agagtcagctgaagtataatgtctagaatccccaaggcatagtaacaatgactgctaaaattatgcacaaagaaaaagtgcatttgaatccagagatgtatctctctgaatctggatatatggatcctggcagcctgtttggtagccatttcccagaaatccagtcctctggaaaagcaggaggaggtttgtgcataggctgcactaccttggtctggccatgcgtagtcgtgcatgagaactactccctggagtatttctcagtccactgacactgatgtaattggctccacttcccctgctgttgagccaggccgacacgccctgggcaaaggcatctgygtgaagtattgaggttcaaatcagtgcttaagatatgtttggatgcaaaacactttttcatctacatgggcagtgtcttggcagaggatggagattctctctaaatgcatgtgagacagggtggctggcatctgggtcaggatgatgccctggtgcatggcaagaacatgccttgtgcagcagctgccctcgctaaggagagaggctcactgacctggcttttcccc

SEQ ID NO: 557953 - DNA, 499 bp, Homo sapiens
tcatgactttatttttatagcaacgaggttgccacgaactgagtcaaaatgtgagggaacacagcacctgcaatgagaargaggacggatgcacttacataggacagaagcaaataggcaccaccatgacaagtaaagctggaataatcaataaattcctaaagacaaagtggggctggtgagattgggagaccgctgacagctgcagaagttgggaaagatccatcatcttgaaaactttttccccacaaacccactgcgatctctcaagcaattggtaaggaatccaagagagtctgtatatgacacagatcagggagagcagaacacttgggaggtgaccaggtcttgggggtcgagcccatatgaatgggattagtgcctttataaaagaagctcaatggagttcttgtgtgccttccactatgtgaggccatagaaagcaggcaccacctatgaaccatgaaatgggctctcatcaacactgaatttgtgagca

SEQ ID NO: 557954 - DNA, 499 bp, Homo sapiens
tcatgactttatttttatagcaacgaggttgccacgaactgagtcaaaatgtgagggaacacagcacctgcaatgagaaggaggacrgatgcacttacataggacagaagcaaataggcaccaccatgacaagtaaagctggaataatcaataaattcctaaagacaaagtggggctggtgagattgggagaccgctgacagctgcagaagttgggaaagatccatcatcttgaaaactttttccccacaaacccactgcgatctctcaagcaattggtaaggaatccaagagagtctgtatatgacacagatcagggagagcagaacacttgggaggtgaccaggtcttgggggtcgagcccatatgaatgggattagtgcctttataaaagaagctcaatggagttcttgtgtgccttccactatgtgaggccatagaaagcaggcaccacctatgaaccatgaaatgggctctcatcaacactgaatttgtgagca

SEQ ID NO: 557955 - DNA, 448 bp, Homo sapiens
tgagggaacacagcacctgcaatgagaaggaggacggatgcacttacataggacagawgcaaataggcaccaccatgacaagtaaagctggaataatcaataaattcctaaagacaaagtggggctggtgagattgggagaccgctgacagctgcagaagttgggaaagatccatcatcttgaaaactttttccccacaaacccactgcgatctctcaagcaattggtaaggaatccaagagagtctgtatatgacacagatcagggagagcagaacacttgggaggtgaccaggtcttgggggtcgagcccatatgaatgggattagtgcctttataaaagaagctcaatggagttcttgtgtgccttccactatgtgaggccatagaaagcaggcaccacctatgaaccatgaaatgggctctcatcaacactgaatttgtgagca

SEQ ID NO: 557956 - DNA, 265 bp, Homo sapiens
agttgggaaagatccatcatcttgaaaactttttccccacaaacccactgcgatctctcaagcaattggtaaggaatccaagagagtctgtatatgacacagatcagggagagcagaacacttgggaggtgaccaggtcttgggggycgagcccatatgaatgggattagtgcctttataaaagaagctcaatggagttcttgtgtgccttccactatgtgaggccatagaaagcaggcaccacctatgaaccatgaaatgggct

SEQ ID NO: 557957 - DNA, 265 bp, Homo sapiens
agttgggaaagatccatcatcttgaaaactttttccccacaaacccactgcgatctctcaagcaattggtaaggaatccaagagagtctgtatatgacacagatcagggagagcagaacacttgggaggtgaccaggtcttgggggtcgagcccwtatgaatgggattagtgcctttataaaagaagctcaatggagttcttgtgtgccttccactatgtgaggccatagaaagcaggcaccacctatgaaccatgaaatgggct

SEQ ID NO: 557958 - DNA, 265 bp, Homo sapiens
agttgggaaagatccatcatcttgaaaactttttccccacaaacccactgcgatctctcaagcaattggtaaggaatccaagagagtctgtatatgacacagatcagggagagcagaacacttgggaggtgaccaggtcttgggggtcgagcccatatgaatgggattagtgcctttataaaagaagctcaatggagttcttgtgtgccttccactatgtgaggccatagaaagmaggcaccacctatgaaccatgaaatgggct

SEQ ID NO: 557959 - DNA, 234 bp, Homo sapiens
aaggctacattcctgagaccctgagaaaaagtacctgcataagactgagatsaaattacctactctaattatgattgaaatcccaaaaagaaaagagggaaaaataatggagcaaaagaaatatttttcaaaataactgccaaaaatattctaaaagaagtgacagaaaatcaaacttcaaatataggaaactcagagaatgtcaaatagaacaagaagaaataagaattacat

SEQ ID NO: 557960 - DNA, 347 bp, Homo sapiens
aaaacaggaaaaacaaaacaaaactgctcttgaaggtgaaggaggaatatcactgagctcaccaacacagccaggaaaagaacagaagtgtgagaaggctacattcctgagaccctgagaaaaagtacctgcataagactgagatcaaattacctactctarttatgattgaaatcccaaaaagaaaagagggaaaaataatggagcaaaagaaatatttttcaaaataactgccaaaaatattctaaaagaagtgacagaaaatcaaacttcaaatataggaaactcagagaatgtcaaatagaacaagaagaaataagaattacatcttgaaaaatctttaaaaa

SEQ ID NO: 557961 - DNA, 234 bp, Homo sapiens
aaggctacattcctgagaccctgagaaaaagtacctgcataagactgagatcaaattacctactctaattatgattgaaatcccaaaaagaaaagagggaaaaataatggagcaaaagaaatatttttcaaaataactgccaaaaatattctaaaagaagtgacagaaaatcaaacttcaaatataggaaactcagagaatgtcaaatagaacaaraagaaataagaattacat

SEQ ID NO: 557962 - DNA, 603 bp, Homo sapiens
tcataaatacacttaataagaaagaaacttttaatttaactctctcccgatggctaagattgaatacattcataccaaattgttttcctcttcttcctgattacagagctagagcatatttgcctgccacagttagttttgtgtttccatggaatttgagcaaaactgatgcacttgtctcccaggattaatccatacaagtcacctctaaaattatcttttcccattcgttgactgagcaaaatggacttcaaggacctaaaggaggttaaataccacaagatggaggagcttgagtctctgaatcattgtgtgtgaagtcatctgccaattacataaattgaattcttggtgagtgtgaagtacacaagtagccatgtaattttggaatgaatgttacagaaatttacttaccctgcctaatacactcctaccatttcarttaattagttctactgtatgtttaatgggatgaaatgtatgtatatgtttttattctctattttctattgttatgcatagcatataaatttctaacataagcgtaactattgagtccttttaacattgttccatatggttatgtaacaacattttaatgct

SEQ ID NO: 557963 - DNA, 679 bp, Homo sapiens
gagaatgataaaataatgaacagatgaagcagcttataataaatgtattgtaggagacctagtttaagccgaagcttaggtcagtttatggttgtcttcatgaaattaatatttacttggggaacaaagcaacctcctgaaaaataactcattcctagtgcaatgtaaatgggtttcatgtcattgactaggtgcataaacgtaggctggaagagactagtgatgtcgaatactactgggtgtttttcagcacattcttccctaataatgaaacttcagactacatttaagatctaacttactaaagacatgagtgacatgaagctgatttaggccattgggaaacaatgtagataakataataaggtataggagaggtaatctgttaatcacttgcagaatgcctaatcctcatgtttagggaggaagggcacattcgacaagaacgaaaagtattaaacgcatgattttaaaaggtggcagggttttcctgtcttcctgtctcaaattagtacccctacacattacatttttttaagaattactggaataggtatggccagtgaggtgagaaccagcaggaaacttcgaaatttatgattatagaaatgtgaagtagagtttcattgtaagtcttaaaaatatgattgtttatgagaagacaactagaaaaatccaa

SEQ ID NO: 557964 - DNA, 586 bp, Homo sapiens
aaaatataggaaaactcagaaataagagagataattggattatttttctgtaactatccacgtcacttacttaaatctccactttggcaatgaacattgtgtctacacctgtatgttcttgttccagattacccctgatgaagccacacaggaaaacaaatatttaaaatacttgagttaatatctactggtgaagatgaccaataaagatttgaaaattgttgaactcataacaaaggatttagaatattagatgaacttaatggataaagcaggtacacggtttgagaagactgaatccaattttgcaataagctcttcmgtggttggaatactatcaaaccatacatttttaaagcctgtttaaaaaaaaatactacaaggcaaataaatgtgaattacattttacatatatgctacaggcagtgatacattaaataagagtaatacaacagagagctttacaaatagtttggaatttaaaaactagatgtagtagagcatatcctaaaaggaaattagtttcaaatggctgagaaagggcaaaagaacactgaaatgtacttgtctaactagagcagaagta

SEQ ID NO: 557965 - DNA, 515 bp, Homo sapiens
gggctcctctcctacaacctcaaaatacctgataggccattttcccacctttataaagcccttcttgcctgaactttatgatctttccttcctctgaatttttacttaattgtaattcagttagcactcaatcattccccaaccctttgaaaaaaaaaatttttatattctcatcttggtcaagacaatgagattttgtagactgttgtagacaattttctatttcttttggatcagccagagtatttggcatagtagcagagtcacataataggcacttgtcaaatatttttatagataatggttttactagttcattygataaatgttgtcaaacactgactctgccagagcctgttatgagtatagagatacagcaggaaacaatacaaagtcatttgccttcatggagcttacattctaatggtgggagacagtcatcaacaaataaggcaaagaacgattatgacaaatggtgagaagtgttataggggaaattaagcagagacatacat

SEQ ID NO: 557966 - DNA, 590 bp, Homo sapiens
ttaagaatgttatcaagttctaggtggaccagtaaaccagagataaaccttctgcctgcattgggaggccatgggagggcattgttattgccattttttgtttttgttgaatcttaacccctaggttccttaaccccagacttcaaaacaccatgaaataagatgttattaaagattaaagaaaatataaatactttgcatttaagaccagcatatataacccagaatccaaacaatgctgggaaaattgtgacagaaacaaataggtagacagggagcccaattcctttcttcccatgctgaatctactcacctataaaaccccacagattcaataattacccrtgaagcatccttctttgttctcctaactccataaaaactctgtgaaaattccttaagagcatggccagttcttggatatcattgtgcaccttgactgggccaaccatagtacatatatttcacactacaggcaaccagtacataaagattggctgaatttgccttgaggaacccagtaggctgagaagaattatgttaatctgtcaaagtataataaactccttgcctggaaattgctgaagaaa

SEQ ID NO: 557967 - DNA, 607 bp, Homo sapiens
aggttgattccatgtctttgctattatgaatagtgctgcgatgaacatatgtgtgcgtgtgtctttttgacagaatggtttgttttcttttagatatatatccaataatcggattgctaggttgaatggtagttctgttstaagttatttgagaaaacttcaaactgctttccacagtggctgaaatatttcaccttcccaccaacagtgtataagcattcccttttctttgcagcctcaccaacatctgttgttttttgactttttaataattgccattttgactggtgtgagatgataggttttttttgttttgttttgttttgttttgttttgttttgttttgttttgttttgttttgctgagcggaagctctttagtttaattaggtcccacttgtcaatttttgtctttgttactattgcttttgaggactttgtcataaattttttcccaaggcccatgtccagaatcatgtttcctaggttttcttctaggattcctgtaactagagatcttacatttaaatatttaatctgtcttgggttaatgtgagttaactttgcataaggtaaaaggtagggggtccagttttattcttctgcat

SEQ ID NO: 557968 - DNA, 607 bp, Homo sapiens
aggttgattccatgtctttgctattatgaatagtgctgcgatgaacatatgtgtgcgtgtgtctttttgacagaatggtttgttttcttttagatatatatccaataatcggattgctaggttgaatggtagttctgttctaagttatttgagaaaacttcaaactgctttccacagtggctgaaatatttcaccttcccaccaacagtrtataagcattcccttttctttgcagcctcaccaacatctgttgttttttgactttttaataattgccattttgactggtgtgagatgataggttttttttgttttgttttgttttgttttgttttgttttgttttgttttgttttgttttgctgagcggaagctctttagtttaattaggtcccacttgtcaatttttgtctttgttactattgcttttgaggactttgtcataaattttttcccaaggcccatgtccagaatcatgtttcctaggttttcttctaggattcctgtaactagagatcttacatttaaatatttaatctgtcttgggttaatgtgagttaactttgcataaggtaaaaggtagggggtccagttttattcttctgcat

SEQ ID NO: 557969 - DNA, 607 bp, Homo sapiens
aggttgattccatgtctttgctattatgaatagtgctgcgatgaacatatgtgtgcgtgtgtctttttgacagaatggtttgttttcttttagatatatatccaataatcggattgctaggttgaatggtagttctgttctaagttatttgagaaaacttcaaactgctttccacagtggctgaaatatttcaccttcccaccaacagtgtataagcattcccttttctttgcagcctcaccaacatctgttgttttttgactttttaataattgccattttgactggtgtgagatgataggtttkttttgttttgttttgttttgttttgttttgttttgttttgttttgttttgttttgctgagcggaagctctttagtttaattaggtcccacttgtcaatttttgtctttgttactattgcttttgaggactttgtcataaattttttcccaaggcccatgtccagaatcatgtttcctaggttttcttctaggattcctgtaactagagatcttacatttaaatatttaatctgtcttgggttaatgtgagttaactttgcataaggtaaaaggtagggggtccagttttattcttctgcat

SEQ ID NO: 557970 - DNA, 576 bp, Homo sapiens
aatcaaaaacaaaggatgataaataaaatttgaaatgtcgacctgaatttgccatcagatgtcctagcaaaaatgaaatgagagtcatagcagtcttacttgttgtctaaccatattcatgtacagccaatagttgttgagtgcttactgtgtgctggacatgatgttagacacgttttaygcattatggttcacttgatcctcattccaaaacaatatgttcatatttaccaccccaccctgcctcattttatggttgagtaaatggaagtccagaaagatttagtatcttgttcaaggtcacaaggctagtaagtgatagagcagacattaggtctaaggatttagacttcagagctcttatccatgatgccagctccatcaaactttacgcagtaattttattttaaaatgttttcagtattcacactctcagtgatactaacaacattctaaatgtgttaaatggaaattccctggtacttcaggttggagaattatgcaattcacataagaaacaaataaacagattcttcttggatatcacgggcacattgcccaatttcattgcctatt

SEQ ID NO: 557971 - DNA, 621 bp, Homo sapiens
aaaaagaaatataattagtatgaaatataagaaatataagaagaaagaaatataattagtatgcaatggaaatgaaaaatatttgtctgctatgcctggattaaatttcatgcaaaataaatttgccttaaatacactgtcgctagacaaagtgagtagtttgatcacaagttgatttaatggccrctagaaaagatagatccaagactgacaaaagataacctcaatggaaatgcaagttacttttaattttttaaggaaaataaaacaacttttaccaagaaacattatgatacaagactttggaatacataaatatatatacacatttttaaaaaaatctttacttatggaaatcagttggctatggctaagatatgtatctgataaacaaatattgcctatttatatacctaaatttgatagttctttaaaatatgaagctactgcatgacaaatattcatgggttaaagagtaaactgaaaaataacatcaatggcaaagtccaccagttcatcttcatgaggtaaatttgaaaagtcatttttaagattctcatggaagtctagcaatcctttaataaaatttttaaataggtaagattactgtgaatattgtga

SEQ ID NO: 557972 - DNA, 526 bp, Homo sapiens
ccataattcttacttctctttccaattcatattttattttattttttctgttacatgaaataattcctggcacctattgcactcaggagccctgattaagacaaactgggaaatggcaagcagagattgagtrcaagtagggaaaaaggataatgaacagcaatcaaagcaaggccttatgagtcaaatagggagagtaataaaagaacttgaacaagatggtattgggaacagtacaagatctctattgtttgaacaaaattttaaggtcagagatgaataaaaaacacagatgaatttattttgtgctgcttagtttggtctggagtcccttaaaatctccaatacatggagaaaaggaaggaaattaacatttattgtatacccaccatgttctgagcttggagtgatgtactttatataaattgccacttgcattaacagtttaaaaacagtaataaggcatgcaatgtaactctgaaggagaaagaggagaaggaggaagaggagggggagaaggagaaga

SEQ ID NO: 557973 - DNA, 526 bp, Homo sapiens
ccataattcttacttctctttccaattcatattttattttattttttctgttacatgaaataattcctggcacctattgcactcaggagccctgattaagacaaactgggaaatggcaagcagagattgagtacaagtagggaaaaaggataatgaacagcaatcaaagcaaggccttatgagtcaaatasggagagtaataaaagaacttgaacaagatggtattgggaacagtacaagatctctattgtttgaacaaaattttaaggtcagagatgaataaaaaacacagatgaatttattttgtgctgcttagtttggtctggagtcccttaaaatctccaatacatggagaaaaggaaggaaattaacatttattgtatacccaccatgttctgagcttggagtgatgtactttatataaattgccacttgcattaacagtttaaaaacagtaataaggcatgcaatgtaactctgaaggagaaagaggagaaggaggaagaggagggggagaaggagaaga

SEQ ID NO: 557974 - DNA, 249 bp, Homo sapiens
atttctttactgtctgtcttccactccaaaatgtgaaagtaacaaaattagagkttttctttgtccttctaacaccataacccaggtgcctatatgcattactggctcacaatagatgatcaatatgtgtgttcaatgataaacaagttttgagtaaatgaatgcaatagaaatctcaagttataacaaaaaactagacaataaatttggcaacatagaagttaccaatgccctgtggaaaagtagttt

SEQ ID NO: 557975 - DNA, 533 bp, Homo sapiens
ttaatttttccgcaggatgatatataacaagtactattctagatgcataggagaaaagttaacatacaatagatgccttctataacatggatttctggttacatagaaatttgttataacataaacttctgggctcaaccttcagaggtgcagtaagctggtcttgggttaaacctcagaatttgcatttctgataaggtttcagatgatgctgatgccattgtggtcagtaccacactgagaatcactgcattagggttttaatcttttctcagaaacctggtgtgcaaggccaccagtcttgaattactttctgtttccaaacatggagaaagtgtaggttgtcttgcaaataacacctatgaaaacttttttttttttttttttttttgagatggaatctcacttggtcaccaggctggagtgctgtggcaygatcttggttcactacaaccaccgcctcccaggttagagcaattctcctgcctcagcctcccgagtagctaagactacaggtgtgtgccaccatgccc

SEQ ID NO: 557976 - DNA, 589 bp, Homo sapiens
ggtggaacaaaaatattaaacctaggacatcactaacttcacaaataaataaataaaaatatatctctaccttgttcaaatattttacaattaaagcataatcttcattagaaggcacaatggatacctccatgactcatgaaatagaaagagtaaatattttcattctaaaggcattccatgaaacagatgtaaggggatggttatacatccaggaagtgaatgtatcttttctawgcacaaaataaatatatttagctgtccaatattatttaaaggagtctacatgaattatcaatatatttttattgttgggatcaaatggcattaaaaacatagcagataaacaacctggaaacaagagaaaataacacagagaataaaataagaggtatttgttatagaaagactgttgagtgttagctttgttgtttatggtctgtgcaaaaacttgaggcatatacaattaattgagaatatctaaatacttaatcttgtattaacaaactaaagtgtcatgaaaatttattgagatcgtttgtgagctagaatagctagtgtgagtttaacgagtaagaagtcaggccgg

SEQ ID NO: 557977 - DNA, 403 bp, Homo sapiens
accctgatttgaccattacacatcacataaatgtataaaaatatcatatgtacccccaaaatatgtgaaattatttatgaattaaaaataaaaactaaaaaataaaaataccactaatatttttttcacaaaaattgtccaggttttakaaaccaggttgcaagaagttcaggcaataatgatgccttagataattccttctgcaagaatgtagaactctgccttctccagttgtcactgaagagtccagacagacttaactgtttgaaagttagggcaaactctaacactttgtttaattttgaaaaatatagtcattcataatatggtgttgcttagacaatattaaaatgtatttttattaattataacttctaattatattttatgacaatttttaaat

SEQ ID NO: 557978 - DNA, 566 bp, Homo sapiens
ttaaatggctacaaacagtatcagtccatttatataacattctctaaaacggggtggacagcaaaaggtaaacagtggggcaagtgagtatcactgcctgagcttcacctcctgtcagatcagtgcggtattagattctcataggagcacaaatcctgttgtcagctgagcatgtgaggaagctgggttgtgtgctcattatggaaatctaatgtctaatgatctgaggtgtaatagtttcaacctgaaaccacacccccgccccactcccatccatggaaaaattgtcttccacaaaaccagtccctggtgccaaaacggttagggactgctgttctaaagggcaaaattataaggmtagaaagcagttgttggcaggcgccagtggcaaagatatgagatttactacaaggggacataaaacaacattttagagtgatgaaaatctatatctggatagtggttacaaaattgtattcatttcccccaaacttgtctaaccgcttgcttgaataggatgactttgctctgtgtaaacctaaataaacttaatttcaaaaaatcgt

SEQ ID NO: 557979 - DNA, 616 bp, Homo sapiens
tttcatattacattagagcttcagggtttgcaaggatggcaccttttcctttatgttatcaatcatttgtattttctctcctttatctttattagtttatcccacaggccaattgggttagtaaaataataaacatgtgcttttgttgatcctctacatcacacattgtctatttcactaattcccacacttacatttattatttttcttctcatgtgttcatttgagttttgaacttatcacactttatacaacttcttgagctagattcttctatcatgaattttctatcttgccccttagttactaatatattcatgtcaggctatgttgtgtcatcattgttttatatgtgtccaagtattataacatttttaatctcttagtgcaaaatatttacttaattccattttgatttcctccttcaatgagttatttaggccctaatctgatagtttttcattattgtatgtgcctccaacgccstcaaacagatattttatccagttttatgttatgtttggtaatatacttgctccaaattatacagtttaccagtattcacatttattttgaaacacctaaaatattataaatttatataattaagaaaaaa

SEQ ID NO: 557980 - DNA, 424 bp, Homo sapiens
tttttctctttgtattcatttggggaagtttcaattgacattatcttcaaactgtttttctatagatatatgcagtcaactgatgtgcctaacaaaggcaatcttcattactgtacaatattttttatttctagcattttctattgattttttcttaacattttcatctctctgcttacattatccaactgktcactcgtgcatcaactttttttccattagaggcctttacatgtcaatcatagttattttaaacttctctgataatgtcctaatatataacatatcttagtgtggttctgattcttgctttgtctttctaaaatgagtttgttttcttgccttttaacatgcattgtaatttttttattcaaatctagacctcatgtgtaaacttcagttgcttttagttttttttttattt

SEQ ID NO: 557981 - DNA, 540 bp, Homo sapiens
gtcgatcaggaatgtccttaggttattttatgattttatgttttttttccccctaacttctttataagtcaccatgcatgcttctgaaaatattagtcatggtacacttgatcaaaaggcacatgactctgaatttcagaagtatgaacttyaagttccaacaatacaatgccttataggtgaaaaagaaataataattaaagtgattttagaaaggtggactaaagtaaattgtgaggagtgttgaaagtttttgaaagacaagatccataaaaaccaaggtggccttgttaaggtcatggtgccagtgttcactgaatgtttaccacgtccattgccatattctaaggatgtttccctttgaacttgagaaatggtcgttcagggtgtgtgtgtatgtgtgtgtgtgtgtgtttcaatatgttaaggttgcaatctatctcctcattctttaatcccaagggctagaaactttcttttatcaaggtaatttaatttaatgtgaatgcacataaaatgagaatgataatcaaaaggaat

SEQ ID NO: 557982 - DNA, 343 bp, Homo sapiens
atatctaactgaaagaaaaagagggaggtaaatctgtagcattataattaacagattaccttctcgggagactttacaagatcagaaagttaatactgataatattcagtgtcatttctaagactttactaattcattacttatcataaatgttctagtactagatgaggtttttgcttctgggcattatatatctctgtttcccgtagaagaggacacatgtattacrttctggacttgaggaggcatttatcacagccaaaagatgtttatacttgaggtgactgggagtggtaaaccatatggctttggtgaccctcaaagtgcagatggaggagcttta

SEQ ID NO: 557983 - DNA, 558 bp, Homo sapiens
aatgacaactttcagttaatgcagcttttccactaggtttacctattacaaaatgacaactttcaattactgcagcttttccactaggtttacctattacaaaatgacaattttcagttaatgcagcttttccactaggtttacctattacaaaatgacaactttcagttaatgcagcttttccactaggtttacgtatcaacaactacctatatgctatctcatctacacccaaacttaagaaactggggaatgaaaagaaatatgaatacgtccaagagctgctttcatcatgtgcttaccatcatttctggttagaaagataaatttgaaagtagcggccaggcrcagtcccaacactttgggaggccaagacaggcagatcacttgaggtcaggagtttgaaaccagcctggccaacatagtgaaaccacatctctaccaaaaaaatacaaaaaaaaaaaaaaaattagctaagcatggtgatgcacgcctgtggtgccagctactcaggaggctgacgcataattgcttgatcccaggaggcagaggttgcag

SEQ ID NO: 557984 - DNA, 623 bp, Homo sapiens
ataggtaggcatcatccaatcagttgaaggcctgcatggaccaaaagactaaccctcccccaagtaagagaatttctcctgcctgatggccttcaaactggatgttgtctcttcctgattttccaggcaactcctggccttcagacttgaactgggtcatgagctctgcagacttcggccttgccagccttcataatcacatatttctctggagaattctaatacaggcttctcttagctaaaatggtttctcagactttcctggtttctgatgacctttgaggaagagatactcctcaagctgggtttttttaatgtcttttcttattattacaccagcgttacatgtctttgggagggaaacctcagaggtaaaatgcctttcccatcacattactgtaagagtacacatttttcaatatgagttattattaataatattagcctcaatcacttggccaaggtagtttttccagacttctctacagtaaacttacttccccccataccatcttttcacactctgctttttgaaagcaagtcattaagcacacactcactcaaggggtaaggaagtaaactccmtgtccttgaagggaaattacctacatcaactatttgga

SEQ ID NO: 557985 - DNA, 564 bp, Homo sapiens
attatcacaataatgcccaacactccattagagtgayggaagtgagcattgacttgatgtagtatgttttattattcatcatctaaaacaccaagtgccaacacccacatatggggttatggcatatgtacaacaggaaagcattttctagaaagcagtaggtcttctatagcataatattccaaggttgccatcattctttaaccagctccctaaaagaaagagcaaatggtcagggattttttcacgcataaaactaccataaactctaatcaaatggatgcttgcttaaggatttgaattccggagtatctcccatgcagaataagttaagagctagtctggaatattgagtaagggaagttcacagacctcgcagaagccagcacagatgaacattcaaaagttcacaatttccaggcttaggtcagtccttaggagttcacaaacacagatggaatatttcttttttttttttttatactttaagttctagggtacatgtgcacaacgtgcaggtttgttacatatgtatacatgttccatgttggtgtgctgcaccca

SEQ ID NO: 557986 - DNA, 564 bp, Homo sapiens
attatcacaataatgcccaacactccattagagtgacggaagtgagcattgacttgatgtagtatgttttattattcatcatctaaaacaccaagtgccaacayccacatatggggttatggcatatgtacaacaggaaagcattttctagaaagcagtaggtcttctatagcataatattccaaggttgccatcattctttaaccagctccctaaaagaaagagcaaatggtcagggattttttcacgcataaaactaccataaactctaatcaaatggatgcttgcttaaggatttgaattccggagtatctcccatgcagaataagttaagagctagtctggaatattgagtaagggaagttcacagacctcgcagaagccagcacagatgaacattcaaaagttcacaatttccaggcttaggtcagtccttaggagttcacaaacacagatggaatatttcttttttttttttttatactttaagttctagggtacatgtgcacaacgtgcaggtttgttacatatgtatacatgttccatgttggtgtgctgcaccca

SEQ ID NO: 557987 - DNA, 564 bp, Homo sapiens
attatcacaataatgcccaacactccattagagtgacggaagtgagcattgacttgatgtagtatgttttattattcatcatctaaaacaccaagtgccaacacccacatatggggttatggcatatgtamaacaggaaagcattttctagaaagcagtaggtcttctatagcataatattccaaggttgccatcattctttaaccagctccctaaaagaaagagcaaatggtcagggattttttcacgcataaaactaccataaactctaatcaaatggatgcttgcttaaggatttgaattccggagtatctcccatgcagaataagttaagagctagtctggaatattgagtaagggaagttcacagacctcgcagaagccagcacagatgaacattcaaaagttcacaatttccaggcttaggtcagtccttaggagttcacaaacacagatggaatatttcttttttttttttttatactttaagttctagggtacatgtgcacaacgtgcaggtttgttacatatgtatacatgttccatgttggtgtgctgcaccca

SEQ ID NO: 557988 - DNA, 564 bp, Homo sapiens
attatcacaataatgcccaacactccattagagtgacggaagtgagcattgacttgatgtagtatgttttattattcatcatctaaaacaccaagtgccaacacccacatatggggttatggcatatgtacaacaggaaagcattttctagaaagcagtaggtcttctatagcataatattccaaggttgccatcattctttaaccagctccctaaaagaaagagcaaatggtcagggattttttcacgcataaaactaccataaactctaatcaaatggatgcttgcttaaggatttgaattccggagtatctcccatgcagaataagttaagagctagtctggaatattgagtaagggaagttcacagacctcgcagaagccagcacagatgaacattcaaaagytcacaatttccaggcttaggtcagtccttaggagttcacaaacacagatggaatatttcttttttttttttttatactttaagttctagggtacatgtgcacaacgtgcaggtttgttacatatgtatacatgttccatgttggtgtgctgcaccca

SEQ ID NO: 557989 - DNA, 564 bp, Homo sapiens
atagagaacccagaaataaacccaaatacttacagccaactgatctctgacaaagcaaaacagaaatatgaagtggggaaaggacatccttttcaacaaatggtgccggcataatcaggtacccacatgtatgagaacgaaactggatcctcatctctcaccttatacaaaaatcaactcaagatggattaargacttaaacctaagacctgaaactataaaatttctagaaaataacattggaaaaccctttctagacattggcttaggcaaggatttcatgaccaagaagccaaaagcaaatgcaataaaaacaaggataaatagctagaacctaattaaactaaagagcttttgcacagcaaagggaacagtcagcagagtaaacagacaagccacagagtgggagaaaatcttcagaatctatacatctgataaagaactaatatcaggaatctacaacaaactcaaacaaatcagtaagaaaaaaaacaaaaaatcccatcaaaaagtgggctaagaacatgaataggacaatttccaaaagaagatatacaaatggcc

SEQ ID NO: 557990 - DNA, 564 bp, Homo sapiens
atagagaacccagaaataaacccaaatacttacagccaactgatctctgacaaagcaaaacagaaatatgaagtggggaaaggacatccttttcaacaaatggtgccggcataatcaggtacccacatgtatgagaacgaaactggatcctcatctctcaccttatacaaaaatcaactcaagatggattaaggacttaaacctaagacctgaaactataaaatttctagaaaataacattggaaaaccctttctagacattggcttargcaaggatttcatgaccaagaagccaaaagcaaatgcaataaaaacaaggataaatagctagaacctaattaaactaaagagcttttgcacagcaaagggaacagtcagcagagtaaacagacaagccacagagtgggagaaaatcttcagaatctatacatctgataaagaactaatatcaggaatctacaacaaactcaaacaaatcagtaagaaaaaaaacaaaaaatcccatcaaaaagtgggctaagaacatgaataggacaatttccaaaagaagatatacaaatggcc

SEQ ID NO: 557991 - DNA, 541 bp, Homo sapiens
agcaccatgtcaactaaaacaactgaggaaagggatattaactcaacagccaagagccagcctaatggcaggagggcaggcagccaggctgagcaggcctaggcctggagggagcatgatagcctggggcccagcttgctgcctccttctaggtgcttgggtcacccctacccacccctcccatgctacctctgactccctggaccaaaggccctggacctcttcatgcctcaaagccctgcagcagctacaagaatgcacctcgcagaccttctgctgcaggaagcagaaatgacgagggccccagctgcatactttatttattttattttattttttgagacagagtcttgctctgtcacccaggstggagtgcagtggcatgatctcatctcactgcaacctctgcctcccagtttcaagacagtctcctgcctcagcctcccgagttgttggtatgacaggcgtgcaccaccatgcccagctaactttttgtgtttttagtagagactgggttttaccatcctggccaggctggtct

SEQ ID NO: 557992 - DNA, 594 bp, Homo sapiens
ggcttgtccctgccattggcagagtgcagtggtgatactaaggcagatccctgcctgggagacaggggatttctttctttttttttttaatttctgttatttagagatcccccagattggaatgcaatggtgcaatcatagctcactgcagcctcaaactcctgggctcaagtgagcctcctgtctcagcctgccgggtggctgggaatacaggtgtgatcaccccactggcactagggacggtctttctagatcaactccacctccatggttccctgttggctttgccgaactcctctcggagtgcaatgaggctaggacgcwtcctccaggcctcttttcctctctccttcccttggggtcaggttacattgcggtgtgaggctctcccagcctcccctagccctttcatttcaaaatcaggcatttcccctagtaaaatcctccattcagtcccatcttgtttctcagaggagttaaactaaatcccttagataatgacaccaccaggaataacatcttgattaagagctgtcaatatgtcccacactatactaaatgcttttaggacagtggaggaaaccaaggcacaga

SEQ ID NO: 557993 - DNA, 485 bp, Homo sapiens
tggctaacacgatgaaaccctgtctctactaaaaatacaaaaaaaattagccgggcgccatggcgggagcctgtagtcccagctactcgggaggctgaggcaggagaatggcgcgaaccccggaggcggagcttgcagtgagccgagattgcgccactgcactccagcctgggcaacagagcgagactccgcctcaaaaaaaaaaaaaatcactatgtaccccataaatatgtatcattattatgtacatatttgccaatttttaaaaaagaagkagaaaaaagactggtaagtacaggtgtctgataactaagattatgctattggactgggtaagaagttccaaaactctaagagaaaactgatagtttcatgaaactattaacaaaatatcaaacaaaacaaaagagttaattagatgaggctaaattaactgatgagaatgattattcattttattactttttgttaaaacgttggttttt

SEQ ID NO: 557994 - DNA, 620 bp, Homo sapiens
tcccattgaaagtctcttttccatggacatcaggaaatcatttaaagcctcctcttaatgcacagcagaggctcagcaagtgctgtcaactctaatacaatttagaagttacagattcataagagcagctttgagtcttagcagcattcctgctagcatcctagtaaaagtagggctgtgtgtctagattaaaatggaaagttctgatttggcatctatatgtttttctatctaacactgtatatctgcatttaaaaaaacattttggtgcctgattatttgagttttcattgtgattttttgatacctgcctggaacctccaaaacatgtgaactcagactatttaggcttttaggaaaccttttaggcttagaccgtttaaccttttaggagggttttgttgytgccttatagaagctaacataagatgggtagacacttgagtgtgctggttggccaaagaaaagaaatgcaaagagggcagacaaagaaaaaaaaaaaaacacatgaatgtaaagctatgccactttttttcccctctcataggtaattctggaacactttatttattatatctactgtgtgcacacttactgttcaaaatcctgatggcataaca

SEQ ID NO: 557995 - DNA, 620 bp, Homo sapiens
tcccattgaaagtctcttttccatggacatcaggaaatcatttaaagcctcctcttaatgcacagcagaggctcagcaagtgctgtcaactctaatacaatttagaagttacagattcataagagcagctttgagtcttagcagcattcctgctagcatcctagtaaaagtagggctgtgtgtctagattaaaatggaaagttctgatttggcatctatatgtttttctatctaacactgtatatctgcatttaaaaaaacattttggtgcctgattatttgagttttcattgtgattttttgatacctgcctggaacctccaaaacatgtgaactcagactatttaggcttttaggaaaccttttaggcttagaccgtttaaccttttaggagggttttgttgctgccttatagaagctaacataagatgggtagacacttgagtgtgctggttggccaaagaaaagaaatgcaaagagggcagacaaagaaaaaaaaaaaaacacrtgaatgtaaagctatgccactttttttcccctctcataggtaattctggaacactttatttattatatctactgtgtgcacacttactgttcaaaatcctgatggcataaca

SEQ ID NO: 557996 - DNA, 573 bp, Homo sapiens
tacaggcactcgccaccgtgcctggataatttttgtatttttagtagagacaggtttccccatgttgtccaggctggtctcaaactcctgacctcaagtgatccacctgccttggtctcccaaagtgctgtaattacaggcatgagccaccacgcccagctgggacaattcttgttatatgttartttcttaaaaccaccaaagtctattcaatatatgatatagtgattaagaaataaaggtgtacattgataaaaagtatgaagtttcacatatgcacattcttatagcactcataatggcatctgttaaatcttcatctaacttttaaaataaaatggcttgtaaaagctatgaattactaagctgtgggatgcttttgggatctcaagtagtaatgtggaagtctaggcactcagcactgtatggaatcaaaattcccagtggaatatggagagcagaaagattgggcagggagaacttgtgaaaatttaaacatgattttcaggttcatttggcaaaaaaaattaggtgacaatggatatttttaaaaaaacaccaccaacaagggca

SEQ ID NO: 557997 - DNA, 353 bp, Homo sapiens
cccccaccccagcaacctgcaccagcagaaactcctacttctacaaggtctaagacgaaacgggaaaacaaccaccaaagcccagtgagggcaggaagataggaggggccgccggaccactcaagatgtaatcaagaaaggacacaactacagccctggatgctgtgtcaaagcagagatgaatggaagaaatatcccaaccactcttctgcccactctctcatctcctgctgtgtcttctgggggtggatttccacagggcagggctggcaggggatgtggcccatttaggtcagctcccccaggcatakaactgagcagggatagagaatcaatttagaggagcaaaggga

SEQ ID NO: 557998 - DNA, 616 bp, Homo sapiens
gggtgtcaccatgttggccaggctgacctcaagtgatttgcccacctcagtctcccaaagtgctgggattacaggcctgagccactgtgctcagcctacctgcacatgtttcttattccagtgacacacatgtgcttagctyactgagatggttgccagtagttgcttcctggttcctgaactataaggataggaattttgatacaaaaatcaaatattgtggtacagttgactttgctccccaacttccagctgcccttgagatgcttccaagctcacccagcagcctatggtcccaacacttatcactgagcacctctccctcgcctggactgcctgttcctctgggcagctggtggacctttgctcctggtccgcagagctcttggaagacatcactgtgctcacttctctcacaggaccccacccagtcctgagacaaccctgggatgcaactgggggctggagaggcagaacaatgttttgttagttagaaggacttggattccagacccggctcttgctcttctgggctctgtgactaggggcatatgatttctactgtctgtaatttccctcatgaaaaatggggatggtactacttaatcttctgcaa

SEQ ID NO: 557999 - DNA, 500 bp, Homo sapiens
ctgggcaatggtagcaaaaccccgtctctacaaaaaatacaaaaaattagctaggtgtggtggtgcatacctgtagtcccagctactcaagaaactgaggtgggaggatcgcttgagcccaggaggttaagggtgcagtgagccatgattgtgccactgcactctagcctggcccacagagtgagaccctgttgcaaaaaaaaaaaaatttaaaaagtaaaattagtttaatttaatttttaaaagatgttatttttattcattctgagcaattctcaaccattatctcttcaaatgttacagattccattctctcatcatttctggaactctggatatacartggacctcttctattcttcatgtctgtcaaattttctttcatattgtttatttctttggattgcactctggctaatttctgaagatgtatcttcttgttcacttgatctttagcagtttctaatctgctattttaccctatctattgagttttcagt

SEQ ID NO: 558000 - DNA, 479 bp, Homo sapiens
gcagctcatcggagactcagtctctttccctccacgttgtagatttttctttcccaagatcccctcactccgtatggagaaatcaaaataacccgactgaccccacgcctgcagggcccttcccacctctggcagtctgccatcagcccatgtctgccagaaaatttatctgatctttgaacctcgcactcgcttggagataaacgtaggctactgctaaaggcatcagtgctrttgtagagttggggcaagtggaggtgaacagggcagggagagggcagaaggctttgggacagaggggctgggaggcaggctgccaacgctgggaaggtgcagggagtgtctgcagtcatttctccctcccttcatgttcatcccctggttccaggccaaatagaaatgcctgaacatctaccagggacagtccttttctgtcgtcgtcatcatcatcatcatcatcatcatcatcatcatcatca

SEQ ID NO: 558001 - DNA, 479 bp, Homo sapiens
gcagctcatcggagactcagtctctttccctccacgttgtagatttttctttcccaagatcccctcactccgtatggagaaatcaaaataacccgactgaccccacgcctgcagggcccttcccacctctggcagtctgccatcagcccatgtctgccagaaaatttatctgatctttgaacctcgcactcgcttggagataaacgtaggctactgctaaaggcatcagtgctattgtagagttggggcaagtggaggtgaacagggcagggagagggcagaaggctttgggacagaggggctgggaggcaggctgccaacgctgggaaggtgcagggagtgtctgcagtcatttctccctcccttcatgttcatcccctggttccaggccaaatagaaatgcctgaacatctaccagggacagtccttttctgtcgtcrtcatcatcatcatcatcatcatcatcatcatcatcatca

SEQ ID NO: 558002 - DNA, 538 bp, Homo sapiens
gatgtaccacattaacagaatgaaggacaaaaaacataatcatttcaatagatgcagaaaaaaaaatcagagaaaattcaacatcccttcatgataaaaacccttaatgatttaggtgcagaaggaatatacatcaataagggacatatatgaaaagcacmcaagctcacatcagactcaatggtgaaaaattgcaagttttctaagatcaggaaaaagacaaggattccccctcttgtgataagtattcaacattgtgctggtagtcttagaataatcaagagagaaataaatgaaattcaaattggaaaagaagatgttatgatcttatatctagaaaaccctagccactcaccaaaaagctgttagatgtaataaacaaattcagcaaagttgcaggaaacaaaatcaccatacagaaatcagtaacatttattccctgaaaacaaactatacgaaaaaaagtcaagaaagcaattctatttacacaagcaaaatgtaataaaataaaatatgtaaaaataaatttaacaaataa

SEQ ID NO: 558003 - DNA, 538 bp, Homo sapiens
gatgtaccacattaacagaatgaaggacaaaaaacataatcatttcaatagatgcagaaaaaaaaatcagagaaaattcaacatcccttcatgataaaaacccttaatgatttaggtgcagaaggaatatacatcaataagggacatatatgaaaagcacccaagctcacatcagactcaatggtgaaaaattgcaagttttctaagatcaggaaaaagacaaggattccccctcttgtgataagtattcaacattgtgctggtagtcttagaataatcaagagagaaataaatgaaattcaaattggaaaagaagatgttatgatcttatatctagaaaaccctagccactcaccaaaaagctgttagaygtaataaacaaattcagcaaagttgcaggaaacaaaatcaccatacagaaatcagtaacatttattccctgaaaacaaactatacgaaaaaaagtcaagaaagcaattctatttacacaagcaaaatgtaataaaataaaatatgtaaaaataaatttaacaaataa

SEQ ID NO: 558004 - DNA, 538 bp, Homo sapiens
gatgtaccacattaacagaatgaaggacaaaaaacataatcatttcaatagatgcagaaaaaaaaatcagagaaaattcaacatcccttcatgataaaaacccttaatgatttaggtgcagaaggaatatacatcaataagggacatatatgaaaagcacccaagctcacatcagactcaatggtgaaaaattgcaagttttctaagatcaggaaaaagacaaggattccccctcttgtgataagtattcaacattgtgctggtagtcttagaataatcaagagagaaataaatgaaattcaaattggaaaagaagatgttatgatcttatatctagaaaaccctagccactcaccaaaaagctgttagatgtaataaacaaattcagcaaagttgcaggaaacaaaatcaccatacagaaatcagtaacatttattccctsaaaacaaactatacgaaaaaaagtcaagaaagcaattctatttacacaagcaaaatgtaataaaataaaatatgtaaaaataaatttaacaaataa

SEQ ID NO: 558005 - DNA, 507 bp, Homo sapiens
tttttacctctcccacccaccatacccactaaagtgcttaatattgaggaggtttttgtgatatcttggcctttcttggtctctatgtcttatgcttgccatgcagattatctatcaattatattcagatttccaactaaggtagtttaaaaagttagagaatgttatacttgaaaaaaaacttagattttatgatgtccagtttatagataagaaaactaggcctgaaagaagtgaagggattttcccaaggccatagagctagcgagtggctagcaagtggtagggtttgtatttggacaataatgtattgaatttcatatcatgtctcttccctgtttcaccattcttaggtttatttgtcatgttgatattgagctggagattgtaacacagtggtgtcaagctgagatgtaaactaaattttatatyctcaacctggtaggggatggagaagtcattattttgagctagatatttgctgcaactctgttacgggaatgagaa

SEQ ID NO: 558006 - DNA, 634 bp, Homo sapiens
gaggaatgcttatacactggtggtgggaatgtaaattagtgcaatctgtatagaaaacagtgtggaaattcttaaagaacttaaagtagatctaccatttgatcctgcaatcccgctactgggtatctacccaaaggaaaataagtcattatcaaaaaaaaaaaaaacatgcatgtatawgtttattgcagtccaattcacaattgcaaagatatggaaccaacctaagtggccatcgatcaatgagtggataaaaaaatgtggtatatacgaacaatgaaatactactcaaataaaaaggaataaaataatgtcttttgcagcaacttggatggatctggaggtcattattctaagtgaagtaccttagaaatgggaaaccaaaaaccttatgttctcatttataagtgggagctaaattatgagtacataaaagcatacagagtgatataacagactttggagattcagaagggggaaggtaaagggcaggtgtgagataaaaaaactacatattggctacagagtacactattcaggtgatgggtacattaaatctcagaattcaacactatttaattcatctgtgtaaccaaaaacacttgtaccacaaaagctattgaaataaaaaaaa

SEQ ID NO: 558007 - DNA, 634 bp, Homo sapiens
gaggaatgcttatacactggtggtgggaatgtaaattagtgcaatctgtatagaaaacagtgtggaaattcttaaagaacttaaagtagatctaccatttgatcctgcaatcccgctactgggtatctacccaaaggaaaataagtcattatcaaaaaaaaaaaaaacatgcatgtatatgtttattgcagtccaattcacaattgcaaagayatggaaccaacctaagtggccatcgatcaatgagtggataaaaaaatgtggtatatacgaacaatgaaatactactcaaataaaaaggaataaaataatgtcttttgcagcaacttggatggatctggaggtcattattctaagtgaagtaccttagaaatgggaaaccaaaaaccttatgttctcatttataagtgggagctaaattatgagtacataaaagcatacagagtgatataacagactttggagattcagaagggggaaggtaaagggcaggtgtgagataaaaaaactacatattggctacagagtacactattcaggtgatgggtacattaaatctcagaattcaacactatttaattcatctgtgtaaccaaaaacacttgtaccacaaaagctattgaaataaaaaaaa

SEQ ID NO: 558008 - DNA, 634 bp, Homo sapiens
gaggaatgcttatacactggtggtgggaatgtaaattagtgcaatctgtatagaaaacagtgtggaaattcttaaagaacttaaagtagatctaccatttgatcctgcaatcccgctactgggtatctacccaaaggaaaataagtcattatcaaaaaaaaaaaaaacatgcatgtatatgtttattgcagtccaattcacaattgcaaagatatggaaccaacctaagtggccatcgatcaatgagtggataaaaaaatgtggtatatacgaacaatgaaatactactcaaataaaaaggaataaaataatgtcttttgcagcaacttggatggatctggaggtcattattctaagtgaagtaccttagaaatgggaaaccaaaaaccttatgttctcatttataagtgggagctaaattatgagtacataraagcatacagagtgatataacagactttggagattcagaagggggaaggtaaagggcaggtgtgagataaaaaaactacatattggctacagagtacactattcaggtgatgggtacattaaatctcagaattcaacactatttaattcatctgtgtaaccaaaaacacttgtaccacaaaagctattgaaataaaaaaaa

SEQ ID NO: 558009 - DNA, 634 bp, Homo sapiens
gaggaatgcttatacactggtggtgggaatgtaaattagtgcaatctgtatagaaaacagtgtggaaattcttaaagaacttaaagtagatctaccatttgatcctgcaatcccgctactgggtatctacccaaaggaaaataagtcattatcaaaaaaaaaaaaaacatgcatgtatatgtttattgcagtccaattcacaattgcaaagatatggaaccaacctaagtggccatcgatcaatgagtggataaaaaaatgtggtatatacgaacaatgaaatactactcaaataaaaaggaataaaataatgtcttttgcagcaacttggatggatctggaggtcattattctaagtgaagtaccttagaaatgggaaaccaaaaaccttatgttctcatttataagtgggagctaaattatgagtacataaaagcatacagagtgatataacagactttggagattcagaagggggaaggtaaagggcaggtgtgagataaaaaaactacatattggctacagagtacactattcaggtgatgggtacattaaatctcagaattcamcactatttaattcatctgtgtaaccaaaaacacttgtaccacaaaagctattgaaataaaaaaaa

SEQ ID NO: 558010 - DNA, 527 bp, Homo sapiens
tctcagaattcaacactatttaattcatctgtgtaaccaaaaacacttgtaccacaaaagctattgaaataaaaaaaataaaagagcaaaataaataaataagttaattaatattatcttaaagtgaaataaacagcgtgaatgcaaggtacaggtgaagaaagcaaagttttaagcatcaawgtagaaaaatatagctctgattactttaattttaaggtagagggtgttgataatgaacttaaccacaaggaggcaagaaggagaatttacaaaaaagaaaaacagagtatgggataataagccaaggcagaaatattacaagagtgatttacacatacttagtttcaggggtcagggcaaggagaagtgaagtcagcaagatgtcattcttgtccttacctcttctctttaaagctagtagagggagagtgatagcccccttctgcttttggcactggaacaggaaagctacaggaggaacaatgtaaaattccaaataaactcttctgattttgaaatgtggc

SEQ ID NO: 558011 - DNA, 527 bp, Homo sapiens
tctcagaattcaacactatttaattcatctgtgtaaccaaaaacacttgtaccacaaaagctattgaaataaaaaaaataaaagagcaaaataaataaataagttaattaatattatcttaaagtgaaataaacagcgtgaatgcaaggtacaggtgaagaaagcaaagttttaagcatcaatgtagaaaaatatagctctgattactttaattttaaggtagagggtgttgataatgaacttaaccacaaggaggcaagaaggagaatttacaaaaaagaaaaacagagtatgggataataagccaaggcagaaatattacaagagtgatttacacatacttagtttcaggggtcagggcaaggagaagtgaagtcagcaagatgtcattcttgtccttacctcttctctttaaagctagtagagggagagtgatagcccccttctgcttttggcactggaacaggaaagctacaggaggaacaaygtaaaattccaaataaactcttctgattttgaaatgtggc

SEQ ID NO: 558012 - DNA, 597 bp, Homo sapiens
gaaaattcaagtttggaactgcttagggcaacctgcctcccattctattctaataagtagggtaagtgtctcagattgttgctaggaggtgtgaaaggaaaatatcttgggcccccacaatcacaatcaggaagctaaagggaaaattcaagctgggaactgcttagggcaacctgcctccattctattcaaatttatctctatgctcactgagataaatgcatatctgattgcctactttggaaaggctaatcagatactcaaaagaatgcaacctttgtctctcacctgtctgtgacctgctttgagtcttcctgcctttgcttcgagttgtccyacctttccagactgaaccaatgtactccttatatatattgattgatgtctcatgtctccctaaaatgtgtaaaatcaagctgtgcctcaaccaccttggtcatatgtcatcagaacttcttgaggctgtgttacctcaaccttggcaaaataaacttccttaattgactgcgacctgtctcaactgtttggcgtccacagaggttttaagtaaaatagtctacagaaaggttcagaagtctatgagacttagcgagtagt

SEQ ID NO: 558013 - DNA, 597 bp, Homo sapiens
gaaaattcaagtttggaactgcttagggcaacctgcctcccattctattctaataagtagggtaagtgtctcagattgttgctaggaggtgtgaaaggaaaatatcttgggcccccacaatcacaatcaggaagctaaagggaaaattcaagctgggaactgcttagggcaacctgcctccattctattcaaatttatctctatgctcactgagataaatgcatatctgattgcctactttggaaaggctaatcagatactcaaaagaatgcaacctttgtctctcacctgtctgtgacctgctttgagtcttcctgcctttgcttcgagttgtcccrcctttccagactgaaccaatgtactccttatatatattgattgatgtctcatgtctccctaaaatgtgtaaaatcaagctgtgcctcaaccaccttggtcatatgtcatcagaacttcttgaggctgtgttacctcaaccttggcaaaataaacttccttaattgactgcgacctgtctcaactgtttggcgtccacagaggttttaagtaaaatagtctacagaaaggttcagaagtctatgagacttagcgagtagt

SEQ ID NO: 558014 - DNA, 597 bp, Homo sapiens
gaaaattcaagtttggaactgcttagggcaacctgcctcccattctattctaataagtagggtaagtgtctcagattgttgctaggaggtgtgaaaggaaaatatcttgggcccccacaatcacaatcaggaagctaaagggaaaattcaagctgggaactgcttagggcaacctgcctccattctattcaaatttatctctatgctcactgagataaatgcatatctgattgcctactttggaaaggctaatcagatactcaaaagaatgcaacctttgtctctcacctgtctgtgacctgctttgagtcttcctgcctttgcttcgagttgtcccacctttccagactgaaccaatgtactccttatatatattgattgatgtctcatgtctccctaaaatgtgtaaaatcaagctgtgcctcaaccaccttggtcatatgtcatcagaacttcytgaggctgtgttacctcaaccttggcaaaataaacttccttaattgactgcgacctgtctcaactgtttggcgtccacagaggttttaagtaaaatagtctacagaaaggttcagaagtctatgagacttagcgagtagt

SEQ ID NO: 558015 - DNA, 597 bp, Homo sapiens
gaaaattcaagtttggaactgcttagggcaacctgcctcccattctattctaataagtagggtaagtgtctcagattgttgctaggaggtgtgaaaggaaaatatcttgggcccccacaatcacaatcaggaagctaaagggaaaattcaagctgggaactgcttagggcaacctgcctccattctattcaaatttatctctatgctcactgagataaatgcatatctgattgcctactttggaaaggctaatcagatactcaaaagaatgcaacctttgtctctcacctgtctgtgacctgctttgagtcttcctgcctttgcttcgagttgtcccacctttccagactgaaccaatgtactccttatatatattgattgatgtctcatgtctccctaaaatgtgtaaaatcaagctgtgcctcaaccaccttggtcatatgtcatcagaacttcttgaggctgtgttacctcaaccttggcaaaataaacttccttaattgactgcgacctgtctcaamtgtttggcgtccacagaggttttaagtaaaatagtctacagaaaggttcagaagtctatgagacttagcgagtagt

SEQ ID NO: 558016 - DNA, 420 bp, Homo sapiens
tctgttaaccaaagagcacttgggccctgaataatcagaggaaattcccaagtactatgtcaagggctttgggtgaaactctaacacttgctcacttcaggtgagactcagcacattcctagctgggatggctatgggatgagactctgtaaacttgagaaaagcagagaaaaaagtcttgcacctaacrtgccaacatggccacagtggggtatagcaccaagcagacacctggggtcccaaatttcaggcctttactcttagacttcatttctggagttgtctggggccagatggcagcccactacgctgaaggataagtcacaggacaggtttttggctctagtctctgactcctgaacagcacctaaggacccacctggcactgaggagaagtcacctccctgaagggaaggacaa

SEQ ID NO: 558017 - DNA, 420 bp, Homo sapiens
tctgttaaccaaagagcacttgggccctgaataatcagaggaaattcccaagtactatgtcaagggctttgggtgaaactctaacacttgctcacttcaggtgagactcagcacattcctagctgggatggctatgggatgagactctgtaaacttgagaaaagcagagaaaaaagtcttgcacctaacatrccaacatggccacagtggggtatagcaccaagcagacacctggggtcccaaatttcaggcctttactcttagacttcatttctggagttgtctggggccagatggcagcccactacgctgaaggataagtcacaggacaggtttttggctctagtctctgactcctgaacagcacctaaggacccacctggcactgaggagaagtcacctccctgaagggaaggacaa

SEQ ID NO: 558018 - DNA, 420 bp, Homo sapiens
tctgttaaccaaagagcacttgggccctgaataatcagaggaaattcccaagtactatgtcaagggctttgggtgaaactctaacacttgctcacttcaggtgagactcagcacattcctagctgggatggctatgggatgagactctgtaaacttgagaaaagcagagaaaaaagtcttgcacctaacatgccaacatggccacagtggggtatagcaccaagcagacacctggggtcccaaatttcaggcctttactcttagacttcatttctggagttgtctggggccagakggcagcccactacgctgaaggataagtcacaggacaggtttttggctctagtctctgactcctgaacagcacctaaggacccacctggcactgaggagaagtcacctccctgaagggaaggacaa

SEQ ID NO: 558019 - DNA, 420 bp, Homo sapiens
tctgttaaccaaagagcacttgggccctgaataatcagaggaaattcccaagtactatgtcaagggctttgggtgaaactctaacacttgctcacttcaggtgagactcagcacattcctagctgggatggctatgggatgagactctgtaaacttgagaaaagcagagaaaaaagtcttgcacctaacatgccaacatggccacagtggggtatagcaccaagcagacacctggggtcccaaatttcaggcctttactcttagacttcatttctggagttgtctggggccagatggcagcccactaygctgaaggataagtcacaggacaggtttttggctctagtctctgactcctgaacagcacctaaggacccacctggcactgaggagaagtcacctccctgaagggaaggacaa

SEQ ID NO: 558020 - DNA, 601 bp, Homo sapiens
ggcacaacaggtggttgagtacattgcttkgtcactcagcgctcctggaggtcgttagaagctctactttggatctcacttctgatgccaactgttaaaagaaaaacttcagccaaattaaatttaaagaagtttaattgcgcaatggatgattcacgaattaggcagcctcctgagctagagcaggcactgggactccagcacagcgacatagtggaagatgatttatggacagaaaaaggaaagtgacatacagtaaatggaagtaaggtacagaaacagctgaattggttacagcttggcatttgacttatttgaacatggtttgaacagttggctacatttgattggccaaaactaggtgattggcacaagtataggctgtcgtctgggttatacctccacttgttatagttcacgatgtacagaaaaacctttaggctgaacttaaaatatgtaaggaggcagctttaggctaaactttatttaacacctctaaatcaagcaatcaaaataatagaaatctgagttcatgatttatatttatgtgcacacaaaaaataaacgattttgtttatcataaggcttgttcgtccaggag

SEQ ID NO: 558021 - DNA, 601 bp, Homo sapiens
ggcacaacaggtggttgagtacattgcttggtcactcagcgctcctggrggtcgttagaagctctactttggatctcacttctgatgccaactgttaaaagaaaaacttcagccaaattaaatttaaagaagtttaattgcgcaatggatgattcacgaattaggcagcctcctgagctagagcaggcactgggactccagcacagcgacatagtggaagatgatttatggacagaaaaaggaaagtgacatacagtaaatggaagtaaggtacagaaacagctgaattggttacagcttggcatttgacttatttgaacatggtttgaacagttggctacatttgattggccaaaactaggtgattggcacaagtataggctgtcgtctgggttatacctccacttgttatagttcacgatgtacagaaaaacctttaggctgaacttaaaatatgtaaggaggcagctttaggctaaactttatttaacacctctaaatcaagcaatcaaaataatagaaatctgagttcatgatttatatttatgtgcacacaaaaaataaacgattttgtttatcataaggcttgttcgtccaggag

SEQ ID NO: 558022 - DNA, 601 bp, Homo sapiens
ggcacaacaggtggttgagtacattgcttggtcactcagcgctcctggaggtcgttagaagctctactttggatctcacttctgatgccawctgttaaaagaaaaacttcagccaaattaaatttaaagaagtttaattgcgcaatggatgattcacgaattaggcagcctcctgagctagagcaggcactgggactccagcacagcgacatagtggaagatgatttatggacagaaaaaggaaagtgacatacagtaaatggaagtaaggtacagaaacagctgaattggttacagcttggcatttgacttatttgaacatggtttgaacagttggctacatttgattggccaaaactaggtgattggcacaagtataggctgtcgtctgggttatacctccacttgttatagttcacgatgtacagaaaaacctttaggctgaacttaaaatatgtaaggaggcagctttaggctaaactttatttaacacctctaaatcaagcaatcaaaataatagaaatctgagttcatgatttatatttatgtgcacacaaaaaataaacgattttgtttatcataaggcttgttcgtccaggag

SEQ ID NO: 558023 - DNA, 488 bp, Homo sapiens
cctcctctctgggcagggcatctctgaaagaaaggcaggatcccagtcaggggcttatagataaaacttccatctccatgrgagagagcacctgggggaggcacggctgtgggtgcagcttcagcagacttaaatcttcctgcctgctggctctttagagagcagcaggtctcccagcaccgtgctcgatctctgctaagggatagactgcctcctcaagtgggtccctgacccccatgcctcctaactgggagacacctcccagcagggttctacagacatctcatacaggagagctccagctagcatctagtgggtacctctctgggatgaagcttccaggggaaggaacaggaagcaatctttgctgttctgcagcctcccctggtgatacccaggaaaatagcgtctggagtggacctccaaaaaactgcagcagacctgcagcagagaggcctgactgttagaaggaaaactaacaaacagaa

SEQ ID NO: 558024 - DNA, 488 bp, Homo sapiens
cctcctctctgggcagggcatctctgaaagaaaggcaggatcccagtcaggggcttatagataaaacttccatctccatgagagagagcacctgggggaggcacggctgtgggtgcagcttcagcagacttaaatcttcctgcctgctggctctttagagagcagcaggtctcccagcaccgtgctcgatctctgctaagggatagactgcctcctcaagtgggtccctgacccccatgcctcctaactgggagacacctcccagcagggttctacrgacatctcatacaggagagctccagctagcatctagtgggtacctctctgggatgaagcttccaggggaaggaacaggaagcaatctttgctgttctgcagcctcccctggtgatacccaggaaaatagcgtctggagtggacctccaaaaaactgcagcagacctgcagcagagaggcctgactgttagaaggaaaactaacaaacagaa

SEQ ID NO: 558025 - DNA, 488 bp, Homo sapiens
cctcctctctgggcagggcatctctgaaagaaaggcaggatcccagtcaggggcttatagataaaacttccatctccatgagagagagcacctgggggaggcacggctgtgggtgcagcttcagcagacttaaatcttcctgcctgctggctctttagagagcagcaggtctcccagcaccgtgctcgatctctgctaagggatagactgcctcctcaagtgggtccctgacccccatgcctcctaactgggagacacctcccagcagggttctacagacatctcatacaggagagctccagctagcatctrgtgggtacctctctgggatgaagcttccaggggaaggaacaggaagcaatctttgctgttctgcagcctcccctggtgatacccaggaaaatagcgtctggagtggacctccaaaaaactgcagcagacctgcagcagagaggcctgactgttagaaggaaaactaacaaacagaa

SEQ ID NO: 558026 - DNA, 488 bp, Homo sapiens
cctcctctctgggcagggcatctctgaaagaaaggcaggatcccagtcaggggcttatagataaaacttccatctccatgagagagagcacctgggggaggcacggctgtgggtgcagcttcagcagacttaaatcttcctgcctgctggctctttagagagcagcaggtctcccagcaccgtgctcgatctctgctaagggatagactgcctcctcaagtgggtccctgacccccatgcctcctaactgggagacacctcccagcagggttctacagacatctcatacaggagagctccagctagcatctagtgggtacctctctgggatgaagcttccaggggaaggaacaggaagcaatctttgctgttctgcagcctcccctggygatacccaggaaaatagcgtctggagtggacctccaaaaaactgcagcagacctgcagcagagaggcctgactgttagaaggaaaactaacaaacagaa

SEQ ID NO: 558027 - DNA, 352 bp, Homo sapiens
gaaggtttttgaaaatatggcagaaatctttattaaaatgtttccttcagtaatatgttaccacgtacataatatacacacatacctatgtacattctttgacatacctcaaagattgctaccattagtttaaccaataaattaaaactaaaaaaaaaaataggaaggggagaaaggagagggaatcagggcaaaattttgatgttttatctagtaagaaattgcaaatatctcagaatttctctgarggaaacctataagcagagaatctttaagataaaatacataaattttcactcatctcaccaaaaaaaaaaaaaaagatttgaaagatgccgtcacaacaattgtg

SEQ ID NO: 558028 - DNA, 584 bp, Homo sapiens
agagatggctgaagctgcagcttacacagacttgtgacacactgcaaaactgaaaggtttttagataaaattaaaatgaaagatcaataggtataaaactgagcaaatgaaatctgagaaaattttccaaataaagaaaagtacattcctaagcatcctacttgaattgccctaaaaacccacttctgagataatatttacactgtgaaagcacccaagaaaacaaaatacttacccatcattatatggctctaatagccagacctcatcttgtgctgttagagttatcaaaatgcagtggtcatattttgggtcaaaaaaatgtctgattgcccagttacaggaaatagggatggttattaaataaacataatctttaaagtgtataattctacttatacatagatgatcattgacagttgttaactctacagtttcctactcaaacgaatttaattggacaagatatgtctctttaaattagaaaatatgacrtttcttttgagagagagagtgtaatatgtatgtacatcttagcatataaattattgaaaatatattcaaaggaatcttgattttggtaa

SEQ ID NO: 558029 - DNA, 572 bp, Homo sapiens
cgtccctccttttacaagacaatgccctcttcatctttcgggggactttggtaaaaaacaaacaaacaacaacacacacamaaaaaacctcaacaggggtctacagctcctcagatagagatcctgacatttaagccgttgattttgattcaactagtaagatttgtggattcaatcagagcattccgaccacaggaaaagctttgatctgtgtagaaatacataggcaacaggatttccaagtaatattgatagtgtaatttgtaaaatagaaaataatgtaagtttactcagtagcacttattcattgaccgaaggaggtaaaaaggtatctacagacttattctctcaaaagtggcaacgactcttacgcacgctttggactttggattttttttgccttcagtttcccaaatacttcagggaaaaaccaaggaagactcacatgctccttcatttaccccctcaatccataagatgatgatctggaataactatgtactaaaattccatttgttacaacttgatctccaatgcatgtataaaatgctatctcttcctcaaagcttcaa

SEQ ID NO: 558030 - DNA, 572 bp, Homo sapiens
cgtccctccttttacaagacaatgccctcttcatctttcgggggactttggtaaaaaacaaacaaacaacaacacacacaaaaaaaacctcaacaggggtctacagctcctcagatagagatcctgacatttaagccgttgattttgattcaactagtaagatttgtggattcaatcagagcattccgaccacaggaaaagctttgatctgtgtagaaatacataggcaacaggatttccaagtaatattgatagtgtratttgtaaaatagaaaataatgtaagtttactcagtagcacttattcattgaccgaaggaggtaaaaaggtatctacagacttattctctcaaaagtggcaacgactcttacgcacgctttggactttggattttttttgccttcagtttcccaaatacttcagggaaaaaccaaggaagactcacatgctccttcatttaccccctcaatccataagatgatgatctggaataactatgtactaaaattccatttgttacaacttgatctccaatgcatgtataaaatgctatctcttcctcaaagcttcaa

SEQ ID NO: 558031 - DNA, 596 bp, Homo sapiens
gttctttgtcacagcactccaaaaatcatctgtgcatgctgtcttcatttcctcacctcatttttttttcaacccacacatatcatatatgtagcctaaaaactccactaaagctgttctgacaaggtcagtggcagcctccacattaccaaatggaaagaccacagctttgctttcttcttactctcagtaaaatttcacatcgttaaggtttctcttcttggtaaaggttctcttggctggagtggttcctagttttccttcaacctgactagcagctattactcaattttctttgccaattcttcctcgctgtggaacctctaaatgttgcaaaaactcacaactcaatcctgagatctcttctgttttctgttcctgatgtttatctcaccctggtccagggttattcagtgtcaatgccrttaagcctcaacatttatatctacggtaatgactactccccttagggtatttatccaatagtttacctggatgtctaatggcatttcaaatggaacaagctttgttttcttactaataagactgttcttttttaaagacttccagtaacttccaagccaaaagcctagcac

SEQ ID NO: 558032 - DNA, 589 bp, Homo sapiens
tgtgattgaagttaagttgttatcagcttaaaatagactattaaagctataatatgattatgtaagccccatggtaatgctaaagataatatttatagaagataaatgagaaagaaaacaatgcatgtcactataaaaaatcaatgaaacataaaggaagatatcaaaagagacaaagaggaccagaagcactacaaaaacgaaagaaaacagtcaacaaaatggcaaaaagaagtccttccttttcaagaaytcctttaatgtgaatgcattaaactcctcaatcagaagacatagagtggcagagtagattaaaaagatacaattatctgctgcctacaaaagactatacagatttaaggacaaatttgttgaaactgaaagtatggaaaaaaaaacatgttccattcaaaaagaaaaaaaaatagagcaggatggccatacttataccagacaaaatacattttaagtcaaaaactgtcacaagagcaaggatattatataatgataaaaaggtcaattcaccaagatgatataacacttataaatacatatgtatacaatatcagagcatctaaacatatgaagc

SEQ ID NO: 558033 - DNA, 532 bp, Homo sapiens
gaactcctttaatgtgaatgcattaaactcctcaatcagaagacatagagtggcagagtagattaaaaagatacaattatctgctgcctacaaaagactatacagatttaaggacaaatttgttgaaactgaaagtatggaaaaaaaaacatgttccattcaaaaagaaaaaaaaatagagcaggatggccatacttataccagacaaaatacattttaagtcaaaaactgtcacaagagcaaggatattatataatgataaaaaggtcaattcaccaagatgatataacacttataaatacatatgtatacaatatcagagcatctaaacatatgaagcaaacattgacagaactgaagggagaaatacacagcaacacaataacagtagaacctttcaatacccactttcaataatggccagaacattcagacagaagatcaataaggaaagagaacttgcacaatataaaacaaatgggccttataaacamatatggatcattccagtcagtaaaagcagaataaactt

SEQ ID NO: 558034 - DNA, 612 bp, Homo sapiens
ctacttgtacaaaatttgatttacaagaatttgtaagtgtagcctggttaaaggtgcctgctgacaaaatamccccattgactttagtcaaaaagtcagagcttcttaggagtcaaagttgtggtaaatgcacagattttctctgcagggaccaggatcatgtgagtctccatccatgtaggagagttggatgctctgtatgaggcagaacatcccctaagcacttctgtgccatctgcccaccagaggcatttactgagcagtcacccagtacttagtgctagtccactaggctagatagaacatcaagaaatgtcagaaaaagaacttttctataacaggaccaaacccctgatatccacttttgactctagtgtaaatgcccatttttccctttcaggacctcagtttccccttctggatttgattatcttttaggcctgagtgtatgcctgtctcaattaatcacattacaccaaattaacaaccaagccccagataccctgatataagtaagggaaccaaaggcctcagtgtcacaggagctggaatgatggcaggagggcatatttttcctcaaataaaattcagaaaaaaggctgctgtaaatca

SEQ ID NO: 558035 - DNA, 320 bp, Homo sapiens
atgtatacacacacacatatactgatacagatcaytgcaagaaaatcacaaataccaaagtcaaccagaagacgtgagtagagaaaaatagacaacaaaacaacaaataatgcaaattaaagtgagataatcattttgctgtcaagataggagaaaaaccaagagtgggaagatattatgattcttcaatcatgtgggcatgtatctttactgtgtgtgtgtgtgtgtgtgtgtgtttatctgctgagggcctttgaatactctttccttgctcagaacaaatagacaaatatataattaaggcacctaacaatacagac

SEQ ID NO: 558036 - DNA, 546 bp, Homo sapiens
acctgcctttttccaaaagaaaactgagcgattgagaagacagacacgtcctccaaaaaagtgctatgattcaatgatttcaattgatgtcagtttagcaaacacgttgagtacttgcgttgtatgaaggtgctctgccagaaaggaggaaacaggcttggcccttgaggagcttaccctcctaaccacagccaatattccaaaaacacatcatgaaagaacagtttccaggggaaatttaatttttagagatggccagaagcaatcttgtttaagcaggggcaaaagctgttagaaatggtcagtttttctagtatgaccaaatatcagtcagaagaaattcctaaagatgaattacccaatttcccgarcaatggcaatagcttgagaaggtttatgctttttttctccagaagtcttctttgaaggagacacttttgacgacatgcttgtgcaagcatgtgtgtgtatacgtgtttgtttactacccctcttttcttacaggcacagcttatctataaaggatgctaataaactgagactcac

SEQ ID NO: 558037 - DNA, 612 bp, Homo sapiens
tcctggcaagaacaggtactctgaaactgttagccagcataatgtcaatatcacctcctattattagtgccatggtattttgtgaagtgtcttattaacataaatatacatgggtaaacattttcacaaggatgtctgtaaaaaaaagaaatttctagtgaatttccagaattggaaaattgtggaatttatccttcatcagaytttagctccaatggtgtctacctgccagagtgctttgaaggaagatccatggagtttaagataaagttagcttgttttacagtacctgttacttttataggtttttttacattttaatagctattaataatataggtatgattatcagcatgaagctcccatacaaataagtttatgttgaaagtgtcaatcgtcattaatatcccataagaagaaactatttaaaacttcataggagttcatacatggggttcccatggcaacaatggagcttataatttttaatttattgcttaattttctctaaactacattgtcattgcatcggcaggaatcccagtctgtagtaatgatggggattaaatggtcattatgaagttgttcaacattcttgtgatttgcttcagg

SEQ ID NO: 558038 - DNA, 611 bp, Homo sapiens
tacattttaatagctattaataatataggtatgattatcagcatgaagctcccatacaaataagtttatgttgaaagtgtcaatcgtcattaatatcccataagaagaaactatttaaaacttcataggagttcatacatggggttcccatggcaacaatggagcttataatttttaatttattgcttaattttctctaaactacattgtcattgcatcggcaggaatcccagtctgtagtaatgatggggattaaatggtcattatgaagttgttcaacattcttgtgatttgcttcagggaacattggctttgggtatctttgaatgtactattaagcattgttaaatccatttaaaatagactgagtttacagggaaatgaagtatattttcttattgcaatttatcatccagtaataatggtaaatattgcaagtcaaaatttaaggccaaatgtaactcaacagtgagctgactaatggctgtcttgtgcttaaagaaagtatattgcttttgcatttaaccaaatggtcattgaaaagtataaaamgatatttaatagctacaagtcatattccagaaggattcaatctgtaatataaaatgagc

SEQ ID NO: 558039 - DNA, 618 bp, Homo sapiens
ctgtaagggagaaatggaatattagctgggaagcatggggagaatccaaacagaagggaggcagggaataggcagaagaatgacagacatgaataccattggcagaatgtttgtggtgttattgtaagttaaaatgttaagggagaaggaggcatagaaatttgctttccaggtgggaaatttgatcaagagtctatcttttaggaaacagacaagatggaatatagatcttccagcttgtagtatgtttcaagtgttttaagaatacaacccaaacattatcaagtgatgttttaggcaarggagaaagtaatgtgcatgatactgaatgttcctgtgagcatcaaggaacgtgattagcatcgggagccctgtgaaattgtctaggtcactcacatacctttgtgttcctttaggattattacaaaaaacactcctatcaaggtagtttagaaaacatgatctccatttaatagaaaggggatattttgtttttctagagtggtaactgaaccttgataaggaaaatatgcagaaatgagtgaaaaatggggccaagttgttgactacattgaataaaatgttagtcaacatcaaagtccttttatgaaggaaact

SEQ ID NO: 558040 - DNA, 571 bp, Homo sapiens
ctgatgccagttgtgttgaggagtttgcaaatttattgtcaaataaactctcctcttacactgttttgagatcattcctttgggcttatgtactttttcttcacatgtaagtaaaatgccacaaatgcttactcttgaaatcctgagagaagtggcatattatttttatgggaattgtacsattcttaaccactgtccttgattaaaataagagccttttttccttcttaaacctgatcattttcacactggaaatgaaatctttcatggggattagtttactcactcaagctttccattcagatgaaggtgtgaaaaatacatgacaagaatattatttaaatgctcaaacttctgcatgaagagcatgaaacaagaagaaaatgatagtctttagctgtagataggtttcaattttttttagtaggcttcaaattccttttaagacaaacaaaaaattaaaatagaagaccaactatgaaaataatgatttgatttaatctaaacttccatgaaggctgcaagttacagattaggtgcatcacctgaaagtaacattgctgattgcata

SEQ ID NO: 558041 - DNA, 551 bp, Homo sapiens
ctggtttttattggcctcttttcagaaggtctaattaacctatggagtcttccaaatttaccgacagctctttcatattaatctctcttctaatataagaaatttcttttttaaccttccactcaaaaagattatttcaaaaagtgcccacaactgaaggagtgacttaatcaggttctcaaggaaaatgcctctctttactttgcaccttaagctctgccattgttattttatgttttgtgcatatatgaacttttcattcctgtctttaaaatatttatcagtcatataaaatttggataatggtgagaagcacaaagaaggagataaaaatcagcaaccagataccaactacaatattgtaaatatttaggcaatatagtccttgaggacttagattttcgattagacatcactgtcattcattacatcagtaggtgaatgagacaaattaattcaggragctataaatgatgggaaatctctggtatgtcaatgtaggataggtgaaggctggcaagagagttctggtttagaagtggttagaaaag

SEQ ID NO: 558042 - DNA, 598 bp, Homo sapiens
ttacttgttgggagattttattattattcataaaatttttagttttattctggcatgcaattaatttacttggtaagtgtttcattctgttagttcctgtttttatgattcgtaggctggactaaggcagtattcagtctagaacttattatttccctctccttatatatgactctctcaatagtaaacaaaatgattcttaagtctgaatatgacttagtggcagtggcatccaaaggggcagggtgatgggagtgttccaccctgtagagaattttataataattgctgtgtttactgtaaaattttataaaatatgtrtaagcttcatattagcacattattattacttattatattttttatatgaaggttaattcagagaactcccaatttcataattatctcctagcacacatgggctcagccacagttatttgttttcagaataagttcttttgggtttatcattgtttaaacttgtgataagcgtttgttgtacttttgtaaatatttgcttatatttaccaccttctttttaatacgtgattgtttttgtttttctcattttaaaaactccaaatacataaagattatt

SEQ ID NO: 558043 - DNA, 571 bp, Homo sapiens
tgaatatttgtcaatattattcctcctccttagacatgactctcttaataataaacaaaatgactattaatttaactctgaatatgactttgaatattttctctttgtgcagcctaagattgctgcatttgtcttctttctatggtagtacctgttttcatgtaggatcgttcccctaaatgtttgtcaayatttggctgtctgcttatattaaaaatgctgtgcttgaaacctattccaaggctctccgtgggtaggtggctgggaattgtccatttggcttctctcttggaagatcccagtaggaaaccctcaacatcagtatcttcaggtcatattctttggagtggtcagagtccccagagaaagaaaacattcctccactcttctacagatgtgaaatacacttgcccatcaaaatatggagagatagatgaggaaagaataatgaaagtatcaatacataatctcgagttttgagctttttcttttctcacaatgttacaacctcatccaaccagactacctagaatagtgatcatggttgacatgtgcagtcctcacctgtgaa

SEQ ID NO: 558044 - DNA, 598 bp, Homo sapiens
ggcttagttgctctctgatagatgctgtatagaatgatataggtcataaatgggagtatgatggaaggggaagcagttatcttgcagccactaaggacctggaagcaagatgtttccttcatcagagcaggttaaattcagctgcgagtattacagttcaagttagtggcttaagcaaaatagaactacatatttcttccatgtaggagtagttcagaggtaggcaattcaagaattcatggttccaggaactcaaaaacttgctcttgtttctcatgcctggctgcttacataaccaaaattgcttcatgattcaaaataactgttgatattctggccactgcatccacgtttcatgyagcaggaaaggtaaagagggaagaacaaggatatcccttccttttaagagaatcttaagaagtgtcatgacaacactgcttcctatatcttataagatcttagtagccacacctggttgtaagaggtgataaggaatgacatttttatcactcagcaatgtgcacagctaaaataccaggattcatttacatcagaataaaggtaaatggaatttgggctaattattgcactgtgacac

SEQ ID NO: 558045 - DNA, 585 bp, Homo sapiens
atcaacagggagtcttcaccacaggctcctaatatgaaagtgtctgtgcaggaaaatccataagctagggtgacttttgagttaaattaaattttatggctcaaaaaatgctttgcttggttttcactaccattataaagcaaagaggataatttcagattcagtttctacaaaggattgctttgggttgatacaggctttatgttagtggcatggaagtatttgcatctgcacattgatatgtagtgaaataggctgtaaaagataagatcaatttcctgttaaaggtaaaaaggccaatgtagccagatacattaagttttttttttttccatttgtcattcaggacygtttgacagttttacattagctgtgaaaggcaccaactggtacactactgtcaagacttagaaagtaggcacacgtacacaaacacgcacacatgctgatgtaaaatataaatataaacagatagaagcctggaccatacatatgagtgccaaaaatgcagttgtcacatgcatacacacctattaaaacatagcaacacaatcttatagcaaagacatgcacacacaggtacaa

SEQ ID NO: 558046 - DNA, 616 bp, Homo sapiens
ctattacttttagaatgtataaaaatcaacagggagtcttcaccacaggctcctaatatgaaagtgtctgtgcaggaaaatccataagctagggtgacttttgagttaaattaaattttatggctcaaaaaatgctttgcttggttttcactaccattataaagcaaagaggataatttcagattcagtttctacaaaggattgctttgggttgatacaggctttatgttagtggcatggaagtatttgcatctgcacattgatatgtagtgaaataggctgtaaaagataagatcaatttcctgttaaaggtaaaaaggccaatgtagccagatacattaagttttttttttttccatttgtcattcaggactgtttgacagttttacattagctgtgaaaggcaccaactggtacactactgtcaagacttagaaagtaggcacacgtacacaaacacgcacacatgctgatgtaaaatataaatataaacagatagaagcctggaccatacatatgagtgccaaaaatgcagttgtcacatgcatacacacctattaaaacatrgcaacacaatcttatagcaaagacatgcacacacaggtacaaggacatt

SEQ ID NO: 558047 - DNA, 576 bp, Homo sapiens
ggaaggtcgaccctaatgcctgccaagtgtttaggtccagtgagttatctaaaaagcacatttgcaaaaggaaaaattttgagaaattactttcctgaatcatcaaaataatggagagtaggtatgtgaattataaacacagattggattatgtacacacataaccctatgatagaaatacagtaatgtctacctatatgaagctcaatcctttttcatgctagtaaataccacttttcgggaagattgttttctctcctttcttgtaaaagaagaaacatccttcaactggttccccatatgtactcaccatacctatacatgtatatacacacacataaacatatatatgaatatatgtatgtgcatatatacatatatatgaatttaagaaattgtagaatttatttgcattcatgtacacccaaagaaaatcaagctaggtaaggctaacactatccagtgtttcatatttttagtttgttttaaaatcrccctaagagacattagcagcacaaaatgatgcccatttgatggaagtgtgaaacttcgtgccaagacacagattaacattgt

SEQ ID NO: 558048 - DNA, 576 bp, Homo sapiens
ggaaggtcgaccctaatgcctgccaagtgtttaggtccagtgagttatctaaaaagcacatttgcaaaaggaaaaattttgagaaattactttcctgaatcatcaaaataatggagagtaggtatgtgaattataaacacagattggattatgtacacacataaccctatgatagaaatacagtaatgtctacctatatgaagctcaatcctttttcatgctagtaaataccacttttcgggaagattgttttctctcctttcttgtaaaagaagaaacatccttcaactggttccccatatgtactcaccatacctatacatgtatatacacacacataaacatatatatgaatatatgtatgtgcatatatacatatatatgaatttaagaaattgtagaatttatttgcattcatgtacacccaaagaaaatcaagctaggtaaggctaacactatccagtgtttcatatttttagtttgttttaaaatcgccctaagagacattagcagcacaaaatgatgcccatttgatggaagtgtgaaacttygtgccaagacacagattaacattgt

SEQ ID NO: 558049 - DNA, 587 bp, Homo sapiens
gaaactgcagttatgtgtggaataaccattttgctcaatgagaaatcatatttcaggagcttgcttgttagaggctgtatrtgcaacctagtgccattgctttccaagcagaaaacacccagacttgccagaaaagtaaatgtccatttcaccttggattatcatgatacagagttcatttttatttacaaacatacttcatgtgatggttaaggttgagtgtcaacttgattggattgaaagatgcaaagtattgttcctggatatgtctttgagggtgttgccaaaggagattaacatttgagtcagtggacagagggagacagaccctccctcaagctgggtgagcacaatctaatcagctgcccacaaggctagaataaagcaagcaggagaagatggaagagcagacttgctgagtcttctggtcttcatctgtctcccaagctggatgcttcctgcccttgaacattagactccaagtccttcagctttgggactcttgaacttacaccagtggtttcccaggggctcttgggccacagactgaagactgcactgtaggcttccttacttttgaggttttg

SEQ ID NO: 558050 - DNA, 586 bp, Homo sapiens
aagaatgaagcacatctaccaaatctagaaaatagtctcaaaggggcatatccaagagttatytgccttaaaaaggaagtagagagagaaatggggtagaaagtttatttaaagggataataacagagagctttcaaaatctagagaaagatatcaatagtcaattaaagaaagttacagcatgccaagcagatttagcctaaagaagcctacctcaagacatttaacaatcaaactaccaaagatcaaggataaaaaaggatcctaaaagcagcaggagaaagaaagaaataacatacaatgaagctttagaatatgtggcagcagaattctcagtggaaaccctataatccaggaaagatattaaaatttttaatttcatatggaatttttttttttttttttgagagggagtcccactcacactggttggagtgcagttgtgtgatctcggctcactgcaacctccacctcccaggttcaaatgattctcctgcctcagcctcccgagtagctgggactacaggcatgtgccaccacgcctggctaattttgtggtattttttagtagagatgaggtttcacc

SEQ ID NO: 558051 - DNA, 549 bp, Homo sapiens
atccagggatgccaccatgtgagaacaaggtcccctaatattctagagtgcctggcctccatgcagggacaattgtgtatttatttacaagaatgtgagcaccaacactgcagagtttaggcatttatgttcattgccgtatcctcagcacttacaacagagcctggattctaggaggtggctaatactttattttggtgaaatatttgattagagcagttatgtgattattggctgtcttcccctagactaggagttccctgaaggcagcactatactcttttctttgccaggttatcttctgcttcaggtacagcatctagaacataaaaagtaaatacatatcattttatgaataaaaaagcacttttagaatgcagaaagcagaatgactagtagtatagctgtgttcatgtctgcccctcaaataaactaagtgacctgacgatagtgactcttgtattcatctttgaacttctgacaaacccmgcacaattcttttaagtaagtccttgcttactaattatttggttgaataagcaaacaaat

SEQ ID NO: 558052 - DNA, 554 bp, Homo sapiens
aatgctgtcactgtccctcccattgcctcagaaacgctgtatgtcatgttctgtagtgtgttgatagagaagggtttgatttggattaatgaggggctttcatccaaaatataggagctaatcatatattctctattacagaggygtacttttctactgagcagttctccagagacaccttagccactattttgcccaccactgtgatagcttttggtgggaggatcagtttgaatgtgtgtaactgatatcttcagcacatgagtactttagcagtgttttgattagatcttttctgaagctgtattcatctcatttttttgctgctttctaattttgcgagtaccctggcatgggaataggaaaaagggggtgggtagtggcaaatttctgaagagaaatatgtcatctctccttttttgcccccgctaacaaaagtcgaattgggagcttttgtgtgttttctttttgttttttggttggttttgtttaaccctttaccttgtgtccccaaacttgggacagtatactttcttttgccccttactacaggt

SEQ ID NO: 558053 - DNA, 539 bp, Homo sapiens
agatctttttcattaatacttttaaatacctttcaggtagttacatcatgtttcttcattggatttgtaaaacttgaagccataaaaatattagtttggtgtgtattggggaaaatagctaaaagtctaatttttacccatttagactttgttatttccttgtataaagtgacaaatcggggctcttgtatcagtgccagctgtaatgtttttaaatgcagtggctgccttctattgtcttcctatttttgataatgcagattgttgggaaatctgtaaggaagtaactgattccaggcaaattgttttcttccttctacccaccccaacccctacccatcaccttttaagaacatagtacgccagtgtaacgtgggaaccattgagattgtatttgccctgagtattaaagctagcttagcaaaatacttttaaaaacatattggtaaatgatacccrtaaaattaaattagttatattttattttaaaatgcaaaatacattgatatttattaatcattggatttagggaaagggac

SEQ ID NO: 558054 - DNA, 523 bp, Homo sapiens
aacagcctgggcaacagagtaggcaacagatatgactcaatattcagcaccctctgccgaccccttctaagtaacaatgctattgataccaacagaaagaaagtgcttaaaaaaaaatttaaggtgattttggggaggacaattgcaatatgaaatgaaaaatcagyacaaatcctaaggtatgtggcttttggggttttatttgaggagttttttcctggactcaactgttgagattgggagggcatgaccatgtcaagggtctggcgtgtgctgagtgctttcacgtaactcttctgacataatttctccagcatcctaggaggatgggtgggtggtatctgcattttacagagaaataaatcccgtgtcgtgagtctgggttagccacctgaggtcacatgcaggcaggatcagaatttgaaaccaggtctgcttgattcccacagcagctgggggttccgagaccccatgctgtccttcctgggtggccactcctgtagcctctgtgtacgcattcccg

SEQ ID NO: 558055 - DNA, 432 bp, Homo sapiens
tgacaacatgttctcccagtcactggcttgcctaataatgatgttttttgcttaatgtaagtacttaattttaacgaatcaagatttacctttaaaaaaaaaataggccrggcgcggtggctcacacctgtaatcttagcactttgggaggctgaggtgggtggatcacctgaggtcaggagttcaagaccagcctggccaacatggtgaaacccgtctctactaaaaatacgaaaattagccaggtgtagtggcatgtgtctgtaatcccagctacctgggagactgaggcaagagacttgctggaacctgggagacagaggctgcagtgagccgagctgagatcacaccactgcactccagcctgggtgacaagagtgagtgagactctgcctcaaaaaaacaaacaaaaaacattataacttacatata

SEQ ID NO: 558056 - DNA, 594 bp, Homo sapiens
gctctcttgcccaggatgtccactgaagacacgatggttgacaggtctctggctgctatgatgccaccccaggcccactctgtagagatgtgtttgggaaggagcatgtctggctttagcatctcccaccaggaccattctgtcaacttctaccctggtccctctgctgcctccttcttcccaccttgctgctctccccacagccttcccttacttgcttccrcctccatacctttcctctcgctgttcccttcacctgcaatgtacactcccttccttaactcagctcaaggtctcagctaaacctgtgtggagccctggaacccaaagcaggagacgacaggggcaggaggagccctgggcagtggtgggaggggcaggagcctctgtggcacttcatgttctgggacagtcaggcagtgactgttgagggtacaggagcctgagttcagccctggggtcagagaggccaggattcaggaccctgccacttagtccttccagtcacctgcggaatagggtggtccccaaagtgcaaaaacagcaaagttgcagagcccaggttggagagagaggagaagagccaccccaggc

SEQ ID NO: 558057 - DNA, 594 bp, Homo sapiens
gctctcttgcccaggatgtccactgaagacacgatggttgacaggtctctggctgctatgatgccaccccaggcccactctgtagagatgtgtttgggaaggagcatgtctggctttagcatctcccaccaggaccattctgtcaacttctaccctggtccctctgctgcctccttcttcccaccttgctgctctccccacagccttcccttacttgcttccgcctccatacctttcctctcgctgttcccttcacctgcaatgtacactcccttccttaactcagctcaaggtctcagctaaacctgtgtggagccctggaacccaaagcaggagacgacaggggcaggaggagccctgggcagtggtgggaggggcaggagcctctgtggcacttcatgttctgggacagtcaggcagtgactgttgagggtacaggagcctgagttcagccctggggtcagagaggccaggattcaggaccctgccacttagtccttccagtcacctgcggaatagggtggtccccaaagtgcaaaaacagcaragttgcagagcccaggttggagagagaggagaagagccaccccaggc

SEQ ID NO: 558058 - DNA, 606 bp, Homo sapiens
gagaattcacattcaactgaagagccaacacagcgctgggagaacagacgaaataagcaataaacaagggtgttttaaaaaaaaaccaaaaaacaaatctggcgtggtggctcacacctgtaatctcagcactttgggaggcgaggcaggaggattgcttgagtccaggagttcaagacagcctgggaaacatggtgaaaccccatctctacaaaaaatgaagaaaattatctgggcatggtamcatgtgcctgtggtctcagctactcaggaggctgaggtgggaggattgcttgagcccaggaggtctaggctacagtgagccatgatcacatcagtgtcctccggcttgggtgacagaacaagaccctgtctccaagaaaaaattgaaaacaggaaaaacccaatgggttaagagaggaaggcagcagtgagattttctgagcttggatcttggcagaaagtgggttccctggagcctgtagtgacggatgaggctggcagcaagaccccttcccagatgcctacagactcttccctgggggcttgaccttaagacctgggttggcctccaccctgtgtacacgggacagctgggttccatgc

SEQ ID NO: 558059 - DNA, 504 bp, Homo sapiens
aggctagtcagctcccccaacccctgcctctgcaggcatctgtgctctggattcagggccgctccctgaggatcccaggtgcagcgcgtaccattcttggaggtttcaggacttctacatggctgaggcccatccctaagcctggcttctgcctcccatggccacagatgcctggtctgccacagagaggggagaggaggaccaggctgctaggctagctggcttctccctggatgggaagcagggcttagacccccaaatttgcccaaggcctggtggtaggtctgatagmcccaggcctctctcttttccaccccagggtcccctgttcctgtccacccaagctgcaccactctgagtgactttattacatatactgttgagatggtgctggcttatgacaagggtacctgcatttcataacatatggcagctcgaggcccctccatgcagacatgaagatgaagatgtctcatgtcagacatctgagatgaaggctcatgc

SEQ ID NO: 558060 - DNA, 579 bp, Homo sapiens
gtgactcccctcccctgccttactcccccggaggcccctgtgcccctggagtattcacctgcagagttcccaagtgcatgcttggctccaccccttgatattccccttgtggacgtctgtattggcttcttgcctcagaggaggggaattgtgggctctctctccctctgtgccctgcatcctgccctctgggtggcaggtcatgacggtgctctgcagtctggtcagatccgtggtgcacgttttctgcattaggcctgtgtcaacacacagcacagcccagttagggaagcgytgccttagcctttcctgtccgatattttgcttcccctggagttgctgactgactttttggtggttcggggctttgcttgctatgcatctctcctcatttcatccccgcactctcagctgggcgtctgagtgtccccttgctctgatccttgctcagcaactcctgggctttccattccgctgcttggctgcttgaccttctcccctggagcctcccaactgctgcaaggggcactctccctcatctgtgaggctcactctcccctcctccagtccctgctgtct

SEQ ID NO: 558061 - DNA, 579 bp, Homo sapiens
gtgactcccctcccctgccttactcccccggaggcccctgtgcccctggagtattcacctgcagagttcccaagtgcatgcttggctccaccccttgatattccccttgtggacgtctgtattggcttcttgcctcagaggaggggaattgtgggctctctctccctctgtgccctgcatcctgccctctgggtggcaggtcatgacggtgctctgcagtctggtcagatccgtggtgcacgttttctgcattaggcctgtgtcaacacacagcacagcccagttagggaagcgttgccttagcctttcctgtccgatattttgcttcccctggagttgctgactgactttttggtggttcggggctttgcttgctatgcatctctcctcatttcatccccgcactctcagctgggygtctgagtgtccccttgctctgatccttgctcagcaactcctgggctttccattccgctgcttggctgcttgaccttctcccctggagcctcccaactgctgcaaggggcactctccctcatctgtgaggctcactctcccctcctccagtccctgctgtct

SEQ ID NO: 558062 - DNA, 494 bp, Homo sapiens
ctggcttgtggttagtgttgttcgatgagtcggtcagatagagagtgggccaggctggccgggcaccgtggcttatgcctgtaatcccagcattttgggaggcygagacgggcggatcacgaggtcaggagatcgagaccatcctggctaacacggtgaaaccccgcctctactaaaaaaaaaaaactgcaaaaaactagccatcctggtggcgggcgcctgtagtcccagctactcgggaggctgaggcaggagaatggcgtgaacccaggaggcagagcttgcagtgagccgagatcgcgccactgcactccagcctgggcgacagagcgagactccgtctcaaaaaaaaaaaaaatagtgggccaggcagtcagcagggctcagggtctttctggaaatgcctacagatgagtgggcgacgcttacatgaaataacacaactgtcagaaacaatttatagccatgttcccatggagccaggtctggttatg

SEQ ID NO: 558063 - DNA, 494 bp, Homo sapiens
ctggcttgtggttagtgttgttcgatgagtcggtcagatagagagtgggccaggctggccgggcaccgtggcttatgcctgtaatcccagcattttgggaggccgagacgggcggatcacgaggtcaggagatcgagaccatcctggctaacacggtgaaaccccgcctctactaaaaaaaaaaaactgcaaaaaactagccatcctggtggcgggcgcctgtagtcccagctactcgggaggctgaggcaggagaatggcgtgaacccaggaggcagagcttgcagtgagccgagatcgcgccactgcactcyagcctgggcgacagagcgagactccgtctcaaaaaaaaaaaaaatagtgggccaggcagtcagcagggctcagggtctttctggaaatgcctacagatgagtgggcgacgcttacatgaaataacacaactgtcagaaacaatttatagccatgttcccatggagccaggtctggttatg

SEQ ID NO: 558064 - DNA, 655 bp, Homo sapiens
tttcatgcaccaatgtcttggtgagcttgctgtgctatttcatataaatccaccacatttcaaacagagtttcatgacatacatgaaactgtgaatacatatttaacagatacccccccttaatagatagttaggttgtttttaatttgcacaataacaaaccatattgtcatggaaatccttatatatgcctatgtatctaggtggactctaagttgtggaattgcttgtctgaataacatgcacatttaatttaaaaatggcttctgccaaattgtcttccagaaagtggaatcaatttgcacacccagcgacagggtaagaagagcacccactttttcacattcttgccarcacttgatattatcagtcttaatttttgtcagtccaatggctgataggcggtacctcattgttattttcttttccatttccctaattactgtgagccttctcttctacctaacacatgcagttctagcagatcttgttaacagaaatatcatcttgtttaatttatttatcctaagagttcactgcaaacacaattaacaatggcattcttctccagtaagatacagcatttaatgagctcagtgataaaacttccgaaagagcagtatataggtgtccatgactcaatattggcattgat

SEQ ID NO: 558065 - DNA, 534 bp, Homo sapiens
atgtattgccacattgggcctctgggcccaggcacgaggggaggccccaggatgctctgtgcttatggaggtgcagcagggattggtgattggtttgaacatgtaattgcatttcattacttgattactgctgctgctgtcaccgagggagctagggagctcctggtacagctgcttgtcactgcagttcatgttctaatatctgatcctaggagggaatttgatagagtagaaggaggagaggaggaggggcagcccctgggcaccctggacagcagatcctcctgaaagccatcagcagtgctttcaccaygctccctgtcctcgtcagcaacttctgcagacaccaggattgcccacctcccagattatctcatggaagcctctgaggcagctgctactatttattggaacctctttgcctaaagtcatagctggagtgtgctccccatggtgggatgggtgctttacccacaggagttggggggagaggggagggtagctggagttttcccggggcctggggcaggggga

SEQ ID NO: 558066 - DNA, 571 bp, Homo sapiens
gtctgggggctggggatgtgtgggaagagtgggacgccccagcgcagggtgcagcccagctctcacttgctcctcagctggggagaaggctgttcctctcccacgaatttcctgggctttgacattgaggttttggattggaagagggtttggtgataggcgggcaagttcccggacgtcattatatcttgtgccaaggacctactgaactgagcctaaagagggagayttccctgccacggagactcccctggtggctcttcctgcccctgtgccacacttcaagttctggggagtggggatctgaggaggggagctcagaggcctggagagtcctctgttcattacactaacatttcctatgcatgacagggccagagggactgggttccaattccagacccataaattagtggctgagtgatttggacaagttgttgagcctctaggaacctctgtatccttatctgtcaacatctcagggttgttgtgaagatgacctgagaagatatgtgtgaggagcttggcctggtgcctggcacatggttagtgctgggtaatgatcgctgtt

SEQ ID NO: 558067 - DNA, 564 bp, Homo sapiens
atctgggcttggggatggggccaggaaggtatgagggctgcctcaaaatttctcagggtcaggtcagagccagcaggagagccaggtgagggtgagggcactgccctgggcacaggattctggctcagcaaacagcagaagtgattcaagcagtgcaggtggtggagctgaggctgctgaccctagcaggtggcctcaggccagccggcttggacataaaggggtggtagtgggcttgaagctgtgagttctggaaaggtggtgagggagagatggagaagagccagctgtgtcctggctggaggaaacacagttcagaggctgaaatcattgaggcactggcatcctctcttaggatgtctctcccagcagtgaggctttgtaggaggagggacttcagtacaacctttgtgtgctaattggacaaatatacttcagaaggaaggacattgaaggctattgatcccattctacttattggacsttccttagatggttctttgacggcagtgaccatggaggtcagaggccacactgctagcaattcaagtcccccataaagat

SEQ ID NO: 558068 - DNA, 575 bp, Homo sapiens
tgggtgtttggtgtttgtatttcaccagttcctttgggcatagacttccttgcctctccaatctgtcaggatgtacagaagcaatgacctgtttcaaccaaatatccacagaytctggaagtggctctggggctgggaccaggggctagggcctcatcccaatgtctggtgggccctagttcaggtctggaggtagacggacccagctggccactcagaggtgggctcagtttgcacatccatgaggataaagaggaactgcttctggaggtggggcaggctggaaagtgagtgtctagggtggcacagtcaagatgggcaggatggcagggagtgagagcagaattctggactgcagaattcacactgaggtggaagccaggagtggggatgaagaatggtggtccttgggggaggggatgtagggggctgttgttcaatgggtataaacctacagttgtatgagatgagtaagttccggggatcccctgcacagcatggtgcctgtagttaaaaacaggagattgtatatgtagaaatttgttcagagcgtagatctcatgtttagtgcacaa

SEQ ID NO: 558069 - DNA, 620 bp, Homo sapiens
taccacattttctttatccattcrctcattgatggccacttaggctgtttgcataccttggctattgtggattatgctgcaatggacatgggagtgcaatatttctttgagatacagatttcaattcctttgggtacatgtccagaagtgagattgctgaattatacggtagttctatttttagttttttatagaactgccaatacccaatactgttttccataatggctattaccaacttatattcttaccaacagtgtgcaaagcttccattttctccacatcttcaccaatacttgtcatcatctggggacacaaggtaatttttggaggtaatggatatgtttattacttgtactgtggtgagggcgacacaactgtttacacatgtccaaactaaccaaactatagatattgattatgtgcagtgttaggtataccaactgtatcgcaacaaaggtggatcagtacctcggacagcgccaggaagacacagttatcctaagctctggtaaggcagaactgtctggctctctggaacttttagctgttagggtaccttaggactctttaatgtcaacatggtcctcagggactttggatctctgtttctggaggac

SEQ ID NO: 558070 - DNA, 596 bp, Homo sapiens
ttgacccttttacccccttcctatttgctggttttggtattacacaaactcaaaactaatgtactagctgtttccagcccccctaacctgctytattttcttgtagtgttattagcttggctactaaatgtgccatgcccagttttcgaatgcacctgagagcacatgggatggtagcaatggtctttaaaaccttggatgattcccagcaccatcaggtattttttaagtttctgagattgagaagccttatgttgaaaactactagtctatttggctatcaaaaatatcttcactgaatattctataaatatatcctaattatagattgagttcattttatttgctaaatttgtagtgcttatggccagaagcttttgcttaatacttattttatcatgaaaacgtgaaaacattttttcttaatgtgtcattttatacttttaaaattgtattttgttatcttagctaatgtagtatattgatacagaattttgtaagcataattttctctataatcagaaagcactgagaagaatcttttaatattatttgatactaatgaatggaaaaaaactggtttggaaatgcagccc

SEQ ID NO: 558071 - DNA, 577 bp, Homo sapiens
aagccttttccagaaatgtcaacagttctggagaatgtgagtatctttgggycatcaaagttgaggcaccttaactggggatcccaccaaaagattatagtggccacttttgagaacacattttttcacttacattgttgaatcatatgtgtgagtgtgtttgtgtaagaggcatatgtcatggagtttaagatgtacattttttcacgtttaatgtatttgaatttgggatgcatctcacaatacagtcttagctttctgccttaaacctgcacactgactgggttgatagtgtcacctggaacttcagagtgtgaccttatttggagatagagtctttataggtgcaatcataagatgagctcatactgttttagggtgagccctaaatccagcatgaccagattccttataaggagaggaaaggacacaaagaagacacagggaagaaggccaggtgacaacggaggtagagtttggagtgatgtgtctacaagccaaggaacagcaaggattactggcaaacaccaaaagcttggaagaggcaaagagggctcccttcctagagcctctggag

SEQ ID NO: 558072 - DNA, 577 bp, Homo sapiens
aagccttttccagaaatgtcaacagttctggagaatgtgagtatctttgggtcatcaaagttgaggcaccttaactggggatcccaccaaaagattatagtggccactttwgagaacacattttttcacttacattgttgaatcatatgtgtgagtgtgtttgtgtaagaggcatatgtcatggagtttaagatgtacattttttcacgtttaatgtatttgaatttgggatgcatctcacaatacagtcttagctttctgccttaaacctgcacactgactgggttgatagtgtcacctggaacttcagagtgtgaccttatttggagatagagtctttataggtgcaatcataagatgagctcatactgttttagggtgagccctaaatccagcatgaccagattccttataaggagaggaaaggacacaaagaagacacagggaagaaggccaggtgacaacggaggtagagtttggagtgatgtgtctacaagccaaggaacagcaaggattactggcaaacaccaaaagcttggaagaggcaaagagggctcccttcctagagcctctggag

SEQ ID NO: 558073 - DNA, 577 bp, Homo sapiens
aagccttttccagaaatgtcaacagttctggagaatgtgagtatctttgggtcatcaaagttgaggcaccttaactggggatcccaccaaaagattatagtggccacttttgagaacacattttttcacttacattgttgaatcrtatgtgtgagtgtgtttgtgtaagaggcatatgtcatggagtttaagatgtacattttttcacgtttaatgtatttgaatttgggatgcatctcacaatacagtcttagctttctgccttaaacctgcacactgactgggttgatagtgtcacctggaacttcagagtgtgaccttatttggagatagagtctttataggtgcaatcataagatgagctcatactgttttagggtgagccctaaatccagcatgaccagattccttataaggagaggaaaggacacaaagaagacacagggaagaaggccaggtgacaacggaggtagagtttggagtgatgtgtctacaagccaaggaacagcaaggattactggcaaacaccaaaagcttggaagaggcaaagagggctcccttcctagagcctctggag

SEQ ID NO: 558074 - DNA, 577 bp, Homo sapiens
aagccttttccagaaatgtcaacagttctggagaatgtgagtatctttgggtcatcaaagttgaggcaccttaactggggatcccaccaaaagattatagtggccacttttgagaacacattttttcacttacattgttgaatcatatgtgtgagtgtgtttgtgtaagaggcatatgtcatggagtttaagatgtacattttttcacgtttaatgtatttgaatttgggatgcatctcacaatacagtcttagctttctgccttaaacctgcacactgactgggttgatagtgtcacctggaacttcagagtgtgaccttatttggagatagagtctttataggtgcaatcataagatgagctcatactgttttagggtgagccctaaatccagcatgaccagattccttataaggagaggaaaggacacaaagaagacacagggaagaaggccaggtgacaacggaggyagagtttggagtgatgtgtctacaagccaaggaacagcaaggattactggcaaacaccaaaagcttggaagaggcaaagagggctcccttcctagagcctctggag

SEQ ID NO: 558075 - DNA, 607 bp, Homo sapiens
ttagtgtattttgtgtagcccaagaaagttcctcctcctcctcctccttctcctcctcctcctcctcctcctcctcctccttcttcttcttcttcttcttcttcttcttcttcttcttcttcttcttcttcttctyctcctcctcctcctccttcttcttctttctcttcttcttcttctccttccaatgtagccaagggaagccaaaaggttagatacccctgaaagaaaagtaagtgctcatgaggttgatagaagctagctcagcggcctttctatgcacattatcttggtaatctttggtaagactaatctggtatatttcatctcaaaattctctccagtagtttaaaatcttaaagtcatgttaagtaatgggatttttttccattggaatttgggttactaaaagttaaaatattaggagggtaaaaaaagtaggaggtgaagtttataaaaacacaaggatgtggattttgctaatgaaaatgcaattttttctagtttacagactatttgagtcacttttaaatgaaagcaaatgttataatagataaatctaaatgaataaaatgaaaaattaaaaagtgggaaatgagaaaccttg

SEQ ID NO: 558076 - DNA, 419 bp, Homo sapiens
ctcaggggcacattctctttcttagggatgttccttgctgagaaaaagaattcagtgatatttctcccatttgcttttgaaagaagagaaatgtggctctgttccacctggctcaccggtggtcagagtttaagattatctctcttrttccctgaacattgctgttatcctgttcttttttcaagatgcccagatttcatattgttcaaacacacatgctctacaatttgtgcagttaacgcaatcatcacagggtcctgaggtgacatacatcctccttggcttacaagatgacaggattaagagattaaagtaaagacaggcataggaaatcacaagggtattgattggggaagtgataagtgtccatgaaatcttcacaatttatgtttagagattgcagtaaagacaggcataag

SEQ ID NO: 558077 - DNA, 419 bp, Homo sapiens
ctcaggggcacattctctttcttagggatgttccttgctgagaaaaagaattcagtgatatttctcccatttgcttttgaaagaagagaaatgtggctctgttccacctggctcaccggtggtcagagtttaagattatctctcttgttcyctgaacattgctgttatcctgttcttttttcaagatgcccagatttcatattgttcaaacacacatgctctacaatttgtgcagttaacgcaatcatcacagggtcctgaggtgacatacatcctccttggcttacaagatgacaggattaagagattaaagtaaagacaggcataggaaatcacaagggtattgattggggaagtgataagtgtccatgaaatcttcacaatttatgtttagagattgcagtaaagacaggcataag

SEQ ID NO: 558078 - DNA, 419 bp, Homo sapiens
ctcaggggcacattctctttcttagggatgttccttgctgagaaaaagaattcagtgatatttctcccatttgcttttgaaagaagagaaatgtggctctgttccacctggctcaccggtggtcagagtttaagattatctctcttgttccctgaacattgctgttatcctgttcttttttcaagatgcccagatttcatattgttcaaacacacatgctctacaatttgtgcagttaacgcaatcatcacagggtcctgaggtgacatacatcctccttggctyacaagatgacaggattaagagattaaagtaaagacaggcataggaaatcacaagggtattgattggggaagtgataagtgtccatgaaatcttcacaatttatgtttagagattgcagtaaagacaggcataag

SEQ ID NO: 558079 - DNA, 382 bp, Homo sapiens
tatctctcttgttccctgaacattgctgttatcctgttcttttttcaagatgcccagatttcatattgttcaaacacacatgctctacaatttgtgcagttaacgcaatcatcacagggtcctgaggtgacatacatcctccttggcttacaagatgacaggattaagagattaaagtaaagacaggcataggaaatcacaagggtattgattggggaagtgataagtgtccatgaaatcttcacaatttatgtttagagattrcagtaaagacaggcataagaaattaaagaagtactaatttggggaactaataaatgtccatgaaatcttcacaatccacattcttctgccatggcttcagtcggtccctccattcggg

SEQ ID NO: 558080 - DNA, 382 bp, Homo sapiens
tatctctcttgttccctgaacattgctgttatcctgttcttttttcaagatgcccagatttcatattgttcaaacacacatgctctacaatttgtgcagttaacgcaatcatcacagggtcctgaggtgacatacatcctccttggcttacaagatgacaggattaagagattaaagtaaagacaggcataggaaatcacaagggtattgattggggaagtgataagtgtccatgaaatcttcacaatttatgtttagagattgcagtaaagacaggcataagaaattaaagaagtrctaatttggggaactaataaatgtccatgaaatcttcacaatccacattcttctgccatggcttcagtcggtccctccattcggg

SEQ ID NO: 558081 - DNA, 382 bp, Homo sapiens
tatctctcttgttccctgaacattgctgttatcctgttcttttttcaagatgcccagatttcatattgttcaaacacacatgctctacaatttgtgcagttaacgcaatcatcacagggtcctgaggtgacatacatcctccttggcttacaagatgacaggattaagagattaaagtaaagacaggcataggaaatcacaagggtattgattggggaagtgataagtgtccatgaaatcttcacaatttatgtttagagattgcagtaaagacaggcataagaaattaaagaagtactaatttggggaactaataaatgtcyatgaaatcttcacaatccacattcttctgccatggcttcagtcggtccctccattcggg

SEQ ID NO: 558082 - DNA, 382 bp, Homo sapiens
tatctctcttgttccctgaacattgctgttatcctgttcttttttcaagatgcccagatttcatattgttcaaacacacatgctctacaatttgtgcagttaacgcaatcatcacagggtcctgaggtgacatacatcctccttggcttacaagatgacaggattaagagattaaagtaaagacaggcataggaaatcacaagggtattgattggggaagtgataagtgtccatgaaatcttcacaatttatgtttagagattgcagtaaagacaggcataagaaattaaagaagtactaatttggggaactaataaatgtccrtgaaatcttcacaatccacattcttctgccatggcttcagtcggtccctccattcggg

SEQ ID NO: 558083 - DNA, 627 bp, Homo sapiens
gaatgttgaaagggagcttgaactttgagctgatttaaaggaactacaattrcatttggatcaaatccagaaatttgaagtattctgcactgagcctgtccaattaatatggctatttggtctagataaacagatgaagtttttgacacagtatgaggaagaaaacaccactccactaaatcattatgttgaattattagtccagtaggggagtgtaatgaagcaaaaaccagaagctgaaaaggctgaaacggctttactctagataactgggcagtctggattctttcctctatgaattccagttctagtaaagcctcaggggtcaaagtcctggggctgtggagatcggaagctcccctcagcgtagaaaacaagttagacaatgcataggtcggaatgcctaaagtaggtcttaaataattaatgttacccaaaagtttttggaagtcatttaaagtttttaaagaatctctcctaatttgaactttttgaggttgaatacattgtttatcgaccaccattactaaatattgaacaggagtggtctgttgaattttatcctgagcgatgtgtaatccggcctctgtaacacagcggttcaaaatttggtaacagtcaattaat

SEQ ID NO: 558084 - DNA, 627 bp, Homo sapiens
gaatgttgaaagggagcttgaactttgagctgatttaaaggaactacaattacatttggatcaaatccagaaatttgaagtattctgcactgagcctgtccaattaatatggctatttggtctagataaacagatgaagtttttgacacagtatgaggaagaaaacaccactccactaaatcattatgttgaattattagtccagtaggggagtgtaatgaagcaaaaaccagaagctgaaaaggctgaaacggctttactctagataactgggcagtctggattctttcctctatgaattccagttctagtaaagcctcaggggtcaaagtcctggggctgtggagatcggaagctcccctcagcrtagaaaacaagttagacaatgcataggtcggaatgcctaaagtaggtcttaaataattaatgttacccaaaagtttttggaagtcatttaaagtttttaaagaatctctcctaatttgaactttttgaggttgaatacattgtttatcgaccaccattactaaatattgaacaggagtggtctgttgaattttatcctgagcgatgtgtaatccggcctctgtaacacagcggttcaaaatttggtaacagtcaattaat

SEQ ID NO: 558085 - DNA, 627 bp, Homo sapiens
gaatgttgaaagggagcttgaactttgagctgatttaaaggaactacaattacatttggatcaaatccagaaatttgaagtattctgcactgagcctgtccaattaatatggctatttggtctagataaacagatgaagtttttgacacagtatgaggaagaaaacaccactccactaaatcattatgttgaattattagtccagtaggggagtgtaatgaagcaaaaaccagaagctgaaaaggctgaaacggctttactctagataactgggcagtctggattctttcctctatgaattccagttctagtaaagcctcaggggtcaaagtcctggggctgtggagatcggaagctcccctcagcgtagaaaacaagttagacaatgcataggtcggaatgcctaaagtaggtcttaaataattaatgttacccaaaagtttttggaagtcatttaaagtttttaaagaatctctcctaatttgaactttttgaggttgaatacattgtttatcgaccaccattmctaaatattgaacaggagtggtctgttgaattttatcctgagcgatgtgtaatccggcctctgtaacacagcggttcaaaatttggtaacagtcaattaat

SEQ ID NO: 558086 - DNA, 542 bp, Homo sapiens
attccaatgaagataatcctctattaagaaacaaataaattctcaattctttggaaatggtggaaatagttagctattataactgtttatgagagcagagaaatgactgaatcttagcttgtaagaaatttctccatgtacttatcaagccattaattttcttaataaattagaaatttccttttacaattaataaaaactggctttagttaccaaggtttcttttaagaaaggtaaattttggtgcttcatatttgaaatcaatttcaacaaaaaaaagacaagtttttttcacaacagttctctctaaggcaccctgatattggcatcagaaagaatgaggtcatgtgcttttaataaacccaaaagctatcaaatgtagaaaatyatttggttatttcctttactggatacagaaccttatatgtattagtcatttaattatgagttcagaaatgaatttgtgatgctaggagaacaatattcattaataattagggaaatgagcaatgcagaaagttttctaataggtccaacccttc

SEQ ID NO: 558087 - DNA, 644 bp, Homo sapiens
aaataaaataaaatagattctgttatgattcacattcctggaattgctaactatttaataggaatctgttaccatgtggtttagaatccctcattttgtttaatcacatcgggggtggtagaagctatcctccatctgttgggtggggaagtacggataagttcttcttgtttttaattgacacagtaatagtatatatttataggtgcagtgtgatgtttcaatacatatatacattgtgtaatgaccraatcagagcaatagcgtatttatcacctcaaacatttatcatcattttctactgagagcattcaaaatcctctcttctagttttttgaaatatacaatacattattgttaactatagtcacactactgtgcattagaacactagaatttattcatcctaactgtaactttatacccactgaccaatttctccccattccttcctctcccataccctctccagtctctggtaaccactattctgttctctgcttccatgagattgactttttaagataccacatatgagtgagatcatgcagtatttgtccctctgtgcttggcttacttcacttagcataatgtcctctaggttcatccaagttgtcacaaatgacaggatttcattcttttat

SEQ ID NO: 558088 - DNA, 539 bp, Homo sapiens
tatatatatctatatatatatatatctatatatatatgtatatatatatatatcgatatatatatatatactggctttaaatctttgtctgcttgttaggtaattcattttagataattcacccagctgtatcatcttggtggtgttttcttttaattgtcttttcccatgagagtgttatttttcccacctctctctatgccaagtaattttggattgtgttctgtacattttgaatattatgttacaaaactttgtcttttgtttaaatgctatggaaaatgttgatgtttttgtttttgttttttggattttttttttttttttttttttaagagacagggttttgctgtcgcatccargctgaagtgcatggcatgattgtactttccttcatccttcaactcctgggctcaagggatcctcctgccccagtcacctgattagctgggactacagtgacacaccactatgcttggctactttattttctattttttgtagagagaggatctcactttgttgcccagactggtctc

SEQ ID NO: 558089 - DNA, 584 bp, Homo sapiens
ttttttttgagacaggatttcaccatgttacccaggctggtcttgaactcctgggctcaagcgatctgcccatcttggcctcccagctataggcatgagccaccatgcctagcttttaattcttatagtaagaaataatattaaactcatatagtaataaaaatttgttttaattcttacagtaagaaattgacttttccccctagcaagactcataaagagttccatttccaggcaccagaatgagtgaaaaatgaccaaaacagtcttatctggggaaatatcaggaagtggacataccccccatttggcctaatatctggacattgacaaagaatcaattgcaaagtacagaagagaactagcaaatggaatccaraaacacataaaaagaattatacaccatgactaagtaggatttatccctaaaatgcaagctggctaatattagaaaattaattaatttaatataccatatcattaggataaggaacaaaaatgacataattatatcaatacacgcagaaagagcatttgacaaaatcccttcaggatgaaaacattcaacaaactaagaatacaaa

SEQ ID NO: 558090 - DNA, 582 bp, Homo sapiens
aagcaatgtatatcaccctcatacttttctgatgatgtaccaagtccgtaagctgatacatttaaaacaggaatttcattaaagtgattaatcaatgactcacttattaaacagataaacctgtacctatctcttacaaaagatgttgtctcttctgcttaagaaccacaaattattgtttatttcattgattttgaagtccacatgtgagcatatttatcatcttggaaattgtttttaaaataatgatcatgacagaatcattcatctaatattttcttcttacaatggtaccttgacatcctttcttgaaggggtgaggtcttcttaccccctttaattggggtagaacttcgttactgccatgaccagtagattatatcagaagtgatactttgtgacttttgagtctagatcatagaaatgccatgcaattcyaaattattatttatggaacctgccacatgctgtgaggaagcccatgctgtgagacagagatagaacattcatttaaaaaatgattggaggaggagccaagatggccgaataggaacagctccagtctacagctcccagcatgag

SEQ ID NO: 558091 - DNA, 361 bp, Homo sapiens
gtgtttatttttcatcttatatctggcttctttttaaataaatttgggaaatttttgaaatctaatcttctaagtaagcatctataattctgtttactcctttcattttttttttttaatttggatcaatatactgtctttccaaagtcttttaactgagtttgtgttggtcgctctcttttaatctgctgacttttctgttatatcaagtagttcctgcccatcatttcatctttttcatggaaagtataggttagtcagtattaacagctgccacttaycatttcaggccttgaataagtcttgtgccatcattcagtttttggtcagggatagtgataacttcaggataccttcttag

SEQ ID NO: 558092 - DNA, 620 bp, Homo sapiens
tcactctcatcttcttattcacttcctgaaacaaacaaagaaggaagttcatagaccagacttgacatggcaggaaatgtcgaattcctcactggtcttactgcactacagtacatgagagcccatcctctctcccccatcccttctacctcctgtgtttcctccctaattttttgtgtgttcactctttggatgcccttgcacaaaatgtgctccaaattgttccttacgtgatgaagacagaagatcattcttagcttattattacttgctgctgaatttgttcacagatatatttacacagatgggaactggaacatattttataacagtgagaagctgaaaccaccctcagtgtccagtgacacagattggttaaagaaatcacggtgcagccacataatggagtagtataaaatggtaaaaacaaacagataaccactgaagagatctacttagcttcatagacgtatgtggaaattttcaaagaaatgtattttttaaatgactaacatatgtacctgaatataaattatrgtattagttctgggggaaaaatattctagtagtctatgtacacataaatatttcaaacagaagatgccataaagttaacagtg

SEQ ID NO: 558093 - DNA, 624 bp, Homo sapiens
catctagaaacaattttaaatgttgaatacatttttatactctaataytctaacaaatgtaattttttaaaaacaaatgtacattgtttcaagtctattacttatccatctttggaactgccaaagcaaatctctccatattataaaaaaaaaacttttgtgacttctagtaaacagacatagaaacagaagtttatgatatgatacataaaagagtttgcatttatcttacatttttactaactttattttttagctaagcttttgtctatatttgcatattcttgattgaaacatgcctttgtacatttgtattgagcaattaaaggcttttttaactagtcaacctaacaacattgacatatggcttttctcagattggaatgatctacaaagcttctgaagcttgaactttggggtccttcatgtgcacaggccctttccaagaccctgtttagagtgaatagaatacagacatttagaaggttcatgaactagcagtggtcttctttatgccaactcctttactcaagcctttatgtatttttctgtcttccactgacccatggggatcataagatttcaggaccttctcctccctaaaacaaactccaatcatttgag

SEQ ID NO: 558094 - DNA, 624 bp, Homo sapiens
catctagaaacaattttaaatgttgaatacatttttatactctaatacwctaacaaatgtaattttttaaaaacaaatgtacattgtttcaagtctattacttatccatctttggaactgccaaagcaaatctctccatattataaaaaaaaaacttttgtgacttctagtaaacagacatagaaacagaagtttatgatatgatacataaaagagtttgcatttatcttacatttttactaactttattttttagctaagcttttgtctatatttgcatattcttgattgaaacatgcctttgtacatttgtattgagcaattaaaggcttttttaactagtcaacctaacaacattgacatatggcttttctcagattggaatgatctacaaagcttctgaagcttgaactttggggtccttcatgtgcacaggccctttccaagaccctgtttagagtgaatagaatacagacatttagaaggttcatgaactagcagtggtcttctttatgccaactcctttactcaagcctttatgtatttttctgtcttccactgacccatggggatcataagatttcaggaccttctcctccctaaaacaaactccaatcatttgag

SEQ ID NO: 558095 - DNA, 624 bp, Homo sapiens
catctagaaacaattttaaatgttgaatacatttttatactctaatactctaacaaatrtaattttttaaaaacaaatgtacattgtttcaagtctattacttatccatctttggaactgccaaagcaaatctctccatattataaaaaaaaaacttttgtgacttctagtaaacagacatagaaacagaagtttatgatatgatacataaaagagtttgcatttatcttacatttttactaactttattttttagctaagcttttgtctatatttgcatattcttgattgaaacatgcctttgtacatttgtattgagcaattaaaggcttttttaactagtcaacctaacaacattgacatatggcttttctcagattggaatgatctacaaagcttctgaagcttgaactttggggtccttcatgtgcacaggccctttccaagaccctgtttagagtgaatagaatacagacatttagaaggttcatgaactagcagtggtcttctttatgccaactcctttactcaagcctttatgtatttttctgtcttccactgacccatggggatcataagatttcaggaccttctcctccctaaaacaaactccaatcatttgag

SEQ ID NO: 558096 - DNA, 624 bp, Homo sapiens
catctagaaacaattttaaatgttgaatacatttttatactctaatactctaacaaatgtaattttttaaaaacaaatgtacattgtttcaagtctattacttatccatctttggaaytgccaaagcaaatctctccatattataaaaaaaaaacttttgtgacttctagtaaacagacatagaaacagaagtttatgatatgatacataaaagagtttgcatttatcttacatttttactaactttattttttagctaagcttttgtctatatttgcatattcttgattgaaacatgcctttgtacatttgtattgagcaattaaaggcttttttaactagtcaacctaacaacattgacatatggcttttctcagattggaatgatctacaaagcttctgaagcttgaactttggggtccttcatgtgcacaggccctttccaagaccctgtttagagtgaatagaatacagacatttagaaggttcatgaactagcagtggtcttctttatgccaactcctttactcaagcctttatgtatttttctgtcttccactgacccatggggatcataagatttcaggaccttctcctccctaaaacaaactccaatcatttgag

SEQ ID NO: 558097 - DNA, 482 bp, Homo sapiens
catggggctgcgtctgtgcctacgtacttcttgtgtctctctgtgtgcaaatttccagttcwtataaggaatttccactttttctaaggacattcatcttattggatttagttccactgaaactccctcattttagcttgatcacctcttcttagggctattttctgaacacaatcatattctaaggaacaagaggtaggttggctgtggagttttgtatacctatgcctatcatatttcgctaaatatttgattatatagaggttatgtctttagaactttgagctatgtgcagacaacacaaacctggccattcatggctgacagaaggttggccctcagcccggtcggacccacacagattgtccaatattccttggatctggctccgatcagaaaagtctcggtgttttaggatacaggtgtcttaacgaattctattattaatattcgtggagaggttaaaacaaagttggacacaa

SEQ ID NO: 558098 - DNA, 482 bp, Homo sapiens
catggggctgcgtctgtgcctacgtacttcttgtgtctctctgtgtgcaaatttccagttcttataaggaatttccactttttctaaggacattcatcttattggatttagttccactgaaactccctcattttagcttgatcacctcttcttagggctattttctgaacacaatcatattctaaggaacaagaggtaggttggctgtggagttttgtayacctatgcctatcatatttcgctaaatatttgattatatagaggttatgtctttagaactttgagctatgtgcagacaacacaaacctggccattcatggctgacagaaggttggccctcagcccggtcggacccacacagattgtccaatattccttggatctggctccgatcagaaaagtctcggtgttttaggatacaggtgtcttaacgaattctattattaatattcgtggagaggttaaaacaaagttggacacaa

SEQ ID NO: 558099 - DNA, 482 bp, Homo sapiens
catggggctgcgtctgtgcctacgtacttcttgtgtctctctgtgtgcaaatttccagttcttataaggaatttccactttttctaaggacattcatcttattggatttagttccactgaaactccctcattttagcttgatcacctcttcttagggctattttctgaacacaatcatattctaaggaacaagaggtaggttggctgtggagttttgtatacctatgcytatcatatttcgctaaatatttgattatatagaggttatgtctttagaactttgagctatgtgcagacaacacaaacctggccattcatggctgacagaaggttggccctcagcccggtcggacccacacagattgtccaatattccttggatctggctccgatcagaaaagtctcggtgttttaggatacaggtgtcttaacgaattctattattaatattcgtggagaggttaaaacaaagttggacacaa

SEQ ID NO: 558100 - DNA, 482 bp, Homo sapiens
catggggctgcgtctgtgcctacgtacttcttgtgtctctctgtgtgcaaatttccagttcttataaggaatttccactttttctaaggacattcatcttattggatttagttccactgaaactccctcattttagcttgatcacctcttcttagggctattttctgaacacaatcatattctaaggaacaagaggtaggttggctgtggagttttgtatacctatgcctatcatatttcgctaaatatttgattatatagaggttatgtctttagaactttgagctatgtgcagacaacacaaacctggccattcatggctgacagaaggttggccctcagcccggtcggacccacacagattgtccaatattccttggatctggctccgatcagaaaagtctcrgtgttttaggatacaggtgtcttaacgaattctattattaatattcgtggagaggttaaaacaaagttggacacaa

SEQ ID NO: 558101 - DNA, 443 bp, Homo sapiens
actgtctctgggagaaaaaggcgggttttckgtttttgctttattttagtttgttttttggtactcttcaatgtaactataagaatggaagtcatgggagaataaagggaaaacaagaaggcctggttactgttgtggaagaaagactttcttaggagaaaggttgaggaatttactagagagcaatgtcaggaaaaatgagaatctggaggccgggctaggcacacatcaaaggaatctgcatctaattactcagaaagaagaaactgaaaaagagaggtttttgtttctagattggaaagggtgactactaacatccaaaaaagtaaacaaataacagaaaactaacagaagagacccctccccaggaactagttatataaagtgggcacatatttgagaagagaaaaccaggaaaattagccgaaatagtattacgtgat

SEQ ID NO: 558102 - DNA, 605 bp, Homo sapiens
attttacaagaattatctaaaaataacctctacaatatatgtattactcattagtttcattaaataaactccataatatttccaattctactttagakgaattaagtgtaataaaaagaagcatcaaaaagctcacagagtagtgaaaagaagcaacattaaatgtgcttttactactgaatgtaaccacagtttgatcaaaatgcaattacaacacagaggagggtgttataaaatctatggccaataactaattctagtttcatgaagataatgacagttggcttgggtcttgaagcttttaggatttcttaaagaaatagacaaaaagggagatgattttacataattatgtaaaagcatatgtaaagaaacaaaaagtattcctttatctgagctattttactgaacttttgagcttggtttccaatgccttcctggctatttgattttgaataagctcttatcaactgaaatgaaaaaaaaatagtaaaaaaggatggaaaaatagcaaaaaaacataagagggagaataggagggagattctccttttcattaattcttcctttggtaaaattctttgtctcataaaaatgtatccaca

SEQ ID NO: 558103 - DNA, 554 bp, Homo sapiens
aaaagaaaaaaatagaagtcagggaaggagataaacagtaaaatatttttcatggcagctggctaaattaggattaaagaggagggaatctccctggaagcatcaaagagaaggggtcctagatgttcttataatgtgttcttggtcctcacactccacattcacaaacactgagaaagagacaccacaatcagaaattgtaagctgtttattttattggtatattaaaggtagagctatgaccaccttcttccaatgtcatggcatttgaatcatttgaatcactgtcatcttcttrttcacttcctgaaacaaacaaacaaggaatttcatagagcagacttgacatggcaggaaatgtcgaattcctcactggtgttactgcagtagagtacatgagatcccatcctctctccccaatcccttcaacctcctgtgattctttcctgattttttctgtgttcactcttttgatgcccttgcacacaatgtgctccaaattgttgctgagaagatgaagagaaaagatcatccttaggttgttatgactcatt

SEQ ID NO: 558104 - DNA, 460 bp, Homo sapiens
gatattgtatttctctctgtctcattttagytctgcttaacatttcagctttttggtgttatatgttgttgtatgtgttattatcagtatacagatttaaggttgtcatattttcctgtcgaatcagctcttttattattacatctaaatacatagtatcacttataattacattgtgctttacatggtttgaaggtaaaaagaaaggacaagatatactaaaaaatagtggctattcaatgtaattattgtataatttaatcttacctataatcttgctatttttcttatctatgtttctagttgattaatctaaaaaaggcaaaatatttctattattcagttttgtcatctattagcttgttagtaaacattattttattatttacttcagtgattaccctagaggttataacatttattctcaatttaatattagagtctatattatattagcact

SEQ ID NO: 558105 - DNA, 631 bp, Homo sapiens
ctgtatatgagaatcatatgggaaactctgtaaacaccgattcctgggcgtactcccatccatctgattcagtgtctagagtaggtcccaaaatctgtagtatttagggtttcctagataaatctgatgcacaagtcaggtgaggaaccactggttaagatgcttgctaagggctgctcaaactttgaagggtccaaattgctttccttgtctgaaaaatgagaatagtgttagtatctkccccatagggttagtgtcaggattaggtttggaagatgcttgtgaagggttgagggcagcttctggcacctgctacccactcaggaaataatatcccataaattatagaaataaatgtttgccaatagagtagaactgtcaactttaaaattggttttaaacccacaaatagaatgtcaaatcttttcttatttttgttttatttttttacacatttctagtctgggccatgctctttttccttctcatgtgtttgtaattattttctttcaaatgttttcttgtctcattccacccacatcccacgcttgcagttgtgtttccccttatattaaaatcatgaacatttcttaccaattttctagttcttggggcaaacttccacaagtac

SEQ ID NO: 558106 - DNA, 597 bp, Homo sapiens
gacctcaagtaatccatccgcctctgccttccaaagtgctcagattacaggcatgagccactgcacctagtcacctttccttgttccatcagaagactgtattgttctctatgtttccatgatgcttcatgcattatagattttatcatattgtgaaatttggcctatttgtctatctgactagattactcatagtattattaataataataacyagctatcatttactgaacatttactaatactattccaaagacaatagctccataagataggtactactattatctctgttttacagatatggaaactaaaactccaagagttggattaacttgcccaaggtcacccagctactagtgggcagatctgggatttgaacccacatctgactctcgggctcacgttcttaaccactagattataagacagagattataccatatcattctctgctttctctgcacccagcacagggtctagccttcagtatgtgctaagtaaataattgctggatgaatgatggaataaaggcatcatctccatgtctgctgctgcatccctagctccagatccagtgcctggtacagggagaga

SEQ ID NO: 558107 - DNA, 597 bp, Homo sapiens
gacctcaagtaatccatccgcctctgccttccaaagtgctcagattacaggcatgagccactgcacctagtcacctttccttgttccatcagaagactgtattgttctctatgtttccatgatgcttcatgcattatagattttatcatattgtgaaatttggcctatttgtctatctgactagattactcatagtattattaataataataactagctatcatttaytgaacatttactaatactattccaaagacaatagctccataagataggtactactattatctctgttttacagatatggaaactaaaactccaagagttggattaacttgcccaaggtcacccagctactagtgggcagatctgggatttgaacccacatctgactctcgggctcacgttcttaaccactagattataagacagagattataccatatcattctctgctttctctgcacccagcacagggtctagccttcagtatgtgctaagtaaataattgctggatgaatgatggaataaaggcatcatctccatgtctgctgctgcatccctagctccagatccagtgcctggtacagggagaga

SEQ ID NO: 558108 - DNA, 597 bp, Homo sapiens
gacctcaagtaatccatccgcctctgccttccaaagtgctcagattacaggcatgagccactgcacctagtcacctttccttgttccatcagaagactgtattgttctctatgtttccatgatgcttcatgcattatagattttatcatattgtgaaatttggcctatttgtctatctgactagattactcatagtattattaataataataactagctatcatttactgaacatttactaatactattccaaagacaatagctccataagataggtactactattatctctgttttacagatatggaaactaaaactccaagagttggattaacttgcccaaggtcacccagctactagtgggcagatctgggatttgaacccacatctgactctcgggctcacgttcttaaccactagattataagrcagagattataccatatcattctctgctttctctgcacccagcacagggtctagccttcagtatgtgctaagtaaataattgctggatgaatgatggaataaaggcatcatctccatgtctgctgctgcatccctagctccagatccagtgcctggtacagggagaga

SEQ ID NO: 558109 - DNA, 633 bp, Homo sapiens
cagggtcttgagggccaacgcaaagagcttggagtttatcctgacagattgaaagctgccaaaggattttgagtgggggtgtgtcattgtcagattcatatgatttatggatcattttgattgagtatgaggaatagattagatcaggggaaggctggaggcaggggtaataggtaggagggtgttacatagtccagataacgggtaagaacttgaatcatttgtttagcctgaagatggcagcagatgctgccagtgccctgcccttcccgcttcatgcctgaggcgccctgtggcagggacaggcacctggagcgctgcctgctggcctgttcttggctgcccaagggcaggtctgaagtgcctggatattaacacttgggagcagcctcagccaatagccaatgctgaaggataaagcctcagcctcctcagaccccaggggacaactctgaagcatattctgtgccatctctctgatgtcctcaggacactgagcctcagttgcccatagtggtaacctggtcattgcagaacccttcctatagcagtttcctcccyttccattctcactttctcactctcttctcagtgtatctgggatcacctaccaaaataagccacttatattca

SEQ ID NO: 558110 - DNA, 633 bp, Homo sapiens
cagggtcttgagggccaacgcaaagagcttggagtttatcctgacagattgaaagctgccaaaggattttgagtgggggtgtgtcattgtcagattcatatgatttatggatcattttgattgagtatgaggaatagattagatcaggggaaggctggaggcaggggtaataggtaggagggtgttacatagtccagataacgggtaagaacttgaatcatttgtttagcctgaagatggcagcagatgctgccagtgccctgcccttcccgcttcatgcctgaggcgccctgtggcagggacaggcacctggagcgctgcctgctggcctgttcttggctgcccaagggcaggtctgaagtgcctggatattaacacttgggagcagcctcagccaatagccaatgctgaaggataaagcctcagcctcctcagaccccaggggacaactctgaagcatattctgtgccatctctctgatgtcctcaggacactgagcctcagttgcccatagtrgtaacctggtcattgcagaacccttcctatagcagtttcctccccttccattctcactttctcactctcttctcagtgtatctgggatcacctaccaaaataagccacttatattca

SEQ ID NO: 558111 - DNA, 633 bp, Homo sapiens
cagggtcttgagggccaacgcaaagagcttggagtttatcctgacagattgaaagctgccaaaggattttgagtgggggtgtgtcattgtcagattcatatgatttatggatcattttgattgagtatgaggaatagattagatcaggggaaggctggaggcaggggtaataggtaggagggtgttacatagtccagataacgggtaagaacttgaatcatttgtttagcctgaagatggcagcagatgctgccagtgccctgcccttcccgcttcatgcctgaggcgccctgtggcagggacaggcacctggagcgctgcctgctggcctgttcttggctgcccaagggcaggtctgaagtgcctggatattaacacttgggagcagcctcagccaatagccaatgctgaaggataaagcctcagcctcctcagaccccaggggacaactctgaagcatattctgtgccatctctctgatgtcctcaggacactgagcytcagttgcccatagtggtaacctggtcattgcagaacccttcctatagcagtttcctccccttccattctcactttctcactctcttctcagtgtatctgggatcacctaccaaaataagccacttatattca

SEQ ID NO: 558112 - DNA, 633 bp, Homo sapiens
cagggtcttgagggccaacgcaaagagcttggagtttatcctgacagattgaaagctgccaaaggattttgagtgggggtgtgtcattgtcagattcatatgatttatggatcattttgattgagtatgaggaatagattagatcaggggaaggctggaggcaggggtaataggtaggagggtgttacatagtccagataacgggtaagaacttgaatcatttgtttagcctgaagatggcagcagatgctgccagtgccctgcccttcccgcttcatgcctgaggcgccctgtggcagggacaggcacctggagygctgcctgctggcctgttcttggctgcccaagggcaggtctgaagtgcctggatattaacacttgggagcagcctcagccaatagccaatgctgaaggataaagcctcagcctcctcagaccccaggggacaactctgaagcatattctgtgccatctctctgatgtcctcaggacactgagcctcagttgcccatagtggtaacctggtcattgcagaacccttcctatagcagtttcctccccttccattctcactttctcactctcttctcagtgtatctgggatcacctaccaaaataagccacttatattca

SEQ ID NO: 558113 - DNA, 614 bp, Homo sapiens
actcattccccatccagttttgttcccttgctggtgaggagttgtgatcrtttggaggaggacaggtgttctggttttgggaattttcagccttcttgcgctggtgtttccccatctttgtggatttctctacctttggtctttgatgttggtgaccttaggatggggtatttgagtggacttgctaatcctttctgtttgtttcttttccttctaacagtcatgcccctctgctgccagtctgctggagtttgctggaggtccactcctggccctgtttgcctgagtatcaccagcggaggctgcagagcagcaaagattgctgcctgttctttcctctggaagtttcgacccagaggggcacctgccagatgccaatcagagctctcctgtatgaggtgtctgttggcccctactgtgaggtgtctcccagtcagtatacacaggggtcagggacccacttgaggaggcagactgacccttggcagagcttgaacgctgtgctgggaggtccactgctcccttcagagctgttaggcagggatgtttaaatctgctataagcccctgactggggctgctgccttctttacagcaatgccctgtccagacagg

SEQ ID NO: 558114 - DNA, 614 bp, Homo sapiens
actcattccccatccagttttgttcccttgctggtgaggagttgtgatcgtttggaggaggacaggtgttctggttttgggaattttcagccttcttgcgctggtgtttccccatctttgtggatttctctacctttggtctttgatgttggtgaccttaggatggggtatttgagtggacttgctaatcctttctgtttgtttcttttccttctaacagtcatgcccctctgctgccagtctgctggagtttgctggaggtccactcctggccctgtttgcctgagtatcaccagcggaggctgcagagcagcaaagattgctgcctgttctttcctctggaagtttcgacccagaggggcacctgccagatgccaatcagagctctcctgtatgaggtgtctgttggcccctactgtgaggtgtctcccagtcagtatacacaggggtcagggacccacttgaggaggcagactgacccttggcagagctygaacgctgtgctgggaggtccactgctcccttcagagctgttaggcagggatgtttaaatctgctataagcccctgactggggctgctgccttctttacagcaatgccctgtccagacagg

SEQ ID NO: 558115 - DNA, 657 bp, Homo sapiens
aaataactcagtatgtttcaactggtaaaaaatgtttttacaggcataccttggaaatactgtctaagggtccagaccacttcaataaagcaaatatctaaacagaaagtcacaaaaattttttggttttctagtgtatataagttacatttatactatattgcagtctattaagtgtgcaatatgtcttaaataacaatatacatattttaatttaaaaatatrttattgctaaaaaaggctgtcatagagaaatgaggtgagcatatgatgtcggaaaaatgaggcagatagatttgcttgacacagggttgtcacaaacctgcaatttgtaaaaaatgcagtatctgtgaagcacgacacagtgaagtacaatgaaagaaggtatgcctgtacatgaggtgaaaaatatcccaacttcggagtttctgatggatgttttaatacgtagaaattacctctataaatgattttggacacaatcgcccatcagatgaaaaagcaaaatacaaattttatttaatatctcttatattaatggcagttctttatgaaggtgttgttttctccttaaagaagtatttaatatgatctagaatggctcattattaattcacataaaaatttaaaatgaagttaaaaaaaatcaacctgcaa

SEQ ID NO: 558116 - DNA, 551 bp, Homo sapiens
tgccatccgagcaaagagctgcattagcactggtgtgcaacagagctcggggctacctggaccctagagcttggtgggcttggtggtcccactgtttacatggagatggagtgaaggcaaaacaggttacttggagaaatggattgcaagagctgatctttagtggttcatattttgctaactccacagggagtaagccatgaatttggggacacgcagtctggtgcccatcactgtgtgaaactgaccagggcccttgcccttgctgtctgagccttacttccccacctgtagagctatctgggctggctagaccctgaggtcccttccagttctcctactctgtgaaggttgaggctgagctctggggtccaatggcctgtgctcaaatgccagcactgaggtgggggaagtgtccgctcagcttccctgggctttggcttctgcatttgtcaaataagggcaataaaagcaatagctacctcaaccaaacattacacttaaagtggtaaagtgcttagaatagcccwgtcacgtggcacaggctcacg

SEQ ID NO: 558117 - DNA, 586 bp, Homo sapiens
aattctttgccaccatgtcaaaatggggcaggagagatttctgatgacagcctggctccaccagggctcagaagagcttttgtaactgtcataacccctcagcaactaacacgttccctgagcacagttccggaactactgatgggaccaacagctctggggacatcaggaagacaagagagtgaagaagactcactcattaatgaagaaaaacccgttccctcatagtaaaagagaatgcccaaattttccaaccaagtttgatcaattttacaaagaaaggacttgttgatctgacaattatctgagctgtgagatcaatgtctttcttcttacattccctttctctcccctcttcttgtttgctttctcaaaaggttttgaagagaccataacaaaggacatatgtgcagtatgaaataaaaatagaaaaaaaatattctatgagggctgggatttagaatctcaattggytgtgggcttcctagcagcaaggacaaaaggggaaatatgattaaatcttcttgctctagttatcagaaaagagaaacattccagttgtttggagaggaacatgcacaagatt

SEQ ID NO: 558118 - DNA, 574 bp, Homo sapiens
aggttagctcatcgagaatgcacagggtgatgctctctcaacgagagaaaggcgcgacacacacgagctcatttattccaacaacagcctgcagccccagaaccctttcatccctgagcgatatcccccaggggtggggacagcaaggtggcaaggcttcctgtcagggggaggggagtcacakgagcctaagccgggaggggctggtgcatgtgggggccctcctgggagttagggcagcagcatcctttggcagccaggcaaaccctggcctgggtccatttcctctacctgtacctctctagctgggtgacctacaacatgctcctctggatgtccaaacttgcacatctataaagtgaggacttataatagtacctccgtatcgctgggaggattgagacaatataaagtgtttagcttggcagccggcacttaataatcacatgattatgtcatgcagggtcttatttaatcccttccagtggctctgagagaagtaaccgttactgtcttcatttttattttttattgtgtttttgagacagagtctcactctgtcacccaggctgga

SEQ ID NO: 558119 - DNA, 497 bp, Homo sapiens
ggtgtgcaccaccacgcccagctatgttttttttttttttttttttttgtatttttagcagagtcggggtttcaccatgttggccaggctggtcttgaattcctgacctcaagtaatccgcccgcctcagcctcccaaagtgctgcgattacaggcgtgagccaccgtgcctgaccctgatggtttatttctattatataggcagatctataaaagatctgaagcaaatatgccacaatgttacatttgtgaattcaggatggtgagtaaaaagtgtttattatrtcatctgctgcactttatcttcaaaaatttcccaagtagacaaaaggaaaaaagaaaaaaggtagggtgggtgggagccaaacagaaggcttggaaaccatttctgtgctctttgcacagcaaagggagcatgcagatggcgagttaacatacctaggaggctcccctggggtttaatgttgcattgtgtaccctcagaacgactgctcagc

SEQ ID NO: 558120 - DNA, 446 bp, Homo sapiens
atctaatgaaactttgtaccccttgaccaacatctccctgttttcaccacctctggtaaccattctgctctctgcttctrccagttcaacctttttagattctacatataagtgagatcatgcggtatttgtctttctgtgcctggcttatttcacttagcatactgtccctgtattagtccattcttgcactgctataaagaactacctgagactgagtaatttacaaagaaaagaggtttcattggttccacaggctgtacaggaagcatggctggggaggcctcaggaaagtacaatcatggtagaaggcgaaggggaagcaggcacatcttacatggccagagcaggaggaagagagagaagggggagtcgctacacactttcaaacaaccaattcccatgagaactcactcactatcatgagaacagcaagggggaaatcc

SEQ ID NO: 558121 - DNA, 576 bp, Homo sapiens
tccattttcacagtgctgataaagacatacccgagactgggtaatttataaagaaaaagaggtttaatggactcacagttccacgtggctggggaggcctcacaatcatgacagaaggcgaaaggcatgtcttacatggtggcagatgagagaatgagaaccaagcaaaaggggtttcccrgtacaaaatcatcagatctcatgagaattactcactaccacgagaacagtatggggaaaccgcccccatgattcaattatctcccactgggtccctcctacaacaggtgggaattatgggagctacaattcaagatgagatttgggtgaggacacagccaaaccatatcaccagtcatgcaaatagctaaggaaagaacatttcaggcagaaagaacaaagacaaaggacttgaggaaggccctgggactggcaatatggcagcggatgaagagctgaagttctgaagtaaacagagtgattagactcttggttgtaccacttgctagttgtgcaactctagacaagttaccagcccttgaaatctcaattttctcctctgtaaaatgagggcat

SEQ ID NO: 558122 - DNA, 576 bp, Homo sapiens
tccattttcacagtgctgataaagacatacccgagactgggtaatttataaagaaaaagaggtttaatggactcacagttccacgtggctggggaggcctcacaatcatgacagaaggcgaaaggcatgtcttacatggtggcagatgagagaatgagaaccaagcaaaaggggtttcccagtacaaaatcatcagatctcatgagaattactcactaccacgagaacagtatggggaaaccgcccccatgattcaattatctcccactgggtccctcctacaacaggtgggaattatgggagctacaattcaagatgagatttgggtgaggacacagccaaaccatatcaccagtcatgcaaatagctaaggaaagaacatttcaggcagaaagaacaaagacaaaggacttgaggaaggccctgggactggcaatatggcagyggatgaagagctgaagttctgaagtaaacagagtgattagactcttggttgtaccacttgctagttgtgcaactctagacaagttaccagcccttgaaatctcaattttctcctctgtaaaatgagggcat

SEQ ID NO: 558123 - DNA, 597 bp, Homo sapiens
cattgtactccagtctgggcaacacagtgagactccatctcaaaaaaaaaaaaaaaaaaaggagtggaaataaacaaaaagtagagtaaaaaagtagtacaaaatatcaacaaaatgaaaagttggggaattttttgtttgtttgtttgagacaagatcttgcactgtcacccaggatggagtgcagtggcatgatcatggctcactgcagccttcaactcctgtgctcaagtgatcctcttgcttcagtcttctgagtagctggtactacaggcatgtgtcatcacacaaggctaagattttttttttagtttttcaaagacaagtttttgctstgtttcccaggctggtctcaaactcctggcctcaaatgatccttctgctttaacctcagtgctggaattacatgcatgaggcacgatgcccagctgaaaagttgggtttgtgaacaaataaacataattcgcaaaccattagctagaaaatgtaagaaaaaaagagagaagacctatacaaaaatcagaaacaagaaaggagacattataactgataccacagaaagacaaaggatcattaaagacttctataaacaactat

SEQ ID NO: 558124 - DNA, 661 bp, Homo sapiens
aactcaaacaattccacagcaaaacattcaaataatccaatttaaaaataggcaaatgatctgaacagacacttctcaaaagaagacataaaaatggccacgtatataaatgacactcaatatctytattcctaagataaatgcaaatgaaaccaaaataaattatctcaccccaggtagactggcttttatcaataagacaaaaaagaataaatactggtgcgggtgcagagaaaagggaactcatacactgttggtggaaatggaaagtactacagccattatggaaagcaaaatgaagctttcttgaaaacctaaaactagaactatcatataatctagcaatcccactactgggtattcaaagaaaaggaacccagtatgttaaagaggtatctaccctcctatgtttattgcggagctattcataatagccaagatatggaatcaacctaagtgtctatcagtgaatgaatggatttaaaacatgtagtaactaaacacaatggaatacagttcatccataagaaagaataaaattctgccattcatagcaacatgggtgagccattatgttaagtgaaataaagccaggaaaagaaaattaaacacagcatgttctcactcatttgtggatgctaagaaaacttagttaatctca

SEQ ID NO: 558125 - DNA, 661 bp, Homo sapiens
aactcaaacaattccacagcaaaacattcaaataatccaatttaaaaataggcaaatgatctgaacagacacttctcaaaagaagacataaaaatggccacgtatataaatgacactcaatatctttattcctaagataaatgcaaatgaaaccaaaataaattatctcaccccaggtagactggcttttatcaataagacaaaaaagaataaatactggtgcgggtgcagagaaaagggaactcatacactgttggtggaaatggaaagtactacagccattatggaaagcaaaatgaagctttcttgaaaacctaaaactagaactatcatataatctagcaatcccactactgggtattcaaagaaaaggaacscagtatgttaaagaggtatctaccctcctatgtttattgcggagctattcataatagccaagatatggaatcaacctaagtgtctatcagtgaatgaatggatttaaaacatgtagtaactaaacacaatggaatacagttcatccataagaaagaataaaattctgccattcatagcaacatgggtgagccattatgttaagtgaaataaagccaggaaaagaaaattaaacacagcatgttctcactcatttgtggatgctaagaaaacttagttaatctca

SEQ ID NO: 558126 - DNA, 661 bp, Homo sapiens
aactcaaacaattccacagcaaaacattcaaataatccaatttaaaaataggcaaatgatctgaacagacacttctcaaaagaagacataaaaatggccacgtatataaatgacactcaatatctttattcctaagataaatgcaaatgaaaccaaaataaattatctcaccccaggtagactggcttttatcaataagacaaaaaagaataaatactggtgcgggtgcagagaaaagggaactcatacactgttggtggaaatggaaagtactacagccattatggaaagcaaaatgaagctttcttgaaaacctaaaactagaactatcatataatctagcaatcccactactgggtattcaaagaaaaggaacccagtatgttaaagaggtatctaccctcctatgtttattgyggagctattcataatagccaagatatggaatcaacctaagtgtctatcagtgaatgaatggatttaaaacatgtagtaactaaacacaatggaatacagttcatccataagaaagaataaaattctgccattcatagcaacatgggtgagccattatgttaagtgaaataaagccaggaaaagaaaattaaacacagcatgttctcactcatttgtggatgctaagaaaacttagttaatctca

SEQ ID NO: 558127 - DNA, 661 bp, Homo sapiens
aactcaaacaattccacagcaaaacattcaaataatccaatttaaaaataggcaaatgatctgaacagacacttctcaaaagaagacataaaaatggccacgtatataaatgacactcaatatctttattcctaagataaatgcaaatgaaaccaaaataaattatctcaccccaggtagactggcttttatcaataagacaaaaaagaataaatactggtgcgggtgcagagaaaagggaactcatacactgttggtggaaatggaaagtactacagccattatggaaagcaaaatgaagctttcttgaaaacctaaaactagaactatcatataatctagcaatcccactactgggtattcaaagaaaaggaacccagtatgttaaagaggtatctaccctcctatgtttattgcggagctattcataatagccaagatatggaatcaacctaagtgtctatcagtgaatgaatggatttaaaacatgtagtaactaaacacaatggaatacagttcatccataagaaagaataaaattctgccattcatagcaacatgggtragccattatgttaagtgaaataaagccaggaaaagaaaattaaacacagcatgttctcactcatttgtggatgctaagaaaacttagttaatctca

SEQ ID NO: 558128 - DNA, 526 bp, Homo sapiens
caaaaaaaaaaaaagaaaaaattaacattttcccagctagatttcagaactctcattgactgctgacttctgtatgtctccttttttcttctattaagtcagagtgcctatgatgattattctatgcctgtctcatcattttatgatggatgtgtgaaagataggtaagttgtttctttagtttcaaaggacttcaaatcaagacaaactgtactcaaggagttgtatttgcagcgagacctgatttaaacgacaagattctagacttcaaactaatgctgtgatgagatgaagctttggtagacttaggatacaattagtgaggtgtgtgcattacttggagccagagagcagtctacagtaactggcctctaagaaggaccccaatgracattacctcctggtattcatgcactggtgtagtttcccctctcagtgtaccacggttcatctatatgaccagtagaatatgccagtagtgatggtatgtcatttctaagatgacactttttcgcactcaagggtt

SEQ ID NO: 558129 - DNA, 526 bp, Homo sapiens
caaaaaaaaaaaaagaaaaaattaacattttcccagctagatttcagaactctcattgactgctgacttctgtatgtctccttttttcttctattaagtcagagtgcctatgatgattattctatgcctgtctcatcattttatgatggatgtgtgaaagataggtaagttgtttctttagtttcaaaggacttcaaatcaagacaaactgtactcaaggagttgtatttgcagcgagacctgatttaaacgacaagattctagacttcaaactaatgctgtgatgagatgaagctttggtagacttaggatacaattagtgaggtgtgtgcattacttggagccagagagcagtctacagtaactggcctctaagaaggaccccaatgaacattacctcctggtattcatgcactggtgtagtttccccyctcagtgtaccacggttcatctatatgaccagtagaatatgccagtagtgatggtatgtcatttctaagatgacactttttcgcactcaagggtt

SEQ ID NO: 558130 - DNA, 619 bp, Homo sapiens
tgggtaacgtgatgcctccagctttattgtcttttggtwccatatgaattttaaaatagtgttttacagttctgtgaagaatgtcattggagtttgatatgaataccattgaatctgtaaaacgctttgggcagtatggctattttaatggtattgattctttctaccatgagcatgggatgttttctcatttgtttgtgatttatttgagcagtgttttgtaattctcattgtggagatctttcacttccctggttagctgtattgctgggtattttattctttttgaggcaattgtgaatgggatcgcatccctgatttcgcttttggcttgtcttttgttggcgtatataggaatgctagggattttttatgttgattttgtatcttgaaactttgctgaagttgtttgtcagctgaagaagcttttgggccaggattatggggttttctagacataaacttatgtcacaaagactcaatgaaaaatttcaatgagtctcttcaaaaatgtataggttctcccggcccctataaaaaggggatataaaaatataaatggctttccatttgcttggtagatcttcctccatccctttattttgagcctatgtgtgtc

SEQ ID NO: 558131 - DNA, 619 bp, Homo sapiens
tgggtaacgtgatgcctccagctttattgtcttttggtaccatatgaattttaaaatagtgttttacagttctgtgaagaatgtcattggagtttgatatgaatascattgaatctgtaaaacgctttgggcagtatggctattttaatggtattgattctttctaccatgagcatgggatgttttctcatttgtttgtgatttatttgagcagtgttttgtaattctcattgtggagatctttcacttccctggttagctgtattgctgggtattttattctttttgaggcaattgtgaatgggatcgcatccctgatttcgcttttggcttgtcttttgttggcgtatataggaatgctagggattttttatgttgattttgtatcttgaaactttgctgaagttgtttgtcagctgaagaagcttttgggccaggattatggggttttctagacataaacttatgtcacaaagactcaatgaaaaatttcaatgagtctcttcaaaaatgtataggttctcccggcccctataaaaaggggatataaaaatataaatggctttccatttgcttggtagatcttcctccatccctttattttgagcctatgtgtgtc

SEQ ID NO: 558132 - DNA, 646 bp, Homo sapiens
tttcagaggcttaaagtatttatctatataattgggaatgtagactgtcctggatttacaactgtccgacttacaatttttccactttgcaatgacttaaaagcaatgcaaatccagtagaagccatacttcaagtacacatataactgaattattcattcagtttcagtccagcattccataaatttcatgagacagtcaacacctcattataaaatcagccttgtgttagatgattttgcccaactgcaggctaacataagttttctgggcatgtttaagttactccaggctcagctatgatgtttggtaggttaggtgtattaaatgcattttccacttaatatattctcatcctgcaatgtgwttattgggatgtcaccccatcataagtcgagatacatctgtacatgcttctacttgctttttttcttaattttgaagaaggctcaataatttctgtgctgggtcctaagcacatatggaatggtgatcagattaaaaattatcactcataaaagactgagaaaaatttcctcttattctcattggttttctgagcttccttccgcccaagaaaagcaataaatgcactgagaaagagtgttcacaggtgttatagggggagaagtgggaggtgggacac

SEQ ID NO: 558133 - DNA, 431 bp, Homo sapiens
cacacaactccagtaaacacactgcgtgctcaccgcccaactgctagcagaccactgcacacgtggacagaccactgcacacgtggacagcccactcccagggaagaatcaggggagaagggatgtacaaccctggaactatgtcaacagataaaaccccaagtcaaaggtcaaacagtgcacttgatctctcaagtcgyccgctggccctcttccaagtgtactttacttcctcttagtcctgctctaaagtttgttgttgttgttttgagagggagtcttgctctgttgcccaggctggagtgcagcggcgcgatctcagctcactgcgaactctgcctcccgtgttcaagtgattctcctgcctcagcctcatgagtagctgggattacaggtacctgccaccatgcccagctaattttttttttttt

SEQ ID NO: 558134 - DNA, 431 bp, Homo sapiens
cacacaactccagtaaacacactgcgtgctcaccgcccaactgctagcagaccactgcacacgtggacagaccactgcacacgtggacagcccactcccagggaagaatcaggggagaagggatgtacaaccctggaactatgtcaacagataaaaccccaagtcaaaggtcaaacagtgcacttgatctctcaagtcgtccsctggccctcttccaagtgtactttacttcctcttagtcctgctctaaagtttgttgttgttgttttgagagggagtcttgctctgttgcccaggctggagtgcagcggcgcgatctcagctcactgcgaactctgcctcccgtgttcaagtgattctcctgcctcagcctcatgagtagctgggattacaggtacctgccaccatgcccagctaattttttttttttt

SEQ ID NO: 558135 - DNA, 431 bp, Homo sapiens
cacacaactccagtaaacacactgcgtgctcaccgcccaactgctagcagaccactgcacacgtggacagaccactgcacacgtggacagcccactcccagggaagaatcaggggagaagggatgtacaaccctggaactatgtcaacagataaaaccccaagtcaaaggtcaaacagtgcacttgatctctcaagtcgtccgctggccctcttccaagtgtactttacttcctcttagtccygctctaaagtttgttgttgttgttttgagagggagtcttgctctgttgcccaggctggagtgcagcggcgcgatctcagctcactgcgaactctgcctcccgtgttcaagtgattctcctgcctcagcctcatgagtagctgggattacaggtacctgccaccatgcccagctaattttttttttttt

SEQ ID NO: 558136 - DNA, 431 bp, Homo sapiens
cacacaactccagtaaacacactgcgtgctcaccgcccaactgctagcagaccactgcacacgtggacagaccactgcacacgtggacagcccactcccagggaagaatcaggggagaagggatgtacaaccctggaactatgtcaacagataaaaccccaagtcaaaggtcaaacagtgcacttgatctctcaagtcgtccgctggccctcttccaagtgtactttacttcctcttagtcctgctctaaagtttgttgttgttgttttgagagggagtcttgctctgttgcccaggctggagtgcagcggcgcgatctcagctcactgcgaactctgcctccygtgttcaagtgattctcctgcctcagcctcatgagtagctgggattacaggtacctgccaccatgcccagctaattttttttttttt

SEQ ID NO: 558137 - DNA, 597 bp, Homo sapiens
aacagaatcagaaggatcacattaaaaaaaaaaaaaagacataggagggaatgaaagctgtcactctaatgtgggtttttaaaagtattatccttacccttgttttataggcacataacgtaaccgttcaaatagctgttctagttttgttacaaaaaaatagcagttccccaccctttcattccctcctccccagacaggccatttacaactcgtatctctaaatagcatgcttatattgttactttatgatttttcagttttaggcacatccattaattttctaaaagrgaaaatggggatttgtgtctctttccctccctgtatctatcttacgaatacttccctatgcccccatcttttaatataattagattgctttgattagagcaatacagcatgtttacattattttgtagaaaagagctattcagagttgaggtatgtaataaaccatctgttgttataactgaaaatatatattattccttttcctttacgacgttttgttttccttagaccaaatacatttttgttttctgttttgcttggttttttacattcatacacattttcacctacaaacactccaacact

SEQ ID NO: 558138 - DNA, 603 bp, Homo sapiens
aaactctagaattaagagtcaggtatgtggggtcttgtttgcaactctgccactaacactaggggtgagtttttagacatatactttgggtaagaagtcctcactcaaggtaagaaaactgggttttaatctgatcattgctattaactcaccatagggcatttgccaactcatgagcccttgtttctttatttacaaaataagaatatagaataggatgatatataagcccttagagctgtaaaattctaccttctttttttgtttttttttttttgccaggggggtttgtttgtttgtttttgagacagagtcttgctttgtcacctaggctaccatacagtggtgcaatcttagctcacaccaacctccacctcctgggctcaaatgatcctcctacctcagcctcctgagtagctgggactacaggtgcacaccagcacatccggctaattttttgtagagacggggcttcaccatgttgcccaggctggtctcaatctcctgaactcaagtgatctgcctgcctcagcctcccaaagtgctgggattacaggcaagagccactgcrcctggccctaccttagtttattttaaccactg

SEQ ID NO: 558139 - DNA, 531 bp, Homo sapiens
agaagaaacttttgctgtttttctttctcctctttctcagagttcttattaactccaacttaatctccctttcttaactatctgtttcttaaacaagaaaaaaaaaaagktttgatcacctctgaaaaccagcatccaacactctaaacccacagcatgtaatgtgattgaagccatggtcccaaggcattttgttggatatgaaaatggaaacaggccaaaacacctgggcagatcccagggtgtgatctctcaggagacctggtggccagggtgatgtcccacccttcgccaggccaggatgagcatctgcccacaaaagcaaggaaggagctgcagccacttaggtttcaaagttccttgaaaaatccttcaggaacatagaagaacaatcttatgaacatctgcagcttctcagaaaagctgatgtgcatattccctcgtctagtgtagattgttttgttttgtttttaacaataataccgttattggccttcttgacagtgtctgacacatggttctgttcaaaaa

SEQ ID NO: 558140 - DNA, 531 bp, Homo sapiens
agaagaaacttttgctgtttttctttctcctctttctcagagttcttattaactccaacttaatctccctttcttaactatctgtttcttaaacaagaaaaaaaaaaagttttgatcacctctgaaaaccagcatccaacactctaaacycacagcatgtaatgtgattgaagccatggtcccaaggcattttgttggatatgaaaatggaaacaggccaaaacacctgggcagatcccagggtgtgatctctcaggagacctggtggccagggtgatgtcccacccttcgccaggccaggatgagcatctgcccacaaaagcaaggaaggagctgcagccacttaggtttcaaagttccttgaaaaatccttcaggaacatagaagaacaatcttatgaacatctgcagcttctcagaaaagctgatgtgcatattccctcgtctagtgtagattgttttgttttgtttttaacaataataccgttattggccttcttgacagtgtctgacacatggttctgttcaaaaa

SEQ ID NO: 558141 - DNA, 531 bp, Homo sapiens
agaagaaacttttgctgtttttctttctcctctttctcagagttcttattaactccaacttaatctccctttcttaactatctgtttcttaaacaagaaaaaaaaaaagttttgatcacctctgaaaaccagcatccaacactctaaacccacagcatgtaatgtgattgaagccatggtcccaasgcattttgttggatatgaaaatggaaacaggccaaaacacctgggcagatcccagggtgtgatctctcaggagacctggtggccagggtgatgtcccacccttcgccaggccaggatgagcatctgcccacaaaagcaaggaaggagctgcagccacttaggtttcaaagttccttgaaaaatccttcaggaacatagaagaacaatcttatgaacatctgcagcttctcagaaaagctgatgtgcatattccctcgtctagtgtagattgttttgttttgtttttaacaataataccgttattggccttcttgacagtgtctgacacatggttctgttcaaaaa

SEQ ID NO: 558142 - DNA, 587 bp, Homo sapiens
tcattcttttttatagctccatggtgtctatataccacattttctttatctaaactcttattgatgagcattgaggttgattctatgtctttgccattgtgcatattgctgcaatgaacatttgtktgcatgtgtctttatggtagaatgatatattttcttctgggtatatatgcagtaatgcgattgctggttggaatggtagttctgcttttatctctttgaggaattgccatgctgctttccacaatagttgaactaacttacactcccactaacagtgtgtgtttccttttctccacaacctgccagcatctgttattttttgacattttaatagtagccattttaactggtatgaaattatatttcattgtggttttaatttgcatttctctaatgatcagtgatattgagttttttttttttttcacatgcttgttggctacatgtacgtcttcttttgaaaagtgtctgttcatgtactttgcccacattttagtggggttgtttttctcttgtaaatttgtttaaattccttataggtgctggattttagacatttgtcagacgcatagtttgcaaat

SEQ ID NO: 558143 - DNA, 542 bp, Homo sapiens
gatttctcagacaatgttgtgtggattgttgtaggcattttgcttgttactcataaatgcactgtctagacacatcgagaagttagcatccatgaggctatgcttgaaaaatggaactcctagagctgatggatacatatttcccccgttgtttcacttcagtgaatggtcatatagtattccatcrcctaacttaataatgtgttctagattttactctctctccctatagcacccatcctgtttcttattcttactccacaatacactcccaacttaaacacacagtctcttctttaggtgttgggggttgggagttattacaagatgacatggtgtatgcatttatttctttgtctacgttgattgcactgatttacagtctcaccagcagttcataaaatccttccttgcagctaagatatgggcacaagactaaaatttatatctttagctgatatctcattcctgaacactcatctcatttgcgactgccttgaatatcaaataggcatctcaaccttagtaagtaaaagagaatt

SEQ ID NO: 558144 - DNA, 542 bp, Homo sapiens
gatttctcagacaatgttgtgtggattgttgtaggcattttgcttgttactcataaatgcactgtctagacacatcgagaagttagcatccatgaggctatgcttgaaaaatggaactcctagagctgatggatacatatttcccccgttgtttcacttcagtgaatggtcatatagtattccatcacctaacttaataatgtgttctagattttactctctctccctatagcacccatcctgtttcttattcttactccacaatacactcccaacttaaacacacagtctcttctttaggtgttgggggttgggagttattacaagatgacatggtgtatgcatttatttctttgtctacgttgattgcactgatttacagtctcaccagcagttcataaaatccttccttgcagctaagatatgggcacaagactaaaatttatatctttagctgayatctcattcctgaacactcatctcatttgcgactgccttgaatatcaaataggcatctcaaccttagtaagtaaaagagaatt

SEQ ID NO: 558145 - DNA, 596 bp, Homo sapiens
gaggtaaaatatttctacaataagaactacaaaagatgggtggaagaaacctgaaataaaacaaactaatggaaaaatatcccatgttcatggattaaaaaaaattaaaaatgaccatggtgtccaaagcaatctaaagattcagtgcaatttctatcaaactaccaatgtcatttttcacagaattagaaaacaacaatcccaaagtgtatatgaaattctgaattgaaaaaatgacccagatagccaaagcaattctaagcaaaaagaacaaagctggagtcagcacttcaccccatttcaaattatactacaaacctatagtaacaasaacagcatggtaccaatacaaaaacagatacatagtttaataaaattaaatagagaaccaagaaataaagccacatacctacaaccaactaatcttcaacaaagcgtgcacaaataaacaatgtggaaaggatacctttttcaataaattgtactagaaaaaatggatatccgtatacacaagaataaaactggattcctatatctcaccatatataaaaattaactcaagattgattaaatactcaaatgtaaaaacctataca

SEQ ID NO: 558146 - DNA, 596 bp, Homo sapiens
gaggtaaaatatttctacaataagaactacaaaagatgggtggaagaaacctgaaataaaacaaactaatggaaaaatatcccatgttcatggattaaaaaaaattaaaaatgaccatggtgtccaaagcaatctaaagattcagtgcaatttctatcaaactaccaatgtcatttttcacagaattagaaaacaacaatcccaaagtgtatatgaaattctgaattgaaaaaatgacccagatagccaaagcaattctaagcaaaaagaacaaagctggagtcagcacttcaccccatttcaaattatactacaaacctatagtaacaacaacagcatggtaccaatacaaaaacagatacatagtttaataaaattaaatagagaaccaagaaataaagccacatacctacaaccaactaatcttcaacaaagcgtgcacaaataaacaatgtggaaaggatacctttttcaataaattgtactagaaaaaatggatatccgtatacacaagartaaaactggattcctatatctcaccatatataaaaattaactcaagattgattaaatactcaaatgtaaaaacctataca

SEQ ID NO: 558147 - DNA, 403 bp, Homo sapiens
gatccaaactttgaagaaggatggggaagtgtttaggaaagtgcttccctgtgtaaaacttagctggtaagtaccatatttcactgaaattgctgttataataattgaaacrgattattattggaaaaacaacatcagcaaaactaaaccctagatgagtttaaataagtgccagccatttttctcctgtggggatttagagttgaagtgggtatcttcgattacttttctttatcctcattcttattcttataatttttcctaataagtcacctaagaagggcatttaaataagtgctagccttttttctcctatggggatttagagttgaagtggatgtcttcaattacttttcttctctattctcgttcttattcttataatttttcctaataagtcacc

SEQ ID NO: 558148 - DNA, 600 bp, Homo sapiens
atcaattaaacttcttttctttataaattacccagtctcaggtaattctttacagcagagtgaaaatggactaatacatcaagttttatgatgtaaaataatacactgaagtatgtttggaccctggttagtcttggaaattccatctataagttctgtctgtaacttaccttaataagaaaccaacgatacatggagaaggaaaaattgtaaaaaccagtggatgatcagtaagaaaactaattttttttttttaatctcggaaataatgcaactctatggtcaataacattcatgtgtcagttttaagaaaatgttctaygaacacgtacgcacacacataattccatggactccaagaatcattaggagaaccttaataataataataataaattagtagcttctgaaaagcaaccaaactttaaaagaaatattcaacatttaaggcttcaatcaatctctacttaagcacctgctttcataatcctgaaactcatttaaaaaaaaaaaaaaaaaaaaactttctgacctttaaaaatgcaacagcctgaaatcaatttatttcagtcaggcattcaatagtatatacttgctaaa

SEQ ID NO: 558149 - DNA, 481 bp, Homo sapiens
aaaggccaataacacatgttcttattaatatatggaagccagaaaagttgatctcatagaagcagagagtagaatagtggttattagaggctgggaaagcgggagggatagggagaggttagttaatggttacaaattacagctggataggagaaataatttctagtgttctaagggctatagggtgactatagttaacaataatttactgtatatattctttttcttccttttttaattatactctaagttctagggtacatgtgcacaatgtgcaggtttgayacataggtatacatgcaccatgttggtttgctgcatccatcaactcatcatttacattaggtatttctcctaatgctatccctcccccagcccacagccctcaacaggctctggtgtgtgatgttcacctccctgtgtccaagtgatctcattgttcaattctatctatgagtgagaacatgcggtgtttcgtttt

SEQ ID NO: 558150 - DNA, 578 bp, Homo sapiens
  misc_feature 1, 2, 3, 4, 5, 6, 7, 8, 9, 10, 11, 12, 13: n = A,T,C or G
nnnnnnnnnnnnnacaccttatgaacagtgtgctaaactcattcttgttttcatggtagcagaaatgaaaataataatgtaaatcatcaaatatgaaaaaatacagaatgtaatatctactatagacattcaaaatacatttgtaatctctgatacttgtgtaagataacctccaagtgttagtgtgattttgggaaaacattttaactttaacctaaataaagccaattagtgaagatatacctgattttataaatacagttgtgcattgcttaatgacagggaaatgttctgagaaatgcttcattaggcaatttcatcactgtacaaacatcatagagtgacttcacaaacctggatggtrcagcctgctacacacctaggctataaggtgtgaactattgctcctaggctataaacctacacagcatgttactgtactgaatattgtgggcaactataacattatggtaagtatttgtgtatcaaaacatacctaaatatagaaaaaacacagtgaaactatcttttaaaagataaaaaatggtacacctgtatagggcacttaccatgaatgg

SEQ ID NO: 558151 - DNA, 605 bp, Homo sapiens
ctctatgactgactgaccaataaaatatggttgaaaggacactgccagtttccaggaccaggccttaggagattagcagtttccattttctctctcttgaacatttgcttctagaaccagctgccatgctgtgaggaagcctaagcagtccatggagaggcctaggtggaaaggaattgaagtcctttgttaacagctcccaccaatagccagcaacaacttgtggttgctcttggaaatgaatcctctatccgcatttgagctaccccagccaaagctgcatgagttgttgtgctaagcattgccccaattttaaattcataagctttttttggtgtggtttgttatckaacaattaataactggaatgccactttttatgactctatcttatagaaataagaactccagaaaacaagaatggacgtatatgggaatgtttataacaatgtccttcatgatttaaaaaaaagaaagaaaaaataaactagaaacaacttgaatgtccattctgtacattatggttaaaaagtattgcatagctccattgtggactatatttggctatttttttgtttatttttgagacaggatctcactctgtt

SEQ ID NO: 558152 - DNA, 533 bp, Homo sapiens
aaaatgtgtaaaaaacatctcagatccaaataaactggttaaaacacaaacacttgtgcatacacatgaacatgcatgcacacacatgaccacatgtggcatacatgttcacatgcacattcataggcaccttctgaggacctctcattccaataggtcacaagagaatcacagccctaaacctcttaggctttttcaaatgtcatagtctattatacataagagttcattcattctaccatacatgcctctcaacccacttctgcatgatgaggaaggttgaagttacaaatgaagatggtggaggctttctcaaagccttctgttcatgtttttatccagattaaccgtttaatccaaaaatctctccactcatcatcagctatgaaaactctatccattctgcagattctagttttttttattgttttgattttttgttgttgttgttttgttttgttttttgagacagagtctcgctctgtcacccaggctkgagtgcagtggcacaaactcagctcactgcaacctcc

SEQ ID NO: 558153 - DNA, 344 bp, Homo sapiens
gcccaggaatttgaaaccagccggggcaacatgatgacaacccaagtgttcacactgctgcactccagcctgagtgacagagtgagactttgtcccaaaaaaaataaataaagaaaataaaacacagatgcctatgcccactctagatctactccatcaggatctccaggtgtggggccaagcacrgacagttattttagatccataggggattctgatgatgcctctgcacttgctattctcataaattgatgctgaccctgaaattggatttgtctttcttgaaaaatactggtattcagggttttaagttattcatgatcagacttatagaaagataaatc

SEQ ID NO: 558154 - DNA, 628 bp, Homo sapiens
gcccaggaatttgaaaccagccggggcaacatgatgacaacccaagtgttcacactgctgcactccagcctgagtgacagagtgagactttgtcccaaaaaaaataaataaagaaaataaaacacagatgcctatgcccactctagatctactccatcaggatctccaggtgtggggccaagcacggacagttattttagatccataggggattctgatgatgcctctgcacttgctattctcataaattgatgctgaccctgaaattggatttrtctttcttgaaaaatactggtattcagggttttaagttattcatgatcagacttatagaaagataaatcaaactgatacggcctcttttgaatagagaaagaaggcagcccttcattggaagggacactgtgcctctaaacataggcacaggaggctggagttgcactggggtggacatgtcaccagggtggagcacatcgtgtgtcaggcacctggaacttcaccatacatgcagagactgtgacagcgtgtataagatcatgacagccttactccatctatgctgccaagcttaattctcaatgcagcttaggatgctaagcagaattttgctgctcaaagagtttcagat

SEQ ID NO: 558155 - DNA, 628 bp, Homo sapiens
gcccaggaatttgaaaccagccggggcaacatgatgacaacccaagtgttcacactgctgcactccagcctgagtgacagagtgagactttgtcccaaaaaaaataaataaagaaaataaaacacagatgcctatgcccactctagatctactccatcaggatctccaggtgtggggccaagcacggacagttattttagatccataggggattctgatgatgcctctgcacttgctattctcataaattgatgctgaccctgaaattggatttgtctttcttgaaaaatactggtattcagggttttaagttattcatgatcagacttatagaaagataaatcaaactgatayggcctcttttgaatagagaaagaaggcagcccttcattggaagggacactgtgcctctaaacataggcacaggaggctggagttgcactggggtggacatgtcaccagggtggagcacatcgtgtgtcaggcacctggaacttcaccatacatgcagagactgtgacagcgtgtataagatcatgacagccttactccatctatgctgccaagcttaattctcaatgcagcttaggatgctaagcagaattttgctgctcaaagagtttcagat

SEQ ID NO: 558156 - DNA, 555 bp, Homo sapiens
agaaagaaggcagcccttcattggaagggacactgtgcctctaaacataggcacaggaggctggagttgcactggggtggacatgtcaccagggtggagcacatcgtgtgtcaggcacctggaacttcaccatacatgcagagactgtgacagcgtgtataagatcatgacagccttactccatctatgctgccaagcttaattctcaatgcagcttaggatgctragcagaattttgctgctcaaagagtttcagatgataagaaaaacttcttcatagcagctatatcaactgtgatggttaatactgagtatcaacttgattggattgaaggatgcaaagtattgttcctgggtgtgtctgtgagggcgttgccaaaggagattaacattcgagtcagtggactggcagacccaccctcaatctgggtaggcaccgtctaatcagctgccagcacagccagaataaaagcaggcagaatatggaaagactagactggttcagttttctggcctccatctttcccctggggctgaatgcttcctgccctggaa

SEQ ID NO: 558157 - DNA, 555 bp, Homo sapiens
agaaagaaggcagcccttcattggaagggacactgtgcctctaaacataggcacaggaggctggagttgcactggggtggacatgtcaccagggtggagcacatcgtgtgtcaggcacctggaacttcaccatacatgcagagactgtgacagcgtgtataagatcatgacagccttactccatctatgctgccaagcttaattctcaatgcagcttaggatgctaagcagaattttgctgctcaaagagtttcagatgataagaaaaacttcttcatagcagctatatcaactgtgatggttaatactgagtatcaacttgattggattgaaggatgcaaagtattgttcctgggtgtgtctgtgagggcgttgccaaaggagattaacattcgagtcagtggactggcagacccaccctcaatctgggtaggcaccgtctaatcagctgccagcacagccagaataaaagcaggcagaatatggaaagactagactggttyagttttctggcctccatctttcccctggggctgaatgcttcctgccctggaa

SEQ ID NO: 558158 - DNA, 477 bp, Homo sapiens
aatttctaagcctaaaataaaccaaatgaactcaattactttttttaaaccataaataaaatgtcatgttacagaggtgagataaattctgacaatgtcttaagcctggtgaaaactcttcaaaaattctaaaagttccaaagtcataagtcattttaaaattacgatgagtttgaggattgccaagggccatgagtctgtgtgagctgagaattgtaccagataatataacatttaattagttccaggaagttctgaactcaaaaagaacattcaggtcagaaagaagggagtagttactaatccctagggaaagaaaaagttgagactgacattttttttcaggctttctaaaattaaccagctttcccagagtcagcacaggtgttattgtacttggaggttaaggtgctaagtctcctattcatcacggyatctttcattgcagtcttaatttaatcacatatatgaaaacaa

SEQ ID NO: 558159 - DNA, 399 bp, Homo sapiens
ttaatattgttaaaatgtccatcttaatcaagtgatttataaattaaatgcaatccctatcaaaatatcagtgatatttttcacagaaatagaaaaaaaaatcctacagttcatatggaaccacgaaagatcctgaagattcaaggcaattttgagtaaaaataagaaaactagaggcatcacactacctaacctcataatataccacaaagtcatagcaatcaaagcagcatggtactgacataaaaacagacacatagaccagtggaagagactcagaatagagaacccagaaataaattcacatatctaaagtcaactcatttttgacaaagytaccaggagcacatactgagaaaggacagtttctttaataactggtgctggaaaaattagata

SEQ ID NO: 558160 - DNA, 630 bp, Homo sapiens
tatcttcagcaaggagtggagtccaccctcgtgaaaccgttttctattttcatgcataagaaacaactgttcatcagttcaagttttaccatgagattgcagcaattcaatcacgtcttcagaacccacttttaattctagttctcttgctatttctatcacatctgcagttacttccttaactcaagttgctagaaaataatgcagctagtgactttacattgaacccttcaaagtaaggggttggaatccatttcttccacactcctgttaaggttgctattttgacctcctcccatgagttatgaatattcttaatgtcatttagaatgatgaatcctttccaggaggtttttaatttccattaaaggaattgttctctatatctatggcaactatagtcttacaaaatgtgtttttcaaataataagagcttgagaatcaaaattactccttgatccatgggctgcagaatggatattgtgttagcaggcatgaaaacaacattaatmtccttgaacacatccatcagcgttcttgggttaacaggtgcattgtcaatgaacagtaatattttgaaaagaatcttttttcctgagaagtaggtctcaacagtaggcttaaaatatt

SEQ ID NO: 558161 - DNA, 630 bp, Homo sapiens
tatcttcagcaaggagtggagtccaccctcgtgaaaccgttttctattttcatgcataagaaacaactgttcatcagttcaagttttaccatgagattgcagcaattcaatcacgtcttcagaacccacttttaattctagttctcttgctatttctatcacatctgcagttacttccttaactcaagttgctagaaaataatgcagctagtgactttacattgaacccttcaaagtaaggggttggaatccatttcttccacactcctgttaaggttgctattttgacctcctcccatgagttatgaatattcttaatgtcatttagaatgatgaatcctttccaggaggtttttaatttccattaaaggaattgttctctatatctatggcaactatagtcttacaaaatgtgtttttcaaataataagagcttgagaatcaaaattactccttgatccatgggctgcagaatggatattgtgttagcaggcatgaaaacaacattaatatccttgaacacatccatcagmgttcttgggttaacaggtgcattgtcaatgaacagtaatattttgaaaagaatcttttttcctgagaagtaggtctcaacagtaggcttaaaatatt

SEQ ID NO: 558162 - DNA, 630 bp, Homo sapiens
tatcttcagcaaggagtggagtccaccctcgtgaaaccgttttctattttcatgcataagaaacaactgttcatcagttcaagttttaccatgagattgcagcaattcaatcacgtcttcagaacccacttttaattctagttctcttgctatttctatcacatctgcagttacttccttaactcaagttgctagaaaataatgcagctagtgactttacattgaacccttcaaagtaaggggttggaatccatttcttccacactcctgttaaggttgctattttgacctcctcccatgagttatgaatattcttaatgtcatttagaatgatgaatcctttccaggaggtttttaatttccattaaaggaattgttctctatatctatggcaactatagtcttacaaaatgtgtttttcaaataataagagcttgagaatcaaaattactccttgatccatgggctgcagaatggatattgtgttagcaggcatgaaaacaacattaatatccttgaacacatccatcagcgttcttgggtkaacaggtgcattgtcaatgaacagtaatattttgaaaagaatcttttttcctgagaagtaggtctcaacagtaggcttaaaatatt

SEQ ID NO: 558163 - DNA, 630 bp, Homo sapiens
tatcttcagcaaggagtggagtccaccctcgtgaaaccgttttctattttcatgcataagaaacaactgttcatcagttcaagttttaccatgagattgcagcaattcaatcacgtcttcagaacccacttttaattctagttctcttgctatttctatcacatctgcagttacttccttaactcaagttgctagaaaataatgcagctagtgactttacattgaacccttcaaagtaaggggttggaatccatttcttccacactcctgttaaggttgctattttgacctcctcccatgagttatgaatattcttaatgtcatttagaatgatgaatcctttccaggaggtttttaatttccattaaaggaattgttctctatatctatggcaactatagtcttacaaaatgtgtttttcaaataataagagcttgagaatcaaaattactccttgatccatgggctgcagaatggatattgtgttagcaggcatgaaaacaacattaatatccttgaacacatccatcagcgttcttgggttaacaggtgcattgtcaatgmacagtaatattttgaaaagaatcttttttcctgagaagtaggtctcaacagtaggcttaaaatatt

SEQ ID NO: 558164 - DNA, 507 bp, Homo sapiens
ttactgaatgtgcttccagaaagcatctctgaaggttttatgcatgaagagtttgtgctgggtcttttgccttttgaatgataggaattgctgaagctatatatccctgaaaatgtccagtttaggaatcatcagggataacacatcttagcacatttaggtaaagctattcatattcaaaaatgagtttggggggaattgggcttactcagtttacctctgaccaaatttaacaaataggaggagctgccacaaatttggcactgagctggctatggcttcactgaggatcactcctttctgaacactgacactctaaatgatactgtagatgtttctctctactaaactctaagttcctgatgatagggacygtgagaaatgtgtcctagtctttcttaaccttggaccctcattgcctgaaacaatccctagaatttaacagatgctcaataaatgttcttgggccaaaaatggacaaatatctattgcatggatagatggttg

SEQ ID NO: 558165 - DNA, 596 bp, Homo sapiens
gaataccaaatgtgttatgtatgtcaaagattacctgctaagggagaattcagagtgttttactgtcaaattcagttctaagatgtttattattcctgcaaatccagkataacaatacctagtatttattgagcatttaccaggtataagacattataccaagcactgtaaaatacattaattcatctaatcaccaatgaatggtaggtattattattattattattatttttgagacggagtctcgctctgttgcccaggctggagtgcagtggcgcgatctcggctcactgcaagctccacctcctgggttcatgccattctcctgcctcagcctcccaagtagctgggactacaggtgcccgccaccacgcccagctaattttttgtattttttagagatggggtttcactgtgttagccaggatggtctagatctcctgacctcgtgatccacccacctcggcctcccaaagtgctgggattacaggcgtaagccaccgtacccggccaatggtgggtattattttcttcatgttacaggaaagaaaaccgaggcttggagaagtgatgtaacctgtccaaggtcaggtaaa

SEQ ID NO: 558166 - DNA, 596 bp, Homo sapiens
gaataccaaatgtgttatgtatgtcaaagattacctgctaagggagaattcagagtgttttactgtcaaattcagttctaagatgtttattattcctgcaaatccagtataacaatacctagtatttattgagcatttaccaggtataagacattataccaagcactgtaaaatacattaattcatctaatcaccaatgaatggtaggtattattattattattattatttttgagacggagtctcgctctgttgcccaggctggagtgcagtggcgcgatctcggctcactgcaagctccacctcctgggttcatgccattctcctgcctcagcctcccaagtagctgggactacaggtgcccgccaccacgcccagctaattttttgtattttttagagatggggtttcactgtgttagccaggatggtctagatctcctgacctcgtgatccacccacctcggcctcccaaagtgctgggattacaggcgtaagccaccgtaccyggccaatggtgggtattattttcttcatgttacaggaaagaaaaccgaggcttggagaagtgatgtaacctgtccaaggtcaggtaaa

SEQ ID NO: 558167 - DNA, 618 bp, Homo sapiens
tgaatagtacttgatggcataagactgtgatacttgattccagccaaaatgctgatatttatgtgctcaacatgtgttacttatatgtcagggagatttgtctgtaatgtaaattctttttagagagcactgatggggaggctttggtgccttacatgtcaaggtgggctaaatttcctaacaagacattgggcccatccttgggtctgggccaggcaccagaagcaggctctgcagtaagcatttactctctcagcctctgctaggattgaaatcaccaagaacccagaggtggctgggaaaccatcacatcaccatttcaccaatgacagcgacaactggcttttccctagggattactctgtccctgatactgtgcaagagatttatgcgtgttgtcttatttagttctcacaattactatatgaaataratttcttatttctattttacagatgaagaaaaggaggctcagagagtttaagaaacttaccctcctcacaccatggataacaggcagagccaaaagcaaatgcaggtcagtgtgaccctacactcaaagcctgggactcaccctgccaacaggctgggtgagaagccttaggggcacctgagctt

SEQ ID NO: 558168 - DNA, 607 bp, Homo sapiens
accagtcctttgttaatgaatacttaagcttttcctatagtgactaaaaaatgtgtgcaaattcttcgacatatttttttcaaaaggtggagcctaatttattttcccttgagtatgggcaagacttagtgatttgcttctagaatatggtagaaatgtcagtgtgtgacttctgaaaataagacagtgtattgtggcattgaccttggtacttctcttttttgagaacatctcaagtgtgtgatctctttggaattatcttaaactaaatagcgaggtagctgtctagcttacaatttttttccctttcaaataagttatcttaacactatttgttgtctagtcttttctaaaggaaacatatcttttatcagataataaatgaacagtcataccagggtctttttaaaattctgtttcatggctccatctttctcttgtggaaagtcatattttatttactgtagttttatatatttatatttggcaaggctaattccttgtcattatacatagtttacattatacatacattatgcattagtcttttacctggccatttttaaatctttagtcttycaagtaaactttaggatgatattctcat

SEQ ID NO: 558169 - DNA, 520 bp, Homo sapiens
ttcaagtacttttttccttaaaatatacatttaaatattaatatatatttgaagtatttcattccaatttcataaaacaacactggccacagatgtaagattgaactgatactgttggataatacaatttacatgtaattgtgtgggaccaaactgactttaccaattcagaataaaatcctatagaagggttgagggttgaagagatagccaaggaaaagagtttggaattgaaagagaagaaaaagaatgactaaggttaatttgtaggaagataaatgtatttatgatgaaagatcaatagttgtactgctatctattatgagaaaatgaggtgcatttcaaagagggaatcaatattaaagtccatcttgaggggtttgtatgatgtacttttgaggaaccacctcytgtaagcacccatccttttgggtcctaggtaaacatgtccttctcctctttagaccctgggctctggctgcctgctttagatattgatttccaccgtcattgtttcacc

SEQ ID NO: 558170 - DNA, 538 bp, Homo sapiens
ttttttgtgatggagtttcgctcttgctgcccaggctggagtgcaatggcatggtttcagctcactgcaacctccrcttccaaggttcaagcaattctcctgcctcagcctcccaagtggctggaattacaggggccaaccaccacaccaggcatatctttgtatttttagtagaaactgctttcaccatgttggccaggctggtctcgaactcctgacctcaagtgatctaccccctcggcctcccaaagtgctgggattacaggtgtgagtcactgtacccagtttgtctttataaatcttatagaaatatttaacttttaaaatcaaccacacacaattaagactttgataaaagtaattaagaagtaaagcaatggaaaaagcaatttttaaaaacatatatgaatgattgaaagccaggagtaaaattaagaatagtattaaaatatcactattaaaattagctacataaatatttaattaatgcagctaaatggttaacaaaatttacagaagaaaagtatgttaacattac

SEQ ID NO: 558171 - DNA, 454 bp, Homo sapiens
gcatggtggctcacacctgtaatcccagcacttcgggaggctgacgcgggcagatcactttaggccaggagttggagaccagcctggccaacatggtgaaaccccgtctctactaaaatatgaaaatttgcagggcatgatggtgcacgtctgtaatcccagctactcgggaggctgaggcaggggaattgcttgaacccaggaggcaggggccgcggtgaattsagatcatgccgcagcactctatcctgggtgacagagtgagactgtctcaaaaaaaaaaactcctttttatagagttggggtcttactaggttgcccaggctggtcttgaactcctggactcaggtgatcctcctgccttagcctcccaaggtgtagggattccaggcatgagccacctcgtctggtcaaggagaaggcctgattttgaagggcaggtcccagggtcagc

SEQ ID NO: 558172 - DNA, 377 bp, Homo sapiens
ccaaaagtttggaggcgggaatgagcatgacttactggaagaatggaaagccagtgaggctgcaatgtaacgactgatggacagagtcagaagagatgagaagtaggtaggttaggttatagggctttggagaccacaataagggatttggattttattgtaatacagtaagaaatctttgaaggtttaagcaggacagtgacatgatttgatttactttttttttttttggagatggagtcttgctctgttgcgttgcccaggctgtagtgcagtggtgcgatctcggctcactgcaaccyccacttcccaggttcaagcaatttcccccacctcagcctcccgagtagccgggactacaagcacaccaccacgct

SEQ ID NO: 558173 - DNA, 377 bp, Homo sapiens
ccaaaagtttggaggcgggaatgagcatgacttactggaagaatggaaagccagtgaggctgcartgtaacgactgatggacagagtcagaagagatgagaagtaggtaggttaggttatagggctttggagaccacaataagggatttggattttattgtaatacagtaagaaatctttgaaggtttaagcaggacagtgacatgatttgatttactttttttttttttggagatggagtcttgctctgttgcgttgcccaggctgtagtgcagtggtgcgatctcggctcactgcaacccccacttcccaggttcaagcaatttcccccacctcagcctcccgagtagccgggactacaagcacaccaccacgct

SEQ ID NO: 558174 - DNA, 648 bp, Homo sapiens
ctgcctcagcctcctaagtagctgggattactggcgcccaccaccacacctggttaatttttttgtatttttagtagagacagggtttcaccatgttagccaggatggtctcaatctcctgaccttgtgatctgcccgcctcagcctcccaaagtgctgggattacaggtgtgagccaccgcrcccggacagtgattttcttttaatggaagaactactgttaagtcactggactgatgagcttcacagggccaacacttcttagcttggacatgtttactaaacaagttaagagtgcatgctctaaattaccttgtttgaataggggctgtaaattaggttattgtgaggaaatgaccactttctcaaaatcttcaaagtgcaccaggaaacatgaagcttgggtgtgttataattaattgggaaaatggtggatgcctcaatcattgcaatttggcatgactaatgaaagagttctatcacagcaaagtctagggttcataaagtgcttcttgccgggggaatcttaaatcataaatagcaacatgtttagtcctctgcccttttataagagataaaattgtggtacaaataaagtaggcttttttccaaggtggcacagaacttaacaaagtgaaaatgtggcat

SEQ ID NO: 558175 - DNA, 651 bp, Homo sapiens
ctatattcttataataaagtaagctagagagaagacactgagaaaatcataaggaagaaaaaatatatttactgttcattaagtggaagtggatcatcataaaggtcttccgtcctcttcatcttcacattgagtaggcagaggaggagraggtgagagggggttggtcttgctgtctcagaggtggcagaggaggaagaaaatccacatgtaagtcgactgtgcaatccacaccaacgttgctcaagggtcacctgtatgaagtgaccaacaaagacccaaatctaaatctcagttgccatggcctgacttactactccttagaacttattacactaccttagcttctaaactggccgaaaaagtgccactttggggaataatctgcccagatgtttatctgtgaccatgaactcccatcatgaagattatctcgtgagaaagaaaagaggaactgcatgggtatcttcccactccaccccatactgatgagtcaatattaaattcttttaaagtcttagtgataagtaaccacaaactgaccaactaatttttgtgaattaatgaataatgaaagtactttcattcaacgttatttttcctcagtgctttataaagaacacccaatctagtctcagatatttggctcca

SEQ ID NO: 558176 - DNA, 651 bp, Homo sapiens
ctatattcttataataaagtaagctagagagaagacactgagaaaatcataaggaagaaaaaatatatttactgttcattaagtggaagtggatcatcataaaggtcttccgtcctcttcatcttcacattgagtaggcagaggaggagaaggtgagagggggttggtcttgctgtctcagaggtggcagaggaggaagaaaatccacatgtaagtmgactgtgcaatccacaccaacgttgctcaagggtcacctgtatgaagtgaccaacaaagacccaaatctaaatctcagttgccatggcctgacttactactccttagaacttattacactaccttagcttctaaactggccgaaaaagtgccactttggggaataatctgcccagatgtttatctgtgaccatgaactcccatcatgaagattatctcgtgagaaagaaaagaggaactgcatgggtatcttcccactccaccccatactgatgagtcaatattaaattcttttaaagtcttagtgataagtaaccacaaactgaccaactaatttttgtgaattaatgaataatgaaagtactttcattcaacgttatttttcctcagtgctttataaagaacacccaatctagtctcagatatttggctcca

SEQ ID NO: 558177 - DNA, 612 bp, Homo sapiens
tggtttgtacttttgctctcttttggtccatgtccaacccatcccttctaataaactgttttgggttattggacagagggatgctgagagaaatggcaaagcaaaacactgttttattcattgtagaaatattcttttttttaacttttaggtttgggggtacatgtgcaggttcgttatataggtaaactcatgtcacatgggtttcttgtacatattattttgtcactgaggcactacgcctagtacccaatagttatcttttctgctcctcttcctcctctcaccctccacccacaagtagaccctagtgtctgttgtcctcttctttgtgttcatgagttctcatcatttagctcccacttaaaaatgagaacatgcagcatytggtttcctgttcctgcattaatttgcttaggataacggccaccagctccattcatgtttctgcaaaggacataatctttgttccatgatgtatatgtaccacattttctttatccaatctgttatcgatgggcagttgagttgattccatgtctttgttattgtgaatagtgttgcaatgaacattcatgttcatgtgtctttatgccagaatgatttctaatc

SEQ ID NO: 558178 - DNA, 559 bp, Homo sapiens
ggccatgcattttaatttcttaggacatgttacttttttttttaaatttaaagcttctgtttactaaaagacacattaaaagaaaattaatagacagccatagactggaggtaatatttatgaaacatatgtctgacagaggacttgaatccaaaatatacaaagaactcctacaactcagtaacaaacaaaacaaactattgtaattttaaataagcaaaaattcttaatctgtaataattctctgcttcactgattcaaatagtttcaatttagtrgagtaaatagcttttttttaattttttttattattattatactttaagttctagggtacatgtgcacaacatggagatttcttacatatgtatacatgtgccgtgttggtgtgctgcacccattaactcatcatttacattaggtatatctcctaatgctatccctccccgccgatgacaggccccggtgcatgatgttccccttcctgtgtagggcatgttactttttaaatgtccgtgagatatccaagtggacatactaaacaggtagtttttacaaa

SEQ ID NO: 558179 - DNA, 559 bp, Homo sapiens
ggccatgcattttaatttcttaggacatgttacttttttttttaaatttaaagcttctgtttactaaaagacacattaaaagaaaattaatagacagccatagactggaggtaatatttatgaaacatatgtctgacagaggacttgaatccaaaatatacaaagaactcctacaactcagtaacaaacaaaacaaactattgtaattttaaataagcaaaaattcttaatctgtaataattctctgcttcactgattcaaatagtttcaatttagtagagtaaatagcttttttttaattttttttattattattatactttaagttctagggtacatgtgcacaacatggagatttsttacatatgtatacatgtgccgtgttggtgtgctgcacccattaactcatcatttacattaggtatatctcctaatgctatccctccccgccgatgacaggccccggtgcatgatgttccccttcctgtgtagggcatgttactttttaaatgtccgtgagatatccaagtggacatactaaacaggtagtttttacaaa

SEQ ID NO: 558180 - DNA, 559 bp, Homo sapiens
ggccatgcattttaatttcttaggacatgttacttttttttttaaatttaaagcttctgtttactaaaagacacattaaaagaaaattaatagacagccatagactggaggtaatatttatgaaacatatgtctgacagaggacttgaatccaaaatatacaaagaactcctacaactcagtaacaaacaaaacaaactattgtaattttaaataagcaaaaattcttaatctgtaataattctctgcttcactgattcaaatagtttcaatttagtagagtaaatagcttttttttaattttttttattattattatactttaagttctagggtacatgtgcacaacatggagatttcttacatatgtatacatgtgccgtgttggtgtgctgcacccattaactcatcatttacattaggtatatctcctaatgytatccctccccgccgatgacaggccccggtgcatgatgttccccttcctgtgtagggcatgttactttttaaatgtccgtgagatatccaagtggacatactaaacaggtagtttttacaaa

SEQ ID NO: 558181 - DNA, 550 bp, Homo sapiens
tgcaggaagcattcatgagtggtttatagacagacttgataattctgattttttaggaaaattggtctcagaaagcagcccattttttattgactcaacaacacactgaaatttctaaaataaaaaaagcaatatatttactaataaaaaatatttttaggctaggcctggtggctcatgcctgtaattccagcactttacgaagccaaggcaggaggactgcttgagcccaggagttcaagaccagcctgggcaacatagtgaaacctcatctctacagaaaaaaaaaaaattaaaaattagccaagcatggtggtgtgcacctgtggtcctaggtactttggaggctgaggtgggaggmtcacttgatcccaggaggttgaggctgcagtgagccgtgatcatgcccctgcactccaggctgggtgacagagcaagatcctgtctttaaaaataaaaataggccgggtgcggtggctcacacctgtaatcccggcactttggaaggccaaggcgggtggatcacctgaggtcaggagtttgagaccag

SEQ ID NO: 558182 - DNA, 608 bp, Homo sapiens
aaactcttttttcaaatgacattttacttcaaagacctgtgagaagtgaacacagcctattattcttgaatactctaaaaaaaaccctagagaattggaattatttggcctgtgcaaaagagaaaattttgagaacaaattagctgttctcaaccttatcaaaagacaaagaggaaatgcataaataaaatgcctttaatgcatgtatagcaagaggggatttttctttactctcatttttgagagtggcaagcatgtgtgtttttattaaaccagaggcagactttgttatcataatggtgcatcaaatgtatgtacacatgaaaccattaccataatcatgatagtgaacacattgatcacccttgaaactttccctgtgcctcttttgtctctctcgcctgtcccccaacctgacctcacaatccccagagcgacactgctaaccttctgacactatagatgagtctgtattttctagaattttatataattkgaataatatattatgtaaccttttttgtttggcctctttcactcagcataataattttatgatccatccatgttgtgttcagtactttttattgctgagtagtatgccattg

SEQ ID NO: 558183 - DNA, 548 bp, Homo sapiens
caactcacatttctggaagatctaacaatatatcactgtctactgtgtcaaaggtgagtgatagatctaactttgagagtaggcaactgttttttttccagcaactctcatatattactgaacataaacaggtaacttagtgggaatcccaaaatccatgttggaattttatcaaatattaatcatagataattgtgtcttcaggcaaaatagcaaacatatttccattatttctttttttttctaaaagaaataagagctagaaaacctgtgtcaaaatctagcaggtacctaattaataatcttaaacatttgttgaataaatttttattcatacatgcatacaatttcaacagtcaatgaactagagaagtaaaagacatatagaatgttagtaagttataatattctccttcgtaaaattacattctgccctcatttttcaagtatgaatagggtcaaataattcatcaaagctgataaaaagcaagataatataactgaataacaaagtttctccraaaatacagagaatttttgtgtatttc

SEQ ID NO: 558184 - DNA, 492 bp, Homo sapiens
ctacttcctgcctgaatatatgagaaagtttacttttcctctgggtaaggccagtaatcacacataggtagcytatgctcccctcccactccctactctagctgttaaagtcttgaaaacttcagctctttgtttcaatggcatcaacgtcaggctgagttctggtctctctcctgtattccgctagtctagaataaagtctgccttgcctgtttaactttgtctagtgcaatttttgttttcacaagcattatggcatatgattggttattctatacctgaagtaagtggttcagaaatacatacattactgaataaaatattagtattttgtttcttaaatagtattagtgggtcagccaccacaaattctacagaaattatattttatgtaatgtgttcaaattaaaactcttctgtatctgaatttatcataaatgtatctgttttatatgggggtatatagccttgtatttgttcctaaatatgtga

SEQ ID NO: 558185 - DNA, 546 bp, Homo sapiens
agcacatgccttatatcttgggaagttcatggtagaaccaatttagcaggtgaggaaagaaacaaacaacgagagaggatggtggcggtgatcaagattatcgctcatgaattcacatcgtcagctgcactgtgatagcatcacttttggatttgcccaaccgtgttgaacaggcctttggagaataccagcagcttagagtcccaggttatccctgaaagcggcctccagggagccaagctgcatctcattaatcaagattctaattattcagatgttccagctgtctttttttcatagcataggaggcttaaagcttctgctggcctggggkgtgtgtgtgtgtgtgtgtgtgtgtgtgtgtgtgtgtgtgtgtgtgtgtgtgtgtgtgtgtgtgtgtcttacgtatcaagaagaaagctcctattggagcacaggtgagtcaggcttgcatcaggaggttcctacaggtgtgttcttgtaatgataagaaactagaggtaatcaaaatgtccccaaatagggagtggttaatttttttttcaa

SEQ ID NO: 558186 - DNA, 546 bp, Homo sapiens
aaagtcccaactccccagcaccctctgcatggccccatgtctggtaccctccctctctctggcctcaacttgctgttctctcctcgctctattctccacccacaaatgccagcaaatacgctaacattttaataacgattctctctgggtcatcagcttatgggtaatttttatatttctttctgctttcagtttctaaattttctaccatkaaccaagattatgtttttagtcataatttttttaaagaaacctggaaacttgtgtgagaggaaggagtttaaggaggcaagtttgtcaaggatgctggaggctttagagagggcactaagataagagctaacagcacaggaacatttgttcctacagcaacaaatggctcaggagtgacagaagccagggaagtcctggggacagactgaaaattatgggtgaagtggggcaagactgaaagaaaggtaacatttcatgtctattctgccaaagagcatctggaaacaaaggaagaaatggagcagtggtttgagagggaggcagagttaaagt

SEQ ID NO: 558187 - DNA, 560 bp, Homo sapiens
ttaccctgagtagagaagctggagctttgaatccaggaggataggtagtgaaacaggtggagagtgggctggggaatcgtgtttggggagtgctcagggaaggtgagaccttgcaaaggaagctagaatggtaagaaatcaaccctgcaggggtgggtgaatttagttatcgttaaaaaaaagagaccataattccttataattccttatacttccttgcttgtcaagcaggaaactagtttgtaaggaaaatcaggaaaagaaaagtactgtgaatttggcggctccaagtatttgccagcatttttatatatcttatctcatttaatccttgccacaaccctgtgaaggacagactatcytctatattctataattcaggaaaatgttgctcagaggttaaatcatttgcctaggaacgtagggctcctgtgctgaagtcaagattcaaacttgctcctttgaccatactagtttgcctcaccaggagagttacaaggaagagcctccagtgaaatctgacctggtactgaatggagactctccagggtccacttagt

SEQ ID NO: 558188 - DNA, 560 bp, Homo sapiens
ttaccctgagtagagaagctggagctttgaatccaggaggataggtagtgaaacaggtggagagtgggctggggaatcgtgtttggggagtgctcagggaaggtgagaccttgcaaaggaagctagaatggtaagaaatcaaccctgcaggggtgggtgaatttagttatcgttaaaaaaaagagaccataattccttataattccttatacttccttgcttgtcaagcaggaaactagtttgtaaggaaaatcaggaaaagaaaagtactgtgaatttggcggctccaagtatttgccagcatttttatatatcttatctcatttaatccttgccacaaccctgtgaaggacagactatcttctatattctataattcaggaaaatgttgctcagaggttaaatcatttgcctaggaacgtagggctcctgtgctgaagtcaagattcaaacttgctcctttgaccatactagtttgcctcaccaggagagttacaaggaagagcctccagtgaaatctgacctggtactgaatggagrctctccagggtccacttagt

SEQ ID NO: 558189 - DNA, 582 bp, Homo sapiens
acccacaactggtacatctctgctgatctcaagtctctgagaaactccaagtaattcttcctcacagtgattaaggaatcttgtctaaaaacaccacctgcgcccccccaacccccaagcaagaagaggaagaggacagtgcagtaaaaaaagggaaggggaagcaatatttattgagtgcttcccatatgtaaagaatttatggagattatgctatactgcattttttgatatgtcaaagatcctttatatttttttttacttttacctataaaatatataktttttatttttctttgtgaatttggcggtcccttcccttcctcttcctctttctctttcacttttttttttaaattttgagataggttcttactctgttacccttgttggagtgcagtggcatcaccatgactcactgtaacctcgaactcatgggctcaagtcattttcctacctcaacctcctgagtaactgggactataagcatgagcaaccatgcctggctaattttttaatttctttgtagagatgggggtcttgctttgttccctatgttggtcctgaactcctgacctcaag

SEQ ID NO: 558190 - DNA, 568 bp, Homo sapiens
attttagagtcttccagagcattgtaactgacaacctttttaacataagtacattgaacaaataatttatagacatattctgggaatattttagggtgttttattactacttttgaaagctatggcatattattgattttggcatattaatataacctaagagggagggcacatgctcagctcctaatccacatyagctttgatggcaaacaatatatttcactgaaaggaaccttgaaccaaagcagcagaggttagcaattacacatcatagcccaaagtttaagataatgaatttcactcattagagaactcccactttggggactgaaacaagctttccttacttggggtttcattccaaattctcaaccaccatttgtcagcgtgagcttccctttccttatctccattcaactcctgccacttccttgggatttttaaagcctgcttcctgctgaagaagtcaccattacccctttttcaaaatatgtttccaaaaacatatttttagagtgggttttggggacttgtttaaaagagcttattatgttcttcctctttgtat

SEQ ID NO: 558191 - DNA, 568 bp, Homo sapiens
attttagagtcttccagagcattgtaactgacaacctttttaacataagtacattgaacaaataatttatagacatattctgggaatattttagggtgttttattactacttttgaaagctatggcatattattgattttggcatattaatataacctaagagggagggcacatgctcagctcctaatccacattagctttgatggcaaacaatatatttcactgaaaggaaccttgaacsaaagcagcagaggttagcaattacacatcatagcccaaagtttaagataatgaatttcactcattagagaactcccactttggggactgaaacaagctttccttacttggggtttcattccaaattctcaaccaccatttgtcagcgtgagcttccctttccttatctccattcaactcctgccacttccttgggatttttaaagcctgcttcctgctgaagaagtcaccattacccctttttcaaaatatgtttccaaaaacatatttttagagtgggttttggggacttgtttaaaagagcttattatgttcttcctctttgtat

SEQ ID NO: 558192 - DNA, 572 bp, Homo sapiens
gtttaattgagtcagtgttccgcatggctggggaggcctcaggaaacttacaatcatggcagatgggaggcagcaggtgagagagagagagagaagaaagaagggggaagagccccttataaaactaacagataggccgggtgcggtggctcacgcctgtaatcccagctctttgggaggccgaggcaggtrgatcatgaggtcaggagttcgagaccagcctgccaacatggtgaaaccctgtctctactaaaaataaaaaaaattagccaggtgtggtggcaggtgcctgtaatcccagttactcgggaggctgaggcaggaggatcacttgaacccaggaggcagaggttgcagtgagcagagatggtgccaccagcctgggcaacagagcaagactccatctcaaaaaacaaagaaacaaacaaaaaaacaaaaaaatctaacagatgtcgtaagaactcattcactatcatgagaacagcatgggggaaaccacccccatgatccaatcacctctttccctcaacatatggagattacaattcaagatgagatttggtggggataca

SEQ ID NO: 558193 - DNA, 572 bp, Homo sapiens
gtttaattgagtcagtgttccgcatggctggggaggcctcaggaaacttacaatcatggcagatgggaggcagcaggtgagagagagagagagaagaaagaagggggaagagccccttataaaactaacagataggccgggtgcggtggctcacgcctgtaatcccagctctttgggaggccgaggcaggtagatcatgaggtcaggagttcgagaccagcctgccaacatggtgaaaccctgtctctactaaaaataaaaaaaattagccaggtgtggtggcaggtgcctgtaatcccagytactcgggaggctgaggcaggaggatcacttgaacccaggaggcagaggttgcagtgagcagagatggtgccaccagcctgggcaacagagcaagactccatctcaaaaaacaaagaaacaaacaaaaaaacaaaaaaatctaacagatgtcgtaagaactcattcactatcatgagaacagcatgggggaaaccacccccatgatccaatcacctctttccctcaacatatggagattacaattcaagatgagatttggtggggataca

SEQ ID NO: 558194 - DNA, 543 bp, Homo sapiens
tgcatgttacattatcacaattttaaaatgtttttggtgtcatagtgttttttaatatggtggcctgaggacttcttcatctttccaatgctcatttagcattttctctggcctatgggaggtgataagtaaatgtctgtagaagaaagagacagacggagaaaatacagtggctggcatkttatatgtggttaagaattgttgaatgaatgagaagggaatcaaacaaagtgatttgtacatggtaggtactccataaatatttaatagattgtttcactggtatattatacaatcaaattcagcatagcaaaataattacaactgtctttggaattcactgtaaaaggattttaattatgtttgtaagtgtcaagacttaaggttaatgtccaggtactttatcaaggatcaacatatttgaaaacagggactgtacaattgtgttctgggctaaaactatttacttaactgtcttcattagtggctggtgtctgttatatcaaaagaatattgaattatgcttaaccgtttctgtttatt

SEQ ID NO: 558195 - DNA, 515 bp, Homo sapiens
attaccactcagtcttcagggatgagcccatgttttaggcctgatcaagtaaatacacagtgactggccagttcaaggatggccaggtgacccacactgtctcagaaaagtactccccagaaatttgctggaaccactggtgaaaaagttgtctcagatttctgttacccttcctagttggtaggacataagcttagagcagccagggaactaaccaccatgaggagaaggtataagtgcaaataaagtcaatcagaaggaaggagagctaagagatggaggaaatcaagccacatgataacatttagaaactaaactccatatgcatcctcccccgcaaaaaaaawaaaaataaaataaaataaaaaaatccttcttatgctaaagctcatttgagtgggattctgtcacttgcaactgaaagaggcaaaatgggagcaattaggaaaatgtgacaaacatctgacatcatttgtcagtgggggaatatgcataagaattaaaacattaagatg

SEQ ID NO: 558196 - DNA, 605 bp, Homo sapiens
aaggcgggctatgaaatgtaatcttcctgcatgcccacaaagaggaaacagtctggtgaatgtggcatgatctttccacatctccttttatttgttgtgtccagtcaccctaccagacaggcagaagcccaggaatatggactccagttggactatttgggtcccagaagcctacttaggctatggggtcaggtgtcaacaacggcacgtaaaactaaggtgggtgttctggaagccaacatgccagagtgaaagtaaaactggttcaccaatctaaagaactcagagagggtgagagaaatgaagtgtacatttaacctgataagaagagacaaagtggaggttagaaggcagagcctggaggagttcctcagctatgacaatagagccatagacccttttttgtggagcaatggcagtctctgcgtggatagaaggacagggatactcataatatccycttgacatcagcaaggcagatattattaaccctgtttgacagatgaggttgggggattcactcccaaatagtggtctgatgaaagctatggcccctctggaggtttcccagagatgaagtgacttgcccaaggtcacacagccag

SEQ ID NO: 558197 - DNA, 532 bp, Homo sapiens
aagaggcgtgtacttaggaaagtcaggggaagcttcatgggaaaagtgggacttgaattagccatcgtatacggattagaatcagttaaatacagaggaaagggagagcattatagtgagagagcagttctggggacaaaagtacaaaatgtgggracacacaagtaatatttgggtagcccatgggagaaacaggaaggctagagtgaaaggtttaaacaagttataggcaaaaagattcatgttgtagatttgatttttttaacctaatatttatggaaaatgtgctacgtaagtaagcactgtactgtttatatgtgctattttaattatcacacctacactatgatatgggcgctatttttaatctcatttgcacaagaggagacagtggctcagggaggtaaagagacttttataagattatgtagcaaggactagaactggggcatgaacccaagcatttggatcctagaggccctgctcatgaccactatgaagtctcttgcagccattttaatgcaagatggta

SEQ ID NO: 558198 - DNA, 586 bp, Homo sapiens
gaatacagatcatatccccaaccagaggctgtcgaacttactttggccttgactctgacccacagttagaaatacattttacaacatgtctcccacactctcataactgaaacaaaaaatgtcactcaagtaatacttgcttttaccacgagacaccctttgacactttctgcaatcttttgtagttgacttaaatcttagtggaggcccataaaattaatctcattaccagccttaggccttggaatcagaatcccctgggaataaagtcaggagaccgacatttttaacaaggacccagatgattctcctgcaactaaactatgccttgggccctcggctacctcagcctgccttctgaggaaattcttgaaataatccaggaattttcaatgtctggaggcagccaggtctgtaatggctggtctaggcctgtggtggttcatcttacgtgttggcttggccatgatgcccagctgtttggtcaaacsctaatctaggtgttgctgttgaaggcattttgtagatgtgatttgcatttatgattagttgagttgaagtaaagtagattattctccatgatatg

SEQ ID NO: 558199 - DNA, 592 bp, Homo sapiens
cggaaatgtagatctaattagctctaagctgtagaagatttgagtatggtagtttcattttggcttaatgcttggtgcctggtgtaaaatctgaatttattactctttttttttaatcatttctgcatggctcaaccagtcgtatcaaaactactgcatrttatagactttaaaaagtggttccctgtaggcattttaaggtataggatctattatgggaagatatatacttgacagcattctgtttatcactcagttctgctacattgttcatgaacccagtgaaagatgttcacagtagtaagtaacactttattccaggaagaaaaaaacacaaggcgacttccttgagtgagtaccagaatcagtgtgtggtgcactgattacaggactaacgggcgaatgtgtcgccttctccatcaagaccctgcaaaacaagggagactgctttagtgcctcatattcctctagattttatccaaaaatattttcccattaaaagtactatgtctcagcagtggataatcaatgttgcaattctgaacatttttaagaacaaaactcaggtagcatcatccgtcctcccccaggc

SEQ ID NO: 558200 - DNA, 479 bp, Homo sapiens
atccttccactcccaacccatacacaccaaaataaggcagtctatctcctggcaataggtattgttattgtgcttattttacagataggaaaactgatggagaaaggatgaagctaatgacctaagtggtagttccaggattagaacccaagcatcctgataatagagtctatgcttgtctctgctatgctatatttattgaaatgtcatattttcttgaattgcttatcaacatgagaacagaagggaagcttatgttctcaagattgagagagatttacctaacaaaggaattcttacactgggaaaataaatcctgagaagtcaaggaagtcatctaaggctacccaatgaatcaggagacraatgaatcagaacatggattcccagacttactatcctgacccattctcggggtatccaggggatctggagcctcccaaatcctgggaccatagactagaagataagaggaacac

SEQ ID NO: 558201 - DNA, 466 bp, Homo sapiens
aaatgtcctaaaataaattaagaatttttaaattaatcagtttcaaagttattaagtaaaagatggttctttgatgtccaaaaacatgaagatgatagttttaatcatttccaccaagtaaggtyaaaatcatgactcatacacatataaaataacaacattaaattttttatttattatttaatacattactgaagtgagtgaaccaggcagataacataaccagttcaaagcaggtgccaaagacactcaaatgtatatggagtaaaataatgttgaaatgaatgtgggaatggatgtaaaactgacttttccacaggagagaagcattgtctcttcactgaacagaactgttttgctttgctatttgttacctataagttacagagtaataaaataattcaacggccgtaaaaatctcaaatcaaacaacttgcaaagctgttctctaaaccatgcatagttt

SEQ ID NO: 558202 - DNA, 609 bp, Homo sapiens
ttgaagcatagagtagatgcacaataagaaatcaattgagtaattggagacatctttggatggggctgaggcacaacccgggtttggaacacaaactctcactgctttgaataagttatagagaagagagaagcaaatctactccatgatggactaagtacaggctttctcatttccatggagaaagcagtgacagccacagcatcaaccacacttgaaggaaatcaaatcttgcaaaatggaattcagagggcatcaaatgaaggaatgccatgatgtagcctagaacttttggtttattattccagctgcttgcttgtcttctttggttatgtgggaaggacaaccatagccatcctggctatcttggtatctcaccaggcatcataaatggtcatggcctctatygctcctcgcctattgcttctttgctcacaatgagggagtgaggaggactctctccctgccagtgtttcaatccttgcataaggattctaaacggtgtggtcttagtctttctcacctctcagttttacagttttgtattcaatttatttctttagctttcatctcaaggattctgggacaagtttttgtcaatgaggttta

SEQ ID NO: 558203 - DNA, 592 bp, Homo sapiens
gagtaattctgactttcaagttttattatctaagaaatatattycataggctatagctgccatacatggtgattcctctgatggatctgggcaaagtaaatttaaaaccttctggaagggatttattctagatgttgttaagaacattcacgtttcatgggaggaggtcaaaatatctaccttaccaggagtttggaaagttgattccaaccatcatcaatgactttgaggggttagagacttcagtggcggaagtggagcctaaagacgtgagtaaactgctgcaatctcatgtcaaaactttaatggatgaattatttcttctggataagctaagaaagtggttttggggatggaatctactcctggtgaagatgctgtgaacattgttgaaatgataacaagggatttagaatattacacaaactcagttgataaagctgcagcaggatttgagaggactgactaatttgaaaggaattctactgtaagtaaaatgctatcaaatagcatcatatgctatagagaaatctttcataaatcaatatggcagacttcatatttgtcttattttaagaaattgccacagcca

SEQ ID NO: 558204 - DNA, 588 bp, Homo sapiens
agattagaagcctgagagatgttaaatattttattaaagttatccagttaataaattgctgagttgagacttgaatccttgttgtcttattcctgagcctattctccttatccccgctatatgggcatgcattttacttccccattgtacagatttgaatctgaggctcagacatgggacatgactcaccttttttactgttgaggaagtctatgcctatctcacagggtcttatgaggattaaatgagacaatatgtaaaaaaaaaattaacatggtgcctggtatgcaggaagccttcaagaaatggagggctttggtttgttattataaaaccaggtcttaagttttctggtctaatgcttgaggwtattagaagcctctgaattttaaaaagtcacaacatctttaaaaataccatacccagttcttttaaaccctttgtacttataggagtttatttgcattgtaggagaaattggagatggagatacagacacataaacagtatcagaaagtctctactgtctcctttcactcttttcagaacaaccatggttagatccagaaatccaggactgtgggccat

SEQ ID NO: 558205 - DNA, 584 bp, Homo sapiens
gtggccccagtccgctggttttcaacttttttttctcggtggtagagccctttctgcagaggaaatttaatatagagcctcaatatataaagcataaaaggagactgcctcgtcgaaacaagagtgccacccacctcaactctgccttcccccagaggtcatccctgtggtcctcaacataacgaagtgccccagaaggcatcatttraaaatgtgctcttaaggtttggtgggcacagcctcactgctggttacaaagcagatgcctgggccccaccctaaaacatctaaatcagaatctaggttttcaacaagatccctagctcctccctgaaatctgagaaccattggcctctcccaatactttcatttaacaggtgaaactgatacgcacagtagagaggttccttggccatggtcacatagccagcgtgagggggccaagcctaatgggcaagactcctggcccctgctatcctgcttgcataggctccttagttgcaatcagcagaacccttggctaagctaagcaggagaacttattggaaggctatttcatggttcataaaatgggagaaaaagct

SEQ ID NO: 558206 - DNA, 450 bp, Homo sapiens
taataaataactaatatggtcttcagtgctatgctgagaattgcggaatttgttttctaattctagtactttgcctaatacgaagttgagaaatgtgtcctaaattgagttgttgatactagagagctgctggagggttttgagcaggtgaacaacatgataacagtaatcttttagatagattaataaagagtgggtgggcgagatgaattggggaaatagggagtgcttgtggtagggaggcmattcaggattttgaaatggctcaagcatgtaaatggattggtctagggtgaggcttagggtggggaaaagaaatgaagccaatataagttctgtgagagctgggtccttggctttttttttttttttccaccagagtcttggaaccttccatactgcatggcacatagtaggcacccagtaaaatttattgcacggatgattgaa

SEQ ID NO: 558207 - DNA, 572 bp, Homo sapiens
tccttccaggttagttatcctactcataattctttcctgggagaaggaaaggagggatgtttcctctgtgctttaaagttgatcaggatgctcaggtgcaaggtcttagatcagaaagaaaaattgctatttagatttttatcccatttcttccatgctatttctttcacagtcactttagaaatttccctagttctcctgtggcataaagtgagtcagaatggcaaatgaaacatgcagaagacataaattccaggcataaaatataaatcaaatatacatctatcaattggctttatgctatccgagctgcccccagggtgtcagtggatcaggtgaatggatttctgccactgtgggtaattccataaggtaatagggtgggckctaatgcagtggagaggcaatattctccaagttatatatcatggttttagaggggaatttgtatattttgattttgcgagtcaatgaagttgagtccctaaggcactctcggagctcagcctctctgagactgtggagagaagctggctcaaggccaggaacacggcctgaagaaaatgaagcca

SEQ ID NO: 558208 - DNA, 577 bp, Homo sapiens
tgtttgttttaaatgccgatcctgggctcacacccagacctgatgaatcagattctataggggtgatgccaggaggctacactttttcaagcttccagggtgatttgtatgaacacctaaatttgaatgccactgttccactggttcaggggccaggagccataccattagaaacacaacactagactcttcaagtggttctgcaatgtctggcttagccagaatgccactttgtggaaatccaaaggaargcagcaagcaggcattatgggaggcccttcctaagatgctctttgacgccccaccatgttccacctcaccaagccggcctggcgaacaggacccagcgctgccagcatcctcacttccccaacaccgtcatgcaggctggggagccttcccttcagtcctgcttctgaaggactgggatgggacagctcccactcccaatccttcctgcaagatgtttttttgttctctgtacaattaattagataataatttttgcttctgatccattcctcattaaaaagctgaatccccgagttggagctgtcggaacaaaggtgggagaatt

SEQ ID NO: 558209 - DNA, 577 bp, Homo sapiens
tgtttgttttaaatgccgatcctgggctcacacccagacctgatgaatcagattctataggggtgatgccaggaggctacactttttcaagcttccagggtgatttgtatgaacacctaaatttgaatgccactgttccactggttcaggggccaggagccataccattagaaacacaacwctagactcttcaagtggttctgcaatgtctggcttagccagaatgccactttgtggaaatccaaaggaaagcagcaagcaggcattatgggaggcccttcctaagatgctctttgacgccccaccatgttccacctcaccaagccggcctggcgaacaggacccagcgctgccagcatcctcacttccccaacaccgtcatgcaggctggggagccttcccttcagtcctgcttctgaaggactgggatgggacagctcccactcccaatccttcctgcaagatgtttttttgttctctgtacaattaattagataataatttttgcttctgatccattcctcattaaaaagctgaatccccgagttggagctgtcggaacaaaggtgggagaatt

SEQ ID NO: 558210 - DNA, 430 bp, Homo sapiens
tctgggtgtgggctccaaccccacatttcccttccatactgccctagcagaggttctccatgaggacccatcccctgcggcaaacttctgcctggacatccaggcatttccatacatcctctgaaatctaggtggaggttcccaaacctcaattcttgacttttgtccgctcacatgcccaacaccatgtgtaagctgcaaaggcttggrgcttgcaccctctgaagccacagcctgagttgtactttggctccttttagccacagctgaagctgaaacagctgggatgcagggcaccatgtttggaggctgcatagagcaagggggacctgggcctggccagggaaaccatttttccctcctaggtctccaggcctgtgatgggagggactgctgtgaaagtctctgacatgccctggagacattttcc

SEQ ID NO: 558211 - DNA, 585 bp, Homo sapiens
catcatgtaacctataaaggaaaacctattagactaacagcagacttctcaacagaaaccttacaaagcaaaaaggattgggttcttatcttcagcatctttaaacagaataactgtcagctgagaattttgtatttagaaaaactacgtttcacaaatgagggcgctataaagttattttcagacaaataaatgctgaggaaattaatcacacccaaaccagcattacaagaaatgctaagaggaattctaaaccttgaaacaaaaccttgatatgcatcaaaataggaccccttgaaagcttaacatgtacagggtctataaaagagtaacacaagaaaaagtacaagctatctagataacaattaacatgacaaagagaatagtacctcacatctcaatattaatgtggaatgaaaatggcctaagtgctctgcttaaaagatgcagaatggtagaatggattaaaaataaaatcacaaaccaaatatctactgtctttgagactcaactaatatggaaggattcatataaactcaaggtaaggctgggtgcrgtggctcacgccttaatcccagcactttc

SEQ ID NO: 558212 - DNA, 658 bp, Homo sapiens
ttttgcagccacttggatggagctagaggccattattctaagtgaagtaacaccggagtggaaaaccaaaaactatgttcttgctcataagttggaggtaagcagtgagtatgaaaaggcatacggagtgagataatgaactttagggactcagagagaggtggtagaaagggggccagggataaaaagctacatattacgtacaatgtacactgcttgcataataggtacactaaaatctcagaattcaccactctatagttcagatatttaacaaaaaaccactttaccccaaaaactattgaaataaatttttttcaaaaaattaagaatttctgctcttcaaaaaacacttttaggataattcaggaagagccaaactgggagtacaaatacrtatttgcaaagtacatatcctgtaaagaacttatatccagaatctataaaagaaaactctcaaaacagaattaaaagggaataacctgatgaaaacaaaacaaacaaacaaaagagccaaagatttgaacatatactttaccaaagaagaaataataaatggcatggtaggctgaaaaatggcttcataaaatttatccacatctttatctctggaacctgtgaaagctaccttatttggcaaaataaaaatttgcaggtg

SEQ ID NO: 558213 - DNA, 658 bp, Homo sapiens
ttttgcagccacttggatggagctagaggccattattctaagtgaagtaacaccggagtggaaaaccaaaaactatgttcttgctcataagttggaggtaagcagtgagtatgaaaaggcatacggagtgagataatgaactttagggactcagagagaggtggtagaaagggggccagggataaaaagctacatattacgtacaatgtacactgcttgcataataggtacactaaaatctcagaattcaccactctatagttcagatatttaacaaaaaaccactttaccccaaaaactattgaaataaatttttttcaaaaaattaagaatttctgctcttcaaaaaacacttttaggataattcaggaagagccaaactgggagtacaaatacatatttgcaaagtacatatcctgtaaagaacttatatccagaatctataaaagaaaactctyaaaacagaattaaaagggaataacctgatgaaaacaaaacaaacaaacaaaagagccaaagatttgaacatatactttaccaaagaagaaataataaatggcatggtaggctgaaaaatggcttcataaaatttatccacatctttatctctggaacctgtgaaagctaccttatttggcaaaataaaaatttgcaggtg

SEQ ID NO: 558214 - DNA, 489 bp, Homo sapiens
agccagggatttgagcccaggtctgtcttgcttttgggatcctgtttacagttctgagaataaaggtatgttaaagtgattatcacacagaagtcaagtacagcaatatttaaatctctagttcatgaggtaggccgcttctttatatttttgccttgtktgactatactctatattcacacatgaacttagaagaatagaaaaatcagcatatagtagcaaaacattatcttctcatcattatgtttacaaattaggagattaatggcaactatcaagagtccagttacaacaaagttgtaggagttgaagttcgattactggagactcaataaacagtgacagaaaaccaaggtaactatcactgacaactcatccaatccacacattggtgtcggagttctctctctttcagtggcagaagaaaatgtagataacacttccaagacaaaagaaaagaaaaggaaaggtggcgtaagaggaaagaaa

SEQ ID NO: 558215 - DNA, 625 bp, Homo sapiens
ggcacaatcttgactcactacaacttccccaaccaggttcaagcgattctcctgcctcagcctcccaagtagctgggattacaggcatgtgccaccacaccaggctgactttttgtatttggtagagacggggtttcaccatgttggtcaggctggtctcaaactcctgccctcaggtgatccacctgcctcagcctcccaaagtgctgggattacaggtgtgagccaccrcacctggcctagaagaaatatttaaataagttaaatatttattatggaatacaaaatcatagaagaaaacatgaaagaattaatttatagcctcagtttagaaacaaaaactttctcattatgatataatattcagaggctgtagggagaaaaaaatgaatacatttgactacataaaaattaaatttttgcatggcaacacataaaataaacattatcaatgtagtcaaaaaggcaaatggcaaactaaatttaaaaatatattcccaatttttgtcacaaaagcttaatcttcctggcatataaagacctaccacttgataagaaaatcatcaacagcccaaaagaaaaaagtgggcaaagaatatgcaaagacagttcacaggaatgcaaa

SEQ ID NO: 558216 - DNA, 597 bp, Homo sapiens
tattagtttttctttaaatgtttggtagaattggtattagtttttctttaactgtttggtagaattcagcaatgaagccatgggttctgggcttttctttgatggaagactttttattacatctttgatcccactacttgctattggtctgttcaggttttggatttcttcatggttcaatcttggtagcttgtatatgtctaggaatttatccatttattctagattttcaaatttattggcataaataattgctcacagtaaccattagtgrcctgtgaatttcagcagtatctgtttgatgtctcctttttcatctctgatttcatttatttgggtcttctttttttcttagttagtccagctaaaggtttgtttttatttgtttatttatcttttccaaaaaaatgtttttactttgttgattttgtgtggttgtcttcatttcatttatttctgacctaatatttgttatttcttttcttttaccaattttaggtttggtttgctcttgcttccctgtttctttaagatgcattgttaggttgtttatttgaagtttttcttcttttttgatgtaggcacttacagctataa

SEQ ID NO: 558217 - DNA, 481 bp, Homo sapiens
gtgaaggtgattttctctggtggtatgttttaatttcttactttttatgttttagtatctgttgcttgctttttgattagcagtgatcatgagacttgggaatactatattatcacccattatttctaaactgacagcagcttaacactgtttacataaaaaacaaacaagcaaaaagacaataaactctacactttaacttcatcccattgctttttaacttattgtttccctttatgttttcttgtacttgtctatgtcttgaaaagttgttgyagttattatttttgattgatcaacctgtttgtctttctacctaagacaagagtttacaatccacaattacattgttataatatttggtgtttttataagtacttattattaactgtgagttttgtaccttcaagtaatttctcattgttcatttattttatttttattttattattattatactttaagttttagagtacatgtg

SEQ ID NO: 558218 - DNA, 577 bp, Homo sapiens
tttaattggcttatggttctgcaggctgtacaagaagcacagcagcttctgcttctgggaggcctcaggaagcttccaatcatggcagaaggcaaagggggaatgagatgtctcacrtggtgggagcaggagcaagagcgagagggaagagaggagctacacgcttttaaacaaccagatctcatgagaactcatgaggacagtactaaggggacatggtgctaaaccacaagaaactggccccatgagccaatcacctcccatcaggctccacatccaacattggggattacaattcaacatgagatttgggcgaggacacagagccaaaccacatcaggccccatctctccagtgaaacagctcttgctgaggtcaggaatgatctcccattgttaattattttgatgagttctctgttctcacctccatgattgttaagcaacatttggcaccattaatcaacatccttaaaacacttgtaacacttggcttttaaatattaaattctgccttgtctactacttcactggatgctatttctcagtgtttatcctcactctcgcaatggattgat

SEQ ID NO: 558219 - DNA, 582 bp, Homo sapiens
ttgtccaatccacggcccacgggccacatgcggcccaggatgactttgactgtggctcaacacagtcataaactttcgtaaaacrtgaggtttttttgcaattttttttatctcatcagctatcattagtgttaatgtattttatgtgtggtccaagataatttttcttcttccaatgtgtcccagggaagccaaaagattggacgccactgctttatagcaatgcaaatggactaattaacacaccaagccacttagatgattgtgacgatccttcaggtttcagaagcatcagtcaatattacacagatatttagttcatatttcactaacactcatctcacagagcatatattttccatgcaggataaaatagtaaacaaacttaggacaagtgatatattttatatccagtaacaagaaaaggctccactaataaggtaacatttgaacaagacctgcagaaacagagtagtaagtaatgggatatctaggagaagggtgttccagaaagaagaatcaaggaagtccctggagcaagagcttaactgggaatttttatttttattttttttttgagat

SEQ ID NO: 558220 - DNA, 586 bp, Homo sapiens
gatgcacagactggctgaatgaagtaggaaaggaatcagggatgtaactgttgctcagaattctcttactacttctttaacggtctttcaaacaattctcttgtttttaattttactttcatatctattcccagagaacctgatgttgccaattccagagactttgtagattctgcaaagcatatttgtttttttcttggcttcttccactgctggtttaggattgagctttctttgaaccccttagtcagttaccactcatccagctttaaaaattttgctgctgttgtctcttttttgtttgtccttatgattttgtgccctttaaaaagttcttttctgatgttttagtgtagttttgggaaagagtaaactaaatagaaatttacctgaaggtctctcttgttttcctaattattttaaaaattacaccagtcgttcaaaaatacatgacaatatatgacatgacatgaatttaagattcaagcaatttatcattatatgaaakaaaatgtgactctttcccctccccttcaattccatattttacctcttctgagatgaacaattttaactatttgataat

SEQ ID NO: 558221 - DNA, 596 bp, Homo sapiens
gggtagtgttcctaagtggagagttaargtttcatttatatagagatgttagcaggattttaacattttccatacaagactagtacatacaccactgcaacttaattggtcacagagtggtacattctaaggaaggttattttattactccaccatgaggagggataataatctgagaggtcttatctctgatgctgtttggtcttaattatttagagaaaaaaaggcagaagttgcagctgcattctgtgtgactcaggttgcatagccacattcctttcaaggctcagaataatttaaaattccaacagttttaagtttgaattaattttaagtttgaattattgaattccacagttgccataaacaaaaactttaacttaagagtgactgaagtggattacaaaataattaagagcatcacatgtaaaccaagagcagaaagtgattgagtctcatgaattactgatacttgggagtagaaaattgtcagaatgcaaggaagacattttattttttttctctcttctgacctctttctcattccatgtactttctcttcttattttttctgtttgtcttgataaaagaaaaac

SEQ ID NO: 558222 - DNA, 580 bp, Homo sapiens
gtggtatatccttacaatggaatattattcaaccctaaaaagaaaggaaattcaaacacatgctacaacatggatgaaacttgaggacattagtgaaataagccagtcgcaaaaagacaactactatatgattccacttatatgaagtacctagagtagtccaactcatagagacagaaagtagaatggtggttatcaggttccaggggtaggaggaaaaggggggttgtttaatgggtatagtttcagttttgcaagatgaaaaagttctgggtattgactgcataaaaatgtgaatgtacttaactgtacatttagaaatggttaaagtggtaaaatttatgttgtgtgtattttactcacaatcaaaacttattttttttaaaaaaagcagattccttggctttaccttcagagcttttgactcaatgcagaaatggaaaagccratccttaaattcaaatggaattgcagcggaccccaaatagccaaagcaatcttgaaaaagaagaacaaagctggaagacttacacttcctgatttcaaaacgtattacaaagctacagtaatcaaaatagtg

SEQ ID NO: 558223 - DNA, 612 bp, Homo sapiens
tcaatcagtttaggggtttattttkcaaaaattaaggatcatgactcatgacacagcctcaggaggtcctgagaacatgcgcccaaggtggttgggttacagcttggttttatacattttagggagacagaagtcaggcaaagacataaattaatacatgtaaggtatacattggtttggcccagaaaggtgggacagcacaaagggaatgatggggttacatgtcataggggaatttaaagatttttctgactggcagttggtagacagagataaattattatataaagacctggaatcaatagaaaggagtgtctgggttaagataaggggttgtggagactaaggtttgtattatgtagatgaagtctcatatgtggccatctttagaggcaatagatggcaaatatttcctattgagatatataaaaggtgctagactctcagctaatctcttcaggatcagaaaagcacttgggaaagagattctacacagaatgtaaatttcccccacaagagacagctttgcagggccatttcaaaatatgtcaaagaaatatattttggggtaaaatactttgatttccttttagggtctgctatttgttatgt

SEQ ID NO: 558224 - DNA, 612 bp, Homo sapiens
tcaatcagtttaggggtttattttgcaaaaattaaggatcatgactcatgacacagcctcaggaggtcctgagaacatgcgcccaaggtggttgggttacagcwtggttttatacattttagggagacagaagtcaggcaaagacataaattaatacatgtaaggtatacattggtttggcccagaaaggtgggacagcacaaagggaatgatggggttacatgtcataggggaatttaaagatttttctgactggcagttggtagacagagataaattattatataaagacctggaatcaatagaaaggagtgtctgggttaagataaggggttgtggagactaaggtttgtattatgtagatgaagtctcatatgtggccatctttagaggcaatagatggcaaatatttcctattgagatatataaaaggtgctagactctcagctaatctcttcaggatcagaaaagcacttgggaaagagattctacacagaatgtaaatttcccccacaagagacagctttgcagggccatttcaaaatatgtcaaagaaatatattttggggtaaaatactttgatttccttttagggtctgctatttgttatgt

SEQ ID NO: 558225 - DNA, 208 bp, Homo sapiens
gttttggatatacagttttaaaatatatctttaaaaagtratttttagttactaatatttatggatgtaaaagtaatatagatccataaagacttacatgggaagcaaagaaaggcagacacaagatttcaaagggatcacctatgatactaccatatgcattacattaaaagataatttattgagatgaaattaacataatgtaaaa

SEQ ID NO: 558226 - DNA, 381 bp, Homo sapiens
agcagcccagcggtttgacctgagatagttccttgctgcaacctggtctcggttccacacccttctcctcaacacctaccctcagcctcttgtgctcaatgatctctttctatgttcattgtaccagaatgcaccccgaggaaagggtctgttactgtcatttgtactgacacgttattgtaaaggcaaggcattacccttccagggccgcagggtagagccttactggagaggaaggacccaggcactgactgctatagagwgctggggtgggatctgccttgcgcttcccctccaacccagccctgggctggttaggcactgctcccaggttccccagaccctgtgttcacctctgtgacagctctgaggacagcaggt

SEQ ID NO: 558227 - DNA, 536 bp, Homo sapiens
catgttcccttctccatcatgaatcatgccaaagctatgagagasagagagagagagatggttctttcagaacaaaaacagtttaaattatctgataccctctaacaattacaagtcaagactgtgagactccctcacccctatatgctaggcaggcaaaaataaaagtcacaactgccaattggttaagaatattcacgtattccaagacagtttctgaagaatggaccatccaccaaattgcctcaaagtgtacaccaatatcatagaaatgtccagatgcctgcgtattgaatggggtggagggacttgggatcttcttgattaggctaacactgctctatgtagcttctttttctccacactcttttctgctcagcaggatcgttagagtttccatgggtgttcgttagaaatgtagatgccaggcttctacccaggaattgttgactcagaaaagagagatccaggcgtttgagctgtccaaacaaactccccaggcgagtttgatgcttactgcaatttgagaactacaa

SEQ ID NO: 558228 - DNA, 512 bp, Homo sapiens
aaactatacaaacacatggaaattaaacaatatgctcctgaatggccagtgggtcaatgaagagatcaacaaggaaatttaaaaatttcttgaaacaaatgataatgaaaacacattaaccaaaaccctatgtgatacagtgacggctgtactaagagggaagtttatagctaaaagcacctacatgaaaaaagaggaaamatttcaaataaataaccaaatgataaaccttgaagaactagaaaagcaagagcaaaccaaacccaaaattaatataaaataaaaataaaaatcagagcagaaataaatgaaactgaaacaaagaaaatacaaaagatcaacaaaccaaaagttagttttttgaaaagataaaattggtaagactttcccagactgtgaaaaaagagagaaaccccaaataaacaaaattagagatgagaaagaagacattactactgatactacaggaattcaaaggatcattagtggttactatgagcaaccatatgcca

SEQ ID NO: 558229 - DNA, 350 bp, Homo sapiens
tattatgtcttcgtatatatttatattgtggaatgattaaatcaagctgcttaacacatctcttatgtcacatatttatctttttgttgtgagaacactgaaaatagactttttagcaatcgaaaaaaggcaaacccttaaaagcagagagtagaatgctagttaatgctggaggcaagggatagggaatggggagatgttgttcacagggtacagtttcagttagacacaaagattgagttttagagattgactttatagcagagtgactatatttaaaaatgacttmttgtacatttcaaattttctatttaaaatacacatagtatctgtattcccagttcttaaaa

SEQ ID NO: 558230 - DNA, 372 bp, Homo sapiens
actataaacatatgcgctgacaactacaaatatcaactatttagttttcctttaaataatatgttgttatgttataaatgtcatggaaccaggaattgaaacagttcactgtacattcctggaaataaacttcaaagcacatctggtttacattaactagttatgtcactggaaacacaatctaaaccacagtgcttgctgtaaaaattttaactttcacagactctcakagctcaaacaaaaaaagtaaaataaagtttctgtaacttcaatctgaaatatagaagaactttactctctttattattagtgctatttgttatatatttaaaatactctgaaaacatgattgacaaacaaaattagtgcaca

SEQ ID NO: 558231 - DNA, 578 bp, Homo sapiens
gttacagaaacaaacaaaacaccagttgaactccttaaattacaacctcactcaatcccgcaatacaaatccaatgttttttaaattcgactaactagctcagaaatgtccctgacaattatcttattgttaaaatggaggagtggttttwccaatccagtatcttacatgcaaaaaaaaaaccacactggacttgatagtgtttttcattgtttcatctaaaataaaaagcttaagcacaaatttcatttttgtgattaggcagagaatataggccaacagctgagagtgcacactcgggctttgaatccagtctaccactcaccagcgcacagcctcagaaggctccttaacttcttggtgccaacatttttctattgtaaaacttgaaagctactattagtccttgacttatgaaaatgcttggaagatacattgagaacagattgtggtggtgtgtgttacgcaaatattagcttttgtgattattaatgactctcaaattcagacaggaattgtttgggaaccgaatcgaatgacagcagtacagattcaagggttttttttaaattcccatt

SEQ ID NO: 558232 - DNA, 592 bp, Homo sapiens
attttcctagagagtcctattcaacatttaactgaaggtgttctgccaaataataaggattggcttcttagtcctctgggcaccccagaatccagaacaatgtatgacacgtgccatttctccatacgtgtttgtagcagggaataataaatgtgkgtgtcaatgatggctgctttacttccttttaaataaagagaaatcactggttgtattactctgaataccaattatattcagtttaataaaaatcaagccctttctctgtcaatgcttccgatataaaattatctcaaatacaggaagcctgcccacttttaaaggcaggcacattgcttcattcaagcattaaattctgcaaaaattcattttaaaggatacttcaaatatatatatttgagacaatgtctctgtcacccaggctgaagtgcactggtgtgatcacagctcactgcagccttgacctcctgggctcaaatgatcctcctatcccagcctcccaagtagctagaactacaggtgtgcaccaccacacccagctaatattttcttttttgttattattgttacagacagggtgtaactatgttgccca

SEQ ID NO: 558233 - DNA, 579 bp, Homo sapiens
acatatatcaaaacatcaagctgtacatcttaaatatatcttatataatttttacatcaatgatatctcattaaatctgttaaaaaaagacattcagactaggtactattggaatgtccaataaagccatgtctatttttaagttccaggattttaagttccatacactgcagagtgtgtgggtttsttacataggtaaacatgtaccatggtggtttgctgcacctatcagcttatcacctaggtgttaagcctgcatgcattaactatttatcctgatactctccctcccccgacaccctccccctgctaggccccagtgtgtgttgttcccctgagatggtatctcattgtccatgtgttctcaatgttcagctcccacatgagtgagaacgtgcagtgtttggtttttctgtttctgtgttagtttgcttaggataatggcttccaggtccatccatgtcctgcgaaggacatgatcttgttcctttttatggctgcatagtattccttggtatatatgtaccacattttctttagccagtctatcactgatgggcatctgggttgattccatgt

SEQ ID NO: 558234 - DNA, 579 bp, Homo sapiens
acatatatcaaaacatcaagctgtacatcttaaatatatcttatataatttttacatcaatgatatctcattaaatctgttaaaaaaagacattcagactaggtactattggaatgtccaataaagccatgtctatttttaagttccaggattttaagttccatacactgcagagtgtgtgggtttcttacataggtaaacatgtaccatggtggtttgctgcacctatcagcttatcacctaggtgttaagcctgcatgcattaactatttatcctgatactctccctcccccgacaccctccccstgctaggccccagtgtgtgttgttcccctgagatggtatctcattgtccatgtgttctcaatgttcagctcccacatgagtgagaacgtgcagtgtttggtttttctgtttctgtgttagtttgcttaggataatggcttccaggtccatccatgtcctgcgaaggacatgatcttgttcctttttatggctgcatagtattccttggtatatatgtaccacattttctttagccagtctatcactgatgggcatctgggttgattccatgt

SEQ ID NO: 558235 - DNA, 627 bp, Homo sapiens
acctggttttgctgtagatattgtcattgagtttttgatttttcagaacaagttgctgtctagtcttatgaagagcttttggaggactgaaaaactactttgttgctatgtctaactttccataatttcaggagaaaaaacatttctaatagcactgcataagatgacttcagctggcacaaartttgaaaatggtcaattcaaaacataaaggacagtttcaacaatgtttgtcattttaaatagaaacttttcttagatggtacctcaaatagcatatttttcagaaagtacttttctttgatttctgttttctttagatattgtgacaagaagttttaagttctcaaagtagctggtattaaaagttgaatttaaaatctgtaaaatgtttccaaaataggggatggggcgggggtgagaagcagcagaacaaaacagatatgtcaaaagtataaaatatatcaaaaaacctcaatgattatagtttttaaaattcagaaacaatatattgaggcaaaaatttcaattacctcattttccttatttagttatttagaacactggcaagcaattcaaattcatcctctttttatttttgggatactttaccagcactagggtcaa

SEQ ID NO: 558236 - DNA, 605 bp, Homo sapiens
tggattttgactatgtttaatttttataagcattataaatagattttttgctaattaaatacaacctttttgagtataattgactcatatgattatctcttcagcaattactcccctagttcattcattatgtactattagagtcatcattagaccaggaatgaattcttatcatcacaattaagtaaatttgttttgacctaagtacaaaaaaagagatcatgttaccttttaactctcaagaaagaaatcaatacattggataataatgcagaatgtattttcagcttgataaaatttaaagataactgcagaattaagtaacttaatggagagaccaagttcatatcagctaggtcaatgttgtagaccacaacatgcaaaggaaaagagtctatcttttaaaaccactaagagttgagtgctttactggctgtmtgccattcttcagaggttttctgttaaatatgaatatttcatccacttatctctccaaatgaaatttatcaatagcatttactttttccatttttagctatagctgaattaaatttcatcctaaattctttcatggaagaaaggttgggaagaagagaaggagaaac

SEQ ID NO: 558237 - DNA, 661 bp, Homo sapiens
aacagcaccctaaaatcctcagttaggatctaaaagagagakaaatactagatctgtctactctagtagaatataagctctttaagacagaatattgaaagtgtttcatttaccattcactatttcatcacactataactttcatataaaatgttcccaataaatacatgctaagtaaaagaagaaaggaatttgttctttattatatagatattgaataggcccagatgagttttaagcatatttgtaacttgatgaggtcactgtattgtggagaatagcctaaagaaagaaggcaacctggacataacagaagaagataatattatggactacttactcagagctggaccatgtcctaagcacatcatgtattttatacctcttaattgtcataactttgtgaagtagatcttatcagtattttatgtaaatcagaaactgaggctcagattagataagaaattgcccaagatcacacaaattgtgtatgtggtagaaacaggattcaaaaactgaatttttcatcctaaatattatattcctgattactatgctctactgcctgtaataagtcaggtaaatagtaaagttgacctgaattaaaacagttttcctttaggagtaggagaggaatagatagaagaaagttccagacaaa

SEQ ID NO: 558238 - DNA, 544 bp, Homo sapiens
tccatacttaggtttgcatctaaagatgaaacaatacttgaatattaatgaggttaaacctgtcagggatggaactccatcaaatatgttcaaatgtatacagtcatatatatccatttgagaggattctagaaaactaaatttttattttgaaaactgacatgtcaaagaaaagaatctggcatgtatccagtctttcctttaaagactgtacaactaggtaaccaaatgataaatgaggaatgcttctctttcagaaatattgcagccaataaatcaaaaagttataatgaaagaagataatcaccactttgcaacccataattaattaatggattaggtataaatcatcgatggctgttaacttcacaaattagatatgaagttcctgaacagcrcaacttcacctctgaaataatctcaccaaaatattctagatccacctaacaattcacagacaaaaatagaggacagaagatcatgctaaatggtaacacagggatgtaatcggcaaaatccacagtgtggaaaattcaacaggaaa

SEQ ID NO: 558239 - DNA, 544 bp, Homo sapiens
tccatacttaggtttgcatctaaagatgaaacaatacttgaatattaatgaggttaaacctgtcagggatggaactccatcaaatatgttcaaatgtatacagtcatatatatccatttgagaggattctagaaaactaaatttttattttgaaaactgacatgtcaaagaaaagaatctggcatgtatccagtctttcctttaaagactgtacaactaggtaaccaaatgataaatgaggaatgcttctctttcagaaatattgcagccaataaatcaaaaagttataatgaaagaagataatcaccactttgcaacccataattaattaatggattaggtataaatcatcgatggctgttaacttcacaaattagatatgaagttcctgaacagcacaacttcacctctgaaatartctcaccaaaatattctagatccacctaacaattcacagacaaaaatagaggacagaagatcatgctaaatggtaacacagggatgtaatcggcaaaatccacagtgtggaaaattcaacaggaaa

SEQ ID NO: 558240 - DNA, 575 bp, Homo sapiens
ctgggtatccttcgtttcatctggcaactgtaactatctcgagtggtgtatgtatttatatgtgtgtgtttgtgtagttagtatggggtggtctgtcttctatgggaatttgtgaaaggcagagaaggttttagtcaccatgtacatattataaaatacattcagccattctcattaagtctaaattaaaaacagtttcccccatcctccataggcggggtgcagtggcatgatcttggctcactgcgaccttcatctcccaggttcaagcaattcttctgcctccgcctcccaagtagttgggattacaggcgtgtgccaccatgcctgtctaattttcttgtattwttagtagtaattttagcaatttttagtagtagtaattttagcaattatattgcttgggtatcttaactatttctgcaagattgcctcttgacttcagaaatgagacaaaatcttttttttctgtatttttttagaagaaggtaggcaatataaggaccaaagctaagaagtactcatgatataaaaaaatgttattgacacactaagaaatcagcagtttcagtctt

SEQ ID NO: 558241 - DNA, 469 bp, Homo sapiens
ccgctaatttttgtatttttagtagaaatggggtttcaccatgttggccaggctggtctcgatctcttgacttcatgatctgcctgcctcggcctcccaaagtgctgggattacaggcatgagccactgcaccrgccttatctttgtttttattgtatttgcttttgggttcttgttcgtgaaatcctttcctatgccagtgtctagaagggtttttccaatgttatcttctagaatttttatagtttcaggtcttagatttaagtccttaatccattttgagttgatttttgtataaagtgagagatgaggatctagtttctttctcctacatgtggctagccaattatcccagcaccatttgttgaaaagggtgtcctttccccactttatgtttttgatggaaacacatcccatgctcatggatggttagaatcaatattgtgaaaatgaccatactgccaaaagc

SEQ ID NO: 558242 - DNA, 584 bp, Homo sapiens
cactctggctcctcttttttttttttaagaaacaagattttgctctgtcacccaggctggagtgcaatggtgtattcttggctctctgcagccttgacctcctgggctcaagtgattctcccaccttagcctcccaagtagctgggactacaggcgtgcaccaccacacccagctaattttttattgttttgtagagaccaggatcttgctatgctacccagggtgatcttgaactcctgggctcaagcaatcctctcaccttggcctcccaaagtgctgggattacaggcatgagacaccacacccagccttactacacctcttaacatgcacaccagatggcctctggtaaataaatgattggaaattgagatatcacagaatcatctcactcctagcaacaattccaaggtgacgatagacaaaacctggggcagagcacagtaacctgacttcttgctcatatttctaccaccayatctgctgtcatctcagtctcagtctctcactgactactccaaatgtccatcttgtaagcacttcccctaaagagtggttggaaatagatagctctcctacaatg

SEQ ID NO: 558243 - DNA, 595 bp, Homo sapiens
aggctattcctccttcttaaactcgccacacaccacaccatgctacctgtcattattctgttctccctgactctccctcagcacttgcatatggctaygtccaactgtccgtctctctgcccttcactgatgccggttctagttcttcatgaaatgataaactcacaaaaggggcatcagggtcctctacatcctcaggaactccccactatatattgtgttgctccttgctcagaatagaccatctgtaaataggggtgctgcaggtttaagacaaaacttctcatcagcatgctcagttttctaggcagtttacatttgagactgcaaagcagtgggcgtgtaactgcttccaaccttctctgggtggtgatgtaatcatggggagaccatctgtgtttcctccatctgttgaggcttctctgcacctaatcaagtgcaatgcaccaactcaagcctcatctttccaagcagccttctccgcctgaaccacccttcctcaggagtccactcaacctgggtctccagagcagtggatatgtagacaggctacagcagaatcactgagcctccatttccttatcaataaaatggg

SEQ ID NO: 558244 - DNA, 595 bp, Homo sapiens
aggctattcctccttcttaaactcgccacacaccacaccatgctacctgtcattattctgttctccctgactctccctcagcacttgcatatggctacgtccaactgtccgtctctctgcccttcactgatgccggttctagttcttcatgaaatgataaactcacaaaaggggcatcagggtcctctacatcctcaggaactccccactatatattgtgttgctccttgctcaraatagaccatctgtaaataggggtgctgcaggtttaagacaaaacttctcatcagcatgctcagttttctaggcagtttacatttgagactgcaaagcagtgggcgtgtaactgcttccaaccttctctgggtggtgatgtaatcatggggagaccatctgtgtttcctccatctgttgaggcttctctgcacctaatcaagtgcaatgcaccaactcaagcctcatctttccaagcagccttctccgcctgaaccacccttcctcaggagtccactcaacctgggtctccagagcagtggatatgtagacaggctacagcagaatcactgagcctccatttccttatcaataaaatggg

SEQ ID NO: 558245 - DNA, 570 bp, Homo sapiens
ctttataaaaccatcagatctcataagacttattcattatcatgagaacagcatgaaaaaaactcaccccagtgattcaattatctcccaccgggtccctcccatgactcatggggattatgggagctacaaatcaagatgagatttgkgtggggacacagtcaaacaagattagacactaatagatgactttggcctaatgtccccatttctgtttacagaagctgagcctcagaaggatcaattgtctggttcatggctacagagaaacctggtagaagagccctacagagatggctattcagattctgtacacactgccagggcttttggagtgggctcatgtttccaagctatgcatatctgagtggcaagacagaaactatcttctataattcaatgtgctattacaccacaccccattcagacagaaatgtataatccagccacctccagaaaacctggtctaactgtggattattcagaccttttgggtctcaaccaaattaatttaggaaaagagttctaggcctcctattttctccattcccagaagaccttacaggtctc

SEQ ID NO: 558246 - DNA, 367 bp, Homo sapiens
ggtgtagagtagtagatttcaaccttggttgcacattagaatcacttgggtacgttattttttttggtagaattttattttgtttatttttttttttacagttccctgagtttttttttttttttttttttttttaagtttttatttccataggcttttgggaagcaggcggtatttggttacataagtaakttcttcagtggtgatttgtgagatctcggtgcacccaccatccgagcagtactcactgaacccactttgtagtatcttatcccttactccctccccgctttccctctgagtccccaaagtccattgtatcattcttgcgcctttgcatcctcatagcttagctcccacttatgag

SEQ ID NO: 558247 - DNA, 367 bp, Homo sapiens
ggtgtagagtagtagatttcaaccttggttgcacattagaatcacttgggtacgttattttttttggtagaattttattttgtttatttttttttttacagttccctgagtttttttttttttttttttttttttaagtttttatttccataggcttttgggaagcaggcggtatttggttacataagtaagttcttcagtggtgatttgtgagatctcggtgcacccaccatccgagcagtactcactgaacccactttgtagtatcttatcccttactccctccccgctttccctctgagtccccaaagtccattgtatcattcttgygcctttgcatcctcatagcttagctcccacttatgag

SEQ ID NO: 558248 - DNA, 556 bp, Homo sapiens
tctgattccttacaacacacctctttgcataaagcaattctgagtgaacctctgttctttgcagtgaaacaggacttaagtaaatataagatttaactaagagaagtttgcacagatgcttctgggtgatagaaagataaacaggactctaattcatgaatatgctaattaattttctgctttggaagttaatgcttgttagctgacaatagatattagaaataatagttattgtctctttaatatctatagagcatatttaagggtatctttgttatctcaataacacaagctcagaaaaactggcttcagaaatattggctccatttgcagcccatttagctaagtgggtgyacccagtgtcctccggcttggcctcatggctgccatctctcagaaagtactgcctgtaccactcttatactctggctctctccactttgaactgaatgtttcccactgagctttaatttgtgactttctatgtttgtatgtatttatttaacattttagacatagagtcttgctctgtcacccaggctggagtgcagtggca

SEQ ID NO: 558249 - DNA, 549 bp, Homo sapiens
gaactcctgacctcgtgatttgcctgcctgggsctcccaaagtgctgggattacaggcgtgagccactgtgccctgctggttagctagtatatttttgagaattttttgcatctatgttcatcagggatattggtgtataattttctttgttatgtcctttccttgttttcctattagggtgatactggctttatagaatgatttaggaaggagtccctctttctgtatcttttggcatggtttcagtaagattggtgtcaattcttctttgaatgcctgatagaattcagctgtgaattcatcatgtcctggtttttttttttttttctttctttctttttttttttttgaattggtaattttgaatggctctttcaatctcactatctgctattggtctgttcaaagtttctatttcttcctgatttaatctagggaggttgtatatttctagaaatttatccagctcctctagactttctagtttctttgcataaaggtgttcatcgtagccttgaatgatcttttgtatttctgtggtattggtt

SEQ ID NO: 558250 - DNA, 549 bp, Homo sapiens
gaactcctgacctcgtgatttgcctgcctggggctcccaaagtgctgggattacaggcgtgagccactgtgcccygctggttagctagtatatttttgagaattttttgcatctatgttcatcagggatattggtgtataattttctttgttatgtcctttccttgttttcctattagggtgatactggctttatagaatgatttaggaaggagtccctctttctgtatcttttggcatggtttcagtaagattggtgtcaattcttctttgaatgcctgatagaattcagctgtgaattcatcatgtcctggtttttttttttttttctttctttctttttttttttttgaattggtaattttgaatggctctttcaatctcactatctgctattggtctgttcaaagtttctatttcttcctgatttaatctagggaggttgtatatttctagaaatttatccagctcctctagactttctagtttctttgcataaaggtgttcatcgtagccttgaatgatcttttgtatttctgtggtattggtt

SEQ ID NO: 558251 - DNA, 408 bp, Homo sapiens
gatcttttggggagctctgaagctgggatggccattcagaattgtcctgaggcaagtagtcattggttatgacctgccctgcaagggggccatgaccttggtcaaagcggcagagcaattcctggagttggcttgcccagcagttgggggaatatgtctttttttttttccttaaaacttttaagttcaggggtacatgtgcaggatgtactggtttgttacataggtaaacatgtgccrtggtggtttgctgcacagctcataccatcacctagatattaagcccagcatccattagctattcatgctgatgctctccctcctcccaccttcacccctgcaacaggccccagtgtgagttgttccccaccatgtgtccatgtgttttcatcattcagttccctctta

SEQ ID NO: 558252 - DNA, 615 bp, Homo sapiens
aaccattatggaaaacagtttggaggtccctcaaaaaactaaaactagaaataacatataatccagcaatcccactgctgggtatataccaaaaagaaagcaaatcagtatatcaaagagatatttgtattcccatgtttgttacagcactgctcacagtagccaagacttggaaccaaccttattgtccatcaagagatgaatggaaaaggaacacgtggtacatacacccaatggagtcctattcagccataaaaatgaatgatattctgttatttgcaacaacwtggatggaactggaggtcattatgttatgtaaaacaagtcaggcatggaaagacaaacatcgtatattctcacatatttgtgggttctaaaaactaaaacaattgaacccatgaagatagagggtacaaagatggttacagctgcttggaagggtagtggggtggaaggactgtaggggttggggttggttagtggataaaaaaagatggttagaaagaatgaataagaactagtatgtgacagcacaaccgggagactatagtcaataataatttaattgtacattttaaaataactaagagtataattggattgtttgtaacacaa

SEQ ID NO: 558253 - DNA, 451 bp, Homo sapiens
attaatactcgggaggctgaggcagaagaatggcttgaacccgggaggcggaggtggatgtgagccagagatcatgccattgcactccagtctgggaaacaagagcgaaactccgtctcaaaaaaaaaagaaaaaaaaatgctaatatcaaaatgagtrctacattagtggatttaaacatatttcagactagagttttaaagtaagacaaagttattaagtttatagttaagcttaggagcattttgaaacaaagatgctttttagagaaaaagttaagtaaactatggtccaaggttaatgaggagtactatagaggagttaagtagagtaaggtaaatcttaatgttgtatctccaagacagtttcgagttttaaaacgtagtataggccgggcacagtggctcatgcctgtaatcccagcacgttgggagggcgaggtgggaggatc

SEQ ID NO: 558254 - DNA, 451 bp, Homo sapiens
attaatactcgggaggctgaggcagaagaatggcttgaacccgggaggcggaggtggatgtgagccagagatcatgccattgcactccagtctgggaaacaagagcgaaactccgtctcaaaaaaaaaagaaaaaaaaatgctaatatcaaaatgagtactacattagtggatttaaacatatttcagactagagttttaaagtaaracaaagttattaagtttatagttaagcttaggagcattttgaaacaaagatgctttttagagaaaaagttaagtaaactatggtccaaggttaatgaggagtactatagaggagttaagtagagtaaggtaaatcttaatgttgtatctccaagacagtttcgagttttaaaacgtagtataggccgggcacagtggctcatgcctgtaatcccagcacgttgggagggcgaggtgggaggatc

SEQ ID NO: 558255 - DNA, 459 bp, Homo sapiens
ctcactttggattcaggactagggccctcaagtgggtcccgaaagctgcccaaagatcactccgcctcctctgcatctgtccctctttcactctcctacacaatcgttcccgaccttcttctccctcctcagacttccacatctcttcccytatcctcacgctcagccatgaccttgcttcctgattcactgagaaaacagacgtctgcacacgcacccaccacaccgacccacccatctctgtcggttcacactctcaggcttctttcctgttaactgggtctgccgcccatccatctaagacaatccccaacctgggccctggattccacctcccctcgcctactcaaagaagtcatctggttgtactgcctcttccttccacagcctcagtttcccctttctacttgactctgctcatccacagacatgccggttgctcacgtgtgtttgcaaaag

SEQ ID NO: 558256 - DNA, 276 bp, Homo sapiens
cccggctgctctggaactcctgggctcaagtgatccacccaccttggcctcccaaagttctagaattataggcatgagccaccacacccagcccacttaagtgatcttttggagactggccacccatcagcaatacatgttttgaartttaattgagcaagaaataaacttattatagacactgagattttgatgcttgttataggcgctattaatattatcttaattaacggaggtaatgaaacaatacatcacatttaaggtgaaatgttaaac

SEQ ID NO: 558257 - DNA, 361 bp, Homo sapiens
  misc_feature 288: n = A,T,C or G
aaatgcaatgaagaaaaagaatagagtaaaaagacagataattacattggaagagaaggcggtagtaggcagggtggtcagggaagtgactttaagttttagggtacatgtgtacaacaygcaggttagttgcatatgtatacatgtgccatgttggtgtgctgcacccattaactcgtcatttaacattagtatctcttaatgctatccctcccccctccccccaccctacaataggccaaggtgtgtgatgttccccttcctgtgtccatgtgttctcattgttcnattctcacctgtgagtgacaacatgtggtgtttggttttttgtccttgtgatagtttgctgagaatgatggtt

SEQ ID NO: 558258 - DNA, 592 bp, Homo sapiens
cagagggttagaggagaagcccttttttccttctgagagcttgtgactccttgggtagatcttttgttttgtttttgttgttttttgaaagctgttctacaatgctcattttataaaaatgtattaaaccccttatatttatccagatacattcactgatagtgattttgattggactgatttcctttttaagcctagaaatgtatacaagctttagaaaacagggaaagagtcatagaaaagtattaaaaacacctacaaagccaggtgcagtggggaacacctgtaatcctagcactgtgggaggctgaagtggtcagattgttttgagctcaggagtttgacaccagcctggacaacgtggcaaaaccctgtctctacacaaaaattagcagggygtggtggcatgcgcctgtagtcccagctacctggttgggggctaaggcggggagcatcacttgaacccaagaggtggaggccgcggtgagctgagattgctccactgcactccaggctgggtgacaaagtgagacctgtctcaaaaataaataaataaacacacacacacccaaaaacctataaacttgccaca

SEQ ID NO: 558259 - DNA, 499 bp, Homo sapiens
taatgtgtggtaagatgtgagaaatggttacagtgtttgccacattcttcatatttgtagggctagtttccattatgaattatcttatgttcagtaaggtttgaggacgttaaaagctttgcaacattcttcacgtttgtagggtttctcttcagtataaattgtttattaagaattgaagaattaggctgggcacggtggctcacgcctttaatcccagcactttgggaggccgaggcgggcagatcaccagaggtcgggagttcgagaccagcttgaccaacatggagaaaccccgtctctactaaaaatacaaaattaggtgggcgtggtggcacatgcctatagtccctgctactcgggaggctgaggcaggagaatcgcttgaaaacccaggaggcggaggttgcagtgagccgagattgtgccactgcactccagagcctgggcaactagggcgaaactctgtttmaaaaaaaaaaaaaaaaaaaattgaaga

SEQ ID NO: 558260 - DNA, 479 bp, Homo sapiens
ccctgccttacttatttatttatttagagacagggtctcactctgtcacacaggctggagtgcagtggcgcaatcatagcaaactgcagcctcgacctcctggcctcaagcgatcctcgtgcctcagcccccaaaagtgctgggattacagatgtgagactccaagtatgacagccttagttcttctttttctttytgagatggagtttcactcttgttgccaaagctggagtgcaatggtgcaatcttggctcactgcaaccttgacctcccgggttcaagcgattctcctgcctcagcctcccaagcagctaggattacaggcgtgtgccaccacacgcagctaatttttatatttttagtagaaacagggtttcactacgttggccaggctggtctcgaactcctgacctcaggtgatctgcctgcctcggcctcccaaagtgctgggattacaggtatcagccatcatgcctggc

SEQ ID NO: 558261 - DNA, 546 bp, Homo sapiens
cgcctgtaatcccaacactttgggaggccgaggtgggcagatcactagaggtcaggatttcaagaccaggctagccaacatggtggaacccgtctccactgaaaatacaaaaattaaccaggtgtggtggcatgtgcctgaatcccagctactcgggaggcagaggttgcagtgagctgagattgcaccattgcactccagcctgggtgacagatcgagactccatctcaaaaaaaaaaaaaaggtattaagtgtttgtgtgagtgtgcatgcatatatccgcgcgtgtstgtgtgtgtgtgttagtataggtataaagaaaatttggaacgatatacaagaacctaatagcggagaggtcatctggggtggggctaggtgtggttgtttgtttattttgagacagcgtctcagcaggtccccaggctggagtgcagtggtgtgatcatagctcaaatgcagccttgacctcctgtgttcaagtgattctaccgccttagagtcccaagcagctaggactagagacatgtgctgccacgcccaaat

SEQ ID NO: 558262 - DNA, 629 bp, Homo sapiens
gccacacgttgaagttttctgtgtcatttttggaaataggtatgacaatctgtaagcggcacagagagagagaaccgcagcctccatgggaacgaggaagtgggaacgggatgagagtttggaatcgatctccgtggaaggtctgaattgcaaggcgggtttccctggggacaatctcaaccataaaaaagttctgctcacatgactgatggcttttcaataacaagtatatggcggtcttgaatgtgcacaggttgacagttttcccgggagcttctacatgcacgagctggcagagtctagggacagggacaaggaatggagaaaatttcctcaactcctgaaggacacaggtgcccatggggacgtactgaatttctgcagaggcaccgtgaaacagaatcataagtcagaaggaaaatgcacctatttcacattccatcgtgacaaaagggagacgacttttagcttacytcctgattctgcgggttcctaaaagccaggatgactgctttaacttttatattttattttatttcagatggagtttcactcttgtcacccaggctggagtgcagtggtgtgatcttggctcactgcaatctctgcctcccaggttcaaggaattc

SEQ ID NO: 558263 - DNA, 348 bp, Homo sapiens
atgaattgttaaggagaacttgttcctgaagtccttatcacattccttacatgtataaggtttcyttccaatgtggattaacagatgggcagtgaggcttgaatgcccaccaaattctttggcacatttattgcatttgtaaagtttctctcctgtatgaattctccaacattgtgctaggtatgaatagctactatagaccttgccacattcattacatctataaggtttctcttccatatgaattatccagtgttctgtaaagtgtgaattgtgactaaagatcttaccacattcattacttttgtaaggtttctctccagtatgagttctccaatgtcgtgcaag

SEQ ID NO: 558264 - DNA, 348 bp, Homo sapiens
atgaattgttaaggagaacttgttcctgaagtccttatcacattccttacatgtataaggtttccttccartgtggattaacagatgggcagtgaggcttgaatgcccaccaaattctttggcacatttattgcatttgtaaagtttctctcctgtatgaattctccaacattgtgctaggtatgaatagctactatagaccttgccacattcattacatctataaggtttctcttccatatgaattatccagtgttctgtaaagtgtgaattgtgactaaagatcttaccacattcattacttttgtaaggtttctctccagtatgagttctccaatgtcgtgcaag

SEQ ID NO: 558265 - DNA, 348 bp, Homo sapiens
atgaattgttaaggagaacttgttcctgaagtccttatcacattccttacatgtataaggtttccttccaatgtggattaacagatgggyagtgaggcttgaatgcccaccaaattctttggcacatttattgcatttgtaaagtttctctcctgtatgaattctccaacattgtgctaggtatgaatagctactatagaccttgccacattcattacatctataaggtttctcttccatatgaattatccagtgttctgtaaagtgtgaattgtgactaaagatcttaccacattcattacttttgtaaggtttctctccagtatgagttctccaatgtcgtgcaag

SEQ ID NO: 558266 - DNA, 381 bp, Homo sapiens
ctccacacctgtgggtgtttcttgttaggtggaacgagagacttggaaaagaaaaagacacagagacaaagtatagagaaagaaataagggggccccaggggaccagtgttcaccatatggaggatcccgccagcctctgagttcccttagtatttattgatcatttttgggtgtttctcagagagggggatgtggcagggtcataggataatagtggagagaaggtcagcagrtaaacacgtgaacaaaggtctctgcatcatagacaaggtaaagaatcaagtgctgtgctttagatatgcatacacataaacatctcaatgccttacagagcagtattgctgcccgcatgtgccacctccagccctaaggcggttttc

SEQ ID NO: 558267 - DNA, 381 bp, Homo sapiens
ctccacacctgtgggtgtttcttgttaggtggaacgagagacttggaaaagaaaaagacacagagacaaagtatagagaaagaaataagggggccccaggggaccagtgttcaccatatggaggatcccgccagcctctgagttcccttagtatttattgatcatttttgggtgtttctcagagagggggatgtggcagggtcataggataatagtggagagaaggtcagcaggtaaacacgtgaacaaaggtctctgcatcatagacaaggtaaagaatyaagtgctgtgctttagatatgcatacacataaacatctcaatgccttacagagcagtattgctgcccgcatgtgccacctccagccctaaggcggttttc

SEQ ID NO: 558268 - DNA, 601 bp, Homo sapiens
ctccagcctgggtgacagagtgagaccctatctacaaatataaaacaaacaagtgaaacgtcttcagtcacaagtattccctaacaaatcactatagaattcatactgcagagaagccttacaaatgcagcgaatgtgacaaagcatttagataatgttcaggctttactgcccatcttgtaatccatactgcagacaaaccttacaactgtaatgaatgtggcaaggtctcaaattgaaattcacatcttgcgaatcaccacatagagagaaaccttacaaatacaaatcaccacatagagagaaaccttacaaatacaaatcaccacataatggagagaaaccttacaaatgcaacayatgtggtaaaatgttttagtcacaattcacaccttggacagcatcagataatttattcatgaaagagtccttacaagctgtgtacggaaagctcgtcatgagttttagcattaatgaacatcagaggttccatactaaggagaaatcatataaatgtaatgtatgtggcacaggctttcctgaggcctgccaaatcactagaaatcaaaatatacttttggataaaacgacacagatggat

SEQ ID NO: 558269 - DNA, 601 bp, Homo sapiens
ctccagcctgggtgacagagtgagaccctatctacaaatataaaacaaacaagtgaaacgtcttcagtcacaagtattccctaacaaatcactatagaattcatactgcagagaagccttacaaatgcagcgaatgtgacaaagcatttagataatgttcaggctttactgcccatcttgtaatccatactgcagacaaaccttacaactgtaatgaatgtggcaaggtctcaaattgaaattcacatcttgcgaatcaccacatagagagaaaccttacaaatacaaatcaccacatagagagaaaccttacaaatacaaatcaccacataatggagagaaaccttacaaatgcaacatatgtggtaaaatgttttagtcacaattcacaccttggacagcatcagataatttattcatgaaagagtccttacaarctgtgtacggaaagctcgtcatgagttttagcattaatgaacatcagaggttccatactaaggagaaatcatataaatgtaatgtatgtggcacaggctttcctgaggcctgccaaatcactagaaatcaaaatatacttttggataaaacgacacagatggat

SEQ ID NO: 558270 - DNA, 585 bp, Homo sapiens
ctcagcctggacttcattgtccatatcactatcagcattttggtcaaaccattccacaagtctctaggaagttccaaactttcgcacatcttcctgccttcttctgagtcctcctaactttccaacttctgtctgttactcagttccaaagtcgcttccacatttttggatatttttacagcagcttcccactacccagtaccagtttaccgtattaatttgttttcatcttgctatraagaaatatctgaagctaggtaacttataaatgaaagaggtttaattgacttatagttctgcatggctggggaggccccaggaaacttacaatcatggcagaaggggaagcaaacatgtccttcacatggaagcaggagtgagaagaatgagaacagagtgaagggggaagcctcttacaaaaccatcagatcttgtaagaactcattcactatcatgagaacagcatgagcagcataagagtaaccgccccatgattaaactacctcccaccaggtccctcccatgacacgtggggactataggtactataattcaagatgagatttgggtggggacatagccaaa

SEQ ID NO: 558271 - DNA, 585 bp, Homo sapiens
ctcagcctggacttcattgtccatatcactatcagcattttggtcaaaccattccacaagtctctaggaagttccaaactttcgcacatcttcctgccttcttctgagtcctcctaactttccaacttctgtctgttactcagttccaaagtcgcttccacatttttggatatttttacagcagcttcccactacccagtaccagtttaccgtattaatttgttttcatcttgctatgaagaaatatctgaagctaggtaacttataaatgaaagaggtttaattgacttatagttctgcatggctggggaggccccaggaaacttacaatcatggcagaaggggaagcaaacatgtccttcacatggaagcaggagtgagaagaatgagaacagagtgaagggggaagcctcttacaaaaccatcagatcttgtamgaactcattcactatcatgagaacagcatgagcagcataagagtaaccgccccatgattaaactacctcccaccaggtccctcccatgacacgtggggactataggtactataattcaagatgagatttgggtggggacatagccaaa

SEQ ID NO: 558272 - DNA, 577 bp, Homo sapiens
aagactgctgttaaaaacacttaggaaatgaaatgttaaaatccctcctaaacattacagatgcttatgactggccactaggttgagagaggtggaaggggaaagggctgttggccaaatgttcctatttagaagatactttcaaattatagtctttgttatgtatgtgcatcacttatttaatgctggcttgagtggaaaactgaagtcctatttgaaatacscagtgtttctagatgtttaaaagtgtgttaaaagtaaagggctaaagtcacatcctttacttatttttttttgttatttcataagagtggttgcatttggggagtggctgcatttagatatgagattgttaaagttgatgttttggagagtatgctgactgttcactgggtggtggcaggtggagggaggagaaaggatgaggagagaaggattatgtgcccatgagttaggttagtccagagggttgaaccattgtactctatgtgcattttagttaatattgctgtgtttaaaggataaacaagtcctaatgctcaaagtatgttataagtagaggtagtaaaatcactcc

SEQ ID NO: 558273 - DNA, 577 bp, Homo sapiens
aagactgctgttaaaaacacttaggaaatgaaatgttaaaatccctcctaaacattacagatgcttatgactggccactaggttgagagaggtggaaggggaaagggctgttggccaaatgttcctatttagaagatactttcaaattatagtctttgttatgtatgtgcatcacttatttaatgctggcttgagtggaaaactgaagtcctatttgaaatacgcagtgtttctagatgtttaaaagtgtgttaaaagtaaagggctaaagtcacatcctttacttatttttttttgttatttcrtaagagtggttgcatttggggagtggctgcatttagatatgagattgttaaagttgatgttttggagagtatgctgactgttcactgggtggtggcaggtggagggaggagaaaggatgaggagagaaggattatgtgcccatgagttaggttagtccagagggttgaaccattgtactctatgtgcattttagttaatattgctgtgtttaaaggataaacaagtcctaatgctcaaagtatgttataagtagaggtagtaaaatcactcc

SEQ ID NO: 558274 - DNA, 419 bp, Homo sapiens
ggtgacagtacatgataaaaagtagagttagagaattagccagtttgtaaacatctttttgttataattgatagaaaagatgcatcttggacaagggattgttaaataatttctgagcagtatatgtgagaacttgtggattaggttggcagtagaggggcaaaaggaagcacaaagggagagaagtatgagatgtgttcttatttacattctgacaaaagctaytgatgtatgtgcatgtctttggctggactataggaatacattaagtaatcaatgaaataataccttcttgctaatattttaatggtaaggtctcataataaattttcttaaaacattatacttagtatatcctgttgctttgtgtttcattttaaattgagctttaagggaatgcggtattttaatcagaattc

SEQ ID NO: 558275 - DNA, 599 bp, Homo sapiens
cagtctgctaatgttttattgaggatttttgcattaatgttcattagagattggcttgtagtttttttttcttgtgatctctgtgtctgggttaggtatcaaggtgatgctggcctcataaaatgtgtttggaaatattccctccaattctatttttgtaagagttaaaaaagtattgttattcttctttgaacatttggtagaattcagctgtgaagccatctggtcctgggctattctttgttgggaagttttttattgtttcttcaatatctttatttgttatttttctctttaagctttgtagtccttacttatcttggtaagttgtattcttctaggaatttatccctttcctttaggttgtccaatttgttggcatataattgtacatgatagtcccttatgatcctttttatttctgagacatctgttgtcatttcttcacgttaatttttgattgtatttatttgtgtcttctctctttttccttagttagactagctaaaggtttaccaattttgtttacctttttaaaacaaccgttagttttaytgattctttttgtggctttttgttttctatttgatttaattctg

SEQ ID NO: 558276 - DNA, 548 bp, Homo sapiens
atactgtcattctagtcttctatttttttgttgcttatctgtctagttattctatccattattaaaagtagggttttaaaataccccgctactattattgaaatttttacttcttctttccattttttctctggttttgcttcatgtattttagggctctgtggtacatttatggtgcatattgggtcatatatatttataattgttatttatccttgatagattgacccttttgtcattatccttttatcactataaaatgttcccctctctctttagtaacttgttttttgtttgttttaaagtcatgtttcttctgatactagtatagacactcctggtttcttgtggttgctgttgtgcttgatgttcttcaatcctttatactttcaacctatttgtaacttttacttaaagtgggtcttctatagatgacatataattggaagtgatttacttatccagtctgataatctctgcattttgattggaatattttgtcgtgttcatattgaatgctattwtatatttacataatcaatatatag

SEQ ID NO: 558277 - DNA, 565 bp, Homo sapiens
gtggaggttcccaaaactcagttgttgacttctgtgtacccacaggctcaacaccatgtggaagctgccacggcttggggcttgaaccatctgaagccatggcccaagctgtaccttggcctgttttagccatagctgaagcagctgggacacagagcaccaagtccctaggctgcacacagcagtgggtgcctgggcctggaaaccatttttagctcctaggcctctgggcctgtgatgggaggggctgcagtgaaggtctctgacatttcytggagatattttccacattgtcttgatgattaatattcacctccttgttacttatgcaaatttctgcagcaggcttgaatttctccccagaaaatgggtttttcttttctattgcatcattaggcagcaaattttcccaaatctcatgctctgtcacctcttgaatgctttgctgcttagaaatgtcttccaacagctaccctatgtcatctctctcaagttcaaagtttcacaaatctctagggcaggggccaaatgctaccaggcttgttgctaaggcatagcaagagtc

SEQ ID NO: 558278 - DNA, 456 bp, Homo sapiens
agataacacaaattcaaaacattatgagatttttttgcaattttttttagctcattggctatcgttagcgttagctattttatgtgtggcccaagactattcttcttccaatgtggtccagggtagccaaaagagtggacacccctgctttaatccattgtaccacaatcctacaagaaaccatcctcagaggacacgttttcctggatctcatccaggctgatgggkcctcaggagagccctctagtgctcagaagcagtatctgcaccaagaggagctcattgcagctagatacaggctacagtcaagacctaaagggaagccctgggaggttctaatgccggattcaaaaatcaggggcgggaagggggaagaagagggcatagatggagtctgaggaatcctgtagtcctccgcacactcaacagcaaggccagtagcctctctggagttca

SEQ ID NO: 558279 - DNA, 465 bp, Homo sapiens
aattgagccactattcattctctggtgggcttctctgccccagcaggactataggcctttaacataataagaaaggctgaagatggggctcccttagcggcctatggtcataaacaggaatcagaaccattgacctgggggtgggaggtggtgcatgatcaggcagtggagataaggtactgaaattgcttttagccattattgtttgctgcccttcatattagaaaatggtgtgtttggaactgactgcctgtgcctgtgtaggaaagaagaaagacataaagatgtgacaaactgccttgctgccgcactgagctccctgacagctagccttgggyggcaccagtaattcatgcaaactgtgaaggtgcagtggtgagacattctgacataactatcaaaataatggtaatttcagttcatctgttcataaaatggatcttttttatttaagaaaaaaagcca

SEQ ID NO: 558280 - DNA, 566 bp, Homo sapiens
gctagttcttggtgtgcagagccttgagtttcaaacctctggatcagcgtcagtctctaccagagggaggcagaggttctgtcctggaaccatggtttccatataagctagagtacttccgtctagcagaggacctgagcgtttatgtatgactaaaaggcatgagttaaacaagaggttttcctagttatagctgaggggaaaatattgagtaaaagactttcctgagatgttcctcatgrtggtgctaaaaggaggaggggaggcctggattgcagaggagaaaaaaaatgctgactccagtatccagaaaaatgttcaacttcctcccttcaacctctagaattaccaggggctcctgaatggtaatgagagtctgagctatgggagctggggagtcgagccccaggacccctcagtcctgctgggccgtttctaagactggttctgcacccggtgacctacaactccaggaacagtcttccttccagtggtctccatcacaggctggacagggtcggggtagcttcctcttgctacctgggcaatcctcaaagtgccctgat

SEQ ID NO: 558281 - DNA, 634 bp, Homo sapiens
cctttgttgctaaagtatcagtattcatttcctaaggggtttcataacaaattactacaaatcttggcttgtagatacatcactttgtctcttgtaaggatacttgtcattgaacttagggtccacctaaattatcctaggatgatgttctcttgagtcgcttattttaaatacatctggaaagactgtttttctaaataacattttctaaataacgtttctagttgtaggtgtgcatatctttgaggggacaatcattaaactcaatacagtatcaatggttatatttctccaaatatataaagaagttattagtatacaaattgaagtctttttagctgcttaattttcagtggctatttttttcccaaagttatcagcatygtgctgctagtcatcagtaattcacatactttacaaatacaggaaattatttttgatgctgaattagcaatgaattaatgttaccatagatctcttgtaatattttataaagttataaataacactctttgcttattcaactagttggtttaaaattcagtccacatgtgaaccagcagattaagatatctccctgttcaccaagatatatcctccccaggaaaacaaaaggaaaagaacaaagaaaaat

SEQ ID NO: 558282 - DNA, 548 bp, Homo sapiens
tgtcttaagagcaaatagcccacatagaatatgtttggtaataagaaacatgctacatgcatgcaaaaaaattacaggaccacagagctaaaaataccacatcacacattcgggtttttttgggggacgggtgctaagtatactgagagttataatagaaaatatataattgtattgttaatctgtggcctcattatgtgcaaattcaggattgcaaaggttgaaaatttcatttttttagcattccacagcaatgcctcagtgaatattcctgtttagggaagctcaatgttttttctttgttcttaggaagaagcaccgacatcaatcagraattcatcccttttttgtgtgtgcgtcatgaaataatcaatttcctgacaatggaaattatgtgatatttgacacgtttgagaaggtcacaccttttccttcaaatctgatgaatagaaaagaaaatacaattgctttatttcaactacatccaatctttctccaagccttatactctgcttagcagaaaaaaaataacaaaagtctaatctgat

SEQ ID NO: 558283 - DNA, 614 bp, Homo sapiens
ttcaatagtgagaaaacaaataacacaattaaaaagtaggcaaaagatctgaatagacatttctcaaaagaagacatacaaatggccaacaggartatgaaaaaatgctcaataatatcactaatcatcagagaaacgcaaatcaaaattacaatgagatatcatcttaccccagctagaatggctgttatcaaaaaggcaaaagataacaagtgtttgtgaggatgtggagaaaagggaatttttatttactattggtgggaatgtaaattagtatagccattatggaaagcagtatggagctttatctaaaaattaatagaactaccatatgaaccagcaatcccactagtgggcatatatcaaaaggaaatgaaatcagtaccttgaagagatatctgcactcccatgtttattacagcactagtctcactagccaagatatggcatcaacctaagagttcatcaacagatgaacagataaagaaaatgtggcgcatatccacaatgatatattattcaccataataaaaagaaggaagtcatatcatttgcaacaacatggatgaacctggaaggcattatgttaagtgaaataagcctggcacagaaaa

SEQ ID NO: 558284 - DNA, 614 bp, Homo sapiens
ttcaatagtgagaaaacaaataacacaattaaaaagtaggcaaaagatctgaatagacatttctcaaaagaagacatacaaatggccaacaggaatatgaaaaaatgctcaataatatcactaatcatcagagaaaygcaaatcaaaattacaatgagatatcatcttaccccagctagaatggctgttatcaaaaaggcaaaagataacaagtgtttgtgaggatgtggagaaaagggaatttttatttactattggtgggaatgtaaattagtatagccattatggaaagcagtatggagctttatctaaaaattaatagaactaccatatgaaccagcaatcccactagtgggcatatatcaaaaggaaatgaaatcagtaccttgaagagatatctgcactcccatgtttattacagcactagtctcactagccaagatatggcatcaacctaagagttcatcaacagatgaacagataaagaaaatgtggcgcatatccacaatgatatattattcaccataataaaaagaaggaagtcatatcatttgcaacaacatggatgaacctggaaggcattatgttaagtgaaataagcctggcacagaaaa

SEQ ID NO: 558285 - DNA, 614 bp, Homo sapiens
ttcaatagtgagaaaacaaataacacaattaaaaagtaggcaaaagatctgaatagacatttctcaaaagaagacatacaaatggccaacaggaatatgaaaaaatgctcaataatatcactaatcatcagagaaacgcaaatcaaaattacaatgagatatcatcttaccccagctagaatggctgttatcaaaaaggcaaaagataacaagtgtttgtgaggatgtggagaaaagggaatttttatttactattggtgggaatgtaaattagtatagccattatggaaagcagtatggagctttatctaaaaattaatagaactaccatatgawccagcaatcccactagtgggcatatatcaaaaggaaatgaaatcagtaccttgaagagatatctgcactcccatgtttattacagcactagtctcactagccaagatatggcatcaacctaagagttcatcaacagatgaacagataaagaaaatgtggcgcatatccacaatgatatattattcaccataataaaaagaaggaagtcatatcatttgcaacaacatggatgaacctggaaggcattatgttaagtgaaataagcctggcacagaaaa

SEQ ID NO: 558286 - DNA, 560 bp, Homo sapiens
acagtatgtagcctcttcagattggcttctttcacttaggaatacccactgaagtttcctcgatgtggaaactttgaggattgagactatggatgaggctgtgcttactggttattttatggttctattttatgggactgatatatcatttccattatctctatttccacttttcagccacctttaagactatgttagaataggcctcttcacttagcctattctaaggctaagtgaaggaaaaaggaaaagcttcctttycgtggcttgatagctcatttctttttagcactgaataatactctgttgtctggaagtaccacaatttatttatccattcacctactatagaacttcttgtttacttccaagttttggcaattatgaataaagctgctgtatatatccatgtgcagttttttgtgtggacgtaagtttttgactcctttgggtaaatactaacgagtgcacatgccagtggtatgatgagcatgtttgattttgtaagaaactgccaaactgccttccaaaggggctgtaccattttgcattcccaccag

SEQ ID NO: 558287 - DNA, 560 bp, Homo sapiens
acagtatgtagcctcttcagattggcttctttcacttaggaatacccactgaagtttcctcgatgtggaaactttgaggattgagactatggatgaggctgtgcttactggttattttatggttctattttatgggactgatatatcatttccattatctctatttccacttttcagccacctttaagactatgttagaataggcctcttcacttagcctattctaaggctaagtgaaggaaaaaggaaaagcttccttttcgtggcttgatagctcatttctttttagcactgaataatactctgttgtctggaagtaccacaatttatttatccattcacctactatagaacttcttgtttacttccaagttttggcaattatgaataaagctgctgtatatatcyatgtgcagttttttgtgtggacgtaagtttttgactcctttgggtaaatactaacgagtgcacatgccagtggtatgatgagcatgtttgattttgtaagaaactgccaaactgccttccaaaggggctgtaccattttgcattcccaccag

SEQ ID NO: 558288 - DNA, 560 bp, Homo sapiens
acagtatgtagcctcttcagattggcttctttcacttaggaatacccactgaagtttcctcgatgtggaaactttgaggattgagactatggatgaggctgtgcttactggttattttatggttctattttatgggactgatatatcatttccattatctctatttccacttttcagccacctttaagactatgttagaataggcctcttcacttagcctattctaaggctaagtgaaggaaaaaggaaaagcttccttttcgtggcttgatagctcatttctttttagcactgaataatactctgttgtctggaagtaccacaatttatttatccattcacctactatagaacttcttgtttacttccaagttttggcaattatgaataaagctgctgtatatatccatgtgcagttttttgtgtggacgtaagtttttgactcctttgggtaaatactaacragtgcacatgccagtggtatgatgagcatgtttgattttgtaagaaactgccaaactgccttccaaaggggctgtaccattttgcattcccaccag

SEQ ID NO: 558289 - DNA, 600 bp, Homo sapiens
atacttggcactgggtaatttataaagaaaagaggtttaaatgactcacagttctgcatggctggggaggcctcaggagacgtacaaccatggcggaaggcacctcttcacagggcagcaggagagggaatgagtgctgagygaagggggaagccccttataaaatcatcagctcttgtgagaactcactcactatcacgagaacagcatgggataaaccacttccatgattcaattacctccagctggtcccacccttgacacatggggattattacaattcaaggtgagatttgggtggagacatagagccaaaccatatcaactattattaccaagttgtttggatataactacttaataaatggaacagttagacatttcttttggcatagagatgctataaatattactgacacactaagggtggaaagaacagagaaagttttaggaactctactatatcatatcattctatagataaagatgtgagttattatatcgtatcattctgtaaatgaagatgtgagttataaggtaatgattgtagaaacttcagcacgatacctggcagagaatgagagcttagtaagtggttag

SEQ ID NO: 558290 - DNA, 600 bp, Homo sapiens
atacttggcactgggtaatttataaagaaaagaggtttaaatgactcacagttctgcatggctggggaggcctcaggagacgtacaaccatggcggaaggcacctcttcacagggcagcaggagagggaatgagtgctgagtgaagggggaagccccttataaaatcatcagctcttgtgagaactcactcactatcacgagaacagcatgggataaaccacttccatgattcaattacctccagctggtcccacccttgacacatggggattattacaattcaaggtgagatttgggtggagacatagagccaaaccatatcaactattattaccaagttgtttggatataactacttaataaatggaacagktagacatttcttttggcatagagatgctataaatattactgacacactaagggtggaaagaacagagaaagttttaggaactctactatatcatatcattctatagataaagatgtgagttattatatcgtatcattctgtaaatgaagatgtgagttataaggtaatgattgtagaaacttcagcacgatacctggcagagaatgagagcttagtaagtggttag

SEQ ID NO: 558291 - DNA, 616 bp, Homo sapiens
tctgccatttaggataaatcttcatgcatttatggccagaaatattccagaaccatgagaaacacaaacacacacacacatgcaaatacacatgcacacacaaatccacccccacacacccatacacatgcacatacccatacacacaccaatgtttctagctcggtaaccccaaccccaaagtggcatcaaagacttcaatcaaaaggcattttagccaaaagctagtatcatcactactgtggatcagacaaataacgtgtaagaccacatggcacccaaaatacattctattttcttggccactggcaaagcttcttatcaaccaaccatggcctcctttaattaggagtcctttccagacagtttcataaaagcacataattcaggaatgaaaaacgataaatacttggctaaagcaraaccatttaaatctcccaaggcaaaaaacaaacaaacagaaaaaagcattaatagtgaccctggtttcatgacctttgatattataaatatatatcagtgatgattttttcatgagtaacatggaaatctgaaaatagcttttaaaatttaactttaaaatttttatcaagtgaggcaaacttgccatagatca

SEQ ID NO: 558292 - DNA, 579 bp, Homo sapiens
agagttgtaagtttaccacaagtggagacctgggatgtacacccagggaccagagtcaccccataactcattttctcataaattgtttcctagagaagcctcctttttcagctagagccctttggatgccttttttcttttcttttttttaatttgactyttccaacgtagttgaaacacagaatctccgttaaccctcaatgtacactggtcttaatcagatcaagtttttaaccacaaggtaaaatgtttcactttgctcatgaatcttaagaatgggccatccagagtggctgtacccagaacaacaggtttactgttgtttgtttcactccagttccctgactttgactgctctctttgagtattgccttagctttcatttctaatctgtgaaaagatgccttccatttgcctacagccacttttgcatagattaattgtactagtttagtctgagttaattttaatttaatccatttgctaaggtcatttgcttttttttttttttttttttttttttggagacagggtcttgctgtcacccaggctggagtgcagtggcaagatcatggctca

SEQ ID NO: 558293 - DNA, 579 bp, Homo sapiens
agagttgtaagtttaccacaagtggagacctgggatgtacacccagggaccagagtcaccccataactcattttctcataaattgtttcctagagaagcctcctttttcagctagagccctttggatgccttttttcttttcttttttttaatttgacttttccaacktagttgaaacacagaatctccgttaaccctcaatgtacactggtcttaatcagatcaagtttttaaccacaaggtaaaatgtttcactttgctcatgaatcttaagaatgggccatccagagtggctgtacccagaacaacaggtttactgttgtttgtttcactccagttccctgactttgactgctctctttgagtattgccttagctttcatttctaatctgtgaaaagatgccttccatttgcctacagccacttttgcatagattaattgtactagtttagtctgagttaattttaatttaatccatttgctaaggtcatttgcttttttttttttttttttttttttttggagacagggtcttgctgtcacccaggctggagtgcagtggcaagatcatggctca

SEQ ID NO: 558294 - DNA, 479 bp, Homo sapiens
ccagattgcgccactgcaatccagcctgggtgacagaggaagactccgtctcaagaaaaaaaacaaaacagaatcagccctagcctgggcaacrgagtgggaccacatctctacaaataaatatgcaaactgggttgtgcacacctgtcacttcagcccaggaggtcaaggctgcagtgagctatgatcacaccactgactccagcctgagtgacagagcgagaccctgtctcaaaaaaaaaaaaaaaaagacctatgcctgctcacgaatctattactatacacccagaaaatacaaacatatcaactaaaatactaaaagcaattcttcaaaagtcatcactatagtagataataaacatgaaactcaattgcttcctttatttaaatagccagataataatgcaattgatgaaatagcctcataaaaacagaagcccttgccctccctccaaaatgtttttagaaataaatataac

SEQ ID NO: 558295 - DNA, 510 bp, Homo sapiens
tttgttgttgttagggcacagagaggtgtgcttgtgtgtgtttccatgagcatgtatgtataaaattctggaaaaggaaaatgaaattcaggaaatattttattctatacaggatgtatacccattaaatattgttagcayggtttagctttagcttgtacacgaagatcaatctgcatataagaaatggtatcaaaacttcaaatattggtaacatatttgataaacaccattactatagcattcagctttttgaaaataaaactacttatttggaaggtatatgaagtcaaaaagactgccactggtgacatagcttcaaatgctggaaggtccaagtaaaaactcttttgaggaggtatggaaagaatctcttgcaactttataatgtgatattttatgattatgctgttaatggctaaaagtaaccatataacaggctctgtgttattttatatacattgtctcatttaatcatgtaacaaactagtgaggtattttaaatatact

SEQ ID NO: 558296 - DNA, 510 bp, Homo sapiens
tttgttgttgttagggcacagagaggtgtgcttgtgtgtgtttccatgagcatgtatgtataaaattctggaaaaggaaaatgaaattcaggaaatattttattctatacaggatgtatacccattaaatattgttagcacggtttagctttagcttgtacacgaagatcaatctgcatataagaaatggtatcaaaacttcaaatattggtaacatatttgataaacaccaytactatagcattcagctttttgaaaataaaactacttatttggaaggtatatgaagtcaaaaagactgccactggtgacatagcttcaaatgctggaaggtccaagtaaaaactcttttgaggaggtatggaaagaatctcttgcaactttataatgtgatattttatgattatgctgttaatggctaaaagtaaccatataacaggctctgtgttattttatatacattgtctcatttaatcatgtaacaaactagtgaggtattttaaatatact

SEQ ID NO: 558297 - DNA, 510 bp, Homo sapiens
tttgttgttgttagggcacagagaggtgtgcttgtgtgtgtttccatgagcatgtatgtataaaattctggaaaaggaaaatgaaattcaggaaatattttattctatacaggatgtatacccattaaatattgttagcacggtttagctttagcttgtacacgaagatcaatctgcatataagaaatggtatcaaaacttcaaatattggtaacatatttgataaacaccattactatagcattcagctttttgaaaataaaactacttatttggaaggtatatgaagtcaaaaagactgccactggtgacatagcttcaaatgctggaaggtccaagtaaaaactcttttgaggaggtatggaaagaatctcttgcaactttataatgtgatattttatgattatgctgttaatggctaaaagtaaccatataacaggctctgtgttattttatatrcattgtctcatttaatcatgtaacaaactagtgaggtattttaaatatact

SEQ ID NO: 558298 - DNA, 669 bp, Homo sapiens
taaggcaggaggatcacttgaggccaggagttcaagaccagcctgggcaacatactgagaccctgtcttgacaaaacagaaaaaaaaaattagccaggcatgatggtatgcctgtaatcctagctaattgggwggctgaagagggagaactcattaagcccgggatgttgaggctgcagtgagttatgatcacgccactgtactgtactctagcctgacagagtgagaccccatctctaaatatatataatatgcaatgtatatatatatatagcaagggaggtatcaaagactgctgagggctctgttaaaaggataaagaagccatcttgaagaaatatctagtagtcagaagtttaacaatgtgaacacagaaaagaatgactccaaaaaaactgcctcattggtcattgttggaggttattaaggcaacaacttgttattcttcaagttagtaaataaaaggaacaaatcaagtattcattggcatttcctaaaagtatgtatttcagggaaaccaaatagttggggaaaagaagtctttttagagaagaatcgcatttcgtataggagaagggaatagcagaatttaaatatcactcgttgcagcctccattgaaagaaaagaacagaagtagagaagttaattcagaggacatagaagagcca

SEQ ID NO: 558299 - DNA, 669 bp, Homo sapiens
taaggcaggaggatcacttgaggccaggagttcaagaccagcctgggcaacatactgagaccctgtcttgacaaaacagaaaaaaaaaattagccaggcatgatggtatgcctgtaatcctagctaattgggtggctgaagagggagaactcattaagcccgggatgttgaggctgcagtgagttatgatcaygccactgtactgtactctagcctgacagagtgagaccccatctctaaatatatataatatgcaatgtatatatatatatagcaagggaggtatcaaagactgctgagggctctgttaaaaggataaagaagccatcttgaagaaatatctagtagtcagaagtttaacaatgtgaacacagaaaagaatgactccaaaaaaactgcctcattggtcattgttggaggttattaaggcaacaacttgttattcttcaagttagtaaataaaaggaacaaatcaagtattcattggcatttcctaaaagtatgtatttcagggaaaccaaatagttggggaaaagaagtctttttagagaagaatcgcatttcgtataggagaagggaatagcagaatttaaatatcactcgttgcagcctccattgaaagaaaagaacagaagtagagaagttaattcagaggacatagaagagcca

SEQ ID NO: 558300 - DNA, 462 bp, Homo sapiens
cgagagatggaggttgcagtgagccaagattgtgacactgcactccagcctgggtgatagagtaagactccatctcaaaaaaaaaaaaaaaaaagttcatccatctctaagaatgtctggaatttcaagtctcacacataaagacacgagtaaatctacccagtttcatatgatctccaaagtttctgacatctgcttttgtgggattttgtctaccctcttcctccaggactgccctaggtgcacctgagtccctgaaaaccaaacctgcatgcctgaggctaagttgtggagactatcttactctctggtggggagattatcttttcaggaagctgaagtcttaggtgtgaacaagaatgtattgtgagtccctcagttccatctggaggcctcctcttctataggacccrggcatgagttttatacaataattgtcttcagtatacacatgtgccaggg

SEQ ID NO: 558301 - DNA, 585 bp, Homo sapiens
aatttcctaaaaaggcttggagaaaatcaggcgaaattaataaacaagcaaacacagattatccatctaaggaaaaagaaagtgccctataagcacccaggaagaaaaatggattattgaaaagaacaaaatcatcggggctgcctccatgtccattcttactgtccgcgagggctgtggggtggcacccacacaagggcactgagaactctgagcttctcaaacgtctgctcctaagcagcacttgagtgatttctccagctattcaaacgggcagaattacccatacagtataaacccaagtaactggtaaataactgttcatactcatatgctcgatgggacctgctccaaaggggaaagactcaaaatatagcacagtatgcattccagaggatgaaaatgcaagcaactacttggaatgactattctttaaagcgtttaaagtaagatgtttgggttttgtcgtsttgcaagcaagttctatgcctgtttaattcacacagggaactaaagaagtatgtcttgaaatattttcccaacaaactggaataataatcccttggtttacttataacaacaagg

SEQ ID NO: 558302 - DNA, 439 bp, Homo sapiens
  misc_feature 250: n = A,T,C or G
cctggacaatgatgttggcctcctccatctcccatcttggaaactgagaactctctgaactcttcttctttgtttctcttagggtggaggccacaaaaggctctgaatctyctgggcagcacccagccccttacctatcccacctcactctcactctgtcactctggtattcttgtttttatttatttattttttttaagagataggatcttgctctgctgcccaggctggcttgcagtagcatgatgantgctcactgcagctccagccttgacctcctgggctcaagcaatcctcctgcctcagcctcccaagaaactaagactacaggtacatgcaccaccacacctggctttttttttttttttttttttacagacgaggtcttattatgttgcccaggttggtctcaacctcctggccttaggtgatcgtccca

SEQ ID NO: 558303 - DNA, 570 bp, Homo sapiens
tttttttaagtgaacacagaaagaaataaaattgactatatttaccatttgccagaaagaattagcaattcatatgaatagttcaaataacttgtcttttgcatttttgctattctaactttttaaataaaaggaaatcatatttccatgatcacatgttttaaaacactactttttaccatactgatcaattttggcacctttgaccacatatgagtgaatatcattctggcccttattttgttttattgatctgtttgcttatcattatgctttataattcttaaccataaggataaacatccttatgtaaagtatgttctctatctttatttttctcctccaaaattgttgtaggtgaatcagctgtttatttctccaaaaagaaggctgttaaacctatagaagaatttagggataatttcataatattgagtttgtctattgcttctcagccttttggctaagatcaagtgtggggtctctcaatcaatgatcatggtcagaaaagaaaagaacttttatctgaggaatacaagtwcttttaaactataaggcccagagagaaag

SEQ ID NO: 558304 - DNA, 586 bp, Homo sapiens
tagaggcagagtttcaccgtgatagccaggatggtatcgatatcctgacctcatgatccgcccctctcggcctccgaaagtgctgggattacaggtaagagccaccgcgccaccgtttgttttgttttgttttgtttttttgacagagtctaactctygccaggctagagtgcagtggcacgatctcggctcactgccaccttcacttcccgggttcaagcgattctcctgcctcagcctcctgagtagctgggattacaggcacgcgctgccacgcccagctaatttttgtatttttagtagagatggggtttcaccatgttagccaggatagtctcgatctcctgacctcctgattcgcccacctcagtctcccaaagtgctggttggactattaaatagtaggtcttattaactctttctagttatttttttgtacctgttaagcatctccaccttccccgtcaacactccactacccttcccagcctctggtaatcatcgttcttctactctctgtatccgtaagttcaagtgttttgatttttatatcccacaaataaataataatggatagtaaaaattt

SEQ ID NO: 558305 - DNA, 623 bp, Homo sapiens
ctgtcatttttcttttgtctttttctgaagagtgttgctttctgtttggggaggcagttaaattactggtaratcacttgatcaaagggaggcttggttatgagctttggttggatgaatccatttcaattttgcccttaatactagcacatatcccttagttcgggggcatgatcttcactcctaagttgtagtcttaataggatttcaatgtattactcaaggtgtttatcaagcctctataactctgaatgattgcattcccagctctgcatcctagtggcaggtaccttatgagatcactaatcagctcctttatactttcagctattattttcccctggacttctcagaatatcttttcaggactatgtagttgaagagtccgccaagtattttagcagagtttgtagccagattttgggtcctttcccttgtgtattcattcctttatagaattttcccctctatttcctaatgttacaaagtaattcaactccaacttcgactacttatctaataaaatactctgtcctgattaagctctgtcaccccgctcagcaaatttggggagccccatcaaggggaaggaatccaaacagataaatatggacctcatcttg

SEQ ID NO: 558306 - DNA, 623 bp, Homo sapiens
ctgtcatttttcttttgtctttttctgaagagtgttgctttctgtttggggaggcagttaaattactggtagatcacttgatcaaagggaggcttggttatgagctttggttggatgaatccatttcaattttgcccttaatactagcacatatcccttagttcgggggcatgatcttyactcctaagttgtagtcttaataggatttcaatgtattactcaaggtgtttatcaagcctctataactctgaatgattgcattcccagctctgcatcctagtggcaggtaccttatgagatcactaatcagctcctttatactttcagctattattttcccctggacttctcagaatatcttttcaggactatgtagttgaagagtccgccaagtattttagcagagtttgtagccagattttgggtcctttcccttgtgtattcattcctttatagaattttcccctctatttcctaatgttacaaagtaattcaactccaacttcgactacttatctaataaaatactctgtcctgattaagctctgtcaccccgctcagcaaatttggggagccccatcaaggggaaggaatccaaacagataaatatggacctcatcttg

SEQ ID NO: 558307 - DNA, 599 bp, Homo sapiens
atttcaatgtattactcaaggtgtttatcaagcctctataactctgaatgattgcattcccagctctgcatcctagtggcaggtacyttatgagatcactaatcagctcctttatactttcagctattattttcccctggacttctcagaatatcttttcaggactatgtagttgaagagtccgccaagtattttagcagagtttgtagccagattttgggtcctttcccttgtgtattcattcctttatagaattttcccctctatttcctaatgttacaaagtaattcaactccaacttcgactacttatctaataaaatactctgtcctgattaagctctgtcaccccgctcagcaaatttggggagccccatcaaggggaaggaatccaaacagataaatatggacctcatcttgtatagttctctctgttcaagtgttctaacctctctacttactacctagtctccagaactttcaaatagtagttttataatattttgtctagcattttaaataattattagtaggagggttttctgatatcagctactctgccactaactgaaactgaaacaattttgaatatttctgtta

SEQ ID NO: 558308 - DNA, 623 bp, Homo sapiens
ctgtcatttttcttttgtctttttctgaagagtgttgctttctgtttggggaggcagttaaattactggtagatcacttgatcaaagggaggcttggttatgagctttggttggatgaatccatttcaattttgcccttaatactagcacatatcccttagttcgggggcatgatcttcactcctaagttgtagtcttaataggatttcaatgtattactcaaggtgtttatcaagcctctataactctgaatgattgcattcccagctctgcatcctagtggcaggtaccttatgagatcactaatcagctcctttatrctttcagctattattttcccctggacttctcagaatatcttttcaggactatgtagttgaagagtccgccaagtattttagcagagtttgtagccagattttgggtcctttcccttgtgtattcattcctttatagaattttcccctctatttcctaatgttacaaagtaattcaactccaacttcgactacttatctaataaaatactctgtcctgattaagctctgtcaccccgctcagcaaatttggggagccccatcaaggggaaggaatccaaacagataaatatggacctcatcttg

SEQ ID NO: 558309 - DNA, 599 bp, Homo sapiens
atttcaatgtattactcaaggtgtttatcaagcctctataactctgaatgattgcattcccagctctgcatcctagtggcaggtaccttatgagatcactaatcagctcctttatactttcagctattattttcccctggacttctcagaatatcttttcaggactatgtagttgaagagtccgccaagtattttagcagagtttgtagccagattttgggtcctttcccttgtgtattcattcctttatagaattttcccctctatttcctaatgttacaaagtaattcaactccaacttcgactacttatctaataaaatactctgtcctgattaagctctgtcaccccgctcagcaaatttggggagccccatcaaggggaaggaatccaaacagataaatatggacctcatcytgtatagttctctctgttcaagtgttctaacctctctacttactacctagtctccagaactttcaaatagtagttttataatattttgtctagcattttaaataattattagtaggagggttttctgatatcagctactctgccactaactgaaactgaaacaattttgaatatttctgtta

SEQ ID NO: 558310 - DNA, 384 bp, Homo sapiens
tatctacccagaggaaaataatacattatatggaaaagatacttgcacatgcatgtttagagcagcacaatttgcaattgcaaaaatatggaaccagctcacatgcttatcaatcaatgagtagataaagaaaacatggtatgcatataccatactactcagccataaaaaagaatcaaataatagcattcaccgcaacctggatggaattggggaccattattctaagtgaagtaactcaggaatggagaaccaaacattgtatgttctcactyataagtgggagctaatctatgaggatgcaaaggcataagagtgatacaatggactctggggacttgggggaaggatgggaggagcgtgatggataaaagactacacatt

SEQ ID NO: 558311 - DNA, 553 bp, Homo sapiens
  misc_feature 52: n = A,T,C or G
tggggcttagcttgggagggttcttggcttcacccaggaaagaattccaggntgagcggtggtggtrgacacttttatttttttgagacagttttcactcttgtcacctgtgctggagtgcaatggcaagatctctgctcattccaacctctgcctcctgggttcaagtgattgtcctgcctcagcctccagagtagctgggattacaggcacccaccaccatgtctggctaatatttttttgtatttttagtaaagacagggtttcaccatgttggccaggttggttttgaactcctgaccttaggtgatccaccccctcccaaagtgctgggattacagatgtgagccaccatgcctggcctagacacttttattgaagcagcagtgcacagcagcagcagagggactgctcctcacagagcagggctaccccataggcagtgtgcccagagtagcagctcagaggcagttctgcagtcatatttatacccacttttaatgatatgcaaattaaggggggatttatgcagacatttctagaaaaaagttgg

SEQ ID NO: 558312 - DNA, 553 bp, Homo sapiens
ttcctgaaaatccttgccttataaaaccaaactctaagtcatttgtcatgtgacaatgattccttgatcttgaaatggagagcctttataaatggtaatctatctttccacctcctgatattccaagtccttagtcttttccawctctcaatgtcccaaaaatgaagtgtaaacttatttttgcataactgtgacaattaatattgttgtcaattatcttggcactaatagaagaagtaaagtcatttatcccagggatgtaacattcaggttacactgacacatcatggcagacatctttattccaaactttaaaagagatgtttggaattgccactctatgaattaaagagagaagtcactgtgggtttgtcataaatagctcttattattttgagatacattccctcaatacctagtttattgaaagtttttagcatgaagaggtgttaaatgttatcgaaggccttttctgcatctattgagataatcatgtgatttttctcattggttctgcttatgtgatagattatgtttattgatttgtgtgtga

SEQ ID NO: 558313 - DNA, 619 bp, Homo sapiens
tacccaaaggaatatgaattattctactataaaaacacatggacatgtaggttcatttcagcactattcacaatagcaaaaacatggaatcaaccggattcccataaatgatagactgaataaagaaattgtggtacatacactccawggaattctatgcagccataaaaaagaatgaaatcatgtttttttgcagggacatggttggagccagaggctgttctccttatcaaactaatgcatgaacagaaaaacaaatagtacatgttctcacttataagtgggagctaaataatgagagcacattgacacacagaggagagcaacatacattgagcgttttgaaggatgaagggtgggaggagggagcggatcataaaaaattggattttaggcttaatatttgggggatgaaataatctgtacaacagcccctaataacacaagtttatctatgtaacatacttgcatatgtacccctgaacttacaataaaagttaaaaaaaaataaaaataaataatatgttctagagatctactgcatgaaacaacagtaagcttatagttaacaacagtgtgtgtgcacttaataatttgttaagattgtagattaatgtta

SEQ ID NO: 558314 - DNA, 531 bp, Homo sapiens
tcggttcactgcattctccrcctcccaggttcaagcgattctcctgcctcagcctcctgagtacctgggatcacaggggcctgccaccacacccagctacttttttttgtatttttagtagagacagggtttcaccatgttggccaggctggtctcgaactcctgacctcaggtgttccacccacctctgcctcccaaagttctgggattacaagtgggagctactgcgcctggctgctccaacaattttaatgatgtatgtttgtatcaacaaactgcagatttaacaatggatctgaataaatggctcacaaagatatccaaatggacaatttttaaaactacttaaggtatcaaactgacagcatatcaaatatctgtgaaggaattgtttattaaataattgatatgtagatattcaattatttttggaaatggaaatatcaaagtagagcatatagcttaacattcatccaggaattcacaaatagaataaaaatatttttaaaaaaataatacaagtatggttgc

SEQ ID NO: 558315 - DNA, 531 bp, Homo sapiens
tcggttcactgcattctccacctcccaggttcaagcgattctcctgcctcagcctcctgagtacctgggatcacaggggcctgccaccacacccagctacttttttttgtatttttagtagagacagggtttcaccatgttggccaggctggtctcgaactcctgacctcaggtgttccacccacctctgcctcccaaagttctgggattacaagtgggagctactgcgcctggctgctccaacaattttaatgatgtatgtttgtatcaacaaactgcagatttaacaatggatctgaataaatggctcacaaagatatccaaatggacaatttttaaaactacttaaggtatcaaactgacagcatatcaaatatctgtgaaggaattgtttattaaataattgatatgtagatattcaattatttttggaaatggaaatatcaaagtagagcatatagcttaayattcatccaggaattcacaaatagaataaaaatatttttaaaaaaataatacaagtatggttgc

SEQ ID NO: 558316 - DNA, 468 bp, Homo sapiens
ttccagcctgcgtaacagagcgagactctgtctcaaaaaaaaaaaaaaaaaaaaaaaaagtctacaggcttggtgaggtggctcatccctgtaatgccagcactttggaaagccgaggcaggattatttgagcccatgagttcgagaccagcctgggcaacatggtgagatttttgtctctaccaaaaaaaaaaaaaaatccacaagttatctgatacttctcccttcaaaaggggaagcctaattccactcccaaatatagaactaagtatgtcctaaacagcactgkggcttcttctttgatctctttcttggatcacttgctttggtgaaagtcgtctgccctgccataaagacactcaagcagccccatgaagaggtccaagtggtggagctacaaggcctcctatcaacaatcggcaatatcttgccaggtccatgaaccagccaccttggcagtgaaccccc

SEQ ID NO: 558317 - DNA, 430 bp, Homo sapiens
ctgataagaacaaaataatatatacatatataagctaaaaaaatgagaattgtatcatttcagtgattctgcatatgagagaaatgctgttatatttgcatttaaaattgccattggtgggctgggtatggtggttcaggtctgtaatccccttgggaggccaaggcaggatgatcacttgaggccaggagttcaaaatcagcccgggaaacatagcragaccacgtctctacaaaaaaaaaaaaaaaaaagtcaggcatggtggcatgcacctatagtcccagctactcaggggactaaagcaggaggattgcttgagcccaggaatttgaggctgcagtgagctatgattgcacctctgcattccagcctggggaacagcaagactctgtctctaaatacataagtaaaactgccattagataatgta

SEQ ID NO: 558318 - DNA, 430 bp, Homo sapiens
ctgataagaacaaaataatatatacatatataagctaaaaaaatgagaattgtatcatttcagtgattctgcatatgagagaaatgctgttatatttgcatttaaaattgccattggtgggctgggtatggtggttcaggtctgtaatccccttgggaggccaaggcaggatgatcacttgaggccaggagttcaaaatcagcccgggaaacatagcaagaccacgtctctacaaaaaaaaaaaaaaawaagtcaggcatggtggcatgcacctatagtcccagctactcaggggactaaagcaggaggattgcttgagcccaggaatttgaggctgcagtgagctatgattgcacctctgcattccagcctggggaacagcaagactctgtctctaaatacataagtaaaactgccattagataatgta

SEQ ID NO: 558319 - DNA, 620 bp, Homo sapiens
aagcacttagaacagactgaagctaagaaatgctaaaaatgtgtttttactactaggaggctctctttgttcatcttccttctgagcacacacacatgcacacacctccatgactctgcgcaggtcagtttctagaagtttctcatccacatatcactaaggtgcctaggtccatgccctgcatatggtagtaatcaaatatatagaaatatgcactctttctataagaattcagtctttctacaagaaatacactgacctagatttagataggtaataactaaatggagttggaaaccaaaagttatctagattgttcttaccaccttatgccctaccaacaaaaagcctttttgttttacatatatggttattttgttggtttgaaagccatcaaaaatttgtcagcctgcaacgaacacaaaaatgtgtatggtagaatgtataggtgtattaattgaaaccagtttatccttctaagcattgcatctgcttctgtaatttaggtaaatgctatgattagtagctaactaggccaaakctaataaggatcatgaaatgtacctgcctttgcaaaggagattcatggttgtgtgtgtgtgtgtgtgtgtgtgtgtttt

SEQ ID NO: 558320 - DNA, 444 bp, Homo sapiens
gaattccagagctttcttttaagtactagtggtaaagggtgtaagtggtgctaagccagttgtcactaatggatactgtgtattcaaagactgagattttgccagctctcaacactgatcacatttagactctatacctggaatctcatgtctaggatgtagattttgaagacagcaaatacatgtattaatgcagatacatatttgcatagctctgaagctggctgggcatccataattatgcatactgtcaggaaagaagaacaataaaggagccaaaaataaagaaagacggatatggggacagcagagtcaaatgaagaatctggtgcgagagactggcaccatgcccgaccggtggggtgacctcaaaccaagcatgggaagtgcctgatgcagaggyttcccttgaatcaagcaattaaaaacagcagacagtaaatc

SEQ ID NO: 558321 - DNA, 587 bp, Homo sapiens
cccagagattctggtatgttgtgtctttgttctcgttggtttcaaagaacatctttatttctgccttcatttcgttatgtacccagtagtcattcaggagcaggttgttcagtttccatgtagttgagcggctttgagtgagattcttaatcctgagttctagtttgattgcactgtggtctgagagatagtttgttataatttctattcttttacatttgctgaggagagctttacttccaagtatgtggtcaattttggaataggtgtggtgtggtgctgaaaaaaatgtatattctgttgatttggggtggagagttctgtagatgtctattaggtccacttggtgcagagctgagttcaattcctgggtatccttgttgaatttctgtcacattgatctgtctaatattgacagtggggtgttaaagtctcccattattaatgtgtgggagtctaagtccctttgtaggatgctcaggacttgctttatgaatctgggtgctcctgtattgggtgcatrtatatttaggatagttagatcttcttgttgaattgatccctttaccattaagtaatggcattct

SEQ ID NO: 558322 - DNA, 579 bp, Homo sapiens
aactttgaaatgcaggtagtctgactgaagaactgaatgtttaaatttttaattaaacttccaatttatttaaatagctatatgggtatacccagtaattactatattggacagtgcagktccacaagaatctctatattcctaaaaatgttgacaaaggctattcatagatacacatgaaaaaataattggaaaagtgtacattaaattattaacagtaaaccagacaacctaataagaaaatagacaaaatgcttgatcagatacctcacaaaaagatatccaaatggccaatgaatatgcaaaaagcctcttgattgcagtaatcatcatcagggagatgcaaattaaagccactacacacccaccaaagttgctaagatgaaaaactctccctcactacaagtgggagtatagaaaaccactttggaaaccaatttgacagtattttctaaaatggaacatatgtatatcctctggcccaactcctacatatacacacaacagataacctataaacatttgccaaagacacattagaatgatgtggcagcattgtttgtaatagccccaaattag

SEQ ID NO: 558323 - DNA, 383 bp, Homo sapiens
aagggatcttaattattggaataaggccacagcaggaaaaaggatatttgttattacagtaataacctcacactcaccaagtctcttaaggggaaaaattaagaaaattagaaaatgaatattttcctttaattttccaactaagaaagacaaataaaaatattgacagttttgtccaggcgcagtgactcacacctgtaatcttagcactttgggaggccaaggcagttgggtcacctgaggtcaggagttcaaggccagcctgaccaacakggtgaaacccgtgtctctgctaaaaatacaaaacttagctgggcgtggtggcaggtgcctgtaatcccagctactcgggaggctgaggcaggagaattgcttgaacctgg

SEQ ID NO: 558324 - DNA, 509 bp, Homo sapiens
cagagacaaccacagccactgaagaatgaaaggagaactctggaaaatagaaggccagcggtggaaagagctcatgtctatggctagtcaatgaacatgcatgaakgggagaaaccggaagcagcgtgcagttaaactttagagtaccaagacaccacacaacacagacatgacagtgtgcaatttgaatgtaactcttagtatgatcctccatgttccagttttcaggtcagaatgggttcaaaatgatgcctcacatggggctatcaggaatttcacaggaactgattaattagtaggtgtctgttgggactgactcttatggcatagctgctaccagatatggaaagagggttcaggagtatcatttttagtcattaatccaactattatttaccaaactcctactgtgtttcatgacaatctggctctctggactcaccaacatgccagtctcttagcttagtaatatattaatataaatctgcaacagagaactagcctgggat

SEQ ID NO: 558325 - DNA, 436 bp, Homo sapiens
gagagacctcccaacaggggtcaacagacaccttatataggagagctccagctggcatcaggctggtgcccctctgggttgaagcttccagaggaaggagcaggcagcaatcttgctattctccagcattcactggtgacacgcaggtgaactgagtctggagtggacctccagcaaactgcagtggaccttcagtagaggtacctaactgttggaagaaaaactaacaaacagaaagyagcaacatcaacatcaacaaaaaggacccccacacaaacactccatccaaaggtcatcagcctcaaagatcaaaggtagataaatccacgaagatgtggaaaaaccagtggaaaaacacaggaaattccaaaaaccaaatgcctcttctcctccaaattatcacaactcctctgcagcaagggcactaaaccggacg

SEQ ID NO: 558326 - DNA, 608 bp, Homo sapiens
tttttctttaagctctataccagcatgtgctcacatcagaatatttattaaacagtcatccttctatgaccttgaatttctcttaattacaatttaggagtgcataaattgacttaagtgtagcttttggacagcattgaaagtttcagatacagatggatacagatggaactacaaggcagccctgtgagggataattagaaaaagtataatattaagagttaggcatttgtaaagcaggtaacctgtttgacagaaaaagaattaaggttatttacaacaaagactccggaaaggtaaaggaakataggagagagtaaagcccttagtgctgatctatgccaggtgtgcgagaccctagttaggtatcaaaatagcctgtacagttctgtttttgttgtaatttggttttgttttgttttaatacatttgtcctggtctaaagacttgcacaatttctgggagtggccttctgtatagcagttattcatacaggtctctgttggttctgttagagacaaagttgagttactgtggcctggctgtgcaaatactcttgttttccttttctaccacttgtaaaaacaacactaaaataaaaaccaaat

SEQ ID NO: 558327 - DNA, 554 bp, Homo sapiens
aaatgaaaaaaaaactacatagctacacagtaacttgaatccacatgaagaaaagtcaacagtaaaagtaagtatgtaggtcaatataaaacaaagtataaatgtatgtttgtatgtaacactttattttatttgacttaaaagcaatcgcataaagcaattataaatttgtgttcataggcatacaatgtataaacagggaatttatatgtcaataatgaaagaaacraggaagtacaagcagagatatatagatgtggactttttaaaatatgctcttgaaatgaagctggtgttaatgtgaaataaatttttatgaattaagatggtaattgtaatccccagggtaaccaataaggagctaattttaaacatatacagtagaagaaatgatagtgagttaaactggtacattaaaaaaaaccatctatttaacataaaagaatgcaataatggctgggcacggtggttcatgcctgtaatcccagcactttgggaggccgaggcgggcagatcacctgaggtcgagatttcaagaccagcctgaccaacat

SEQ ID NO: 558328 - DNA, 462 bp, Homo sapiens
aagacgcctttgatagatccacaagtgaattcaagaaagtttagatacgaatcagtgaaatcaaaataggctaatcaaattaatcttatgtgagcacaaggaaaagaaagccagagaaaaacaaatagaacattgcattccagagttgtgcaacaataccaagcagcctaacctatgtgatcagaatcccataaggaaaagacataatagctgagaattcttctacagataatgaaatatgtcaagccgtmaatacaaccaagaagctcagagaaaaccaagttggataagtgaaaataaaatgaaataaaatccaaacacatcaatttcaagccactgaaattcaaaaccaaaaaagacaacaaaaacaaaaagaggcctccagggaaggtgaaaatacattacagagggaggaacaaagagaagaattacacctgactccttgttagacactatgcaaga

SEQ ID NO: 558329 - DNA, 549 bp, Homo sapiens
ttaaaaaatatatattaataagctctctgtattgttctagttgatcacgttgtaatctccaggtatagtgttttctttacaaagaacacagggctaagaattcggtgccaggtttcattggccttatgatttcattttgagtgaataagtgtagcagggattgttcttagaatgtcttggcttcagataatcagttattgtgttacgcctaattatttactggtagtttgctctttatggtgtgtgagcaaattgaacacttttcccaaatgaaaaacaaaatttatatgaatatttctggcattagattatttcctttaggaaacaaaatttttagccatcttgaaatttgagatttttaaaggaatatgaggagaagtatacaagctaaattaggggtgttgggagaggggatgaaggctattgagagaagttgaaagaacttaatttagctgtgtgtagataaatgracaaaatgaatcctggattactggatggcaaaagcagaattcatttctccaggggcccaaggaataacagatgcaaagc

SEQ ID NO: 558330 - DNA, 607 bp, Homo sapiens
agtgtactcacacatattctttattaagaaaattatctgcattgtctttctttatatgtgaataggctatgtaacatttgtaacatctctctactacacattttttcaagctttcatattcaatatgkttatattactcaacttgtatcttgaagtgtttataatcacataagagaggaaactgtcatcaaaatgagtcagggcatctgtggtgacttattggataaggacccacagttattccaaagctatatatcctcatttatttctttctcatatttttcagaataaacaggcaacattgtacaaaaacaataataaaaattgcacttaagaaactcttaagtttgcctgttgaagaaatctgtttactatggaagtcaaaccaaacaacaacagaaaagagattagaaagaaaaggttcaatgttgtaatgtttcattaatcatgctgctcaatattaattttgtcattaaaattattttgagtcaatgtatgtatgaactgtggctcattagagtgacaataattacctaaattttgatttgaaatttggaaaaaaatattatatatgtatgcatatgtatatatgtaataaacacatata

SEQ ID NO: 558331 - DNA, 607 bp, Homo sapiens
agtgtactcacacatattctttattaagaaaattatctgcattgtctttctttatatgtgaataggctatgtaacatttgtaacatctctctactacacattttttcaagctttcatattcaatatggttatattactcaacttgtatcttgaagtgtttataatcacataagagaggaaactgtcatcaaaatgagtcagggcatctgtggtgacttattggataaggacccacagttattccaaagctatatatcctcatttatttctttctcatatttttcagaataaacaggcaacattgtacaaaaacaataataaaaattgcacttaagaaactcttaagtttgcctgttgaagaaatctgtttaytatggaagtcaaaccaaacaacaacagaaaagagattagaaagaaaaggttcaatgttgtaatgtttcattaatcatgctgctcaatattaattttgtcattaaaattattttgagtcaatgtatgtatgaactgtggctcattagagtgacaataattacctaaattttgatttgaaatttggaaaaaaatattatatatgtatgcatatgtatatatgtaataaacacatata

SEQ ID NO: 558332 - DNA, 575 bp, Homo sapiens
gcagtggggggctgggggagggatagctttaggagaaatacctaatgtaaatgatgagttgatgggtgcagcaaaccaacatggcacatgtatatctgtgtaacaaacctgcagcatgttgtgcacatgtatcccagaacttaaagtataataataaaaaaaattaaaaaaattatttctatgattgtaaaagttgacaatattatttcaataatcaagtaaagtactgcaaaattttttcaatagtttattaatatcaactctttagtttctaatactttttttttttttttttttttttgagacggagtctcgctctgtcgcccaggctggagtgcagtggcgggatctyggctcactgcaagctccgcctcccgggttcacgccattctcctgcctcagcctcccaagtagctgggactacaggcgcccgccactacgcccggctaattttttgtatttttagtagagacagggtttcaccgtgttagccgggatggtctcgatctcctgacctcgtgatccacccgcctcggcctcccaaagtgctgggattacaggcgtgagccaccgcg

SEQ ID NO: 558333 - DNA, 510 bp, Homo sapiens
tcaaaactcagaaaatgtttatgtttagtttagtttcacctaaactttttaatctacccaatacttttatttgctatatattcatttttctctagatttccattcatttagcagttcagaatattggctaaaatgacagtaaaatgaggatgtctttttttaacctactttctgrtaagaaaagtgacatacatattatagggacacttggaaaatacagaatagtatagaaaagaccttcttaccacctaactactacagcttttatttattatccttaaaaatattcctttagaacttatgatagcattgaatttcatctcctctgactttcataggaaatttaaataatagattatttcttctctttctggtttttcaaatttctctctgtctttctcacacacacacgcacacacacacacacacacacacacactcttaatccatccttcccaatgactgtcaattaaaataataataataataacttccttttacccccacatc

SEQ ID NO: 558334 - DNA, 531 bp, Homo sapiens
gggaccaaaaggtggtgacacccctggacccagctttcactgtcttgtgtgtgtctattatttcccgacctgccgatctgcctgggaacaaagagagagccccgttgcattgcaggctgctggccagatcccgcaatatatttttaagtaaaaagcagattatagaattgtgtttataatgtggccactgtcatgtctattcacctgttattgtgttctccagataaaagggcataaatcacaattgaaaaatgcatttgcctgttgagaatcaacatattaaaacttttktagctggtcgaataatatgcatcagcagaaatccttcaaatatgtcaatagaaaaagtagggcactctgcttgctgaaaagcacttgccttgagtaattttccattgcagaaacgatctatttcatgacttttcaagactcctagtcaattagaaccacgtaagcaagcttaaacaattttaacatgccaagttgatatctaaaaaatactcccttggatcaactaccatcctcactaat

SEQ ID NO: 558335 - DNA, 454 bp, Homo sapiens
tgcctacattcctaaggttcatgctgatatatatatatatatatatatatatatatrtatatacacacacatacatacatatatatacatgacatatatacataaacatgatatatatcaatattatatatatctatatatttttgggagggatacaatacttattatgtgttgaactgcctcccttcacccaaattcttatgttgaagtcctaagcctcactactacctcaggatgtgatcttatttggaaatttacttgcagatctttacagaagtaatcaagttaaagtgaggtcattaaggtgggccctaatctgatgttactgatgtctttataaaaaaaggacatttggacacagagtgaggccctgtctctaaaaaaatagtatgaaacaatgtatattgtactttttatgaatgatttatgatattttcatttttatcatattttt

SEQ ID NO: 558336 - DNA, 553 bp, Homo sapiens
aatgtgcattgttagcttgtttgaagtttttcttcctttttgatgttgtaggcacttgtaggtataaacttctctcttagagctgcttttgctgtgcctcataggttttggtatgttgtgtttccattatcatttgcttcaaaaattttttcaatttccttcttaatttcttcattgacccactggtcattcaggagcatatatttaatttccatgtatttgtatagcttccaaaattcctcttgttattgatttctggttttatttcattgtgatcagagaagatgcttgatatgatttcatctttttgaatgtttttagacgtccttggtgacttaacatatgatctgtccttgggaataatccatgtgctgaggaaaaaaatttgtattctgtagctactggatgaaatgttctgtraatatctattaggtcaatttggtctatagtgcagactaagtttgatgtttctttgtttattcatctgcaagatctttccaatgctgaatgtggggtgttgaagccatcagctattattatattgatgtctatc

SEQ ID NO: 558337 - DNA, 553 bp, Homo sapiens
aatgtgcattgttagcttgtttgaagtttttcttcctttttgatgttgtaggcacttgtaggtataaacttctctcttagagctgcttttgctgtgcctcataggttttggtatgttgtgtttccattatcatttgcttcaaaaattttttcaatttccttcttaatttcttcattgacccactggtcattcaggagcatatatttaatttccatgtatttgtatagcttccaaaattcctcttgttattgatttctggttttatttcattgtgatcagagaagatgcttgatatgatttcatctttttgaatgtttttagacgtccttggtgacttaacatatgatctgtccttgggaataatccatgtgctgaggaaaaaaatttgtattctgtagctactggatgaaatgttctgtgaatatctattaggtcaatttggtctatagtgcagactaagtttgatgtttctttgtttattcrtctgcaagatctttccaatgctgaatgtggggtgttgaagccatcagctattattatattgatgtctatc

SEQ ID NO: 558338 - DNA, 543 bp, Homo sapiens
tctatatttattaggaatattggtatgtagttttcttttttgttgctatctttgtctgrtttggtatcagggtattactaacttcataaaatgaattgagaaatcatctctcttcctctttttctggaagagattgtgtagaattaatgttaattcttctttaaacatttgacagaatttcccagtgaaaccatgtagtcatggagatttcttttttgggagtttaacaattacaaattcaatttcctttatagttatagggcatgaaatttacttatttcatactgagcgagttgtagcagtttgtgttttttgagaaatttgtccatttcatctaagttgtcaaattcaagtccatagctctgtttgtggggtttccttgctatttttttgatgtctacagggtctgtaattatatcttctgctttattcttaatattgtcaattttctaggagtggcaggctcgctggtttgttcttaatatgtgtatatttttagttacacaagttatatgttagtacatttttgttatagaattctaa

SEQ ID NO: 558339 - DNA, 543 bp, Homo sapiens
tctatatttattaggaatattggtatgtagttttcttttttgttgctatctttgtctgatttggtatcagggtattactaacttcataaaatgaattgagaaatcatctctcttcctctttttctggaagagattgtgtagaattaatgttaattcttctttaaacatttgacagaatttcccagtgaaaccatgtagtcatggagatttcttttttgggagtttaacaattacaaattcaatttcctttatagttatagggcatgaaatttacttatttcatactgagcgagttgtagcagtttgtgttttttgagaaatttgtccatttcatctaagttgtcaaattcaagtccatagctytgtttgtggggtttccttgctatttttttgatgtctacagggtctgtaattatatcttctgctttattcttaatattgtcaattttctaggagtggcaggctcgctggtttgttcttaatatgtgtatatttttagttacacaagttatatgttagtacatttttgttatagaattctaa

SEQ ID NO: 558340 - DNA, 535 bp, Homo sapiens
cttaactgccagcaggtatatgaaaaaatgctcaccattcattactaatcatcagataaatgcaaatcaaaactacaatgagatttcatttcaccccagttataatggcttttatccaaaagataggctataatgaatgctagtgaggatgtggagaaaagggaagccttgtaccctgttggtgggaatgtaaatgagtgcagttactatagagcacagcatggaagttcttcaaaaaattaaaaataaagctaccatatgatccggcaatcccactgctgggtatatatccaaaagaaaggaaatcagtgtatcaaagagacagytgcactcctatgtttcagcaccattcacaatagccgagatgtttaatcaacctaagtgttcatcagtggatgaatggataaagaaaatatagtacatatacacaatggaatactattcagccataaacaagaatgaaatcctgtcattcacagcaacatgaatggaactggcaaataccatgttaagtgaaataagccaggcacagaaa

SEQ ID NO: 558341 - DNA, 535 bp, Homo sapiens
cttaactgccagcaggtatatgaaaaaatgctcaccattcattactaatcatcagataaatgcaaatcaaaactacaatgagatttcatttcaccccagttataatggcttttatccaaaagataggctataatgaatgctagtgaggatgtggagaaaagggaagccttgtaccctgttggtgggaatgtaaatgagtgcagttactatagagcacagcatggaagttcttcaaaaaattaaaaataaagctaccatatgatccggcaatcccactgctgggtatatatccaaaagaaaggaaatcagtgtatcaaagagacagctgcactcctatgtttcagcaccattcacaatagccgagatgtttaatcaacctaagtgttcatcaktggatgaatggataaagaaaatatagtacatatacacaatggaatactattcagccataaacaagaatgaaatcctgtcattcacagcaacatgaatggaactggcaaataccatgttaagtgaaataagccaggcacagaaa

SEQ ID NO: 558342 - DNA, 573 bp, Homo sapiens
tctgattttagacatttgtaaaaactacctgtttagtatgtccacttggatatctcacggacatttaaaaagtaacatgccctacacaggaaggggaacatcatgcaccggggcctgtcatcggcggggagggataacattaggagatatacctaatgtaaatgatgagttaatgggtgcagcacaccaacacggcacatgtatacatatgtaacaaatctccatgttgtgcacatgtaccctagaacttaaagtataataataataaaaaaaattaaaaaaaagctatttactccactaaattgaaactatttgaatcagtgaagcagagaattattacagattaagaatttttgcttatttaaaattacaatagtttgttttgtttgttactgagttgtaggagttctttgtatattttggattcaagtcctctgtcagacatatgtttcataaatattacctccagtctatggcttgtctattaattttcttttaatgtgtcttttagtaaayagaagctttaaatttaaaaaaaaaagtaacatgtcctaagaaattaaaatgcatggc

SEQ ID NO: 558343 - DNA, 660 bp, Homo sapiens
  misc_feature 631, 632, 633, 634, 635, 636, 637, 638, 639, 640, 641, 642,643, 644, 645, 646, 647, 648, 649, 650, 651, 652, 653, 654,655, 656, 657, 658, 659, 660: n = A,T,C or G
agatgctctcatggagccaaatatctgagactagattgggtgttctttataaagcactgaggaaaaataacgttgaatgaaagtactttcattattcattaattcacaaaaattagttggtcagtttgtggttacttatcactaagactttaaaagaatttaatattgactcatcagtatggggtggagtgggaagatacccatgcagttcctcttttctttctcacgagataatcttcatgatgggagttcatggtcacagataaacatctgggcagattattccccaaagtggcactttttcggccagtttagaagctaaggtagtgtaataagttctaaggagtagtaagtcaggccatggcaactgagatttagatttgggtctttgttggtcacttcatacaggtgacccttgagcaacgttggtgtggattgcacagtctacttacatgtggattttcttcctcctctgccacctctgagacagcaagaccaaccccctctcacctcctcctcctctgcctactcaatgtgaagatgaagaggacggaagamctttatgatgatccacttccacttaatgaacagtaaatatattttttcttccttatgattttctcagtgtctnnnnnnnnnnnnnnnnnnnnnnnnnnnnnn

SEQ ID NO: 558344 - DNA, 606 bp, Homo sapiens
tacattttaagtaaaggtgtcacgacctagtgcaagtgggatgaccaaaagatatgaggggaattagaaatctggccattagatacatacctcattctctccctgaagcatcattttgcctcaaattacaatgtgagaacagttaaatgtggatactataaaccccaaaacaaccacaaaaacaatacaactaacagttatagctagtaagccaatgaagaagataaaatagaattataaaaaatgattcagcttaaagtaaaagtataaaagagaaaaatgagaacaaaaaacaggacaagaagaaatcaaatctaactacatcaataatcatattaaccataaatggtctaatatctaaattaaaagacagatattaacagattggattaaaaatgtaagacctaacaatatgctgcttataagtacaagaaacacacttgataaaaacgcaaatatttggccgggtgcsgtgggtcacgcctgtaatcccagcactttgggaggctgaggcgggcggatcacgaggtcaggagatggagaccatcctggcaaacacggtgaaacctcatctctactaaaaatacaaaaaaattagccgggcgt

SEQ ID NO: 558345 - DNA, 484 bp, Homo sapiens
ggtggctcatgcctgtaatcccagcactttgggaggccaaggcaggtggattgcctgagctcaggagtttaagaccagcctgggcaacatggtgaaaccacgtatctactaaaatacaaaaaaaaaaaaaaaaaaaaattagccaggcctgatggcgtgtgcctgtaatcccagctacttgggaggctgagacaggaaaatcgcttgagcctgggagacagaggtcgcagtgatccgagatcgcgccactgtactccagcctggatgacagagcaagactccatcaaaaaataaaaaaataaaaaaaaaaggaggcgaagaagaaagaaagaatcagtgagcctgaagatrtaatagatcaataaaaaaattcccaaaatggtatgtaaaggaaaaaataaataaaaatgtaaaaacctaggagattcaagaatcattacacagtatcaaaaatgtattatatgcataatgagaagggaggaag

SEQ ID NO: 558346 - DNA, 271 bp, Homo sapiens
actaatagacctaagaaatgagacacataacaacacaataatagcaggggacttcaatacttcactgacagcagtggacaggtaatcatgacagcaactcattgaagaaasaatagatttaaactgtaccttggaacaaatggacttagcggatatatacagaacactccatccaacaactgcagaatacacattccattcaacagtgcatggaacttttgccaagatagatcatatgatagaccataaaacaagcctcaataaattttaa

SEQ ID NO: 558347 - DNA, 271 bp, Homo sapiens
actaatagacctaagaaatgagacacataacaacacaataatagcaggggacttcaatacttcactgacagcagtggacaggtaatcatgacagcaactcattgaagaaacaatagatttaaactgtaccttggaacaaatggacttagcggatatatacrgaacactccatccaacaactgcagaatacacattccattcaacagtgcatggaacttttgccaagatagatcatatgatagaccataaaacaagcctcaataaattttaa

SEQ ID NO: 558348 - DNA, 571 bp, Homo sapiens
gtaataatcttcaaaaacatatttttgtcttatttattttagtcattaaactttcaaatttcagtggagcaaatataatctaagttgaagattatatttcacagcctccattacagacagtcttgaacatgtacttcagttctgagaaataccatgctagcttcttcaggtcaccttcactgaataaaaattatttgtcttccatttcctcttccccttcctgtggactgggaagtgggcgtgtggtgaattgcatttagtcatattatgagaagacaacaaaacacaaggaacctagatgtctatgtgtccttatggagttaagaaattgatcaccttgccactcctagcaggtcatggtttacacaacagagaaataaacttctatcttatttatgccaaggacagttggtttcttttgaacaaatatccttaataagtcttacttcacaaatgtcagaatttggggttatttttatttytgctgttgcccactgtactttttaaaaactttagtatgtatttattttatttattaaattgacttataattgtacatatctgttgagta

SEQ ID NO: 558349 - DNA, 623 bp, Homo sapiens
agaattctaaaaggaagaatgatcaaagttaaatttttaagaattatgccatgactgtgatcataatattttccacaaatgaggcacaaaatggcataaagttgttatttgtgccctaaacaaaactggagcattcaatctagattttataatacaagatccttatakgcgcatagatggtgcttcacgaacagctgattgagttgaatggaactgtctactttggaaaacaagagttgtacattaagagcctctccagcgttttgctctggatgcattccaaaagttgttgtcactaaaggtttaaatatataaagatggtacaatagactctatttccatggaagtaaactggtctctaattaatataccagaagctgagtcactttgtttttacaggcacgtagagaggaagtgccatctctcctcggtcgtgacacactgccggttagctgatgtatagttctttttttctttttattaaggagtagaaaagaaacagaactgaaagttgaaacaattcgtacaaggaagaagaaagcctgggaagttacctacattgcctaacatcacagaatctaaaggaatcaaactttctctttccttcttgtatttgaagaaag

SEQ ID NO: 558350 - DNA, 623 bp, Homo sapiens
agaattctaaaaggaagaatgatcaaagttaaatttttaagaattatgccatgactgtgatcataatattttccacaaatgaggcacaaaatggcataaagttgttatttgtgccctaaacaaaactggagcattcaatctagattttataatacaagatccttataggcgcatagatggtgcttcacgaacagctgattgagttgaatggaactgtctactttggaaaacaagagttgtacattaagagcctctccagcgttttgctctggatgcattccaaaagttgttgtcactaaaggtttaaatatataaagatggtacaatagactctatttccatggaagtaaactggtctctaattaatayaccagaagctgagtcactttgtttttacaggcacgtagagaggaagtgccatctctcctcggtcgtgacacactgccggttagctgatgtatagttctttttttctttttattaaggagtagaaaagaaacagaactgaaagttgaaacaattcgtacaaggaagaagaaagcctgggaagttacctacattgcctaacatcacagaatctaaaggaatcaaactttctctttccttcttgtatttgaagaaag

SEQ ID NO: 558351 - DNA, 623 bp, Homo sapiens
agaattctaaaaggaagaatgatcaaagttaaatttttaagaattatgccatgactgtgatcataatattttccacaaatgaggcacaaaatggcataaagttgttatttgtgccctaaacaaaactggagcattcaatctagattttataatacaagatccttataggcgcatagatggtgcttcacgaacagctgattgagttgaatggaactgtctactttggaaaacaagagttgtacattaagagcctctccagcgttttgctctggatgcattccaaaagttgttgtcactaaaggtttaaatatataaagatggtacaatagactctatttccatggaagtaaactggtctctaattaatataccagaagctgagtcactttgtttttacaggcacgtagagaggaagtgccatctctcctcggtcgtgacacactgccggttagctgatgtatrgttctttttttctttttattaaggagtagaaaagaaacagaactgaaagttgaaacaattcgtacaaggaagaagaaagcctgggaagttacctacattgcctaacatcacagaatctaaaggaatcaaactttctctttccttcttgtatttgaagaaag

SEQ ID NO: 558352 - DNA, 452 bp, Homo sapiens
ctaaaagaaaatgaagtggaaaggtaagagtcattggctcaaaccaccccaggtgcacagacacaggcacgtgcacacacacacactcgcacacagtcacactytctcacactgacacagcctccttcctgccttcacctcacatctcagtccccagcctgcctgccatattcctcccatcactgcagggagtcccagccggccccacaggggaagcccccgccccagcctgcacagaacagccccgtgctctctgggcacacagcagctgcagccgtcctggcccaggacctctggggtctctgccaccattccagtaggtcatgctgctcaggggggccagatggccaaaccaggtagggcccagtggacataagcccagtgacacggccgacattattcagggagggtgtgtgagggaggctgctcgtgctgggaagaaggagcaccca

SEQ ID NO: 558353 - DNA, 606 bp, Homo sapiens
ggaactgaggtagcgatggctggcgtattaagaatgtgctccaagcagctctgcctagggctgaacagccccatttggcttcccgtcctcatcagcacctgaccagtggcaacagtgaggccgcaaggctcacctgccgttctctgggtcacaggcatgtgatggggggccagagtcgctccctggcagcaagacccggaacctgcactttaattccatgttccacagcaattccacccccagaataaccagatgcaatcacagcccaaacacacacaggcacgtgcacacacacaggtgcaaacacacacacatgcacacaaagacacacaggcccatgcacacacaggcacatgcaggcacacagacacatgcacacacatgcaaacacacagacacaggcacgtggacatacaggtgcaaacacacatgcacacacagagacacaggcacacgcagacacactcatacaaacacagagacacacaaatagacacacacacagctgaacatacacagctgaacacataccaacatacatacaccggcatgcatactcacacatacagrtgcacattcacacataggaatgcacaaacacacgca

SEQ ID NO: 558354 - DNA, 475 bp, Homo sapiens
tgtcgttattattattattgttattattattgctataatgctattggtagaatgtaaagaaaaattggaaatgcagagtaagataagcctttactttcacattgtgataacatgctctgctataagcaagagactggtattgacggtgagcaataaacaaccattactaaagaaatcataaactaaagaaactctttagtttcttacttgaacctagtttgggcataattgtagtaatttgtccataatcttcatctcagtaagtaagctgtgttacaataaatcaagtaaaagagatttaatggattgccatttgtrctctaagtgttcatatttgtttacctgctaagattaagattttaatgtatttgatatattaaagacatggtgattttcaaattgctctctcgcaaatatgcagaagatattaaaactcatactgaagtaaataaccaccggtgagcttgctgtgaca

SEQ ID NO: 558355 - DNA, 549 bp, Homo sapiens
tgacatgtattttttgaaagaaagatattactattttactttgcattatataaataaatatggcaaaagttttttgggaaagcttcagtatttcaatagcccagttcaccgctttatgatctgtctgtatacacagtggttcagttattcctccatcgaagctgattccaatgaatgccctatagaaagaagaaagaagaaagaatagaaaggagaagtagatatttcaaattttgcttaactctgctggcagttttccatgatgtcagccgtattttctttttgctccaatgcaggagttcatggggcttatttctatgtytctttaaacctgttctcaagccatgatgctgaagatccccccaaatacatggcggacctcattcgagttgtaaagcaaatttttcaaaacaggattttatatctttatttttctttgcagttgatgtggctctgagttgcgttctgactgagctcctgaaaaacagtactgagaagctgtctataaataagtagttttgtttacaggaacttactggggaactggac

SEQ ID NO: 558356 - DNA, 518 bp, Homo sapiens
agagcaaaactctgtctgtaaaaataaaataaaatgaccattaataatagtaataaaagccaacacttgctaagtagccactgtgtgctagccttttgctaagtattatatatcattatctttttggatccttgcaacaatcccatgagctagaaactattatagtccctattttagaaatgtacatactgaggctcaaagagattgaatsagttattaactgtcacaacataagattaaccaccacaggctaggattttgcctcctcagctatcttcagtgacatgagtctctagcagaaaacttacgactggccattggattttgcttcctagtgcttcaagttgtgaggtaggctaggacactgagagaccttctgagggtactgaccatgtatattcatctctatcttttcccaaggcatttgtcatctaataaaggtttgttcttggccatattcattcatttctctgtgttttgttcaaatgccatttccctttcctgtatcacctatgtac

SEQ ID NO: 558357 - DNA, 540 bp, Homo sapiens
cctctgtggtaaattttcaaacaatatttgctaaagcacagaatgagtaaattaattgactactctctaaattttttgaatgattaatgttccaataagtaaaygaattaatctactaatcaatacttggaaagtgctcacctcttttaaacttggcaatagttctctctctctctctgtgtctttctttttttttttttttgttagctcttacagcgaaggataaatctctacaactttaagggatttggatatacttagcacgaaaacacctctttatgcctagagaagttaaatcttttgcctaaggccatgtaacatattaaaagcaaactgtatcacaacattccagggggatttctccactgaaagacattggtacattagtagttgcattagtgctgtcttgatgcttcacaaatcaccacaaacttaagagctgaaagcaacatgtatttactgtcaggcctctgagcccaagctaagccatcatatcccttgtgacctgcatgtatacatccagatggcctgaagcaactg

SEQ ID NO: 558358 - DNA, 598 bp, Homo sapiens
gtgtccacgtgttctcattgttcaattcccacctatgagtgagaacatgcggtgtttggttttttgtccttgcgatagtttgctgagaatgatggtttccagcttcatccatgtccctacaaaggacatgaactcatccttttttatggctgcatagtattccatggtgtattatgtgccacattttcttaatccagtctatcattgtacagctttataacagaaacttgttactgtgaaattattcttacataactgtaatttattaaactttaatgggattacttattattgtgagagaccaaaaaataattataatgttttttctattttttcccaaaaaaatgcactaatgtaattaaaaaatgttacatcattacttatttccttttatgtattgtaacatttgtttttattgctctgcatacatgaagtaaaacgaaagaatttcattttttcactttttgttccyagtcattactattattcatttgacttcatatttattaatgaaaataactttttgaataggagaagaaatgttaaaaaaaggacccactccagctgttgaatacataaagcagaccaatgattggaa

SEQ ID NO: 558359 - DNA, 519 bp, Homo sapiens
  misc_feature 288: n = A,T,C or G
ttgtatgtgtctagttctttacagtttaccgactgcttctgcaaacattgtttgacttgaccttatgctacatgatggagctggctggggacatttagttctcactccacaggcaaagaaatagggaaagcaaagatcttaagtcttttatccaacattacacaaattataaactcccaatccaagactagaagtcagtgtttgaactcctactaataataatgttaactaattatmaatgaggacttactgtgatccaggcaccatgcctcacacacattatcttantatctgcccacctaccagaatcatatacaattcccatgcccatctgaaagatgaggaaactgaggcttaatgagataagttagcatacttaggccgtgtggctagtatgtggcaaagtgtgaaagatcaagatgtgaatgttatccatagacaaaactatacttcattttaacagtaactaggagtgttgtaaatatattttgttacattatttaacctctctgtgcgtca

SEQ ID NO: 558360 - DNA, 519 bp, Homo sapiens
  misc_feature 288: n = A,T,C or G
ttgtatgtgtctagttctttacagtttaccgactgcttctgcaaacattgtttgacttgaccttatgctacatgatggagctggctggggacatttagttctcactccacaggcaaagaaatagggaaagcaaagatcttaagtcttttatccaacattacacaaattataaactcccaatccaagactagaagtcagtgtttgaactcctactaataataatgttaactaattatcaatgaggacttactgtgatccaggcaccatgcctcacacacattatcttantatctgcccrcctaccagaatcatatacaattcccatgcccatctgaaagatgaggaaactgaggcttaatgagataagttagcatacttaggccgtgtggctagtatgtggcaaagtgtgaaagatcaagatgtgaatgttatccatagacaaaactatacttcattttaacagtaactaggagtgttgtaaatatattttgttacattatttaacctctctgtgcgtca

SEQ ID NO: 558361 - DNA, 426 bp, Homo sapiens
gtgattcattttgtagaaaacagtaacacttttcataacgatgccaccatctaaatattcatcaagagttcatcactaaaatccaccctttggagcaacatgtacaaaacagtattctgggaaagacacattacaacaagraccacaggcaggacagatattctgacatccttacacatatagtatacctatatgatttttgtgttatagtctttgaatgttctattggtctcatttaccatagtgattctaatccttaaaaaaacacatttcctagttactatagctatacccagtgctcatggggcagttactcccaatcagacacaaggatgtggacctgaactaggtgtaagcttccatgcccatatatatcccaatgggacaaaaccagagcattagctataatttaaggacacaaaattt

SEQ ID NO: 558362 - DNA, 516 bp, Homo sapiens
tgactactactactactaataataataataaaataccacagactgggtggcttaaatagcagrcatttatttcctcacatttctgaaggctacagtccaaggccaagttgtagttaggtttgattgaggcctctctccttggcttgcagacggctgccttcttgctgtgacttggcctattttatgctgcagtagaccacagactgggtaacttacacaaaacagaaatttatcagctcacagttctggaagctgtaaagtccaatatcaaggtgatggcagggttggcagttctcattccaggaaggagccttgaacacggcagcctctgcaggggaggaatgctttgtctcccatggcagaacacaaaagatcaacgggaaaaaaagggattaactcccttttataacggtgttaatcacacccatgaggtcacagccctcatgacctaatcactttgtaaaagttctacttcctaatagtgttacaatggcaattaaacttcaacatgagttt

SEQ ID NO: 558363 - DNA, 651 bp, Homo sapiens
tttgtctatttacacttttggttctcatgacttttgcttcatgcattgtgaaacttccattatgtctatacatattattatgactaaggcttttgaaggattaacctatttttattattacaagtgttcttttttttctctgaaagtttcctcattttgaagtgtgattytcctggcattaatagagacattctagctttattataaacaatatttgcatgggccatctaaaaatcatgttacctttagccttttaatatactcatatttaaagtgtacatcagggatttccaagcccctgttgtattgttactgggtcagtggcccattaggcaccaggcacacagcaggaggtgagtggtgggccagcaagccaagctccctccgtatttacagccactccccatcactcacattattgcctgatcttcccctcctgacagatgagctgcagtaattaattctctcaggagcacaaaccctactgtgaactgtgcatgtgagggatctaggtctcatgctccttatgagaatccaatgcctgatgatctgtcactgtctcccatcatccatagatgggactgtcgagttgcaggaaaacaagctcaagcctcccactaattttacattattgtaagttgtctaattgta

SEQ ID NO: 558364 - DNA, 651 bp, Homo sapiens
tttgtctatttacacttttggttctcatgacttttgcttcatgcattgtgaaacttccattatgtctatacatattattatgactaaggcttttgaaggattaacctatttttattattacaagtgttcttttttttctctgaaagtttcctcattttgaagtgtgattttcctggcattaatagagacattctagctttattataaacaatatttgcatgggccatctaaaaatcatgttacctttagccttttaatatactcrtatttaaagtgtacatcagggatttccaagcccctgttgtattgttactgggtcagtggcccattaggcaccaggcacacagcaggaggtgagtggtgggccagcaagccaagctccctccgtatttacagccactccccatcactcacattattgcctgatcttcccctcctgacagatgagctgcagtaattaattctctcaggagcacaaaccctactgtgaactgtgcatgtgagggatctaggtctcatgctccttatgagaatccaatgcctgatgatctgtcactgtctcccatcatccatagatgggactgtcgagttgcaggaaaacaagctcaagcctcccactaattttacattattgtaagttgtctaattgta

SEQ ID NO: 558365 - DNA, 651 bp, Homo sapiens
tttgtctatttacacttttggttctcatgacttttgcttcatgcattgtgaaacttccattatgtctatacatattattatgactaaggcttttgaaggattaacctatttttattattacaagtgttcttttttttctctgaaagtttcctcattttgaagtgtgattttcctggcattaatagagacattctagctttattataaacaatatttgcatgggccatctaaaaatcatgttacctttagccttttaatatactcatatttaaagtgtacatcagggatttccaagcccctgttgtattgttactgggtcagtggcccattaggcaccaggcacacagcaggaggtgagtggtgggccagcaagccaagctccctccgtatttacagccactccccatcactcacattattgcctgatcttcccctcctgacagatgagctgcagtaattaattctctcaggagcacaaaccctactgtgaactgtgcatgtgagggatctaggtctcatgctccttatgagaatccaatgcctgatgatctgtcactgtctcccatcatccayagatgggactgtcgagttgcaggaaaacaagctcaagcctcccactaattttacattattgtaagttgtctaattgta

SEQ ID NO: 558366 - DNA, 618 bp, Homo sapiens
atggtttttatatatgtatactgtaacaggttataacaaacaatagaaatwgactatctaaatgttttggaggtcagacatctaaaatgggcctagctgggctaaatttaatgtctaaagagggctggatttcctctggaggctctagagaagaatcttttgttcatcttccacattctaagggccaatgacattttgttgcttgtggtcccatccctcatcttcaaagtcaaaagccaggcagtgtccttctcatgctgccatgcctctgactctctcaaagttatctatagccttatgcatttataaggatccctgtgattacattggtacgacctagataatgtaagacacaaccgaatgtaaaggtcagctgattaacaatcttaattctaccttcaagcttaattctcttttgatatgagactaacacatttactggttctagattttaagatgtgaacatttcgggaggtgagaaaaagcattattctgccttccatgtctaacagtgtctaaaggtgaatcattaatagtaaatataaataaataattgtcctccaaattatggcagtgatagtgaaattgaaattgtcacaatataaaacttcatacaat

SEQ ID NO: 558367 - DNA, 510 bp, Homo sapiens
ctgtggtcccagctacccaggaggctgaggcaagagaatcgctggaacccaggaggcagagtctgcagtgagccaagattgtgccactgcactccagcctgggcaacagagtaagactccgtctcaaaaaaaaaagtcatcttttctgataatgaagaatattttccttcttatacacccttagtttagaaatgtggagaggcgtgttttcccataaagaacaagcctgttaatatttgttggttgctgatattatacagtcctggtgaatttttcctcttcattgctagtaagttttccccaatgaagtctattttagccagtgtaagtagrgcaataacatctttcttttgaatagtgtttgaataatgtatatgtattttcatcctttctgtttcaagatttctgtaacctaatatttaaaatctatatctgctataagcatatagtttttaaaaactcactctactaatctttgccttttacataatatttagtctattaacattt

SEQ ID NO: 558368 - DNA, 510 bp, Homo sapiens
ctgtggtcccagctacccaggaggctgaggcaagagaatcgctggaacccaggaggcagagtctgcagtgagccaagattgtgccactgcactccagcctgggcaacagagtaagactccgtctcaaaaaaaaaagtcatcttttctgataatgaagaatattttccttcttatacacccttagtttagaaatgtggagaggcgtgttttcccataaagaacaagcctgttaatatttgttggttgctgatattatacagtcctggtgaatttttcctcttcattgctagtaagttttccccaatgaagtctattttagccagtgtaagtagggcaataacatctttcttttgaatagtgtttgaataatgtatatgtattttcawcctttctgtttcaagatttctgtaacctaatatttaaaatctatatctgctataagcatatagtttttaaaaactcactctactaatctttgccttttacataatatttagtctattaacattt

SEQ ID NO: 558369 - DNA, 510 bp, Homo sapiens
ctgtggtcccagctacccaggaggctgaggcaagagaatcgctggaacccaggaggcagagtctgcagtgagccaagattgtgccactgcactccagcctgggcaacagagtaagactccgtctcaaaaaaaaaagtcatcttttctgataatgaagaatattttccttcttatacacccttagtttagaaatgtggagaggcgtgttttcccataaagaacaagcctgttaatatttgttggttgctgatattatacagtcctggtgaatttttcctcttcattgctagtaagttttccccaatgaagtctattttagccagtgtaagtagggcaataacatctttcttttgaatagtgtttgaataatgtatatgtattttcatcctttctgtttcaagatttctgtaacctaatatttaaaatctayatctgctataagcatatagtttttaaaaactcactctactaatctttgccttttacataatatttagtctattaacattt

SEQ ID NO: 558370 - DNA, 501 bp, Homo sapiens
ttgctgacaactcagtggggraatggacactgcttaggcaaatgttgaccagaattggtatatttcagaccaaaacttctgcagagtaatggttcaggagacttaaagttttcctcctaaataacacgaatggagtgatcagaacttgaaggggagaagtttatattgctattggaatgtaaccctcattaaggaacaaagaaagatgaactggagaggggcctgggcttgagcttcccttatggttttcccataaattcaccattatagctgggaaagctatcagcagccacagcgtattagcccattttcacgtgctgataaagacataccagagactgggcaatttacaaaagaaagagatttaatggacttacagttccatgtgcctggggaggcctcacaatcacggcagaaggcaaggaggagcaagtcacatcttacatggatagcagtaggcaaagagagttcatgcagggaaattcccctttttaaaaccat

SEQ ID NO: 558371 - DNA, 242 bp, Homo sapiens
actataagtttctgagaagctttctaatattacagtggtttgtattattgtygtgttgctgaagttagaaaagaatgatactgtagataattccccctgacccacattctttttctagacctatttattattacatataaattccatacatttattgaacatataaattccaaaatttttgatggcttaattaatagttaaataatgcatcagaattcacaaacagttgaacttaatcttta

SEQ ID NO: 558372 - DNA, 242 bp, Homo sapiens
actataagtttctgagaagctttctaatattacagtggtttgtattattgtcgtgttgctgaagttagaaaagaatgatactrtagataattccccctgacccacattctttttctagacctatttattattacatataaattccatacatttattgaacatataaattccaaaatttttgatggcttaattaatagttaaataatgcatcagaattcacaaacagttgaacttaatcttta

SEQ ID NO: 558373 - DNA, 421 bp, Homo sapiens
acattaccagctgtggtagccacagggcaagattccttatgcttgagaaaagcagatggaaaagtaaagaagactttgtcttgcaccttaggtaccagcagggccacaggggtgtagagcaccaggtgtactcttggggtccccaattcagggacttgacttttagatggcatttctggacctgccctaggtcagagggtactcacttccctgaagggtaagtctcaggccaggcagcattcaccgcaggcggttttaagagcccctgagccttaagagaacattggaggtagtctggcagtacttctygtggactgtggtgatggtggctacagggtgaggttcctctgtctttggaaagaggagagaggattggtaaggactgtatcttggggtttgagttccaactctgcatcttggg

SEQ ID NO: 558374 - DNA, 421 bp, Homo sapiens
acattaccagctgtggtagccacagggcaagattccttatgcttgagaaaagcagatggaaaagtaaagaagactttgtcttgcaccttaggtaccagcagggccacaggggtgtagagcaccaggtgtactcttggggtccccaattcagggacttgacttttagatggcatttctggacctgccctaggtcagagggtactcacttccctgaagggtaagtctcaggccaggcagcattcaccgcaggcggttttaagagcccctgagccttaagagaacattggaggtagtctggcagtacttcttgtggactgtggtgatggtggctacagggtgaggttcctctgtctttggaaagaggagagaggattggtaaggactgyatcttggggtttgagttccaactctgcatcttggg

SEQ ID NO: 558375 - DNA, 551 bp, Homo sapiens
ggccaacagtgtactttgtctctcataagatttgcttggaatctgctcaacgctaaaagcccctatttagaactggaggttcccaagagatacatttccatcattttgtgagaaaagaggcagaatacgagggagataacacagacgtcatagctggagaataagaatgatttaatgtgttcttggcactgtgctaagtggcttgaggttcacacacctcatctgatccatggttaccatggctgtgcagctccatcatccacggaaatgaaaaaamtacataattgcctacctgtttcaacccatcacccactagacaaactgattgcttaggctttgagttagagctaggcaagtgatatttttaaagctgcacaagtgattctgaattattatcaggcataaaatttgcttattttttacaactcctcaaacaggaatattgcctcatcttctgcagaagatgagttgcaatctatccatctgacaaaggtctaatatccagaatctacaaacaacttaaacaaatttacaaggaaaaaacaacccca

SEQ ID NO: 558376 - DNA, 551 bp, Homo sapiens
ggccaacagtgtactttgtctctcataagatttgcttggaatctgctcaacgctaaaagcccctatttagaactggaggttcccaagagatacatttccatcattttgtgagaaaagaggcagaatacgagggagataacacagacgtcatagctggagaataagaatgatttaatgtgttcttggcactgtgctaagtggcttgaggttcacacacctcatctgatccatggttaccatggctgtgcagctccatcatccacggaaatgaaaaaactacataattgcctacctgtttcaacccatcacccactagacaaactgattgcttaggctttgagttagagctaggcaagtgatatttttaaagctgcacaagtgattctgaattattatcaggcataaaatttgcttattttttacaactcctcaaacaggaatattgcctcatcttytgcagaagatgagttgcaatctatccatctgacaaaggtctaatatccagaatctacaaacaacttaaacaaatttacaaggaaaaaacaacccca

SEQ ID NO: 558377 - DNA, 640 bp, Homo sapiens
aagtggtatgtaatatccagaacaagaaatattggtcattcactaaaatctatattttaaaatgatatttgatgacatggataaatattcacatttttaaaaatgacttaaaagttataacagtatggtctataaacctgtttctatttatttgtgaatgtgtgtaggagtatgtgtatcccttgaagcagtgacacatacacagtggggatccaggagtaatgtgaccactcaagactaaagtttctcagggagctttatttttctgtattcctccaatctatgattaatatataaatatcttcagaaaaaaataaaatttttagaaattgtacatgttttaattgatcaaaatgtcattatccattatactctgcaacagaatatccaatctactttttaattgcattcctatcaaaatgcccatcaaaggagctgtggccctggaagaaaagaatatttctacatgacaaacccagcaaacactgtgccctccgcatttgatcatactaacagacaactcttctaataatgtttgaatccgttaccagcccacagaaaacaggcaatccccaaactccaaattaaggtcttagacactttaggctgctgyaacaaattaccatagactaggtggctt

SEQ ID NO: 558378 - DNA, 619 bp, Homo sapiens
aaactgtcttctgaccaaattcttccagacaaatcagctgttgctatatatatatatatatatatatatgctatatattttactgcatagaatatataatatattatatagcatagaatatattatatattatatattaattatataatatacattacatattatatataatatattatattattatgctatatcttatatattatatatgttatatatgtatatatatattatatatacacatatacacatacatacacacatgtatattttaatagctaatatcttacactggtatatttatattacatatgattatatacaaatatttttgtactttatgtttatgctgtatatacagatgtaattagttgtttatgttatatgtaatataaacatgatgtatattcttattttcctgtgaggacccactgtcttcttaatacactgtcttctgaccaaagtcttccacacaaatcagctgttactatatatatatatatatatatataatatttatatacacatatacacatacatacrcacatatgtatattttaatagctaatatcttacactgatatatttatattacatatagttacatactaatattttt

SEQ ID NO: 558379 - DNA, 587 bp, Homo sapiens
aatacaatttaagaaactcatcatagtctattatacttaccatatgattaccccttctgttgttgctatttctgatttccttatttccttttcgttagtaragcttccttcagccatttattaagggtaggttttctggtaacaaattatcctagttgtccttcctcttagaatatctttatttccccctcatccctgaaggatacgttcactgaatagggttctgggcagacagtttttctcagcacctggtgatggtgtgtcgccccctctgcctcgtggttttagagaagcccaccatcctcagaaccagcgtcccttaatgcatcgtttttctctggtggtttaaaagattttttcttcatctttcctctcctgaagttccgttatgatgtgtttatcctatttggggtttgctcagattcttgaatctgcaggtttacttctttcaccaaatttgggacatcttcaaccactgtgcctttgaatactttttcaccacacattccttcctctcctcctgggactctggtgacaggaacgctgggccttttgtcactgtcccacccatccccgaggaggcgttc

SEQ ID NO: 558380 - DNA, 587 bp, Homo sapiens
aatacaatttaagaaactcatcatagtctattatacttaccatatgattaccccttctgttgttgctatttctgatttccttatttccttttcgttagtagagcttccttcagccatttattaagggtaggttttctggtaacaaattatcctagttgtccttcctcttagaatatctttatttycccctcatccctgaaggatacgttcactgaatagggttctgggcagacagtttttctcagcacctggtgatggtgtgtcgccccctctgcctcgtggttttagagaagcccaccatcctcagaaccagcgtcccttaatgcatcgtttttctctggtggtttaaaagattttttcttcatctttcctctcctgaagttccgttatgatgtgtttatcctatttggggtttgctcagattcttgaatctgcaggtttacttctttcaccaaatttgggacatcttcaaccactgtgcctttgaatactttttcaccacacattccttcctctcctcctgggactctggtgacaggaacgctgggccttttgtcactgtcccacccatccccgaggaggcgttc

SEQ ID NO: 558381 - DNA, 587 bp, Homo sapiens
aatacaatttaagaaactcatcatagtctattatacttaccatatgattaccccttctgttgttgctatttctgatttccttatttccttttcgttagtagagcttccttcagccatttattaagggtaggttttctggtaacaaattatcctagttgtccttcctcttagaatatctttatttccccctcatccctgaaggatacgttcactgaatagggttctgggcagacagtttttctcagcacctggtgatggtgtgtcgccccctctgcctcrtggttttagagaagcccaccatcctcagaaccagcgtcccttaatgcatcgtttttctctggtggtttaaaagattttttcttcatctttcctctcctgaagttccgttatgatgtgtttatcctatttggggtttgctcagattcttgaatctgcaggtttacttctttcaccaaatttgggacatcttcaaccactgtgcctttgaatactttttcaccacacattccttcctctcctcctgggactctggtgacaggaacgctgggccttttgtcactgtcccacccatccccgaggaggcgttc

SEQ ID NO: 558382 - DNA, 587 bp, Homo sapiens
aatacaatttaagaaactcatcatagtctattatacttaccatatgattaccccttctgttgttgctatttctgatttccttatttccttttcgttagtagagcttccttcagccatttattaagggtaggttttctggtaacaaattatcctagttgtccttcctcttagaatatctttatttccccctcatccctgaaggatacgttcactgaatagggttctgggcagacagtttttctcagcacctggtgatggtgtgtcgccccctctgcctcgtggttttagagaagcccaccatcctcagaaccagcgtcccttaatgcatcgtttttctctggtggtttaaaagattttttcttcatctttcctctcctgaagttccgttatgatgtgtttatcctatttggggtttgctcagattcttgaatctgcaggtttacttctttcaccaaatttgggacatcttcaaccactgtgcctttgaatactttttcaccacacattccttcctctcctcctgggactctggtgacaggaacrctgggccttttgtcactgtcccacccatccccgaggaggcgttc

SEQ ID NO: 558383 - DNA, 542 bp, Homo sapiens
gaagaataattgtttcactccataaaagscaagttgcggagaaaaacacatagacattcaactgcaaagcagagaaacttgactattttctgcaattttaaagtgtatattgaataaaaccatctttttattttcttttttgctcactggcaaatattaacaacatcaagtgtattattataatgttatctagttaaaaatctcaaaaagttttcataattaccatttaaaaatatataaataggtgacctaatgttaatttttattgtctgagaccatgtctgttatttcactctttaaattcagttagtaatgcagaacctagcacttagtagatactcaaaaattatttgctgaataaaaaaaggttaaacataatatatacaaaatgtactggaaaaaatgcatcaaacaattttgttataccagtttaatgtaaatattgcctttaaaagataatatagttttcaggtgtctacagtgattttgtaatatttgtgcacatataaaataatatttccaaaaatgtaatccagtgggga

SEQ ID NO: 558384 - DNA, 542 bp, Homo sapiens
gaagaataattgtttcactccataaaagccaagttgcggagaaaaacacatagacattcaactgcaaagcagagaaacttgactattttctgcaattttaaagtgtatattgaataaaaccatctttttattttcttttttgctcactggcaaatattaacaacatcaagtgtattattataatgttatctagttaaaaatctcaaaaagttttcataattaccatttwaaaatatataaataggtgacctaatgttaatttttattgtctgagaccatgtctgttatttcactctttaaattcagttagtaatgcagaacctagcacttagtagatactcaaaaattatttgctgaataaaaaaaggttaaacataatatatacaaaatgtactggaaaaaatgcatcaaacaattttgttataccagtttaatgtaaatattgcctttaaaagataatatagttttcaggtgtctacagtgattttgtaatatttgtgcacatataaaataatatttccaaaaatgtaatccagtgggga

SEQ ID NO: 558385 - DNA, 542 bp, Homo sapiens
gaagaataattgtttcactccataaaagccaagttgcggagaaaaacacatagacattcaactgcaaagcagagaaacttgactattttctgcaattttaaagtgtatattgaataaaaccatctttttattttcttttttgctcactggcaaatattaacaacatcaagtgtattattataatgttatctagttaaaaatctcaaaaagttttcataattaccatttaaaaatatataaataggtgacctaatgttaatttttattgtctgagaccatgtctgttatttcactctttaaattcagttagtartgcagaacctagcacttagtagatactcaaaaattatttgctgaataaaaaaaggttaaacataatatatacaaaatgtactggaaaaaatgcatcaaacaattttgttataccagtttaatgtaaatattgcctttaaaagataatatagttttcaggtgtctacagtgattttgtaatatttgtgcacatataaaataatatttccaaaaatgtaatccagtgggga

SEQ ID NO: 558386 - DNA, 583 bp, Homo sapiens
gttaaacataatatatacaaaatgtactggaaaaaatgcatcaaacaattttgttataccagtttaatgtaaatattgcctttaaaagataatatagttttcaggtgtctacagtgattttgtaatatttgtgcacatataaaataatatttccaaaaatgtaatccagtggggaaatatactttctaaattctagatttataatttagggtttaaattataaaatcattaaataagacacaagtgaaatatagtcaaatatccccttggaaaaaaattaagtggcctctaaagtgaggtattmatatatgtaattttacaatcctctagtgatagaattaaatacaccaccaaattgattatctcctacagtgttaaaagagaagcactaacaatgccagtgaccatgtaacatggatttaagctacaagtcatagaaatgtgatgagaagcctcagcgctgtaaaacagagggtggaggaaagcttttcctctctcaaatgagctttgcgaggtatacttcttgaaggatagaagttgaagtgttcaggacttttatgtctattctactttggcttagttt

SEQ ID NO: 558387 - DNA, 583 bp, Homo sapiens
gttaaacataatatatacaaaatgtactggaaaaaatgcatcaaacaattttgttataccagtttaatgtaaatattgcctttaaaagataatatagttttcaggtgtctacagtgattttgtaatatttgtgcacatataaaataatatttccaaaaatgtaatccagtggggaaatatactttctaaattctagatttataatttagggtttaaattataaaatcattaaataagacacaagtgaaatatagtcaaatatccccttggaaaaaaattaagtggcctctaaagtgaggtattaatatatgtaattttacaatcctctagtgatagaattaaatacaccaccaaattgattawctcctacagtgttaaaagagaagcactaacaatgccagtgaccatgtaacatggatttaagctacaagtcatagaaatgtgatgagaagcctcagcgctgtaaaacagagggtggaggaaagcttttcctctctcaaatgagctttgcgaggtatacttcttgaaggatagaagttgaagtgttcaggacttttatgtctattctactttggcttagttt

SEQ ID NO: 558388 - DNA, 583 bp, Homo sapiens
gttaaacataatatatacaaaatgtactggaaaaaatgcatcaaacaattttgttataccagtttaatgtaaatattgcctttaaaagataatatagttttcaggtgtctacagtgattttgtaatatttgtgcacatataaaataatatttccaaaaatgtaatccagtggggaaatatactttctaaattctagatttataatttagggtttaaattataaaatcattaaataagacacaagtgaaatatagtcaaatatccccttggaaaaaaattaagtggcctctaaagtgaggtattaatatatgtaattttacaatcctctagtgatagaattaaatacaccaccaaattgattatytcctacagtgttaaaagagaagcactaacaatgccagtgaccatgtaacatggatttaagctacaagtcatagaaatgtgatgagaagcctcagcgctgtaaaacagagggtggaggaaagcttttcctctctcaaatgagctttgcgaggtatacttcttgaaggatagaagttgaagtgttcaggacttttatgtctattctactttggcttagttt

SEQ ID NO: 558389 - DNA, 583 bp, Homo sapiens
gttaaacataatatatacaaaatgtactggaaaaaatgcatcaaacaattttgttataccagtttaatgtaaatattgcctttaaaagataatatagttttcaggtgtctacagtgattttgtaatatttgtgcacatataaaataatatttccaaaaatgtaatccagtggggaaatatactttctaaattctagatttataatttagggtttaaattataaaatcattaaataagacacaagtgaaatatagtcaaatatccccttggaaaaaaattaagtggcctctaaagtgaggtattaatatatgtaattttacaatcctctagtgatagaattaaatacaccaccaaattgattatctcctacagtgttaaaagagaagcactaacaatgccagtkaccatgtaacatggatttaagctacaagtcatagaaatgtgatgagaagcctcagcgctgtaaaacagagggtggaggaaagcttttcctctctcaaatgagctttgcgaggtatacttcttgaaggatagaagttgaagtgttcaggacttttatgtctattctactttggcttagttt

SEQ ID NO: 558390 - DNA, 553 bp, Homo sapiens
tgtaagaaacctgtacatgtacctcctgaatccaaactgctccaccattgcacagcaattccaagactgggacatctacccaraggaacagaagtcattctaccaaaaagatacaatgcatggtaaaagttccttttattaaagtatgtaaattgagatggagtctcgctctatagcccatgctggagtgcagtagcaatctcggctcacgaactctgcctcctgggttaaagtgattctcctgcctcagcctcctgagcagctgggatacaggcatgcgccaccatgcctggctagttttatttagtagagatagggtttcacatgttgaccaggcggtctcgaactcctgactcaggtgatctgcccaccttggccctccagaagtgctcgggcattatatgtgcccggccctgtaaggttcgtcacagcatgacttacaataggaaagtcatggaatcaacctagttgcccatcagtagggtaccggataaagcaaaagtggttcttctacagcatcgaatactacacagccatgaaaaagaataaaatc

SEQ ID NO: 558391 - DNA, 511 bp, Homo sapiens
tggctagttttatttagtagagatagggtttcacatgttgaccaggcggtctcgaactcctgactcaggtgatctgcccaccttggccctccagaagtgctcgggcattatatgtgcccrgccctgtaaggttcgtcacagcatgacttacaataggaaagtcatggaatcaacctagttgcccatcagtagggtaccggataaagcaaaagtggttcttctacagcatcgaatactacacagccatgaaaaagaataaaatcacatcctttgcagccacatggatgtagctggagcggcattatgcttaatgaattaagaacagaaaatgaaataccacatgttcttgacgtggataaagcaattgtggcccttctacgccatggaatactgcacagccatgaaaaagaatagaatcatgtctttgcagccacatggacgcagctgaagggaattatgcttagtgaattaatgccaggaaaagaaaatcgaataccacatgttctccact

SEQ ID NO: 558392 - DNA, 553 bp, Homo sapiens
tgtaagaaacctgtacatgtacctcctgaatccaaactgctccaccattgcacagcaattccaagactgggacatctacccaaaggaacagaagtcattctaccaaaaagatacaatgcatggtaaaagttccttttattaaagtatgtaaattgagatggagtctcgctctatagcccatgctggagtgcagtagcaatctcggctcacgaactctgcctcctgggttaaagtgattctcctgcctcagcctcctgagcagctgggatacaggcatgcgccaccatgcctggctagttttatttagtagagatagggtttcacatgttgaccaggcggtctcgaactcctgactcaggtgatctgcccaccttggccctccagaagtgctcgggcattatatgtgcccggccctgtaaggttygtcacagcatgacttacaataggaaagtcatggaatcaacctagttgcccatcagtagggtaccggataaagcaaaagtggttcttctacagcatcgaatactacacagccatgaaaaagaataaaatc

SEQ ID NO: 558393 - DNA, 511 bp, Homo sapiens
tggctagttttatttagtagagatagggtttcacatgttgaccaggcggtctcgaactcctgactcaggtgatctgcccaccttggccctccagaagtgctcgggcattatatgtgcccggccctgtaaggttcgtcacagcatgacttacaataggaaagtcatggaatcaacctagttgcccatcagtagggtaccggataaagcaaaagtggttcttctacagcatcgaatactacacagccatgaaaaagaataaaatcacatcctttgcagccacatggatgtagctggagcggcattatgcttaatgaattaagaacagaaaatsaaataccacatgttcttgacgtggataaagcaattgtggcccttctacgccatggaatactgcacagccatgaaaaagaatagaatcatgtctttgcagccacatggacgcagctgaagggaattatgcttagtgaattaatgccaggaaaagaaaatcgaataccacatgttctccact

SEQ ID NO: 558394 - DNA, 511 bp, Homo sapiens
tggctagttttatttagtagagatagggtttcacatgttgaccaggcggtctcgaactcctgactcaggtgatctgcccaccttggccctccagaagtgctcgggcattatatgtgcccggccctgtaaggttcgtcacagcatgacttacaataggaaagtcatggaatcaacctagttgcccatcagtagggtaccggataaagcaaaagtggttcttctacagcatcgaatactacacagccatgaaaaagaataaaatcacatcctttgcagccacatggatgtagctggagcggcattatgcttaatgaattaagaacagaaaatgaaataccacatgttcttgacgtggataaagcaattgtggcccttctacgccatggaatactgcacagccatgaaaaagaatagaatcatgtctttgcagccacatggacgcagctgaagggaattatgcttagtgaattaatgccaggaaaagraaatcgaataccacatgttctccact

SEQ ID NO: 558395 - DNA, 503 bp, Homo sapiens
ttgaaactaggagtttgagaccagcctggacaacatggggaaactcyatctctataaaaatttgtcaggtgtggtggtgagtgcctgtagtcccagctactcaggaggctgaggtgagaggatcacctgagcccagacaggtcaaggctgtagtgtgccatgatcacaccactgcactccagcttgggtgacagagatcctgtcttaaaaaataaaaaagagctcagcctctagaaccacagccctgggcttaagtcctgactcacttgctattgattttgggcaagtgccgctcctctctgagactcacatttcccttctataaaacaggtgctggggccgggcatggtggctctcacctgtaatcccagcactttgggaggccaaggcaggcgaatcacctaagttcaggagttcaagactagcctggacaacatggtgaaatcccgtctctactaaaaatataaaactaagccaggcgtggtggcgcacgccagtaatcc

SEQ ID NO: 558396 - DNA, 503 bp, Homo sapiens
ttgaaactaggagtttgagaccagcctggacaacatggggaaactctatctctataaaaatttgtcaggtgtggtggtgagtgcctgtagtcccagctactcrggaggctgaggtgagaggatcacctgagcccagacaggtcaaggctgtagtgtgccatgatcacaccactgcactccagcttgggtgacagagatcctgtcttaaaaaataaaaaagagctcagcctctagaaccacagccctgggcttaagtcctgactcacttgctattgattttgggcaagtgccgctcctctctgagactcacatttcccttctataaaacaggtgctggggccgggcatggtggctctcacctgtaatcccagcactttgggaggccaaggcaggcgaatcacctaagttcaggagttcaagactagcctggacaacatggtgaaatcccgtctctactaaaaatataaaactaagccaggcgtggtggcgcacgccagtaatcc

SEQ ID NO: 558397 - DNA, 503 bp, Homo sapiens
ttgaaactaggagtttgagaccagcctggacaacatggggaaactctatctctataaaaatttgtcaggtgtggtggtgagtgcctgtagtcccagctactcaggaggctgaggtgagaggatcacctgagcccagacaggtcaaggctgtagtgtgccatgatcacaccactgcactccagcttgggtgacagagatcctgtcttaaaaaataaaaaagagctcagcctctagaaccacagccctgggcttaagtcctgactcacttgctattgattttgggcaagtgccgctcctctctgagactcacatttcccttctataaaacaggtgctggggccgggcatggtggctctcacctgtaatcccagcactttgggaggccaaggcaggcgaatcacctaagttcaggagttcaagactagcctggacaacatggtgaaatcccgtctctactaaaaatataaaactwagccaggcgtggtggcgcacgccagtaatcc

SEQ ID NO: 558398 - DNA, 497 bp, Homo sapiens
gttaggctttaagatcaccaaaaaaagagaataaaaaaggccaggcagtggctcacgcctrtgatcccagccctttgggaggccaaagcaggtggatcacgaggtcaggaggtcaagaccagcctggccaagatggtgaaaccctgtctctattagaaatacaaaaattagccgggtgcagtggcaggcgcctgtaatcccagctactcgggaggctgaggcaggagaatcgcttgaacccgggaggcagaggttgcagtgagccgagttcgtgccactgcactccagcttgggtgacagagcgagactgtgtctcaaaaaaaaaaaagagagagagaatgaaaaaaagggtgataagggaccgcaaggaggggatcagatgaaagagaagctgagggaaaggctccagggataaagggagatgggaaggctaaagagaccagaggtcagtagaatttccttgttaacatgccatgtatatgtaagcccaacccttc

SEQ ID NO: 558399 - DNA, 538 bp, Homo sapiens
aaactgttcacaaaaccaccatttccaatggcaaaatttatattttgatttctaacgaaaaattccaatgaactaaaacattttcattcttttgtttaattcaattaattcaaacttcttagccttggaggcatcaaaaactagtaaaatccaaaataaagaactacagaaaaaaacagtggggggtgctgttgcctggtgtcactataagctagggagcatctagactttggaagagaaaaaatgttgcagtcagccaaggcygtttcttgctgtctgatatttaacattattctttacttttccacttttcatagcagaccaaattcaaatttactgaattctaatttatcaaataaactcccctgagaatttaaagatgaggtcaagtattggataacacttaatgtttggtttttgtttttgtattcttgttttcataccctagactgcaactatcccttctacctagtcatttcagaaatctaagtgtttccagggtgggtacaagtagagaagacaaaaactgagcttcaga

SEQ ID NO: 558400 - DNA, 594 bp, Homo sapiens
ctgctaaccacatgaggggccacctgcaggctggcagaagaacagcccagctgagcccagctcagattgaagaacagttgggggtggtgattttttaagccactaaagttttagggtaagtttgtcagcaatacttgacaaccaaaaacactggtcattcatagatgccttttttctaagtacaagacaattactcaaatgcaargaaaatatggcaaacgttttcccaccacaaccttctcagtcaacagctgaactataattggtcatcgactgaaaaaaaataaaaaagccacgcctcttatcttagttcataaatatccatgattcttttcctatgactctttaatgccaatgcaaaagtagaccagtcagcttctgacagtctcaggcactggcttagttctcatttggccaaaaatagaagccatcaaaatgaattatacactactcgatacatgacggtaaatgagattgttctcacttttctaggatgtcgttacttaattttcccagatcatttcttcttatcatcccccacaatgaggaaaaaaacttaaactggttaaggttataaaaagaaaaaaaaaagcc

SEQ ID NO: 558401 - DNA, 594 bp, Homo sapiens
ctgctaaccacatgaggggccacctgcaggctggcagaagaacagcccagctgagcccagctcagattgaagaacagttgggggtggtgattttttaagccactaaagttttagggtaagtttgtcagcaatacttgacaaccaaaaacactggtcattcatagatgccttttttctaagtacaagacaattactcaaatgcaaggaaaatatggcaaacgttttcccaccacaaccttctcagtcaacagctgaactataattggtcatcgactgaaaaaaaataaaaaagccacgcctcttatcttagttcataaatatccatgattcttttcctatgactctttaatgccaatgcaaaagtagaccagtcagcttctgacagtctcaggcactggcttagttctcatttggccaaaaatagaagccatcaaaatgaattatacactactsgatacatgacggtaaatgagattgttctcacttttctaggatgtcgttacttaattttcccagatcatttcttcttatcatcccccacaatgaggaaaaaaacttaaactggttaaggttataaaaagaaaaaaaaaagcc

SEQ ID NO: 558402 - DNA, 594 bp, Homo sapiens
ctgctaaccacatgaggggccacctgcaggctggcagaagaacagcccagctgagcccagctcagattgaagaacagttgggggtggtgattttttaagccactaaagttttagggtaagtttgtcagcaatacttgacaaccaaaaacactggtcattcatagatgccttttttctaagtacaagacaattactcaaatgcaaggaaaatatggcaaacgttttcccaccacaaccttctcagtcaacagctgaactataattggtcatcgactgaaaaaaaataaaaaagccacgcctcttatcttagttcataaatatccatgattcttttcctatgactctttaatgccaatgcaaaagtagaccagtcagcttctgacagtctcaggcactggcttagttctcatttggccaaaaatagaagccatcaaaatgaattatacactactcgatacatgayggtaaatgagattgttctcacttttctaggatgtcgttacttaattttcccagatcatttcttcttatcatcccccacaatgaggaaaaaaacttaaactggttaaggttataaaaagaaaaaaaaaagcc

SEQ ID NO: 558403 - DNA, 625 bp, Homo sapiens
gcaattcaagatgaaatttgggtggagacacagccaaaccatatcatctactaatatttgacaaaggaacaaaggcaatttagtgagaaaaagatagtattttcagcaatttatgatggaatacaattggacttccatatgcaaaaaaaaagtgtagacagagacattatattgtaccccaaaattaacttgaaatggatcattgtataaaaggcaaaatgtaaagtctgaggtaaatatgtaaatatacattttcatcctaaatgtaaaatgtgaaactatgaaacctcttgaaaaaaatttaaaaaaatgtggagttggatattgtgatgcgttaaattcagtaacagtggcataattcagcaattaaaaaagtcataagttgcattttattaaaaccaaaaattgtctgccctgcaaaagtcactattaagawaatgaaaatttaagccacatactgtgaatgaatatttgataagcacaaatgatgaaggacttgcactcaaaatacacaaataacttgtaagctcaaaaatgtaacaacaaacagttaaaacaaagggcaaaacacatgaacagacatctcaccaaagaagatatacagatgggcacacagcaaatgaaa

SEQ ID NO: 558404 - DNA, 625 bp, Homo sapiens
gcaattcaagatgaaatttgggtggagacacagccaaaccatatcatctactaatatttgacaaaggaacaaaggcaatttagtgagaaaaagatagtattttcagcaatttatgatggaatacaattggacttccatatgcaaaaaaaaagtgtagacagagacattatattgtaccccaaaattaacttgaaatggatcattgtataaaaggcaaaatgtaaagtctgaggtaaatatgtaaatatacattttcatcctaaatgtaaaatgtgaaactatgaaacctcttgaaaaaaatttaaaaaaatgtggagttggatattgtgatgcgttaaattcagtaacagtggcataattcagcaattaaaaaagtcataagttgcattttattaaaaccaaaaattgtctgccctgcaaaagtcactattaagaaaatgaaaatttaagccacatactgtgaatgaatatttgataagcacaaatgatgaaggacttgcactcaaaatayacaaataacttgtaagctcaaaaatgtaacaacaaacagttaaaacaaagggcaaaacacatgaacagacatctcaccaaagaagatatacagatgggcacacagcaaatgaaa

SEQ ID NO: 558405 - DNA, 620 bp, Homo sapiens
tacaggcatacgccaccacacctggctaatttttgtatttttagtagagatagggtttcaccatgttggccaggctggtcttgaactcctgacctcagatgatccacccacctaggcctcccaaagttctagggttacaggcatcagccaccatgcccggacagaccaatatcttaygaagaaaacaattcttagtttaagttcttctttaaaggtaataatatagattcttgctgaagacagtaggtacacaaagaccaacaatcctttgtgaggagccctgtataattgtagagcacatctctcccatgctttcttgctatgtatcttatatataaacaggcatcgttcctaaggtggtgtatttctccccttgctttcgaggacaccctgctctgtctatggagtagcccttctttgattcctttactttcttaacaaacttgctttcactttactctgtggactcatgctaaattctttcttgcacaatatccaagaactctctcttggggtctggatcacaacccctttctggtaacaaaaccattttttccccttgactttacagacctatgggttgtaactaattcctattgttgcttgactaagtgcctcaa

SEQ ID NO: 558406 - DNA, 620 bp, Homo sapiens
tacaggcatacgccaccacacctggctaatttttgtatttttagtagagatagggtttcaccatgttggccaggctggtcttgaactcctgacctcagatgatccacccacctaggcctcccaaagttctagggttacaggcatcagccaccatgcccggacagaccaatatcttatgaagaaaacaattcttagtttaagttcttctttaaaggtaataatatagattcttgctgaagacagtaggtacacaaagaccaacaatcctttgtgaggagccctgtataattgtagagcacatctctcccatgctttcttgctatgtatcttatatataaacaggcatcgttcctaaggtggtgtatttctccccttgctttcgaggacaccctgctctgtctatggagtagcccttctttgattcctttactttcttaacaaacttgctttcrctttactctgtggactcatgctaaattctttcttgcacaatatccaagaactctctcttggggtctggatcacaacccctttctggtaacaaaaccattttttccccttgactttacagacctatgggttgtaactaattcctattgttgcttgactaagtgcctcaa

SEQ ID NO: 558407 - DNA, 488 bp, Homo sapiens
actgcattccagcgggcaacagagtgagactccacctcaaaataaataaataaataaataaaataaaaataaaaagatatgccagtactgtgtatgtctattcaacacagacttgtaaatacttcttttgtcagagaaatatgtatttcatatatcacgatatartcttatgatatacgtataatgtatatgatacaaaataagggttatatacatccattaaatacaatatactatatgttacatagtaaagttagcatgagttataaaataaatgtaaaataatacgtgtgtattaaataagaatataggaataaaatatatcaaagcgtaccttcacgtgtatcatgaagactagggacagttccatggccatatggacacaaatcctgaaatgcaactacaaagaaaaatacaaattctccattattgaagacttgaaattatcaaagaacttaagaaaggatgaacaatatacatgaaattac

SEQ ID NO: 558408 - DNA, 488 bp, Homo sapiens
actgcattccagcgggcaacagagtgagactccacctcaaaataaataaataaataaataaaataaaaataaaaagatatgccagtactgtgtatgtctattcaacacagacttgtaaatacttcttttgtcagagaaatatgtatttcatatatcacgatatagtcttatgatataygtataatgtatatgatacaaaataagggttatatacatccattaaatacaatatactatatgttacatagtaaagttagcatgagttataaaataaatgtaaaataatacgtgtgtattaaataagaatataggaataaaatatatcaaagcgtaccttcacgtgtatcatgaagactagggacagttccatggccatatggacacaaatcctgaaatgcaactacaaagaaaaatacaaattctccattattgaagacttgaaattatcaaagaacttaagaaaggatgaacaatatacatgaaattac

SEQ ID NO: 558409 - DNA, 558 bp, Homo sapiens
tcaatgtgaatagttgtcaaattaaagaataaggaatagtatggtttttaaaaagacattttgttcttggtgtttaaaatatcttgacatcatatatgtttagtatagaatagggatacttattttagcatgaattagaaacgataagcaagttcatgtttactgctgcaaagaaataattatctgaatttcttctgtaaggtacagaagtacttttttgcatctaagataaagatacagaagagactattctgaataataaaacaaatgggctctcttctttcatctcgtaagatggattttgctctagtccatctactgggagccatcaaaacaaatcttgcaaaagaattccttttggaattccttttgggtttcactcttgaagatttattgacagctctaaaagtacagtacaacttgcatttatttagaatggttggagaacattattgctatttgcattaattatttaagagttaagacacatacagtgtatccgttttcaaataatttaaatgtatttaacattwaaaagttatcaatcatgatcagtat

SEQ ID NO: 558410 - DNA, 524 bp, Homo sapiens
aagaaattccacataaacagaactggccttccactttcctgatgcttctgtttttgactttataatcttaaaataattgggaatcttttttctcagaatcattcttctgaaaatatgtatgtgtatgaaaggagttctgccctatttcaaaatttaatatcaggtagtttatattaccttttctgattttaatcaaacgcttatgccatatgttaatataattttcatgtcagtttccctagcagaaaaacaaagtcccatttaagacatctgcatcaccaaccagctgtcatagtagccattgggcaaaacatgaaatccaccaaagccttccaccatttctctcgagacaaggtagatttagaatgacatttttatcttcctttctgtctatccatccaaaagatattgttcatctattttaatgtttactacatgctgtttactttttaaaataaataggagaatagtataacttcatttatttatttatttrtttatttatttatttatttatttatttt

SEQ ID NO: 558411 - DNA, 335 bp, Homo sapiens
tactctttcccccactgaattgtcttagcacaattggctgtaaacgtaatgttttatttttggyctctcaattccattctattggtttgtatgtctatttttaatgtcttgatttttatgtcttgattactgtagttgtgtagtgagttttgtgataagtgtgaatcctccaattgtttttctttctcaagattatttgggctatttgaagttctttacatatccatatgaattttaggatccgcttgtcaatttatgcaaagaaggcaactgaaattttgatagaaattgcattcgatctatcactaacttgatttaaacttttaactatttat

SEQ ID NO: 558412 - DNA, 540 bp, Homo sapiens
tatagtgttacaggtgtcatctcttcagagaggtctttcttgaccaactatgttaagatgatcgtctctacctgttatgttttcatcacacagttggtttactactttagaatttccttttacaaatttctcagaaaactatagttgtaattataatatttaattatttgcttatttatctattgttattagactaaatatcagatatttatgagtaatacaattgaacgaagtttatagtgtgcataactatccataagttttygtctattacatgttatctattatatatatttatctatctatatgtaaatataatcaatcaaccagaaggacatttcatgccaccagtaccaaagagtgagctttttacaagttcttggttcaaaataaaaatttgacccaacattaccactgaggaggatgaacttaaaatacttaactgaccaagagaagcattagtaatgtcagaacctgcagagaatatgatgactgtcaacttgaataggctaaaggatgcaaagatagatgatgaaacat

SEQ ID NO: 558413 - DNA, 540 bp, Homo sapiens
tatagtgttacaggtgtcatctcttcagagaggtctttcttgaccaactatgttaagatgatcgtctctacctgttatgttttcatcacacagttggtttactactttagaatttccttttacaaatttctcagaaaactatagttgtaattataatatttaattatttgcttatttatctattgttattagactaaatatcagatatttatgagtaatacaattgaacgaagtttatagtgtgcataactatccataagttttcgtctattacatgttatctattatatatatttatctatctatatgtaaatataatcaatcaaccagaaggacatttcatgccaccagtaccaaagagtgagctttttacaagttcttggttcaaaataaaaatttgacccaacattacyactgaggaggatgaacttaaaatacttaactgaccaagagaagcattagtaatgtcagaacctgcagagaatatgatgactgtcaacttgaataggctaaaggatgcaaagatagatgatgaaacat

SEQ ID NO: 558414 - DNA, 615 bp, Homo sapiens
tagcaaagttattcacaaaatgaaacaagtatgtctttatattaaagtattttagggtctggtaaaagtgtgtgttgcaacaaaagaaaaaaggaaatartagttcttccactcatacagaaaattgtaagaatataagaaaacttgaatattatcatccataaataagactaccattcattgctaacttcccaattggaacattcctaattttaaattagaaatttatgtttcttatgcgataagcccaaatcttcactgtgaccattatttttaaaggcaataaataagaaagagagaagtagaggaagtagaggaaggaaggaagaaaggaaagaaggaaggaagtagaggaagaaaggaagtagaggaaggaaggaagtagaggaaggaggaaggaaggaaggaagatgttaaggaccttagttttataaatcttacaaactaaagcattaatttcaattctgtgtcctgccatattgagaaagtttttaaaacaagtgcctagaattcaggttaccttcataaaacaatattttaaaattgttaatttatgtacttttattatcaaaatctctctttattcccagttgatttaaagctctccactaaatc

SEQ ID NO: 558415 - DNA, 492 bp, Homo sapiens
aggtatgagccaccataccctacctattattacttttttagagatagtgtctygctctgtcaccaaggctggggtgcagtagtgccgttgtagctcactgcagcctcgaccttctgtgcttaagcgatcctccctccttagcctgtcaagtagctgggctacagatgcacaccattacacatagctgattttaatttaattttattttattttattttattgtagagatgggggtttcactatgttgcccaggatggtcttaaattcctgacctcaagcaatcctcccgcctcagcctccccaagagctgggattacaggcatgagccactgcacctggctgggctgggttcctgatgacgtctgcaagttgacttgctgcaggaggactatctgaatttcggatgtagtgacacttggcgttccaccctcaatcactcctggctccccttttcagggcctgtagcagccgggttttctagaaggggtcttg

SEQ ID NO: 558416 - DNA, 492 bp, Homo sapiens
aggtatgagccaccataccctacctattattacttttttagagatagtgtcttgctctgtcaccaaggctggggtgcagtagtgccgttgtagctcactgcagcctcgaccttctgtgcttaagcgatcctccctccttagcctgtcaagtarctgggctacagatgcacaccattacacatagctgattttaatttaattttattttattttattttattgtagagatgggggtttcactatgttgcccaggatggtcttaaattcctgacctcaagcaatcctcccgcctcagcctccccaagagctgggattacaggcatgagccactgcacctggctgggctgggttcctgatgacgtctgcaagttgacttgctgcaggaggactatctgaatttcggatgtagtgacacttggcgttccaccctcaatcactcctggctccccttttcagggcctgtagcagccgggttttctagaaggggtcttg

SEQ ID NO: 558417 - DNA, 492 bp, Homo sapiens
aggtatgagccaccataccctacctattattacttttttagagatagtgtcttgctctgtcaccaaggctggggtgcagtagtgccgttgtagctcactgcagcctcgaccttctgtgcttaagcgatcctccctccttagcctgtcaagtagctgggctacagatgcacaccattacacatagctgattttaatttaattttattttattttattttattgtagagatgggggtttcactatgttgcccaggatggtcttaaattcctgacctcaagcaatcctcccrcctcagcctccccaagagctgggattacaggcatgagccactgcacctggctgggctgggttcctgatgacgtctgcaagttgacttgctgcaggaggactatctgaatttcggatgtagtgacacttggcgttccaccctcaatcactcctggctccccttttcagggcctgtagcagccgggttttctagaaggggtcttg

SEQ ID NO: 558418 - DNA, 522 bp, Homo sapiens
aaagctttgagcaggacttagaaagtgaaaatgcagtgatcttaaaacttttattctaaaacaagtggcaatccctaaagtaccaatgatattcttcaaagaaacggggggggaaagccctaaaatgtatatggaaccacaaaagacacaaatagccaaagcaatcctgaacaaaaagaacaaagttaaggcatcaccctacctgacttcaaaatttactacagagctatagtaactaagccagcatggtactggcataaaacagacatacagaccaatggaacagaatagagaacccaaatataaatccacacatttacagtcaacttatcatagacaaaggtggcaagaacatacaatggggaaaggacaatcttttcaataaatggtgctggggaaactgaataactatatgcagaagaatgaaactagamccctatatctcaccctacacaaaaatcaaatcaaaatggattaaagacttaaatctaagacctgaaactatgaaactactagaagaaa

SEQ ID NO: 558419 - DNA, 595 bp, Homo sapiens
ggtgatccaccgcctcggcctcccaaagtgctgggattacaggaatgagmcattgtgcctggcgggcaagttattttttaatcttatggattaggaactccagatggaatcattacaaaaataacaataacaccaacaaagaaaaaacatagcaatagttgcacaacattgttgtacatttttgcacatgattttccccaccctcaaatctaattgaaatgcttgcaaggtacattcagttaacataaatgctttatctggactagatgtagaaaaaaatgtgctaagctacttttactgagtctaaatatacaattgcttacttatagtgccttgtaaaattctgcatagatacttaaacagcctaacaaaatatccagtgcaacactccatctgttgggtagatagctctcttctccttaaggtggattgagccatctttgaaccaattataattttcaaaaaatcatttatgatattgagcctaaaattatcctataacttgtataaacagtctattatttctaggcccaactaggagtaaagctactctttctttcaaacttccttcatgtaattgaaaatgactgtgtta

SEQ ID NO: 558420 - DNA, 589 bp, Homo sapiens
gaactcgggacttgttctttttaactcccagagctacaacattacatgcagaatccttccttacttagggggcccaaatcaataaattcagactgatccaactctatgttccttccaccattatcccacacccttaatatccattcccatgcctgttctccagatttctgcttatataaattagaaaactcaagcagttcttttggagtatagctcacctcctcatgggtcacactctcaacctcacatctagggscctgctgggactttagttataggtctagaagcaaacaggggtgttgagggtaggttctgaggagaatcaacattgtcctgcatggcaactgccttgggggaggcaatcactgttgcctcaggcagtgcagggtttatgttctcagacaaaggggaaaaggttgatggtacctggtttagggaggggataggggaagctgtttcttctgcaaaaaaagttcatcagagtttacaagctcagtgtcccgagcttcatcaggttctttccacatgtctccattccaagttgcaaggtcacattcttttccaatcaatgccctcactttaacagtag

SEQ ID NO: 558421 - DNA, 343 bp, Homo sapiens
gagttgttatttatgagagtaactttgctaatgcacccacctggtcattttctccagctgtgtgttgattctcctctgagaattatgagggatcttgtatagaacaatgaatatcaaagttggctccaaattttttttcctaactgaggtattgttcttcctaatcactttaactctcgctgttaaacttttacctactagttgyactaggcttccaaatacttaataccaaaatgtttgaaaactaaagtataggatgtatattgtatgactcacctgctcatgttttagaatacaagcagcaggaactgttatcattgttattagataattaatttgggaa

SEQ ID NO: 558422 - DNA, 514 bp, Homo sapiens
ctgtaatcccagctactcaggaggcctagggaggagaattccttgaacccaggaggcagaggttgcagtgagccgagatcacgccgctgtactccagactggcaacagagcgagattctgagaaaagagaaagaaagaaaagaaagaaaagaatgaaggaaggaaggaagggagggagggaagcagggagggagggagggaaagggaaagaaaggaactaaaccatgtacttctaagtattccacggttcaaagagaaagcctcaagggaaattttaataattacattgaactgaattaataaaattaagccatatccaaatttgtaaaacatagcyaaagcaggactgaaaaggaaatttatagcactaaatgcatacattagaaaggagaaaaaactctcaaattaatactccaagctctcatcccaagaacctagtttaatgagttatgggatattctaccaactcaaccttaggactatgaaacttatttggaaagtttcagatgagtga

SEQ ID NO: 558423 - DNA, 493 bp, Homo sapiens
ctttcagcattgaacagaactcccagacagaaaataaacactggacttagaatgaagggactaatagatatttacagaacatttcattcaacagctgcagaatccacattcttcttagtacatggatccttcttaaggatagagcgtatgttaggtcacaaaacaagtcttaatgcattcaaaaaaattgaagtaataccaagcatcttctctcacaacaatggaataaaactagaagtcaataacaaraggaattttggaaactatacaaacatgtggaaattaaacatgtgttcctgaatgatcagtcggtcaatgaagaaattaagaagacattgaaaaatttcatgaaacaaatgataaggaaaatacagcatactaaagcctatgtgaggcagcaagtgcctacatcagaaaagaaaagaaatacaatatattacctaatgatgcatcttaaagaattagaaaagcaaagcaaccaaacccaaatttg

SEQ ID NO: 558424 - DNA, 493 bp, Homo sapiens
ctttcagcattgaacagaactcccagacagaaaataaacactggacttagaatgaagggactaatagatatttacagaacatttcattcaacagctgcagaatccacattcttcttagtacatggatccttcttaaggatagagcgtatgttaggtcacaaaacaagtcttaatgcattcaaaaaaattgaagtaataccaagcatcttctctcacaacaatggaataaaactagaagtcaataacaagaggaattttggaaactatacaaacatgtggaaattaaacatgtgttcctgaatgatcagtcggtcaatgaagaaattaagaagacattgaaaaatttcatgaaacaaatgataaggaaaatacagcatactaaagcctaygtgaggcagcaagtgcctacatcagaaaagaaaagaaatacaatatattacctaatgatgcatcttaaagaattagaaaagcaaagcaaccaaacccaaatttg

SEQ ID NO: 558425 - DNA, 450 bp, Homo sapiens
tacattggagaaaagacagtcacttcagtaaattttgctgggaaaaattgtatatcttatgcagaagaatgaaactagacctctatctctcatcatatataaaaataaaatcaaaatggattagtgacttaaatctaatacctcagactataaaactactacaagaaaacattgggaaaatgctccaggcctttgacttggaaaaaaaatttcttgattaatgcccccaaagcacaggcaaccaaagcaaaattggaaaaatgggatcatatcaaattaaaaagcrtctaagctttctgcacatcaaagaaaacaatcgataaagtcaagggactacccacagaatgggagaaaatatttgtaaactactcatctgacagggattaataatcagaatacataaggagctcaaacaactttataggataaattttaataatttaatgataa

SEQ ID NO: 558426 - DNA, 450 bp, Homo sapiens
tacattggagaaaagacagtcacttcagtaaattttgctgggaaaaattgtatatcttatgcagaagaatgaaactagacctctatctctcatcatatataaaaataaaatcaaaatggattagtgacttaaatctaatacctcagactataaaactactacaagaaaacattgggaaaatgctccaggcctttgacttggaaaaaaaatttcttgattaatgcccccaaagcacaggcaaccaaagcaaaattggaaaaatgggatcatatcaaattaaaaagcatctaagctttctgcacatcaaagaaaacaatygataaagtcaagggactacccacagaatgggagaaaatatttgtaaactactcatctgacagggattaataatcagaatacataaggagctcaaacaactttataggataaattttaataatttaatgataa

SEQ ID NO: 558427 - DNA, 450 bp, Homo sapiens
tacattggagaaaagacagtcacttcagtaaattttgctgggaaaaattgtatatcttatgcagaagaatgaaactagacctctatctctcatcatatataaaaataaaatcaaaatggattagtgacttaaatctaatacctcagactataaaactactacaagaaaacattgggaaaatgctccaggcctttgacttggaaaaaaaatttcttgattaatgcccccaaagcacaggcaaccaaagcaaaattggaaaaatgggatcatatcaaattaaaaagcatctaagctttctgcacatcaaagaaaacaatcgataaagtyaagggactacccacagaatgggagaaaatatttgtaaactactcatctgacagggattaataatcagaatacataaggagctcaaacaactttataggataaattttaataatttaatgataa

SEQ ID NO: 558428 - DNA, 583 bp, Homo sapiens
gaggccaaggcaggcagatcacttgaggtcaggagttctagaccagcctggccaacatggtgacaccccgtcactactaaaaatacaagaattatctttgcatggtagcacactcctgtaatctcagctactcgggaggctgaggcaggagaatcgcttaaacccgggaggctgaggttgcattgagccaaggttgtggcacgcactccagcctgggtgacagagcgagactccatctcaaaaaataataataataataaataataataattattagaggtgtaaatttaggtggaaataccttagtcagggaacaaatggactagtgtagctatttcagaatggtgaaagaggatattaataaaatgtgaacttagcatttcagtgagaaatctggccgtctaagtctgacaggatgagttggcatcaatctttttgccttatgaaaaaatagagcaatcatgtaggctttgtttaaaattataattgtagatatgatagattggatcaaattcaggccacattytggaagtgaaaaataaagaactttttgcaactttaaacacatgaagttaggaagtaa

SEQ ID NO: 558429 - DNA, 743 bp, Homo sapiens
taaattgttctactataaagacacatgcacatgtatgttcattgcagcactattcaccatagcaatcatggaatcaacctaaatgcccatcaatggtagactagataaagaaaacatggtacatatccaccatggaatactgctcagccataaaaaagaatgagatcatggattcaggaaccctctatttgagaggagggggagtggagggggaggatcaaaacactacctgtcrggtactatgcttattagctgggtgatggaataatctgtataccaaatccctgtggcacgcaatttacctatataacaaacttacacatgtacggttaacctaaaataagagtttaaagaaaaataaaaaataacaatattcgtggtgtccagaggctagcagttctggtaagaataaagtagtttctccttatccatgaaggatacattccaagatcaccagtggatgcttgaagccatggggagtacaaaactatgtacatcatgatttttcctataaatacatacctataataatgtttaattgataaattaggaacattaagatatttacaataactaataataaaatagaacaatataacaatagcctataatagtatttgtgttcatatagtctctctctcaaaatatcttgtactgtgctgatttatttttgcaccacacttgaccatgggtaactgcaaaactgtggataaaggtggagtactgcattcttaatttgaaaa

SEQ ID NO: 558430 - DNA, 480 bp, Homo sapiens
actttccaaagttagtaaacttacacttaaggttatatattttggccaggcgcggtggctcacgcctgtaatcccagcactgggaggccgaggcaggcagatcacgaggtcaagacatggagactatcctggcgaacacggtgaaacccagtctctactaaaaatacaaaaattagccaggcgttgtaatctgagctrctcaggaggctgaggcaggacaattgcttgaaccccggaagcggaggttgcagtgagccgagatcttgccactgcactccagcctgggcgacagaatgagactctgtcttaaaaaaaaaaaaaaaaaaaaaaaaaagtcatcaaaccagatgacacaaatcaaatgacatttcactttgttttggtccgttttgtttgttagagacaagagtgcagcggggccatctcggctcactgcaacgtccagctcctgggcccaagcgatcctcccacctcagcctc

SEQ ID NO: 558431 - DNA, 480 bp, Homo sapiens
actttccaaagttagtaaacttacacttaaggttatatattttggccaggcgcggtggctcacgcctgtaatcccagcactgggaggccgaggcaggcagatcacgaggtcaagacatggagactatcctggcgaacacggtgaaacccagtctctactaaaaatacaaaaattagccaggcgttgtaatctgagctgctcaggaggctgaggcaggacaattgcttgaaccccggaagcggaggttgcagtgagccgagatcttgccactgcactccagcctgggcgacagartgagactctgtcttaaaaaaaaaaaaaaaaaaaaaaaaaagtcatcaaaccagatgacacaaatcaaatgacatttcactttgttttggtccgttttgtttgttagagacaagagtgcagcggggccatctcggctcactgcaacgtccagctcctgggcccaagcgatcctcccacctcagcctc

SEQ ID NO: 558432 - DNA, 480 bp, Homo sapiens
actttccaaagttagtaaacttacacttaaggttatatattttggccaggcgcggtggctcacgcctgtaatcccagcactgggaggccgaggcaggcagatcacgaggtcaagacatggagactatcctggcgaacacggtgaaacccagtctctactaaaaatacaaaaattagccaggcgttgtaatctgagctgctcaggaggctgaggcaggacaattgcttgaaccccggaagcggaggttgcagtgagccgagatcttgccactgcactccagcctgggcgacagaatgagactctgtcttaaaaaaaaaaaaaaaaaaaaaaaaaagtcatcaaaccagatgacacaaatcaaatgacatttcactttgttttggtccrttttgtttgttagagacaagagtgcagcggggccatctcggctcactgcaacgtccagctcctgggcccaagcgatcctcccacctcagcctc

SEQ ID NO: 558433 - DNA, 480 bp, Homo sapiens
actttccaaagttagtaaacttacacttaaggttatatattttggccaggcgcggtggctcacgcctgtaatcccagcactgggaggccgaggcaggcagatcacgaggtcaagacatggagactatcctggcgaacacggtgaaacccagtctctactaaaaatacaaaaattagccaggcgttgtaatctgagctgctcaggaggctgaggcaggacaattgcttgaaccccggaagcggaggttgcagtgagccgagatcttgccactgcactccagcctgggcgacagaatgagactctgtcttaaaaaaaaaaaaaaaaaaaaaaaaaagtcatcaaaccagatgacacaaatcaaatgacatttcactttgttttggtccgytttgtttgttagagacaagagtgcagcggggccatctcggctcactgcaacgtccagctcctgggcccaagcgatcctcccacctcagcctc

SEQ ID NO: 558434 - DNA, 586 bp, Homo sapiens
ttgacacttgtgattcactaatcatcagaggcaaggagtttagtgactctatacataataccttttaccatatgcggagaaccagggaacataatgaagttggttggttgctcctgagttcactggacaaagtgaagaaaggaaatgatgaactcagggattctaactccctgcctcagaagcagawactgagtctcaaatcttccaagattgccctgagtgaggatcttatctcctgtagagaaagagctagaattgtggaaaatcagatacaggctcttatcatgagagtggctgacctgccatgaaaggtgtgtgcacagccttgccaggtgtctactgttaaagtgagggcattgatcagaaaaaaatgggacccagcaacttggaatggggatgtgtgagaggaccccaatgaagctggggacactgagcttatagactgtaatgaacctttttttgccagaagaaacagcttccacattctcagtagtggcaacatcctctccctgacccatgctgccatcagcttttccaccattgtctgaagagataaaccgtacactgtctgaggcaacagtgatgg

SEQ ID NO: 558435 - DNA, 385 bp, Homo sapiens
aaggagactgaggaacaactgtatatatatatatacacagattctcccatacactttaaataatttctagactatttataatacctgatacaatgtaaataataaataattgttaygctatataatatttttaaaaattttattatttttattgttgtggattttattggtttttcaaatatttatgatctgtaattggttgaatctgcagatacagatcccaaagaaggctgactatatgtataattgaatccataattaataaccttgcaaaacagaaagcactaggcccagatgggttcaccagtgaattccaccaaacatttaaaaaagaaattatatcaattcttcacaatctcctctataaaatagaagtacagggatt

SEQ ID NO: 558436 - DNA, 508 bp, Homo sapiens
gttaggaggagcccgtcattctcttgtccttctgcctgagtttgcaatccctgtgaccaacgccttcttaccccggccttgtcacactctctgtgtcttacccgcatctggaaatttacctacaggagagccagtcagtcaaaatcaacagtgaccccatgccttcttctgtagttttctcctttggtcttgtctgtgttcattccagttttagagtagcatttgtgatagcaagggatggggcccacccagcactggtatcgtggtgaagtctcatgcacacggattgctttatgtgagcagttgatttgaataaaatttgtctaattctcaaagtctgtgtactagtctagtggtcagcaaactgtagcccacaggttacacttggcctactacttgcttttttaaggccctggagctaataatcacttgtataaattttttaatggttgaacaacaacaamaaaaaacaaatatattttttgccatgtaaaaattctagagaatt

SEQ ID NO: 558437 - DNA, 376 bp, Homo sapiens
cctaaatatatgctgccatatttcaaagaatacattactcctgatgcaaatgtcatattctgaaggtggcaatagtgtttcagtgacargcatatttggagccatcttcaatcatacttctgaggcagcttcctccttggccaaatatactcagcctttaataacagtgtagagaaacaaggagtgaagacttgctatttacaccccatccccactgatgcagtttggatattagaccccatgaaaatctcttgttgaaatgaaacccccagtggaggtggggcctggtgggaggtgattggatcatggaggtggatttctcatgaatgatttagcacaaaccccttcttgctgtcctcgctatagtgagtgaatt

SEQ ID NO: 558438 - DNA, 608 bp, Homo sapiens
ctgtttttgtggaatcttgaaagggatatttggctgtggtttgaggcctatggtgaaaaatgaattactttcagataaaaactagaaagaggcattctgggtaactgccctgtggtgtgtgtattcatctcacagagttaaacctttcctttgattgagcagtttcacaacagtttttttgtagaacctgagatgggatatttaggagaactatgaggcctatggtgaaaaatgaaatatcttcagataaaacaagaaagaagctttctgggaaactactttgtgacgtgtgcattcatctcacagagttcaacctttcttttgattgagcagtttggaacactgttttgatagaatcaggaaagggaaatttgggagtgcattcaggcctagggtgaaaaaggaaatatmttcagataacaactagaaagaagctttctcagaggccattttgtgatcttttcattcttctcacagagttaaaccttttcttggttgattgctctggaaaaactctattggtagaatttttgaagggatatttttgagtgcattgaggcctatggtgaaaaaggaaatatcttcagataaaaaatagaaagaagctt

SEQ ID NO: 558439 - DNA, 585 bp, Homo sapiens
  misc_feature 547, 548, 549, 550, 551, 552, 553, 554, 555, 556, 557, 558,559, 560, 561, 562, 563, 564, 565, 566, 567, 568, 569, 570,571, 572, 573, 574, 575, 576, 577, 578, 579, 580, 581, 582,583, 584, 585: n = A,T,C or G
tcacagagttaaacttttcttttcattgagcagtttggaaacactgtttttttagaatcttcaaagggatatttgggagccattagaggcctatgttgaaaaacaaaacatatttgagaaaaacytgaaagaagctttctgagaaactgcgttgagatgggtgaattcgcctcacagatttaaacttaaattttgattgagcagtttggaaaccctgttttggtagaatctgtgaatggatttctcagagcacttttaggcctatgataaaaaaggaaactttttttatcagggtttttgtgaaatctgagaagggatatttggaaacatttagaggcctatggtgaaaagtgaaatatcttcagagagaaacaagaaagaagctttctaagaaactgctttgtggtgtgtgcattcatctgacacagttaagcctctcttttgattgagcagtttggaaattcagttttcgtagaatctttgaaaggatatatgggagagactggaagtctatggtgacaaaggcaatgccttcagagaaaatctnnnnnnnnnnnnnnnnnnnnnnnnnnnnnnnnnnnnnnn

SEQ ID NO: 558440 - DNA, 555 bp, Homo sapiens
ctgagacactgttttgtgatgagtccattcatttcagagagttaaacctttcctttgattgagcattttggaaacactcttttcatagaatctgcaaagggatatatgggactacattgagacctatggtgaaaaaggaaatatcttcagatgaatagttgaaagaagtttttcagagtctcctttttgttgtgtgcattcttctcacaaagttaaacctttcttttgattaagcagtttgggaacactgtttagtataatctgcaaaarcatatataggagcacattaaggtgtattgtgaaaaagaaaatctcttcagggaaaaactggaaagaagctttgtgagaaactgtttattgatgtgtgaattcatctcacagagttaacctttcctttgaatgagcagcttggaaacactgttatggtggaatctgcgaaggtatatatgggagcacattgaggcctttgatgaaaaagaaatatctacagagaaaaactagaaagaagttttctaagaaattgcttgtgatgtgtgcattcatctcacagagtta

SEQ ID NO: 558441 - DNA, 467 bp, Homo sapiens
tggcaacttcatctgttcttctgacgtcaccattttgttcatcttgtgagtcaacggtgctcgattgcggtgtctccgtctccgcggaggtgcttttctttgcatctcygatgggttcattgtagaacttcaaatgtctagtgggtatccaaacaggaagctgattttctcctggtgaaacacaagcaaaacctctcccccacgttatcaccttccctatttcccatgtcttatttttattatctttccaccaaattagttttccttcatgtgggctgttctttttaccagtaagatgttgttctgcagaagtagtagtctgatttctataaatgtttaaaaaatttaaagtatagagtgctagattaagttgcatctgaggagtggtacactccttactgtctcccccttctttttgtttaactaattgagttttgagtgttctatttgttctttcaactatggcc

SEQ ID NO: 558442 - DNA, 587 bp, Homo sapiens
ggatatttgggagcacattgaggatgatgatgaaaaaggaaatagcttcagataaaaactagtaagaagctttctgagaaactgctttttgatgagtgcattcgtctcacagtgttaaaccttttttttattaagccatatggaaacacagtttttgtaggatcttagaaaggatatttgggagcactttgaagcctatggtgaaaaaggaaatatatttagagaaaaactagaaagaaacttcctgggtaactgccttgtgttgtgtgcattcatccaacagagttaaacctttcttttgattgagcagtttggaaacactgttttggtagtatctgtgcagaaatatttgggagcacatagaggcctatggtgaaaaagtaaatacctttagataaaaactagaaaggagctttctctggaaactgctttgtgatatgagcatccttgtcgcagagttaaacctttcttttgattgaggagtctgtaaacactgtttagtagaatctacagagggatataagggagcgtattgagacctatgttgaaacacgamatatactgagataaaaaatagaaagaagttt

SEQ ID NO: 558443 - DNA, 658 bp, Homo sapiens
tcactctaatataatataaacttaaactatgtggcattggctttggaatcagacaatggatagaagccagaaggatttcacaaagactgttagtgaaaagtgaacagacttcaaggaaaatgatagcaaaacctgtaaaagcattctgggaactgacagtaaacactgaatggtccttaaggagactgaaaacttgaaagagcttaagaagtctactggaaagggctttaaggataatgagaaaaaatcatcagtggaggctgaggaaaacgcaccaaagtcrtattctgatgggagagttagaaaacgcttgcctggaatgatataaaatataggaaaaataccgaaaaagtttgtggatctggctggggagatttttggtgtcaactaaagaaaaaaattaagcttttaagaaattaaagttagatttatttaggggtctgagaacaagagactgaggattacagcctaggagaagtctttcagagaggttctgtcagactgctctggtgaaggtctttagcccacagtttatatgcaggctgtacatatacaccatggaatactatgccgccattaaaaaatgatatcatgtcttttgctggaatgtggatggaccttctattatacttagcaaactaatgcaggaacagaaaac

SEQ ID NO: 558444 - DNA, 658 bp, Homo sapiens
tcactctaatataatataaacttaaactatgtggcattggctttggaatcagacaatggatagaagccagaaggatttcacaaagactgttagtgaaaagtgaacagacttcaaggaaaatgatagcaaaacctgtaaaagcattctgggaactgacagtaaacactgaatggtccttaaggagactgaaaacttgaaagagcttaagaagtctactggaaagggctttaaggataatgagaaaaaatcatcagtggaggctgaggaaaacgcaccaaagtcgtattctgatgggagagttagaaaacgcttgcctggaatgatataaaawataggaaaaataccgaaaaagtttgtggatctggctggggagatttttggtgtcaactaaagaaaaaaattaagcttttaagaaattaaagttagatttatttaggggtctgagaacaagagactgaggattacagcctaggagaagtctttcagagaggttctgtcagactgctctggtgaaggtctttagcccacagtttatatgcaggctgtacatatacaccatggaatactatgccgccattaaaaaatgatatcatgtcttttgctggaatgtggatggaccttctattatacttagcaaactaatgcaggaacagaaaac

SEQ ID NO: 558445 - DNA, 582 bp, Homo sapiens
gcttcacattgcacttagaataaagagaaattctttttatacaatataagttcctgcagaatgcagacactttctacttctccagcctcttttcgactcctctcctactrgcttctgtatttaagccacattagacctttcttcagttttttatatagactttgtcgcatcacacctcagagattctgtacatgttcttcctcctgcctagaaaggatcgtccctccactttcgccaactaatccctgctcaacttttcatctcagcaggaggcccattctctttggcaatcctctggcctccagcccatttattatatgctcacatgtcaacatgtacttcgtacagcatgtaacacaattgcacttttatattttaacaaattatatttcccatattgaactgtaagtctcctgaaagcaggaattttgttcttgctcatcatcaactttttcaacatccagtgcaccatttagaacttagatgtagtcaatagaggtttgtggaatgaaagaggaaaagaaagaattaatattcctttaaattaggatggcaaagatcatatatagaaaattggctaag

SEQ ID NO: 558446 - DNA, 582 bp, Homo sapiens
gcttcacattgcacttagaataaagagaaattctttttatacaatataagttcctgcagaatgcagacactttctacttctccagcctcttttcgactcctctcctactagcttctgtatttaagccacattagacctttcttcagttttttatatagactttgtcgcatcacacctcagagattctgtacatgttcttcctcctgcctagaaaggatcgtccctccactttcgccaactaatccctgctcaacttttcatctcagcaggaggcccattctstttggcaatcctctggcctccagcccatttattatatgctcacatgtcaacatgtacttcgtacagcatgtaacacaattgcacttttatattttaacaaattatatttcccatattgaactgtaagtctcctgaaagcaggaattttgttcttgctcatcatcaactttttcaacatccagtgcaccatttagaacttagatgtagtcaatagaggtttgtggaatgaaagaggaaaagaaagaattaatattcctttaaattaggatggcaaagatcatatatagaaaattggctaag

SEQ ID NO: 558447 - DNA, 582 bp, Homo sapiens
gcttcacattgcacttagaataaagagaaattctttttatacaatataagttcctgcagaatgcagacactttctacttctccagcctcttttcgactcctctcctactagcttctgtatttaagccacattagacctttcttcagttttttatatagactttgtcgcatcacacctcagagattctgtacatgttcttcctcctgcctagaaaggatcgtccctccactttcgccaactaatccctgctcaacttttcatctcagcaggaggcccattctctttggcaatcctctggcctccagcccatttattatatrctcacatgtcaacatgtacttcgtacagcatgtaacacaattgcacttttatattttaacaaattatatttcccatattgaactgtaagtctcctgaaagcaggaattttgttcttgctcatcatcaactttttcaacatccagtgcaccatttagaacttagatgtagtcaatagaggtttgtggaatgaaagaggaaaagaaagaattaatattcctttaaattaggatggcaaagatcatatatagaaaattggctaag

SEQ ID NO: 558448 - DNA, 582 bp, Homo sapiens
gcttcacattgcacttagaataaagagaaattctttttatacaatataagttcctgcagaatgcagacactttctacttctccagcctcttttcgactcctctcctactagcttctgtatttaagccacattagacctttcttcagttttttatatagactttgtcgcatcacacctcagagattctgtacatgttcttcctcctgcctagaaaggatcgtccctccactttcgccaactaatccctgctcaacttttcatctcagcaggaggcccattctctttggcaatcctctggcctccagcccatttattatatgctcacatgtcaacatgtacttcgtacagcatgtaacacaattgcacttttatattttaacaaattayatttcccatattgaactgtaagtctcctgaaagcaggaattttgttcttgctcatcatcaactttttcaacatccagtgcaccatttagaacttagatgtagtcaatagaggtttgtggaatgaaagaggaaaagaaagaattaatattcctttaaattaggatggcaaagatcatatatagaaaattggctaag

SEQ ID NO: 558449 - DNA, 547 bp, Homo sapiens
ttcacctcttttatcttcaaatcctaaaactatgaaaattcacaaacttagctccatacattatggtagaaaggttaataatttggactttgagtttgaccaggcctgatttttgaataaattcacaaacttacctccatacattatggtagaaaggtcaataatctggactttgaggtcgaccaggcctgatttttggatccaggctgcaacactcacttgctgtgttaacgtaacaaagttcctagaccatgctgagcttcagtttacttgttattgaattagggatatagcgttcraaggaagaagttctagtatttgattgcacagcagagaaattatagttattgaactggggatatgtagatagacataataaattttagtattcaattatacaatggagaaatcatagggaacaataatttattatatattctaaaatagctagcagagaaaaattataatgttcccaacacaaagaaaagataaatattcgaggtgatgaatatccaaattactctgatttgatcattacacattgtat

SEQ ID NO: 558450 - DNA, 623 bp, Homo sapiens
ttctcctgcctgagcctcctgagtagctgggactacaggcgcccgccactatgccctgctaattttttgtatttttagtacagacggggtttcaccgtgttagccaggatggtctcsatctcctgacctcgtgatccacccgcctcggcctcccaaagtgctggaattacaggtgtgagtcaccacgcccagccagggtacacttttaagcagagacactactttgaaggtcataaaaaatataataagagataaggctaatttcctttaataataataaaatcctttaataaaaatataaaggaataatataataattttctttaataaaatataataagagataaggctaatttcctttaataaaatatagtaactacataccaacagaattccaaaaaaagaaatggagaggaagggagcatgggtcattaatcttgtcaaaaatataaaattatatacgaggaattcctagaaactgttttccttgtctgcggccattgtgctgctgctacacaactaccgcaagcagcccttcacgccctcctcccagtacaaagctaattgacttgtgagaaatgttaagcttggaagagtcagcatcgctgcacttattttttatt

SEQ ID NO: 558451 - DNA, 623 bp, Homo sapiens
ttctcctgcctgagcctcctgagtagctgggactacaggcgcccgccactatgccctgctaattttttgtatttttagtacagacggggtttcaccgtgttagccaggatggtctccatctcctgacctcgtgatccacccgcctcggcctcccaaagtgctggaattacaggtgtgagycaccacgcccagccagggtacacttttaagcagagacactactttgaaggtcataaaaaatataataagagataaggctaatttcctttaataataataaaatcctttaataaaaatataaaggaataatataataattttctttaataaaatataataagagataaggctaatttcctttaataaaatatagtaactacataccaacagaattccaaaaaaagaaatggagaggaagggagcatgggtcattaatcttgtcaaaaatataaaattatatacgaggaattcctagaaactgttttccttgtctgcggccattgtgctgctgctacacaactaccgcaagcagcccttcacgccctcctcccagtacaaagctaattgacttgtgagaaatgttaagcttggaagagtcagcatcgctgcacttattttttatt

SEQ ID NO: 558452 - DNA, 623 bp, Homo sapiens
ttctcctgcctgagcctcctgagtagctgggactacaggcgcccgccactatgccctgctaattttttgtatttttagtacagacggggtttcaccgtgttagccaggatggtctccatctcctgacctcgtgatccacccgcctcggcctcccaaagtgctggaattacaggtgtgagtcaccacgcccrgccagggtacacttttaagcagagacactactttgaaggtcataaaaaatataataagagataaggctaatttcctttaataataataaaatcctttaataaaaatataaaggaataatataataattttctttaataaaatataataagagataaggctaatttcctttaataaaatatagtaactacataccaacagaattccaaaaaaagaaatggagaggaagggagcatgggtcattaatcttgtcaaaaatataaaattatatacgaggaattcctagaaactgttttccttgtctgcggccattgtgctgctgctacacaactaccgcaagcagcccttcacgccctcctcccagtacaaagctaattgacttgtgagaaatgttaagcttggaagagtcagcatcgctgcacttattttttatt

SEQ ID NO: 558453 - DNA, 606 bp, Homo sapiens
actgaagccagtttctctggttagaatagttgcccaaacccatgcctaatactctagtaaacaaggttctacctgggcttaggttaacttttgctcctttgggccctgtgttctaccagcattccatttatctgaaactctccctcaccttaagaacttatctgttctttaatgatttactgctgcttcctgggctcgaaagaacccagttcaggagtttctgttttagtttgagatcttataggcctgtctcatcaggttggtgtcagcccagctaggattaggcagaattgggtgggggctgtagtgcatttttggcacagcatgtacctgtctgactaattctctgtcttttctttcctgttgcaattcatgggtcttagcatcttctgaatggtgtttagtaggtcatcctgttgatttcctgctagggagtagcatactctggcyctgtaccattggccaagggacttaaggatagatgaagggctgcagttttgttaaatggaacaatatgaagagatggcattgttaaaaaaaaaaaaaaaggcttggcagcagggcccatttgaatggttggtccttggctcctttgttgatataggc

SEQ ID NO: 558454 - DNA, 521 bp, Homo sapiens
ttgctatgttgtccaggctggtcttgagctcctggcctcaagcaatcctctcaccttggccccccacagtgcaaggattacaggtatgagccaccatgcctggcccctaccctgcctactgagaaccaaaggaaggatccaaattctccttagctcaactcgagccatttcctgattgcttcatcagygaggagctggttattgggctgtccaggcctcccaagcagcacagaaatgaggtgaaggagttttcctgttgctccactctgtaaggagttggagggtgatgtttactcatttgcagagagagatgccttgtaggcacctcagcatggagagggccctgattccaatgtcctttttttcttcagaaacaggaccttgccctgtcactcaggatggagttcagtggtcctatcatggctcattatagcctcaaactcccaggctcaagcaatcctaccatgtcagccttcccagtagctggaactacaggtaagcatcgtgacactcagtgaatt

SEQ ID NO: 558455 - DNA, 577 bp, Homo sapiens
gaggattgcttgaggccaagagttggaggaggcagtatggcagtatggtgagaccctgtctccattattttaaaaaattgacaggctttaccckggaaggcttatacacaatttaaccacccctcatagtataagaaagtgcccatttcactgcacctttgccagcacagggtattataatttagtaagccattttttgtttgattattttaaatagacaaaagacctcatattactttacttgtcacatttcaacatctttcctcagcttattagctctatttcttttctgtctgtaaatggttgttgtggttttgttctttgagacagggtcttgctctgtcatccggctggactgtagtggcataatcatgcctcactgcagccttgacctcccaggctcaaacttcagcattccgagtagctgggactacaagtgtgcaccaccacccccagctaacttttttcttcttttggatagagacagggtctcactgtgtcgtccagagcggtctctagctcctggccttaagcaatcctcctgcattagcttctgtaatggctggaatttcaggca

SEQ ID NO: 558456 - DNA, 577 bp, Homo sapiens
gaggattgcttgaggccaagagttggaggaggcagtatggcagtatggtgagaccctgtctccattattttaaaaaattgacaggctttaccctggaaggcttatacacaatttaaccacccctcatagtataagaaagtgcccatttcactgcacctttgccagcacagggtattataatttmgtaagccattttttgtttgattattttaaatagacaaaagacctcatattactttacttgtcacatttcaacatctttcctcagcttattagctctatttcttttctgtctgtaaatggttgttgtggttttgttctttgagacagggtcttgctctgtcatccggctggactgtagtggcataatcatgcctcactgcagccttgacctcccaggctcaaacttcagcattccgagtagctgggactacaagtgtgcaccaccacccccagctaacttttttcttcttttggatagagacagggtctcactgtgtcgtccagagcggtctctagctcctggccttaagcaatcctcctgcattagcttctgtaatggctggaatttcaggca

SEQ ID NO: 558457 - DNA, 577 bp, Homo sapiens
gaggattgcttgaggccaagagttggaggaggcagtatggcagtatggtgagaccctgtctccattattttaaaaaattgacaggctttaccctggaaggcttatacacaatttaaccacccctcatagtataagaaagtgcccatttcactgcacctttgccagcacagggtattataatttartaagccattttttgtttgattattttaaatagacaaaagacctcatattactttacttgtcacatttcaacatctttcctcagcttattagctctatttcttttctgtctgtaaatggttgttgtggttttgttctttgagacagggtcttgctctgtcatccggctggactgtagtggcataatcatgcctcactgcagccttgacctcccaggctcaaacttcagcattccgagtagctgggactacaagtgtgcaccaccacccccagctaacttttttcttcttttggatagagacagggtctcactgtgtcgtccagagcggtctctagctcctggccttaagcaatcctcctgcattagcttctgtaatggctggaatttcaggca

SEQ ID NO: 558458 - DNA, 577 bp, Homo sapiens
gaggattgcttgaggccaagagttggaggaggcagtatggcagtatggtgagaccctgtctccattattttaaaaaattgacaggctttaccctggaaggcttatacacaatttaaccacccctcatagtataagaaagtgcccatttcactgcacctttgccagcacagggtattataatttagtaagccattttttgtttgattattttaaatagacaaaagacctcatattactttacttgtcacatttcaacatctttcctcagcttattagctctatttcttttctgtctgtaaatggttgttgtggttttgttctttgagacagggtcttgctctgtcatccggctggactgtagtggcataatcatgcctcactgcagccttgacctcccaggctcaaacttcagcattccgagtagctgggactacaagtgtgcaccaccacccccagctaacttttttcttcttttggatagagacagggtctcactgtgtcgtccagagcggtctctagctcctggccttaagcaatcctcctgcatkagcttctgtaatggctggaatttcaggca

SEQ ID NO: 558459 - DNA, 365 bp, Homo sapiens
gaaagctgcctctgaagcactgcagactcagctgagcaccgatacaaagaaagacaaacatcgtaagaagcaatagtttctcttactattctgagagccttatcattctacatcccatcttcctgtgagtttgtctttgtagcatttaactctaattgcagttctcwttttaaaaactggcttgcttattgtatattttccccaactaaagcgtgaactcctagcagggcgtggtggctcatgcctgtaatctcagcactgtgggaggccgaggtgggtcgactacctgaggttaggagttcgagaccagcctgaccaacatgatgaaacgctgtctctactaaaaatacaaaaattagctaggc

SEQ ID NO: 558460 - DNA, 365 bp, Homo sapiens
gaaagctgcctctgaagcactgcagactcagctgagcaccgatacaaagaaagacaaacatcgtaagaagcaatagtttctcttactattctgagagccttatcattctacatcccatcttcctgtgagtttgtctttgtagcatttaactctaattgcagttctcattttaaaaaytggcttgcttattgtatattttccccaactaaagcgtgaactcctagcagggcgtggtggctcatgcctgtaatctcagcactgtgggaggccgaggtgggtcgactacctgaggttaggagttcgagaccagcctgaccaacatgatgaaacgctgtctctactaaaaatacaaaaattagctaggc

SEQ ID NO: 558461 - DNA, 365 bp, Homo sapiens
gaaagctgcctctgaagcactgcagactcagctgagcaccgatacaaagaaagacaaacatcgtaagaagcaatagtttctcttactattctgagagccttatcattctacatcccatcttcctgtgagtttgtctttgtagcatttaactctaattgcagttctcattttaaaaactggcttgcttattgtatattttccccaactaaagcgtgaactcctagcagggcgtgrtggctcatgcctgtaatctcagcactgtgggaggccgaggtgggtcgactacctgaggttaggagttcgagaccagcctgaccaacatgatgaaacgctgtctctactaaaaatacaaaaattagctaggc

SEQ ID NO: 558462 - DNA, 631 bp, Homo sapiens
tagatagttattttatgaagaattttcatatgccacaatcctgaccatatcttcaagtgaacagaaaaattctattaaaaagtcaaccttctgtctcactctgttgcccagactggagtgcagtggtgcaattatggctcactgcagcctcaacctcctgggctcaagcaatcctcctgcctcagcctcacaagtagctgggactacaggtgcttgtcaccacacctcactaattttcccatttgtgttatatgtggattccacaggactgacttcgaaaacttgagtatrcgtggattttggtatacacagaaatgggagagctggaactaatccccccatataccaagggacaaattgtatctgtttctacaattatacagtaggagacattatgttccatgacaatggtaatttttaacgacagtttttaattgagtgaaattaccataaaaataataatagtagcagctaatatttactgagctgttactaggtgcctataaatagcatagatttttaaattctccataattcttccttatttcacttaaccaccctatcttaaattactcatgcttgcctcagtagcacacatacttaagttggaacaatagagagattggcacgg

SEQ ID NO: 558463 - DNA, 536 bp, Homo sapiens
ttatgtttgtttatgtatttacctttaccagagagctttgtatattcatacagcttgcttatttacttacatagttattgcctagagttcatttatttcaacctgaaggacttaacacttcctgaatgkcaaattcagggataaatggatttttttcagttttaaaaaaaaatccggaaatgtcttaatttctccttcatttttgaaggataagttttccagctatatatttctcaattgacaggtttcttcattattttaaatatataatccactgcctactggccttcaaggtttctgccgagaaatcagctgctaatgttatctggatccctatctgtgagagttgctcttctctctgagttttcaacattctcccattatcttttttttgtttgtttttgagacaaataattgtacatattcatgggatacagagtgatattttgatacatgtatacaatgcccaatgatcaaataaggataattagcatatccatcacctcaaatatttgtcatttatttgtattgtgaac

SEQ ID NO: 558464 - DNA, 631 bp, Homo sapiens
tagatagttattttatgaagaattttcatatgccacaatcctgaccatatcttcaagtgaacagaaaaattctattaaaaagtcaaccttctgtctcactctgttgcccagactggagtgcagtggtgcaattatggctcactgcagcctcaacctcctgggctcaagcaatcctcctgcctcagcctcacaagtagctgggactacaggtgcttgtcaccacacctcactaattttcccatttgtgttatatgtggattccacaggactgacttcgaaaacttgagtatgcgtggattttggtatacacagaaatgggagagctggaactaatccccccatataccaagggacaaattgtatctgtttctacaattatacagtaggagacattatgttccatgacaatggtaatttttaacgacagtttttaattgagtgaaattaccataaaaataataatagtagcagctaatatttactgagctgttactaggtgcctataaatagcatagatttttaaattctccataattcttccttatttcacttaaccacyctatcttaaattactcatgcttgcctcagtagcacacatacttaagttggaacaatagagagattggcacgg

SEQ ID NO: 558465 - DNA, 593 bp, Homo sapiens
ctcaacgtccagggctcaagtgattctcctgcttcagcctctcaagtagctggaattacagggttcccaccaccacatttggctaatttcttttattttttgtatagatggggtcttcttatgttgcccaggttggtctcaaattcctaggctcaagtgattcygcccacctctgcctcccaaagtgctgggattacgggcatgagccagtgcatctggccaccttattttctattactggctcaatgtaatggctccatctcaggaacagccaatgaaagagatgcacaggacaaggtaagtggggaggggcacagagcttccatgccctctgttgggcacactaccctcccaggacctccttgtgtttagcaacacagaagctctccaaaccctgctgtttgggtgtttatggaggcatgattgataaaatcactggccattggtagttaagtcaatctccagttccttttgcctcctggagttcagcaggtgaggctgaaagttccaagcctcaaaaaatgtggttggggccaggtgcggtggctcactcctgtaatcctagcagtttggaaggctgaggcacatggacc

SEQ ID NO: 558466 - DNA, 282 bp, Homo sapiens
gtggttggggccaggtgcggtggctcactcctgtaatcctagcagtttggaaggctgaggcacatggaccacttgaggtcaagagtttgagactagcctgaccaacatggtgaaaccccrtttctactaaaaataacaacagttagctaggcgttgtggcacatccctataattccagctactcgggaggccgaggcaggagaattgcttgaacccgggaggtggaggttgtagtgagctgagattgtgccattgcactccagcctgggctacaagagccaa

SEQ ID NO: 558467 - DNA, 282 bp, Homo sapiens
gtggttggggccaggtgcggtggctcactcctgtaatcctagcagtttggaaggctgaggcacatggaccacttgaggtcaagagtttgagactagcctgaccaacatggtgaaaccccatttctactaaaaataacaacagttagctaggcgttgtggcacatccctataattccagctactcgggaggcygaggcaggagaattgcttgaacccgggaggtggaggttgtagtgagctgagattgtgccattgcactccagcctgggctacaagagccaa

SEQ ID NO: 558468 - DNA, 480 bp, Homo sapiens
tttaacctgcttaatcaaaagaaagatttaactttgtgatttgaatccagacatcagaaagcagtttcacagatagcttctgtctatcttttatctgaggatacttggttttttatcataggtctctaagggctccaaaatgtacctggaaaggttctgccataggagtgtttccaatttactgaatcaagagaaatgtttaattctgtgaaatgaatccacacatcacagggcagtttgacaggttgcttctttctactttttatcaagaaatatttgctttttcaccataaacctcaatgggcttcgaaatgtcccttcctaccaaaagagggtttcacacctgctgaatcaaaacagacgtttatttctgtgaggtgaatccacacatcacacagcagttacacagacascttctctctagtttttatctgaggatactctgttttttagcataggcctctaaggtctcccaaatgt

SEQ ID NO: 558469 - DNA, 503 bp, Homo sapiens
gatcaaaaatgtccctttacagattctagaaaaagagtgcttctaacccagtgaatcaaaaacaagtttaaccctttgagatgaatccacatatcactaagctgtttcacagagagcttctttctagtttttatctggggatattctgtttttcaccataggcctttggggttcccaaacttcccttcacagattctaccaaaagagtgtttccaacatgcttaacaaaagaaaaggtttaactctgtgagatgaattgacacatcacaaaagagtttgacagatagcttctttctagattttatctggggacattctgtttttcactgtagrcctctatgtgttcccaaatgtcccttcacagattctacctaaagagtgtttcaaacatggtttatcaaaagaaaaacttaactctgtgagataaatccacacatcacaaagctgttttacagatagcttttttccagtttttatctcgggatattttgtttttcaccaaa

SEQ ID NO: 558470 - DNA, 598 bp, Homo sapiens
gaagtgtctgtgaaactgttgtgtaatgtgtggattcactcacagaattaatgttgttttgattcagtggatgtgaaaccctttttcggtaggatatgcgaagggacatttggaagcccattgaggtttatggtgagaaaccaaatatttgtagaaaaaaactagaaagaagctgyctgtgaaactgccttgtgatgtgtggattcgtttcacagaattaaaaatttctctggattctgaaaattggaaacactgttatggtagaatctttcaaggaatattttggagcccttagaggcctatggtaaaaaaaaaaaaaaaaaaaaaaaagtataaaaactagaaagaagctatctgtgaaactgcttaatgatatctggatttaaatcagaaaggtaaacctttcttttgattcagcagtttgcaagcactcattttatagaatctgtgaaggtacatttgagaacaatttcagaaatgttgtgaaaaacaaaatacccccagatacaaatcagaaagaagctatttgggaaactgctttttggatgtgtggattcatctcacagagataaaactttcctttgattcagcaggttga

SEQ ID NO: 558471 - DNA, 447 bp, Homo sapiens
ttgaattgtcacatggtagaatgtgagatacaagttatcaagtgttttaaaaatgttgttctcaggttgattatttgaaaatgaactggaatgggggtgtacactytgaagaggcaccaaattaaattccctgttaactctagtccctctcttcaaataaattttttgcttgcttacaaacagatccatttaaagactgtgaagcaatatcacaatttatctcacattgctatgtgtatctacagctcataagagttcatatattttttcttttctgttttttttttttttttttttttttttgagatggaatctcgctctgttgcccaggctggaatgcagtggcatatcagctcaccgcaacctccacctcccaggttctagtgattctcatgcctcaacctccagagtagctgggattacaggtgtgcaccaccatgcccagct

SEQ ID NO: 558472 - DNA, 328 bp, Homo sapiens
taaaataaatccgtctgtaccttatcgggctgttggcagcatcagggtctttggcatgcactctcccaaccacggtgccagcagctgcattttcttggacttcgtggatgtaacttggggccaagaacatagggggctcatcagcatcttctactgmgatcttgacggtcacagtgtccttgaaagggccattgctgataaacttcgggtcgatgtgcacgttggctgcctctaccttcaagctataggctcttttggtttcaaaatctacaggctggcaagaatgaagagaagattgacaaccaattccttgaaagaataatggaag

SEQ ID NO: 558473 - DNA, 550 bp, Homo sapiens
aaaaaaaaaaaaaaatttagctgggcatggtggtrtgcccctgtggttccagctactagggaggctgagatgggaggatcacttgaacccgggaggtcgaggctgcagtgagctgagattgcaccactgcactccagcctggatgacagagtgagacactatctcaaaaaaacctgtcaattcacccatccagccatccacccattcgtccatcaatccttggataaatatatagagataggcagttttttattatctcataatcttttcaaattctgaaaatgttgaaaaagaaactttaggttaataatggtacattcctatgatgtaatattattcaggctttacaatgacaatgatgttctatctgtatttattaatagatctttggaatttagtagcaggtaaataagtggttgttttccatttaccaccttttctcaataaaatgttctttttctttttattttattagtcatgcttttatttatgttatataaataagacatatttatttcaaattctaaaacatattgaaaagcatttaaaa

SEQ ID NO: 558474 - DNA, 574 bp, Homo sapiens
ggggtcaatttctatctctttaagtttttttattttctttaaacttttctttatagatggccagtgtattagtctgttgtcatgctgctaataaagacatacctgagactgggtaatttatagagaaaaagaggcttaatgaactcayagtggctgggagacctcacaatcatggtggaaggcgaggaggagcaaagccaggtctcacatggcgggaggcaaggagagaatgacagccaagtgaaaggggattccccttataaaaccatcagatcttatgagacttatcactaccatgagaacagtacaagggaaaaccacccccatgattcaattatctcccaccaggcccctcctgcaacacatgggaattatgggagctacaattcaagatgagatttgggtggggacacagccaaaccatatcagccaattctggctttcctgacccaggatttaatacttatgtttatacaaattatatataaataatctcttcacatgataatattcatgaatacagaatgaatctataaggcaaatgtgatgaagtactaaatctacatatgtaaaa

SEQ ID NO: 558475 - DNA, 574 bp, Homo sapiens
ggggtcaatttctatctctttaagtttttttattttctttaaacttttctttatagatggccagtgtattagtctgttgtcatgctgctaataaagacatacctgagactgggtaatttatagagaaaaagaggcttaatgaactcatagtggctgggagacctcacaatcatggtggaaggcgaggaggagcaaagccaggtctcacatggcgggaggcaaggagagaatgacagccaagtgaaaggggattccccttataaaaccatcagatcttatgagacttatcactaccatgagaacagtacaagggaaaaccacccccatgattcaattatctcccaccaggcccctcctgcaacacatgggaattatgggagctacaattcaagatgagatttgggtggggacacagccaaaccatatcagccaattctggctttcctgacccaggatttaatacttatgtttatacaaattatatataaataatctcttcacatgataatatwcatgaatacagaatgaatctataaggcaaatgtgatgaagtactaaatctacatatgtaaaa

SEQ ID NO: 558476 - DNA, 577 bp, Homo sapiens
gtaggctaggataatgtctgcaggaacacatagtcagaacttctatctgctcaacattcctgttttatcctccgtgttctctatgccttttctttaagaaagccattctgttggcagaattttggctgccccttctacctcactctgtgtgacctaggcatgtcaaacactaatatgccaatctctgctcattgggattagagattgccatgtacatcaaggcarcccaaccttctcttggactttgttagaaccatcaaggaagaggtgctcttttttttttttttcatagcattatgagcttgaagaataatggaaacctggagcagctgaaggctgtgatcattggttttatgtgtcaactgggctaagccatgaaatccagatatttgatcaagattattctaaatgtttctgagaagatattctttagatgaggctaacatttaattttttcacatgaaacaatctttctgataaatcaatagacaatcctatttataatagcgtcaaaaagaatgaaatacttaggaataaatttaaggaggtgaaagatgtatacattgaaaactgtaaa

SEQ ID NO: 558477 - DNA, 577 bp, Homo sapiens
gtaggctaggataatgtctgcaggaacacatagtcagaacttctatctgctcaacattcctgttttatcctccgtgttctctatgccttttctttaagaaagccattctgttggcagaattttggctgccccttctacctcactctgtgtgacctaggcatgtcaaacactaatatgccaatctctgctcattgggattagagattgccatgtacatcaaggcaacccaaccttctcttggactttgttagaaccatcaaggaagaggtgctcttttttttttttttcatagcattatgagcttgaagaataatggaaacctggagcagytgaaggctgtgatcattggttttatgtgtcaactgggctaagccatgaaatccagatatttgatcaagattattctaaatgtttctgagaagatattctttagatgaggctaacatttaattttttcacatgaaacaatctttctgataaatcaatagacaatcctatttataatagcgtcaaaaagaatgaaatacttaggaataaatttaaggaggtgaaagatgtatacattgaaaactgtaaa

SEQ ID NO: 558478 - DNA, 577 bp, Homo sapiens
gtaggctaggataatgtctgcaggaacacatagtcagaacttctatctgctcaacattcctgttttatcctccgtgttctctatgccttttctttaagaaagccattctgttggcagaattttggctgccccttctacctcactctgtgtgacctaggcatgtcaaacactaatatgccaatctctgctcattgggattagagattgccatgtacatcaaggcaacccaaccttctcttggactttgttagaaccatcaaggaagaggtgctcttttttttttttttcatagcattatgagcttgaagaataatggaaacctggagcagctgaaggctgtgatsattggttttatgtgtcaactgggctaagccatgaaatccagatatttgatcaagattattctaaatgtttctgagaagatattctttagatgaggctaacatttaattttttcacatgaaacaatctttctgataaatcaatagacaatcctatttataatagcgtcaaaaagaatgaaatacttaggaataaatttaaggaggtgaaagatgtatacattgaaaactgtaaa

SEQ ID NO: 558479 - DNA, 586 bp, Homo sapiens
agcagagagatggaaattctaagaaagaaccaaaagaaacactagagataaaaaacatcaacagaaatagagaatgccttcaaagggctccttagtagactggacacagctgaggaaagaatctctgagcttgagaatagatcagcaaaaacctctaaaactataaagcaaagagacaaaagactgaaaaaataataccccagaatatccaagaactgtgaaactataaaaggtgtaatatatatgtgatgataataccagaaacagaagagagaaagaaacagaagaactatttgaaacagttatgacagaatttctccaaattaatgtcagataccaaaccacagatgcagaaagctcagagaacatcaagctgtatcaatgccaaaaaggaagtccctacacctagtcatatcatattcaaactacagaaaaatcaaagatttttwaaaaatgctgaaagaggtcaggagaaaaaaacccaccttacccgtagaggaataaagataagaattacatccaccttctcagaaatcatgccagcaaaaagagaataaagtgaaataattaaagtattgagagaaaa

SEQ ID NO: 558480 - DNA, 359 bp, Homo sapiens
gaattctcagtctctagcgaggtgattaactatataaataatgaagtaaaaggacaggagaagcgtggaggctcacacctataatcccagccctttgggaggctgaggcagaaggactgcttgagccccagagttccagaccagcctgggcaagcacagcaagaccctgtctctaccaaaattttttttttttttttgagacagagtccagctctgtcgygcaggctggagtgcagtggcatgatctcagctcactgcaacttccacctcccaggttcaagcaattctgctgtttcagcctctggagtagctgggattacaagtgcacacctccatgcccggctaatttttgtgttttt

SEQ ID NO: 558481 - DNA, 539 bp, Homo sapiens
ggatacatatgtaactaacctgcacattgtacacatgtaccctaaaacttaaagtataataattaaaaaaaaaaaaagaaaacagaattgtccacaattttaggaaagccatcgcatgacaacaaaccackacaatgataggagcatcactgagtcaatggagttcaagcagtgagcagatcagtattgaggccccaggaaaatcaaggctcttgggtacattttgcagaacccagaattgagccacataatctatggccaagtgatctttgacaaagttaacaaaaattaaccaacgtatacaccagggaaaggtcacctcattcaataaagggcgctggggaaattggatagctatatgcacatgaattaaactggacacccaccctcaacatgtaaataattaacagaaaatagattaaaggtttaaatgtaagacctcaaactgtaaacgtattcaaataaaacaccaggacaactcttctggacactggcctaggtaaataatttacgactaagaactcaaaagcacaagccaa

SEQ ID NO: 558482 - DNA, 539 bp, Homo sapiens
ggatacatatgtaactaacctgcacattgtacacatgtaccctaaaacttaaagtataataattaaaaaaaaaaaaagaaaacagaattgtccacaattttaggaaagccatcgcatgacaacaaaccacgacaatgataggagcatcactgagtcaayggagttcaagcagtgagcagatcagtattgaggccccaggaaaatcaaggctcttgggtacattttgcagaacccagaattgagccacataatctatggccaagtgatctttgacaaagttaacaaaaattaaccaacgtatacaccagggaaaggtcacctcattcaataaagggcgctggggaaattggatagctatatgcacatgaattaaactggacacccaccctcaacatgtaaataattaacagaaaatagattaaaggtttaaatgtaagacctcaaactgtaaacgtattcaaataaaacaccaggacaactcttctggacactggcctaggtaaataatttacgactaagaactcaaaagcacaagccaa

SEQ ID NO: 558483 - DNA, 539 bp, Homo sapiens
ggatacatatgtaactaacctgcacattgtacacatgtaccctaaaacttaaagtataataattaaaaaaaaaaaaagaaaacagaattgtccacaattttaggaaagccatcgcatgacaacaaaccacgacaatgataggagcatcactgagtcaatggagttcaagcagtgagcagatcagtattgaggccccaggaaaatcaaggctcttgggtacattttgcagaacccagaattgagccacataatctatggccaagtgatctttgacaaagttaacaaaaattaaccaacgtatacaccagggaaaggwcacctcattcaataaagggcgctggggaaattggatagctatatgcacatgaattaaactggacacccaccctcaacatgtaaataattaacagaaaatagattaaaggtttaaatgtaagacctcaaactgtaaacgtattcaaataaaacaccaggacaactcttctggacactggcctaggtaaataatttacgactaagaactcaaaagcacaagccaa

SEQ ID NO: 558484 - DNA, 539 bp, Homo sapiens
ggatacatatgtaactaacctgcacattgtacacatgtaccctaaaacttaaagtataataattaaaaaaaaaaaaagaaaacagaattgtccacaattttaggaaagccatcgcatgacaacaaaccacgacaatgataggagcatcactgagtcaatggagttcaagcagtgagcagatcagtattgaggccccaggaaaatcaaggctcttgggtacattttgcagaacccagaattgagccacataatctatggccaagtgatctttgacaaagttaacaaaaattaaccaacgtatacaccagggaaaggtcacctcattcaataaagggygctggggaaattggatagctatatgcacatgaattaaactggacacccaccctcaacatgtaaataattaacagaaaatagattaaaggtttaaatgtaagacctcaaactgtaaacgtattcaaataaaacaccaggacaactcttctggacactggcctaggtaaataatttacgactaagaactcaaaagcacaagccaa

SEQ ID NO: 558485 - DNA, 563 bp, Homo sapiens
gaaggtaatttgtatgattttagtctgtttaaatttgagactttgtggcctaacatatggtctggtcagtctaagagagtgttctgtggtatacttgagaataatgtttattctgctctttttggtgaaatgttctgtatatgtctattagatctgattggtttatggtggtgttctttggctaaaactgagatgctgcagggcccgttgtcaaagtcacagtgaaaaagcaaggttttcccaagctcttttaatcacatcagtcttagagttcamattaatccattcaaaaatacgtatcaggccaggctgtaatcctagcactttgggaggctgaggcgggtggattgcttgagctcaggagtttgagaccaacttgggcaacatagcaaaaccctgtctctataaaaaatatgaaaattagcttggcatagtggtgtgtgcctgtggtcccagctacctgggaggctgaggtgggaggattgcttgagccagggaggcagaggttgcagtgagcggagatcaagccactgcactccagcctgggcgacagagtgaaatcc

SEQ ID NO: 558486 - DNA, 563 bp, Homo sapiens
gaaggtaatttgtatgattttagtctgtttaaatttgagactttgtggcctaacatatggtctggtcagtctaagagagtgttctgtggtatacttgagaataatgtttattctgctctttttggtgaaatgttctgtatatgtctattagatctgattggtttatggtggtgttctttggctaaaactgagatgctgcagggcccgttgtcaaagtcacagtgaaaaagcaaggttttcccaagctcttttaatcacatcagtcttagagttcaaattaatccattcaaaaatacgtatcaggccaggctgtaatcctagcactttgggaggctgaggcgggtggattgcttgagctcaggagtttgagaccaacttgggcaacatagcraaaccctgtctctataaaaaatatgaaaattagcttggcatagtggtgtgtgcctgtggtcccagctacctgggaggctgaggtgggaggattgcttgagccagggaggcagaggttgcagtgagcggagatcaagccactgcactccagcctgggcgacagagtgaaatcc

SEQ ID NO: 558487 - DNA, 408 bp, Homo sapiens
gtctttactggatcattaaaatagtaagataaattgaactttttacattgttttcttttcctccagttagggcttgaggtttgtctctggagagtgactgtcaattggagccctgcctttctggggttctggtcagggggttgtggatgcttaacatgtgcctttcacaggacacttccttaccccagcagtggccaggtgtgcatcccacgrccaggcctccctctcacagaacatctgttgagactaggagatgcctagtgactgttgcctgacttgtgtcctgtgtatttctgacaagaggcactctcagagaccctggccaggaggagagttaggttccagtgtaggtcagctcagacacatggaggccacagaaccaaacatgggaaatcacagaagtaggtt

SEQ ID NO: 558488 - DNA, 521 bp, Homo sapiens
cactataatccacacctgataatagtgtaacagtgtatagccagtcactrataaatgttatttccataagccaatgggaatttgtgacaaatctctttgcatcatcccacttctggacccctttttgcctttaagaaactgcttgttgcaaagctccaaagggagttcatatccaaggatacttgggtctgtttcttccaggcagctgtcctcattgtggctcaagtaaactctttgaattacgttttgtgcttcagccccttccacttagattaacaacatggatttgtgtcaccatgtacagcaattaaaatgtttacacttttcccctcgagggcactgatgtgttttcctgagcacttggaatagctacgtagtgtttcctgtctagattatggtttctgaaccttggtgctacttacctttaggaccggaggattctttgttgtgggaggctgccttagcaatgctaggtgtttcatttgacctctaaatttcacacctccaccagtcttgacatc

SEQ ID NO: 558489 - DNA, 521 bp, Homo sapiens
cactataatccacacctgataatagtgtaacagtgtatagccagtcactgataaatgttatttccataagccaatgggaatttgtgacaaayctctttgcatcatcccacttctggacccctttttgcctttaagaaactgcttgttgcaaagctccaaagggagttcatatccaaggatacttgggtctgtttcttccaggcagctgtcctcattgtggctcaagtaaactctttgaattacgttttgtgcttcagccccttccacttagattaacaacatggatttgtgtcaccatgtacagcaattaaaatgtttacacttttcccctcgagggcactgatgtgttttcctgagcacttggaatagctacgtagtgtttcctgtctagattatggtttctgaaccttggtgctacttacctttaggaccggaggattctttgttgtgggaggctgccttagcaatgctaggtgtttcatttgacctctaaatttcacacctccaccagtcttgacatc

SEQ ID NO: 558490 - DNA, 521 bp, Homo sapiens
cactataatccacacctgataatagtgtaacagtgtatagccagtcactgataaatgttatttccataagccaatgggaatttgtgacaaatctctttgcatcatcccacttctggacccytttttgcctttaagaaactgcttgttgcaaagctccaaagggagttcatatccaaggatacttgggtctgtttcttccaggcagctgtcctcattgtggctcaagtaaactctttgaattacgttttgtgcttcagccccttccacttagattaacaacatggatttgtgtcaccatgtacagcaattaaaatgtttacacttttcccctcgagggcactgatgtgttttcctgagcacttggaatagctacgtagtgtttcctgtctagattatggtttctgaaccttggtgctacttacctttaggaccggaggattctttgttgtgggaggctgccttagcaatgctaggtgtttcatttgacctctaaatttcacacctccaccagtcttgacatc

SEQ ID NO: 558491 - DNA, 521 bp, Homo sapiens
cactataatccacacctgataatagtgtaacagtgtatagccagtcactgataaatgttatttccataagccaatgggaatttgtgacaaatctctttgcatcatcccacttctggacccctttttgcctttaagaaactgcttgttgcaaagctccaaagggagttcatatccaaggatacttgggtctgtttcttccaggcagctgtcctcattgtggctcaagtaaactctttgaattacgttttgtgcttcagccccttccacttagattaacaacatggatttgtgtcwccatgtacagcaattaaaatgtttacacttttcccctcgagggcactgatgtgttttcctgagcacttggaatagctacgtagtgtttcctgtctagattatggtttctgaaccttggtgctacttacctttaggaccggaggattctttgttgtgggaggctgccttagcaatgctaggtgtttcatttgacctctaaatttcacacctccaccagtcttgacatc

SEQ ID NO: 558492 - DNA, 336 bp, Homo sapiens
tttcttgcttcctctagtccgcaggtagcatacaaatgtaataaactacttattcatgtcacatcaatttattttctgccttataccaagcttgtgggattctcttmaatacaagcattctttaatacttttacaccctatggcaatacccattagcatcgccttcctaaatcaggggaaattgagcctctgtaaggtggagtaactccctaagatataaaactcagcattgacagtcctgtattacttcaagtacttcctggccctcttctcatgtgtctttactgccttttatgtatgtgttagatgttcaacaaattctctttcttaaactga

SEQ ID NO: 558493 - DNA, 595 bp, Homo sapiens
gtacgtattggtactttctttctttttataactgtataacattcaatttcttggatataacattttgtttatccaataatatttttattgacatttgagttgtgttcagccttyggctattttaaatactgctgctaaaaatacttgtgtacaatttgtgtttgaacacctctttccaataatctgggtgtatacctaggaataaatttctgggtcatatgacaattctatgtttcatatatttagaagccatcaaattattttccaaggtggccagttctacccatagagtatctaactgtggttttgatttgtagttgcctgatgagtgatgctattgagtatatttttatgggattattgaccgttcgtgtatcttcttgggaaacacatctattcctatcatttatcagttttgagttgggatatttgtgacggagttaaaacaatttttctatattcaagatacatatatatatacagacatatagatacgtgtttttcaaatatcttctcacaatttttgagctgccttttgacttgcttgtttgtcctttgaaacaccaatgtctttaatttttaagaaattttaaat

SEQ ID NO: 558494 - DNA, 363 bp, Homo sapiens
ttcaaaatcacatttttgaacctygatgcttgaagtgtagcttgggtaacagatgggctttaagccaattttggcatgcaaggggttgagtttattaggcatcagcactgctgaaaatcgtggggatgcaggcttaatttcaacactattctaaatacttgaaagatattatataagtctttaataaactcctgtgtctacaaatggttcacattaactcaatatccatgattaaacatctacaaaatcaaggcactgttatttagtggagacttgctggctattctatgagaggaggtattgttattgtaatctcgtcatctcataaaattgtatcatattactcataaccagcccttcata

SEQ ID NO: 558495 - DNA, 188 bp, Homo sapiens
tctgttatctctttgctgatattcctactttttaatattttttctgattcctttatttctttgtttatgttttccttttgacatttgagtataatgaagagagttgttttaaagtctttgtctrgtaagtttgatgtctgggtttccttagggatattttctgtcaatttattttggtcctttgaatg

SEQ ID NO: 558496 - DNA, 188 bp, Homo sapiens
tctgttatctctttgctgatattcctactttttaatattttttctgattcctttatttctttgtttatgttttccttttgacatttgagtataatgaagagagttgttttaaagtctttgtctggtaagtttgatgtctgggtttccttagggatattttctgtcamtttattttggtcctttgaatg

SEQ ID NO: 558497 - DNA, 596 bp, Homo sapiens
aaacctgacaacaatgaaagacccaaactaacttcaaagtcatgactttatttttatagcaacgaggttgccaagaactgagtcaaaatgtgagggaaaacaagcacctgcaaggcgaaagaggacggatgcacttacataggacagacgcaaataggcaccaccatgacaagtaaagctggaataatcaataaattcctaaacacaaagtggggctggtgagattgggagacggctgacagctgcagaagttgggaaagatccatcatcttgaaaactttttccccacaaacccactgcgatctctcaagcaattggtaaggaatccaagagagtctgtatatgacacagatcagggagagcagaacacttgggaggtgaccaggtcttgggggycgagcccttatgaatgggattagtgcctttataaaagaagctcaatggagttgttgtgtgccttccactatgtgaggacatagaaagcaggcaccacctatgaaccatgaaatgggctctcatcaacactgaatttgtgagcatcttgacccgagatcttacagcctcaagaaatgtgaaaaaagaaatatctgttgttt

SEQ ID NO: 558498 - DNA, 596 bp, Homo sapiens
aaacctgacaacaatgaaagacccaaactaacttcaaagtcatgactttatttttatagcaacgaggttgccaagaactgagtcaaaatgtgagggaaaacaagcacctgcaaggcgaaagaggacggatgcacttacataggacagacgcaaataggcaccaccatgacaagtaaagctggaataatcaataaattcctaaacacaaagtggggctggtgagattgggagacggctgacagctgcagaagttgggaaagatccatcatcttgaaaactttttccccacaaacccactgcgatctctcaagcaattggtaaggaatccaagagagtctgtatatgacacagatcagggagagcagaacacttgggaggtgaccaggtcttgggggccgagcccwtatgaatgggattagtgcctttataaaagaagctcaatggagttgttgtgtgccttccactatgtgaggacatagaaagcaggcaccacctatgaaccatgaaatgggctctcatcaacactgaatttgtgagcatcttgacccgagatcttacagcctcaagaaatgtgaaaaaagaaatatctgttgttt

SEQ ID NO: 558499 - DNA, 469 bp, Homo sapiens
cttgggggccgagcccttatgaatgggattagtgcctttataaaagaagctcaatggagttgttgtgtgccttccactatgtgaggacatagaaagcaggcaccacctatgaaccatgaaatgggctctcatcaacactgaatttgtgagcatcttgaccygagatcttacagcctcaagaaatgtgaaaaaagaaatatctgttgttttttagtcacccggtttatgttattttgttataagagtcctaatagagcaagatattccacttaatatgtaggggaaggcaacaaaaactgccacacttaggatcctcctgatgctgggagtatgaaaacaggaaaaacaaaacaaaactgctcttgaaggtgaaggaggaatatcactgagctcaccaacacagccaggaaaagaacggaagtgtgagaaggctacattcctgagaccctgagaaaaagtacctgcataa

SEQ ID NO: 558500 - DNA, 582 bp, Homo sapiens
tgacccgagatcttacagcctcaagaaatgtgaaaaaagaaatatctgttgttttttagtcacccggtttatgttattttgttataagagtccwaatagagcaagatattccacttaatatgtaggggaaggcaacaaaaactgccacacttaggatcctcctgatgctgggagtatgaaaacaggaaaaacaaaacaaaactgctcttgaaggtgaaggaggaatatcactgagctcaccaacacagccaggaaaagaacggaagtgtgagaaggctacattcctgagaccctgagaaaaagtacctgcataagactgagatgaaattacctactctagttatgattgaaatcccaaaaagaaaagagggaaaaataatggagcaaaagaaatatttttcaaaataactgccaaaaatattctaaaagaagtgacagaaaatcaaacttcaaatataggaaactcagagaatgtcaaatagaacaaaaagaaataagaatcgcatcttgaaaaatctttaaaaaatcagtctaaattttatatcttgctccaaatatatagagatataaagaggttatcat

SEQ ID NO: 558501 - DNA, 332 bp, Homo sapiens
aaaacaggaaaaacaaaacaaaactgctcttgaaggtgaaggaggaatatcactgagctcaccaacacagccaggaaaagaacggaagtgtgagaaggctacattcctgagaccctgagaaaaagtacctgcataagactgagatgaaattacctactctagttatgattgaaatcccaaaaagaaaagagggaaaartaatggagcaaaagaaatatttttcaaaataactgccaaaaatattctaaaagaagtgacagaaaatcaaacttcaaatataggaaactcagagaatgtcaaatagaacaaaaagaaataagaatcgcatcttg

SEQ ID NO: 558502 - DNA, 600 bp, Homo sapiens
ttctcttctcttcccttcccttgccttcytccttcctttcttcttttcctcttccttttcttttcttttttcttttcctttctttttctttatctttttttctccttccttccttctttccttctttgtttctttcccttattcttccttccctaatccctcccttcctttctccctcccttttcttccttcttttctcatattctttctttctttctcacgttcttgctttctttccttttttgttccctcctcccgccctccatttcttccttcctccctcccttcctttcctctttttctttccttcctttgcctgtttattttctttgtttctttgccttcctcccttttaccattctctcttcctcctttccatcctccctttctcctttctttctttctctctctctttctttctctttctttccttctttctttcttgtgttcatgctttctgttttctcccttcctgcctttctcccttcctccctccctcccttccttccctcatttcctccttcttttcttctttctttctttatttccttccttccttctttccttccttctttttctttctttgttttcttttctttc

SEQ ID NO: 558503 - DNA, 600 bp, Homo sapiens
ttctcttctcttcccttcccttgccttcctccttcctttcttcttttcctcttccytttcttttcttttttcttttcctttctttttctttatctttttttctccttccttccttctttccttctttgtttctttcccttattcttccttccctaatccctcccttcctttctccctcccttttcttccttcttttctcatattctttctttctttctcacgttcttgctttctttccttttttgttccctcctcccgccctccatttcttccttcctccctcccttcctttcctctttttctttccttcctttgcctgtttattttctttgtttctttgccttcctcccttttaccattctctcttcctcctttccatcctccctttctcctttctttctttctctctctctttctttctctttctttccttctttctttcttgtgttcatgctttctgttttctcccttcctgcctttctcccttcctccctccctcccttccttccctcatttcctccttcttttcttctttctttctttatttccttccttccttctttccttccttctttttctttctttgttttcttttctttc

SEQ ID NO: 558504 - DNA, 444 bp, Homo sapiens
tttttacattgttttcttttcctccagttagggcttgaggtttgtctctggagagtgactgwcaattgcagccctgcctttctggggttctggtcagggggttgtggatgcttaacatgtgcctttcacaggacacttccttaccccagcagtggccaggtgtgcatcccacgaccaggcctccctctcacagaacatctgttgagactaggagatgcctagtgactgttgcctgacctgtgtcctgtgtatttctgacaagagccactctcagagaccctggccaggaagagagttaggttccagtgtaggtcagctcagacacatggaggccacagaaccaaacatgggaaatcacagaagtaggtttattactcacagatccagagagaagagggtagctgagaagagggtttagctgtgtccccagccaaatctcatctt

SEQ ID NO: 558505 - DNA, 444 bp, Homo sapiens
tttttacattgttttcttttcctccagttagggcttgaggtttgtctctggagagtgactgacaattgcagccctgcctttctggggttctggtcagggggttgtggatgcttaacatgtgcctttcacaggacacttccttaccccagcagtggccaggtgtgcatcccacgaccaggcctccctctcacagaacatctgttgagactaggagatgcctrgtgactgttgcctgacctgtgtcctgtgtatttctgacaagagccactctcagagaccctggccaggaagagagttaggttccagtgtaggtcagctcagacacatggaggccacagaaccaaacatgggaaatcacagaagtaggtttattactcacagatccagagagaagagggtagctgagaagagggtttagctgtgtccccagccaaatctcatctt

SEQ ID NO: 558506 - DNA, 421 bp, Homo sapiens
aaaattaatttatccaactcacaacttatatgcttctgccgttgtatggaagatacatkttaaactttatgagatagcattctgttatacagtcaatatccaattaaatttctctcaatgtttatttctttcattaaaaaattgttcttctaactgcaaactttcatcagggatcatggctcttctacctgaagaataatctttagtatttcttttcctgtgggtctgcttgggagaaattctttattgtatctttgtatttgatggatatgtccaccaagtagacagttctaggtcagcacttattttatttcaggacttgaaagatatcaatacctcacttgttggctttcgttgtttcatttgagaaagttgttatcagtcaactctttctctttgtagttagcccaatttttttatc

SEQ ID NO: 558507 - DNA, 421 bp, Homo sapiens
aaaattaatttatccaactcacaacttatatgcttctgccgttgtatggaagatacatgttaaactttatgagatagcattctgttatacagtcaatatccaattaaatttctctcaatgtttatttctttcattaaaaaattgttcttctaactgcaaactttyatcagggatcatggctcttctacctgaagaataatctttagtatttcttttcctgtgggtctgcttgggagaaattctttattgtatctttgtatttgatggatatgtccaccaagtagacagttctaggtcagcacttattttatttcaggacttgaaagatatcaatacctcacttgttggctttcgttgtttcatttgagaaagttgttatcagtcaactctttctctttgtagttagcccaatttttttatc

SEQ ID NO: 558508 - DNA, 542 bp, Homo sapiens
gagttgttgtgcacattaaaataattaaaataatgtgtgtaaaatgcttagcctattgcrtggcaaacaataaatattttttcctcttattcatgaagttgttcatttattccttccaggcactgggaaggggctggggatgcaaaagcaaaaagatcaacaagagttgaacagacatttcaagagtttttgggagaattagctgagaaatgcatgtgaaggacctggctcctgtgctcaggaagccctaagggtcagttgaggcaagtccctgtatgctcatccattcctgtcccctgaaaaactaataataatgagatctgtgccaggggattgttagaaatgttaattcacttaattttatgatatagaaggtgttattatcctcattttgtagatgaagaaactgggtcacagggaagttaagtaacttgcccagggttacagagctgttggatggtggagccaggattataaagcaggtaatctggttcccaggtccttgcttttcactcctccaccagacagcttcttaggatggc

SEQ ID NO: 558509 - DNA, 566 bp, Homo sapiens
caccatactctgcttttttgttttgttttgttttggaatttttggtrgagatagagtcttgccatattgcccaggctggtcttgaactccacagctcaagccctctgcccacctcagcctctcaaagggctgggagaacaggcatgaggcactgcacctggccacaattgatattttaaaaaacgtaccttttcatcacatcctattcctctcttcctcacttttttgggggataggtctcatgtgttaaacttttttttttttatcaatgataaattttgaatccacccaattcattcactgaagagtctggaccactccacggctttgatttgttttgttgtttcaaactctctaatgcaaatatctgtttcattttattttattgtttgcattgtgggcctattccccatcatattttgtgctcatcgtggctcacagcaacactttttcattcttaacctttttgtgcagtgccaatgtctagccctcctgtttcacctttctcacctctagttcagtcatctctctggctaggtcatgaagaactagaatgatttgtccgt

SEQ ID NO: 558510 - DNA, 566 bp, Homo sapiens
caccatactctgcttttttgttttgttttgttttggaatttttggtggagatagagtcttgccatattgcccaggctggtcttgaactccacagctcaagccctctgcccacctcagcctctcaaagggctgggagaacaggcatgaggcactgcacctggccacaattgatattttaaaaaacgtaccttttcatcacatcctattcctctcttcctcacttttttgggggataggtctcatgtgttaaacttttttttttttatcartgataaattttgaatccacccaattcattcactgaagagtctggaccactccacggctttgatttgttttgttgtttcaaactctctaatgcaaatatctgtttcattttattttattgtttgcattgtgggcctattccccatcatattttgtgctcatcgtggctcacagcaacactttttcattcttaacctttttgtgcagtgccaatgtctagccctcctgtttcacctttctcacctctagttcagtcatctctctggctaggtcatgaagaactagaatgatttgtccgt

SEQ ID NO: 558511 - DNA, 568 bp, Homo sapiens
ccatgacacgtgggaattgtgggagctacaattcaagatgaggcttgggtggggacacagtcaaaccatatcatgtgccttatgctttcctctcctgcactctcccactccctcactttgcttcctggaatcatcttccaagtaaactacttgttcccagatgcttgtcttagggtctgcttttggagaatcccagctaagacagatgtcatgtaagctggtggagagaggcttaggatgtagccatcatggtctatttgtttatttatttatttagagatgaagtcacccaggctggagtgcagtggtgtgatcttggctcactgcaacctctgcctctgggttcaagtgattctcctgcctcagcctcctgagtagctggaattacagtcatgcgccaccacacckggctaatttttgtatttttagtagagaatacaaaaatttagtatttttgtattcaccatgttggccaggctggtctcgaactcatgatctcaggtgatccacctgccttggcctcccaaggtgttgggattacaggcgtgaaccagcatgcccagccctc

SEQ ID NO: 558512 - DNA, 376 bp, Homo sapiens
ttgaattcaccttcatatataggtttttaattaaaacctttttcccctgagtggaaaaacatgtctgcttccatatttactgagttctacatcactagagttgttccaagaatgtgcattagtgaatgtgctaacattcctagtctgacagccaamctttatggttttgtgcaagtcactttgcttcttgacatctcagttactttctccaaacatggcaggagtaactttactaaatgagacaaggatgagaagtaatgtatataaaagttcctgaggcatcaaagtactcaaatataatataaataacaatatgcttttaatcatttttattgtttttactcctaattatttttgctctcagtagtggtacaat

SEQ ID NO: 558513 - DNA, 376 bp, Homo sapiens
ttgaattcaccttcatatataggtttttaattaaaacctttttcccctgagtggaaaaacatgtctgcttccatatttactgagttctacatcactagagttgttccaagaatgtgcattagtgaatgtgctaacattcctagtctgacagccaacctttatggttttgtgcaagtcrctttgcttcttgacatctcagttactttctccaaacatggcaggagtaactttactaaatgagacaaggatgagaagtaatgtatataaaagttcctgaggcatcaaagtactcaaatataatataaataacaatatgcttttaatcatttttattgtttttactcctaattatttttgctctcagtagtggtacaat

SEQ ID NO: 558514 - DNA, 544 bp, Homo sapiens
ctttttattcattctgccattctgtatcttttaagtgtagcatttaggccatttacattcaatgttaatattgagatgtaaggttctgttctcttcatcatgttaattgctacctagttttttgttattattgttgcattattattttataggccctgtaagttttgagctttcaagaggttctattttggttcayatcagcctttttttcaatgtttagaactccttctggtatttcttgttgtgatggtttggtaatgacaaattttctcagcattagtttgtctgaaaatgaatttatttctccttcctttttaaaacttggtttgctgggtgtaaaattcttggctgatagtgttctgtttaagacgcttgaagataaaactccaatccctttcagcttgtaaggtgtctgctgggttgtctgctgggaagtctgctgttaatctgataggctttcctttgtaggttacctgatgattttgtcttactgcttttagaatttttttcttcatattgactttaaatagcctgatagttatat

SEQ ID NO: 558515 - DNA, 481 bp, Homo sapiens
acactagattttctttatgcatttgtccattgagagacaattagcttctttccacattgtggctattgtaaattttgctgcaacgaatatggaagtgcaactatctcttcaatatactggtttcatttcattcagatatatatttctgtggttttaatgggtaccctccaaaattcagtgcttgccaatgagagggcrttaagaagtggggtctttaaaaggtaattaagtaatgagagattccctcttcctgaatgtgattaggtgtccttataaaagggcttgagagagagggttcactcctttcattcttctgccttctgccatgtgaagacacaagaaggcggccctcaccagatgccaataccgtgatcttggacttctcagcctccagaactttgagatatacatttctgttctttataaattattcggtctcagatattatgtgatagccagacaaactaagacatctacttaa

SEQ ID NO: 558516 - DNA, 381 bp, Homo sapiens
taagaatacctgaggcttttcttttcttcctctctttagtctactgctggggctgttaaccaaacccaactcataaagcagaggataagraggtcttttgacacagtctggaaaaggtaggctctctggcatctgtgtatagctccactgcttcctctctgccatcagtgatacccacaaatacacaggtgggaaattattttgtcaatatttaaaatatttttaaaaagatatttgccttgcttttaaattaaaattatggcatttattactctctatagaacattttctcgtatttcttatttttactttttaacttagtacattttcaccacatgtacatttgatagctctattttgcaaatatgtgaattcaatgga

SEQ ID NO: 558517 - DNA, 555 bp, Homo sapiens
attcaacttcttcctggttcagtcttgggagggtgtatgtatccaggaatttatcagttcattttagattttctagtttatttgcayagaggtgtttatagtattttctgatggttgtttgtatttctgtggggtcagtggtgatatcctctttatcatttctgattgtgtctatttaactcttttctcttttcttgttattagtcagcttgtggtctatctattttattaatttttaaaaaaaaaaaaaaaaaccggctcctggatgcgtttatttatttatttttttgaaggtttttttttttgtctttatctccttccattctgttctgatcttggttatttcttgtcttctgcaagctttggggtttgtttgcttttggttctgtagttcttttagctgtgatgttaagtgttaatttgagatctttctagctttttgatgtgggcaattagtgctgtaagtttcccgcttaacatagttttagctgcttcccagagattttggtatgttgtctttttgttctcattagtttcaaagaacttcttgatttc

SEQ ID NO: 558518 - DNA, 507 bp, Homo sapiens
caagcgtccaataaaatgctttcaytgattgcagtgtcacttttagatgctgcaagggctccaaacaagagtcatcttttagcactctgctgtgggtttactttttatggtgttgggatctagtgggtaaatacagcttctgcattaacactaacctgaagagacaaacctctcaggaggaccatctcctctttatgcttttccaaccctggggccataaatcctatcagcctgcagagatgaagcatcctaatgattacagtggcacagaggtgttctttgagtgaaccaagcaaataaaaattaaagttcaaagtcactgggtaatctaagacattcattacacctgtgctgagccagtcaggcctgatcagccaaataggcatcaggccagtgagtgtgcaggagaaagtaaacacctctaagattcaccttgtttcctcccaagggtgtcaacattgtgggatgcaaacaatatttcaaataagtttgccttgaaaagcacta

SEQ ID NO: 558519 - DNA, 507 bp, Homo sapiens
caagcgtccaataaaatgctttcactgattgcagtgtcacttttagatgctgcaagggctccaaacaagagtcatcttttagcactctgctgtgggtttactttttatggtgttgggatctagtgggtaaatacagcttctgcattaacactaacctgaagagacaaacctctcaggaggaccatctcctctttatgcttttccaaccctggggycataaatcctatcagcctgcagagatgaagcatcctaatgattacagtggcacagaggtgttctttgagtgaaccaagcaaataaaaattaaagttcaaagtcactgggtaatctaagacattcattacacctgtgctgagccagtcaggcctgatcagccaaataggcatcaggccagtgagtgtgcaggagaaagtaaacacctctaagattcaccttgtttcctcccaagggtgtcaacattgtgggatgcaaacaatatttcaaataagtttgccttgaaaagcacta

SEQ ID NO: 558520 - DNA, 564 bp, Homo sapiens
acaatttttcaagggtagttccacatatctattaaaactaagttaggcatgcacatgacccagaaatctcaccccggaaatctagactatggaatattgcataacattgaagatatatatgtatgtcctcgtatccatataatgattatatataatatatatccatgtaaagattatatatataatctcatctgtatctacatctatgtcacccatgccaccgtctacatcatcatgtacacctctagaragacatgaccttatttatttatttatttttgagacagggtcttgttctgtccctgaggctggagtgtagtggtatgatcttagctcactgcaacctccacctcccgggctcaagtggtccttccacctcagcctcccaagtcgctgggaggacaggcatgcaccatcatgcccagctaatttttgtggttttgtagagatggggttctgccatgttgcccaggctggtctcgaactcctgggcttaagtgatatcctgccttggccttccaaagtgctgagattactggcgtgagccaccatgcccagccaacc

SEQ ID NO: 558521 - DNA, 564 bp, Homo sapiens
acaatttttcaagggtagttccacatatctattaaaactaagttaggcatgcacatgacccagaaatctcaccccggaaatctagactatggaatattgcataacattgaagatatatatgtatgtcctcgtatccatataatgattatatataatatatatccatgtaaagattatatatataatctcatctgtatctacatctatgtcacccatgccaccgtctacatcatcatgtacacctctagaaagacatgaccttatttatttatttatttttgagacagggtcttgttctgtccctgaggctggagtgtagtggtatgatcttagctcactgcaacctccacctcccgggctcaagtggtccttccacctcagcctcccaagtcgctgggasgacaggcatgcaccatcatgcccagctaatttttgtggttttgtagagatggggttctgccatgttgcccaggctggtctcgaactcctgggcttaagtgatatcctgccttggccttccaaagtgctgagattactggcgtgagccaccatgcccagccaacc

SEQ ID NO: 558522 - DNA, 593 bp, Homo sapiens
ccctttggaaaacaactcctgccatgctactagaccttggtagagatcgagcatcatgagttactgggataccacgtgtctggaattgcctataattagccatccctatactcaccaagtaataagattagatgtgcccaggaatacattgtaaggtggacatggtatatctggggttgagcatgagtaggactagggtacaagcaaggtgcccaagtaggtattgagaaatcagtgtcatcctctgttgcatgaaagcccttccctctgcatatacctctggctgtgtgagctaccctttaggaccagctgagagaggagagaaaaacccaaacctggtttatggatgggttaacatggtatgtgggggcaggctgaaaatgataactgctttgcagtctggagaccttgaaagacagtgaaaggcataattccctcattgggcagaacttagggtagtgcagcacctgattggccattttgtgtgtaaggwgaagtggccagtggttaaaatatatatggaattatgggcagtaataaatggcctggccctcggtgggggacatatatatttcctgctttctctctttatc

SEQ ID NO: 558523 - DNA, 597 bp, Homo sapiens
taacaccattaacataagcaagttctattttcttgtttgtattcttcttatgtattttaatgttgacatgggtaagttgcccttaaattgcctttggatctccattgttccaaggggtcatgatacaatagtattcttcactggccattctttacaccttgtgagacagatcctctttgagcactgcaagctgacactttctagttctttatgaraaagtcttttgtaggttttcttaaagaagcctgcttccaaaaagttactgggaatgtagcagtcactacattagctgtgtgattgacacatggaaaggtgaaattgcttgcccaaggtaattctgcaggctagtggcgatgccagctcatgatctgtagatccggctctgtgcccttagctgtgaccattggatcaaagagtcaccttaaaatcagggggcacctgtaagcagcttcagtgtgcaagtgcattgcatactgttggtatttcaaccactattcatatgatcagcaattttgctgtgttttcagtggcctcagtaattgcctgtttatggtaagcacttggcatttttgcttagtttttttttttttacttttt

SEQ ID NO: 558524 - DNA, 566 bp, Homo sapiens
tgaatgaggtactcgcctcaggaacaaaatgaaaaagggtgccaaaaactcaagaatcaagataaaactattttaatgcaatatttttaaaacatcaaaattatgactaaaaatccttggtggacaaaatatcaacatttcaaataaagtcagaatttgaccctggctagcatgacccatcttaacccaattcccggtcctgtctgcttatctaaatacttcctgtatcccatgccgcccccgccccgacytccaccaccccactgtaagccgcaggaggaagaaaccacctctaactttttcaccatggtatctgcggggcctgtcgcattggatgtgctcagtacatcttttttttcttttccccatgaatgaatgaaaaagtattttttccagtggaaggaggactaggctgtgaatctacagatagcccatgccagctactcactgtgtgaccttaattaaatcacttctctcagcctcatctttgaaaagagggcgttgaacactatgagtcttgtgggtctttccagcctttacatagtaagatttgtacctgatattag

SEQ ID NO: 558525 - DNA, 518 bp, Homo sapiens
aaagacttttaatatgaaaaaaggaggaaagtgggaatttgtatattatttgtataatgaagaaaaaaactagaaagctgcaaacatgtctataaaaatgatacatatgcatcttcaatagtaccccataattcaacttctattattatctccattttacaaataggaaaattatatcttagtgaagtgttaagataataaaggacagagctagcttttaatcatagatagtgggactccaaaacgatttcccttaagataaagtgactttaattcagggccttacaaacagagatatgtgatacgaataaatgttaagactagccaaaggggcaagcaacttttaaaatgttgcatacaataagatacacytaccatgattgtctgtttaacagattttatgtccatgtgtattacattttaaaattaaatagagaacttttatgaattcaccttttagtctcccctttaaggatgagtagtgaaatgtgtacagatttttgtagaataaaactagc

SEQ ID NO: 558526 - DNA, 489 bp, Homo sapiens
aagtgtcattcagcccacatttctgaacttataactaaagaaaccagaacaaaagttgactgagtcttttgcacaagagtatgctgtttgtgaggatgagggatgaggttcaaattaaaactaggtgtgtcaggctgcctagctgttcactgatcctgccattttcttcctgagcacacagtgacatggcgttttatgggtccctggaagtgagatgtgacctgtaaggcacatggatgtgccttggtcaggaataggccgaggcgaacatccaggccagagtgactcagtgagtttagggtgcaggcacatactccacttgttatataacctgtttgtgtaactccatacttggatctgagccactattgtctgaaaaagktataactgccctgctgacactgtacggggttggcttgcacttgtgggtcttgaaagaagagggtctggtttggggcgcatctggttcactccagtacctgccccatg

SEQ ID NO: 558527 - DNA, 566 bp, Homo sapiens
tggcttccagcatacttccttgcctggttatctttctgtctcaagggctgctctttttggctggttcctcttcattttcctaatttcttaatgttagagtgtcctgggatccatcattgcacagcttcttgtttccatctatgctcactatcttgttgatgtcatccaggctcatagcttcaaatatattccaatccatatgctagtgactctcagagttctctctctagctcaagcctcaaacataaaagtccagcctctcayatcttgttccctactcaaaacctcttgcatgtctaacagccatctcaatcttaacaagttcacaattaagctgataattccatctcacacctcctcttgaagttttatacacatcagtaaacatcaactccattcttccagctgcacaggacaaaagccttggattcatccttgacttgtctttttatcttgccaacacatatccaaactatcatcaaaatctgttggatcaaaattgacaaatggcatctaattaaacgtaagagcttctgcacagcagaagaaactatcaaaagagtaaa

SEQ ID NO: 558528 - DNA, 597 bp, Homo sapiens
aaaggccaggcatggtggctcacacctgtaatcccagcactttgggagggtgaggcaggtggatcacctgaggtcaggagtttgagaccagcctggccaacatggcaaagccctgtctctactaaaaattcaaaaattagctgtgtgtggtggcacgtgcctgtaatctcagctactcgggaggctgaggcaggagaatcgcttgaacctgggaggcagaggttgcagtgagccgagatcgtgccattgcacttcagcctgggtgacagagtgagactgtcttagaaaaaaaaaaaaaaaaaraaaagaaatctatcccacaaatatactggaaaaaatacaaacaaacatacatctgcacaagactacaaattgaaatattatttgtaatagcaaaagactggaaacaatataaatgttcatcagtggagggccagttgaaaaatgtagtgcgtctccacaatggagtactatgtagatactaaaaggaatgatgaatatctacttacagttatgcctagtttaatgacaggggtgtgttctgagaaatgcttcattaggtgattttgttgttgtggaaacatcatagagtgtacc

SEQ ID NO: 558529 - DNA, 607 bp, Homo sapiens
cccacaaaggccaggcatggtggctcacacctgtaatcccagcactttgggagggtgaggcaggtggatcacctgaggtcaggagtttgagaccagcctggccaacatggcaaagccctgtctctactaaaaattcaaaaattagctgtgtgtggtggcacgtgcctgtaatctcagctactcgggaggctgaggcaggagaatcgcttgaacctgggaggcagaggttgcagtgagccgagatcgtgccattgcacttcagcctgggtgacagagtgagactgtcttagaaaaaaaaaaaaaaaaagaaaagaaatctatcccacaaatatactggaaaaaatacaaacaaacatacatctgcacaagactacaaattgaaatattatttgtaatagcaaaagactggaaacaatataaatgttcatcagtggagggccagttgaawaatgtagtgcgtctccacaatggagtactatgtagatactaaaaggaatgatgaatatctacttacagttatgcctagtttaatgacaggggtgtgttctgagaaatgcttcattaggtgattttgttgttgtggaaacatcatagagtgtacccacac

SEQ ID NO: 558530 - DNA, 461 bp, Homo sapiens
ctggggattaggatgtggacgtctttggggagccattattcagccttccactggccaaggaaagcctcactgaggagctatttgatgagggtcctgaggggatgagggagggaactgggtaaatagccgggggagcatgctctaagaagagggaatagtgggtgagagtctgggaagtttgaggaaccgyatgaggccaatgtggctgcagcagagggaatgatggggagagtggcgagggcagggccagaggcaggatggggactctgttacgtggcatctcataggctggtgtagggacttagctttacttgtaatgcagtggggatccacagaacccactgagtacagggttccagatctatacttaggagaagcatctaacccagacttagagggtggtggagttaaacgaatcttctcagaggaaggaaaatgtaagctgagacatgccagcttct

SEQ ID NO: 558531 - DNA, 536 bp, Homo sapiens
actgttggcgggagtgtaaattagttcaattgttgtggaagacagtgtggcaattcctcaaagacctaaaggcagaaataccattcaacccaacaatcccattactacatatatacccaaaggaatataaattgttaaattataaagatacacgcacacgtatgtttattgcagcactatttacaatagcaaagacatgtaatcaatccaaatgcacatccatgatagataggattaaaaaaatgtagtacataggtaccatrgaatactatgcagccataaaaaggaatgagatcatgtcctttacagggacaggatggagctggaggccattatcagtagcaaactaatgcaggaacagaaaaccaaataccatgtgttttcatttataagtgggagctgaatgatgagaacatatagacacatggtggggggaaacaacacacactggggcctgtcgaagggtgggggatgggaaaagggagagcatcaggcaacatagctagtggatgctgggcttaatttttaggtgatag

SEQ ID NO: 558532 - DNA, 639 bp, Homo sapiens
tttatttgataattacaggtggttagatgtgcaactttctcctattcggtcattatggaggcaaatttattcacgagaagtccctttctggacaagggtccattgtactggtggagctgaagggaggaaaggggtccacacaggggttctgggcccagggcacacartgattttaccagagacaagcctgagttcaccatctcttctctgtggaattgagctgtgcagatgaaatggtcttttaatattatctcttctagaaagaaattgtgacagtactaccatcttggttaaatatgaactttccaatcatattcttggtgggcagttaaacaagcaaaccaaaaacccctaactatgcactgaatgtttgtgtctccccaaattcatatgctgaagcataaatctccaatgtgatgatacttggaggtgaggtgtctgttaggtaattagttcacaaggatggagtcctcatgaatgggattaatacccttttaaaaaaaagacaggaagagatgatctctctctctctctctctaccatgtgaggtcacagcaagaagatggtcatctgcaaaccaggaagaggaccctcaccagacacagttctgctaccaccttgatcttggacttcccagcc

SEQ ID NO: 558533 - DNA, 433 bp, Homo sapiens
aaaaatgaaagttatacttgcatatgattagaatttaaaccttctaaaaggtataaaatcaagcaaagctctgtctgacctttcctcttgagccctagtttctttctcgaaagatgacaattctacctttctaaaaaaaaaatgtgtgtgtgtgtgtaaaacaaatgggaatatactgtgctgaatcttgccttttttttaagctaaacagtctatcttaaaaatatttccatgtcagcaagatatatctaaatcattctttttaaaggttacccataattacrttgtagaaatgtacaataattaatgattttaccagtttgtcattgatagacacttaggttgttttattattttctcttattgttgctttataaaaaaatgctgcagtgaatttccttgtacatttatcttggcatacttttgggtaaat

SEQ ID NO: 558534 - DNA, 493 bp, Homo sapiens
tgccatgaataccaacttaaatacatacrtgacagtgttcaacaaaagtaagtaattaaaaagacaaaacagccattaaaaattaacatttacatttcctttttccaaacaatctcatgtgttgggactctatctgaccaaaaaataagcacctgtatagaaggaaacagttcagcgggtccaagaaggaaacagttcagcgggtccaagaaggaagggaaagagggagaaaacaaacttgaaaattatttgactgtcccttagtaggggactggtcaaaaaaatttatggtacagccatactgtacaatattatgaagctattattacatgagtttgatttatgtatcctgacctagaacagtttctctgatatatttttaagtcagaaaagcaaataatatagagagttttgtcctgttcttttaagaaagaagtggaataaatttttatctttataggaacatttcctaaatgtgtggaaaaatacagat

SEQ ID NO: 558535 - DNA, 513 bp, Homo sapiens
ttactgaaatctggtcaccctactgaattctattctatttgtttgtttcctgattctgttgggttttatagatagataatcatataatctgctaatacgaaagttttgtctctcttctcctaatagtatgcttttatttttcttgtgttactaaattgggcatagctttcagtattattttgaacggtactggtgatatacgaaatmttggcttattcttgatttgaagatttgaagacaatatataggattttcattaagtaggatattatattggatataggttaatggaatatagcctttatcagtggaagctctttcatctctgtttttcaaaaggtttttataattaaatagatattgaattttataaaatgttttaaaaaaactattgagataacaatgtgattttcctccttgcatccatgattgtggagaattacatggatagttttttctaatgttaaaccatttaacaattgcctttcttgaataaatcctacctaatcataa

SEQ ID NO: 558536 - DNA, 513 bp, Homo sapiens
ttactgaaatctggtcaccctactgaattctattctatttgtttgtttcctgattctgttgggttttatagatagataatcatataatctgctaatacgaaagttttgtctctcttctcctaatagtatgcttttatttttcttgtgttactaaattgggcatagctttcagtattattttgaacggtactggtgatatacgaaatattggcttattcttgatttgaagatttgaagacaatatataggattttcattaagtaggatattatattggatataggttaatggaatatagcctttatcagtggaagctctttcatctctgtttttcaaaaggtttttataattaaatagatattgaattttataaaatgttttaaaaaaastattgagataacaatgtgattttcctccttgcatccatgattgtggagaattacatggatagttttttctaatgttaaaccatttaacaattgcctttcttgaataaatcctacctaatcataa

SEQ ID NO: 558537 - DNA, 468 bp, Homo sapiens
tttgcagacaaaaggccatattccattgttccagtcaggataccactaatcaagttcttgaggtcggaaagatggggagactcattcattctttgtatatctactctggtaaccaacctatgcaaggacacatagacattaagggaggaggcatgattcaaagcaagtgggggcagtgatgtcagctgattgacagactgggccagggaccagtgagacaatgcctgaagacagaaggaacgtggaggaagagagaagaaggcatataggagaatgccttattttytggatgaatgtgatgtctactatgagaggagacactggatgaagaccagtttggaaaattgtgggaaaactgccaacaacagtcaggaaccacaggagtgaaatgttgctgaaaagagaaagaaacatttagctcagtgattctcaaaaggtggtccctggaccagcagcatcagcatcacc

SEQ ID NO: 558538 - DNA, 531 bp, Homo sapiens
gaattctccatttaatatgtttgaactgtggaaacctcagaaagagaaactttgaataagcagggactactgtactctcaactgactctcacctctgctgtccccctcgcgtgtcataatgttggcatcytgtttgttgtctctacctcaggggacaggaggtgacagagcatttgctgggagaggacactgagggggtgaccctcgtgtgcagatgagcaagtgaatttttttgttttgttttttgctttttggtttttttgagacggagtcttgctctgtcgcccaggctggagtgcagtggcacaatctgactcactgcagcctccgcctcctgggttcaagcaattctcctgcctcagcctcctcagtagctgggattgcaggcacgtgccaccacacacagctcatttttgtatttttagtagagacagggtttcaccatgttggccaggctggtctcaaactcccgacctcaggtgatccacccaccttggcctctcaaagtgctggaattacaggcgtgagcca

SEQ ID NO: 558539 - DNA, 531 bp, Homo sapiens
gaattctccatttaatatgtttgaactgtggaaacctcagaaagagaaactttgaataagcagggactactgtactctcaactgactctcacctctgctgtccccctcgcgtgtcataatgttggcatcttgtttgttgtctctacctcaggggacaggaggtgacagagcatttgctgggagaggacactgagggggtgaccctcgtgtgcagatgagcaagtgaatttttttgttttgttttttgctttttggtttttttgagacggagtcttgctctgtcgcccaggctggagtgcagtggcacaatctgactcactgcagcctccgcctcctgggttcaagcaattctcctgcctcagcctcctcagtagctgggattgcaggcacgtgccaccacacacagctcatttttgtatttttagtagagacagggtttcaccatgttggccaggctggtctcraactcccgacctcaggtgatccacccaccttggcctctcaaagtgctggaattacaggcgtgagcca

SEQ ID NO: 558540 - DNA, 553 bp, Homo sapiens
tcagactgtcactatctcccatcacccccagataaaactgtctagtggcaggaaaacaagctcagggctcccactgactctatattatggtgagttgtataattatttcattatatattacaatgtaataataataaaaatatagtgcaaaataaatgtaatgcacttgaatcatcctgaaactattcccaacccagtctgtggaaaaattgtcttccactaaattggtccctggtaccaaaaaggttggggtccactgctctgcttctagtactacctctatgcacccatgctactgaagtcatgcacttgccaacagaatcaaagataaattatatgaaagcaattatgccagcataatgtattaggcaaatatttggcatcatgattgtatgtaatatgattatatgtrataggatattattttagggatactctaaaaccatgtacacacaagagtgggcctttgccacagtgagtttaaagtgtgttccttgcagcctttgccacatcactaaaaatgggcaaatcatattttcttaaaggaattaat

SEQ ID NO: 558541 - DNA, 534 bp, Homo sapiens
ccacatacttacaagcaactgatctttgacaaagtcaacaaaaatatacgctggggaaaggacacgctattcactaactggtgctgagaaaactggatagccatatatagaagaatgaaactggagccatacatctcaccatatgcaaaaattagtaactcaagttggattcaagacccaaacacaagagcagaaactaaaaatcctagaagaaagtaaccccattaaaaaataggcaaagggccacaccggctctaggctgtccatgccgcatcgcttccttttcctctactgcagcagctatggcagtggtgaagaccctaaaccccaaggctgaggtggcccgaacggaggtggcgctagcggtcaacatcagcataatgcagggtctgcaggacgtgctgggaaccaacctggggcccaagggcacaatgaatatgcttgtttctggcgctggagacatcaagcttactaaaaagatggcaatgtgctgtttcacgaaatgcaarttcaacacacaacagcttccttaat

SEQ ID NO: 558542 - DNA, 331 bp, Homo sapiens
attgccctgactagttaattagaaagttcttttctatatattacacatggacaaatacaatgactagcatttcrgtgtattttttatttttttaattgacacataatagttgtattatgtattatggatacagtgtatgatgtttcaatgcatatatacaatgtgtatttagcatatatacaaggtatttagcatatccatcacctcagacatccatcacttctttgtggcaagaccattcagaatcctctcttctgtcttctttgaaatatataccatagcattgtttactatcctcaccctactatgccatagaacaccagaacacatt

SEQ ID NO: 558543 - DNA, 331 bp, Homo sapiens
attgccctgactagttaattagaaagttcttttctatatattacacatggacaaatacaatgactagcatttcggtgtattttttatttttttaattgacacataatagttgtattatgtattatggatacagtgtatgatgtttcaatgcatatatacaatgtgtatttagcatatatacaaggtatttagcatatccatcacctcagacatccatcacttctttgtggcaagrccattcagaatcctctcttctgtcttctttgaaatatataccatagcattgtttactatcctcaccctactatgccatagaacaccagaacacatt

SEQ ID NO: 558544 - DNA, 549 bp, Homo sapiens
aagtatactctatgatgtttgtacaacaacaaaattgcctagcaacacattttctcagaacataatccccatcattaaatgatgcatgactgtacatgataggttttctttttcttctttttttctggcaataaggaaggaaaagatacacctggtacgttttctagcatgctagaattttggttggactttgaagactgggtagactttgagccagtggagtggaagagggaaagcagtggtgtgctggagctggctcacactgtctcccgagagctgattgttacattctcagaaatattgtgaggcagttgttaaatgtggcrgttactgaaaattaaattatagaaatttacaatgaataaattctatcttaaaaggcagcaaatatgcagccataaaaaaaagaatgagttcatgtcctttgcagggacatggatgaagctggaaaccatcattctcagcaaactaacacaagaccagaaaaccatacactgcatgttctcactcataagtgggagttgaacaatgaaaacacatggacacagg

SEQ ID NO: 558545 - DNA, 496 bp, Homo sapiens
aatcaacctacgtgcttatcaatggataaatggataaaaatataaatattatatatataatttaatattactcagccataaaaaatgccatcctgtcatttgcaacaacatggatggagctggaggtcatcgtgttaactgccataatccaggcacagacagacaaatattacatgttctcactcatacgtgggagctcagtatgtggaattaatgaagacagagagatgatcgttggttctcaaaggctgggaagtggagagaagaagggcgatgaagagaattggttattgggaataaaaatacagttagatagaaggagtaagatccagtgttcaaaaacacagtaggatgagtataataacaacatcgtactgcrtagatcaaaaaagctacaagagaagaactagaataaccccaatacaaagaaaagctaaacattggaggtgatagatatacgaatttccctcatttgatcaatacatattgtagtgaa

SEQ ID NO: 558546 - DNA, 428 bp, Homo sapiens
aaacatgtatgatggtatgatatatacacaatattttgttttaaaaatagttaatgctcttagaatttctttcctttacagtatgtttgtttttccccaatattcacaataactattttcttaaaaacattaagattattgttgattttcatcttagacccacacataagcatgattaacattttgtgaaatatgtacctttgtatcctattacagataaattaaagttaaagatagccctgttatagccttatacagaccaaggtaacagaacttgacagtttcaggttaatcactgcaagaaaaatatccctgctagaaaatagagaagttttatattattctttgtgtttattgtttgattttacactaaacctaatttgttttattataaatagtttmatctttttacatattttgaacgctgg

SEQ ID NO: 558547 - DNA, 578 bp, Homo sapiens
tctatgttatctactaaaactcactaaatagtacmttttaatgtttattagatacaaaataaatctcattaaataacatattagaagaagcatgcatttttaaaaattgttttgaatttatatgagcttagctgtcaattactatgttaaactattaccacttgatggcaggaaccatgttgtacttgtgagaaacttaattcctctgatttcagagatcaaatttacagctataacatttgtggtcaccaaattaaaagaatattgcctgactgcttaattattcctatcccctgcattgtgataatatattgtttttctattttcagtccattatcttaaccttacatttctgaaggccttttcattgttagaatgttttaaaactgtttataatatcttgggaatttgtatgtgtgactgtattaatcagtctgaatttgctttcagaatcttaatgttcactataatacatatgagtgcactttcattattttcttggttactctaagtactaaatacgatatgaataaaaattgtagaaatatatctgtactgacaaacacaaaccaagacaa

SEQ ID NO: 558548 - DNA, 578 bp, Homo sapiens
tctatgttatctactaaaactcactaaatagtaccttttaatgtttattagatacaaaataaatctcattaaataacatattagaagaagcatgcatttttaaaaattgttttgaatttatatgagcttagctgtcaattactatgttaaactattaccacttgatggcaggaaccatgttgtacttgtgagaaacttaattcctctgatttcagagatcaaatttacagctataacatttgtggtcaccaaattaaaagaatattgcctgactgcttaattattcctatcccctgcattgtgataatatattgtttttctattttcagtccattatcttaaccttacatttctgaaggccttttcattgttagaatgttttaaaactgtttataatatcttgggaatttgtatgtgtgactgtattaatcagtctgaatttgctttcagaatcttaatgttcactataatacatatgagtgcactttcattattttcttggttactctaagtactaaataygatatgaataaaaattgtagaaatatatctgtactgacaaacacaaaccaagacaa

SEQ ID NO: 558549 - DNA, 489 bp, Homo sapiens
tgttggccacttgcatatcttcttttgagaactgtctatgttcctggctccctttttaatttttttttctttgttttatttattatactttaagttctgggatacatgtgctgaacgtgaaggtttgttacataggtatacacatgtcatggtggtttgctgcacccatcaacccgtcattcacattaggtatttctcctaatgctatctccttcctctagcccccactcccaacagatcccagtgtgtgatgttcccctccctgtgtccatgtgttcttactgttcaactcccacttatgagtgcaaacatgcagtgtttggttttytgttcctctgttagtctgctgagaatgatgtttccagcttcatccatgtcactgcaaagaacatgagctcatcctttttatggctgcatagtattccgtggtgtatatgcaccacattttctttatccagtctatcactgatgggcatttgggttggttcc

SEQ ID NO: 558550 - DNA, 558 bp, Homo sapiens
tacaaaaataagctgggagtggtggcgcatgcctgcaaccccagctactcaggaggctgaggcaggagaatcacgtgaacctgggaggcggattttgcagtgagccaatattgcgtcattgcactccagcctgagcgacagagtgaaactccgtctcaaaaaaaaaaaaaaaaacaamaaaaaaaaggattttaaaaagcatatagaaaaaaatacaggagaataattccataatctcaaataggagaagatatattaaacagtccccaaaaatcattaaaaaattcaaaagtttaacatgatcaattttttaaaaattctaattaagatattaatacaaatatgaataggcaaacaataaactagggataatccttgtagcacacgtctgatgaagaaattctttctaaaatatgtgatgaactcttacaaatcagcaataagaatacatagaaccagccaggagcggtggctcatgtctgtaatcccagaactttgggaggccaaggcgggtagatcacttgaaatcatgagttggataccagactgtccaacatg

SEQ ID NO: 558551 - DNA, 468 bp, Homo sapiens
ctcaacacaataagagtctatatacagcasacccacagcaagtatcatactgaatgggaaataattaaaagcctttcatctatattctggaatgtgacaaggatgtccactttctaccctgttattcaacatagttctagagatcctagctagagctatcagacaagaaaaagaaatagagggcatccaaattggaaagaaataagtcaaattatccttgtttacagataatataatcttatatttggaaaaacctaaaaacttcaccaaaaaaactgttagaattgatgaacaattaagtgagttacaggatacaaaacaaacatagaaaaataagtagtatttctatttaccaacactgaacaatctataaaagaagccaagaaagtaatccaattgacaaaagttacaaataaaatacctagaaataaacttaaccaaagaaggtgaagatttctacaataaaaa

SEQ ID NO: 558552 - DNA, 576 bp, Homo sapiens
aaattatttaatatagtatttaaatataacatttaaatataaatagtatttatagataaattatacatgtacttaaataaatttttaaaactcagtatcacatatgcttaagataaaactgtagttttgtctttttaaatgattggaacactttctgaaatattgcccattttcagttggaatcatttgttcatacatacttaaacactctccccaaatttggtatatttactctgattttaaaaatattttctgctgagattttttttaatgggaaataagacagcctgttttataagtattaactgtgcatgagaacatttgtaatatcacccttggagaataataaacagatactagagattgaaattctgacatagtttacagaacaataatccaaacatctgttataatgacaagggatttgarcagagtagagagtacatgggaaagctatgctacttttagtacagttataacattaaatcaaagcattgcagctcaaggcagcttgctgctaatataaacaattttctacatattcctgggccacaagccagatctcaggattcagtt

SEQ ID NO: 558553 - DNA, 500 bp, Homo sapiens
tgatacatatacactatgaaatactctgcagccataaaaacaaatgaaatcatgttctttgtagcaacatggatggagctgggggccattatcctaagcgaattaatgcaggaacagaaaaccataatacaattggaggtataatagtgaatgtcatggacataaaaatgagaacaatagacactaggcactatttcaaggtggagggtaggaggagagtcagggtccaaaaactgcctattgggtactrtgctcatcactggatgatgaaaaagtctgtacaccctatacctgcaacacacaatttacctatgtaacaaacatgcacatgtactctctgagcctaaaataaaatttgaaagaaaaaataaatttaaaaattaatagttaaataaaattatactccatgaaaaacaacaaccaaaacaaaatattgcaagtctacatttaccaaatcagcatggtattggtataaacatagacacatagactaatgaaca

SEQ ID NO: 558554 - DNA, 599 bp, Homo sapiens
ggcttggtggctcacacctgtaatcccagcactttgggaggccgaggcgggcgggtcacctgaggtcaggagttcgagaccagcctgaccaacatggagaaaccccgtctctactaaaaatacaaaattagccaggcatggtggcacatgcctgtaatcccagctaccctggaggctgaggcaggagaatcgcttgaacacaggaggcagaggttgtggtgagctaagatcgtgctgctgcatttcagcctgggcaacaagagcgaaactccatctcaaaaaaaaaaaaaaactatttgggtgtggtggcatgtacctgtagtcccagctactggggaggctgacgcaggaggatcacttgagcccaggagttcaaggttgcagtgagccatgattgaaccactacactccaacctgacagagtgagaccctgtctctaataacaaacaaaagtaagatgaaaggtcattctgagaatgccagggttgagggctgcacaatgccatgctcatggcaaatgctaaytgtggtggctgaagttcggtgtgtgttagggagtagaaattggaaaagcggaggaaataagtgaatgaggggag

SEQ ID NO: 558555 - DNA, 484 bp, Homo sapiens
ctatccataggcaattactaagttactttgtatctccatggatttgcttattctggacatttcatataaatgaaattatataatatgttgttatttgtttgttgaaacttacagatcacttttagaattgtsatctttactaagttgagtcttccattttatgaacatggtatgtctctatttaggtcttctttgatttttttcatcagtgctttttagttttcagcatacatattagtacctgtttggctacactaatacctgtatattttaaaataactatttaaatggcattattatttttattattgtcatcatcattttagagacaagttctcactctgtcacccaggctgaagtacaatgatgagatcatagcctactgcagcctcaaactctgggttcaagtgacctccccacctcagccttccaagtaagctaggactacagatgcaggccaccatgcctggctaattttttaatt

SEQ ID NO: 558556 - DNA, 572 bp, Homo sapiens
  misc_feature 54, 242: n = A,T,C or G
gaaacataaggaagagcaggaaatgagaacttcacttaaaacaaatagacttcntcagcttgttccaaatgagcaagtatggtcctttatttcatttcacagtttaagaaactgtccttctctctgttacacaaaacaagattctacaatgacatactaagagctttagaatcaaaatgattccagtttgaattagctcttctgtcatcttggaaaagatctctcgcaatcactcaggtatntacacatgtaagatggaacaataatacctcttttgtagggttgtcataggctaaaatgagataagatgcttaaagtacctggcccataagaggcactcaattagtgtcagccaaactctaccccaaacccaactttctcttctaagttgctccagccacacccaggcacatacagactgtgaatactacttctgccacttgattacccctccttagctttgtgacttcagggcaatcatttagcctcaacctcaccrtgtcttaaattctacagctttaaaatgaggattaacaataatatgagctcaaagatatttgttgggaaacaaa

SEQ ID NO: 558557 - DNA, 563 bp, Homo sapiens
tttttcactaaatgattttagagtctcaagtaaaaattcaaaagacatagaaaattttgccccaaaacttatttaatcaaaggatatatatgaacacttgagatagtatcaccttgctgctagatctttataccttttggaaatgcctttgccaaagtgaacacttagttaatcatctatacatgtctctgtgtgcccatttatttggcctcaaattgaccggactattatttagagtaagaggatgacaaagaaaaaaaaaaaaaagaaaaaaaacctcttgaccyaactgtatgacccaacctttaaaatggtggttactgggaaagcaccaactctgactgtacatcctacttcagaagggcaaagaattacctatctaaacttcctggaatttcccacgactctcgtagttgcacagtatttgacagcttggaaagcactgttttacaaaaagtgttttataatcctttagctttcctttaaaggtaggtaagattgttttcattaaatattacatatataataaattatcatatgtcatgtcatattattatatacat

SEQ ID NO: 558558 - DNA, 523 bp, Homo sapiens
tccaatcctacaattcctcagccctactcagctacagggacgaaataataactctcaggtgttagtgtttaccatgtgccaggacaatattttaagtgtctcagagatattagtggatttatggatttaattcccagagaaatcctatgagtaggtaccactatttcccccaatgtgagggatggagaaattgaggacacaaatttaacacaattaagccacaacactgagacttgacctygggccaggtagagagtccacgttcttgatccctatgcaatataccccctgaaaattgttagtttgtggtcttatccccactctttttctttttctttcttttctcttttccttttccttttttcttttttgagactgtcttgctctgttcctcgagctgcagtacagtgccctgctattggcctgcagccttgacctcctgggctcaagcaatccttccaccttagcctcctgagtacctgggactacaggcaccatcatgcccggataattttggtatttt

SEQ ID NO: 558559 - DNA, 578 bp, Homo sapiens
attttgtgccaatgaggggaaggatttaggctctagaaattatttccaagctgccttagaagtgtgaagaaatttataaaagtctcttttatacctagagaattagaaggtcttaatacaagccayttgggagatttatttcaactcactctgatgtgcctgtagcacacatttggaatacatatttgttaactaatttcagcctcctatatgtttaaagcaggtcccagtttggggcatattaacccttagttgtgattacacaaagtggtaccccttttaagagtttcagcaagaaaaaaaaaaacttcataaaaaatgagttgataaaatacactttgtcctctagtctttaaatatataattcaggaggtgacaacctgggacctgatacaaattccccacaagtggggaagatacttgagcatgggtcacaaattcctacactattttcttcaacatcagtggttttctgggagctacacaggcacatgtttcaactcaaggatgtttcctggcctccttttctctttggggacagaggggcagcttacactgatgaaacagcatgaccccac

SEQ ID NO: 558560 - DNA, 578 bp, Homo sapiens
attttgtgccaatgaggggaaggatttaggctctagaaattatttccaagctgccttagaagtgtgaagaaatttataaaagtctcttttatacctagagaattagaaggtcttaatacaagccatttgggagatttatttcaactcactctgatgtgcctgtagcacacatttggaatacatatttgttaactaatttcagcctcctatatgtttaaagcaggtcccagtttggggcatattaacccttagttgtgattacacaaagtggtaccccttttaagagtttcagcaagaaaaaaaaaaacttcataaaaaatgagttgataaaatacactttgtcctctagtctttaaatatataattcaggaggtgacaacctgggacctgatacaaattccccacaagtggggaagatacttgagcatgggtcacaaattcctacactattttcttcaacatcagtggttttctgggagctacacaggcacatgtttcaactcaaggatgtttcytggcctccttttctctttggggacagaggggcagcttacactgatgaaacagcatgaccccac

SEQ ID NO: 558561 - DNA, 308 bp, Homo sapiens
tcaggggtacatgcacaggttttttatatgagtaaacagtgtatcacagggatytggtgtgcagattatttcgtcactcaggtgatcaagcatagtacagggtaggtagtttttcaattctcaccctcctcccaacctccaccctcaagcaggccccactggctattattcccttctttgtgtccatgtgtactcaatgtttagctcccacttacaagtgagaacatgcagtatttggttttctgttcctgagttagttcacttaggatcatggtctccagctccacccatgttgctgcaaaggacat

SEQ ID NO: 558562 - DNA, 590 bp, Homo sapiens
ttatcacgatcaccaccattaccgcaagaagcagcagccagagcacacctagcagccattgcagctacagatggcaggaagcaggaagcaggaaggagggaagagcctagttcccgggcagcctgggcggcccatctccgtttcataacgttggtctcctcccacctcaatggcagaagtagaagccagacaacccctccttgtgaaggtgaagaccccaggatccaggctgagggagcagccctgactccccagagctgaacaggggaaacctccactcacctgcaggtcaatttcccacaggaagccttggaggaaacactgcaaccaggccggagcaaggccagcaccagagcccctgcggagcttgggctaggaaccagctcttacttctgctggggcagggtgggaggacttaacccatttgtgacaggcagaatacgtgttactgtcaaaacatggacaaatgattgagcttttataatgaagggatcctttytgacttttgactgatactgagggggaaaactgaggtctcttgggtcaactgctaaggccggcgtggctcagacaggcttccctcatggagc

SEQ ID NO: 558563 - DNA, 612 bp, Homo sapiens
ggcaggtggctgacacctcttccactcaggcagtcaaagtgccaatggccccttaaacccaaggccgagcagggaggccacccccagctscgtgttgcctggtcaggagtcaccgtcctccttaattccatttcatttgactttacttggacaaatcaaatcaaagcaaatggcaggaaccacagtacaatagaagattggcacttctgagggataagatccgagaccttcacaattcccgagcccacaagcaccactatggaacagctgaaaaatttgggtcatgcttttgtgtcctcaatgtgggctatgacaggtaaaggcaccagagagctgggggatgacagcggctgtccgccccccagataagagagctgttctcccttaaccatctgccttgccaagtacttttcagtctcagcaaaatggcaaattactacatgacctcgacttttcattctcctgtgaaaccataaatcctatggcctcacatacaaaagccagtctacttagcaatcttcagagacaacctctgaagcaatcctgggataaacaggactcctcaagatttaagatattgagtcaggggctggcgtggtggctcacacctgt

SEQ ID NO: 558564 - DNA, 618 bp, Homo sapiens
acgatggatgtcacaacggccctgaggaggtgagaggtgacagaccctgcggcccagaggaggactggcttgagagcaacagggacatgtttcccctgagatggaagaagaggatggtatgagtgtcggggccraggggtgtgcaggtggggaatgggatgtttagggagctcctgaatggatgctttcatttctcactcaaacttcctgaattctccctcataccctttgctttcagcagaaattctaaatacattgcctggacaggcatccagggctttccgtgactctcagcctttcctcccttcattgcacccccacccctacacaccctatcccctggccatatcacacaaccgaggtccccgagcctgcctgctctcacagccctggccctctggtcagcttgtgctggatattttgcccaccccagtctcccagtctgcattagccagcttctcctcctctgagaagccttccctgacccatccaggctgaaagaggtgcttctccttcatgtccctgggctcatctctccaacaactgtcaaagtgcatggtatctgtttacttgtctctctaccctacacctgtgagcttcacaagggcatgcaccagg

SEQ ID NO: 558565 - DNA, 562 bp, Homo sapiens
cagttattttaaaagtaaactaaaaagataatctctagggttaggaactatgtagagaaatataccctcactcactcctggcaacagtgtcaaatgagtgtaacccttctgaagggtaggttgggaatatgctttcaaaacctgaaaaataagcatactcttgactcagcaattttatactagacatgttatctaaattatgtcaaagaatataattttggatatccccaaagatttacctatgaaaatggttattgtaaatgytatgtaaaatgtttttacataaagaaacatttatttagtaaatgggattgactgaacaaactatgatacatggaatattatgtagccattaaaaacaatatcatggaagattaattattttacgatatggatcattatatagtcagtgttaccaaagagtatatgtactatagccttactgtagtttttaaaagtacatatgaatacatataagaataaacaaggcataaaagatacacaacaagccaagtgcagtggctcactcctgtaatcccagcagtttgggaggccgaggcag

SEQ ID NO: 558566 - DNA, 562 bp, Homo sapiens
cagttattttaaaagtaaactaaaaagataatctctagggttaggaactatgtagagaaatataccctcactcactcctggcaacagtgtcaaatgagtgtaacccttctgaagggtaggttgggaatatgctttcaaaacctgaaaaataagcatactcttgactcagcaattttatactagacatgttatctaaattatgtcaaagaatataattttggatatccccaaagatttacctatgaaaatggttattgtaaatgttatgtaaaatgtttttacataaagaaacatttatttagtaaatgggattgactgaacaaactatgatacatggaatattatgtagccattaaaaacaatatcatggaagattaattattttacgatatggatcattatatagtcagtgttaccaaagagtatatgtactatagccttactgtagtttttaaaagtacatatgaatacatataagaataaacaaggcataaaagatacacaacaagccaagtgcagtggctcactcctgtaatcccarcagtttgggaggccgaggcag

SEQ ID NO: 558567 - DNA, 605 bp, Homo sapiens
gaatattttttcccattactttctcatttctgtatcatttattaggtgggtctaataccatctaatgcatctcytctggaaagttttaaaacttctggtcatgtattatatgtttccatgcttttcactgctgtaataaaacagataatagactttatatttcttctgtaactcactggggtttttggaggtaaaaggaggtaagcaagaaggatctcaatccatcaaccaaaactaaaactctggaaaaatgcttttaaatttaacatttcaactgaatcattttgttagtaacaaagctatacatcacctatttgtatattaagagttttttttaagtaatttaaggtatgtcaatggtgtgaacatgtttccatggttttaaggttcagaaatttagttttctttcaaaagcaaaaacaaaataagcttttctccctcaaggcattaacatttctagacatttaatagttctcatccagaaaacagagaactccctggaagatgagctggccagagccaaggtatcctggggagatactctcccaggcagtgcgcagcctggggctggacttccttccccagcacctgctgacatctctgct

SEQ ID NO: 558568 - DNA, 605 bp, Homo sapiens
gaatattttttcccattactttctcatttctgtatcatttattaggtgggtctaataccatctaatgcatctcttctggaaagttttaaaacttctggtcatgtattatatgtttccatgcttttcactgctgtaataaaacagataatagactttatatttcttctgtaactcactggggtttttggaggtaaaaggaggtaagcaagaaggatctcaatccatcaaccaaaactaaaactctggaaaaatgcttttaaatttaacatttcaactgaatcattttgttagtaacaaagctatacatcacctatttgtatattaagagttttttttaagtaatttaaggtatgtcaatggtgtgaacatgtttccatggttttaaggttcagaaattwagttttctttcaaaagcaaaaacaaaataagcttttctccctcaaggcattaacatttctagacatttaatagttctcatccagaaaacagagaactccctggaagatgagctggccagagccaaggtatcctggggagatactctcccaggcagtgcgcagcctggggctggacttccttccccagcacctgctgacatctctgct

SEQ ID NO: 558569 - DNA, 528 bp, Homo sapiens
aagggagagggaggaagaaggaatggcaaacagaaaccacaaaatcagatagtaataagtctaaatagatcagtaatgatyatctatataattggattaaattcaacatactaaataataatagagtgaattttaacaatctagctatatacatcttctaagagtcacaactaaaacacaacacatagaaagactgaaaagacaaaatgtacatactaggaaaatgctaatcaaaataaagcctgcagcagtaatatcagacaagagctacctgtctttgttttttgtttttttgagacagggtctcgctttgttgcccaggctggagtacagtggtgtgatctcaggagtagctgagaccacaggtgcacagcatcatgcctggctcatttttgtatttttgtagagatggggtttctctatgttgcccaggctggtcttgagctccaaggttcaagcgatcctcctgcctccacctcctaaagtgctgggatttcagatatgagccactgtgcctgacctaagaaa

SEQ ID NO: 558570 - DNA, 561 bp, Homo sapiens
aggggagtgatacatctacagctgactgttctctttaggaaatgttctgtcttgcaacataggacataaagtctgagcagaaaacaccagcctggaacttgcagcagtcttactaggttgtgtaagagaaaaattggaatacactgtaaccaaggaaaccaggatataagaggccaaatttctgggaaaaagggaaacataaagaagcaaacctgacaagctatgttcaatttcctcttgaggcttttgacatttcctaagctgaatacacaaggcagatgataagaaaccagcacaaagaggctgctagaaggctaaatatctaagcaggtatttctgcagtatcacagtgatcaagagacagraattggagtcaggactccccaataaggaaaaacatctgggattttaattcatccctgaatgcctaaaccctaggagtaaaagcaagcaaggggacatgccctcacaaagcctggaatgcaaacttgaatcatttcaatccacctgtagcaaggttacaagcctttaccctcattatccgccagaataaaactagat

SEQ ID NO: 558571 - DNA, 577 bp, Homo sapiens
ttaattcatccctgaatgcctaaaccctaggagtaaaagcaagcaaggggacatgccctcacaaagcctggaatgcaaacttgaatcatttcaatccacctgtagcaaggttacaagcctttaccctcattatccgccagaataaaactagataatctctggaggaagatacattactcagacctgctacaattcttcacacacaatatgtgccattcaaataaaaataatttggcataccaggatactgaaccaacaatggaaaactaagaaaagaattagatgatccaacaggtaatcccagtattgacatcagaaatgatttttaatgtaactatgataaatrtgttcaataaaataaatgacaatgtaaaatttttatcaaaaattggaatacataaaaagaaagcaaatgaaaattacagatgaaaatccaataactaaaattaagaacctaacagaagtgtttaatatcaattagacgacaacagagagaatatgtgaactggaagttcagtcagtagaaagtatctaaattgaaacataaagggaaagaagatgaaaaacacaaaaaaga

SEQ ID NO: 558572 - DNA, 577 bp, Homo sapiens
ttaattcatccctgaatgcctaaaccctaggagtaaaagcaagcaaggggacatgccctcacaaagcctggaatgcaaacttgaatcatttcaatccacctgtagcaaggttacaagcctttaccctcattatccgccagaataaaactagataatctctggaggaagatacattactcagacctgctacaattcttcacacacaatatgtgccattcaaataaaaataatttggcataccaggatactgaaccaacaatggaaaactaagaaaagaattagatgatccaacaggtaatcccagtattgacatcagaaatgatttttaatgtaactatgataaatgtgttsaataaaataaatgacaatgtaaaatttttatcaaaaattggaatacataaaaagaaagcaaatgaaaattacagatgaaaatccaataactaaaattaagaacctaacagaagtgtttaatatcaattagacgacaacagagagaatatgtgaactggaagttcagtcagtagaaagtatctaaattgaaacataaagggaaagaagatgaaaaacacaaaaaaga

SEQ ID NO: 558573 - DNA, 577 bp, Homo sapiens
ttaattcatccctgaatgcctaaaccctaggagtaaaagcaagcaaggggacatgccctcacaaagcctggaatgcaaacttgaatcatttcaatccacctgtagcaaggttacaagcctttaccctcattatccgccagaataaaactagataatctctggaggaagatacattactcagacctgctacaattcttcacacacaatatgtgccattcaaataaaaataatttggcataccaggatactgaaccaacaatggaaaactaagaaaagaattagatgatccaacaggtaatcccagtattgacatcagaaatgatttttaatgtaactatgataaatgtgttcaataaaataaatgacaatgtaaaatttttatcaaaaattggaatacataaaaagaaagcaaatgaaaattacagatgaaaatccaataactaaaattaagaaccyaacagaagtgtttaatatcaattagacgacaacagagagaatatgtgaactggaagttcagtcagtagaaagtatctaaattgaaacataaagggaaagaagatgaaaaacacaaaaaaga

SEQ ID NO: 558574 - DNA, 651 bp, Homo sapiens
atggtgaaaataccttaacacaagtgtattttagagttcaaagaaatgaaaagaaacaatatttgaagaggagatggacaataattattcaaaatagaaaaaagacaccaagctacagattgaaacttctctatgaataccaatcaggataaatatgaagataaacatacctaggcacattatagtcaaactgctgaagaccaaagacaaagagaaagatacacattgcattcaaaggagcaacaaaaagattcttagctgatgttacaagagaaatcaaggagctacaaaacaatgaaatcacatctttaaaatgctggcagaaaatatctaccaatctwagattctattccctgtcaatgaatatatccctcataaacaggcaacatcaaagaaatcttcagacaaaagcattgagagaatttctcacaacagacaaacaccaaaagaaacactaaagggagttctttaaaaaattatatatgtagtgtgtatgtattatatatatacacatttatgtaatatatgtgaatttatatatataaatatatataaatggaaacacagacacatataattttttattatatatacacacacatatttaaatggaaacaaatggaaataagaaaatagggaaagaaatgaaga

SEQ ID NO: 558575 - DNA, 651 bp, Homo sapiens
atggtgaaaataccttaacacaagtgtattttagagttcaaagaaatgaaaagaaacaatatttgaagaggagatggacaataattattcaaaatagaaaaaagacaccaagctacagattgaaacttctctatgaataccaatcaggataaatatgaagataaacatacctaggcacattatagtcaaactgctgaagaccaaagacaaagagaaagatacacattgcattcaaaggagcaacaaaaagattcttagctgatgttacaagagaaatcaaggagctacaaaacaatgaaatcacatctttaaaatgctggcagaaaatatctaccaatctaagattctattccctgtcaatgaatatatccctcataaacaggcaacatcaaagaaatcttcagacaaaagcattgagagaatttctcacaacrgacaaacaccaaaagaaacactaaagggagttctttaaaaaattatatatgtagtgtgtatgtattatatatatacacatttatgtaatatatgtgaatttatatatataaatatatataaatggaaacacagacacatataattttttattatatatacacacacatatttaaatggaaacaaatggaaataagaaaatagggaaagaaatgaaga

SEQ ID NO: 558576 - DNA, 536 bp, Homo sapiens
aattcttaaaaaggatgcctgttgaaggtggtggggggagggaggttggaggacatagaagaagttagattttaaaggttaaaaatgagtagcagaatgagtagcagaaagcagcaagagacagtaagaatttgaaaaccaagtggtcactgaaagcaatggtagatgagagtacaggcaaaagcatttttaagtctaggaaaaaaatcycaaatcctcttaaatgtggtcaggaagagacacagcaaacgctaaattagtcaagggcagaggagcaggaagtttaccagggagaagggatggcctggtatgaataggtataaaaggacctctccaacatgagatcaaggtagttctctaaatggcttcgagcttgcattagtgggattatccttggttaattttaggaaaatcaaaacccactacttgtcctacatgcttggaatccaaggtattaaccttttttcctgccttttggtgcctagtagactaaaagtggcaaggtcagcattattttaataccctatattaatatt

SEQ ID NO: 558577 - DNA, 568 bp, Homo sapiens
tgcacacataagtttgaacttaattgaatatgattatatatcttattttaatgtggcaatgaggtcagggaccaaacatttaagaaatatctatggaagaaatgtttaattgtaaaatgcttttctgctaattaattttttctagtgaatttgatatttttgaagttgcattatttgattttaggtatgcaatgtagtatggcaaaaaagtgaacatgttttctctctttatttatttattttttaaaatgagacagagtctctctctgacacccaggcyggagtgcagtggtatgatttctgctcactgcaacctctgcctcccagactcaagtgattctcctgcctaagcctcctgagtagctgggattacaggcataagccaccacgcccagcaatttttgtatttttagtagagatggggttttgccatgttggtcagtctggtctcaagctcctagcctcaagtgatctgcccacctcggcctcccaaagtactgggattacaggtatgagccacctcaccaggccaaatattttttctcttgaaaaagacctaggtatgaaa

SEQ ID NO: 558578 - DNA, 568 bp, Homo sapiens
tgcacacataagtttgaacttaattgaatatgattatatatcttattttaatgtggcaatgaggtcagggaccaaacatttaagaaatatctatggaagaaatgtttaattgtaaaatgcttttctgctaattaattttttctagtgaatttgatatttttgaagttgcattatttgattttaggtatgcaatgtagtatggcaaaaaagtgaacatgttttctctctttatttatttattttttaaaatgagacagagtctctctctgacacccaggctggagkgcagtggtatgatttctgctcactgcaacctctgcctcccagactcaagtgattctcctgcctaagcctcctgagtagctgggattacaggcataagccaccacgcccagcaatttttgtatttttagtagagatggggttttgccatgttggtcagtctggtctcaagctcctagcctcaagtgatctgcccacctcggcctcccaaagtactgggattacaggtatgagccacctcaccaggccaaatattttttctcttgaaaaagacctaggtatgaaa

SEQ ID NO: 558579 - DNA, 579 bp, Homo sapiens
ttaagactttgggggactgttggaagggcatgattgtgttttgagctgtgaagacttgagatttgggagggggccaggggcagaatggtatggtttggctatgtccccgcccaaatctcatcttgaattgtagttcccatactgcccacatgtcttgggagggaccgggtaggaggtaattgaatcatggaggcagttaccctcatgctgttctcatgatggtgagttctcacaggatctgactttttaaaggggttttataaggggtttctcccygctttgctcatagttcttcctgcagccatgtgaagaaggacatgtttgcttccccttctgccatgagtgtaagtttcctgaggcctccccagccctcaggaactgtgagtcaattaaacctctttcctttataaattacccagtcttgggcagtaatttacagcagcatgagaacagactaatacagtcacagatatgtattatgaatgttttttagtctatctttttatttttctaatgtatctttctttagaggagcaaaaatgtttaattttaatgaagtccaattgatcaattttatct

SEQ ID NO: 558580 - DNA, 578 bp, Homo sapiens
gaacagtgctaaactgaagatgatttggttatcaaacaaaactttaaagaatataaggcttattccactttgaaacaaatcaaaaagtaaaaacttgaaccagcatctataaaattctagccatctttcctcagaaagaaaaaaataaaaaagaaggaaaggtcaggacaacatgatacccattaataaaagcagcttacattccttcttcctagcaaagtgcagcacagctcaacctcaaatggaacgtgacattaatgggctaaaaggaaagatggagaacagagagcccctgaagctaaacagacccagcaccgtgctctgcacacttcaagccaaagccatttcatttccctttactcttatcagtcagtctgttgacctgatgtagaaatgaatactgatgagaaaaaagtacaggcaacatggtgcacccttgacgtctratcctatctggaatactcaactctgacttttcactacaagccgcaacaaacaaacaaacaaacaccaaaaagggatgtattcgggttctgcaaagaaacagaatcaatagaatgtatatattaaaagaacaa

SEQ ID NO: 558581 - DNA, 578 bp, Homo sapiens
gaacagtgctaaactgaagatgatttggttatcaaacaaaactttaaagaatataaggcttattccactttgaaacaaatcaaaaagtaaaaacttgaaccagcatctataaaattctagccatctttcctcagaaagaaaaaaataaaaaagaaggaaaggtcaggacaacatgatacccattaataaaagcagcttacattccttcttcctagcaaagtgcagcacagctcaacctcaaatggaacgtgacattaatgggctaaaaggaaagatggagaacagagagcccctgaagctaaacagacccagcaccgtgctctgcacacttcaagccaaagccatttcatttccctttactcttatcagtcagtctgttgacctgatgtagaaatgaatactgatgagaaaaaagtacaggcaacatggtgcacccttgacgtctaatcctatctkgaatactcaactctgacttttcactacaagccgcaacaaacaaacaaacaaacaccaaaaagggatgtattcgggttctgcaaagaaacagaatcaatagaatgtatatattaaaagaacaa

SEQ ID NO: 558582 - DNA, 578 bp, Homo sapiens
gaacagtgctaaactgaagatgatttggttatcaaacaaaactttaaagaatataaggcttattccactttgaaacaaatcaaaaagtaaaaacttgaaccagcatctataaaattctagccatctttcctcagaaagaaaaaaataaaaaagaaggaaaggtcaggacaacatgatacccattaataaaagcagcttacattccttcttcctagcaaagtgcagcacagctcaacctcaaatggaacgtgacattaatgggctaaaaggaaagatggagaacagagagcccctgaagctaaacagacccagcaccgtgctctgcacacttcaagccaaagccatttcatttccctttactcttatcagtcagtctgttgacctgatgtagaaatgaatactgatgagaaaaaagtacaggcaacatggtgcacccttgacgtctaatcctatctggaatactcaactctgacttttcactacaagcmgcaacaaacaaacaaacaaacaccaaaaagggatgtattcgggttctgcaaagaaacagaatcaatagaatgtatatattaaaagaacaa

SEQ ID NO: 558583 - DNA, 612 bp, Homo sapiens
tccagagtataatgagctcagtgaaaaaaggtgaagacatgtagcttattctctcaagaaactaggctatgataaactggcagaggctctaagagtgggaggtgagttgttttctccttcatgtaaatatatttaccttttaaacactaggcccaattttatatcctatttcatttaactttatgaacatatttatgtatgtatgcatgtatgtatgtatctcatgtgatgttttagacactgaaaaataactcatttctattataaaactgatatctttagatgttcagaagcaacttcctaaaaggaggtagcagtaatggagctatgtctatcattctttcccatcaacccccttgatggagatgtaaacatgtgtccatcaagcctttaatttttacctcttatcttcatggctctccatacaaaacttaactcttttttttttctatttgtatacgtatatttatatgtatatctatatcgagagagagagagagagaaagagtcttgctrtgttgcccaggctgatctcaaactcctgggctcaagcaatcctcccaccttggcctcgcaaagtgctgggattacaggcgtgaaccactgtgccca

SEQ ID NO: 558584 - DNA, 632 bp, Homo sapiens
tacaactaaacaaccaagttgctaaaccagagcccacaaaagcagagtcaaagttctaacacttggtaaaagaaaaatgcacacatacccctgtgagctaaaaaaaaatgcttaagtattcaaagacagcaattacagctactgagaacatcactgtaagcaaactgaggcagagaaaacaaacgtgctgatgaggatttgaaccacctaagctgcagaaacccactggatggtttcctaggttccgagttggcattatctttcagaacaatcttctagaagagatcacataacactgttacaaaggatctggagaaagggaccctggcttcatcactstggctctccagtcatgctttacatttggcagtgactatctccattcaactcaattccctaaccctaaactagctgacatttatcaaatactgccctttaccaggtctaagtaagtttaactccccccacccccaccaaaaaaaattcaagatactaagggatatactattcacaaaagggaaacctgtctcctcttcatatacctgttcctttcaaggaagggtataaaaatggggatgagggaggataaccactaggaatttgaccctatattataaattggtcagataaat

SEQ ID NO: 558585 - DNA, 632 bp, Homo sapiens
tacaactaaacaaccaagttgctaaaccagagcccacaaaagcagagtcaaagttctaacacttggtaaaagaaaaatgcacacatacccctgtgagctaaaaaaaaatgcttaagtattcaaagacagcaattacagctactgagaacatcactgtaagcaaactgaggcagagaaaacaaacgtgctgatgaggatttgaaccacctaagctgcagaaacccactggatggtttcctaggttccgagttggcattatctttcagaacaatcttctagaagagatcacataacactgttacaaaggatctggagaaagggaccctggcttcatcactgtggctctccagtcatgctttacatttggcagtgactatctccattcaactcaattccctaaccctaaactagctgacatttatcaaatactgccctttaccaggtctaagtaagtttaactcccccsacccccaccaaaaaaaattcaagatactaagggatatactattcacaaaagggaaacctgtctcctcttcatatacctgttcctttcaaggaagggtataaaaatggggatgagggaggataaccactaggaatttgaccctatattataaattggtcagataaat

SEQ ID NO: 558586 - DNA, 632 bp, Homo sapiens
tacaactaaacaaccaagttgctaaaccagagcccacaaaagcagagtcaaagttctaacacttggtaaaagaaaaatgcacacatacccctgtgagctaaaaaaaaatgcttaagtattcaaagacagcaattacagctactgagaacatcactgtaagcaaactgaggcagagaaaacaaacgtgctgatgaggatttgaaccacctaagctgcagaaacccactggatggtttcctaggttccgagttggcattatctttcagaacaatcttctagaagagatcacataacactgttacaaaggatctggagaaagggaccctggcttcatcactgtggctctccagtcatgctttacatttggcagtgactatctccattcaactcaattccctaaccctaaactagctgacatttatcaaatactgccctttaccaggtctaagtaagtttaactccccccacycccaccaaaaaaaattcaagatactaagggatatactattcacaaaagggaaacctgtctcctcttcatatacctgttcctttcaaggaagggtataaaaatggggatgagggaggataaccactaggaatttgaccctatattataaattggtcagataaat

SEQ ID NO: 558587 - DNA, 632 bp, Homo sapiens
tacaactaaacaaccaagttgctaaaccagagcccacaaaagcagagtcaaagttctaacacttggtaaaagaaaaatgcacacatacccctgtgagctaaaaaaaaatgcttaagtattcaaagacagcaattacagctactgagaacatcactgtaagcaaactgaggcagagaaaacaaacgtgctgatgaggatttgaaccacctaagctgcagaaacccactggatggtttcctaggttccgagttggcattatctttcagaacaatcttctagaagagatcacataacactgttacaaaggatctggagaaagggaccctggcttcatcactgtggctctccagtcatgctttacatttggcagtgactatctccattcaactcaattccctaaccctaaactagctgacatttatcaaatactgccctttaccaggtctaagtaagtttaactccccccacccccaccaaaaaaaattcaagatactaagggatatactattcacaaaagggaaacctgtctcctcttcatatacctgttcctttcaaggaaggstataaaaatggggatgagggaggataaccactaggaatttgaccctatattataaattggtcagataaat

SEQ ID NO: 558588 - DNA, 523 bp, Homo sapiens
cagctactcgggcagctgaggcaggagaatcgcttgaacctgggaggcggaggttgcagtgagctgatatcgtgccattgcactccagcctgggcaacaagagtgaaactctgcctcaaaaaaaaaaaaaaaaaaargaaagaaagaaaagaaaatatatctatgcaccagagctcaacactaggttaggagcatttctgagatttggagctattcaaccatggaagttcctggcacatacatcaggtattcacaataccctttctcaggtgtttggtcactgctagtgagcctgcctggatcagtgtttcccaaatggcagtcatttgcatctttgcatttttttgggggggggggttgtgggggtatataccataccagattttttaaaaattgacattaaaaatacatgtataaaatgtgtaaagtgcactaatctaaagtgcactggatgtattttttattgatgtacatacttttgttatccatcacccaggtcaaaatacagaatcagcaccacaga

SEQ ID NO: 558589 - DNA, 523 bp, Homo sapiens
cagctactcgggcagctgaggcaggagaatcgcttgaacctgggaggcggaggttgcagtgagctgatatcgtgccattgcactccagcctgggcaacaagagtgaaactctgcctcaaaaaaaaaaaaaaaaaaaagaaagaaagaaaagaaaatatatctatgcaccagagctcaacackaggttaggagcatttctgagatttggagctattcaaccatggaagttcctggcacatacatcaggtattcacaataccctttctcaggtgtttggtcactgctagtgagcctgcctggatcagtgtttcccaaatggcagtcatttgcatctttgcatttttttgggggggggggttgtgggggtatataccataccagattttttaaaaattgacattaaaaatacatgtataaaatgtgtaaagtgcactaatctaaagtgcactggatgtattttttattgatgtacatacttttgttatccatcacccaggtcaaaatacagaatcagcaccacaga

SEQ ID NO: 558590 - DNA, 553 bp, Homo sapiens
tgcagccagccaccatgttgtgcgtcagcaaggcttcccacagcccccgcctctagccattgacactgaggtcttccatgcagccagcccagcagggaggcattggcagcccctggtgtcaggcctgagcggtgttcctggaggtgacgagaggcctctgcaccagctccccaagaaggagactgtcacgtggctccaggtagctgaggactcctcggttcaaagtacrtgtggggtactggtccatggagatttctagctggtgaatgttgatgtggatgctgaccttgtggggctgtgcgtcagtcacaggcacactgttgaggagcaatacagtaccctggcccttctcaaccatggaccacaggtggccctcaaatatgtccacatggatgaagtccccatgccagcctgctgcctggaaggccaagggtgcctgccagctctgtgtggtgagtgtaaactccagggttccttcatcctgagtgccccaggcaggcaaggcagccagagagtgggacctagagaagcccagggccacatcgtcattggc

SEQ ID NO: 558591 - DNA, 576 bp, Homo sapiens
tccattcacattcagtttttgacatacgtttgaatctcccttttctcctgggccccaaaggggctttcattattagcattgcatgttttatcaagacactttctcataaaaaattggtacagcaggcaagcgatagccactgcttgaacccggctaattccttgctctccaaataagaattcagttcagcttttaaatatgcaattgtgtgacttactccctacctgggctgaattcaggaggaaaaatcactctcagtgggccagaaccaaagagctggaaaatcaggtsacattctgcagtgatggctccctgccaggactgagatggaggagacaccatttggggtacttgaaagcttcgtttagagttttcctggatttgacctgcctccggggtgcagggattgatggagaaggctggcagctttgatgtcccagttacatgggacagtggagggctggtactgtggctgtcacctctgctggggtgtacagtacttcagaaccagcctcacaggagagaggaagccactcctcaggtgtctgcaagcagcaagtccagccagaagtggga

SEQ ID NO: 558592 - DNA, 627 bp, Homo sapiens
ttttgaaagaaataatataaaaaccagcaataaagaatactttagttactttaattggaaaaactgttctaacatgcagcaggtttgtttttgtttgtttgtttgtttgtttgtttttaagayggctgattagggatgtcagattccagatctcctcagaaagatcaaaattacaaatgagtggccatgatttgaatggaaagctgaagaaagaaggcctggatctctttgagagcccaggggaaacagctggtgtgcctaaaaggcaaacagcaaatatattaagtatattgcaaaaactaatcccccaaagaactcggagctccatgaaaaggacaggttcgagtgcttctgtactttcctcatgcctgcaacaatctgctgaccactaaattgttggggaggccttctgtcttagttaccctgggcaatgcttttggtggctgtttgggaaattgccagggacagagcactgtgcggtcagttcacacagatgcacccacattcttctcagggctgaaccgagatggtcggagacatactgtttgtgtacccaatgtgagccactgctttgtctagggaaactcagctcttatatcattgcatcaccagatatcctgcaaacat

SEQ ID NO: 558593 - DNA, 627 bp, Homo sapiens
ttttgaaagaaataatataaaaaccagcaataaagaatactttagttactttaattggaaaaactgttctaacatgcagcaggtttgtttttgtttgtttgtttgtttgtttgtttttaagatggctgattagggatgtcagattccagatctcctcagaaagatcaaarttacaaatgagtggccatgatttgaatggaaagctgaagaaagaaggcctggatctctttgagagcccaggggaaacagctggtgtgcctaaaaggcaaacagcaaatatattaagtatattgcaaaaactaatcccccaaagaactcggagctccatgaaaaggacaggttcgagtgcttctgtactttcctcatgcctgcaacaatctgctgaccactaaattgttggggaggccttctgtcttagttaccctgggcaatgcttttggtggctgtttgggaaattgccagggacagagcactgtgcggtcagttcacacagatgcacccacattcttctcagggctgaaccgagatggtcggagacatactgtttgtgtacccaatgtgagccactgctttgtctagggaaactcagctcttatatcattgcatcaccagatatcctgcaaacat

SEQ ID NO: 558594 - DNA, 627 bp, Homo sapiens
ttttgaaagaaataatataaaaaccagcaataaagaatactttagttactttaattggaaaaactgttctaacatgcagcaggtttgtttttgtttgtttgtttgtttgtttgtttttaagatggctgattagggatgtcagattccagatctcctcagaaagatcaaaattacaaatgagtggccatgatttgaatggaaagctgaagaaagaaggcctggatctctttgagagcccaggggaaacagctggtgtgcctaaaaggcaaacagcaaatatattaagtatattgcaaaaaytaatcccccaaagaactcggagctccatgaaaaggacaggttcgagtgcttctgtactttcctcatgcctgcaacaatctgctgaccactaaattgttggggaggccttctgtcttagttaccctgggcaatgcttttggtggctgtttgggaaattgccagggacagagcactgtgcggtcagttcacacagatgcacccacattcttctcagggctgaaccgagatggtcggagacatactgtttgtgtacccaatgtgagccactgctttgtctagggaaactcagctcttatatcattgcatcaccagatatcctgcaaacat

SEQ ID NO: 558595 - DNA, 627 bp, Homo sapiens
ttttgaaagaaataatataaaaaccagcaataaagaatactttagttactttaattggaaaaactgttctaacatgcagcaggtttgtttttgtttgtttgtttgtttgtttgtttttaagatggctgattagggatgtcagattccagatctcctcagaaagatcaaaattacaaatgagtggccatgatttgaatggaaagctgaagaaagaaggcctggatctctttgagagcccaggggaaacagctggtgtgcctaaaaggcaaacagcaaatatattaagtatattgcaaaaactaatcccccaaagaactcggagctccatgaaaaggacaggttcgagtgcttctgtactttcctcatgcctgcaacaatctgctgaccactaaatkgttggggaggccttctgtcttagttaccctgggcaatgcttttggtggctgtttgggaaattgccagggacagagcactgtgcggtcagttcacacagatgcacccacattcttctcagggctgaaccgagatggtcggagacatactgtttgtgtacccaatgtgagccactgctttgtctagggaaactcagctcttatatcattgcatcaccagatatcctgcaaacat

SEQ ID NO: 558596 - DNA, 600 bp, Homo sapiens
ctctaaggtctctcttcaacaaggccttactcaaccttggcctataaaaaaacacayattttcagtaccggtgattttgcccacacactaagagagctgaacaaacgcttctaacatagcttctaatagctcagagttgccaaataatttgctatttggccctaccaacacctaaagacaggttccctgtctcccactctctatggaagggtaagcgcctaactgtgataaatgccagttagcaaaccaaaatgggttttacattaaccaatccctttgtcatgattttctgtaaatatccattttctggacttttttcaaccattgttcccctccttattccctcattgtccctttatagtgcccagtcacctctgcacaaatgaattttgagttaagttcacattataatataccccttattgaaacagttattactgattaaaatctgttcttaccacattaactagtatccagcattatttttgacacttcttacccacaaaaatgtgagctataacaaactgaatattgttttaaaatacatttgagttttggggtatttttctatgcactaatatacaagcagaataactggaa

SEQ ID NO: 558597 - DNA, 600 bp, Homo sapiens
ctctaaggtctctcttcaacaaggccttactcaaccttggcctataaaaaaacacacattttcagtaccggtgattttgcccacacactaagagagctgaacaaacgcttctaacatagcttctaatagctcagagttgccaaataatttgctatttggccctaccaacayctaaagacaggttccctgtctcccactctctatggaagggtaagcgcctaactgtgataaatgccagttagcaaaccaaaatgggttttacattaaccaatccctttgtcatgattttctgtaaatatccattttctggacttttttcaaccattgttcccctccttattccctcattgtccctttatagtgcccagtcacctctgcacaaatgaattttgagttaagttcacattataatataccccttattgaaacagttattactgattaaaatctgttcttaccacattaactagtatccagcattatttttgacacttcttacccacaaaaatgtgagctataacaaactgaatattgttttaaaatacatttgagttttggggtatttttctatgcactaatatacaagcagaataactggaa

SEQ ID NO: 558598 - DNA, 548 bp, Homo sapiens
atttcttacttacaagtttggaccgaatgaaccagaaaccccagtggatgttcttaggaatatgtawtgtatcaagatatccacgtgggaaatttggaaaacaccaatttaagttagaaatgcaaggatgtcacattttttttttaaattgttgtgtgtcaattttggtgagtggccgaagattaaaattacactttcactgactctgtttatttcactattatgtcctgctttttgctgcaagaaaataggtattgcatggaatttttatagcttttcaatgggtaagtcataattacattttcctctgaatattgaaccacctaaataaaccaacataaaatattgaaccacctaaattttaaagatctattcatcacaaattgtctaccactgccctttgagcagtagttttaggaagctatagaatacagtaattaacagttcaggcttggaatctaactacttattttggggtctctgccctgccacttactaaatgggagaccttgatcaaattatttaacaaacatatacttcagtttctc

SEQ ID NO: 558599 - DNA, 548 bp, Homo sapiens
atttcttacttacaagtttggaccgaatgaaccagaaaccccagtggatgttcttaggaatatgtattgtatcaagatatccacgtgggaaatttggaaaacaccaatttargttagaaatgcaaggatgtcacattttttttttaaattgttgtgtgtcaattttggtgagtggccgaagattaaaattacactttcactgactctgtttatttcactattatgtcctgctttttgctgcaagaaaataggtattgcatggaatttttatagcttttcaatgggtaagtcataattacattttcctctgaatattgaaccacctaaataaaccaacataaaatattgaaccacctaaattttaaagatctattcatcacaaattgtctaccactgccctttgagcagtagttttaggaagctatagaatacagtaattaacagttcaggcttggaatctaactacttattttggggtctctgccctgccacttactaaatgggagaccttgatcaaattatttaacaaacatatacttcagtttctc

SEQ ID NO: 558600 - DNA, 548 bp, Homo sapiens
atttcttacttacaagtttggaccgaatgaaccagaaaccccagtggatgttcttaggaatatgtattgtatcaagatatccacgtgggaaatttggaaaacaccaatttaagttagaaatgcaaggatgtcacattttttttttaaattgttgtgtgtcaattttggtgagtggccgaagattaaaattacactttcactgactctgtttatttcactattatgtcctgctttttgctgcaagaaaataggtattgcatggaatttttatagcttttyaatgggtaagtcataattacattttcctctgaatattgaaccacctaaataaaccaacataaaatattgaaccacctaaattttaaagatctattcatcacaaattgtctaccactgccctttgagcagtagttttaggaagctatagaatacagtaattaacagttcaggcttggaatctaactacttattttggggtctctgccctgccacttactaaatgggagaccttgatcaaattatttaacaaacatatacttcagtttctc

SEQ ID NO: 558601 - DNA, 548 bp, Homo sapiens
atttcttacttacaagtttggaccgaatgaaccagaaaccccagtggatgttcttaggaatatgtattgtatcaagatatccacgtgggaaatttggaaaacaccaatttaagttagaaatgcaaggatgtcacattttttttttaaattgttgtgtgtcaattttggtgagtggccgaagattaaaattacactttcactgactctgtttatttcactattatgtcctgctttttgctgcaagaaaataggtattgcatggaatttttatagcttttcaatgggtaagtcataattacattttcctctgaatattgaaccacctaaataaaccaacataaaatattgaaccacctaaattttaaagatctattcatyacaaattgtctaccactgccctttgagcagtagttttaggaagctatagaatacagtaattaacagttcaggcttggaatctaactacttattttggggtctctgccctgccacttactaaatgggagaccttgatcaaattatttaacaaacatatacttcagtttctc

SEQ ID NO: 558602 - DNA, 564 bp, Homo sapiens
aatctcgacttatatatgggatactttttcttccgaaaagtttcacaggtatagacacatatagacattttcattcacttacttacagaatctctactagttcccaggaaatgagtgacatgttctattgggcctacacagattcttgtaggaaacaaaattggagagcccgatgcaggcccttcytcatcaaactcttgccttttatcttccctaggtcctgcgattgttcatgtatggtacagcatggtcactcatggtgccccttccccatgcttatttgctgttcagttgaatcaaagaggtttggtgagcaagatttggtgacaagatggcagcataattttaactattcacgtaatatactttgggaattagtatctagtctttctgctgaatgagctgttctttgtaaagaagatatgtgtagagaaataagttgatatgcacgtgtatttatacatatgtgtgtaagtctgtgtataaagccttacaataacttcggtaaaagaaactggatcttttgccataccatcatggcaaattttgctataaatgttaaaa

SEQ ID NO: 558603 - DNA, 564 bp, Homo sapiens
aatctcgacttatatatgggatactttttcttccgaaaagtttcacaggtatagacacatatagacattttcattcacttacttacagaatctctactagttcccaggaaatgagtgacatgttctattgggcctacacagattcttgtaggaaacaaaattggagagcccgatgcaggcccttcttcatcaaactcttgccttttatcttccctargtcctgcgattgttcatgtatggtacagcatggtcactcatggtgccccttccccatgcttatttgctgttcagttgaatcaaagaggtttggtgagcaagatttggtgacaagatggcagcataattttaactattcacgtaatatactttgggaattagtatctagtctttctgctgaatgagctgttctttgtaaagaagatatgtgtagagaaataagttgatatgcacgtgtatttatacatatgtgtgtaagtctgtgtataaagccttacaataacttcggtaaaagaaactggatcttttgccataccatcatggcaaattttgctataaatgttaaaa

SEQ ID NO: 558604 - DNA, 558 bp, Homo sapiens
agttgtgcaagtttcaggcataaagtgagagccatctggtccttgatcttagcttctcaggacttccatggccaggccaaaccagtgaggttcatggcccagagccattcactgtgttaggcagaggggagaggtgctttctgggtgcccccatgaggctgattgtcctgatgaaatgggggctgagttcctgcccatgagttttgggaactggtgctgagttgagccttctgcttggagaaaagtcttgtgtagcatgacatagcacaaayagttctggactaaatgtcacaaatctctggatttaaacactctctcgaccgggcgtggtggttcacgcctgtaatcccaacactttgggaggctgaggagggcagatcacgaggtcaagagattgagaccatcctggctaacacagtgaaaccccgtctctactaaaaatacaaaaaaattagccgggcatagtggtgggctcctgtagtcccagctactggggaggctgaggcaggagaatggcgtgaacctgagagacggagcttgcagtgagctgagatcgcg

SEQ ID NO: 558605 - DNA, 558 bp, Homo sapiens
agttgtgcaagtttcaggcataaagtgagagccatctggtccttgatcttagcttctcaggacttccatggccaggccaaaccagtgaggttcatggcccagagccattcactgtgttaggcagaggggagaggtgctttctgggtgcccccatgaggctgattgtcctgatgaaatgggggctgagttcctgcccatgagttttgggaactggtgctgagttgagccttctgcttggagaaaagtcttgtgtagcatgacatagcacaaacagttctggactaaatgtcacaaatctctggatttaaacactctctcgaccgggcgtggtggttcacgcctgtaatcccaacactttgggaggctgaggagggcagatcacgaggtcaagagattgagaccatcctggctaacacagtgaaaccccgtctctactaaaaatacaaaaaaattagccgggcatagtggtgggcwcctgtagtcccagctactggggaggctgaggcaggagaatggcgtgaacctgagagacggagcttgcagtgagctgagatcgcg

SEQ ID NO: 558606 - DNA, 558 bp, Homo sapiens
agttgtgcaagtttcaggcataaagtgagagccatctggtccttgatcttagcttctcaggacttccatggccaggccaaaccagtgaggttcatggcccagagccattcactgtgttaggcagaggggagaggtgctttctgggtgcccccatgaggctgattgtcctgatgaaatgggggctgagttcctgcccatgagttttgggaactggtgctgagttgagccttctgcttggagaaaagtcttgtgtagcatgacatagcacaaacagttctggactaaatgtcacaaatctctggatttaaacactctctcgaccgggcgtggtggttcacgcctgtaatcccaacactttgggaggctgaggagggcagatcacgaggtcaagagattgagaccatcctggctaacacagtgaaaccccgtctctactaaaaatacaaaaaaattagccgggcatagtggtgggctcctgtagtcccagctactrgggaggctgaggcaggagaatggcgtgaacctgagagacggagcttgcagtgagctgagatcgcg

SEQ ID NO: 558607 - DNA, 558 bp, Homo sapiens
agttgtgcaagtttcaggcataaagtgagagccatctggtccttgatcttagcttctcaggacttccatggccaggccaaaccagtgaggttcatggcccagagccattcactgtgttaggcagaggggagaggtgctttctgggtgcccccatgaggctgattgtcctgatgaaatgggggctgagttcctgcccatgagttttgggaactggtgctgagttgagccttctgcttggagaaaagtcttgtgtagcatgacatagcacaaacagttctggactaaatgtcacaaatctctggatttaaacactctctcgaccgggcgtggtggttcacgcctgtaatcccaacactttgggaggctgaggagggcagatcacgaggtcaagagattgagaccatcctggctaacacagtgaaaccccgtctctactaaaaatacaaaaaaattagccgggcatagtggtgggctcctgtagtcccagctactggggaggctgaggcaggagaatggcgtgaacctgagagacrgagcttgcagtgagctgagatcgcg

SEQ ID NO: 558608 - DNA, 563 bp, Homo sapiens
atgcctcctcccgctccctctcctccttatccagggtcccttccagcttctccagggtgccttccaaggtcccttttagcttctccagggtccccttcaggagtgaagtggactgggtgcacagcctgtgctccaccccaggagcctggcagtgctgagaggagagtgtgtcacaccccacgggagggaccttttgccactggggacaatgcatttgggacacttatctatcagcaggaagttaagataccccagctgggaacagctttaaaagtaaaaagttatctattatgacatccgaggggattgcatcaattaattcgttaaatctattggtgctcctggaactttggagactttgtgtacagtggagaaaactctggacatgagttacttaacctggttttgaacctcattcctgcctttagagatctagtgtgtctgggcaaactactcaaactctctgggccacactgactttatcttgtaatgtgggcagtaataactacttcctaagatctttatgaagattctyttaaaagtagtgtctataaaactcctgg

SEQ ID NO: 558609 - DNA, 500 bp, Homo sapiens
gtgaatattggctattgaagtctccaaatattcttatattcaggtctatctctttagctctagtaataattgctttatatatctgggtgctccagtgttgggtgcatatttctttacaattattatatcctcttactgaattgacccctttattattatatagtgaccttttttctcttcttatagttttggtcttgaaatctattttgtctgatacaagtataactacttcttatcttttttgatttccattggcatagaatattttttccctccctttattttcagtctgtgtgtgtcttcataggtgaagtgtgtttcttgtgataacagatcattgtgtcttttttaaaattcattcggccactctgtctttttaatggagagtttagttcacttacattcattgttattgttgataagcaggggcttactcccgccattttaaaatttgttttctgrttgttttgttgtcttccgtcttcctttttttctgtctt

SEQ ID NO: 558610 - DNA, 587 bp, Homo sapiens
catttgaggccaggagtttgagaccagcctgggcaacatacgctggattcgtctctgccaaaaatacaaacctcagccgggtgtggtggcgtgtgactatagttccagctattcaggaggctgaggtgggaagatcgcttgaaccaggaggcagaggtcgcagtgagccaagatcacaacagtgcactccagcctgggtgacagagcaagactctgtctcataaaaacacaaacaaaagttccagcagcccataataagtgaccaagatgttttgcttgaccagactttagtcaggctcctgggcccatctgtgtacctctttgtaaaatctggttttagcaaaacaaaaaacaaacaaacaagaaaacccacaaaaccactcatccttgatatttgatcaccattatctgttcacttgctatctaacgaggtttaaggcttaggttagggatayccaatctttcagtttccctgggccacactggaagaactgtcttgggccacacataaaacccactaacaataactgataagtgcatatatctacatatatggtaaaaaaaaatctcatgttttaagaaagctt

SEQ ID NO: 558611 - DNA, 382 bp, Homo sapiens
tgcttctacttactcagccccctggagtagctgggactacaggtgcctgccaccatgcccgcctcggcctcccaaagtgctgggattacaggcctgagtcacagcgcccagcccagagtgtctttaaaatatgtcagattacgtcactgctgtattatatrccatccagtggtttcccctcccagagcgaaaaccaaagtccttacaaaggcttacatgatcccttatgattgtgtccactgttatttcactaagcgtgcttcttcctattctccccttcctcactctgctcccactgcacttacctcctcactctcctagaatgtgccaaatgccctccagtcaggggctctttgcattggccatttcctctgcatggaac

SEQ ID NO: 558612 - DNA, 514 bp, Homo sapiens
gctttgtcaacattttgggctttcctgtaccgaacagatttgcttgttgggtcgaacttgtggctattcatttattctcaccagggtaagtgttttcttttggggaatacagttgaaggacctgatgttctgtggagaaaaaaattgcaataataatgaggtaaccaattgtttttcacagtgaggtttattctttatctattaggacagaatcaagcttaatagttttaatgtcagatatttctgggtttgaatcttttcaactattaagctgtataattttgggtcacttgtcttaactgagttgcagattcctcattttttttaagtaggagaacctgctatacwgatctgaggatcaatattaaccagccaatcagctggttaattctgaaagcaagattccaaagaagcacatagaaaccacgtaactataaagattaaaaagctataaggtatgttgatctaatgctttttattattattattattcttttttttttgagatggagtc

SEQ ID NO: 558613 - DNA, 471 bp, Homo sapiens
cccttatgtagtttgactgtttactgccttagtttctcttcttgtgcagaagctctttagtttaattaggtctcacttgtcaatttttgtttctgttgcagttgcttttgaggaaatagatataaattccttgccaaggccaatattaagacagctattgcctaggttttcttctagtactttgatactttgaggtcttagacttaagttttaatccatcttgacttaatttttgcatatggtgacaggtaggggtccaatttyattcttattcttatgtatagccaattatctcagcaccattttttgaagaaggaatcttttcccctttgcttatttttgtcaaattttcaaagatcagatggttgtaggtgtgtggctttatgtttgtgctctctattctgttccattggactatgtgtgtttttgtaccagtacaatgctgtttcagttactgtagttttgtagtat

SEQ ID NO: 558614 - DNA, 471 bp, Homo sapiens
cccttatgtagtttgactgtttactgccttagtttctcttcttgtgcagaagctctttagtttaattaggtctcacttgtcaatttttgtttctgttgcagttgcttttgaggaaatagatataaattccttgccaaggccaatattaagacagctattgcctaggttttcttctagtactttgatactttgaggtcttagacttaagttttaatccatcttgacttaatttttgcatatggtgacaggtaggggtccaattttattcttattcttatgtatagccaattatctcagcaccattttttgaasaaggaatcttttcccctttgcttatttttgtcaaattttcaaagatcagatggttgtaggtgtgtggctttatgtttgtgctctctattctgttccattggactatgtgtgtttttgtaccagtacaatgctgtttcagttactgtagttttgtagtat

SEQ ID NO: 558615 - DNA, 471 bp, Homo sapiens
cccttatgtagtttgactgtttactgccttagtttctcttcttgtgcagaagctctttagtttaattaggtctcacttgtcaatttttgtttctgttgcagttgcttttgaggaaatagatataaattccttgccaaggccaatattaagacagctattgcctaggttttcttctagtactttgatactttgaggtcttagacttaagttttaatccatcttgacttaatttttgcatatggtgacaggtaggggtccaattttattcttattcttatgtatagccaattatctcagcaccattttttgaagraggaatcttttcccctttgcttatttttgtcaaattttcaaagatcagatggttgtaggtgtgtggctttatgtttgtgctctctattctgttccattggactatgtgtgtttttgtaccagtacaatgctgtttcagttactgtagttttgtagtat

SEQ ID NO: 558616 - DNA, 471 bp, Homo sapiens
cccttatgtagtttgactgtttactgccttagtttctcttcttgtgcagaagctctttagtttaattaggtctcacttgtcaatttttgtttctgttgcagttgcttttgaggaaatagatataaattccttgccaaggccaatattaagacagctattgcctaggttttcttctagtactttgatactttgaggtcttagacttaagttttaatccatcttgacttaatttttgcatatggtgacaggtaggggtccaattttattcttattcttatgtatagccaattatctcagcaccattttttgaagaaggaatcttttcccctttgcttatttttgtcaaattttcaaagatcagatggttgtaggtgtgtggctttatgtttgtgctctctattctgttccattggactatgtgtgtttttgtaccagtacmatgctgtttcagttactgtagttttgtagtat

SEQ ID NO: 558617 - DNA, 578 bp, Homo sapiens
tttaggtaggctaactcagagggaagatctggggctcaaggctgctgttcagattcttttttggccatggggtgtatccttgatgtagcactatttccctttttctataaatgtggcttacttagatctgtgctgtagtgattgttatttctcttattgatctagccacccagcaggcctaccaggccctgggctggtcttgtggggtgtctgcrtagagttttgtgatgtgaaccatcttcaggtctctcagccatggataccagcacctgctccagtggaggtggcaggggagtaaaatggactctgtgagagtccttagttgtagttgtttaatgcattagttttgtgctagttggtctccttcctggagttggtgctttcaagagagcatcagatgtggtagtatacaggagggtcaggtggtgggtggggccctagcattcccaagagaatatgacctttgtcttcagctaccagggcaggtagggaaagaccataaggtggaggcagtgtaaggcctatctgagcttagactctccttgctgcagctgcgtggggatggggttgttgtttcc

SEQ ID NO: 558618 - DNA, 571 bp, Homo sapiens
atagggtccatattacactatgtcctcacatgatataaacacatagcaattatatatattatatatatatatatamaatgtatgttcaatatgtaagtattcaaaaatatataactgcgtttaaacaaataaaaagtctgtagacaaggaaaaaaatgaaaacaaactcaaagcagaaaatggagctaaagccacaggactgttgatattctatcagaagacaggccatgatagactagatctaagctcaattgggataaaggggctaaaattgtcccacaccagaagatgaactagggccattagcactgcttgaagctggtccttaggggaggtaccaacctctcccactaaaaaataaactgggaaaataggttgtttcacatcacttccaaaaacctgaaatgtacattaaaaagaagctgcagtctcaggaataaggaggatatatgtacagttctagacctagtgactagctgacttcatgattgaatctattgttttccaaatatcactttgaaaggaagatcttaaaatttctatatgagtccagtttttgagaagatgttca

SEQ ID NO: 558619 - DNA, 394 bp, Homo sapiens
ttgtttaaaagtgtgtgacaccaccctactctctttctccctctctctctgtctcactcctgctctgaccatgtgatgtgcctgctcccscttcaccttctgccatgaatgtaaacttcctgaggcctcatcagaagccaagcagatgtgtggtgccatgcttcctgtacagcctgcagaaccttgagtcaattaagccctttttctttatgaattacccagtctcagttatttctttgtagaaatacaagaatggcctaatacactcacttattgcagagtcactctattagtccacagatgtcgaggcaacataagacattatccgtcatagtaactctccataaccacatgctatttgcatgcaaaacatgcttgcctgttgagaccatga

SEQ ID NO: 558620 - DNA, 408 bp, Homo sapiens
atgcttatcttactttaacagtaaagaatatgtaagttgttacacaaatcctcctcaaaaaatttgttcacaacttctatgattaatgtaaaatgaactacagtatcttgtacttgataggtgagagaaattttaattttstgatggcagtcttacatcatctgagtgactgaactagcaaaaacagtagcaacagcaatactcaccactaaatcaaggtaagtggagtgctgcttagaaaccacacagaaaacatatgcattttgaaacattacatatacttactctcagatggatttgcttgttttatctgttgtgttaaacagaaatatttcaaatagttcctaacaagataattgtactttccactttcagcatgtttaaaatgagaacacatggacacaggaa

SEQ ID NO: 558621 - DNA, 408 bp, Homo sapiens
atgcttatcttactttaacagtaaagaatatgtaagttgttacacaaatcctcctcaaaaaatttgttcacaacttctatgattaatgtaaaatgaactacagtatcttgtacttgataggtgagagaaattttaattttgtgatggcagtcttacatcatctgagtgactgaactagcaaaaacagtagcaacagcaatactcaccactaaatcaaggtaagtggagtgctgcttagaaaccacacagaaaacatwtgcattttgaaacattacatatacttactctcagatggatttgcttgttttatctgttgtgttaaacagaaatatttcaaatagttcctaacaagataattgtactttccactttcagcatgtttaaaatgagaacacatggacacaggaa

SEQ ID NO: 558622 - DNA, 408 bp, Homo sapiens
atgcttatcttactttaacagtaaagaatatgtaagttgttacacaaatcctcctcaaaaaatttgttcacaacttctatgattaatgtaaaatgaactacagtatcttgtacttgataggtgagagaaattttaattttgtgatggcagtcttacatcatctgagtgactgaactagcaaaaacagtagcaacagcaatactcaccactaaatcaaggtaagtggagtgctgcttagaaaccacacagaaaacatatgcattttgaaacattacatatacttactctcagatsgatttgcttgttttatctgttgtgttaaacagaaatatttcaaatagttcctaacaagataattgtactttccactttcagcatgtttaaaatgagaacacatggacacaggaa

SEQ ID NO: 558623 - DNA, 546 bp, Homo sapiens
ttaaagtgcaggtgattttttttcattttttctttgtttatattattttatttttaatttatggtaagtgatcatcacttataaataacttgtaatatctgtaagatgttttgtctcattgtaaccacaatgcaaaaatctatactagatwcactaaaaataaaaagcaataaatgaaaacatactaccagagaaaatcacaaagaaatataataaaaaaggaagaaaggaagagaagagttataaaataacaagaaaataagcaagataatggcattgctcagtccttactaatcaataacaataaatgtaaatagactgaatttggtaataaaaagactggaaggatgaatggacaaaaataataccctgttgtattctgcctataagaaactgacttcacctataaaaacacatagactgaaatggatgaagaaagagatttaatgcaactggcaaccgaaaaagagcaaaagtagctataattgtattagaccgtaaaaggaaacaaaggaaggttactatataatgataaacgggtaaatt

SEQ ID NO: 558624 - DNA, 546 bp, Homo sapiens
ttaaagtgcaggtgattttttttcattttttctttgtttatattattttatttttaatttatggtaagtgatcatcacttataaataacttgtaatatctgtaagatgttttgtctcattgtaaccacaatgcaaaaatctatactagattcactaaaaataaaaagcaataaatgaaaacatactaccagagaaaatcacaaagaaatataataaaaaaggaagaaaggaagagaagagttataaaayaacaagaaaataagcaagataatggcattgctcagtccttactaatcaataacaataaatgtaaatagactgaatttggtaataaaaagactggaaggatgaatggacaaaaataataccctgttgtattctgcctataagaaactgacttcacctataaaaacacatagactgaaatggatgaagaaagagatttaatgcaactggcaaccgaaaaagagcaaaagtagctataattgtattagaccgtaaaaggaaacaaaggaaggttactatataatgataaacgggtaaatt

SEQ ID NO: 558625 - DNA, 532 bp, Homo sapiens
aaaagtagctataattgtattagaccgtaaaaggaaacaaaggaaggttactatataatgataaaygggtaaattcagcaagaggacttaacaatgataaatatatatgcaccctacaccaagccacccaagtatttacagcaaaattaattgatctaaatggatagaaagactgcaatacaatcatactagggacttcaacaccctgctctcagtagtggacagatcattcagatgatcaacaaagaaacatccaagttaaactattaatacacactagaccaatcaggcctaactgatatttacagaacatttcacccaactgctgcagaatacacattattttcatcagtacatggaacattctccaatacagaccatatgttaaaccacaaaacgagtctcaaaaaattcaaaaagtagacattatatcaaatatcttgtcttaccaaaatggaataaaattagaaataaaactagaaagaagaaccttggaaactatgcaaacacatggaaattaaacaaaattctc

SEQ ID NO: 558626 - DNA, 532 bp, Homo sapiens
aaaagtagctataattgtattagaccgtaaaaggaaacaaaggaaggttactatataatgataaacgggtaaattcagcaagaggacttaacaatgataaatatatatgcaccctacaccaagccacccaagtatttacagcaaaattaattgatctaaatggatagaaagactgcaatacaatcatactagggacttcaacaccctgctctcagtagtggacagatcattcagatgatcaacaaagaaacatccaagttaaactattaatacacactagaccaatcaggcctaactgatatttacagaacatttcacccaactgctgcagaatacacattattttcatcagtacatggaacattctccaatacagaccatatgttaaaccacaaaacgagtctcaaaaaattcaaaaagtagacattatatcaaatatcttgtcttaccaaaatggaataaaattagaaataaaactagaaagaagaacctyggaaactatgcaaacacatggaaattaaacaaaattctc

SEQ ID NO: 558627 - DNA, 539 bp, Homo sapiens
atttcctttccaaactgatatttttaaactttctgtactatttttatttaaattggtttctcatagaaaatgtactgtgatatttttggttttgttttgtttttcatccaatattaatctatcattttctgagtaaggtaaatgaaagcaccccactatgttctggcattttctatttcttctagaatactagaaatgtctgctttatgtattttaggttatgtagtttgctcaaaaattcatcatgaatttgatcttgtttttgttatcactgcyttttttcctttttgtcctacgtttatagaattcctgataatatcaagggacctcaggaaagtcagtccctttttcacttgcaaaataaaaacaaataaccattaacatttttctgtatctgttagaatcctctggagagtattacttccttttcataatattttgagttataaataaactaagatttgaagtccaactgagcattggtttaagaacaatctaaaatgcggcagcattttgcagtattcgtcaatattaagtag

SEQ ID NO: 558628 - DNA, 539 bp, Homo sapiens
atttcctttccaaactgatatttttaaactttctgtactatttttatttaaattggtttctcatagaaaatgtactgtgatatttttggttttgttttgtttttcatccaatattaatctatcattttctgagtaaggtaaatgaaagcaccccactatgttctggcattttctatttcttctagaatactagaaatgtctgctttatgtattttaggttatgtagtttgctcaaaaattcatcatgaatttgatcttgtttttgttatcactgccttttttcctttttgtcctacgtttatagaattcctgataatatcaagggwcctcaggaaagtcagtccctttttcacttgcaaaataaaaacaaataaccattaacatttttctgtatctgttagaatcctctggagagtattacttccttttcataatattttgagttataaataaactaagatttgaagtccaactgagcattggtttaagaacaatctaaaatgcggcagcattttgcagtattcgtcaatattaagtag

SEQ ID NO: 558629 - DNA, 538 bp, Homo sapiens
aacatgatatatcttaacagaagactggatatataaaaattacatactcaaagtaagaacaaaataaagccattaaaaatagagtaacaaacctagatacattcacaggaaagataaatcagaaattgtgctaaataaaaagaaaagtttcaaaatgtaatatttttataaaaaagtaaacagttttgagtaytttaagtatgatagatgcgtataaatgaatatatacaggtctcaaagaatgcatatcttattaatggcattttattactgtttctgtggaaagtaaacagaatgacatagaatgaagaactttcatactgtatgaatttttgtgttctctgacttacttaacaaaaataatgttttaaattttataagtgtataaaaagaaggcaagaaaggggaaaaggaaatttttctttaagaaaaaaaaactctcttaaaagatatttttagtaaagaatgaaagaaaaagagagaaggaaaaaaaaaatacaacgtactctgatgctagatccagagaagaaatgtaaga

SEQ ID NO: 558630 - DNA, 617 bp, Homo sapiens
aaaagaggtttaattggacaggctgttaaggcagcatgactgggaggactcaggaaacttataatcatggtaaagttgaaggggaagcaagcatgtcttaccacagtggagcaggagagagagagagaaaagggggaggggmcaaacacttttaaatgataatatctcatgagatcaacaaggtggaaatctgtccccatgatccaatcacctcccactagacccctcctctgacatatggagattacaagtctatatgaggcttgggtggggacacggagccaaaccattatcagctggtgcactgtcataaagacatcatataaagagctcagaatgggaataattaggcttctattagccatcagtttcaggggacaaacactgatgtttaagatgctctaaggtaaaagctgctccaaatgtgggaagcccaataagaagagtcctccacgtaagtttacctatagttcacccaaacacatgagcatttaactatgaagcaatttgtacttgaatatgaacaagagttttttcatatctatatgtattattttacagataactacacacacatattatcaatagctatatctgtctagacctagatatagata

SEQ ID NO: 558631 - DNA, 549 bp, Homo sapiens
ctcttgctatgctttagcaaagagactggtgacattttgcccctgtcctagagatctgtgctactttgaacttaagagagctaatttaggatatctactggaagaaatttctaagtcaaaagcattcaagaagaagcagagcataaaagtttagaaaatttgyagcctgacatgaggtggaaaagaaaaatccatttctgtttctctctattttttttattttttgagacagagtctcgctctgtcacccaggctgaagtgccatggcatgatcttggctcattggaacctctgcctcctgggttaaagtgattcttgtgcctcagcctcccaagtggctgggattgcaggtatatgccaccaaactcagctaatttttgtattttaatagagatggggtttcaccatgttggccaggttggcctcaaactcctgacctcaggtgatctgcccacctcagcctcccaaagtgctgggataacaagcataagctaccatacccagcataaaaacccattttctggggagaaatttaatctggctgcagaa

SEQ ID NO: 558632 - DNA, 628 bp, Homo sapiens
gtttgggggcaaggggagggagagcattaggacaaatacctaatgcatgcygagcttaaaacctagatgacgggttcataggtgcagcaaaccacatggcatgtatatacctatgtaacaaacctgcacgttcagcacacgtataccagagcttaaagtaaaattttttaaaaatgtggaaaattaaaataaatcagctaaatgttatactccagaaggtaggaaaaataaagataagttgaggagaaaactaaatatagaaatagaaattaatgaaataaggaaatattcatcaatgaaacagtgatttggaagatggatttgtcaataaatgaagttgaggaacttgcgtaaaaatctcttcatccatactcctttcaatatcccaagaagaattctaaatacaaaagatatgtacattaaaatggttacatttttaaaacccagaagaaaacattgggattacttttataatctccgagtaaggtctttctaaattatgacacataatatagaaatcatatcaaaattaaatataatatattcgattactttaaaaatagcaaattatagtagtaataataatacaaaaattataatctaggaaaaatgccttaactcatcatag

SEQ ID NO: 558633 - DNA, 628 bp, Homo sapiens
gtttgggggcaaggggagggagagcattaggacaaatacctaatgcatgccgagcttaaaacctagatgacgggttcataggtgcarcaaaccacatggcatgtatatacctatgtaacaaacctgcacgttcagcacacgtataccagagcttaaagtaaaattttttaaaaatgtggaaaattaaaataaatcagctaaatgttatactccagaaggtaggaaaaataaagataagttgaggagaaaactaaatatagaaatagaaattaatgaaataaggaaatattcatcaatgaaacagtgatttggaagatggatttgtcaataaatgaagttgaggaacttgcgtaaaaatctcttcatccatactcctttcaatatcccaagaagaattctaaatacaaaagatatgtacattaaaatggttacatttttaaaacccagaagaaaacattgggattacttttataatctccgagtaaggtctttctaaattatgacacataatatagaaatcatatcaaaattaaatataatatattcgattactttaaaaatagcaaattatagtagtaataataatacaaaaattataatctaggaaaaatgccttaactcatcatag

SEQ ID NO: 558634 - DNA, 626 bp, Homo sapiens
ccttgctgtgctgcagtgagctcctcccagtttcagcttccaggatgctttgtttacactgtgagctactcaagcctcagcaatggctgatgcccctccccctgccaagctgcagcatcacaggttgatctcagactactgtattagcagtaagcaagctctgtgggtgtgggacctgcccggccaggcatgggagggtatctmctggtctgccggttgctaagactgtgggaatagcacagtatttggtcaggagtgtattgtttctccagttatagtctgtcccagcttcccttggctaggaaggggaaatccctccaccccttgtgcttcctgggtgaggagatgcccccccctgcttcagcttgccctccatgggctgcacccagtgtccaaccagtctgagtgagatgaaccaggtaccttagttggaaatgcagaaatcacccatcttctgtgttgatctcactgggagctgcagactggagctgttcctattcggccatcttgcaaaaatatgtatattttttaacaataaaggagacatagttacaaataaaaaagtaatatgacaaataacaaaacttttatgccaataaatatgaaaaattttaaataaaaaatca

SEQ ID NO: 558635 - DNA, 621 bp, Homo sapiens
ttttccttcagccctttaaatatgtcatgccatgctctcctggcctgtaaggtttccactaaaaagtctgctctgaatgtattcaagctccattgtatgttatgtatttctttacttttggcgcttttaggatcctttctttatccttgacctttgggaatttaattattagatggcttaaggtagtcttctttggattaaatctgcttaatattttataaccttcttctgcttgaatgttgatgtatttctctgggtttgggaaattctacattattatccctttaaataaactttatacctctgtttctttctatatctcctctttaaggccaataattcttagatttacccttttgaggctattttctacatgctgcagatgtgtgtcactgtttttcattcttttttcttttgtctccyttgaccatatattttcaaatagcctgtcttcaagctcactaattctttcttttgcttgatcagttctgctatttaaaaactttgatgcatttttccatgtgtcaatttatttttcaactccagaatttctgctttattttgttaaatttatcagatagaattctcaattatttccctgtattgttttgaatttctttg

SEQ ID NO: 558636 - DNA, 402 bp, Homo sapiens
ttttttttttcaaagagacaggcttttgccatgttggccaggctggtcttgaactcctgacctcaagtgatctgtctatctcggcctcccaaagtactgggattataagcatgagccaccgcacccagccacctctttttttttttttttcaaacaaraatctatacatacgtaactactatggttacaaaattaagatttaaaaaactgtaaaaagtggtaccaccaaaataaatttgttaattctcacaattgactttatttcatccaagccctctagttatttttctaaacaactcaatattccaagttcatctcccaaagctgtgaccacaataatgaggagtacgtagctcccacttctggtcttaccctggtcatttacaatgtgactggaggagc

SEQ ID NO: 558637 - DNA, 402 bp, Homo sapiens
ttttttttttcaaagagacaggcttttgccatgttggccaggctggtcttgaactcctgacctcaagtgatctgtctatctcggcctcccaaagtactgggattataagcatgagccaccgcacccagccacctctttttttttttttttcaaacaagaatctatacatacgtaactactatggttacaaaattaaratttaaaaaactgtaaaaagtggtaccaccaaaataaatttgttaattctcacaattgactttatttcatccaagccctctagttatttttctaaacaactcaatattccaagttcatctcccaaagctgtgaccacaataatgaggagtacgtagctcccacttctggtcttaccctggtcatttacaatgtgactggaggagc

SEQ ID NO: 558638 - DNA, 402 bp, Homo sapiens
ttttttttttcaaagagacaggcttttgccatgttggccaggctggtcttgaactcctgacctcaagtgatctgtctatctcggcctcccaaagtactgggattataagcatgagccaccgcacccagccacctctttttttttttttttcaaacaagaatctatacatacgtaactactatggttacaaaattaagatttaaaaaactgtaaaaagtggtaccaccaaaataaatttgttaattctcacaattgactttatttcatccaagccctctagttatttttctaaacaactcaatattccaagttcatctsccaaagctgtgaccacaataatgaggagtacgtagctcccacttctggtcttaccctggtcatttacaatgtgactggaggagc

SEQ ID NO: 558639 - DNA, 555 bp, Homo sapiens
ggcttaattgagaatggatatgatataggaaagcatgcatctttaaagatgtgcaataataattatctgatgtgaaaaacagattttaaaaattaaaaaaagacccaaatctcagggacatatgagaaaatatgaaaagatttaacaaacatataacttttaatccagagaaataagagagaatgggatagaaaagaaaatgtttgaaaaaagctttaactatcttcaaaattctcagagacataaatatacaggctcaagaagctcagtaaacttcatgaagaataattttgtaactactatcagcattattgataatgctaacaatatatttattaacactaagaaaataaaaacaaaagcaatacagaaagatttagagaaatattaatcaccaaccagaaaaaaaaaggcataagatgtgaaggctgaatcctccatccaggaaataaaatgtgtttgaaaaataaacacattattacataatctcaaaatgaaagaaaactaagagcattttctgcaagaactatccaacwagaaatgttaaaggaattc

SEQ ID NO: 558640 - DNA, 602 bp, Homo sapiens
ttcatccacaaaacaaaaataaattactatcaaattttaataatgttaattctaaattgattacaattttccatgtgtatttgtatagagatctatacatagtagtattttatattcagtggtactaaggaaagtaaattttcatattagctttcattctttttaacaaaacaaaagcagttactatgatgatgatgtattcttagktgagattccctcctaacctcattgcaagtaattcaatagatggcattcttttatttttcaacctgacatttatcaaaataacttaaaataatataagaatcttaaaacaatgtatattgtcacatattttacttctatgttttaaacttcacaatttatcctgagcattttgacttatgagacaataattcctaaagaaattaaaaattgagaaaaatagtttatgtatatgcatatatttaccacttctgccactcttcatttctttatttagattcaagtttccatctgccattattttcctaaagtgagaacaattttttagaatatttctttcagttcaagtttgtttgtagtaagttctcaaagtttttgttttctgaaaataatttttt

SEQ ID NO: 558641 - DNA, 602 bp, Homo sapiens
ttcatccacaaaacaaaaataaattactatcaaattttaataatgttaattctaaattgattacaattttccatgtgtatttgtatagagatctatacatagtagtattttatattcagtggtactaaggaaagtaaattttcatattagctttcattctttttaacaaaacaaaagcagttactatgatgatgatgtattcttaggtgagattccctcctaacctcattgcaagtaattcaatagatggcattcttttatttttcaacctgacatttatcaaaataacttaaaataatataagaatcttaaaacaatgtatattgtcacatattttacttctatgttttaaacttcacaatttatcctgagcattttgacttatgagacaataattcctaaagaaattaaaaattgagaaaaatagtttatgtatatgcatatatttaccacttctgccactcttcatttctttatttagattcaagtttccatctgccattattttcctaaagtgagaacaattttttagaatatttctttcagttcaagtttgtttgtartaagttctcaaagtttttgttttctgaaaataatttttt

SEQ ID NO: 558642 - DNA, 530 bp, Homo sapiens
cttgctctccttgctcctcaagcttgcagacagtctattgtgggaccttgtgaccatgtaagttattacttaataaactcctgtgtgtgtgtgtgtgtgtgtrtgtgtgtgtgtgtgtgtgtgtgtatcctatcagttctgtccctctagagaaccctaattcacattgtgtttgattttattgagtttatggatttattgttttatatttttcaacaaataaagacatttttcagcccttgcttgtaaatttacttttatgcttgtatcctgtctttttcttctggggctccacttatatttatgttaggccacttgacattgtttcatagagcagtgaggtgttgtcaatttttcaggctttttcctctctatttgtttcagtttggataactgtattgcccagcttcaaaatttattattaattttttggctctatctaatctgctgtttgtccatttagcggattttttaaattttcagatattgtatttttcatgtctggaagtttccttttgttttttatatct

SEQ ID NO: 558643 - DNA, 530 bp, Homo sapiens
cttgctctccttgctcctcaagcttgcagacagtctattgtgggaccttgtgaccatgtaagttattacttaataaactcctgtgtgtgtgtgtgtgtgtgtgtgtgtgtgtgtgtgtgtgtgtgtatcctatcagttmtgtccctctagagaaccctaattcacattgtgtttgattttattgagtttatggatttattgttttatatttttcaacaaataaagacatttttcagcccttgcttgtaaatttacttttatgcttgtatcctgtctttttcttctggggctccacttatatttatgttaggccacttgacattgtttcatagagcagtgaggtgttgtcaatttttcaggctttttcctctctatttgtttcagtttggataactgtattgcccagcttcaaaatttattattaattttttggctctatctaatctgctgtttgtccatttagcggattttttaaattttcagatattgtatttttcatgtctggaagtttccttttgttttttatatct

SEQ ID NO: 558644 - DNA, 559 bp, Homo sapiens
gagcccaatccctagagataagaataaaaattgtgatatataaacacagttgagaaaaacaaaattttccgtatcctggggccttttattacagttgtaacccttctcaattttttttttttttttttttttttaagatgggatcttgctctgtcagccaggctggagtgcaatggctccatcttggctcactgcaaccttagcctcccaggttcaagcgattctcctgcctcagcttcctaagyagctgggactacaggtgtgcaccaccacgcccagcaaatttctatatttttagtagagacgggctttcaccatgttggtcagtctggtctcaaactcctgaccttgtgatccgccctctcagcctcccaaagtgctgggattacaggcatgagccaccatgcctggccagccctctttaattttaaaactgaaatagggaagattaagataaagttacaatttattaatttgcatatattagtaaatttcttggtcctaatgagcataataatccaaaattacaaaattattttcagttaaaagtttcaagaga

SEQ ID NO: 558645 - DNA, 568 bp, Homo sapiens
attttgatgaaagaaaaaaattaaaaatgtgtggaaatacacagtttcagcactgatgagcaaaaatcttggaagctgttgagctcttcctttaaaataataaaaaagcaatcaaactgaaaattaataacttttctggaacacttcagagaacagaagtaacactggatacaaccaacccagaatcagaggtagcaggtgaatacacagaatcatrgtagaaatctatttataagaagcctcaactgatggagacatacaatggtaggagcattttattgggcattttgatcacttgctggagatggagtatggactaacctgagagtgaaaatgtccaactggctgaagtcttaaaagtgttctggttttacatccagaaattttccaagatgtcattgttaagagccaagaaggtttctcccagagctctggcaggggaatggtggaacaaccattttaaaatacacccagagaattttccataacaaatgcctactcccttggaaccaagaatttaccaaagccttatcctaactatgaagaaatacatttacccaatttgaac

SEQ ID NO: 558646 - DNA, 532 bp, Homo sapiens
atatatttcatgtattttatttactcaatgcacaaaatcaccaatgaaatattttactttttttttttttttttttgaggcagggtctcagtcgcccagggtggagtgcagtgctatgatcacagctcactacagcctcaacctcctgagctcaagcaatcctcccacctcagcctccctagtagcagggactacaggcatgcaccaacatacccaccgaatttttgtatttttttttaaagaccaagtctccgtgtgttgcccaagctagtctaaaactcctggrttcaagagatcctcctgccttggcctcacaaagtgctgggattataggcatgagccaccatacccagccttactttttcatactcatttcttcagcatatattttacatttacagcatatctcaatttggactcgccttatttcaagtgctcaatagccacacgtggctagtgtctatgaaactggacactacagagtgaataagaatggaaaagaacaaagcagacagaaatgttaaatgtaggc

SEQ ID NO: 558647 - DNA, 475 bp, Homo sapiens
caagggtaaccaaactcagagacatcaacttctctctccagcctccacatcctggtgagagaaactaacctatcctgtgggtcagtgagaatctaagtgaggcttagaagcttatacaaacatacatatctataaaagcattcctatgatgttctmttctcttaaaaactcttccagagactcttctaaaggaatttaaaatacaagtttctgaacagatatagaataccattagttcactggccaagtaataatccacaggctggtatattttaaattcataacagtgtactctgtgcctactaaggtagagaggacacctcccggattcaaatgatcctcctgcctcagcctcctgagtacccgggattacaggcacatgtcattatgctggccaatttttgtatttttagtagagatggggtttcgccatgttggccaggctggtcccgaactcctggcctcaggtgatctg

SEQ ID NO: 558648 - DNA, 475 bp, Homo sapiens
caagggtaaccaaactcagagacatcaacttctctctccagcctccacatcctggtgagagaaactaacctatcctgtgggtcagtgagaatctaagtgaggcttagaagcttatacaaacatacatatctataaaagcattcctatgatgttctcttctcttaaaaactcttccagagactcttctaaaggaatttaaaatacaagtttctgaacagatatagaataccattagttcactggccaagtaataatccacaggctggtatattttaaattcataacagtgtactctgtgcctactaaggtagagaggacacctcccggattcaaatgatcctcctgcctcagcctcctgagtacccgggattacaggcrcatgtcattatgctggccaatttttgtatttttagtagagatggggtttcgccatgttggccaggctggtcccgaactcctggcctcaggtgatctg

SEQ ID NO: 558649 - DNA, 577 bp, Homo sapiens
ctgtgtccatgatacccctggcttggatagaatgttgcatgaggtaccatggcaacattttgtgaacaaacatgtattttggagtagcaaggacttcattgaaaggatctagatggtttggtgatgtargccattgatggaataatgtagtatgtttaaagatgacttttttttccttcttaaaaaattatttccataggtttttggggaatgggtggtgtttgattacatgaataagttctttagtggtgatttctgagattttggtgcacctgtcaccactaaagaactgtacccaatgtgtagtcttttatccctcactcctttctcaccatttccctgattccccaaagctcattatatcattcttatgccttcgtgtcttcatagcttagctcctactaatgagtgagaacatatgatgtttgtttttccatttctgagttatttcagttagaataatcgtctccaattccatccaggttgctgcaaatgccattatttcattcctttttatggctgagtagtattccatggtatgtatctaccacactttctttatccactcattgattga

SEQ ID NO: 558650 - DNA, 577 bp, Homo sapiens
ctgtgtccatgatacccctggcttggatagaatgttgcatgaggtaccatggcaacattttgtgaacaaacatgtattttggagtagcaaggacttcattgaaaggatctagatggtttggtgatgtaggccattgatggaataatgtagtatgtttaaagatgacttttttttccttcttaaaaaattatttccataggtttttggggaaygggtggtgtttgattacatgaataagttctttagtggtgatttctgagattttggtgcacctgtcaccactaaagaactgtacccaatgtgtagtcttttatccctcactcctttctcaccatttccctgattccccaaagctcattatatcattcttatgccttcgtgtcttcatagcttagctcctactaatgagtgagaacatatgatgtttgtttttccatttctgagttatttcagttagaataatcgtctccaattccatccaggttgctgcaaatgccattatttcattcctttttatggctgagtagtattccatggtatgtatctaccacactttctttatccactcattgattga

SEQ ID NO: 558651 - DNA, 590 bp, Homo sapiens
aaattcatcttttaaccaacatacatgctaaatctaccaatgaatgacagttgtttaatgacagaggccactttttctctgcatagaaacaatggcacatcattcttccctttgtttccttttagaatactgtggttattttcattagggttgtataagcaaccagtttttggattttttttttatattttagcacccttttagatcattttggtgcaaatctgtttctacttagtatcatatatatttaaaatcttccttataacacatataaactggcagtaaaytctgtcagctttcctttggctgaaaagtctttccttccttcattttgcaaggccgttttgcgtagcataattttgaattgagaaattattttttcttgaagtatttgctaaaggtcattctattgtctttgggcttgtatggttttacaatgaaagcctactgtgtttttaacctatgtttatctgtatgtaacctgtcatatttgtctggctgccttcaatattctttatatctttgattttcagcagcttaaaaatgaaatgtctgggtggtgtgttgtgtgtgtgtgtgtgtgtgtgtgc

SEQ ID NO: 558652 - DNA, 587 bp, Homo sapiens
tgaatattacaaattgtttaaaaaatttaactttcttaaaacttaaaattacttaaaaaatttaaagacatttttatcaagaacactttttgccatcattggattgctaaaccttcattgtggttgtattaattctatttctgtataacaaattacccccaaacttagcaacatcaaacaacaaacatttattatttcagtttctttggatcaggaatctaggctcagcttagttgtgtcctctgggtcagtctctctcacaaggctgcaattaaggtatcagccaggattgcagtcatcctaaggttcaactaggggaggatctgcttacaagcttactctcytggctcttggcaggcctcagatccttaccgactgttcaacagagacgtgagttcctgcccagggacatgtaggcctctctgccaggcagcctacagtgtgacagttggtattccttagagggagtgagggaaaaagcaagagagaatttaagcaagatggaaaccagtctttttataacttaacatggaactgacatctcatcatttttgccatattattttggttagaagagtcagtaggta

SEQ ID NO: 558653 - DNA, 574 bp, Homo sapiens
ttctgaggaaccaccatactgttttccacagcagctgcaacatgttacatttccaccaacagtacacagcttccagtttctccacatccttgccgacatttgtctatttccattttgttgtttgttttytatagtagccatcctaatgtgtgtgaaggtggtatctcatttggtttttatttgtatttctctgatgactaatggggttgaacatcttttcatatgcttattggccatttgtatatcttttggagaactgtctatccaagtcctttgcctattttctaatcagtttatttttgtgtgtgttgttgggttttagaagttctctctatattctgtgtattaaccccttgctaaatatgtgatttgcaaatattttctcccatactggaggtggcttttttactctgttggtactgtgctttgaggcacaaaaattttaaattttcatgatgcccaacttgtctattttttcttttctttcttttctttttttcctcgctctgtcacccaggctggagtgcagtggcacaatctcggttcactgtaacctctgcctcctgggttcaag

SEQ ID NO: 558654 - DNA, 574 bp, Homo sapiens
ttctgaggaaccaccatactgttttccacagcagctgcaacatgttacatttccaccaacagtacacagcttccagtttctccacatccttgccgacatttgtctatttccattttgttgtttgttttttatagtagccatcctaatgtgtgtgaaggtggtatctcatttggtttttatttgtatttctctgatgactaatggggttgaacatcttttcatatgcttattggccatttgtatatcttttggagaactgtctatccaagtcctttgcctattttctaatcagtttatttttgtgtgtgttgttgggttttagaagttctctctatattctgtgtattaaccccttgctaaatatgtgatttgcaaatattttctcccatactggaggtggcttttttactctgttggtactgtgctttgaggcacaaaaattttaaattttcatgatgcccaacttgtctattttttcttttctttcttttytttttttcctcgctctgtcacccaggctggagtgcagtggcacaatctcggttcactgtaacctctgcctcctgggttcaag

SEQ ID NO: 558655 - DNA, 537 bp, Homo sapiens
ggaagggcagggaggatataaggcagccagctgagccagtgcaagtgtccaagtgagaggtgagggtggcctggactaggcggcagtagtaaagatgaagagaagtggatggattcaacagatacttgagaggcaaaattggcagacaataaaggtgagagaggtgccaagagccttctagtgtgtacaaccaggtttcaagtggtgcagtccactgagcctgagagccccggaagaagatcagggctagaaaactgacctgcaatcttgctaggtccacgtaatactattcagcataaaaacagggttcttttggaggaaccagcatacactctaggactgggagcatatcttccactcacaatctttttcacttgggtttggtaaaccttaattttctatgtgcaaggtgatggtaaaagactkatcctcggaggacaggcgcagtggctcacgcctgtaatcccagcactttgggaggccaaggcagccggatcacttgcagtcaggagttcgagaccagcctggccaacatgg

SEQ ID NO: 558656 - DNA, 606 bp, Homo sapiens
aaagggatgaacaatataaaaatatgtaaatcatgacatcaaaaatttaaaacgagggtgtatagaaaagtgtaatgttgttttatstgattatagttaagttgttatcagcttaaaatagtctgttataagatattttataataaccataaacaaaaaacccacagtagatatgcaaaagataagaaggaatcaagatatactgctagagagaaacacctaatcaaaaaggaaaacaataaaaaaggaagaaagaaacaaagaacctataaaacaactagaaaacaacaaaatggcagtggtaagtccttatctatcaacaattacttggaatgtaaatgccataaattatttaactgaaaggcatagagtggtagaatggattaaaaataaaagactcaactatatgctgcctacaagagatttacttcacctttaagaatacatatagactgagagcgagggatagaaaatgatatttcatgcaaatgaaaaccaaaagagagcaggagtacctatatttaaagtaggcttcaagccaaaaactataaaacaagaaggacattatacagatactcctcaacttatagtgggattatgttctga

SEQ ID NO: 558657 - DNA, 583 bp, Homo sapiens
tgataagtaatatggaatttgaattacatatgtcccactttaggtaaagaagttaagctctccatcttacaaggctgtggataagaaaggcttttaacttttttttttttttttgtcaacacctaagaaaaaatgtaatatttattcttctggatagagaaggaaaaaatatatatatatttctagagttttcctcaggcacatatctactaccacgctacatcacatctttcagaatttgaattggataagctttcttgccactgtttttaaaataaaaagctctagaccctcttcattccatataaaattattgcacaaaatactttcagtgttctctttcaaattgtacctgttgtgcttattagttttatataaaagcaaatagtgacaaagtagatgcaaaagaaaagttactaayacattattagaagttcagaattttaagggtagccagaggagctaatttagaaacaacagaaactaaagaaattcttaaaattaaaaacagaaacaataactgtattattatgattacagagttcataccctcgctctgttcttcattctctcagatacgaag

SEQ ID NO: 558658 - DNA, 590 bp, Homo sapiens
ctgtaagagaaattaagaatgccttttacgggcttactggtagactggacatggctgagaaaaagaaaaaacaacaacaacaaaaaactccaatcttgaagatatcccatcagaaactgccaaaactgaaaagctaaaagataaaaggcgaagaaaaacataatagaatatctaagaactgtgggacagctacaaagtttgtaacatacatgttatgggaattccagaagcagaagagaggaagaaagataaagaaaactaaattctttttttttttttttaaggcggagttttgcttttgcctaggctagagtaaagtggcgcgatcttggctcactgcaacctctgcctcctgggttcaagcgattctcctgcctcagcctcctgagtagctgggattacaggtgcccaccaccatggctggctaatttttgtattttcagtagagacagggttttgccatgttggccaggatggtcttgaactctgacctcaggtgatccacctacctctgcctcccaaastgttgggatgacaggcatgggccactgcgcctggcctactaattctttttataaagcctgtataac

SEQ ID NO: 558659 - DNA, 365 bp, Homo sapiens
tgttgaccaggctggtcttaaactcctgacctcaggtgatctgcctgcctcagcctcccaaagtgctgggattacaggcgtgagccaccgtgcccggcctcttcccattattttggaactggccttgctgtaacccagtmtcctgcttctttctcaggatacccagagccagaggtgacctggtacaaggatgatacggagctggaccgctactgtggcttgccaaaatatgagatcactcatcagggcaaccgccacacactgcagctgtacaggtgagggagaagggcctgttttgctctctctgccctcccgagggccctctggctggggtcctgccctcagaaatggagcagtctggatgg

SEQ ID NO: 558660 - DNA, 410 bp, Homo sapiens
gaagtggtctactgaggatgtgtgctttttactcttcatgaattttacctcaaagaagaaaaagaagaatgaagagaaagaggaaaaggaggagggagagcaggaggagaacaaaagaggaggagagaaaggaaaagtgtaaacaaatgagctctggttaatgatatgattgctgaagtgtttaggagtgaagggcattaacatctacaacttaactttaagtgcatccaaaaaataagatggactratggataaacagagggatggatgtgtgctaaagcaagtaagtatattcaaatgttaatatggcataggtggtgggtagacctgtgctcactgcaatattttttaaatgttttaaatttccatcttgagaaaatagaggtgttctactaagataaaataccaaa

SEQ ID NO: 558661 - DNA, 345 bp, Homo sapiens
aacttatagtggagtaatgtgtttaaacttgtggggaaaactactttatgagaaaggctgattttccaacatcctcttaaggagatatggttttggttttatggaagaatggtttctaagctacatttcttcttctttttttttttttttttttgagacggagtcttgcactgtcamccaggctggagtgcagtggcgcgacttcggctcattgcaacctccaccacctcccaggttcaaacgattctccttgcctcagaatcccaagtagctgggattacaggtgcctgccacgatgcctggctgttttttttttttctatttttagtagagacagggtttcac

SEQ ID NO: 558662 - DNA, 345 bp, Homo sapiens
aacttatagtggagtaatgtgtttaaacttgtggggaaaactactttatgagaaaggctgattttccaacatcctcttaaggagatatggttttggttttatggaagaatggtttctaagctacatttcttcttctttttttttttttttttttgagacggagtcttgcactgtcacccaggctggagtgcagtggcgcgacttyggctcattgcaacctccaccacctcccaggttcaaacgattctccttgcctcagaatcccaagtagctgggattacaggtgcctgccacgatgcctggctgttttttttttttctatttttagtagagacagggtttcac

SEQ ID NO: 558663 - DNA, 485 bp, Homo sapiens
ttgatggtagagggttccagatgttacagagtcagtaggagaacagaagtggataacagggaataaaatgcaaggtacagtgcaagaacctgaaactcccaatctcagagatacttgaaagtttctyctatgacccaaatacatcctcaatttttgaaagagtatgaaataaccaactgcataataacatgcaagatgtacacaacttaagagtaagcagagagggattcccgacttttctattagcaggttttatatgcacagaaagactgataaatattaaggtcaataaatggccaagtgccaaaaaaaaaaaaaaagaaaagaagaagggtatcatatgtaaaattttatgcttctgttttggttaggatacgtgtgtttgcgtgtatttatttgtgtctgtgtgatgtacatacatgtgatgtaagatacttttttctgtttgagacagagtcttgctctgtcacccaggctggagtgca

SEQ ID NO: 558664 - DNA, 600 bp, Homo sapiens
tggctttacttggctggtgccatgacaactgcacatgtggcaacaaaggaaagtgagcgggaasagtcatattgagtggacctggctgttagccacctgcatttacttctgcaagcctgtaatttacatacctatgcttccagcatggcttttcaggctgctttctgttagaaaagaaatggtttgggggctgcttttttattaaaaggaaaagcctttctgaggactcttttaccctttctagctgcctaaaaataatttcttaataactcctgtattaatagtggggtctaatgtgagaaattaggtacttataaaatttttcaagtatagaagaccattatttatgctgggcatctattatagaaattgttaccagaaaaacactgtagaactaacctgctaagtgacctatccctgccataaccaggagactgagaggacaagaaaccactttcccagctcttggctcagggaacacatcaatcagccatggtctggcatgaagagaattgtagagagcacctctcatgttattgtctctctaattattttttctaaattaaattttgtatgagtatatttgatagaatctgtaat

SEQ ID NO: 558665 - DNA, 600 bp, Homo sapiens
tggctttacttggctggtgccatgacaactgcacatgtggcaacaaaggaaagtgagcgggaagagtcatattgagtggacctggctgttagccacctgcatttacttctgcaagcctgtaatttacatacctatgcttccagcatggcttttcaggctgctttctgttagaaaagaaatggtttgggggctgcttttttattaaaaggaaaagcctttctgaggactcttttaccctttctagctgcctaaaaataatttcttaataactcctgtattaatagtggggtctaatgtgagaaattaggtacttataaaatttttcaagtatagaagaccattatttatgctgggcatctattatagaaattgttaccagaaaaacactgtagaactaacctgctaagtgacctatccctgccataaccaggagactgagaggacaagaaaccactttcccagctcttggctcagggaacacatcaatcagccatggtctggcatgaagakaattgtagagagcacctctcatgttattgtctctctaattattttttctaaattaaattttgtatgagtatatttgatagaatctgtaat

SEQ ID NO: 558666 - DNA, 469 bp, Homo sapiens
agagcagaatgaactgtcaacagagtcaacagacaaccyacaaaatgggataaaatatttgcaaactatgcacccaacaaaggtctaatatccagaatctacaaggaacttaaatgatcgagcaaaaaacaatctctttaaaaattgggcaaaggacatgaacaaaggcttttcaaagacctacatgcagccaagaagcatatgaaaaaatgctcgacatcgctaagcacatcaaaaccacaacgagataccaactcacagcagtcagaatggttattattaaaaagtcaaaaaataacatgctagtgaggtttcagagaagagggaacacttatacgctgctggtgggaatgtaaattagttcagccattgtggaaagcagcgtggcaatttctcaaagaaattaaaagagaattatcatttaacctagcaatctcattattgggcacatatccaaaggaatataaat

SEQ ID NO: 558667 - DNA, 610 bp, Homo sapiens
cagtctaacaatcttattttttcaaaagactaactcttggtttcattgacgttttgtatagatttttgcacctcactttcattaagttgttctctaatttttgttatttcttttcttctgctagctatggagttggtttgtcctttattttctaattccttgaggtgcaaagtgcaggaggatgaagctagacccttgcttttcagcatgtaagaaaattaacaggatagattaaagatttaaatgtaaggccacaaactatgaaaatcctagaccaaaatctaggagatatttttcttgacattggccttgggaaaaaaattagctaagtccccccaaagaaattgcaacaaaaccaaaaattgacaagtgggacctgggtaaacgaaagtgcttctgtacagaaaaagaaactatcaagaggggaaacagacaacttaccgaatgggagaaaatatttgcaaactatgcatctgacaaaggtctaatatcccaaatgtaaatagaacttaaacaatacaacagacaaaaaacaaatagccctrttaataatgggaaaaggacacgaatagatccttctcaataaaaagatatgcaaggagccaacaaa

SEQ ID NO: 558668 - DNA, 462 bp, Homo sapiens
gggattactttactggtgaacwaaacctttaattctattataattttccatagactcaagagaattgacatctggtgttaaaaaacaaaaaatcatacaaatgactgatatgtatcattttccttattaaatatggaagaaaggggaggaggatgcagaaatggttggctaaaagctccagagaaaaacttaacagattttatgattttgcggaaggtaagtccttgacctcttcattttcacattcagcaggtatgaaagtttcttctgttacatatggttctatcatttattcatagaattttgacagaaagctgtagaactgaaaaaaagcttgatatacaaactactagctgtattggcaattttacatgaaggcattactgaccctccacagcttctttctattaaccattcagatttatgcaactaccattatcccaggggttactcaaagacatt

SEQ ID NO: 558669 - DNA, 564 bp, Homo sapiens
actggcaagcaaaatggaattttcaaactgcaggtccaggcttatgattcaaatttcctcaatgttgatttataagcactaaaaatgacttaatttttaattgaattgagacttttaatctaattgagaaattggaaactgagtcttcctctcttgattaaataaaatgttacttttctataggtgagtagcatacattatatttgaaggattctgaaattttatacatcagatcttatactctgacttcatgcttttatttacagcctcaaaaaattaattwatttatttaaacaaagttctcactccaaagtaaatttctgacaagagaagttggaggtggggggagagagagcactgattagggaaaaacattaaattcaataaaaaagactcagattctctaggttcttgtatggaaaagaggaactataagactaattatgaaagaaattcaaatgtgagtcaatagtgtggaaatcaagctaaagacaagaaaaatattcatgaactatgttcaagaaatatgaagaactttctctaccatatttaacatcatatagg

SEQ ID NO: 558670 - DNA, 532 bp, Homo sapiens
aggccaggggtaagatggggtggagctgtttacaccattgtgcctgaagggactgagagagggaggaaatacagaaaccccaaaaagagatatttatgatagccatttgaaaggaggaatgaacttcagtgggaggtcaaccagcatgtggccacatggtmtagcttattctccttcattccccttttccagttttattgaagtatatttgacaaataagaatcatacatatttaaatgtgcaacttgatgttttgaactatgtgtacactgtgaaaagatcatcacacttaagataattaacatatccattacctcacagggttatgtttttctgtgtgtggtgtgaacccttaagatctactcccttagtacatttcagttgtccaatacagtattgcattgtaatacagacaccatgttgtgcattaactctccagaactcactcatttttgcataactgaaactttgtaacctttagtccattatctcctcatttctccctttcctttccactcttggcaaccgccat

SEQ ID NO: 558671 - DNA, 181 bp, Homo sapiens
ctgtgtacagttgttaattgaacattctatgaagggtagggaaaactgggacctcctattcttcaatcttcctgatgtcacagagaatctgcattttgaaaagatccatasgtgatggtgattgatatggatattaaagttgagaactactaggttaaacatctgttttcatgtgaaacat

SEQ ID NO: 558672 - DNA, 181 bp, Homo sapiens
ctgtgtacagttgttaattgaacattctatgaagggtagggaaaactgggacctcctattcttcaatcttcctgatgtcacagagaatctgcattttgaaaagatccatacgtgatggtgattgatatggayattaaagttgagaactactaggttaaacatctgttttcatgtgaaacat

SEQ ID NO: 558673 - DNA, 434 bp, Homo sapiens
taattattatacaccgtatgcctgtagaaaaatatctcatgtaccccataaacatatacagtcactgtgtacccataaaaatttaaaaaggaaaatataaaataaacaacctgatattacaactctagtaactaataaaaaaagaacaaactaaacccaaagtcagcagaaggaaagaaataacaaggatctgaatagaaataaacaaaatagagactaaaactacaatagaaaagaactcaatgtaataaagagtgttttttcagaaggataaacaaatcaacaaacctttagccagaccaaggaaaaaaaagaaaggactcaaatattaatacaatcaaaagtgaaaagggagacattacaactgataccayagaaatataaaagctcataagaaaaaaaagctcataagagagtactatgaaaaattgtac

SEQ ID NO: 558674 - DNA, 624 bp, Homo sapiens
caaatttttcagcatcagttgaaatgatcatatggttattctccttcatactgtttattgtttatcatattgattgatttgcacatattgaaccattcttgcatccctgggataaatcctactgtgggagctaaaaattaaaacaattgaactcatggagatatagagtagaaggaaagttatcagaaactgagaaagatagtggttagggggatgggagggcaggtagggatggttaatgggcacaaaaagtagttagaaagaatgaataaaatctagtatttaatagtacaagaggatgactattgtgtattataatttaattgtacattttaaagtaactaaaagagtgtaattgaattgtttgtaacccaaaaggataaaaatgyttgaggggaatggataccccatttaccattatgtgattattatgcattacatgcctgtatctaagtatctcatgtactcaataaatatatgcacctaccacatacataccaaagtttaaagtaaattaaaaaaaaagaaaaagccaggcacggtggctcacacctgtaatcccagcactttgggaggccaaggcaggtggatcaactgaggtcaggagttcaagatcagcctggc

SEQ ID NO: 558675 - DNA, 455 bp, Homo sapiens
aggaattcaagggttattcagtataaatgaatcaaaaagtttgatacattacactgatagaataaaagacaaaaagtgtatgatcatttcaatagatrcaaaaacagcatctgataaaatttatcattgcttcatgataaaaattaaacaaatttaggcatagaaggagcatacctcaacataataaaggccatatatcagaaactcacagtgaaaatcatactgacgtaggacaaacagaaaatccttcttctaagaactgaaaaacgacaaggattctcactttcacaacacctatttcatatagtattggaagttttggccagagtatcagcaagagaaagaaataaaacgcattgaaattggaaaagaagaagtcaaattgtttctcatggcagatgacatgatcttatatagagaaaaacataaaaacgttatcaagacaactcttagaa

SEQ ID NO: 558676 - DNA, 455 bp, Homo sapiens
aggaattcaagggttattcagtataaatgaatcaaaaagtttgatacattacactgatagaataaaagacaaaaagtgtatgatcatttcaatagatacaaaaacagcatctgataaaatttatcattgcttcatgataaaaattaaacamatttaggcatagaaggagcatacctcaacataataaaggccatatatcagaaactcacagtgaaaatcatactgacgtaggacaaacagaaaatccttcttctaagaactgaaaaacgacaaggattctcactttcacaacacctatttcatatagtattggaagttttggccagagtatcagcaagagaaagaaataaaacgcattgaaattggaaaagaagaagtcaaattgtttctcatggcagatgacatgatcttatatagagaaaaacataaaaacgttatcaagacaactcttagaa

SEQ ID NO: 558677 - DNA, 455 bp, Homo sapiens
aggaattcaagggttattcagtataaatgaatcaaaaagtttgatacattacactgatagaataaaagacaaaaagtgtatgatcatttcaatagatacaaaaacagcatctgataaaatttatcattgcttcatgataaaaattaaacaaatttaggcatagaaggagcatacctcaacataataaaggccatatatcagaaactcacagtgaaaatcatactgacrtaggacaaacagaaaatccttcttctaagaactgaaaaacgacaaggattctcactttcacaacacctatttcatatagtattggaagttttggccagagtatcagcaagagaaagaaataaaacgcattgaaattggaaaagaagaagtcaaattgtttctcatggcagatgacatgatcttatatagagaaaaacataaaaacgttatcaagacaactcttagaa

SEQ ID NO: 558678 - DNA, 428 bp, Homo sapiens
tactatgcttgagggttagttcttttcttgggattagaccctttttctccttgtccacaccacccccaaattttcctagacattttcttccctcagttcctgtgtaattcccagttcctagctggtaactctcttccttrccctctgtcttatcatctaatttacttcttattatactccttttggtctgatatccttgaatactcttttcccagactgttcacgagaatcccaagctatagctccacttttgacctaacacaggcacagtgctccagctgtaactctgtttgaacaccactcctgtggccactccacacctgcatgcagcttatttagcactttttgagtttcaaatactaataaactcacaacacatttctttctctgttccaagtatgacacccaagatacagccctttaacaaa

SEQ ID NO: 558679 - DNA, 594 bp, Homo sapiens
aaaactccgtctcacacacaaaataataaataaataaataaataaayaaaagtttaaataggtttcaaatgttaacagtaaaaataattggcatatttgagagctcattttgtagcaggcattttgctaagggctttgcatacactggtcttatataatttaccataagaggcatgcatttctttcagtaaccagcatcatagtactgcaaaaatgtgttagtttatgaatttaagtatttcagagaatctccatattcctggataaagttgtcaaaatattaacaattgttgaaacacagcgactaatacatagggttttattatactattctactttcgtgtatatataaacacttccatgataaaaaaaatcaaaaacacaaaacaaaacaactctttcagagatcagctatcctggttatgttccttcctccccatctccagctcctgtcagttggccccacatggggacacatgcttcttcagctggggagggaaagattggtagaacttacagttggccattactactcctctctcctcagtctcccatgatggatttaggaaattcctcttctgatctactttgtag

SEQ ID NO: 558680 - DNA, 595 bp, Homo sapiens
tgttgtttctatttgtgctcaattttggggatgataatcttgatcctattgcaaataatctcaaaggcagaggcaggctgggtctggaggaaggtagcgtgactttaaagacactccctcccccacatcttctcataatggtgtattttaggcttgcttcttgttccagatctttgtctcagccttccttcttacaagccaccctccagaaacaaatgtattccaagggcctgcttctgactccaccatccctaaagaattggcaggagaatctggactaaaaatggctttaatgtgctctcaatctctagttaaacatttgtagattaaccagctgaaaatagtgaattgtgagactggggtgtgwgtgtgtgtctgtgtgtgtgtgtgtgttgatagggaggggacatcaggaactaggtaagaccatagtgggtcttatgtgtggggagtgatttcctatctgttagagatgaagtggtgcctatatccactgtcatgcgcagacagtcaaatgcccagcaaatgggcccttaataaaggcaatgaatgatgacgatgtggactggggggaaagggaaaatgtgaagtagaa

SEQ ID NO: 558681 - DNA, 525 bp, Homo sapiens
taaacagttattatgagttggtgattcaaaaacacttcaaagcggattcttgactaactccattcattgggcccagggggcgtctgtaaacgtgggtttagtcaccctcctgccccttcccagtgaatcaggtcacggtggtggcgactgttcaggtttctgaatacccagctacaataytcgcgtagaaactaacccactgtggaaaatcagagggggtacactcagggcctatttagtggtatcgtctcagaatggttgtcctactgcgtttttcagccactacagcccgtcacctacagaagtgctcatggatttggccggacagtttcctcggggagagatttcactgccgtgacatgaggaatgaaagaaagaaactgagcagagaactgcgactctgtgcaagaaccaagtgtcatgccacccaggctggagtgcagtggtgcgatcactactcattgcagcctccatctcccgggctcaagcgatcctcccgcctgtctcccaaggagctgggatcac

SEQ ID NO: 558682 - DNA, 568 bp, Homo sapiens
gtctgtgtgattgtcagggagaattgacctgccacaraaatgctccatggaaggggaagggttggggaaggcttggtggcttgcagaagggttggcacagtctaaaatggctatttctcttactggtggtggcttgttttgattctgtggatcaagggggtttctctacttctcccccaagttttgttgtattcagggattcagggtggtatttttgtctttgagtagtttctagttatgtttttttgggagggaatgatgccagagaatcttctattctgccattttgctctctttctctctctctatcttgtttttcaaagccatatctaaagtattttagttctctgaaagtatagggagcctcaggtgttgcttgaggctataccagactgggacctattagtttctcttcacagacataaggacccagaggaaggaaggaagagactagagtgactggctcacgattaatacaatctgaataaagactggcagtgaacataatacaaaccatattatgcagccttcttaaagtgacattttctaccttgtcatatgttataga

SEQ ID NO: 558683 - DNA, 568 bp, Homo sapiens
gtctgtgtgattgtcagggagaattgacctgccacagaaatgctccatggaaggggaagggttggggaaggcttggtggcttgcagaagggttggcacagtctaaaatggctatttctcttactggtggtggcttgttttgattctgtggatcaagggggtttctctacttctcccccaagttttgttgtattcagggattcagggtggtatttttgtctttgagtagtttctagttatgtttttttgggagggaatgatgccagasaatcttctattctgccattttgctctctttctctctctctatcttgtttttcaaagccatatctaaagtattttagttctctgaaagtatagggagcctcaggtgttgcttgaggctataccagactgggacctattagtttctcttcacagacataaggacccagaggaaggaaggaagagactagagtgactggctcacgattaatacaatctgaataaagactggcagtgaacataatacaaaccatattatgcagccttcttaaagtgacattttctaccttgtcatatgttataga

SEQ ID NO: 558684 - DNA, 594 bp, Homo sapiens
agaccacattttaataaccattgaagtagagcattaaaaatacagagttcttctgaagatacctacattgcagatacatgccagctatgccaacccaaaacactttttttatgggataataggtattaatgatcatgtgtcttttacttgtctgtatttttctaataaagcttcattacatttttaccccaagacagtagtggggatatatgtatgcatgtttgcctgtttgcatggaaatctggctgcttaacacatttgtaacctgctctgcccctgaagacttgttcgtggctcctatttagagagtgtgattgaatgacagtacttagagtgtatagtttgtatttgccattacttgatatgtttgaatagaatatactagcaaacatgtaatttgtgacttyctaggcatcatattcacaactaggctagcttccactttaattaatgatggtaccagatttgggtggttcaaatagcaagtcttcccataggtggataactaagagtgataaagtattacacaattcccacgcagtcttatcgtttattttccagcaaaaaatgaaacaaaataataagtcaacagcc

SEQ ID NO: 558685 - DNA, 505 bp, Homo sapiens
ccatctcaaaaaaaaaaaaaaaaaaaaaaagaagagtcaattgatgtggcaaactyattattgtcttgttttatgaaactgccacagccatcccaagcttcagcaatcaccaccttgatcagtcagcaaccatcaacattgaggcaagaccctccactggcaaaatgattatgactcactgaaggaacagatgattatttgcatttttaacaataaggtatttttaactaaggtatgcacagttttttagatgtaatagtattgtatgcttaatagactatagtataaacatatattttatatgcactggaacactaaaaatttatgtgactctctttattagatattctccttattgtggtagtctgtaactgaatcttcagtatctctgatgtaggcctgcattttgaaaatgacccaaaaagcaagcactaaagaaaccataaaattaatatatggttaataactccattttggctctgcaatttcttcagattggggatgg

SEQ ID NO: 558686 - DNA, 620 bp, Homo sapiens
ttaccacctgccactctcctacctcttcattcagtggactgagattgctgamctgtgtgttgaactattatgctggctcataataacatgcctttgaatgcattgtttcctcttaccagaatgccccttcttcccttgaccaacataaaaaaaacacctgtttttcctttcaaatacttttcaagtgatcctttttatgagaatctcttcttaattccaagatccagcactctcagcctgcctcccaatagagtgaatcaataaatcactgttgagctaccttcaaatctggtgcataattttactactaaccttatacaaatctcatatgtgcctgtctcctctacttcccaaaggttgagatcatacctggtctattcatatttttaacaccagcatctaaccgagatcctgatgtgtaatggcccctcaatacatttttaaccaaattaaattctgacctaatcaaacatattatttgaaaagttagattcatgaataagataaattaagtggcaattactaattacccaaaaatactttttatttaacaaaaatatttgcttccttccttttttcctagcaaggtagtacagtatatcaggacttgctctgaagtc

SEQ ID NO: 558687 - DNA, 620 bp, Homo sapiens
ttaccacctgccactctcctacctcttcattcagtggactgagattgctgacctgtgtgttgaactattatgctggctcataataacatgcctttgaatgcattgtttcctcttaccagaatgccccttcttcccttgaccaacataaaaaaaacacctgtttttcctttcaaatacttttcaagtgatcctttttatgagaatctcttcttaattccaagatccagcactctcagcctgcctcccaatagagtgaatcaataaatcactgttgagctaccttcaaatctggtgcataattttactactaaccttatacraatctcatatgtgcctgtctcctctacttcccaaaggttgagatcatacctggtctattcatatttttaacaccagcatctaaccgagatcctgatgtgtaatggcccctcaatacatttttaaccaaattaaattctgacctaatcaaacatattatttgaaaagttagattcatgaataagataaattaagtggcaattactaattacccaaaaatactttttatttaacaaaaatatttgcttccttccttttttcctagcaaggtagtacagtatatcaggacttgctctgaagtc

SEQ ID NO: 558688 - DNA, 424 bp, Homo sapiens
ccttggtctctgcagtccaccgtgccatctgcctcttcttatgattcacagacttcagactcaaaagatcagaggcattccgacaggagagtaagawagtggcagtggcagggaagaggctttggggcctcaagaatgagggctcaggctggtgaggcctggtggagcagaggaggggaactcacggtggagagggcaccaaggtcaaagtttgtctcctcatagctttgcagagggaggtcccgcaccatgctcccgggtgactcacatgaagtgcgttaccgggggaggatcaggctggggctggtagggagctgagctatccaggaggagccaggaatggacccacacctcggacattcatctgcctggccctttgctccctggagggcaaggatttctcctttgcctttgggggaaactg

SEQ ID NO: 558689 - DNA, 424 bp, Homo sapiens
ccttggtctctgcagtccaccgtgccatctgcctcttcttatgattcacagacttcagactcaaaagatcagaggcattccgacaggagagtaagaaagtggcagtggcagggaagaggctttggggcctcaagawtgagggctcaggctggtgaggcctggtggagcagaggaggggaactcacggtggagagggcaccaaggtcaaagtttgtctcctcatagctttgcagagggaggtcccgcaccatgctcccgggtgactcacatgaagtgcgttaccgggggaggatcaggctggggctggtagggagctgagctatccaggaggagccaggaatggacccacacctcggacattcatctgcctggccctttgctccctggagggcaaggatttctcctttgcctttgggggaaactg

SEQ ID NO: 558690 - DNA, 607 bp, Homo sapiens
atatattttattgattaaatttattggaaaacttatttttttaattcatttattctcagactgtgccttctgggatggggagggagtttaacaggcaatatcacttctactcagtcgataggttgattaattctaataatatcctccttccccaccctcttgagacctccttaaacaaacaaatgtgtttatactgtgccagtttatttggttgtattttcatctttgttaacctgtgtttaggtctgaaaacaatacatccaaattacagtctctcttgaccactgctaatgcccatcacctacaatggctggcccttaggagttgctcaaaaatatttgttgaaggaactgcagaatgaaaagttttcttagaatgggtaacagtatctccaacatacattttatttagtttaaaattccttaatacaagaaggtgttactccttaaccactgctgcagcctcaccggaccctcctgatgtggatgaagcaggcggggtggctgctggtcggctgtggaggcacctccaggcacagggcctagagggtgagaacactggtgacattaaygccatagctgtggcttgggacagggattgagaggca

SEQ ID NO: 558691 - DNA, 623 bp, Homo sapiens
acaaatccccaaattcatcaaacctgagaaaaaggaaaccattttcaaggaaggctatttcctagggtagctgttttcctcatttctcttgtcttctagcgaaagccagaattgggagccgggaggagggcttcctctgttggtctcccaccggtgccacctccgtccagtccacagtcatgactgaacacccaactttccctgttaccttggtggccgagaacgggccaaccaggagccattcctcctggaaaaacagagctcttccataattagcacgaacagcaaagcaaataaaagggagatgctctgagtctcagcagggctcaaagtcttccccagtctgattcaaaaacaaaccacaaatacttatcactgctgggacaggcactgcgccttcagcctggtgcctcagaacgtgcgctgtgactgtggccaaggaggtgtgcttggcaggtcctgggtaagctccctacagggcacccctctgccgctgcccgactgctcaggaaaagcctggccctactcttagaaaaatacagaatgcacgtgcctccaactcaattcagcagrtatgtacgtggcctgacaatgaggaaaccattgggagaaagggggcacag

SEQ ID NO: 558692 - DNA, 453 bp, Homo sapiens
aggtgggactacaggcctgcgccaccacgcccggataatttttgcatttttagtagagacagggtttcaccatgttggccagactgctctcgaactcctgacctcaaatgatctgcctgcctcccaatgtgctgggattataggcgagagccactgcacccagccaccatggtgagtttttaaaaataattttatattttgtgtattatactttatttacatattatttatgtaggtcaatttaccatttgaaatataaattgtggacatttttctaagtcaacaacaaatatagctcccacacattattttaatagctaaatacatgtccacttatacatmcaccataaattattcatctgttttcttaacaatggactgtttccaggtgtttctggttatttttggttacttttgctattgtagtcaaggccacagtaaaatatttatgct

SEQ ID NO: 558693 - DNA, 393 bp, Homo sapiens
tacctagagagtgccttgcagtgaatagttactgaacacgcatggcctattttgtatatacaggttcagagaaaatgaaatatctaagcatattacttctttctcattktgctacatctctaattactaatctcacatcagggaaacttcctatactaatgaggactccacaaattctattactttactagggcttgcttgagtttaatttagtggacaaatgagcatcagcaaagcaaaggggtggcaggatgtcaggaggagagaaagtcaatttatcaaggctttctaccaggtttataccaacctattctggctattgtttataataatgatatcacttttggcattcatcttggcgaccccaggaaaaaacactttcagctacctatg

SEQ ID NO: 558694 - DNA, 416 bp, Homo sapiens
  misc_feature 1, 2, 3, 4, 5, 6, 7, 8, 9, 10, 11, 12, 13, 14, 15, 16, 17,18, 19, 20, 21, 22, 23, 24, 25, 26: n = A,T,C or G
nnnnnnnnnnnnnnnnnnnnnnnnnngaattccatatgaataatacctcccttcgactgagaaaagtgtccaccttcccagagtatctatcactcatgaacaagctgaaaaaagagtctaccctaaattaaaaagttattgctttaaaacctcaggtgagtgacttatctatgccaaagtcaagatgcacattgccaaatatcacacagatgaagtatacaagtttcataagacttctagaacagtcataattcttgaattttgaattggtatctaagtctcaaacttcttcagggcacttaggtatttgcctttttattgaaaatttttataaaaattaaacacttktaatacccaaagcaagaatctctgaggaaactcatatgccacacccaaatataaataactcttccccc

SEQ ID NO: 558695 - DNA, 500 bp, Homo sapiens
aatgcaatatgcagttcaaattcaacctcatttcattaactctgtaactgaagtacctgatagcaactaccaaaactaacatgtagaaaataaactttatttcacccaagagttcagttcactgacatcgaaaggcttcagagatttggatcacatgaatataacatgagagctttacaatttttaaaaacaagtatgtttagaatagggatgaacactattctgtcagcatcaagaatcatttctaattcttgtagactcttttccatgataagatcaatgtaatttgtaacaaattacccttgggttgagtccttggagaaagctggactcatttttaaaaagagaatgaaaattaatttcaatcaaaggcacttaaggcttttatttatactttgcatttgttttagggaatttttgtacgtttatcaatagtcytttattacaatattttatcctttgaggttaaaaaaacaaaacaaaaaacaaaacaaaacaaa

SEQ ID NO: 558696 - DNA, 580 bp, Homo sapiens
taagaattgccatttctatctaatccacggtttgcccttttccatttttttggatactgtattttaagctacattttactttctctgcaatttttttcataaaagattatataaaggaattgcaaatgcmaactatcaaagatattgcttttgaatcacaaacactatttggagtatactgtcaataaacttcatagtaacatattccctgccctaacatttacagcaataactactgaacccaccatcacacaatttacatagtgaacagcacaagatccatatactggtttctcttggaatacttcatgtaattttcagataattagctcattctccaatattgttgtgaaatgagtaatgacatcatcttcattttgcctctgcatcaaagaattgcagtcactagaagttatatggtatttgttcaaagccagggatacaatatcttcacaattttacccctctaattctctgctggcagatcaatgctcattccattaggctatagtattattaaaattattaaaataatcttaataatttttggagtatatttttaaagatgcatattttgtgg

SEQ ID NO: 558697 - DNA, 580 bp, Homo sapiens
taagaattgccatttctatctaatccacggtttgcccttttccatttttttggatactgtattttaagctacattttactttctctgcaatttttttcataaaagattatataaaggaattgcaaatgccaactatcaaagatattgcttttgaatcasaaacactatttggagtatactgtcaataaacttcatagtaacatattccctgccctaacatttacagcaataactactgaacccaccatcacacaatttacatagtgaacagcacaagatccatatactggtttctcttggaatacttcatgtaattttcagataattagctcattctccaatattgttgtgaaatgagtaatgacatcatcttcattttgcctctgcatcaaagaattgcagtcactagaagttatatggtatttgttcaaagccagggatacaatatcttcacaattttacccctctaattctctgctggcagatcaatgctcattccattaggctatagtattattaaaattattaaaataatcttaataatttttggagtatatttttaaagatgcatattttgtgg

SEQ ID NO: 558698 - DNA, 220 bp, Homo sapiens
catgaagctggaaaattctttttcctaaagttctttatatctacaaactgttgaggttttcatttatttatttttaatgctacgttgtaatgaaaatcattggaaaactttaaattctagtaattttgaagtcttyttaatttggacaggactgagctaaagtttgtactttttttaatttattgaaaaatggtttctaatgatagtattaacaagatta

SEQ ID NO: 558699 - DNA, 220 bp, Homo sapiens
catgaagctggaaaattctttttcctaaagttctttatatctacaaactgttgaggttttcatttatttatttttaatgctacgttgtaatgaaaatcattggaaaactttaaattctagtaattttgaagtctttttartttggacaggactgagctaaagtttgtactttttttaatttattgaaaaatggtttctaatgatagtattaacaagatta

SEQ ID NO: 558700 - DNA, 547 bp, Homo sapiens
actaccttttcataaataaacatccttgtttagaccattgctaacttatttagtatcagcccctcctatrgtataattttttaatagtgaacactgctagtaataatatacaagatataaaagaaaaataataacattttaagaaagaaaatgtttttgtaagaaaaaatgcacaattccagctattttgttttaaaagctgtttcgtatgtaggaaaacaactggagagagaaacaaccaaattgtattattagcattgcaaacaccaatttttttttttttgagcctatcacctaggctagggtacagtggtgcaatcatggctcactgcagcctccacttctcaggctcaggtgatcctcccacctcagcctcccaagtagctgggactacaggcacacaccaccacacccagctattttcttttgtttgtgttttttgtagaggtggggtttgccatgttgcccacgctggtctcaaactcctggactcaagcaattcacctgcctctgcctccaaaagtgctaggattacaagtgtgagcca

SEQ ID NO: 558701 - DNA, 611 bp, Homo sapiens
agtactctgcatgcagtaaattgaagtcttgctttttgaaactatgttgatatttttctgaatgattttaatccagagttagtgaatcaatgacacagaacccacagatatggaatgcttaccatatgtgtaaaaaactaggtttcataagttatttcagttcttataaatgtactctctgattttgaactacatgggaaacacacagaccctcaaacacacacacaaatgctcacacatacactcacatgttgacagtcacrtatgattgtctttactctcaaaaacttttatttctgtcttaaaacaacactgtagcatacatcttagtgtattctaaatacaaatcccattctacatgacattactgactattagtccattttgcattgctataaagaaatgtctgaaactggatagtttataaagaaaagaggtttattttggctcacagtctgcagactgtacaagtgtgatgctagcatccgcttctggtgaggcctgagggagcttacaatcatggtgtaaggtgaaggtggagcaggcatatcacatgctgagaaagggagcaagaaagagaggaggaagttccaggctcttttaaacaacca

SEQ ID NO: 558702 - DNA, 635 bp, Homo sapiens
ctcatgtgcagtaaatgggaagatcaatgagccactgccagtagctcctggtggatgctgggccccttttgcacatgacacacaggttttcataacagaactgactctcaacgtcaactcattcctccagtgcacctactcattgtcacggyggatcatgtactggatcagcacagaaagatctaagataagtctctaccaagtttgttgctgttgctactgttctacatggaaacataagagctccattggagaaataggaacacttttacactgttggtgggattgtaaactagttcaaccattgtggaagtcagtgtggcgattcctcagggatctagaactagaaataccattagacccagcaatcccattactgggtatacacccaaaggattataaatcatgctgctataaaggcacatgcacacatatgtctattgtggcactattcacaatagcaaagacttggaaccaacccaaatgtccaacaatgatagactgaattaagaaaatgtggcacatatacaccatggaatactatgcagccataaaaaatgatgagttcatgtctttatgaagcgggaaaccatcattcccagcaaactattgcaaggacaaaaaaaccaaacact

SEQ ID NO: 558703 - DNA, 620 bp, Homo sapiens
gtgtttacatgaacatttctataatttttgcctaacactaatatgtggttttatggggtgaaatcttaggctarcacagagggaatataatggggtggcaagctcagtagagataccaaagggcaaagggtgctggggaaatgtgaatcctggccaagaagaaattcactcacacctcagtaaaaccatcccttagaaataaacacaactctctgtacagtaaaggccagatcctcaggataagggcaaaacaggaggagcatttttaaagtaattatgaaagcaagcttggcaggacaaaataactcaccagtaatttaagtctttgtcaaaacaatccagagaccttccagaatgacatcaagaatggctgtaatagatataattgttataaaatgtataagacatatgaatgagtagaaaatagtgataattaatgttttattttttaagtatttatttatttatttttaattatactgtaagttctggggtacatgtgcagaacaggtaggtttgttacataggtagacacgtgccatggtggttggctgcacccatcaacctgtcatctacattaggtatttctcctagtgctatccctcccatagtcccctaca

SEQ ID NO: 558704 - DNA, 478 bp, Homo sapiens
gtaaccaacccagctgtttctgtatgtcattttcctttttctgtccataaaycttcttccaccacgtggctgccctggagtctctgagcctaccctggctcaggaggctgcccaattcacgaattttttattgctcaatgaaattactttaaatttaattctgctaaagttttttttttttaattactggcaaagctgcagagaaaagggaatacttgtagactgttgataggaatggcaaattagtttagccactgtggaaatcaggttggaaatttttcaaagaacttaaaacagaattaccatttgacccagtaatcccattatttggtatatatccaagagaaaacaagtcattctaccaaaaagtcacatggacttatatgttcattgcagtgctgttcacaatagcaaagacatagaagcaacccagttgcccatcaactctggattggataaagaaaatgtggtacatata

SEQ ID NO: 558705 - DNA, 542 bp, Homo sapiens
aagggtaaaagacaaaaacctttccctctaaaaacagaaacaagtcrgaaatgcccaatcctttttattagtattattattatactttttttaagttctggggtacatgtgcagaacgtgcaggtttgttacataggtatacacgtgccatggtggtttgctgcacccatcaacccgtcatctacattaagtatttatcctaatgctatccctcccccagccctacctccgacaggccctggtgtatgctactcccacccccatgtccatgtgttctaagtgttcaactcccacttatgagtgagaacatgcaatgtttggttttctgttcttgtgatagtttgctcagaatgatggttgccggcttcatccatgtccctgcaaaggacatgaacacatccttttttatggctgcatagtatttcatggtgtgtatatgccacattttctttatccagtctatctatcattgatgggcatttgggttggttccaagtcttagctattgtgaacagtgccacaataaacatacttgtgtatgt

SEQ ID NO: 558706 - DNA, 558 bp, Homo sapiens
aaatttctctatgaacactaccttatccatgtctcagagattctggtatgttgtatctttgttctccttagttaaaaagaacttattgatttctgccttaatttcattatttacccaaagtcattcaggagcatgttgcttaatttccatttaattgcatggttttgaatgattttcttagtttttggctactatttttattgcactgtggcccgagagtgtgcttggtatgatttcagttcttttgcatttgctgaggattgttttttgtccaattatatagtccattttagaatgtgtgccatgtggtgatgagaagaatgttattatgaggtggagagttttgtagaggtctatcagatccatttggtacaatttgggttcattttcatactgttatgaagaaatacccaaaactgggtaatttaaaaagaaaaagagatttagtggactcacaattccatatggctggggaggcctcayaatcatggcagaaggctaaagaggagcaaaggcatgtctgacatggcagcaggcaagagagcatgtgcagaggaa

SEQ ID NO: 558707 - DNA, 538 bp, Homo sapiens
aaacaatagaaatttattttctcacagttctggaggctgaaagcccaagttcaaggtgtcagctggcttagtttctcctgatgcctcatttcttggctttgctgatggccaccttcctgctctgtcctcgcacggyctttcctctgtgtctgtgcatacctggtgtcttttattcttcttataaggacaccactcatattgaattggatccccacccttatgacctcatttttcttcaatagtttttggggtacaggtagtttttgaatacatgggtaagttctttaatggtgattcctgagattttagtgcacccgtcaaccaggcagtgtacactgtacccaaaatgtggtcttttatccctcatccccctcccaaccttctcctcaagtccccaaagtttattattcttatgcctttgcatcctcacagcttagctcccacttataagtgagaaaaacgatatttgattttccattcctgagttacttcacttgaagtaatggtctccagctccatccaggttgctacaaaagac

SEQ ID NO: 558708 - DNA, 712 bp, Homo sapiens
gcagttctcttgttccaaggtcagggtcctgacagggatggaataggactatgacacatgggatgacatggttgaaagaacatggcattcttaggagaaacagatggacagccaacaagtgtattttttaatttatacaaccaaaaaaaatcaasgatgggtaatcaagagaatgagagcaattgctccactaaaaagctgtttataggctccagccagtttgagacataaaattcaatgactgaaagagatgctgggtccctaggagaagcaaatttataaccctgtagcaagtatatttgttagttctccctaaggggacctaagccataaacttgagaaaggaatactcatatatttttagggctgttggacagaggatccatgttaacattgataaccacaggcccagaagtcatcatggcccctgttaaagtggagatatatgggagctaagtataaagtagagtcctgacctaggtatggcttacagcaggtccgtctactaagtccatggtgatcacctctttggtctccaatgtgtaattagactgaacatagttggtagtatgcagaacctccacaattggtccttggtatgtaaggtacaacctaccacagtagagaaacccaaatgcaaacgtctgaaactttccttttataagccaaaataatatttcatcctggcaataatggcagaggatagtgtcac

SEQ ID NO: 558709 - DNA, 712 bp, Homo sapiens
gcagttctcttgttccaaggtcagggtcctgacagggatggaataggactatgacacatgggatgacatggttgaaagaacatggcattcttaggagaaacagatggacagccaacaagtgtattttttaatttatacaaccaaaaaaaatcaaggatgggtaatcaagagaatgagagcaattgctccactaaaaagctgtttataggctccagccagtttgagacataaaattcaatgactgaaagagatgctgggtccctaggagaagcaaatttataaccctgtagcaagtatatttgttagttctccctaaggggacctaagccataaacttgagaaaggaatactcatatatttttagggctgttggacagaggatccatgttaacattgataaccacaggcccaraagtcatcatggcccctgttaaagtggagatatatgggagctaagtataaagtagagtcctgacctaggtatggcttacagcaggtccgtctactaagtccatggtgatcacctctttggtctccaatgtgtaattagactgaacatagttggtagtatgcagaacctccacaattggtccttggtatgtaaggtacaacctaccacagtagagaaacccaaatgcaaacgtctgaaactttccttttataagccaaaataatatttcatcctggcaataatggcagaggatagtgtcac

SEQ ID NO: 558710 - DNA, 712 bp, Homo sapiens
gcagttctcttgttccaaggtcagggtcctgacagggatggaataggactatgacacatgggatgacatggttgaaagaacatggcattcttaggagaaacagatggacagccaacaagtgtattttttaatttatacaaccaaaaaaaatcaaggatgggtaatcaagagaatgagagcaattgctccactaaaaagctgtttataggctccagccagtttgagacataaaattcaatgactgaaagagatgctgggtccctaggagaagcaaatttataaccctgtagcaagtatatttgttagttctccctaaggggacctaagccataaacttgagaaaggaatactcatatatttttagggctgttggacagaggatccatgttaacattgataaccacaggcccagaagtcatcatggcccctgttaaagtggagatatatgggagctargtataaagtagagtcctgacctaggtatggcttacagcaggtccgtctactaagtccatggtgatcacctctttggtctccaatgtgtaattagactgaacatagttggtagtatgcagaacctccacaattggtccttggtatgtaaggtacaacctaccacagtagagaaacccaaatgcaaacgtctgaaactttccttttataagccaaaataatatttcatcctggcaataatggcagaggatagtgtcac

SEQ ID NO: 558711 - DNA, 712 bp, Homo sapiens
gcagttctcttgttccaaggtcagggtcctgacagggatggaataggactatgacacatgggatgacatggttgaaagaacatggcattcttaggagaaacagatggacagccaacaagtgtattttttaatttatacaaccaaaaaaaatcaaggatgggtaatcaagagaatgagagcaattgctccactaaaaagctgtttataggctccagccagtttgagacataaaattcaatgactgaaagagatgctgggtccctaggagaagcaaatttataaccctgtagcaagtatatttgttagttctccctaaggggacctaagccataaacttgagaaaggaatactcatatatttttagggctgttggacagaggatccatgttaacattgataaccacaggcccagaagtcatcatggcccctgttaaagtggagatatatgggagctaagtataaagtagagtcctgacctaggtatggcttacagcaggtccgtctactaagtccatggtgatcacctctttggtctccaatgtgtaattagactgaacatasttggtagtatgcagaacctccacaattggtccttggtatgtaaggtacaacctaccacagtagagaaacccaaatgcaaacgtctgaaactttccttttataagccaaaataatatttcatcctggcaataatggcagaggatagtgtcac

SEQ ID NO: 558712 - DNA, 575 bp, Homo sapiens
gaaattgaagccagctgtagaaatttgcataagtaatgaggaatcaaatgttaatcacgaagacaatgggggaaatgcctccagggcatgttagagaacttcatggcagcccctccaatcctggaggcctaggagggaaaagtgattttgtgggccaggcacagggcccccctgctctrtgtagcctcaggacatggtgccctttgtcccagctgtttcagctcaagatatagctgaaagggagcaacatacagtttaggacattgcttgagagggtgcaaactccaagccttggtggcttacatgtggtcttggggctgtgggtgcacagaagttgataattgatgtttggaaacctccacctgtatttcagaggatgtatgcaaatgcctggatgtccaggcagaagtctgctgcaggggtggagccctcacgctgaacctctgccagggtagtgtggaagggaaatgcagggttggagcccccacacagagtcaccactggagcactgcctagtggagctgtgagaagagggccaccatcctccagaccccagaatggtagatccactgaca

SEQ ID NO: 558713 - DNA, 575 bp, Homo sapiens
gaaattgaagccagctgtagaaatttgcataagtaatgaggaatcaaatgttaatcacgaagacaatgggggaaatgcctccagggcatgttagagaacttcatggcagcccctccaatcctggaggcctaggagggaaaagtgattttgtgggccaggcacagggcccccctgctctatgtagcctcaggacatggtgccctttgtcccagctgtttcagctcaagatatagctgaaagggagcaacatacagtttaggacattgcttgagagggtgcaaactccaagccttggtggcttacatgtggtcttggggctgtgggtgcacagaagttgataattgatgtttggaaacctccacctgtatttcagaggatgtatgcaaatgcctggatgtccaggcagaagtctgctgcaggggtggagccctcacgctgaacctctgccagggtagtgtggaagggaaatgcagggttggagcccccacacagagtcaccactggagcactgcctagtggagctgtgagaagagggccamcatcctccagaccccagaatggtagatccactgaca

SEQ ID NO: 558714 - DNA, 392 bp, Homo sapiens
ttctgtctcttgtctgattgctctagctaggacttccaatactatgttgaataacagtggtgacagtgaacatgcttatctttttctaggtcttagaggaaaggctttcagttttttcccatttggtatgatactagctacaggtctgtcatacataacttttataatgttgaagtgttcctcctatatccagttttttgawgatttttgtaatgaaaggtatttaattttatcaaatgctttttcagcatcaattgaaataagcatatgatttttgaccttcattctgttgatatgatgtaccacatcaattaatttgaaattgtattagtcctttttcatgctgctgataaagacgtacctgagactgggaagaaaaagaggttggactt

SEQ ID NO: 558715 - DNA, 546 bp, Homo sapiens
ggaattctgggagatataatttaagttgagatctgggtggggacacagccaaaccatagcatttcacccctggcccctccaaatctcatgtcctcacatttcaaaaccaatcatgcattcccarcagtcccccaaagtcttaactcatttcaacattaaccaaaaagtccacagtccaaagttttgtctgagaaaaggcaagtcccttccacctatgagcctgtaaaatccaaagcaagatagttacttcctagatacaatgggggtacaggtattgggtaaatacagccattcaaaatgggagaaattggccaaaacaaaaggtttacagggcccaagcaagtccaaaatccagtgggtcaatcaaattttaaagctccaaaatgatctcctttgactccagatctcacatccaggtcatgctgatgtaaggggtgggttcacatggtcttgggcagctctgcctccgtggctctgcagggtacagcctccctcctggctgctttcacgggctggcattgagtgtctgtggcttttccacgtgca

SEQ ID NO: 558716 - DNA, 546 bp, Homo sapiens
ggaattctgggagatataatttaagttgagatctgggtggggacacagccaaaccatagcatttcacccctggcccctccaaatctcatgtcctcacatttcaaaaccaatcatgcattcccagcagtcccccaaagtcttaactcatttcaacattaaccaaaaagtccacagtccaaagttytgtctgagaaaaggcaagtcccttccacctatgagcctgtaaaatccaaagcaagatagttacttcctagatacaatgggggtacaggtattgggtaaatacagccattcaaaatgggagaaattggccaaaacaaaaggtttacagggcccaagcaagtccaaaatccagtgggtcaatcaaattttaaagctccaaaatgatctcctttgactccagatctcacatccaggtcatgctgatgtaaggggtgggttcacatggtcttgggcagctctgcctccgtggctctgcagggtacagcctccctcctggctgctttcacgggctggcattgagtgtctgtggcttttccacgtgca

SEQ ID NO: 558717 - DNA, 546 bp, Homo sapiens
ggaattctgggagatataatttaagttgagatctgggtggggacacagccaaaccatagcatttcacccctggcccctccaaatctcatgtcctcacatttcaaaaccaatcatgcattcccagcagtcccccaaagtcttaactcatttcaacattaaccaaaaagtccacagtccaaagttttgtctgagaaaaggcaagtcccttccacctatgagcctgtaaaatccaaagcaagatagttacttcctagatacaatgggggtacaggtattgggtaaatacagccattcaaaatgggagaaattggccaaaacaaaaggtttacagggcccaagcaagtccaaaatccagtgggtcaatcaaattttaaagctccaaaatgatctcctttgactccagatctcacatccaggtcatgctgatgtaagrggtgggttcacatggtcttgggcagctctgcctccgtggctctgcagggtacagcctccctcctggctgctttcacgggctggcattgagtgtctgtggcttttccacgtgca

SEQ ID NO: 558718 - DNA, 580 bp, Homo sapiens
tctcccctgtgtccgccccccgcccctcaaaaaaagacagaaaaataaaacctggaaaaaaaaaagactagatcatagttttttgatgcatggtatagatccagcaactttttagtaggttttctgtgtattttattaccatgtgatcaactaaccacaatttgagatccctattgkccaaaagcaatctgattacctgtatgttgctgctgacctttgtgataactattcccaccttgtctttatcagtgacatgctgcctcttggctgccattactccaggactttattaattccattgaaatcagggtagcctcccctctggtcacatttagtctgtgaatgggagcgaccactgagcttttaaaggatacaggtgttccctcactatttataaacatcttagtgaagggagggccttctaagctttctcagaagatgtgattgggagatgggtatgcatgttacacaccaatatttctgtctccctaagcctttggattccttcctccacaccatgcatagacatactggcatctcatcctcattaaatgggggcactgctgagttcaagtttcag

SEQ ID NO: 558719 - DNA, 580 bp, Homo sapiens
tctcccctgtgtccgccccccgcccctcaaaaaaagacagaaaaataaaacctggaaaaaaaaaagactagatcatagttttttgatgcatggtatagatccagcaactttttagtaggttttctgtgtattttattaccatgtgatcaactaaccacaatttgagatccctattggccaaaagcaatctgattacctgtatgttgctgctgacctttgtgataactattcccaccttgtctttatcagtgacwtgctgcctcttggctgccattactccaggactttattaattccattgaaatcagggtagcctcccctctggtcacatttagtctgtgaatgggagcgaccactgagcttttaaaggatacaggtgttccctcactatttataaacatcttagtgaagggagggccttctaagctttctcagaagatgtgattgggagatgggtatgcatgttacacaccaatatttctgtctccctaagcctttggattccttcctccacaccatgcatagacatactggcatctcatcctcattaaatgggggcactgctgagttcaagtttcag

SEQ ID NO: 558720 - DNA, 580 bp, Homo sapiens
tctcccctgtgtccgccccccgcccctcaaaaaaagacagaaaaataaaacctggaaaaaaaaaagactagatcatagttttttgatgcatggtatagatccagcaactttttagtaggttttctgtgtattttattaccatgtgatcaactaaccacaatttgagatccctattggccaaaagcaatctgattacctgtatgttgctgctgacctttgtgataactattcccaccttgtctttatcagtgacatgctgcctcttggctgccattactccaggactttattaaytccattgaaatcagggtagcctcccctctggtcacatttagtctgtgaatgggagcgaccactgagcttttaaaggatacaggtgttccctcactatttataaacatcttagtgaagggagggccttctaagctttctcagaagatgtgattgggagatgggtatgcatgttacacaccaatatttctgtctccctaagcctttggattccttcctccacaccatgcatagacatactggcatctcatcctcattaaatgggggcactgctgagttcaagtttcag

SEQ ID NO: 558721 - DNA, 580 bp, Homo sapiens
tctcccctgtgtccgccccccgcccctcaaaaaaagacagaaaaataaaacctggaaaaaaaaaagactagatcatagttttttgatgcatggtatagatccagcaactttttagtaggttttctgtgtattttattaccatgtgatcaactaaccacaatttgagatccctattggccaaaagcaatctgattacctgtatgttgctgctgacctttgtgataactattcccaccttgtctttatcagtgacatgctgcctcttggctgccattactccaggactttattaattccattgaaatcagggtagcctcccctctggtcacatttagtctgtgaatgggagcgaccactgagcttttaaaggatacaggtgttccctcacwatttataaacatcttagtgaagggagggccttctaagctttctcagaagatgtgattgggagatgggtatgcatgttacacaccaatatttctgtctccctaagcctttggattccttcctccacaccatgcatagacatactggcatctcatcctcattaaatgggggcactgctgagttcaagtttcag

SEQ ID NO: 558722 - DNA, 396 bp, Homo sapiens
atgactgggctggatgtggtggctcacacctgtaatcctagaactttgggaggctgaggcaggcagatcacttgagatcaggagttcaagaccagcctggccaacatggcgaaaccctgtctctgctaaatatacaaaaaattagttggatgtggtggtgcacacctgtaatcccagctactcaggaggctgaagcaggagaatcacttgagcccaggaggtagaggtagcagtgagccgagatcgggtcactgcactccagcctggatgacagagtgacactctgtctcaaaawatatataataataatagtaatgactgaatatatacagaaatacatacttacataagtaaatgaataggagagaatagacaaatctccagtgaagaagaatt

SEQ ID NO: 558723 - DNA, 557 bp, Homo sapiens
atgatctatgttccgcagtcctcaaaatactgtgttatgtattttgttttttgtttgtttgtttgttttttgagacagagttttgctcttattggccaggctagagtgcaatagcgcgatctcggctcactgcaacctcctcctcctgggttcaagtgattgtcttacctccgcctcctgagtagctgggattacaggcatgcgccaccatgcccrgctaatttttgtatttttatggagtttcaccatattggtcaggctggtcttgaactcctgacctcatgtgatccacccaccttggccttccaaagtgctggaattacaggtatgagccactgcacccagcctgttatatatttcaaattcacatgttgaagccctaatctctaatatgactatttgagatagggtctataaggaggtaataaaggttaaatgaggtcataagtattggcccttaacctgatagggcctcttaatctattgggtctcaatatgatgtccttacaaacaggggaagaggcaccagatatctctttttctgcctgtgcacagag

SEQ ID NO: 558724 - DNA, 557 bp, Homo sapiens
atgatctatgttccgcagtcctcaaaatactgtgttatgtattttgttttttgtttgtttgtttgttttttgagacagagttttgctcttattggccaggctagagtgcaatagcgcgatctcggctcactgcaacctcctcctcctgggttcaagtgattgtcttacctccgcctcctgagtagctgggattacaggcatgcgccaccatgcccagctaatttttgtatttttatggagtttcaccatattggtcaggctggtcttgaactcctgacctcatgtgatccacccaccttggccttccaaagtgctggaattacaggtatgagccactgcacccagcctgttatatatttcaaattcacatgttgaagccctaatctctaatatgactatttgagatagggyctataaggaggtaataaaggttaaatgaggtcataagtattggcccttaacctgatagggcctcttaatctattgggtctcaatatgatgtccttacaaacaggggaagaggcaccagatatctctttttctgcctgtgcacagag

SEQ ID NO: 558725 - DNA, 557 bp, Homo sapiens
atgatctatgttccgcagtcctcaaaatactgtgttatgtattttgttttttgtttgtttgtttgttttttgagacagagttttgctcttattggccaggctagagtgcaatagcgcgatctcggctcactgcaacctcctcctcctgggttcaagtgattgtcttacctccgcctcctgagtagctgggattacaggcatgcgccaccatgcccagctaatttttgtatttttatggagtttcaccatattggtcaggctggtcttgaactcctgacctcatgtgatccacccaccttggccttccaaagtgctggaattacaggtatgagccactgcacccagcctgttatatatttcaaattcacatgttgaagccctaatctctaatatgactatttgagatagggtctataaggaggtaataaaggttaaatgaggtcataagtattggcccttaacctgatagggcctcttaatctattgggtctcaatatgatgtccttacaarcaggggaagaggcaccagatatctctttttctgcctgtgcacagag

SEQ ID NO: 558726 - DNA, 580 bp, Homo sapiens
gacaaatactcatgtgtatgggcaaaaataggactgtatttgtgactaactgtataacaggttattttagtttctgttctgtgcaaagtgtaaagcattccaacaaagggttttaatgtagactttttttgcacccatgctgttgattgctaaatgtaatagtctgatcatgacgctgaataaatgtcttttttaaaaaaaaatcctaaattaatgtgaagttagataatattttttaagacacttttatctcatgtttgtatacttattttctattatcatcatgatagcactgataacacacaatttgatcatttctaccttgtgcatagagaataatgactcaaagagattaagatagtgtctgatcctggctaacatggtgaaactctgcctctattaaaaatacaagaaattagccaggcgtggtggcaggtgcctgtagtcccttgggagactgaggcaggaggatggcttgaaaccgggagacggagcttgcagtgagctgagattgctccattgcaccccagcctgggcracagagtgactctgtctcaaaaacaaaacaaaacaaaagata

SEQ ID NO: 558727 - DNA, 592 bp, Homo sapiens
ttatctgcagaatgaaaaataaattggaggaacaacatatatataggacaccataatacaattttatattgagatacatctggattattagtaacrtgcagggataaagaaagaatccttcaagtaaccacgcagaaataaaacaagtcatatacaaaaggaaaaaagtcaagtttacatgattttttcatagtatctttcagagttatgaataatcaagtagtatctagacattctgagggaaagaaattattacctaaatctgttaagcagaacaggtgacccttgaacaacatgggaattgggggtgtcagtcccctcctcagtaaaaaatccactgcaacttttgactccccagacacttaactactaaaagttgactagaagacttactgagaacatcaacacacatattttgcatgttacatgtattgtatactgcattcttacaataaagtaagctagagaaaaaataatgatattaataaggaaaataaaatatatttaagtgcaaatagatctttttaaatgtcttcatcctcatcatcttcacactgagcagactgaggaggagggggaagaagttgaagaa

SEQ ID NO: 558728 - DNA, 592 bp, Homo sapiens
ttatctgcagaatgaaaaataaattggaggaacaacatatatataggacaccataatacaattttatattgagatacatctggattattagtaacatgcagggataaagaaagaatccttcaagtaaccacgcagaaataaaacaagtcatatacaaaaggaaaaaagtcaagtttacatgattttttcatagtatctttcagagttatgaataatcaagtagtatctagacattctgagggaaagaaattattacctaaatctgttaagcagaacaggtgacccttgaacaacatgggaattgggggtgtcagtcccctcctcagtaaaaaatccactgcaacttttgactccccagacacttaactactaaaagttgactagaagacttactgakaacatcaacacacatattttgcatgttacatgtattgtatactgcattcttacaataaagtaagctagagaaaaaataatgatattaataaggaaaataaaatatatttaagtgcaaatagatctttttaaatgtcttcatcctcatcatcttcacactgagcagactgaggaggagggggaagaagttgaagaa

SEQ ID NO: 558729 - DNA, 295 bp, Homo sapiens
gtaaatattctgaaattatatatatttccagagacaatttgttgcatcgaaataatttcaatgtctcagcaaacaaaagactgcrttcaatgccagtatattctcaagttcctctgctttcaaagaaaatgtactttcttgactttgtgatacaatattaaagactaaataaaccctctaggaaagttgtgtaattagtagaaaacattgcatctaaatttaacaaaaccacagaatttaatatgctaagatttaggacattaacttttaaaaacctaaaacaaataaatcaatt

SEQ ID NO: 558730 - DNA, 565 bp, Homo sapiens
gtcaggagatggagaccatcctggctaacacggtgaaaccccatctctactaaaaatacaaaaaagttagtcgggcatggtggtggggcctgtagtcccagctactcaggaggctgaggcaggagaatggcgtgaacccaggaggtggagcttgcagtgagccaagatcgcgccactgcactccagcctgggcgacacagcgagactccatctcaaaaaaaaaaaaaaaaacacaagagaactacaggccaatattattgatgaatatagatscaacaaatcctcaataaaatacaagcaaaccaacacattacaaggaccatacactatgaccaagtcagatttatccctggaataaaaggatgggtaatctaaaattcaattaatgcgatacattaattgatgaaaaaaattacttcaacaggcacagtaaaagcatgtgataaaagtaaacacctttttataaataaatactctgaaaaaatagaaatagaagcaaagtagctcaacataataaaaacatatgtgaaaagcctagttgttaaatcaatggtaaaaactgaaa

SEQ ID NO: 558731 - DNA, 407 bp, Homo sapiens
agcgattctcctgcctcagcctcatgagtagccggaattccaggcgcctcccaccatgtccggctaattttttttttttttttttyagtagagacagggtttcaccattttggccaggctggtctcaaacttctaacagcaggtgatccacctgtcttggcctgccaaagtgctgggattgcaggcgtgagctgtggtgcccatctgagcctatgtttcataatgtggtattgtacacttaaaaatttgttatgagggtagttcttatgttaagtgttctttctattaaaaaaaaaacaaaattttacaaatgaagatgtcttctgttacccccacataactgattgggcatacataggcctcggagtcttcattataaactttgcataaagaatgaagaggacaga

SEQ ID NO: 558732 - DNA, 608 bp, Homo sapiens
attggctctgttcagcaaaatatgttttgttatccatttattatagatatatagaggtctgctctctacaaaagattacaatatcattaaactgcattttgattcattcctttcaaaagtaatatactactatcatttttacaaagtgcattggatattcctcctattataaaggcaataccattcctttgaagaacatttggaaaatacagaaaaacaacaaaaaggaagacaattacttgtaatcctgtcacctaacttagccacttcatttggctctatatctgggtctatatrtaaattagaatctccttgcatattctactttgtaacttgaattttccatttgatattatataataaatatttaccatgtttttatgattctcatacattttaatggctgcctactgcatcacatatagttgaaccatactttattttactaatcacttattgttaagtaggtaggtttgtgacattttattataaataatattgcaatgaacatcattgcttaaaaatgtgtttatttccctttttttattatactttaagttctagggtacatgtgcagaatgtggaggtttgttacataggtatacatg

SEQ ID NO: 558733 - DNA, 608 bp, Homo sapiens
attggctctgttcagcaaaatatgttttgttatccatttattatagatatatagaggtctgctctctacaaaagattacaatatcattaaactgcattttgattcattcctttcaaaagtaatatactactatcatttttacaaagtgcattggatattcctcctattataaaggcaataccattcctttgaagaacatttggaaaatacagaaaaacaacaaaaaggaagacaattacttgtaatcctgtcacctaacttagccacttcatttggctctatatctgggtctatatgtaaattagaatctccttgcatattctactttgtaacttgaattttccatttgatattatataataaatatttaccatgtttttatgattctcatacattttaatggctgcctactgcatcacatatagttgaaccatactttmttttactaatcacttattgttaagtaggtaggtttgtgacattttattataaataatattgcaatgaacatcattgcttaaaaatgtgtttatttccctttttttattatactttaagttctagggtacatgtgcagaatgtggaggtttgttacataggtatacatg

SEQ ID NO: 558734 - DNA, 593 bp, Homo sapiens
cttgaaaaaatgggaaataaatgaatgttttgttattgtaaaacataatatacaaggattcaaagcagccaaatctcaattatgatcactagaaactaaaatctctgttaaatgttgtatccaagaaaactgtaaatttaaatccagaaaagttaatagaacattccgtctttctttattgacttattcattcaacaatatgagtaccaactttatgccaaaactcagactagttgctatatattcaaatattaaaggaaacagacataggacatgcttttgggaagctgaaacattaatgaagsaggcaaacaataaatgaataaacaaaaaaaattaaactgtcatctgtagtttaaaaaaacaacaaagaaagtaggattagagataatgggagtgtagaactttgatagggtggtagtattttcagaggatatgacatttatgctgaggcctgaatgatgcccaggagcctatattaaggagaaataggggcattccagcagaggaaactacacatgcaaaggcctcaaagtatacaagagtttgagaaatagcaagaaggtcagattggagcaaggctagtgcataaa

SEQ ID NO: 558735 - DNA, 570 bp, Homo sapiens
tcaggagtttgagaccagcctggccaacatggtaaaatcctgtctctactaaaaatacaaaaattagctgggcatggtggcacgtgcctgtaatcccagctactcaggaggctgacgcaggagaattgyttgatcctgagaggcagaggttgcagtgagccgagatcacgccactgcactcctgcctgggtgacagagcaagagtccatctcagaataaataaataaacatatttacatttttaaatgactgaaatgaaatcaaaagaagggcaatattgtgtgaaaagtgaaaattatatgaatttcaaatttcaatgtctataaataaagtgttctagggatacagtgtctcatccatttatatagtctatggatttctcagtatatcctcttgcctttccacccaagtcacaaaggaaaaggattctattccccccaatggtaagcaattgaagcagaatttctggttcaccttcccccagaaagcctcaggatgtagttaaaggacaggccaatgttactccttagagtagagcacaggtctgtttggaaactttgggactccagg

SEQ ID NO: 558736 - DNA, 570 bp, Homo sapiens
tcaggagtttgagaccagcctggccaacatggtaaaatcctgtctctactaaaaatacaaaaattagctgggcatggtggcacgtgcctgtaatcccagctactcaggaggctgacgcaggagaattgcttgatcctgagaggcagaggttgcagtgagccgagatcacgccactgcactcctgcctgggtgacagagcaagagtccatctcagaataaataaataaacatatttacatttttaaatgactgaaatgaaatcaaaagaagggcaatattgtgtgaaaagtgaaaattatatgaatttcaaatttcaatgtctataaataaagtgttctagggatacagtgtctcatcyatttatatagtctatggatttctcagtatatcctcttgcctttccacccaagtcacaaaggaaaaggattctattccccccaatggtaagcaattgaagcagaatttctggttcaccttcccccagaaagcctcaggatgtagttaaaggacaggccaatgttactccttagagtagagcacaggtctgtttggaaactttgggactccagg

SEQ ID NO: 558737 - DNA, 570 bp, Homo sapiens
tcaggagtttgagaccagcctggccaacatggtaaaatcctgtctctactaaaaatacaaaaattagctgggcatggtggcacgtgcctgtaatcccagctactcaggaggctgacgcaggagaattgcttgatcctgagaggcagaggttgcagtgagccgagatcacgccactgcactcctgcctgggtgacagagcaagagtccatctcagaataaataaataaacatatttacatttttaaatgactgaaatgaaatcaaaagaagggcaatattgtgtgaaaagtgaaaattatatgaatttcaaatttcaatgtctataaataaagtgttctagggatacagtgtctcatccatttatatagtctatggatttctcagtatatcctcttgcctttccacccaagtcacaaaggaaaaggattctattccccccaatggtaagcaattgaagcagaatttctggttcaccttcccccagaaagcctcaggatgtasttaaaggacaggccaatgttactccttagagtagagcacaggtctgtttggaaactttgggactccagg

SEQ ID NO: 558738 - DNA, 560 bp, Homo sapiens
tactcatttgtttgcatgttgtctatagctgccttctcaccataagaacagaggtaaatagttgcaacagagactgtgatacccataatctggtcctttacagaaattttgctttataccagaccaccagtatctaccttcccattacatcatagcccagccaggccacagtgggctcaggaagcagcattgttgtgggacagatgaatatttcactcgtatacatggtcctatgtgtactgaaggcaggttacattttttgaaaatggaaataaactgaatatcatttctgtaaccttctggtttgtgaataaggaatcatccagactttatccttagggagaactgtctactttggccaaatactgtgtatgtgagagatcttttatttataatctcatttactcttcacaacaactttgaraaatgttattatagccattgtattagtcagagttctccagagaaacagaaacaataggatgtatatatatgatgtatatatatatatatatatgtgtgtgtgtgtgtgtgtgtatgtgtgtgtatcgtgagcgtat

SEQ ID NO: 558739 - DNA, 561 bp, Homo sapiens
taaagttcttgaaaggtgtcttcctgagcttgttttcatttcatcctcgaagcgaccattctagtcccatttttgtcattatcctgagaacctaactcatgtgtgatcctgggcaagtttccccttccccgcctctctttcctcatccagttggcctcgctctatggccaggggttttaattccayatgccagtcatctttaataataacactaaccacagcagtaatgacacatccatttactgaaagactgctatattttagacagcattcctgaaaaataagaggctgtggataaacactaatttctaaaccaactgcaaaatatacccaaaagtcagattttttttttttttttttgagaaggagtttcgctctgtcgcccaggctgcagtgcagtggcgcaatcgccgctcactgcaagctccgcctccagggttcattccattctcctgcctcagcctcccgagtagctgggactgcaggtgcccaccaccacgcccaactaatttttgtatttttagtagagatgggctttcaccttgttagccaggatggtct

SEQ ID NO: 558740 - DNA, 437 bp, Homo sapiens
aaaaacctgatatagtatataaatcatgatatgtcacatttatgattcatttctgaatctaagaatttctttaaattttttattgaaaattccagttgctgctgcagagtagtttctccaaattggaattaattaaaatcaatctaaattataaaggctcaagaaaactggtttcatttggcattagtatcaacagaaaacaaactatatattataaaattttcaattatgaaagcacaactagtgacttcattgagagtaaaacaagaaaataaattttataaaaaaawacataatttatgaataatgttggtctttattgttttactctttgaaacactacctgtccattaacagaacatctagacatatgcgataaaagttatattcagtaatctttgacactttgtcaacttttagtcatattaagacataat

SEQ ID NO: 558741 - DNA, 437 bp, Homo sapiens
aaaaacctgatatagtatataaatcatgatatgtcacatttatgattcatttctgaatctaagaatttctttaaattttttattgaaaattccagttgctgctgcagagtagtttctccaaattggaattaattaaaatcaatctaaattataaaggctcaagaaaactggtttcatttggcattagtatcaacagaaaacaaactatatattataaaattttcaattatgaaagcacaactagtgacttcattgagagtaaaacaagaaaataaattttataaaaaaatayataatttatgaataatgttggtctttattgttttactctttgaaacactacctgtccattaacagaacatctagacatatgcgataaaagttatattcagtaatctttgacactttgtcaacttttagtcatattaagacataat

SEQ ID NO: 558742 - DNA, 518 bp, Homo sapiens
cggtaaaaaaatcacatattaaatgatatataattaaaattaaattatttcataatatttttcatgataaaaataatgtatcacaaaaacctgatatagtatataaatcatgatatgtcacatttatgattcatttctgaatctaagaatttctttaaattttttattgaaaattccagttgctgctgcagagtagtttctccaaattggaattaattaaaatcaatctaaattataaaggctcaagaaaactggtttcatttggcattagtatcaacagaaaacaaactatatattataaaattttcaattatgaaagcacaactagtgacttcattgagagtaaaacaagaaaataaattttataaaaaaatacataatttatgaataatgttggtctttattgttttactctttgaaacactayctgtccattaacagaacatctagacatatgcgataaaagttatattcagtaatctttgacactttgtcaacttttagtcatattaagacat

SEQ ID NO: 558743 - DNA, 454 bp, Homo sapiens
tctcaccttgtcaagaagggcaaactctaacaaacatttcccaaaaattcttcctgctaaaacgtaagctcagtctggctagaaattaagctcacttcataaaaattagttggtagctaatctttgcacactgttctctgaacctgagagaaagctgtccatcaggcatacarggaatgacggaaaagatgacaacagaagatgaatgctatgtcactaaccttcaaagatgacctgccttttctttcaaattcttgatatcttaagacttcattaattcatctttctttgcccttggttcaacattgtgctataccaaaactcatgtaaaacaatgatctattgtaataaaaatggcatttttctttcatgtagatgcaagctctctggcatttttacaatcaaaatagttccgttgtcaatttttcattctgtattggaagtaattggtagg

SEQ ID NO: 558744 - DNA, 421 bp, Homo sapiens
atcctttctttcaccactaagttgaatatttgctcttggcttttcacaggtgccatgtatctggtgtagaaagttctctattcctggttcattgagtttttatttttatttttaatcattaaagcatttggattttgttaaatgtcttttctgaatctatcgacatgatcatgcaattctygtttcttattctatggataagatgtattaccttaatggattttggggtgttaaaccaacctgagattactagtataaatttcactttgtcatagtgtataattcttttatatgttgctagatctgatttgttagtagtttttaaggaattttgcatttatacttatagtagttttatttttctatgctatttggactaatttttgtatcaaggtaacactggccccacagaataaattgg

SEQ ID NO: 558745 - DNA, 421 bp, Homo sapiens
atcctttctttcaccactaagttgaatatttgctcttggcttttcacaggtgccatgtatctggtgtagaaagttctctattcctggttcattgagtttttatttttatttttaatcattaaagcatttggattttgttaaatgtcttttctgaatctatcgacatgatcatgcaattcttgtttcttattctatggataagatgtattaccttaatggattttgggstgttaaaccaacctgagattactagtataaatttcactttgtcatagtgtataattcttttatatgttgctagatctgatttgttagtagtttttaaggaattttgcatttatacttatagtagttttatttttctatgctatttggactaatttttgtatcaaggtaacactggccccacagaataaattgg

SEQ ID NO: 558746 - DNA, 294 bp, Homo sapiens
tttgtctaaccctcaataaatttgctttcatcaaatattgtatttattatcccaaaattaccatcatgtttttttctccaaataactaacattgggagaaatagccagctgaatctgtaactcaacagaaacaagtgatccatmtaccatataagtggccatttcattttgcctccttccaccaaatcttagcaacctcaaccattgccatgagcccctgtaggcctaccgtctacaaacaaaccagtatcttttaaaaacacttcacactcccatttgataaatttcccagca

SEQ ID NO: 558747 - DNA, 294 bp, Homo sapiens
tttgtctaaccctcaataaatttgctttcatcaaatattgtatttattatcccaaaattaccatcatgtttttttctccaaataactaacattgggagaaatagccagctgaatctgtaactcaacagaaacaagtgatccatctaccatataagtggccatttcattttgcctccttccaccaaatcttagcaacctcaaccattgccatgagcccctgtaggcctaccgtctacaaacaaaccagtatcttttaaaaacacttcayactcccatttgataaatttcccagca

SEQ ID NO: 558748 - DNA, 439 bp, Homo sapiens
attttcacaacatattaatattatagaaaatgttgaacttaacagttaagatacaagtagtgaaaaatgatagtatttaaggagatctagaaaatttaatctatacctgtaatgtgtgagaagtattagaataatgcttgtatttstggattggcatcgatttctattgagactggaaacataatagaagtgaggggaaaagaatttaaattgtggatacttgagttttatacctaggagtttgagaaatacattttgttactatcaaagcagttggcacaagagtgtacaaaattccctaattgtgtctatgtggagaagacatagacaaacagagaatagcaaaacagaaatagcaaaaaagcagagataaattttacctgtatttttaagtaaaagccaattagagaaggaaaacatgaaatttgtgttttatcaa

SEQ ID NO: 558749 - DNA, 439 bp, Homo sapiens
attttcacaacatattaatattatagaaaatgttgaacttaacagttaagatacaagtagtgaaaaatgatagtatttaaggagatctagaaaatttaatctatacctgtaatgtgtgagaagtattagaataatgcttgtatttctggattggcatcgatttctattgagactggaaacataatagaagtgaggggaaaagaatttaaattgtggatacttgagttttatacctaggagtttgagaaatacattttgttactatcaaagcagttggcacaagagtgtacaaaattccctaattgtgtctatgtggagaagacatagacaaacagagaatagcaaaacagaaatagcaaaaaagcasagataaattttacctgtatttttaagtaaaagccaattagagaaggaaaacatgaaatttgtgttttatcaa

SEQ ID NO: 558750 - DNA, 265 bp, Homo sapiens
tcgatttctattgagactggaaacataatagaagtgaggggaaaagaatttaaattgtggatacttgagttttatacctaggagtttgagaaatacattttgttactatcaaagcagttggcacaagagtgtacaaaattccctaattgtgtctatgtggagaagacatagacaaacagagaatagcaaaacagaaatagcaaaaaagcagarataaattttacctgtatttttaagtaaaagccaattagagaaggaaaacatg

SEQ ID NO: 558751 - DNA, 317 bp, Homo sapiens
aaaggcatctaagcatgcaaggaaatgatattccaccatttgaaaggaaagcagaaaargagtacaaacagatccacaaaggttcattagtagaaatatcactgttagattataaagcacatttgctttcaaaaaattttttaaaaaatgaatatattgttaggagactaaaaaattcatgtagcaaatttgaaaagtagtttgtataaaaatatagttattttaaattaaaaactcaaaaatgaactcatcagattagacatggccaaggtaacagttcataaatatttcagaatgcattacagaaaattttaaaa

SEQ ID NO: 558752 - DNA, 317 bp, Homo sapiens
aaaggcatctaagcatgcaaggaaatgatattccaccatttgaaaggaaagcagaaaaagagtacaaacagatccacaaaggttcattagtagaaatatcactgttagattataaagcacatttgctttcaaaaaattttttaaaaaatgaatatattgttaggagactaaaaaattcatgtagcaaatttgaaaagwagtttgtataaaaatatagttattttaaattaaaaactcaaaaatgaactcatcagattagacatggccaaggtaacagttcataaatatttcagaatgcattacagaaaattttaaaa

SEQ ID NO: 558753 - DNA, 317 bp, Homo sapiens
aaaggcatctaagcatgcaaggaaatgatattccaccatttgaaaggaaagcagaaaaagagtacaaacagatccacaaaggttcattagtagaaatatcactgttagattataaagcacatttgctttcaaaaaattttttaaaaaatgaatatattgttaggagactaaaaaattcatgtagcaaatttgaaaagtagtttgtataaaaatatagttattttaaattaaaaactcaaaaatgaactcatcagattagacatggccaaggtaasagttcataaatatttcagaatgcattacagaaaattttaaaa

SEQ ID NO: 558754 - DNA, 497 bp, Homo sapiens
ttactgccaccttgtggatattctgttattataggctattataaaaagcaatgaggttatgtaatctgttctaacaagaarcatttcctttttttgtcgtttttattattgttattattacattttaagttctgagatacatgtacagaacgtggaggtttgttacataggtatacacatgccatggtggtttactgcacccatcaacccatcatctacattaggtatttctcctaatgctatcactcccccagcctcccacccccctgacaggccccggtatgtgatgttcccctccctgtgtccatgtgttctcattgttcaactcaaaagaaaaacagaagcatttcctgctttcccaatttcttagatacaatgcaactttatgtttaatttaactaacttaattttttgagacaaggtctagctctgttgcccaggctgcagtggagtggcgtgaatatggttcagtgaaacctccacctccctggctcaag

SEQ ID NO: 558755 - DNA, 488 bp, Homo sapiens
gcatccccatgtttattgcaacagtgttcacaatagccaagatatggaatcaacctagtttccaacaacagatgaatggacttttaaaatatggtatatatacaccaaggaatgctatttagcgataaaraagaataaataaaatcctgtcattctcagcaacatggatggaactggaggatattatgttaagcaaaataagccaggaatagaaatttcaacaccacatgttctcactcacgcagaagctaaaaaaaaaagttgatcttatagaagtaaaaagtagaacagaggatactgcaggctgaaaagggtagggagaaaggaggaatagtaagagatttgttaatggatacaaaattacagctaggtaggagtaataagttctagtgttctatagtaccgtagatgactatagttaacaatactatattatgtagtttgaaatacctaggagtagtatgaatgttcccaacacaaagaaatgg

SEQ ID NO: 558756 - DNA, 495 bp, Homo sapiens
atacgttgaaaatatcagtaaggatgttttcccytcctttttagcacctgtgcttgtgatacaagcacattttaatacaattgtagtctcatgctttgatcattcctatgatgaaaataacatttttagataaaatatctgagttttatgaggcctttagtatgtgatgtgatagaatatcagaagaccatacttttttctagttttccgtgcaattctatcattgtttcatctttactcctaccagagtaattttccaaaatagatatcttgtcattcttcctgttgttatcagtaaataagtgaaatgaaaagctagattatataatttatctagaacaagaaagtagaattgaatctatattcattaatgagactaaccagtcaattacacagataggcattttacattttgaagatcatatggacccattgtcagaaatattattatttatgtctatatggacatcacctgtgcatatttacatagaaatc

SEQ ID NO: 558757 - DNA, 495 bp, Homo sapiens
atacgttgaaaatatcagtaaggatgttttcccctcctttttagcacctgtgcttgtgatacaagcacattttaatacaattgtagtctcatgctttgatcattcctatgatgaaaataacatttttagataaaatatctgagttttatgaggcctttagtatgtgatgtgatagaatatcagaagaccatacttttttctagttttccrtgcaattctatcattgtttcatctttactcctaccagagtaattttccaaaatagatatcttgtcattcttcctgttgttatcagtaaataagtgaaatgaaaagctagattatataatttatctagaacaagaaagtagaattgaatctatattcattaatgagactaaccagtcaattacacagataggcattttacattttgaagatcatatggacccattgtcagaaatattattatttatgtctatatggacatcacctgtgcatatttacatagaaatc

SEQ ID NO: 558758 - DNA, 495 bp, Homo sapiens
atacgttgaaaatatcagtaaggatgttttcccctcctttttagcacctgtgcttgtgatacaagcacattttaatacaattgtagtctcatgctttgatcattcctatgatgaaaataacatttttagataaaatatctgagttttatgaggcctttagtatgtgatgtgatagaatatcagaagaccatacttttttctagttttccgtgcaattctatcattgtttcatctttactcctaccagagtaattttccaaaatagatatcttgtcattcttcctgttgttatcagtaaataagtgaaatgaaaagctagattatataatttatctagaacaagaaagtagaattgaatctatattcattaatgagactaaccagtcaattacacagataggcattttayattttgaagatcatatggacccattgtcagaaatattattatttatgtctatatggacatcacctgtgcatatttacatagaaatc

SEQ ID NO: 558759 - DNA, 566 bp, Homo sapiens
aagctgatttttaaaatactgagatcatatagatgacagcacctgaaaaatagacaacaccaagctttatgttaaaaggtgtgagggtatcaatattgttgtggctattggggaggaaacattagtaaaaccatttagttaaagctattgctttaaactttggctttaatttaacaaatgttctatggagtgacagtatgtatgtaaccatgctatgcccattcacagatgcagtagagggaagaatttctcaaagacaactgttctaacactcaaattaaaccgtmctgggtttgaaaagagaaagtccaggaattaccaaatattttagatatcagataaaagagaatgccaggtatgcgatgataatcagcaatggttgttcacacaatacatcaaatcagtatttgaattagcttttgaattacaaggacaaatggatcaagtctagactctttagtagataaatcttattaggctgagatgtgttttcccctgtttttccacaaggagattacaaatttgcaaacctcagctgctctcattttatgctctcaccaagccaa

SEQ ID NO: 558760 - DNA, 533 bp, Homo sapiens
ttgtatcttaaaagtcagtgatgttgagtaatttctcatgccaccacccccaaggttgcctttcttctgtcttcttctttcacttataaggaagtttgtgatttcattgatcccacccatttaagacaatctctctatcatttttccgcaaccttaatttcacttgaaatctaatttcacactgccgtgcaacctaacatatttgtatgttagactctgggaattaggacatgaaaatttttgggaggccattcttttgcctacagcagacataatctatttaacctgcagattaaagcgttctttatttttctgtctccctgtcttaatttttttaaaataatatgaattgtagtaaagagaaagaaagaaaagaaaacaaagaaagaaaaagaaggaaggaaagaaggaaggaaataaagaaaaaagagggaaaagaaggaggaaatgagggaaggaagrgagggagggaggaagggagaaaggcaggaagggagaaaaaagaaaacatgaacacaagaaagaaagaagga

SEQ ID NO: 558761 - DNA, 533 bp, Homo sapiens
ttgtatcttaaaagtcagtgatgttgagtaatttctcatgccaccacccccaaggttgcctttcttctgtcttcttctttcacttataaggaagtttgtgatttcattgatcccacccatttaagacaatctctctatcatttttccgcaaccttaatttcacttgaaatctaatttcacactgccgtgcaacctaacatatttgtatgttagactctgggaattaggacatgaaaatttttgggaggccattcttttgcctacagcagacataatctatttaacctgcagattaaagcgttctttatttttctgtctccctgtcttaatttttttaaaataatatgaattgtagtaaagagaaagaaagaaaagaaaacaaagaaagaaaaagaaggaaggaaagaaggaaggaaataaagaaaaaagagggaaaagaaggaggaaatgagggaaggaagggagsgagggaggaagggagaaaggcaggaagggagaaaaaagaaaacatgaacacaagaaagaaagaagga

SEQ ID NO: 558762 - DNA, 533 bp, Homo sapiens
ttgtatcttaaaagtcagtgatgttgagtaatttctcatgccaccacccccaaggttgcctttcttctgtcttcttctttcacttataaggaagtttgtgatttcattgatcccacccatttaagacaatctctctatcatttttccgcaaccttaatttcacttgaaatctaatttcacactgccgtgcaacctaacatatttgtatgttagactctgggaattaggacatgaaaatttttgggaggccattcttttgcctacagcagacataatctatttaacctgcagattaaagcgttctttatttttctgtctccctgtcttaatttttttaaaataatatgaattgtagtaaagagaaagaaagaaaagaaaacaaagaaagaaaaagaaggaaggaaagaaggaaggaaataaagaaaaaagagggaaaagaaggaggaaatgagggaaggaagggagggagggaggaagggagaaagkcaggaagggagaaaaaagaaaacatgaacacaagaaagaaagaagga

SEQ ID NO: 558763 - DNA, 321 bp, Homo sapiens
aaatttaagtgtaatgatgcaaaattttgtttaaaagtaaatgtatataaaagtgttgatatagactaaaacattgaataagyaagaaggtagttagttgtcacagtaggagtgaagtgaaaagcttcgcctttcaccctctgaagattacccgaaatgaactgaccatacacagattaataaaagaaagggtatacaaacttacataacctgcaaaaacatgagagctatacacaaagtataagacttgaagatggctcagatctgaaatgctctcctcataggcaatagatatatagacccaggatgcagacattattt

SEQ ID NO: 558764 - DNA, 321 bp, Homo sapiens
aaatttaagtgtaatgatgcaaaattttgtttaaaagtaaatgtatataaaagtgttgatatagactaaaacattgaataagcaagaaggtagttagttgtcacagtaggagtgaagtgaaaagcttcscctttcaccctctgaagattacccgaaatgaactgaccatacacagattaataaaagaaagggtatacaaacttacataacctgcaaaaacatgagagctatacacaaagtataagacttgaagatggctcagatctgaaatgctctcctcataggcaatagatatatagacccaggatgcagacattattt

SEQ ID NO: 558765 - DNA, 532 bp, Homo sapiens
ttcttacaaagttgtttctatgtctcaggtactattctgaacaacatacgtgcatcttgattgcgtgaagaattcctatataagaaaaacacaaacaacaacatttaaaatgagcaaaaaacccgaataggaatttcacggaagagaaaacataaatggcccataaacataataaaagatgctcaactacaattctaatcagggaaataaacattaaaaccccaaagagataccacttcatactctaggaaaaacctaaaaggctgtgaatatctagtttcattgaggaagarcaatgggaagactattcactgctggtgagggtgtagattggtacaactgctttggagtatgatgccactcaatagagctgaacacacacatgcccaatgaccaagcaattccactccaggtacatactgtaaaaatactcctgcacatgtagaataggagacactgcataacaaagttcactacaacatgaggccgaggtgggaagatggcttgagaccaggagttcgaggctgcacca

SEQ ID NO: 558766 - DNA, 445 bp, Homo sapiens
cttgcttttagtatattcacaatgttccagggcaatttcatcatgtcccttmcaaaaacccattatgcataaagttgttacaccctattctgcttccctgagccctaatgaccactaatctaatttacatcccaattgatttgccaattcctgatgtttcatgtgaataaaatcaagtgatatttgtccttttgtgcacttaacataatgctttcaaatttcaccaatattataccatatataagtacttcattctttgttatagctgaaaatttggtgtccatttatgagtcaacaagcatatggattgtttccactttttgactgtatgaatattactgctgtaaatattcatgcacatgtttattttttgagcacctatgttttgtaagattaacagctgacttaagagaaacaatggaaggcaagaggcagtagaataata

SEQ ID NO: 558767 - DNA, 445 bp, Homo sapiens
cttgcttttagtatattcacaatgttccagggcaatttcatcatgtcccttccaaaaacccattatgcataaagttgttacaccctattctgcttccctgagccctaatgaccactaatctaatttacatcccaattgatttgccaattcctgatgtttcatgtgaatmaaatcaagtgatatttgtccttttgtgcacttaacataatgctttcaaatttcaccaatattataccatatataagtacttcattctttgttatagctgaaaatttggtgtccatttatgagtcaacaagcatatggattgtttccactttttgactgtatgaatattactgctgtaaatattcatgcacatgtttattttttgagcacctatgttttgtaagattaacagctgacttaagagaaacaatggaaggcaagaggcagtagaataata

SEQ ID NO: 558768 - DNA, 563 bp, Homo sapiens
atgtacagcttacacgtattgattgatatcttatgtctccctaaaacgtgtaaaaccaacctgtagcccgacgacctttgacacacattctcaagacctcctgaggctgtttcactgatatttctttaactttgaccaaataaatttctaaagtgattgagacttttctcagatacttatttgtttataggtatcactggatacacttaaggaattgaagagattgatgacattgagaaaaggaggaagccagggtgtgtggagagagagagagagagagagagagattgtgatgtatgtacaggactaacactgagacctggttatgtaatggtgtagtactgagtatcatccccaaatagtgaggtttcattccawgaagactatgcatgtatctcatttgggaaaacagcttttgcaggtgtaaattaaggagcctgaaacagggagatggtcttagattaatcaactgggacttaaatgcaaactcaagtgtcctaaaaaaaaacaagaggtagagagacatttagcatagactgaagtggagaaggtagtgtgaacac

SEQ ID NO: 558769 - DNA, 442 bp, Homo sapiens
gacattgagaaaaggaggaagccagggtgtgtggagagagagagagagagagagagagattgtgatgtatgtacaggactaacactgagacctggttatgtaatggtgtagtactgagtatcatccccaaatagtgaggtttcattccaagaagactatgcatgtatctcatttgggaaaacagcttttgcaggtgtaaattaaggagcctgaaacagggagatggtcttagattaatcaactgggacttaaatgcaaactcaagtgtcctaaaaaaaaacaagaggtagagagacatttagcatagactgaagtggagaaggyagtgtgaacacagagacagagattgcagtgatgtgtccacatcccgggagagagaagccaccagaagctggaagagctaaatcagactgctccctagagcttcagaaggagccagaac

SEQ ID NO: 558770 - DNA, 348 bp, Homo sapiens
acaaagttcgggaaacaagcaagtgagcaagggaggggaggagggaaagggaaagtgaaaggtgcctcagaaggagccacctctgaggatgacgagagctcaagcccacatagaaacacaggaaaaatgcctctgttattccacatgagaggtgagggagctgcgggatgtgtacacctccccttgtcatcactgattggcagccgtcctaggggatgctaattccaggccrtgaggtctgcctcatttgcagcctgagctgcttccccaggttcagacagagcagtgaaggggagaaagggccatagagagtcagctgaagtataatgactagaatccccaaggcgc

SEQ ID NO: 558771 - DNA, 527 bp, Homo sapiens
tttcccagaaatccagtcctctggaaaagcagcagsaggtttgtgcacaggctgcactaccttggtctggccactggtagtcatgcatgagaactactccctggcgtatttctcagtccactgacactgatgtaattggctccacttcccctgctgttgagccaggccgacacgccctgggcaaaggcatctgtgtgaagtattgaggtgcaaatcagtgcttaagatatgtttggaggcaaaatactttttcatctacatgggcagtgtcttggcagaagatggagattctctctaaatggatgtgagacagggtggctggcatctgggtcaggatgatgccctggtgcatggcaagaacatgcattgggcagcagctgccctcgctaaggagagaggttcactgacctggcttttcccccctcacctgctctccagaaagccagactctagggcagatgctcctgagaccccaggaacaggctggtggggagcgcagctcagagcattactcaggggatgtggcc

SEQ ID NO: 558772 - DNA, 527 bp, Homo sapiens
tttcccagaaatccagtcctctggaaaagcagcagcaggtttgtgcacaggctgcactaccttggtctggccactggtagtcatgcatgagaactactccctggmgtatttctcagtccactgacactgatgtaattggctccacttcccctgctgttgagccaggccgacacgccctgggcaaaggcatctgtgtgaagtattgaggtgcaaatcagtgcttaagatatgtttggaggcaaaatactttttcatctacatgggcagtgtcttggcagaagatggagattctctctaaatggatgtgagacagggtggctggcatctgggtcaggatgatgccctggtgcatggcaagaacatgcattgggcagcagctgccctcgctaaggagagaggttcactgacctggcttttcccccctcacctgctctccagaaagccagactctagggcagatgctcctgagaccccaggaacaggctggtggggagcgcagctcagagcattactcaggggatgtggcc

SEQ ID NO: 558773 - DNA, 527 bp, Homo sapiens
tttcccagaaatccagtcctctggaaaagcagcagcaggtttgtgcacaggctgcactaccttggtctggccactggtagtcatgcatgagaactactccctggcgtatttctcagtccactgacactgatgtaattggctccacttcccctgctgttgagccaggccgacacgccctgggcaaaggcatctgtgtgaagtattgaggtgcaaatcagtrcttaagatatgtttggaggcaaaatactttttcatctacatgggcagtgtcttggcagaagatggagattctctctaaatggatgtgagacagggtggctggcatctgggtcaggatgatgccctggtgcatggcaagaacatgcattgggcagcagctgccctcgctaaggagagaggttcactgacctggcttttcccccctcacctgctctccagaaagccagactctagggcagatgctcctgagaccccaggaacaggctggtggggagcgcagctcagagcattactcaggggatgtggcc

SEQ ID NO: 558774 - DNA, 550 bp, Homo sapiens
ggtattatcatgcactctgattaaggtaaatgggaaactatacccaatccaggtaggactacamatggtccagatcctctccgggtcacgacctgctgaggtgcttgctgaaggcaaagggaatacagaataaatagtggaagaaagtagttatcaataccagctacgaccacctgaccagctgcagaaatgaggactggaactatcatgagtatttccttcttcttttgttaaaaacatgtttgtgcatgtatgcacttgtactaagaaaatatcttcatttcatttcccttttctttatcaggtgacatagatttgctgacctcatatcagcatttaagtattgtttactttatgtaagagtatttgggttggggatgggtgcatttccagttgtaggaaggatagtttattatgttaggggtaattatgaccttactattgaaaatattttaagattatgtatgatctcaggagatgtgtgtgggttcaagttcacaaggggtgggcttgtgatggttaataatgagtgtcaacttgattggattga

SEQ ID NO: 558775 - DNA, 550 bp, Homo sapiens
ggtattatcatgcactctgattaaggtaaatgggaaactatacccaatccaggtaggactacaaatggtccagatcctctccgggtcacgacctgctgaggtgcttgctgaaggcaaagggaatacagaatraatagtggaagaaagtagttatcaataccagctacgaccacctgaccagctgcagaaatgaggactggaactatcatgagtatttccttcttcttttgttaaaaacatgtttgtgcatgtatgcacttgtactaagaaaatatcttcatttcatttcccttttctttatcaggtgacatagatttgctgacctcatatcagcatttaagtattgtttactttatgtaagagtatttgggttggggatgggtgcatttccagttgtaggaaggatagtttattatgttaggggtaattatgaccttactattgaaaatattttaagattatgtatgatctcaggagatgtgtgtgggttcaagttcacaaggggtgggcttgtgatggttaataatgagtgtcaacttgattggattga

SEQ ID NO: 558776 - DNA, 545 bp, Homo sapiens
agttatcaataccagctacraccacctgaccagctgcagaaatgaggactggaactatcatgagtatttccttcttcttttgttaaaaacatgtttgtgcatgtatgcacttgtactaagaaaatatcttcatttcatttcccttttctttatcaggtgacatagatttgctgacctcatatcagcatttaagtattgtttactttatgtaagagtatttgggttggggatgggtgcatttccagttgtaggaaggatagtttattatgttaggggtaattatgaccttactattgaaaatattttaagattatgtatgatctcaggagatgtgtgtgggttcaagttcacaaggggtgggcttgtgatggttaataatgagtgtcaacttgattggattgaaggatgtaaagtattcatcctgggtgtgtctgtgagggtgttgccaaaaaaaaattaacatgtgagtcagtgggctgggaaaggcagacccacccttaatctgtgtgggcacaatccaatcagctgccaacccagccatatta

SEQ ID NO: 558777 - DNA, 291 bp, Homo sapiens
ggaactatcatgagtatttccttcttcttttgttaaaaacatgtttgtgcatgtatgcacttgtactaagaaaatatcttcatttcatttcccttttctttatcaggtgacatagatttgctgacctcatatcagcatttaagtattgtttactttatgtaakagtatttgggttggggatgggtgcatttccagttgtaggaaggatagtttattatgttaggggtaattatgaccttactattgaaaatattttaagattatgtatgatctcaggagatgtgtgtgggt

SEQ ID NO: 558778 - DNA, 291 bp, Homo sapiens
ggaactatcatgagtatttccttcttcttttgttaaaaacatgtttgtgcatgtatgcacttgtactaagaaaatatcttcatttcatttcccttttctttatcaggtgacatagatttgctgacctcatatcagcatttaagtattgtttactttatgtaagagtatttgggttggggatkggtgcatttccagttgtaggaaggatagtttattatgttaggggtaattatgaccttactattgaaaatattttaagattatgtatgatctcaggagatgtgtgtgggt

SEQ ID NO: 558779 - DNA, 496 bp, Homo sapiens
ggcctcgcctcccagcctacatctttctcccatgctggatgcttcttgccctcgaacatggactccaagttcttcagttttggaactctggctggctctttttgctcctcatccagcagatggcctattgtgagacttggtgattgtgtgagttaatacttaataaacttcctgtataagccagtgacatctagagggacagaactaacaggatatatacatatatatatacatacacacacacatatatatatgcacacacacacacacacatatatatatttatttacaaaggggagtttattaacttacrggatcataagttacacaatgggctgtctgcaaactgatgagaaaggagagccatggagtccaatgtttgagggcaggaagaaaccagcatgggagaaaaaagatgtaggctgggaggctaggccagtctctccttttcaaatttttctgcctgctttatatttgctggcagcagattagattg

SEQ ID NO: 558780 - DNA, 496 bp, Homo sapiens
ggcctcgcctcccagcctacatctttctcccatgctggatgcttcttgccctcgaacatggactccaagttcttcagttttggaactctggctggctctttttgctcctcatccagcagatggcctattgtgagacttggtgattgtgtgagttaatacttaataaacttcctgtataagccagtgacatctagagggacagaactaacaggatatatacatatatatatacatacacacacacatatatatatgcacacacacacacacacatatatatatttatttacaaaggggagtttattaacttacaggatcataagttacacaatgggctgtctgcaaactgatgagaaaggagagccatggagtccaatgtttgagggcaggaagaaaccagcatgggagaaaaaagatgtaggctgggaggctaggccagtctctccttttcaaatttttytgcctgctttatatttgctggcagcagattagattg

SEQ ID NO: 558781 - DNA, 358 bp, Homo sapiens
taagtatgcttacatttctataaacaatatcctttgactcccaggcattacagatgagcagtcagtaaaatcattctgaggaatactttctctttccttttcttccatttttcttagttgtatcatttctatattgccagagcacctacagttgcatttctttctgtcagctttatccagcatttgtttttgtcttttatttgaagttaaatatattccttgctcactacaacactgggggaaggraggtttctgttgtcattgttgtgcttgtacagttgtgtatttaaaaacattggcgaaaacaaaaactgtacgtagatggaatggagataagacagaaaatgagagagactga

SEQ ID NO: 558782 - DNA, 358 bp, Homo sapiens
taagtatgcttacatttctataaacaatatcctttgactcccaggcattacagatgagcagtcagtaaaatcattctgaggaatactttctctttccttttcttccatttttcttagttgtatcatttctatattgccagagcacctacagttgcatttctttctgtcagctttatccagcatttgtttttgtcttttatttgaagttaaatatattccttgctcactacaacactgggggaaggaaggtttctgttgtcattgttgtgcttgyacagttgtgtatttaaaaacattggcgaaaacaaaaactgtacgtagatggaatggagataagacagaaaatgagagagactga

SEQ ID NO: 558783 - DNA, 509 bp, Homo sapiens
tgtcaactggtggagagttttccccaggagacatttgtcaatgtctagggttattgtggggatgtcaagactggtggaggtgtgaaatttagaggtcaaacgaaacacctagcattgctagggcagcctcccacaacaaagaatcctctggtcctaaagttaagtagcaccaaggttgagaaaccataatctagacagyaaacactacgtagctattccaagtgctcaggaaaacacatcagtgccctcgaggggaaaagtgtgaacattttaattgccgtacatggtgacacaaatccatgttgttaatctaagtggaaggggctgaagcacaaaacgtaattcaaagagtttacttgagccacaatgaggacagctgcctggaagaaacagacccacgtatccttggatatgaactccctttggagctttgcaacaagcagtttcttaaaggcaaaaaagggtccagaagtgggatgatccaaagaggtttgtcacaaattctcatt

SEQ ID NO: 558784 - DNA, 376 bp, Homo sapiens
tcttttcgaggatgaagtaaatggaatgaaaaacaaaacccaagctgaccagaaatcatagagggaagaaaaggttataaatatatggatttttcaaagtgattttaagctattaggaatcagttaaatgttgggggattttgtctgagaatgggctaaaggagaatgtcccttttgccttctgaagtttccctgaaaatcactaataggaggcagataaatagtagaaaaggcatacaggtttctgcaatgtgtgtacactggagcccttagaacgaagacccagacacacgatgcgtgcagaagctyatctaccacatgaagtttacagaaagaatggggtcttggatcacagggaaaaaaaaaaaaggttatg

SEQ ID NO: 558785 - DNA, 575 bp, Homo sapiens
cgatgcgtgcagaagctcatctaccacatgaagtttacagaaagaatggggtcttggatcacagggaaaaaaaaaaaaggttatgtgagaaaacgaccctggctagcgacagtgggcttattacataggtggaacctcactgggagcagtcctcagagagaatagagaraaaatgtttctttcagacctttggagacctcagactctcagttaacctttcctagatccagacaagggggcagacctcagagaaagcctggctgcatcaaggcagattctctactgacgcaaatctccccaagacagctttgcagctaagtttgcatttccagcccttctcaatagccattttgaaatatatcaaggaaatatatttaggggtaaaatatattagtttccctcatacagctataaaacatacaggaataatttttgtcaatgtctactacaaatccaatatagcagtaattataaaacccaccagatattgaagaaaaaatatgtagagtacatcaattgcaaatgttgatactaaaatgccaaataaaataaaaataatatccaacaatatttga

SEQ ID NO: 558786 - DNA, 200 bp, Homo sapiens
agagaatagagaaaaaatgtttctttcagacctttggagacctcagactctcakttaacctttcctagatccagacaagggggcagacctcagagaaagcctggctgcatcaaggcagattctctactgacgcaaatctccccaagacagctttgcagctaagtttgcatttccagcccttctcaatagccattttgaaa

SEQ ID NO: 558787 - DNA, 575 bp, Homo sapiens
cgatgcgtgcagaagctcatctaccacatgaagtttacagaaagaatggggtcttggatcacagggaaaaaaaaaaaaggttatgtgagaaaacgaccctggctagcgacagtgggcttattacataggtggaacctcactgggagcagtcctcagagagaatagagaaaaaatgtttctttcagacctttggagacctcagactctcagttaacctttcctagatccagacaagggggcagacctcagagaaagcctggctgcatcaaggcagattctctacygacgcaaatctccccaagacagctttgcagctaagtttgcatttccagcccttctcaatagccattttgaaatatatcaaggaaatatatttaggggtaaaatatattagtttccctcatacagctataaaacatacaggaataatttttgtcaatgtctactacaaatccaatatagcagtaattataaaacccaccagatattgaagaaaaaatatgtagagtacatcaattgcaaatgttgatactaaaatgccaaataaaataaaaataatatccaacaatatttga

SEQ ID NO: 558788 - DNA, 575 bp, Homo sapiens
cgatgcgtgcagaagctcatctaccacatgaagtttacagaaagaatggggtcttggatcacagggaaaaaaaaaaaaggttatgtgagaaaacgaccctggctagcgacagtgggcttattacataggtggaacctcactgggagcagtcctcagagagaatagagaaaaaatgtttctttcagacctttggagacctcagactctcagttaacctttcctagatccagacaagggggcagacctcagagaaagcctggctgcatcaaggcagattctctactgaygcaaatctccccaagacagctttgcagctaagtttgcatttccagcccttctcaatagccattttgaaatatatcaaggaaatatatttaggggtaaaatatattagtttccctcatacagctataaaacatacaggaataatttttgtcaatgtctactacaaatccaatatagcagtaattataaaacccaccagatattgaagaaaaaatatgtagagtacatcaattgcaaatgttgatactaaaatgccaaataaaataaaaataatatccaacaatatttga

SEQ ID NO: 558789 - DNA, 575 bp, Homo sapiens
cgatgcgtgcagaagctcatctaccacatgaagtttacagaaagaatggggtcttggatcacagggaaaaaaaaaaaaggttatgtgagaaaacgaccctggctagcgacagtgggcttattacataggtggaacctcactgggagcagtcctcagagagaatagagaaaaaatgtttctttcagacctttggagacctcagactctcagttaacctttcctagatccagacaagggggcagacctcagagaaagcctggctgcatcaaggcagattctctactgacgcaaatctccccaagacagctttgcagctaagtttgcattyccagcccttctcaatagccattttgaaatatatcaaggaaatatatttaggggtaaaatatattagtttccctcatacagctataaaacatacaggaataatttttgtcaatgtctactacaaatccaatatagcagtaattataaaacccaccagatattgaagaaaaaatatgtagagtacatcaattgcaaatgttgatactaaaatgccaaataaaataaaaataatatccaacaatatttga

SEQ ID NO: 558790 - DNA, 395 bp, Homo sapiens
cttgggggtgaaagtgtgtttccaaatttggtaatccactaatattaacaatcatattgattagcccaaattaaaaataaataggggattctcagtacatgctaaaatatatttgttaaaaggcaatattcatgtctttaaagattttaaatgctataaagagtctgatattctataygcaaacatgtgtatgtccattagaagaatagaggcctgattttcatatgttactacatagagatagagaagtggatagattaatttgcatatgcatagagaaagcataaaatagaaatttactatcatattaaaggaattttaattcaacaataaaataattcaaaggtaaaattttaaatatttttaacaggtacattattaatattagataatat

SEQ ID NO: 558791 - DNA, 395 bp, Homo sapiens
cttgggggtgaaagtgtgtttccaaatttggtaatccactaatattaacaatcatattgattagcccaaattaaaaataaataggggattctcagtacatgctaaaatatatttgttaaaaggcaatattcatgtctttaaagattttaaatgctataaagagtctgatattctatacgcaaacatgtgtatgtccattagaagaatagaggcctgattttcatatgttactacatagagatagagaagtggatagattaatttgcatatgcawagagaaagcataaaatagaaatttactatcatattaaaggaattttaattcaacaataaaataattcaaaggtaaaattttaaatatttttaacaggtacattattaatattagataatat

SEQ ID NO: 558792 - DNA, 395 bp, Homo sapiens
cttgggggtgaaagtgtgtttccaaatttggtaatccactaatattaacaatcatattgattagcccaaattaaaaataaataggggattctcagtacatgctaaaatatatttgttaaaaggcaatattcatgtctttaaagattttaaatgctataaagagtctgatattctatacgcaaacatgtgtatgtccattagaagaatagaggcctgattttcatatgttactacatagagatagagaagtggatagattaatttgcatatgcatagagaaagcataaaatagaaatttactatcatattaaaggaattttaattcaacaataaaataawtcaaaggtaaaattttaaatatttttaacaggtacattattaatattagataatat

SEQ ID NO: 558793 - DNA, 481 bp, Homo sapiens
gcaaattgaaaccacatacaggtagacatgtattagagtagataaaatctgcaaaaattgcaccaccgcatgctggagaggattcagtatggaggaactctcttttgctgctggtgtgaatgaaaaatggtgcagtcattggaagatagttaggcagtttcttgcaaagctaaacatagtcttactatgtgatttagcaatcaagttcctagtaagaattgatttgaaaacttatattcacaccaaaagctgcatgaaagtgtgttttagcagcttcattcataaactccaaaactgaaagcaaccgaggtaaacaaagtagagagcayccacacaagtgactgttactcagccataaaaagaaatgagctatcaagccatgaaaagacatggttaaattttaaatgcatattactaagtgaaagaagccaatttgaaaaggctacatagcatatgattccagctatatgaggttcaaaga

SEQ ID NO: 558794 - DNA, 481 bp, Homo sapiens
gcaaattgaaaccacatacaggtagacatgtattagagtagataaaatctgcaaaaattgcaccaccgcatgctggagaggattcagtatggaggaactctcttttgctgctggtgtgaatgaaaaatggtgcagtcattggaagatagttaggcagtttcttgcaaagctaaacatagtcttactatgtgatttagcaatcaagttcctagtaagaattgatttgaaaacttatattcacaccaaaagctgcatgaaagtgtgttttagcagcttcattcataaactccaaaactgaaagcaaccgaggtaaacaaagtagagagcacccacacaagtgactgttaytcagccataaaaagaaatgagctatcaagccatgaaaagacatggttaaattttaaatgcatattactaagtgaaagaagccaatttgaaaaggctacatagcatatgattccagctatatgaggttcaaaga

SEQ ID NO: 558795 - DNA, 512 bp, Homo sapiens
tattgattatagtcaccctgttgtgccatcggatgctaggctttattcatttattctattttttgtacccattaactttcaccacatcccctccaccccccaccccactccccttcccagcctctggtaaccatccttctactctctatctccatgtgttttgatttttagatcccacaaataagtgaaaacatgtgatgcttgtctttctgaaagcatacgttttttgagtgctgaaactatcctagtgggcttaaatccccactccttaagcacgaggtgcttcgttccaaagagtacggtgtggaaagtgggaaaaaaagagcaactttacgtgaagaagcctgacaaagactccckgagccaggtgaccaaggtccacatcagcagtggtgggccatgctggcacctgcctaatcagagaaagaattcacatcaattccattcgagggacatcttaccaagtatgaccattactcctcaaatttatcagtgtcatcaaaaacaagaaa

SEQ ID NO: 558796 - DNA, 512 bp, Homo sapiens
tattgattatagtcaccctgttgtgccatcggatgctaggctttattcatttattctattttttgtacccattaactttcaccacatcccctccaccccccaccccactccccttcccagcctctggtaaccatccttctactctctatctccatgtgttttgatttttagatcccacaaataagtgaaaacatgtgatgcttgtctttctgaaagcatacgttttttgagtgctgaaactatcctagtgggcttaaatccccactccttaagcacgaggtgcttcgttccaaagagtacggtgtggaaagtgggaaaaaaagagcaactttacgtgaagaagcctgacaaagactcccggagccaggtgaccaaggtccacatcagcagtggtgggccatgctggcacctgcctaatcagagaaagaattcacatcaattccattcgagggacatcttaccaagtatgaccrttactcctcaaatttatcagtgtcatcaaaaacaagaaa

SEQ ID NO: 558797 - DNA, 494 bp, Homo sapiens
aaaattaaagatactaactgataattgcttaatgatttagtatctgcttgtttagtctttgttatatttacagtaggcaaacatgtctaccgttgtgaatttattactggtatgtataccctagtaagttaaaagttgtacgtactttgaagttttgcaaaattgagttcatattatagaattaattcctgatgaaattttatgtgctaggcactggtctttttatttaattatttatttttacttttttttcctctgtgcctatgcttaccaagtctttttattttttactttttattaactcttttaatcctctggataaattaaaaagagggtattattaatatctrcattttgtagatgaggtaactgaaggtaggtaacttgtccaaggtcacaggtggcagagcaaggattaaaactagacagtctggctgcccaaggcccaaagaagaggagctgagagcaagccactgggcagaaggatgttggtc

SEQ ID NO: 558798 - DNA, 434 bp, Homo sapiens
  misc_feature 349: n = A,T,C or G
accacagaggggggcacaagttttcagcaacggtcacacctggatgtgtcagctcaccgcaacaatagackaagtcacagatgaagggggctgcctttggggctgggggagccactgccaagtcacagaacagccgcccaggcaggcttggaaagggaagtctctgagaagaggaggaatctgtttagaggtcaaaggggggcctggggctctcaggatgggatggacttgcctgagccgattggctggcagttggagagaaagcagagagaagacaggagagagaaaagcgagcatatcatctcacaccagttagaatggcaatcattaaaaagtcaggaaacaacangtgctggagaggatgtggagaaatcggaacacttttacactgttggtgggactgtgaactagttcaaccattgtggaagtcagtg

SEQ ID NO: 558799 - DNA, 434 bp, Homo sapiens
  misc_feature 349: n = A,T,C or G
accacagaggggggcacaagttttcagcaacggtcacacctggatgtgtcagctcaccgcaacaatagacgaagtcacagatgaagggggctgcctttggggctgggggagccactgccaagtcacagaacagccgcccaggcaggcttggaaagggaagtctctgagaagaggaggaatctgtttagagktcaaaggggggcctggggctctcaggatgggatggacttgcctgagccgattggctggcagttggagagaaagcagagagaagacaggagagagaaaagcgagcatatcatctcacaccagttagaatggcaatcattaaaaagtcaggaaacaacangtgctggagaggatgtggagaaatcggaacacttttacactgttggtgggactgtgaactagttcaaccattgtggaagtcagtg

SEQ ID NO: 558800 - DNA, 629 bp, Homo sapiens
attaattcatgactgtttttttcttgtctcattgggaacattagtgtggtttagaacaatgtaagggtttttggattcatgtttattttctagatagacagcattttatatagatgatttagctgtttttcataatggagctaattctttttgtgagttcatatgtctggcagtgtaactttattatgctaagtttgatgtgcattggcgcattttcaaartgggctttctagaacaatttgtgatatctttcccaggggtgtccagtcttttggcttccctgggccacactggaagaagaattgtcttgggccacacataaaatacactaacaatagctgatgaactaaaaaaccaataaaaaaaaattgcaaaaaaattcttacaatgttttaagagagtttatgaatttgtgttgggccatattcaaagccgtcttgggccgcatccagcccacgggctgcgggttggacaagcttgctttacacaatattctgtgtttccttttttcctcttataaccatatttgatagtttatgggaagccttcatcagtggaaatttttgtgtttaacttttaattctaaactacttttagagaaaagattaaaaaatagttgagaactcctg

SEQ ID NO: 558801 - DNA, 629 bp, Homo sapiens
attaattcatgactgtttttttcttgtctcattgggaacattagtgtggtttagaacaatgtaagggtttttggattcatgtttattttctagatagacagcattttatatagatgatttagctgtttttcataatggagctaattctttttgtgagttcatatgtctggcagtgtaactttattatgctaagtttgatgtgcattggcgcattttcaaagtgggctttctagaacaatttgtgatatctttcccaggggtgtccagtcttttggcttccctgggccacactggaagaagaattgtcttgggccacacataaaatacactaacaatagctgatgaactaaaaaaccaataaaaaaaaattgcaaaaaaattcttacratgttttaagagagtttatgaatttgtgttgggccatattcaaagccgtcttgggccgcatccagcccacgggctgcgggttggacaagcttgctttacacaatattctgtgtttccttttttcctcttataaccatatttgatagtttatgggaagccttcatcagtggaaatttttgtgtttaacttttaattctaaactacttttagagaaaagattaaaaaatagttgagaactcctg

SEQ ID NO: 558802 - DNA, 422 bp, Homo sapiens
caccaccatgcccagctaattttttttgtatttttggtaaagacatcgtttcaccatattgcctaggcttgtcttgaacycctgagctcaagccatcagcctgcctctgcctcccaaagtgctgggattacagatatgaggcatcgtgcctggctgttttttcttctttgttctgctaatatggtgaattatgtggattaatttttgaatgttgaagaagtcttgtattcctgggataacttgtttggttgacatttattatcctttttatatgtttctgttttcgatttgctaatattttgttgactattttgcatgtatgttcatgaagaacattcatctgtagttttctttttattataatgatttggtctggttttggtattagactaatgatggcctcataaaataattggggaagt

SEQ ID NO: 558803 - DNA, 460 bp, Homo sapiens
cagaaataaaagatgtcataaaattcatatggaactataaaagaccctgaatggccaaagcartcatgagcaaaagagcaaagctgggggaatcacactacctgactccaaaatatactacagagcaataataatcaacacagcatggtattctcataaaaaccgaagcatagaccaatggaacataataaatagcccagaagtgaatcatgcatttacagctaattcatttttggtaatgttgtcaagaacacacaatagggaaaggacattctcttcaattaatggtgctggggaaacagaacatccacatgcagaagaataaaattaaacccttatctcacaccatatacaaaagtcaactcaaaatggattaaatacctgaatgtatgaactgaaactgtaaaactctagaagaaaacataggggaagagctccatgacattggcctgggccaaga

SEQ ID NO: 558804 - DNA, 554 bp, Homo sapiens
aggtgccatgagttaaaatacatatgattaagtccagacgtggtggctcaggcctgtaatcccagcactttgggaggccaaggctggtggatcacttgaggtcaggagttcgagaccagcctggccaacatagtgaaaccctatctctactaaaaatacaaaaaattagctgrgagtggtggtgggcacctgtaatcctagctactcgggaggctgaggcaggaaaattgcttgaacctgggaggtagaggttgcagttagctgagatcatgccactgcactccagcctgggcaacagagtgagactctgtctcaaaaaaaaaaaaaaaaaacaaaaaccaaaaaaaaaccccaaaacccagaaacatacaattaagtgttttttagagctgtggttaatcagatcatgatagtcaaatgaataaattttaaacccttattaatgtttttaatgctaggcatttacagttaaaatcaatatttttctcaaagtaatgactctagatattggattatatcatttaggcataaaactttctgataaatatgcactg

SEQ ID NO: 558805 - DNA, 554 bp, Homo sapiens
aggtgccatgagttaaaatacatatgattaagtccagacgtggtggctcaggcctgtaatcccagcactttgggaggccaaggctggtggatcacttgaggtcaggagttcgagaccagcctggccaacatagtgaaaccctatctctactaaaaatacaaaaaattagctgagagtggtggtgggcacctgtaatcctagctactcgggaggctgaggcaggaaaattgcttgaacctgggaggtagaggttgcagttagctgagatcatgccactgcactccagcctgggcaacagagtgagactctgtctcaaaaaaaaaaamaaaaaacaaaaaccaaaaaaaaaccccaaaacccagaaacatacaattaagtgttttttagagctgtggttaatcagatcatgatagtcaaatgaataaattttaaacccttattaatgtttttaatgctaggcatttacagttaaaatcaatatttttctcaaagtaatgactctagatattggattatatcatttaggcataaaactttctgataaatatgcactg

SEQ ID NO: 558806 - DNA, 393 bp, Homo sapiens
tcaccatgttgcccaggctggtcttgaactgttgagctcaagcgatctgcctgcctcggcctcccaaagtgctgggattataggcatgagccaccgcgcctggcctgcgtctctcttttcagtctcatcatttgtgttattaccagaacttatgtattattttttaagacttcttcccaaatccctaggccatggcatcaacgtctttgtctctgattcttttgaagccagatctctgtgcatttccttccttggccattttgaattcagagygctgtggttcatctttcccataacatttgtagattcaccacccaccagtggggtttgccacattatatattttatcttctgaaagacaaacttcttaggaaggaaagataagaattgatc

SEQ ID NO: 558807 - DNA, 595 bp, Homo sapiens
accatggaatactatgccgtcataaaaaaggatgagttcatgtcgtttrcagggacatggatgaagctggaaaccatcattctcagcaaactatcacagaaaagaaaacccaacaccacatgttctcactcataagtgggagttgaacaaggagaacacatggacacagggaggggaatatcacacactggggcctgtcagtggtggggggctagtggagggatagcattaggagaaatatctagtgtaggtgatgggttgatgggtgtagcaaaccaccatggcgtgtgtatacttatgtaacaaaactggatgtttttcacaagtacctcactacttaaagtataattaaaaaaaaaagaaaaaaggagaagagatagaaaggaaagaaaatagcaagatggtaaattaaaccaaatgatttattgaaaacttcattaactgtaaataatctaaagacttgaattaaaacacaaagattgtcacattggacaaaaaaaacaagacaaatatatatgctgcctataagaaatctactttaaatataatgacccagataacagtaaaaggataaaaacatatactatgcaaaaac

SEQ ID NO: 558808 - DNA, 587 bp, Homo sapiens
gaaagattaaataacttgcccaactttgtatgggtagataagaacagattcaggatttaaacaaaagcagtctagttccaggctcactaggtacagtggcatgatcacatcagagtcagaggacaaaacagttcaagtgaactcaggcagcctccattcatggttctcatgatgccctcagtctaggtatgctgccaagtcagactactgcagacccaggtgccagccctcattctttatgctaatctcatcactctggaaagaaatgctacagttgttcatgctgaagctctttttttttttttttaaacggagtctcactctgttgcccaggctgtagtggcaccatcttggctcactgcaacctgcacctcccatgttcaagccattcttctggctcagcctcctgagtagctgggattacaggcaccccaccaccatgcctggttaatttttgtatttttagtagagacagggtttcaccatttttggccaggctggtctcgaactcctgacctcaagtgatccgcccacctsggcctcccaaactgctgggattagaggcatgagccaccgcacccagccca

SEQ ID NO: 558809 - DNA, 561 bp, Homo sapiens
tatccctttttgactggcttctctaacttagaataatgctttcraggttcattcatattgtagcttatgtcagtagttcacttctttttattgcagaataatgttacattgtttggatataatacattatagatatccatttatcagttggtggacatttgaattgtttccactcttggctattatgaataatgctgctatgaacatttatgtacaagctattgtgtggacatgtttttatttccttgggtatatgactaggactggaattgctggatcagatggaaactctgtttaactgtttgaggaactgccagacttgtccaaagtgactacactgttttacattccccgaagcagcgtttgagggtttcgatttttccacatccttgtcaacactagttattatctttctttttgatgatagacattctaatgtgtatggagtgataccttactgtggttttgagttgcatttgcttgatggctaaatgatgttgagtatcttttcataagcttattgacgatttgtgtatctttggagaaatgtatattcagata

SEQ ID NO: 558810 - DNA, 561 bp, Homo sapiens
tatccctttttgactggcttctctaacttagaataatgctttcgaggttcattcatattgtagcttatgtcagtagttcacttctttttattgcagaataatgttacattgtttggatataatacattatagatatccatttatcagttggtggacatttgaattgtttccactcttggctattatgaataatgctgctatgaacatttatgtacaagctattgtgtggacatgtttttatttccttgggtatatgactaggactggaattgctggatcagatggaaactctgtttaactgtttgaggaactgccagacttgtccaaagtgactacactgttttacattccccgaagcagygtttgagggtttcgatttttccacatccttgtcaacactagttattatctttctttttgatgatagacattctaatgtgtatggagtgataccttactgtggttttgagttgcatttgcttgatggctaaatgatgttgagtatcttttcataagcttattgacgatttgtgtatctttggagaaatgtatattcagata

SEQ ID NO: 558811 - DNA, 561 bp, Homo sapiens
tatccctttttgactggcttctctaacttagaataatgctttcgaggttcattcatattgtagcttatgtcagtagttcacttctttttattgcagaataatgttacattgtttggatataatacattatagatatccatttatcagttggtggacatttgaattgtttccactcttggctattatgaataatgctgctatgaacatttatgtacaagctattgtgtggacatgtttttatttccttgggtatatgactaggactggaattgctggatcagatggaaactctgtttaactgtttgaggaactgccagacttgtccaaagtgactacactgttttacattccccgaagcagcgtttgagggtttcgatttytccacatccttgtcaacactagttattatctttctttttgatgatagacattctaatgtgtatggagtgataccttactgtggttttgagttgcatttgcttgatggctaaatgatgttgagtatcttttcataagcttattgacgatttgtgtatctttggagaaatgtatattcagata

SEQ ID NO: 558812 - DNA, 286 bp, Homo sapiens
agcaagtgctggcaaaggatgtggagaaaaaggaatcctcacacactactggtgggaaatgcaattagtacagccatcatggaaaacagtatggaggttcctcataaatcactaagaatatarctaccatatgatccggcaatcccgctactgagtacatatacaaaggaaatgaaagcagtatgtcaaagagatatctgcactcccatatagcattattcgcaatagccaaggtatggaatcagtataaatgtccatcaatgaataaatgtgtttaaaatatgtg

SEQ ID NO: 558813 - DNA, 286 bp, Homo sapiens
agcaagtgctggcaaaggatgtggagaaaaaggaatcctcacacactactggtgggaaatgcaattagtacagccatcatggaaaacagtatggaggttcctcataaatcactaagaatatagctaccatatgatccggcaatcccgctactgagtacatatacaaaggaaatgaaakcagtatgtcaaagagatatctgcactcccatatagcattattcgcaatagccaaggtatggaatcagtataaatgtccatcaatgaataaatgtgtttaaaatatgtg

SEQ ID NO: 558814 - DNA, 286 bp, Homo sapiens
agcaagtgctggcaaaggatgtggagaaaaaggaatcctcacacactactggtgggaaatgcaattagtacagccatcatggaaaacagtatggaggttcctcataaatcactaagaatatagctaccatatgatccggcaatcccgctactgagtacatatacaaaggaaatgaaagcagtatgtcaaagagatatctgcactcccatatagcattattcrcaatagccaaggtatggaatcagtataaatgtccatcaatgaataaatgtgtttaaaatatgtg

SEQ ID NO: 558815 - DNA, 286 bp, Homo sapiens
agcaagtgctggcaaaggatgtggagaaaaaggaatcctcacacactactggtgggaaatgcaattagtacagccatcatggaaaacagtatggaggttcctcataaatcactaagaatatagctaccatatgatccggcaatcccgctactgagtacatatacaaaggaaatgaaagcagtatgtcaaagagatatctgcactcccatatagcattattcgcaatagccaagrtatggaatcagtataaatgtccatcaatgaataaatgtgtttaaaatatgtg

SEQ ID NO: 558816 - DNA, 603 bp, Homo sapiens
agatcttgtaggtgtgcttcatagtgttttatttatctaatttatttatttgtctcctctggctctgtcttttcaaataccctgtcttcaagttcrctaattgtttcttctccttgatcaattctgctattaaaatactttgatgcattcttcagtatgttaattaaatttttcaactccagaatttctgtttgattcttatttcaatctttgttaaattaatctgataggattctgaattccttctctgcgttatcttcaatttctttgactttccttaaaacaactatttcgaattctgtctgcaaggtcacatatctctatcactctgggtttgatccttggtgcattatttagttttttttttttttgttggggtcatgttttcatggatggtcctgatgcttgtgattattcctcagttcctgggcattgaaggtatttattgtagtcttcacagtctgggcttgattgtacctatgcttttgtgaaggctttccaggtatttgaagggacttgggtgttgtgatctatgtttttgttcactgtagctgaatctgcattaggaggcaccctaaacacagtaatgctttaatttcttgc

SEQ ID NO: 558817 - DNA, 661 bp, Homo sapiens
aaacagcatggtactggcataaaaacagacacattgatcaatggaacagaatagagaacctgcaaataaacccatgcatttatggtcaattgattttccacaaaggtgccaggaacatacaatggaaaaagcacagtctcttcaataaatagtgttgggaaaactggatatccacgtgcagaacagtgaaatttgatccttatctcacatcatgtacaaaaatcaactcaaagtggattaaagacttaaatataagagctgaaactgtaacattactagaagaaaacatagacatgacatctgtctgggcagagatttctgggatatatccccaaaagcgcaggcagcaaaagcaaaaatagacaaatggaattgcaccaaactaaaaggctcctcctgcacagcaaagggcattattaagagagtgaatagacaacccatgggttcggagamaatacttgcaaaccacatctgacaagggactaatattcaaaatatataaggaactcaaataataggaagaaaacagataccccattaaaaatgagcaagggacttgaagagatatttctcaaaaaaagacatacaggcagccaacagacatatagaaaaatgctcatcatcagtaatcatcagagaaatgcaaattaaaaccgcaatg

SEQ ID NO: 558818 - DNA, 556 bp, Homo sapiens
aacattgtgtatagtaaaataaactgtgctaaaggatcattcaacattgtcctttaattatgtttatggctactactttgggtcacccggcttrtcttctacatcccttcctcctattgctgaaacggttactaaagcccattgcaacactgttcctaggtaaaggcagaggtagtgtgggaaggaaagcacaggaatgacatcagcattctacatttttgtacctatgtgttccattaggagttggcagggatgaggtatgttccacaatcaatcagtccgtctatgtagttacacactcactattgtctcttttctgtgacctaggttgtaaaggaatgggtagaaaaaaagggcaagggtggagataagatcttctgctttacgttgtaagcattctaaatctctgaaatgaaaaagaacaacctcatgttttctgggaagtgatacttttgatgtggtttttccactcctagctcataggaaaaaaggatattgttgagttatgagatatctatcagtggtcatgggcaaagttggtgacagttttaagaac

SEQ ID NO: 558819 - DNA, 535 bp, Homo sapiens
gctactactttgggtcacccggcttgtcttctacatcccttcctcctattgctgaaacggttactaaagcccattgcaacactgttcctaggtaaaggcagaggtagtgtgggaaggaaagcacaggaatgacatcagcattctacatttttgtacctatgtgttccattaggagttggcagggatgaggtatgttccacaatcaatcagtccgtctatgtagttacacactcactattgtctcttttctgtgacctaggttgtaaaggaatgggtagaaaaaargggcaagggtggagataagatcttctgctttacgttgtaagcattctaaatctctgaaatgaaaaagaacaacctcatgttttctgggaagtgatacttttgatgtggtttttccactcctagctcataggaaaaaaggatattgttgagttatgagatatctatcagtggtcatgggcaaagttggtgacagttttaagaactacttcctcatgtgtacacacacacacacacatttacattttaaatg

SEQ ID NO: 558820 - DNA, 543 bp, Homo sapiens
agtactttggttgggttgtcccttcctgtttttcagtttagaaattgcttccaatttctaattggaatgcaggaacgatcatagagataacttagggaaaacagctctgaactgccgcttatccattttctgaaaatagttgctccatattttgtccagttttctagttgtttatggtggaaggagggcaaattcagttgtttgtttatagtgggattccaaatcatggccagaattcttagtttcyatactacaattttttttttttttttaggcagaatctcgctctgttgcccaggctggagtgcagtgatgcaatcttggctcagtgcaacctctacttcctgagttcaagcgattctcctgcctcccaagtagctgcgattacaggcatgtgccaccatgcctggctaatttttgtatttttagtagagatggggtttcaccatgttggccaggctggtctcgaactcctgacctcaggtgtttcactcatcttggcctcccaaagtgctgggtttacaggtgtaagccaccatgcct

SEQ ID NO: 558821 - DNA, 543 bp, Homo sapiens
agtactttggttgggttgtcccttcctgtttttcagtttagaaaytgcttccaatttctaattggaatgcaggaacgatcatagagataacttagggaaaacagctctgaactgccgcttatccattttctgaaaatagttgctccatattttgtccagttttctagttgtttatggtggaaggagggcaaattcagttgtttgtttatagtgggattccaaatcatggccagaattcttagtttctatactacaattttttttttttttttaggcagaatctcgctctgttgcccaggctggagtgcagtgatgcaatcttggctcagtgcaacctctacttcctgagttcaagcgattctcctgcctcccaagtagctgcgattacaggcatgtgccaccatgcctggctaatttttgtatttttagtagagatggggtttcaccatgttggccaggctggtctcgaactcctgacctcaggtgtttcactcatcttggcctcccaaagtgctgggtttacaggtgtaagccaccatgcct

SEQ ID NO: 558822 - DNA, 563 bp, Homo sapiens
gtttatgaatcaaaccaaatatttgtgtaacacctttaaaaatgaataaaatatattaggtttattaatagaatactaaggtttttaagcgggaattgaaagaattaaagacctacttttttaatgtttacctcaaataaatttaaattgtataatcgaagaaacatatataattttcttcatgcaaaatgtgttgtcatcagtgtttaaaatctcatatcaatgcaggagaggatttaatgatacaggagtgagaagggacaaacagtagggctgggtccaaggcaggggaggaaacaaggtctggagctgaactgaagttggaactaaggtcttttttccactttagcactcataagcggataggtggatagaagaatgtatctgcctccctgaaaacagttgattgagactttttttttttttttggccggcgctattgatatttccattattatctgcttattttctccccacacctctagctggcctcctggtcattaggattycgctggcagttgccctgtgtccctgctattttctccgcaggagccgagcgaaac

SEQ ID NO: 558823 - DNA, 588 bp, Homo sapiens
aagtgccatctaccaagcacttactacatgccaggtattgtgctaagcactttgctacatcccttatacatatattttcccttcacattgaccctgcgaggaaatatttttcccattttacagatgtggaaaccaaggttcagaggaatatgcccacagttgcagggctgctcagtgacagaacaagggtttgaattcagtgatgacgctaaatcctgggctctacagcatcccaaaaggtaaggtgagctctaagagttatttggcagatgaggaaatgggaggkatcgtgatgcatcaaagtttcagagaagaggaaaagagctgcgtcctctgatcagaagtgtggggaagtgcggaggtgggaagagggaagctgaaggagttcaaatgcagctgtccctcaagtcattccttcctatgaagtaggccagtttatctgctgagggtgaaagggacggggagaatgaaggaggcttcaggaaagggtcagagacttgcggcagaccctgtgagaagatggaaagaacactgactgctaaagattcctggcagcaccaagcactcagctaggactggaaatcatca

SEQ ID NO: 558824 - DNA, 588 bp, Homo sapiens
aagtgccatctaccaagcacttactacatgccaggtattgtgctaagcactttgctacatcccttatacatatattttcccttcacattgaccctgcgaggaaatatttttcccattttacagatgtggaaaccaaggttcagaggaatatgcccacagttgcagggctgctcagtgacagaacaagggtttgaattcagtgatgacgctaaatcctgggctctacagcatcccaaaaggtaaggtgagctctaagagttatttggcagatgaggaaatgggagggatcrtgatgcatcaaagtttcagagaagaggaaaagagctgcgtcctctgatcagaagtgtggggaagtgcggaggtgggaagagggaagctgaaggagttcaaatgcagctgtccctcaagtcattccttcctatgaagtaggccagtttatctgctgagggtgaaagggacggggagaatgaaggaggcttcaggaaagggtcagagacttgcggcagaccctgtgagaagatggaaagaacactgactgctaaagattcctggcagcaccaagcactcagctaggactggaaatcatca

SEQ ID NO: 558825 - DNA, 578 bp, Homo sapiens
atagatgtaaaaatctaaaagaatctataattattagaatttgtaagtgtaattactatattagtgaatataaaatcaacaaacaaaaatcaattgccggccaggtgcrgtgactcattcctgtaatcccagcactttgggaggccaaggtgggtggatcacttgaggtcaggagttcaagaccagcctggccaacatggtgaaaccccatctctaccaaaaaaatatgaaaattagccaggaatggtggcacatgcctgtagtcccagctactcaggaagctgaggtgggagtattgctcgaactcaggaggcagaggttgcagtgagctgagatcacaccactgcactccagccttggtgacagagtgagaccgtcacactgtctcaaaaaaaaaaaaattgctatatagcaacactaacataaaatgaaagcaaaaaataaacaacatttaaaataatgtaaaaaaaaaacctaggaataaatctaacaaaagatgcagaaaatatgtaaccagaaaactataaacattgaaagaaattaaagaagtctcaaataaatggaaagatatattgtgt

SEQ ID NO: 558826 - DNA, 578 bp, Homo sapiens
atagatgtaaaaatctaaaagaatctataattattagaatttgtaagtgtaattactatattagtgaatataaaatcaacaaacaaaaatcaattgccggccaggtgcggtgactcattcctgtaatcccagcactttgggaggccaaggtgggtggatcacttgaggtcaggagttcaagaccagcctggccaacatggtgaaaccccatctctaccaaaaaaatatgaaaattagccaggaatggtggcacatgcctgtagtcccagctactcaggaagctgaggtgggagkattgctcgaactcaggaggcagaggttgcagtgagctgagatcacaccactgcactccagccttggtgacagagtgagaccgtcacactgtctcaaaaaaaaaaaaattgctatatagcaacactaacataaaatgaaagcaaaaaataaacaacatttaaaataatgtaaaaaaaaaacctaggaataaatctaacaaaagatgcagaaaatatgtaaccagaaaactataaacattgaaagaaattaaagaagtctcaaataaatggaaagatatattgtgt

SEQ ID NO: 558827 - DNA, 574 bp, Homo sapiens
aaacagcttacatacacttttcatttaatatacataaaagtatgtaagactgatattactgccttaattttagaagtggagactaaagctcagatagtttaaaaactctcccaaagcaaggactctgaacaggacccaatactaaagttctgtcacattctttctgctaccccaacttgcctacacagcatattatgtaaataaaaattttattgagatataattcacataccatcaaattcaatttggtagtttttagtatattcacaaggttgtgaaaccatcaccactatctacttccaraacatttccatcatctccaaaagaaaccccaaatcaatgagcagtcatagtcatttcccattccccgcaccatccctagtccctggcaatcactttctgtctctgtggattcgcttcttctggatatttcattttttcaatatttcacatttctgtctctgtggattttcatatttctgtctctgtggatttgcttcttctggatatttcatttcatttcatagaaatgaaagcatacaatatgtggtcttttgtgtctggcttttttcac

SEQ ID NO: 558828 - DNA, 680 bp, Homo sapiens
cagcactttgggaggccaaggggggcggatcatgaggtcaggagatcaagaccatcctggctaacacggtgaaaccccatctctactaaaaatacaaaaaattagccgggcgatgtggcaggcacctgtagtcccagctactagggaggctgaggcaggggaatggtgtgaacccaggaggtagagcttgcagtgagccragatcacgccactgcactccagcctgggcgacagagcaagactctgtctcaaaaaaaaaaaaagacaaaaattagccacatttttttctcctcatcaaagaggataatagattaggctcaatgtgcatacttgaaacattgttaaacaaactctttaataccacgttaccctttctaagcattaaagggaattttccactgatcatcactcatgagttaatgatattctgcatgctacagctattaaattgcattttaggtagcctgtaccagagatgtccgacttgttcacccttcacatccaactccctcatctaattggcccactgagaaaacacttcttttaacccttatcttttttttccattccctgcataatgctaatggatataaatctgcctgacagcagttctgtaaaagtatacaacttgtccctaaagtgtacagccttttattggttgtctccctttgtgccagaat

SEQ ID NO: 558829 - DNA, 680 bp, Homo sapiens
cagcactttgggaggccaaggggggcggatcatgaggtcaggagatcaagaccatcctggctaacacggtgaaaccccatctctactaaaaatacaaaaaattagccgggcgatgtggcaggcacctgtagtcccagctactagggaggctgaggcaggggaatggtgtgaacccaggaggtagagcttgcagtgagccaagatcacgccactgcactccagcctgggcgacagagcaagactctgtctcaaaaaaaaaaaaagacaaaaattagccacatttttttctcctcatcaaagaggataatagattaggctcaatgtgcatacttgaaacattgttaaacaaactctttaataccacgttaccctttstaagcattaaagggaattttccactgatcatcactcatgagttaatgatattctgcatgctacagctattaaattgcattttaggtagcctgtaccagagatgtccgacttgttcacccttcacatccaactccctcatctaattggcccactgagaaaacacttcttttaacccttatcttttttttccattccctgcataatgctaatggatataaatctgcctgacagcagttctgtaaaagtatacaacttgtccctaaagtgtacagccttttattggttgtctccctttgtgccagaat

SEQ ID NO: 558830 - DNA, 554 bp, Homo sapiens
attataaatttaatttatttaataaaatgattagaagaatatttggatattctatttcttatttctgcctgaataagttttggtaagtaawacaatttatccattcaacattttcaaatgtatcaacataaatttgtacctaatgccctgttattatttgtttaatctccacagtgcctatagtggtatctcatttattatatcttgattaagttaattaagcttttgtcctctgtaatcaggtttgtctgaagctgatgtattttattagtctatttacagaacatttcttaactttgctgaaactctataatacaataaatgttttctattttattaatttttgctattatatttagtatttacttctttttattttatgtttattttgttgttttttaataaaattcttgagataaatgcttacctcattaattttcaatttttttattttctaatatatgtattaaaatataaattactctttgagtttcttataatgttaaacacttactaaacgactcaacattatatggctttaaaaaagacaaatt

SEQ ID NO: 558831 - DNA, 508 bp, Homo sapiens
gaagtatttctctttctctctctctctctctcaatagcaaggggtctaacataggtatgctcttggagtttcctttttctgctctcatcaatggagccaagaattttttttccatcagtcaccacttgtcacttcatcaayattgaaagcaaccttttttttctaaaatatgtggggcttgtcctctcagcacaaatggcctttgaatagcatgtaaacaaaccaaacattgttggtccatgcgtgtgcctgtacattgaggcaaagtgtaagtatatactatttgtgtactagagatcacattctgtattccacatatattccccacagctctttacttcaatcctgaccacacaatgcattgcttcacaatatttgttaactgaaaatacattagaattgtttgacagcaaataagacataattttctttttataaattatggatttacatctttggccatgggaaagccatataaatacttccatacatgtcaggatttctttta

SEQ ID NO: 558832 - DNA, 639 bp, Homo sapiens
atttccttcaccccaccctatatcatctttgcccttctcttacatagggtttcatgggactcaccttctgccggttaatgtactctatctttgtggtcctccatggcatcttaccttcaagcacaacacatgccattgggtattgttttactcaaggatggtcaggtgtgttcctctaatggctcgtggggaaaaacaatctctctgtttaatcaagggtgtcattaccaaccagatggttgaatatctagaattaatcagttattgggtacctgtagaatttaaaaaacagaaggctgccaagttaagacagccttgacaatttgtgtataccttgaaattttgtatacacattggcagaagtaatayaaactttacatcatttccatcttattatagagttgatactaattggatctcaataagccttgactctcgttaaacgatgcaaatataacctaccttttctttcccttgccaaggtttttttttttctgctgttgttgctgtttgttttgatgtgttttatgttattttgtattatttggatttgccataccatggttacaaacagaagaggttaaaatattcttgaaaatgcatcaataaataatttatgttgtctcttaatcaaataac

SEQ ID NO: 558833 - DNA, 642 bp, Homo sapiens
gtttactcatttatctataaataattcaactagcatttatcaggtacatatgatgaccctagaactatacatttttcccatttgcacaaagaaaagagagtgatggattttgacatcaaaaatttcataatcttagtctataaaagcacaaacattactatagtgggccaaagtaaacactaagttagggatactgtatttcttattgtcaccaattactgttctgtggaatctaattgtacatatatgaaatacttttataatgttaaaggacaatatacgtataarcaaacatttacaaatgttatatgttcctttattataaaatccttaacatatagaagtgatttaatgataactttaataaaaatatatatatttagaaactccttggttgttagtgaacctattggttaaaggggcatttaattaataatggaaaaaatagcagcagaagaagaaacaggaataattaataatgaatgaattacattagttactagataaccacaatgcatgtgttattgtatttagagaaaaagtcaataaattttagctttaataattttgcttttaatttttggtaatttattagctaaatcagatacagataaatagataatctgtatctatagacatagg

SEQ ID NO: 558834 - DNA, 585 bp, Homo sapiens
acttgcctctcaatttcagactcaataattcctaatatggggctgaaatcagacacacacacacacacacacacacgtgtgtgtgtgtatatatgtgtgtatrtatatatatatatatatatattctctctgtgatctaaaatttaaattttattgtcgaccagataaataactcccaatgtaaagagcagtcatcttggaatcagaagactcaagtttttctctcaattctgccattctcattagaccaaattaccatctaaggagaaccaaactgtctttgtctgtgaaataaattaaatatcacctaccttaaagggtgggtgagagggtccaattacttaaatgatggacatttgcctggtacaggggggaactactcccataatatcagttatttgttctttatcatttaacatcatattctaaattattgccgagtccgaaaggattaaagaaaaaccagtccgtttgggaggaagcacactcgtcttcctatcatctcctcagatcagcactggtgatctgctttctttttactgatgtattatgcacgcaaggttcacagagagaccctggcctatt

SEQ ID NO: 558835 - DNA, 585 bp, Homo sapiens
acttgcctctcaatttcagactcaataattcctaatatggggctgaaatcagacacacacacacacacacacacacgtgtgtgtgtgtatatatgtgtgtatgtatatatatatatatatatattctctctgtgatctaaaatttaaattttattgtcgaccagataaataactcccaatgtaaagagcagtcatcttggaatcagaagactcaagtttttctctcaattctgccattctcattakaccaaattaccatctaaggagaaccaaactgtctttgtctgtgaaataaattaaatatcacctaccttaaagggtgggtgagagggtccaattacttaaatgatggacatttgcctggtacaggggggaactactcccataatatcagttatttgttctttatcatttaacatcatattctaaattattgccgagtccgaaaggattaaagaaaaaccagtccgtttgggaggaagcacactcgtcttcctatcatctcctcagatcagcactggtgatctgctttctttttactgatgtattatgcacgcaaggttcacagagagaccctggcctatt

SEQ ID NO: 558836 - DNA, 569 bp, Homo sapiens
actcctaatatgaaactgaaatatgggtaccctaacctccactcatcataacctcagtctatttatcatcttatttttactcatatatcttacctgataaaggaatccattagctgcaagattcctatcctgaaaattagcagtgataactttactctttttaggtgctcatatttgtataaaaagcatagatattaaacatatatgtaagacacaatttaaatgtattgatgtcttatacacacacacataccyacatttatattccacccaatcaataaattgcattccagttgatcaataaattacaagaaaaagtcattattataaactatagcacagaattctaatgggtgaagaaggagcagcatgtttagtggaaacccaaaggttatatgtacatatctatagttgccaggccgccactacctcttgtattcagatgcatacattatttcaccgtgtacatttccctggtaattccagaggttttgttgacatattttttcaaagcaaaatccaggtacatatttgtttccattgctcaaagaaaacccccttaaaagaca

SEQ ID NO: 558837 - DNA, 519 bp, Homo sapiens
tggagtgcagtggtgcgatcttggctcactgcaagctctgcctcccatgttcaagcaattctcgtgcctaagactctcaagtagctggaactacaggcacacaccaccacccccagctaatttttgtacttttagtagagacagggtttagccatgttgaccctggcctcaggtgatccgcccacctaagcctcccaaagtgcagggattacagggcatgagccaccacacctggccaggattttttttttaaaagaaagtcacaccttctaactcttctttcaaagcttccagttcccaacgtcaataagaaatacttctagaattccaagaacaaaagtttatgacccaagaattttatcttcaattgagctctcattcacatgtgaaggcaacaaaagacattctcagatcatcrtggactcagaaagtatcccattccctccctgaggagcaggcaaatcaccacacagagagagaaatagagatagagaaataatagagaacgtggtttgaaaa

SEQ ID NO: 558838 - DNA, 544 bp, Homo sapiens
aggtagatcacctgaggtcaggagttcaaggccagactggccaagatggtgaaaccacaatctttactaaaattatgaaaattagccaggcatggtggtggctcctaaaatcccagctacttgggagactgaggcaggagaatcacttgaacccagagggcagaggttgcagtgagccaagatcacaccacttcactctaacctgggcaactgagcgaaactctgtctcaaaaaacaaacaaaaaaacaaaaaaagaagtggattcctaataaaaggatgaatttggcctgcttttgcctctctctcaccttctcttttccctttgtcatggaatgacacagcaagaagsctctcaccatatgccaatcacttgatgttggacttcccagcctccagaccatgagctaatacatttctgttcattatcaatttcctggtctgtggtgttgtgttaactaagataacatttcacagcaatttatgttattttatagaattttcaataatacagttttattcagactgtgacagattcccattata

SEQ ID NO: 558839 - DNA, 408 bp, Homo sapiens
gatagataaccaacctatagtcaattgctagctctggaagatgtgattatagttggataaatttgacaatagcaatattaacaatatgcaataacatataatgayactttattttgtatgaatatgtaattataatgaagatattactattttgacttactatttgatatactatttattttaaagtataaaaagagctttgaaatagttcattttggtttccctacaatgagcagtgtccctacgatcaaatggatggataaacagattccatgagaaaaataattaaagatggacaatacaatatatttttaggccatatcaaatctctcagtaatgcacaagtattaaaacggagtaggcagaagagtttgccagctgatggcctgcagagtgtgatctgattgg

SEQ ID NO: 558840 - DNA, 485 bp, Homo sapiens
atgtggtcaagatgaatgagtaaatcaaatcagagggtaatatcaggagaattaagaattggcccaggtaaggtgcaaacacaggttggagggtagttccaagtttagtttatgaagaatgtrtatgaagatgaggtgtgccctgagccataatgcagtataatgtaaaaaaagcttgcctacggcataattctgtggagtgatgcaaatcactcctgcaattagtgagacaaatacttccagattagggtcccagcaaaagttacaatttgtcagctcttatcataacattggtactaaaattaaagtgttctaattttcttaccaaatgtaaaagtgatcaatgaaatgaaaagttttgcagtggctactgtaatagtaagtgacaatgataagtgcttagagtaacagcaagttaacaattaaatttatgcttatagctcaatctctaaagatatgaaaacgttgactggaagttagaatat

SEQ ID NO: 558841 - DNA, 475 bp, Homo sapiens
gggtggatcacgaggtcaggagttcaagaccagcctggccaagatggtgaaatctccagtctctactaaaaatacaaaaattagctgggtgtggtggcacatgcctgtaatcccagctactcgggaggctgaggcagagaattgcttaaaacccacgaggmgaaggttgcagtgacctgagatcacgccactgcactccagcctcagggacagagcaagactccctctcaaaaaaaaaaaaaaaagtactctggtacacccataccccatactatggagtactatttggcagtaaaaaagaaaaaaaatggatgattgacacatataaaatcttaaatgaatgtcataggaattatgctgaataaaaaacatataatccagaaagtttatatactctaagtttacacactgtataattccatttatataacattgttgaaaatgacaaaattttagatatcaaaaccagattagt

SEQ ID NO: 558842 - DNA, 575 bp, Homo sapiens
attgctgtgatgcagtttaatgaattacctccaccttctccatactgtttatccacagctctccatactgtttatcctcagcatttgcttcctcataaggaaagcccggatcagcttctgttagcttgcccagcagtcaccaccagcatgcagcagcagttcatggataaacgcctcaagggcatttaataacattgcagtttagtgaactagaatagttttccagagaactgagtgtcrattttaatgtttttttcctgatactttatgaaacaccagaggcatctagctgtgaatcccaaggacataagggtaacaccattcagggacatgcctgtattctggatgccttgttttcccttttcataccccgaacagactttgtgttatttatccgaatgccagcttccaggatttgtttttcatgcttaggcataaagataagaatccaaacacggagggaaatagaaggctagaatcctgcccagtagggcttcggtggagaatgtactccttacccaggcccccatccccttgttgaaggctgcacgcagccccaggctgcatgcctgggt

SEQ ID NO: 558843 - DNA, 521 bp, Homo sapiens
gaacattgctctgtagcaagggcaggctgcaagttgggagaaacgcagcaatggtgccctaagcaaattgatcaggccagtatcatggattgggggagtgggaaaaggctggaacattctaggaacttctagcattaggattaaaccaagacttaaggctggatgggatctggagatggcagacctggaagggcagaggaaggcgcaggcaagtaagggtgagaagcaaccgtcctagccctaattggcttctcctggtaagctaaaaatcagctggtggttttgttatataggactctaaaatcaatgagtctttctcttttacragtgactgaaatgatagttaggcaatcagttataaatctatatgctttcttaggccaggccgagtgtctcatgcctgtaatcccaacacttcagaaggccatagcaggagaatcacttgaggccaggagtttgagagcagcctgtgcacgatagtcagaccctgtctctacctcccacccaccccgcaaaaaaca

SEQ ID NO: 558844 - DNA, 570 bp, Homo sapiens
ttcacctcctcagttagatgtattcctaggtattttatttgtgtgtgtagctattgtaaatgggattgcattcttgatttagctctcagcttgattttttttggtgtatagaaatgctgcagatttttgtacattgatactgtatcctgaaacttcactgaagcttatcagttcaaggacgcttttcagtctttagggttttctaatttagaatcatattgtcaatgaggagagatagttggatttttccttttcctatttgtatgccttttatttctttctcttgcctgcttgctctggatgggacttccagtactattaggttggtgcaaaagtaattgcggtttttgcctttaayggcaaaaactggccgggagtggtggctcacgcctgtaatcccagcactttgggaggccgaggtgggcagaacacgaggtcaggagatcaagaccatcctggctaacatggtgaaaccctgtctctactaaaattacaaaaaattagcaagggcatggtggcgggcgcctgcagtcccagctacttgggaggctgaggcaggagaatggcatg

SEQ ID NO: 558845 - DNA, 599 bp, Homo sapiens
cctggctcactgcaacctccaccccccgggttcaagcaattctcctgcctcagcctctcgagtagctggtattataggctcctgtcaccgtgcccagcyaatttttgtatttttagtagagacagggtttcgccatgttggccaggctggtctcgaactactgacctcaggtgatccacctggttcggcctcccaaggtgctaggattacaaacgtgagccaccgcgcctggtctgctttaatagttttgataaataaaagggagaaaggaaagaactaatattttgagtgttttctaggtacaaggtgctttccttataaacattttatggggtgagtattaacccattccacggatgaaaaaactaagattctgagagattggagtaatttgctaataagtgatagggctaggtgtttgtctagctccaaagcctgtttcctttccgttacacttgagctcaaagctgcttttctctggccagggtgctgatgggattcttgtcagtctctggaaagaacgtgcctaacaccgtctgacacacgcggttaaactcatcttcatataaacagctctgaaatggaacaaagctctcatg

SEQ ID NO: 558846 - DNA, 612 bp, Homo sapiens
tctgctctctcacctcctacagaaacctggaggcccggcggtcccacctctcagagagctgcagcataggtgagctgcccgctgcatcctccacctgctccagttgcctcccgtctgcttgctccccactgcttgctctcgtgacattgccgagggtttcctccaagtgacagaaaaatgatcctctcccataacttctcagtgatggctttaaaatatcgtgaattatggctgggtgcagtggctcatgcctgtaatcccagcactttgggaggccaargtggatggatcatgaggtcaagaaatcaagaccatcctgaccaacatggtgacaccccatttctactaaaaatacaaaaattggatgggcatggtggcatgtgcctgtagtcccagctacttgggaggctgaggcaggaaaatagcttgaacctggaaggcggaggttgcagtgagctgagatggcaccactgcactccagcctgtcaacccagcaagactccatctcaaaaaaaaaaaatcatgagtagtaatcgctagtgtgtattgagtacttagtacatggcttaagcagcttgggctgccataacaaaatactatagactgggtggc

SEQ ID NO: 558847 - DNA, 612 bp, Homo sapiens
tctgctctctcacctcctacagaaacctggaggcccggcggtcccacctctcagagagctgcagcataggtgagctgcccgctgcatcctccacctgctccagttgcctcccgtctgcttgctccccactgcttgctctcgtgacattgccgagggtttcctccaagtgacagaaaaatgatcctctcccataacttctcagtgatggctttaaaatatcgtgaattatggctgggtgcagtggctcatgcctgtaatcccagcactttgggaggccaaagtggrtggatcatgaggtcaagaaatcaagaccatcctgaccaacatggtgacaccccatttctactaaaaatacaaaaattggatgggcatggtggcatgtgcctgtagtcccagctacttgggaggctgaggcaggaaaatagcttgaacctggaaggcggaggttgcagtgagctgagatggcaccactgcactccagcctgtcaacccagcaagactccatctcaaaaaaaaaaaatcatgagtagtaatcgctagtgtgtattgagtacttagtacatggcttaagcagcttgggctgccataacaaaatactatagactgggtggc

SEQ ID NO: 558848 - DNA, 521 bp, Homo sapiens
gcaagaccttgttgctaagaaaaaaaaaaaaaaaaaaaaaaaaaaagcagcagagacctatagtcccagctacttgggaggctaaggcaggaggattacttggatcagtagtacaaggctgcagtgagccatgactgcaccactgcactcctccagattatgagttctttgtcctaggaaattatgttcctgcgtgttttggtttcagtgctttagccaccacctgaagatactgtatattttcgaaacttaatatttttttccacaccagccaggttgaaaagtttaagttgctttctggaaacagttatctaccctgccatcctccttcccatgctttgtttctcataggttttgtctgtcaagctgtatctgacaagcctcamatcatagggtatgaactctcccagcctgaatggttgagacttgctggggttgagagaaagtcctctctggcctcggtctgatatctttcatcagaggatgagccaagattgaacatggaggccaagggccctgga

SEQ ID NO: 558849 - DNA, 525 bp, Homo sapiens
ttagatggcccaaacaaatggaaacacatcccatcctcatggatgagtagaatcaattttgggaaaaaggaccttccggccaaaagtaatctaaaaattaatgcaatttattaaaacaccaccatcattcttcacagaactaaaaatgacaatcctaaaattcatatggaaccaaaaaagagcccacatagccaaagcaagacaaagcaaaataaacacatcgtggaggcatcacattatctgacttcaaactatagtataaggccatagtcaccaaaacagcatggtactggtataaaaataggcacatagaccaatggaacagaatagagaactcagaaataaaccaaaaaacttacagctaactgatctttaacaaagcaaacagaaacaaagtggggaaaggacatcctattcgacaaatggtgctgggataattggctagccacatgtaggagaatgaaactcgatcctcatctctcaccttatacaaaaaycaactcaagatggatcagggacttaaat

SEQ ID NO: 558850 - DNA, 517 bp, Homo sapiens
caggttgatttcagactgctgtgctagcagtgagaatttcaagtcagtggatcttagcttgctgggctctgtggggatgggatctgctgagctagaccacttggctcgctggcttcagcctcctttccaggggagtgaacagttctgtctcactggtgttccaggtgccactggggtatgaaaaaaacctcctgcagctagctcagtgtctgcccaaatggctgcccagttttgaaacccagggccctggtggcrtaggcaccagagggaagctccttgtctgcaggctgtgaagactgtgggaaaagtgtagtgtctgggccagtgtgctccattcttcatggcacaatccttcacagcttcccttggctaggggatggagttccctgaccctttgtgcttcctgggcgaggcaacgccccaccctgcttcagcttgttctccatgggctgcacccactgtctaaccagtcccaatgagataagccaggtacctcagttggaaatgcagaaatcac

SEQ ID NO: 558851 - DNA, 615 bp, Homo sapiens
attaaagacaatattctttctctattgtgtgtttttggcatctttgtcaaaaatcagttggctgtaagtgtgtggatttatttctgggttctctattctgttgcattgatctatgtgtctatttttatgccaattccatgmtgttttgattactatagctttgtagtatattttgaagtcaggtactgacttcatattgctgtgaaaaatgtcattggtattgtgatagggattgcattgaatctgtagattgctttgggtagtatgaacattttaacaatattaatacttttaatcaatgagtgtgggctatcgttccattaagttgtgtcttttcaatttcttttgccagtgttttatagttttagtgtagaaatctttcatctccttagttaaacttacatctatgtattttttgtaactattgcaaataggattgttttcttgtttcctcctttagatagttcgctattaaggtataaaatgctactgctttttctatgtcgattttgtatcctgcaactttactgaatttgtgtatcagttttgaatttttagtggagtctttagtgtttatatatatatatatatatatatatatatatatatatatat

SEQ ID NO: 558852 - DNA, 615 bp, Homo sapiens
attaaagacaatattctttctctattgtgtgtttttggcatctttgtcaaaaatcagttggctgtaagtgtgtggatttatttctgggttctctattctgttgcattgatctatgtgtctatttttatgccaattccatgatgttttgattactatagctttgtagtatattttgaagtcaggtastgacttcatattgctgtgaaaaatgtcattggtattgtgatagggattgcattgaatctgtagattgctttgggtagtatgaacattttaacaatattaatacttttaatcaatgagtgtgggctatcgttccattaagttgtgtcttttcaatttcttttgccagtgttttatagttttagtgtagaaatctttcatctccttagttaaacttacatctatgtattttttgtaactattgcaaataggattgttttcttgtttcctcctttagatagttcgctattaaggtataaaatgctactgctttttctatgtcgattttgtatcctgcaactttactgaatttgtgtatcagttttgaatttttagtggagtctttagtgtttatatatatatatatatatatatatatatatatatatatat

SEQ ID NO: 558853 - DNA, 615 bp, Homo sapiens
attaaagacaatattctttctctattgtgtgtttttggcatctttgtcaaaaatcagttggctgtaagtgtgtggatttatttctgggttctctattctgttgcattgatctatgtgtctatttttatgccaattccatgatgttttgattactatagctttgtagtatattttgaagtcaggtactgacttcatattgctgtgaaaaatgtcattggtattgtgatagggattgcattgaatctgtagattgctttgggtagtatgaacattttaacaatattaatacttttaatcaatgagtgtgggctatcgttccattaagttgtgtcttttcaatttcttttgccagtgttttatagttttagtgtagaaatctttcatctccttagttaaacttacatctatgtattttttgtaactattgcaaataggattgttttcttgtttcctcctttagatagttcgctattaaggyataaaatgctactgctttttctatgtcgattttgtatcctgcaactttactgaatttgtgtatcagttttgaatttttagtggagtctttagtgtttatatatatatatatatatatatatatatatatatatatat

SEQ ID NO: 558854 - DNA, 615 bp, Homo sapiens
attaaagacaatattctttctctattgtgtgtttttggcatctttgtcaaaaatcagttggctgtaagtgtgtggatttatttctgggttctctattctgttgcattgatctatgtgtctatttttatgccaattccatgatgttttgattactatagctttgtagtatattttgaagtcaggtactgacttcatattgctgtgaaaaatgtcattggtattgtgatagggattgcattgaatctgtagattgctttgggtagtatgaacattttaacaatattaatacttttaatcaatgagtgtgggctatcgttccattaagttgtgtcttttcaatttcttttgccagtgttttatagttttagtgtagaaatctttcatctccttagttaaacttacatctatgtattttttgtaactattgcaaataggattgttttcttgtttcctcctttagatagttcgctattaaggtataaaatgctactgctttttctatgtcgattttgtatcctgmaactttactgaatttgtgtatcagttttgaatttttagtggagtctttagtgtttatatatatatatatatatatatatatatatatatatatat

SEQ ID NO: 558855 - DNA, 565 bp, Homo sapiens
cttctgtctgattcctcctgatcatcccaaccactgacacttggtgggtcccaagcctcagccctctaaacacgtttcttatcagtctctgtagaccatgccagttgtcccatcttgtcttaaggttttaaacaccatcgcacgctaattgtcaatgactctcaaatttatatctccaagcttgtgccctcagctcaagattcacatacccaactgcctactcaacatctctacttggatgtctcatagtttcttaactatgagtatccatgaactcctttccttgtcttkccccacagatcttccctcagtccttcccattccatgaatggtaacttcatccttgcaattgctaagtctgaaaatcacagagttaactttcactgtctctcactccataatcaatacttcaggaaattgtatgcattccaccttcaaaacgtcccctataacccaaccacttaccacctccacatctacttctggggtccaagtcactctcatctcacccatggattattgtaacagcatcttaacttagctccctgtttctgcccttatcctc

SEQ ID NO: 558856 - DNA, 516 bp, Homo sapiens
cacctctcctgctgcatttttctccatggtactaagcaaatttaacaaaaactataattttcttattttgtttattgactgttttccttctagaagtaaacaccatgagagcaagattttggcctgttttgttcacagccatagtccctgtgcctggaacatggggaacgtgttaagtgatcactcaatacttgttgaataacgaggagttgaaattatcaaagtaaatgaggtctcccagggaggacatgtagagtaagaacagaagaaaggtaaggygggtaaaggtagggaaacaactgtcaaccatcaacatttaaaggctagaataagaaacaagattcttgagagcggatcaaagaattaggtgagttagaaggatcataaggttgtagacataggctcaacgaagagccttaagaactgttaaagaggtagatgagtgtgtcaaacccttaatgccatttttaggaagatcaagagagaaaaggtgcacagccagcatgtacagagtta

SEQ ID NO: 558857 - DNA, 590 bp, Homo sapiens
cttaaaatctcaagaagaaagctatttctaaggagaaatagaaaagacaaaaaaaaaatcgtctttttcccgagktctgtaccaagcatgtaaaaatccccctagctactaagttcattcagataatcttcctctttctctttatcaaagttcagttagcactgacccaatctcatttttgaccagcctgcaatttgatacacctctctaagcaacttgttttttcaaaaggttccaaatataattattctctgaatattataaaaatgatttggtatagcataatagtattggaaataaaagcaaacaatacttttcttatagtatttattaattttaaaaatgagaatacagtacttcctacctttacctgaccccaggaatattgtatagaaactataataatgaaatgctcagtccccaacatatttttatctacacaagaatcccaaatacaaaagtacttcagatttctagctccacttccagtccaggatgaataggatatagggatcattaatgaacaaatgagatggagaggtaaagacagaccaagtcctgcatgaccctataagccatattaagtttgg

SEQ ID NO: 558858 - DNA, 557 bp, Homo sapiens
gtaacttaagcctgatattcagccatatctcctgttatctctgacagtccaaaagtaacaaaaactagcattaattgagttcttactctggaccaggctgtgtgctaatggctttacaaatatcccctcatttaatactgaaaacatccatacgagacaggcaatacattgtgatattgccatgcaacaatgataaatgytagctctcattgttactattattgtcattataaccaggtatcaccttaatgaggaaaaacctgagacttacagaaggtctgcaacttgcccaaggtcacagagctgggaagtagtggagcccagattcaggctcagttctttgtggctagaaatactgccaagcatttaactgttttagtataagccagtagaccaaaaaatagaaaatcacattaaaggaaaccagtgcactattaagcagcaacagagactggaaacaagtttctgctcagacacaagcactggcattgtgagtagtaagaaactacaaactgtcttccttttttattgtatatatttaaggcaaacaacaggat

SEQ ID NO: 558859 - DNA, 557 bp, Homo sapiens
gtaacttaagcctgatattcagccatatctcctgttatctctgacagtccaaaagtaacaaaaactagcattaattgagttcttactctggaccaggctgtgtgctaatggctttacaaatatcccctcatttaatactgaaaacatccatacgagacaggcaatacattgtgatattgccatgcaacaatgataaatgttagctctcattgttactattattgtcattataaccaggtatcaccttaatgaggaaaaacctgagacttacagaaggtctgcaacttgcccaaggtcacagagctgggaagtagtggagcccagattcaggctcagttctttgtggctagaaatactgccaagcatttaactgytttagtataagccagtagaccaaaaaatagaaaatcacattaaaggaaaccagtgcactattaagcagcaacagagactggaaacaagtttctgctcagacacaagcactggcattgtgagtagtaagaaactacaaactgtcttccttttttattgtatatatttaaggcaaacaacaggat

SEQ ID NO: 558860 - DNA, 583 bp, Homo sapiens
tagctatattcttatcttaataaggatgaatgtttgtgtgttaaatatatttatagtaaagaacagtgttttagtgcagagtttcatagagatccataactaatcatatctcccatgtaattttcatttgccaatgaacagaggcaytttgataactattccttatttccagccactaaagtaggccatgatttttattctcatttagcagataaggaaagaaatgcacaaagaggtgaaataactgacttagccatttgaagatgtggtagtagggttgaaattcgaaatctcagcctcttccaacttcataaaccctagagctatatagccggttttgcaataagaaagcctatttatatgactttccatgggaccaagaagtcaaaaccacaacagggtaaaagcaggaagacatggctttcttggcagggtatttcaaaggcagcaacgttaaccaatttcagggcattttgctatattgtgggggctgtcctggataagcatgactaaaaagtgcttgaataaagaagcatattctttgagaacactgttaaccttcttgtttttgaaaaattaaact

SEQ ID NO: 558861 - DNA, 537 bp, Homo sapiens
cccttagcataacaaagatatcttgagatgtataaatgtttattgatgtactcatgcttttacacaaaataattactaaatactaaaaaatctaaaaattactgcagcatccactgcttaccagctacctggggaaatagaagagcagcatatctctatgattgcaagttatcagtgtaatccatgattacatgcacgttgccataagaattttagctctcctacattttcagttaacagagctggtgctatcattccctcccagggaaatgctccatgaaacagtgaggatggctcaccytccaacatcttcatcctccaatccatgtcactttgatccaatcaagaaaaaaaaaatgccaacagcattgattaaagattttgtgaatatatttgagaatgtctctgttgataccaacatatttttggtgaaggccatgttccgtgtcaacagcccagcttacttccacctaatataagctctttcctctatagttcccatgatgctcagcctttagctttagtgttcttcctgga

SEQ ID NO: 558862 - DNA, 465 bp, Homo sapiens
gctcttctgggaaggactgaacgatcactctggctcccatatccctggatcctagcatcttctcactcatggaatacaaacagtgctgcagattacctgaaatgcaaaataaagtccagagaacctaaagcatgtagaacatgcttccagacaaatctcccagtttgaaaggtactgtcagcaccgaggaaaaaccattacwgtttatttcatttaataatcttatttccccttttctttgattctcctctgtatattattaattaaaagatctgataaacaggacatgatgttgccttcattctattttttcaagaaactcccaaatcaatcaccttaattactgtcacaaagagtcagactataacccacaaacccaacctaaatagatgcttatttcaatctaaaagatcctctggaggaaatgtgcaataaaatgaccttcttgtggttgataattgtagg

SEQ ID NO: 558863 - DNA, 436 bp, Homo sapiens
gcactcccattgcaaaaataacacctctatgtgtayggttaaaacatcaagcctggatgtttaatgagtgttggcctcatatttctagctacatagtagatattgacatttagatgagctactaccatcttgaaattattgtaataattatctgagctagaccctcttgcaaacagcttttattcctttaagtattcctccttatgttctttttttaaacaaattttgtgctaagttatttcaattacatcccttctttgtccattaacctgcagtattttcctgcaatactcagtaacaaagtctcaaatttgctgcttgacttcaaagactctccataatgtgaccctactttatggtctctgatttcttaataaattctgttccaagaagcccagtctctttacctcttctcatttaaccggatcgtcctgcc

SEQ ID NO: 558864 - DNA, 611 bp, Homo sapiens
ttttatttttgttatttattttaacagattgtacagataggaaactatgattcttcaaggacaagattatatggtaatagatatcagcacaaagttctgaaactagttcttctgaatctaagaccagagaactagacaagtaaatggaatttgtagcctctggaaatagctgtaaattaactgtacccaattagctttgatgttcaaaaaattatactcattacttcataaatgttatttaaatgtcatacaaggtggaccaactgacttctctgatgaagaaggcattgcacacattttacatctgagtcatttctgttcatagaactattgaaacccaggttgggtagctcccttcctttctgtaccacaaatcaaaaacacataaaactacgyataaaaagctcaataatttatgaatatgctaaatgaaaaaggactatgcttttaacttgtaatttaatactatgtttaatcactttgggctttccatgttgacctgttaaccaacaaactactcatttactcccactaatgacttctactcataattgtatttcctacaaattattgttcaagcatttcaatgtcattcatccataattacacag

SEQ ID NO: 558865 - DNA, 528 bp, Homo sapiens
cgttaagtattaagcttgttaaacctctcaccttacctcttccacctgccccatactgacaatatgaaataagaaggattagaggaagagtgagggagcagaccctaccatcccaagtgcctcaagttgaagctttgtgggtgaggaaggtaacattaaatgaataggagactgagtttttaaactagattwatcaggactggcattttcaatatctgaaatcaactggaaagctattggtaaccaaggtgtttttaaaggacaagaaaaaggatccatcagaatacagacgaaggtagtgactaaagaaaaataaaatctattctgagtcagacttctgtctgaaaggtttgcatctaccaaacatccctaaaattgtgtcggttgcatttgctcaggcctgtggcaaatttacacaccacatcagctcaagtttcccatgaaatcacaggtaatattttgtggtgataaatgcaaggggaaagcagaagtgaaaatgtggcttgagcttggacagtcagagtgcac

SEQ ID NO: 558866 - DNA, 546 bp, Homo sapiens
cgggtggttctttggaaagtggagtattcttagttcctctatggcagcagttctggaagtgtgcttcccagagcagtagctgcaagggcctcacccrggagcttgttagaaatgtgaattcttgggccctactgaatcagaaactttccaagtaaacattttagtatctcacttttcagccctctctgaaatcctatattctttcctaatttgaagccccaaatgaggaagctgttctatacaagcaagttctggccaaattgggtagcatcgtaagatgcctgtgtatcgtctgatcccatgtttgtttgtacaattatactgcagtcttgctggttaataagctttctgttacctactgttatcccaaggggtgtgtgtgtgcacgcacgcatttctaccatggctgtgcacagctggactttccttatatttatatgatttctttttttcttttgtagtttactgtcttactcttttcatttgttcttttgtttatttctgttaacttctctcatttaccaaggtcgctttgaattctgaccc

SEQ ID NO: 558867 - DNA, 266 bp, Homo sapiens
tctttcctaatttgaagccccaaatgaggaagctgttctatacaagcaagttctggccaaattgggtagcatcgtaagatgcctgtgtatcgtctgatcccatgtttgtttgtacaattatactgcagtcttgctggttaataagctttctgttacctactgttatcccaaggggtgtgtgtgtgcacgcacgcatttctaccatggctgtgcacagctggactttcctyatatttatatgatttctttttttcttttgtagttta

SEQ ID NO: 558868 - DNA, 587 bp, Homo sapiens
cgctttgaattctgacccgtgctttgagtttttttcttcagtttgactttgtaccatagagtgatgtttcacattccaggttacagataatgaccctgaactcaaacgttcttaattattgttttgtttatgcctgtgccacagaactaatatgttttctttacatgtgtggggcagggggagttaaagcagggggctctacaaatgtgcttttgctattttggaggtcacccatttttaccatccccacaaactgtacttctaaccataggagaaatttcctttttcttgtaatgagttgccaaaacatcctgttaggtgaaactaatactttgtgtttgtttaaaatgagcaaaatctttgatctttggctttcttgcatttataccttgaattataccacatgacattttcatggaaactttaacttttccataaggcatggaaagctaaagtgattaaggtcacrcagctatttagtggcagaactttgagtaaaacccatagattttgatccccagccctgggtgattttcataatcctgcttgtcaatttgcatctacttaatcacctttaatgaattcat

SEQ ID NO: 558869 - DNA, 571 bp, Homo sapiens
atgtcagtaggtcctggctccattgaattcagggacttcatctgaatccccaaaactcttctttggrgttcttccatgctcttcctcttcattgtatgggatggctgaagcaactgagcctcagaacgcattgacagtatagctttacctatgaatatcatttcaatagtgctgctcaatgttctggctattgcagtaggcaaaagtgggtatgttttcttttttcttttttttttgagactgagtcttgctctgttgcccaggctggagtgcagtggcaagatctcggttcactgcaagctctgcctcccgggttcaagccattctcctgcctcagcttcctgagtagctgggactacaggtgctcaccaccacgcccggctaattttttgtatttttagtagagatggggtttcactgtgttagccaggatggtctcgatctcctgacctcatgatctgcccacctcagcctcccaaagtgctgggattacaggcgtgagccactgcactcggccaaaagtgggtatgttttcttgagtaagaattataataagtgccctatgatttaa

SEQ ID NO: 558870 - DNA, 581 bp, Homo sapiens
ggcagtgccacctccaggccccaagccgactgtgtgtgaaccggagccaaggcatcctggacgtggacttccacatccaaatccgtatagttcatcagcctcgccactccaatgaccagggtctcaccgcctgtgttgagaagaatccaatagcctctgacatgtggggtttgtgggctcaaccatctattcaattctaaaactgtctttttggattaaattcacagtcacccctatgcataatactcttaagagttacgataccaacctaaatttttcaagaaacttctaacaactatttttttttttttttgagacaggtctcattctgtcacccaggagtgctgtggtgcaatcttgtctcactgcagcctcaacctccagggctcaagcaatcctcccaactcagcctcccaagcagctgggatyacaggcatgtgccaccacacccagctaatttttgtattttttgcagagacagggttttgacatgttgcccaagctggtctcaacctcttgggctcaaccaatctgcctgccttggcctcccacagggctgggattacaggggtaagccacct

SEQ ID NO: 558871 - DNA, 552 bp, Homo sapiens
ccaagctaacagaaaggggtttaattctcttcagagcaagaataacatgcttagtgaaaacagtgtgttcctaacaggcaaacagagggyagagtgactcagcccattttacttgtacctctgccagcgaagagtcaggaaagggcataagaaggtttatgaggcaagtggaagcccaaggccaagaaaggatgtagaaggaagttggtcactactttccttgagttcaagtctgtagtctcagatcattcataaactgggtacaaaaaactcactcttatgattgaggacctattgctggcaatgaaccatgagaaggggtcacataacagaggtgatgggcagatattctatgaacctaaaaaaaagaggaggaattctggaaatttagacaactaagcttggtgttatccctgacaaaattctagaatgaactattcatcagatagtttgtgagccttcagaaatgaaagtagccatctggaaaccgatttacgaagaatgtgatggtgtgggaaaccaacttcatttcctttctgataggtttataag

SEQ ID NO: 558872 - DNA, 235 bp, Homo sapiens
ttttgacattgatttgaaaaaagatggtagggtttgacatggtgtacagtttctcaagtggtgacctttttgcccttctctccacccttcctrgtcttcccatgggatctgccatcttcctggctgatgttcaatcagcatttcaaaacttgagagcactgctctgggaaacaggaccatctggttttgacctcggagctaccgtagttctgtgtttgactttctgagaatctct

SEQ ID NO: 558873 - DNA, 235 bp, Homo sapiens
ttttgacattgatttgaaaaaagatggtagggtttgacatggtgtacagtttctcaagtggtgacctttttgcccttctctccacccttcctggtcttcccatgggatctgccatcttcctggctgatgttcaatcagcatttcaaaacttgagagcactgctctgggaaacaggaccatctggttttgacctcggagctacygtagttctgtgtttgactttctgagaatctct

SEQ ID NO: 558874 - DNA, 434 bp, Homo sapiens
atatattttctcaaaaataaatgagtgttgcccgggctctttcaaagcaaattytgagcagataatctgcttggcattttgtcctgatttctgtatgcatgtttgaaaggggctctctgtggtttatttcttcacaaaataaatggcctacgatttaaccagatcctactggaaggcttccaaatcactcagccgtcctcagcttggcgggacagcaatgtctgcaggtccattcggttcatctctgtgccatgggggagcagagtggaaacttcagcttctgaggggattacgtggacatcagaaacgaaaaggacctcagggtcattcggtctagcctctctgcctcaattcacccattttgaaattgtctaaaccactccctccaagtggctcttctaaaagcatgtttgtaagtctccagagaggaattc

SEQ ID NO: 558875 - DNA, 434 bp, Homo sapiens
atatattttctcaaaaataaatgagtgttgcccgggctctttcaaagcaaattctgagcagataatctgcttggcattttgtcctgatttctgtatgcatgtttgaaaggggctctctgtggtttatttcttcacaaaataaatggcctacgatttaaccagatcctactggaaggcttccamatcactcagccgtcctcagcttggcgggacagcaatgtctgcaggtccattcggttcatctctgtgccatgggggagcagagtggaaacttcagcttctgaggggattacgtggacatcagaaacgaaaaggacctcagggtcattcggtctagcctctctgcctcaattcacccattttgaaattgtctaaaccactccctccaagtggctcttctaaaagcatgtttgtaagtctccagagaggaattc

SEQ ID NO: 558876 - DNA, 663 bp, Homo sapiens
ttacagtaaatgctcaataaatagtacgttcacattcaaacaagttctttttcaacaattaaagttcctgatcatccaatggcatgttaaactatctgtaaaacatgagagccttaactttgattctttctttcttcatgggtatgggactggcaacagagaaaaggaaaatgagaagacagtgaataccttagtccttggttcctctgaccaactgaaatgcaaggaagcttggctrtctgcctgaatccagaaagtgtaattatttgtctctggagccacaaagaacccactgagccgtgctctgtaaagtagaacatagagtcaagcaagagtaaccaaggcctgaatcactgaaccaacaaatgactgcccttgtactttgtcttcttttatggtaataaagaagaacaacctgattcttatgccacacaattgtccagaatattctagaaagagatatagcacctgcctagtctcagtagcccaatacatctctacactggacacaaatacccttgctgttgtgtcatgtttgggaaagttgtagccacagcacacagctatacggaagcttagctgacaaaaccacctaacacagctattgcaagccctggatcatggtagaagctcaatctatagtaaatactattcttattatta

SEQ ID NO: 558877 - DNA, 377 bp, Homo sapiens
ctctgttgcccaggctggagtgcagtggtgtgatcatggctcgctgcagccctaactcctgagctcaaacaattctccacttcagcctctcaartagctacaggtgcacaccatcacacctggctaattttttattttttacgttttagagacagggcctagtcccaaactcctagactcaggcgatcctcctgtctcagcctcccaagtagatgggattacaggctcaagccatagcatccagccttaactgccactttaaaaccataaactcatggttaagtacctagtaagtaaggcttcaggagacactttcctgctcacagattaccaaccctacttggcttattcaatgcctaaaaattctctaagctttt

SEQ ID NO: 558878 - DNA, 403 bp, Homo sapiens
actgtacagggaagtcctgggctagacacagtttcttctaaagaaactataaataattctgtcggtaacactttccttgtttattacctcactgagcagctgmatgatttttgctggcttccttaacttggcctttccttcatcaagacttgtccaggaacatcttcaaagatggagggatagattaaggcccatgcttagctggtgatctatacaggagaatccaatctagcctagtatataaattctatactgccttttttttttttaaacaaaaggaaattccagcaatgatccatgcttcaccccctctctaagcaggcaaggcaagaatctagataattttgtattcatttgggaagtcattctgatcatgagggaaaactagtatattaagcagtat

SEQ ID NO: 558879 - DNA, 612 bp, Homo sapiens
atgcttttctcttctattccttgaggtttatctcactaaccaacattcttttatctctaaacattgtctgtgatggtttaagtatacatggttaaatattctaattatttggaaggcacatacttgggatccctgaagacccatcagattgtgtgatatgagcctcttcatatcacatgttcattttagcaaatgcccasaggaaagtctcatgaagcctggagcacccaaggcacattgtccttaaatctcgtgttgggtagatggtctccacagagccaagagaatggaacagggcagtgtgtggagatgagcccctcctttctgaaatgttcacacaatctgagactgtgaagaagacccattattccttctatgctccatgcattagaagattaagtctgtgattgaaacaattgcttattttagcttttatattgtgtaatattgatcactaaatcatacccttgaccttactgttgtacaatttattaaaagtattaattttctgggccatgacctgctttgccatattgagtatatacaaccaaaaagaaacatggttttttattatacattgagtttgagctaagtccattaaattaaaaaaat

SEQ ID NO: 558880 - DNA, 571 bp, Homo sapiens
tagactactgaaaaagacacagggattgattcaaagtgcgtattgaagtggatgccaaaaccttccttgaaaacacatagctaatacttgttaggggcttaccataggccaagctctgctcgaatgctttacattgaagtcacccaataatcttgggagtatgtatggttattagtctcacattatagatgaggaatttgagacacagaaaagttaagtaacttgcacaaggtctcacagagagcaagtggcagasctgggatttgaaccctgtctaactaatcatcccctagagttcatgatcttaaccactatacttcagtgactagccaaaggtaaaaataataaaaaatttagaaataagtttctacactctccagtttaaatacccaatgttttgctggatttttacttcactctggacagggtgtgttgcccctcctttgaggccattacaagaatgatactctatggtttcactttttcagactggtgtgtattctgcccttgtgtgtagtcttccttgtgtctgcattttgtttgctcagaattgtcctttatggggttcata

SEQ ID NO: 558881 - DNA, 571 bp, Homo sapiens
tagactactgaaaaagacacagggattgattcaaagtgcgtattgaagtggatgccaaaaccttccttgaaaacacatagctaatacttgttaggggcttaccataggccaagctctgctcgaatgctttacattgaagtcacccaataatcttgggagtatgtatggttattagtctcacattatagatgaggaatttgagacacagaaaagttaagtaacttgcacaaggtctcacagagagcaagtggcagacctgggatttgaaccctgtctaactaatcatcccctagagttcatgatcttaaccactatacttcagtgactagccaaaggtaaaaataataaaaaatttagaaataagtttctacactctccagtttaaatacccaatgttttgctggatttttacttcactctggacagggtgtgttgcccctcctttgaggccattacaagaatgatactctatggtttcactttttcagactggtgtgtattctrcccttgtgtgtagtcttccttgtgtctgcattttgtttgctcagaattgtcctttatggggttcata

SEQ ID NO: 558882 - DNA, 557 bp, Homo sapiens
tcattaccatataacataacctaatcatgggagtgatagcccatcatattcacaggctctacttctgctgaaggggagaggactacacagggtgtgtacaccaggggttcagaatcctaggacatctcagaattctgcttcatacaagtaatatgtttgaatttgaggatttgagaaggtcactagactcagcctttgtgaaagcaacgtttctcctgctggcattgtagaagtctgttccatgtttttctgggctccatgtgtttcacttaagtctaaggaatggacctggcctggatcatgtctgttcctggagactttactgaggctaagtgggctttagcttccttagaggagttcaagtctggggtggcccctaagcagttcactccatgaagtaatccgaagtcttggtagaatacccagccctatattcagtattaaagctgggacatgyctgatgtcaacaagaagacagggagaagacttggccttatctggttctgatcaaaatgtaaggaatttgtgtggaataaccctagatccagaaatatgcc

SEQ ID NO: 558883 - DNA, 478 bp, Homo sapiens
atcccaggtggaccctaaatacaattatataataggtacccttataagagagaggcagagaaaattttgagatagaagaggaagaagcaacgtgaccacagaggcggtggttggagtgatatggccacagccaagacatgctagccaccaccagaagccagaagaggcaggagcaaatacttcacaggagtgtggccctgccgacaacttgattttggacttctggccccagaactgggggagaatcattttttgctgtttgaagccaccaagtttgtggttaactccttacaacagtcccaggaagctgatccactcagtttccacaactatacatcttccrcatctacaaaatgtaaaggttggggtagcattaacaataagtccctttccaaatctttcactttaagaatgtcactttcagacactggaaaataaataaaatagctttaatattatcacctgtctgacaacctcc

SEQ ID NO: 558884 - DNA, 461 bp, Homo sapiens
gactagcgggcaagagccaggtgagaccactgtgcccaagagtggtcaagggagagttcgggaaggaagagccgggcctgatctctaaataatgagtaggaagagtctggagagacagaaaggacaagggccttctctctgaagaagatgattaccttctaactctcactgcgtctgtcttgaaggttgtaaatcagactcttggcccatttacagagacagacactgctgagttccttccagcacctggtatgacatattaactcatggaaaggtggagaaatcctgctagtctaatgataacaataataataacaataattgcttatatttattagacaccttctatggacaagaccagtaaggagtactttatattaaactttagttaatcttcaccrtaatctaatgaagtagggtccttattatacccattttacagatgaagaaaccaagacttc

SEQ ID NO: 558885 - DNA, 607 bp, Homo sapiens
ttggaagcttgcttggaattgtgaactcgatttggtagtagaaagctggctactaaagaatacttagattctagaatggaatacagtcacacagccrctgaagaaatgtctgtggggttggttcagattccagaagcaatcaaaatctacctttgtcaaaagtgcaagataattcacaggtcatggagaaaatgtcatttactctctagatagcctaatcctgcaacagctgcattttgaccctgatttttcctttctttcaacagtattgctagtctatttggggtaagtttgaagaagcgcccaaggtgatggtgataacgatagctgctatagaaagaatgtcagaccttgttaagtgtcttacatacaatctcaatattaatttcacttaactatgagatggattaacattagccccattttacagataaggaaacagactcagataaacaaagtatcttgtccaaagccaaaggtcttagagctagaatgtgtagttctaattccaaatcttatgtccatagccaatatatggtgggaagcacactcttcttgccactccactccaaggtttttgtgagcctgcccattgctatcaaaccct

SEQ ID NO: 558886 - DNA, 549 bp, Homo sapiens
ccttttatggacctgtctagagccttttgttttgccaggtcctgtagcaggtgggatgcctctgtagttggtgacaccaagggtgtcctcacactgtcatgtcacacttacctcccatgctcagttaggtggttcagtacgtccccaatgaagagcactccattgcatggctttccttctgaatactccacgctgccctatgctctgctgctctgcactctctcttttctccttcaattggggtgacaactttcgctattccatccacacccagccctttgccttagaataggagcctgtctacttcagtctggtcttgccatcacatctcccgactgcctctctctctctctgtctctctctctctctctctctctctctctctctmtatatatatatatatatatatatatatataattatacatatacccacacacatatacatatatatgtatacctacacacacacacatacataaatttctttaattcgctttaggcattccatgtgatattagacacgtgtctcccaggaagattgagtgca

SEQ ID NO: 558887 - DNA, 280 bp, Homo sapiens
tgccattgcaatacctcttcctttaataaggaaacactgtcatgaatataatctgtatgctattaatgcattttttatacatagagaatcagtggggtcacatcttttttacctttctcatttccaagtagtttttgagttctattagattaacattagttccagtgaaagggaaagatatatagtctctctttaggaatctaccattctgtgacaaaagagaccccaastaaagtgtccaaatacactctagtctttagttatatattcacagagtggt

SEQ ID NO: 558888 - DNA, 606 bp, Homo sapiens
tgatttatgcttctacctggtggtatcaaaaagtaaatgagctaagtcattctttttgtctttaaaaagtccttttatttttttcctatctttccatatttctgttataggtcatctactttcaatttgataaagttttaaaatacaaaaacaataaagaataatattatcaacacctggggacccaaactgaaaattgacattgtcaacattctgatatatttatattttttgtctttatggaaaaaatgaaacagtacagataaaattgaagtgttctttattgtccatgccattgcaatacctcttcctttaataaggaaacactgtcatgaatataatctgtatgctattaatgcattttttatacatagagaatcagtggggtcacatcttttttacctttctcatttccaagtagtttttgagttctattagattaacattagttccagtgaaagggaaagatatatagtctctctttaggaatctaccattctgtgacaaaagagaccccaagtaaagtgtccaaatacactctagtctttagttatatattcacagagtggtggaaggaatgcaccraatttgttggtctttactagc

SEQ ID NO: 558889 - DNA, 495 bp, Homo sapiens
acatgtcctcaggcaatctctatgaagagtacagtttgagaaatgatgctctggggtatttaaagagaaccaggctggggcctatcagcaagaaatttacagaatatttgcatatgtaatgaatggatacaataatgtgataaatcaccacctacccatttgcagaagcaaaacccttgaaaggatttttttgaggaaaatcttggctttgctttacatactttcttcattcatttttgtgctgagatagcattgtcttctttaaggtacggactcttgtgtggccatagtctaaactttcaawtgagaatggcaagatatcatcacctcttcaacctttaattgttaccatcaacaataatcataatgacaatttatttagcttttattaccaggcattattaatgctggggatacagtaaataaaaacaaatcctctgttcttggggcagtgatggtaagtgtataggataaaaatcaagaagggaaggggat

SEQ ID NO: 558890 - DNA, 542 bp, Homo sapiens
gagtagatggttgtgatggtatagtcattggcattggaggaatgacatgagtggccttagagaagggagatatgggtgaagtgaaggaatgaattctggggaaatcttggggaagacagttcaagtcagaaggaacatcaaggaacaaaaagtcttgagtcaaagttagactggcttgttccagaatgtcatggaggttgccatggctggagtagattgagtgaggggagagcagtagaagatgacccaaagmaagttatatggccttgggggatatgaatggccctcagctcactcagcttttattctgagtgagatggtggccattggaggatttcaagtgaagtgacatgatctgacttaggctgctgtgtgagaactcacagtagggaggcaaagatggaaccagcaagaccggttaggaggatatgacagacatccaggggagagataatgttggcttggcctagggtagtataccttagaaataggtaggatattttattcttttctttaccccaaggatctcttttttaacttaa

SEQ ID NO: 558891 - DNA, 542 bp, Homo sapiens
gagtagatggttgtgatggtatagtcattggcattggaggaatgacatgagtggccttagagaagggagatatgggtgaagtgaaggaatgaattctggggaaatcttggggaagacagttcaagtcagaaggaacatcaaggaacaaaaagtcttgagtcaaagttagactggcttgttccagaatgtcatggaggttgccatggctggagtagattgagtgaggggagagcagtagaagatgacccaaagcaagttatatggccttgggggatatgaatggccctcagctcactcagcttttattctgagtgagatggtggccattggaggatttcaagygaagtgacatgatctgacttaggctgctgtgtgagaactcacagtagggaggcaaagatggaaccagcaagaccggttaggaggatatgacagacatccaggggagagataatgttggcttggcctagggtagtataccttagaaataggtaggatattttattcttttctttaccccaaggatctcttttttaacttaa

SEQ ID NO: 558892 - DNA, 593 bp, Homo sapiens
atttcattgtggttttaatttgtgtttattttattgagagagaaattgaatatcttttcatstgtttaggggcattgtgtttccttttcagtgaaatgtctgtttatctccttagcccattttttctaatggggttattggtctttccttactgattttaaaagagctttttatgtattaaggatatttgccctattattatcatttgtctctttgttttttattttggaaattcgtaaatatttttaatttttacataataaaatatatcttccttttatggcttcaggacttctaaaatacttaggatagactttgcaactctgaaattatatgaaaataaaaattctgccatgtttccttctagtcaaaaaactttctttttaatatttaaatatttgataaattgggaatttattttggtgaagcatataaggtagaaattcaaatttagttttttttcagtgatatttacttattttatttactgaataatttattttgcacttatgtgaaatgtcacttatatcctaatctatagcctcatactgatctgcatttcttctggactatattttattttaccacatagt

SEQ ID NO: 558893 - DNA, 618 bp, Homo sapiens
atagttactgtataagatatggcagaagacctctttacacttctttttgaaattttgttttctggctattcttgtttatttttcattaaacttaagaatcagcttgtctaatttaagtacaaattctgtttatatgtctattgaaattgcatttatgctttaatttataaagatatgtcacctttatggtgttcactctttcgatccatttattttagttttcttatgtaagttttaatccatccattaagttcttcaagagtatttcaaatattttttcaatttttttatcttcttaatttttgttttgaagtttgcttccagatattgtatattttatatcacgattgtatattgctcttagttatgcacttaacttcagggtattagtccascgagtcacactgtcctcaaaggttttcatcagattttgtagattcccctttctgtccccaacatgcttgaaagtagtcttgcttctgcatccctccccaccctcaagggggggtaaggctgtttggtggcctcactgcctctcttgtatctgggagatggcagaccagaatcattatacattagctagatcaaaggctgctcctccacatggaaacgtgtgcc

SEQ ID NO: 558894 - DNA, 583 bp, Homo sapiens
  misc_feature 277, 283, 299: n = A,T,C or G
ctccaaactgcaaaattacatgagctataactttactcaagacaaagttatgatgacccatatttctgtatagggaaaagggataatgctaagtggcatttttctagaaaagaatcaagtgattttcagtttaacaaaagcatttatttaagatgagatgatgtgtatcttatgctttcagtttataggggtgactttcacaagtaaattatcattctacatttattttatacaaatawtttttttttttttaaacagggtgctcactgctgtcacnccaggnctagaatggcagtggncatgatcatggctccctgcagcctcgacctctcaggctcaggtaatccttctacctcagcctttggagtagctgggaccacaaattagccagcatgcctggctaactgttatttttttgtagagacagggtctcgccatattacccaggctggcctcaaactcctggcctcaagcaatctacccacctcagcctcccaaagtgttgggattacaggtgtgagccaccacgcacagcctgacatttttaatgtaacatttattgcatcctaagtggcctttatat

SEQ ID NO: 558895 - DNA, 492 bp, Homo sapiens
tttattttgtgctattaaatctttagaattgaatagaaattgagattgttcaaatttggcctaaaaattgaatgatggtacatttaaagaaaaaaaaatctattcttgaacatgcaattaccatttaaagaaragcttttttaccataagcatcaaagaacattagacactcccctgcataagcagtagtttaggtgcttaatttacataattcacatcaagtatagggaactcctatacctctgttttatttatctattcccagaagtgcctaatgagaaactgattttcttttatggatatttctgattgtccttttttagaacaaagctgctgaaaatttaaagatcaggttttagggttttattttcagcaaaatgaacaaaaatgtaactgcgatgggccctcccattgaaaaaaaaaatgctagctaaaatatttatttaattacgctttctcaatgcaccagtcagggaagccattcagaccacg

SEQ ID NO: 558896 - DNA, 613 bp, Homo sapiens
aatacttgatatacaaaaaaaactcataataatttaaatatatagcacaaagttttcccccacgtttaccatcttgaagctaaagtaacaagagctcttaggggtgaggacattcagagaatttagaaactatccctgacttggatgaaagattcttatattcccctgagagcacactcataaaataaaccaggatttagaaataagaaatgccatgaaattagttcctctgaactcaaattattggaataatctataaaatcaaaggtcgctgrtataggagtcaaagagtgccacctgggagtgccgcttaatattgccatagatacggcaggtagctaccaaaacagattcaaaaagcaacactcctgcaatgctcctgactgacactagatggcggtaaagttttatcatgcagttaaatttcaattagtttggccagggttaaaataatttaatgagcataaggcgaaaaaattaaaagaacccttacttaattacttagtaaatactatttttgaattattatttctaagctggaattaaaattgagttgcttatactgatctgtgacctgaaaccatttttgaaaggaggtgggttaaagtgtatt

SEQ ID NO: 558897 - DNA, 613 bp, Homo sapiens
aatacttgatatacaaaaaaaactcataataatttaaatatatagcacaaagttttcccccacgtttaccatcttgaagctaaagtaacaagagctcttaggggtgaggacattcagagaatttagaaactatccctgacttggatgaaagattcttatattcccctgagagcacactcataaaataaaccaggatttagaaataagaaatgccatgaaattagttcctctgaactcaaattattggaataatctataaaatcaaaggtcgctgatataggagtcaaagagtgccacctgggagtgccgcttaatattgccatagatacggcaggtagctaccaaaacagattcaaaaagcaacactcctgcaatgctcctgactgacactagatggcggtaaagttttatcatgcagttaaatttcaattagtytggccagggttaaaataatttaatgagcataaggcgaaaaaattaaaagaacccttacttaattacttagtaaatactatttttgaattattatttctaagctggaattaaaattgagttgcttatactgatctgtgacctgaaaccatttttgaaaggaggtgggttaaagtgtatt

SEQ ID NO: 558898 - DNA, 588 bp, Homo sapiens
tacctcatgatctaccttatgaatgagtcacaaatgaattcatacacataaagtactagaaacaatactttttctttagagattctatttaaatattaaccattattatcacttcacataagttccctgagtctgagatagagcatgctatggaaatatacagtaaaaactgaagcatgaaatctaggtcaatttcccaatgtcacacaatcagcagaatcaaagtccacagataaaaacagaygaacactaccacttggaattgccctttgctattgacatagagggtctgcttccaaaaacgacgagtaaactaggagtagaacacaaaccttccaaatcacaagccagtgacctgtccactgcaccatgacaaaccaggctgatttattgactgaagaaactcctaaaagacaagtatttgacaatattggctgctagttaaatggcaggtgaaattctaaagtattaacagacacttctgtccatttactgcattctgtttatcacttcatgaggttctgccttaattgcctcagagaagggaggatacaacataatccagaaaacagaatcttcctaaagctt

SEQ ID NO: 558899 - DNA, 587 bp, Homo sapiens
catctacaagaggggtccaaaaagcatctttgcaaaggaagcccaggacacggtgaatgaattgttactcatgcagagcaagatcagccccttacctcaggccctgccagtgcaccttcgtaaagcacttcccctttctgttaaccagcctcctcacaagaagaaaaatcayagtccctgctttagtaaactgttgtagttaagaagatggaaagagagaggattaaatgacttggttcaggcagtgaagaggcaggtattcaggagcaagactggctgtgttagaattgtggctactctgctgcttacaagctgtgtgaccttgggcacattgcataacctctctttggcttggttttctcgtttccaaaatggggataacaatagtacctatctcaatgagttgttaagatgattaaatgagttaatatttataaagttcttagaacaagctgacagaataagtgctgtaaaagtatttgttagcaaatcataaataacatatgtgtattaacttttttcagatcatttgtgtactcattctcactatatgtgactcaggctgaagtcaatcaatgtatcgcatt

SEQ ID NO: 558900 - DNA, 587 bp, Homo sapiens
catctacaagaggggtccaaaaagcatctttgcaaaggaagcccaggacacggtgaatgaattgttactcatgcagagcaagatcagccccttacctcaggccctgccagtgcaccttcgtaaagcacttcccctttctgttaaccagcctcctcacaagaagaaaaatcacagtccctgctttagtaaactgttgtagttaagaagatggaaagagagaggattaaatgacttggttcaggcagtgaagargcaggtattcaggagcaagactggctgtgttagaattgtggctactctgctgcttacaagctgtgtgaccttgggcacattgcataacctctctttggcttggttttctcgtttccaaaatggggataacaatagtacctatctcaatgagttgttaagatgattaaatgagttaatatttataaagttcttagaacaagctgacagaataagtgctgtaaaagtatttgttagcaaatcataaataacatatgtgtattaacttttttcagatcatttgtgtactcattctcactatatgtgactcaggctgaagtcaatcaatgtatcgcatt

SEQ ID NO: 558901 - DNA, 541 bp, Homo sapiens
ctgataaacaaaataagttcttatttaaaacaaaataaytaatgttaatgtagtgtttaaccaggaaatgaagtatttaaacaaagacagcattatttgagtgtaaagaaattggaattactcatacatgcagggcccctttttatggatgccaaccacgtgcttggatacttgagtagacattcagatgtcctagtgcccttggatgtaaatgagctctgtgtggagccagtgtggggagctgcttctcagctgaagaatcccttccagagcctgagtgtgctagctctggacccagccctcctgcccagtcagcccctgcagtattctcagtttcttacagaggcatttgggcccacctaaatccaaaacctgagaatttagtgccagctgaagttcagatggttcagaaacagttctgctcacgatgatcagtttcaatgtgtaaaatattctacagaatacttaattacctggacttttacattctcatcataatctctgttactttgattgttaggatcaattttaacatacacag

SEQ ID NO: 558902 - DNA, 545 bp, Homo sapiens
acaacgtcaggacattgagaccatcctggctaacacggtgaaaccccatctctactaaaaatacaaaaaaaaaaaattagctgggcatggtggcgggcgcctgtagtcccaactactcgggaggctgaggcaggaggatggcgtgaacctgggaggtggagcttgccgtgagccgagattgcaccactgcactccagcctgggctacagagagagactctgtttcaaaaaaaaaaaaaaaaaaaaaaagaacatcgcaactaagatccgttctgctccctccagtttgatggaggaaactgaraattgggctgtggcctcctgcagaccaaggctgtgctgtgccaagaagggagtgaggcaagagtgtgtaaaaatgccagaaaacttcctactcttgtgaatatggctattgtggacctttttctgctctccaaagtgcctataaagttttaaatacccagtttctggctgttttttggtgtttctatgggggaatgaaggcttggagcttcctactctgccgttttggcaatgtcactactc

SEQ ID NO: 558903 - DNA, 545 bp, Homo sapiens
acaacgtcaggacattgagaccatcctggctaacacggtgaaaccccatctctactaaaaatacaaaaaaaaaaaattagctgggcatggtggcgggcgcctgtagtcccaactactcgggaggctgaggcaggaggatggcgtgaacctgggaggtggagcttgccgtgagccgagattgcaccactgcactccagcctgggctacagagagagactctgtttcaaaaaaaaaaaaaaaaaaaaaaagaacatcgcaactaagatccgttctgctccctccagtttgatggaggaaactgagaattgggctgtggcctcctgcaraccaaggctgtgctgtgccaagaagggagtgaggcaagagtgtgtaaaaatgccagaaaacttcctactcttgtgaatatggctattgtggacctttttctgctctccaaagtgcctataaagttttaaatacccagtttctggctgttttttggtgtttctatgggggaatgaaggcttggagcttcctactctgccgttttggcaatgtcactactc

SEQ ID NO: 558904 - DNA, 545 bp, Homo sapiens
acaacgtcaggacattgagaccatcctggctaacacggtgaaaccccatctctactaaaaatacaaaaaaaaaaaattagctgggcatggtggcgggcgcctgtagtcccaactactcgggaggctgaggcaggaggatggcgtgaacctgggaggtggagcttgccgtgagccgagattgcaccactgcactccagcctgggctacagagagagactctgtttcaaaaaaaaaaaaaaaaaaaaaaagaacatcgcaactaagatccgttctgctccctccagtttgatggaggaaactgagaattgggctgtggcctcctgcagaccaaggctgtgctgtgccaagaagggagtgaggcaagagtgtgtaaaaatgccaraaaacttcctactcttgtgaatatggctattgtggacctttttctgctctccaaagtgcctataaagttttaaatacccagtttctggctgttttttggtgtttctatgggggaatgaaggcttggagcttcctactctgccgttttggcaatgtcactactc

SEQ ID NO: 558905 - DNA, 556 bp, Homo sapiens
ggtggtgagaatgtggatagattgtaacccttgggaatgtaacacaattcaaccactgtggaaaacagtttggcggctccacaaaatataaaacagaattacctagcgatttcatgtccaggtatgtacccaaaagaactgaaagcacgaactcaggtatttataacaggaatgtccctggcagcatttttcataactgccaaaaggtggaargcacccacgtgtccatccccagatgaatgggtgacggcacactatttacccctcacaggaaggggctgatgtgtgccacagcctagaggaaccctgaagaccttatgctgagtgaagccagacaacagtccatgcagatgaaatgttccaggacaggccaagccgcagagacagaacgcaggctgggggttgcccggggacaggaagcagctgtttaatgggtatggggtttccttttggggtgatgcaaattttttggaactaaggcaatgcctgttcaatgctgtaaatgtgctaaatgccaccaaatggttcacttataaatggttaaacttatgttaca

SEQ ID NO: 558906 - DNA, 556 bp, Homo sapiens
ggtggtgagaatgtggatagattgtaacccttgggaatgtaacacaattcaaccactgtggaaaacagtttggcggctccacaaaatataaaacagaattacctagcgatttcatgtccaggtatgtacccaaaagaactgaaagcacgaactcaggtatttataacaggaatgtccctggcagcatttttcataactgccaaaaggtggaaagcacccacgtgtccatccccagatgaatgggtgacggcacactatttacccctcayaggaaggggctgatgtgtgccacagcctagaggaaccctgaagaccttatgctgagtgaagccagacaacagtccatgcagatgaaatgttccaggacaggccaagccgcagagacagaacgcaggctgggggttgcccggggacaggaagcagctgtttaatgggtatggggtttccttttggggtgatgcaaattttttggaactaaggcaatgcctgttcaatgctgtaaatgtgctaaatgccaccaaatggttcacttataaatggttaaacttatgttaca

SEQ ID NO: 558907 - DNA, 556 bp, Homo sapiens
ggtggtgagaatgtggatagattgtaacccttgggaatgtaacacaattcaaccactgtggaaaacagtttggcggctccacaaaatataaaacagaattacctagcgatttcatgtccaggtatgtacccaaaagaactgaaagcacgaactcaggtatttataacaggaatgtccctggcagcatttttcataactgccaaaaggtggaaagcacccacgtgtccatccccagatgaatgggtgacggcacactatttacccctcacaggaargggctgatgtgtgccacagcctagaggaaccctgaagaccttatgctgagtgaagccagacaacagtccatgcagatgaaatgttccaggacaggccaagccgcagagacagaacgcaggctgggggttgcccggggacaggaagcagctgtttaatgggtatggggtttccttttggggtgatgcaaattttttggaactaaggcaatgcctgttcaatgctgtaaatgtgctaaatgccaccaaatggttcacttataaatggttaaacttatgttaca

SEQ ID NO: 558908 - DNA, 590 bp, Homo sapiens
taatttttaattggttttctcctccactggctaaaaggctattagctccccgctaggtgatcgcatcccattttcttcacaccaccaaggaaacagtgatttcctcagcctgtccctaaagtgattctgcagaagaaaggcaatttagtgaatcagctcaatgcacttccccatttgctctctgcttgcaggcccccagcaggcayagcccaccagtgagggctgcaggcagcttctggaggccagacagggttagtgagctggagtggaggaggaagcaagccaggcccaggtgaacctggtgaagcctctggccagagaaaggggagaaggaaaaggatgaagcagggggagctgtacccctggcctgagctgcccgcgctgatacctggtgcttcaggcaggggtgggctgcctaggccctctgcagagggtggtctggcagcttggatccgggccctgccaagtcacagtgcccagctcttccatgctgggaacagaaggccccggggcccaggggcagagagggaatgtccttccttgctgcaaaacaggacccaagaagtcaggccaggaagacaagagacaag

SEQ ID NO: 558909 - DNA, 619 bp, Homo sapiens
ttttattttatttttttagacagggtcttgctctgacactccacaggctggagtacagtggtgcgatcatagctcactgcagccttgacctcctgggctcaagcagtcctcctgtctcagcctcccaaagtactgggactacaggtgcatgccaccccacctggcttaaatttctcttgaaaattcttctttgactcggctgggtgcagtggctcatgcctgtaatcccagcactttgggaggccgaggtatgtggatcacgaggtcaggagatcaagatcatcctggycaacatagtgaaaccccgtctctactaataatacaaaaattagctgggtgtggtggcacctgcctgtaatcccagctactcaggaggctgaggcaggagaatctattgaaccaaggagttggaggatgcagtgaaccgagattgcgccactgcactccagcctggtgacagagcgagactccatctcaaaaaaaaaaaagaaaaaagaaaattcatctttggctcatgtgttatttagaagtgtcttgtttaatttccatattaaatacttgggggatttcccagctatctttccattattgatttctactttatttcaactgtggtctg

SEQ ID NO: 558910 - DNA, 591 bp, Homo sapiens
ttacaacttgtggtagatgaagaaataatttcttaacatagcaagaacccaggcaaatgattaagaaaaagaataatcatacaaatttaatacatgtgagaagctgttcagcctttcccattaattaaagaagtaaaatataaaacaaaacatataatttttcacttagcagagaygaaataccaaaacagatgggtataggtgtggaacatacttccttggttgacagttagccaatatctattaaaatcccttgccacagtaatttcagttctagacatttgtcttatattactgtatttattctgtcctgtaaccataaattccacagctgcctagtgatggttctatatttaaatggaatgcttactctcagtattgttttttcttttgagatggagtcttgttctgttgccaggctggagtgcagtgccatgatctcagctcactgcaacctccacctcccaggttcaagtgattctcctgcctcagcctcccgagtagctaggactacaggtgtgcaccaccacgcccagctaatttttgtatttttagtagagatggagtttcaccttgttggccagtatggtc

SEQ ID NO: 558911 - DNA, 600 bp, Homo sapiens
agtcactgtctttcaaactccaagaagaaagtatctacctagtgatcatttccactctagtaagtttaaaatagaactgaactgcaactctgccaatcttcctcctgcattccctttgttcaaaggatggtgatggcttctagctagtcctctagtcaaaagccataaaataatcttatactttttatcctacttgtttattccaattattctgtttactgtcctattcagccagtcacgaaatctggttgaaaccaccacttacatactcttcactttcacattcttctattcattcctactaccttaggacatagttcagattttcatgatttctgcaatagtctgtgtagtttttctgtctctatattttcatcaccgtagtagaaatgtttttttcatgtgtagttaatagtgtttacagctttctattccttagtcacctgagacyttaaaatgcaacatgtgacttctgtttaaacttcacgaattggccaaacacatgaatttcttctgcctgttgtgactttacacaaaggataataataaaaaatatatgaaaaccttcagaatgaaggaaagagaatgggaaagggtcta

SEQ ID NO: 558912 - DNA, 594 bp, Homo sapiens
ttaaataaaatcctgtataagaactattgaactatcagttctcttgtccatcctgctcccagaaaccataggagcaggtgtatatccctcaggtagaaaaactggggcttttcctccagacaaagtgaagagccttagagatgagatttccagaaagtgacattggcagcactttcaaacaaacacatayacaccaatgcaaattcagccttgccacattaataccccagagtgtaactctccagttaccaaagcccagcagagaatacagagcaccagccaccttctcagtgtcttattgttacaatatgaaccaagagataaggattacaaaacaatgaaagacaaaccactaatatgaaaggtggatacaatcaaactggaaaatcaaaacccagatgaaccacaatcagcatatgaaacaattaagaagcagaatttaaaaaaaaaactgtaaatataattatttagagaaactaaaaattatactgcatcataagacactactaaaatttaactatcagaaaataagaaagaactcttgactgttagaaatctgatagctgaaatataactattaagtactgagaaaag

SEQ ID NO: 558913 - DNA, 561 bp, Homo sapiens
agcaagaatgaagcagggagaagcttaaaaaatccatgtggtcagtcaccaaaagagatgatggcatggattaggtggcagtgatggagcaggtagaaagaaaggttttgaaataatgttaattggattgctaatgaattttttggtttcaacagctatttttttttttgagatactgagttggagaagtgtatgcaacacctctcacgtaggtaactggatatagacgtactaagctcagagtggagatctrggctaaagatacaaactaaattctcagcataaaaatgcaatttaaagaaaagtataaggctgaatggaatcacatagagagtgtaaatggagaagagaaaggggcccaggtcaaaggcctgaaatgccccaaaatttagaatttgtatgcaggagttggagacacttttaaaaaggaatggcccgtgaggtaggaggaaagctaaatgaatgtggtgtcaaagaagccatgagtggagaacatgtcaataagcagagagtaaccagttatgctgtgaaaatgagatttgacagtgtggattttatttt

SEQ ID NO: 558914 - DNA, 561 bp, Homo sapiens
agcaagaatgaagcagggagaagcttaaaaaatccatgtggtcagtcaccaaaagagatgatggcatggattaggtggcagtgatggagcaggtagaaagaaaggttttgaaataatgttaattggattgctaatgaattttttggtttcaacagctatttttttttttgagatactgagttggagaagtgtatgcaacacctctcacgtaggtaactggatatagacgtactaagctcagagtggagatctgggctaaagatacaaactaaattctcagcataaaaatgcaatttaaagaaaagtataaggctgaatggaatcacatagagagtgtaaatggagaagagaaaggggcccaggtcaaaggcctgaaatgccccaaaatttagaatttgtatgcaggagttggagacacttytaaaaaggaatggcccgtgaggtaggaggaaagctaaatgaatgtggtgtcaaagaagccatgagtggagaacatgtcaataagcagagagtaaccagttatgctgtgaaaatgagatttgacagtgtggattttatttt

SEQ ID NO: 558915 - DNA, 578 bp, Homo sapiens
cttctcctctgaatgcttccagtttccttttacagtttgaaaaatttcatcagaatgtgaacatgaatggtgaggaggaaaggaaaaaggaaaagataattaagtgaccatcttggggtattaggaagcaaatgtattgaagaaatacagcagggttgctggagagggtcaccttgagatgcatggccagctatttatagtgagaccacttactggggtttgctatattcccaagcaaagttcagtaatacgatttgcagcagagtcttggagccagaggaaaattagatttaaccctgacctggctttttccatgggagaaagatagaaaggggarcatttcatccaacttaaatgctatagcctcttacactgaacactggaaagctctgtcactcttaggcacagagaagctggggatcaccctgaagttgctatcacttttggttctactcttgacaaaactgccctttgtcaagtaaagaactttactagctcatcaagtgatatcaacatctttggacatatttgattaaaaccaagggactgctaagcctctgataagttttctctcagga

SEQ ID NO: 558916 - DNA, 609 bp, Homo sapiens
aacagtacacatttatcagctgtattataacttagaaaaatgtaatttattatgatacagacctgtttatcttatgctggtgtttcttttataatctactaagaaaaaaaaacatgaagtgaaacaacatgtttattcttagaaagaacatttaggcatgtgtgtaaaagtggattgggaatctggtgcttcttacaattcctggaagttgggaggaaggagaagaagctatggaggggccrgatagggtagctcacgcctataatcccagcactttgggaggccaaggtgggcggatcacctggggtcaggagtttgagaccagcctggccaacatggtgaaacctcgtctctactaaaaatacaaaaattagccaggcgtggtggcacttgcctgtaatcccagctactcaggagactgaggcagtggaattgcttgaacccagcaggcagaggttgcagtgagccaacatcaccacagagcattccagcctgggcaacacagcaagactccatctcaaaataaaataaaataaaataaaaacgctatagagggagtcaccaaagtggaggatgtgctttagcccagctatcccatccccagaatgg

SEQ ID NO: 558917 - DNA, 609 bp, Homo sapiens
aacagtacacatttatcagctgtattataacttagaaaaatgtaatttattatgatacagacctgtttatcttatgctggtgtttcttttataatctactaagaaaaaaaaacatgaagtgaaacaacatgtttattcttagaaagaacatttaggcatgtgtgtaaaagtggattgggaatctggtgcttcttacaattcctggaagttgggaggaaggagaagaagctatggaggggccggatagggtagctcacgcctataatcccagcactttgggaggccaaggtgggcggatcacctggggtcaggagtttgagaccagcctggccaacatggtgaaacctcgtctctactaaaaatacaaaaattagccaggcgtggtggcacttgcctgtaatcccagctactcaggagactgaggcagtggaattgcttgaacccagcaggcagaggttgcagtgagccaacatcaycacagagcattccagcctgggcaacacagcaagactccatctcaaaataaaataaaataaaataaaaacgctatagagggagtcaccaaagtggaggatgtgctttagcccagctatcccatccccagaatgg

SEQ ID NO: 558918 - DNA, 614 bp, Homo sapiens
gtgactgtcttagacaaatacaaaagactgggtgttccataaatatttgaaggacaaagcaatgttagagtagagctataaccacactactatgagaacactaaataggtatgatyaaattgtctttatttgaggcatttggagaagggaaaggctgtatcctgagactttttgttaagtctctgacttcagaaatttcaggcatatacttcagaaatatatgggaatatatttttattgcagagaattgcattcaaatagtatagacaaaagtttcccatttaaggtcgatatcctctctctcacctaaaatagctataattgttatttttatcatatatccttttgaatattaaaaacatatttacatacatacatatagagagagaaataggcaaatttttctttttatttttccctagatctctcttacttcaagctttattctgctgctggcctggaagtctaccgtatagttaaaggaggaagacgagtacaagacagggttggagagaaaggtcggagccagaccattctaaatgtcaggcaatggtaagaaagttagtgtggattctaaggtgtttacatgcaaaaacagggaattgtataatctg

SEQ ID NO: 558919 - DNA, 614 bp, Homo sapiens
gtgactgtcttagacaaatacaaaagactgggtgttccataaatatttgaaggacaaagcaatgttagagtagagctataaccacactactatgagaacactaaataggtatgatcaaattgtctttatttgaggcatttggagaagggaaaggctgtatcctgagactttttgttaagtctctgacttcagaaatttcaggcatatacttcagaaatatatgggaatatatttttattgcagagaattgcattcaaatagtatagacaaaagtttcccatttaagstcgatatcctctctctcacctaaaatagctataattgttatttttatcatatatccttttgaatattaaaaacatatttacatacatacatatagagagagaaataggcaaatttttctttttatttttccctagatctctcttacttcaagctttattctgctgctggcctggaagtctaccgtatagttaaaggaggaagacgagtacaagacagggttggagagaaaggtcggagccagaccattctaaatgtcaggcaatggtaagaaagttagtgtggattctaaggtgtttacatgcaaaaacagggaattgtataatctg

SEQ ID NO: 558920 - DNA, 522 bp, Homo sapiens
attctgctgctggcctggaagtctaccgtatagttaaaggaggaagacgagyacaagacagggttggagagaaaggtcggagccagaccattctaaatgtcaggcaatggtaagaaagttagtgtggattctaaggtgtttacatgcaaaaacagggaattgtataatctgattatttctaaagggtactctggcagctggggaggagacactatcagaatggggcataatccatattgaagaaagcgtgagagttggagaattagagacagtaaatacagacaactagataagttttgctgttaaggggaaaagaaaattggcacttctccagaacaggctccagaatactatatccagcatgttcctctcttaaaatttgctgagagttcttgaggccatagttcttggtctatcacagactttttttttccaaatagagaaatgagcagcatcaaaagaccatgtgatgaaacgtggaatccctgacctagcacaaaccagccctcatctccagaccga

SEQ ID NO: 558921 - DNA, 581 bp, Homo sapiens
aacacttacctcactgtgttatgagaagaaatggaatgtaaagccttaatacaagatacagtaatcataaaatgttgctagtattgttatcactatcatggttatgatttttttaaattatagcagatcctctgtaaagacttgggtaatgaatatgctttgtgaccctatcagcccaaaaacaaactcaaaattcaaagattatggaagctcacagtaaaaataaatcatgttaaatacttgactccataatgctataccttgtcatttttgaattatttggtcatatataattctacactgtgcagccccagctaaggagccttctgggatctcacatcccaccagtgaggaaggtggaacacagccgaagccttgaagggtcraaatgtggagaataaaattaagaagatagtaacaatcctctgctcctaagagaggggatccgtgttcaaatggctaagtctaagaggtgtagtaaatttgaatccaatacaagtaaatattgatatcaaacttgtgagtaactgttttcatgttcttgaaaaaatactaagaaaagaaatatggttgatgcataa

SEQ ID NO: 558922 - DNA, 611 bp, Homo sapiens
gatgcatgtcttcggagaaagaaatgtaagcaatgtcagagttctcctgtacatcagcaaaggaaacacatgtgagccccaggctgtttgtgccagagtccttccyagtaaaatgggtcagagctctgctgcaatctgcattctctctcatacagtccactgaggaccgaagcagcacattggaagtcctaccgcttgttccactcccactcccacaagtcagcaggggaacatggaaccaaacctcacattcaggaattgtattgacacctttgtaacaccttttatgatgagttgaatttctgagttactttacatgtgtatctttaaaaatttctctccagagagtaaaaatgaatgtcccattctgatcccaaaggtgaagtgcatcaaacacacaacccagcaagggatgcatgttgtgggaaaaaaaaaaaaaaaaagattttggaagccaataaccatagggctttcactggattaattgaaaatttaggaaatagaaaataacatgggaaggccatatttttctcctccactcagcactctctaccccagtgaacacacatgcacatacgatgacagacacatactcacaggttttctcctct

SEQ ID NO: 558923 - DNA, 496 bp, Homo sapiens
cagaactgaagaaaaaaggggacgtggatcacagttactgtgaatggacgggctctcaagagaaaactgagggaagagagccaggacagctggggtgcagaaaaggaaagtagcaagagtctggctgagaccgaccccagagcaacgtggagccccgaagaaagggtagtgggagtcctctctgctcccctcacctctgtggcaatctgctgcctgycaaactgttgggaagaccccctgcactcacagccctggacaacactgtccgtggcgatttggaaacttcatgaggacagaggaccaggtagcgagttcgcgcagaggttcccccatcccactcagacccaaactgagatggtgagtaccatactggttatgtacctatcattggccactgtcctgcctgggaaatctctgcccccaagacgatgcaccagcagatccccagcaaacataccttataatcccctcagactttcacaagcacagcaatcaa

SEQ ID NO: 558924 - DNA, 496 bp, Homo sapiens
cagaactgaagaaaaaaggggacgtggatcacagttactgtgaatggacgggctctcaagagaaaactgagggaagagagccaggacagctggggtgcagaaaaggaaagtagcaagagtctggctgagaccgaccccagagcaacgtggagccccgaagaaagggtagtgggagtcctctctgctcccctcacctctgtggcaatctgctgcctgccaaactgttgggaagaccccctgcactcacagcyctggacaacactgtccgtggcgatttggaaacttcatgaggacagaggaccaggtagcgagttcgcgcagaggttcccccatcccactcagacccaaactgagatggtgagtaccatactggttatgtacctatcattggccactgtcctgcctgggaaatctctgcccccaagacgatgcaccagcagatccccagcaaacataccttataatcccctcagactttcacaagcacagcaatcaa

SEQ ID NO: 558925 - DNA, 496 bp, Homo sapiens
cagaactgaagaaaaaaggggacgtggatcacagttactgtgaatggacgggctctcaagagaaaactgagggaagagagccaggacagctggggtgcagaaaaggaaagtagcaagagtctggctgagaccgaccccagagcaacgtggagccccgaagaaagggtagtgggagtcctctctgctcccctcacctctgtggcaatctgctgcctgccaaactgttgggaagaccccctgcactcacagccctggacaacactgtccgtggcgatttggaaacttcatgaggacagaggaccaggtagcgagttcgcgcagaggttcccccatcccactcagacccaaactgagatggtgagtaccatactggttaygtacctatcattggccactgtcctgcctgggaaatctctgcccccaagacgatgcaccagcagatccccagcaaacataccttataatcccctcagactttcacaagcacagcaatcaa

SEQ ID NO: 558926 - DNA, 236 bp, Homo sapiens
ccccatcccactcagacccaaactgagatggtgagtaccatactggttatgtacctatcattggccactgtcctgcctgggaaatctctgcccccaagacratgcaccagcagatccccagcaaacataccttataatcccctcagactttcacaagcacagcaatcaagtccctggggagctgtggggtccctagagatctaacccttggtgtaggctgccccaagggaggaggg

SEQ ID NO: 558927 - DNA, 236 bp, Homo sapiens
ccccatcccactcagacccaaactgagatggtgagtaccatactggttatgtacctatcattggccactgtcctgcctgggaaatctctgcccccaagacgatgcaccagcagatccccagcaaacataccttataatmccctcagactttcacaagcacagcaatcaagtccctggggagctgtggggtccctagagatctaacccttggtgtaggctgccccaagggaggaggg

SEQ ID NO: 558928 - DNA, 485 bp, Homo sapiens
aatgcctacaccaaaaagaaagaaagttctcaaattaacaacctaatgctgcacctaaaggaactagaaaaacaaaaactaaccaaatgcaaagttagcaaaagcaaagaaacaacaaagattaaatggaattgtgaccccaaaaaacamacaaaggatcaacaaaacaaaaagttggttatttgaaaggataaacaaaactgacatatcaatatctagattaaccaagaaaaagagagaagattcaaataagcacaatcagaattgataaaggtgtcatcacacccgacaccacaaaaatacaaaagatccataaagactactatgaacatttctatgtgtacaaaatagaaaccaagaggaaatggataaattcctggaaacatatgacttcccaagattaaaacagtaagaaattgaaatcctgaacagactaataacaagttatagaaatgaatcggtaataaaaaatctaccaactaaaa

SEQ ID NO: 558929 - DNA, 609 bp, Homo sapiens
aaacagaattcaataaaatccaacatcactttatgataaaaaaaaaaaaaaaccgctcgacaaaccaggccttgaaggaagtacctcaaaataatcaaagccatatatgacaagcccacacctaacattatactgaatggggaaaagttgaaagacttcctcctaaaacctggaacgagacaaggatgtctactctaaccatttctattcagcatagtaccggaagtcctagccagaataattaagcaagagaaagaaagaaaaagcatctaaataggaaaagaggaaatcaaattatttctatttactgatgacatgattctataactagaaagccttaatgattcttttaaaagactcctagacctgataaagracttcagcagttttcaggatacaaaattaatgcacaaaaatcaattgcatttcatacaccaatagtgctcaagctgagaaccaaatgaaaaactcaatcccatttataatagccacacacaaaaaaataaaatacccaggaatacatctaaccaagaggtaaaagaccgttaccagaaccataaaacaatgatgaaagaaatcataagtgatacaaacaagtgcaaaaacatc

SEQ ID NO: 558930 - DNA, 533 bp, Homo sapiens
ttccacagattagaaaaatataacaattcataaagaccactattacaaagaggatttttataataatttctctaaatcaatctgataatgttaagttcaactctggtggaaagaaagcaaatagaaatatttgttcagctatgtccatttttccccctttattcctacttaacagcaaagaatactcccacagggatctgacctaaaaccgaacatggaaatgaaggtaaaggtgtgtatttgtgtgttgggtggtgggtaatgacaattccaatttctagttttcttatgcagaaaccaactcgttatcaagtggtaayagagactaactatcactctgccagcaacctcctattctatttccactacccaataaatgtggtgttttccagggaactgtaaacactttaaaaaataattaacctgaatgtttcccacatttataaatggtggagagcatttaaatggaaattaaattcagtataagaatctacaccatggaatactatgcagccataaaaaatgatgagttc

SEQ ID NO: 558931 - DNA, 533 bp, Homo sapiens
ttccacagattagaaaaatataacaattcataaagaccactattacaaagaggatttttataataatttctctaaatcaatctgataatgttaagttcaactctggtggaaagaaagcaaatagaaatatttgttcagctatgtccatttttccccctttattcctacttaacagcaaagaatactcccacagggatctgacctaaaaccgaacatggaaatgaaggtaaaggtgtgtatttgtgtgttgggtggtgggtaatgacaattccaatttctagttttcttatgcagaaaccaactcgttatcaagtggtaatagagactaactatcactctgccagcaacctcctattctatttccactacccaataaatgtggtgttttccagggaactgtaaacactttaaaaaataattaacctgaatgtttcccacatttataaatggtggagagcatttaaatggaaaktaaattcagtataagaatctacaccatggaatactatgcagccataaaaaatgatgagttc

SEQ ID NO: 558932 - DNA, 549 bp, Homo sapiens
ccagcagtaagtcaggccaggggtcaggaatcttttcctttaaaggcacaagattataaatactttaggctttgaggaacatgtagtctctgttgcaactactcaaygctgccattacagcaaccagagacaacgtgaaaaagggcatgactgtttcaattaagctttatgtatgaacactgatatttaaattgtatgcaattttcatatgtcatgaaatagtgttctttttgtttttttcaaccatttcaaaatataagaaccattcttatcttgctgttcctacaaagaggtagcaggccacatgtgccccatagaccattgtttgcctacactggattggagtcagccattcagaactgatcatatggagtctcatttttttgtgtatggtacctctgcatgcttgaaagttaacatttatgagttggttgcagaagaaatatcaataatctgatttgtgaaatgcatattttactcaaaaataccaataatagaaaatagtaacaatacccattacttctacagattttactatgctctaggcac

SEQ ID NO: 558933 - DNA, 612 bp, Homo sapiens
attattttatgcagacataacaaacttctaaaacagtcttgttaggaaaacatggacagtgggtcaggattcaaacacacttgtgatattatgaatgtctatccttataggctgcctgagagaagactccagtcactgtgatacaaaggagacagtacacgaggcttccaaaatgtcatagactggtatcatagaacctttgcacaaaaagggatttagccaagtagtccagcccttttctatacaacctctcaaagggcatcttggagctgcttaaacactttcagacagaaraggaacgcactccttctagtgataacctttgtcattgccatattgagaggaataagactaagacaagatcttagatctgtttctgtctcttactctgctctctgaagatattcaggatagcttaaagtgtaagcatctgtatttgtatgaatatatactgagtatcacattgtgttcctagaattatttaagatgtgctaggtaatacaaagtaagtctaatgaactttttaatatgacttactacttatcttgatggcagcatccaaacaccataacttatttcagaatgcctaaaatagatataatgccctgtgca

SEQ ID NO: 558934 - DNA, 418 bp, Homo sapiens
aaacactttcagacagaaaaggaacgcactccttctagtgataacctttgtcattgccatattgagaggaataagactaagacaagatcttwgatctgtttctgtctcttactctgctctctgaagatattcaggatagcttaaagtgtaagcatctgtatttgtatgaatatatactgagtatcacattgtgttcctagaattatttaagatgtgctaggtaatacaaagtaagtctaatgaactttttaatatgacttactacttatcttgatggcagcatccaaacaccataacttatttcagaatgcctaaaatagatataatgccctgtgcacggtgacctgtcaatattactcactaatcctgtagtttgccctcattataggatcaaaagtgttaagaggaaaaagaaaag

SEQ ID NO: 558935 - DNA, 475 bp, Homo sapiens
ggtctatttacaggcagaaataacaaatgaaattatggcaagatcatggagccatagatctctctgttgccactaggtagccatatgaccttaagttagtgactctgaacaattttctgcacttgacctttataggttaagtatctttcgtgagagtaatttaaccaaaagctagacacaaaatgtgacagacctgacaaatctgaaaaaaaaaagaagaagaaaaattgaggtaggaggatggtgagcagctagacacaaagagggataagaaagctctataaatccatctcctgttttcacctggttgtgggccaaatcttagaaattcttgggtgtcaaaaaacagtatgtgttttatccatgaaactcctattgtcctttgtgcctccaaaaatcctgtatttccacacagatttgtctaatggcccttycccctccttctcaatgacagactctctaaggcagctgtgtc

SEQ ID NO: 558936 - DNA, 516 bp, Homo sapiens
taacatattctggaatgttttcttattagctctaattsgtgaaatttcagtcaatgtggaggagatattttgaaataggaaggcatcctctctcatcctggaaggaaaaaaaccaaataccacaggttttctcttcatctattcccactacaattatccaggcctatccctaacgggaactaatgagcctttctttcccctctcaccaacttcctaaatcaagaccaatgagcattcgtaattacaactgtgtctctcaatgaaaggggatggggtagaataactgggatatctagacttacaccaagctacagtgagattttcatgtctcagttcccagtatttgcagcggtcaattattacatgagtaggtcccaaaatttatggaggatcaggatcacctgaagggcttattgaacaacagattcctgggttctaccagtagagtttctaacagcagtatgcttgggtggggttaaaattttgcatgactatcaagctcccttgttgatgctc

SEQ ID NO: 558937 - DNA, 516 bp, Homo sapiens
taacatattctggaatgttttcttattagctctaattcgtgaaatttcagtcaatgtggaggagatattttgaaataggaaggcatcctctctcatcctggaaggaaaaaaaccaaataccacaggttttctcttcatctattcccactacaattatccaggcctatccctaacgggaactaatgagcctttctttcccctctcaccaacttcctaaatcaagaccaatgagcattcstaattacaactgtgtctctcaatgaaaggggatggggtagaataactgggatatctagacttacaccaagctacagtgagattttcatgtctcagttcccagtatttgcagcggtcaattattacatgagtaggtcccaaaatttatggaggatcaggatcacctgaagggcttattgaacaacagattcctgggttctaccagtagagtttctaacagcagtatgcttgggtggggttaaaattttgcatgactatcaagctcccttgttgatgctc

SEQ ID NO: 558938 - DNA, 652 bp, Homo sapiens
gaattccatcatggccactaaagtatctttgaactctgcacacttagttgtttcaatgtctcttcaatgttatgtggtctccacaaagaactggaatacaccaattatatttgatctcaaagaaggaactgttagttttatcctgcaggcagaaagacattttcttcttgtagatgttagtagtatcgatttatattcatatgaagggccctttatttcatctccaaaatttcctgcagtgagaacayatattctgaatgcacagactgtgtctctgagtaatgataccatagcaatgagacaaagctgatgaaaaaataatctttttcttcaaggtatcaactggaaaactattagatgatggaaagcttcttcctcgtaaggatgcaatcttgaaaattgctctggatcaaaaaggacttaccaatgatagaaaagtcactttcattgataaaaatagagatatctatatcacttctgtgaaacgatttgggaaggaagaaaaaattctcaaacttggaacaatggtgcatactttggcctggagtgatacatgcaatgtcctttgcaggcttcaagatactcaatttacagtgtggtattattccaatatggtttatgtggacagtgacactttgcctaaaacattacg

SEQ ID NO: 558939 - DNA, 666 bp, Homo sapiens
gaaatactgctcaggcacaaaaaggaatgaagttactgttatgtgctacaacatagagaaaccttgaaaacattataatatgtaaaagaaatcagatgcaaaaggctacatcttacattattccatttatatgaaaggttcagaaaaggcaactccacagggacagaaggtagattagtggttgccagaggctgggggcaggggraaaagagagtgacgacaataaacatggggtttctttttggggtgacaaaagttccaaaattagattatggtgatggttgtacatctctaaatatgctaaaaattattgaattttatttacactttaaaagggtggattttatattacgtaaatttattttgataaagttgtaataggaaaaacttattctgaaattaaagcctaagctgtgagtgatacaaggcccaaagggaaatggtctttaataatgccacctgtcaatagagccatctatcaaaccaggacccaagagtatgtaaatgaagtcatatgatggcacagaatagatgaaaagagtaggacaccccactgagggacaaaacatcatcccaaaatagggtatcccaagttctggttgtctacacattaactaatacaagattgcatagaaattgtggcaagagtagaaacctgtttccctt

SEQ ID NO: 558940 - DNA, 666 bp, Homo sapiens
gaaatactgctcaggcacaaaaaggaatgaagttactgttatgtgctacaacatagagaaaccttgaaaacattataatatgtaaaagaaatcagatgcaaaaggctacatcttacattattccatttatatgaaaggttcagaaaaggcaactccacagggacagaaggtagattagtggttgccagaggctgggggcaggggaaaaagagagtgacgacaataaacatggggtttctttttggggtgacaaaagttccaaaattagattatggtgatggttgtacatctctaaatatgctaaaaattattgaattttatttacactttaaaagggtggattttatattacgtaaatttattttgataaagttgtaataggaaaaacttattctgaaattaaagcctaagctgtgagtgatacaaggcccaaagggaaatggwctttaataatgccacctgtcaatagagccatctatcaaaccaggacccaagagtatgtaaatgaagtcatatgatggcacagaatagatgaaaagagtaggacaccccactgagggacaaaacatcatcccaaaatagggtatcccaagttctggttgtctacacattaactaatacaagattgcatagaaattgtggcaagagtagaaacctgtttccctt

SEQ ID NO: 558941 - DNA, 560 bp, Homo sapiens
caggcaaacttaacacccatatcctccaattcatttctcccttttgcccagggaatatttatctgggagacagaattttatgaaccacttttacacattttaattttattccagacrctgacctgtgggacaaagaaaatgagcttttcatctagtctcatatgaatacagatgtctagtactcataataggcaatgagttatccttgctattttattatttttggtgcataaatctctgaattatctaccagtagttgacttttgtaggagaatatcattcacctaaaaaccagcattcaaagcaacaacagtccttatttttaatgtggttttaccaaaacggtattatgtaagcatacgcattgtttctagaaaatttggaaacggtaacaatggaagagtaagattgcatttcttcctaagataagctctgatttggaaaacataattatatctaagcattagtgattgcccctatttgtaatcatcaattttaaatttccaataaatgcaattcctcaaatagggtatctaataaatagggatcatgatacgtac

SEQ ID NO: 558942 - DNA, 642 bp, Homo sapiens
ctgtcagtttggctgcataagtgccattttatggcattgtcttactttcttgctgattactaataataatgaataggtaataattagtattttaattgtaatgtcattaattatccagttatttatttttctgtgtcttctcttctacttataaccacgatgtcattcactgtatacattcagtaggtgctaataaatattttcaaaaaacaattgaatgataatatgagtatcagctacaatgcctctcacaacagtcagctcaagaaataattgtgaattcacttgaacyggatcataatagtatcaaggaaggaaaccacgtgtttgtatcatgtgccttctccctgcagccctaatcttgagttcatcacactactagcactcaataaatgttgattgacttatttggttccctatgttgaaattgccccgaggcaacacagttaaaaagccagagagtacaggcagaggcacattttttgtgtttcatgaaaacatcaataactgaagctattaatgctaagtccagtttcaccaagctgtctgtgcccagagtctttcaagaattcaaacccaaaaataatcacaatcaattcccaaaatgcattctggatggtttagttaagaaatgtttaggaa

SEQ ID NO: 558943 - DNA, 644 bp, Homo sapiens
gagaaatacccttgacgcagtcccaaagtttgtattacaggccaggtgttctaacttctagaagaaagaagcataaacgtgcacaagtagctaagagcatgttattgtgcaaagaataccagaggaggattcagaaatcctgggcctgtcacctgatctcatcatatgctacatttacaacctacattaatgaccggtaaytatcttcagggaatagagacttgaggacttcagccatagtctactccattaacgttttatgaggattcaatatatatgataggtgactttttaaaatatcccatttgcattttgtttctagaaaatgcaaagggcatgttgatcagctcgagaatttcctatccatttctctcagatagtaaaatgctttcttaaacattaagtaaattatcattttatgtatgtgtataggaacaccagtatgtgtgccttaactgtaatcactaaagaacagaaatgtaaatctaaaaccacgggctttccacaagacactgtcagcatcagaaaaggcattaaaagggcaggggaagcttaacctacatctctgggaaataagaagattatattcaagctgtcatttcttgttgccatgattatatgcggtcaacaatttcttttatcac

SEQ ID NO: 558944 - DNA, 548 bp, Homo sapiens
gggtaaaaagtttgagctagactggaggaataaatgttagtgatctactgcacggtatggtgaccacagtcaataataacattgtatatctcaaaattactgaaagaatagatttgtcatgttctcactaaaaaaaaaatatgtaaggtgatggatatgttaattagcttstttgaatctttctacaatgtatatgtaactcaaaacattacattataccgcataaatatacacaattgttattgtcgattaaaaatgttactgtcaaataaaaatgtcaattaaaaaaacaagagaatcactttatagataattctagtgtattagaagcaaaaaatactagacaaaaggttattgttatgcactgcatttttatggaacattttgcaaataagttgccttctactattaccagtattgctatgcttgaaggaagatttaccaaaaacaaacaaaaaaaaagccccaagttgtcagataaaatgtggaaggataggaatttatttgtaggcaaaattatgcactaaatggtttctacaggaaaatcc

SEQ ID NO: 558945 - DNA, 503 bp, Homo sapiens
gaggaataaatgttagtgatctactgcacggtatggtgaccacagtcaataataacattgtatatctcaaaattactgaaagaatagatttgtcatgttctcactaaaaaaaaaatatgtaaggtgatggatatgttaattagcttctttgaatctttctacaatgtatatgtaactcaaaacattacattataccgcataaatatacacaattgttattgtcgattaaaaatgttactgtcaaataaaaatgtcaattaaaaaaacaagagaatcactttatagataattctagtgtattagaagcaaaaaatactagacaaaaggttattgttatgcactgcatttttatggaacattttgcaaataagttgccttctactattaccagtattgctatgcttgaaggaagatttaccaaaaacaaacaaamaaaaagccccaagttgtcagataaaatgtggaaggataggaatttatttgtaggcaaaattatgcactaa

SEQ ID NO: 558946 - DNA, 552 bp, Homo sapiens
tttttatagaaaaaaatcatgttgtcaccgaggtcaggaaaggctttttctgaggacaggctgactgagagattcagtgaagaggagttagctaygcaaagggaggtagaaaggctactctgagcagaggggtatcagagacaatgggccagctgtagagaaacctattcatattttagaaactgaaacctagtgtgactggaattcaaagagcaaaactaaagagttattgagaagggtcaggcctttttattaatggttttgatctttatgagcaatggaaagttattaaagaagtctgagtagtaggatcacctgatcataattacattttgaaatagcccactctggctatggtatggagaacatcttcttgtggagcaagaatggatgtagaaatgccaattaagacagcatggtaaaagtccaagtcagggtaaggcagtagtgatgaagaggagagattcaggagatattatattttattaaacattataattttgatctaatttaaagaattactctcaggaaatgcatacgtgtgagctcata

SEQ ID NO: 558947 - DNA, 552 bp, Homo sapiens
tttttatagaaaaaaatcatgttgtcaccgaggtcaggaaaggctttttctgaggacaggctgactgagagattcagtgaagaggagttagctatgcaaagggaggtagaaaggctactctgagcagaggggtatcagagacaatgggccagctgtagagaaacctattcatattttagaaactgaaacctagtgtgactggaattcaaagagcaaaactaaagagttattgagaagggtcaggcctttttattaatggttttgatctttatgagcaatggaaagttattaaagaagtctgagtagtaggatcacctgatcataattayattttgaaatagcccactctggctatggtatggagaacatcttcttgtggagcaagaatggatgtagaaatgccaattaagacagcatggtaaaagtccaagtcagggtaaggcagtagtgatgaagaggagagattcaggagatattatattttattaaacattataattttgatctaatttaaagaattactctcaggaaatgcatacgtgtgagctcata

SEQ ID NO: 558948 - DNA, 527 bp, Homo sapiens
agatcttcatcactgtcatcaggtgactgccaattgttcttcttgatttttggctctggagtagacaactttatagccatgctctcatatgtctgggaggatggtatccctttctcttttctttctctgatgtcatgagttagaatatctgttgagattccaatgcctgttcctttgagtttatatgacttttttaagacagaatccctttgttgaggggtttcaaagtacacaagtatgggtcgaggctttgcatttgggcagtctctctggtgtcctatcctctgagcaaattcaattttaatagcatttggtgcatctgaaaaacccattttatctattagaatttggtacaccacrctttcaacatattcaaatctttcttcagtcacatttaaaaatctcaggcttgccttgctacccatatgacctaagtgcttaatataatcatggatgtctctagtttccctccgagactggacaaaccctgtgcgcaactgctcaatttcactttgtacaacctccac

SEQ ID NO: 558949 - DNA, 537 bp, Homo sapiens
ttatttttaaactaattttagtcgaataaaattttctacccatcactcaatccaaaatctttggtcttccaaacttagaaacagatggttctttttgtttaaatcaaagtagcaattctgttaatgcctctgatgttttcaaatctaaatttcctgactggcattactggttcaaagctactgttctaggcaacaattgttagaaaaagtttgagcgggaaagwtcaatgcgaaatgaagcccaccaaatgcaaactcaggaacaggtgtccacagttgcacacacgaactcacttgctcgtattccaaccacagagaacaacctgttattcactaagggctccacactctttcatgccccagtaacttttatgtcctctctagccagaatatcattcattatccagccctcactatctgtaaaaattatgtttaaactccaaaaccatttcagcaaccacccaaactgagctcatctctctcctagccactctttatcgaagaattggccacatttcagccacttagtatctccac

SEQ ID NO: 558950 - DNA, 570 bp, Homo sapiens
ctggcccttattctgatctgtattcctgtctttggtatagaaatatgcttattacctggcttttcttgttatttttggttctgggttacatgggctggatgtgcaggtttgttacatagataaatgtgtgccatgctggtttgctacacctgtcaacccattacataggtattaagcctagcacacatttcgctacttttcctaatgctctacctccccacaacccaccctgcaacaggttccagtgtgtgctgttcccctccctgagtccacgtgtcctcattgtatagctcccacttatgagtgagaagatgcagtgtttggttttctgttcctgcatcagtttgctaaggataatggcttccaccttcatccatgtccctgcaaagaacatgacrtcattcctttttatggcttcatagtattccatagtgtatatgtaccacattttctttatccaatctatttttgatgggcatttgggttgattccatgtctttgctattgaatcacttgactttttgactttctctttactgttatttgcttaatcctagactaatagaataa

SEQ ID NO: 558951 - DNA, 496 bp, Homo sapiens
atgaatttataggtttaaataatctaagaatctatcatctaaatttcacctttagaagctgtcaaaaaaagagcaaattaaatacatagcaagtggaatgaagaaaataacaaaaataagagaagaagtcaatgacaaaaacccagaagttaacaaataggtaataaaaattgatgaagaaaataagaaatacaaattaccaatatcagaactgaaagacagaatataagtacaaatcatacagatattaaaccgacaatgagaatattgtacaaactttatgtcaataaattcagtaatggataaaatatatcaattccttcaaraccacatattataaaaactaaggaagaatttttctctatgtatatatatcttatgtatattttatatgtatgagagaatagatttatatatatagatatcttacatatacatatgtaatcaaatatcttccataaagaaagctccaggcggaatttttaaactagaggat

SEQ ID NO: 558952 - DNA, 603 bp, Homo sapiens
tccacagagattgtttaatttatacaagcaaaagaaataatggatgattagaaggttgaggacagccttcccagtaagattcaccaagtctgatctaggtgctgctgctgccaaatacccaatctgccagcagctgagacaaaggttgagcacctgatacaacagctttcaagaagatggaccagccacttggtaaagattgatcacattggactttttctgctctagaaagaacaatgttttattttaattagaatcgacatgatttttgatatgtttacctttcccacccacataattttagaccaagcggtctacttcatcttagtggagatgcagcattggacycatggaagtacacaccatttacaatttaaccttatagactcctctactattcctatcacaacaaagcccagagaattccaatctgcatatacatatatatacccttctatggcatatattgaagtaccaggttataaatgataccctaatagaaagaagtctcataattcagaaagaagtatataccctaaattcatgactatcccatggtactgtgcccccagtagataaaatacatgagtctgggaaccaagg

SEQ ID NO: 558953 - DNA, 603 bp, Homo sapiens
tccacagagattgtttaatttatacaagcaaaagaaataatggatgattagaaggttgaggacagccttcccagtaagattcaccaagtctgatctaggtgctgctgctgccaaatacccaatctgccagcagctgagacaaaggttgagcacctgatacaacagctttcaagaagatggaccagccacttggtaaagattgatcacattggactttttctgctctagaaagaacaatgttttattttaattagaatcgacatgatttttgatatgtttacctttcccacccacataattttagaccaagcggtctacttcatcttagtggagatgcagcattggactcatggaagtacacaccatttacaatttaaccttatagactcctctactattcctatcacaacaaagcccagagaattccaatctgcatatacatatatatacccttctatggcatatattgaagtaccaggttataaatgataccctaatagaaagaagtctcataattcagaaagmagtatataccctaaattcatgactatcccatggtactgtgcccccagtagataaaatacatgagtctgggaaccaagg

SEQ ID NO: 558954 - DNA, 590 bp, Homo sapiens
ataatttgactgcagtgatctttgttgtgatcatttcttatttatcctgcttgggtgctgttagacttttgaattcgtaacttgatgccatttattacttttggaacatttttggttattttgatttttaaatattgatttggtttttaaatattgatttcctgttgtctttgctctccattttggcactccaattgcacatatatttgaatttctcrctgtagctcatatactgatattttctttttctttaattagtattctttctttcagagcttcctttagatgtattgaactatctctaattatatttatagtatcttctctatgtcccttctcttgtgaaacccatccaataaggacttaatagtatatattgtattttgcagctctagaatatcaacctgtttcacgtatttcaactctttagtgaaactctccatgtattcctacatttagtgcatgtatacttctgccctttgatatattaataatagcaattttacagtctgtagatacagactaaatccattattggattgttagtctgcttattttgtttcttttgattatcagccacattttcttgc

SEQ ID NO: 558955 - DNA, 590 bp, Homo sapiens
ataatttgactgcagtgatctttgttgtgatcatttcttatttatcctgcttgggtgctgttagacttttgaattcgtaacttgatgccatttattacttttggaacatttttggttattttgatttttaaatattgatttggtttttaaatattgatttcctgttgtctttgctctccattttggcactccaattgcacatatatttgaatttctcgctgtagctcatatactgatattttctttttctttaattagtattctttctttcagagcttcctttagatgtattgaactatctctaattatatttatagtatcttctctatgtcccttctcttgtgaaacccatccaataaggacttaatagtatatattgtattttgcagctctagaatatcaacctgtttcacgtatttcaactctttagtgaaactctccatgtattcctacatttagtgcatgtatacttctgccctttgatatattaataatagcaattttamagtctgtagatacagactaaatccattattggattgttagtctgcttattttgtttcttttgattatcagccacattttcttgc

SEQ ID NO: 558956 - DNA, 623 bp, Homo sapiens
aattcactgaatcatgctatggtttggctattggacccctcaaaatctcatggtgaaacgtaatcyccagtgttggaggtggggccttgtgggaggtgttagtatcacagggcgggggtcatccctcatgaatgcaccatccccttggtgataagtgagttcttgctctgagttcatgtgagctggttgtttaagagtatgtggcacctctttcctctttctatctttttcctgctctcaccatgtgtcatgctggctccccatcaccttctactgtgattgtaaacttcccaaagccctcaccagaagctgagcaagtgttggtgccatgcttcttgtacagctttcagaattgtaagccaattaaacctctttctttaaaataattttccagtttaagtattcttttatactaaaaatagcctgagacaaagccatacaataaatcttatgaaatggaactactattatgcttattttctacattagcatactaaaacacagagatgttaagtattttgttccaaaatcacacaactgacacatataaagcttacatttgaacccaaccagtctggtttcagagtgcttctcttgatcactacagtagtgaatgatattca

SEQ ID NO: 558957 - DNA, 576 bp, Homo sapiens
gatatgaattattataatcataatttgctacttaagaactttttgataaaggatttcagtcattcaacattgtttctacttcattttttgtgtaatatatgtagaaatattatcataagggttagacaggggctaatggagacattrtaaaaggtaactgtagattacagggccaaggtaagccagatctcaaaaagtagaaagattgaggaataaagacagaacagaacagacaacctaagttaaaagttatattgtttctttaatagaacataataatctcagtactttcactgtaattggctcctatcttctagaagccactggtccacaatatgatttagagatgctactaaaaagtgggagacactttcttatacaccactggaagcagccttaataaaatttagcagagaaaaaaaaaactacgatcttgaagattgtggttaaaaagaatgttgaacccactgtgcttccagattcttttcaggatgttttaaaacaaatttcataaagttgaaatgcagaagcatgttaaaaaaccacaagcaacaaaaaaagagtagacatctacac

SEQ ID NO: 558958 - DNA, 576 bp, Homo sapiens
gatatgaattattataatcataatttgctacttaagaactttttgataaaggatttcagtcattcaacattgtttctacttcattttttgtgtaatatatgtagaaatattatcataagggttagacaggggctaatggagacattataaaaggtaactgtagattacagggccaaggtaagccagatctcaaaaagtagaaagattgaggaataaagacagaacagaacagacaacctaagttaaaagttatattgtttctttartagaacataataatctcagtactttcactgtaattggctcctatcttctagaagccactggtccacaatatgatttagagatgctactaaaaagtgggagacactttcttatacaccactggaagcagccttaataaaatttagcagagaaaaaaaaaactacgatcttgaagattgtggttaaaaagaatgttgaacccactgtgcttccagattcttttcaggatgttttaaaacaaatttcataaagttgaaatgcagaagcatgttaaaaaaccacaagcaacaaaaaaagagtagacatctacac

SEQ ID NO: 558959 - DNA, 576 bp, Homo sapiens
gatatgaattattataatcataatttgctacttaagaactttttgataaaggatttcagtcattcaacattgtttctacttcattttttgtgtaatatatgtagaaatattatcataagggttagacaggggctaatggagacattataaaaggtaactgtagattacagggccaaggtaagccagatctcaaaaagtagaaagattgaggaataaagacagaacagaacagacaacctaagttaaaagttatattgtttctttaatagaacataataatctcagtactttcactgtaattggctcctatcttctagaagccactggtccacaatrtgatttagagatgctactaaaaagtgggagacactttcttatacaccactggaagcagccttaataaaatttagcagagaaaaaaaaaactacgatcttgaagattgtggttaaaaagaatgttgaacccactgtgcttccagattcttttcaggatgttttaaaacaaatttcataaagttgaaatgcagaagcatgttaaaaaaccacaagcaacaaaaaaagagtagacatctacac

SEQ ID NO: 558960 - DNA, 624 bp, Homo sapiens
tctgcaaataaagacagctctgtttcttcctttccaatctttgtgccatttttcttgcctaattgcctatacttgttttaaaaagctgtaaaattggactgaaaatttacagaaaatgaatagttcagaaataactaaacacaatttggttacaaatatatataattttgtacataataataaaaatgttaaaaatttggagaaataatatttttaagatatgattgggtaataaataattgaataagtaatattttttcatgtctcctatcatacatkcaaataaattaatacaggctaaatatacgaatgtttgctctaagaagactggaagcaaatattctcataatttttctgttgggaatagttttgtaagcattatctaaaggcagaaatcaagagaatatggatagatttagtaaaataaaaatctgttcaagatcaataatgctataataacattcaaaatgtgataaactggaaagatgactttgatacataagccaaaaatacccttaatacataaataactcctacaaaccttaataaagataatttatcacagaagataaatgtaatgagaacaatagacgaacaatcacaaaataacaaatgcaaatggca

SEQ ID NO: 558961 - DNA, 624 bp, Homo sapiens
tctgcaaataaagacagctctgtttcttcctttccaatctttgtgccatttttcttgcctaattgcctatacttgttttaaaaagctgtaaaattggactgaaaatttacagaaaatgaatagttcagaaataactaaacacaatttggttacaaatatatataattttgtacataataataaaaatgttaaaaatttggagaaataatatttttaagatatgattgggtaataaataattgaataagtaatattttttcatgtctcctatcatacattcaaataaattaatacaggctaaatatacgaatgtttgctctaagaagactggaagcaaatattctcataatttttctgttgggaatagttttgtaagcattatctaaaggcagaaatcaagagaatatggatagatttagtaaaataaaaatctgttcaagatcaataatgctataataacattcaaaatrtgataaactggaaagatgactttgatacataagccaaaaatacccttaatacataaataactcctacaaaccttaataaagataatttatcacagaagataaatgtaatgagaacaatagacgaacaatcacaaaataacaaatgcaaatggca

SEQ ID NO: 558962 - DNA, 510 bp, Homo sapiens
gaattcacctgttaaaaataatacaaattttaaaaatgagatgcattttgacctttcagattggcaagaaagggagaaaaagagagggagggagggagaaaaaaaggaaaacagaaaaagagagagggaagcagagagaattataaaatgaaccaaaatttttaaaaataaaatgtatgttgaggacaatttactaaatcagtaattataytttaaataattcagagcaataattttgaaaacacattacatacaataataaaaatgaagtaacctaaaacctgatgtcaaaatgctgattaaataaattatgttatattattctatttgaatgttttactatagtatataaagatgataacttatttgttgatgtaagaactacaatacctaagttctgaagtaacacagggctggaatcagaacctagctctgtcatttactcactgtgtggccttagacttcatctttatccctcaatttcctcatctgtaaattgcagcaatggga

SEQ ID NO: 558963 - DNA, 502 bp, Homo sapiens
gtgagaacccgggaggtggagcttgcaatgagcagagattgggccactgtactccagcctgggcgacaagagtgagactccatttcaaaaaaaaaattwaaaaaaagagtaaatgacactgcaccatgcatggaaaggaaagaagtttggcagcatctgccaggtattcattcaaacatcaaagtttttagaaagggaagaatctctgatgaggtctacttatttgctcaaataggcaacaaaacaaatttctgttctaaaagttgctccttctcacaactcaattcagttctagaaagaactcaccattctatcctgaggcttctctcttccttgtctctttgtcgttctggagatgagttccttgagatatgattttcttgttttcaagaggtaaacaattatggctaaagatatatgccaagtagagggctggagtaggcaattactatttttccaagcttgaatctgtacattttcttaggcagaagaccattaggag

SEQ ID NO: 558964 - DNA, 331 bp, Homo sapiens
tagtgttaattctaatttgtaacctatggctggcttgtactcaattggtgagaggggaactcagcagttttgccctgatcccagagaaacagctcaagttcacatacagtccttttctctctccttaaaagttacttatacaaccaggttggccacacccacccacacacagagtaatgagaacttctttcctctgatgtctagttctaactgctgagtctgaattgccatccycagctcttttttttctttatgataagacttctcacaggaaacctaggtgcctttcaaaaattatgttgcccatcaatttcactgctactgacacagt

SEQ ID NO: 558965 - DNA, 597 bp, Homo sapiens
tcttttttttctttatgataagacttctcacaggaaacctaggtgcctttcaaaaattatgttgcccatcaatttcactgctactgacacagtctttcatcaaatatgtctagttttgaaccacagttgcaggcaccgtccagcttctctaytctcagactctgtgtaaaccaatgaaagcaaacatacacattgcaaagagattttgcagatgtcacactggacaaatctgagtctcagctctagcctggaaaggataccctgttacatgtaatccgtgttttccttgacacttgcactacagctttgtgcctcccacacttgatacaaataaatgcaacttattgttaaacgtggggaaccttctaaattataagattctgtagctgtcactctgtgactctggaataactgtttcaagtattgtttcctgaagaggtctttatatgtgaagattatagggcagatgatgtcatcttgtataaaaagatttatacagatgattctcagcagtgatggcttctacaaatcccctggtttggcctttcctacctggcaccttagagtctaagcctcaagataatgagtaggcgttac

SEQ ID NO: 558966 - DNA, 591 bp, Homo sapiens
cctgctatgcctgagtgcacctgcttctggagactaatgtctttctaaaaattaagactttggcagatgattctgctctagttaatgaaaatcatacaatcttgtgaatttaaatccrtcagtttcttccccgtcattttcaccatcaccctgtagttattgtttgaccagaataactgagtcatttttcacaagatgtaggtatttcaaattacagaaatatgttattcaaaggttaatatatttagtatctttggtcaggcattcaaactttcaacttacatttcccaacatattttccacttctttcctccacatgatcggacatactactgtccactttcttgcctatgatgcaactcatgttttgtactgctttctggtctgcattttattttccatatccatgtgtcaaaattgaatccaaacatttaagcccaatttaattccaccttctccataaagtctgcactgagaactccaaatcagaaatgcagcttctcttaaatgtacagaacacttttattcacccatctggaaagtacattactctttatcccatattgtaacagaataattaggtactactga

SEQ ID NO: 558967 - DNA, 585 bp, Homo sapiens
atatctatttttccattatttaaaatacaaataagtggaagtaaatataagaaatgatattctattttctctaaattgtggaaaatatataatttgaagaatatttaattgtgaatatacatgattatactctattgtyaaaaatggcctcagtcactcgctcctcttataaagaaaacagagcctcatttccacattccttgaatctcagtgggacttatgacgtgttttcacaatagaatgtggcaaaagtgataggtgtcagttccagttttggattcaaatggccttgcatgcttccacttattctttagaatcctgtcaccatcatataatcaagtttggtttggccagctggatgatgaataacagcccaaatgcccccgctccagaatagccaaagagcctccagaaatgtgagcaatggcctctgttgggctgaccacacatgcatgagtgaatgtagacaagacccaaggaatcattgtttaagccactgagttttggagtggtttgttacatggcaatgtctaactgatacaggtactatattatgatagaatataaggataggacattaagatt

SEQ ID NO: 558968 - DNA, 566 bp, Homo sapiens
acctaatcttttgaatacttgaagacctctaacatgaattctcacttgaaccttctcttttctagattcagcgtgtatgaaggcaaagcctctgtcagcatggttccctgaacaactatgaagatcaaagtgcaccctcctcctcatatctatatgttgcatgcttaaattctgagaaataaggggaaaaaacggaaatgttgcatggatgagaaataacattttatttaattaatatactgaaatttggtagttgttmattactgtatcataacctaggttatcttggttaatatacgatttatactccatcttgttagtttcagctcattgttgtaatatgctaagatcttttagacattaattccattattaatatactaattattttcccaggtatatgtcacccttaaattgtataagtatgtattttatatttttatcttttccagttaaaaacaatctaagtccatattcatggattggaaaatgtaatattgctaaaatgtccatattacccaaagcaatctacagattcaatgcaacatgtatcaaaataccaatag

SEQ ID NO: 558969 - DNA, 602 bp, Homo sapiens
caaaataccaatagaaagtagattggtgaataacagaggccaggaagaatacagaggaggtggggaagaagagaggttaataggtacaaaaatatagttagataggggaaataagacctagtgctcaataaatcagttgagtgactacaacaatatataatttattatatatttcaaaatagctagtacagaataatttgaatattccaggcataaagaaaaatgtttaaggtaatgagtatttcaattaccctggtttaattattacatgttatatgaataaatcaaaataccacaggtacccctaaaatatgtacctctattatataccaatttttagaaatctatgtaaaggcaattcctgaggcatttcaataagagccacccctgagtacaatatcaatcatgaattatcacaccttgggtccagtcattcaacctattactagtttatctaggycatatttttctaggatatatcctgaaattcctttgcaaatatacttttgaaatctagaaatatatctacatttatttggtacatatacttagaaatcttttcagaccaatacataatgtaatgttaaatttaaaatataatg

SEQ ID NO: 558970 - DNA, 616 bp, Homo sapiens
acagtacaatatttaatagaacagatccagaaatgagcattattgatgtgtaaaattgtatcaatttcrcataaaagcaaagcaatcaaattctggagtcagctagatctagttcaaatctcagctctgatactgtcactgatcttgatatttgcttagtgtctggatttctgaattatctcatctgtaaaatatgaataataattatcatacctacctccaaaagttgctacaagaattaaaggaagtaatgctaaagaatgctcagatatgggtctgttatattacaatatttcaaaaagtattacttatatcataataattatgaatttgagatataccatttttaaatgacatctaaagtgttgcttaattattttattttatattctttctaaatgttaagacagactaaaaactaagaactcttaatctgctagtcttagatagattttgtcatatctgaaaatatggattacagtgcagttctttgagcaagttgtttcatatttaagaaagtatatggattaagcaaacttgttgctttaaataagaagtgagtaattatttacaagcttatagcagcagcagcacacatttttagcagtgattattt

SEQ ID NO: 558971 - DNA, 552 bp, Homo sapiens
agcagcagcagcacacatttttagcagtgattattttattgttctctctgactactatatagtctgtctgtaagagggaatctatgtcatctaccttcatggaataaggtattcattcattaaaagatacctaaaaacatactctatatatgcttcattggaaaatacaattatcaccctcagtgttcctcttttttttttctctctaagacttttatatatattagatgtgcccaacagccattatcaattacagcttggaaagaaccagtaggtgtagaaaccatggcatttcttacactttccatcttatttagtggggttattttcagtgtttcccagctaatagctggtaattttctaacacaagtgattattctgctcaatgtaacatgatattttctgtagttactaaacttgcaccactttaagactgacgactcaaacactgccttcataaaggatgtatcagtgrttttaatttgctactcttcaaactcaagaatatctggaaggcattagaagattaagcttgactctgatgtagctaag

SEQ ID NO: 558972 - DNA, 556 bp, Homo sapiens
tgcctgagctcaggagttcaaaaccaccctgggcaacttggtgaaaccccatctctactaaaatacaaaaaatttagccaggcatgatggcacgygcctgtaatcccatctactcgggaggctgaggcgagagaatcactttagcccaggaggcggaggttgcagtcagccgagatcaggccactgcactcctgcttcagtgagagtgagactccatctcagaaaaaaaaggaataaaagagtagttttcatataatgagtaaaattggaggttctcctggcttacatgtactaggattatcctgaggtttcatgttcttaaatactattaaataatggaagtaaaaaatgtgatttgggggaataacttttttatggtcagcctcctaaagctcagaagatggcctctattacaatagacatcaggtttcttatatatgtgtgaggatggatggacctattttctaatattacccgaagatgggggagtcttatacagtatccctgatcaaccgtgggtaatagtcaaatattttttcctgggtttatggtctac

SEQ ID NO: 558973 - DNA, 595 bp, Homo sapiens
ggaattgccaaacacttttaaagcctcggatctcatgagaactccctagcaggagaacagcctgggggaaactgccccccatgatccaatcacctcccaccaggtccctccttgacacatggggattacaatttgagatgagatttaggtgacacaaccaaaccatataaaagacaacggctcyttcctccatgattaaagcactgtgttatgtgggggctgtcattttcttaatatttggcaaacctgattcagagcatgcaaggatggtgccgtagggtaaaccactgactcagaagaaagggcagtcgaaacagcccatgtctaggcttaggagaatttctgacccttgagaaatagggaagttatctgagggaacagggaagaatcaaattagtggacttgataggaagaactgaaattaaaagttctcagctatgagagataagactgctgcaatgagaaaagttaggtgaagagcccctggagagtaggaacaactttatcttctatgctaagtggaagattttaggccctggctaaacatggaagtcaagactatgaaagaggaagagagtgtgaggatagtaggcaa

SEQ ID NO: 558974 - DNA, 595 bp, Homo sapiens
ggaattgccaaacacttttaaagcctcggatctcatgagaactccctagcaggagaacagcctgggggaaactgccccccatgatccaatcacctcccaccaggtccctccttgacacatggggattacaatttgagatgagatttaggtgacacaaccaaaccatataaaagacaacggctccttcctccatgattaaagcactgtgttatgtgggggctgtcattttcttaatatttggcaaacctgrttcagagcatgcaaggatggtgccgtagggtaaaccactgactcagaagaaagggcagtcgaaacagcccatgtctaggcttaggagaatttctgacccttgagaaatagggaagttatctgagggaacagggaagaatcaaattagtggacttgataggaagaactgaaattaaaagttctcagctatgagagataagactgctgcaatgagaaaagttaggtgaagagcccctggagagtaggaacaactttatcttctatgctaagtggaagattttaggccctggctaaacatggaagtcaagactatgaaagaggaagagagtgtgaggatagtaggcaa

SEQ ID NO: 558975 - DNA, 566 bp, Homo sapiens
gatgctcggtagctgccatgggcatgtatcactcagatatcccttagagagaatctgctgcaggatagttgggtaaaagcctccagctgacacacctccagtgtgtcattcacygggtgcagcattcaccccaaggctacaccctccccaagctgctcccaaccaatggctaaacttggtggagataatagagctggctacttgtacccaatgaaagactcatctaataagcaaactttcctctgcatttgtctgaatgactttcttttagcctcattatagtcaatttcaggcttttcatactcaattcaccttcctgctccatatacttttgcaaacctaagaactgtgtcatggtccaaaggctcttctcacctacttctgctacctctccattttatctttgagacatttctgtccactaaacctcttgtacttttcatattgagttgctgtgtgctttctgtatgactctttgcttacatagatgataaaagttaacaaaatcttataaaaccactaaagggtataaatgttaaattcattgatttcaccaaaacatgtat

SEQ ID NO: 558976 - DNA, 566 bp, Homo sapiens
gatgctcggtagctgccatgggcatgtatcactcagatatcccttagagagaatctgctgcaggatagttgggtaaaagcctccagctgacacacctccagtgtgtcattcaccgggtgcagcattcaccccaaggctacaccctccccaagctgctcccaaccaatggctaaacttggtggagataatagagctggctacttgtacccaatgaaagactcatctaataagcaaactttcctctscatttgtctgaatgactttcttttagcctcattatagtcaatttcaggcttttcatactcaattcaccttcctgctccatatacttttgcaaacctaagaactgtgtcatggtccaaaggctcttctcacctacttctgctacctctccattttatctttgagacatttctgtccactaaacctcttgtacttttcatattgagttgctgtgtgctttctgtatgactctttgcttacatagatgataaaagttaacaaaatcttataaaaccactaaagggtataaatgttaaattcattgatttcaccaaaacatgtat

SEQ ID NO: 558977 - DNA, 566 bp, Homo sapiens
gatgctcggtagctgccatgggcatgtatcactcagatatcccttagagagaatctgctgcaggatagttgggtaaaagcctccagctgacacacctccagtgtgtcattcaccgggtgcagcattcaccccaaggctacaccctccccaagctgctcccaaccaatggctaaacttggtggagataatagagctggctacttgtacccaatgaaagactcatctaataagcaaactttcctctgcatttgtctgaatgactttcttttagcctcattatagtcaatttcaggcttttcatactcaattcaccttcctgctccatatacttttgcaaacstaagaactgtgtcatggtccaaaggctcttctcacctacttctgctacctctccattttatctttgagacatttctgtccactaaacctcttgtacttttcatattgagttgctgtgtgctttctgtatgactctttgcttacatagatgataaaagttaacaaaatcttataaaaccactaaagggtataaatgttaaattcattgatttcaccaaaacatgtat

SEQ ID NO: 558978 - DNA, 568 bp, Homo sapiens
cattgccacttactattcgagccttaaatgaagagtaagagaaaaacaaaacaaacaggcttttagcatactacagttttatgtacacgaaatcgggacacaggtcagctgcactacacacgtaacacctagtatgacagatgctaagcagggtcagctccaagtcaaagctactgtgtttttatgagtagaggttttgaaattagctgtcagcatttaaacaaatgcactggcagagtcccggaaaatatgtcatattccaagtactatttgcccttaaaacttgatatgcacagtgaagatcatgaatcagtcagaaaggtcatgattagccagacttaagaaaagatgctgtgtttgacagtagcagacccctaggttggcaagtatagstaaggtaagcgcagctggcaaggtgtgacctctccataagtgcaacatatcagaggcacacttaaaggacaaccaaataatggaaagctgggataacatgcacatttcaaaactaaaacagaggaatcaaacagatctaatatgtcacaaacaaacatgtacaaaagacaagatt

SEQ ID NO: 558979 - DNA, 645 bp, Homo sapiens
tgcattcctctttgctaatcttcatcctttgccagtttccttatctgcaatcctttcagaatttgagctccttgatggtagtctgttttttaatctctctctctgttttttttacttttaccacattcctgaaatataggagatgactaataaccatttcttaaatattggaatggacaattttaataagctacaccacttcatggaatagctaaaaatctgaataatggaaaatattatttcatttttctatatagtgaagatgaattataatctaacagatttgtagatttcacagtcaaaatcctaatggcagattgctgtaacttgaaattttaccaattttaagtgtaactggattaataaacaagtaaaaatatctaaaattttgtaaaagaagcactatgagatgaatctataaaaatattaataatttataacagctaaaacagtatggtcctggcaaaataatagattaaaagtgaaacacaaaatataattaagaaacccttatactcaagaatttaatgactaagaaaacatttttyattaaagacaaagagaagcactagtcagtaaatggtgcttggacaataggttaagtatctataatattcatttgtatcctcatctcatacatatgcc

SEQ ID NO: 558980 - DNA, 498 bp, Homo sapiens
ggacaataggttaagtatctataatattcatttgtatcctcatctcatacatatgccaccaagttccacatacattaaagatttaaatatagaatagttaaaggaagaaagacaagtaaaaagagaaaggaatatttattaaacctatggaaagagatttttaaatttagacttamtagataattgacaaattaaaatgcaacaatggtaaatatgcatacaaattatctattttactaaaactacaactaaagagtacaaaattaatgaagattaaagatactgattttaatgatattaaaaataattcccaaggctgttgagaatattattaatcaaacactatcatgcatagttgatgagcatgaaaattgtaataatacaagttaaaaaataactttcaaaacatgtctatcaatacactgttttgacaggaaaattccacttttggaaactggtgctaaggaaattatttttgttatgggttgaattgtgtcc

SEQ ID NO: 558981 - DNA, 588 bp, Homo sapiens
cacacacaaacgcacacacacacacacacagatgattatttagccattaaaaagaaaaaactcctgccattcatgacaagattgattaatctagaggacatatactaggtgaaataaggcagaaaaagaaaagagaaatattatttcacttataagtaaaatctcacaaaaaaaaaaactgaactcataaaagtggagartagaacagtagttgccagggctgggggtgggggaaatagtttttggtcaaagtgtacaaactttcagttataagatgaataaattctggggatctaatacacaccatgacaactatagccaataatactacattgttttctcgaaatgtgttaatatagtacataagtgtcctcaccacacacacacacacacacacacacgtaactcagtatagtgatggatgtattagttgcttttattgtggtaatcatttcacaatgtatatgaatatcaaatcattatattttaacaccttgaaatagctaatttatttgtcaactatgccttaataaagctggggaaagaataaaatgtaaaatgtatacaataggcaaaaatcttggctat

SEQ ID NO: 558982 - DNA, 604 bp, Homo sapiens
aaagccatacaataaatcttatgaaatggaactactattatgcttattttctacattagcatactaaaacacagagatgttaagtattttgttccaaaatcacacaactgacacatataaagcttacakttgaacccaaccagtctggtttcagagtgcttctcttgatcactacagtagtgaatgatattcatgacaggcattgagtcattttaagaaaagacatatattgtgttctgaatattgtttaagaagtcagagatgtacaaatttttagaaaaatatctaatcaaaattatctccaaattatccccattatatgtatctttaatgggtacttcagttatctggataattaacgtagatgaattattccattccctcaaaaacttaattgtaaaatgccagtaggcttatttctactttcacagtttcttctcctcctctccctcccctaagttcaacattgggcagctatgtgtggtgagggcctcatgctcctcctgctcatggcagaacatgaaaaaggagtgcaaagagatcacatgacaactgaggacatgagagaaagaaaataagaaaattataatatttttaacaacca

SEQ ID NO: 558983 - DNA, 564 bp, Homo sapiens
gattgcaatggtgcttatacaatttacacrtgtgataaaatgacgtagaaccatacttgcacattataccaatgccaaattcctgtttttgatattgtactctacgtaatgagatgtaactgctgggagaaactggtgaaggataactgtcacctctctactatctctataacttcctatgaatccataatttttttcaaataagcagttttaaaaatcagtgttaaaagaaaaataaattactttgatttattacttttgaatttgatttaatcaagatttaaagttatgctctttgcaagatatctttaagaaaatgaaatactaagaaaacatactaagaaatatactaagaaaaaaatacatatgaaaataatttatattatccatatcatttatatatccatataaatgtatatataagtatatataaacacacatagatattcattacatctctctctagttatatctagaatactatatcaagataacaaaccaatttacaagtggacaaaagagttgaatggagactgtacaagagaatatatgaatagggaaaag

SEQ ID NO: 558984 - DNA, 564 bp, Homo sapiens
gattgcaatggtgcttatacaatttacacgtgtgataaaatgacgtagaaccatacttgcacattataccaatgccaaattcctgtttttgatattgtactctacgtaatgagatgtaactgctgggagaaactggtgaaggataactgtcacctctctactatctctataacttcctatgaatccataatttttttcaaataagcagttttaaaaatcagtgttaaaagaaaaataaattactttgatttattacttttgaatttgatttaatcaagatttaaagttatgctctttgcaagatatctttaagaaaatgaaatactaagaaaacatactaagaaatataytaagaaaaaaatacatatgaaaataatttatattatccatatcatttatatatccatataaatgtatatataagtatatataaacacacatagatattcattacatctctctctagttatatctagaatactatatcaagataacaaaccaatttacaagtggacaaaagagttgaatggagactgtacaagagaatatatgaatagggaaaag

SEQ ID NO: 558985 - DNA, 575 bp, Homo sapiens
gttgccttcacagcaaagataattgactacaagggggcatgacagaacattctgtggtgattaatttttttttctatcttgattgtgaaattggctacaaggattcgtacggtagccaaaaatgtatcaaactgcacacatacaatggatgcrttatacatacagagagattatacctcaaataagtcaattttaaaaatctattggtacaattcaccatgttaaaggattgaaaaaagaaacctaaaattatctcattatatacagtaaactatttttaataaaattaaacatttattcacaactaccaaaaactaactaaagaaccaaaacaaagcacaagcattttaagaaactaagaaaatctccagaaatttccttgatctgatgaaatgtatttattaaaaacatggtacaccatttagaaattattaagtgtaagatcagaaatcagacacataggactgttatcatttctacaatttaacaaagtgccccaaagccctaactaatgaaataagaaaaaaaaaatggaacaagattgcaacaaaatcataatttacagactagctgcc

SEQ ID NO: 558986 - DNA, 643 bp, Homo sapiens
ctttcagcctattgactttcgacatgccttccccgctaagcttaatcatttctagttttcaatttaaagtgagagatgtgtgactcttcagctcacttaaacactcagaggccaatgtagggttactaattggcctaatttcaatattgttgtgtctgcagaaatcaggatgccaaaaaagagagaaagagaastaatggcctatatgtggagtactcagaatacacacaacgttttttaagttcaccattataaatgggcacagtatgcggtgttccaaaacaattacaatagtaatatcaaaggtcactgatcacagatcactataatacacataataatcatgaaaaaaattaaaatatttcaagaattaccaaatgtgatacagagacatgaagtgagactgttcttgaaagaatgttgcctaaccacttgctcaatgcaggattgccacagacctttgatttgtaaaaaaacgcaatatctttcagctttcctttactgagtaataagatagaagctataataaaaagtctccgatcaaagaaaagcccaggacctgatggcttcaccactgaattctactaaatatttaagaactactaacagcaattctacacaaattctttaaaaaaaaaaacaa

SEQ ID NO: 558987 - DNA, 565 bp, Homo sapiens
aaactggaaggtaatgagttgaattatccctattcacagatgacatgatattatattagaaaaacctagactccaccaaaaaattataagaagggataaacgaattcagtacagttgcaggttagaaaatcaacatgcaaaaatcagtatcatttctatatatcaacagcaaacaatctgaataaaaaatcaagaaagcaatccaattaaaatagctacaagaagaaaatacttagggatcaatttaaccaaagaagtaaaatatctatacaagaaaaactaaaaaacactgatgaaaaaaaattgaagaggacacaagaaagtggatattccatgttcatgaattagaagaagtaatattgttaaaatgaatatagtacccaaagaaatccacagattaaatatactcactatgaaaatgccaatactattttcacaaaaatagaaaaaacaattctaaaatttatatggaaccacrtaagaactcaaaaggccaaagcaatcttttttttttctgaaaataaagaaaaagctgaagcatcacattatctgaacttcaaaatat

SEQ ID NO: 558988 - DNA, 565 bp, Homo sapiens
attgctctctctgtctgagcaggagctgcaagccagtcctgcctcctatcctccatcttaatctgatgtcccccagatgctttatttttaaaggttccttttacagccagaagatgcacttcaggcaaagttttaaatgtgaaaaagtttgcatccacaactcaattattctcaaagcctccttacagagatgtgcttaaaatgtaatcatgcaattgagttttgtatattaaacctatccagcgtctttctaaatgtgcttattaatttttctttttttttttttgagatggagtctcactctgtcacccaggctgtagtgcagtggtgtgatcttggctcactgcaacctccgcctcctgggttcaagtgattcctgtcttagcctcccacttagctgggattacaggtgcccagctaatttttgtatttttagtagagatggggttttgccatgttggccaggctggtctcratctcctgacctcaggtgatcttcctgccttggcttcccaaagtgctgggattacaggcgtgagccactgtgcccagccaaatgtactta

SEQ ID NO: 558989 - DNA, 609 bp, Homo sapiens
tcttctcccaacgagtttgcaatttaaggggtaagatgtaggttgggttgagtgtggaggagaggtggaaaaaaaaaatctcgcctaacatgataaagagtaaaatatgacacaatttatcaagatacatctgcatatccatttaacctgaaaaacactatttactgtacctatttgcaaccctgttgcttcatactctggtttcacctactattacatgcaagataatgtttgatcaaggcataactcactctctcagaagtattttcattttaatgtggacttttggcattaggggaaagcaatgtttaggggtagtactgtccatgggcctcaacctgtaacttgggttggctctgagcagagaggtccaactgacakgagcgttaaaaagaaattattttggcagatagtgagggtaagaaagtcctcagtaaggtttccctttttataaaaagcagcaccaaaattatttcttttctaacaaaaagcagcctgtaaaattgagctgcaaacatagataagcaagctggaagcttgcacgagtgaatgtcggcagatgtgacaatagtaaaagactacctgggggctagacatattcaacatgac

SEQ ID NO: 558990 - DNA, 582 bp, Homo sapiens
cattaggggaaagcaatgtttaggggtagtactgtccatgggcctcaacctgtaacttgggttggctctgagcagagaggtccaactgacatgagcgttaaaaagaaattattttggcagatagtgagggtaagaaagtcctcagtaaggtttcyctttttataaaaagcagcaccaaaattatttcttttctaacaaaaagcagcctgtaaaattgagctgcaaacatagataagcaagctggaagcttgcacgagtgaatgtcggcagatgtgacaatagtaaaagactacctgggggctagacatattcaacatgacagttccatctttccttttatcaaccatgtgtacagtaagaagcagacaacatggcgctggccaggtagaaacctcatttgcataatagattaaggtgggtggccagctccttcaggcactatgtaaacatcatgcctgggccaatctttgggccctatgtaaatcagacaccacttcctcaatccagtctataaaaacccatgcacttcacgatgggactggaagacccactcaggagcccctctctctctgcaggaaagag

SEQ ID NO: 558991 - DNA, 478 bp, Homo sapiens
ttccctgttgctttgcatcatgggaggttatgtmtagggggcaggataatttggctgttgaacattcaaatttatgtctcagatcatgtacccaggtcccagatatgaaatcagaaattttatgatgttccctacatgctccacatccccagacctaatcccacatcttgttgtcttttttgtttctttaacccattcgctttctcttagcagaactaatcaatgacataatggattatctgagcaagaagtgtgttttcatcaaaacttcaggttatgatctttccacttataccaactaaataaacatgacagcagacacagtttcttttctctggactgtctgtgtcagtgctgacactacctcagtttgaaaaaagagagcaaaaaataaagtccacatgtgtccccaaggtagcaccagcctgtttgagatggtaattgtcaccagagctataagaagtccttttgggaattc

SEQ ID NO: 558992 - DNA, 573 bp, Homo sapiens
agaattcatcttaaaaaaataaaataaaacaagacataaaccttaaacatttttaaaaaattaactcaatatggattagacataaatgtaaaacacaaaactaygaaacttccaaaagaaaatatagaagaaaatgataggttgaacttcattaaaattaaaagtttcttctttgcaaaagaccttttaagaggatgaagaaccattcacagactgggaaacaatatttgcaaaacacatatccctagcccagtctaaaggcatatatccctactctaatcataataaaaacatcagttaaatcccaacagaaggacactttatgatgtcctaccactactcctcaatactgttgaggtcattaaaagcaagaaaagccagagaaactgtcacagccaaagaagcctagggagacatgatgaccaaatgtagtgtggtatccatgatgagatcccagaacaaaaaaaaaaaagcagattatataaaacttagaaaaatctgaataaattatggacttcagttaataataatttatcactgttggttcattagttgtaacaaatataccacact

SEQ ID NO: 558993 - DNA, 573 bp, Homo sapiens
agaattcatcttaaaaaaataaaataaaacaagacataaaccttaaacatttttaaaaaattaactcaatatggattagacataaatgtaaaacacaaaactatgaaacttccaaaagaaaatatagaagaaaatgataggttgaacttcattaaaattaaaagtttcytctttgcaaaagaccttttaagaggatgaagaaccattcacagactgggaaacaatatttgcaaaacacatatccctagcccagtctaaaggcatatatccctactctaatcataataaaaacatcagttaaatcccaacagaaggacactttatgatgtcctaccactactcctcaatactgttgaggtcattaaaagcaagaaaagccagagaaactgtcacagccaaagaagcctagggagacatgatgaccaaatgtagtgtggtatccatgatgagatcccagaacaaaaaaaaaaaagcagattatataaaacttagaaaaatctgaataaattatggacttcagttaataataatttatcactgttggttcattagttgtaacaaatataccacact

SEQ ID NO: 558994 - DNA, 513 bp, Homo sapiens
tacacattttaattttggataagtaaatatttttagaataaactaattcaatttattaataattagactataatcatcttatctctacgttaatgttcagttacatattaaaaatatacattatccrttaagatagtcaacattaataaaattacattgtaatagtttaggataattttcctttcactaaaaacaaaatatagttacataaaacattcatttaatatttattgcatatgaaccaaaagtaaaataagtaaaaaagaaaaaaaaatcatccaatgtcctctgtaaatattcctgacggccatgactaccccacatcttttgaatgaacagcctttctatatttggaaaattctcatctcaagaattcactttcccagcataaaagtcagaacacaaaatgcagtctccttagcattcaggcaggtggcttagtctaaaatgtgcctgtacaaaacttggaatcagatatcagcaacatgaggtaatgggctctgtgtggaagtt

SEQ ID NO: 558995 - DNA, 513 bp, Homo sapiens
tacacattttaattttggataagtaaatatttttagaataaactaattcaatttattaataattagactataatcatcttatctctacgttaatgttcagttacatattaaaaatatacattatccattaagatagtcaacattaataaaattacattgtaatagtttaggataattttcctttcactaaaaacaaaatatagttacataaaacattcatttaatatttattgcatatgaaccaaaagtaaaataagtaaaaaagaaaaaaaaatcatccaatgtcctctgtaaatattcctgacggccatgactaccccwcatcttttgaatgaacagcctttctatatttggaaaattctcatctcaagaattcactttcccagcataaaagtcagaacacaaaatgcagtctccttagcattcaggcaggtggcttagtctaaaatgtgcctgtacaaaacttggaatcagatatcagcaacatgaggtaatgggctctgtgtggaagtt

SEQ ID NO: 558996 - DNA, 599 bp, Homo sapiens
ataccaccatcattcttcacagaactagaaaaaacaatcctaaaattcatatagaaacaaagaagaacctgcatagccaaagcaagactaagcaagaagaacaaatcaggggatcacattacccaacttcaaactatactacaatgccatagtcaccaaaacagcatggtactggtataaaaataggtgcatagaccaatggaacaaaatggagaacctagaaataaagccaaatacttaacagccaactgatcttcaacaaagcaaacaaaaacataagataaggagatgacacgctattcaacaaatggtgctgggatatytggcaagctacatttggaagaatgaaactggatcctcatctctcaccttatacaaagatcaactcaagatggatcaaagacttaaatctaagaactgaaaccataaaaattctagaagataacctcagaaaatcccttcttgacactggcttaggtaaagacttcatgatcaagaatccaaaagcaaatacaactaaaacaaagataaatagatgggacttaaactaaaaagcttttgcacaacaaaagaaataatcagcagagctaacagacaat

SEQ ID NO: 558997 - DNA, 599 bp, Homo sapiens
ataccaccatcattcttcacagaactagaaaaaacaatcctaaaattcatatagaaacaaagaagaacctgcatagccaaagcaagactaagcaagaagaacaaatcaggggatcacattacccaacttcaaactatactacaatgccatagtcaccaaaacagcatggtactggtataaaaataggtgcatagaccaatggaacaaaatggagaacctagaaataaagccaaatacttaacagccaactgatcttcaacaaagcaaacaaaaacataagataaggagatgacacgctattcaacaaatggtgctgggatatctggcaagctacatttggaagaatgaaactggatcctcatctctcaccttatacaaagatcaactcaagatggatcaaagacttaaatctaagaactgaaaccataaaaattctagaagataacctcagaaaatcccttcttgacactggcttaggtaaagacttcatgatcaagaatccaaaagcaaatrcaactaaaacaaagataaatagatgggacttaaactaaaaagcttttgcacaacaaaagaaataatcagcagagctaacagacaat

SEQ ID NO: 558998 - DNA, 601 bp, Homo sapiens
tacagtttattttgccgcagattattttccttcctgggaaaaacattgtttcactgacaaattgccaaaatccacacagttcagtgaagtggccttgctgagttggcttcctcaagcaggcagcagatacttattaagtgctcaatatatgctccaaattgtgccacatttggtgttgggtacacacagtgtgttctctggattttcttttttgaaaaaaaatctgcaaaaatttcaagtagtctgaattacacakcctgaataaatgttcttgttgaagcttggaaaagtaagaggacaaagaagaataaaatctctcatatttctaccatgcaaatacaacgaacatttttagtatatgtcttccaaaaatttaatgtatgtatttttgctcataattttcatcagctataatattgagttactttttaaacatatcatatttcttttttatcattttctatattttcttttctttttttttttgagacagagtctcactctgttgcccaggctggagtgcagtggtgcgatctcagctcaccgcaagctccacctcccaggttcacatcattctcctgcttcagcccccgagtagctg

SEQ ID NO: 558999 - DNA, 601 bp, Homo sapiens
tacagtttattttgccgcagattattttccttcctgggaaaaacattgtttcactgacaaattgccaaaatccacacagttcagtgaagtggccttgctgagttggcttcctcaagcaggcagcagatacttattaagtgctcaatatatgctccaaattgtgccacatttggtgttgggtacacacagtgtgttctctggattttcttttttgaaaaaaaatctgcaaaaatttcaagtagtctgaattacacagcctgaataaatgttcttgttgaagcttggaaaagtaagaggacaaagaagaataaaatctctcatatttctaccatgcaaatacaacgaacatttttagtatatgtcttccaaaaatttaatgtatgtatttttgctcataattttcatcagctataatattgagttactttttaaacatatcatatttcttttttatcattttctatattttcttttctttttttttttgagacagagtctcactctgttgcccaggctggagtgcagtggtgcgatctcagctcaccgcaagctccacctcccaggttcacaycattctcctgcttcagcccccgagtagctg

SEQ ID NO: 559000 - DNA, 194 bp, Homo sapiens
taagtgtgaaggtgaaagccaaggaagtagtggatgaaagagtcacttcccctcccacagattccagttgaaaaagaagaggctgtaccgctccaacattgtatgagtctgtggaatccccaggctaaaggacactaaagttctcagaagagcaaaaacaaaagaattacawcaaatggaacatgcatttgctg

SEQ ID NO: 559001 - DNA, 629 bp, Homo sapiens
tctatacttttggatattgctgatttaacactcatgcctcttagataaaccaatatccatggaagtaattaaaatgatgtcaacataagtaaaatttccagaaaaaaatttcatgaacttctagcacatattttaaaaaatagctctctcctaagaacattttattttctctaaaattcctaacctttaatatataaataggtaatatacataatgcaattttttccttaaagtacattcaatgctgaaaacactattatttaagctataactaaatattaatatatgtaagatactttattccttatgcaaygcaattttcatagtctcttttttccaaaaatattaattccaatttatatacttagttcttagaaacaggtcattatcctcaccctttttattcattgagcatgagctactgaaattaaaactttcctagagtttggcatatataaagttttagacctaaaaaagccagtgaaataattttgaccatttattaataaagtgcacatatctgtcaaataatcccctcttttttgtatgtctaagagaagtatacagaaattgtataacataaaagcacaagtaaatattttaaacctgaaattattatacaacaatga

SEQ ID NO: 559002 - DNA, 524 bp, Homo sapiens
taaatattctaaaaatgggagaagacattgcatgggaataggcagagtcgtggagagttgggatggcggtatcctactccacagtctattgtgtgtgggtggaaaggaggagcagagtgtcttcaaagtagcctgtgtcatgccctcccctgtaagggaagaaaacagtctctgagggcaggtggatgagaagaaagggatgatgtcaagagtcagcctggccttgagaaactactcctaggctttagtttagaaagaagtacacaaaagacatctgaggaaaaattgtcacaaaaatgattgaaagcactacagaaaataataaacatttttctgtgaaatacaacttcataaagataagtgatctattacttttcttataggaattagaagtttgtggggtctttaaatttttttttgccagttataaaacagacacacatttgaaagaagaatgaaaactaatatttcarttctgattttagaatacttgtgttttgaaatcagattttgtggtttgttta

SEQ ID NO: 559003 - DNA, 562 bp, Homo sapiens
tggatcacttatcccaagatcaaactcctaattttaaggaatttacaatcaaggtggagtaaaataatagcacgcactaagcaaaaagcaatttcgacagggcataactaaatgccaaattgtatatggaactgaatttaatgacaatgatacagacaatgaaacatttgaaaaataggctgatacccatttgaaatagctaagtaaaggtgtttagaagagacaagatgttttagaaactaagataaaatgggaaacaaaagtctgaaaggatagagagaagaagaaaatacatttacaataaaattcagcattggagaaagaaaacattacagtatccccatgaaaatctatttccaaatactttaaggttaatgaaacttagaacaccttaacacactatctgtgtagtaaactgaataatgaaggcagaagaaaagaacccccaagaggcaataaaaatgaaatctgagtacttggaaaaacataggatcactgggggcytaacttatttgtttggttaattttctcattttattccttttcaatggaagaaaatgtt

SEQ ID NO: 559004 - DNA, 610 bp, Homo sapiens
atagtttgaagtcaggtagcatgatgcctccagttttgttctttttgcttagaactgctttgactattcagcctttttggggtttcatatgacttttaagatagttttttttctaattttgtgaagaatgtcattggtagtttgataagagtagcaytgaatctataaactgctttaggcagtatggccattttaacaatatttattcttcctattcatgagcatgaaatgtttttccatttgtttgcatcatctctgatttctttcagcagtgttttgtaattctcgttgtagagatttttttacctacctggttagctgtattcttaggcattttattgttttgggggctattgtgaatgagattgtattgatttggttctcagcttggacgttgtcagtgtataggaatgctaccaattttcatatactgattttgtactctgaaactttgctgaagttgtttattagacctaggagttcttgggcaaaaactatgaggtttctaggtatagaatcctattgtctgcaaacatagatagtttgacttcttctctccctatttggatgccttttatttatttcttttgcctgattgttctgactaggt

SEQ ID NO: 559005 - DNA, 504 bp, Homo sapiens
accaagccattcatgagggatccacccccatcacccaaacacttcccaccaggccccacctccaacattggggattacatttcatcatgagatatggaaggaacaaacatccaaactattatcagtaaccttaccrttttcctatgctaagtagaggtagaaatggatgctggggatgatacatcctaagaaaaggaaaagcttcaattcttaattggaggaatgctctgaaggctgagagcaatgccttcacgctggggcatattttcttaataagtctagtaacctccagtataggatatttaacagaatctcagaacccagagtggaaactgagctgagagcatcacccttgccccccataccatgccctccattaccatttctccagaaacagaacaaaagttaaaacataacaaatgtagtagtcagaacaatggccatggagccacagaactgagaggcaaacaaatcaccaataccatgttacagaaaagagaaggt

SEQ ID NO: 559006 - DNA, 621 bp, Homo sapiens
ggcaggtaagagcaaaagaggcaagtgatctgatttacattttaaaaggatggcttctatggagaataagtggtaggggagtgagtgtgcagggcggaccagttagaaattcaggcaaaggataatggcaattttgactgggtgaatataccagaagtggtaaggagtgatcatatttaggatatatttagaakgtaaacccaatagaatttgccaacaaactggaagtggattgaaaggtgggaggaaatccaaaatgactccaagatttttgacctaagcaatgaatagaaaggagcctctgctaaatgaggtggggagggcagaaggagaggcagactgagtgtgggggtaagaatgagatgagagttggtatttggaaatgtaagttttgtttttgttttttgggttgtttctttgtttgcttgagacagggtttcactctattgcccaggctggagtgtagtggtgtgaacactgctcactgcaaactctgcctcccaggctcaggtaattccttccacctcagcctcccaaatacctgggactacaggagtgcgccaccacacctgaataatttttttttttttttagagatatggttttgccatgttgcccagg

SEQ ID NO: 559007 - DNA, 621 bp, Homo sapiens
ggcaggtaagagcaaaagaggcaagtgatctgatttacattttaaaaggatggcttctatggagaataagtggtaggggagtgagtgtgcagggcggaccagttagaaattcaggcaaaggataatggcaattttgactgggtgaatataccagaagtggtaaggagtgatcatatttaggatatatttagaatgtaaacccaatagaatttgccaacaaactggaagtggattgaaaggtgggaggaaatccaaaatgactccaagatttttgacctaagcaatgaatagaaaggagcctctgctaaatgaggyggggagggcagaaggagaggcagactgagtgtgggggtaagaatgagatgagagttggtatttggaaatgtaagttttgtttttgttttttgggttgtttctttgtttgcttgagacagggtttcactctattgcccaggctggagtgtagtggtgtgaacactgctcactgcaaactctgcctcccaggctcaggtaattccttccacctcagcctcccaaatacctgggactacaggagtgcgccaccacacctgaataatttttttttttttttagagatatggttttgccatgttgcccagg

SEQ ID NO: 559008 - DNA, 621 bp, Homo sapiens
ggcaggtaagagcaaaagaggcaagtgatctgatttacattttaaaaggatggcttctatggagaataagtggtaggggagtgagtgtgcagggcggaccagttagaaattcaggcaaaggataatggcaattttgactgggtgaatataccagaagtggtaaggagtgatcatatttaggatatatttagaatgtaaacccaatagaatttgccaacaaactggaagtggattgaaaggtgggaggaaatccaaaatgactccaagatttttgacctaagcaatgaatagaaaggagcctctgctaaatgaggtggggagggcagaaggagaggcagactgagtgtgggggtaagaatgagaygagagttggtatttggaaatgtaagttttgtttttgttttttgggttgtttctttgtttgcttgagacagggtttcactctattgcccaggctggagtgtagtggtgtgaacactgctcactgcaaactctgcctcccaggctcaggtaattccttccacctcagcctcccaaatacctgggactacaggagtgcgccaccacacctgaataatttttttttttttttagagatatggttttgccatgttgcccagg

SEQ ID NO: 559009 - DNA, 630 bp, Homo sapiens
acgcagtgttgggtgtttatacagtttgataaaggccaggtgtagaggaggcattgaagaattccactgcgtctctcattgaaccaaagtgagagggggagcacagaacagtctattacgagtaataccaaaccatcttccctaaaaaaaaaaagtaaaaacaaggatcctgtttatccggaagaagtcacctagagaattcagtaatttcaagataattagattccttccagagagctgaatgcaggtttcacttttctctggagaatatggccactttcagagacaattaaaatgcttttaagtgtggcaacacagtccctggagaggaagggggcttcataacatgaccsaagtggcagctgatgctgctcctctgactcagaatatcctgtgtgtgtgcagacacttaatctttgtgtctttctctggactttgagtaggaaattttagtcaagactctctagagtactttctattcatgaaattaaatgcttgaaggattctatgatttatactaggcattaaactttacttccattcacagtcccattagttttaatgagttaaggactttgctttacttaaagtaaacaaatagaaatactccaatggcaaaggatattggac

SEQ ID NO: 559010 - DNA, 348 bp, Homo sapiens
atgtttgacaaaatatttgggcaccatgtgacccagrcaagtagacacataaaaaataatcatggcagcacctggccatgaaatgataaaaccgagcttcaaatctagctctgtctgactccaaaacccatatcctttctaccactgtagtgaccgattttgttctcaggaaacttaattgttcttaaggaggtaagatttataaacattaaaaactctgcttaagaaaggtatgtgaggccaggtgcggtggctcacatctgtaatcccagcactttgggaggccgagatgggcagatcacctgaggtcaggagtttgaaaccctcctggccaacatggagaaaccc

SEQ ID NO: 559011 - DNA, 348 bp, Homo sapiens
atgtttgacaaaatatttgggcaccatgtgacccaggcaagtagacacataaaaaataatcatggcagcacctggccatgaaatgataaaaccgagcttcaaatctagctctgtctgactccaaaacccatatcctttctacmactgtagtgaccgattttgttctcaggaaacttaattgttcttaaggaggtaagatttataaacattaaaaactctgcttaagaaaggtatgtgaggccaggtgcggtggctcacatctgtaatcccagcactttgggaggccgagatgggcagatcacctgaggtcaggagtttgaaaccctcctggccaacatggagaaaccc

SEQ ID NO: 559012 - DNA, 348 bp, Homo sapiens
atgtttgacaaaatatttgggcaccatgtgacccaggcaagtagacacataaaaaataatcatggcagcacctggccatgaaatgataaaaccgagcttcaaatctagctctgtctgactccaaaacccatatcctttctaccactgtagtgaccgattttgttctcaggaaacttaattgttcttaaggaggtaagatttataaacattaaaaactctrcttaagaaaggtatgtgaggccaggtgcggtggctcacatctgtaatcccagcactttgggaggccgagatgggcagatcacctgaggtcaggagtttgaaaccctcctggccaacatggagaaaccc

SEQ ID NO: 559013 - DNA, 501 bp, Homo sapiens
gctgggcaagagctgctgtggctctcccgctaatcttggtggacagctctgcctgcattgacaatgaggccacccatgctgtcgattgatgtggccagggcaagcctgagcatgkgtggtcagtctctctggctggccgaggtgtgggtgtgtgggaatccgctccatacccacacaacccaggatgccagttctttcctggggcagtatagggagaaggcaagcccactcctcctgggagacagggcaatgcagggccttgccaggctttccaggtcctcagaggtgtggccagaagtcgactcataagctgaagtgaaacagaagaacttggtcttggagaacagacagcagcatgagaggtgtcattcaccacaacaccctcacttatagatgaagaaactgatcttaacaggacgggtttttcatgatggctttgcaagtgaacctcagggcacttacctttgcattgcaaagagaagggagaaagaaaactagtcc

SEQ ID NO: 559014 - DNA, 585 bp, Homo sapiens
cttttctcagagtgcttctttctaacaagctgccggaagagttgtgagatgaatgccttgcactagaacccacaggaaccaggagctgggcaagagctgctgtggctctcccgctaatcttggtggacagctctgcctgcattgacaatgaggccacccatgctgtcgattgatgtggccagggcaagcctgagcatgggtggtcagtctctctggctggccgaggtgtgggtgtgtgggaatccgctccatacccacacaacccaggatgccagttctttcctggggcagtatagggagaaggcaagcccactcctcctgggagacagggcaatgcagggccttgccaggctttccaggtcctcagaggtgtggccagaagtcgactcataagctgaagtgaaacagaagaacttggtcttggagaacagacagcagcatgagaggtgtcattcacyacaacaccctcacttatagatgaagaaactgatcttaacaggacgggtttttcatgatggctttgcaagtgaacctcagggcacttacctttgcattgcaaagagaagggagaaagaaaactagtcc

SEQ ID NO: 559015 - DNA, 366 bp, Homo sapiens
tgggctgattaacaatgagaagtaaatagggagagattcagctcatttttttggtcttttttcttttcctcattagatgtttcttccattgctttcctgttcatttctaaagtacaagacacagaatcaaaaggttgaggtcctagaaggatatctgtggggaatctcagggggaaaccagaygggaagttgggacaaggccttcttctttgggtcccatgacatcattcacatttccttagagcttgaggaataggatgccccattattgagacagagagaggcatggttgtagaagacagaatgctcatgtgtataagtctatttgtgctgctataacaaaataccagatactgggtaatttac

SEQ ID NO: 559016 - DNA, 331 bp, Homo sapiens
cctgttctttccagtcttcctcaagttttactagaagagtcaggagttctcctgtctaagccagaccttctagccttatwatttccttgaaattgctttcaagaacctctctgttgctaagccatcggaggtgtttctgtcgtcttcttcttccttgaattctgcagtgttcaaaactactgaccctcttcctgctccgggtttctatattccatgctcttcagttcttcctcctacctatgcaaggagcccttctcagccttctccttccttgcccttgtcaaggtggctgtctttttagtatacactttcagagcattttcatctgctc

SEQ ID NO: 559017 - DNA, 586 bp, Homo sapiens
aaatgcagtgtgatatattctcacacttgtatattatacaacagttataaaagaaacacagagaagtgtaacaatatgtattaatcttgaaaatgtaaagttaagtaaaagaagtaaatctcaaaggattacatacagtataacatccttttggtaaaaataaaaacaactaaagtgaatatgtttgcatttacacacaattatatataatgtgcacatcatatataatctgtatacacaatggtgttacataragaggcaataacactttataataaaggaagcaagtgaactaacacaggatctcagacattgattgccttgtgagagggaacaaggaggcagaaggatgggttggttatagtcaaggtcttagcttttgttttagatggtgttttcaagaatacttgctgcattattaaaaataattaggctgggtgtggtggcttacgcctgtaatcccagcattttgggaggccaaggtgggtggatcacgaggtcaggagatcgagaccatcctggctaacattgtgaaaccccgtctctactaaaaatacaaaaaattagctgggtgtggtggtgggca

SEQ ID NO: 559018 - DNA, 586 bp, Homo sapiens
aaatgcagtgtgatatattctcacacttgtatattatacaacagttataaaagaaacacagagaagtgtaacaatatgtattaatcttgaaaatgtaaagttaagtaaaagaagtaaatctcaaaggattacatacagtataacatccttttggtaaaaataaaaacaactaaagtgaatatgtttgcatttacacacaattatatataatgtgcacatcatatataatctgtatacacaatggtgttacataaagaggcaataacactttataataaaggaagcaagtgaactaacacaggatctcagacattgattgccttgtgagagggaacaaggaggcagaaggatgggttggttatagtcaaggtcttagcttttgttttagatggtgttttcaagaatacttgctgcattaytaaaaataattaggctgggtgtggtggcttacgcctgtaatcccagcattttgggaggccaaggtgggtggatcacgaggtcaggagatcgagaccatcctggctaacattgtgaaaccccgtctctactaaaaatacaaaaaattagctgggtgtggtggtgggca

SEQ ID NO: 559019 - DNA, 567 bp, Homo sapiens
tatacatacagttttttttctttctttctttcyttttttttttttttttgagatggagtctcactctgtctccaaggctggagtgcagtggcgcgatcttggctcactgcaacctccacttcccgggttccagtgattcttctaccttaacctcctgagtagctggtatgacaggcatgtgtcaccatgcctggctaatttttgtatttacagtagagatggggtttcaccatgttggccaggctggtctcgaactcctgacctcagttgatccacaagtcccagtctcccaaagtgctgggattacaggcatgagccaccgtgcctggccgaatatctttatctactaacacctacactccttatttggtggggaatggcataccagttctccccacatgctttccagaaggctgattgagtggaacacttggagctgatgacttggatttacataagtctcatcttactaacacatcaaggcttttggatttaaacctcttcagcatcctctgtatccctaaggaatgcagtttctgcccctcttatccctgagtatagaggaga

SEQ ID NO: 559020 - DNA, 567 bp, Homo sapiens
tatacatacagttttttttctttctttctttccttttttttttttttttgagatggagtctcactctgtctccaaggctggagtgcagtggcgcgatcttggctcactgcaacctycacttcccgggttccagtgattcttctaccttaacctcctgagtagctggtatgacaggcatgtgtcaccatgcctggctaatttttgtatttacagtagagatggggtttcaccatgttggccaggctggtctcgaactcctgacctcagttgatccacaagtcccagtctcccaaagtgctgggattacaggcatgagccaccgtgcctggccgaatatctttatctactaacacctacactccttatttggtggggaatggcataccagttctccccacatgctttccagaaggctgattgagtggaacacttggagctgatgacttggatttacataagtctcatcttactaacacatcaaggcttttggatttaaacctcttcagcatcctctgtatccctaaggaatgcagtttctgcccctcttatccctgagtatagaggaga

SEQ ID NO: 559021 - DNA, 573 bp, Homo sapiens
ttttgtcctgtatccataataacccctgtcccccaamtgtctttctcttctctatttctaaagaaggttacatttggcaggaagggcctctgctctgtgcagctagcttttaggctccttgcaaactcactgtggaagtgtctgggaggttgttcattcttcctcaatttcctgttcaaccatttggccattcaatatacatatatttggtatttttgttttttttgagatggagtctcactctgtcacccaggctggagtgcagtggtgcaatctcagctcactgcaaccttggcctcctgggttcaaggcattctcctgcctcagcctcctgactagctaggattacaggcatgcaccaccactcccagctaatttttgtatttttagtagacacggggttttgccatgttggccaacctggtctgaaactcctgtatggttatctgcctgcctccacctcccaaaatgctgggattacaggcatgagccaccacaccccgcccacaatatatatatattttttaaaaacttctgtctttcattctcctggctgaaggttaaacaagatga

SEQ ID NO: 559022 - DNA, 585 bp, Homo sapiens
tggtgctcaaaaaggtttgaattttggaacatttcagattttggatttttgggtttcagatgctcaacctgtataggagcccaaaagctgcatttaaacataaacaaatacatgtaattgagttgcatgttttctgactccagaccctcagttcctcaagatcaagaaccaagtctttcattctgcatattcttaatgagtacccagtatataagaggcaactgagagtttcttgaattagtacttgatgtaacagtacaaaaacactaacaaacacatccttgtttttatcacataagaagctggcatagagtatgttcaggagggcagaatgcctgcctttgaatcctgggtccactgacaactttcttatcttcagcagtttatgtaacttctctgtgtgcctcactttcctcatctgcagaatgggatactagtagtagggacttctaggggttgtagtgagcactaagtgtgttttaggcatgtaagacacttcaaagaatgtccagccaatagcacaygctcaataagcaatggttactattatcagctttacaaatattacatacaagattttattac

SEQ ID NO: 559023 - DNA, 547 bp, Homo sapiens
ttacaagtgggagctaaaagataagaactcatgaacacaaagaaggaaacaacagacactggggtctacctgagggcaatgggtgggaggagagggaggagcagaaaagatacctattgcgtactgggcttaatacctgggtgatgaaataatctgtacaacaaacccccgtgacacaagtttacctatgtaactttcacacgtacccccaaacctaaaataaaagtttttttaaaaagctatagtatcaaatataaattaaagcagtaaaatataccactttttgtgaaagatgcagaaaacaaaacggtagcaaaccaaatctaacaacatataaaagaatgatacaacacatccaartgagatttatcccaggaatgcgagacaagtttaaaatataaaaattaattaatacaatacatcacattaatagaataaaggacagaaaagcatatcattgtcctaatagatgcagaaaaactatttgacaaaatctaatacatattcatgattttaaaaaattcaacaaacaaagcatagaaagaaa

SEQ ID NO: 559024 - DNA, 557 bp, Homo sapiens
cccagactggagtgcaatggtatgatcttggctcactgcaacctccacctcccaggttcaagtaatcctcatgcctcagcctcccaagtatctgggattacaggcttgcgccaccacacctggctaattttgtatttttagtagagatgaagtttcaccacattggccaggctggtctcaaactcctgacctaaggacatctgcccacctcagccttcaaaagtgctgggattacaggcgtgagccaccacacccaacctctctctctctttctttcttctttctttctttctctctttctttcttctttttttttttttattgatcattcttgggtgtttctggcagagggggatttggcagggtcataggacaatagtggagggaaggtcagcagataaacaagtgaacaaaggtctctggctttcctaggcagaggaccctgcagccttccgcagtgtttgtgtccctgsgtacttgagattagggagtggtgatgactcttaacgagtatgctgccttcaagcatctgcttaacaaagcacatcttgcactgg

SEQ ID NO: 559025 - DNA, 615 bp, Homo sapiens
acttcacatgaaatctgacttgcttctggactccgcagcccattataatgcttgtcagctctatttaaatagctcctctcaagttgacttttaggctttttttaagtgttgatattgaagatttctgaagcaaagcaaaaacaaaactggtgttactgatatccaactgtgtcatctgtaaaagtgaagaaaatagtatactttcttcctttctcttgctttcattttttttctaaaataacccccctccccccatgaatcacttattttttcagttgacaaagtctaaaattctgcttcccactttgggattgatatttgaattccttattgcatctcaaacctgtgaattgtttcaggaattatttccatgtctttgttatatgttctttcagagaaaacgaatcacaacacagtagctggtaacaattaatagtacaatattagaaagctcttcatctcaaaggagggcagagtgttggcaaagactattatgcaaataattgcctcttctctgaaaaatatcaccttctgcacactaggaaatcagcatccatcacaccatgacaaaaagtagagcctctttyctcatcaccagcacggctgaagcatgaa

SEQ ID NO: 559026 - DNA, 352 bp, Homo sapiens
gttattatccctattttacagatgagaaaactgagtggcaacgtaaaacaaaacaaaacaaaacttgcctaagtgtaaatagctatgaagaagcagatcaagaattcaaagttgatctgtctgattccaaagtcctggttttctctgaaatgcagcttgaattattggggatggaggagggatttaarcttattttcagttctagagatgagttgctgtatagagacaaccatttagatgaaaatcacaagacttacagtctagaaaggcaggttttatttctggttcttctgtgaacctatttgggataacccccaccccccgagacctcagttccctcataaagatgagc

SEQ ID NO: 559027 - DNA, 549 bp, Homo sapiens
  misc_feature 367: n = A,T,C or G
gaaccctcaagaagaagccacactgggcaacaagagggtggccccaygtgagggacagggggaccgaatcgcttttcctgatttcctattttagcctcactctcttctctcctcaaattcttaccactccctttatcctctctgactcacctcatggcccagttcattaaaggggacagaaggtggaggcagattgagaaaccagcagtgggcagacatttttatttttaatgtgaaatgtctctttagggggctcatggttgatgtgcttgagagagtactctgggagaaaaaaatactctactaatatataatgcttccagcatgtatttattttcacttagaatattattgtagcagttcctcntagataaggcaccttgggaatgatgttatcagaaattctacatccacataattctcttttcctgttgttttggttagacttgggtggtgtggtatagctttgcccacctctcccctggtagttgttggatgcattaaattctacaaatgtgattttataaattagttgccctcctaatggcc

SEQ ID NO: 559028 - DNA, 549 bp, Homo sapiens
  misc_feature 367: n = A,T,C or G
gaaccctcaagaagaagccacactgggcaacaagagggtggccccatgtgagggacagggggaccgaatcgcwtttcctgatttcctattttagcctcactctcttctctcctcaaattcttaccactccctttatcctctctgactcacctcatggcccagttcattaaaggggacagaaggtggaggcagattgagaaaccagcagtgggcagacatttttatttttaatgtgaaatgtctctttagggggctcatggttgatgtgcttgagagagtactctgggagaaaaaaatactctactaatatataatgcttccagcatgtatttattttcacttagaatattattgtagcagttcctcntagataaggcaccttgggaatgatgttatcagaaattctacatccacataattctcttttcctgttgttttggttagacttgggtggtgtggtatagctttgcccacctctcccctggtagttgttggatgcattaaattctacaaatgtgattttataaattagttgccctcctaatggcc

SEQ ID NO: 559029 - DNA, 549 bp, Homo sapiens
  misc_feature 367: n = A,T,C or G
gaaccctcaagaagaagccacactgggcaacaagagggtggccccatgtgagggacagggggaccgaatcgcttttcctgatttcctattttagcctcactctcttctctcctcaaattcttaccactccctttatcctctctgactcacctcatggcccagttcattaaaggggacagaaggtggaggcarattgagaaaccagcagtgggcagacatttttatttttaatgtgaaatgtctctttagggggctcatggttgatgtgcttgagagagtactctgggagaaaaaaatactctactaatatataatgcttccagcatgtatttattttcacttagaatattattgtagcagttcctcntagataaggcaccttgggaatgatgttatcagaaattctacatccacataattctcttttcctgttgttttggttagacttgggtggtgtggtatagctttgcccacctctcccctggtagttgttggatgcattaaattctacaaatgtgattttataaattagttgccctcctaatggcc

SEQ ID NO: 559030 - DNA, 419 bp, Homo sapiens
ttatctcattcttttttatggccacatagtatttcatggtgtatatgtaccacattttctttatccaatctgtcatcgataggcatataggtgattccaagtctttgctcttatgaatagtgctgcaatgaacattcacattcatctgtctttatgatagagtaatttatattcctctgggtatatacccggtaataggattgctgggttgagtgttaggtctgtttttagctctttgaggaatcactggactgctttctacaatagatgaactaatttacagtcccaccaacagtgtgtaagtgctcccttttctccacaacctttccagcatctgttattttttgacttttttaaaaataatagccattctgkctgagatgagatggtttctcgttgtggttttgatttgcatttct

SEQ ID NO: 559031 - DNA, 556 bp, Homo sapiens
ccactccagctttcttctgattcttattttcatgataygtcattttccacacttggtttttggactagctctttacaattaaagagcatgtatagtaaaaagaacataattgggctttgatttttattcagcttaataatctctgccttttctgtgcaatgtttaatccctttatatttaatatgcttaggagtatattaaatatattttcagttcagtttaagtgtaccataatgctgtgtattttctctctttgccatatcttcttcattcttttttcttcctttctttccttcttttggataaatggaacattcttattattatctattcctctaagtttaaattttttcagttgttctaggatttgcaataaccctctttaacttaccaccttcaaccatgtgtattatataacttcatggataatgcaagaaacttagaacagtatactaccatttatttcctacattatttatgtgattattattatttagaaatttttacttttacatatgttaaagtagcaatacattgctatcattttgcttcaagt

SEQ ID NO: 559032 - DNA, 556 bp, Homo sapiens
ccactccagctttcttctgattcttattttcatgatatgtcattttccacacttggtttttggactagctctttacaattaaagagcatgtatagtaaaaagaacataattgggctttgatttttattcagcttaayaatctctgccttttctgtgcaatgtttaatccctttatatttaatatgcttaggagtatattaaatatattttcagttcagtttaagtgtaccataatgctgtgtattttctctctttgccatatcttcttcattcttttttcttcctttctttccttcttttggataaatggaacattcttattattatctattcctctaagtttaaattttttcagttgttctaggatttgcaataaccctctttaacttaccaccttcaaccatgtgtattatataacttcatggataatgcaagaaacttagaacagtatactaccatttatttcctacattatttatgtgattattattatttagaaatttttacttttacatatgttaaagtagcaatacattgctatcattttgcttcaagt

SEQ ID NO: 559033 - DNA, 556 bp, Homo sapiens
ccactccagctttcttctgattcttattttcatgatatgtcattttccacacttggtttttggactagctctttacaattaaagagcatgtatagtaaaaagaacataattgggctttgatttttattcagcttaataatctctgccttttctgtgcaatgtttaatccctttatatttaatatgcttaggagtatattaaatataytttcagttcagtttaagtgtaccataatgctgtgtattttctctctttgccatatcttcttcattcttttttcttcctttctttccttcttttggataaatggaacattcttattattatctattcctctaagtttaaattttttcagttgttctaggatttgcaataaccctctttaacttaccaccttcaaccatgtgtattatataacttcatggataatgcaagaaacttagaacagtatactaccatttatttcctacattatttatgtgattattattatttagaaatttttacttttacatatgttaaagtagcaatacattgctatcattttgcttcaagt

SEQ ID NO: 559034 - DNA, 399 bp, Homo sapiens
aaccaggggctgaatcctactgactgcactcgctatgttttgtccaggtggcacggtgcctgggaagcaactgcagggctgttcctccagcagtttatgaactcaagaagtaaaatgagaggagaacccagggggcaccaggctgctgcctcttggttttggttcaaaaaaaaagaaaagaagaacaatgataaatgtattacagtcagtaaccgtttctgatttacactcaaggtggtcttgctatgatctcaaagcgctcttccagcaaacagcactgctattaaaacctgttggtgatacaaattgtttaagaataaaaatcggctgggtgtggtggctcacacytgtaatcctagcactttgggatgctgaggcgggtggatcacctgaggtcag

SEQ ID NO: 559035 - DNA, 569 bp, Homo sapiens
aaatagcctcaaaagggcaaatctaaactactggccttaaagaggaggtaaaaagagagattagggtagaagtttattcaaaaggataataagagagcttcccaaacttagagaaagatatcaatattcaaatacaagaaggttatagagcaccaagcagatttaacccaaacaaaattgcctcaaggcaattactaatcaaactcccaaaggtcaaggataaagagaggatccaaaaagcagcaaaagaaaagaaacatacaaagaagctccaatatgtttgcagcagacttctcagtggaaacctcacagggcaagagagagtggcatgacataataaagctgctgaaggagaatgcaacatttaaaacttcctataattcaattttattaagagtaaatcaacactttaaaaaaatcttgggctgggcgcagtggcttacgcctgtaatcccagcattttgggaggcccaggcaggtgaatcatgygaagtcaggagtttgagaccagcctggccaacatggtgaaaccccatctctaattagccaggcgtgatggtgcatgactg

SEQ ID NO: 559036 - DNA, 511 bp, Homo sapiens
atgctgttctcataggaaaaaaatcatgctacttcgaattgcttttctagcaatgatgacggatttgcattgcaaatggacccccctcacgtagcttcctctgtggacaacagtgttcatttgccagatgattggatgaggttaggcatacagttcatgaacatggggaagaaaaccaactaatgcatgtgaacgaccaatctgtgactcatctgtactacacataaaccagatgaaccaatgggtcataggctgaaacagaggaagagcaaagaaacaaaggctttacttctcattcttcagctgtttttgcccactggcaacatgaagcttaggctttcagaatctcaaggaaacaacattgtctactgttaaatgattgttaattgttaggagtattttctggcatctttgtgagtatgtcatacccagctaaactctttttttttccttcttaamctttttttttttttttttttttgagatggagtcttgcactgttgcctgggct

SEQ ID NO: 559037 - DNA, 500 bp, Homo sapiens
ttgaacctgcactgattcttcttttcctatcttctcagcctatcaagatttacactgaaaaataaacaggtctgttgcttgcagttagttttatccacttctcaggacttttactcaattttttgaagctatggagaaaatgmaaaataccattcacatttttaaataattagtgtaatcttctttattaaggtcttcctgattttctcttgtcactataaacttttcctttaatctgaaaccagaaactatgtattttactaagaaaatttcatagtaagttcataatacttttggtaatgtgtaaagtctgcctgttcctgactttgatactgtaaacagattttccaataattcttttttgtgtgtgtgtgacagagtttcgctcttgttgcccaggctggagtacaatggtgcaatctcggctcactgcaacctccacctcccggcttcaagcgattctcctgtctcagcctcctgagtagctggggactacagcc

SEQ ID NO: 559038 - DNA, 551 bp, Homo sapiens
tgaacctaaaataaatgtttttttaaacaagattgtaaagtgtagcatgcagttatattgcgatcgagttctaatattataggtattaaaaacagaggaaacacagagagtaaaactaattctgagaagacgcttataattatgtgatcttggtaaaactcatgtctcagcttgttaagttaaaaaaaaatgatgtaaaatgctggcattggactaaatcctaatttccttcctgggtgtcagatttagctgactctttctcctgcctgaagtgctctccttatacagcttgttccacttttatgatgctattcatccttgagcaattgtgggatagatcagtgtgaagtgtatcatttgtttttaacctgctctggttgtcagtggaaacyacaatataaggggtaaagacacccagaattgaagtgtgcaatattatacacaacattaatatgaaagcagtgccaaaatggcaaaatgaggtggtgaaaagaggcgaccacccagaatcctgcagtacttagtgttaatagatatttacaaacttacta

SEQ ID NO: 559039 - DNA, 473 bp, Homo sapiens
tctttatgattatcaatctttaayatttttgaggtccgttttatgggccagcttatggacagcttttgtaagtgttctgtatgtaataaaaaagtatgtgtggccaggcgcagtggctcacacctgtaatcactttaggaggccgaggcgggtggatcacctgaggtcaggagttcaagaccagcctgaccaacatggcgaaaccctgtctctactaaaaacacaaaaattagctgggcggggtggcacgcacctgtaatcccagctactcaggaggctgagtcaggagaatggcttgaacccaggggcagaggttgcagtgagccgagattgcaccacttcactccagcctgggtgaaagagcaaaacttcatctcaaaaacaaacagacaaaaaagtatatgtattctgagctgagcacagtggtgtgtacccgtaatcccagctacttgggaggcggaggtgggagagtc

SEQ ID NO: 559040 - DNA, 474 bp, Homo sapiens
ttaagaccaggtgcagtggctaaagcctgtaatctcagggctttggaggcaggcagatcactcaaggtcaggaattccagaccagactggccaacgtggtgaaacctcctcactagtaaaaatacaaaaattagccaggagtggcagcgacagcctgtaatcccagctacttgggaggmtgaggcacgagaatcgcaagactgggaggggaggttgcagtgagctgagatcacaccactcactgctctccagcctgggcaacagagcaagaatttgtctcaaaaacaaaaacaaaacaaaacaaaacaaaaacacctttccttttaacaaactaaaaatcaaaactttgctcaaagtgcactgagaaagcttcattaaataaatttaatataaaaatttcagcttaattaaattttaagccatacacaaaagccaagaaaatttgttaagttaggtaaatgcattcattgtgaa

SEQ ID NO: 559041 - DNA, 474 bp, Homo sapiens
ttaagaccaggtgcagtggctaaagcctgtaatctcagggctttggaggcaggcagatcactcaaggtcaggaattccagaccagactggccaacgtggtgaaacctcctcactagtaaaaatacaaaaattagccaggagtggcagcgacagcctgtaatcccagctacttgggaggctgaggcacgagaatcgcaagamtgggaggggaggttgcagtgagctgagatcacaccactcactgctctccagcctgggcaacagagcaagaatttgtctcaaaaacaaaaacaaaacaaaacaaaacaaaaacacctttccttttaacaaactaaaaatcaaaactttgctcaaagtgcactgagaaagcttcattaaataaatttaatataaaaatttcagcttaattaaattttaagccatacacaaaagccaagaaaatttgttaagttaggtaaatgcattcattgtgaa

SEQ ID NO: 559042 - DNA, 474 bp, Homo sapiens
ttaagaccaggtgcagtggctaaagcctgtaatctcagggctttggaggcaggcagatcactcaaggtcaggaattccagaccagactggccaacgtggtgaaacctcctcactagtaaaaatacaaaaattagccaggagtggcagcgacagcctgtaatcccagctacttgggaggctgaggcacgagaatcgcaagactgggaggggaggttgcagtgagctgagatcacaccactcactgctctccagcctgggcaacagagcaagaatttgtctcaaaaacaaaaacaaaacaaaacaaaacaaaaacacctttccttttaacaaamtaaaaatcaaaactttgctcaaagtgcactgagaaagcttcattaaataaatttaatataaaaatttcagcttaattaaattttaagccatacacaaaagccaagaaaatttgttaagttaggtaaatgcattcattgtgaa

SEQ ID NO: 559043 - DNA, 614 bp, Homo sapiens
tgtgaataaattataaagttttgtattctgtttttcagctttatcacactggccacattttcctccagattgtttgttttatctgtcagtttctgcaattttcccttccttgcattggtttgcaacttacttttgtagctcaatgaagcttatttctattcacattctgaattctatttctgtcttcttaggtcttgctggaaatgtaggttggttatttggattaaataagtcactctagcttttttttttttttccccagcagttttgcattgattttgtctcatctttgtaggcatatatttgaggttgctgaactttgaatgaagattttttaatcatattttgatgttcttgagtatctgattgtggcataaggtgctttcatccaacaggctttgttcttgggagaagtttttatttttttatttttattttttatattttttgtggaggggttgggggaagtgctcagctcacaactcagaggcttcatactcagcgggaattgtattgagccccaactctctyccctgtctctttgatatttggagtctgccaccctgttggactaagtttctgcagcttcagcagagtgctagtggatatggagt

SEQ ID NO: 559044 - DNA, 640 bp, Homo sapiens
accaacccccaatattttaacataggttcttttctattttccctaagtgtcagtgggtctgagaaataaagagaaagagtacaaaagagataaattttaaagctgagtgtcttgttggtcatgtcagcaggttctgtgatgccccctgagctgcaaaaccagcaagatttaattagcaattttcaaaggggagggaatgtacaaatagggtgtcggtcacagagatcacatgcttcccattttaagggaaagaaaaagctgaacctcttattcaaagtagaatgatgattctcattctcctgataagaaacaaaataagtagcctccagrcattcccttccaccagaggagcagttgttttttaaatagccctttggtgcccagtctattactaaaccatatgagcctttttttcatattactgcatgtgagttaacacaatcatcccaaactaaagttttagatgggccctcaaaatttttagggcatgcttttcctgcaggtttatattgaaagtatgaggcatctcccattactccccctttcatttgttttaaaggagaaagggagaggccagagaccaaatgccccggttcctctgtagctgatctctccagaagataagcagcccagactagag

SEQ ID NO: 559045 - DNA, 257 bp, Homo sapiens
ctagacctagtgactcacttttgataaatacagtatagcaaatgtgatgggatgttccttcctgaagatgaaaggccatggctttcaccctaagcattctttcttgctttcatgctctgagggaagctggctgtcatgctatatgccccatggagtggctcatatgacaatgaactgaggtaggtctctggccaacagctagcaataaactgagtccttcagtccagtsactagcgaggaactgaaactgttaacaa

SEQ ID NO: 559046 - DNA, 586 bp, Homo sapiens
actgtcctacactgagccaaggcaaaagggccatcaggtgttaaaggtagaacaggacacaggcatttttgttttccaggtatttctaaaaagcaaacagactactattagcctttcaacagtaatccttgtgkttttttttcagccatttcctgcagtcttaagggtcctctcctccaaataacactccacgtaaaaaaatctcatttaaaaacacaccttcaccactaatttaattcctccttctatgtttagaagtctgaggaagggatgggcgtgtcaaccttataattaatgacccctgtcattttgtatttcctctggctttgcacatatttaatgaatgtgcttgatgtaaaacagataaacgctttcccgggcagcttcaggccatgggtttctatggtatattccaggtttttgtttcattgacaattttaagttggtaccaaagctttctcactctatgcatttgtttttccttcttcaaaggaaagaaattcaaatcagtgttcgagatcttaagtggtttaaaagagatacttgtaattttagataatgcttttaggagctctgataagacaca

SEQ ID NO: 559047 - DNA, 491 bp, Homo sapiens
cctctgcaacctgtgagagccacctcttgctcacactcttggccctctgtgacctccttctctgatgtttgccagaactccaagttagtgtggggacaagaatttccatatatgatttcaagccaatgtgaggckatggaagaagctttaagcttaaagacataaaatccaaatcagcacgcaagaccccacatcttttgtatggtcttattgataagttattgactttttatgagcctcagttgcctcattggtaatatgggaataatcacattggttctttacatatcatagagatgctctgagaactagaagagaatatggaatgtaaaaagttaaccctaggccagacatagtggctcatgcctgtaatcccatcactttgggaggctgaggcgggtggaccacaaggtcaggagtttgagaccagtctggccaacatggtgaaaccctatctctactaaaaatacaaaaattagccaggagtagtg

SEQ ID NO: 559048 - DNA, 571 bp, Homo sapiens
ggactgggattctaatttgcaaagaagattacttttttatttaagtaacttctcatccattgagaaaatgagctactatattctaaaattaataccctaaataagatacttttgttcatgtcaaccttacaagcatacgtttcagtattaaaattactgtaatctcttgtctgttagtgagaaagtacaacaggttatgtggaaaagaaaataaagaagcagaggttactatttactacattctgtatggcaggcactgtactgaatgctttgaatatcttctctcattggaatcatttcaacaatatgaggtaggtgttataaaggcccgtgttattgatgaggacactgagggtcagtgagattgtgtacctttactaagatcatacactgaataagtggaactaggatttggacacaaatatgtttgactttcagccccttcttgtaactataatgccaataatatgcctttaaaaaaaatcaagcatctgttaagcactaactaagttccaggcaaggaacatgctgctaacggcacaaaasgggaactagatgaggttcctgatgc

SEQ ID NO: 559049 - DNA, 540 bp, Homo sapiens
tttgtaaggacactggctctatcagcttttaatgtttaacttaaccacttagtgctgaaacaattgttctagaggcctgactgctgactgttcagccattaggaagacctggcctgccacagtgtcataggactatctccttagtttagctaaacatgggggatccttgtcacacagccatgaaaaataagtctcgcagacaatttgaaggggaagaaaaatggaatttattggacaaaaaggaaagaaaagggaaacagggacacgtcacaaacccagagagagaatcctgctaktatatgcttcccacatcacagattaaatcccaggttccacgcaggaagaggaggggccaggctcttccccactgcaattggtgcatatttttgtggctcccccacagtgtgcattcctcccagtgcacaggctggttggagtttctcaggggacccctttttacccggctgtctcaacagtactcattagttatttttcctgatcctctccctcctcccaccctccaccctccaaaaggcctca

SEQ ID NO: 559050 - DNA, 521 bp, Homo sapiens
ggaatcaatgagaccatgacctcctgtggcttgttttttaagctatcagagtgtgagccctggaatagcagcataatgaacatctcctaggaacttgataaaaatgtagattatctagactcacaccaacctactaaattagaaattctggcagtagaaacctatgttttcccaagttccttaagtgattctgatgctcacaaaactttgggaagcacttcttagagcactgaaactcttcaaggatccaagacccagaatcaccctttcctatttcaccagcttccacaatttggtcatctgcccagtcctgaaacaatcacagtcaaggaggwtggaattaccatcgctgaatttacattcattatctgatagagaataatcaaccatgtctataaatcttcattctatccctttctctctccctttctctccttctctctctcctctccttctctctttcctctttctctcctttctctctctctctttcacagtaatacaattcaatacactcatat

SEQ ID NO: 559051 - DNA, 602 bp, Homo sapiens
gaaatgaatgatactttcaaaaattaaatatagatatttaagtagatgtctacaaaaaataattaggggataaatgttccacagtgtttattaagtatatttttctgcaaaatggaccaagtaggtggattttaaaagtctgcttttttcatttttcacatttctttaaggaacagaaataatgtttgccattggtagaaatctcattttaattttacagaaatacaataaaactagcttttagatcctcttttcttaccctaaactttcacaagggtttgatcagtgtgtgagggrtggtgttgtggaatggagcagagctggtcaatgtgttagcaaacagcctcccaagcagcaggcaccctaccctcccactgaaccaacttttccatgtcagccctgtatgctgcatgatttgtctttggtagaaatcctgggaaaatcaagtgactttcctttacttcattttgcaggtgagcccagaggttcaactttcatcacctttttgggaagtaagattctcctacttctactttcaggagtgagctcaaagtcccagcaggcaaaaagcctgcaacattgtgtgggttttacagccagga

SEQ ID NO: 559052 - DNA, 605 bp, Homo sapiens
ctgggcccgtgtagaacccctgtccctgtggtcgtgagcaatctcctactgtgctatacctatataatcaatgaatgtttcgatgtgaaaaaggttggaaaccatggccaggcaactctagaaagggaaaagatgaaaatggtttgaataagtcagaaaaaaatgtatgaataggtagatttttaaatgcacagtcttgagagaakcacagaatttaaaaaaaaaaggaaaataaattccataagaggagaacagcaagagacaaaattaggagtgcaggattagaaggtgtgaaggaaacagtagtgtggctgacattctggaggggcatgtctgggccaggagactgcaaccgaagcccatttcatggtcagagaggcctggagatgggggttggctagaaggcaagagaaaaaggtggcctctgggtaacgatgtaacaggatgaatgtgtggtttgggaaaatgcactattaactgcatgcaggactgatggaaggaaaaggtaatggagtcaacaaaatctgatcagggtctttctgaagttatacttcttaggttttcatcagaaaaactttggcttggaaaagatacagctttaattt

SEQ ID NO: 559053 - DNA, 521 bp, Homo sapiens
actttaatattcaaggagaactttccatatgaaaagttcttgattcttcactcaaagacaaaaaaatggataattctgattcagttgggattacccacatgattaccactgtacctcaatttgttttgtaaatttagataagaataacacctattctgtagggttattctaagcmttaaataaaataacatttgtaatgttcttagagtagctcctgagacacggttaagtgccctttattgttggttttgttgtttctgaattattttagttgttatcattattcattattattatttattctcattactatgggacaggttagaccaaagtcatatattattgatgttattaaactggttctacagaacactacaagcttatcagtatcagaggatgtgtttagtaatgaacatggctttccagtttaggccatgatcagcataaaagtggtggtgtgactttggacttagaaaatgtcctgatggtatatcaactttgattatgaatgttgtgcatgg

SEQ ID NO: 559054 - DNA, 553 bp, Homo sapiens
aattaaattcagttaattaatgatgatgttgagttgtactatatccttaccagttttctgactgctgaatttgtctatttctgacagaggggtgttgaagtctccaactctaacagttgrtttagctatttcttcttacagttttatcagtttttacctaattttttaaacatgtatttgttaggccaatatatttaggagagttatgtattctcggcaaactgatcttttgttgttattgttatgtaatgcctctttatccctgataacatttcttgctctgaaattggtcctatctaaaactaatacaggtactcctgctttctttttattagtattagcatggtattatctttctcgatgaatttacacttaatccatttatatctttatattaaaagtgtgtttcatatagataacatacagttggatcttttttttttagcaacttttttttttaattatactttaagttttagggtacgtgtgcacaaagtgcaggtttgttacatatgtatacatgtgccatgttggtgtgctgcacccattaact

SEQ ID NO: 559055 - DNA, 553 bp, Homo sapiens
aattaaattcagttaattaatgatgatgttgagttgtactatatccttaccagttttctgactgctgaatttgtctatttctgacagaggggtgttgaagtctccaactctaacagttgatttagctatttcttcttacagttttatcagtttttacctaattttttaaacatgtatttgttaggccaatatatttaggagagttatgtattctcggcaaactgatcttttgttgttattgttatgtaatgcctctttatccctgataacatttcttgctctgaaattggtcctatctaaaactaatacaggtactcctgctttctttttattagtattagcatggtattatctttctcgatgaatttacacttaatccatttatatctttatattaaaagtgtgtttcatatagataacatacagttggatcttttttttttagcaactttttttttwaattatactttaagttttagggtacgtgtgcacaaagtgcaggtttgttacatatgtatacatgtgccatgttggtgtgctgcacccattaact

SEQ ID NO: 559056 - DNA, 543 bp, Homo sapiens
taaaggttaagaaaatgtatactggaagcggtactgtaacgcagaaacctgctgtcagtgtaaaatggtgtcttgggtttgtatagcactcgaataactgcaattggcactagtttatttttaaaatttttaaaaatcacctttctcasgttgaatatactatttcagtttgataaaaatatcccagtagtatttattaaataaaatcatttacaatggtttctttctaattctaaaagcttaattctatgttaaagtttgacttacatcttgagaccttaaaagatacagaagtgtactcagttttacagaatagagggtaaaaattagagaattatctcttttgcattacaagccattttgtataaagaaaaatacagagccagagaaagacattttattaggaacattaggccaggtgcagtggctcatgcctgtaatcctagcactttaggtgactgaggcaggtggatcacttgagcccaggagtttgagaccagtctgggcaacatggtgagccccatctctactaaaaatacaaaa

SEQ ID NO: 559057 - DNA, 543 bp, Homo sapiens
taaaggttaagaaaatgtatactggaagcggtactgtaacgcagaaacctgctgtcagtgtaaaatggtgtcttgggtttgtatagcactcgaataactgcaattggcactagtttatttttaaaatttttaaaaatcacctttctcaggttgaatatactatttcagtttgataaaaatatcccagtagtatttattaaataaaatcatttacaatggtttctttctaattctaaaagcttaattctatgttaaagtttgacttacatcttgagaccttaaaagatacagaagtgtactcagttttacagaatagagggtaaaaattagagaattatctcttttgcattacaagccattttgtataaagaaaaatacagagccagagaaagacattttattaggaacattaggccaggtgcagtggctcatgcctgtaatcctagcacttyaggtgactgaggcaggtggatcacttgagcccaggagtttgagaccagtctgggcaacatggtgagccccatctctactaaaaatacaaaa

SEQ ID NO: 559058 - DNA, 492 bp, Homo sapiens
gtggtaaggactaaatacccgaatgtatgcacagtccctaacatgtagaatttgagtcatcttcaccrtcatcaccaaatgttgatggagaatttatacacaccaggtaaagtcctaggatctggattcctaaagataaatgtaagacataactctcacccctgttccttttccctgagaaacaggcaatatccctctatcaccattatggagtcctcatggcttgcctgggggaggaagtaaaataaagatgcccaatggaaatatcatgataaacacccttccatgggcctctagtgctgtcagaagtcaagttcaaggtttagcactacaaacagactaattggcatatctagtctatttaacaagcaaacctattgattccagtgtgtgcctcagaatgacaaagatgggttaaattgatattcttcagaaaaatagtgccttaaagatcagagacaaaactatggatttcttgactcaaactgctgg

SEQ ID NO: 559059 - DNA, 467 bp, Homo sapiens
tcctcccactccactattatctcttctaatggttagatgatttcttagccagaattcttctgaaatcaaggattcctgtgattaatgcaggaatacctggtatcaggatgaactgtcacaaagaagtaaggcagtgagtgtttcctgctctttaaaccagccttgtttgtgtatgtgtctcagttgggctgctataacaaaataccatggactggctggcttatgaacagcagaaacttatttctcacagtgctgaaggctgggaagtccaagatcaagggactggcagattcagtgtctggtttctcatagatggctgtcttctcactttakcatggcagaaggggcaaggggtctgtttgtggatccattcatgaaactctgcccctatgacctcatcatcttccaaaggctctgcctactgataccatcatctcaaaggtgaggattcaacatgttaatttcat

SEQ ID NO: 559060 - DNA, 604 bp, Homo sapiens
ccccgagctcagaaggtcccctgcttggtgtcttaatgctctgccatgactatcttgaaattctcaatgatttttgggcaagttcccctgcatttcattttscactgggtcctgcaaattatgcagtgagtcctgcctgggacaaaggataatttaagaaagttttccatgactcctggggacagggcgtgctccacattgacctttcatggagggtggattgaaggacatgaaaggcaatgtccttccacccccacttccctgagccccacatgtacctggcatgttcctttataaacctgccattctccagctcctgcacccaggcctgttctaagccctgagaagcagggtgtgtgtcatctgtttagtgcacattgacccccaaatccctgcaactctacaaaggaccatgcacacagtaggggctccatggggcgtgctgaccccaacccgaaggccaggctgggtggaaagactgacggcccctgcaacggtccccttctgcagcctgggcaggaatggaggagagaagggagggagactgtgtgtgtgtgtgtgtgtgtgtgtgacagaggaagggagggggcgcataaaacagaaa

SEQ ID NO: 559061 - DNA, 604 bp, Homo sapiens
ccccgagctcagaaggtcccctgcttggtgtcttaatgctctgccatgactatcttgaaattctcaatgatttttgggcaagttcccctgcatttcattttgcactgggtcctgcaaattatgcagtgagtcctgcctgggacaaaggataatttaagaaagttttccatgactcctggggacagggcgtgctccacattgacctttcatggagggtggattgaaggacatgaaaggcaatgtccttccacccccacttccctgagccccacatgtacctggcatgttcctttataaacctgccattctccagctcctgcacccaggcctgttctaagccctgagaagcagggtgtgtgtcatctgtttagtgcacattgacccccaaatccctgcaactctacaaaggaccatgcacacagtaggggctccatgrggcgtgctgaccccaacccgaaggccaggctgggtggaaagactgacggcccctgcaacggtccccttctgcagcctgggcaggaatggaggagagaagggagggagactgtgtgtgtgtgtgtgtgtgtgtgtgacagaggaagggagggggcgcataaaacagaaa

SEQ ID NO: 559062 - DNA, 604 bp, Homo sapiens
ccccgagctcagaaggtcccctgcttggtgtcttaatgctctgccatgactatcttgaaattctcaatgatttttgggcaagttcccctgcatttcattttgcactgggtcctgcaaattatgcagtgagtcctgcctgggacaaaggataatttaagaaagttttccatgactcctggggacagggcgtgctccacattgacctttcatggagggtggattgaaggacatgaaaggcaatgtccttccacccccacttccctgagccccacatgtacctggcatgttcctttataaacctgccattctccagctcctgcacccaggcctgttctaagccctgagaagcagggtgtgtgtcatctgtttagtgcacattgacccccaaatccctgcaactctacaaaggaccatgcacacagtaggggctccatggggcgtgctgaccccawcccgaaggccaggctgggtggaaagactgacggcccctgcaacggtccccttctgcagcctgggcaggaatggaggagagaagggagggagactgtgtgtgtgtgtgtgtgtgtgtgtgacagaggaagggagggggcgcataaaacagaaa

SEQ ID NO: 559063 - DNA, 604 bp, Homo sapiens
ccccgagctcagaaggtcccctgcttggtgtcttaatgctctgccatgactatcttgaaattctcaatgatttttgggcaagttcccctgcatttcattttgcactgggtcctgcaaattatgcagtgagtcctgcctgggacaaaggataatttaagaaagttttccatgactcctggggacagggcgtgctccacattgacctttcatggagggtggattgaaggacatgaaaggcaatgtccttccacccccacttccctgagccccacatgtacctggcatgttcctttataaacctgccattctccagctcctgcacccaggcctgttctaagccctgagaagcagggtgtgtgtcatctgtttagtgcacattgacccccaaatccctgcaactctacaaaggaccatgcacacagtaggggctccatggggcgtgctgaccccaacccgaaggccaggctgggtggaaagactgacggcccctgcaacggtccccttctgcagcctgggcaggaatggaggagagaagggagggagactstgtgtgtgtgtgtgtgtgtgtgtgacagaggaagggagggggcgcataaaacagaaa

SEQ ID NO: 559064 - DNA, 484 bp, Homo sapiens
tctttagatctctattccagttcactaattcattatttagttgcatctaatctgttcatttcattccttgcatttctaatttattatatttttcacaattagaacttccagttggttcttyttcaaatctgcctggtaacttttaatagtctttgttccttgctcatattgttttttagaatcacaaaatgtggcagagcattggatctccccacatatttgttttatattatttttaggctgggggaataaacgactctgtttgtcctccctattaactttgtgtgtacgaattgttgctatttttgctattttcccaatcacagtaccttacattttgctttaaacttcatatattttcaggtgcctttccccaagttttattaaggtatacttaactaacaaaaattatatatatatttatggtatacaatgtgatgttttgagatatatatattgttaggtgattaaatcaaacctaata

SEQ ID NO: 559065 - DNA, 562 bp, Homo sapiens
cgcggtggctcatgcctgtaatcctagcactttaggaggctgaggcaggcagatcacgaggtcaggagattgagaccatcctggctaacacagtgaaaccccrtctctactaaaaataacaaaaaaaaattagccgggcatggtggcaggcacctgtagtcccagctactcgggaggctgaggcaggagaatggtgtgaacccaggaggcagagcttgcagtgagccaagatcgcgccactgcactccagcctgggtgacagagcaagactccgtctcaaaaaaaaaagaaaacatgtttaacatcactaatgatcagggagatgcaagtcagaaccacaaggcaataccaccttactcttgcaagaatggccacaatcataaaatcgaaaaataatcaatgttggcatagatattggtgaaaaggggacacttttacactgttggcaggaatgcaaactagtgcaaacactacagaaaacagtgtggatattccttaaagaactaaaggtaaaaaaaaaaaaaacaaaaaacaaaccaaaaaaaaaactaaaagtagatct

SEQ ID NO: 559066 - DNA, 562 bp, Homo sapiens
cgcggtggctcatgcctgtaatcctagcactttaggaggctgaggcaggcagatcacgaggtcaggagattgagaccatcctggctaacacagtgaaaccccatctctactaaaaataacaaaaaaaaattagccgggcatggtggcaggcacytgtagtcccagctactcgggaggctgaggcaggagaatggtgtgaacccaggaggcagagcttgcagtgagccaagatcgcgccactgcactccagcctgggtgacagagcaagactccgtctcaaaaaaaaaagaaaacatgtttaacatcactaatgatcagggagatgcaagtcagaaccacaaggcaataccaccttactcttgcaagaatggccacaatcataaaatcgaaaaataatcaatgttggcatagatattggtgaaaaggggacacttttacactgttggcaggaatgcaaactagtgcaaacactacagaaaacagtgtggatattccttaaagaactaaaggtaaaaaaaaaaaaaacaaaaaacaaaccaaaaaaaaaactaaaagtagatct

SEQ ID NO: 559067 - DNA, 562 bp, Homo sapiens
cgcggtggctcatgcctgtaatcctagcactttaggaggctgaggcaggcagatcacgaggtcaggagattgagaccatcctggctaacacagtgaaaccccatctctactaaaaataacaaaaaaaaattagccgggcatggtggcaggcacctgtagtcccagctactcgggaggctgaggcaggagaatggtgtgaacccaggaggcagagcttgcagtgagccaagatcgcgccactgcactccagcctgggtgacagagcaagactccgtctcaaaaaaaaaagaaaacatgtttaacatcactaatgatcagggagatgcaagtcagaaccacaaggcaataccaccttactcttgcaagaatggccacaatcataaaatcgaaaaataatcaatgttggcatagatattggtgaaaaggggacacttttacactgttggcaggaatgcaaactagtgcaaacactacagaaaacagtgtggatattccttaaagaactaaaggtaaaaaaaaaaaaaacaaaaaacaaacmaaaaaaaaaactaaaagtagatct

SEQ ID NO: 559068 - DNA, 562 bp, Homo sapiens
cgcggtggctcatgcctgtaatcctagcactttaggaggctgaggcaggcagatcacgaggtcaggagattgagaccatcctggctaacacagtgaaaccccatctctactaaaaataacaaaaaaaaattagccgggcatggtggcaggcacctgtagtcccagctactcgggaggctgaggcaggagaatggtgtgaacccaggaggcagagcttgcagtgagccaagatcgcgccactgcactccagcctgggtgacagagcaagactccgtctcaaaaaaaaaagaaaacatgtttaacatcactaatgatcagggagatgcaagtcagaaccacaaggcaataccaccttactcttgcaagaatggccacaatcataaaatcgaaaaataatcaatgttggcatagatattggtgaaaaggggacacttttacactgttggcaggaatgcaaactagtgcaaacactacagaaaacagtgtggatattccttaaagaactaaaggtaaaaaaaaaaaaaacaaaaaacaaaccaamaaaaaaactaaaagtagatct

SEQ ID NO: 559069 - DNA, 597 bp, Homo sapiens
ccttggcctcccaaagtgctaggattacaggtgtgagccaccgtgcccagcctgacattacaaatcctttttatctgctaaagttccctgaacacaactactaggtactttactagttgtatcaagccagtgcaagatatamaatttaatttattttaaaacatcataccatgtggaggtttctactaatttagttgagctttcccaaattataccaaatcagtgaggctgacaaatatcatatttttgtaaaagaaatggaatattttaattaaagttacttaaagagatatttgtgagagtctaaaatggatcagagcttttaaagccatgaacaactcagcagacattggtttctgggtaccatgtttgagtagattattcagaagaatcatcctgcttaaaaccaccacaaattcagaatgaaacataaaatatgttatctttaaagcattaaagcacagacaaaattttcaggattaagaggacaaaaatctaagtgaaagccaaccaggtgcagtggttcatgcctgtaatcctagcactttgggaggcccaggcaggattgcttgagcccaggagtttgagaccagcctg

SEQ ID NO: 559070 - DNA, 597 bp, Homo sapiens
ccttggcctcccaaagtgctaggattacaggtgtgagccaccgtgcccagcctgacattacaaatcctttttatctgctaaagttccctgaacacaactactaggtactttactagttgtatcaagccagtgcaagatatacaatttaatttattttaaaacatcataccatgtggaggtttctactaatttagttgagctttcccaaattataccaaatcagtgaggctgacaaatatcatatttttgtaaaagaaatggaatattttaattaaagttacttaaaragatatttgtgagagtctaaaatggatcagagcttttaaagccatgaacaactcagcagacattggtttctgggtaccatgtttgagtagattattcagaagaatcatcctgcttaaaaccaccacaaattcagaatgaaacataaaatatgttatctttaaagcattaaagcacagacaaaattttcaggattaagaggacaaaaatctaagtgaaagccaaccaggtgcagtggttcatgcctgtaatcctagcactttgggaggcccaggcaggattgcttgagcccaggagtttgagaccagcctg

SEQ ID NO: 559071 - DNA, 499 bp, Homo sapiens
agatactttaaaaaggtaattttttattactatttctttcaaaatttgtgagcgctttgtattaaaaaaaaaaacactctctaattggataactttgtggacgacaacgctgtgctttcagcttttacatctttaaaatgggtttttgtgaagattaaaccaatgatatttgtaaggtacgtagtgcagagtctaaacccaaacaagcattgggcgttaagtgttaagtgttaaaccagattgccatgtagcctcattacttgaccgcacttttcatgtgwgcatgtgtggaatcaggaatcagatataataagacctctctgcagaaaaaaaaaaaaagtggggaggagggagaggcgcaaattacatattttgtcctttttactgtctctgatctattactgatccagggtgcatgcacatgtaaaacatcgaattgttttgtaattacaaattaaatgttttagagaagtctctcatttttatgacttattttatt

SEQ ID NO: 559072 - DNA, 499 bp, Homo sapiens
agatactttaaaaaggtaattttttattactatttctttcaaaatttgtgagcgctttgtattaaaaaaaaaaacactctctaattggataactttgtggacgacaacgctgtgctttcagcttttacatctttaaaatgggtttttgtgaagattaaaccaatgatatttgtaaggtacgtagtgcagagtctaaacccaaacaagcattgggcgttaagtgttaagtgttaaaccagattgccatgtagcctcattacttgaccgcacttttcatgtgagcatgtgtggaatcaggaatcagatataataagacctctctgcagaaaaaaaaaaaaagtggggaggagggagaggcgcaaattacatattttgtcctttttactgtctctgatctattactgatccagggtgcatgcacatgtaaaacrtcgaattgttttgtaattacaaattaaatgttttagagaagtctctcatttttatgacttattttatt

SEQ ID NO: 559073 - DNA, 536 bp, Homo sapiens
attggaaagtgtgagtcaccaactttgttctttctaaagaccatattggctattcttactcccttccatttccacatgaattttaggttcagcttgtcaatttctgcaaataagccagctgggattatgatagggaattgtgttgaatctgtagatcaattaggggaatgttttcatcttaataagattaagtctttcaattcataaaatagaatgttttttcatttattaaggtctttaattcttcaatgatattttgtaatttcagtatacaagtcttccatttctttcgcttattttttgtctgttttaaaatctgagaaaggagatctagtatgtattcatggaatttctcatattaaccttgtttccaatttctggttctctttatttgttcctgcaaatctgratatcatctgctgtcatttcctcactccaataaagctttgcacccacctacctcctttatgttgttattgtcaaatatattacatttctataagctataagcccaacaagacaattacatacatatc

SEQ ID NO: 559074 - DNA, 536 bp, Homo sapiens
attggaaagtgtgagtcaccaactttgttctttctaaagaccatattggctattcttactcccttccatttccacatgaattttaggttcagcttgtcaatttctgcaaataagccagctgggattatgatagggaattgtgttgaatctgtagatcaattaggggaatgttttcatcttaataagattaagtctttcaattcataaaatagaatgttttttcatttattaaggtctttaattcttcaatgatattttgtaatttcagtatacaagtcttccatttctttcgcttattttttgtctgttttaaaatctgagaaaggagatctagtatgtattcatggaatttctcatattaaccttgtttccaatttctggttctctttatttgttcctgcaaatctggataycatctgctgtcatttcctcactccaataaagctttgcacccacctacctcctttatgttgttattgtcaaatatattacatttctataagctataagcccaacaagacaattacatacatatc

SEQ ID NO: 559075 - DNA, 525 bp, Homo sapiens
aagtgagaccctgtctcaaaaaaatgaaataaagtaacgatgctggcctttgagattggagtgatgcagccacaagccaagaaattctggcaggcatcagaagctaaaagaggcayggaacagattctcccatagagcctctgaaggacacataaccctgctgacaccttgatttcagcccagtgatactgatttcaaacatccaatatccagaacagggaaagaacaattttctgttgtttttagcctcccaatttgtgttgtagcagcttcaggagacgaatacaaaaagaaaacaaaaagggaagctcagattttaaaacagacaaaaaaataatacaaaaggggaacaaaaagagaaatgagaacaattttttttttttttttaaaaaagaaacacaaatggaaatactagccagcatcataggactggactggatgcttgttgaaggactggaagcttccccttaagattggaatcaaagcatggatgtctactcttacatttctattattactagctac

SEQ ID NO: 559076 - DNA, 528 bp, Homo sapiens
tccatatccttttggccaacatttacctcctcatcccacctatcctcaacccaatagtctatgctgtccgcacaaagcagatccgagaggctcttctccatattaaggcaaggactcaaaccaggtgactgttctatatctttttattttagattcaggggtacatgtaaaggtttgttacatagataaactcatgtcacagggayatgttgtacagattatttcatcacccaggtattaagctcagtactcaatagttatgttttcttacagggcatataaatacttagtcatgacaggacaaagctctgactggggaagcccatgaaatgtctgggtcctacctgaactttgaggataagagtctaagagcaatcttaaagtctattctgtttgatcatggattttctatacagtatagacctaatatctgaaagtgaagaaaatcagggcatgagtttttgtactacaattctctgtttaactataaaattaagcaacataagcatacaggccacagaaagcaag

SEQ ID NO: 559077 - DNA, 645 bp, Homo sapiens
tggcttgtttcacttaacttaatgacctacagtttcatccacgttgctgcaagtgacaggatttcattctttcttatgactaatattccatgtgtatcatatttttctttatccattcagatattaatagcacttacattgattccatgttttggctattgtgtctagtactaaatataggaatacagatatctctttgacatattgattcctttcttttgaataaatacctagtagtgggattactaaatctcatggtagttatatttttagtattttgaggaacttccatactgtttttcagagtggttgtattaatttgcattccctccagaattgttgaggactagatatgctaatggcagcacaaggaagactttgttcagccttagatgaaaagtattgcttttgggtaaaccaactgtgaaaagtacaggacaacatcacacgacttccaaatcaagcctccatttattatgggaacttgcctctcagggttggttagatagggaaggagmctggaaatggttctcctgggttctttcctttttaggaccacttgttattctcctagttttgcacctttttggttcaggtcttctaaattctaaacccaatttgtctcctctcacccccaggccatca

SEQ ID NO: 559078 - DNA, 582 bp, Homo sapiens
attcacatctgtactgtaaaaataatggtgttacttttgttataagaaaagaacaaagccaagagtccacatcccatttaagaccagttcagatttcttgagtcagactacactgaccactcaccaactctaacttctaaagcaaaccacggctgctgctatttttgtaaataaaatgctagccatgcccgttagttctatggccaatttcaagctacagtaatggagttaggtagttgcaacaaacaccgtgtggtcagcaaagccaacaataaygtggtcctttgaatcttgctgcctcccattctaaagcatttatataggtaggctttgtttgtaatttcaaagttacatttgaaactatctcatacaatgtcttttttcttttttttgaggtatggtctcactcggtcaaccaggctggagtgcagtggcacaatcatggctcactgcagccttgacctcccaggctcaagtgattgtccagcctcaacctcctgagtagctggaaccaaagatgtgtgctaacacagccagctaattttttaaaattattttttgtagagatggggtctccttatg

SEQ ID NO: 559079 - DNA, 623 bp, Homo sapiens
aaattaaatcataccaccagagaaaaatcacctgcactaaaagaaagacttgaagaaaggaaagaagaaagataagaccataaaacaactagaaaacaaatttttaaatggccagagtaagcccttacttatcaataataacattgagtgtaaatggactaaactttccaatcaaaagacatagagtggctgaatggatttaaaaacaaaagacccaatgatctgttgcctatgagaaatgcacttagcctataaaggcacatatagactgaagataaagggatggaaagatattctatgacaatggaaaccaaaaagaaacaggagtagctttacttatgccagacaaaatagatttcaagacaaaacctatacggagatgcaaagtaggtcattaygtaattataaaggggtcaatccagcaagaggatatgacaattataaatatatacacaatcaacactggagcagccagatatacagagaaatattagagctacagagaacgatggaccctaatacaacaacagctgaagacttaaacaccccattttcagcattagaccaatcttccagacagaaaatcaacaaagaaatatctgatttaatctgcactatagaac

SEQ ID NO: 559080 - DNA, 579 bp, Homo sapiens
tagcatactgcatgctagggatgatctgaagaactatcccaaccaagtttattcctcagttccacctacctgccatctgtggtcacatcctaattttgagccttagggtccctcgggtggaaatgggctggtaaatggaagaagtggggtaataggtaaaggagagcacaaggaaattaatagttattgagagcctattataaggctgacattagatatactgtatatacataattgtacaacactgtaaatcagcataatatctctattttacagacaaaaatactgaggattagagaagttacaagagttgtccaaggttaggctgttggtgagtgattaggaatgggatttagatcctggtctgtgtgactcaagtcatgttcctagtcttgcacagaatgcagcacrgcatcactgttcttcaaatccctgaagagttctgctaacacatcctcataacctcaagaacataggagctttattatattacttcttcagtgtaggataaaatagatatataaaataaaacttgtatacccatagaaaattattacacaatgtaagttagaaatagaa

SEQ ID NO: 559081 - DNA, 610 bp, Homo sapiens
tagtgatggctgcacaacaatgccaatatattattagtactacttaactgytctgcacatttcaccaccacaacaaaaaaaagactatgtcttactctcatgtaatattaactgcctattacatggcagactcttcatcagaggaaaggaaaaaggaaatatactggttaaatgttaggatgtaagaaagaatggggaagaaaatctcaacctctatctatatgcaatgctggtgttagagtataaatacaaactaaaatagggtaatttaatcataaatcttgtccaaaggggcttaaagaaaagtaagtggagaaaaaaactgcttaggcaacatcagtttatctgtgtgaggtaaattaaactttttcaaggtgccaagtcactactcaagacataaatgagaatttagcccaattttactaatgtattatctatatgaataatgcaagtattttgtatgcttgcaaaaggcattccaaggtatcagaagcacatttttttaaaatgaacatttggtaaatattcttaaaatttgtaaatataaaagatcctaaaactataaataccttaaaaaggaaaaagacaaaaaaaaaaaagaaaaatcaca

SEQ ID NO: 559082 - DNA, 536 bp, Homo sapiens
tttatacaaacaaatattttaaaacaacctaatacatataacatttgaaattacagtagaataacactaaagaacaggggaaacgatcactaaatatatcagtggcaaatttgtggcccactcatgaaaaatgtatggaatttcaaagcgtcccttttgttttaaattattctttattcaattttattttttcagtctcactgctcattgcctgttttatctaccttaagtttatattacctaatattttgattgtgctttgataagctgtcttaagtctatattttgtgttttaatattttgtgattgctgctgttgttgcatgtcatcttttaaaaataatttcaaattttattttatatacagggggtacgcmggcaggtttgttacctgggtttattgtgtgatgctgaggtttagggtctgggtcccatcatccaggtattgagcatactacccaataacaggtagtttttcaaaacacaatcccctccatcccttccccctttagtatttcacagtgttatttttcccat

SEQ ID NO: 559083 - DNA, 574 bp, Homo sapiens
atctgcagcctctgctggtgatacccaggcaaacaggatctggagtggtcctttagcaaattccagcagacctgcagcagaggggcctgactattagaaggaaaactaacaaacagaaaggaatagtgtcaacatcaccaacatcaaagaccaaagttagaaaaatccatgaagatggtgagaaaccagcacaaaaaagctgaaaattccaaaatacagaacgtctcttcttgtgcaaaggatcacaactcctcactagcaaaggaacaaaactggatggagaatgagcttgacgaattarcagaagtcggcttcagaaggtgcataacaacaaacttctccaagctaaaggatcaagttctaacccaatgcaaggaagctaagaacgtggaaaaaattttagatgaattgctaactagaataaccagcttagagaagaacatcagtgacctgatggagctaaaaacacagcatgagaacttcgtgaagcatacacaagtatcaatagctgaatcgatcgagcagaagaaaggatatcagggattgaagatcaactcaatgaaataaagacaga

SEQ ID NO: 559084 - DNA, 629 bp, Homo sapiens
tgtttcccccctggtgtcagttttgacaaattgrtgattgtgaagtatcccatttggaatgattttgaagccaaatctcagctaaatagattgcatcagagaccaacaagcaatgtctatcatggctacatgatgggttgtttcttgtgaaatgtaaatgtcaactagaaactgagtactataagagatgggatagatctatgccaacttaaaggcacacacacacccacatacacacatatacacatataaatgttaaacacacacaatgtttaacaaattatttttaattttttttctttttacaaagtccccaataagtttggagatgatttacttttctctttaatatagaagtagagaaacaaattctgttcactttaggactctaaataattgatttagttcatgaaaattttatatttgataagtaaaatatataaactaacaaatatgaataaatggataagtagacagtgtgctcattcaacacagtgtgggggcaaggcaaactggaaacttgattatgcagttgggacaaagctggaaacacaatgaattagctggagaaaataaaggactgaaaaagactggaatgaaaaaggggaactcacaatagaaaatgattt

SEQ ID NO: 559085 - DNA, 581 bp, Homo sapiens
attcagtcattgatctagagagggaagtcagcccattgaattaactgggatcatgatggtagcctctgtgtggggacctgctccttactgggtaatgagccctagttacaaagttaacacagcatgatggtcctagcccagcttatctgaaaactggtcatataaagatactgatttccttctaggtgtatttgtatgaagtgatgtgtacgtggatttttgttatgctttgtattttgattggtggaggaagaagccaaagttgcatggccaagcccaacatcaatggaatgggtaaatattctcctcccatgcacaaggtagctgggcttactcttttgtgcttattctagggaggatacttctctcacttaggtagtcaatttttttttttttttttttttttggagatggagtctcactctgtygccaggctggggtgcagtggcgcagtcttggctcactgcaaccttcgcctctggggttcatgccattctcctgcctcagcctcctgagtagctgggactacatgtgcccaccaccacgcccggctaattttttgtatttttagtagagacagg

SEQ ID NO: 559086 - DNA, 621 bp, Homo sapiens
ttttgctctatacccatcaaattctgatcaaccacacattgctcaataagtttgtattgaacacttaatctatataaggcagttgatatggtttggctgtgtccccatccaaatctcatcttgaattctcatgtgttgtgggaggaacccagtgggagctaattgaatcatgggggcaagtctttcccatgctgttctcatgatagtgaatgggtctcacgagatctgatggttttaaaaatgggagtttccctgcacgagctctcttctctttgcctactgccatccatttaagacatgacttgctcctccttcccttccaccacgattgtgaggcttccccagccatgtggaactgtaagtccattaaacctctttcttttttaaattgctcagtctcaggtatgtctttattagcagtgtaaaaatgaaccaatagagtaaattggtgccagtaaagtggggtgctgctgaaaagatamctgaaaatgtggaaggaactttggaactgggtaacaggcagagattgaaatagtttggagggctcagaagaagacatgcaaatttggggaagtttggaactctctagagacttgttgaatggctttgaccaaaatgctg

SEQ ID NO: 559087 - DNA, 618 bp, Homo sapiens
tttaattggctcatggttctgcagaatgtacaagaagcatggtgccaacatctgctcagcttctggtgaaggcctgaggaatctttcagtcacggtggaagacaacagaaagccagcatgttatgtggcaagagcaggagcaagggagagaaggaaatgagtcatccatttttaaacagccagatcccatgagaactcactcactgtcttaaggacaataacaagctattcatgaggaatcttcccccaagactcaaacacctcccaccaggcctcacctccactggaaatcatatttcaacatgagaattggaggggacattggaaatcatatttcaacgtgagaattggaggggacaaacatacaaaccatatcattcttcccatagcccctcaaatcttatatccttttgacattgcaaaatatcgtcgtccgtgacaataatccccaacagtcttaactcattccagcattgagtccaaagtcctaagtctcaagtgagacttatctccttctacctatgaaacmgtaaaattataaaacaagttatttactccttacatacaattctagtacagacattaggtaaaaattatgattccaaaagagagaaaata

SEQ ID NO: 559088 - DNA, 512 bp, Homo sapiens
gtggtatctttcctccccatcataagggtcatggccaccactagtatatccaaagacaaattaatgagagaaaagtaagacagattgattttacaaaagtgtcacttgacatagaagacttgagaaatgaaaacctaaagactcagggaactatcaatttttgtttttatgttagataaataatagtaaggtggaaatgtaattgtacaaaatggatatgatctaatagtaataaaggaaaagggaaatccaacaagacatgtctttttcaattttttttggctgttttgtgtggcaatccttctcaagccttgagtgggatcccttctagaataagggttttatgacctrctatttgacaaggtaggtcagataatttatttacactcagcacttacatagaaagataggggaaggttttatggatagctttgaagtgtaggttttatggatagctttgaaggagaaatgtcctagtttctatccccgcccagaggcaaaagaattctatt

SEQ ID NO: 559089 - DNA, 567 bp, Homo sapiens
aatgttctattgtccttacattttttcgtagtcacagggtaatgttttttaatgttatattgacctaggtttgcaagtattttatttagagtctttgcatatatcacataaataaaaaagagaactacagtctcattttcctttgtgtcaattttaggtttttgtgttagagtaatggtagcttcataaaatgaatagggatactttgtatctctttcagtgctctaaaatcaatctctctctctctttctctatgtgtgtgtgtttcrgtgtgtgtctttttatctctcttacactttggtaaatgacttgatcatatacccatgtgacttaagacttaccttatttcattgaatgtaagttaccatcactgttaaaatatatcattgtttatgtactagtgagaaggaagaaaaatgctacctatcaaactgtgactaaaacaaatcttaccagttagaatttcattttatacttattaaagtctatttggatctcttaagagacagctttttaaaatcatatattagctttttttcatgtgtttatacatatgaataaaacata

SEQ ID NO: 559090 - DNA, 551 bp, Homo sapiens
ggggcctggcagccatcccagtgaggaggttaaatagaaaccatatgggtgccacacgtgcctgggctcctactctgcctcctctctctactgttctaaccaccatttccaccaacaacacctgctccaccttgaattgcactcccacttcaagagtcagggcaaatatgtcaccttctctgggaaccctttcttgaccccttcccaatctcacrtgccaccctgcacgatcatacactgtttatttgtgtgtgagccaccacacggtgagatccctccagtcaggaagacactctgattcagctttatatcctcagcaccaaccactacaccttctgcaaagtggaactctcagcaaatgttcctggaactgaactagtctattacctgtaagacactatgctaagagctatgaaagatgcaaaaatgtaaaagacacagtcaatttacagactctgtggggatataaagcttgaacatttaataactccacttgtatctttgtagttattcttatgaaaatacaatctagcttgatactggtagagaat

SEQ ID NO: 559091 - DNA, 626 bp, Homo sapiens
agttgtagttaaaaaaaaaagtagaggccgggcgcggtggctcacgcctgtaatcccagcactttgggaggccgaggcgggcagatcacaaggtcaggagatcgagmccatcccggctaaaacggtgaaaccccatctctactaaaaatacaaaaaattagccgggcgtagtggcgggcgcctgtagtcccagctacttaggaggctgaggcaggagaatggcgtgaacccgggaggcggagcttgcagtgagccgagatcccgccactgcactccagcctgggcgacagagagagactccgtctcaaaaaaaaaaaaaaaaaaaaaaaaaggaaagtagagaaatagaaataaaaagaaaagacaaaactgagtatattaggaattgctgaccaaaaggatttagtcaaatgaactcacccaagtagcttgagcacttgggttttataagattattgaagaatttgtcacagagggattttaaggtgggagttaacaggcaaggccctggttagactttgtaagctaccgagtatctgattagattaatatgcagaggtgaggttggttgttgaaacagtctgtgttccagaaaacagctttctttttgtagaacacatgggtat

SEQ ID NO: 559092 - DNA, 594 bp, Homo sapiens
cattatataatgacaagggttcaatttagcaaaaggatgtgacaattataaatatatatacacccaatactgtagcactcatatatatgaagcagatattattagagccaaagggagagataggtccccatataataatagttggagacttcaacaccccactttcagtattggataaatcatccagrtagaaaatcaacagagaaacattagacctaatctgcactacagaccaaatggacctcataaatatttacagaatatttaatccaatggctgtagaatacatactactcttctcagcacagggatcattctgaagggtagaccatatgttagaccacaaaataagtctttaaaaataataaaaaattgacatcaagtatcttctttgaccacaatggaataaaaatagaaattaatagcaggaactttggaaatgatacaaatacataggtattaaacaatatgcttattaatgaccaatgggtcaatgaagaaattaagaaggaaatttaaaaaaatgcttgaaacaaaggaaaatggaaatgcaacataccaaaacctctgggatacagcaaaagcagtactaag

SEQ ID NO: 559093 - DNA, 540 bp, Homo sapiens
ggtgcacgtgcaagtttgttacatgtgtatattgtgtgatgctgaggatacgattgatcccatcacccaggtactgagcatagtacccagtagtaagtttcttaacccttgcccttctcccyccctcctcactctagtagtccccagtgtctattgttgcaattttatgttactgagaaaccagaaatgtgggtttagctcccacttaagtgagagtatatagtatttggttcctgagttaattcacttatgataatggcctgcagctgcatccatgttgctgaaaaggacatgattttgttctttttatggctgtgtagtatttcatggtgtatatatactacattttcttcatccaatacaccactgagggacatctaggttgattccatatttgctattgtgaatagtgctgtgatgaacatatgagtgtatgggtctccttggtagaacaatttgttttcttttcgataatatacccagtgattgctttgctaggctgaatggtagttccgttttaactttttgagaaatcgccaa

SEQ ID NO: 559094 - DNA, 582 bp, Homo sapiens
tttgtggttagcctttaagaataattaagtgattgtgaaccaggatccctttttgagactctatgcatatagaagtatatattgcaygtgtataaacactttaaaataattatactctttattattttcaaggtgtcacaaacagaatatattattgaaaagaatttccctatataaaaatattattgccacttcccaaaattagcagtcatattttttttctagttattttgactgctggaaaaaatcagaatgagcaccataagactttaggtaattctgggcaatatcttcatatgatcagtctctgccactaaatctaataggtgttgcattttgcacctatgaacagacctcacatattaagaacttaagaaaagctaacttgccagtaaattgcaattaccatatgagcactaaggtgcagtctgttcagaagctttatgtcataatttccatagataagataaaatgatatttaatttgtattttttattttattaataggatattttatagatgccattccttcccacactctaatttatctcattttatagtgctttccttaaggccctggag

SEQ ID NO: 559095 - DNA, 582 bp, Homo sapiens
tttgtggttagcctttaagaataattaagtgattgtgaaccaggatccctttttgagactctatgcatatagaagtatatattgcatgtgtataaacactttaaaataattatactctttattattttcaaggtgtcacaaacagaawatattattgaaaagaatttccctatataaaaatattattgccacttcccaaaattagcagtcatattttttttctagttattttgactgctggaaaaaatcagaatgagcaccataagactttaggtaattctgggcaatatcttcatatgatcagtctctgccactaaatctaataggtgttgcattttgcacctatgaacagacctcacatattaagaacttaagaaaagctaacttgccagtaaattgcaattaccatatgagcactaaggtgcagtctgttcagaagctttatgtcataatttccatagataagataaaatgatatttaatttgtattttttattttattaataggatattttatagatgccattccttcccacactctaatttatctcattttatagtgctttccttaaggccctggag

SEQ ID NO: 559096 - DNA, 582 bp, Homo sapiens
tttgtggttagcctttaagaataattaagtgattgtgaaccaggatccctttttgagactctatgcatatagaagtatatattgcatgtgtataaacactttaaaataattatactctttattattttcaaggtgtcacaaacagaatatattattgaaaagaatttccctatataaaaatattattgccacttcccaaaattagcagtcatattttttttctagttattttgactgctggaaaaaatcagaatgagcaccataagactttagstaattctgggcaatatcttcatatgatcagtctctgccactaaatctaataggtgttgcattttgcacctatgaacagacctcacatattaagaacttaagaaaagctaacttgccagtaaattgcaattaccatatgagcactaaggtgcagtctgttcagaagctttatgtcataatttccatagataagataaaatgatatttaatttgtattttttattttattaataggatattttatagatgccattccttcccacactctaatttatctcattttatagtgctttccttaaggccctggag

SEQ ID NO: 559097 - DNA, 537 bp, Homo sapiens
ttgttaaattgctgatatggatattctacttagtgaaataaaatctgaatatggtgtccttctatggagcaaaatgtaatttactcttggtactttataccaacatagaacttcacattctcttggcctgagatgaaaacatatgaaaagagaatcttaaagttacccaaataaatgattctttttttwaaaaaaatgtcaatcacccccttatatgaagtgtgtgtgtgggggcatagaatgagacatttagatccaaaaaaaccccaaataatagttaaaacaagatttcatggactttaattcccacagtatttagcaagcattgaacttaatcagcattataaaacagtctatgtaaatgtcttagacactgagaaaggaagtatgaaaattttatttaaagtagagagaatcaatttagttgaatacagtttgaaaaaaactggactttattcaaataaatttctctcaaactaaaataaaagcaccctttttcttatgaactattatgtataattctttgattctggtatc

SEQ ID NO: 559098 - DNA, 605 bp, Homo sapiens
tcatgggggtttgttgtacagaatatttcatcacccatgtattcagcctagtacccattagatatttttcctcatcttctccctcrtcccactccccaccctctgaaaggccacagtgtgtgttgttcccctctatgtgtccatgtgttctcattgtttagctcccacttacacaggagaacatgtggtatttggttttctgttcctgcattagtttgctagggataatggcctctagggaaacctacatttattttaaatgcttgaaaatcatttattcattcattcgctcattcatcagttatcacacttattctatatatcatgtattgtgctcaaagttaggaatacaaagaaaaccaataattatttatcatacgttggtgcaaaagtaattgtgatgttacttttcatggcaaaaaccgcaattacttttgcattggcctgataatatgccttgttctgtaggcgttcactctctagtcagagaggtagtttggtaaacaagacattttacagcactctgaaagaaggaaaacctataagtcaactctacctctgctgtcagtgaaaatattcctacaaccattaccagaggggaaaga

SEQ ID NO: 559099 - DNA, 452 bp, Homo sapiens
gtgaatgtttttacaaactataaaggtgccatgagtattggggttataaagaaaatgtattattagacaaacttgcaagtatgaaatccacaaataatcaggattgactttaattatatgtgaagggcacgtgaatctccctcacaggtacyaagcacaggacaccttattcttgtcttgatttcagatccctgtttggaaccccagtatgcagtctttgtccttccttctatcgatgtattagtcaaggtttccagagaaacagaacaaacattaccctacaggattggctcatccagttatggaggctgagaagtcctaagatctgtaagctggagacccagaaaaaaaaaaatgtgtaagttcctgtccaagagagcaagcttgaaacccagaaactgcctatgtttcggttcaagtctgaaggcaataaaacaccaatgtcccagctc

SEQ ID NO: 559100 - DNA, 350 bp, Homo sapiens
gagaagaatagaattgattcaattccaataattcaattattaattctcaatattaatgagagaagattccatcagaagagggatgttggagtctttctggtccttgtttagtcgtctcttcagtgcaactgtatggtcttcacaatgaaaactatataytgcagtttccattcatgtaaggttgtaaatattagttaaacgacttagatattcacaggatagacccttcttatctgaggttctaaaatatttaacctagctagaatttttgagcttataaaaataaaagctattaaacttttgcatagaaaacgacaatgaattttctagcttatcaaatgcagaatcat

SEQ ID NO: 559101 - DNA, 411 bp, Homo sapiens
tttcttattgtgactctatttctaaagagaaaactaacataaattcttaatatctagggtcttagaagaagccaattactcttttgaaaatgtttttttacatgtagaggagtttcttattttctcaccaattctagatggcaataattactaaaccactaggcagaagctactggaaatgttatacagtagtaattacacagatatccttaaatttacttatctataaccaatttctattactctattatgaattactttctcacamcaccaaaatcattccacatatatttcactcagcaatggcttttcaacaatgattagcccatatgcgccgtgcttggtttagcattcctttccatttctgttcttcatatcttggcaactaaccttaactccttgacatgtgca

SEQ ID NO: 559102 - DNA, 591 bp, Homo sapiens
ttttttgttagttttatatttgctattttcagttttctttttctttgaaacagagtcccactctgtcgcccaggctagagtgcatggcatgatctcgggtcactgcagcctccccatcccgggttcaagcaattcttctgcctcagcctctcaagcagctgggattacaggtgcccgccaccacgcccaactaatttttgtatttttagtagagacagggtttcatcaggttggccaggctggtctcaaactcctgacctcaagtgatccacccacctcagcctcccaaagtgctgggattacaggcrtaagccactgcgcccagcctcagttttacttttcttggccaacaagatgactcgagcatccagatgtaagtggatagaaagacaagagtagagaagcaaagagagagaatgaagggaaaggtaacacaggtttaaagagcactgacagaccagcacagcatacagtgcccagcacagcttctgctcatgagggaacttaagtagaaccatctagagtggagagaagccatataagatggcagggtttctattaatattatttttaattgacaagtcataatgc

SEQ ID NO: 559103 - DNA, 649 bp, Homo sapiens
ttgaaaaggataggcataaaatgatgagacggttttagcataaagacttgtagacaattaagcttattggaaaaatatcaggattctatgactgattagaggtgaatgtgagagaataaaattctgaaataaggactcaagttttgagattgttattgaataygacaaactgagataaagactatggaataggaaagatagtgtagaaagatggatattttgagtgtcagtggcttatgggatatctgattagaggtacccagaaacaataaggcatataattcagaaactctacaatcatgtttttgtagaatcatacatatatatgagacagagtagtggacaaatcacagagaaaccatgcatacataacggagcatatggaagaaagagacctggattgcagcactgtttaaagtcagaggactgaacgagagaccagcagaggattgttcccttgattatggagtggaaagtattaagaaggaagaagatgtaaacagtgcaaaatacatctgtgatagctagcaagataattgaagagtgttaataggatattattggtaaactgtagaagtttcagagtttgggaggcatttcagaaaaaaataataataattaaacaacaacaacaacaaaccagaatagt

SEQ ID NO: 559104 - DNA, 539 bp, Homo sapiens
ccaattagattttaagtttcagcaacctcattagtttttcaggctttatgactcaagcttagggggttgggggtggagggcagcaacccacaaaacaaagacttcaatgtctctaaaagctgagaaaattccagcwttgtcagggcagatactatttataacccatttaatgtgtatgctcccaaatgcattttctacgcacagcatctgacctacacttctgaattcctggctttagcaatggaagtgaagcagctaaaagtctgacgatcaaagggaaagaaatgaactccttgctattattattttataacatccagcatcatgtgacaaacagaatcaaagggttcctgtttttgactcacctttgtcaagaaagtgcctcattgctataagtttggggctcaaattgctggaaaatgtgggtttggaaaatatcctacaacgaggctgaaatttttttaaaaagttgtggaaaatctcatttaacttttttccagaacacacacacagacacatacacacacacacacacacga

SEQ ID NO: 559105 - DNA, 593 bp, Homo sapiens
taatacatcctgcctcagatgtatgcaggtcacataggygtggtcaattactattctacaccctagctatgctcaaggtatgtgacccaagtcactgtgctctgggaaaattgctaaagctgtgagtaaagatgctcccgcttcctttggtatctcaagcaataaggaccatgtatgcatcaagtcatcagtggccatcttgtcacctgatggagggagatactgagaatgtagccaacacagaggaaaatagaaccaaggtacggacagaaacaaaaccctagttatatagttgaaaacacgtagcaagctattcctgaagactgatgtccctagacatttcagcattgtgagacaatacattctctttttggtatcaagcccttctaagtttctaccactcgcaaccaagggcagaccaaaatattacggcacagcaccaacaatatttttaaatactatggaaatgtaaaaaacttttattgttgccaaataaatgcaaaaacttcctccaaaatattacattttatctgattcaagtccagtgactccttcaatcttggatatatctttaagtcaattctcactgtcct

SEQ ID NO: 559106 - DNA, 641 bp, Homo sapiens
ctactacaataaaaaataccaattttccaaaatatattaagtacatttttattgtataatatgcctagttaatggaaagtaatccaagagggaaagaggcagatgaagggactgagaggagaaccgtaagacagagctgtgcaaaaacatgaacagttccaaaagggagattgccaggtcaagaagagaattgaaaaaggccatctcctgcttatgtagccctcatcatttcccctcttccattttcagaaaattacctccgaaatgacctctgctacaaaatgatcttttctgtagatgtatgctttactgatttccacctcagatccagtttcttacagatccacatagcctcagctccttggaattcattcatgacccaattgtttaccttcacttacctatatatttttaaatgtcatattatagatattttgaacatactcacccaaattatccstccaatttgattattttttttaaaaaaagtccacatcacattatgttatttttttctgtaattcctttagtttgaaagcctaaggtctcttttttataacaacaataacattataccttataaaaatggcaacctttaagactgccttaatgttatcaaatatccaaactagtcaaatatc

SEQ ID NO: 559107 - DNA, 641 bp, Homo sapiens
ctactacaataaaaaataccaattttccaaaatatattaagtacatttttattgtataatatgcctagttaatggaaagtaatccaagagggaaagaggcagatgaagggactgagaggagaaccgtaagacagagctgtgcaaaaacatgaacagttccaaaagggagattgccaggtcaagaagagaattgaaaaaggccatctcctgcttatgtagccctcatcatttcccctcttccattttcagaaaattacctccgaaatgacctctgctacaaaatgatcttttctgtagatgtatgctttactgatttccacctcagatccagtttcttacagatccacatagcctcagctccttggaattcattcatgacccaattgtttaccttcacttacctatatatttttaaatgtcatattatagatattttgaacatactcacccaaattatccctccaatttgattattttttttaaaaaaagtccacatcacattatgttatttttttctgtaattcctttagtttgaaagcctaaggtctcttttttataacaacaawaacattataccttataaaaatggcaacctttaagactgccttaatgttatcaaatatccaaactagtcaaatatc

SEQ ID NO: 559108 - DNA, 443 bp, Homo sapiens
agggttcccattgggactgagccacagtcacccacaacaatgacacattcgttcatgcacattttattgttttttttctcttccatgttttactttttccatttcattacttttgcttcctgggtcactttctatatagaycacctggtgtaggcaaacagctcatctgtggcacctggcaaccttgcaggcttgaaccataacttactcagtctttaaggaatgccttgtgatctgtccaaaacatgagaagatggaaggtctgtaaggagttgatatgaggccacctcccactcacctccttgtcgacgatcacaggacaatttctcatcccctccccaattcaggtgagatatggatcttccactccagccccaccagaacagagttgaagaacataaacctacctgtgcccatctagatggagttctaggagtggtgtt

SEQ ID NO: 559109 - DNA, 380 bp, Homo sapiens
ctccacacctgtgggtgtttctcgttaggtggaacgtgagacttggaaaagaaaaagacacagagacaaagtatagagaaagaaataagggggcccaggggaccagcgttcagcatatggaggatccygccagcctctgagttcccttagtatttattgatcatttttgggtgtttctcagagagggggatgtggcagggtcataggataatagtggagagaaggtcagcagataaacacgtgaacaaaggtctctgcatcatagacaaggtaaagaattaagtgctgtgctttagatatgcatacacataaacatctcaatgcgttagagagcagtattgttgcccgcatgtcccacctccagccctaaggcggttttc

SEQ ID NO: 559110 - DNA, 569 bp, Homo sapiens
ttctatccttaagaccccaaggaaaactcaaggtatagctgtggaggcatctgaattgagattcgtttgatcccagggattttttcttatgcagtttagcaatacatagctattaaaataaacaatgaaatgtttttgtaccagaatcgagatagtcacattcctttatagggaatgaatagtctttagagttgtagcttgaccggtattggaaataacaagaaaacttccttgattggaaatytgtagagaatgcctttaattagctgatacagaataaagtctttatttagcaattggacattttgctttgacgaagctgctgttctgggggtgattgtgaggatgatttctcctagaaacttctaatttttttttaaagctaagtctgttggactttggcttgaaaacatgttccatgcagatgtaaaataagtacatcgaaccatggcagaacttggaatccacaggtaacagaagcgtacatttgtcatcgcgcaggccggaggtaagggccaagtggaagctgtctctggaccagggagggacttggcagctgaagaaagctt

SEQ ID NO: 559111 - DNA, 428 bp, Homo sapiens
gttggtttctgtgcttgtgagcatttagaataaaagtctgtatcagttaatcctttgattatgtaaatcattttattttgttttcctctcattttcaaactgaggtttgaaaaccaaaaaaaaaaaaagaattaaatattttgaaacattctaagtgcataaattcttggtcaggaatgaggaactgtccttagaaaaatgggctagacatttaaaaaggaatcttgtagagcaccttggcctgttcagcagtttatgtttgtggttagtttttttctcttccaataatttgggtgggaatagtagttgctcatcttttgagattaatgttctaattatttgaatacaaatgttttctctcaaaataattgggaaggaagtatgaaaacagaaaaggtcatcttttgarttcttaaagttttatgtca

SEQ ID NO: 559112 - DNA, 609 bp, Homo sapiens
acagtaaacctaccatgtagtagaaaaaatactttttttttttcttttgagacagggtctcactctgtcgcccaggctgtagtgcagtggcacaatcacagctcactgcggcttccactttctgggctcaggtgatcctcccacctcagcctcctgagtagctgggaccacaggcaggtgccgccacgcccggctaatttttgtgtttttttgtagagccagagtttcaccatgttgcccaggctggtctcaaactctggggcttaagggatactcccgcctcagcttcccaaagtgctgggattacaggcgtaagccaccatgcctaaccacaaaaaattttttttgtgttcaaaatctagtcttctgggagtttgtggtgaacayattgctttatgtgaaatatagtcttggccctgaggatgaggcctttttagaaacgcgttgtcaacttgtacagacaaacacaaaccttatgaacaaatacaaaattatgaactgctgaccaatgaggatttgccaactgaacaggagataataatttgttttggccccaggatcagagctggtaaaaacctattggagtcctccttaatatgtgcctgttct

SEQ ID NO: 559113 - DNA, 571 bp, Homo sapiens
tttcattttggagtgatagattttttactgtttgtaaaagaaaaaaataatttttttgtgtggatcaggtgaatataaaaaaagcttatactactatttttcccatggaagttccccttccaaaagaaaatctccaataccattggagatgggtggacatcatagaattatacctgaaattgctaagtttttatgaggtatgcggcgagtgccaaagctagggaaaaacattttatgttattcattaacctatataaataactagatgacctggaattacttccaacagagtttggtaggccatttaggagccacagtgcattatggcacccaatttattaggcactttacaacagccatggaattaaatgggactgcaagctaaggttcatccaggaacatgctgatattggaggrtgcaagaatgtttgctccactgatgtgtgattcatttcctactgcaattcatgttttgggtcaagagctggtcagcttttcatttggataaagttatttgacatattgaatcctgacagccaggacaattcagaattggaacaaatttattgat

SEQ ID NO: 559114 - DNA, 600 bp, Homo sapiens
acaccaacatggcacatgtatacatgtgtaacaaacctgcacattgtgcacatgtaccctagaacttaaaatataatttaaaaaaaatctatcatgtcaaaagagctatagtctccacattaaagcctgaatgcatcatccatgccagaactaggcaacatgctatgtgggacaccttttacacttagaatcaggatttatatcactgtctactatcatccataaagagagagtgcagagtggaggagcaggctgtccccaccactcggctgagtgacaaggcccactgctgttgctgaagcacctggttctgtgcttcagtttcttctgtacaatgatgataataacaaaaggagaatagctgctatttcttgtgcttctgcaatgtggcaaacaagccctttgtgtatattgtggtaaatctttacagaaatgattctgaagcttgagtgtgtatcagaattacctggaaggcttgttacaacatacattgctgggccttaaccyagagtttctggttcactggatctgggtagggccttacaatttgcacttttttttttgtttgtttgtttgtttgttttttgagacagagtttct

SEQ ID NO: 559115 - DNA, 425 bp, Homo sapiens
tgttctttttgtttagtcttgctttggctatgggggatcttttttggttccatatgaattttaggattgttttttctagttctgagaagaatgatggtggtattttgatgggaattggcttgaatttttaaattgcttttggcagtatggtcatttcacaacgttgattctacccatccatgagcatgggatgtgtttccatttgtttgtgttgtctatgatttctctcagcaatgttttatagttttccttgtagagggctttcacttccttggttaggkatatgcttaagtattttatttttttgcagctattgtaaaagaagttgagttcttgatttgattctcagcttggtcacttttggtgtatagcagagctactgatttgtgtacattaattttgtatcccgaaaatttgttgaattc

SEQ ID NO: 559116 - DNA, 393 bp, Homo sapiens
taggctgtactgccttccaggaatgagtgcagaaatattacgaaacagacgtacatggactagaaggccaaggagggtcactagttctggctgggggaatcctgaaggcttcaaaagggagattgcatttagtcaagtcttgcagtgtgggaagggatgagtggtggaggtggaagcggagatgggagaaggctgcccctgtgtcagcaacaggacctgcaaaggcacagaggtgtaaaaagtgcacggctcccttgggaatacctagagtaatcatgttcataaaattcacaagggctgaatggtagaaggtggagcaaagatcagattttaaaggtgctttgacaacacaaaggcacctcyaggaaatgggaagctaatagtttataagaa

SEQ ID NO: 559117 - DNA, 622 bp, Homo sapiens
cccactaacaccagtgccagtgtatactaccatggggcccaaggacagggatgcttggactgctgctgtcaccactggaacccaaggattggcttgcttgacatgcctgttcacagcaaaactttaccacagccccyactaataacagccccctaagccactaaagaaatcataggcactactgacactgtttgtatccaaagaaatcatatggagaccacactactgcacacacctacaatcaaggccaaagtgtcctacccaaccaatagcatagatgtgtcttcagaaaaaatttctccccaatgaaagcaaattttaaaaattggaagaagtgactattatgccagctgcacagctatcaatataaggacacaagaaacatgaaaaaaaaacaaggaaatatgacacctccaaaggaacaaattaactttccacgaacagattccaatgaaaaagaaatttatgaaaaacaatcatattatgatattaaagaagctcagtgaaatttaagagaagtcagaaaaacaatataaagaaatcagaaaaacaattcaggatatgaatgagaaatttaccaaagggacagatatcataaaaaaccaaacagaaattctggaac

SEQ ID NO: 559118 - DNA, 622 bp, Homo sapiens
cccactaacaccagtgccagtgtatactaccatggggcccaaggacagggatgcttggactgctgctgtcaccactggaacccaaggattggcttgcttgacatgcctgttcacagcaaaactttaccacagcccctactaataacagccccctaagccactaaagaaatcataggcactactgacactgtttgtatccaaagaaatcatatggagaccacactactgcacacacctasaatcaaggccaaagtgtcctacccaaccaatagcatagatgtgtcttcagaaaaaatttctccccaatgaaagcaaattttaaaaattggaagaagtgactattatgccagctgcacagctatcaatataaggacacaagaaacatgaaaaaaaaacaaggaaatatgacacctccaaaggaacaaattaactttccacgaacagattccaatgaaaaagaaatttatgaaaaacaatcatattatgatattaaagaagctcagtgaaatttaagagaagtcagaaaaacaatataaagaaatcagaaaaacaattcaggatatgaatgagaaatttaccaaagggacagatatcataaaaaaccaaacagaaattctggaac

SEQ ID NO: 559119 - DNA, 627 bp, Homo sapiens
caaaaaattacacatttttaaaaataaaagatgaaataaaaatattttaaaatagggctcattctcttttaaaattgcataacaatacaaaacaacttttgctctcattagaatatttttatttccagttctcacagaaaacaatgttattgagtcttaaattatttttgaaaattttattttaacatttagttatagagtaatataaccatmcactttatctacaacaaatggcctcataaaaacagtcaactcatatgtgatccagttatcactatacccatgagaggatagtgagcaagttctcagaatttcagtttattgacagagcctgctcagaaaacaaaatttgagtgcggagagagaagttatgggttgataagaaaacttccatcctgaatttgaggactgacaggagtggtacagagccagagatatgtagtcagagaagaggcttgctatgttacagatgagagatggcaagagcagagatccaaaagaaaaaagaaaaaaaaaacttagcttttgagaaaagaaaatagtgacagaattttagaagagatgggattgagttaaaaagaggttttccttatgggttggcaaaacggtagtagtgccgaccatgac

SEQ ID NO: 559120 - DNA, 632 bp, Homo sapiens
aaatacaaaaaattacacatttttaaaaataaaagatgaaataaaaatattttaaaatagggctcattctcttttaaaattgcataacaatacaaaacaacttttgctctcattagaatatttttatttccagttctcacagaaaacaatgttattgagtcttaaattatttttgaaaattttattttaacatttagttatagagtaatataaccatccactttatctacaacaaatggcctcataaaaacagtcaactcatatgtgatccagttatcactatacccatgagaggatagtgagcaagttctcagaatttcagtttattgacagagcctgctcagaaaacaaaatttgagtgcggagagagaagttatgggttgataagaaaacttccatcctgaatttgaggactgacaggagtggtacagagccagagatatgtagtcagagaagaggcttgctatgttacagatgagagatggcaagagcagaratccaaaagaaaaaagaaaaaaaaaacttagcttttgagaaaagaaaatagtgacagaattttagaagagatgggattgagttaaaaagaggttttccttatgggttggcaaaacggtagtagtgccgaccatgac

SEQ ID NO: 559121 - DNA, 634 bp, Homo sapiens
catttgtgaaaaagtaagttatgtcaggcaaacttaattactttctcaattgaattacataattaacggatgaagtgactgtagtagatgtgatagatttatattttatagagttgatgcaatgactaagaattatgatttgaaaaatggattgaattgtcatacatgagttgacatttcttattgaaaatggaaacaccaattaaatctgttgacgaaacggataaggtctacaaattagtaatcaaacctactcataaattccctctcttatgaacctttagtaaatgatgatggcacactgagctctaacatacctctcaagttctctaaacacagaaactgagaccaaataatcaaggaactcgattcattccagggaaagaagaaagctaagctagtgaggtcacctgtgttcttatttcttctttcactgactccttttcatcatgtaatttggaaatttgcatacctctacctttactgtaacttataaagaaagaagtgataaaaatcaaygtcattaaatgttggtagttaaatgcattatgcctcacagaagttttggtgatatttatatttttaaaaattattaataaagaaataagagcatataaattagaaaagaaaaaat

SEQ ID NO: 559122 - DNA, 373 bp, Homo sapiens
gggcactgctgggactggaccataaaatccttccacattatgtcagtgcctcttttactccattggcagctggatattgtcatccagagagatggatgacttagaagccacgtgcagaagatggcaaccttccatcagcatggatccttgagtgactgtggagtgcaacgccttctaccagttagaactactgtgattgacaatcacatttcatttgtattaagctactgatttggggggtttatctccttcagctcccacattagtacaactcatgcagaatggagagtgactgtgaacacatgtggcacaggctggtgaaacctaggactttatagatgaattyctgattatactctcctttcttgcaaaa

SEQ ID NO: 559123 - DNA, 506 bp, Homo sapiens
gaaactgacacaggcaatgtagagagtcttgcttacggataatgaacaaaagaacatacctgggtaaaagaaatgagaggttactgataacaaaactaatatctatattgcacaatataaaacattattttatacttaggattayatttgatttttgcaaatccctgtgaaatagctattattatcagatccactttatgcatactaaaaacaagactcatatgggttagctaactaggctatggtctctccaccaagctctacttctctgattgaggagatagtagtatctagagcttcagtgttctttctaccgccctatgctaccacccagtgcagatgtaagaacaaaacctactagtaacctgctattgactgtttagaactttagcaactttaattatccaaaacatagctgtgagaccaaaaagaggaaaacagtttgcaaaagcccacatttattacaccatgaaagagccaggtctgtgaaatgttgcctagaattt

SEQ ID NO: 559124 - DNA, 506 bp, Homo sapiens
gaaactgacacaggcaatgtagagagtcttgcttacggataatgaacaaaagaacatacctgggtaaaagaaatgagaggttactgataacaaaactaatatctatattgcacaatataaaacattattttatacttaggattatatttgatttttgcaaatccctgtgaaatagctattattatcagatccactttatgcatactaaaaacaagactcatatgggttagctaactaggctatggtctctccaccaagctctacttctctgattgaggagatagtagtawctagagcttcagtgttctttctaccgccctatgctaccacccagtgcagatgtaagaacaaaacctactagtaacctgctattgactgtttagaactttagcaactttaattatccaaaacatagctgtgagaccaaaaagaggaaaacagtttgcaaaagcccacatttattacaccatgaaagagccaggtctgtgaaatgttgcctagaattt

SEQ ID NO: 559125 - DNA, 594 bp, Homo sapiens
cctatacagtaccttgaaaagtggctgacaggtaatcagtgcctaataaacattttttgactaaacgaatsaataaatatctcagcaaaatacacttactttccttttcctaaatctgtatcaatccttcctttagtcatttcaaatatatttattcagcatttaacacttgccaggcactgtggtagatgctgaggtaaaaaaaaattacatatgatatattctttgtctttaaagaactggcgatctggtgggagatgtggacaattcatgattacaatcttttgcctgagtattctgctagaggccggtacaatacgctctggaggaacacaaaagaagcatctagctctgtctgggtgccaggaaggggaggagtgtggctgggttaggaaaggctttctgagaaagctgtccatatggtaatagcaagcatttactaaaatgttcactgttctaaccactgtactaagcactttatctcactacgttctcccaagagctccctagaatagaataattattattctcactgacagataaaaaaattcatctacagggagaaactgagagactttttccaactgatacaac

SEQ ID NO: 559126 - DNA, 594 bp, Homo sapiens
cctatacagtaccttgaaaagtggctgacaggtaatcagtgcctaataaacattttttgactaaacgaatgaataaatatctcagcaamatacacttactttccttttcctaaatctgtatcaatccttcctttagtcatttcaaatatatttattcagcatttaacacttgccaggcactgtggtagatgctgaggtaaaaaaaaattacatatgatatattctttgtctttaaagaactggcgatctggtgggagatgtggacaattcatgattacaatcttttgcctgagtattctgctagaggccggtacaatacgctctggaggaacacaaaagaagcatctagctctgtctgggtgccaggaaggggaggagtgtggctgggttaggaaaggctttctgagaaagctgtccatatggtaatagcaagcatttactaaaatgttcactgttctaaccactgtactaagcactttatctcactacgttctcccaagagctccctagaatagaataattattattctcactgacagataaaaaaattcatctacagggagaaactgagagactttttccaactgatacaac

SEQ ID NO: 559127 - DNA, 577 bp, Homo sapiens
attgggccttgctgtcacttatagaatatctcagaaaggttttgcttcttgaggatcatatgaggatgtgggtggggtggggcttggctgtgacaggcaactgtgggacctcagctatctttttattcatgcctccccctgaatttcagaatttgcaggtccatgagcatgccagtattaaatccctggcactattctttgaacatgcccaaacaggacagagctttgctctatgagaatgtggtatttctgggtaatagttgatgaaagagaaaaraaagataatttgtaaatgctcaagatttttaaactgaaagggcactaaggtcatcttttaattagcatttgtttctgtttttacagatatcagaagaattcctccaataccttccttccctcccccacctacttcttgaaaaagagaaagtttaggagatcgatgagcagtatgtttgggattttaacaaagtcaagattaatgtatatatgaaacagtaatatttctatgttaaaactttggctagttacataaagcagctctgtaaaggaaaggcattaactcttcccacttgacaga

SEQ ID NO: 559128 - DNA, 577 bp, Homo sapiens
attgggccttgctgtcacttatagaatatctcagaaaggttttgcttcttgaggatcatatgaggatgtgggtggggtggggcttggctgtgacaggcaactgtgggacctcagctatctttttattcatgcctccccctgaatttcagaatttgcaggtccatgagcatgccagtattaaatccctggcactattctttgaacatgcccaaacaggacagagctttgctctatgagaatgtggtatttctgggtaatagttgatgaaagagaaaaaaaagataatttgtaaatgctcaagatttttaaactgaaagggcactaaggtcatcttttaattagcatttgtttctgtttttacagatatcagaagaattcctccaataccttccttccctcccccacctacttcttgaaaaagagaaagtttaggagatcgatgagcagtatgtttgggattttaacaaagtcaagattaatgtatatatgaaacagtaatatttctatgttaaaacttyggctagttacataaagcagctctgtaaaggaaaggcattaactcttcccacttgacaga

SEQ ID NO: 559129 - DNA, 356 bp, Homo sapiens
atgctatgatctttctaccatttygtcttttattttcttcatctctttacttcctccccacaaaacctccaccaccagagttgaacagaggtcaaataggaatctttcccttgtccatggtggtggttggtgatggtgtgtctgcaaatttgaaagtgtttctggaaatgctgtctggaagctttatattgtaggattttgcctggccttttttaatggatgtaactggaccctctttcctcaccacccaatgtgtgagaggaatcctgatagtctatgtatgctgtatgggtgaggcctatgtctctaattaccgctgcagacaataatgtgggaatgccaacagcaactactgt

SEQ ID NO: 559130 - DNA, 522 bp, Homo sapiens
cctttttaaaaagtcagaaaaccawattctcacaatatttaatgcagctttttttcttgtgtaaggattgaaggctgaattatgccaaaggtgtgacaattagaaaaaaatatgagtcagggaaaattttcctcaggctgatttcgtgccttcaatacgtgcttacatcctaaggcctgcacttagaatgggaatttgagatattagaaaataagataaagaaaccaaaagacacatttttctctaaatcctataaatggcatttcttttctttgactcacaaaggtatccatgtgatattcagcacagacttactaaatactacctcatggctgccacagtggtggttgtatgggcattaggagagaagggtctgcctgaaagacttcacatagcccaaaaccatcaccaccctgctctgtgtcaccctcatctgtcaccctgaccaaggcaaaagcctcccccaaatagtttctctgtttctttctcttttccctagagtctattcccatgcaaaagtca

SEQ ID NO: 559131 - DNA, 589 bp, Homo sapiens
ctgcactccaggctgggtgacaaagcaagaccctgtctcaaaaacaaattaraaacaaacaaacaaaaacaaaacattgcttcaatgcctgccctcagagagaagtcattgctcacattcatattttctgggacaaattgctagatatagaattgttgggacaatggatgtgaacaaattgtaaatgctcatacacgctgacaaactgtcctgcaaataagttgcaccaatcacactctaccagtaatatatgtaaatgccccaagttatggtcactttccttacatcctcactaactttattatcattttttctctttgccaacttaaaagaccaaacaaaggcatatcaatttgattttaatttctcttattgctagtgagattgaacctgttttcatttgtttatcatacatttgtgtttcatctttcaaattatttattcatggtctttatccatttttctattaggatatttgtctatttgattagcaagaatattgtatgcattagggatatgcaccttttaggtgacatatagattatatatgtttttcccaactctttgtcttttaacttccctcatagtg

SEQ ID NO: 559132 - DNA, 589 bp, Homo sapiens
aagataatgaccatggttaactccaaggaaagaagctgtatctctcacctgtaaggactatcctcttaaggtcaatagaagtcagttctgcacgattctgwacaagggcctgtctcagaaagctgccatcatcagtgattctgcctggtgtcagccaaagtgagagccccaggagagaaaaccaaagtcactgcaatgaactcatgcttaactggcaatgtcttattctaagcaaggcgaaaatttttaaacaacacaaaaactaagggatatgtacttttagccaataactagcttcttttttctgtacaaagtttttgagcttctgacaccatactgctaagataagaaaggagaggttggaagatgctggggctttgaggttcagatcatgtggtctacagagtgagatgtcccccatttctatccttccagacttccaagtaacaccatagacccaggttgtaagctcttctgaaccaaaaccaaaaatttagaaacattcaggcacatagtgcttgcaactatggctttcaaatggtggtgtatagaatgccctggtgtaggagtaagaatccaccgaaggatc

SEQ ID NO: 559133 - DNA, 589 bp, Homo sapiens
ctgcactccaggctgggtgacaaagcaagaccctgtctcaaaaacaaattaaaaacaaacaaacaaaaacaaaacattgcttcaatgcctgccctcagagagaagtcaytgctcacattcatattttctgggacaaattgctagatatagaattgttgggacaatggatgtgaacaaattgtaaatgctcatacacgctgacaaactgtcctgcaaataagttgcaccaatcacactctaccagtaatatatgtaaatgccccaagttatggtcactttccttacatcctcactaactttattatcattttttctctttgccaacttaaaagaccaaacaaaggcatatcaatttgattttaatttctcttattgctagtgagattgaacctgttttcatttgtttatcatacatttgtgtttcatctttcaaattatttattcatggtctttatccatttttctattaggatatttgtctatttgattagcaagaatattgtatgcattagggatatgcaccttttaggtgacatatagattatatatgtttttcccaactctttgtcttttaacttccctcatagtg

SEQ ID NO: 559134 - DNA, 589 bp, Homo sapiens
ctgcactccaggctgggtgacaaagcaagaccctgtctcaaaaacaaattaaaaacaaacaaacaaaaacaaaacattgcttcaatgcctgccctcagagagaagtcattgctcacattcatattttctgggacaaattgctagatatagaattgttgggacaatggatgtgaacaaattgtaaatgctcatacacgctgacaaactgtcctgcaaataagttgcaccaatcacactctaccagtaatatatgtaaatgccccaagttatggtcactttccttacatcctcactaactttattatcattttttctctttgccaacttaaaagaccaaacaaaggcatatcaatttgattttaatttctcttattgctagtgagattgaacctgttttcatttgtttatcatacatttgtgtttcatctttcaaattatttattcatggtctttatccatttttctattaggatatttgtctatttgattagcaagaatattgyatgcattagggatatgcaccttttaggtgacatatagattatatatgtttttcccaactctttgtcttttaacttccctcatagtg

SEQ ID NO: 559135 - DNA, 292 bp, Homo sapiens
aactctgccactgactagctttgtgatggtgggtaagtaggtaagaagctagggaaccacttctgctagtgagagctgggcgagattgtccacagagtcttcccagttcccatactgtgtgattgtccgcaaatctccaggtttgaaaaagaggmaaattatgcatttaaatgaaatggaattttataaaggatacaacacaaaacagattaaaagacagattgtttggcttgaattcctaaacaattacactgcaaagtacaaaatgaggcttcttgtttgtaacttaaaa

SEQ ID NO: 559136 - DNA, 626 bp, Homo sapiens
aagctggaaaccatcattctcagcaaactatcgcaaggacaaaaaaccaaacaccgcatgttctcactcataggtgggaattgaacaatgagaacacatggacacaggaaggggaacatcacacaccggggcctgttgtggggtggrgggaggggggaaggatagcatttggagatatacctaacattaaatgacgagttactgggagtggatcttatctgaccctccagactcagagctatagcagaaacttaaagattctcacagaaaaggcatatttatcttttttgatatcttgagccactgtgaataaatactttggtcctttgtgaaatgcatgaaagacttctttttgatttccaatagtcctaaaacagcatttccatttccatggagctaaggatctgatttaaaaaaagaaaaatcccagccttagagcttctctagtgtgggctaatatgtttggttctggggtagatgtaatttgtcttggggttaatgttttaactctcacctcataggctatttcaaaaattataaatcaggatatacctgacatgaaaaagtggagttgggctgtgagacaagaaacttggggtctagttctagtactgttatgaaccagc

SEQ ID NO: 559137 - DNA, 481 bp, Homo sapiens
caatccgtgggactaagtagaccactagcaaagaatcccaatcctgccttccacagtctccagccaggacttaacgagccatgaattttcaccacaaagtagatttcttcattaaatagctaattaagctcttttgaaaaagtgattttcaacagagctgataaattcaacccaaattggtgcattaactaatcaaagcaagagacttctgctcaaaagtacaaaccgaaaggcttacaattcccacctcctcacataccttcattcattcatagatagaccgataatagacagatagatagatagayagacagacagacagacagacagacagttaacctgttcctaaatgtgattaaataaggacttggaacctgaaatcatgaatttaggagaagctatctcagtccaattcacactggagagtatggaaagaacccagccaacctctgcttcctgggctgagtccatttccaggtca

SEQ ID NO: 559138 - DNA, 525 bp, Homo sapiens
ttcagctgaagcaatgcttgtcaatacaatgatcactgggctgtaaactcagtgcakgcaaatgccctacttttaagcccctctactcaagtaggtgaacagggggagattgcagacagccaaacataaagaaagctaaatgtaaaggatgtagcatggtcctggctccgtccctcacctgccaccactaagagagccttagccttatactcccgcctgaggtgttcagagcaacagactatgacatgagacaaagagggtgcttctcagggacagataagtctgcagtcaacaggctaaaggagctcttttccccaaattcaacttaatcccaggcatttaaatactataggcaattcatgctagcttaccctttggggaaaatgtgggagaaaaatttaaagacatgagtattggtgatagaatggagagacagaaaccttttgaagtaattctttaaagctgtgtcctttcagaaacacaataaagatggactctaggtatactatgtgcacacacaggtaa

SEQ ID NO: 559139 - DNA, 506 bp, Homo sapiens
gaacctcaggaagtagaaaaggtggtgacagatagaaatggcaaatgtaagtggcctaaagaagaaggcctgcagcaggctagtgtsgcttagcataaaaagtctatatggttacctttgagagcatcactcactcaatcaatacctacaaagcacctcctaagtgcacagaactaaggtaggtactggagaacagccaataggaaatggatgctgtccttcgggagctagcgtcttacaggcagtgagaagagaccaccatgggagaaggaaaaaaaccattgcagctggtgagaagtgaggctctatagagaagaaagtcaacagtcaacattgtgctactcctaggtcaggaaaaacagatctaaattgcctggcattgcccatttttgcatcaacacatatttattgagccactgaacatacaagagagaggcaggaaggaaaagccagtttttgcccaaggagaaatttataattttggagcaagacaggcctgatctccc

SEQ ID NO: 559140 - DNA, 506 bp, Homo sapiens
gaacctcaggaagtagaaaaggtggtgacagatagaaatggcaaatgtaagtggcctaaagaagaaggcctgcagcaggctagtgtggcttagcataaaaagtctatatggttacctttgagagcatcactcactcaatcaatacctacaaagcacctcctaagtgcacagaactaaggtaggtactggagaacagccaataggaaatggatgctgtccttcgggagctagcgtcttacaggcagtgagaagagaccaccatgggagaaggaaaaaaaccattgcagctggtgagaagtgaggctctatagagaagaaagtcaacagtcaacattgtgctactcctaggtcaggaaaaacagatctaaattgcctggcattgcccatttttgcatcaacacatatttattgagccactgaacatacaagagagaggyaggaaggaaaagccagtttttgcccaaggagaaatttataattttggagcaagacaggcctgatctccc

SEQ ID NO: 559141 - DNA, 506 bp, Homo sapiens
gaacctcaggaagtagaaaaggtggtgacagatagaaatggcaaatgtaagtggcctaaagaagaaggcctgcagcaggctagtgtggcttagcataaaaagtctatatggttacctttgagagcatcactcactcaatcaatacctacaaagcacctcctaagtgcacagaactaaggtaggtactggagaacagccaataggaaatggatgctgtccttcgggagctagcgtcttacaggcagtgagaagagaccaccatgggagaaggaaaaaaaccattgcagctggtgagaagtgaggctctatagagaagaaagtcaacagtcaacattgtgctactcctaggtcaggaaaaacagatctaaattgcctggcattgcccatttttgcatcaacacatatttattgagccactgaacatacaagagagaggcaggaaggaaaasccagtttttgcccaaggagaaatttataattttggagcaagacaggcctgatctccc

SEQ ID NO: 559142 - DNA, 471 bp, Homo sapiens
tatttcgtgtgtggagtttttatggttttctactataaggtcatgtcatctccagacagataatcttacttcttccttatcagttggctgccttttatttctttttcttgcctaattgctctgtctaggacttctagaactatgttgagtagaagtgctgagagaggacatccytgttttgtttctggtcttagagaaaaaggtttttgtttttcatcagtgagtataatgttaactctgggattttcatatgtgacttttatttttggtttgatataattgatatatctcaactttattgagatatcattaacataaaattttgtatatttaaggtgtacaacttgatgttttgatatatgtatatatcgtgaaagaatcaacatatttgtaccaattaacatatcttacataatttttattttgttgaggtaaattttttctatacctatttgttgagagtttttatta

SEQ ID NO: 559143 - DNA, 471 bp, Homo sapiens
tatttcgtgtgtggagtttttatggttttctactataaggtcatgtcatctccagacagataatcttacttcttccttatcagttggctgccttttatttctttttcttgcctaattgctctgtctaggacttctagaactatgttgagtagaagtgctgagagaggacatccctgttttgtttctggtcttagagaaaaaggtttttgtttttcatcagtgagtataatgttaactctgggattttcatatgtgacttytatttttggtttgatataattgatatatctcaactttattgagatatcattaacataaaattttgtatatttaaggtgtacaacttgatgttttgatatatgtatatatcgtgaaagaatcaacatatttgtaccaattaacatatcttacataatttttattttgttgaggtaaattttttctatacctatttgttgagagtttttatta

SEQ ID NO: 559144 - DNA, 471 bp, Homo sapiens
tatttcgtgtgtggagtttttatggttttctactataaggtcatgtcatctccagacagataatcttacttcttccttatcagttggctgccttttatttctttttcttgcctaattgctctgtctaggacttctagaactatgttgagtagaagtgctgagagaggacatccctgttttgtttctggtcttagagaaaaaggtttttgtttttcatcagtgagtataatgttaactctgggattttcatatgtgacttttatttttggtttgatataattgatatatctcaacttyattgagatatcattaacataaaattttgtatatttaaggtgtacaacttgatgttttgatatatgtatatatcgtgaaagaatcaacatatttgtaccaattaacatatcttacataatttttattttgttgaggtaaattttttctatacctatttgttgagagtttttatta

SEQ ID NO: 559145 - DNA, 471 bp, Homo sapiens
tatttcgtgtgtggagtttttatggttttctactataaggtcatgtcatctccagacagataatcttacttcttccttatcagttggctgccttttatttctttttcttgcctaattgctctgtctaggacttctagaactatgttgagtagaagtgctgagagaggacatccctgttttgtttctggtcttagagaaaaaggtttttgtttttcatcagtgagtataatgttaactctgggattttcatatgtgacttttatttttggtttgatataattgatatatctcaactttattgagatatcattaacataaaattttgtatatttaaggtgtacaacttgatgttttgatatatgtatatatcgtgaaagaatcaacatatttgtacyaattaacatatcttacataatttttattttgttgaggtaaattttttctatacctatttgttgagagtttttatta

SEQ ID NO: 559146 - DNA, 491 bp, Homo sapiens
ttatgtactcagtagaacttttaaattaaaaacaattatcaacatcaaaggcatacaaaagagcttaaagaataacacaggccaggcgcagaggctcatgcctrtaaccccaacactttgagaggctgaggcaagtggatcacttcgagctcaggagttcgagaccagcctgggaacatgcagaaaccctgtctctacaaaaatacaaaaatcagccaggcattggtggctcgcacctgtagttcaagctacttgggaggctggagaactgcttaagcctgggaaaatggaggccacagtgagctgagatcgcactgctgcactccagcctgggcaacagctggaaaccctgactcaaaacaaacaacaacaacaaaaaagaataacacagaaaattcttctgtatcttagctttaagaagtaaaataaggatgggcgtggtggctcacacctgtaatcccaacactttgggaagccaaggtgagcagatc

SEQ ID NO: 559147 - DNA, 597 bp, Homo sapiens
ggcacaaaatctccagagtttcttatagagctcagtgggttccaaccacttgaacttgtcaccacctaaaccctggagttaatttactctctgcttcatttcattcgttggtctaatccatagctgcaattttataaaacacagacctgggctggggagtttttcagggtcccattctgaaataaatcatggcagttggtgggctatatgacacatgcatggggtgtctggaagcatctgagttctacctcagtccatgtaagccgaggtggggtctttttagtgcatcaagagaggtgcctctattgagttcaataggtccttttggggaatccatctgcttccctcatttctatccaggttgaagtgggcatgtgggacttttgtaaagaaactgtaatcccagggttgctgcatggagtaattgcagggaataccattgtgcaatgcgaggtctgcatggccacacatgatggtcccagaacactgtgttagtccattcttgcattgctataaagaaatgcctaagagtgggtaatgtataaagaaaaggagttttattgkctcacagttttacaggctgcacaggaagcatag

SEQ ID NO: 559148 - DNA, 647 bp, Homo sapiens
ggattatttttcatgtttcctggaggtaaaagcagtgtcctcaacttgtattcctctgtttcctcatgtyggagactatctgtttccattctctttacctcctctctggctgtgtgtccccagaaggcagcctggattttgacagcagcaacctcttctttttccttatcttcctcagaagagtctaagatggtgactggtgtctctttctccttcccagatattggagagttttcttgtttaggatcacatttctcaggtggttcttgctcctcgaatgcatgactgttctagaagcagtcttctacctgagtcccccattctgctggatcaaaagtggttttctctcttttctctggaaagctgtcaaaatatgctgctgcaaaagctgtatattatctggttgctctctcagaatctcgtgggtcagctctttaagaagactcccaaatccttgcagaattcagtagtgggtattggagaatggaatcgacatcctcttggtaagaactgcctatggagcctcctctttctctgggagctggtgccgctggtccagcttacttcctcctctgacctcatgttctagggatgcatgatctctctcttccggggcaattcaggaccagcactgtccagcctgcatc

SEQ ID NO: 559149 - DNA, 520 bp, Homo sapiens
tcctcctgatgtctaccacaggtccaatcctcttcctctaaggctccagctcctcttgcctgagtttccccccacttctgctttcttttctaggattttcagacctccagggtcctgggagaccagggcagaggtcatcccaccagaacatgtcttggtgactgcaatctctgcccctcagaccccagcatttcctgagctctgtgggccgcccagtcataccctcacccaggcaatcttggagtcactttgtgactcagccgctcagtctcctggtcacttagtcactcaatcagctcttcggtagttaaatcaactaaccagtcacatgcttctgcccttggccaggtgctcagatacttcttactccgccatttcrtttgctatctgttcattgatcagccattcactgaacctgaatgagccagccctgtgctaagttagtggggataaacagacaccaggtacaaaccctgtcctgaaccagggcagctgccagtctgtgtccatcagtcattgg

SEQ ID NO: 559150 - DNA, 620 bp, Homo sapiens
ctacccattggtcttgagtcttcctcgctgaccttcatccctctgcctctccaagtctgatgttgttcctcacaaaggtgctcaaagggaactcggacacctttctgtccttggtgctgagaccccatgctatcctcccagttctctgctaccagaccacccttctcgagatggagatagatgagggatggggagctgggaatgtccttttaagggggttctctatggggccacgccaaggacagagcctaggggagggacaaagaggtggccatcttagggacccggaggccagcaaggcagtgagctgagaamcagaaacatggatagagggacttgctatggctggagaaaggccaatcaggagacacacaggaaggtcaccgaggtcacccctcttctgtgtggctgggagcattctcttgggatgggcaaagtgatactggcctgtctcagttatctactgctacaagaaaaagagtctcaaatcaaggggcttaaaaacaagcccaacttttattttattcacaaattggcaatttcggtgaggcttagtggggagggctcatcttgctccactccattttggtcagctggggcggcccaaagcctgggccagg

SEQ ID NO: 559151 - DNA, 604 bp, Homo sapiens
aactgtagcagtttccagaaggcagtgcagacaggcgtggctgggggaggcggaggcctggctcccatgtggtccttctgccctaggcccaggcagcccctcctggtccatcccgtactctcagctgtccttgatgactcactcactctcatgctctgaattgctttgtctgtgcccttgagttattgagttattagaggaccttgagttattaaaggaccttgactcttctttaaatagggaggccatgagaatgtgcccaatctgcaagcattcttcaagatggccagcaacaagctgggaccagagatcccaaaagtaagataatacgcctgcattcaggcagctcagtccagccaagaccagcacgcattcatacatagggaagtggtgcctgaagagaggctcacrtcaagtggaagtcttcaccgaaccttgggatggctttccagatgacagtgtgtttcctccatcagcctggaaacttcctgagaattgatatcaaatcaagtctccctcatcaggcgaggtgcttcagaggatattgactaggcccttcccaacaggctaggagatcttctggggaaaaagaccaggtctctag

SEQ ID NO: 559152 - DNA, 621 bp, Homo sapiens
atatgtacaattaattatgtgtcaagaaaaaaaaataaaacaataaacattttaaaagtcaaacaaaaaaaaaggaagattgccttcaaagtagtagcaataacttacttctcaacaaaaacaatgaaggccagaacaatgaaagatatctggaaagtcctaagttaaaaataattgccaactcatcattatatattttgtaaaaatatcttcccaaaataaatggaaaataaagacatttccagccaagcaaaagttgaagcatttataaccagcacacttatatcaagaaaagaaagaaagaaagaaagatctgcaggcagaaggaaaataaccagattaagatcacagatattcagaaaagaatgaagagctaaaggaatggtaaagatgtctgtaaaaccgaaatgatatgttgcctatatagaaaattccaaagaatctacccaaaaaactgttagaaytaacaagtgactttagcaaggtcataagatgcagggcaaatatacaaaaaaatcaattgtatttctacatagtggcaatgaacattggaattccaatttttgttaggctgatgcaaaagtaattgatgtttttgccatgactttcaatggcaaaaac

SEQ ID NO: 559153 - DNA, 549 bp, Homo sapiens
ggcagacatgagttttcttgatcagcaaatgccagtggtgcatctatcatcatgttttggcttcaaaatgagtcttctgagctgaaagggcaagaacttctcccacggtgctacactgaggacccaagaagagtgttagagcctgggaaaagagagggatatttgcttccctttttcttctgtaggaattccattcaaaggaaacaggagcaccaaggagagctatcayaaagcatttggatcactcacaacatctgatgagactgtcagcagcctgtttcagtacatggtcttaactatacaacatcccaggaagactaagaaaaatacaagttgttctcactgttctcaaatgtgaagaccaagtctcaaaagtttagcatgagaaccaactcgataagtaatctgcatgcttagataactcctgtggtaaagtagaagcttttagagatgtgagttaagccgaccaggctgaagggctcaaatcagctggaaaaggcttaaaagcagcaagcagccactgccagacattgcaagcaatgcttgaaa

SEQ ID NO: 559154 - DNA, 607 bp, Homo sapiens
attaagcaagctccccaggtgatttttggcccaaggaagttggggatctgctgtactgagggaggatattggctttggagtcagagaaacccttgctgggttctgtgcttcgctctttgctagtggcatgattttaaaaacagctttattaagatagaatacacataccatgaaattcactcatgcacgaatcagtggtttctagtacattcacagaggtgtgcaaccatctctacaatctattgtagaacaattttatcacccccaaaagaaamcctgtgtctattagcagtcactccccatttacccttaggctcccagccctaagcaaccattaatcttatttctgtctctatggatttgcctatcctagacacttcatatcaatggaatcctacaaaatgtggttatttgtatctggcttcttccatttagcataatgttttcaaagttcatccgtgttgtaccatgaatcagtacttattccttttcgtggctgagtaatattctactgcatggatatgccagcttttatttatccattcatctactgatgggcatttgagctgtttccagtttgaggctattggaaataaggttgctatga

SEQ ID NO: 559155 - DNA, 558 bp, Homo sapiens
cctccctgctgttcagtgccctaagagactgctgaatgaactgcatttaccagctctcttgccctcttgcttctggtaggatttagccaacggggggcaccagtgaagatcagagaacagaggagtccctgattctctgcctgaggattgaatgcatccctctatcaaaggacacactcctggtggccaaccctttccacacagctccagctccacttgttctatttccatttcttgcccctcaggcctagggatggtagccgcttccctgcctggctagctccaaggtaatgcaacattccttgttggtttcctttaaccctgtacacatctctgtaaaagtccctgtttggcataaatgtaacagctaaaactataaaacacttagaatacaacatarcaataagtattcgggtttaacaatggattcttagatatgatcaaaaaaaccccagtcaacaaaagaaaaaatagatacactgaattccatcaaaattaaaaactttttcataaaagaacactagcaagaaagtgaaaaagacaacccacagaatgaca

SEQ ID NO: 559156 - DNA, 618 bp, Homo sapiens
taaatgtaacagctaaaactataaaacacttagaatacaacatagcaataagtattcgggtttaacaatggattcttagatatgatcaaaaaaaccccagtcaacaaaagaaaaaatagatacactgaattccatcaaaattaaaaactttttcataaaagaacactagcaagaaagtgaaaaagacaacccacagaatgacagatctgacaagggtctagtatctagaatataaagaactcttaccaatcaacagaaaaagacagacaatccaattcacaaatgagcaaagaccttggataggcatttctccaaagaagagagrcacatggccaacaagcacatgaaaagatattcccaacattagtcattagggagatacaaatccaaacacagtgagatactacgtcacacattgtaggatggccataatcaaaacaaaacaacaagtgggttggtgaggatgtggagagtggaaccttcatacactgcgggtgggaaggtagaatggtgtggctgctgtggaaaacagtttggcagttcctcagtaaattaaatgtagaattaccatgtgatccagcaattccgctcctaggtatataccccaaataattgaaa

SEQ ID NO: 559157 - DNA, 582 bp, Homo sapiens
agatacaaatccaaacacagtgagatactacgtcacacattgtaggatggccataatcaaaacaaaacaacaagtgggttggtgaggatgtggagagtggaaccttcatacactgcgggtgggaaggtagaatggtgtggctgctgtggaaaacagtttggcagttcctcagtaaattaaatgtagaattaccatgtgatccagcaattccgctcctaggtatataccccaaataattgaaaacaggtgttcaaataaaaacttgtacatgaatgttccattccatcacccatggatcctcccagtcagctcaacttatgagcagaaaacayttgcttttagaccctcacaggagacaatgggtgtcattgcaaaaagccaatgcatggagcctatggaggggagggctgaccattgtccaggagtgctaatcacagcgtaacacaaagttcagggtttctgccagctgggttatttctcagtatgctggagggggtggaggttgcccttcacatgcctagagaggcccctgatttatggggctttaagaagaaaacaaggtcagaggaaaattggctgacc

SEQ ID NO: 559158 - DNA, 693 bp, Homo sapiens
gccagtactgaagattcaaaagaattgataaaatagtccctggcttcaagaagctcctactctggtctatagttatagaccagcatagttacagaccagcagactccagaatgctgtgttataagtaatctggaaggaagcttgcattgtggaagcacaaagtgaggaaagatcaagtcttcctgtaggtagagggtcaggggacaccacaccaaacaaagaagactagcaaggataagtatgcataatggctgaaaggtatgagtgtgcatgatggctttaggaaactatgaatacccagtgaggctgaaataagggaagcagsgaaataagattgggggtggaggtgaggatttacaagatgtttctgaaggacaggagcaaagtggtctggctgcaagaaaaggttatggttaaaggaataaggaaaactaacattaattctttatcctgtgaaacacaaatacccagttagtagactgggctctaccacaatctgaagccttacctcctagatccttgagtggctgccacctccacaaactccttcgttttctgtaactcaagagagagctcaggaatcaaggacttgacacatggcagaggccctaggtgtcttgagccagggaacctcggactggaaggagtattctatttccaagtggtgagaaggggccataaagaattcaaatt

SEQ ID NO: 559159 - DNA, 537 bp, Homo sapiens
gcctactttgttgagtttttataatgaagggatgcagaattgcatcaaatgctttttccatatgttttgagatgatcatatggtttttcctcttattctgtttatgtgatgaatcacatgtattgatttgtgtatgttgaaccatccttgcatccctgaaataaaacccacttgattgtggcttattatctttttgatgtgctgttggattcagtttgttagttttttgttgttgttgttgttttgttgagkatttttgaggatctgtgttaatcagggatattggtctgtagttttctttttttgttgtgtccttgcctcatttaggtatcatggtgatactggcttcatagaatgagttaaagataattccctcctccttgatttttttgggacagtttcagtagcattggtatcagttctttgtatacatggtagaattcagctgtgaatccatctggccctcggccttttttttttttttggttgagggatttttttattattattactgattcaatctgactacttgttatc

SEQ ID NO: 559160 - DNA, 528 bp, Homo sapiens
aattcacggttgagagtttttcctttaagtctgaaaattgaaccccaatttcccctggtttgtaagggttctgctgagaaatctgctgtctcatggagtttcctttataggtgattagacactttcctcttggtgactttagaatttttcccttactttggcttcagatagtgtgatgactatatgtcttggtgaagtatatcttgcaatgtattttattggagttttctgagcctcttgtatcaggatactaaatctctaacaagactagggaaatgttcctcagttatttcctygaataggtttttccaacattttttcttctgactcaagtatacctatgacttgtaggtttggacgttttacataatcccatacttcttgaaggctttgttcattttaaaaaaactttttatttttgtctgactgggttaattcaaaagacttgttttcaagcttggagattcttttttctgcttggtctagtctattattaaagctttcaactgtattttgtagtttcttcaa

SEQ ID NO: 559161 - DNA, 648 bp, Homo sapiens
ttttacataatcccatacttcttgaaggctttgttcattttaaaaaaactttttatttttgtctgactgggttaattcaaaagacttgttttcaagcttggagattcttttttctgcttggtctagtctattattaaagctttcaactgtattttgtagtttcttcartgaatttttcatttccagaagttctatttgtttttgtcttttaaaatatctatgactttggttaatttttcatttatattctgaattgtttttctgatttctttatattgttttcaactttctcttggatctcactgagcttctttaaaatcagtattttaaattatttacttggtatttcaaatatttcattttggttaggatccattgctaaagactcagtgtgttcctttgtgggtgttgtaacagttttttcatactttcacaattgtttctctgcccttctcatctgaataaactatctctttttattattttttaatttactttcatctggataggatttttccctccttgatgttgtgtagggtcgtttggctttggttctgagtgctttcattggccatgactctatatgagttccttggttatagatagccattgtgtggtggctttctcatattctggttgtagtagtaa

SEQ ID NO: 559162 - DNA, 521 bp, Homo sapiens
gtcaagtggcattttctggggtgagaagacctcattctatcttgtttgctgactgctttaccatctggcctcccccagtccatgctaactcttcaggacaggaatgggtcttgcttttctacatatttccttgagaaatgccagtggagagtgtgccttagtctgttccagctgctgtaacaaattgtgatagactgggtggcttaaacaacacaaatgtatttatcacatactgaaggctagaagtctgtgatcagggtgccagcatggtcaggttctggtgagatccctcttcctggtttgcagatggctgttttcttgcagtgttctcacatgggggagagcagagacaggaagctcttgtatctctctctcttttattttttttcaccgaatctcactcagtcacccatgctggagtgcagtggtgcgatctcagcccaatgcaacctctgcctcctgggttcaagtgattctcatgcctcagcctcmtgagtagctgggactacaagcatacacca

SEQ ID NO: 559163 - DNA, 559 bp, Homo sapiens
ctgtgcagttccacaacccctgctggccccctgacactgtggtcttcctggtccaatgctgggcaatggggaccctgagataaggaagacggagtgccagcacccccagacctcacattccaagggagaagtcagggacttatacagactaatatgattcaaggcactaagagcccaaacaatgggacacagcctgataaacagcctggagagtagggaggcaatcagggaaggtttcctgaaggaggagagacctgagcagagtggagagttggccaagcagaggaacttgagggcattgtcagcagaggggatggatgcaacaccaccttgaggagatccttcttccctgcaccttctcacctccaawctcaacacaaatttctctgtaccacccactggtgtggcccctggtgtatgctgctctgtgtagcagtgtgttcatctggctgcttggcatgaccagactgtgtgtgtgtgtgtgcgtgtgtgtgtgtgtgtttgtgtgaagagagagggagagatttatactctccttctaccctctgtgctgtcccca

SEQ ID NO: 559164 - DNA, 471 bp, Homo sapiens
attgtagttggtaggggctctggagagagaggaatggagagttattgtgtaattggtgtaattggtacagagtttcagtttgggaagatgaaaatttctggagatagatggtggtgatggtggcacaacaacgtgaatgyacttaaggccactcaactgtacaccaaaaaatggttaaaatggtaaattgtatgttatgtatattttaccaaaataaaaaataacagtaaaaaatcagtacattttaacacatatatttttatgtacaactatattttccaaaaaataattagtaagaagtggcattattttgcacttttgcaaatctcttaaagtttggtttactagaagataactgaggccgggcacagtggctcgtgcctgtaatcccagcactttgggaggccaaggcgggcagatcacttgaggtcaggagttcaagaccagcttggtcaacatggtgaaaccctg

SEQ ID NO: 559165 - DNA, 550 bp, Homo sapiens
cgagactccctctcagagaaaaaaaaaaaaaaaaaaaaatgctgcaaataagtgaaattgacctggagacagaaaggatagagtagagataaatggaaaagtatgaaaataatatactatgtcttaataactgagtgagattatatgatgctttagtctgtttgtgttgctataaaggaatacttgaggtgggtaatttataaaraaaataagcttatttggctcactgttctgtaggctgtacaagaagcaatgtgccagcatctgcttctggtgagggcctcaggaagcttctactcacaggatagggcaaggaaagtcagtgtgtacagagatcacatggtaagacagaaagtgagagagatgagtaagggtcagtctcttcaccagtcagttgtttcgggaactaagagtgagaactcactcctgtgaaaatggcaccaagccattgatggatcccctacccaaggatccaaacacctcccacaaggccccacctccaacattggaaatcaaatttcagcatgagacttggcaggacaaaacaagc

SEQ ID NO: 559166 - DNA, 550 bp, Homo sapiens
cgagactccctctcagagaaaaaaaaaaaaaaaaaaaaatgctgcaaataagtgaaattgacctggagacagaaaggatagagtagagataaatggaaaagtatgaaaataatatactatgtcttaataactgagtgagattatatgatgctttagtctgtttgtgttgctataaaggaatacttgaggtgggtaatttataaagaaaataagcttatttggctcactgttctgtaggctgtacaaraagcaatgtgccagcatctgcttctggtgagggcctcaggaagcttctactcacaggatagggcaaggaaagtcagtgtgtacagagatcacatggtaagacagaaagtgagagagatgagtaagggtcagtctcttcaccagtcagttgtttcgggaactaagagtgagaactcactcctgtgaaaatggcaccaagccattgatggatcccctacccaaggatccaaacacctcccacaaggccccacctccaacattggaaatcaaatttcagcatgagacttggcaggacaaaacaagc

SEQ ID NO: 559167 - DNA, 585 bp, Homo sapiens
gtagtaccttgtaatccatggtaaagagttagattggtagaaggcaggattttaagaacagagaatgacacgataatctatgcagttaaaagattgcagtgtgggctagtgggtggagatagaattaaaggcaagcaaacctgggaactgaaagacctatttggagattactataaaacaccaggccagtgaagtgagcaaccatcctggattgccttcaattgaggggttccctgaaggtggaacttgcagtactaaaacctagaaagtcccagacatatcgggatgttagttatcctytaggcatgacatcatgatgtcctgaatttttagatgacattaaatggaaggatggggatggtctagaggtcaatggcttattgatggactgaacaaaaggggcagagaaaaaggagagttcttgacttctggcttttgcaaccagttagtaggtctttccattgagatagatgatttcctatttctctgtctacctctgggctttttgagaagaaagtaagtcaacacagaagatgagagtgaaagaagacagcttcccattgtgttatcacttctaggacttca

SEQ ID NO: 559168 - DNA, 528 bp, Homo sapiens
tggctcttccttccggtagcaaattgcataagttctcagagcctcagtttccttatctgtgaaatgttacagctgattttttttccctaaaactattaggttggtgcaaaagtaattatggtttttgccataataactgattttcttcgttcgataaataaaacatattcattgcacaaaatttagaaatacagataactcccattccgccccccaaaagaaagaaaatagaaattgcctcagtcttattatccagagataccattgttaaaccctctgttcactatgttgcttcaaggactagaaaattataagaaaatactgtaagttgcaaagctctatataaataagcggtatttttattgagtcaacagaattcaaatttgaacctcttcacagccaagaagccctatattatttaacctcattttaaatttcattttgtttacaktttttctgaatattaaaataacaatgctgattttttggtttatccatgttttctaatttttctataatgtacatgta

SEQ ID NO: 559169 - DNA, 585 bp, Homo sapiens
tcctttttctatttacccattgattttttttcttttcctgtcatgttttgcaaagtttttgtcaaacaagccattttttattacatattagcctaatagcccaattataaaggaacatagagtttaatatattgagtgtggcttgctgatcaccattcatgcttgagaatctggggaccccagagtgggaacagctagtctgttgcatgagttgctctgatgctcactgaaatctggaactggctctccagaaccaggccttytagggtacatgcacaatggtctagagcagctctcactgttcaatagaaatgtaacatgagccacatatctcattaaacattttctagcagtgacatcttaagtttgaaagagacaaatgaaattaattttaaagcatagtttagttaactcatttagaaacattaaaaaaatttagttaacccattatatccaaaatattgtcattttaacaggtaatcaatattaaaaactctcagtgaggtattttccttttctaccaagtctctaaattcttttctttctttctttttttttttttttttttttttgagatggagtctc

SEQ ID NO: 559170 - DNA, 573 bp, Homo sapiens
gcccatctggctgctaagtctgtgttttaaaatctgtaactgcttcccacagagaggaaaccacctctggtggtttaaaaagagagagtgcctgtaacatgctgagaataatgcttacatggaggcttaataaatagatcttactgtctcctataagaaaagggaacagcttagtagcaaattcaggccactaagagtccccaggagtctgtgaaaactgtctagattcatcactaaccacaatggggcaggcctcagagtgctttccagtcgggaagtaaggtctggagtcaagaaacatctttcttgtacccatgagatgggaggcaacataaaatagtagttaagagcaagagcttctcacacctgtaatccyagcactttggtaggctgaggcagatggatcacctgaggtcaggagttcaagaccagcctgaccaacatggtgaaaccccgtctctaccaaaaatacaaaaattagctgagcatggtggcgcatgcctgcaatcccagctacttggaaggataagacaggagaataacttgaaccagggaggcagaagttgcagtgag

SEQ ID NO: 559171 - DNA, 573 bp, Homo sapiens
gcccatctggctgctaagtctgtgttttaaaatctgtaactgcttcccacagagaggaaaccacctctggtggtttaaaaagagagagtgcctgtaacatgctgagaataatgcttacatggaggcttaataaatagatcttactgtctcctataagaaaagggaacagcttagtagcaaattcaggccactaagagtccccaggagtctgtgaaaactgtctagattcatcactaaccacaatggggcaggcctcagagtgctttccagtcgggaagtaaggtctggagtcaagaaacatctttcttgtacccatgagatgggaggcaacataaaatagtagttaagagcaagagcttctcacacctgtaatcccagcactttggtaggctgaggcagatggatcacctgaggtcaggagttcaagaccarcctgaccaacatggtgaaaccccgtctctaccaaaaatacaaaaattagctgagcatggtggcgcatgcctgcaatcccagctacttggaaggataagacaggagaataacttgaaccagggaggcagaagttgcagtgag

SEQ ID NO: 559172 - DNA, 587 bp, Homo sapiens
tcctgtctgacatggatggcagcaggcaaaaagagagcttgtgcaggggaactcccctttttaaaaccatcagatcttgtgagatccattcrccatcacaagaacagcacaagaaagacccgaccccatgattcaatcacctcccacctggcccccccccgccccaacacgtgggaattgtgagagttacaagatgaaatttgagtggggacacagaaccaaactatatcatcagcactttgggagaccaaggcaggaggatagcttgaggccaggagttcaagagtggcctgggcaataaagtgtgacctccaacctgggcaatgtggtgagaccccatctgttacaaaaaataaaaattagctaggcgtggtggcacacacctgtggtctcagctacttgggaggctgaggtgggaggatcacttgagcccaggaggtcgagactgcagtgagccatgtttgtgccattgcactccagcctgggtgacagagcaagaccctgcttcagaaaaaagaaagtctttttcaaaaatgccaagtgctcctcacgtgatactagggaacccagtcctggtcaggagggta

SEQ ID NO: 559173 - DNA, 582 bp, Homo sapiens
aaacatatgcctgtcatataatctagccattccactactaggtatttggtcaagggaaataaaagaatatgttcatatgaagatataaaatcaatgtttaaatattcacagcagcttaatgtagaagcctgcattaatccattctcaygctgctataaagaaatacccgagactgggtaatttataaacgaaagagatttaactgactcacagttctgcatgactgaggaggcctcaggaaacttacaatcatggtggaaggggaagcaaacatgtccttcttcacatggagtaggagagagaagtgcagagcaatgtgggggaaagccccttataaaaccatcagatctcgtgagaactcactatcatgagaacagcctgggggaaactgcctcccataatctaatcacctcccatgaggtccctcccttgacacatgggggatatgggaactagaattcaagatgagatttgggtgagggcacagccaaaccatatcagagccccaaaatggaaacaaactaatatcttcaatgactaaatggataaacaaattgtggtatattcataaaatggaatact

SEQ ID NO: 559174 - DNA, 582 bp, Homo sapiens
aaacatatgcctgtcatataatctagccattccactactaggtatttggtcaagggaaataaaagaatatgttcatatgaagatataaaatcaatgtttaaatattcacagcagcttaatgtagaagcctgcattaatccattctcacgctgctataaagaaatacccgagactgggtaatttataaacgaaagagatttaactgactcacagttctgcatgactgaggaggcctcaggaaacttacaatcatggtggaaggggaagcaaacatgtccttcttcacatggagtaggagagagaagtgcagagcaatgtgggggaaagccccttataaaaccatcagatctcgtgagaactcactatcatgagaacagcctgggggaaactgcctcccataatctaatcacctcccatgaggtccctcccttgacacatgggggatatgkgaactagaattcaagatgagatttgggtgagggcacagccaaaccatatcagagccccaaaatggaaacaaactaatatcttcaatgactaaatggataaacaaattgtggtatattcataaaatggaatact

SEQ ID NO: 559175 - DNA, 455 bp, Homo sapiens
aaaatgcatgaatataatagaccacaaagactttaactttgactctcttgctttccctctcacacacgacacacacattcatatatgcacacatgtgctcaagaacttggcatttgccattgtaaatgcctgacatactgctttacttctgtattagcaatgaaaagtgactcttacattcaatccaacaagacattaaggaaatgttccaaycaaaagatgaaacccagagttgcatcacttcttccaaatccatcatttttgttgtaccacctaaggagacactagctattcaattatccttggttccatgactacgttttacagaaagggaagtttaaacatgtttaatgcctatacaattttaaatatttttctctcttaagatataaattcatttcccagttctattgtcctgcattcaaaactacttcacaaaaaaggagcatttgttc

SEQ ID NO: 559176 - DNA, 387 bp, Homo sapiens
ggtctgaaggggaaatggtttctggcttctgacttgggttttgaaatgtcagcattacaacagtgctacatggttactggggaagaagtaacatttactgagcgcctgccgggtcccaggagcttttgcgtggcatctggcttcaggatattgtggtttgtttggccattgtgaactggcttgggccctaaccactttctgtctggcttccatgaggacagtgtggtcttgtaactaagtcaccaaacttctgtgaacttctgggacatcctaacacatttgcatagtacgtgcagactgtgaagttgttgagggcaaagttgtatgtgtgttgmtggatctagccaccatgtcctgtatgctgtccataagagatacccggaattc

SEQ ID NO: 559177 - DNA, 414 bp, Homo sapiens
gcacaatcatggcaaaaggagaagcaaacatgtatttcttcacatggtggcaggagggagaagtgcaagcaggggaaatgccggaagcttataaaaccatcagttctcctgatacctcactatcatgagaacagcatggaggaaattatcctcatgattcaattacctcccactgggtccttcccatgacacataggtattatgggaactayaattcaagatgagatttgggtggggacatagccaaaccatatcaacttctttaagttaaatcaaaatactatagctttttatgagtattgataaatgaatagaattgttgagtaggaaaggatcataggtattatatggtcgatatccctgaaaaaataagatagtttcagtatggtcacagtctagttaacggtgaatctg

SEQ ID NO: 559178 - DNA, 615 bp, Homo sapiens
cttttaaataaaacccatcctgactggtaggagggggtatctccattgtgattttagaatacatttctctactgattagtgatgttgagaatttttcatatgcttcttagccacatgtacgtcttcttttgagaagtttatgtccatcacctattctttaaatggggttggttattacttgttgatttgtttaagttccttatagattctggatattagacctttgtcagattcatagtttgcaaatatttttatgctcatggatgagaaaaatcaatattgttaaaatggccatactgctcaaagcaatttacagattcaatgccatatctgtcaaactacaaatgtcatttttcacagagctagaaaaactattttaaaagtcatgtggaaccaaaaaaagagcctgaataactaaagcaatcctaagcaaaaagaacaatgctggagacatcacactacccgacttcaaactatatgactaggctacagtaatggaaacagcatagtactggtacaaaaagaggcacatagaccaatgaaacagagtagagagctcagaaagaaygtgacacatctacaaccatctgatgtttcacaaagtcagcaaaagta

SEQ ID NO: 559179 - DNA, 511 bp, Homo sapiens
gaagggcagtctggaaaagacattaacagggtgaaggagagttccttctgcactgaggtcagcttgcactcccaaagtatgtcaggacaaaaaattcaagtgtggaccatgagggagaggaggatggcttggagcttgtttaaactctggtcaagggacgcctggaagaacaggggtcttcaacagagattctgtgcacggtggatagctacacacacacatgcatgcacgcacgcacacrcacacacacacacacacacacacacacccacacacacacacacacggctgagagaaaagcaaccaggagcaaatacattgccctcaacatgggaagcacagttgaaagtcacggtgaaatctgaagcaccaggaagaaaaggtcacctttaaccatttgccaaacccagaaagtgagaacatagcctacaagagtgtcacttaaggtgaaggtttctggccacaccctaaccttttctgtcctaacccaacctaacccacttcaattgat

SEQ ID NO: 559180 - DNA, 511 bp, Homo sapiens
gaagggcagtctggaaaagacattaacagggtgaaggagagttccttctgcactgaggtcagcttgcactcccaaagtatgtcaggacaaaaaattcaagtgtggaccatgagggagaggaggatggcttggagcttgtttaaactctggtcaagggacgcctggaagaacaggggtcttcaacagagattctgtgcacggtggatagctacacacacacatgcatgcacgcacgcacacgcacacacacacacacacacacacacacccacacacacacacacrcggctgagagaaaagcaaccaggagcaaatacattgccctcaacatgggaagcacagttgaaagtcacggtgaaatctgaagcaccaggaagaaaaggtcacctttaaccatttgccaaacccagaaagtgagaacatagcctacaagagtgtcacttaaggtgaaggtttctggccacaccctaaccttttctgtcctaacccaacctaacccacttcaattgat

SEQ ID NO: 559181 - DNA, 436 bp, Homo sapiens
aaactcctggcctcaagtgaactcccacctcagcctcctaagtaggtgggaagacaggcacacacaaccaaacatggcactaattttaatgaggtccaatttatctattttttctcctgtcacttgagattttcatgtcatatctaagaaactattgcctaatccaaagttcatgaagatttaaacctatgttttyttctaagagttttagttttagctcttacatgtaagtctatgataaatttcaagttgattcgtgtatatggtgtgaagtaagggtccaaattcattcctttgcatgtgtatatctagttgtatcatttgtggaaaagactaatctttccctcattaaattgttttgacactcaaaaatcaatttatcataaacttaagggtttatttctgaactctcaattctactcccttaacacacaag

SEQ ID NO: 559182 - DNA, 436 bp, Homo sapiens
aaactcctggcctcaagtgaactcccacctcagcctcctaagtaggtgggaagacaggcacacacaaccaaacatggcactaattttaatgaggtccaatttatctattttttctcctgtcacttgagattttcatgtcatatctaagaaactattgcctaatccaaagttcatgaagatttaaacctatgttttcttytaagagttttagttttagctcttacatgtaagtctatgataaatttcaagttgattcgtgtatatggtgtgaagtaagggtccaaattcattcctttgcatgtgtatatctagttgtatcatttgtggaaaagactaatctttccctcattaaattgttttgacactcaaaaatcaatttatcataaacttaagggtttatttctgaactctcaattctactcccttaacacacaag

SEQ ID NO: 559183 - DNA, 514 bp, Homo sapiens
ctacagtcttgacctcccaggctcaggcaatcctcccacctcagcctcctgaacaactgggacaataggcgcatgccaccatgccaggcaaattttttgatattttttgtagagacggggtctcactatgttgcccaggctggtctcaaactcctgggctcaagaggtcctcctgcctcagcctcccaaagtgctkggattataggcatgagtcactgtgcctggcccatatgcttttataatggctactcctccttactcccctattccatatttgcttttttctttttttaactgcctgatgagtgatcttacttgagcaattacccgatgggcccatatttttttgagacagagtctggctctgtcacccaggctggcatgcagtggtgtgatctcggctcactgcaacctcctcctcctgggttcaagcaattcttctgcctcagcttccgagtagctgggactacaggccaccatgcctggctaattttttgtatttttagcagagaca

SEQ ID NO: 559184 - DNA, 525 bp, Homo sapiens
tatggctgcatagtattccatggtgtatatgtgccacattttcttaatcccgtctatcattattggacatttgggttggttccaagtctttgctattgtgaatagtgccacaataaacatacggagaccacactaagtattcttacacgagcccatctaaaccccaggtcagcagcttgactcacatttgagtgtaccaacctcaaataagcccaataaaatagatwaaagtgtatgcaaggcagggaagaggtctggaagaatatactaatatgttgaccatggttatttctggatgactattactttcattttttggagctacatatatttctttgaggaataaaaagaattagaatatgtaaaacatgatcaagtatttgctttgttgtactggagaaggttcagtgtggtataagttttgtgataaggaaaaattctctagtcctggaaagggtttatccatgttcagttgagttaattttgagaactggctgaaggatgcaaaggaaggggtttccagct

SEQ ID NO: 559185 - DNA, 468 bp, Homo sapiens
ctgcactgctacactccgggcctgggcaacagaacaagactccatctcaaaaaaataaaaagtatcttttagtccatcattatcacttttgaattaacaatttgtcagtaagttatgattagcttttctttttttaaaaaaaactattattaattgtaaaaagcaaaacaagacaaaacaaagtcatatttctttctgccaaactaaatctgtatattagctctaacacttacagattttggaagatttcttgtattctctgattgctcatctggaaaatgggtctatgtatatcttatacattggagtattatgtttgaaataatgtttgaaaattgtttatccaaccaccatctatacctagtgatttggaagccttttatgacttatcacctaatagatagagactgcccagtaaagaggaatcacrtttgatgtgcaaatatatgaatggtggcattacattac

SEQ ID NO: 559186 - DNA, 630 bp, Homo sapiens
attggggcaataaaccccaggaaatggaatctgtctaccaagaaggcaatacaaattctgccacttcataagaaactacaactttttgggcatgtagcataaaaattagagataatttattagaacattatatgaactttgcttctggagatcataaaacatttagggcarttttcttcactttttcatcttcaaaacatgaaaaacattttttactgaataaaaatgcagtatgttcaagtgtcatagaatgtttgctcattaaatatttgcttgtaagtttggaaagtgcatcttgtaggtgtcatatgcttggatgttccaggaagcgctataattactgagaggctcaatacttcaaaagaccatgccctctattatatagtaaatgcactgaatcttcgaaaagagttgacaagttcgtcaataaataagtctttgtatcctgtagcgtataaataaaatgccagttagaaagtagatgttatttaacaatggcaaacagatgatttttgataagaaacctgagttttgctctttgccaaaccaaaatttgtgaaaaacaatagaatagtatattgcactatttagatatcaatcatcagatgttgtctgcaagactgtcatttc

SEQ ID NO: 559187 - DNA, 538 bp, Homo sapiens
ccaggctgcacctcttctgttcaagcttgttggaagtagacactaacattcttggcagaagcctctccacatattataaaataatctccattaagagcgctaggttaattttaaatcaactgtgtaaacattactagcatcaaccatattaattacatggcaaagttatcatgtttacatacaygcacatgcatatattttctaataaaattgaattgagcatgactcataatggataccaatgaaatgaaatctgaaagatgcagtcatcaactttgatagtcattgaaatttaatttgataaatgatcatactcatttgagttgtagaataactcttggattagtgtctagttgtcaagagttctacttttctggaaactgtccctgttacagtgaggtgggtctctaccagccatggcactgctatatgacctgcttcacctgctgcagttgattgggttgatatggatggcttatttaagctgtggcaatcagaagatcctaggaatttagaaagttgaactgagaaaccagag

SEQ ID NO: 559188 - DNA, 538 bp, Homo sapiens
ccaggctgcacctcttctgttcaagcttgttggaagtagacactaacattcttggcagaagcctctccacatattataaaataatctccattaagagcgctaggttaattttaaatcaactgtgtaaacattactagcatcaaccatattaattacatggcaaagttatcatgtttacatacacgcacatgcatatattttctaataaaattgaattgagyatgactcataatggataccaatgaaatgaaatctgaaagatgcagtcatcaactttgatagtcattgaaatttaatttgataaatgatcatactcatttgagttgtagaataactcttggattagtgtctagttgtcaagagttctacttttctggaaactgtccctgttacagtgaggtgggtctctaccagccatggcactgctatatgacctgcttcacctgctgcagttgattgggttgatatggatggcttatttaagctgtggcaatcagaagatcctaggaatttagaaagttgaactgagaaaccagag

SEQ ID NO: 559189 - DNA, 538 bp, Homo sapiens
ccaggctgcacctcttctgttcaagcttgttggaagtagacactaacattcttggcagaagcctctccacatattataaaataatctccattaagagcgctaggttaattttaaatcaactgtgtaaacattactagcatcaaccatattaattacatggcaaagttatcatgtttacatacacgcacatgcatatattttctaataaaattgaattgagcatgactcataatggataccaatgaaatgaaatctgaaagatgcagtcatcaactttgatagtcattgaaatttaatttgataaatgatcatactcatttgagttgtagaataactcttggattagtgtctagttgtcaagagttctacttttctggaaactgtccctgttacagtgaggtgggtctctaccagccatggcactgctatatgacctgcttcacctgctgcagttgattgggttgatatggatgscttatttaagctgtggcaatcagaagatcctaggaatttagaaagttgaactgagaaaccagag

SEQ ID NO: 559190 - DNA, 598 bp, Homo sapiens
ttatatgccttggagcttcatttatgggaattttctaaatcctggaataaacatgggtttctccaaatgattgggttttcctctgccaggtccctcagtgaactatgtgtcaaggatcgctgtaaataayaacatatcattggaatttggaccatataacgggtggctaagaattattactgtttcatagcagcaaggtggctgtatctaattcatatttacagtatgtttagacagttgggagccaagagttgcaagatggatttcttctggaagaagactcctgattttgccttgtatcatttaagttacacaagactatgaagacataaatttaagtttatgaggtttaacaattaccctaaagatgaaagttgtcatcaatgctcccttcttggtttccaacttcacttaggttttggcctgctgctgctgctgctgctgctgctgctgatgatgatgatgatgatgattttgatatcacatggaaagatttaaaaatatgctttcctaaattgtatccaacatggcatattagtctgtcctcacattgctattaaaaatacttgaggctgggtactttataaagaaaagaggt

SEQ ID NO: 559191 - DNA, 598 bp, Homo sapiens
ttatatgccttggagcttcatttatgggaattttctaaatcctggaataaacatgggtttctccaaatgattgggttttcctctgccaggtccctcagtgaactatgtgtcaaggatcgctgtaaataacaacatatcattggaatttggaccatataaygggtggctaagaattattactgtttcatagcagcaaggtggctgtatctaattcatatttacagtatgtttagacagttgggagccaagagttgcaagatggatttcttctggaagaagactcctgattttgccttgtatcatttaagttacacaagactatgaagacataaatttaagtttatgaggtttaacaattaccctaaagatgaaagttgtcatcaatgctcccttcttggtttccaacttcacttaggttttggcctgctgctgctgctgctgctgctgctgctgatgatgatgatgatgatgattttgatatcacatggaaagatttaaaaatatgctttcctaaattgtatccaacatggcatattagtctgtcctcacattgctattaaaaatacttgaggctgggtactttataaagaaaagaggt

SEQ ID NO: 559192 - DNA, 598 bp, Homo sapiens
ttatatgccttggagcttcatttatgggaattttctaaatcctggaataaacatgggtttctccaaatgattgggttttcctctgccaggtccctcagtgaactatgtgtcaaggatcgctgtaaataacaacatatcattggaatttggaccatataacgggtggctaagaattattactgtttcatagcagcaaggtggctgtatctaattcatatttacagtatgtttagacagttgggagccaagagttgcaagatggatttcttctggaagaagactcctgattttgccttgtrtcatttaagttacacaagactatgaagacataaatttaagtttatgaggtttaacaattaccctaaagatgaaagttgtcatcaatgctcccttcttggtttccaacttcacttaggttttggcctgctgctgctgctgctgctgctgctgctgatgatgatgatgatgatgattttgatatcacatggaaagatttaaaaatatgctttcctaaattgtatccaacatggcatattagtctgtcctcacattgctattaaaaatacttgaggctgggtactttataaagaaaagaggt

SEQ ID NO: 559193 - DNA, 620 bp, Homo sapiens
agcatgatgctggcatctatttggcttctggggaggcctcatgaaacttacaatcatggcagaaggtgaagggggagcaggcacaccccatggctggagcacacaatagagtgagcagagaggttttacatatttttaaacaaccagatcgcagaacaactcactccctatcacgaggacagaaccaagggtgatgatgctaagccattaatgagaaatctgcccccatgattccatcatgtcccaccaggcctcacctctaacactgaggtttatatttcaacatgagatttggaggggacacacatccaaactatatcaattggtaagtggtttcggttaaataatcacttaatataccttgtcagccaaagtgctggtatcaaaaactatcatgttattcttagatttttgtcattttttttgtattaggtatgtcttttgtaaagagcatagagttaagtttactcttattgaatctgagatttcatgtcttctaattgtgtggtctgtcttctgttatcttattacacactttctgatctttaaaattttttacttggcttaatctttaaaagcttcatggagaagttataycttaagctgagttgtgatgaaag

SEQ ID NO: 559194 - DNA, 546 bp, Homo sapiens
ccacttggtcatgatgaatatcttcctaatgtattggtgatttcagtttgctagtattttgttaatgatttttgcatcaatattcatcagagatattggcctgtagtttcattttttttaatatgtctttgtctagttttgatatcaggataatactgatgttgtagagtgaatttggaagtaatctctccttctctagtttttgaatagctggagtggggttgatattagttcttctttgaatttttgatggaattcaacagtgaggccaacagatcctgcgcttttctttctaggagactttttactagagttttgatcttgttactggttactggtttgatatggtttggctgtggccccacccaaatctcatctttaattgtgcttcccataatcctcacatgtcatgggagggacctggtgggaggtaattgaatcatgggggtggattcccccatgctgttctcatgacagtgagtgagttctcatgagatctgatggttttgtaagggytttttccccctttgctcagcacatctctct

SEQ ID NO: 559195 - DNA, 573 bp, Homo sapiens
caaccacgtctggctaatttttgtatttttagtagagacgaggtttcaccatgttggccaggctggtttcaaactcctgacctcaaatgatctacccgccttggcctcccaaagtgctggcattacaggcgtgagtcagcacgcccagcctattctattatttaaaagagacattgatttggcatatttatgtggattttaactytgtataaaagatgggctaacaatagaattcatagtcaattatgtcttcttagttttggaattttctacttgggataagttagcatcaatgttaagagatctagccattcttttatttttcctaatttaaatggtatgcatacacacacacacatttgtttcttgtgtatttttttctctacaacagtgttgtctgatagcactttctggaaatgctttctatgtatggtgttcaggatgatagttactagcaacatgtgactgagtaattgtaattattaagaagctgagaatttaaaatttgatttaattttaactacttaaatttaaatttacacgtggctagtggctactgtattagacaacaaa

SEQ ID NO: 559196 - DNA, 536 bp, Homo sapiens
atagtaatccagggtcccttctaatgcacaacgtgagaataactttctattttcatttgtctgagaaattgtggggataaaaaaagatcctagagaacgtgaggtatatatcttacttartttgattatattttacccaatagctttgtttaaaatatttataatatctgaatatcacatttcccattaacgtaaaaagtaaattttctctttttaatccttttttatagtagcatcagaattctgagatcttacgtgtaaaattgcatttggaaaaatattttctttttgtttatttggtaaacatatgagtgctgattacaagaaaaaaaacaattttctaggtcttgtagagagaatacaaagatttagtaaagaataaatcatgacctcaaagaacttagagctaatgagtgactttaaaaaaaaaataaaagacatggatgatgctggaaaccatcattctcagcaaactaacacaagggcagaaaactaaacacatcacatgttctcactcatgagtgcgagttgaaaaa

SEQ ID NO: 559197 - DNA, 520 bp, Homo sapiens
tgacactatgtacctggagatagtatcaaatcccacaggtgaagagcttagtcccagaagactgctggtccctgcccccacttcagatgccagtagcaaaccccaggttgtgacctgtgcttccaactgactggctatagatcagggttcccatgaccccctctttgggttcaattaatttgctacagtggctcaacagaactcagagaaacacttcacttacatttacacatttattataaagaatattacaaggccaggcgtggtggctcatgcctgtaatcccagcactttgagaggccaaggcaggcggatcacgaggtmaagagatcgagaccatcctggccaacatggtgaaaccccgtctctactaaaactacaaaaattagctgggcgtggtggcatgtgcctgtagtcccagctactcaggaggctgaggcaggagaattgcttgaacctgggaggcagaggttgcagtgagccaagattgcgccactgcactccagcctggggacagagt

SEQ ID NO: 559198 - DNA, 666 bp, Homo sapiens
tttcctgggtgtcgcatgtcttgtttgtcattgtatatcctgggtgtctcagaatgattagtatgtgattgtcactcaataaatatttgctgaactgtacaggacagaattgcttcaaaatatttatcctgagcatcccttctgagtgtcagacgcctacttacacctgccacctcttgctccataggtactcatgagtccaaaactgaccaactctcagtctggtctgcctatgtctggattgccctagtctcccacactgaaagcctgagaatccattctttcctcctctctcccccaccctccatatccaatcagtccttccaaatacatctcctaaatctttctcaaattcttcctctctctccagtccattccttcactagaatataagctacaagggcagggatgttagcctgttttgttcactgccatattcccagcgcctagaatagagcctgtcacataacaggtgctcaaaaatgtttgttgaatgaatgaatcctaccaacactctagttctatttatatcagtcatctgtgctgcataacaaacctctcccaaacttaatgacttaaaacagcagaaatttgttatttctgatgggtggttcttgggctggctttgcctgggctcacktacatgattgcagtcagagagctgcc

SEQ ID NO: 559199 - DNA, 605 bp, Homo sapiens
ataattaatagtaaaaccgaagcgttatagcattattaagtaaaataaagtttacttgaacacaagcactgcaatactatgatagttgatctgataaccaacaaggatcctaggtaactaaagggccagtagcatagacagtgtggatgccttgggcaaagagaggattcatctccttggtggaattggacagaatggagcaggagtaggatagtacaagatttcatcatcttactcakaacatcatgaaatgtaaaacttatgcatcttttatttctggaatttcccttttaatactttcagatcacagttgaatgcagctaactgaaaccatggaaaatgaaactgcagataatggaggatgtattagttcattttcatgctgctgataaagacattacccaaaactgggaacaaaaataggttttataggacttacagtgccacatggctggggaggcctcagaatcatggtaggaggtaaaaggcacttcttacatggcagaggcaaagagaaaaataaggaagatgcaaaagcagaaacccctgataaacccatcagatctcatgagacttattcactatcacaagaacagtatggggga

SEQ ID NO: 559200 - DNA, 360 bp, Homo sapiens
tcacattctgcaaccattaacctgaagtttgtctttattattcctttcctgtgtaaaaggtttatcactgctctctatatatgccttcatamagctcagtttttgtagtgtttgttctttattcatagagtattatgctgtatatggtcttccaagacttacttttgcctttcagcatcatatcacctctgattcatccacattgttgcctttgactgaagtcattcattttcactattgtataattctctgcagagtgaatgcaccataatttatcctgtcgatgggcctttggtttgtgtccagttttatgcttttatgagaagtattgctatgagcattctgaaacacgttagctaa

SEQ ID NO: 559201 - DNA, 360 bp, Homo sapiens
tcacattctgcaaccattaacctgaagtttgtctttattattcctttcctgtgtaaaaggtttatcactgctctctatatatgccttcataaagctcagtttttgtagtgtttgttctttattcatagagtattatgctgtatatggtcttccaagacttacttttgcctttcagcatcatatcacctctgattcatccacattgttgcctttgactgaagtcattcattttcactattgtataattctctgcagagtgaatgcaccataatttatcctgtcgatgggcctttggtttgtgtccagttttrtgcttttatgagaagtattgctatgagcattctgaaacacgttagctaa

SEQ ID NO: 559202 - DNA, 568 bp, Homo sapiens
tacttcacatttatctatcacagagctataaaaattaatgctgccaataccaaagaatctaccagctctgggaaattgtaaaatgagtgattttgccaataaatacagattctatgttcattgaactatgagaccaatatgtcagtttccttctgcattaggtttatagcccatgtatgtgaaggtaatagaaatggatttactttgaacaaaaaaagcaacatgtgttttmaaaatatgtagttactggaacttttgggatattaccattttagtattgataatcttagttttcttatcagttttttaaaaatgatttcccttaagtgagttttaattgaaggtgcaactaaaaatcacaaagtggagtaaatcacagcatatgcatgacaatagaaaattcaacagattaacaatttttattaaaactttttttttttttgagacggagtgttgctctgtcgctcagtctggaatgcagtggtatgatcttgtctcactgcaacctctgccccacaaggtacaagcaattctcctgcctcagcctcccaagtagctgggactacag

SEQ ID NO: 559203 - DNA, 625 bp, Homo sapiens
gtcagttctggtcagggtctcttcctggtttgtatcctcacacagtagagagcagagagagagagagagaaagagagagaaagctctcccttcttataaaagcaccaatctgatttatgagagctctatcctcatggcctgatcacctcccaaaggcctcatctccaaatatcatcacattgtggatgacgaattcatcatatgaatttggtggtacataaacagtcagtccatcacaggatggtagtctcttcatgaagttattattcctgagttacctctgtgtctcctttttgcttttttagtccttctatatttgttgacttcattctttatatgaaattctatgtgttcaagtggcaagtatcatgtatcgtttttatatttatgactgggcatggtctaatagaggaagcaaatagaaaagtttgaaaatctgagggaattttggacaatgctccatgaaattggacaaatgaggcaaaataataagaacaatgaatcaaaaagaaagaagtgccaggtgcagtggctcgcacctgtaattccagcactttgggaggccgaggcaggtrgaacacttgaggtcaagagttcgagaccaacctggccaacatagtaaaac

SEQ ID NO: 559204 - DNA, 568 bp, Homo sapiens
tactattcagtcataaaaaggaataaaatcctgacatttttggcaacatggatgggcctggaagacattatgtaaaatgaaattagctaagcacagaaagacagatactgcttgatcttacatgtaaagtgtaaaaaagttaatcctgtagaagtaaagagtagcctggtgatcaccaggggctagggcaggagtgggtgaaagtattggtcaaaggatacagaatttcagttggaaggaataaattcaaaacatctacggtacatcatggtaactatacttaataacaacatattgtattgagcatccttaagagactttgagttctcattacaaaaaaaaacagtatgtgagctaatatatatatatatatatatatatatatatatatatatatatataaattagcttgtgagcttatatatrtatatatatatatattagcttgtgagcttatatatatatatataaataaattagctcaatttagcctttctacaatgtatacatatttcaaaataacatattatacatggcaaatatacacaatttttgccaattaaaaata

SEQ ID NO: 559205 - DNA, 610 bp, Homo sapiens
gctaccacacctggcacatagcaacttttatgtttttttaaaaagtctgtttaaaatgcattgccaaagcctacgttagtgaatagtgatgttgccattcactgcctcagcaagaagcatggctgatacaggatcatgaactggagctttgcttagtcatgtttatctaacatgtacagggtgaccaacataagggaaaatgggagattttacagaaatgtgtggatttccatagtttctcaaaacaattggtagagttatttttctgactggagatttacaaggtaactcagtgtctctacyactactgccttggtttgagtcaccggtggctctcacctggattcgtgcatttgcgcaattgcttcctaattgacttctcagcctctgatctcacttcccactcctgttattaacctgaaatgtagttcataccatgtcactattttattcaaaatgaatgaaaagtttaacagtgacctttatagggaaaaagaaaagaatttttttggtggcatttgctaatttccatggtggaaatatttcacagtggttgattttaagctaccaatgtgaagtcacgtcagagttggaaagaagtgcacaagca

SEQ ID NO: 559206 - DNA, 516 bp, Homo sapiens
tctccctcccaaagtgctgggattacaggcgtgagccaccgcgcccagcctgctccatctatttttatgtgaagattcaggaagtttccaaaactatcttgacacctctttccaccccaaattaacacattatttcattaaatgttttggagtcacctaccctatgccagccactgggtggtattctcaagacacgacagtgacaagtgataagacagatgttttggcttgttctcatgaagcttgcactccgataaagcatcagtgacagrtaaatagccaattataattcactgtcctctcataggaagtacagaatgtcatgaagtacaagggaagggcaattattttgcatttccctttttcgattgtcaattaattttaagacagggattcagttaaggccaaagatttaacttccctgaagttccctataaagtgaacaaaaccacttatagctagaagttcttttataaggtattagctattaataaatgtcctgattatttttgtcat

SEQ ID NO: 559207 - DNA, 568 bp, Homo sapiens
agagaaaattcaactttataataagggagaaaaagtggggacatgattaggtggaagatggtggggctgggtgaacacataacatgttgaaaagtttggaataaatgggacacagcagggaacatgattaagatagaaccctaaacgatatttaggaaataagtgaagtcttccttttacctgaactggtgtatatttcacctttatacagtatctcatctaataacatgtaatgaaggttaagtttgtttcaggctttcagcttgaaaaaatgacactaaaaatatttcaagtggatagacattctgtaatattcatacrtaaataaattatggtatataattaattgatataattaattgaaaatatgattactatgagtgattctatgtttcaaactaccagttatgcaatttacaggtcattaaaattcatccttccctttgtgtataatatacctttgttataactaaccaatcttttccatctcagcagtggagagtcttataaatgctgtttggcactgagacactctgcaaaaagaatgatttcttttttctttttgata

SEQ ID NO: 559208 - DNA, 566 bp, Homo sapiens
gcctggtgaggatgtggagaaaggggaacccccattactgttacygggaatgtaaattagtaaagccaatatgaagaacaggatggaggttcctcaaaaaactaaaactaaaacttccatatgatccagcaatttcactactgggcatatggccaaaaagatgaaattcaatatatcaaagatatacctgcactcccatatttatcacagcactattcacaatagctaaaatatggaactgtgtgtccatcaaaagataaatggataaagaaaatgtgatacatatacacaatgagatattattcagccacaaaaagaatgaaattgtgtcatgtgcagcaacatagatgaaactggagtccatttgctaagtgaaataagccaagcagagaaagacaactattgcatattctcactcatatggagaagttaataaaagtggacctcatgaagatagagaatagattcctggccactagaggccaggaagggaagagggagaggagagataaaaggaaatatatatatatatgtgtgtgcgtgtgtgtgtgtgtgtgtgtgtttgc

SEQ ID NO: 559209 - DNA, 564 bp, Homo sapiens
ataaactgtctggcacacccagaaatgtgcccaattaaaatcaaacacatattagaaatatttcataatatgtaggttttattttttcccttgtgrtcattatctcttctttgagaaatgacctctaataaagatactcattcggcctcaggatatgtgtacattaaggaaataaaaacctcaagtgttctccctattatatccataagatatttgtcaaatatccctagggcctttcacatactggtcagctgtacccagagatcattatgaaaactttctgtagttttacaatataactttgtgatttttcagagctattatatcttctaagacttccttgtgttttatggaaagcttcagggaaaataaatatgtctttctagacccagaacttgaaatgacagtggactcaagagatcaaggttatcaaaacaggagttctgtgttatggcttctgtttatctgcaggaaagcagccaaggtgaaaggggttgttgttatttttaaagtactggattatctataaggggaatttcttatcattatagattatttttgttt

SEQ ID NO: 559210 - DNA, 534 bp, Homo sapiens
aaactctctctcacatttttttttwaaatatttatctctccaaaaattgctgccaattttatttaacaaatctactcattctggtctttgttcccatttctcaaatggtaccaatgacttgatgcttattaatccaatgttaatttttatctcactcaagctgccttgatactgttaactattcattagccactgagtgaatgaaatgagtaattttcctgcatcactcagtactacatccttggtcctttgcttctgactctaagtctagttgctcaagtttgtacatgttcataatttaaattgccatttgcatgctaacaactacaatattcaaaacaacctatatcatttttcatcacattaagctcttgtgtcctaaacaattgatatgctgcacagttacctatctctgtgccagttcagctgtgtagggaagctaatttgcagggacaaggggaaccactgaaatacattccattcccacattctctttaaattaaccttttatgaaatgttattttctggccatga

SEQ ID NO: 559211 - DNA, 546 bp, Homo sapiens
aggattatgaatcggataggagaaaggaacatggagctagaaagtgggcgaggagtacatgagtggaattgatcagcctctttattccagtcagaaatttggtgtgcagttgtgggataactttgtaaatgaatactttaagcataatcttaactgtgaatcaaaattgcacataaatttatatttattaaacattaaacaaacattcactgatgattatattgtgcatacaaacatgcatagaaattggctctccataaaaatatataattttagcattggtaataccaaataaagataatgctatcacaaaactggtgaacaagatttccagcatatatgaaatattgttttgggggcttcaaaaatccagatggaagagtggtttccctagctcttcttcaaarttccattgaatgacacactcttctctctaggcttgtaacgaggaatgcatatctacttaatagatgtggtaagacacaaacaaaataaagactcattcttttcttttcgagacaacacaagttgtgatttgaaccaaga

SEQ ID NO: 559212 - DNA, 650 bp, Homo sapiens
ataagtaggggttccgagaccagacacataggttctaattctcaatgctccattggcaaattgtttgtccttggtcaagttatataaattcttctctaaaaccgggtaataaataggattgtgtattcattagctggtgtacaaggaggataaaatgtatcaacacctagcacttcggtgcttggtctatatcacgcactgaataaatgctagttagtattaatgtgagaattctttttttcacccccrttatcccaaaatactatgctttgggctttccctagacaatgagaaaattaccagagctgtaaacgtaaatcctgaccaatgaatgaaggtctagaaaaaattgaggcaagacaactaaaagttataaaacgagtaaaaatgaaaaatgttttcctgggcatgggggctcacacctgtaatcccagtactttgggaggcctgggtgggcagatcactttaaggtcaggagttcgagaccagcctggccaatgtggtgaaaccctgtctctactaaaaaaactacaaaaattagctgggcttggtgatgtgcacctgtaatcccaattacttgggaggctgaggcaggaaaatcacttgaatccaggaggcggaggtcgcagtgagccaagattgcatgactg

SEQ ID NO: 559213 - DNA, 650 bp, Homo sapiens
ataagtaggggttccgagaccagacacataggttctaattctcaatgctccattggcaaattgtttgtccttggtcaagttatataaattcttctctaaaaccgggtaataaataggattgtgtattcattagctggtgtacaaggaggataaaatgtatcaacacctagcacttcggtgcttggtctatatcacgcactgaataaatgctagttagtattaatgtgagaattctttttttcacccccgttatcccaaaatactatgctttgggctttccctagacaatgagaaaattaccagagctgtaaacgtaaatcctgaccaatgaatgaaggtctagaaaaaattgaggcaagacaactaaaagttataaaacgagtaaaaatgaaaaatgttttcctgggcatgggggctcacacctgtaatcccagtactttgggaggcctgggtgggcagatcactttaaggtcaggagttcragaccagcctggccaatgtggtgaaaccctgtctctactaaaaaaactacaaaaattagctgggcttggtgatgtgcacctgtaatcccaattacttgggaggctgaggcaggaaaatcacttgaatccaggaggcggaggtcgcagtgagccaagattgcatgactg

SEQ ID NO: 559214 - DNA, 532 bp, Homo sapiens
gctgaagtctttgtaggacctgcatcacagtttgacttcttcctccttccaatcctttgttccttaccccttgcagatgtagatccctagaggattctccccaaacttcctgctcacaaccatctcagattccacttcctagagaatctgacctaagacgtggatataaatctcctgatcttcacctcactgatgctactacctatgttcctttgcaatttgattttaattatattcacccacctttcctttctgtatctgtcttttatttttcttcagctctgttcttgatatttaagggcttcttagtgtggacacctttttacttcctcawtgatttttttttttttttttttttttgagacaaagtctcactgtgttgcctaggctggagtgcagtggaacaatctcaactcgctgcaaccttcaactgccaggttcaagcaattctcctacctcaacttcccgagtagctgggattacagacatgtgccaccatgcctggctaatttttttgtatttttgatagaaa

SEQ ID NO: 559215 - DNA, 415 bp, Homo sapiens
ctgatctcaaccccatacctgatctctaaacttcatattggtgagagccaactaagaatggcaatgaycttaggctgggtgtggtggctcacacctgaaatcctagcactttggcgggagaatcacttgagcctaggagtttgagactagcctgggcaacatagtgagactgtctctacacaaacttaaaaaaaaaaaaaattagccagacactgtggtgcttcctgtagtcccagctattacggtggctgaggcaggaggattactttacttgaggcaggagttcaaggcggcagcacactatgatcctgccactgcattccagcctgggtaacagagcaagaccctgtgtttgtgcgggcggggatgggggggtaggggttgcgggggaggggaagaatgactttatataagc

SEQ ID NO: 559216 - DNA, 415 bp, Homo sapiens
ctgatctcaaccccatacctgatctctaaacttcatattggtgagagccaactaagaatggcaatgaccttaggctgggtgtggtggctcacacctgaaatcctagcactttggcgggagaatcacttgagcctaggagtttgagactagcctgggcaacatagtgagactgtctctacacaaacttaaaaaaaaaaaaaattagccagacactgtggtgcttcctgtagtcccagctattasggtggctgaggcaggaggattactttacttgaggcaggagttcaaggcggcagcacactatgatcctgccactgcattccagcctgggtaacagagcaagaccctgtgtttgtgcgggcggggatgggggggtaggggttgcgggggaggggaagaatgactttatataagc

SEQ ID NO: 559217 - DNA, 415 bp, Homo sapiens
ctgatctcaaccccatacctgatctctaaacttcatattggtgagagccaactaagaatggcaatgaccttaggctgggtgtggtggctcacacctgaaatcctagcactttggcgggagaatcacttgagcctaggagtttgagactagcctgggcaacatagtgagactgtctctacacaaacttaaaaaaaaaaaaaattagccagacactgtggtgcttcctgtagtcccagctattacggtggctgaggcaggaggattactttacttgaggcaggagttcaaggcggcagcacactatgatcctgccactgcattccagcctgggtaacagagcaagaccctgtgtttgtgcgggcggggrtgggggggtaggggttgcgggggaggggaagaatgactttatataagc

SEQ ID NO: 559218 - DNA, 634 bp, Homo sapiens
catatagcaactcaatagcaagaaaatatgtaacctaattaaaaatggacaaaggacttaaacagacatttctccaaagatgggaaaatggccagcaggtatgtgaaaagatgctgtacatcgctaatcatcaggaaagcataaatcaaagccaaagccactatacccattaggatagctgttatcaaaaagacaagagatacatgtcggtgagagtgtggagaaaagggaacccttgtacgctgttggtgggaatgtagcttattgcagcccttatgcaaaataatatgaatgttcctcaaaaatattaaaaatagaattaccatatgacccagaaatccctcttctggatatatattcaaaggaaataaaattatcacctgttaaagatattgagctcccgtgttcattgcaacattattcacaatagccaaaatatggaaccaatgctggtgcccatmaatgagctgtgagcaaatggttacagaaactgtttatataatatataaacatatatatataaatgttttatatatatatatataattcagcctttaaaatggagaagattataccatttgctacaacatggatagacataaaaaacataatgctaagtgaaataagccagaca

SEQ ID NO: 559219 - DNA, 526 bp, Homo sapiens
tctgctcctgccggcacccaaaaacactcgtcccaggccctgcacctgctcatctgtgtgctccccattccaagaggggttgagcagtgtgggctgagtaaacaagccaacccctttgcaagtcctgtgaaggggtccagggaacaattctgtttcactatcagacttacagattagggtaatgtggtatatggtaagaccagtggatcctggtcacctgctattttcatccctcctttgacataaaggggcccaatgcaaccaacttgccacaaagttgatctctatttgaggactcagcatcagtttctgctgctggcagatttcacgtaatcaatagctgcagtagttagattaatgttggtaggaggaatctgtactgttgagcccatgtttagcctccatctccaccatcatgaccactctttgtgggttcattgtgggcattggcatggccaagataacagaggctagctaacttagatgagttattctgyacacttgattgtttgaatccttcgcttta

SEQ ID NO: 559220 - DNA, 427 bp, Homo sapiens
cccgcttaagctcagccacagggtamtaagtctcttcaggaaaaagcaattgttgtccatcatctgaaaaactgtggcctggaaccatgggcaccgagagtgcacactgcccactagagttccatgcctacatcacggagagatagaatagtctcaaaggattcttaagagtaatgtggggaccaaaaggagatgaatccacagcctctgccttaccgtctgatctaactaatagtatttccagacctttctgtgggctgcaccaggggttgttcagaaagaaaaaaagttgttaatgtcccaccgtttcccgtagcttccgaggtctgtgttgttcataccccaggttccaggttgttctcccactacttccacagaatcagtgtgtctcattccggtacctataatctcatctttattctagtcg

SEQ ID NO: 559221 - DNA, 410 bp, Homo sapiens
cagggtactaagtctcttcaggaaaaagcaatkgttgtccatcatctgaaaaactgtggcctggaaccatgggcaccgagagtgcacactgcccactagagttccatgcctacatcacggagagatagaatagtctcaaaggattcttaagagtaatgtggggaccaaaaggagatgaatccacagcctctgccttaccgtctgatctaactaatagtatttccagacctttctgtgggctgcaccaggggttgttcagaaagaaaaaaagttgttaatgtcccaccgtttcccgtagcttccgaggtctgtgttgttcataccccaggttccaggttgttctcccactacttccacagaatcagtgtgtctcattccggtacctataatctcatctttattctagtcgc

SEQ ID NO: 559222 - DNA, 406 bp, Homo sapiens
taagctcagccacagggtactaagtctcttcaggaaaaagcaattgttgtccatcatctgaaaaactgtggcctggaaccatgggcaccgagagtgcacactgcccactagagttccatgcctacatcayggagagatagaatagtctcaaaggattcttaagagtaatgtggggaccaaaaggagatgaatccacagcctctgccttaccgtctgatctaactaatagtatttccagacctttctgtgggctgcaccaggggttgttcagaaagaaaaaaagttgttaatgtcccaccgtttcccgtagcttccgaggtctgtgttgttcataccccaggttccaggttgttctcccactacttccacagaatcagtgtgtctcattccggtacctataatctca

SEQ ID NO: 559223 - DNA, 618 bp, Homo sapiens
atagtaacgaaataatttacactcaaaatcaccgtatgatccagcaatttcacatcttggtatgttgcaaaagatgtgaaagcgaagacacaaaataatacacgtacacctaagctcatagcagcatgactcacwtcactcaaaatgtttttgaattacctgtgttgtttgaattatcgtcaatgaataaatagataaaatgtgatttatacatacagtgggatattattcagttatgaaaaataaggaaattctgacacatggtaagtcatgcatgaaccttaaggacattgtgcaaagtgacatgagccagtcataaaaggacaaatactgtatcattccacttatgagatacttagagtagttaaattctggaaacccacgtagaagagtggttcctaggagctggagggggagtaacagggagctgttatttaatgtgtattgaattttggtttggaagttgaaaaaagatccttatgaatgggaataatagttgcaaaacaatgtgagtgtagttaatttctctgagctgaacacttaaaatagttaagatggttaattttatgtatactttgccaaaatgtaaaaaatattttttaaataaacaaactatag

SEQ ID NO: 559224 - DNA, 598 bp, Homo sapiens
agtccgcctcactggaggaagagaaagrcgtgtgagcgccttgctgggctttctgggagatgttgtctctttatttctcccagccctttggtcacagggcttcaagactacaatcccagcatgcatcctgctcagggacaacgcgcgtcactgtaggaagaggtggacctgtgctgttctcgctatgctttttgggatacgtattctcgtaaacactcccagccctttggtcactgggctgcatcactacaatcccagcatacatcgggatcagggagagtgcgctaatcagtggagaaaggggcgaggctctgcacacctcgctggtcttgctgggagatgcagtctcataaacactcccagccctttggtcactgggctgcagcgctacaatcctagcatggaccgggcgcagggaatgtgcgcgtcactggaggaagaggcagggttgtgcacgcctctctgggcttggtgggagttgcagtctcataaacactcccagacctctcatcaccgggctgcaggactacaatcccagcatgcacccggctcagggagagtgcgcattactggaggaaaagtctaggctgtggatgcc

SEQ ID NO: 559225 - DNA, 601 bp, Homo sapiens
gcacagatttttacaaaacagcttaacatagaagtctcacaaaatgtgcagatttcctcagatcccaaaaacaatggaaaagcactcagaccacaagagcttcatgggaatagcagaaagaagaggygaactttggctgtcactgtgaatgccctggaatgttagtggatgaacagagaagccttagaagatttaagagcataataagcatagggtaggaaatttccacctgtggcagcaaaagaagtaaatttagaattttccagaaccaatttctttgaagcagaacttccaacaccacatttttaaggttttctccttggcctttgcacctctcatctttgttatttgtttattcttccctattggggtgttgcctattattctctctctttttacattccaaagacatttcctttactgtaggacaggggcatccacgggagactacagccatgagttcttagtttctgtttctggttgagccagtaaggccctttcctcatcccccttttccacttatcactagacacagaacccaaaaaccattgctgcaggctgctaaaaacctaaaacaaaacagagccataacaaaaacaaa

SEQ ID NO: 559226 - DNA, 601 bp, Homo sapiens
gcacagatttttacaaaacagcttaacatagaagtctcacaaaatgtgcagatttcctcagatcccaaaaacaatggaaaagcactcagaccacaagagcttcatgggaatagcagaaagaagaggtgaactttggctgtcactgtgaatgccctggaatgttagtggatgaacagagaagccttagaagatttaagagcataataagcatagggtaggaaatttccacctgtggcagcaaaagaagtaaatttagaattttccagaaccaatttctttgaagcagaacttccaacaccacatttttaaggttttctccttggcctttgcacctctcatctttgttatttgttyattcttccctattggggtgttgcctattattctctctctttttacattccaaagacatttcctttactgtaggacaggggcatccacgggagactacagccatgagttcttagtttctgtttctggttgagccagtaaggccctttcctcatcccccttttccacttatcactagacacagaacccaaaaaccattgctgcaggctgctaaaaacctaaaacaaaacagagccataacaaaaacaaa

SEQ ID NO: 559227 - DNA, 601 bp, Homo sapiens
gcacagatttttacaaaacagcttaacatagaagtctcacaaaatgtgcagatttcctcagatcccaaaaacaatggaaaagcactcagaccacaagagcttcatgggaatagcagaaagaagaggtgaactttggctgtcactgtgaatgccctggaatgttagtggatgaacagagaagccttagaagatttaagagcataataagcatagggtaggaaatttccacctgtggcagcaaaagaagtaaatttagaattttccagaaccaatttctttgaagcagaacttccaacaccacatttttaaggttttctccttggcctttgcacctctcatctttgttatttgtttattcttccctattggggtgttgcctattattctctctctttttacattccaaagayatttcctttactgtaggacaggggcatccacgggagactacagccatgagttcttagtttctgtttctggttgagccagtaaggccctttcctcatcccccttttccacttatcactagacacagaacccaaaaaccattgctgcaggctgctaaaaacctaaaacaaaacagagccataacaaaaacaaa

SEQ ID NO: 559228 - DNA, 548 bp, Homo sapiens
aggccatatatataaaatatatatcttttatgtatacagatatatgaamtatgtatcttttatacataaaggtgtatatgtataagtttatatattatatataatatataaatatattatatatatatacatatattatatatatatatatatatatatatatatatatatatatatatagtatatatatttttttgagacacagtctcgctctgtcacccaggctggagtgcagaggcacgatcatggcttaatgtaatttctgcttcctgggctcaagtgattcttacacctcagcctcctgagtggctgggattacaggcatgcatcaacacacctggctaatttttggatttttagtagagaagggtttttgccatgctggccatggctggtttcaaacccctggccttaagtgttccacccgtcgccttggtctaccaatctgctaagattacaggcaagagccactgcatccaactgattttgattcattctatctcatatatcaccaaagactgtttttggaagttgatgttagcataatc

SEQ ID NO: 559229 - DNA, 575 bp, Homo sapiens
ttcatgtcctttgcagggacatggatgaagctggaaaccaccattctyagcaaactaacacaagagtagaaaagctaacatcgcatgttctcactcataatagggagttaaacaaagagaacacacggacacaggaaggggaacatcacacactggagcctgtcgggaagtgggggactatgggagggatagcattagaagaaatattcctggcctaggccactattgcgattttctaaattttgtttcaaaaacatgatatgtttcaaaaattgttattggtatgtaattatataaatatatagttcagaaaaaagaatcaacattaattatgctttttccaaaatactttatggttttgagctcttctagcagtgacatttttgctgtaggtaattgctgtgtatctggtatattcatcatagcatactttgtgccgtttacacttatccttcaatttcccactctcctaagtgtaaaagttcaaggccagagctcccatatcttcccaatattactttttgaaaagaagcttctatgtactgttttctctgggtcttgattggatatattgc

SEQ ID NO: 559230 - DNA, 575 bp, Homo sapiens
ttcatgtcctttgcagggacatggatgaagctggaaaccaccattctcagcaaactaacacaagagtagaaaagctaacatcgcatgttctcactcataatagggagttaaacaaagagaacacacggacacaggaaggggaacatcacacactggagcctgtcgggaagtgggggactatgggagggatagcattagaagaaatattcctggcctargccactattgcgattttctaaattttgtttcaaaaacatgatatgtttcaaaaattgttattggtatgtaattatataaatatatagttcagaaaaaagaatcaacattaattatgctttttccaaaatactttatggttttgagctcttctagcagtgacatttttgctgtaggtaattgctgtgtatctggtatattcatcatagcatactttgtgccgtttacacttatccttcaatttcccactctcctaagtgtaaaagttcaaggccagagctcccatatcttcccaatattactttttgaaaagaagcttctatgtactgttttctctgggtcttgattggatatattgc

SEQ ID NO: 559231 - DNA, 338 bp, Homo sapiens
ttttcacatacaaattctttatacacacacacagacacacacacacatatctcactctgtcaatgcagtggctgaatcatgggtcactgcatcttcaaattcttaggctccagtgatgctttcaaatcagcctctcaagtagctgggactacaggcatgcaaagctacacccagacaatttttaaatatttttctagagactgagcctacttatgttgctcagactcgtcttgmactcctgggatcaagcgataatcccaccttgaccacccaaagtgtttagattacaggtgtgagctagcactctcagcaaaaatatattttaaagaaccgttaca

SEQ ID NO: 559232 - DNA, 338 bp, Homo sapiens
ttttcacatacaaattctttatacacacacacagacacacacacacatatctcactctgtcaatgcagtggctgaatcatgggtcactgcatcttcaaattcttaggctccagtgatgctttcaaatcagcctctcaagtagctgggactacaggcatgcaaagctacacccagacaatttttaaatatttttctagagactgagcctacttatgttgctcagactcgtcttgcactcctgggatcaagcgataatcccaccttgrccacccaaagtgtttagattacaggtgtgagctagcactctcagcaaaaatatattttaaagaaccgttaca

SEQ ID NO: 559233 - DNA, 584 bp, Homo sapiens
aagtttcatttatccactctgtctgctttagtctcttttggctgttataacagaatatcacagactggtaattaataaagaacagaattttatttgactcatgattctggaggctgggaaggtaaaagaacatgttactggtatctgttgaaggtctagttgctggataataacatggccaaagatgtgagggagagasagcttttttttttttaatatataacagatccattcttgttaaaattagcccattcccataataagaacattaatccattcatgagggcagagtgcttatagcttaattaatttttaaaggttccacctcttaattctttcacattggccattttatcctaaattttggagatgacattcagtctacagaagtatctgtttagtagataatttaatctttttatttgtaaggtagtgataagtaagcagttactattgtacatttgtagttttctgtccattttaagtttgcttcttttttttctggttctgtctttcctgtggtattgttcatttttgttgagacaaagttatgctttcttgctcagactgaagttcagtggcat

SEQ ID NO: 559234 - DNA, 584 bp, Homo sapiens
aagtttcatttatccactctgtctgctttagtctcttttggctgttataacagaatatcacagactggtaattaataaagaacagaattttatttgactcatgattctggaggctgggaaggtaaaagaacatgttactggtatctgttgaaggtctagttgctggataataacatggccaaagatgtgagggagagacagcttttttttttttaatatataacagatccattcttgttaaaattarcccattcccataataagaacattaatccattcatgagggcagagtgcttatagcttaattaatttttaaaggttccacctcttaattctttcacattggccattttatcctaaattttggagatgacattcagtctacagaagtatctgtttagtagataatttaatctttttatttgtaaggtagtgataagtaagcagttactattgtacatttgtagttttctgtccattttaagtttgcttcttttttttctggttctgtctttcctgtggtattgttcatttttgttgagacaaagttatgctttcttgctcagactgaagttcagtggcat

SEQ ID NO: 559235 - DNA, 584 bp, Homo sapiens
aagtttcatttatccactctgtctgctttagtctcttttggctgttataacagaatatcacagactggtaattaataaagaacagaattttatttgactcatgattctggaggctgggaaggtaaaagaacatgttactggtatctgttgaaggtctagttgctggataataacatggccaaagatgtgagggagagacagcttttttttttttaatatataacagatccattcttgttaaaattagcccattcccataataagaacattaatccattcatgagggcagagtgcttatagcttaattaatttttaaaggttccacctcttaattctwtcacattggccattttatcctaaattttggagatgacattcagtctacagaagtatctgtttagtagataatttaatctttttatttgtaaggtagtgataagtaagcagttactattgtacatttgtagttttctgtccattttaagtttgcttcttttttttctggttctgtctttcctgtggtattgttcatttttgttgagacaaagttatgctttcttgctcagactgaagttcagtggcat

SEQ ID NO: 559236 - DNA, 584 bp, Homo sapiens
aagtttcatttatccactctgtctgctttagtctcttttggctgttataacagaatatcacagactggtaattaataaagaacagaattttatttgactcatgattctggaggctgggaaggtaaaagaacatgttactggtatctgttgaaggtctagttgctggataataacatggccaaagatgtgagggagagacagcttttttttttttaatatataacagatccattcttgttaaaattagcccattcccataataagaacattaatccattcatgagggcagagtgcttatagcttaattaatttttaaaggttccacctcttaattctttcacattggccattttatcctaaattttggagatgacattcagtctacagaagtatctgtttagtagataatttaatctttttatttgtaaggtagtgatargtaagcagttactattgtacatttgtagttttctgtccattttaagtttgcttcttttttttctggttctgtctttcctgtggtattgttcatttttgttgagacaaagttatgctttcttgctcagactgaagttcagtggcat

SEQ ID NO: 559237 - DNA, 503 bp, Homo sapiens
  misc_feature 1, 2, 3, 4, 5, 6, 7, 8, 9, 10, 11, 12, 13, 14, 15, 16, 17,18, 19, 20, 21, 22, 23, 24, 313: n = A,T,C or G
nnnnnnnnnnnnnnnnnnnnnnnngaaagtttaagaagcaagagaagaaagctctttgccagcagagataggtgtctgaaagtggtgccctctacgaggctgggtccagggtttttatggactgggaagggaaggatatgtgcctagttcacaggctgtcttgaaaaacgtgtggctcagcttggcccatgcctttggcccgggatcaatcaggagctgaagggatgattaatagatgctgcttagcttggcccaagacttatcagaagctaaagtgaaagtttggccaaggagcttggcccgggagcactcnagggctgaagtaaattattcatagaggtcagacttacagtccaaataaacgagagtgtcgaccggaatgcaccakatcccacagtgcccatgccaacaaaaagagaaggaacattttcctgggagcccactgactgtacaaagacaaaagtgcttcttttttttctttttcttgtctttcttttttttga

SEQ ID NO: 559238 - DNA, 623 bp, Homo sapiens
tttgtgatgcacatctgtaatcccagctactcaggaagctgagacagcagaaatcacttaaaactgagaagtggaggttgcagtgagcggagatcatgccactgtactccagcctgggtgacagagtgagactctgccacaagaagaaaaaaaagagaaactaraagatctaaaattaacagcctaacatcttgatgaaaagaactagaaaaccaagtgaaaactaaccagaaaggtagcagaaaacaagaaataaccaagatcaaagtagagctgagggagatagagacactgaaaactcttccaaaaaaaaaagtcaacaaatccaggagctgtttttatgaaaaaaattaataaactagatggaacactagctaggcaaataaataagaaaagaaaggagaaccaaacacaattagaaataataagggagatatcatcactgatcccatggaaatatgaacaacaatcagagaacactataaacatatgtatgcacataaaccagaaaatctagaagaaatagacaatttccttgcaaaataaaccctccacaagactgaaccctgaatagatcaataatgtgttctgaaactgaggcagtaaaaactagcctaccaagc

SEQ ID NO: 559239 - DNA, 623 bp, Homo sapiens
tttgtgatgcacatctgtaatcccagctactcaggaagctgagacagcagaaatcacttaaaactgagaagtggaggttgcagtgagcggagatcatgccactgtactccagcctgggtgacagagtgagactctgccacaagaagaaaaaaaagagaaactaaaagatctaaaattaacagcctaacatcttgatkaaaagaactagaaaaccaagtgaaaactaaccagaaaggtagcagaaaacaagaaataaccaagatcaaagtagagctgagggagatagagacactgaaaactcttccaaaaaaaaaagtcaacaaatccaggagctgtttttatgaaaaaaattaataaactagatggaacactagctaggcaaataaataagaaaagaaaggagaaccaaacacaattagaaataataagggagatatcatcactgatcccatggaaatatgaacaacaatcagagaacactataaacatatgtatgcacataaaccagaaaatctagaagaaatagacaatttccttgcaaaataaaccctccacaagactgaaccctgaatagatcaataatgtgttctgaaactgaggcagtaaaaactagcctaccaagc

SEQ ID NO: 559240 - DNA, 608 bp, Homo sapiens
gtatgtcagaatcacacctgcaggaaggtccatggatgagattaacaatcccacataagttcsggttctgggtatgagagtgaacgcctcctgtacgttgtatctatgtgcataagtcacaatctcaatggaggaatgggttttttccatgagagccttaatcccttttgaaaacggagttatcttagtggactcacagcctcacaagtgttttggatcttggtcagggagtcacaaacccactggcagacaatatccacttttaagagccaattttccaacttttgactgcctctgggtgtgagtttcagaacctcaattatggtccatgttcatgtgggagaaacaattttgacagatggctgggctcaggcaggagactttcatcctgcaggtgttgagacaaaggatacatcacaatacccaaaatatgctgggtgcaggcaaaagaggagactcatattagctggttgctaggtccagttatatgtcaccacctccctttttggcagggctaaggcaaaagaggagagtcagagctaaagaaatgtcataatgtccctgtgggtagggcctatgcataagagttgcatcacctagtcattaaa

SEQ ID NO: 559241 - DNA, 546 bp, Homo sapiens
caccattgcactccaccttgggcaacaagagcaaaactccgtctcaaaagaaaaagaaagaaaagaaaagaaagaacattgaatccgtagaccacttttggtwgtagtgacattttaacaatattaagtctataacctcttgaacaagagtgtgtttgagaatttgttgtttaatttttacttattctttgacatgttagtgtttttaacttcttgttttattgtatcatagttaggaataatttgtgtaattccatctgctgaaatttgctaagatgtgttttttaacttaacaggtggtctatctggaatattgtggcatgtgtgattaaaagtattgcatattctactgttgagtggagagagataaatgtgactgttaggtctaattgttctattgtgttgttgaaatcttctgttaactaattcatcttaggttggtttttaatttacattactaaaagtctgataaaaaagtcatctactgttatgtgctggctacttcatgtttcaattctgtaaaatgttgcttcatattttgggaac

SEQ ID NO: 559242 - DNA, 546 bp, Homo sapiens
caccattgcactccaccttgggcaacaagagcaaaactccgtctcaaaagaaaaagaaagaaaagaaaagaaagaacattgaatccgtagaccacttttggtagtagtgacattttaacaatattaagtctataacctcttgaacaagagtgtktttgagaatttgttgtttaatttttacttattctttgacatgttagtgtttttaacttcttgttttattgtatcatagttaggaataatttgtgtaattccatctgctgaaatttgctaagatgtgttttttaacttaacaggtggtctatctggaatattgtggcatgtgtgattaaaagtattgcatattctactgttgagtggagagagataaatgtgactgttaggtctaattgttctattgtgttgttgaaatcttctgttaactaattcatcttaggttggtttttaatttacattactaaaagtctgataaaaaagtcatctactgttatgtgctggctacttcatgtttcaattctgtaaaatgttgcttcatattttgggaac

SEQ ID NO: 559243 - DNA, 546 bp, Homo sapiens
caccattgcactccaccttgggcaacaagagcaaaactccgtctcaaaagaaaaagaaagaaaagaaaagaaagaacattgaatccgtagaccacttttggtagtagtgacattttaacaatattaagtctataacctcttgaacaagagtgtgtttgagaatttgttgtttaatttttacttattctttgacatgttagtgtttttaacttcttgttttattgtatcatagttaggaataatttgtgtaattccatctgctkaaatttgctaagatgtgttttttaacttaacaggtggtctatctggaatattgtggcatgtgtgattaaaagtattgcatattctactgttgagtggagagagataaatgtgactgttaggtctaattgttctattgtgttgttgaaatcttctgttaactaattcatcttaggttggtttttaatttacattactaaaagtctgataaaaaagtcatctactgttatgtgctggctacttcatgtttcaattctgtaaaatgttgcttcatattttgggaac

SEQ ID NO: 559244 - DNA, 587 bp, Homo sapiens
attttataatggaaataaagtagaatgttgggagggagggctggggagaggttgcctggaggggacatgaatgcctccctgaggtgacattatgttgtgaccagaatgacaacagagagccastcctgcgcaggtgtgcaaagtgtgtcagggaaaagccactctttgtgaagagactcacaggcacaggtgagttcagcagaggaggttataacgggacaattgtggcggcaggcagcctgagaaagaaaggaaaagaggggagggaggatcctggggactgaaagaggagattagtcatttgcccctctctgacaaaatttccctgaattttagcacatgttgacaacaaatactatctcacaacttttgtgaaccagaatctcgatatagcttagttgggtgcctctgcctcaaggtctcttacgaggctggggctgtgatttcaactgaagctggatttgaggagagatcagccttctatctgcctcatggaaactggcacgattcagtgtgaactgagagcccgagttccttcctctcgattggcctgggcatctcctcagttctctatcatgtgggtctgt

SEQ ID NO: 559245 - DNA, 519 bp, Homo sapiens
ctttgtgaagagactcacaggcacaggtgagttcagcagaggaggttataacgggacaattgtggcggcaggcagcctgagaaagaaaggaaaagaggggagggaggatcctggggactgaaagaggagattagtcatttgcccmtctctgacaaaatttccctgaattttagcacatgttgacaacaaatactatctcacaacttttgtgaaccagaatctcgatatagcttagttgggtgcctctgcctcaaggtctcttacgaggctggggctgtgatttcaactgaagctggatttgaggagagatcagccttctatctgcctcatggaaactggcacgattcagtgtgaactgagagcccgagttccttcctctcgattggcctgggcatctcctcagttctctatcatgtgggtctgtgcctagagcatcttaggacactgcagatcacttcctcatcttgaggattacaatacagagatgaaaaatgaaagagatagacagacatatgcaga

SEQ ID NO: 559246 - DNA, 519 bp, Homo sapiens
ctttgtgaagagactcacaggcacaggtgagttcagcagaggaggttataacgggacaattgtggcggcaggcagcctgagaaagaaaggaaaagaggggagggaggatcctggggactgaaagaggagattagtcatttgcccctctctgacaaaatttccctgaattttagcacatgttgacaacaaatactatctcacaacttttgtgaaccagaatctcsatatagcttagttgggtgcctctgcctcaaggtctcttacgaggctggggctgtgatttcaactgaagctggatttgaggagagatcagccttctatctgcctcatggaaactggcacgattcagtgtgaactgagagcccgagttccttcctctcgattggcctgggcatctcctcagttctctatcatgtgggtctgtgcctagagcatcttaggacactgcagatcacttcctcatcttgaggattacaatacagagatgaaaaatgaaagagatagacagacatatgcaga

SEQ ID NO: 559247 - DNA, 519 bp, Homo sapiens
ctttgtgaagagactcacaggcacaggtgagttcagcagaggaggttataacgggacaattgtggcggcaggcagcctgagaaagaaaggaaaagaggggagggaggatcctggggactgaaagaggagattagtcatttgcccctctctgacaaaatttccctgaattttagcacatgttgacaacaaatactatctcacaacttttgtgaaccagaatctcgatatagcttagttgggtgcctctgcctcaaggtctcttacgaggctggggctgtgatttcaactgaagctggatttgaggagagatcagccttctatctgcctcatggaaactggcacgattcagtgtgaactgagagcccgagttccttcctctcgattggcctgggcawctcctcagttctctatcatgtgggtctgtgcctagagcatcttaggacactgcagatcacttcctcatcttgaggattacaatacagagatgaaaaatgaaagagatagacagacatatgcaga

SEQ ID NO: 559248 - DNA, 519 bp, Homo sapiens
ctttgtgaagagactcacaggcacaggtgagttcagcagaggaggttataacgggacaattgtggcggcaggcagcctgagaaagaaaggaaaagaggggagggaggatcctggggactgaaagaggagattagtcatttgcccctctctgacaaaatttccctgaattttagcacatgttgacaacaaatactatctcacaacttttgtgaaccagaatctcgatatagcttagttgggtgcctctgcctcaaggtctcttacgaggctggggctgtgatttcaactgaagctggatttgaggagagatcagccttctatctgcctcatggaaactggcacgattcagtgtgaactgagagcccgagttccttcctctcgattggcctgggcatctcctcagttctctatcatgtgggtctgtgcctagagcatcttaggacactgcrgatcacttcctcatcttgaggattacaatacagagatgaaaaatgaaagagatagacagacatatgcaga

SEQ ID NO: 559249 - DNA, 435 bp, Homo sapiens
atacatactggctcagcctacatccttgataccactggccattcgacaagaggcacccacaggtaacacagtttagcccagggcaggtccgtccatgccaggccacctgtgtcatctaatctgggcaacccgaccctgcctaccattaccctgtgttgcaaggggagcaggaaaggagggggcttttcctcacaggggcaggttttaagacacaggaaccctggtgggtctgtcatgttcatacccaggtcacggttggtggaataaaaagttgtgagttgcggaccaagtacgtctactcagatgtgaatcccaaggccttaagctgtcctcgggtttcctcattggctgggggtctatgcagatactcctatgttcctgatctaggaaacagaatttctaatgsagatgtcacctggtggtaaaaacaaagaa

SEQ ID NO: 559250 - DNA, 491 bp, Homo sapiens
acctcctgtgctctggtgagatggggcctcccctcacagggtattctgagactgtgagtgagaagctaacacagtgccttgcaatactcacgggagctgtcatcctctgtgaccatcacgtggccttgtagtgttcagactgcctggcctgcctggggtttggtgaggctgttttgtggtcagctgctttagaatctcactttctctgcaatcaaacagtgactgtctttgtgtctgtttatgggtttaaaaaatcctaatatttcatttatagtagtttcagcttgcatgtgtttatttgtataaattttattagaataaagagagcttaagacaacagcattttaaggtcttaatgaggcatagactttcatgtcacaacagctattgttgacctctgtttgctacctttatgtaatgtatacacataaagtacagccagaggtgactagagctgagctkcttgggcttgcttgctggcctacagtcag

SEQ ID NO: 559251 - DNA, 567 bp, Homo sapiens
acaggttgatgggtgcagcaaaccaccatggcacatgtatacctacgtaacaaacctgcacattctgcacatgtacctcagaacttaaagtacaacaacaacaacagaaaaaaaaaaagagcttaccacaaactttggcagcgctgctcactaagtcaaaaggcttggtaaaaacttcagccatccctttttgaacctttgtttacttgaggaataaaagtcacatctaacgactcagagatrttccttagagtaagcgcaagcctgatttagctctactccaacaaaacctaaaaccaagccttcagaaggccaagatgatctgccagtaatttaatcgcctgctggaataacgttcaacgctcttcagagggaaatggcggaaggcaaagcctacatgatgtgtcatacgtagtatgtccagcaaattagcagagaaaacatgaaaatatgactcagtctagagaaaagtcagcagaaacagacccggttccaaggcagattttagaattagtggacaagaattgataaaacggaaaagaacctatgatcaatgttaaactacag

SEQ ID NO: 559252 - DNA, 567 bp, Homo sapiens
acaggttgatgggtgcagcaaaccaccatggcacatgtatacctacgtaacaaacctgcacattctgcacatgtacctcagaacttaaagtacaacaacaacaacagaaaaaaaaaaagagcttaccacaaactttggcagcgctgctcactaagtcaaaaggcttggtaaaaacttcagccatccctttttgaacctttgtttacttgaggaataaaagtcacatctaacgactcagagatgttccttagagtaagygcaagcctgatttagctctactccaacaaaacctaaaaccaagccttcagaaggccaagatgatctgccagtaatttaatcgcctgctggaataacgttcaacgctcttcagagggaaatggcggaaggcaaagcctacatgatgtgtcatacgtagtatgtccagcaaattagcagagaaaacatgaaaatatgactcagtctagagaaaagtcagcagaaacagacccggttccaaggcagattttagaattagtggacaagaattgataaaacggaaaagaacctatgatcaatgttaaactacag

SEQ ID NO: 559253 - DNA, 665 bp, Homo sapiens
aatcaggctttatagtaaacgtttttattatccttttccaaaatttcttgggattcttttacatttattcttccatataaatttctttttccaccccagaaaatccttaatcatttaaaatttactctgattagaattgtctaaaattattcattgatttggaaataactaatgtaataatgatcagttttttcatccaggaacatatgtaacttgctatttactcatgtcttttatagtttttagtaaaatgttgtattttttatgatatacatttgtttacatcttgttaaatttagtcctagatattatattttaggttgctttataaatgcctttcttttcaatgtttaaactaattattgctactataaagaaaagctatgtttttgaaacatacaaccttattaaattctcttrttagctctaataggtttttagtgcagtgtcttgtaatattcaaatattcaataacaccatttataataataagatttctttccttttgtaataaaatgttatgaatttttaaagtttttcttgccaaaacctctatcttctttaataacagaaattgtaggaagtttttaagcttgtttggatcttaaaacaaatgtgtttagtattttaccatttggcataatgttttagttttttgcaaaaac

SEQ ID NO: 559254 - DNA, 608 bp, Homo sapiens
cagcacacggtaaattcttaaaccatattttgtaataattacaaccatacccaaagaaaaagaaggaatgttgcatgtacaagagggccattattaagccaagagcatagaaaagttcaaacaaatccaattaaaagcatttattaagactctcatgagcatggcatagagattcttgattgaaatagatgyataaattggattacagttagactgcattgatatgaaaaacatggagttaaatgaaaaattttgtgtcttctaataagtggtgactttatattttggttctacttaagttgtgactcattcagagtcaggaaaaagagcacataagtcaagtagagcgtctgtttcattctggatattttgtaagaccttcagcacctctgcttcatttattttctctccttccagtaagagatataaccccttaggtttgggtaaataacgtgatctcacttcttagaatcgtttgtttgccttgaatcactgtgtttatggtcatcaagtcatttctacaggattagtggaggcttttctctgatcacctacactggacctcaaagcataaaacttttttttttttttttttttttgagatggag

SEQ ID NO: 559255 - DNA, 588 bp, Homo sapiens
ggccatatgtagaaagctgaaactggatcccttccttacaccttatacaaaaattaattcaagatggattaaagacctacatgttagacctaaaaccataaaaaccctgaagaaaacctaggcaatgccattcggggcataggcacgggcaaggacttcatgtctaaaacaccaaaagcaatggcaacaaaagccaaaattgacaaatgggayctaattaaactaaagagcttctgcacagcaaaagaaactaccatcagagtgaacaggcaacctacagaatggaagaaaatttttgcaatctactcatctgacaaagggctaatatccagaatctacaatgaactcaaacaaatttacaagaaaaaaacaaacaaccccatcaaaaagtgggtgaaggacatgaacagacacttctcaaaagaagacatttattcagccaaaagacacatgaaaaaatgctcatcatcactggctatcaggcaaatgcaaatcaaaaccacaatgagataccatctcacaccagttagaatggtgatcattaaaaagtcaggaaacaacccggtgctggagaggatgtggagaaat

SEQ ID NO: 559256 - DNA, 588 bp, Homo sapiens
ggccatatgtagaaagctgaaactggatcccttccttacaccttatacaaaaattaattcaagatggattaaagacctacatgttagacctaaaaccataaaaaccctgaagaaaacctaggcaatgccattcggggcataggcacgggcaaggacttcatgtctaaaacaccaaaagcaatggcaacaaaagccaaaattgacaaatgggatctaattaaactaaagagcttctgcacagcaaaagaaactaccatcagagtgaacaggcaacctacagaatggaagaaaatttttgcaatctactcatctgacaaagggctaatatccagaatctacaatgaactcaaacaaatttacaagaaaaaracaaacaaccccatcaaaaagtgggtgaaggacatgaacagacacttctcaaaagaagacatttattcagccaaaagacacatgaaaaaatgctcatcatcactggctatcaggcaaatgcaaatcaaaaccacaatgagataccatctcacaccagttagaatggtgatcattaaaaagtcaggaaacaacccggtgctggagaggatgtggagaaat

SEQ ID NO: 559257 - DNA, 394 bp, Homo sapiens
tagcctggtgtggtggcgcaggcatgtaatcccagctactsaggaggctgaggcaggagaatggcttgaatctgggaggtggaggttgcagtgagccaagatcacaccactgtgctccagcctgggcaacagagtgagactccatctcaaaaaaaaatattaaaaataaaaatattttcaaaatatttgagaagcttgacagaatgaagtgtttctccctgccaaacttaagccatttaactggaagaggagaaagagaactctctgccttcctgtctccgccagccatggcatttccattccttctttcccctcctgaccagccaacaactcacatcctcattttcttcttggggtgtgaaaaaacttgctgacattctggaataggatgaca

SEQ ID NO: 559258 - DNA, 537 bp, Homo sapiens
aataaaaaaaaaacatgaaaagtaaaaaaaatagacaaaataaaacaaaaacaatcagatgatatgacaatacttgttaactctgaggtaggaaaacaaaactaacaaaaagcagacacacrtgtgaatacacgtatacacacacacacaaacacaaattacttcctaagaacgacacaaaactcagaaagtgtaaaagtaaagactgacaaaattaacaacctaaaaattaaattcttacatatggcacactgctccataacttaaattataatacaagagataagctgaaatgaattaattataataaatgattaatgtgatgtaaaatcattcaattttaagtcgagcaaaggttgaaatggttatatccccaaaatgaatataaatagttaataaacacatgataaagtgtttatattaatagaagacagaaatggaaatctctgtacattagtaatcaggcccaaaacaaattaagcaatacaatgtttttttaaaccatcaaatgaacaaatattaaatgattttttatta

SEQ ID NO: 559259 - DNA, 358 bp, Homo sapiens
ttatcatttagtgtttcacctttgggagttacctacgcatattctttgcatttgtactgttttctggaagattcatgagtttctctaatcatcttgattttggtttttctttgttttatatattacaaataacatttacaagctgtcaacatctgctgatttttatttagacatacttctttgcacagaaatctataattttagtgaaatcaaattaattgttygtatttatttgctagctagtttatttatttatttattttgccttctcctggagccctattaaaaattttaatggcactaggtcacatagattctaaatagttacatagcacatactaataattacaaaatttta

SEQ ID NO: 559260 - DNA, 679 bp, Homo sapiens
taacacatagtttctttgccttgagagtgtgtgttaagacccactcttctttacatctattcaaatcattccctgatctcctgaatcatagcttcaaccatgaccatctttcttgcccactcctcacattttgctatggtctacaatcacataagtttttgatatccaatattattcagaaaaaacaaagtcatattccctatgtaaaattaatgaattttcacatacaagatcgactgattctgcagaattcaacatataatatcacaaaaatgatggtggcatcacacgttatcatttcttgctttatggtatttttgcccacatggaattagcttaaatagaatatatagtaaacacaagagtctggaaataaaaccatcatagtatggtaaaataagagcatcctgcagtcccaaacgtttctaaggtgataaatgtgcaatgaaatacatgaacataatgttagttgctgcctgtgtttcaatcatttgaatcattgaaactatgtttaaatcattgtgataagaaaaatacaaatcaaacaagtgcttattatccttaggacttttaaaatgtaatataaaacaattatctcattttctttttgcttagtgttgttacctatctcagactgaatttgtttctttcttcygaatgatccagtttgttcagacta

SEQ ID NO: 559261 - DNA, 410 bp, Homo sapiens
tttcaagcatcaacagggtttcttggaccatatccctgcagataagaaaggactaccatatatatatatatatatatatatatatatatatatatatatatatatatatacatacacacacacacacacacacacacacaaatatatatacacacacacgtatatatacatatgtatgtatatgtgtgtgtgtgtgtgtgtgtrtgtacaaatatatacacacacataggtttttaatatctcaatgcaagacaaaagggttaactctagcctaactcgtttctaatattccaattttctttcaccggagagaaccagctttctattattctcaatatagtaatcatttgctcaatttcaaaatacctagaaagaatttttgcaattgcttgcctacaccactgtgaaag

SEQ ID NO: 559262 - DNA, 590 bp, Homo sapiens
ccttttcattttctgtcaatctgattggataaacatgattttattttcattttttatatttataacttctaattattacaactacctgaaaaagtaaactgtttaatttcattttgcagaccgaaaaatgaaactgaggcaaaaggagattgagtgacatactcaaggtcagtcccgtgtctaataagtttcagagtcagaaattaaactcaggttcatctgtttgcaaagctcttgttcttttcactagggttatacagccccactgtgtcaaagcttctagacaatcatcctggtgtctttcctcttgagtgtttccagcatagaactwgggaagtggtaagtgcccaatatatgtcttgtaagtctagttctgagtgtacctaatctttctaaagtctcttaaaatgtggccctccaggtaaggtcattccagaacagaaaggcttctaaaatgttttactgtaggtcagataggaaggtaaagtatgtgtactactcattgaaggtatgatttttgttgaacttgtgcgcataacaatcacttagcatttttaattccctttttctccttttagtcatcatttact

SEQ ID NO: 559263 - DNA, 590 bp, Homo sapiens
ccttttcattttctgtcaatctgattggataaacatgattttattttcattttttatatttataacttctaattattacaactacctgaaaaagtaaactgtttaatttcattttgcagaccgaaaaatgaaactgaggcaaaaggagattgagtgacatactcaaggtcagtcccgtgtctaataagtttcagagtcagaaattaaactcaggttcatctgtttgcaaagctcttgttcttttcactagggttatacagccccactgtgtcaaagcttctagacaatcatcctggtgtctttcctcttgagtgtttccagcatagaactagggaagtggtaagtgcccaatatatgtcttgtaagtctagttctgagtgtacctaatctttctaaagtctcttaaaatgtggccctccaggtaaggtcattccagaacagaaaggcttctaaaatgttttactrtaggtcagataggaaggtaaagtatgtgtactactcattgaaggtatgatttttgttgaacttgtgcgcataacaatcacttagcatttttaattccctttttctccttttagtcatcatttact

SEQ ID NO: 559264 - DNA, 506 bp, Homo sapiens
agcccaggagttcaacaccagcctgtgcaacataagaagacctcgtctatacaaaaaattaaaaaattagttgggcatagtttggtatgccctacatgtagtcccagcttcttgggaggctgaggcaggagaatggcttgagccaggaaggtcaaggctgcagtcagccatgattgcaacactgcactccagcctgggtggaagggtaaaactctgtctaaataaataagtaaatagaataaagcttacaacactatcactattgcttaaattatatakagaagactttggcaacaattttgtattttctttttaaattttaatcgagaaacttgggtggagtttttttttccaatgcataaatttgagtgaatcaaaatacgtttatctcatcttaaaaatttaatcagacttacatctttgagaacaacataaacaataaagccaagtagtcaataataccagatttagttagtcatttgattaaaactgatagctacaaaatc

SEQ ID NO: 559265 - DNA, 515 bp, Homo sapiens
ttgtattttggcggtctgaatttagtttgatagttggttttttcagtttagcttgttttttaattgaatcactggtttcagggtggagccatgttaatgaatagcacaaaaagaaatttgctgtttttagagtttaatatctaatatatgagaagcagacacaaccggaaggcagagcatctagatctttaaaaattaaggatttcacatttacattgaattctgggtccccaaaatagggaaatgccatgggacttgcccatgcaacagttctgcagtgctcctcactacaagggtattcccccaaggctggttagaaatccaataccaaccagtccactctgtaattaactcaacccctataagagtcttctctctttttggcaagtatttccacagcctcgaattgttcaaaccacttttcttatctacaagtgcaaataaatagctttytgcagtaataaccacccattgcaaccacagttggcctgtaagcagcagcaaagctgtatggg

SEQ ID NO: 559266 - DNA, 515 bp, Homo sapiens
ttgtattttggcggtctgaatttagtttgatagttggttttttcagtttagcttgttttttaattgaatcactggtttcagggtggagccatgttaatgaatagcacaaaaagaaatttgctgtttttagagtttaatatctaatatatgagaagcagacacaaccggaaggcagagcatctagatctttaaaaattaaggatttcacatttacattgaattctgggtccccaaaatagggaaatgccatgggacttgcccatgcaacagttctgcagtgctcctcactacaagggtattcccccaaggctggttagaaatccaataccaaccagtccactctgtaattaactcaacccctataagagtcttctctctttttggcaagtatttccacagcctcgaattgttcaaaccacttttcttatctacaagtgcaaataaatagctttttgcagtaataaccacccattgcaaccayagttggcctgtaagcagcagcaaagctgtatggg

SEQ ID NO: 559267 - DNA, 381 bp, Homo sapiens
gaattcctcaaactcttgcatatttaaaattacatttttgaaccttgatgcttgaagtgtagcttgsgtaacgggtgggctttaagccaattttggcatgcaaggggttgagtttattaggcatcagcacctctgaaaatcgtggggatgcaggcttaatttcaacactattctaaatacttgaaagatattatataactctttaataaactcctgtgtctacaaatggttcacattaactcaatatccatgattaaacatctataaaatcaaggcactgttatttagtggagacttgctggctattctatgagaggaggtattgttattgtaatctcatcctctcataaaagtgtatcatattactcataaccagccctt

SEQ ID NO: 559268 - DNA, 213 bp, Homo sapiens
gaattcctcaaactcttgcatatttaaaattacatttttgaaccttgatgcttgaagtgtagcttgggtaacrggtgggctttaagccaattttggcatgcaaggggttgagtttattaggcatcagcacctctgaaaatcgtggggatgcaggcttaatttcaacactattctaaatacttgaaagatattatataactctttaataaactc

SEQ ID NO: 559269 - DNA, 213 bp, Homo sapiens
gaattcctcaaactcttgcatatttaaaattacatttttgaaccttgatgcttgaagtgtagcttgggtaacggrtgggctttaagccaattttggcatgcaaggggttgagtttattaggcatcagcacctctgaaaatcgtggggatgcaggcttaatttcaacactattctaaatacttgaaagatattatataactctttaataaactc

SEQ ID NO: 559270 - DNA, 387 bp, Homo sapiens
gaattcctcaaactcttgcatatttaaaattacatttttgaaccttgatgcttgaagtgtagcttgggtaacgggtgggctttaagccaattttggcatgcaaggggttgagtttattaggcatcagcacctctgaaaatcgtggrgatgcaggcttaatttcaacactattctaaatacttgaaagatattatataactctttaataaactcctgtgtctacaaatggttcacattaactcaatatccatgattaaacatctataaaatcaaggcactgttatttagtggagacttgctggctattctatgagaggaggtattgttattgtaatctcatcctctcataaaagtgtatcatattactcataaccagcccttcatatt

SEQ ID NO: 559271 - DNA, 381 bp, Homo sapiens
gaattcctcaaactcttgcatatttaaaattacatttttgaaccttgatgcttgaagtgtagcttgggtaacgggtgggctttaagccaattttggcatgcaaggggttgagtttattaggcatcagcacctctgaaaatcgtggggatgcaggcttaatttcaacactattctaaatacttgaaagatattatataactctttaataaactcctgtgtctacaaatggttcacattaactsaatatccatgattaaacatctataaaatcaaggcactgttatttagtggagacttgctggctattctatgagaggaggtattgttattgtaatctcatcctctcataaaagtgtatcatattactcataaccagccctt

SEQ ID NO: 559272 - DNA, 383 bp, Homo sapiens
gtgtagcttgggtaacgggtgggctttaagccaattttggcatgcaaggggttgagtttattaggcatcagcacctctgaaaatcgtggggatgcaggcttaatttcaacactattctaaatacttgaaagatattatataactctttaataaactcctgtgtctacaaatggttcacattaactcaatatccawgattaaacatctataaaatcaaggcactgttatttagtggagacttgctggctattctatgagaggaggtattgttattgtaatctcatcctctcataaaagtgtatcatattactcataaccagcccttcatattctattcctattttggtatttaaaaataagatatctttgaaacacttgaattc

SEQ ID NO: 559273 - DNA, 417 bp, Homo sapiens
tatttaaaattacatttttgaaccttgatgcttgaagtgtagcttgggtaacgggtgggctttaagccaattttggcatgcaaggggttgagtttattaggcatcagcacctctgaaaatcgtggggatgcaggcttaatttcaacactattctaaatacttgaaagatattatataactctttaataaactcctgtgtctacaaatggttcacattaactcaatatccatgattaaacatctataaaatcaaggcactgttatttagtggagacttgctggctattctatgagaggaggtattgttattgtaatcwcatcctctcataaaagtgtatcatattactcataaccagcccttcatattctattcctattttggtatttaaaaataagatatctttgaaacacttgaat

SEQ ID NO: 559274 - DNA, 417 bp, Homo sapiens
tatttaaaattacatttttgaaccttgatgcttgaagtgtagcttgggtaacgggtgggctttaagccaattttggcatgcaaggggttgagtttattaggcatcagcacctctgaaaatcgtggggatgcaggcttaatttcaacactattctaaatacttgaaagatattatataactctttaataaactcctgtgtctacaaatggttcacattaactcaatatccatgattaaacatctataaaatcaaggcactgttatttagtggagacttgctggctattctatgagaggaggtattgttattgtaatctcatcctctcataaaagtgtaycatattactcataaccagcccttcatattctattcctattttggtatttaaaaataagatatctttgaaacacttgaat

SEQ ID NO: 559275 - DNA, 383 bp, Homo sapiens
gtgtagcttgggtaacgggtgggctttaagccaattttggcatgcaaggggttgagtttattaggcatcagcacctctgaaaatcgtggggatgcaggcttaatttcaacactattctaaatacttgaaagatattatataactctttaataaactcctgtgtctacaaatggttcacattaactcaatatccatgattaaacatctataaaatcaaggcactgttatttagtggagacttgctggctattctatgagaggaggtattgttattgtaatctcatcctctcataaaagtgtatcatattactcatarccagcccttcatattctattcctattttggtatttaaaaataagatatctttgaaacacttgaattc

SEQ ID NO: 559276 - DNA, 506 bp, Homo sapiens
attttttaaagatttttcaagatgtaattcttatttatttttgttctatttgacattctctgagtttcctatatctgaagtttgattttctgtcacttcttttagaatatttttggcagttattttgaaaaatatttcttttgctccgttattttttcctcttttctttttgtaatttcagttgtaactagggtaggtaatttcatctcagtcttatgcaggtgctttttctcagggtcccaggaatgtagccttctcacacttctgttcttttcctggctgtgttggtgagctcagtggtattcctccttcaccttcaagagcagttttgtttttcctgttttcatactcccagcatcaggagtattctaagtgtggcagtttttgttgccttcccctacatrttaagtggaatatcttggtctatttggactcttataaaaaaataacatgaactgggtgactaaaaaacaatagatatttcttttttcacacttcttgaggct

SEQ ID NO: 559277 - DNA, 506 bp, Homo sapiens
attttttaaagatttttcaagatgtaattcttatttatttttgttctatttgacattctctgagtttcctatatctgaagtttgattttctgtcacttcttttagaatatttttggcagttattttgaaaaatatttcttttgctccgttattttttcctcttttctttttgtaatttcagttgtaactagggtaggtaatttcatctcagtcttatgcaggtgctttttctcagggtcccaggaatgtagccttctcacacttctgttcttttcctggctgtgttggtgagctcagtggtattcctccttcaccttcaagagcagttttgtttttcctgttttcatactcccagcatcaggagtattctaagtgtggcagtttttgttgccttcccctacatgttaagtggaatatcttggtctatttggacycttataaaaaaataacatgaactgggtgactaaaaaacaatagatatttcttttttcacacttcttgaggct

SEQ ID NO: 559278 - DNA, 506 bp, Homo sapiens
attttttaaagatttttcaagatgtaattcttatttatttttgttctatttgacattctctgagtttcctatatctgaagtttgattttctgtcacttcttttagaatatttttggcagttattttgaaaaatatttcttttgctccgttattttttcctcttttctttttgtaatttcagttgtaactagggtaggtaatttcatctcagtcttatgcaggtgctttttctcagggtcccaggaatgtagccttctcacacttctgttcttttcctggctgtgttggtgagctcagtggtattcctccttcaccttcaagagcagttttgtttttcctgttttcatactcccagcatcaggagtattctaagtgtggcagtttttgttgccttcccctacatgttaagtggaatatcttggtctatttggactcttataamaaaataacatgaactgggtgactaaaaaacaatagatatttcttttttcacacttcttgaggct

SEQ ID NO: 559279 - DNA, 506 bp, Homo sapiens
attttttaaagatttttcaagatgtaattcttatttatttttgttctatttgacattctctgagtttcctatatctgaagtttgattttctgtcacttcttttagaatatttttggcagttattttgaaaaatatttcttttgctccgttattttttcctcttttctttttgtaatttcagttgtaactagggtaggtaatttcatctcagtcttatgcaggtgctttttctcagggtcccaggaatgtagccttctcacacttctgttcttttcctggctgtgttggtgagctcagtggtattcctccttcaccttcaagagcagttttgtttttcctgttttcatactcccagcatcaggagtattctaagtgtggcagtttttgttgccttcccctacatgttaagtggaatatcttggtctatttggactcttataaaaaaataacatraactgggtgactaaaaaacaatagatatttcttttttcacacttcttgaggct

SEQ ID NO: 559280 - DNA, 430 bp, Homo sapiens
ttacatgtgagcagatataaatggcttttccatattctttatacaatttttctcaagtataaatgctttcctgtgcaataaggtgtgaggattggttaaaagtttgccacattcttcatacttggaggatttttctccaatataaattakcttacctacaatcaagcgtgacaaccatttaaagtccttgtcatattcctcacatttctagggcaccaatatggtttatgtttagaaaagtttgaggtgtagtgaaaatcattgtcacatctttcaggtttgtagtttctctttagtataatttgaggatttgttaaaggctctgccacattcatgtttgcagggtttctctccagtataaattatctgatgtgtaataagggttgagaacttgttaaaggctttgtcacattcttcatatttgtagggt

SEQ ID NO: 559281 - DNA, 430 bp, Homo sapiens
ttacatgtgagcagatataaatggcttttccatattctttatacaatttttctcaagtataaatgctttcctgtgcaataaggtgtgaggattggttaaaagtttgccacattcttcatacttggaggatttttctccaatataaattatcttacctacaatcaagcgtgacaaccatttaaagtccttgtcatattcctcacatttctagggcaccaatatggtttatgtttagaaaagtttgaggtgtagtgaaaatcaytgtcacatctttcaggtttgtagtttctctttagtataatttgaggatttgttaaaggctctgccacattcatgtttgcagggtttctctccagtataaattatctgatgtgtaataagggttgagaacttgttaaaggctttgtcacattcttcatatttgtagggt

SEQ ID NO: 559282 - DNA, 534 bp, Homo sapiens
gccagccttctacctcctttccactattttgcccccgccgaagcggcctttgaagcttttcgtcccccggcgccgcggctttttgccaccccgggtttttgccgccgcggctttttgcccccgccgccgtggcttgctgccgccgctgccgcggttttttgtggttttttaccccagctcccactgctttttgcccccaccgcggcggctttttgctggttttcgcccctgccgccgcggctttttgcccccgcctcagcggctttttctcgccgcgacttttttcacccgcaccgaggcttttgcagctttttgccccctgccgycgcggctttttgcctccgccgccgcggcttttcgcccccgtcgccgcggcttttgcggccttttgcctgggccgccgcggcttcttgcccccaccgtcgcggcttcttgccaccgctgctttttacccccgccaccgtggctttttgcccccgctgccgaggttttctgccgccgctgccgcggctttttgtggtttttttgccccag

SEQ ID NO: 559283 - DNA, 534 bp, Homo sapiens
gccagccttctacctcctttccactattttgcccccgccgaagcggcctttgaagcttttcgtcccccggcgccgcggctttttgccaccccgggtttttgccgccgcggctttttgcccccgccgccgtggcttgctgccgccgctgccgcggttttttgtggttttttaccccagctcccactgctttttgcccccaccgcggcggctttttgctggttttcgcccctgccgccgcggctttttgcccccgcctcagcggctttttctcgccgcgacttttttcacccgcaccgaggcttttgcagctttttgccccctgccgtcgcggcttttygcctccgccgccgcggcttttcgcccccgtcgccgcggcttttgcggccttttgcctgggccgccgcggcttcttgcccccaccgtcgcggcttcttgccaccgctgctttttacccccgccaccgtggctttttgcccccgctgccgaggttttctgccgccgctgccgcggctttttgtggtttttttgccccag

SEQ ID NO: 559284 - DNA, 534 bp, Homo sapiens
gccagccttctacctcctttccactattttgcccccgccgaagcggcctttgaagcttttcgtcccccggcgccgcggctttttgccaccccgggtttttgccgccgcggctttttgcccccgccgccgtggcttgctgccgccgctgccgcggttttttgtggttttttaccccagctcccactgctttttgcccccaccgcggcggctttttgctggttttcgcccctgccgccgcggctttttgcccccgcctcagcggctttttctcgccgcgacttttttcacccgcaccgaggcttttgcagctttttgccccctgccgtcgcggctttttgcctccgycgccgcggcttttcgcccccgtcgccgcggcttttgcggccttttgcctgggccgccgcggcttcttgcccccaccgtcgcggcttcttgccaccgctgctttttacccccgccaccgtggctttttgcccccgctgccgaggttttctgccgccgctgccgcggctttttgtggtttttttgccccag

SEQ ID NO: 559285 - DNA, 295 bp, Homo sapiens
agctggctgtttctccaaatgttagttatttggagaaaaaaatgatggtaattttggggtaacaaatacaatatttgatgaaagcaaatttattgagggttagacaaactacaagatactttaggctgcaaagtcaacacgagacttctggcccaaattgtgcagactttgggtccagctgcaaagttcaaaggaggaggccatataagacgattctcacttttagacaccaactgccrgttcaggggtttccccagaacaccctcagtttcaagaatttactagagatactcac

SEQ ID NO: 559286 - DNA, 409 bp, Homo sapiens
attctgtggggccagtgttaccttgatacaaaagttagtccaaatagcatagaaaaataaaactactataatcataaatgcaaaattccttaaaaaaaactaacaaatctagcaacatataaaakaattatacactatgacaaagtgaaatttatactagtaatcccaggttggtttaacagcccaaaatccattaaggtaatacatcttatccatagaataagaaacgagaattgcattatcatctcgatagattcagaaaagacatttaacaaaatccaaatgctttaatgattacaaataaaaataaaaactcaatgaaccaggaatagagaactttctacaccagatacatggcacctgtgaaaagccaacagcaaacattcaacttagtggtgaaagaaaggat

SEQ ID NO: 559287 - DNA, 409 bp, Homo sapiens
attctgtggggccagtgttaccttgatacaaaagttagtccaaatagcatagaaaaataaaactactataatcataaatgcaaaattccttaaaaaaaactaacaaatctagcaacatataaaataattatacactatgacaaagtgaaatttatactagtaatcccaggttggtttaacagcccaaaatccattaaggtaatacatcttatccatagaataagaaacgagaattgcatkatcatctcgatagattcagaaaagacatttaacaaaatccaaatgctttaatgattacaaataaaaataaaaactcaatgaaccaggaatagagaactttctacaccagatacatggcacctgtgaaaagccaacagcaaacattcaacttagtggtgaaagaaaggat

SEQ ID NO: 559288 - DNA, 409 bp, Homo sapiens
attctgtggggccagtgttaccttgatacaaaagttagtccaaatagcatagaaaaataaaactactataatcataaatgcaaaattccttaaaaaaaactaacaaatctagcaacatataaaataattatacactatgacaaagtgaaatttatactagtaatcccaggttggtttaacagcccaaaatccattaaggtaatacatcttatccatagaataagaaacgagaattgcattatcatctcgatagattcagaaaagacatttaacaaaatccaaatgctttaatgattacaaataaaaataaaaactcaatgaaccaggaatagagaactttctacaccagatacatggcacctgtgaaaagccaacagcaaacatkcaacttagtggtgaaagaaaggat

SEQ ID NO: 559289 - DNA, 504 bp, Homo sapiens
ttaataatttgaatgcagatcaccaatataaagatattccacaggccgtgtgcagtggctcatgcctgtaatcacacaacttcgggaggccaaggtgggtggatcatgaggtcaggagttcgagaccaacctggccaacatggtgaaactctgtctctactaaaaagatacaaaaaaaaaaaaaattagccaggagtggtctcatgtgcctgtaatcctagctactcgggatgctgaggcaggagaatcgcttgaacccaggaggaggaggttccagtgagctgagattgcgccactacactgcagcctgggtgacaggacgagactccatctcaaaaaaaaaaagatattccataatttcactctatactcaatatttaacaataattaacataaatcaaatagaaaattgaaatgtatcttataaaataatggatttgaatatcctaatgtagtctataagaastgcaagggcactcaattagctgttgtagttaagaattc

SEQ ID NO: 559290 - DNA, 575 bp, Homo sapiens
cttcaaagcttcgaaggccaggctgactctcttgtgaggggctaatacagctggtaattttaagttgaagccaattatcatttgcaattccaaaaatcctagggccttcaagaattatgctaagtctactctccctttgctatataaatggaataacaaagcatggatgacagcwcatccatttctaaaaaacaattttacttcaagttctgggatacatgtgcagaatatgcaggtttgttacataggtatacatgtgtcatggtggtttgctgcacctatcaacccgtcatctaggttttaagccccacatgcattaggtatttgccctaatggtctccgtccccttgccccccagcccccgacaggccccagtgtgtgatgctcccctccctgtgtccatgtgatttcattgttcaactctcacttatgagtgagaacatgcagtgtttggttttctgctcctgtgtcagtttgctgataatgatgggttccagcttcatccatgtccctgcaaaggacatgagctcattctttttatggctgcatagtattccacggtgtatatgtgtcac

SEQ ID NO: 559291 - DNA, 575 bp, Homo sapiens
cttcaaagcttcgaaggccaggctgactctcttgtgaggggctaatacagctggtaattttaagttgaagccaattatcatttgcaattccaaaaatcctagggccttcaagaattatgctaagtctactctccctttgctatataaatggaataacaaagcatggatgacagcacatccatttctaaaaaacaattttacttcaagttctgggatacatgtgcagaatatgcaggtttgttacataggtatacatgtgtcatggtggtttgctgcacctatcaacccgtcatctaggttttaagccccacatgcrttaggtatttgccctaatggtctccgtccccttgccccccagcccccgacaggccccagtgtgtgatgctcccctccctgtgtccatgtgatttcattgttcaactctcacttatgagtgagaacatgcagtgtttggttttctgctcctgtgtcagtttgctgataatgatgggttccagcttcatccatgtccctgcaaaggacatgagctcattctttttatggctgcatagtattccacggtgtatatgtgtcac

SEQ ID NO: 559292 - DNA, 575 bp, Homo sapiens
cttcaaagcttcgaaggccaggctgactctcttgtgaggggctaatacagctggtaattttaagttgaagccaattatcatttgcaattccaaaaatcctagggccttcaagaattatgctaagtctactctccctttgctatataaatggaataacaaagcatggatgacagcacatccatttctaaaaaacaattttacttcaagttctgggatacatgtgcagaatatgcaggtttgttacataggtatacatgtgtcatggtggtttgctgcacctatcaacccgtcatctaggttttaagccccacatgcattaggtatttgccctaatggtctccrtccccttgccccccagcccccgacaggccccagtgtgtgatgctcccctccctgtgtccatgtgatttcattgttcaactctcacttatgagtgagaacatgcagtgtttggttttctgctcctgtgtcagtttgctgataatgatgggttccagcttcatccatgtccctgcaaaggacatgagctcattctttttatggctgcatagtattccacggtgtatatgtgtcac

SEQ ID NO: 559293 - DNA, 575 bp, Homo sapiens
cttcaaagcttcgaaggccaggctgactctcttgtgaggggctaatacagctggtaattttaagttgaagccaattatcatttgcaattccaaaaatcctagggccttcaagaattatgctaagtctactctccctttgctatataaatggaataacaaagcatggatgacagcacatccatttctaaaaaacaattttacttcaagttctgggatacatgtgcagaatatgcaggtttgttacataggtatacatgtgtcatggtggtttgctgcacctatcaacccgtcatctaggttttaagccccacatgcattaggtatttgccctaatggtctccgtccccttgccccccagcccccgacaggccccagtgtgtgatgctcccctccctgtgtccatgtgatytcattgttcaactctcacttatgagtgagaacatgcagtgtttggttttctgctcctgtgtcagtttgctgataatgatgggttccagcttcatccatgtccctgcaaaggacatgagctcattctttttatggctgcatagtattccacggtgtatatgtgtcac

SEQ ID NO: 559294 - DNA, 427 bp, Homo sapiens
ttctagtgagccgagatcacgtcattgcactccagcctgggcgacaagagtgaaactgtctccaaaaaaaaaaagtaatagcctgaaaagaggagtagaagaggccattataatttaaaagcccattgctactagatgattttasttggcttggcttatgtatcttcatcgctgtcctgtagggcagtggctttcaggaataccaggacttcagcagcacctgatgtggtgttcaattttgggtgtcaattggactgggccattatgcccacttgtttactcaaacaccagtctagatgttgctatggagttattttttagatgtcattgatattttaaatcagtagacttcgagtaaagcagattactctccataattctggtgggcctgatccaatcagctgaaagctttaggagaaaagattga

SEQ ID NO: 559295 - DNA, 453 bp, Homo sapiens
actgttttccatagaggttgaaataatttatattcccaccagcaatgtataagcattcccttttctccatatccacatcaacatctgtagcttttagactttttaataatagccattctgactagcataagatatctcattgtggttttaatttgtgtttctctgacaattattgatgttgagaattttttcatgtttttttttcttttgctgcttatatttcctcttttgaaaaatatcagttcatgttctttgcccagtttttaatgtttttcttttttcttgttgagttgtttgagttccttgtagattctggatatattagtcctttgtcagaagcataatttgcaaatattttcttccattctgttggttggttgtttactcagttgattmttttcttttgctgtgcagactctttttattttaattaagtcccatactgctaaaaat

SEQ ID NO: 559296 - DNA, 617 bp, Homo sapiens
gacactgggtgattttctggcaagggagtgagagacaacttccttcttctgtttcaaacctaatttatctccaggtggagtcagggctttctacttaatgataggagtgaaaaggcagaaaaaatgacaaaatcagggcgagggtgaatgttcccatcaaagcagaaatgatgtaaaccttttgtattttcccagagaagcgggggctgtagatagcagcgactgtgctccttaaataaaagaagggtcagcgacttctgagaaatgggaaaatggagtgcctgggggtgcccaggaagaactgaaaagactgtatgttggcttccatccgaggctgatctrtgggcttcgggaccagacaagtgtgagttagaatcccatttctgtgactcaccggttgagtgaaattaggcaagttccttatcctctctgagccatagttttctcatttgtaaaataaggacaatcccaagtgactaaattattttaccataatcatatggattagttttaatccatatgaatatagttaaaattatatgaatatataatcttaatccatgaacattttatctctctgtgtgtgtgtgtgtgtgtgtgtgtgtgtgtgtgtgtgt

SEQ ID NO: 559297 - DNA, 540 bp, Homo sapiens
  misc_feature 429: n = A,T,C or G
ttaataattaaatcaagcatttaaatcaagcactaatgtttattgatttttaaaacttattaaatktttacatttaataatagcagtgacataatgcattgacaaatgttaaagatcaggatagaaaacaatctgtaaacatgaaggcactagtacgcagtaatcccgtgggtgaccaaccccaccagaaattacattactgcacaaagaagtggacactgacaagctaaatggcactctgaatctgtctctaatgacagacaaatacagaaatttccgaccctaaaccatgctttacaggttgtgaatatgttcttatgagatgaagacattagagacaaaaagaaaaagaaaaaaaccaagatgatggaacaattctggaagatggtttgcagtggccagtactaaagagctgctctgctttctcanaggtttaagaatctaagaatgcccggtgtgtgatgttccccttcctgtgtccatgtgttctcattgttcaattcccacctatcagtgagaatatgcggtgtttggtttttt

SEQ ID NO: 559298 - DNA, 593 bp, Homo sapiens
ttggctgtgtccccacccaaatttcatcttgaattgtaactcccacaattcccatgtgttgtgggaggaacccggtgggaggtgattgaatcatggggacaaggtctttcctgsactgttctcatgatagtgaatgagtctcatgagatctgatggttttaaaaaggggagacttccttcataagctctcttctcttgtctgctgccatgtgagacgtgcctttcacctgccatgattgggatgcctccccggccacttggaattataagtccagtaaacctctttcttttggaaattgcccaatctcaggtatgtctttatcagcagtgcaaaaacagactaacacgatacctgtttgttgaatgaatgcatgaaggaatggatgaaaagtcacatttgtctaccctcagaggatggcttgcttgagagagacccccctcaaaatcatggcctttcccaagcagaaaaggcaataggtatgttggtctgtattgttagaagttagtactacttctagcaaaatagtattgctacactgccttctttttttgagacagattcttactctgtcacccaggctggagtgcaatgg

SEQ ID NO: 559299 - DNA, 593 bp, Homo sapiens
ttggctgtgtccccacccaaatttcatcttgaattgtaactcccacaattcccatgtgttgtgggaggaacccggtgggaggtgattgaatcatggggacaaggtctttcctgcactgttctcatgatagtgaatgagtctcatgagatctgatggttttaaaaaggggagacttccttcataagctctcttctcttgtctgctgccatgtgagacgtgcctttcacctgccatgattgggatgcctccccggccacttggaattataagtccagtaaacctctttcttttggaaattgcccaatctcaggtatgtctttatcagcagygcaaaaacagactaacacgatacctgtttgttgaatgaatgcatgaaggaatggatgaaaagtcacatttgtctaccctcagaggatggcttgcttgagagagacccccctcaaaatcatggcctttcccaagcagaaaaggcaataggtatgttggtctgtattgttagaagttagtactacttctagcaaaatagtattgctacactgccttctttttttgagacagattcttactctgtcacccaggctggagtgcaatgg

SEQ ID NO: 559300 - DNA, 593 bp, Homo sapiens
ttggctgtgtccccacccaaatttcatcttgaattgtaactcccacaattcccatgtgttgtgggaggaacccggtgggaggtgattgaatcatggggacaaggtctttcctgcactgttctcatgatagtgaatgagtctcatgagatctgatggttttaaaaaggggagacttccttcataagctctcttctcttgtctgctgccatgtgagacgtgcctttcacctgccatgattgggatgcctccccggccacttggaattataagtccagtaaacctctttcttttggaaattgcccaatctcaggtatgtctttatcagcagtgcaaaaacagactaayacgatacctgtttgttgaatgaatgcatgaaggaatggatgaaaagtcacatttgtctaccctcagaggatggcttgcttgagagagacccccctcaaaatcatggcctttcccaagcagaaaaggcaataggtatgttggtctgtattgttagaagttagtactacttctagcaaaatagtattgctacactgccttctttttttgagacagattcttactctgtcacccaggctggagtgcaatgg

SEQ ID NO: 559301 - DNA, 567 bp, Homo sapiens
tcagtgcattggcttttctgggcagtgggcaagaagaacccatcaggctgcaacaatagtctgcatcattaagcttgagtaacacatgatgcctttgcgctttatttatttttagaagtttacttcatggtattgcatggtgtttaaaagatgactttggtattaaaatttggtgttataaatcattgtgtccttgtgatgatgcaggtaaaaaaaattgcattcatatagtagttacagttyggaaaaggccttctcttatattttctcattagggttttaccatgaccttatcagatagacagggcaggcatgttatccttgagagaacaaagtatggcacatacgaattttgccaagaccaaataattcctaaactattgtctgctatgcttcctaaaagtcacttcaattatgtgggtacagtctcaagataaagacgaagaaccggaaagaggtaagcaacctccttatgacacatcctcacacctccatgtccttaggtttgaagcagacaccccaagaatgcttctgtttgaatggcaaatgttttcataggtagtgaag

SEQ ID NO: 559302 - DNA, 567 bp, Homo sapiens
tcagtgcattggcttttctgggcagtgggcaagaagaacccatcaggctgcaacaatagtctgcatcattaagcttgagtaacacatgatgcctttgcgctttatttatttttagaagtttacttcatggtattgcatggtgtttaaaagatgactttggtattaaaatttggtgttataaatcattgtgtccttgtgatgatgcaggtaaaaaaaattgcattcatatagtagttacagttcggaaaaggccttctcttatattttctcattagggttttaccatgaccttatcagatagacagggcaggcatgttatccttgagagaacaaagtatggcacatacgaattttgccaagaccaaataattcctaaactattgtctgctatgcttcctaaaagtcacttcaattatgtgggtacagtctcaagataaagacgaagwaccggaaagaggtaagcaacctccttatgacacatcctcacacctccatgtccttaggtttgaagcagacaccccaagaatgcttctgtttgaatggcaaatgttttcataggtagtgaag

SEQ ID NO: 559303 - DNA, 606 bp, Homo sapiens
gtggaagaaacctgaaggatcatttaaactctttgaagcttttatagatgaagaaagctcagaggagtgttatagcctgcccaatatcatatatgtactccctagttcaccaggactgaaaactaggtgctttgaccttgaattccttgtttcttctactacactaaggggctaagttaattatcaaaaatattatatctgaaaatgatgcaaaattttaagaatgactaaaattcaagcaaygctaaatttttcttcatctggcaaaacgaacagtggtctgaaataaaaattctgatacatttaaattaaatagtagagggattttatttttgaaatattctagtataattttgaattttagactaaaagagtgaactttattataattttcaaaactcttttttagtcttcttaaaattgcacaactgggaacagtaaggcaaaatagtttatgtaggctgaattcttcttaccatgatagataacttggggctttaaaagatgattgcttaatttataaatgctcttcacaacatacagtactgtcataagatgaattctgcttaaacaaccatattttatagtgtcttatgtcaccacttc

SEQ ID NO: 559304 - DNA, 606 bp, Homo sapiens
gtggaagaaacctgaaggatcatttaaactctttgaagcttttatagatgaagaaagctcagaggagtgttatagcctgcccaatatcatatatgtactccctagttcaccaggactgaaaactaggtgctttgaccttgaattccttgtttcttctactacactaaggggctaagttaattatcaaaaatattatatctgaaaatgatgcaaaattttaagaatgactaaaattcaagcaacgctaaatttttcttcatctggcaaaaygaacagtggtctgaaataaaaattctgatacatttaaattaaatagtagagggattttatttttgaaatattctagtataattttgaattttagactaaaagagtgaactttattataattttcaaaactcttttttagtcttcttaaaattgcacaactgggaacagtaaggcaaaatagtttatgtaggctgaattcttcttaccatgatagataacttggggctttaaaagatgattgcttaatttataaatgctcttcacaacatacagtactgtcataagatgaattctgcttaaacaaccatattttatagtgtcttatgtcaccacttc

SEQ ID NO: 559305 - DNA, 606 bp, Homo sapiens
gtggaagaaacctgaaggatcatttaaactctttgaagcttttatagatgaagaaagctcagaggagtgttatagcctgcccaatatcatatatgtactccctagttcaccaggactgaaaactaggtgctttgaccttgaattccttgtttcttctactacactaaggggctaagttaattatcaaaaatattatatctgaaaatgatgcaaaattttaagaatgactaaaattcaagcaacgctaaatttttcttcatctggcaaaacgaacagtggtctgaaataaaaattctgatacatttaaattaaatagtagagggattttatttttgaaatattctagyataattttgaattttagactaaaagagtgaactttattataattttcaaaactcttttttagtcttcttaaaattgcacaactgggaacagtaaggcaaaatagtttatgtaggctgaattcttcttaccatgatagataacttggggctttaaaagatgattgcttaatttataaatgctcttcacaacatacagtactgtcataagatgaattctgcttaaacaaccatattttatagtgtcttatgtcaccacttc

SEQ ID NO: 559306 - DNA, 438 bp, Homo sapiens
tgcatttaaaattgaaatgcaggtctggcgtgatggctcacccctgtaatcctggcactttgggaggccgaggtgggcagatcacttgaggttaggagttcaataccagcctggccaatatggcaaaagcctgtctctactaaaaatacaaaaattagctggtgtggtgacacacacctgtggtcccakctactgaggaggctgaggcaggagaatcacttgaaccggagaggcagaggttacagtgagccaagatcgtgccactgcactccagcctgggcaatagagtgagactgtgtctcaaaaaaaataaaataaaataaataaataaataaataaataaaaatataattgaaatacataatctgattattcataatgataaaaataaacctatattaatatttcaaatgctccagaaacaatgaaattttcagc

SEQ ID NO: 559307 - DNA, 438 bp, Homo sapiens
tgcatttaaaattgaaatgcaggtctggcgtgatggctcacccctgtaatcctggcactttgggaggccgaggtgggcagatcacttgaggttaggagttcaataccagcctggccaatatggcaaaagcctgtctctactaaaaatacaaaaattagctggtgtggtgacacacacctgtggtcccagctactgaggaggctgaggcaggagaatcacttgaaccggagaggcagaggttacagtgagccaagatcgtgccactgcactccakcctgggcaatagagtgagactgtgtctcaaaaaaaataaaataaaataaataaataaataaataaataaaaatataattgaaatacataatctgattattcataatgataaaaataaacctatattaatatttcaaatgctccagaaacaatgaaattttcagc

SEQ ID NO: 559308 - DNA, 469 bp, Homo sapiens
tatataaactgtttttattgcatgaaaaaaataggcagcacaaaactgtgatttctgagagaaagaaaacaatatataccctttattgtgccagcatacttactgaaagtgatttccagcctccagcatggtatgagacaatcygagagagaatatcatgatttgctgaatttaagagcaagatatcaaagtttatggaggccaaggtgactagaatcatcaaggcagactgacagagagaagagggctgcacagagagagaactgtggagatttacatagaggttctctggagtccttgagtgagaactgaactgtgcctacataaaggaaaactccatgagatagaaaaatgagtcttcattagcagtgggccagagaaattcctggaggtcatgtgggccttagaagaacccgtatgtgctccagccagagtgagaaacttataatatccgatagagttctcagaa

SEQ ID NO: 559309 - DNA, 469 bp, Homo sapiens
tatataaactgtttttattgcatgaaaaaaataggcagcacaaaactgtgatttctgagagaaagaaaacaatatataccctttattgtgccagcatacttactgaaagtgatttccagcctccagcatggtatgagacaatctgagagagaatatcatgatttgctgaatttaagagcaagatatcaaagtttatgkaggccaaggtgactagaatcatcaaggcagactgacagagagaagagggctgcacagagagagaactgtggagatttacatagaggttctctggagtccttgagtgagaactgaactgtgcctacataaaggaaaactccatgagatagaaaaatgagtcttcattagcagtgggccagagaaattcctggaggtcatgtgggccttagaagaacccgtatgtgctccagccagagtgagaaacttataatatccgatagagttctcagaa

SEQ ID NO: 559310 - DNA, 469 bp, Homo sapiens
tatataaactgtttttattgcatgaaaaaaataggcagcacaaaactgtgatttctgagagaaagaaaacaatatataccctttattgtgccagcatacttactgaaagtgatttccagcctccagcatggtatgagacaatctgagagagaatatcatgatttgctgaatttaagagcaagatatcaaagtttatggaggccaaggtgactagaatcatcaaggcagactgacagagagaagagggctgcacagagagagaactgtggagatttacatagaggttctctggagtccttgagtgagaactgaactgtgcctacataaaggaaaactccatgagatagaaaaatgagtcttcattagcartgggccagagaaattcctggaggtcatgtgggccttagaagaacccgtatgtgctccagccagagtgagaaacttataatatccgatagagttctcagaa

SEQ ID NO: 559311 - DNA, 469 bp, Homo sapiens
tatataaactgtttttattgcatgaaaaaaataggcagcacaaaactgtgatttctgagagaaagaaaacaatatataccctttattgtgccagcatacttactgaaagtgatttccagcctccagcatggtatgagacaatctgagagagaatatcatgatttgctgaatttaagagcaagatatcaaagtttatggaggccaaggtgactagaatcatcaaggcagactgacagagagaagagggctgcacagagagagaactgtggagatttacatagaggttctctggagtccttgagtgagaactgaactgtgcctacataaaggaaaactccatgagatagaaaaatgagtcttcattagcagtgggccagagaaattcctggaggtcatrtgggccttagaagaacccgtatgtgctccagccagagtgagaaacttataatatccgatagagttctcagaa

SEQ ID NO: 559312 - DNA, 570 bp, Homo sapiens
ccgggcttttccttaccaagagactttttattatagctttaattttgctacttgttattggtctgttcagaatttttatttctttctggttcaatcttggtagattgtatttgtctaggaatttgtctatttcttctagatattccaatttatttgcatgtagttgctcatagtaggcactaatgatcctttgaaattctgcaatatcagttgtaatgtctcctttttcattcctgattttattatttggatattttgtctttttttcttagcctggttaaagatttgtcaagtttgtttaacatgtaaaaacacccwactttttgtttcattgattctttgtatttttttattttaatttcatttatttttgctctactctttattatttctacttttctcttaattttttgtttggtttgctcttgctttcctagttctttagggtgcattgtaggattctttatttgaagttattctccttttctgaggtaggcacttattgctataaacttccatctgagtgctgcttttgctgtatcccataggttttggtatgttgtttttccg

SEQ ID NO: 559313 - DNA, 553 bp, Homo sapiens
cacatatcacttactctaaaattgaacacatagtaggaagtaaaatatgcttcagaaaaagcaaaggaactgaaataataacaaacagtctctcagaccacagcacaatcaaattataactcaagattaagaaattcacccaaaaccacatgacaacatggaaasagaacaacctgctcctgaatgacccttgggtaaataatgacattaaggcagaaatcaagaagttatttgaaactaatgataacaataatacaacatacctgtattagtcagggttctctagaggggcagagctaataggattaatgtatatataaaggtgagtttattaaggaacattgactcacatgatcacaaggtgaggtcccacaataggctgtctgtaagctgagaatcaaggaagccagtctgagtcccaaaggtgaagaactttgagtctcatgttcgaagacaggaagcatccacacaggagaaagatgaaggccagaagattaaaccagtctagtcttttcatgttattctgcctgcttttattctggccacactgaca

SEQ ID NO: 559314 - DNA, 570 bp, Homo sapiens
tgctggcaatctttagcatcttggcttttgctgtatcaccctgatctctgccttcaccttcacatggtgttctccctgtgtttatgtgcctgtgtccaagtcttccttttccaggacatcagttatgttggactagagacccaccctactacagtatgatttcatcttaactaattgcatctgcaacgactattttcaaataaggtcacattctgaagtaatgggagttaggacttcagcatacaaattttaagagggatacaattcaacccccagcacatacattggattctcattttttaaaattaatggcctctgtacaatgaatgtttatttcaatctagtaactcaggaaaaaggcctctttcaatgtcagtattagcaataggtagcataamataaccagtgtactctgtttggcatcctttgctaagatttttctcctcaagccaatatcttgtgtctggtggatttgggaggcagaagggatacaatatctcatcttcttttgtaccaaagcgtattcatatttctgcttgttttattctatatttttcatgctctttgaca

SEQ ID NO: 559315 - DNA, 559 bp, Homo sapiens
tacaaaaattagccagatgtggtggcaggcacctgtaatcccagctactcaaaagctgaagcaggaaaattaattgaatccaggaggcagaggttgcagtgagctgagatttcgccactgcactccagcctgggcaacagagtgagactccatctcaaaaaaaaaaaaaaaaaaaaaaaaaaaagaactaccatatgatccatatgatccagcaattccactactgcactactgcacatatataaaaggaaatcaacatatcaaagggatatttgcactctcatgtttattgtaatactttcatgtttattgtagcacaatagccaaaatagggaaatcaagctaaatgctcatcaatggatggataaatggataaagaaaatgtggtatacctacacaatggaatattattmagccattaaaaagaaagaaagctggtcatttgcagcaacatggatggaactggacgtcattatgttaaatgaaataagccaagtacagaaagacaaatatctcatgttttcactcatttgtgggaattaaaccatgaatctcgtta

SEQ ID NO: 559316 - DNA, 605 bp, Homo sapiens
ccatggctacacgccagctgccagtgtagagttagtagttacaacagagatcatatggcctgcaaaatagaaaatagttacatttggtcttttacagaaaaagtttgccaatccctggtctagagcaaaagaatgtgtgtgaggcccaggctgcagctgtgtgccttcttgggacacacagagaaatcctctcccttccccagcctaggggaacacactgttccccgaggaagggtgactattagaatatcctcccatctcgtcaccatcaacacaggctgtgccctcctggagcactcttctttctcgcagggacccctccagytctcttccttgctggatttcagaaagaataggagaatcaatgaaaacgcgttgcttttcatactctgaatctttgtgtaaagatccactccctcagagagaaagtgctctaagatccactcctggatttagaaaattagtcttaataaaatgaatacccaggaaaatattctaatgataatctgtgaaaataaaacttcagtgcttcagttgatttctccagaaactccgtttaaatctgtgtaacttttcttcatgcatctaagaaaaattgcaattaa

SEQ ID NO: 559317 - DNA, 377 bp, Homo sapiens
gttgtatttatttcaagtacataaactggaaagtatttgaaataaggaagctaagagtaatccagagttgtacattgggtttttttaaggtggaaaaggaatttttctccaaatcttgtttaatacgttcttttgctagttaaagctttttctcctcacatagttcaaggaaacaagcctaacttaggactcactcttaaatttggaatgaatgtagtcaaactaatgagattgctaatactgccatcttttastaatttactctcctaggtgatcctcttgcttgcctctatcttgacatttttcaaacacaatcttaaataaaaatccaaggaattatgttaaaatgcagatttcctaggctgtatccccagata

SEQ ID NO: 559318 - DNA, 539 bp, Homo sapiens
ttataaggttttgtgtgttaaacatatatttcaatacacctacctctaggtgaaatgtgacatatacccagttacttctccctgtgatactacgattcctaaattcttttggaaaacggcacgcattccatttgccaaacaagttattggaccatgcctccattcatgcttgggaaatgtattcctcccacagcaaagaacagcaaattttttttctctctctctttttctctttctctttcacacacacacacacacacacacacwctctctctctctctctctcattcacatacagtatagtgcaggccactcacttcgtcacaaactgtgtttctcccttcttcacttgaaattttttactccctcaccaaggtacccaagcaacgttccaaacatggcattagcctcaaagttcaatgactctatagttctatggaatgcctacaaatatttttaaaatgtaatcacttatagaaagattcaacaggctattttttcccttcaaataaatttagaatacacacacacacacaaaa

SEQ ID NO: 559319 - DNA, 635 bp, Homo sapiens
gctgcagtcaaacccctatctaaagggtggggctgtgacctccgtgaacctgagtaagctagagggtggcatggcttataacatgggcaactgccactataagcgccagctcagactttgctgtggcaccagatgtggacctgaaagcttttgagcagcagctgcagggctggtgccagacagctggagacagggtcacattttcgagtttgctcagaagcrgatgcagctctgagtgacacctactaatgactcagacctctggtgggcagcttttagccaggtctgcaagggcatgaacctcacactctggctgccactgacagctgtttcttctgtgccgtagggcttctcacccatgagccacacacctgtgctgctgcatgaccacgacgagtggctacatgaggctgcgttcctcctgggttgacacatattcacacctgctgcctgccctggccagcatgcccacactgcctggcgagagcggagccccagaactccccagcctctgcccctggagcttccattccaactagtgccaaggacctcttcttcccccttccaaataataaagttggtgtttgggcgggggatgggggcgggaagaaggtggtcttctagttacaacccag

SEQ ID NO: 559320 - DNA, 573 bp, Homo sapiens
tactcaataggtccttgctcaacccatacctcccaccctccgcactctagcagtctacagattctgttgttccaatctttgtgtccgggtgtgctcaaagtttatctcccacttataagtgagatcatccaatatttggctgtccattcctgtgttaatttgcttagggtgattgcctccagctacatccatgttgctgcaaaaaacatgtttttttttcccttttatggctgcatagtattccatgatgtatacgtaccacattttttttctaatccactgttgatgggcaccttagttgattccctatctttgctcttgtgaatagtgctgcartgaacatatgcgtgcctgtgtctttacaatagaatcgtttatattctttcagctatatacccattaatgggattctgagtggaatggtagttctgcttctaacttctttgagaaatctccaaactgctttccacagcggctgaactaatttacattcctgccaacagtgtatgagcattccctttttttctgcagcctcaagagcaggttattttttgactttttagtaatagccat

SEQ ID NO: 559321 - DNA, 467 bp, Homo sapiens
ctatttggggtttaattttgtatggtttagtactgacttttaaaaaattttgtttgattatatctaatgtcacagatgtagttatttctaatgttaccgatttaaataaacttaagtagaggactcatagactcacgtattctgttcaaaattttaagtaaattccattatgttgtaatgaggaaatgaaatatttaatatatcatgtcttaaacaccgtttttggtgtcttaaatatcatgaatgccatcatcatacctgaatagaatttagataaattcagcacatattctacactgtcttttctactttctgtcgttttcataaactttgaattttaaaaacatatagggaattccatggaagaggaattagtaattctttytaaaataaaggcttagagttctcagtagactactatactatacaaatgtcttgcattaaccaagtgtcagtagaataatgca

SEQ ID NO: 559322 - DNA, 289 bp, Homo sapiens
aaatgtggtgtgtgcatacacacacacacacacacacacaatggaataccattcagccacaaaaaagrataaaattatgtcttttgcagcaacagggatgcaatggtaggctgttatcttaagtgaaacaactcacacacagaaagtcaaatactacatgttctcacttctaagtgggagctgaataatgcacacacatggatgtagagagtaaaataagagacactggaaagttggaagggtgggagggtgggaggaggtaggggaatgagaaattacttaatgggta

SEQ ID NO: 559323 - DNA, 594 bp, Homo sapiens
gctttcaggccttagttgatctacaagggcaggaaggttggggataagattggctcagggaggatgaaatggcaaaggaaatctagagcactggagctaacgagagggccatgttcctttctgaaatggaacgtatttggggttttccacatcatgatcaagattggcatagatccttctctgagggagaacacaaacttccaaggatactggtgtttaagaataagtctctgcctacattgtagcagttaggttttgcrtagggaaacagaaccactgtgagtgttatagaataagagatttactttaaacattatatggtgttcaaacataggagcctggttaaaaatctatggaaggtagactatttccctgctggtggcataaagagcctcagagatcatcttcacagtagaaataaagcataactggtaaaaattataaaaatataactttttaaagtatttggacattgtcttaagggcatataacaaatgaagaaatatttattgaaggaaatacactaaatatcaaaaaagaacactgagagtctgtggcattgagccatgacctattctctccctttgtctccca

SEQ ID NO: 559324 - DNA, 508 bp, Homo sapiens
gttctggttttagccctttgaggaattgccacactgctttccacaatggttggaccaatttacacttccaccaacagtgtgtaagcatttccttttctctgcaacctcctcagcatctgttattttttgactttttaataatagccattttgcctagtgtgagatggtatctcactgtggttttttttctttacttcaataggtttttgggggacaagtagtgtttggttacataactaagtttctttagtggtgatttctgagattttggtgcatccattacccgagcagtgtacactgtatccaawgtgtagtcttttatccctcaccccctcccaccttgtcccccaagtccccaaagtctgttgtatcattcttacgtgtttgcaacctcatagcttagcttccacttatgattgagaatatctgatgtttggttttccattcctgagttactgcacttaaaataatggtttccagtttcatccaggttgctgtgaatgccatt

SEQ ID NO: 559325 - DNA, 325 bp, Homo sapiens
gcctcccctctcctcaccccctccccttgttttctgccttatttttcttcatgtcatttatcactttctatgatttttttaagttttagatatttatgacgtttgttgtttcttaaaccccctaaaatgtatgatccaagcatgcagagactgctgtttgctctgtttcctgctgcaatgctcacacctagagcaagctcacygcgaatctctttggttcaagactcagtgacttgaataaattcttttcgattttatatcttgatctggtctggtcatccatatcttttcatgcaaaagtaaacacttctataattaatgtcat

SEQ ID NO: 559326 - DNA, 581 bp, Homo sapiens
gcatgttgactcacgcctgtaatcccagagctttgggaggctgaggcgggtggatcatctaaggtcaggagttcgagaccagcctggccaacatggtgaaaccctgtctctactaaaaatacagaaattagctgggcatggtggcacacgcctgtgatctcagctactcgggaggctgaggcaggagaattgcttgaacccaggaggcagaggttgcagtgagccaagatcgcgccattgcactccagcccgggcaacagagactcmgtctcaaaaaaaaaaaaaaaagaaagaaagaaaaagaaaaaagaaaacttgcagagtgtctcgatgctatggaattccgggcttaaagaacagactttgttttgttttgaggctacatagctttatccttaacagctcagatttagactttgaagtcagactgcctgggttcggatttcagttctacagctttgtagcagcctagactttcgcaagttaaatactatgtgcctcagtttcttcatctgtgaaatgagaaaaatatcaatacctgtctcatggggttaccctgagtagattaatatctagtctga

SEQ ID NO: 559327 - DNA, 529 bp, Homo sapiens
gactatataccaagatgtgtctgtttgcttttggtgtttatacccattctgaagtgtaaagcccactgcaaattgaaaaacatggcttcatcgttctagataggattcttccagtaataaagactaaatgctcttttctttaatcctgttagccaggttgcatttcagattgtttttcggatttgtgttgttgtttttgttgttgttactgtcgttgttgaaatgacggctgtcgtgtactatttcttccttctttgcttgcaatgtactttatttgtatcaataaacaagactttwtgtttctgttaaagtgaatagatcaaattaatcttattgtcccaaatttttaaacttttttatatcttaatttcattatatatcatgcattcctttaatgatgtaagttctatatcaattcattagaaatatatgaacaagacaaaacctatggtcttacaccagtaaactctcaaaaagttaatataaatatgttttacatatatatctattcaatttttgtgtgctgatt

SEQ ID NO: 559328 - DNA, 348 bp, Homo sapiens
cagccacctgactagctgggattacagacatgcgccaccacaagactttttattttttatcttcttagagaacatatgtaatatcagttacctggggaggggaggtgactagttagttcagagttagaataaaatagattttgcccrttgtattagtcggttttcacactgctgataagacatacccaagactgggcagtttagaaaagaaagaggtttattgggtttacagttccacgtggctggggaggcctcacaatcatggcagaaggtgaaaggcatgtttcacatggcggcagacaagagaagagagcttgtgcagggagactcccatttttaaaaccatca

SEQ ID NO: 559329 - DNA, 468 bp, Homo sapiens
aagtgattctcctgtctcagcctcccaagtagttgaggttataggtacccgccacacaaaataaaaaatatataataatattagatatctttaaaaagaagaascctaatattcaaaattaaactagatcatactgttcatgaaataaaaaatattattgagaaaataaattatgtattttattcaatttaatttacatatttataataggtaattggaggaatactaagagatttatatattctaatggtatgtatatttttgaaagtaattcatcactatttttatacctttctcttaggtcactaaaattcctgagttctctgtgatatgatacctacaacttgttatatttcacaaaaggggagtttttgcttgataaaatttaattcctagaatatgtttatagaaaaatatgagcagatcactcaggagactgaggcaggagaattgcttgaacctgggagg

SEQ ID NO: 559330 - DNA, 511 bp, Homo sapiens
gaaagttttatattgtgctacacctagttttgattatttttttcttaatgaaaattggcttaaaatgttcctttaaaaaaacaaaaactacatgcactatttgaaaatccatcaaggatatactttcttagggccagcaggtaacttacagactctttcttttgcttcccctttatttaggtttatctagtgatgaacacagtaygtgattattataaatatactatgttgtttctttttaggttcctatccttagtaaaaaagaggatgtttttgcatatttagctaaatattctgtgccaatggttcgagcaacgtggctgatcaagatgacttgtgcctattattctgctatatctgaagctaaaattaagaaacgtcaggctcctgatccgaatttgggtaagtgagagaatacaatacaccttacatttcattattgattttgcaagtaattgttgcctgtaccctctggatacagcccagcatggtgagtgttgagaaggtccgt

SEQ ID NO: 559331 - DNA, 595 bp, Homo sapiens
ctctagatttttttggtactgcagatggcaaagggggaaggaggtatagggtagaagaaaagtaaatgaaataaatatwttttttttaagacaggaagcaaacacagaaagcaagtgcatgtttttgttgttgttgttgttgttttgtttgtttgttttagctgtgagaaattttggccagattagaaaggctttgttacccgtaatttggaattctcactcagattggaccaagtctggaagagtaggtcaaatctgatgggaaagcaaccagaacaaacaacaacaacaacaaaaccccaacaatatgatcactgagcactctaatggtaaaggagaaattcagaccagctggttgttaaactttagccaagacaaaaacccaactcagctacttacctagggatgggtctcaggctgaagactgctttttgtcatcctaaaagcaggaaaaaactcgaattcatcttccctgctgggagtgagctcaagctccctgaaggagttgtctgccttctatcgtcatggaaagaggaaatcttgccttccttgttggaagcaaataaaactccaaaaaaaaggtgggggggagttg

SEQ ID NO: 559332 - DNA, 613 bp, Homo sapiens
gatctcatcaccagacagggtgaaggacactggactttgacttttggactcacatagccaatggcttgcttggcgtcttcacaaagatatctaacaagcatctcaaccctaacagaactctcggttccttccctctcatccccaacatacgcccccactaatgttccccatttcaataaaataaatggttttggcttaagccaaaagcctagactcctcctcgattcctctctttctcacatctccacagccaacctatcggcaagaccttctggctcagccatcacaagktatctcgaatctgtccactttcactccttcttcattgctgccatgtgcttccaagccaccagcatccattcaaacaactcagttaggtctgtccgtggccaccctggctctatgacaacccattttcccatacagcatcccgagaccctaggcgacctggctgctgtctacctctcccacaatgagcttctcttccttcaggtaagaactggaatgttacatgaccctgttcaatttcatcagtgtacttagaagaatcagccattttaatactcgttcatttgtgtttgttgtcacgcctccctcatttgatgagggtgga

SEQ ID NO: 559333 - DNA, 622 bp, Homo sapiens
gcaggtagaaggaagactgagactgtataaagcctaagcaactcactggaaagrgacatccaaagtaaccagttatttggcattgcacgattttttaggctcttagaactgaatttaaaatttttcctagtgatctcaaaacactagccatcaaggcagcctgtagcttataaatgcctctaacgataccctgtctttggctcttcacagaggagtgggcatgtgtaatggctgaagatacaaaaacgctgagaaatgatgtgactttcctaggaaatggcagggctgggatggggacccaagctaggctgactccagaacttgggtattcagaaaggaaagtgattctatacatagattccattaaacacacacacacacacacaaacacacacacacacactacaaaaaaagactctgtgatgaggaccctgtcacagaacccaagaaggatgaaatctcaggggtgagattaagtctcaaatgactttaagacaaagcagaacgtcctaagagtgtcgccacaagttctaatgaaactcagatatgggactgtaagtctgtctagctatgacccttagggagagcttcatggcaaaggaaggtgcggagtgggggaggg

SEQ ID NO: 559334 - DNA, 484 bp, Homo sapiens
aaatgggtttaatttttctgtcataatcctctttgacttgtgcccttgagcaagtctctcatctctctttatcttggtttcatcagcagcaaaacaacaccagccaggtctactaggcttcttgtgagatcaaatggaaggatctatgtgaaaggtctttgaaacataaaagcaaagggcactgtgcaaacgtgaggattatttgcagtcagtstgttccatttctgttgccaggcaaatctttggatatttgccccaaccacaacatcctcatgacgggcatggtgcatggtagaaaccggaaacaggccactttcacattattttaaaatttgttatgaaattttgccaaaactttataaataccagccagggccatggggtgttgtaccacattctttccacctcatgaaccattgttttttgttctgaactcgtaagttgaaatgcattgagttgcagttgcttagctgggtcagcttgt

SEQ ID NO: 559335 - DNA, 628 bp, Homo sapiens
cattgctaatgctacatattgtacgcaggaaagagcaagagtgggatttataatttatattctcttcttggaagttgtctctagattctctgaggtcaatttttttcatattttgaattagtctgcccaatttcatgaactcttctgtatgaaatatttgtaacctagagaaattctcagtaagattattaaaacttaattaaaatctcttcatctggttccctagctgtagtcatgggtttctgttttggaattgagactcatagtaatcatttgtacatttgctttcaatcctgtcatattccattacaatgttcataagtttttatttacagcagatgagaaatatattttatttccaataataattgatttgtcaaaggtcatttttgccaggcacattgcctcacacctgttaattycaacacttttggaggctgaagtaggagaatcacttgaggccaggagttggagagtagcctggacaacatagcttgacctcatctctcatctctaaagaaaaaaaaaaaaaagttagtcaggcatgatagctaatgcctgtaatcccagcttactcgaggggtcaaggcaagaggatcactggagcccaggagttcaaggctgcagt

SEQ ID NO: 559336 - DNA, 596 bp, Homo sapiens
aatattctctgggataaagcacatattagtcacgaaacaaatctgaaaatttaagaagattgattatttcaagtatgtttcctgaccataaaggaacaaatatagaaatcaattgcagaaagaaaactgaacaatcacaaatgcatgtgaataaaataaactctcgaaaagtcaytgggtgagaaaagaaatcaaaaaggaaattagagaatatcatgagacaaaaatgaaaacaacatatcaaagcttatgggatacagcaaaagcagtatgaagagggaagtttatggcaataaatatctcttttaaaaagaataaatggcaaggcacagtggctcacacttgtaatcccaaaattttggaaggccaaagtagcaggattgttaagacaaggagttcaagattagccttgtcaacacagtgagaactgtctcaacaaaaaaacaaaataattagccaggcatgatcgtgtgagtctgtagttccagctactcaggaggctgaggcagcaggattgcttgagcctaggagttcaaggcagtagcaagctatgaatgtgccataaaactctggcctgggtgacagagtaaggccct

SEQ ID NO: 559337 - DNA, 560 bp, Homo sapiens
tattaaaataaattccagcatcataagtcaataccagaaatttttaaatatagtcattttaggttgactaaggaatgggaaaccactgggaaagttttctctcctaactaatcctgctctgttatgcaccatttcagatccctttggcctcacagtcccttgttccagccaccactgcaacaacgagctccacatggctccaaacaacttcacacaggcacgatgtgacaaagccttgcctcatgccactgtaggcctcccacctcattcagggcttcctcctgcatgctggtgggccccactgggcacgcagtgtgatggttaatactgagtgtcaacttgattggattgaaggatacaaagtattgatcctgggtgtgtctatgagggtgttgccaaargagattaacatttgagtcagtggagtgggagaggccaacccacccttaatctgagtgggcaccatctaaccagctgcaagtgtggctagaatataagtaggtagaaaaatgtgaaaagagagactggcctagccttccagcctacatcttgctcctgtt

SEQ ID NO: 559338 - DNA, 487 bp, Homo sapiens
ataatagtaccaagtcatagatattttgtgaatattaatgacataaagctttacagttcctgttgcctagtaaattctcagtrtatattagttgccatcattattacagtactaataatagaatgttggaaactgaaaaaagtggggggtcttgattgacaatatgacattgaatagatttgaactgtgggttggattatgattgacagagggtggggaaaaggcacaacttgaaatgaagcgtgtgctgaagaataccaagttatcctctgtagtgtgacatatatttatggcaggttaatagaggggcaattagtctggagaattgtgatgccctttgaatggtagtttagaagtttgtagttaatttggtagccatttagagacccctagcacgttgtcatcaacagttgattttgccagactttgaaatatttgtcagtctgattggtgtaaaattgtatattgtggttttaatttgtttttt

SEQ ID NO: 559339 - DNA, 384 bp, Homo sapiens
ttaaaatatttaaaaattaaaaataaagaaaactaatgttagaaatcaagaacgtagagatttttgcttctttctttgttttggatgggaggagtaatgactataaatattattttaaaaaacaagcaccaggccagatttagcctatgcactatagctagccagttccaataatacattttaaaataaaccaaattatgattatcttagtagatgcagataaaatatttgattacatttaagttaaaaactattagcaaagaggcaggacttccagaatagcagaataagaaattcagcaaaccatctccccagcaaacaaacmaaaaaaaaacacccaaactgaaaattattaaaaagcaaaacaaaaacaatcattccaaa

SEQ ID NO: 559340 - DNA, 573 bp, Homo sapiens
tggtaagttgcccaagatagtctggcaaagaatgtcacatccaaaatttactccagcaaattttgcttttaaaatatgtaaatatatcattaatattataatcgatatattaatattaataatatataatgttagtgaataatattaatatataattaattggtatataatatatataagatcccttctctcaatttgctgtcttgctttgggacaaatcataaaaataaatttaaataatccaatactaaacaacaacaaagactacaagataggaaatgtcacagggaggagtgtgatcagttgctgagtgataggctcagtgaaggctgtgagttagaagtagggaggtcaccaygtactaaaagctctacggtgaaggtgaaggtggtggccgaggaggcagctggagcagcctttcttgaaggactgcattaggtgtatggtggtaaataccacagagagcatgataaccctggcagtgcgggatagttcagcagacacctaggaagatgtcaccataggactggttcagaaatagaaatttaagatattacttaagactgaggttaa

SEQ ID NO: 559341 - DNA, 615 bp, Homo sapiens
tgtgatgcacttttttcctacctagaaatagttggggaagatagtgtttgtaagaaaaatgtaagattgaccgctgtcattgaacgttaattgctgtcacagaggaacatggaaactagatatttaagattacacaaataaataagatttaagagacaaatgcatctgtgacctttcttaaaatacctattcatttatgtggcacctccctaatcaggaaactagtcatttctctggttataatgaccaactcacagtggcaaaagtcagataggggatatataatcccaggcatgtaagtaagttttcgtcaaggttattgagtgtgtgagaaagaacgttttaagggttagtaaaggtctcccggatgaccacrtccatattttaaaataaggagacttgaggtaacctaatgcatacataatataaaataagatttttttttttagaaaaagagagacaggagagcaattaattgttgttgaaagaaggaggagagctagagttaccacaaacctatgataaaactattaaaattaggcactacacatgatgtgccaaggcaagaggagaagcttaaaaaatgggccagagagaatcatatgtttttcttgc

SEQ ID NO: 559342 - DNA, 621 bp, Homo sapiens
ttgttgcagaacaataaaccagacagatccaatctgcaataaatattattataaaacaagtgaccttagccagcgagggcaagggcaaaactctaaggatctgaggttgctgggtagctcatcttggctgtgaacctatgggcagctgtgggatgcaaccttgctgccgttagataacttcattctgctaattctctggggataaatagaacagccctgagattataaacttttggagtggaaactgattatcttgcaggcctaggtcagtcagggcaatggcacacatcaaagtgtctccctctcatctgcacaaaatactcttgtcaaattaataccgcaaacttgttacagtaaatgatggtgcctggcttttccttccacataatatgccagttattttttcttattagaattcagctttaactgaaggctttgctttccaaatttttatggatatataacataggttcatatatgaaaaagataaaaatgtatagatttcttataaaattaatgaaatttagatgtgacattatccttacctatatgatcaatgactcaagggttcacttccttgcaaagtgaatcaacygtaactgccttgttcagaaagaatat

SEQ ID NO: 559343 - DNA, 580 bp, Homo sapiens
atcgcttgaaactgggaggtggagattgtagtgagccaagatcatgccactgcactccagcctgggcaacagagtgagactttgtcttaaaaaaaaaaaagaatttttacatatgtatatcccatataaccactattgagatcatgatacaaaataccctagcaactcagaagcattcctgatagctcttcctaagcagtaatttcctctaagagataattagtattctaattctttttaccatagataggttccacctgctctggaatatcatttaaatggaatcayactgcacattctgttctgtagccagcttcttttgcttaatgtgacatctctgaggttcgtctgtgtgcattgcaatagttgattacatgttttttactatgcagtattctattgtatttatatgctactatttgtccattcttctgtgaatggatgcttgggtgtttccagtttgggctattaggagaaaaaccacaatgagtgttttgtatttgtgttttgatgaacacacactcatttttcttgtatatgtacctaggggtagaattgttgggtcatagcataagcatgt

SEQ ID NO: 559344 - DNA, 619 bp, Homo sapiens
ggatagctctaattccttagacttttgaggcatgccttcggtatgaaagataaagacagaaaaattaatttggagataacagaaacaatgcagaggtcacaaggaaacataaaacaaaagcaacaatgaaaatgatgaatatcctcagagggagaagaagaggatgctatcaataatgaaaaggcacaattagattaagaaggagctcttggaaatcaaaaacaagatagctagaataaaacagtagaaggatgaaaagatgaagttgakgaaatctcttaaaaatagaataaaagacatgtagatgcaaaatgtgagaaaagaaggtaaggaaatgagaatatgaatccagtaggatctactggtgactcgtcagcattccagaaagaaagagaaaatggagcttaaaaagcacaaaagtgaggctgagcacggtggctcacgcctgtaatcccagcactttgggaggccaaggcaggcagatcacctgaggtcaggagttcgagtccagcctggccaacatggcacaaccccgtctctactaaaaatacagaaattagcccggcatggtgacgggcgcctgtaatcccagctactcaggaggctgaggcgggagaat

SEQ ID NO: 559345 - DNA, 571 bp, Homo sapiens
tggcctcatcactctggtctctgccaccatcttcacttggcctcgtctgtgtgcatcgctcctctgtgtacctgtttcaaagttcctctgcctctcctttaaggatgcatgtgattgcatttagggaccacccagataatccaggataaactcctcctctcaaagtccttggcttagtcacatcctttcagatataaggtcatagtcactctcttgccatgtaagggaatagccacaggttccaggattagaggttagaacatgtctttagggccaccattcaacccattgcagggagtgagaagaggtcagatcccagaaagcacgcaacactgtgactcggtttttggtaaaatccattctcatttaagctagragaaaaattggcaagtaagaggtcgggcaagcggggagcatctgtttggtgcagactctgtgcagggctttacatggatacatattgacaagagcgaatgtttatggagcatttagcagatccaggctctgtcttaaggactgcacacagactagctcatataatcctcatatcagcttcacatatgaccccctt

SEQ ID NO: 559346 - DNA, 557 bp, Homo sapiens
aacaatcacaaaatacaaacctctactatataataaatttataaactcattcaacacacttttactgaatgcctacagtatgccaggccctgaggaaatagtggaacagtgatcaataagacagaaatagcctacccgtatttgcaggaacactgtgtcttatatcctacagaaatcttttttaattgcttatttaraaaatggctgggtgcggtggctcacatctgtaatcccagcactttgggaggcaaaggtgggtggatcacctgaggtcagtagttccgagaccagtgtggccaacatggtgaaaccccagctccgttaaaaatacaaaaattaggccgggcacagtggctcacgcctgtaatcccagcactttgggaggccgaggcgggcaaattacctgaggtcaggagtttgagatcagcctgggcaacacggcgaaaccccgtctctactaaaaatacaaaattagccgggcatggtgacacatgcctgtaatcccagctactcgggaagctgaggcaggagaatcgcttgaacctgggaggtggagg

SEQ ID NO: 559347 - DNA, 557 bp, Homo sapiens
aacaatcacaaaatacaaacctctactatataataaatttataaactcattcaacacacttttactgaatgcctacagtatgccaggccctgaggaaatagtggaacagtgatcaataagacagaaatagcctacccgtatttgcaggaacactgtgtcttatatcctacagaaatcttttttaattgcttatttagaaaatggctgggtgcggtggctcacrtctgtaatcccagcactttgggaggcaaaggtgggtggatcacctgaggtcagtagttccgagaccagtgtggccaacatggtgaaaccccagctccgttaaaaatacaaaaattaggccgggcacagtggctcacgcctgtaatcccagcactttgggaggccgaggcgggcaaattacctgaggtcaggagtttgagatcagcctgggcaacacggcgaaaccccgtctctactaaaaatacaaaattagccgggcatggtgacacatgcctgtaatcccagctactcgggaagctgaggcaggagaatcgcttgaacctgggaggtggagg

SEQ ID NO: 559348 - DNA, 627 bp, Homo sapiens
gaatcaagttcaccttaattaaaaagttgattttaaaaatcgtatcatttatgacagcctggatgaaactggaggacactatgctaagtgaaaaagccaagcacagaaagacaaatactatatgatctcactcatatgtggaatcttaaatgtggaactcacagaagcagagagtagaatggtggttaccaaggttcagggttgaggagaggagactgggaarttggtagaaggatacaaaacttcagttaggaggaatctgttctgcagatctattgtacaacatgggattatagttaataacaatgtattgtatacttgaaagttgctcagaatagattttaaatgttctcagcacacacacaaagagataagtatgtgaggtaatagatatgttaattggctcgatttagttatttcacaatgtatacatacagcaaaacatcatgttgtacactataaatatatacaatttttatttgtcaattaagaaactaataattaaaaaagtcaaactttctcaactataaaaaagattgtttcatgtgtaaccttctgggactcctaattaaacatggtagcttgaacacatgcttatctttggtccttcttaaaacctcattaaaa

SEQ ID NO: 559349 - DNA, 635 bp, Homo sapiens
gacttctggaatgaaaatatgttctcagatgctaataaaaaagaccctgattagttactcttacttgtgaaaagtaaattgatttacttggtacaagaatctttgttcagagaatatgttttcttttcaagaaagcagtttaaacattgacaccaaagagtttagattccttccagttccctctagacctatctttcytctttttccaaaataatacaagttttagatataatatagtataataatgataaattattcatctataaagtctctgggatatttgcagcgttaattaactctcatgcccttataaagaataagccagcaatggaatgtaaatttttgattaacaaaaatgaccataatagaggctgggtgcagtgactcaggcacttagtactttgggaggccaagacaggaggattgcttgaggccaggagctcgagactagccttggcaacattagccaagcatggtgttgctcacctgttgtcctagctactcagaaggctgaggcaggaggacagcttgagcccaggaagtcaaggctccagtgagccatgactgggccactatactgcagcctgggcaacagcgtaagaccctctttctaaaaatgaaatttaaaaaaatga

SEQ ID NO: 559350 - DNA, 283 bp, Homo sapiens
agttggctgatattttctgctgcctattgcaactcaacacatgaccttttaatggagcaaaatatttgtgatataaaactagcctggcattcttagataatttattcattcaacaaatattattcagcatccattatgtgtcatagccctttctaggcataggattcaagagtgaaaaaaaacaaagaaatatcctgccctcacagagcttatatkctaaagggagaggacaaacaaccaagcaagaatatatatatgtactataaaggaagaagaagggaaa

SEQ ID NO: 559351 - DNA, 560 bp, Homo sapiens
aaggaatttcacaagacaatgtcatcagttaaggcaggaacaggccattttcacttcttttgtggtggaatgtcatcagttaaggcaggaaccggccatctagatgtgtacatgcaggccacaggggatatgatggcttagcttgggctcagaggcctgatatttatatgttgatataaattgttgttgcacaggtatatataatttgtaaaatttcattcagttatatactttgggcattttactgtatgtgtgttatgtttcaatattaaaaggatgcccaaaataaaaaactaatcgaatcatgtggcatgattgttaatattgagtgtcaacttgattggattgaaagatacaaagtattgttgctgggtgtgtctgtgaaggtgttgccaraggagattaacattgagtcagtagactaggagaggcaaacccaccctcaatctgagtggatatcatctaaccagctgccagcgtggctagaataaaacaggtagaagaaagtggaatgaggagacttgctgagtcctcgccttcatctttttcccgtgctgtat

SEQ ID NO: 559352 - DNA, 604 bp, Homo sapiens
tgccaggcactgtgtcaactttttcaaccatcgtacagggagcatcgaggggcttgtagttgtgtccaaaattcagccttcagaatccaaaacattaaaatgcctgccagttccgccttacacttactctttgactagacaattgttgagcactttttatctgtcaagctgcacatttgagactggagatrcaaaaacttaacaaaattaccttcatatttcacaattgaatgagagacatatgtatactaactttaaacactaactgcaaaaagcaatcatgaatagagaaaagattattaaagatgaaccttataaaaattttctcaaatgtgaatgtttttgttttaaatgaatttactcccatgtttactattctattctttaacacataattctgttaaggggctgcattttgccacctctacaaatggtgtttacattggaacaaagtgaaaaatgacagacccaagcagtatcaatcagtcctagatgctgtgatgcatcatttccagcatttcataagtttgataaggtccctcaatttttatggtaggctaaggatatggaactgttaatagggcaacaacaagaagaaaaacat

SEQ ID NO: 559353 - DNA, 535 bp, Homo sapiens
ttattcaataaatagggttgggataactagaagttctgatccaaaaaaataagttggatctgtccctcacacattaaaacaggataaagtttaaatggatcacaaactaaaaataaataagtaaaacgataaatgaacaagaaagaaactatcataaaaaattttttgtcacctctgaataaaaacagctagaacacatgacagaaaagataaattcagcaatgtaaaaactatatattaaaaataataactatatatttatatatgttacaaatacataaatgtatatcttgtgtgtatttgtgtgtgtgtgtgtgtgtgtgtrtatatatatatatatatatatatatatataaaaaataagtaaagtcaaaagttaaacaccaaactggaaaaaagcataacttatatgacacttaaaatgttgattttctggctgggcatggtggctcacgcctgtaagcccagcactttgggaggccaaggcaggcagatcacaagatcaggagttcgagaccagcctggccaatatggc

SEQ ID NO: 559354 - DNA, 535 bp, Homo sapiens
ttattcaataaatagggttgggataactagaagttctgatccaaaaaaataagttggatctgtccctcacacattaaaacaggataaagtttaaatggatcacaaactaaaaataaataagtaaaacgataaatgaacaagaaagaaactatcataaaaaattttttgtcacctctgaataaaaacagctagaacacatgacagaaaagataaattcagcaatgtaaaaactatatattaaaaataataactatatatttatatatgttacaaatacataaatgtatatcttgtgtgtatttgtgtgtgtgtgtgtgtgtgtgtatatatatatatatatatatatatatatatawaaaataagtaaagtcaaaagttaaacaccaaactggaaaaaagcataacttatatgacacttaaaatgttgattttctggctgggcatggtggctcacgcctgtaagcccagcactttgggaggccaaggcaggcagatcacaagatcaggagttcgagaccagcctggccaatatggc

SEQ ID NO: 559355 - DNA, 636 bp, Homo sapiens
gttttccattcctgagttacttcacttagaataatggtctccaattccattgaggttgctgcaaatgtcattattttgttcctttgtatggctgagtagtattcaatggtatatacatatatatatatatatatatatacacacacatttttttatccacaagttgattrataggcatttgggctggtttcatatttttgcaattgcaaattgtgctactataacgaatgtgcaagtatctttttcgtataacgacttcttttcctctggataaatactcaggagtgggattgctggatcaaatggtagagctacttttagttctttaaggaatttccatactgtcttcaacagagcttgtactagtttacattcccaccgacagtgtaaaagtgttcccttttcaccacatccaggccaacaccaattatattttttattttttgataatggccattcttgagaagtaaggtggtactgtattgtggttttgatttgcatttccctactaattagtgatgttcagcatttttccatatgcttcttggccatttatgtatcttcttttgagaattgtctattcatgtccttagcctactttttgatggaattttttttttttgctaatttgtttga

SEQ ID NO: 559356 - DNA, 623 bp, Homo sapiens
agtaagttttaaaaactcagcttttttatgtattatatatttgggtttctaataacatttcagttgagaaaagaattttaatctagccagaaatccactctgtacagaacagtgctagtcttctatgtagcagcggcactgccccatggtatttacatgtaattggaactcgatttgactatagccaggcagagcagagtcattcaaaccaaggcctagagtgatttgtaaatcgctaattgtatttagggctgtttgttctcagatatcatttctttaggaaaaagcacagttagtcagtagtccaatgtctagagtctttgttttgttcttgacaccaaaataaaatatttagccaaataacctattctgctcttctccatgactataacattggccacaggcaaacgtatggagtaattaaaggctttccttagtgctcctctcccagatgctctatgcttgcttgtgcttaagcatatgctaytgcaaaagagagaagagcaaaggaaatcttgtaagtcaccatgttgaacagcaaagcctcagaccctcagtggctgggagcagtgccttctcccagttcagtggacttaggttatggcagctattgctatagttac

SEQ ID NO: 559357 - DNA, 574 bp, Homo sapiens
atctaaaaatagagctaccatgtgatctggcagtcccactgctgggaaatatccaaaggaaaggaaattagtatatcaaagagatatctgcacactcacatttgttgcagcactgttcacaatagccaagacttggaagcaatcttagtgtccatcaacagattaatggattttaaaaagtgatacatgtacacaatgaagtactattcagccataaaaaggaatgagatccagtcatttgcaacaacatgggtggtactggagatcattatgttaagtgaaacaaaacaggcacagaaaaaccaacatcacgtgttctcacttatttatgagatttaaaaattaaaacaattgaattcatggagatagagagtggaaggatggataccagagactggaaagggtagagcggggatggtggtagggagttgagggatgattaatgggtacaaaaggatatagaaagaatgaataagacctgctatttgttagcacracagggttactatagtcaataataatttaattgcatatttaaaaataactaaaagagtataattggattgtttgtaac

SEQ ID NO: 559358 - DNA, 641 bp, Homo sapiens
gatatgctgttgaatttggttagctagtattttgttaaggatttttgcatctatattcatcagggatattggtctgtagttttctttttctgttatgtcctttcctggtttttggtattaggatgatactggcttcatagaatgatttagggaaaattcccccgtctctgtcttgtggaatagtgtcaataagagtgataccaattcttctttgaatgtctgatagaattcagctatgaattctagacttttttgttgacaaattttttattactgtgttaatctcactacttactgttggtctgttcagagtttctatttcttcctggtttaatctaggaaggttgtatatttccaggaatatatccatctcctmtaggttttctagtttgtgcacatgaaggtttgcatagtagccttgaatgatcttttgcatttctgtggtattggttgtaatatctcctgtttcatttctaattgagcttatttggttcttttctcttcttggttaatcttgctaatgacctatgaattttatttatcttttcaaagaaccagcttttttttcatttatcttttgtaatttgtttgcttcaatttcatgtagttctgctctggtctttgttatttcttttattctg

SEQ ID NO: 559359 - DNA, 276 bp, Homo sapiens
gattcaatttcagaactcattatcattattattgttattattatactttaagttctgggatacatgtgcagaacgtgcaggtttgttacataagtatacatgtgccttggtggtttctgcacccatcaacctgtcatctacattaggtatttctcctaatgctatccctcccctagctccccaccccgcgacaggccctggtgtgtgatgttamcctccctgtgcccatgtatcagaactcattatttatctattcagggtttcagcttcttcctg

SEQ ID NO: 559360 - DNA, 588 bp, Homo sapiens
tcttgccccacttctgtaaagtactgtcacctagttggtgaggttgcctgtaactgacttcaaaaggccattccaccattccgtcaagccagctgctttagaacggttgggaacaccgtgagaccagtgaattccacgagcacgaacccactgctgcgcttcatttgctgtgaagtgagtcccttgatcagagcaatgctgtgtggaccatcrtgaaggtggacaaggcattttgtaagtccatagataatagattctacagaagcattgtgtgcagggaaggcaagttcatatccagagcaaatgtgtattccagtaaggacaaaatgcttcccctcccttccacaatggaagcagtccaatgtaatcaacctgcctccaggtagctggctggtcaccccagggaatggtgccatatattggggactcagcattggtctctgctgttggcagattgggtactcagtggtcgctgtagccaggttgaccttgttgcttgaactccatgttgtgagcatgcgtgtgtgtgtgtgtgtgtgtgtgtgtgtgtgtgtgtgtgtgtttgacagagacagagggaggagaaag

SEQ ID NO: 559361 - DNA, 588 bp, Homo sapiens
tcttgccccacttctgtaaagtactgtcacctagttggtgaggttgcctgtaactgacttcaaaaggccattccaccattccgtcaagccagctgctttagaacggttgggaacaccgtgagaccagtgaattccacgagcacgaacccactgctgcgcttcatttgctgtgaagtgagtcccttgatcagagcaatgctgtgtggaccatcgtgaaggtggacaaggcattttgtaagtccatagataatagattctacagaagcattgtgtgcagggaaggcaagttcatatccagagcaaatgtgtattccagtaaggacaaaatgctkcccctcccttccacaatggaagcagtccaatgtaatcaacctgcctccaggtagctggctggtcaccccagggaatggtgccatatattggggactcagcattggtctctgctgttggcagattgggtactcagtggtcgctgtagccaggttgaccttgttgcttgaactccatgttgtgagcatgcgtgtgtgtgtgtgtgtgtgtgtgtgtgtgtgtgtgtgtgtgtttgacagagacagagggaggagaaag

SEQ ID NO: 559362 - DNA, 483 bp, Homo sapiens
ctcctttgattcaacataggacgacaatggtgaagaatagagaaaaaatgaacaaaagctctgagaaatgcaggattctataaaaagacagaacctcagactgaatggcattcctgaaagagacagagagagcaagcaatgtggaagaaatattggagtatattgtccataaaaacatccccaatgttgctagagagattgacatgcaaatataggaaacgcagagaacccttgcaagatactacacaagacaaccatgccaaaagcacagagtcatcagattcttcaaggtcaatgtgaaagaaaatatgttaatggcagctagagagaaggagcatgtcacctacaaatggaaccccatcaggctaatagcagaactttcagcagaaatcttagaaaccagaagagagtggagrcctataatcagcatccctatacaaaagaaattccaaccatgaatgtcatattctaccaaactaactt

SEQ ID NO: 559363 - DNA, 445 bp, Homo sapiens
gtgtggccagtcagatatcccccattacagtcaccaaccagcctgcccctggggcctatttcagaaataaattggtttgtagatgagctgatgcagaagaaggaaaaaaaaaatgttttcttgagactgtacctaaatcttatcragtaatacagggaagcttcaaagtctttttattctgaaatgttattttattctgctttatatcatcttaaatttattagtattatattaaatattagtttatgtaagcttattatttgactctgtataggatataatagatggcattgaatatttaataagatagcaacagcaataacacctgggaaattgttcagggaaggattctattcagttattaaaagatttgcatacttatttcgctaatattactcagcaatcacaaacactgggtaatgctagacaaatctgcaagaggtac

SEQ ID NO: 559364 - DNA, 445 bp, Homo sapiens
gtgtggccagtcagatatcccccattacagtcaccaaccagcctgcccctggggcctatttcagaaataaattggtttgtagatgagctgatgcagaagaaggaaaaaaaaaatgttttcttgagactgtacctaaatcttatcgagtaatacagggaagcttcaaagtctttttattctgaaatgttattttattctgctttatatcatcttaaatttattagtattatattaaatattagtttatgtaagcttattatttgactctgtataggatataatagatggcattgaatatttaataagatagcaacagcaataacacctgggaaattgttcagggaaggattctattcagttattaaaagatttgcatacttatttcrctaatattactcagcaatcacaaacactgggtaatgctagacaaatctgcaagaggtac

SEQ ID NO: 559365 - DNA, 615 bp, Homo sapiens
tctagtaaccagaggacacagcagggttatgaaaccttggattcctgtttggtttggcaggtaactagattaacaaaaatacgaggttttgagtttcaaaacacaacagcttatttaaaaaatacttggtggggatctggcaattgagagaccttagtagcataatcactggtcttcacaatcactgccaggtactctttcaaactagctggaataactgcaaaacacatcatcaacccagctttttttgctggacctgggcatatataaactgattagatttaaaaataaaaaaattagaattttttcagttgtgtttgaagaggtgaacccttggactcaaaatctctcaaaagtcctgtctttcacttcagaatctgagttaatttgcacaggaatatacttctgtgtttyaataaacacatgtaatttttctgtttacatcttgcaagtaatgacagctttgttctcaaaccaattttgttttttatagattttaccctgatacaatatgaagagacaattacatgatctgtgtagaaattcttcctctaaactaaattatactaccttagcaatctgacatgaaagtaccaaaactatgtaaattgaccc

SEQ ID NO: 559366 - DNA, 401 bp, Homo sapiens
atccttcagttgccccagaggcatgtcacgttctttgaatgctttattatagtcctcttcatttagcaatcagtgaggcaatacactgacatcatgatccctttttttaggaactctgtacaaaattccctttgaaaatataaattttggaaatgagtgatgagcaaaggggtttcattaacattatcacaatctcttgatatatctgcttgataatgtagcacctattatttggggccattaggaccttggctgaaattctggtaaatgtaaagaaaccacatttaacatccagttaatttaatttttgtttgtttgtttgtttgttttgtttttgtttttgagacgttgtcttactctgtcacccaggctagagtgcrgtggtgtgatctcgactcact

SEQ ID NO: 559367 - DNA, 596 bp, Homo sapiens
ttttgaaagaatgcctagttttgtaaaaygctttttcagcatttattgaattgatcatattatttttatcctttattctgttactgtggtatattacattgttgatttgcatatattgaatcatctttgcacctcagggataaatcccacttaattatgttttgtgatctttttaatatgctattgaatatggtttgctgatatttcattgagtttttttgcatccatgtttattagtggtaatggcctgtaattttatttttttgtaaagtctttgtctttgctatcagggtaatgctggcctcctcaaataagtttggaagtgttgtctcttcaattgtttgaaagcagttgagaaagattggtattaattttttttaatggttggtaaaattcaccattgaagtcatttgaccctagatgttttttcctttttgttgggaggtgtttaattactgagtcaatttctttactcattgattaatctcctcagattttctatttctccatgaatcagttctggtaggttctatttttctagaaatgtatccattcttgtagcttatacaatttgttggcatataattgtttacagt

SEQ ID NO: 559368 - DNA, 373 bp, Homo sapiens
gtgtgttcttgtgtcaaagagaccccaagtagtagttataaagggtatacaaaagcaattaagtaatcaggtgtcattccctaaatgcaaacgccctcagaattaaatgaagaaacccaaagaacagcagacacggtactgcaaaaggttcatctaccaaaaggaattagataaataagaatcaacagacaaatgtcaatcattggcagctgggagcaatgggtcatgcctgtaatcccagcaatttgggaggccacactgggcggtcacctgaggtcaggagttcaagaccagccaggccaacatggtgaaacyccatctctactaaaaatacaaaaattagccgagtgtggtggcatgtgcctgtaaaccc

SEQ ID NO: 559369 - DNA, 622 bp, Homo sapiens
ataatgttggacatttttatgtgcttattggctatttttatatcttctctgaaaatgtatctattcagctaatatactcattttcgaaattgggttaattgtcttcttgttactcaggtttacaagttattcatattctggacatgagacccttattagatatatgatttgcaagtactgtgttccatttcaagggctgcatttttgccttattgattctattctttgaagctcaaaatattttaatttttataaggtccaaattattcaattttttctttgtctcttgtactgtcagtgttatgtgtaaaaacacatggcttaacctgtgattatgaagattcttaagtttttcttctaaaagttttatagtttyaattattacctttatatccttgattcatgtttggtaattttttgtgtatgttgtaaattaggggtctaccttcattatttagcatcttgatatttaggtctccaagcataatttgttgaaaagagttttctttccaccactgaattgtcttagtaaccttgtctaaaaccaatagaccatcaagttaaaacattatttctggactcaatctgttccattgatctctctatatatttatgccaatat

SEQ ID NO: 559370 - DNA, 554 bp, Homo sapiens
ctgaggtcaggagttcgagaccggcctggccaacatggtgaaaccctgtctctactaaaaatacaaaattagccaggcttggtggcacatgcctataatctcagctccttgggaggctgagacaggagaattacytgagcccaggaggcggaggttgcagtgagccgagattgcatcactgcactccagcctgggcaatagaactagatatattctgaaaaacaaacaaacaaacaaaacacaaaaaatgaacaacaacaacaacaaaaaatcaaggagaacttaacaaaaattataatgtaaggtttcaatagatctctctcaaaattggaaccatctaggacaaaaccttcagattttgctcgtattttttttcttcccagaatggctttatcctacctcaacaccagtggtaatcatgttcaccccttaaatgttattttagggtcattttcttcaggaaacttttcattccaccctctctccagatagaaatttagcattcctcccatttggactccagtgaattccttatatacatgtgtctaacacag

SEQ ID NO: 559371 - DNA, 545 bp, Homo sapiens
ccagcctggtcaacctggtgaaaccccatctctactaatactacaaaaattagccaggcatcaccaygtgcctgtgcctgtaatactgggaggctgaggcacgagaatcacttgaacccgggaggcagaggttgcagtgagccaacatcacgccactgcactccagcctgggcaacacagtgaaactgtctcaaaaaaaaacaaaacaaaacaaaaaaaaagttaactagagagagtcagaagtagatttgagacagcagaagaaagagtaagtgaacttgaaggtagattaataggaattattcaacctgaaaaacagaaaagagattgaagaaaactgaacagaacctcagagacctgtgagaaaacaagcacatgagcgtatgagtaatgggagtccaaagagagggacaaaaaaaaataatggcaaaaaacttccaaatttgatgaaaaccaattatctataaatctaagaagctcaacaaacttcaagaatagagattcccatctagatacaccaaactgttgatacatttaaactgctg

SEQ ID NO: 559372 - DNA, 600 bp, Homo sapiens
ggaagtgaactttcttatactaaatccttaatacatacagacttcccatcccaggttgtaaccacaaaccttcccaacacttactactaaacttaccacatagataagggcaaatgacctctgtgggtaggtttgcttctaagacaaaggggaaggaaaaaattatagtttacttgctgagtttctctttctcaaatccccagtgagattaggtcacatctcctctacagaatgtgagtgagaagctagaagcaggcaaagagtgaaatgctaatgggactgcaaccacaggaaagaaaaaaatcaagagtgggaagargcactcctccacaaacatgctggaagttattactaatattatattagaggagaagccaaaatgcaagctttagtcctatcatcaaagccttgacttcctattgtctgctctgaaattctgaagggaaacagagagaggagagagagaaactgattgagaaatcatccccacaagcccacatttgagttttaaataactcaatttttctccaatttaatatgtctattgtgtttcctgacattccaagaagtcctgcaaaactgaaaaatacaatcatcgct

SEQ ID NO: 559373 - DNA, 571 bp, Homo sapiens
aggggaaagggaagggaagggaaggaatggccatcggcttcaatgagtggagggagtcaggtttggacagacttagacagttacatcaaggtatattagcttctcccctaacctcaactaggcaacattctttctcaaaaaatgaacaaaatgtggacatttatatctaggacagagcctgttgctgaatccagtaacttaaaagtatcatgcttttgaaaacttcctctttttctaaagtaatagcttgtattgttctaagtgttgttttctttttctttctgttttcattatggggcatataggacattgattattgctgttattattgtaattcttaaaattacattttctttgaatcataaatcaatgcattatctcccctcaaggacttcttctatttaaagagccagatcgatttttacaggatatgccgacmataaatctttggttcttattttttcctcctgaagactttggatcagaattattattatcattatttattatttattgagtgctgtcagtgggctcagcagtatacaaatataaatgggtaaacatcatcatt

SEQ ID NO: 559374 - DNA, 395 bp, Homo sapiens
gaactcaacttttcttatttttaattcctgctaagaatgggttacttttttttttttttttttttgagacagggtctcgctttgtcacccaggctggagtgcagtggtgccatctcgactcactgcaacccccacctctcaggctcaagtgattctcatgcctcagcctcctgagtagctgggattacagatgtgcaccaccacacccagctaattttagtattttttaatagagacggtgtttcaccatgttggccaggctggtctcaaactccaaagctcaagtctgcccacctcagcctcccaaagtgctgggattaygggtatgagccactgcacccagcctgtgttatatatttttttttaatctgggatgtttcgtgaacgttgtagtg

SEQ ID NO: 559375 - DNA, 565 bp, Homo sapiens
ggtctcacctgaaagctcaatgggggcctggcatgttattggcaggaatcaatttcttacaggttgttggactgagggcctcagtttcttgytggctgttggctggaagctgctctcacagtcttaccacatgggcctctccagatggctcgtcatcaaaggcagcaaagaagagtttaaatagagcaaaagtgctagcaagaccaaagttacaatctctcataacctagttacagaagtgacatcctctcattttatctaaattctactggttagaagcaagttacaaggcccagcccacactcaagagaaggggcttacaccagggtatgatgatcaggaggtgaggatcattatggtccatcttagagtctgcctgccacaccctccaaagtcatatctatttgcagtctctttacaaagaacctgcaaagttccaattcttaaaacttgtctatggatcaagatggctctgtccagggtcagaatgcaagaagtagcaacaagagttgcagcaatcacgaaaatgagccaccaagatctgctgtaggaacatggttgactt

SEQ ID NO: 559376 - DNA, 565 bp, Homo sapiens
ggtctcacctgaaagctcaatgggggcctggcatgttattggcaggaatcaatttcttacaggttgttggactgagggcctcagtttcttgttggctgttggctggaagctgctctcacagtcttaccacatgggcctctccagatggctcgtcatcaaaggcagcaaagaagagtttaaatagagcaaaagtgctagcaagaccaaagttacaatctctcataacctagttacagaagtgacatcctctcattttatctaaattctactggttagaagcaagttacaaggcccagcccacactcaagagaaggggcttacaccagggtatgatgatcaggaggtgaggatcattatggtccatcttagagtctgcctgccacaccctccaaagtcatatstatttgcagtctctttacaaagaacctgcaaagttccaattcttaaaacttgtctatggatcaagatggctctgtccagggtcagaatgcaagaagtagcaacaagagttgcagcaatcacgaaaatgagccaccaagatctgctgtaggaacatggttgactt

SEQ ID NO: 559377 - DNA, 565 bp, Homo sapiens
ggtctcacctgaaagctcaatgggggcctggcatgttattggcaggaatcaatttcttacaggttgttggactgagggcctcagtttcttgttggctgttggctggaagctgctctcacagtcttaccacatgggcctctccagatggctcgtcatcaaaggcagcaaagaagagtttaaatagagcaaaagtgctagcaagaccaaagttacaatctctcataacctagttacagaagtgacatcctctcattttatctaaattctactggttagaagcaagttacaaggcccagcccacactcaagagaaggggcttacaccagggtatgatgatcaggaggtgaggatcattatggtccatcttagagtctgcctgccacaccctccaaagtcatatctatttgcagtctctttacaaagaacctgcaaagttccaattcttaaaacttgtctatggatcargatggctctgtccagggtcagaatgcaagaagtagcaacaagagttgcagcaatcacgaaaatgagccaccaagatctgctgtaggaacatggttgactt

SEQ ID NO: 559378 - DNA, 565 bp, Homo sapiens
ggtctcacctgaaagctcaatgggggcctggcatgttattggcaggaatcaatttcttacaggttgttggactgagggcctcagtttcttgttggctgttggctggaagctgctctcacagtcttaccacatgggcctctccagatggctcgtcatcaaaggcagcaaagaagagtttaaatagagcaaaagtgctagcaagaccaaagttacaatctctcataacctagttacagaagtgacatcctctcattttatctaaattctactggttagaagcaagttacaaggcccagcccacactcaagagaaggggcttacaccagggtatgatgatcaggaggtgaggatcattatggtccatcttagagtctgcctgccacaccctccaaagtcatatctatttgcagtctctttacaaagaacctgcaaagttccaattcttaaaacttgtctatggatcaagatggctctgtccagggtcagaatgcaagaagtagcaacaagagttgcagsaatcacgaaaatgagccaccaagatctgctgtaggaacatggttgactt

SEQ ID NO: 559379 - DNA, 650 bp, Homo sapiens
cattttctcaatccagtctatcattgttggacatttgggttggttccaagtctttgctattgtgaatagtgccgcaataaacatacgtgtgcatgtgtctttatagtagcatgatttataatcctttgggtatatacccagtaatgggattgctgggtcaaacggtaattctagttctagatccttgaggaatcaccacactgtcttccacaatggttgaactaatttacactcccacaaacagtttaaaagcattcctacagaaatagatcttgagtgaacaatgatgtgctctgtttggagatttcttttggaagttgacctgataatattgtatgaactacattatttgtggagttatatagaccagatatgccagttactagatgtgtgactaaggcagtttatttcctttattgggttctcctatttctctcatatttaaaaaaaggacaacagatatctcacagaactgttgtgaatatataatatgtgccyagcacagtgacaattaattatcagtgtgtgtttgcctttgaggtttctatgaaatactctaagtggatgtgcctagaagaaatctgcctatttctatcaggaatttaggataaaggaacctttatctgagtcattagagtaaagaaatagat

SEQ ID NO: 559380 - DNA, 554 bp, Homo sapiens
ctgagcgttatagtaaatgatattttttgagagtatgaatggagatgaagtattccatttttctttactttctgaaggtaaaattttgactggggagatagggctttgctatcaacattaggttttctggtgtgagttcatatgatttgattcctcattgatgactattcgtaggtttaacaagtcaaataacaactgtggaaagttttattttttattcctaaagagtttacctgtatctttttatctttttatctttttttttttttggagacggagtcttgctctgtcacccaggcaggagtgcagtggcgcgatcttggctcactgcaacctccacctcctgggttcaagtgattctcctgcctcagcctcccgagtagctgggattacaggcatgcactaccataccctgctaaatgttttgtatttttagtagagttggggtttcactgtgttgggcaggctggtctcaaacttccggacctcaggtgatccacctkccttgacctcccaaagtgctgggattacaggcgtgacccactgtgcctggt

SEQ ID NO: 559381 - DNA, 557 bp, Homo sapiens
tggagcatgcctgtgattctagctatctgggaggctgaggcaggagaatcacttgaacctgggagggggaggttgctgtgagctgagatcacaccactgcattccagcctgggcaacagagtgagactacgtctcaaaaaaaaaaaaaaaaaaaagtaatatttctatcactactagccacctggagtacattagtcatgctgttctctccttcctaccctttggtaaggaagtcattccacctgtggcagaaacaggataacctatgcttctccctcctgcttagagggtatggatggtcttgaactctaattcttccaaataaggttgtgttggtgactgttcatcagactaaaaygcaagcatgctgaaatgttccatatgcttctatccaatattttatttgtaacctgcataagagatgtaaataaaactgacttttatcttgattcagtcactcctcagttaatcacaaatgcatagtttaacatgaaattcaatttatacttctgacttatcactgcacagtgttagattatgttaaagaaatttgattg

SEQ ID NO: 559382 - DNA, 551 bp, Homo sapiens
taatgcatgcctcccaaaagcatagcatagcccagaacaaatttttcatttactttgttttcatgaaaaaaaaagtgaagcttccaaatatgcaaaattgcataataacacgctctcgcttggagaggaagccacacattaagaagtatctaatggcaaaaatgcagtcattgtctgagcacggtaggggggccccaggcagagggcctgtccaaccatttacaatgcttggggcttacagagtgggccaacagtacagctttctcaaaggatgccttttattcagttagttagggaatgtctacaagtaatcatatccacctgaagactcctrgattccagtcattcctccacacttagcatgagcaagttagctaaaatatctatgactcagttttctcagctgtaaaatgggaacctctaacccatagccatggattcaatgaattatatgtttagtgtgcttagaacagtgcttgatatgaagaaaatgctatgtaagtgttactgttagcattaattttctattgtttttatttgttgatgttatt

SEQ ID NO: 559383 - DNA, 551 bp, Homo sapiens
taatgcatgcctcccaaaagcatagcatagcccagaacaaatttttcatttactttgttttcatgaaaaaaaaagtgaagcttccaaatatgcaaaattgcataataacacgctctcgcttggagaggaagccacacattaagaagtatctaatggcaaaaatgcagtcattgtctgagcacggtaggggggccccaggcagagggcctgtccaaccatttacaatgcttggggcttacagagtgggccaacagtacagctttctcaaaggatgccttttattcagttagttagggaatgtctacaagtaatcatatccacctgaagactcctggattccagtcattcctccacacttagcatgagcaagttagctaaaatatctatgactcagttttctcagctgtaaaatgggaayctctaacccatagccatggattcaatgaattatatgtttagtgtgcttagaacagtgcttgatatgaagaaaatgctatgtaagtgttactgttagcattaattttctattgtttttatttgttgatgttatt

SEQ ID NO: 559384 - DNA, 517 bp, Homo sapiens
tgtcaaccaggcatttgaggactgtttcaggaaggaagaggagtcccggctgtaggccatacgccttccattstcacctgcacgggaggtgagggaagcatcagctcagatcttgctgagtgggtttcagacttcaaaggaagccccagcgaccacagtgcagccatctttctgaagtgctgcggccccagccctctcctcctggcagcctagaggacgatcctggacatcgacagctttgcgtcaagaaaattattcagctgatcatgctctgtatgtaaagaaggtttagcaagtccataactaatgtttctgttttctttcttgtataagcacaagaatgatataaagataataatctctatttaaataagcctaaaagagctctttcaataagtagtaaatcaacctaagtggtttgaaatgctgtgttatatttgagtacggagcctatgttttttcttttttcatggtatataaaatagagaggtccagacacagtggctcacatctgtaa

SEQ ID NO: 559385 - DNA, 644 bp, Homo sapiens
tacgtattaaccatccctttctcccgtggtcccctcccactacctttctgtgtttcttataaccatccttctaccatatatcttcaagagttcaattattttgatttttagatcccacaaataaatgagaacatataatatttgcctttctgtgcctggattatttcgcttaccataatgacctccagttccatccatgttattgtaaattactggatatcattcttttttatggctgaatagtactccattgtgtatatgcaccacattctctttacccattcatctgatgatgacacttaggttgcttccaaatcttaactattgtgaatagtgctrcaacaaacgtgggagtgcagatatctcttcaatatactgatttcctttattttgggtatatatcattcagtaggatttctagatcaaatggtagctctatttttagttttttgaggaacctctgaactgttctccatagtggttgtactaatttacataccctccaacagtgtgtgagggttccattttctccacatcctcaccagcatttgttatggcctgtcttttgcatataagccagtttaactggggtgggatgatatctcattatagtttgatttgcatttctttgatgatcaatcatg

SEQ ID NO: 559386 - DNA, 474 bp, Homo sapiens
tccacttaaataggagggtatgataatggctattcttgcatgctgacttcagggatggcatttgtaatgttttttattatgatgctgggtataggtttctagtttatgctttgtcaagttaaagaattttcttttcagtttattttttgtttattggtctattgtgaaattctattctttttgtttcttttttyttcttcttctttttgaggcatggtcttgctgtgccctgcaggctggaatgcagtgactcaatcacagcttactgcagcttccatctcccaggctcaagagatcctcctgcctcagtctcctgagtagctagaacctcaggcacgtgctgccatgcctggccaattttttttatttttagttgagatgaagtctcactatgttggccaggttggtctcaaacttcaagctatcctcccacctcggcctcccataatgctagcattacaggtgtgagccact

SEQ ID NO: 559387 - DNA, 581 bp, Homo sapiens
gcagtggcaccatctcggctcactgcaacctccacatcctgggttcaagcaattttcctgcctcagcctccagagtagctggcattacaggtgcccaccaccacacccggctaatttttgtagttttagtagagacggggttttgccatgttggccaggctggtcttgaactcctgatctcaggtgatccacctgtctcggcctcccaaagtgctgggattccagatgtgcccagcccagttyacttttttattagcacacaggacctttctataccttgtcatggatagaagtggaagggaagtagagacaggaaataaaggcaaaagtgaggaaacagaaagaagctcaggacacttgtagactaagtcaggcctgatgacatggtggcccaaagactagttggcatcaagaaacaactttggtgggctcatataggattcaaacaaaaataaaaacatcctaaaactaaggatacttcaaattaaaacagagatgtctggcttctctagaacaatcagagacctgacaatagagaccctgtgtttctgcaggacaaggattggcccaccctgagagac

SEQ ID NO: 559388 - DNA, 547 bp, Homo sapiens
cagtgagccaagattgtgccactgcaccccagcctgggcaactgagtaagactctcactcaaaaacagaaacaaaaaccaaagcaaacaagaaaaaacaattttctatgtctatgttggataaatttaaatttatttactttcatatcaaaacaaacaccttaatttgggactaatgtaatagtttgtaattgattttaacctcctccaaaagatactgtaagaataactygtatattaatcatcctaaaatataaaatgtggtgtcattttccagtttttaagatttcatcgtcctaggaattcaagtccaggcagcaccgaatgtctcttaaccttagtccacttatctttcatgccttggggcccactgtttcacttggtttcaaaaaaacaacctggctcagtgtattattgtagattccctagagaaatccatctgctttttcctctcttttttctcacatgattgtcttgcctcacagacccttccatcatcttccaagtgaggaaacctattgaggtatcaagggccaacttcaatgaaa

SEQ ID NO: 559389 - DNA, 516 bp, Homo sapiens
ttgaaaatatgcatgagaatgaagggtaagtacagaagcttaaggaaagaagaaggagaaaaaggaggagaaggaagaagaactagtagaaatagcagtaaaagtagtagcagtggtggtagtggtggtggtggtggtggtggtcgtgtgaatgatccctcctgatgtctagaaagtatgaaaggtacaagctatagtagagcttttgtatccctagcaggaataagaggagcattattgcctttcttattctaagtgttgtcgcaatcatatgaargtggcactgggctatgcctgtaagaacacttggcaagggaaagtcacaaggtcacccataagtcatgacatgaaatgtagttttagtgcaaagtccaaccctataagaaaattgagagaaactaatcacttaatagggctgacttcattgaattttttgaaccacagtataaggcaaatggataaactattcctcatgttagactacactagagagtggaccttttacagtgatgcccg

SEQ ID NO: 559390 - DNA, 622 bp, Homo sapiens
tagccttactgcttatgctagagacaaagtacgtctgcagagtaataaactgagtgtttaactccaaaaattagaaaaagaaaagcaaataaatccaaagaaaggaggagtaaaataatataagcataatataaacttaggagcagaaatcaatggaagaacaactactaaataatagaaagtatccaaaaaatgaaagtcatcattttttctttttcttcaaattattaataaaactgacaaactgcaagcaagatttaaaaaaaaaacagagaagacactgataatcaacatcaagaatgaaaaagagggcatcactatagatgctgcagacatcaactaaaattaaaaacaggatattactgacaacttcatgccaattattttgagcatttagacaaaactcacaaattcctagacaaatgtaatttccatagttaattcaagaataagtacaaaacctgaataagccaataaccatgaaagaaattgaatcattagttaaaattgttatcataaagaaaacatcagactttgatggctytgttaaaagttctacaaaataaccaggaaataaataattctaatcttacacaaactatcccagaatgtataaaaaaaa

SEQ ID NO: 559391 - DNA, 553 bp, Homo sapiens
ctttggtaggctaaggcgggtggatcacgaggtcaggagatcgagaccatcctggccaacacggtgaaaccccatctctactaaaaatacaaaaaattagccaggcatggtggtgggsgcctgtagtcccagctactcgggaggctgaggcaggagaatggcttgaacccgggaggcggagcttgcagtgagccaagatcgcaccactgcactccagcctgggtgacagagtgagactctgtcttcaaaaaaaaaaaaaaaaaaaaaaaagaatttactggcttttattctggctaatacattcctaatagattttcttttgcacttccaaacaggagccctctttccagaatttgccatattgttatctaagcttagcaccattcagactcagagccatgttgatctaaagtgcttaattgcaactgaatatttactggaaaaagtctgaaacttcactttcagaatatttttcaatatatttcccatttattctgagtacagcaccatagagagtactaggtcaagagctttctttatcttcaccataatc

SEQ ID NO: 559392 - DNA, 606 bp, Homo sapiens
tttttaaaatttttttgtagagacaggatcttgctttgttgcccaggctggccttgaactcctggcttcaagaactcctcctacctcagcctcccgaaatgctgaaaatagagacataagccacaacacccagcctctttcttttttttttttttccacttaactttagactctaattcttgactctcagattctgtaatatgaccttttatagtccctctcccccaggtaactacccactaaatcagtagttagtgtctgtaattatctggggaggataatgaaggcccatgtaagagaattaatgaaaaaattccatgaataaaatggaggtaaggggaattgattaatattcyctgtaacaaaattccatcatataaatctggaactacacttctccttagagatttatactaatatcttattctttgaacctacttaatcttgatatttttttactatacttaatgagatacacaaattccatttgaatgcagcacaaattattggctacatatgtttttaagttggatcttgaaacaagcaggaagattaacaacaagactgcctatctctgtaatctatagtctcaacttaaataacata

SEQ ID NO: 559393 - DNA, 536 bp, Homo sapiens
taatacttagcttggcagttattaggtctcagctccaaataaactcatttatacttggctctgatgctggggctgggactgtaaactaactttctccttagccatatgcatccattgagattctttcaatgggggacattaaagrgagattgcaaggcaggaagacagagaagggatattcttcctgttctcttgtaggatattacagctgtctgacaatcatctaatgttcaaaaattaatgtcattttattcatagaaaactgcaatgattttgcttattcagttccaaacatttttcttttacaaaatgggataatcgagatcctctttaaaatgtggtttaaatgtcttaaaaagtatcttgtaaaatatttattaattttgaaaattattttaaagtttaaatcacatggggccgggtgtggtggctcacacctgtaatcccagcactttgggaggctgaggtgggcagatcacgaggtcaggagatcgagaccatcctagctaatatggtgaaaccccgtttctactaaa

SEQ ID NO: 559394 - DNA, 584 bp, Homo sapiens
aatgctccatgtctgtttactctactgaaaaggattatttcaaatgaaatagcaamgttataatgtaaggacccagctctgaggactccagaacccttctcaaatgccccctccagtgtgctcccagacctccaacaggggagacatagtgccacttctcacatatctacttcggtctggtccaagtcacccctactcttgagcagggctgctgctaccccatatggtgcctctgtgtgaatttaagaaaatgtgcctcgtctgggtggttaaattagaaaaaggcacctcatctgggcaatttgcatttcctcagactggagatgactgcacccctcatccaggaggatacagacaacccccgagggcactgcttagagagcaggctgttggctgatttctatcatttcctgctttcctggcacgacatttctgtgaaacacaaactgcacaagtctacacaatgatcttgattttgaatctgttgtctgtctcattagttccatgaagactaaaatgtgatttcatggttgcagagtcctctactgggtacctatcaacacttacattgccttctctctagt

SEQ ID NO: 559395 - DNA, 623 bp, Homo sapiens
ggggacccattcaaaccatagcaatgttgcaacaggataaacccccaaaatcttatgttgtatgaaacaaacagatgtaaaattcatactgtatgatttcatttatgtatgactcaagaacaggtaaaatgaattaacttatgaagatgaaaattagaagtttttgcctaaagggaatagggacttaatggcaagacagcatgaaggaacattctgaggtgatgaaaatattccatcctcacaggaatagtggttaccctggtgtgtaaattcatcaaaacatcaaattgtatgctaaaaatctgtacatttcagtacacatgaatttaatctactttttaaaaagtcactatacaatgttcacaattaaaagcagaaagagaggactgggcgcggtggctcrtgcctgtaatcccagcactttgggaggatgaggtgggtggttcacgaggtcaggagatcgagaccatcctggctgacacagtgaaaccccgtcttcactaaaaatacaaaaaaaactagccaggcggggtggcacgtgcctgtaatcccagttacttgggaggctgaggcaggagaatagcttgaacccaggaggaggaggttgcagtgagctgagattg

SEQ ID NO: 559396 - DNA, 569 bp, Homo sapiens
ggaagagacaaagaggtaagctgacttgctgaagttctctagatgattcacttacagaactgagagcagaaattttgtatcttctgtttgattccctctagtggtgtagtgtcctctcagaagggtcagattcaatgttcagattcttagaaaggtgtcatcatgaaaaacaaaacaaaacaaaaatattcacatcaacaaggagccacctgtcactccacattttattttctctgcagattagaatctatacgaacacacctatgattcatgcatgtcaccctagagggagccacctagcatgtgcctggtgtcatgaaaggacactctcaaggagatgtccaaggagacaaacagaaatcttctacacttggtgatggaagtgaatgtcttcatggaaggcatgaaaaactccacattgctgtgggtatctctgactgatcagcttccacctgcctgygtgggattctgataatgggcctattttcaggtctaacccacgatctgtaacttaaaaaaaaaaacttttcaagattattctgaatttaatattttcatttccaggcagc

SEQ ID NO: 559397 - DNA, 312 bp, Homo sapiens
gaaaccctacactgctggaaasagttccttgatgtctcctgcctggattactgggttgcactcttcgtctgtgctcccctaagtgaggcttgttacattaatatcatgctgtgattgtcccttttcttgcctacttttgcatctttacggtccagtacactgtttacaactagtaggagttgaacattatttttaaaccaatatcagctaaataaataagcaacccaacttttttcttagcttaagaaagcaacagaagacatttattttttactcattacatgtttactgagtgtgggattgctatgtaaa

SEQ ID NO: 559398 - DNA, 312 bp, Homo sapiens
gaaaccctacactgctggaaagagttccttgrtgtctcctgcctggattactgggttgcactcttcgtctgtgctcccctaagtgaggcttgttacattaatatcatgctgtgattgtcccttttcttgcctacttttgcatctttacggtccagtacactgtttacaactagtaggagttgaacattatttttaaaccaatatcagctaaataaataagcaacccaacttttttcttagcttaagaaagcaacagaagacatttattttttactcattacatgtttactgagtgtgggattgctatgtaaa

SEQ ID NO: 559399 - DNA, 573 bp, Homo sapiens
tgggtgcagcacaccaacatggcacatgtatacatatgtaacaaacctgcacgttgtgcacatgtaccctagaacttaaagtataataaaaaaagaaaatacatataaaatatttattgagtttttattcatatatgtatatgtattcatgtattcatatacatacatgcatgtatatatatacacacacacaccaaaatatctaaaaatagacttawaataccaataattagcaagatataaaacaatttttacacttatacgttgctggttaagtagaaagttgtcatgactactttagaaaactggcaatatctaacaaagttgaagttaagtataacatacagcccccaaattttaattttactcctatttataacccaatgcaaatgtgtgtgtatatatatatatatatatatatgtgtgtgtgtgtgtgtgaacatatagatgcataacaaaagtatacaaaattgtttatagcactactattgtaataccaacatttgcaaatgactgaatttttgtcagcaacagaatggataaagatgggtaaaattttaataggattgaatg

SEQ ID NO: 559400 - DNA, 573 bp, Homo sapiens
tgggtgcagcacaccaacatggcacatgtatacatatgtaacaaacctgcacgttgtgcacatgtaccctagaacttaaagtataataaaaaaagaaaatacatataaaatatttattgagtttttattcatatatgtatatgtattcatgtattcatatacatacatgcatgtatatatatacacacacacaccaaaatatctaaaaatagacttataataccaataattagcaagatataaaacaatttttacacttatacgttgctggttaagtagaaagttgtcatgactactttagaaaactggcaatatctaacaaagttgaarttaagtataacatacagcccccaaattttaattttactcctatttataacccaatgcaaatgtgtgtgtatatatatatatatatatatatgtgtgtgtgtgtgtgtgaacatatagatgcataacaaaagtatacaaaattgtttatagcactactattgtaataccaacatttgcaaatgactgaatttttgtcagcaacagaatggataaagatgggtaaaattttaataggattgaatg

SEQ ID NO: 559401 - DNA, 573 bp, Homo sapiens
tgggtgcagcacaccaacatggcacatgtatacatatgtaacaaacctgcacgttgtgcacatgtaccctagaacttaaagtataataaaaaaagaaaatacatataaaatatttattgagtttttattcatatatgtatatgtattcatgtattcatatacatacatgcatgtatatatatacacacacacaccaaaatatctaaaaatagacttataataccaataattagcaagatataaaacaatttttacacttatacgttgctggttaagtagaaagttgtcatgactactttagaaaactggcaatatctaacaaagttgaagytaagtataacatacagcccccaaattttaattttactcctatttataacccaatgcaaatgtgtgtgtatatatatatatatatatatatgtgtgtgtgtgtgtgtgaacatatagatgcataacaaaagtatacaaaattgtttatagcactactattgtaataccaacatttgcaaatgactgaatttttgtcagcaacagaatggataaagatgggtaaaattttaataggattgaatg

SEQ ID NO: 559402 - DNA, 573 bp, Homo sapiens
tgggtgcagcacaccaacatggcacatgtatacatatgtaacaaacctgcacgttgtgcacatgtaccctagaacttaaagtataataaaaaaagaaaatacatataaaatatttattgagtttttattcatatatgtatatgtattcatgtattcatatacatacatgcatgtatatatatacacacacacaccaaaatatctaaaaatagacttataataccaataattagcaagatataaaacaatttttacacttatacgttgctggttaagtagaaagttgtcatgactactttagaaaactggcaatatctaacaaagttgaagttaagtataacatacagcccccaaattttaattttactcctatttataacccaatgcaaatgtgtgtgtatatatatatatatatatatatgtgtgtgtgtgtgtgtgaacatatagatgcataacaaaartatacaaaattgtttatagcactactattgtaataccaacatttgcaaatgactgaatttttgtcagcaacagaatggataaagatgggtaaaattttaataggattgaatg

SEQ ID NO: 559403 - DNA, 480 bp, Homo sapiens
ccaatcaccaatattgtcctttcaaaacaacacaacttgagagtgtgtatatttgcatataaaatacacacactaacgaattctgctttggagatatatgtagtacaatatatatgtaatgctgattacttaattcattcatgaagctttgtagcaggtgaataattacttgtataaactgaccttagtggctactgtaaaacagtctaattattgtgttctaaaagtggctgtaattaatgtaatctccaaagccataagatattaatatttcaggttacagattgtctgtaacatttgttgcacaagatggtagtttagtgtgcagtctgtgctataatttactgttagtctttaaatactgagctttaaagtgccaactcttaatatattgctgctgtagtatcataggtttgaactcaactccagataaaagtgagcarttaaatatgcagccaaactgaaacattagaaaaaatg

SEQ ID NO: 559404 - DNA, 574 bp, Homo sapiens
ttctgaggtaatgacattagggstttaatatgaatgagtgggggccttgggaattcagtccataataccatgaatctagagaattataagctgtcacatagagagatatactcatggtggctagcagaatgccatgcatgttaataaataagtattatttatttattcatgttttaagattcaactctgacaatatctaggtaaacaataaatttttgttgaatcaatatgattgattcaatgaataaatttgtttactatcttgagtggtcaccatcacactatgtgaataacacaacttaagggttagagacttagctgagatacaagttaatatattactcccatctttcttatttaaaagttagtattttaattaaacaattgaacttaagcaatgttacaagttaagcagataaatcttatttagcaagatctttctttagtaaatatctagaattgaatatttttctcgctttttcttctttattagctttaatcagacctaattcatatacttaaaaatggaggactgaatatttactacaattaaatcctatactgatactaaatc

SEQ ID NO: 559405 - DNA, 426 bp, Homo sapiens
aagagtagatacaaatgcataaaaacttcacactctaaaatgcaataacataaaggaaagcaaaatcaggtgacagagggcaaatatctccactgtaaagggtggagaagatttaacatttgctgatttttttttaaaaaaagcaaagcctctaagatgtcaatatgggcaaacatactcagggaagaagtaaactggtcaacacacaaacgaaaaaatattcattttcattagttgcaaaagaagtgtaaaggcaaaacataaatagattcaaattttgcttattaaattgtatttcaaatggtagtatattccgatggtttaaaaatcagaamgtataaaaagtgtatagtggaaagtctccttcttgtgtttattcccctagtgccagtttcccaaccctgtgcttagattttaaaatattat

SEQ ID NO: 559406 - DNA, 587 bp, Homo sapiens
tttatgattaaaaccctcagtaaaattggcayagaagggacataccttaaggtaataaaagccatctatgacaaacccagagctaacattatactgaatggggaagagttgaaagcattccccctgaaaactggaacaagacaaggatgttaactttcaccacttctcttcaacgtagtactgcaagtcctatccagagcaatcagacaagagaaagaaagggcatccaaatcggtaaagaggaagtcaaaccgtctctattcactgatgatatgaacgtatacctagaaaacccctaagactcatccaaaaagctcctagatcgataaatgaattcagtaaatgttttagtctgttttcatgctgctgatagtcatagctgagactgggcaacttacaaaaggaagatttaatggacttacagttccacatggttgggaaggcctcacaatcatggtggaggatgaaaggcacgtctcacatggtggcagacaagagaagagagtttgtgtagggaaactcccatttttaaaaccatcagatctcatgagacttattcactatcaccagaaagagctgcccccatg

SEQ ID NO: 559407 - DNA, 587 bp, Homo sapiens
tttatgattaaaaccctcagtaaaattggcatagaagggacataccttaaggtaataaaagccatctatgacaaacccagagctaacattatactgaatggggaagagttgaaagcattccccctgaaaactggaacaagacaaggatgttaactttcaccacttctcttcaacgtagtactgcaagtcctatccagagcaatcagacaagagaaagaaagggcatccaaatcggtaaagaggaagtcaaaccgtctctattcactgatgatatgaacgtatacctagaaaacccctaagactcatccaaaaagctcytagatcgataaatgaattcagtaaatgttttagtctgttttcatgctgctgatagtcatagctgagactgggcaacttacaaaaggaagatttaatggacttacagttccacatggttgggaaggcctcacaatcatggtggaggatgaaaggcacgtctcacatggtggcagacaagagaagagagtttgtgtagggaaactcccatttttaaaaccatcagatctcatgagacttattcactatcaccagaaagagctgcccccatg

SEQ ID NO: 559408 - DNA, 598 bp, Homo sapiens
ctcctgcctcagcctcccgagtaactaggattacaggcatatgccaccacccccagctaatttttgtatttttcgtagagatggggtttcaccatgttggccaggctggtctcaaattcctgagctcaggagatccgcccrcctcggcctcccaaagtgctgggattacagtcatgagccactgcgcccagcccaaagtgtgcttttctatccccaggatttgagggtggcagctccaggatccaccgtgaatgtgtgtgtagcccctgcctccctttcctccttcaagcagaggtgttcattatttctgtgtaatacattagacatgagcctgagatttcatttgaagaaaggagttggcttttctaataaaccctgagttctaggccaggtcccctggtggctgatagatctatttgcttttcagtgttagtgtccaggtgcactctacagttgtggctgagctgttgaaagtgtgcactccaaagtcaagtttaaaaatgggcccaccacctgcccaggtgggggatcttggccaagcacttaggctcacaagcctactgtgaggagtaaataagctaattcgtgtaaagtgcct

SEQ ID NO: 559409 - DNA, 598 bp, Homo sapiens
ctcctgcctcagcctcccgagtaactaggattacaggcatatgccaccacccccagctaatttttgtatttttcgtagagatggggtttcaccatgttggccaggctggtctcaaattcctgagctcaggagatccgcccgcctcggcctcccaaagtgctgggattacagtcatgagccactgcgcccagcccaaagtgtgcttttctatccccaggatttgagggtggcagctccaggatccaccgtgaatrtgtgtgtagcccctgcctccctttcctccttcaagcagaggtgttcattatttctgtgtaatacattagacatgagcctgagatttcatttgaagaaaggagttggcttttctaataaaccctgagttctaggccaggtcccctggtggctgatagatctatttgcttttcagtgttagtgtccaggtgcactctacagttgtggctgagctgttgaaagtgtgcactccaaagtcaagtttaaaaatgggcccaccacctgcccaggtgggggatcttggccaagcacttaggctcacaagcctactgtgaggagtaaataagctaattcgtgtaaagtgcct

SEQ ID NO: 559410 - DNA, 544 bp, Homo sapiens
tcttggggaaagtttgtaaaactctatagcaactaatttaaaaatgagaagtcagctgtgtaatttacttagtttctatccataattggctgctggctcattcattatcatccttttgactatcctatataaaatgcccctttaatggggcttataaacctaagttcctacagaaacaacaataacaaagagtcaaaatgaaaagaatggttaagtaaatacctggtcagtaaggatcactgagctccaaagcattttaattttttccccataataaatgcttaacctcaacaattcagtcgtatcccactctctwgtcaatatttatacatagaaatttatcttttaaaacacaagttgagccccacactgtgattcacattttcagaatgcttgtttattcagaatattttttagtaattgctgtggagtaatcataaggacaatccagttgtccttgttgtcattaaccaacaacaacaaatgtcccgagtaaccatgaatttataaatttattttaatacttccttagagctgtgtgtgt

SEQ ID NO: 559411 - DNA, 531 bp, Homo sapiens
gttcattgcagcactattcacaatagcaaagacgtggaatcaacccaaatgcccatcaatgacagactggataaagacaatgtggtacatatacaccatggaatactatgcggccataaaaaggactgagaacatgccctttgtatggacatggatggagctggaagccattatcctcagcaaactaatgtgggaacagaaaaccaaacactgcatgttctcacttataagttctcacttatgagagttcaacaatgagaacacatgggcacagagagggaaacacacacactggggcctgtcagagatgtgttggggaaggaagagtatcaggataaatagctaatgcatgctggactttatacctaggtgatgggttggtaggtccagcaaaccaccatggcacacgtttacctatgtaactgcacaagtatctcagaacttaaaatgaaagaaaataatttaraaataaataaataaatgtcatttctgagtagtggagataggcaaggaagcatttaggtaaggggt

SEQ ID NO: 559412 - DNA, 548 bp, Homo sapiens
ataggaaaaaatataatcttgattcctatctttcctatctttcagcatacacaaaaattaattccaggtagattgtagctctaaatgtgaacagaaaaagaaatgaagtttctagaaaatatcataagagaataccttaatgacattaggttttaaaaagttttcttaaacagaaaacaaaagtataaaccatgaaggaacatgataaatrgactatattaaaattgtgaacttgttttttttaatcaaaaagcatctttaagggagtacacagtcaaatcacagattatgagaagatatttcaattcttatgcctgacaaagggttccaatctggaatgtcgaaaatacttctaattcataatgaaaagacagacaatcccaaataaaaatgacaaaagacatggccttgaactttataaaacaggatagccaccaaacatttgaacaggtgctcaacctcattattcatgagtgaaatgcaatttgaaaccgtatgagatggaaccatgcacataataataatggctagcttttttaaaaatatac

SEQ ID NO: 559413 - DNA, 548 bp, Homo sapiens
ataggaaaaaatataatcttgattcctatctttcctatctttcagcatacacaaaaattaattccaggtagattgtagctctaaatgtgaacagaaaaagaaatgaagtttctagaaaatatcataagagaataccttaatgacattaggttttaaaaagttttcttaaacagaaaacaaaagtataaaccatgaaggaacatgataaatggactatattaaaattgtgaacttgttttttttaatcaaaaagcatctttaagggagtacacagtcaaatcacagattatgagaagatatttcaattcttatgcctgacaaagggttccaatctggaatgtcgaaaatacttctaattcataatgaaaagacagacaatcccaaataaaaatgacaaaagacatggccttgaactttataaaacaggatagccaccaaacatttgaacaggtgctcaacctcattattcatgagtgaaatgcaatttgaaaccgtatgagatggaaccatgcacataataataatrgctagcttttttaaaaatatac

SEQ ID NO: 559414 - DNA, 636 bp, Homo sapiens
gagaacatgcagagtttggttttctgttcctgtgttagtttgctgagaatgatagtttccagcttcatccatgtctctgcaaaggacatgaactcatccttttttatggctgcayggccagcttttttaaaagaacaacaataccaagtgttgcaataccagatgtggagcatctggtgttacacgcccccccccacacacacgcacacacacttacaaacatacacacacataaatatgtgatatagaatgatctatctctctatctttaaagggagtgttttgtgtcttgaaccgtttgagattagactgtagacagaatgcctaattataccttaatagttcagtatatttcctaaaaacaaagatactctgctacagaacaacggcattaaaaatatgaaatcaggaaattaacatcagtttaatgtcaccatctgatccaaatatttcattaaggcttttttcattgtcctaatcatatcctttacaggttcatggtccaatccaagatcatgttgcatttagctgtcatgtctctttagtttccatcaatatgaaatagttgctcagtctttccttatattttgtgaccttgacagtaagatcagttacttagcagaatctccctcaatt

SEQ ID NO: 559415 - DNA, 636 bp, Homo sapiens
gagaacatgcagagtttggttttctgttcctgtgttagtttgctgagaatgatagtttccagcttcatccatgtctctgcaaaggacatgaactcatccttttttatggctgcacggccagcttttttaaaagaacaacaataccaagtgttgcaataccagatgtggagcatctggtgttacacgcccccccccmcacacacgcacacacacttacaaacatacacacacataaatatgtgatatagaatgatctatctctctatctttaaagggagtgttttgtgtcttgaaccgtttgagattagactgtagacagaatgcctaattataccttaatagttcagtatatttcctaaaaacaaagatactctgctacagaacaacggcattaaaaatatgaaatcaggaaattaacatcagtttaatgtcaccatctgatccaaatatttcattaaggcttttttcattgtcctaatcatatcctttacaggttcatggtccaatccaagatcatgttgcatttagctgtcatgtctctttagtttccatcaatatgaaatagttgctcagtctttccttatattttgtgaccttgacagtaagatcagttacttagcagaatctccctcaatt

SEQ ID NO: 559416 - DNA, 541 bp, Homo sapiens
ctgtcacccaggctggagtgaagtggcacgatctcggctcactatagcctctgcctcccgggttcaagcgatactcctgccttagcctcctcaatagctgggactacatgcatgcaccaccatacccatctactttttgtagttttttagtacagatggggtttcaccatgttggccaggctggtcttgaacccctggcctcaagtgatcctcccgccttggccttctaagttgctgggattacagacatgagccaccaagcctggccatgagccactgtacccagcccagattggtttttaaatgtttttgacacgtctccatctttctttgagtaatccctttctctttgacacgatagaatattctaattctggagtcagccacttatcccaggagctcttgtttctatagtggaggatagtatttataaamtgggcactgaagcgcacattaccaccccatgtgtcattctttctaggctttctcagtaaacataactagtatacctatgtttatgtgttcccactaatcaccattt

SEQ ID NO: 559417 - DNA, 599 bp, Homo sapiens
ataatgataaaaggactagtccaacaggaaaatatcagtcctaaatatatatgcacctaacactggagctcccaaatctataaaacaattactactagacctaagaaatgagatagcaacacaataatagtgggggacttcaatactccaatggcagcactagacaggtcatcaagacagaaagtcaacaaagaaacaatggacttaaactataccctagagcaaatggacttaagggatatttacagaccattctacccaacaactgcagagtatacattctattcatcagcacatggaacattctccaagatagacattatgataggccacaaaacaagtctcaacaaatttaagaaaattgaaattatatcaagtactctctcagaccaaagtggaataaaattggaaatcaactccaaaargaaacctcaaaaccatgcaaatatatggaaattaaataatgtattcctgaatgattgttgggtcaacaatgaaatcaagatgaaaattttttaaatctttgaacggaacaatgataatgacacaacctatcaaaacctttgggatacagcaaaaacggtactaagaggaaagct

SEQ ID NO: 559418 - DNA, 480 bp, Homo sapiens
tatgcacacacctatacatacagcttctcattcatacataggggttgttaagtctccattatccacaagtaggttagatctctactgaagttaacaggttggtttaggtttgacttaacttttatttgacagatagcctttggaattgaaaatcattgtgataaaacattagagtacatgcaaaaagattaatagtcctatcaatttcaaagaactacttgtttctcactttccattatttakctttttctacataaatcttcatatcatctcaatcatcatgaatgccaaattttgtgtcttcttttttcactgaatatcataaacattttctgtgatgccccttagttttcataactgccattgtgatgacagaaaaatatttcatcaagctgaagttacacgtctcaatatatagatatttagctggttatttaggtttttgatatgtagatatttattatagatatttagcttgtt

SEQ ID NO: 559419 - DNA, 413 bp, Homo sapiens
gggaggaattttcctccacatgattggaaaggaaacctatcttgctgaaatgaaagcctagtcttccttccttccctccctcctccccacccaccctccctttcttccttcctctctctctgtctttctccctctctgtctttcattttggccttttatcagttggattggggagctcagaacaaggctagcacaatgtcaccaggaaaatgtccataaaaatgtaatcagaaggaagcagtcccattaataagagcacatagcttactgggacaacattaagtgcttttaagactttgawgtgagtctttgcttctctctcgggagtatcttcatttacaaaggctcctaatcttggagaggtgtggacagaggtagaggcaggaactagaagccgtgtaattgtactggtc

SEQ ID NO: 559420 - DNA, 548 bp, Homo sapiens
gggacacatgtggatagcttagagaaaagatgtatctgaaagtgttgtgagcccagaggctttgaactaagactttaacagctataagcgaaatcataacagtatayatttaaatccacatccctgggactttcatgcctcaagacgggtagagtgaatgatttaacatagcctcaaatagaacatgtgagtgactttctcagaaccgcagtatagagagcagaatttgggattttagcaaaatcagatgtttttagtgttaagtggcacatgtcaaccaagccatcgtgttccttcaaaaagagtctatcctggagtttctttgggaagttttcagcattttatgtttttgcctgaaaatgagacctgtggttgtaaagctccggaggttcaggttctgataagtgcatcagctatacaaaagactattcagaagtcctgggaatgtagaatgaggagccatttacctgcccccacacccaaaaaaactaaagtgaaagaagctgatatgtgagtttgtgtctgtgggtgtgtgttgagttttgggt

SEQ ID NO: 559421 - DNA, 535 bp, Homo sapiens
taatctgcactatagaacaaagatggatttaataaatatttatagaacatttcattcaatgactacagaatacacatttttcttctcagcacwtggatcattcttagggatagatcatatgttagggtcacaaaccaagtttaaaacgttgaaagaaactgaaataataccaagcatcttctgtgaccacaacagaataaaactacgaatcaataataagaggaattttggaaactatataagcacacagaaactgaacaataggttcctgaatgaccagtgggtcaatgaagaaattaagaaagaaactgaaaaatgtcttgaaacaaataataatgggaacacaacataccaaaacctatggttatagcaaaagcagtaagtactaaaagggaaatttatagctgtaagtgtctacatcaaaaaagataaacttcaactaaataaccatttccactgatgtatctttactagaaaagcaagagcaaacaaaaccccaaattaatagaagaaaagaaataataaagatcagagc

SEQ ID NO: 559422 - DNA, 572 bp, Homo sapiens
caaaagttctctgaagttttaccgaaataaaaatggtgagttatgcatatattctgggacattttttctgatactgastttgactctccatgaatatttttacaaggagttgtttagcattcagttgattattttttgttatttggtccaactgcagtttagatgatacagaatgaacatagaaaaccatagcattaatcttgcactgtaaaagccctatttgtattgtgacaaaaatataaatgtgaagtaagcagaaaaaaaaagctatgtaagctcttttctgaccacggaactgttaaaaagtatttgagtcttatgttgtttggtaacgtttctattgtgcttactataaatgcgaaaataattatgctactgtccaaaatgattctaaagtttcatagtgaactatttttatcaaaaatttattagttcctcaggtaaatgtgaagcattgaacttaatacaattaccaagatctatgaaatacagaattaatattcaataccgatctgaattatatggatcagtaaatatttgatctaaggaactaaaaaggaaaaatgcatgtt

SEQ ID NO: 559423 - DNA, 572 bp, Homo sapiens
caaaagttctctgaagttttaccgaaataaaaatggtgagttatgcatatattctgggacattttttctgatactgagtttgactctccatgaatatttttacaaggagttgtttagcattcagttgattattttttgttatttggtccaactgcagtttagatgatacagaatgaacatagaaaaccatagcattaatcttgcactgtaaaagccctatttgtattgtgacaaaaatataaatgtgaagtaagcagaaaaaaaaagctatgtaagctcttttctgaccacggaactrttaaaaagtatttgagtcttatgttgtttggtaacgtttctattgtgcttactataaatgcgaaaataattatgctactgtccaaaatgattctaaagtttcatagtgaactatttttatcaaaaatttattagttcctcaggtaaatgtgaagcattgaacttaatacaattaccaagatctatgaaatacagaattaatattcaataccgatctgaattatatggatcagtaaatatttgatctaaggaactaaaaaggaaaaatgcatgtt

SEQ ID NO: 559424 - DNA, 549 bp, Homo sapiens
ttttagcatttgattcagattggttggttttgaggatgggagaagaggggaatttgtattgaccgtaaggcttggcggtggctgcaccactgcaccaatctgggaaccatttaagtccctcagaagactacagtcctgcaccatataatgacatttcagtcaactgtgaacagcacatacgacagmggtcccataacattataatggagctgaaaaattcttattgcctagtgacattacagccatgctgaacaccacacattactcacattctatgatgctgctgctgtaaacaaatgtacaaagctgacggtcatataaaagtatagaacatattaatacaattaggtacagcacatagtatttgataaggataacaagggactctattactggttatgtgttgactatcctttttgtcattattttagaacgtactcctgtttgtatatattttaagttaagtgtcaaacagccttaggctggtctttcaggaggtattccagaagaaggtattgttatcataggagaggacagctccatatatgt

SEQ ID NO: 559425 - DNA, 497 bp, Homo sapiens
agctttccattattgctggacctgtaatgctgcaatatctcttcttttgtttccttagattctgcccacaattttataaacaattcctttattaacttctcctgacattacccagtctgagagtcccatctgtttcctgtcagacccctggctgagacagtcactggttgatcaatgtcgcgttcggattaaactagcttttgccccggcaaartgatggcatagctttggaggatgctgtgagagcaaacagagcttgcacttgaggacacttttcctcttcatgctggatgggaagccaggtaaaaggaacctctgatcttagacaaggcctacattgccaataattaggggcagtaatttctgcccaacataagtctttggactagctcctattccatttggaagcacagataagataattatgtgataattctttcaaaagtaagacttcttagtcttaccttcattccaaggttgaggggaatagctgagga

SEQ ID NO: 559426 - DNA, 575 bp, Homo sapiens
ctttttatatagtaaatactctcattacatagccagtgctgttaatatgagattgcaaagagagagacatagagatacacaagcccagactgtgtataggacttcagagaaatcagtcacaaataaggtattaaaaaagataaaatatagtagaacatcttttttcaaggcacatcacaaactaacgcctgatgatggaatgtgtagtgcacaaattactggatttatttttaaagacaaatgatgtcttttttgtggtcttttgaattcatcagatgtttacataggcaaatagggccctctttgacccccttattcatccccckcaataattcactctgacatatacagaacattttttctcaaggacatttgaaagttcagaactatggggtactattgattattttagtcagtgtaccatgcctgtcattttatcctgcttttgtacctcatcagaatttaaacctatttttagttccacatgggcataattgtatatgatctaaaaaaatcatggtgagaataacatcggacaaaatctaaaatgctccctatagcttgtatggcaatag

SEQ ID NO: 559427 - DNA, 591 bp, Homo sapiens
agatataaatccaggtatatgggaaggagaatcataatcaatgaactggttaccaagttagtctgggttcagaatcaggggaattcgtcagaatgtgtaaatggctggtgtttttaggccatgacaacctaatgcatttttctctcaccagggacacatttgctacatggtccagagacttgtgttcctggcccagaatctccttgtcctatcaattgttggaaagacactgcctgcatttgcccttttgcctctctctgttctgtacttgcactatcaaataaaaacaatttctaatggataggcatgtttactcataagagtttttaagtgatgtgtaaactaaatgctgaaattttaagctaaaatgctacttattcgcttgcatggaaatactaggtaataactgactaagtgctgtgctgactttatgtggaagcaagatggagtttcagtaacattctccacgtgctgttctgaaaaatcatgaatacctgattatacataaattctctttgaaagggaatacagtgtttttacttagcaggaacaaaatgrtttttcagtttttccatataagcatctctcttc

SEQ ID NO: 559428 - DNA, 245 bp, Homo sapiens
tcacacatttaaaaatattacctcataatatgttgtcttattggtagatctaatgtaatgggttttatatttcactatatacaaaatttttaataataaaaatatttyctttaaattcacatcagagcactttctggatttgtaagtactttttggtttcaaaaatacatgttaaatttgagagagaatttctggattcagaaagagtttaatatttaacacacaaaatgtgttttaaatcatct

SEQ ID NO: 559429 - DNA, 611 bp, Homo sapiens
tcttccaaactagcattgtttacttggatttgcgaaaaagcctctaaacttgtctttctgctcttagtcttgccccatagtctgttatccagatagcatttaatgcgacagtttttgaaagtatatatcataattcttgtcagtcctctgctcaaaaaaaaaaaaaaaaaccctcaatggctttctattgstctcagaatacaatacaacaggaccctgtctgtcaaggccttacctgcttgccacttcacctctcttacctccttctctaccactgtcctctcctacatcttgtcacagattctctggctttcttttgctctttcaacctcattctcctgtctcttgacctttgagctagaactcttcctgttaatatttagagtcttgctcctcagctacatcagatgtctactcccatgtctgctattggagaagcaatccatcaccacccattctacaaatagccccctttctcaacctcctcattctttgtctccttaattaatttagttttccttttaatacataagttaacatgtgtgtgtgcattgtctgctgttttccccctacagtgagaacagcaacttggttatagtgccaggaacata

SEQ ID NO: 559430 - DNA, 567 bp, Homo sapiens
  misc_feature 189: n = A,T,C or G
ctgtgtctgcaattcagaacttcctccttctgacttattctctctaggctgagggcagaggcatttttgggggagaataaagtggtggactaattttgaaagtctaatcatggcaaatattagaaattactggtagaattgttgttaagattcactaaggaaaatatcagtgaaagtgttctgtaccgntttaagtgccaattattatcaracaaatataattatgggttcaaaaatcactaagagtgtatcttgtatgttgactttaataagaatggcagaacactttcatcaagagatcctttccttttggattaccagctgtgtcctttattgatatggaatagctgaaagataggtaacagaattatccactgaggatatgcagaattatttaacagtctctttcttttcaccacctactttgaaaggaaaaactgtatgggctggaatatatttcttcatcagaaagttccagtataaacacatcacaaactgatgttttcttttcttctttcatcatgaaaagtcaacatacttagttgtatttgaccaacttgtcaagct

SEQ ID NO: 559431 - DNA, 472 bp, Homo sapiens
tttgcttggatgtatcatttttactgaaagcaaaaggactcatgctccgctacttaatggatgcatataaagaattaagttatttgttgtggaataaagaatttaagaggaacactggaatatcagagctcgtaatagatggtgagtgctggtcttcagggtctacacagtactgtgtaagattcagaatgtaccaggaggaaatttcaagtaattttgtcatccatcatcatcacaaactacaacagcatggtggatggggaagatatgggctttggagtcagacagattcaagaggaaagtccagctgcactctgtcctggctgtctgaccttggcccttttttgtgcctgtttctccaaccgtgaaatgagcctattttgcaggctcrccacaagagtgaagcaggacaggacacatgcagcacgtagcacaggcctggtgcctggggcaccctgattaaactgtagtt

SEQ ID NO: 559432 - DNA, 453 bp, Homo sapiens
tatttcaatctctgtgcttggtatcaagagaacatcagtaagtcttatctattaatattgtcatagaagttatgcttatgatgagtttgcaataatccagagaaatgctgctattattgaggggaaagtgtggaatagtaatgtgaaatacattcgactgaaacaacagtaaataagtatgtgcaacccaaataaaattgggcctcatgcattcacatgaagcactgtcttagcagagtgacatagcagaaagaaacacaaactgattcttggaaagctgtgaaccatgtagctgcttatgaatagagaggyatggcttacctcacctattatgcaccttacagtgaacctcctaaaaaagtctctttgaaatgtttccctctggagtctcacctttcatggcaactgctcaaatctgtctttctgcctctcaggacctgggatctcttccct

SEQ ID NO: 559433 - DNA, 603 bp, Homo sapiens
ttcctataaccattccttaaaatatcagaattcaaatgactccagtaaatttagagacaaaaatgatacaactgcctaatatgttaaaagactttctttcgagatactctaggaaggctaagaagagagctaacccttactgagcacctactatgtgctttacatgcatgaggattttataacatcctcataaccctctgaggggggaggggatgctgttcccattttacagttgaggaaagtaaggtcatatttcaccgaagttgcatagttaatgaaatgccagagtttggtcaaaatgaaaaagcatcgaacagatcacttaagaaagacagcttggaagggtttatgtaacaaagacagcttagaagggtgttatgttttgaataagagaaaaagactattttatctcagcaccactgaagataagtgaggtttctcctagtacccaccatatctttrcacgactggaattctcttatcagcatttctggatgtaccttgggtttcagatgtatatcatacttgctagttgtatttcaggctacattggaagatttagaagacttggcacttttcaggcagtgttatgtaatggaactg

SEQ ID NO: 559434 - DNA, 664 bp, Homo sapiens
ttgtaataatcttagcttgtaacatctcattttctgcaaccactaaaatcttatctgccctgagatatgtgagtgtttaacagatgagaaccttttgatagaggaaagacgctgcttgttttctcagaagtaattttcttaataattgcttacctttatatttgaggcagtccatattgaatccttaaatctagagaaaatcataaaaaaaaattaacagacatactatataatgatatgcaatcaatccttggcttttgcctttgttgccccggcattagaaatatttacttctatagtcacggtttaaggattcatgaaccccattttttcaaactaaaatcattcttgctttcgacactgcacttgtttcyatttaaaaggggagttttgttaacatcagtgggtattttgcctccaagtgaggctaccttccaagcagggttgccatagagcaaattgcatttgacaaggctgtctggggaagatttagcagtagttagattaagcttgagcttgccatttaatccaccactactggtattgtgtgctaagctgatgatcatacttagaagcacaacaattaggttattagttttctctctttttttctttttttattatactttaagttctgggatacatgtgcagaacatacaggttt

SEQ ID NO: 559435 - DNA, 558 bp, Homo sapiens
agattaacagagaaaagaagagagaagacagtctgtagtgttcttttagtgttaagtcctttcctggttttggtattagggtaatactggcttcatagaacgatttagggaggattccctctttctctatcttttggaatactttcagtaatattgtggcaattcttctttgaatacctggtagaattcagctgtgaatccatttggtcctggcctttttttgttgttggcgaattttttattactgtttcaattgcactactttttattggactgttcagagtttgttgaggatttttgcatctatgtacatcaggaatatgagtctgttgttttcttttcttgttatgttcttcagcatatcaaaaagataatacaccataatcaagtgagtttcataccagggaggcagggatggttaaatatatgcaagtcagtaaatataatacaagacataagcagaattaaaaacaaagatcatatgatcatctcaatagatgcagaaaaagcatttgacaaaatccrgcatcacattgttattaacagcctcagcaaatt

SEQ ID NO: 559436 - DNA, 495 bp, Homo sapiens
aaggacttgtacttaaactagatttaaaaaattcactaggtttccagaatttgtcaaatttgggcaatgtttagtaatttttctatgtttgcaagacatccctaaattttttaccaccaggcctgtatgaatctgacctttatatttcagacacttagtcttattctgatgcttaataataactgactgaacctccagatcttcatacatcaggtctaagccatctaccatgaatttacacacacttttctgcccacagactggcttaaaaaaattacccacctgtaaaaaggaattagtaggacctgacctacccacaggaataagaagacattattgacagaggtgtatttaaagtactaatagcctcattttacagactagagtaatgaggacytaagaaatgcagtgactcaactaagacagcagagctgaaactgaaacctagagtttattcttcctggttgggtgctatttctctagaccacatagtat

SEQ ID NO: 559437 - DNA, 439 bp, Homo sapiens
tttggagtttaattattaaatgcctagagtcagtcttctttgggttaaatctacttartgttctataaccttcttgtacttgaattgtggtatttttctctaggtttgagaaattctctgtcattatctttttgaataaacattctagccctctctttttctctatatattctctttaatgccaacaacccttagatttgctttcttgaggctattttccagttcccgtaggtgtgctttatttttaaaacttttttcttttgtctcctctgactaaaaactttcaaatagcctgacttcatgctcagtatttctactgttaaaagactctgatactttcttcagtatgtcaattgcatttttaactttagaatttctgcttgattctgtttaattatttcaactttttgttaaatttatcttatataattttgaattc

SEQ ID NO: 559438 - DNA, 628 bp, Homo sapiens
ctaggttaaacatggcttttttttttagcactttaaatatgtcatgcctcttgacgtatttaaatatgtcactctctcttggcctgtatggtttccattgaaaagtctgctgccaggcatatttcagccccaatatatgttgtttgtttgttgttttcttgctgagtttagaattctttatttataataagtcttttggagtttaattattaaatgcctagagtcagtcttctttgggttaaatctacttaatgttctataaccttcttgtacttgaattgtggtatttttctctaggtttgagaaattctctgtcattatctttttgaataaacattctagccctctctttttctctatatattctctttaatgccaacaacccttagatttgctttcttgaggctattttccagwtcccgtaggtgtgctttatttttaaaacttttttcttttgtctcctctgactaaaaactttcaaatagcctgacttcatgctcagtatttctactgttaaaagactctgatactttcttcagtatgtcaattgcatttttaactttagaatttctgcttgattctgtttaattatttcaactttttgttaaatttatcttatataattttg

SEQ ID NO: 559439 - DNA, 560 bp, Homo sapiens
atttaggctgatttcataattttgcaactgtaaattatgctgctataaacatgtgtgtgcaagtatcttttttgcataatgacttattttcctctgggtagacacccagtggtgggatggatgtatcaaatgataattctacttttagttccttaagatgtttccacattgttttccacagtggttgtactacttcacattcccaccaacagtgtaaaagtgttctctttttaccacatccctgccaagatctataattatttttttttaattttttcattatggccattcttgcaggagtaaggtggtaacacactgtggttttgatttgcatttayttgatcattaatgatgttgagcattttttcacatgcttgttggctatttgtacatcttcctttaagaattgtctattcatgtccttagcatattttttgatgtcactcttttctttttttatcttgctaatctccttgagcttcttgtagattctggatattagtcctctgaaggatgcacagattgtgacaattttctccaacactgtgggttgtctgttt

SEQ ID NO: 559440 - DNA, 167 bp, Homo sapiens
gatatttctcccatttgcttttgaaagaagagaaatatggctctgttctgcccagctcaccggcggtcagagtttaaggttatctctcttattccctgaacaaytggtgttatcctgttcttttttcagggtgcccacatttcatattgctcaaacacacatgctgt

SEQ ID NO: 559441 - DNA, 167 bp, Homo sapiens
gatatttctcccatttgcttttgaaagaagagaaatatggctctgttctgcccagctcaccggcggtcagagtttaaggttatctctcttattccctgaacaactgstgttatcctgttcttttttcagggtgcccacatttcatattgctcaaacacacatgctgt

SEQ ID NO: 559442 - DNA, 612 bp, Homo sapiens
aagcaagactaagcaaatagaacaaatttggaggtatcacaatactcgacttccaactatactataacgccatagtcaccaaaacagcatgatactggtataaaaataagaacacagaccaatggaacagaatagaaaacccagaaataaactcaaatacttacagacaactgatctttgacaaagcaatctgaaacataaagtggggaaatgacaccctactcaacaaatggtgctgggataataggcaagccacatggagaagaatgaacctggatcttcatctctcacttcatacaaaaatcaactcargatggatcaaagacttaaatctaagacctggaaccataaagattataaaagataacatccgaaaaacccttctagacattggcttaggccagaactttatgaccaagaacccaaaagtaaatgcagcaaaaccaaatataaatagatgtgacttaaactaaaaagctcctgcacagctaacgaaataatcagcatagtaaacagacaacccagagagtgggagaaaatctttacaatctatacatctgacaaaggataatatccagaatctacaaataactcaaacaaattagcaagaaa

SEQ ID NO: 559443 - DNA, 609 bp, Homo sapiens
tacattttgggttttattctgaatgaggtgggaagtcactggaggatctcgagcagaatgacatgatctgaattacaattttaaatgatcaccctggctgctgtaaggagaataaagtgcagcaggaataggtggaagcaggaacaccagctgaggtcaatatcatgctccaggcaagagatggtggtgacttggactggggtagtagtggtggagatggtgagaggtggtcagattatgggtgtattttaaagctgagaacacaggatttattaaccaattggatgtggggtatgagagaaagagaggcgtccctgcaagtttgcagcctgsgtaattggaagagttagaatttcccaagttgaacaagactgagggaggaccaaggtttttgtctgcttgcttggtgtttatttgcttgttgagggtttgtggagaagaccacgtgtttggtttgaagactatgtattagatatctaagtaaagatagtgagtaggcaattaattggatatatgagtctggaactctgggaaagtttcaagctggagacagggaaggctcctagctggggagggagggagaggagactcaaaaactgagtccaaata

SEQ ID NO: 559444 - DNA, 624 bp, Homo sapiens
ggtttcaccatgttggtcagggtggtcttgaactcctgacttcaggtgatccacccaccttggcctcccaaagtgctgggcttataggcgtgagccaccaaacctggctatttactatatttaaataaatatgggtttttttctttttgaaatacatttgttttgtttattcaagtactttaactcaagcaatttaacaaatgtttattaaatcaagataccatgcaagaggccaaagaataatatattaagaacactggaagttaaaaattaaaaaaaaaaatctggcctgaattctacctcctccacttatgaactttcaaatcttttttttctagcaaacgttgtccatcgctgttaagatgaccttgaacactttacatgactttctgagcctctttttcctcattaaaagagagattgcatcacccactctgcttactcacaaggaatttgtaaggattaaattaaataatgactatgcarataaaagtactgttattcgagcgagactccgtctcaaaaaaaaaaaaaaaagtactgttattcagcagaagagaggcatgtgcattaataagcacgatgatagtttgttatatatagtgagaaatactactgatgagc

SEQ ID NO: 559445 - DNA, 585 bp, Homo sapiens
aatagccaacaagtgggaaacaacccaaagtccatcaactgatgaacagataaacgaaaggactgagacacactataatgtacgtgaaccatagaaacactgtgctaagtgaaakaagccagtcataaaaggccagacattgtataatcctgtttatttgaatatttcctttgttttcttgctttcattaaaatgtgtgctttccttgaagatacagtttctccatctaatattttgtagaagctgtttaatttcacttttctgaaatagcttttctaccactgggtctggaagtagcaaagacattctttgtgttcttcattgtctgttctaggctcttcttcctccatcgtccgtaaataacaccaagagtgaatctcctgttatcagattacatcatctatcttccatctttggttcaaatatcttatttattacttctctgcctcttcaaacttagtttaattgatgaacatattaactagcataaaattgtcatgtaaaattctaaattaatcacttagtttccaggaattggtgtgtgtgtgtgtgtgtgtgtgtgtgtgtgtgtgtgttttgttcgtt

SEQ ID NO: 559446 - DNA, 585 bp, Homo sapiens
aatagccaacaagtgggaaacaacccaaagtccatcaactgatgaacagataaacgaaaggactgagacacactataatgtacgtgaaccatagaaacactgtgctaagtgaaataagccagtcataaaaggccakacattgtataatcctgtttatttgaatatttcctttgttttcttgctttcattaaaatgtgtgctttccttgaagatacagtttctccatctaatattttgtagaagctgtttaatttcacttttctgaaatagcttttctaccactgggtctggaagtagcaaagacattctttgtgttcttcattgtctgttctaggctcttcttcctccatcgtccgtaaataacaccaagagtgaatctcctgttatcagattacatcatctatcttccatctttggttcaaatatcttatttattacttctctgcctcttcaaacttagtttaattgatgaacatattaactagcataaaattgtcatgtaaaattctaaattaatcacttagtttccaggaattggtgtgtgtgtgtgtgtgtgtgtgtgtgtgtgtgtgtgttttgttcgtt

SEQ ID NO: 559447 - DNA, 585 bp, Homo sapiens
aatagccaacaagtgggaaacaacccaaagtccatcaactgatgaacagataaacgaaaggactgagacacactataatgtacgtgaaccatagaaacactgtgctaagtgaaataagccagtcataaaaggccagacattgtataatcctgtttatttgaatatttcctttgttttcttgctttcattaaaatgtgtgctttccttgaagatacagtttctccatctaatattttgtagaagctgtttaatttcacttttctgaaatagcttttctaccactgggtctggaagtagcaaagacattctttgtgttcttsattgtctgttctaggctcttcttcctccatcgtccgtaaataacaccaagagtgaatctcctgttatcagattacatcatctatcttccatctttggttcaaatatcttatttattacttctctgcctcttcaaacttagtttaattgatgaacatattaactagcataaaattgtcatgtaaaattctaaattaatcacttagtttccaggaattggtgtgtgtgtgtgtgtgtgtgtgtgtgtgtgtgtgtgttttgttcgtt

SEQ ID NO: 559448 - DNA, 680 bp, Homo sapiens
gaatgtcatctagcatttgtggctcaggtggggatactgtagcttgcctggcatgatgaggtcaaaatcagtgatgactgatgtcacaggtaagaaractgctaaagacaaatgacacccatatcctaaggacaaattccacataattactcctgggcacttaaaacacgtatttgaagtcaactgtgttttaacacataataatattaatatacctaataatattaatatcattgaattattgtgggaatcaaataagacaccttgtacaaagcatcctttgcaatcaattctcaataaaagtcagttatgttgtgcttttgagtatcacttgcactacacattaaaaacaatgaactttgtttttctttctacaactgaatcttcttcattgtctttctgtctcccaagagtgagggacaaatctctctactatctttccacacctacctacgaccatttatgttttgtctaatccagtaaccttgtcccaaaccaataattttaagtatttaaatgtacatctaattttctttaggtatttaatttattgtgcataaatatccagacttttagtcacctctcaagtcttgttctcccttccaatacggtgtctgcgtctaaggaaggcaggtaagagcttctgtgatttcatagaagggcttcttaattccacccct

SEQ ID NO: 559449 - DNA, 538 bp, Homo sapiens
acatggaggcatcagaaataggtttttaatcttccagattgtgcattcaaacaacactatacaatatagatagaagcaaaatcatagattttttagtcagaaaaacttgaaaagagattacttcttaaagtgtcacacccacccacgcaaccacctacacacacatgtgcacacatatacaagtgataaataataattattgccacttgcagggtttttctgagtatagaaatctagaaatctctgagtacctcacacaatgccatgtatatattatgctcttaacaaccattttctctttccacttctccttttaattcataagttttggtagcctctaccatttattgcattgctctctctctctctctctyttttttttttttttttgttgttgttgttgagttggagtttcgctctcgttgcccaggctggagtgccatggtgcgatctctgctcactgcaacctctgactcccaggttcaagccattctcctgcctcagcctcccgagtagctgggactacaggcacgtacca

SEQ ID NO: 559450 - DNA, 538 bp, Homo sapiens
acatggaggcatcagaaataggtttttaatcttccagattgtgcattcaaacaacactatacaatatagatagaagcaaaatcatagattttttagtcagaaaaacttgaaaagagattacttcttaaagtgtcacacccacccacgcaaccacctacacacacatgtgcacacatatacaagtgataaataataattattgccacttgcagggtttttctgagtatagaaatctagaaatctctgagtacctcacacaatgccatgtatatattatgctcttaacaaccattttctctttccacttctccttttaattcataagttttggtagcctctaccatttattgcattgctctctctctctctctcttttttttttttttttttgttgttgttgttgagttggagtttcgctctcgttgcccaggctggagtgccatggtgcgatctctgctcactgcaacctctgactcccaggttcaagcsattctcctgcctcagcctcccgagtagctgggactacaggcacgtacca

SEQ ID NO: 559451 - DNA, 605 bp, Homo sapiens
cctatgcctttgtattttctcttggtcccgcttaacatacccacgcttataagtaagtgatagtacaagcaatttggggtgtccgcagcacagaatattcaaaatgggacactttattcaaaagctgctaaagctatctgtgtcaggagcttcctgaaatgtgggaaaacgcagccatatttcttcttccaatgaaataactgtccataaataaaaaagtacatatatgtatagtatacaaatacacaaataaatatcttagatgataagagataaagcaaagatctctctgtatcttaggatacctgctttaactgctcttcctccagacagaggaccaagctgactacctgggacccacaatgcttaaatgccatctcctccagcagaatgcgtggtggcttcacaacttgtttcttctatttgcttcctttgcaattgcctgtatctttatagcaattatcacatccctgtattcattgtctctttctctttctccaccytgctatttctctatcaaaggcaggtattattagtatagacttcatacatttcattgagtttgggggtgttttttttgtttgtttgtttcttttaactgttat

SEQ ID NO: 559452 - DNA, 377 bp, Homo sapiens
gttcaaatctttggcccagttttgagaattgtgttgtcttactattaacttgctaaaatgttctttttatgctctggaacaagacttttgcattaaattttcaaaacagaattttgtatatggsaaagcaattaatttgcctcaaaacttcttgaaaaaattactcctttcatagttattgtttctaataacctttgaagattaggtaataaactattaaatcgtggaaataattctttatataccttaaaggatctgctaaccataatctagtatgtcttaagagttataactaacactgcaaaaaatatttttatttaattatgattatttaccctatattattgaaaatttttctttaaaaagtttagtgtgtg

SEQ ID NO: 559453 - DNA, 515 bp, Homo sapiens
agtagagtaggaacgggagtgggtgtgtrggtgaagatgactggaactttaatctcttcctgaggtctgtttttgaatttgccaaagatagaggacaaagctttgagagtgagaacagtggtggagagaaagagcgtctttttaaagaggtgttgagatgatggggtcagatggcttcaggaaggccaaggatttgttgctaaaggtaggggcagtgtcatcgggaccacttgtgggtggatgaggagtgagctagccagcccagggataaaagcaacatgaattaatgaggcttctgagaatcctcagcaattggactgacccctgctgcctggcttcccagggtgggttccaagcacagtgtggcctcacattctaagtagctgacagcaggaggtgctgatatggagtagtggaggaagggtttgccagaagagaagcttgggaaagtctcaatccccaggctttggaataagtagaagaaagccttgctaccctaaatagtgacagctgga

SEQ ID NO: 559454 - DNA, 362 bp, Homo sapiens
tcttttttcctgtctttatttttagtatatgtgtatctttataggtgaattgtrttctttgcaagcaacagatagttgggacttgttttattttccccaatgtagtcactctatgtcttttgatttaagactttagcacacttatatttaatgttgttaattgtttcccagttgttttgtggtcttttattccttccttgcttcctgtcttttctgtgaaggtgattttctatggtggtgtgctttaatttcctgctttttatttttttgtgtatctattgtaatttttatttttgatttgaagttgccatgaggcttacaaagaacatcttataacccattgttttaaactgttgaaaaca

SEQ ID NO: 559455 - DNA, 612 bp, Homo sapiens
ataagctttttacatattaaatttgttgctatttagtctacatcaagcaattcaattcaagtcactgtggttctcctaaatcttttgacatgttaaaatatattttaaattacaatgaattcaaatatttaattatagcttcaaattatatttacagtttcaaattatgttggctgagcatagacaataccctaagtcttacttcatgtgtatgttaagtctggttggtatacatcaatcatgacttatctgcatactcagtgggtcatactgtactcagaataaacaggcaagagwctccttatttattggctctttagtaaattaactatacatacctaggaagaaaacctaaaaaatccaaatgatttgatttggatgcttgtcccaaccaaattcatattaaatgtgattcccagtgttggaagtaggcctggtaggagatgatgggatcatgagggtaattccctcattaatggtttagcactatccccttggtgattagtgaattctcatttagttcacacaagatctgatatttacaattctgggacctctcctgtctccctttcttgttaccactcttgctatgtggtgtgcctgctccggatt

SEQ ID NO: 559456 - DNA, 612 bp, Homo sapiens
ataagctttttacatattaaatttgttgctatttagtctacatcaagcaattcaattcaagtcactgtggttctcctaaatcttttgacatgttaaaatatattttaaattacaatgaattcaaatatttaattatagcttcaaattatatttacagtttcaaattatgttggctgagcatagacaataccctaagtcttacttcatgtgtatgttaagtctggttggtatacatcaatcatgacttatctgcatactcagtgggtcatactgtactcagaataaacaggcaagagtctccttatttattggctctttagtaaattaactatacatacctaggaagaaaacctaaaaaatccaaatgatttgatttggatgcttgtcccaaccaaattcatattaaatgtgattcccagtgttggaagtaggcctggtaggagatgatkggatcatgagggtaattccctcattaatggtttagcactatccccttggtgattagtgaattctcatttagttcacacaagatctgatatttacaattctgggacctctcctgtctccctttcttgttaccactcttgctatgtggtgtgcctgctccggatt

SEQ ID NO: 559457 - DNA, 612 bp, Homo sapiens
ataagctttttacatattaaatttgttgctatttagtctacatcaagcaattcaattcaagtcactgtggttctcctaaatcttttgacatgttaaaatatattttaaattacaatgaattcaaatatttaattatagcttcaaattatatttacagtttcaaattatgttggctgagcatagacaataccctaagtcttacttcatgtgtatgttaagtctggttggtatacatcaatcatgacttatctgcatactcagtgggtcatactgtactcagaataaacaggcaagagtctccttatttattggctctttagtaaattaactatacatacctaggaagaaaacctaaaaaatccaaatgatttgatttggatgcttgtcccaaccaaattcatattaaatgtgattcccagtgttggaagtaggcctggtaggagatgatgggatcatgagggtaattccctcattaatggtttagcactatccccttggtgattagtgaattctcatttagttcrcacaagatctgatatttacaattctgggacctctcctgtctccctttcttgttaccactcttgctatgtggtgtgcctgctccggatt

SEQ ID NO: 559458 - DNA, 572 bp, Homo sapiens
cagctcactgcagccttaaattcccagacttaagcaatccctcctcctcagcctcccgagtagctgggaatacaggtaggcatgcaccaccatgcccagctgatttttctatttgttgtagagatagggtctcactatattgcctaggggaaacagctcctctattttaaagccctttgataatgtgcttaagatgcaaaaacaacatattcagattctttttacactcttaagaacctagcatgatactaaacactaatcagaaaatcagcctgcacacttcataatcmtataagccaaatacctgtgatgactgtcatttttctcactgttagtaatgccagcatggaggagagtatgaacttgactgtgagctctttaagggaagagatattacctaatttatctctgcaactccaatgactaacacacctggcccttagtgagggctcatatttgttccttgaactgagttgaagatcaaagtttaagacagcagggaaagaatgtatttgtgtatccaaattattgcaaaaaataacctttaataggtattttctgacaatgcaaaa

SEQ ID NO: 559459 - DNA, 617 bp, Homo sapiens
gatatcaaggctataatataaaccatagtaatgaagaaaggtaaatatcacaagcatagatagacaaatagtatagaakcttgtatcggtatggaaaaagaaatctagatttttacctcacctcattcacaaaaccatttcattcatgcagatctaaacaggaatggaaaagcaataattgtataagataataaagaatatcttcagggcctgggaagacaaaggtttcttaagcaggatatgaaaaacattaatgatttcaactgtattaaaattaaaaagagttttcttctctaaaaaggcaccaataagagagcaaaagcaagtgaaactagattatttgtggtttatataattgacaaatggcttatatgcagaatacataaaaattcgaacaataagaagagagaccacccaataggaatatgggcgatattttgaaaaagcagtttacaaaagagattatacaaatatctaataaacgttttaaaggacgtccaacctcacttgtccttaaataataattaagtccatcgggagaaatactatacattcaccagaaaagttaaaagatagaaaataatttaaagtgttgatgtggttttgaagcaactgga

SEQ ID NO: 559460 - DNA, 421 bp, Homo sapiens
ggttacattttgggagaagggagagggaaataatgtggttggggcatgaggagcctcctatgtgtcctttgagtgtttcttgacccaggttgatagtttcatgggtgtgttcrctctgaactaattccttgagctatacaattatgatttgcacaattcaattatattatatttcagtggaagcttatgaaagagaaacattgctgctaaaattcattaagtgaaggcttatggggacgtagaccttcatagcatcccatacttgcaaaaggggcaatctaactgaaggatgacatcagtatcagatatcagatatcacacaaaccaatgatcacttttactgtctcaactgtgggtcaatctgacattacaaattttctgatgtagtacaacatgaggtacaaaatttcacctgtgattt

SEQ ID NO: 559461 - DNA, 334 bp, Homo sapiens
tttactgtctcaactgtgggtcaayctgacattacaaattttctgatgtagtacaacatgaggtacaaaatttcacctgtgatttattctagtcaagcgtgtttaactggcagccattaaggcattaggtgtaaatttagacacagaaagcaatcaagcaaagcctcaaggtatgccattttgtaggtcaattgtcctctttccttcaacaagtcagtaccatttaaaaaggggggtaattctagatttaaaaaaaaattaaggggtggacaattagatataatgtgcaggactgcactgagactggtttaaagaaatcagccataaagaaaaa

SEQ ID NO: 559462 - DNA, 334 bp, Homo sapiens
tttactgtctcaactgtgggtcaatctgacattacaaattttctgatgtagtacaacatgaggtacaaaatttcacctgtgatttattctagtcaagcgtgtttaactggcagccattaaggcattaggtgtaaatttagacacagaaagcaatcaagcaaagcctcaaggtatgccattttgtaggtcaattgkcctctttccttcaacaagtcagtaccatttaaaaaggggggtaattctagatttaaaaaaaaattaaggggtggacaattagatataatgtgcaggactgcactgagactggtttaaagaaatcagccataaagaaaaa

SEQ ID NO: 559463 - DNA, 280 bp, Homo sapiens
acggaggtgtagctagggttaaaaaaataagagagaaagagagatgcagaggaacaaagacaccaaccacaggaagccataaagggacaagagaaaagatagcattaccagagctaagtgagttctggagctrcaaagaaaggtcacatagcagaagttctagttatggagagattcagcccctggcagaagcacagaaccaaagcagagggaatcggggaagaaataacccattctcctctccacctaacttgaaccctagagaagcctcccactgagt

SEQ ID NO: 559464 - DNA, 280 bp, Homo sapiens
acggaggtgtagctagggttaaaaaaataagagagaaagagagatgcagaggaacaaagacaccaaccacaggaagccataaagggacaagagaaaagatagcattaccagagctaagtgagttctggagctacaargaaaggtcacatagcagaagttctagttatggagagattcagcccctggcagaagcacagaaccaaagcagagggaatcggggaagaaataacccattctcctctccacctaacttgaaccctagagaagcctcccactgagt

SEQ ID NO: 559465 - DNA, 625 bp, Homo sapiens
ttagtaattgtcgtatctgattatctttgtcagaaaaactaacatatacaagttttttaagcccaaaatatgaagtctttttatcacttcattgagtcacgagctgctatggttaccaagagaaaagatttttggagcccaaagacttctcaggcttatttttctctccatttcttacttctgtgcctttaaagatattacaaaggaatttaagagcacccattgtagggcaaaagtgaagaaaaaaattaactgtgggtatgttatgatcaattgcttgtattagttatgaagccaggtatctaagaatgtccttatccaaacaactgtatttagcataaaaaatactggaaaagtggcttatcaatttcaaaaacttatctctgcaaatattatataatggaatttgttttccagtatcttatatagcaatgtcatcaagtttrtaaactggaaaatctgctaattattttatgagaatggcagaagtcatttaaagtagccacattcaactctgagtgtatatgtgcatatgcccatcaaaatacaagcagggctcaataggtagtttatgtttgtgggcaggtaatcttaaaaaatatttacctaaaaatcaacagccctt

SEQ ID NO: 559466 - DNA, 625 bp, Homo sapiens
ttagtaattgtcgtatctgattatctttgtcagaaaaactaacatatacaagttttttaagcccaaaatatgaagtctttttatcacttcattgagtcacgagctgctatggttaccaagagaaaagatttttggagcccaaagacttctcaggcttatttttctctccatttcttacttctgtgcctttaaagatattacaaaggaatttaagagcacccattgtagggcaaaagtgaagaaaaaaattaactgtgggtatgttatgatcaattgcttgtattagttatgaagccaggtatctaagaatgtccttatccaaacaactgtatttagcataaaaaatactggaaaagtggcttatcaatttcaaaaacttatctctgcaaatattatataatggaatttgttttccagtatcttatatagcaatgtcatcaagtttataaactggawaatctgctaattattttatgagaatggcagaagtcatttaaagtagccacattcaactctgagtgtatatgtgcatatgcccatcaaaatacaagcagggctcaataggtagtttatgtttgtgggcaggtaatcttaaaaaatatttacctaaaaatcaacagccctt

SEQ ID NO: 559467 - DNA, 294 bp, Homo sapiens
gcttaaaatagggtaggttatgacttacaaatataaaatgaacacttgtctaagatttttaactcatttatttaatgagggagccagtaagatrttatactaagttttatggaaaattaagagccacacataactaggcactaaggaacactgaaataaatttgcttgataggttcaaaactgacttcttgatggtagatggaaaaaggaaaattaattatacttccaccaaaatcaatcatttgcctgtctatagacaagaatatttgcattactatcagtaatctacaacta

SEQ ID NO: 559468 - DNA, 294 bp, Homo sapiens
gcttaaaatagggtaggttatgacttacaaatataaaatgaacacttgtctaagatttttaactcatttatttaatgagggagccagtaagatattatactaagttttatggaaaattaagagccacacatawctaggcactaaggaacactgaaataaatttgcttgataggttcaaaactgacttcttgatggtagatggaaaaaggaaaattaattatacttccaccaaaatcaatcatttgcctgtctatagacaagaatatttgcattactatcagtaatctacaacta

SEQ ID NO: 559469 - DNA, 461 bp, Homo sapiens
ctcttgtaaagttaatttcatatgtggatattttttcatatagatgtgtcgtaggggtatgattactggagagatctactccactaccttgctctgcccaaatccttcccctttccaacaagagtttgccaccttctagtattcttttttcttaaccaaactaagtttagccttttaatccttcaccctcctccacttcaaatgccattgcttctttgtatgcttattgtattttccatgctatatgactttcagctggttatttacagtatgtaagttttaatatcctgtaaaagggggayaataatggcatccatttgatagggatgttaaagatattaaatgacactgtccatgttaaataactttttgagatatattgagatgtttctgtacttccttgttctggccttcttgttgaaccagaggaatctattgccatgaaaagcaataaaactgtt

SEQ ID NO: 559470 - DNA, 426 bp, Homo sapiens
tgaggccgatgttaccatgacttaaaagctagacgaagacaacacaataaaaaataattacagaccagtatccttaatgaatatagatgcaaaaattctcaataaaatacaaactagcaaactgaattcaaaagcacattgaaaaggtcatacaccatgaccaattgkaatttatctatgcggtacaaggatgtttcaatgtgtaaaaattaaaatgtgatataccacattaacagaatgaaagacaaaaataacattccaatagatgcagaaaacacatttgacaaaattcaatatactttcatgataaaactctcaacaaaataagtatacaagaaacttacctcaacactataaaggctgtatatgaaaaacctatatctaatattataatcaatggggaaaaactgaaagctttttctttaa

SEQ ID NO: 559471 - DNA, 426 bp, Homo sapiens
tgaggccgatgttaccatgacttaaaagctagacgaagacaacacaataaaaaataattacagaccagtatccttaatgaatatagatgcaaaaattctcaataaaatacaaactagcaaactgaattcaaaagcacattgaaaaggtcatacaccatgaccaattggaatttatctatgsggtacaaggatgtttcaatgtgtaaaaattaaaatgtgatataccacattaacagaatgaaagacaaaaataacattccaatagatgcagaaaacacatttgacaaaattcaatatactttcatgataaaactctcaacaaaataagtatacaagaaacttacctcaacactataaaggctgtatatgaaaaacctatatctaatattataatcaatggggaaaaactgaaagctttttctttaa

SEQ ID NO: 559472 - DNA, 426 bp, Homo sapiens
tgaggccgatgttaccatgacttaaaagctagacgaagacaacacaataaaaaataattacagaccagtatccttaatgaatatagatgcaaaaattctcaataaaatacaaactagcaaactgaattcaaaagcacattgaaaaggtcatacaccatgaccaattggaatttatctatgcgktacaaggatgtttcaatgtgtaaaaattaaaatgtgatataccacattaacagaatgaaagacaaaaataacattccaatagatgcagaaaacacatttgacaaaattcaatatactttcatgataaaactctcaacaaaataagtatacaagaaacttacctcaacactataaaggctgtatatgaaaaacctatatctaatattataatcaatggggaaaaactgaaagctttttctttaa

SEQ ID NO: 559473 - DNA, 426 bp, Homo sapiens
tgaggccgatgttaccatgacttaaaagctagacgaagacaacacaataaaaaataattacagaccagtatccttaatgaatatagatgcaaaaattctcaataaaatacaaactagcaaactgaattcaaaagcacattgaaaaggtcatacaccatgaccaattggaatttatctatgcggtacaaggatgtttcaatgtgtaaaaattaaaatgtgatataccacattaacagaatgaaagacaaaaataacattccaatagatgcagaaaacacatttgacaaaattcaatatactttcatgataaaactctcarcaaaataagtatacaagaaacttacctcaacactataaaggctgtatatgaaaaacctatatctaatattataatcaatggggaaaaactgaaagctttttctttaa

SEQ ID NO: 559474 - DNA, 295 bp, Homo sapiens
tatgtagagataatatgctaatttgcttgattgtggtgatcctttcaaaaagtatagaatggggggaggagccaagatggccaaatargaacagctccggtctacagctcccagcgtgagcgacgcagaagacgggtgatttctgcatttccatctgaggtactgggttcatctcactagggagtgtcagacagtgggtgcgtgcaccgtgcgtgagcggaagcagggcgaggcattgcctcactcaggaagcacaagggtcagggagttccctttcctagttaaagaaaggggt

SEQ ID NO: 559475 - DNA, 295 bp, Homo sapiens
tatgtagagataatatgctaatttgcttgattgtggtgatcctttcaaaaagtatagaatggggggaggagccaagatggccaaataggaacagctccggtctacagctcccagcgtgagcgacgcagaagacgggtgatttctgcatttccatctgaggtactgggttcatctcactarggagtgtcagacagtgggtgcgtgcaccgtgcgtgagcggaagcagggcgaggcattgcctcactcaggaagcacaagggtcagggagttccctttcctagttaaagaaaggggt

SEQ ID NO: 559476 - DNA, 295 bp, Homo sapiens
tatgtagagataatatgctaatttgcttgattgtggtgatcctttcaaaaagtatagaatggggggaggagccaagatggccaaataggaacagctccggtctacagctcccagcgtgagcgacgcagaagacgggtgatttctgcatttccatctgaggtactgggttcatctcactagggagtgycagacagtgggtgcgtgcaccgtgcgtgagcggaagcagggcgaggcattgcctcactcaggaagcacaagggtcagggagttccctttcctagttaaagaaaggggt

SEQ ID NO: 559477 - DNA, 557 bp, Homo sapiens
atatgtcactaggaatattcagtattcaaatagaggcttcaatgggctctgaaatatcccctcctgaactctataaaaagcgtgtttccaactggctgaatgaaaacaaaggtttacatctgtgagatgaattcacacatcagaaagcgttttcaccaagaacttttctagttttatagcaagatgttcattttttcaatattggtctcagtggtctccaaaatgtccctttgtacagtctacaaaaatttttgccaacgtactgaatcaaaacaaatgtttaacactgtgagatgaattttcacatcaccaaacatttttacagatagtttctatctagtttttaatcacaaaactttgaattgttccctataagcctcaaagggctctaaattgtcccctcttagcttctactaaaagagagttttgaacctactgtgtagaaacaaaagtttaactctgtgaaataaatccccacattgcaragcaatttcacagatagctttcttctagtttttatcatgaattattcagcttttcactataggcctcagtgg

SEQ ID NO: 559478 - DNA, 612 bp, Homo sapiens
tgttacatccatacaatggaatactacayagccataaaaaggaacaagtggtacaacaatgatggacctcaagaatgttataagtgaaagaagactgatacaaaaggtcacatgttgcatgatttcttaggaaatattcagaataggcaattttacatagatagcagactagtggttgccaaggactaggagagagggaggatgggatgtgactgctttaatgggtaggaagagatttccttctgagatgacgaaaatgctgagcaactagacagtggtgaacctcttgaatatgtactaaaaaccactgactgtacaaaagggtgaatttcataattatgaattacatcgcaataaaaaaataaaaacccaggagcgatttgaaaaaagttaatgtgcaaagtgcctacaacaatttcttggcgcattgaaagtgctatataagcattaattatgattattacgataatcttaagacactcttgtctccattttcatcataaagttttcagaagataactcaccactcctcacaggaaattcacagagtaaaaatctcacattcattcaggatatacctgccatttattctggcatcttcatgaggccaga

SEQ ID NO: 559479 - DNA, 533 bp, Homo sapiens
atggcctttgtgttggattggtatacttgtgcgaggacttaacagcaagtactgtacatttctaaatgtttacttcttaattttgctggaagaaatatactactcaattaactatttttaaagcaaagtaaaacaatttattttgacaagtgacattgtattttccyagttttcaggtggcagagattaggcttaacatcactaatcatgagagaaatgcaaatcaaaaccaaaatgagatactatcctataccagtcagaatagctactattaaaaaatcgaaaaacaacagatcttgggaggctgtggagaaaagggaacatttacacataattggtgcgaatgtaaattagttcagccactgttgaaagcagtttgaaaatttctcaaagaattgaaaatagaattacctttcaagccaacaattccattactgttttatgacccaaataaagtcagttattctaccaaaaacacatacgcacttgcatgttcattgcagcactattcacaatagcaaagacatggagtc

SEQ ID NO: 559480 - DNA, 396 bp, Homo sapiens
tgtccagtgcaatggatcacacctgtaatcccagcacttagggaggctgaggtgggtggatcacttcagatcaggagttcaaaacccgctggccaacatggcaaaaccccatcactactaaaaatacaaaaaaaatagcgggtatagtggcacacrtctgtaatctcagctactcaggaggttgagacaggggaatcacttgaacctgggaggtggaggttgcagtgagccgagatcacaccactgcactccagtctgggctacacagcaagactctgtcttaaaaaaaaaaaaaaagtggcagtttttcctgctctctctctgctgccatgtaagatgtgcattgcttctcctttaccttttgtcatgattgtatgtttcctgaggcctccccag

SEQ ID NO: 559481 - DNA, 357 bp, Homo sapiens
ggggtgggagaggagtgcttgagtatcctgtccccgggccaamcccccaggagtccagtcttcaggacctccttgagccgacttccacctatggagggggatcttcagggtgcctgctgggttctcaggactcctcttcagatcctagtttggacccctccgggttagaaaggatgggctcagcacatctggtgaggcaggcaggtcctcgctgcagcacagaatgatcccatggccctcaaggcgtggtgtcagctgaaagttcactgatccgtgagccctctgcctccctcctccgttgaaagagcagtggcgtgccccgcttctaaaagccctggggctcctgcaagcggacac

SEQ ID NO: 559482 - DNA, 580 bp, Homo sapiens
tcttttatacagacacacacacacacacacacacacatacatacacacggagaaagaggggaagagagtgacagaaagataaacagtgagacagaaagaaagaccagaaattaccagtgtgagaaattaataaargagaggacatcactacagtttctgtagacatcaaaacaagtataaaagatttatagtggccccagctagtgggataaggcaattaaaagaagttaaatttgtaaatattgaaaaggaaagtaaatgcttttttggagatggcatggctatgtacaaatgtcaaaaattatctacaaacaattagaaataaaagccagtttggtaaggtgactggatttataacaaatgcacaaaaagcaaaaatcaattgtatacctattacaattttgtttgataaagtagaaataattcatcacaaacaaggacagaaaagaaagggaataaacacgtccttaaattttgtaccctaggtgcctctcttgcttcacccaaggctcagtcctgatgaaaatggctcattatttgttagagaaatttaaattaaaactgtaatgacataccattc

SEQ ID NO: 559483 - DNA, 580 bp, Homo sapiens
tcttttatacagacacacacacacacacacacacacatacatacacacggagaaagaggggaagagagtgacagaaagataaacagtgagacagaaagaaagaccagaaattaccagtgtgagaaattaataaaggagaggacatcactacagtttctrtagacatcaaaacaagtataaaagatttatagtggccccagctagtgggataaggcaattaaaagaagttaaatttgtaaatattgaaaaggaaagtaaatgcttttttggagatggcatggctatgtacaaatgtcaaaaattatctacaaacaattagaaataaaagccagtttggtaaggtgactggatttataacaaatgcacaaaaagcaaaaatcaattgtatacctattacaattttgtttgataaagtagaaataattcatcacaaacaaggacagaaaagaaagggaataaacacgtccttaaattttgtaccctaggtgcctctcttgcttcacccaaggctcagtcctgatgaaaatggctcattatttgttagagaaatttaaattaaaactgtaatgacataccattc

SEQ ID NO: 559484 - DNA, 580 bp, Homo sapiens
tcttttatacagacacacacacacacacacacacacatacatacacacggagaaagaggggaagagagtgacagaaagataaacagtgagacagaaagaaagaccagaaattaccagtgtgagaaattaataaaggagaggacatcactacagtttctgtagacatcaaaacaagtataaaagatttatagtggccccagctagtgkgataaggcaattaaaagaagttaaatttgtaaatattgaaaaggaaagtaaatgcttttttggagatggcatggctatgtacaaatgtcaaaaattatctacaaacaattagaaataaaagccagtttggtaaggtgactggatttataacaaatgcacaaaaagcaaaaatcaattgtatacctattacaattttgtttgataaagtagaaataattcatcacaaacaaggacagaaaagaaagggaataaacacgtccttaaattttgtaccctaggtgcctctcttgcttcacccaaggctcagtcctgatgaaaatggctcattatttgttagagaaatttaaattaaaactgtaatgacataccattc

SEQ ID NO: 559485 - DNA, 547 bp, Homo sapiens
aaagataaacagtgagacagaaagaaagaccagaaattaccagtgtgagaaattaataaaggagaggacatcactacagtttctgtagacatcaaaacaagtataaaagatttatagtggccccagctagtgggataaggcaattaaaagaagttaaatttgtaaatattgaaaaggaaagtaaatgctwttttggagatggcatggctatgtacaaatgtcaaaaattatctacaaacaattagaaataaaagccagtttggtaaggtgactggatttataacaaatgcacaaaaagcaaaaatcaattgtatacctattacaattttgtttgataaagtagaaataattcatcacaaacaaggacagaaaagaaagggaataaacacgtccttaaattttgtaccctaggtgcctctcttgcttcacccaaggctcagtcctgatgaaaatggctcattatttgttagagaaatttaaattaaaactgtaatgacataccattctacacatactagtttgtctaacattaaaagactaacaataa

SEQ ID NO: 559486 - DNA, 547 bp, Homo sapiens
aaagataaacagtgagacagaaagaaagaccagaaattaccagtgtgagaaattaataaaggagaggacatcactacagtttctgtagacatcaaaacaagtataaaagatttatagtggccccagctagtgggataaggcaattaaaagaagttaaatttgtaaatattgaaaaggaaagtaaatgcttttttggagatggcatggctatgtacaaatgtcaaaaattatctacaaacaattagaaataaaagccagtttggtaaggtgactggatttataacaaatgcacaaaaagcaaaaatcaattgtatacctattacaattttgtttgataaagtagaaatwattcatcacaaacaaggacagaaaagaaagggaataaacacgtccttaaattttgtaccctaggtgcctctcttgcttcacccaaggctcagtcctgatgaaaatggctcattatttgttagagaaatttaaattaaaactgtaatgacataccattctacacatactagtttgtctaacattaaaagactaacaataa

SEQ ID NO: 559487 - DNA, 547 bp, Homo sapiens
aaagataaacagtgagacagaaagaaagaccagaaattaccagtgtgagaaattaataaaggagaggacatcactacagtttctgtagacatcaaaacaagtataaaagatttatagtggccccagctagtgggataaggcaattaaaagaagttaaatttgtaaatattgaaaaggaaagtaaatgcttttttggagatggcatggctatgtacaaatgtcaaaaattatctacaaacaattagaaataaaagccagtttggtaaggtgactggatttataacaaatgcacaaaaagcaaaaatcaattgtatacctattacaattttgtttgataaagtagaaataattcatcacaaacaaggacagaaaagaaagggaataaacacgtccttaaattttgtaccctagrtgcctctcttgcttcacccaaggctcagtcctgatgaaaatggctcattatttgttagagaaatttaaattaaaactgtaatgacataccattctacacatactagtttgtctaacattaaaagactaacaataa

SEQ ID NO: 559488 - DNA, 547 bp, Homo sapiens
aaagataaacagtgagacagaaagaaagaccagaaattaccagtgtgagaaattaataaaggagaggacatcactacagtttctgtagacatcaaaacaagtataaaagatttatagtggccccagctagtgggataaggcaattaaaagaagttaaatttgtaaatattgaaaaggaaagtaaatgcttttttggagatggcatggctatgtacaaatgtcaaaaattatctacaaacaattagaaataaaagccagtttggtaaggtgactggatttataacaaatgcacaaaaagcaaaaatcaattgtatacctattacaattttgtttgataaagtagaaataattcatcacaaacaaggacagaaaagaaagggaataaacacgtccttaaattttgtaccctaggtgcctctcttrcttcacccaaggctcagtcctgatgaaaatggctcattatttgttagagaaatttaaattaaaactgtaatgacataccattctacacatactagtttgtctaacattaaaagactaacaataa

SEQ ID NO: 559489 - DNA, 442 bp, Homo sapiens
gaattcgagaccagcctgacccacatagtgaaaccctgtctctactgaaaatacaaaaatttgccgggtgtggtggygtggctgtaatcctagctactcaggaggctgaggcaggataatggcttgaatctgggaagtggaggttgcagtgagccaagggagtgccactgcactctaacctgggcaagaaggcaagattctgtctcaaaaaaataaaaataaaaaaacaggggggaggagccaagatggccaaataggaacaccttcagtctacagctcccagcatgagcaacgcagcagatgggtgatttctgcatttccaactgaggtaccgggttcatctcactggggagtgccagatagtaggtgcaggacagtgggtgcagcgcaccatgtgcaagccaaagcagggcgaggaatcacctcacccgggaagcacaag

SEQ ID NO: 559490 - DNA, 442 bp, Homo sapiens
gaattcgagaccagcctgacccacatagtgaaaccctgtctctactgaaaatacaaaaatttgccgggtgtggtggtrtggctgtaatcctagctactcaggaggctgaggcaggataatggcttgaatctgggaagtggaggttgcagtgagccaagggagtgccactgcactctaacctgggcaagaaggcaagattctgtctcaaaaaaataaaaataaaaaaacaggggggaggagccaagatggccaaataggaacaccttcagtctacagctcccagcatgagcaacgcagcagatgggtgatttctgcatttccaactgaggtaccgggttcatctcactggggagtgccagatagtaggtgcaggacagtgggtgcagcgcaccatgtgcaagccaaagcagggcgaggaatcacctcacccgggaagcacaag

SEQ ID NO: 559491 - DNA, 442 bp, Homo sapiens
gaattcgagaccagcctgacccacatagtgaaaccctgtctctactgaaaatacaaaaatttgccgggtgtggtggtgtggctgtaatcctagctactcaggaggctgaggcaggataatggcttgaatctgggaagtggaggttgcagtgagccaagggagtgccactgcactctaacctgggcaagaaggcaagattctgtctcaaaaaaataaaaataaaaaaacaggggggaggagccaagatggccaaataggaacaccttcagtctacagctcccagcatgagcaacgcagcagatgggtgatttctgcatttccaactgaggtaccrggttcatctcactggggagtgccagatagtaggtgcaggacagtgggtgcagcgcaccatgtgcaagccaaagcagggcgaggaatcacctcacccgggaagcacaag

SEQ ID NO: 559492 - DNA, 330 bp, Homo sapiens
agaaaaagtaaacagtgcttggggaaatgatcccgttttaaatttctgtgtttaaaggcaattatattgacaatgattttctggcacttttctctagctatcaagataataatacttttagactgcaggtgaatttttatttttaatggcgctattgttgctaagatgtaacacttgatgattttatgacataaaccctaaaaaaaagagcccataacctgaaatatttttttaaattatatacatatatataaacatatatacatatattctcatctaataccagttcggcacagcattaacctggtwgaaattagatcaagtaaaaaa

SEQ ID NO: 559493 - DNA, 642 bp, Homo sapiens
tataaaatgctcagaaaaaaaaatagaagtaaatctttgtgatcttaggcaatgttttcttagatatgagacaaaataaaagcaaaaaagaaaaaatacaaatggatcattaaaattaaaactttgagttttaatgcacaccatcaagaaagtgaaaatacaacctctggaatgggacaaaatatttgcaaatcatatgtctaatgacttgtwtcaaaaatacataaataattcttacaattcaataataaaaagacaaatacccaactttaaaaaaggagaaagaatttggtggacatgccttcatatacaaatatacaaatgatatacaaatgagcattaaaagatgctcaacatcattagtcattagggaaatgcaaattaaaaccacaatgagatgccattagcatgtctataatttaaaaaaaaaaacagacaataacaagcattgtcaagatgtggagaaatttaaaacctcatacattgctaattgtattataaattggcacagccactataaaaaacagtttggcagctcttcaaaaagttaaccatagcattaccatatgacccagtaattccacttccgggtgtatacttaaaagaattgaaaacatatctccatgaaaacacttgtacata

SEQ ID NO: 559494 - DNA, 593 bp, Homo sapiens
ggccgggcacagtggctcaagcctgtaatcccagcactttgtgaggtcgaggcagggggatcatttgaggtcaggagttcaagaccagcctgaccaacatgatgtaaccctgcccctactaaaaacacaaaaattagccaggcatggtggtgcacacctgtagtcccagctacttgggaggttgaggtgggagaatcacttgaactcacgaggtggaggttacagtgagccaagatcatgccattgcattccagcctggacaacagagcaagacttggtcaaagaaagaaagaaagagagagagagaagccaaacacaaaagcaaccgctatggtctgaatgtttatgtcccccaaaactaccaaggtgatggtattagaaggcgggagcctctgtgaggtgattaggtcaagagtacacagccctaataaatggaattagtgtccttataaaagaggcccaaaagaggccccttatctactatcaccttgatcttggacttcccagcatcacaactgtgagaaataaatttctgttgtttataagccacccaggttatsgtattttattataacagcccaaatgtcttaaaa

SEQ ID NO: 559495 - DNA, 562 bp, Homo sapiens
agaggcctggaagcctagaaagaaaacagggtttcctggatcaggcccagggtccccatgctatgtgcagcctagggacttggttccctgtgcctcakccactccagccatggctgaaagggtccaacatagagcttggcctgtggcttctgagagtgcaagctccaagccttggcagcttcgatgccgtgttgagcctgcaagtacacagaataccagaattggggtatgggaacctccaccgagatttcacaagatacatggaaatgcctggatggccaggcagaagtttgctgcagaggcagggcattcatggagaacctctgctagggcattgcagaagggaaatgtggggtcagatcccccctacagagtccctactggggtaccacctagtggagctgtgagtagagggccacaatcctccaggccccagaaaggtagatccactgacagcttgcaccatgtgcctggaaaagctgcagacattcaacaccagcctgtgaaagcagccaggagggaggctgtgccctgcagagctatgggggcagagctgcccaag

SEQ ID NO: 559496 - DNA, 562 bp, Homo sapiens
agaggcctggaagcctagaaagaaaacagggtttcctggatcaggcccagggtccccatgctatgtgcagcctagggacttggttccctgtgcctcagccactccagccrtggctgaaagggtccaacatagagcttggcctgtggcttctgagagtgcaagctccaagccttggcagcttcgatgccgtgttgagcctgcaagtacacagaataccagaattggggtatgggaacctccaccgagatttcacaagatacatggaaatgcctggatggccaggcagaagtttgctgcagaggcagggcattcatggagaacctctgctagggcattgcagaagggaaatgtggggtcagatcccccctacagagtccctactggggtaccacctagtggagctgtgagtagagggccacaatcctccaggccccagaaaggtagatccactgacagcttgcaccatgtgcctggaaaagctgcagacattcaacaccagcctgtgaaagcagccaggagggaggctgtgccctgcagagctatgggggcagagctgcccaag

SEQ ID NO: 559497 - DNA, 562 bp, Homo sapiens
agaggcctggaagcctagaaagaaaacagggtttcctggatcaggcccagggtccccatgctatgtgcagcctagggacttggttccctgtgcctcagccactccagccatggctgaaagggtccaacatagagcttggcctgtggcttctgagagtgcaagctccaagccttggcagcttcgatgccgtgttgagcctgcaagtacacagaataccagaattggggtrtgggaacctccaccgagatttcacaagatacatggaaatgcctggatggccaggcagaagtttgctgcagaggcagggcattcatggagaacctctgctagggcattgcagaagggaaatgtggggtcagatcccccctacagagtccctactggggtaccacctagtggagctgtgagtagagggccacaatcctccaggccccagaaaggtagatccactgacagcttgcaccatgtgcctggaaaagctgcagacattcaacaccagcctgtgaaagcagccaggagggaggctgtgccctgcagagctatgggggcagagctgcccaag

SEQ ID NO: 559498 - DNA, 562 bp, Homo sapiens
agaggcctggaagcctagaaagaaaacagggtttcctggatcaggcccagggtccccatgctatgtgcagcctagggacttggttccctgtgcctcagccactccagccatggctgaaagggtccaacatagagcttggcctgtggcttctgagagtgcaagctccaagccttggcagcttcgatgccgtgttgagcctgcaagtacacagaataccagaattggggtatgggaacctccaccgagatttcacaagatacatggaaatgcctggatggccaggcagaagtttgctgcagaggcagggcattcatggagaacctctgctagggcattgcagaagggaaatgtggggtcagatcccccctacagagtccctactggggtaccacctagtggagctgtgagtagagggccacaatcctccaggccccagaaaggtagatccactgacagcttgcaccatgtgcctggaaaagctgcagacaytcaacaccagcctgtgaaagcagccaggagggaggctgtgccctgcagagctatgggggcagagctgcccaag

SEQ ID NO: 559499 - DNA, 607 bp, Homo sapiens
ccgagaaagtagaataagagagatattaaaagtactaaagaataaaatttacattatacagtaacaaataattcctgaaaaaaagggtaatttgaccaaagcaaacactcaagccctgtggcaattctgccaattrtgaaatggattttttcataattggaaaaaggtgtagataaatgattccaggatcctgaaaaaagaccagacccagaatgaatcaaagtttgtgaaatactagaaacattgttcacatacattttgtttttgttttttctttcattaagtaggagaaagggataggttcattgtttgaagaaaaggtacagcgatgtatcatggatagaatacggtatgatgagaaaatgagcttcaactttgttttaatattctcttgcaagaagaatataatgaaagttcaaaaaggtaaaaaacatgataaatagaaaattgaaattcaaggtaatttggatataaacagttccaacttgttttagtatgcaggctcagacaaaggtttatcaggctactaaatgaatttaaaaatggaaagctaaaaatacaatttaaacttaaaagtgatgagaaaatatagtaaaaaatgacaaca

SEQ ID NO: 559500 - DNA, 607 bp, Homo sapiens
ccgagaaagtagaataagagagatattaaaagtactaaagaataaaatttacattatacagtaacaaataattcctgaaaaaaagggtaatttgaccaaagcaaacactcaagccctgtggcaattctgccaattgtgaaatggattttttcataattggaaaaaggtgtagataaatgattccaggatcctgaaaaaagaccagacccagaatgaatcaaagtttgtgaaatactagaaacattgttcacatacattttgtttttgttttttctttcattaagtaggagaaagggataggttcattgtttgaagaaaaggtacagcgatgtatcatggatagaatacggtatgatgasaaaatgagcttcaactttgttttaatattctcttgcaagaagaatataatgaaagttcaaaaaggtaaaaaacatgataaatagaaaattgaaattcaaggtaatttggatataaacagttccaacttgttttagtatgcaggctcagacaaaggtttatcaggctactaaatgaatttaaaaatggaaagctaaaaatacaatttaaacttaaaagtgatgagaaaatatagtaaaaaatgacaaca

SEQ ID NO: 559501 - DNA, 556 bp, Homo sapiens
caaaaacagaagaagcaattcagacaaacacaaagattagaagaggcatcttaaaatttctggccagatagattgctgagatcattctcctacacaactacaatctgaaaagaatgggagagacatatttcttatacaatgtgcagaaacaaacacagaaaaatcaagaaaaagaaacayggaaatatattccaaataaaagaaaaaataaatatctaaaaaaacagtcttagtagaatgaagctacccaacagggaactcaaaataatgctcatatagatgataaaaacttcagccaaattaaatttaaaggagtttaactgagcaatgaatgattcacaaatcgggcaactcccagaatcacagcagatacagagagactccagggcagtcatgtggtagaaaaatatttacagacaaaaacaggaaatgacatacagaaatcagcagtgaggtacagaaacagctggactgattacaggttggcattgccttattgaacacagtttgaacacttagcagtctatgagtggttcaagtattgttgctgggattg

SEQ ID NO: 559502 - DNA, 609 bp, Homo sapiens
catctgagttctctaatccatagwaccatgtgagagaattatttgagtcgaacatttttgggtatagtttgttctgcaacatatacatatttatgcccagcaatacatcactcaaaggtcaaatgccgattaccaattgtctttttttttttaagaaattgttgtctgggcacggtggcttacgcctataatccctgcactttgggaggccgaggcgggcagattgcctgaggtcagtgtttcaagaccagtctggccaacatggtgaaactccatctctactaaaaatacaaaaaaattagctgggcgtggtggcaaacacctgtaatcccagctactcaggaggctgaggcaggggaattgcttgaaccagggaggtggaggttgcagtgagccgagatcatgccactgcaccccaacctgggcgacagagcaagactccatctcaaaaacaaaaaacaaattaaaatgtcatgatctaggtgcacttaccttaaatctttcatccccttcttgcagctcaactctgaaaatattggagctggaaaaaaatatcactgtattctatcttggtttatagatgaggaaactgaggattttacagaaaaa

SEQ ID NO: 559503 - DNA, 512 bp, Homo sapiens
gcttatagttttaatttgaaaacattttaaagattgtattgggaattttagagagatgtttttacgtttaatgatttcactgttttgactaaattcacatttaattagtaagaagcaaatatatagatcacataaatctttttaatagttctgacatggtctatagaaatggccaaaatgtaatattctgctatgtccaaaagcttgaaaattatctgttttatctttatatgtttgatgaaagtcacataagtataattattgcgattgytgttcttttagtttctgttatcacattttttccatcttataaattcttttctgtattcctttgagttttgtggtgctttgataactctgtcccattctaagcacagtctcttagtgcatggaactttccccgtctaccccatggagaagcaagaatattaaggcattgacagcaattttcctgcctagctctatgcgaggtatgaaagcatcacatatggagaaaagaaccatatatcaag

SEQ ID NO: 559504 - DNA, 587 bp, Homo sapiens
gtactaaaccattagaaaccacccccatgatacagtcaccaggcccaacactccagatcacaattcaacatgagatttgggtggggacacagagccaaaccatatcagaaggcacattaggagatagcaaaatttttatattgattcggctatttggattatgaaataagacatgcaaacctgctccttaaactctgtttgcttgttttggtctaagcaccaagtgaaaatataatttctgtttgtctgtttcttaaagttgacatatctctaaattttgccagaagcactcatttgcaagtaatgctcttcttatcctccttgtttgatttccatgtctcatgatcaaattcttataagttattttaatgttactttatgtcatgctatttgcttcctttaaatcaagtttggtttcccaatactcagcacttctctatccttaggcaatatattttcctaaaagagcataatagccaacattttctaacccctttgtgggtttttcaggactaaaaattcattacaatagagtaagtgaackcctgcattttgtgtccatatttaccccaccaaaatatggatgt

SEQ ID NO: 559505 - DNA, 571 bp, Homo sapiens
taccatgaggaaaagaagttgttatacraaaaagacacttgcacatgcatgtttatagcagcacaattcgcaattgcaaaaatatggaaccactcaaaattcccagcaatcaatgagtagataaagaaattttggaatatatacacaatagaataccatttggcaataaaaaggaacaaaataaaggcatttgcagcaatctggatggaattggagaccattattatgagtaaattgactcaggaatggaaaaccaaatgttttatgttctcactcataagtgggaactacgttatgaggatgcaaatggataaaaatgatacaatggacttttgggccttgggtgtatagttggagggaggtgagggataaaagactacaaattgggtaaagtatacactgctcaggtgattgctgtaccaaaatctcagaaatcaccactaaagaacttactcatgtaaccaaaaaccacctgttccccagaaacctatggaaatataaagatatctatatagattttagatggacacatttgtctatctgtcttttaaataacctaatagttttgact

SEQ ID NO: 559506 - DNA, 525 bp, Homo sapiens
ttgaatcactttcaagacaaataaggaattgaaccacttgtttttacaaagtctgttactgggagacaccatctctggatccaggccgggaggctgcggtgaggragccagctcaggaggttgtcagggcagccacagtggagccacagctctggggctgccatcttgtcctgtcagcttagctaccactgttcacatctctccctcagtagtttatgttttattacatatcacaaaatgtccatatggaatgtgttgaaaataaagttgaaaggacaaaaataacaggttcttcaccacagatagccgaagaagtagtggtctggaacagccctatccatcagaactttgacaatgatggaaacgttctgttcctgcagtgaccaatatggtagccactagttgcatgtggctactgagcacttggagtgaggcgattgtaatttagaatccaaacatttcattttatttaattttaattaagttaaaatagccatgtgactagtggctgcagtactggacaca

SEQ ID NO: 559507 - DNA, 525 bp, Homo sapiens
ttgaatcactttcaagacaaataaggaattgaaccacttgtttttacaaagtctgttactgggagacaccatctctggatccaggccgggaggctgcggtgaggaagccagctcaggaggttgtcagggcagccacagtrgagccacagctctggggctgccatcttgtcctgtcagcttagctaccactgttcacatctctccctcagtagtttatgttttattacatatcacaaaatgtccatatggaatgtgttgaaaataaagttgaaaggacaaaaataacaggttcttcaccacagatagccgaagaagtagtggtctggaacagccctatccatcagaactttgacaatgatggaaacgttctgttcctgcagtgaccaatatggtagccactagttgcatgtggctactgagcacttggagtgaggcgattgtaatttagaatccaaacatttcattttatttaattttaattaagttaaaatagccatgtgactagtggctgcagtactggacaca

SEQ ID NO: 559508 - DNA, 525 bp, Homo sapiens
ttgaatcactttcaagacaaataaggaattgaaccacttgtttttacaaagtctgttactgggagacaccatctctggatccaggccgggaggctgcggtgaggaagccagctcaggaggttgtcagggcagccacagtggagccacagctctggggctgccatcttgtcctgtcagcttagctaccactgttcacatctctccctcagtagtttatkttttattacatatcacaaaatgtccatatggaatgtgttgaaaataaagttgaaaggacaaaaataacaggttcttcaccacagatagccgaagaagtagtggtctggaacagccctatccatcagaactttgacaatgatggaaacgttctgttcctgcagtgaccaatatggtagccactagttgcatgtggctactgagcacttggagtgaggcgattgtaatttagaatccaaacatttcattttatttaattttaattaagttaaaatagccatgtgactagtggctgcagtactggacaca

SEQ ID NO: 559509 - DNA, 573 bp, Homo sapiens
tacccagctagtagctgagtggttaaaaaaaaattgttccagtacctgctcttgtgatatttgcattctaataggagagaaaataaacaagtaatcacccatttgcataataattgatttgataaatgagatgcayataaagtacaggacagtgtaagaaagcaaaagacagacctagcttgggagtggatccacattctaagcatgaagctgggacttgaaaggctaggagttagccaggtgacaatggggaagagacgctgaggttttttacttttaccattgggtaggggatggtgccatgctgagatgggaaacactgtgttttcatagagtagccctggatgggcagatcagagattcattttagcatacattggctccagggtaaccatgaaacctccaacgggaaatgtcaaggaggcagcagctattgcacagagcttgttgaggggtctggagtggcgctgtaactggaagatgccttattgatgatctagtctgtctcaaaggcattcctcaccaccccttacccaaatgcatcattcatggggaaaactcccagaatccagt

SEQ ID NO: 559510 - DNA, 573 bp, Homo sapiens
tacccagctagtagctgagtggttaaaaaaaaattgttccagtacctgctcttgtgatatttgcattctaataggagagaaaataaacaagtaatcacccatttgcataataattgatttgataaatgagatgcacataaagtacaggacagtgtaagaaagcaaaagacagacctagcttgggagtggatccacattctaagcatgaagctgggacttgaaaggctaggagttagccaggtgacaatggggaagagacgctgaggttttttacttttaccattgggtaggggatggtgccatgctgagatgggaaacactgtgttttcatagagtagccctggatgggcagatcagagattcattttagcatacattggctccagggtaaccatgaaacctcyaacgggaaatgtcaaggaggcagcagctattgcacagagcttgttgaggggtctggagtggcgctgtaactggaagatgccttattgatgatctagtctgtctcaaaggcattcctcaccaccccttacccaaatgcatcattcatggggaaaactcccagaatccagt

SEQ ID NO: 559511 - DNA, 505 bp, Homo sapiens
tttcccacaaaaaccctatttttccattttcttcttgccatggttttcagtgtaagtggttggctaatgcagggactaatgaaataaagaacataataggtttctctggttgttcacctttagcagaatgtaaatacctttttgcaattcaaagtgagttccggttcagacagaaagtttgcctctggggtgcaccttactcatcctgtcatagagggagtgctctcacytggtaacccagtcttgctgaagacccagcctggtaggtccactgaaatgctatgatcctggagaacgtgattgtgggggaaagaatggaatggcagacatacaaattgtgcacctctgaatttccagatggcaatggcagaattttttttttttagttaagagtcttgctctgttgcccaggctgtagcgcagtggtgcgatcgtggctcactgcagccttgacctcccgggctcaagcgatcctcctatctcagcctccagagtcgtggggact

SEQ ID NO: 559512 - DNA, 555 bp, Homo sapiens
tattaacctatcttatgtcaatttgattctcaggcccagctgggccccaaagaagatggaggggcagttttgctgcccctactcaatgtatcaccctcagggctcccccaagcactgcttcctggggggtggccgctgcagagacwgttgtggccctgtacccttgacttgtgaagctagctcattagcaccagcatgggtgcttcctcttagcaacccttcagactggaaagatctacttgtagaattacacggtaaaaaataaaaaatcaggatgcaaaactctatctatagaatgatccagtttcataaaagactggaataaaaaaacccataaatgtaaaactgttattttgtttcatttcacaatttttttgaagaggcactgaggtttctgacatatgagcattgcctccttcccttctgtgtaccctcatgggtgtatcgttctcactgtgaattagtacagcagcgttcaatagactaacgaaattcaggcacacttgaagggcaccttctctttttttggtcctggcaagacagctggcaatgata

SEQ ID NO: 559513 - DNA, 555 bp, Homo sapiens
tattaacctatcttatgtcaatttgattctcaggcccagctgggccccaaagaagatggaggggcagttttgctgcccctactcaatgtatcaccctcagggctcccccaagcactgcttcctggggggtggccgctgcagagactgttgtggccctgtacccttgacttgtgaagctagctcattagcaccagcatgggtgcttcctcttagcaacccttcagactggaaagatctacttgtagaattacayggtaaaaaataaaaaatcaggatgcaaaactctatctatagaatgatccagtttcataaaagactggaataaaaaaacccataaatgtaaaactgttattttgtttcatttcacaatttttttgaagaggcactgaggtttctgacatatgagcattgcctccttcccttctgtgtaccctcatgggtgtatcgttctcactgtgaattagtacagcagcgttcaatagactaacgaaattcaggcacacttgaagggcaccttctctttttttggtcctggcaagacagctggcaatgata

SEQ ID NO: 559514 - DNA, 615 bp, Homo sapiens
atacggaggatccctttgtatttattggcctctgagttcccttagtatttattgatcattattgggtgtttctcggagaggcggatgtggcaggatcataggataatagtggagagaaggtcagcaggtaaacacgtgaacaaaggtctctgcatcataaacaaggtaaagaattaagtgctgtgctttagatatgtatacacataaacatctcaatgccttaaagagcagtattgctgcccgaatgtgccacctccagccctaaggcggttttcccctatctcagtagatggaatatacaatcgggttttacaccgagacattccattgcccagggacaggcaggagacagatgccttcctcttgtctcaaccgcaaagaggcgttctttcctcttttactaatcctcctcagcacagaccctttatgggtgtcgggctgggggactgtcaggtctttcccttcccamgaggccatatttcagactgtcacatggggagaaaccttggacaatacctggctttcctaggcagaggtccctgcagccttccgcagtgtttgtgtccctgggtacttgagattagagagtggtgatgactcttaatgagcatgctg

SEQ ID NO: 559515 - DNA, 615 bp, Homo sapiens
atacggaggatccctttgtatttattggcctctgagttcccttagtatttattgatcattattgggtgtttctcggagaggcggatgtggcaggatcataggataatagtggagagaaggtcagcaggtaaacacgtgaacaaaggtctctgcatcataaacaaggtaaagaattaagtgctgtgctttagatatgtatacacataaacatctcaatgccttaaagagcagtattgctgcccgaatgtgccacctccagccctaaggcggttttcccctatctcagtagatggaatatacaatcgggttttacaccgagacattccattgcccagggacaggcaggagacagatgccttcctcttgtctcaaccgcaaagaggcgttctttcctcttttactaatcctcctcagcacagaccctttatgggtgtcgggctgggggactgtcaggtctttcccttcccaagaggccatatttcagactgtcacatggggagaaaccttggacaatacctggctttcctaggcagaggtccctgcagccttccgcagtgtttgtgtccctgggtacttgagattagrgagtggtgatgactcttaatgagcatgctg

SEQ ID NO: 559516 - DNA, 529 bp, Homo sapiens
tttcattttttgctttttccttgtgtctttttataaaattaaatattttaattagttttaagatgggtaagttctggggattttatacatttttgcaagtatgtgttgtaggaaaaacttgttttgttttgttttgatttgattttctctttcttgttctctctgtttctctcttcctgtgtagatattttgtatttgcctccagctggtccctcagatataaatktagaaacagatagttttaggacttctagtccacattaatgttgaagacagtgagatgtgatcaccaagccagtgggcagcttggctcacatgtggacatgaagctacgcctttgttaaactttcttcctaggccaaaatctttccatgaattggtaaagtagacttcatttgattttattcttttttcatgagcaagacaactcacttctcacctgcttcaacctcaggtagacactcttccttctctttaccccacaggtgcccagcccctgtccttgctgagcccagagtccacaggccat

SEQ ID NO: 559517 - DNA, 625 bp, Homo sapiens
aacaaatatgctccaaattttgttccagaaatatactttactcaattgctacaagctgtaagtagctcaaaagaaaagttttcttgactgtggaaaacaaaacaaaggatcagcaatattttaagcaaaaaagtcaaaaaaagattacttaaatcttttattagttcaatccatgctgttaactcctgttccacatgacattcatggacatcccagctctccatgcaagtcctgaaagtttttcctctattctaatgtcacaatttccaaagttatcagagccctgcattcaacaacacctaccagagttttatagctgattataaaaccaccttctagagaggaccaaaacaagacaacaattgtccatggatgacaaaaagttttagggcagccatagtcaaagacacaattgacaaggaaatttgttatctctgtggcacacaataatttaacataatagttataattattactgatagcatacactaagtcawatcagaattatacgagtttcccataattttgaaacacataccaataacatatttatacaaatacagcccaaagaaagccaaacatttcatatttgacaatgctttctgcatgatttttatgccaaata

SEQ ID NO: 559518 - DNA, 498 bp, Homo sapiens
gcggtggttcatgcctgtaatcccagcactttgggaggccgaggcrggcagatcacctgaggttgggagttccagaccagcctgaccaacatggagaaacccccccgtctctactaaaaatacaaaattagctgggcgatggtgcatgcctgtaattccatctactcgggagcctgaggcaggagaattgcttgaacctgggaggcagaggttgcagtgagccaagattgtgccattgcactccagcctgggcaacaagagtgaaactccatctcaaaaaaaaaaaaatttccatattatagaaactcttttacactatattcttcaacctaatttttgaggagagtttattttaataccaaaaccagaaaagaatagtatgagaaataaaaattacaagttaaactcacttacaaatgtgaacagataaactctgttctcttgcaaactaattgcagcaatgaatgagaaaaacaaataaatttatcccaggaattc

SEQ ID NO: 559519 - DNA, 541 bp, Homo sapiens
gtggactgagcttcttccaggacaagcacatggggacaataagcttctcaagatgacctttcaggagccaaggagcttccaggcttccatggtaccagtrgggtgaggtggcagggatgggagagggacttgtggagggtctcctgatgccacaggctgagtagccttgaaggacagctgagagtggtggtctgaggaaaatcagactcagagatttctctagatttggaattgtattgtattattgtttctagtaacaggttgaaaatatgggccaggcacagtggctcacacctataattccagcactttgggaggctaaggtgtgtggataacgaggtcaagagtttgagacaagcctgaccaacatggtgaaaccccacctctactaagaatacaaaatttagccaggcgtggtggcaggcacctgtaatcccaggtacttgggaggctgaggcaggagaattgcttgaacccaggcggcaaaggttacagtgagccgaaattggaccactgcactccagcctgggcgacagagcaa

SEQ ID NO: 559520 - DNA, 434 bp, Homo sapiens
ccattttagtcaaaaaatatttcctttagtaattttttctctattcttatgagtctctctaattcagaggacagaaagacaatgatcactccaggctactgaaagtgtggttgctatcaagtgtcaaactgagaactgaaggttgctgttggcaaaagaaattgagaagaaccatttagraacttcatttgcaatatgacagataaattatatgcctattaaatctgataatttgaaaatggggttgatagtttatgccttttattgtactttcccaataattccattttagtctatttttaaaagtgttacccatgacatatttagaggagagagagaattgttccttcacaacagaaagtttgagaattattggcctattattttctctccatttttagcatttggagaaaaaggcagaataaataagtttt

SEQ ID NO: 559521 - DNA, 563 bp, Homo sapiens
tgacttaactaatccctgttctgagtttgttgtttatcaattgctttttgagaatctatagatttaaagaccaataattttctcaccttccatgcaaagatattaaagaagagcccaagtgacacaggtgtggataaataattataacagaatacagtaaatgaaataatagaagtatgcaaattctacacagtactatgcataaatgaataattagctttctgctgggaaagtccctgtaagtgataaggaggctaaggagaaggtgtagcagttggcatgattagttgacatgataatgtgcagatgacttcaacaactagagggctcttagcatatataactttgagggaagtggtcagggatggcaggcaatatttaaagagaagtagtcaaggctgtgtcataaaagtcactgcagaaggtggaacttacatgatggaagccagcagttggctttaagcagagcactgatttagtcatatatgcattttattgtagtatgkatattgaataaaaggccacagaggtgaaacaaagggcacaagaatcaggtagggcac

SEQ ID NO: 559522 - DNA, 557 bp, Homo sapiens
gtgcagtggcacgatcaaagcttactgtggcctcaaactcccaggctcaagcgatcatcctactttcagcctcccaagtagctgagactacactaaaggcatgcatccccacacctggctaatttttaaaattattttttgtagagatgggatctcactatgttacccatactaatttctaactctaggcatcaagcgatcctcctgccttggcctcccaaagtgccgggatgacaggcatgagccactgcacctggccttaagatcctacattttaagaagctcccaggtaatgcaacaatgttggtttaagcacaactctgtgagtagcaaggtccttagctcctttgacctaagcgtcatattatgcttttgtatgagctgtggtgctgccccagttttgaggaaagggagcattcatttttagattcagatttcatacatatatatatwtttttttcttttttttgagatggagtttcactcttgttgcccaagcctgagtgcagtggcgcgatctcggctcactgcaacctcgcctccagggttcatgcgat

SEQ ID NO: 559523 - DNA, 599 bp, Homo sapiens
cctgaggctggcagttcaaaaccarcctgaccaacatggtgaaaccccatctctactaaaaatacaaaaattagccaggtgtggtggcggatgcctgtaatcccagctactcaggaggctgaggcaggagaatcgcttgaacctgggaggaggaggttgcagtgagctgagatggcaccactgcactccatcctgggcgacagggtgggattctgtgtcaaaaaaaaaaaaatgcatgaagttagaagctgaaactccaacagtgcctgctttagcaccacactccaactaaacttcacatgctggtgcatttccatcttcctctgtacactgtgtcacgccatcaacactccgcataccaggctatatgctgtgtttcattcactatctgcatgattgagaacattgggttcccatcaagttgctattgcaataatatccaacagatcaggacacatccaccgcttacttgtccagtttgatctttaagggaattgaaaatccacaaaggtctaaacttgtcaggtattttagtgggaaatgggtaagtccctctcaaacagctgacctggaactcgtacctgccacagagagtgaaa

SEQ ID NO: 559524 - DNA, 599 bp, Homo sapiens
cctgaggctggcagttcaaaaccaacctgaccaacatggtgaaaccccatctctactaaaaatacaaaaatyagccaggtgtggtggcggatgcctgtaatcccagctactcaggaggctgaggcaggagaatcgcttgaacctgggaggaggaggttgcagtgagctgagatggcaccactgcactccatcctgggcgacagggtgggattctgtgtcaaaaaaaaaaaaatgcatgaagttagaagctgaaactccaacagtgcctgctttagcaccacactccaactaaacttcacatgctggtgcatttccatcttcctctgtacactgtgtcacgccatcaacactccgcataccaggctatatgctgtgtttcattcactatctgcatgattgagaacattgggttcccatcaagttgctattgcaataatatccaacagatcaggacacatccaccgcttacttgtccagtttgatctttaagggaattgaaaatccacaaaggtctaaacttgtcaggtattttagtgggaaatgggtaagtccctctcaaacagctgacctggaactcgtacctgccacagagagtgaaa

SEQ ID NO: 559525 - DNA, 594 bp, Homo sapiens
atttttattacactgggatttctccaagaagagatgtttccaaatctctacagagggagtcgttgtctttctactgccaagactatctgctatgcaaacatcctggatcatccattgatgatctcaatgtcctttgttcagaagacatgcaaaccatgtccagacatagaggactagttcataacaaaaggatcctgtggcctgatttggagcagggcccctaagggacagaaaatttcaagacatatttgggagacctgacagtggaagttatctttacccaattttcccagggaacggtactaggaaggcataaaacctcaggaaatttagagctgcacagtgtgtcagaaactatggaaccggagacagctttgcaagggtttttccggaatggcaactgactgaggttataaaattattcccacayacttatgctgcaaggagtggaatatccagcaaactgggagacacaggaggacaagaacagatgatgcttcggtaatgacttaaagggaccagttcccaagggccatatgggatgttcaccccacaagacgattgaaggagggagagaggcatctccccagtgcc

SEQ ID NO: 559526 - DNA, 641 bp, Homo sapiens
ctacaactcacactttagggtatagattaattttgaactttataaaagtggaattataacatgtgtactctcttggatctttctcctaacattatgttagcttctttctcctaamattatgttaatgaaattcatattgttatagttatttgtgaatgcttcattcttgtggtggtacagtattccattgtgtgcatactatcacaatctagttatgcatctgtcgattggctttttgctacatttaacattctgatgtatttcttttggtgaaagtatgtatgcacttttgttgtgtatagaggtaagagtagagttgttgggtcatagggtatgcatatgtagatactgccacacagttttcccaagtgattatatcaatttacatacccaccattaatgtacaagaattccagttgttcaacatcctcactattacttgaaatctctaaactggctggatgtggtggcttacacctataattctagcactttgggaggctgcggtgggagaattgcttgaggccacgagttcgagaccatcctgggcaacatagtgagaccctgtttctacattaaaaatgtttaaaaagaaaaagaatttaaaaattagaaaaatctttaatctatttttttttttt

SEQ ID NO: 559527 - DNA, 641 bp, Homo sapiens
ctacaactcacactttagggtatagattaattttgaactttataaaagtggaattataacatgtgtactctcttggatctttctcctaacattatgttagcttctttctcctaacattatgttaatgaaattcatattgttatagttatttgtgaatgcttcattcttgtggtggtacmgtattccattgtgtgcatactatcacaatctagttatgcatctgtcgattggctttttgctacatttaacattctgatgtatttcttttggtgaaagtatgtatgcacttttgttgtgtatagaggtaagagtagagttgttgggtcatagggtatgcatatgtagatactgccacacagttttcccaagtgattatatcaatttacatacccaccattaatgtacaagaattccagttgttcaacatcctcactattacttgaaatctctaaactggctggatgtggtggcttacacctataattctagcactttgggaggctgcggtgggagaattgcttgaggccacgagttcgagaccatcctgggcaacatagtgagaccctgtttctacattaaaaatgtttaaaaagaaaaagaatttaaaaattagaaaaatctttaatctatttttttttttt

SEQ ID NO: 559528 - DNA, 558 bp, Homo sapiens
cttaaactcatcaaaaagttaaatgtagagttcccacatgacccagaaattattttcctaggtatgtagccaagagaaacaaaaatatgcattcacacaaaacttacacataaatgttcatagtagtattattcgtaatcataaaaaattagcatgtgcctatcaatagataaatggataaacaaaattagcatctacatacaatgaaatatcatttagtcttaaaaacgaatgagggggctggcaagacggccaaataggaacagctgcgatctgcagctccaagcgagatcaatgcagttggcaggtgatttctgcatttccaactgaggtacccagctcatctcactgagactggttagacagtgggtgcagcccatggagggtaagcagaagcagggtgggccatcacctcacctgggaagtgcaaggggtccaggaactccctcccctagccaagggaagccataagggactatgccacgtggaacagtgcattcaggcgcagatactacactttttccactgtcttygcaacctgcagaccaggagattccc

SEQ ID NO: 559529 - DNA, 501 bp, Homo sapiens
cttcctttgcataagagggcctgattgaaaacttttataaaagccaaaccattctgttgttctctggaacaccttcattttatacagaaggatatttctccttgtttgtgaactgttcactggaataaagtctcattcctccaaattcattttcagggaattttattattctttaagttctgggatacaagtaaagaatgtgcaggtttgttacacaggcatacatgtgccttggtggttttgctccacccatcaacctgtcacctacatgaaatatttctcctaatgctatccctccccttgccccctcascccccagcaggccctggtgtgtgatgttcccctgtgtccatgtgttctcattgttcaattcccacttatgagtaagaacatgtggtgtttaatttcctgttcttgtgtcagtttgctgataatgatggtttccagcttcattcatgtccctgaaaaggacatgcacgcatccttttttatggctgcata

SEQ ID NO: 559530 - DNA, 501 bp, Homo sapiens
cttcctttgcataagagggcctgattgaaaacttttataaaagccaaaccattctgttgttctctggaacaccttcattttatacagaaggatatttctccttgtttgtgaactgttcactggaataaagtctcattcctccaaattcattttcagggaattttattattctttaagttctgggatacaagtaaagaatgtgcaggtttgttacacaggcatacatgtgccttggtggttttgctccacccatcaacctgtcacctacatgaaatatttctcctaatgctatccctccccttgccccctcaccccccagcaggccctggtgtgtgatgttcccctgtgtccatgtgttctcattgttcaattcccacttatgagtaagaacatgtggtgtttaatttcctgttcttgtgtcagtttgctgataatgatggtttccagcttcattcatgtccctgaaaaggacatgcaygcatccttttttatggctgcata

SEQ ID NO: 559531 - DNA, 638 bp, Homo sapiens
atataataattgcagctttgtgtagcaatgaattacttatcactagcatgcaacctgaaaccgcactctagaactcttcaagaggaaatcactgtctgagagaggtttgcaccagacaatcaatcgaattcctttccaattgtagaccttatgattccactatcttagttagtaaagataacaagaatgaaaacagcaatagtgctaaggttatatcttgatgtctagcctttatctatataaagaaggattagcagagagctaaaagacagtcacttaatactgggcacagttaatatattgataatatgtaatgtgaactcacataagaaagtatccttgccttatcagtaggaaaggtctattctattactcccctattaaaaataaacattcccgaaatcaaatctttacatagcttctttaaaaaaaaaaaaattgaatacccttttaggaaaagaggaagtcaaattgtccctgtttgcagaygacatgattgtatatctagaaaaccccattgtctcagcctaaaatctccttaagctgataagcaacttcagcaaagtctcaggaaacaaaatcaatgtacaaaaatcacaagcatacttatacaccaataacagacaaacagagagcca

SEQ ID NO: 559532 - DNA, 638 bp, Homo sapiens
atataataattgcagctttgtgtagcaatgaattacttatcactagcatgcaacctgaaaccgcactctagaactcttcaagaggaaatcactgtctgagagaggtttgcaccagacaatcaatcgaattcctttccaattgtagaccttatgattccactatcttagttagtaaagataacaagaatgaaaacagcaatagtgctaaggttatatcttgatgtctagcctttatctatataaagaaggattagcagagagctaaaagacagtcacttaatactgggcacagttaatatattgataatatgtaatgtgaactcacataagaaagtatccttgccttatcagtaggaaaggtctattctattactcccctattaaaaataaacattcccgaaatcaaatctttacatagcttctttaaaaaaaaaaaaattgaatacccttttaggaaaagaggaagtcaaattgtccctgtttgcagacgacatgattgtatatctagaaaaccccattgtctcagccyaaaatctccttaagctgataagcaacttcagcaaagtctcaggaaacaaaatcaatgtacaaaaatcacaagcatacttatacaccaataacagacaaacagagagcca

SEQ ID NO: 559533 - DNA, 591 bp, Homo sapiens
acacacacacacacacacacacacacacacacacacacacacacacccctgctttctttttatccaagtcttaagcatgagtgaagatcctgttcaagtttcacctccttgttgaagtcttagccaatcactcccatctcttccttcctttcaacatctattttatgtattccttatttaaggacttcattgtattttgcctgcagagttctcaacaattttttgagagattartgtttcctctgaaaagattataaaccccaagtagatagtagccatggtttttgatcttaccctacttttctggcacaatagagatagctaataattgctaactataatgaaagccatacagctacccctaataaacagcaaatacttttagaaattcctggtgaatccttttatctaacctttgctagatcatggattccttcatgtttagtaaaaggtagaatgtgatgaacctgtgtgttgactgaaaaagaaggaaagctaggaagattttaggtaaaagtaatgtagggtgatagatttaaattaggtatcttgttttttttttttcaagcatgatattgattttgacttatc

SEQ ID NO: 559534 - DNA, 591 bp, Homo sapiens
acacacacacacacacacacacacacacacacacacacacacacacccctgctttctttttatccaagtcttaagcatgagtgaagatcctgttcaagtttcacctccttgttgaagtcttagccaatcactcccatctcttccttcctttcaacatctattttatgtattccttatttaaggacttcattgtattttgcctgcagagttctcaacaattttttgagagattagtgtttcctctgaaaagattataaaccccaagtagatagtagccatggtttttgatcttaccctacttttctggcacaatagagatagctaataattgctaactrtaatgaaagccatacagctacccctaataaacagcaaatacttttagaaattcctggtgaatccttttatctaacctttgctagatcatggattccttcatgtttagtaaaaggtagaatgtgatgaacctgtgtgttgactgaaaaagaaggaaagctaggaagattttaggtaaaagtaatgtagggtgatagatttaaattaggtatcttgttttttttttttcaagcatgatattgattttgacttatc

SEQ ID NO: 559535 - DNA, 381 bp, Homo sapiens
attttttcatgttttagtatgtctctagaagctaatcactttttaaaaagacagtaacactcttacctacaaaattaacagcaattcactagtttgctcttcttttctataaaactccaactaaataagaacaagtatgaattctttaatagttcgttttyttcctaactcattattcaggtccacccatagtttataaacctttgaaagagctgcagactattctttattagtggtttactctcagtaattttaacagtttaacaaacaatttatctgtagatgaccccaaagaatagcgtatcctgaatttaacaaagcatgtaagaaagttaagcaataatggtaatcattagagagatttcagcacaatggcaattt

SEQ ID NO: 559536 - DNA, 571 bp, Homo sapiens
aagggggaagagccccttataaaaccatcaggtctcatggaactcactcgctatcacaagaacagcatgggggaaaccgcccccatgatccagtcacctcccaccagctctctcccttgacacgtagggagcacagttggagatgagatttgggtgaggacacaaagccaaatcatatcagtgatgttttctcaatcctggcatttggggtcctctagcacaatggctggcccctcacacagagttcccagtcagccttcattttcctttcttttcaatcatgaatgagcagcaaaaattaccagatatttgagaaaaacctgctgcatgaaagagaaaaatcacaagaagcacggaaacaaatttttcctggaggaaagagagagtaygtgaagagacaaagaaagcaatttgaaaggtatgtcttgattaaaagaggatttgctaagcccaatatttcaaatttctcttttgtttgatacactgggattttgacaccttgaagtaatataccacgataagattcagataaaagctatgctattcttacattctcatataacaattaggg

SEQ ID NO: 559537 - DNA, 575 bp, Homo sapiens
gatgttgtttcaatccaatcaattattttcataaacaaatacaaatttcacctgcaaatgggaaaagttcttatgtgcatataagacactcaacaggcaaagttcctcaaagtaattccaataatttcagtaatgtcaaaatctgaaatggaaaggtaaagttatagagtagagaaatttcattcttattattttccratttttctgtgtaagcagcaaaccctaagaggatcaaccatattttatgtcatcagcattttataagtgccatatttaagtacttccctgaaaatgccatgagtatgtataaagatgaaaggcttatgaatataaataaagctaagtctccaactgcaaaccttatcattttctaaaatgcattttgttagaaatagctaaggatacttgaattttgctttctgggttcatacttataaggtacaaataccaaaatatgcattaaagaatttatcataaagtaagcgaaaaagagaaaaatcaataagtagccccaattcaaaataacaaaaggtcacccaaagcacagcaatacgtctggcaatatcatacatgat

SEQ ID NO: 559538 - DNA, 626 bp, Homo sapiens
tgaattttgctttctgggttcatacttataaggtacaaataccaaaatatgcattaaagaatttatcataaagtaagckaaaaagagaaaaatcaataagtagccccaattcaaaataacaaaaggtcacccaaagcacagcaatacgtctggcaatatcatacatgatggcttcaaatctaaaaacaaagtcattgatattaaccttggttattgactaataagaaagctattaaagtcaggttagtgtaccaacaaggaagcccaaactttcaagactgttgtctgactgcccttgagggttcacctttatctcccctgaaaaatgccaatataaaaattctaaaataccttcataagccccaaggaaagcctgtggacagacagatgatgtgatatatttcttcctttccattcttgggcagcttcttctctctgcggctgaaagcaaatgcattgagactcagtcgcatatttaattagaagcaagctgcttgcactatcactgtgtgaatctacctctccaatctctcgtgagtcaatctttcccatctctgattttcttttatatttatgctagaatatttaattgtagacaaaaggttactctggctgtattcactgca

SEQ ID NO: 559539 - DNA, 578 bp, Homo sapiens
tgtgtaggcatggcacacgcacccagcactgtaattccatatgattcaggggcaaaactctaatttctgcacacagttgggtttttaaatcctattcagaccctatccattctggctggttctctaaggccagatttatcattaaacttgactctttttctgaagtgcagcagccatacagcaattttatttttgttcctctgcttgttacccccccaaaaaatgttcattaaaagtgtattmatctaaatattacctttttcattttatttagcctagagctaatagttttacacattttcccagctatttaattgaaaaaaaaaaggatctgagggaatgaacaagcgctaagaactttgctgtgaacatgcaaaatagtagtttaaaaaaacaccccaagatcaagtcagaaaacaacattttgttaaattcttattttcagcctaggcttactagtaataaggaatgtatttttggcaaaagactggacaacttctaaaaagataactgggaggattaaaaaagacaatagagacacttctcttttctagtcttaaggtatctcacaattttac

SEQ ID NO: 559540 - DNA, 538 bp, Homo sapiens
agtatctggttatagtaagtgttcaataaatggtaactatcattgtttttcaagaaagagatttctcctctaatccatctcacattggcagcgattcacaatggccaggctcattaccaattggtagacaagccactagctcagctgggagcactgtatcctgaagggtttttctaacaaaaatatacatcattgtaaccatgaaaaatatatttcctatctctgactcgtatttataaaaactgcatttcccctgtgcctatcacaacaaacgaggatttaagttaagttacatgagggtagcaacttcttttgtgaaaattctttstctatttggtttaagaaactgattccaaatgtttttgtgcatagaagccttttctagtctccattcagtatcaaggccttataagaacactgaggaagaacaaaaagagagttttctctgttgaaatccctgtgctggcagcatgtgtgacctggcctacacaagcattggccaagatactgaaatctggaataaattccaagggtcaag

SEQ ID NO: 559541 - DNA, 599 bp, Homo sapiens
aggtgccctcccagtcatatgcgccgcatcaaggttcttgggaatcaacaggaagtaagtcataggaatcaatacaggagtctgtattgaagtctgaaacctgggttctaatcctggctctgcttctaattatttggatagtcttgttaattyatttagcttttaaaaaaatacacttttaaaaatagcagctttagttccacagcaaaattgagatgaagatacagagattttccatatattccctggccccacacatgcacagcctctcctactatcaacatctccactagagtagtacatttgtcatagttaaccaacctacattgacacatcataatcacctaaactctgtaattgacatttgggttcactataggtgtacattctgtgtgtttggttatgtatactgccgtgtatccagcattacagtatatagtgcagtttccctgccctaaaaatcctttgtgttctgcctcttcatccctctctccccttcccaaactctggcaaccactggtcttttttactgtctccatagttttgcctatttcagaatgtcaaatcatttagctttaaaaagttttgtaggactcaat

SEQ ID NO: 559542 - DNA, 599 bp, Homo sapiens
aggtgccctcccagtcatatgcgccgcatcaaggttcttgggaatcaacaggaagtaagtcataggaatcaatacaggagtctgtattgaagtctgaaacctgggttctaatcctggctctgcttctaattatttggatagtcttgttaattcatttagcttttaaaaaaatacacttttaaaaatagcagctttagttccacagcaaaattgagatgaagatacagagattttccatatattccctggccccacacatgcacagcctctcctactatcaacatctccactagagtagtacatttgtcatagttaaccaacctacattgacacatcataatcacctaaastctgtaattgacatttgggttcactataggtgtacattctgtgtgtttggttatgtatactgccgtgtatccagcattacagtatatagtgcagtttccctgccctaaaaatcctttgtgttctgcctcttcatccctctctccccttcccaaactctggcaaccactggtcttttttactgtctccatagttttgcctatttcagaatgtcaaatcatttagctttaaaaagttttgtaggactcaat

SEQ ID NO: 559543 - DNA, 593 bp, Homo sapiens
aaaaattgttaccaaagacaaagtaatgtttcataatgataaaaaggtcagtcaacaaaaagatataacaattataaatgcctatgcatctaacaacaaagccacaaaatacatgaagaaaaaaactaacagaactgaaaggagaaatgtgcaattcaacaataatagttggaaattttaatactgatattttcaataattttatttcaataataaayagctagacagaatatcagtaaggaaacagaagtcttgaacaatgctataaaccaactagacctaacagatatctaaagaacatttcacttaatcacagaaaaatatataatacattcttctcaagtgcacatgaaacattccccaggaaaggtcaggttaggccataaaacaagtctcattaatttaagggattaaaagcatactaagtatgttctctgatgacaatggaatgaaactggaaattcatagcagaaggaaattggggatcacaaatatgtggaacatgtgtaaaacacagttcaaaataatcaatgggtcaaaggaaatctcagaaaggaaattgggaaattctttaactgaagacaaaaacacaa

SEQ ID NO: 559544 - DNA, 444 bp, Homo sapiens
tcttttacccatgatgtgggttaagaggggttttgactgattgtgaggcaatgtatgtgccgttaaagtttctcacctacmttgggtcttcatcttttatctatcaaagtataaagttattcatgtataaggctggctgcaaaatccttcacaaatcaaagtataccctataagtgcacatagtagacccccttttcatttctgttgttcatagagacataaataaggaaaaaatattcaaagacaagagtctcatgctagtagaagtcttgatccatgatcttgggaaaagctgttaacatcaaggataccagttttaccttaagggttccaatgggtgtacagttccaagagtgtggagggacccttttcagttgtgagactatgaacccaagattcaaggttccaaagttttgttgcagggtggatggcaaggacagtctt

SEQ ID NO: 559545 - DNA, 564 bp, Homo sapiens
aggtaggggctttgttttctaggaaagggaatgtgattcctaatattttatgttttgagtatctgaaaagagatattgtctgtaaagaggctctggaagagaagatgggaatgaatgagtactagatttttcctttctgcttttggaaatctaggctcagtgccaagacatacttactaggagatgaaacatatctccagtggtataattatttagcacatgacacttataaggagatcataggaacctgtatgcatatagtctgggggagggatctgtggttaaaagggtaggtaggggaaaatgtaaagatatatgcatagtttagcatttacttatttatttattaatttttactttattttcaggagtacatgtgcaggtttgttatataggtaaattgtgtgtcatggggatttggtgtacaraatattttatcaccagggtaataaacataatatctgataagtagtttttcaatcctcaccccactctcaccctttaccattaagtaggccctggtgtctgtgtactcaatgtttagatcccacttataaggaacaa

SEQ ID NO: 559546 - DNA, 494 bp, Homo sapiens
ttcagtgcctctttaactcttccttgtaaaatcatttggtatccaagttctgtagcaaattctgattgctgagggtttaaactaaaagctctctcaagtaacgtttgaattttttgaagaataagttgactacgtccacactaaaaagaaaaaaaaatgatgtaagatttcaaagtctaacatttctactgagactaaaggattattttttctaaatatatatattatttgtacttcamaggagtgatgaaaaagaaaaaaattaataattaaggaaaaataaaactttcctattatctagacaatgcatcaagaaagagtttatattctatcagaacttaatatcctaatgaatataatgcttttacaaaataactagtatgaaaagtacacttctaatgatgtcactgcaaaaacatattttttgaactccttttccaagctgtctcatgactgttttacagattaaacaggaaaaccattattttatggtt

SEQ ID NO: 559547 - DNA, 494 bp, Homo sapiens
ttcagtgcctctttaactcttccttgtaaaatcatttggtatccaagttctgtagcaaattctgattgctgagggtttaaactaaaagctctctcaagtaacgtttgaattttttgaagaataagttgactacgtccacactaaaaagaaaaaaaaatgatgtaagatttcaaagtctaacatttctactgagactaaaggattattttttctaaatatatatattatttgtacttcaaaggagtgatgaaaaagaaaaaaattaataattaaggaaaaataaaactttcctattatctagacaatgcatcaagaaagagtttatattctatcagaacttaatatcctaatgaatataatgcttttacaaaataactagtatgaaaagtacacttctaatgatgtcactgcaaaaacatattttttgaactccttttccaagctgtctcatgactgttttacagattaaacargaaaaccattattttatggtt

SEQ ID NO: 559548 - DNA, 530 bp, Homo sapiens
ttcatattatatatatatataaaagcatacattttacatatatatagatagatatatgcacacacacacacacacacacacacacacacacacacacacacaggaaaagatatgaccatggtaggcatgaggatggccaagggagggtgtaacatctaaaaaaaatcatggtaaaaagaagtaaaagaaaacagagagaaaatgtaccaagaagaggcaaatagaatttgtaaacatgtggaagttcagggctatttgcatcatgccaagtcctcgcattccagtgacccttgcagacattactgttatagcacattaattgttatggatacttggatattctgtgccaaaactatatagttagtttctaatcactgcaaacaataaataattctactgaaaacatttaggtttttttaaaatgggaaattaactaacaaaaagtagtcatcaggttaagtgatgaatcacataarataaaccgtaattcttaaaaagtgtagataaatgaagttatttcttatttagcc

SEQ ID NO: 559549 - DNA, 519 bp, Homo sapiens
tttataatatcttcaagttatccatttaaaaactaaaaggcactcagaaaatataaccccttgaaaaaaagtgtgtgtgtgtttgttttttaagcaattataaggggaaacagtgactataacacaaaagaatagtttggtttccagaaaattttcagtgatcttctgattatagccacaggattagacctgccaggtgaatttagtaattcctgctcaccagattaaacaaaaaagagaataaaattgtattaaataattagacacatgaaatatgataaaaaatgtaaatttcgggtaaataaatgaacacatatagatatcatagtttgaatttaaactatgtgaaaagtgctaasatgctatataaatgacattataggaaattatagaaattgttaaagaagccttagtgaaagtgaacttaaactttggtaattaaagttcccaccttaatgatttcttacagatttttattttacacaggaaacaatcttcttaacacttttaaaaaataat

SEQ ID NO: 559550 - DNA, 593 bp, Homo sapiens
gtgtacatatgtgaatatatagaatattttctttattaaatgattcattgatggacacttaggttgattccatatctttgctactgtgaatagtgccaaaataaatatgatataatgacttattttcctttgagcagatacccagtagtgggatttctgggttgaatggtagttctagttttaattctttgacaaatctccatactgttttccatagaggttgtactaattttcattcccaccaacagtgtaaaatagtttccttttctccacatttttgtcagcatcttttgattttaaactttttagtaatagccattctgactggtgtgagacattatctcattgtggtttggatttacatttctctgataattagwgatgttgagcattttttcaaatgtttgttggtcacttgtacgtcttcttttgaaaaatgtctgttcacctcctttggccactttctaatgcagttgttttcttcttgctgagttgtttgagttccttgtagactctggatattagtcctttgtcagatgcatagcttgcaaatattttctctcattctgtaggttgtctgtttattctattgt

SEQ ID NO: 559551 - DNA, 575 bp, Homo sapiens
taattagagatgttgagcattttttcaaatgtttgttggtcacttgtacgtcttcttttgaaaaatgtctgttcacctcctttggccactttctaatgcagttgttttcttcttgctgagttgtttgagttccttgtagactctggatattagtcctttgtcagatgcatagcttgcaaatattttctctcattctgtaggttgtctgtttattctattgtttatttcttttgctgtgcagaagctttttagtttaattaagtcctatttgtctatttttgttttgttgcattggcttttgaggtcttagtcataaattctttgcctaggcctaygtccagaagagtatttccaaggttttcttctaggatttttatagtttcaggtcttacacttaaatctttaatccatcttgagttaatttttatatatggtgagaggtaggggtccagtttcattcttctacatatggctttctagttttcccagcaccacttatatattagggtgtcatttccccattgtatatttttgacaactgtgtcaaaattcagttgattgtaggtatgtgcctt

SEQ ID NO: 559552 - DNA, 585 bp, Homo sapiens
actctcaggcaaaattttatgcctgcctcatatagtgtcaggatgtctcaaaatctaaattaaattaaacaacacacttgctttgacagatcatgtgtttattcagaagtttattcaagccaggagcatgcacaaaatctgacagtattcaaggttataaatttttttaaaccactgtttcagtcaaatgtatctaattaaatgcttttggagatgatgatgttagtaaaccargtcaactttttgacattatttacagacatgcagacgttacttgcttaacaaatcagcccttgaatcttcttgagtccctgattgattacgaagggattacaaagaaaataaaatcttgcagaaaaagggaaaccctcctcacctaagaaactgttaaccctgtaggtgatacatgggcacctctgggacaaaatcctgagctacttgttcatttcttactgaaaattacctttctgaaagttccatttctcattatcctttatggtcagttccagtccaacatctttttcaaagtctgctgagtccttcagctcatgttcatctcccttcccttggccatctataggacga

SEQ ID NO: 559553 - DNA, 623 bp, Homo sapiens
cagtcatgcctgggttggcgacctcctgaatcaaggaactgctaactggcaatactgagttctaatacaggtggccaacccaagacaatttactttgcatggggagtaggtggctatgtaatactgtgaagttaccagtaacatttcaattctggactgcggctgccagatataaatggctttatcattttgtttgtgattttgcagatgtggttaaagtcacacaaaggctcataccaaaggaatatgagctgttttttggtttgagacccagtaccaaattggtaaaatgagccagctttcagtaagaagtttttattatgtggacatgagataaatatttaacttgcaaagcttacttgcacgttaaaygtctatcacagaaaagggaaatacccaagtctttctgtctcagtcatctgtgggttctaaaaatgcacaaactagatggaacatcataaacacattttcaaaaggccatgcaaaaaaaccaacaccaggtggacacatcttcttgccacctcatcagcgggcataccacataaaccagaccagactcaatgctgaagaaaagtgacataaaagtctaagtgttcttttttgttttttgttttttgtttttt

SEQ ID NO: 559554 - DNA, 623 bp, Homo sapiens
cagtcatgcctgggttggcgacctcctgaatcaaggaactgctaactggcaatactgagttctaatacaggtggccaacccaagacaatttactttgcatggggagtaggtggctatgtaatactgtgaagttaccagtaacatttcaattctggactgcggctgccagatataaatggctttatcattttgtttgtgattttgcagatgtggttaaagtcacacaaaggctcataccaaaggaatatgagctgttttttggtttgagacccagtaccaaattggtaaaatgagccagctttcagtaagaagtttttattatgtggacatgagataaatatttaacttgcaaagcttacttgcacgttaaacgtctatcacagaaaagggaaatacccaagtctttctgtctcagtcatctgtgggttctaaaaatgcacaaactagatggaacatcataaacacattttcaaaaggccatgcaaaaaaaccaacaccaggtggacacatcttcttgccacctcatcagcgggcataccacawaaaccagaccagactcaatgctgaagaaaagtgacataaaagtctaagtgttcttttttgttttttgttttttgtttttt

SEQ ID NO: 559555 - DNA, 421 bp, Homo sapiens
cagtggtgcctgagatggggaatgcccaaactatagtcaatcatgagaaactgatggkctcatattccagcttaggcttcctcctccatcttagtcattttatctcttactttcaagaacactaatttttaatacatcactggtccactcagaaactcttaagagttcaatcagaatttaggataaaatccaaagttttcaatatcattttctaaaattctaggcagtatttttcagaaaagaagttagttctgtatactgctataggcatgaccactagtcaactgaaatttgtttgggaggctgccttttctactttcagctgttcctgcctactttgtagcattctccctctcccccagtctcagtgactgtaaacactggtagttcagaacaccctctgcagtgatgaaccagctag

SEQ ID NO: 559556 - DNA, 525 bp, Homo sapiens
ataaaagcactcatgacccagaagcggattgggggtgcacattgttctctgtagttgttttggagtggcaaatactcatttgtgccaaaatactgagtaaagggaactgttgacatttgacattaggattaaacaacttcctaaacctgggacacacagtgctgtcctcacctctctcattgccctaagacagtcactgaagtamaagggcctacgtcgtcctcaatgataagagccaataatgagaacagtattattaatatgtattaatagtattattaataacgtattaatactacttacatgtattgtgagtctattttggtacaggcacttgaggtagcttatctcatttattcttcacgatgaacctgtaagaaggtaatataatctaaatatgtggctcaaataattactgtgtaatctggaacatattaacctcttggtaccttggtttttgcatctaaaaatgggattaataataacgtctatctcagtggtctgttttaaggattatatgagaca

SEQ ID NO: 559557 - DNA, 525 bp, Homo sapiens
ataaaagcactcatgacccagaagcggattgggggtgcacattgttctctgtagttgttttggagtggcaaatactcatttgtgccaaaatactgagtaaagggaactgttgacatttgacattaggattaaacaacttcctaaacctgggacacacagtgctgtcctcacctctctcattgccctaagacagtcactgaagtacaagggcctacgtcgtcctcaatgataagagccaataatgagaacagtattattaatatgtattaatagtattattaataaygtattaatactacttacatgtattgtgagtctattttggtacaggcacttgaggtagcttatctcatttattcttcacgatgaacctgtaagaaggtaatataatctaaatatgtggctcaaataattactgtgtaatctggaacatattaacctcttggtaccttggtttttgcatctaaaaatgggattaataataacgtctatctcagtggtctgttttaaggattatatgagaca

SEQ ID NO: 559558 - DNA, 533 bp, Homo sapiens
atatattttaaattattaaaattctgaactaatgggtaatcaactgtacracccgaattgctcatttgcatacagctgaagtccctcctcaaaacttctgtaatacatgaaacttaggcaaatggttgggtcattaccatatattactttatatttttatttatcagtatatgtgattacagttatgcttatgttaattgatatgtatatgtacattgtattattctgttacatagcacagcattttgtactcaaaaagtgaccaataataataagctacatactttgggaagcattgcaggctagtcgtacagttttgttttgtttttttccctgcagcctgacaacctttttagtcattcactaaacctctctcagcttcagtttcttcatctgcaacatatagcaaataataaaacttaactcagatggttctagtgtgaaataatacagagtaaatgtgccaccaaatacaaaccaatggcttgattgacataactcactgctaattttcttgaaatgattcaaagtat

SEQ ID NO: 559559 - DNA, 541 bp, Homo sapiens
ttataaaacaagtagaaaacaaacagcaatatggcagaaagaaaacctcatgtattaacattaaccttgaatgtaaatgaattaaacrttccacttaaaatatatagattgatagatattgggccaggtgcagttgctcacacctgtaatcccagcactttgggaggccgaggtgggtggatcacgaggtcaggagttcgaggccaggctggccaacatagtgaaaccctatctccattaaaaatacaaaaattagccaggcgtggtggccggcacctgtaatcccatctacttgggaggctgaagcaggagaatcgcttgaacctgcaagacggagtttgcagtgagccaagattgcgccactgcactccactctggatgacagagtgaaactccatctaaaagtaaaaaaaaaaaaaagaaaggtagattgatggaacgaactaaaaaatgatccaaaaatattatgcttacaagaaacatatagacacatacagactgaaaagtaaagacacatacagatttaaagtaaatgggtgaa

SEQ ID NO: 559560 - DNA, 636 bp, Homo sapiens
aaatggacaaagctatgtagctagaatcagaagtctttgaaatcaaaacatcaagattcaaactatttaggggcagtggggctgacgtggtgaccgtgggcctgatcagataaaacctttacaaagaaacagtagctctcagactcacctcctgagacagagttgttctgaggggaaaatgggtaagtttctacagtaacatacagtacttaaacatacagtaagatacagtacttaaagccctgacctgtccagttcccaacacatctttcttgatgggcayctaaatgtcaccttttggttttatttttgtgtttttctcatctaagctcggagagcaaagcctgacagggtgagcccccaaagtgtgttcatgtcttaagagtgtccagaagccacctagggagtgtgcaagtttttcattttcatgccagggacaatgtctctctttattgagctaatggcaaggtatgggcctcagaatatgtacagtttgaacatatttgcatcttccctttaattaactgtgaaatctgtgaggctaatgagaagaaaattgatgggtagtcggtggaagaatttttttttcattgtcatatcttcaactttcctggggtataataagagatgcacagt

SEQ ID NO: 559561 - DNA, 636 bp, Homo sapiens
aaatggacaaagctatgtagctagaatcagaagtctttgaaatcaaaacatcaagattcaaactatttaggggcagtggggctgacgtggtgaccgtgggcctgatcagataaaacctttacaaagaaacagtagctctcagactcacctcctgagacagagttgttctgaggggaaaatgggtaagtttctacagtaacatacagtacttaaacatacagtaagatacagtacttaaagccctgacctgtccagttcccaacacatctttcttgatgggcacctaaatgtcaccttttggttttatttttgtgtttttctcatctaagctckgagagcaaagcctgacagggtgagcccccaaagtgtgttcatgtcttaagagtgtccagaagccacctagggagtgtgcaagtttttcattttcatgccagggacaatgtctctctttattgagctaatggcaaggtatgggcctcagaatatgtacagtttgaacatatttgcatcttccctttaattaactgtgaaatctgtgaggctaatgagaagaaaattgatgggtagtcggtggaagaatttttttttcattgtcatatcttcaactttcctggggtataataagagatgcacagt

SEQ ID NO: 559562 - DNA, 636 bp, Homo sapiens
aaatggacaaagctatgtagctagaatcagaagtctttgaaatcaaaacatcaagattcaaactatttaggggcagtggggctgacgtggtgaccgtgggcctgatcagataaaacctttacaaagaaacagtagctctcagactcacctcctgagacagagttgttctgaggggaaaatgggtaagtttctacagtaacatacagtacttaaacatacagtaagatacagtacttaaagccctgacctgtccagttcccaacacatctttcttgatgggcacctaaatgtcaccttttggttttatttttgtgtttttctcatctaagctcggagagcaaascctgacagggtgagcccccaaagtgtgttcatgtcttaagagtgtccagaagccacctagggagtgtgcaagtttttcattttcatgccagggacaatgtctctctttattgagctaatggcaaggtatgggcctcagaatatgtacagtttgaacatatttgcatcttccctttaattaactgtgaaatctgtgaggctaatgagaagaaaattgatgggtagtcggtggaagaatttttttttcattgtcatatcttcaactttcctggggtataataagagatgcacagt

SEQ ID NO: 559563 - DNA, 636 bp, Homo sapiens
aaatggacaaagctatgtagctagaatcagaagtctttgaaatcaaaacatcaagattcaaactatttaggggcagtggggctgacgtggtgaccgtgggcctgatcagataaaacctttacaaagaaacagtagctctcagactcacctcctgagacagagttgttctgaggggaaaatgggtaagtttctacagtaacatacagtacttaaacatacagtaagatacagtacttaaagccctgacctgtccagttcccaacacatctttcttgatgggcacctaaatgtcaccttttggttttatttttgtgtttttctcatctaagctcggagagcaaagcctgacagggtgagcccccaaagtgtgttcatgtcttaagagtgtccagaagccacmtagggagtgtgcaagtttttcattttcatgccagggacaatgtctctctttattgagctaatggcaaggtatgggcctcagaatatgtacagtttgaacatatttgcatcttccctttaattaactgtgaaatctgtgaggctaatgagaagaaaattgatgggtagtcggtggaagaatttttttttcattgtcatatcttcaactttcctggggtataataagagatgcacagt

SEQ ID NO: 559564 - DNA, 555 bp, Homo sapiens
ccacacattctcacttataagtggaacctaaacactgagcacacaggaacattaacatgggaacaagacatgctgcaggctaygggggtgggggagagaggggagcatggggctgaataactacctactgggtactatgctcactaccagggtgcactgtacaaaagtaacaaatctgcatatgcactatctgtgtctggaaaaaactgaaattataaaaaccaagagaatatgtttctaatgaatgtagactttatttgatggactggattagaatataatatttttttaaggggaaaggcattgggggatgcacaatgtctacaggtttctaaacctctctggtttctcacctaattcatagtctcttatgtcattttcatagttttcatattctgcctttccacctcttctttttaacaagtaaaattcctcatagcatacaaaaaaacaattttataaaaaacccatattatagatcagggacctgtggattatatgctattagaactatacaaaatgtctctatatagttttctgtatctttggaatatc

SEQ ID NO: 559565 - DNA, 555 bp, Homo sapiens
ccacacattctcacttataagtggaacctaaacactgagcacacaggaacattaacatgggaacaagacatgctgcaggctatgggggtgggggaragaggggagcatggggctgaataactacctactgggtactatgctcactaccagggtgcactgtacaaaagtaacaaatctgcatatgcactatctgtgtctggaaaaaactgaaattataaaaaccaagagaatatgtttctaatgaatgtagactttatttgatggactggattagaatataatatttttttaaggggaaaggcattgggggatgcacaatgtctacaggtttctaaacctctctggtttctcacctaattcatagtctcttatgtcattttcatagttttcatattctgcctttccacctcttctttttaacaagtaaaattcctcatagcatacaaaaaaacaattttataaaaaacccatattatagatcagggacctgtggattatatgctattagaactatacaaaatgtctctatatagttttctgtatctttggaatatc

SEQ ID NO: 559566 - DNA, 555 bp, Homo sapiens
ccacacattctcacttataagtggaacctaaacactgagcacacaggaacattaacatgggaacaagacatgctgcaggctatgggggtgggggagagaggggagcatggggctgaataactacctactgggtactatgctcactaccagggtgcactgtacaaaagtaacaaatctgcatatgcactatctgtgtctggaaaaaactgaaattataaaaaccaagagaatatgtttctaatgaaygtagactttatttgatggactggattagaatataatatttttttaaggggaaaggcattgggggatgcacaatgtctacaggtttctaaacctctctggtttctcacctaattcatagtctcttatgtcattttcatagttttcatattctgcctttccacctcttctttttaacaagtaaaattcctcatagcatacaaaaaaacaattttataaaaaacccatattatagatcagggacctgtggattatatgctattagaactatacaaaatgtctctatatagttttctgtatctttggaatatc

SEQ ID NO: 559567 - DNA, 609 bp, Homo sapiens
taaattgtttaaactctttgttatttaaattctatattactttagtygattactctgtattattacggcaaagctttgatatgttgccctgaatttaaagaaaaggctgttcggcctaaaaacaggaatattttattaccaaaaagaattaactaccatatgtcatttacagaaaagagtaaattcttcagggcatagaaaatacacatttccttctgtttgtgtggaaataagcaaaatacctgttataatagattcctcacagaattttgtgaagcttcaggtaaacttgaaagagaaaaattaaaatgctagagtttcataattacaaattgggatataaaaatagaataattatttgaattttgtatttctctccaggggatcaaaagtaatatataaacttttaataaatattgatatagcttcacgttgactccatatgtgagcaatttgctttctgttaaattcacaattgcataatttttttcaggctggaatgcacttggatgccagagattttgatttcttcatgtgaaataaggtgataatacattccaaagtatatattttttcaactttgaatatatctggtgtatttggagtaat

SEQ ID NO: 559568 - DNA, 609 bp, Homo sapiens
taaattgtttaaactctttgttatttaaattctatattactttagtcgattactctgtattattacggcaaagctttgatatgttgccctgaatttaaagaaaaggctgttcggcmtaaaaacaggaatattttattaccaaaaagaattaactaccatatgtcatttacagaaaagagtaaattcttcagggcatagaaaatacacatttccttctgtttgtgtggaaataagcaaaatacctgttataatagattcctcacagaattttgtgaagcttcaggtaaacttgaaagagaaaaattaaaatgctagagtttcataattacaaattgggatataaaaatagaataattatttgaattttgtatttctctccaggggatcaaaagtaatatataaacttttaataaatattgatatagcttcacgttgactccatatgtgagcaatttgctttctgttaaattcacaattgcataatttttttcaggctggaatgcacttggatgccagagattttgatttcttcatgtgaaataaggtgataatacattccaaagtatatattttttcaactttgaatatatctggtgtatttggagtaat

SEQ ID NO: 559569 - DNA, 608 bp, Homo sapiens
gcaattaatgataaaaatcaaatccatgtaaaatactaataaaaataaaatatgtatatatgattttaacaaattacatgcaagatctctctaaataggaaactagcaaaagtgttgggagatgtaggaaagttctaaataaatggagtcgcatacaataattgatggttttgatgtgtgtccctgcccaaatctggtatgatgtaatctccaatgttagaggtgaggcctgatgggargtgattggatcatggggtggatttctcatgagtggttcagcatcatccctcttgatactgttctcataatagtgagtgagtgagttctcatgagatctggtcatttaaaagtgtgtagcagcttcccctttcactctcttgctgttctggccatgtgacgtgcctgtccccctttgctttctgccatgattgtgcgtttcctgagtcttcccagaagctaagtagatgccagcatcatccttcctgtatagcctgcagaacagtggggcaattaaacctcttttcttcataaattgtcgaatcttctgtatttctctatagcaatgccggaacaaactaatacaataatcatggcttgaaagttcagtg

SEQ ID NO: 559570 - DNA, 450 bp, Homo sapiens
ggtggctcacacctgtaatcccagcacttcgggaggctgacgcgggcrgatcactttaggccaggagttggagaccagcctggccaacatggtgaaaccccgtctctactaaaatatgaaaatttgcagggcatgatggtgcacgtctgtaatcccagctactcgggaggctgaggcaggggaattgcttgaacccaggaggcaggggctgcggtgaattgagatcatgccgcagcactctatcctgggtgacagagtgagactgtctcaaaaaaaaaaaactcctttttatagagttggggtcttactaggttgcccaggctggtcttgaactcctggactcaggtgatcctcctgccttagcctcccaaagtgtagggattccaggcatgagccacctcgtctggtcaaggagaaggcctgattttgaagggcaggtcccagggtcag

SEQ ID NO: 559571 - DNA, 450 bp, Homo sapiens
ggtggctcacacctgtaatcccagcacttcgggaggctgacgcgggcggatcactttaggccaggagttggagaccagcctggccaacatggtgaaaccccgtctctactaaaatatgaaaatttgcagggcatgatggtgcacgtctgtaatcccagctactcgggaggctgaggcaggggaattgcttgaacccaggaggcaggggcygcggtgaattgagatcatgccgcagcactctatcctgggtgacagagtgagactgtctcaaaaaaaaaaaactcctttttatagagttggggtcttactaggttgcccaggctggtcttgaactcctggactcaggtgatcctcctgccttagcctcccaaagtgtagggattccaggcatgagccacctcgtctggtcaaggagaaggcctgattttgaagggcaggtcccagggtcag

SEQ ID NO: 559572 - DNA, 450 bp, Homo sapiens
ggtggctcacacctgtaatcccagcacttcgggaggctgacgcgggcggatcactttaggccaggagttggagaccagcctggccaacatggtgaaaccccgtctctactaaaatatgaaaatttgcagggcatgatggtgcacgtctgtaatcccagctactcgggaggctgaggcaggggaattgcttgaacccaggaggcaggggctgcggtgaattgagatcatgccgcagcactctatcctgggtgacagagtgagactgtctcaaaaaaaaaaaactcctttttatagagttggggtcttactaggttgcccaggctggtcttgaactcctggactcaggtgatcctcctgccttagcctcccaargtgtagggattccaggcatgagccacctcgtctggtcaaggagaaggcctgattttgaagggcaggtcccagggtcag

SEQ ID NO: 559573 - DNA, 451 bp, Homo sapiens
ttgattgctaggttgcatagaggacaaacatggaaattaatgaagtaccttaatatctggcttcagatcttagacaggatcagagggccagctcaaatttgcaaggaggggaggtagatcccaccattttatgggtgaatggcaaaatcaaacagaaattatgtgggatgggagatactgatgcaggcatctttggaaacattctacttagctaattttatgctaggctttaggtcaagaaggagagagagagctgacatgctgtggtacacacttatagtcccagcgacttggaaagctgaggcaggaggattgcttgatcccaggagtttgaggtagtgtgcgatgatcgttcttgtgaatagccactagccacygaactccagcttgggcaacattgagacaccctgtctcttaatttaaaaaaaaaaaaaaaaaaaggaggaaagaa

SEQ ID NO: 559574 - DNA, 479 bp, Homo sapiens
acttccagtctgttgggaaggcatgattggttttgaaatgtgagaaggacatgatacttgggaggggccagaggagaaataatatggcttggcctctgtccccacccaaatctcatctcaaattgtaatccyctcatgtcaagagaggggcctgggtggaggtgactggatcatgggagcagatttccacatgctattctcatgatagtgagtgagttccaagagatctgatggtttaaaagtgtgtggcacttccctccttgtgctctctctctcctggtgccatgtcaagaagaaccttgtttcccctttgccttccaccatgattttctgagtttcctgagtcctcccattcatgcttcctgtaaagcctgaagaactatgaatcaattaaatctcttttcttcataaattactcagtctcaagtcattctttatatcattgtgaaaactgactactacggttagcaatcttaaag

SEQ ID NO: 559575 - DNA, 558 bp, Homo sapiens
ggcccactgattcggtttttctgtgtccctacccaaatctcttcttgaactgtacttcccataatccccacctgttgtggagggacccagtgggaggtaattgaatcatgggggcagttagccccaggatgttctcatgatagtgagtgagttctcacagatctgatagttttataaggggcttttccycctttgctcagcacttctccttccagacgccatgtgaagaaggatgtgtttacttccccttctgccatgattgtaagtttcctgaggcctctccagctatgctgaactgtgagtcaagtaagcctctttcctttataaattacccagtctcagttatgtctttagaagcagtatgagaacggactaacacacccacaaatcctaaaatattttcttttttaaaaaatagagacagagtctctgttgcccaggctggagtgcagtggtgctgattatagcttactataacctccaattcctgggttcaaggaatcctcccacttcagcctcccaagtagctaggactacaggcacaggttaccatatcca

SEQ ID NO: 559576 - DNA, 454 bp, Homo sapiens
ctagatgtacttttgccttctctattgtgtttgatgcacactgcaaataaagatcttgagactatacttgacatcctatgggctaaacattccactgaaataggaaaaataattggagcagaacctactaaagttcagatagatcttaccaaactgttgcaattatttccacaatatcccttgaagccaaaagcaaaagaaggactcaaatctatacttaaaagccttttatccaaagaccttcatgtatcctggactagctactacaatacgcttgttctgccaggaaagataccaagtggatgagaatattgacttgtctaagacaccaaggccaccaacaacattgttattcttcgatgtggtggcatctaacccaaataccaataatgtcgttaattccatctgaagcctcttgcttcactgtagtgtrtctttgctccatatttctgca

SEQ ID NO: 559577 - DNA, 568 bp, Homo sapiens
agctagctagctctctttctgccatagcaagaggtcagccatctgcaatccagaagagagacctcactagaacccagctatgctggcaacatgatctcaaacttccaacctccaacatgatctcaaacttccaacccccataackgttgtttatgccactcagtctatggtaatttattacggcaacctgagctgactaagagttcccaactcagctcactcgatctccacaatgcttcttctgacggccttcatcatgtgtggagagctatcctctgtgctaccacagcccttgtgccctccagcccccatcacggcaccaatggtgttgcaccatctgtctttgcatctaacttgtctgttttattagattgtgaacacctcatgtacaggaacaattgatttattttctgtttccgtagcacctaccacagtatctggcacgtggcatcaggtgctccagaaatgtctgctgaatgggaataaatgaatgagtggatggtcactagtggataaaaagaagcatttttaggtctctgccaacacctcatagtggcattgcttggac

SEQ ID NO: 559578 - DNA, 568 bp, Homo sapiens
agctagctagctctctttctgccatagcaagaggtcagccatctgcaatccagaagagagacctcactagaacccagctatgctggcaacatgatctcaaacttccaacctccaacatgatctcaaacttccaacccccataactgttgtttatgccactcagtctatggtaatttattacrgcaacctgagctgactaagagttcccaactcagctcactcgatctccacaatgcttcttctgacggccttcatcatgtgtggagagctatcctctgtgctaccacagcccttgtgccctccagcccccatcacggcaccaatggtgttgcaccatctgtctttgcatctaacttgtctgttttattagattgtgaacacctcatgtacaggaacaattgatttattttctgtttccgtagcacctaccacagtatctggcacgtggcatcaggtgctccagaaatgtctgctgaatgggaataaatgaatgagtggatggtcactagtggataaaaagaagcatttttaggtctctgccaacacctcatagtggcattgcttggac

SEQ ID NO: 559579 - DNA, 547 bp, Homo sapiens
tgtggaaaggatttgaagagcttaaacattcagcaaacgtgattaattagatgggttactagttcctgcaccctcaattgtcattcatcattgtccttttctgaaggtgctgcttctaatygtggtcaccacttgtggggccactgactgaggacaaagatcacagaggctactgaaaagaaagatggtgaaggggggcactgactgaggacaaagatcacagaggctactgaaaagaaagatggtgaaagggggcactgactgaggacaaagatcacagaggctactgaaaagaaagatggtgaccacctgtacacttgatacctcaattagacacactgggcacccacaccctagggcaccattagcaagtaccgtttggtactcacaggcatccaggttctatcaaaggtgtgtctagcataatttgttgagaagaaggtctaagggtctgtaatcctctcctcctcaagaatctgagtgtggctttgtgacactctagactgccgacattgatttctgaccacattagcaaggcgcaacggaa

SEQ ID NO: 559580 - DNA, 187 bp, Homo sapiens
acccagctattttttgttgttgttgttkgtagagacgggagtctcaccatattgcccaggctggtctcaaactcctgggctcaaaagatcctcctgccttagcttcccaaagcattgggatcacaggcatgagccactgaactcagcttcattcactaatttatacctgggtttatgtagctataat

SEQ ID NO: 559581 - DNA, 608 bp, Homo sapiens
cagcagaggaacacagagagcagagaggagcaaacctgggcactgacctgtctaggcttagaacggagcaaggagaacctctccaacacgagaaaggaagagtgagtgacagctccaagagggattaatgctgtccatagggacctgtgcaagaatgggaatgggaaaatctcccttctcccctccccagcacccctgtagtgtgcttcttgattgaggcatagagccactcaaacattttgccaggtgaacttacaaggacattttataagctttaggcccaagagaagaccagcaaagatgccacaggtaaaatagaagacacagttgtggtgcctgggagcagtaagattgttccctttgctggaaggggcttagcaccattttccagcccagctgtcctgctttggcccaaacttggctggctactctaccaacccagctactagtagccaagtgggaaacacttactcgagattccagcccactgatcacattttagygtaaactcagctggagtgcatagtctcctcatgtcccaggaaacacccagatggcagggcatgtgacctcactcaaccacaccaattatagccaggtaagcaatg

SEQ ID NO: 559582 - DNA, 487 bp, Homo sapiens
tttatgatggttttctcattatcttttaatatcagataatgaatygtagattttaaatttaatggaagtgaatatattaatcatactctttataatttttctttatgttcctgaggaaatccttttctactatgaaattaaaaaaaggatttttatgctgtcttaatagaagctatggttttgcttttactttaaacatataaatttgtttaaaattatttattttttacaaaaattactggacatggtggcatgtgcctgtggtcccagctactcaggaggctgaggtgggagaatggcttgaacccaggaggcagaggttgcagtgagctgagatggcgccactgcactccagcctgggcaacaagagtgaagctctgtctctaaaaataatgataataaaataaattattttttgtgtgtattttgcagagttgagtccatttctttgcatttttttcattttttccctccttccttcttccct

SEQ ID NO: 559583 - DNA, 590 bp, Homo sapiens
atacctaatgctagatgatgagttagtgggtgcagcacaccagcatgtcacatgtatacatatgtaactaacctgcacattgtgcacatgtaccctaacacttaaagtataataataaaaaacaacaacaacaamaacaaaaaaacccaaatagatggaatggtttctctaaagatgggagggccaggaccagggctgtaatgagggcctgctttagctctctcattggctgaatgtcctctgggtaccattgcaagggatcaggttactcttccattaacttgagatacacaatctttgtcttttgagcatatgagtcaatccataacctacagcagccagttaaacctgaaaattttcagagttctctctttgtcttaggcaaaggaagacccactattcctgatagtctttctgggtttattctctgctttccttcactaatcaggtgtcctaaatatttaacttatttttctacaaactgcaatttgtttttagggactcacaaccccctttcttctagaaaattaagcaacttatggtggtttctgatacctgagccctcttctccccagaaattaaaagatcat

SEQ ID NO: 559584 - DNA, 607 bp, Homo sapiens
aaatatatttcaaggcaaaaattataatgaccttatatctttttaaataatgataaagggaacaattcagcaataggatataataattgtcaatatatatgcacccaacgcttgagcacctaaatatataaagcaaatgttattagagctaaagagagagatagacgccaatacaataatagctggagatagtcaacaccctactttcagcattggatagatgctgttacatgtctgactgaacagtacagtcggaaaatcaaacaccaagcttaatctgcactctaggccaaatggacctcatagatatttatagaacatttcatccaagagctgccaaaataaaacatttttctcagcacatggattattcgcagaggtagaccatatattaggccatgaaagaagacttaaaaatttcaaaaatgttgaaatcrtatcaagtctcttttctgtacacaatggaaaaaaataacaatcactaaaaagagaaactttggaaactatataaatgcatggatattaaacaatatgttcctgaatgaccagtgggtcaatgaagaaattaagaaggaaattaaaaatttcttgaaagaaatgaaaatgg

SEQ ID NO: 559585 - DNA, 611 bp, Homo sapiens
atatcatctcaccccagttaaaatggcttttatccaaaagacagataataatggatggcggcaaggacgtagactgttggtgggaatgcaaattagtacagccactatgaaaaacagtatgaaaattcctcaaaaaactatacaattccacttctgggtttacatccgaaagaactgaaatcaatatatcaaggagatagatacctgtactcccttatgtattgcagtgccattcacaatagccaaaatgtggaatcaacctaagtgcccatcaatgcatcaatagataaagaacatgtggtatttgtacacaacatattattcaggtataaaaaagaataaaatcctgtcatgtgcagcaacaggaatgacactggagaccattatgttaggtgaaataagccaagcacagaaggacaaatattgcatgttatcactcacacgtgggagttaaaaaagwgaatgacatgaagatagacagtagattggtggttactagaggccaggaaggggaggcagaaaggagggatgacaagggaaaaataatataaatgtatttgttatcactgaactgtatgctttaaaatggtaaagctggtaaattatatatg

SEQ ID NO: 559586 - DNA, 428 bp, Homo sapiens
atccaggggctcaactgatgctttstgtacgtgcttccttccctccttggctctgctttatgcagtacggaattcatggtaaaggaagtgaaagtagtgagcttagcaacctcaacaggaagaatatactccttctcaggtgctcacagactaatagagaagatgggttaaatctaataacagaaacatgttcagggtcaaatgagacctgagatgattagaaacctactcaacctggagaattcagagagggatactgagggttgaggtaaaaggatcaggagaagctttccagagtaggtaatgtcagacctgggtcttaaagaacgactgtgagtttgctaaggaagaatatccaagcagaagtcaccttgtatgcccgcttagacagcaacttcgttaataatgaaaataaaaattggaaaagt

SEQ ID NO: 559587 - DNA, 595 bp, Homo sapiens
ctcggctcactgcaagctccgcctcccgggttcgagccattctcctgcctcagcctccggagtagctgggactacaggcgccagtcatcacgacaggctaattttttttttttttttttttagtagagagggggtgtttcatcgttttagccaggatggtctcgatctcctgacytcgtgatccgcccgcgtcagcctcccaaagtgctgggattacaggcgtgagccaccgcgcccggccaggaatctgtggttctttaagtcagcctcaacttcagcttgtctccttgtgtgaggatgtcaaacttctgggaatgtgaacctggggtacagagatacactgtgcctttaaatggaaacccacagggatcagtatcactttgagtatacacgatttcccaacgagggctacctttaaaactgtactgtccataagctgtcactccattgtctaagcagtagcatgatagcccccaagggccttggcccagcagtcagagatttacctgctttttccaactctgccatgaccattttctgcgatctgagacaaatcattcaattctgtgcttcattttcctctcctataaaatga

SEQ ID NO: 559588 - DNA, 595 bp, Homo sapiens
ctcggctcactgcaagctccgcctcccgggttcgagccattctcctgcctcagcctccggagtagctgggactacaggcgccagtcatcacgacaggctaattttttttttttttttttttagtagagagggggtgtttcatcgttttagccaggatggtctcgatctcctgacctcgtgatccgcccgcgtcagcctcccaaagtgctgggattacaggcgtgagccaccgcgcccggccaggaatctgtggttctttaagtcagcctcaacttcagcttgtctmcttgtgtgaggatgtcaaacttctgggaatgtgaacctggggtacagagatacactgtgcctttaaatggaaacccacagggatcagtatcactttgagtatacacgatttcccaacgagggctacctttaaaactgtactgtccataagctgtcactccattgtctaagcagtagcatgatagcccccaagggccttggcccagcagtcagagatttacctgctttttccaactctgccatgaccattttctgcgatctgagacaaatcattcaattctgtgcttcattttcctctcctataaaatga

SEQ ID NO: 559589 - DNA, 595 bp, Homo sapiens
ctcggctcactgcaagctccgcctcccgggttcgagccattctcctgcctcagcctccggagtagctgggactacaggcgccagtcatcacgacaggctaattttttttttttttttttttagtagagagggggtgtttcatcgttttagccaggatggtctcgatctcctgacctcgtgatccgcccgcgtcagcctcccaaagtgctgggattacaggcgtgagccaccgcgcccggccaggaatctgtggttctttaagtcagcctcaacttcagcttgtctccttgtgtgaggatgtcaaacttctgggaatgtgaacctggggtacagagatacactgtgcctttaaatggaaacccacagggatcagtatcactttgagtatacacgatttcccaacgagggctacctttaaaactgtactgtccataagctgtcactccattgtctaagcagtagcatgatagcccccaagggccttggcccagcagtcagagatttacctgctttttccaactctgccatgrccattttctgcgatctgagacaaatcattcaattctgtgcttcattttcctctcctataaaatga

SEQ ID NO: 559590 - DNA, 590 bp, Homo sapiens
cactaaaaataaactatttgtcagccaagaggtgaatgaataaataaactttgctatagacatacaatagaatacttctcgacaataaaaaggaaaaatctactgatatatgcaacaacatgaatgaatctcagaagcatagtgaacaaagttacaaagacatacaaactgtataatttcatttatattaagttcagtgagaaaaattgttctgtaatgatacaatgagaacactggttgcctacattaaagttgggtatttactagaaatgaatatgtgggaactttcaggagtgatgaaaatgttaaattaaatctcttsctttgggtagtagttacatgaatgtatatatttatcaaaacccatccaatcatatagtttggatttataaactttatataaaatatacctcacttaaaataacactatgtatattaaattcttgccagggttgtgtaattgatcaccataaggtttgtcattgcagaaaactgtgacaaaaataattgaaattattatttattgagtccttattataggctaggtacgatgttagacaatttaaatagattatctaggttaattctca

SEQ ID NO: 559591 - DNA, 396 bp, Homo sapiens
atatggcatttgtataattttacctttctaacatctgaaaaaatgctgagtcctgaaacatacctggccctgagactaagacctgtagggttgtgtggcctgagyctggcatgtgcttgtctggggtgctgagcatggggataaggatttccacggtgtgatagttaatttcatgtgtcaacttgactgggcccccaaatgcccagacatttggccaaatattattctggcatgcctgtaagggtatttcgggataattaacttttgaatttgtagaatttgtagactgagtaaagcagatttcccttcttttttttgagacagagtctcactctgttgcccacgctggagtgcagtggtgccatcttggctcactgcaacctctgcctcctgggt

SEQ ID NO: 559592 - DNA, 548 bp, Homo sapiens
tgagctcgggagttagagaccagcctgggcaacatagggagaccctgtttctacaaaaaatgaattaaaaaaattaaccaagcatggtggcctgtggtcccagctacttaggaggctgaggcaggtggatcaattgagcctgggagttcaaggctgcagtaagccctgatcacaatagtgcactccagcctaggtgacagagtgagactctgtctcaaaaaaaaaaaaaaaaaaaaaaaaaaagagaaactattaaaccctcatagctctgctgccctgaggtattagttgcccagtcttctttgtctcttcagatgatttcaccaagccataggcaccatgagattagggaycagattggcattgttcattgctttctcttcaatggttagaatagtgctttgcacaaagtagattataaatacagttttttgttaaataaatgactgtatgtatgcttaaattgttttacaaaaatgagatattatatctagaaagttgtaacctaatatttttcacttaatatattgtgtagttttaaccatatc

SEQ ID NO: 559593 - DNA, 548 bp, Homo sapiens
tgagctcgggagttagagaccagcctgggcaacatagggagaccctgtttctacaaaaaatgaattaaaaaaattaaccaagcatggtggcctgtggtcccagctacttaggaggctgaggcaggtggatcaattgagcctgggagttcaaggctgcagtaagccctgatcacaatagtgcactccagcctaggtgacagagtgagactctgtctcaaaaaaaaaaaaaaaaaaaaaaaaaaagagaaactattaaaccctcatagctctgctgccctgaggtattagttgcccagtcttctttgtctcttcagatgatttcaccaagccataggcaccatgagattagggacsagattggcattgttcattgctttctcttcaatggttagaatagtgctttgcacaaagtagattataaatacagttttttgttaaataaatgactgtatgtatgcttaaattgttttacaaaaatgagatattatatctagaaagttgtaacctaatatttttcacttaatatattgtgtagttttaaccatatc

SEQ ID NO: 559594 - DNA, 589 bp, Homo sapiens
taatttttttcacttctaaatgaccgaaaaaagtttatctgaaaaaatttagaaactagattgtgattcaagagttacataaccactaataagctccctggtggcagaaaatttattgttacrggaggtgttcagagactggtccattacgtaactgaatattgtggtggaatatcatgaatgatttaaaaagtcgaatgtgataactctaagctcccttcccaaatttggaactttacgattttaagcttattgatcattgaaaagacatcttgtatctcttttagcttttgttttgaccacattatctaaaacatcttaaatgagtactatgaatactaaaaatgaattactgaatgaataaatcagccataacagcagcaaatatgctatgaatggccttttgccttttctgccttgtctataattaatgcagctatgcaccttaaaagaggtgtgtgtgtgtgtctgtgtgtgtgtgcatgcacacacatgtgtgtagtagacaagttggagaagataatctgttaaattcaagcactggaagtgatttcttattcagggtaagtaaaatcctccaatgcctcaa

SEQ ID NO: 559595 - DNA, 534 bp, Homo sapiens
tgaaatagctttaatttctgaccctgtgtctcaggaacacattttactttgattggcatcttctatcaggcctaaagatkaggcattaatcgctatcaatgcttaagatttagcaggacttggtgtcctttttagatacaggagtcaaagccttgtaactcaatgtcacaaaaactttaaaagcatacacagaaagatatacaaatgtagtaaccttaatttaaaagaaaaaaagtgttttggctgggtgtggtggctcacacctgtaatctcagcactttgagaggcctaggcaagcagatcacacgaggtcaggagtttgataccagcgtggccaacatggtgaaaccctgtctatactaaaaatacaaaaattagccagtgtggtggtgtgtacctgtaatcccagttactgtggaggctaaggcaggagaatcacttgaatccaggaggcagaggtttcagtgagccaagatcttgccattgcactccagcctgggtgacagaatgagattccatctcaaaaaataaata

SEQ ID NO: 559596 - DNA, 534 bp, Homo sapiens
tgaaatagctttaatttctgaccctgtgtctcaggaacacattttactttgattggcatcttctatcaggcctaaagatgaggcattaatygctatcaatgcttaagatttagcaggacttggtgtcctttttagatacaggagtcaaagccttgtaactcaatgtcacaaaaactttaaaagcatacacagaaagatatacaaatgtagtaaccttaatttaaaagaaaaaaagtgttttggctgggtgtggtggctcacacctgtaatctcagcactttgagaggcctaggcaagcagatcacacgaggtcaggagtttgataccagcgtggccaacatggtgaaaccctgtctatactaaaaatacaaaaattagccagtgtggtggtgtgtacctgtaatcccagttactgtggaggctaaggcaggagaatcacttgaatccaggaggcagaggtttcagtgagccaagatcttgccattgcactccagcctgggtgacagaatgagattccatctcaaaaaataaata

SEQ ID NO: 559597 - DNA, 368 bp, Homo sapiens
acagctcattgggaacgggccatgatgacgatgttggttttgtcgaatagaaaagggggaaatgtggggaaaagaaagagagatcagattgttactatgtctgtgtagaragaagtagacatgggagactccattttgttctgtactaagaaaaattcttctgccttgggatgctgttaatctataaccttacccccaaccccatgctctctgaaacgtgctgtgtccactcagggttaaatggattaagggcggtgcaagatgtgctttgttaaacagatgcttgaaggcagcatactccttaagagtcatcaccactccctaatctcaagtacccagggacacaaacactgctgaaggcctcaggg

SEQ ID NO: 559598 - DNA, 368 bp, Homo sapiens
acagctcattgggaacgggccatgatgacgatgttggttttgtcgaatagaaaagggggaaatgtggggaaaagaaagagagatcagattgttactatgtctgtgtagaargaagtagacatgggagactccattttgttctgtactaagaaaaattcttctgccttgggatgctgttaatctataaccttacccccaaccccatgctctctgaaacgtgctgtgtccactcagggttaaatggattaagggcggtgcaagatgtgctttgttaaacagatgcttgaaggcagcatactccttaagagtcatcaccactccctaatctcaagtacccagggacacaaacactgctgaaggcctcaggg

SEQ ID NO: 559599 - DNA, 368 bp, Homo sapiens
acagctcattgggaacgggccatgatgacgatgttggttttgtcgaatagaaaagggggaaatgtggggaaaagaaagagagatcagattgttactatgtctgtgtagaaagaagtagacatgggagactccattttgttctgtactaagaaaaattcttctgccttgggatgctgttaatctataaccttacccccaaccccatgctctctgaaacgtgctgtgtccactcagggttaaatggattaagggcggtgcaagatgtgctttgttaaacagatgcttgaaggcagcatactcmttaagagtcatcaccactccctaatctcaagtacccagggacacaaacactgctgaaggcctcaggg

SEQ ID NO: 559600 - DNA, 368 bp, Homo sapiens
acagctcattgggaacgggccatgatgacgatgttggttttgtcgaatagaaaagggggaaatgtggggaaaagaaagagagatcagattgttactatgtctgtgtagaaagaagtagacatgggagactccattttgttctgtactaagaaaaattcttctgccttgggatgctgttaatctataaccttacccccaaccccatgctctctgaaacgtgctgtgtccactcagggttaaatggattaagggcggtgcaagatgtgctttgttaaacagatgcttgaaggcagcatactccttaagagtcatcaccactccctaatctcaagtacccrgggacacaaacactgctgaaggcctcaggg

SEQ ID NO: 559601 - DNA, 585 bp, Homo sapiens
cattgctatctatattttgtagaaagtgggaaatttaaagagaaaagtaagaatttgttaaacttaggttaactgaaaccccctgtagagatccttactgaacatggggacaacaataagcatccaaaaagacttgccactacttgggtgtcttttagacaattggagcacattcgaattattaagcaaattgaaaaagaaaacctcatttactattgcaataatgtttgggttcaatacaaagtgtcaaaccaacagatttggcctaggcatrtttccttaagttataattatattgtacaattagatttgctttgtgaaaagtaagaaaaatgggaagaagttccttatgtacaggcttttatggccctctaccaggattctaaaggctagctgtagaatgtggcttatgatattcccaggcacccagaagctacaccagatatcctagattactgcctgctagctgttccccctaggacactcatgcccctacttcagagcctcctcagtcccctagttatgaggggggccctacctgttctctaatgcaggattataccccaaggtcatcaggtacccatt

SEQ ID NO: 559602 - DNA, 479 bp, Homo sapiens
atagagttgatgggttacaaatccattgctatctgaagagcacaagactacctggaaaatcggtatccagcttctcctcttgtggagctgatatctaccctcctctcttcggcatgggatagaagaaggctgacccacaggttgtgggtgtacagcaaaggaagtcaggatccatgtccctcccatgatagtgtaaatagttaatgctctgttaatcctaacagagcaagaacagctgtgaataagtacagttgtgaaatgaaatgagtcagcagctgtggtcaagcaagaagaagtggactttttggcaggatatcagccaagtcataattacaaaacaataaagcattctcataaaaatcaaaaacaaaattacaatgtctgttatgccaatataatttaacaattttagaagttctagctaaaataataagaataaaagatgaaactrttgaaaataaattcataggtgggaattg

SEQ ID NO: 559603 - DNA, 528 bp, Homo sapiens
ccatatatttgtgtcatcttctatttcttttatcaatgtctcatagttttcagtgtacagatcttttatctccttgattaaatttatccctaagtattttattctttttatgctgttgtaaatgggatggttttcttaatttctttttcagatagtttatttttagtgtatagaaatgcatctaagttttaactagcttctctacagcccttccttacaacagacttagatagaggtaaagagtcaaggatcctgaaaaggaggagaaacagagggatggagcccgtgctagtcactgccctgtccagactactgaaaagtgaggctggtgtgaattcgcctagactggtccctactacccttactcaagtcttctataagacatattcagggaattcaaagtttgcatagatattagtccaagtccacataatgagaaaggtaaagatgatgccaaacatactgacaatgcatttgaaamccaagtgtgattcatatccctctatcttgagttaataatattccttc

SEQ ID NO: 559604 - DNA, 481 bp, Homo sapiens
tgaaattaatatttactttagaacttgtgcttaatctgaaacattacatttatttcactcaattatttttctcaaataaattcactggaaaatatttggattaaccaagaaccagagtaactattgcctataaaatatattcgtgacatgctgaaactgcctggagttatttgcatacctgttgcatctttgcatattctctgtctgctaaagtccaccactgtcatcaatatggtaagcctattttccaatcccttattttgtgctaaattttcatgyatgcctccaagtggttgaaataaagcctttcctattaagatttagctttaggacttttacatagatctttgctcattaagcatttccctctttttcttttcccagcaggcagttgttggagttcttgggtagacctaaatttgtcacagatgtctcagtaaagttattcatcctaagaattcttataacttaataagaagct

SEQ ID NO: 559605 - DNA, 615 bp, Homo sapiens
atagtcttagtttttgtttccaaaatttttagattattttaaattttagattgtttttattgtaatatctttagaaataatagacctttagaagaaaatattgagaggaaggatgtttattaataataatgattttcctagagtactttaatggatgggattactaaagtgtggtagatgtcccagtacatttccatacctgctccctttgtacagccaaagagtggtcaataacaatcactgttagtaaaacatgtattcatgagtttttttgtttttgtttttgttttttttttttttaccataaggcaaagtttccatttccacataatgaaactttttatgatgtaattctttttacttctcagctggttcaatgtatttttttctccaaaggcaatcaaatttgcccgatagtttatgcagtgaggtcctatggccatttagaatatcacattgactctagctttgtctgatgcttctgatcacatggatacatttcaagttgttttttgaggtatttacataaattattyaaaagctttggtgctgttttaatttcctctcttccccgaggatgctggggtaggcttgctctgagtggggttttggatt

SEQ ID NO: 559606 - DNA, 567 bp, Homo sapiens
aaattaacgagattaatttggagattagtaaacacttgaagaagttaaataattctaacatacttttgtcacctgaatgtttaacataagagatagattactgaaccgtcaaaatgaccaatgaaatgaggtaggcaacagtttctaaagagcaagctagttagtatttaggattygcaaatgatctttgactgtaaaacctaggtgctagtccaaatgatgaataatactgtttacaaaaaaaaagtttagattttagactggggtgagctaattaatataccattagctaaaaaataatttattataaaattaatgcaactaattatccaattcttccaccaagtaaaagagaaagtaaggtgttgggcaacattaaatatagttatgtaagtgatggctagggggtaggaggaggagcagaaggatggagtagaaaatgcagtgaaataagaacaccttctatttctcaatttgattccaaacagcattgggaaaagaaggttctttcttgaggcaagtcataaaaagcaaggcaagttgcatggatttgatcagccattacta

SEQ ID NO: 559607 - DNA, 632 bp, Homo sapiens
tacattgtacaaggttcaggagtaagtagaagaagccctcttcaatactaaaaatatgttgataagaacagagtgacataatgataacttgatagaattgatggtcttgcttgtttttcataagggacaggagaatggaggcaggaaggaaggggaagtgagaagagatgggatcaagggcacaggaccggaataacttggaaaataagaggaccatcattttctgatagagaaaggaaggagagaatcaagaagatagagacattttgaggtagattaaagttaagaaatttcattaatgcaacacatagatactgggagcccagtaattgtcatgtactcttcmagatgagaaaacactggtgaacaaaacgatgagaaatccctaccctcatggagcttacatgggttaattctcttatactcaataaaatatagatatagcagagataatgctgtgaacttgaggagagagcaaactgttgagactagttttttggagagaatgtaataaaaattggcatcaaatgagattaattcacaaaataggaccggcttggagcagagtaggaccagctaactgtggacaaattctaaggacattaacactctcacatactttagtacttgac

SEQ ID NO: 559608 - DNA, 632 bp, Homo sapiens
tacattgtacaaggttcaggagtaagtagaagaagccctcttcaatactaaaaatatgttgataagaacagagtgacataatgataacttgatagaattgatggtcttgcttgtttttcataagggacaggagaatggaggcaggaaggaaggggaagtgagaagagatgggatcaagggcacaggaccggaataacttggaaaataagaggaccatcattttctgatagagaaaggaaggagagaatcaagaagatagagacattttgaggtagattaaagttaagaaatttcattaatgcaacacatagatactgggagcccagtaattgtcatgtactcttcaagatgagaaaacactggtgaacaaaaygatgagaaatccctaccctcatggagcttacatgggttaattctcttatactcaataaaatatagatatagcagagataatgctgtgaacttgaggagagagcaaactgttgagactagttttttggagagaatgtaataaaaattggcatcaaatgagattaattcacaaaataggaccggcttggagcagagtaggaccagctaactgtggacaaattctaaggacattaacactctcacatactttagtacttgac

SEQ ID NO: 559609 - DNA, 677 bp, Homo sapiens
gcagctgtccttgataacgtccatgttctggagtgacacgatcaggaccatccgtgtttgtgacaaaggtcaaatccttgtgagaatgaagaggaagggccataccattgaatatgaggaaaattatatcattttcctgccccaggcggatctaccttcctcgcttcctgcttaatgtgcagcatgtatgtgtggtattctctagagctcattttgtatttgaatttctgtaggaggtatattcaaatgtagattctttaaaaaaaaaaagacacaggacacttagctagacattcaagttggatctagttttaatttgtctcmtctaatttgcaagagtaaataaatggtgattggaatgtgcaaagaggtaacattgttgttttgatatatgctcctgttttttttcctgagttaatgttctattttgagttactattaaatcaccttcaaatctcaccagcacccctgaaaatagataaattgtttttagagtttcttgatttcattcctcctctaatcaccatcatcatcaaaaatttttgctgactgagtgaatgagtgattgaatagatgattctggaagtccagagaatgcagcttagttactgaagaatactaataatgttattataaataataatagtgaattatttattatttattaagtacgtagt

SEQ ID NO: 559610 - DNA, 504 bp, Homo sapiens
agacttccagtgggacaagatatagagatggaagatgatgatattgctgatcctgaccctatgtgccttaggctaatgtgtgtayttgtgtttcagtttttaatttgaaaagctttaaaattaaatttttttaattttgaaaataaaaaatcttaaagaataagtatatagacaaaatatttttgtatagctgtacaatgcatttgtattttaaactaagtgttaaaagttaaggaattgaaaaggttataaagtaaaaaagttatagtaagtgaaagttaatttattattgaagaataaaaaatatgtttttccaaatttagtgtagcctaaatgtacagtgcttatcaagtttacagtagtgtaacagttatgtcctaagacttcagtcactcatcacgtactccctgactcactggggcaacttccggcttcatttgtgataaaagcctcgtatagttgggccactttttagcttctatactgtattttgactgtcttttt

SEQ ID NO: 559611 - DNA, 485 bp, Homo sapiens
atacatttctacaattacagacatttgtacacacatatatacaygtatacactttttgttttagttttcatgtaaatgatagaaatgtatcattttacaacttactctttttatttaaattgtttttgagatttgtccatgttacttacgtctctactgaagaaaaattgtaatccacatcttttcattttcctaaataatattttagtaaaaacatctgcacatgctactccagtcatatattgaataattctcttaagtgaatactaagaagtggaattggtagatcagagctgcagtctaaatcaattctccaaaattgtcttccaatgtgcttataccatttaatactaccaccaatcaccctcatccatgagagtaccttctcctgtgccctcacctcaattgatactgtcaaactgtgaaattattaataaaatgtttgatgtatctaattgtattttgattttgattttccgagatta

SEQ ID NO: 559612 - DNA, 485 bp, Homo sapiens
atacatttctacaattacagacatttgtacacacatatatacacgtatacactttttgttttagttttcaygtaaatgatagaaatgtatcattttacaacttactctttttatttaaattgtttttgagatttgtccatgttacttacgtctctactgaagaaaaattgtaatccacatcttttcattttcctaaataatattttagtaaaaacatctgcacatgctactccagtcatatattgaataattctcttaagtgaatactaagaagtggaattggtagatcagagctgcagtctaaatcaattctccaaaattgtcttccaatgtgcttataccatttaatactaccaccaatcaccctcatccatgagagtaccttctcctgtgccctcacctcaattgatactgtcaaactgtgaaattattaataaaatgtttgatgtatctaattgtattttgattttgattttccgagatta

SEQ ID NO: 559613 - DNA, 624 bp, Homo sapiens
caaatatcctttttttcaagattgtatggttagaaataagataaggaaaaataaaaggacaaaggggaaaaatgtatagtgtatgcttggcaaacagttgagaagtagaaagtagagataacaaaatgttttcaagataagttttaatttctacatatagtacctgcgtataccttaaagtaaataattaactcaatccatgcatttgaaaaaagtgtatactaatatagagttttgaaggagtattaggggaattactagtgtttttgttctatttcctcaggtatttggaggaggtaagttgcagttatttttcagaaatgttagcataatccagtccaattcttaagtttcaaaaaaactgtgaatgtgaaacaggcataaacacagagatgatattttcatttggaatacatttcatgcataagtttcaaatactgttagttcaaggtatgcaagtggtarttatctaaaatttaattttaaaagtattacctttatttgtctttatttaaaaagcctataatttctcatagtatctcatttattttgggaccaagagcactgaaccaaattattgaacatttctgaacaatttcaaagatttatcaacccagggaaaaa

SEQ ID NO: 559614 - DNA, 540 bp, Homo sapiens
gttaatagaattaatactattatgcaacaccataaaatgtatacagatattattttatagccccatcatgtttagatgtttatttgccacaactattttgttgcacccttgttatcataattttcattacatagtaaattacttaaaattagtttatcttttaaaaactaactggaccacataatttaaaggacacagaacattctattatgatttctaagttaaaataaagatttgaaaaaaaactcagatgtgatcttgaagtaaggacaaatacattgactgggacattctatgtaaatattatgcaattgatttatggcatgaggttgagggtgtggaagcaaactttaaatagatgcaatcaaataaaaggacaacactcaattaattcctgccttctacattttgccacacagtgcttcaattccttcactaatatctgcagctggtttgtttcrgatcataatgaccatcatgactgttgattgtttttggtgaaaaattactttctattgatttgtttaaatatgacctttt

SEQ ID NO: 559615 - DNA, 509 bp, Homo sapiens
ataaaacagaaatgtaatggaatgattttgaattttttgcattaactatttatacctgcatttatctcttacaaatctctaccatagtcagtaaactctgagtactagagaaagagaagagctaaaattagaatagagataacaagtttatgcygcagttctgcttttcctatgtatatttttaactcatcaggctcatcattgaatgacaataatagtgtatattattatcgcatttttgaggaaactacatactgtgttccatagtgagtgtaccatcctacattcctatcaatcgtgtgtaagggttctaatttctccacatcctcactgacacttgttatcttttttttttttataatagtcatcataacagatgagaggtgataattcattgtggtttatatttgcatttttctgatgattagtggtattgagtatcttttcatgtaactgttggacatttgtatgttttctttggagaaatgtctatttaagccctttgctca

SEQ ID NO: 559616 - DNA, 529 bp, Homo sapiens
gtgccagtatctctcagttgttatgggaaggtagaagcctaactccaatgagaaaacacagaaaaccgaatcacagagaaaaacatttccaaagtcaggagtaactcaaggtgctccacacacgccaaggatcagcttcctctctgaagtcctccaatattcttcagctaactcagcccagcacttaaaacttctccagtcctttatttcaacagattgagttcagactcagctatggcctatcttccctatcacagaagccttgaaaaagctcttgcttgcctgttaaagtttgtccagtgcaggtttgttttgatggtatctaaaacttctatttgatgtgttcaatttcctgatgttgcaatcattttttaagtgacatttttgttgggagttaacaaagctttttttagttytcattccaacaaagatacaccctgagagaggcatgaaattaaagaaacttgtatattttaatagcactttgaacccctcagagagatttcacttatattcagaagaatacctt

SEQ ID NO: 559617 - DNA, 620 bp, Homo sapiens
ggctgcgctccctctaaaacccgtaggggaagaatatctcctgcttcttccagctcctggtggctacagacgttccttggcttgtgacagcattgctcatcttgacacggtgttctctgtgtgaacctttacacagccytgcctctgtgtccaaatgtcttctttttacaaggacaccagtcctgttggaccagggctcaccctaatgacctcattttaacctgattacctctgccaagaccctacttccaaataaggtcacattatgagatactggggtttaggacttcaacctatttttgcagggaacacaaggcaacccctaacctaggatgtggggtcatagtgaaaattagaggtggtgcacatgggcagagctagctctgtgcttgacaccacggtgacttattgatgccgtctcttccacctcctcccagggtcctggggacaggcacgctggatgtagcacggtcacttctttatcagcatccagcctaaggtaactgaagggattcagtaagggctggaattctgcaggaagtaggaatgctatgcaaagtgagctgcagccatcatagtgggtcccttggtgagatgtgcaaattcagctccagatgatc

SEQ ID NO: 559618 - DNA, 574 bp, Homo sapiens
atagacatttctctaaagaagatatataaatggccaataaccacatgaaaagatgctcaacatctgtgatggttaatattgagtgtcaacttgaytggattgaaggatgcaaagtattgttcctgggtgtgtctgtgagggtattgccaaaggagattaacatttgaatcagtggactgggagaggcagacccacctcagtatgggtgagcacaatctaatcagctgcccatgcagctagaataaagcaggcagaagaatgtggaaggactaaactggctgagtcttctggcctttatctttctcctatgctggaagcttcctgccctcgaatatcagactccaagttctttggactcttggacttacaccagtggtttgccaggggctttcgggcctttggtcacagactgaaggctgcactgtcagcttccatacttttgaggttttgggacttggactggcttccttgctcctcagattgcagatggccatttgatgcagacggcctattggtgaagcctattgtgggacttcaccttgtgatcatgtgagtcaatactccttaataaact

SEQ ID NO: 559619 - DNA, 574 bp, Homo sapiens
atagacatttctctaaagaagatatataaatggccaataaccacatgaaaagatgctcaacatctgtgatggttaatattgagtgtcaacttgattggattgaaggatgcaaagtattgttcctgggtgtgtctgtgagggtattgccaaaggagattaacatttgaatcagtggactgggagaggcagacccacctcagtatgggtgagcacaatctaatcagctgcccatgcagctagaataaagcaggcagaagaatgtggaaggactaaactggctgagtcttctggcctttatctttctcctmtgctggaagcttcctgccctcgaatatcagactccaagttctttggactcttggacttacaccagtggtttgccaggggctttcgggcctttggtcacagactgaaggctgcactgtcagcttccatacttttgaggttttgggacttggactggcttccttgctcctcagattgcagatggccatttgatgcagacggcctattggtgaagcctattgtgggacttcaccttgtgatcatgtgagtcaatactccttaataaact

SEQ ID NO: 559620 - DNA, 574 bp, Homo sapiens
atagacatttctctaaagaagatatataaatggccaataaccacatgaaaagatgctcaacatctgtgatggttaatattgagtgtcaacttgattggattgaaggatgcaaagtattgttcctgggtgtgtctgtgagggtattgccaaaggagattaacatttgaatcagtggactgggagaggcagacccacctcagtatgggtgagcacaatctaatcagctgcccatgcagctagaataaagcaggcagaagaatgtggaaggactaaactggctgagtcttctggcctttatctttctcctatgctggaagcttcctgccctcraatatcagactccaagttctttggactcttggacttacaccagtggtttgccaggggctttcgggcctttggtcacagactgaaggctgcactgtcagcttccatacttttgaggttttgggacttggactggcttccttgctcctcagattgcagatggccatttgatgcagacggcctattggtgaagcctattgtgggacttcaccttgtgatcatgtgagtcaatactccttaataaact

SEQ ID NO: 559621 - DNA, 574 bp, Homo sapiens
atagacatttctctaaagaagatatataaatggccaataaccacatgaaaagatgctcaacatctgtgatggttaatattgagtgtcaacttgattggattgaaggatgcaaagtattgttcctgggtgtgtctgtgagggtattgccaaaggagattaacatttgaatcagtggactgggagaggcagacccacctcagtatgggtgagcacaatctaatcagctgcccatgcagctagaataaagcaggcagaagaatgtggaaggactaaactggctgagtcttctggcctttatctttctcctatgctggaagcttcctgccctcgaatatcagactccaagttctttggactcttggacttacaccagtggtttgccaggggctttcgggcctttggtcacagactgaaggctgcactgtcagcttccatacttttgaggttttgggacttggactggcttccttgctcctcagattgcagatggccatttgatgcagacggcctattggtgaagcctattgtggracttcaccttgtgatcatgtgagtcaatactccttaataaact

SEQ ID NO: 559622 - DNA, 610 bp, Homo sapiens
cacaatgtggagaaaacctgtgtgggtcagagaggtatttgggccaaatccatttttccacaatgcggtgccataccaagagaaaaggtttctgtgttaaggtgcaaatctggaattggaagcatttttgtattgtcagcagacaccatgcccctggggaggcaaagaaagagtggaggttctgaartgaagacactcagccctgagcctggcatcatctaggagctcacccagggagcaccagccagaaagagggacagaaaattcgccctaaacctcagagctggtgcccgaaatgtggctgagtcctgggtgggccagtgacctcaaagacagcaagtttaactccaaagctgaacttcacgttggccgacaccagcaggctcaggccagaggctggggatgggacgggcccataggtcaacctcaagagttggagtctaaaaggaggaaggcaggaagggccgtgggtgtctggaaggaattacttaatgcagtgattcaggtttcccctgacccagggattctttgatgtgtaacccatgacctccagggcttctaatttctgtatgaagatctcacagcctccaagggcacgtcacagcaagag

SEQ ID NO: 559623 - DNA, 519 bp, Homo sapiens
cagcagcttactgacctgactatcttggggcatccggttcacaccgggcacccttaagccaactgagcccagtgtgagaacgcagtcccaggggaggagaccgatggcaggcgtccactctccttgtggtaagggacttcggtatctgggaaactatttgctctgtttattttggactagaaaattgcatcttgtttgtctgtggttgtttagtgacagagaaaaattaggaagtctaaatttaaacaaatgctaaatatataattgttccaatgaaaactacgatagttattttcccacctggtataaacgtgtaggaaataatgcccctaggatcccacagacaaaaagaatgayttttttttaaaaaatctttggagttatttctgggaagagcatgacatttcctacattaattgaatatggtcagttatcccatctatttgaagggcatgacacttggtccctaaaagttgaaaagacgaggcagagtgcccttagttggtgttctcagcacac

SEQ ID NO: 559624 - DNA, 563 bp, Homo sapiens
tacagtatctggagggggaagagggccatgagcttcaggttcttcttggtcttgcggggcaaaccatggggagaggaacaccaaagagagcccttgtcaggccccctgaagtggggaatcatgccctgggaagcagcttcactggcctggggctaaaggtggtactgaactcatatgttgcgaatatcttccaggacagmtggaggaattaagggtggttcatctttccatagtaggaatactcttgttggagtaagtggtttcctcctaggagagtccattagtattatctctttgattaacctatgtctgcgttctgagctgcttgtacccttcttcacccttaccccccaaccccccccccaaaaaaaacagaaaacaaaccaaaactctaaaggtaacaccaatccttcactcaggcttcagaactgtttgaggatcgatatagatgataatgccagctgctttattgctttcttactaagaaccaggcaagaaaccaagctttagcttatttaatcctcataataccaccatgagaaagatctaattattattgatac

SEQ ID NO: 559625 - DNA, 563 bp, Homo sapiens
tacagtatctggagggggaagagggccatgagcttcaggttcttcttggtcttgcggggcaaaccatggggagaggaacaccaaagagagcccttgtcaggccccctgaagtggggaatcatgccctgggaagcagcttcactggcctggggctaaaggtggtactgaactcatatgttgcgaatatcttccaggacagatggaggaattaagggtggttcatctttccatagtaggaatactcttgttggagtaagtggtttcctcctaggagagtccattagtattatytctttgattaacctatgtctgcgttctgagctgcttgtacccttcttcacccttaccccccaaccccccccccaaaaaaaacagaaaacaaaccaaaactctaaaggtaacaccaatccttcactcaggcttcagaactgtttgaggatcgatatagatgataatgccagctgctttattgctttcttactaagaaccaggcaagaaaccaagctttagcttatttaatcctcataataccaccatgagaaagatctaattattattgatac

SEQ ID NO: 559626 - DNA, 566 bp, Homo sapiens
tcttctgcccaaaataaggtaaaggaacatactgggaagagcagggaattccagggtcctacagtatctggagggggaagagggccatgagcttcaggttcttcttggtcttgcggggcaaaccatggggagaggaacaccaaagagagcccttgtcaggccccctgaagtggggaatcatgccctgggaagcagcttcactggcctggggctaaaggtggtactgaactcatatgttgcgaatatcttccaggacagatggaggaattaagggtggttcatctttccatagtaggaatactcttgttggagtaagtggtttcctcctaggagagtccattagtattatctctttgattaacctatgtctgcgttctgagctgcttgtacccttcttcacccttaccccccaacccccccccmaaaaaaaacagaaaacaaaccaaaactctaaaggtaacaccaatccttcactcaggcttcagaactgtttgaggatcgatatagatgataatgccagctgctttattgctttcttactaagaaccaggcaagaaaccaagctt

SEQ ID NO: 559627 - DNA, 618 bp, Homo sapiens
cttttcttcacttgacccagaaattttgtgcttctacagttcaagtaagagcatagtaagcttcccatctattttacttctaggaacatcatgattaattagccagtgctggaggtctacacaagtcagattattctgattgttgctttgcctctgctgttaattccagtaactacgcccaccttgcctttgacatttgagtgccatcgcttggctcctgccacccagggatccaattattcccattgcatttgttttctaattgagtgattgtagttcccactataagttctggaatgcagagaagagcaatcacagagatctttaaggatgctggtgctcccctcacaaatttatttcttaaaatattagtgaaaggtgtatcttctggaccctcccagtgtgggggagtaggttttatgtgacaagtccactgtatcattccaatttccttaagccttttaattccctcctctaaatgaaaccaaggtagatcaggcatccccagctcactcctggggtggtctattttttgatccatgtttcagccagtcagccaaataaacttatagtgcctkttttcactccttgagcttcaatattaaatgcagaatatat

SEQ ID NO: 559628 - DNA, 570 bp, Homo sapiens
gtcttattagacattcatgatgtctaaagaaatcctctgttgggcattttgtttttaattcttaggtcagatgttgccattttgtataatgatcgctctgtccttgagaatcaccacgtgagtgcagcttatcgacttatgcaagaagaagaaatgaatatcttgataaatttatccaaagatgactggaggtgagtttcagagaaaacctagaggaaatttaatttcaggaaaggaawaaattatgcgatttaaagtcaagaaaaaagatgaaagtcgatgcattccccaaattacaaacttaattactgtcgactggatgactctgagaaggattagtacttagggactttgttcagagccagactgtgttaaagggacctgaagtatttccaggtcaactcaacatccatatgtctgaataagaccacacacaacacaacaaataattttatatacataattacacactctctggaatggagctctgctcaatttttatcaatatggggtgttacataaattcaaaattttggcattatattcattctttcatatattttttttaaa

SEQ ID NO: 559629 - DNA, 422 bp, Homo sapiens
acataatcaaccaaactatcaatcaagtgtgagggtagactatgacaaaagtgaatagtgatggggatgggctaagcaccaggcactgttctaaatggtttacatgtaccaactcatttaatcctcayagctccctagaaacataggtactaatactattactggttcccccattttgcaaatggaaattgatgcatagagcaattagggaatctgcccaagggcatacagctaataagtagtagaaccaagattcaaacctatctcagactggctccaaaacccaaacactggattgtattttttcagaagctagagatcagaaaatataccactccatgctttcttagggttttacttgaggacatagtcaggtaaaatgacaaagggaaagccaaagaagatgacatgggatccaggaa

SEQ ID NO: 559630 - DNA, 422 bp, Homo sapiens
acataatcaaccaaactatcaatcaagtgtgagggtagactatgacaaaagtgaatagtgatggggatgggctaagcaccaggcactgttctaaatggtttacatgtaccaactcatttaatcctcacagctccctagaaacataggtactaatactattacyggttcccccattttgcaaatggaaattgatgcatagagcaattagggaatctgcccaagggcatacagctaataagtagtagaaccaagattcaaacctatctcagactggctccaaaacccaaacactggattgtattttttcagaagctagagatcagaaaatataccactccatgctttcttagggttttacttgaggacatagtcaggtaaaatgacaaagggaaagccaaagaagatgacatgggatccaggaa

SEQ ID NO: 559631 - DNA, 422 bp, Homo sapiens
acataatcaaccaaactatcaatcaagtgtgagggtagactatgacaaaagtgaatagtgatggggatgggctaagcaccaggcactgttctaaatggtttacatgtaccaactcatttaatcctcacagctccctagaaacataggtactaatactattactggttcccccattttgcaaatggaaattgatgcatagagcaattagggaatctgcccaagggcatacagctaataagtagtagaaccaagattcaaayctatctcagactggctccaaaacccaaacactggattgtattttttcagaagctagagatcagaaaatataccactccatgctttcttagggttttacttgaggacatagtcaggtaaaatgacaaagggaaagccaaagaagatgacatgggatccaggaa

SEQ ID NO: 559632 - DNA, 422 bp, Homo sapiens
acataatcaaccaaactatcaatcaagtgtgagggtagactatgacaaaagtgaatagtgatggggatgggctaagcaccaggcactgttctaaatggtttacatgtaccaactcatttaatcctcacagctccctagaaacataggtactaatactattactggttcccccattttgcaaatggaaattgatgcatagagcaattagggaatctgcccaagggcatacagctaataagtagtagaaccaagattcaaacctatctcagactggctccaaaacccaaacactggattgtattttttcagaagcyagagatcagaaaatataccactccatgctttcttagggttttacttgaggacatagtcaggtaaaatgacaaagggaaagccaaagaagatgacatgggatccaggaa

SEQ ID NO: 559633 - DNA, 376 bp, Homo sapiens
ctacaaaaaagcttctagtactaaaaatgagtttagcaaggttgtagaatccaaggtcagcatataacataaaatcatcttcctatatactagcaatcaccaactggaaattgagaagtatcattcacaacagtaccacaaacatgaaataaatgtgtaagattacaaaatrcaagcaagatccaattgctaaaaactacaaaacactgacgaaaaatctaaggtctaaatacatagatataccatgttcatggctcattattaaaatgtcagttgcctcctaactgatttccagcttcaatgcaatgtcaatcaaaaaccccagcaggctgggcatggtggctctcacgcctgtaagccctacactttgggagac

SEQ ID NO: 559634 - DNA, 376 bp, Homo sapiens
ctacaaaaaagcttctagtactaaaaatgagtttagcaaggttgtagaatccaaggtcagcatataacataaaatcatcttcctatatactagcaatcaccaactggaaattgagaagtatcattcacaacagtaccacaaacatgaaataaatgtgtaagattacaaaatgcaagcaagatccaattgctaaaaactacaaaacactgacgaaaaatctaaggtctaaatamatagatataccatgttcatggctcattattaaaatgtcagttgcctcctaactgatttccagcttcaatgcaatgtcaatcaaaaaccccagcaggctgggcatggtggctctcacgcctgtaagccctacactttgggagac

SEQ ID NO: 559635 - DNA, 376 bp, Homo sapiens
ctacaaaaaagcttctagtactaaaaatgagtttagcaaggttgtagaatccaaggtcagcatataacataaaatcatcttcctatatactagcaatcaccaactggaaattgagaagtatcattcacaacagtaccacaaacatgaaataaatgtgtaagattacaaaatgcaagcaagatccaattgctaaaaactacaaaacactgacgaaaaatctaaggtctaaatacatagatataccatgttcatggctcattattaaaatgtcagttgcctcctaactgatttccagyttcaatgcaatgtcaatcaaaaaccccagcaggctgggcatggtggctctcacgcctgtaagccctacactttgggagac

SEQ ID NO: 559636 - DNA, 473 bp, Homo sapiens
gaatcctgaccccaaaacttggagaactgctgccttcccctccactttcttccttctctagaatttcttccttggaagaaacatccctttgccattctatattaacttacatagttccactgaggcaagttttgctacctccctcccatctttccacctctctctcaacacaaarcctgaccaaagcattctaccagcccaccccatttccagtgattagctgtcaggtgggctaagccaaacaaatctgggttttccctgagactagacctctctttctgggagagatggaatcacagggacaaggttggccaccttggggtagtgagaattcatcctgcctaaacagggagaattcaaacaagtttctagaaagccaaactactttctagaaagtcaaagataattatattttttgccatgactgtaagaatgcccatttcattgcacactttctaacatttttaccaatc

SEQ ID NO: 559637 - DNA, 473 bp, Homo sapiens
gaatcctgaccccaaaacttggagaactgctgccttcccctccactttcttccttctctagaatttcttccttggaagaaacatccctttgccattctatattaacttacatagttccactgaggcaagttttgctacctccctcccatctttccacctctctctcaacacaaaacctgaccaaagsattctaccagcccaccccatttccagtgattagctgtcaggtgggctaagccaaacaaatctgggttttccctgagactagacctctctttctgggagagatggaatcacagggacaaggttggccaccttggggtagtgagaattcatcctgcctaaacagggagaattcaaacaagtttctagaaagccaaactactttctagaaagtcaaagataattatattttttgccatgactgtaagaatgcccatttcattgcacactttctaacatttttaccaatc

SEQ ID NO: 559638 - DNA, 385 bp, Homo sapiens
gggcatttcccagagcagtctctgccagccaccctgctgtgatcactttgccacagagcagccccggcggtcaacctcagcctcccttagcaacctgagcgccccgcccaggtgccttactattggtctcgtggagcgggatgggcagctctgccgtgcaatcccagctcgcagcccttgcyccgcgtgtactcacgggaggactcgcagacgttactgccctattgcgtgccccggccacccccgggcggattgtagccggtgcgcggggtggctggggctacgtgcagagctgtcgcggagccggaacagcagcggtgaagcccctcagctcggccgagaccgacgtgcccattgctcgcctcgggtgccgccgctttagccc

SEQ ID NO: 559639 - DNA, 444 bp, Homo sapiens
gtcttcttttctcccccttgggttttcttccaatgacagcagagaagaagaggttaacaagctgagctagaactcacagcctcacagagctcacagggagttaaacattggagctcagcatccactgaggagaggccctgctaagtctcccactccttargttgggaatctgaagaacaaactgcaaaatgccccaacagggaatgatggccagctttaatcgtctcaatccctgattgtgaatttccaagaccctagcaggggaaatgtaaatcctctctggagaagaatatcatccaaggcttcaaattagctctgcaatttttcatatataatgtctatcactaaaaataaaaagccacatgagacttaaagatgacataacagaaaacaagagaagcaaacaacagacacaaaaccacaagggattgagataacagagtt

SEQ ID NO: 559640 - DNA, 411 bp, Homo sapiens
aaaatattacctcctagctatgtaaacytgaactcatttcatatctataaaatatgaaaagtttttcatatctctaaagtataaacagcacctatttcacacagtggctatgatgactaaatgaaaagatctttattagtataaagtatttagtatagtatcggtcatgcaaaattataatttttacttgttttgaagataactcaaactggaattgatcacaagacacaggaagtacagtaacattaattcaaatgctacaatcttagttttttaaataatcaagatatggagattaactaaatttctttgctgtatgaaaaattaccaattaaattaatatacaaataagattgaaggagggagagttatctgatttcaacatctggcatttgcttgcctaacaattca

SEQ ID NO: 559641 - DNA, 590 bp, Homo sapiens
tagaagtcaataacaagaggaactctggaatacaaacacatggaaattaaacgatatactccaaatgaccattgggtcaatgaagaaattaagaagaaatttttaaaaatacttgaaacaccatcctggctaacacagtgaaaccccgtctctactaaaaatacaaaaaattagccaggcaaggtggtgggcacctgtagtcccagctactcgggaggctgaggcaggagaatggcatgaccccaggagccggagcttgcagtgagctgagatcatgccactgcactccagcctgggcgatagagcaagagtacttctcaaaaaaaaaaaaaaaaaaaaaaaaaaaaaaaaaaaacttgaaacaaatgaaaatggaaacataacacatcaaaacctgtgggatataggaaaaacaatactaagagggaagcttatatagcaatacatgcctacatttaaaarggggaaaaatttcaaataagtaacctagcaatgcatctgaaagaactagaaaagcaagagcaaaccagatccaaaattagtagaagaaaagaaacagtaaagatcagagcagaaatgaataaaatgga

SEQ ID NO: 559642 - DNA, 377 bp, Homo sapiens
gagacgtacaggcagcaggggattaagaaacaacttgtccctaaatgacccttcaggtctgggggaaaacatttggaagaatgggaagccaaatgttttccccctagacctagatgtctgaagctgcaagtctgraggctgactgtatgttgttaagttctgcttggctatgaacaagctgtgaaatgcagggacagttaggtgttgtctgggtgtagacagggcctgctgccagtgacagcagtgtgctaggaagaaaggcacatgggaggtgccactctgctgctgtctgtccatcatagccacagattcattatattggatcaagtctcggtatcttctggatacactccccatggctgctactacccagtgat

SEQ ID NO: 559643 - DNA, 589 bp, Homo sapiens
cctgaattaaactgatttctcctaagcccctagcctgactagtgggctacagtgacttttggatctcctggaattaatgtcagttcagagcctatgtctggtaattcccgaaagatctgattatttccttttcccaaattcacagttcccttggtaaaaggccatggatccctttggggtaggctgagagaaatattattaatttttggcagtgtatcaaggtctttcttcaagagtacctggcttccccttcattyaaggggttctgggtctgtaaaccagttaagtctgggaatcaattgagtggctgtgactctttttatggttcaagtttgacttttattcagttgacgtagaacttttctgcttatacagatcaagtaagaacttagtaggcatcctaactatttcacttctataaacaccatgatcaaatagccaatgccataggtctgtgtgagccatgttattttaactgctgcttcgactctgctgttcattctggtaatcatgcctaccatgcctttgggggttgaatgctgccacttggcccctcccatcccagaatcgaattattcccattgcattt

SEQ ID NO: 559644 - DNA, 422 bp, Homo sapiens
ggattttgcctacacatctgctaaactaaatatcaaatttccttgtactgagaagctgcataagccatagctttggaatcagaaactcgagttcaaattcttgatttcaacacatacagctctgttttgaacaacctctgtgtaggtacattacttatcccccaatctgcctcaggttcctcatctgaaaatgtgtacaataagataatctaatattattatgagtaaataacttagcaagtgctatatttatggtaggtaatcaaaaataatagtgcttgaaggaagaaggaatataagcaattttagagcaktgtgcaaataactgagaaaattaacttgtttttagtacaaattatacatactgcattttcaacatgtatagtttcacactactcatagaactcttttgaagccaaaga

SEQ ID NO: 559645 - DNA, 487 bp, Homo sapiens
gctccgcctcccaggctcaagcaattctcctgcctcagcctccmgagtagctaggattacaggtgggtgccaccacattcagctaatttttgtatttttagtagagacatagtttcaccatgttggccaggctggtctcgaactcctgacctcaaatgatccaccagccttggcctcccaaagtgctgggattacaggcatgagccaccgcgactggccgatttctgttgtttaagcaacaaatctaaggttatagcagcccaagctgactgtggcagaccccatgtcagggagactgggagggggtggtgatagggaattagagagtgtatgattggtctaacatgggccaaagccactcagcttcagctgtttatggcatatgggaaggtaagtccaaatacggcacatctaattttaaagaaatatgaacatctagatttaaacatgaagtcttctaaattttacaaattgattatgaattcaa

SEQ ID NO: 559646 - DNA, 487 bp, Homo sapiens
gctccgcctcccaggctcaagcaattctcctgcctcagcctcccgagtagctaggattacaggtgsgtgccaccacattcagctaatttttgtatttttagtagagacatagtttcaccatgttggccaggctggtctcgaactcctgacctcaaatgatccaccagccttggcctcccaaagtgctgggattacaggcatgagccaccgcgactggccgatttctgttgtttaagcaacaaatctaaggttatagcagcccaagctgactgtggcagaccccatgtcagggagactgggagggggtggtgatagggaattagagagtgtatgattggtctaacatgggccaaagccactcagcttcagctgtttatggcatatgggaaggtaagtccaaatacggcacatctaattttaaagaaatatgaacatctagatttaaacatgaagtcttctaaattttacaaattgattatgaattcaa

SEQ ID NO: 559647 - DNA, 671 bp, Homo sapiens
tctaacatatgcaggggaaaaggagagagaagaatgttaagattttctcactggccagagtgctgacactggttttctgctccaattaaagtgggaccttgagagtgtgggggtgatactctttgtccagatgaactttggcaaagtgatggaggatgggaggcccagatgtgtgacccaacagcagatgtcagcactgggatggtccagctgagtgcacgtttatgcctttccttctccaagggagacctcaggagatagatagtatctcacaggcttacaacagatgctaatcagattatatccagatgctctatgaacatatgtcagcagttgaaaagacctactctaattgaggcaaaattactttttccaatgctgtaggtaaaatgcacaagtaaaaatataactctgtggytgtttaaatacaccctaaggtactttttctttagcacacagaaagcccagggtgaacaaatattgtatgtgcttgccaagaagtctgttgaagagacaaaagtggagagagaaaggaagtaggcagcctcttcagctccctgtgcttacaagatgcaatttcttaatggtttaggattctatcatccaatttgaaaaccatgcttttgtaaattctctttcttgcttgctgattgaggagctcctaatgttaa

SEQ ID NO: 559648 - DNA, 374 bp, Homo sapiens
agttttcctctttttgataatagccattctaactggaatgatgtggtatctcattgtggttttgatctacaattccatgatgattagagatgtagagcatttgtttcatatacttgttggccatttgcatgtcttcttttgagaaatatctatttagatcttttgcctggtttttaattaggatagtaaaaaagaaaaaagtaatctaaattttttcacactttttgtgtcactatacactcatgtattcccttcaacatgtcayacagaaaacctagatgttatagtttcagaataacagaaatgtaaccaattagaaacataacaaagaatgatactttgcaaaaggtcactttccctgagtaccagaaagt

SEQ ID NO: 559649 - DNA, 374 bp, Homo sapiens
agttttcctctttttgataatagccattctaactggaatgatgtggtatctcattgtggttttgatctacaattccatgatgattagagatgtagagcatttgtttcatatacttgttggccatttgcatgtcttcttttgagaaatatctatttagatcttttgcctggtttttaattaggatagtaaaaaagaaaaaagtaatctaaattttttcacactttttgtgtcactatacactcatgtattcccttcaacatgtcacrcagaaaacctagatgttatagtttcagaataacagaaatgtaaccaattagaaacataacaaagaatgatactttgcaaaaggtcactttccctgagtaccagaaagt

SEQ ID NO: 559650 - DNA, 319 bp, Homo sapiens
tttaatattactgcatgtgagttaacacartcttcccaaattaaagttttagatgggccctcaaaatttttagggcatggttttcctgcaggtttatattgaaagtatggggtatctcccattactccccctttcatttgttttaaacaagaaagggagaggccagagactaaatgtcccggttcctctgtagctgatctctccagaagataagcagcccagacttgagtttgtagatggatacaaccaggtgtatgtccgaggcacagagaggggtatttataacccatggtaacattaaatgcagtgccttcttctc

SEQ ID NO: 559651 - DNA, 319 bp, Homo sapiens
tttaatattactgcatgtgagttaacacagtcttcccaaattaaagttttagatgggccctcaaaatttttagggcatggttttcctgcaggtttatattgaaagtatggggtatctcccattactycccctttcatttgttttaaacaagaaagggagaggccagagactaaatgtcccggttcctctgtagctgatctctccagaagataagcagcccagacttgagtttgtagatggatacaaccaggtgtatgtccgaggcacagagaggggtatttataacccatggtaacattaaatgcagtgccttcttctc

SEQ ID NO: 559652 - DNA, 319 bp, Homo sapiens
tttaatattactgcatgtgagttaacacagtcttcccaaattaaagttttagatgggccctcaaaatttttagggcatggttttcctgcaggtttatattgaaagtatggggtatctcccattactccccctttcatttgttttaaacaagaaagggagaggccagagactaaatgtccyggttcctctgtagctgatctctccagaagataagcagcccagacttgagtttgtagatggatacaaccaggtgtatgtccgaggcacagagaggggtatttataacccatggtaacattaaatgcagtgccttcttctc

SEQ ID NO: 559653 - DNA, 319 bp, Homo sapiens
tttaatattactgcatgtgagttaacacagtcttcccaaattaaagttttagatgggccctcaaaatttttagggcatggttttcctgcaggtttatattgaaagtatggggtatctcccattactccccctttcatttgttttaaacaagaaagggagaggccagagactaaatgtcccggttyctctgtagctgatctctccagaagataagcagcccagacttgagtttgtagatggatacaaccaggtgtatgtccgaggcacagagaggggtatttataacccatggtaacattaaatgcagtgccttcttctc

SEQ ID NO: 559654 - DNA, 601 bp, Homo sapiens
tgagctacccaaggccacgcaagcccaccccttgcactggcatgccctggatatgaggcatgaagtcaaaaactattattttggagctttaagatttaatcactgccctgttggctatcagacttgcatagagcctgtagcccctttgttttgggcaatttctcccatttggaatggaagcattttytaatgcctgtaatgccattgtatctaggaagtaactaactggcttttgattttataggctcataggtggaagggacttgccttgtctcagatgatactttggacttggacttttgggttaatcctggaatgagttaagactttggagaactgttcagaagccatgactgctttgaaatgtgagaaatacatgagattttggaggggccaggggtgaaatgatatggtttgaccttttgtcctcacccaaatctcatctcaaattgtaatccccatgtgtcaagggagggacctagtgggaggtgattggataacaatggtggtttaccccatgctgttctcatgatactgagtgagttcttttttttttttctttttttttttttttttttgagatggagtctcactttgtcac

SEQ ID NO: 559655 - DNA, 577 bp, Homo sapiens
tgaggttgctgcagacctgtatggatttgctgctgctaacagtaccttgatgaaaaaatatttgaaaaaaatatatatgtatgagcattccctgccctcctcctccataagaagaacacttcaagtatgaaataacctgttaggggataaaaaaaatctgaagttgttcatgtctgagaaaggtatatttcttcatttctggagtagattagcataaatacagcattattatagaaaacaataatttgtagccttttatgaaaaagactagatgaccataaaatccattttttataaccagccaattgtgattctataattctctgaggagaggtatactactaatgacataattaaaatgaaagagcaatatcaaattacatgttggtttcctaaactgagtgctgagtgaaaatgccttattaaagagcttggtggtgtatctactgaagcagtatcagtttatttagttgaaggaaagataaataatgttattctaatctcagatamagctaatgaaatacgtcaaattgtagtttatgttttatatttagcttaagatttctataaaatacat

SEQ ID NO: 559656 - DNA, 586 bp, Homo sapiens
gatggcaggaaggagaagtgccgagcaaaagtggggaaagccccttataaaaccatcggatctygtaagaactcactcactatcataagaacagcagcatgggggtaattgcccccacgattcaattaccttctatgggtttctcccacgacacgggattatgggaactacaattcaagatgagatttgggtggggacacagccaaactatataatcatttctttgtgatgagaacattcaaaattatctcttctagctattttgaaatatgtaatattgttaaccatagtcagcctagtgtgcagtagaataccagactttattcctcctatctaactgtaactttgtactcgttgaccaatttctctttattttctctccatcctcccctccgcagcctctggtaaccactgttctactcaatacttctatgaggtgaacttctttggattccacatatgatcaagatcatgaggtatttgtctttctatagcctggcttatttcacattacataatatcctccaggttcatccacattgttgtatatgacaggatttcattcctttttatggctgaatagtat

SEQ ID NO: 559657 - DNA, 586 bp, Homo sapiens
gatggcaggaaggagaagtgccgagcaaaagtggggaaagccccttataaaaccatcggatctcgtaagaactcactcactatcataagaacagcagcatgggggtaattgcccccacgattcarttaccttctatgggtttctcccacgacacgggattatgggaactacaattcaagatgagatttgggtggggacacagccaaactatataatcatttctttgtgatgagaacattcaaaattatctcttctagctattttgaaatatgtaatattgttaaccatagtcagcctagtgtgcagtagaataccagactttattcctcctatctaactgtaactttgtactcgttgaccaatttctctttattttctctccatcctcccctccgcagcctctggtaaccactgttctactcaatacttctatgaggtgaacttctttggattccacatatgatcaagatcatgaggtatttgtctttctatagcctggcttatttcacattacataatatcctccaggttcatccacattgttgtatatgacaggatttcattcctttttatggctgaatagtat

SEQ ID NO: 559658 - DNA, 586 bp, Homo sapiens
gatggcaggaaggagaagtgccgagcaaaagtggggaaagccccttataaaaccatcggatctcgtaagaactcactcactatcataagaacagcagcatgggggtaattgcccccacgattcaattaccttctatgggtttctcccacgacacgggattatgggaactacaattcaagatgagatttgggtggggacacagccaaactatataatcatttctttgtgatgagaacattcaaaattatctcttctagctattttgaaatatgtaatattgttaaccatagtcagcctastgtgcagtagaataccagactttattcctcctatctaactgtaactttgtactcgttgaccaatttctctttattttctctccatcctcccctccgcagcctctggtaaccactgttctactcaatacttctatgaggtgaacttctttggattccacatatgatcaagatcatgaggtatttgtctttctatagcctggcttatttcacattacataatatcctccaggttcatccacattgttgtatatgacaggatttcattcctttttatggctgaatagtat

SEQ ID NO: 559659 - DNA, 586 bp, Homo sapiens
gatggcaggaaggagaagtgccgagcaaaagtggggaaagccccttataaaaccatcggatctcgtaagaactcactcactatcataagaacagcagcatgggggtaattgcccccacgattcaattaccttctatgggtttctcccacgacacgggattatgggaactacaattcaagatgagatttgggtggggacacagccaaactatataatcatttctttgtgatgagaacattcaaaattatctcttctagctattttgaaatatgtaatattgttaaccatagtcagcctagtgtgcagtagaataccagactttattcctcctatctaactgtaactttgtactcgttgaccaatttctctttattttctctcyatcctcccctccgcagcctctggtaaccactgttctactcaatacttctatgaggtgaacttctttggattccacatatgatcaagatcatgaggtatttgtctttctatagcctggcttatttcacattacataatatcctccaggttcatccacattgttgtatatgacaggatttcattcctttttatggctgaatagtat

SEQ ID NO: 559660 - DNA, 522 bp, Homo sapiens
tgacaggatttcattcctttttatggctgaatagtattccattgtatctatacacgactttttctttgtttgagacagattcttgctctattgtctaggctagagtgcagtggtgcaatcatggctcactgcagcctcaaactcctaggttcaagcgattcttccacctcagcctccccagtagctaagactacaggtgtgcactatcatgcctggctaatttttagttttctgtagagacagagtcttgctattttgcacaggctggtcttgaactcctggcctcaagtgagtctcccaccttggcctcccaaagttctggcartacagctgtgagccaccatactctggcagattattatcattattattatttagcttttgagtattctgagttcctcatatattctgaatatgaaccccttgtcagatgtatgatttgcaaatattttctcctgttctgcaacttgtctcttcactccgttgattgtttcctttgctgtgcggaagctttttagtttg

SEQ ID NO: 559661 - DNA, 516 bp, Homo sapiens
cctctctagattcctcttctctgggcagggcatctctgaaaaaaaggcagcagccccagtcaggtacttatagataaaacccccacctccctgggacagagcaccttgggkaaggggcagctgtgggcacagctttagcagacttcaacgtccctgcctgacggctccgaagagagcagctgatctcccagcacagtgttcaagctctgctaagggtcagactgcctcctcaagtggttccctgacccctgtgtctcctgactggtagacacctcccagcaggggctgacagacacctcatacaggagagctctggctggcatctggcgggtgccccctctgggacgaagcttccagaggaaggaacagtcagcaatctttgctgttctgcagcctccgctgatgatatccagggaaacagggtctggagtggatctccagcaaactccagcagacctgcagcagaggggcctgactgttataaggaaaactaacaaacagaaaggaatagcatca

SEQ ID NO: 559662 - DNA, 620 bp, Homo sapiens
aaacccccacctccctgggacagagcaccttgggtaaggggcagctgtgggcacagctttagcagacttcaacgtccctrcctgacggctccgaagagagcagctgatctcccagcacagtgttcaagctctgctaagggtcagactgcctcctcaagtggttccctgacccctgtgtctcctgactggtagacacctcccagcaggggctgacagacacctcatacaggagagctctggctggcatctggcgggtgccccctctgggacgaagcttccagaggaaggaacagtcagcaatctttgctgttctgcagcctccgctgatgatatccagggaaacagggtctggagtggatctccagcaaactccagcagacctgcagcagaggggcctgactgttataaggaaaactaacaaacagaaaggaatagcatcaacatcaacaaaaaggatgtccactcagggacctcatccaaatgtcaccaacatcaaagaccaaaggtagataaatccatgaagatggggagaaaccagtgcaaaaaggctgaaaattccaaaacccagaacgcctcttctcctccaaaggatcacaactccttgccagcatgggaacaaa

SEQ ID NO: 559663 - DNA, 481 bp, Homo sapiens
atctcacaaatcactattaaataatttactcatataaccaaataccacttgttccccccaaaacctatggaaataaaaaattttaaaaaaataaaaagaaaattggcaggcctacagtggyttgaagatgctatgactaactcacatgccatttatcaatatatccattcaacagatagtctgcaaatatgcactgggctcctagaatattacaggtattgttctaggtgcttgggatacagcagtgaacgaggagacaagttccaatatctcctggaggttacattccagagagaaaataaaaataaaaaataagcaaataaatgcacaagctaactactttctttctgcgttgtggtaagcatctaattgcattgtatgtgggtactactatattcatttaatgttacaaatgagtaaaataaaggagagagagggtaaataacttgacctaagttctcaaagctcatgagaggcagag

SEQ ID NO: 559664 - DNA, 481 bp, Homo sapiens
atctcacaaatcactattaaataatttactcatataaccaaataccacttgttccccccaaaacctatggaaataaaaaattttaaaaaaataaaaagaaaattggcaggcctacagtggtttgaagatgctatgactaactcacatgccatttatcaatatatccattcaacagatagtctgcaaatatgcactgggctcctagaatattacaggtattgttctaggtgcttgggatacagcagtgaaygaggagacaagttccaatatctcctggaggttacattccagagagaaaataaaaataaaaaataagcaaataaatgcacaagctaactactttctttctgcgttgtggtaagcatctaattgcattgtatgtgggtactactatattcatttaatgttacaaatgagtaaaataaaggagagagagggtaaataacttgacctaagttctcaaagctcatgagaggcagag

SEQ ID NO: 559665 - DNA, 541 bp, Homo sapiens
gccattctcctgcctcagcctcccgagtagctaggaatacaggcgcccgccaccacgcccagctaattttttgtatttttagtrgagatggggtttcaccatgttagccaggatcatctcgatctcctgacctcgtgatctgcccgactcagccttccaaagtgctgggattacaggcatgagccaccgcacctggctgaactttttttttttttttttttaacttccacatatgagtgagaacatgcggtgtttaactttctcttcctggcttatttcacttaacaatgtcctccagttccatctatgttgccacaaatgacaagatttcattcttttttagtgctgaatattattccattgcatatatacagcacaatttctttatccattcatgcatcgctggacagttttaaagacttcctgttccttgcctgtccactatcgacaccacagtccaaatgacagcatgctctacaatagcctcttgccacatgcatcagtctgatgactgcagcctctgactcctccctgcatatta

SEQ ID NO: 559666 - DNA, 541 bp, Homo sapiens
gccattctcctgcctcagcctcccgagtagctaggaatacaggcgcccgccaccacgcccagctaattttttgtatttttagtggagatggggtttcaccatgttagccaggatcatctcgatctcctgacctcgtgatctgcccgactcagccttccaaagtgctgggattacaggcatgagccaccgcacctggctgaactttttttttttttttttttaacttccacatatgagtgagaacatgcggtgtttaactttctcttcctggcttatttcacttaacaatgtcctccagttccatctatgttgccacaaatgacaagatttcattcttttttagtgctgaatattattccattgcatatatacagcacaatttctttatccattcatgcatcgctggacagttttaaagacttcctgttccttgcctgtccactatcgacaccacagtccaaatgacagcatgctctacaatagcctcttgccacatgcatcagtctgatgactgcagcctctractcctccctgcatatta

SEQ ID NO: 559667 - DNA, 609 bp, Homo sapiens
  misc_feature 98: n = A,T,C or G
agaaggttaactatctcattcatcttttatattaggtgcatgttgaaattaaaacattttggatatattaagtaaaatccaatttttttttttttttnttttttttttttcagatggagtcttgctctgtcgcccaggctggagtgcagtggcataatctcagttcattgcaacctctgcctcccaggatcaagtgattctcctgtctcagcctcccaagtggctgggattacaggcgtgcaccaccacscctggctaatttttgtaattttagtagaggcggggtttcaccatgttggtcaggctggtctcaaactcctgacctcgtgatttgcccgcctcggcctttcaaagtgctgggattacagacatgagccaccgcacctggcccaattgtatttttaaaaccagtttcactacttcttttttattttatttttttctttttctttttcttttttttttccttaagacaggatctcgctgtgtcactcaggctggagtgcagtggcaggattatggctcattgcagcctcagccacctgggctcaaactgtcctcccacctcagcctcctgagtagctgggactgtggaaaccaccatcacac

SEQ ID NO: 559668 - DNA, 424 bp, Homo sapiens
tttttttttatttctgtaaggtcccattttcatttctgattttaggaatttgagtctttcttttttttaatcagtctactagaagtttgtgctttcttgatttatcaaagatgcaacttttggttttgttggttctatttttctattctcaattctgtttttctccactctgattctttattgytttcttccatctgctagctttgctttagtttgcccttctttttctagttccttaaggtagaaaattgggttattgatttgagatctttcttttcatttaatgttggtatttacagctataaatttctttctgagtgttgctttgcctttcttccataagttttgacatgttgtgttttgttttcattcatttcaaagtattttataatttcccttgtgatttctttatccacctgttgtt

SEQ ID NO: 559669 - DNA, 237 bp, Homo sapiens
tttgtgtcagaattcttttctgccaggtaggaatttgagaggggcaaagaagagctcratttaatttccctcagggtctttgctgaagggagaagaacagaaatctggattcagttttgttagtaaaaataatctttccaccagaaaatgtaaaaagctacattgttcaggatatttggacctattcatttcaatacagtctgataggtgggggtggggaggggagattttgagctg

SEQ ID NO: 559670 - DNA, 608 bp, Homo sapiens
ctcttctttctgtccctttttcytcccatgtttttatttttcttttttatcattattttttttcatgagatacagtctcgctttgtcacccaggctggagtgcagaggcacaatcttggttcactgcaacctctgcctcctgggttcaagtgagtctcctgcctcagcctcctgagtagctgagattacaggtgctcaccatcacacccagctaatttttgtatatttatagagacagggtttcatcatgttggcccgactggtctcaaactcctgacctcaggtgatccacccccctcagcctcccaaagtgctgggattataggcttgagccaccacgtccagccctttgtatatttttaaaaggtcttcttttctagctcttggaaataaaatcagaaattatactttatgtggaaaatttcagtgtacctcataacattataaagtgttctgacaaagctcttcaaaagtccatatgttcatggtgttaaatagatgaggggaaaatagaacactcaaagatctagctcagaaagaaaattctcagaatgctaggttatcctgttcattttggaggcaacacaagacaggcagaatgaaagtgt

SEQ ID NO: 559671 - DNA, 553 bp, Homo sapiens
gtttctggtagtcagagctaaaaggggacaagttcagtgacaagactctcggtgtccacaagaggaaaatagccttgttgttcagaagaatcacagattttctagatactgatgtttgagatgaatgtttcccacaggtctttataaagtgagtactgggagacgtcatttaggatgtccttgacatttttcgttgctcttcctcaggacatccctccaggtagttagttattcaatctcatctgttttccaaattgaaataaaaaggcatgsaaaagcaaggcaatccttatgaccttagacccaaaagaaataacgatgggcatgaaattgagagagtacaataaagatggcttcctcaaaacaagagttgactctcctcttcattccatttcaaattctatactttaaaatagttctccttcaaataatgcatttatgggtattgtctatttctgtttgatttgcccttttaaagtagaaatcaactttttattttagaacatttttctctttattaaggtataacttacatatcttaatggcacagact

SEQ ID NO: 559672 - DNA, 525 bp, Homo sapiens
ctgggcaatgtagtgatacctcatctctactaaaaatgaaaataaaaacaattagtcaggcatggtggcacatgcctgtagtcccagctacttacggggttgaggcgggaggatcgcttgagcctgtgatattgaggctgtatagagtcaagattgcgcgcctgcactctagcatggataacaaagtgagactttgtctcataagcaagcaaatawataactgcagaggattcttggggagttcgaattgagacttttagaccttgaagaaacgtttgatattatccagttccaggactgccgctagatttcatcttcaaagccaattcaatggattggtactgaatgcttacagtcagcaagtttttttctctaaaggtacagattgtaaatattttcagctttgtgggccatacagttgccactacgatcacgcagctctgttgtgcaaaagcagcaaagacaatatgtaaacaaattaatgtgcaattgctgtgctccaataaaactttattttacaacaag

SEQ ID NO: 559673 - DNA, 525 bp, Homo sapiens
ctgggcaatgtagtgatacctcatctctactaaaaatgaaaataaaaacaattagtcaggcatggtggcacatgcctgtagtcccagctacttacggggttgaggcgggaggatcgcttgagcctgtgatattgaggctgtatagagtcaagattgcgcgcctgcactctagcatggataacaaagtgagactttgtctcataagcaagcaaatatataactgcagaggattcttggggagttcgaattgagacttttagaccttgaagaaacgtttgatattatccagttccaggactgccgctagatttcatcttcaaagccaattcaatggattggtactgaatgcttacagtcagcaagtttttttctctaaaggtacagattgtaaatattttcagctttgtgggccatacagttkccactacgatcacgcagctctgttgtgcaaaagcagcaaagacaatatgtaaacaaattaatgtgcaattgctgtgctccaataaaactttattttacaacaag

SEQ ID NO: 559674 - DNA, 596 bp, Homo sapiens
tgacttaaaaagaaggtgaagagtatgaggttgagtagttacccaaagaatttctgtgcagtaggctaaatatcataaatatgatatcttgsggactactttgtctcttctcaagagtttgaattaagatgtggtaggaagaaaaactgtatgacaaggggaaacgaagcctctaaaatgcaagatttcgctcttctccacatgctttctttaaatctggttctgagaatttgaaccaactaaagacatctgttttctaaattacttaggtcagttattttgtgcccttccttggtgaaatccatagttaccgatctattatcaggattactctaagtataacacggcaagaagccaatgaattttaagtttttaaattttcaattattttattgaaaaaaaaatgcaacaaaatagctgctcagctacagcccaggagttagcggaccccagctgctttgtacattaattactaaatctcatctggtctcttttttaaattttctcatctgtactgagaagcgggggagaaaaaggtaagcagaaggagagagagccaaaacatgctcatatatactgaaaccctttaccaaaga

SEQ ID NO: 559675 - DNA, 596 bp, Homo sapiens
tgacttaaaaagaaggtgaagagtatgaggttgagtagttacccaaagaatttctgtgcagtaggctaaatatcataaatatgatatcttgcggactactttgtctcttctcaagagtttgaattaagatgtggtaggaagaaaaactgtatgacaaggggaaacgaagcctctaaaatgcaagatttcgctcttctccacatgctttctttaaatctggttctgagaatttgaaccaactaaagacatctgttttctaaattacttaggtcagttattttgtgcccttccttggtgaaatccatagttaccgatctattatcaggattactctaagtataacacggcaagaagccaatgaattttaagtttttaaattttcaattattttattgaaaaaaaaatgcaacaaaatagctgctcagctacagcccaggagttagcggaccccagctgctttgtacattaattactaaatctcatctggtctcttttttaaattttctcatctgtactgagaagcgggggagaaaaaggtaagcagaaggagagagagccaaaacatgctcawatatactgaaaccctttaccaaaga

SEQ ID NO: 559676 - DNA, 451 bp, Homo sapiens
ctttaaagcaaaaagacaaaaagggacattgtataatgataaaagtattggtccaacaggaaaatatcacaatcctaaatttataaaactggagattccaaatttataaaacgattactactagacctaagaaatgagatagatggcaacacaataatagtaggggacttcaatactccactgacagcactagatagattatcaagacagaaagtcaacaaagaaacaatggactataccctagataaaatgaacytaacagatatttacagaacattccacccaagaactgcagaatatacattcttttcatcagcagatggaacatgctccaagatagaccatatgataggccacaaaacgtctcaataaatttgaaaaaatagaaattatattcaatactccctcagaccacagtggaataaaattggaaattaactccaaaaggaac

SEQ ID NO: 559677 - DNA, 495 bp, Homo sapiens
atcatatacctagaacaccctaaagactcattcaaaaagctcctagatctgatatatgaattcagtaaagcttcaggatacaaaatcggtgtacacaaatcagtagcactgctataaagtgactaagctgagaatcaaatcaagaactcaaccccttttacaacagctgcaaaaataaaataaaatacttaggaatatacataaccaaggaggtgaaagacctctacatggaaaactacaaaacactgctgaaagaaatcatagatgacacaaacaaatggaaacacatcccatgcttatgagtgggtagaatcaatattgtgaaaatgaccatgctgccaaaagyaatctataaattcaatgcaattcccatcaaaataccaccatcatgctttgcagaactagaaaaaacaattctaaaactcatatgaaacaaaaaaagagtctgcatggccaaagcaagactaagcaaaaagaagaaatccagatgcatca

SEQ ID NO: 559678 - DNA, 495 bp, Homo sapiens
atcatatacctagaacaccctaaagactcattcaaaaagctcctagatctgatatatgaattcagtaaagcttcaggatacaaaatcggtgtacacaaatcagtagcactgctataaagtgactaagctgagaatcaaatcaagaactcaaccccttttacaacagctgcaaaaataaaataaaatacttaggaatatacataaccaaggaggtgaaagacctctacatggaaaactacaaaacactgctgaaagaaatcatagatgacacaaacaaatggaaacacatcccatgcttatgagtgggtagaatcaatattgtgaaaatgaccatgctgccaaaagtaatcyataaattcaatgcaattcccatcaaaataccaccatcatgctttgcagaactagaaaaaacaattctaaaactcatatgaaacaaaaaaagagtctgcatggccaaagcaagactaagcaaaaagaagaaatccagatgcatca

SEQ ID NO: 559679 - DNA, 512 bp, Homo sapiens
ttgagaccaagagtttaagcccagcctgggcaacctaacaagaacttgtctctacaaaaattaaaacaaaaaaaattagctggacatsgtggcatgtgcctgtagtcacagctacacaggaggctgaggtaggaggattgcttgagcctgggaggtcaaggctgtagtgagccacgattgtgccactgcactccagactgggtgacaaagtgagagaccctgtctcttagagagagagaggccttaacaactgacttgaagttcaggaagcaggaggccttttcaactggttttcactgcaggatgatctggctggggacctctaatatcaatatccttttatcttctctctcgggctgttcagctgacccagagactagtctttcatctcatacctgaaggatataacctggtttcaagtattcaggatgctggatgggcaaaaaaaattggtgatttcaacctatcatttgtgagctttcacttagttgccctatgtgctggatgataca

SEQ ID NO: 559680 - DNA, 378 bp, Homo sapiens
aacatgctctcttctaacctataaatgaaccactcatagacttctgtttgcctcatcaatttctacacctttttgaaaaatagatcattttacattccttttcaatgacgggaaggagttcacatttttaaaaaacatatatccatttcttagcatatgtgcagaatgacttcccagcatgaaactggctgacccctttaaatgttctcattccaaatacaagggaaagcccatcttgtgcaactccacaggaatccttgcagaattatatcagatgagaaccacttggcggctcattagaaatagtccccgtctgtcactaaggttagatttgaggacatctttacaakgatataagggggcctttcccccacattt

SEQ ID NO: 559681 - DNA, 477 bp, Homo sapiens
tatacagcctcaattcttggccaagagccacttgcagatatgtgctcatcaaagaaaatctagggctgagtagtctattgcaagggttttattcaatacacagttttccctggttgcaggaaaactgctgaaaactctcaggtcctcgcctacataagacagaaaacatcaaagtttgtgaaaatcacagcacacctccacccagagtcaaagccaagaacaaacaactttgggggttggactgatttcataaaataatctgagtgactgaagtggaaaacagcaatgactatgaactttagggaggccaaaaaataatctactacatttttttaaaattatgcaatgtttagcaaactgagatcactgcaagaaaaaaaagaaagaaaaagaawcacacaaactttactaaacaaagtcacataccaacaaacatttaaaccactgtaaccaagatgaggaactgaagcttgtttt

SEQ ID NO: 559682 - DNA, 565 bp, Homo sapiens
tagctctaagaaagtagttgattcttccagtattcaagaaaatgagaacaggacaaaaaacaatttatatattgtatttataggcaaattgcaggtctgaacaaatctcacagaataacaacatgaaccctatgaaaaatactgttaacagaagagataaagagaattatccaaaagattacagtgaagagcacaggatgaaaaaaaaattgtaatcaattacttactgttcttaaaaggatgcaaacaaagacatgtccactagaaaacaagagcaaggaaggacatagcagagaaagataaaaacagaacaagctgaaatttttaaaaattaragtgttaaaaaagagaagacaacacatgatttaaatttgcagagagcattaaataactaaaactaatactgcaaaaaatagaattagggatgtaaaggatacaaagttttcccagacttctgaggattcaattcagagaaaagagaataaagctcttctaaattataagaaatgggtgtattgaaaacaaactctatgaaataatagctgaggttaaaatggaaggctca

SEQ ID NO: 559683 - DNA, 604 bp, Homo sapiens
aaatcagttttaaataatagtttacattttatgaagtatcaacatggcagagaaataagaatttccaaaaactgtggacaatgcaaaaacctaaactctttgacaatgctagaatataaacattaccatatttttctaagctatgtcaatgaattttaagcctcattttcaaactggccacgtcatttcaaaccaccaagtgtgttggttctgacttcagatatgtatttttaatatctttaaatgtattttctttaaaatgtcaatcacaagtcatatttctaaattggccctgtcattcaaaactattgctcaggctgttggctctgagttaacagaaaaagattaacaatatccatccttttagccacatccataaatatgcctaaagtgtgaaactttctgcctttcaaaacgattttatccaaggtctcaatgcttgagcaattcaaatcagttccactgtttcttttgtgcttattacaactgaaaataattgctatattacatccctgcycatatacttctttcaaactgtattactctaccaattggttttaaatagcacttaatactttcctgtatctgagcagtactacctgct

SEQ ID NO: 559684 - DNA, 599 bp, Homo sapiens
acaccatgccttttctaggaaaaatagtgaattactttgacagcaacagggtattatgaagagagaccacaaagtacatagaacgtgctcaactcttattttacrgactagcacaacatgcacacacaattaaagtagctgttggggctgacaaagtttttttttgtttttttcctacaggcaatctaacactactctcatgggatgattcttgccttccacccttgctcgcttttccagtcctgtttcgtggagttttgtgtgttttaggtaatatggatgcagcagctcttacctgcctcactgaccttcccttcagattttatccttgctgattactgttccctggtagctctgcagaatttatgagaagctaaatttcagtttctactccatgggccctggcttacagaaaagcatgcttttaaaacagcacaatacaacacagcaggtctccaccttctcataccccgaccttgaacacaagctagtgaaagcaccttttttatcttccttaagaatgccatcattacaaagctagtatctttacaaaattataatttatctaaaatacaatacaatatgacattatagatagg

SEQ ID NO: 559685 - DNA, 484 bp, Homo sapiens
ttcaccttttgactgtgacacacttttatgagaattctatgtggtttattgtatatactcagatacaatatttaaagtatgtaaccactgtggtagacagaataatggtccccaaagatatctgcatcttaatccctggaacctgtgaatatgtcaccttacttggcaagaggaactttgaagatgtgattaarttaaggattttgagatggcgagattatcctggattatctgggtgggcccagtgggatcattagggtctttctaagagggaagtgggagtgtcagagcagcagagagatttgaggatgctacattactgacttaaagaagaatgaagaggccaggagctaagggattgggcaacttttacaatctggaaaaggtaaggaaaggaattgcctctcagagcctccagaaagactagcagcagcttgattttagcttacgaagacctatttcagacttctgacctgcataactg

SEQ ID NO: 559686 - DNA, 621 bp, Homo sapiens
cccacaatccccatgtgtcatgggagggaccaggtagagataattgaatcatgggggcggttattctcaagttattctygtgatagtgagttgagttctcagcagatctgacggttttacaaggggctttcccctaggctggtcactcattcttctccctgccactatatgaagaaggatgtgtttgcttccccttccaccacgattgtaagtttcctgaggcctttctagtcatgctgaactgtgagttactttaacctcgttcctttataaattacccagtctcaggtatgtctttattaacagcatgagaatgaactaataagcctcgtttcctgttgcccctgcaggctctttgagtcctgagagctcatttatcttgttcattgttgtggcacaggagctggcacaagtacatcttcaatgaacaccaaatgatgtttgtggtcactcctcacagactcaccctcaagccctaacacaactgtcaaagcatggaattcctaatccatcttataaaccactgagacaggctgccaatcagatgctgagactgaaaaaaaggaagaaagggtgtctggttggttacattaaacatcacagctggcacttaaaggaagt

SEQ ID NO: 559687 - DNA, 593 bp, Homo sapiens
cagacatgatagatagagatattgagaaacacacatgcatgcatacacatatacgtatacatacatagatacatacaaacatgtatgataaaatgatatatagagatataaatgcttaaaagcatccattttatcttcagtattatgcttctacgtaaaaatcttcatttttaaatggtcaattcttaatcactgattaagaaatgcaattttttttttggtcatgaaatacatggcatgaagaaatgccatgcactttaggaatcattaaatatcaaaatattkggaagaaaactctgcagtgtacctggtgaacttggatttttacattgtcagagctcagagcccagcacgggggccaggaaggctatctcaggtactgtagccaagagagtagattgttagccccagaaaacaaaaataaaacaaaacttggaaaacaaaattctctaccatgtataattcatttatgtattcaataaatatttattgggtctatactatatgtacagccagtaagaatttggcattacaaagatgaataagacaaggggcttaaaatctagttgttatcaagttgtagtttacatgac

SEQ ID NO: 559688 - DNA, 513 bp, Homo sapiens
taaatataaccttacatgattgtacataggcttcatgatatactttaacgtaatagaaacttgccattttggctactatgttaacttaaagtgatgagcaattcaatctacagatattcttagtcagtttctcaatttttaaacgctcatagaaaatagctaacattatttcttagtttttcctaactttttgtttctgactattataatattaaaatttccaacatttatgaggcacagccttttcataaaaactttgttacattatgcaagaattagacaaagaagagattatgaacaagagtacttccaagtcctggatgttttatttggttgaaacctttcctggtattcatggcagccagtccacactggcatgcagacctgcagtaattagagaattaactattcaacagcaccaagcagtgtgcyggacacgctgtgagtgcccacactatagaaaaatcaccctctgaaagcttcactagttacaactggctgtttttttttcca

SEQ ID NO: 559689 - DNA, 513 bp, Homo sapiens
taaatataaccttacatgattgtacataggcttcatgatatactttaacgtaatagaaacttgccattttggctactatgttaacttaaagtgatgagcaattcaatctacagatattcttagtcagtttctcaatttttaaacgctcatagaaaatagctaacattatttcttagtttttcctaactttttgtttctgactattataatattaaaatttccaacatttatgaggcacagccttttcataaaaactttgttacattatgcaagaattagacaaagaagagattatgaacaagagtacttccaagtcctggatgttttatttggttgaaacctttcctggtattcatggcagccagtccacactggcatgcagacctgcagtaattagagaattaactattcaacagcaccaagcagtgtgctggacacgctgtgagtgcccacactatagaaaaatcaccctctraaagcttcactagttacaactggctgtttttttttcca

SEQ ID NO: 559690 - DNA, 505 bp, Homo sapiens
tgttttctactacttaggagccaacaactgagaggtgaccagaacacattattatttttttaaataagtggaggaaaatcattttcttttacagtaatagagttgaggaaagactgttccattttaggtccacacttgattttgaagagtcagaagaagacaattggggaaagttattacagttctgtatttttaaaataatggaatatattttcatcatgtatttcttaaatgatggaatcacttttgcttagcctttggtatttcatgttttatttatacattttataaatggccataaatgcaaaagcggagagaacaactgaatagtatgggctataaacccaaacttttcatttttgaggatttgaaacataatgtaaacatttgaatcaatttaaattctaaccackttcatatataattctttttttaaaataaaaacatatatgtgtagattcttagatttgtatagacagaacagaagttaaggtagggcaagaga

SEQ ID NO: 559691 - DNA, 266 bp, Homo sapiens
ttccacagcgtggaaggggacctgagcgggttgccactgctggctcaggcagcctgcttttattctcttatstggccccacccacatcctgctgattggtagagctgagtggtctgttttgacagggcactgattggtgcttttacaatccctgagctagacacaaaggtttttcatgtccccaccagattagctagatacagagctagacacaaaggttctccaaggccccaccagagtagctagatacagagtgttgatttgtc

SEQ ID NO: 559692 - DNA, 511 bp, Homo sapiens
acaaatataggtatttgtatacattctatgtatataaatacatagaatatgtatacaaatatakgtatttgtatacattctatgtatataaatacatagaatatgtatacaaatatatgtatttgtatacattctatgtatataaatacatagaatatgtatacaaatatatgtatttgtatacattctatgtatataaatacatagaatatgtatacaaatattaattggtgctatggagtatggggggcggttcatcatagaccatggtaaggatctgggatttcactctgagtcagattggagccattggagagtttagaacacagaagtaacatgatctgacttagtttccaccaggatcactctggactgttgcccatttgccccaagtatagcagaatcctttttgcttcttgggctaactgagattctgtgaattcggtctgttaaagtaagtaatttttggcaaacagatggtatagaaaaatgttaacacatgccattaaat

SEQ ID NO: 559693 - DNA, 517 bp, Homo sapiens
cctatttaatggcatgtgttaacatttttctataccatctgtttgccaaaaattacttactttaacagaccgaattcacagaatctcagttagcccaagaagcaaaaaggattctgctatacttggggcaaatgggcaacagtccagagtgatcctggtggaaactaagtcagatcatgttacttctgtgttctaaactctccaatggctccaatctgactcagagtgaaatcccagatccttaccatggtctatgatgaaccgccccccatactccatagcaccaacttaatatttgtatacatattctatgtatttatatacatagaatgtatacaatacatatatttgtatacatattctatgtatttatatacatagaatgtatacaaatacctatatttgtatacatattctatgtatttatatacatagtatgtatamaaatacatgtattgtatacatattctatgtatttatatacatagaatgtatacaatacatgtatttgtataca

SEQ ID NO: 559694 - DNA, 564 bp, Homo sapiens
aaggtaaatactttctaaactatgaatgctactgatgcatattcacttagctctctccttagatgggatccacctacttttgtgtataatatacatataaaatgtattttctctcaaaacacagttgcatataagaagctctcccacctgttctcagatccacaagatcgggtaccgtgtcttcattaactttgtatccctggtgccttatcaatctctagcatattgcagtcactcaatataaacaaggaaggtgtgttattcactcagcaaatatgtattgagtgtttactatgtgctaggcattattctaggaacagcaaatatggaaatgaatacaaaagacaaaggtgcctccctgatggagttcattttctaacttgttaggaaaccaataaatagtgtaagagctaaggggacaaaataaagcattgaaggggaatatgatgtgttggtkacagtgaaggtaaagtagaagaagaaaattgttgacaggatggtaagggagtccttactgaaaagatgacctaaaggagttagccttatagacaccaaggggagagc

SEQ ID NO: 559695 - DNA, 564 bp, Homo sapiens
aaggtaaatactttctaaactatgaatgctactgatgcatattcacttagctctctccttagatgggatccacctacttttgtgtataatatacatataaaatgtattttctctcaaaacacagttgcatataagaagctctcccacctgttctcagatccacaagatcgggtaccgtgtcttcattaactttgtatccctggtgccttatcaatctctagcatattgcagtcactcaatataaacaaggaaggtgtgttattcactcagcaaatatgtattgagtgtttactatgtgctaggcattattctaggaacagcaaatatggaaatgaatacaaaagacaaaggtgcctccctgatggagttcattttctaacttgttaggaaaccaataaatagtgtaagagctaaggggacaaaataaagcattgaaggggaatatgatgtgttggtgacagtgaaggtaaagtagaagaagaaaattgttgacaggatggtaagggagtcyttactgaaaagatgacctaaaggagttagccttatagacaccaaggggagagc

SEQ ID NO: 559696 - DNA, 497 bp, Homo sapiens
attatttaaacacatggcaattgctatatatcctgaaggagagtgtttcaactttgctaatttctgaaaaataagggtgttaacatatacaaaaaaactatgtctaaataagacttgctctgaaataagacttgcttaggctctgctctgagatttagataaacctaagtactctaccttaacattaatagataaatgaattcaactacaaccacaaaagaaagcatggttctaacattagccctcattattttgaaatatatccccaagtaagttttcttcctaacctgctccaatctagggccttgttgaattgttgcaatamacttttatttttattttatttgtgatttgtttttaatttccataggttattggggaacaggtggtgtttggttacatgagtaagttctttagtggtggtttgtgagattttggtgcactcatcacctgagcagtatacactgcacccaattcgtagtcttttatccctcacc

SEQ ID NO: 559697 - DNA, 513 bp, Homo sapiens
gtcactgtgaatggcatctaattcattcctttttaggctgagtagtattccatcgtatatatatttcacagtttctttatgcactcgttgactgatgggcatttgggctggttccacatttttgcaactgcgaattgtgctgctataaacattcatgtgcaagtatctttttcatataatgacttcaggagtagctattcttatatcagtcaatacactttcagacaatagactttctgtctagtcagaaatggtaacggcagaaagataagtgatattggaaatttggtagcaatactaagtatgatccgatcctaactacactgttttcagttgcagtrgttcaggtcaccagagaaaatgaatcctgatggctgttaaggagattatgtacctcataatccactggggattcatatccccgtggataatttgtttcattataaccaacactggcattaaccagaaaatggcttcaggtgccccagacttcatggaaacacagtgaaaagt

SEQ ID NO: 559698 - DNA, 464 bp, Homo sapiens
tgacaatggcaaactccccagttttccyaactgccccgcctacacgaagaaagacagttccttgagtgacttcgcttccactgagtttaacagacaatttgtgcctccaacctagatataaggaaacaagaaggaaagggagagaaagggttaaaaacacatgggaagtatgacttcctggatcctttaatggaaataaaattttcagggttgtatttgaacagtgctgcacatattcatgcaaaaatacaactttagtttcagtgaatttggtgaaaaactacgtttaaaaatacacattatgggtcacattttaattttccagaataaatagtttaataatattttaaaagaaaattatttatttttccaggcatttttatgacttttaaaaatggaagtcctgtgtcttcttttgcctatttcctttgtattgtgtggcatatatatagtatgtatacttt

SEQ ID NO: 559699 - DNA, 365 bp, Homo sapiens
caagaagatgtaggcttttataatcatatacaggcaaagtgagtcattcttcttctcctgcagggatatgtgctaagaatgcccagtacacgtagatacagatcaatatagtatctgtcagtagatcattcccttgcaaatggccaaatgtgactttttacatctagagctaaacagatcttttaytctgaattctgaaattactgtacgcttaataacaaactgaaaaaatgcaattcttcatatgattatttgaaaataattgaaaggggaaagaaacctaccagagaggaattttaattcatgagttaatcattgccaaagaattttctttctcttctccgcccattctactggaacctggc

SEQ ID NO: 559700 - DNA, 597 bp, Homo sapiens
tctatatttgaaaacctggtttaaatgttctgatacgtagccattttatttaatgaaagaattttcttgtcctatgtacaactccacgtgcttttcctaaagccggggaagcttttctgcctttttgtgtgtggtgaaactcttctctaawgagctggttatgggcatgtttgccccttctcgtcactcgatgaaattagacacttaggcataggtaactgtatcttgtcagcccacagaggatggaagtcccaggctgctgcagctccaactttctttttcacacaaacatgctgtctcaggtctgagtcaggtccttaagccttctttgaaaaataagattttattactcccccatttctgagagttaaatgctttttaaagagttgtgtaatttaaatatgagctgggtgtgtggtgtaggatttttaactgaaccgcaattctccaaacataccaatattccaaaattgccagttgcaggccataaaatatttacattacagagtaaataatgtatgtttagtaagaaatgataaaatatttacagtttttctaaagatactgtatggattttttcctctgccacagccattt

SEQ ID NO: 559701 - DNA, 577 bp, Homo sapiens
tggttgaaggtctagggaggcattagcaaacaattttggtatccttaccattaaattgaagggttgctaggctcagttcacgtgacgcagtcatttgccaaagctattctgtgggagcgttgtaaacctcagaggatgatggtatgaccttccaagcttctaaataaatgccttttcaaaacctcccctacacattcactgaccctgaacatgatacacagaacaaaatcacagtgtcactaaatcatcactgcacctgtttgggaaggagcctgaaaaagctcttaacaaaggttttcaacagaatctcctgggagagtcttaaacagagattcccasgtcccccatcctcctaagaaattctgataggacgcatctagtgcggggctgggtaatctatttttgaaaagctttccaagtggtgatcatccaagtttgggaactgttgtaggttgaacaatggtctccaaagatacctgtgttctaaatcctggaacctgtgaatggcaaaataccttacatggcaaaaaggaggttgcagatgtgattacacgaagaatcttgggatggaggggtt

SEQ ID NO: 559702 - DNA, 394 bp, Homo sapiens
tcaggtttttctcagaatacacattgtctttttcttaagtttttagcagtttgaatacagtatgccyagtgtctggatgtgataaattcaagaaaaacatttttttttcaggttgcctaaaattttgttgtttttataaaggtgagagaaatgttctttctagctttatgaattctaagctaaagctataagttcatcattacctaacaagtgtattttagatttcagacatgctatttttcaggtgttgattttccatttggtaaacacgcacatacagacacatctatttctctgatcgtgttccctatctttttattcattggtatattttcttcacctccctgagcaaaattagaattttaaaaaataatgaaaacatcagagtcatctt

SEQ ID NO: 559703 - DNA, 394 bp, Homo sapiens
tcaggtttttctcagaatacacattgtctttttcttaagtttttagcagtttgaatacagtatgcctagtgtctggatgtgataaattcaagaaaaacatttttttttcaggttgcctaaaattttgttgtttttataaaggtgagagaaatgttctttctagctttatgaattctaagctaaagctataagttcatcattacctaacaagtgtattttaratttcagacatgctatttttcaggtgttgattttccatttggtaaacacgcacatacagacacatctatttctctgatcgtgttccctatctttttattcattggtatattttcttcacctccctgagcaaaattagaattttaaaaaataatgaaaacatcagagtcatctt

SEQ ID NO: 559704 - DNA, 519 bp, Homo sapiens
aaatctttgccagggcttgtatccagaatggtattttctagattatcttccagggtttttatagttttaggttttacatttaaatctttaatcgatcttgagttgatttttgtatatgctgtaagaaaggggtccagttttattcctctgcatatggctagccagttatcccagcactattagttgaatagggagtacgttccctatagcttgtttttgttgactttgtcaaaaatcagytgtaggtgtgcagctttatttctgggctctctattttgttggtctacgttggcaccctttttgaagatcatttgatcataaacataagcgtttatttctgagttctatttaagtctattgggttatatgtctgtctttacaccagtacaatactgtttttattactgtcactttgtaacatgttttgaaatcaggaagtgtgaagcctctagctttgttctttctcaggattgttttagctattcataatcttttgagattccatacacaatttaggat

SEQ ID NO: 559705 - DNA, 492 bp, Homo sapiens
ataatacattctggtgaccattcctttggggtttggaatgaactgacttgggtaaaatattggtaattgtccccatttttgtgctagagaagagaaaagctaatctgctgtggcagttagcagagcttttaactctaaattcagaatcttttttgggcttgtatgttcaattgtccaatattgaaaatgactaaggcttgcatttgtagcattgtgacatatttagacagaaatatgtctcattagccagtattttgttgcagatgcctttcccctggtctccccctgagggtgccagataatgactattgtcagaggatgtcccgtcacgacatttgatacccacagtcattcacatggaagargcttttagctcagaattttatatggagggcaaatgtattcactaaagctcagatattagcttccagcatctctttgtgaaaaacagatgaaaaaagccatagttcctggtgccttagggaaattcct

SEQ ID NO: 559706 - DNA, 578 bp, Homo sapiens
aaaaaataaatgatgacaatgaacagctttagaaagttagattaaataactgtcattggaatttgactactttgaaacttttattcttactccaaaaggttaggatgaaaatttcacattcctgatggaagatgtcacctagaatgcctatgtttttaacagtcatctaacagtaggaacagagtcaactgaactcagagaaaccctgtttcctctcatcttcaccttcttagcatatgtcattaaagcaaagataccacatgttttagaatcagatcattcttccccagagcctggctaatatgacttaaattagcagatgtgtagactctgcctgtcaagttttttctctttttttttttttttttccaggcagagttttgctcttgttgcccaggccgagtgcaagggcrcgatcttggctcactgcaacctccacctcctgggttcaagcgattctcctgtctcagcccctggagattacaggcacgcgccaccatgcctggataatttttatatttttagtagagacgtggattccccatgttggccaggctagtcttgaaatcctgacctcg

SEQ ID NO: 559707 - DNA, 234 bp, Homo sapiens
actgggtactgggctgtgctgggtgctsgggcgagagcagtgagctaaacagacttagccttgccagtacaggactcagggtctgggagggcagatcaggagacagacatgcacaaactttagacacaccgaaacacatatggcaacaaaggaaatgtctgaggtgacagtgaaggctgaccttgcagaaagtgacctgtgagtctgggggactcaggaaggcctccacacgat

SEQ ID NO: 559708 - DNA, 570 bp, Homo sapiens
aattgaaacaaaaaaaaaaaaagaaagataaataaaacaaaaagatggttctttgaaaagataaacaaaattggtagactattggcaagattaaccaagaaaacaagggagaaaatctaaataacctcacwaagaaatgaaacaagagatattacaactgacaccactgaaatacaaaagatcattcaaggctactatgaacacctttatgcacataaactagaaaacctagaagatatggataaattcctggaaaaatataactctcctagcttaaatcaggaagaattaaataccctgaacagatcaatagcaagcagcgagattgaaacggtaatttaaaaattaccaagaaaaatgcccaggaccagatggattcacagcagaattatatcagacattcaaagaagaattggtaccaattcttttgacactaaggaaacctccctaattcatcctatgaagccagcatcaccctaataccaaaaccatgaaagaacataacctaaaaagaaaactgcagaccaatatcactgatgaacacagatgctgaaatccttaacaaaatac

SEQ ID NO: 559709 - DNA, 570 bp, Homo sapiens
aattgaaacaaaaaaaaaaaaagaaagataaataaaacaaaaagatggttctttgaaaagataaacaaaattggtagactattggcaagattaaccaagaaaacaagggagaaaatctaaataacctcactaagaaatgaaacaagagatattamaactgacaccactgaaatacaaaagatcattcaaggctactatgaacacctttatgcacataaactagaaaacctagaagatatggataaattcctggaaaaatataactctcctagcttaaatcaggaagaattaaataccctgaacagatcaatagcaagcagcgagattgaaacggtaatttaaaaattaccaagaaaaatgcccaggaccagatggattcacagcagaattatatcagacattcaaagaagaattggtaccaattcttttgacactaaggaaacctccctaattcatcctatgaagccagcatcaccctaataccaaaaccatgaaagaacataacctaaaaagaaaactgcagaccaatatcactgatgaacacagatgctgaaatccttaacaaaatac

SEQ ID NO: 559710 - DNA, 562 bp, Homo sapiens
tgacacaaacaaatggaaacatgtcccatgctcatggatgagtaaaatcagtattgtgaaaaataaccatactgccaaaagcaatctataaattcaatgcaatttccatcaaaataccaccatcattcttcacagaattagaaaaaacaattctaaaattcatatggaaccaaaaaagaacctgcatagccaaagcaagamtaagcaaaaagatcaaatctggaggcatcacactacctgatttcaaattataccataagcccacagtcaccaaaacagcatggtactggtacaaaaataggcacatagaccaatggaacagaatagagaacacagaaataaactcaaatacttacagccaactgatctttgataaagcaaatgaaaacataaagtgggaaaaggacacccttttcaacaaatggtgctgggataattgaatagccacaagtaggagaatgaaactggatcgtcatctctcaccttatacaaaaatcaactgaagatggattaaggacttaaacctaagacctgaaactataaaaattctagaagataacat

SEQ ID NO: 559711 - DNA, 664 bp, Homo sapiens
cattttataaatatttgtcacaaattatttgtccacccatcagaggatgaacatatggaaataactttgtattccaagaaatggcattgcagggttatagggtataaatagtctcagcttcattaactttatatgttggcaaatagttccccaaagaaatgtatcaattcttccccgaagaattgtatcatttcataccatcaacatgtaaaatatcttatttcttcaaattctaagtcttttaaatatttctgcctatcatacaagtgtgaaatgtttttggttgcagtattcatgatcacttttaagactactggtgagattgaacacatttcatttgtgctttttctgttcaartttcttgtatgtgtttcatataacaatgtttcaaatgtattactacttatttattggcatttagaaaacatatgtgcatgtgggatacacacacacaggtgtataggagaattagatccacgaaaatcaggtgttacaaagagttaggtacaaaactatgaagaaagtagagaaggattgacctgatacaataggcttgtggagaggcgactggttgataaaacctggggaacagtgatctaaataacagataaagaacaaacaactagacgtcactcttatttaagccagagaaagaaagtaaaaa

SEQ ID NO: 559712 - DNA, 533 bp, Homo sapiens
catggtggcaggtgcctgtaatcccagcgactcaggaggctgaggcagtagaatcccttgcacctgggaggtagaggttacagtgaagcaagattgcaccattgcactccagtctgggtgacaagagtgaaactccatctcaaaaataaaaggaaaaatccagaaatgcaaaccaagaaattatagcgtcttaagaaatattgtgttgtatgtatcgaaagccaccatggaaacatagaagaagggtgatattttgaattatctgtcttgttttctatagcgcttatatttgaggtcacccctgccccagaaatagacaaagaagtactacaaaactaactccttttaacaacttttgaaatcataaaaatcagatwggcgaagtgcgataatatattcattgaagcatatatgtgattaaatccatagaattttagtgctggaaggaactttaaagttcatttattaacattctaatcttattaagttcagagactttgacttcaccaagattccacatctagttgttagtg

SEQ ID NO: 559713 - DNA, 520 bp, Homo sapiens
cattctggggtctgaaggatggtggccctcttctcatagctccactaggcagtgccctacctttccctttcaccccacatttccctttcacattgccctagcagaggttctccatgaggggcccacccctccagcaagcttctacctggacatccaggcatttccatacattttctgaaatctaagtggaggttcccaaacctcaastcttgacttctctgcacccacaggaccaatatcatgtgtaagccaccaagacttggggcttgcaccctctgaataaatggcttgagctgtacattggctcattgtagccacagctggagctaaaacagttgggatgcagggcaccatgtttggaggctgcatagagtaggggggcttaagcctggccggagaaaccattcttccctcctaggcctccagccctgtgataggaagggctgccatgaaggtctctgacatgccctggagacattttgcccattgtcttggcaattaacatttggctcgttgttac

SEQ ID NO: 559714 - DNA, 598 bp, Homo sapiens
tgtctgcagcttttccaggcacatggtgaaagctgtcagtggatctaccattctggggtctgaaggatggtggccctcttctcatagctccactaggcagtgccctacctttccctttcaccccacatttccctttcacattgccctagcagaggttctccatgaggggcccacccctccagcaagcttctacctggacatccaggcatttccatacattttctgaaatctaagtggaggttcccaaacctcaactcttgacttctctgcacccacaggaccaatatcatgtgtaagccaccaagacttggggcttgcaccctctgaataaatggcttgagctgtacattggctcaytgtagccacagctggagctaaaacagttgggatgcagggcaccatgtttggaggctgcatagagtaggggggcttaagcctggccggagaaaccattcttccctcctaggcctccagccctgtgataggaagggctgccatgaaggtctctgacatgccctggagacattttgcccattgtcttggcaattaacatttggctcgttgttacttatgcaaatttccgcagccagcttgaatt

SEQ ID NO: 559715 - DNA, 555 bp, Homo sapiens
ggcacagtggctcatgcctgtaatgccagtactttgggagggccgaggtgggtgaattgcttgagcccacgagtttgagaccagcctggacaacatgacgaaaccgcatctctacaaaaaattaaccaggggtagtggcacatgcctgcaatcccagctactggagaggctgaggtgggatgatcccttgaagctggaaggtagaggctgcagtgagccgtgattgcaccactgcactccagcctgggcgacagagtgagaacttgtctcaaaaaaacaaaagtacaaaaaacttgtgctctagtcattatgaaatggcatctataattgtgtttttgatttgcatttcccttctgactaatgatgtggagtatcttttttgtgtgctcattggccactatttgtacatcttctttggaaaaatatctaatcatgctttttgctcatttttaaattggattttttgtcttttttgttgttaagttrtatgagttctttttatattctggataagacttttgtgtttgtttgagacagaggctcgttctgttgccc

SEQ ID NO: 559716 - DNA, 416 bp, Homo sapiens
ttgagctcaggagttcaagaccagcctgggcaacatggtgaagccccatctctgcaaaaatacaaaaattagctgggcgtggtggtgtgcgccagtattcccagctacttgagaggctaaggtgagaggcccagctacgcctgaacctgggaggtcatggctacagctgagattgcaccactgcattccagcctgggtgacagagtgagaccctatctcacaaaaaaaccccaaaaacaaaaacccgattccattgcctcttggctgctasctgtggtcaagacatcacacatttctggtagcaaagggataggtccaaccctgatcccctcccttctaccatcttggaagtgtttgagagtgaggaacagtgctgtgtaggggaaagcgggtgatactgaaagcagggaggcttg

SEQ ID NO: 559717 - DNA, 561 bp, Homo sapiens
ctttgatcctggtgaaaagggatctgaaaggagaataaattgtggagcagaagtgatgaataacacagtttatatgaattggacagagagagaactgtcactcgataatctacaaattggaaaaactaacttccaattatgtacttagtgaaatgtactctcgtgcaagagccagtgagtattagaaatttttccttttatctccttaggaaacagataagaatatagagattcccaagtgagactgcaactgtgttaaaatatatcagtaagaaattgaagaaacgaaagcaatgacagaaaactagagatgggcaaatatctacatgtttaaaataagtaagaagataaattttggaaaatgtcagaatagttactaataatccctgataatcatatagtggtaattattttttaatcatattctttgaataaatatttatgcagtaattgctaaatattagatgaaaatttgaaaaattaaagattaataaggtacagattctgctcataaagagcatstagacaaatagaggagataccatataggcataattttat

SEQ ID NO: 559718 - DNA, 570 bp, Homo sapiens
gcacagtggttcacgcctataatcccagcactttggaaggccgaggcaggcggatcatgaggtcaggagtttgagaccagcctggccaacatggtgaaaccccgtctctactaagaatacaaaaattagccaggcatggtggcaggcacctgtagtcccagctactcgggaggctgaggcaggagaatcgcttgaaccygggaggcagagactgcagtaagctaagattgcaccactgcactccagcctgggcaacagagaaagactccatctcaaaaaaaaaaaaaaaaaagaaagaaaaaaaaaaaagaaaattaaattcagtaactttaaaaaacaaatttttgttacaaattaaagaaaataattgacttccctatttattttgactcaaaactggacaaccactggcatttgactgctataatgatttaaaaattaataagctgattcctgctcagaaaatgcttcttctaatgcagttctagctacagtgtggaatatctgtctcctttaggtacaccttggatgatctggactctaaaaatccaagttacacccaagattcca

SEQ ID NO: 559719 - DNA, 621 bp, Homo sapiens
aagggaatcaacaaattatgactgtatgcgttttgcatttgcttgtrtgacttttccctgactattgtttgtccaggtagaggaagaattgcctccagaaaattaaaatggaggcagtctgacatatagtaagtgagtagtttgcaaatattttccttgattctgtgggtatcttttcacttcattgattgcttcctttcctgcgcagaagtttttcaacctgatgtggtccatttttgctatgaattttctgtgttagttaggtatttcaacctgatgtggtccatttttgctatggttgtctgtgttagttaggtattactcaagaaatctttgccagtccaatgttcaagagagtttcaacacagttttcttgtagtagtttcattgtttgaggtcttagatttaagtcttcaatccattttgagttgatttttatgtatggtgagagataggattgtggtttcatttttctgtatatggatatccagttttcccagcatcatttattgaagactgtccttttcccagtgtatgttcttggcaccttcaccaaaaatgggttcactgtggacatatggatttatttctgggttctctattctgttccactgattcatg

SEQ ID NO: 559720 - DNA, 519 bp, Homo sapiens
ttttcacattgattcttccaatccatgaacataaaatgcctttccattttttagtgtcctatttaatttcttgcaccaatgttttatagtttttattgtagagatctttcacttctttggctaagttaatacctaggtatttaatttgtaactaaggtaaattgaattactttcttgatttgtttttcagattgttcactatgggtatacaaaatgctactgatttttctgtgttgatttcctttcctgcaactttactgaatttgtttatcagttcaaatagctttttggtggagtctttaggtttttccaaatataagatcagattatgtgcaaacaaggataatttggcctcttkttttccaacttggatgccctttatgtctctcttgtttaattgcttcaggaggacttacattactgtgttgaataaaacttgtgaaagtgggcatccttgttgtgttcccaatcttggaggaaagggttttggttttccctcatttagtttaatactagctg

SEQ ID NO: 559721 - DNA, 285 bp, Homo sapiens
aaagaaagagtttcaggtttttccagtttcaaaaagtaaagcagcttctaaaatacagacatttgtgttaatattggctgtctattatagcctaacactatttcattatttagtctatgtctctgctttacacamaataacaaaaacaaaaatgaaatcttctccaaagagagatggagaggaacaatcctgtattaccacagaacacaaagaaaaatatcaaagaaaattgtatcctttctttttctctcttcaaaatatagagctcacaattattctattgta

SEQ ID NO: 559722 - DNA, 608 bp, Homo sapiens
gactgcactccagcctggatgatagagtgagattccatctccaaaaaaacccaaaaacaaaacaaaacaaaacaaactgaccttgtggaaagacacaaatatgtatggacctggttatgtctgaccttgtgccactcatgacagaagtctttatattaaataattttttgatatcaaactatcatcaggtctttgaagaaaaaagaacatggtgcccagtcagagaataacaaggtagaaatcacttagagtgtggttgtggccaggaaaggcctcttcgaggaatcattgaggttgagagctgaaggctacattggagttagctgagggaaaatatgggtggaaggtggatggagaagcatcccaagcataagaaccagcatgtgtaaagatcatgaggtagccaggagtttgatccatccakcctgaataaccaaaagtaagtgagtgtggatgaagcacataagtcagtgataaaatgaggtagggttggcatagagactaggattgctagccttggcaaagagtttcggtttcatcccaagaggacaggggagcctttggaaggtttttaagcagggggagtaatgcgatctgatttatttgat

SEQ ID NO: 559723 - DNA, 508 bp, Homo sapiens
gctggaaataaaataaactatttcatatgatttcaggcatagtgaaccaatggttaaaaaaaaaatggaatagagatggcccccgagtgaggaaaaagttgcctggaaaataacctgaggaaattttytggggataatgggaaacttctgttcttaaaggatgaagttcatatgaatgtatttatctgtcaaaactgtacagctaagatttgagctttcattgtatgtacatcagaccacaccaaaaaaaaaaaaaaaaaaaaagaacttacaaaaaaaaaaaaacctgtgtgtaggtggggaatggcatatgattaggtgttgttgaggctgggtgagaagtctattgtactgttttgtttattatgtttgtttttttaacatttgtcttaggttcagggttagttcaggttcaggtgcaggtttgttatgtagctaaagtcatgtcacaggggtttgctgtacagattattttgtcacccaggtactaagcatagtacccaatagt

SEQ ID NO: 559724 - DNA, 567 bp, Homo sapiens
ttcttactaataatatatttcttttttwtttttttttttttgagactgagtctcgctctatcgcccaggctggagttcagtggcacgatctcagctcactgcaacctccgtctcccaggttcaagtgcttctccgcctcagcctccccggtagctgggattacaagcacccgccaccacacctggctaatttttgtatttttagtacagatggggtttcatcatgttggccaggctggtcttgaactcctaaccccaagtgatctgcccgcctcagcctcccaaagtgctgggattacaggcatgagccaccgtgcctggctaataacacctgtttcttaccaaaggaaaaagaatgtgcagagcctggaagtatcaaaggcaaaatttgtttcctgctgaggaatatgtattcccccctcctgatacttttaaaactagaagagatcatcagtgaaggacagctcaggaggggaaatagttagatttccacctgatctgcttctcttctgatttcattccctctaggtcactaaccaaagcctttcattgaaacaggcaccaggaa

SEQ ID NO: 559725 - DNA, 576 bp, Homo sapiens
tattttaatgattaaaaatacatgttatattctataatatgtatataccataatttttaactaatatcctattactaggcatttaggttgtttccaggttttgttaccataaattatcttatagtgaaagaaggtacagataagtgtacattttcatttcttctctcatttttttctcttctgatataatagaaatctcagaataaaatgtccaggacttgtatatgakagaattaaaatataggtgactttctctttccatgtttaactgcatttatccctataaacaggaaaaatattattcatccattcattgaaaaaaaatattcaattcttgttatgttacagccactcttgtaggcacttagataaaacctcaaaggaagacagacaaaaattattgtagttatcgaggtcttttctttttgaagactcttgcctcacatagtattctaattgttaaatcatgctatgtatttttgacaggagattgtatgattccattgcattgtgttggaacgggaagcaggcactgaggagatcttttggtgacagattaccaaaaccttgagaaag

SEQ ID NO: 559726 - DNA, 396 bp, Homo sapiens
ttttacttaattaccatatacactgcctcttattatgctattaccarcatcatcattatctcattagcaactccatgatggtttctctattctgctagatacggagatcattccacaaattatcagtgtctgttacattaaaaaaaaaaacaacctgctaagttcttgaatacagaaaattggaaagtaggaataaaaacgttttaataagtggctgaacatggattcaaagagttcataatgtagtaagattgttaccctgtagaaaagtaatttgaatgtatttatttttaagaagtcaattttagtgcagagaaaaaacaaaaataaaatgaaaacattttctgtagcatatgactagcctaataaactaaggtagaacacttaacattattt

SEQ ID NO: 559727 - DNA, 663 bp, Homo sapiens
taataatcatcagggaaatgcaaatcaaaaccaaaatgagatatcatctcattccatttagaatggctattatcaaaaagacaaaagttaataaatgctggcaaggatgtggagaaaagagaatccttacacagtttggtaggaatgtaagtgagtacagacattatggaaaaccatatagaggtttctcaagaaattaaaaatagaactaccatacaaaaacactgttctaattaaaagtgaaaaagctcaatatcactgatcattaaagaaatgtaagtcaaaaccacaatgagataccatcttacacctgtcaaaatggctattaaaattgaggaggagggactcctccctaactcatactatgagtacagcatcaccttgattccaaaacctagcagagatacaacaacaataacaaaaaaatttcaggccagtaaccttgatgaacatcaatgcaaaaattctcaacaaactactggcaaactgaatccagcaccacatcataaagtttatccaccatgatcaaayaggctttatccctgtgatgcaaggttggtccaacatatgcaaatcaataaatgtgattcatcacaaaaacagaactaaagacaaaccacatgcttacctcatagatgcagaaaaggctctcaataaaattca

SEQ ID NO: 559728 - DNA, 549 bp, Homo sapiens
tttgtggggagtgtgtgtgtgtgtgtgtgtgtgtgtgtgtgtgtgtaggcgcacatgtgtgcatgggtggtgtatggcccacagctaagattggattttatacttcatatttttttgatggtgagaaaaaaatcacaagaaggatattatttggtgacatgtaaaatttatatgaaattcacatttcaatgttcataaataaaatattattggaacacaagcacatctattttgttttcgcatattatctatagctgcttcctcaaaacaacagtaaaatggattagttgtgacaggtatcatatggcctacaaaacctaaaatatttactatctgattctttaccgaaagtatttgttgaccccggtataaacaatttctattttggtagcctaactatttgsttattgataaacatctttctatgtcaataaatatcatctccaaaatcatctttcttagtctttcattaaaaatggtacttttagctgggcaggtggctcatgcctgtaatcccagcacttttggaggcgaggcgggcaaatcact

SEQ ID NO: 559729 - DNA, 615 bp, Homo sapiens
tactttatttgtgtgtatttatttatattgatttaattctcacaacaaatttatgctctaggtcctagtatttgccctcattttacagaggaggaaacagaggcactagaagattaactaccttgcctgatgtcatacagctagtgagtgataggactgggatttgaaccaaggcagtgtggcttgaraatccatgctcataatcatgatttttgctgcctcaaaatattgcttgtgatttgctccctccctatcactatatcaagaccatcttcccaactgttatatattcttctccaacatcatttgtaaagtctatagagtgtttcagtacatagatactctaatttttcaatttttataattttaatttaagttttttggagatagagtctcactctttcaactgggctggagtgaagtggtatgatcagagctctctccagccccaaactcttgggctcaagccattctctcacctcagcctcctgagtagctaggactgcaggtgcacaccaccatggcctggctaatttttaaaattttttattttggagacaggatcttgctatgttgtccaggctggtttcaaattcctggcctcaagtggtcctt

SEQ ID NO: 559730 - DNA, 577 bp, Homo sapiens
ggtctttaattccctcttgcaatgtatagtatttaactgttgctatacagtgggatcacatatttgttataaaaataaagtgctaaaaatcacaagcctttggtctttgtgctctttaatgtttcaattgagttctttgcatttgtcagcctgtcttatttattcttcattgtcagaatgatgaggaatcaaacctcacagagggtaactaactttcccaagaacacacagctctatctaagacagtgactactagcctcaagtgatattagcctcaagtgactatttgaattcaaatctgaattacttaagattatataaaattagtcataatgagtagactattcagacttgttctttgatgaagaggtttttgtttgactctatgatctatctggtgagccagaatacatgctaactgaataggggagaggatttttaaaatttttcatcttccatacttctgagcaaaatatttgttaaaccctgtaaagggacagagggcagcagatagatgagcaactgaygtggaaggtaattcccccaaaaaaatatgtaaatgatcaataaatagatg

SEQ ID NO: 559731 - DNA, 577 bp, Homo sapiens
ggtctttaattccctcttgcaatgtatagtatttaactgttgctatacagtgggatcacatatttgttataaaaataaagtgctaaaaatcacaagcctttggtctttgtgctctttaatgtttcaattgagttctttgcatttgtcagcctgtcttatttattcttcattgtcagaatgatgaggaatcaaacctcacagagggtaactaactttcccaagaacacacagctctatctaagacagtgactactagcctcaagtgatattagcctcaagtgactatttgaattcaaatctgaattacttaagattatataaaattagtcataatgagtagactattcagacttgttctttgatgaagaggtttttgtttgactctatgatctatctggtgagccagaatacatgctaactgaataggggagaggatttttaaaatttttcatcttccatacttctgagcaaaatatttgttaaaccctgtaaagggacagagggcagcagatagatgagcaactgacgtggaaggtaattccccmaaaaaaatatgtaaatgatcaataaatagatg

SEQ ID NO: 559732 - DNA, 433 bp, Homo sapiens
ctttaaaacagtttgtagatgggattagatattgattcatatattaagattcatgttattttgtttgggagcaggactaaaatacctgacttatttattargctctttgaatacagccaataaagaaaggaagaaaagctcttgctatgtacctgctatggtttgaatgtgtccccccaaggcacatgttggaaacttaatccttggtgcaacagtgttggaagtgacctaatgagaagtgttcagatagtgagggctccacccctttgaatggattcatgccaattataaaagggcttgaaactgtgagttcaatctcttggtttcttgtacataccctcttgccaagtggtgccttctgccatgttataacacagcaagaaggccctcaccagatgcactccctcaatcttagacttcccagcctccagca

SEQ ID NO: 559733 - DNA, 607 bp, Homo sapiens
gttttacagttaacctttttttcagagacagggtctctcactttgttgcccaggctgtagtgcagtggcataatcatagttcactgcagcctcaaactcctgaactcaagtgatcctaagtaggtaagactacaggctcatgtcactgcaacyggctaattaaattttttttttttaatagagaaggggtcttactatgttgccaaagctggtctcgaactcctggccttaagcaatcctcccacctcagcctctcccaaagtgccaccatgcctggccctatagttaatttttttcataagtagaagtacattctaaaatgataaaaagtacaacataataaatatataaaccagtagtgtagtcatttaccatcgttatcaagtattatgatgttataattatatgtgctatacttttatacaactggcagtgcagtagttttgttcacaccaatgtcaccacaaacacatgaggaatgtattgggctatgacagctacaacgtcaccaggtgataggattttttcagctcctatacagtcctgtgggaccaccatcatatatatcatctgtcattgactgaaatgtcatcaagcagcacattac

SEQ ID NO: 559734 - DNA, 570 bp, Homo sapiens
tggatgaagctggaaaccatcattctcagcaaactatcataargacagaaaaccaaacaccacatgttctcactcatagatgggaattgaacaatgagatcacttggccacagagtggggaacatcacacaccagggcctgtcagtgggtgggggcctaggggagggatagcattaggagaaatacctaatgtaaatgatgagttgatgggtgcagcaaaccaacatggcacatgtatacctatgcatcaaacctgcacgttgtgcacatgtaccctagaacttaaagtataataaaatatatatatatatataaaagactcacaccaagacacattatagtcaaactgtcaaaagtcacagaaaaagggagaatcttgaaagcagtaagagaaaagcaactcatcacattaagctcctataagattttcagtagattacttggcagaaactttgcaggcaagaagtgaatggaatgacatgttcaaaatactgaaattaaaaaaaaaaaaaaacctacaagacaaaaatactacatccagcaaaactatccttcaaaaatgaaagagaa

SEQ ID NO: 559735 - DNA, 570 bp, Homo sapiens
tggatgaagctggaaaccatcattctcagcaaactatcataaagacagaaaaccaaacaccacatgttctcactcatagatgggaattgaacaatgagatcacttggycacagagtggggaacatcacacaccagggcctgtcagtgggtgggggcctaggggagggatagcattaggagaaatacctaatgtaaatgatgagttgatgggtgcagcaaaccaacatggcacatgtatacctatgcatcaaacctgcacgttgtgcacatgtaccctagaacttaaagtataataaaatatatatatatatataaaagactcacaccaagacacattatagtcaaactgtcaaaagtcacagaaaaagggagaatcttgaaagcagtaagagaaaagcaactcatcacattaagctcctataagattttcagtagattacttggcagaaactttgcaggcaagaagtgaatggaatgacatgttcaaaatactgaaattaaaaaaaaaaaaaaacctacaagacaaaaatactacatccagcaaaactatccttcaaaaatgaaagagaa

SEQ ID NO: 559736 - DNA, 214 bp, Homo sapiens
ttttttttccctcaatattttctggagatgcattcagattgttgattgtatcaatagctcattcctttttaattgctgaatagtattccatggtatggacgtaccacagtttgatgtgctgttcacacrtctaagaacatctgggttgtttccagttttttggtaattatgaataatgctgctataaacattgtgtacaggtttgtatataggt

SEQ ID NO: 559737 - DNA, 608 bp, Homo sapiens
aattactatatatcaataaaactataataaayggaaggaaaaaaagaatcactcaagatatgtagaatactattgagaaggactcatttcaaaggtcatttctgagctttaggataactctagacactgtcccccaccccacttttctgtgatacacacatcaggaaacactactttaaatgcattatcatggttcacccaggttgccaagtgaagcgctcctggagacagtcagccaggtgccaattatgaagttggcaccttcctgattatcccacatcctgataaggaagacagatgctgccacttcctgaaacccctggctgtacccacctgggcctcctgacaaccaccaactatcactgaagtgctgttcatgggggccaggttacttccagacaatttaagatatttacattgccctctgctttctccgagctcttaatttataactcctttctgtttgtgtataaacccttttagtcctttgcccatattaatccttcttggtatcatttggaaagagatgatattggtttgattctctctggctctccccacctcccaaactggtagggaaaaaaatgaagacacatttgggtatgatg

SEQ ID NO: 559738 - DNA, 612 bp, Homo sapiens
ggtggccagtgcctgtagtcccagctacttgggaggctgagggagaagaatcgcttgaacccgggaggtggaggttgcagcgagcagagatcatgccactgcactccagcctgggtgacagagggagactctgtctcaaaaaaaaaaaattatattatataattataattattgctaacatttattgagcactacttcctatgcactaggcattgttataggcattttaagatacattatttaatcctcacaataacccaatgaagtaggtactttcatctctgtttttaaagatgagaggaatccgatgcttagagaagaccagtgacttgctccaggtgtcactactagcatctggcagacccgggactggaacccaaggccatctgtgtacaaagtttgtagttctgttgcctgccctctcccctccatcccctctaaccctgctctgatccattgccttttaaattgactatattttcaataacaacataaacaccttgagagccagggttgtgacttgtcactcaataaatattygccggatggattactgactcttctgatgttgtttagaaagacaaaatcagaatctgtttagaagcaatgagg

SEQ ID NO: 559739 - DNA, 581 bp, Homo sapiens
ttggccaggctggtctcgaactccagacctcaggtgatccgcccaccttggcctcccaaagtgctgggattataggcatgagtcaccrcacccagccttataatattctcttacatccattttttttttctgtaaactcagtaataatgttagtatacaaccccccactttatttttgtctctctcatcattagagaggttttccttgatttttactaaaatctggatccaagaacctttctgacatttggtcctggttctcagactttattattttttggtcagtttaagacaaaaacacattgctgatagtgatgataataatgacagcaataacagctcccatttactaaatgctttccacatgccaggcattatatgtgaaatagcttcctatatcatctcactcaactcttaaccccatgagttaggtattatcatcttatcctatcaattttcagaaaactaaaacacaaagcagttaagtcattcatcaagttagagtatccaggaaaatcaaagaaagatttaattttgattaggattagtccaaggcttataagtccacagaattcaccaag

SEQ ID NO: 559740 - DNA, 586 bp, Homo sapiens
agatagaaataagtgtaaattatgactggtgtaatggaggaaaataatagaagcatgcctaatttaacctaaggccccaatggccttgttttgagcaaaatctgaaagcgttaagcaagttggattggcgaagagctggtggaaaggtggtttcaggcagagggaactgcacgagttgagttcccagggcagaaagagctcaatatgctctaagaactgagaggagctcaggtggtggccttgtcacagagggagggcagagggctgggatgagactggaagggttttcagggtctggccccacaggccttgtcaaggggttgggctttgccctaagaacaagaagaaactagtggctaactgggcaatrgcatggttggactcacttttgccagactggatgccgtgtgaggagtacattggtacagacaaggttagaggccaagagattacataaggccagtagccatcatccaggcaagaaatgacagtgactcagagggacatccacaagggttgggattgattagatgcaggtgacgagtgtgagtgaggagtcagccatgactcccaggaccctggcatg

SEQ ID NO: 559741 - DNA, 491 bp, Homo sapiens
tttcctcttaaggccttttaactagttgawtcagacccacccagattatctaggataatctcccttacttaaagtcgaatatggacattaatcacatctataaaatactttcacagcaacacctagataacacattgattgaataactggaggctgtagcctagccacattgacatatcccaacaccatcacagacattaaacaaagtctaaagtctttgcttcaaaactgggaggcaacagagagaatgcaaattacatttagcttcagaatcaggttgaccgttcaccttctgtaacttctagctaagtgagcccagtgtggcagaaactggctggctcttcagcaaaattgtctccttttcttcctgggcacacagcaaggctacctttcccagcatcccttgcagttagatttggccatgtgactgagttctagccaatgacacatgagaaaggggtgtgccagtttcagattggtccatgaaacct

SEQ ID NO: 559742 - DNA, 231 bp, Homo sapiens
caattatagcttgctgcagcctcgaactcctgggctcaagcaatcctgcctcagcttcctgagcagctacaactacaggcacacaccacacctgactctcccttcctttctccttctatttattcatgcttgtrctttagaccagcctttcacatggtgaattctgtaatgggtgtgccacacagtgccagggtcaaacaaacctgagattaaagtaaaactaaacatttt

SEQ ID NO: 559743 - DNA, 442 bp, Homo sapiens
acccaaaatatcgggagatattttacatcctttttattagtactaatttttcaaaaccattgtgtgctcatcacttacagcacacctgaattcaaactagccacatttccaatgttcaatagacacaagtggctagggactaccatattggacagtgcatatatagatccttgcagacattcataaagactttggcttttattccgagtgacaatgaagctgttgtgtagagtagtgatctggtttttatttattgtttacaaagatcattctagctcctatggggagaaaayaaactgcagtgggacaagggtagaattagagaaaacatttaaatctttattgaagtgacctcatcacttgagaatagaagggaaaaaacaagcctcttttttttttcttcctgcacagtgtctgcccctttccttatttgtaataagta

SEQ ID NO: 559744 - DNA, 520 bp, Homo sapiens
acatatcaattttggactattctttgaaaagattttgggtattctctacatttctaatacttttattttttgtgagtacatagtaggcatatatatatatatatatatatatatatatatatgttacacgagatattttgatacaggcatgtaatgtgtaataaacacatcagggtaaatggggtatccatcaccttaagcatctgtcttttgtgttacaaacaattaaattatactcctagttatttttaaatgtacaattacttttttttttactattgtcaccctttgatactagcaaatactrggtcttattcattctttctaattattttttgtacccattaaccatccaccccacaccccactactcttcccagcctctggtaaccatccttctgctctctatcttgatgaattcaattattttcatttttagctccctcaaataaatgagaacatgtgaagtttgtttttctgtgcctggcttgtttcacttaacatgatgacctccaattcc

SEQ ID NO: 559745 - DNA, 513 bp, Homo sapiens
ttcaactaaaaattaatacttaaaaagtcataaatcgagtaacttagaatgttataatgtttcctgaaagctacttttctacttttaaaaatataactctctaattcctgaaagctacttttctacttttaaaaatataactctctaattcctgaataatcttgggaaaaatcataatattctaacatgtccagaattttagacagttttgatagagatagaatacaaacatgtcaatattaattgcttttatttttaaaagtaaayagactacttaaaaatgagttataggtacaattttctctttgccagagagcatttgatctttcatctaacttgtgtccatattccatgtttttttttgatagaggaatagagattataaagtttgttaagtatgaaaatttagcagattgaatttaaatagagggcaggtatggtggcttatgcctgtaatcccttagctttaggaagccaagatagaaggattacttgaggtcaggagttcgagac

SEQ ID NO: 559746 - DNA, 563 bp, Homo sapiens
gaagttgttccactaaaggacaagcacagcgcatttaacagggaaaacggggatcactgctgcacagrcagaagcaataatgtatagtgcatttgacctgtccccaactccctcacaatgaatgcgcctcctgccacattctcatggccccataattctagttagcacttattcatgcttttttatggttgatgccatattttgtgctgcacagtgacttctcctttttattattactagacaagataccagttttcctattttaaaataacaatttaaggttgatgtaaatgttctatatctcagttagggtggtagttacacaggcattgcatttgtcaaaactcatgggtgcgttttattgtgtgtaaacctcattaaaggttgattttaaaaaataatgatgatgggcctggcgcggtggctcatgcttgtaatcccagcactgtgggaggccaaggagggtggatcacgaggtcaggagatcgagactatcctggctaacatggtgaaaacccgtctctactaaaaatacaaaaaattgtctgggcgtagtggcacgc

SEQ ID NO: 559747 - DNA, 406 bp, Homo sapiens
acttttccccactctgcctgtaacgtttgtgaagaactcctggtcaaaagccamtccccagactagctcttcctgcatcggctttgtcctgtagctgggaacaagcaagggctgcctgcctgcaaagagaacaatcacagccgtctgctctccaggttgagcacaatgttctgtcccacaaagctgcagggtgagagaagggtgtattgctcccctccagtttggaactgggatggttttcaccctcaagaggttcaagacaaaagcgtgcaggtaggctaagccgactctgacgttctcccctctctccagcacctgctggaggcagcaaggggacacagacattgcctgattttatccatttcttggtctacccattgcatgacattaagtgttgttttcctac

SEQ ID NO: 559748 - DNA, 515 bp, Homo sapiens
ctgtcataggtgtacagtagttttccagaatctatttgacatgtagtatcacaagttgaatgcagtgcagatataaaaatcaaactcttttccattaagccatatattaaagagatttgcaaaaaaaaaaaaaaaacaattcaatctacttatttttttgggggggaatatagctatttttcataaaaatgtgctatttatgttaacattgataaccaaaatragtgactgaggcaggcatctcaatcaatcagagtttttaagccagctttagggcacagccaggaaaatgtaaatcacagaggcatctgttgctgtttttctgaataggttttcagaaggtttatatttatacattttcctaaagggagaaagacatgtagggaaagaggtgggtaggagcaaatggttacattcttgtgagactttagttaatgcccagcaaatctacatttcacataaaattaaggtgaatgtttgaagataaaagaaaaaagagtaaaggaagaatcaat

SEQ ID NO: 559749 - DNA, 593 bp, Homo sapiens
gcttacttgtgaactctcacttcaacagtgggaatgtgtatatgcatatattaatcagtggctatttccctgctactttgctaacaaccttctcaaacttttggatttttcccaatttggtaggtgagaaataatacctcattgtagttgtaatttatatttctcttattatgagcaatgttcacatcttttcaaatgtttaaagtccatttgcattttattttttgtgaatactctgtttaaaactctgccattttgggggggttggtggtctttttcttctctactttataaactctttatatattagtgatgccaaccatttgtcaggtgtattacaaatatgtgtttttctagtatgccatttctgaaagtttatyttgaagcttatagcaaatatgattttcccccattttataggttttgtagggaaactatccttttatcactttataataatggtttaggaggatgtgactaccgtttcctccccaaagattgacgggggagaaaaaaagcccagatgtgtttatgttatttctgtcccattccctctcccagtcctggccaatcatatgggacatttttctaaa

SEQ ID NO: 559750 - DNA, 500 bp, Homo sapiens
ggcaggctgactcccttgttaggagctaatgccactggtaacttcaagttgaagccaatggtcactgaccatttccaaaatcctactgcccttcatctagaaatgaaacaagaaagcttaaatgatagcatatctgttttcagcatggtttggtgagtattttaagtccactcttgagacctactgcccagaaaaaaaaatcctttgaaatattactcctcattgacaatgttacctcagaactctgatggggatgtacaaggagatgaatgttgttttcmtgcctgctgacacagccaccattcagcagcccatggatcaataagtaattttgactttcaagtttcataagaaatatatttggtaaggctatagctgccatggatagtgattcttctgatggaccttggcaaagtaaattaaaaaccttctggaaataattcaccatgctagatgtcattaggaacatttgtggccaggaacagtggctcatgtctgta

SEQ ID NO: 559751 - DNA, 447 bp, Homo sapiens
aataaatcctgtgtcatatatttgccctatagcagaaggagggtggggtttaagctcaggaatcacagcctaaagcacaataattgtctggtttcctcaaaggagtttgcaagtttcacataccggaagtgtagaaaggctgaaaggagaaggtggggcaagggcatgagagtttctttcaatgataccagtataaactgtacgtgtctgagctaatattaactagaaatttgtctactacacttctttttttttttttttttttttttgagacagagtttctctcttatttcccaggctggagwgcagtggcgcgatctcggctcactgcaacctccgtttcccgggttcaagagattctcctgcctcagcctcccgagtagctgggattacaggcacatgccaccatgcccagctaatttttgtatttttggtatttttagtagg

SEQ ID NO: 559752 - DNA, 656 bp, Homo sapiens
gacttcatggaacgtctggacgggaaggagaagtggagtgtggttgagtctcccagggaacgccggagcatacagaccttggttcagaatgaagccgtgtttgtgcagtacctggatgtgggcctgtggcatctggccttctacaatgatggaaaagacaaagagatggtttccttcaatactgttgtcctaggtaggtgtggggtctctgagatggtacgccatgaagggaagatggaaatgttctgggcttctctgcagaagacacatcttctaaggtagtttctactacagatgacaaccaaccaggatcctttgtttaggccttatagtgtcacccacctgaaactagctctgattaaatggaaatgctgcttaaaccatgaaaaattcaccaaggatgaaattgaggttaagagtttgggtcagactgcctgggttgagtcctgaccacactacctaagcaaatcacttgactttgataagcctcagtttcctcatagtraaataggaactaacgtgaatgcccacctcatagggccattgtggggattaaataaaacaaatatataaatctctaagcatatagtagagaaactactggcgattcacatcagctcagaatttttcttaaaaattaagggaacctcaaaata

SEQ ID NO: 559753 - DNA, 599 bp, Homo sapiens
atgagcccagtcctgggctgcgtgttttgcaagagaagtttcaacattttgcacaaaacaacttcaaactcctttgctttgataaatttctttggttgtagaacaagaaaagcctatggagatggttctggaagaaacgttttgttttactctcctttgtagaaattgattccttttctctttcacctttgtttttctctttaaattgctctctctgcctttgtctttctgtcttctctttccttctactcctcctccccttccttctctttcttttcctcttttgttcctttccctcgccctatctttcttcctcttttctcctgctttatttagtaattgggaattactaaagctattcagagaaaagaaacaagaattcctaagccccttgcctcccttccaaacaaaaagctgtttgttgttattgttgttgttactaactcttcctggtaatctaaggcccrtgtatgtctgtgtaaatatttcagcaaaaattaatatcaatagacagcagtcaggcttgaaagactgtaggttttttatgtcatttagaaacaccatgtagggcaaattagcttggttacttacaattgcac

SEQ ID NO: 559754 - DNA, 572 bp, Homo sapiens
ccttcctctctccaacactcctgccctgtgttccatcccattctcagatggatgggaatctactcttaatacttagctggggataaggggactttgatgaatcacattgtgtctttctcattctcttctcctcaatcgtggagtctgtgatctttgagaaacaaacaaaaaagcactgggttggtaccatcaccgcaaatgcatgaggagcccaggagggatgcttccatttgcattataggttttcttatgtacattccctaaaggtaccagaaaacaaaacagaacatttcagccccagacaaactaaatggaacatcccataaaacagaaaaggggctccctcggggtgctgcgtgaacatgttctacagctctgtaatactccagtgacaggaaaataatgaagtcgcgctgtacacttcattttcctaaaatttagagtatgtgtcttccctccagagtgaccttaaaaatggaacagttcaacagttcaagccagtcccaaccttcctgagaaaggttctgttcmcactgacaagtccctatccaagcaagcgatcattccgcccc

SEQ ID NO: 559755 - DNA, 600 bp, Homo sapiens
gtgtaccaccatgctcagcagtagagatggggtttcgccatgttgcccaggctggtctcaaactcctgggctcaagagattctcccaccttggcctcccaaagtgctgggattgcgggcgtgagccatcacgcccggccagaatctttttttttaaagatcctccaggggattctgaggcagccaatttgataatcactgatctaaggtctttacctagaatggagttttgcctctctaatggagaaattatactcatccctccctcccccgtccaaccatcccttcctctatccctccatccacccacatatattaattgagctgtagctctggaccaagctttgtcaggtgctggtgagcaggacgagacccagctcctgcaccctggagctcacaaccttccctgcttcctgcccttctcttcctggagttctcrgaaccttgcccagatgtggccactttaagcttctttctcatagggcttttgagaatcatggcccccagctagagggggacctaaaggtctttggggtccatccccatgcctgggtagggtgggcacctttgagagactagttgtcccccaccttccttagat

SEQ ID NO: 559756 - DNA, 536 bp, Homo sapiens
gaacttaatgcagggtcttgaggacacagatgacaaaagagctaaaaagccaaatgggacatagtgaggcagacattggcaacagcagaaacacaataccaacttgggctggaggaataaagacgagagaagctggtagcagmgtccatgggctggggtgactcatcagaagctggaactatgcatggtttggctggcagaagctggagccagggaagagatacaactactattagagatactataccagagagggggatatagcccctggtttatcctttgctttttctctcctatttctagtcactgccctcagtaaactaatcccagctggaaaccagctaacaggagagtcttggaaaagcagcctgcaggtgtcaatccactgcagaacagaccacagtggggaaaagatgaggaataggttgagggtcgacaggtccaagtctgacacatccaacttcttttgtttgtttgttttgtttgttttttgagacagggtctcactctcttgcccagactggagttcagtggca

SEQ ID NO: 559757 - DNA, 536 bp, Homo sapiens
gaacttaatgcagggtcttgaggacacagatgacaaaagagctaaaaagccaaatgggacatagtgaggcagacattggcaacagcagaaacacaataccaacttgggctggaggaataaagacgagagaagctggtagcagagtccatgggctggggtgactcatcagaagctggaactatgcayggtttggctggcagaagctggagccagggaagagatacaactactattagagatactataccagagagggggatatagcccctggtttatcctttgctttttctctcctatttctagtcactgccctcagtaaactaatcccagctggaaaccagctaacaggagagtcttggaaaagcagcctgcaggtgtcaatccactgcagaacagaccacagtggggaaaagatgaggaataggttgagggtcgacaggtccaagtctgacacatccaacttcttttgtttgtttgttttgtttgttttttgagacagggtctcactctcttgcccagactggagttcagtggca

SEQ ID NO: 559758 - DNA, 536 bp, Homo sapiens
gaacttaatgcagggtcttgaggacacagatgacaaaagagctaaaaagccaaatgggacatagtgaggcagacattggcaacagcagaaacacaataccaacttgggctggaggaataaagacgagagaagctggtagcagagtccatgggctggggtgactcatcagaagctggaactatgcatggtttggctggcagaagctggagccagggaasagatacaactactattagagatactataccagagagggggatatagcccctggtttatcctttgctttttctctcctatttctagtcactgccctcagtaaactaatcccagctggaaaccagctaacaggagagtcttggaaaagcagcctgcaggtgtcaatccactgcagaacagaccacagtggggaaaagatgaggaataggttgagggtcgacaggtccaagtctgacacatccaacttcttttgtttgtttgttttgtttgttttttgagacagggtctcactctcttgcccagactggagttcagtggca

SEQ ID NO: 559759 - DNA, 619 bp, Homo sapiens
aagggaaaatggtgcctccatgttgaccatgcctggctcccttgtagcccttttctgttgggacagctcccagcattcacccgtgcaagcttccaggctgcttatctatgtttgcaacttgattttccaggctgcttttcttgggctgctttttattagaagggaagccttgatgaggactcttttactctatctgcctaaataatttctttctatctcctgtatcaataggacctcttgtaggaggactagacgtctaaattatgattctcctattggtacttgtgtgggagtcaagattaccttgtaccttaggcatggcgttgcagggtccttcctactgatgaactggcttttccttcaattaatggattgcaagcctgaaaactagctcagatccagaatttgggcaacggattattactaaattgtgtctatggggctaaattcgaagtgttatcagagctgcctacattccttggctcatggctgcatctgacacccttkgttgtctaaacacagacagatactggtgtctagacacagtgactcttgctttaacacaactccctctctttttgagtctcctgcctccctcctccctttatcaggaccctag

SEQ ID NO: 559760 - DNA, 444 bp, Homo sapiens
gggatcttggtcactttgctttcctgcagcctctgcatgtgcggaaacagctcagtttggctagagctcagccccagtggaaaggccttgtaggaaggagagagaatagtagtttagaaccagatagctaaacttggttcctggctaagagttgggactatctcaccatcgcccaaggagtcacagaaagtttttgggaaaaaagagtaagagttcaggactgtgttctagctgctgagtgtctttgagagagcattttgaactagtctgctattcttcagccacggggtttctcaaccatggcactattgacattggggctggataattctgttgcagggctgatatggtttggctgtgttcccacccaaatctcatcttgaattgtggctcccataatcccccwgtatcatgggagggatccagtgggaggtaattgaatca

SEQ ID NO: 559761 - DNA, 547 bp, Homo sapiens
aagcttagtctacaatttcaaagaagtaacttgctgaggtaacatatttactaggtaaggaaacaatytgtatcaagtctgattctaaagttaattttcctttctactaaccatgctgcctacctaagtggaatgaactagattgtgaaaacatggattcaagttaaagtctgggattgcccttcctagctgtttgcctacttcctttttttcatctgtaaatcccaaaggaacataaaaaaaatcaaaatgaaataagaatgggaagtatttttgcctactataaaattttattaaaacttaataaaatcctattattgaggctggacacgatggttcgtgcctgtaatctcagcactttgggaggccaaggtgggaagatcacgaggtcaggagttcaagaccagcctggccaacatggtaaaaccccatctctactaaaaatacaaaaaattagctgggcatggtggcgcatgcctgtagtcccagctactcaggaggctgaggcaggagaatcacttgagcctgggaggcagaggttgcagtg

SEQ ID NO: 559762 - DNA, 544 bp, Homo sapiens
ataatgacagaactataattgtatgattgagaacctgctataagccaggcatgctgttgccaccatacattcttctaaacattttaattctggctgggtgcgttggctcacatmtgtaatctcagcactttcagaggccaaggcaggaggatcacttgagaccacgagggagagatcaatctgggtaacatcacaagaccttcagctctacaaaaaataaaaaatattagctatacatggtggcatgtactcaagaggctgagacctgtctctaaaaaaataaataaataaaaattttgatccttacaacaagcctaaaatgtataggtctctccgcattgcgcccccagccctcttttttttgagagtctcgctgtgtagcccaggctggagtgcagtggcagcatctcagctcactgcagcctccacctcccaggctcaagcgatactcccacctcagccttcccagtagctgggaccagaagcacagcaccaccacatgcctggcttttttgtagagatagggtctcaccatgttggccag

SEQ ID NO: 559763 - DNA, 409 bp, Homo sapiens
tgacagaagcacataaagggagtgtggtgtgaagtgaaataaagaaggcaggctgggaccacaggatgaagggtcttgaagggcatagttgagaatttatttaaataccctaaatagccatggagggttttaaggtagaaagtagtatctgatttaaaattttaargttcattctaggtgttgtgtggataacagactgtaaaaaacttcaaatgccagcagaagcccagctggaaggcaactgaatgacatgggaatgaagagaagagagcccatgactgctcaatgtcacaagtaaaaatgcctgggtagttttaagaatattatctgcatggcgaggcatggtggctcatgcctgtaatcccagcacttttggaggctgaggcaggaggattgcttgagcccagga

SEQ ID NO: 559764 - DNA, 409 bp, Homo sapiens
tgacagaagcacataaagggagtgtggtgtgaagtgaaataaagaaggcaggctgggaccacaggatgaagggtcttgaagggcatagttgagaatttatttaaataccctaaatagccatggagggttttaaggtagaaagtagtatctgatttaaaattttaaggttcattctargtgttgtgtggataacagactgtaaaaaacttcaaatgccagcagaagcccagctggaaggcaactgaatgacatgggaatgaagagaagagagcccatgactgctcaatgtcacaagtaaaaatgcctgggtagttttaagaatattatctgcatggcgaggcatggtggctcatgcctgtaatcccagcacttttggaggctgaggcaggaggattgcttgagcccagga

SEQ ID NO: 559765 - DNA, 409 bp, Homo sapiens
tgacagaagcacataaagggagtgtggtgtgaagtgaaataaagaaggcaggctgggaccacaggatgaagggtcttgaagggcatagttgagaatttatttaaataccctaaatagccatggagggttttaaggtagaaagtagtatctgatttaaaattttaaggttcattctaggtgttgtgtggataacagactgtaaaaaacttcaaatgccagcagaagcccagctggaargcaactgaatgacatgggaatgaagagaagagagcccatgactgctcaatgtcacaagtaaaaatgcctgggtagttttaagaatattatctgcatggcgaggcatggtggctcatgcctgtaatcccagcacttttggaggctgaggcaggaggattgcttgagcccagga

SEQ ID NO: 559766 - DNA, 409 bp, Homo sapiens
tgacagaagcacataaagggagtgtggtgtgaagtgaaataaagaaggcaggctgggaccacaggatgaagggtcttgaagggcatagttgagaatttatttaaataccctaaatagccatggagggttttaaggtagaaagtagtatctgatttaaaattttaaggttcattctaggtgttgtgtggataacagactgtaaaaaacttcaaatgccagcagaagcccagctggaaggcaactgaatgacatgggaatgaagagaagagagcccatgactgctcaatgtcacaagtaaaaatgcctgggtagttttaagaatattatctgcatggcgaggcatggtggctcatgcctgtaatcccagcacttttggaggctgargcaggaggattgcttgagcccagga

SEQ ID NO: 559767 - DNA, 530 bp, Homo sapiens
tgttcacagctttcttcccttttcctttcccttctgttcaatactgccctctcttctgagcctctctcttgctgggccccattttctctccattctcactttgagggttgactatttgaagttccaattataatgctgtcctatatgtcccagtgactagatgtaattcagagatccctaccctatttttctgaggagaagccaaccttcatttctctactggctttcagatagcagtgttggtggggtactgaccagagtccctgaactgagtggttgggtgaggctggatgtgctcctccccsatatgggggtcccagcagtatggggaaggtattataatcagggtttgctgacaatgccaggatccattagacaaggggctgaggcttacctgtggggacccttccataagctgaatgcagaggggaatactgcatccaggcagtcctctagcttttgcagaggaccatacatgatgaatgaaggctggagaaggagcccttgggtgaggttagcctggaacccac

SEQ ID NO: 559768 - DNA, 351 bp, Homo sapiens
ttggtgaagtgttttttcaagtcttttatccactttcaaattgggttgttttcttactgtggacttttgagagttgttatatattttagatacaagtcctctgttggctgtgatttgcacatattttctctgcgtctgtagcctatcttttcatccccttaaccgtgtcttccatggagcaaaagttttcattgtgattaagtccagtttatcaattttttattttatcacgtttttggtgtcagtctaaggactctttgtctaaccccaggtcatgaagatgcttttcyatgttttctttaaaatattttacagttttatgtttttcattgagatctataatccacttgg

SEQ ID NO: 559769 - DNA, 362 bp, Homo sapiens
gaactaaatgaggacaaaagaggtaaaagaaaccttggaaagtctctaatttaatggcttttcttaaaaatgaagaaactgagtcaagaaaaggtgcaatrtgatttgtccaaagtcacacaaccagtggatgatacaatcattcacaagtttcctgtcttttattttgataatgagattcacagatgttcacaatgtgatgtcttcctatcccgggaaagggacaagtaagtcttttttactcaaacaatagtgactgggcatgcttaaccatttctttcttcaattagaggagatgacagattggtggaagatgtgttttcttagataaaaattgggccatttcaacaaaacaaatgcat

SEQ ID NO: 559770 - DNA, 412 bp, Homo sapiens
taaactaaatctaaccataaggaaacaaaggacaaacctaaaktgacagactatgaaacagctggtctgtaatcttcagaagtgtcaaggtcgtggaagtcccgcaaagaccaaataactcttccagactgaaaaaaactaaagaagtgtgacaactaaaggcaatgcatcattctgaactgggtagctctgctataaaggaaattatcaggacctctgatgaaacttaaataagggctgagaattagttggcagtaacctgtcagtgctaatttaccgatttgattctcgtattatgactatgtagaacatcctcctttgtaggaaatacacagtaaaatattacagcatgagagaagcattcggtcagctttactttcaaattgagaaacaaaaggttctgtgtgttata

SEQ ID NO: 559771 - DNA, 594 bp, Homo sapiens
cacctgtcgtcccacctattcaggaggctgaggcaggaggatcacttgaacctgggaggcagaggctgcaatgagcccagatcrtgccactacactctagcctgggtaacagagttagactcggtctcaaaaaaatacataaataaataatttttttttaatttaaatgagggaattctgatagttgtcagattgcataccctcctatgaacaaagaaaacaaatatacaatgataaagaacaaaatgttaacattcgtttcttagggggaaggaagggattagaagggagagattactaaacttttctgtatataatttaattaagtcataataaaatactgatattccttgaccaagcaattacacatacaaaatcgtacaagcctaaagatacatatgcaatgaaatcactgaagttcctataatacaacccccgccacaaaagacaaaaaaaaaattgtagtctaaaggcccctcaaaaggaaaactagccaccgggatcagtggctcacacctgtaatcccaacacttttgggaggctgaattgggaggatcacttgagaccagaagtttgagaccagcctgggcaata

SEQ ID NO: 559772 - DNA, 590 bp, Homo sapiens
cagccattacgagcttagactttgaagtcrtataattccctttataaaatgaatattaaacatagtaatattgtgttggttagatgatattgaaacatgtgaagaatttagtatattgtctataaatatttaataaatggtagtgatgatggaaagagaaagcagggtctaggtttgggaacataaatgagaaaattattatgtgaaccctttgaatttttaggtggtttctttcccattatgttaacaaccctgcattgggttggtgtggttaccaatttgtaaaatttggggatggattaggacatttctagcaagcttagctttaaaagcacagctgattccattgagcaaaggaagaaagtccctggagtaggtttctgccttgggcatctgtacttgcatgtatgtgtaggtttatatgtgtgggtatatagctggtcatcattaggcatagattccatatttgtgagttaatctactcattagaatttatttgtaacctcctaaatcccccaaatcaatacttgagttgctttcacagtgtttttatggtcatttgtagacatgcatgtgcacaaagcagtgga

SEQ ID NO: 559773 - DNA, 527 bp, Homo sapiens
cagttgttttatacattttatttctatttcttgccatatcagtgcaacaaaggtattacttcctccattttacaggtgaggaaaatggtgttcagagatgcaacatgatttgcctaaggtcacatggctagtaagttaccacagcccagatagaatccagttcctttttttttttttttttgccgctatcatagttcactgcagcctcaaactcctgggctcaagcgagcctcccagctcagcctcctgagtagctgggactacagaggctcaccaccatacccaaccaaattcttttcttttttccagtctgattttgaacgaccgccctcaagygatcctcccaccctggcctcccaaagcgttgggattacaggcatgagccactgcacagaatacagttctaactccagaacctaaactttgactcaatggcctacaaataaatcataatactaagtttattgtatttatttatttttgagacagagtctcgctctattgcccaggctagagtgcagtggcac

SEQ ID NO: 559774 - DNA, 407 bp, Homo sapiens
tacatttgaaaacttactgcccaacctaatcaccctctccaatgaacttatataacaatagcaacaacaacaacagcaacaggaagctgtctaacttgttctctgtgtttctaggaaattgtatcagcctaatyatggatcttcaccttcatgagtcctggagaaaaccattcaaaagcctttacatctagataatatcactcaagaaacacgttcaggttatcttaatattgaaagtcaggtgtctcacagcaacgaaagctaacgaatgtgacatcagtcactgtaataactttagaatgaattattaatcagaacatttgtaaatattcagaaaacaaagtgatggttatttggaggcagcagtgtggtgccactaaaaccaagcaatacagactaattttgtt

SEQ ID NO: 559775 - DNA, 391 bp, Homo sapiens
tctcatactcttccagtgcatcttgttatctggtgtaaataaaattttgttgttttaatagcttttagtcagcattccctttgtgtgtccaaaagtgttttagtgacaaacatataacagctttttcaagttgtttcatctttggacagatacagaaaatatcctatgtarttgtttaattgttctgaagatgcaatcacccatttgacacagctgagaacatgtcccttaataagaaattcaaactatgtatcacacatgcctcataataaatgcttgttccttaccaactgccattatcattagcttgccatcattattcttttaaatcaatgtctaaaattcaaaattgtattttcaattctactttttacaataggtataaaatcaa

SEQ ID NO: 559776 - DNA, 564 bp, Homo sapiens
ttttacctaaatgcttccacagcttaaattctccttgcacacacattcctcagcagtgtccttttgtgatgctggcagcagcacaacctgtgattcttcacaacatttgggtggtcagcttgtgtttccaggaccgaggagcattttccatggcctgaatggtgttagtcaccaaagtgattgtttagggtatctgcaatggtcacctgatttcatatattctttaatacatttgtctttttatgtgtcttttctaaacatgagatctgaggtaggggttcctccttaccagatctagggctgtcctgagtacagtaaaaataatccaacactacttatatatacaacccacacgtataaaatagaaataggttctccctacaagtacttgagtaaattaccatgtaaccagtttgttgtttatttttmtagactttaaaaaatactaacacacatacacacacacacacacacacacattttttttttttttttgagacagagtctcactctatcacccaggctggagcgcagtggtgcaatcttggctcactgcaacctccc

SEQ ID NO: 559777 - DNA, 533 bp, Homo sapiens
gggtggggagaggggggagggatagcattgggagatatacctaatgctagatgacgagttagtgggtgcagcacaccagcatggcacatgtatacgtatgtaactaacctgcacaatgtgcacatgtaccctaaaacttaaagtataacaataaaaaaataaataaataaaaaagaaacaagaaataaaaaaaaaaaagaatgaactgcattcctacataccttaaaggtctaacttctgctttatttttttccctatggcttatgagaccactgattttacawgtgtgcatttcctgatgatacaatagagccatctggtggtaaatgaaaccaggcataaaaatacagcattcattcagtttttgtaattgttcatactatacattgaaccttgagtctctgccactggcctctgatataaacagaattctatgggaggaggggcaaaaaaatattgctacgtcaccaacagcctggctccacagtcaagttctgccactacaggtgcatactcaccctcaaaagtttgcc

SEQ ID NO: 559778 - DNA, 414 bp, Homo sapiens
ttgtgtgccaaattttttatttgatayaaagagttttgctatgtttaacttttattaaaatttctaatcagtttttctattatgcctttatccttctgtaaattatttgaaaaatgacttaaaaatgaaaaaatttagatggatttctttagttgagatggtgaatgatgatactattttcctagtatatataggggtaagtacttgaatatttgaaactagacttttcttttcttctttttttttttttttttgagacggagtctcactctgtcaccaggctggagtgcagcagcactatctcggctcactgcaacctccgcctcccaggttcaagcgattctgctgtctcagcctcccaggtagctgggactacaggcgcgtgccaccacaccctgataatttttgtatttt

SEQ ID NO: 559779 - DNA, 571 bp, Homo sapiens
aatttacaatgacgaggctgtttttactctggtacctcataaataacttttgatttaaagtttccaaagaattgacagagcacttcaaacgacctcatcggagagggaatgagcttctccctccatgccctgcccgctcaggtgaggactgagatcagtagctggaggggttcatcaggggtgtagcccgactggcaactgacaggcttactgactgactgaggagctaaccggccagcaagctcatggagagactgacccatgggctgacaggttggtgaaataaccaagggatggttgagccaatggcatggttgatacaccaatgaagggactgactgtccaatagatggacagttggactaatggccagccagcagaccaacggattgaccgatggatcggtttgtcagtgagtcagtggatcgtaaggctaacctgtctgcctcccccaaatctggttagccagctgacctacagaccaacaggmtgatgaaccaaccttcccagacactaacaggagaatatggaaaggagggggtcatctagcagatggacagggcaagcaacc

SEQ ID NO: 559780 - DNA, 508 bp, Homo sapiens
cagtgatttggaattatttcccttgaatactctctgggagctgaatggacaggctgactgaagataaaaggtgagaagtcctgtgaatgatgaacaggatttcgtggcctgtttgtgttctgagtaggttttagaacaaaattaaaatgctgctttaytttcttgttcaaattctgaataaataatcacagacagcccttgctatgcattatcttactatcttccaataactgagaattaacttatcatatgaagtcccattgtagcctgctttctgtggaaggtcctatgtaaagctgaagaaggtcaactaggaatagccccacatgattttaagacagcaccgagaaaaagaaaatatatcaaaatattttttcaattaagattatttttaaacttctattttatcactacattatatttggaaaaaatagaatctctctctccctcccatctaactggaatttgttttaaattagtctgaaagataaaatttcattttaattta

SEQ ID NO: 559781 - DNA, 508 bp, Homo sapiens
cagtgatttggaattatttcccttgaatactctctgggagctgaatggacaggctgactgaagataaaaggtgagaagtcctgtgaatgatgaacaggatttcgtggcctgtttgtgttctgagtaggttttagaacaaaattaaaatgctgctttattttcttgttcaaattctgaataaataatcacagacagcccttgctatgcattatcttactatcttccaataactgagaattaacttatcatatgaagtcccattgtagcctgctttctgtggaaggtcctatgtaaagctgaagaaggtcaactaggaatagccccacatgattttaagacagcaccgagaaaaagaaaatatatcaaaatattttttcaattaagattatttttaaacttctattttatcactacattatatttggaaaaaatagaatctmtctctccctcccatctaactggaatttgttttaaattagtctgaaagataaaatttcattttaattta

SEQ ID NO: 559782 - DNA, 602 bp, Homo sapiens
gaaatatgatgtttgagcttaatgtcaagaacatgggtcatgagaaaactaacaggtggcttcaaattctttttacaagtcttaattatggaaacagatttattacaaagtagaatacctaatgttttgggtctaaaacttcaggatattagacctctcatccagaggtcctatttccacaatacttgctaaactctgagaattttccaaaatggtttaaaacagcccaagaagaaggtttgcattacasaaaagggaatttatgcagtagaatataatggaaatttacacagtcatttgagcctgagtcaaagtctttaatatcaagtcaatctcagaaaaactaaagtcactcgtggaatcccttttatttgctttgttcattccacacctttatttaacctggcatgctcttttgatattgccaaaattcagaactctatttaaatggcattctattctttttttttccttttttttaagatggagtctcactcttgtcacccaggttggagtgcagtggcacaatctcagctcactgcaacctctgcctcccagattgaagcgattcttctgcctcagcctcctgagtagctggtatt

SEQ ID NO: 559783 - DNA, 624 bp, Homo sapiens
aagtttgttatacagtatttttcctgatacaggtcatttgtccttgaaattctgcatttctacatggtttcctctgcccaatcctctttccccttacagcttttacatgcataaggagaggtgtgacttctgtggtgggtcgtttctttttcttgctgcatggtagttaattaggtaactagtttatttgtatattcagtgtaggacaatttgcttctttaaacagaaaaggtctccttatttttcccaaataaagaaaaagtatttaccattttctcgaataaggagaaagtattgatcattttttttaattttttctttcagttttgttttttattttttcttgagatggagtctcactctcttgcccaggctggagtgcagtggtgcaatctcggctcactgcaacctctctctcctgggttcaagtgattctcctgcctcagcctcccgagtatctgggattayaggcatgtgccaccatgcctggctaatttttgtatttttagtagagacagggtttcaccatgtgagccagattggtctcaaactcctgacctcacgtgatccacctgccttggcctcccaaagtgttgggattacagacgtgagccaccacgcctg

SEQ ID NO: 559784 - DNA, 406 bp, Homo sapiens
atacattagcaggtttttctatgtgccaggaatagtggcttctagtagttccagagtttgattcttaaagctggttggcccagaaaaatagagttcatgtatctccctcaatgtccctatactctaatacagtcatacagtctgctttggttacctacccgcccatgtgtgtcaatctgcttgggctgccatagctgaatgcttcagtctgggtggcttaaacaacagaaatttattttctcacagttctggaggctcaaagtccacgattaaagtgccagcacagttggtttctggtgagatctttcttcctggcttgcagacagccaccttctcatggcctcaagtccctagtctaattctatttcttgatctcggkttttttttacaaatgtttttttttctt

SEQ ID NO: 559785 - DNA, 505 bp, Homo sapiens
acctgtagcagctacttggaaggctgagacaggagaattgcttgaatctgggaggcagaagttgcagttagccaagatcacatcactgtactccagcctgggtgacaagagcaagactgtctcaagaaaaaaaaaaagtagagcgaaatgagatttttgccatcctattccatattccattggttccttttatgcaacattcaactcaaaaccaatatttacctcagtttttatttgatggcttggtcaaataacttcattaatttttctcactagagctgatcattatgtttacatttgtaaatgctaataattactgatgtttatggcatttaatgccatacgtttttctaagtttaaatttattaatttaatcctcacagtaaccatatgcatctcatactgtgatctccagtccataaatgaggaaaattgaartatggagaagttaaataatcccatactgcttataagacacagagccaaaatttaaacttgggcagtc

SEQ ID NO: 559786 - DNA, 468 bp, Homo sapiens
tgagttttaaaaatgttgttgctggtggatttcttgttcctgttacataactaaaagtgaggccatttgtggtttttaaaaaccttatgaattaaaaatgctacaggtgaacaaacagaagcttatgtttagagatattgatgacttaacagtacaattggaagtaatacggatgagcaagaattagttctgcagcttttcaaaataaktacgtagagactcttggtatattggattatctgttgtaaacaatttttttttcttccctgacacagggtctcactctgtcacccagactggagtgcagtggcacagttctctgcaacctcagcctttgggctcaaatgaccctcctacctcagtctcctgagtagctgggactacaggctcatgccactatacctggctagtttttggtttttttgtatagatggggctttgccatgttgcccaggttgatcttgaatt

SEQ ID NO: 559787 - DNA, 540 bp, Homo sapiens
cagtaactacttatgctaaaggaaatcctaaattatattctccaggaacaaatctgagatacaatgattagtgagcaaagaaactgttggaaatatagatgaaccaaaacaattatatgcctgtgagataataataatatttwttgtgtattcgttaataaaagaattaacctactgggcaaaaatagcataaacttgggagggatcattggagttaaagtattatgatttccttgtattgttcaagaaggttattaagatatttgaactttctttagttaaatagaaagtttcaaaagtaactactaaaaattataaataatttggcctaagttctgaaagtataaatagagaaaaatggaataagtaatttaagataaacaaaaaaagacagtaggaaaagcagcatataaaaagctagacaaattatctgtatttaaaatccaaaagaatctatgaacacattatttactataaaagtttaacaaagtggctagatataagacatataaaaatttattttattctaacatagcagta

SEQ ID NO: 559788 - DNA, 633 bp, Homo sapiens
tgataaaaactattttaaatataagtaaaataagagggaaaacaatatagcacccactgttatgaaaagcactttgaacataaaaacaacaaaaggaacaacagtttttgaatatttactttgtggtaacatcatgctaagtgctttcatgtatatttaccaactaatcctcagcccattcttgtgatgtaggtgctatttgtatcatctaaatgagaaggctacatttcagatgattgagcaacttaaggacccagttaataagaagtagggacagsactggagtccaggtctgtctgaccatacaggatcccaacatctcacctcataccactgggtaatcagataaaactgaaaaaaggacataaggtaaaaacatttgagtggggaggacacgtctaggaagagggctaataactgcaaattgttatgaatagtaaactaaagtaaccaaagagatttaaaagcaactaaggagtggaataccgtttcatttaaacagtctgaacaaaacaaagaaactacacattcattaacattatgaaatatttaggtagcttataatactactgttacattaaacttaattttctttcaattaggcaatatctctagaggagtttccattccgca

SEQ ID NO: 559789 - DNA, 589 bp, Homo sapiens
attcgggacttcaattttctttgtaaacatttattttttaagctaaggtatactgatgtttgtatactattctccatgttttgctgaatatctggaattttcacaatttgaaaactcacttttaagacaaccatttttggaggaagttgtatagagcatgtacccctataacataatctaacagccagacatattccagtgcattgaaatagagattttaaagcacacagtattagcagttttagaattagaatttaccttaaagtctgaccagtctaccactttcctatttgaaaataaggaaatggaataattactttaatcactcagtattattagattggctagtaatagggttaagaccccatctgctacaaccccagacatatgagtgtaattaaattaaggcattctaagcacgatgcccaaagttgttctagtattattacttttatcaatctcattttatatatatatatatatatatatatatatatatatatatatatatatatatatattagtgacagagtcttgctctgytgcccaggctgaagtgcagtgacatgatcatggctcactgcagctt

SEQ ID NO: 559790 - DNA, 619 bp, Homo sapiens
catttctgaacctgctctgagccagacagtagcctaccaccctgaagggtgactcccaggcctagcaactttcaccacaagctgacgtaagagcccttgggctttaagtgaacattggtggaagcctgacagtactccttgtgcgactgtggttgtggtggccatgtggtgaggctcctctgcctgtggaaaagggaggcaagagtaagaaagactttgtttcattgtttgagagccagctcagcatcagtacagttgaacgctgyaggtttttaactcccatccctggtttctgtatggcatctctggacccaccctgggcctggggaacttgacaccctgaaggaaaaaacacaagcctgtctgaattcaccatctgctgattatctagtcctagggtcttgagcaaacatagacagtagatagatagaggttacagcaagccttgggcaagacccagtggtctgctggtttcaggtctgacccagtgcagtcgcagtggtggtggtcatagaggtgcttgtgtcaccccactcaagctccaagtggctcagcacagaaagatagactctgttaatttggagaaaataagggaagagaatgagcatctctacttggt

SEQ ID NO: 559791 - DNA, 569 bp, Homo sapiens
agtcttcccactgagcatctttatttattatgtagaaaatcttcttcattttggagttctcaaattctcaatttgtgaaaatgcagacataggctgaacaaaaacttgacctttggagaatccatgataaagagcttttytgaacacattaaaaccataaacagaactcagagtttttacacacgtatatttcttaaagtgctgaaagttattctcctgaatgtgctaaacaactgatatgctaattatgtactggtctcatctattcattaaataatgctaatcccagaaggacctctatttgaggaaagaaaaaacataaagctttttaagactaatttgggttattctgtatgcctgaacattgtccaactgcaagcatatcttatttaaaaatcagaattttggatttaaaaatgactgtgaaatgacattcgtctgaattaaggttaactgggcttcatgccatgccatggctttccaagccaacaaggagataaaatggtccttggaaaagggctcccttggtttcctggggctcatgatctttcttatggcctgatgatacc

SEQ ID NO: 559792 - DNA, 608 bp, Homo sapiens
gcatttgttttttcacttttgcaaccgaaaaacaaataacgattaaaaaatgggtcccaacattatggagccatctttcactgcaaaaggcaaaagtaggcatttagaatgagtcataacctgggtattatgaagtcttcccactgagcatctttatttattatgtagaaaatcttcttcattttggagttctcaaattctcaatttgtgaaaatgcagacataggctgaacaaaaacttgacctttggagaatccatgataaagagcttttctgaacacattaaaaccataaacagaactcagagtttttacacacgtatatttcttaaagtgctgaaagttattctcctgaatgtgctaaacaactgatatgctaattatgtactggtctcatctattcattaaataatgctaatcccagaaggacctctatttgaggaaagaaaaaacataaagctttttaagactaatttgggttattctgtatgcctgaacattgtccaactgcaagcatatcttakttaaaaatcagaattttggatttaaaaatgactgtgaaatgacattcgtctgaattaaggttaactgggcttcatgccatgccatg

SEQ ID NO: 559793 - DNA, 457 bp, Homo sapiens
ttggccttccggtcacttgcttgtcctctgagttaggaggttgtgcacatgatgtccattttccttgagccttggacctttcctaaacagataccaatcacactgaaccatcgttattgaaggagcagtgaggagccacctccttctgaggagaaaaaggggaaccctactacaagagctaatgagttccaatgcacacaagttgggagtgttgtcgttttttttttagaaaacaagatttaatgaagctttaggtttgcagggcctacctaatctggaaaaataaagaaaaagcatattataacagtgttaaragaaagagcagagaaaagcagaggccccttttgctagtgtacgatacatctgagaagcgtgaatgccagcctatggagagacccatgcgcaggatcccccaggagctagagagaaatttcaatgtgagccagttaaggcaggt

SEQ ID NO: 559794 - DNA, 457 bp, Homo sapiens
ttggccttccggtcacttgcttgtcctctgagttaggaggttgtgcacatgatgtccattttccttgagccttggacctttcctaaacagataccaatcacactgaaccatcgttattgaaggagcagtgaggagccacctccttctgaggagaaaaaggggaaccctactacaagagctaatgagttccaatgcacacaagttgggagtgttgtcgttttttttttagaaaacaagatttaatgaagctttaggtttgcagggcctacctaatctggaaaaataaagaaaaagcatattataacagtgttaagaraaagagcagagaaaagcagaggccccttttgctagtgtacgatacatctgagaagcgtgaatgccagcctatggagagacccatgcgcaggatcccccaggagctagagagaaatttcaatgtgagccagttaaggcaggt

SEQ ID NO: 559795 - DNA, 601 bp, Homo sapiens
gtagatgagttggggtacccagaagatatgattccatgttctcatctttaatatcagagagctggcctgtttgccagaaacgaagttatatcagtaagactggagggtgtgaccgtctggaatgtgggttcacatgatttactgtctttcctgtactttcattaagggccaaacccttgaacctggtgttatggagaggcctgagttctctatcagtccaagctaacctaatgccatgtgattttagttacataaacaatttattgctccataaccctatttcttacactycactcaagagcctccatttcaactgctcacacggagacagagggcacatggccgtcccgaggcagaggagctagcagtggtgtcagtcgggtacatggaggtatgtcctgctagactcaggacagaccactgctgtcacatcaggccaggcaggcctggggtagggaaaaaaaaatccaatcattttcatccctcacgaaagaaaaatactaaaaataaaaatctacaccatgaaaactagcaaatataaaaaatggcagctatgacatggaaaatgacaattttagagcaattataaacgaaaggcaga

SEQ ID NO: 559796 - DNA, 602 bp, Homo sapiens
tcctgtcaaaattcctttgacattcctcttacattttctagagaagcttcagcctagcctyattttatacttgtatttcttacagcattgttttaggtcatttttattctccatttaatattttgaattcaaatattcccgagtacaggtctaggagttggccacattaacttgctgaatgcttttgatctgcatcctagattcatttcccagctcaggacaggttatttttatttgtttgtttgcttgttttacacgcttgcattttgtttacaactttgatttgtaaatacttactgtttatcacttgacctttgttgtctttttctcaatatcaaccagcactcttattaaacaaacaaacaaaaatccctatatctttctctatttagcttagaacttcctggttttacttccgtatcactaattgtgtgtgtgtgtgtgtgtgtgtgtgtgtgtgtgtgtaattttcacctctaatactcatggctccttagattaaaaagttggccagtgcaaatttagttgtcttttaactatttattttaaaaaaatgagacacaacatactatacaactcatccatttaaagtgtacgattca

SEQ ID NO: 559797 - DNA, 602 bp, Homo sapiens
tcctgtcaaaattcctttgacattcctcttacattttctagagaagcttcagcctagccttattttatacttgtatttcttacagcattgttttaggtcatttttattctccatttaatattttgaattcaaatattcccgagtacaggtctaggagttggccacattaacttgctgaatgcttttgatctgcatcctagattcatttcccagctcaggacaggttatttttatttgtttgtttgcttgttttacaygcttgcattttgtttacaactttgatttgtaaatacttactgtttatcacttgacctttgttgtctttttctcaatatcaaccagcactcttattaaacaaacaaacaaaaatccctatatctttctctatttagcttagaacttcctggttttacttccgtatcactaattgtgtgtgtgtgtgtgtgtgtgtgtgtgtgtgtgtgtaattttcacctctaatactcatggctccttagattaaaaagttggccagtgcaaatttagttgtcttttaactatttattttaaaaaaatgagacacaacatactatacaactcatccatttaaagtgtacgattca

SEQ ID NO: 559798 - DNA, 576 bp, Homo sapiens
gttaaataactttccaaggtcacacagcttctgagaggtgaagtcagcattaaacccctcagcccagctctggatccctggatcccataacctctccagamacatatcctactttaagtatcctttttctgcttctgtgcctaagggcatatcttaactctgagcataaatttcctttagggtctggcaggctatggataacattcctaaattcttttgcagttggaattttgtatcacaatgggtgtttttgtaagtatttcaatgaggattgtgaatccagccccgctagtaactatcatcttaattcagaagtcctcatggaattatgtgaatataaatttggttttaatgaccactgttattttacagacgagaaaaatcaaagtccagaatgactaggcaacctccaagacatagaactagttagcaaacctgggatgggaacttgagctcacccttacttggtttgttccctactatgccttgccagctaaactctctaagaagctgctgaggtgcaattgcatctttccttacctctttccaaagtgcatcctcaaaagccacaggcaa

SEQ ID NO: 559799 - DNA, 606 bp, Homo sapiens
attcatacagttccgtttcctgaacatcctacataaccaagtctccaaaaacacacacatttatatcttaggaggcacccaaattaaacagctgtttctcaggcataaggaagacctcaactcctcaccacaatgtgtgttaacacaactcactccttgtgttgaggcagcatggccaaaacatgggctactctgcttagatttttttttttaatggcaagaaatgtaaaaggaaagagagaagtttaaatgaggaaataatgctctctttcttacagacagcagaaggaaattgatattctctctgccgcgaaaggtcaaaatgccaactttgaattgaactgtaaagactaaattccgaacaattattctctkcagcagttgtaaaaatttcagcaaattgcagctgtcttaggtctttcacccaaaagacctactcatttccatcagctgagttcactcttccaacctggcatgtccaacctagcactaaatccctttgcaaagtcagtctgcataacagcatggccaaaaccgagggcagctcaggcaacctgagcacaaacaccaggctcaacctctctgaaaatcatctttacacataaa

SEQ ID NO: 559800 - DNA, 501 bp, Homo sapiens
tcactagcctactcagcagactaaaatgatgtcaacagtctatattcaggcttataaacatttcttggtttccaacagaagtcaaatgtgtttgtggggagaacgttttgctaggattttgacaactttcctgaaagctaggccttttttacataatgattttgcattggggtcaccttagtatattcacgtcaatccacgctcttctttccttcgtgaaccatagtgggctcttcactcctgctcgtaataaccacctccaaatttgttagagtgatttggtctcctctggcaggctgtggtggccacataaaggatcttccattagagggacacaggacacaaagctccattcccatgaccctctcttccctgtgtcwcccctaacaaggcaatctggaagcagaaatgcaaactccagccccaccacacatccaccgatgcatttgtggctagaaattttaatctaaactttttttaaaaaaaatcataatagttagg

SEQ ID NO: 559801 - DNA, 559 bp, Homo sapiens
atacctatgtttgctttatgtaggtgtgatagttctgaaacttcagaaatttcctctgtatttcatttttaatgcccctagcaccactcttttaacagcagttttttctctgatgtattcaagagttaattgactttggcggggcagggagactctgacctacagatgacaatccttaaaacttttagccttggtctcatcctagattccactcacctgctcatttatgtctcttcagggaagcagtggccctgtctattagagagaaaggaactctagagggtggaaaagaataggaaacacctgaatgtcataaaaggtgggtrgacttttaacttagatctatacatcaattagaatattaattttctatagctttttattcttaaaatttaattttgttattttactactttcaatagataagttaattaaaggatacactaattaaaaagatgttaattatatctattaatctggagggaatataattctgtatttttaattaagaaaagcaagttgcaaaatcttatttgtagtatgagcttttcatttgcca

SEQ ID NO: 559802 - DNA, 472 bp, Homo sapiens
gcaaacacttcttagctttcttgccttcaacttcttacccaacttagccaaacaaaaattcagagattgccactctgagtgctgatactggaaacaaaagaacaagataggctcttcaaggagttcactttgtatcagaatgataagatgtmatacagacaccaaataacaatgtagcactgaagcacttggaaactatattccccaagtggtgtggaagtacaaagaagaaaatgattaatatctctgggaaagtagaaatgatccacagtgtccatgaaagcttaacataggagctgatatttaagctgagcttgaaaagtgagcgtagttgggcaaggtggaaaacatagaggcttgtgtgtcaaaagggtcttcccagcagtgttgggcctaagaacgtggcatcatgtattcatcacccaacaggagtgtcccagggaggtggagaggatacagaagtaaaacctcc

SEQ ID NO: 559803 - DNA, 437 bp, Homo sapiens
gacttaaggagggtgtggtttaatcagatggggtggcaattactaaggctgagaacttcactctcctattcagaccgggactgagaaagtgtgtcttagatggcttttcgccatacatgtggcagaatattgttacctcttcacctccttttctcctttcctcattcctactgttaggaattgggctttggtaaaactgactaaagaggtagattatcacctaaaacattttaattgtgttgaaaatatagtaaagcaaaggtttgccttgtaggtattcccaaatgttggttaattgttggatttatacatgtgccrtaattcccactagtccctttttttcttttttctttttttttttttttttagttttaacttttaagcttttaaaagtgaagtcaaccagaagtttagggtatatgggaaaaaattttcga

SEQ ID NO: 559804 - DNA, 316 bp, Homo sapiens
gttctttgaaaagatgaataaaattgataaacttttagcaagacagaagaagagaaaagagagaagacacaaatgaccactatcactacagacctcatggacrttaaaagaataataagggaatactgtgaatgagtctatgcatataaactcaacttagacaatatggacaaattgctcaaagaccgcaaagtgctgtaatcctagcactttaggaggccaaggcgggaggatcgcttggccaaagctcacctaagatgaaatagatattatgagtagtcttataactatttaaaaaacttgatctctaattaaa

SEQ ID NO: 559805 - DNA, 497 bp, Homo sapiens
ttttataaactgattttagaaggtaaagatcttttgttgggcccttagggtgatgagatgccctctgaatttgtagtggagagggggtgtagcttggtgacaaggctgctgggtctgcactagggtccacctttagttggcttgttacaggggcttgggtagttgtacttctcattttatttttggacagactgcatatccttcagggctttgctccgtagttaaracactagggtatgtttttgtagtcaggtctgcatatggtgggccttatatctggatattgatgagtatggcttttattgagtatcagagagcattccctcagataactgtgggtttctatataggcagaactgaccataaactatcttgtttaagtgagtagtcatggagatagtcttttttttcaccatgtgtttaatgatgaatatatatttccttttgtgagagaaatacttgtttgatttgaaggtaattttcaaaaagatttataa

SEQ ID NO: 559806 - DNA, 536 bp, Homo sapiens
cactcttgtcaacctgacacaactctgctctggatattcccaaatgcctcaaagacacctaggtgattgtgagagaattcccagtgaccatgggctgatgtctcaataagccaggctggagagactcaatgataagccaggctggagagactcaatgataagccaggctggagagactcaggctgactctaagtagaaaatggaactgccttggtggagctcaagaacctggatcacccattctgatttgctagcayttgggtaagagaaagaatgaaaatattctactccagtatcacattttacaggtaaatatagttgtgcacatggctctggctattttgtggacttgatgtctcactcctaagatgtttatttacacttacagattctaccatcagattctatttcctcctggacactcttacagtctgacccttttttgtaaaccccaggcagaagccataccttatctgcagattctaggtaggacccacctggttctgcatcctttggtgttacagcaagtggagtac

SEQ ID NO: 559807 - DNA, 614 bp, Homo sapiens
ttcagataaaagttttttatttcccaaatctcaagacctggattcaaaatttggagctacagatttagggcctgaatggctggagttgcagcaggtgttaactgcacatttgtgggcattttggcaagaggaggaatgggaaagtggagattctcatgtctatatgtctaatcaatgcacagatgctactgtgattgggtttctgggctccatagtcactgaattgctttcaggtttgaagataaaagagtcattgaaaaaggtgaaatgactgattgctgcccgtgaagtttgtagaaatttggtctagcttctctagaaatgactgtagaggactacagataacaaataggctgagacacaattctgcctgcatatttargggacagcatgcactgtgctgtgcacgtgtctgttaactggaagcctgagagaaaaagtcccctctagagtaaattctggttggcaccttatgtgtttatatcatgtctggtaattctagacagtgtttggaaacaataattaaaagaaaatttttctccagtcccagagaaactccacaataatagaacagaaagaaaatgcttttattacacaattaaacttgaatgtga

SEQ ID NO: 559808 - DNA, 392 bp, Homo sapiens
ttattcatacacatgctggaattattggtgcagacatttaaatacattttctttgagaaagtccttttttttttttttttggatggagtttccctcttgttgcccaggctggagtgcaatggtgcaatctcagctcacaacaacctctgcctcctgggttcaagcaattctcctgcctcagcctcccaagtagctgggattacaggcatgcaccaccacgcccagctaattttttttatttttagtagagacggggtttctccgtgttggtcaggctggtcttgaactcctgatctcaggtgatctgcccgccttggcctgccacagtgctgggattacagtcgtgagccaccacagctggcctgggaaastccattctttttttttttttt

SEQ ID NO: 559809 - DNA, 193 bp, Homo sapiens
tttttgcctcttggtttagtggtatatgaagcccaaaagggccaagtggcagtctcctgttccaatgcattagaaccatagctgtgccccctgggggrggcattttcctctagggtctaagaagatctccagaccagcagtgctctgagttgctgggaataaaagcaaacttctgtcagtggagttaattcca

SEQ ID NO: 559810 - DNA, 193 bp, Homo sapiens
tttttgcctcttggtttagtggtatatgaagcccaaaagggccaagtggcagtctcctgttccaatgcattagaaccatagctgtgccccctggggggggcattttcctctrgggtctaagaagatctccagaccagcagtgctctgagttgctgggaataaaagcaaacttctgtcagtggagttaattcca

SEQ ID NO: 559811 - DNA, 446 bp, Homo sapiens
tgcccccacctgcctccccgacagtgagatgactgcaatgcagggatgatgaccatgatgggagagatgcagctagagggaatccatccccagaggaaagaagtcagccttgcacttatcagccccaagttcatggctcatgttcaattgaaagtaatgagtattgatatgccctgtgctactgaamgaattagagaggagagaagctcaggatgaccctctcaatacaaagaaagatctcccctgaaatctcactttaagggaagaacccacatgtgcccacccagttttcgcaaaccatgttattatacttcttggagcaggactcgttcctttactgcaaacagaatggcgtggcctttgaatccagattatgccatcccagcagtgggtggtcaaaagggaaaggttttgttcttgtgaatcagaaggaagcaggccaacat

SEQ ID NO: 559812 - DNA, 565 bp, Homo sapiens
tttatttaacatatataatagaaattaagaaataaaattatctttatttgcaggtaacataattgtctacatagaaaatctaaggaatatacaaagaagctactagaagtaataagtgagtttaacaatgtcacagaatatatcaataaacaaaataacaactgtatttacatattgtagcaacaaataattggaaattaaagctttataatataatytattgtactaacaatatcaaatatacataaagataaatttaacaaaatatgtgtgggactagtaaacagaaattacaaaacattgcaaaaaaaagacctgacaaaaaatatatactatcttcatagacttattatttttaacttgttagttctccccgagttaagttacaggtttaaaacaatatcaattaaaattctagcaagctttttaaattaatgtaaattgacaaagtgattctaaaatttacttgtgaaggcaaaggccctagaaaagccagaacaattttataaagaacaagtttagaagtgtaagaataccttatctcaaggtttaatacaaagtaaca

SEQ ID NO: 559813 - DNA, 537 bp, Homo sapiens
cctcctgggttcaagtgattctcctgccccagcctcccgagaacctgggactacagatacccaccaccacgcccagctaatttttgtatttttagtagagatggggtttcaccatattggccaggctggtctcgaactccatacctcaaacgatccacccaccttggcctcccaaagtgctgggagtacaggcatgagccactacacccagcctttgctcactttttgatggaattgttttttttcttgtaaatttttaaaagtttcttgtaaattctgratattagatctttgtcagatgggtagattgtaaaatttttctcctattctgtaggttgcctgttcactctgctgatagtttccttttctgtgcagaagctctttagtttaattagctcttatttgtcaattttgggtttagttgcagttacttttggcatttttgtcatgaagtctttgccgatgcctatgtcctgaatggtattgcctagattttcttctagggtttttatggttttgagttttacatttaagtct

SEQ ID NO: 559814 - DNA, 537 bp, Homo sapiens
cctcctgggttcaagtgattctcctgccccagcctcccgagaacctgggactacagatacccaccaccacgcccagctaatttttgtatttttagtagagatggggtttcaccatattggccaggctggtctcgaactccatacctcaaacgatccacccaccttggcctcccaaagtgctgggagtacaggcatgagccactacacccagcctttgctcactttttgatggaattgttttttttcttgtaaatttttaaaagtttcttgtaaattctgaatattagatctttgtcagatgggtagaytgtaaaatttttctcctattctgtaggttgcctgttcactctgctgatagtttccttttctgtgcagaagctctttagtttaattagctcttatttgtcaattttgggtttagttgcagttacttttggcatttttgtcatgaagtctttgccgatgcctatgtcctgaatggtattgcctagattttcttctagggtttttatggttttgagttttacatttaagtct

SEQ ID NO: 559815 - DNA, 430 bp, Homo sapiens
gcgcctgtaattccagctacttgggaggctgaggcggaagaatcgcttgaacctggtaggcagaggttgcagtgagctgagattgcaccactacactccaawgtgggcaacaagagtgaaactccatctcaaaaaaaaaaaaattctttcaatcaatagacatgaaatgtttttaaatttatttttgtcttctccaatttttttttattgatgtatcttttatttgaaagatatttaagctccttggttaaatttgttctcagaaatttattattttagtgctattgtaaataagattgctttctgtctcttttttgtcagatagtttgtttaaagtgtatggaaccataacttacacttgtatgttaattttctattttgctaaattattgagtgtaattattactttaattaggttttaaatgtactg

SEQ ID NO: 559816 - DNA, 489 bp, Homo sapiens
agcaacatccacaaatcacagtgaaaataggaacccgtaatgctgtggtcatctgacttgtcattggagccaaaaagccacaggcaaacattctcaaagagcctggaagaactcagggagtgccgcagccatgtgcgtgtctttaaaatctctgtgatagttacatccgggcaaagtgaatcacaaggaaaaggaaactggatattggggttgggggagggaagatgcagggaaagaargggagggggagggaatcctcacactagtgcaaaacccatggaaaggcagctttaaagggaaaaccaaatatgcttcaagttgtccttaaaatataaaaatcaagagacaggcattctctagcatgaaggacacaggcaacacagaacccatgatgcttgaaaagaaagaaaaaccatttcacaataaaatagagcctcaacatagaggaaaaagccttggaatggaaaagtcatgaaaaaaatgatgaga

SEQ ID NO: 559817 - DNA, 551 bp, Homo sapiens
gattctgcccctagaagacactggcaataccaggagacatttttggttgtcacaactatatggaggggcattactggcaactaatggatagatgccaagtgtgctgttcaacrtgctatgatgcacacggcaggcctccacaacaaaccattatccagcttcagatgcccacagtgcccagatcgaggaaccctcatccaggggctgagaaccgtatttttgcagaagggaggtataaggatgggttggtggagaatggggaaggaaggtgtgtgtccagtaagagaaataaggcctgcacaggctggaggggagagtgagagagaaagggaggcggagagatacacgatgagggagacaggctggaacagaaagtagagacgaagattcgagatgtggagaggaagggtcacagacccccccgaaatgatgtgtggacaacaggaatctggaagaggaagatggagtggagagtgacaaatggggtctaaaggttgaacttggaggccaggcatggtggctcacgcctgtaatcccaacactttggaggc

SEQ ID NO: 559818 - DNA, 501 bp, Homo sapiens
ttgtgtttagttttcctgagcaaagcatttacaagctttggagataaaattttccccctttaaaaaataattggccaggtgcggtggctcaagcctgtaatttcagcactttgggaggccgaagcggatggatcacctgcggttaggagttcgagaccagcctggccaacatggcaaaaccccgtctctactaaaaatacaaaaattagcagggtgtggtggtgggcatctgtaaacycagctactcaggaggctgaggcagaagaatcgcttgaacccaggaggcggaggttgcagtgagccagggatcatgccattgtactccagcctgggtgacaagagcaagactcggtctcaaaataaataaacaaataaattaataataataattgtgccaggtatggtggctcatgcttgtaattccagcactttcacaggctgaggtgggaggatcacttgagcccaggagttcaagaccagcctgggcaacaatgtaagacc

SEQ ID NO: 559819 - DNA, 501 bp, Homo sapiens
ttgtgtttagttttcctgagcaaagcatttacaagctttggagataaaattttccccctttaaaaaataattggccaggtgcggtggctcaagcctgtaatttcagcactttgggaggccgaagcggatggatcacctgcggttaggagttcgagaccagcctggccaacatggcaaaaccccgtctctactaaaaatacaaaaattagcagggtgtggtggtgggcatctgtaaactcagctactcaggaggctgaggcagaagaatcgcttgaacccaggaggcggaggttgcagtgagccagggatcatgccattgtactccagcctgggtgacaagagcaagactcggtctcaaaataaataaayaaataaattaataataataattgtgccaggtatggtggctcatgcttgtaattccagcactttcacaggctgaggtgggaggatcacttgagcccaggagttcaagaccagcctgggcaacaatgtaagacc

SEQ ID NO: 559820 - DNA, 460 bp, Homo sapiens
aacctccgcctcccgggttcaagtgattctcctgcctcagccttccaagtagctgggactataggtgcacaccaccatgcccagcttatttttatatttttagtagagacggggtttcaccatgttggccaggctggtcttgaactcccgacctcgtgatccacctgcctcagcctcccaaagtgcrtgctgggattacgggcgtgagtcaccgcacccggcctttttttttttttttttcttagagacaaggtcttgcttgattgcccaggctggagtgcagtggtgtaattacggctcactgcaggcttgaactcctgggctcaagcagttctcccatctcagccccacaagtggctgggactactggtgcgcaccaccacaccaggctaactttataaattattattattattattattgtagagactaggtctcaccttttttttttttccccccc

SEQ ID NO: 559821 - DNA, 460 bp, Homo sapiens
aacctccgcctcccgggttcaagtgattctcctgcctcagccttccaagtagctgggactataggtgcacaccaccatgcccagcttatttttrtatttttagtagagacggggtttcaccatgttggccaggctggtcttgaactcccgacctcgtgatccacctgcctcagcctcccaaagtgcgtgctgggattacgggcgtgagtcaccgcacccggcctttttttttttttttttcttagagacaaggtcttgcttgattgcccaggctggagtgcagtggtgtaattacggctcactgcaggcttgaactcctgggctcaagcagttctcccatctcagccccacaagtggctgggactactggtgcgcaccaccacaccaggctaactttataaattattattattattattattgtagagactaggtctcaccttttttttttttccccccc

SEQ ID NO: 559822 - DNA, 523 bp, Homo sapiens
tctacaataataataataataataatttataaagttagcctggtgtggtggtgcgcaccagtagtcccagccacttgtggggctgagatgggagaactgcttgagcccaggagttcaagcctgcagtgagccgtaattacaccmctgcactccagcctgggcaatcaagcaagaccttgtctctaagaaaaaaaaaaaaaaaaaaaggccgggtgcggtgactcagcctgtaatcccagcatgcactttgggaggctgaggcaggtggatcacgaggtcgggagttcaagaccagcctggccaacatggtgaaaccccgtctctactaaaaatacaaaaataagctgggcatggtggtgtgcacctatagtcccagctacttggaaggctgaggcaggagaatcacttgaacccgggaggcggaggttgaagtgaaccaagatcatgccactgcattccagggtggcaacagagcaagactctgtcaaagaaaaaaaaaaaaaaaaaaagaaaaaaaaagccc

SEQ ID NO: 559823 - DNA, 546 bp, Homo sapiens
atgagtgagtttgataattttttgtgaccttcaaacaagtgagaaacccaaaaccttgcctcttgccctaagcctaagagtcaacacatcttctattggctgggttcattgtgcaagtgagttgagttcagaaatttgtcaccattcaacctgtggctgaatccatatatgacagtataatttcttttttttttttttttaatttatttttttattgataattcttgggtgtatctcacagagggggatttggcagggtcatgggacaatagtggagggaaggtcagyagataaacaagtgaacaaaggtctctggttttcctaggcagaggaccctgcggccttccgcagtgtttgtgtccctgattacttgagattagggattggtgatgactcttaacgagcatgctgccttcaagcatctgtttaacaaagcacatcttgcaccgcccttaatccatttaaccctgagtggacacagcacatgtttcagagagcacagggttgggggtaaggtcacagatcaacaggatcccaaggcagagg

SEQ ID NO: 559824 - DNA, 546 bp, Homo sapiens
atgagtgagtttgataattttttgtgaccttcaaacaagtgagaaacccaaaaccttgcctcttgccctaagcctaagagtcaacacatcttctattggctgggttcattgtgcaagtgagttgagttcagaaatttgtcaccattcaacctgtggctgaatccatatatgacagtataatttcttttttttttttttttaatttatttttttattgataattcttgggtgtatctcacagagggggatttggcagggtcatgggacaatagtggagggaaggtcagcagataaacaagtgaacaaaggtctctggttttcctaggcagaggaccctgcggccttccrcagtgtttgtgtccctgattacttgagattagggattggtgatgactcttaacgagcatgctgccttcaagcatctgtttaacaaagcacatcttgcaccgcccttaatccatttaaccctgagtggacacagcacatgtttcagagagcacagggttgggggtaaggtcacagatcaacaggatcccaaggcagagg

SEQ ID NO: 559825 - DNA, 397 bp, Homo sapiens
agatctctcctttttcccaaagaagcactgatactgtccctaaggatgcaaagagggcttggaaattgaaggctcttcccagggagctatatctcttccttccaatatgttccaaatgcattgcttcttccttttcatcccggtaacagaacactgactcttcagtctcctaaatgtgccaccacctctaaaaatgacatttgggagtgtgtcctcatatctgagcaaaaccccaaagcaagccagttctccaaaactgggtcacttttgggtggacctgggtcaaacagccagtggtttccacactcctgaatttccttctgggcagaagagaatcttgcatctaagrgcagaaaagaatcttgcatctaagtacctatccctggactctgatgct

SEQ ID NO: 559826 - DNA, 422 bp, Homo sapiens
gaattcgagactagcctggccaacatggtgaaaccctgtctctactaaaaatacaaaaaattagccgggcatggtggcaggcggctgtaatcccagctactcgggaggctgaggcaggagaatcgcttgaaccygggaggcagaggttgcagtgagccgagatcacaccactgcactccagcctgggcgacaagagcaaaactccatctcaaaataaaaacatttaaaaagtttgaacagccaccgttcttctttccccaagcctcagtttcccaatctgtaaaatgagcacctacagccccgggtcatcctgcagggatcctgtgccttagaaaatgctcttgaaggaaagcactgagcatggcaccctgcacacggagggtgcctgatcagtatcatctggtgaacctccaaggatttca

SEQ ID NO: 559827 - DNA, 572 bp, Homo sapiens
agtttattttacacattaacatgtgagcagtattttctaactgaatatgtcttttccatctgaaaaatttacacaacttattctgtatgatgtaaatgtagcactcaaaartgtacatgttagtgttaatgccctcagttttatacttcatcatccaaaaaagtatcatctatacctcgatgttgtggatcttatgccactctcttttctcagagttagagaatacattagagaatacttctgtgctgaaagttatttattaaatatatcagtcactcctataagtaagaaccagttctctttactcttgttttaccttgagtcaaattaaaaattctgtttatggccacttggtaaatatgtatgtgtgtttgtatgtttttcagggagtgttgacatttagggatgtggccttagaattctctctggaggagtggcaatgcctggacaccgcacagcagaatttatataggaatgtgatgttagagaactacagaaacctggtctttgtgggtgaggataacttcaatatacaattccctaatataccctataaattttatttctctttt

SEQ ID NO: 559828 - DNA, 572 bp, Homo sapiens
agtttattttacacattaacatgtgagcagtattttctaactgaatatgtcttttccatctgaaaaatttacacaacttattctgtatgatgtaaatgtagcactcaaaagtgtacatgttagtgttaatgccctcarttttatacttcatcatccaaaaaagtatcatctatacctcgatgttgtggatcttatgccactctcttttctcagagttagagaatacattagagaatacttctgtgctgaaagttatttattaaatatatcagtcactcctataagtaagaaccagttctctttactcttgttttaccttgagtcaaattaaaaattctgtttatggccacttggtaaatatgtatgtgtgtttgtatgtttttcagggagtgttgacatttagggatgtggccttagaattctctctggaggagtggcaatgcctggacaccgcacagcagaatttatataggaatgtgatgttagagaactacagaaacctggtctttgtgggtgaggataacttcaatatacaattccctaatataccctataaattttatttctctttt

SEQ ID NO: 559829 - DNA, 572 bp, Homo sapiens
agtttattttacacattaacatgtgagcagtattttctaactgaatatgtcttttccatctgaaaaatttacacaacttattctgtatgatgtaaatgtagcactcaaaagtgtacatgttagtgttaatgccctcagttttatacttcatcatccaaaaaagtatcatctatacctcgatgttgtggatcttatgccactctcttttctcagagttagagaatrcattagagaatacttctgtgctgaaagttatttattaaatatatcagtcactcctataagtaagaaccagttctctttactcttgttttaccttgagtcaaattaaaaattctgtttatggccacttggtaaatatgtatgtgtgtttgtatgtttttcagggagtgttgacatttagggatgtggccttagaattctctctggaggagtggcaatgcctggacaccgcacagcagaatttatataggaatgtgatgttagagaactacagaaacctggtctttgtgggtgaggataacttcaatatacaattccctaatataccctataaattttatttctctttt

SEQ ID NO: 559830 - DNA, 572 bp, Homo sapiens
agtttattttacacattaacatgtgagcagtattttctaactgaatatgtcttttccatctgaaaaatttacacaacttattctgtatgatgtaaatgtagcactcaaaagtgtacatgttagtgttaatgccctcagttttatacttcatcatccaaaaaagtatcatctatacctcgatgttgtggatcttatgccactctcttttctcagagttagagaatacattagagaatacttctgtgctgaaagttatttattaaatatatcagtcactcctataagtaagaaccagttctctttactcttgttttaccttgagtcaaattaaaaattctgttyatggccacttggtaaatatgtatgtgtgtttgtatgtttttcagggagtgttgacatttagggatgtggccttagaattctctctggaggagtggcaatgcctggacaccgcacagcagaatttatataggaatgtgatgttagagaactacagaaacctggtctttgtgggtgaggataacttcaatatacaattccctaatataccctataaattttatttctctttt

SEQ ID NO: 559831 - DNA, 497 bp, Homo sapiens
aaaaccctgtaaatgtaataaatttagaaaaaaacatttattcaaaaactacaggttagaaaattccagagttcatattaaaatatttttgcatatacagtaaatagaaaaaaaatttaattcaatggtaagtctatgtaaatatcagagaatttacattagaaatatataaggcaatgacacttcagactttacactgaatcagagttctgagtttagaaaataatccaaaactaaacttggtagaaaaattatttgtttataactttaaaagagtagaagattytttggagagttacaagtatacttttttttagaaagattacagatttttttaaaagtaaataactgtcaaattacttcatacaaataatgttgtaattaactcaaattacttcatgttaatgttgtaattaactctcaaattacttcatgctaaagaaattagtttttctttttcttttttctttttctttttttttagatggagtcttgct

SEQ ID NO: 559832 - DNA, 430 bp, Homo sapiens
atgccgagaaaagtgaccactacaaacagagtcagggtcaccgtcaggcgatgaactccagggatttaatgtttgatcccatcattctggggagaaattaattcaaaggaggtctggtagcagagaagtacccaccaacggacacgccctgacctcggggttttctggttcactctctggcccactgggggtgaactttctgatgttgagttctgtcytgataagggagaagatatctacatgttgacctctcctctccctgcctggactctggattctaggttgaagtattatttatgctgaggatttacaatgtctgatatatctcgctgagccttctgcacagagatacactgggagtggaggctaatcatgtcaaaggagaagcaccataagcccacactccagcctatcagagtggattaaaggt

SEQ ID NO: 559833 - DNA, 262 bp, Homo sapiens
agagataaaccttgttaaattttttatgcatttctttacaggcctgtgggcatttagatgtcttactattttttcaaaattgggattcaactatacatatagtttttatatcctgcccttttttttcctcccccttaacatattgtaaacattttctatgtccttgatkgttttcagactttttttggttcgattttaagaattcacagagttgcattttatagatgtgttaaataaaagttataggaggctattgttttcg

SEQ ID NO: 559834 - DNA, 395 bp, Homo sapiens
tcagtgacatgagccagtagaggctctttgtttttcttttctttttttctttcttgcttttctttctttctttctttcttttcttagcctgactctgttgcccaggctggagygcagtgacaggattagggctcactgcagcctggaactcgtgggctgaatcgatcctcccgccttggcctccacctcccaagtatctgtgactaaaggcacacgccaccacgctggctaatttttcatttttttgtagagatgggggtctcactatgttgcccaggctgatctgaacttctggcgtcaagcgatcctcccatctcggccttccaaagtcctgggattgcaggctttgccaccaggcccggcctatagatgctcattattattttcagcgggag

SEQ ID NO: 559835 - DNA, 569 bp, Homo sapiens
tccagcctgggcaacagaatgagactctgtctcaaaaacaaaatgaaaacaaaagcaagcaaacaaaaaaagaaataggctatcagtggtagggaatgcactatgtcatgcaatatcactgatgtttgagaggtgaggggtggggggagttagtatgcacaagaacagtagaattgagcggttgttgctaaagacaacatttattgaggctttsatgagagaaaatgacagagagaaaatgcatcttcaaatctcaggaagaaatagcctagaatgtaacaaaaggaattcttcagattctcctccagattatcctatgatgctctaggaagacatgccacctaagtgggtttccccaaatgaccctgtggcctttatatgtgtgacatcaaaatttctagctgctaaagcaaacatattaaaaaagaaaatcagtcaagtcagtcattcagccttatggacctaaacaaaaaggatattgaagaatctttgactttacagcatgtggttttgtcaaagagatagttccactgtcacggggcttacagcttttcccaattcaattaatt

SEQ ID NO: 559836 - DNA, 569 bp, Homo sapiens
tccagcctgggcaacagaatgagactctgtctcaaaaacaaaatgaaaacaaaagcaagcaaacaaaaaaagaaataggctatcagtggtagggaatgcactatgtcatgcaatatcactgatgtttgagaggtgaggggtggggggagttagtatgcacaagaacagtagaattgagcggttgttgctaaagacaacatttattgaggctttgatgagagaaaatgacagagagaaaatgcatcttcaaatctcaggaaraaatagcctagaatgtaacaaaaggaattcttcagattctcctccagattatcctatgatgctctaggaagacatgccacctaagtgggtttccccaaatgaccctgtggcctttatatgtgtgacatcaaaatttctagctgctaaagcaaacatattaaaaaagaaaatcagtcaagtcagtcattcagccttatggacctaaacaaaaaggatattgaagaatctttgactttacagcatgtggttttgtcaaagagatagttccactgtcacggggcttacagcttttcccaattcaattaatt

SEQ ID NO: 559837 - DNA, 569 bp, Homo sapiens
tccagcctgggcaacagaatgagactctgtctcaaaaacaaaatgaaaacaaaagcaagcaaacaaaaaaagaaataggctatcagtggtagggaatgcactatgtcatgcaatatcactgatgtttgagaggtgaggggtggggggagttagtatgcacaagaacagtagaattgagcggttgttgctaaagacaacatttattgaggctttgatgagagaaaatgacagagagaaaatgcatcttcaaatctcaggaagaaatagcctagaatgtaacaaaaggaattcttcagattctcctccagattatcctatgatgctctaggaagasatgccacctaagtgggtttccccaaatgaccctgtggcctttatatgtgtgacatcaaaatttctagctgctaaagcaaacatattaaaaaagaaaatcagtcaagtcagtcattcagccttatggacctaaacaaaaaggatattgaagaatctttgactttacagcatgtggttttgtcaaagagatagttccactgtcacggggcttacagcttttcccaattcaattaatt

SEQ ID NO: 559838 - DNA, 569 bp, Homo sapiens
tccagcctgggcaacagaatgagactctgtctcaaaaacaaaatgaaaacaaaagcaagcaaacaaaaaaagaaataggctatcagtggtagggaatgcactatgtcatgcaatatcactgatgtttgagaggtgaggggtggggggagttagtatgcacaagaacagtagaattgagcggttgttgctaaagacaacatttattgaggctttgatgagagaaaatgacagagagaaaatgcatcttcaaatctcaggaagaaatagcctagaatgtaacaaaaggaattcttcagattctcctccagattatcctatgatgctctaggaagacatgccacctaagygggtttccccaaatgaccctgtggcctttatatgtgtgacatcaaaatttctagctgctaaagcaaacatattaaaaaagaaaatcagtcaagtcagtcattcagccttatggacctaaacaaaaaggatattgaagaatctttgactttacagcatgtggttttgtcaaagagatagttccactgtcacggggcttacagcttttcccaattcaattaatt

SEQ ID NO: 559839 - DNA, 489 bp, Homo sapiens
cacccttctttttctttatttagaggcttgttttgctttgtaggaatcctactgcacacacaatctcctgtttagtattcaattctcattcatatgatttttccatgccattatcatcatctttataaccatcctctttaatggttatgtaatattctattgagctgcctaacctgttttcatttkctggaaatctaacctatttgcagagcatttaggagagtcaggcatgtggcaactacttcctaagcgttggctattattactatttcacatacaatgcataaaacatatacaatattcatatatcatttaatataatgtattttgtacatattttcctgtatttacctctgtttaacttctcagatgtgtattacttccccaaagtgcatgactatttttatgcctttggatactgtattagtccattttcaaactgctatgatgaaatacccaagactgggtaatttataaagaaaaagagtt

SEQ ID NO: 559840 - DNA, 371 bp, Homo sapiens
ctgtgcaagcaaccccccgtgacactagtttccttatgtaacaaacccgcacgtgcacccctgaacctaaaaaagacaaaaagaaaaatcagatgccctagaagagctggtaagcaraagagagctggatcatcatcactcacaaggcgcctgctgcctcctggcacaagccagagcaaaccatcagcggcgggattcataaataagctccagtgaagccccagtgaaggctggatgaaagaaaattacaagtgggttatgaacggggggaaaataactacagctctaaatagggataggaaacagctgaatttagagcaaaggtaaacagcctaatctcgatagtctcgtctttctaatttggactagaa

SEQ ID NO: 559841 - DNA, 371 bp, Homo sapiens
ctgtgcaagcaaccccccgtgacactagtttccttatgtaacaaacccgcacgtgcacccctgaacctaaaaaagacaaaaagaaaaatcagatgccctagaagagctggtaagcaaaagagagctggatcatcatcactcacaaggcgcctgctgcctcctggcacaagccagagcaaaccatcagcggcgggattcataaataagctccagtgaagccccagtgaagsctggatgaaagaaaattacaagtgggttatgaacggggggaaaataactacagctctaaatagggataggaaacagctgaatttagagcaaaggtaaacagcctaatctcgatagtctcgtctttctaatttggactagaa

SEQ ID NO: 559842 - DNA, 557 bp, Homo sapiens
agcagtctagaagcacgaggtcctatccctcattctcagtgaaacaaaaccactctgtaaatgcaaatgaagattttgcaatttgaagcaaaattgtataggtttccaataataatgtctagaaaaatctttaaaatttggtaagttaagctggtatgaagtcaaaagacatagagactgacagactctgcttatgtggggtttcctaaatatagttttaacagggactatctacaggttcaggcatcagttttattacttcacaatgatgagagtgaaaaaatcacttaccctgaccaagcatgtaagacaatgatttctagatcagatgatagctattaatttttcatgggagataaattgcacctctctacccattttctgaagggcagggcactccagagaccaaacaacaaaccaaaracccggggagtgaactataaaggagaaattcagcatggcaaaaggagatttacatcaaattaacatatcttgagatgttattcttcttccctgcaggggtatttctgtctagacacctaggaatggtcattaga

SEQ ID NO: 559843 - DNA, 557 bp, Homo sapiens
agcagtctagaagcacgaggtcctatccctcattctcagtgaaacaaaaccactctgtaaatgcaaatgaagattttgcaatttgaagcaaaattgtataggtttccaataayaatgtctagaaaaatctttaaaatttggtaagttaagctggtatgaagtcaaaagacatagagactgacagactctgcttatgtggggtttcctaaatatagttttaacagggactatctacaggttcaggcatcagttttattacttcacaatgatgagagtgaaaaaatcacttaccctgaccaagcatgtaagacaatgatttctagatcagatgatagctattaatttttcatgggagataaattgcacctctctacccattttctgaagggcagggcactccagagaccaaacaacaaaccaaaaacccggggagtgaactataaaggagaaattcagcatggcaaaaggagatttacatcaaattaacatatcttgagatgttattcttcttccctgcaggggtatttctgtctagacacctaggaatggtcattaga

SEQ ID NO: 559844 - DNA, 612 bp, Homo sapiens
ctcattttccacttccccagtccccttcccctcagttccccagttgtctttgcttctaaacagtgcatgtcttttgacttgtaaacattgatttagatcctgcttaatttcataatcttttcaggccactactgttcacttagacgatatccccttagcttggatttagccatgaaccattgatcatttacttggtttctcttggagttcaatgtagtcattctggtttagttcaaaaggacattatgtttgggtaagagaatgtattttgttatacccttgcttgttactactccctctaccagttctgctcttcctttctcccttgcatcagtgtaaggctatgtctttaagcccaacactttccacagcatcacgcttcctctaccattgtaagttcacatgtacacttagccatcactctctcccatgtgctacaacactaggcacatgctgctattgcagcactctccatatttgggagctcctttgagacaataaccaactggttaatgttcatccatcctacttaatatctactatagttcttaacactcartaacacacagttggcaaacatctgttaattgttgtcatattgcaagatgtaaa

SEQ ID NO: 559845 - DNA, 645 bp, Homo sapiens
tgcctttttcagaatgaccctatagttgaaatcatatattatgtagctttttcaggttggcttttttcacttaataatatatatttaaggattgtttgtcttttcatggattgatagggcatttctatttaatgctgaaaaaatattctgtagtttaaaggtacgacaatttattttactattcacttactgaaggacgtcttggctgcttccaagttttgacaaccatgaataaagctgctataaacatcaatgtacaggtttttgtgtgaacataagttttgaactcatttaggtaaattccaagaggtacaattcatgggccatatgctaagagtatcttcagctttcgaagaaactgccgaactgtcttccgaagtggctacacaatttgcatttccaccaacattgtgtaatagttcttgttccacatccttgccagcatttggtgtttcyagtgttttgcattttggtgatcctaacaggtacattgtagaggtacctcattgttttaatttgcatttccctaatgacacatgatgtgagattttcttatgcttatttgccaaatgtatatcttctttggtgagatatatgtttgggtgttttgcacatttttttaatcaacttatttttttattgttg

SEQ ID NO: 559846 - DNA, 578 bp, Homo sapiens
gaaagccagtaaggaaacatgggccttcaactatacttcagaccagatacaactaacagacatagatggaggactccacccaacagaatacattcttctcaaatgcacacagaactttcttcaggataggctatatgttaggtcacaaaactagttttgacatgcttaataagatcaaaattatatgaaattattttctgaccacaagtataggaaactagacatcaataagagaagaaatcatggaaaaagttaacaaatgtgtagaaattaaacaatattctcctgagcaactactaggtytaagaagaaattaaaggagaaattttaaaatagcttaagacaaataaaaatgaaaacaacatatcaaaacttatgggatgcagcaaaaacagttctaagagggaagtttatagcagcaagtgcctacatcaaaatagaaaaaaaaaaaacaaaaaacctcaaatagacaacctaatgttatacccaaggaaatggaaaaagaaccaactaagcccaaagttagcagaagaaagaaaataataaagatcagaacagaaataagaaaatacagaata

SEQ ID NO: 559847 - DNA, 578 bp, Homo sapiens
gaaagccagtaaggaaacatgggccttcaactatacttcagaccagatacaactaacagacatagatggaggactccacccaacagaatacattcttctcaaatgcacacagaactttcttcaggataggctatatgttaggtcacaaaactagttttgacatgcttaataagatcaaaattatatgaaattattttctgaccacaagtataggaaactagacatcaataagagaagaaatcatggaaaaagttaacaaatgtgtagaaattaaacaatattctcctgagcaactactaggtctaagaagaaattaaaggagaaattttaaaatagcttaagacaaataaaaatgaaaacaacatatcaaaacttatgggatgcagcaaaaacagttytaagagggaagtttatagcagcaagtgcctacatcaaaatagaaaaaaaaaaaacaaaaaacctcaaatagacaacctaatgttatacccaaggaaatggaaaaagaaccaactaagcccaaagttagcagaagaaagaaaataataaagatcagaacagaaataagaaaatacagaata

SEQ ID NO: 559848 - DNA, 481 bp, Homo sapiens
atccataggaaagacataaaaatcatgaatacaggtatacttaataatagagcatcaaaatgtatgaagcaaaaaagaacagaattaaaggcagctatagattatttcattattatagagataccaacactcttccctcagcatttgatagaagagctaggcaaaattcaaaaaagacataagtgatctgaacaacactatcaaccacctgaaccaaaataatacccacaactatagaatacacatgattttcaagtgtacatgctatgttcaccaaaaaaggaaacaaaccatacaaagtatgttttctgaccacaatggaattaagtaagaaatcagtagctatamgatatctaataatttactggaggcaaattagagggatatgaaaagataaacttactgtaaggtggactgaaagatagtactgttgaaatttagtccagatattattacatggaaaatatttatcaaaataata

SEQ ID NO: 559849 - DNA, 584 bp, Homo sapiens
taaaatgaggacattaaaatctgatatcttaagattcctttgaattttgagactacatgtcttttttatatgactgaacttctaagtataaagactgcagagactctttgattagataaaatgttaagcattttaaaaaacattctaccttaaaaataccattttactttttgtaccatttacatttcataatttctcccatttttgtgattttcacatttaatatgttgtatataatgctataaaaatagattgaagttttaaggaaagttcattattattaaaagtttagtactctgagtctgggctttctgacaataaaatacaccagagcaaaagcccaaggaagtacaacaaagaggtatactaattgacaaaatagctgctgcaacatgccacaggcacttcaggcctaacatttctgaaaaagcatggaacatgtggattcccgggaaaaaactgcctcagatcatttgtaagaggaagaaatagtaagtgacctctctaaccaaaactgrctagtagatactacatctttcccgtggcatttttgtttgtttgcgtgttattgagaacagggcaag

SEQ ID NO: 559850 - DNA, 553 bp, Homo sapiens
cccctatctccctttgctgactctctttttggactcagcccacttgcacccaagtgaaataaacagccttgttgctcacacaaagcctgttggtggactctcttcacacagactcacttgacatttatagaacacaaaattaagaatagygaatatgaaaaggttcactaataagaatttaaacaaaacaagaaagatttttaagattgctaaagacaaacgatttataatattcagtgttaggaggtgtgtggatatacaggcatacttagttttacatttttagaaggtaagacttatttagaaggtaagaagttgtccataccccttgattcaacaacttagcttcttggaattatccatatagaaatgcttacataaatgtttgaacgtatgtacaaagaagcactatttatttaaatttggaaacttgaatgcctaacatttggaatttaaatttttatatgtctattcattaaaataccacccagtttttagaaactaagagatgctaaaggtatattgagtaaaataaaaagttacaaaagatatg

SEQ ID NO: 559851 - DNA, 553 bp, Homo sapiens
cccctatctccctttgctgactctctttttggactcagcccacttgcacccaagtgaaataaacagccttgttgctcacacaaagcctgttggtggactctcttcacacagactcacttgacatttatagaacacaaaattaagaatagcgaatatgaaaaggttcactaataagaatttaaacaaaacaagaaagatttttaagattgctaaagacaaacgatttataatattcagtgttaggaggtgtgtggatatacaggcatacttagttttacatttttagaaggtaagacttatttagaaggtaagaagttgtccataccccttgattcaacaacttagcttcttggaattatccatatagaaatgcttacataaatgtttgaacgtatgtacaaagaagcactatttatttaaattkggaaacttgaatgcctaacatttggaatttaaatttttatatgtctattcattaaaataccacccagtttttagaaactaagagatgctaaaggtatattgagtaaaataaaaagttacaaaagatatg

SEQ ID NO: 559852 - DNA, 599 bp, Homo sapiens
gcaacctcttggctttctgcaagttaagatctgtgctaacaaagctataaaatgttgccatggataccagtaaatagcaagtcaaggaaagttacattcttaagacagaagacctttaggtgagcttgttagacaatgccatcacttaacaatgtaagtcacacagttatcttttcccatacttccaagttttggataataacattttcttattatttggcactaaagttgagtcaaaagtagaggaaaaagcatatattttagagatcctgctaagaaagcatttataagactaatatctacctcattgttaagaaaattaaataagttattacatgcaaagcccttggaagagcaccttctccaatattccctgtcattctcttacattatcctgacataatttgtttggaaagtcttctaggagaacatatttttagcaaagtacattcatattcctatattcaataatatctgagtaactactatgtctataatgttacatgataatwttcttcaaggatttttatcttatttctaagacttgaaactgttaaaggtttaacacatgaaataataaaagaatacaatattgtata

SEQ ID NO: 559853 - DNA, 589 bp, Homo sapiens
gttttgtagttttccttgtagaggtctttcacctccttggttaggtatattcctaagttttttttgtttgtttgtgtgtttgttttttacacctttttttataggattgttgttcttttgttttgttttgtttttttcttgctgatttgtttgagttacttatagattctggatattagttctttgtcagatgtacagattgtgaagattttcycctgctctgtgggttgtctgtttactctgctgatagttccttttgccatgcaaaaattctttagtttaattaagttccagctatttatctttgtttttattgcatttgcttttgggttcttggtcataaaatccttgcctaagccaatgtcttgaagagtttttccaatgttatcttctagaatttttatactttcagatcttagatttaagtccttaatccatcttgagttgatttttgtataaggtgagagatgaggatccaatttcatcctcctacatgtggctagccaattatcccagcaccatttgttgaaaagggtgtgctttccccaccttatgtttttgtttgctttgtcaaagatcagttggctct

SEQ ID NO: 559854 - DNA, 387 bp, Homo sapiens
cacctcccgggttaaagcaatcctcctgcctcagcctcccaagtagctgggattacaggtgcccaccattatgcctggctaattttttgtatttttagtagagacagggcttcaccatattggtcaagctggtcttgaactcctgacctcaggtgatccacctgcctyggcctcccaaagtgctgggattacaggcgtgagccaccacacccggaccaattttatgatatttctaaagaaaccttgttctggcaagaagagtactaatatttatttgtatgtctaatttatgtacctgtgacttttagtcatggtattactgaatttccttcgggtgcatatccgcaactaggcttggaatacataagacttttttccttaaggaat

SEQ ID NO: 559855 - DNA, 606 bp, Homo sapiens
ttgtgaacactaaagactccataatttctaggaatcactgcttgcccactaattaaacagtcacccagcaggtagtttgagagaggatatgaaaaagggaagtgcggccttactcttgcaggggtgcgtctctgtcttccatcagttgatagcacaatgcttaaccctagggcagcttcatcctgctaaaagcacacatgaaagattcttggagaaagctatttttttaaaaaatgtagcttatttctgtattcaggtggactcagaggccaamcttcagaacttctaaagaggaaccatgacaggatagctgtgttgggtgggccatttagcctgctctgggttctgaaataaggattcccaccctgaaaaagtccagggctttaaactttaattactaacgtgatcaagacaagtttggaacaatcaaactgaagctagtccattccaggtatcaaaatggaaatgtcaggaaggaaggaagtatatgttacctgaattcattcacatgggattaacaatgtgtggtttctctatcactgtggtttcttcttatttaagtatttattctcaaccagacgcaaagtatctttctatgtattatct

SEQ ID NO: 559856 - DNA, 589 bp, Homo sapiens
gcattacttaccctgactaatacttctacctaaaaggagaatgctaatgaaataaaacctaagacttataaacttgacttcatagttgtgtagtagacactgaatagggacatatctgagctgaaaagatgttgattcatatcgtgcaaaacagccaatcatggactgaggtggcatctccagggaaagtgctggaaatcaaagtrttagtgtgataactgaccagattgccaaggataaatggcagaaaatagagtaaaaagtatgaagtcttaatgaattggaaaatccaagttttcctataccttacatgggtgaaaaagcccataataaaccagagtgtattaaaggccagctacaaattggagaccagattttaaatatgcctcctcctcaaaccatatggtttttttgtttgtttgtttttggtttttggttttttttgagatagagtttcactcttgtcacccaggctggaatgcaatggcttgatcttggctcactgcaacctccacctcccggattcaagagaatctcctgcctcagactcccgagtagctgagattacagacatgcacaaccacgccca

SEQ ID NO: 559857 - DNA, 650 bp, Homo sapiens
aaaatgaaagtacacaatgtaagcttatattttgtgtgaattggtggaatacgatttgaaggtagaaagtgagatattagaatacacattagaaaccttaaatcaactacaaaaagagatgtaattagtaagataataatacagtaaaattatttaataatacatttaatgtgaaagaagagacaaaggataataaaatattataatattttagtaatcaaatatcaagacacaagacaaactcaccaatattggcaagtaagtgtgaatgatcaaactctgcaattaaaagactgagattgtcacaatggataaaaaagtagaatctaacaatatgctgcctacaagaaacatatttaacattcagagagagataatttaaaactatgggaaaagatatacactacaaacactattgataagaaatttggaatggttacagtaatattaattaaaactgacttcaggataaataattttatcagagatgaagggacattttacaatgataaaaggataaattagttaagaatgcacaacaatattaactgattatgcacctacatatagaatatcaaatgtattcaggaagagtrcacagaactgaaagaacaaatggaaaaattcacaattttaattgaatatttcat

SEQ ID NO: 559858 - DNA, 650 bp, Homo sapiens
ccacatgtcacaagctcacagttcacacaatactcagtggtaaaatttgaaagctttgtctctaagatcaagaataaaacaaagatgcccattctcaccactcctaaccracatagtactagaaatcctagccagagcaacaggcaaataaaagacatccaaatcagaaaggaaaaagtgaaattgtctctgtttgcagatggtgtaattttatgtacagaaaatgctaaacgtgtgaaaaaattgttaaaactaataaatacagtaaagttgtagaacacaagatcagcatataaaactccataatatttctttataataacaacaaacctattaaaaaattcaaaacaatcctgtttacattagccacaaaaaatttaatagcttgtgaataaattaacctaaggaggtgaaagatctgtatgatgaaaactacaaaacattgataaaatacattgaagaaaacacaaataaatggaaagatatcctgtgttcataaactggaagaaggaatattattgaaatgtgcataacacccaaagcaacctacagattcaatgcaatctctgtcaaaactccaatgacattttttacagaagtagaaagaaatcctaagatgtgaacggaaccacaaagtaccccaaataccc

SEQ ID NO: 559859 - DNA, 543 bp, Homo sapiens
tatatctatctatctatctatctatctatctatctatctatctatctatgttacctatgtctgaatccatccacccatccatctgtctgtctatctgtctacctatatacacacagctaacccttgaaaaatgcagtggttagggagaaccctaaccactcaatcaaaatccacttttaacattcaactcccccaaaacttacttaactcctaataccctcattaatctatctatctatccatccatccatccatccatctatccatctatatctatatatctatatccatatctgtatctatgtgtatagatagatatacacacacatatagctgaccctggaacaatgcagragtcaggggaccaacccctcacacagttgaaaatccacatttaactttcgcctccctgaaaacttaactactgatagcctgttaacccaaagccttaccaataacataaacagtcattattttaacacattgtctagtatctacatatattttacccattcatgacctgcctttttcttgtttttttca

SEQ ID NO: 559860 - DNA, 411 bp, Homo sapiens
ttagcaactctcttcttgcagccgtcatttctaggcctccatcccaccatcatcaaaaccatttattaagcactccatctgcatagagctcccatttaggcctgggacagagtgagtctgttagacaaaaggtccccatcacagagttatgggcccatcacagacagacagtgatgaggcagactagctaattaaggcaggcattaagccaagaggcagagttacaaagcatttgcactggacacaggcagaagagtccaaaggtcctagtggggaggagaggtggggaaggagggcctcatgcaactctgccatttggatttcaaaggcttccttatccaatgaagagccatgtccattggattcaaagtcaaaggaygatcattattgttttttcatttcagtagcttt

SEQ ID NO: 559861 - DNA, 353 bp, Homo sapiens
tcaaccttgtctgtaatgtttttaaattttatctatgtttattrtctgcctgatctgttacattctcagaggagaatgtcacattattgtcatatagtttttgtttgttgttgttgtttttattgttttttgagatggatcctgtcacccaggctggagtgcagtgccacgatcttggctcactgcaacctctgcctcctgggttcaagtgattctcctgcctcagcctcctgagtagctgggattacaggttcccaccatcacatcaggctaatttttttgtatttttgtagagacagggtttcgccatgtttgccaggctggtctcaaactcctgacctcaggtgatccac

SEQ ID NO: 559862 - DNA, 403 bp, Homo sapiens
atggctgggaaggcctcaggaaacataatcatggtggaaggtgaaggggaagcaagcacgtcttacatggcagcaggagggggcggactgccaaacacttttaaaccattagctctcatgagaactccctcattatcatgaggacagcatggggaaaatgactgccataatccaatcacccccaaccaggtccctccctmcacacatgagcattacaattagagatgagatttgggtgggaacacaaagacaaaccatatcaatatccaatagttttcagtccttgccctcctccaaccctccaccctccagtaggccccagtgtctgttgttcccatgcttatgtccattggtgctcaatgtttagctcccacttatgaggacatgcattgggtgtttggtt

SEQ ID NO: 559863 - DNA, 571 bp, Homo sapiens
aatgcccacctttctttcatttctgatattgcccattttttcaactctttttttatggttagcctggcaagaggtttgtcaatattattttattttatttatctcattcatcttttcaaacaatcagtttttcrgtgttgacttttttctctattgttttccttcgctcaatttcatctctaatttttcttatttattttattttattttattttatgataaaataaagcatgactcttccttttctagtttcctaaggtgggagtttaagatgaatattaaatcttctttcatttctaaaatatgcatttaatcctttaaacttccctgtaagcactacttttttttcatcccacagattttgataaaagtattttcattttaattttgttaaaattatttttagatttctggctaggcacagtggctcacacctgtaatcacagcactttgggaggccaaagcaggaggatcacttgaggtcaggagtttgagaccagcctggccaacatggtgaaacactgactcaactaaaaaaataccaaaaaaaaaaaattagcctggcgtggtg

SEQ ID NO: 559864 - DNA, 571 bp, Homo sapiens
aatgcccacctttctttcatttctgatattgcccattttttcaactctttttttatggttagcctggcaagaggtttgtcaatattattttattttatttatctcattcatcttttcaaacaatcagtttttcggtgttgacttttttctctattgttttccttcgytcaatttcatctctaatttttcttatttattttattttattttattttatgataaaataaagcatgactcttccttttctagtttcctaaggtgggagtttaagatgaatattaaatcttctttcatttctaaaatatgcatttaatcctttaaacttccctgtaagcactacttttttttcatcccacagattttgataaaagtattttcattttaattttgttaaaattatttttagatttctggctaggcacagtggctcacacctgtaatcacagcactttgggaggccaaagcaggaggatcacttgaggtcaggagtttgagaccagcctggccaacatggtgaaacactgactcaactaaaaaaataccaaaaaaaaaaaattagcctggcgtggtg

SEQ ID NO: 559865 - DNA, 572 bp, Homo sapiens
ttttctcattttctcaaaacaaacaaaaaatccttttttcccaataatgtgtttttaccacacgtatgagaacctcaaaaccttctgtcaatgtctaaagtctaaataaggccctaatgtacatattgtatttttactcaatacaaactgtcacaaaatgccaaagtgcaattcaggaaaagcaatttcatggaacaccaaaataatgtttttcctaaatttttatcataatcataatcttaaaaatcatctatgttctatgttctccggattaagataaatgtacattacagaaagaaaaaatacattttasatcatatcataagaccctattgtaaaatagttttctttattgtggtattgagcctttaattttatagcaataaaggtacatttagatgattaagaagaagagaggaggaataagagccattttatttcttattggaaacacaagccctggcctgcttgtgttaaaaataaaatatcttgtattttaaaatgctggtatttaaaataaaatactttggctacttctccaagaaaaataaaacacactaaaggaaacaaga

SEQ ID NO: 559866 - DNA, 441 bp, Homo sapiens
atacctagctgtctgctgatgatgatagaaaagctggacttacctgggggctgtcttcctttctgtgtgctccccaagattcatgatatctctgcaggaaggtagttgggctactcacagggagacacagggctccaagtaacaggaagagagagcttctggtccaaggcagaaactaagagcattatttctgctgtatgccattccatcccattgttcaaagaagatacagggaatacctcagcatcacgctgtcaatggaaatatattaaagaattactagacaacttcaattacccacaaatatttaggaatactaaatttctccagaaacaatgcrgactactattttttttctgtctcaaaaaaaagttattttgttttgtggagtccatataggtctggagactacaaaaatggaagaactataataatttaaaa

SEQ ID NO: 559867 - DNA, 572 bp, Homo sapiens
acttcccaaggtcaatgctaaagaaaaaatcttaaatgcagctagaaaaaaagatcagattacgtacagaatgaaccccatcagactaacagatttctcagcagaatgcttataagacaagagatattagtggcctattctcagcattcttaaagaaaataatttccagccaggaattttatatcctgtcaagatgaactacataagcaaaggagaaataaaagtttttcrggcaagcaagtgctaagagaaatttttaccactagaccaactttacaagagacacttaagagatttctaaacatggaaatgaaagaccaatacctgctgcaacagaaacacacttaaaatcatggatcacaggccctacaaagtaaccactaaatataaactataaaacaatcagctgacaacttcatgataagatcaaaacctcacatatcaatattaaccttgaatgtaaatagtctaaacacccatttaaaagtcacagagtggcaacttggattaaaaaaaaaaaacaaggcccacctgtctgccttcttcaagagacccatcttacatgtaatgaa

SEQ ID NO: 559868 - DNA, 581 bp, Homo sapiens
caaactgttccaatctctgcctgttacccagttccaaagtcacttccacattttcaggtatcttttcagcaacgccccactctactggtatgaatatactgtattagtcccttttcacattgctgataaagacacgcccaagactgggcaatttacaagagaaagaggtttaatggacttacacttccccatggctggagaggcctcacaatcatggcagaaagcaaggaagagcaagtcacatcttacgtggatgatggcaggcaaagagagacagcttgtgcaaggaaactcctgtttttaaaaccatcagatctcgtaagacttatgcactgtcatgagaacagcatgagaaagatcygcactcatgatttaattacctcctactaggtccctcccacaacacctgggaattgtgggagttataattcaagatgagatttgggtgcagacacagccaaaccgtatcaatctccatttctcaaaagtcttactatgtatgttgagtgtaaactttttttttgtttccatgtcaagcttaaaatagttatagtgaactagaatgaatggttagcttaact

SEQ ID NO: 559869 - DNA, 600 bp, Homo sapiens
aaaaaaaagagagaatattgtctgttagagtaataaaagattctaaatgtagctattaaagcaaggtaatttattgtgtagttgccctagaattgatcaattctaacagaaatatatttatgtcttccactaaatacttctctatattaygcatttctaatgtttttgctttacataatttaccagcatgatgtttggtgtatagaatttaaaaattctacctttttcaggccaggtatggtggcttatgtctataatgccaacacttcaggaggccaaggcaggaggattgattgaggccaggagttcaagaacaacctggtcaacatagcaagctcctgtctctacaaaaaaagaaaaaaaaaaattaaaaattagttgggcatggtgtcacatgcctgtagtcttagctacttgggaggctggggcaggaggatcacgagtttaagagttcaaggttgcaatgagctatgatgatgccagtgcacaccagcatgggtggcagagtgaaacccagtctctaaaaaaataaataaaataagtacaataaaattatacctttttcataaattgtaccttttattttttattttttttatt

SEQ ID NO: 559870 - DNA, 620 bp, Homo sapiens
agtttgtgctgctataacaaacatgccatagactggaaaactttaacataaacatttacttctcaaagttctggaggatggaaagcccaagatcaaggtgtcagcagatacaaaatgtctgatgagggccaaattcatggtttacaratggctgtactctccttgtatactaacatggaagagaggaaaccaagaattacttttcttcctcttgtcatgtggatcactagtgtcatcatgggggctccatattaataatctaactatctctctaaagtcccaccgcctaacatcatcccattgaaggttagggtttcaaaatatgaattttgatggacacaaacatgtagtccacaataatcagatctatgatatagaaacatttttaaatccatgctaccttataaaatacagactattaaaaaatgtattcagactcattttgcatacagaaggataaactccactcccgttcagcagctttattcttgatcaaatacatatttagcatccactgcaagatctataaaaattagaccaagtcttatatctacatggtgctttacagttgtgaaagctttgtttgcccttgctttctcattttatcctcacatcaaagc

SEQ ID NO: 559871 - DNA, 321 bp, Homo sapiens
tggttttccccccatactgcccacctgatagtgaataactctcatgaaatctgatgactttgtacaggggttccccttttgcttggctctcaatttctcttttgcctggcatcatgtaaaatatgcctttttgccttccaccatgattggggaggccttcccgagccatgtgaaagtgtgagtccattggaccttttttttcagtataaattacccagtctttattatgtctttctcagcagtgagaaaayggactaatacatgggaactccaattcaagatgcgatttgggtagggacagagaaaaaccatatcaacagg

SEQ ID NO: 559872 - DNA, 605 bp, Homo sapiens
tgttaatttgctcaagcaataaaaccatatctggtacagcagctgcaattggagtcaccacttagttaagcttacagtaatccactgtcattctccaaagttcatccatcttctgcacaggccaaatgggagagctgaatagggatgtagtgggaatcaccattcctgtgcctttcaagttcttgatggtggcactaatctctgsaatccctccagggatgtgatatctttttttatttactattttttgaggtagaggcagctctaatgtcttccatttggcctttcccaacataatagccatcaccctaccagtcagggagccagtgtggtgattctgccagctgctaagcatatttatgccaattttgcattctggcactagggaaatgaccacaggatgggtctggggacccactggacccactgtaagttggacctgagctaaagctccattaattacctgacctcctgaattagtctgttttcacattgctgataaagacatagccaagactgagtaatttatacaggaaaaaaaggtttaatggacttacaattctacatgactggggaagcctcacaatcatggcagaaggcaaggt

SEQ ID NO: 559873 - DNA, 605 bp, Homo sapiens
tgttaatttgctcaagcaataaaaccatatctggtacagcagctgcaattggagtcaccacttagttaagcttacagtaatccactgtcattctccaaagttcatccatcttctgcacaggccaaatgggagagctgaatagggatgtagtgggaatcaccattcctgtgcctttcaagttcttgatggtggcactaatctctggaatccctccagggatgtgatatctttttttatttactattttttgaggtagaggcagctctaatgtcttccatttggcctttcccaacataatagccatcaccctaccagtcagggagccagtgtggtgrttctgccagctgctaagcatatttatgccaattttgcattctggcactagggaaatgaccacaggatgggtctggggacccactggacccactgtaagttggacctgagctaaagctccattaattacctgacctcctgaattagtctgttttcacattgctgataaagacatagccaagactgagtaatttatacaggaaaaaaaggtttaatggacttacaattctacatgactggggaagcctcacaatcatggcagaaggcaaggt

SEQ ID NO: 559874 - DNA, 441 bp, Homo sapiens
gttaatagcagggaaaatcaaaatggacgctttcatctccctaggaaatttcaaatcctacaacattaaagtaaaactaaatgaaaggaatctaaacaacgaaagtacaagagaacatatttttaaaaatgaaacagtatttccttaacaagctacatttcaacacttttcttgaaaagcaaaaatcaatttttagatagttcactagtgaggtaaaattcagttgagactatttttaagtaaaattaaacattcaataatagggtttaaacactttgaagaagttctttttaaaaatgttgtagaggtataattaaagcctaaaaaagaaacattagaagtaaartgattgtgatcattctctttccccaggtaagataatctccaataatcattttatccttaactaatagtaacaacttctgaagtttaaacaataac

SEQ ID NO: 559875 - DNA, 490 bp, Homo sapiens
tactgaactgtgagtcaattaaacctctttcccttaaaattacctagcttcaggaagttttttaatagcagtgtaagaataaactaatacatccacataaagaagaataaaattgaaaccttatctcaccctacctacacaamttaacatggattaaagacttaaatattaagacctgaaattgtaaaaatgctaggaaaaaaaaaaacagaggaaagcttcttgaccttgatctgggcaataattttttcagctatgacctcaagagaataggcaatgaaacaaaaatagacaaatggcattacatcaaactacaaagcttctgcaccacaaataaaacaattaacagagcaaaaagacaacacatgagtgggaaaaaatatatgcaaaccatacatctgataagggggtgatttccaaaatatgtaaagaactcaaacaacttaatagcaataaagcaaattaaacttgactttttttaaatgggcaa

SEQ ID NO: 559876 - DNA, 533 bp, Homo sapiens
ggcttttcttttgtgggatgtacagagagggaaagagagagaactctggtgtctcttcctccacagatgaggacaacagtcctttcatattaggaccttaccttaagattttattaaaacttaattatattctgaaaatccctatctctaaatacagtcacactgagagttaggatttctaaatatgaattttggaaaggcacaattcagtgtataacagctccagacatcccagtgtggcactattcctcaagggaccaactgaccacatggtggaaatcaacagcattgggccctttccatcctgagaagggcagtggttgattctcacagggttagacacctacttaggatgtgcatttgcctttcctgcttgctgtgactcagttgccaccaccagcctgaggctattgatacagacatacccaagacttggcaattaaaaaaaaaaacaggkttaatcgacttacagttccacatggctggggaggcctcacaatcatggtggaaggcaattctccataagagcccca

SEQ ID NO: 559877 - DNA, 504 bp, Homo sapiens
gcacaccccaagacaccaggcctcagttctgccctggtgactggctcaggttcccttgacagaccctgccaaaggaacgctccccagctctggcaccccyttctccaacctaaaggccagctccggctaagatagtccatctggctgtgcccccagtccaaccctttctgggccctggccgggcggacttcactcacctcttcacagggcgatccagaaatcctcatccgagaacatggccagagcccgggccgctccccgacctccaaccgccagagcgatcacagccgccccccgcacgggggggcttaggggggccaagaacggtaaatccaggtcggagtggccaccctccccccacaaaaaaacagcaagaagccaaagaggggttctctgcctcaggttccagcagtttaggtttccatggacagccccagggcggcgaatcccgagcggacacaaagagagcaccggtggctttgatcttgggcgagcaggctccgc

SEQ ID NO: 559878 - DNA, 504 bp, Homo sapiens
gcacaccccaagacaccaggcctcagttctgccctggtgactggctcaggttcccttgacagaccctgccaaaggaacgctccccagctctggcacccccttctccaacctaaaggccagctccggctaagatagtccatctggctgtgcccccagtccaaccctttctgggccctggccgggcggacttcactcacctcttcacagggcgatccagaaatcctcatccgagaacatggccagagcccgggccgctccccgacctccaaccgccagagcgatcacagccgccccccrcacgggggggcttaggggggccaagaacggtaaatccaggtcggagtggccaccctccccccacaaaaaaacagcaagaagccaaagaggggttctctgcctcaggttccagcagtttaggtttccatggacagccccagggcggcgaatcccgagcggacacaaagagagcaccggtggctttgatcttgggcgagcaggctccgc

SEQ ID NO: 559879 - DNA, 573 bp, Homo sapiens
ttgcaggcagaccaaggagaaggtggaggaagggaggggaggaagtactgaaacagagctcttagaaagatgttcactgctgggcaacaccatcacctcctctagaaggcatggatagcaccaagtaagtgtgagagctttgccatcacccttccaggcaatttgcttttagtgtctttgtaacacttggagtttgcatcttactcaaaatctctccccrgtctgcttccctggcaaagtccgtcttgctttttgcatctttgccccctctataactcctacatcccttaggaacctggtcttcctgggaaagcgtcttccacacataccccacctccacctgccatctcacccgctacacacactcaaaaattccccagcccctcaaacagggggtaagaggaatcccttaggacaaaaaggtgcatctcctacctgaagagcaacctggattctgcagactgagggaggcggctctgcttcagggctctgcagtctctgaagtaaaatgagattcaaagctgggaggagaagggtcatggtcagctgccccttccacactcccacgctgag

SEQ ID NO: 559880 - DNA, 454 bp, Homo sapiens
aaaattacattgaattgatttttagaggtaatgaaaacttcctttctgagaagttagtgttaaggtcttggaatgtgaacacattgtttgtagtgctatccattcctctcctgagattttaacttactactggaaatccttaaccaattataatagctttttttctttattttcaaaatgatttcctttgctttgattagacactatgtgctttttttttttaaccatagttcatcgaaatgcagctttttctgaacttcaaagatagaatcccatttttaatgaactgaagtagcaamatcatctttttcattctttaggaaatagctattgccaaagtgaaggtgtagataatacctagtcttgttacataaaggggatgtggtttgcagaagaattttctttataaaattgaagttttaagggacgtcagtgtttatgccatttttccagt

SEQ ID NO: 559881 - DNA, 490 bp, Homo sapiens
tttctcctagtgggcagctctgacctcatggctgcttgatgtatcatggtaaggcactcagtcaccaaaagggctaatagcctcccaggagctgcttttcaaatggtaagtagttttctgctgccaaaggtatccacttcttctaggtgcccaggcaaatatgcaacaactctcctactggggctttctacatgtagcaccattggatctgctgggcccttgagtggcaggatagtttatacaatagcttagatctgataagaatcctcttgtcattggacctcactcaaaattagcaatctttcaaatacttaaatagccattagctggaagtatggtatrcactgcctctaaaatccaaacaattcaagtgcactaagccaaacactgtgcatttttctaagaattgatggctgcaaggtgcaacgatttgttctttaccttgagaggatgttccagtaagaccccaagttattcccccaagtttcac

SEQ ID NO: 559882 - DNA, 601 bp, Homo sapiens
ttagacatacagtaaaaagatgcattgggttatagatatggggaattctcacagccccacagacaatgggaatagaaaaaatattatgtagaaatgggcactgcaatgaagagaattttaatattcagagaatttaatgtatttagctttcaatacattaatataataaagcaaaattatttgggtcaatagaagaggtgaaaatgatattattagagcattagagcttgattcctttgaatatgttgactgtaacaatragtgccatgatgaatcctatatttatctttagttaagtgaaagtctgtttaaaatgcttttatccttaatgtatgagcagatgtcattttatttccaataaatggttggtggtctacaggaaaataaataaataaataaaataaataaataaataaataaaaatataattttaaaatgtttcatatctatagtcagataaagaaacttaaacattagtttcacataaatgaataaatcatgaagaaaatcataataatattaataagctggatttaatgaagatatatatatatatgtatatatatatataattcaactaagcctagatctgtttttactc

SEQ ID NO: 559883 - DNA, 619 bp, Homo sapiens
attttactctaagataaccagattaatatggacaatgaaacaacatattatgaggatttctcagtttagctatgcaagccaaagtcttgttttgttgtaacttgcatgcaatcaagttttgcaagtctttgggaaaattaggggaaaaccaaatataattgcttaaaactctcaaagaaccaatttgtaacaaataacagattttgttaaaattcagttaagaggctctcaaattttacaaagtctaaggttcttttattaacataccaccaaaaatatctggagatatggtgagagagtcgtctcaggtatactaccatattaattagaaagtttcctatacaggtatcattatcaaaaccatcctgaaaagatcaaatcacctttctcaagccctctcacattttctcctattcttatgagaagacgtcagcacacatggacttattctgcaaaaaatagagaaagaagttttctattattttgagatacgtcycatcaatacctaatttattgagagtttttagcatgaagggttgttgaattttgtcaaaggccttttctgcatctattgagatgatcatgtggtttttgtctttggttctgtttatatgctgga

SEQ ID NO: 559884 - DNA, 591 bp, Homo sapiens
tcttgggctcaagcaatccactggcctcagcctcccaaagtgttggaattataggcatggaccatcatgcttgattgaaaaacaaaaaacaaaaaccaaactacttaattttacaatttctcatggattgtttgatatttctgagtagagaggccaaggtgaggcagaaaacatattgggaggaggtgtgttcagaggagggcataggactcaatagtaagatgttcaagtttgctaggtgagatttgttttcttacaagaagtgaattcactatttaagtaaggaatataaaccagtgttacaatgtctctgtttatttgcttctgcatttatatttcaccttttacttaaaggatttgaagcagcttatagtaaaaacaattcactaggactgaactattaacagagattgttgttacgtaacatttattgcactccaattccacgttgtatttgaaaatgtccttgttttttaaaaagattataaayagcttgaaagaaaagtcagctctataaaactgcatatgtattttccttttttccttctctgccaatctaccctcttcacactttagtaatctaaaagaaca

SEQ ID NO: 559885 - DNA, 350 bp, Homo sapiens
gatacccccttacctcattgagaaaactaggataacaatgcctgcttaaccaactacagtaggaaagtgtgagacattaaatagaaatccataagagccatttggaaaaaatcagccaatataattagaaagaaaaaaagttaattttaaatgatcagaggaaaaaatgtttyctcacattagctatgatatttcagtggaaacaaatcagacaaaggcaacctaattttattaatatttttgcaatgttattagacaaagtgtacatgctagataagccattaaatatatccattagtttataacaacaaaaatatcattttaggatattttgtcatacagttcctaag

SEQ ID NO: 559886 - DNA, 350 bp, Homo sapiens
gatacccccttacctcattgagaaaactaggataacaatgcctgcttaaccaactacagtaggaaagtgtgagacattaaatagaaatccataagagccatttggaaaaaatcagccaatataattagaaagaaaaaaagttaattttaaatgatcagaggaaaaaatgtttcctcayattagctatgatatttcagtggaaacaaatcagacaaaggcaacctaattttattaatatttttgcaatgttattagacaaagtgtacatgctagataagccattaaatatatccattagtttataacaacaaaaatatcattttaggatattttgtcatacagttcctaag

SEQ ID NO: 559887 - DNA, 296 bp, Homo sapiens
ttttgacaataatggacaaggcattatgggtaagatttgatggactgagatgaagacctgaccgttgcagaattttttatgttcagttaccaagtactttattcaaactttaaaaaaaaattggcactccgtaattcctcacyttcctgtataatagcttttagaatttacatgaaggatgttgcttacgtatgctaatttttattagcatttgtaattgaaaaataatactccgcaagtactatttttttaaatatttattattattgaattctattttaaacctgaagatcata

SEQ ID NO: 559888 - DNA, 296 bp, Homo sapiens
ttttgacaataatggacaaggcattatgggtaagatttgatggactgagatgaagacctgaccgttgcagaattttttatgttcagttaccaagtactttattcaaactttaaaaaaaaattggcactccgtaattcctcactttcctgtataatagcttttagaatttacatgaaggatgttgcttacrtatgctaatttttattagcatttgtaattgaaaaataatactccgcaagtactatttttttaaatatttattattattgaattctattttaaacctgaagatcata

SEQ ID NO: 559889 - DNA, 296 bp, Homo sapiens
ttttgacaataatggacaaggcattatgggtaagatttgatggactgagatgaagacctgaccgttgcagaattttttatgttcagttaccaagtactttattcaaactttaaaaaaaaattggcactccgtaattcctcactttcctgtataatagcttttagaatttacatgaaggatgttgcttacgtatgctaatttttattagcatttgtaattgaaaaataatactccgcaagyactatttttttaaatatttattattattgaattctattttaaacctgaagatcata

SEQ ID NO: 559890 - DNA, 562 bp, Homo sapiens
aaaatgcatgaaaaaaactgttaagcaagacatagtcttgrtgattttgccttattgtttccagctctgtaatttctttttgattgattacattcctttaggctatcatatcctgctggtgtcccaggatctcatttttccaaaggttatgccaacataccttatttactcttgactgattttacttatcctgtcttacaaaatgaaaactcttatatgtagcaacttagttttcagtttaataattaagtcataattattttcttgcactgaaggtgacaattagttctttttcattgttgtctttatgcacataataaaattttatttaacaaaaacgttttctttaattaataagacggagaaggaaatggcagaaactgatggtccaaggcatggtattattatcaattcactgtagacacatccaacaaaaattattacttggaaagttttaaaaaatgttgtttaaaaattagataaatatttttatataacaattatttttcttcttagacagatgaggatttctttctgtttgaagctgaaaacaccaaattct

SEQ ID NO: 559891 - DNA, 599 bp, Homo sapiens
tttttaaattttttttctccttttttgtctttctgtatgatttgaagaaggagtcttcatgctctgaaactcttcagtttggtctatactgttawcaatgcttccaatggcattatgaaattcctgtagtaaatttttcattagaagttcatgttggtgctttctttaaatggctattttgtctttcaattttggatcaatatactgctttccttagattgggtttcaaccttctgtatctgattgagcttccttgccatccagattatgcattctatgtctttcatttcagccatttctatctggttaggatctattgctggggaaccattacagttgttttgagataagaagacactctggcttttgaggtaagaagacactctggcttttgaggtaagaagacactctggcttttagaattaccagatacttctactagtttttctcctctgtgtatgctgatgttcctgttatctttgaactttctgtcttctggatggagctttttgcttttattttcttcaatacccttgagggtttgattgtggcataagttgagttcagtcagttgacatttttttctagatgctttcagg

SEQ ID NO: 559892 - DNA, 382 bp, Homo sapiens
aatggtgttgggatagctggcaagccatatgcagatggatttaagatttaaatatggccaggcgtggtggctcacacctgtaatcccagcactttgggaggtcgaggcgggtgcatcacaaggtcaggtatttgagaccagcctggacaacatagtgaaatcccatctctactaaaaataccacagattagctgggtgtggtggcrgacacctgtaatcccagctactagggaggttgaggcaggagaattgcttgaacctaggaggcggaggttgcagtgagccaaaatcacaccactgcattccagcccaggtcacagtgtgagactccatctcaaaaaaaaaaaaaaaagatttaaatataagacccaaaactataaaa

SEQ ID NO: 559893 - DNA, 558 bp, Homo sapiens
gtgtacattaattttgtatctggaaactttgctgaattcttttatcagttctaggagctttctggaggagtctttagggttttctaggtaaacaatcatatcatcagcaaacagcagcagtttgactccctctttaccaatttggatgccctttatttctttctcttatctaatttctctggctaggatgtccagtactawgttgaagaggagtggtgagagtggccatcattgacttgttccagttctcagagggaatgctttcaacttttccccattcagcattatattggctgtgggtttgtcataaatggcttttattatattgaggtatgtcccttgtatgtcgattttactgagagttttaatcataaagggatgctggattttgtcaaatgctttttctgcatctattgagatcatcatgtgtttttgtttttatttctgtttatgtggtgtatcacatttattgacttgcctatgctaaaccctgcatccttggaatgaaacccatttgatcatggtgaattttctttttgatatattgttggattcagt

SEQ ID NO: 559894 - DNA, 558 bp, Homo sapiens
gtgtacattaattttgtatctggaaactttgctgaattcttttatcagttctaggagctttctggaggagtctttagggttttctaggtaaacaatcatatcatcagcaaacagcagcagtttgactccctctttaccaatttggatgccctttatttctttctcttatctaatttctctggctaggatgtccagtactaagttgaagmggagtggtgagagtggccatcattgacttgttccagttctcagagggaatgctttcaacttttccccattcagcattatattggctgtgggtttgtcataaatggcttttattatattgaggtatgtcccttgtatgtcgattttactgagagttttaatcataaagggatgctggattttgtcaaatgctttttctgcatctattgagatcatcatgtgtttttgtttttatttctgtttatgtggtgtatcacatttattgacttgcctatgctaaaccctgcatccttggaatgaaacccatttgatcatggtgaattttctttttgatatattgttggattcagt

SEQ ID NO: 559895 - DNA, 558 bp, Homo sapiens
gtgtacattaattttgtatctggaaactttgctgaattcttttatcagttctaggagctttctggaggagtctttagggttttctaggtaaacaatcatatcatcagcaaacagcagcagtttgactccctctttaccaatttggatgccctttatttctttctcttatctaatttctctggctaggatgtccagtactaagttgaagaggagtggtgagagtggccatcattgacttgttccagttctcagagggaatgctttcwacttttccccattcagcattatattggctgtgggtttgtcataaatggcttttattatattgaggtatgtcccttgtatgtcgattttactgagagttttaatcataaagggatgctggattttgtcaaatgctttttctgcatctattgagatcatcatgtgtttttgtttttatttctgtttatgtggtgtatcacatttattgacttgcctatgctaaaccctgcatccttggaatgaaacccatttgatcatggtgaattttctttttgatatattgttggattcagt

SEQ ID NO: 559896 - DNA, 525 bp, Homo sapiens
gaacaatgatctgaaatatggctgaacataaatcacctgggacagttwttaaaaatcccaattcctgggccttatatcagtcctagtggatcagtgggtcagattctccttaagggttacttgagagtttgcgttttaaacaagaattggaggggactgtcatgatgacgtgatatggaaagcattaaattaaactagcattcagctaggatggttctggctgcaagtaagtaaaaatttatttcagacttggttaagcaataaagtcatttattagctcagataacatcaagtccacaggcagagcaagaagtcttcagattgcttaaaacagctgcttatgtgtatcacctaggacacagtaaacttcccacgctctactctgcagttggcaaatttaacatcattctaaggtagtataccttaaaggcattagatgacctctttagcccatgagggcatttttcccataagtgtctaaaaattactcctaatgttttagttttcaagttagcttagacttaa

SEQ ID NO: 559897 - DNA, 311 bp, Homo sapiens
ggtgtttttgcattacatttacaattgytattgctagtacataaaaagacagttgatttttgtacattgttttgcatacataagtgtatctagtaattctaaaaacttctaaaaaccttttaggtagatgttttagaattttctgtattcatgatttatcaactacaaataagacagtttatttccaaattgtatgccttttatttctttgcttgacttaccgtacaggccaagtcctccttttatattattaaacaaaagtggtgaaatttggctgtttttaattagttttatcaggttgagaaattttc

SEQ ID NO: 559898 - DNA, 311 bp, Homo sapiens
ggtgtttttgcattacatttacaattgctattgctagtacataaaaagacagttgatttttgtayattgttttgcatacataagtgtatctagtaattctaaaaacttctaaaaaccttttaggtagatgttttagaattttctgtattcatgatttatcaactacaaataagacagtttatttccaaattgtatgccttttatttctttgcttgacttaccgtacaggccaagtcctccttttatattattaaacaaaagtggtgaaatttggctgtttttaattagttttatcaggttgagaaattttc

SEQ ID NO: 559899 - DNA, 311 bp, Homo sapiens
ggtgtttttgcattacatttacaattgctattgctagtacataaaaagacagttgatttttgtacrttgttttgcatacataagtgtatctagtaattctaaaaacttctaaaaaccttttaggtagatgttttagaattttctgtattcatgatttatcaactacaaataagacagtttatttccaaattgtatgccttttatttctttgcttgacttaccgtacaggccaagtcctccttttatattattaaacaaaagtggtgaaatttggctgtttttaattagttttatcaggttgagaaattttc

SEQ ID NO: 559900 - DNA, 334 bp, Homo sapiens
tgcagtaacagaaaaccacataacacattgatctcacttataaatggaagctaagcattgggtacacatggatatcaatgcaggaacagaaaaccaaataacacattgttctcacttgtaaatgggagmtaagcattgggtacacatggatatcaagataagaacagcaggctgggcacagtggctcatgcctgtaatcctagcgctttgagaggccaagatgggtggatcacctgaggtcaggagttcgaggccagcctggccaacatggcaaaaccccatctctaagaaaaatacaaaattagctgggcatgctggcgcatacctgtaatcc

SEQ ID NO: 559901 - DNA, 610 bp, Homo sapiens
tcttattgccctttaagtacctattctccactaaatcccaatggcaatgtcacatatattcgatatttgttatggcagcacctcatgtataggtaccaatttaagtttyagatatctattactgcataacagagagctccaaaacatagtgacttaaaacaacactagtttattttctcataccctgtgcatcagaaatttgcacagggttcagtttgacaattctattattttataaggttttggcttgggtcattcacttgactacattcagctagtgtctaggctagtgtaaagatacaagaaggcatttggatagctaatttctccagcaccatgtttgattctattctctatctaattgcattggcatctttgtcacactcaataaactattgttttattgatctaagtgtttatattttaccagtaccatactgttaaagttggtttcttatagagatcactatagcagtgactttttcatatctagtcagataatctcaatattttgattaaagtatttaaactctttatatttaatgtaaatattaatatgactagatttcaattgattatcatgctatttcttttttattctctcatcatt

SEQ ID NO: 559902 - DNA, 610 bp, Homo sapiens
tcttattgccctttaagtacctattctccactaaatcccaatggcaatgtcacatatattcgatatttgttatggcagcacctcatgtataggtaccaatttaagttttagatatctattactgcataacagagagctccaaaacatagtgacttaaaacaacactagtttattttctcataccctgtgcatcagaaatttgcacagggttcagtttgacaattctattattttataaggttttggcttgggtcattcacttgactacattcagctagtgtctaggctagtgtaaagatacaagaaggcatttggatagctaatttctccagcaccatgtttgattctattctctatctaattgcattggcatctttgtcacactcaataaactattgttttattgatctaagtgtttatattttaccagtaccatactgttaaagttggtttcttatagagatcactatagcagtgactttttcatatctagtcagataatctcaatattttgattaaagtatttaaactctttatatttaaygtaaatattaatatgactagatttcaattgattatcatgctatttcttttttattctctcatcatt

SEQ ID NO: 559903 - DNA, 546 bp, Homo sapiens
aatttgcacagggttcagtttgacaattctattattttataaggttttggcttgggtcattcacttgactacattcagctagtgtctaggctagtgtaaagatacaagaaggcatttggatagctaatttctccagcaccatgtttgattctattctctatctaattgcattggcatctttgtcacactcaataaactattgttttattgatctaagtgtttatattttaccagtaccatactgttaaagttggtttcttatagagatcactatagcagtgactttttcatatctagtcagataatctcaatattttgattaaagtatttaaactctttatatttaatgtaaatattaatatgactagatttcaattgattatcatgctatttcttttttattctctcatcatttataatwtagtccttttctcctcttttactgaataattttgtgttacctgaatatatttttctattccaacttacgtccactcttggcttattagatttatctgatttttaatttaattttatagtgattgc

SEQ ID NO: 559904 - DNA, 593 bp, Homo sapiens
cacattttctctgattatcttttctgtttgctcaaatctgctattggtatcctttagtgagttttttgcttcagttattatatcttcagctttaaaatttctgttttttatagtttctctttatttatattttttatttattcatatgtaattattctggtttcctgtagctctttaaggtagttgaattacagttatttgtctagtaaattaatgtctgctttctcaggaaccgttcctawaaatttcttctgtgaatagaccacactttcttgttttgtttcgtgcttcataattttgaaaacaaacatttttaatactagagtgtgataactctggaaatcagacttttccctatcctctgcaattgtattagttgcttgttataggctgtagccattggtttagtaattttgctgaactaattttgtactgtatagtcttcttcacgtgtgatctccaaagtctctgttcatttagtttgtattcagcaagtattttggcagatacttccttacatgccaggaacgtcaacctccaaaataagaaaattgacaaaaaaagaggaggaaacaaattttaataataataat

SEQ ID NO: 559905 - DNA, 534 bp, Homo sapiens
agcagggtgtgagactcctgggaagggaagaataggaaccatccctgggattgttctagccttcccaatcctttcctctgaggttcagcagtgcaagggagaccatcaggtcaacgtkggggagggtacttggcccatgtttctagacatcgggaaatctgtgctgaggagccttggaggccagtgtccattcataagagcctaaagtccttacgaagaaacaaaaacaaaaacaaacaaaagctgggcctgtatattagttttctagggctgccatagcaaatatcacagactagggggcttaaacaacagagaaatctgttttctcagttctggaagctgtaagtccaagattaaggtgccagtagagtgttttcttctgaggtctgtcttctccccgtgtcttcacatggtcttccctccctgtttttctgtgtctgtattagtctgttctcacactgctataaagaaatactccagactgggtaatttataaaggaaagaggtttatttgactcacagttctgcatggct

SEQ ID NO: 559906 - DNA, 395 bp, Homo sapiens
tacttcctgggttttacttggagatggttgccacattcttcctatacctgactctctaaatytgtttgggatttctattgctcccttacttcctacttttgaatttagtcctgtggaatcttgaccatgtctgaggataagggtaaagtgcagataaacatttccctgataatattttctgcttaatcttttgtcgcgtcagagcctgtgccatttgaaactcaaagccaaggatcaattctttcgttctctctttctcctatgttctctcttccttggcgactgttgaaagcagggaaacatccagggataatgaaatgctgggaatgaaaaacagaactgattaataaatcaagattttattcaatatttctcaaacttcaatgaagcacaga

SEQ ID NO: 559907 - DNA, 357 bp, Homo sapiens
tgactgcaacttctgcctcctgggttcaagcaattctcctgcctcagcgtcccaagtagctgggattacaggcacctggctaattttttttttttttttttttttgtcgttaagtaaaaacaacatttcaccatgttgcccaggctggtctcraactcctgagctcaggtaatctgcctgccttagcgtcccaaagtgctaggattacaggcgtgagccaccgtgcctggccgcaaaaatttcttattctaacatgttataaatctgcatctgctacacaaggacaaacacacagggagatgcctaccccgcacttcagtggtctgctgaatctagttcacatctttaaaaccatag

SEQ ID NO: 559908 - DNA, 501 bp, Homo sapiens
gcatgtaagaaatcttgtaccccctcaatagataaaattttaaraaggttttaggtgataaatcaataaatacacagattcttcacatacacacacaaacaatcatacaaaacaacatacctattgaactgaacatattgcaggttcagctcctgatgactgcaataaatatagtcacaagaagtttttggtttcccaatgcatttaaaagttgtgtttaaactatattgttgcctattaaatatgcaatagtattatgtctaaaaaaacaatgtacacaccttaatttttaaaatacttgattgccaaaaaaatgctgatgatcatctgagccttcagcaagtcataatctttttgctaatggagggcctgatctcagtgtggatggctgctggctgatcagggatggttgctgaaggttgtgtggctgtggcaatttatttttatttatttatttttttgagacagcatctcactctgtcacccaggctgaaatgcagt

SEQ ID NO: 559909 - DNA, 462 bp, Homo sapiens
aggttttaatatatcttgttttcattccaatagaatgtaatactgattgtaaaataattttgtccactcactagtggtagaccagaattactttactaaggtttgcttttctttttggttccccrtttattcccaaaggctaaaaatccaatttatcattattgatctgtctttcactatagaacagaaatcttttgaattaggtatttaggctttgcttggtttcattttataattaaactcctactaaagctgaattgtctaacattttaataagtattaaaaagatatatttgtatttaatcccttttgtactgttttgaagtggctcacaccaatatgaagtgtctaggaaattcatgtgaaaatactttgttatatttgtaatgaactcttatttattcatttaaacaacaggaatttatttagagctctctatgagtttcatagtgtgttttgagg

SEQ ID NO: 559910 - DNA, 453 bp, Homo sapiens
caagcctctgggttctaaaactytaatctctttcccttgttcccttctcaatctcaggcatagaaattgctccctggaggtatgacctctgtgaaattcagtgtttcctatttgccttttcagttttctactaagaaggtaaaaagtctttacattaaattctccagggtataatatctgtttcctggaccttgactgatataaaaattatcaccaggagttgtctcaggaaacaaacactcaaaatggtatttggggattgttttggtcgcatttttaggcttgaaagcaaggctgcaattcttgcaaacctgagatggaatactagctccaaagcatgtattaacagcaacagtaatcaaaaaatctaaaaaatcaggtgactttgagggcttttgtagcattagcaatgatgataagaaccacaggattagatgcctgctccgggcatgc

SEQ ID NO: 559911 - DNA, 572 bp, Homo sapiens
tgaggtagtcaataataagctttaccttactattgaatatgtcatgtttatagccaattacaaatttgaaaatctcattgttcacagaaattataaaagttgagctacacagaaaattttggagttataaagttkgtaagttagtgttttttatgttgtccaatcatcagatactgaagttgactggggaacttctctgcagggttttgttgtaaattaataaccttttgaaacattttgatccttggcttctgtgacaccacattctcttcttaccctgccattctctctggttactccttgccattcttatactcagtgttctcacactttaagcagcataagaatcatctggaggcctaaaacacagataggtaggtcccagccccagtgtaggtctggggtgtggccaaaaaatgtacatttcttttttttttttttttttgagatggagtcttgctgtgttgcccagtctggagtgcagtggtgcaatctcggctcactgcaacctccacctcctgagttcaagcgattctctggcctcagcctccagagtagctgggactacaggc

SEQ ID NO: 559912 - DNA, 572 bp, Homo sapiens
tgaggtagtcaataataagctttaccttactattgaatatgtcatgtttatagccaattacaaatttgaaaatctcattgttcacagaaattataaaagttgagctacacagaaaattttggagttataaagttggtaagttagtgttttttatgttgtccaatcatcagatactgaagttgactggggaacttctctgcagggttttgttgtaaattaataaccttttgaaacattttgatccttggcttctgtgacaccacattctcttcttaccctgccattctctctggttactccttgccattcttatactcagtgttctcacactttaagcagcataagaatcatctggaggcctaaaacacagataggtaggtcccagccccagtgtaggtctggggtgtggccaaaaaatgtacatttcttttttttttttttttttgagatggagtcttgctstgttgcccagtctggagtgcagtggtgcaatctcggctcactgcaacctccacctcctgagttcaagcgattctctggcctcagcctccagagtagctgggactacaggc

SEQ ID NO: 559913 - DNA, 483 bp, Homo sapiens
ttttattggtaccttaaatcatcaattctaaatggtgtctctcctgaataaatcttttgttggtctaaattctaaactattgagtttcaatattcacgtacacttcaaattgtttaaaattatgctttcgtaagcattatattctatgtggaagttaatttgtagaactcctagttacattgtcagccctcaacatggactcagctacacatatttgttcaaatatgttcaaactgttataattctataacagttcccaatcattacagcttgcttcaggtccagatttatctcracccctatcactctacatatttctgagcttaaagagtaagttttaaataaacaatcatagtgcagtagttgtaagtgaaagaaataatttgacttgcttcagttctgcaatcctttatgaccacctggagtttttatttctgtttaaaagttcaaatggcaaaacagaacaaatggcaaagtgtaata

SEQ ID NO: 559914 - DNA, 536 bp, Homo sapiens
ttgttcctatgcctgtgtctggaatttcagagaaggatttcatcatcttatatgtatgaaaatcattagtatgactatttttgttagagaacaaaaggaaattataaagtcagaccaaggacagcaatgagatctaraaagagaatatgctcatctgaaacaatgaataatgtgatgcaattacactcatttcaagtaatttattttctgatttaggatacactagcatggctaattaattgggagtagccagagaaagaaggggaacagctaagtgctggcaatcaggagacctacgttccagcctctgctctgtcactactttactgctgagagcttggataagttacttaaacttcatggagcattttgcatttgtttttcatctgtgaaatggagataagaagtgttgccctacttatcgcatgctgctgttgtgaggcaatagatgtaaacacatgtgcaaaattaacagtgctctacaaatgtatcatttttaccattatcattaatatttatgactagtcattcatatt

SEQ ID NO: 559915 - DNA, 536 bp, Homo sapiens
ttgttcctatgcctgtgtctggaatttcagagaaggatttcatcatcttatatgtatgaaaatcattagtatgactatttttgttagagaacaaaaggaaattataaagtcagaccaaggacagcaatgagatctagaaagagaatatgctsatctgaaacaatgaataatgtgatgcaattacactcatttcaagtaatttattttctgatttaggatacactagcatggctaattaattgggagtagccagagaaagaaggggaacagctaagtgctggcaatcaggagacctacgttccagcctctgctctgtcactactttactgctgagagcttggataagttacttaaacttcatggagcattttgcatttgtttttcatctgtgaaatggagataagaagtgttgccctacttatcgcatgctgctgttgtgaggcaatagatgtaaacacatgtgcaaaattaacagtgctctacaaatgtatcatttttaccattatcattaatatttatgactagtcattcatatt

SEQ ID NO: 559916 - DNA, 536 bp, Homo sapiens
ttgttcctatgcctgtgtctggaatttcagagaaggatttcatcatcttatatgtatgaaaatcattagtatgactatttttgttagagaacaaaaggaaattataaagtcagaccaaggacagcaatgagatctagaaagagaatatgctcatctgaaacaatgaataatgtgatgcaattacactcatttcaagtaatttattttctgatttaggatacactagcatggctaattaattgggagtagccagagaaagaagggraacagctaagtgctggcaatcaggagacctacgttccagcctctgctctgtcactactttactgctgagagcttggataagttacttaaacttcatggagcattttgcatttgtttttcatctgtgaaatggagataagaagtgttgccctacttatcgcatgctgctgttgtgaggcaatagatgtaaacacatgtgcaaaattaacagtgctctacaaatgtatcatttttaccattatcattaatatttatgactagtcattcatatt

SEQ ID NO: 559917 - DNA, 536 bp, Homo sapiens
ttgttcctatgcctgtgtctggaatttcagagaaggatttcatcatcttatatgtatgaaaatcattagtatgactatttttgttagagaacaaaaggaaattataaagtcagaccaaggacagcaatgagatctagaaagagaatatgctcatctgaaacaatgaataatgtgatgcaattacactcatttcaagtaatttattttctgatttaggatacactagcatggctaattaattgggagtagccagagaaagaaggggaacagctaagtgctggcaatcaggagacctacgttccagcctctgctctgtcactactttactgctgagagcttggataagttacttaaacttcatggagcattttgcatttgtttttcatctgtgaaatggagataagaagtgttgccctacttatcgcatgctgctgttgtgaggcaatagatgtaaacamatgtgcaaaattaacagtgctctacaaatgtatcatttttaccattatcattaatatttatgactagtcattcatatt

SEQ ID NO: 559918 - DNA, 613 bp, Homo sapiens
tctgcacatgtatcccagaacttaaagtataataaaaataaataaataaatatgagaaaaacagtcaatgttgaagcatgtcttagaaaagagaaggtgtagaggtaggactcttatttcaagctgttaaattagaattttgccttttttttatgttcttaagagctrgtaaaaatgtagctactaacttgctctgtgaccttaaacaaatcattcaatgtctggacctcagtttcctcctctgtcaaaaggttgcaattggatgacatgattttgtagttccctttgagctcaaaaattccacactctaaaagaaagaaatgtaaactgactcatcattattccctgggctcaaatgatgttttctgccttagattgtcttaatacttaaaacatttaaatataagaaagggaagatttgaatagtctttacaagttgaatttcaaatggtttagaagatgcttagagatgttttcagaaagaattatcaagaagagatcactcagtaagtgcacagcctgcctgaagggcagccaagttatatacataaaaatatttaatgtgagcaaggaagaaatacaaatcctgacagaatagaattcagacatggga

SEQ ID NO: 559919 - DNA, 613 bp, Homo sapiens
tctgcacatgtatcccagaacttaaagtataataaaaataaataaataaatatgagaaaaacagtcaatgttgaagcatgtcttagaaaagagaaggtgtagaggtaggactcttatttcaagctgttaaattagaattttgccttttttttatgttcttaagagctagtaaaaatgtagctactaacttgctctgtgaccttaaacaaatcattcaatgtctggacctcagtttcctcctctgtcaaaaggttgcarttggatgacatgattttgtagttccctttgagctcaaaaattccacactctaaaagaaagaaatgtaaactgactcatcattattccctgggctcaaatgatgttttctgccttagattgtcttaatacttaaaacatttaaatataagaaagggaagatttgaatagtctttacaagttgaatttcaaatggtttagaagatgcttagagatgttttcagaaagaattatcaagaagagatcactcagtaagtgcacagcctgcctgaagggcagccaagttatatacataaaaatatttaatgtgagcaaggaagaaatacaaatcctgacagaatagaattcagacatggga

SEQ ID NO: 559920 - DNA, 613 bp, Homo sapiens
tctgcacatgtatcccagaacttaaagtataataaaaataaataaataaatatgagaaaaacagtcaatgttgaagcatgtcttagaaaagagaaggtgtagaggtaggactcttatttcaagctgttaaattagaattttgccttttttttatgttcttaagagctagtaaaaatgtagctactaacttgctctgtgaccttaaacaaatcattcaatgtctggacctcagtttcctcctctgtcaaaaggttgcaattggatgacatgattttgtagttccctttgagctcaaaaattccacactctaaargaaagaaatgtaaactgactcatcattattccctgggctcaaatgatgttttctgccttagattgtcttaatacttaaaacatttaaatataagaaagggaagatttgaatagtctttacaagttgaatttcaaatggtttagaagatgcttagagatgttttcagaaagaattatcaagaagagatcactcagtaagtgcacagcctgcctgaagggcagccaagttatatacataaaaatatttaatgtgagcaaggaagaaatacaaatcctgacagaatagaattcagacatggga

SEQ ID NO: 559921 - DNA, 543 bp, Homo sapiens
ccactcactctacaggctccttgttggcacctcttcctctttgcattctcactgtcacattcctcaccctttgccataggagacccaggagaggaaattattttggctacgctgagacataagcacaggtggtaccacttgttataaacttttcagtttttgttggagctataagcctactttataggggtcttgagctgtttgttctatgagagaaagggaagcaatagcttttggccctcaatgttgattgattgcattgcggctggtttccacaggctgctggcttgcagaggacacatttcttctcagtggtgccccagtacaatgatgccaatctgaattacatactggctacagccaaatatcttcatttcctttctgcttcaaacagtggatttgggcagttctttttattctgttttggagaaatgtcacacgaaattttgaattaagttaagctattattattattattattgctgtaccaaggtaaaatcaatttgtcataawttttgtcttttgcctacacgttggagtctt

SEQ ID NO: 559922 - DNA, 563 bp, Homo sapiens
aggtatggttggccttgtgaacatcatcatcatcatcatcatcatcatcatcactaatgttttgcaatggtagttttgagaagagaataggatctacccaaggaacagtactgaaaggggtagtgaagtcaaatgtatttcagagaattattggcwtgggaaagatggagagtgtctccaaccagcaggtcaaccattacattagaaagttcccaggtgggaggtaaaattcctaatttagggtcagatattgatgtattaggtataacctttttaagagatgtgcaggctgggtgcggtggctcacacctgtaatcccagtactttgggaggccaagggcaggtggatcacctgaggtcaggagttcaaaaccagcctggccaacatggtgaaaccctgtctctattaaaaataccaaaaaaaaaaaaaaaaagctgggagtggtgataggagcctgtaatcccagcttctcgggaggctgaggcaggagaatcacttgaacccaggaggcagaggttgcagtgggccaagattgcgccactgcactccagcctgggtgaca

SEQ ID NO: 559923 - DNA, 563 bp, Homo sapiens
aggtatggttggccttgtgaacatcatcatcatcatcatcatcatcatcatcactaatgttttgcaatggtagttttgagaagagaataggatctacccaaggaacagtactgaaaggggtagtgaagtcaaatgtatttcagagaattattggcttgggaaagatggagagtgtctccaaccagcaggtcaaccattacattagaaagttcccaggtgggaggtaaaattcctaatttagggtcagatattgatgtattaggtataacctttttaagagatgtgcaggctgggtgcggtggctcacacctgtaatcccagtactttgggaggccaagggcaggtggatcacctgaggtcaggagttcaaaaccagcctggccaacatggtgaaaccctgtctctaytaaaaataccaaaaaaaaaaaaaaaaagctgggagtggtgataggagcctgtaatcccagcttctcgggaggctgaggcaggagaatcacttgaacccaggaggcagaggttgcagtgggccaagattgcgccactgcactccagcctgggtgaca

SEQ ID NO: 559924 - DNA, 463 bp, Homo sapiens
ggtatctggtttgcttgctcttcttaatttttttatacatctgtgattaagtcagtcatcataacctttcaattattggagttttattatgctggacccctctcccttaagattttcttagagatttttctttggtgctttcttgtgtttattcattgacatgaacttcagttgactcttacattttcaataagaaaccaagaagccttaattcatattttcacaaaacatggggcttactcatgttctaagaagtgggcatattacatataatttaattgtagtcaacttttattatactgggaaatctcttcttttctcttataaaacaggcaaacaaaggaaaccactttgttttaaatggcacagtttcattttgttttaaagggaatatcaggctggcwgcggtggctcacacttgtaatcccaacactttgggaggctgagacaggagaatcacttg

SEQ ID NO: 559925 - DNA, 526 bp, Homo sapiens
agttagaaaaccctaaggactctgacaaaagactatgagaactgataaacaattttagcaaggtttcagaatacaaaatcaatgtgcaaaaacaagcaacatttctatacaccaataatgatgaagctaagagaaatcaagaatacaatcccatttataatagctgcacatgcacaaaaatacctagggrtacatataaccaaggaggtgaaattgaagaacttcagaatactgctaaaaggcatcataaatgacacaaataacagtccatgcatatggattggaagactcaatattactaaaagcaatctatagattcaatgctattcctatcaaatttccaacatcatttttcacataattggaaaaaaactgctaatattcatattgaaaaacaaagatcccaaatagccaaagcaatcctaagcaaaaagaaccaaaccaaaggcatctcattacctgacttcaaactatactataagtctacagtaaccaaaacagcatggtactggcacaaaaacagaca

SEQ ID NO: 559926 - DNA, 473 bp, Homo sapiens
cactccagcctgggcaacagagcaagactccgtctcaaaataaataaattgtcaaacaataaataatttaaaagacaaaattgagtccactattggtgatgtagacccccaggctctctaaggttgattgggacactctagagagggtatccatcagaacacttgggactaccaggatctcctcaggtaagcattcaaagaaaacagagattaaaaataaaaaacaagttgaggggtagaaggactgagtatcctgtggttaaggttgctgcctagagacactgggtcccttcctttttctcttaycagtcaaagacataacataaagacaactacaggtggctaaactcctattttaacaatctctcaccatgtttgcctccaccttcaaaagaactcagtacaccttttgccagctacccatggagtttctcagcagctttgccatcacacacagtcttagcagagaggct

SEQ ID NO: 559927 - DNA, 512 bp, Homo sapiens
tcacatttaagtttaaaagcttggatgaagtggaccagttagttaaaaaacacaaactaccacaaatcactcaatattaaatagattagttgaatggccctataactattaaagaaattaaatttgtaatttaaaaactgaaacttcttccatgtgttcagaaattgttaggaatattaataggatattattagaaagagttagctcactgatctacaacataaagcctgatacagagctaacattcagtccctgtcataatacacaaatatatacatgaataacaagtttaatattgatcttatagaratattaggcaagtcacttgttcaattctcatgtattttaggcaatatagaattctacccaataaagacttgagaaagtatcagcattcacttggtactgggcatttgtaaaatgctaaaggtatattcatttatcattcatttattcattcagtatttttttttttgagacggaatttcactcttgttgcccaggctagaatg

SEQ ID NO: 559928 - DNA, 512 bp, Homo sapiens
tcacatttaagtttaaaagcttggatgaagtggaccagttagttaaaaaacacaaactaccacaaatcactcaatattaaatagattagttgaatggccctataactattaaagaaattaaatttgtaatttaaaaactgaaacttcttccatgtgttcagaaattgttaggaatattaataggatattattagaaagagttagctcactgatctacaacataaagcctgatacagagctaacattcagtccctgtcataatacacaaatatatacatgaataacaagtttaatattgatcttatagagatattaggcaagtcacttgttcaattctcatgtattttaggcaatatagaattctacccaataaagacttgagaaagtrtcagcattcacttggtactgggcatttgtaaaatgctaaaggtatattcatttatcattcatttattcattcagtatttttttttttgagacggaatttcactcttgttgcccaggctagaatg

SEQ ID NO: 559929 - DNA, 485 bp, Homo sapiens
tccagattaaagaagactaaagagactgactggtaaatagttttataaaacattattggartaattgacaaaattggaatatggactgtggagcagatttatgaatgagtacaatgttatatttcttggttttgttgtttggttggttttttgttttgttttggttttgagacagtctcactctgtcactgaggctggagtgcagtggtgcaatctcagctcactgcaacctccacctcccaggttcaagtgattctcatgccttggcctcctgagtagctgggactagaggcatgtgccaccacacagggctaattttggtatttttagtagagacggggtttcaccatgttggccaggctgctctggaactcctgatctcaagtgatctgcccaccttggcctcctaaagtattgggattacaggtgtgagccaccgcacctggcctatatttcttgattttgataattgttctgtaaatgaa

SEQ ID NO: 559930 - DNA, 485 bp, Homo sapiens
tccagattaaagaagactaaagagactgactggtaaatagttttataaaacattattggaataattgacaaaattggaatatggactgtggagcagatttatgaatgagtacaatgttatatttcttggttttgttgtttggttggttttttgttttgttttggttttgagacagtctcactctgtcactgaggctggagtgcagtggtgcaatctcagctcactgcaacctccacctcccaggttcaagtgattctcatgccttggcctcctgagtagctgggactagaggcatgtgccaccacrcagggctaattttggtatttttagtagagacggggtttcaccatgttggccaggctgctctggaactcctgatctcaagtgatctgcccaccttggcctcctaaagtattgggattacaggtgtgagccaccgcacctggcctatatttcttgattttgataattgttctgtaaatgaa

SEQ ID NO: 559931 - DNA, 485 bp, Homo sapiens
tccagattaaagaagactaaagagactgactggtaaatagttttataaaacattattggaataattgacaaaattggaatatggactgtggagcagatttatgaatgagtacaatgttatatttcttggttttgttgtttggttggttttttgttttgttttggttttgagacagtctcactctgtcactgaggctggagtgcagtggtgcaatctcagctcactgcaacctccacctcccaggttcaagtgattctcatgccttggcctcctgagtagctgggactagaggcatgtgccaccacacagggctaattttggtatttttagtagagacggggtttcaccatgttggccaggctgctctggaactcctgatctcaagtgatctgcccaccttggcctcctaaagtrttgggattacaggtgtgagccaccgcacctggcctatatttcttgattttgataattgttctgtaaatgaa

SEQ ID NO: 559932 - DNA, 485 bp, Homo sapiens
tccagattaaagaagactaaagagactgactggtaaatagttttataaaacattattggaataattgacaaaattggaatatggactgtggagcagatttatgaatgagtacaatgttatatttcttggttttgttgtttggttggttttttgttttgttttggttttgagacagtctcactctgtcactgaggctggagtgcagtggtgcaatctcagctcactgcaacctccacctcccaggttcaagtgattctcatgccttggcctcctgagtagctgggactagaggcatgtgccaccacacagggctaattttggtatttttagtagagacggggtttcaccatgttggccaggctgctctggaactcctgatctcaagtgatctgcccaccttggcctcctaaagtattgggattacaggtgtgagccaccgcacctggcctatatttcttsattttgataattgttctgtaaatgaa

SEQ ID NO: 559933 - DNA, 397 bp, Homo sapiens
gtaggtggcaggaatatagcaatataattgatttgtgtatactgatttttatrtcaagcaaacttactaaatttctttattaattctatctataaattactttgaaatttcaatgatgacattattagctaataataatggttttgtttattctcttcaaatcccttatgccttttttttccctttttctgccaaattgatctggcaaggattcttatttcaatgttaaacagaagacattcttggaatcttcttcctcgtaaagatgttttctatgtttaaccactagagataatacctgccctatgttctttgaagttaactttctttagattaagctaattttttattagtttgcacatcatgaatgaatgttcaattttataaaaattatttt

SEQ ID NO: 559934 - DNA, 621 bp, Homo sapiens
agcctcctgagtagctgggattacaggctcatgccaccatgcctggctaatttttgtatttttaatagagacggggtttcaccatgttgcccaggctggtcttgaactcccgacctgtggtgatccacccacttcagcctcacaaagtgttgggattacaggcatgagccactgtgcctggccaggggaggttttaaaacatacagacgcccaggtcccgtccaagactaatcagaatctctgggagtgagacttgagcatcaatatatttttaaagctccctagtgattctaatgtgcagactggtttcataaattttactctagggttaaaagggggaagatttttatgctgtttcttttggtagmaattcaccccctttttggatgccaaaagtaaattaatcatctgattctacaacacagtgatacttccagcataactctattaaacatctccctagaagcagtagttcatgaaagcatttcacgtccaatattatgtaggtaggtagctagcattaagtataggatagccttcttcaagaattgagcttctgattctagttgcttgtatgttgacattcatggaataggcagatgggatagatgactgtcatca

SEQ ID NO: 559935 - DNA, 599 bp, Homo sapiens
cagcacaggaaagacccacccccatgattcaattaccttccactgggtccctcccaggatacatgggaatcgtgggagctacaattcaagatgaggtttgggtgggaacacagccaaatcatattcacactcagggcccaggatattgtttctagacagagggaaaataacaggaggaggagaatggctccaagtggatgtttctcattttttcccttagctcccatctctaaatctctgtccctccaaattaagggatataatgtttccctccaaatttcttccattttatgccatcacactgcgcaattatttcaggaacagtgatatgtgggtttaatagttgttaaggttgaaacattcccctggattttacatggattatttttgttgaataattgtgctttttttttttwaaaaaaattgtcgtctattttagggaggggtgatttgtgtgtgtgtgtgtgtgtgtgtgtgtgtgtgtatgtcacagaattacccagaatttatatatatatgtatatatatatgaatatatatacatatatatatgtatgtcacagaattacccagaaatgtccttgttttttagataaaga

SEQ ID NO: 559936 - DNA, 587 bp, Homo sapiens
ttttcaattttaatagagattaatttttctattttttttcyttcattcattgtacttttggtgttttatgtaaaaactaaccaccacactcaaggtcacctagattttctcctagacatttcacaattttgcattcacacttattgcatgtaaacattgaactgttccagggctattttttttagaaaggttaacccttttttattgaatttccttcccaatgctgccaaaaataagctgatagttgcttaggtctatttctgggatctctattctcttgtattaatttatatgtctatcattaatttatatgtctatcattaatttatatgtctatcattacttgatcattgtaacattacaagaagtcttaaaattaagactttcaggtgtgtcttctgactttgttcttttttcaaaattatcttggcctttctattacctttgcctcgctatacatcttagaaatattttgtcaatatctacataaaatcttgctagatttgattcaaattgcactaaatccatagaacaaaattgtaaacaattaacatcttaacaattttgtatctttccatccatgagta

SEQ ID NO: 559937 - DNA, 642 bp, Homo sapiens
atctgggtgctcctatattggatgcatatatatttaggatagttagctcttgttgaattgaactctttaccattattaatgcccttctttatattttttgatctttgttggcttaaagtcttgttttgtcagaaattaggattgcaacccctacttttttctgttttccatttgcttggtaaattttccttcatccttttattttgaacctgtgtatgtcttgcatgtgagatgggtctcttgaagacagcacaccagtgggtcttggctctgtccagcttgccattctgtgtcttttaattggggcatttagcccaaaaaaaawatatatatattttatattttttgagatggaatttcactctgtgtcacccaggctggagtgcaatggtgcagtcccagctcacggcaacctctgcctcccgggtgaagcgattctcctgcctcagcctcccgagtagctgggattacaggcacctgccatcttttagtagagatggggtttcaccatgttggccaggctggtctcgaactcttgacctcaggtgatttgcctgcctcaggcttccaaagtgctgggattacaggtgtgagccactgtgcctggcctagcccatttatatttaaggttagtattattat

SEQ ID NO: 559938 - DNA, 598 bp, Homo sapiens
tacaacataatgttttgaaatatgtwtacattgttgaatagctaaatcaagtgaattaacatatgaattacgtcacatatttattttggtgagaatgcttaaaatctatttgctgatttttaaatatacaatgcgttgttatatgatagatctcttgaattcttgaatgtattcctcttgtctaactgaaattttgtatgtttttaccaacgtctctgcagtccattaccccctcacccccagcccctggtaaccactcttctattctctgcttctattaattcagcttttttagattccacataccagtgagatcatgtagcctctgtctttttgtacctggtttaattcacttagcataatgtcctgcaggtccatccatgttgttacaaatggcagggtttctttcttttttaaggccgaatagtattccattgtgtatatataccacattgtctttatccacttatccattgatggacatgtagattggttttatagcttggctgttgtgaacaatgctgcaatgaacatggaagtgcagatagatcttcgacattctggtttcatttgctttcgatgtatacccattagtgca

SEQ ID NO: 559939 - DNA, 622 bp, Homo sapiens
tcagtctgtttccaaaaaataattgttcaataaaaaattattgatatattttatacgttacatttaaaaggtgatctagaaacttataatggtctttggctcaacacaaattctaaatcaaatcttttcacttccctgatgaaaactctccagtgaygtccccctacataactgagactatggtcattatatccatcagtttgtgtttctaaagtaatttcataccactctccaaaagcatagcttactccactcttggtccactggctttcttgttgatttttgaatctatcaagttcattttttaacccagataattttcacataggcttccgtttccaacttttcttcagctacttgcctctgtagcatttcattgaagtcacagctaaaatatatatttactgtttctaaagtacttctctgagttttattttcataatagctccttcaatccctgtcacttttttatctccatgagcaccagtaactcataaatacttgttgaatgagtttatgaatgagcttcagtttttcagctatatagtgaatatattactattggtgatttctagtgtacctgctatatataacattataaaaatatagcagctaccattca

SEQ ID NO: 559940 - DNA, 622 bp, Homo sapiens
tcagtctgtttccaaaaaataattgttcaataaaaaattattgatatattttatacgttacatttaaaaggtgatctagaaacttataatggtctttggctcaacacaaattctaaatcaaatcttttcacttccctgatgaaaactctccagtgatgtccccctacataactgagactatggtcattatatccatcagtttrtgtttctaaagtaatttcataccactctccaaaagcatagcttactccactcttggtccactggctttcttgttgatttttgaatctatcaagttcattttttaacccagataattttcacataggcttccgtttccaacttttcttcagctacttgcctctgtagcatttcattgaagtcacagctaaaatatatatttactgtttctaaagtacttctctgagttttattttcataatagctccttcaatccctgtcacttttttatctccatgagcaccagtaactcataaatacttgttgaatgagtttatgaatgagcttcagtttttcagctatatagtgaatatattactattggtgatttctagtgtacctgctatatataacattataaaaatatagcagctaccattca

SEQ ID NO: 559941 - DNA, 622 bp, Homo sapiens
tcagtctgtttccaaaaaataattgttcaataaaaaattattgatatattttatacgttacatttaaaaggtgatctagaaacttataatggtctttggctcaacacaaattctaaatcaaatcttttcacttccctgatgaaaactctccagtgatgtccccctacataactgagactatggtcattatatccatcagtttgtgtttctaaastaatttcataccactctccaaaagcatagcttactccactcttggtccactggctttcttgttgatttttgaatctatcaagttcattttttaacccagataattttcacataggcttccgtttccaacttttcttcagctacttgcctctgtagcatttcattgaagtcacagctaaaatatatatttactgtttctaaagtacttctctgagttttattttcataatagctccttcaatccctgtcacttttttatctccatgagcaccagtaactcataaatacttgttgaatgagtttatgaatgagcttcagtttttcagctatatagtgaatatattactattggtgatttctagtgtacctgctatatataacattataaaaatatagcagctaccattca

SEQ ID NO: 559942 - DNA, 684 bp, Homo sapiens
tttgcatgtgcaggtgtcaaaacatagtgtcaacgaaatgaaatcaaacaatattttattcttttgcaataaaatttcgggtaatagagcaacaatcatgaattctaaataagagccaatgcataaggcaaaacattgcaattgctacattaaatggatacagcatacattgaaaactattatgtaagacagttgctatatcaaataatttgtttttaatttgcttctggttggcctggactataacaattttgataactgcatttatgtaacaataatttagaaagaataaaattacttgactatctttatatttggataagggagaaacaaaacaagtctgttttatatatacaaatggaaaaagcatcaagacttaaaatactctctctgcaaaatgccaatattaaatarcagagggaccaaaatagatttggcatacagagggcacaaaattcacctaaattatttggcttatagagcctgaaagaaaaactgaaggggtaaaaatcagactatatatgggaccattgaaatgggaagagacttagtgtggtcctatcggtttcaaagactttttttacatttttgaatttactgtgtgtgttatggtgaacctgacacaggtgtttcttccagcttatcacatataaaacatttctacaggacctatatagaaattag

SEQ ID NO: 559943 - DNA, 684 bp, Homo sapiens
tttgcatgtgcaggtgtcaaaacatagtgtcaacgaaatgaaatcaaacaatattttattcttttgcaataaaatttcgggtaatagagcaacaatcatgaattctaaataagagccaatgcataaggcaaaacattgcaattgctacattaaatggatacagcatacattgaaaactattatgtaagacagttgctatatcaaataatttgtttttaatttgcttctggttggcctggactataacaattttgataactgcatttatgtaacaataatttagaaagaataaaattacttgactatctttatatttggataagggagaaacaaaacaagtctgttttatatatacaaatggaaaaagcatcaagacttaaaatactctctctgcaaaatgccaatattaaatagcagagggaccaaaatagatttggcatacagagggcacaaaaytcacctaaattatttggcttatagagcctgaaagaaaaactgaaggggtaaaaatcagactatatatgggaccattgaaatgggaagagacttagtgtggtcctatcggtttcaaagactttttttacatttttgaatttactgtgtgtgttatggtgaacctgacacaggtgtttcttccagcttatcacatataaaacatttctacaggacctatatagaaattag

SEQ ID NO: 559944 - DNA, 530 bp, Homo sapiens
tcttaaatttaagtctttaatccatcttgagttaatgtttatatgcagtgggtctagtttcattcttctgcatgtgactatccaactttctcagcaccatttattcaatagggtgtcctttccctggtgtatgttttcgtcaactttgtcaaagatcagttgtgtgtagctatgtggctttacttctgggttctctattgtgttccattgatctatgtatctgtttttataccagtacsatgctaatttggttactatagtcttgtagtataatttgaagtcaggtaatatgatacctccagctttattctttttacttagaattgctttggctatttgggttctttcttagttccatatgaattatagaatagttttttcaaattctgtgaaaaatgatgtttgtaatttgataggaactgcgttgaatctgtagattgctttaggcagtatggtcactttaatgacactgatccttcaaatccatgagcatgggatgtcttctcatttgtttgtgtcatctacaattt

SEQ ID NO: 559945 - DNA, 531 bp, Homo sapiens
aggcctttctgttacatcctcacatagtggaaggcagataggcatgagctctcatgacttaaacaccccccattaggccctacctttcagaattatcacattgggaattacatttccaacacatagattctggggaacacattcaaaccatagcagggctcatggagcaaaaagatttacctagttactacatattcaaaacagtttttatctgtagcctttataytttgaaggacagattggctggacataaaatccttggctcatgctatcttttctttgatgagtctcttgtaggttcttcttcacaatctgtgtgtgaatgttgttgttgagaagcctgatggcaatctaattttttctcttataaatggcttggtctcttcacatgactgactaaaaagtttatttcttcatattttaagtaccataacatggtttagcaattactattgcaagttaattctcacaggtaaaagtgtggcctttcaatatgtagagttgtatctttgatttcaaaacattttttct

SEQ ID NO: 559946 - DNA, 584 bp, Homo sapiens
agattgacgcagaagatgggtgatttctgcatttccaactgaggtacctggtttattggttcatctcatcaagactggttggaccgtgggtgcagtccacggagggtgagctgaagcagggtggggcatcacctcacctgggaagtgyaaggagtcagggaatttcccttttccagccaagggaagctgtgagagactgtaccaggaagaacggtacactcctgcccaaatactgcacttttgccatggtctttgcaactggcagaccaggagatttcctctggtgcctggctcggtgggtcccacgcccatggagcccagcaagctaatatccattggcttgaaattctcactgctagcgcagcagactgaaattgacctggaatgctggagcttgctggggggaggggcatccaccattgctgaggcttgagtaggcgattttatgctcatagtgtaaataaagctgccgggaagcttgaactggtcagagcccactgcagctcagcaaggctgactgcctctctagattccacctctgtgggcagtgcatatctgaacaaaaggcagcagccccagccagg

SEQ ID NO: 559947 - DNA, 584 bp, Homo sapiens
agattgacgcagaagatgggtgatttctgcatttccaactgaggtacctggtttattggttcatctcatcaagactggttggaccgtgggtgcagtccacggagggtgagctgaagcagggtggggcatcacctcacctgggaagtgcaaggagtcagggaatttcccttttccagccaagggaagctgtgagagactgtaccaggaagaacggtacactcctgcccaaatactgcacttttgccatggtctttgcaactggcagaccaggagatttcctctggtgcctggctcggtgggtcccacgcccatggagcccagcaagctaatatccattggcttgaaattctcactgctagmgcagcagactgaaattgacctggaatgctggagcttgctggggggaggggcatccaccattgctgaggcttgagtaggcgattttatgctcatagtgtaaataaagctgccgggaagcttgaactggtcagagcccactgcagctcagcaaggctgactgcctctctagattccacctctgtgggcagtgcatatctgaacaaaaggcagcagccccagccagg

SEQ ID NO: 559948 - DNA, 278 bp, Homo sapiens
gaattctgcacataacagtggctcccctggagagagtgagaagccccaggggcatagggtgccaccttttacatttcagctggacagcaaggtgagtgggcacagtggctgctcacccctccgccacagtcacagtattacaggccaagcagggagacatcatggctcaaagaatcttgtcaaagaatcttgatgtttttactctaaattttaaaaaatgcaatatttttacttaatactttaagcatatgtgacmctttggttttattcctcccttc

SEQ ID NO: 559949 - DNA, 622 bp, Homo sapiens
ttttacaaaaataatccattttaaatgagataattagggtggaccctaattgaatatgactggtgtcttaataaaaaggggaaatttggagacatacacattgggagaacaccataagatgaaggcagagattgaaatgatgtttccataagccaaggaataccaaaaattgacagcaaacaaccaggagccaacactgctaacaccakgatcttgaacttctagcctccagtactgtgagacaatacgtttctaagtatttgtgcatactcatctaagtttatgtgcatactcatcaacatgttggggaaagggaaaacttggtggtttacctcattccaaatgaaatctaaatgtctgcatagaaaggaagaacaaagctgctcacttgtatagccaatgaaatgctgaacttagcctgctcttataaaattacaaaataccattctactgtcaattccataacaagttattatcagatatctttaaagcacagatttatctcatgttgccttatacatttaattaccctaagatttgcagattgtagaatgcctttcagaattttccatccatcaatctgcactctttagagttagaaaatatttatttcttcatctcc

SEQ ID NO: 559950 - DNA, 622 bp, Homo sapiens
ttttacaaaaataatccattttaaatgagataattagggtggaccctaattgaatatgactggtgtcttaataaaaaggggaaatttggagacatacacattgggagaacaccataagatgaaggcagagattgaaatgatgtttccataagccaaggaataccaaaaattgacagcaaacaaccaggagccaacactgctaacaccatgatcttgaacttctagcctccagtactgtgagacaatacrtttctaagtatttgtgcatactcatctaagtttatgtgcatactcatcaacatgttggggaaagggaaaacttggtggtttacctcattccaaatgaaatctaaatgtctgcatagaaaggaagaacaaagctgctcacttgtatagccaatgaaatgctgaacttagcctgctcttataaaattacaaaataccattctactgtcaattccataacaagttattatcagatatctttaaagcacagatttatctcatgttgccttatacatttaattaccctaagatttgcagattgtagaatgcctttcagaattttccatccatcaatctgcactctttagagttagaaaatatttatttcttcatctcc

SEQ ID NO: 559951 - DNA, 472 bp, Homo sapiens
aagaaaatatcaatggtcagcaaaagaaaaaacaacactaaagaaaatatgggycaagctagtaagtcataaatttccattgaaatgtaaatgtaagttagagtctatgaacctcaggtgtgggcaaaggctatgagaaactgtgttgtattaatccttttatctagagatgatagtcaaaatctttaacaaccagtatggaacaaacatcaacaaataagaacgggtgctgaccatagacaagtaaaatagctgtgcccatgtatactggatgtgtatcggtcatgcacttttccatgcctaacactgcactttgtacctagtaagttctcaattaatatctattagagtaaattcacactgtattaacctggccatctcacaaaagtgaggttaattcaaaaaacactaaattaataatgatttagatttatcattaataataatgattaataaggatttatcaaagaat

SEQ ID NO: 559952 - DNA, 572 bp, Homo sapiens
tgcagtgagctgagatcatgccattgcactccagcctgggcaacaagagcaaaactctgtcaaaaaaaaaaaagaaagatagaaagaaagaaagaaagagaaagaaagaaaagaaagaaagaaagaaagaaagaaagaaagaaagaaagaaagaaagaaagaaaacgtagggtcaagagaaactgatccccttttctaacccttatgcaacaagagtatcaaagtcttagcttgtgtttttcaagagaaataatcttttataaaattctcaacaacaaatccttctattagcctatactactaccatacagacgtaacattaaacagaagagaggacaccctgcaggtagacagcaacacttaacaatttctycgctcaaggatttggtaactatcttaaaggtagaatggtttgcaagtctagacatttgcaatagacttttcttgtgttccttcttttaacctctttcagagattctcatctgtgtcatataagaattgtcattcagggttgtatatgccaaattatgttcactatactctgtgagtgctttaaagggttctgaagaata

SEQ ID NO: 559953 - DNA, 539 bp, Homo sapiens
tattagttactgaacaatcagaaaatgggcacatagctccaacattttccccttggaattctccagtttttgtaattaagaaaaaaatcaggtaaatggagaatgttaactgacctaagagccatcagttcagttatacaacctatgggagtattacagccaggattgccttctcctgctataattccaaaaaattggcctttaatagtcayagatttaaaagactgtttctttactacccctttagctgagcaaaattgtaaatggtttgcatttacaattcctgcagtaaacaacctgcagcctgctaagcgttttcattgttttacagatgggtctagtaatggtaaagcttcttattttggctcaaaaagtaaagttttccagacatcctatacttcagctcaaaaagcagagcttgtagcggtaattgaggtattgactgcttttgatatgcctattaatgtgatttctgattcttcatacatggtttattccacacagttaattgaaaatgctcagttacgatttcatacaga

SEQ ID NO: 559954 - DNA, 501 bp, Homo sapiens
atataaaagtattttatatataaaaacaaagtatttgaatatacattatgtattttaatatatgatatatatttctatataatatataattatatataatatacagaaatatatagaatacatgtagaaatatatagataatatatatattttctatatataatatgtaaataatatatagagaaaatagaaaatatgtattttctctatatatattctatatatatttctctatatattctaacatataaatataatttaaatattaataaatatatagagagaaaagtgtatatttctatagataaaatatttttatctataaaatatgtgtattatatatagaaaagatatatatctctatataaatatttttatgtgcctgcatatatatatgcatcatttccagagaagaattttggtgggttctgtggttatctgtycatcctgctgcaagggagtggaagaatgacatcaatagtcccatgaaaaatatttgca

SEQ ID NO: 559955 - DNA, 609 bp, Homo sapiens
ataatttcttcataagctgtattatatttcatgtttccattgggcaactttgacattaaatatggataaactaatggttttcctaaggatgtccagtattagaatgttagaatgattttaatgagaccccatcagcaggataggtttacctgtgaggttgtccatgtgaagtgcatataaatcctggagcattacctatgaatttaaatcagaaagctcatcaacttccgttggcaaggtgaaagataaaagccacagaaggtccttcccagcctctgtcactaatgataaacagcattaactgcttctgtagacactaattccgctatcttgggaacacaggcagctaccatgagaactttacagcttcactaatcatacttttgtttgtcacaaagcacaaaataaaacctcaacaaagaagcaataaatattagcatttatgaacaaaagaaggtcgcataaatatgtatattgctaaataggcaatgcattcttcattaaccaactatcatgttcattagtataagctcttattacaaggaaagraaagaaacaaaataagagcaaatttaatgtaaactaggtcagattctgttatgtaggaag

SEQ ID NO: 559956 - DNA, 607 bp, Homo sapiens
acgtggggtgtgttccatctctgagttttacagttatgtagtaatcacgtttcctaattatgactaaaattaaaaaagcaccttctttggattgggaagcaaatcaagggatttgatataaattagacacaagtgtatgcacttctgcwattttttctactttagccactcatgaatttagagggagctcatctgaaaaagccatagaaaacacatttactctaagatactcctcttataattgcaacatactaatcgtgccctttaatctaaaatatattgcatgtatgcaattctcctaatggaatattgttaggaagaaataatccaaaaataatgtattaaaatgaaataactactttgatttataaaatgttttacattaaataaactcacctggcttttacattatacaggtaggaagatgtttttgagtctgactttaaattgctttaaccctctatttaatgcacctgataactgaatattctgaacagaaaattttcagaatgcaaataccatcacacctgttcctttttagcacatattctttatttgtataaaatctatgaagattttagggacagtccatggaaattttaggggg

SEQ ID NO: 559957 - DNA, 513 bp, Homo sapiens
atcctcaacaggctgatgctctgtcttctgagcctacagaagccctgtcagtcttaaggatgtcctcagagtcattcttcctttttcttaaaggaaacacatgtttgaagctcagtacctctatgagttcatatcctgcctgtgacattttggaagtccaacagcttctcttcatttaattctgcttctgtccctttcaattcagggtgacagtgcttctgctgatataacattctcaaaactttktgtgtctcctgtgcaactcacagagtccacacaatcaggtaagagggttctccacagctctttcctggataacctcatctctattcctggcttctgctaggatggctgattgtttccattagccaaatattcaatctctttagaaacaagagacagtagtcagaaacaaaaagattaggccaggcatggtggctcacacctgtaattccagcattttgggagggtgaggtgggtggatcaattgaggtcatgagcacaagaccagcc

SEQ ID NO: 559958 - DNA, 586 bp, Homo sapiens
cccgtctctaataaaaatacaaaagttagccaggagtggtggcccacacctatagtcctggctactcaggaggctgaggcaggaggatcacttgagcctgggagattgaggctgcagtgagctgtgatcccaccactgcactccagcctgggstacaaagtgagaccctgtatcaaaaaaaaaaaaagaaaaaaaaaaggtcaggagcagtggtttatgcctgtaatcccagcactttgtgagaccaaggcaggtggatcacttcaggtcaggagtttgaggccagcctgggcaacatagtgaaatcccgtctttactaaaaatacaaaaattagccaggcatggtgatgcacatctgtggtcccagctactcaggagggtgaggcatgagaatcacttgagcctgggaggtagaggttgcagtgagccaagatcccgccattgccctccagcctggggtacagaaaaagaccctgtcaaaaaaaaaaaaaaaaaaaaaaagaaagaaaaaaaaatctgtagggattgagtaaatacaatttcttatcttcttggagcttacatttcatggaggaggcagaaaata

SEQ ID NO: 559959 - DNA, 586 bp, Homo sapiens
cccgtctctaataaaaatacaaaagttagccaggagtggtggcccacacctatagtcctggctactcaggaggctgaggcaggaggatcacttgagcctgggagattgaggctgcagtgagctgtgatcccaccactgcactccagcctggggtacaaagtgagaccctgtatcaaaaaaaaaaaaagaaaaaaaaaaggtcaggagcagtggtttatgcctgtaatcccagcactttgtgagaccaaggcaggtggatcacttcaggtcaggagtttgaggccagcctgggcaacatagtgaaatcccgtctytactaaaaatacaaaaattagccaggcatggtgatgcacatctgtggtcccagctactcaggagggtgaggcatgagaatcacttgagcctgggaggtagaggttgcagtgagccaagatcccgccattgccctccagcctggggtacagaaaaagaccctgtcaaaaaaaaaaaaaaaaaaaaaaagaaagaaaaaaaaatctgtagggattgagtaaatacaatttcttatcttcttggagcttacatttcatggaggaggcagaaaata

SEQ ID NO: 559960 - DNA, 513 bp, Homo sapiens
caactccatcttgaatatgggctaggcaaaataaggctgagacctgytgggctgcattcccaggaggttaggcattcctagtcacaggaaggaggtcaacaggactgatatcacaaaatacaggggataaagactctgctgataaaacagaatatagtaaagaaactgtccaaaaatccatcaaatctaagatgacaataaaagtgacctctggtcaacttcgctgcacattatatgttaattataatgcagaagcatgctaaaagacactccccccagcaccatgacggtttaaaaatgccatgacaatgtgcagaagttccgatgtttagtctaaaaggcagagaaaacctcagttccagaaattgccttcaccatttctggaaaactcatgaataatcatgaataatcacttttttttgatggagtcttgctctgtcaccagactggagtgcagtggcacgatctcagctcactgcaacctccacctcctgggtttaagcgattctcctg

SEQ ID NO: 559961 - DNA, 496 bp, Homo sapiens
ctctcatgaatctggcacatccactttttcagccattggacagtggagtcccatgtggggagggcgttagccttggactgaaagwtgtaccataggctcccctgtttctcaggcctttgaagtcagactgaatttcactactgggttttctggttttccagcttgcagatgaaacatcatgagactttataatcatataagacaattactatagtaaatccccttttacatgtctgtatatatctaattgattctatttctctggaaaatcctaacacaatacagtttctttctagagtgtttttaggttaccagaaaaatcgagcagaaggtatagcgattttatgtatacccccttcccacacatatgcatagcttctcccatgatcaatatttcctaccagagtggtatatttattaaaattgatgaacctacattgacacatcattatcactcagagtccatatttcacagtagtgttctttgttggtgttg

SEQ ID NO: 559962 - DNA, 495 bp, Homo sapiens
ctgcctcagcctcccaagtagctgggattacaggcacttgccaccatgtccagctaatttttgtatttttagtagaggtagggtttcactatgttggcaatgctggtcttgagctcctgacctgaagtgatctgcccacctcttcctcccaaagtgcagggattagaggtatgarccactgtggctggccagtgagatttaattgttgtaatttgcatttctctaatgacatatgatgtgaagcatccttttcatatagctatgtgtcatcttggtaagttatctgcctttaacccatttttttgggttgtttattttcttattgatgatttctaggtcttttttgtatattttgaatagtagtcctttaatatgtcttttgcaaatattttctccctgtctgtggctcatcttcttattcttttgacagcattttaaacaaagtgtaaatttttaacttcagtgaagtacagcttattcactgtgtaaaaaaat

SEQ ID NO: 559963 - DNA, 549 bp, Homo sapiens
aatttgtttcttcatggagaaggacagagaggsagctggcgtttgttgagcactccctctgtgccacacgcgttacatacattatagcattttgtcttcaaacaacctgggcaaatagaagttaatattcccatgttacatgtgagaaactgatgctctaaaagaagtggtaactggctaaagataacccatctaggaagtgtcagatcctgactcaggcaggtcttggtctttattgagacaggcctctgtctttccaacgaaacagctaaatcagcgtagaaagctgaggaaaggtggggaaaagatacactttgtcaggaagaagtgaaaagccttcttgtcaaacaaactggtcataaccaaaggctttataagaaccctgggttagcaaagaacttttcagtcccccacaagctcttcttcctgccatctcatgtatccacagccaccacagataccaaatcaaaccgtggaatcccagagatcttctggggagcaaatatttacagagacttgacgtcaaacttgcaactaaggcaataacaa

SEQ ID NO: 559964 - DNA, 608 bp, Homo sapiens
tgttaggtggaagtatgaccttgtaattgtctttgggagctaagtatgattttaaaagatgcatatgggtgccaagtaaacaaggggagaggttatgctggcacttgtcatggtacccacttattgggtcaaacattcttctggatgtttctgtaaaggtgtttcttgaatgagaataacatttaaatcagtggagcctaagtaaattaatttgccttccataatgtgggtgggccccatccagttagatgaaggcctgaatagaaaaaatatctgacctcccacaagagaaaattctccataagactgacttgggcctcatctgcaacattggctcttcctggttttccaggaattgattttggaattgaactacaactccttcctgagtctccagcttgctggcctcccccaccagattttagactcactccactatccacagtcacatgagccaatttcttaaaataaatatctttatacacacatagatcctattggtcctgtttctctggagaaccctggttcacagrtttagcaccacattatctaaagaaagtcttccatatgtatacatgtgccatgctggtgtgctgcacccactaact

SEQ ID NO: 559965 - DNA, 557 bp, Homo sapiens
cacatctccgggtgcaaggtctagcgatatgtcaaaatgctcactgtgggcagtgmcaaggaaggagaatagagttacaccctcaatgtgctggatccagcaatatgttaatatcccatctgtgggctgggtccatgtgagaccatcaagtcactcaggtgctaggcaccggcaaatttcaccatgaaagctgcagaatggtccaggaattagattaacaatcccacaactgtctcagttgtaggcatgacattcaacacctcctgtatgttgggtctaagctcacgaataaccctctcaacaccagactggatttgtgcatgagagtctcaattcctctgcagactgacctgtgttcccgtgagaggatgacaatagttactgttggctgggtgtgcatatgagtgtcacaatctcacctgtgtgctcggcccagttagcacgctctgtgtactacccaatggccctatacactatgcatgagagtcgtaatcaactttgacaccttcctaatggtagggacccatgatcgtacttgtagcattaagcccggtatg

SEQ ID NO: 559966 - DNA, 599 bp, Homo sapiens
aatagtatttcgctgtgtatatatagtacattttccttatccatttatctgttgctgtacatttgaattgattccatatataagctattataaatagttctgtaatgaacatgggaatgcaaatatctttttgacacagtaatatcctttcttttggatatacacccagaagtaaaattgctggatcatataatagatatatttttaatttctttcagaaacctccatastattttctataatggccatactaatttacaattccaccaacaaggtatacatccactcttttttatatcctcattagttcttgatttatttatttatttatttttattatagccattctaatgggaatgaggtggtacttcattgcagtttggatttgcatttccttggtgattagtaatgtagagcatctttttgtgttccagttagccatttttgtatctctttttgacaaacatctattaagatcttttgtattttttaaattagattataagtgtattttattttgagattttaaagtttcttatatattctgaatattagccttttgtcacatgtatatgaaaacattttctgtcatcgcctaa

SEQ ID NO: 559967 - DNA, 599 bp, Homo sapiens
aatagtatttcgctgtgtatatatagtacattttccttatccatttatctgttgctgtacatttgaattgattccatatataagctattataaatagttctgtaatgaacatgggaatgcaaatatctttttgacacagtaatatcctttcttttggatatacacccagaagtaaaattgctggatcatataatagatatatttttaatttctttcagaaacctccatagtattttctataatggccatactaatttacaattccaccaacaaggtatacatccactcttttttatatcctcattagttcttgatttatttatttatttatttttattatagccattctaatgggaatgaggtggtacttcattgcagtttggatttgcatttccttggtgattagtaatgtagagcatctttttgtgttccagttagccatttttgtatctctttttgacaaacatctattaagatcttttgyattttttaaattagattataagtgtattttattttgagattttaaagtttcttatatattctgaatattagccttttgtcacatgtatatgaaaacattttctgtcatcgcctaa

SEQ ID NO: 559968 - DNA, 532 bp, Homo sapiens
tacgtctgtgctaccttctgttttattggaaaaattgtctgtctttatgctagaaacaaactgttttcattgctgttgctttgtaatgtgctttgaaatcagaaaagttgaggccgctaacattgtttttttttwaaacatttttgggctctttatggtcgcttgacattccacataatttgttggttcctttttctatttcaaaaaaattgctaatttaaaagggattgcattgaatctgtaactcgctttaggcatcatgagcattcttcataatatcaagtcttacaacccttaaacatgagcatgctcaaaagtgagttgtttaatttccatatatatgttgctatttttgttttcttctgttattcatttctagttttattccattttgatcagaaataatagtcactgaaaggctaaaccactctgggaagtgacccccattatagaacattacaaagatatgtgagggcaccacttctgccctgatgggctagagggatgtgttctctgagatgacacattgcac

SEQ ID NO: 559969 - DNA, 532 bp, Homo sapiens
tacgtctgtgctaccttctgttttattggaaaaattgtctgtctttatgctagaaacaaactgttttcattgctgttgctttgtaatgtgctttgaaatcagaaaagttgaggccgctaacattgttttttttttaaacatttttgggctctttatggtcgcttgacattccayataatttgttggttcctttttctatttcaaaaaaattgctaatttaaaagggattgcattgaatctgtaactcgctttaggcatcatgagcattcttcataatatcaagtcttacaacccttaaacatgagcatgctcaaaagtgagttgtttaatttccatatatatgttgctatttttgttttcttctgttattcatttctagttttattccattttgatcagaaataatagtcactgaaaggctaaaccactctgggaagtgacccccattatagaacattacaaagatatgtgagggcaccacttctgccctgatgggctagagggatgtgttctctgagatgacacattgcac

SEQ ID NO: 559970 - DNA, 532 bp, Homo sapiens
tacgtctgtgctaccttctgttttattggaaaaattgtctgtctttatgctagaaacaaactgttttcattgctgttgctttgtaatgtgctttgaaatcagaaaagttgaggccgctaacattgttttttttttaaacatttttgggctctttatggtcgcttgacattccacataatttgttggttcctttttctatttcaaaaamattgctaatttaaaagggattgcattgaatctgtaactcgctttaggcatcatgagcattcttcataatatcaagtcttacaacccttaaacatgagcatgctcaaaagtgagttgtttaatttccatatatatgttgctatttttgttttcttctgttattcatttctagttttattccattttgatcagaaataatagtcactgaaaggctaaaccactctgggaagtgacccccattatagaacattacaaagatatgtgagggcaccacttctgccctgatgggctagagggatgtgttctctgagatgacacattgcac

SEQ ID NO: 559971 - DNA, 561 bp, Homo sapiens
aaataaataagaaaggattatgttgcccaaatttgctcaccttagaaagtctcctcaaccattctgtgtgaggtgatttttccaaggtaattgtgccctgactgcgctggatgtcagtgtgtcttgtctttttgaaaatcactggattactctcatgaacggggtatttctctttctatttgaaaacggtcaactgtcctctgcaggtgtcctgatttgctagttkagaccctgaaggtagcggtgagaaaatatttgggccacatcagaatacctattctcagctggaggatatatataaattttttaataatatctaaccattttctcaataaccattatatttaacattgatagcttggagggcagggaaggacacagatgacacaatcttcaaagtttaatttatttataaggttttttttttgttcttgttcagttttgcttagtttttggatacaaggtcttgctctggtgcccaggctggagggcagtggcataatcataactcataatttggttgtaatggttctttaaaatatatttttgctgagagtgcta

SEQ ID NO: 559972 - DNA, 561 bp, Homo sapiens
aaataaataagaaaggattatgttgcccaaatttgctcaccttagaaagtctcctcaaccattctgtgtgaggtgatttttccaaggtaattgtgccctgactgcgctggatgtcagtgtgtcttgtctttttgaaaatcactggattactctcatgaacggggtatttctctttctatttgaaaacggtcaactgtcctctgcaggtgtcctgatttgctagtttagaccctgaaggtagcggtgagaaaatatttgggccacatcagaatacctattctcagctggaggatatatataaattttttaataatatctaaccattttctcaataaccattatatttaacattgatagcttggagggcagggaaggacacagatgacacaatcttcaaagtttaatttatttataaggttttttttttgttcttgttcagttttgcttagtttttggatacaaggtcttgctctggtgcccaggctggagggcagtggcataatsataactcataatttggttgtaatggttctttaaaatatatttttgctgagagtgcta

SEQ ID NO: 559973 - DNA, 444 bp, Homo sapiens
aaatagtattacaaaagaagataagtwttttcttttcttttttttttttttttggttcatctagccaaaagctgtttcaatttttaaatatacatcccaggggtgtttcaatgacagtaaaggaagcggctcccacggggccgacagaatcttgcaacgtcaaaatatgtactaaagtccaggaggccatgggcatcacaatgggacaagtggaaccaccaaggtgtccagcacagcccctcgagaccccattaactgaagctctaggaggtcataggcatttgccatacaccgtcctatctctcaccagcgctgcacatctccagccctgccgagatgacccccactgctggctggggggcagatgtctggctgacaagcctttccctaatttactggtttgcaatttatgatgcccaattataacacctgcaatgctcagat

SEQ ID NO: 559974 - DNA, 444 bp, Homo sapiens
aaatagtattacaaaagaagataagtattttcttttcttttttttttttttttggttcatctagccaaaagctgtttcaatttttaaatatacatcccaggggtgtttcaatgacagtaaaggaagcggctcccacggggccgacagaatcttgcaacgtcaaaatatgtactaaagtccaggaggccatgggcatcacaatgggacaagtggaaccaccaaggtgtccagcacagcccctcgagaccccattaactgaagctctaggaggtcataggcatktgccatacaccgtcctatctctcaccagcgctgcacatctccagccctgccgagatgacccccactgctggctggggggcagatgtctggctgacaagcctttccctaatttactggtttgcaatttatgatgcccaattataacacctgcaatgctcagat

SEQ ID NO: 559975 - DNA, 444 bp, Homo sapiens
aaatagtattacaaaagaagataagtattttcttttcttttttttttttttttggttcatctagccaaaagctgtttcaatttttaaatatacatcccaggggtgtttcaatgacagtaaaggaagcggctcccacggggccgacagaatcttgcaacgtcaaaatatgtactaaagtccaggaggccatgggcatcacaatgggacaagtggaaccaccaaggtgtccagcacagcccctcgagaccccattaactgaagctctaggaggtcataggcatttgccatacaccrtcctatctctcaccagcgctgcacatctccagccctgccgagatgacccccactgctggctggggggcagatgtctggctgacaagcctttccctaatttactggtttgcaatttatgatgcccaattataacacctgcaatgctcagat

SEQ ID NO: 559976 - DNA, 571 bp, Homo sapiens
  misc_feature 526: n = A,T,C or G
taacatctaaaccaaacttaaagagaacaccacaataagaaaagaaattgcaaaattggaataaatattttcaacacatgaaattacgaaggggctcatgtttccatgaagagcactctctctctccctctctctctctctctttttttttttttttttcccgggccttcctctgtcacccagtctggagtgcagtcgtgcaatctcggctcactgcaacctccgcctcccaagtttcagcaattcttctgtctcagcctcctgagtagctggggctacaggcttgggccaccattccccgctaatttttttgtaagtttagtagagacggattttcaccaggttcrccaggctggttttgaactcctgacctcaaataatccacctgcctcatcctcccaaagtgttgaaattacaggtgcgagtcaccacagctgacctgtgaagacctcttaaaaattagttaaaaaacaaacaaaacagaaaaagagaaagaagaaacatcctctcagttaaaaaaaaaaangaaaagaaaagaaaaaaaggaaaaagacattattttacaggtgta

SEQ ID NO: 559977 - DNA, 427 bp, Homo sapiens
ttaggtcctcccatgcaataatttccagsttttcttctcaataatctactttatattatagtccttgctcttttctttcacatatacttgctttagtgcatttgtccagcggtcctcagactgtttggtcctgggttggggggtgcagacatgatgtaataattttctgtaccacatgttggacccaccagggtcgctggcaaatggtgagcgcaagggaaaaaagactggctaagtgattatatgggggatccctaatatcccttccccttttgaccacatgataatgtggacatcactgataacaacatgaggtgtgtgactgttacttgttccagctgctccagcaaagctcagtgggcaccagaaacacagtaggctgtaaccacctcctggccatcactaaccctacagccccaagcaggag

SEQ ID NO: 559978 - DNA, 427 bp, Homo sapiens
ttaggtcctcccatgcaataatttccagcttttcttctcaataatctactttatattatagtccttgctcttttctttcacatatacttgctttagtgcatttgtccagcggtcctcagactgtttggtcctgggttggggggtgcagacatgatgtaataattttctgtaccacatgttggacccaccagggtcgctggcaaatggtgagcgcaagggaaaaaagactggctaagtgattatatgggggatccctaatatcccttccccttttgaccacatgataatgtggacatcactgataacaacatgaggtktgtgactgttacttgttccagctgctccagcaaagctcagtgggcaccagaaacacagtaggctgtaaccacctcctggccatcactaaccctacagccccaagcaggag

SEQ ID NO: 559979 - DNA, 587 bp, Homo sapiens
acattttgacaacagattggagaagctcccggaatgackagtgtggctgaatattgtcaattttcccatgtataaagctctttcataaaggataaaataggtagtggtttcttaattgatcaaaaccttaacaaaactacagtaagtaaaagcaaccaggaaatgtaacctaatcaaaggagaaaaatatatattcaagtgaacctaaagaagtggagatctaggaattatttttttaacttaaaatccttttatttttctttactttttcattttatgcagaggatcttactttatctcctgggacagagtacactggtggaatcacagctcacttgtaacctcaaatttcgcaagtcaagcagtcatgccacctatgtcttctgagtaaatatgaccacagtttgtgcacattacccctcctgtatagtttctttaaaaaaatttgtacaaacagtatgttgctgtgttgcctcggctggtctcaaactcctggtctcaggcaatctgactgcttcagtctgaaagtgctggcacaagctaccatacctggaattgtttctcttttaagaaaaaatagctttaaa

SEQ ID NO: 559980 - DNA, 587 bp, Homo sapiens
acattttgacaacagattggagaagctcccggaatgacgastgtggctgaatattgtcaattttcccatgtataaagctctttcataaaggataaaataggtagtggtttcttaattgatcaaaaccttaacaaaactacagtaagtaaaagcaaccaggaaatgtaacctaatcaaaggagaaaaatatatattcaagtgaacctaaagaagtggagatctaggaattatttttttaacttaaaatccttttatttttctttactttttcattttatgcagaggatcttactttatctcctgggacagagtacactggtggaatcacagctcacttgtaacctcaaatttcgcaagtcaagcagtcatgccacctatgtcttctgagtaaatatgaccacagtttgtgcacattacccctcctgtatagtttctttaaaaaaatttgtacaaacagtatgttgctgtgttgcctcggctggtctcaaactcctggtctcaggcaatctgactgcttcagtctgaaagtgctggcacaagctaccatacctggaattgtttctcttttaagaaaaaatagctttaaa

SEQ ID NO: 559981 - DNA, 587 bp, Homo sapiens
acattttgacaacagattggagaagctcccggaatgacgagtgtggctgaatrttgtcaattttcccatgtataaagctctttcataaaggataaaataggtagtggtttcttaattgatcaaaaccttaacaaaactacagtaagtaaaagcaaccaggaaatgtaacctaatcaaaggagaaaaatatatattcaagtgaacctaaagaagtggagatctaggaattatttttttaacttaaaatccttttatttttctttactttttcattttatgcagaggatcttactttatctcctgggacagagtacactggtggaatcacagctcacttgtaacctcaaatttcgcaagtcaagcagtcatgccacctatgtcttctgagtaaatatgaccacagtttgtgcacattacccctcctgtatagtttctttaaaaaaatttgtacaaacagtatgttgctgtgttgcctcggctggtctcaaactcctggtctcaggcaatctgactgcttcagtctgaaagtgctggcacaagctaccatacctggaattgtttctcttttaagaaaaaatagctttaaa

SEQ ID NO: 559982 - DNA, 625 bp, Homo sapiens
tcatctaaagaaagtaaattcttctcatctgctcacagaatatgacaggccacaatggaacaaagataaaaatcaataccaagaaaatctcacaaaatcacagaatgatattgaaattaaacaacttgctcctgaatgaattttggataaacaaaaaaattaaggcagaaaattataaagattttgaaatagaagagacacaatataacaaaatgtctgggttgtaggaagagatctgttaagaggaaagttgagagtgctaaatacttgcatcaagaagttagaatgatctcaaactaacaatttaacatcacacttagagaaactagaaaaataaaaactaacttaccccaaagctagcagaatggcaaaaatattcataacctatgaacctgacaaaatctaatactcagaatctataagaaacttaaagaattcacaaggaaaaaattaccccatgaaaaagtgggcaataacagacactgttcaaaagaacacatacaagtggccaaataacatgaaaaaagcttatcatcactaaccatcaaggaaatgtaaataaaaaccacaataagacaccatygtacaccagttagaatggcttttgttaaaaagtaaaatgata

SEQ ID NO: 559983 - DNA, 625 bp, Homo sapiens
tcatctaaagaaagtaaattcttctcatctgctcacagaatatgacaggccacaatggaacaaagataaaaatcaataccaagaaaatctcacaaaatcacagaatgatattgaaattaaacaacttgctcctgaatgaattttggataaacaaaaaaattaaggcagaaaattataaagattttgaaatagaagagacacaatataacaaaatgtctgggttgtaggaagagatctgttaagaggaaagttgagagtgctaaatacttgcatcaagaagttagaatgatctcaaactaacaatttaacatcacacttagagaaactagaaaaataaaaactaacttaccccaaagctagcagaatggcaaaaatattcataacctatgaacctgacaaaatctaatactcagaatctataagaaacttaaagaattcacaaggaaaaaattaccccatgaaaaagtgggcaataacagacactgttcaaaagaacacatacaagtggccaaataacatgaaaaaagcttatcatcactaaccatcaaggaaatgtaaataaaaaccacaataagacaccatcgtacaccagttagaatggyttttgttaaaaagtaaaatgata

SEQ ID NO: 559984 - DNA, 599 bp, Homo sapiens
gtgtgtgtgtgtgtgtgtgtgtgtgtgtgtgtgtgtgtgtgtgtccctggaggaagacgtggagctgtgcgtgcctcgctgggcttgctgggagatgcattctgataaccaatcccagccctttcatcacatagctgtaggactacaattccagcatgcacggggtaccgggacagttcgcctcaatggaggaagagaaaggggtacatgcgtctcgctgggctttctgggagatgttgtctcattatttctcccagcccttttgtcacagggcttcaggactacaatcccagcatgcaccgtgctcagggagagcgcgcctcagtggasgaagaagtggacctgtgctcttctcgctatgctttttcggagatgtattctcacacactcccagccctttggtcactgggctgccctttggtcacagggctgcagcactacagtcctagcatgcatgggactgagggagcatgcgctaatcagtggaggaaggagcgaggctctgcacgcctctctgggcttggtggaagatgcagtctcataaacactcacagcccttttgtcacagggctgcagcgctacaatcctagcatgcaccg

SEQ ID NO: 559985 - DNA, 599 bp, Homo sapiens
gtgtgtgtgtgtgtgtgtgtgtgtgtgtgtgtgtgtgtgtgtgtccctggaggaagacgtggagctgtgcgtgcctcgctgggcttgctgggagatgcattctgataaccaatcccagccctttcatcacatagctgtaggactacaattccagcatgcacggggtaccgggacagttcgcctcaatggaggaagagaaaggggtacatgcgtctcgctgggctttctgggagatgttgtctcattatttctcccagcccttttgtcacagggcttcaggactacaatcccagcatgcaccgtgctcagggagagcgcgcctcagtggaggaagaagtggacctgtgctcttctcgctatgctttttcggagatgtattctcacacactcscagccctttggtcactgggctgccctttggtcacagggctgcagcactacagtcctagcatgcatgggactgagggagcatgcgctaatcagtggaggaaggagcgaggctctgcacgcctctctgggcttggtggaagatgcagtctcataaacactcacagcccttttgtcacagggctgcagcgctacaatcctagcatgcaccg

SEQ ID NO: 559986 - DNA, 167 bp, Homo sapiens
gaaaatctaagagcaagggagaaaacccsctttccaaggcgtgagttttgtgagccattttcatcaacccatttaagtggacaagctccaaaatgtaacctcaagctgctgactatttaggcattttacaattaaaatctcatcccaagtcgtgcctgacttgccag

SEQ ID NO: 559987 - DNA, 167 bp, Homo sapiens
gaaaatctaagagcaagggagaaaaccccctttccaaggcgtgagttttgtgagccattwtcatcaacccatttaagtggacaagctccaaaatgtaacctcaagctgctgactatttaggcattttacaattaaaatctcatcccaagtcgtgcctgacttgccag

SEQ ID NO: 559988 - DNA, 167 bp, Homo sapiens
gaaaatctaagagcaagggagaaaaccccctttccaaggcgtgagttttgtgagccattttcatcaacccatttaagtggacaagctccaaaatgtaamctcaagctgctgactatttaggcattttacaattaaaatctcatcccaagtcgtgcctgacttgccag

SEQ ID NO: 559989 - DNA, 167 bp, Homo sapiens
gaaaatctaagagcaagggagaaaaccccctttccaaggcgtgagttttgtgagccattttcatcaacccatttaagtggacaagctccaaaatgtaacctsaagctgctgactatttaggcattttacaattaaaatctcatcccaagtcgtgcctgacttgccag

SEQ ID NO: 559990 - DNA, 612 bp, Homo sapiens
tatgtttattcaggattttatagatcaaagtttctcttaattatgttttagaatttatgtttctgtattttttagagtaggctgtctcacagcagttaattgtgtttttactttctacctatttattatgattttgaattacattattcaagtaagaattcggggaaggtttcttttaagtttgttttgcaattttgcatttctgtgtttcatgttttagggtagggcaccttacatcagtttattgtttttastttgaatttatataatataattttctatgacaatattcaaatctgtacaccttaagacagtgtgaggcacaaaatatgaaccatccctatggtcttttgttaatataatgatttaagtgtgtgtttgcttgtttaaatattgcccctattttgtttatgacttgtgcattttcttcttgtttgatggccaataattgattctgtctaagtgagtaatcatggaaattgtcttaatttcaacatctattgtttatattatcctagtgtgaaagaaagacttatgcgttttgaagataatttttcaaaaactttgtaactctctctcttcgggtgtctttacttatttatttattttttg

SEQ ID NO: 559991 - DNA, 612 bp, Homo sapiens
tatgtttattcaggattttatagatcaaagtttctcttaattatgttttagaatttatgtttctgtattttttagagtaggctgtctcacagcagttaattgtgtttttactttctacctatttattatgattttgaattacattattcaagtaagaattcggggaaggtttcttttaagtttgttttgcaattttgcatttctgtgtttcatgttttagggtagggcaccttacatcagtttattgtttttactttgaatttatataatataattttctatgacaatattcaaatctgtacaccttaagacagtgtgaggcacaaaatatgaaccatccctatggtcttttgttaatataatgatttaagtgtgtgtttgcttgtttaaatattgcccctattttgtttatgacttgtgcattttcttcttgtttgatggccaataattgattctgtctaagtgagtaatcatggaaattgtcttaatttcaacatctattgtttatattatcctagtgtgaaagaaagacttatgcgwtttgaagataatttttcaaaaactttgtaactctctctcttcgggtgtctttacttatttatttattttttg

SEQ ID NO: 559992 - DNA, 386 bp, Homo sapiens
agaattctagatactcataagtgtctgctccccttggctcttcattggtaactcactgtgctttgagactctgggaagaggcttttcaggttctagaggtccttcagagaagagagaggcctagagatgtgggcagatgaggacttggaataaagcagaatgtgacaatgcactgggctctggagtgtggggcccagaaaaaatactagttttttgggctgtccttgagttcctcattcagaagtggaagaaaatactgtctctgaatgctgttaaaatgtttaatgagtgcacagcacactcaaagaggctgaggaaaataggaatcaagggaggtttccgaggttacttttatggmccttggagtcttcagatactgctccttt

SEQ ID NO: 559993 - DNA, 586 bp, Homo sapiens
ttttataatggaaataaagtagaatgttgggagggagggctggggagaggttgcctggaggggacatgaatgcctccctgaggtgacattatgttgtcaccagaatgacaacagagagccactcctgcgcaggtgtggaaagtgtgtcagggaaaagccactctttgtgaaragactcacaggcacaggtgtgttcagcagaggaggttataacgggacaattgtggcggcaggcagcctgagaaagaaaggaaaagaggggagggaggatcctggggactgaaagaagagattagtcatttgcccctctctgacaaaatttccctgaattttagcacatgttgacaacaaatactatctcacaacttttgtgaaccagaatctcgatatagcttagttgggtgcctctgcctcaaggtctcttacgaggctggggctgtgatttcaactgaagctggatttgaggagagatcagccttctatctgcctcatggaaactggcacgattcagtgtgaactgagagcccgagttccttcctctcgattggcctgggcatctcctcagttctctatcatgtgggtctgt

SEQ ID NO: 559994 - DNA, 586 bp, Homo sapiens
ttttataatggaaataaagtagaatgttgggagggagggctggggagaggttgcctggaggggacatgaatgcctccctgaggtgacattatgttgtcaccagaatgacaacagagagccactcctgcgcaggtgtggaaagtgtgtcagggaaaagccactctttgtgaaaagactcacaggcacaggtgwgttcagcagaggaggttataacgggacaattgtggcggcaggcagcctgagaaagaaaggaaaagaggggagggaggatcctggggactgaaagaagagattagtcatttgcccctctctgacaaaatttccctgaattttagcacatgttgacaacaaatactatctcacaacttttgtgaaccagaatctcgatatagcttagttgggtgcctctgcctcaaggtctcttacgaggctggggctgtgatttcaactgaagctggatttgaggagagatcagccttctatctgcctcatggaaactggcacgattcagtgtgaactgagagcccgagttccttcctctcgattggcctgggcatctcctcagttctctatcatgtgggtctgt

SEQ ID NO: 559995 - DNA, 586 bp, Homo sapiens
ttttataatggaaataaagtagaatgttgggagggagggctggggagaggttgcctggaggggacatgaatgcctccctgaggtgacattatgttgtcaccagaatgacaacagagagccactcctgcgcaggtgtggaaagtgtgtcagggaaaagccactctttgtgaaaagactcacaggcacaggtgtgttcagcagaggaggttataacgggacaattgtggcggcaggcagcctgagaaagaaaggaaaagaggggagggaggatcctggggactgaaagargagattagtcatttgcccctctctgacaaaatttccctgaattttagcacatgttgacaacaaatactatctcacaacttttgtgaaccagaatctcgatatagcttagttgggtgcctctgcctcaaggtctcttacgaggctggggctgtgatttcaactgaagctggatttgaggagagatcagccttctatctgcctcatggaaactggcacgattcagtgtgaactgagagcccgagttccttcctctcgattggcctgggcatctcctcagttctctatcatgtgggtctgt

SEQ ID NO: 559996 - DNA, 566 bp, Homo sapiens
tcaattgaatctggactcaaacaatggtcaccaagtcctggaacaggttgtgtgagccccttgaggctttcatccagcgctgtttcagataaatctctatttcaatttattcctatatgttagttactgaaaaacaacagacaatcacaaaaaacaagttgaccttttttttttccttgagcccagaaatgaagggccctcctgactggaygtcatgccagataactcattacaaaaagagctagggttccagactgtgccaaaacttcatgagatctcttctcatctgttcacggacaagtggccaactctggagcccagtctgttgcttcgcagtctggtggtgaatcctccatagtctgatgagtgtaaatatatatatctcttttcccttctctccgtcccattgcaacttgcttattatatcatttgcttattatatctgcattgccatatatgtgggatacagtttgtttacccttaaaggtattgtgtgtgtgtgtgtgtgtgtgtgtgtgtgtgtgtgtgtgtgtttccttctctccttgagcatttcctgcgcagaa

SEQ ID NO: 559997 - DNA, 625 bp, Homo sapiens
ccagaagctgtcagaggctagcaaagcttatactctttgagaagcagctgttgacctgctactgggctttacaggaaacagaacacctttgtcttaatcatgatgtttttatgaggccccaaattcctaatatgacttgggtcatgagctccctcaaacctcattggatagggtacactcaagaaagtaaatggaaatggcacatacaagaccaggctaagccggaaccaaaacaggtatcatttttaaatgaggatgtgcaaaacttgccagctcagcaaaccactgagcaagtcctgcagayagggaaggaaacctcccctgcccaatggggcaaatcctttaaagaaccaagcccagactatcagagacatgcttgggtttgttgatgattccaccaaatatattgatgggacccgatgctgggaggccgtggcttataatcctgttaaaaacataagcatttctgaggaagggaggggtgttagcagccagctggctgaactagaatctgttctctgaactattcaggaggaggccagagggatttgttacttgtatacctactcttgcttagcagaaaatggtcttactacctagttgcccgaatggcaatgaaacaaat

SEQ ID NO: 559998 - DNA, 625 bp, Homo sapiens
ccagaagctgtcagaggctagcaaagcttatactctttgagaagcagctgttgacctgctactgggctttacaggaaacagaacacctttgtcttaatcatgatgtttttatgaggccccaaattcctaatatgacttgggtcatgagctccctcaaacctcattggatagggtacactcaagaaagtaaatggaaatggcacatacaagaccaggctaagccggaaccaaaacaggtatcatttttaaatgaggatgtgcaaaacttgccagctcagcaaaccactgagcaagtcctgcagacarggaaggaaacctcccctgcccaatggggcaaatcctttaaagaaccaagcccagactatcagagacatgcttgggtttgttgatgattccaccaaatatattgatgggacccgatgctgggaggccgtggcttataatcctgttaaaaacataagcatttctgaggaagggaggggtgttagcagccagctggctgaactagaatctgttctctgaactattcaggaggaggccagagggatttgttacttgtatacctactcttgcttagcagaaaatggtcttactacctagttgcccgaatggcaatgaaacaaat

SEQ ID NO: 559999 - DNA, 581 bp, Homo sapiens
tggagaaaacaatactaggaagatatctgaatcctggtgcacactaccattattgctgttttccagattgatgctcrtgcatctctgctttctcttgacagactattccatcagcaggtagatcaacaggtgtgagattcggaaccttaacattgggctgtgttcatgtgaaaagatgacaatttttgctcttggctcagtgtacatatgagtatcacaatctcacctttgttctgggccctagcaggacactctcttcaccatatgaagcctttatagagtatgcatgagtgtaacaattctctctgaaaccttaagcaggcacggacccctccttgtaccctttagctttaagccctggtatgacagtcaacatctttctacttggatgggtccaaataagagttcttaactgcctatgagctgcgtttaaaaatgagtcaccatcccacctgtggctggatgttcacatatgaaagtcagaatcccagttgtggactgtgtctgcatgtgtaattcaggacctcaagagtgggctctctccacgtgtgatagagaccatcctgaatattggtgtggtg

SEQ ID NO: 560000 - DNA, 581 bp, Homo sapiens
tggagaaaacaatactaggaagatatctgaatcctggtgcacactaccattattgctgttttccagattgatgctcatgcatctctgctttctcttgacagactattccatcagcaggtagatcaacaggtgtgagattcggaaccttaacattgggctgtgttcatgtgaaaagatgacaatttttgctcttggctcagtgtacatatgagtatcacaatctcacctttgttctgggccctagcaggacactctcttcaccatatgaagcctttatagagtatgcatgagtgtaacaattctctctgaaaccttaagcaggcacggacccctccttgtaccctttagctttaagccctggtatgacagtcaacatctttctacttggatgggtccaaataagagttcttaactgcctatgagctgcgtttaaaaatgagtcaccatcccacctgtggctggatgttcacatatgaaagtcagaatcccagttgtggactrtgtctgcatgtgtaattcaggacctcaagagtgggctctctccacgtgtgatagagaccatcctgaatattggtgtggtg

SEQ ID NO: 560001 - DNA, 491 bp, Homo sapiens
  misc_feature 488: n = A,T,C or G
ttaaaataacaatcattttatcttgctcacaattatgtgggtcatctgggtgtgttttttctggtgtagcccactgtttctgggcaccatcatgcatttgtggtcggtcgatgggtaggctggtggctggacagtctaggtatgctgtgcgcacatgccagtggttggcaggctgtcagcatgagacatargaagaattgggacacatgactctcatcctgcagcagactagcttgggcttattctcatggtggtctcagggatacaagcacaggaaagaaggaagtcagaatatgcaggggctttataagtctctgctatgttacatttactatcatcctattggccaaagaaattcacatggccaagaaagacccatggccaagtctacctacactctacgtcttgatgaaaaaatggcctaaagatgggaagaatctgtggtcacttttccaacataccacacctgattttacctttattagagnttg

SEQ ID NO: 560002 - DNA, 336 bp, Homo sapiens
attctttaaattatcaagctcttggctcctggmtgcagtcctttgctggtggcagtgggctgggtactgtcaccggggagaaatgctgcccacttagagaaagagaaactggttctctttaagaggcagagggaggtttccagtgccagtttgtttggaggcaaaatggctgttgtattaaaattgcccaaacttgggctggtgccttgtgtgtttagagctcaaagccatgattgttttcattttctttttcttttttttttttttggtggtcggttttccaaccttttgcttggtaggtttctgctaatagcttcgacctcaagagtcccatta

SEQ ID NO: 560003 - DNA, 336 bp, Homo sapiens
attctttaaattatcaagctcttggctcctggatgcagtcctttgctggtggcagtgggctgggtactgycaccggggagaaatgctgcccacttagagaaagagaaactggttctctttaagaggcagagggaggtttccagtgccagtttgtttggaggcaaaatggctgttgtattaaaattgcccaaacttgggctggtgccttgtgtgtttagagctcaaagccatgattgttttcattttctttttcttttttttttttttggtggtcggttttccaaccttttgcttggtaggtttctgctaatagcttcgacctcaagagtcccatta

SEQ ID NO: 560004 - DNA, 336 bp, Homo sapiens
attctttaaattatcaagctcttggctcctggatgcagtcctttgctggtggcagtgggctgggtactgtcaccggggagaaatgctgcccacttagagaaagagaaactggttctctttaagaggcagagggaggtttccagtgccagtttgtttggaggcaaaatggctgttgtattaaaattgcccaaacttgggctggtgccttgtgtgtttagagctcaaagccatgattgttttcattttytttttcttttttttttttttggtggtcggttttccaaccttttgcttggtaggtttctgctaatagcttcgacctcaagagtcccatta

SEQ ID NO: 560005 - DNA, 532 bp, Homo sapiens
tctttttctctggcttgctattcttacacttttcaactgggaaaaacatttgtcatctccatttcctttagctctataagggaaacaagccaaaccaaactgaaatgggcttgtttttccttccctatcttccctgcctctagtttttatattatctgcaaacttggaaactgcatttcatgtgcttatgacttgtacatagagaattattcacaactatggttctgaaattgaccctggaggaatttcccatctgatcttcacttccattctgagaagtttccatctgctgatactctgwgttgcccaagttaaagacttccaaatatgccttaattcatctcctattcagcaccactttggaacactgtacaaaactttctgggaaatataatcatttagaggctacagatttcactttcctatcagctcagagatgatagcaaagaatgtcagtagaatatcaacatcccctcatgatgcctggatttaggctgataattctccatcacgctgttttcctagaaacctt

SEQ ID NO: 560006 - DNA, 481 bp, Homo sapiens
aaatgagaaatgtccgtgacagaaaggaacctgttaaaagccaggttttctcattagcagtgaaacatggataattattcactgggaacatacacagtggggattcatgttaaattccttattttgactgttgctgctggcaatccatagagagcactgtgtacacacagagacatgcacataaatatgtacataaaattacaggggcctgtactacatgtgctgagaataccaattctgaacacaaagtttttataaaataagctacgtatttagttgaaagccttgaaaaacagattagtgacagaaaaggcagatggctgacaattttgttcatttactttggttataattaatttattttgatctttccctttactgttgaaagtggactttcctaaaagtgtttycaattcaagatgaacagtcatgcttattagaagcacattccctgaggtcactgtcctgatgtgaagggaaa

SEQ ID NO: 560007 - DNA, 467 bp, Homo sapiens
tccgggttcaccagtttatgtttccccagcattttaaagtaatagttccattatctcctggtttcctttgtttcctataagaggtcaaccatcattcacatcattgtttccttacatgtagtctagctttttttctgtcctggctttcaatattttttctttctctgctatctactaattccagcaatttgactatgatgtgcataggtggtttgtaaactttttagaactttcagatttcccaaaatttgggaagtttgaggattttatttcttccaatatgttttagttattttcttctttctttcatggcctccaattagacatatattagacctcaattttttttcaatttttttctgtttttcacaatggataatttatgtggaacttcaagtttactgacactcctgccagctctaatcttctgttaagattgtctrgtaaatttttcatttcatttttca

SEQ ID NO: 560008 - DNA, 577 bp, Homo sapiens
gtcgctttcaaaatcagaggagmtgttcaaaccttttgctccacgcatcctccactgacctaaaatttttcatgtaattaatctctcttttccttttgtgatacattctccatctaggaaagttcacgaatttccatggtttcaactttcattgagaagttaatgactcttacacatctatacaaatcctacagaggccccaaactcatagagttaaaagccatactctatcttcccttctactcccacccctttggcctcgccagttaccaagtctcaaaaaccaaaggattatgtctctgaaatttctctcagtcaagcacaaatctctcttctttctctgttttgtatttgatgctttaatctggaccctgttcaacctgtggtaatgaagaaacattgatctggagccaaatggtctgatactgcttggtagattcacttaaatccctgggctcccagtttccttgtgtatgaaaaggagaaaacaagaggatttactttataaaattattttaagaattaaatgtattaacacatttaataggttttgaatgttctgtggcacatattaagc

SEQ ID NO: 560009 - DNA, 537 bp, Homo sapiens
tactataccatgcactgagatcaccaggctttgcacattacatgtctacggcattttctgtctgccagggacttataaaatattcgggacattaycctatgttgtcttccaatggtgggatgtgtagggaagcagctgcagctttttttgtaaaatagtgaaggaaacagaccaaaaacgaccaaaacaacaaaacaaaacatacacacacacattattgaacacataagtgtgtaatgaggattgtgatgaagaaaaatctatgaagaaaaatttaagggtattaggagattatatcactgcagaattgacccgaggtatcttctgagttggagaactaatggaaatgaatgagcagataaagcaggagtgaatctggatgtgctgccatttatataacccatctcctattggaagacatgtgcgttatttattgttccttgctattataaacaattctgaattgaatagcttccatatatcactttgccaaagtatgtaaagatctgtatagtgaaagttaagttgttaggtcaa

SEQ ID NO: 560010 - DNA, 537 bp, Homo sapiens
tactataccatgcactgagatcaccaggctttgcacattacatgtctacggcattttctgtctgccagggacttataaaatattcgggacattaccctatgttgtcttccaatggtgggatgtgtagggaagcagctgcagctttttttgtaaaatagtgaaggaarcagaccaaaaacgaccaaaacaacaaaacaaaacatacacacacacattattgaacacataagtgtgtaatgaggattgtgatgaagaaaaatctatgaagaaaaatttaagggtattaggagattatatcactgcagaattgacccgaggtatcttctgagttggagaactaatggaaatgaatgagcagataaagcaggagtgaatctggatgtgctgccatttatataacccatctcctattggaagacatgtgcgttatttattgttccttgctattataaacaattctgaattgaatagcttccatatatcactttgccaaagtatgtaaagatctgtatagtgaaagttaagttgttaggtcaa

SEQ ID NO: 560011 - DNA, 537 bp, Homo sapiens
tactataccatgcactgagatcaccaggctttgcacattacatgtctacggcattttctgtctgccagggacttataaaatattcgggacattaccctatgttgtcttccaatggtgggatgtgtagggaagcagctgcagctttttttgtaaaatagtgaaggaaacagaccaaaaacgaccaaaacaacaaaacaaaacatacacacacacattattgarcacataagtgtgtaatgaggattgtgatgaagaaaaatctatgaagaaaaatttaagggtattaggagattatatcactgcagaattgacccgaggtatcttctgagttggagaactaatggaaatgaatgagcagataaagcaggagtgaatctggatgtgctgccatttatataacccatctcctattggaagacatgtgcgttatttattgttccttgctattataaacaattctgaattgaatagcttccatatatcactttgccaaagtatgtaaagatctgtatagtgaaagttaagttgttaggtcaa

SEQ ID NO: 560012 - DNA, 674 bp, Homo sapiens
tataaagttcacagggcatgaacggcatggtaatatattttagaagatagatagattattgttttttcccaatgtctccattatcaaaatgattataataaactaattaaaagactgtaataagtttagtattttcatagtaaccttgaaatttagtataaaatacctcatcagagtaacgttaaaaacaatcattttgctgagcaaatgtcaaatgtcaagcatcttaaagaaaatcaaggaaaaagcccaaattttatttygccttcagtgtcaattcagttgatgaaagttaatacaaatttgggccccaaaatgcatttctgagattataaacaaacacaaaaattgcttttttgttgtaccctgtatgcacttgacttttgttcatgtcatgcttctgctcttcagcaattcttcccacctaggctgcaccttcttgtctgctattaggttggtacaacagtaattgcagtaaaaagtaatgacaaaaaccgcaatcactgctgcacagacctaatagattcattgcaatctttcaaggccaatttatgtcccatacttttccataatgcacagttagtggcccctactggccatttcttttctttttttttcttttctttctttctttctttcttttttttttttttttttttgttgttgttattata

SEQ ID NO: 560013 - DNA, 674 bp, Homo sapiens
tataaagttcacagggcatgaacggcatggtaatatattttagaagatagatagattattgttttttcccaatgtctccattatcaaaatgattataataaactaattaaaagactgtaataagtttagtattttcatagtaaccttgaaatttagtataaaatacctcatcagagtaacgttaaaaacaatcattttgctgagcaaatgtcaaatgtcaagcatcttaaagaaaatcaaggaaaaagcccaaattttattttgccttcagtgtcaattcagttgatgaaagttaatacaaatttgggccccaaaatgcatttctgagattataamcaaacacaaaaattgcttttttgttgtaccctgtatgcacttgacttttgttcatgtcatgcttctgctcttcagcaattcttcccacctaggctgcaccttcttgtctgctattaggttggtacaacagtaattgcagtaaaaagtaatgacaaaaaccgcaatcactgctgcacagacctaatagattcattgcaatctttcaaggccaatttatgtcccatacttttccataatgcacagttagtggcccctactggccatttcttttctttttttttcttttctttctttctttctttcttttttttttttttttttttgttgttgttattata

SEQ ID NO: 560014 - DNA, 674 bp, Homo sapiens
tataaagttcacagggcatgaacggcatggtaatatattttagaagatagatagattattgttttttcccaatgtctccattatcaaaatgattataataaactaattaaaagactgtaataagtttagtattttcatagtaaccttgaaatttagtataaaatacctcatcagagtaacgttaaaaacaatcattttgctgagcaaatgtcaaatgtcaagcatcttaaagaaaatcaaggaaaaagcccaaattttattttgccttcagtgtcaattcagttgatgaaagttaatacaaatttgggccccaaaatgcatttctgagattataaacaaacacaaaaattgcttttttgttgtaccctgtatgcacttgacttttgttcatgtcatgcttctgctcttcagcaattcttcccacctaggctgcaccttcttgtctgctattaggttggtacaacagtaattgcagtaaaaagtaatgacaaaaaccgcaatcactgytgcacagacctaatagattcattgcaatctttcaaggccaatttatgtcccatacttttccataatgcacagttagtggcccctactggccatttcttttctttttttttcttttctttctttctttctttcttttttttttttttttttttgttgttgttattata

SEQ ID NO: 560015 - DNA, 641 bp, Homo sapiens
catttcaaagtttttgtatgctaaacctttctatgaatwacttataattctatctcatttactcaggctgaagttaaggaaaagaaaaaaaatgaagcacacttcaaacaaatgcagtcaaattataatagcaaaatagcaatagtcctgaccacccatataatgagacttcagctccccgagaacatggcacaacacatgtgtcagtgtcaacccaaggctgagatctaattagggcacattcagccggtctgattatgtgtttcttgtttggtgacaaatccgttcattttgcaacaacatttccgcaaacgtccaacaatttgtttcagagcctgaagcagatttttaaaatatataattttatgaagtggtgaataagagtgtttctcagcaaataaccgttcacatataatctgtttatctgaccctttagatgaaattgccaagcctgatgaatggtccaattctatcaattaatatttttgaatactaattttttttaactgaagacaattgactgatgaaagatttagctgatttaatttggctgagtacttcagttgtgtatgtagattgttgtggttttcaaagaccaaatatgtcagggaaacatctttaaatagtagaaatacactgga

SEQ ID NO: 560016 - DNA, 599 bp, Homo sapiens
cctccctggcctcccaaggtgctgggattacaagcgtgagccaccatgcctggccaaaagtatctttcttaataaagattttggggtacagtgtttcttctccttctcaccaaattaatctacaatgattaaaatttgagttgtggtcatagatgaaataacagatacaaccacccaacatctacctgtttaataaacatagttctggaaaaaaaccctcttcagttgttgtttttcacaaagatagcatctaatattgcctgcttccacactcaatcactggcacatgtttgtttcatcaaaaatctcattcatgasaggcacccaaagacagagcattgtgcaaaatgttgtcttgatgccaaaactgtcagaactgtcctggattctattatctctactaaaactaggatacattttagcattttatttgtgattccaagattctctaactcaccagagcacttcctgctttgagcatctctgcctgccctgttgttcatagcaatagaactgtatgaaaacctcctcgccaaattagtagttacccattaaccaataagttagttgatagaagagttgactacataagaagttaa

SEQ ID NO: 560017 - DNA, 666 bp, Homo sapiens
ctgttcatttgaaggggactaacgccacacagcagctaatcctggaatggcaggcagttttgggaactgcctatcctgcaaaggctgagatattcacagacattcttgaacttttggaaatggtctaattctgcttttttctgaccaggaatacaattgggtcataaaatttggcgtttgggaagagacaaaggtttatctttagtccagtgcataatttaatttcttacttcaatattaaaaatgaaaacataaaggtaggcactttcttttcaaattctggattttagtgagtatttyggtgctcagaaaacatctcacaattgaaactttgcaaacagagtcatgtttgtttacaacaaaagtacttgaaataaaactacagcatgttattctgttgccactttgtcatttattctcattttcatatgttttaaattatgttacaaatttattgatagcttgggagaaaatgccaattttgatatcttttttctttctttttcttgttattatttttcttttcttcccctgctcctttctttctttttaatacactcttcttttgttaccattgcatttagtccttgatataagcaatgacaaactacctatctccagtacatgtcaggttatctttggattttatttctccctgtctcaaat

SEQ ID NO: 560018 - DNA, 509 bp, Homo sapiens
gccaaactgtcagtatctgaaattagatagccttgcatttgaattcaagatccccaaatattaactttgtgaatgtgggcaagtttcttcaacatcctaagcctcattttttgacatttgaaaaatagtacctccttcatagggttgttgtagcatttacaagcatttaattaatgggaattaattatcacataagaatatatttaaaagagagcactccaagcaatcatgctttgaaaattaagaagatgagttattatatttaaggtgtaatcctgggtcytctgaatcaaaagattgaaacatgatcttggattgggagtaaaaataagtgattgaatttttttcttttggacaaaaatgaatattttgcagttgaaaaaatatttcattaactagattgaaacttctcacagtcaatgtgagccagctcagctgaatatctgttatttggggctggacagtgagggatgccatacaaagctcttctgtgtccaggctgagtaaca

SEQ ID NO: 560019 - DNA, 501 bp, Homo sapiens
tttcttaaaacatacaacatcactaatcatcagataaatacaaattaaaactacactgagatatcatcttacacctgtcagaatggctattactaaaaagtcaaaaaaccacagtgttggcatgratgtggagaaaagggaatgcttataaactgttggtgagaatttgaagtagttcaacgtctttggtaaaacagaatggaggtatgtcaaagaactaaaaatagaactctttgaccaaggaagatatttttttcttgaagacagtttgctttttttttttcttttgaacagtgctttggttttagaaagtagttgatttattggagaatcagcttaatccaagcaaagcttggtttggagttttgctgaggctactctaagattacctttatactgggatacagtagcacttttctatggtatgtagtttttgaggtcttaactaaatgctcagagtatttagaaaggtctctacacttaactggttggaactccacc

SEQ ID NO: 560020 - DNA, 683 bp, Homo sapiens
tagtgatgcttatggcattttcattatatttttatactttagtgtatttttaaatttaatttaattatgtttttattgataaaaatgattttacatatttatgtgatacagtgtgatgttcacctagtacttatcacaagatggyttttgcaggtccaggtccatttttatctcatttctccaaaattgaatacaataccatacctctcagtcccaaggacttcttttatcaccctacgtaattaaaattgtaaaggatattgtcagataagataaatttgttatacagatagcaaattgtcctccagtcacttttttaatgaaaaataaaatatttgtaacattttaaatttctattcaagtaatatattgagcaattactcttcacctagcattctgccaaaaggtggggatagaatagggaacaaaagaaactgacaaacagaacatctaatttgcatgatttccacccaaaatcaaaacaatgaataccggcaattccagcccaaatatagacattaattagttaagctgtattactctatcatgattgtaagtaaacttaaatattctgaaccaatgaaaatagatgactaacttcattataacatgaagaatccttatgtccaaaatataaagcatatgactaactcaaatgtgcctgtagttgatatgatttggac

SEQ ID NO: 560021 - DNA, 457 bp, Homo sapiens
ttctatggggattaatgtatttaatatctttccacgttctaatgaggaatgttgaatctctgggttatagtaacaaaaataatgttaaaagaatatttttattgttagcattatttatcttcctcaaaagtgtccataggtatgttttttaatatataggggacatttacttacctcctccatatgaagaaatccaaacctatctattccaggagtcactggatctactctttaaattagagtttattagaaatttaagaaatctctctctctctctctctstgtgtgtgtgtgtgtgtgtgtgtgtgtgtgtgttctttcaagaaaaacaactgtaagaatgtgaaggaagctttattagttagaaagataatttgacagtcaaggcagtagcaattgaggcctctgtcagtgctacagaaaaatctggaactggaacaacccttcaggattatcc

SEQ ID NO: 560022 - DNA, 559 bp, Homo sapiens
gctataagaaatgcctgaagctgggtaatttacaaagaaaagaggtttaattggatcgtggttctgcaggctcttctagcatggcactgccatctggttgggctctggggaggcctcagggagcttttattcatgacagaaggtgaagtagaaacaggcatgtcacatggcaaaaacaaagtgagagggggaagggaggtaccatatacttttcaaccatcagattttgtgagatcccactcactatcaagaggacagtaccaagccatgagggatctgtccccatgacctaaacacctcccaccaacccccatctccaacattgggaattttatttaaacatgagatttggttggaacaaatatccacaccatatcaccaggctctgagcttytaaagctgtttttacccacaagctcttcaaaggaagcagtccaaagtaaggacataacaaatgccatgtatgattgactattaaccctctcctatagcatagtgaaaaccccacctttttgtatgataatgattacaatgtccttatgtatgaccaattcataat

SEQ ID NO: 560023 - DNA, 581 bp, Homo sapiens
tacaattgttttcatttttagatcccacaaataagtgagaacatgcaatgtttgtttttctgtgcctggcatatgtcacttaatataatgacctttaatttcatccatactgttgcaaatgataggatctcattcattttatggctgaatagtactccattgtgtatatatagcacattttctttatctatttgtctgttgatgaatgcttargttgcttccaaatcatagctattgtgaaccatgctgcagcaaacatgggagtgcagatacgtctttaatatactgatttcctttcttttgggtatataacagcagtgggatagctggatcatagggaagctctaattttagtttattgaggaacctctaaaccattctccaaagtagttgtacttacttacattcccaccttggcagcattgtctgtcttttggatatcagccattttaactggagtgagatgagatctcatgatagctttgatttgagtttctctgatgatcaaggatgtggagaacttttacagatgcctgtttgtcattgtttttcttcatttgagaaatgtttatgtacctctt

SEQ ID NO: 560024 - DNA, 421 bp, Homo sapiens
gaatattatttcttaattaaatcccttttaggctcagttatatctgtttcttgccgtgaggatatagcatgtaatacccakgtactggggcattatgataaccagatactcactggtggaggctgagctgaataatgcatgagcacagcgtcactccataacctccctgctctcattgagtgaagtgctttgtttttcaaaacctcctttgggaggcttcacaaacaacagctatttagctcacagattccaaagatgatagacagtggccttttcctgcaggtacagatagcttacctttaatggtgaaaatctgattattggcatcctccctgcaaatgagtctgtccaaaatcaaataaaaactggagatattcaaaaccaaatgaaaaagaactgagagtgtagccaaattaatgct

SEQ ID NO: 560025 - DNA, 488 bp, Homo sapiens
tttgtaaagtttaaagaatggaagaaaacatctcaaagtatttaccataattatctctaggtgatcaaatcataggttattttctaaattccatccttacttttttgggtgtcttgcaaattttttataaagtataactacttttacaataaaaaagccaacacatctcaatacaaagacattcatttcaaaaatgaacattttcaaatgtccaaagaagactcaagtaaagaaggaggtctctctgttgaaatgctctgcagggtgcatacagtagcttgtgcctgtaatcacagcactttgggaggccaagtcaggtgaattgcttgagctcaggagttccagaccagcctgggccaaaagatgaaactctgtctctacaaaaaataygaaaaaaattagccagctttggtggcatgcacctgtagtcccagctacataggaggctgaggtaggggaatcacctgagcccaggaggtcaagtgagc

SEQ ID NO: 560026 - DNA, 596 bp, Homo sapiens
gaaaattaggcaaattaggcaaagatagagcaaagaaggagggatccaaatgcccccaaccatatgaaaygtgtaagtattataataaaaaatgcaaattaagacctcaccaaagtaccccttcacacaccagactgacaaaattaagaagtcagataacgccaagagttttctaagatgcaaaatcataactttcatttgatgctgatggttcaataatcacttgggaaatggttggcattaactaatgaagcagaaactgtatatcccaaaacctagtggtcctactcctaggcatataccctagagcagtagatctcaaacttgagcctgtatgagaagcacctggaggcgttatttaaacaagattgctaagtcccatccccagagttcctgattcagcagatttggaggggggcccaagaaactgcattcctgaaaagttttcagatgctgccctccaggcacctcactgggaactattgctctaaattcttacacgcgtccaccaggtgatacgtataatgatgtttacaagagtacttttgataatggaaaaaaaaaacccaaaaaacaaaatgaaaatatccaaatat

SEQ ID NO: 560027 - DNA, 557 bp, Homo sapiens
caactccagttttactgatgagaaaactgaggcttggtgaggttaaatgtattgctcacattttcgcagctaggaagaagaaattgcctctgtctgatgaagcaaatgcccctaactaccgagctargtgatgttgatctatatctttttgttgttgttggagaacaatgcatgactcctgtatcctcctcttgtgagttgatgccccagagccagttatattaacacattcagcgctgcaagatgaagtccacatcccctagagtgacacaggaggctggtcagagtccatcccgcacccccttctctagattcaccctcccacaccgtctgctcctgcttgccccgactattttcaagttcactgaacacaccacagcagtttgtacctggtgctgtctgggtcggtgatgtccttccccctcttcttctcctggctggctcctccaagtccttcaaaattgagagtgagtgtcaccccctttccacttttctgagctgaaaacagtgaaagtactattgcttttcacactgggcaggtctaggtctagggcttc

SEQ ID NO: 560028 - DNA, 405 bp, Homo sapiens
cacccttgccaacacttgttgtctttctttgttgttgtttttgatagcagatattctaacaggtccgaggtgatatttcattgtggttttgctttgcatttccctgatgattagtgatgttgagcagctttcctgtacctgttgrccttttgtatatcttcttttgagaaatgtctattcaggttcttcaaccattattttttattttactttaagttctgggatatctgtgctgaacgtgcaggtttgttacataggtatacatgtgacctggtggtttgctgcaactatcaacccgttatctaggttttaagccccacaagcatgaggtatttgtcctaatgctctccctccccttacccctcagcccccaacaggccccagtgtgtgatgttcccctccctg

SEQ ID NO: 560029 - DNA, 541 bp, Homo sapiens
ttaacacctttgctttctgatggttcagtgtatccacactttgtttcatgccaaaattatttaaaatattgtatgaaattaccttcaggctatgtgtataaagtatatatgaaacataaatgaactttatgtttaaactgggatcttatcctcaagctatctcattgtgtatgtgtaaatatttcaaactaaaaaaaaaaaaaatctgaaacacttctggtcccaagcatttcagacaagggatattcaacctgccctgcagtcttgattactgtaactgtataataaatcttgaaatcaggtagcctgatcccactttatttttttctcaaaatggttttagttattctagttcctttgcctttccacacaaattttagaatgatatgtatgtctaaaaaatactgttggggctgggcrtggtggctcatgcttgtaatcccagcactttgggaggctgaggcaggtgaatcacaaggtcaggagatcgacaccatcctggctaacacagtggaaccccgtctctactaaaaatacaaaa

SEQ ID NO: 560030 - DNA, 375 bp, Homo sapiens
ttaatatttataatttcttatgcctgtctttactgcagtctctaaacataaattgtraagatttcatggacacttatcacttccccagtcaatacccttgtgatttcctatgcctgtctttactttaatctcttaatcctgtcagctgaggaagatgtatgtcgcctcaggaccctgtaataattgcattaactgcacaaattgtacagcatgtgtgtttgagcaatatgaaatctgggcaccttgaaaaaagaacaggataacagcaattgttcagggaataagagataaccttaaactctgaccgccgatgagccgtgcagaacagagccatatttctcttctttcaaaagcaaatgggagaaatatcactga

SEQ ID NO: 560031 - DNA, 375 bp, Homo sapiens
ttaatatttataatttcttatgcctgtctttactgcagtctctaaacataaattgtgaagatttcatggacacttatcacttccccagtcaatacccttgtgatttcctatgcctgtctttactttaatctctyaatcctgtcagctgaggaagatgtatgtcgcctcaggaccctgtaataattgcattaactgcacaaattgtacagcatgtgtgtttgagcaatatgaaatctgggcaccttgaaaaaagaacaggataacagcaattgttcagggaataagagataaccttaaactctgaccgccgatgagccgtgcagaacagagccatatttctcttctttcaaaagcaaatgggagaaatatcactga

SEQ ID NO: 560032 - DNA, 375 bp, Homo sapiens
ttaatatttataatttcttatgcctgtctttactgcagtctctaaacataaattgtgaagatttcatggacacttatcacttccccagtcaatacccttgtgatttcctatgcctgtctttactttaatctcttaatcctgtcagctgaggargatgtatgtcgcctcaggaccctgtaataattgcattaactgcacaaattgtacagcatgtgtgtttgagcaatatgaaatctgggcaccttgaaaaaagaacaggataacagcaattgttcagggaataagagataaccttaaactctgaccgccgatgagccgtgcagaacagagccatatttctcttctttcaaaagcaaatgggagaaatatcactga

SEQ ID NO: 560033 - DNA, 456 bp, Homo sapiens
tcttgctttggctatgtaggctcttttttggttccatatgaattttaggattgtttttactaattctgtggtgaattatggtgatattttgatgagaatagcatcgaatttgtagattgcttttggcagtatggtcattttcacaatattgattctactcatccaagagmatgggatgtgtttccacttgtttgtgttgtctgtgatttctttcagcagtgttttgtagttttccttgtagaggtctttcatctctttggttgggtatattccaaagttttgttttttgggggtattttgtttgtttgttttgtttttgcagctattgtaaaacgtgttgagttcttgatttgattctcaacttggtcactgttggtatatagaagagccactgatttgtgtacattaattttgtacctggaaactttgctgaattcttttatcagttctaagagt

SEQ ID NO: 560034 - DNA, 651 bp, Homo sapiens
gatatccagaagttgcttaatggatacaaaattacagctagataggaagaataagttcgagagttctacagtactgtaggatgactacaattaaaataaatttgtatattttcaagtagcaagaagagcagattacaaatatgcccaacacaatgaaatgataaatgtttgaggtgattggacatgctaattactctgatttgatcattatatgttgcatacatgtattgaaatagcacactgtatcccataaatatgtacaactattttgtgtcaatttaaaatattaataaaagcaaaaaacaaaaatcactgggtgtgtcttgaaggtgtttccagaagagattagcatttgaatcagcagaatgagtaaagaagattgcccttaccaatgcagctggccgtcatctaatgcttgagggccwgagcagaacaaaaaggcagagtatggcaaattcactctctctgtctgagctagggcaaaaatcgcctcctgcccttggacattggctcccccagttctcaagcactcaaactcatattgggagttgcaccatctgcattcccggttttcaggcctttggactcaggctaaaatttcagcactggctttcctgattctccagctttgtggatggcagattatgggac

SEQ ID NO: 560035 - DNA, 623 bp, Homo sapiens
attatgctgcacaaatgtcctctgcacatctttaatcccgatttaaacaatgtcttccatctaacttttctatagttttagagcctaggaaataggaagagaatttgtcaagattttgggagatgaaaggaagaaatgaccaaagggctagaaaataaaggagtaggatggctacagaaatcagaattacttaagaaaaactgtgtggctaaaatgtcttcatttatacaaaggcctaattagcaagatgctggacactctgttactgattcaagttgaataaagaaaagggaattgttgaaattgaaggtttatgttagaaacaaggggaaattatcttactagaagtagtaatatttactaacaagataaatatgtggtcacctgagtctcccagaaagtattcctctttttttttgttgttgttgtttttttgacagaggatctcgctctgccacccaggctacagtgcagtggtgctatcacagctcactgcagcccagagctcctgggytcaagccttcctcccagctcagccttcccagtagctgggactacaggcacatgccagccaccatgaccagctaatttttttattattttatagagattatgtatatatt

SEQ ID NO: 560036 - DNA, 623 bp, Homo sapiens
attatgctgcacaaatgtcctctgcacatctttaatcccgatttaaacaatgtcttccatctaacttttctatagttttagagcctaggaaataggaagagaatttgtcaagattttgggagatgaaaggaagaaatgaccaaagggctagaaaataaaggagtaggatggctacagaaatcagaattacttaagaaaaactgtgtggctaaaatgtcttcatttatacaaaggcctaattagcaagatgctggacactctgttactgattcaagttgaataaagaaaagggaattgttgaaattgaaggtttatgttagaaacaaggggaaattatcttactagaagtagtaatatttactaacaagataaatatgtggtcacctgagtctcccagaaagtattcctctttttttttgttgttgttgtttttttgacagaggatctcgctctgccacccaggctacagtgcagtggtgctatcacagctcactgcagcccagagctcctgggctcaagccwtcctcccagctcagccttcccagtagctgggactacaggcacatgccagccaccatgaccagctaatttttttattattttatagagattatgtatatatt

SEQ ID NO: 560037 - DNA, 623 bp, Homo sapiens
attatgctgcacaaatgtcctctgcacatctttaatcccgatttaaacaatgtcttccatctaacttttctatagttttagagcctaggaaataggaagagaatttgtcaagattttgggagatgaaaggaagaaatgaccaaagggctagaaaataaaggagtaggatggctacagaaatcagaattacttaagaaaaactgtgtggctaaaatgtcttcatttatacaaaggcctaattagcaagatgctggacactctgttactgattcaagttgaataaagaaaagggaattgttgaaattgaaggtttatgttagaaacaaggggaaattatcttactagaagtagtaatatttactaacaagataaatatgtggtcacctgagtctcccagaaagtattcctctttttttttgttgttgttgtttttttgacagaggatctcgctctgccacccaggctacagtgcagtggtgctatcacagctcactgcagcccagagctcctgggctcaagccttcctcccagctcagccttcccagtagctgggactacaggcacatgccagccaccatgaccagctaatktttttattattttatagagattatgtatatatt

SEQ ID NO: 560038 - DNA, 585 bp, Homo sapiens
ggcgccctgcacccactgtcctgcgtccactgtctggcactccctagtgagatgaacccagtacctcagatggaaatgcagaaatcacccatcttctgcgtcgctcacacggggagctgtagaccagagctgttcctatttggccatcttctaacaaactccctaattcttaataaaactttatagacaaatttattcaatcttaatcagtttgaccataagataagatacctataaactttttttctcacctccctagcaaagtggattataaacctcttataagcctttataatttttgtgaaagagcagatcagtgctctaagaaacacctgatgtgcttatattccattgttcaatttatggaaaaattgaataatacctttaactttaggtaatatgttcatattcagaatttcttttacaagattaactttttgcaagccttccacaacttgcttaaacttttagctttatcttatccaatttaaaacaatycttcaacttttaaatctaggcaaaacaaaacaaaacaaaagaaaaaaaactatatcctcttgccttcttataatcttttaccagaaa

SEQ ID NO: 560039 - DNA, 589 bp, Homo sapiens
tgcagtgagccaagattgtgccactgtactccaggctgagtggcagagcaagaccccatctcaaaaaaaagaaaaaattcatcaccatagaggaacctatcctttcagtacttggtggacaaatagtcttttctctgatacatgaactttatggaaaaacttaaatctcaactccaatgatatccttttcttcacatctgagaattttatatttgatggatcactmagtacagatgaagtaaaaaactaagtaattttgacatgctcttggagaccatccttggatatagagttacaaacactattttccaaatcctagttacatctgtaaatcatccaaatctcttcataatcaggcatatgtttttgtgagaagaagtacttttttttatgttggctgtcctccgtgaaagcagaatatgtgtcatatcacctcaccaaggaactcaaggccaagtgtttttgatttatggagtcttagatgtggtctacaatgagttaattactcttgggagcagaacgcatctcatagatcaaaacaatatttgagatttatttgtgctagtgaaataactcacaataatatgaa

SEQ ID NO: 560040 - DNA, 589 bp, Homo sapiens
tgcagtgagccaagattgtgccactgtactccaggctgagtggcagagcaagaccccatctcaaaaaaaagaaaaaattcatcaccatagaggaacctatcctttcagtacttggtggacaaatagtcttttctctgatacatgaactttatggaaaaacttaaatctcaactccaatgatatccttttcttcacatctgagaattttatatttgatggatcactcagtacagatgaagtaaaaaactaagtaattttgacatgctcttggagaccatccttggatatagagttacaaacactattttccaaatcctagttacatctgtaaatcatycaaatctcttcataatcaggcatatgtttttgtgagaagaagtacttttttttatgttggctgtcctccgtgaaagcagaatatgtgtcatatcacctcaccaaggaactcaaggccaagtgtttttgatttatggagtcttagatgtggtctacaatgagttaattactcttgggagcagaacgcatctcatagatcaaaacaatatttgagatttatttgtgctagtgaaataactcacaataatatgaa

SEQ ID NO: 560041 - DNA, 610 bp, Homo sapiens
gttcttcactgattcattcagaaacactctcctcagtgtggtggaaggtgaaatgaagcagatactatgacccttgtctctgggagttcatattcgcctaggggaggttaaatacacacatataaaaacagaaccaatattacagagtctgtccatggtgacaatgaatgaataatttggaaaattaagttttagaggggttggatgatgtcagtgttttcacatacttttatgctgtgcagtttttcaaatgtaactatgtgggaaagcactagatacaaaatagattaaagtgactctttttgaaatgtcttcagccttgtccctcaaagtttgaatgactgaagccttccaacttctggctccagtcccaccttgttaagctatgttagttagttatctgcaagtgtcatcactaactaatgcgctccgagagggcaagtgtcttcattgatcctgcactcctacagcaaggatagaacaaatgcaaggcaagtgcatgccaacaccmctccctcatcagaagcaggcatttcttattgatcacagaatgcttttattctgatcctagatttggcttgaacacactcactcttgtgctcaaagcggc

SEQ ID NO: 560042 - DNA, 544 bp, Homo sapiens
tggatatatttacccagaaaaaaagaaaragaaaaactgcaaataattaatatttggaatgacaatggagtcataactacagaagtattaacaatttaaaacatctgaagagaacactgcccacacccccgcctatacatttgaaaacttagataaaatgaaaaaattagaaaatctgagttattagaattgattatagaataagatagaaaacctaaatacttcaatcaccagtcaagaaattcaatcagtagttagaagtttctccccaattgccccagctcacttcctacttccctctaccaactactttcacatattccaagttcagataattttaaaagcacatttttactaaaccttgactgaacaaataatccctacttatccagtggtatgaagatgttattgccttttggtcttttggtctccatatttctcatgatatgtgagcactaattcctattgttattccttagtatgtaatatgtcattttcctctggctgcttttaaggttttctcttccacaaaaagaatacaaca

SEQ ID NO: 560043 - DNA, 493 bp, Homo sapiens
aggtggaggttgcagtgagccaagattgtgccattgcactccagcctgggcaacaagagcgaaactccatctcaaaataaataaataaataaataaaaatttttaaaaaatgtccaacttctggatatatttacccagaaaaaaagaaagagaaaaactgcaaataattaatatttggaatgacaatggagtcataactacagaagtattaacaatttaaaacatctgaagagaacactgcccacacccccgcctatacatttgaaaacttagataaaatgaaaaaattagaaaatctgagttattagaattgattatagaataagatagaaaacctaaatacttcaatcaccagtcaagaaattcaatcagtagttagaagtttctccccaattgccccagctcacttcctacttccctctaccaactactttcacatattccaagttcagataattttaaaagcacatttttamtaaaccttgactgaaca

SEQ ID NO: 560044 - DNA, 542 bp, Homo sapiens
tgtctaaaaaaaaaaaaaaaagtcatatagttggaatygtgtattatgtagccttttcaatttggcttttttcacttggtaatatgcatttaagtttcttccacatgattttatggcttgaaagcttatttctttttaacgctgagaaaatttccattgactggatgtacaacggcttattccttcgcctattctaggctatctaaatttcttctaagttttagcaattatgaatagaaatgctctaagtgcaagtttttatgtagacatgttttcatcttctttgggtaaataccaaggagagtgattatagtatcatataataaaagaatgtttagtttggtaagaaacggccaaactctcttccaaagtgactgccattttgcattcccatcagcaatgaaagagaattcattgttctttaacctcactagcatttggtgttggatctggagcttggccattacaataagtgagtagtaatatctcattgttttaatttgcatttccctgaggacgtatggtatggagcatctttcacg

SEQ ID NO: 560045 - DNA, 542 bp, Homo sapiens
tgtctaaaaaaaaaaaaaaaagtcatatagttggaattgtgtattatgtagccttttcaatttggcttttttcacttggtaatatgcatttaagtttcttccacatgattttatggcttgaaagcttatttctttttaacgctgagaaaatttccattgwctggatgtacaacggcttattccttcgcctattctaggctatctaaatttcttctaagttttagcaattatgaatagaaatgctctaagtgcaagtttttatgtagacatgttttcatcttctttgggtaaataccaaggagagtgattatagtatcatataataaaagaatgtttagtttggtaagaaacggccaaactctcttccaaagtgactgccattttgcattcccatcagcaatgaaagagaattcattgttctttaacctcactagcatttggtgttggatctggagcttggccattacaataagtgagtagtaatatctcattgttttaatttgcatttccctgaggacgtatggtatggagcatctttcacg

SEQ ID NO: 560046 - DNA, 542 bp, Homo sapiens
tgtctaaaaaaaaaaaaaaaagtcatatagttggaattgtgtattatgtagccttttcaatttggcttttttcacttggtaatatgcatttaagtttcttccacatgattttatggcttgaaagcttatttctttttaacgctgagaaaatttccattgactggatgtacaacggcttattccttcgcctattctaggctatctaaatttcttctaagttttagcaattatgaatagaaatgctctaagtgcaagtttttatgtagacatgttttcatcttctttgggtaaataccaaggagagtgattatagtatcatataataaaagaatgtttagtttggtaagaaacggccaaactctcttccaaagtgactgccattttgcattcccatcagcaaygaaagagaattcattgttctttaacctcactagcatttggtgttggatctggagcttggccattacaataagtgagtagtaatatctcattgttttaatttgcatttccctgaggacgtatggtatggagcatctttcacg

SEQ ID NO: 560047 - DNA, 581 bp, Homo sapiens
tatgaatacttaaagcactgctctggaaaaataattgaaagataaaaggacatttatcttaaatggtagtaattttcatgtttatttaaaataagcacagataaaattctgaaaaaagaatgataaagtaaactcagagtagaaaaatcctttagtagtgaaataacaggtaaaacaggatgaaaatcttttaaataatgtacttaacttacttggttttaaaaagatcatcatcatgtgtaaaaggccattttatgtccagagcaaygttggccttggtctaagccaaaattcttagtagagtttttagagtgtttgctgtggtaacatgtgttaaacttttttcaatatagctaattcaaaacttttaagtaaaatatatgttagccctattcctacctgccatgcctctcacatcttatatccttatcttataacatctggctgctccgtgatggccattaaatccctgctaggaattaggaatccattcctgtttcagggtcctcttcatcaccttcaaattgtttatgtacagtgtacttttgaaggctatacactttatatttttaacatttaaa

SEQ ID NO: 560048 - DNA, 581 bp, Homo sapiens
tatgaatacttaaagcactgctctggaaaaataattgaaagataaaaggacatttatcttaaatggtagtaattttcatgtttatttaaaataagcacagataaaattctgaaaaaagaatgataaagtaaactcagagtagaaaaatcctttagtagtgaaataacaggtaaaacaggatgaaaatcttttaaataatgtacttaacttacttggttttaaaaagatcatcatcatgtgtaaaaggccattttatgtccagagcaatgttggccttggtctaagccaaaattcttagtagagtttttagagtgtttgctgtggtaacatgtgttaaacttttttcaatatagctaattcaaaamttttaagtaaaatatatgttagccctattcctacctgccatgcctctcacatcttatatccttatcttataacatctggctgctccgtgatggccattaaatccctgctaggaattaggaatccattcctgtttcagggtcctcttcatcaccttcaaattgtttatgtacagtgtacttttgaaggctatacactttatatttttaacatttaaa

SEQ ID NO: 560049 - DNA, 408 bp, Homo sapiens
agtgccaagatgacttactagaagcagctagtacgctccactcttgtgaaaacgaaatagactggccagtaaacactagcacttcaactggatcttccaagaggacatgttgggattcagcaaggaagcaacagaagccatggagaaaaaaacagcaagacacaacagccacccacccaggattgggtggagtcaggggaggatccttaccacaaagaaatagtgactgagagagagtcccatggccccayacttctgtcatggacctttgtaatcataggcacaggtgatccaccctgagtgatccccctggggccttcagactaacaaggagagctgcatagaatctgggcagagctccagatcaggcacatgagaagttccaggggtcttagacccctaagcacc

SEQ ID NO: 560050 - DNA, 470 bp, Homo sapiens
caggcctgccatttttgcctgctatagcccctgcccataatgccctcagatcaagagatagcaaagaggcttaaggactrtagcaggtcttcagctcagcacagctgccttatggaggtgttgtcagacttttttccatgcctgtctttgctcctgctacttcttactgggtagggcctcccgacctgggccccagcacagctaccctgctcccacttgaacacttcagacagtggcacctgtgcatttctctgagatagaattcccagcgacaacccacagcccctctgccattacatacagtggtaccacccttgctgcctgatatggtttggctctgtgtccccattcaaatctcatcctgtagatcccacaattcctatgttttgtgggaggtacctggtggaaaatgactgaataatggggatgggtatttcccatgctgttctcatcatagtggatgggtctca

SEQ ID NO: 560051 - DNA, 470 bp, Homo sapiens
caggcctgccatttttgcctgctatagcccctgcccataatgccctcagatcaagagatagcaaagaggcttaaggactgtagcaggtcttcagctcagcacagctgccttatggaggtgttgtcagacttttttccatgcctgtctttgctcctgctacttctyactgggtagggcctcccgacctgggccccagcacagctaccctgctcccacttgaacacttcagacagtggcacctgtgcatttctctgagatagaattcccagcgacaacccacagcccctctgccattacatacagtggtaccacccttgctgcctgatatggtttggctctgtgtccccattcaaatctcatcctgtagatcccacaattcctatgttttgtgggaggtacctggtggaaaatgactgaataatggggatgggtatttcccatgctgttctcatcatagtggatgggtctca

SEQ ID NO: 560052 - DNA, 494 bp, Homo sapiens
ccctgctcccacttgaacacttcagacagtggcacctgtgcatttctctgagatagaattcccagcgacaacccacagcccctctgccattacatacagtggtaccacccttgctgcctgatatggtttggctctgtgtccccattcaaatctcatcctgtagatcccacaattccyatgttttgtgggaggtacctggtggaaaatgactgaataatggggatgggtatttcccatgctgttctcatcatagtggatgggtctcatgagatctaatgattttaaaaacaggagtttcctgacacaagctctctcttagcctgctgccatccatgtaagatgtgacttgctcctacttacctttcaccatgattgtgaggccttcccagccacgtggaactgtaagttgattaaacctccttcttttgtaaattgcccagtctcaggtctgtctatcagcagcatgaaaatggaataatacagtaaattggtac

SEQ ID NO: 560053 - DNA, 494 bp, Homo sapiens
ccctgctcccacttgaacacttcagacagtggcacctgtgcatttctctgagatagaattcccagcgacaacccacagcccctctgccattacatacagtggtaccacccttgctgcctgatatggtttggctctgtgtccccattcaaatctcatcctgtagatcccacaattcctatgttttgtgggaggtacctggtggaaaatgactgaataatggggatgggtatttcccatgctgttctcrtcatagtggatgggtctcatgagatctaatgattttaaaaacaggagtttcctgacacaagctctctcttagcctgctgccatccatgtaagatgtgacttgctcctacttacctttcaccatgattgtgaggccttcccagccacgtggaactgtaagttgattaaacctccttcttttgtaaattgcccagtctcaggtctgtctatcagcagcatgaaaatggaataatacagtaaattggtac

SEQ ID NO: 560054 - DNA, 574 bp, Homo sapiens
gcctagggacttggcaccctgtgtcccagctgctccagccatggctgaaaggggccaatgtagactttaggctgtggcttcagagggtacaagccccaagccttggcagcttccacttgatgttgagcctgtgagtgcacagaagtcaaaaatgggggtttggggatctctgcctagatttcagatgtatggaaatgyctggatgtccaggaataagttcactgcaagggtgaggccctcataaagaaccactgtttagggcagagtggaagggaaatgtggggttggagcccccacagagagtccctactggggcactgcctaatgcggctgtgagaagagggccaccgttctccagaccccagaatggtaaatccactgacagcttgcaccgtgcacctagagaagactaagacactcaatgtcaccctgtgaaagcagccatgagggaggctgtaccctacacagccacgggggtggagctacccaagaccttgggaacccacctcttgcattagcatgacctggatgtgagacatagagttactgggagatcattttggagctttaaaat

SEQ ID NO: 560055 - DNA, 574 bp, Homo sapiens
gcctagggacttggcaccctgtgtcccagctgctccagccatggctgaaaggggccaatgtagactttaggctgtggcttcagagggtacaagccccaagccttggcagcttccacttgatgttgagcctgtgagtgcacagaagtcaaaaatgggggtttggggatctctgcctagatttcagatgtatggaaatgcctggatgtccaggaataagttcactgcaagggtgaggccctcataaagaaccactgtttagggcagwgtggaagggaaatgtggggttggagcccccacagagagtccctactggggcactgcctaatgcggctgtgagaagagggccaccgttctccagaccccagaatggtaaatccactgacagcttgcaccgtgcacctagagaagactaagacactcaatgtcaccctgtgaaagcagccatgagggaggctgtaccctacacagccacgggggtggagctacccaagaccttgggaacccacctcttgcattagcatgacctggatgtgagacatagagttactgggagatcattttggagctttaaaat

SEQ ID NO: 560056 - DNA, 574 bp, Homo sapiens
gcctagggacttggcaccctgtgtcccagctgctccagccatggctgaaaggggccaatgtagactttaggctgtggcttcagagggtacaagccccaagccttggcagcttccacttgatgttgagcctgtgagtgcacagaagtcaaaaatgggggtttggggatctctgcctagatttcagatgtatggaaatgcctggatgtccaggaataagttcactgcaagggtgaggccctcataaagaaccactgtttagggcagagtggaagggaaatgtggggttggagcccccacagagagtccctactggggcactgcctaatgcggctgtgagaagagggccaccgtyctccagaccccagaatggtaaatccactgacagcttgcaccgtgcacctagagaagactaagacactcaatgtcaccctgtgaaagcagccatgagggaggctgtaccctacacagccacgggggtggagctacccaagaccttgggaacccacctcttgcattagcatgacctggatgtgagacatagagttactgggagatcattttggagctttaaaat

SEQ ID NO: 560057 - DNA, 635 bp, Homo sapiens
gtcatcagccagcttgcagcagaaacttcaacactaaaattactttgctaatataagcctctgtgaaacccaggacaataattcagctactaataaagatcatgcaaaaaggtgctttgaaaacatccagaaacaaagtcaactgactatgctcaaattataccacagttaaagaaacaccagcccacacaggtgagaaaaaagccaacataagaactctagcaactcaaaaagtcagastgtcactttacctccaaatgactgcactagttctacagcaatggttgttaaatagaaggaaatggctgaaatgtcagatatagaactgagaggtagaagaaaatgaagatcattgaaattcaatagaaagttgaacactatttccaagaatctgaggaatccagtaaaatgattaaagagaaaaaaattagccattgtgaaaaaacaaaacaagacaaacaaacaaaaaccaaacctagcaggtagagttacaaaatacactacaagaatttcataaaatgattggaaatattcacagcagaatggactaagccaagaaaagaatctcagagattgaagactgattatttaagttaacacagccagaaaataaataaagaaaagaagaattttaa

SEQ ID NO: 560058 - DNA, 336 bp, Homo sapiens
cactgggcatggtggcaggtgcctgtagccccagctattcaggagtctgaggcaggagattggtaggaacctgggaggtggagtttgcattgagccgagatcatgccactgcactccagcctgggctacagagcaagactccatctcaaaaaaaaaagaaaaagaaaaaaaccttggagaaataagrgattctataaaaaatttccccaatttcactagagagattgacatataaatttagaaaattcagataacccatgtaagatgctatgtaagacaaccattgcagagacacaaagtaatcagattcttgaaggtcaatgcaaaagaaaaaaa

SEQ ID NO: 560059 - DNA, 336 bp, Homo sapiens
cactgggcatggtggcaggtgcctgtagccccagctattcaggagtctgaggcaggagattggtaggaacctgggaggtggagtttgcattgagccgagatcatgccactgcactccagcctgggctacagagcaagactccatctcaaaaaaaaaagaaaaagaaaaaaaccttggagaaataagggattctataaaaaatttccccaatttcactagagagattgacatataaatttagaaaattcagataaccyatgtaagatgctatgtaagacaaccattgcagagacacaaagtaatcagattcttgaaggtcaatgcaaaagaaaaaaa

SEQ ID NO: 560060 - DNA, 617 bp, Homo sapiens
attcacaaaacaagctcttagagatatacaaagaaacttacataactacacgatgacagtggcagacctcaacacctcactgacagtgtaagacakatcactgaggcagaaaactaacaaagatattcgggacctaaacttgacacttggccaaatacacctaacagacatctacagaacactccacacatcaacaacagaatatatattcttatcatctgcacatgacacatattctaaaatcaaccacatgctcagctgtaagtcaattctcaacaaataaaaaaaaatgttaccagccacactctcagaccacagcacaataaaaatacaaatcaataccaagaagatctgccaaaactgtaggattaagtgaaaattaaacaacctgaacctgaatgacttttgtgtaaacaataaaatcaaggcagaaatcaagaaattcttagactctgatgaaaacaaaaatacaacacactagaaactctagaacacagataaagcatggttaaaaggaaagtttattgtgctaaacacttatgtcaacagctagaaagatctcaaatttgcaacctaacatcacagatagaggaacctaaaaaacaaaaaagaaccaa

SEQ ID NO: 560061 - DNA, 617 bp, Homo sapiens
attcacaaaacaagctcttagagatatacaaagaaacttacataactacacgatgacagtggcagacctcaacacctcactgacagtgtaagacatatcactgaggcagaaaactaacaaagatattcgggacctaaacttgacacttggccaaatacacctaacagacatctacagaacactccacacatcaacaacagaatatatattcttatcatctgcacatgacacatattctaaaatcaaccacatgctcagctrtaagtcaattctcaacaaataaaaaaaaatgttaccagccacactctcagaccacagcacaataaaaatacaaatcaataccaagaagatctgccaaaactgtaggattaagtgaaaattaaacaacctgaacctgaatgacttttgtgtaaacaataaaatcaaggcagaaatcaagaaattcttagactctgatgaaaacaaaaatacaacacactagaaactctagaacacagataaagcatggttaaaaggaaagtttattgtgctaaacacttatgtcaacagctagaaagatctcaaatttgcaacctaacatcacagatagaggaacctaaaaaacaaaaaagaaccaa

SEQ ID NO: 560062 - DNA, 617 bp, Homo sapiens
attcacaaaacaagctcttagagatatacaaagaaacttacataactacacgatgacagtggcagacctcaacacctcactgacagtgtaagacatatcactgaggcagaaaactaacaaagatattcgggacctaaacttgacacttggccaaatacacctaacagacatctacagaacactccacacatcaacaacagaatatatattcttatcatctgcacatgacacatattctaaaatcaaccacatgctcagctgtaagtcaattctcaacaaataaaaaaaaatgttaccagccacactctcagaccacarcacaataaaaatacaaatcaataccaagaagatctgccaaaactgtaggattaagtgaaaattaaacaacctgaacctgaatgacttttgtgtaaacaataaaatcaaggcagaaatcaagaaattcttagactctgatgaaaacaaaaatacaacacactagaaactctagaacacagataaagcatggttaaaaggaaagtttattgtgctaaacacttatgtcaacagctagaaagatctcaaatttgcaacctaacatcacagatagaggaacctaaaaaacaaaaaagaaccaa

SEQ ID NO: 560063 - DNA, 617 bp, Homo sapiens
attcacaaaacaagctcttagagatatacaaagaaacttacataactacacgatgacagtggcagacctcaacacctcactgacagtgtaagacatatcactgaggcagaaaactaacaaagatattcgggacctaaacttgacacttggccaaatacacctaacagacatctacagaacactccacacatcaacaacagaatatatattcttatcatctgcacatgacacatattctaaaatcaaccacatgctcagctgtaagtcaattctcaacaaataaaaaaaaatgttaccagccacactctcagaccacagcacaataaaaatacaaatcaataccaagaagatctgccaaaactgtaggattaagtgaaaattaaacaacctgaacctgaatgacttytgtgtaaacaataaaatcaaggcagaaatcaagaaattcttagactctgatgaaaacaaaaatacaacacactagaaactctagaacacagataaagcatggttaaaaggaaagtttattgtgctaaacacttatgtcaacagctagaaagatctcaaatttgcaacctaacatcacagatagaggaacctaaaaaacaaaaaagaaccaa

SEQ ID NO: 560064 - DNA, 566 bp, Homo sapiens
gaatgacttttgtgtaaacaataaaatcaaggcagaaatcaagaaattcttagactctgatgaaaacaaaaatacaacacactagaaactctagaacacagataaagcatggttaaaaggaaagtttattgtgctaaacacttatgtcaacagctagaaagatctcaaatttgcaacctaacatcacagatagaggaacctaaaaaacaaaaaagaaccaacctcgaaggtagtagaagaaaagaaatggccacaatcataacggaaattaacaaaatggagatgagaaaaaaatgtaaaaaaatcaacaaaactgaatgttgggtatttgaaagaaaaaataatgttgataggccattatctaaacttataaagaaaaaaagagacaatattcaaataaacacaatcacaaaagagacaaaggggacattaccagtgactccacagaaatacaacaaccctcagggatkattatgaacacctctatgtacacaaactgaaaaacccagagaagctgcataaattccgggaagcaatcttcaaagattgaaccaggaagaaaacga

SEQ ID NO: 560065 - DNA, 560 bp, Homo sapiens
caaagattgaaccaggaagaaaacgaaactttgaacagactaataggaagttccaaactgaattggcaatacaatgcctatcaatcagaaaaagtgttggcctcaaaggattcactgccaaattctaccagctgtataaagaagagctgataccacacctactgacactatctaaaataattgaggaggagggactcatacctaactcattctatgaggacaacatcattstgataccaaatcctggcagagatgcaatgaaaaaaaaaacttcagaccaatatttctaatgaacatagatacagaaatattcaacaaaatactagcaaaccaaatctagctgtacatcaagaagctaatccaccacaatcaagtaggttttatttcttgcaaaatattttcagaatggtacttccaaggttttcttctagagattttatagtttgaggttttacatttatgtctttaatccatcctgggttgatttttgtgtatggtgaaaggtaggggtccagttcaaatcttctgtgtatggtcagcaggttatcctggcaccattt

SEQ ID NO: 560066 - DNA, 397 bp, Homo sapiens
gtctgaaatcacaatgcaaaagctctaaacattaagttggtattgaaactacagccaaaayaattggccagtgcaggacagttctccatgtggccttggattgacccagttctcttccctttcttccttgtaggtcttaataattactgtagattatgctgggaatacattatggtgagataaggaggggctgactggactagcctgggcctgttgctctttcctctggaagcaggatgcccctcaaagctttaagtcaatgtttcacattggctctgaggtatataaccctgaacaggctgtcttaaagagtcctggctgggcgtggtggctcatgccttgtaatcccagcactttaggaggccaaggtgggtggatcacctgaggtcaggaattc

SEQ ID NO: 560067 - DNA, 397 bp, Homo sapiens
gtctgaaatcacaatgcaaaagctctaaacattaagttggtattgaaactacagccaaaacaattggccagtgcaggacagttctccatgtggccttggattgacccagttctcttccctttcttccttgtaggtcttaataattactgtagattrtgctgggaatacattatggtgagataaggaggggctgactggactagcctgggcctgttgctctttcctctggaagcaggatgcccctcaaagctttaagtcaatgtttcacattggctctgaggtatataaccctgaacaggctgtcttaaagagtcctggctgggcgtggtggctcatgccttgtaatcccagcactttaggaggccaaggtgggtggatcacctgaggtcaggaattc

SEQ ID NO: 560068 - DNA, 667 bp, Homo sapiens
ggttttggtacagcctgcaaggtaataatggtttttagagatttaaatgattgaaacaattttttaaaataacattttgtagcatataacgattgcataaagtaaaaactgcagtgttttcataaataacaaggttttttttttggacacaagatcattcacttacatgtggtctatagatgttttcaggctattatgtcagagttgagtggttgcaacagaaactgtatgattgtcaaagcctaacatacttaaaatctgacgctttgtagaaaaagctaacatttgatctaaagttttctgtaaagatacatctacattatgtttatcgtaatttatatttatttatctgcctactggttgcagttttgaaaaactataatmttccagaaaatagaaactataatatttttaattagacctcaagcaaaattattttaaaatgtggtctcaatttttaagaaagtggggaagaatgcttttttttcttttgttaaacttctttgcttccagtccaagaagtgactgtcatttatttttatcttattgcttcctttctcatattagcttgataagaagtaatgaaataatattcaggtttcttagtagagtcatgttgtaaacatagcttttttttctagccactctcgaaaaatggaaagcctct

SEQ ID NO: 560069 - DNA, 556 bp, Homo sapiens
tccatgtggagttgagcctgcatgtgcacagaagtcaagaagcaaggcttgggagcctcagcctagatttcagaggatgtatggaaatgcctggatgtccaggaagaagtttactgtgggggagagggggtgatcatggagagcctctgctaaggaagtggggaagggaaatgtggggttggagccccacacagagtccccactgaggcgctgcctgtgtgagaagaggaccaccatcttcmagaccccagaatggtaaatccactcacagcttgcatatgcacctaaaaaaaacctcagatgctcaacaccagcctgtgaaagcagctaggtgggaaccgtacctttcaaagccacaggggcagagctgcccaaggccatgggagcccacgtcttgcatcagcatgacctggatgttagacatggagtcaaaggagatcattttgaagcgttaagattcaactgccttgctggagtttggacttgcatggggcctgtaacccctttgttttggccaatttgtcctgtttggaatgggtatagttacccaatgcct

SEQ ID NO: 560070 - DNA, 525 bp, Homo sapiens
gttggctctgtgtccccacccaaatctcatcttgaattgtagctcccataattgycatgtgttatggaaggacctagtgggacataattgaatcatggaggcagtttcccctatactgtccttgtggtagtcagtaagtctcacacgacctgatggttttataaggggtttctgcttttgcttggttcccattctctctcttgccttttgccatgtaagacatgacttttgccttccactatgattgtgaggtctccccagtcatgtggaactgtgagttcattaaacctctttttctttataatttacccaatctcaggtatgtctttatcagcagtgtgaaaacagactaatacactgtctttaacattttttctattgttttgaccttggaaactgatgattatttgtcttcaagatgatctttttgtggagtatcttactgaagttctctgtatttcttgaatttgaatgttgacctctctatctaggttagggaagttctcatggatgatattttgatcc

SEQ ID NO: 560071 - DNA, 578 bp, Homo sapiens
actctgtctcaaacaaaaacaaaaacaaaaacaagaaaatctttctctccatcatgttattcaatatgtttttaaaagcaccatttcttatagcctgatacatttcaaatggcccccctcccccagggatctctgttgctctctcctcattttccattggctttggtctttgtgataaaccacagcagaagtgagtacatggaatcatttatttgtagcccttytgctcccccctaatccaagcctgctgaatccaagtctgtggaccattctgtggtccttgcttcagtggcaagatacgacagtgtggaaaatctagaaaagtctggcttccttgagtttattataaacatcaatgccgttagggaatcagaagaggactccaggaagcaaagagaagaaaagggttccttctctcccgtttccaagactggaagagcccctctgtgtggagcagggcacgctagtgttaggtaggggttcctagagaggaaaggcctgctttttgtctatcagccacagctctgggttgtctgcaaatcctgagaaagctttgtgagatctgagagcagagatga

SEQ ID NO: 560072 - DNA, 578 bp, Homo sapiens
actctgtctcaaacaaaaacaaaaacaaaaacaagaaaatctttctctccatcatgttattcaatatgtttttaaaagcaccatttcttatagcctgatacatttcaaatggcccccctcccccagggatctctgttgctctctcctcattttccattggctttggtctttgtgataaaccacagcagaagtgagtacatggaatcatttatttgtagcccttctgctcccccctaatccaagcctgctgaatccaagtctgtggaccattctgtggtccttgcttcagtggcaagatamgacagtgtggaaaatctagaaaagtctggcttccttgagtttattataaacatcaatgccgttagggaatcagaagaggactccaggaagcaaagagaagaaaagggttccttctctcccgtttccaagactggaagagcccctctgtgtggagcagggcacgctagtgttaggtaggggttcctagagaggaaaggcctgctttttgtctatcagccacagctctgggttgtctgcaaatcctgagaaagctttgtgagatctgagagcagagatga

SEQ ID NO: 560073 - DNA, 220 bp, Homo sapiens
actattaggaacatttgtgattcatggaagaaggccaaagtatcaacattagtaagagtttagaacaagttgcttccaaccytcatggatgactttgaggggttcaagacttcagaggagaaagtaattgcagatgtaatggaaatagcaagagaactaggattaaaagtggagcctaaagatgtcactgaattgctgcaatcttgtaatataaccaaca

SEQ ID NO: 560074 - DNA, 607 bp, Homo sapiens
gggaggcagaggttgcagtaagccaagatcgcgccactgcactccaccctaggagacagagcaagactctgtctcaaaaataaataaataaataaataatgcatttatttgtagataattaacgattttttacctttgttttgagataattatatacacagcaggctgccaaggtaccacagagaggacccatgtaccctttcaatgatttaactgatacaattttagtaaaatatcaaaaccaggaatttgacattggcacaatgtgtaagtatcggtacgtgttattatatcacatgttcagatttatgtaatgaccactgcaaccatgagacagaattcttttattatcacaaatatctcccttctgttatccctttccacccactcctccactatccctaactcccaacaatcctaatctgttaytcatctctgtattttgtcatttaaaaaatgtaatataaatgaattcattcactatgtaaccttttgaaattgattttttttttactcaaaatacttcactggagattcatggcatggatgtactacagattgttgtgttttgctttgtttttagccatttatgtattgaggggcattt

SEQ ID NO: 560075 - DNA, 607 bp, Homo sapiens
gggaggcagaggttgcagtaagccaagatcgcgccactgcactccaccctaggagacagagcaagactctgtctcaaaaataaataaataaataaataatgcatttatttgtagataattaacgattttttacctttgttttgagataattatatacacagcaggctgccaaggtaccacagagaggacccatgtaccctttcaatgatttaactgatacaattttagtaaaatatcaaaaccaggaatttgacattggcacaatgtgtaagtatcggtacgtgttattatatcacatgttcagatttatgtaatgaccactgcaaccatgagacagaattcttttattatcacaaatatctcccttctgttatccctttccacccactcctccactatccctaactcccaacaatcctaatctgttattcatctctgtattttgtcatttaaaaaatgtaatataaatgaattcattcactatgtaaccttttgaaattgattttttttttactcaaaatacttcactggagattcrtggcatggatgtactacagattgttgtgttttgctttgtttttagccatttatgtattgaggggcattt

SEQ ID NO: 560076 - DNA, 607 bp, Homo sapiens
gggaggcagaggttgcagtaagccaagatcgcgccactgcactccaccctaggagacagagcaagactctgtctcaaaaataaataaataaataaataatgcatttatttgtagataattaacgattttttacctttgttttgagataattatatacacagcaggctgccaaggtaccacagagaggacccatgtaccctttcaatgatttaactgatacaattttagtaaaatatcaaaaccaggaatttgacattggcacaatgtgtaagtatcggtacgtgttattatatcacatgttcagatttatgtaatgaccactgcaaccatgagacagaattcttttattatcacaaatatctcccttctgttatccctttccacccactcctccactatccctaactcccaacaatcctaatctgttattcatctctgtattttgtcatttaaaaaatgtaatataaatgaattcattcactatgtaaccttttgaaattgattttttttttactcaaaatacttcactggagattcatggcatggatgtactacagattgttktgttttgctttgtttttagccatttatgtattgaggggcattt

SEQ ID NO: 560077 - DNA, 620 bp, Homo sapiens
gattgctgggtcaaatggtatttctgtttctagatccttgaggaattagcacaatgtcttccgcaatggttgaactaatttacactcccaccaacagtgaaaaagcgttcctatttccccacatcctctccagcatctgaatatacttttgtgtctatctaccaaaatgagaaagttgttctttatattaaatagctgtgtatcttgctgaaaattgacacagaaaaatttaaaaatatatgtttattttcaagattccaatattatgagaatttaacttctaagaagaaactgaaattaccaccacacccaaaaatcttgtatggcatctaatggtcaggtggcctatgagcttatgaagtttaatttgcatcactattgtactrgctacgttcaatatcaaccaggcagcaagtgtttactaatcttttacctctagtaattctactcatgatatcccttcaaggtggtaaatatatgaaatgtagttacacagtaataaatttttaaatacagatactcagaaagttcactttggaaaactagccattgattttagaaagagctttgtaatctatcgttttttttaattttctttggttgacacaaaggtcagagct

SEQ ID NO: 560078 - DNA, 620 bp, Homo sapiens
gattgctgggtcaaatggtatttctgtttctagatccttgaggaattagcacaatgtcttccgcaatggttgaactaatttacactcccaccaacagtgaaaaagcgttcctatttccccacatcctctccagcatctgaatatacttttgtgtctatctaccaaaatgagaaagttgttctttatattaaatagctgtgtatcttgctgaaaattgacacagaaaaatttaaaaatatatgtttattttcaagattccaatattatgagaatttaacttctaagaagaaactgaaattaccaccacacccaaaaatcttgtatggcatctaatggtcaggtggcctatgagcttatgaagtttaatttgcatcactattgtactagctacgttcaatatcaaccaggcagcaagtgtttactaatcttttacctctagtaattctactcatratatcccttcaaggtggtaaatatatgaaatgtagttacacagtaataaatttttaaatacagatactcagaaagttcactttggaaaactagccattgattttagaaagagctttgtaatctatcgttttttttaattttctttggttgacacaaaggtcagagct

SEQ ID NO: 560079 - DNA, 573 bp, Homo sapiens
ggtgcaagccccaagccttggcagcttccatgtggtgttgagcctgtgggtgctcagaagagttgaggtttaggaacctccacttagatttcaaaggatgtatataaacacctagatgtccaggcagaagtttgctgcaggggcagagcactcatacagaacctccactagggcagtgyggaaggaaaatgtgggaatgtggggtgggcaccctcacacagtgtccccactgggacagtgtccccactggggcagtgtctagtggagctgtgagaagagggccaccattctcaagaccctagaatggcagatggactgacagcttgcaccttgagcctggaaaagccacagacactcaaagccagcctctgaaactagccaggagggaggctatcccctgcaaagccacagaggcagagctgcccaaaaccatgaggactcacttctgcatcagtgtgacttagatgtgagacataaagtcaaaggaaatcattttggaacattaagatttgactgcccttctggatttcagactttcatggggcctgtagcccctttgtttgggccaattta

SEQ ID NO: 560080 - DNA, 573 bp, Homo sapiens
ggtgcaagccccaagccttggcagcttccatgtggtgttgagcctgtgggtgctcagaagagttgaggtttaggaacctccacttagatttcaaaggatgtatataaacacctagatgtccaggcagaagtttgctgcaggggcagagcactcatacagaacctccactagggcagtgtggaaggaaaatgtgggaatgtggggtgggcaccctcacacagtgtccccactgggacagtgtccccactggggcagtgtctagtggagctgtgagaagagggccaccattctcaagaccctagaatggcagatggactgacagcttgcaccttgagcctggaaaagccacagacactcaaagccagcctctgaaactagccaggagggaggctatcccctgcaaagccacagaggcagagctgcccaaaaccatgaggacycacttctgcatcagtgtgacttagatgtgagacataaagtcaaaggaaatcattttggaacattaagatttgactgcccttctggatttcagactttcatggggcctgtagcccctttgtttgggccaattta

SEQ ID NO: 560081 - DNA, 637 bp, Homo sapiens
cactcttccactcagtcagtccctctaacataccatattagagtttttcggggttttttttacttagttttcatcttcaaatttagaatttaaaatgaaaaattggggtacagtaayatatggtatatgtgttagactattttcattgcaagagaaagaaaagagactcaaattcaaataaacaataattacaaaaataatgtgtaggcttgagggaaaaagataaagtaacctcagaaggatctacatcttctaaagctctttgtggtttccactgcttcagggtcttcactcatggctaccagatggctatagtctcaggatttgtaatattaccctaccaacatctgtgaaagggagagaaatgtaacatagaggtaacttcaacaaaagtgtttggacactttggtgtttccttggttttcatgaaggaaagtgcttatccctgaactaaaaacattttctagaagaaaaatatataccttgatatgccaatcagagctaaaaatgttgtcagtctttccacacatgattggaatgagggagacatgatttcacaaatgaaatgaaaaggctgtctttggaagaagggggaaatggatgttgtgaacaaagtcaacttgatggaataccaaaa

SEQ ID NO: 560082 - DNA, 637 bp, Homo sapiens
cactcttccactcagtcagtccctctaacataccatattagagtttttcggggttttttttacttagttttcatcttcaaatttagaatttaaaatgaaaaattggggtacagtaatatatggtatatgtgttagactattttcattgcaagagaaagaaaagagactcaaattcaaataaacaataattacaaaaataatgtgtaggcttgagggaaaaagataaagtaacctcagaaggatctacatcttctaaagctctttgtggtttccactgcttcagggtcttcactcatggctaccagatggctatagtctcaggatttgtaatattaccctaccaacrtctgtgaaagggagagaaatgtaacatagaggtaacttcaacaaaagtgtttggacactttggtgtttccttggttttcatgaaggaaagtgcttatccctgaactaaaaacattttctagaagaaaaatatataccttgatatgccaatcagagctaaaaatgttgtcagtctttccacacatgattggaatgagggagacatgatttcacaaatgaaatgaaaaggctgtctttggaagaagggggaaatggatgttgtgaacaaagtcaacttgatggaataccaaaa

SEQ ID NO: 560083 - DNA, 615 bp, Homo sapiens
cactgctcaattctaccaaagttttttttttctttttttwaaaaaactaataccaatgctatttaaactattctaaaaaatagaggagatagaaatactttcaaactcattctattatgtgagtataccctgataccaaaaacagagaaagacacatcaaaaagaaaaaaaaactatatgcaaatattactgatgaatgtttcttcaaaaatccccaacaacatactagcaaaccgaattcaacaacatattaaaaagatcattcaccatgaccaggtgcattttatcccagggatgcaagaatgattcaacatacacaaatcaaacaatgtgatacataatattaacagaatgaaggacaaaactcatataatcatttcaactgatgctgaaaaagcatttgataaaattcaacatcccttcatgataaaaacctttaagaactggttatagaaggaacagacctcaatataataaaagccacatatgacaaactcacaggtagtaaattattgaatggggaaaactaaaatgcattaattagcaaaccaatcaatgtgatacataataataacagaatgaagtacaaaagtcatataatcatttcaactgatg

SEQ ID NO: 560084 - DNA, 657 bp, Homo sapiens
ttggtgctatgaagatgagaccagatgtgtcagagaagatttctattagcatgaatataagtttatatctgaaaatgtgtttgagatttcttggacaggctgggagattgtagtgcaatagaaacagtaaacatgtmaaaattattcttaggcagagattctgagacagtgatctgtggacctgttaaaggtctctgagattttgttcacggtatttgagaggtcaaaattatggcatttcactgtcttgagatttgaaatgataatacgaaggcaatggtgagaaacactgctggaaccctagaacatgttaaaacagggcatctggccgggcgcggtggctcacccctgtaatcccagcattttgggaggccgaggcgggtggatcacggggtcaggtgatcgagaccatcctggccaacatggtgaaatctcgtctctattaaaaatgtaaaaattagtcaggcgtggtggcgggcgcctgtagtcccagctacttgggaggctgaggcaggagaatcgcttgaaccggggaagcggaggttacagtgagccgagattatgccactgcactccagcctggcaacagaacaagactccatctctaaattaattaattaattaaaaataaagtccttagtaaaaaagtaaaattta

SEQ ID NO: 560085 - DNA, 538 bp, Homo sapiens
tttagtgtttttatttttataagatgyttataattacagaaaaaatattcacatagctaagcataaaattattccattatcttagaaataaaagattatttattttatacatattattagggtaacaaaatattttatatgaatattgaacagcttgtaactattttgcatattcgtcagaaaccattttatcagttatacaatttatctttgcctacttgtaaatagaaaatacaaataaatggtacaaacttaataaaacttcattgaaaactcgatgttgccaattaaagtacacattgtataattactaaataattaatttctagaaagctgtattgtctgctctaaggataaaatatactgaaatatggttaaaaatataaaaatataactctgagtgttacctattacttcattaattcgtagaactttggaaaaactaatcttccacaactgaataaagtggttcttattttgaaaacgtggattttcctttagaacagtttcggtgacatgtatcttatgtagcagtcat

SEQ ID NO: 560086 - DNA, 537 bp, Homo sapiens
gtgaaatataagaaataaacacttgtgctttttctaaatgtttgttttgttttctgctggagggaatctagagctttaatcaaatctcgaaggtaactataactctgaaatgtttatattcatgaatataaatggagaacgtcctcgtgacaatcattacaatttgctagaatagcagctgaaaatwaacatccttatggatatctgatcaaaaatattttctgcatctctagattattaaaaattaccacatgcttctctaaccccaacttacctatgttaaatcataactggaaatggaagcatgtatgaatatttaacatttttacatgtgttcctgtacaactcaggttgtgatctacttgacagtatgatttgtattctttttggctacttctaactctctatatctctccctagaaaactctggataaaaattgtacattatctattatatgtcagacatcaaggatacagttatgaagtagcaacacagaccctgttcacattggacacacaacctagcgtgaaaaaaca

SEQ ID NO: 560087 - DNA, 592 bp, Homo sapiens
gaaaatcaataaaatcaaaagctggttcttcaaaaagagcaataaaattgataaacttctagccaggcaaatcagaaagacaaaagagacagaagaaacacaaatcrctaatatcagagataaaagagggggcaatcacttctaatcctaagaacattaaaaggataataaaggaattttatgaaaaattctatgcccacaaacctgatagcttaaacaaaatggaccaattacttgaaagacacaaactactaaaactcacacaaaaataaatagaggcaaggcctggtggctcatgcctaaaatcccagcacttagagaggctgaggtgggaggatcacttgagcccaagagtttgagaccagcctgggcaacatagtgggatatcaactctatttttaaaattttaacatatattttaaacaattttaaaaaaggaatagctagtctgcctggatgcagtggctcatgcctgtaatcccaacagtttgaaaggccaaggtgggaggatagcttaaaccctggagtttgagaccagcctgggcaacagagtgagacctcatctctacaaaaaatacaacattagctgggc

SEQ ID NO: 560088 - DNA, 598 bp, Homo sapiens
acaaatgcaaaaaaaaaatatggtgaaatcaaaagctagactcctaaagcttaacttgctttgcaaaataccatcatgaagctcaagataaaacaccattaaaacaatactcaaaaccactgctgtaagtaatagagagtgattgaatgtaccttggctgatgtatgtttaaattgcttyatccaaatctgtgaaactagaaagtgccctggctggacttttttgtgattctgttgttgttattgttgtttgttttgttttccaattattgttttcagttcactggttaaggaatcaaaatgtttcaattttttaataaaaaatatttattaaaactaaaggttaaaaccttgcttccattcttgttctactgaaacacatatggattttgtcacaatataatggcatttgaaatctgaaaaaatgttattccttaaatggactgtctgaccttttcattcattattccattcacaagttgtttaacaggttgtcaggctggatgtcctcattccaggctccagggtgaatacaacttgaccactaaataaaatcccaaattgttaggaatgcaaatgaacagagaggttcggagaaa

SEQ ID NO: 560089 - DNA, 620 bp, Homo sapiens
tatttcacagcaagatttttttcaaaacagaggctataatgctaataaatgaataaaagtctggcaaccattgttgtcatagaagtgtagttgctagcattgtctactgtgtgattgtgcggaaaacatctaagctatgtaagcttcagtccattcttctctgaaattaataggtgggacaaaatgatctctaaagctccctccagcaataatatcctatgattgaaagatttctaaagcctaacgttttgcaattggtagaatttctttcttttatttttatttatggtttttyttttgagacaggtcttgctttgtcatataggttggagtgcagtggcaccatcatggctgagtgcagcctccacctcccagactcaagcaatcctcctatcacagcctccttagtagctgggactacagttgcatgcctccatgccttgcaaatttgtaaaaaaatttttgtagaaacaaggaggtcttgttatgttgcttacactggtctcaaattcctgggctcaacttatcttccagcctcagcctcccaaagtgctgggattacaggcataagcctccatgccctgccacaattggtggaatctcttgatttgaaagaagct

SEQ ID NO: 560090 - DNA, 545 bp, Homo sapiens
cagggaaaaggagtgagaccccaaaacttcgttcttgcctgttgaaaagtatggaaacaaaggagggacaagagaagattctttgtccagagagaagggctgtgccccaggccagctctcgcctgtgcattcattgtccatcacaatctggtttgtgaggttttagaaaaatgagtcgcccaaacacctgaaagatttagaccagttctgaaaaataaattgtaccttgaatacatatccagtaaaagtatgtrtaactgtataagtaactaagtgggggaaaaaaaggagtatactgttcatatcaaggttttcatatataaatagtagggaaaagggactttttttttttttttaaattttttgagagggagtttcgctcttgttgcctaggctggaatgcagtggcgcgatctcagctcactacaacctctgcctcccgagttcatgtgattctcctgcctcagcctcccaagtagttgggattacaggcgcccgccaccacgcccagctaattttttatattttcagtagacacggggttt

SEQ ID NO: 560091 - DNA, 405 bp, Homo sapiens
tgattacatgctagtgtcattgatgcttaaagcgcatcaatgtgtgttatacaaatgtgtgtataagtgtgttatacaaagcacaacaatttagtttattatatatttccaaagttattttcagtttgtacaaaaaaaaatgacaccagtgtcattgagttcttctgatatacaagatagtgttctaaatggcttacrtctatcttatttagtcccaaaaaacagttctttgaatttgatggttttcttattccctatgcttatccggtagagactgaaatcggaggagaggagttgtataacctgtcagaagtctcacagcaagtaagtgtaggagcctggatttgagcccaggtagtttgctccagagcccatactcaatttctgagctatgctgcattgatt

SEQ ID NO: 560092 - DNA, 405 bp, Homo sapiens
tgattacatgctagtgtcattgatgcttaaagcgcatcaatgtgtgttatacaaatgtgtgtataagtgtgttatacaaagcacaacaatttagtttattatatatttccaaagttattttcagtttgtacaaaaaaaaatgacaccagtgtcattgagttcttctgatatacaagatagtgttctaaatggcttacgtctatcttatttagtcccaaaaaacagttctttgaatttgatgsttttcttattccctatgcttatccggtagagactgaaatcggaggagaggagttgtataacctgtcagaagtctcacagcaagtaagtgtaggagcctggatttgagcccaggtagtttgctccagagcccatactcaatttctgagctatgctgcattgatt

SEQ ID NO: 560093 - DNA, 613 bp, Homo sapiens
aagcatactggggtggggcaatgcagagaccactttggcaggagccgggggttcatgaggagagacgaagtttgagaggcagagacttgcgccggattgctgagaatcttgaaggccaggcatcttagtcatgaactgagtagaggtgagattatattttttttacacaatgcttgctgaaaatgacatctcaattcaagggctggatgaaaatgcaactcattgctttattcccttatgaattttgatataactcacaaaattaatctaatagaaatgaaattggagaattactaggtaagagtccagcatctgaaacttgtcgggtcctagataataacctattacaggccatggggagccgttgaaggtttgaggccagtggggtagtgtggttaagcaggattttaagactaggctgttaggaaaatatgctttaccgagaaaaaaaaaagataaatttaaagtctcgatgaaggaaatgggagatgatcatgacttgaataagkggggaatatggactgaccatggaaatataaagtattacattaaaaatagctatttgaaatgatttgatgtttaatatctataactccccacatttcatatattg

SEQ ID NO: 560094 - DNA, 521 bp, Homo sapiens
gtttgcaatctattgcaaagggagagagaagaactagctgagcaatttgcagactgaattctttgggatcctgatgttgaggaaggatgccttggagaaagaggaggyggccggacacagcctcctgtgcctcacccccactgctaccaggacagtgctgtcgtcatctgtcctacataaggtgactccctgtatgatttcatttggaaaacataaagtgtgctattctagctttttgaaaagtttaaaaaccatagcactgcgttttagaatactgttcattttttgcataccagagttctgagtatcagattctgctatattaaataactcagaatttactcatttgtgaacatacctctctgtacttccaagttatctcgttaccacacacagaaatgtaaaagctttaaacaatgtgttttttaagtgcttagtgacaaccctaaaatatttccaaaaggttctatggctcagacagactttgtgatgttattctttaagaaatgcaatggttgata

SEQ ID NO: 560095 - DNA, 611 bp, Homo sapiens
gaacaactgccagatatcataccagggcaagtgcaaatagatgcctgagtcccaggtctccatcataaagcaaatatctgtccttattccctctaggggaccacttgcccacaccccaggcaacaacaggaatagacatttgctttccgaatgtgcctgccccagaggccagcctctgttttaatatgtattcttggaagtacatgggataggtgagtttgctttgaagggcatattttgactctatgagggacaaatccttttgccaaaattttaacaactaactttaatttaccacgggagatgttggtaaaaattgtcaagacctctttaagttttcagcaaatgccaatagcagcttggacatgattgctgctaagatgcctttaatgagctgaatagtggaatgattgcctttgcttcttcctttgaaaacagacattccccagtagctgctgaacatccccaaggatgttctttgaggatattcctctttactttgtaaccatcacttgcccatccctactgcaaactcttggccctacctacggcaccctgtgtgacatagcaattgctttttctytggtcctctggagaactgttggtgggac

SEQ ID NO: 560096 - DNA, 372 bp, Homo sapiens
tacttgccctcttaaagaaaaagggaaagcctcatatttctgcagtgcatttaggcacatcatggcttcctgcctttcagtgatcaaattgtttcttaaatatgagacttgttctcagagttatacaatgaatcctatgctaatccactgtagaactgccattttgttctttcctccctgtggtttagactttctgattcacacagagcttgaaacttaaatgttctacatatatttaaaatagtgtttcacagaaatgtattaataggatagtcttactaaataattgggggtaatttatccctaatttatgtgaatcwataaatgcatgagtgatgtaattgcaaacgtacacacacacgtgcacatgca

SEQ ID NO: 560097 - DNA, 372 bp, Homo sapiens
tacttgccctcttaaagaaaaagggaaagcctcatatttctgcagtgcatttaggcacatcatggcttcctgcctttcagtgatcaaattgtttcttaaatatgagacttgttctcagagttatacaatgaatcctatgctaatccactgtagaactgccattttgttctttcctccctgtggtttagactttctgattcacacagagcttgaaacttaaatgttctacatatatttaaaatagtgtttcacagaaatgtattaataggatagtcttactaaataattgggggtaatttatccctaatttatgtgaatcaataaatgcatgagtgatgtrattgcaaacgtacacacacacgtgcacatgca

SEQ ID NO: 560098 - DNA, 612 bp, Homo sapiens
gaggcggtcaaggaaggccaagctgattcggttacatttgagcagacacctaagggaaaagagcaagccacgtggctaaccagggaaagagcattgcaggcaaaagggagaagtcatgcaaacgccttgaggcataaacttggctggagagttttagcaatagagagccagtgaccctggagagaaccagcgaggggaagagtagttgaggatgaagttccagaggcaatgggaactccactgtggctttgttcatcattagaaggactttaggttttatttggaaagaaatgggaaaccactgaaggaatttttttttttttttttttttttgagacggagtcccgctctgtcgcccaggctggagtgtatctcagctcactgcaacgtccgcctcccgggtttacgccattctcctgcctcagcctcccaaatagctgggactacaggcgcctgccaccatgcccrgctaatttttttgtgtttttagtagacacagggtttcaccatgttagccaggatggtcttgatctcctgacctcgtgatccccctgcacaaggcctcccaaagtgctgggattacaggcgtgagccaccgcgtccggcctacca

SEQ ID NO: 560099 - DNA, 459 bp, Homo sapiens
attagactccaccccctacatgagatttggtagggacagacaaatcatagctgctrtactatattgtaatttgtattgttatgagatacctcttctgctataaaaaaatggagttaactgtaaaacagcctcaggcaggtcctttagaaggtattacagaagaaggcatttttatcaaaggagatgatgactccatgcatgccactgcccctgaacaccttccagtgggacaacatgtggagatgaatgacaaatgaaaatatgggaaggtgataaagaataaaatttctattttcctaaatttccaattctttttttttttttcttgagacagcgtctcactctgtcacccatgctggagtgcagggcactatctcagctcactgcaacctccatctcctgggttcaagctattcttctgcctcagcctcctgagtaactgagattacaggtacatgc

SEQ ID NO: 560100 - DNA, 459 bp, Homo sapiens
attagactccaccccctacatgagatttggtagggacagacaaatcatagctgctgtactatattrtaatttgtattgttatgagatacctcttctgctataaaaaaatggagttaactgtaaaacagcctcaggcaggtcctttagaaggtattacagaagaaggcatttttatcaaaggagatgatgactccatgcatgccactgcccctgaacaccttccagtgggacaacatgtggagatgaatgacaaatgaaaatatgggaaggtgataaagaataaaatttctattttcctaaatttccaattctttttttttttttcttgagacagcgtctcactctgtcacccatgctggagtgcagggcactatctcagctcactgcaacctccatctcctgggttcaagctattcttctgcctcagcctcctgagtaactgagattacaggtacatgc

SEQ ID NO: 560101 - DNA, 459 bp, Homo sapiens
attagactccaccccctacatgagatttggtagggacagacaaatcatagctgctgtactatattgtaatttgtattgttatgagatacctcttctgctataaaaaaatggagttaactgtaaaacagcctcaggcaggtcctttagaaggtattacagaagaaggcatttttatcaaaggagatgatgactccatgcatgccactgcccctgaacaccttccagtgggacaacatgtggagatgaatgacaaatgaaaatatgggaaggtgataaagaataaaatttctattttcctaaatttccaattctttttttttttttcttgagacagcgtctcactctgtcacccatgctggagtgcagggcactatctcagctcactgcmacctccatctcctgggttcaagctattcttctgcctcagcctcctgagtaactgagattacaggtacatgc

SEQ ID NO: 560102 - DNA, 570 bp, Homo sapiens
ccttaagtgtgtcattgttgcctgyccaaaatagtacttagcacacctacaattataggttctggtgtgaatgacacctctagagtgtttcaacatggcattcctgagtgcatctctttccctttggtgaatctgtataatattttgcaggtacttttgtgtttgtaccacagctgaaacttttctttctgttagtcttaccaggataatgatcttggcattatatacggaaaagccacaagaggtctgcagaattaccattttaaaatctaaaaagtcttctaatgaacaaagtagatttgaaaagaattgactagttcctatgaagttatgaaatctataaaatttgagacagaggtacaaaaaattaaatcaaatgatgtagcagcctaggtggaaggttgcatgtggaaaaaaaaaaggggtagaatgaggtaaggatgtgactcaagtgtagaaaaatgggtaacactaccacctgtgttctttaatttaaggactctaagatacggtgcttaaaaatggaagtcagcctgacagttgggattgtgagaaaaatcaccctggcta

SEQ ID NO: 560103 - DNA, 632 bp, Homo sapiens
tgctctggggtgcaataaatcactatktgagtcttgactctatagaaatggtatgatgtcggacaagttattaaactctctaagcataagtttacttctaaaatggatgtgatataaatgtttactttatagatttagtatcagtacatgatataatgtccagaagaaggttagtacactgcctcccaagtaataccttgcattcaccgagaatctactactgtaacccatcgctttctgttcttttttattacctgtcacaaccttccccttagattataaactcctcaagcattggtctttgttttttccttgtggaacttccccaatgaaacaactcaattaatatttgttgaattcaagtgaagtaagtggatctcatcaccaacaacaaagtctttgatagatttttactcagtacatttgcatcctcaagatatttcaccatcaagtagagttcaaggttatccacagattcttcctggaggtttcgctctgtagtccgcctctcatactattgcatgccacagatctatgaatccacccttccagaaaatcagctaacactcagccatgtgctgcagtcctttgtcttctctctgcatgtcagcagtctgattgcaaataaaacg

SEQ ID NO: 560104 - DNA, 554 bp, Homo sapiens
gacaaaacctttgctcagtaagcattttttcattgttttatttactttcttgatccctagcatggttataagcattactgaactcattatgatcaaaatagtaggtagaatttctagtcagttccctttgaacgatccaggatatccattttcgaatgcttctaatgttttagcctactcaaaggtggcccacacatgtctctggcaggtctgagaatgctaaactacagaatatcacaagccttcctgcctggctgtctttactggggcgtcgttgaacgggtttgtttttcttgggctatgggtcacttaaactggtatttaacggctcttttcacagactgttggttcagcttattaattaactttcttggtgtcagcagtcttccttaaactaaaaaatctgtgagagatgtctgaggactcaccgaatcatagaaacaaacagaaaaaataaaataccgtctcctggccaggcggagtggttcatgcstgtaatcccagcattttggggggccgaggagggcagatcatgaggtcaggagttcaagacc

SEQ ID NO: 560105 - DNA, 586 bp, Homo sapiens
aaatgccaacctggtgtctccatctctaaagcccatctcttgcctggatgaaagcagtcatctaagagttcttgatgtgcccttttctcccctctagttggttctcaactcagcagttaagaaagtcagaccacaaactcttctgctgcagttctacagtggtctagaaggcttcataaaatctccctcccccattagctttctaaatcatctcctacttctctacccattgcttacctggctccagtcccactgacctccctgctgtcccttgaaaatgggacatactgccatcttagggcctttgcactttcaatttccctgccagagatgctttccccttatttgcgtgttcttttctctcacctccttcaggcctatcttagtctgctaggactactataacaaaatattgcagactggctggcttaaccgaaatgtattttctaacagctctggaggctaaaagtccaagattaaggtgctagctgattcagttcctggtaagggcccttttcctggcttttggatggccagcctccttcttgctgtatccccacatggmctttctgtgatgcacgggagt

SEQ ID NO: 560106 - DNA, 535 bp, Homo sapiens
ccttcccatccatactcccagtctcaccaacacttataattattcaccagaaattcaacaatagggagaaaagcaactggataatacacgttgcacaataaaaatatgagattatcaacaggctacgtggagaccctgggacacacatctcactataggaagtgagggtagtaatagctggagtgggaatcttgaagcctgcatcacatattaagatgcaaagttggtgtattcatctgctatatgaagatatcacagactgtgtggcttaaataactatttttcatagttctggaggctagaagtccaagatcaaggtgccaggaggcttggtttctggcgagacctccttcctcaccttgcagacagcaccttcccattgtgtccacacatggccttgtctttgtgcctgcacacagagagggcaaggagctctggtgtgtcttcctattcttataggacaccagatcttttggattagggccccatccttatgayctcatttaatcttaattacctccttaaaagctccatc

SEQ ID NO: 560107 - DNA, 537 bp, Homo sapiens
ccttcctggatactcccagggggagatcagttaaaaagctaagcacctgaaaaatatgcagtgatcccacagcaaagatcttaaaatattgacagcctaagccagcagctaaaggaaggctatatttgagaagtggatgtgcacacccaagcaaacttgtgccgaagtcagcaaggaaagactgctgagcctaaccaggctgaaggaagcagcaccaagttcacttttcgttctacccaaaagatttccaagggtggccctcaggcaaccygcagtgggtcacctggggtaataagtaaactgcagaccctccaagtcctctgcacatactatagaacagaatttctgaaggcatagctttggaatctgtacttttaaaaaacaagttcctcaggttattattcaagcagtcatcaaaaatcattgcagtttatccagaaactttttacctctttcttcacctgggtaactaccactttgaagaaaattcaaaggatatcttctccaggaagacttccctcaagcagggttaaatgc

SEQ ID NO: 560108 - DNA, 608 bp, Homo sapiens
cattagggaaagtgttggttgggggctttatatatggtcatatgctactgttccagaaagtgagattcaggcaacatctgtggtcaaaaaaaaaaaaaaaaaaaatgttatcagttgaaattcactcttaraaagtatgtgaaattgttaagtcaaggaatgtggattcgtaaggtagtgattaagtgcgtgggctcaagagccaggctgtctgagttggaatcccagctctggcattgtgactttgaacacattccttgacctcttcaggcctgcattttctaatctggaggagtgggaataataatttcagcttgttctagggccattgtaaggattaaaagaattatcatataaagcgcttaaaatagtaccttgcaaacagtaaacacacacttaaaattagctattaatattaccttatcactgttatgatgataatgttatagcattgaagctgacttaatgaatcgatcatatctatatacttgcaggggaataattggatggagaggtggggagcaggaatctgtagtgggaagacactttcttcccatggaagtaaaaagaaaattcttttatagaaaatggaattttcaaccttcaga

SEQ ID NO: 560109 - DNA, 328 bp, Homo sapiens
gcacagtggacgcctcgtgttttcgactggccgcctttttgtggtgctgtctggctgtccctctgtcctgtacatcacagcagctcagtttataacctcctgggctgggaaagccagtgggaaatggaatctcaggtagccctctcctgccttccatcgtgactaacgaggtgggcatctcttcgttcgttgcgtcttcttgtttcttttcctgtgaartgccccattgagttcttcggcctattttctttttctttttttttttttttgagacggagtcttgctctgtcaccccggctggagtgcagtggcgtgatgttggctcact

SEQ ID NO: 560110 - DNA, 454 bp, Homo sapiens
gtcatcggtataagactctttcagctctttatatttattactaatgaatatatggctttttatgtacccgaaggacagtttggatataaaatctttagcatgtatttactatatgatataaaatctttagctcatatttactatccttgagattacagcaatcactccactctcttctggcatacagagctgccagcctaatttttttcacctttttatatactggtttgattgttttgcctgagtgcctaaaggattctgccattaccttttaaggccaataatttatatgccttgatgctgacagttcttgatcaatttcccctaccatgtgatatcctctttcaacaaccttcacttgttttaagaaaatgttcttgagtatcatgaaataagtgctctgtttacagaamgttaaataactgttctgtctggtttttcttctttgagagaa

SEQ ID NO: 560111 - DNA, 586 bp, Homo sapiens
acagaaaagatatgaatggctagtaagcacatgaaaagctgttcagtatcattagtaattaggagaatgtaaattaaatcacagtgagattctgctacacacacactaaagcagctaaaactaaaaagactgacggtaccaagtattggtgaggatgccaaacaactgtatttctcaaacagtgcagataggatataaaatggaacaaccactttggaaaacaacctggcaatttcatgtaaaattaaatatgctaaccacacaacctaacaattccactcctaagtatttacccaagagaactaaaatatgtccacatgaagatttatacacraatgttcatagaaactgaaatgtccattaacaggtgaaagagttaacaaactgctctataaccataaaatggaatactactccataaccataaaatggaatactgctcagccatagaaaagactcaaactgatacacataatatagatgaatctcaaaaacagtaactaagtgaaaaaaagcaaaacacattctaagtatatattgtacatactgtaagtactgtatatgtatatgctagaatgattacatg

SEQ ID NO: 560112 - DNA, 586 bp, Homo sapiens
acagaaaagatatgaatggctagtaagcacatgaaaagctgttcagtatcattagtaattaggagaatgtaaattaaatcacagtgagattctgctacacacacactaaagcagctaaaactaaaaagactgacggtaccaagtattggtgaggatgccaaacaactgtatttctcaaacagtgcagataggatataaaatggaacaaccactttggaaaacaacctggcaatttcatgtaaaattaaatatgctaaccacacaacctaacaattccactcctaagtatttacccaagagaactaaaatatgtccacatgaagatttatacacgaatgttcatagaaactgaaatgtccattaacaggtgaaagagttaacaaactgctctayaaccataaaatggaatactactccataaccataaaatggaatactgctcagccatagaaaagactcaaactgatacacataatatagatgaatctcaaaaacagtaactaagtgaaaaaaagcaaaacacattctaagtatatattgtacatactgtaagtactgtatatgtatatgctagaatgattacatg

SEQ ID NO: 560113 - DNA, 553 bp, Homo sapiens
gctgggtgctaagtcatcaaatgcctatgtaaaaataaaagtagaaatgcacctaggcatcttcagagtaacagtaatagtgtaaatttcagaatatcttttctcatttttaatgagtaaaaatccttttagaaaaatggttgatgtattaaggttgggtttcctgcttaggtrtctctgaaacagtattctcaacctttcagctctccctgttctacttccagggaggtcttcacttcagaaatccaagactcatattcatccagcttggtgtcaagtgggctgttgctgccagaattatcttgtgattatttgagagatgtatcagtttcttctgaagtacaatcaactgtagaagcctttgtagcaggtgtgtaacaaggcaagtgcccagctcctgcagccactactcttggagctaccctgtcgatgaacatgaggactcagcggcctcatgaaaggctccagggagcagtgtgtggttctttggagccttttgtttcttttggcagctcttcatggaaaaatgtattaaaaaaacacccatatgaag

SEQ ID NO: 560114 - DNA, 417 bp, Homo sapiens
gtggtatttggttacatgagtaagttctttagtggtgatttgtgagattttggtgcacccatgatccgagcagtatacactgaacccaatttgtagtcttttatcactcacccccttcctaccctttcccctgagtccccaaagtccactgtgtcattcttatgcctctgtatcttcatagcttagtttccayttatgagtgagaacatacgctgtttggttttccattcctgagttacttcacttagaataatggtctccaatcccatccaggttgctgtgaatgccattcattcatcccttttatggctgagtagtatttcatatatatatatatgaattatatatatataaatatatatgaattatatatatatgaattatatatatacatatatatgaattatatatataaat

SEQ ID NO: 560115 - DNA, 557 bp, Homo sapiens
tcaaactcctgacctcagatgatccacctgcctcggcctcccaaagtgctgggattacaagtgtgagccaccacacctggcctattcagccctcttgatctgcaggctggattcataggtcttcatcttagtacagtaggaagtatactggcatcaggaggtcaagcttacttctttcattacctattaaggtagataggcatttgttataaaattgaacaaaaaggaactagtttacaattttacataaatagtaaaagagaataatttcttcttttcgtagataagaaatgttatcaactggcataatttcttaccagtctgtcatcctccatttagaaaaccattagtaattaaatgttgttttcctttaccatgttcctaaatatgaatccttcataaggcatctattaaatacctactatggggcggtatacattattgattaaatcaatccatatttccctgagaaagaccaagaaaaatttcaaggaaayatgtatcacagctacatgcattgagtactttatatgttccaggcactgtgaaaagccatg

SEQ ID NO: 560116 - DNA, 538 bp, Homo sapiens
catcttggccaggctggtatcgaactcctgacctcgtgatccacccacctcggtctctcaaagcactgggattacaggcgtgagccacccatctggcctgaaaactaactctttaacaaggcaaaagtctttaaatattctgtgatcatagacagttacaggatttgttgccaccactttggcaaacatgaaagtcactgtgaaarcagaaaacacatttttagtggttttggttttggttttgttttgcttagtaagcatttttcagtctccattatttcataaatgcacaaggggctacacccttcttatgtttcttactctgtaccaagttgagtcactgaaagtttcccccagtgatttagtatatctggtctctttgatttttgcccctggaacattcatccatgcccaggtaatgtctgccttagaaagggctctagtaccctaactgctatcaaagcaaactcagatagagaaataaaaggctataagaactggaaataaaatgttaaagtacaaaccaatataatcatgt

SEQ ID NO: 560117 - DNA, 642 bp, Homo sapiens
aattgtcatatctcacatttaaaggtgacatcactttatataatttagttttttttttttcattttctcttcatttttattgagaaaagggacagtgagagagaaatgtggaaagaagatatagagtagaagcaggcatttgaaaatttcacatctgatataagctgtttcccgttcttcaaatcatgcctctgctgctgctactgtcataaatttaactggcttacctttaatcacagggaatggtaggctactgaaacatacattttccaaaataatccacaaaatccaaaatacacaaaaataaatattgagatgagttaggctcaaaatgtgatccagtctttcccaatagtttgtttaaccagcagggtcatttcaggcaactcagatgaaaggattcatttagcaattgaaaatgagcatccattagcagttacaaaaatttaaattctaacatttactcatcaaaataaaacaaaaactccaatataatcatgtcacattattatatacaaattttgtcactaatcatggggtcaaaagttagaaagtgttgcaatctttaaaatattcccatcagtttgagattatgggttttttttccctcatctcctgcayaaaattattcctaggcaactt

SEQ ID NO: 560118 - DNA, 543 bp, Homo sapiens
atgaaggtcagtgataaaagagagctggtcatatrttaaattgaattgaaagccttatttactgtacttcctgatttatgcagtcctatattcattgtaccaaagatatgatcctatgggacctaattttagtgactggagcaaagcatagtgattatctctcattttttatcaaattgtagtttcacatgaaatccttcctacaacccaccatgaaaaacatcctctatacaacagaagaaattttgggctccatcctgaggtatttattaaccaatccacagagcgtcttccatatcaatgctttcaaaacaaaatacaatgtctaggattggttacttgctttctcagcagaagtaattcagatgtgggctctcagattagaaactactgttgctctgtggtaatacattacatttccatctgaaaggttcatgctactttttactgtttaggtggttttatgtcatatatatgtatgtatgtattctaatttaaggccggcgtgatagccacaggctagacaatttaaactgattggca

SEQ ID NO: 560119 - DNA, 582 bp, Homo sapiens
ggaaagcattaacagaatggaaaactataactgaaacaaaaacaaaagataacataaatagtaatttgttcaaataaaacaataagagaaaaaaataataagaaatttaagccagtagtaaacatgagatatactgatctctactctgagaatggaatgaattttgccattaaaggtagactctcacattgagtaaacataacaccaatgtacttaatgtttacacagtcatgcttaaaacaattggtaaggagaattagagagtcaaggagtgaacaaaaagataagaaaaaatgcaaaccaagaaagcagaagactcgatgttaataccaaaaaaggtggcatttaaggytaaaagaaatataagaaacatgaatggccatgatataatggtaaaagctactataaattgcaaagtttcaacagtaatgaaatagtgagcattaaattctgtaccagcatgaacaaagtcatagctgaaattataaagaaatattacagagcaggtctcaagcatgggcaaactccctgtcttgatggagtggaagctccaactgacttgatgaaatgtttttgtttttt

SEQ ID NO: 560120 - DNA, 602 bp, Homo sapiens
tcaggtaatctacccgccttggcctcccaaagtgctgggattacaggcgtgagccactgcgcccagccaaggccatttttttctgacatactgtaatgcatttgtatgccttctttattttttctttaaatctggggtaatgaagcttcagacaatgaagtataacctcctcattaattctttcctccgcacagtaattctgtctccccactcctccgtcttaagtcaaatgtcactccagtgttgccttccaagacaaccttatctaagtagacatttttctccataataacttatcactacctgaagttatcttgttcatttgtttacttgttcttgtctgtctcccttcataagcatgcaagttctgtgagagctggaactttgtcctgttcattcctgtatctccagtccctagaagaatgcctgacacatcataggcattcaacaaataatacctatcctggaaggtgagatttgtatgcaagatattaaactcacttgttcaaagttcgtgmtcaacaaactttaattttccttcctgcctattgacgagactaatcaatttggttccctgatcagcaaaaatcacacacatatct

SEQ ID NO: 560121 - DNA, 545 bp, Homo sapiens
aggccgggcggcccccaggcctcggggcagccagacccaccttgcctcagggcggtgctcacagaggctgggcagggagttagcaggacgcctgcaggacctccttgtgagccccctgctggccaaggggaaggaaggaggcctctgracatggggagagaagccagagcccagccctggcaccttgggcccttgggaagctgctatccaggcagggtggactggagcccccgcaggagacccccaagcccagaagcacctctgctgatagtgccccaggttctctgcctttccgagatggtcccaaggtcaccaccccagagggacacagccccaggccaagggcgctagtctgccctccttcctccctccttccctgcttcctgccccttttcttcccccttcttccccccttttttctccctcctccttcttctttccctcctccctccatccctctctcctctatgcctccctccctccatctatcctccctctttccatctctccctccctccctcctccatccatcctcctatccatcc

SEQ ID NO: 560122 - DNA, 543 bp, Homo sapiens
aaaataattgtaccggtttcaagtgtgaatgtgtgtgtgtatgtgtgtgtgtgtgtgtgtgtgtgtatatatatatmtctctccaatatatatccattatctaatagattccattatctaatggattcttcccctacacccacagaaaaaccatagaagtgcatgcaaattacagttaccaaaaaaagtacttaatgttgcatgacatgagttgcagtggcagaataatcacttaccacaataattgtatatattcccattattgatatatttccattattatatgttgctctataaacactgtaagacattttaatatcacaagtgtgatggtcatacaatgtttatacatattattaaatatgtattatagtattttgagtcaaaaataaataaaatgcaaataaaacacaagtactgtgttatagaataggtaatacatgaatacatgaacatatttaaagttacattattttgcaaggtattcaccaatgctggatgatttgtaaagtgaatatgtcattggaaaacaacataaatcat

SEQ ID NO: 560123 - DNA, 593 bp, Homo sapiens
gattctaactggagatctggtctgtgcttcttctcttgactcactggaatcatcgagattctaactggagatctggtctgtgcttcttctcctgactcactggaatcatcgagattctagctggagatctggtctgtgcttcttctcttgactcactggaatcatcgagattctaactggagatctggtctgtgcttcttctcytgactcactggaatcatcgagattctaactggagatctggtctgtgcttcttctcttgactcactggaatcatcgagattctaactggagatctggtctgtgcttcttctcttgactcactggaatcatcgagattctaactggagatctggtctgtgcttcttctcttgactcactggaatcatcgagattctaactggagatctggtctgtgcttcttctcttgactcactggaatcatcgagattctaactggagatctggtctgtgcttcttctcctgagagtcgcacccataaaaggcatgcaaacctccctttctacactagactgcactactgaggactccagaattccctgataaaaaagcacaagcccacatccagcacc

SEQ ID NO: 560124 - DNA, 644 bp, Homo sapiens
gaattccaccacacctgttaatttttccaaactgaaaaaaaaaatttagtttttgtaaagatggggtcttgctatgtcattcaggctggtctggractcctgggctcaaacaatcctccctccttggcctcccagattgctgggattacagctataagccaccttgcccagcaagagtaccttttcaaacaactttaaataccaccatttcaaaaaatttccatgagtaaaaatttgacaacttctctttaaatttttttgaagtcagttaggttatttacagtgttgcatgaactggagtgttctagatcaatattcctcagaacatggtgtaaactagcagcatcaacatcacatggagcttgtcagaaatgtgtaatctcaggccaaacccctgctgaaatgtagtctttattttaacaagatccacagcttatttatatttaggttgagaaatactagtatagataatgcattaagatagaatctcaatgtaggaagtacctatctctgataatatgtattagccatttctatgtcatatgggtggcaaatgttttcctactctataatctgagtgttttttttaattcatggtatctttgccatacatttaaaaactgttatgtactcaagaatgttta

SEQ ID NO: 560125 - DNA, 525 bp, Homo sapiens
gttaaaatgtctccttcttcatctcagattttatttatttggatttctttctttttttcttagtctggataaaggtttgtcaattttgtttatcttttcaaaaaaataactttttgtttgatcctttgtattgttttgttcatttcaatttcatttatttctgctctattcattattattttttctactaattttgggtttaatttgcacttgcttttttagttcaagatgaatcattaggtcatttatttgaagcatttgttcttttttgatataggcatttatggtgaaaaacttccctgtttgtactactgtaacccatagattttggtatgttatgttgtcctcatcatttgtttcatgaaactttttaatttacttcttaatttcttcattgacctactggtcattcaggagcatattgtttaatttccgtgttgatatggtttggttctgtgtccccaccagaatcgcatcttgaattgtaatacccataatcyccatgtgtcgaaggcaggggcctgc

SEQ ID NO: 560126 - DNA, 515 bp, Homo sapiens
ataaagcattgctcaaagaaatgctcagagtcttaatagctttaagaaaataggataataagcaaactctacattctactcacaaagttaaaaaatatactcaaaatacccataaaaraaataatgaggattttaggtagaatgtgcacaagagatatttgcacaaaatgggaaaagacaatagatggaacattatctaaataattaatgaaaaataatatcaatatacaaaaaaatgataataatcctaaaagtaaaataatcacagacatagaggtcatacaactactcaactttctccctctttctttctgtcttatttttgtaactaagtttatttcatttacatttactgaattacaagtgttatggttttagtcctgactaaacaaattttaattttacatctttagttctttatggttatttggtttatatctagtatattacagtctgattttactttccctgtgtgtgtgctgtgtcgttgtgggtgtcctgcagttaaagaaaat

SEQ ID NO: 560127 - DNA, 515 bp, Homo sapiens
ataaagcattgctcaaagaaatgctcagagtcttaatagctttaagaaaataggataataagcaaactctacattctactcacaaagttaaaaaatatactcaaaatacccataaaaaaaataatgaggattttaggtagamtgtgcacaagagatatttgcacaaaatgggaaaagacaatagatggaacattatctaaataattaatgaaaaataatatcaatatacaaaaaaatgataataatcctaaaagtaaaataatcacagacatagaggtcatacaactactcaactttctccctctttctttctgtcttatttttgtaactaagtttatttcatttacatttactgaattacaagtgttatggttttagtcctgactaaacaaattttaattttacatctttagttctttatggttatttggtttatatctagtatattacagtctgattttactttccctgtgtgtgtgctgtgtcgttgtgggtgtcctgcagttaaagaaaat

SEQ ID NO: 560128 - DNA, 609 bp, Homo sapiens
agtaattgctcaccaaacccctctatatccaatgtctcttacacccacttctatgaggaaagggagggtaagccagcatgatatacctcaaagtacttattttcctagctgagttagaaacaagtatatttctctgactattttagttgttcactgtaaaaattattaacmacttcaaaactatccattttatagtcttaaattcacctgcatcctttcttggatcttgcataaagttgtgaccctaaacaggagctagatctctccacaatcccatttccacctacacaattcacgtcctccctgaacaatacagacttttgtggtacaaacaccccatctcccatttctgtgaactctgctagtacttataatcattaacagtgatcctttatttaacagccaatgttgaacaatatataaataatatttttgaataagagcacttactgttatctatgatagctgttagaaaatatttttcatctgagcatatttggtttttgttccatgtgacaaatgaaataatcatttttttttaattttcccattttatttttttatcatttaaatctgtatactagagacttttggagcaataacagtgac

SEQ ID NO: 560129 - DNA, 609 bp, Homo sapiens
agtaattgctcaccaaacccctctatatccaatgtctcttacacccacttctatgaggaaagggagggtaagccagcatgatatacctcaaagtacttattttcctagctgagttagaaacaagtatatttctctgactattttagttgttcactgtaaaaattattaacaacttcaaaactatccattttatagtcttaaattcacctgcatcctttcttggatcttgcataaagttgtgaccctaaacaggagctagatctctccacaatcccatttccacctacacaattcacgtcctccctgaacaatacagacttttgtggtacaaacaccccatctyccatttctgtgaactctgctagtacttataatcattaacagtgatcctttatttaacagccaatgttgaacaatatataaataatatttttgaataagagcacttactgttatctatgatagctgttagaaaatatttttcatctgagcatatttggtttttgttccatgtgacaaatgaaataatcatttttttttaattttcccattttatttttttatcatttaaatctgtatactagagacttttggagcaataacagtgac

SEQ ID NO: 560130 - DNA, 609 bp, Homo sapiens
agtaattgctcaccaaacccctctatatccaatgtctcttacacccacttctatgaggaaagggagggtaagccagcatgatatacctcaaagtacttattttcctagctgagttagaaacaagtatatttctctgactattttagttgttcactgtaaaaattattaacaacttcaaaactatccattttatagtcttaaattcacctgcatcctttcttggatcttgcataaagttgtgaccctaaacaggagctagatctctccacaatcccatttccacctacacaattcacgtcctccctgaacaatacagacttttgtggtacaaacaccccatctcccatttctgtgaactctgctagtacttataatcattaacagtgatcctttatttaacagccartgttgaacaatatataaataatatttttgaataagagcacttactgttatctatgatagctgttagaaaatatttttcatctgagcatatttggtttttgttccatgtgacaaatgaaataatcatttttttttaattttcccattttatttttttatcatttaaatctgtatactagagacttttggagcaataacagtgac

SEQ ID NO: 560131 - DNA, 568 bp, Homo sapiens
ttgttaacttctttggttcatctaagagatgtagaaattaaatagtaatttcttggaaaatgaggtcttggatgctaaatgagcatgctctcttgtagcagcaacctccagcagagatgcggggatgcacgtggctagtcttcaggtctattcaactctaaaacctgtccacgagggaggggagaggaagcaatggattgatacattgaggtacctcttactatagaataaataaataggatttaggggagccaaaaaagaaatttataaaaatggaataaaaatcaagtaagatgaaaattttaataagaaactcactgaaggagtcttttttttagacagggtctcactctgttacttakgctggagtgcagcggtgtgatcttggctcactgcaacctcctcctcccaggctcaagcaatcctcctccctcagcatcctgagtagctgggaccactggcatgtgccaccatacctggatgttttttttttttgtagagacgaagttttagccatgttgcccaggcttgaaggagcatgttgtagactggaaatagttaaaatggt

SEQ ID NO: 560132 - DNA, 487 bp, Homo sapiens
tctgaaaaatgcacttctttatttcttgaaacaccctgaaagaaggtgcatttccctttkgtattcaaaatgtatgattgcttatttttataattcctatgcctgtcttttctttttgttcagctgtcagtgcccttgaaaattctgatatgaaaggcatttttaatgacaagttaaaaatttactaaaggctccactatcatgcttgggctagaacaagacaaacttaatgcttaaagaatttctgtctcccagaatgcatcagcttccccgaaatggaacaaagcaccaagccccttgattcacctggaaatgtgtgtgattctggggacactgaatccttttatacaatctgaaggagtgaagtcaaccctgggtcaatttctgggggattagcaatgcaatttcactgcaatcaaatttcattaagaactgacaggtcaaccaggcaccatgggcttatgagtttattaggctgcagccaggg

SEQ ID NO: 560133 - DNA, 487 bp, Homo sapiens
tctgaaaaatgcacttctttatttcttgaaacaccctgaaagaaggtgcatttcccttttgtattcaaaatgtwtgattgcttatttttataattcctatgcctgtcttttctttttgttcagctgtcagtgcccttgaaaattctgatatgaaaggcatttttaatgacaagttaaaaatttactaaaggctccactatcatgcttgggctagaacaagacaaacttaatgcttaaagaatttctgtctcccagaatgcatcagcttccccgaaatggaacaaagcaccaagccccttgattcacctggaaatgtgtgtgattctggggacactgaatccttttatacaatctgaaggagtgaagtcaaccctgggtcaatttctgggggattagcaatgcaatttcactgcaatcaaatttcattaagaactgacaggtcaaccaggcaccatgggcttatgagtttattaggctgcagccaggg

SEQ ID NO: 560134 - DNA, 585 bp, Homo sapiens
tcttagtatattctaatacttataattctccctcaactcctgtgagactagaatcagccatcttttatctctagcttatatggcttgagaccttaaacactgtttattaatatattgaagtctgttatatatgttattgtcttttctttttttaatccaattgattctataacatgaaatgtcccaaaaagcaggaggaaaaaataatgtcattaaagcatttttaaaaaatgaaaygtgttccttttttctactcatatctcacatggttgattcttcattgttgtttagaacaggcattcccaaatagtcaaactgcaagcctaaactagacaatcatgagaagtcatgggcagacaattcctgccttcaggtttctgctgccagtatcatcaccactcagtctttgtgtttatgactccttatctctgagtgagaaagggtaggatccttttttcttcttttttgtccattatctaagtctatataaaattaacaaatctacccaataactctttgttgactgaatattattatctattagcttcaaataatcctaacaattcaaataatttctttcctccc

SEQ ID NO: 560135 - DNA, 587 bp, Homo sapiens
gttattacccaccttctgaagcctacttctgtcaattcgtcaaactcatcctccacccagtttcgttacyttgctggcgaggagttgtgattctttggaggagaaaagcattccggtttttggaagtttcagccttttatgctggtttttcctcatcttcgtggatttatctacctttggtttttggtgttggtaaccttcggatggggtttctgtgtggatgtcttttttgttgatgttgctgctattcctttctgtttgttagttttccttctaacagtcaagcccctctgctgcaggtctgctggagttagctggaggtccacatgaggccctgtttgcctgggtatcaccagtggaggctcagttggaaatgcagaaatcacctgccttctgtgttgatctcactgggagctggagaccagaactgttcctactcagtcatcttgccagccacctatatgtaccacattttctttttccaacctaccattgatgggcatttgggttgatttcatgtctttgctattgtgaacagtgctgcaatcaacatacacacgcatgtatctttataatagaatgagtta

SEQ ID NO: 560136 - DNA, 587 bp, Homo sapiens
gttattacccaccttctgaagcctacttctgtcaattcgtcaaactcatcctccacccagtttcgttaccttgctggcgaggagttgtgattctttggaggagaaaagcattccggtttttggaagtttcagccttttatgctggtttttcctcatcttcgtggatttatctacctttggtttttggtgttggtaaccttcggatggggtttctgtgtggatgtctttttkgttgatgttgctgctattcctttctgtttgttagttttccttctaacagtcaagcccctctgctgcaggtctgctggagttagctggaggtccacatgaggccctgtttgcctgggtatcaccagtggaggctcagttggaaatgcagaaatcacctgccttctgtgttgatctcactgggagctggagaccagaactgttcctactcagtcatcttgccagccacctatatgtaccacattttctttttccaacctaccattgatgggcatttgggttgatttcatgtctttgctattgtgaacagtgctgcaatcaacatacacacgcatgtatctttataatagaatgagtta

SEQ ID NO: 560137 - DNA, 587 bp, Homo sapiens
gttattacccaccttctgaagcctacttctgtcaattcgtcaaactcatcctccacccagtttcgttaccttgctggcgaggagttgtgattctttggaggagaaaagcattccggtttttggaagtttcagccttttatgctggtttttcctcatcttcgtggatttatctacctttggtttttggtgttggtaaccttcggatggggtttctgtgtggatgtcttttttgttgatgttgctgctattcctttctgtttgttagttttccttctaacagtcaagcccctctgctgcaggtctgctggagttagctggaggtccacatgaggccctgtttgcctgggtatcaccagtggaggctcagttggaaatgcagaaatcacctgccttctgtgttgatctcactgggagctggagaccagaactgttcctactcagtcatcttgccagccacytatatgtaccacattttctttttccaacctaccattgatgggcatttgggttgatttcatgtctttgctattgtgaacagtgctgcaatcaacatacacacgcatgtatctttataatagaatgagtta

SEQ ID NO: 560138 - DNA, 523 bp, Homo sapiens
tgcactccagcctgggcaaaatagcaagactccatctcagaaaaaaaagaaaaaaaggaaatctgcaatctgcacccacccgccctgtaaggaggactctatctaccctgggatggaatgcggcctgccgctcatcattccagaccgccgagtgtcagtgcacattgactcctcatcttgtgactgaactatttttaactgactgtcgccatggcagcgtgagaaccactgggaaagatgtggcctttctgacagcattcaagatgctggctgcccacttatctcacttatctgcaccagggccaaaataatctgtatgaaatccccaccttctattgacagagayggagttaggacttctctatgtgctttctcatctgcaaagtaggaaagtagggcttttaattaaaacacacacacacacacacacacacacacacacacacacacacacacagaaaacacaaaaacaactccctttgtgagtctgctgtgggggtccaaactaagttattaaggaaca

SEQ ID NO: 560139 - DNA, 523 bp, Homo sapiens
tgcactccagcctgggcaaaatagcaagactccatctcagaaaaaaaagaaaaaaaggaaatctgcaatctgcacccacccgccctgtaaggaggactctatctaccctgggatggaatgcggcctgccgctcatcattccagaccgccgagtgtcagtgcacattgactcctcatcttgtgactgaactatttttaactgactgtcgccatggcagcgtgagaaccactgggaaagatgtggcctttctgacagcattcaagatgctggctgcccacttatctcacttatctgcaccagggccaaaataatctgtatgaaatccccaccttctattgacagagacggagttaggacttctctatgtgctttctcatctgcaaagtaggaaagtagggcttttaattaaaacacasacacacacacacacacacacacacacacacacacacacacagaaaacacaaaaacaactccctttgtgagtctgctgtgggggtccaaactaagttattaaggaaca

SEQ ID NO: 560140 - DNA, 641 bp, Homo sapiens
gctaaatgtttccatcttataacatagactcaaagagataaaaggaggctagtagttattgtcagaaaatatttcttgtactcctggggacctcatccaaataaatagactaagtacacatcatggggagagagtcgtctrtgaattgactcagatgattgagctcagaagccttactgtcaagtgtttgtagattgagccttggagacttgtggtcagggagacataggcttttctgtggaaatctacagtctgtagtcaccaatcaccttgagaaagactgaggttttatgccagcctggagctgataattctttaaaacaatgtaagatttttcactggaaatatagacctcaaattgatcctcaacagtaagaagattactgaacagtatcatgatgattagaaaggaaaacactattagatcaaaactgtaatcttttactttaggatagtgacagatggtgtgtgttatcagatttttactcctgatatgaatcttatatctgttttgagaacatctggcttcatgcataaagttgtcacatcacatattaatcttgcagaacacccttaaaggatcatgaacatcaccagtaaattctaggggtgtcttccagtccaagatggcaatgttagaa

SEQ ID NO: 560141 - DNA, 395 bp, Homo sapiens
agtatacaacataatgttttaaaatatgcatacattgtagaaaggctacattgaggtaattaacatatatattactgcatatatcattttttttgtggcaagaacacttaaaaggtactctcagtgattttcaagtatakactacattattaaccatatatgccatgttgtacaatagatctcttgaatttattcctcttatctaactgaaattttgtaatcattggccatttccccaagccccccaccccctatcccctggtaaccaccattatactctctgcttctacctctctagacacccgcccccccgagtcagatacaagggcacccagttggcagagcctggatcccatgcccacataccttgggacccgggagcagagggagaggga

SEQ ID NO: 560142 - DNA, 395 bp, Homo sapiens
agtatacaacataatgttttaaaatatgcatacattgtagaaaggctacattgaggtaattaacatatatattactgcatatatcattttttttgtggcaagaacacttaaaaggtactctcagtgattttcaagtatatactacattattaaccatakatgccatgttgtacaatagatctcttgaatttattcctcttatctaactgaaattttgtaatcattggccatttccccaagccccccaccccctatcccctggtaaccaccattatactctctgcttctacctctctagacacccgcccccccgagtcagatacaagggcacccagttggcagagcctggatcccatgcccacataccttgggacccgggagcagagggagaggga

SEQ ID NO: 560143 - DNA, 587 bp, Homo sapiens
tgttgtggtgggagggattcaaaacatagaaaaacatcaaagatttttttytaatgtctctctttttttaaagttaaaaatttaaggcaactttgagaatggtaaagaaaccaaatctttgtcagtgtttgtacttgctttgtaaggataatttttttttttttaaatcttgtcaacacacctctgctggcaggagtgtaggaaaatatttctgtttagtctgtgggcccgtggctaattggttaaaattcctatgccactgtagtctaggttataggtttggctgggtgaggtatagcttctatcagggaaaagagtgtctccaaaacaaagttcacacataggacagtcccccaaggaggatgtgataaagtgtagaggtaaacgaagtacttaagtacgtatttaactatttaaacgaaagacctccccaggctaagaggtagccctatttcctagactgacttgatcttgagcttccagagtctctaaggacacagactgcgccctctgctggagggaaggcaccaccggcccatactagggtggcccaagggcgcggtggctcaacctgtaatctcagcact

SEQ ID NO: 560144 - DNA, 587 bp, Homo sapiens
tgttgtggtgggagggattcaaaacatagaaaaacatcaaagatttttttctaatgtctctctttttttaaagttaaaaatttaaggcaactttgagaatggtaaagaaaccaaatctttgtcagtgtttgtacttgctttgtaaggataatttttttttttttaaatcttgtcaacacacctctgctggcaggartgtaggaaaatatttctgtttagtctgtgggcccgtggctaattggttaaaattcctatgccactgtagtctaggttataggtttggctgggtgaggtatagcttctatcagggaaaagagtgtctccaaaacaaagttcacacataggacagtcccccaaggaggatgtgataaagtgtagaggtaaacgaagtacttaagtacgtatttaactatttaaacgaaagacctccccaggctaagaggtagccctatttcctagactgacttgatcttgagcttccagagtctctaaggacacagactgcgccctctgctggagggaaggcaccaccggcccatactagggtggcccaagggcgcggtggctcaacctgtaatctcagcact

SEQ ID NO: 560145 - DNA, 624 bp, Homo sapiens
gtcaaaaaaagaaaagaaaaaaaaaattatgaagaggctgggcatggtggcttatgcctgtaatcccagcactttgggaggccggggtgggtggatcacctgaggtcaggagttcgagactagcctggccaacatggtgaaatccagtctctactaaaaatacaaaaattagccaagcatggtggtgcatgcctgtaataccagctacttggaaggctgaggcaggagaatcgctttaaccctagacgcagaggttgcagtgagccaacatcatgctactgcactccagcctgggcgacagagtgagactctgtctcaaaaaaaaaaaaaaaattatgaaggatttcaagacartgtcagaagaccatcaaactaaggatgggacccatgtgactgcacaggtcatatgctcatgaagctggccaggatggcaagtccaggacaccaagccaggctctttcctgggcaccgtgcacctcttcccttgctcaaggtccatctgctggccagttcctgggatttctctgacccgcccactccacacaggctggacgtccagggcgtcttcagagaggtccactagatattaggggacgctgcccagtactttcccatcaaagacca

SEQ ID NO: 560146 - DNA, 487 bp, Homo sapiens
aaagaagagaagaaaaaatttactcttccattgtgagatawgaggcagtggtgagtttttaagtttctgtactgtctagatttgtgtcacatcacctataaaagttattcttacatggattactgaattttcaacagcagaggccacaaaatctaagtactgaaagtaactatcaacttagatttgtataacaggaaaactatcttttaggagtgatggtagcattcccactaaaactattccaaaaaaattgaagaggagggactgactcctctccaactaattctatggggccagcaccatcctgataacaaaacctgacaagaaaaaagagaaaacttccagccaatatccttgaggaacattgatgcaaaaatcctcaacaaaatactggcaaactgaatccaaagcatatcaaacagcttatccaccatgatcaagtagcttttatcattgggatgcaaggttggttcaacatatgcaaatc

SEQ ID NO: 560147 - DNA, 487 bp, Homo sapiens
aaagaagagaagaaaaaatttactcttccattgtgagataagaggcagtggtgagtttttaagtttctgtactgtctagatttgtgtcacatcacytataaaagttattcttacatggattactgaattttcaacagcagaggccacaaaatctaagtactgaaagtaactatcaacttagatttgtataacaggaaaactatcttttaggagtgatggtagcattcccactaaaactattccaaaaaaattgaagaggagggactgactcctctccaactaattctatggggccagcaccatcctgataacaaaacctgacaagaaaaaagagaaaacttccagccaatatccttgaggaacattgatgcaaaaatcctcaacaaaatactggcaaactgaatccaaagcatatcaaacagcttatccaccatgatcaagtagcttttatcattgggatgcaaggttggttcaacatatgcaaatc

SEQ ID NO: 560148 - DNA, 630 bp, Homo sapiens
attaatctagaaaggaaggaaaagtaaaaggcagtaaaatgaagcaaaagaaagaggaattgaggaagaggagagccaggaaggggaaaagataataggggagaaaaggaaaggaagacaaatagaaacgggagataaaggagtagggaaaaggaagagaaaactgaataatagtaagagtcagcagcacataaaacaacaatttattattattgacaattactatgtgcaaagaaccatagttgatgctttatgtggatttctcctccaccccactgcaaccagtgagtactgctactctccacgtcttctataaggaagttagttaagtcacttgctaagccatttaagtagctgagctcgagtttgaacccatttgtctattttaccctacatcgtcatcaagtctagctccactgctcagtgaccatacctgatattgctttgtcatctgacatttcactcctgcatagcatgtccagaaatttagcaccaacatcttcccttatcttttatctgatttctgtctgttgaaggagaaagattcctgtgtaggtaacatcacagttaatrttagaaaatctgttctttccctacatatgattttgctctggtattttttaataaaaa

SEQ ID NO: 560149 - DNA, 522 bp, Homo sapiens
atgattggtaagatgtttacatttagagagaaaaagagcaaacaagcaaagagaacacacaaatacacatgtttgcttatacaaacatttggatattataatgtggtgtgttcagaaaataaaaaccattctgaagagtatgaaaaccaagactctagtcttgtgctgttgctgtcttacttataaccataactatagccctaacttgtaacccatatttctcagcaatggattggtatgagaatcaaatatatggaaaatatttcataaactatatgaatgtattatgatattttgttgtacctagaatactttatcttacacagaaagtttgacaatttttttctgcttttagtcaattaattataagtatttatgattattattattattattattattttgagatagtgtctcactsttgtcactcaggctggagggtacagtggcttgatctcggctcactgcaacctccacatcctgggttccagcgattctcctgcctcagcctcccaagtagct

SEQ ID NO: 560150 - DNA, 522 bp, Homo sapiens
atgattggtaagatgtttacatttagagagaaaaagagcaaacaagcaaagagaacacacaaatacacatgtttgcttatacaaacatttggatattataatgtggtgtgttcagaaaataaaaaccattctgaagagtatgaaaaccaagactctagtcttgtgctgttgctgtcttacttataaccataactatagccctaacttgtaacccatatttctcagcaatggattggtatgagaatcaaatatatggaaaatatttcataaactatatgaatgtattatgatattttgttgtacctagaatactttatcttacacagaaagtttgacaatttttttctgcttttagtcaattaattataagtatttatgattattattattattattattattttgagatagtgtctcactgttgtcactcaggctggagggtacagtggcktgatctcggctcactgcaacctccacatcctgggttccagcgattctcctgcctcagcctcccaagtagct

SEQ ID NO: 560151 - DNA, 583 bp, Homo sapiens
gttgtttctctttagtcatttgtgctattataacaaaataagacagatggagtaatttataaagaagataaatttatttctcacagttctgctggctgggaaaagtgtaagaccaagcaaccaacaccgctatctggtgaaggccactttcaacttccaagatggtgccttgttgctgcatcctcacatgatggatgggggaaacccacgaggggatgaatactatgatgtcacatggcagagggcaaaccaacttccacaagtcctttctgccctaatccattaagacttaatcacctcttaataccatcacaatgagtattaagtttcaatatgagcattgtgataagatcttatgtgctgtggtgatttatattgcagcttttctttgctctatcaagaattttctctgatgtcgattgaacaagaggaaaaatgtaatacatgaatttacctttgagcaccctccacccccacattgttttgaggttttggcttaacagactcatagaaagtactttggaactgctgaatatattaattatatttaaatgaagwaatgtgagctggtcccttggttcag

SEQ ID NO: 560152 - DNA, 552 bp, Homo sapiens
tttcttctcttagtaacattctcaactttctttcatgaaaaaaaaaaaaacgatctacgatgttctgtgggatctggtactgtttaccattatattcttcaatgtcactattctgtttctttagcaagattagctctacagctctactttctctgcctaacctttacatgtcagtgttgctcaaggtttgtttgtttgtttgttttttgactgttctcctgatacatgtttcccctgcaatattctcttcactgctgttgcttcaaccagtayctataggctgatgaattccaaagtttggtttttttgtttgtttgttttgagatggagtttcactcttgttgcccaggctggagtacaatggcatcatctcggctcactgcaacctctgcctcctgggttcaagcaattcttctgcctcagcctcccgagaagctgggattacaggtgcacaccaccacacctggctaatttttgtatttttggtagtcatggggtttcaccatgttggccaggctggtctcgaactcctgacctcaggtaacccaccca

SEQ ID NO: 560153 - DNA, 503 bp, Homo sapiens
  misc_feature 1, 2, 3, 4, 5: n = A,T,C or G
nnnnnttggcccctcaaagtgctgggattacaggcatgagccactgtgcctggcccaaaagttggcttaattaattgcagatattcaagctctaacagcctggaagtccttggaaaaaacagaggaggtgccacaataggcattttgggaaaaacttctgttttcttcctgaaaccccaggaattggaagtggatagatccctctctaagtccaaggctctgttccattttgcattgcattatctgatggtttttactttccaggatatyagaaattacttcacattatgagagaatttagatatgtaataagtggttaggaaatatacatttagggatggcgaatggcagctatggggggatactcggctttttgcacatttgaatcagtgaagtgtgctcttggccacctagaagatatggaaatgttccctccccgcactgagaggtaagatgccaatgggagatgggctgattccctcttcttgggatccaggttctag

SEQ ID NO: 560154 - DNA, 534 bp, Homo sapiens
ttacaaatatatattttttattakttcatgtctgtattataaaaggaaaataaaatcttaggacttcagactcactacaacctccacctcttgggttcaagcgattctcctgcctcagcttccagagtagctggaattacaggcatgtgccaccatgcccagctaattttttatttttagtagagacagggtttctccatgttggccaggctggtcttcagttctccacctcagatgatctgcccgcctcagcctcccaaagtgctgggataccaggcgtgagccaccacgcttggcccaatgttttatgaacaaacatttaaactgtaattctgctttgtaccagaattcatcagaaacaatccttttagctctgtgattttattttcttttcaaaattagctgaacattatagcaaaactaaaagttacaattttctcccgccttccctgaagaaaagcccagagagattttgttttgtttttttggggggagtttttgagacagagtttcactcttgctgcccaggctgga

SEQ ID NO: 560155 - DNA, 534 bp, Homo sapiens
ttacaaatatatattttttattatttcatgtctgtattataaaaggaaaataaaatcttaggacytcagactcactacaacctccacctcttgggttcaagcgattctcctgcctcagcttccagagtagctggaattacaggcatgtgccaccatgcccagctaattttttatttttagtagagacagggtttctccatgttggccaggctggtcttcagttctccacctcagatgatctgcccgcctcagcctcccaaagtgctgggataccaggcgtgagccaccacgcttggcccaatgttttatgaacaaacatttaaactgtaattctgctttgtaccagaattcatcagaaacaatccttttagctctgtgattttattttcttttcaaaattagctgaacattatagcaaaactaaaagttacaattttctcccgccttccctgaagaaaagcccagagagattttgttttgtttttttggggggagtttttgagacagagtttcactcttgctgcccaggctgga

SEQ ID NO: 560156 - DNA, 534 bp, Homo sapiens
ttacaaatatatattttttattatttcatgtctgtattataaaaggaaaataaaatcttaggacttcagactcactacaacctccacctcttgggttcaagcgattctcctgcctcagcttccagagtagctggaattacaggcatgtgccaccatgcccagctaattttttatttttagtagagacagggtttctccatgttggccaggctggtcttcagttctccacctcagatgatctgcccgcctcagcctcccaaagtgctgggataccaggcgtgagccaccacgcttggcccaatgttttatgaacaaacatttaaactgtaattctgctttgtaccagaattcatcagaaacaatcyttttagctctgtgattttattttcttttcaaaattagctgaacattatagcaaaactaaaagttacaattttctcccgccttccctgaagaaaagcccagagagattttgttttgtttttttggggggagtttttgagacagagtttcactcttgctgcccaggctgga

SEQ ID NO: 560157 - DNA, 534 bp, Homo sapiens
ttacaaatatatattttttattatttcatgtctgtattataaaaggaaaataaaatcttaggacttcagactcactacaacctccacctcttgggttcaagcgattctcctgcctcagcttccagagtagctggaattacaggcatgtgccaccatgcccagctaattttttatttttagtagagacagggtttctccatgttggccaggctggtcttcagttctccacctcagatgatctgcccgcctcagcctcccaaagtgctgggataccaggcgtgagccaccacgcttggcccaatgttttatgaacaaacatttaaactgtaattctgctttgtaccagaattcatcagaaacaatcctttyagctctgtgattttattttcttttcaaaattagctgaacattatagcaaaactaaaagttacaattttctcccgccttccctgaagaaaagcccagagagattttgttttgtttttttggggggagtttttgagacagagtttcactcttgctgcccaggctgga

SEQ ID NO: 560158 - DNA, 570 bp, Homo sapiens
cttttgcaggaagtggcattcactcaaaggaaagcagttattcatgagagagtctgcaaaagtgatgaaactggggagaagagtggtctgaattccagtctattttcatccccagttatacccataagaaaccattttcataaacatgtatcacatgctaaaaaatggcatcttaatgctgctgtaaacagtcatcagaagattaatgagaatgagacactatatgaaaataatgaatgtggaaaaccccctcagagcattcaccttattcagtttacaagaactcaaacaaaagataaatsctatggatttagtgaccgtattcaatctttttgccatggtacacccctacatatacatgaaaaaattcatggaggaggaaaaacctttgattttaaagaatgtgggcaggttttgaaccccaaaatatcccataatgaacaacagagaattccttttgaagagagtcaatataaatgtagtgaaacctctcatagttcctcccttactcaaaacatgagaaataattctgaagagaaaccttttgaatgtaatcagtgtgggaaatcc

SEQ ID NO: 560159 - DNA, 539 bp, Homo sapiens
cttacatggccagtggggttgaaagactgtgcccctgcaatggtcttttcctaagacagttgaacaaagttccaagtctgtctgtcctattttaaccatctttaagaagcacaaaggggatatgagaaaaacagatgctgaaatgaaaattttaactgatatcttacttatctcacaagtcgtgtaaagaaagaaatgatatggtcgaatattagattagatggtttaatgatgttttgagtgttatatatgagctatgatgagacctagaaaataaagtaaaaataaaaaatatataagccatgaacattcttcatattcagtgacagtctgcctgccacacccaggaattacagagacactcatagacctcacgggatcctcccctatgtctcccatctcttcaccaccagccctcagggagtctcatgtctcccaattactctccaatcattcctagatttctgtaacagtcaggccctgacacccatgtaacaascagaaactcagggacctcacagggctctggccccatgtct

SEQ ID NO: 560160 - DNA, 579 bp, Homo sapiens
tgctgacctcatcgatggcagcgtccctgtcttttgctcccccagccctcccaaaggctgagtaagcctctatcatctggaatacagtgtggcttctgttttcctaattgaaccctgacttactacctttataatgtttctctctgcttatgtagtttttgatgagtcrgaaggtccttgccacgctcacaatgtgtgtactgtgtctcatctatatgcactctctgatgggcaaggaggtatgaattacgactgaagcccttaccacatgccttacacttatagggcctctctcctgtgtggactctgagatgaacacgaagatctgaattccgactgaagtctttaccacactcatcacatttatatggtttctctctggtgtgatctctttgatgtaagtgaaaatatgaactgtaactaaagcactttccacacactttgcatttatatggtttttctcgagtgtgaactcagatgagtgtgaagaacagagctatacacaaaatcctttccacacacattgcatttgtatggtttctcccctgtgtggactctctggtgaatgtgaaggtgtgt

SEQ ID NO: 560161 - DNA, 579 bp, Homo sapiens
tgctgacctcatcgatggcagcgtccctgtcttttgctcccccagccctcccaaaggctgagtaagcctctatcatctggaatacagtgtggcttctgttttcctaattgaaccctgacttactacctttataatgtttctctctgcttatgtagtttttgatgagtcagaaggtccttgccacgctcacartgtgtgtactgtgtctcatctatatgcactctctgatgggcaaggaggtatgaattacgactgaagcccttaccacatgccttacacttatagggcctctctcctgtgtggactctgagatgaacacgaagatctgaattccgactgaagtctttaccacactcatcacatttatatggtttctctctggtgtgatctctttgatgtaagtgaaaatatgaactgtaactaaagcactttccacacactttgcatttatatggtttttctcgagtgtgaactcagatgagtgtgaagaacagagctatacacaaaatcctttccacacacattgcatttgtatggtttctcccctgtgtggactctctggtgaatgtgaaggtgtgt

SEQ ID NO: 560162 - DNA, 579 bp, Homo sapiens
tgctgacctcatcgatggcagcgtccctgtcttttgctcccccagccctcccaaaggctgagtaagcctctatcatctggaatacagtgtggcttctgttttcctaattgaaccctgacttactacctttataatgtttctctctgcttatgtagtttttgatgagtcagaaggtccttgccacgctcacaatgtgtgtactgtgtctcatctatatgcactctctgatgggcaaggaggtatgaattacgactgaagcccttaccacatgccttacacttatagggcctctctcctgtgtggactctgagatgaacacgaagatctgaattcygactgaagtctttaccacactcatcacatttatatggtttctctctggtgtgatctctttgatgtaagtgaaaatatgaactgtaactaaagcactttccacacactttgcatttatatggtttttctcgagtgtgaactcagatgagtgtgaagaacagagctatacacaaaatcctttccacacacattgcatttgtatggtttctcccctgtgtggactctctggtgaatgtgaaggtgtgt

SEQ ID NO: 560163 - DNA, 579 bp, Homo sapiens
tgctgacctcatcgatggcagcgtccctgtcttttgctcccccagccctcccaaaggctgagtaagcctctatcatctggaatacagtgtggcttctgttttcctaattgaaccctgacttactacctttataatgtttctctctgcttatgtagtttttgatgagtcagaaggtccttgccacgctcacaatgtgtgtactgtgtctcatctatatgcactctctgatgggcaaggaggtatgaattacgactgaagcccttaccacatgccttacacttatagggcctctctcctgtgtggactctgagatgaacacgaagatctgaattccgactgaagtctttaccacactcatcacatttatatggtttctctctggtgtgatctctttgatgtaagtgaaaatatgaactgtaactaaagcactttccacacactttgcatttatatggtttttctcgagtgtgaactcagatgagtgtgaagaacagagctatacrcaaaatcctttccacacacattgcatttgtatggtttctcccctgtgtggactctctggtgaatgtgaaggtgtgt

SEQ ID NO: 560164 - DNA, 497 bp, Homo sapiens
cccttcacccagtttcacccagtgattatactgtccttaattaaaatacaacattgaaaccagggaattatattgacaccatgaatatgtgtagttgtatgttatcacttgtagattgatatagctactaccacaatcaagataaataagtattccatcactgcaaagccctccttcttgctacatcttgatagtcacacccagtcccctcccttccaccattcctgatatctggaagcaactaatctgctttccatttctataatttggtaatttcaagaatgttatacaactagaaccataaaatagattcacgyttttcacttagcataattatcttaagacccatctaagttgtgtatcaatagtccattcctttttattgctgagtagtattccacggtatggatgtaccacagtttgtttaacatttacctattaaggaacattttagttgtttccactttttttccattatgaataaagctactatgaac

SEQ ID NO: 560165 - DNA, 556 bp, Homo sapiens
aagttttttggcaaatataaaatactggttttctactctttaaaatatgcatgactgtttaaataaaaattataactttcttggctagaggtttttgtgtatatagagtagtatatacaaatgaaacaaagtggggagataaaggraactatttgttggtaaggcatctgcattttacaaaaaatagtaaaacagtaatgctaaatacactgtgaaagattagatatgtatattacaaccctagagcaaccactggaaaaaaaaaaaaaggacatatagccaaaagctaatagatacaatgaatggaatagtaaaaaaaaaaaaaaaaaaaaaatcaacccaaaagaaggcagaaaaaggggtaatagagggacaaaatcagggaggacaaacaggaaaaaagataataaaatggtagacagaaacccagctatatcaataattataggaaatgctaatggcctgaatacatcaattaaaatatattgtaagattggataaaaagcaagaaccaagtatatgtggtctaaaataactccatttaaatacaaggaca

SEQ ID NO: 560166 - DNA, 556 bp, Homo sapiens
aagttttttggcaaatataaaatactggttttctactctttaaaatatgcatgactgtttaaataaaaattataactttcttggctagaggtttttgtgtatatagagtagtatatacaaatgaaacaaagtggggagataaaggaaactatttgttggtaaggcatctgcattttacaaaaartagtaaaacagtaatgctaaatacactgtgaaagattagatatgtatattacaaccctagagcaaccactggaaaaaaaaaaaaaggacatatagccaaaagctaatagatacaatgaatggaatagtaaaaaaaaaaaaaaaaaaaaaatcaacccaaaagaaggcagaaaaaggggtaatagagggacaaaatcagggaggacaaacaggaaaaaagataataaaatggtagacagaaacccagctatatcaataattataggaaatgctaatggcctgaatacatcaattaaaatatattgtaagattggataaaaagcaagaaccaagtatatgtggtctaaaataactccatttaaatacaaggaca

SEQ ID NO: 560167 - DNA, 556 bp, Homo sapiens
aagttttttggcaaatataaaatactggttttctactctttaaaatatgcatgactgtttaaataaaaattataactttcttggctagaggtttttgtgtatatagagtagtatatacaaatgaaacaaagtggggagataaaggaaactatttgttggtaaggcatctgcattttacaaaaaatagtaaaacagtaatgctaaatacactgtgaaagattagatatgtatattacaaccctagagcaaccactggaaaaaaaaaaaaaggacatatagccaaaagctaatagatacaatgaatggaatagtwaaaaaaaaaaaaaaaaaaaaatcaacccaaaagaaggcagaaaaaggggtaatagagggacaaaatcagggaggacaaacaggaaaaaagataataaaatggtagacagaaacccagctatatcaataattataggaaatgctaatggcctgaatacatcaattaaaatatattgtaagattggataaaaagcaagaaccaagtatatgtggtctaaaataactccatttaaatacaaggaca

SEQ ID NO: 560168 - DNA, 463 bp, Homo sapiens
agtatttgtctttttgtacctggcttattttacttggcatagtgtcctccaggctcatctgtcttgtcacaaatgataggatttccttctttttaagagatgaatatgtccccattgtgtatataagccacatttwatttatccattgatggacacttaacttgatttcccatcttggctgctgtgaatagtgcggccatgaacatgagagtgcaggtatctcttcaacagagtgatttcaattcctttggatgtatacccagtagtggaattgctgaatcatgttctatttttaggttttggggaatcttccatactgttttccatagtggctgtaccagtttacattcccaccaacagtggacaagggtgcccctttctccgcatccttggctacacttgttatatttgatatttttgataatagccatcctaacaggtgtgaggtgacagctcattgtgg

SEQ ID NO: 560169 - DNA, 607 bp, Homo sapiens
aggtgcagtgagccaagatcatgctattgcacaccagcctggccaacagaggaagactctatcaccaaaaaaaaacaaaacaaaacaaaaaaatctgaatattttatggactttagttaataataaggtatcaacatatcaacactggtccaatactgtaacaaatgtaccctactgatgtaagatgttagaaacatgggaaacagtgcaagatatatgggaactctctgtattaacttcatgatttctctgtaaatctataaccattcctaaaaataaatttcatttggccgggtgcagtggctcatgcctgtaatcctagcactttagcaggttgaggtaggtggatcagttgagtccaggagttcaagaccagcctggccaacttggtgaaaccccatctctactaaaaatacaaaaaattagccaggcgtggtggtgcacacttgtagtcccagctactcaggaggccgaggcacgagaatcacttgaacctgggaggtggaggttgaagtgagctgagatcgcaccactgcactccagcctrggcaacagagactctggctcagaaaataaagttcatttaatttacatttttgagaaattc

SEQ ID NO: 560170 - DNA, 591 bp, Homo sapiens
gggagtgacccaattttccaggtgccgtctgtcacccctttctttgactaggaaagggaattccctgaccccctgtgcttcccaggtgaggcgatgccttgccctgcttcggytctcactcagtgtgctgcagcccctgtccgacattctccagtgagatgaacccagtacctcagttggaaatgcagaaatccccagtcttctgcatcacttacgctggcagctgtagactggagctgttcctattcagccatcttggctcctccccccacaaaaaacgttttttaactgataaatattacctttggaaaatgtgcgaaattagtgcccccaatgggtgtccttcactaccacgatctgttttcacattgacaccccttagttacagagaaggggtcctgatccagacaccaagaggggttcttgtatctcacccaagaaagaattcagggtgagtccatagggtaaagtgaaagcttattaagaaagtaaagaaatgaagaatgtctactctgtaggcagagcagcccctggaggctgctggtttcccattttttatggttctttctggattatatgctaaacagtgaa

SEQ ID NO: 560171 - DNA, 327 bp, Homo sapiens
tgagccgagattgtgccactgcataccagcctgggcgacagagtgagactccgtctcaaaaaaaaaaaaaaaaawaaataaataaataaattgaatgatttgaaatattttttaaaatatagtatttgcttttttgcactttatttcctatcaggcagaagtcttacatacccagtgacagtctgtgtaatctccatcaaatgcatttcttatgcttattatttcatactcttacctaagtcattcctcacatggcagtgtttagggctcatgttacttgcaaagactctactcaacgcctcaggcaccagtgatgtgccctctcac

SEQ ID NO: 560172 - DNA, 557 bp, Homo sapiens
cttttgtttgcctattatgggaattgtaagtagctacatttaaatatcattagggcctgatttagattgattagaataaggaaattcagaattaaggttaaaataccacatgacatttcagccttaattcacttcttagggctgttatttcttttctttttttagtaaaatagttaagatgtcacatggaatttctcagtaacagctttgaatttttggctttttccctgcccaagccaagtcttaggctcatcaatcattggaaagtggactgttctccaagatattataaatttaaaaagtaacaagaatttattgaatttggaagatttttagccatcaattcttcaaatattttttctctcctcccttctctcagttttccttcatgtattagacaacttgacagtgtcccagaggtcactgatacttttttctgtctttrtttttgcctctgtgcttcctttggatagtttttattgtttcttcaaattcattgatttttctttttttcctctgcagttcccaatctgctgctaagacatatctggcatatt

SEQ ID NO: 560173 - DNA, 582 bp, Homo sapiens
tggcatagcaccacttgatgattaatagttttmcttatcttaacaaataaatgttaacaccaagccttaacatacctttctgctgaccccaaggttttagacaaaggcttgttcccttagccagttgcaaatcagagaatctctaaatccacctgggacctgttagcccctgcttcaagatatcctccctttgcagaacaagtcaatgtataacctccacgtattgatttatgagtttgcctattacttctgttttcctgaaatgtacccctgtctttaaaaacgcttgtaagccactggggaggttgggtcttaagtgttagctacctgttcttcttacttggtgccctgcaataaatgtccttctttctcttcctgcaaaccttggtgttggtatttggctttattgtgccaggtgagtggatccaagtttggttcagcaacagtttttttcctcatctgttaaaataaagagaactgaatgatttcctaatatcccttccaactgtaatatctatttggacctgacaagacccaaaattgtggaggaagaagtacatgaaatattacctcactatcatg

SEQ ID NO: 560174 - DNA, 582 bp, Homo sapiens
tggcatagcaccacttgatgattaatagttttccttatcttaacaaataaatgttaacaccaagccttaacatacctttctgctgaccccaaggttttagacaaaggcttgttcccttagccagttgcaaatcagagaatctctaaatccacctgggacctgttagcccctgcttcaagatatcctccctttgcagaacaagtcaatgtataacctccacgtattgatttatgagtttgcctattacttctgttttcctgaaatgtacccctgtctttaaaaacgcttgtaagccactggggaggttgggtcttaagtgttagctacctgttcttcttacttggtgccctgcaataaatgtccttctttctcttyctgcaaaccttggtgttggtatttggctttattgtgccaggtgagtggatccaagtttggttcagcaacagtttttttcctcatctgttaaaataaagagaactgaatgatttcctaatatcccttccaactgtaatatctatttggacctgacaagacccaaaattgtggaggaagaagtacatgaaatattacctcactatcatg

SEQ ID NO: 560175 - DNA, 574 bp, Homo sapiens
tgttacttgcagccacaattatcttaattgataaaatgttatatataaagttattttgttgctgtttttaaattatttatttttaattaaccaagtaattacacgttcattgaagcaagttattataygctcattgaaaaaaaaacaaaaaagaatatagaacacagattattattccccttcatgtggcccatctccctctccttaacagaggcaaccacccttaacatattttgatttaaatgttattggaatatctgcatctatgtttgcctagatgacattgtttatgaggactgctttgtgagtctgtgtgcctatgtatctatgtgtatcatcatttgtgggacctgatccttctgggacagacaaggaatctgtcttttcattcacttctaattatctccccccagtggctaatgtagcactaaaatttcaccatgcactgagtaaacccttatttgtagataatattaatggtgataagaatagccaggcttacaagaatcatttccaaactgcactcaaactgaactccaagtctgcaaaagcaatattgtaccttccccacccc

SEQ ID NO: 560176 - DNA, 581 bp, Homo sapiens
aggaggactctgaccaccgcaggaccagcgagatgtgtcaggacagaaatgagcaagcttgagtctctgggcacacctggggaaagartaatgcaaggcacacatcagggctgtgactcactcctcaaagcaggcttggttccccagggtaagagtgaagagacagactccccacatcatgtagtgtggatggcagggctgcaggggatgtagtcctcttgcaggtgggctgccagagacctggcagccagacccacttcttagtgagggcacatttatttcctctctgggatgcatttcatcatattcactttgtacccacgattcttcctgacagcctgaaacagcaggctttgcaccttttcaggcctggggtctggccttacaccaggggcttttgtttcacccacaatagactcgcctccacaccagagacctggtcactgctgacagcagggagagaagaaggcagaggggtccagcacggccctcctgcattcataaatcctcttttccaatgaacatcatgaactccctgtctcctgctcccaggagaagcctcgggtctcaggagtggtcaa

SEQ ID NO: 560177 - DNA, 513 bp, Homo sapiens
gtttttcttacagggttttggagacatattacacaggtgagtatttacctagattttagcatatattctttcagtttccatgaatatcaaagcaggctctaccaaagtcatggcataaatgattaagatattgatactacctttttttttgcatctgctttcactctcacaccaaaaaagacaagaacamtaaataaataaataaataaataaataaataaataaatagtgaaataaaaaaatgtttattactgattttgttttattgcttaaaagcctgcataggtgaaagataaagttttattttctggatggtgagaaagtcaccagaggaagcaggagagaagtgggggaagaattttagcagtgaaaaagttgatgatttgttgttcatacctacatacatatcagttaacagtcctgaaaaataggttgaaaaaactgtagagtgttagaactgtataagtctctagggaagcttgtttctaaaaggcaggtctagctgcttagaac

SEQ ID NO: 560178 - DNA, 664 bp, Homo sapiens
ttcaaaggattctcatgaactgtattttaaatagaaatagttatttttatttattttatggctgtagatgttgtaactgcaggtttttccttgcaggagtgagtccgtgctgctgcacatgccccagcctctgaatctagagctcagggcagggcccatcactggactgagggacaggctcatgcaattctgaggtaagtctccacccataggtagcaatccsactatctaaatattattattgttaggaccacataggtaatatttcaccctttatcaaatattttacttttttatagacgtaagtggacaacataatcatgcaacccttctgtatctgtgtctgtacagtcagatttatagcattaagtttgaaagatagtgaaaaacaaatacattttggcctcatatgtactgagtaatgtaatgggaaaaaggagtagtgtagcaaatttaaaaaaggagcaaattgaacaatgctcagaatgaaggtgagttatttaatgttaaatacaaaattttacgtttccttagtgtattcatttgaacagctaagaactgttgttttggggattatggtttactggggattgctgggggtttttaattttttaaatggatatgtatcatgaattgccaaaaaaaaaattagttaatgggtcaa

SEQ ID NO: 560179 - DNA, 626 bp, Homo sapiens
aaatattttacttttttatagacgtaagtggacaacataatcatgcaacccttctgtatctgtgtctgtacagtcagatttatagcattaagtttgaaagatagtgaaaaacaaatacattttggcctcatatgtactgagtaatgtaatgggaaaaaggagtagtgtagcaaatttaaaaaaggagcaaattgaacaatgctcagaatgaaggtgagttatttaatgttaaatacaaaattttacgtttccttagtgtattcatttgaacagctaagaactgttgttttggggattatggtttactggggattgctgggggtttttaattttttaaatggatatgtatcatgaattgccaaaaaaaaaattagttaatgggtcaacataaaaagaagaaatcattttgtgaatacaagtaaaattacaaacaaaaagaagttcagtttaattgcaatatgaaaagctacaggttaagtttaaaatccagcttcagccccaagctagcatggaggaccacagagagactgtgtaaaagattttacagaaatctgctttaaattgtcacttatgacatgtacttayggatttttatccagtcatcaagagcagttcttgagtaactg

SEQ ID NO: 560180 - DNA, 594 bp, Homo sapiens
ataaacctctagtcttttttactttgaaagctgaagtgggaggattacttgagccctggaattcaaggctgcggtgagctaagattgcgccactgcactccagaggctgaaactttctttggtataaataaataaataaatgtgcacttagaggaatgcttgtgtctttggaagaaattcaggaaacagcattaatcaatttcagtcaatttctagcatgtttactctgataagattgatgatagatatgcctcattcaggcagtggtttttacaatgatagtgtgatgctaatttaatcagtgatgaaaaggcatgtactamatattgcataaacctaatcatctctgtctccacctttcttaacaccctaaatatcactaaataggtggttgtggtcttcaaagattcacctaaatggatgtagaagagacaagctcatatttctccagaggaggacagcacttagagttaactgcgttcaggtgatgacctctgaaagtcaactcagcagggaatgagctcctgatcttggggagtacttaaaagaattttttcttggaagaattactgcaggaaacattcatagaacctt

SEQ ID NO: 560181 - DNA, 496 bp, Homo sapiens
gagaaaaaaacaccctaattgcttatataagttagtgtgactctttggtaggatttctaatcagaccacagatgttacccaagcatgctcatctgtttccatacaaacctataggaataccccaacaaatacaagaaactgggccatttcacactgttcccaatgggctgcctggataaattctggacacaagagttatttgtcagtcatggaaatttcaggtgacccttctaaggctgagtcagtaggaatttgaatcctggtgggcaagtayattgaaatgtgagctaaatttcaggcagaaggagcaagagtgcaaccttagggaaagcatgaaatgaaatatcagcactaattaatattgaataagtcataacacataacgggaaatgtggcgagaaatgtagactggtgtcttgatgaagacagaaatatgtgagaaacatgggaactagtatttaatataaggagaactctaaggacttgagaagaattc

SEQ ID NO: 560182 - DNA, 502 bp, Homo sapiens
gagcactctgcctggccttggtcagctcttttttttttttttttttttttccctgaggaaggggctctctctgttgccctggctggagtgcagtggtgcaaccatagctcactgtaacctcaaattcctggcctcaagtgatcctcctgcctcagcctcctgagtagctgggagtacaggcacataccaccacacccagctaattttttaaaaatgttttttgtggaaatgggatcttgctatgctggtctcaaactcctggctcaagcaatactcccaccttggcctcctgaagtgctgggaatataggcctgagccaccgtgcctaattggtgactgagttcttgatcaacaaccaaacaaggaagaataaaccacccattctactttcaaatggtttataaactagtgaggatctcacacagcccaaaaacaaaacttgaaaggaagaatggaagggaaraaatcaggggtggaggtaagggatcattttaacttgggg

SEQ ID NO: 560183 - DNA, 562 bp, Homo sapiens
gtgcagaaatgatgaaggaggatttcatgtctgttaagggcctacaaataccatgtaaatttccatacagggatttttttttttttttctgaggcttcttaagaacaacattgcccttaaatgtgtggatgagtcttttaatgctgatgcggtctatgcttrgagaccaggctcatcatacataatacagggcttccgtacaataaagatgaataaatgagttaaaacagattttaatttgttaaatataaacatataattaaaatactatttatatggctcataaagttgttgcagtatttataaaaattggccaggcacggtggctcatgcctgtaatcccagcactttgggaggctgaggtgggcagatcacttgaggccagaagtttaagacaacctggccaacatggtgaaaccctgtctctactgaaaatacaaaaattaggcaggcatggtggcccacacctctaatcccagctacttgggtggctgaggcaggagaatcacttgaaacaaggaggtggaggttgcagtgagctgagatcgcaccactgcactcc

SEQ ID NO: 560184 - DNA, 526 bp, Homo sapiens
tattaaaaaaaaataataaagctttgccaaacccaaggtcatgtagattttctcctatgttttctcctaaaagtctatttgtttggtggttgttttgaaatagggtctcactctgtcacccatgctggagtgcagtggtgccataatagctcactgcagcctcaaactccttggctcaagcgatcttcccaccttagcctcgcaagtaattgggactacagatgtgggccaccacgtctggctattattttctattttttgkggagacagagtctccatatgttgctcaggctggtctcaagttcctggcctcaagtgatcctctcatcttggcctctcaaagcattgggattgcaggcatgagccactgcatctgccctctaaaagttttacagtactcattttatatttagattactgatcatattttgagttattttatgaaacatttaagtctctgttgaattctttttttttttgcatttggacatccaattgtttaacagcatttgttgaaaaatgaact

SEQ ID NO: 560185 - DNA, 433 bp, Homo sapiens
tttttattttatactacattattgccttttatctaaattgtgtttgctttacatgtgtggtttcaattttattcacactttattttatctttaatggcgaaagaaagtacaggcatgaggtgatcagctggagrgaaacccttagcctaactgagagtattggactctatgtccttccaaatatctcactcaataatagccctctaagttttccactgaacatctttttctttccaatgatgaaacttcagcttaaaatatatcaagctaattgtatagattcacctgtcaacttcatttttgcttacctttaccccatatttccaggaagataatatgtatttttaatataagtcactttgagctagaacggtgctatctccttacagtatttgcccaaactttctaagtgcttcttgatcaaaatttagtt

SEQ ID NO: 560186 - DNA, 598 bp, Homo sapiens
gtaggccccaatttctgtatttcccctctctgtgtccacgtgttctcatcatttagattccacttgtaaatgaggacatgcagtatttggttttctgttcctgcattagttcacttatgataatggcctccagctccacacacattcgtgaaaaggaaatgacctcattcttttttatkgctgcataatattccatggtgtatacgtaccacattttctttatccattctaccattgatgggcatttaagttgattccatgtctttgctattatgaatagtgctgcaatgaacatacacgtgcctgtgtctttataatagaacaatttatattctgttgggtacactttcaataatgggattgctgggtcaaatggtagttctgtttttaggtcttgaggaaaggccacactgttttccacaatggttgaactaatttacactcccaccaacagtgtataagaattcctttttctccaccgccttgccagaacctattatttttttgactgtttaacagccatttgattagtgtgagctggtatctcactgcagttttgatttgcacttctctaatgaacagtgatgttgagtttttt

SEQ ID NO: 560187 - DNA, 598 bp, Homo sapiens
gtaggccccaatttctgtatttcccctctctgtgtccacgtgttctcatcatttagattccacttgtaaatgaggacatgcagtatttggttttctgttcctgcattagttcacttatgataatggcctccagctccacacacattcgtgaaaaggaaatgacctcattcttttttatggctgcataatattccatggtgtatacgtaccacattttctttatccattctaccattgatgggcatttaagttgattccatgtctttgctattatgaatagtgctgcaatgaacatacacgtgcctgtgtctttataatagaacaatttatattctgttgggtacactttcaataatgggattgctgggtcaaatggtagttctgtttttaggtcttgaggaaaggccacactgttttccacaatggttgaactaatttacwctcccaccaacagtgtataagaattcctttttctccaccgccttgccagaacctattatttttttgactgtttaacagccatttgattagtgtgagctggtatctcactgcagttttgatttgcacttctctaatgaacagtgatgttgagtttttt

SEQ ID NO: 560188 - DNA, 527 bp, Homo sapiens
ttctgactgcatgaaggtcaagtgtgccagtgtgcagctgggcttcttttccagaattaaaagtattttgggtggtgctgaaggtcagcggaagtagtaaagattgcgagaaaggagaaacatgggcttggggagaacccagaattggggacagaagacctggcactaggctacagcacttagcacctctgatcttgtttttcctcacctgtaaaaggagattaacaatgcttttctgcccgcctcttggggagaagggaagaatataattggtaaaaaaaaaaaaaaaaaaaaagaaaaagaaaaagaaaaagttttgaaaaataagcaacactgtctttatagargtagccaagcattattaattatccaccccatatcactggtagatacctgtattcaagcagtcacattttagaagtcatgaagttggtgctaataaacctaatctacagaaaaactcttgaaaaaacttgagcgtttgttctgcaaatagaaaggtatgagattcagagaaagttcagagt

SEQ ID NO: 560189 - DNA, 527 bp, Homo sapiens
ttctgactgcatgaaggtcaagtgtgccagtgtgcagctgggcttcttttccagaattaaaagtattttgggtggtgctgaaggtcagcggaagtagtaaagattgcgagaaaggagaaacatgggcttggggagaacccagaattggggacagaagacctggcactaggctacagcacttagcacctctgatcttgtttttcctcacctgtaaaaggagattaacaatgcttttctgcccgcctcttggggagaagggaagaatataattggtaaaaaaaaaaaaaaaaaaaaagaaaaagaaaaagaaaaagttttgaaaaataagcaacactgtctttatagaagtagccaagcattattaattatccaccccatatcactggtagatacctgtattcaagcagtcacattttagaagtcatgaagttggtgctaataaacctaatctacagaaaaactcttgaaaaaacttgagcrtttgttctgcaaatagaaaggtatgagattcagagaaagttcagagt

SEQ ID NO: 560190 - DNA, 527 bp, Homo sapiens
ttctgactgcatgaaggtcaagtgtgccagtgtgcagctgggcttcttttccagaattaaaagtattttgggtggtgctgaaggtcagcggaagtagtaaagattgcgagaaaggagaaacatgggcttggggagaacccagaattggggacagaagacctggcactaggctacagcacttagcacctctgatcttgtttttcctcacctgtaaaaggagattaacaatgcttttctgcccgcctcttggggagaagggaagaatataattggtaaaaaaaaaaaaaaaaaaaaagaaaaagaaaaagaaaaagttttgaaaaataagcaacactgtctttatagaagtagccaagcattattaattatccaccccatatcactggtagatacctgtattcaagcagtcacattttagaagtcatgaagttggtgctaataaacctaatctacagaaaaactcttgaaaaaacttgagcgtttgttctgcraatagaaaggtatgagattcagagaaagttcagagt

SEQ ID NO: 560191 - DNA, 527 bp, Homo sapiens
ttctgactgcatgaaggtcaagtgtgccagtgtgcagctgggcttcttttccagaattaaaagtattttgggtggtgctgaaggtcagcggaagtagtaaagattgcgagaaaggagaaacatgggcttggggagaacccagaattggggacagaagacctggcactaggctacagcacttagcacctctgatcttgtttttcctcacctgtaaaaggagattaacaatgcttttctgcccgcctcttggggagaagggaagaatataattggtaaaaaaaaaaaaaaaaaaaaagaaaaagaaaaagaaaaagttttgaaaaataagcaacactgtctttatagaagtagccaagcattattaattatccaccccatatcactggtagatacctgtattcaagcagtcacattttagaagtcatgaagttggtgctaataaacctaatctacagaaaaactcttgaaaaaacttgagcgtttgttctgcaaatagaaaggtwtgagattcagagaaagttcagagt

SEQ ID NO: 560192 - DNA, 389 bp, Homo sapiens
actttgagactgtaagtgacctgagatatacattatccttacttgagaatagtaatttttcaatacgcgttaaagatcattacacatgagccaagacaaatgagctggcctacttactttgtatataaatgtgtaaactcctcaagaattccaataatgaactccaataaggaaattagttcaatgtctttatggccttggtgacaaatggttacagacaatcagagcatttttttcctatccactaatggtcaagaaraaagcagacagatcctcactatcttagagaactaagtgagaaagttggtcgatgaagaggacttcatccagagaggaagggatgtagcttacagggaagatgctgcaggaggctgaggaaagtgaggcta

SEQ ID NO: 560193 - DNA, 561 bp, Homo sapiens
cagacgagtacccaaactatcaggtcttctggtccaaaggctatttttacttacctctagccaagtgcctgggatggatccttcctgcatctccccaaggctcaccacttagccatagcctcaaacccgtggggaaggaaggtctacccgccctgcaagaggacaaataactgatttttgttcatttgactctgttttaaaattctctttaaaaraaaaaaacaaaaaaaagaaaaagaaagcgtatctgaaacttaaaaaaaaaaacaaggaaaaaagatgaaaaaaatgacatacataggtgaaaaacacatagatatatgtataagcaacaaacacggctaattcacatataaattaaatatcacattgtcataaagtgtaccgagttaaaaaattatcattcaactcatgatatcaagctttaaaagcaaaaatacaattaactgatctgagaaaacatacccccccaagaaaagaaacacaacaacacagaattgaacataagaagagagattaaatgcataaaatcctgaatacaacataaatatacaatgaaaa

SEQ ID NO: 560194 - DNA, 347 bp, Homo sapiens
tgcctggcctgcaatgtgtctctaaggaatggaaactaagctttggggtaagaaaatcttaatgacctaatgggtttgcttttagcgcaagggtatacctagagattccttccaggcacakctcaaacaaccactccacagagaggctgcattcccataccttgggctgttccctgagaggagatgacacaagggatgctatttactagacacttcaagagtcatggccactgttggcatcttggggaatcctcaaacagttttgaaattcaaaaccaagaaaataacaggatggctgaggatgtattgccctgtgaagtttccaaaatgaaacctgaacccaaagg

SEQ ID NO: 560195 - DNA, 586 bp, Homo sapiens
ttaataaatggtgctgggaaaactggctggccatatgcagaaaactgaaactggatcccttccttacactgtatacaaaaattaagtgaaaatggattaaagacttaaatgtaagacctaaaaccataaaaacttacaagaaaacctaggcaataccataggcatggacaaagacttcatgactaaaacaccaaaarcaatggcaacaaagccaaaattgacaaacgggacctacttaaactaaagagcttcttgtaaagggcccgctaggcatacccaaagcgggcagaaggctcctcaggggaaggtaaggtttgagggagtgcaggtgaggcacctgtggcagaaaaaaaaaaacgcaaaacaaaaaaaaaaaattcgccgccaagaagcgttcctggttcccccacggacgaaagtgccttcccatcagtccctgcactgggccttggatactctggcgtccctggttcgaacccagggagcgactcaggcccgctaggggtaccccaaagcgggcagaaggcccctgaggggaaggttaggtttgaggaaagggaggtgaggcacctgtggatgaaaaaaa

SEQ ID NO: 560196 - DNA, 586 bp, Homo sapiens
ttaataaatggtgctgggaaaactggctggccatatgcagaaaactgaaactggatcccttccttacactgtatacaaaaattaagtgaaaatggattaaagacttaaatgtaagacctaaaaccataaaaacttacaagaaaacctaggcaataccataggcatggacaaagacttcatgactaaaacaccaaaagcaatggcaacaaagccaaaattgacaaacgggacctacttaaactaaagagcttcttgtaaagggcccgctaggcatacccaaagcgggcagaaggctcctcaggggaaggtaaggtttgagggagtgcaggtgaggcacctgtggcagaaaaaaaaaaacgcaaaacaaaaaaaaaaaattcgccgccaagaagcgttcctggttcccccacggacgaaagtgccttcccatcagtccctgcactgggccttggatactctggcgtccctggttcgaacccagrgagcgactcaggcccgctaggggtaccccaaagcgggcagaaggcccctgaggggaaggttaggtttgaggaaagggaggtgaggcacctgtggatgaaaaaaa

SEQ ID NO: 560197 - DNA, 442 bp, Homo sapiens
atgcatgcacgcctatgtgacaacattgaagagtagaaagcccaggtagaaagtagagcacagggttttccaggactcatgggctctcatttccaaagcaaacctgatgggtggggtgcatgcaaggcctaggaagctggatccctccctaatactctgtgctctgcccagtttctgggatctggaccagtctttgcctttttgggaggtctcagtcttcctgctgtaaaatgaagagttggctacaaaactgtatgagcacatgctcagtgaagacagggtgtcatgctcaataccacagagaatattgggatggggaaagtttgggcagacttaggtgtccatgcgtgctcaggcctctgaacagggccagtgcaggcaaacataaagcacggcacagccaggttttcttaccagggctacrggatgaaacagtgcacca

SEQ ID NO: 560198 - DNA, 553 bp, Homo sapiens
cacttgagccaggagttctaggctacagggagctatgatcgtgctgctgcactccaaccagggcaactatgcaagatgtttcaaaaataaaatcttttattattcttcacccctatagtctctccagaacttgtgcactatgtagcagaaagaatcaaactccccaagagtttggttcttgcttatgatttggttttctgctgcttggctgccccstcatttccccattttgtataaataagaacccccaggtgaagtggagtttctccccagcagagggtctcaccaaggccccaggactggcactttaggtggaggcttgcctttcaacctctgaataataattgatactaaaattgagaagttttccagacaccagcttcctgaaaggagcacccagtcgagacaagatgaggtcagtagcgaaggtgacccaggctgagtgggccgtacattcctctacttttcccaaacttccctctgacatcctccaaactttctgtcttcccaggactttcttgccagggagtctaatgaagtaaaagctttaaaa

SEQ ID NO: 560199 - DNA, 578 bp, Homo sapiens
agaattccagaacactgcaacgggggtctgaatgtatgatcctaacttaggattccagaccactcccgctcttgtttgagtgtttgtctgtcacatgggattccagaacacttctgctagggtctgaatgtttgtccataacataggactccagaacactcccgctgttgtttgaacgtttgtccctcatataggattctagaacactgcttctaggttctgaatgtttgtccctcacgtaggattccagaacactgctacaattgtctgaacctttgtccctcatataatattccasaacacttctgtgaggatcgaaatgtttgtcacatattattacagaacacccccactctggtctgaatgtttctcccgcacataggatgacagaatactgctgagagggtctgaatgattgtccctcaaataggattccagatcaatgctgctggggtctaaaggtttgtccgtcacatcggattccaggttactgctacagggttctgaatgtttattcctcacaggggattccagatcactacttctgtgttctgaaagtttgaccctcacgtaggatt

SEQ ID NO: 560200 - DNA, 578 bp, Homo sapiens
agaattccagaacactgcaacgggggtctgaatgtatgatcctaacttaggattccagaccactcccgctcttgtttgagtgtttgtctgtcacatgggattccagaacacttctgctagggtctgaatgtttgtccataacataggactccagaacactcccgctgttgtttgaacgtttgtccctcatataggattctagaacactgcttctaggttctgaatgtttgtccctcacgtaggattccagaacactgctacaattgtctgaacctttgtccctcatataatattccagaacacttctgtgaggatcgaaatgtttgtcacatattattacasaacacccccactctggtctgaatgtttctcccgcacataggatgacagaatactgctgagagggtctgaatgattgtccctcaaataggattccagatcaatgctgctggggtctaaaggtttgtccgtcacatcggattccaggttactgctacagggttctgaatgtttattcctcacaggggattccagatcactacttctgtgttctgaaagtttgaccctcacgtaggatt

SEQ ID NO: 560201 - DNA, 220 bp, Homo sapiens
tattttatttatctgtttattaacttatttttatgtatggaaaaacacatttttttatttgcttatttatttagagacagggtctccstctgtcatccaggctggaatacagtggtagattggagtgatcatggctcattgcagcctcaaactcttgagctcaaatgattctctcacctcagcctcctgtgccaccatgccctgctagttgattttaatt

SEQ ID NO: 560202 - DNA, 249 bp, Homo sapiens
ggacaggtgaaatcaaaatgyacatgctttctagaacagaaagtccttaatgaggataactttgcttgaataagcccaattacaatgcgaatgctacggcttattgtgttggctgtacagtcaccatggtttctgtatcctgagatcatggtcattttctgtactatctattctgcctcaatttccccctaagagattttagggcaataatcatattggaggttgaggggttaggccattatttctgga

SEQ ID NO: 560203 - DNA, 576 bp, Homo sapiens
tttggttccggcttagcctggtcttgtatgtkccatttccatttactttcttgagtgtaccctatccaatgaggtttgagggagttcatgacccaagtcatattaggaatttggggcctcataaaaacatcatgattaagacaaaggtgttctgtttcctgtaaagcccagtagcaggtcaacagctgcttctcaaagagtataagctttgctagcctctgacagcttctgggtctaaaaccccaaaggtatctcttcccatcttgtttctacctaaggctccaatgagcgtgttgatctaggacagttacttgcagttctactggcccatcctgtaagggccatactgttgctctgcttgtttggctggttgaaaagccacgctcactttctgtcttcagtgaaagtcatagcgttttctagtgactgcatgcagaggttgtaaaatgttacccaaatggggaatatgatgtctccagaatccaaacaaaccaatacaattttggacctccttttcagtggtagggctgcaaattctagtattttagccttagcctttggtaaaatggactgttt

SEQ ID NO: 560204 - DNA, 383 bp, Homo sapiens
ctttctgccatgattgtaagtttcctgaggcctcccctgccatgtggaactgtgagtcaatgaaacgtttttcttttataaattaccagtctcaggaatttctttataggagtgtgaaaatgggctaatacacccccactgctgtttggcaggaactgaccaaagctgagcaatgatcacttccaagtaaagccataagagcattcgagtttgccacagtctccaccactccctattttatcacatgtaatctgatatagtttagatgtcccgtccaaatctcatgttggaggtggggcccacgttggaggtggggcctggtggtaggtgtttgagtgtttgggtcatgggggcacatccytcatggcttggtgctgtcctca

SEQ ID NO: 560205 - DNA, 583 bp, Homo sapiens
actattatgaacaatgctgctatgaatactcgtatacaaggccatgagtggtggcccatgcctgtaatcccagcactttgggaggccgagacaggcagatcacttgagtttaggagtttgagaaaagctgggcaacatggcaaaaccccatctctacaaaaaatacaaaaattagctgggcgtggtggcatgtgcctgtagtttcaactacttgggaggctgaggtaggaggatcacttgagcccaggaggcagaggttgcagtgagccttgatygtgccactgcactccagcctgggtaatagagcaagaatttgtctcaaaaccaaaaacaaaaacaaaaaccatgtacaagattttctgtggacatgttttcatttatcttggccatatgcttatgtatggaattgctggatcatgtggtaatctatgcccaactttttgagaaactactagacaattttccacagtggctgcaccattttacattcccgccagctgtgtatgagcattccaatttttccacatcctcaccaacacatgttattacctgtctttttattatagccatctcagtgggtgtg

SEQ ID NO: 560206 - DNA, 633 bp, Homo sapiens
gcacattttaccgtaaattttttaaaacagatatatatgcagatatagacatatagttctatatcagacatatgtctatatatgtcaaatattgacaaataaaatgggaagagtagggagtgttggggggcgtagttgtaaatcaagtgattgagaaaggcctccctaaggagatgtttgagcaaaggcctggaggagggagggagggagccatgtgggtttggtgtggcagagagggagtgttctgaatagcaggtgtaataagtgcaaaggtcctaaggtgggagtgtacctggggcatcagaaggctcgagcagagccaatcaggagacgatgagatcaaggaaggaaggagggtgcagttataggtgcacaagggcatcacaggccactagaggtgcttgacttttttttttttttttttttttcgagacggagtcttkctctctcacccaggctggagtgcaatggcaccatctcagctcactgcaacctcttcctcccaggttcaagtgattctcctgcctcagcctcccaagtagctgggattacaggcactcaccgccacacctggctaatttttgtatttttactagagatggggttttaccatgttggccaggctggtctcta

SEQ ID NO: 560207 - DNA, 479 bp, Homo sapiens
tgcactccagcctggtgacggagcgagactccatctcaaaaaaaaaaaaaaaaaaaaattatgttgcatcttcacctataacctaaattctaccagaagtgtcttttataagaaagatgttacaaaattacatgccagggccaggtgtggtagcacccattatgttcccagctactcaggaggctgaagcaggaggatctcttgagcccagaagttagaggctgcagtaagctatgattacaccactgcactccagcctgggtgacagagtaagactccatctctaaaataaataaataaaaattacatgccaggataatcaggcattttgcaatgagatgattgaactgctctatgtaatcctctcagtaatcagaaaaatggaggggatgctggaaaactagagacaaccaaaagtaaggaagaagttttttttttttycttttttttttagagaaagcaggtgggtcctgacaatg

SEQ ID NO: 560208 - DNA, 479 bp, Homo sapiens
tgcactccagcctggtgacggagcgagactccatctcaaaaaaaaaaaaaaaaaaaaattatgttgcatcttcacctataacctaaattctaccagaagtgtcttttataagaaagatgttacaaaattacatgccagggccaggtgtggtagcacccattatgttcccagctactcaggaggctgaagcaggaggatctcttgagcccagaagttagaggctgcagtaagctatgattacaccactgcactccagcctgggtgacagagtaagactccatctctaaaataaataaataaaaattacatgccaggataatcaggcattttgcaatgagatgattgaactgctctatgtaatcctctcagtaatcagaaaaatggaggggatgctggaaaactagagacaaccaaaagtaaggaagaagttttttttttttccytttttttttagagaaagcaggtgggtcctgacaatg

SEQ ID NO: 560209 - DNA, 570 bp, Homo sapiens
tgctggcatggatgcggcattggacaccaaaagcagtccccattagtagctccggaactccaggaatggctggggtgatgaacagaagcaaccagagccactacaggccgcctgcagaacccatggaagtagggmgggactagcctgtgcccctttcatgccacagcctcattttatgccccaccccgtctagccactagacattactgacaagctctattccactccctgtgtatcccctgacctcgcacagtgtctgacacatactggcacttaagaaacatttcctgaatgtctgaataattcaacccatgtgtactgaacacaaatgactcaatccttatcctcatggaacttgcaatcaagtaaatgagagctgaattttttaaatgattatttcattacaactgtggtaagtgacacaaaggagcagtaacagggaaacttgccctggaagtgggagggctgggggagagttaaagagggctgggcacggtggctcacgcctgtaatcccagcactttgagaggctgaggcaggtggatcacgaggtcaagagttcgagaccag

SEQ ID NO: 560210 - DNA, 673 bp, Homo sapiens
caagcaacagccatatcatctggaaacttgttagaaggtcctagaatcactttggaactgaggccccacaccagattttctgaatcagaatatgtggggatggggctcagcaatctgtagtttaacaagcctttcaggtgattctaatgctaaagtcactgtgtaggtgatatgggagggggacagggaagtgctgggtagagaaggggcgggtccctggcaagggctccaccctggggcctgtgcccatggatctaagtgagaacaggcactctgggttttygggctcaaatgttgcatttaccaagaccactttggcctgtcatgcccccacatcctgtgcccaagagaccttagcaggcacacatacaagttggctggacctctagaggaggagaacacactgatgacaccagcagacactgacagaccagccatggcggaaccacatggacacagagggcagttcggccggggggcaatcagaggagagtctggctgctgggctgcctgactccaggggaagacagccttcccactccatcccccttctaactccccagtcatgttgctgagagctaactccaccactcaataaaaacttgcactcatcttccaagcccacatgtgatccgatttttccagtacactagggcaagaacccgggatacag

SEQ ID NO: 560211 - DNA, 551 bp, Homo sapiens
tcagaactctagagtctagtgtaatactygtagcatctagaggaatgcttggtgaagaaaaagcctggtaaattttattgaatttcaatattttatgaagtgacctaaattcaccatctcccagcctgacagcatgtagtcacaaggatggtggcttacatttccagtgtagcttgctggtgccacagtgggcaatacagattttgttcccccaaaatcgagattgcatcttttgatctgcttgacagattactgagggactggcaaaagacctgtccatcgtttcaattgtcaaacacaattaacttccccaaacagttagttgtgggaatttaaagagatagaacatcatttctcttcttttcttatggaatctatgcatttgagaacatttctctcaggtcactgcctgacatcatagatcacaaaacagagacttcggtaaccacatgtgaccaggaatatattttttgaaaaaattattttggaaaagtcaataaataaatgaatatctggagatttcatcaagcaacaacagcaatcactgggga

SEQ ID NO: 560212 - DNA, 569 bp, Homo sapiens
tctaacagtcagacccctcagctgtaggtctgctcaagtttgctggaggtccactgcagaccctgtttgcctgggtatcactggcggaggctgtagaacagcaaatattgctgcctgatacttcctctggaagcttcatcccagaggggcatccatctgtttgaggtgtttgttggcccctactgggaggtgttttccagtcaggctatacgggggttagggacccacttgaggaggcagtctgtccgttcttcgatctcaaacgctgtgctgagagaaccactgctctcttcagagctgtcagtcagggatgtttcaatctgcagaagctttctactgccttttgttctactatgccctgtccccagaggtggaatttatagaagctgtaggccttgctaagctgttgtgggctccatgyagttcatgcttcctggcctctttgtttacaccgtgagctactcaagcctgagcaatggtggatgcccctccccgcaccaatctgcagcatcacaagttgatctcagactgctgcattagctgtgagcaaggctccatgggcgtgggac

SEQ ID NO: 560213 - DNA, 404 bp, Homo sapiens
aacagtgtttcccagtttatcacagtgcacgtattgaaaggtgcactaggagctgggaggcaacagactgaaaactgacactggagacgctggctcatagcaacgamgagaagctgaaaaggagtgggaaggaactaactgtaattttacatcaatgatctgcatctttgtttcgatggtttgtggcaaccaaaatgactattctttttaccctcctagttcagtcatagccttagaggttttttttttttttttttttttttttttttttttgagatgaagtctcattctgttactcagactgggatgcagtgaccttatctctactcattgcaatctccacctcccaggtccaagtgattctcctgcctcagcttccagagtagctggggctaacaggcacc

SEQ ID NO: 560214 - DNA, 404 bp, Homo sapiens
aacagtgtttcccagtttatcacagtgcacgtattgaaaggtgcactaggagctgggaggcaacagactgaaaactgacactggagacgctggctcatagcaacgaagagwagctgaaaaggagtgggaaggaactaactgtaattttacatcaatgatctgcatctttgtttcgatggtttgtggcaaccaaaatgactattctttttaccctcctagttcagtcatagccttagaggttttttttttttttttttttttttttttttttttgagatgaagtctcattctgttactcagactgggatgcagtgaccttatctctactcattgcaatctccacctcccaggtccaagtgattctcctgcctcagcttccagagtagctggggctaacaggcacc

SEQ ID NO: 560215 - DNA, 588 bp, Homo sapiens
ctagcttgccttccagggcttttatagttttgggttttacatttaagtatttaacccatcttggattgatttctgcgtatggtatacggaagaagtccaacttcaatcttctgcatatggctagccagttattccagtatcatttattgaatagggaatcttttccccattgcttgtttttgccagctttgtcaaatattagatagttgtaggtatgtggtcttatttctaacttctctattctgctccattggtgtatgtgtctgtttttgtactagtaccatgctgttttggttactatagtgctatagtataggttgaagtcaggtaatgtgatgcctcaagctttgttctttttgcttaggattgccttggctacttaggtkctttcttggttctatatgaatttctaaatagcttttttctacttccatgaatcatgtcattgctggtttaataggaatagcttttggcagtacgaccatttaaattatattaattctttctctccattaacatggaatggtttttcttttgtttgtatcttctctgacttctttgagcagtgttttgtaattttcattgtag

SEQ ID NO: 560216 - DNA, 588 bp, Homo sapiens
ctagcttgccttccagggcttttatagttttgggttttacatttaagtatttaacccatcttggattgatttctgcgtatggtatacggaagaagtccaacttcaatcttctgcatatggctagccagttattccagtatcatttattgaatagggaatcttttccccattgcttgtttttgccagctttgtcaaatattagatagttgtaggtatgtggtcttatttctaacttctctattctgctccattggtgtatgtgtctgtttttgtactagtaccatgctgttttggttactatagtgctatagtataggttgaagtcaggtaatgtgatgcctcaagctttgttctttttgcttaggattgccttggctacttaggttctttcttggttctatatgaatttctaaatagcttttttctacttccatgaatcatgtcattgctggtttaataggaatagcttttggcagtacraccatttaaattatattaattctttctctccattaacatggaatggtttttcttttgtttgtatcttctctgacttctttgagcagtgttttgtaattttcattgtag

SEQ ID NO: 560217 - DNA, 602 bp, Homo sapiens
tattaattctttctctccattaacatggaatggtttttcttttgtttgtatcttctctgacttctttgagcagtgttttgtaattttcattgtagagatttttcaactccctggttagctgtattcgtacatgttttattctttttgtggaaattgtgaataaaattgcctctctgatttggctcttagtttgactcttcttggtatataggaatgctagcaaattctgtacattgattttgtgtcctgaaactttgtggaagttgtttatctgcttaaagagcttttgrgtcacaactatagggtttagatagagaattatgttgtctgcaaacagagatagttggacttccctttctatttaaatatgctttatttctttctcttgtctgattgctccagaaaggacttctaatactatgttgaataggagtggtgagagagggcatccttgtcttgtgtgggtttcaaggagaatgcgtccagattttgcccatttagtaaaatgttggctgtgagtttgtcataggtggcctttattattttgaggtatgttccttcgatacttcatttattgagaatttttaacatgaagctttgtt

SEQ ID NO: 560218 - DNA, 614 bp, Homo sapiens
cattttgttttatttgtggctactgcaaatagtattacatttttgaattctttttcagtttgttgactgttggcatatagaaatcctactgatttgtatatgttgattttgaattctgcaaatttactcaagttattacttctaatagtttttggtggatgtattaggccattgtcatattgctataaaaagtaatcagtgactggttaatttataaagaaaataggtttaattggttcatggttcttcaggctgtacagaaagcatagcactggcttctgcttctggggaagcctctgaaaactgacaaggtgaaaaataaatccggtgcttgcacatcacatggtaagtgcgagggcaaggggaaagtgctacacacacttatagataaccagctctgataaaaacttactattgtgggaatggcaccgaagtaaatgatgccaaactgttcatggaaatcttgccctcatgattcaatcacctcccctataggcccacatccaacattgaggattatatttcaatataagattttggtgrgaatacacatccaaactgtatcattttgcccctggccattccaaatctcatatccttctcatatttcaaaa

SEQ ID NO: 560219 - DNA, 622 bp, Homo sapiens
aaattctcaataaatgaggtatcaaaggaatatacctcaaaataataaaggccatctatgacaaattcacagccaacattatactaaatgggcaaaatctggaagcatcctccttgaaacccgcacaagacaaggatgctctctctcaccactcctattcaacatagtattagaagtcccttctggagcaatctgacaagagaaagaaataaagggtatttaaatagaaagagaagtccaactacctctgttggcagacaacataattctctatctaaaccctatagttgtgacccaaaaactccttaagctgataaacaacttccacaaagttttaaggacacaaaatcaatgtacaaaatttgctagcattcctatacaccaaagaaaagccaaactaagagccaaatcagagaggcaattttattcacaatttccatgaaaagaataaagtacataygaatacagctaaccagggaggtgaaaaatctctacaatgaaaattacaaaacactgctcaaagaagtcagagaagacacagataaatgaaaaatcattccgtgttaatggagagaaagaattaatatcatttaaatggttgtactgcccaaggctattccta

SEQ ID NO: 560220 - DNA, 507 bp, Homo sapiens
aaatggtgatgttgaaatacaacagaaaacttctcttgggaaccatttartcagtgctcgcttttgcactctttccagaaatgtcaatgcctttaaaatgtagaagtatattatacaactaaacttacacttattcagtattgtgcaatatttagtacttgttctagctatctcttgctgaatagtaagccattccaaaacttaaggaattatttataatttaatattgtttattgttattgtttagtgattataaataatgttatttctcatggttttgtgggttggtgggcactacaaaagttctcttttggactatttcttgcaattgcggtgggctggctgctgctgaactcacctaaaatctcaactaggctaaagagcctagacgggtcactcttatggctggcagggcatattggctgctgggtgtgatgcctatctgacctctccatgttacctggagtgctcacaacttggtagttggtcccaaggcacacaggcaaa

SEQ ID NO: 560221 - DNA, 507 bp, Homo sapiens
aaatggtgatgttgaaatacaacagaaaacttctcttgggaaccatttaatcagtgctcgcttttgcactctttccagaaatgtcaatgcctttaaaatgtagaagtatattatacaactaaayttacacttattcagtattgtgcaatatttagtacttgttctagctatctcttgctgaatagtaagccattccaaaacttaaggaattatttataatttaatattgtttattgttattgtttagtgattataaataatgttatttctcatggttttgtgggttggtgggcactacaaaagttctcttttggactatttcttgcaattgcggtgggctggctgctgctgaactcacctaaaatctcaactaggctaaagagcctagacgggtcactcttatggctggcagggcatattggctgctgggtgtgatgcctatctgacctctccatgttacctggagtgctcacaacttggtagttggtcccaaggcacacaggcaaa

SEQ ID NO: 560222 - DNA, 507 bp, Homo sapiens
aaatggtgatgttgaaatacaacagaaaacttctcttgggaaccatttaatcagtgctcgcttttgcactctttccagaaatgtcaatgcctttaaaatgtagaagtatattatacaactaaacttacacttattcagtattgtgcaatatttagtacttgttctagctatctcttgctgaatagtaagccattccaaaacttaaggaattatttatartttaatattgtttattgttattgtttagtgattataaataatgttatttctcatggttttgtgggttggtgggcactacaaaagttctcttttggactatttcttgcaattgcggtgggctggctgctgctgaactcacctaaaatctcaactaggctaaagagcctagacgggtcactcttatggctggcagggcatattggctgctgggtgtgatgcctatctgacctctccatgttacctggagtgctcacaacttggtagttggtcccaaggcacacaggcaaa

SEQ ID NO: 560223 - DNA, 507 bp, Homo sapiens
aaatggtgatgttgaaatacaacagaaaacttctcttgggaaccatttaatcagtgctcgcttttgcactctttccagaaatgtcaatgcctttaaaatgtagaagtatattatacaactaaacttacacttattcagtattgtgcaatatttagtacttgttctagctatctcttgctgaatagtaagccattccaaaacttaaggaattatttataatttaatattgtttattgttattgtttagtgattataaataatgttatttctcatggttttgtgggttggtgggcactacaaaagttctcttttggactatttcttgcaattgcggtgggctggctgctgctgaactcacctaaaatctcaactaggctaaagagcctagacgggtcactcttatggctggcagggcatattggctgctgggtgtgatgcctatctgacctctccatgttacctggagtgctcacaacttggtagttgstcccaaggcacacaggcaaa

SEQ ID NO: 560224 - DNA, 225 bp, Homo sapiens
acatggtctgatttattttagatttttacctcttaatttcaaagcttatagaaatccawagaaataatcatcataatccacaatgcctggaccagaagtccttgttctaagagtatcttgtggcatgctaaaaacttattactaactaggaaatttaaaactttttgttagtgattttaagagagctgactagctcatcaccacaattcacacagagtaagaatg

SEQ ID NO: 560225 - DNA, 225 bp, Homo sapiens
acatggtctgatttattttagatttttacctcttaatttcaaagcttatagaaatccaaagaamtaatcatcataatccacaatgcctggaccagaagtccttgttctaagagtatcttgtggcatgctaaaaacttattactaactaggaaatttaaaactttttgttagtgattttaagagagctgactagctcatcaccacaattcacacagagtaagaatg

SEQ ID NO: 560226 - DNA, 506 bp, Homo sapiens
atatttcataaaatttacattttttctttatttagaaatgtgaggctattatttgcttttaaaggctgtaatacagcttttttattttgtgaaataatagtaccaatattataaatattcatagtgtaaatacttattcattaaaatcttcccattagagaattttattaattattgtagtgcatttctgtaaaattgtaccgccacacaccacagggcaatgattcaaagtgcctcrtcttcacagatgcacagtcacagttgaacattgtagttatttagaaaaattcttttctagtgttatatcaatgttccaaacaagattttatgggaaaatatttctcccattctagttttgcaattccatgttaactgtatttttattttagggtagattccttgacattggtttatactatatttggttttacctaagtattattttggatgactgtgtgcagcaacttttaacgtacagtttatgtcaatgtgcagtttaattacaa

SEQ ID NO: 560227 - DNA, 651 bp, Homo sapiens
ctttacccaccacccagaccacccagatacgtattcatcaggacctagaaaaaaaaatcaaaaagacttaagcaaaaatatttattccaaggctcatgtattttatttcataggcaagtaagcaatctctcactttttatgcagataaccaactctcttctgataacaatgcataccaaatagtttccttgcaatatgtagctgacrtaattttgcattagtttatcaccactgtccactttcagaagtaacagaagtgtaacaaagcaattaccaacaggggacagcaaaggccaatcacaacagttagaaacaggagggcattctagatgttacaaaagtgccaagagcatcagtctcttacaacatgctataataagtatcattcataatgacatttagttaagggaaggatgacatcttttgttaaagagcatcttccatcaaaaggattttcggggaaaaacataataaatacagattaatctttagctgtcacactcagctataccagcctgaaaaagaatgcagaataactgaggaactatcataattacctttctgagtatggacagattaccaaaaaaattggtaaacttacccctagcatttgacatataaatattaaatgtatacatcacatatcttaca

SEQ ID NO: 560228 - DNA, 603 bp, Homo sapiens
ctctaggatacttgacctaatgsaaagacctgtacgatctggccactgcatacgttgctaaactcatttcctactacttttcctcttaaaattttgattccagccgcactggtctgcttgctgtttcttcacatgctaagcacctgccattctcagggccattatttttctcccaacatgaaccctattctcttgatagccattgggtttcactccctcacttcatgcatatttttaatcaaatgccacctgttgagaaaagtcttttctggatactattctatctaacgtaggacattctgtctttccatctacttgtccttctctactatttttccatatatcatattacatgacatgctactatatatttctttctttgtgtattgtctacctccctgactagaatacaaacaccaaaatgatagggaattttctattccatttgctgtaatatccttgctgcttataagaatgtcagaaaaatagtaggtgttctgtaaaggatgttactgtatgacagtcactccactcaataagttctgaatcttgaattcaaccccaaatttatctggctccaaagatcttgcttttggttttgaa

SEQ ID NO: 560229 - DNA, 590 bp, Homo sapiens
aacacacacatacatgcacrcacacacacacacacacacacacacacagttgatttctggatgaaaatcagaagtaaataattagatgttggctgggtctggtgtctcatgcttgttatcccagcactttgagaggccgaggttggcagatcacctgaggtcaggagtttgagaccagcctggccattatggtgaaaccccatctctacgaaaaatacaaaaattagccaggcgtagtggcggttgcctgtaattccagctacttgggaggctgaggctggagaatagcttgaacccgggaggcagaggttgcagtgagcctagatcacaccactgcactccagcctggacaacagagtaaggctccatctcaaaataataataattaaatgttatattcacactttcataaattgtatgattatttattatgctcatttatttattctctctctcctcatgataagattacgtatcctcagctggctttgccatgtgacttgctttggtgattaaaattggaacaagaagcagtggatatcactgttacaagtttcaccatcgatcttttcccagtgccatgcactcag

SEQ ID NO: 560230 - DNA, 618 bp, Homo sapiens
  misc_feature 1, 2, 3, 4, 5, 6, 7, 8: n = A,T,C or G
nnnnnnnntctacccaaaagagctgaaaacttatatccacagaaaaacctgcacatgtgtgtttatagccactcttcataattgccaaaacttaaaagcaaccaagatgtcctttgaatggataaactgtggtacatccagccaatggaattttcttctgtrctaaaaagaaatgaactatcaagccatgaaaagacatgaaggaagcttaaatgcatattcctaagtgagagaagacaatctgaaaagctacctactgtacgatcccaactatatgatgttctgaaaaaggcaaaactatggagaaagtagagaaaatcagtggatgccaggggttgggtgcagagtgggagggaggaggaatgaacaggcaatccatatgggattttagggcagtaaaaatactctgtatgatactataatggtggatacatgtcattacacatttgtccagatccagggaatgtagagctccaagagtgaatcctaatgtaaactatgaactttgagtgattttgatgtgctaatataggttcactgattttaagaaatgtgcctctatcgtgagggctattgatagctggggaggctgtacatgtgtagggacaggggtatgga

SEQ ID NO: 560231 - DNA, 618 bp, Homo sapiens
tactgcggccttttccataacagcacactactgccgcttacagcgcaagtttgagatcatttctgagtggatccttgtcckttagcagagtgttgatggaatttcctcattccctgagtaggcccaatgataaagccactcattgggttcctttattctcgacctctcactcttaaaaatatttccaatttatagcaatgtttaaattggctctttccctcattgtaatatgacattttcaggaatctagtgccatcagactagagaattatgtcttagttacataacaactatctcaacccacttgtcaaccactgagttagtaaatctcactatgtgccaggccccgtgctgagttcctgacatctgtcatctcatttaatcctttggttgcactatgacattgacattcttttttttttttgagatggagtctcactctgtcgcccaggctggagtgcagtggcacgatctcagctcactgcaaactctgcctcccgggttcaagttattctcctgtctcagcctccctagtggctgggattacaggtgcatgccaccacacccggctgattttttaaatttttagtagagacagagtttcaccatattggccag

SEQ ID NO: 560232 - DNA, 618 bp, Homo sapiens
tactgcggccttttccataacagcacactactgccgcttacagcgcaagtttgagatcatttctgagtggatccttgtccgttagcagagtgttgatggaatttcctcattccctgagtaggcccaatgataaagccactcattgggttcctttattctcgacctctcactcttaaaaatatttccaatttatagcaatgtttaaattggctctttccctcattgtaatwtgacattttcaggaatctagtgccatcagactagagaattatgtcttagttacataacaactatctcaacccacttgtcaaccactgagttagtaaatctcactatgtgccaggccccgtgctgagttcctgacatctgtcatctcatttaatcctttggttgcactatgacattgacattcttttttttttttgagatggagtctcactctgtcgcccaggctggagtgcagtggcacgatctcagctcactgcaaactctgcctcccgggttcaagttattctcctgtctcagcctccctagtggctgggattacaggtgcatgccaccacacccggctgattttttaaatttttagtagagacagagtttcaccatattggccag

SEQ ID NO: 560233 - DNA, 618 bp, Homo sapiens
tactgcggccttttccataacagcacactactgccgcttacagcgcaagtttgagatcatttctgagtggatccttgtccgttagcagagtgttgatggaatttcctcattccctgagtaggcccaatgataaagccactcattgggttcctttattctcgacctctcactcttaaaaatatttccaatttatagcaatgtttaaattggctctttccctcattgtaatatgacattttcaggaatctagtgccatcagactagagaattatgtcttagttacataacaactatctcaacccacttgtcaaccactgagttagtaaatctcactatgtgccaggccccgtgctgagttcctgacatctgtcatctcatttaatcctttggttgcactatgacattgacattcttttttttttttgagatggagtctcactctgtcgcccaggctggagtgcagtggcacgatctcagctcactgcaaactctgcctcccgggttcaagtkattctcctgtctcagcctccctagtggctgggattacaggtgcatgccaccacacccggctgattttttaaatttttagtagagacagagtttcaccatattggccag

SEQ ID NO: 560234 - DNA, 604 bp, Homo sapiens
gaacaaaagagagattatcactaatgacccttaggaagttaaaaaacattataagtgaatactctgaaaaacctgaagccaataagttagaccacttrgataaaaaggaccaattcgtgcagagatagaaattgccaaaactgacccaaattaactggaaaacatgaagagaactgtgaactaagtcagaaattgaaaaaccttctcaaaaagaaatgccaaagcccagatatcttcactggtgaattctatcaaatattttgaaagctctttcagacaagaagagaggagggaagactttccagcccatttacagaactggcattaccctcatatcaaagtcacagcaagactcacaggaaaagagtgccatacaccagtgtcaccaataaacataaatgaaaacatccttaacaaacattggcagataatacaaagccacataaaaaaggattacactccatgaccaatgggattcatcccaggaacatatggttggattaacatttgaaaatcagttcatggaatgcactgtattaatggaaaaaaagacataattatctcaaaagatgcaggagaaacagttgacaaaaatgttaacatc

SEQ ID NO: 560235 - DNA, 604 bp, Homo sapiens
gaacaaaagagagattatcactaatgacccttaggaagttaaaaaacattataagtgaatactctgaaaaacctgaagccaataagttagaccacttggataaaaaggaccaattcgtgcagagatagaaattgccaaaactgacccaaattaactggaaaacatgaagagaactgtgaactaagtcagaaattgaaaaaccttctcaaaaagaaatgccaaagcccagatatcttcactggtgaattctatcaaatattttgaaagctctttcagacaagaagagaggagggaagactttccagcccatttacagaactggcattaccctcatatcaaagtcacagcaagactcacaggaaaagagtgccatacaccagtgtcaccaataaacataaatgaaaacatccttaacaaacattggcagataatacaaagccacataaaaamggattacactccatgaccaatgggattcatcccaggaacatatggttggattaacatttgaaaatcagttcatggaatgcactgtattaatggaaaaaaagacataattatctcaaaagatgcaggagaaacagttgacaaaaatgttaacatc

SEQ ID NO: 560236 - DNA, 462 bp, Homo sapiens
tcacatggctgttggaaaaggcctggttccttgttgtctgttcccagaaggcctcagttctcagtcatgtggaccttcctgcagggctgcttatggcacagcggctggcttcccccagagctcatgatcccagattcagagagagagaaggtggaagccgcagttagttttatgttctacacccagagtcacaaactgttatgttggcactattctataagttagaagttgtattagtccattctcacactgcyataaagaaatgcctgagactgggtaatttataaaggaaagaggtttaattgacccacagttctgcatgactgaggaggctgccccaggaaacttacagtcatggcagaagtggaagcaaacccgtccttcttcatgtggtgacaggagagagaaatgcacaatgaagcagggaaaagccccttataaaaccatcagatctcatgagaa

SEQ ID NO: 560237 - DNA, 436 bp, Homo sapiens
agaaacatggatcagtcacatggctgttggaaaaggcctggttccttgttgtctgttcccagaaggcctcagttctcagtcatgtggaccttcctgcagggctgcttatggcacagcggctggcttcccccagagctcatgatcccagattcagagagagagaaggtggaagccgcagttagttttatgttctacacccagagtcacaaactgttatgttggcactattctataagttagaagttgtattagtccattctcacactgctataaagaaatrcctgagactgggtaatttataaaggaaagaggtttaattgacccacagttctgcatgactgaggaggctgccccaggaaacttacagtcatggcagaagtggaagcaaacccgtccttcttcatgtggtgacaggagagagaaatgcacaatgaag

SEQ ID NO: 560238 - DNA, 436 bp, Homo sapiens
agaaacatggatcagtcacatggctgttggaaaaggcctggttccttgttgtctgttcccagaaggcctcagttctcagtcatgtggaccttcctgcagggctgcttatggcacagcggctggcttcccccagagctcatgatcccagattcagagagagagaaggtggaagccgcagttagttttatgttctacacccagagtcacaaactgttatgttggcactattctataagttagaagttgtattagtccattctcacactgctataaagaaatgcctgagactgggtaatttataaaggaaagaggtttaatwgacccacagttctgcatgactgaggaggctgccccaggaaacttacagtcatggcagaagtggaagcaaacccgtccttcttcatgtggtgacaggagagagaaatgcacaatgaag

SEQ ID NO: 560239 - DNA, 462 bp, Homo sapiens
tcacatggctgttggaaaaggcctggttccttgttgtctgttcccagaaggcctcagttctcagtcatgtggaccttcctgcagggctgcttatggcacagcggctggcttcccccagagctcatgatcccagattcagagagagagaaggtggaagccgcagttagttttatgttctacacccagagtcacaaactgttatgttggcactattctataagttagaagttgtattagtccattctcacactgctataaagaaatgcctgagactgggtaatttataaaggaaagaggtttaattgacycacagttctgcatgactgaggaggctgccccaggaaacttacagtcatggcagaagtggaagcaaacccgtccttcttcatgtggtgacaggagagagaaatgcacaatgaagcagggaaaagccccttataaaaccatcagatctcatgagaa

SEQ ID NO: 560240 - DNA, 462 bp, Homo sapiens
tcacatggctgttggaaaaggcctggttccttgttgtctgttcccagaaggcctcagttctcagtcatgtggaccttcctgcagggctgcttatggcacagcggctggcttcccccagagctcatgatcccagattcagagagagagaaggtggaagccgcagttagttttatgttctacacccagagtcacaaactgttatgttggcactattctataagttagaagttgtattagtccattctcacactgctataaagaaatgcctgagactgggtaatttataaaggaaagaggtttaattgacccacagttctgcatgactgaggaggctgccccaggaaacttacagtcatggcagaagtggaagcaaacccgtccttcttcaygtggtgacaggagagagaaatgcacaatgaagcagggaaaagccccttataaaaccatcagatctcatgagaa

SEQ ID NO: 560241 - DNA, 350 bp, Homo sapiens
gctgcttgtgtgtcctccctccctccctccctccccccacaccaattttcttgcacactgcagcacacaaccatatttttttcttcaggaaagataaccctgggcttatgggtccaattttccacccacatatgaatctaaactagactctgctttataaattgatgagtttctmttggagccagcactaggattactacaactcagggcaggaagaagagtaggagtgcagaagaggagttccaacagaaagttacctatgatgagaaactatgggaccctgcctcttggcaaatttcagaatctggttcctttaaaaagattgcagaaaagatggaaaatacaatgag

SEQ ID NO: 560242 - DNA, 584 bp, Homo sapiens
cactgcctggggtagaacaaaaacaggacttggtcagagcccasaggagatgcggctagaggaggaatctggggttgggtgagctcccccatgggctcccgaccacaatatcccaaagatctcagggatcagcccacttcatacttacttgcagcttcagagtagctcactctatctgtgggaagaaaatgtcctataagaggccagaaaggagtcagggccatacggccctaaacaaaccccctatagcctttgatcctagagaagtttcctgaaagtgtaactgctgatctaggacaggatcaggaaacatgaggaaagcaggtgtgggtcctgaaccaactgccctcctgaggtctgtcctcagcagggaccttcccctgtgacttgtgactgctgggatcaggtccccatcatcataatcatcaaggtgataaatctgtccttcattgtcacaggtgctttacaaaagagtaagtgctggcacacagggcccaggctgggtaggcccatgagtgtggatggtgcttcccagtaaccaggcaggacacacttctaactggggcttgaaaccctcagtggga

SEQ ID NO: 560243 - DNA, 584 bp, Homo sapiens
cactgcctggggtagaacaaaaacaggacttggtcagagcccacaggagatgcggctagaggaggaatctggggttgggtgagctcccccatgggctcccgaccacaatatcccaaagatctcagggatcagcccacttcatacttacttgcagcttcagagtagctcactctatctgtgggaagaaaatgtcctatragaggccagaaaggagtcagggccatacggccctaaacaaaccccctatagcctttgatcctagagaagtttcctgaaagtgtaactgctgatctaggacaggatcaggaaacatgaggaaagcaggtgtgggtcctgaaccaactgccctcctgaggtctgtcctcagcagggaccttcccctgtgacttgtgactgctgggatcaggtccccatcatcataatcatcaaggtgataaatctgtccttcattgtcacaggtgctttacaaaagagtaagtgctggcacacagggcccaggctgggtaggcccatgagtgtggatggtgcttcccagtaaccaggcaggacacacttctaactggggcttgaaaccctcagtggga

SEQ ID NO: 560244 - DNA, 584 bp, Homo sapiens
cactgcctggggtagaacaaaaacaggacttggtcagagcccacaggagatgcggctagaggaggaatctggggttgggtgagctcccccatgggctcccgaccacaatatcccaaagatctcagggatcagcccacttcatacttacttgcagcttcagagtagctcactctatctgtgggaagaaaatgtcctataagaggccagaaaggagtcagggccatacggccctaaacaaaccccctatagcctttgatccyagagaagtttcctgaaagtgtaactgctgatctaggacaggatcaggaaacatgaggaaagcaggtgtgggtcctgaaccaactgccctcctgaggtctgtcctcagcagggaccttcccctgtgacttgtgactgctgggatcaggtccccatcatcataatcatcaaggtgataaatctgtccttcattgtcacaggtgctttacaaaagagtaagtgctggcacacagggcccaggctgggtaggcccatgagtgtggatggtgcttcccagtaaccaggcaggacacacttctaactggggcttgaaaccctcagtggga

SEQ ID NO: 560245 - DNA, 584 bp, Homo sapiens
cactgcctggggtagaacaaaaacaggacttggtcagagcccacaggagatgcggctagaggaggaatctggggttgggtgagctcccccatgggctcccgaccacaatatcccaaagatctcagggatcagcccacttcatacttacttgcagcttcagagtagctcactctatctgtgggaagaaaatgtcctataagaggccagaaaggagtcagggccatacggccctaaacaaaccccctatagcctttgatcctagagaagtttcctgaaagtgtaactgctgatctaggacaggatcaggaaacatgaggaaagcaggtgtgggtcctgraccaactgccctcctgaggtctgtcctcagcagggaccttcccctgtgacttgtgactgctgggatcaggtccccatcatcataatcatcaaggtgataaatctgtccttcattgtcacaggtgctttacaaaagagtaagtgctggcacacagggcccaggctgggtaggcccatgagtgtggatggtgcttcccagtaaccaggcaggacacacttctaactggggcttgaaaccctcagtggga

SEQ ID NO: 560246 - DNA, 552 bp, Homo sapiens
ctggagactgggtaatttataaaggaaagagrtttaattgactcacagtttcacaggactggggagacctcaggatacttacaatctggcagaaggggaagcaaacacattcttcttcacatgacagcagcaaggagaagtgccaagcaaaaggaagaaaagtcacttataaacccgtcagattttgtgagaactcacttactatcacaagaataagacggggaaaactgcccctatgatttaattatctccgcctggtccctcccatgacacgtggggattatgggaactacaattcaagatgagattgggtggggacacagtcaaaccatatcaggaagggttcagagaagccagggcaacaaagagtcatttagaggatgtggaacagtgactatcaaccagtaaagaggtactttaattttaacatttagtacaggctttcctgtgagtaccacctgaatgtcagccttgcacaagcctactgctaaggtagtacctatcctccttgtagtgcaactgtatatttgctatttgaggaccggttatgtg

SEQ ID NO: 560247 - DNA, 552 bp, Homo sapiens
ctggagactgggtaatttataaaggaaagagatttaattgactcacagtttcacargactggggagacctcaggatacttacaatctggcagaaggggaagcaaacacattcttcttcacatgacagcagcaaggagaagtgccaagcaaaaggaagaaaagtcacttataaacccgtcagattttgtgagaactcacttactatcacaagaataagacggggaaaactgcccctatgatttaattatctccgcctggtccctcccatgacacgtggggattatgggaactacaattcaagatgagattgggtggggacacagtcaaaccatatcaggaagggttcagagaagccagggcaacaaagagtcatttagaggatgtggaacagtgactatcaaccagtaaagaggtactttaattttaacatttagtacaggctttcctgtgagtaccacctgaatgtcagccttgcacaagcctactgctaaggtagtacctatcctccttgtagtgcaactgtatatttgctatttgaggaccggttatgtg

SEQ ID NO: 560248 - DNA, 368 bp, Homo sapiens
tggctagggcagcctgcttytattctcttatctggccccacccacatcctgctgattggtagagccgagtggcctattttgtcagggcgctgattggtgtgtttataatccctgagctagatacaaaggttctccacctccccatcagattagttagatacagagtttcgacacacaggttctccaaggcccaccagagcagctggatacagagtgtcgattggtgcattcacaaaccttgagctaaacacagggtgctgattggtgtgtttacaaagcttgagctagatacagagggcccattggtgtatttacaatccttgagttagacataaaggttctccacgtcctcaccagagcagctagat

SEQ ID NO: 560249 - DNA, 368 bp, Homo sapiens
tggctagggcagcctgcttctattctcttatctggccccacccacatcctgctgattggtagagccgagtggcctrttttgtcagggcgctgattggtgtgtttataatccctgagctagatacaaaggttctccacctccccatcagattagttagatacagagtttcgacacacaggttctccaaggcccaccagagcagctggatacagagtgtcgattggtgcattcacaaaccttgagctaaacacagggtgctgattggtgtgtttacaaagcttgagctagatacagagggcccattggtgtatttacaatccttgagttagacataaaggttctccacgtcctcaccagagcagctagat

SEQ ID NO: 560250 - DNA, 368 bp, Homo sapiens
tggctagggcagcctgcttctattctcttatctggccccacccacatcctgctgattggtagagccgagtggcctattttgtcagggcgctgattggtgtgtttataatccctgagctagatacaaaggttctccacctccccatcagattagttagatacagagtttcgacacacaggttctccaaggcccaccagagcagctggatacagagtgtcgattggtgcattyacaaaccttgagctaaacacagggtgctgattggtgtgtttacaaagcttgagctagatacagagggcccattggtgtatttacaatccttgagttagacataaaggttctccacgtcctcaccagagcagctagat

SEQ ID NO: 560251 - DNA, 508 bp, Homo sapiens
ggctgaagttatagtgaagagtttttactaactttgtctttgtttgcttgtttgttcttgctctcaatgttgtcatcactttacaataatgggttaaaaaatattatttgcaagccttgtggaaacctcaaatcaaataacctacaacagaaacacaaatgaaacagaaagcaagaaagtaaagcgtatcaccagagaaaattcctttcacacaaaggaagacaggaagaaagaataaaaggaagagaagaccacaaaacaaacaaacaaacaataacaaaatggtaggagtaagttcttacttatcaacagtaacattgaatgtacatggactaaagtcttaaattaaaaaatacaagtggagttggtaggcagaggaagatggcagaatggaaggccccaccagttgttccactcacaaggattccaatttaacaactatctacacagaaaaaaacatcttcamgggaaccaaaaatcagaggaacactcatagtacctggtttta

SEQ ID NO: 560252 - DNA, 590 bp, Homo sapiens
agctgacctcgaactcctgacctcaaatgatcctcctgccttggccttccaaattgctgggattacaggtgtgagccactgaacccggcctaattttggcccttgtaaatgtttttatgactaccctgaatgactaagtacattgttgttcctgttggagggtcttgggaaatagaaatctcttctgaagggatccatgagtcagagcttgactaaaacaaatcaagaattgacattaaaaatgagataaaatggaattccatcttgtgcagagtgtaggttctagaggtagcatttaaaaccaaaatctcgtatagtcaacattctccttgaaaactccccacacgcacggcacgtctgatcgcatatgtacagccctgcacatcatatcctatgcacagtcaagattttcagcccctragctcagtggaagaaagtcaacctctgactgtctgactctccaagccattctgttttgaggtacagaactgagtctccagcaggaaatgtggaaatattcccattttcctgtggggtttattttatcctgtttgacagtggctatataaccattcattcattcattctac

SEQ ID NO: 560253 - DNA, 590 bp, Homo sapiens
agctgacctcgaactcctgacctcaaatgatcctcctgccttggccttccaaattgctgggattacaggtgtgagccactgaacccggcctaattttggcccttgtaaatgtttttatgactaccctgaatgactaagtacattgttgttcctgttggagggtcttgggaaatagaaatctcttctgaagggatccatgagtcagagcttgactaaaacaaatcaagaattgacattaaaaatgagataaaatggaattccatcttgtgcagagtgtaggttctagaggtagcatttaaaaccaaaatctcgtatagtcaacattctccttgaaaactccccacacgcacggcacgtctgatcgcatatgtacagccctgcacatcatatcctatgcacagtcaagattttcagcccctgagctcagtggaagaaagtcaacctctgactgtctgactctccaagccattctgttttgaggtacagaactgartctccagcaggaaatgtggaaatattcccattttcctgtggggtttattttatcctgtttgacagtggctatataaccattcattcattcattctac

SEQ ID NO: 560254 - DNA, 637 bp, Homo sapiens
ttactttgcgatattcatttattcatgccactaacttttattcaacacccactgtggaaaatatgccccatgtggggaataggggaagaaaaccagagggtatggacataaccaagggtgactgattatccatacgcttcttacagtccagaaattgtgaaatcatttctttccctttgaacttttcaaaaagtgaattaagtcataactcaaatgactgccacagcatttgatctgaattgcattgctaagttcattgttactttgtccttattttccgccaaaaacttcactgaaacttttacagctgaacatgacatctggcttgcatgccttttcccaactttgtgcacaaatactcttaaagtagataaagatgaaaattagtggtactaaaacttaagactgacaaacaatgtgggacagtgacaagttggaaaagcatttataacaaactttcaagtgtttcaaggcatcaatattttgtacagatgttccttgacttatgatagcattacatccaaataaatccatcattaagttgaaaatattgtaaattgaaaaatgcatttaatataccttacctactaaacttcatagcatcacctaacctaycttaaatgtgctcagaacactt

SEQ ID NO: 560255 - DNA, 616 bp, Homo sapiens
tttatatacatatataacatatatatcatatattaaacattacatatgatatatatcatgtrttacgcactatatttttatgatatattaacaattaaaatattgtatattgtattgtacattaagaagtagcaagcttagacccaacggaaaaaaaaaaaagtataagctcacatcactgaagtagtgctcctgaagggaaacattctatcgacagagtaacaaatcttaattttatatcaagctttgttgttagttttctgcactcgatgcatctaacttgtcatgacagtctccttcttgcatctcttttttgtttgaaaagttaagcaaatttttgtaatttttttctaagttgaatggtttgtacatttgaaaattttgttttttccaagtacagtatgtaagcacatttccatcatcgacagtggccccatcagattataatggagttgaaaaattcctatcacaaagtgacagtataaccatcataatttcataacttaatgtgttactcaactgtttgtggtgatgctggtgtcaacaaaccaactaagttgcagtcctatgaaagtctagcacatacaattatgtataatacataacaattgaaaat

SEQ ID NO: 560256 - DNA, 568 bp, Homo sapiens
acacaaccacgcccagctaatttttgtatttttagtagagacggggtttcaccatgttggccaggctgatctcgaaatcctgacctcagataatccacctgccttcgcctcccaaagtgctgggattacaggcatgagccaccatgccctgtcccagttaaaactttaatccaacttgagttaattttttgtttatagtgaaaggtaggagtccagtttcattcttctgcatatgactagccaattatcccagcaccatttattgaatagggaatcctttctatattgttttaattattgttgactytgtagaagatgacatggctgtagttgtgcagctttatttctaagttctctattctgttccattggtctatgtgtctgtttttctaccagtaccatgctgtttcatttgctatagtcgtatagtatagtctgaagtcagatgatgtgatatctctggctttcttctttttgcttaggattgctttggctattcagacttttttttagtttcatatgaactttagtttttttttttttaatttctgttaaaactgatggtagt

SEQ ID NO: 560257 - DNA, 411 bp, Homo sapiens
tctcttactaccttcttttgtgttaaataggtatattttctagtgtattaccttgattctcttgttttgttactgaaattttttaagttaaattcattgttaatggttggcctgaggactgcaattaatttgtaacaatctacttcagttcatacaacttaatttcaatagtatacaaaaactttgctcttatctgcctctacttgttctccctcccatgtgctattactgtcatacaaattacatccttatgctttctaagtccatcaacacagtgatataattattgttttatatggttgtcttttaaataagagttaaamgaaaagttaccaaaaaaaattcattcagtcttttatatttgccagtgcagttacctttattcgtattctttatttctctgcattcaag

SEQ ID NO: 560258 - DNA, 601 bp, Homo sapiens
atgactgaaaaactgtcaatttagtttccaattttaaacttctactgcattatttttataatatagatgaatattataagtattaaaatagatggatgaattagagccaggaaataacttgtttagttcaatgatatttccaaagcaccggagtgaagaaataggagattatagcactaaccttgctgtatatgtggtacttaatattttgctatctgtttttaacagtcatttactgctgttactcctgtaaggtaagctattattagagtcagcctttccagcctccctctgaatatgtggagggcagtgggcagtcagagggcatattaaaatgtgacatccaaatgccttattttttaatttggaaaaatataaatatatagcagtgacctggaagaatagagatcacaggataattttagcactactccatgaaacaacaatttaattcaatagtatgaaacttacaacttatctttcatattaaaacagatatggtatattgtagagaaaaatgcccccccccccccaatcttaaaaataatccgtgacttaaaaaatcatgattgtgrtaatattttatggacaggccaccaag

SEQ ID NO: 560259 - DNA, 596 bp, Homo sapiens
gatatagaaacaacattccttacctgatgagagccagaggtgcatgtttggaaaggcccatatgttattttctgttagtaaccattrttcctgctatgtggataataattaagcaaaatgatacagtaattgagattttctattagatattctaccctgagggtgctacagcagagtaaggcaattcccacaagggtggcatagtaaataatgtccattaaaaagttttaatattttgcttagaaggagaggtaggaatgacaaaaagtatttggtgaggtaggggtgagactgagtaaaatgagtagttctcgctcacttattttttatgattttctgctaaagatgtcctatttctttatttccacttgtgaggatcagagggcttagaggcagtgcctactgaaacatctagctttgagtttatagggctttaagaaagcacagtttaggccaggcacggtggctcacacctgtaatcccagcactttgggaagccgagatgggcagatcacaaggtcaggagatcgagaccatcctgactaacagggcaaaaccccatctctactgaaaatacaaaaaattagccaggcgtg

SEQ ID NO: 560260 - DNA, 596 bp, Homo sapiens
gatatagaaacaacattccttacctgatgagagccagaggtgcatgtttggaaaggcccatatgttattttctgttagtaaccattgttcctgctatgtggataataattaagcaaaatgatacagtaattgagattttctattagatattctaccctgagggtgctacagcagagtaaggcaattcccacaagggtggcawagtaaataatgtccattaaaaagttttaatattttgcttagaaggagaggtaggaatgacaaaaagtatttggtgaggtaggggtgagactgagtaaaatgagtagttctcgctcacttattttttatgattttctgctaaagatgtcctatttctttatttccacttgtgaggatcagagggcttagaggcagtgcctactgaaacatctagctttgagtttatagggctttaagaaagcacagtttaggccaggcacggtggctcacacctgtaatcccagcactttgggaagccgagatgggcagatcacaaggtcaggagatcgagaccatcctgactaacagggcaaaaccccatctctactgaaaatacaaaaaattagccaggcgtg

SEQ ID NO: 560261 - DNA, 596 bp, Homo sapiens
gatatagaaacaacattccttacctgatgagagccagaggtgcatgtttggaaaggcccatatgttattttctgttagtaaccattgttcctgctatgtggataataattaagcaaaatgatacagtaattgagattttctattagatattctaccctgagggtgctacagcagagtaaggcaattcccacaagggtggcatagtaaataatgtccattaaaaagttttaatattttgcttagaaggagaggtaggaatgacaaaaagtatttggtgaggtaggggtgagactgagtaaaatgagtagttctcgctcacttattttttatgattttctgctaaagatgtcctatttctttatttccacttgtgaggatcagagggcttagaggcagtgcctactgaaacatctagctttgagtttatagggctttaagaaagcacagtttaggccaggcayggtggctcacacctgtaatcccagcactttgggaagccgagatgggcagatcacaaggtcaggagatcgagaccatcctgactaacagggcaaaaccccatctctactgaaaatacaaaaaattagccaggcgtg

SEQ ID NO: 560262 - DNA, 545 bp, Homo sapiens
aaatgttcttttacttttgcccttctataaaatgctgttgagaagtgtaactagaaatgttttcccttgtaaatcatgtgctttttcttctagaagctcaaagtactttttcctttttttggtattagtcatactgtaaacactctcagttatgcagtgtgcttttttcatatggtgcttttttttaaatttcagaagttttcttgaattagtttttattagttcagttcccttgcattggttttctttgtgatctactaaacaagttccatcttcttgcctacttcaatatctggcactttcttttcaatcctttttacttaaaaaattttttaaattccttttcaacttatatttctgttgtgttgattcatacttctgttgtatttattcactttttttttttttctgagaccaagtcttgctctgtcacccaggctagagtgcagtggcaagatcttagttcaccacatctacctcattggttcaagctrttcttgtgcctcagcctcctgagtagctgagattacaggtgtgcaccacca

SEQ ID NO: 560263 - DNA, 497 bp, Homo sapiens
catcaaaatccagtttaagctgagaaacaaagaactaaattttgcatgagagattatacactgcataagtataaaagaggaccagaaacaatggtggattagcaatttttgaaaagacaaaagcaggttatcatcaaatcaattgttaccaacaccccaattccacctctaggccagaaaattagccacttacccacgggaaaacaatgattgaagacaaagttcaccagtgaaagttggttatttttttccatccttgcatcaactaaaatgatatctactgttcctcttaacacttttcttactttcaaatatgtgggtatgcttaattagctgaggycatgttccatatgtacatctggctacaagggaaactgggaatgtgagccccaatacttatgtttgtagaatatttagaaatttgagaattccctccaaataaagagttttttaaaacattgttagacaaaaagtttgaattacaaaatgtggcagta

SEQ ID NO: 560264 - DNA, 619 bp, Homo sapiens
actgtacttactcaaatgttttaagagtttgcatgcaggcatctctaaaatatcaaatggtatctcttcaactggaatgacaagagattaaaaaaaaaagtgcaaccataaggacaccatatcctatgagtgacatactaaaccggaaacccaaaacaatgagagtgacatgctaaaccagaaacccaaaacaatgggagtgatgtactaaaactggaacccaaaacaatgggagtgacgtgcactaaaaccagaacccaaaacaatgggagtgacgtgctaaaccagaaacccaaagcaatgggagtgacttgctaaaactggaacccaaaacaatgggagtgatgtgataaaaccagaaatgaaaacaatgggagtgatgtgcttaaaccagaacccaaaacaatggaagtgacctgcaaaaccagaaacccaaaacaatgggagtgacttgctaaaactggaacccaaaacaatgggagtsatgtgctaaaaccagaaacgaaaacaatgggagtgatgtgcttaaactggaacccaaaacaatgggagtgacctgctaaaccagaaacccaaaacaatgggagtgacctgctaaaccagaaacccaaaacaatgg

SEQ ID NO: 560265 - DNA, 619 bp, Homo sapiens
actgtacttactcaaatgttttaagagtttgcatgcaggcatctctaaaatatcaaatggtatctcttcaactggaatgacaagagattaaaaaaaaaagtgcaaccataaggacaccatatcctatgagtgacatactaaaccggaaacccaaaacaatgagagtgacatgctaaaccagaaacccaaaacaatgggagtgatgtactaaaactggaacccaaaacaatgggagtgacgtgcactaaaaccagaacccaaaacaatgggagtgacgtgctaaaccagaaacccaaagcaatgggagtgacttgctaaaactggaacccaaaacaatgggagtgatgtgataaaaccagaaatgaaaacaatgggagtgatgtgcttaaaccagaacccaaaacaatggaagtgacctgcaaaaccagaaacccaaaacaatgggagtgacttgctaaaactggaacccaaaacaatgggagtcatgtgctaaaaccagaaacgaaaacaatgggagtgatgtgcttaaacyggaacccaaaacaatgggagtgacctgctaaaccagaaacccaaaacaatgggagtgacctgctaaaccagaaacccaaaacaatgg

SEQ ID NO: 560266 - DNA, 530 bp, Homo sapiens
aattctcctgcctcagcctcctgagtagctgggactacaggcacccgctgccacacttggctaattttttgtatttttagcagagacggggtttcaccttattagcaaggatggtctcaatctcctgacctcgtgatctgcccacctcagccccccaaagtgctgggattacaggtgtaagccwcctcacccagccaaaaggaggaattttttaagcaaaattatgggaggccattgttttgaactaagctcatgcaataggtcccaacagaccaaaccaaacaaaatcgagtcactcatgataaatgtaacataatcaaactaagactttaaggaaacacataaatcctagaacaaaccaggttttgtttttctcctgtaaacaggatgttccagcataagaagatatattctactcaagtccttgttccaccttttcaaatctcactggtctatttcccagtgggtttctaaaccaagtaagtacatttgcaacggtaatagtgacaccagtgactgaagttttggcc

SEQ ID NO: 560267 - DNA, 530 bp, Homo sapiens
aattctcctgcctcagcctcctgagtagctgggactacaggcacccgctgccacacttggctaattttttgtatttttagcagagacggggtttcaccttattagcaaggatggtctcaatctcctgacctcgtgatctgcccacctcagccccccaaagtgctgggattacaggtgtaagccacctcacccagccaaaaggaggaattttttaagcaaaattatgggaggccattgttttgaactaagctcatgcaataggtcccaacagaccaaaccaaacaaaatcgagtcactcatgataaatgtaacataatcaaactaagactttaaggaaacacataaatcstagaacaaaccaggttttgtttttctcctgtaaacaggatgttccagcataagaagatatattctactcaagtccttgttccaccttttcaaatctcactggtctatttcccagtgggtttctaaaccaagtaagtacatttgcaacggtaatagtgacaccagtgactgaagttttggcc

SEQ ID NO: 560268 - DNA, 519 bp, Homo sapiens
tcatttgaaggtgaaaactgctcatcaaaatccagtttaagctgagaaacaaagaactaaattttgcatgagagattatacactgcataagtataaaagaggaccagaaacaatggtggattagcaatttttgaaaagacaaaagcaggttatcatcaaatcaattgttaccaacaccccaattccacctctaggccagaaaattagccacttacccacgggaaaacaatgattgaagacaaagttcaccagtgaaagttggttatttttttccatccttgcatcaactaaaatgatatctactgttcctcttaacacttttcttactttcaaatatgtgggtatgcttaattagctgaggtcatgttccatatgtacatctggctacaagggaaactgggaatgtgagccccaatacttatgtttgtagartatttagaaatttgagaattccctccaaataaagagttttttaaaacattgttagacaaaaagtttgaattacaaaatgtggcagta

SEQ ID NO: 560269 - DNA, 518 bp, Homo sapiens
ttcaatggtttcactggcttcactgattaattttaccaaacattgaaggcagaattactatcaatcctactcaaactattccaaaaaacagagaaggctgtagtatttccaaactcatcctatgaaaaagaccattcatcatgtctaagtgggatttatcccraggatgccaacatggttcaacatacgcaaatcaatgaatgtgacacatcatatcaacagaatgaaggacaaaaaccatatgataatttcaattgatgctaaaaagcatttaataaaattcaacatccctgtgataaaaagaaaccctcaaaaaaaactagatatagaaggaacataccacaacacaataaaaaccatatgcaacagacccacagccagtatcatcctgaacagggaaaagctgaaagcctttcttctaagatctggaacaagacaagaatgtctacttccaacactgttactcaacatagtactggaagtcctagctagagcaattcagacaagagaaaaacaat

SEQ ID NO: 560270 - DNA, 518 bp, Homo sapiens
ttcaatggtttcactggcttcactgattaattttaccaaacattgaaggcagaattactatcaatcctactcaaactattccaaaaaacagagaaggctgtagtatttccaaactcatcctatgaaaaagaccattcatcatgtctaagtgggatttatcccgaggatgccaacatggttcaacatacgcaaatcaatsaatgtgacacatcatatcaacagaatgaaggacaaaaaccatatgataatttcaattgatgctaaaaagcatttaataaaattcaacatccctgtgataaaaagaaaccctcaaaaaaaactagatatagaaggaacataccacaacacaataaaaaccatatgcaacagacccacagccagtatcatcctgaacagggaaaagctgaaagcctttcttctaagatctggaacaagacaagaatgtctacttccaacactgttactcaacatagtactggaagtcctagctagagcaattcagacaagagaaaaacaat

SEQ ID NO: 560271 - DNA, 518 bp, Homo sapiens
ttcaatggtttcactggcttcactgattaattttaccaaacattgaaggcagaattactatcaatcctactcaaactattccaaaaaacagagaaggctgtagtatttccaaactcatcctatgaaaaagaccattcatcatgtctaagtgggatttatcccgaggatgccaacatggttcaacatacgcaaatcaatgaatgtgacacatcatatcaacagaatgaaggacaaaaaccatatgataatttcaattgatgctraaaagcatttaataaaattcaacatccctgtgataaaaagaaaccctcaaaaaaaactagatatagaaggaacataccacaacacaataaaaaccatatgcaacagacccacagccagtatcatcctgaacagggaaaagctgaaagcctttcttctaagatctggaacaagacaagaatgtctacttccaacactgttactcaacatagtactggaagtcctagctagagcaattcagacaagagaaaaacaat

SEQ ID NO: 560272 - DNA, 518 bp, Homo sapiens
ttcaatggtttcactggcttcactgattaattttaccaaacattgaaggcagaattactatcaatcctactcaaactattccaaaaaacagagaaggctgtagtatttccaaactcatcctatgaaaaagaccattcatcatgtctaagtgggatttatcccgaggatgccaacatggttcaacatacgcaaatcaatgaatgtgacacatcatatcaacagaatgaaggacaaaaaccatatgataatttcaattgatgctaaaaagcatttaataaaattcaacatccctgtgataaaaagaaaccctcaaaaaaaactagatatagaaggaacataccacaacacaatraaaaccatatgcaacagacccacagccagtatcatcctgaacagggaaaagctgaaagcctttcttctaagatctggaacaagacaagaatgtctacttccaacactgttactcaacatagtactggaagtcctagctagagcaattcagacaagagaaaaacaat

SEQ ID NO: 560273 - DNA, 608 bp, Homo sapiens
ttattatttttttgagacagggtctcaccctgttgcccaggctggagtgcagtggtgaaatcatggctcactgcagcctcaacctcccaggatcaggtgatcctccaccttagtctcccaagtagccaggactatgagcacgtgctaccacacacagctagcttttttatttttagtagagatggggttttgccattttgcccaggctagagttgaactcctgggctcaactgatccacccaccttggcttcccaaagggctggaattacagacatgagctgctgcacacagccacatgtcatttttaaatagcagtcattcatttaattagcatgacaaccaaaagacatcaaaagcaacatagaaggttacatggatgtgaaaactgaaaaccctcagttttcccaagtaattaaaaaaaaataaaggyaacacatggattatcttgataaaacctaaaatcttcattacaggccagtcatttaaagggtaaaactcctgtggcataactgtgtcttcttatgggaagctaatttaaatcacttggaagtcaattccgatgacaaagagactttaatttaattagacatagaaagagtgtgtccag

SEQ ID NO: 560274 - DNA, 642 bp, Homo sapiens
aactcctgtggcataactgtgtcttcttatgggaagctaatttaaatcacttggaagtcaattccgatgacaaagagactttaatttaattagacatagaaagagtgtgtccagggtcatgagtgagcataatattacaaaggaatgtaaacaggaaaaccagagcatagagcagtggggatccatagctcacaatgatagcatggaagtttcctggttacatgaagtaattaagacatatttaaaagmcaagagtacaaaatcagacctgatgaaaaagctgaaggagttatcatcccagccaagcaggaaacccaagccttttattccttctcaagaaggaacaggagacagtgatgtgatctgtgagtcatgtgtaacatgaaagtacaggagaagttgaacttctgatatacaaatctgaaaagtttttatagtaatagatttcaggattaaaagtcaatatttattacctcttcttatgagcaaataaatacattaagaaaaccttgttgttttaaccaaaatttttagtattttatcactctttttaatattacagctaatttaaataaactttataaacaatctatctgatctcaatcagttttgacctcgatgtaagttttacataaactttta

SEQ ID NO: 560275 - DNA, 642 bp, Homo sapiens
aactcctgtggcataactgtgtcttcttatgggaagctaatttaaatcacttggaagtcaattccgatgacaaagagactttaatttaattagacatagaaagagtgtgtccagggtcatgagtgagcataatattacaaaggaatgtaaacaggaaaaccagagcatagagcagtggggatccatagctcacaatgatagcatggaagtttcctggttacatgaagtaattaagacatatttaaaagccaagagtacaaaatcagacctgatgaaaaagctgaaggagttatcatcccagccaagcaggaaacccaagccttttattccttctcaagaaggaacaggagacagtgatgtgatctgtgagtcatgtgtaasatgaaagtacaggagaagttgaacttctgatatacaaatctgaaaagtttttatagtaatagatttcaggattaaaagtcaatatttattacctcttcttatgagcaaataaatacattaagaaaaccttgttgttttaaccaaaatttttagtattttatcactctttttaatattacagctaatttaaataaactttataaacaatctatctgatctcaatcagttttgacctcgatgtaagttttacataaactttta

SEQ ID NO: 560276 - DNA, 578 bp, Homo sapiens
cttctcaagaaggaacaggagacagtgatgtgatctgtgagtcatgtgtaacatgaaagtacaggagaagttgaacttctgatatacaaatctgaaaagtttttatagtaatagatttcaggattaaaagtcaatatttattacctcttcttatgagcaaataaatacattaagaaaaccttgttgttttaaccaaaatttttagtattttatcactctttttaatattacagctaatttaaataaactttataaacaatctatctgatctcaatcagttttgacctcgatgtaagwtttacataaacttttaataaccttgtataattttttcatctttcccaactttttatacacatttagttttatctatcttttttattccttcaatttaaaataatccttaaaaatctctaagcgaatttactttctctgaaacaaaaaccggtatacgttttgcatacagaattgtttcccttgtatctagtagtcttaatcacatatatctaccaagatattaacacttagtaacccttattttaataaaaaacctaggaagcaagaaatcttgaattgtc

SEQ ID NO: 560277 - DNA, 578 bp, Homo sapiens
cttctcaagaaggaacaggagacagtgatgtgatctgtgagtcatgtgtaacatgaaagtacaggagaagttgaacttctgatatacaaatctgaaaagtttttatagtaatagatttcaggattaaaagtcaatatttattacctcttcttatgagcaaataaatacattaagaaaaccttgttgttttaaccaaaatttttagtattttatcactctttttaatattacagctaatttaaataaactttataaacaatctatctgatctcaatcagttttgacctcgatgtaagttttacataaacttttaataaccttgtataattttttcatctttcccaactttttatacacatttagttttatctatcttttttattccttcaatttaaaataatccttaaaaatctctaagcgaatttactttctctgaaacaaaaaccggtatacgttttgcatacagaattgtttcycttgtatctagtagtcttaatcacatatatctaccaagatattaacacttagtaacccttattttaataaaaaacctaggaagcaagaaatcttgaattgtc

SEQ ID NO: 560278 - DNA, 511 bp, Homo sapiens
agcttttaatgtcatatcctaaaaattattgacaaattcatcrtcataaagcattttccaaatttgttttccctaggagtttgatagttctagttttacatttaggtttataattcactttgaattaattttgacgtggtgtaaggtaagagtccaacttcattgttttgcatgtagatatacaattttcccatcacaatttgttgcagaaactgtccttcaccattgagtggccctggcatccttgtggaagatcatcggaccatatatgccagggttggtttctgaggtctctgttgtgttggtccataagtgtgtcaagagtgtctttatgccatgaccacatttttttttggcttattgcagttttgtaattgttttgagacctttaattttgttctgtttcaagattgatttgcctattcatgggccctggagattccatatgaattttaggataggtttttctgtttatcgaaaatgtcattggaatctgtataaggattgtatt

SEQ ID NO: 560279 - DNA, 511 bp, Homo sapiens
agcttttaatgtcatatcctaaaaattattgacaaattcatcgtcataaagcattttccaaatttgttttccctaggagtttgatagttctagttttacatttaggtttataattcactttgaattaattttgacgtggtgtaaggtaagagtccaacttcattgttttgcatgtagwtatacaattttcccatcacaatttgttgcagaaactgtccttcaccattgagtggccctggcatccttgtggaagatcatcggaccatatatgccagggttggtttctgaggtctctgttgtgttggtccataagtgtgtcaagagtgtctttatgccatgaccacatttttttttggcttattgcagttttgtaattgttttgagacctttaattttgttctgtttcaagattgatttgcctattcatgggccctggagattccatatgaattttaggataggtttttctgtttatcgaaaatgtcattggaatctgtataaggattgtatt

SEQ ID NO: 560280 - DNA, 511 bp, Homo sapiens
agcttttaatgtcatatcctaaaaattattgacaaattcatcgtcataaagcattttccaaatttgttttccctaggagtttgatagttctagttttacatttaggtttataattcactttgaattaattttgacgtggtgtaaggtaagagtccaacttcattgttttgcatgtagatatacaattttcccatcacaatttgttgcagaaactgtccttcaccattgagtggccctggcatccttgtggaagatcatcggaccatatatgccaggrttggtttctgaggtctctgttgtgttggtccataagtgtgtcaagagtgtctttatgccatgaccacatttttttttggcttattgcagttttgtaattgttttgagacctttaattttgttctgtttcaagattgatttgcctattcatgggccctggagattccatatgaattttaggataggtttttctgtttatcgaaaatgtcattggaatctgtataaggattgtatt

SEQ ID NO: 560281 - DNA, 564 bp, Homo sapiens
ttgtagttttctgtgttcaaatctgttgccctcttggttaagcttatttctaatttttttaatgctgttgtaaatgtaattcttttttttttttttttttttttttgagatggagtcttgctctgtctcccaggctggagtgcagtggcactatctcaggtcactgcaacctgcaccttccttattcaagcagttctccaacgtcagcctctcaagtacctgggatcacaggtgcgcgtcaccacgcccagctaactttttggtatttttagtagagacagtgtttctccatgttgaccaggttagtcttgaacttgtgacctcaggtgatctgcccgcctcggcctcccaaactgctgggattgcaggcatgaaccaccgcacccggccaaatgtcgttctttttaaaaatttcttttgttttctctttcttttcttttcttttctttctctctctttctttcctttctttcttytttttgagacggtgtctcactctgtttcctaagctggagcacagtggcacaatctcagctgactgcatcctccaccttccaagttcaa

SEQ ID NO: 560282 - DNA, 564 bp, Homo sapiens
ttgtagttttctgtgttcaaatctgttgccctcttggttaagcttatttctaatttttttaatgctgttgtaaatgtaattcttttttttttttttttttttttttgagatggagtcttgctctgtctcccaggctggagtgcagtggcactatctcaggtcactgcaacctgcaccttccttattcaagcagttctccaacgtcagcctctcaagtacctgggatcacaggtgcgcgtcaccacgcccagctaactttttggtatttttagtagagacagtgtttctccatgttgaccaggttagtcttgaacttgtgacctcaggtgatctgcccgcctcggcctcccaaactgctgggattgcaggcatgaaccaccgcacccggccaaatgtcgttctttttaaaaatttcttttgttttctctttcttttcttttcttttctttctctctctttctttcctttctttcttctttttgagacggtgtctcactctgtttcctaagctggagcacagtggcacaatctcagctgactgcawcctccaccttccaagttcaa

SEQ ID NO: 560283 - DNA, 210 bp, Homo sapiens
agatatttaatgagtatctattatttaatttaacataactaaaatttcaaaaataggctgggcatggtggctcacacctgtaatcccaacactttrggaggccaaggcaggagtatcgtgagaccagcctgagcaaaatagcgagacgctgactctacaaaaaaaataaaagttagctgaccatggtggtgtatgcctgtaattaacagc

SEQ ID NO: 560284 - DNA, 482 bp, Homo sapiens
gttatctggacctggaattttcttttttggggggtttttgattactggttgaatcttcttactagttacaggtctctttggattttttatttctccgtgatgctgtatggtggtttgtgtttctaggaatttataaatttattctaggttgtccagttttgtggcatatggttgctcacattagtctcttgtaatctttttcagttctgtggcatctgttgtactgtcacctcttttatttatgatttyagtatttgagatttctctttttttcttaatatagctgtgagttttaaaatttttattgatctttaaaaaaacaaactcagtgggtttttttccttttttctggtcttattctgcttatctctgctctaatctgttattttcttccttttgcttggtttgtcattagtttttttctccccttcaggtgtaatattaggttattgatttgagatctttcttctttttaatttaag

SEQ ID NO: 560285 - DNA, 210 bp, Homo sapiens
agatatttaatgagtatctattatttaatttaacataactaaaatttcaaaaataggctgggcatggtggctcacacctgtaatcccaacactttgggaggccaaggcaggagtatcgtgagaccagcctgagcaaaatagcgagaygctgactctacaaaaaaaataaaagttagctgaccatggtggtgtatgcctgtaattaacagc

SEQ ID NO: 560286 - DNA, 210 bp, Homo sapiens
agatatttaatgagtatctattatttaatttaacataactaaaatttcaaaaataggctgggcatggtggctcacacctgtaatcccaacactttgggaggccaaggcaggagtatcgtgagaccagcctgagcaaaatagcgagacgctgactctacaraaaaaataaaagttagctgaccatggtggtgtatgcctgtaattaacagc

SEQ ID NO: 560287 - DNA, 210 bp, Homo sapiens
agatatttaatgagtatctattatttaatttaacataactaaaatttcaaaaataggctgggcatggtggctcacacctgtaatcccaacactttgggaggccaaggcaggagtatcgtgagaccagcctgagcaaaatagcgagacgctgactctacaaaaaaaataaaagttagctgaccatggtgktgtatgcctgtaattaacagc

SEQ ID NO: 560288 - DNA, 507 bp, Homo sapiens
aagacaaaatcacctcacatattattaaaaaacaacataatataactttataagctgctgctgttcttttgctattaaraaccattgacatctgtaattagggaagattatggaaaggttaaaggtgagaatacatgcactctatctacacgaaacctatactgtgtaggttaaggagatgtgtgcgaaagtcatattaattagcaggttcacaggaaactaacatttattgtataaattccatgggaaaatgtattatggctccacgcacacaactgtgtgccatctacgttaccacacagagcttacttctttcagagtgtatacatttctctcctaacggtctgtatggtattattgcatagttctaaaaaccttgctgaggcagaaatttcatttaatgatatagcttcgaaaacaatgaaaaacagtagaaactttctatttttttatgaagcagaattgttgaattttcagtttcatttatttaatgttacaagatgacaa

SEQ ID NO: 560289 - DNA, 566 bp, Homo sapiens
tctatttttattttatcaatactttttaaattatttgtatttataaaagaactcttttgtctgggcacagtggttcatgcctgtatcccagcagtttgagaggctgyggcaagaggatcacttgagctcaggagtttgagaccagcctgggcaacatagtgagacccaatctctactaagaataagataaacaattaccaggcatggtggtgcatgcctattgtcccctctactagagaggatgaggcaggaggattgcttgagcctgggagtttgagataacagtgagctatgatcccactactgcactccagtctggggaacagattgagaccttagagtgagaccttgtctcaaaaagagaaaaaaataaagaattgtttcattcttttgtttttcttcagccaagtaaccttgaattggtaacaccacagacagtaagtcttatctcaacaccagtagacaaatcagcagattcaaagtaggcagggaaaaaaaaagataggcaaaagaactgagactttttcattttagggtttttaaaaatagtaactatttgagttctg

SEQ ID NO: 560290 - DNA, 566 bp, Homo sapiens
tctatttttattttatcaatactttttaaattatttgtatttataaaagaactcttttgtctgggcacagtggttcatgcctgtatcccagcagtttgagaggctgcggcaagaggatcacttgagctcaggagtttgagaccagcctgggcaacatagtgagacccaatctctactaagaataagataaacaattaccaggcatggtggtgcatgcctattgtcscctctactagagaggatgaggcaggaggattgcttgagcctgggagtttgagataacagtgagctatgatcccactactgcactccagtctggggaacagattgagaccttagagtgagaccttgtctcaaaaagagaaaaaaataaagaattgtttcattcttttgtttttcttcagccaagtaaccttgaattggtaacaccacagacagtaagtcttatctcaacaccagtagacaaatcagcagattcaaagtaggcagggaaaaaaaaagataggcaaaagaactgagactttttcattttagggtttttaaaaatagtaactatttgagttctg

SEQ ID NO: 560291 - DNA, 566 bp, Homo sapiens
tctatttttattttatcaatactttttaaattatttgtatttataaaagaactcttttgtctgggcacagtggttcatgcctgtatcccagcagtttgagaggctgcggcaagaggatcacttgagctcaggagtttgagaccagcctgggcaacatagtgagacccaatctctactaagaataagataaacaattaccaggcatggtggtgcatgcctattgtcccctctactagagaggatgaggcaggaggattgcttgagcctgggagtttgagataacagtgagctatgatcccactactgcactccagtctggggaacagattgagaccttagagtgagaccttgtctcaaaaagasaaaaaaataaagaattgtttcattcttttgtttttcttcagccaagtaaccttgaattggtaacaccacagacagtaagtcttatctcaacaccagtagacaaatcagcagattcaaagtaggcagggaaaaaaaaagataggcaaaagaactgagactttttcattttagggtttttaaaaatagtaactatttgagttctg

SEQ ID NO: 560292 - DNA, 357 bp, Homo sapiens
atctttgttgcagcctggcaatgtggtaaaagaagaaaagtccattatcaggggaaacatcaagatgacctccaatatttgcattgaaaaaagctcagtgctaatagccaagagaatgggggaaacgcctagaagtcatttcataacttcacagcattaattttctgtatctacataaagaaaagaggtgtaattgactcacagttcttcaggctgtaaagaaagcacagtggtttctgcttgtaggaggactcaggaagccccccaattataccaraaggccaagcggcaatgaaatgtttcatatggcaggagtagaagcaagacagagagaggaaggaggtgcgacatcctgtt

SEQ ID NO: 560293 - DNA, 609 bp, Homo sapiens
gatgaggcaggaggattgcttgagcctgggagtttgagataacagtgagctatgatcccactactgcactccagtctggggaacagattgagaccttagagtgagaccttgtctcaaaaagagaaaaaaataaagaattgtttcattcttttgtttttcttcagccaagtaaccttgaattggtaacaccacagacagtaagtcttatctcaacaccagtagacaaatcagcagattcaaagtaggcagggaaawaaaaagataggcaaaagaactgagactttttcattttagggtttttaaaaatagtaactatttgagttctgaattttctttcatgtaatttggccgtcaggtttaaagtgtgcactagaggtcaggtgcagtggctcattcatgtaatcccaacactacgggaggctgaggcaggtggatcacttgaggcctggagtttgagaccagcctggccaacgtgacaaaaccccatctctactgaaaatacaaaaattaactgggtgtggtggtgtgcaccctgtagtctcagctattcaggaagctgaggaaggataatcgctcaaacctgggaggcggaggttgcagtgagccgcg

SEQ ID NO: 560294 - DNA, 609 bp, Homo sapiens
gatgaggcaggaggattgcttgagcctgggagtttgagataacagtgagctatgatcccactactgcactccagtctggggaacagattgagaccttagagtgagaccttgtctcaaaaagagaaaaaaataaagaattgtttcattcttttgtttttcttcagccaagtaaccttgaattggtaacaccacagacagtaagtcttatctcaacaccagtagacaaatcagcagattcaaagtaggcagggaaaaaaaaagataggcaaaagaactgagactttttcattttagggtttttaaaaatagtaactatttgagttctgaattttctttcatgtaatttggccgtcaggtttaaagtgtgcactagaggycaggtgcagtggctcattcatgtaatcccaacactacgggaggctgaggcaggtggatcacttgaggcctggagtttgagaccagcctggccaacgtgacaaaaccccatctctactgaaaatacaaaaattaactgggtgtggtggtgtgcaccctgtagtctcagctattcaggaagctgaggaaggataatcgctcaaacctgggaggcggaggttgcagtgagccgcg

SEQ ID NO: 560295 - DNA, 507 bp, Homo sapiens
aagacaaaatcacctcacatattattaaaaaacaacataatataactttataagctgctgctgttcttttgctattaaaaaccattgacatctgtaattagggaagattatggaaaggttaaaggtgagaatacatgcactctatctacacgaaacctatactgtgtaggttaaggagatgtgtgcgaaagtcatattaattagcaggttcacaggaaactaacatttattgtataaattccatggkaaaatgtattatggctccacgcacacaactgtgtgccatctacgttaccacacagagcttacttctttcagagtgtatacatttctctcctaacggtctgtatggtattattgcatagttctaaaaaccttgctgaggcagaaatttcatttaatgatatagcttcgaaaacaatgaaaaacagtagaaactttctatttttttatgaagcagaattgttgaattttcagtttcatttatttaatgttacaagatgacaa

SEQ ID NO: 560296 - DNA, 622 bp, Homo sapiens
ttagggaagattatggaaaggttaaaggtgagaatacatgcactctatctacacgaaacctatactgtgtaggttaaggagatgtgtgcgaaagtcatattaattagcaggttcacaggaaactaacatttattgtataaattccatgggaaaatgtattatggctccacgcacacaactgtgtgccatctacgttaccacacagagcttacttctttcagagtgtatwcatttctctcctaacggtctgtatggtattattgcatagttctaaaaaccttgctgaggcagaaatttcatttaatgatatagcttcgaaaacaatgaaaaacagtagaaactttctatttttttatgaagcagaattgttgaattttcagtttcatttatttaatgttacaagatgacaaacatatttctttaattccctcttgttatttttgtctaacatcaagcaaagccatttctttcatttgaaggtgaaaactgctcatcaaaatccagtttaagctgagaaacaaagaactaaattttgcatgagagattatacactgcataagtataaaagaggaccagaaacaatggtggattagcaatttttgaaaagacaaaagcaggttat

SEQ ID NO: 560297 - DNA, 517 bp, Homo sapiens
agctttatgaaatatattttttaagtgataagacttgaaagttgaaattattctttgatccaagggcaccagaatgaatgttgggttagtaggcatgaaaacaatattcagctctttatacatctctgtaaaagcccttgagtaccaggggcattgtcagtgagcggtaatactttgaaaggaatcttatttcttgagcagtaggtgtcaacagtgggcttaagatattcagtaaaccatatttgtaaaccgatagtctgtcatccaggctttgttcccatttgtagagtacaggcagagctgtgttttattataattcttcaggkcccttggattttcagaatagtaaatcatcattggtttcaagttaacatcaccaactacattagcccttaacaaaagagtcagtatgtcctttgaagccttaaagccaggcatcaactcctctctagctgggaacatcctagatggcatctccttctagtagaaggctgttttgtctccattgaaaatctgt

SEQ ID NO: 560298 - DNA, 332 bp, Homo sapiens
acaagtttcttgaatttttatttttctgaggaaggccttaattctccttcacttttgaagggtgttttcagtgggtacagaaacttaggttggtgggtttttttctgtcaayatttggaatttttcatttcactgtcttcttgctttcacagtttctgcaatgttgaatgcagttcttatctttgtgtctctgtaggtaaggtgttttctgccccacctctggtttctttcagagttttcctttatcttttatttcatagagtttgaaaattatatgtccaagtgtaggttgttggcatttattctgcctggtgttctcggagcttcctgga

SEQ ID NO: 560299 - DNA, 332 bp, Homo sapiens
acaagtttcttgaatttttatttttctgaggaaggccttaattctccttcacttttgaagggtgttttcagtgggtacagaaacttaggttggtgggtttttttctgtcaatatttkgaatttttcatttcactgtcttcttgctttcacagtttctgcaatgttgaatgcagttcttatctttgtgtctctgtaggtaaggtgttttctgccccacctctggtttctttcagagttttcctttatcttttatttcatagagtttgaaaattatatgtccaagtgtaggttgttggcatttattctgcctggtgttctcggagcttcctgga

SEQ ID NO: 560300 - DNA, 292 bp, Homo sapiens
ttgaatgcagttcttatctttgtgtctctgtaggtaaggtgttttctgccccacctctggtttctttcagagttttcctttatcttttatttcatagagtttgaaaattatatgtccaagtgtaggttgttggcatttattctgcctggtgttctcggagcttcctggatctttggtttggtgtctgacattaatactggaagttctcagaaatggttgttgcagaactttcttctatttcttctcctcctggtattctcattactctstttcaccttttgtagttgtccca

SEQ ID NO: 560301 - DNA, 635 bp, Homo sapiens
aaaattattaatatctacaggattgatacagatatttwaattttaaacaaatatttttcactaatgtgaccagtatttatgtcctatttcattaaacagacatttcaagattttttagagttaatttttaaaaattaagtatcacaaatatttctgaagtactaccttaaaaaataaaactctttcctagcttttcatatagttaaacattttcataatgactaaaaagataaaaataaattaacaaccataattaatttagaattctactttttatataagatgaaatactatataaaatgtccagaaaatctagtgttaatgaggctgtgcagcctggacatttgatgtctcatctgtgggaatgtgaactaacccaaccattctgaataattattggctctgtgtgttaacagtctagagtcctgaaacaaggatcttaattctaaaataaaatcctattctaagaatataccaagggttgataatcaaggaagtttcaaagttatagagaagaaccttcatcctagcattatatatgtaatcatccatataaaccagatagtgttgaatgaaactgcagaaaaacaaagagcctacagaatatgtttctctttgtgtacaactgtaaatgt

SEQ ID NO: 560302 - DNA, 567 bp, Homo sapiens
ggaagtttcaaagttatagagaagaaccttcatcctagcattatatatgtaatcatccatataaaccagatagtgttgaatgaaactgcagaaaaacaaagagcctacagaatatgtttctctttgtgtacaactgtaaatgtacacatctatccatgtaaaattttacatctcaggaggataggtaccaacatgttaacatgctatatctrtaagataagaaattttactttcctacaatgtgatacacacacacacacacacactctctcaaacacacatacacacacaccgaggatatatacacacacaaatatatatataaacatacatgtttatataggtgcacacacacatacatatacacagatggtcaacttataatggttcaatttatgattttttttttactttatgatgaagcaaaagtgatagctttgaatagaatataaccattctgcttttcactttcagtacaatattcaacaaattacataaaatatccaatactttattataaagtgggttttgtattcaacgattttgcccaattgtctgctgatgtaa

SEQ ID NO: 560303 - DNA, 567 bp, Homo sapiens
ggaagtttcaaagttatagagaagaaccttcatcctagcattatatatgtaatcatccatataaaccagatagtgttgaatgaaactgcagaaaaacaaagagcctacagaatatgtttctctttgtgtacaactgtaaatgtacacatctatccatgtaaaattttacatctcaggaggataggtaccaacatgttaacatgctatatctgtaagataagaaattttactttcctacaatrtgatacacacacacacacacacactctctcaaacacacatacacacacaccgaggatatatacacacacaaatatatatataaacatacatgtttatataggtgcacacacacatacatatacacagatggtcaacttataatggttcaatttatgattttttttttactttatgatgaagcaaaagtgatagctttgaatagaatataaccattctgcttttcactttcagtacaatattcaacaaattacataaaatatccaatactttattataaagtgggttttgtattcaacgattttgcccaattgtctgctgatgtaa

SEQ ID NO: 560304 - DNA, 541 bp, Homo sapiens
gattttgcccaattgtctgctgatgtaagtgttctgagcacattaaakgtatgccaggctaagctgtgatattcagtaagttaggtattaaatacatttttaacttactgtattttcaatttataatcagcttatcaagacttaaccccattgtacattgaaaagcatttgtattgcattaaacatgttatataatatttttaattgaaattactggcaacttttgaaaaaatgcaatgaaataatgtgctttgctattggttaaaatgtttttgggcagggtcagtggcttacacctgtaatcccagcactttggtaggctgaactgggcagatcacttgaggtcaggagtttgagaccagcctggcaaacagggtgaaaccccatctctactaaaaatacaaaaattatctgagtgtagtggcatgtgcctgtaatcccagctactagggaggctgaggtgtgagaattgcttgaactatgcaagcagaggttgcagtgagccaagatcatgccattgcactccagcctgggcaacaga

SEQ ID NO: 560305 - DNA, 541 bp, Homo sapiens
gattttgcccaattgtctgctgatgtaagtgttctgagcacattaaaggtatgccaggctaagctgtgatattcagtaagttaggtattaaatacatttttaacttactgtattttcaatttataatcagcttatcaagacttaaccccattgtacattgaaaagcatttgtattgcattaaacatgttatataatatttttaattgaaattactggcaacttttgaaaaaatgyaatgaaataatgtgctttgctattggttaaaatgtttttgggcagggtcagtggcttacacctgtaatcccagcactttggtaggctgaactgggcagatcacttgaggtcaggagtttgagaccagcctggcaaacagggtgaaaccccatctctactaaaaatacaaaaattatctgagtgtagtggcatgtgcctgtaatcccagctactagggaggctgaggtgtgagaattgcttgaactatgcaagcagaggttgcagtgagccaagatcatgccattgcactccagcctgggcaacaga

SEQ ID NO: 560306 - DNA, 541 bp, Homo sapiens
gattttgcccaattgtctgctgatgtaagtgttctgagcacattaaaggtatgccaggctaagctgtgatattcagtaagttaggtattaaatacatttttaacttactgtattttcaatttataatcagcttatcaagacttaaccccattgtacattgaaaagcatttgtattgcattaaacatgttatataatatttttaattgaaattactggcaacttttgaaaaaatgcaatgaaataatgtgctttgctattggttaaaatgtttttgggcagggtcagtggcttacacctgtaatcccagcactttggtaggctgaactgggcagatcacttgaggtcaggagtttgagaccagcctggcaaacagggtgaaaccccatctctactaaaaatacaaaaatyatctgagtgtagtggcatgtgcctgtaatcccagctactagggaggctgaggtgtgagaattgcttgaactatgcaagcagaggttgcagtgagccaagatcatgccattgcactccagcctgggcaacaga

SEQ ID NO: 560307 - DNA, 549 bp, Homo sapiens
cagaatagtcaactaattgaagaaaaaaacaaggagcaacttttaccaaatcgsacaacaaatagatggtatcaatgcttagttaattcaacatgatccacttctttatgattctcttatctttctacctatgttttcaagatggctacggcattcccagccttacaacttcatgtgacaaaatccaatggcaggaaataataagtgacggcattttggaacgttaaggaaaaactttaaggattggaaaacagggatgccatatgtccagtaacatgggatagccgctcctaattaaggattgctgtatgtcctgaatgactttctaatgtaatgaaggtgaataacctgctttgtttaattatacaatcccaaatgtaactgcctaagtgccaagtacttttgcatggttttaatatgccatgaattttgcaagaatgaaactactatgtatatgagaaaagacggtagattttttcatttagatactcatttcagagtctcaataggaaaaatagaacacacacaaactaagataatttaacatgg

SEQ ID NO: 560308 - DNA, 505 bp, Homo sapiens
gagaaaagacggtagattttttcatttagatactcatttcagagtctcaataggaaaaatagaacacacacaaactaagataatttaacatgggtttatttccaaagagactacttacgaaaatttcaggggagaagggtgaaggaatcacagaaatcacaccccacaataactctgggttagtagcagcaggcagagttctggggagtaaactgccctgatcacrcaaggaaacactaattttcttatgaaaaagattggtcaaggagacctagcagagagggagtttaggcaataacccccaatcccatttcctccttccctttaatctcatgaacatgcatagaaggcaatgagcaagggaaccgattgagatattcaatatggtccattccacttggacaaaagccagtaaataggggagtataacaggggacaagggccaaacagaaagtatctattacatttaccaatgcagatcaatcatgtcaacaatagaaatggc

SEQ ID NO: 560309 - DNA, 587 bp, Homo sapiens
caataaaagaaaaatactctgtccgaaagtcagcaacctcaaagatggaaggtggataagcccataaagatgagaaagaatctgtgtgagaacactgaaaactcaaaaagtcagaatgccttctttcctccaaatgactgtatcaactctccagcaagtgttcagaactgggctgaggctgagatgtctggaatgatacaagcagggttcaggatatgcgtaggaacaaagttcactgagtgaaagaagtatgttgtcatgcaatacaagtgagctaaaaatcattgtaaaacattgcaggagctaacagacaaaatagcaagtataaagaagacataaccgacctaatagagctgaaaagcacactacaagaattttcataatgsagtcacatggtgattatgtgtgactggattatgaaaattattgtagtgtgtgtgggcacccgagattgccctgtaagcaggtgtggccagacaggggtcctgggagaggcaagcagactaaggagcgctgaggtcacaccagttccatctcatgtgcaagaccacccagcagaatagaccaagctgaggaaagaatcccag

SEQ ID NO: 560310 - DNA, 587 bp, Homo sapiens
caataaaagaaaaatactctgtccgaaagtcagcaacctcaaagatggaaggtggataagcccataaagatgagaaagaatctgtgtgagaacactgaaaactcaaaaagtcagaatgccttctttcctccaaatgactgtatcaactctccagcaagtgttcagaactgggctgaggctgagatgtctggaatgatacaagcagggttcaggatatgcgtaggaacaaagttcactgagtgaaagaagtatgttgtcatgcaatacaagtgagctaaaaatcattgtaaaacattgcaggagctaacagacaaaatagcaagtataaagaagacataaccgacctaatagagctgaaaagcacactacaagaattttcataatgcagtcacatggtgattatgtgtgaytggattatgaaaattattgtagtgtgtgtgggcacccgagattgccctgtaagcaggtgtggccagacaggggtcctgggagaggcaagcagactaaggagcgctgaggtcacaccagttccatctcatgtgcaagaccacccagcagaatagaccaagctgaggaaagaatcccag

SEQ ID NO: 560311 - DNA, 587 bp, Homo sapiens
caataaaagaaaaatactctgtccgaaagtcagcaacctcaaagatggaaggtggataagcccataaagatgagaaagaatctgtgtgagaacactgaaaactcaaaaagtcagaatgccttctttcctccaaatgactgtatcaactctccagcaagtgttcagaactgggctgaggctgagatgtctggaatgatacaagcagggttcaggatatgcgtaggaacaaagttcactgagtgaaagaagtatgttgtcatgcaatacaagtgagctaaaaatcattgtaaaacattgcaggagctaacagacaaaatagcaagtataaagaagacataaccgacctaatagagctgaaaagcacactacaagaattttcataatgcagtcacatggtgattatgtgtgactgsattatgaaaattattgtagtgtgtgtgggcacccgagattgccctgtaagcaggtgtggccagacaggggtcctgggagaggcaagcagactaaggagcgctgaggtcacaccagttccatctcatgtgcaagaccacccagcagaatagaccaagctgaggaaagaatcccag

SEQ ID NO: 560312 - DNA, 539 bp, Homo sapiens
ttttctaacttggcaaagattatgtttttttttcatgaagaaatataggcatatttaaacactcaggatctgagaatttgaaatacatgaaacttagcaagtggtctttaagtagttttcatttctaaattatagtacataacattgaatgcyacagaaggaaagacaatgagggattacacataaatattgcctttatgatatccttccaaagaaaaccaagtgtccctgtgcttggactcataaagcagaaatgcttaccttgcttttatgtcactaacaaacaattgtgcctagtcatttaattattacacatttaagccatcttgagagtggagcccctagggaaaactacaaatggaaaattcattgatttttgattttgctttcctatggattaaatttaacactttcttgtaaatctctcccttaacagatcatatgtgataaatagttatccaactttctagatgtccacccagagctgcttccatatgaagaggtggaaacggattctgtgcatgatactggttaggatc

SEQ ID NO: 560313 - DNA, 539 bp, Homo sapiens
ttttctaacttggcaaagattatgtttttttttcatgaagaaatataggcatatttaaacactcaggatctgagaatttgaaatacatgaaacttagcaagtggtctttaagtagttttcatttctaaattatagtacataacattgaatgccacagaaggaaagacaatgagggattacwcataaatattgcctttatgatatccttccaaagaaaaccaagtgtccctgtgcttggactcataaagcagaaatgcttaccttgcttttatgtcactaacaaacaattgtgcctagtcatttaattattacacatttaagccatcttgagagtggagcccctagggaaaactacaaatggaaaattcattgatttttgattttgctttcctatggattaaatttaacactttcttgtaaatctctcccttaacagatcatatgtgataaatagttatccaactttctagatgtccacccagagctgcttccatatgaagaggtggaaacggattctgtgcatgatactggttaggatc

SEQ ID NO: 560314 - DNA, 539 bp, Homo sapiens
ttttctaacttggcaaagattatgtttttttttcatgaagaaatataggcatatttaaacactcaggatctgagaatttgaaatacatgaaacttagcaagtggtctttaagtagttttcatttctaaattatagtacataacattgaatgccacagaaggaaagacaatgagggattacacataaayattgcctttatgatatccttccaaagaaaaccaagtgtccctgtgcttggactcataaagcagaaatgcttaccttgcttttatgtcactaacaaacaattgtgcctagtcatttaattattacacatttaagccatcttgagagtggagcccctagggaaaactacaaatggaaaattcattgatttttgattttgctttcctatggattaaatttaacactttcttgtaaatctctcccttaacagatcatatgtgataaatagttatccaactttctagatgtccacccagagctgcttccatatgaagaggtggaaacggattctgtgcatgatactggttaggatc

SEQ ID NO: 560315 - DNA, 582 bp, Homo sapiens
actattgttttccgttttttaactgtggcaaaacacactcaacaatttgcatcttaaccactgttaagtatacaattcagtgtcattaaatgtattcacaatgttgtgcaagcatcaccaccacccatctccataattctttttgtcttgtaaaattgaaatcctgtacccattaaaaagtgactccccattccccgccctcccagggcaactacagctttactttctgtcttgatgaatcatacaatatcaaatggaatttttaagatatttaaaatmttttgtctggaagtgaagtggaagttaatatcaatggctatgccttcagtgagttctcagaccatattacaatgtagttaactatttatcttttattacgttctagacctattatttctttctggcacaaaaatatcttctttgtagattatggcatttacctctatctccacacctttttgtttctgtcatccacagatcatcagcctcttgcttagtctccatttaatgacaatttctatttagtatacaacagtccttccccctgcaatgcaatttcgtcactctgaaaagctctgactc

SEQ ID NO: 560316 - DNA, 582 bp, Homo sapiens
actattgttttccgttttttaactgtggcaaaacacactcaacaatttgcatcttaaccactgttaagtatacaattcagtgtcattaaatgtattcacaatgttgtgcaagcatcaccaccacccatctccataattctttttgtcttgtaaaattgaaatcctgtacccattaaaaagtgactccccattccccgccctcccagggcaactacagctttactttctgtcttgatgaatcatacaatatcaaatggaatttttaagatatttaaaatattttgtctggaagtgaagtggaagttaatatcaatggctatgccttcagtgagttctcagaccatattrcaatgtagttaactatttatcttttattacgttctagacctattatttctttctggcacaaaaatatcttctttgtagattatggcatttacctctatctccacacctttttgtttctgtcatccacagatcatcagcctcttgcttagtctccatttaatgacaatttctatttagtatacaacagtccttccccctgcaatgcaatttcgtcactctgaaaagctctgactc

SEQ ID NO: 560317 - DNA, 335 bp, Homo sapiens
gtctccatttaatgacaatttctatttagtatacaacagtccttccccctgcaatgcaatttcgtcactctgaaaagctctgactctggctamtggtctctgttatgtactcatccctagagccatgtcttcaaatatttctcagaacttcttcacatctaaaaatctaggattaatttattgctctctgattatattcttctggtatttcaagtatcctgtataacttcttcatctgcccttgcttttcttctacatcaagatgtcaagttcatggacttcccaattaatcattttaaaaatttatttcaagcctttatgagtcactacaatgt

SEQ ID NO: 560318 - DNA, 562 bp, Homo sapiens
aaatctctttagataaaacaggktatgagagtatataggaggcttattaactcagtgtggttggagaaaacaggttgaaaggagaaataggggagaaagttacaaagggaatcaaatgtgttagtagttgaggaaaaagcaaatattgaatacgacccatagatcttggataacccagtgtttggtagtagcttacataaaaggttgtgacaaaataaccagagctatgcggagaaaataataactgagtgttatatttcctctcagtagaaacctaaaaaaaaaaatgaaatcacatcctgatcttttaactgacctccacttatcttgctgcctggattggtatacatattcctgtgcctgaaaaattgctcaacacttttgaaaggttgtttctcactgttacacccaggcatttctgctaacaccagctgagttgtaaggggccctccaggaggcataggttgttctccttatcacatacattattttcatttatcaatttacccagaacatctaatgaaatattatggacaccaataacatgaatacaaatatagct

SEQ ID NO: 560319 - DNA, 550 bp, Homo sapiens
agtggtctaacttggggtgcactccaaactttgataaattaaagaccctgcttattccttgagtaatgctacactgacaactgatttagtgaatgccactgtgaaaataataaacctcttggtgaatatatttagacatgtcttgtaacctgtacacatcttaaccagggatgttacttggtctttctatgttcaggagtgtgtggagatagaaaagcatacaggattgtaattgtttcctgtgagactaacagaaaattcaagctagtgaagtatgcttatgcatggcacacttctcaccagcaattttaggaagttctacccaaaacccatatgtcttttgatatgtgggttaccttggagagagaaaaagaaactctgaaaacaagcatgaaatactttagaattttatctagagttggacttgtccgaaagcttttgtataaacttgcttgatgagcaactgttgtccactggtaccttcaccgtacaatccwcacacaaccaaacttcacaactggacacctaaatttgcactttgtttggtaaa

SEQ ID NO: 560320 - DNA, 613 bp, Homo sapiens
aaattttgcatgagagattatacactgcataagtataaaagaggaccagaaacaatggtggattagcaatttttgaaaagacaaaagcaggttatcatcaaatcaattgttaccaacaccccaattccacctctaggccagaaaattagccacttacccacgggaaaacaatgattgaagacaaagttcaccagtgaaagttggttatttttttccatccttgcatcaactaaaatgatatctactgttcctcttaacacttttcttactttcaaatatgtgggtatgcttaattagctgaggycatgttccatatgtacatctggctacaagggaaactgggaatgtgagccccaatacttatgtttgtagaatatttagaaatttgagaattccctccaaataaagagttttttaaaacattgttagacaaaaagtttgaattacaaaatgtggcagtagctcaggtctaactcaaatgcagggaaaaaaactattagctctaaaaaaattaaatacacatttgatggtaatgagaaacagaaaacaggcagaaatagtagaatattcaaccactgatgaagtattcgaccattgaataaagaaaattgca

SEQ ID NO: 560321 - DNA, 613 bp, Homo sapiens
aaattttgcatgagagattatacactgcataagtataaaagaggaccagaaacaatggtggattagcaatttttgaaaagacaaaagcaggttatcatcaaatcaattgttaccaacaccccaattccacctctaggccagaaaattagccacttacccacgggaaaacaatgattgaagacaaagttcaccagtgaaagttggttatttttttccatccttgcatcaactaaaatgatatctactgttcctcttaacacttttcttactttcaaatatgtgggtatgcttaattagctgaggtcatgttccatatgtacatctggctacaagggaaactgggaatgtgagccccaatacttatgtttgtagartatttagaaatttgagaattccctccaaataaagagttttttaaaacattgttagacaaaaagtttgaattacaaaatgtggcagtagctcaggtctaactcaaatgcagggaaaaaaactattagctctaaaaaaattaaatacacatttgatggtaatgagaaacagaaaacaggcagaaatagtagaatattcaaccactgatgaagtattcgaccattgaataaagaaaattgca

SEQ ID NO: 560322 - DNA, 613 bp, Homo sapiens
aaattttgcatgagagattatacactgcataagtataaaagaggaccagaaacaatggtggattagcaatttttgaaaagacaaaagcaggttatcatcaaatcaattgttaccaacaccccaattccacctctaggccagaaaattagccacttacccacgggaaaacaatgattgaagacaaagttcaccagtgaaagttggttatttttttccatccttgcatcaactaaaatgatatctactgttcctcttaacacttttcttactttcaaatatgtgggtatgcttaattagctgaggtcatgttccatatgtacatctggctacaagggaaactgggaatgtgagccccaatacttatgtttgtagaatatttagaaatttgagaattccctccaaataaagagttttttaaaacattgttagacaaaaagtttgaattacaaaatgtggyagtagctcaggtctaactcaaatgcagggaaaaaaactattagctctaaaaaaattaaatacacatttgatggtaatgagaaacagaaaacaggcagaaatagtagaatattcaaccactgatgaagtattcgaccattgaataaagaaaattgca

SEQ ID NO: 560323 - DNA, 367 bp, Homo sapiens
tgcatcaaggcaacttcacacctgatgacacttcccagtctgtgcaaaattaggtgtctacgagtaaagtggtgagttttactagcttgaggaataagagcacagagttccaggctgacagaaaagaagaactgggaaatttgaatgacatgggaggaaatctcacaaaactgaaagtcacagaggagaatgtcacagagtaaaaatctaaaatcagcacttaaacttcattcagatatatgatggctgctacatttcacattcataaaaagagactccatagaatccagcagaaaacaacagctaaattgctagwacagagcagagatttcaaccattgcatatagctcaggagtgaaggtttggt

SEQ ID NO: 560324 - DNA, 630 bp, Homo sapiens
caaaacactgtaatcataaaaagtatgctttctgaccataatgaaaatgagttgaaatggktaaaaacaagctacccaggaaagtctacactattggaaattttaaatacaccttaaaatgccctttagctcaatgaagaaatcataagaaacacctttaaatacattgaactgaatacaaataaaaatatactatatcaaaatgtatgggataaagttaagcagacccagattaaattttttgtataaatgcttattctagaaaagagaagttcaaaacaagtgaactaattttctaccttaaaaagaaaatctaaaacaagagagcaaattaagtccaaaacaagtagaagaaaggaaataaaacagaaattagaaatcaatgagacagaaaacagaaacaggagaaaatcaacatggccaaaagttagttctgtgagaaagaaagaaaacgcaaattataaatatcagggattaatgagattgtacagttgtagacacaagagacattaacaagataatggaatattgtgaaacattttatacaaattttcattacttggatgaaagggtgaattccttgaaaaaaaacttataaaaaaattcacaagattaaatggaacatatgaa

SEQ ID NO: 560325 - DNA, 630 bp, Homo sapiens
caaaacactgtaatcataaaaagtatgctttctgaccataatgaaaatgagttgaaatgggtaaaaacaagctacccaggaaagtstacactattggaaattttaaatacaccttaaaatgccctttagctcaatgaagaaatcataagaaacacctttaaatacattgaactgaatacaaataaaaatatactatatcaaaatgtatgggataaagttaagcagacccagattaaattttttgtataaatgcttattctagaaaagagaagttcaaaacaagtgaactaattttctaccttaaaaagaaaatctaaaacaagagagcaaattaagtccaaaacaagtagaagaaaggaaataaaacagaaattagaaatcaatgagacagaaaacagaaacaggagaaaatcaacatggccaaaagttagttctgtgagaaagaaagaaaacgcaaattataaatatcagggattaatgagattgtacagttgtagacacaagagacattaacaagataatggaatattgtgaaacattttatacaaattttcattacttggatgaaagggtgaattccttgaaaaaaaacttataaaaaaattcacaagattaaatggaacatatgaa

SEQ ID NO: 560326 - DNA, 630 bp, Homo sapiens
caaaacactgtaatcataaaaagtatgctttctgaccataatgaaaatgagttgaaatgggtaaaaacaagctacccaggaaagtctacactattggaarttttaaatacaccttaaaatgccctttagctcaatgaagaaatcataagaaacacctttaaatacattgaactgaatacaaataaaaatatactatatcaaaatgtatgggataaagttaagcagacccagattaaattttttgtataaatgcttattctagaaaagagaagttcaaaacaagtgaactaattttctaccttaaaaagaaaatctaaaacaagagagcaaattaagtccaaaacaagtagaagaaaggaaataaaacagaaattagaaatcaatgagacagaaaacagaaacaggagaaaatcaacatggccaaaagttagttctgtgagaaagaaagaaaacgcaaattataaatatcagggattaatgagattgtacagttgtagacacaagagacattaacaagataatggaatattgtgaaacattttatacaaattttcattacttggatgaaagggtgaattccttgaaaaaaaacttataaaaaaattcacaagattaaatggaacatatgaa

SEQ ID NO: 560327 - DNA, 592 bp, Homo sapiens
aaatgggtaaaaacaagctacccaggaaagtctacactattggaaattttaaatacaccttaaaatgccctttagctcaatgaagaaatcataagaaacacctttaaatacattgaactgaatacaaataaaaatatactatatcaaaatgtatgggataaagttaagcagacccagattaaattttttgtataaatgcttattctagaaaagagaagttcaaaacaagtgaactaattttctaccttaaaaagaaaatctaaaacaagagagcaaattaagtccaaaacaagtagargaaaggaaataaaacagaaattagaaatcaatgagacagaaaacagaaacaggagaaaatcaacatggccaaaagttagttctgtgagaaagaaagaaaacgcaaattataaatatcagggattaatgagattgtacagttgtagacacaagagacattaacaagataatggaatattgtgaaacattttatacaaattttcattacttggatgaaagggtgaattccttgaaaaaaaacttataaaaaaattcacaagattaaatggaacatatgaagtaattgacatttatt

SEQ ID NO: 560328 - DNA, 429 bp, Homo sapiens
tatgggataaagttaagcagacccagattaaattttttgtataaatgcttattctagaaaagagaagttcaaaacaagtgaactaattttctaccttaaaaagaaaatctaaaacaagagagcaaattaagtccaaaacaagtagaagaaaggaaataaaacagaaattagaaatcaatgagacagaaaacagaaacaggagaaaatcaacatggccaaaagttagttctgtgagaaagaaagaaaacgcaaattatamatatcagggattaatgagattgtacagttgtagacacaagagacattaacaagataatggaatattgtgaaacattttatacaaattttcattacttggatgaaagggtgaattccttgaaaaaaaacttataaaaaaattcacaagattaaatggaacatatgaagtaa

SEQ ID NO: 560329 - DNA, 592 bp, Homo sapiens
aaatgggtaaaaacaagctacccaggaaagtctacactattggaaattttaaatacaccttaaaatgccctttagctcaatgaagaaatcataagaaacacctttaaatacattgaactgaatacaaataaaaatatactatatcaaaatgtatgggataaagttaagcagacccagattaaattttttgtataaatgcttattctagaaaagagaagttcaaaacaagtgaactaattttctaccttaaaaagaaaatctaaaacaagagagcaaattaagtccaaaacaagtagaagaaaggaaataaaacagaaattagaaatcaatgagacagaaaacagaaacaggagaaaatcaacatggccaaaagttagttctgtgagaaagaaagaaaacgcaaattataaatatcagggattaatgagattgtacagttgtagacacaagagacattaacaagataatggaatattgtgaaacattwtatacaaattttcattacttggatgaaagggtgaattccttgaaaaaaaacttataaaaaaattcacaagattaaatggaacatatgaagtaattgacatttatt

SEQ ID NO: 560330 - DNA, 225 bp, Homo sapiens
cattcaagataaaaagattagcaatgrtatctaagttgaaaaaatcaccccgcaggaagacaaaagtctcacaaaaggatatttaagctagccaacactttgaaattcaggcagagatcgtgctttctgggtgaactaaagtagcaagaacaaagtagaggctccaattctaggaaaaatgggccctaataaggtttacaatccagaaactcaagatatccagac

SEQ ID NO: 560331 - DNA, 524 bp, Homo sapiens
aggatgcagtctctgctttcaaggcagcagcagtacctggattactaagccaatccccaacacaatcataaacacaaatttgattgaggaagaagcttgcccaccagaagatttaggttattacaaggtagaatgtgatagagaaaacgagcatgggactggaaacaaaaggaggtagccccatgattacaactggaatatatctgtcagcgatggtgcggaaataagactgaagagagagatccttaaaccccacgtgccttacatcaggactaatcctggacacaggctggaaagcatagcctacaggtggtgaggsaagaggagtgggctcagctgtgagaaggagaaggaaatatggctgaaaaccagataggggtcttgaaatcacacagaggatttgggcctttgctgctgtctgccagcagctgccagtagttctcacactttggctggcaacaaaatcacctgggacagtggtgcggaagcgcggggagtgatgtaaaaccacaagtgaccaggca

SEQ ID NO: 560332 - DNA, 524 bp, Homo sapiens
aggatgcagtctctgctttcaaggcagcagcagtacctggattactaagccaatccccaacacaatcataaacacaaatttgattgaggaagaagcttgcccaccagaagatttaggttattacaaggtagaatgtgatagagaaaacgagcatgggactggaaacaaaaggaggtagccccatgattacaactggaatatatctgtcagcgatggtgcggaaataagactgaagagagagatccttaaaccccacgtgccttacatcaggactaatcctggacacaggctggaaagcatagcctacaggtggtgagggargaggagtgggctcagctgtgagaaggagaaggaaatatggctgaaaaccagataggggtcttgaaatcacacagaggatttgggcctttgctgctgtctgccagcagctgccagtagttctcacactttggctggcaacaaaatcacctgggacagtggtgcggaagcgcggggagtgatgtaaaaccacaagtgaccaggca

SEQ ID NO: 560333 - DNA, 524 bp, Homo sapiens
aggatgcagtctctgctttcaaggcagcagcagtacctggattactaagccaatccccaacacaatcataaacacaaatttgattgaggaagaagcttgcccaccagaagatttaggttattacaaggtagaatgtgatagagaaaacgagcatgggactggaaacaaaaggaggtagccccatgattacaactggaatatatctgtcagcgatggtgcggaaataagactgaagagagagatccttaaaccccacgtgccttacatcaggactaatcctggacacaggctggaaagcatagcctacaggtggtgagggaagaggagtggrctcagctgtgagaaggagaaggaaatatggctgaaaaccagataggggtcttgaaatcacacagaggatttgggcctttgctgctgtctgccagcagctgccagtagttctcacactttggctggcaacaaaatcacctgggacagtggtgcggaagcgcggggagtgatgtaaaaccacaagtgaccaggca

SEQ ID NO: 560334 - DNA, 488 bp, Homo sapiens
ttggtaaatatcccagtgagttgaaggtttgaatccatctcacttaactagcttgatggatgcatttctaaacctatacaacccactcctgtgcttttaaaaaattaaagttagctgtagattgaggtgtcagtgacacagtttatagaacataacttagattgtcatctacattactgtaactataaataccaccctcagatggaagaatcagttttatcagtgaacatctctaattgaactataaatggtgtatgttttctggcttttacaagctcttggtctaacacaggggatatatgatgtaaaaattacaaagcaaggtcactcacggtggctcatgcctgtaatcccagcactttgggaggccaaggcgggyggatcacaaggtcaggagatcgagatcatcctggctaacatggtgaaaccccatctctactaaaaatacaaaaattagctgggtgtggtggcacacgactgtagtccca

SEQ ID NO: 560335 - DNA, 497 bp, Homo sapiens
gttaagaagaggaaaaaacaaaggcctcttggtgarcagtggtgacttaggcagtttcttagaaatattctagaagacatagtcatcttttaaaaaaaatagctacaaggatatgtctaagcagaagggaccatgggccaaattacgtgtagatttcgcattccaaatatggtaaagaagaagcaggaagctgggggtcctaaacaggccacacagaaatggacaaggaagaggccatcagcagcttgtggggacaagatgtcaagccccaaatgttaaacccaccaaccatcctccaaattctggctctgtttaacaaggctgtggtctgacactagatgctgcctcagtgactaaagcataatttcccgtctcctgggagtgttgacagctgactcctggcaacaatactcacagcacagtaaagttccttcatccaagttcatgtcccttctgaaggcatcccacatccgataactgcttggtacagaaatata

SEQ ID NO: 560336 - DNA, 519 bp, Homo sapiens
tcatttgaaggtgaaaactgctcatcaaaatccagtttaagctgagaaacaaagaactaaattttgcatgagagattatacactgcataagtataaaagaggaccagaaacaatggtggattagcaatttttgaaaagacaaaagcaggttatcatcaaatcaattkttaccaacaccccaattccacctctaggccagaaaattagccacttacccacgggaaaacaatgattgaagacaaagttcaccagtgaaagttggttatttttttccatccttgcatcaactaaaatgatatctactgttcctcttaacacttttcttactttcaaatatgtgggtatgcttaattagctgaggtcatgttccatatgtacatctggctacaagggaaactgggaatgtgagccccaatacttatgtttgtagaatatttagaaatttgagaattccctccaaataaagagttttttaaaacattgttagacaaaaagtttgaattacaaaatgtggcagta

SEQ ID NO: 560337 - DNA, 497 bp, Homo sapiens
gttaagaagaggaaaaaacaaaggcctcttggtgagcagtggtgacttaggcagtttcttagaaatattctagaagacatagtcatcttttaaaaaaaatagctacaaggatatgtctaagcagaagggaccatgggccaaattacgtgtagatttcgcattccaaatatggtaaagaagaagcaggaagctgggggtcctaaacaggccacacagaaatggacaaggaagaggccatcagcagcttgtggggacaagatgtcaagccccaaatgttaaacccaccaaccatcctccaaattctggctctgtttaacaaggctgtggtctgacactagatgytgcctcagtgactaaagcataatttcccgtctcctgggagtgttgacagctgactcctggcaacaatactcacagcacagtaaagttccttcatccaagttcatgtcccttctgaaggcatcccacatccgataactgcttggtacagaaatata

SEQ ID NO: 560338 - DNA, 553 bp, Homo sapiens
gatcaaaccatgtgtatgatttctaagatccctcgtgcagtatatatttgcactgtttataaatgacatcccyttgaattgaattcagtgcaattcaaaacagtaatttgtgggaaaaattagatatgcagatagcctggactctagagaggcacgcatcatttggagaataatagtgaaccggctggtctatgagggaagaaaacagagtgaatatagactattagtgaacaaggatattttcccatgtatattcaaattaaggtgaatttctttagagaattgtgccttagaaagaaaaagtatttccctatatttgagtcctcacaagttttcctacgatgagtgcttttgtgattattttgaataacaaagtaatatttaaagaaactctcttgccctgaatgtactttatgtcaattgatgttgcatatagagagcatcagagtcaagccacaagaaaaggaggaacataacttagcaaagacttagaggattagtcctaatagtgtgaaatcaaaagttcaagtgagggaataaatgcagcctttaa

SEQ ID NO: 560339 - DNA, 393 bp, Homo sapiens
ataatagtgaaccggctggtctatgagggaagaaaacagagtgaatatagactattagtgaacaaggatattttcccatgtatattcaaattaaggtgaatttctttagagaattgtgccttagaaagaaaaagtatttccctatatttgagtcctcacaagttttcctacgatgagtgcttttgtgattattttgaataacaaagtaatatttaaagaaactctcttgccctgaatgtactttaygtcaattgatgttgcatatagagagcatcagagtcaagccacaagaaaaggaggaacataacttagcaaagacttagaggattagtcctaatagtgtgaaatcaaaagttcaagtgagggaataaatgcagcctttaatgattactt

SEQ ID NO: 560340 - DNA, 393 bp, Homo sapiens
ataatagtgaaccggctggtctatgagggaagaaaacagagtgaatatagactattagtgaacaaggatattttcccatgtatattcaaattaaggtgaatttctttagagaattgtgccttagaaagaaaaagtatttccctatatttgagtcctcacaagttttcctacgatgagtgcttttgtgattattttgaataacaaagtaatatttaaagaaactctcttgccctgaatgtactttatrtcaattgatgttgcatatagagagcatcagagtcaagccacaagaaaaggaggaacataacttagcaaagacttagaggattagtcctaatagtgtgaaatcaaaagttcaagtgagggaataaatgcagcctttaatgattactt

SEQ ID NO: 560341 - DNA, 393 bp, Homo sapiens
taaacaagcaataagaaacttcctgtgacaacataataaattcaaaaagttctgtaactcagacaatttagatagaagtgaggactttggcctagacagccctgttcactctaaaggtggattaaacaaggaaaaakatattgatatcaaaaattcaatcaggaatttgattaaagcatttcattaaatgtgataatttcttagtatattatcttacatatgcaatattcatgtgtaacaaattaaatacaagtaaacatttgagcatattatctgcagcataatttacatattcagttttgcttacatgaaaacttcgatcttctcaataagaaaatttgtgaaatctttaattcctcatccccaggaatgtaaataaataaatataaatat

SEQ ID NO: 560342 - DNA, 393 bp, Homo sapiens
taaacaagcaataagaaacttcctgtgacaacataataaattcaaaaagttctgtaactcagacaatttagatagaagtgaggactttggcctagacagccctgttcactctaaaggtggattaaacaaggaaaaatatattgatatcaaaaattcaatcaggaatttgattaaagcatttcattaaatgtgataatttcttagtatattatcttacatatgcaatattcatgtgtaacaaattaaatacaagtaaacatttgagcatattatctgcagcataatttacatattcagttttgctyacatgaaaacttcgatcttctcaataagaaaatttgtgaaatctttaattcctcatccccaggaatgtaaataaataaatataaatat

SEQ ID NO: 560343 - DNA, 296 bp, Homo sapiens
aagtttgggcaggcggttgctggatacatgtcctcacagaagtgtattttgtgtaaggtcgctatggcctttgtgcaaggttgtggattttgtggtattttgtgatagtttgtatcaggcctagaagcacgagaaccctctcttcaaggccttctctgaatctatttktccaggttttttcttttctttttaaacattagtgacagttttgattctgataactttcatatcatgatccctaatttcaaaaaaaattaaacgtgtaacttatttatgatgtatttgataggcttgga

SEQ ID NO: 560344 - DNA, 296 bp, Homo sapiens
aagtttgggcaggcggttgctggatacatgtcctcacagaagtgtattttgtgtaaggtcgctatggcctttgtgcaaggttgtggattttgtggtattttgtgatagtttgtatcaggcctagaagcacgagaaccctctcttcaaggccttctctgaatctatttttycaggttttttcttttctttttaaacattagtgacagttttgattctgataactttcatatcatgatccctaatttcaaaaaaaattaaacgtgtaacttatttatgatgtatttgataggcttgga

SEQ ID NO: 560345 - DNA, 373 bp, Homo sapiens
catgcacctgtagtcccagctactcagggggctcaagtgaggattggttgggcctgggaggcagaggttgcagtgagccaagattgcaccattgcactacagtcttggtgacagagcaagaccctgtcttaaaaaaaataaacaaacaaatagaaaataagtagaaaaatggcagacctaaatccaaccttagcaatgattagttacaatgtaactggacaaatactctacttaagacagagactgccagacctgagaggaaggcaagacccaamaatatggcatccatagagacacaatttaaacacaaagacacaaagaaagtatgagaaaaaatatgctatgcaggcactaatcataaaaatatgctatc

SEQ ID NO: 560346 - DNA, 373 bp, Homo sapiens
catgcacctgtagtcccagctactcagggggctcaagtgaggattggttgggcctgggaggcagaggttgcagtgagccaagattgcaccattgcactacagtcttggtgacagagcaagaccctgtcttaaaaaaaataaacaaacaaatagaaaataagtagaaaaatggcagacctaaatccaaccttagcaatgattagttacaatgtaactggacaaatactctacttaagacagagactgccagacctgagaggaaggcaagacccaacaatatggcatccatagagacacaatttaaacacaaagacacaaagaaagtatgagaaaaaatatgctatgcagrcactaatcataaaaatatgctatc

SEQ ID NO: 560347 - DNA, 563 bp, Homo sapiens
gtatgatgttacaactataaattgtgcctcagagtgcacacaaagtacacacacacacagagcctcaaagtatgtgaatcaaaaacaacagaacaaaagcmggaaattgacaatccaaaattatagctggtgaattaatactgctctctcagtaactgatggaacacccagataaaaatataggaaaaatatggatctaaatgacaaaatcctgacccaaatggtacttggcagtaccaagatagactgtatgtcgatcgattgagaaaaggttcaaacctgaaatagtatacaaagtatgttgtctgaacatttgaaattaaattagaaaccaacaacaaattgatatccagaaaagcctcaaatgtctgaaaaccaagtaataaactttgaaataccctgagtcaaaaagtattcacaaggggaactggaatgtatttggaacaaacttgttataaaatctcatttctggtagactaaaggtgacaacttctttctctgctcctctctctgtgaggacaaattccccttaaaccttgaccagactactgacttatttggcc

SEQ ID NO: 560348 - DNA, 563 bp, Homo sapiens
gtatgatgttacaactataaattgtgcctcagagtgcacacaaagtacacacacacacagagcctcaaagtatgtgaatcaaaaacaacagaacaaaagcaggaaattgacaatccaaaattatagctggtgaattaatactgctctctcagtaactgatggaacacccagataaaaatataggaaaaatatggatctaaatgacaaaatcctgacccaaatggtacttrgcagtaccaagatagactgtatgtcgatcgattgagaaaaggttcaaacctgaaatagtatacaaagtatgttgtctgaacatttgaaattaaattagaaaccaacaacaaattgatatccagaaaagcctcaaatgtctgaaaaccaagtaataaactttgaaataccctgagtcaaaaagtattcacaaggggaactggaatgtatttggaacaaacttgttataaaatctcatttctggtagactaaaggtgacaacttctttctctgctcctctctctgtgaggacaaattccccttaaaccttgaccagactactgacttatttggcc

SEQ ID NO: 560349 - DNA, 563 bp, Homo sapiens
gtatgatgttacaactataaattgtgcctcagagtgcacacaaagtacacacacacacagagcctcaaagtatgtgaatcaaaaacaacagaacaaaagcaggaaattgacaatccaaaattatagctggtgaattaatactgctctctcagtaactgatggaacacccagataaaaatataggaaaaatatggatctaaatgacaaaatcctgacccaaatggtacttggcagtaccaagatagactgtatgtcgatcgattgagaaaaggttcaaacctgaaatagtatacaaagtatgttgtctgaacatttgaaattaaattagaaamcaacaacaaattgatatccagaaaagcctcaaatgtctgaaaaccaagtaataaactttgaaataccctgagtcaaaaagtattcacaaggggaactggaatgtatttggaacaaacttgttataaaatctcatttctggtagactaaaggtgacaacttctttctctgctcctctctctgtgaggacaaattccccttaaaccttgaccagactactgacttatttggcc

SEQ ID NO: 560350 - DNA, 583 bp, Homo sapiens
tcatctacataacaaggccacccttttgctagccaaggccaaactgaaggagtagtggcggtgacccaatgtgaagattctgccctgttcactacagaatcctgagtttggttcctaagtctagttctttctgtctgatatttgtgttacttttaaagcgtcagcattttgtcccagttatgatgtggtaataaaagattcaaaaggattttctttacaagttctatgattaaaagcttaactaaaagcaaatttcttttttttcttaattatactttaagttctggggtacatgtgcagaacatgcaggtttgytacataggtatacacatgccatggtggcttgctgcatccatcaacccatgatctacattagttatttctcctaatgccatccctctcctagccccccaccctgacaggccctggtgtgtgatgttccccttcctgtgtccatgtgttcccattgttcaactcccagttatgagtgagaacatgtggtgtttggttttctgttcttctgttatttagctgaaaatgatggtttccagcttcattcatgtcccagcaaatgacatgaatt

SEQ ID NO: 560351 - DNA, 566 bp, Homo sapiens
gccagtgccataaggaaaaccattctggggctcttgagaggggcaaagcatagtttgcatgtgggagaaatgttaatagtttgtggccagaggacaagctgtggtttattaaagactgctgcaggttcctactatgcttctcatcaagaggtagaatctaatcaccttccccccttgaatcatggctggtctcagtgatgagtgygactgggcagtgtggcaggagagatgctctggcacttctgaggggcgatcatgagaggccttacagcttctgcctgggcctcttggacacacaccctgggagaagccagacaaacctgactacctgacgctgccagactgggaagaagtccgtgctggccacaaagagagggctcggtgcctgctccatgtccccagccactagagtccttccagatgagaccaaggacatcatgaagcaaccaacccgcaccgccctgtccagtgtcttgacccagaaaattgtgacatgtaaaaagaataaattcctggtttaagccagtaaggttacgggtacattgttacatctcagataattaaaa

SEQ ID NO: 560352 - DNA, 602 bp, Homo sapiens
ggcaatttatattgagtattaggttaaaaatgcaagaatagagcatagttaatattttacgttaaagctaaaactataattgcctacttaaaattttcagttaattaggttgtcactttttgttcttaaccaagaaatcaattagtattagtcgataaacagttagaactgatgcacacatccgtttttccttactcattttaaacagctatctgaaataggaagygtaatataatctttaaagaatctgaaaacatgacagaaatgtttaaactataaacatatattgtatatgttagcatattgtatacattgcatattaacataagctagaatcattgacataaatttatataaacaaaaggtataaaatatgacaatgttcttcctgatttttgtctttgcatatttctttattggcccttgtcaaacgtgacccactaactcctgaatgctttctctctccccatggattcctaaggatgtcaccacagtgttggccagatgcacaggtcacaggggactgaatctcatcaccccacaaacataccattcaggttttgccaagaatgacactgtaaatgtaacaaagcttccgtgct

SEQ ID NO: 560353 - DNA, 583 bp, Homo sapiens
tcatctacataacaaggccacccttttgctagccaaggccaaactgaaggagtagtggcggtgacccaatgtgaagattctgccctgttcactacagaatcctgagtttggttcctaagtctagttctttctgtctgatatttgtgttacttttaaagcgtcagcattttgtcccagttatgatgtggtaataaaagattcaaaaggattttctttacaagttctatgattaaaagcttaactaaaagcaaatttcttttttttcttaattatactttaagttctggggtacatgtgcagaacatgcaggtttgctacataggtatacacatgccatggtggcttgctgcatccatcaacccatgatctacattagttatttctcctaatgccatccctctcctagccccccaccctgacaggccctggtgtgtgatgttccccttcctgtgtccatgtgttcccattgttcaactcccagttaygagtgagaacatgtggtgtttggttttctgttcttctgttatttagctgaaaatgatggtttccagcttcattcatgtcccagcaaatgacatgaatt

SEQ ID NO: 560354 - DNA, 583 bp, Homo sapiens
tcatctacataacaaggccacccttttgctagccaaggccaaactgaaggagtagtggcggtgacccaatgtgaagattctgccctgttcactacagaatcctgagtttggttcctaagtctagttctttctgtctgatatttgtgttacttttaaagcgtcagcattttgtcccagttatgatgtggtaataaaagattcaaaaggattttctttacaagttctatgattaaaagcttaactaaaagcaaatttcttttttttcttaattatactttaagttctggggtacatgtgcagaacatgcaggtttgctacataggtatacacatgccatggtggcttgctgcatccatcaacccatgatctacattagttatttctcctaatgccatccctctcctagccccccaccctgacaggccctggtgtgtgatgttccccttcctgtgtccatgtgttcccattgttcaactcccagttatgagtgagaacatgtggtgtttggttttctgttcttctgttatttwgctgaaaatgatggtttccagcttcattcatgtcccagcaaatgacatgaatt

SEQ ID NO: 560355 - DNA, 579 bp, Homo sapiens
aaaagcccagaagaaatcccattttgggtcactggctgcatggtagtaataccatacacataarggaagagaggaggatgtggctttcactttgaattttttgagcttaaggtaacttttgcatagctacaaagaagcattcaacagagagttaaacctatgatggaaagactgaagaggtccaagctgtagagaaacaggacggcaaaccacaaagggctgaatcagtcaaggagaactgcagggcgggatgaacagggaccagtggaacatttggataagctgttgagaagaaaggagaattcagagaaaaagaactgtcagtgaggtcataataggaactgttacagtgaactaaatatggcctgggaaggactctgtacttctagacttgagtccctgtggacaaactgaaacctaacttaataggtagaaagactgaaaacctaacttaggagtatgcacctgtaactatagctgagtcctggccaatcccaacagccaaacttctgccactcacacactgctgagtgttcagctgtgttcaaataaggcaaaagctgagcactgtaaccagtc

SEQ ID NO: 560356 - DNA, 579 bp, Homo sapiens
aaaagcccagaagaaatcccattttgggtcactggctgcatggtagtaataccatacacataaaggaagagaggaggatgtggctttcactttgaattttttgagcttaaggtaacttttgcatagctacaaagaagcattcaacagagagttaaacctatgatggaaagactgaagaggtccaagctgtagagaaacaggacggcaaaccacaaagggctgaatcagtcaaggagaactgcagggcgggatgaacagggaccagtggaacatttggataagctgttgagaagaaaggagaattcagagaaaaagaactgtcagtgaggtcataataggaactgttacagtgaactaaatatggcctgggaaggactctgtacttctagayttgagtccctgtggacaaactgaaacctaacttaataggtagaaagactgaaaacctaacttaggagtatgcacctgtaactatagctgagtcctggccaatcccaacagccaaacttctgccactcacacactgctgagtgttcagctgtgttcaaataaggcaaaagctgagcactgtaaccagtc

SEQ ID NO: 560357 - DNA, 497 bp, Homo sapiens
catcaaaatccagtttaagctgagaaacaaagaactaaattttgcatgagagattatacactgcataagtataaaagaggaccagaaacaatggtggattagcaatttttgaaaagacaaaagcaggttatcatcaaatcaattgttaccaacaccccaattccacctctaggccagaaaattagccacttacccacgggaaaacaatgattgaagacaaagttcaccagtgaaagttggttatwtttttccatccttgcatcaactaaaatgatatctactgttcctcttaacacttttcttactttcaaatatgtgggtatgcttaattagctgaggtcatgttccatatgtacatctggctacaagggaaactgggaatgtgagccccaatacttatgtttgtagaatatttagaaatttgagaattccctccaaataaagagttttttaaaacattgttagacaaaaagtttgaattacaaaatgtggcagta

SEQ ID NO: 560358 - DNA, 562 bp, Homo sapiens
gatgcagcttggccccagagctataatgttgtgaggagggtgacagagaaagatgttatctttaaaaaaaaatggccagrggcagtggctcacgcctgtaatcccaacacttggggaggctgaggcaggtggatcacctgaggtcaggagttcagggccagcctgaacaacaaggaaaaaccccgtctctactaaaaacacaaaattagctgggcatggtggggcatgcctctaatcccagctactcaggaggctggggcaggagaattgcttgaatctgggaggcagggggttgcagtaaaccgagatcgcgccattgcactccagcctgggcaacaagagggaaaatccacctcaagaaaagaaaagaataatagatttgcctataaggttttatgaaaaagtgggtgacatttggctttctctctttaaagaagattttcagaaaatattaaaaaataatgggagaaggagccaagctggccgaataggaacagctcgagtctacagctcccagcatgagcgacgcagaagacgggtgatttctgcatttccatttgag

SEQ ID NO: 560359 - DNA, 562 bp, Homo sapiens
gatgcagcttggccccagagctataatgttgtgaggagggtgacagagaaagatgttatctttaaaaaaaaatggccaggggcagtggctcacgcctgtaatcccaacacttggggaggctgaggcaggtggatcacctgaggtcaggagttcagggccagcctgaacaacaaggaaaaaccccgtctctactaaaaacacaaaattagctgggcatggtggggcaygcctctaatcccagctactcaggaggctggggcaggagaattgcttgaatctgggaggcagggggttgcagtaaaccgagatcgcgccattgcactccagcctgggcaacaagagggaaaatccacctcaagaaaagaaaagaataatagatttgcctataaggttttatgaaaaagtgggtgacatttggctttctctctttaaagaagattttcagaaaatattaaaaaataatgggagaaggagccaagctggccgaataggaacagctcgagtctacagctcccagcatgagcgacgcagaagacgggtgatttctgcatttccatttgag

SEQ ID NO: 560360 - DNA, 562 bp, Homo sapiens
gatgcagcttggccccagagctataatgttgtgaggagggtgacagagaaagatgttatctttaaaaaaaaatggccaggggcagtggctcacgcctgtaatcccaacacttggggaggctgaggcaggtggatcacctgaggtcaggagttcagggccagcctgaacaacaaggaaaaaccccgtctctactaaaaacacaaaattagctgggcatggtggggcatgcctctaatcccagctactcaggaggctggggcaggagaattgcttgaatctgggaggcagggggttgcagtaaaccgagatcgcgccattgcactccagcctgggcaacaagagggaaaatccacctcaagaaaagaaaakaataatagatttgcctataaggttttatgaaaaagtgggtgacatttggctttctctctttaaagaagattttcagaaaatattaaaaaataatgggagaaggagccaagctggccgaataggaacagctcgagtctacagctcccagcatgagcgacgcagaagacgggtgatttctgcatttccatttgag

SEQ ID NO: 560361 - DNA, 559 bp, Homo sapiens
ataacgtttcagtcagcaatagaccatatatacagtggtcccataagattataataatatatttttactgcagcttttctatgtttaggtgtgtttagatacacaaatattatacttgccattatattacaattgtctatggtattcagcatggtaacgtgctatgcaagtctgtagcctagaggcaataagctacaccttatagcctacatacacagtagtagactgtaacatgtaggttcgtgtaagtacactctatgatatttgcataatgatcagatcacctaatgacacatttctcagaatgcatcyccattgttaagcaacacataactatatatattattttacgtgtgtcattattgttagtcttcaaaaattcacatttggttttcatagcaaatagaaggctcagtcaccgtgttcatattctgaaatcaatgaaagcaatgtaactaaactcctatttatctttggcattaaaatataaaaagaaggccatttgcaatttctctatgcttcttcctacttttctgtaagtgccacttgtttataagcc

SEQ ID NO: 560362 - DNA, 638 bp, Homo sapiens
aattcatgtaattccagtccttgtaattttcacatcaactgtatgtatgaagaaatatgatccaattaaataatgtctacatacaggtaataaatggctgaggtaggcatgaacccagtgcttctgataaaaattcagtgttctttcagccatagcacactgyatccataactcattctgaaacttactattcataatcttcaattttctagtttggaattaaaagtcctttatgattttctttccattaatattgcattatcaataagcataagtcctttcttataggttccagttgtgcatccaacaaacactgaagttgcagccccacagctgccttggtgacacctttcctcctcctctcacaatgcctatcccctttactccaacccagtccctggagaccctggatccctctgccttcctggatccaatcttcaccccaagtaggtttctccctttccaatgtaagtattcaactgtgattctagattctttcagtcctgatattttctataatttatccagtcaacataataaagagatagaagctaagtcctgaaaagttgaaattcttttagattttggtaataggagtaaaaggtcgtttgggagaacagcttgagaatacacatata

SEQ ID NO: 560363 - DNA, 554 bp, Homo sapiens
gaagaaaaggagagggatattatgaaaatgtgatgttgaaatcagtgtaacaagcatagaattaatttgagtatataataaaaagtattaaaatatatattggaagtaaatgagtattctaatatgctaacttccatataacagttacaaaatttaaatggcttacagaattgtttagggatttggacctccagaaattggttaatattttcccttgcaaaaatcttcactgtggagtcaaggtatgattcagcaatgaaacagtctttctgattacttatgtaaggcgatcagtttgyttgtttttttccttactatatgtcttgttgagcaattatttatctaggaaccatcttacaacctatagtcaacccaatggaatttactaaatccatctaaagtcacatttttaaaaattattattattattattttttgagacggagtctcactctgttgcccaggctggagtgcagtggtgcgatctcagctcactgcaacctctgcctcctgggttcaagtgattcttctgcctcagcctcctggagtagctg

SEQ ID NO: 560364 - DNA, 510 bp, Homo sapiens
ggaaccattgagaagggggtctcaggttgatgacttattgttttttggaaatttaactaggtttttctatcccttctgtactattgaggggatgggggtctagtctctttttaggcggttggtggaattgtctgccaaactgtcaagtgatttgaattaacacatgcgttttttcaataaaatgacttcctttcccctaacttcacactgctggaccaacttagatagttgttatataaattaagccatctgcctggtattgtcatacaatgagtcaatgcctgagtgccctgtcctattggttttcattttcggtattattgtctcttagagaagttgataatatactctttttattgagtttgcaaactcttatttcrtagatttgttaaagacccattttaatttttaaaattacattactattcagactgttgcactacattgagcctttcgagtctaggacacatacattcaatgaacaaatgttaaaaaataaaataaaatcac

SEQ ID NO: 560365 - DNA, 596 bp, Homo sapiens
agcaagaggccggggatgggtctggggtctctccagagccctcttctctctctgtgccttcactctccttctctgacaggacttccgacatcttttctcattagaattaatggagaactatccccaaagctatgaagtcatagtgctctgaaattgctgaaacagaataatttctccttcattctagggtgtaaatcttgaggaaagatgagaagctgtttcaggtatatcgataatgtcccagggaagagacccacatagacaattttcatttagcaacaagaaacttttaaaagaatgttacacaaagtatatcagccagtttctgttttggctttcartctttcaaatggcattttcttttttattgtcttttttccttctctaatttcataatcctattttcactctgtattttaagggcacacacttgatgtctggacatgacagaatttttaaagcaaaattttaaacaccgctttgcactgaattcaggatttctgtgaggggagggtggttatcttgattgcctttcatcagagaaatagaaaagagatgaaaattactaagaaaaatggttgttgaagtaaaagatt

SEQ ID NO: 560366 - DNA, 599 bp, Homo sapiens
tcaacatgaatttgtgaaaaagctgtatgtcaatggattttttaaaaattaaaaatgtattttgaatgaccctaagggagctggctctttaaaagcatcctaaggtaaagattttttttaaatgaagaatctttttataaagcaatgaacaatctctgattttataaatctwaattttcctatgggttttcttaaagtgaaatacaattataagaatacattttaagggtaacattaacaacctagaacccagtttgggttactaaaaataaaatgtcagtattatcaattgataactaccacagttttatactctgcaagtgtgtactgcatgatggttaaggaaaaacaaatttattttagaacaaagcaaaccagagtttaaagatcagggatttccttctttccccagtgctaattttcccagtgttaattttattatatctttaggtaagggtcttaaccaactgatgcctcagtttcttccacagagaatagttagagggatgctgtcatgaactaagggaagggcactgaatttttttttgccaatatcaaaagtgacatttccccatgatgttcaagactcaccaggtttc

SEQ ID NO: 560367 - DNA, 554 bp, Homo sapiens
gaatcccatccacagccggaggaaagagtgagcctagcctcatttccctcttcccttagcacacggatccgcccccacactttcagtaggacttgttttcattttagtttttaattttgttttcttctttctcgctcatttgtgggaggtaaaaattaaaacaattgaactcacagagataagagggtaggggagtgggcgggaaagtggggatggttaatgggtacaaaactatagttagaatgaataagctagaatttgatagcacaacaggatgactacagtcaacaataatttatagcacatttaaaaattaaaagagtataatcagaatgtttataacacaaagagatgataaatgcttgaggtgatggatgcaccatttaccctgatgtggttattaaacactgcatgcctgtatccaaatatcccacgtatcccataawtatatacacctaccatgtgcccataaaaagtaaaaaattaaaataaaattttaaagaatggttttaaagttctttcttctttttaaaaaaatatttagttgagatgtt

SEQ ID NO: 560368 - DNA, 382 bp, Homo sapiens
tttctttgtttaattagcatcagtgaattattaattcagcgcaaaaaagcatagctctttgtcatataaaaaatcatcaataccacaagagaccctcacaaaccaggatgatgataacttacttatatttgcacagtgctttgcaatttacaaggccctgttctgtacttcacggatttaactctgttaactgtgtggaatggagtttttgcccgggctggagccagcaggacagtacagagattttacttcctcaccatcaygccccaaattatggagaaacactccagatttaatcagaagtgcctgggacaagaagtcattaatattcaacaaattttaaaattgcattcccaaactatgtcaaactttttgagaattc

SEQ ID NO: 560369 - DNA, 349 bp, Homo sapiens
gctatatataacaagtcaaaacaaaataaaagccttctattaaatataatgtctaaccatagtatttctaccaaaaaaccacaattggagctattagtatgagtttaagaaattttatatgaatttgagtaatttcatacacagcayacacacaaagacatcaaaatgtgacagaagatccttacaaaactctgcacttgcagacttggaaggctcctggaactctgttgtagcagatctgctaatgacggtggtggattacaagtgtataagcaatttaattctccttactcttctccattttctacaatatatacctattacttttataagcgaaaacaaaattaaa

SEQ ID NO: 560370 - DNA, 514 bp, Homo sapiens
aactctttcctttataaattacccagtctggggtatgtctttattagcagcatgaaaacagactaatacaatgtgtatagaaaggtttcaaagaagcaaaaccttagtaagaatatttgtgtgatggggggaaatttttgtatatttcgtattttatatgcttgtaacatttaaagtatttggtctattagtgtaagaattgtataattccaatttaaaatggtatttcatataagcttaagattgtaaattgaaatgttgctaaatctatgtgcagtgttacaacatctataaaaactttatattaatgatattccataaatttaatttattaggtttaaaagagttaagtatatgggaagattttgtttcttatgcagagtatttaggaagaaaatggagactattacctttataaatgcagttaaaatatgttcaattaattaaatttgtaaagagsctaaatattttccaaaggttacctttaaagtagtgattaaatagaaaaacagag

SEQ ID NO: 560371 - DNA, 560 bp, Homo sapiens
ggctggagtgcagtggcatgatcacagctctctgcagcctccacttcctgggatcaaattatcctcccacctcaccctcccaagtagctgggaccacaggtgagtgccaccaacccagctaattttttttttaatgcagagattgtggtctctgtgtgtttcccagrccagtttcaaactcctgggctcaagtaatcttcccaccttggcctcccaaagttctgggattgctggagtgagccactgtgctcagccactaattttttttttcacagatggggtattgctatgttgcccaggctgacctgcgattcttaggctcaagtgatcctcccatctcagcctctcaagtagctgggacaacaattagcatcactgtgcccagctaaactatcccagtttttacaggtaaagaaaccaaacccatgccaggtgtggtggctcacacctgtaatcctagcaatttgggaggctgaggcaggcatatcacctcgggtcaggagttcaagaccagcctggtcaacatggcaaaaccctatctgtatacaaaaattagccag

SEQ ID NO: 560372 - DNA, 621 bp, Homo sapiens
ggtcagtttcctaaactacaaaatgggaaggcaacagaacggcctcaaagagttgtgaggacagtgaaaaacctatgtgtacactaaggagaagctacctggcaacaggaagtattcagtcagtgtcagctgcttatctagtgcaagggttcacagcacaytccagggatatgacaaaggcaacattcactgatgtgcttttgtctgtgcatgtgtactatatatagtagggaaaatatatacatacatataaaatattaaaattttgcaaaagatgatattgaacaacagtcatctttaggaagaacctgcttctattacatactctcctaactttcaaaaatgttaccctaaatccaactccaacttataggaaataggacaaaggacatgctaaaccacatgtgggtaataatcagcaaaatccagctagtgggaaatacaaacaaacaacttgatttactttaccaaataaattttgagggaaaaaaaagagagaaaaatggagggttgactatgaggcattggtgtttggagccttattagtagcctgattcaaacaaaactttcttttaattaggacactataagaaaactggaagtttaaacagtggctgaaaa

SEQ ID NO: 560373 - DNA, 418 bp, Homo sapiens
taggttcggccttaaacagtttttttctatctacataaattattcakcaagatattctaggccaggcgcagtggctcatgcttgtaatcccagcactttgggaggccgtggatggatcccctgaggtcaggagttcgagaacagcctggtcaacatggtaaaactccgcctctactaaaaatacaaaaattagccgagcgtggtggcacatctcttaattccagctacttgggaggctgaggcaggacaatcgcttgaacccgggttgcagtgagctgggatcacaccactacactctgtcctgggtgacagagtaagatttggtctcagaaaaaaaaaaaaaagatattctaaagctgtgcagatcataggaaaagttctattttacagaactgtcaccacactaagccttgaattc

SEQ ID NO: 560374 - DNA, 415 bp, Homo sapiens
tggaattcagttataggttcggccttaaacagtttttttctatctacataaattattcatcaagatattctaggccaggcgcagtggctcatgcttgtaatcccagcactttgggaggccgtggatggatcmcctgaggtcaggagttcgagaacagcctggtcaacatggtaaaactccgcctctactaaaaatacaaaaattagccgagcgtggtggcacatctcttaattccagctacttgggaggctgaggcaggacaatcgcttgaacccgggttgcagtgagctgggatcacaccactacactctgtcctgggtgacagagtaagatttggtctcagaaaaaaaaaaaaaagatattctaaagctgtgcagatcataggaaaagttctattttacagaactgtcaccac

SEQ ID NO: 560375 - DNA, 557 bp, Homo sapiens
ctggctgacactcctccctagagcccctctagagcccccccaggcagagattacagagcagaggagcgaaggagcacagttcacagcacttccagtgtcttggagaaggggaagtggtggaaattaccactctctcttctccaactttgctcaagggtgtcacatcagcacacatcactgagacctctagtccaggaaagtcaaggtttgggggaataaaaagtagctctcctcataaaaacattgtggatcctgcctctgtgttctaagaataatctgaaacaatagtccatgaagtatgcctcatgtatttgtcaaacagtgtttcttaaaaacaccaaaatagatgcactgctcccaaaaataacagggaaaggcactgaaggccttgagcctctccccgacagcaagcaccatgtcctgtgcggtaccttgtacagttcactggatcctcacatgrtcccaggtgggtatgtctagatgaaggaactaaggatcagagattgcaagtaattctctccaggtcaattcattcttgaggaacaacggtctgaatt

SEQ ID NO: 560376 - DNA, 530 bp, Homo sapiens
gagattaagtttctagtacatgaaaatttgagaaacacattcaaaccatagcaatggttgtacataaatttatatatagaaaaacttttcctgaaaaataagtccctcattgtcaatcagttgagggaaatacagaggagagcaaagagccaractcagaagtcaaacccttggcttgaaattctcaaaccaccatttaccagctgaatgacctgagacaaattacaaatctttcctgaacctcagtttttatattcatgaatgagaggcaataggactgtattctaccacttttggaaagactagaaccaatatattccctgttccccattgtttgacatatagtatccactgacacatctcagctcaattctgaggagaaaaacaactaccctatgagcaaatggagtttttggagttttcagtaaggctgtttataacacctcatgtcctttggtatcatgctcccccaaaaaggtttatttttttaaatctagaaattaggatcgtgtttataagagaaactctaa

SEQ ID NO: 560377 - DNA, 530 bp, Homo sapiens
gagattaagtttctagtacatgaaaatttgagaaacacattcaaaccatagcaatggttgtacataaatttatatatagaaaaacttttcctgaaaaataagtccctcattgtcaatcagttgagggaaatacagaggagagcaaagagccaaactcagaagtcaaacccttggcttgaaattctcaaaccaccatttaccagctgaatgacctgagacaaattacaaatctttcctgaacctcagtttttatattcatgaatgagaggcaataggactgtattctaccrcttttggaaagactagaaccaatatattccctgttccccattgtttgacatatagtatccactgacacatctcagctcaattctgaggagaaaaacaactaccctatgagcaaatggagtttttggagttttcagtaaggctgtttataacacctcatgtcctttggtatcatgctcccccaaaaaggtttatttttttaaatctagaaattaggatcgtgtttataagagaaactctaa

SEQ ID NO: 560378 - DNA, 639 bp, Homo sapiens
aattgagtagtttagaagcagaaatagaagagaatggagaaaattcaaagatacaaattcacagagttagaatgccaacttttttggttctaagatactatatttaattaattataagacatacacttttcacattttaatatatttgactatggaatggtccttaaaatttccatcatctcatagtcgctgttgactatgtgatgactgtgacacagttgtcattgcctgcacrtgtgtaagcttgctacttattcctatgctttattggataacaacatctcttaaatatttcaaccaataaaccattaatgggaattggaggaagaaatatgaataaaggttgtatgtgaatgccttctcctgacaggtggataaagcttctataaaattaaaaacaaaaatgaaaaatgtgtcagcattaaaacatatacagcaattattactaacttggaagaaaatcttggggacaataatggaatactttaaaaaaaaagtaccgtcaatactttccatgacatagaagatgatattgcatgaaaaaaacacaggtatccagaaatattagtcagaaattgatttttaaaatttaacggtgaattcatagaatttttgaaatgatgtaaccaatttccttac

SEQ ID NO: 560379 - DNA, 639 bp, Homo sapiens
aattgagtagtttagaagcagaaatagaagagaatggagaaaattcaaagatacaaattcacagagttagaatgccaacttttttggttctaagatactatatttaattaattataagacatacacttttcacattttaatatatttgactatggaatggtccttaaaatttccatcatctcatagtcgctgttgactatgtgatgactgtgacacagttgtcattgcctgcacatgtgtaagcttgctacttattcctatgctttattggataacaacatctcttaaatatttcaaccaataaaccaytaatgggaattggaggaagaaatatgaataaaggttgtatgtgaatgccttctcctgacaggtggataaagcttctataaaattaaaaacaaaaatgaaaaatgtgtcagcattaaaacatatacagcaattattactaacttggaagaaaatcttggggacaataatggaatactttaaaaaaaaagtaccgtcaatactttccatgacatagaagatgatattgcatgaaaaaaacacaggtatccagaaatattagtcagaaattgatttttaaaatttaacggtgaattcatagaatttttgaaatgatgtaaccaatttccttac

SEQ ID NO: 560380 - DNA, 359 bp, Homo sapiens
gccttctcactgtgtcctcacatggtgttagaagtgagcaagtttccttggacctattttataagggaactaatcccatttgtgagggcttttccctgaagttttagtcaactcctgaaaggccccatcttctaatatcatcacctggggcgttaggatttcaacatatgaattttgggaagacacaaagattcagaccacagcctacagggagagaggatttctgargatggtggtgcactgtgagtccacgcaggcctcctgggcataggatggagcaattctatctcacctcaggcctagcacaaagggcttcagtaaaccactggagtttccttcattaggattccatcccagga

SEQ ID NO: 560381 - DNA, 635 bp, Homo sapiens
caaccttgagttgatttttgtttagggtgagagatagggatccagtttcattcttcttcgtgtagctagccagttttcccagcaccatttattaaataggatgtcctttccccaacttatgtttgtcgaagataagttggttataagaatttggctttatttctgggttctctattctgttccattggtttatgtgtctatatcattaagatgttattttggtaaatacggccttgtagtataacttgaagtccagtaatgaggtgcttccagatgtgttctttttgcttaggattattttggctatttgtctcttttttttttttggttccatatgaattttaaggcttttcttctaaatctatgaaaaatgatgtttgtattttgatgggaattgcattgactctgtggatggttttgggcagtatggccattttcacaatattgattcttccaatccatgagcatgggwtgtgtttccatttgtttgtgtcatctatgaattctttcagcagtgctttgtagttctacttgtacagatctttcatctctttggttaaatacattcctaggttgttttttgtttgtttattttgttttgttttgttgcagctatcgtaaaagagattaagttc

SEQ ID NO: 560382 - DNA, 542 bp, Homo sapiens
taaaatagtattttcatatgtaaattacagaaaatacgcaagtatccactactcagcttaagtagtcctccctacctgatgtacttctgtgtttataataattctcattttttaaaaagtaataagatatcagtaaaccatatggttacatttgaatggctttgaattacatatcagtggtaatatattgcatcttactttgtacctgcatatttttcactcaaatgactgctctaagatttaycttgtattgatgtgtgtatcaatagtgtattcatttttattcctaagtgaaatacctttgtatggatacactacaatttatccaatattctttaatatacatttattgtttctagttttctttttgctgttccaaacaatcctgtaggctttaattttactaagtaattcaaaattatttttccaagtaattgtatcaatttattttcttcaggagtccatgggcttcctttaaatccacatattatcaatgcttgatgctgtttggcttcttaattttggatctacttaatgaatat

SEQ ID NO: 560383 - DNA, 447 bp, Homo sapiens
aaatgcaatttcatttcagctataaattttcacaaatacttttcctaatatttatactttaatttactgtgtaattagagtaaaaaatattctgagaggttttgttttytgttttttgggtttttttgtttgtttttgcttttttgtttgtttgtttttgcaaataggttctgataaattcctcagtgtgctagctaaaaaaaaaaaatcaatagtctgaatggtcatcacctggggctgctctgagccagtctgctgccctgcttgatacaaaaagtttggaaggtgaacagccttagcattatttgataaaaattaccataaaacactggaagggcaattcttagagtcattaaaatatttcaaaggaagaaattctattaagtctggatttctctaagtaatagcttgggctgtgtagtttcaagctttaattgcataaatatt

SEQ ID NO: 560384 - DNA, 158 bp, Homo sapiens
agattaaatgactatacaccttaactataatagaaagcatgttgatatgccaaattcatagagaagacagagtggtggtttcctctgaattgttctgaatatatttttctaggaccactgttaygatttaacttcatggactccattcctatttatat

SEQ ID NO: 560385 - DNA, 574 bp, Homo sapiens
aacactttgagtgactcactggtcagatgctgtaggtatttttttatttttatttttgctaaagctaaaaatacattaatcagttatgtctgtagatgttttgaagacctaataaagaatgaagaaaatattcatttgtatattaagcagttattattaggcctatatttctttttttagagacagggtctcactctgtcacccaggctggaatgcagtggcatgattctacctcactgcaatcgagaactcctgggttcaaatgatcctcctgcctcagccttccaagtagctagtactaccagccacaccaccatacctggctaattttttttattttaatttttttgtagagacaggtcttgctatattgtccaggctggttttgaactcttggcctcaagccatctttctgccttggcctcccaaaatgttgggattacaggcatgagccaccctaaccacctaggcttatatatttttttgctctattttataaataattattttagagtagaacagggaaataagaagtgttcgttatttttggcakagttgtgatgattcttgtgca

SEQ ID NO: 560386 - DNA, 565 bp, Homo sapiens
ttccaacttcattcttctttcttagttgttttggctatttgagatccyatcaaaatttgtatgaattttagattttttttctatttttgcaaaaatgccattgggtttgatgaggatatattgaatctatagatcattttaggtagtatggacatttaaaaagtactgtcttccaattggagagcatgggatatctttccatttacttctgtcttctttgatttcttttagcaatgttttgtgatgttcagtgtacaagtttttcacttctcaggtcaaatttattcctaagatttgtattcttgatgctataataaataaaattgttttcctaatttcctttttcaattgattactgtttgtgtatggaaatgcaactgatttttatggatttattttctatcctgagattttgatgaaattatttattagttgtgacagtttgtgtatgtgtgtatatgtgtaatctttgggggtttctaaatgcagttagccctctgtattgtgggttttgcatacatgaattcaaccaaacacagattgaaccctgtggatacgaagggcc

SEQ ID NO: 560387 - DNA, 447 bp, Homo sapiens
ctatccaaatatcctcttgcagattctacaaaaagagtgtttcaaaactgctctttgcaaagaaaggttcamctctgtcagtagagggcacacatcacaaacaagtttctgagaatgcttctgtctagtttttatgggaagatatttcctttttcaccatacgcctgaaagcgctccaaatgttcacttacagacactacaaaaagagtgtttcaaacctgctctgtgaaagggaatgctcaattctgtgacttgaatgcaaatatcacaaagtagtttctgacaatgctgctgtctgctttttatatgtaatcccgtttccaacgaaatcctcaaagctagcctaatacccacttgcatattccacaaaaagagtgtttcaaaactgctctctcaaaacgatggttcaactctgtttgctgagtagatacatcatgaaaaaatttc

SEQ ID NO: 560388 - DNA, 602 bp, Homo sapiens
agagtcaagggtctgtttgggtggcagggatagccacttctgaaggtagaaagaaaaataagccaccaaattggtatctttctgtgaaatggacatcgtgcttagagtctccattttccccacaacctggaggaataagtattgtcatctgcattttatagctgaggaatctgactcaacaaaattaaattactcacctaagcaattagcaattaaccaagtctttctgattcagaaacccagctgttgcctgttcatatccagcccctgtattgggatcaagatctgccctattctcagtgcagcaagatccaggcagatcacactggactcccagcactgaatctggctcaaggggacatgaaatttgactgggtcatgggrctcaggagcatcactctcaaaaatagcagtacaggaagaggcgatggccctaaacagcatttgcaggcagatcccatgttaatcataagggccaggactctctcactgtctgtctctctctctgtctctcctctagggctgaccccacattggacaccgctgcatccatgtccatcacacaacacagctgccgtttcttctgcctgcttatgggaaag

SEQ ID NO: 560389 - DNA, 285 bp, Homo sapiens
aatgaggatctctgctgggtggttgggtgatgtgggggctgtgtgaaaacagcttgtcaatacaagccaaaatagaaatatttctccacagagtatgaaggtcaaatgagagaatacatttaaattaaatggaaaattaaaatggtaaaaaatgcaaagctgtattgaaagttccgagcttctctataaggagctttttgactatgkaagaatcctgtactcgttccccctaaatataaaaaaaaagttgaaggaggcagaagggagagtgatgcacgatgggca

SEQ ID NO: 560390 - DNA, 333 bp, Homo sapiens
gaccatgtcctcacccagaatggtgcctgcctttctacagtttttcaggaagaggaaacattttctgcttctctcgctgaggttttttttaaccacccattaggaacctatagatttcaggatcraacactgggattccctcagcactaaaggaggaaaattgcaaacagagctgaaagtgcaatgtggaaaggtcaggctgaggaaggttcttagccagtagaccaatggcaggaaggacactgcctcctcagtctcccactagggaacttgtggttcttgtcccctgacctcagaattcctggtcatgtttgttttgtctccaagggaagg

SEQ ID NO: 560391 - DNA, 333 bp, Homo sapiens
gaccatgtcctcacccagaatggtgcctgcctttctacagtttttcaggaagaggaaacattttctgcttctctcgctgaggttttttttaaccacccattaggaacctatagatttcaggatcaaacactgggattccctcagcactaaaggaggaaaattgcaaacagagctgaaagtgcaatgtgsaaaggtcaggctgaggaaggttcttagccagtagaccaatggcaggaaggacactgcctcctcagtctcccactagggaacttgtggttcttgtcccctgacctcagaattcctggtcatgtttgttttgtctccaagggaagg

SEQ ID NO: 560392 - DNA, 568 bp, Homo sapiens
cccgaacaggtttcagactcctaccaaaacatctgtatcttaaaagggataagatgcaagattaggtcagatacataccaccacaccagtcatattcataatttccttcttgtattatcacattccattttagtccatttgtcttcctttaaaagctacagggaataatcacagtgctgagggtagactcagtaatactacctgctatggtgtgactgtgtccccaaagttcatgatccccaatgcagaggtgttgagaggtaggacctctaaggggtgattacatcatgaaggctctgccctcacagatggattaacrctgttactgagggggtgggttccttataaaaggatgagttcagcctccttccttctcttccttcccccctcctcttcccccaccatgtgatgccctctgctatgtaatgatgcagaagaaggtcctcaccagatgccagccccttgatcttggacttcccagcctccagaaccatgagccaaataaacttctgttggttacaaattacccagtttgtggtattctgttacaggcgcataaaatagacta

SEQ ID NO: 560393 - DNA, 259 bp, Homo sapiens
gaactgtcaagctttttactacatgtcactaaagtatttctgcwtttattacaagcctatggtgtataacactgaacctaatcagcaaaaaatagtattttctactatcaccttattgaaaagtcctggaactcacaaaataacattctttaaaaatatttctttaaattgattccccacacccaccttaggaaatgttgtggaaattaactcatattacctcttattaacaagaaaccacaaaaaactaagcagaatg

SEQ ID NO: 560394 - DNA, 522 bp, Homo sapiens
gattctgaattctaaagctgtgaatttgaatgaatgaagctgcaaatgacaatctcaataggtatcatttactgacatttactatatgccaaaacacggctgtttaaagttcatgggggtttcatctactccttctgaggctacttcaaggtagggaggctacttccaaggtaggatctgaagtcctatccaaggttcagaaaggagaaacgactggcttttgttccaggggacacagtctcgcttgcttctgagcccagcgtcttctttttacagcacgctgtctcagcacccccatgaggcaggtccatgcctaaattgcttyctacacacacaagcacacacctgcaagaccctctaaaatgagaattgttaaattgttaacagaaaaactcagagtataaaatctgccattgacaaagcttctactcacagctttgtgaaagctgatgattttagtttatgaactaaactaaacatgaacagtaagacagttttatttcccagcattgaaaaggctat

SEQ ID NO: 560395 - DNA, 580 bp, Homo sapiens
ggttgctcatacctgtaatctcagcactttgggaggccgaggtgggcgaattgcttgagcccaggagttcaagactagcctgggcaatatagcaacatcccacctgtatttgaaaaaatagtaagtaagtaaataaataaaaatccataagtatttggacacctaaggtaaatttaaaatcttgcagttttgttttcctttgttctttgtaatttttagcttgtttgagtgggggaaagtttgaaatattgggtaaggcaaacatttgaaaaygctcatctgcagaggaaatttgcagtgttgtggatagatcacttgtgtcaatacgtgaagcataacaaatgctttttgattgtgaaagcataggtagatatattgcatttcaggtcaccactaattaattgcattaatttagttaaattggttttctcaactcatctgaaaaagatgaaaactaacacttcaaactacttcctcttggtaacatcataaagacaaatgaactttctttttcagtcatttccctccttcccctgttctgccctctctctctaactaggaagctactacaccagccttt

SEQ ID NO: 560396 - DNA, 560 bp, Homo sapiens
taaaaaattaattcttacagggaggaattgcagaagtagaaataactgtctttgcctggaaggatgaaaaatctcaggacatgtagagaagrtagaagaacattttctttgaaagggatgggataagcaaggacattaaaaagatagcatggtgtacccacaaatcattcagtttacctgaatcaagaggaggacaggaatggaaaggaagattggggatttacatagtatggtaggctaaatccatctactttctaatctctggaatttttaaataagttaactgacatggcaaagtctttgtaggtataattaagactcttgagttggagatattatcctggattgtctggtgggcccagtgtaatgacaagggtcctttcaagtgaaagaataaggcaaaagaatcagagtcagagagagagctatactaatggaagcagggatcagagtgatgcaaggaaggggccataaactgaggaatgcaggtggcttctagaaaatgaaaaagacaaggtaacatattctcccctaaagcctccagaaggaatgcagctgcc

SEQ ID NO: 560397 - DNA, 644 bp, Homo sapiens
attaaaacataagttgtcataagagaaaaaaagaagctggcagaagtttcgtatttctcagtaattctagaaaagctatgcaaatatatagataagaaggtattttaaaaatcagaaatggtagtatttaaaaattcartgtagttacaggaattattatagacaagaaagcttaagctgttggttccttcaaactttatttgaattaaattcattttgaggaaaatacttccatctctttggcttaattaaataatattaggataagtgtacagtttacctttttttcttttgatatgtaactgagttttgtatattgtggatagctgttaagaagttgtttttcagagaaccctttttatttttggcttagagtgagtagtaaaatgtttaaatgaagcggcctactatcattgagggttgataaattgctaaatgtatacagttttgatggttgccgtggttaaagaatggttgcaggtggtcaggtgataatgattatgtattcttgttccttggttacagggtgcaatatgtgacttctgtgaagcttgggtttgccatggtaggaaatgtctcagtacacatgcttgtgcctgccctcttaccgatgctgagtgtgttgaatgtgaacgagggcgtgt

SEQ ID NO: 560398 - DNA, 488 bp, Homo sapiens
ggtaccaattcttctttgaatgcctgatagaattcagctgtgagtctgtctggtcctggactatttttggttggcaggtttttttattttttattattgtttcaatctcattacttgttatttgtctgttcagtttctatttcttcctgatttaatcyaggagggttgcatatttccaggaatttatacatctcctccagattttccagtttgtgcacataaaggtgttcatagtggtcttgaatgatctttcgtatttctgtggggttggtcgtaatacctcccattacatttctaattgagcttattttggatcttctctcttcttgattaatcttgttaatggtctatcaattttgtttgtcttgtcaaaaagtcggctttttgtttcatttatcttttgtatttttttaatacaatttcatttagttctgctctgatctttttttttttttgagttggagtcttgctctgttgccaggctggag

SEQ ID NO: 560399 - DNA, 552 bp, Homo sapiens
tatgtaatacttagaatattaaatcctatattagtcataccactgcagtgagctatctaaaataattaaagtattaataaaaatagttatggcaattgaatgcttattgaatcatcactatgtggtagacacatttgtaagtgcttaacatgtgtaaaccacttaatctttattaccttgagaagggcaatattcagctattcatattacatgaaggaactaagtcaatgagagttcaagttacttgctctaaatctcatttcaaggaagaatcctgggcttgaaccctaccagctgatcccagagcctatgtaaaataatttagttaaaatataataattaaacatacaaatayattttcagacactttagaaatgatcatgagatgagcttattggataacttgaaaacccgaaggaaacattggagagattccgttttcgttctctcatgcacattcactcctctgggatctctttgagatcaaaagtaagggacccctgaaaaagaattcataagagtggaggaaagcaacagcctgagaagacgaca

SEQ ID NO: 560400 - DNA, 601 bp, Homo sapiens
gttcccctatctctcacagtatgcaaaaccaatcaaaatggattaaagacttaaatctaagacctcaactttaatcttttagtcaaaggactaaaagaaaacattggagaaactctccaggacattagtctgagacaagatttattgagtaatgccccacaatcacaagtaaccaaagctactttagacaaatggaatcacatcaagttaaaaagcttcttcacagcaaaggaagcaatcaataaagtgaagagacaacccacagaatgggaaaaaatatttgcaaactagtcatctgacatgwgattaacaatcagaatatataaagagctcaaacaactctatagaaaaaaaatctaataatctgaataaaaagtgggcaaaagatctgaatggacatttctcaaaataagacatacaaatggcaaacacatataaaaaggtgctcaccatcattcatcatcagagaaatgcaaattaaaactacaatgagatattatcatattctagttcaagtggcttttatccaaaagacaggcaataatgaatgctggtaaggatatggagaaaagggaaaccttgtacagtgttcgctgaaatg

SEQ ID NO: 560401 - DNA, 512 bp, Homo sapiens
aatattctgttgattttcttccttccctctccttttcagaacagataatttctttttattttcaaatttactgaaacttccttgctatctccatttggtagttaagtttagcaaattttaaatatcaaatattgaagttgacagttctaaatttttgcttgctgtctcaatagatcttatttctctgctgagattatatacatatctatatacatctacatataatatgtattmtatacatatctatatacatctacatataatatgtattatatacatatctatatatatgcatatatacatatataaatttattattagcatatttttatgagtatattataatagatgtttaatgctcttttctgcttaattgaacatttcggtcgaattatagttactctatatttagttccttttttcttgaaaatagatcatatttcctagttcttcacttgtcaagtaatttttaattgtatcccaggtattttatatattttattccaagtctc

SEQ ID NO: 560402 - DNA, 615 bp, Homo sapiens
tgagccaccgtgtgttttttatacatttgacatggtatggaagagaaagagagataacaagaataagctcaagctttttgatggaagcaaataaaagattgagttcccattggataaactgagaaggttgagggtagagcaggatttgaagaggaaatttaagagttaaattttaaatgagttatgtttgaaatatgtgttagatacctaagtgcaaaatcaagtatgcaatttagtatatgactttgacatttaagaggagctgagatatatactgaagaggttttcaagatactaatggtattttattatagaatagtcaattagctcaatagaaaagtgaagataatatgsacaagatagcagacactaagctctgggtttctacagcttgaagtgttagggagaaatttgggaaccaactaaggatactgaccataagctgtgaacaggagaaaaaacaaaaaggctggtgacttgcatgccaaagaaagaatatcaaggccgagagaatgatcaattatgtcagatgatactgataggtcatataaacatctagaaaactcttctgtgcaggttcaaaacaaacaaataaaaattgaccaccaaatgctt

SEQ ID NO: 560403 - DNA, 615 bp, Homo sapiens
tgagccaccgtgtgttttttatacatttgacatggtatggaagagaaagagagataacaagaataagctcaagctttttgatggaagcaaataaaagattgagttcccattggataaactgagaaggttgagggtagagcaggatttgaagaggaaatttaagagttaaattttaaatgagttatgtttgaaatatgtgttagatacctaagtgcaaaatcaagtatgcaatttagtatatgactttgacatttaagaggagctgagatatatactgaagaggttttcaagatactaatggtattttattatagaatagtcaattagctcaatagaaaagtgaagataatatgcacaagatagcagacactaagctctgggtttctacagcttgaagtgttagggagaaatytgggaaccaactaaggatactgaccataagctgtgaacaggagaaaaaacaaaaaggctggtgacttgcatgccaaagaaagaatatcaaggccgagagaatgatcaattatgtcagatgatactgataggtcatataaacatctagaaaactcttctgtgcaggttcaaaacaaacaaataaaaattgaccaccaaatgctt

SEQ ID NO: 560404 - DNA, 615 bp, Homo sapiens
tgagccaccgtgtgttttttatacatttgacatggtatggaagagaaagagagataacaagaataagctcaagctttttgatggaagcaaataaaagattgagttcccattggataaactgagaaggttgagggtagagcaggatttgaagaggaaatttaagagttaaattttaaatgagttatgtttgaaatatgtgttagatacctaagtgcaaaatcaagtatgcaatttagtatatgactttgacatttaagaggagctgagatatatactgaagaggttttcaagatactaatggtattttattatagaatagtcaattagctcaatagaaaagtgaagataatatgcacaagatagcagacactaagctctgggtttctacagcttgaagtgttagggagaaatttggraaccaactaaggatactgaccataagctgtgaacaggagaaaaaacaaaaaggctggtgacttgcatgccaaagaaagaatatcaaggccgagagaatgatcaattatgtcagatgatactgataggtcatataaacatctagaaaactcttctgtgcaggttcaaaacaaacaaataaaaattgaccaccaaatgctt

SEQ ID NO: 560405 - DNA, 437 bp, Homo sapiens
cattcccaccagaagtgtataagtgttcccttttctccacagtctcaccagcatttgttatttttgtttactttttcataatagccattctgactggtgtgagatggtatctggttgtggttttcatattcatttctctaaagtttagtgatgttgaacattttgatatgcttatagatcatgtgtatgttttctttagaaaagtatttgttcatgccttttgcccactttttatgtttttcttttctggtaaacttgttaaakttctttatagaggctggatattaggcctttgttagatgcatagattgcaaaatttttctcccattctgtaggttgtttttattaccctgttgattgtttcttttgttgtgcagaggctcttaaatttaactagatcatatttgtcaatttttgcttttgttgtaattgctttt

SEQ ID NO: 560406 - DNA, 437 bp, Homo sapiens
cattcccaccagaagtgtataagtgttcccttttctccacagtctcaccagcatttgttatttttgtttactttttcataatagccattctgactggtgtgagatggtatctggttgtggttttcatattcatttctctaaagtttagtgatgttgaacattttgatatgcttatagatcatgtgtatgttttctttagaaaagtatttgttcatgccttttgcccactttttatgtttttcttttctggtaaacttgttaaatttctttatagaggctggatattaggcctttgttagatgcatmgattgcaaaatttttctcccattctgtaggttgtttttattaccctgttgattgtttcttttgttgtgcagaggctcttaaatttaactagatcatatttgtcaatttttgcttttgttgtaattgctttt

SEQ ID NO: 560407 - DNA, 625 bp, Homo sapiens
tcttgaagacaagcattattatactgtgacaagtcaatccaaaaactgagatggttactaaatgactaaaggcaagtagtatatacagygtggatacactaaataaaggaataatattatttccatcatatagcatttcaagcacaagtagtctaggctggtataatagcttcacatgtctagagttcaggctacctttttgatattctgtctttaatgtgtcacccatgatctcaaaaacttgctctagctcttgctatcatacctgacttgataacaatatattagcctctagaggctcctacactggattttaaggttatatgaggcaatacattttctttattggattgggttatgttcagttgggttatgttcatctcattcttctgtctaaataacaatgcaggtatttcaatccttgtatttattatagcatgctatggttatttactttgtgactcaagattatgggctataatgagtcatattcactcttcttttttcctcccttaacacatattctgacagaaagtcgaagtctaatgaaaattatcgaataaatgaactagatgataagaattcaaggaattaaactgcaaatttcataaacgtctatgccata

SEQ ID NO: 560408 - DNA, 625 bp, Homo sapiens
tcttgaagacaagcattattatactgtgacaagtcaatccaaaaactgagatggttactaaatgactaaaggcaagtagtatatacagtgtggatacactaaataaaggaataatattatttccatcatatagcatttcaagcacaagtagtctaggctggtataatagcttcacatgtctagagttcaggctacctttttgatattctgtctttaatgtgtcacccatgatctcaaaaacttgctctagctcttgctatcatacctgacttgataacaatatattagcctctagaggctcctacactggattttaaggttatatgaggcaatacattttctttattggattgggttatgttcagttgggttatgttcatctcattcttctgtctaaataacaatgcaggtatttcaatccttgtatttattatagcatgctatggttatttactttgtgactcaagattatgggctataatgagtcatattcactcttcttttttcctcccttaacacatattctgacasaaagtcgaagtctaatgaaaattatcgaataaatgaactagatgataagaattcaaggaattaaactgcaaatttcataaacgtctatgccata

SEQ ID NO: 560409 - DNA, 294 bp, Homo sapiens
acataataataatattctagatttcttttatctacctcamgttaactttcaaaaatttccctcccaagatcccatgaaacaatctttcaaatgaatgcaccttaatgggcagattaaatttgtccttacttcatcttcttcaactatacatatgtgataatgcttacctcttgaatatagtattgacatccattgactacttagtaggtagactagagcatttgaaacatggagctcagtgtattggtatattttatggcatcagatcttattcaataaaccatatacattcat

SEQ ID NO: 560410 - DNA, 294 bp, Homo sapiens
acataataataatattctagatttcttttatctacctcaarttaactttcaaaaatttccctcccaagatcccatgaaacaatctttcaaatgaatgcaccttaatgggcagattaaatttgtccttacttcatcttcttcaactatacatatgtgataatgcttacctcttgaatatagtattgacatccattgactacttagtaggtagactagagcatttgaaacatggagctcagtgtattggtatattttatggcatcagatcttattcaataaaccatatacattcat

SEQ ID NO: 560411 - DNA, 569 bp, Homo sapiens
tacttttacagataactactttaaatayttatgctttaaataaattagttttcatatttacatatatttttaccacttccagcacccttcatttcttcctgtaaatctaaattttaacaagtactatttctctaactctgagaaatttcttttaggaattcatataaattagacataatttatgtgaattcacataaattcacataagttagaattcaaaggtgaggaatgatttcagattttatttaaataaagtgttttatttttccttcatgattttgaagttgtctctttctcggtttttgttttttcacctgaaatttactataatgtgccttagtgtggttaatttgatatttatcctacagggatttgctaagctctttgaatgtgtttcatcacatttgaaaagactttggttatcatattttcaaacttttggttattatgtttttagtcattttaggatttcagttatatataatttagtttgattgtataattcagttttatatagtataatatttttaaatttaattctctggattacaattgtttggtttaatatt

SEQ ID NO: 560412 - DNA, 642 bp, Homo sapiens
gcttgtacacatatcataatgtttggaaaaaaatcagggctttaggcaatacacctcttcatagggtacatattttgatcaagctttatattcactgtggacccagtggatatgaaaatgaaagtcttttctacaaaaagaagcatattaaaagttactacattatggatattgctgaaaataagtgcctattctttgtctgtctgtctggccatttatgccactgtgtttcaattagaatatgaattggctaatacgggtgttatgcacaagttatttaaattcagatcttctacagaaggatgctagctaatccatggagtaattaggattatttccccgtagagctcttggtagcttgagttggagcagtgaattctgaataggaaaaagcaatgtaayttgttatctgggttagaggttcagataacaaatgtagtttgcaattttttttctgtctttaaattgcactctacaaaaggaaatggaaatggactatgtaatcattcatgtataaaatctatttagaataagggcccaatgcttatgaaacagagcttattactgttttgtggtttctatccagttgcctgatatggtactacctgtgaaaattaagcagctattaattattgattatgg

SEQ ID NO: 560413 - DNA, 642 bp, Homo sapiens
gcttgtacacatatcataatgtttggaaaaaaatcagggctttaggcaatacacctcttcatagggtacatattttgatcaagctttatattcactgtggacccagtggatatgaaaatgaaagtcttttctacaaaaagaagcatattaaaagttactacattatggatattgctgaaaataagtgcctattctttgtctgtctgtctggccatttatgccactgtgtttcaattagaatatgaattggctaatacgggtgttatgcacaagttatttaaattcagatcttctacagaaggatgctagctaatccatggagtaattaggattatttccccgtagagctcttggtagcttgagttggagcagtgaattctgaataggaaaaagcaatgtaacttgttatctgggttagaggttcagataacaaatgtagtttgcaattttttttctgtctttaaattgcactctacaaaaggaaatggaaatggactatgtaatcattcatgtataaaatctatttagaataagggcccaatgcttwtgaaacagagcttattactgttttgtggtttctatccagttgcctgatatggtactacctgtgaaaattaagcagctattaattattgattatgg

SEQ ID NO: 560414 - DNA, 642 bp, Homo sapiens
gcttgtacacatatcataatgtttggaaaaaaatcagggctttaggcaatacacctcttcatagggtacatattttgatcaagctttatattcactgtggacccagtggatatgaaaatgaaagtcttttctacaaaaagaagcatattaaaagttactacattatggatattgctgaaaataagtgcctattctttgtctgtctgtctggccatttatgccactgtgtttcaattagaatatgaattggctaatacgggtgttatgcacaagttatttaaattcagatcttctacagaaggatgctagctaatccatggagtaattaggattatttccccgtagagctcttggtagcttgagttggagcagtgaattctgaataggaaaaagcaatgtaacttgttatctgggttagaggttcagataacaaatgtagtttgcaattttttttctgtctttaaattgcactctacaaaaggaaatggaaatggactatgtaatcattcatgtataaaatctatttagaataagggcccaatgcttatgaaacagagcttattactgttttgtggtttctatccagttkcctgatatggtactacctgtgaaaattaagcagctattaattattgattatgg

SEQ ID NO: 560415 - DNA, 301 bp, Homo sapiens
ttctcctgcctcagcctcctgagtagctgggattacaggaaccaaccaccacatccagctaatttttgtatttttagtagtgatggggtttcaccatgttggccaggctggtctcgaactcctaacctcaggtgattcaccygcctcggcctcccaaagtgctgggattacaggtgtgagccaccgcacccggccctagtttttgttgttgttgttgttgttgtttatttgtttgtttgaggcagagtctcactctgtcatccaggctggagtgcactggggcaatctcggcccactgcaa

SEQ ID NO: 560416 - DNA, 555 bp, Homo sapiens
caccatgcccaactaattttttgtatttttagttgagacagcgtttcaccatgttgatcaggctggtctcaaactcctgacctcaagtgatctgcccacctcggcctcccaaagtgctgagattacaggtgtgagccactttgcccggcccaggttttcactttagacagattacacagcagagttagggaggtaaacaaacaacgacacagctgattgtagtgggaagtgttaccacacccctttctgtgggtagaacctgcaaaagaaaaagagacagttctacttagatagaatcagaccctgctattaagaaaattggtatgactcaacctagattgaactaaaatttaccttctcactgttgcaaaatttaaaaagtatttcaagtgagaaaatactgtgcaaacaagattgctgcgagattgtttttaaagaacaaactcttttcctggttttgttgaacaagtagagtattcatttacgtatcaaaaatgtcctcggataattacaaatgagtattacttattcrttaaagcagacttgacagttcag

SEQ ID NO: 560417 - DNA, 581 bp, Homo sapiens
aagaataaattaatgtgtacaaaccatttttgtacagtcagsaaaaatagaggctttaaaaatatttacatgcaaacaaaatctcctaaacaaaaacaaaagcaaagaacaaccactacaaccaagacttgtaaaataaaacttctgtttcagaagaaacctatttatttatttaccacaagacagggtcttgctacattgcccagtctggagtgcagtggtgtgatcatagttcactggagtcttgaactcctgagctcaagtgatcctcccacctcagcctcctgagtagctggaattgcaggcatacgccaccacacctggctaatatttttactttttgcagatacagggtctcaccatattgcccaagctggtctccaactcccggtctcaagcaatcctcccacctcagcctcccaaagttttggaattgcaggtgtgagccaccgtgcctggccagaaacctgtttattaacttttgtttttagaacttccagaagtttctctatgaagccagcatattcaggaacactgttttatacaaagatatatatatatatttaaattgtatttattat

SEQ ID NO: 560418 - DNA, 555 bp, Homo sapiens
aaacaactttgtggcattgtaccccaactctagggatctgtggaactttgaacttgtgagtgatgatttagagtacctagtggaagaaatttctaaacaacaaagcattcaagcattggcctggctgtttcaaacagcataagctcatatatgtgagcaaagaaatgaaactggaaataatatttaaaagggaagcaaagtgtaaagttaagaaaatttgtagcctggccatgtggtaggaaagaaaaggccattttcaggagaggaattcaagccaactgcagacatttgcataagtaaagaggagccaaatgctgatagctgagacagtaggaaaaaggcctttaaggcatttgagagaatttcacaacagcccctcccatcacaggcccagaagcctaggagggaagaatggttttgtgggccaggcccagggtgcagctacactgggcagcccttggactctggtycctgcattccatccactccagctgtagccagttaccgcttgggctgctgcttcagagagtgcaagccataagccatgcagtttcc

SEQ ID NO: 560419 - DNA, 485 bp, Homo sapiens
ttggcaggtgcttgtaatcccagctactcaggaggctgaagcaagagagtcgcttgattcctagaggcagaggtttcagtgarttgagattataccactgcactccagcctgggtgacagagtgagactctgtcacaaaacaaaaacaaaaacaaaaaacaaacaacactaacaaaaaaaacccacctactatgagctaatatattttttcaaaatttaagttttttgttttttttttttcctcaaggttctattcactccttccccaaggaggagaaatatcatttgttaggtggcaagaaatatttgaagaaataaaaatatcttaattaaaaatatctttgaatctttgaatattaccctatgacaaattttactgtaatcttgcagtagtaaccaaaaagactgcaagatataaactaaactttttgataacaagagagacaaaactgttgaaaaaagagaaaaattaatgggaattttag

SEQ ID NO: 560420 - DNA, 613 bp, Homo sapiens
ctgttcttttggtgcttcaaggtgattgtcattgggaacgtggacaggccttggtaatagtggaattgtttcctgtttttgttgtttttgtttttgtgttttttggcattagcctacaaactcaatagttgatgtggtgttttgctacagcatgagcctttgctaaagccatcaacttattatggtcccattggtttttctgtggggaaaggggaaaaaaaggacaattacatataagaaaaaagaaaaaaatggctgggtgcagtggctcctgcctgtaatttcagcactttgggaggcagaggtgggcagatcatttgaagtgaagagttcaagaccagcctggccaacatggtgaaaccccatctctaccaaataatmcaaaaaaaaaaaaaaattagctaggcatgatggtgcatacctgtaatcctggctatttgggaggctgaggcaggagaattgcttgaacttgggaggtggaggttgcaatgagccgagatcccaccactgcactccagcctgggccagcctgggtgacagagtgagactgcatctcaaaaaaaaaaaaaaaaaaaaaaaaatatatatatatatatatacatatataaggttt

SEQ ID NO: 560421 - DNA, 613 bp, Homo sapiens
ctgttcttttggtgcttcaaggtgattgtcattgggaacgtggacaggccttggtaatagtggaattgtttcctgtttttgttgtttttgtttttgtgttttttggcattagcctacaaactcaatagttgatgtggtgttttgctacagcatgagcctttgctaaagccatcaacttattatggtcccattggtttttctgtggggaaaggggaaaaaaaggacaattacatataagaaaaaagaaaaaaatggctgggtgcagtggctcctgcctgtaatttcagcactttgggaggcagaggtgggcagatcatttgaagtgaagagttcaagaccagcctggccaacatggtgaaaccccatctctaccaaataatacaaaaaaaaaaaaaaattagctaggcatgatggtgcatacctgtaatcctggctatttgggaggctgaggcaggagaattgcttgaacttgggaggtggaggttgcaatgagccgagatcccaccactgcactccagcctgggccagcctgggtgacagagtgagactgcatctcaaaaaaaaaaaaaaaaaaaaaaaaawatatatatatatatatacatatataaggttt

SEQ ID NO: 560422 - DNA, 594 bp, Homo sapiens
tatttgcatcaaaccatttattcagtgatgtgaaatttagttctgtgtattcagcacattactgtttacttgaaacaggtgacagatgtattagaaagagcataaggcttctgattgaaattccagcttcaattctcaaaggtctaagatgttcagcaagtttttcaattactttgagcytcagttacttaggggaaaatcttaatctcaagatgtaaatttatgagtatgtgttgtgtgggaagcataatttaataatccaaagaagttgactggcactcaataagtaatcaataaatgtcagtccccctcttcctcttctaggtagatattgtaagaattctgtctaaaacaatactgttatccagaaacatatgcaaagaatatacattctggaattaatttgatgacaaaagaattagagaaacaagacgcagacaaatttgcactcttatgttaataaaccaaatggctgtaatttggaagaagcactataaaaatagtgcttcttcagaagggaagcgtgaaatcaggaaagtatcttagaatcagcacctaacaaaactttcagtcttttttattgtaatttatttt

SEQ ID NO: 560423 - DNA, 470 bp, Homo sapiens
ggtgcccaccttggccttccaaagtgctgggattacaggcatgagtcaccatgccccgccagcatcaggtgattcttaccaacacttggtgaaaagctggtgtgggagaaggaaagtacttgagtagcaacatttcctttaaatgaagactagtatcacaaccccaatcttcctgcaggtctccattagtctagggttctctagggaaacaagaccaatagtgtgtgtgcatatgtgtgtgtttgtgtatgtgtgtatgagagaaacatagatattaattttaaacaattgactcatgcaactatgakagctgtaatgtccaaaatctgaagggcaggctggcaacctagagacccaggatagagttgatgttgcaatctcaagtccaaagacaatctggaggcagaattccttcttcttcctggtaactcaatctttttctcttaaatccttcaactgattggatgagg

SEQ ID NO: 560424 - DNA, 470 bp, Homo sapiens
ggtgcccaccttggccttccaaagtgctgggattacaggcatgagtcaccatgccccgccagcatcaggtgattcttaccaacacttggtgaaaagctggtgtgggagaaggaaagtacttgagtagcaacatttcctttaaatgaagactagtatcacaaccccaatcttcctgcaggtctccattagtctagggttctctagggaaacaagaccaatagtgtgtgtgcatatgtgtgtgtttgtgtatgtgtgtatgagagaaacatagatattaattttaaacaattgactcatgcaactatgagagctgtaatgtccaaaatctgaagggcasgctggcaacctagagacccaggatagagttgatgttgcaatctcaagtccaaagacaatctggaggcagaattccttcttcttcctggtaactcaatctttttctcttaaatccttcaactgattggatgagg

SEQ ID NO: 560425 - DNA, 622 bp, Homo sapiens
ccaggtgttctttgtgcttcttatatttggatatctagatctctagcaagactaggaagtttttcttgattattccctcaaataagtccttaatgaccccactatataacatgaaatatctgttrttggtactgaggtgctggccacaaacaattctgtgtgtcctgaaaactcttcagaatattcgtcatctttagcacttgttatcttagtgtttgggcttggcttagagtgatacatctcataacagggcaacagaaagaaccaggaaccaagatttatataacataagtcagtaaaactagaggcaccagaggtttacatttacattaggttacattttctaacaggtagcaaagcacatgaatgaagttcagtggaaggccttcctcaggaatccagtaaaaaccaaacatacacacacacacacggacatccgtgaggcaggaagggaggtccactatagtacagacaagcatcctggaaggccatcaaggagtaggtgggtttcagttgcctcaggaatgtggcatggacccaaactaagtgagtacagatacttgtcattgaggagaagattcaaaatagcatcctaggtgtaaaaactgaggcacctggggca

SEQ ID NO: 560426 - DNA, 551 bp, Homo sapiens
ttcttttttgtttgtttgtttgtttgagatggagtctccctctgtagcccacgctggagtgcagtggcaggatctcggctcactgcaacctctgcctcccgggttcaagtgactctcrtgcctcagcctccagagtagccaggattacaggcgcatgccaccacatcccacttttttttttttttgtatttttagtagagacaaggtttcaccatgttggccagggtggtctcaaactactgatctcaagtaattggccagccttggcgtcccaaagagcaagactgcaggcttgagccaccacgctccaccaaaagtttattagcactcattctcatgagaaaaattgctgaaagcttggcaataaagaaacagaatgactacatgtcctttaaatgttatttataaggggctcaatcaatgactatgaagttatctaagataaaacacctgattttgacattgccattaacttttttattagagcccccagatctacaggttatatgtgcagatgtgcagtggctgctttatttcccttttcaagagct

SEQ ID NO: 560427 - DNA, 616 bp, Homo sapiens
tatctggtttgcagcaaagccctgatagaaaggcaaagctttgtccttagtaatacagacagtccccaacttaccatttttcaaatttacaatggtgtgaaagtgatacacattcagtacagtattcagtaaattgcatgagatatttaacacttttttataaaataggccttgtgttagatgatatggcccaactgtaagtgttctgagcacatttaaggtaggcgaggctcagctaggatatttggtaggttaggtggattaaatgcatttttcaacttacgatattttcaacttacaatgggtttatgggaatgtaaccccatcgtaagtcaaggagcatcttttctgctagggtatttataataaccaccaaatcctggcccaaagctcgagaaaattcatctcccttgtttattcaagtctccctggtcattcccagggcagtagctggtacatatgggccctcattaaatacctgctggattgctgaatggttagatgattggatggacagatcttggattcagagaaaaatatgctcctgtcatcagcttttttagccaaagcaagtccaaggaactytctggtaagcgcccagctacccttcactaac

SEQ ID NO: 560428 - DNA, 663 bp, Homo sapiens
ggatactacttttcttgctcatccataagaagcaactccttatttcttcaagtttcatcatgaaattgcagcaattcagtcaaatcttcaggttmctaattatttatttatttaggagacagggccttgctctgtcacccaggctggagtgtagtggcaggatcacggcgcaccgcagcctagaactcctgggctcaaatgattctcccacctcagcctcccaaatagccagtactacaggtgcacaccaccacggtcacctaattttttttttcaatttttaacagagatgtggtttctgtttattgcccggtctggtctcaaattcctgagctcaaacaatcctcctgcctcagcctcccaaagtgctgagattacaggtctgacccactgcacccagcattttgttttttatgagatggggtctttccctctgtcacccaagctggagtgcagtggcacagccatagctcattttaacttcaaactcctggcttcaagcaatcctcctgccttgggctccataaatgctggggttacaggcatgagtcaccatgccccaccttcaggttccacttctaattctagttcttttgctatttctgtaacatctgcagtgacttctccagtaaagccttatgcccctcaaagtatccatgagat

SEQ ID NO: 560429 - DNA, 663 bp, Homo sapiens
ggatactacttttcttgctcatccataagaagcaactccttatttcttcaagtttcatcatgaaattgcagcaattcagtcaaatcttcaggttcctaattatttatttatttaggagacagggccttgctctgtcacccaggctggagtgtagtggcaggatcacggcgcaccgcagcctagaactcctgggctcaaatgattctcccacctcagcctcccaaatagccagtactacaggtgcacaccaccacggtcacctaattttttttttcaatttttaacagagatgtggtttctgtttattgcccggtctggtctcaaattcctgagctcaaacaatcctcctgcctcagcctcccaaagtgctgagattacaggtctgacccactgcaccyagcattttgttttttatgagatggggtctttccctctgtcacccaagctggagtgcagtggcacagccatagctcattttaacttcaaactcctggcttcaagcaatcctcctgccttgggctccataaatgctggggttacaggcatgagtcaccatgccccaccttcaggttccacttctaattctagttcttttgctatttctgtaacatctgcagtgacttctccagtaaagccttatgcccctcaaagtatccatgagat

SEQ ID NO: 560430 - DNA, 604 bp, Homo sapiens
acccaatggcaacttgaatttttaagaatgtaaaatacagcatgatttataatcctttgggtatatatccagtaatgggattgctgggtcaaatggcacatgtatacatgtgtaactaacctgcacgttgtgcacatgtaccctaaaacttaaagtataaaaaaaaaaagaatgaaaaatacagagatgtacaacacgttggaaaatgtatttctttatcttagactcctacaagtgaaattcttggtcagggtgtattcacagcatcattattactagatgctattcatttgtcctccaaagtgaccctaccattttatactttaggaaaaaatgtgcttaacaatatttgttattttctgtaaaartattttttatttgatttctgtgaacaagtctgttcattttgtgtttattgattgcagaggagattgaagatcttttctaagttcatttgtggttatggtatattcctgtatgcactgcttaatgtcatctctagattttacatatatttggctgaataactttttctcatagatttgtagacaccatgtaaatattctggatattcattatttattagttatatgagaagcagaca

SEQ ID NO: 560431 - DNA, 573 bp, Homo sapiens
tctgacattgcaacatcaattatgccttcccaacagtcccccaaagtcttaactcatggcatcatgaactcaaaagttcaagtccaaagtttcatctgagacaaggcaagtcccttctgcttatgatcctataaaatcaaaaacatgttagtcacttccaagacacaatgtgggtacaggtattgggtaaatgctcccattctgaaagggagaaatgggccaaaagataggggctacaggccccatgtaactccaaaatccagcaagacagtcattaaatcttaaagctccaaaataatatcctttaactctatgcctgacatccagggcacactgatgtaacaagtggaytcccatcaccttgggaaggtctgcccctgtggccctgcaaggtacagtccttgcagctgtttttacaggctggcattgactgcctgtggctttttcaggcacaaagcgcaagttgtcagtggatctagcattctggccttcttctcacagctccaccaggcaatgcccaagtggggactctgtgtgggggttccaaccccacatttcccctccacactgccc

SEQ ID NO: 560432 - DNA, 573 bp, Homo sapiens
tctgacattgcaacatcaattatgccttcccaacagtcccccaaagtcttaactcatggcatcatgaactcaaaagttcaagtccaaagtttcatctgagacaaggcaagtcccttctgcttatgatcctataaaatcaaaaacatgttagtcacttccaagacacaatgtgggtacaggtattgggtaaatgctcccattctgaaagggagaaatgggccaaaagataggggctacaggccccatgtaactccaaaatccagcaagacagtcattaaatcttaaagctccaaaataatatcctttaactctatgcctgacatccagggcacactgatgtaacaagtggattcccatcaccttgggaaggtctgcccctgtggccctgcaaggtacagtccytgcagctgtttttacaggctggcattgactgcctgtggctttttcaggcacaaagcgcaagttgtcagtggatctagcattctggccttcttctcacagctccaccaggcaatgcccaagtggggactctgtgtgggggttccaaccccacatttcccctccacactgccc

SEQ ID NO: 560433 - DNA, 573 bp, Homo sapiens
tctgacattgcaacatcaattatgccttcccaacagtcccccaaagtcttaactcatggcatcatgaactcaaaagttcaagtccaaagtttcatctgagacaaggcaagtcccttctgcttatgatcctataaaatcaaaaacatgttagtcacttccaagacacaatgtgggtacaggtattgggtaaatgctcccattctgaaagggagaaatgggccaaaagataggggctacaggccccatgtaactccaaaatccagcaagacagtcattaaatcttaaagctccaaaataatatcctttaactctatgcctgacatccagggcacactgatgtaacaagtggattcccatcaccttgggaaggtctgcccctgtggccctgcaaggtacagtccttgcagctgtttttacaggctggcattgastgcctgtggctttttcaggcacaaagcgcaagttgtcagtggatctagcattctggccttcttctcacagctccaccaggcaatgcccaagtggggactctgtgtgggggttccaaccccacatttcccctccacactgccc

SEQ ID NO: 560434 - DNA, 596 bp, Homo sapiens
agagagatatatatacttacatgtttattacagtgttatttacacagccaaggtatggaaactacctgtgtccattgacagatgaatggatgttttaaatgtattacacacacacacacacacacagacacacacaaatatgtaatggaatatcatttagcctttaaaaatgaggaaatactgccatttgtaacaagatggataaacctggagtttattatggtaagtaaaataagccaggaacagatgcaaaaaaatcctgcatgatttcacttatatgcatactaagaaaatgtcaaactcatggtaacagagtaaaatagtgcttactagggcctgggagttgggggaaaagaaaaaatgtttgtcagaargtacaaactttcagttataagatgaataagttctggagatctaatgtacagcatagtgactaaagtcaataataatgtatacttgaaatttgctgaaagagtagatctcaagtgttctccaccacacaaacacaaataaaaaggtaaccaggtgaggtgatgaatatgttagcttgattgtggtaatcatcacttcacaatgtatatgtatatcaaaatatc

SEQ ID NO: 560435 - DNA, 596 bp, Homo sapiens
agagagatatatatacttacatgtttattacagtgttatttacacagccaaggtatggaaactacctgtgtccattgacagatgaatggatgttttaaatgtattacacacacacacacacacacagacacacacaaatatgtaatggaatatcatttagcctttaaaaatgaggaaatactgccatttgtaacaagatggataaacctggagtttattatggtaagtaaaataagccaggaacagatgcaaaaaaatcctgcatgatttcacttatatgcatactaagaaaatgtcaaactcatggtaacagagtaaaatagtgcttactagggcctgggagttgggggaaaagaaaaaatgtttgtcagaaagtacaaactttcagtkataagatgaataagttctggagatctaatgtacagcatagtgactaaagtcaataataatgtatacttgaaatttgctgaaagagtagatctcaagtgttctccaccacacaaacacaaataaaaaggtaaccaggtgaggtgatgaatatgttagcttgattgtggtaatcatcacttcacaatgtatatgtatatcaaaatatc

SEQ ID NO: 560436 - DNA, 432 bp, Homo sapiens
agttttcttaaggagacacttaagaagaatgacaaatggagctctactttttctttatttgccttttcttgtatcaaatgccccatcatattttagaaatcttggttttgcagaaaaatttagcaatgtgcaattccaggaaatatcaatgtaaacttaatgacaacaaagtcaggtttaatagtcaaatccaaatttcaagaatttcatattttatataatggcaccaattttcctgyagctgaatatacacaatctgactatacctatatgtcagtatacatacatatatatactgaaatatatatgtatgtatatactgacatatatagtcagtatatgactatgactatagtcagtatatatgactatgactatatatagtcagtatacagttagtatacactaacatatatgtatatgtgtatatgt

SEQ ID NO: 560437 - DNA, 432 bp, Homo sapiens
agttttcttaaggagacacttaagaagaatgacaaatggagctctactttttctttatttgccttttcttgtatcaaatgccccatcatattttagaaatcttggttttgcagaaaaatttagcaatgtgcaattccaggaaatatcaatgtaaacttaatgacaacaaagtcaggtttaatagtcaaatccaaatttcaagaatttcatattttatataatggcaccaattttcctgtagctgaatatacacaatctgactatacctatatgtcagtatacatacatatatatactgaaatatatatgtatgtatatactgacayatatagtcagtatatgactatgactatagtcagtatatatgactatgactatatatagtcagtatacagttagtatacactaacatatatgtatatgtgtatatgt

SEQ ID NO: 560438 - DNA, 432 bp, Homo sapiens
agttttcttaaggagacacttaagaagaatgacaaatggagctctactttttctttatttgccttttcttgtatcaaatgccccatcatattttagaaatcttggttttgcagaaaaatttagcaatgtgcaattccaggaaatatcaatgtaaacttaatgacaacaaagtcaggtttaatagtcaaatccaaatttcaagaatttcatattttatataatggcaccaattttcctgtagctgaatatacacaatctgactatacctatatgtcagtatacatacatatatatactgaaatatatatgtatgtatatactgacatatatagtcagtatatgactatgactatagtcagtatatatgactatgactatatatagtcagtatacagtyagtatacactaacatatatgtatatgtgtatatgt

SEQ ID NO: 560439 - DNA, 432 bp, Homo sapiens
agttttcttaaggagacacttaagaagaatgacaaatggagctctactttttctttatttgccttttcttgtatcaaatgccccatcatattttagaaatcttggttttgcagaaaaatttagcaatgtgcaattccaggaaatatcaatgtaaacttaatgacaacaaagtcaggtttaatagtcaaatccaaatttcaagaatttcatattttatataatggcaccaattttcctgtagctgaatatacacaatctgactatacctatatgtcagtatacatacatatatatactgaaatatatatgtatgtatatactgacatatatagtcagtatatgactatgactatagtcagtatatatgactatgactatatatagtcagtatacagttagtatayactaacatatatgtatatgtgtatatgt

SEQ ID NO: 560440 - DNA, 506 bp, Homo sapiens
tatataagaagtgcccaatgtttttgcttaatttctttgtggtaagattttagtcttccaggaaaagtttcatattggttattattgtgaaaaataatgaagtggcctgcttctaatttttctaagttcccttttgaataactaagcatctacaccaaattaaagatacttctctataatttttcaaaattcaaaaaggatgtctcataaagtaagaaaataaactgtggtttgttcctccattgttgttaatttgcaatgtcccacttatctctgatgggatatcagtaaatttacttgccttattgtacttgttccttgatgtatttctaatgattaattagaaataattacacatttgtccactttggaaagtaatggaggtgaagggggtgtgtgtgtgcacttgtatggacgcacacatgcataggtacacacacacrtattgtgttttcttgttttgttttgtgctttgatttttatttttaaattgtaaattgacaaat

SEQ ID NO: 560441 - DNA, 322 bp, Homo sapiens
aaaaccaactttataaatactgtcattccaaaaccacacaaytcaaatataaataatctttataaggtaaaacaaaaatgtacataatactttacataaacatttttagaataagtttattataactcgataagcaaaataatccaaacctttatacatttctacaaggatagtcacgtatgtcaatttttcggtttcctctcgtgcctattttgtctcctgagccggcccctttccagctgacacgtgtgctccgtgttctcccacaatagcctgacctggcctgagtccgcgcccctgtgagcctcctttctttgcttac

SEQ ID NO: 560442 - DNA, 507 bp, Homo sapiens
tataaaaaatgctcaatattactaatcattagagaaaggcaaattaaaaacactttgagatatcaccccatacgtgttaggatggttattataaaatgacaaaatataacaagtgttggagaagayttgaaggaaaggcatcatggaaaatagcatggaggttccttcaaaaattaaaaatgaactaccatatgaaccagcaatcccactactgggtatatatccaaaggaaatgaaatccgtatgtcgaagagatatctgcaacaccatatacattaaatcttatttatatattagcccaagatgtggaaacaatgtaagtgtccatcaatggatggatgaattttaaaaagtagtatatatacacaatgaaatactattcagccataaaaaataatgaaatcttgttatttgtgacaacatggatgaacctggaggacattatgttaaatgaaacaagccaggcacagaaagaccatatgatttcacttttatgtcgaatctgaa

SEQ ID NO: 560443 - DNA, 507 bp, Homo sapiens
tataaaaaatgctcaatattactaatcattagagaaaggcaaattaaaaacactttgagatatcaccccatacgtgttaggatggttattataaaatgacaaaatataacaagtgttggagaagatttgaaggaaaggcatcatggaaaatagcatggaggttccttcaaaaattaaaaatgaactaccatatgaaccagcaatcccactactgggtatatatccaaaggaaatgaaatccgtatgtcgaagagatatctgcaacaccatatacattaaatcttatttatatattagcccaagatgtggaaacaatgtaagtgtccatcartggatggatgaattttaaaaagtagtatatatacacaatgaaatactattcagccataaaaaataatgaaatcttgttatttgtgacaacatggatgaacctggaggacattatgttaaatgaaacaagccaggcacagaaagaccatatgatttcacttttatgtcgaatctgaa

SEQ ID NO: 560444 - DNA, 507 bp, Homo sapiens
tataaaaaatgctcaatattactaatcattagagaaaggcaaattaaaaacactttgagatatcaccccatacgtgttaggatggttattataaaatgacaaaatataacaagtgttggagaagatttgaaggaaaggcatcatggaaaatagcatggaggttccttcaaaaattaaaaatgaactaccatatgaaccagcaatcccactactgggtatatatccaaaggaaatgaaatccgtatgtcgaagagatatctgcaacaccatatacattaaatcttatttatatattagcccaagatgtggaaacaatgtaagtgtccatcaatggatgratgaattttaaaaagtagtatatatacacaatgaaatactattcagccataaaaaataatgaaatcttgttatttgtgacaacatggatgaacctggaggacattatgttaaatgaaacaagccaggcacagaaagaccatatgatttcacttttatgtcgaatctgaa

SEQ ID NO: 560445 - DNA, 524 bp, Homo sapiens
gctgactttaaatgaatttattttaggcatggccttttgacttcctatttggtagatgagggtgtatctctcttctatcayctttctgtgtctccttccctaaattccaaatacagtgatactcaattttcactaagtatgaattttttcatgcatattagagttctcagtgcttctctgcttttagaatcttgctttctcaggttaatttagtcaattacctctttcagcctatctgcttttcagatttcaaatactatgaatttatgcctcttaaaaatatctgcaccgggggcatggtggctcacacctgtaatcccagcactttgggaggccaaggtgggcagatcacgaagtcaggagatcgagaccatcctggctaacacggtgaaaccccgtctatactaaaaatacaaaaaattagccgggcgcggtggcgggcgcctgtagtcccagctactcgggaggctgaagcaggagaatggcgtgaacccgggaggcggagctcgcagtgagccaagatc

SEQ ID NO: 560446 - DNA, 524 bp, Homo sapiens
gctgactttaaatgaatttattttaggcatggccttttgacttcctatttggtagatgagggtgtatctctcttctatcacctttctgtgtctccttccctaaattccaaatacagtgatactcaattttcactaagtatgaattttttcatgcatattagagttctcagtgcttctctgcttttagaatcttgctttctcaggttaatttagtcaattacctctttcagcctatctgcttttcagatttcaaatactatgaatttatgcctcttaaaaatatctgyaccgggggcatggtggctcacacctgtaatcccagcactttgggaggccaaggtgggcagatcacgaagtcaggagatcgagaccatcctggctaacacggtgaaaccccgtctatactaaaaatacaaaaaattagccgggcgcggtggcgggcgcctgtagtcccagctactcgggaggctgaagcaggagaatggcgtgaacccgggaggcggagctcgcagtgagccaagatc

SEQ ID NO: 560447 - DNA, 524 bp, Homo sapiens
gctgactttaaatgaatttattttaggcatggccttttgacttcctatttggtagatgagggtgtatctctcttctatcacctttctgtgtctccttccctaaattccaaatacagtgatactcaattttcactaagtatgaattttttcatgcatattagagttctcagtgcttctctgcttttagaatcttgctttctcaggttaatttagtcaattacctctttcagcctatctgcttttcagatttcaaatactatgaatttatgcctcttaaaaatatctgcaccgggggcrtggtggctcacacctgtaatcccagcactttgggaggccaaggtgggcagatcacgaagtcaggagatcgagaccatcctggctaacacggtgaaaccccgtctatactaaaaatacaaaaaattagccgggcgcggtggcgggcgcctgtagtcccagctactcgggaggctgaagcaggagaatggcgtgaacccgggaggcggagctcgcagtgagccaagatc

SEQ ID NO: 560448 - DNA, 556 bp, Homo sapiens
tgtgtacaagtgatttattgaggaagggctctcccaggagagacagactttttccttttcacccagggaagaggaaaaagttaagcaaaaatgagatctcatgcaaaattgttcagaggctatgtttcgcctgatttcacagggaaactctggaatataagctatggctcagagctgtcccaagtaggcagcaagtgtgagtctttggctaaggatcattgtattastctgggttctccagagaaacagaatagatagatagatagatagatagatagatagatagatagatagattgatagacaaatacagatatgaagataggtaatagattaaattatcatattatatattatatacagaaataatatttattataaggaattggctcatgtggttataaagatcaaaaagtcccaaaatctgcagtcagtgagctggagacccagtagagccaacggtgaagtttcagtatgagtccaagttgaaacaggaaaaaccaagtatcctatctgaattagagagagagaattctcccttgcccagccttcttgct

SEQ ID NO: 560449 - DNA, 597 bp, Homo sapiens
ctaatttgaaggaaagtagagatagcttttgagaagtataagaagtccagctgaagaattcagacacagaccagtgcggaactgaaagcattgacgatttttaacaaggatgtctcagcaatggagtaggattgtttasaaagcaatatgtaaggtgggctaaagaaatgtttaaaaagatgaatagagcagttaatccttgggggaaagggaaagtaagccacaaaaattaacttggggccatttaagttattgaaaggatttttagtaggtcgtagagtccaacagaatgtcagaaccaagctttggaaaggctctgacgcaaggcagttcaggaaaatcaggtacactggacactcccttcgcagtcagccagtaggaagaatcaagatcaattatcttctttctttgagttactcttcagggatcaaactccgaacagagcttggtttgcatgtttactccttgtccaggagagggagggcaccctgactgacagtcctctcaaaacgtaaagtgtctcccccttaacattaaaaaggagattggatactgggcagacaaacaaacagctgtccaaatgagaaccagcaaagt

SEQ ID NO: 560450 - DNA, 597 bp, Homo sapiens
ctaatttgaaggaaagtagagatagcttttgagaagtataagaagtccagctgaagaattcagacacagaccagtgcggaactgaaagcattgacgatttttaacaaggatgtctcagcaatggagtaggattgtttagaaagcaatatgtaaggtgggctaaagaaatgtttaaaaagatgaatagagcagttaatccttgggggaaagggaaagtaagmcacaaaaattaacttggggccatttaagttattgaaaggatttttagtaggtcgtagagtccaacagaatgtcagaaccaagctttggaaaggctctgacgcaaggcagttcaggaaaatcaggtacactggacactcccttcgcagtcagccagtaggaagaatcaagatcaattatcttctttctttgagttactcttcagggatcaaactccgaacagagcttggtttgcatgtttactccttgtccaggagagggagggcaccctgactgacagtcctctcaaaacgtaaagtgtctcccccttaacattaaaaaggagattggatactgggcagacaaacaaacagctgtccaaatgagaaccagcaaagt

SEQ ID NO: 560451 - DNA, 597 bp, Homo sapiens
ctaatttgaaggaaagtagagatagcttttgagaagtataagaagtccagctgaagaattcagacacagaccagtgcggaactgaaagcattgacgatttttaacaaggatgtctcagcaatggagtaggattgtttagaaagcaatatgtaaggtgggctaaagaaatgtttaaaaagatgaatagagcagttaatccttgggggaaagggaaagtaagccacaaaaattaasttggggccatttaagttattgaaaggatttttagtaggtcgtagagtccaacagaatgtcagaaccaagctttggaaaggctctgacgcaaggcagttcaggaaaatcaggtacactggacactcccttcgcagtcagccagtaggaagaatcaagatcaattatcttctttctttgagttactcttcagggatcaaactccgaacagagcttggtttgcatgtttactccttgtccaggagagggagggcaccctgactgacagtcctctcaaaacgtaaagtgtctcccccttaacattaaaaaggagattggatactgggcagacaaacaaacagctgtccaaatgagaaccagcaaagt

SEQ ID NO: 560452 - DNA, 597 bp, Homo sapiens
ctaatttgaaggaaagtagagatagcttttgagaagtataagaagtccagctgaagaattcagacacagaccagtgcggaactgaaagcattgacgatttttaacaaggatgtctcagcaatggagtaggattgtttagaaagcaatatgtaaggtgggctaaagaaatgtttaaaaagatgaatagagcagttaatccttgggggaaagggaaagtaagccacaaaaattaacttggggccatttaagttattgaaaggatttttagtaggtcgtagagtccaacagaatgtcagaaccaagctttggaaaggctctgacgcaaggcagttcaggaaaatcaggtacactggacactcccttcgcagtcagccagtaggaagaatcaagatcaattatcttctttctttgagttactcttcagggatcaaactccgaacagagcttggtttgcatgtttactccttgtccaggagagggagggcaccctgactgacagtcctctcaaaacgtaaagtgtytcccccttaacattaaaaaggagattggatactgggcagacaaacaaacagctgtccaaatgagaaccagcaaagt

SEQ ID NO: 560453 - DNA, 439 bp, Homo sapiens
atgaatagccctgtttgcttgcagtaatttgggaaataaccaaatacaagcaaactaaatacaaaaatcataacttcttctactaacactattatagaactctttggggaatgtcattgtcatttaattaagtcaaagagctagatctattttgtctgatgttgcccttagagattcacaccaaaagttggytgagatgacttcgtttcaagggccccagcttccaggtaaactgaggtaatgatccatgtgttttaggatcccagcacctagcagaatgtctcacaaatactgtacttagtaaacatttgttgcttgcaatttttgatgctcaggtgtcaagtagttaacaattagtttccattgacaaaagtattctttcatacccccgaggcgtttttcgctttagaaaaaatggtagcagtacatggttattttt

SEQ ID NO: 560454 - DNA, 585 bp, Homo sapiens
atagttagctcttcttgttgaattgatccctttaccattatgtaatggccttgtttgtctcttttgatctttgttggtttaaaatctgttttatcagagcctaggattgcaacccctgaagggctsacttcttatcagaagcaatgagggctagaaggctgtggaatgacataatgaaaatgcagagggcaataaaaaaatctgttaaactagaaaaatttatatccagcaaaagtatcccacaaaacaataacagcaaaattctacagataaatactgagagaatttgctgctagtagaccagccttaaaacaaacactacagagaggccttcaggataaaatgaactgacatgacagtaacttgaatctattgggtgaactgaaatacctgagcaaccaactcaacctaactgacatttagagagcacatcacctaatgtgtggagaatataccttctcttcaaacatggagcattctccaggagataacatatgctctgccataaatgcttacatcagaaaggtggtttacactcaataatctaagttcttgctgtaagaaacagaaaaagggcaaattaaa

SEQ ID NO: 560455 - DNA, 585 bp, Homo sapiens
atagttagctcttcttgttgaattgatccctttaccattatgtaatggccttgtttgtctcttttgatctttgttggtttaaaatctgttttatcagagcctaggattgcaacccctgaagggctcacttcttatcagaagcaatgagggctagaaggctgtggaatgacataatgaaaatgcagagggcaataaaaaaatctgttaaactagaaaaatttatatccagcaaaagtatcccacaaaacaataacagcaaaattctacagataaatactgagasaatttgctgctagtagaccagccttaaaacaaacactacagagaggccttcaggataaaatgaactgacatgacagtaacttgaatctattgggtgaactgaaatacctgagcaaccaactcaacctaactgacatttagagagcacatcacctaatgtgtggagaatataccttctcttcaaacatggagcattctccaggagataacatatgctctgccataaatgcttacatcagaaaggtggtttacactcaataatctaagttcttgctgtaagaaacagaaaaagggcaaattaaa

SEQ ID NO: 560456 - DNA, 585 bp, Homo sapiens
atagttagctcttcttgttgaattgatccctttaccattatgtaatggccttgtttgtctcttttgatctttgttggtttaaaatctgttttatcagagcctaggattgcaacccctgaagggctcacttcttatcagaagcaatgagggctagaaggctgtggaatgacataatgaaaatgcagagggcaataaaaaaatctgttaaactagaaaaatttatatccagcaaaagtatcccacaaaacaataacagcaaaattctacagataaatactgagagaatttgctgctagtagaccagcctkaaaacaaacactacagagaggccttcaggataaaatgaactgacatgacagtaacttgaatctattgggtgaactgaaatacctgagcaaccaactcaacctaactgacatttagagagcacatcacctaatgtgtggagaatataccttctcttcaaacatggagcattctccaggagataacatatgctctgccataaatgcttacatcagaaaggtggtttacactcaataatctaagttcttgctgtaagaaacagaaaaagggcaaattaaa

SEQ ID NO: 560457 - DNA, 545 bp, Homo sapiens
ccaggcttgacttgaacttctgggctcaagcgatcctcctgccttggcatcccaaaatgctgggattataggcataagccactgtactcaggcaatattaaagtcttgatattagaagtgtctcagtgtactggaaagctttgtctaaattttgaaaaaatattaaaaaacacattggttttatttggccaatactgatttctttgctccatcattatttattggcattrttagcctgttgactttcaatttctttacatccctttcactccatttcttttattttgtcccccaaatagaaattctttttttttttagatggattctcgctcttggctcttgtgacccaggctggagtgcagtggtgcagtctcatcactgtaatcttcatcttccaggttcaggcaattctcctgcctcagcctccacagtagcctagattacagtcatgcgctactacaccccgctaattttttgtattctttcttttttttttctttgagatgcagtttcgctcttgttgcccaggctggaatacaatggca

SEQ ID NO: 560458 - DNA, 545 bp, Homo sapiens
ccaggcttgacttgaacttctgggctcaagcgatcctcctgccttggcatcccaaaatgctgggattataggcataagccactgtactcaggcaatattaaagtcttgatattagaagtgtctcagtgtactggaaagctttgtctaaattttgaaaaaatattaaaaaacacattggttttatttggccaatactgatttctttgctccatcattatttattggcattattagcctgttgactttcaatttctttacatccctttcactccatttcttttattttgtcccccaaatagaaattctttttttttttagatggattctcgctcttggctcttgtgacccaggctggagtgcagtggtgcagtctcatcactgtaatcttcatcttccaggttcaggcaattctcctgcctcagcctccacagtagcctagattacagkcatgcgctactacaccccgctaattttttgtattctttcttttttttttctttgagatgcagtttcgctcttgttgcccaggctggaatacaatggca

SEQ ID NO: 560459 - DNA, 545 bp, Homo sapiens
ccaggcttgacttgaacttctgggctcaagcgatcctcctgccttggcatcccaaaatgctgggattataggcataagccactgtactcaggcaatattaaagtcttgatattagaagtgtctcagtgtactggaaagctttgtctaaattttgaaaaaatattaaaaaacacattggttttatttggccaatactgatttctttgctccatcattatttattggcattattagcctgttgactttcaatttctttacatccctttcactccatttcttttattttgtcccccaaatagaaattctttttttttttagatggattctcgctcttggctcttgtgacccaggctggagtgcagtggtgcagtctcatcactgtaatcttcatcttccaggttcaggcaattctcctgcctcagcctccacagtagcctagattacagtcatgcgcyactacaccccgctaattttttgtattctttcttttttttttctttgagatgcagtttcgctcttgttgcccaggctggaatacaatggca

SEQ ID NO: 560460 - DNA, 595 bp, Homo sapiens
ctggctgcctcggcctcccaaattgctgggattacagrtgtgaaccactgtgcctggcaagagtttgggtcttttaaaaaaatgactatatcgtctcttagctcttgtttctttctaattgattccttagattctttggatgggcttttaactgtctcctgaatctcagtaaccttcattgccatcaagcttgtgaattctgtctattatttcagccttttcagtctggttaacagctgttgctggggagttagtgtggtcatctaaaaatagacactctgggttattgaattgccagtgtagttatgctggttctggttctttctcatctctgtgagctaatgttcctttaatcgttgaagttagtttgcttgtttgttttggatggggctttttacttgtatactttgatgccgttaagggtttactatgctataagttgcatttaattgactggcttcatctctggatgatttcaggtggccaaggctcagctcagctctcctgggatgtgtgctctaacactggggggattgggacctggcccacagctttgttatatgccccctcaagatgaagtacctgctgcactgac

SEQ ID NO: 560461 - DNA, 595 bp, Homo sapiens
ctggctgcctcggcctcccaaattgctgggattacagatgtgaaccactgtgcctggcaagagtttgggtcttttaaaaaaatgactatatcgtctcttagctcttgtttctttctaattgattccttagattctttggatgggcttttaactgtctcctgaatctcagtaaccttcattgccatcaagcttgtgaattctgtctattatttcagycttttcagtctggttaacagctgttgctggggagttagtgtggtcatctaaaaatagacactctgggttattgaattgccagtgtagttatgctggttctggttctttctcatctctgtgagctaatgttcctttaatcgttgaagttagtttgcttgtttgttttggatggggctttttacttgtatactttgatgccgttaagggtttactatgctataagttgcatttaattgactggcttcatctctggatgatttcaggtggccaaggctcagctcagctctcctgggatgtgtgctctaacactggggggattgggacctggcccacagctttgttatatgccccctcaagatgaagtacctgctgcactgac

SEQ ID NO: 560462 - DNA, 501 bp, Homo sapiens
caatgctttccttttgaagatctgctcagagtgtgctggttttcttgatagtcagctctttcagtggaggatcttcctggctctgtcttgatggccattttggctcttctgtcttttagggtttccttggtgagtatcaggtgttcataaattaaggatttatatrttgggtttaaaaatcaagattgtaaatcaagatatctttagtgtgatgaaaggaagtaaattataaaacgtatttaggttactatgttgctcttaataagtagtacggctgccacattttaaagtgttttctttttcccctatggttgttttaaggatttctttttctctgtcactctctgtctttccagctctcattttctctctttctctcacatcagatttattgttaagtgttaattcagtggttattttttccttgaaatttactgtgtttcttgaatggacacgtgtatctttcatcattttggaaagtttaaaccattaagtattcac

SEQ ID NO: 560463 - DNA, 550 bp, Homo sapiens
cccatctctactaaaaacacaaaaaaattagccaggtgtggtggcrggcgtctatagtcccagctactcggcaggctgaggcaggagaatggcatgaacctgggaggcagagcttgcagtgagtggagattttgtcactgcactccagcctgggcgacagagcgaggctccatctaaaaaaaaaaaaaaaaaaaaaaaagaggagctggaggaggcccaccttcttaatgtacgccaaaatagttctgctggttgaaggcctggagttccctgcaatgggtggggaaggggattagcctggggaaataatgcctgggtcaagttagggaagatccaggtccctctgctgagggacagtttggaggacagagcctgaccctccatgaagagagactctcaaggtctcttttagctttaacattggctaagtgtgattctatgactcaaccagtctgccctaattcctcagtgtgggcaggacatgaaagacaacccaccagtatctcagtgagtttgtgtggagcccaccttggcagtcacacacagacac

SEQ ID NO: 560464 - DNA, 550 bp, Homo sapiens
cccatctctactaaaaacacaaaaaaattagccaggtgtggtggcgggcgtctatagtcccagctactcggcaggctgaggcaggagaatggcatgaacctgggaggcagagcttgcagtgagtggagattttgtcactgcactccagcctgggcgacagagcgaggctccatctaaaaaaaaaaaaaaaaaaaaaaaagaggagctggaggaggcccaccttcttaatgtaygccaaaatagttctgctggttgaaggcctggagttccctgcaatgggtggggaaggggattagcctggggaaataatgcctgggtcaagttagggaagatccaggtccctctgctgagggacagtttggaggacagagcctgaccctccatgaagagagactctcaaggtctcttttagctttaacattggctaagtgtgattctatgactcaaccagtctgccctaattcctcagtgtgggcaggacatgaaagacaacccaccagtatctcagtgagtttgtgtggagcccaccttggcagtcacacacagacac

SEQ ID NO: 560465 - DNA, 550 bp, Homo sapiens
cccatctctactaaaaacacaaaaaaattagccaggtgtggtggcgggcgtctatagtcccagctactcggcaggctgaggcaggagaatggcatgaacctgggaggcagagcttgcagtgagtggagattttgtcactgcactccagcctgggcgacagagcgaggctccatctaaaaaaaaaaaaaaaaaaaaaaaagaggagctggaggaggcccaccttcttaatgtacgccaaaatagttctgctggttgaaggcctggagttccctgcaatgggtggggaaggggattagcctggggaaataatgcctgggtcaagttagggaagatccaggtccctctgctgagggacagtttggaggacagagcctgaccctccatgaagagagactctcaaggtctcttttagcwttaacattggctaagtgtgattctatgactcaaccagtctgccctaattcctcagtgtgggcaggacatgaaagacaacccaccagtatctcagtgagtttgtgtggagcccaccttggcagtcacacacagacac

SEQ ID NO: 560466 - DNA, 381 bp, Homo sapiens
cacctctgctgtggcacgaccattgtcaaaatgctagaaagaagagagactggctcttagaccaagggratttgggatttgaaaggacttccaattccagttctatagatttccttcccattagcctcttcatgtgcatcaaatgtaaatggcaggctaaacctacaggatgaagagagttgaaagactgctgcctaaaaatgcccttttccaaatctgtgggtgcagaagcacattgaaaggcagctacccagcctggcggtgtggcacatgcctgcagtctcacatacttaagaggctaaggtgggaggactacttgagcccaggagtttgaggcttcagtgaactatgatggtgccacaacactccagcctgggaaac

SEQ ID NO: 560467 - DNA, 381 bp, Homo sapiens
cacctctgctgtggcacgaccattgtcaaaatgctagaaagaagagagactggctcttagaccaagggaatttgggatttgaaaggacttccaattccagttctatagatttccttcccattagcctcttcatgtgcatcaaatgtaaatggcaggctaaacctacaggatgaagagagttgaaagactgctgcctaaaaatgcccttttccaaatctgtgggtgcagaagcacattgaaargcagctacccagcctggcggtgtggcacatgcctgcagtctcacatacttaagaggctaaggtgggaggactacttgagcccaggagtttgaggcttcagtgaactatgatggtgccacaacactccagcctgggaaac

SEQ ID NO: 560468 - DNA, 587 bp, Homo sapiens
attgtcaaaatgctagaaagaagagagactggctcttagaccaagggaatttgggatttgaaaggacttccaattccagttctatagatttccttcccattagcctcttcatgtgcatcaaatgtaaatggcaggctaaacctacaggatgaagagagttgaaagactgctgcctaaaaatgcccttttccaaatctgtgggtgcagaagcacattgaaaggcagctacccagcctggcggtgtggcacatgcctgcagtctcacatacttaagaggctaaggtgggaggactacttgagcccaggagtttgaggcttcagtgaactatgatggtgccacaacactccagcctgggaaacagagctggaccccatttccaaaaaaaaaaaaaaaaaaaaaaaaaaagtagttacccargtaaggtggatgatcaagtacacccagtgagaagcacacaaaccttaccctttacccaaactctctcccttacctggcccatttccggtctctagaggaggatcagttagggggtgtgacccaagttacccagataattaactgtggaagcaagtttttttttcactcc

SEQ ID NO: 560469 - DNA, 571 bp, Homo sapiens
atgccgtctatataacaaatgttatagttttcttctaattgggtcttgaggtctctcaggagaatggctataaactctacctcactctaatggggctctaggggaggggcctgtgggtctttagagtagcctttcaccagaaatttcttttttctggaccacagcctaatgctcaagtatctgacccatgaccaggtgtctcacaggaaacttgtttatactagcagatggcctwgtaacttttgtctgacctgtgtgcagtttattcctaccatgataccactctttttttttttttttttttgagacgcagtcatgatgaccaggctggagtgcagtggcacgaccttggctcactgcaatctccaccatctgggttcaagcaattcccctgcctcagcctcccaagcagctgggactacaggcttgcaccaccatgcccagctaatttttgtatttttaatagagtcagagtttcaccatgtagtccaggatggttttgatcccttgacctcatgatctgtcctactcagcctcccaaagttctgggattacaggcatgagccaccac

SEQ ID NO: 560470 - DNA, 571 bp, Homo sapiens
atgccgtctatataacaaatgttatagttttcttctaattgggtcttgaggtctctcaggagaatggctataaactctacctcactctaatggggctctaggggaggggcctgtgggtctttagagtagcctttcaccagaaatttcttttttctggaccacagcctaatgctcaagtatctgacccatgaccaggtgtctcacaggaaacttgtttatactagcagatggccttgtaacttttgtctgacctgtgtgcagtttattcctaccatgataccactctttttttttttttttttttgagacgcagtcwtgatgaccaggctggagtgcagtggcacgaccttggctcactgcaatctccaccatctgggttcaagcaattcccctgcctcagcctcccaagcagctgggactacaggcttgcaccaccatgcccagctaatttttgtatttttaatagagtcagagtttcaccatgtagtccaggatggttttgatcccttgacctcatgatctgtcctactcagcctcccaaagttctgggattacaggcatgagccaccac

SEQ ID NO: 560471 - DNA, 525 bp, Homo sapiens
  misc_feature 425, 435: n = A,T,C or G
ttgcattatgtctaaataattatgagttataaatgaagctaacaaatagttaaatatgttctattctcctatttygataaatatactgccataataacccacaaggtcaaagttgagtgtagaattctctgatttcttggtgctctgcacaggaatgtggtagtaaagggagagctgatcatcagccccaggctaaacttttttctttcatcgtaggtagccctgtcctcacttgagaagctttgcaaacccttgtgtggggaactccctaggccccatgcaagctccatccacaattctcaccccttcagaaagcagatccttgggcacccatttgggcgagcacagtttgcactttgaaatggacccagggaagaggccatgcaggctcaggcacatttcgccaggtccctgagtgcccagcntgtgccctanaagaaagggtgaagctctgagtgggccacggtacagtcagtggaaggccagagaggcaccttctctagtgcaggattcagggcaggggtc

SEQ ID NO: 560472 - DNA, 525 bp, Homo sapiens
  misc_feature 425, 435: n = A,T,C or G
ttgcattatgtctaaataattatgagttataaatgaagctaacaaatagttaaatatgttctattctcctatttcgataaatatactgccataatracccacaaggtcaaagttgagtgtagaattctctgatttcttggtgctctgcacaggaatgtggtagtaaagggagagctgatcatcagccccaggctaaacttttttctttcatcgtaggtagccctgtcctcacttgagaagctttgcaaacccttgtgtggggaactccctaggccccatgcaagctccatccacaattctcaccccttcagaaagcagatccttgggcacccatttgggcgagcacagtttgcactttgaaatggacccagggaagaggccatgcaggctcaggcacatttcgccaggtccctgagtgcccagcntgtgccctanaagaaagggtgaagctctgagtgggccacggtacagtcagtggaaggccagagaggcaccttctctagtgcaggattcagggcaggggtc

SEQ ID NO: 560473 - DNA, 247 bp, Homo sapiens
tgtgcctgtattccaagctactttgatggctgagtcacaaaaatcacttgaacccaggaggcagaggttgcagtgagctgtgatcacctcactgctctgtagcctgggtaacagattgagacttgtctcaaaaaaaaaaaaaattcttggcaggacatggtggctcacacctgtaatcccagcaytttgggaggccaaggtgggttgatcccctgaggtcaggagtttgagaccagcctgactaaca

SEQ ID NO: 560474 - DNA, 326 bp, Homo sapiens
ctgtctcaaaaaaaaaaaaatggggaaactccatctctactaaaaatacaaaattagccaggcatggtggcacatgcctgtaatcccagctacttgrgaggctgaggcaagagaattgcttgaacctgggaggcagaggttttggggaggtggaggttgaggtgagccaagatcgtggcattgcactgcagcctgggcaacaagagtaaaactctctctaacaaacaaacaaacaaacaaacaaacaaaacaaaacaaagaaaaatacacacaacttatttcctggtttgtgataatctgtgaaatatattttgaaatgaattgga

SEQ ID NO: 560475 - DNA, 514 bp, Homo sapiens
cctggccaagatggcttatccccaactctactaaaaaatacaaaaattatccaggcacggtggcaggcacctgtgatcctagctacttgggaggctgaggcaggagaatcgcttcaacccaggaggcagaggttgcagtgagctgagatctcaccactgcactccagcctgggcaatagagtgagaatctgtctcaaaaaaaaaaaaatggggaaactccatctctactaaaaatacaaaattagccaggcatggtggcacatgcctgtaatcccagctacttgggaggctgaggcaagagaatygcttgaacctgggaggcagaggttttggggaggtggaggttgaggtgagccaagatcgtggcattgcactgcagcctgggcaacaagagtaaaactctctctaacaaacaaacaaacaaacaaacaaacaaaacaaaacaaagaaaaatacacacaacttatttcctggtttgtgataatctgtgaaatatattttgaaatgaattgga

SEQ ID NO: 560476 - DNA, 512 bp, Homo sapiens
accttttcaaatccaccaaggaaaagtgtctatgccttatagattgaaaagctcatctttaccagttaatttacattttactttttcctaaaatataaggctctccatatctgtaggtacacagtttgacttaattatcctatgttatatattgtacataattatatgagagataatggcaatttaaacaaataaaatgatggctatttctttttattaacttcatcatatttcactgaggttttccttactttaggcttcctygatggctgcaatgtatgctaaaagtaaatttttatgtgaaatgtttaaaatatttgaaaatgatgcttattgtttgtcaggttttgccactgttagcatgactcagtacccatagagtctgtctcttagggatgtgaagcaaatgatttctctgatccaaaacatttcatatgccttaaaagtcaaacaatgcaaagatgtgatatttagaatactagttacataataatggataatgacttagcttt

SEQ ID NO: 560477 - DNA, 471 bp, Homo sapiens
gacctacatgatccactcgtctgggcctcccaaagttctgggattacaggcatgagccactattccctgccaaattaaaagtttttatatgaaaaagatatacacaaagcaaagatacttttacagtatgaaartgaattataattgagaaaaatatctgcaggccataatagaatagttctatttcaatagttcgcaaacaatttgttagttctgctaaataaaaaaatttccaacacttgttaaaatggttaaggatcactttatttaagattaaaatgataggtgtcaagatgattctaacaggcaagagagataaggttcaactctgaacacagcaaagatatctgggaagtgcagctaatgagcagagtgaaaggttgtcaatgaatacaaattactaagaggagacatcaagggtaggggatttcttgttagctaacgtaagaggattcttgctgaaggcaagcc

SEQ ID NO: 560478 - DNA, 471 bp, Homo sapiens
gacctacatgatccactcgtctgggcctcccaaagttctgggattacaggcatgagccactattccctgccaaattaaaagtttttatatgaaaaagatatacacaaagcaaagatacttttacagtatgaaagtgawttataattgagaaaaatatctgcaggccataatagaatagttctatttcaatagttcgcaaacaatttgttagttctgctaaataaaaaaatttccaacacttgttaaaatggttaaggatcactttatttaagattaaaatgataggtgtcaagatgattctaacaggcaagagagataaggttcaactctgaacacagcaaagatatctgggaagtgcagctaatgagcagagtgaaaggttgtcaatgaatacaaattactaagaggagacatcaagggtaggggatttcttgttagctaacgtaagaggattcttgctgaaggcaagcc

SEQ ID NO: 560479 - DNA, 471 bp, Homo sapiens
gacctacatgatccactcgtctgggcctcccaaagttctgggattacaggcatgagccactattccctgccaaattaaaagtttttatatgaaaaagatatacacaaagcaaagatacttttacagtatgaaagtgaattataattgagaaaaatatctgcaggccataatagaatagttctatttcaatagttcgcaaacaatttgttagttctgctaaataaaaaaatttccaacacttgttaaaatggttaaggatcactttatttaagattaaaatgataggtgtcaagatgattctaayaggcaagagagataaggttcaactctgaacacagcaaagatatctgggaagtgcagctaatgagcagagtgaaaggttgtcaatgaatacaaattactaagaggagacatcaagggtaggggatttcttgttagctaacgtaagaggattcttgctgaaggcaagcc

SEQ ID NO: 560480 - DNA, 471 bp, Homo sapiens
gacctacatgatccactcgtctgggcctcccaaagttctgggattacaggcatgagccactattccctgccaaattaaaagtttttatatgaaaaagatatacacaaagcaaagatacttttacagtatgaaagtgaattataattgagaaaaatatctgcaggccataatagaatagttctatttcaatagttcgcaaacaatttgttagttctgctaaataaaaaaatttccaacacttgttaaaatggttaaggatcactttatttaagattaaaatgataggtgtcaagatgattctaacaggcaagagagataaggttcaactctgaacacagcaaagatatctgggaagtgcagctaatgagcagagtgaaaggttgtcratgaatacaaattactaagaggagacatcaagggtaggggatttcttgttagctaacgtaagaggattcttgctgaaggcaagcc

SEQ ID NO: 560481 - DNA, 565 bp, Homo sapiens
cagcaaccaccagtactgaggcaagaccctccagcaaccaaaacattatgactcactgaaggctcagatgattaacattacttagcaataaakctttttaaaattaaggtaagtacattatttgtttaaacataatactattacaccctttacagtacaatgtaaacataacttttatatgcattgagaaaccaaaaatttttgttgacttgttttattgtgatttttgctttattgtgatggtctggaacaaaacccacagtatcttcaagtatgactcgaatatgtagagaatttttaaaaatttttagcatattttacaaaacttattgccttataagtactcactcaatattttatttaaggagtacatcttgatttttaagggtttcttaactttattggttatgtattaaataaaacctcagcatttcaatcataatgtataagaagtatgtttatgtcattatttttaaaacataatttgaataaatgtataatattccatgtatgctgttatcataacatatttaaaaattttagcaacattcaatatctcttattt

SEQ ID NO: 560482 - DNA, 565 bp, Homo sapiens
cagcaaccaccagtactgaggcaagaccctccagcaaccaaaacattatgactcactgaaggctcagatgattaacattacttagcaataaagctttttaaaattaaggtaagtacattatttgtttaaacataatactattacaccctttacagtacaatgtaaacataacttttatatgcattgagaaaccaaaaatttttgttgacttgttttattgtgatttttgctttattgtgatggtctggaacaaaacccacagtatcttcaagtatgwctcgaatatgtagagaatttttaaaaatttttagcatattttacaaaacttattgccttataagtactcactcaatattttatttaaggagtacatcttgatttttaagggtttcttaactttattggttatgtattaaataaaacctcagcatttcaatcataatgtataagaagtatgtttatgtcattatttttaaaacataatttgaataaatgtataatattccatgtatgctgttatcataacatatttaaaaattttagcaacattcaatatctcttattt

SEQ ID NO: 560483 - DNA, 565 bp, Homo sapiens
cagcaaccaccagtactgaggcaagaccctccagcaaccaaaacattatgactcactgaaggctcagatgattaacattacttagcaataaagctttttaaaattaaggtaagtacattatttgtttaaacataatactattacaccctttacagtacaatgtaaacataacttttatatgcattgagaaaccaaaaatttttgttgacttgttttattgtgatttttgctttattgtgatggtctggaacaaaacccacagtatcttcaagtatgactcgaatatgtagagaatttttaaaaatttttagcatattttacaaaacttattgccttataagtactcactcaatattttatttaaggagtacatcttgatttttaagggtttcttaactttattggttatgtattaaataaaacctcagcatttcaatcataatgtataagaagtatgtttatgtcattatttttaaaacataatttgaataaatgtataatattccatgtatgctgttaycataacatatttaaaaattttagcaacattcaatatctcttattt

SEQ ID NO: 560484 - DNA, 545 bp, Homo sapiens
ccaggcttgacttgaacttctgggctcaagcgatcctcctgccttggcatcccaaaatgctgggattataggcataagccactgtactcaggcaatattaaagtcttgatatkagaagtgtctcagtgtactggaaagctttgtctaaattttgaaaaaatattaaaaaacacattggttttatttggccaatactgatttctttgctccatcattatttattggcattattagcctgttgactttcaatttctttacatccctttcactccatttcttttattttgtcccccaaatagaaattctttttttttttagatggattctcgctcttggctcttgtgacccaggctggagtgcagtggtgcagtctcatcactgtaatcttcatcttccaggttcaggcaattctcctgcctcagcctccacagtagcctagattacagtcatgcgctactacaccccgctaattttttgtattctttcttttttttttctttgagatgcagtttcgctcttgttgcccaggctggaatacaatggca

SEQ ID NO: 560485 - DNA, 488 bp, Homo sapiens
acctgccttggcctcccaaagtgctgggattactggcgtgagccaccacgcctggccgttccgtatttcctttatgttttattttgctgttatttgcctagcatattcaaggtaccaaattaagtattgattgatggtaatagtgataacattaagacttggagatcaggttaaagacagatatgcaccatgaatccgtaattgaataagacagaaggaaatttaattagcctttttcctgtgtccatagcagtgctttaataagaacaayagaaaagtcttttttttttcctttaaattgctaatccaggatgttttcgatgcttttatggaagtcagctaactaaataccttgagagaacagcaataccatcaaattacatctgtctgtgacattttctctaggatgggactaacaaatttgatctgtttttttttaatatgtattaattcacacttattgcattacaacaaggtttttgtcttct

SEQ ID NO: 560486 - DNA, 602 bp, Homo sapiens
aatcccttctctactaaaaatacaaaaattagcccagtgtggtggtgtgcgcctgtagtcccagctacttcaggaggctgaggcaggagaataacttgaacctgggagatggaggttgcagtgagccgagattatgccaatgcattccagcctgggtgacagagagagaaaggagagaaaggggagaaagagagagagagagagagagagagagagagagagagagakagatagatagatagatagatagatagatagatagatagagggagagacagaggagggagggagggggagagaaagaaagaaagaaagaaagaaagaaagaaagaaagaaagaaagaaagaaagaaagaaagaaagaaagggagagagagagaaagaaagaaagaaaaagaaagggaaagaaagaaatgttataagaactggaggttctaaagtcacagttatattttaatcccctttaatgagagaaaaaattgaaaaaactgaggtttactaagtattctacaatgataagaattattggccattaaaaccctaaaattgtaaggaatattgatgatgactgtggcagacagactctactatggtccttaatg

SEQ ID NO: 560487 - DNA, 566 bp, Homo sapiens
cttacaaaagttaagcatattgggaaaatattagggaattcgagattcagctaaccatataagtgtcatttagttagaattagagtgaaatawgcggtacatacttagaatccttcactagatgaagtgcattacattttcaataagaatcattcctgctagatgatacattccaaaaatcaggaattgctcctgtcttctttcccattgtactaacaactggaagccattaaatatgcagtagataataacttccttatctctatttttatttttctcatgccagtagaaattccattcattctttcaggttcagagcaggaaataccactccctccacaaaatctttttcaatatcccctgggtctctctctccctccctctctctctctccttccttttctctctctcttgttatttcaatatgatagaatatgttatatccatattcataccatcttatctttctgacttgaatatttctgtatctttctgacttgaatatttattagttttgtttgatcagagtagcagaaactgcatgagtaatattaggaattatttag

SEQ ID NO: 560488 - DNA, 566 bp, Homo sapiens
cttacaaaagttaagcatattgggaaaatattagggaattcgagattcagctaaccatataagtgtcatttagttagaattagagtgaaatatgcggtacatacttagaatccttcactagatgaagtgcattacattttcaataagaatcattcctgctagatgatacattccaaaaatcaggaattgctcctgtcttctttcccattgtactaacaactggaagccattaaatatgcagtagataataacttccttatctctatttttatttttctcatgccagtagaaattccattcattctttcaggttcagagcaggaaataccactccctccacaaaatctttttcaatatcccctgggtctctctctccctccctctctctctctccttccttttctctctctcttgttatttcaatatgatagaatatgttatawccatattcataccatcttatctttctgacttgaatatttctgtatctttctgacttgaatatttattagttttgtttgatcagagtagcagaaactgcatgagtaatattaggaattatttag

SEQ ID NO: 560489 - DNA, 542 bp, Homo sapiens
ctccctccctctctctctctccttccttttctctctctcttgttatttcaatatgatagaatatgttatatccatattcataccatcttatctttctgacttgaatatttctgtatctttctgacttgaatatttattagttttgtttgatcagagtagcagaaactgcatgagtaatattaggaattatttagaggtttatttacttcaagcccatctgttatccctgtctggccctraaacaaactggaccagcagtcaggaagggaagataaatataaataaggggaaggcaagaacaacctggagtccatgaggacaggcttaagtctacaaggataaacaaaccctcatctgtctttcaccagaagcttccctgatctcatatctcctccaagcctctggcctccaacttcagtgctgcagttttccgcacatctattgtgcttcaacatggtgctgtgaacaaatgtttcccagggtttgaagaaggttaaaaaaaaaaaaagatccagcaaaacttggaggcgaacctgcagatc

SEQ ID NO: 560490 - DNA, 627 bp, Homo sapiens
ctctgtgtggtgaaaccagatatttgtctttttttgagatagggtctcagtctgttgcccaggctggagtgcagtagtgtgaccatggttaaccacagccctgacctcctgaactcaagggatcctcctgcctcagcccctcaaggagctgggaccacaggtgcatgccactatgcccagataatttttgtattttctgtagagacagggtctcaccatgttacccaggcaggtcttgagctcttggtctcaaggcaattctcctgccttggcctcttaaattgttgaggttacaggcatgagccagcacrcctggctcagatatttgtcttatacaatcacttcctgatggccacctctctctgacacagatagatacaacgtacttgacttgtcccactgacccccacacaacccacatggactgcacaaatatgctgcagtgactagctgtcagtcacagtgtgactgtatggaacatgtgcctgccctaaacccaccaattataacttacctcaggaagcctgcttgagtaacatcttgaaccccaataaggctgtggcctataggtttatctttctccggctccatatctgctggttgagggcattgcttttgtgaccctct

SEQ ID NO: 560491 - DNA, 557 bp, Homo sapiens
tgtcttatacaatcacttcctgatggccacctctctctgacacagatagatacaacgtacttgacttgtcccactgacccccacacaacccacatggactgcacaaatatgctgcagtgactagctgtcagtcacagtgtgactgtatggaacatgtgcctgccctaaacccaccaattataacttacctcaggaagcctgcttgagtaacatcttgaaccccaataaggctgtggcctataggtttatctttctccggctccatatctgctggttgagggcattgcttttgtgaccctcttgttgtccctcatcaatatccctctctttcatggacctatgagtaataaacttcttttatgtcatrtgtttttgttgtgtgggttctctgggtctcacccagctgacacaccaaaacctaacctttctctgggtcaagttctctctagagagtagctatctttgcagaagtaaactagtcaaagatcagacaagagccactagggtgtctgccagtataaacaaatttcctgggagagggacaactggtcatgagt

SEQ ID NO: 560492 - DNA, 542 bp, Homo sapiens
ctctaaatatggagaagttctcctccctttttcagcatgaaagtgtcagaggccgggcgcggtggttcaggcctgtaawcccagcactttgggaggccaagacgggcagatcacgaggtcaggagatcgagaccatcatggctaacgcggtgaaaccccgtctctactaaaaatactaaaaattagctgggcgtggtggtggtcgcctgcagtcccagctactcgggaggctgaagcaggagaatggcgtgaacccgggagacggagcttgcagtgagccgagatcgcgccactgcactccagcctgggcgacagagcaagactccgtctcaaaaaaaaaagaaaaaaagaaagtgtcagaaagcatctgggactcacaaaggccccctccaggcatgggggcttcgagctgtggggccgtgggggcagtgcatgcgggggagtctggaatctctgaagaccacttgccttacaagggcatgtcctgggccctaccgtcctgaacacgaacacataaatgtttgtttcctcaaaatttggac

SEQ ID NO: 560493 - DNA, 575 bp, Homo sapiens
cacatatatgcatacatacatttatgtatatatacatgcatatattttattatttttaattgtggtaaaatgcatataatatacaatttaccatcttgatctttttttttttttttgagatggattctcagtctgtcgcccaggctggagtgcagtggcacaatctcaactcactgcaacctctgccccccaggttcaaacgatactcctgcctcagcctcccaagtagctgggattacaggcgcctgcccccacgcttggctaatttttgtaatttttagtagagacggggttttcaccatcttggccaggctggtcttcaactcctgacctcatggtccacccgcctgagcctcccaaagtgctgagattataggcgtgagccactgygcccggccatcttgaccatttttaagtgtatagtttagtggcattaagtatagtcacattgttgtgcaaccatcttcaccatctatctctggaactcttgtgatcttgcaaaactgaaattctttgcactcatgaaacaataactccaattctcccctccctccagcccttggcaaccaccattc

SEQ ID NO: 560494 - DNA, 571 bp, Homo sapiens
tctgtgtgagttccaggtactgatccttccagatggttcttttcccatgtcagtttcctcacatgcatgcactgattgaacccttttcagatctctaggtttttctctctatgcaactctccagagtagtatgttctgcagactgtagccaccttggtctcccaggactctcagcttagtattctcaaatcagggagtccaccttggtttcctcttcctgagccatagtctaaaaattctcttaaagcaataataaagctcaggcaatcacttgcttcctgtctttcaggattattgtcctttactgactgatgcccagtgccttgaaaactattgcttcatatattttgtttgtttttagttatttcagatggaaaggtaaatcttgttcctgttagtctattggaagaatgcttcctttctctttaaatattttaaaacatagattgtgggccttgtcctgtgctgggccctttagtcaatctttaatagctatacaatattatcttcactccttacgtcaataaatttgacaggatggaaaggrtgtcctagataaataaatcaactg

SEQ ID NO: 560495 - DNA, 594 bp, Homo sapiens
actgatttgctcttaatgacattacaagaaattttactttcactttttttttgtttgttttgtttttttgagatggagtcttgctctgtcgcccaggctggagtgcagtggcgcaatctcggctcactgcaagctccgcctcccgggttcacaccattctcccgcctcagcctcacgagtagctgggactgcaggaacccgccaccacacctggctaattttttgtatttttagtagagacagcgtttcaccatgttarccaggatggtctcaatctcctgacttcctgatccacctgcctcggcctcccaaagtgctggaattacaggcatgagccaccacatctggccaactttcacttttataaactgtttctctcgaaaacttctctttttttttaaatttttttagtatttattgatcattcttgggtgtttctcggagagggggatttggcagggtcataggacaatagtggagagaaggtcagcagataaacatgtgaacaaaggtctctggttttcctaggcagaggaccctgcggccttccgcagtgtttgtgtccctgggtacttgagattagggagtggtgat

SEQ ID NO: 560496 - DNA, 594 bp, Homo sapiens
actgatttgctcttaatgacattacaagaaattttactttcactttttttttgtttgttttgtttttttgagatggagtcttgctctgtcgcccaggctggagtgcagtggcgcaatctcggctcactgcaagctccgcctcccgggttcacaccattctcccgcctcagcctcacgagtagctgggactgcaggaacccgccaccacacctggctaattttttgtatttttagtagagacagcgtttcaccatgttaaccaggatggtctcaatctcctgacttcctgatccacctgcctcggcctcccaaagtgctggaattacaggcatgagccaycacatctggccaactttcacttttataaactgtttctctcgaaaacttctctttttttttaaatttttttagtatttattgatcattcttgggtgtttctcggagagggggatttggcagggtcataggacaatagtggagagaaggtcagcagataaacatgtgaacaaaggtctctggttttcctaggcagaggaccctgcggccttccgcagtgtttgtgtccctgggtacttgagattagggagtggtgat

SEQ ID NO: 560497 - DNA, 594 bp, Homo sapiens
actgatttgctcttaatgacattacaagaaattttactttcactttttttttgtttgttttgtttttttgagatggagtcttgctctgtcgcccaggctggagtgcagtggcgcaatctcggctcactgcaagctccgcctcccgggttcacaccattctcccgcctcagcctcacgagtagctgggactgcaggaacccgccaccacacctggctaattttttgtatttttagtagagacagcgtttcaccatgttaaccaggatggtctcaatctcctgacttcctgatccacctgcctcggcctcccaaagtgctggaattacaggcatgagccaccacatctggccaactttcacttttataaactgtttctctcgaaaacttctctttttttttaaatttttttagtatttattgatcattcttgggtgtttctcggagagggggatttggcagggtcataggacaatagtggagagaaggtcagcagataaacatgtgaacaaaggyctctggttttcctaggcagaggaccctgcggccttccgcagtgtttgtgtccctgggtacttgagattagggagtggtgat

SEQ ID NO: 560498 - DNA, 554 bp, Homo sapiens
cagaaaggaaatgagagagagggaacgttttggaatagactatggcagccttgtactcagttcctagtaaacacccatgacaaaataactcagaagttcccacttgaaggcactcagattctgcattcagcagctactgacggcccttcattacattccccaggggaagcagggcaccatctggtggcaagagatgatttctttcatcctgcctgtcactgcaccagggaaaataaacagayactttttcttttctgggctaactcagaagcctaaacaatttgtaacatcaggagaagcaagttggatacagcatataaaaatatcatcaccctctatctgccttctctgtgtctcaacttagtacattcacatcatagtcttaacagttgcagttcagtattataccaaatttttgaatcgcaattgaaccttcaacaccatgggtttgtactgcatgagtccacatattcacagattttcttctacctttgccatccctgagacagcaagtccttccccttctctctcttcctcctcctcctcctcagcct

SEQ ID NO: 560499 - DNA, 629 bp, Homo sapiens
ttgctctgtcacccagtctggggtgcagtggtacgatctcagctcactgcaacctctgtctcctgggttcaagcgattctcctgcctcagcckcctgagtagctgggactacaggcatgcaccaacacgcctggctaatttctgtatttttagtagagatgaggtttcaccatgttggcctggctggtcttgaactcctgacctcgggggatctgcctgcctcggcctcccaaagtgctaggattacaatggtgagccactgctcccagccaaatttttacattctttttaagtcccttaaagaaaatgtggagtatttcagaaacaacattttatttatttgaacgtaattgtttaagaatttgtgataattcagacgaagactaggctgacccttatatgatcatttaaacaagaatttaataatctgggaaactttgaaactaccaaaaagtttaattgtaaatttcttgaacatattgcacacactaggtgcttattaagtaattttgtattaataaaaatcaaattagaatatttaatatatgaaaatttttacatgctatgtagtcaaaagtatgtatgtgctaagaacaaatggttattatttattacatttacatcaaggt

SEQ ID NO: 560500 - DNA, 611 bp, Homo sapiens
cggcaacaacaaaacagacacagggcttcctagcttttgtgcttttgagtggattatagatgtcattttcaatatcatttccttcagccaagtggttttcaacttgagcatgaatcaaaaatccacaccagcacagtttctgattctgtgggtgtcaggtggagcttgtgagtttgcatttctaaaaagttggcaagagatgctgctgttgatgttagtttggaccgmtagtttgagaatcagcaggttatcaggccagagttcaaggaatcacatttgatagtctttaatataatcttctatacactaaagagatgctctaccttgaggaaatttatttcagcatccagtgaaaactccctgggttgctgctgaagcagtttatgttagcgaaatggaacaaggctccagatgagctggtcagaggtggtcagagaaagctcctggagggtgttacttcaggagcagatcttgaatttgtgtgtttgtgacagatatgttttgttggtgcatccaagctagctgtagtatgactggtctaaaaatggatgcatattctgcaaattagatattcttcattattttgaaatatatcacatacaaatgttttt

SEQ ID NO: 560501 - DNA, 596 bp, Homo sapiens
caattaaacctctttcttttgtacattgcccattctcaggtatgtctttatcagcagcatgaaaaaggactaatacattttctatatattctttattcatttttcataatttatacctttcaaggaatttatccattccatctaagttatcaaatttatgggtataaagatgataataatattcctttattatatatacttataatatacatttaacatttatagggtctgtagtgacatctcctctttcattcctggttttggttatttgggcattgtctctttattacttgtccagtccagctagatgtkttattaattttatttatatttacaaataactgccttttaggttctttgattttctcagctgtttgtttctattgcattgatttctatttctcccattattatttccctccttcttttcactttatttttcttgcctcttaaaggggaagctgagatcactgactttaaacattcttcttttctaatataagcacttgaaactataaattttcctctaaagcacttgtctagtttcattttgtaaattttaatagattttatttttgttttatagctttcctttt

SEQ ID NO: 560502 - DNA, 576 bp, Homo sapiens
aatttttaaattttttgtagagatgagctctcgctatgttgcccaggctggtctcaaattcctgggctcaagcgatcttcccaccttgacctcccaaagcagtgggatcacaggcttgccaccagcattgccacctctaacctcaccaaaataacatctttaggtttccaataaggcttttgaaacartaagtttcatgtattcattttgtcttctaagggaaaacagtaacaagtgaagagcaaaagacaatgtgacagacaacttctgccagggtttgtaacgatcccacctcttggtgtacctgtccttggcggaacctcctccccatatgtgtgggctggacttggtggcatgcttctggtgagtggaatatggcaaagttgatgaaactaagtttggaaagtcagtgacttctgtcttgtttgcattctctttggctcctctcatgtgcttgctctaatggaacaaactggagaggcccatgtagcatggaaccgaaggtaaactccagccaaccaccatcaaagaactgaggccctcggtctaacagttcttgagaaactaaatcctgtc

SEQ ID NO: 560503 - DNA, 637 bp, Homo sapiens
gaccccgcgccctggcctatcctgatggtcacagacactgcactttaggcaccctgcccacactgaaccccaacaactccctctgcttttctactccctgcatcccaggtttgtttccagaagctctcctaacacagtcactgggccctctagscctcttgtctaaacgggtgccccacagctccctctgcaggcctgtatgtctgcccaccagctacagcttgcctgaaccacacagggttgcttcctgcctgccttaggactgtagaccagcaaacttctctgtcatctagtagattgcaacaatatcttctccagtgaggtctgaacctgaaccttgggaaggggaccccttcagtgtttttccttccttgaggactcttctttatctctagagtactgtatagaattttcttacttattaacgttacccttcagtgctttgtaattgttttgtaattctttatattaaatttttctgtctaaattactgtatagtttctgtttcctgattgaaccctgactgatctaggccttttgagaaacagaggaggctgctctataatatttcagcactggcatattgtggcccctttctccattgattcgaagaagcagcaggatagaaagacaaata

SEQ ID NO: 560504 - DNA, 637 bp, Homo sapiens
gaccccgcgccctggcctatcctgatggtcacagacactgcactttaggcaccctgcccacactgaaccccaacaactccctctgcttttctactccctgcatcccaggtttgtttccagaagctctcctaacacagtcactgggccctctagccctcttgtctaaacgggtgccccacagctccctctgcaggcctgtatgtctgcccaccagctayagcttgcctgaaccacacagggttgcttcctgcctgccttaggactgtagaccagcaaacttctctgtcatctagtagattgcaacaatatcttctccagtgaggtctgaacctgaaccttgggaaggggaccccttcagtgtttttccttccttgaggactcttctttatctctagagtactgtatagaattttcttacttattaacgttacccttcagtgctttgtaattgttttgtaattctttatattaaatttttctgtctaaattactgtatagtttctgtttcctgattgaaccctgactgatctaggccttttgagaaacagaggaggctgctctataatatttcagcactggcatattgtggcccctttctccattgattcgaagaagcagcaggatagaaagacaaata

SEQ ID NO: 560505 - DNA, 536 bp, Homo sapiens
gattcacaggaatcagatattaaaatgccttgtgtgatacctgaccaaggttctgaactcagtaaatgagcctgccctgtactttcctgccttcttagtattgctagagcatcacatttagatctgcgtatatcatagctatcctattatgtgtttggggtcatgaaaatgaatactccatctttatagtttctgacactgaccatcaaccaacttgaaggtatcccaataggtaaggtgccacccattttcttggggttgcaayttctaactgaaggtagaaagggaggtactgagtagggggtagaaagggaggtactgattagggaggggaaaagagaagtggtgaggaaaacattatgactgcctcaaaaagcaagtattcccctcccaggagagggatagcttcccatcacctggctactgtaggccatgttttgctgaaccagaaagcaggtagagttcctacatttctttttgttggtgatttctaatataattctgttgtggtgaaaaaaatactttgtgtgatttca

SEQ ID NO: 560506 - DNA, 600 bp, Homo sapiens
tggaattcgtaattgcctcttatctatcccatttcatagttctttgagcagctcaaataaactaacatcataattggtcagacagtctactcacatgttaaacgtttactaatatgaaacagaatctgatacttctagacatgaattattactaagataaaaatataagaatttttatatggaataagagtcattattctatatagcccaggtaagtctaacataagctctaacgatttctgtctttgtgaacgtagttctctgttttaataccaatttcaaatagagaaatatgtacctcaatgtgttcatttacttttttcataataatccattctgcttctgtcattttataaagctctttattttttaaatgttagtaactaatgaaaatgatcaaaatcaacatgtttttattttgtatgttgctgcctaagaaaacatatttaaaacttgcatctttttttttwttttttttaattatactctaagttttagggtacatgtgcacattgtgcaggttagttaccatatgtatacatgtgccatgctggtgcgctgcacccactaatgtgtcatctagcattaggtatatctccc

SEQ ID NO: 560507 - DNA, 531 bp, Homo sapiens
atttttagtccatcaggggaattagttattttaaaggaactttaaatataaaacatataaaatataaatataaaacatctcttatatttttctaaaaatagagtaacctaaatcttctacagctatcacagtacatatgtgtgtgtctgtgtgtgtgtgtgtatatatatatgtctatatatgtacatatgtctatatatgtctatatatgtctatatatatctatatatatctatatatgtatgtgtgtgtgtgtatatatatatacacattcagtagttcttyaaacttttttcttgtattctttaattttttggttgttttacccaatgtcatattggtttaaggtcttcatgaaaccgtcagcaataatccccatgtcctttgcttaggtggcaacaatgacttggtataattaaccccttgaatattgaaactacaaatttatatagcagaagtgacagttttatgagcgaactcaccatgctaaaattacagtttttatctctttcacctgaatgcattatctta

SEQ ID NO: 560508 - DNA, 531 bp, Homo sapiens
atttttagtccatcaggggaattagttattttaaaggaactttaaatataaaacatataaaatataaatataaaacatctcttatatttttctaaaaatagagtaacctaaatcttctacagctatcacagtacatatgtgtgtgtctgtgtgtgtgtgtgtatatatatatgtctatatatgtacatatgtctatatatgtctatatatgtctatatatatctatatatatctatatatgtatgtgtgtgtgtgtatatatatatacacattcagtagttctttaaacttttttcttgtattctttaattttttggttgttttacccaatgtcatattggtttaaggtcttcatgaaacmgtcagcaataatccccatgtcctttgcttaggtggcaacaatgacttggtataattaaccccttgaatattgaaactacaaatttatatagcagaagtgacagttttatgagcgaactcaccatgctaaaattacagtttttatctctttcacctgaatgcattatctta

SEQ ID NO: 560509 - DNA, 608 bp, Homo sapiens
cccttggttctctctgcttttttccatgtgacactccctccctagaggtgtgcaaatgtccagaaggcagccaatctgtgggctgaccagcagccttagattggtcctgaccatagaactcggtttatcatggtgttgaatattggaccagtggagtcaaccagatccttcttctctgtaattttgaactttagagatgaaaaacaaaagcattatttaacacaataggcaggcraagcagaaatagagaatagcccatttactacaaaggcagagccctagaattaggagatggcctttgcagagaagacaagccagctcggctggttgtgtcctgatctgtgctccaggctctgacaggcctgcatgcaggctgagctatatgtctcatggggcactctaagcagctgacctggggcctgtaagactgtatgggcctacaaaaaatatacgaaacctaaaaaaagtctaaagggctaaaaaacacaaacatgaaactaatacaatatgtataaaacatcacaagagttggtacatttggtatttgtaataattttgttacttttgaaaacagtgtacaggttagattttctcatgtatgcatgata

SEQ ID NO: 560510 - DNA, 608 bp, Homo sapiens
cccttggttctctctgcttttttccatgtgacactccctccctagaggtgtgcaaatgtccagaaggcagccaatctgtgggctgaccagcagccttagattggtcctgaccatagaactcggtttatcatggtgttgaatattggaccagtggagtcaaccagatccttcttctctgtaattttgaactttagagatgaaaaacaaaagcattatttaacacaataggcaggcaaagcagaaatagagaatagcccattyactacaaaggcagagccctagaattaggagatggcctttgcagagaagacaagccagctcggctggttgtgtcctgatctgtgctccaggctctgacaggcctgcatgcaggctgagctatatgtctcatggggcactctaagcagctgacctggggcctgtaagactgtatgggcctacaaaaaatatacgaaacctaaaaaaagtctaaagggctaaaaaacacaaacatgaaactaatacaatatgtataaaacatcacaagagttggtacatttggtatttgtaataattttgttacttttgaaaacagtgtacaggttagattttctcatgtatgcatgata

SEQ ID NO: 560511 - DNA, 608 bp, Homo sapiens
cccttggttctctctgcttttttccatgtgacactccctccctagaggtgtgcaaatgtccagaaggcagccaatctgtgggctgaccagcagccttagattggtcctgaccatagaactcggtttatcatggtgttgaatattggaccagtggagtcaaccagatccttcttctctgtaattttgaactttagagatgaaaaacaaaagcattatttaacacaataggcaggcaaagcagaaatagagaatagcccatttactacaaaggcagagccctagaattaggagatggcctttgcagagaagacaagccagctcggctggttgtgtcctgatctgtgctccaggctctgacaggcctgcatgcaggctgagctatatgtctcatggggcactctaagcagctgacctggggcctgtaagactgtatgggcctacaaaaaatatacgaaacctaaaaaaagyctaaagggctaaaaaacacaaacatgaaactaatacaatatgtataaaacatcacaagagttggtacatttggtatttgtaataattttgttacttttgaaaacagtgtacaggttagattttctcatgtatgcatgata

SEQ ID NO: 560512 - DNA, 608 bp, Homo sapiens
cccttggttctctctgcttttttccatgtgacactccctccctagaggtgtgcaaatgtccagaaggcagccaatctgtgggctgaccagcagccttagattggtcctgaccatagaactcggtttatcatggtgttgaatattggaccagtggagtcaaccagatccttcttctctgtaattttgaactttagagatgaaaaacaaaagcattatttaacacaataggcaggcaaagcagaaatagagaatagcccatttactacaaaggcagagccctagaattaggagatggcctttgcagagaagacaagccagctcggctggttgtgtcctgatctgtgctccaggctctgacaggcctgcatgcaggctgagctatatgtctcatggggcactctaagcagctgacctggggcctgtaagactgtatgggcctacaaaaaatatacgaaacctaaaaaaagtctaaagggctaaaaaacacaaacatgaaactaatacaatatgyataaaacatcacaagagttggtacatttggtatttgtaataattttgttacttttgaaaacagtgtacaggttagattttctcatgtatgcatgata

SEQ ID NO: 560513 - DNA, 489 bp, Homo sapiens
agctaagaggaattttgacacttttaagtagttgaaaaatcaaagaaataatactcagtcacaagtgaaaattgtgtgaaattcaaattccagtgtctatraagtatacaattttgctgaaacacatcctagctctttcattcacatattatctatggtcacttctgcactacaatggcagagttgagtatttgcaatggagaaagcaaggtctaaaatatatactctctggcctttacaaaaaaagttgacctacccctgaccttaacagaatatctttctttaaatggatactcctattttacataaaattattctaaagaaaactttatagcacttataaatagaaagttataattaccataatcaccttaactacaagacaaacttggaaattactgtaacaaccacaataagtacaacttcacattcattagcatgattattattatttaagaaaaaaaaacagaaaataacaaggtttggcaa

SEQ ID NO: 560514 - DNA, 489 bp, Homo sapiens
agctaagaggaattttgacacttttaagtagttgaaaaatcaaagaaataatactcagtcacaagtgaaaattgtgtgaaattcaaattccagtgtctataaagtatacaattttgctgaaacacatcctagctctttcattyacatattatctatggtcacttctgcactacaatggcagagttgagtatttgcaatggagaaagcaaggtctaaaatatatactctctggcctttacaaaaaaagttgacctacccctgaccttaacagaatatctttctttaaatggatactcctattttacataaaattattctaaagaaaactttatagcacttataaatagaaagttataattaccataatcaccttaactacaagacaaacttggaaattactgtaacaaccacaataagtacaacttcacattcattagcatgattattattatttaagaaaaaaaaacagaaaataacaaggtttggcaa

SEQ ID NO: 560515 - DNA, 417 bp, Homo sapiens
attattgggatgcttactatcaatgtttaaaacttgtatctactttccttaataaactgatactttaattgagataaaagtagctgataaaaatcttagtccataaggtcccatgatcaacaaatacaaatttattttcctgtatataaaaattaatttcttttgggggccccattctcttgaatctcaatcagtcttgggtgttcctkgtgatttcttggaggcacagcattttttttatctttgtgttgtagtcccaggtgattatctcctccttccttatcttaatcgattggattctttgatcacccgttctcttagaaatattggcacaacttggccagcgtggtggctcacgcctgtaatcctagcactttgggaggccaaggcaggcggattacctgagctcaggaattc

SEQ ID NO: 560516 - DNA, 417 bp, Homo sapiens
attattgggatgcttactatcaatgtttaaaacttgtatctactttccttaataaactgatactttaattgagataaaagtagctgataaaaatcttagtccataaggtcccatgatcaacaaatacaaatttattttcctgtatataaaaattaatttcttttgggggccccattctcttgaatctcaatcagtcttgggtgttccttgtgatttcttgraggcacagcattttttttatctttgtgttgtagtcccaggtgattatctcctccttccttatcttaatcgattggattctttgatcacccgttctcttagaaatattggcacaacttggccagcgtggtggctcacgcctgtaatcctagcactttgggaggccaaggcaggcggattacctgagctcaggaattc

SEQ ID NO: 560517 - DNA, 417 bp, Homo sapiens
attattgggatgcttactatcaatgtttaaaacttgtatctactttccttaataaactgatactttaattgagataaaagtagctgataaaaatcttagtccataaggtcccatgatcaacaaatacaaatttattttcctgtatataaaaattaatttcttttgggggccccattctcttgaatctcaatcagtcttgggtgttccttgtgatttcttggaggcacagcattttttttatctttgtgttrtagtcccaggtgattatctcctccttccttatcttaatcgattggattctttgatcacccgttctcttagaaatattggcacaacttggccagcgtggtggctcacgcctgtaatcctagcactttgggaggccaaggcaggcggattacctgagctcaggaattc

SEQ ID NO: 560518 - DNA, 541 bp, Homo sapiens
tgttaaacccaacatgtaacatctgatgtttatgggaaataaacaatcccatcaaaagagccaaaagagccaaaagaaagttctgctttctatttcttgtcatgacactatgtgactatgacacatagtataatttcttatagttaaattcaaagattaactataatttcttatagttaaattcaaagataaaaactatataattattctgataggaaaagcctttgatayaattccatctttgttcctgataaaactccttgtatttattatttagtaaaaacgccaaacacctcaaattaattaaaaaaaaacctcaaaaacttcaaacaatacttcagaagccttttttaagcctctaaatctaatttccagtttgtaggaaatagaaatgataaagcagtaagttaaatatcacctgggaaaaacaatcagataaattcatttgggaaacatatgaaagtcaatttataaatatacaaatatagacacagagagagcaattatatcaatgtatatgattctcaggtgatcagtgatg

SEQ ID NO: 560519 - DNA, 413 bp, Homo sapiens
tcacctactgatattacggttggtaaaatctacatgttacatcatacagttaaaagtacatctctgtcagaggttgcattggttcttaaatttttagatcaatgttatctaataacagttttgatattgatcgttaaaataaaagtgcacscaataagctgctatgataagacaaacatctctgaggaaaagtaaggtatgtgaataggaaagtctcattagtagaatgatcacttccccaggtgccaagctgaattagatcacaattagaactagcaatgtctcaagaaacagtgctgaatggtgagttggaactgttggtttcttcgactttttggacctttgcacaattcagtgacttttcattaattaggttgtcagtgctgcagatcctggtaatctgaaatagtcca

SEQ ID NO: 560520 - DNA, 477 bp, Homo sapiens
aagtttcttttacttttgaacagattttgcttcatttgttcacctctctcctttagacatatcaagtagctatatgtctgctctcatacgcttgtcctccatatccatcacctttcttccagtttatttcttccctttcatttcacttttctttttatgattttgcttaaaatgtcttcctcatcaatttattgtatgtattctctagtaatattgtatatattacaagttaagtcctgcaattggattattttccattcatttctttgctgagtcaacaactgttgcatcttatttcttacctaataactggttctgaatttttggtttcagagttcatatcttttgctatatttttgatacattggatcagttttattaaaatttatttttgtttcctgggatagtgaaatcaaactcccaaagtatgatcttaatctatctttccacatggkatcttttttcctttcccattcc

SEQ ID NO: 560521 - DNA, 305 bp, Homo sapiens
gcaacaggagagcaattctcaggtcccaggcakagtgtatggggcacgggtagaagcagctttgttgagggcttgccattgaagagggtgaggcatccctctggtcacatccttgtgctggcagatggggaacatgcaagcccttcaaaccctagtccttatgggatttgcctcccctaccctggcttcaagagccctcactcagcttgcaaccaagtcccagcagcaactttccctcacctcgtgaccccacctcagatcactcacttcctggcactagttgctgcctctcaggcctagctcat

SEQ ID NO: 560522 - DNA, 643 bp, Homo sapiens
agtagctaactctccaaaagtttcttaattattttcttgtacagcggggcttgcaggtccaagcaaattttccttccattcttcagcgtggctctggcagggaaaagagaagagatgtgactttcagtccttgggtttgcaaatggcattagaagggggagggttgggcagaggaggcacggagcgggagcactgacagatgcagtgcaaggactcacatcagttgggcagtggggcagtggggtccggccttgatcacctccaggctggtgatgtgcctgggacggacctgggaggtggtcttcacacacaggcactgcaggtccccatcttcttcagcttcagctgagggggaaatggagagggtaagagaggasgaggggagggagtggtgactccatgagtagccagaggtactttagggactttttccactaccttcagccttcttttccttaccataaatcacacctcccccagacagaagttgttctaaccaggtgggaggtgcaggtgcagcgcctggcactgtggccagacactcagcaggctctccgttaagtgtggctgtgatcatgatcctagaggattcctccccagccccagggcttcccggactccccctcgccgctgccagccctca

SEQ ID NO: 560523 - DNA, 538 bp, Homo sapiens
tctgggtggaaaactttgagagggtccctggatcaatgtttatctttggtactctagcccactgtcatttatatcaatgtattattggagcaagtcgtaatagcaaaagtgagtaccacattaaattctctgtgaaaatttggagtgcaagcagacctccatttaggtcatcaaggtagcgggtggcagatagggttatttgagggaatggtcaccagatgatgagggcagaaaacagatgttctctgtattcaaagatcagtcttagaacagtgtgacacagcatgacctgtgactttgagaggcagacaacaatgtcaacagtacctgagacttttggggcaaataaactacaagagaaaaagaggaatgatggatgaccccactctgttattacgattccttatttgagaattatcctgaaatctcctgttagagatttccagaaactggtgggatgtgagagatacagagatggagcttctgcaatagccagtttgggcaatgtttcytctgctggaatatcaaagttataaga

SEQ ID NO: 560524 - DNA, 564 bp, Homo sapiens
tttttcctgatcctctctctcctcccaccctccaccctccaacaggcctcagtgtgggttgttcccctctatgtgtccatgtgttctcatcatttagctcccacttatttcatggcagttttgtaaagagtttttgacrgttaactgattgcacagtacaacagaatgaaattacattaaatctatgtatttgcatagatttaacaccatgagtggaattaaatggacagaaaactttttgatttttttgaatcataaatttaacaccatgagtgggattaaatggaccgaaaactttttgattcttttgactcataaatttcaagatcgtcttgcctggcagttcttcctgctcatctataatttcctggttgggtacctgcctacaactgccagtgcttggtttcacagactcacagctaacttagcaactgatcatagtttaaaattgtaaaattccatcaatttttactgccactgtctgatgtgaaaactagaaaagaaacatagtcagatgtagatatctgacggtccacaacataaagattatacgaagtcggccgc

SEQ ID NO: 560525 - DNA, 539 bp, Homo sapiens
ttttgtaaattttataagttaacaaactgaatatgagattagtggtgttttcatcatttttttctctcagttcagtatcaatatcctaaatcaccatagataattgacctttatgacctccaaaatgtatcaattttacagttagttcagaattaaaattaattatagacattaacattcttaacaaatttatgccagattgctccctaggtttttggctacagcagtatcaggtgtcagttgtcacaagttattcattagtatcacaatatggttgttaagtcatgagatggtaacaaggccctgccattgtcaaatttcaaagaaaaataaaggatctcttcttttacaaattcaytgttaatctctataaattataaccagaattatgcatgaatcatacttaactattcagtgtagagtgaaatgtcttaatttattaatctctcatccattagctcactgattataatattaagttaaagtgtaattttacatgtcacacgtacattggttatttcaacctcataatgctatat

SEQ ID NO: 560526 - DNA, 594 bp, Homo sapiens
caaacaggctttgtgtgagcaataaagctgtttatttcacctgggtgcaggtgggctgagtccgaaaagagagtcagcaaagggagataggggtggggccgttttataggatttgggtaggtaaaggaaaaaggggggttctctggcgggcaggactgggggtcacaaggtactcagtgggagagcttttgagccaagatgagccaggaaaaggaatttcacaagacaatgtcatcagttaagtcaggaacaggccattttcacttcttttgtggtggaatgtcatcagttaaggcaggaactggaaatctggatgtgaacgtgcaggtcacaggggacatgatggcttagcttgggctcagaggcctgacactatctatctatctatctatctatctatctatctatctatcttctttctttctwtctatctatctatctatctatctatctatctatctatctatctatctatcttagggttctccggaggggcaggcctaataggagactatatatctgaaagggagtttattaaggagaatattgacttgcatgttcacaaggtaaagttgcataataagctggaggaag

SEQ ID NO: 560527 - DNA, 567 bp, Homo sapiens
taactgaatcatgggggtgggtctttcccacgctattcttgtgatagtgagtttgtctcatgagatctgatggtttttaaaaggggagtttccccacaccagctctcctgtcttgtctgctgccatgtgatgtgcctttcaccttccaccatgattgtcaggcctccccagccacgtggaactgtgggtctaggaaaccagtttcttttgaaaattgcccaatcttgggtatgtctttatcagcagtgtgaaaatggactaatacagggcagttccttgcattggcttgggaaagggaggtcaattccmtgaggtcaaggtcaatccccagggggtcccctaactctctgacctaggtccctcccagcccagtgtggtccatgccttctgaagagctggagggatgtaggccatgagtagtcacagtgtttactgtatttatttggaaattatgtgaaaatctaatgaccaatggagagtctacctcttaacatttatttttttaagagatagggtcttgctatgttgcccaggctggcctcaaagtctgggttcaagcaatcctcc

SEQ ID NO: 560528 - DNA, 526 bp, Homo sapiens
gcacttctaagattaagccacaaaaaggcaaggacacctctagagggtccctgagatggctgcaccccaactgcagcctatgggaccctgatccagagaacacagctgggccgtgctggatccctgtccatacrgtgctcaattgctaaagtgaacagaattaaatagatggaatccattccttacgtgagggtctcaagattactctgcagacagagtgagagggaatgtgttcaagttgactaaactaccaggaccacagagacacaggaatgccaaagtgtcttggaaacccaaaagagactgtttcaggacaaacaaaaccaggttccaattatacctagaacagcacgatgtagtgaaaatataacctaggattaaacatttctgggttcagatccaagtcctttcatacacaggcattgtggccctgtgaaaggtgcttattcaaattctctgagcttttagagacatctgtaaaatgcagaacctcagttatagtaataattgcttcagccaatattga

SEQ ID NO: 560529 - DNA, 599 bp, Homo sapiens
ttcttctctcttttcttctttattagtcttgctagcagtctatcaattttgttgatcttttcaaaaaagcagctcctggattcagtgattttttgaagggttttttgtgtctctatctccttcagttctgctctgatcttagttctagttcttgccttctgctagcttttgaatgtgtttgctcttgcttctctagttcttttaattgtgatgttagggtgtcaattttaggtctttcctgctttctcttgtgggcatttagtgctatagatttatcagataaacaaaagctgagggaattaatcaccattagatctgacttaaagggaattattcactggaacaaaagaatgctaaacagtaacatgataacataaaaaagtatgaaactcattaataaaggtatacatatatgcacacacacacacacacacagcagtatacttctgtaatggtggtragtaaatcactgttaatagtaatataaaagttaaaagacaagtatattaaaaataattataactttaaaatatgttaaaagaaacaatagacgtaaattttgataataacagaaagtgtggaggtgggaagaagttaaa

SEQ ID NO: 560530 - DNA, 599 bp, Homo sapiens
ttcttctctcttttcttctttattagtcttgctagcagtctatcaattttgttgatcttttcaaaaaagcagctcctggattcagtgattttttgaagggttttttgtgtctctatctccttcagttctgctctgatcttagttctagttcttgccttctgctagcttttgaatgtgtttgctcttgcttctctagttcttttaattgtgatgttagggtgtcaattttaggtctttcctgctttctcttgtgggcatttagtgctatagatttatcagataaacaaaagctgagggaattaatcaccattagatctgacttaaagggaattattcactggaacaaaagaatgctaaacagtaacatgataacataaaaaagtatgaaactcattaataaaggtatacatatatgcacacacacacacacacacagcagtatacttctgtaatggtggtgagtaaatcactgttaatagtaatataaaagttaaaagacaagtatattaaaaataattataactytaaaatatgttaaaagaaacaatagacgtaaattttgataataacagaaagtgtggaggtgggaagaagttaaa

SEQ ID NO: 560531 - DNA, 623 bp, Homo sapiens
aagcttgttttccttatctaaggtcgcaaagaaatcacttactttactctctcaccccatatacataagtacctgctatttgtcaagtggtctgctagccctggaggtaaaatgaaaagccagacatattccctgctttcaaagattacacaatctatccagggagatggacaaataagcagaaaatcatcctagaatataacaactctaaaacatctcaataagtgctgagatcagggaggtcttccaagtggaggtggcccttgagctatgtcttagaggatgaatttgagttttctgagcattgagggagaggtagccggtccgaagagcacagcataggcaaggcccagtggaacgaagggacagctggtcagcgtggctaagaggctgcctgggtgttgggagagagaccagggaagaagcaagccaaggcttacgcagcgccagaggactcacactcgatcccagggcagcaagaagctactgaaggatcccagcagaagagggcccacatcccatccagagacaagaaacgaatctctgccagcgtgacagaggatgctcttatgggtaggrgtgaggaggtatgtccagaggcaaaagatcagaaatgaaatcat

SEQ ID NO: 560532 - DNA, 611 bp, Homo sapiens
tctcagaggataattagtaggagagagatagaggctgcccttttatttattattcattatttgtttattttttgtatctacaaaaattgtacattttaatggtgtacataaccatgtttttatatatgtaacattgtagaatggctagatcaaactaattaacatatgcattgcctcccatattttaatatgagaacacttaaaatctattccyttatcaattttcaaatatgaaatacattactattaactctattcaccatgttgcacaatagatctcttgaacttattcctgcagtctaagtgaaattctatgtccttcgactaatatctcctcaatccttgccttgcagcttcaccagcccctcataaccatcattctactctctgcttctgtgaggtcaactctttaagatttcacatataagtgaaatcatgtggtatttgtctttctatgcctggcttatttcacttagtataatgttctccaggtccatctatgttgtagaaatgacagtatttccttctttttatggctgaatagtattccattgtgtgtgtgtatatgtatgtacgtgtgtgtgtgtgtgtgtgtgtatagatagatagat

SEQ ID NO: 560533 - DNA, 558 bp, Homo sapiens
tcatacctggcggataaacattccccattacaagactcaggctcatgggctttcaagaggctcatgtatgaggtcacctctttggcaaaccagatgttcccatttagggggatattctgtaagtgctctccatgctagagctgagacacaagaaagctcaaaagagaagtgagaaggttggattcatattaaaaactgtgctaaccagtgaaggctgtccccagccacagagagaacagtttgggtttgataggaataatgcaggtcccctggaaggaagggcaaggtggggcttgaatatagactttgctgctttgctgtaaggggagctaaactgtggccaaagtcagtgttttctgggaatgggacagtatagacagtgtctggctgagtctgtgagagaactgaatttactcagcagaaagctatacctgcattcctaccccagacagattcccaactttgatcttttatttatctgataarttattaaactctttttcctaactgtttttcagttgttattttccctccctcaatgcgtgcgtccctcccttc

SEQ ID NO: 560534 - DNA, 552 bp, Homo sapiens
cttggtgagagagaaagcaagagagagaaggaggaagtgccaggctcttttaaacaaccggatcccatatgaactcagaatgagaactcactcattatcgtgaggacagcaccaagccattgatgagggatccaggcccacgaacacctcccactaggcccacctccaacattggaggtcacatttcaacatgaggtttggagggaacagaacatccaaaccctatcagctaccaaagagctttgccttacagtttactttgttactaaattattacctgtgacctctatctcttatctgtaactctcccctccctacaatctaaaggaaagtaagttttctttatcagttacyaaatcctgtctttctccacttgttatccatcctctttgtcttctcctcctcatccctggaagaccaggcctcagggtcctattttagggtttttctggatctgtgtttggtaccatcagtaggcgtgagtgcacagtgcttgtcttcactaaaactatacaccgagtccttcttctttagcactgaggcattttaagc

SEQ ID NO: 560535 - DNA, 577 bp, Homo sapiens
tacattatttagctcctacttttaagtgacagcatgaggtwtttgtctttctgtgtcttgtttcattaaagttaattgcctccagttttatccatgttgctgcacaagatatgatttttttgtgtggctgaaaaatattcaattgtgtatatatacgacattttcttttttttttttttgagttggagtcttgctctagtcatccagggtggagtgtaatggcgcgatcttggctcactgcaacctctgcctcccaggttcaagcaattctcctgcctcagcctcctgagtagctgggattacaggcacctgccaccacacctggctaatttttgtatttttagtagagacggggtttcaccatgttggtcaggctgttctctttggccaggctggtttcgaactcctgatcttgtgatctgcccacctcagcctcccaaagtgctgggattacaggtgtgagccacagcgcccagctgacattttctttatccagccatccattggtggaggttgaccatatctttgctactgttaatagtgctgtgataaacatacagatgcaggtttcttcttg

SEQ ID NO: 560536 - DNA, 576 bp, Homo sapiens
  misc_feature 291, 293: n = A,T,C or G
ttggagaaggcagctggatttaaacagaaatttctgcagtaaaatatactggattgagtgatttcatgtgggtgggagtgagagtgatcttggagatgagaaatttgaggtgcctgtgaaacatttaggagcaaatattttgcagtagttagaaatggggctttggcatgatcatgccactgcacttatctgggcagcagagtgagactctgtctcataaaaaaaaaaaaaaaaaaaraaagaaagaaagaaaagaaaagaaatggggctctgaggttcaggagagagtcngntcggcgaattgttggatgagcggctcccagcgaaccacacctgtgagtattcatgcccttgcccctctctcaactgatgtgctgggctatatcactcgcttgaccgatgggcactaacactatcatatagcttgatagctctgcatattggctaccctctagcacactcctctgaacccagatgccatattgtaaggaaggacaggttatcctgctgagacagaagccacgtaaagaggaactggacaattagatacaatgtggacagaggcctcctggagaa

SEQ ID NO: 560537 - DNA, 557 bp, Homo sapiens
catgttggtttgctgcacccatcaacctgtcatttacattaggtatttccatatgaagatctttcttaactcacctcctgccacttctcactacctaaacttcctcatttatagtttgttcccaccatattaaatgtcttgccattacatgacaaagtagactcttttatgactgtttattccatgccctctatttagaaggccattcttccactttccacctaagagactcctacttmtattccaaggattaagtatcccttcctggaacagacttctgttatttttgcttgatagcatccattccactttcttccagtaattgcactttgatttctctttgggaattacccttccctcattgcatacagttttgattgcactgtaaatcaaagtgcctcccctgtcttatctaagtggtaggcatgtggcccacaccggattttctcttgtgaatcttgagggaggcaacacaaggacagaaaacatttggagtcaattcatcctatagtaactccccctaggaactgtcctttagtttctgatacctagatgct

SEQ ID NO: 560538 - DNA, 450 bp, Homo sapiens
tcccaacaggggtcgtcagaacctccatacaggagagctctggctggcattaggccagggcctccctagaatgaagcttccagagaaggagcaggcagcagtctttgctgttctgcagcctccactgatgatacccaggcgaacagggtctagagtggacctccagcaaactgcagcagacctgcagaagagggacctgattgttagaagaaaaactaacaaacagaaagcgataacatcaacataaaggacccccacacaaaaaccccatccaaagatcatcagcctcaaagatcaaaggtagataaatccatgaagatgagaaaaaaacagtgcaaaaaaacaactgaaaattcaaaaaaccagaatgcctcttctcctccaartggttacaacccctctctggcaaggacacaaaactggatggagaatgagtttgacgaactgaca

SEQ ID NO: 560539 - DNA, 596 bp, Homo sapiens
aatgacacagctccaccccagactgatgcagagctggatctgtcttgctgtatctgattcctcttttctcagtttctcctcacacttccataatcaggcttggccmaacatttcactaacattcattagatgaaagttatcaaggatttttacatagataattgtaattgtcactcctcagatttcaccttcctgggtctatctgttgcctccaacaagtggatcattctctactctttgaaacgctgtatttacttgacctccaggacatatttccctgcttttcctattaatccattgactactccttccaagcagactttgctgcttctttctctttgttctgctctctaagggttggggtatcctgggactcagtcacttctcattcactgtgggcaatcacacttataaaccactgtcacaatgtcagagggctgtctgcatgcagctgtcttcaacccagacctctctgtgggatttggaacatttatatcaaagcttcccagtcagcatttcaccatgatgttgtagacttttttttttttttttgagacagagtcttgctctgtcacccaggctagagtgcagtggcg

SEQ ID NO: 560540 - DNA, 629 bp, Homo sapiens
aggacagaattctgtaggaaccattatgagtgaaactatgtatttctccctaactcacaggctagcaacaaatctcagtgtgttaaaaaacwcagagtagcaacaagccacactgtgttaaggaaacataaaaataaaaactctcttggcatgatatctaatgaacacaaatgattccattaaaaaacaaacttgtgttaggcttgtttaatcagagctggaaagttaatgctaaggatgtgtggtttaaaatgtaaaacttttttttaactaaatggtcttcccacagtctaaccacacacacacacacacacacacacacacacacacacacagacacacacaaacccacacacgccatcaacaaacaacaaataattgaggtaccagagttagaatattggctcccatcttcctcttccccttgtgttactcccctgactatgtaatgccatgtgccaagaagagatcatctaggtgagcccaatctcataagcgttttaaagtaggggcaaaagatcagagatatctaaaaagaaagaaggaatccatgtaccattactggctttgaagatggtggggccatgagctaagggttgtggacagcatttacaaactcagaacaacac

SEQ ID NO: 560541 - DNA, 375 bp, Homo sapiens
ttcatttctttccttttttctctccttctatttcctttcctctctccttctattttctctcctctctcctccyctccccttctcttacctcatatcctgtccccttttctcctcttccagttttgtttcctctccttctttcttttctttccctctcttccacctctttcccatatattaaataccaaatagagctgtgttaggttctaaaatatgaaaaagtaaaaacatgttctcggttcctatggaattaacagtcttagggatttttattggtgaaataactgtggatcaaatagtactaataaagtagtaagctcaggcactgaaattactgtgcagccattttctagctttcttgaataaatgatatat

SEQ ID NO: 560542 - DNA, 615 bp, Homo sapiens
cagtgtcattagattttaaagatgaattcagtgcaaatcactgcaactgaccataccgttaacccctttattaatcacaactacctattctagaacaccgtttttaaaagatgaatttattgattcttatagtagggggataaaaattaggatttgggggacatcycaactttatttgataggattatggctaattcctcaagtgtattaggattggaaacaatgaggttttgggccaccgctttaaaattgaactttgtagattatatcaaattctgaaaactctactcaagaaagcaattctcactctcttgagagcagggaattattatcagaaaagtctagcctaatttagggtccatttgcaagaaaaagtggctttcctgataggtatgtctatttggatatatttggactgaccttgtccatgtggcggaaagcacttaaggaaacagcaattccttattgttattactctcggggacttaattgtaaaactaaaacaataacaaactcctgtccaatttggaactaatttactgttttttaagatatataggtaaggtactcaatgcccatctgatgttttcattactttatttggtatgagtattt

SEQ ID NO: 560543 - DNA, 479 bp, Homo sapiens
ggctaatatagggggattttggaataccccatgacagagaacagacaacagttggttttgaaactggtccctggagtttcttcctacctcatcytagcagaagaaactttctcaattacaagtaaggaataccccacttggaaagaggaatggcagaaggtgaggtaaaggaagatttcggtgtaggtaggattgtccattgagaatgaactactaatgatgagtgataatgaaaccaatggtattctgcttagagttaattaccctcctacattttttttttaagatggagtctcactttgtcacccaggctggagtgcagtggcgtgatcttggctgactgcaacctccacctcccaggttcaagcaattctcctgcctcagcctcctgagtagctgggactacaggcacgtaccaccacacccaggtaattttttgtatttttagtagagatggggtttcactgtgttagccagga

SEQ ID NO: 560544 - DNA, 479 bp, Homo sapiens
ggctaatatagggggattttggaataccccatgacagagaacagacaacagttggttttgaaactggtccctggagtttcttcctacctcatcttagcagaagaaactttctcaatyacaagtaaggaataccccacttggaaagaggaatggcagaaggtgaggtaaaggaagatttcggtgtaggtaggattgtccattgagaatgaactactaatgatgagtgataatgaaaccaatggtattctgcttagagttaattaccctcctacattttttttttaagatggagtctcactttgtcacccaggctggagtgcagtggcgtgatcttggctgactgcaacctccacctcccaggttcaagcaattctcctgcctcagcctcctgagtagctgggactacaggcacgtaccaccacacccaggtaattttttgtatttttagtagagatggggtttcactgtgttagccagga

SEQ ID NO: 560545 - DNA, 479 bp, Homo sapiens
ggctaatatagggggattttggaataccccatgacagagaacagacaacagttggttttgaaactggtccctggagtttcttcctacctcatcttagcagaagaaactttctcaattacaagtaaggaataccccacttggaaagaggaatggcagaaggtgaggtaaaggaagwtttcggtgtaggtaggattgtccattgagaatgaactactaatgatgagtgataatgaaaccaatggtattctgcttagagttaattaccctcctacattttttttttaagatggagtctcactttgtcacccaggctggagtgcagtggcgtgatcttggctgactgcaacctccacctcccaggttcaagcaattctcctgcctcagcctcctgagtagctgggactacaggcacgtaccaccacacccaggtaattttttgtatttttagtagagatggggtttcactgtgttagccagga

SEQ ID NO: 560546 - DNA, 453 bp, Homo sapiens
gttggcaaatgagtattgtaattcaggctcaaaataaatatatatagaaggtatgattgaggaaaaaagcattaaggaccaccccaacacaatagcctgataatcatatctttcctgtgtccctattagatttttagatttagatttttcccattcatactatgcctacctggggtaccttgctatactgatattttaagtctttcattaaggttttcttagttataaaaatacaagtcttaaagcacaaactcaagagaatgtaatttttaaaacatcgtcttattttcttataatccactctaatacactttacccaagaaattaaaatccagtatttaatttatgggtttataagtacattgtcaggggaatgtagccataaaatcctccaaaataggctacctgctgaggtctcagcaattaacttyatctcatatggtacaaaaactt

SEQ ID NO: 560547 - DNA, 518 bp, Homo sapiens
ttgtttaattttattgaattttgttaaagaaataaagatttaaaagtggctttaaggataaagccacatacaattaaaagtagagtttgttaataggttaagccatacctttctatttaatttcattacttttttctttttaactatatgatgagaaagtttatgtagaatatgaatactttttttctcattaaattaaagcaagaaactcctgatttaatgtagaattcttagttgattatcattagaaatcatatgaaaaccaattctatgctttgcacacatgtactatttgtatcaactgtaatatttgtttattttctaatttcacttaaaattacctagtgcttaaggtcaatgatacaaactccctaattyggtaattaaaaccgtcgaccttgtgtccattttatgccagtgtgaaattctagaataaggttataaaagtttgcaaattttatatgcatatatttatactatatacatatagaaatatatatacacatttattatatata

SEQ ID NO: 560548 - DNA, 469 bp, Homo sapiens
tttttcattttttaagagacagggtctcactctgtcacccagctggagtgcygtggcacaatcatagctcactgcagcctcaatctcttaggctcaagtgatccaccagcctcagcctcctgagtacccaggaatatgagtgtgcatcaccatgcccagctatttttttttttttttaactagagatggactcttgctacattacccatgctggtcttgaacttgtgtcctcaagcaatcctcccacctcatcctcccaaagcatgggattataggtgcgagccactgcacccagccaaatccaagtcttagtttcctcatttgccaaactgttaggatactacctgcctagccaaccttacagcactactttgttattcacccagacacctatcctagacttcaggaggcaagcagaattctatagttgggactctaaaaagaaaggggactgttgatcttgattaat

SEQ ID NO: 560549 - DNA, 531 bp, Homo sapiens
gctaattttttaattttttatagggacaaggtctctctatgttgcccaggctggtctcaaactcctgggctcaagagattcacctgcctcaacctcccaaagtagtcgcattatgggtgtgaaccactgtgccaagcctgcttttacacctttaaaaaaaatgagttgtttgtctttgagtggttatattttgaacactattctgttccactgatttgtctattttgatgccaataccacactgtgctgattactgtagctttatagtctcaacatcaaattgtgctaaccctccacctttgttcttttccaaattgttttttattrttattgtaggttctttgcattttcatatgaattttagaatcagcttgttaatttttataaaataataaaaaagccaggcatggtggctcatatctgagccatggtggtgagaaattgagtgtgataggggaaagggtgggaagcaaacttctattaataactggatacctgtttgtatttttttttggtggggggatggagtct

SEQ ID NO: 560550 - DNA, 577 bp, Homo sapiens
taagaattcctcgtatattctgatacaagtcctttaacagacatgcattttgcaaatattttcttgcattctgcggcttgctttttcatttaatggtgtcctttggagagcagaagtttttaattttgaggaagaccaatttttttctttcatggattgtactttctgtgtatgatctaaaaacctttgtataaccctaagccacacagatttccttttatgttttttttctagaagttttatagttttaggttttcttatgcctataatcaattttgggttaattttgtatattttgcagattttaaaatatttgtatatttttgtatatcagatatttactttgggcrcacacacacacacacacacacacacacacatatatatatatatatataactttatttaatcctcacaataaccctctgttatggagattactattatcctcacactattgaagaaggtgttgaaacttagagaggatgagaaactcacccaaggtcactactctaattagtggagtaacagagattaaaatttagatgttttaattttgaagtcttgcatttagcca

SEQ ID NO: 560551 - DNA, 577 bp, Homo sapiens
taagaattcctcgtatattctgatacaagtcctttaacagacatgcattttgcaaatattttcttgcattctgcggcttgctttttcatttaatggtgtcctttggagagcagaagtttttaattttgaggaagaccaatttttttctttcatggattgtactttctgtgtatgatctaaaaacctttgtataaccctaagccacacagatttccttttatgttttttttctagaagttttatagttttaggttttcttatgcctataatcaattttgggttaattttgtatattttgcagattttaaaatatttgtatatttttgtatatcagatatttactttgggcacacacacacacacacacacacacacacacayatatatatatatatataactttatttaatcctcacaataaccctctgttatggagattactattatcctcacactattgaagaaggtgttgaaacttagagaggatgagaaactcacccaaggtcactactctaattagtggagtaacagagattaaaatttagatgttttaattttgaagtcttgcatttagcca

SEQ ID NO: 560552 - DNA, 638 bp, Homo sapiens
agagacaacagagagatgccttgccccttctgccatgcaagggttcaatgaaaagacagtgatctgtaaacaaggtagtgggccctcaccagacaccaaatctgctggggccttggtcttggacttcccagcctccagaactgtgaaaaacaaatatttcctatttataagccacctggtttatagtattttcttacagcagctggaataaactgagactaagagcgaaaaaatgtttttcataatcatgcatttctctccctttcatctcttgggtgcctggtatgtgtccaaaatagcaccagatgcttctggcagaggscctacctacataaagggtatcatccagggaagaagtcagacagcaaaaactaagtgcaattaatatgaccaaatgggtggttctgggttccaggaccatagagctagaagctgatattcagagttttaagcagaaaaagaaagattggataagaaattgttttgaagactcctaaaggattataaacatttaaggaattggcaatgcttagggaggataccttggtttggggtggggttttttttttgtttgttttttgtttgtttgtttgttttttccatttagagcacatggttgcaagcaacagaaaccaatt

SEQ ID NO: 560553 - DNA, 638 bp, Homo sapiens
agagacaacagagagatgccttgccccttctgccatgcaagggttcaatgaaaagacagtgatctgtaaacaaggtagtgggccctcaccagacaccaaatctgctggggccttggtcttggacttcccagcctccagaactgtgaaaaacaaatatttcctatttataagccacctggtttatagtattttcttacagcagctggaataaactgagactaagagcgaaaaaatgtttttcataatcatgcatttctctccctttcatctcttgggtgcctggtatgtgtccaaaatagcaccagatgcttctggcagaggccctacctacataaagggtatcatccagggaagaagtcagacagcaaaaactaagtgcaattaatatgaccaaatgggtggttctgggttccaggaccatagagctagaagctgatattcagagttttaagcagaaaaagaaagattggataagaaattgttttgaagactcctaaaggattataaacatttaaggaattggcaatgcttagggaggataccttggtttggggtggggktttttttttgtttgttttttgtttgtttgtttgttttttccatttagagcacatggttgcaagcaacagaaaccaatt

SEQ ID NO: 560554 - DNA, 596 bp, Homo sapiens
aatacaactttaagtccacaaaataacacttgtttaaaaatacaacagcccaaaacaacattctgttttatgtagtctctcttaaagaaagcttgtctgtaaaagtccatcagtgaatagttcccctcgttctctgagatgtcatggcagttgagtaatcatacaagctgctctaaaaatgtatgtgtgtctagttaatttaggcagtttattttaatagcattcacctctttttgattatagcaggtgtttcaaggataaatttgctgaaaattgtattttgtttaaacagcagcatgtacatttatggccttactatattaaaaagcatttattgtctggcagcaatagatacaattacaaacatttgtgacagtaattggagctattattcctgcattgagccacrtggagaccgacttattgccacctgtatttacatttgttactggtaattgtaaaagctaattttttttatttggcaccttgtttttctttaaattacgtgaatatttctcaacagaggtctaccagaaaatctgtaagaattataactgtagtttctccattattcaaataacaggcagagtcccatt

SEQ ID NO: 560555 - DNA, 543 bp, Homo sapiens
tccaaataaataaaatgagaaatgaaaaaagagacattacaactgatattgcagcaattcgaaggaccattagtggctaccatgagcaactacatgccaataaattggaaaatctagaagaaattgacaaatttctagatatataaaacctaccaagattgaaccaggaagaaatccaaaacccaaacaaattgataacaagtaatgagatcaaagctgtaataaaaaagtctctcrgtagagaaaagcctgcaaactgatggcttcactgctgaattctaccaaacatttaaagaatgacttacaccaatcctactcaaactattccagaaaatagaggaagaaggaacacttccaaactctttctatgaagccagtattaccttgacacaaaaaccagaaaaagacacaaaaaaagaaaatgacaggccaatatctgtgatgaatattgatgcaaaaatccgtaacaaaatactagcaaaccaattcagcaatacattagaaagatcattcattatgactaagtgggatttatcacccatg

SEQ ID NO: 560556 - DNA, 512 bp, Homo sapiens
aatctaggtggaggttcccaaaccttaattcttgacttctgtgcacccacaggtccaacaccacatggaagctgccaaggcttggggcttgcacccactgaagccacagrtcgaactgtaccttggcccgttttagctacaactggagtggcttgatgcagggtatcaagtccctaggctgcacagagcagggggggccctgggccccacccacgaaagcatttttttcctcctaggcctctgggcctgtaatgggaggggctgctgcaaaggtctctgacatgccctggagacatctcccccattgtcttggtgattaacatttggcttcttgttacttatgcagatttctgcagctggcttgaatttcccctcagaaaacggggttttcttttctatcacattatcaggctgcacattttctgaattttttttgctgttccccttttaaaactgaatgcttttaacagcacccaaatcacatcttgaatgctttgctgttagaaatttct

SEQ ID NO: 560557 - DNA, 519 bp, Homo sapiens
gcctccagcccactgtgcccaccactgccagtgcagatgagggagggcagagtgaggggcagcgcagagggagggacaacattctcttctgagtgctcaccaggggacagggacccgtgccaagccctctcccatttaatatcttacaaccaagctgcatcggggttccaaagcttccatctctacacaagagggccctggggcacagtgtgtaactggctcagggtcagccagctaacagaggcagatcaggaagccaaccggtgtgcctcactccaaaagccctttcatttaagaagtcatataatctgtaccacctagaggagagacagctgggtgaggaagatggaggagcaaagctgggtagcagaaggggcttccactgccctaactgtagaaggctgaaaaatatcccaaagaaatcaggtcctaatccctggaacctgcaaatgttaccttataggtattatatacatatatgtrtgtgtgtgtgtatacacactcttttttttttttttt

SEQ ID NO: 560558 - DNA, 561 bp, Homo sapiens
gttaatatcatttgatgctatcaaagaaattgatgcatttgggcaaaattgtcagacttttgtaaaacaattcaaccttgagctctgtttggctgctcaagattttctcgtccttaaatcaaagctggcagttcaaggaggtgatgtactgtgcctctgtacttgaaacctcttcactgattgctctcagatgagaataatagcagaacrccagccaatttctaggctggtgagaatcttggggaaagagagttttaaaaatattgtgccccacggagtcaccacagttggtgaagaataacagtggctcgttaggccagccaacattctagcctgaccactaagtgtcattgtggtcccagcacacagacctgggtcaggaagagaaaagaagaggcataaaatgcagatcatgagcaatgagcttcatcatatttgataggtcatttctagagaattacaccattaaggaacgtgggagtgcagagtagcagatgtacagaacttcagaaaaacagcttgtgtagtgctttaaaattagttaggagcttaataaaaatt

SEQ ID NO: 560559 - DNA, 547 bp, Homo sapiens
tacaggctgagtgacagagcgagactgtgtctcaaaaaaaaaaaaaaaaaagaaagaaagaaaagaaagagagagagaaagaaagaaagagagagagaaagaaagaaagaaaaggcattctgactggtgtgagatactatctcattgtggttttgagttgcatttctctgatgactagtgatgatgagcattttttcatatgttttgggccacttgtgtatcatttttttgagaagcrtctgttcatgttctttgctcacattttcatgggattatttgctttttgatttgcttaagttccttatagattctggatattagacctttgttgggtgcataatttgcaaatattttttccactgtaggttgtctgtttactcccttgatagtttctcttgctgtgcagaagctctttagtttaattaggtcccacttgtgaatttttgtttttgttgcaattgcttttgaggacttaaccataaattctttgccaaggctgatatcaagaatggtatttcctaggttttcttctaggatttttatagtt

SEQ ID NO: 560560 - DNA, 583 bp, Homo sapiens
aagctttccccctgagaactggaacaagacaaggatgcccactttcaccacttctattcaacgtagtactggaagtcctagccagagcaatcaaacaagagaaagaagtaaagggcatccaaatcagtaaagaggattcaaactgctactgtttgctgatttgctgctgttttctaggtatagatcatatacttagaaaaccctaaagactcttccaaaaagctcctagataggataaatgaattcagtaaagttgcagaatataaaatcaatgtacacaaatcagtagcactgctacacaccaacagcgaccaagctgagaatcaaatcaagaactcaaccccttttacaacagctgcaaaaaaataaaataaaatactcagaaatgtacctaaccaaggaaatgaaagatctctacaaggtaaactacaaaacactgctgaaagaaattataggtgacacaaacaaatggaaacatatcccatgctcatggatrggtagaatcaatattgtgaaaatgaccatactgccaaaagcaatctataaagtcaatgcaatgcccatcaaaataccaacatcattc

SEQ ID NO: 560561 - DNA, 623 bp, Homo sapiens
caatcctactactggttatctgcacagaggaaaagaagtaattatatgaaaaagacacttgcacacacatgtttatagcagcacaatttgcaattacaaaattatggaaccagcctaaatgcccatcaaccaaygagtggataaagaaaatgtggtgtgagagtagtggttctcccagcacacagcttgagatctgagaacgggcagactgcctcctcaagtgggtccctgacaccctgtagcctaactgggaggcacccccaagtacgggcggactgacacctcacacggccaggtactcctctgagacaaaactttcagaggaacaatcaggcagcagcattggcggttcaccaatatccgttgttctgcagccactgctgctgatacccaggcaaacagggtctggagtggacctccagcaaaatccaacagacctgcagctgagggtcgtgactgttagaaggaaaactaacaaacagaaaggacatccacaccaaacacccatctgtacatcaccatcatcaaagaccaaaggtagataaaccacaaagatggggaaaaaacagaacagaaaaaccagaaactctaaaaatcagagcacctctcctcctccaaaggaa

SEQ ID NO: 560562 - DNA, 606 bp, Homo sapiens
gcaccaggtttaaggttaaaccaaaaaaaaaaaatgacccctgaccccaaataagttccaattgcatatgggctatatctgtgctatcataaataagcagatagagttctgcctctttgtcacctaaggatacttctgccttgccaggcaagagctactgagtcattaagaggacaatgctcacagttcagtaaaggagccctttcaatagaaaaaaaaaagtgtggcttctgaagggagagtgaggatgatcagatttcaggagtcaatccagctgctgagaagcatgrgggcagatggtagatggtggaccagaagaaagcagatcaggagtactagaagctccaagtgctgtacacagaggcttccaaggacactctcccaggaaacaaaaagtgtggtttttaaaaaaattcatagagataataccattgacatatactttgagtaattttttattagtaatgatgagtttcaccagctcttttatcctaatctgctttacgaccacagaaggatttctttaaatcccttaagtattctgagtactaaagacagagacaatatgttatatttgtgtaacactttacaaatttcaaagtgctt

SEQ ID NO: 560563 - DNA, 463 bp, Homo sapiens
gctgctcttctcaatctcctttgctggattctactctttttctaccatctaggctctttaggactctgtccttggacctctcctctttccacactcatattatttgatgattctttctaatcttatagcttttaattccatctgtgcactcttgattcacaaacttatacctccaggccagatctccctttggaactccagtcatatttccaactgcctaattgacaccyttctgggaaatctaagagattgctcagagtttgcacgcctcaaatgagactctgggacttctgcaaagtctattctatcgtatttaatggcaactctgtccttccagttgctaggacccaaatatcttagtcatccttgactattcttttttttttttcgtatggcatgcatcagatccaccaagaaatcctgtaggttctcccatccaaatatattttgaatcaaaccactt

SEQ ID NO: 560564 - DNA, 463 bp, Homo sapiens
gctgctcttctcaatctcctttgctggattctactctttttctaccatctaggctctttaggactctgtccttggacctctcctctttccacactcatattatttgatgattctttctaatcttatagcttttaattccatctgtgcactcttgattcacaaacttatacctccaggccagatctccctttggaactccagtcatatttccaactgcctaattgacacccttctgggaaatctaagagattgctcagagtttgcacgcctcaaatgagactctgggacttctgcaaagtctattctatcgtatttaatggcaactctgtccttccagttgctaggacccaaatatcttagtcatccttgactattcttttttttttttcktatggcatgcatcagatccaccaagaaatcctgtaggttctcccatccaaatatattttgaatcaaaccactt

SEQ ID NO: 560565 - DNA, 581 bp, Homo sapiens
gaggcgggtggatcacccgaggtcaggaattcaagatcagcctggccaacatggcaaaaccctgacactactaaaaatacaaaaaattagccaggtgtggtggcacgcacatgcaatcccagctactcaggaggctgaggcaggtgaattgcttgaacccaggagacggaggttgcagtgagacaagatcactctactgcackccagcctgggcgacaaagcaagactctgcctgaaaaaaaataaaattaaaataaactgaaagtttggagatatcattaaacatgaagtaatagcatttttacactatacatctttttgaaatcccctgaaaacaacagaaataacaagagaactaccacagtcccaaaccacaaaattgaaacatatcagcaaaatgctataaaatctaaagcaagatgaaggaggaatctgaaagccgacatataagtctctagaccttgagcaggacacaaatcttttctaactgtatcagaatccagaacagttcacctaagaatcctaatattaacatggttaaagaaggaaaggatgtgagtgcgccattgaagatgtacatc

SEQ ID NO: 560566 - DNA, 635 bp, Homo sapiens
agaaagggaaacgaatgccaaaaaataattgtccacacatgctgcagaccagtcctcacaaaactgacatccttagtgatgagaggacatggatgttgatgcagagtattcgtgcatgtagatacaaagtattcaagcatggccacacaggcaygcagacctacacccaaggagggggctatcatggcctcgcctcatcatcatgctttgctagcaggggcattccttagtcctattcttggtccctaaatcagcatctgaaaaaccatcttttttaaaaaaaaacccaagcctctgacttaatatccccaaacattttttctcaaaagaatgaattttcttcttactgctttattgaagcatttcccaaagtatgttccatagaatccaagtgcttgggatgctactgggtattatacattctcttaaatccattactaaataagtctgggaacagttcacttaagcgtgatgttttaagactgctgtattactagaccctagaagctttactatgacaagtgggcattgggatcttctagaatgggacccagtacctgaacttttaacacacacccttacaccagtgacccaaattgccctcccttctccagatgatgatggccatcaaaagt

SEQ ID NO: 560567 - DNA, 610 bp, Homo sapiens
tgtgtgtatttgagtatatgcatgtattttatgttcttgaggttagtccagctatactacattttttaattagcagtctgaaatataaatrttcactccaacacttaacaatacttgcatgcacagccactgctgtggtgaccaactctgagggggatccaactgagttccctccagaagcaatcccagatattgtcctgtggtcggaaaacatgctctgtataattctgattctttgaaattattgaagacaccaggcgccgtggctcatgcctgtaatcccaacactttgggaggccgcagctgtggatcacctgaggtcaggagtttgagaccagcctggccaacatggtaaaaccctgtctctactaaaaatacaaaaattagccaggcatggtggtgcaggcctgtagtctcagctacttgtgaggctgaggcaggagaattgcttgaacccgggaggtggaggtcgcagtgagctgagattgcgccactgcactccatcctgggagacaaagcaagactccatctcaaaaaagaaaaagaaaaagaaaagaaaaagaaattgttggagacctgttttatggcccagtatatggtcagttttgca

SEQ ID NO: 560568 - DNA, 485 bp, Homo sapiens
ttatcttgacactttttcaaaaatcaattgagcatctgtatgtagatttatttctgtaccttatccttttctgttgaattatgttattcttcctctagtgctacactgtctaggccacagaaattttaagtctttaactcaggtagtatgagtcctccaaacctttctctttctctcaaagttgttttattytattctattctattctattcctttatatttccatataaaagtgagaattatcttgtcaatgtatataagaagcctgctgtgattttaattgggattgcattgaattgctagattaaaatgaaaataatgaatgtttttaaaatattgactctccaaatacatgaacatggtttatgtctccacttatttatcttttccttgatttatccaaattttttagttttcagcatataagtgatgtacatatttggttggattcatcccttaatatttttatgatttgaagccattgt

SEQ ID NO: 560569 - DNA, 499 bp, Homo sapiens
tcaagagacttattcaccctcatgagattagcatgcgaaagacctgcccccatgattgaattacctctaactgggcccctcccacaatatgtgggaacggtgggagctacaattcaagatgagatttgggtggcaacacagccaaaccatatcaggatgtccaagagttcctgcaagattcgttgacaaaactattctttgttcattgaattatcttgacactttttcaaaaatcaattgagcatctgtatgtagatttatttctgtaccttatccttttctgttgaattatgttattcttcctctagtgctacactgtctaggccacagaaattttaagtctttaactcaggtagtatgagtcctccaaacctttctctttctctcaaagttgttttattctattctattctattmtattcctttatatttccatataaaagtgagaattatcttgtcaatgtatataagaagcctgctgtgattttaattgggattg

SEQ ID NO: 560570 - DNA, 504 bp, Homo sapiens
attcctaggtattttatatcctttgtagctatgataaatgggattgctttcttgatttcttttttagattgttcactttgggtatatggaaatgctactgatttttgtatgctgactctgtattctgcaactttgctraatttgtttatcagttctattagtttcttggtggcgtcttcagctttttctgagtataacatcttgtcggcttttatatcagcactttaatatcagcacttagggccaaagatgagggatcacttgcacctaggagtttgagatcagcctaggcaacatggcaaaaccccatctttacaaaaaatacaaaaattagcaggatagggtggcaggtgcctgtggtcccagctatttgagaggctgggaggatcacttgagcttgggaagtcaagcctgcagtaaactctgattgcaccactgcactccagcctgggtgacagagcaagaccctgtctcataaaacaaacaaacaaaaaaacaaaacaa

SEQ ID NO: 560571 - DNA, 504 bp, Homo sapiens
attcctaggtattttatatcctttgtagctatgataaatgggattgctttcttgatttcttttttagattgttcactttgggtatatggaaatgctactgatttttgtatgctgactctgtattctgcaactttgctgaatttgtttatcagttctattagtttcttggtggmgtcttcagctttttctgagtataacatcttgtcggcttttatatcagcactttaatatcagcacttagggccaaagatgagggatcacttgcacctaggagtttgagatcagcctaggcaacatggcaaaaccccatctttacaaaaaatacaaaaattagcaggatagggtggcaggtgcctgtggtcccagctatttgagaggctgggaggatcacttgagcttgggaagtcaagcctgcagtaaactctgattgcaccactgcactccagcctgggtgacagagcaagaccctgtctcataaaacaaacaaacaaaaaaacaaaacaa

SEQ ID NO: 560572 - DNA, 504 bp, Homo sapiens
attcctaggtattttatatcctttgtagctatgataaatgggattgctttcttgatttcttttttagattgttcactttgggtatatggaaatgctactgatttttgtatgctgactctgtattctgcaactttgctgaatttgtttatcagttctattagtttcttggtggcgtcttcagctttttctgagtataacatcttgtcggcttttatatcagcactttaatatcagcacttagggccaaagatgagggatcacttgcacctaggagtttgagatcagcctaggcaacatggcaaaaccccatctytacaaaaaatacaaaaattagcaggatagggtggcaggtgcctgtggtcccagctatttgagaggctgggaggatcacttgagcttgggaagtcaagcctgcagtaaactctgattgcaccactgcactccagcctgggtgacagagcaagaccctgtctcataaaacaaacaaacaaaaaaacaaaacaa

SEQ ID NO: 560573 - DNA, 506 bp, Homo sapiens
attcctaggtattttatatcctttgtagctatgataaatgggattgctttcttgatttcttttttagattgttcactttgggtatatggaaatgctactgatttttgtatgctgactctgtattctgcaactttgctgaatttgtttatcagttctattagtttcttggtggcgtcttcagctttttctgagtataacatcttgtcggcttttatatcagcactttaatatcagcacttagggccaaagatgagggatcacttgcacctaggagtttgagatcagcctaggcaacatggcaaaaccccatctttacaaaaaatacaaaaattagcaggatagggtggcaggtgcctgtggtcccagctatttgagaggctgggaggatcacttgagctygggaagtcaagcctgcagtaaactctgattgcaccactgcactccagcctgggtgacagagcaagaccctgtctcataaaacaaacaaacaaaaaaacaaaacaaaa

SEQ ID NO: 560574 - DNA, 586 bp, Homo sapiens
tattaggtatccttctgtgtctctattaattctataatctacctctatcactgtacttaattcacagtttagtgattgttggttgatgtgtctayctgcactcactaatttgagtttctagagaacagggattatgtttatgttcaaatatttattagctacagttatggaacatgaaactggtttaagtgctagacatacttacaaacatgactcttccctcaaagaacatatcctatagaagtaaaaaaaaatgaataagaaacaaaaacaatgaagttacttttagagattgataaaaactgtgatgaaaatacaggcatatcttgttttattgcatttcattttactatacttctcaaatatatgtttttgttttctttctttctctccttttctctttctttcttgcttgcttgcttttttttttcagtgtctcactctgtcactcaggctggagtgaagtggtgcaatctcagctcattgcaacttaacttccacctcctgggctcaaatgatcctccggcctcagtctcctgagtagttgggactacaggcgcatgccaccatgcccagctaatttttt

SEQ ID NO: 560575 - DNA, 498 bp, Homo sapiens
taataaataattagagcaatataattaggataaacaagatgctaagaaagcaagggggaaagcctgaaacaatcaggaaaggactcatgcaagtggaaaactttgagctgagtctgaggattgagttcatcaggcagattagataaaaggcttagggcagagaaaagacaagcatcaaggaacacaacacaatcttgtatattttacatttagtaaaaacagaaggtagttcaggatgcctggaagaaagaaaggtttaaaaggtcacatcataaactgtcttgtgtgtcatagtaaggagaaggagaaaagcctgttggtaagttgagaagttccctgtgtaaaattgtatatgcytgaactaagacaaggacagtgaaaatgaatgcagatttgagagagatgagagagtagacacagagaaattagagatataaattttagatgtatactaaaattataactgcacagcagctaggaaaaatgatttacatttat

SEQ ID NO: 560576 - DNA, 552 bp, Homo sapiens
gttatctgaatattcagaaaactaatgcctcctcaatcagtgactatacctacattgtttataaatatctttctctattcagatgtatcaatataaagaggaacatatggcaaaattttatatagctcatttgcggaaaacttggacatagttcaagctggataacctttaagaagcttttattcttttgggttacacagttcctaccaaagtatgcccaacctctcaaagttgcatgtcaggactgaaaaactgaacaaaaaaaaaaaaattgcaagaagacattactaaatttatgaatggaaaaatctcagggaaatttagcaaggtctaagattgcaacatgtttggaccaagaattaaaatattcttttctgcataatgaggaacatctataatttgcatttttattgttgtgttgacctatgagttagttctgcataggtaacaaagggttcacagagaatttttgaaaatcttgatggatgggytaaaaatagagctgactacaatccaaagctgaaaagtaggtggtggaaaagaagtggaatt

SEQ ID NO: 560577 - DNA, 606 bp, Homo sapiens
attcttataccctttaacaaaggttaaataatctgacaaataaatgccattcccaagcaaaaatcttaaatatggacatttgtgattaatagaagtatctcgagcttctcaggcgttatgatgactagcaaaatggcaactgccagcaggatggttcaggtacttaaattacatactccattaataaggttccctgacagagagaccattctaagcccaatacatcagaagctttgagatcagcaggactattatctcactcctcttcaatttcacagattctaagaaaagcaaatcaccagctttgcttacacatcagggtctgccagacactgcagaaataataaaaacactacctcagaagaaayttatgtctcaagaagaaatcaaatttatccaatgtggactgctgtttgtcataagacaaaaaaattgtctttataataagtgacttccaaatgacaaacaagaaattgtacattaaaccacattaataaatattctgcaaaaaaatagaaaatttatatttttttacattagagcagtgtaaatcctaatttatgtatttttgtcagcttctccacaggtttacttgtttatattctt

SEQ ID NO: 560578 - DNA, 609 bp, Homo sapiens
ttctcctgccttttcctcttcatgctggtgcatgttttcttcaacttgtaatttggttaggattccttagccactaacacatattcagtaggaaaactagtaaactttaatgttaatctctttgaaggaattttttcagtaaagaaaaaagataaagcagtatatggaggagaaagcagattcaagaaggtattgttgttgttgtttatgttttttgttttgagatgcagtctcattgtcacccaggctggagtgcagtggcgcaatctcggctcactgcaacctccgccttctgggttcaagcgattctcccaccccagcttcctatcttggactacaggcacgtgccaccacgcctggctaatttttctatttttagtagagacagggtttcaccatgttggccaggctggtcttgaactcctgacctcaggtgatccgcctgccttggtctcccaaagtgctggaattacaggcwtgagccaccgcgccaggcccaagaaagtgttttgtattgctttagctggggacattatggtatgtttatatatttatggaattttcttcccatagagaggaaaatatatagattccaggaaaagaaaggaa

SEQ ID NO: 560579 - DNA, 609 bp, Homo sapiens
tgaccaacacatctttaacaaagtaaaaaaatgtatatatacactggggaaaggacatcctattcagtaaattgtgctgtaaatattggatagtcataagcagaagaatgaaactgggtcataaatcaccatatacaaaaattaactcaaaatgtattaaagacttaaatgtaagacctgaaaatataaaaatcctaaaagaaaacctaggaaaaactcttctcgacactggcytgggcaaagaatttatgactaagtactcaaaaacaaaagtagacaaatggaacttaattttaaaatcttctgaacagcaaaaacaaacaaacaaaaaaacaaaaaacaatcaacagaatgaacagacaacttatagaatggaaaacaattccgaactatacatctaacaaaaaactaatatctagaatctaaaaataactcaacaagaagaaaaatagataaccccattaaaaagtaggcaaaggacattagcagacattttttaaaagaagatatacaagtggccaacaaacatatgagaaaatgctcaacatcactaatcatcagagaaatgcaaattaaaaccacaaggagatatcatctcacaccaatcag

SEQ ID NO: 560580 - DNA, 609 bp, Homo sapiens
tgaccaacacatctttaacaaagtaaaaaaatgtatatatacactggggaaaggacatcctattcagtaaattgtgctgtaaatattggatagtcataagcagaagaatgaaactgggtcataaatcaccatatacaaaaattaactcaaaatgtattaaagacttaaatgtaagacctgaaaatataaaaatcctaaaagaaaacctaggaaaaactcttctcgacactggcctgggcaaagaatttatgactaagtactcaaaaacaaaagtagacaaatggaacttaattttaaaatcttctgaacagcaaaaacaaacaaacaaaaaaacaaaaaacaatcaacagaatgaacagacaacttatagaatggaaaacaattccgaactatacatctaacaaaaaactaatatctagaatctaaaartaactcaacaagaagaaaaatagataaccccattaaaaagtaggcaaaggacattagcagacattttttaaaagaagatatacaagtggccaacaaacatatgagaaaatgctcaacatcactaatcatcagagaaatgcaaattaaaaccacaaggagatatcatctcacaccaatcag

SEQ ID NO: 560581 - DNA, 502 bp, Homo sapiens
gctgcacccctcttatatcaaaatgatgtgcgcttgcttcaaattttaagctcactcaatgaacaatattttctctttcatttctgcaaaatataaattacatatatacctacatatatgtatatgtgtatactataattataaatatattttgatacaattatatagatyatatacacacatacaaaatctatataatacttatacatatgtatgtacacacccaaatataaaaatatatctataatcttctatgttttgtatggtctcattacttgtcctgaccaaacaggcaaccactgctttttttttttttttttttttttttttttttttttttgggacagagtctcgctcttgttgcccaggctggagtgcaatgacgcgatcttggccaaatgcaaccttcacattccaggttcaagcgattcttctgcctcagcctcctgagtagctgggattacaggtgcccgctaccgtgtccagcaaattttttttattt

SEQ ID NO: 560582 - DNA, 502 bp, Homo sapiens
gctgcacccctcttatatcaaaatgatgtgcgcttgcttcaaattttaagctcactcaatgaacaatattttctctttcatttctgcaaaatataaattacatatatacctacatatatgtatatgtgtatactataattataaatatattttgatacaattatatagattatatacacacatayaaaatctatataatacttatacatatgtatgtacacacccaaatataaaaatatatctataatcttctatgttttgtatggtctcattacttgtcctgaccaaacaggcaaccactgctttttttttttttttttttttttttttttttttttttgggacagagtctcgctcttgttgcccaggctggagtgcaatgacgcgatcttggccaaatgcaaccttcacattccaggttcaagcgattcttctgcctcagcctcctgagtagctgggattacaggtgcccgctaccgtgtccagcaaattttttttattt

SEQ ID NO: 560583 - DNA, 502 bp, Homo sapiens
gctgcacccctcttatatcaaaatgatgtgcgcttgcttcaaattttaagctcactcaatgaacaatattttctctttcatttctgcaaaatataaattacatatatacctacatatatgtatatgtgtatactataattataaatatattttgatacaattatatagattatatacacacatacaaaatctatataatacttatacatatgtatgtacacacccaaatataaaaatatatctataatcttctatgttttgtatggtctcattacttstcctgaccaaacaggcaaccactgctttttttttttttttttttttttttttttttttttttgggacagagtctcgctcttgttgcccaggctggagtgcaatgacgcgatcttggccaaatgcaaccttcacattccaggttcaagcgattcttctgcctcagcctcctgagtagctgggattacaggtgcccgctaccgtgtccagcaaattttttttattt

SEQ ID NO: 560584 - DNA, 569 bp, Homo sapiens
gaatagaaaaacttattgaacaatctatgtacttaatatattttcaaaaaatgttattctgttatgtagtattatggtgggattcaaggatarttttgtggagaatttataaaatttatttatacttattctgtataacacatgtaatttcttacagtaggatcataactttagacttcccctgttcaatatttactttaatgttacttttactttataaaataataaaggctcatgacaaaaatggaaaaaaaaaccagaactactagtactttatataaattttcaatttgttctatgtatagctaaatattaaatatatgatcatgtatgcacatataaacagttattctttcccctataatgtgacctatatcaacccaaaatttgtcaaatatctaagttttatagtttcatagtatcctatgcctatttggtggtacttaatttgtttttttactttacttttttaagtttatttcactttttcaaattgttcccctatgactgattatttagacaatatctagcatataactacactttgagctaggtgttttagtgtgagc

SEQ ID NO: 560585 - DNA, 488 bp, Homo sapiens
catggatggagctggaggccattatcctaagcaaactaacacaataacacaaaatatcacattttctcacttctaagtgggagataaacattgagaacacacggactcaaagaaggggrcaacagacacggtggtctatgtgaggctggagggtaagaggagggtgaggattaaaaaaactacttattgggtactatgcttattacctgggtgatgaaataatctgtacaacaaacccctgtgacatgcaatttatctatatgacaaaccaccacatgtacctctgaagcaaaaataaaagtaaaaaataatatagtataataatattatgagaccactgtcatatatgtggttcattgttgactgaaatgttgttatgcagcatatgactgtagttgcaattacgaactattcagctattctttaattttaaattcattttgtttatgctgttattttatgatatggtttggctctctgtccccacc

SEQ ID NO: 560586 - DNA, 555 bp, Homo sapiens
aattgctggaatctgggaggcggaggctgcagtgagccgagatcacaccagtgcactcyagactgggtgacagagcgagactctgttcttccccccaccccccccaaaaaaaaaccacaaaaagggataattggccgggcacagtggctcatgcctgtaatcccagcactttgggaggccaaggtggacagatcacctgagaccgggagttcaagaccagcctgaccaacatggagaaaccctgcctctactaaaaatgcaaaaattagccgggcatggtggcacatgcctgtaatcccagctactcaggaggctgaggcaggagaattgcttgactttgggaggtggaggttgctgtgaaccaagattgcaccattgcactctagcctggacaacaacagcaaaactctgtctcaaaaaaaaaaaaaaaaaaaaaaaagatttataactggggcaatggaattgaaaatcatttttaaaaatatccaaaatatctaaggaacttgtataaataaataggaaaaaaaaaaagaaaaacatcaagaagcccacaaa

SEQ ID NO: 560587 - DNA, 555 bp, Homo sapiens
aattgctggaatctgggaggcggaggctgcagtgagccgagatcacaccagtgcactccagactgggtgacagagcgagactctgttcttccccccaccccccccaaaaaaaaaccacaaaaagggataattggcygggcacagtggctcatgcctgtaatcccagcactttgggaggccaaggtggacagatcacctgagaccgggagttcaagaccagcctgaccaacatggagaaaccctgcctctactaaaaatgcaaaaattagccgggcatggtggcacatgcctgtaatcccagctactcaggaggctgaggcaggagaattgcttgactttgggaggtggaggttgctgtgaaccaagattgcaccattgcactctagcctggacaacaacagcaaaactctgtctcaaaaaaaaaaaaaaaaaaaaaaaagatttataactggggcaatggaattgaaaatcatttttaaaaatatccaaaatatctaaggaacttgtataaataaataggaaaaaaaaaaagaaaaacatcaagaagcccacaaa

SEQ ID NO: 560588 - DNA, 523 bp, Homo sapiens
gatcagacagtgctgtcctgaggctggccgtctgataaggggctacagaaagggcagtggtggagccctgggaggctttctgctctcctgatcrcaggtttttggtgagaggacctattggccactagggtgtctgcgtgcgtgcgtgcgtgtgtgtgtgtgtgtgtgtgtgtgtgtgagatgtgtgtttacttggattgacttctttcagcatgaagcccactgttttgctgaatgtatctcactgtttcctgaaactcagtacattcagctggcttaagggtcctggggcctcgctgtgtcatatttgcacaagcctagtgtctgtgcagactgtacactggagttcagttgtaagacccttttgatcccttattctgttcctgtagtagaaaaggcatttcactcaatggaatagaaacccagatccaatggagagatgttctaatctgccatacactggggcagtggccagtgatttggactttgtggcacagatggaaatttccaggttctctaggtg

SEQ ID NO: 560589 - DNA, 496 bp, Homo sapiens
acggctcactgcagccacaaccttccagctyaggtgatcctcccacctcagtgctccccaccctgagtagctgggactacaggcatgtgccaccacaccaccatgctaggctaatggtttgtatttgtttgagagatgcagtttccctaagttgcttaggcttcttttttagactcaaataatctgcatgcattggcctcccttagtgctggaattacaggccatctaaatcttttatctcaggtttgccttgtgacaaaaggaggggtactttttctgacatgaggcagagaaaggtgaggtgggcgcatcctgtgcatatgattttctcaggtgatgggaatatggttggctcttgactaatgggatatattttctctttgaatgatttggcaagatatcagatgagagaagttgaatgaatgttagaagaacatagaaaaaataggttatacacgttgggtttctgaagaaatgatgtctttggagaaacaaa

SEQ ID NO: 560590 - DNA, 496 bp, Homo sapiens
acggctcactgcagccacaaccttccagctcaggtgatcctcccacctcagtgctccccaccctgagtagctgggactacaggcatgtgccaccacaccaccatgctaggctaatggtttgtatttgtttgagagatgcagtttccctaagttgcttaggcttcttttttagactcaaataatctgcatgcattggcctcccttagtgctggaattacaggccatctaaatcttttatctcaggtttgccttgtgacaaaaggaggggtactttttctgacatgaggcagagaaaggtgaggtgggcgcatcctgtgcatatgattttctcaggtgatgggaatatggttggctcttgactaatgggatatattttctctttgaatgatttggcaagatatcagatgagagaarttgaatgaatgttagaagaacatagaaaaaataggttatacacgttgggtttctgaagaaatgatgtctttggagaaacaaa

SEQ ID NO: 560591 - DNA, 496 bp, Homo sapiens
acggctcactgcagccacaaccttccagctcaggtgatcctcccacctcagtgctccccaccctgagtagctgggactacaggcatgtgccaccacaccaccatgctaggctaatggtttgtatttgtttgagagatgcagtttccctaagttgcttaggcttcttttttagactcaaataatctgcatgcattggcctcccttagtgctggaattacaggccatctaaatcttttatctcaggtttgccttgtgacaaaaggaggggtactttttctgacatgaggcagagaaaggtgaggtgggcgcatcctgtgcatatgattttctcaggtgatgggaatatggttggctcttgactaatgggatatattttctctttgaatgatttggcaagatatcagatgagagaagttgaatgaatgttagaagaacatagaaaaaayaggttatacacgttgggtttctgaagaaatgatgtctttggagaaacaaa

SEQ ID NO: 560592 - DNA, 623 bp, Homo sapiens
cttacacaaaactataatatttttgctragtaatagagattctgaaaggcaatggagaggaggaggatgagctttgtaaaatcagctaatccagatagaaagtgtcagttaatttaacatatttttattgacagttttacatatgaacaccactgttgtaggaatggtgaatcaatcataaatcttgtcttaaaggagcttctagtaagggctagaaggcacgttcataaataacaacagaaagcagaaagtcttaagtgtcttgtgaaaaaaagttcaaataaattacaagagggagaattactttttagctggagagtaaatttggatagacttgaagcaaactattgtttgagcaagatcaaaaggttggataagttttggagttaagaaggaaagatattccaggatcgtatctgtagcagcacaaacagatgctatagaaaaatgaatttctgagtttctagtatgtaggctgcacagaaggtagagtttgtgagtgtgtgtatgttatatatatgtgctgaatgagactagataagaatctagggtaagggagcttgactgttagttcaagggatttgttctgtattgaaaaggcagcagaaagccattgaaagctt

SEQ ID NO: 560593 - DNA, 623 bp, Homo sapiens
cttacacaaaactataatatttttgctaagtaatagagattctgaaaggcaatggagaggaggaggatgagctttgtaaaatcagctaatccagatagaaagtgtcagttaatttaacatatttttattgacrgttttacatatgaacaccactgttgtaggaatggtgaatcaatcataaatcttgtcttaaaggagcttctagtaagggctagaaggcacgttcataaataacaacagaaagcagaaagtcttaagtgtcttgtgaaaaaaagttcaaataaattacaagagggagaattactttttagctggagagtaaatttggatagacttgaagcaaactattgtttgagcaagatcaaaaggttggataagttttggagttaagaaggaaagatattccaggatcgtatctgtagcagcacaaacagatgctatagaaaaatgaatttctgagtttctagtatgtaggctgcacagaaggtagagtttgtgagtgtgtgtatgttatatatatgtgctgaatgagactagataagaatctagggtaagggagcttgactgttagttcaagggatttgttctgtattgaaaaggcagcagaaagccattgaaagctt

SEQ ID NO: 560594 - DNA, 623 bp, Homo sapiens
cttacacaaaactataatatttttgctaagtaatagagattctgaaaggcaatggagaggaggaggatgagctttgtaaaatcagctaatccagatagaaagtgtcagttaatttaacatatttttattgacagttttacatatgaacaccactgttgtaggaatggtgaatcaatcataaatcttgtcttaaaggagcttctagtaagggctagaakgcacgttcataaataacaacagaaagcagaaagtcttaagtgtcttgtgaaaaaaagttcaaataaattacaagagggagaattactttttagctggagagtaaatttggatagacttgaagcaaactattgtttgagcaagatcaaaaggttggataagttttggagttaagaaggaaagatattccaggatcgtatctgtagcagcacaaacagatgctatagaaaaatgaatttctgagtttctagtatgtaggctgcacagaaggtagagtttgtgagtgtgtgtatgttatatatatgtgctgaatgagactagataagaatctagggtaagggagcttgactgttagttcaagggatttgttctgtattgaaaaggcagcagaaagccattgaaagctt

SEQ ID NO: 560595 - DNA, 623 bp, Homo sapiens
cttacacaaaactataatatttttgctaagtaatagagattctgaaaggcaatggagaggaggaggatgagctttgtaaaatcagctaatccagatagaaagtgtcagttaatttaacatatttttattgacagttttacatatgaacaccactgttgtaggaatggtgaatcaatcataaatcttgtcttaaaggagcttctagtaagggctagaaggcacgttcataaataacaacagaaagcagaaagtcttaagtgtcttgtgaaaaaaagttcaaataaattacaagagggagaattactttttagctggagagtaaatttggatagacttgaagcaaactattgtttgagcaagatcaaaaggttggataagttttggagttaagaaggaaagatattccaggatcgtatctgtagcagcacaaacagatgctatagaaaaatgaatttctgagtttctagtatgtaggctgcacagaaggtagagtttgtgwgtgtgtgtatgttatatatatgtgctgaatgagactagataagaatctagggtaagggagcttgactgttagttcaagggatttgttctgtattgaaaaggcagcagaaagccattgaaagctt

SEQ ID NO: 560596 - DNA, 527 bp, Homo sapiens
tttttatatggagctttagaattcataaaaccctattatatctgaaagctttcgtaactctgtaagttaaagttatagtagaattatccttactatggatgaggaaataaagaatttagggatttttctgtggttaatatgagagtaaatgccgatctaggcctataactagtcttccagtttcttggccagtatttcttttatatccttccttgtgaacctgggaagaaaaactctggcatctagtcccaatgtctttttgttttttttttttgttttttttgagacagagtcttgctctgtcacccaggccggaggtgcagtggcatgatctcagctcactgcaacctccacctcccgaactcaagcgattytcatgccttagccacccaaatagctgggactacaggtgtgggccacaatgctcagctaatttttgtatttttagtagagatggccaggctggtcttgaactcttgacctcaagtgatccacctgctttggcctcccaaaatactggggttata

SEQ ID NO: 560597 - DNA, 555 bp, Homo sapiens
tatcagtttctcttttaatcttagacgtcgtggtggaaggaaaaatcagttagcaaagaagcaatcccagaaacagtgtatctttttgatgcctttatgcctttagacaatgttgaacacagtgagaaggataggttccctttattgaatgttttttgtggaaacttagtttttcaatgcatcataggcctaaatcagtgtgcactactttggacattatccttggaagaaggaacagcttttcttcttctggcaccacagtgtatctgcatttgaatttctcccattgtgcatgagcacctcrtgggccacaaagatgcgctttgagagcaccctgagatgaagtttattttaaaaggaacaacaaccaacaccaccaccagctccacaggggctgtccagtgtacattattctcatcttcttgggttattagtcttgatttttagaacacagtttggaaagtgctaatttagaatattaatgtctttatctttaatttaacttttcattctgtacacataactagcttataaacaattttgtttcaaatgcac

SEQ ID NO: 560598 - DNA, 457 bp, Homo sapiens
tgtattgtgcctactaaaatattgaagcaaattatttgtattttctttgttccttaagactctcataattcttaaatgattgagaatctcaaagagtatgtgtttatattgattatattgatatttagtgtggtagaattatacaattgaaattttttcaaaatctatttttagtttmgatttcacagccttaccactgttgatattatgggctagataatgctttgttgtgaggactgtcttgtgcattgcagagagtttagcagtattcatggcctctaccaactagatatcagtagtaacccatgacccaggttataacaacagaaaatattccttgagaacagtattgttaacagaattttttcattgaaaaataacttttctacaacaaaaagttgagtaaaaagtgcgtcatgtatttatattatttaaagtctctcatgttgagcttaat

SEQ ID NO: 560599 - DNA, 555 bp, Homo sapiens
ccattgcaccccagcctgggtgacagagagcgactctgtctcaaaaaaagaaaaaaagaagcaataagatgacctaacctcatgcaaatatgtagttggtagaaggtgtatttttaaagttttcagacagttgtgggtatttgttaacactaaatcaaaacttcacaagtggtggtttcttaaattagttacggtggcattttacatattaataaatttattccatcagtactcattgatctttcttgcacagtaaatggatcttttgctccatacttgcatttataatatcatgcattagttacttggaatatattggtttatgttttattgtgtcaaaaatcacttttagtttaaccaccaatcttwctttaacacgcctttaagtattgaaaagctgccaagcctacagtagaaggaacaagtttttcaaagtccacaggaaagcttaaattttatcattgggaacaaatacgtatttcccttgaagtgacaacctctcacttcatttatttttgagaatgatagttgaactggttttttagaccgagtttc

SEQ ID NO: 560600 - DNA, 555 bp, Homo sapiens
ccattgcaccccagcctgggtgacagagagcgactctgtctcaaaaaaagaaaaaaagaagcaataagatgacctaacctcatgcaaatatgtagttggtagaaggtgtatttttaaagttttcagacagttgtgggtatttgttaacactaaatcaaaacttcacaagtggtggtttcttaaattagttacggtggcattttacatattaataaatttattccatcagtactcattgatctttcttgcacagtaaatggatcttttgctccatacttgcatttataatatcatgcattagttacttggaatatattggtttatgttttattgtgtcaaaaatcacttttagtttaaccaccaatctttstttaacacgcctttaagtattgaaaagctgccaagcctacagtagaaggaacaagtttttcaaagtccacaggaaagcttaaattttatcattgggaacaaatacgtatttcccttgaagtgacaacctctcacttcatttatttttgagaatgatagttgaactggttttttagaccgagtttc

SEQ ID NO: 560601 - DNA, 555 bp, Homo sapiens
ccattgcaccccagcctgggtgacagagagcgactctgtctcaaaaaaagaaaaaaagaagcaataagatgacctaacctcatgcaaatatgtagttggtagaaggtgtatttttaaagttttcagacagttgtgggtatttgttaacactaaatcaaaacttcacaagtggtggtttcttaaattagttacggtggcattttacatattaataaatttattccatcagtactcattgatctttcttgcacagtaaatggatcttttgctccatacttgcatttataatatcatgcattagttacttggaatatattggtttatgttttattgtgtcaaaaatcacttttagtttaaccaccaatctttctttaacacgcctttaagtattgaaaagctgccaagcctacagtagaaggaasaagtttttcaaagtccacaggaaagcttaaattttatcattgggaacaaatacgtatttcccttgaagtgacaacctctcacttcatttatttttgagaatgatagttgaactggttttttagaccgagtttc

SEQ ID NO: 560602 - DNA, 378 bp, Homo sapiens
aagatctagctttccaaaggcatttaaaaattatagagactcagtggctatgaatgatgaggtactcttcatctgcctctagtcatgtgctctgactttaaaaccagagacccttcaagtaaagtccaygttaataagtgctgaaatgggtaattatttttcatgattacaacagcaagcttatgtaactacgctgagagggaaaagttaattccatgagaaaatcctattgagcgactgaaataaattaggaaaaggaaaggaaatgcacatttcaaatggttccgttttcaatgatctgaaatctgtattcagggtcaatttctggaaaaacaatttatatgaatatttatttcctaaaaagaatactaatgtatg

SEQ ID NO: 560603 - DNA, 378 bp, Homo sapiens
aagatctagctttccaaaggcatttaaaaattatagagactcagtggctatgaatgatgaggtactcttcatctgcctctagtcatgtgctctgactttaaaaccagagacccttcaagtaaagtccatgttaataagtgctgaaatgggtaattatttttcatgattacaacagcaagcttatgtaactacgctgagagggaaaagttaattccatgagaaaatcctattgagcgactgaaataaattaggaaaaggaaaggaaatgcacatttcaaatggttccgttttcaatgatctgaaatctgtattcagggycaatttctggaaaaacaatttatatgaatatttatttcctaaaaagaatactaatgtatg

SEQ ID NO: 560604 - DNA, 378 bp, Homo sapiens
aagatctagctttccaaaggcatttaaaaattatagagactcagtggctatgaatgatgaggtactcttcatctgcctctagtcatgtgctctgactttaaaaccagagacccttcaagtaaagtccatgttaataagtgctgaaatgggtaattatttttcatgattacaacagcaagcttatgtaactacgctgagagggaaaagttaattccatgagaaaatcctattgagcgactgaaataaattaggaaaaggaaaggaaatgcacatttcaaatggttccgttttcaatgatctgaaatctgtattcagggtcaatttctggaaaaacaatttatrtgaatatttatttcctaaaaagaatactaatgtatg

SEQ ID NO: 560605 - DNA, 643 bp, Homo sapiens
atacttttcccctgcctagaatgcaaccacctctccttctccttggcaaaactcttattcacccttttgtacttaattcaaaagttgcgctgggcatggtgacatgtacctgtagtcctagttactttagagactgaggtgggaggatctcttgagcccaggaatttgagaccagcctgggcaacataatgagacccagtctcaaaacaacaacagcaagaaaagttatttccttgaggaaagtttcctttattaaattatatctttctttaataaaacgtcatggtgctgtgcacctctccagaggtacacacaggctagcataggaacctrgagtagcaaacctatcctagcagaatctgagacaccagaaaaactgatacgtgaactgagtactggaggaggaataaaagccacgtggaaaagagaagggcatctgtgacgtgaggtttgaaaatgagacaatactacataacagtaagaactcagaaactggcttctcctttctctgtaaccttatggcacttaatacactgtggggaatattgcagttgctcattgtacatttgaactaaacattgactaaataccagtatctaaaaacaaacttacctactgtacaaacttgaaaaatagattaaaa

SEQ ID NO: 560606 - DNA, 643 bp, Homo sapiens
atacttttcccctgcctagaatgcaaccacctctccttctccttggcaaaactcttattcacccttttgtacttaattcaaaagttgcgctgggcatggtgacatgtacctgtagtcctagttactttagagactgaggtgggaggatctcttgagcccaggaatttgagaccagcctgggcaacataatgagacccagtctcaaaacaacaacagcaagaaaagttatttccttgaggaaagtttcctttattaaattatatctttctttaataaaacgtcatggtgctgtgcacctctccagaggtacacacaggctagcataggaacctggagtagcaaacctatcctagcagaatctgagacaccagaaaaactgatacgtgaactgagtactggaggaggaataaaagccaygtggaaaagagaagggcatctgtgacgtgaggtttgaaaatgagacaatactacataacagtaagaactcagaaactggcttctcctttctctgtaaccttatggcacttaatacactgtggggaatattgcagttgctcattgtacatttgaactaaacattgactaaataccagtatctaaaaacaaacttacctactgtacaaacttgaaaaatagattaaaa

SEQ ID NO: 560607 - DNA, 418 bp, Homo sapiens
tcactggatgctgactctgttgctcttctgagtgctggggtagaggagaggagaggtggagcacagttcttgcttttatgagcttatgttctaggaagttcaaacaagtattttttcaggtagtatgaaatagcaggaagaggaagcaggctaaagggacacagagtgattgggggctattttaagtagaatgataaggaagagcctgtctagagagctatttgaacagtgacctgactgaagggacaacagaaagcagtgctgacattacaggtagcaggatgactgccaagacagaaacgcatktcatatgtgtttgaggaacaaacagcaaggtgaccagcatggggagagtgaagaatgagggaaaccttgaatgagaataaagcaattccatgttggatgctaatctgccatg

SEQ ID NO: 560608 - DNA, 580 bp, Homo sapiens
aattcaagcacggttgtgagaaacacaggaataaaattatgaacaaaacaaaccctgtggaggtttgaaaatacgttcacaaattctttgatgctcctctctttaagaggtggagtcttgggcacggtggctcatgcctgtaatttcagcaccatgggaggcaaaggcgggcggatcacatgaggtcaggagttcgagaccagcctggccaaaatggtgaaactccgtctctgctaaaaatacaaaaaaattagccgagtgtagtggcacaygcctgtagtctcggctactcaggaggctgaggcaggaaaatcacttgaacccaggaggcagaggttgcagtgagccaagatcatgccactgcattccagcctgggggacaaggatgaaattcagtctcaaaaaaaaaaaaaaaaaaaaaaaacaggtggtctaatacccctccccctgggtactggctagcttccaatgaacagaaaaacagcagaagtgatgctaggtaccttgagaaaaataggtcatagaagacactgcagcttccttgctctctcccttggattgcttgctctggggaagttag

SEQ ID NO: 560609 - DNA, 565 bp, Homo sapiens
tttctggtctccatgtttgctgctgagagatccgttgtcattcaaactgtttttctgtataggcattgtgtcatttctctcttgctgctttcaagattttttctttgcctttggttttaagaaatgtaattatagtatgtcttggtatgaatttctttgggtttatcctacttaagttttggtcagcttcttgaatctgtagatttatgacttttgtcaaattttggaagttytcagccattatttctttgaatattttttcagtcccaccctctttcccctccctttctgaccacacaaagacacaaatgttatatctaaactctgggttttgttttttcatctattttctcactgctgttcagactgagtaatttctcttaatttcttccaagttcactgattctttcctctatcatccccattctccattaaacctgtctattccattttaaaaattcagttattatatttttcagttctaaaatttccatttggtttctctggatagtttctttttctttgctgggactttctgtttttttcatttgtttcaagtatgttt

SEQ ID NO: 560610 - DNA, 565 bp, Homo sapiens
tttctggtctccatgtttgctgctgagagatccgttgtcattcaaactgtttttctgtataggcattgtgtcatttctctcttgctgctttcaagattttttctttgcctttggttttaagaaatgtaattatagtatgtcttggtatgaatttctttgggtttatcctacttaagttttggtcagcttcttgaatctgtagatttatgacttttgtcaaattttggaagttctcagccattatttctttgaatattttttcagtcccaccctctttcccctccctttctgwccacacaaagacacaaatgttatatctaaactctgggttttgttttttcatctattttctcactgctgttcagactgagtaatttctcttaatttcttccaagttcactgattctttcctctatcatccccattctccattaaacctgtctattccattttaaaaattcagttattatatttttcagttctaaaatttccatttggtttctctggatagtttctttttctttgctgggactttctgtttttttcatttgtttcaagtatgttt

SEQ ID NO: 560611 - DNA, 521 bp, Homo sapiens
ttcattcgattggctgataaacaaatacctgaggaactattatgtctcaggaattgtgccagaagatgacagaagagtaaacagttaacagacgtggtcactgacctcatgaatctcatggcacaaagccctatcctctccctgtgacccccaayacatcagccctaacctaggagggcagtaataactgcaaccacatcatagtgactgtggacaggctatttttttttcttctctccacaaatagaaacaagctactaaaataaaggaactaaatctgccaaacatcaaaacgttataaatatttaaatatctacaaacatccaaacagaaaagagatatttacttatttcttctttctttgaatatctgattaactacatacatctgttaaatgtgctctaatatttatgaaagacatatttatacatgactaagtaccatacctgacatatggaaagtattaaatattgactactgaactttgaattaataagtgaaatctgtagctcgcaaaatga

SEQ ID NO: 560612 - DNA, 521 bp, Homo sapiens
ttcattcgattggctgataaacaaatacctgaggaactattatgtctcaggaattgtgccagaagatgacagaagagtaaacagttaacagacgtggtcactgacctcatgaatctcatggcacaaagccctatcctctccctgtgacccccaatacatcagccctaacctaggagggcagtaataactgcaaccacatcatagtgactgtggacaggctatttttttttcttctctccacaaatagaaacaagctactaaaataaaggaactaaatctgccaaacatcaaaacrttataaatatttaaatatctacaaacatccaaacagaaaagagatatttacttatttcttctttctttgaatatctgattaactacatacatctgttaaatgtgctctaatatttatgaaagacatatttatacatgactaagtaccatacctgacatatggaaagtattaaatattgactactgaactttgaattaataagtgaaatctgtagctcgcaaaatga

SEQ ID NO: 560613 - DNA, 521 bp, Homo sapiens
ttcattcgattggctgataaacaaatacctgaggaactattatgtctcaggaattgtgccagaagatgacagaagagtaaacagttaacagacgtggtcactgacctcatgaatctcatggcacaaagccctatcctctccctgtgacccccaatacatcagccctaacctaggagggcagtaataactgcaaccacatcatagtgactgtggacaggctatttttttttcttctctccacaaatagaaacaagctactaaaataaaggaactaaatctgccaaacatcaaaacgttataaatatttaaatatctacaaacatccaaayagaaaagagatatttacttatttcttctttctttgaatatctgattaactacatacatctgttaaatgtgctctaatatttatgaaagacatatttatacatgactaagtaccatacctgacatatggaaagtattaaatattgactactgaactttgaattaataagtgaaatctgtagctcgcaaaatga

SEQ ID NO: 560614 - DNA, 521 bp, Homo sapiens
ttcattcgattggctgataaacaaatacctgaggaactattatgtctcaggaattgtgccagaagatgacagaagagtaaacagttaacagacgtggtcactgacctcatgaatctcatggcacaaagccctatcctctccctgtgacccccaatacatcagccctaacctaggagggcagtaataactgcaaccacatcatagtgactgtggacaggctatttttttttcttctctccacaaatagaaacaagctactaaaataaaggaactaaatctgccaaacatcaaaacgttataaatatttaaatatctacaaacatccaaacagaaaagagatatttacttatttcttctttctttgaatatctgattaactacatacatctgttaaatgtgctctaatatttatgaaagacatatttatacatgactaagtacyatacctgacatatggaaagtattaaatattgactactgaactttgaattaataagtgaaatctgtagctcgcaaaatga

SEQ ID NO: 560615 - DNA, 575 bp, Homo sapiens
tataatccttctccatcaacttaaaccttccacaaaaattagctctttacttccctaatatgtgtataaataataatttttctgcccaatgaagttttaatctttaaactattatctctttgtctcaaaatgcagtgtctaaggtcctatcaattttaattatacagcaactcctggaactatgtcatccttcctattaatataactttagttgataactctcattactttgtaaaccctactgcaacactttcctgytctggcaaagctcctttgttcaaaaaaccttaaatgactcatttcctaaacaatagtagctcaagttcctgaagtggcattaaaaatcctctaaatctgacagtaatctatctttcctatataatctctgatgactcacatccacaaaactcttactttgaccatatggagtttctagctagcctaagtataaatcctgtacctttctatatcctttcctttgctggtgatatttattcactctgtagaatctgctcttccttttctacttggtcaactaaagcaaggactggcaagtgttttctgtaaaatgcccc

SEQ ID NO: 560616 - DNA, 531 bp, Homo sapiens
tctgacttatgataaataatactacaaattccacctacacttatctcagaaacttttctcacgggtcaccaacctcagtctttcttcttgacctttttgaataggacttgatctcattttttccagggaagaaggatttctgcatagtgtaacatttaraaatatttatttaagatataaattgagtattaattcccttttattctttcagagatttaattttaactcccatccaaaatttcttagcatctcctattacttttcattttgtggttaaatatttttcttttaggtcttttgtcaattttccccatgcactctagcatatttaattgctctcttttggatcttccaactccactggataatttaatacatgaaaaatgagacttcatcgatattttagaatttgaatttccccaccctttcctaggaactctcttcccttcttttctgttgcatatctttattcccattctctcacttttctgttgcttatcttatttgctacattccctaaatgcagtcttt

SEQ ID NO: 560617 - DNA, 624 bp, Homo sapiens
aactgacaggatacaaatgtatgttctgaaagttttcttctatggagaattctgatgtatcaacagataatataatttttgtaatattaaaacttaaaatcagtaaaactttaaaaaattcctgaaaatttttatttatattctcatgatcaaaacatttgactttttaattgaatattcccrtgattacattttgtcctacatataattgccagtttgggaaattaaaatgtgaaacttaaattagaaaaaaacccaccacttggaaatcctttttctaaatgtgacttaaacctagatttactataatatggtaaagcataaaaaagcaaacttgtaagaaactatcacagctcctaataattgagtacaaagaagcaagtttccctactctggagtagttcttttataggatcttcagaacagaatatctgtatcacatgttccttgtctttcctctatgaagaggaagctctatgtctcgtttgtcaagtctgatgacatgaataacatgaacatgtattactttgctgcttgataatctgcctttactacatttaaaaagagtttcacaaactcatataatatctttctctagagttcaaagtgagcttactagtcctt

SEQ ID NO: 560618 - DNA, 621 bp, Homo sapiens
tttaattaaaacaatacctctcaaaaagctcttatgtagagaagaatgcctgctaataaatgtataaattcagaaaaatcatctttttgcaatcctcataacgaaatttatgcaggcaaggatcctcagtagatgttaaactcattgggtaaaaaggatgatagggaactgggtatttccatggaatcaaagtatctcagattatatgctggtcacgggagcaaagcataactttataatggaaggatcaagctgtcatcactttaacccagtgatcgatgctatcacttatcatcactaatagtgggatcaccaaatattctttgccttctgttgtgatgcagtgtgaagttcacaccatcacctataaagtaytctaacctaaatactttaatatgaattaatcaaaactttagtccagtaacttgcagtctataagaaatacagaggataggggaacaagttaaagtatacacagagaaagcaactgaaaacattcatagggtaggacattctgtaggacaactagcttaatgtttttaacaagtcaatgtaatgtaaagtagaaaagggaaaatgaccaagaacaatgtataaaccttaattggtttatacaaacca

SEQ ID NO: 560619 - DNA, 505 bp, Homo sapiens
ggttaatattctctttccttctgtgttccaaggtctagcttgcattgtttctgttgaggagactgctgctattcttatctttgtttctctgtatgtaatgcatttttgttgttgttgttgttgtttttagaaacctagctactttaagttttttttctttattactgatcttatgcaatttgattatgttccttggtgtagcttttcagtgtttcttctgcttttggtttgttgagctttttggatttgtgggtttacagttattatcaaatttggaaaaatttcagcccttatgtcttcaaatattttttctgtctccctgccccatccgtagtctttatatatttgatcatctaaagttgtctcacagctcacagtgacactgcttgtttttccagtctttttttccctctaggtgtttcaytttgaacaattgctattgctatgtcttcaagatccttaatcttttcttctgtagtgccacatcttacccagtgaacttttc

SEQ ID NO: 560620 - DNA, 520 bp, Homo sapiens
ttcttttctctttttttcctccccaaagccgcattaaattggctattgagaacaataacatatttgtgcttttataggtagaatgattggtattatgcaaagatttggcttacagtctgaaggcacattcacactgatcaggacttcgtgccactaataattttcrggatgctctagggaacccgtaattccctaggactacaacttagcaggtcaatgcatgctttgtacagaatctaagccttgcttctagaaccatacccaccaataagactctaggaaactcatttccaaagaaggtcttggaaatgttaagtgttccttttgacctacattccctctagcctgggtaggtgcaatgactcagccaagataggctgccaacttgaaaaatggcaccctggaatccttaggcagagcctaaaaccgcttgtgtgcccacaccttgtgacccaataagcccagccatgaaaaattatcctaaggaagtaatttaaaggaaacacacatacacacacac

SEQ ID NO: 560621 - DNA, 544 bp, Homo sapiens
tacatatcccccacttcaaaaaagaaaaaaaaaaaaaagacagctttggagcctagacagagtattagttcactgttgaaaataaataatgagttctaattcaggtaatgtagctcaaaatttactgccatattttaaaatgcacatgaaaaataaaattatcctaaaatgtccttggtgaaaaggctgcacgtaattgctatcactgacaatggcgttgaacttagctaaattaacatcaaaggaagtcccaattacagagcatctgtgcattattgatggwgccctgtctgttcatctaagacactctactgtaaggagcagaaaagcaaacagaagggctaattgtagcaccagccttcagtgaccccaaggacaagccttccccatcatgcttgtgaaatggcacttctgctggtcagagtgacaaagaagatgcatttggaatctgagtgtgtatacaggccccagaaggaagctatggtgaccacaggtgggcaaaacaacttctaggcaaaaacacacctcccagagggttgtagca

SEQ ID NO: 560622 - DNA, 544 bp, Homo sapiens
tacatatcccccacttcaaaaaagaaaaaaaaaaaaaagacagctttggagcctagacagagtattagttcactgttgaaaataaataatgagttctaattcaggtaatgtagctcaaaatttactgccatattttaaaatgcacatgaaaaataaaattatcctaaaatgtccttggtgaaaaggctgcacgtaattgctatcactgacaatggcgttgaacttagctaaattaacatcaaaggaagtcccaattacagagcatctgtgcattattgatggagccctgtctgttcatctaagacactctactgtaaggagcagaaaagcaaacagaagggctaattgtagcaccagccttcagygaccccaaggacaagccttccccatcatgcttgtgaaatggcacttctgctggtcagagtgacaaagaagatgcatttggaatctgagtgtgtatacaggccccagaaggaagctatggtgaccacaggtgggcaaaacaacttctaggcaaaaacacacctcccagagggttgtagca

SEQ ID NO: 560623 - DNA, 544 bp, Homo sapiens
tacatatcccccacttcaaaaaagaaaaaaaaaaaaaagacagctttggagcctagacagagtattagttcactgttgaaaataaataatgagttctaattcaggtaatgtagctcaaaatttactgccatattttaaaatgcacatgaaaaataaaattatcctaaaatgtccttggtgaaaaggctgcacgtaattgctatcactgacaatggcgttgaacttagctaaattaacatcaaaggaagtcccaattacagagcatctgtgcattattgatggagccctgtctgttcatctaagacactctactgtaaggagcagaaaagcaaacagaagggctaattgtagcaccagccttcagtgaccccaaggacaagccttcccyatcatgcttgtgaaatggcacttctgctggtcagagtgacaaagaagatgcatttggaatctgagtgtgtatacaggccccagaaggaagctatggtgaccacaggtgggcaaaacaacttctaggcaaaaacacacctcccagagggttgtagca

SEQ ID NO: 560624 - DNA, 566 bp, Homo sapiens
aaaagctagaataactaaaggcagttgtgtgcaatacatcaaacctgtgcctcgatagggagcactgttaacactttaatagctatgaaatgaatcactcaattaatttcccacatgctgaaagaggtaacaatacatttatctgccagtaatataccctccatatcayatatttccacaactgctagcaattttattcagcataatggaaaataagttgcacctcatggattcagggaaagaaagtggcctgaggtctgctgccagcagagcaacttgatggaagatgtttcattgttctgttttgtttttgttttttctttcccccctttaatcatttccaatgcacatgcagagtgctataagtcaatagctgaggataaactagacttctaggatatcagtgccagcattttcaacacacaagttgcaatctcatgggaggtgaccacacagctccacagagcctcaaggcaatgatggttctccaaggagatcatcaggggtcaccgagtccattccccagcctctggcttcactgaaggactcccaactcctcccaaaga

SEQ ID NO: 560625 - DNA, 566 bp, Homo sapiens
aaaagctagaataactaaaggcagttgtgtgcaatacatcaaacctgtgcctcgatagggagcactgttaacactttaatagctatgaaatgaatcactcaattaatttcccacatgctgaaagaggtaacaatacatttatctgccagtaatataccctccatatcacatatttccacaactgctagcaattttattcagcataatggaaaataagttgcacctcatggattcrgggaaagaaagtggcctgaggtctgctgccagcagagcaacttgatggaagatgtttcattgttctgttttgtttttgttttttctttcccccctttaatcatttccaatgcacatgcagagtgctataagtcaatagctgaggataaactagacttctaggatatcagtgccagcattttcaacacacaagttgcaatctcatgggaggtgaccacacagctccacagagcctcaaggcaatgatggttctccaaggagatcatcaggggtcaccgagtccattccccagcctctggcttcactgaaggactcccaactcctcccaaaga

SEQ ID NO: 560626 - DNA, 566 bp, Homo sapiens
aaaagctagaataactaaaggcagttgtgtgcaatacatcaaacctgtgcctcgatagggagcactgttaacactttaatagctatgaaatgaatcactcaattaatttcccacatgctgaaagaggtaacaatacatttatctgccagtaatataccctccatatcacatatttccacaactgctagcaattttattcagcataatggaaaataagttgcacctcatggattcagggaaagaaagtggcctgaggtctgctrccagcagagcaacttgatggaagatgtttcattgttctgttttgtttttgttttttctttcccccctttaatcatttccaatgcacatgcagagtgctataagtcaatagctgaggataaactagacttctaggatatcagtgccagcattttcaacacacaagttgcaatctcatgggaggtgaccacacagctccacagagcctcaaggcaatgatggttctccaaggagatcatcaggggtcaccgagtccattccccagcctctggcttcactgaaggactcccaactcctcccaaaga

SEQ ID NO: 560627 - DNA, 566 bp, Homo sapiens
aaaagctagaataactaaaggcagttgtgtgcaatacatcaaacctgtgcctcgatagggagcactgttaacactttaatagctatgaaatgaatcactcaattaatttcccacatgctgaaagaggtaacaatacatttatctgccagtaatataccctccatatcacatatttccacaactgctagcaattttattcagcataatggaaaataagttgcacctcatggattcagggaaagaaagtggcctgaggtctgctgccagcagagcaacttgatggaagatgtttcattgttctgttttgtttttgttttttctttcccccctttaatcayttccaatgcacatgcagagtgctataagtcaatagctgaggataaactagacttctaggatatcagtgccagcattttcaacacacaagttgcaatctcatgggaggtgaccacacagctccacagagcctcaaggcaatgatggttctccaaggagatcatcaggggtcaccgagtccattccccagcctctggcttcactgaaggactcccaactcctcccaaaga

SEQ ID NO: 560628 - DNA, 582 bp, Homo sapiens
atttctaggagatattaatggcccaacaaatgctaggtgctctccatttccctggaagaattccttggcagatggactccagaaataagccaatggctgctagtgtaattaactgtcctcaaataggtatatatggagttgacaagaataaccacttggccagggtatagttatataaatgcataaataaatgtataacaggtatggacatgtgtctatacttctccctcgtcagggacaatcactaaccaagatgctttccatcaagttccatagtccaacaatcaaacaagcgagttgtttccaccctattctgcttatcaagaggtaagtacacagtgtcaagagcaatggattatctccaagggaatctgtcatttccttcctatacccagcctcctcagcatatactcatctttcaagcctcatcycctgtgaaggtttttttgtacacctccacccttcattgctttctcccttcccaggactcctagaatatgccatcagcaccttacagtctaacattttgttgttttctaattattttcttggtgttcattaatgtccttacccaaactgtaa

SEQ ID NO: 560629 - DNA, 480 bp, Homo sapiens
cagtgcctgcagtggaagctggttgtggtatgcctggtccagatgcagcctcacagggagctagtgcccatgccagtgtctagagctgcccagcctgctgcttccagcatgcctggctgtatgcagtggccagaccctgtgcttgcttgctcatgtaccccttaccactccacacctggctcacccttggcaggcatgggatctgaactggcagcacgagccaagtgcagcccaccaggccgagtaggtggaacaagctcagcaggcccaagcaaaactcaggcaaaggaaccaccagtcacagaggttcccaactgaggaagtaacamcccaaggattcggtgacattatcaccaagtggcctgcatatgcttatccaggtaaaaggcttggctgaccatcccaaagccagagagaatagtttagaggtctgcaggaataaccttcacaggactcattgttaaagtcaaaatattatga

SEQ ID NO: 560630 - DNA, 518 bp, Homo sapiens
tgacctaaaaactgggctgacctctttgaaatcaacatctcccatggaaatgaaacaacagacacacttgttttgatgtatgcctgggtgacatattataaatattacatcacataaccacagaggatgccaatcaataagaatttttttcagacagcactaaatgaaccatgggttcttgcttctgaatacactcctttaaggctcctagtattgcttaaatgattaatagaagacatattgtcagaaaatgtacttaaagtgaaaaacagtaaactctagaaatakcattcatttttaagcaattttctagtgaaaacgtcacataaatttacatagaggctctactattaggctctgggaaacagctagaaggaaggcaaacctcgtgttttgtggatgaagggccaggaaaatgttttaccaaaagaaaaaaaaggcagctgcattgttttgtataaacacaaatgccacaggaactccagaatcaaaagtcatattgcaaaaccctaaaattt

SEQ ID NO: 560631 - DNA, 518 bp, Homo sapiens
tgacctaaaaactgggctgacctctttgaaatcaacatctcccatggaaatgaaacaacagacacacttgttttgatgtatgcctgggtgacatattataaatattacatcacataaccacagaggatgccaatcaataagaatttttttcagacagcactaaatgaaccatgggttcttgcttctgaatacactcctttaaggctcctagtattgcttaaatgattaatagaagacatattgtcagaaaatgtacttaaagtgaaaaacagtaaactctagaaatagcattcatttttaagcaattttctagtgaaaacgtcacataaatttacatagaggctctactattargctctgggaaacagctagaaggaaggcaaacctcgtgttttgtggatgaagggccaggaaaatgttttaccaaaagaaaaaaaaggcagctgcattgttttgtataaacacaaatgccacaggaactccagaatcaaaagtcatattgcaaaaccctaaaattt

SEQ ID NO: 560632 - DNA, 584 bp, Homo sapiens
tactatgcaccccagagtataatatcatcccctaaagtttctctttttccctttkcccaccatggtccaacccctggacactcacctgtatctcttgtagtcttcctcatccttttccaagctgaccagctcgttgggacaggccacgttgcccagcagactgaggtactccagagctggtgtcacttctgccaagtgatccagcaggttctccaaatcagtgatgtgacaaaggttaagaatcttggtccagtaagacaaaaggcttagcaatgagcataggccatgactgacaggcgctgatgagtccagtctgctcctgtgagacctcagggtgggggctgaaatcaattcagctgtgggtatacggtattgctactttttcactcccactgttgggaacacagcccaactttcgctaggcaggtaagactaagtccagatcatctgaggaagaatgaataaacttgattgtcccatcatatttttctttcctctatagttctgtttctaaaacacaccaaaagggaagattccatagagtaaaatatttttacaatatgcaaaaccataaaacttaattc

SEQ ID NO: 560633 - DNA, 584 bp, Homo sapiens
tactatgcaccccagagtataatatcatcccctaaagtttctctttttcccttttcccaccatggtccaacccctggacactcacctgtatctcttgtagtcttcctcatccttttccargctgaccagctcgttgggacaggccacgttgcccagcagactgaggtactccagagctggtgtcacttctgccaagtgatccagcaggttctccaaatcagtgatgtgacaaaggttaagaatcttggtccagtaagacaaaaggcttagcaatgagcataggccatgactgacaggcgctgatgagtccagtctgctcctgtgagacctcagggtgggggctgaaatcaattcagctgtgggtatacggtattgctactttttcactcccactgttgggaacacagcccaactttcgctaggcaggtaagactaagtccagatcatctgaggaagaatgaataaacttgattgtcccatcatatttttctttcctctatagttctgtttctaaaacacaccaaaagggaagattccatagagtaaaatatttttacaatatgcaaaaccataaaacttaattc

SEQ ID NO: 560634 - DNA, 601 bp, Homo sapiens
ggtggatttgcattcagaaacaccatccaaggacaaccaccaggaggtgaagggtgtaagaaacagtgattgagacagtcctaaagttgcttaaccaggagcagagaagtcttagtcatttcaaagtcctcagcctacagggttccagaatgcagaatcaaaaacaaatagaaaattatgtaagctgggaggaaatgtcttgaatcaattttttgaaacttgtcaaaatggagaagctgttcactaaaggatgagctgccctcagagccactatacttatttgaacagaggctaaaatcatggagaatgtttagagggaatttcttcatagagatcagattcgatgrcttctaatattctatccagatactatggttatctgactggagctccttcctttataactatagtttataagggctgttaagtcagttctgctttgccaaagggtcccttaagagtcagtctggtaggaagagggtagcagagttccagcacactaaactctatgcctcattcttctagctgggactgtgcaaggcttctttaatattttcctaactatgggaagggtgtaacatgtgcccataataaaaaggca

SEQ ID NO: 560635 - DNA, 558 bp, Homo sapiens
attagtgtgggatgccactaaaaaatatatccactctctaccccatcctcctaaaaaaaagttaacactgaaaagtaatggatttaatgatctagaaaatctagatgctggaaactccaagggagatcatattaagttagaccagtacaaacaagccaaactcgatttatcctcttgtggttacagattttatctactaaaccaggttttcagggctagtctgttttcaatgaatagaatttttgaatgtcaagtctcaggattcctagtggaagataatttaccctcaggatctccgttcagccagggctggccatgcttgcatctctgcagagggcctgagacaggccagtcctcctcccgttcctgtggccaggccacctgttgagggccagccacaggcaggattcagaggtgrcagaggtcaggattcagggagaaagaggaattctttccttggctccttcctgagagagtaaggaggcatgagagggggagtgggagggtaaagaaactgcagagaatgtcctggaatggatgttgcctactcttaaaaat

SEQ ID NO: 560636 - DNA, 515 bp, Homo sapiens
tgtcgcctccaagcataacagacaaggatgactgagctggagtctgcatcaagtctaccattttatgtccaacgccagacagagccatgattccragcctgcataccaagagctcagattctcctcaaagtggttgcggaggatcccaggacactggtaaactttctacttcatcttcctatgtgttttattataaaatgtcttcatttttcaccagtgcaattaagttccccaactcattcttaagtcacatgtttctctgtatttccatcgacaatcaaacaaagggaagtgttgcacagtggaaaggatgcaggctttggagtcagacagccctggattcagaccccagctctgccatttaccagctgtaggaacttgagtgattcactgaaattctcagagtctcagtgatttcatctgtcacaggaggtagatgaaagtgacctcatgaacaatggccagtgtttgcatcatgtatcatagcactctattcattacaactaatttggttc

SEQ ID NO: 560637 - DNA, 522 bp, Homo sapiens
ctctgccgaaatctctctgagttaatgggttcatgcagagctgtcgcctccaagcataacagacaaggatgactgagctggagtctgcatcaagtctaccattttatgtccaacgccagacagagccatgattccaagcctgcataccaagagctcagattctcctcaaagtggttgcggagsatcccaggacactggtaaactttctacttcatcttcctatgtgttttattataaaatgtcttcatttttcaccagtgcaattaagttccccaactcattcttaagtcacatgtttctctgtatttccatcgacaatcaaacaaagggaagtgttgcacagtggaaaggatgcaggctttggagtcagacagccctggattcagaccccagctctgccatttaccagctgtaggaacttgagtgattcactgaaattctcagagtctcagtgatttcatctgtcacaggaggtagatgaaagtgacctcatgaacaatggccagtgtttgcatcatgtat

SEQ ID NO: 560638 - DNA, 617 bp, Homo sapiens
tttcttttttattttattcatctctgctttgtctgtcttaatttatttgttcttttggctttgcatttaatttgcttttatttttctactttcttaaggtagaaacctagattcttgatattctttactagtgtaagcattttagtgctataaatttccctctgagccctgctttagctgcatcccatgtattttgttttattcaattaaaatatattttccacattgccttatgacttccttttacctgtgttctttagactttaatttgttaatttcatatacttggcaatattccagatatcttttttgtattcattactagtttaattttgtgtggttaaaaaggaaataaataataaataaaccaatagtaataataataattttgtgttgttagataacacactttgtattatttaaattctgttaaatttattgaggtttgttttattgcccagaatactgtctgttttagtgactgttttgtwtgtatttgaaaataatatgtatttttactgttgtttcatatgaggcttcataatgttaattaggtcaggttggttgatagtgttgttcaggtcttctatatcagtgtctactttattgattagtga

SEQ ID NO: 560639 - DNA, 517 bp, Homo sapiens
gaggcagcattctgcagcatctcakaaactggtgctcattaaggcacaggatcctggctgaggccagtggcaaagcttgcttaaagatactttgtcatctttccgtgtatctcaaactctgtgccatgttaggggatgcggcaaatatttgcagaatgaattaataactggttgaaggatggatgggtgaaagatgagcctcttctgtcttattattactattaccaaagaggcaacagtgctttagcttgttccttcccctccctgatcttttctctcccactccaccttttgaaacttttgttaatcttgctttcttctaccttgtctcatttccgccttgctttcctctctcctctgccacctctcccatcgtctctaggcccaaccatgactctctgtgtctactatttgtcgcttctgccatcggtatcaagtactaagtatccctcaaatccagagtattcacagtgcagtgacccagatgaaagggggttgggattttgctttcttccct

SEQ ID NO: 560640 - DNA, 555 bp, Homo sapiens
gaattctttcactcagaggtggatgtgaggcagcattctgcagcatctcagaaactggtgctcattaaggcacaggatcctggctgaggccagtggcaaagcttgcttaaagatactttgtcatctttccgtgtatctcaaactctgtgccatgttaggggatgcggcaaatatttgcagaatgaattaataactggttgaaggrtggatgggtgaaagatgagcctcttctgtcttattattactattaccaaagaggcaacagtgctttagcttgttccttcccctccctgatcttttctctcccactccaccttttgaaacttttgttaatcttgctttcttctaccttgtctcatttccgccttgctttcctctctcctctgccacctctcccatcgtctctaggcccaaccatgactctctgtgtctactatttgtcgcttctgccatcggtatcaagtactaagtatccctcaaatccagagtattcacagtgcagtgacccagatgaaagggggttgggattttgctttcttcccttggtaactattt

SEQ ID NO: 560641 - DNA, 555 bp, Homo sapiens
gaattctttcactcagaggtggatgtgaggcagcattctgcagcatctcagaaactggtgctcattaaggcacaggatcctggctgaggccagtggcaaagcttgcttaaagatactttgtcatctttccgtgtatctcaaactctgtgccatgttaggggatgcggcaaatatttgcagaatgaattaataactggttgaaggatggatgggtgaaagatgagcctcttctgtcttattattactattaccaaagaggcaacagtgctttagcttgttccttcccctcccygatcttttctctcccactccaccttttgaaacttttgttaatcttgctttcttctaccttgtctcatttccgccttgctttcctctctcctctgccacctctcccatcgtctctaggcccaaccatgactctctgtgtctactatttgtcgcttctgccatcggtatcaagtactaagtatccctcaaatccagagtattcacagtgcagtgacccagatgaaagggggttgggattttgctttcttcccttggtaactattt

SEQ ID NO: 560642 - DNA, 555 bp, Homo sapiens
gaattctttcactcagaggtggatgtgaggcagcattctgcagcatctcagaaactggtgctcattaaggcacaggatcctggctgaggccagtggcaaagcttgcttaaagatactttgtcatctttccgtgtatctcaaactctgtgccatgttaggggatgcggcaaatatttgcagaatgaattaataactggttgaaggatggatgggtgaaagatgagcctcttctgtcttattattactattaccaaagaggcaacagtgctttagcttgttccttcccctccctgatcttttcyctcccactccaccttttgaaacttttgttaatcttgctttcttctaccttgtctcatttccgccttgctttcctctctcctctgccacctctcccatcgtctctaggcccaaccatgactctctgtgtctactatttgtcgcttctgccatcggtatcaagtactaagtatccctcaaatccagagtattcacagtgcagtgacccagatgaaagggggttgggattttgctttcttcccttggtaactattt

SEQ ID NO: 560643 - DNA, 555 bp, Homo sapiens
ataaacggaccggatcaacaatttcctgcttctgcctcctgctgttcacgcactcagtcacagagagtgcccctgtgcaggccccagaggccatggggatcaaatataagtttcgaaagttgaagagggagaatccatttcaaataacttagaggataactgtcactggaattaatatggttggaatgtttaaaattgccacaggttccttcacttttgaaaggtgtcaggcccctgtcttgaacgctgaatgtctgtctgtgatacctcagtgaaaggttgcactatcacagacagtttcaggctaaggaaagcttatttaatttactgaactgcacatagaaattggcaaagatgagtccaaaaggttaagcatggggcatgattcttatctctctccatttcccatagtactataatgtcccattaaattttcctttcacaaaggtgcctgaaaatatgttttacatttctccatgcgtacctttctgtttagtactcaggactcctctcccaaagaattaaaacagacragagatgagaaatagaaatctg

SEQ ID NO: 560644 - DNA, 586 bp, Homo sapiens
atattcaactgtgttaaatgaaaaatttgtggcccagtgaggtggctcacacctgtaatcccagcactttgggaggccgaggcaggtggatcacctgatgtcaggagttcaagaccaaggtggccaacatggcgaaacctcatctctactaaaaatacaaacaaaattagccaggcgtggtggcacatgcctgtaatcccagctacccaggaggctgagacaagagaatcacttgaacctgggaggctgaagttgcagtgagctaagatcatgccattgcactccagcctgggcaacaagagtgaaactgtctcaaaaaataaataaatacataaataaataatttgtggtttgctgtaagttaactaggcaaataaattaaacagaaccattctccaagcattttagtcgatctacctggaaatgcagtattgtgacctattaaaaaatattaagtgatcaaacccaggcaaatatttaaaaagaagcaatattttctrtttctttaaaacttgtcagaaggtgaatattttccttccaatgtctgcctctttgaatgtgagacacagttttctcttggctgtag

SEQ ID NO: 560645 - DNA, 536 bp, Homo sapiens
ttcaactcacaatttcttgatatgcaactctgggtagttaagctattctgggatagctggggcaagagtgaaggagtgagggacagaggaggtaagacaagatcgtcactggaatgagtgaagctggctggtataaaagaacctggagaatacatgctctgttaatggcatttaaatccatygttttcacttaaaatatgttagcccaggatctgactgcaatctgtgactagttactctccaagacctgacctggctctgccatttgtagcctctccccttttgtatcccctcatcccttagcagcacccatctttgttatgcagttatccagtccacctggtctttcaggacaagggacacttgtgtgcaatgcaaagacagagcacaggcactggtctcttccttcaagccatcttgtttcaatcccacacaccctttaaagtgggattgcagttgacaaagctcttgcttttacatgagcaatgccagttggactaatccagggccgtaattctgctgtactcactcctatc

SEQ ID NO: 560646 - DNA, 621 bp, Homo sapiens
tgttagctgctagtatcgtatctctaatttttatattgttgataaaattgttaacttgtcataggtattccctttatgttagttttatttgtctaattagataatatgttcaagaataagaatgatacatagttgtctttatccccatcctcccctcctccactgctactttccatcagtctggtgtattgtatacaatgcatgcccagagctgtcatagtataagggcaggatgccaaggcaaataaaacacaggccctcacacagacatgtgttcaattcctggctctgcttcttaataatttagtgactttatccaacttacctaacacctccaagcctcaggtttataatgtataaaatgtgggtaaagtgattgccccataagatggctgtgaatacagatccttcccagtagggagctcatcataggcatttaaaaatgtctatttccttccctttccttccctctcaccatcaatgaattgatcagaatgtgctcrgagacatagggaaatgtacatggaagctgacctcaacataacagacaatgggaagagggctaatgtcccaaaaacaaacaccactaccttataacagggccatgtccccaggcactcc

SEQ ID NO: 560647 - DNA, 529 bp, Homo sapiens
gaccaacgcctcctctcgttcttgtctggttactttctgggcatccagaaatttcaagttgggcagcttgtacagaacaaagcatctggaagataagagtcagagacaactcaggaagtttgagtggcagcctcagagatcccgacagcttgtctgatcttcaagaatccacaccatccggtcttctggaacttagaccttggctgcgcctcctctcttctttcacaaagaataaacaactgttccttggagaagtcagaatgattctatcttacacacatgcacaactaaacattagaagcacacactaatggtacacttggctcaaaggtaaacacacacacacacacgtgggttagccagtggcaccctatcaacgcatgcccttccttccagtctagaaaacaggctcagcttctttgctacacagaaattctcagtaaaataaacctataaattgattgtaccctttaygtcactgccattcctatgggtcatctgtatcatagactataatgacctggatgac

SEQ ID NO: 560648 - DNA, 271 bp, Homo sapiens
ctctaaaaatcaacagggagaactgccttaaataccgtgccattgcttctaaacatcaaatgattgactcctttgtatagctcagccctccttttgcaagagtaaaakagctagctggtgtcgacgtaagctacagccacccactaataagtttaagataaaaggccaatatatttaaataagattcagacataatgtaatagtatttgttaccaagccccatctaattatatcaatcttttattaccagacccatgagtacagggaactc

SEQ ID NO: 560649 - DNA, 271 bp, Homo sapiens
ctctaaaaatcaacagggagaactgccttaaataccgtgccattgcttctaaacatcaaatgattgactcctttgtatagctcagccctccttttgcaagagtaaaatagctagctggtgtcgacgtaagctacagccacccactaataagtttaagataaaaggccaatatatttaaataagattcagacataatgtaatagtayttgttaccaagccccatctaattatatcaatcttttattaccagacccatgagtacagggaactc

SEQ ID NO: 560650 - DNA, 555 bp, Homo sapiens
agcacaatcaaattaattaacacacccatcacctcacagagttaccatgatcagatattaattatgcatctcaggaggtaatgcaataggaagtatacagcaccatatacaaaaaaaaatgaatttgaattcaaacaagttattgatctgacaccagattatagaaagtacagaggatagaggaacaagttagatggcatggcaaggaggcaaccagccaaagcagaatgtgggtcattgcccaggataactcattcaattcctcaaaaatatcaatgcataatagagagagagagacagagagagaaacagagagcataagagacaaagagaagatgaaaaaggagaaggggagggagatgattaaagactaaaaaagatcaaagggatacagcaacgcaataaaaggtatgggctgtgtttggacaytgaatcaaacgaactggatacaaaaagatatttttgagacaactgggaaaattagaatatggactgggtattgaaaagccctatggaattattattctttttttagttgtgataatgacatggtga

SEQ ID NO: 560651 - DNA, 571 bp, Homo sapiens
aaatagcaaactgatgagagaaacagctgaggcccaggtctttgagtcctgctgacatcccccaaccatcaccttactacaccattctcaaccsagtgctcctcatttagcattttaactgcctgtgagatgatatttcggaatttggtttctgaagaacaacaggcaggttgtaagaacagctgcaaagaaactgattttctttctaaacttgggccccattagttatgtggcaggtggttgcatttaatccaggcagaatttatggagagttctgctgttcccagcacttcattcaactccaatagcagaaaacaaaagccccaaaatcaccaagtacagctcctgccacattgtgagtgcccaagcaagtgctggtctcctttgctttcttgttttcttgttttcctcagagatttcagttcagatgaggatataaggcttgttccatgccataactatctagtcaataagtcttcagaaatgtagttatcacttaccaggtaagctacaaaatgagctattaagaaatgatgttgcggccgggcgcggtggctcacacctgtaatcc

SEQ ID NO: 560652 - DNA, 518 bp, Homo sapiens
gccatctctccctggatagtgtccccatgtgctggtgctataggacactctctcagagtacacacaatggatgttcatacaggattgtacgtgayacatcagcaatggaagcagccacaaatccgaggggctggctccatgttcagagagacacccttctttggaacaaaaatcatttaaagaagtcatttacaagacactttagaagagatcaaatccttatcttgatattgaaggagagataactcaaagcaaggaccccagaaatcaaccactacatacaaaagagctctgcaggtgtttgtatggatcatggtaacatccagtccctcacaggagccatggatcacgtacaatatactaattcttatgccgtcaatccagagagagaagaaaacacccccaacagaagacgaaggcccagagggaaacatgagcagcaagttctcagcaggccacagcagtcacacaaggaggcgacctgcatagggaagcctgggtctcagctgggcctggaa

SEQ ID NO: 560653 - DNA, 518 bp, Homo sapiens
gccatctctccctggatagtgtccccatgtgctggtgctataggacactctctcagagtacacacaatggatgttcatacaggattgtacgtgatacatcagcaatggaagcagccacaaatccgaggggctggctccatgttcagagagacacccttctttggaacaaaaatcatttaaagaagtcatttacaagacactttagaagagatcaaatccttatcttgataytgaaggagagataactcaaagcaaggaccccagaaatcaaccactacatacaaaagagctctgcaggtgtttgtatggatcatggtaacatccagtccctcacaggagccatggatcacgtacaatatactaattcttatgccgtcaatccagagagagaagaaaacacccccaacagaagacgaaggcccagagggaaacatgagcagcaagttctcagcaggccacagcagtcacacaaggaggcgacctgcatagggaagcctgggtctcagctgggcctggaa

SEQ ID NO: 560654 - DNA, 617 bp, Homo sapiens
agggctaatgcacaaactctctcagccaaactcctgtgtctgccaagatcctggattaaaactcaataatggagatagcttcccaatttgttaaaggatagcactatttcaattttattattgtcctctaatcatttttcttacatcctcagtgcctgtgactattgtctctgagagaatgtgccataagatagcatttctgatttggcagaaaatgctatatttagccgttttaagtttgggttaatactaataatggtctccacgtagcacatacttgctgcatgggtgtcaaggatacaagtaaatgcctgtggytctaagcctcagcatggttctgcaagatagacacttcagtattatccctactttaaggataagggaaaggaggaatagagaagttaagtaacaaggtcacatagccagtccatggaggaaacgggaattcctctaggttgcctaactctagagcctgtgcccttaaaccggggcatatgaaatccatggtatcactcaagaaacaccataattttcaaatgccctgcttcttgaacatgtttgagaacccctggattcatgacctggtaaaaacaggaccattatcacagagtttgaca

SEQ ID NO: 560655 - DNA, 533 bp, Homo sapiens
ccctactttaaggataagggaaaggaggaatagagaagttaagtaacaaggtcacatagccagtccatggaggaaacgggaattcctctaggttgcctaactctagagcctgtgcccttaaaccggggcataygaaatccatggtatcactcaagaaacaccataattttcaaatgccctgcttcttgaacatgtttgagaacccctggattcatgacctggtaaaaacaggaccattatcacagagtttgacataatgctggcttcatgaatatgaagttccaaaacaaaatttaatattagaacgacacagatgacatctgtatttttaggcacacattcacacacaagtgcacacacacatacacatcccataccctataccttagtcattttactagataacctgcctagatttattttattttggctgtgaatgaagatattcctcttccaattcaataaaaaagcacaacagagccataaatacagagatgaatgtaagaattcaaccatttgattgcattaattca

SEQ ID NO: 560656 - DNA, 533 bp, Homo sapiens
ccctactttaaggataagggaaaggaggaatagagaagttaagtaacaaggtcacatagccagtccatggaggaaacgggaattcctctaggttgcctaactctagagcctgtgcccttaaaccggggcatatgaaatccatggtatcactcaagaaacaccataattttcaaatgccctgcttcttgaacatgtttgagaacccctggattcatgacctggtaaaaacaggaccattatcayagagtttgacataatgctggcttcatgaatatgaagttccaaaacaaaatttaatattagaacgacacagatgacatctgtatttttaggcacacattcacacacaagtgcacacacacatacacatcccataccctataccttagtcattttactagataacctgcctagatttattttattttggctgtgaatgaagatattcctcttccaattcaataaaaaagcacaacagagccataaatacagagatgaatgtaagaattcaaccatttgattgcattaattca

SEQ ID NO: 560657 - DNA, 570 bp, Homo sapiens
ttttcacaaataattttaggaaattatataaaattaggacacattccatcattgtcttggagattcatattgtactttggaacattaaaggcttgagaagctgcaaagaaaggaagcttgcttgactttgtttgatagagtattttgtggccttttgataaaaaattcctttttcatataactcctttctggatcatcaagcacatattggactttccatccaagtgtctgacccatggtctgtctgcagagacaggttgatatggtagctagagcacttccagtgaataacttaagcactggagagaacaaagcctaacgttttccaactgcctcataagctaagaagctacatcttacagatccaacatgagactttgcacctttcaggattcccatgtgtgccacaagtattatcaaagcagcaaaataatgcctggacatgtgagcctatgtgagattcaagctcataattctattatgttcatttttctactcttcattcctttctctcttcatcctaccttgtgtayccggatacccaaacagtgttagagcccaggcatccct

SEQ ID NO: 560658 - DNA, 582 bp, Homo sapiens
gcaattgagatgctcctgattccaaaaactttttctcaaaacacaaatcttatcctgttcttgtccatccgaaataactcagtggttcccctactacaaacaggccaaatctaagcacttctgcaacagactcaaaattcttcatactctagtccctgtatacctcttagcccagtggtaaccccaacctccttgcaaatgttgctcaagcaatactgcacaccactaattttctgctatatcctgtcccttcaagtctctgtacctttgcactggctctactccctgcctgaataaatgccattatttgtccmccatcaaaatatcaagtatgggttgacgcaagttagtgctttcaagctaaataatgaatacacagattctacctcctcactttacagtcatcatttctcctgaaagctccagttagaattagcttctcctgctgcaggcctctccttatacacattttatcacattttactataattttctgcttggatctctgactccctagggccatgctttactcatttttgaagctcactgcctatcacagtgactggcacattgcagacagca

SEQ ID NO: 560659 - DNA, 501 bp, Homo sapiens
ttccttgaggtcgaggctatgctagcacaagaaacaagtcccacagtacctgttggagctggctaccaaggaggaacccagtgcagggctactagttgcggtgcgtagccagatttcacttcaccctctagaatcataaaatttgatgcactgtgtgcagggcgcatcttcctttagtggtgggtcagaggtgagcctgaaagccactataaggacaggagactagacaagcactcctttcctccaggttttggattatctgagagcatcttgtgctcaggatctaggctcccagctgtatgctgaagggccctgggtcaccacagcaaacacataggaacactgtgggacatttaaattaatttgaacttaattttgaaatatgttaaattttcaaggaaaatacagcaatacatgacatctgtcactctgcaaaccagtaggtcaatgtagttctcagtgtcaacrttagatcatgctacattccttctgattatgcca

SEQ ID NO: 560660 - DNA, 686 bp, Homo sapiens
ttgaagctacacagctggttgatttgcatggttaaaactggaatccactctgactccactatttttcccctctgttgcagtaatgaactagaagaatggtcctggtccctgatacaagggaaaggaaaggagcaaggggcccactggcttacagagtgtctttatactaattttaaaaagaatgtgattctttttaaagaatctgattcaaggttcatttgctatgggggacattttcttaatatccttaacatacaatgattttcttagaacaagacacatcatctgtcaggaaaccactataaaaatacacatttacagtctctgtgatgtggatagtgtccttttagatgtgacagcatcgtgtggtatataacttgccctttcttgacggccttcctggatgggctaggcaagagggaagggggtacattttgcctcttcaccctgggagaggctggragtagtgaagaatgtcaagtcttacacacaataggaagtttgtaaataactgttgaatcaaatcaaaccaaaatccttatcttgaagaaattaaaactaacataaaatcactaaaaataccagtataagaattattgcaaaagaccaactggtccatggaacataagtctaattcagtgagctgaaattcagttaatagagtagaaaccaaattttacaaacca

SEQ ID NO: 560661 - DNA, 532 bp, Homo sapiens
ttttcattaattccacttacctccctatttgatggggactcttagggactctgatgagaatcttgttgattcactttagctttgaaaaggagattccccatgtagaaacctctttgaacatgtcctcttttttgagggacagttggttcttccaaggcagtggactcactactctttcaggcattccaggctcatattgaaggcagatcaacatcttcctcatcttgagtcaaactcgctcttcatataaatatgtccgtggattctagctgtgcccttagcaattacaaagaataaatctccctatgctgcagtgtggaaacggttcaaatgtttgaggatggtctttataatcccttgaagcattttctttcttaccgacaagacagtcctgggttcttcaaaacatcgtcataagctcccgatcctcccagccatcctcctgtcatgtgtccttgccttaaactatcgtctgcagagctgaacaaagtatgccagctatggaactgstcatcagccatcagtgtcactt

SEQ ID NO: 560662 - DNA, 618 bp, Homo sapiens
agcaatgcacatccatctatgagacaaaactagatattaacctagtgctgtgtttagtacatatactcataatagttgatatttattgtacatttaccaagtgctaggtattcttctaagcatttcatatttattaactccttgaataccaataccacaaataccttgcaagattagtagtaacagataatattttttagtttattttccycctctctaacctcatataaattttcaaataagagaaggtgaacttcagtccagagttcaatttctggattaaaatatcacaaaactaaaaggtctaaaagaaaccaaccattttatagaattttaaaattttacatgtataacatttctagagatatagtttcctttatatgataaacatttacttatgctccagtaataatttttaccattgcttttgaagggaagagttttagggcagaattagttaaatctccaaaattggtagcagtattatctctgctttacgtatgagaaactgagctagactcagagaagcaaacggacttgcttaaggtcaaagagctagttagtggttgaagcaggaactaaactctagaagccttacttttagtcaattagccaata

SEQ ID NO: 560663 - DNA, 618 bp, Homo sapiens
agcaatgcacatccatctatgagacaaaactagatattaacctagtgctgtgtttagtacatatactcataatagttgatatttattgtacatttaccaagtgctaggtattcttctaagcatttcatatttattaactccttgaataccaataccacaaataccttgcaagattagtagtaacagataatattttttagtttattttcctcctctctaacctcatataaattttcaaataagagaaggtgaacttcagtccagagttcaatttctggattaaaatatcacaaaactaaaaggtctaaaagaaaccaaccattttatagaattttaaaattttacaygtataacatttctagagatatagtttcctttatatgataaacatttacttatgctccagtaataatttttaccattgcttttgaagggaagagttttagggcagaattagttaaatctccaaaattggtagcagtattatctctgctttacgtatgagaaactgagctagactcagagaagcaaacggacttgcttaaggtcaaagagctagttagtggttgaagcaggaactaaactctagaagccttacttttagtcaattagccaata

SEQ ID NO: 560664 - DNA, 618 bp, Homo sapiens
agcaatgcacatccatctatgagacaaaactagatattaacctagtgctgtgtttagtacatatactcataatagttgatatttattgtacatttaccaagtgctaggtattcttctaagcatttcatatttattaactccttgaataccaataccacaaataccttgcaagattagtagtaacagataatattttttagtttattttcctcctctctaacctcatataaattttcaaataagagaaggtgaacttcagtccagagttcaatttctggattaaaatatcacaaaactaaaaggtctaaaagaaaccaaccattttatagaattttaaaattttacatgtataacatttctagagatatagtttcmtttatatgataaacatttacttatgctccagtaataatttttaccattgcttttgaagggaagagttttagggcagaattagttaaatctccaaaattggtagcagtattatctctgctttacgtatgagaaactgagctagactcagagaagcaaacggacttgcttaaggtcaaagagctagttagtggttgaagcaggaactaaactctagaagccttacttttagtcaattagccaata

SEQ ID NO: 560665 - DNA, 618 bp, Homo sapiens
agcaatgcacatccatctatgagacaaaactagatattaacctagtgctgtgtttagtacatatactcataatagttgatatttattgtacatttaccaagtgctaggtattcttctaagcatttcatatttattaactccttgaataccaataccacaaataccttgcaagattagtagtaacagataatattttttagtttattttcctcctctctaacctcatataaattttcaaataagagaaggtgaacttcagtccagagttcaatttctggattaaaatatcacaaaactaaaaggtctaaaagaaaccaaccattttatagaattttaaaattttacatgtataacatttctagagatatagtttcctttatatgataaacatttacttatgctccagtaataatttttaccattgcttttgaagggaagagttttagggcagaattagttaaatctccaaaattggtagcagtattatctctgctttacgtatgagaaactgagctagactcagagaagcaaacggacttgcttaargtcaaagagctagttagtggttgaagcaggaactaaactctagaagccttacttttagtcaattagccaata

SEQ ID NO: 560666 - DNA, 610 bp, Homo sapiens
gatgaaactcagaatggattcagacaaaaatgtcaatattcccttgagctgaattattctgggaactgaaagcactgtggaatgaatggttagttgtagcaaaaagatccagttttatgccgaagaatcctatcagcaacagattcaatctaattgctgtgcctgcaccaaattttcctgccaataattttagaattactatggggcaggctgaaaagagctattctaaggaaagaaagactgattttcatagttcttaactccccataatatggtttccttaatacatattatctttttccctcctagaatgtccttcttttctccccaccttgttacccacaatttgtaaagtacctatacagtggatacctttctaacttcacttygcttttgttctgtcttacttattggcttcaacaataaacagtggacttcatggaatgcatgtatgtttcagaattccaatgtcaaggataaaatgagatctattgtaattttaagaacataaagcaaaagaatgtgtggaagagatatatggaaatagatctgacaacttttaccaattgtttttagtaaaacatctttcatctactcatcatcccctttc

SEQ ID NO: 560667 - DNA, 604 bp, Homo sapiens
ttcttctttccctctgtattcccactgaatattggtctagaagggcaagaaccatactgtttgttcaccaacctacccaaagcatccagcatagcctctcgatacccactgaatatgtgctgaatgagtgtgctgatatggtttgtttgtgttcccacccaaatctcatcttgaattgtagctcccactatccacacgtgttgtgggggggacttggtaagagataattaaataatgggggcggctaccctcatattgttctcatgatcatgagttctcaygatatctggtggttttataaggggctattcccctccttcactcattcttctctctcctgctgccatgtgaagaaggatatgtttgcatcctcttctgccatgatggtaggtttcctgagtcttcctcagccaatgaggaactgtgagtcaattaaacctcttttcttggctgggtgcaatggctcacgcctgtaatcccagcactttgagaggctggggctggcagatcacttgaagtcaggcatttgaggccagcctggccaaaatggtgaaaccccgtctctactaaaaatacaaaagctagtcaggtatggacgtgcatg

SEQ ID NO: 560668 - DNA, 548 bp, Homo sapiens
  misc_feature 187, 205, 244: n = A,T,C or G
ggaatatttgacaaaacacaagcatctgccccagcagctgttcccagcaatggggatcagtcaccaactcctcccacctgctccttctcatgcttcactcttctgcaccaccccccgccccaatttatagtcttctcaagtttaaagacttcccttgacatgccataaaccaaatttctcttctggngaccagtgaacacatatntctgattttttctagttcctcgccttaccccattctcangaaagcccagtacttcgtgagttcagagcacttccttgctggggcgcctgctaagtggggtgagtttmactggagcacccctcccaacttttgggaaagagttcactctcaccaacccatactttctgcctttccttctctgggattgtcttacctctggaaatccttcagggacttctagggaatggctatgtcaatggggctggtaaaaagcagctgtgggctggtaaatgtcagaagctgtttgcaaggctgggaaaattcactgtttatttcttcaacaagccctagtttcctccactga

SEQ ID NO: 560669 - DNA, 453 bp, Homo sapiens
gtgtgtgtgtggaggaaaatgagggttttcagaccctgggacagctcccaagtccgccgcagtgttcctgctggatgcaagccatgggggcagcacagatgggaaaccctgagttggtgtggatgggaacaatgaagagcaggaggctgaagttctgtcaatgcttttcaggtcaagagtgggaggtggctcaggaatgtggcccctgaygtcagcccgtgcaactcttgtcaacaaagagagctcccagttggagaaattaaaagcaaactttgactgggaatgtgtgggaagtggtagctcagtgagtgaggccagatgccacatcagctcaaagtaaagccatgcacttggctttactgatggagatgatggatgtttatgatccccagtgtgaaaatccttgcaatgagatccatccctgaactcctcttctcccatctgtgaagatgc

SEQ ID NO: 560670 - DNA, 610 bp, Homo sapiens
ctaatggttgcatctttagtaatattgttagtgatatgttactgattttaacatttttattaattctttgttgtttcttcgtagtacgttctctttaaaaaatatatcagttttcatttcataagactgagctttctactctagctaaatcacaaaggaccatgtattcactagtcttaagtttggagaagtagaataagtgcctaaaaacataaataataattaaaggcagctatcagcaaaccatcagtaaagtctacacctgccattagtaygtaagaagagagaggtcaaaggggcctggtttagaaggttttatataggaaagcaaaaatgaaggttaccaggaagaaggaggcaaagggggtaggaaaaggaaaagagaataaatgcaggttaaatggtctgtctaaagtacaatgtgtagatcaaagtccctaggacataagattcacatgaaagaatggttagagatgaagttatagatagtctatgatggctctgaggccatcatagaaaaggaaaacatatttgaccagtcccatatacagtcaaatatcacataatgatatttcagtcaacaatggaccacatataagatggtggtccc

SEQ ID NO: 560671 - DNA, 661 bp, Homo sapiens
gtattttactgtaactttttttttgtttagatacacaaatacttaccattgtgttacaactgcctacagtattctgtacaggaacatgctgtacaggtttgcagctcaggagcaataggctataccatatggcctaggtgtattgcatgctataccatctaggtttgtattaagcatatactatgatgttcacacaatgacaaaatcacctaatttcatctatcatttctcagaatgtatccccattgctaagtgacacatgcctatacacacatacacataattttttttattgtcactaatgctaaaaaatgagtcattggaggctcaggctgtccatctcggaggtctacattaagccttcatttagggtctttttttttgtttttaagagacagtatttcactctgtcacccaggctgcagtgcagtggcacactcatagctcattgcagccttgaactcctgggctcaagcaatcttcctgcctcagccctctgagtagctgagactataggtgcatgctatcacacctggctaattttttaaaaaacttttttggcaacagggtctggctatgttgctcagctggtctsaaactcctagcctcaagtgatcttcctgactcagactcccaagtagctcagattgcaggtgtgagc

SEQ ID NO: 560672 - DNA, 602 bp, Homo sapiens
catttgcttctttccactatcatcttttggaaaatgagatctagaagcttatttcctgacgtggaaactggatcatctttgtattggtcctaaatttaccttgatccattttcaaaagggagtctcccaactctgtatttaggacttagcaactaactcccctttcaacctagtcttccccatgtaggatttaacagatcttgatcatgacacttcattctcctcctctctagaccaaagactcttggttatttccattcaatacaaacattattaactgagcagcaactatgyattacacactcctccaggcaccaagaacctaaaagtgaaatgtattacgttctctgcccctgaggcatacctaacacaacagggaaagtaattcagtgggataagtgaaatgacaaaagcctctacaggagaaagaatgtatcttggaagaaatctgatcttacctgctctcctataaatgtcccatcattccaatagccacttgttgcctagtctaagcctaatggtatgtcatcttgagctatcatgagccttaagtccccagctgacattctatgacatgtcaatgctatcataaagaatctaaa

SEQ ID NO: 560673 - DNA, 560 bp, Homo sapiens
tgcttaaggaggaagggtcagaagtcagaggtccctagtccaccctcttgttcttctcttttatgacactgtttggaaagaataatggaagaatcaagatctttggctgggtctaatttatgaagaaaacagtcggtttttttcatagaagagaagcaaaatgctgaactatgagttctcatcacctgtgagcttgctgtaagtgcccagggtgcagctcccagggaccaaagagaagkcctccagggtttttgagcccttggagactgctggttgctgtgattccttgggagaagcagctcagatggtaaactaaagagccccattaacctaagcacaataacaccgacacttccaattagccagaggctgtcaggtttagccatttacattgcatacattctctgttcctgactgtgtttgagttactttcttccagcacagatggagaaagtgatttttttttcctgttaaaggaagtcttcccagatgaaccatatccaacactaatcactcttttgttttaagaacacaattctgtaagacttggcttacaatta

SEQ ID NO: 560674 - DNA, 587 bp, Homo sapiens
gtcaattccaggactccataatcaatgactctgtttacacctggaggctgataagtacttgcaaaatgtgatagtcaggatagactgcgtcatatgcaggaaccagaaatccctaaatcttatcaccctaatacagcaaaagtttaggcgcttaaacaatatcaacgtggatgtgaatgactctctagggcagctgtctagtaagctagttactagatggatgttgtgattccaccatcccaaaatacaaggtaccctctaagatgacctcagctgggatgtaagttaaataggaagttgcacaggggcatttcatayctcagctcagaaaggaaatgaaaatcatatattgaaaaatgctaatattgtctaccattctaacatattccctttataaaacagcttccaggtaagtgacgatctacccttagacagattaagaaattaatgatccttcctcttaggttgtagaagcaactcctctgatgacctttagggagaagagtgacagagatttcaggtatgttcatttcatcccaggtttcaggttactgccagcaaatgaagggtgccccatagcaacacat

SEQ ID NO: 560675 - DNA, 587 bp, Homo sapiens
gtcaattccaggactccataatcaatgactctgtttacacctggaggctgataagtacttgcaaaatgtgatagtcaggatagactgcgtcatatgcaggaaccagaaatccctaaatcttatcaccctaatacagcaaaagtttaggcgcttaaacaatatcaacgtggatgtgaatgactctctagggcagctgtctagtaagctagttactagatggatgttgtgattccaccatcccaaaatacaaggtaccctctaagatgacctcagctgggatgtaagttaaataggaagttgcacaggggcatttcatatctcagctcagaaaggaaatgaaaatcatatattgaaaaatgctaatattgtctaccattctaacatattccctttataaaacagcttccaggtaagtgacgatctacccttagacagattaagaaattaatgatccttcctcttaggttgtagaagcaactcctctgatkacctttagggagaagagtgacagagatttcaggtatgttcatttcatcccaggtttcaggttactgccagcaaatgaagggtgccccatagcaacacat

SEQ ID NO: 560676 - DNA, 659 bp, Homo sapiens
atatgacccagaaattccactcctaagtatataatcaagatactgaaaaacatattcacacaaaaacgtatacaaaaaatattaatagcagcattattcattattcatcatagccaaaatgtagaaataaccaaaatgtccatcaactgattaatggatagataaaatatggtatatctatacaatggaatattatttacccataaaaaggaaaggaagttctgatttatgatacaataagaatcatccttgaaaacactatgccaaatgaaagaagccagacatgaaaggctacatgttgtatgactacatttgtataaaatgccaagaataggcaaatctatagagacagaaagttgattaaggttatcaggggctgaaggaagaggcagattgggagtaagtataaatggttaaggggtgtctctttggaawgacggaaatgtttttgattgaatagtggtgacagttgcacaaccttgtggatatgctaaaaaccaatgaattggatacttaaaaacgaagaattttatgttctaagaaattttattatgtggttctaagaaattttattatgtgggtaaactagtaatgtgggctttctttatttttaagaaaacttttgggatataattccattactactttatcctacatta

SEQ ID NO: 560677 - DNA, 659 bp, Homo sapiens
atatgacccagaaattccactcctaagtatataatcaagatactgaaaaacatattcacacaaaaacgtatacaaaaaatattaatagcagcattattcattattcatcatagccaaaatgtagaaataaccaaaatgtccatcaactgattaatggatagataaaatatggtatatctatacaatggaatattatttacccataaaaaggaaaggaagttctgatttatgatacaataagaatcatccttgaaaacactatgccaaatgaaagaagccagacatgaaaggctacatgttgtatgactacatttgtataaaatgccaagaataggcaaatctatagagacagaaagttgattaaggttatcaggggctgaaggaagaggcagattgggagtaagtataaatggttaaggggtgtctctttggaatgacggaaatgtttttgaytgaatagtggtgacagttgcacaaccttgtggatatgctaaaaaccaatgaattggatacttaaaaacgaagaattttatgttctaagaaattttattatgtggttctaagaaattttattatgtgggtaaactagtaatgtgggctttctttatttttaagaaaacttttgggatataattccattactactttatcctacatta

SEQ ID NO: 560678 - DNA, 487 bp, Homo sapiens
tactagtatgtattaccaggtgtatttcaaagtattaattaaaactgtgctttgaaaataatcttttagtaatccattgctgccaaaaagggttataggagaggaaaaatcattttctctccacccttcatgttcttagttggaatggacccccataacaaaagacagattaacagagaagaacaaatagaagcttattaacatgtgtgatatargagcaaagagaatttttccctcctcttctgaaagtttgagcctgctgaaagaaactgataatagattagcagaaaaggtatacacatttaataatgtgctggtgtgcatgggagccatacaaaatacaagactcaaagaaggaccagatggttcaagcttaaatactgccctcttcttaggggagagggagatgggggaatgtaggcaattttgaaaagagtatgatttttaggagagttggttggactcaaagaataatttgtaaataggc

SEQ ID NO: 560679 - DNA, 487 bp, Homo sapiens
tactagtatgtattaccaggtgtatttcaaagtattaattaaaactgtgctttgaaaataatcttttagtaatccattgctgccaaaaagggttataggagaggaaaaatcattttctctccacccttcatgttcttagttggaatggacccccataacaaaagacagattaacagagaagaacaaatagaagcttattaacatgtgtgatataagagcaaagagaatttttccctcctcttctgaaagtttgagcctgctgaaagaaactgataatagattagcagaaaaggtatacacatttaataatgtgctggtgtgcatgggagccatacaaaatacaagactcaaagaaggaccagatggttcaagcttaaatactgccctcttcttaggggagagggagatgggggaatgtaggcaattttgaaaagagtatgatttttaggagagttggttggacycaaagaataatttgtaaataggc

SEQ ID NO: 560680 - DNA, 637 bp, Homo sapiens
gccatcctttggggtactgttttctgagctccagtgataactcatttatacaagggagatacccagaaaaaaagtgagcaaatcttaaaaaggtggcttgagttcaggcttaaataccatcttgaaatgaaacagagaaagaaggatgttgggtgggagtggagggagacatatactgggtaggtattcaggtgaagtatggtccacaaaaacagatttcagatttcagattttgttctgcagatttcagctggcaccttctccagtgaaaggagtctctggtgmtgcagtcagccttcttttcttggtacagacagaagccaccttcatgaatggaaattcccttgagagatgtaaatttcccttttaacagggtaacttttattctgttgtcggcgcttctcctatggctgtagacctccaaataatcagctcaaaataatccttacgctagagagacatattttggggtggcatattctggtttccaaagggtggagactggctcagattggaacagagcttaaacttaaaagtctatgaaaagagtcctttgtgttctggaagatgacacaaacagggtcagaaaattgatttcagtcaccccactttccaaacagtatttgaactggaaggc

SEQ ID NO: 560681 - DNA, 576 bp, Homo sapiens
cagctcggtgaagatttgtttattcaagatcactggagttcaacaattttattagcttagattgacaactatctatcacagatgtactacccactaaatgatagaggaagaagggagttaaggcctcatgtgcgcgcctgtgtgcagtaagaaagaagagatcactgagagctagaggtttcacagatagtgcccagcaagtgagcgctggacgggcacctctcccttcttcttggttggacttccacagaagtggaacaaawgactcagaacaaaacctccagcttcacagaaccacgccagctggtacttatgctttattttttgacgcagtcaggtgttcattctgccaagcaagttttcattcttccctttactccagccaattcctgttttcttcaactggagctccccaagactcatcaaaaacacgatttaattacatctccaaaaaaaaaaaaaaaaaagggaggagtgtaaacatgactcctttttatctcctgatacatctggacaagtagacaatgtgctaaaacaaaataaatctgccctgacagtcacatcaaagagttcagc

SEQ ID NO: 560682 - DNA, 670 bp, Homo sapiens
caaaaactaaaatacctaggaatacatttaaccaaagaggtgaaagatctctacaatgaaaacgtagaacatcgataaaagaaactgaagacacaaatacatggaaatatattctgtcttcatgccttggaaaaattaatattgccaaaatgtgcatactactcaaagcaatatatagatttgaagaaattcctataaaaatttcaatgccatttaktcacagaaatagaataaaatcttaaaatttatatagtattgcaaaagacaccaaatagccaaagcaatcttgagcaggaaaaacaaagctggaggcatcacactatttgactttaaactatattacaaagctatagtacatagaacaacatcatattggcataaaaatagatacatcaaccaatagaacagaattgggaacccagaaatgaactcacacatcaatggtctattaatttttaacaaaagtgccaagaacacaatcagtaaaggacagtggctttaacaaagagtgttgggaaaactggatatccatatgcagaagaatgaaactagacccatatctctctccacatacaaaaataaaatcaaaatgggttaagggctcaaatgtaagttctggaactgtaaaactaactagaagaaaacataggagaaaaaaactacgcaacat

SEQ ID NO: 560683 - DNA, 613 bp, Homo sapiens
atcactgtgtacccccataattgtatgtaattataatgtgtcaaaaataaaattaaatttaaaaaactaaatttaaaaaagatcactgtgttcagtgtttcctagggtaaataacttttttaaatgatggatgaaataaaggtaatgtttttctttatttcagaagaactctgaatttataatattgtgcactaagaatctctaaaaggagattatactgtaaagcatccaggaccaccacctctttgttccaaaaccaggaaatckcaaggggtgataatattgtgttcatttccatttatgcaaactgtatgtctattggaaaaggccattccacactcaaggacttcatgtcacatttgggcacttcagtgccctcataatattaatataattggaggttgaaagatttgtgctgtcccaagcaaagcatgaaatgtttcatgaattggtggaaaattaggaccagaaggatgtcatgtgtccatttcagtgttttggttttagggaaatccaagacagtacatgattgattatgattaattgtatttacttacatagttctctttgtggatattttcatctgaactgggaaagcacaagaattaagcag

SEQ ID NO: 560684 - DNA, 597 bp, Homo sapiens
gtctttcaccttaaggagaggaaaagcttccagttcctagggaatttgtagcatttggggaatttgtaccatttggggaatttttttttcaaatcctggagtatcggtcaaccatagcatcacttggtgatagtggtgttatttttagttaagtctttctagcccaagttraaacatgtgcatatttaaaatgtagaataaatgcttttgcaaaacaaactgagaaccaggcgtggtgtttggcttaactgaatacctaactcagcaatagcttttgcacagtgttgttcaaaatatcttccttcaattttcagattctttgccttatattatagaattgatggagtaactgatttattttgtaggatctgaaacttccaactcattatttccaggttctgagtgttatacgactgaacctattggtaatgtgtgttcttccagcctaattgttaaatgagagaagttcatgaagaaaaatgagatatgatgttgcatttcatgaaacagctgcctcagcccaaacaaatgtttctcttatctgtagaagaagataaaataagacatagctgaccagagatcttcaagttttaaaag

SEQ ID NO: 560685 - DNA, 597 bp, Homo sapiens
gtctttcaccttaaggagaggaaaagcttccagttcctagggaatttgtagcatttggggaatttgtaccatttggggaatttttttttcaaatcctggagtatcggtcaaccatagcatcacttggtgatagtggtgttatttttagttaagtctttctagcccaagttgaaacatgtgcatatttaaaatgtagaataaatgcttttgcaaaacaaactgagaaccaggcgtggtgtttggcttaactgaatacctaactcagcaatagcttttgcacagtgttgttcaaaatatcttccttcaattttcagattctttgccttatattatagaattgatggagtaactgatttattttgtaggatctgaaacttccaactcattatttccrggttctgagtgttatacgactgaacctattggtaatgtgtgttcttccagcctaattgttaaatgagagaagttcatgaagaaaaatgagatatgatgttgcatttcatgaaacagctgcctcagcccaaacaaatgtttctcttatctgtagaagaagataaaataagacatagctgaccagagatcttcaagttttaaaag

SEQ ID NO: 560686 - DNA, 667 bp, Homo sapiens
ttcttaaaatatattttttayttaaacaaaaatatagctctggaatgtagtcatcttactctatgaaacagaaacatatttggatcacaaacctgctttagaggagtaattccttcagtttcttccataattcttacaattctatacagtaacaaacaggatttgtgaggcaatataatgttcttcttaacctctcagtaattggaggcatcttctgtatgtattccacaagtccagctcatgctgatgaaggaagtataattacattacaggcaatctcatctaaggtaattacaattgtcaccgtcaatccaattaaacaggataactaactctactgagtcagaagcaccataaagctttctgactaaatccaggctttgggataaggatgtgattagaattctgagaattttcatttgctaaaatactgttgtgtatacaaatagataacaatgctgggaggggggcttgtggggagagattggatacaggtagacttttttttttttcatttactgatcaatttcttatttctaagccagaaatcactgtagattcttggcatcaaacttcaggccacacaacatcattatggaaaggttaccccagcatcacaacatcctaatgctctactgttcccatctggcctcttgtcctgaatcaa

SEQ ID NO: 560687 - DNA, 538 bp, Homo sapiens
aggtgtccagatgctcttcctagcaatgactgtgcatctgttcaaattagatatgaggctcaggacagaagccagctcaagtgtcctccttgacctcaggtcaagttaggtgccctgctgaatgttcccacaatgtcctgcacatttactgttgataggtatctgtttagacctttatcatgctcattagactgtaagtatcctgagggcaggggtaggacactgggatgtcatcagttttatatcactatatcascaatgctttaacaatgttgacacagtatagatgttcaacaaaaatggttttcgaataaagtaaagactttatggctcatgatgaagcatagtgctacagaggaatcctggaataggagtgatatggtttggctgtgtgctcacccaaagctcacctcgaattgtaataatccccatgtgtcaagggtggggccaggtgaagataattgaatcatgggggtggtttccccccatactgttctcatgatagggaataagtatcaaaagatctgatggttttata

SEQ ID NO: 560688 - DNA, 538 bp, Homo sapiens
aggtgtccagatgctcttcctagcaatgactgtgcatctgttcaaattagatatgaggctcaggacagaagccagctcaagtgtcctccttgacctcaggtcaagttaggtgccctgctgaatgttcccacaatgtcctgcacatttactgttgataggtatctgtttagacctttatcatgctcattagactgtaagtatcctgagggcaggggtaggacactgggatgtcatcagttttatatcactatatcaccaatgctttaacaatgttgacacagtatagatgttcaacaaaaatggttttcgaataaagtaaagactttatggctcatgatgaagcatagtgctacagaggaatcctggaataggagtgatatggtttggctgtgtgctcayccaaagctcacctcgaattgtaataatccccatgtgtcaagggtggggccaggtgaagataattgaatcatgggggtggtttccccccatactgttctcatgatagggaataagtatcaaaagatctgatggttttata

SEQ ID NO: 560689 - DNA, 524 bp, Homo sapiens
aaataatggtttaaaacttcccaaatttaatttaaaagttattaacctacagatccaagatcaatgaatctcacacagaaatactcaaggagattcatatctggacacattacaggcggtttatggccaaagaaaaggagaaaatcttgaaagcagcaaaagaaaaatgatccatcacatacaggggaatgattaacagctgatttattgtcataaacaatgragtttagaaatcagtggaatgacaacttcaattgagaggaaaaaaaatcttgtcaaccaaatcttctatatccagcaaaaccatccttcaaaaatgaaggtgaaataaagacatttctagataaacaaagactgaaagaatttgttgctatcagatatgccttctaacaaatattaaaggaagtcattcaagctgaaaggaaatgacaccaaagagtaacaccaaatcctaagaaaaaaactgaagaatacaggatattttaaatataggtaaatatatttaaaatatataggatatttta

SEQ ID NO: 560690 - DNA, 487 bp, Homo sapiens
tcatttaaccgtccccaaccggagttccacatatggaaagggcaatgaatacctcgctcctgaaattgttatgagaattcaatgagctaacggatggaaagtgttgcttccagtgyctgtcacgtgatagtgtttaacacaggctagctgtgtagtcctgacaaaaatatggggagttctgaaggaagacggaagatgtttttgctttgtttatttaagaataaaacaagagggtgttacagagaaaagaaaatgaatgagcctagccttttgctcctttggacaaggcatgaaaatatcagcctctctttactcttcaaaaagaggtcatttttggaagctgaaatttgttgtttggaattattctgccaccagtatttatagtggctgtggaatggcatgaaagaatataggcaggtcttaaagtaggctcaaaaattcatcagagaatttcccattgaagagtttttgtgtaaacttctgcttt

SEQ ID NO: 560691 - DNA, 487 bp, Homo sapiens
tcatttaaccgtccccaaccggagttccacatatggaaagggcaatgaatacctcgctcctgaaattgttatgagaattcaatgagctaacggatggaaagtgttgcttccagtgtctgtcacgtgatagtgtttaacacaggctagctgtgtagtcctgacaaaaatatggggagttctgaaggaagacggaagatgtttktgctttgtttatttaagaataaaacaagagggtgttacagagaaaagaaaatgaatgagcctagccttttgctcctttggacaaggcatgaaaatatcagcctctctttactcttcaaaaagaggtcatttttggaagctgaaatttgttgtttggaattattctgccaccagtatttatagtggctgtggaatggcatgaaagaatataggcaggtcttaaagtaggctcaaaaattcatcagagaatttcccattgaagagtttttgtgtaaacttctgcttt

SEQ ID NO: 560692 - DNA, 335 bp, Homo sapiens
ggtcaagtggaaactcaagggcagtctgtcttggaggagagcgagagggacaggcagacaggtcgtggggctccctcttctgggcctgccgaatacaacctgctccgcccatgcctcacttggtccttgcaacccaggactcgtgcttttcctccccctagttaatttagtccattattttttcattctccatagaatattggttttgtracactcaatacagtttaatatataccatttagacaaaagttccaccttacgaaagatcagcaaaaatacatcagcaaagatataactagtgcatttataaaatacatcataacaaggaatccaaa

SEQ ID NO: 560693 - DNA, 443 bp, Homo sapiens
aaaaataaacagtatgttcctgaatgactactgggtcaatgaagacattaagatgggtaaatgatgaaatataagattacgaaattaagaaatttggccaggcatggtggttcacatgtgtaatcccaacactttgggaggctgagacgggcaggttgcttcagtccaggtgttcgagaccagcctgggcaacatggtgaaaccccatctctaccaaaaatacamaaattagccaagtgtggtggcacccatctgtagtcccagctactcaggagactgatgtggaaggaaggcttaagcccaggaagtcaaggctggagtgagccaagatcgtgccactgcacaccagcccaggtgacaaagtgagacccggtctcaaaaaaaaagtaattaagaaattaaatttaaaaaattcttaaaacaaatgaaatggaaacaaaaca

SEQ ID NO: 560694 - DNA, 542 bp, Homo sapiens
aaaaacagtgctatccactatgttgatttcatcaatcatcagctcatgaatcccayaaatatagtgaagtttccatctttttcatagtttcatcatgcactgtagatgctattttagcacttttcagagcattctcaggtaaagatcagtgactttccccttcttatctctgggtgtgtgctattgttgatttattgacattgaactcacgtcaacaacgttgcacttcatgcctgaacaaagtctatctaatgctcatattttctctgtaaggcacatcatagtcttcttgcactttggaacactagacggcacttcagccctactctttagggccattttaaacagaaaattcactgacaaaagacacaaaaaattcaacaatatttctaaatagatggcaaaatgacactcatttaccatatgaaggctgaaatcagaaggttaggctgggcgtgatggctcacacctgtaatctcaacactttggaaggccaaggctggtggaacatctgaggtcaggagttcgagaccagcctggtc

SEQ ID NO: 560695 - DNA, 599 bp, Homo sapiens
ttaatttctagaagaaaatactcaattttaatttaaaaattaaagcagaccaatactctgcaggcaactgtatgggaaacatacatgcatacatatacacatagatatataaatatatatataaatgattattaacattataaggattatacacacatattataaatattcactttttaaaagaaacscaaatgttatgtcaatgcctatttatcaaaacttgattcttaaatcctagattatagaaaattaaaccataatgtaagatttttgagaaagatgcatgatatattttccatttcatactgtgagcgaactaacatatactttctgtttttacagaaataataaggtaaaacttgttcaaagtaatttgtcaaaaacttctgagtaaacacaattatttaaaaagttgtaaagtataaataccaaatatttagggaaataaaaaggtaagcagtcagcacaaaaaataaaaagaaattgtaataagcaaaaaaaaaaaagaaatccaaatataaaatgtgatgcgatcccctataattggaaataaactaaaatcacttccaaataacaacacttttaagtttgggctaaaa

SEQ ID NO: 560696 - DNA, 488 bp, Homo sapiens
taacagaagtgagaagatatgtcwttgtggttttaatttgcatttctctgacaaactatgtttaacattttaaaaatataactgttggccatttgtatttcctctttggaaaaatgtctgttcagttcttctgcccattttaaaatcagattatttgttttctactattaagtttttcacttctttggtttctaaattgtaaatccatagcatacacactcaagccttgtattagtctgttctcatgctgctaataaagacatacctgagactgggtaatttataagaaaagaggtttaattgactcacagttccacatgactggggaggcctcaaaatcatggcagaagagcaagggatatattacatggccgtagatgagagagagcctgtgtagaggaattcctctttataaaaccatcagatactctgagacttattcactatcatgaaaacaattcggagaatacctgcccccatgattcact

SEQ ID NO: 560697 - DNA, 552 bp, Homo sapiens
atgcttgtgtttttgcaggagaagaacaaaccttgtaggtgccctcaagatgtgtacaaccatggactgggttcccccagtatgagacatgctgagaaactgctggagcaccagggttttactaatagatgcttaaaaccaatgctttctgaccgaacttctctctaccctgaatacaagagaccctaataggtaggcaggagtatcatctcccctattcagcatgaagaagttacagaagatggattttcatccttctgcaacccctargattaagggtcctcttgtaaaagggaaagggaagatatgtaggaagcattcaaaccagagcgactccatttggaataagggctaagaaaaatgaagctggatcaccaactgacaatgaagatctgcacagcctgcaattgccttgctcaattaatttaaaaagaggccaccttgttagtaataatgatagctgtggtggtttttacaaaaaagagaaagggggcatgttgggagaaaagctgagtgttgggagagaagctgaggcagggcttgcatgtctgc

SEQ ID NO: 560698 - DNA, 480 bp, Homo sapiens
cgtaactcactggtaagtatgtgtgtatctaaacatacctaaacagaaaaggtatagtaaatacacaatatyataatcttgtggtacttccatcagatgtgtagttaatcatttactgaaacatctttatgtggtgcattactgtatagataatgggttgattataaacacgcataaagaactcatatgacttacaagcaaaaagccttaattgaaattaaactcaatgaaaaaattgacaaagggcttgagcatacattcctcaaaagaagacatataaatggtcaacaggtatatgaaaagttgcttagtctcactcatcatcagggaaatgcaaaccaaaaccataatgaaatatcacttcacgcctgttagaatagctattatcaaaaagagaaaagaaaacaagttttggaggggatgtagagaaaagggaagtggagtttgcacactcttggtgggaatgtaaattggtataac

SEQ ID NO: 560699 - DNA, 480 bp, Homo sapiens
cgtaactcactggtaagtatgtgtgtatctaaacatacctaaacagaaaaggtatagtaaatacacaatatcataatcttgtggtacttccatcagatgtgtagttaatcatttactgaaacatctttatgtggtgcattactgtatagataatgggttgattataaacacgcataaagaactcatatgacttacaagcaaaaagccttaattgaaattaaactcaatgaaaaaattgacaaagggcttgagyatacattcctcaaaagaagacatataaatggtcaacaggtatatgaaaagttgcttagtctcactcatcatcagggaaatgcaaaccaaaaccataatgaaatatcacttcacgcctgttagaatagctattatcaaaaagagaaaagaaaacaagttttggaggggatgtagagaaaagggaagtggagtttgcacactcttggtgggaatgtaaattggtataac

SEQ ID NO: 560700 - DNA, 550 bp, Homo sapiens
aacaagagagcagaacataaaagcagtaaatacaagttagttaaaactcaattttacacacacacagagacacacacacacacacacattcacttacatacatattcacaaaacacacaaacacatatgtgtattttctttttttttggatggagtctcactctgtcatccagtctgcagtgcagtagcgagatctcggatcactgcaacctccgcctcctaggttcaagtgattctcctgcctcagcctcccgagtagctgggattacaggcatgtgccaccatgcccggctaatttttgtatttttagtagagactgggtttcaacatgttggccaggctgatctcaaacccatgacctctggtgacctgcytcagcctcccaaagtggtaggattacaggtgtgagccattgtgccctgcccatatatgtatgtttaacagttatggttaaatatacatatgtttaacagtaaatataccaaaaaatgtatatttaacaataaaacaattatgttaaatatatatatatatatatatatatatatat

SEQ ID NO: 560701 - DNA, 595 bp, Homo sapiens
tgctctttcactttttgttttcctaaaacaactcttcgcgtgataagagggattatattgggaatcatttttatattttaattcatatactttatttaaaattattgcactaaaaaattattatggcagtgagatgcctaaggaagttttcctatgaaggtaggtattrccaatagtaatcagagaagaatatgattatttaaaaagattctagtttggggacccagaagacttacattttactcctttggcaagcaaatgaaaagccctatgctaaaatattcttacctttaaggtatggttcacactgtaaatattaaatttctgaatattctgtttaattctttagattttctatgtttcaggaactaaactgaactggatattttttccatttcagtgctgatttagtactaatttatttatttattgtcatagctgaacattataatcacaaggacttcatttctaaaacaccaaaagcaatggcaacaaaagtcaaaattgacaaatgggatctaattaaactcaagagcttctgcacatcaaaagaaactaccatcagagtgaataggcaacctacagaatgggagaa

SEQ ID NO: 560702 - DNA, 595 bp, Homo sapiens
tgctctttcactttttgttttcctaaaacaactcttcgcgtgataagagggattatattgggaatcatttttatattttaattcatatactttatttaaaattattgcactaaaaaattattatggcagtgagatgcctaaggaagttttcctatgaaggtaggtattaccaatagtaatcagagaagaatatgattatttaaaaagattctrgtttggggacccagaagacttacattttactcctttggcaagcaaatgaaaagccctatgctaaaatattcttacctttaaggtatggttcacactgtaaatattaaatttctgaatattctgtttaattctttagattttctatgtttcaggaactaaactgaactggatattttttccatttcagtgctgatttagtactaatttatttatttattgtcatagctgaacattataatcacaaggacttcatttctaaaacaccaaaagcaatggcaacaaaagtcaaaattgacaaatgggatctaattaaactcaagagcttctgcacatcaaaagaaactaccatcagagtgaataggcaacctacagaatgggagaa

SEQ ID NO: 560703 - DNA, 536 bp, Homo sapiens
gtcaccggtgtgtcccctaccttggcaaaataaactttctgaattaactgagacctgtctcaggttttcggggttcacatatatatcctcacacacatcatcccatcattctgcctgtttgggaactacatatgatctgcagggatggaaktgcttgctattttttgccttgtttccctccctaaatatggaaattcaaccttgctattttgtttagaatgaaagaattttatttatgtccattgatgtgtaatattggatcccatgaatatgccacaatttatttatgtgtttttacttgcagtaaatacttgggttctggattggggttatgtcaaacatgccaccgaagattcttgcacacgttatgctggtgtacatatatggaagtgtctgtgagtacacacgtcacggaggaactgctgtgccataggggatacacaccctcaaccttggcagatgatgctgagctgccttccagagcagcagtgctggtttgcactctcagaagctttgtagagagttccaactgctcc

SEQ ID NO: 560704 - DNA, 468 bp, Homo sapiens
tgcagaaaatgcaattttaaaggaaaaggacccgcctgcccttcttcggcagttcgtttggcccaggccttcgatcagctgaaagtttccgatctagggggatgtccaggctgccggcggagcagagccgataacccccctctcctgcgcgttcccctgagacttggcctccgcaacctgtcccagccgcggagcaaaytgctctgcggcccgcgcgagtgcgccccagggcttcgccgctgccgggcgtcccctccatccacctcgggacccgcgccatcaccgcggcggggtaagaagctcggaggcgccatcccggggctctgcgccgtccgctctccggctcctggccgctcacgcacacagccggtagctggttttcgttagccgctgccctcgcccagaaggcgggtggaaggtcgccagttggacgcacagccaaactcttagcgcactcccgcgcgagat

SEQ ID NO: 560705 - DNA, 490 bp, Homo sapiens
tgcaattttaaaggaaaaggacccgcctgcccttcttcggcagttcgtttggcccaggccttcgatcagctgaaagtttccgatctagggggatgtccaggctgccggcggagcagagccgataacccccctctcctgcgcgttcccctgagacttggcctccgcaacctgtcccagccgcggagcaaactgctctgcggcccgcgcgagtgcgccccarggcttcgccgctgccgggcgtcccctccatccacctcgggacccgcgccatcaccgcggcggggtaagaagctcggaggcgccatcccggggctctgcgccgtccgctctccggctcctggccgctcacgcacacagccggtagctggttttcgttagccgctgccctcgcccagaaggcgggtggaaggtcgccagttggacgcacagccaaactcttagcgcactcccgcgcgagatcccccatcacccggggctgccgtcctcattt

SEQ ID NO: 560706 - DNA, 523 bp, Homo sapiens
attagccaaagctctacaagcttcatgtagtttcattcaaggccatcaaaaaggctagataaagatgaaagtacagaaatagggaagagattaaagaaatgwtcccttgaatgatgtatttatccaagttttctaaggcaaaattccatattaatatttgggtgccagggaaatacatttaattgcagggaatggggtgggggatagttaaatggctgtcttctcattgtgaatattattttgaaacagtggcatagtcaaacatgactgaaattcacagcaaatgtggctcagagagtttcttttactcagctaatgaaagacctccagaatagggaatgtttttcattataagggctacttaaatggtacagtggtctctaggtggctgctaatcttgggctcattctccacaccactacagcaggattaagagttgaggcattctatggaaaacgtagggtaaagggaatatggaagacaggaatgaatcagtggaagttgataaacattttacattttc

SEQ ID NO: 560707 - DNA, 435 bp, Homo sapiens
cacagctgaccctctttcctagtccctgtttccttttattcacctctctttcatcctattccctcttgtttcaatccttacccaaatgtcttttgaaatgccaatagaaataaccatagtgacactttgctcaatagatgtcccagtggttcaaagagcaatcctctttggcctcacccactgggttctatttctgctgagccaagtacatttaattcactcsttcatttgctctgaccctgttatcagtcttattttttctttccttcctctgctcccagatcagaaaaatcaatacatttgttaacaatgtaaaaaaattaaaaatcagtcaaagaaatcagggaactaaagtttcaaataggtaagtgacttgcccatagctgcggaattcagtcttgcatgatcagtcctcaggagatggaagtctggact

SEQ ID NO: 560708 - DNA, 592 bp, Homo sapiens
tggagctgattgataaagcaaaaatacaaatttataattggtgaattgcagatcgatctatatgatgggaatacgttctaataagatttttttctctcatttcctccttgcagatggatccctgaaagcctattatctttaatataaaattcttatttattatcttttaaaggtttggaaggatgagagctttaaggggaaattgagtagagaatgagattaggaaaggatttcatgcagagaaagaaagatatataatgcaaacyatgctatggtctttgcatatgcaaacaaagcatctgacctactttcaggaggccacactcttttgagcttttccagtaattcattctctcttcccaccaactctaccctgttagaatgcaaatagttaggactgtaatgtggggcatggtatagaatagatgttgacaaactactaaggcctgtgggccaaatctagctcacagtctgtttttgtaaataaagtttcattagcacatacctatgcttaattcaagtgcttattttctacagcttcttacatgccacaaaggcggatttgagtagttgcaatagagacaatgaacct

SEQ ID NO: 560709 - DNA, 339 bp, Homo sapiens
  misc_feature 41: n = A,T,C or G
atatattgaatatatatattcaataaatatatatatatatntgaatatatatattcaataaatatatatatatatatatatatatatatttgaagttcttttaagtaatgatatattagggttgagagtcctaatctgaatttgcaattgaactctaacttaccttatctttgtattacacaraaacttacattagactacacagagagattgacaaaatacaaagggctagccaacttcctaattcctggaaatatttaaaatatacagaatttggggagcaaataagggatatgatgaactagttgcattggtcctcttatagctagacaagaaata

SEQ ID NO: 560710 - DNA, 607 bp, Homo sapiens
ttcaaacccatgtggttcatctaattttaatgctgaaattstgtgatcattgacagaatattcctgatagaaaacagattatctatcagccagctcctctagactttactaatgtagttacatgaaaaagtgtctctacatcatgctgattatataatttttataaaacatctttataattaaaaaataaaatatctacataaacttatttttattcaagccaaaaacaaaataccttaaaatggataccatatttgcaattttatctatcatttgaagtttcattgtataactaaaagacacactactcaaaattgatgtagtcttgcacattgttataggtccctgtcctgtcttagattttcttgtactttgccaagagaaaatccaataaatgtaattcctacaatttgcaaacacatcatactattaaatttaactgctaagagtttttcttatggttgggatttagataggatagaaaagatcttttatcttgggttcacacatgaaaaatcagacaaattaaaacttaccccatagggctaatgaagagtggtgaatttaacaatgtcttgatgaactgaatcccagaaagaaacaagcc

SEQ ID NO: 560711 - DNA, 607 bp, Homo sapiens
ttcaaacccatgtggttcatctaattttaatgctgaaattctgtgatcattgacagaatattcctgatagaaaacagattatctatcagccagctcctctagactttactaatgtagttacatgaaaaagtgtctctacatcatgctgattatataatttttataaaacatctttataattaaaaaataaaatatctacataaacttatttttattcaagccaaaaacaaaataccttaaaatggataccatatttgcaattttatctatcatttgaagtttcattgtataactaaaagacacactactcaaaattgatgtagtcttgcacattgttataggtccctgtcctgtcttagattttcttgtactttgccaagagaaaatccaataaatgtaattcctacaatttgcaaacacatcatactattaaatttaactgctaagagtttttcttatggttgggatttagataggatagaaaagatcttttatcttgggttcacacatgaaaaatcagacaaattaaaacttaccccatagggctaaygaagagtggtgaatttaacaatgtcttgatgaactgaatcccagaaagaaacaagcc

SEQ ID NO: 560712 - DNA, 246 bp, Homo sapiens
aaaacaattactttcctatataccagcaacraacaagaacaacctgaattttaaaatacaataccaattacgttagcatgctccaaaatgaaatgtttaggtataattctaacaaaatgtgtacaagatttttacaggaaatttacaaactgtgttgaacaaaatcagtgaagaacttagtatatttggaaatatttgctgttcatagataggagacaaatattttaaagatgtgagttcttccca

SEQ ID NO: 560713 - DNA, 554 bp, Homo sapiens
tgtattctccgcaaaattcatatgttcaaatcctaaccctcaagtttatagtagtaggaggtatgggggtaaaactgtcatgaatgagactagtgcccttataaaagagatccaagagagattccccatcacttctggtatgtgagtttacagtgaaaaggtggccacctatgagaaagtgggccctcattagacaccaaatctgctgatgccttcatcttggacattacccccctctccaaaattgtaagaaacaaatttctgtcatatatgagctacccaccagcctaaaaagactaagagagttaacatttgttttttcatgggatacctgggtttgtaccttattctctaaatacacttgttagtaattttctgttgccataacattattccatagactagataatttatatataaaatactttcatttaactcacagttctggagcctgggacatctacragcatggcaccggcatctggtaggtgccttcttgctgaattgtaaaatggtggagggcatcacatcaccagagggcaagagtgtgccag

SEQ ID NO: 560714 - DNA, 570 bp, Homo sapiens
agttttgttcccttgctggcaagcaattgtgattctttgaagaagaagagacattctgtttttttgaattttcagcctttttgtgctggtttttcctcatctttgtggatttatctacctttggtttttgatgttggtaactttcaaatggggtttttgtgtggatgccctttttgttgatgttgatgctattcttttctgtttgttagttttccttctaatagttaggcctctctgctgcaggtctgctggagtttgctggagttccactccagaccctgtttgcctgggtatcaccagyggcagctgcagaacagcaaagattgctgcctcttccttcctctggaagcttcatcccagagggccacctgccagatgccagctagcactctcttgtatgaggtgtctgttgacccctgctgggtggtgtctcccagtcaggaggcatggcggtcagggacccactgtaggaggcagtctgtcccttaacagagctcacttactgtgctgggagatctgctgctctcctcggagccagcaggcaggaaagtttaagtctgctgaagctgc

SEQ ID NO: 560715 - DNA, 563 bp, Homo sapiens
aaaacagtctcattcatgatagytatttaaaaaaaaaaaaattccaggaataaatttaaccaagtaagttagaaaaattataagaaaaattatgttaataatgcaagaaattgaagaggacacaaacaaataaaaagacatcctgtgcttatagattggcagaactagtatttaaaatgaagatactacccaatgcaatctacagattaaatgcaatctctatcaagatacaagtaacattcttcacagaaatagaaagaaagttattaaaatttgtatagaaccacaaaagacctcacatagccaatacaatcctcagcaaattgaacaaagctggaggtatcacactaacagacatcaaaatatactacaaagctacaataaccagaatagcatgggactgtcataaaaacagacatataaccaatgaaacagaatagaggatccaaaaattgatccaaatattgatagccaattgatttttgacaaagttgccaagaacactcattggggaaagcacagtctcttcaataaatggtgccagggaaactagatatctatat

SEQ ID NO: 560716 - DNA, 563 bp, Homo sapiens
aaaacagtctcattcatgatagctatttaaaaaaaaaaaaattccaggaataaatttaaccaagtaagttwgaaaaattataagaaaaattatgttaataatgcaagaaattgaagaggacacaaacaaataaaaagacatcctgtgcttatagattggcagaactagtatttaaaatgaagatactacccaatgcaatctacagattaaatgcaatctctatcaagatacaagtaacattcttcacagaaatagaaagaaagttattaaaatttgtatagaaccacaaaagacctcacatagccaatacaatcctcagcaaattgaacaaagctggaggtatcacactaacagacatcaaaatatactacaaagctacaataaccagaatagcatgggactgtcataaaaacagacatataaccaatgaaacagaatagaggatccaaaaattgatccaaatattgatagccaattgatttttgacaaagttgccaagaacactcattggggaaagcacagtctcttcaataaatggtgccagggaaactagatatctatat

SEQ ID NO: 560717 - DNA, 643 bp, Homo sapiens
tatctatatgcagaacaatgaaactacactcyctcctcactctgtacacaaataaactcaaacatagatcaatgacctaaatgtaattctgcaaaagataatatacaaggaactcaaatgtctcaacagcaaaaaaaaaaaaaaaaaacaaacaaaaaaacagtctgattaaaaaatggacaaataatctgaacagatgtttcccaggggaagatgtatgaaaggctagaaaatatatgaaaagattctcagcatcactaatcatcaggaagttgcaagtcaggagcacaatgaggtatgatctcactcctgttaggttggctattattaaaaagacaaaaaataacgagttctgttgaggatgcagagaaaatgaaactgttatacactattggtgggaatgtggagtggcgtagtgctaaggagagcattttgtaggttgctcagaaaactacaaataggtcaagcgcagtggctcacacttgtaatttctgcactttgggaggctgaagcaggtgaatcacttgaggtcaggagtttgggaccagcctgggcaacatggagaaaccccatctctactaaaaatacaaaaattagcttggcatggtggtgggcacctgtaatcccaacaacttgggaggct

SEQ ID NO: 560718 - DNA, 643 bp, Homo sapiens
tatctatatgcagaacaatgaaactacactctctcctcactctrtacacaaataaactcaaacatagatcaatgacctaaatgtaattctgcaaaagataatatacaaggaactcaaatgtctcaacagcaaaaaaaaaaaaaaaaaacaaacaaaaaaacagtctgattaaaaaatggacaaataatctgaacagatgtttcccaggggaagatgtatgaaaggctagaaaatatatgaaaagattctcagcatcactaatcatcaggaagttgcaagtcaggagcacaatgaggtatgatctcactcctgttaggttggctattattaaaaagacaaaaaataacgagttctgttgaggatgcagagaaaatgaaactgttatacactattggtgggaatgtggagtggcgtagtgctaaggagagcattttgtaggttgctcagaaaactacaaataggtcaagcgcagtggctcacacttgtaatttctgcactttgggaggctgaagcaggtgaatcacttgaggtcaggagtttgggaccagcctgggcaacatggagaaaccccatctctactaaaaatacaaaaattagcttggcatggtggtgggcacctgtaatcccaacaacttgggaggct

SEQ ID NO: 560719 - DNA, 643 bp, Homo sapiens
tatctatatgcagaacaatgaaactacactctctcctcactctgtacacaaataaactcaaacatagatcaaygacctaaatgtaattctgcaaaagataatatacaaggaactcaaatgtctcaacagcaaaaaaaaaaaaaaaaaacaaacaaaaaaacagtctgattaaaaaatggacaaataatctgaacagatgtttcccaggggaagatgtatgaaaggctagaaaatatatgaaaagattctcagcatcactaatcatcaggaagttgcaagtcaggagcacaatgaggtatgatctcactcctgttaggttggctattattaaaaagacaaaaaataacgagttctgttgaggatgcagagaaaatgaaactgttatacactattggtgggaatgtggagtggcgtagtgctaaggagagcattttgtaggttgctcagaaaactacaaataggtcaagcgcagtggctcacacttgtaatttctgcactttgggaggctgaagcaggtgaatcacttgaggtcaggagtttgggaccagcctgggcaacatggagaaaccccatctctactaaaaatacaaaaattagcttggcatggtggtgggcacctgtaatcccaacaacttgggaggct

SEQ ID NO: 560720 - DNA, 643 bp, Homo sapiens
tatctatatgcagaacaatgaaactacactctctcctcactctgtacacaaataaactcaaacatagatcaatgacctaaatgtaattctgcaaaagataatatacaaggaactcaaatgtctcaacagcaaaaaaaaaaaaaaaaaacaaacaaaaaaacagtctgattaaaaaatggacaaataatctgaacagatgtttcccaggggaagatgtatgaaaggctagaaaatatatgaaaagattctcagcatcactaatcatcaggaagttgcaagtcaggagcacaatgaggtatgatctcactcctgttaggttggctattattaaaaagacaaaaaataacgagttcygttgaggatgcagagaaaatgaaactgttatacactattggtgggaatgtggagtggcgtagtgctaaggagagcattttgtaggttgctcagaaaactacaaataggtcaagcgcagtggctcacacttgtaatttctgcactttgggaggctgaagcaggtgaatcacttgaggtcaggagtttgggaccagcctgggcaacatggagaaaccccatctctactaaaaatacaaaaattagcttggcatggtggtgggcacctgtaatcccaacaacttgggaggct

SEQ ID NO: 560721 - DNA, 540 bp, Homo sapiens
tggattagctttttgatatgctgctggatttgatttgctaatattttgttgagaatytttgcatctatgtttatcaagaatattggccttaagttttcatttttgtgtgtgtctctgtccggtattgatattgagatgatgctggcctcatagaatgagttagggaggggtccctcctcattttcttaagaatagtttcattaggaatggtaccagattttctttgtatacctggtataacttgactgtgaatccatctggttctaggcctttttgggttgttagtacatttattactattttaatttcagagctttatattggcctattcagggattcagtgttttctgtttcagattttgaagggtgtatgtgtccaggagtttacctgtttcttctagattttctagtttttgtgcatagaggtgttcatggtagtctctgatagttattggtatttctgtggggtcactggtaatggcttcattctttctaattgtgtttatttttatcttctctcttttcttctttattagtcta

SEQ ID NO: 560722 - DNA, 540 bp, Homo sapiens
tggattagctttttgatatgctgctggatttgatttgctaatattttgttgagaatctttgcatctatgtttatcaagaatattggccttaagttttcatttttgtgtgtgtctctgtccggtattgatattgagatgatgctggcctcatagaatgagttagggaggggtccctcctcattttcttaagaatagtttcattaggaatggtaccagmttttctttgtatacctggtataacttgactgtgaatccatctggttctaggcctttttgggttgttagtacatttattactattttaatttcagagctttatattggcctattcagggattcagtgttttctgtttcagattttgaagggtgtatgtgtccaggagtttacctgtttcttctagattttctagtttttgtgcatagaggtgttcatggtagtctctgatagttattggtatttctgtggggtcactggtaatggcttcattctttctaattgtgtttatttttatcttctctcttttcttctttattagtcta

SEQ ID NO: 560723 - DNA, 540 bp, Homo sapiens
tggattagctttttgatatgctgctggatttgatttgctaatattttgttgagaatctttgcatctatgtttatcaagaatattggccttaagttttcatttttgtgtgtgtctctgtccggtattgatattgagatgatgctggcctcatagaatgagttagggaggggtccctcctcattttcttaagaatagtttcattaggaatggtaccagattttctttgtatacctggtataacttgactgtgaatccatctggttctaggcctttttgggttgttagtacatttattactattttaatttcagagctttatattggcctattcagggattcagtgttttctgtttcagattttgaagggtgtatgtgtccaggagtttacctgtttcttctagattttctagtttttgtgmatagaggtgttcatggtagtctctgatagttattggtatttctgtggggtcactggtaatggcttcattctttctaattgtgtttatttttatcttctctcttttcttctttattagtcta

SEQ ID NO: 560724 - DNA, 600 bp, Homo sapiens
tgtagctattaatttcttgggattcttgtgcagattggctggatattggagaagatacatcaggaataaggagtttttgttctttttcctggacctatatcaggtatcagaaccttgtaactatcttgcactctgctggtatcctgtgggactgcttatcttgcaaaagagttaggtgctgacacagaagggtgctagggatggagcctgcagggcttcaaacaagggatccagtcagtattgccatctaacctaacttattctgccccattatgaaattcaagatgtatcaatattaaaataaattttcattgtttatatttcgtgtgtwtaatgaaaaaaatacatattcccccaaataaatgtgagctgtgagctttatgactacatatataaacaacactcaaaacaatattgttgccaatattagctagtgtaaactgaaaagtatctgagacagaacctaacacatatttacagaatatcctatcaaagagctacagaatatgaattcttctcatcagcacatagaacattctttgagatacatcatatgattggccacaaaacaagtctcaataaattttaaaaaattaaaat

SEQ ID NO: 560725 - DNA, 600 bp, Homo sapiens
tgtagctattaatttcttgggattcttgtgcagattggctggatattggagaagatacatcaggaataaggagtttttgttctttttcctggacctatatcaggtatcagaaccttgtaactatcttgcactctgctggtatcctgtgggactgcttatcttgcaaaagagttaggtgctgacacagaagggtgctagggatggagcctgcagggcttcaaacaagggatccagtcagtattgccatctaacctaacttattctgccccattatgaaattcaagatgtatcaatattaaaataaattttcattgtttatatttcgtgtgtttaatgaaaaaaatacatattcccccaaataaatgtgagctgtgagctttatgactacatatataaacaacactcaaaacaatattgttgccaatattagctagtgtaaactgaaaagtatctgagacagaacctaacacatatttacagaatatcctaycaaagagctacagaatatgaattcttctcatcagcacatagaacattctttgagatacatcatatgattggccacaaaacaagtctcaataaattttaaaaaattaaaat

SEQ ID NO: 560726 - DNA, 582 bp, Homo sapiens
atcaacactatccagaaaaacacgatttcaccaaataaataaaacaccagcaaaaacacaaatcctgaaaaaggcacaaatacgtgagctttcagacagagaattcaaamtatctatgttgagaaaactcaaaaatactcaatataacacacagaaggaatttaaaattctataagataaatttaacaaaaagattgaaataattaaaaaaatcaagcagaggttctgcagtgaaatgttgggattcactcaggatggtggcagaaatattaaagggaaatattaaggaaagttgcaggaatagtcacaaaccttttgtttctttgttgattttatgtttggaaaggctgaaaggttacctatcttgtaataattgaataggctgaaggcagctggttcttaccttagagcattaggtcatagggtaaatactagggacgatagaggcttccccagttatgtctatttatcctacctgcattaactaacctttgagccaaatggccctggggcgggggaggtcgactagggatattgccccctaatggtatttaccttcaacagaggtaccagagctttaat

SEQ ID NO: 560727 - DNA, 642 bp, Homo sapiens
tggagagggtagtggggggctgtgggggaggtggagacagttaatggatccaaaaagtatagttagaatgaataagagagattatttggtcgcacaacagagtgactttagtcaataataagttaattgtacattttaaaataagtaaaatagtataattggattatttgtaacagaaaggataaatgcttgcrtaaatggatagcttattctccatgatgtgaatcttatgccttgcatacttgcatgaaaacatctcatgtacttcacaattatatacatctactgtgttcccacaaaaattaaaaattaaaacattaaaaacatgaaacctagagaaagactcttacaacattcattattgattgcttcagggaaagacatcttttaagaaactttcatctcagcattgttcttcagttactcaaggttgaattgagcttttatcttgcaaaaatgaggagacaactttctgatctagctgtataatttatttaaaatctcaagaatcatacacatatcaaaacattgcactgatgttgatctattatgcaaaaaatgcattgtaccccataaatatatacaattatttgtcaataaaaacaaaattttaaaaatcttagaaaccaacttataattgca

SEQ ID NO: 560728 - DNA, 642 bp, Homo sapiens
tggagagggtagtggggggctgtgggggaggtggagacagttaatggatccaaaaagtatagttagaatgaataagagagattatttggtcgcacaacagagtgactttagtcaataataagttaattgtacattttaaaataagtaaaatagtataattggattatttgtaacagaaaggataaatgcttgcgtaaatggatagcttattctccatgatgtgaatcttatgccttgcatacttgcatgaaaacatctcatgtacttcacaattatatacatctactgtgttcccacaaaaattaaaaattaaaacattaaaaacatgaaacctagagaaagactcttacaayattcattattgattgcttcagggaaagacatcttttaagaaactttcatctcagcattgttcttcagttactcaaggttgaattgagcttttatcttgcaaaaatgaggagacaactttctgatctagctgtataatttatttaaaatctcaagaatcatacacatatcaaaacattgcactgatgttgatctattatgcaaaaaatgcattgtaccccataaatatatacaattatttgtcaataaaaacaaaattttaaaaatcttagaaaccaacttataattgca

SEQ ID NO: 560729 - DNA, 642 bp, Homo sapiens
tggagagggtagtggggggctgtgggggaggtggagacagttaatggatccaaaaagtatagttagaatgaataagagagattatttggtcgcacaacagagtgactttagtcaataataagttaattgtacattttaaaataagtaaaatagtataattggattatttgtaacagaaaggataaatgcttgcgtaaatggatagcttattctccatgatgtgaatcttatgccttgcatacttgcatgaaaacatctcatgtacttcacaattatatacatctactgtgttcccacaaaaattaaaaattaaaacattaaaaacatgaaacctagagaaagactcttacaacattcattattgattgcttcagggaaagacatcttttaagaaactttcatctcagcattgttcttcagttactcaaggttgaattgagcttttatcttgcaaaaatgaggagacaactttctgrtctagctgtataatttatttaaaatctcaagaatcatacacatatcaaaacattgcactgatgttgatctattatgcaaaaaatgcattgtaccccataaatatatacaattatttgtcaataaaaacaaaattttaaaaatcttagaaaccaacttataattgca

SEQ ID NO: 560730 - DNA, 595 bp, Homo sapiens
gctgcaaatgacatgattttattcttttatatggctatgcagtattccatkgtgtatatataccacattttctttatcatccaccattaatggacatctagattgattccgttctttggtattgtgaatagcaaagcaattaacacatgtatgcatgtgacttttgatataattatctattttcctttgagtacatatccagtaatgggattgctgggtcaaacaggagctctgcttcaagttctttgaggaatcgccacactgatttcccaatgatttaactaatttatacactctcaccaacagtgcataagtgtttcctttttctcttcagcctctcgaggatcttacttgttattttaatttctcaaaaatagccatttggagtggtgtgagatggtatatcgttgtggatttgatttgcatttctctaatgatcagttatgtggaacatttttatatgtttgttggctgtttatgtcttttttgagaaatgtctgttcatatcctttgcccatttaatggtgttttttttgcttgttaatttgtttaaattttgtatagattcttgatattagtctttcgtcagatgcat

SEQ ID NO: 560731 - DNA, 595 bp, Homo sapiens
gctgcaaatgacatgattttattcttttatatggctatgcagtattccatggtgtatatataccacattttctttatcatccaccattaatggacatctagattgattccrttctttggtattgtgaatagcaaagcaattaacacatgtatgcatgtgacttttgatataattatctattttcctttgagtacatatccagtaatgggattgctgggtcaaacaggagctctgcttcaagttctttgaggaatcgccacactgatttcccaatgatttaactaatttatacactctcaccaacagtgcataagtgtttcctttttctcttcagcctctcgaggatcttacttgttattttaatttctcaaaaatagccatttggagtggtgtgagatggtatatcgttgtggatttgatttgcatttctctaatgatcagttatgtggaacatttttatatgtttgttggctgtttatgtcttttttgagaaatgtctgttcatatcctttgcccatttaatggtgttttttttgcttgttaatttgtttaaattttgtatagattcttgatattagtctttcgtcagatgcat

SEQ ID NO: 560732 - DNA, 595 bp, Homo sapiens
gctgcaaatgacatgattttattcttttatatggctatgcagtattccatggtgtatatataccacattttctttatcatccaccattaatggacatctagattgattccgttctttggtattgtgaatagcaaagcaattaacacatgtatgcatgtgacttttgatataattatctattttcctttgagtacatatccagtaatgggattgctgggtcaaacaggagctctgcttyaagttctttgaggaatcgccacactgatttcccaatgatttaactaatttatacactctcaccaacagtgcataagtgtttcctttttctcttcagcctctcgaggatcttacttgttattttaatttctcaaaaatagccatttggagtggtgtgagatggtatatcgttgtggatttgatttgcatttctctaatgatcagttatgtggaacatttttatatgtttgttggctgtttatgtcttttttgagaaatgtctgttcatatcctttgcccatttaatggtgttttttttgcttgttaatttgtttaaattttgtatagattcttgatattagtctttcgtcagatgcat

SEQ ID NO: 560733 - DNA, 595 bp, Homo sapiens
gctgcaaatgacatgattttattcttttatatggctatgcagtattccatggtgtatatataccacattttctttatcatccaccattaatggacatctagattgattccgttctttggtattgtgaatagcaaagcaattaacacatgtatgcatgtgacttttgatataattatctattttcctttgagtacatatccagtaatgggattgctgggtcaaacaggagctctgcttcaagttctttgaggaatcgccacactgatttcccaatgatttaactaatttatacactctcaccaacagtgcataagtgtttcctttttctcttcagcctctcgaggatcttacttgttattttaatttctcaaaaatagccatttggagtggtgtgagatggtatatcrttgtggatttgatttgcatttctctaatgatcagttatgtggaacatttttatatgtttgttggctgtttatgtcttttttgagaaatgtctgttcatatcctttgcccatttaatggtgttttttttgcttgttaatttgtttaaattttgtatagattcttgatattagtctttcgtcagatgcat

SEQ ID NO: 560734 - DNA, 581 bp, Homo sapiens
ttacaaggtgggggaagtagtgggggatgcctgcagctgcaagaagtttcctggaaacaggcacagaaactgccccctttcctttcagcacatgcagataagcagctcaaactaaggacctgcctgcatgatcaaagaatagggtgggggctgctagaaacactgctctatgcagatggcccacctggtcctaatgggttcttcagtccctataaagataagatgcccctacctcactatttatttatacaaatcctgatatttttactacaacctgcaaacttgtccaggaccyctgtctgtgacagagttgttctttctttttgcccattaaactcctgctccactctcactctgtgtgctgcatccatgtccatgatttcctcagctgtgagagcaagaaccttggtacttacccaaaacaacaaggctgttttagtaccattccttctgaaactattctaaacaattgaaaagaatggacttctctgaaactcattttatgaggccagcatcatcctgataacaaagcctggcagagatataacaaataaagagaactttaggccaatatccctgat

SEQ ID NO: 560735 - DNA, 581 bp, Homo sapiens
ttacaaggtgggggaagtagtgggggatgcctgcagctgcaagaagtttcctggaaacaggcacagaaactgccccctttcctttcagcacatgcagataagcagctcaaactaaggacctgcctgcatgatcaaagaatagggtgggggctgctagaaacactgctctatgcagatggcccacctggtcctaatgggttcttcagtccctataaagataagatgcccctacctcactatttatttatacaaatcctgatatttttactacaacctgcaaacttgtccaggacccctgtctgtgacagagttgttctttctttttgcccattaaactcctgctccactctcactctgtgtgctgsatccatgtccatgatttcctcagctgtgagagcaagaaccttggtacttacccaaaacaacaaggctgttttagtaccattccttctgaaactattctaaacaattgaaaagaatggacttctctgaaactcattttatgaggccagcatcatcctgataacaaagcctggcagagatataacaaataaagagaactttaggccaatatccctgat

SEQ ID NO: 560736 - DNA, 618 bp, Homo sapiens
caaattaatgcttttataatttcttatgcctgtctttactgcaatctctaaacataaattgkgaagatttcatggacacttatcccttccccaatcaatacccttgtgatttcctaggcctgtctttactttaatctcttaatcctgtcatctcaaaagccgaggaggatgtatgtcacctcaggaccctgtgataattgcattaactgaacaaattgtagagcatgtgtgtttgaacaatatgaaatctgggcacctttaaaaaagaacaggataacagcaatatttaggaaacaagagagataaccttaaactctgaccgccagtgagccgagtagaacagagccatatttctcttctttcaaaagcaaatgggagaaatatcgctgaattctttttctcagcaaggaacatccctgggaaagagaatacatgcctgggggtaggtctatagacggccccctgggtgtggccatcttctatggtctgtagactgtaggggtgaaatagaccccagtctcccatagtgctcccaggcttattaggaagaggaaattcccgcctaataaattttggtcagaccggttgctctcaaaaccctgtctcctgatacagatg

SEQ ID NO: 560737 - DNA, 618 bp, Homo sapiens
caaattaatgcttttataatttcttatgcctgtctttactgcaatctctaaacataaattgggaagatttcatggacacttatcccttccccaatcaatacccttgtgatttcctaggcctgtctttactttaatctcttaatcctgtcatctcraaagccgaggaggatgtatgtcacctcaggaccctgtgataattgcattaactgaacaaattgtagagcatgtgtgtttgaacaatatgaaatctgggcacctttaaaaaagaacaggataacagcaatatttaggaaacaagagagataaccttaaactctgaccgccagtgagccgagtagaacagagccatatttctcttctttcaaaagcaaatgggagaaatatcgctgaattctttttctcagcaaggaacatccctgggaaagagaatacatgcctgggggtaggtctatagacggccccctgggtgtggccatcttctatggtctgtagactgtaggggtgaaatagaccccagtctcccatagtgctcccaggcttattaggaagaggaaattcccgcctaataaattttggtcagaccggttgctctcaaaaccctgtctcctgatacagatg

SEQ ID NO: 560738 - DNA, 618 bp, Homo sapiens
caaattaatgcttttataatttcttatgcctgtctttactgcaatctctaaacataaattgggaagatttcatggacacttatcccttccccaatcaatacccttgtgatttcctaggcctgtctttactttaatctcttaatcctgtcatctcaaaagccgaggaggatgtatgtcacctcaggaccctgtgataattgcattaactgaacaaattgtagagcatgtgtgtttgaacaatatgaaatctgggcacctttaaaaaagaacaggataacagcaatatttaggaaacaagagagataaccttaaactctgaccgccagtgagccgagyagaacagagccatatttctcttctttcaaaagcaaatgggagaaatatcgctgaattctttttctcagcaaggaacatccctgggaaagagaatacatgcctgggggtaggtctatagacggccccctgggtgtggccatcttctatggtctgtagactgtaggggtgaaatagaccccagtctcccatagtgctcccaggcttattaggaagaggaaattcccgcctaataaattttggtcagaccggttgctctcaaaaccctgtctcctgatacagatg

SEQ ID NO: 560739 - DNA, 616 bp, Homo sapiens
acatttcctctgaatatcttcctctaccctagaatgactcaagccyatttctagttttacgtattagttcaggctgctgtcgatgatggaaaaaaaaccaaccaaacaaaatggaacaaaactggcttttgttttgcagctttttcgcccacagcaagaaattcaggacagatttatgacaaattttaaaatgctggcaatgggaaaaataatatagagatctgggttgctgatgaatttctatgtctagattattaaagggaaaagaagctgaaggtctgactgatttgctgacaaattcttaatttttaaaaatgaacttaaggagtacaaggctgttttgtcacgtggatattttgctcagtggtgaagtggggacttttattgtaaccatcatcacctggatagtatacattgtactcattaatttctcatccttcatcccgctcctatgctctcacccttctgaatctccaatgtcaattattctactctctatgtccatgtgtacacactatttagcttccacttataagtgataatgtgtggtgcttgattttgcatttctgagttgtttcacttaagatagtggcctccagttccatccatgttgcta

SEQ ID NO: 560740 - DNA, 616 bp, Homo sapiens
acatttcctctgaatatcttcctctaccctagaatgactcaagcctatttctagttttacgtattagttcaggctgctgtcgatgatggaaaaaaaaccaaccaaacaaaatggaacaaaactggcttttgttttgcagctttttcgccyacagcaagaaattcaggacagatttatgacaaattttaaaatgctggcaatgggaaaaataatatagagatctgggttgctgatgaatttctatgtctagattattaaagggaaaagaagctgaaggtctgactgatttgctgacaaattcttaatttttaaaaatgaacttaaggagtacaaggctgttttgtcacgtggatattttgctcagtggtgaagtggggacttttattgtaaccatcatcacctggatagtatacattgtactcattaatttctcatccttcatcccgctcctatgctctcacccttctgaatctccaatgtcaattattctactctctatgtccatgtgtacacactatttagcttccacttataagtgataatgtgtggtgcttgattttgcatttctgagttgtttcacttaagatagtggcctccagttccatccatgttgcta

SEQ ID NO: 560741 - DNA, 616 bp, Homo sapiens
acatttcctctgaatatcttcctctaccctagaatgactcaagcctatttctagttttacgtattagttcaggctgctgtcgatgatggaaaaaaaaccaaccaaacaaaatggaacaaaactggcttttgttttgcagctttttcgcccacagcaagaaattcaggacagatttatgacaaattttaaaatgctggcaatgggaaaaataatatagagatctgggttgctgatgaatttctatgtctagattatyaaagggaaaagaagctgaaggtctgactgatttgctgacaaattcttaatttttaaaaatgaacttaaggagtacaaggctgttttgtcacgtggatattttgctcagtggtgaagtggggacttttattgtaaccatcatcacctggatagtatacattgtactcattaatttctcatccttcatcccgctcctatgctctcacccttctgaatctccaatgtcaattattctactctctatgtccatgtgtacacactatttagcttccacttataagtgataatgtgtggtgcttgattttgcatttctgagttgtttcacttaagatagtggcctccagttccatccatgttgcta

SEQ ID NO: 560742 - DNA, 620 bp, Homo sapiens
ggtatgtattatttgaagggactctgattaattaaaaatctatattgtraagtctagggcaacaactcaaaccactaaaaattttaaataatgcataaagaatgagctgaggatagagacagaaatggaataatgaacaatatactaaatctaaatgaagggagaaaaaccttaaaaagaaacaacaaatagatgaggaaaaatggaagagagtcctcaaaatagtacattttaatctaatcatgtcattaatacattaaacataattggtgtaaacatacataaaagaaaaagattgacagattggataaaaaagcgaggcccaactatgcatggtccacaaaaaagccactttaaatataaataggctaaaaatgaaaagattctaaaaatttattatgctaccacttgtcgaaagaaagttggaatagctataacagtatcaaaatagacttcagaaaagtgactagactattaccagaaataaagagcaacattacatgatgataaaagggtcatttctccaagaatccataataatcctaaatgtatatgcatctaaaaagagagctttaaaatatataaagcaaaaacaaataatagtataaggagaaataaac

SEQ ID NO: 560743 - DNA, 456 bp, Homo sapiens
caaaaacataactaaacatgtccaaagtatatctaacttataaataagaacacaaaatcaagaaatgtctcagaagaaattctgtggattacttatacttgcagattcacagtgatatcaaatgataaaaacaattatggtcgtgctataatttagatttggggatatagagggcccagctatgaggctctaggaatgctcagccaagaaaaagagaggtctcaataataaaataagtgtgatcagatttaaggayacaatttcaaacaacaaaaaagtaaaaattaacagactaggctgggcttggtggctcatgcttgtaatcccagcactttggaggccaaggtgggtgggtcatgaggtcaggagttcgagaccagcctgaccaacatggtgaaaccccatctctactaaaaataccaaaaaaaaaaaaaaaaaaagctgggtgtggtggct

SEQ ID NO: 560744 - DNA, 547 bp, Homo sapiens
ccataacaaatcttcttgcataaattcatgctctttctttgcaactgcctttcccttctcatctctttttttcccagagaaagagaaagaccctatctaaaatgctttctgcttcagagagcatcagaagggaagcttgcccaggctccctggttctttcttttgggctgtgggtcaaatgctgtccagtgctgacctggacaagttgaggataccagaaggaatccaaggcgccactagtgctgtgggtggaccctggtcatccccctgcctctggatattagaactcagtttagctacattcgagatgtaattcaaggggtcactggggaatggttatatgtgatgcccaagtgtgtggcttcatggtcccccaaagaccaggtgccagggcaacccttycccacctgctccagcactatccaccccatcccagtactgtcaattatatggggtcaatggtgtggcaggaggatggttcttggtattaaaacggatccatttccttagggttgaaaacgtagaggatccaagcagatcctagcct

SEQ ID NO: 560745 - DNA, 595 bp, Homo sapiens
gcttaaccattcatgtcacaacatttttactgagcaactattatataccagacatagtatgtaagagttgggaatgtaacactgataaaagaaagacacagaattgtccctgtagagcctatgtattgyaaaaggtgaatctgtcaggtgaacagaaaaacaaaatatttacaaatttagatagatgttgggtaactgttaaaggaagcaagtatatattcataaagaaaacatatcactaaacactaataaagcaaataagacaaattctactatattattatttacatctaaagataaggtaataaggttcagagctaataaacagctaaccaaggtcagagaactagcaaatgctgtaacaggacacgatcacaggtcttccgacctcatattctttgctctttctactgcctttatagtttttttttacactaattattatacaaaatgactttcctctgtatttggatacaacatacacagttctttttttttttctgtttttgagacctcaacatataaatgtctcttccccgtaacatgtttttgtactttctagcaataaagacaaaacagattataagcccacaca

SEQ ID NO: 560746 - DNA, 531 bp, Homo sapiens
aatggccccaaagtatatttgatagcatagggttttgcaatttgcaaaaaatagttacatagaccactaggcttaataactagaaaaaaatagtacattagaaactactgagttgatgcaaaagcaattgtcatttctattattacttttaatttcattttaattacatttcaccattacttttagtgcaaaaatcacaattacttttgcaccaagctaatactacttgcggktctcttcttaaactcttgctgtgaagcattacttccaaaaatatattttaatgccttcttcaaataatattgtcttatataaataatggaggattatttagtgatttgacaataggaaaaagcgtaccttaaactgaggattaatatcacaggtttgctttttttttttgaatgcatcggttggagaaaactattttccaaattattgtagtttatgtctgtgtgtatatgcacacagtgtaacatgaattactgatgttccttagtcttggcaaaacatactgcatatatatagatc

SEQ ID NO: 560747 - DNA, 562 bp, Homo sapiens
ctggccagaatttaatcatatgaccattccgaaacttattactagaataccattggatcaacaaggccaatccctttgtcagttctccaaatggatactaggaagtcaaatattcactgaaagtgcatacgcatgttagagaatagttttaagtgaaaccacatttgtaaaataccaagtatagtggctggcataaaataagagttcaacacacagtattttgctaggatatgggaatagcaatrgtggtggaatttattcactatcccttgaactgtattttccatctaatttctgggttgttatttgcaaaccttcaattgtcttttaattgtagcatttctttccttgcccatacattgttagaacaatctagtgatacgtttcttttccaaatgcagaattcactgggttattgtggcagattatatacatatatctttctgcatcataatcatgttttagacaccttgattctatgaactttagagaagagaatcaccatcttgttacaggagtttgttttttattctaagttacagacatatctcagagatactgt

SEQ ID NO: 560748 - DNA, 615 bp, Homo sapiens
tgctccaaatttcagtgtaaaattcccccataagtacaatttcaaaatcaaaattttagctaacaacaaaaggcatgaatgtggatgtaatgtattgggtgaaaaataatatgaataatgagcattatggagaatgacttttattttattttattttttttattttttgagacggagtctccctctatcgycaggctggagtgcagtggcgtgatctcagctcactgcaacctctgcctgcagggttcaagcaattctcctgcctcggcctcccaagtagctggggatttatttttctcaagcaattctcctgcctcggcctcccaagtagatttggggatttatttttcaatagctagtgagaattcctctaacttataaagcacctgctttatgctaaccactttttagcagctttgctatcaaacatggcaaaaactatctgataacagccaggcatatagaaagcacaatctaatatatgagtctgaattttactgtgtcccttgctgaaaaaaattcagccattaaaataaccaaaaaattcataatcaagaaatatgtttctgtcatgaatagttgttttttactttagagtgtaaagcatgagatgat

SEQ ID NO: 560749 - DNA, 599 bp, Homo sapiens
  misc_feature 161: n = A,T,C or G
ttaattcactaagggtaagagcttccagctccatccatgtttgctgcaaagaacataatggtattcccttttatggcagcatggtattccatggtgtatatgaacaacatcttctgtatccaatttgccattgatgggcacctaggtttattccacgtctntgctattgtaaacagcacagtgatgaacatacatatgcatgtgtcttttgggtataataatctgttttcctttgggtatatacccaataatgggattgttgggttgaatgatagctgttttaagttatttgagaaacatctaaactgctttccacagtggtggaactaatttacattctcaccaacagtatatagtatttcttttctctgcagcctctccagcatctgttgttttgtgacttttcaawaatagtcattctgactggtgtgagacggtacgtcaaatacttcttttcccaaagcatctagaaatatttcttatcctttcaataatttatgaatagaaaaaggaagatgcaatactttattaataaatagtaatgcctataagtcattgaaagaaatggtctcagtagaatcatcactggaaatataatg

SEQ ID NO: 560750 - DNA, 628 bp, Homo sapiens
ccaccaccattctaatctcttttccaaaatactctccccmtctcagctttcccctatatacaaatcatgctaactacatctttccagtaaatcagactgagtatcttggaggcaacctttaatcacttcccttttcttatttctcacaaacactaaaatgaatcttatcagtccttccttcaaaatatacacagaagctgaccacttgtaaatccaaaggtacagatgtagttgaaatcaccaccatctctcccctggatgtcaacatcaactctccttaactgtgattgtcaaaaatgaatattttggtttatactcttcacattcatctcctctccacccacctcattctcaaaaccacaacaaaagtgatgcttttaaagtaagtcaagccatgccagtcttctgctcaacagggtagggggagaaaataagagcttaggtactagcttcaaggtgagacaatgctcaagaaacagtccagccccaatgttcctgtggaaccctttgctaagactatggtgcaattcaactcctttctctgtccaatcctacttctcccttcctatccccaaccccaaggaagtgatcccaatgggacatatcaataaatcttctgtaggtaatt

SEQ ID NO: 560751 - DNA, 628 bp, Homo sapiens
ccaccaccattctaatctcttttccaaaatactctccccatctcagctttcccctatatacaaatcatgctaactacatctttccagtaaatcagactgagtatcttggaggcaacctttaatcacttcccttttcttatttctcacaaacactaaaatgaatcttatcagtccttccttcaaaatatacacagaagctgaccacttgtaaatccaaaggtacagatgtagttgaaatcaccaccatctctcccctggatgtcaacatcaactctccttaactgtgattgtcaaaaatgaatattttggtttatactcttcacattcatctcctctccacccacctcattctcaaaaccacaacraaagtgatgcttttaaagtaagtcaagccatgccagtcttctgctcaacagggtagggggagaaaataagagcttaggtactagcttcaaggtgagacaatgctcaagaaacagtccagccccaatgttcctgtggaaccctttgctaagactatggtgcaattcaactcctttctctgtccaatcctacttctcccttcctatccccaaccccaaggaagtgatcccaatgggacatatcaataaatcttctgtaggtaatt

SEQ ID NO: 560752 - DNA, 628 bp, Homo sapiens
ccaccaccattctaatctcttttccaaaatactctccccatctcagctttcccctatatacaaatcatgctaactacatctttccagtaaatcagactgagtatcttggaggcaacctttaatcacttcccttttcttatttctcacaaacactaaaatgaatcttatcagtccttccttcaaaatatacacagaagctgaccacttgtaaatccaaaggtacagatgtagttgaaatcaccaccatctctcccctggatgtcaacatcaactctccttaactgtgattgtcaaaaatgaatattttggtttatactcttcacattcatctcctctccacccacctcattctcaaaaccacaacaaaagtgatgcttttaaagtaagtcaagccatgccagtcttctgctcaacagggtagggggagaaaataagagcttaggtactagcttcaaggtgagacaatgctcaagaaacagtccagccccaatgttcctgtggaaccctttgctaagactatggtgcaattcaacycctttctctgtccaatcctacttctcccttcctatccccaaccccaaggaagtgatcccaatgggacatatcaataaatcttctgtaggtaatt

SEQ ID NO: 560753 - DNA, 573 bp, Homo sapiens
taacttttctttctttctttttttttttttctgaggcagagtctctctctgttgtccaggctggaatgcagtagtgtcatctcagctcactgcaacctctgcctcctgggttaaagtgattctcgtgcctctgccacccaaatagttgagactacgggtgcttgccaccacgccgggccaatttttgtattttcagtagagacggagtttcgtcatgttggccaggtgggtctwgaattcctagcctaaagtgatccgcccacctcagcctcccaaagttctgggattataggtatgaaccaccacaactgggctggattagctttttggattacaatttgtttatatccatgagatggaattagctaactaaatttgaaataagatatatttttataattaatttatttttgtaacattaaatattacaatgcaaacagttctctgtaactaactgaactattctttcagcttttgatgagaccacaaatcatttgcttcctcttcctctacctgaacagaaagacatcttcaaagttaatttttctgtccttatttatatttatctaattt

SEQ ID NO: 560754 - DNA, 573 bp, Homo sapiens
ttacaatttgtttatatccatgagatggaattagctaactaaatttgaaataagatatatttttataattaatttatttttgtaacattaaatattacaatgcaaacagttctctgtaactaactgaactattctttcagcttttgatgagaccacaaatcatttgcttcctcttcctctacctgaacagaaagacatcttcaaagttaatttttctgtccttatttatatttatctaatttgcagcttttctacttgtatattacagtctgattctttcagaaaaattcctcaaaaaatttcaacttcctatataatagcattttcaaaatttattttcacattttgctctatttttactcttaatattaatactttaatattagtattaatagtaatattagaataagcactatgaatatttctttataaactccccttcagttaattagatgrcattacactttcttttctctaaattcctcctccttcaattcactgcctacatttcagatgttatctgacttttatttttactataataactctttccctgccaagtcatgtccccat

SEQ ID NO: 560755 - DNA, 559 bp, Homo sapiens
tgaagctgtgagttgtgtcagccagagttcaaggcacacgagcttttctcacactgacatgttctaaagccaaatgatgcttccgccagctgagagtaccttttttgcttaatcatgcaagatgaggagtagcctcttaataaggataaagaaaacttggaatcaaactgaaataattaagcatatttacatatttactacacaaatccttcatattttgttgagtttacataatcaagactgaaaatctcagaacagcattctctgaattttctrttttcaatttcagaagtttctagtaacaattctatgtaaataataaatagatcaaaatgccaaaggaaactttttccctaagatttagctatctcattgtgcaacaatcctggaaaaagacatacttcaaatcatataaaatacatttctgagtaagtttggagtcaggagacattttttttcacacaaaaacataattggctggcagtttatttcatagcatgtaacaatcactacattaattaaacaatttaattgtcaggaaaaataattcattaaataa

SEQ ID NO: 560756 - DNA, 629 bp, Homo sapiens
gcgttctgtatagacaatcccaaggaatctttcaaaaaactcctagaactaataaatgagttaagcaaggtggcaatatgcaagataaacatataaaaacttctatatactggcaatgaacacattgaaactgacattaaaaatacaactaccatttccaaccacccccaaaaatgaaatacttaagtgtaaatctaacaaaacatatataggatgcatacccaaaatattgatgaaagaatcaaagaatatttaaataaatgaagggttatactaagatcatgaattggcagattcagcattttgaatatattgtttctccctaaatattaatagacataaaggtttaacacaattcctttcaaaattccagcaaggttttttgtagacatatacaagattattgtaaaattatattgaaatgcaagggaactaaattagctaaaataattttcaaaaaggaggttaaaatgggagcagtctattgaatttcagacttattatgtaactgcagtaatcaagactgcatggcattggtagaaggctagctgtgtagatcagtgcaaaagaatagataacccaratatatacctcacacaaatacagacaacttacttttgaaaaaggtg

SEQ ID NO: 560757 - DNA, 590 bp, Homo sapiens
attattttttgttttatatggctcaatttttttttttagacggagtctcactctgtccccaggctggagtgcagtggtgcaatctcggctcactacaagctctgcctcccgggttcacaccactctcctgtctcagccttccaagtagctgggactacaggcacctgccaccacacccagctaattttttgtatttttagtagagacagggtttcaccatgttagccaggatggtcttgatctcctgacctcgtgatccgcccacctcagcctcccaaagtgctgggaatacaggcgtgagccaccgcacctggcctaatggctcaaatttttaataaactgatttatttttattaatttgttgatattaggcaacatgattgaatatgcatcattacctttaaaaatcttgctgtaaaccagcatttaacaaagtgtgatttgtcacttagagtccccagaacccattcagtcagtccatgaggtcaaaatgatttccctaatcrtttccctaataccagttgttatttgctcttttcactatgtggaccttgctctggtggtgcgaaatcaacagtgaacaaaactgt

SEQ ID NO: 560758 - DNA, 584 bp, Homo sapiens
aaagcttacaagccagagcactgacccagtaccctgagcacagagaggacaggaggagcctcacccctgctaggctttgcscactccatctcattatttcctaccggaaagttttggcaggagaatgcaaaagttggaattttgggaaagggagtctttggtccaatcaaaagtctcagagttaaattaaaaagccgtgagacttcttctagagtccataaagccccatcctcaagcatatagaaaatctaaatataatctttgaaccagcccagtgctatcaggtcccacatcccacctccctatccttgcatcctctaaacattttctctctctgaacattttaattacattcaaacacagtaagatacaccttccgtttttattgtaaaaacatccctttgaatgttgccaactggctttctaaaaatgttatttcaatttgcactgctaccagttttgccaaagcatgacaaagacagaaaataattattttaacaattaagggtggcttaacagatgagaaatgatatttgattttttaattaaccttttttatataggaatatatacagtgtttgctc

SEQ ID NO: 560759 - DNA, 530 bp, Homo sapiens
cacacttagtcacctgaatagagagttgtccagcccatgtacagacttcctaaccagatttttagtgaccaattctttttcatttttttctttattttcttcttatgaaataatatttgacacacaaaagaatatgtgatgtacatataagctatgaagccaaataaggaacaaacattggtgaaatcacagcccatgtaaaagctaaagtaagagctgctaataagctgtaaacactctgtgagtttcttttctatatcacattgattcttcttacccatagtttatcacaatcctggattctgcagtcatccttctcatgctttaaaaaaatacagctttaccccaggcatgtttwctgctggataatatatttagtttttctttgttttgaattttataaaaataatattctttatatatttttctgaattatgttttcagtcattcaaccgtgtatttgtaagattttcctggaaaagaccacatagaaaatattttagcctttgtgagccatatggtctctgtca

SEQ ID NO: 560760 - DNA, 563 bp, Homo sapiens
attactgccaaaactagcttcatttaaatttatgagaaataataaatcaatcattaaaatggaaactaggcatgaataaaatcgagacaagaacwgtgacagcattttaagtaaactttgtaacaatcctcaaaagcccaatacttattgtttatgcaattgttttcatacaaccttgtattgagcctccttaattatgccatagttgaattacaattaatatgtaaatagaaacataaaacctggtttatcccatgtagcgatctgtaccagcaaacatccttcacaatcctctcattggaaagtctctggggttgcttaggcattctatttttcttttcctttagctttagtaatctggttggcaaagctaattcggagcaggatgtgctgctcctgtaacctgtttacaaatctttaacatctggaaaaacgtagcttctctgttggtctccctgtacccctgactcactgacattaagtgtatttatcactacctaaggtgggagtgaattttacatgctatgttgttgttgttgctgttcgtctgccttaattttcaa

SEQ ID NO: 560761 - DNA, 391 bp, Homo sapiens
agccctgattacattgtttgattaatcaaataaaaatgaaatttcatttgttttagaaaataaatccagattaattttaaagctgatttgaaagcagtcactgattcctgaaactagaattatactaagtgaaacaaatgatgagaaaaggattaaagattatcaatgggaaatacatgttgctaaaattttacatagccaaaaatatttaaactaacaattaatattcttgaccatgccaaaatttctccaaaaaagtatcaaaatataaatgtcatgtacccaaatagggttcctctaaccaattccaaatgacccaattttagacaacytcatgaatcactcctctagacccaataattagaataaaaggaaagcaccaaagggtcac

SEQ ID NO: 560762 - DNA, 615 bp, Homo sapiens
aaccattacaaatcattaagaaatatggatatcagtagggaaaaacacaaaagactcaggaatttcmtagaagtgggctacattggtcaataagcagatttaaacacggtcaatcaattcatcatgaaaatgcaattttaaaagacaatgaaatgacattttacaaatttttgtggaaaaatatggctatatcaggttttgacagatcagtgatacagtggggattcttacaggcccatagatgcaatgtaaattggtatatccattttggtaaacaaatttagcattacttataaaaactgaatatgtgcatctcatttaatagtcaatgatttcactttggaataaatacaccaggaaaattcttgcatatatcttccatgggaaatgactaagaaaaaaagcaggtttttttgagtaataaaatcctagaacataacacagacaggagaatggataaatgaattattctatttctgaacaagtattattacaaagcactaaaatgaataagttgaaaccacaaccataaacataatgaatctcaccaatgaaattttgagagaaaagacagtttgagatgaattcatataatatgatcaatttttataaaat

SEQ ID NO: 560763 - DNA, 615 bp, Homo sapiens
aaccattacaaatcattaagaaatatggatatcagtagggaaaaacacaaaagactcaggaatttcctagaagtgggctacattggtcaataagcagatttaaacacggtcaatcaattcatcatgaaaatgcaattttaaaagacaatgaaatgacattttacaaatttttgtggaaaaatatggctatatcaggttttgacagatcaktgatacagtggggattcttacaggcccatagatgcaatgtaaattggtatatccattttggtaaacaaatttagcattacttataaaaactgaatatgtgcatctcatttaatagtcaatgatttcactttggaataaatacaccaggaaaattcttgcatatatcttccatgggaaatgactaagaaaaaaagcaggtttttttgagtaataaaatcctagaacataacacagacaggagaatggataaatgaattattctatttctgaacaagtattattacaaagcactaaaatgaataagttgaaaccacaaccataaacataatgaatctcaccaatgaaattttgagagaaaagacagtttgagatgaattcatataatatgatcaatttttataaaat

SEQ ID NO: 560764 - DNA, 612 bp, Homo sapiens
aaacaaacaaaaataaaaacaaaacgcctttttatcatttatttaaaaacttctgagataaagctatttgtaaatgaattgggagggaataataatgggaaaacacattttaagggcawtttttacagtgttgaatattgaaactgaatatcacaagacataattttaaaaattattcaaaattacaagacccaattaccaacgtaaatttgattttacaaataagctatataaagacaaaacattatattcctgattccagttgccaacacagtaaaataattcatactgaaaaaaattttatttgaacactccaaataatgttaaaagtggtaaatagatatatcatagcattaaaatgtagctttttgtttcagacaataatcaatttcatacccaatattttatcacaaatattaaaagcatagtggtaggtagtatggttaaaagtcacaatatttcaggaaagaagtaatgcacatgctgccggtttaacatgtttattttgataaattgagtgtggaatttaaacatgtaggtctcttataagagtgtgtaagataactcatatctccaaatttctaaataaaataagaaaaattcattatgaac

SEQ ID NO: 560765 - DNA, 593 bp, Homo sapiens
tatgaagagaaggcaggaagatgctagaaatgtcagcttattagagtaagkatgtattatattgttaacagccaccaaaaattcacatagaaagaagttactagagatcttcaggaagattacaatctaatcagacagataaaacacacacacaagaaattacttgaaataattaaataataaaatgtcaacaaatgcaaagtagatacataattggaattgaattctagtttctgtggaattaatatcattaaatcagatacaaaatgatggggcagggagagagtgggtgactccttctcttaaaggattcttcctgctttcaacataagctggtgattccaatgagtgcatgaggacaaatcaatgtgaagggcccaggaaatgctgactgatccaaacaaagtgaacctggtcattaatgttctcctaaaggtgagatttgagattcaaagaaggtgagacccattgatcagttcagaggagccaagggatattctgatttgaggataaggtggagagagcagattaggctattgatagactgaagaaagagtgaaaaagtagcaggtgtaaaggagggaggcaggagt

SEQ ID NO: 560766 - DNA, 552 bp, Homo sapiens
tctttttcttattgagctttaaaaattctttatatattctacatgcacatccttaattatatgtatgatgtgcaaatattttctctcaccttgtgggctatcttttcactttcttgcyagtgtgctttgaacacaaatgtttttaattttgataaatccaatttatctgtttttttcttttgtcacttatgcttttagtgtcgtatttaaaaaggcttgcctaatccaaagtaaggagtatttactcctacattttcttttgagagtagtagaattttagctcttatgcttaggtctattatctattttgagtttaattttgtgaatggtgtgaggaaggtgtctaacttcactttttttgcatgtgaatatacagttatcaccgaaccagatgttgaaaaaattaccccctccccgaccctcaccattggattgtcttagcactcttataaaaaattgatcatagatatatattcttattttgggactcttaagtttattccattgatcttcatgtatttccttcttccactgcgtgcagttttgattacc

SEQ ID NO: 560767 - DNA, 552 bp, Homo sapiens
tctttttcttattgagctttaaaaattctttatatattctacatgcacatccttaattatatgtatgatgtgcaaatattttctctcaccttgtgggctatcttttcactttcttgctagtgtgctttgaacacaaatgtttttaattttgataaatccaatttatctgtttttttcttttgtcacttatgcttttagtgtcgtatttaaaaaggcttgcctaatccaaagtaaggagtatttactcctacattttcttttgagagtagtagaattttagctcttatgcttaggtctattatctattttgagtttaattttgtgaatggtgtgaggaaggtgtctaacttcactttttttgcatgtgaatatacagttatcaccgaaccagatgttgaaaaaattaccccctccccgaccctcaccattggattgtcttagcactctyataaaaaattgatcatagatatatattcttattttgggactcttaagtttattccattgatcttcatgtatttccttcttccactgcgtgcagttttgattacc

SEQ ID NO: 560768 - DNA, 539 bp, Homo sapiens
tgttgcccaggctggagtgcagtggtgtgatcttggctcactgaaacttcacctccttggctcaagcaattctcctgcctcagcctcccaagtagctgggattacaggcacttgccaccatgccggctattttttttttgtatttttagtagagatggggtttcaccatgttggccagactggtcttgaactcctgacctcaggcaatccacctgcttcagcctcccaaagtgctgggattacaggtgtgagccactgcacccagcctgccagctatcccttagygacgttccagcttcatgcttacacaacactcatgcttacacttccttgaccagatcttaataataggaccatacccacttgccaggtgcataaccatatgttcagccaaaaagtagaggctctggccatatggaagaatggaaaaaatagatattagggaatggctagcaccactatccttaccttcaaaaattgcaaggtctaatatagaagatagacatgtaaataatctgttatattgttatattgtaagt

SEQ ID NO: 560769 - DNA, 539 bp, Homo sapiens
tgttgcccaggctggagtgcagtggtgtgatcttggctcactgaaacttcacctccttggctcaagcaattctcctgcctcagcctcccaagtagctgggattacaggcacttgccaccatgccggctattttttttttgtatttttagtagagatggggtttcaccatgttggccagactggtcttgaactcctgacctcaggcaatccacctgcttcagcctcccaaagtgctgggattacaggtgtgagccactgcacccagcctgccagctatcccttagcgasgttccagcttcatgcttacacaacactcatgcttacacttccttgaccagatcttaataataggaccatacccacttgccaggtgcataaccatatgttcagccaaaaagtagaggctctggccatatggaagaatggaaaaaatagatattagggaatggctagcaccactatccttaccttcaaaaattgcaaggtctaatatagaagatagacatgtaaataatctgttatattgttatattgtaagt

SEQ ID NO: 560770 - DNA, 532 bp, Homo sapiens
ttctcattacttctgtctttccatcatctcagcacctatccagtgccaatgtgtctgggattctcaattcacaatgtgtttgttcctgtttgggaagccaaattacaaacaactcatgtttagcaacagattttaattctttaactgtcaataaagattgaattaatacacttttattcatacttcgtcattcttctttacttcctttcaccaccgtgatctccactgtaaaagtgtaatcaatttgaatatcccctatccaaaatgtttgggatcaaaaatgtttaaaagtttagatttttgaatatttgcattttacttactggtggagcactcctaatatgaatatctgaaatcaaaatgctccaatgagcatgttctttaagcatcatgtcaactttcaaaaagtttctgattttggagcrtttcagatttcagattttcatattagggatacttaacctgtattatttttacaggttatttgcgtgcttttaaacaggtaacttttcaaagtccccttttcccccta

SEQ ID NO: 560771 - DNA, 629 bp, Homo sapiens
ggctcacagttctgcaggctgtacaggaagcatggtgacagcatctgctcagcttcagtggaggcctcagggagcttttactcctggtggaaggtgaagcaggagcacacatgtcacatggccagagtaagagcaagagagagagatggcgggagaggggaaggtgccacacaattaaacagccggatctcatgaggactcagtctctattgtgagggcagcaccaggccatgagggatcttcccccaggtcccaaacttctcccaccagtccccacctccaacaccaacatatttcatcatgagatctggaggggccatccaaactayatcatcctccaaccagtcatactaaacttctttcaaattctggaacttgtcatgccttctttctttattataactccctgtattattccattcatagtccatgcttggcctttttcacatcccttttgctctattcatttccactcattatgctgatctcagtttaaattaactttgccaaggaagcctattttagcaatctcgagttgtgtgcctacccaatgatgttgggttgcctgactactcaacctcttgtctatgttaagactttctccatcagacagtatcccccaaacactt

SEQ ID NO: 560772 - DNA, 629 bp, Homo sapiens
ggctcacagttctgcaggctgtacaggaagcatggtgacagcatctgctcagcttcagtggaggcctcagggagcttttactcctggtggaaggtgaagcaggagcacacatgtcacatggccagagtaagagcaagagagagagatggcgggagaggggaaggtgccacacaattaaacagccggatctcatgaggactcagtctctattgtgagggcagcaccaggccatgagggatcttcccccaggtcccaaacttctcccaccagtccccacctccaacaccaacatatttcatcatgagatctggaggggccatccaaactacatcatcctccaaccagtcatactaaacttctttcaaattctggaacttgtcatgccttctttctttattataactccctgtattattccattcatagtccatgcttggcctttttcacatcccttttgctctattcatttccactcattatgctgatctcagtttaaattaactttgccaaggaagcctattttagcaatctcgagttgtgtgcctacccaatgatgttgggttgcctgactactcaacctcttgtctaygttaagactttctccatcagacagtatcccccaaacactt

SEQ ID NO: 560773 - DNA, 506 bp, Homo sapiens
cagacaccctacaatgtcaatgtcagccaattttttgaaattgaaactggatcacagcagtggctaatggggctcttggtaagcaacatagattgagaatgaattttatcttgattaatgaatggcaatcaactaattttgtaatatactcattacaaaaaatagccaaataggaaggtataaaaagaacagaataaatgaattcatttataataaagaaaaataaagtgactttatacataatattttgcctcatggacaactttacctggcttaagtcattgtttacaactctgattcttttttttttttcttttgagacagcttcactcttgttgcccaggctggagtgcaatggtgtgatctcagctcaccgcaacctctgcctcctgggttcaagcaattctcctgcctcagactcccgagtagctgggattacaggcatgygccaccatgcccagctaattttgtatttttagtagagatagagtttctccatattggtg

SEQ ID NO: 560774 - DNA, 542 bp, Homo sapiens
atgtcagtgttttatctaatacctagaattttctgttttaaaggctgggttgaatagtgctttcagcaaagaagaaagatagaatttatttatttatttttaagtatgatggcctacaatcttctctgttacaaaaaacccacaccaaagagatgacaaaatgacttgctgarggacatcatcctgagaagataaatagacgttaaaatggttttggcctgaaaaatcaatttggttgtctataggcctcatggaaagaaaatcacctttgctgaggaaaatattatttctacctctgagaggaccaaaccagtatcagggaggaaggaaggctcttttttttttttttttttttaaatgatgacactttctccaacaaagaatgagtgtttacagaaaaataggggacatatacttatttttctcagcattgaagtaaaaccttgtccttctttattgttcgcccagctacagggcattactgacatatatgtataggatagagaggcaaaaagccatgtcatgctgtgagggcaacagac

SEQ ID NO: 560775 - DNA, 609 bp, Homo sapiens
tggtggttggatgatgtgctctaattcagcttcagtaagagttattaatcatatgtgtggttccagtggaagtattttaattaccattgactaaactgaggawgaaaagctactgacaaaaacagaaagttaaactacttcagtgaagtgactaattattgctggctctaactgtggacacaagtaggattattgtaaagtagggagatggtggatctgaagaagcctaggatgaggtagcactagatagatcttatttgtggagcattgttgagtgtgcacttgcatctttctttgtgactagaaccagaaaaagtaaatacatctgtgatggttaatatcgagtgtcaacttgattggattgaaggatgcaaactattgttcctgggtgtgtctgtgagggtgttgccaaaggagattaacttttgagttattggactgggaaaggcagacccaccctcaatctgggtgggctccatctatcagcagccagtgcagccagagaaacatggaaagactagatctagcttagtcctccagcctgcatctttctcccatgctggatgcttcctgccctcaaacattgtcttcagctttgggactcggact

SEQ ID NO: 560776 - DNA, 609 bp, Homo sapiens
tggtggttggatgatgtgctctaattcagcttcagtaagagttattaatcatatgtgtggttccagtggaagtattttaattaccattgactaaactgaggatgaaaagctactgacaaaaacagaaagttaaactacttcagtgaagtgactaattattgctggctctaactgtggacacaagtaggattattrtaaagtagggagatggtggatctgaagaagcctaggatgaggtagcactagatagatcttatttgtggagcattgttgagtgtgcacttgcatctttctttgtgactagaaccagaaaaagtaaatacatctgtgatggttaatatcgagtgtcaacttgattggattgaaggatgcaaactattgttcctgggtgtgtctgtgagggtgttgccaaaggagattaacttttgagttattggactgggaaaggcagacccaccctcaatctgggtgggctccatctatcagcagccagtgcagccagagaaacatggaaagactagatctagcttagtcctccagcctgcatctttctcccatgctggatgcttcctgccctcaaacattgtcttcagctttgggactcggact

SEQ ID NO: 560777 - DNA, 567 bp, Homo sapiens
ggttcttcatgttgccctttcagagccacacccacttccctctcccacctccccttaaaccctggcaaccgccaatgcgttctscatttctatgattgtgttattccaagaatgttctataagtggaatcctacagtatgtaatcttttgggattgggttattttactaagcataattctctggagattcacttaagttgtttggtctatcagtagttggatcctttttattgatgagtagtatactatggtatggacgtgctacagtttaactatttgctcattgaaggccatctggattatttttagtttggggatatagtgaataaagttgctacaaatatctttgttcaaccttttgtgtgaacataattttcacttctctggaataattataatgtaatgcctgattggatggtagatgtgtgttcagtggtttttttttgttgtttgtttgtttcctttttgaaatggagtctcgctctgtcacccaggctggagtgcaatggcacagtctctgctcactgcaacctccacctcccaggttcaagcaattctcttgtctca

SEQ ID NO: 560778 - DNA, 567 bp, Homo sapiens
ggttcttcatgttgccctttcagagccacacccacttccctctcccacctccccttaaaccctggcaaccgccaatgcgttctgcatttctatgattstgttattccaagaatgttctataagtggaatcctacagtatgtaatcttttgggattgggttattttactaagcataattctctggagattcacttaagttgtttggtctatcagtagttggatcctttttattgatgagtagtatactatggtatggacgtgctacagtttaactatttgctcattgaaggccatctggattatttttagtttggggatatagtgaataaagttgctacaaatatctttgttcaaccttttgtgtgaacataattttcacttctctggaataattataatgtaatgcctgattggatggtagatgtgtgttcagtggtttttttttgttgtttgtttgtttcctttttgaaatggagtctcgctctgtcacccaggctggagtgcaatggcacagtctctgctcactgcaacctccacctcccaggttcaagcaattctcttgtctca

SEQ ID NO: 560779 - DNA, 567 bp, Homo sapiens
ggttcttcatgttgccctttcagagccacacccacttccctctcccacctccccttaaaccctggcaaccgccaatgcgttctgcatttctatgattgtgttattccaagaatgttctataagtggaatcctacagtatgtaatcttttgggattgggttattttactaagcataattctctggagattcacttaagttgtttggtctatcagtagttggatcctttttattgatgagtagtatactatggtatggaygtgctacagtttaactatttgctcattgaaggccatctggattatttttagtttggggatatagtgaataaagttgctacaaatatctttgttcaaccttttgtgtgaacataattttcacttctctggaataattataatgtaatgcctgattggatggtagatgtgtgttcagtggtttttttttgttgtttgtttgtttcctttttgaaatggagtctcgctctgtcacccaggctggagtgcaatggcacagtctctgctcactgcaacctccacctcccaggttcaagcaattctcttgtctca

SEQ ID NO: 560780 - DNA, 567 bp, Homo sapiens
ggttcttcatgttgccctttcagagccacacccacttccctctcccacctccccttaaaccctggcaaccgccaatgcgttctgcatttctatgattgtgttattccaagaatgttctataagtggaatcctacagtatgtaatcttttgggattgggttattttactaagcataattctctggagattcacttaagttgtttggtctatcagtagttggatcctttttattgatgagtagtatactatggtatggacgtgctacagtttaactatttgctcattgaagrccatctggattatttttagtttggggatatagtgaataaagttgctacaaatatctttgttcaaccttttgtgtgaacataattttcacttctctggaataattataatgtaatgcctgattggatggtagatgtgtgttcagtggtttttttttgttgtttgtttgtttcctttttgaaatggagtctcgctctgtcacccaggctggagtgcaatggcacagtctctgctcactgcaacctccacctcccaggttcaagcaattctcttgtctca

SEQ ID NO: 560781 - DNA, 557 bp, Homo sapiens
taaacattgtgatgttcttgctgtgaagaacagaagaggacaatgcaagactaaatgttctcagatttatctttttttctatgctcttctcatatattttttgatgctaagtgtgactttcaaatataactaatctgttttttcccactaattttactttcactatcaataaacccagctctratcttcttggatcaggggatcaggagctaagacagtagcagaagcaatgcaggcaaaaataatgcatgcaattaattatgtcaatttcctaattatgaacttggtcttagtggtcttagtgttctttttaaagcagcacatgttaaactgtggcctataaacatgagtgacagagaatacaagaaatcttgaaactgaataattacatgtgcattttaaaaatttattttttatttttatgagtacatagtaggtatatatatttaaggggtacatgagatattttgaggcatacaatgcataataattacatcaggttaaatggagtattcatgaccccaagcatttatcatttccttgtgttacaagcattc

SEQ ID NO: 560782 - DNA, 616 bp, Homo sapiens
gaatgagctttggagtgagatagacctgcctgggtccaggacccaccatttatcatcatgtctggcctttttcataacatttctgacacagaatctccctgtctttaagataaagatagcaatctctgcctcgtggctattgtgagaattaaataatacatattgagctcttagmacagcacctgacacatgataaatattcagtaaatgcttccacaagttctgaatgtcatcattggtattgttaatgtcatcgtcgatattattgccaatattcttatcaatgagagtgggaattttactaaggaaacatcatttcttgtatagttgctatattcagacacactgaggtccctgactttctgtgtataatttcctctgcctggaaagtccctgccaccacctaccaccacctcctgcctggccatgtcccactcatctcccactctcagctaaaacatggcttcttactagaacccaaccttcactgatcccgaaggatggagttgacccgtagcacccgctcttcacctatgctattctcatcacattacactgtaattccgcgtttattttatagacctgtatgctcctcatattatacacagacatacac

SEQ ID NO: 560783 - DNA, 616 bp, Homo sapiens
gaatgagctttggagtgagatagacctgcctgggtccaggacccaccatttatcatcatgtctggcctttttcataacatttctgacacagaatctccctgtctttaagataaagatagcaatctctgcctcgtggctattgtgagaattaaataatacatattgagctcttagaacagcacctgacacatgataaatattcagtaaatgcttccacaagttctgaatgtcatcattggtattgttaatgtcatcgtcgatattattgccaatattcttatcaatgagagtgggaattttactaaggaaacatcatttcttgtatagttgctatattcagacacactgaggtccctgactttctgtgtataatttcctctgcctggaaagtccctgccaccacctaccaccacctcctgcctggccatgtcccactcatctcccactctcagctaaaacatggcttcttactagaacccaaccttcactgatcccgaaggatggagttgacccrtagcacccgctcttcacctatgctattctcatcacattacactgtaattccgcgtttattttatagacctgtatgctcctcatattatacacagacatacac

SEQ ID NO: 560784 - DNA, 577 bp, Homo sapiens
aaattttcaacgatagtccagagaacttttatgtacccttctttatcagattcatcacctgttgacaatttcccccatttgctgtcttttcccccaacttaaaaattatggtaaaatacacataacataaaatttaacatcttaatcatttttaagtatgcagttcagtagtastaattatattcataatgttatgcagccatcatcaccatccatcactccatctgataactcttttcattttgcaaagctgcaactctatacctatgacgtgataacactgtgtttccaccttgcctcagcccctggcaacccaccattctactttctgtctctatgtttttggctactccaattttcacttcaccatttctctgtctcaccatttctctgtttgtctctcgctctgttatctgtctcttgttctgtctctctctatatatacacatacattcccttcgagagtaaattggagacattgtgccttttaactcctaaatacttcaatgtgtattttctaaggatactttcttacataactatagtgtggttattagagacagttatatttaaaaaa

SEQ ID NO: 560785 - DNA, 596 bp, Homo sapiens
atttatttccatatcttcaatttgtaatatatatcttgtggattcttaatatggaactttatttttttcttatttctggttgtgtccttcttttataaatttctttttgagtctcaaactaaatgcagacttcactatatatacataatatcactatgcacaggtagtttccaagtttatttttattttctttagtcaatgtatatcaggtcaaaagttaggcttttttttaaccattgaaaaactcacttgtgtctgttatctgtagagtacagtttgatgtatcaaggaaagagaaaagttacttttcttataaataagtactatggtcttaactgagatcagttcattaattcatcagtgcattcatttaattttatcatatattattgttacaaccaaaagcaaaccttgataaactccaaatctgattaatttttctgtattaatkatcttaagttaatggtacccttacccatctaagtgaaaattggaatccatcttagactcccctgttatatgttaacacttcctatcatttctgttagttaattcccatcctcattttaaaattactaatgcctttttcttagttc

SEQ ID NO: 560786 - DNA, 596 bp, Homo sapiens
atttatttccatatcttcaatttgtaatatatatcttgtggattcttaatatggaactttatttttttcttatttctggttgtgtccttcttttataaatttctttttgagtctcaaactaaatgcagacttcactatatatacataatatcactatgcacaggtagtttccaagtttatttttattttctttagtcaatgtatatcaggtcaaaagttaggcttttttttaaccattgaaaaactcacttgtgtctgttatctgtagagtacagtttgatgtatcaaggaaagagaaaagttacttttcttataaataagtactatggtcttaactgagatcagttcattaattcatcagtgcattcatttaattttatcatatattattgttacaaccaaaagcaaaccttgataaactccaaatctgattaatttttctgtattaatgatcttaagttaatggtacccttacccatctaagtgaaaattggaakccatcttagactcccctgttatatgttaacacttcctatcatttctgttagttaattcccatcctcattttaaaattactaatgcctttttcttagttc

SEQ ID NO: 560787 - DNA, 596 bp, Homo sapiens
atttatttccatatcttcaatttgtaatatatatcttgtggattcttaatatggaactttatttttttcttatttctggttgtgtccttcttttataaatttctttttgagtctcaaactaaatgcagacttcactatatatacataatatcactatgcacaggtagtttccaagtttatttttattttctttagtcaatgtatatcaggtcaaaagttaggcttttttttaaccattgaaaaactcacttgtgtctgttatctgtagagtacagtttgatgtatcaaggaaagagaaaagttacttttcttataaataagtactatggtcttaactgagatcagttcattaattcatcagtgcattcatttaattttatcatatattattgttacaaccaaaagcaaaccttgataaactccaaatctgattaatttttctgtattaatgatcttaagttaatggtacccttacccatctaagtgaaaattggaatccatcttagactcccctkttatatgttaacacttcctatcatttctgttagttaattcccatcctcattttaaaattactaatgcctttttcttagttc

SEQ ID NO: 560788 - DNA, 596 bp, Homo sapiens
atttatttccatatcttcaatttgtaatatatatcttgtggattcttaatatggaactttatttttttcttatttctggttgtgtccttcttttataaatttctttttgagtctcaaactaaatgcagacttcactatatatacataatatcactatgcacaggtagtttccaagtttatttttattttctttagtcaatgtatatcaggtcaaaagttaggcttttttttaaccattgaaaaactcacttgtgtctgttatctgtagagtacagtttgatgtatcaaggaaagagaaaagttacttttcttataaataagtactatggtcttaactgagatcagttcattaattcatcagtgcattcatttaattttatcatatattattgttacaaccaaaagcaaaccttgataaactccaaatctgattaatttttctgtattaatgatcttaagttaatggtacccttacccatctaagtgaaaattggaatccatcttagactcccctgttatatgttaacacttcctatcakttctgttagttaattcccatcctcattttaaaattactaatgcctttttcttagttc

SEQ ID NO: 560789 - DNA, 273 bp, Homo sapiens
ttttttggttatttataatagtgccctaagaagtggagaattctagataataacacatatatacatactttatgcagttaaagtttaagttcctatacttctaattaaagattgggtatttaatgatgacagttctttttgcctttgtaygcattcacaattttttttgttactttattgaagtaccaaaagtacttcttacatatataattcttgcttattcattctaaggtgtgaaatagcctttggggataggggaagggaactgagcca

SEQ ID NO: 560790 - DNA, 273 bp, Homo sapiens
ttttttggttatttataatagtgccctaagaagtggagaattctagataataacacatatatacatactttatgcagttaaagtttaagttcctatacttctaattaaagattgggtatttaatgatgacagttctttttgcctttgtacgcattcacaattytttttgttactttattgaagtaccaaaagtacttcttacatatataattcttgcttattcattctaaggtgtgaaatagcctttggggataggggaagggaactgagcca

SEQ ID NO: 560791 - DNA, 273 bp, Homo sapiens
ttttttggttatttataatagtgccctaagaagtggagaattctagataataacacatatatacatactttatgcagttaaagtttaagttcctatacttctaattaaagattgggtatttaatgatgacagttctttttgcctttgtacgcattcacaattttttttgttactttattgaagkaccaaaagtacttcttacatatataattcttgcttattcattctaaggtgtgaaatagcctttggggataggggaagggaactgagcca

SEQ ID NO: 560792 - DNA, 273 bp, Homo sapiens
ttttttggttatttataatagtgccctaagaagtggagaattctagataataacacatatatacatactttatgcagttaaagtttaagttcctatacttctaattaaagattgggtatttaatgatgacagttctttttgcctttgtacgcattcacaattttttttgttactttattgaagtaccaaaagtacttcttacatatatrattcttgcttattcattctaaggtgtgaaatagcctttggggataggggaagggaactgagcca

SEQ ID NO: 560793 - DNA, 528 bp, Homo sapiens
ttctctgtcttgtggaatagtgtgaaaggattggtatcatttcttctttgaatgagagaagacattctttgaatgtctgctagaattctgctgtgaatctgtctggtccttgrctttttttgttggtaattttaaaattaccatttcaatcttgctgcttgctttattggtctgcttggggtatctaattcttcctgatttaagctaggagggttgtatttttccaggaatttatccaactcttctaggttttctagtttatgtgccaaaaggtgttcatagtacccttgaataatctttaatatttcagtggtgtcagttgtaatatcccctgtttcatttcttagtgaggttatttggattttctctcttcttttcttggttaatcttgctaatggtctatcaattttatttatcttttcaaataaccaactttttgttttatttatgttttgtatttgttgtttttgctgttgttgtgtcaatttcatttagttctgctctgaccttggttatttcctttgtttg

SEQ ID NO: 560794 - DNA, 399 bp, Homo sapiens
gaggttatttggattttctctcttcttttcttggttaatcttgctaatggtctatcaattttatttatcttttcaaataaccaactttttgttttatttatgttttgtatttgttgtttttgctgttgttgtgtcaatttcatttagttctgctmtgaccttggttatttcctttgtttgctgggattgggtttggcttgttcctgcttctctggttccctgagatgtgaacttagattgtctctttgtgctctttcagactttttcaagtaggtgtttagggctacaaactttcctcttagcactgcctttgctgtatcccagaggtcttgataggttgtgtcatccagttcgaagaaattttttacatttccatcttgatttcatttttcatccaat

SEQ ID NO: 560795 - DNA, 399 bp, Homo sapiens
gaggttatttggattttctctcttcttttcttggttaatcttgctaatggtctatcaattttatttatcttttcaaataaccaactttttgttttatttatgttttgtatttgttgtttttgctgttgttgtgtcaatttcatttagttctgctctgaccttgrttatttcctttgtttgctgggattgggtttggcttgttcctgcttctctggttccctgagatgtgaacttagattgtctctttgtgctctttcagactttttcaagtaggtgtttagggctacaaactttcctcttagcactgcctttgctgtatcccagaggtcttgataggttgtgtcatccagttcgaagaaattttttacatttccatcttgatttcatttttcatccaat

SEQ ID NO: 560796 - DNA, 604 bp, Homo sapiens
tcatttttcatccaatgctcattcaggagcaggttatttaatttccttgtatttgcatggttttgaagattccttttggagttgattttcagttttattccactgtgatctgagagagtgcgtgatacaattccaactttcttaaatttactgagactcgttttatggtctatcatatggtctatcttggagaaaattccatgtgctgttgaatagaatgtgtattctgtggttgttggatgaaatgttctgtatatatctgttaagtccatttgttccaaagtatagtttaaatccagtgtttctttgttgactttgttttgatgagctgtctagtgctgtcagtggagtattgaagtcccccattattattgtgttgctgtctatctcatttcttatgtctactagtaattgttttataaatttgggagctccagtgttaggttcatgtatgtttaggattgtcatatttttctgttggatgagacctttaccattatgtactgtctgtctttgtctcttttagctgctgttgctttaaagtttgttttgtctcatatgagaatagctaccrctgctcgcttttggtgtccatttgcatgaa

SEQ ID NO: 560797 - DNA, 510 bp, Homo sapiens
ttggaattctgacttcatgaactgggcagctctcctacctacccttcctatccgtcttatgctctgacrtcctgcaacaaattgcactatgttgttggctgtaggttttttatagatgctttttttggtagttagaattccattctattcctagtttgttcaatgcttcttataaaaagtgttagattctgtgaaacatgtttagtgtatctgttgagataataatattaatatgttagtcagtctaggtacaggcttgttagtagtgttgatcttttcaaagaactggcttttgattttattagtgttttcacagttgttttcttattgtctatttcattaagttcttctataattctttttatttttttctttctgcttgttttatgtttagtttgcttttttgcttccagggtcataaagtgggaggtttagttgttgatttgaagtcctctttttaaatacaaacatttacacgtagaagtttctaagtgccttaactgcttatat

SEQ ID NO: 560798 - DNA, 510 bp, Homo sapiens
ttggaattctgacttcatgaactgggcagctctcctacctacccttcctatccgtcttatgctctgacatcctgcaacaaattgcactatgttgttggctgtaggttttttatagatgctttttttggtagttagaattccattctattcctagtttgttcaatgcttcttataaaaagtgttagattctgtgaaacatgtttagtgtatctgttgagataataatattaatatgytagtcagtctaggtacaggcttgttagtagtgttgatcttttcaaagaactggcttttgattttattagtgttttcacagttgttttcttattgtctatttcattaagttcttctataattctttttatttttttctttctgcttgttttatgtttagtttgcttttttgcttccagggtcataaagtgggaggtttagttgttgatttgaagtcctctttttaaatacaaacatttacacgtagaagtttctaagtgccttaactgcttatat

SEQ ID NO: 560799 - DNA, 510 bp, Homo sapiens
ttggaattctgacttcatgaactgggcagctctcctacctacccttcctatccgtcttatgctctgacatcctgcaacaaattgcactatgttgttggctgtaggttttttatagatgctttttttggtagttagaattccattctattcctagtttgttcaatgcttcttataaaaagtgttagattctgtgaaacatgtttagtgtatctgttgagataataatattaatatgttartcagtctaggtacaggcttgttagtagtgttgatcttttcaaagaactggcttttgattttattagtgttttcacagttgttttcttattgtctatttcattaagttcttctataattctttttatttttttctttctgcttgttttatgtttagtttgcttttttgcttccagggtcataaagtgggaggtttagttgttgatttgaagtcctctttttaaatacaaacatttacacgtagaagtttctaagtgccttaactgcttatat

SEQ ID NO: 560800 - DNA, 510 bp, Homo sapiens
ttggaattctgacttcatgaactgggcagctctcctacctacccttcctatccgtcttatgctctgacatcctgcaacaaattgcactatgttgttggctgtaggttttttatagatgctttttttggtagttagaattccattctattcctagtttgttcaatgcttcttataaaaagtgttagattctgtgaaacatgtttagtgtatctgttgagataataatattaatatgttagtcagtctaggtacaggcttgttagtagtgttgaycttttcaaagaactggcttttgattttattagtgttttcacagttgttttcttattgtctatttcattaagttcttctataattctttttatttttttctttctgcttgttttatgtttagtttgcttttttgcttccagggtcataaagtgggaggtttagttgttgatttgaagtcctctttttaaatacaaacatttacacgtagaagtttctaagtgccttaactgcttatat

SEQ ID NO: 560801 - DNA, 193 bp, Homo sapiens
ggcccccatctgcagaggccaacagtttctgaggagtgaccttcctcagaaaacagggtcttggaggagacagtcagaggarggggccttttcctccccactgcacatcccctcgtggggattggaaagtgagggtctctgcccacaagttggcagtcaccctaagctcttttgtgggaggaagcatagggaa

SEQ ID NO: 560802 - DNA, 193 bp, Homo sapiens
ggcccccatctgcagaggccaacagtttctgaggagtgaccttcctcagaaaacagggtcttggaggagacagtcagaggaaggggcctyttcctccccactgcacatcccctcgtggggattggaaagtgagggtctctgcccacaagttggcagtcaccctaagctcttttgtgggaggaagcatagggaa

SEQ ID NO: 560803 - DNA, 650 bp, Homo sapiens
caccaacatggcacatgtatacatatgtaacaaaccagcacgttgtgcacatgtaccctggaacttaaagtgtaataaaaaaatatatatatatatatatataagtaaatggctgatcaggaaaaaaaatttaggaagtagaattcaacaacacatcaaaaagattatacatcatgactaagtgggaattatctctggcatgcaaggttggtttaacatatgtaaatcaatcaatgtgatatatcacattaacaaaatgaaagataaaaccacatggtcacctgaattgatgcagaaaaagcatttaacaaaatttagcaacctttcttgataaaacctcttaatagtttatgtatagaaggaaagttcctcaacataataaagaccatttatcagaaacccatggcctacatcatagtcagtggggaacaactaaaagcttttctactaagattgagtacaagatagsgatgcccagtctcatcacttttattcaacatagtacttgcaagagcaatctgatgagaaaaaaaaagcaactaaattaaagaagtaaaattatctctgtttgcagatgacaagaattcattaattcctttacacatttttaaaagtcctccaacatgttttcttattctcgtttgctcata

SEQ ID NO: 560804 - DNA, 354 bp, Homo sapiens
gtttctatgcccaacttaatttttstgtagaatctttaactagttgtccagtcccaagaaacccatcaaacttcacatgtctttactgacaaatggacattgcatttctcattgattttactatctctggggaggtgtgctccctgaaggcagcacttttatttccagtgaaaaaggcacggttaggcaatatgggaaaggcatttctgaatttcaggaccagtcctaaaattgagtttgggtcagttctctctagaaaatattctattttatctacaaagcaaaattattttattccttacaataatatcagagacagtttcgctactatttacattcagtcttttgccctaa

SEQ ID NO: 560805 - DNA, 354 bp, Homo sapiens
gtttctatgcccaacttaatttttgtktagaatctttaactagttgtccagtcccaagaaacccatcaaacttcacatgtctttactgacaaatggacattgcatttctcattgattttactatctctggggaggtgtgctccctgaaggcagcacttttatttccagtgaaaaaggcacggttaggcaatatgggaaaggcatttctgaatttcaggaccagtcctaaaattgagtttgggtcagttctctctagaaaatattctattttatctacaaagcaaaattattttattccttacaataatatcagagacagtttcgctactatttacattcagtcttttgccctaa

SEQ ID NO: 560806 - DNA, 354 bp, Homo sapiens
gtttctatgcccaacttaatttttgtgtagaatctttaactagttrtccagtcccaagaaacccatcaaacttcacatgtctttactgacaaatggacattgcatttctcattgattttactatctctggggaggtgtgctccctgaaggcagcacttttatttccagtgaaaaaggcacggttaggcaatatgggaaaggcatttctgaatttcaggaccagtcctaaaattgagtttgggtcagttctctctagaaaatattctattttatctacaaagcaaaattattttattccttacaataatatcagagacagtttcgctactatttacattcagtcttttgccctaa

SEQ ID NO: 560807 - DNA, 443 bp, Homo sapiens
ttcttcctgatcttatccaagaccaccaaggcagtgcctctgagtctgcaagaacgatagtgtaactgggcttggagttccccttaatgcagatatggctgcagtaaccaaaaacttagatcacaacacccaaatccctttgaatacttggaaagccttcccaagaargacaggtacaaacaagccctacttattatagtctgcaaagtgcataataaatgcactgatattatagtctgcaaagactataataaatacctaactcttcaatgcccagacaccaacaaacatccacaagcatcaaaaccatccaggaaaacaagacctcaccgaacaaactaaataaggtagcagggacccatcccagagaagcagagatatgtgacctttcagacagaaaattcaaaatcattttttgagaaaactcaaagaaaattaaggta

SEQ ID NO: 560808 - DNA, 617 bp, Homo sapiens
gctacataaaccaaacagacaaattctgttatcaaacttaaaaaaaaaaaaaaaggaagcaaaaaaacaaaaactctcttgttttcccagtcaatcctttttcaatggtttcagagaagaattcagggctggctggactagagacctcttcagctatcttactgggcagttgggtctctgctcctggtggtcccaggagccaccccttgggcctcagaagccaacatctttcagacagcatggaaacrtatctggaaataaaaccttcccttcccttttcgacacaatgagtattagtcaggaaaccctggctgaccactcattagaatgccagattttactctttctccctgtagaaagagtgtctgtcatcagggaggtgatgtcctcaactgctgcagaaggggaataaattatccctttcttgacatcccctgctaacttgttagtatcactaacaactgctcaaaagcagcagagcaagagaggtggaaatctaaagtgggggaaaaaagttgccactttcaagcttacattgggcagagtcttatttagagcaattagccagcatcagttttgctcaaaaatcccctatatggactcctatatggcaatgc

SEQ ID NO: 560809 - DNA, 578 bp, Homo sapiens
caaggtgggcggatcacttgaggtcaggaatttgagaccagcgtggccaacatagtgaaacctcgtctccgctaaaaatacaaaaattagccaggtgtggtggtgcacacctgtaktcctagcaactcgtgaggctgaggcaggagaattgcttgaacccaggaggcagaggttgctgtgagccaatatcgtgccactgcactccagcctgggtgacagagtgagagagactgtcaaaaaaaagaaagaaagaaagaaagaattaatgagaataattttttctataattaaccaaagaggtaagttctaaaaaagtatttgtttttccacccctaaattttggcaactataaataaatgagcaaagagctttccttcattattattctttttgttgataaaggtggaagaagtagttgaagccaaattctctgagtgacttaaaaagataatattttgtagaggttgcaaaggttatgaaagtgtcagttctaattttttaaatgaatcacacatccagaagttgatgcagaaaattaacctcatcatgtattttataaagttctatgaggaaaaata

SEQ ID NO: 560810 - DNA, 634 bp, Homo sapiens
tgagtggacctaaggacctaagggtctgtgtaaccataaactcaagctcttcagcaggtaagcgaccttctgagataataatggaggaaggagggaggcattccagtgacatttggaagaaagaatctcttcctcctttgaatgcccagagcactttaccgatagatatttatttattttttcatttttttaaataatgtcaacttttattttagattcaggggggtacatgtgcaggtttgttacatgggtatatttcatgatggtggggttggggcgggattaatcccatcacccaggtagtgagcatagtacctaatagttagcttttcaagcctttcctcaccccaccwccccttctagaagtccccagtgtttattgtcctatcattatttaaatcctcttgtttctcctaacaaatattaattttaatcataataaaaatctctaccattattgagttcttactttgctcctgagctcttttgaaagggcattgcatgcattcatacatttaatttgtataacacatttatgaggttgctcctattataagctttagtttatcaatttatcaacggagaagaaaaagattaagtgacttgccatgatcatacctggcacatagcaaca

SEQ ID NO: 560811 - DNA, 590 bp, Homo sapiens
aagagaaaagaattagaggtgtatcgggcattwctttttctatggattcttctttaacctgttctagtgccataaaaacaaaagcaaaaaaaaccaagaaggtaccagcatcactgcaggacaggcaatgctggctctggttcagggagttctaccagcaagaacagccaatgtgtcgagagaggaaagacccaattcaagggccaaatcaggccaggttaggaggtaggaaaagtagcccagaaaaaagacttgtttactgatcctgtctgagtgtgtcaacctgtgttcttagattatgtccactactgtgcatggaatccaaagcaatgtaagtttggaacttcttcccccaagcttcttgttctttgaactgtaattcttttacaagaggttctccctcctttacacatacacacacacacacacacacacttatgcacactcatagctgcaagcagaaaagcatttagtgactgcctcctgaatattataaacccaggtaaaatttgtctgcctttatctttcctccagctattaatcagaactggagatgactccgctagcttctagctacacttggaaagcat

SEQ ID NO: 560812 - DNA, 537 bp, Homo sapiens
aaggcccaaactgcagagctactcctgaatactctctctctctttctcttgactattctacttgtctgagagcagcgtggatacatcccaaactagggcctgataaagaatcattatggacattggttagtaacaaatatgatttcttagaaggagcctcagaacatcaggagaaaatgtcaggtgcctacagtctagaatgcttggcctgtgttatggtgcataattctttgtcaagttatggtgtacagtattctctatttagtcaattgtttttctctcattctttttgatgagccttttttttggcttggatgacccaagataggttctaaaataayttgggttacccaaagcatttttcagtgtgagtatgaaatagcagtggttgttattcctgtagacaatcctagtttgcattatttctagcaagaacttcaaccaggatagtgcatgcatctttatttcacacctagagcttcgtccaactcttttctcatgggcttgagtcaagatgcggtagtgcttggagaggta

SEQ ID NO: 560813 - DNA, 601 bp, Homo sapiens
atgtttcagcaaagagaccggaagcattttgcccctgccctagagatttgtggaactttgaacttgagagagacgttttagggtacctggcggaagaaatttctaagcagtaaagcatttaagatgtaacctgggtgctgttaaaggcattcagtttgataagggaagcaaagcattcagtttgataagggaaaatctgcagcctgactatgtgatagaaaagaaaaacacattttcctgggagaaattcaagctggctgcagaaattttcataagtagtaaggagcttagtgttaatccccaggacaatgggggaaatgtctccagggcatgtcagaagttcttcacagcagcccctcccatcacaggcccaggaggaaaacgttgtttcatgggccgggtccagggtccccgtgctgtgtgcagactagggacttggtgccctgtgtcccaggcactctagcagtggctgaaaggggccaaaatacagcccgggctgtggcttcagagggtggaagccccaagccttggcagcttccccattgtgttgagcctgygggtgcacagaagtcaagaattgaggtttgggaacttctgccta

SEQ ID NO: 560814 - DNA, 601 bp, Homo sapiens
atgtttcagcaaagagaccggaagcattttgcccctgccctagagatttgtggaactttgaacttgagagagacgttttagggtacctggcggaagaaatttctaagcagtaaagcatttaagatgtaacctgggtgctgttaaaggcattcagtttgataagggaagcaaagcattcagtttgataagggaaaatctgcagcctgactatgtgatagaaaagaaaaacacattttcctgggagaaattcaagctggctgcagaaattttcataagtagtaaggagcttagtgttaatccccaggacaatgggggaaatgtctccagggcatgtcagaagttcttcacagcagcccctcccatcacaggcccaggaggaaaacgttgtttcatgggccgggtccagggtccccgtgctgtgtgcagactagggacttggtgccctgtgtcccaggcactctagcagtggctgaaaggggccaaaatacagcccgggctgtggcttcagagggtggaagccccaagccttggcagcttccccattgtgttgagcctgcgggtgcacagaagtcaagaaytgaggtttgggaacttctgccta

SEQ ID NO: 560815 - DNA, 590 bp, Homo sapiens
gattggaatcacaggtgggaccttcagagcccattttcttaacctgtgctttaggaagcctgagaggtgaaatggtattggaatcccaggrtttgcccccaaaataggggatttgtggctaagatgctgctacccccaagagttaataaatggcaacaatgtagatgtatttagtacagtcaattttttattcaatttgacttaggtaacaagatataaaaaaatagcattcagagtttataaagagtttacatttacaatcctgaaatttcaaattatctcctaaaataattcgtaaaatatgatgacactgagccagcattcccgtgtgccaagagtttcctaaaactcagtgctgttgttctctttagatgggggatatattcttcaacctgccaatctctacccagcaggccttatttatctaagttactacctggtctgtgcaagcatttgattttgcaattcctgggctagaggtgaaagatcagtctaacagcagacacttcagagggtaggctgaactgggagtgggcaaagagactggaacatcttcccaaattttctggttattgggaagctttcctcat

SEQ ID NO: 560816 - DNA, 340 bp, Homo sapiens
tggttgtcctttgaaacaccaatgtctttaatttttaagaaattttaaatatctaatttttattttgttgctcatgtttttggtgttacagctatttctttgctagatccaaaatcctgaagattttcccatatgytttattctagctcttgcatgtgtgtctttaattcatttgagttaatatttttgtatgctttggggtaagggttcgaatttattattttgcaagtggtgatccacgtgtacgttgttgacccagtttgttcaaagactgtctcttcctcattgaattgcacatggcaccactgtaagaatccattgactatagacacatagtttt

SEQ ID NO: 560817 - DNA, 340 bp, Homo sapiens
tggttgtcctttgaaacaccaatgtctttaatttttaagaaattttaaatatctaatttttattttgttgctcatgtttttggtgttacagctatttctttgctagatccaaaatcctgaagattttcccatatgctttattctagctcttgcatgtgtgtctttaattcatttgagttaatatttttgtatgctttggggtaagggttcsaatttattattttgcaagtggtgatccacgtgtacgttgttgacccagtttgttcaaagactgtctcttcctcattgaattgcacatggcaccactgtaagaatccattgactatagacacatagtttt

SEQ ID NO: 560818 - DNA, 340 bp, Homo sapiens
tggttgtcctttgaaacaccaatgtctttaatttttaagaaattttaaatatctaatttttattttgttgctcatgtttttggtgttacagctatttctttgctagatccaaaatcctgaagattttcccatatgctttattctagctcttgcatgtgtgtctttaattcatttgagttaatatttttgtatgctttggggtaagggttcgaatttattattttgcaagtggtgatccacgtgtacgttgttgamccagtttgttcaaagactgtctcttcctcattgaattgcacatggcaccactgtaagaatccattgactatagacacatagtttt

SEQ ID NO: 560819 - DNA, 601 bp, Homo sapiens
agggttgacattttatttcaactcttctcttagacagtttggtctgtattggttaagtccatttattatgggttgatttttcaatctcaaaatattacttttcctagattttgtagccaattactagaaagcactgtatatgaaccccttatgcatgaactacaatgatatccttttattcttttaggacacagttccctaccgatatcctagcccttctaactaacatttgtgtctattagaggttctcacaagttatcgttttaagctaaaggtgcggttccagaaatacaagcaatttgagggaccactagggctcgatggaaaagaaaggggtcttttagtacgcttcaaataatgtaacctttatagccttattgacaamtgataactcatatacaaatgaatagataaatcatctcttgtggtgagctatagcttttgactattatcctgacctgctgtatttattctagaaattaattttattttcttctttcttgagttgtttattcatctgtccattttctcccctctactcttcctttctattacctttgaaaattcagtattatctatacccaggcaatatataaattat

SEQ ID NO: 560820 - DNA, 500 bp, Homo sapiens
tgttgttgggcagagaggaaggaacatccctccttatcccgctccaaagctgaaatacttataagcatttaacctcaaagaagaattgggccaggaagttgtgttacagagaagtctaacgtttgatttttgcccacaagaggtttaaaatctactaaggaataatgacaataagaagccattaaacaaatactaaatgaataaaatacattttattaacaagtgccttgaactctaaaagcacctaaaatattagaaaatagtaagtactgaagttatctgtggaatttaattgtgttatttatcttgaggctattattacttatttttaaagcatgtatgtcattctcataatagactatatctctaaaagaaaaggtgtaagaaaraaaaactactaaatctctgaactctaggagagtgacttctcttagcattttggtttatattcttccagttgtctttatttttctcttcttacatagataagatcatatgga

SEQ ID NO: 560821 - DNA, 262 bp, Homo sapiens
ctactggtctccttccatgggaaagttctagatactatgattttccattgacaatttacctttatttcttcatattcctcctcttcccccaacccctatgcatcacartcgataaattgacccaaactgaggaataaattgggcttaactgaggctctatgcaaagtctctcctaaacattacttcattcagttctaactctggccccactgcaagcacataaaaaggaaaggtgaggagtttatccggggatcacacagct

SEQ ID NO: 560822 - DNA, 625 bp, Homo sapiens
tcatagtcacacagatgcttcagggcaggcctatttcttgcatacctrtgatttcaggacattttcagaagtcccagacctagaacccataggtggagaatccaaattttttgtctgaggacaatgaaggtgtcagtgaatatctactcccttacaagagctttgttacaattgttcaaacctatcaacttctagatggggaagactggaagaaggttcaagaagtgtttcctcagaaacacccaaaatgcacgagaaggaaatagacgcaccaaagttacctcaatatagtgatcatcacagaataagaaacttgagcggccgggtgtggtggctcgtgcctgtaatcccagcactttgggaggccgaggcgggcagatcactggaggtcgagagtttgagaccagcctgaccaacatggagaaaccctgtctctactaaaaatacaaaattagccaggcatggtggtacatgcctgtaatccagctactcgggaggctgaagcaggagaattgctcgaacccgggaggtggaggttgcagtgagccgagatcacgccaccgcactccagcctgggcaacaagagtgaaactgagaaagaaacaaagaaagaaaaagaaggaag

SEQ ID NO: 560823 - DNA, 625 bp, Homo sapiens
tcatagtcacacagatgcttcagggcaggcctatttcttgcatacctgtgatttcaggacattttcagaagtcccagacctagaacccataggtggaraatccaaattttttgtctgaggacaatgaaggtgtcagtgaatatctactcccttacaagagctttgttacaattgttcaaacctatcaacttctagatggggaagactggaagaaggttcaagaagtgtttcctcagaaacacccaaaatgcacgagaaggaaatagacgcaccaaagttacctcaatatagtgatcatcacagaataagaaacttgagcggccgggtgtggtggctcgtgcctgtaatcccagcactttgggaggccgaggcgggcagatcactggaggtcgagagtttgagaccagcctgaccaacatggagaaaccctgtctctactaaaaatacaaaattagccaggcatggtggtacatgcctgtaatccagctactcgggaggctgaagcaggagaattgctcgaacccgggaggtggaggttgcagtgagccgagatcacgccaccgcactccagcctgggcaacaagagtgaaactgagaaagaaacaaagaaagaaaaagaaggaag

SEQ ID NO: 560824 - DNA, 625 bp, Homo sapiens
tcatagtcacacagatgcttcagggcaggcctatttcttgcatacctgtgatttcaggacattttcagaagtcccagacctagaacccataggtggagaatccaaattttttgtctgaggacaatgaaggtgtcagtgaatatctactcccttacaagagctttgttacaattgttcaaacctatcaacttctagatggggaagactggaagaaggttcaagaagtgtttcctcagaaacacccaaaatgcacgagaaggaaatagacgcaccaaagttacctcaatatagtgatcatcacagaataagaaacttgagcggccgggtgtggtggctcgtgcctgtaatcccagcactttgggaggccgaggcgggcagatcactggaggtcgagagtttgagaccagcctgaccaacatggagaaaccctgtctctactaaaaatacaaaattagccaggcatggtggtacatgcctgtaatccagctactcgggaggctgaagcaggagaattgctcgaacccgggaggtggaggttgcagtgagccgagatcacgccaccgcactccagcctgggcaacaagagtgaaactgagaaagaaayaaagaaagaaaaagaaggaag

SEQ ID NO: 560825 - DNA, 435 bp, Homo sapiens
gaggtagcacaggaccgtcttcaaaatgacartaccattttacattccaccagcagcgtgtggagtttccagtttgtccacatccttgccatttcttggtattgtctgtctttttgattctttagagtattctttataaagaaaactccagaaagtgtctcaggttgtttgcagcacagatattttctcatatccattattttcccctaagggttgtaagtagaagagtggaggagtaggatatgggtataataatctttttaatgtcaaaagtatttttgactagccctgtatttcaccagtaaccccagacaggaaccattgttctatctgcattggaatattgtcattatagtgctgcataagccatcatgcttttaaagtaacaaagattaaaattcatatccctcagactgcttagttaccaacacttgt

SEQ ID NO: 560826 - DNA, 516 bp, Homo sapiens
ttttgttactatgattatatatttatttctattaaaatactaaaattatagtgcagattgtagtggagagctttagcagttatttacctgatttcattcaatataaacaggcaaaccagatacttttatgggaaacaatttgctctggttatcagccataatcttcatagaatcagcctcaacagatgtctttctaatagaaaaccaatgaggcacagtgttatccctttgtgtagcctgtagagtcacatagctgatcagaacctgcgatgcccctcttaggatacacaaaacttaatagggctggtcattgtgctatagttgcaaaacgaatgcagatactctacactcacagcatacagacaacatgtacatcatattttcataaacgatgttgcttatcataatcaatctaatatttattgatcttaccaccatgtatctctgggctaagctagtggtcagaaaastagggttaggcctacattctctttttgtaaataaagttttattaga

SEQ ID NO: 560827 - DNA, 554 bp, Homo sapiens
ttcactatgttggccaggctgatcttgaactcctgacctcataatccacctgcctcggcctcccaaagtgctgggattacaggcataagccaccgcgcccggcctgatgtttggttttctattcctgaggataatgacttccagctgcatccatgtccctgcaaaggacatgatctcgttcctttttatggctacgtagcattccgtgatgtatatgtaccacattttctttatcctgtctatcattgatgggcatttgggttgattccataagacccctatttttcaaagcatcccaggtgatcccaatgtgtaaagtgaagaaccagcaccctcagcaaaaattttgattctatgtttctcaataaacaagtcytaagctgccaaaacttaagcactgagtgatgtcttaaggtctcagttttccctttaaagcatgatgaaactggattagatccgtgttttttagctctgcccttggaaactcttatgatttctgaaaacacattctgaagggaatgaaaacagtaggacagacaagaatagataaaatt

SEQ ID NO: 560828 - DNA, 509 bp, Homo sapiens
ccaaagctggtattctgagaggaaaaacaaaattgacaaccccctagctagactaataaaaaaaattagagggagaacacaagtcacaaataccaagaatgaaaagtactttatcatggcagatcctacacatgttaaaaaagtaactccatcaacaaaccaataaatttgacaatttacctaagmcaattttttctaaaacatactactcacaaaattgatacatgaagaagcagaaaatctgaatataattattagagaaattaaatttggtatcaaaaacatttctcacacaaaaaaaaaacaaaacaaacaaacaaaaaaaaaaaacaacaactggaagaccagatgattttactggtgaattctactgaatactcaaaaaagacataataccagtcttacataaaatctttcagatattggaatccactgcccagcagaagagggacacctccccagcaaaattatatgaggctagtgtaatcctaacaccaacgccagaccaa

SEQ ID NO: 560829 - DNA, 509 bp, Homo sapiens
ccaaagctggtattctgagaggaaaaacaaaattgacaaccccctagctagactaataaaaaaaattagagggagaacacaagtcacaaataccaagaatgaaaagtactttatcatggcagatcctacacatgttaaaaaagtaactccatcaacaaaccaataaatttgacaatttacctaagacaattttttctaaaacatactactcacaaaattgatacatgaagaagcagaaaatctgaatataattattagagaaattaaatttggtatcaaaaacatttctcacacaaaaaaawaacaaaacaaacaaacaaaaaaaaaaaacaacaactggaagaccagatgattttactggtgaattctactgaatactcaaaaaagacataataccagtcttacataaaatctttcagatattggaatccactgcccagcagaagagggacacctccccagcaaaattatatgaggctagtgtaatcctaacaccaacgccagaccaa

SEQ ID NO: 560830 - DNA, 532 bp, Homo sapiens
ttagacattttttactgtgccctttataataactctccatctgccttataaataataagttctagaattttgcttggtatctaaaataaacttactggtttatagacacctttacctgttttggaattcatgtctctctttctctttaacagaaaatgagcttcacttctcagaaacatgaaattggttatggtggatcaatgttcctgctagtaaccaggaaaaaaaagcatataaattacaaaaataatacacttaaagataccagagagctgtgaagtcaatgaggactcgatgaactaaaatttcagagtcaaaagaacrtttccagctgggcgcggtggctcacagctgtaatcccagcactttgggaggccgaggtgggcagatcacaaggtcaggagttccagaccagcctggccaatatggtgaaaccctgtccctactaaaaatgcaaaaattagcagggcatggtggcgtgtgcctgtagtcccagctacttgggaggctgagacaggagaatcacttgaac

SEQ ID NO: 560831 - DNA, 606 bp, Homo sapiens
tagaggccccatctctaaatgtagccacactaggggttagggtttcaacacaagaatttcggggtgacacaaacattccgtttctaacaaccagctcatacctacatctccatttgaagtcagtttcgatgacatgttctcagggactccttcctttccatgctccatagcatcctgtgtatggccttgtcataaaacttgccacattgaattgctattgcctataaacatgttactrtcgatgattatatatatataaaaaacatatttatgtgccaatatgtattatactatactatatataatattaaatatatacattatactatcttgacatataataggcacacaatgctgaatgaatgaatgtgtagaagagggagatagaaagatttgctcctgactctaattctcagcccagtggaaatgacattttcctaaacttcaatattaaatatctgaattcattagtcatatgccttatatggctagttctaacagaaatgtggctcttagaaacatacagttattaattcattcactgtatgttcatattagaaaagtgcctgttcatttcatgcagccatgtgaaaacactaatataaa

SEQ ID NO: 560832 - DNA, 537 bp, Homo sapiens
cctcgcctcaagtgatctgcctgcctcagcctcccaaagtgctkggattacaggcgtgagccaccacatgcggcccaagcattttataaagcaatgcgagttctcaatatctgcttaaaattcaaccaaaccactaagacatagctaaaattttgatcaagttaaaaattaagaacctctctggagttaatgtctactaagatttttaaatgtatttattagtttttcgctctgtggttctaaatagaatatgctggagtttatggacaaactatgatttacaggcaagcttaactagccagcatctgccctgcagaaaatgaaaacctaggcattcatttcccttaatgctacttgtataagaagtaaaattagtcatgctgaccacctggctgatcctaatttcatagattgaacaaaaaagaaattgtgtaggtctccatcaaggaaagagaattctctggaataaagatactgcaaatctaagagtgaggttgcacatttctctttaatgaattatggaaaatagacaccaac

SEQ ID NO: 560833 - DNA, 537 bp, Homo sapiens
cctcgcctcaagtgatctgcctgcctcagcctcccaaagtgctgggattacaggcgtgagccaccacatgcggcccaagcattttataaagcaatgcgagttctcaatatctgcttawaattcaaccaaaccactaagacatagctaaaattttgatcaagttaaaaattaagaacctctctggagttaatgtctactaagatttttaaatgtatttattagtttttcgctctgtggttctaaatagaatatgctggagtttatggacaaactatgatttacaggcaagcttaactagccagcatctgccctgcagaaaatgaaaacctaggcattcatttcccttaatgctacttgtataagaagtaaaattagtcatgctgaccacctggctgatcctaatttcatagattgaacaaaaaagaaattgtgtaggtctccatcaaggaaagagaattctctggaataaagatactgcaaatctaagagtgaggttgcacatttctctttaatgaattatggaaaatagacaccaac

SEQ ID NO: 560834 - DNA, 590 bp, Homo sapiens
ccatctctaccaaaaaacaaacaaacaaacaaacaaacaaaaaatttgttgagcatggtggtgcatacctstagttccaactcctctggaggctgaattaggaggattgcttgagcccgggaggtcaaggctgcaatgagcactgactgtaccactgtactccagactgggtcacacagcaaaactctgtctcaaaaaaaaaaaaattatctgaatcaaaacattggtttcatgttgcaaaagagcaatgtttaatgatactttcatatatattttataatttcatcttcattggaataaggatataaggcagtaattattattcctacatttcagtagagaaagctgagattcatacaagttaaggacctacattaagtaacagaagtagttataggcaacatcaaaaaggctattcaagtctcctaatttctataatagtttgaacaatttccaaacaggcttgaatacacaaaagcaattccagtccattacaagatattactacacacctagtagaacatctaaaattaaaaaatagtggcaataaaaagtttggcaagggtgtgtaaaaactggatgtatacatt

SEQ ID NO: 560835 - DNA, 364 bp, Homo sapiens
  misc_feature 292: n = A,T,C or G
ggctaaaatggcctgcaaccaaagcaagccaaatgccatctacctccacaaatacatacctgagttttggattttaccaccaactgcagagaaagccctacatttttcaraaaaatagaacccaagggtgtgccaatgcactggcaaagttggtccaagccacaaatctcatgcctttcaaggtcagtcacaagtgcagcccatgggcttgccttcctttgcaatacatttggaaggtagagctttctcaaaataaaaaaggagtcagggagaggtgttagttctttagctntgaaaaactaggaagttttacaggtccttacaacaaaagcagtgaatttctgagcctttggaacttaggctc

SEQ ID NO: 560836 - DNA, 364 bp, Homo sapiens
  misc_feature 292: n = A,T,C or G
ggctaaaatggcctgcaaccaaagcaagccaaatgccatctacctccacaaatacatacctgagttttggattttaccaccaactgcagagaaagccctacatttttcaaaaaaatagaacccaagggtgtgccaatgcactggcaaagttggtccaagccacaaatctcakgcctttcaaggtcagtcacaagtgcagcccatgggcttgccttcctttgcaatacatttggaaggtagagctttctcaaaataaaaaaggagtcagggagaggtgttagttctttagctntgaaaaactaggaagttttacaggtccttacaacaaaagcagtgaatttctgagcctttggaacttaggctc

SEQ ID NO: 560837 - DNA, 552 bp, Homo sapiens
tcttcagttataaaagcaaattattctgggggaaaaaaaagaataagagacagtgtccataaccattaagttaaatttactgagattttaactttggagcataattaccaacaatttcacaaagaacaaatgtgacaaayagcaaacagtttcaaatatgttagatattaatccaagtatattaaaaatacttttaaatattaattgtgtaaatgtgctaaataaaagaaagagatttttttttcccaggctggagtgaagtggcatgatctcacctcactgcatcctccgcctcccgggttcaagtgattatgctgcctcagcctcccaagtagctgggactacaggcacatgccaccatgcctggctaatatttgtactttcagtagagacttggttccatcatattgtccaggctggtcttgaactcctgccctcaagtgatccgctgccttggcctcccaaagtgttgggattacaggcatgagccactgcacccagccagaaagagatttttgacaaatattttttaaaggcatgtttatttaaaaa

SEQ ID NO: 560838 - DNA, 552 bp, Homo sapiens
tcttcagttataaaagcaaattattctgggggaaaaaaaagaataagagacagtgtccataaccattaagttaaatttactgagattttaactttggagcataattaccaacaatttcacaaagaacaaatgtgacaaatagcaaacagtttcaaatatgttagatattaatccaagtatattaaaaatacttttaaatattaattgtgtaaatgtgctaaataaaagaaagakatttttttttcccaggctggagtgaagtggcatgatctcacctcactgcatcctccgcctcccgggttcaagtgattatgctgcctcagcctcccaagtagctgggactacaggcacatgccaccatgcctggctaatatttgtactttcagtagagacttggttccatcatattgtccaggctggtcttgaactcctgccctcaagtgatccgctgccttggcctcccaaagtgttgggattacaggcatgagccactgcacccagccagaaagagatttttgacaaatattttttaaaggcatgtttatttaaaaa

SEQ ID NO: 560839 - DNA, 451 bp, Homo sapiens
ctatataattgaaaagaatgaaatatttaggaatgaggctaatcaaggaacggaacaaattttacaatcaaaaacttgaaaacattgctggaagaaagtaaagaagatgcaagcagtggaaatatgccccatgtgcatggattcaaagacttaatgttgttaagatgtcaatacgacccaaatgatatacagattcaatacaattcttaatgaaatctsaacaatgtttacttttcagaaatagaaaaatccactctaacccccaccccaatggaataatctttacatcaagggaccccaaataacgaagataatcttcaaaaagaagagtgaagtttgaggtcctacactttctgatttcaaaccttattacaaaattacttacagtaatcgaaagtctggtactggcataaacagaaacatataaaccaaggaaataaaatagaggcca

SEQ ID NO: 560840 - DNA, 549 bp, Homo sapiens
agcaaaggttgcaatgagcagagatcatgccattgcactccagcctgggtgacagagcgagactccgtctcaataaataaataaataaataaataaataaataaataaataaatgaagtgactgctcctgttctccgggctccctgtccccactgtgattttggagcaatgttgaagcaaagcctgagtgctgtggtgacccggctggatgtgtgtatgctgagggcggctccaacataccaacctcctcaccacctctggggccctctgaaattctgggcaccaaaaagcacaagagggaggccaggggttgcagctcctcatgagcctgcagccacccctgggtgcaaacagcctgggcacagtggacagcatgttgatggcagaggcagacagacttctgagcagaaaaaggtggtctyggtgaaatcccacctccaagcctaggacagcttgaagcctggggctgggctgacagttccggtggagtcctcagcctggagtgagaacttatgatgtttttccatgcctgtgccttgccacccaggg

SEQ ID NO: 560841 - DNA, 621 bp, Homo sapiens
gggtatacaagtgattaaatttgaaactayttttaggtatttgatgggatgcctgataaaatcaataatgggttgtattttggaccaagatcaatgggtaaatatgacaagcacatttattttcacttaaaaaaagcgggaaaaaatagcttttactgaatatatctgtatttaacatgggtaaatataaagctccagaaaagctcatgttttattaaccatagtatctcgatttggaaagagataaaatgttctccaggttactgtcactcttcagaagccttttgtgaaagaaactattaactagtgaacctgccccctgcatagacattatgatagactttgtttcttcatgttctcataataattttgtgaggtgagtaatacctatacgttgcttagatgagaaccccaaggttcagagagttttgttagttcatgattacacaacatataaatagcagcacagctggaactcaaactcatgccctgaaagccagtgtttcctacaaccctttacagtcatattttaagagaaaaaaaattctaggaagcattcccaggagcaatgagttccacggaattagaaatttataaatggaggcccccttggcttgataa

SEQ ID NO: 560842 - DNA, 621 bp, Homo sapiens
gggtatacaagtgattaaatttgaaactacttttaggtatttgatgggatgcctgataaaatcaataatgggttgtattttggaccaagatcaatgggtaaatatgacaagcacatttattttcacttaaaaaaagcgggaaaaawtagcttttactgaatatatctgtatttaacatgggtaaatataaagctccagaaaagctcatgttttattaaccatagtatctcgatttggaaagagataaaatgttctccaggttactgtcactcttcagaagccttttgtgaaagaaactattaactagtgaacctgccccctgcatagacattatgatagactttgtttcttcatgttctcataataattttgtgaggtgagtaatacctatacgttgcttagatgagaaccccaaggttcagagagttttgttagttcatgattacacaacatataaatagcagcacagctggaactcaaactcatgccctgaaagccagtgtttcctacaaccctttacagtcatattttaagagaaaaaaaattctaggaagcattcccaggagcaatgagttccacggaattagaaatttataaatggaggcccccttggcttgataa

SEQ ID NO: 560843 - DNA, 559 bp, Homo sapiens
actgagaccaaaaccctaaaataatggtaactgagaatggcgttaaaagcctaatggtcacactcacctaagtaaaatcataaccaaaaggaagaaactgttaaacaaaattaggagatgccattattttggactgagttcatacaataggccccagcagaccagaccaaaccaaaatagagtcactcatgctaagtgtgacataatcaaattaaaattttttwaaaaaatcctaaacaggtaagtcctaaaatagacgcgaattttctttctgccctccaaaaaacaagagattccaacacagagaggtcccctgtactctctttcaaaaaaataacctaaaaaaaccatcttacaaagctcactgttctgctatttcccagtaaaacttaagaccaaataagtgcctttacgatagtggtagagtgaaatcaatgcctacagttttggttcacctctcaattttgaggggagcattgttaaatgtagcctaaaactgcctccttacatattttaagcttgccctaaaagtttctctgtacctagtaaactgtaacct

SEQ ID NO: 560844 - DNA, 565 bp, Homo sapiens
tgtccccatgtagctatgagattttggataagtaaggataaagaccagcatgataaaccaacgtgctgaccatgtgctgagcattgttctaagtgtttcaaatgttttaatagatttaatcctcaaaacaaccctataagataagtatgattgttgtccctgatttacagttggggcacatggtgggtaagaaaggtcacacagacagtagatggtggggcttggatttgaatccaygcagtcaaatcttgggagcctcgttcttaaccactatgtcatacttctatagccattgcagtaaatgcatgtggaatgaatggatacatgaatatacaccctatggtactctctagatgttaattttctcaggttgttatataatttctgttctgcctgtcttcattacacacacacacacacacacacacacacacacattgtcagtccttcaatggacgagagcttcagaaagcttctcttcaatagattgaaaggaaatattttgagactttaattcatctttaaattttttgaatttgataatttgttgagtttggcaattaaa

SEQ ID NO: 560845 - DNA, 565 bp, Homo sapiens
tgtccccatgtagctatgagattttggataagtaaggataaagaccagcatgataaaccaacgtgctgaccatgtgctgagcattgttctaagtgtttcaaatgttttaatagatttaatcctcaaaacaaccctataagataagtatgattgttgtccctgatttacagttggggcacatggtgggtaagaaaggtcacacagacagtagatggtggggcttggatttgaatccacgcagtcaaatcttgggagcctcgttcttaaccactatgtcatacttctatagccattgcagtaaatgcatgtggaatgaatggatacatgaatatacaccctatggtactctctagatgttaattttctcaggttgttatataatttctgttctgcctgtcttcattacayacacacacacacacacacacacacacacattgtcagtccttcaatggacgagagcttcagaaagcttctcttcaatagattgaaaggaaatattttgagactttaattcatctttaaattttttgaatttgataatttgttgagtttggcaattaaa

SEQ ID NO: 560846 - DNA, 616 bp, Homo sapiens
tggtcttgatctcttgacttcatgatccacctgcctcagattcccaaagtgctggtatcacaagtgtgagccaccatgcctggccaaagatattatctttcatacactgttgctatgaggattgagatattgattataaaacatttagcacagtgtccagtacaagctcttgcctaataaatattagctttttttttctttttttgacacagtcttattctgtcacccaggttggagtgcaattgtgtgatcatagctcaccrtatgtagccttgacctcctgggctcaagcagtcctcccaactaagcctcccaagtagctgggactataggcatgcaccaccacacccagctaatttttaaatttttggtagaaaaaaggtctcaccatgttacccaggctggtctccaccccctgacctcaaatgaccttcctgccttggcctttcagcatgtttgtaatgctgagattacaagcatgagccatcacacctgtctaaattttagcatttttattactcagatcagctatatctgatcagtataacatgtgatccacaaattagtggcttaaaataaaaaagctgtttttgttgtattgtttgtccattgtgtg

SEQ ID NO: 560847 - DNA, 457 bp, Homo sapiens
atatgtacattttttaaatccagtctaccactgatgggcatttaggttgattctgtgtctttgccattgtgaatagcgctgtgatgaacatacacgtgcatgtctttatggtagaaagatttacattcctttgggtatatacccaatagtgggattgctgagaaatacaaatcaaaaccmcaatgagataccatctcacatcagtcagaatggccagtattaaaatgtcaaaaaaaaaaaaaaaaaaaaaaaacagatactggcaaggttgtggaggaaagggaacactcatacactgctgatgggaatgtaaattagttccgccactgtggaaagcagtttggtgatgtctcaaggaatttaaaacaccctttgtgtttttttgctgctgtgttacattccattattggaaaataccacactttttcatgcacattctgttatttgatttgtttcc

SEQ ID NO: 560848 - DNA, 399 bp, Homo sapiens
gaattccagccgtaagtttcttagcttttatgcatctccatcatctagcccaggacatagcacatagtagggctaagggatggagacagggagagagttgaatgcccatgtggcgcacagtaggccctcagagtcctacaggaaatgactgactcttacagcaggatggttttttcttcctcctggagccccatcctgactctctcactagactgtgagcaccaagcggacaaggaccccagcaccccggtcagggcctggcacacagtacgggctcaatgaagactgaagagcacatggctgagcacgtgagtgagtgggggctggagtagagggcaggccagggctggctgggcttctgtcctgggaactcagrttggatgaccccaaagggccagc

SEQ ID NO: 560849 - DNA, 426 bp, Homo sapiens
taacaccactgttgcaatgttccttattgaaatggtatccaatgtcaaataaaaagtataggaggaagctgggcrtggtggctcacgcctgtaatcccagcactttgggagaccaaggcaggtggatcacgaggtcaggagttcgagatcagcctgaccaacatggtggaaccccgtctctactaaaaatacaaaaatcagtcaggcgtggtggtgcatgcctgtaatcccagctactcaggaggctgaggcaggaaagtcgcttaattcgggaggcagaggttgcagtgagccgagatcatgtcactgcactccagcctgggcaacagagcaagattccatctcaaaaaaaagtataagaggccaggtcgggcactgtgcctcatctgtaatcccagcactttgggaggctgaggcgggtagatc

SEQ ID NO: 560850 - DNA, 426 bp, Homo sapiens
taacaccactgttgcaatgttccttattgaaatggtatccaatgtcaaataaaaagtataggaggaagctgggcatggtggctcacgcctgtaatcccagcactttgggagaccaaggcaggtggatcacgaggtcaggagttcgagatcagcctgaccaacatggtggaaccccgtctctactaaaaatacaaaaatcagtcaggcgtggtggtgcatgcctgtaatcccagctactcaggaggctgaggcaggaaagtcgcttaattcrggaggcagaggttgcagtgagccgagatcatgtcactgcactccagcctgggcaacagagcaagattccatctcaaaaaaaagtataagaggccaggtcgggcactgtgcctcatctgtaatcccagcactttgggaggctgaggcgggtagatc

SEQ ID NO: 560851 - DNA, 414 bp, Homo sapiens
taaatcacttagcacaactcctataatttcgaaatattcaatatatttataaatgattattttgtattagaaagaaatctgtatatataggtacacacatacatttcttttaaattcaaataaatcataggtaaatttattgagtacttaatgtatatacatatataatttaaaaagaaaacataaatatatacattgtcaaaaaatgaaagtgtgaaaaaggatttaaaataacacatggatcttgctrttcattttagtttattttggtttatctgatctgtgaaagtctttcttataacattgtttctttctagcatattccaatagaaagttctgtgatgatgaaaatttctgtatctgtgctgtccaatatggcagtcactattttttaggaggctactgaacgtttga

SEQ ID NO: 560852 - DNA, 513 bp, Homo sapiens
tcaggccaggcacaatggcacaggcctgtaatcccagcactttgggaggtggaggcagaggtgggcagatcatttgagcccaggagtttgagaccagcctgggcaacatagtgagttcccattgttaccggggtgtccttgctcccagagctcccaagatgaaggcaggccgcttccaagatggtggcaagccttgtgttctctgacctggggttcttggcctcatggattccaaggaatggaatcttgggctatgtggtgagtgttatagctctattagaagccgtgggtcacggaagagaaccgcgtaacccagtaactagtgttcagctcsattaggacgaacccgggcacttagctgtgcaggaacaatggcaagcctttagcccgttcgggagcggcactgggcgtctcactggatcaggagcacagcggacaccctgccggatccggagggatggaagtcagtggcgggtctgccaaggcggcaaacaggagtggtggacggggagc

SEQ ID NO: 560853 - DNA, 513 bp, Homo sapiens
tcaggccaggcacaatggcacaggcctgtaatcccagcactttgggaggtggaggcagaggtgggcagatcatttgagcccaggagtttgagaccagcctgggcaacatagtgagttcccattgttaccggggtgtccttgctcccagagctcccaagatgaaggcaggccgcttccaagatggtggcaagccttgtgttctctgacctggggttcttggcctcatggattccaaggaatggaatcttgggctatgtggtgagtgttatagctctattagaagccgtgggtcacggaagagaaccgcgtaacccagtaactagtgttcagctccattaggacgaacccgggcacttagctgtgcaggaacaatggcaagcctttagcccgttcgggagcggcactgggcgtctsactggatcaggagcacagcggacaccctgccggatccggagggatggaagtcagtggcgggtctgccaaggcggcaaacaggagtggtggacggggagc

SEQ ID NO: 560854 - DNA, 566 bp, Homo sapiens
tctgggcctacaggcacaagccatcatgcctggctaattgtagttttttttgtttttgtttttggttttggttttttttttagaaacagggtctcaccatgttgcccaggctagtctttaactcctcacctccactgatcctcctgctgggattacaaacaggmtccacaaccaaggcccatgccacctttttaaaataagatagactcctttacttaaatatccatcaaggtttatgagttatcagcaaaatgtactcaaagcaatgaatacacagagcttggcttaagaaacatttcaggacaatccagaaacaaaagactcatttttgagaaatcccacacaagtaagaaaaacagatacaaaaatagatgccccagggcattgagctgttagctgcagggtgacaaggctaccaagctcagtcagggaagatgttcatgcacaggtgcattttggccaagaaacaagctgaattcatgtcaaacatcttaagaaatattagactgcaaacttaaaaatctgtctttgtttgaatttttgcagatttctttcttagaacaaac

SEQ ID NO: 560855 - DNA, 566 bp, Homo sapiens
tctgggcctacaggcacaagccatcatgcctggctaattgtagttttttttgtttttgtttttggttttggttttttttttagaaacagggtctcaccatgttgcccaggctagtctttaactcctcacctccactgatcctcctgctgggattacaaacaggatccacaaccaaggcccatgccacctttttaaaataagatagactcctttacttaaatatccatcaaggtttatgagttatcagcaaaatgtactcaaagcaatgaatacacagagcttggcttaagaaacatttcaggacaatccagaaacaaaagactcatttttgagaaatcccacacaagtaagaaaaacagatacaaaaatagatgcyccagggcattgagctgttagctgcagggtgacaaggctaccaagctcagtcagggaagatgttcatgcacaggtgcattttggccaagaaacaagctgaattcatgtcaaacatcttaagaaatattagactgcaaacttaaaaatctgtctttgtttgaatttttgcagatttctttcttagaacaaac

SEQ ID NO: 560856 - DNA, 542 bp, Homo sapiens
aaaaaaaaaaaaaaaatgaaggcacttggcaagaaaaaagagagaaaacacaaaatgtatcaaccaggatgatggggtgggggaatggtcagatggtcatggtgggggtaagtgagatgaagggaattaggaaktgtaggaatgcttaatgtacagaaacacttttgatcaaaaatagtcttccttccttcattctttttttattccagtctcccatttcccagatggaacagttttttttagtcttttttttttccttaccatttttcctaaggctgaattatcattgctgcagccacatcatattttttttcatgacagcagggaggtaaccttttattaattgaatttctaatggcaattcatcaaaacaagcgatcaccgttatttaatgcgtgatccatattcatggcatgttctgttaggtaaataatagtggctctgggaaaatgcttctctaaggtccttttccttctcaaatgactttctttcccccccacccccaagtagagacaaacagttgtaatttaagcagaacaaac

SEQ ID NO: 560857 - DNA, 362 bp, Homo sapiens
tgccctgatatttggccttggctgcagaataccctgataatgaggtgttgcggcacaggaggccacgactgtcttgtctaagttcaaaccctagctctccgtttgcctacactgtgactttgggttacctttataatctgcctgatcttcagttttctcacttgtaaaataaatggagatggtaatcatactgatctgagagttttcgaaaataataaatgagctaaaatatgtactagtttataagagtgctgtataccttaaaagcatgtttgctattattattgttattttcaagacggagtcttgctgtgtcrccccggctggagtgtagtggcacaatctcggctcactgaacctcc

SEQ ID NO: 560858 - DNA, 530 bp, Homo sapiens
aaatgtgggatagaattcaccaatgaaaccatctgtccatggtggtttgcttttcagaaggttattaattattgaatactcttctttaatagatatagggatttgcaagttgtccgtttcactttgtgtgaattttgatagtttgcatttcagtcagatgtcgtcttgcttccatggtttctggttagaaagtcactgtgaaattcttatccttgctcctctatatgaagggagttcttccaccctgctctggtttccttcaagattttttacttgtctttgtttttctacggtttaactatgctacattcagttatagtttttgtctttttctgctttgtgagccctgagctttctaaatccatagttttgtgactataataaattttggaaagtttttagtcattattacttgaagtatttctttctcagttttctctttgttcttctgatgctctaattaygcatttgttacatcttttgtatgagtaacatgcttttagtattttaaatgggtaacatacatcttt

SEQ ID NO: 560859 - DNA, 516 bp, Homo sapiens
gaatggcacgggaaagaccagcccccaaaattcaattacctccccctaggtcacctcccacaacacgtgagaatattgggaaacagaattcaagttgagatttgggtggggacatagccaaaccatatcaaatatcatatacttttagctcacacatttaaattcttgattacttttgaggtaatttttgcataaaaatcacttgaacaaaaattgatcagtgtarggttgtatttatgaatgttgtgttaaagaaactttggataattataatccccccaacaatgttataatccccccaacaatgttgtgtgttttgttctgcttatttatattaataggcaattaatttggttggattggaactgcaaacccttttggacgtcattttaatattaggtcagtttcttcatccttagctgtgctgcttggaatctacctcacaaatgcaggtttcagagatcagaatttgttccttgcctctgacttgctctttcctgggattcccttccctca

SEQ ID NO: 560860 - DNA, 550 bp, Homo sapiens
atgtaagttctacgtatagtatgctttgtaactactcaaaccactacatttccaataaataggttttaagtggattcttaggcctaggttgacttaagaatcacaacactctcttcattagataacactaaagatcaggacactgagatccaatttagatcacggttgattgcttcaagctcatcagctggtaaatattttaaaagttattttattcaatgaaatgtaactaatataaatgtaaataaaaagaaggcctgttcctcttgaagcagcaatggattgctgagtcctgtgccatggatttcctttgtctcctatattggactttaatagaggttagctaaacatcagggctccaagcaatccaactgaagggcccacactctagattatggtatagccacaggtatcttaaacgaaatttatagctctgcttttcactatggtggtcattagtcacgtggctatttaaatttaaattagtcratttttctttttaaaaaacataatttttgttgcactggttacatgttaaatgctcatagtt

SEQ ID NO: 560861 - DNA, 567 bp, Homo sapiens
tcctaggtcacacagctggtaaagaaaagatgcatgactagaacctaggtatatatgattcctgaccctgtgccctggctaccgtgccagcctgggaaattatggggctttgagatgaaaataattgaccagacagccaaaagaacatgggggtagatgtcacagctgtcatgaccagtggcctctggtgaatagcattatacaaatgtagaaatggtttgctctgaggctgagatgagtcaagatctggagaaacagtcttgatctacagtggtcagttgcctgtgctgggtactactgaggacagctgcccaggaatggakgcactgagtggtgcaaaatccgaggatacgggacaccaggggaatccacctttcggagcctgccctttcacaaaggagcggctgcgtgctcccagcccacttaccaggctgtgtcatgctgaagtataagcagctccggaaataccccattgtgtcttgtctccgctgggccttggcacaagctggtcttccttgctggaggacgcctctctgcctggctgattctcattcacccaagacgaag

SEQ ID NO: 560862 - DNA, 558 bp, Homo sapiens
aggctgcagtgagccgtgatcatgcccctgcactccagcctgggtgaaagagtgagaccctgtctcaataaaaaaaaaatgtagaattacaaagggaataaattattttgttggcaaaatattataaacaataaatatstgatagaatgatacatgtacttccttaatagtgcattaaatagatccaacagcaggtctaataactatcaatatttcaacattgtgctaagcatgaatagtattttgtgatgtctacaataattgtgctgtgatggcaaagtatctgtggtttctcttggtgacaaaatcataatgtaagtatcactgtgcttgactgtctacattcagctgaaggaaatgaaaactttcagctagaggttactaaaaagtcttcctctaatgttttcccattgaagttgatggactccctaaattctatccaggaccctttgagcgtttgtggaccctgggttaagaacccctgcaccaacttaattttcttgaggaagtcacacttctctgagcctcagtgtcctcatttggaaagtgggtgcatag

SEQ ID NO: 560863 - DNA, 581 bp, Homo sapiens
catactctgcttttttgttttgttttgttttggaatttttggtagagatagagtcttgccatattgcccaggctggtcttgaactccacagctcaagccctctgcccacctcagcctctcaaagggctgggagaacaggcatgaggcactgcacctggccacaattgatattttaaaaaacgtaccttttcatcacatcctattcctctcttcctcacttttttgggggataggtytcatgtgttaaacttttttttttttatcaatgataaattttgaatccacccaattcattcactgaagagtctggaccactccacggctttgatttgttttgttgtttcaaactctctaatgcaaatatctgtttcattttattttattgtttgcattgtgggcctattccccatcatattttgtgctcatcgtggctcacagcaacactttttcattcttaacctttttgtgcagtgccaatgtctagccctcctgtttcacctttctcacctctagttcagtcatctctctggctaggtcatgaagaactagaatgatttgtccgtgaagtttcaccttcagct

SEQ ID NO: 560864 - DNA, 503 bp, Homo sapiens
ggcacatatctgtaattctagctactagagaggctgaggcaggagaattgcttgaacctgggaggtggaggttgcagtgagctgagattgtgccattgcaccccagcctgggtgacacagctagactgtctcaaataatatgcagccaggaatgtccacttctcctgggaccctgaataaagtccagactccctgggcactcactgctccttccaagctgacaccttcaccatctttccttctccatccaggcacctgctttaccaaactgtttaygggttaaaatatgcaatcagttgagacctagtaagaaatatatatttggtctctgcctctggtttctggaacagagcttctaaaactcgtgtaacttcctgagtgatactgatgataggagcatcttttgttataatatttggtcttcgtccctggttccttacacaagagcttctgagatacttggaatctccagagtgatatgagtgcctttttgtatgctaatg

SEQ ID NO: 560865 - DNA, 491 bp, Homo sapiens
ataaaagcaacaatcatatataaaaagaaccgaaaaaaatacatgcaagagcacaacatagaaaatctacaaaaacacaagagacgcaagtcctaggtaaaggaggaaatactgcatgtccccaggtgggaaggctcagtacaggaagaygtcacagactgcagggctactcagaatttggttttgttttagagactcaacagctgcttccaaggtttatatggaaacgcaaaggactgggaagagccaagatgctcttaaacaatgaggccctactctaccagatgtgagaatttcctgaaaataacagggagaccccatctctacaaaaaaataaaaattagctgagcatggtggcacacagcacacctgtgagtcccagctacttgggaggctgaggcgggaggatcacctgagcctgggaggttgaggctgcagtgagccaagatggcgccactgcactccagcctgggaaacagagcaagacagtg

SEQ ID NO: 560866 - DNA, 491 bp, Homo sapiens
ataaaagcaacaatcatatataaaaagaaccgaaaaaaatacatgcaagagcacaacatagaaaatctacaaaaacacaagagacgcaagtcctaggtaaaggaggaaatactgcatgtccccaggtgggaaggctcagtacaggaagacgtcacagactgcagggctactcagaatttggttttgttttagagactcaacagctgcttccaaggtttatatggaaacgcaaaggactgggaagagccaagatgctcttaaacaatgaggccctactctaccagatgtgagaatttcctgaaaataacagggagaccccatctctacaaaaaaataaaaattagctgagcatggtggcacacagcacacctgtgagtcccagctacttgggaggctgaggygggaggatcacctgagcctgggaggttgaggctgcagtgagccaagatggcgccactgcactccagcctgggaaacagagcaagacagtg

SEQ ID NO: 560867 - DNA, 491 bp, Homo sapiens
ataaaagcaacaatcatatataaaaagaaccgaaaaaaatacatgcaagagcacaacatagaaaatctacaaaaacacaagagacgcaagtcctaggtaaaggaggaaatactgcatgtccccaggtgggaaggctcagtacaggaagacgtcacagactgcagggctactcagaatttggttttgttttagagactcaacagctgcttccaaggtttatatggaaacgcaaaggactgggaagagccaagatgctcttaaacaatgaggccctactctaccagatgtgagaatttcctgaaaataacagggagaccccatctctacaaaaaaataaaaattagctgagcatggtggcacacagcacacctgtgagtcccagctacttgggaggctgaggcgggaggatcacctgagcytgggaggttgaggctgcagtgagccaagatggcgccactgcactccagcctgggaaacagagcaagacagtg

SEQ ID NO: 560868 - DNA, 510 bp, Homo sapiens
gtaaccttatttaacaaaaggtctttgaagatgtcattaaggatctcaagatgagatcatccaggtttatccaagtgggccctaagtccaatgacaagtatcttacaagaaaaacacacagaggggtgggcgtggtggctcacgcctgtaaggaggccraggcaggtgatcacttgaggtcaggagttcgacaccagcatggccaacatggtgaaaccccgactgtactaaaaatacaaaaattagccaggcatggtggtgcacacctgtagtcccagctactcaggaggctgaggcatgagaatcgcttgaacccaggaggcggaggttgcagtgagctgagatcacaacactgcactccagcctgggcgacagagcaagactgcatctttaaaaacaaaaacaaaaacaaaacaaaaaaccaccacacacacggagatacacagaaaggcgaagaccaggtgaagatggaggcagagattgaagtgatgcagccacaagccaaggaac

SEQ ID NO: 560869 - DNA, 510 bp, Homo sapiens
gtaaccttatttaacaaaaggtctttgaagatgtcattaaggatctcaagatgagatcatccaggtttatccaagtgggccctaagtccaatgacaagtatcttacaagaaaaacacacagaggggtgggcgtggtggctcacgcctgtaaggaggccgaggcaggtgatcacttgaggtcaggagttcgacaccagcatggccaacatggtgaaaccccgactgtactaaaaatacaaaaattagccaggcatggtggtgcacacctgtagtcccagctactcaggaggctgaggcatgagaatcgcttsaacccaggaggcggaggttgcagtgagctgagatcacaacactgcactccagcctgggcgacagagcaagactgcatctttaaaaacaaaaacaaaaacaaaacaaaaaaccaccacacacacggagatacacagaaaggcgaagaccaggtgaagatggaggcagagattgaagtgatgcagccacaagccaaggaac

SEQ ID NO: 560870 - DNA, 609 bp, Homo sapiens
tgttttgttttgttttgttttgtttttgagatggagtttcgcttgtaggccaggctggagtgcaatggtgcaatctcggctcactgcaaccttcctgggttcaagcaattcccatacctcagcctctcaagtagctgggattacaggtgcccgccaccacacccagctaatttttgtattkttagtagagacggggtttcaccatgttggccaggctggtctcaaacttttgacctcaggtgatttacccgcctcggcctcccaaagtgctgggattacaggcgtgagccaccgtgcctggctgcaaatgtttccttttttctttttctttgtgtttttgagacagggtctcgctctgctgtgttgcccaggctctagtgcagtggcacactcatagctcactgcagcctctgcctctcaggctcaagtgtcctcccacctcagcctcctgagtagctggtaccacaggtgtgtatcaccacacttggctaatttttaaattttttgcagagaagggagtctcactatgttgtctaggctggttgtgaacgtgcctaggctgatcgctgaagcgatcttcccgccttgacctcccaaagtgctgggatt

SEQ ID NO: 560871 - DNA, 488 bp, Homo sapiens
tcttgccctgtcaccaggctggagtgcagatgccctatcttggctcacttcaatctccgcctcccaggttcaagtgattctcctgcctcagcctcccaagtagctgggattacaggcgcacgacaccacacccagctaattttagtatttttagtagagacggggtttcaccgtgttggccaggatggttttgatctcctgacctcgtgatctgcctgcctcagcctcccaagtgctgggattacaggcataagccaccgcacccygcacctgtttctataatttagcttacaagttgtgtgtctagggaaagttaactctaaacttctccgaaccttttctgtgactcaatttggtcatagatgaaatggggataatagtagtagttaccttgtaggattgttgtgagaaatatatgacactatgtatgcaaggctctttgtacagtgcctggcccataggaaacgccctgtatctttactgttatt

SEQ ID NO: 560872 - DNA, 635 bp, Homo sapiens
ccctatgtttcattttcaacacttcattgtcaatttgcatggtacctgaaacaatggtttagcttttcatatctttgttaacaactcataaatactttttgttaaattaccagaaatttccactgtttagatagatgrgagaggtagtttgcaggtggtagggagatgattttatgccactcttacttctggcttggtttctacattccgaacctgggaagtggctccttgggagattgatatactccaaccatatcacttatctctgcctctgaatctcaactccaaccgtatttgatctctctgctatatatttttgcctttccaaatgctttctgacaagaacttgcaaaaaaatacagaaaaacatgtttttttaattccctgaactcattaaatgaaaccaaatcttccagagtctttaaattttttatgacaaatttagtaactttaatagacagttgatccctgctttcacctccaaattttgaacatgtaattttaattttcctctgattattgtagaaaatgaatttatatgagtgaaattacaattttgagtgtttgctatattatttgtctttcttaacattactttttttagtaataagcttttatttctaatattaaacttt

SEQ ID NO: 560873 - DNA, 545 bp, Homo sapiens
aataactttaagcattacaaaaacactagatacttattcaaattcaagttttgtcacttggtcaagtctctgaacatttgttgtcacagttcattaatctctaaaacaaaattattagaaaagtgatgtttaatgtgtctcctagttataacagtccataagtctatgaatgctccatgttgctaacaagactgtatttctctggccacaactgtttgtccagttttgggcacaygatccaagctgaacaaatgattaccttctctgcagtttttggacttggaaccagagatagcagcagttagtaatgttttctctttggaggttaaattgaaaggtgtacaactttaaaactgcttgtagtcaactttactgctaagttgagaaagtttgaaaaggaagggaaaaacaatgtgagcattcaagaagcagcagagatgaaagcccaagtccctgatgtcatgtgagttctagtgttcactacctgtcactagatccagtgtccctggggtacaaatatagccctctcttttttctggtttggt

SEQ ID NO: 560874 - DNA, 545 bp, Homo sapiens
aataactttaagcattacaaaaacactagatacttattcaaattcaagttttgtcacttggtcaagtctctgaacatttgttgtcacagttcattaatctctaaaacaaaattattagaaaagtgatgtttaatgtgtctcctagttataacagtccataagtctatgaatgctccatgttgctaacaagactgtatttctctggccacaactgtttgtccagttttgggcacatratccaagctgaacaaatgattaccttctctgcagtttttggacttggaaccagagatagcagcagttagtaatgttttctctttggaggttaaattgaaaggtgtacaactttaaaactgcttgtagtcaactttactgctaagttgagaaagtttgaaaaggaagggaaaaacaatgtgagcattcaagaagcagcagagatgaaagcccaagtccctgatgtcatgtgagttctagtgttcactacctgtcactagatccagtgtccctggggtacaaatatagccctctcttttttctggtttggt

SEQ ID NO: 560875 - DNA, 545 bp, Homo sapiens
aataactttaagcattacaaaaacactagatacttattcaaattcaagttttgtcacttggtcaagtctctgaacatttgttgtcacagttcattaatctctaaaacaaaattattagaaaagtgatgtttaatgtgtctcctagttataacagtccataagtctatgaatgctccatgttgctaacaagactgtatttctctggccacaactgtttgtccagttttgggcacatgatccaagctgaacaaatgattmccttctctgcagtttttggacttggaaccagagatagcagcagttagtaatgttttctctttggaggttaaattgaaaggtgtacaactttaaaactgcttgtagtcaactttactgctaagttgagaaagtttgaaaaggaagggaaaaacaatgtgagcattcaagaagcagcagagatgaaagcccaagtccctgatgtcatgtgagttctagtgttcactacctgtcactagatccagtgtccctggggtacaaatatagccctctcttttttctggtttggt

SEQ ID NO: 560876 - DNA, 596 bp, Homo sapiens
gttactgcttttgaagaatttataaacaatttgagggaaaagaaaataaactggcaattgcaatgtaacataaaacattgtgtgayagagtgtacatttaaaaaaaaattccaactaatttcaaggtggcaattgacagcgggactacattttatagttataattcattaagtgatcaatgtatgtgttatgagaaacaagccacatttgcataaaccagtgagttagagaggctgagtagagaaacctctgctaagatgaggtctcagagctcagagataaatcaaatgatcatatttatttctcatatttttttagaaaaataaagtgatcgcataaaggcagaccacatttgaatcaacacaaaggaggaaagatactaccaaaaccgtgtaagacatacaaggttttaaaagtgaaatagaaatgaacataacacactgaattcaacaacacattaaaaagattattcatcacaaccaagtgggatttatcccagggatgcaaggatgattcaacataatgcaaatcaatcagtgtgatgcatcatatcaacagaatgaaggacaaaagctatatgatcatttcaatagatg

SEQ ID NO: 560877 - DNA, 574 bp, Homo sapiens
atgctctgtctctatgtttcagccatcatrctgtacacaagtgtgcttttcttggtctacttagtgacacctttttcacattttaatgctttttattggtgatttttgccttttaaattggccctcaagcataatgctgaagtgctatctatctagcgttcctaaatgcaagaaggttgtgtgatgtgtcttatgttacaaactatgtatacccaatgttaagagtagctctagttataagtcaattattgaataaacacataatatgcacactctaataaagttaattgctataatctttctacctttacagctaaataacattcttttaatatatgttgaattccaccttttttgagattactgggtatggttgtagaaataatataaagttaataagtatttttatttatacttgattgaatgcttttgaaaaatcaaatttaataataattaaaattatcaaggtgggttttcaaaaaatttcattcttacaactggcatatgaagcagacagtattattatcccagtttcagagacgaaacatccagattcagtgtggttacactaaca

SEQ ID NO: 560878 - DNA, 606 bp, Homo sapiens
tttatagtttgcaatctggccacagtctctcatcttgccgtggtaatttgttcttgagcaacataaagttggatgatacagcattactctcattgtcaaaactgatccaacattgggaaaaagaacctaatcaatttacaggagtccacaaaaaaagtgagcatagaattaaagctgaagattgtgctataataataaaattgtttcaccacaacaaacaggtataatttgcaactaaaaaatgtcagaaactaaactcgtttgtattagtctgttcccaaactgctataaaggactacctgagactcagtaattggtgaagaaaagaggtttaattgactcacaatttcacaagattaacaggaagcatgactgggaggcctcaggaaacttacaatcatggcagaaggtgaaggggaagcaaggaccttcttcacatggtgtcaggaaaaagagagtgaggggggaactgccaaacacatttaaaccaccagatcatctcatgagaactcactcactatcatgagaacagcatgaggcaaactgcccccatgatccaattgcctcccaccaggttcctcycccaatatgtggggattacaattt

SEQ ID NO: 560879 - DNA, 515 bp, Homo sapiens
ctcttctgccatgttgcttcactcttctctcctatatttaaaattaaatgtaaaccactaaccattcttaatttgattgaaraaaaaatgtataatctgtgttttttatttgaatttaaagatataacctgcaacatgttttttctaaatatgaatttaaaggtataacctgtaacattttttcaaggattttttctgaatcctggaaaatacataaaagtaaattaatctgctattctgtaggtaggtgaaagttaataaacattttaataagcatctatttctaatggaacttgcagtcagtatcttagtaaagaagagctttagttgataataaacgctctatttctgtttttatgagcatagagatttagtattctctcaaccaccagacacctttcacaatagaaaaactatattaaatatattaaaaataaataaaaatagaagaaatcatttgtgatgtacattttttagagtgcgattaaaagaatgtcttaaatatgtaggttata

SEQ ID NO: 560880 - DNA, 495 bp, Homo sapiens
cctttgctattgtgaataaataarcacagtttttaattgttgccttatacagttgccttttaaaacatgggataagaaaagtgttacaaacataataaatatgtttatattgtctttttttaaaattatactttaagttttgggatacatgtgcagaatgtgaaggtttgttacataggtatacatggagcgaaaatatttctaaacaatgtatctgatgaaaagttaatattcaaaaaatgtaaggaactccagctcaatttcaaaaacaaaaaacaaacaaaaaacaaaaagaccccacaacccaacaaataccttgattaaaaatgggccaaatacgtgaataagtaattctctaatagagacatacaaatggccaaaaggtttatgaaaggtgctcaacatcactaatcataaggaaatgcaaatcaaaactgcaatgagatgtcactttgcacctgctaggatggttattgtaaacaaccactacaaaaa

SEQ ID NO: 560881 - DNA, 535 bp, Homo sapiens
tcagtgtatgtcccatattacctttttattgttttttccattttttatctccaacttttaagttcagaggtacatgtgcaggatgtacaggttacataagtaaacgtgtgccatagtggtttgctgcacagaycatcccattactcaggtattaagcccagcatccattagctattcttcctgagcctctccctcctcccacccccgccttctgacaggtcccagtgtgtgttgttccccccatgtgtccatgtgttattatttagctcccacttgtaagtgaaaacatgagatatttggttttctgtttctgcattactttgctaagaaaaatgggctccagctccatccatgtccctgcaaagaacatgatctcattcctttttatggctgcatagtattccatggtatattacatgtacggcattttctttatccagtctatcattgatgggcatttgggttgattccatgtctttgcaattgtgaaaagtaatgtagtgaacatatgcatgcgtctttataataaaacaat

SEQ ID NO: 560882 - DNA, 668 bp, Homo sapiens
ttaaccactagctcttcagttaaaatatcaaaaattatggtctaagtaagtcatacgagatctaacctgaaacagagcttgtgaatagacagatggatattcataagaccttctaataaatgggcaaaaataaagaaaagtttatgtgtttctgctcctgtttggattccaaagcactgctggcttataccctccagccacataacagttaagaatatgcctttgtcatctatcatatgttagaaaagggaaaggatcatgtctttaaaaaataaagattacagatttctggctaaggatggtaggttgaacttacatttacaggcacactgtcccaccaaaatgaaagtaaaggractttttgtttgtttctttgttttttttttttttgttttttttgacacagggtctcactctgtaacccagaccggagtgcagtggtgcaatcatggctcactgcagccttgacctcctgggctcaagtgatcctcctaccgcagcctctgggactacaggtatgcgccatcatgcccagctaattttttttgtatttttttgtagagacggagtttcaccagcttgtacaggctgatcctgaacttctgggctcaagcaatccacccacctcagcctcccaaattactgggattacaggggtgagccaccac

SEQ ID NO: 560883 - DNA, 563 bp, Homo sapiens
tttgacttgtcacttggaagctaccactgtgacaggctgaataatggtcctgggagatgttctcattagaatccctggaactgtgaatgttgccttatattgcaaagagattttgcagatgtgaccaagttaaggatctcaagatggggagattactctggattatccagctggatctagtgtaatcacaagaatcctcgtaaaagggagggctgtcattgtgctgtttacctctgttctcctggtagaagccaacactgctaggcaggaacatgggaaaaatccaaaaaggaactgccgaaggcatggatgatcatgcctttgtcacctcatcttgtcttcaggtctcttgtgaaccataccatctctcctttcctcctctagtttagtgtagatgggctttaaaatggttcctcagggttgacatttactaaacatgtctacactgcagtcacaggctggggttagagagtcggggtattggatactgtcagcttgaacgtaacccttgtacttagggrcacaaatacagcaagagcaagcccagcttggtaatattttta

SEQ ID NO: 560884 - DNA, 562 bp, Homo sapiens
accagcctggccaacacgatgaaaccctgtytctactaaaaatataaaaacttagccgggcatggtggtgcaggagaggctgctacttgggaggctgaggcaggagaatcgcttgaacccaggaggcacaggttgcagtgagccaagatcgcgccactgcactacagcctgggcaacagaccaagactctgtctcaaaaaaaaaaaatagggtctattttttaaaaactcctataagcatagaaatgttcttaggacatggggtcttttatctctctcacgtgagaaaaattggttagtatgagctaaaactggacaggttcaaactactggcttatagcatgtttctgaatgcccgatgaccttagcagcctatacaacacctcatcctctcgtacctagaacattgttcttcccaaagatgtttcctacttagagttaagtttttacccaaagcatcagaggaatagacaaaatcaaatagaaacagtttcaatcacttgcagtgtttaaaatatttataatccttgctatagccaaaggcagccgggctaattatttac

SEQ ID NO: 560885 - DNA, 562 bp, Homo sapiens
accagcctggccaacacgatgaaaccctgtctctactaaaaatataaaaacttagccgggcatggtggtgcaggagaggctgctacttgggaggctgaggcaggagaatcgcttgaacccaggaggcacaggttgcagtgagccaagatcgcgccactgcactacagcctgggcaacagaccaagactctgtctcaaaaaaaaaaaatagggtctattttttaaaaactcctataagcatagaaatgttcttaggacatggggtcttttwtctctctcacgtgagaaaaattggttagtatgagctaaaactggacaggttcaaactactggcttatagcatgtttctgaatgcccgatgaccttagcagcctatacaacacctcatcctctcgtacctagaacattgttcttcccaaagatgtttcctacttagagttaagtttttacccaaagcatcagaggaatagacaaaatcaaatagaaacagtttcaatcacttgcagtgtttaaaatatttataatccttgctatagccaaaggcagccgggctaattatttac

SEQ ID NO: 560886 - DNA, 555 bp, Homo sapiens
cagctgctgtgactgaagggggaaaaacaagggagagaagaatgtaagatgagaatggagaagtatgtagggcttgacaatagcatggatttgcggttatgtcctaaaagcaaaaaaatgcatgtaaagctaggagaatgtggggtgtcattagaaaagaaggaaagagaatgtttttatgtggaaaagagttaactgcatcactgctgctaaggagtcragtcagatgatgcactggccaaagtgactcacctctaaaaagaatacaaagggagtgacactgtatgacttccagcagcagattataaaggaaggtcccaagagaaaagctgtgcaagaaatcattctgtaaggaagccaaggaactgcctaggaagcccacaggtagctgttctagcaaccgatccaactgaggtctcagcccacagccaacaccaacctccagaggcaggaaggaatgggtctttgggtgattctagccctcagccttggagcttctgcagcagcagctaagtggagaagagaaaaactttatctataaatcttttttcaaac

SEQ ID NO: 560887 - DNA, 457 bp, Homo sapiens
tttatagcaaggtcaacaaacaaccaagttggtaggccaattccggctcaccgtatgcttctttatgaccatgagcttagaatgatttttacattttttaatgatttttttaaatatcaaaagaaaaatattttgtgacaagtgaaaattatatgaatttcggtgtccataaataatgccatattggaatacagtaatacttaaaaattgtttatagcagctttggtgctacaatggcaaagttgggttttgagttattgtgacagagatcatatggcccacaagtctaaaatatttactacctggctctttaaagaaaacgtttgctgaccgacctctaggttagatacttagtccctttcctttctaaaggcccctaggcccyttattcaaactagctcatcactctctcctgaaagttctgcaaacctagggaagatagagattttgataggca

SEQ ID NO: 560888 - DNA, 610 bp, Homo sapiens
atattaatcctcaagtgtgtatattacattatagacatttgataaaaaattataatgtagatattagaaacaacgcaaatggctaatcataatatggtatggatgcactatattagtaattagatttagtctaattacacattaaaaccccattattataggctcaattttatttttgaagtgttttattaaagcagaggttttacctttagtaggatgaagacataaaactttcataagtgactaagtgtagagggatatttaacaggacccatgacacatccatatactaatcactaatcgcacactattcatatctatttaatactgcagaacctctggaatctttttgtttgtttgtctgtttgtttagagacagggtctcactctgttgcctacctaggctgcagtgcagcagcacgatcactgctcactgcagctttgacactgggggctcaagctatcctcccagctagtttctttgttgctgagactacagggactttcaycgtgcccggctaaattttttatttttgttttttgtagagacaagggtcttgctctcttgcctaggctggtctcaaactcctgggctcaagtgatccttcca

SEQ ID NO: 560889 - DNA, 511 bp, Homo sapiens
aaacattacagatacttgaaattattcayattgttaattattcttttcctcattctaggatacagtagtttgtcttacttgtgaaaatatttaggggaacttagataaaatttttgtttgatattcctaaaatgctagaaatgacctcagaaatctttttgagaataagccctttataaaaacctccaaataggtctttcctgagaaaactcaattgatgtgctttatcaagtataatagtatgtttcatttataagctttccaagttgaaatccaaagtaataagcatgtttcaaaaaaaatctaaacaagtaaaaatggggaaacttactaaaactgtgcacacatatatagcatcaagaaataaactagcagtaaaatccaaggtcatattcagtgtgataggcactgcagatcttttctattaataaaaagcaacagaggctttttctacccatgaaatgtttttttaaaagagctttcttattattttagtgaaatgaagtttttc

SEQ ID NO: 560890 - DNA, 548 bp, Homo sapiens
gagctcctttctgcagcctctacagaaagcatgttttctagctgtttccagcttccagaggacacctacattctttggctagtggccccttcccccatcttcacacccagcaagtatggttcaagtacttctcgtatcaaagcactcacttcttctratttcctccacatttagaaattattgtgataatattggacccaatggaataatccaagaaaatctacctctcttaaagtcagcagattagcaactttaaatccatctgctactttaatttctacagatttgccatgtaatgtaacatattcttaaattccaaaaccatggacatccttggggagccattattctggctgtcaaatacctcaaccaaaaatgggcattagggtaatgatataaagacaacacaaacatttcaattttaggagtttattcaaaaaatcttaattatatgctcttattcacatttagaacatttgcagttattaaaacacaacaatgctaaatgtgctttatatctttctatgtcatttctcatacattgtaaa

SEQ ID NO: 560891 - DNA, 536 bp, Homo sapiens
gggggtggggggctaggggagggataacattaggagaaatatctaatgtatatgacaggttgatgggtgcagcaaaccaccatggcacatgtatacctatgtaacaaacctgcacgttctgcacatgtatcccagaacttaaagtataataaaaataaaataaaaataaatttaaccataaaaaaggtgaggggtgaacggttgcaacatatgaatcttggagaaattcaagagctaatagacaccacaccagaggaattaatggaagaagacctgttggagaagacctgttggagatgagtgcttccaaagtagtaccaaaagataaaaacaaagacatggaagaagcagtgccagaagcaagttgctrtaagttaatctagcagaggggttctcatttttcaagatgtttttgacttcttttacaacatggatccttgtatgatacaaaactaaagcatatggtggaaggaagattagtactgtatagaaatattttcagagaaatgaaaaagtaaaaagtcatatattatgat

SEQ ID NO: 560892 - DNA, 570 bp, Homo sapiens
agaggtttattttctgatcatttccctgattttgcttctggcaaaacttgcaacttagtttattaataactactcataccaaataagagcttttgacacacttctatcacgtgaagtatagtaatttattgatggattggtaacccactattagtcatagcgccaccatgacaacamtaacaataaaccaaataaggaccaatgctgaagtatttacaaaggtgtcaacaatgtcctcactgcttggcacacattatctcatttaagatgattggtgaccatttccacattttattgataagcaaactaggttcaaagacattaagcaccatgtcctagaatataaagctcacataaataaaccagctctgtgtgactcaggtcataggttgccccctctcttaattatgtacattttctgaccaccccccacctccattcccttaatctcctgatggacactgcattcatttgaaaatgcagaagatataactaaggaaagctggctaatttgtttgcttttatgggatgtgtgggcccacaattgcaatagtccttatcaaaaattct

SEQ ID NO: 560893 - DNA, 588 bp, Homo sapiens
ttggtgtcatatctaagaattcattgccaaatccaaggtcctaaagatttaccattatgttttcttctaagagttttatgacatcaaatacttatgtgaagttttcagcatgactaactgaaatgaaatgttgaaaaggaatatagtttatgcactaatctgctccagagagcacttacctagtgccaaagactttttgttttcagtactrtataattagatgttggtcctgagttctgctacctagacatcacattgtcctcttagcatctaattaacagaaaatgttaactgatgagctaagtgagcaaaagacaatttaacaagaaggtcagcatatcccttggacttggaagatagacagatggttcaaggacaaggtgccaagcttcttaccaaatgaagacttgcagcacaaaccagtctttgctgtgttgaaaatactttacctgccacataaactcattttatttcttaaacagcttcattagtgaatagctttcattgaatatcatgacagagcctccaccagtaagatataagtgatagctttgaaatgtagtaggactgccttcataatgatatcca

SEQ ID NO: 560894 - DNA, 634 bp, Homo sapiens
aatcgttagatataattactggctatttttataaaattagatgtagcttgccctggtctattttaggtgtattcttacgtagacattgacattggtcttctaaagtgaaagtgcccttccctctggaaaggctggataaaactaatatcaatttgttttcttgcatttcttttctcctcctgtatggcagcacaacagtaatctgaggcatttgacaacatcactgartacactacagctttttgaaaaatccagcgacttccttaattggactaagagacagtggctctatttgagcttgtttataaaccacttaatgggagttatttctgcaggtgcatctaatttttattagttttaatatcaagttaacttttccttgattttacccccaaattatatataggatatataattatatataggatagctatatcctatttggagccttaatgaattactacactcttaatgaattactacactcttaatgaattactacactcttcttccagtatctctactccctggctctagtccatgccctataataagaccttcttatctcaatcaggtgctcagttgtaatgtaattgttgttgctaaccaggttttggttggttaaaacttgtga

SEQ ID NO: 560895 - DNA, 545 bp, Homo sapiens
atcaaattgagactggattactgtgtgggctcctctctctccttcatctatcacaggtgcctggtcaccaagtcctattcatcctacatcttaaatacattttaaagataccccttctttccatcttcatcaccactgtttactttcgatttgacctttattattgcttctaatatttctctttataccactcttggttccttccatttcacttcctatctcctcatagaataacctccctaaatacmatctcaccataacagttccttgctgtagaatacgcttcccccactcaaaatgtgcccaagaccagtagtataggcatcaattggagctcgagagaaatgcagaatctcagcctccacttcaaactaactggcatagtggcacgcacctgtaatcccagctactcaggaggctgaggcaggagaatcgcttgaacccaggaggtggaggttgcagtgagccaagatcacgtcactgcacttcagcctggtgacagaatgagattccatctcaaaaaaaaaaaaaaaaagaaaaaaaat

SEQ ID NO: 560896 - DNA, 598 bp, Homo sapiens
ggctgtggacctgaaaagacccacataaatacaggaaactgatctttgacaaaggagcaaaggcaatacaatggagaaaggactgtcttttcaacaaatagagctggaacaatgggacatccacatgcaaaaacaaaatgaatctagacatagatcttaaaaactcttcacaaaaattaactcaaaatggatcacagacctacatgtaacaggcaaactacaaaatgcytagaagatcaatgggggggaaatcaaaatgaccttgagtatggcgatgacttttgaaatgcaacaccaaacacatgatccacaggagaaataattgataagctagactgcattataattaaaaacttctctgggaaagacactgtcaagaggatgagaagacaagtcacagactaggaaaaaatatttggaaaaacaaaacaaacaaacaaaaaccccatgcctgacaaaggactgttatccaaaggttgtgtggcaagtggtctgccctcttacctgataggaccatccagccattccattaactggcatttcttttctcccctttccagcacctctgagttttgttctcagctggattctttcacta

SEQ ID NO: 560897 - DNA, 596 bp, Homo sapiens
gtgagcatttctttgtgtgtcacgtcagtgctcaaaaagttttgaattctggagcatttcagatttttggatttttggaaccccaacctgtaactgtattttaatcaaaatcctagtgagaggctaggaaaaccaccctgttttcattttgattttcatttttgcattttacattatacttattcatttgtaaatatgagatctttgaaaaaattttgagctcccattttcagatgagctaagagacccatctatgctgtctatatctggaagtactatacaccaccaaggagaccccaaaattccaagtttaaaattccaaacctagcagatacaacaatcttaaagatgagctggatttcaggttcaacgttcaaaatggatgaattagaaagtagattctaactctactcttagcyaaaaaagaagtgtatatgccacacattataacagtttctaggctctgagtcaaaattaggaaataatttttgtttaaaacatgtttattcaactaaaaaatcaaatttaatagtaaatacttattgagtccctaaacaaaggcatttggaaatatgcaaacatatatgcattattac

SEQ ID NO: 560898 - DNA, 519 bp, Homo sapiens
gagaactggaacaagacaaggatgcccactctcaccactcctcttcaacatagtactagaagtcctagccagagaaatcagacaagaggaaaaaaataaagggcatccaaatcagttaagaggaagttaaactgtcactgtttgctgatgatatgattgtttaccttgaaaaccctaaggactcctccagaaagctcctagaactgataaaagaattcagcaaagtttccagatacaacattaacgtgcacaaatcagtagctcttytatacaccaacagtgactaagaagagaatgaaatcaagaactcaaccccttttatcatacctgccaaaaaacaaacaaacaaacaaacaaaaacttcggaatatacctaacaaaggagtcaaaagatctctacaaggaaaactacaaaatactgctgaaagaaatcagagatgaaacaaacaaatggaaacacatcccatgctcatggaatggcagaatcaatattgtgaaaatgactatactgccaaaaac

SEQ ID NO: 560899 - DNA, 600 bp, Homo sapiens
tcaacaaactgttctgttattatgtctacattcaaagacacagattaatacctggaaggtaggtcaacaaatgttatttaaaatttttggtgattggtatgttcttcttatagattcctagattgctataattttctgtatgagctattcatcaaatatttctggctctctgttttacaggtagaatccatttcctggcccctttgtagtttggcaggattacctgtctagttctggccagttagttgtcagtagaagaaactttttagttccaggacaaagaagtcagtttcctgtattgagatcctccagacttttctttttctccctctgccacaacagctagctaacagtgttttggaaratggccacgccatcagccttgaaactatagtaagagtttaatctaacacacagcacccagctgactgtgatggccctatagcatgagagaaaaataaatctttcctgtgttaagcagctgagatttctaagttgtttgctactttatcataatttagactgtcctattttctgcaatctatattatgtttataagcaggggaaaaaagctattttcattaaacaaatacatgttcc

SEQ ID NO: 560900 - DNA, 511 bp, Homo sapiens
gtagagaaaataaataaggcaaaaagtatattttaaaaaggcattaataatattgacaaacaccatctaayaccatattaattgtgaaagactaaacccttttagtctcaaatcttgaacaatacaagaatgcctgtttcgctatttttattagatagtgtactgaaagttctagcctgggcaattaggcaaggaacagaaataaaagtcatgcagactggaaaagatgaggtaaaactatacgtatttgcaaatgacaagatctcatatgtaggggtgaagaatccactgctagggtgagaaggggggaaatctgtgataactaataaatgagtttggtaagcttataatataattttacaaaaataattgtatttctatgaactcacaaaaagaatatgacaaattgagaaaattatcttgttgacaatgatatcaaaaagaattggagtaataaatttaacaaaaaatgttaaacttttacattcaaaacttgaaaatattattcaaa

SEQ ID NO: 560901 - DNA, 511 bp, Homo sapiens
gtagagaaaataaataaggcaaaaagtatattttaaaaaggcattaataatattgacaaacaccatctaataccatattaattgtgaaagactaaacccttttagtctcaaatcttgaacaatacaagaatgcctgtttcgctatttttattagatagtgtactgaaagttctagcctgggcaattaggcaaggaacagaaataaaagtcatgcagactggaaaagatgaggtaaaactatacgtatttgcaaatgacaagatctcatatgtaggggtgaagaatccactgctagggtgagaaggggggaaatctgtgataactaataaatgagtttggtaagcttrtaatataattttacaaaaataattgtatttctatgaactcacaaaaagaatatgacaaattgagaaaattatcttgttgacaatgatatcaaaaagaattggagtaataaatttaacaaaaaatgttaaacttttacattcaaaacttgaaaatattattcaaa

SEQ ID NO: 560902 - DNA, 527 bp, Homo sapiens
tgcagttatttccttgggaggtatcaaagtgggattcttaaaggtatacccaacttaaggctattggtttatattactaattatcttatgtttcataaagtcattttaatataaatatatcatttaaatttttgtctttatcataaccctgctgtgagactgtttgggaagtgttaaaataacctcacttttcactaaagggaacagtggctcakaaaagtataacctcttctcccacatacctctggtatgcgcattgtaaaaatatgttttaattatgcttccaagtgtcagtcccctgaccttagtatcaacattgaggcagagaagcatatgtaattcctcatgggagcccctgttacaatgccttgtaaatagtaaaaattttgtgggaggaaatgacttgtgcaatgtcacacaacaagtggaaacaaggtgaagactttaggtcagatatgtgtctttgcatttatgcagccaacagacacatgaaaaaatgctcatcatcactggccatcagagaaatg

SEQ ID NO: 560903 - DNA, 516 bp, Homo sapiens
cttcttcaccttcttcataagactaaattgacaagyataagtgtaccctaatgtaaagaaaatagcttaggcactgtgttttcaagtggataaaatgagatgatataaaacatataatacatagcaagttcttaatatgcaatagctattgttattattctctctaaaaattgacatttatttaaatttaataaaataaaatttaaataaatttaaataatttttatttaaaatttttcagattaaaaagcaacttatttcttatttttctttttttctttctttctttctttctttctttcttttttttttgaaacagggtttcactcttgttgcccaggctggagtgcaatggcgcgacctcggctcactgcaacctctgcctcccaggttcaagcgactgtcctgtctcagactcccgagtagctgggattacaggcatgcaccatgacgcctggctagtttttttgtattttgagtagagacggggtttctccctgttggtcaggctggtct

SEQ ID NO: 560904 - DNA, 581 bp, Homo sapiens
gctttcgtgcggcatctgcgccttacttttgcagtctggggtgactgagtcaacgtgaccgtgcggagcaccaagcagccccgggtccccatggctaccgccagggcaacgcttcgcggcccgctcctcrgggaccctcaggggcggcaccgggaaatcagctttgcggagaggaaccgcagggctccggggacgggctagggcagccggcgggcagcagaggcaagcctggcaaactcttcccggcttcttcgcggcgcttggggcagacgtcctggcgacaccaggccgcgtcggttccccttcatcctattttccctttaacacggtggcttgagaactttatttatgtgctcactcaagaaaattttaaatgattttacagatacaaccccaaagatgaagctccaacaaacccgccactactcgagcctttctcaccgtcttcctcacaggccccaccccctaccgcgaggagcacgagctgaggggaacacaagcccccgtcgggcactccccggcctcgccccaccccccaggcgcgcacccaacccatataaggcgaggggaggcaatcgcgc

SEQ ID NO: 560905 - DNA, 635 bp, Homo sapiens
ggatggtggcgcatgcctgtagtcccagctactcgggaagctgaggcaggagaattacttgaacctgggaggcagaggctgcagtgagccaagattgcgccactgtactccagccagggtaacagagagagactctgtctcaaaaaaaaaaaaaaaaraaaaaaaagaaaagaaaaagaaaatatcagctccaaaactctgacatgaatctgactgatgcaggcattttcttaatgcttattggctactctctcttcttcatctattcgcaataaacatctgctttgtcttcttatctggctctcctgcagccctatcaagaatagtctgacttctctcatcagaatctgtcatcccaaaactgtttacaaagtttacttttcatattgcacttaagctggctctaattctgtgtcttggtattgaaaatgatcttttaaaactagtttctccttcatatttaaaaaattattcctgatacaaaattctcctaatctcatctaaaacctaaaaacgatcaaaattgtcctagtgtagtcaataaccttcgtaaggctttataatgataaagacttcagctgtgaattctacctctaaatttcctagtattgcaaattcctgcctctccataacca

SEQ ID NO: 560906 - DNA, 635 bp, Homo sapiens
ggatggtggcgcatgcctgtagtcccagctactcgggaagctgaggcaggagaattacttgaacctgggaggcagaggctgcagtgagccaagattgcgccactgtactccagccagggtaacagagagagactctgtctcaaaaaaaaaaaaaaaaaaaaaaaaagaaaagaaaaagaaaatatcagctccaaaactctgacatgaatctgactgatgcaggcattttcttaatgcttattggctactctctcttcttyatctattcgcaataaacatctgctttgtcttcttatctggctctcctgcagccctatcaagaatagtctgacttctctcatcagaatctgtcatcccaaaactgtttacaaagtttacttttcatattgcacttaagctggctctaattctgtgtcttggtattgaaaatgatcttttaaaactagtttctccttcatatttaaaaaattattcctgatacaaaattctcctaatctcatctaaaacctaaaaacgatcaaaattgtcctagtgtagtcaataaccttcgtaaggctttataatgataaagacttcagctgtgaattctacctctaaatttcctagtattgcaaattcctgcctctccataacca

SEQ ID NO: 560907 - DNA, 630 bp, Homo sapiens
tatgtcaagccatagcagagtaaatcactgacttaaaaccatacagaatgctaatcttactgatattgcagttgsaaagaaaatcatctgttggctcattgatgtacatagggtctgcttgggcaattcattctcatgggaaaaagctctcaaaataaatacgaaacctaaatagtcaaatggagaaaggaaaaggagggcctgtctgatgagctggctgatactggaaatgaacagaatgtccataggaccaagacatggggaaaaaagtgaggcgtgactaatctcaccctgctgcctccaaggagtatcggcctctgacatcatcccttgaaactctcattgtagagtcacaaggcccattttgagcaactctagaagaaagtaactagaaggcaatctttggacataatggtaatgcataattactgaatgacagaaaacactggaacacatgtcatttcacttctgacccagccatttatttttatgggaagaacaacaagagaatggcaatgaaattacagcaagaacactttagcttaagaattgagtagaattttgttttttaactgatattaataaaaaatgtaaaaatgttaccttttagcatttaataatcatatttta

SEQ ID NO: 560908 - DNA, 630 bp, Homo sapiens
tatgtcaagccatagcagagtaaatcactgacttaaaaccatacagaatgctaatcttactgatattgcagttgcaaagaaaatcatctgttggctcattgatgtacatagggtctgcttgggcaattcattctcatgggaaaaagctctcaaaataaatacgaaacctaaatagtcaaatggagaaaggaaaaggagggcctgtctgatgagctggctgatactggaaatgaacagaatgtccataggaccaagacatggggaaaaaagtgaggcgtgactaatctcaccctgctgcctccaaggagtatcggcctctgacrtcatcccttgaaactctcattgtagagtcacaaggcccattttgagcaactctagaagaaagtaactagaaggcaatctttggacataatggtaatgcataattactgaatgacagaaaacactggaacacatgtcatttcacttctgacccagccatttatttttatgggaagaacaacaagagaatggcaatgaaattacagcaagaacactttagcttaagaattgagtagaattttgttttttaactgatattaataaaaaatgtaaaaatgttaccttttagcatttaataatcatatttta

SEQ ID NO: 560909 - DNA, 630 bp, Homo sapiens
tatgtcaagccatagcagagtaaatcactgacttaaaaccatacagaatgctaatcttactgatattgcagttgcaaagaaaatcatctgttggctcattgatgtacatagggtctgcttgggcaattcattctcatgggaaaaagctctcaaaataaatacgaaacctaaatagtcaaatggagaaaggaaaaggagggcctgtctgatgagctggctgatactggaaatgaacagaatgtccataggaccaagacatggggaaaaaagtgaggcgtgactaatctcaccctgctgcctccaaggagtatcggcctctgacatcaycccttgaaactctcattgtagagtcacaaggcccattttgagcaactctagaagaaagtaactagaaggcaatctttggacataatggtaatgcataattactgaatgacagaaaacactggaacacatgtcatttcacttctgacccagccatttatttttatgggaagaacaacaagagaatggcaatgaaattacagcaagaacactttagcttaagaattgagtagaattttgttttttaactgatattaataaaaaatgtaaaaatgttaccttttagcatttaataatcatatttta

SEQ ID NO: 560910 - DNA, 516 bp, Homo sapiens
gcgtaaattctcttaacttaaattttttcatttgtaaaatragtattattttagcatgattaggagcatgaagtatgatgtttcatataaagcacttagcactgtgcttaatataatcattaaggccctaagaaaatgttaggtcacttcatttttatgattttttttcctttctactgaaaaatctcacagtctgaacaacagaactaaaagaaaatggctactataaagaaggcaagcagatgtgatttcagacagccagtggggaaatctcaggatatgttatgaattaatttcaagtaggtttgatttgggtaagtgaggaagcagaaaagtatgaataggagcagaacctgtagcagagtggattttgttctggcaagaaaagtcttgggaaatcccaaataaatgtagaccacataagattcatgggttaacaattttgcccccctccaccctcactgggaaaaactaaatgtacttgttgactcttaatttttccaatctaccattacc

SEQ ID NO: 560911 - DNA, 516 bp, Homo sapiens
gcgtaaattctcttaacttaaattttttcatttgtaaaataagtattattttagcatgattaggagcatgaagtatgatgtttcatataaagcacttagcactgtgcttaatataatcattaaggccctaagaaaatgttaggtcacttcatttttatgattttttttcctttctactgaaaaatctcacagtctgaacaacagaactaaaagaaaatggctactataaagaaggyaagcagatgtgatttcagacagccagtggggaaatctcaggatatgttatgaattaatttcaagtaggtttgatttgggtaagtgaggaagcagaaaagtatgaataggagcagaacctgtagcagagtggattttgttctggcaagaaaagtcttgggaaatcccaaataaatgtagaccacataagattcatgggttaacaattttgcccccctccaccctcactgggaaaaactaaatgtacttgttgactcttaatttttccaatctaccattacc

SEQ ID NO: 560912 - DNA, 263 bp, Homo sapiens
cgatcatctgagtggatgaggcccaactgcattgtgagagtaatttgctttgckcatcgaatactgatttaaatgttaatgttatctaaataaatacttcataaaaacatctagactggtgtttgaccaaatacctgggtaccatggcctagccaaattaacacataaatcagccgtcacaaattagaaacctactggtaaagacttagaaaattattttaaaaaatatttccccccatattaatataatcatgttcaacata

SEQ ID NO: 560913 - DNA, 547 bp, Homo sapiens
caatttcttctaatatctaccatgtattcagccactcagttcttcaacagccctgtaattaggtgctcctattatccttctccttgcacaggtgggaaactgagaggtggagacattaggtaacttggtcacagccgagactaaaactaaagttgtttggctccagattctgcgtgtttaaccttaatgctacattccttttcctgggcaagaaggaggatctaaggacagaggatggaattgaatgctccctaaaataccctctgttctaacagtctatgatcttaggatttttcttagagtctttgaaactaatatatatggaataatatattaaaatatctattatttcttcagaaattttatgaaaggttctaactattcatcatatttattcactgagcatgtctagtctgataaaaagactacgtttctcatcrattaaccatagcatgcctactcatactctcacctatttataattttattcaagttcattttcttgaaataagtggttctgttttaaatgaaatcaattagagaaaag

SEQ ID NO: 560914 - DNA, 646 bp, Homo sapiens
aatcagccaataaatttaagagaaaagaggcattttaaaagactgtgtttttctaagttctcatagcaacttgtcgaaaattctactatataatttactatttggaaatatatatatctaatattttatatatacatataaattattccattagacccttaccttaaagaatggtaatattctattcatttcatatactgtatagacagtgtccatcaaatatttgtagttttattacatctttaacaaaatatagttgaacatagctatgttttaagcagagctgtgttttaagccaaattatatgaataattacctctcactgatcatgtggtcttcaaggtgttttacttctactaaaattttcttagttctttgaacttactctrtgtccaagaatgtgtatgtaaagataaaacttaataaagtaccatttcctccatctcttcacattctatatttcttttgatagcactgaaataaggagatcttcactaaataaaataaatttctgtgcttggcaactaatagaaaagtgataataaataatacctatgttactagtgctttaactattttatattctatgtttatgttctatggaaactccatagagttagacaggttaaaatgtagaattaatttt

SEQ ID NO: 560915 - DNA, 576 bp, Homo sapiens
tatcatggggacaaatacacagaggtggtagtttaaacctttatcttgcaaatccaaattcggtatccaaatccactttaacaccctcacctttgagacatagtgagaccttttccatttctgagacaagcaactacagttgtcagaacrttattaagttgtgttcaggaaattctgaagagttgacagtctatttttctgagacacaatgtattcccagtacaatttccggtcttcatgaaggtagaaaatgtgatttagtcaagcacatgtaaactatgtcaccactctaagattttcttgacattttctggataaacacaatggtttgaggttaaactagacatttcagatgtttcccttcttctgcctgaaatgtttattaggctatttggtggggtaggggagtgcacatgtggggccatggtatggaggagacgctgtggttgcctcaggttcttagtcctgacaccccacgtagccatctctactctttccccttgccatggtgacattcttgggagtctgctgcctcttggcatgctaggcagagagcagaggcacaggcattccatc

SEQ ID NO: 560916 - DNA, 523 bp, Homo sapiens
aaatagcatttacacactcaaatattataaaatacatgagatytatgtgtgacaaatagtttattttatctgtaggcatttcctggtgcatttatggatttgcaggtatcagggatgcatagccctcaggttccttaagccagtaattcccatgctttctacatggtaatagatacaatggatgagttcctatttgctctatgctatgtaacattagacatatcaaatatgttttagatgattcattctagaagtggttaatgattacatcaatgataaaaatagctatttaaatacttcactaatattgcgggctacacacaatttttagatgagtagctgtaattctatcccttttccctggctgaagaaagcttctaataatgcagcataatgaagctggtgtattctttagcatctttaatttgctgtaattttagggattaatcatacattttgtctttttttaattttgaaacacaacttgaaatatttcacaaatgtagctatattcaatttaaaa

SEQ ID NO: 560917 - DNA, 492 bp, Homo sapiens
ataagcgataactaatttttttcatataaatatgtcccaaatattgcacatgtgttaggccatttttgcattgctatacaagaaagcctgagactggataattttaaaagaaaagtggttcattttggttcatgtttctgcaggctgtgcaggaagcatggcgctggtatctgcttctgtcgagggtctcaggaagctttcaatcacaatggaaggcaaagggggaacaggaccatcacatggtgagagtgggagaaagacagaggggggaggtgccacagtcttctaaacagccagatttcacgtgaactcagagcaagaactcactgcttacttagaggagggcaccaagccattcatgaaggagtttctttcctcatgacccaaacacctagcagwacgcctcatctccaacactggggattacattttattttattttagattttttttttttttttttgaggcagagtctcactctgtcacccaggc

SEQ ID NO: 560918 - DNA, 596 bp, Homo sapiens
tgatgcagcaagtgtcacattactgcccaaaagatgtcaactatagttactattttaacctaattaaaaacaactcataaaattattcacatgagtactaaaaagaaaagcaaagagaaaaaatattgcagatttgggggaaaaaagatgaattttgcttgaattccagtccagctacttagctctataaccttacactattttcttgcctaatatccctcatgtggcacatggaaatttaaaaagaaaactagttcacatggttattgtgagaattaagtaaaaaaaaaatatggacatgaaggaggatgacagcatttagactttgtcctagaatggttagaaatattctgaattcatatatatttatcacttttgacaagagacctttgggagatacatactataaaagctctgttgtatgtgcaaaaggaagtggcatagatcaggatgtaaggactggtaactcatttcagtcctttgcttattgatcataatatcttggacatgccacttcttttctgcctcactgaattattgtgaggataccattaaatagtacattttaaagtcaytttaacattaagtaatttctt

SEQ ID NO: 560919 - DNA, 530 bp, Homo sapiens
cgggttcaagcaattcttgtgcctcagtctcccaaatagctggaattacaagtgtgtgccaccatcaattttgatttttaataatcaaattctctctctctctctgtattaaaacctatactactactgactactactcttcagtcatactattctattattcacagctggttataggtatatatatatatttttagacaagactcattctgtcacccaggctcgagggcagtggcataatcatggcttactgctgccttgacctcctaggctcaagaaatccgctcacctcagcctctcgaatagctgggactacaggcatgtgccaccatgtctggctaattttctgcatttttttttgtagagwtggtggatgtggaactgggctcaagcaatccacctaactcggcctcaacatactgagatcacaggcaagagacaccagccccggccagtgtatcccatttttaaatatagttacattaatatcagaaatttccacatataaagtagagtcaaataaatccaga

SEQ ID NO: 560920 - DNA, 459 bp, Homo sapiens
ttaagctgtatctgagtccattaataattgtagaaaatcataatgaattaatattctaaaatctaggacttgcttctgactttgttctttactggttacaagatcttgagtaaatagcttctttctttgggtttcactttgctcattcagaaattcaataaaattgcaattttggagtatctgagatccaggtactgagcaggcattgatcatcatatgatgatgaacaagatacagcctgtgccctgtagtagttcagcctgataaaatgatgtccactgtctcactctgcaattatgtgggtttacagaagcatcatttctaataaaagcaggcacacagacacataaagaaagaaacattgttttttgttttgttttgttttgtttttgagayggagcctcactctgtcacccaggttggagtgcagtggcttgatctctgctcactgcaacctcc

SEQ ID NO: 560921 - DNA, 602 bp, Homo sapiens
taagcactcactattaattaaatttagagtatgtggtttttatatatctctaacccttccaaataaaaatccacccaacagaaattctgggatcgtcctcaagtatagtcctctcagagtggataaccaaatctaattacattcctgcatagaatgcttcagtattacccattacatttagcctagattttcaagttgctttcctagctaaatgatatcacttatctccagttactctttaaacacttatagaaatgggactattatgaaagctgtgagatattgcatacraaacaagatatgtgtattggcattttaacaaagcaatgcaaatgtagatatgaaggtttatatgagtttgatttggttgcctggacttcaacttgatttattagaaactacttttctcttcaggtgataattctcctcaagaatctttatatccctatcaatacttaccttatctactttctcacaatctctaatttttagataattaacgtaatgaccagaaggttcttgaggattcctttgtatgagcaccaattttatgttgggtaaaggtaaactaaacattctaaagtctcatagctatgtggtgg

SEQ ID NO: 560922 - DNA, 519 bp, Homo sapiens
attaacaaagaatttgtgtgatatattggtaaccatctatacaacgaatcccaactgacattaaaatacctgtgatatataaagacaaatatctgccataattaaattgaaggcttaacgtatgtaatatataaagtagttactaaatagatttaaataaaactcaaatttacagatcaaagaatgggtgatatctatggaagagaacgtagaaaaaaatcacaaaaggctaatatatgtgcaaaaacttcacattaataatcaaagaaacaatatttctaatagtgagatttttaaaaatgatatggtttggaaaatattttaaaattatatgaatattctctttggcaagatcatagtataacaattcccaaacctgttagcctaaatcgtttttataataaatatctgtaataccccttgrcaattctaagatgaaattcataaaaacaaactactaactgaattaagttagagacaaaaataaaatacaatgtctaattggaatataaaaaaata

SEQ ID NO: 560923 - DNA, 479 bp, Homo sapiens
tactaaaaatacaaaaattagccaggagtagtggcgcatgcctgtaatcccagctactctggaggctgagtcaggagaatcgtttgaacctgggaggtggaggttgcagtgagccaagactgcaccactgccatccagcctgggcaacaaagcgagagtccatctaaaaaaaaaaaaaaaaggaaaaaaagaaaaatacagtcataaatgtttacaagcttttaataatcaccagtgtataagagtcaatctcttaagtgtatttagcatcttaatacaaacaattttgagttaatgaactatgttaggtagttaaatgtttttgattcaattttatatgcgaccttttcttttaaatacatttgtaagtgtttaggtcattgaagaattgaagactcataaacagtttggctatctcatattcccttcataactcatgaagtacrttgctacatatattttttgtaattattatgttt

SEQ ID NO: 560924 - DNA, 276 bp, Homo sapiens
ttaatgaagcaactcaaggaaaatgaaggcaacaaccagagtaacagtaaaagataaagaaaaaaattcattttcttttttgtacagaaacattattattctcaaatactgagttgtctggcatccagcatgtggacaatgtctagaaatggtttaatactttctgtgaagcactatttagaactggttgatagatgtttccatgtagacagaagaatgaggwgctaccctagtgtgtcccttaatgaggcttcctgtgtaagaaattgagccggc

SEQ ID NO: 560925 - DNA, 583 bp, Homo sapiens
gtgaaagcctgaggtaaacagtgtttttaatctgtgaggaaagtgccatacccagagaaggaggtaatctgctgatccctggcatggtgaagaaacccatagcaaaaccagaaataacaatcatgtttattgccatttgtccagctatgtatttgttacagtaactgttctgagcatttgatacacgttatcttaaagagttgttatatctctgacatagccatgcttatcttcattctatttatgagaaaattgttagtgggaagatgtgagttaactgacctggaatttctgaactgccattaggaaagcaaagaattgaacattctcatttagtttattcaaaatttctgtttttaatcattgcattataaagaatggtagagcataggctgggcgtggtggctcattcttgtaatcccagcactttgggaggctgaggcgggcggatcatgaggtcaggagatcgagaccatcctggctaacactgtgaaactccgtctctactaaaaatacaaaaaaaaaaattagccaggtgtggtggtgggcacctgtrgtcccagcttctcaggaggctgaggca

SEQ ID NO: 560926 - DNA, 548 bp, Homo sapiens
agtgcattaggctgattagatggtaaactaatatgcaattttgctctgggtcagtgatatatctcagatatcaataatctaatctgatatgtagataactgaggaaggaatagagaaaggtaaagtgggaaagaagagccaaaaaatatttaagtactgaactaaattaaaatttctatctaaattattcataatagcattgtgatgtatctccattttaaatatttacttgaagttcatractgggcatggtggctcactcctgtaatcccagcactttgggtaggctgaggcaggtagataacttgagcccagaagttcaagaccagcctgggcacatggtgaaacccggttctacaaaaaaaatacaaaaattagccagtcgtggtgatgcatgcctgtggtcccagctacttgggaggctgagatgggagaatcatttgagcctgaaagattaaggctacagtgagccaagaatgaaaatgtgggccaggcacagtgactcacacctgtaatcccagcactttgggaagccgaggaaagaggat

SEQ ID NO: 560927 - DNA, 503 bp, Homo sapiens
ctcaatcactgccctacatgcaaatattcatctttgacccggtctgcactaccatcttcctgctatccactatcccttgtgcctcctccaattcgctatctactctgcttttaaagtaggttttgtaattcagaaaatttcattttccttcctccaaattcttgacggatctccataatcatatgataaaactgaaaaccctgtgctgggatttaatgcctttgatggcctggcctcactgtcgcctgggctggagtgcaatggcgcgatctcagctcactgtaacctccacctccagggttcaagtgattctcctgcctcagcctcgcaggtagctgattacggctgcccaccaccatgcccggctaattttttgtatttttaatagagacggggtttcaccatgttggccaggctggtctcgaattcctgacctcgtgatccgccygcctcggcctcccagagtgctgggactataggcgtgagccaccgcgcccggctgc

SEQ ID NO: 560928 - DNA, 317 bp, Homo sapiens
cttgtccttttcctagggcaagctgttcacagtggctctccttgaatctatcttcaaggagttgaagagctctggtactgaatcaactggttcagaactcaaaagttggctgsgctggtggctcacacctgtaatctcagcactttgggaggccgaggtgggcagatcacttgaggtcaggggttcgagaccagcctggccaacagggtgaaaccccgtctctactaaagctacaaaaattagccatgcgtggtggtgggcacctgtaatcccagctacttgggagtctgaggcaggagaattgcttgaacccagga

SEQ ID NO: 560929 - DNA, 619 bp, Homo sapiens
gtacttgagggaagaacgattctggataaaagaaattttgggttctgctggagatgtctgggatgcagttgtaaatatagccctaaagttcagtgataaagtcagagcgggaaatataaatttggatatcattggcaactatgtgacatttaaagcctagatactgaatgtgatcatccagcaagaggagcagagamctaacaacaaaatcttggatagaacaacattaaggacaagtataggcgaggggaaagtcagcaaagaaaaccaagatgataacctcagctgaagtagaaaggaaactatggcttaataatatcttaattctctcacaggtattagaagagtcatagaattatataaatttggttgtctgtattatggaagttttatttctgtattcattatggaagtttatgtctgtattgcaagacagaatgatcacgacatcagtatgttgttattcttcttattatttgcttaatcagtcaacattgatattaaatatttgcctccatcaatgtgataaatttgctcttgaaattttatacttgaatgatttttataactttattaaagcaatacatacatacaatgaataaactttttttaactgcag

SEQ ID NO: 560930 - DNA, 260 bp, Homo sapiens
agctgggactacaggtacgcgccacgatgcccagctaatttttgtattttttagtagaaacagggttttgccatgttgaccaggttggtctyggactcctgaacttaagcaatctgccctcctcggctcccccaagtgctgggattacaggtgtgagctactgtgctgggcctcccctttagtgtactgaggttctcaaaactctctttggaaaaagtgcaggccacagatcctactgtggctcagtctctttcctgagc

SEQ ID NO: 560931 - DNA, 518 bp, Homo sapiens
ttgattcaatccaatgtcatgtattaagcatccctagcgatctggcactgtgtgagagatatcaaggtaaataaaacactatatcttccctaaaagaacccacagtctagcacagtgcacaagtgtgagaaagataattacaggacatcataacaaactctacagaagatkttggaagcttagaggtagtgtaggaaggcatgacttgggtagggagaggggagggtctagaaagttccacagacttatcctcttgggttttctgagagtattccagatggacaagggaatgtaggttatgtggttaagtgtataacttgttccaggaagagctaacagagtaaaggaaggcacagaatcttagaacagcatggaatgtttggagatgtaaaaatcaatattaaaacacagagtacaagttgaagcatatcaaaagatgaagctggagaggaaaagagatgccaaaagacaaaggcccttgtgttgccttcatgaagaggtttgactagtagttttca

SEQ ID NO: 560932 - DNA, 340 bp, Homo sapiens
gcagtgccatctcccaggttcaagcagtttttgtgcctcagcctcccaagtagctgggattacaggtgtgtaacaccatgcccggctaatttttgtattttcagtagagaygggattttgtcctgttgcccaggatggtctcaaactcctggcctcaagtgattcactcgcctcgtcctcccaaagtgctgggattacaagtgttagccaccacacccggctgagatctgatcattttttaaaaagaaattaggctatttcaggaatcctcactttaaggacaggtcagtctttgtcaggagccctcagttaaggtaaaatagagttatgtcagaagccc

SEQ ID NO: 560933 - DNA, 634 bp, Homo sapiens
taaataaatacatggaaaagatcaaatatataaacatgattatatggaagatcacagatagggaatattgacaaaagaaattcaacatatccatagagaaaaacatacaaagatataatcgacaaaaacatccctgaaatagtgaaagttgaatttcaagatcaaaagagcacatgaggtctccaaaaattttatatatagcaatcaccttaaagatgtattctggtgaagatactacatttcaagggaaaagaatgaatcatatggacatctaggcagaaacaccaagctaaacaagagagaaataagtctggttggcctccaatcaagccattcgagctccgaggagaactgcagcttaagaggtgtatactcattgaagttgtcatttacatatttagacaacaggtggacattcacgagcatgaattcagggaatacaacacccatgaacctttcttgtaagaagtatmtgacagtggactctggcaaatgaagaaatcaatcaaaatacaacacttggaatgtaaaatgtatggcaagaaaattggtggtgagtgttaaatcctattaaatatggaactaagattacacaaccctgaggattgtacagaatggaatataaatgttatag

SEQ ID NO: 560934 - DNA, 514 bp, Homo sapiens
tagccgagtgaaggaacaatccaagcacagaatgctaggtgggcaattaatattcatttattcattcattcaaccaacaactattctgtgagcatctattatgtaccaggttcaggtctgcgagctagagatagagcagagaaaaaaatggtgccccactctcatggagattgtattttactggggagggygcatcagaaaattaacaagaggaaaatatatggcagaggtgctaagtgctatcaacaaataaagcaggcaccaggaacacctggcttgagaagcaggtctgaattgtacttagggtagtctccaaggaggttatatttgactagacaccggaaataagtaagggtcccatggctactggggaaacattttctgggctgaagtcttggcaaatgcaaaggtccagcatggccggattacagggatatggccggattacagggatatggttggattacagggatatggccggattacagggatatggttggatcacagggatatg

SEQ ID NO: 560935 - DNA, 596 bp, Homo sapiens
tgtttgggtcttatttcatctctcattagcaytttaacattttctacaaataatatttcttgtgtttattcctaagtatgttatcatttatgttttgtgctattataacatgggtcttttcttcccttagagcttgaaattagacatattgtatctataaaagctattgatttctgaaaattaatttattaaatttttattttgtaaaaaaaaaaatcatctaaacctgtaacaaaactcatttttaaaaagaagtacctaagtatagagaggaagactgaaagtcagcagtcatcatttaactttataacacttgtggcccttcaatacattctggaggaccgctgctctaacacaaacatagaacgaatgctggcctcattttgctttccaaattaaaaagagaaaaaacaaactaatatctgagggaataaactgaaaacagaaagctgcttcatgttagcatacattgagcaaaacttcttccacggatttactcccataggtaaaagctactagcaatagttgacataaaatacagaatgccttttatcttctagatatccaagtaaaacatgaatattttaagacactgt

SEQ ID NO: 560936 - DNA, 623 bp, Homo sapiens
ttccattcttagccactaaactgtaaaaacgctaggtgagatggttacagttcataacttttattaagtttgttaacataaatgatgtgaaaaccagctcccctgccccactctttgtgagcaaaatcccacagatttagtccaatgttctgatggaactgtaataagactactgggttaatcgactatttccattcagagactaacaaattcaattctaaaagaatgttttaatgtcacaattttatttcttaatcctcattttaattttaatttataaatgtggcagatgagccactatagatgaaaagtgcatgagattatgtgtgtgtttgtatgtatgtggatgtggatatatatgcatgtatgtatacatgtacgcacacatagacacatttatatcttctctccaccacctgcctatagcaaagatatyagggacctgaattcctttccaaaactgacactgtcaacccaagacaaaaacattacttgaaacaagctttcatgtttaatcctttctggtagtcccgaagcatggtttacagcttgttctttttttttttttttttttaggcagggtctcactctgtcacccaggctggagtgcagtggtgctatca

SEQ ID NO: 560937 - DNA, 566 bp, Homo sapiens
tagagcaagtgtctacacagcggttggcacccacgatagcagtgtgtttggaaggggcagagctgtcccagaccagcccctgcccctctgtagtggctgggatcaccagttgcactcctgccagtgaggaacatggagagtgagtggtgggcaggcaagcctggtttctgcagaagctgcagggactggatacaggacaggcaggcaagtgagtggctggggagaygcccaggtcaggacagcttactgccaagtgttcagaactgtccactctgcaaaaccatccccaaattacttattgaactgttttcactgctgagaggcagagccaatagaactcgccttgcattggggagcctgacctctagcaagatcagcatgcctccccctgggctccattcaatgttcccagtgaccaccagacctcaagcagagggctgatggtgagtcctggaattctccacaaataaagaagctgtgaaacagcgacaaacacaacatctaatcacccaaatccatcctatttttttcatctttttatccattcatctatccatccatccatc

SEQ ID NO: 560938 - DNA, 566 bp, Homo sapiens
tagagcaagtgtctacacagcggttggcacccacgatagcagtgtgtttggaaggggcagagctgtcccagaccagcccctgcccctctgtagtggctgggatcaccagttgcactcctgccagtgaggaacatggagagtgagtggtgggcaggcaagcctggtttctgcagaagctgcagggactggatacaggacaggcaggcaagtgagtggctggggagatgcccaggtcaggacagcttactgccaagtgttcagaactgtccactctgcaaaaccatccccaaattacttattgaactgttttcactgctgagaggcagagccaatagaactygccttgcattggggagcctgacctctagcaagatcagcatgcctccccctgggctccattcaatgttcccagtgaccaccagacctcaagcagagggctgatggtgagtcctggaattctccacaaataaagaagctgtgaaacagcgacaaacacaacatctaatcacccaaatccatcctatttttttcatctttttatccattcatctatccatccatccatc

SEQ ID NO: 560939 - DNA, 566 bp, Homo sapiens
tagagcaagtgtctacacagcggttggcacccacgatagcagtgtgtttggaaggggcagagctgtcccagaccagcccctgcccctctgtagtggctgggatcaccagttgcactcctgccagtgaggaacatggagagtgagtggtgggcaggcaagcctggtttctgcagaagctgcagggactggatacaggacaggcaggcaagtgagtggctggggagatgcccaggtcaggacagcttactgccaagtgttcagaactgtccactctgcaaaaccatccccaaattacttattgaactgttttcactgctgagaggcagagccaatagaactcgccttgcattggggagcctgacctctagcaagatcagcatgcctccccctgggctccattcaaygttcccagtgaccaccagacctcaagcagagggctgatggtgagtcctggaattctccacaaataaagaagctgtgaaacagcgacaaacacaacatctaatcacccaaatccatcctatttttttcatctttttatccattcatctatccatccatccatc

SEQ ID NO: 560940 - DNA, 566 bp, Homo sapiens
tagagcaagtgtctacacagcggttggcacccacgatagcagtgtgtttggaaggggcagagctgtcccagaccagcccctgcccctctgtagtggctgggatcaccagttgcactcctgccagtgaggaacatggagagtgagtggtgggcaggcaagcctggtttctgcagaagctgcagggactggatacaggacaggcaggcaagtgagtggctggggagatgcccaggtcaggacagcttactgccaagtgttcagaactgtccactctgcaaaaccatccccaaattacttattgaactgttttcactgctgagaggcagagccaatagaactcgccttgcattggggagcctgacctctagcaagatcagcatgcctccccctgggctccattcaatgttcccagtgaccaccagacctcaagcagagggctgatggtgagtcctggaattctccacaaataaagaagctgtgaaacagcracaaacacaacatctaatcacccaaatccatcctatttttttcatctttttatccattcatctatccatccatccatc

SEQ ID NO: 560941 - DNA, 586 bp, Homo sapiens
tatacccatcttctaaatattggtacattttattttacaatatgaaaagaattcattgatattaccactgaactcgtcagaaaagtccctaattattgagaatctgtcaggataaaggaggcacgcagaagttctcaaaattctaatttaaaattcaaatttgatcattgataacccatattatcagttgttttccttaaagtgacaggctcattgtgttcatcatgaaaaaatgtctgccaaatactcatgcctgagaaaccatagtttgttagtatttctttcaagttaaagtggtgtttcatgaaaacagtggctagttagatttgcaactacaatgagtaacaattgtacaaatgattttcaacacagccaacgcatcacagctaatgtgagtttcccattttgttatgcagggtattaaaatgaagggtactcaatggtagctatataataaaacacttttcctggcttcctcaggaacattgttgtttaagtgtataagtaatactgtgttaaagagtgtgatgactgatagcagagttgggcgcccckgccttcattcatgttatggagccagctgctt

SEQ ID NO: 560942 - DNA, 529 bp, Homo sapiens
gctgtcagcagggatctgccygagccaacagacaaaaagagatggaaatgttcacagcacctgccatgtgcagacggtgggctgggctttatcctcaccatagcactcagtttgtacatgagaaacccaaagctgggaagttgcagatgccaccttgggcgtcagcatgtcagctaagccccacaggcttagcaagtgagaggcctagaaggagtggagtaaaggtgttggaaaccctgccccagtgtgctcactcactttctgtgcttggttgattagggcaggggacagggacccatgcagcacctcccacccccactggacagtaggtcctgggctgccccacactttggtgactggccttcctggggagtggggaaagctggcatgatgctccctttgctaaagattaagttctgtagactcactccttttcaaagtttgggttagggttaggacacttggccactccaacagcagcttctggtagatagggtacactgtcattaggtcaaaagaggaagaattc

SEQ ID NO: 560943 - DNA, 558 bp, Homo sapiens
ctcgaactcctgatctcaggtgatctacccacctcagcctcccaaagtgctgggattccaggcatgagccactgtgcccggcctcacggagactttcatctctcctatttgcctcatcaccaaactaaagcaaacagctgtttcccatttcctcccttcctttctggggccctctccccacagacattcattttgacctcctttcccccgaataaaagtgttaggaaggttgaggagatgcatccagcttgttttccagggtgacacctctccaggcaagggtaagagtggggagataaggccatggtgagagaarcatatgggcagggtctggaagccaccctgaagcaagggcccaccgctgtggggaaacaaggagaggagatgcaggctgctgagggagttgaagggatggaggcagcagcccaagtcagctgcacttcgcactcacccaggattgcagccccgatgaataagctggtcaccacccgaagcagccagaacagcctctgagtcacaaggtaggtgggttaagtaaagagtgccttccttccacat

SEQ ID NO: 560944 - DNA, 525 bp, Homo sapiens
gagtttgttaaccttcttgaacctatatatatatacgtttttcatcaagtctgggaagtttacaaccattatttcttcaatatttttctgcaccagtgtcctcctcctcttcttctgagactccaataataagagtattagactttttgatattgtctcacaggtgcttgaggctctgtttttgtttcatttttttttctctcaatcttcaggctgtgtaattcctattgattaatcttcaagttcactgacaatttccaggatatctcccacaatttttggcattcagggctctcctttcctggttcttctggacagaaagatagtgttatctccaagatttagcttcccgcactgccatgcagctctgcgtgactaggactaccttaggaataaattggtaaaagaaaagacaaaaaaattaacagggattatcyccccatttttaaaacagctggagctctttttccagttttcttctgtccagaaaatcaggtttttcttagctttttaattctttgtgct

SEQ ID NO: 560945 - DNA, 550 bp, Homo sapiens
atatacaaatacatggaaattatataacatgctcctgaatgaccattgagttaatgaagaattaagatgaaaataaaaaaatttttgaaacaaatgaaaatgaaaacacaatatgccaatatctrtagaaaccagcaaaaaaagtgaaaaaaaagtttatagtaataaatgcatacatcaaaaaagtagaaatatttcaaattaacaacctaataatgtacttcaaggaactagaaaagctaagaaaaaaaccaaaattactagaagtaaagaaataataaacatctcagcagaactaaataagagagactttaaaaatacaaaggataaaccaaataaaatattgggtctctggatagataaacaaaatttataaacctctagccacactaacaaagaaaagaagagagaagacccaaataaaagaaatcagaaatgaaaaatgagacattacaattgatatcagagaaatatttaaaaagattatgagagtctattatgagcaactacatgccaataaacaggagaacctagaggaaattaatacatt

SEQ ID NO: 560946 - DNA, 562 bp, Homo sapiens
gcaactttttttttttttaaatataaagttgccaagaacacacaagggggaaaggacattctttgcaaaaagtggtggcaggaaaattggatatccatatgcagaagaatgacttaaatataatacccaaaactataaaactactagggaaaaacagggaaaatgctttaagacattggcattggcaaatatttcatggctaatactgcaaaagsgcagacagctataacaaaaatagacaaataggactatattaaactaaaagccttcttcacagcaaaggaaaaaatgcacagagtaaagaaacaacctgttgaatgggagaaacttctacgaactatttatctgacaagggacgaattaatatccagaatatacaaggaactaaagcaactcaaccaccaatatcaaataatcccattaaaaagtgtgttaaggacatgaatacaatttttaataagacatacaaatggctatcaggtatatgaaaaaatactcaacatcactaatcattagggaaatgcaaatcaaaaccacaatgcaataccattttatcccagtt

SEQ ID NO: 560947 - DNA, 493 bp, Homo sapiens
tgttctactcagtgggtgatttcatacactccatcttgatccccctgtttccaattatgttttctataatgatgattccccaagctcaaattctcctatcttccctgagttgtgaatctaagccaaagaaactgcccactggcaaactgcacttggatataccatatgcatataaaattcagaattttggaaatagaagtcatcttctcccctctcaataatacacttcatccttcatcagttattccaycttggccaatgaatgacatcataatccaggcagaaacccagtaaaagttttctttaattcctacatctaatcaaaaagtcatatctaccctccatttactaatgatttttcaaaattgcctcctcttagccagccacagtggtatgtgcctgtagtcccagctactcgggaggctgagacaggaagattgcttgagcctaggaatttgaatgcagcctgggaagcatagcaaaattttgtctt

SEQ ID NO: 560948 - DNA, 322 bp, Homo sapiens
cagcaggcccagtcaggggctcagagataaaactcccatctctctgggacagagcaccttggggaaggggcggctgtgggcgcarcttcaacagacttaaacgttcctgcctgccagctttgaagagagcagtagatctcccagcacagggctcgagctctactaagggaaagactgcctcctcaagtgggtccctgaaccctgtgcctcctgactgggagatacctcccagcaggggccgacagacacctcatgtaagagagctccagctggcgtctggcaggtgaccctctgggacaaagcttccagaggaaggaacagg

SEQ ID NO: 560949 - DNA, 486 bp, Homo sapiens
actacaagctctgcctcttgggttcacaccattctcctgccttagcctcccgagtagctgggactacaggcacccgccaccacgcccggctaattttttgtatttttagtagagacggggtttcacygtgttagccaggatggtctcgatctcctgacctcgtgatccgccccccttggcctcccaaagtgctgggattacaggcatgagccaccatgcccggcccccaaacttatttttaattacattttattatgaaatataatacatataaacatgcgtggtccaaagaacttgaaaatcacctatgtcctactacccagcttaaaaaataaaaaccttctgtaggccaagattgataaaaacataaaataaaaataaataatacattaaattttttttaccttttccagatcacagatttaaaaagaaaaaattttaaagaaacagaaacctcccatgtgcccctccttatgccatctcctg

SEQ ID NO: 560950 - DNA, 632 bp, Homo sapiens
aaaagggatataaggaggcagaaarccctagccacaaaaagctgatactacagtcatgtgtggctgggtgtggtggctcatgtctataatcccagcacttcgggaggctgaagagggaggattgcttgagcccaggagtttggtaccagcctgggcaacatagcaaaacctgtctctacaaaaattagccaggcatggtggtgcacaactgtggtcccagttactgggaggtgagaggtgggaagtcagaggattgcttgagcccaggaggcagagatcgcagtaagccaagatcacacaactgcactccagcctgggtgacagaatgagaacctgtctcaacaaaacgaaacaatacagtcacatgtcacttaacgataggggtacattctcagaaatgtatccttaggtgatttcatcattgcacaaacaccatagagtgtacaaatctagctctataacctactacatacctaggtcatatggcatagcctatcattcctggactataaacctgtacttcatgttactgtactgaatcctgtaggcaactctaggtcaatggtatttgtgtatccagatatgagaaagctatgtaaaaatatgttattataatcttatgagaccaccac

SEQ ID NO: 560951 - DNA, 619 bp, Homo sapiens
aacacaaatacattgtacaactgtacacaaatattttatatttttataagcttttttctatttccacaatttttaattttttaatttctttttttacttcttaagtttttttgttaaaaactaagacacaaacacattagcctccatctacactgtcttccacctccacagcttgtcccactgcaaggccttcaggggcaataacaggcatggagttgccatctcctatgagagcaacaccttcttgtgcaataccttctggaggacctgcctgaggctgttcacagtcaactttttctttaagtagaaggagtacactctaaaataaaaagtrtagtaaagccataaaccgtagtcattattatcaagtattatgaactgtacataattgtatgtgctatacctttatatgactgacagcacagtaggtttgtttacaccagcatcaccacaaacacgtgagtaatgcattgcactgtgatgttaagatggctacagtgtcactgggccataggaatgtttcagctctactgtaatcttatgggaccactgcctatattgactgaaatgtcatcatgcaatgcatgactgtactttaaatcatctctagattacttat

SEQ ID NO: 560952 - DNA, 597 bp, Homo sapiens
  misc_feature 312, 313, 517, 537, 541, 563: n = A,T,C or G
gccattatttatttaaagcatacaagccaaactccaayccttgttccacagttctatgttcccctgataatgttctgtttgctgtccctggttctatttttgagacaatttgctggtcaaactgataagtgactggtcactagacacacatccacttctctttgtgaatggattctcattctggtatacaaccttatgtctagggtggctttatggcagccatctggatcttgttgaagtctgggatgctgaagaagtctcactgtgtgagtttctgaccctgtaaggttgaggcaagatggaatgatggtnngactttaccagaaaaaaatgctatcttgtgaagtctccctcttctgataacaagtgaccctgctccctctttggtaagtgaggaaactgtggctcatggaagtggcatggctaatgcatggcaagcgaggtctgcctgactaggaagcctatgttctctctagtttatcactccttgcctgaagaaagagagcagatctagcanagggtggtagacaaaaacanaagntcatatattcaatgtgttgttnttagcttccagtgatttccacagtacacaattct

SEQ ID NO: 560953 - DNA, 620 bp, Homo sapiens
  misc_feature 294, 429, 463: n = A,T,C or G
cttgctggcgatagcccagatttaattgggacctgaagaatcatcatagatttcctgttttgcttctgacccaaggcatgtagcaccttctatctccaggaccgtttccctggtatatagcagggatccttcatagtcaataaatayttgaggattatgattaagatgaaatgatgaaaggagcacagctagaaccaaatgatattgaaaaagttactaaaaggaattcctgagtttcagataaaattgagttctgagaaagctaatagcttcaaattcctccacgtttctggnacttaaatgactaatcgtctaccaaaaaatggggtggtctttaggtagagccagaaaagattccagaaaaagatatctccatccactccattagtttcttaaatgtcttaatatgaacccacactgtctacctantcctgtcaatcctcctctactcccacattttgtnccaaggtagacagaggcttagagaaagtaggtttgaaatttctagttcaagcttgtctggcccacgagccatgaggccaagtatggctttaaatgcagcccaacacaaattcataaactttcttaaaacattatattttttacaatttttttttttt

SEQ ID NO: 560954 - DNA, 559 bp, Homo sapiens
agacacgcatgagccaaattgaccttataagtaggatgcttcttttttccttcacttctgtcattttctctaaatggtgacaatacatacatgtcccatgaagcttcacttttttttctgaattgatccccaacaaaataaggctctaaaaaataagtggtgtcctagacattgtaagccccctaaaatgacctagttaagtgaagatatagctgagatgcctgtggccagatactatggaattattggagtgatttatgctcgcatcttgggtgtctgttcttttttaaggaattcacttactctgatagaccatccaggatgtttgttagtaggcacaccctccaattttgaagtgctggggaggagatatggtcattacaaaagctgcttagagcaaagagtggtaattktgtgtgtgttgaatgtgggtgtcttttgaacactgaaagactacctaatgtcatgaaaagacaagtgacttgttaaaggaatggagctctcttcccctggggtactactagcctgtattaaacctttgtgaacattagggaaaggt

SEQ ID NO: 560955 - DNA, 533 bp, Homo sapiens
gcttattgtgtgtctttataatagaaattttagcttttttgtttgaacttggactatttgtcatttctggtctttatttttttgactgatttttytttttatgagtcccattcttgcatttcttcttttgtgtagcaatatttcatttctgacattgtatattttgcattaagtctgtcatatcgatttttctaaagagtgttggatttttttctggtaggcaataaagttacttttagattattttaactttttaggggtttgctttaaagcttttttaaggcatatttagaagtgcctttattttaggagtaaggctgttctgtttctaaggcattgccattctgaattatttttacaaaaggcactatatattcaacatgacctctgtggtctggctggtgagcaactccagtgattccctggccttctgtgagctctgggaattgtttctcttactcctacctagtaactcatttcttaggatttttttttttttttttttttggcctggcctttgtggggttttttcc

SEQ ID NO: 560956 - DNA, 565 bp, Homo sapiens
gttccttttccttcttttttctctaatcttttcttcatgccttatttcagtaaattgatcttccatctctgatatactttcttccacttgatctattcagctattgatagttgtgtatgcttctcaaagttctcgtgctatgtttttcagctccatcaggtcatttatgtttctctgtaaactgcttattctagtaagcagttcctgtaaccttttattaaggttcttaacttccttgcattgggttagaacatgctgctttagttcagaggagtttgttatcaccygccttctgaagcctacttctgttaatttgtaaaacttattccccatccagttttgtgcccttgctggagaggagttgcaatcatttggaggagaagaggcattctggattttgaaattttcagcatttttgtgctgactttccctcatcttcatggatttatctgcctttgatctttgaggctgatgacctttggatggggtttttgtgtgggggttttttatgttgatgttgatgttgttgttttctgtttgttagtttttcttcaaacagtcaggc

SEQ ID NO: 560957 - DNA, 619 bp, Homo sapiens
aattgttaacaattttagaaaattgaatccaacaatgtatcaaaagcataatgcattatgaccacttcggatttagctgagtaatatgagattggtgtartatttaaaaaatcaatgaatgtaatttattacattaataaactgaaaaaaagtatatgatcatcccaatcaatgcagaaaaagcaagcacttgacaaaatccgacaaccattactgatgaagtaaatgtcagcaaactagaaattgaaggaaacgtcttcagctggataagcagcatctacaaaacaaaacaaaaacccacaactataaacagcatcatacctaggggtgagaggttgaagatcaggagcaagtcacagatatttccttctcaccatttttgttcaacatggggttgcaggttctaatcgatgaaatgaaactactggatttcaggacagtgtggcattgggaacaagatagcaaacaggtcatagaacaagacagaaatggaatgagacccacacatgtacagtcaattgattttcaacaaatgtgcagagtgtatcagtcagggttctccaggggaactgaaataataagatagatatatatacaaaggggagtttattaaggagta

SEQ ID NO: 560958 - DNA, 400 bp, Homo sapiens
ttcagcctttctcctctattccygcatgcagcctgcgatctagggccagccatgaccaaaccctcgtgcctcatctgcttccctccagctcctcagactcgcccttcagggcgcctgctgttcagagcctgcatgggaatccgcatgaggtcatattttgcctggagagcagtggacgccacagtgcaccatggccaagatccatctcccaatcctgactgcaagtttctcggagccggagcacaaatttgccatgcattcttttgttcattcttttattactgtatattcattcgcaggtgatatgcatatgtctgtgcggtggaaggctgaaaatgacttgattccttcttagggcatttggaatctagtctgagagtctggaatatttggttcctaa

SEQ ID NO: 560959 - DNA, 334 bp, Homo sapiens
ctgtgtcactgtggtcatgcaaagtgctatcaatgtattatggttaacattttgtgargaaaacttttttggatcacctgctattacaggccctgctgaggcctgggcccaaaggctttgtatttcagcatagccagcttgctttaatgctctatttcccagcagtttcaaactcacaaagatggccaacagtggcagatgggacctgacacttgaacttggggagctttcctccaacaggatgaatccatggaagataccaggcacattctcaaaagaacagaagtttagctggtggaaatgagagtagggtggatgtaagttaaaattgttg

SEQ ID NO: 560960 - DNA, 514 bp, Homo sapiens
tgacagtgatgatttcctgggagtatgcataagtcaaaacttctcaaagcagaaacttgacgtggatatagtttattgtttatcaataaactcaatacctcaataccgctgtttaaataggagcaacaaaaagcctgtctttggaaaagagaggtgcctatatgagtaaggcaggctttattcacactgctgttttttgkggatgtgagttcatccctcttctgctaattgttcactcatcaataaattaggactctttgttttgattgaaaagaaaagattttgggaaggaaccacagttaaaaacgtgggcttggtgtgagaagattgctccacgaatttcgaactctgtgaccttgaacaggtccaagattctcaccttctaaatcagcttgacttcaccgggcagctgggaagatttaatgaggtagaaatgcctaacgtgcccaacatggtgcctgccatttgtgcttcaggagtaattcgtaagaatgcaccggtggatctttccctg

SEQ ID NO: 560961 - DNA, 524 bp, Homo sapiens
ggggaccaattctgccgaagacccatgtgtcctgggagggctcggaaactgccttcctccctaggcatcaacaaattaattacttgtcaaattgcatcatgacagaaatacatcagaagtctggagaaataaagaaataaagagaaaaatagggcaatactagagtggttctgattgccatagaattttaaaatataaattaaaacaataccaccactgaaccaagtaacttgtatacgamggagttattctttgttgagggcttgctcaaaacaaatattttcacatttaatattcaaaatgatgctttgaatagcaatttatataatcccattttttaaaaaataagcaactgaggctaactaggaattcaaagccagacaatccagcaattccacgactgactcacaatagtttgtttttgcattgctataaagaaatatctgagactggtattccttttaaaagacaggtctagttgtatttttcatactgctagaacaaacacatccttacatctcagc

SEQ ID NO: 560962 - DNA, 588 bp, Homo sapiens
tgctgacccttcttgggtttaggatgaccattttccgagaatagaaaatttgggctaaataagaaatactctttaaaattgctttattgctatgttggtttttctttgtaattayggttgagttattccataaaatttgctgctacaatagtcttataatggcaatacagtccaaccaatttgtttttcactggagtagatggtaaatgggccacggaatataaacttgttttgctggagatgctggttaggttttccagaagctgttggttgggttttccataagaattggactagaagcaaggctgaatttgaggtatcctagaaatagcatgagaaaaatgccttttaagccatatttccatcttaaataatgagcagaaccgtgcgttgaaagggaatcgtttgtgttggactcaagcagtgaaggagggaaaaagaaaaagaagaaaacatggaaagaccagaacaaaagtaggcagagtgcctggaaataaatatgaatatacatataattttaaaatgttaaaactatagacttgaagaaatagaactctcaaactctgaagacaggagtcaactggcata

SEQ ID NO: 560963 - DNA, 588 bp, Homo sapiens
tgctgacccttcttgggtttaggatgaccattttccgagaatagaaaatttgggctaaataagaaatactctttaaaattgctttattgctatgttggtttttctttgtaattatggttgagttattccataaaatttgctgctacaatagtcttataatggcaatacagtccaaccaatttgtttttcactggagtagatggtaaatgggccacggaatataaacttgttttgctggagatgctggttaggttttccagaagctgttggttgggttttccataagaattggactagaagcaaggctgaatttgaggtatcctagaaatagcatgagaaaaatgccttttwagccatatttccatcttaaataatgagcagaaccgtgcgttgaaagggaatcgtttgtgttggactcaagcagtgaaggagggaaaaagaaaaagaagaaaacatggaaagaccagaacaaaagtaggcagagtgcctggaaataaatatgaatatacatataattttaaaatgttaaaactatagacttgaagaaatagaactctcaaactctgaagacaggagtcaactggcata

SEQ ID NO: 560964 - DNA, 594 bp, Homo sapiens
agcgatccacctgcctcagcctcctaaagtgcygggattacaggtgtaagttattgtgactggccccaaatttttatttatttatttagtataaacttggggatacaagtgtaattttgttacatgcatacattgtgtagtggtgaagtcagggtttttagtatatccatcacttgattaatgtacattatgcccatttagtaattactcatcatccactctctctcctctccctcatccttcggagtctctattatctgtcactccacactctacatccatgtatacacattatttaatctcacttatgagtgagaatatatgatatatatatatatctgtgtatatatgtatataggtgtgtatctatatgtatatatacatataaatcacatgcatattcatgatctatacatgtatacatatacatatgtatatgtatatatgtatatataacattttcttaatctaatcatatgttgatagacacttaggttgaatccatatctttgcaattgtgaatagcactataataaacatacagattaagatgtctttttgatataaggatttattttcctttggggatatagc

SEQ ID NO: 560965 - DNA, 587 bp, Homo sapiens
aacttatacctgcatgtttctatccagtgaaaggctgtactatggtatctgaatcagagaacttacactgcatgattttcttctttttctcaaagtggcactgagtgcagctaagctgttacacacttgatgtaaaatttttccatttaaaaatcacccatctttaaaaagggaaaaaatagtcctggcattttggggaaagagttttctctgaaggaaggaggagaaaaatatggagaataatgaattcatcaagctgaaaatgcacgaagcagcgaagcgctcaggcttcaatacatggcaaatggaaagagagctcccattactgtcgagatgcacagacacagccccgctaatcgcttggtcatgcttgggagacactaagtcatcacaggccatgacatggtgagaacagggtgccaggggtttgttgtaagaaaaaattgtttatttaacatccataaccagcagcactcctttctctgaccctcatcctcaggtgacaagtcttggtttggaaaatgcatatgtatgtgtgtgctgtgtgtgcrtgcgtatgtgtgcatgtgtgtgtgtgtgtgtgttta

SEQ ID NO: 560966 - DNA, 582 bp, Homo sapiens
aatgaggtgtgatcacgccactgcactccagcctgggaggcagagaaagactctgtctcaaaaaaagaaaaagtaaaagcagaaagacaaggcataacttgagttacatactgagaagtatctcttaaaaatgagatctagtgtcctatatgtcaggaagttgagaagggggaattaattctctctaattctttacttgggggaccacataaattcccaaggagttttgtagcttctgactctgattctgtacccatcctgtmacccccaccccccatgcacacaacaaagcagatgcagtttttggctctcccagcccatctccatgtagtttttcaattccaatcatgttttgttaacataggtacatcatcacagggttaagaagcaacccccagcagcaatgaatctgggattgcttctcatagtctagccttagtttcctctggtttgacagctgggagctagcaagtgagaaatttgggctccctgcatgaatattctagaagcttatttcacttggcaatgtgacacccttagtgcacttctaacttctgctatttctcttcatagtcattatct

SEQ ID NO: 560967 - DNA, 582 bp, Homo sapiens
aatgaggtgtgatcacgccactgcactccagcctgggaggcagagaaagactctgtctcaaaaaaagaaaaagtaaaagcagaaagacaaggcataacttgagttacatactgagaagtatctcttaaaaatgagatctagtgtcctatatgtcaggaagttgagaagggggaattaattctctctaattctttacttgggggaccacataaattcccaaggagttttgtagcttctgactctgattctgtacccatcctgtaacccccaccccccatgcacacaacaaagcagatgcagtttttggctctcccagcccatctccatgtagtttttcaattccaatcatgttttgttaacataggyacatcatcacagggttaagaagcaacccccagcagcaatgaatctgggattgcttctcatagtctagccttagtttcctctggtttgacagctgggagctagcaagtgagaaatttgggctccctgcatgaatattctagaagcttatttcacttggcaatgtgacacccttagtgcacttctaacttctgctatttctcttcatagtcattatct

SEQ ID NO: 560968 - DNA, 622 bp, Homo sapiens
acacatctttgagactgtttattttttctctcagtctggtttttctctgtttatcagattggataatttctactgatttattttcgagtttactgattctttcctcttccattgccattttcctattgagcagacccaataagatttttattgtgggttattgtattcttcaattctaaaatttccatttgatttttctttctatttcttatttcctattgctgaggttttctactttaactttgtttcaggagtgtttgtgactgcttgttggaacaatttttataatagtttctccaaaaggctgttagaaaagtccaacatctgtatcttcwaaacatccgtatctgttcattgccttcttgatgtaggttgaaatttttctggtttttcttaggccaaataattttagatagtatctgggacatttttaatgtgttttgagactatgtgtcttgcttaactcttatggaatatgtgatacttttgttttaccaaccaatcaaattgatgagtttcagtccacaagttccaactgaccttctcatggctatggtttcaaaactaggtcagttttcaaagtttttgcagttattcagatttttcctgtgtgtgcaccacc

SEQ ID NO: 560969 - DNA, 537 bp, Homo sapiens
cctgactttctccctgttttttagacaacattttgttttcaaattgaacgcatctgttgttgtcattcttccatgagtagggcctcaaagctcatatctatgcatgcgatacccaattgtacattccagtcttgacctgtcttttaattttcaacagcacttcaagatgctggtcaaagacaatcatttttcaaacattttttatcttcttttccaggttatcacctcctgactrtgattttgttaatgactcactgttttactccaatatccatctccactgaaaaatacctaagtcatcttttaaaaaaatcaaaaataaatgacttttctttatttgtcctttatattacgggtagagttatgttgattttttattttattgtatttattttattttattagagacagggtctcattctgttgcccaggctggagtgcaatgatgcgatcacagctcactgcagcctcaaactcctgggctcaagtgatcttcccgcctcaacctgctcagtagctgggactacaggtgcaaga

SEQ ID NO: 560970 - DNA, 537 bp, Homo sapiens
cctgactttctccctgttttttagacaacattttgttttcaaattgaacgcatctgttgttgtcattcttccatgagtagggcctcaaagctcatatctatgcatgcgatacccaattgtacattccagtcttgacctgtcttttaattttcaacagcacttcaagatgctggtcaaagacaatcatttttcaaacattttttatcttcttttccaggttatcacctcctgactatgattttgttaatgactcactgttttactccaatatccatctccaytgaaaaatacctaagtcatcttttaaaaaaatcaaaaataaatgacttttctttatttgtcctttatattacgggtagagttatgttgattttttattttattgtatttattttattttattagagacagggtctcattctgttgcccaggctggagtgcaatgatgcgatcacagctcactgcagcctcaaactcctgggctcaagtgatcttcccgcctcaacctgctcagtagctgggactacaggtgcaaga

SEQ ID NO: 560971 - DNA, 506 bp, Homo sapiens
gctgtattctgaagccctatataaacttaaactaaataaattttaaggaacaagtcttgtgcctgatgtagaggccacacagaaagttcaccaaactgcccaaagctgtaactagagacattcaaattgcaaaccaggatgagaaactgacatttttcacgttgtagacagcttttctcaagataygggaacaaggctccctaccacatggaatctcgcccctttttctacctttctgacttgacaaaataatgctgcaattaaaatttcccaattagtaaatgctataggtaacttgacaaactccagcctaagaaatcctttcagttcatctagttggcaaccttgacaatatccctgacatgactgtgtattcaaattgtactgctgatcccttcagtagagttgtcattgttcgctttaattcaacccagtcaaccacaaaagaccccaaacagccaaagcaatcctgagcaaaaagagcaaagctggaggcatctcactac

SEQ ID NO: 560972 - DNA, 506 bp, Homo sapiens
gctgtattctgaagccctatataaacttaaactaaataaattttaaggaacaagtcttgtgcctgatgtagaggccacacagaaagttcaccaaactgcccaaagctgtaactagagacattcaaattgcaaaccaggatgagaaactgacatttttcacgttgtagacagcttttctcaagatacgggaacaaggctccctaccacatggaatctcgcccctttttctacctttctgacttgacaaaataatgctgcaattaaaatttyccaattagtaaatgctataggtaacttgacaaactccagcctaagaaatcctttcagttcatctagttggcaaccttgacaatatccctgacatgactgtgtattcaaattgtactgctgatcccttcagtagagttgtcattgttcgctttaattcaacccagtcaaccacaaaagaccccaaacagccaaagcaatcctgagcaaaaagagcaaagctggaggcatctcactac

SEQ ID NO: 560973 - DNA, 506 bp, Homo sapiens
gctgtattctgaagccctatataaacttaaactaaataaattttaaggaacaagtcttgtgcctgatgtagaggccacacagaaagttcaccaaactgcccaaagctgtaactagagacattcaaattgcaaaccaggatgagaaactgacatttttcacgttgtagacagcttttctcaagatacgggaacaaggctccctaccacatggaatctcgcccctttttctacctttctgacttgacaaaataatgctgcaattaaaatttcccaattagtaaatgctataggtaacttgacaaactccagcctaagaaatcctttcagttcatctagttggcaaccttgacaatatccctgacatgactgtgtattcaaattgtactgctgatcccttyagtagagttgtcattgttcgctttaattcaacccagtcaaccacaaaagaccccaaacagccaaagcaatcctgagcaaaaagagcaaagctggaggcatctcactac

SEQ ID NO: 560974 - DNA, 506 bp, Homo sapiens
gctgtattctgaagccctatataaacttaaactaaataaattttaaggaacaagtcttgtgcctgatgtagaggccacacagaaagttcaccaaactgcccaaagctgtaactagagacattcaaattgcaaaccaggatgagaaactgacatttttcacgttgtagacagcttttctcaagatacgggaacaaggctccctaccacatggaatctcgcccctttttctacctttctgacttgacaaaataatgctgcaattaaaatttcccaattagtaaatgctataggtaacttgacaaactccagcctaagaaatcctttcagttcatctagttggcaaccttgacaatatccctgacatgactgtgtattcaaattgtactgctgatcccttcagtagagttgtcattgttcgctttaattcaacccagtcaaccacaaaagaccccaaacagccaragcaatcctgagcaaaaagagcaaagctggaggcatctcactac

SEQ ID NO: 560975 - DNA, 515 bp, Homo sapiens
ccctcccctcaggcacagccttctgcagaaatcctttctgacccttcctcttcttctttaggcttggtgccccttatgggggcacatgttattgttttgaattttttatttgtatagacttaggtgcaagtgcagttgtgttacatggatatattgcatagtgaagtgtgggttttcagtgtaaccagcacccaaacagtaaacactgtacccaatgggtagtatttcatcattcaccttcacccygctactactctcccattttttggagtctacaatgtctgctcttctactctgtatgtccatgggagggcacttgtttttgaagaggtaatttaatgggatcatgaaagatttgggcctaaattctgctctgccacttgtttctagctgtacaactcaagttaaattacttaacttttctgggcatcggcatcctccactaaaaggccagtagtatcactgggtttctgggagcatcacatgacatatttcccggcacattgtaagtgctc

SEQ ID NO: 560976 - DNA, 603 bp, Homo sapiens
acagtgggtgccagctaagattctttcgcactccagcttyaagtcttacatgaaggcagatactacattccaccactgggaaggagagaaagcaggattaaaggcacatttgcattgaagtagtgcaaataaatgcaacccagagcagctgaaacctgagcccagaacgatgtgactcctccatttgaacttctaaggggactacttttatggtgccatggcaacagcatcaccttccatggttctcttgaagaaaattttgcagaaacataatcagaatatatgagtatttggcactgatttgatgagccagtgatcaaagtattcatttcttatcacattttgttgtgcagcttttaacttctaagaaattatccaaataatattcagcatagaaaaattagaatatgcacataaataaggaaaactaccagtagtctctcaactcagatataagcactgccttgcagttattttcctatgcctatatacccaactatatgcaagagggagggtaaaataaagattcttttttgagacaaagaaggaaagggttttctactcatagaccttcactgaaataattacacagagctgtcagtc

SEQ ID NO: 560977 - DNA, 547 bp, Homo sapiens
ggatggagtgcagtggtgtaatcttggctaactgcaacctccaccacacaggctcaagggatcctcccacctcagcctccttgtagctgagaccacaggwgtgccccaccatgcctggccaatttttttattttttatttttgtagaggtgaggcaaggtctcactatgttgcccaggctggtcttgaacttctggactcaagtgatcttctcagcttggcctcccaaagtactgggattacaggcatgagccaccatgagccaccatgcctggccctgcaattgatttttaaagtctttgtatcatgcttcgctctcttccagtttggatatatatatttttttattttttatatcttcctattaagatgtatacttagagcaaatactcatcaagttccttctgatgaatactccatccctaccaagctacagttttctttttaaaaactaggatccttatactatatttcaatgatggagctcccttttatatattaaaatcaaaccagttattataacacaatggaattgacactctagggta

SEQ ID NO: 560978 - DNA, 547 bp, Homo sapiens
ggatggagtgcagtggtgtaatcttggctaactgcaacctccaccacacaggctcaagggatcctcccacctcagcctccttgtagctgagaccacaggtgtgccccaccatgcctggccaatttttttattttttatttttgtagaggtgaggcaaggtctcactatgttgcccaggctggtcttgaacttctggactcaagtgatcttctcagcttggcctcccaaagtactgggattacaggcatgagccaccatgagccaccatgcctggccctgcaattgatttttaaagtctttgtatcatgcttcrctctcttccagtttggatatatatatttttttattttttatatcttcctattaagatgtatacttagagcaaatactcatcaagttccttctgatgaatactccatccctaccaagctacagttttctttttaaaaactaggatccttatactatatttcaatgatggagctcccttttatatattaaaatcaaaccagttattataacacaatggaattgacactctagggta

SEQ ID NO: 560979 - DNA, 595 bp, Homo sapiens
atcatccattttgtgatctatgataagactgtaattatgtccaaataaccagaaagttcaaatgtccaggttttatcactagtcatcagagaaatgcaactcaaaaccacaatgagagatcatctygcccccagctaaaatggcttgtatcaaaaagacaggcaataacagataccggtgaggatgtggagaaaggggaaccctcattcaatgttattggaaatgtaaattaatatagccactatggagagcagtatggaagttcctcagaaaactaaaaacagaaatttatgtgatccagcaatttcactgtgtatatatccaaaataaaggaaatagatatatcaaagagatacctgcactctcataattattgcagcactattcactgttcactattcactattcacaatagctaaaataaaatcaacctaagtgctcatcaatggatgaatggataaagaaaacagggtatatatatacaatggagtaccatgcaaccatcaaaaaagaacgagattctatcatttacagcagcatagatggaactggaagccattatgttaagtgaaataagccaagcacagaatgacaa

SEQ ID NO: 560980 - DNA, 560 bp, Homo sapiens
cgaatggtatttgctctttgcaaataaataagaaggcactggatttatattggtaatttagagtagcttagaaagccaactgaaaaaaaggaagggaggaaaaatgaaggaaataagaacagaagaaaggatgggaggaagaaaggaaagaaagcgagtgggctgcctcaagtagaacaaacacgagaacaactgacaaactttcagtgagtcttggaacatacaggcagtttgaggttctatttaatgtgtcaagatgtactgtgttttsgagatattttagtcaactggacttagtagtaattcatactctccacagcatcataaaagtttcagtttgtgccagggaagataaactattttgaagtaactttgaatttcatttctaccttttcaccatgtctgcatagacatggccttattgtagcacatagctcactgtagcctcaacctgctggactcaagtgatcctcctacctcagcctcctgagtaactaggactacaagcatgtgcaaacatgccctactaattttttatttttttgtagagatggggtctt

SEQ ID NO: 560981 - DNA, 622 bp, Homo sapiens
taactcacaggttaaagaagacatcaaaagggaaattcaaaagtatttttaattgggtgaaaatgaaaacacagcatataaaaatttgtaggatgtccctaaaaataaaactcaggggaaaacacaactctgaaaagaagaaatgtgttaaatcaatgcccccagtttccaccttaagaaaatagaaaatagagggcaaattacacccgaagtagattgaagtacagatataataaaaaattaaagtagaaattaatggaatataaaataaccaaaaaattaatagcaaaatttaataaaaccaaaagtgattctttgagatatcagaatagataaacctctacycagacttattagggaaataaaggagacaggaaggaagaaagagggtggtggcagggagggagaaaaattttaaaatttttaaaaataagagacattgtgtgtgtgtgtgtgtgtgtgtgtgtgtgtgtgtgtacgagtgtgtgtatgtatgtgtgtgagaatccttggaagacaagttgtatctacctggactgaaccatttatccatccactcgttcatccaattgatcaacaattttattctaagaatatatcatgtaccaatctctgttccaga

SEQ ID NO: 560982 - DNA, 525 bp, Homo sapiens
gtgctgcaagtttggcttatttttgtttctcttccttacttttttctgattaattttatgaggtttatagggacactttgacttcaagaagggcattggacatcaagtgrcaataaattattcctactctttggggttgagtgctgagcttttcattttcttggatccccagttttatcatgttaatacccaactctttggatataagaagtagatggtttactaaaaatagttcatttcctgtgatgtccaggtatttcttattaactttttctccccttactctgagaagtcttttaaccctggtgtggagtttttaaaagtcacccgtattaaagcaccatttgtttttgtgggggacagaccatgtgcttggtttgaatgcagcaatggaaaatgtttgtcctcttatgccattagaattcacatctgttaacctccagggcatcacaccaaaaccatctgcttgactagtatttgctacgggcacagggagtgggggtggaagggacaaagagagagtaa

SEQ ID NO: 560983 - DNA, 618 bp, Homo sapiens
tcttgacacagggccctgggtatgtgttgaggacaatcagatgaaggcttaaagggaagactattagctcctgtctcaaggggatctattttaggaaggagacaagacagtacgtgtgaaatgttaaattaattacccatagacagactctaagatttcagaggtgtgttgattggggaaagctctgagaagaaggtaggagcaaagtcagccctcataggacagctagatctcgatggactcagaggagcagaagggaaagccagcaaggggcatgtttgggagcccaccatgacctggggagagaccctcccaaggcaaggggactgtgaggtaaaggtccagagtcaggctcccagtgtaaggatccagggggggccgagacccaaaagcttgtctgcatggagtgaagcatcctggaagcatctaagcagaaatgtgagcacaatgaggccagagaagggtggtttagagaacgatggttggagaacagtggtttagagaagggtggtttagagaaygatggtttagggaacagtggtttagagaatggtggtttagagatcagtggtttagagaagggtggcttagaaaacgatggtttagggaacggtggtt

SEQ ID NO: 560984 - DNA, 618 bp, Homo sapiens
tcttgacacagggccctgggtatgtgttgaggacaatcagatgaaggcttaaagggaagactattagctcctgtctcaaggggatctattttaggaaggagacaagacagtacgtgtgaaatgttaaattaattacccatagacagactctaagatttcagaggtgtgttgattggggaaagctctgagaagaaggtaggagcaaagtcagccctcataggacagctagatctcgatggactcagaggagcagaagggaaagccagcaaggggcatgtttgggagcccaccatgacctggggagagaccctcccaaggcaaggggactgtgaggtaaaggtccagagtcaggctcccagtgtaaggatccagggggggccgagacccaaaagcttgtctgcatggagtgaagcatcctggaagcatctaagcagaaatgtgagcacaatgaggccagagaagggtggtttagagaacgatggttggagaacagtggtttagagaagggtggtttagagaatgatggtttagggaacrgtggtttagagaatggtggtttagagatcagtggtttagagaagggtggcttagaaaacgatggtttagggaacggtggtt

SEQ ID NO: 560985 - DNA, 421 bp, Homo sapiens
tttttacggcttcgtaaatccattctttgcctaatgccttagccaccttgggtggctgggaggggggaaagcaaggaatcccataaacaaggcagcatccctgttaaaactagatcatctgattccaatccccatgctcttcccamcatggtgcactgctgtggaggtggcagatgttgaaggcctccctcaatctggccccagattctctccttgatctaatttcccataaacctacgcttgccttccaggtctccagccacactgagttccttgtctttcatggatgtaccattagttagtgctaagtcaatgtctttgctcttgctgtccctcccttctatctagaacattatctgcttagaatagtttttgtccccttggctgcctgccaaatttctaaataaagggcagccacttc

SEQ ID NO: 560986 - DNA, 429 bp, Homo sapiens
ttactaaaaatacaaaaattagccagatgtggtggtgggcacctgtaatcccagctrcttgggaggctgaggcaggataattgcttgaacccagcaggcagaggtttgcagtgagccaagatcacatcactgcactccatcctggaggacaaagcgagactctgtcttgaaaaaaaaaaaagctcccagaaatgtccagaaccagccagattcccaggagaattctaccctacatttaaagacaaattaacatcattttttcacaattagttcagaggagggagcacatcctaattcattttgtaaagctggtattgtattgatacaaaaccaaagacagtaccaaaataataataataataaaaatctacagaccaatacatctcatgaactttgatgcaaaaatcataaacaaaatattcacaaagt

SEQ ID NO: 560987 - DNA, 429 bp, Homo sapiens
ttactaaaaatacaaaaattagccagatgtggtggtgggcacctgtaatcccagctgcttgggaggctgaggcaggataattgcttgaacccagcaggcagaggtttgcagtgagccaagatcacatcactgcactccatcctggaggacaaagcgagactctgtcttgaaaaaaaaaaaagctcccagaaatgtccagaaccagccagattcccaggagaattctaccctacatttaaagacaaattaacatcattttttcacaattagttcagaggagggagcacatcctaattcattttgtaaagctggtattgtattgatacaaaaccaaagacagtaccaaaataataataataataaaaatctacagaccaatacatctcatgaactttgatgcaaaaatcatmaacaaaatattcacaaagt

SEQ ID NO: 560988 - DNA, 599 bp, Homo sapiens
ggctgctaggaaaatttctgtatgtctttttgtgaacatacatttatatttctcttggataaatacctagaagtgggagtgctaggtcatagggtaggttatgtttagttttataagaaaccactagccctattccagagtggctgtaccgttttatgcttttaccaactgtattaatcagctcaagctgccataacaaaataccataggcagaatggcttaaacaacagacatttattttctcacagttctggaggcaggaagcccgaggtcagggtgccagagtgagggctttcttctagccaagaaggcccctgccatcttgccgtgtgcttacatgaccttttttttaagtgtgtgagtggagacagagagagaaagagagagagagagrgggtgctctttagtgtcttttcttataaggacattaatcctattgaatcagggcccagcctttattactttatttaaccttaatcttaactttaatggtcctatcaccaaatactgtcacacgggaggtttcaagataagaattttggagggacacaaacaatcagtctgtaacaccaacaatgtgtgaaagttccagttttgtc

SEQ ID NO: 560989 - DNA, 585 bp, Homo sapiens
ttataatcaaaattaatatactacattaaaattactgaaatataaatgcataccaaaatgctgtaacaacaatgggggaagatttttatgaaagctcatgcttcactttgaaagggaaaaatgccaaattattcttcagtcacgtagtaggcaatagaggttaaagctacttctgaacatgggactaacacaagttaaactaagaacatctacaacttctataaaataatagagctaaaagaaaactcactgtctaattgaagaaacaaggacttccrtttactttattctttaaaatctgccaagaaggggttcccctcccatattatgttgctctgcttcttcacccacacatcatccttctgggcatttagtgtgctgacctaggtagacatggtgaaaatctattactcataggtatctatataaacccattactctttttgttttttgttttttttttttttgagatggagtctcactctgtcacccaggctggagtgcagtggcacaatcttggttcactgcaacctccgcctcccatgttccagcgattctcctgcctcaacctcccaagtagctggg

SEQ ID NO: 560990 - DNA, 502 bp, Homo sapiens
ctctgtctcttcctctctctgtctgactttctctttctctctttcctttctgctggtctttccctgcctctgccagctgcttatgctgctgttctcctctctccttcccctttttgatggcttcagcagtgtaagactgccacctccttgggtttttgcactgcatgcaagaactccatgatttccttgtggtatttaatgggggttcccccagaggttagggactcccttcctttccatattgcagcatgggcatrtaggattagataagcatacttactatctgtagcaaagtctcccaattacaactgaggaggtaagagaaatacctggatacaggatgtcccaggattcctcatatggtaacggaccttgaggacagctgtctgggacaggagattaacactgagaaagctgcaccagtgtccaggaggaagtcaatttcctggccctcaatggttatatgtacctggggctcagtgagggtgatgacataagctgg

SEQ ID NO: 560991 - DNA, 537 bp, Homo sapiens
gctgctgttctcctctctccttcccctttttgatggcttcagcagtgtaagactgccacctccttgggtttttgcactgcatgcaagaactccatgatttccttgtggtatttaatgggggttcccccagaggttagggactcccttcctttccatattgcagcatgggcatataggattagataagcatacttactatctgtagcaaagtctcccaattacaactgaggaggtaagagaaatacctggatacaggatgtcccaggattcctcakatggtaacggaccttgaggacagctgtctgggacaggagattaacactgagaaagctgcaccagtgtccaggaggaagtcaatttcctggccctcaatggttatatgtacctggggctcagtgagggtgatgacataagctggcactttccccgggcaccctcagtcctgttgttggatcatctggttgggggcttctggcccagagaaactttgtcctctggggcagtgcaccttccagtgattgcctcagcatagtggac

SEQ ID NO: 560992 - DNA, 574 bp, Homo sapiens
agtttgttaaatgccacaagaaatttattttgagtgagagaaaataattaagcctgaaaaaattttttacctacaattgacagaataaacaattataggagatccatttgatatgttctatyccaattagaaacaactacttctcatcaaatacctgcaaagacctaaagattgccatcattctacctcactcagtttgtgtttttccacagaaagtattttttaataaagttttctagtttgataataaaattattcatatttatattaaactcatcttcattttacatcactgctgcttcaactgggtgagacatttcctttccaattaagaacaaagattagtgttgcaggtgtaaaatatatggaaaaatagaacataaatatcagatatatttctctatacttaagtatatacttataagcttataagtatatgtttaaatatgactcataattttttctacaaataacaatcaaggaaaaggaaacaattaaaatatatatatattaagtttatttctcaaattactaatttaaaacaagtattttaaattttgaaaataaaaacagt

SEQ ID NO: 560993 - DNA, 588 bp, Homo sapiens
ggttcacaaatgtcataaagtatggaactgcagatgtggtagaaatagcaagagaactaggattaaaagtagagcctgaaggtgtgactgaatcgctgaaatctcataaccaaacttgattggatgaggagttgctttttatggatgggcaaagaaagtgatttgttgagatggaatctactcctggtgaaggtgctttgaatattgttgaaacgacaataaaggatttagaatgttatgtaaacctagttgataaagcagctgcagggcttgagaagattgactgcaattttgaaagaagttttactatgggtaaactgctattaaatagcattgscttctacagataaatctttcatgaagagtcgattactgtggcaaacttcattgttatcttattttaagaaattactacaatcaccgcaaccttcagcaaccaccattatgatgattcagcatcaatcaacatcgaggcaagatcctccaccagcaaaaagtttgcaactacttgaaggtttagatgattgttagcatgttttaataatgatgtatgttaattaagttatgtgcattgtcttttagacatca

SEQ ID NO: 560994 - DNA, 574 bp, Homo sapiens
ataagaaggaatcattttactataattatgttcttttcccctttttaatatactgtcaacttatattgtttatacctttcctagagaatttaatttatttattttaaacaacctaaaatttaatctgatttaagatattataattcactggtattgtaaattctttggaaattttaaaagaataagcactcattttttttagtttatattgaccacaatgaaatgtgtttttactctacactttctctcctaacctgtcaaatctgtcacgtaaatatctactacacacagtgtcaatccttaaggaccaaaatgaaacaaaacagaaatttttaagatataaatacattcaggatgtatcattattttcttcattgcttaagagattgggagaaaaaccattacatgtaaaattggaataataatgagatgcatcaccagtcatcaaatatgtttttgcccataaaataaaaccaaaacaaaattgactagataattaggagaacttgatttttctacattttagcaagacaaattraaaaaactcatttaaaattcacagttacatgaaagt

SEQ ID NO: 560995 - DNA, 654 bp, Homo sapiens
agctcactgcaacctccgcctcccaggttcaagccagtctcctgtctcagcctcccgagtagctgagattacaggagtgcaccaccatgcctagctaattttttgtgtttttagtagrgacagggtttcaccatgctggccagagtggtctcgaactccttacctcaagtgatccaccctccttggccccctgaagtgctaggattacaggtgtgagccactgcgccaggtcgcttacaaaagacctttatccagtacatacaaagaactccaacaaatcaataagtaaaggaagactcaacagagaactcagtaaaagatttgaacaggcatttcataagaaagactctctacacacatatgaaaggccactaacctttagtcatctgggaaatgcaaattaaaaccaccttgagataactactccgaaagttaaaaagactggcattttcacatatgaaagggcgctaaccttctttagtcatctgggaaatgcaaattaaaaccatttgagaaactactccaaaagttaaaaagactggcattttcaagtgttcatgaggatatagatctcgtggaattcttatcacagcaaaattgtaaatcaaaaaactactttggaaaactgtgtagcattatctactaaagcagaac

SEQ ID NO: 560996 - DNA, 654 bp, Homo sapiens
agctcactgcaacctccgcctcccaggttcaagccagtctcctgtctcagcctcccgagtagctgagattacaggagtgcaccaccatgcctagctaattttttgtgtttttagtagagacagggtttcaccatgctggccagagtggtctcgaactccttacctcaagtgatccaccctccttggccccctgaagtgctaggattacaggtgtgagccactgcgccaggtcgcttacaaaagacctttatccagtacatacaaagaactccaacaaatcaataagtaaaggaagactcaacagagaactcagtaaaagatttgaacaggcatttcataagaaagactctctacacacatatgaaaggccactaacctttagtcatctgggaaatgcaaattaaaaccaccttgagataactactccgaaagttaaaaagactggcattttcacatatgaaagggcgctaaccttctttagtcatctgggaaatgcaaattaaaaccatttgagaaactactccaaaagttaaaaagactgkcattttcaagtgttcatgaggatatagatctcgtggaattcttatcacagcaaaattgtaaatcaaaaaactactttggaaaactgtgtagcattatctactaaagcagaac

SEQ ID NO: 560997 - DNA, 573 bp, Homo sapiens
gagttcactcatgatttggctctctgtttgtctgttattggtatataagaatgcttgtgatttttgcacattgattttgtatcctgagactttgctgaagttgcttaycagcttaaggaaattttgggctgagacgatggggttttctagatatacaatcatgtcatctgcaaacagggacaattttacttcctcttttcctaactgaatgccctttatttccttctcctgcctaattgccctggccagaacttccaacactctatgtgtctaatcctttaaaacaaaaaacaaacagggatatgttaactaataattggagatgaataaacttaactctgccagcaaggaaagctctaaagccaatcccacaatcaagtggctctaatcctaccaagtctaaacagactaaggtgacagataaggaaattctgtgaagcgatctcccttatgctggactgacaggcccatgggaggagggtagacaatatacacagtaagtagtctgtgcttcagaagagaccccatatgattctcattaataaactacatatattttggatgtgcatacac

SEQ ID NO: 560998 - DNA, 564 bp, Homo sapiens
tgcacttcagcctgggtgacagaatgaaacttcatctcaaaaaaaaaagctttgatcattgtcagtcttttcagcagaggcctcaaaaacttctgtcacaatcagcaaagataaagacctgtcataataactgatagtcctttcacatctgtcttctttttagtcaagaggatgggaaggtttttgtcagaattatataagtctacgaggctattctaaggtcaaatgaaagtttatttttcaaacgtttcctacaacagaaaatttctcctatttaccacactcaatatttaaaaaccccttttactgtaaaatacaacatgcataaagaaaagggcaagaggacaaaaagtacagctcartgactaatcacaatgcaaacttacatgtctacccactacccagctcaagaaatggaacatgttttcacaaaaactaatacgtgcttacttatagtagctcttcgtgatcaccaatgttcttcaactactgcatgaataaacaagctgtggtatgtccataccatggaacactgctcagtgataaaactgaacaaactgttaa

SEQ ID NO: 560999 - DNA, 564 bp, Homo sapiens
tgcacttcagcctgggtgacagaatgaaacttcatctcaaaaaaaaaagctttgatcattgtcagtcttttcagcagaggcctcaaaaacttctgtcacaatcagcaaagataaagacctgtcataataactgatagtcctttcacatctgtcttctttttagtcaagaggatgggaaggtttttgtcagaattatataagtctacgaggctattctaaggtcaaatgaaagtttatttttcaaacgtttcctacaacagaaaatttctcctatttaccacactcaatatttaaaaaccccttttactgtaaaatacaacatgcataaagaaaagggcaagaggacaaaaagtacagctcaatgactaatcacaatgcaaacttacatgtctacccactacccagctcaagaaatggaacatgttttcacaaaaactratacgtgcttacttatagtagctcttcgtgatcaccaatgttcttcaactactgcatgaataaacaagctgtggtatgtccataccatggaacactgctcagtgataaaactgaacaaactgttaa

SEQ ID NO: 561000 - DNA, 564 bp, Homo sapiens
tgcacttcagcctgggtgacagaatgaaacttcatctcaaaaaaaaaagctttgatcattgtcagtcttttcagcagaggcctcaaaaacttctgtcacaatcagcaaagataaagacctgtcataataactgatagtcctttcacatctgtcttctttttagtcaagaggatgggaaggtttttgtcagaattatataagtctacgaggctattctaaggtcaaatgaaagtttatttttcaaacgtttcctacaacagaaaatttctcctatttaccacactcaatatttaaaaaccccttttactgtaaaatacaacatgcataaagaaaagggcaagaggacaaaaagtacagctcaatgactaatcacaatgcaaacttacatgtctacccactacccagctcaagaaatggaacatgttttcacaaaaactaatacgtgcttacttatagtagctcttcgtgatcaccaatgttcttcaactactgcatgaataaacaagctgtggtaygtccataccatggaacactgctcagtgataaaactgaacaaactgttaa

SEQ ID NO: 561001 - DNA, 611 bp, Homo sapiens
  misc_feature 5, 19, 62: n = A,T,C or G
ctggngcactgcccatctnccaaaccaagcccatttttcacactaaatacaaatcttcaaanactcatcctgaaaactcagacaaatccaaaagatgagacattgtacagaccaactggcttgtctcttccacagctccatgtcacatgcccatacacacacacacaaacacacacacataagaaattcactatccttgattagatcctgactgaacaaactggctgcaaaagacaatttggggacaattgagcaatttgaatttgcagtactacaggayattaagaaattatataggttaattttaatgggagtgataatagtattacagttatgcagaaaattgtcatttttaagaaaaatatgtaaaggtgagataacactagcaaaaaaacacaaaataatgaagcaaatatggcaaaatgttgacaattgttaaatccagatgatgtgtatatggacattcattattctattctgattacttcatttgaaatttttcattgggaaaaataatttttaaatagatcatccttgaaaaatgggtatggctagaaaatactgtctttcttataatgaagataggaaaacctctttccataggaaaacac

SEQ ID NO: 561002 - DNA, 634 bp, Homo sapiens
ttggtgggaacgtaggttgattccatgtctttgctattgtgaatagtgatgccataaacataccagtgcatgtctctttggtagaatgatttatttatgttttaaaatacatctagwaatgggattgctgagtttaatggtagttctgttttctttgagaaatctctaaactaatttatatccccaccaacaatgcataagtttccattttctctgcagcctcaccagcatctgttgttttttgactttttaataatagccattataactggtatgagatggtatctcattgtggttagggtttgcatttctctgatgatttgctgtatggaacatttttccatatattcttggccacctgtatgtcttcttttgagaagagtcttttagtattttgtccatttttaaatggagttacttgtattttgcttgttcaattgtttaaattttttatagattctagatactataattttgtaggacgcatagttggccaatattttgtcccattctgtaggttgtctgtttactccgtttatggctccttttgctgtgcagaagctctttagtttaattaggttcacttgtcaatttttctttctgctccaattgctttcaaggacttagtcataaa

SEQ ID NO: 561003 - DNA, 634 bp, Homo sapiens
ttggtgggaacgtaggttgattccatgtctttgctattgtgaatagtgatgccataaacataccagtgcatgtctctttggtagaatgatttatttatgttttaaaatacatctagaaatgggattgctgagtttaatggtagttctgttttctttgagaaatctctaaactaatttatatccccaccaacaatgcataagtttccattttctctgcagcctcaccagcatctgttgttttttgactttttaataatagccattataactggtatgagatggtatctcattgtggttagggtttgcatttctctgatgatttgctgtatggaacatttttccatatattcttggccacctgtatgtcttcttttgagaaragtcttttagtattttgtccatttttaaatggagttacttgtattttgcttgttcaattgtttaaattttttatagattctagatactataattttgtaggacgcatagttggccaatattttgtcccattctgtaggttgtctgtttactccgtttatggctccttttgctgtgcagaagctctttagtttaattaggttcacttgtcaatttttctttctgctccaattgctttcaaggacttagtcataaa

SEQ ID NO: 561004 - DNA, 634 bp, Homo sapiens
ttggtgggaacgtaggttgattccatgtctttgctattgtgaatagtgatgccataaacataccagtgcatgtctctttggtagaatgatttatttatgttttaaaatacatctagaaatgggattgctgagtttaatggtagttctgttttctttgagaaatctctaaactaatttatatccccaccaacaatgcataagtttccattttctctgcagcctcaccagcatctgttgttttttgactttttaataatagccattataactggtatgagatggtatctcattgtggttagggtttgcatttctctgatgatttgctgtatggaacatttttccatatattcttggccacctgtatgtcttcttttgagaagagtcttttagtattttgtccatttttaaatggagttacttgtattttgcttgttcaattgtttaaattttttatagattctagatactataattttgtaggaygcatagttggccaatattttgtcccattctgtaggttgtctgtttactccgtttatggctccttttgctgtgcagaagctctttagtttaattaggttcacttgtcaatttttctttctgctccaattgctttcaaggacttagtcataaa

SEQ ID NO: 561005 - DNA, 610 bp, Homo sapiens
atttataattaaatttaattatacagaaaaagaagataaaggaaaaaaacagtatctgcttccagatggctacattcttmagttctattaaatatttaaggaagaaaaatttccaatatcatgccaaatcttccatagaataggaaaaaatggtacatttcacaatatattttagtaaattatcctaatcttgttacagaaacatcatgagaatttataaagaagaaaacatatagagcaatatttctcaaaagtacaaataaaaaagtcaacaatatgttagaaagctgcatctaacaatacataaaatgagcaaagtataattactaaactggatttatctcagaaatgtaaggtcagattaacatttaaaagcaatcaatgcaatttgccatactttcaaaattaaagagaattatgagatgactatacaaacacatatagagaaaaattgacaaattcaaaatctcataatagcaaattaagattagaaaagaactaatctaaacaaaattgtttttatccagtaaacgatctcattaaaacctaacaaacacacaaacacttatagcaaaattaatacttactgttgaaacaaagcattccctat

SEQ ID NO: 561006 - DNA, 585 bp, Homo sapiens
aatggaaaatgtttttctccttctggagctgcagtggaggctcatgagctgaggacattggttggtaatgcttacatcctctgtaaagaaagttatcaayaccatttgtgcaagacatgctaagagatgaccaccaatgcccattcctcttaacgagtgcatttaagaaaagcctagacattctttaagacaaagcaaaacaaaatttgtctcttaggttggagtattagtctgttctcatgcttctaataaaaacatagctgagactgggtaatatataaaggaaggagatttaatggactcacagtttcacgtggctggagaggcctcacaatcatggcggaaggtgaaagacatatcttacatggcagcaggcaagagataatgagagccaagtgaaaggagaaacccttataaaaccgtcagctctcgtgagacttattcaccaccacgagaccagcatgggggacacctttcccctcatgattcaattatctcccaccaggtccctcccacaacatgtgggaattatgggagctacaattcaagatgagatttgggtgggaacacagccaaaccatatca

SEQ ID NO: 561007 - DNA, 558 bp, Homo sapiens
tgcttgactaaaatttttatggtgtattttctattttttttaaaagctacagctctcatattttactcagtttttctttcaaaattaagaaagaatggtatttgtaagttgatactatatatcccaggtgttcctatagggaattccaggatttgactcattggagatactatgcaggggaattgagcatttgatagcaatctgaaataaaatcactcattcatcaattaattaattcatatatattgaatatttactagctgctgggtttgggtttgcaggattgcaaagaagaaacaggaggattttgtgttagagaaaattaaagaagataggtatgattcaaggcatgatgaataaaagtaaacaggaagaaagctagggtaaarggagttcttacatttcttaaactaggctaaacattggtttcattcattatataaatagaaagctaatgaaactttttaagcataagagcaccacaagttaacatgtttaattaaacaaataaacttaatattggaaaatggattgaagtagccgggagacgacacccca

SEQ ID NO: 561008 - DNA, 510 bp, Homo sapiens
taatgaaacatagcctcataccaggatgtgtcttttcactggtttttagtatacaaggcagggagcaaatttaatatttgcaaaaggcctagtgaattccagagggtatcactgggttccaaaaagaatgtcagacacataatagatgctcaatagatgtctgatgggatgatggatggatggagaggtgaaagaacatcacatcacaatagagaatttctagtggaatcagaacaataattaatttttctagcaataataaacccaagaccctgagtactgagwggtctttctcttttcctgtggagcccctggcataaatattgtctaggaatatagaaataaatggtgattttgaaaggacaattttcaaggtacaggaatagaaggtgaagagagagcaagagggaaaagagggaagtcagagaaccttgggtttgaatccttttgcttagtatttattctttaaatttggcaagttaaatttattataattctaggtttatattt

SEQ ID NO: 561009 - DNA, 619 bp, Homo sapiens
ttactcagtgttccataaaattatttaaatatcatttccctgaggcagggcacttgttgagccttctgcaggggacaaagttgaaatagatataaaattccctggtgtatttgatcacttgcctaatgttttccttacaattttctcagagtaagtaggttgcaatacacactctcaagattgctcacgaagattgatggaatatctcaaatgaaacacttgagtttacagggtggtggcttctaatatcacagtctctggaagatacagttgrtccattccactcattgtacgtcagaaaattgaaaatcaatgttgaagttgtttgtgtaatggaacacagtctcccgttaagctcctatctttagaaacttataattgcaaagcaaaataaaaatcaaatcttaataaaagcagtaaatgtatagaagttgttatttatagcttttaatgtacgagaagtgtgaacagggtcctgattagagttctgcaacctggtaagcacaaagcaggtctatacaaaatggaattatgaaaactaggaatgttcaaagtttgaaaataaattctttctttcccataggcatctctcccataggtatttttgccgtgttagaga

SEQ ID NO: 561010 - DNA, 600 bp, Homo sapiens
accttttctctagagttacatgtttattgccatagggttgcgtgctgtgttttcttacaattctattaatctattctaggacttacatgtttcctttgctattcctaatctctttctccttttgctctttttttccaactcagacaaaaggaatttatctgttttattattcttaataaggaataaataatttataaacatttaaacttactttttctatttttgtttttttgataatattaactttggttattattattatttttcctactgtcctctttttctttttcttttttcttttttyttttttttttttgagatggactttctctcttgttgcccaggctggagtgcaatgacacaatctcggctcactgcaacaaccgactcccaggttcaagcagattctcttgcctcagcctcctgagtagttgggattacaggtgcaagccaccatacctggctaatttttgtatttttagtagaaacagcgtttcaccatgttgaccaggctggtctggaactcctgacctcaggtgatccacccaccttggcctctcaaagtgctaggattataggcatgagccatcatgcctggcc

SEQ ID NO: 561011 - DNA, 458 bp, Homo sapiens
gagactggtggataaatggttggatttaacaattgttggggttttgccagcaactatgtcagtgggtgaagaggacaaaaaagaccaaggccttataaagacgttggctatagtgctgcggtgctgcatagtcaccaaggaatctaatgaatcttgggtgcatgatgatggctgtgaggacagggtgtgtagaaaggcaaaggtaaaaatggatttggagaggaaaaacatagagtcaattattggaggcctgtgaaagattgaaaggtagctggaatggaattacttcagtaagtaaataagaaagttagaatgtgaaagtaaagtgggatgtttaaaatgcagatttttggctgggtktagtgtctcatacctataatcccagcactctgggaggccaagtggggatgatggcttgaggccaggagttcaaggttagcctgggcaacatagcgagg

SEQ ID NO: 561012 - DNA, 475 bp, Homo sapiens
tcaaaggtatagcagagaaagtaaaatctcataagacttcaaaatgttgcctatatactgtgtgctatcataattgcaaacaggttttagtgttttgtaagcacagctatgaaaataatttacctacctgaagtgagcatatcagtcacagaattaaagacttaaagagttaaacttatttatctgtttttgttgcttgggattgtagatattttagcaaataataacatgttttagaaaatacagaaaygaattccaaatttctgcccagcaactcagcaatgagaatcttccttatgtccagtctgctttatttatgctaagtcaatgtgccaatgtttttttaaaaattcccaaagagttcagaaaaacagaacaatccgtatccctttgccccaccaagtaattctaaatcataactttctgattcttcgagatcttatccctattttccaactcattcattcaaacaaca

SEQ ID NO: 561013 - DNA, 525 bp, Homo sapiens
aaagaatcccctattctattamtagtgctgggataactggctagctatgtgcagaagaatgaaattggacccataccttacaccatatacaaatattaactcgaaatggattaaagatttaaacataagacctcaaactgtaagagtcctgaagaaaacccaggaaatactcttcctgacattagctttgggaaataatttatgattaagttttcaaaaggaattgcaacaaaacaaaaattgacaagtggaacctaattaaactaatgagcttctgcactgcaaaagaagccatcaacagagtaaacagacaacctaccaaaggagagaaaatatctcaaactattcatccaacaaaggtctaatatccagaaacgataagaaacttaaacaattaaacaagaaaaaaacaaataaccccattaaaaatgggcataggacatgaaaagatacttttccaaagcagacatacatgctaccaaaacaatgtgtgaaaaatgatccatatcactcacatcactaatc

SEQ ID NO: 561014 - DNA, 311 bp, Homo sapiens
tgaaacttataaagaaaggttgttattttcttttattttcttccacaccatctttccccactgtaccctgaagacagacaagatctatgagagtctagtgagaaaataagtaatatccagtatgatatatggaaggaaagtgataaaaagaattaataattctrctttatgttaaaaaaagacacttttgcaaaagtgggttccactgtgcccaccattcaataagcaattgatatttttactaaaataatacatgaggctggcaagacagagaactgctaaaactagaatattccagcatctatttttaa

SEQ ID NO: 561015 - DNA, 619 bp, Homo sapiens
caacaaaattttaaattaacttttttgggggtgtttaatttcttggtaattttcaggactaaaagagtaaggtaattaaaaagaagatgggatagaaattaagcagtgaggatcaaacatattctattgccaaaattagttgctcaaaattaatgttcattttattcagaactaaacataggcattctcatgaactgcttaccaaagactacgtgagatcttaagaaatgttctgaacagtttgagcattatgagtattatgtgggaaattcagaatgcaaagaaaaatgagataattataaaagggacatgaggtgaacactaggaaaacaccttattatcctatgccctacrccctgttagagtcacagacccagggaccaagtgtgaaggcctcgtgtaaatgaatagctgaagccagcgaggcttctcctgcccgattcctctcaggccaggccctcaaacatgccggcccttgctcacggctactcatgcacctgtgcccccttcttaaccacccacacctcctgacccaccctgaacactgagcccttcctccacatcactcaagcctcagtttaggtgtcacttcccctgaaaagccttcccaccaccttat

SEQ ID NO: 561016 - DNA, 615 bp, Homo sapiens
ctggttccagttattaaggccaaaatgccttgaagaaataataactcttcttcctcatatatcacatgaaactagtcaaaaactactattgaatccacctttaaaatatatccagaatatgactacttaccaccctggtcatagccaccatcctttttcccaagtattattgcaataactttatctgtcttcctgctttcatccttgctccttctaaaatctgttcactgcagaacagtgacacaaagtcattcaaacttagtgaaaccagttcattttgtgtgtgtgtgagtggcagtagcataagtgttgaaaaatgtttccgttattgattttggtctataatgttaaggtagagccaacaggatctgctggagtatctggtgaatgttgtcatgtgtaagaggtgtcaacaaaaagaatgagtggcttgagcaaatagaatagagttgtctctaactgagaaggaaagatgaggagaagaaaatttgaggaggaagaagatgggcaggagaagttcagttttggacactttaacctttagaagcataataagcatccaactggagacgtcaatraacctctggataaaaatttgaagattgggaaaataga

SEQ ID NO: 561017 - DNA, 585 bp, Homo sapiens
atctcagcactttgggaagccaatgcgggcagattgcctgaggtcaggagtttgagaccagcctggccaacatgataaaaccccatctctaccaaaaatacaaaaatcagctgggcatggtggtccatgcctgtaatcccagctactcgggaggctgagaggcaggagaatcgcttgaacccaggaggtggaggttgcagtgagccaaaatcctgccactgtactccagcctgggtggcagagtgagactccatctaaaaaaaaaaaaaaaaaaaaaaaaaaaaaagaaagaaagtcattccatctgttggtaaaggagagtgtagggaggttacctcactcggtataagccttcaraaaccttatcattacccattgttacaaggtatatattaaaccatctgaaagccgcttctcacaatagttttccgccatctggaattgagacataacccctttcattcaaatgtatataaaattagtgacatgctcccaaatcacttcttttttctgataattcatgctaacaggaattcatcagactcattctttgatgtcttcataaagaaccccagctctaaccag

SEQ ID NO: 561018 - DNA, 475 bp, Homo sapiens
atgatggtctatagaatcaataactcattacagattactaaagcatatcccctggcccccaaacttttactaatgtagttttttttttttttttcaatgagggatgcgattcttttgaacaccagtaacggtgtttyagattaagccagcacgttttctttccttagatggtttgtgacatttatattcatttggaaaccctgattttactcaactaatcattattgctgttgttcatattttattatatttttctctttagttatctcattgttaaaaggaacaggacttttaaaaattatgtgtgtgtatgcgtgcgtttctttcttgcccaagtattacgtcaagtttctcaagttttaccttacacagtgcatctgggtcacattttctgctcttttaggcttgccataaacaggtaagtttaaatatctcaagcatttggtctttgccctaaatatgctaaagcaaggga

SEQ ID NO: 561019 - DNA, 569 bp, Homo sapiens
acaagttaatgggtgcagcataccaacacggcacatgtatacatatgtaacaaacctgcacgttgtgcacatgtaccctaaaacttaaagtataataataataaaattaaaaaaaaaaaagatgactggcttgatgtcatagaataaactagaaataatcacataaaccttaagtgttgctgcttcaaagaaactgaataaaaataaattgtatataaatgtctgaaaaaaaaaagaaaaaacaaaggttgttcatttttctactggacttacttctttattcttcatttctggcagttatttatatactatgaagattagccrttagactgtgatatgagttggaaatatatcttcccaattcatcatttgtcttccactttgcttatcaagttttttcttgacaaaagtagtttgttttttaaataatttttactgagtcaaatttctctctctcttattaaagacagggtctcactctatcacccagactggagtacagcggcatgatgctggctcactgtagcctcgacctcccagactcaagcaatccttccacctaagcctcc

SEQ ID NO: 561020 - DNA, 439 bp, Homo sapiens
gtagctctgaagatctaacaaggggtttaagggtttaccagtaagataccctgaagtgacaatggccaaaaaaaaaaaaaaaagttcctttaaggcaaaaggactttatgcggatcatttatctagtcaataacacactgaagtttaacatatcccgaatgccctgaaagacagaaaagagaaaatggccaattttctttatgcaactttaatggcacttatttactcaaatttctggagcaatgaactgtaacttttaaaaaactatgaggaggttaatggaacattttcccctagcctttcatttcttaacatccttcctctctttgttcctgtaacttttctttttaactgttccaaagcaatcaaaaacatgactactgtatttttccattaratttgccctggaatcacagaatgccagctagcaccaaaaaca

SEQ ID NO: 561021 - DNA, 509 bp, Homo sapiens
tgaattccagtcactcaacttaaagcctgctgatcttacattctctttcctgtaggtaccgtctgagttcttagttacatgtaattacctatgccttgccatgaatgaagaaataattctaagtaattacctatgccttgccatgaatgaagaaataattctaaatttattgaccataaggggaagaagcagctctcaaactgtttggctcagtacaccattcttaaaaattattgaagacccacaaagagcttccctttatatctatcaacattaacctatgagttatacaaaagaatctaataataatagttaccctttgttgaatacctaccatgtcataacacattacaatgtctcatttaattttcacaataaacctataaactgggtattattattatgtgcattttagagtaaaggtaactgaggctgaggaargtaacctgataaatggccttgctgacatttgaactagggctttgtgacccaaaacctgtgctcctaca

SEQ ID NO: 561022 - DNA, 614 bp, Homo sapiens
ggaaggtaacctgataaatggccttgctgacatttgaactagggctttgtgacccaaaacctgtgctcctacaattatagcatagtatctagcctagaattctaggaggagctcctcaataagaacctcaaaatgtaagctaattcattgatgtccaatttcttacttgtgagattcccaatgggaattctgtgtcagttgagcaagacacacaatactcaggatcttttgtatcttgaactttttaaactaatgatacttaaaatgtatggtcaaaaaatgtttttcactgtagggtaaattcacttttacctataaatcatatcattctcttcctagctgaaaagttctaagatttatttcctcctttactgttagtgtttcctttttaatcaggttattttgttaagtatacaaagtttaattaaaagactaatgtgaaatgttatgcaaataatttgatcaggccacagtgackggaagggaaagtaattcttctggagggagagctgaaattccttagcagaacctatctgacccttttttgaggttaatagcaatgcaaaagataaataatgtttggagatcatttaaacctgaagcaaacccatgaa

SEQ ID NO: 561023 - DNA, 587 bp, Homo sapiens
acaagtagctctcaggggaactctcagggaggctatagtagacaactcttctagcttcattacttattgctacaagatactaaaaagcaggcattactaggaggacaaaagcaccaggccattcatgagggatccagccccatgacccaaacacctcccattaaggtctcacctccaacattagggaatcaaatttcaacatgagattttgggggacaaatatccaaacttccaaactatacaaatttgcctgtttctttctctcctaagctaaaatggaactatacattcgaggggaaaaatgatttattaaaatactgcaggccgggcactatggctcacgtctgtaatcccagcactttgggaggccaaggcaggctgactgcttgagatcaggagttcaagaccagcctgagcagcatggtgaaaccctgtctctayaaaaaatacccatactagccaggcgtagtggcacacacctgtagttccagctactcgggaggctgaggtgggaggatggttggagctcaagaggttgaggctgcagtgcgtcatgatcatgccactgcactccagcctgggtgaca

SEQ ID NO: 561024 - DNA, 359 bp, Homo sapiens
tacaacctgggccacttctttagagggccactgctttagacggtggaagctgcaagccttggcagttcccacgtggtgttaagcctgcaggtgcacagaatgcaaaagttgaggcttgggagcctctgcctagatttcagaggatgcaggaaaaagcctgggtatctaagcagaagcctgctgcaggggtggagccctcatggagaacctctactaaggcaatgaagaggggaaatgagggattggaatgcagagcccccactgaggcactgcctgatggagcrgtgagaagaggaccactgccttccagacctcagaatggcagacccaccagcagcttgcacactcaatctggaaat

SEQ ID NO: 561025 - DNA, 510 bp, Homo sapiens
gtgcatgccatcacgcccggctaatttttgtatttttagtagagacggggtttcaccatgttggccagaatggtcttgatctcttgacctcgtgatctgcccaccttggcctcccaaagtgytgggattacaggcataagccaccatgcccgacccttttctttttaaattacctagtctcaggtatttatagcaatgtgagaatgacgtaatacaaccaataatgtggtatctctatgaatgtgtgagaactacagcattgttgggctttgtgtgccccctaaagcagatacaggttagatcacaacacccaagtccttttgaatatctggaaacctttcccaagaaggacaggtataaacaagcccagattgagaagactacaataaatacctaactgttcaatgcccagacacagacaagtatctacaagtatcaagaccatccagggaaacaggacatcaccacatgaactaaataatgcaccaggaaccaattctagaaaaacag

SEQ ID NO: 561026 - DNA, 540 bp, Homo sapiens
agcactttttggtggaaaccttacaggtcaggagagagtgacatacttaaattgctgaagaaaaaaagttttacctgagaatagtatatccagtaaaaatatccttcaaatgtgatggacaaataagctttcccagacaaacaaaagctgagggattttgtcaacaccagacctgccctacaagaaattctaaagggaatacttcagtcagaaagaaaagtatgttaatgagcaataagaaatcctctgaaggtacaaaactcactgctaataataagtacacagaaaaacagaatattataacactgtaactgcagtgtataaactactcttatttctagtaaaamgactaaatgatgaacaaatcaaaaataataactacaaatttttaagacatagtacaataacatataaatagaaagagcaaaaagtttaaaagagggggatagagtctgtagtttctttttgcttgttgcttctattgtttatttatgcaaacagggttaagttgttatcagcttaaaacaatgggtattaaga

SEQ ID NO: 561027 - DNA, 588 bp, Homo sapiens
ttccctgcatatgtggttgttttgaatgtcctagcccctaaatgcctggctcccaaaggggaaaaagagaaaaatgaarggaaaagggaaggagccatatagcctgaaagttatttctgcctgagtgggagggccttgtagcaatgggaatttgccacaattactgcctatctctgtgttgtctgcacttccatgatcaaaagcagcaatccgtgattacaacccagctctccaacatttgaaggattgggtcttttttgtctaccctggctgaggcaaactgcaagctgctcctggaatatgtgtacagctgcttaccaggtggcttggggtgggggatggatagctgctgctgagctaatagctgaaattcaccaaaattaacccgcaatttactgtttaagtcttcctctggaagctgcaagccttcaatagactccagagttgatcttgttttcctgctacattgctgaacccatttattagttctagattttttttgattctagatttcttgagattttctatgtaaacagtcatgttctctgcaaatgggggcagtttatttcttcctttccaattggtatg

SEQ ID NO: 561028 - DNA, 638 bp, Homo sapiens
ctcccccttccctagggtttgctgtgtgtttgtgcttgttttgtttaattctgcttttgtttttagattgttgtaggctgtgtctgtgccggggatcagcttaaggtataaacttaatgtcttttctgagcctgtgccttcccttgagcatgcagagtcactttctaaattccctgcatatgtggttgttttgaatgtcctagcccctaaatgcctggctcccaaaggggaaaaagagaaaaatgaagggaaaagggaaggagccatatagcctgaaagttatttctgcctgagtgggagggccttgtagcaatgggaatttgccacaattactgcctatctctgtgtygtctgcacttccatgatcaaaagcagcaatccgtgattacaacccagctctccaacatttgaaggattgggtcttttttgtctaccctggctgaggcaaactgcaagctgctcctggaatatgtgtacagctgcttaccaggtggcttggggtgggggatggatagctgctgctgagctaatagctgaaattcaccaaaattaacccgcaatttactgtttaagtcttcctctggaagctgcaagccttcaatagactccagagttgatcttgttttcctgctacattg

SEQ ID NO: 561029 - DNA, 623 bp, Homo sapiens
gaatcggtccattttctctaagttcatagtattcccatattatctcttttggcttaaaaaattacagtaaaacatacatagcatacaatttacccttttaaccattatttttctctctacttagagacaggttcttgctctgtcgctcaggctgtagtacagtggcatgaccacagctctctgcagtctggaactcttgagttgaagtgatcctcctgcgtcagcctcctgagtagctaggactactgatgcataccacgatccctggctaatttaaaatatttgtttaaagacagggctgtgctatgttgcccaggctggtcttgaactcctggcctcatgcaatcctcccactttagcttcccaagtagctggaattacaggtgcaagccactgcacccaggtcttaaccatttttaagtgtagatttcagtagcatttagtamactcacagtgttgtgcaacaagcaccactatctggttccagaataatttcatcactctaaaaggaaaccccatacccattaaccaggcactctctatttccccttcctcttcaaccctggtgttaatggaaaaaccaaagtctgtagaatattttaaagaggtttattctgagccag

SEQ ID NO: 561030 - DNA, 586 bp, Homo sapiens
gttctgttagttaggacttttggtcatcaccaaacccttgatagatatggtccccaattgacagatgaaccaattgagactccgaaaggctaggttacttgcccagttgggaaaatcaagaactgatacaggtttttagattcccacctaggcctttacttttgcctcaatctcactgtctcttcctagttgaccattaaatatattttaaagagggcaaagtccaattgcataataggtctgcctgtctgaaacatgataattagtgctaatggctgggtattacctggcatgcatgtgttaggtttacagtaaagaatgtctactttttattaactgtccttttagatatattagtgactgtcacacctgaattataacaaagaagcactacagaarttcaatgtgggcggcaaaattctttgaagaataactagttataattggggagtctgaacacatttcagagttgcacgtttaatatgcagtatgcttaattgcactgtaattacagtattttagaatgccatgctaagtgtttaatccttttcaggtttgccctccaatcagtggtctgccttcattt

SEQ ID NO: 561031 - DNA, 575 bp, Homo sapiens
ataggcctttggcatgaggttaatctgactagaagttaggctgtgtttactgtttgccatagttgtatgtgtcagaagctaamatttcttctagtgtccttgtttttgtttcaactgttgtatatgggctttcctgaagacttcttcttaaataaggtctgggatgtggaattatttcatatgtaattgccttgtattagtaggtccctgaataatgtagatgtggtggtaagatgtggggagaggagaagtgtgctatagtcctgtgactagttctcagctttttcgtgagcctgtgcctctgggctgtgacctttatgtttctcagctcattgttcttaccaagatcaagtcatttttaaatataaatgcccatcagattgttgcacacttttgcttattttccagaattctgaaaatgttgatttcaacaattttgtcagtgttctcattgcttttaaggagaagatttccagagtttgttacttttatttctgctgataccattccagattattctccataaatgaatgttgtgaacatgctgcctagttcagaaataatacaaatttcca

SEQ ID NO: 561032 - DNA, 500 bp, Homo sapiens
gcctggctctgaaggggaggtraggagagctgtagctaaaaaagaatgtggaactgagaaagattttggttcattagatggtgacagagtgagactccatctgaaaaaaaaaaaaagagtcatcaatttcttgtttgaatctggattcaatgccattacttaatgacattaaataattactgctaattctgcttaggtatacaaatggcacagtggctataacttcaaagccctcatgaaatgtatattgaaatatttacaaatatttacaggtgcagtgacatgatggggaaggataagtgacacaaaatgtgtaaagtgctggtaatttttgcagctgagtgatgagtacacagacattaattaaaccattatttccgcttttgtttatgtttgagaacatctgagacagtttttttaaagaatcatctacctatataggaaacagtgagaaatggataaacttgctctgggatgacaagaaaagggaagaaaaagga

SEQ ID NO: 561033 - DNA, 500 bp, Homo sapiens
gcctggctctgaaggggaggtgaggagagctgtagctaaaaaagaatgtggaactgagaaagattttggttcattagatggtgacagagtgagactccatctgaaaaaaaaaaaaagagtcatcaatttcttgtttgaatctggattcaatgccattacttaatgacattaaataattactgytaattctgcttaggtatacaaatggcacagtggctataacttcaaagccctcatgaaatgtatattgaaatatttacaaatatttacaggtgcagtgacatgatggggaaggataagtgacacaaaatgtgtaaagtgctggtaatttttgcagctgagtgatgagtacacagacattaattaaaccattatttccgcttttgtttatgtttgagaacatctgagacagtttttttaaagaatcatctacctatataggaaacagtgagaaatggataaacttgctctgggatgacaagaaaagggaagaaaaagga

SEQ ID NO: 561034 - DNA, 500 bp, Homo sapiens
gcctggctctgaaggggaggtgaggagagctgtagctaaaaaagaatgtggaactgagaaagattttggttcattagatggtgacagagtgagactccatctgaaaaaaaaaaaaagagtcatcaatttcttgtttgaatctggattcaatgccattacttaatgacattaaataattactgctaattctgcttaggtatacaaatggcacagtggctataacttcaaagccctcatgaaatgtatattgaaatatttacaaatatttacaggtgcagtgacatgatggggaaggataagtgacacaaaatgtgtaaagtgctggtaatttttgcagctgagtgatgrgtacacagacattaattaaaccattatttccgcttttgtttatgtttgagaacatctgagacagtttttttaaagaatcatctacctatataggaaacagtgagaaatggataaacttgctctgggatgacaagaaaagggaagaaaaagga

SEQ ID NO: 561035 - DNA, 532 bp, Homo sapiens
agtacaagcccagagcctggtagacttgctaggtggctagacccagaagagagataacaatcactacagcttggctctcaggaagtgacatccataggaaaagggggagagtaccacatcaggggaacaccccatgggacaaaggaatctgaaaaacagccttcaaccctagaccttccctctgacagtctacccaaatgagaagaaaccagaaaaccaactctggtaatatgacaaaacaaggctctttaacacccccaaaaatcacactagctcacsagcaatggatccaaaccaagaagaaatccctgatttacttgaaaaagaatttaggaggttagttattaagctaatctgggaggcaccagagaaaggcaaagcccaatgcaaggaaatccaaaaaatgatacaagaagtgaagggagaaaaatttaaggaaatagatagcataaataaaaaaatatcaaaagttcaggacacattggacacacttacagaaatgcaaaatgctctggaaagtctcagcaataga

SEQ ID NO: 561036 - DNA, 570 bp, Homo sapiens
accaaaaattttagatcctctcttgtacaattttgatatatgtaaattaatttccatatcactttccagaacaatacagaattacagtatttttattttagtaacccatgccatttctattggagataattacaagaacagggaactgagactaggaacaggaaatgcagcagtaggcagggcaggagtagaaatttttacaacaccttggacagacaaaagaagyccagggacaataaacctgcttttgcactgccctcccgtgtctgtagggaggatgggcagatagcaggtactctctacggctgagagtcatcctggtcaaagctaaggctctatacttgaggaattaagaaatgtagtagtctttcaggagtttcagttcctcaggacattcagggaatttaggattgaaaaaaaaattaagatattgtgaagaaaaagactcttttgcatttcctaaaataaaacaatacagatataaataactgaattttacacattataaattattaaaacatggaaactgtactattattttccatttatctttcccctggcttggtaaaa

SEQ ID NO: 561037 - DNA, 657 bp, Homo sapiens
cattttccagtaattaaaatcacaactcacttaatgataatatatatttacatttctttctaagttcaaaccagggaaatgattatgaaacttcgcttatcttctgggaagcctcttaccagggtgttaagcaataattagaacaaatactttgrgatgtcagcagagcttttcaaattagacaactgacccaagtgttctaaagaaacacatggtaataaccaagaagtaccaaattacaaggctacccctgtgaaactccagacctatttttatctatgaaatggctttaaagattttttcctgaggaggggaaaactggggaaggtgaaaccctaggaagaactgacagattggactgaaattaaacatttttttgcaaggtaagatcttcctacagtgctgatgatatatcaatccaagctgaagtatattgcgtgtcattgtaatcagcaaatattacacagtttgtactgtgtggcaacatctgtgacaccaaaataagtcaagacaaatactgtcatttctgctccttttggtatttcttaggtctttttggggcaatacatttttctcatcagagcggtgtagtgcctcagatagtggcagagcaacggagttgtgcccaggaggagagatactctgtgatttgtttat

SEQ ID NO: 561038 - DNA, 573 bp, Homo sapiens
tcaatgctgaagaaaaactagatgagtaaataagtgatactattgaaaaatcaatatgtagcatcasggagtccaatactctatttttggaactattttaaaacctgcaacatgtgttttcttttctgcatttcaattttttcagtgacaggcattgcttcatacgaggatagcatatacacaggcttatagttcaagagggaaaggaggttcactggtttaatattctcaccctttgtcttgaagagttacattggttcaccttggttaggtgaacgtgtaactttccgaagcacttgtaattttctcacaattctagagaaaaattagtgtgcctctcattgtcataaatatctaccgctagcccatcacgtgaagagacgcttaaaatcattagtattttaaagattatacagatagaacactatattattcttttcaaagattcaccaacactgagttatttgttcgaaatcatctacttaaattttaaaattccttttacttaaagaaccaacagaatgatattcccaattttacataagaggaaaataagatccacaaaaattaaat

SEQ ID NO: 561039 - DNA, 545 bp, Homo sapiens
ctgtaggaagaacagcgaggctgtargttaggcagagccagaccataaaaggcctaagagccagggtaagggacaaggaagttatgcaaagttttagagcagagtgtgatgacctcagaatttcaagctcgctgatggtctagggccaaggactgcctcaggtggaaaggtttcctctcattgcaatgaattgtacttgcaaacttacttattctggggcactaaccagtgccaatacttggcttttttttctttgcagcctgagttcccaacaaaccctgtacagttttctgggtggtgcccaactatagtgggcttcagcctttcttaatttgccttccactgaatgaagcgcctgagacacagaattgggcgtgatatggtttggctgtgtccccacccaaatctcatcttgaattgtaactcccacaattcccacgtgttgtgggaggaacccagtgggcagtgattgaattatgggggcaggtcttttctgccctcttttcatgatagtgaatgagtctcatgagatctgatggtttcaa

SEQ ID NO: 561040 - DNA, 534 bp, Homo sapiens
tatgaaaatatatgagtccactttcctgccctagcaaaaacagactagtggccatagtgaaatctttcttccctgttaaagggtctggcaaaccttaagtcttcatcctgaatgcgagttgctgtttatcagagattgaggtgggaaaagtctacgcattttggctgaactttcattgaacacagaacaaactgtggaaggtgattagttctaaaaagactacatgtcagctctgagctctttttggtatcatttgtgtattcctgtccaaagtagatgcagggaacagcaacagtattatattgggtaattatagtgaatggatgtgatactttatttgcaaggaatcctactcatcattgtccatgagtaattgacagagcagtgccatttaccaacaagggtttactgagcagctatttggcaagccttgtgctaatttgaatgcaacatgcatacctcaagttgaaatgctctgaaaattttgtttgttgcaatctcgccyttctcattatgtcaaatagacaaaaggta

SEQ ID NO: 561041 - DNA, 606 bp, Homo sapiens
ttttttccttcagttatgttgtttattcaaaacttgaaaacatatacaatttcagggtcttctagagtatatttacatcattctgatgaacaactttataatttttaaattagcaaatattctcaaccctgtcagctttaatattataattaatgtgcacaaakctgaaaacttttcttgctcatactataatacattaaatagaccttagcaaacaacttcttatttgaatacttgtctgtccctgtcactcttctcatactttagcctcataactttggttataattatgtaaatggttaatattcatgttctcattgcaaaatgaaaagtgaggaagagaaattaagccatttgcctaaggtcacaagtctggtaaaatcaacagaggcactcagaatacctccaaaatcatttccatgatgccagaacctttaaatgctacagaaacaagctaaagcgatgcatttaaatgtgcttctatgtagggcttgagctgtatctaaacttaaattagagctcagccaacatagaatctagttcagcaatactctacaacatgagataaccatactgatgtttgatataaaatgagattgcagagga

SEQ ID NO: 561042 - DNA, 465 bp, Homo sapiens
gtttctttattctcacacttttcttgactgatctcaagcatttattttatttcaaattttttatctttaatttttatgggtacatagtaggtgtatatatgtatggggtacctgagatgttttgatacaggcatgcaatgtgaaataagcacatcaagcatttattcttgcatataatctttattttagccaatttttaaaaccttggatcaaaagaattatattatacttatattttaatttggggagaatttttttgttgtttttttgggagttttttgttttgttggggaaaattttttgtttgctttttrgattttgttttgttttgttttgttttgtttttgtttttagagacagggtctcactgtgttacccatgttggagtgcagtggtgtaattattgcttactgcagcctcaaactcctgggctcaagtgatcctcccactgccaccacacccagc

SEQ ID NO: 561043 - DNA, 578 bp, Homo sapiens
acgccactgccctccagcctgggcgacagagcgagactcagtctcaaaaaaaaaaaaaaaaaaaaaaaacaaaaaaaaaaaaaaaaaaaaaagatttgaagacaatttccaaagaactcatgctaagtatttatgctactcagacacattcgcacttctccagttctcctgtttccagccccaggagaagactatgcgtcttcaattcagacatgatcatgggcatcctcttatccacaggacatragtggacagtctatgggcctccttcaggtgaaagtatttaagagagggctcccactcaaaggcagatcaaacataatgaggagctgagccccccacctacatatcatgatatgaacaagaaatagctgtttctggttcgaatcactgatgttttattgtctgttaccattgcatgacttagtttaaactgataaatatggaggcatttcaaagaggtcctgaggcattcggagcccttacaataagtttttcaataatacatactttactcactatcatatgactaaagcagtactgaaatgcttgttaaagaataaaaagttttatgatgg

SEQ ID NO: 561044 - DNA, 570 bp, Homo sapiens
ttgtatttttgatttttccctcatatcttaattatttttcatcaatagcactaaagtaacatttattaaaatagaactttattgttggatatatagttccctgcccccatcacaactgccaatacacttaaattcttcaaaacttccttatttagactatcaaatttgaccaaaaaaaaacacttttaaatattctaggttcaggcaaaattaatattttacaacaggcaaaattaatattttacaatgataaagtatgaagataaaaataccctgtttactcastaatttaaattcagcaggctattttttcataaaaagaagaagaaaaagagaaaaatgtaagttctcattgcttcccactggctgtatttacttaatttcatgcacttaatatttttttcatcgttggtattcactataattagctgaacaagatgcttgaaataatacattttaaataggaacaattatataaaagtgctttttaaaattaattgaaagcctaatatagcaattgtcgactgtgttgctagatatgttactaaggacactgtggtttaaaaacag

SEQ ID NO: 561045 - DNA, 456 bp, Homo sapiens
tatgtgaaaaagaaaaaataaaaacaaaaaaatgagcaaaaatccaattytaagagcaggaaaagatgagatgttccagctcaagcagtgaggcaaaaaaaaaaaaaaaaggcaagctcctccttcctccacctttttgtctgttcaggccctcaacaggttagatggtgacaactcacactggggagggtaatctactttactgagtccactggttcaaacactcatctcatccagatatatcctcatgaacatagccagaaagaatgtttaaccagatatctgtgcattccctgattcattcaagttgaaatatgcaatcagctttctcaagtccacctcatcaactcggcattcacacaaattcccttaagccacaattaatctccagataaagacaataataaggtcataattccacctaacatgatacaactatcctgcttaccagaatgt

SEQ ID NO: 561046 - DNA, 546 bp, Homo sapiens
ccagctggcatctggcggtatccctctgggacgaagcttccrgaggaaggaacaggcagcaatctttgctgttctgcagcctctgctggtgatacccaggtaaacagggtctggagtggacctccagcaaattccaacagacctgcagcaaagaagcctgacagaaggaaaattaacaaacagaaaggaacagcatcaacatcaacaataaggatgtccacacagaaaccccatctgaatgccaccaaatcaaagaccaaaggtagataaatccatgaaaatgaggaaaaaacagtgcaaaaatgctgaaaattccaaaaacgagaacgccttcttctcctccaaaaaatcacaactccttgacagcaaaggaacaaaactggatggagaatgagtttgacaaattgacagaagtaggcctcagaaggtgggtaataacaaactcctctgagctaaaggagcatgttctaacccaatgtaaggaagctaagaaccttgaaaaaaggttagaggaattgctaactagaataaccagtttagagaaga

SEQ ID NO: 561047 - DNA, 456 bp, Homo sapiens
tatgtgaaaaagaaaaaataaaaacaaaaaaatgagcaaaaatccaattctaagagcaggaaaagatgagatgttccagctcaagcagtgaggcaaaaaaaaaaaaaaaaggcaagctcctccttcctccacctttttgtctgttcaggccctcaacaggttagatggtgacaactcacactggggagggtaatctactttactgagtccactggttcaaacactcatctcatccagatatatcctcatgaacatagccagaaagaatgtttaaccagatatctgtgcattccctgattcattcaagttgaaatatrcaatcagctttctcaagtccacctcatcaactcggcattcacacaaattcccttaagccacaattaatctccagataaagacaataataaggtcataattccacctaacatgatacaactatcctgcttaccagaatgt

SEQ ID NO: 561048 - DNA, 456 bp, Homo sapiens
tatgtgaaaaagaaaaaataaaaacaaaaaaatgagcaaaaatccaattctaagagcaggaaaagatgagatgttccagctcaagcagtgaggcaaaaaaaaaaaaaaaaggcaagctcctccttcctccacctttttgtctgttcaggccctcaacaggttagatggtgacaactcacactggggagggtaatctactttactgagtccactggttcaaacactcatctcatccagatatatcctcatgaacatagccagaaagaatgtttaaccagatatctgtgcattccctgattcattcaagttgaaatatgcaatcagctttctcaagtccacctcatcaactcggcaktcacacaaattcccttaagccacaattaatctccagataaagacaataataaggtcataattccacctaacatgatacaactatcctgcttaccagaatgt

SEQ ID NO: 561049 - DNA, 487 bp, Homo sapiens
aatagatcgatcgatttcatttaacttacaatgacttcaaatgaaaaaaccaagaataggaacagaggtaagactttcccaccctatgatgatttaccaagtaattcctactgaagtctcatcttaattattttcttcagtttgcaaagctgctaccagggaaataactgtgtgatggattttgcttttrtgaaataagtaattagctctccaaaacacagaaaaccaagaaaatccagatatggccaaccatccatctacccatctatcaatccatccatccacccatctatcaatccatccatccattcatcctccgttctgtcatttgaccagctacactttgaacatgcattgtttaccaacatataccagagtcttgtacacagaagtgactataaacaggttgggtgcggtggctcacgcctgtaatcccagcactttgggaggccgaggcgggtggatcgtgaggtcaggagatcgagac

SEQ ID NO: 561050 - DNA, 578 bp, Homo sapiens
tgtccatttactctaggttttccaatttgttatcatatagttgtttataatagtctctactgattgtgggtatttctgtggtatcagttgtaatgtctcatttctgattttgtgtcatctcttttttcttgtttagtctaacactttatgaattttgtttatactttcaaaaaacaactttgcattttgatgatcctttgtaaattttttttctattccatttagttctgctctgatctttattactttgttccttctactaattttgggtttggtttgttcttacttttcgagttccttgatgttcatcattaggttgtttatttgaaatttttctacttttctgatgtaggcatttattactataaacttgcctcttagcactgcttttgctgtacccactaggttttgatatgttgtttccatttcatttgtctcaagaattttccctcttaattctttcattgatccaatggtcattcaggatcaggttgcttaatttccrtgtatttgtaagtgtccaaagttctcttgttattgatttctaggtttttttctactgtggtctgagaagatat

SEQ ID NO: 561051 - DNA, 574 bp, Homo sapiens
gtgcacaaatgttctagacatcgccaccaacctctgtgattagttccaaaatgagcaggtgaccgagatctatccagcgacaagactatcatgggaactattggtgcagaaatgctctgccaaaggtctccctgaaaactgagccaagataagaatgatgaatggccaagaagaaagcaggctggaaatatgtccatcagtggagtcttcatgatgtgaatccagctgggcctgaagttatctaactttagtcttcttggttacaccactcaatatggtttttttcccttaaatcaatgtgattggatttctttcccttgccatcaaaaacaccttgactaaacacagccactaggggaaagtgcaggatgatgtgagagaatatgacgcaagtcttggttttattcataattgttctaaactctgaagtatgaatagcagtgagcaagctgagaaagaagtagacatgaagttaggaacaatgyctgagcctgttcatggctctttcccccgatgccttccactccagagtatgtgtttaataactgacatggcttttctgtgtccccaccca

SEQ ID NO: 561052 - DNA, 393 bp, Homo sapiens
cgctcttgtttttgttgttttattttttacttgtaactctttaagccatctgaaacttatgttaatacattttctttcttttttttttcttcgagacagttttgctttgtcgcccagactggagtgcagtggcgtgatgttggctcactgcaacctctgcctcccaggttccagcaattctcctgcctcagcctcctgagtagctgggattacagcggccccgccacgacgcccagcctttttttttttttttttttttttgkatttttagtagagatggggtttcactttctctaagaaaattaactcatttttcttgggcatggtggctcatacctgtaatacaagcactttgggaggctgaggtgggtagatcacttgaggtcaggagtt

SEQ ID NO: 561053 - DNA, 393 bp, Homo sapiens
cgctcttgtttttgttgttttattttttacttgtaactctttaagccatctgaaacttatgttaatacattttctttcttttttttttcttcgagacagttttgctttgtcgcccagactggagtgcagtggcgtgatgttggctcactgcaacctctgcctcccaggttccagcaattctcctgcctcagcctcctgagtagctgggattacagcggccccgccacgacgcccagcctttttttttttttttttttttttgtatttttagtagagatggggtttcactttctctaaraaaattaactcatttttcttgggcatggtggctcatacctgtaatacaagcactttgggaggctgaggtgggtagatcacttgaggtcaggagtt

SEQ ID NO: 561054 - DNA, 393 bp, Homo sapiens
cgctcttgtttttgttgttttattttttacttgtaactctttaagccatctgaaacttatgttaatacattttctttcttttttttttcttcgagacagttttgctttgtcgcccagactggagtgcagtggcgtgatgttggctcactgcaacctctgcctcccaggttccagcaattctcctgcctcagcctcctgagtagctgggattacagcggccccgccacgacgcccagcctttttttttttttttttttttttgtatttttagtagagatggggtttcactttctctaagaaaattaactcatttttcttgggcatggkggctcatacctgtaatacaagcactttgggaggctgaggtgggtagatcacttgaggtcaggagtt

SEQ ID NO: 561055 - DNA, 586 bp, Homo sapiens
ttgctttttagatataatattatcacactcttaataaactacaatgtagtgtgaatataactttatatgcactgggaaacaaaatttgtatgatttgctttattgcagttgtctggaactgaacctgaaagcacataaattcggaagattcgtatctcctcggttttctcttataacacatccatctagtacagtgcttgtctcacaggacaagtaaatatgtacttattaaaatataataaaaaccatcaaaattggaataaaatgtcaaagcagtacctttaaaatatttggtcaaagcagcgaacaggttgttatctttaaatgatgcccattgatttggctcttttaactttccttcytaacgaattgactaacggcttgattacattgactgatttttcttcctatggtgtttttcatttctgcttttccccttatgataacacaatgtgtgtccaactaaagtcagaaattgttgtcaagcaaaaatacaaaagtagtaagcctcttcaaagatagccactgctaatgcctttgtcatacccactttccacccctttcctgcacataaagcaaagacaga

SEQ ID NO: 561056 - DNA, 586 bp, Homo sapiens
ttgctttttagatataatattatcacactcttaataaactacaatgtagtgtgaatataactttatatgcactgggaaacaaaatttgtatgatttgctttattgcagttgtctggaactgaacctgaaagcacataaattcggaagattcgtatctcctcggttttctcttataacacatccatctagtacagtgcttgtctcacaggacaagtaaatatgtacttattaaaatataataaaaaccatcaaaattggaataaaatgtcaaagcagtacctttaaaatatttggtcaaagcagcgaacaggttgttatctttaaatgatgcccattgatttggctcttttaactttccttcctaacgaattgactaacggcttgattacattgactgatttttcttcctatggkgtttttcatttctgcttttccccttatgataacacaatgtgtgtccaactaaagtcagaaattgttgtcaagcaaaaatacaaaagtagtaagcctcttcaaagatagccactgctaatgcctttgtcatacccactttccacccctttcctgcacataaagcaaagacaga

SEQ ID NO: 561057 - DNA, 622 bp, Homo sapiens
tgggcccggtggctcatgcctgtaatctcagcactttgagaggctgaggtgggtggatcacgaggtcaggagatcaagactattctggctaacatggtgaaacccccttctctactaaaatacaaaaaattagatggatgtggtggtgtgcacctgtagtcccagctactccggaggctgagrcaggagaatcacttgaacccgggaggcggagattgcagtgagccgagatcacgctactgcactccagcctggcgacagagcgagactccaccaaaaagcaaacaaacaaacaaacaacaacaacaacaaaacccttaagctgctggggacacctagaaggtgtctagggcagtgggaagagtctttgctgaggttgagagttcttttatttaagtcaagatcttgtgggctatgttaggttttgcaaagcctggatgagcctgccctgtgacagcagaaatgaggaggactttggagcttgtgggaaagtctttggggagacatggatttgaaaaacagagggaagtggtgatgtcaagacagagaaagagcaaagtagacacggctcaaattctgaatgagaaatgccctgtcaggagtcactgaagaatcttagagc

SEQ ID NO: 561058 - DNA, 613 bp, Homo sapiens
aattccactcctaagtatatacccgagggaaataaaaatcgaaagcacaaaaacttcaacacaaatgttcatagcagcataatttaaaataaaaaagaacccaatatccatcaattaatgaatggataaataaaatgtgatatattcacacaataacatattattcagcaatgaaaggtacttacttacacattacaatatggataaaccttgaaaactttatgctaggtaaaagaaagcagtcatcaaagaccacattttatattttctattcatatgaaatctccagaacagtcaaatctatagaaacagaaagtagactggtggcagcctagagctggggaagtgtggggggaaatgyggagtgagcgctaatgggtagggcatttctttttgaggtgatgaaatcgtaaaactctggtgatggttgcacaatctatgactatactaaaaatcactaaattatacaattttaatgggttatttgtatggcatatgaattgtgatctcaataaagcttttatttttatttatttatttattgttttttaagatggagtctcactctatcaaccaggctggagtgcagtggcatggtctcagctcactgcaa

SEQ ID NO: 561059 - DNA, 393 bp, Homo sapiens
ggtgccgtgcatggcagaatgtggagcaggggtttgggtgccagggcctagggggtcatgaaggcttcccaatgggagctcccttgggttggacttggggtgacccggggaccctggaggtggcttggtttggtggggacctcctttctgactctggggccctcctaggaccccagtagcaggatctaagccaactggggccaaaacacggtggcatctgtctccactgcactcaagccctccgggccattcccatggcactgactgrtaggcatgaggccctggccccagttggtgctcaacaaatgcttatcgtagagtctccaggtgcgctgtcctggctgcactaatgccgcatagggccctgggtcagaatgcaggccactcatttgc

SEQ ID NO: 561060 - DNA, 593 bp, Homo sapiens
tccacatggattatgaaggatggctcatattgactgtattttcattcaaatgtgcaaaactatttactgaatttttttactgaccggaaataactcctgacttacagaatattttcatttccaagttacactttaccctgagttacatagcaggcgcatccgtagtgattctgcaccccaygccctcgccagcccctggaagacactggctggcccttggctgaaatgacccaaatcaaaagcccctgcctttctgctaatgggcgttggggagattgaccagcaaagagctatggacaagaagcaggactgtccatttaaaaaggacaaaaatcagagcccagtcccaggcctgggcagctcctgtcagcatcccatcccccttgcactgaaccagctgtggcccgcactttttcccatggtcatgcctgggaaatgaaggtgcagggacatgcaggcgagctggggcgtggagtcacatctgtttccagaacattcatgctaagggaggaacagggtccgcattggagaacatggggcgggtgactggaaaaagggaagctagagccacttttattgtttcccggggtaac

SEQ ID NO: 561061 - DNA, 585 bp, Homo sapiens
ggaatcaaagcaattgtactgtgcagataacatggttctttagggtcaaaggaaggcttcctttgtgctctattaatgaagcatagtattcatgatgcgtgaaygtggaatgaattcccaatgtcctttggcacagaaccacactcatttcatgaagtgtttatgaactgttgatggctgcttttacaaaaccatggcagaattgagtagttgtgacagagaccatatggcctacgaagcctaaaatatttaatatctcaccatttatagaaaaagtttggagatctctgatgtaagctccaagaagcagccaactttgtctgttttgtgcacagacattctagctcataaggaaggcacttttcgaatttgtctgtaatggatgaatggacagacagatgggtggatggacgcacggatggatggactgttcccacacagtgttggagttgaccaatggtcagaccatacatttatggcagcagaatctacaacctcatgggagcttatcccacaggtttcagccacttactgtgaagcaggcttagaaaagaccaagagtggggctctcccaggaagaagtga

SEQ ID NO: 561062 - DNA, 585 bp, Homo sapiens
ggaatcaaagcaattgtactgtgcagataacatggttctttagggtcaaaggaaggcttcctttgtgctctattaatgaagcatagtattcatgatgcgtgaatgtggaatgaattcccaatgtcctttggcacagaaccacactcatttcatgaagtgtttatgaactgttgatggctgcttttacaaaaccatggcagaattgagtagttgtgacagagaccatatggcctacgaagcctaaaatatttaatatctcaccatttatagaaaaagtttggagatctctgatgtaagctccaagaagcagccaactttgtctgttttgtgcacagacattctagctcataaggaaggcacttttcgaatttgtctgtaatggatgaatggacagacagatgggtggatggacgcayggatggatggactgttcccacacagtgttggagttgaccaatggtcagaccatacatttatggcagcagaatctacaacctcatgggagcttatcccacaggtttcagccacttactgtgaagcaggcttagaaaagaccaagagtggggctctcccaggaagaagtga

SEQ ID NO: 561063 - DNA, 585 bp, Homo sapiens
ggaatcaaagcaattgtactgtgcagataacatggttctttagggtcaaaggaaggcttcctttgtgctctattaatgaagcatagtattcatgatgcgtgaatgtggaatgaattcccaatgtcctttggcacagaaccacactcatttcatgaagtgtttatgaactgttgatggctgcttttacaaaaccatggcagaattgagtagttgtgacagagaccatatggcctacgaagcctaaaatatttaatatctcaccatttatagaaaaagtttggagatctctgatgtaagctccaagaagcagccaactttgtctgttttgtgcacagacattctagctcataaggaaggcacttttcgaatttgtctgtaatggatgaatggacagacagatgggtggatggacgcacggatggatggactgttcccacacagtgttggagttgaccaatggtcagaccatacatttatggcagcagaatctacaasctcatgggagcttatcccacaggtttcagccacttactgtgaagcaggcttagaaaagaccaagagtggggctctcccaggaagaagtga

SEQ ID NO: 561064 - DNA, 585 bp, Homo sapiens
ggaatcaaagcaattgtactgtgcagataacatggttctttagggtcaaaggaaggcttcctttgtgctctattaatgaagcatagtattcatgatgcgtgaatgtggaatgaattcccaatgtcctttggcacagaaccacactcatttcatgaagtgtttatgaactgttgatggctgcttttacaaaaccatggcagaattgagtagttgtgacagagaccatatggcctacgaagcctaaaatatttaatatctcaccatttatagaaaaagtttggagatctctgatgtaagctccaagaagcagccaactttgtctgttttgtgcacagacattctagctcataaggaaggcacttttcgaatttgtctgtaatggatgaatggacagacagatgggtggatggacgcacggatggatggactgttcccacacagtgttggagttgaccaatggtcagaccatacatttatggcagcagaatctacaacctmatgggagcttatcccacaggtttcagccacttactgtgaagcaggcttagaaaagaccaagagtggggctctcccaggaagaagtga

SEQ ID NO: 561065 - DNA, 563 bp, Homo sapiens
tttaccctttattgattacaaataccatttcaaggaaagcacagttttttgagtcttgaaggagaaaagggctttccacaggtaaggcaggtgggagtgagatcaagttaggatgttgaccaagaatggtttacacagcaaagcagtgcttacgactacaaaggtgcttgcaggcatctgtctggaggtctcctcaatagcaaagctcctatyctgccctttatattaatgtgtttagagcctcactccatttccctggcggcatggactttctcaattttttcacttctggccaccttgtgcagatgtttccagaatggggaatctttattcctgtttctgcccaagttcattcctgggtagttctattatagtttgaatatttgtttcctccaaatcgtatgttgaaatttaccctcagtgttggaggtggggcctaatgggggcagatccttcgtgaatggatttaatgccctccctcaggggtgagtgagctcttgagctctattaatctcagggagagctggttgttaaaaagagcctgaacatcccctgtctctctt

SEQ ID NO: 561066 - DNA, 666 bp, Homo sapiens
gtgtatcaggacttcattctttttatggctgaataacaatccattgtatgtatacaccacatttgatgcactccgcactccttcatctgttgctggacacttgggttgtttaccccttttggctgttatgaataatactgctattaacactggcatgcaagtatctgtttgagtccctattttcaatgctttckggattatacctaggcgtggaaatgcagggccatatggtaattctatgtttaactttttgaggaaactccatgccgtttgccacagcagctgcaccattttccattcccactagcaatatacaagagttccaatttctccacatccttgccaacacttgttattttccattaaaaacattacaggcatcctagtaggtatgaagtgctatctcattatggttttgagtttcatttccccagtgacaaatgatatgagaatctggtggcccagtgggcttggagattcactgggctggatggtgggaagggttcacctgcctccttcgtgccctcccagagctcaggatgctttgtgatgtgggcctaaactctagtcaggagagcatattctctgctcaggtgcctgaggtggctgtgagcttcagatgatgaagaattttgtttggtttcttctgcattttaatgagccctg

SEQ ID NO: 561067 - DNA, 258 bp, Homo sapiens
gtatacaccacatttgatgcactccgcactccttcatctgttgctggacacttgggttgtttaccccttttggctgttatgaataatactgctattaacactggcatgcaagtatctgtttgagtccctattttcaatgctttcgggattatacctaggcrtggaaatgcagggccatatggtaattctatgtttaactttttgaggaaactccatgccgtttgccacagcagctgcaccattttccattcccactag

SEQ ID NO: 561068 - DNA, 666 bp, Homo sapiens
gtgtatcaggacttcattctttttatggctgaataacaatccattgtatgtatacaccacatttgatgcactccgcactccttcatctgttgctggacacttgggttgtttaccccttttggctgttatgaataatactgctattaacactggcatgcaagtatctgtttgagtccctattttcaatgctttcgggattatacctaggcgtggaaatgcagggccatatggtaattctatgtttaactttttgaggaaactccatgccgtttgccayagcagctgcaccattttccattcccactagcaatatacaagagttccaatttctccacatccttgccaacacttgttattttccattaaaaacattacaggcatcctagtaggtatgaagtgctatctcattatggttttgagtttcatttccccagtgacaaatgatatgagaatctggtggcccagtgggcttggagattcactgggctggatggtgggaagggttcacctgcctccttcgtgccctcccagagctcaggatgctttgtgatgtgggcctaaactctagtcaggagagcatattctctgctcaggtgcctgaggtggctgtgagcttcagatgatgaagaattttgtttggtttcttctgcattttaatgagccctg

SEQ ID NO: 561069 - DNA, 666 bp, Homo sapiens
gtgtatcaggacttcattctttttatggctgaataacaatccattgtatgtatacaccacatttgatgcactccgcactccttcatctgttgctggacacttgggttgtttaccccttttggctgttatgaataatactgctattaacactggcatgcaagtatctgtttgagtccctattttcaatgctttcgggattatacctaggcgtggaaatgcagggccatatggtaattctatgtttaactttttgaggaaactccatgccgtttgccacagcagctgcaccattttccattcccacyagcaatatacaagagttccaatttctccacatccttgccaacacttgttattttccattaaaaacattacaggcatcctagtaggtatgaagtgctatctcattatggttttgagtttcatttccccagtgacaaatgatatgagaatctggtggcccagtgggcttggagattcactgggctggatggtgggaagggttcacctgcctccttcgtgccctcccagagctcaggatgctttgtgatgtgggcctaaactctagtcaggagagcatattctctgctcaggtgcctgaggtggctgtgagcttcagatgatgaagaattttgtttggtttcttctgcattttaatgagccctg

SEQ ID NO: 561070 - DNA, 618 bp, Homo sapiens
aatgagccctggaactttggttccattttttcatttgtatggagttgggatcatctttctgccatctgactgcattcggtggtgtccacatttgccagtttggaaaaaacatgtacccaaatcaggtaatgaaacccaagggctgcccactgaaacagtaggctttcatcttcccttcccaactcccatttttctaaatctattattgggatggaaagacctagggatggggactcttgggagatttaaacatcagtagtctagaataggttgagcagggcagtagtctagaataggttgagcagggaccccctgctaggcatggggcaggcttccagggctaagccccacactgcagtgcaggytgtggaccagcttccctgccccctgccacctgcccaatgcaggagtctctgggccatgccattcccttttgatgggctgggctggatagtgctgctggcctcagcaggctggtgggacccacaggagctgtctcaggggctggaccctgcagaatgcagcctgcatgtgcctgaacagctgagattccatgccccacaatttagaaatccatgtagaaaagaactctttatttgagattggtggagaaggatc

SEQ ID NO: 561071 - DNA, 618 bp, Homo sapiens
aatgagccctggaactttggttccattttttcatttgtatggagttgggatcatctttctgccatctgactgcattcggtggtgtccacatttgccagtttggaaaaaacatgtacccaaatcaggtaatgaaacccaagggctgcccactgaaacagtaggctttcatcttcccttcccaactcccatttttctaaatctattattgggatggaaagacctagggatggggactcttgggagatttaaacatcagtagtctagaataggttgagcagggcagtagtctagaataggttgagcagggaccccctgctaggcatggggcaggcttccagggctaagccccacactgcagtgcaggttgtggaccagcttccctgccccctgccacctgcccaatgcaggagtctctgggccatgccattccmttttgatgggctgggctggatagtgctgctggcctcagcaggctggtgggacccacaggagctgtctcaggggctggaccctgcagaatgcagcctgcatgtgcctgaacagctgagattccatgccccacaatttagaaatccatgtagaaaagaactctttatttgagattggtggagaaggatc

SEQ ID NO: 561072 - DNA, 618 bp, Homo sapiens
aatgagccctggaactttggttccattttttcatttgtatggagttgggatcatctttctgccatctgactgcattcggtggtgtccacatttgccagtttggaaaaaacatgtacccaaatcaggtaatgaaacccaagggctgcccactgaaacagtaggctttcatcttcccttcccaactcccatttttctaaatctattattgggatggaaagacctagggatggggactcttgggagatttaaacatcagtagtctagaataggttgagcagggcagtagtctagaataggttgagcagggaccccctgctaggcatggggcaggcttccagggctaagccccacactgcagtgcaggttgtggaccagcttccctgccccctgccacctgcccaatgcaggagtctctgggccatgccattcccttttgatgggctgggctggatagtgctgctggcctcagcaggcyggtgggacccacaggagctgtctcaggggctggaccctgcagaatgcagcctgcatgtgcctgaacagctgagattccatgccccacaatttagaaatccatgtagaaaagaactctttatttgagattggtggagaaggatc

SEQ ID NO: 561073 - DNA, 618 bp, Homo sapiens
aatgagccctggaactttggttccattttttcatttgtatggagttgggatcatctttctgccatctgactgcattcggtggtgtccacatttgccagtttggaaaaaacatgtacccaaatcaggtaatgaaacccaagggctgcccactgaaacagtaggctttcatcttcccttcccaactcccatttttctaaatctattattgggatggaaagacctagggatggggactcttgggagatttaaacatcagtagtctagaataggttgagcagggcagtagtctagaataggttgagcagggaccccctgctaggcatggggcaggcttccagggctaagccccacactgcagtgcaggttgtggaccagcttccctgccccctgccacctgcccaatgcaggagtctctgggccatgccattcccttttgatgggctgggctggatagtgctgctggcctcagcaggctggtgggacccacaggagctgtctcaggggctggaccctgcagaatgcagcctgcatgtgcctgaacagctgagattccatgccccacaatttagaaatccatgtagaaaagaaytctttatttgagattggtggagaaggatc

SEQ ID NO: 561074 - DNA, 563 bp, Homo sapiens
tttaccctttattgattacaaataccatttcaaggaaagcacagttttttgagtcttgaaggagaaaagggctttccacaggtaaggcaggtgggagtgagatcaagttaggatgttgaccaagaatggtttacacagcaaagcagtgcttacgactacaaaggtgcttgcaggcatctgtctggaggtctcctcaatagcaaagctcctattctgccctttatattaatgtgtttagagcctcactccatttccctggcggcatggactttctcaattttttcacttctggccaccttgtgcagatgtttccagaatggggaatctttattcctgtttctgcccaagttcattcctgggtagttctattatagtttgratatttgtttcctccaaatcgtatgttgaaatttaccctcagtgttggaggtggggcctaatgggggcagatccttcgtgaatggatttaatgccctccctcaggggtgagtgagctcttgagctctattaatctcagggagagctggttgttaaaaagagcctgaacatcccctgtctctctt

SEQ ID NO: 561075 - DNA, 615 bp, Homo sapiens
ggggtccaataagaggaacttagtgtcagtgatttcttcttctgaagagagggaagggtaagcctagccatggcatgaagccttgggcagagcccaggcccactgagcagcagagccatctcttgggtaaagggcatatggacacccagagacaagtgagccattgcctggagcccccagaggacggcaggctcgtgcctggagccaacacaaggaaaagaagtccacccaagggggtgctcaaggcccaggcagagccaccctgtgattgcagggcacccacctccccgarcacagcagagggcagagggctgcagctctgtgcgcctgagtgtcagagagctccacacaataagaaggtcacaggcagcgtccgagaaaccaagcaaccttgcagtcacccactcccaggcttctagggaatgttttctcagccagatcctgacagcccggaccagagcagcagggccatgggccatgctcacacatggcagtttccttgagtcacccagaaagtcctcctccatcctcaatttcagcaaaatgatggccttacttctcactaccagccacgctgaatcttcctgaatggatacatttatttaccaaggaagg

SEQ ID NO: 561076 - DNA, 396 bp, Homo sapiens
ggggaagtttagaatatcccaggaactggagctgarggaaaaggttggcttcagctctttcagagagccggcttggacttctggaaactgaccagcacctggcagggggtttgaagccacgtggaacacccatggtcatcccaggtttcttcacttgtttctgtgaatactgcctttagaaaaccaatacaaaaaacaacgaacaaacaaacaaacaaacaaaaaacaaaaaacaaacccaagcactcagggacttagaaagtgagaagactcatcaaagaacaagcgtcaggacctggtcttgtcagtccttccgtgccctcgttctactgaactgcatagccaccagggtgccggggctgcacgggaaccagacagtcacagttctattgttca

SEQ ID NO: 561077 - DNA, 396 bp, Homo sapiens
ggggaagtttagaatatcccaggaactggagctgaaggaaaagkttggcttcagctctttcagagagccggcttggacttctggaaactgaccagcacctggcagggggtttgaagccacgtggaacacccatggtcatcccaggtttcttcacttgtttctgtgaatactgcctttagaaaaccaatacaaaaaacaacgaacaaacaaacaaacaaacaaaaaacaaaaaacaaacccaagcactcagggacttagaaagtgagaagactcatcaaagaacaagcgtcaggacctggtcttgtcagtccttccgtgccctcgttctactgaactgcatagccaccagggtgccggggctgcacgggaaccagacagtcacagttctattgttca

SEQ ID NO: 561078 - DNA, 396 bp, Homo sapiens
ggggaagtttagaatatcccaggaactggagctgaaggaaaaggttggcttcagctctttcagagagccggcttkgacttctggaaactgaccagcacctggcagggggtttgaagccacgtggaacacccatggtcatcccaggtttcttcacttgtttctgtgaatactgcctttagaaaaccaatacaaaaaacaacgaacaaacaaacaaacaaacaaaaaacaaaaaacaaacccaagcactcagggacttagaaagtgagaagactcatcaaagaacaagcgtcaggacctggtcttgtcagtccttccgtgccctcgttctactgaactgcatagccaccagggtgccggggctgcacgggaaccagacagtcacagttctattgttca

SEQ ID NO: 561079 - DNA, 596 bp, Homo sapiens
atgaataaatggctatttggagtcctggctccctttgtgcttttatattcctgagagcgtagttttataatacttcacagaataagactaattgtgaaatatttggatgtaagttgatttggatgtccctgattacacaacatctgcatgtaagacaacacactattttcaattatgattttgtcaagttctcaaaatacaggattgacttttaacagaaactgtttctrtgtgctggcataataccatttgtgctattttcttatatttattctgtatattaaaaagggatattaattaactgaaagggtttttgtgcttactttagacaataaagaaattatgaaagtttactcataaatatggtggacagtcatttcataacaaagtatgacctaaatgtctccccaagggtaaagatcattcaagcaaaactatctcctgtatcagtatttattcacctaaatagactgttttggttaaaattttaatgaaaagtcatgcttatattactatataattttgtatatgcatggatatttatctgttcaaagtagagatgtagttgacatgaagggatgtctgcctagttcaca

SEQ ID NO: 561080 - DNA, 396 bp, Homo sapiens
ggggaagtttagaatatcccaggaactggagctgaaggaaaaggttggcttcagctctttcagagagccggcttggacttctggaaactgaccagcacctggcagggggtttgaagccacgtggracacccatggtcatcccaggtttcttcacttgtttctgtgaatactgcctttagaaaaccaatacaaaaaacaacgaacaaacaaacaaacaaacaaaaaacaaaaaacaaacccaagcactcagggacttagaaagtgagaagactcatcaaagaacaagcgtcaggacctggtcttgtcagtccttccgtgccctcgttctactgaactgcatagccaccagggtgccggggctgcacgggaaccagacagtcacagttctattgttca

SEQ ID NO: 561081 - DNA, 563 bp, Homo sapiens
tttaccctttattgattacaaataccatttcaaggaaagcacagttttttgagtcttgaaggagaaaagggctttccacaggtaaggcaggtgggagtgagatcaagttaggatgttgaccaagaatggtttacacagcaaagcagtgcttacgactacaaaggtgcttgcaggcatctgtctggaggtctcctcaatagcaaagctcctattctgccctttatattaatgtgtttagagcctcactccatttccctggcggcatggactttctcaattttttcacttctggccaccttgtgcagatgtttccagaatggggaatctttattcctgtttctgcccaagttcattcctgggtagttctattatagtttgaatatttgtttcctccaaatcgtatgttgaaatttaccctcagtgttggaggtggggcctaatgggggcagatccttcgtgaatggatttaatgccctccctcaggggtgagtgagctcttgagctctattaatcwcagggagagctggttgttaaaaagagcctgaacatcccctgtctctctt

SEQ ID NO: 561082 - DNA, 563 bp, Homo sapiens
tttaccctttattgattacaaataccatttcaaggaaagcacagttttttgagtcttgaaggagaaaagggctttccacaggtaaggcaggtgggagtgagatcaagttaggatgttgaccaagaatggtttacacagcaaagcagtgcttacgactacaaaggtgcttgcaggcatctgtctggaggtctcctcaatagcaaagctcctattctgccctttatattaatgtgtttagagcctcactccatttccctggcggcatggactttctcaattttttcacttctggccaccttgtgcagatgtttccagaatggggaatctttattcctgtttctgcccaagttcattcctgggtagttctattatagtttgaatatttgtttcctccaaatcgtatgttgaaatttaccctcagtgttggaggtggggcctaatgggggcagatccttcgtgaatggatttaatgccctccctcaggggtgagtgagctcttgagctctattaatctcagggagarctggttgttaaaaagagcctgaacatcccctgtctctctt

SEQ ID NO: 561083 - DNA, 596 bp, Homo sapiens
atgaataaatggctatttggagtcctggctccctttgtgcttttatattcctgagagcgtagttttataatacttcacagaataagactaattgtgaaatatttggatgtaagttgatttggatgtccctgattacacaacatctgcatgtaagacaacacactattttcaattatgattttgtcaagttctcaaaatacaggattgacttttaacagaaactgtttctgtgtgctggcataataccatttgtgctattttcttatatttattctrtatattaaaaagggatattaattaactgaaagggtttttgtgcttactttagacaataaagaaattatgaaagtttactcataaatatggtggacagtcatttcataacaaagtatgacctaaatgtctccccaagggtaaagatcattcaagcaaaactatctcctgtatcagtatttattcacctaaatagactgttttggttaaaattttaatgaaaagtcatgcttatattactatataattttgtatatgcatggatatttatctgttcaaagtagagatgtagttgacatgaagggatgtctgcctagttcaca

SEQ ID NO: 561084 - DNA, 631 bp, Homo sapiens
aacatgacattaaaaatgaatccctcgacaaaaaagaaggtaggcaaaatgttcttcagaccaaatggacaaatcaattatgattacctaacatgcccattattatttattaacatccttcattaatacccccaaaccccatcaacwggtaaatgaataaatgcattgaggcctatctgaacaatatcccaattccttaccattcttacttcttttgcaagcagaaaagactcagtattagcaaagacaattcagatagtttgttcttatgccagtagttgtaatttcctggaggtctatgtgacatcaattatgtacttcaatacctctcacaagcacttttcctgtttggccattttctgcagtatatccatgctcccattttctctattcttttatttctagcctagacttttctttcatcctataattctttatcctaaagatattaatttaaggataacatcacaaaatagtatatttcttcagatgatactccaaattgatacctaatatacagaaatgactatcatggacataacccacaacatgtgaaatatatggctcattctactgacattataaaggaaagttaatgacaactgaatttccagtcattgttcacccaacc

SEQ ID NO: 561085 - DNA, 631 bp, Homo sapiens
aacatgacattaaaaatgaatccctcgacaaaaaagaaggtaggcaaaatgttcttcagaccaaatggacaaatcaattatgattacctaacatgcccattattatttattaacatccttcattaatacccccaaaccccatcaacaggtaaatgaataaatgcattgaggcctatctgaacaatatcccaattccttaccattcttacttcttttgcaagcagaaaagactcagtattagcaaagacwattcagatagtttgttcttatgccagtagttgtaatttcctggaggtctatgtgacatcaattatgtacttcaatacctctcacaagcacttttcctgtttggccattttctgcagtatatccatgctcccattttctctattcttttatttctagcctagacttttctttcatcctataattctttatcctaaagatattaatttaaggataacatcacaaaatagtatatttcttcagatgatactccaaattgatacctaatatacagaaatgactatcatggacataacccacaacatgtgaaatatatggctcattctactgacattataaaggaaagttaatgacaactgaatttccagtcattgttcacccaacc

SEQ ID NO: 561086 - DNA, 631 bp, Homo sapiens
aacatgacattaaaaatgaatccctcgacaaaaaagaaggtaggcaaaatgttcttcagaccaaatggacaaatcaattatgattacctaacatgcccattattatttattaacatccttcattaatacccccaaaccccatcaacaggtaaatgaataaatgcattgaggcctatctgaacaatatcccaattccttaccattcttacttcttttgcaagcagaaaagactcagtattagcaaagacaattcagatagtttgttcttatgccagtagttgtaatttcctggaggtctatgtgacatcaattatgtacttcaatacctctcacaagyacttttcctgtttggccattttctgcagtatatccatgctcccattttctctattcttttatttctagcctagacttttctttcatcctataattctttatcctaaagatattaatttaaggataacatcacaaaatagtatatttcttcagatgatactccaaattgatacctaatatacagaaatgactatcatggacataacccacaacatgtgaaatatatggctcattctactgacattataaaggaaagttaatgacaactgaatttccagtcattgttcacccaacc

SEQ ID NO: 561087 - DNA, 631 bp, Homo sapiens
aacatgacattaaaaatgaatccctcgacaaaaaagaaggtaggcaaaatgttcttcagaccaaatggacaaatcaattatgattacctaacatgcccattattatttattaacatccttcattaatacccccaaaccccatcaacaggtaaatgaataaatgcattgaggcctatctgaacaatatcccaattccttaccattcttacttcttttgcaagcagaaaagactcagtattagcaaagacaattcagatagtttgttcttatgccagtagttgtaatttcctggaggtctatgtgacatcaattatgtacttcaatacctctcacaagcacttttcctgtttggccattttctgcagtatatccatgctcccattttctctattcttttatttctagcctagacttttctttcatcctataattctttatcctaaaratattaatttaaggataacatcacaaaatagtatatttcttcagatgatactccaaattgatacctaatatacagaaatgactatcatggacataacccacaacatgtgaaatatatggctcattctactgacattataaaggaaagttaatgacaactgaatttccagtcattgttcacccaacc

SEQ ID NO: 561088 - DNA, 575 bp, Homo sapiens
aggggagggctggggggcaagttgcatgacacacctcctcagctggctcctgggaatgaagacaaggggctgtttaactacagacacactcagcaccatgagaaagctaaaataaacaaacaaaaagctacaggcatatcttggagatattgcaggtttggttccaggccaccacaattaagagagtcacacaaattttttggtctcccagtgcatataacattatgtttacattatatggtagtctatgaagtgtgcaatagcatatgtctaaaacagtgtacacaccttagttaaaaacacttcagtgctaaaaaatgctaacaaccctctgagccattagcaagttgtaatcttttggctgcagagccttgcctcagtgttgatggctacttactgatcagggtggtggttctgaaggttggggtggctgtggcaatgttttttttcttttcttttctttttttttttttagagacagagtctggytctgtcatccaagctggagtgcagtggtgcaatgacagctcactgcagcctcaaactcccaggctcaagtgatcctcctgccttag

SEQ ID NO: 561089 - DNA, 575 bp, Homo sapiens
aggggagggctggggggcaagttgcatgacacacctcctcagctggctcctgggaatgaagacaaggggctgtttaactacagacacactcagcaccatgagaaagctaaaataaacaaacaaaaagctacaggcatatcttggagatattgcaggtttggttccaggccaccacaattaagagagtcacacaaattttttggtctcccagtgcatataacattatgtttacattatatggtagtctatgaagtgtgcaatagcatatgtctaaaacagtgtacacaccttagttaaaaacacttcagtgctaaaaaatgctaacaaccctctgagccattagcaagttgtaatcttttggctgcagagccttgcctcagtgttgatggctacttactgatcagggtggtggttctgaaggttggggtggctgtggcaatgttttttttcttttcttttctttttttttttttagagacagagtctggctctgtcayccaagctggagtgcagtggtgcaatgacagctcactgcagcctcaaactcccaggctcaagtgatcctcctgccttag

SEQ ID NO: 561090 - DNA, 551 bp, Homo sapiens
aatgctttgtatcaaatgtgcgagaaaattaatgggttttaaagactattctatgtcaactataacatttcatttggggatttctgtcccttatagtatctacctcattttggatggattccttgaggsctggtttatttttcttttcctttctatacatcgctgctcagagtgatgaatggcgttgtattttgaataaaatatctaagcatccttttgtgagcaaggagcatgatggttggtacttagacctaccatttctcgttacagtggttatggttacagtggggctggggtgtttacctggagcctggacgtccactgggacatgatacccactgggatttttttgtgtcaacctggtctatgatgtccacctggggactgggtatccacctaaggcctgatgtttacctggagccagatgtgcacctgaggcctgatgtctatctgtggccttatgttcacctggggaccgatgcacatctgaagcataggtattcacctggggcctcatatccacctgtagtatgggtgtcaaccttggggcg

SEQ ID NO: 561091 - DNA, 551 bp, Homo sapiens
aatgctttgtatcaaatgtgcgagaaaattaatgggttttaaagactattctatgtcaactataacatttcatttggggatttctgtcccttatagtatctacctcattttggatggattccttgagggctggtttatttttcttttcctttctatacatcgctgctcagagtgatgaatggcgttgtattttgaataaaatatctaagcatccttttgtgagcaaggagcatgatggttggtacttagacctaccatttctcgttacagtggttatggttacagtggggctggggtgtttacctggagcctggacgtccactgggacatgatacccactgggatttttttgtgtcaacctggtctatgatgtccacctggggastgggtatccacctaaggcctgatgtttacctggagccagatgtgcacctgaggcctgatgtctatctgtggccttatgttcacctggggaccgatgcacatctgaagcataggtattcacctggggcctcatatccacctgtagtatgggtgtcaaccttggggcg

SEQ ID NO: 561092 - DNA, 551 bp, Homo sapiens
aatgctttgtatcaaatgtgcgagaaaattaatgggttttaaagactattctatgtcaactataacatttcatttggggatttctgtcccttatagtatctacctcattttggatggattccttgagggctggtttatttttcttttcctttctatacatcgctgctcagagtgatgaatggcgttgtattttgaataaaatatctaagcatccttttgtgagcaaggagcatgatggttggtacttagacctaccatttctcgttacagtggttatggttacagtggggctggggtgtttacctggagcctggacgtccactgggacatgatacccactgggatttttttgtgtcaacctggtctatgatgtccacctggggactgggtatccacctaaggcctgatgtttacctggagccagatgtgcacctgaggcctgatgtctatctgtggccttatgttcacctggggacygatgcacatctgaagcataggtattcacctggggcctcatatccacctgtagtatgggtgtcaaccttggggcg

SEQ ID NO: 561093 - DNA, 472 bp, Homo sapiens
tggctccaggttccaggtagacactggaatccaaatcaacaccaggccccagatggacacccmggcctgtggtggacatcagactccagaaggtcatctggctggaagtggacatcaagccccaggtggatacctagtccccaggtagatatcaggccccactttgacaccagtccctgggtagataccttggcctcaggtggatatccagtctctagctaagcctcaggctccaggtggacccaggccccagctgactggggactagtgttcatatggggccacatgtccatctgggccctaggtgtcaacttgtagcctgatgtcaacctgggagctggtgttcaccagaggactaaagtcctcctggtggctgatgtccaacttgggactttgtgtccacctggagactgatgtccacttgggaccagatgtccaactggagcaagatgtccacctgtagcctagaact

SEQ ID NO: 561094 - DNA, 472 bp, Homo sapiens
tggctccaggttccaggtagacactggaatccaaatcaacaccaggccccagatggacaccccggcctgtggtggacatcagactccagaaggtcatctggctggaagtggacatcaagccccaggtggatacctagtccccaggtagatatcaggccccactttgacaccagtccctgggtagataccttggcctcaggtggatatccagtctctagctaagcmtcaggctccaggtggacccaggccccagctgactggggactagtgttcatatggggccacatgtccatctgggccctaggtgtcaacttgtagcctgatgtcaacctgggagctggtgttcaccagaggactaaagtcctcctggtggctgatgtccaacttgggactttgtgtccacctggagactgatgtccacttgggaccagatgtccaactggagcaagatgtccacctgtagcctagaact

SEQ ID NO: 561095 - DNA, 472 bp, Homo sapiens
tggctccaggttccaggtagacactggaatccaaatcaacaccaggccccagatggacaccccggcctgtggtggacatcagactccagaaggtcatctggctggaagtggacatcaagccccaggtggatacctagtccccaggtagatatcaggccccactttgacaccagtccctgggtagataccttggcctcaggtggatatccagtctctagctaagcctcaggctccaggtggacccaggccccagctgactggggactagtgttcatatggggccacatgtccatctgggccctaggtgtcaacttgtagcctgatgtcaacctgggagctggtgttcaccagaggactaaagtcctcctggtggctgatgtccaacttgggastttgtgtccacctggagactgatgtccacttgggaccagatgtccaactggagcaagatgtccacctgtagcctagaact

SEQ ID NO: 561096 - DNA, 510 bp, Homo sapiens
cctccaggctgctctgtcccattctaagagaaaaggaaaagtgggaatggggatcacagatcatgtccagatttctcactggcatggatgctgctatggaaacatccctgatggtccaggtttgtggtgggagagattgcaacactctgcttcctggaaatctgtgtttacagccaacacagttgctgcccgagacagccccacctgaaaaccccagagctgccccagcttgccaggcttcccctcctcctgttatcaycccatgctgctgagaacctgcctggcaggctgcccagccaaggccggggcctaatctcaagtgaaactgacatgtcctcgtgagggctgaggaacatcctctctccccacagagcctcactcaggttctcatctacttccttggggtctgccccgcctccctcaggagtttggaaccacatactgttctggaggggacctctcactgctgcagaacctgtcctccaggatacccacaagtgttcatctcgg

SEQ ID NO: 561097 - DNA, 510 bp, Homo sapiens
cctccaggctgctctgtcccattctaagagaaaaggaaaagtgggaatggggatcacagatcatgtccagatttctcactggcatggatgctgctatggaaacatccctgatggtccaggtttgtggtgggagagattgcaacactctgcttcctggaaatctgtgtttacagccaacacagttgctgcccgagacagccccacctgaaaaccccagagctgccccagcttgccaggcttcccctcctcctgttatcatcccatgctgctgagaacctgcctggcaggctgcccagccaaggccggggcctaatctcaagtgaaactgacatgtcctygtgagggctgaggaacatcctctctccccacagagcctcactcaggttctcatctacttccttggggtctgccccgcctccctcaggagtttggaaccacatactgttctggaggggacctctcactgctgcagaacctgtcctccaggatacccacaagtgttcatctcgg

SEQ ID NO: 561098 - DNA, 510 bp, Homo sapiens
cctccaggctgctctgtcccattctaagagaaaaggaaaagtgggaatggggatcacagatcatgtccagatttctcactggcatggatgctgctatggaaacatccctgatggtccaggtttgtggtgggagagattgcaacactctgcttcctggaaatctgtgtttacagccaacacagttgctgcccgagacagccccacctgaaaaccccagagctgccccagcttgccaggcttcccctcctcctgttatcatcccatgctgctgagaacctgcctggcaggctgcccagccaaggccggggcctaatctcaagtgaaactgacatgtcctcgtgaggrctgaggaacatcctctctccccacagagcctcactcaggttctcatctacttccttggggtctgccccgcctccctcaggagtttggaaccacatactgttctggaggggacctctcactgctgcagaacctgtcctccaggatacccacaagtgttcatctcgg

SEQ ID NO: 561099 - DNA, 485 bp, Homo sapiens
ttcccttatatttatgtttccccatttactgaagctttccacaggccaggcactgagatccaggggaggaccctgagggtaggacaagcatgagcactgaaggctacaatggcacaggcaccaacagaycatgtggggtgcaggaagcctcatctctagagtgtcttcctggtttaccatacgctttcttcccttcccttattggagtcaccttgtgctgactttgatagcctgtgtccctgaaacatgcactcccacacacacaaaccgacccacacctatccacatgtacctgcccatacatacacagacctctctgtgtatcccccagagctacaaatgccaatcttgagaatgaagattttgcaagtgctctgtgccaggcatgatgccaggtccctgacaacacaagactcctctggtttctcccactcagctgtgcaaggttcggggttgaggagctccccctgccaaggtcacagacg

SEQ ID NO: 561100 - DNA, 592 bp, Homo sapiens
aggttttcaatttactttgcctggatccattagaggaatcactatctatagcagctatagccttatgaaatatatttcttaaatgataaggcttgaaagtctaaaactaccccttgatccacaggctrcagaatggatgtgtgttagcaggcatgaaaacaacattaatctccttgtatatctccatcagagcttctgagtgactacgtgcattgtcaataagcagcaatattttgaagagaatctttttttctgagcaataggtctcaatcacaggcttaaagtgttcagtaaaccatactgtaaacagatgagctgtcatccaggccctgtcgcattcatagagcacaggcagttaatttagcttaattcttaagggccctaggattttcacaatggtaaatgagcactggcttcaatataaagtcaccagctgcattagcccctaacaagagagtcagcttgtcctttgaaacttggaagccaggcattgacttgtcctttctagctatgaaaatcctaggtagcatcttatttcaatagaaggctgtttcatctaaattgaaaatgtgttgtttagtgtagccacctt

SEQ ID NO: 561101 - DNA, 596 bp, Homo sapiens
atgaataaatggctatttggagtcctggctccctttgtgcttttatattcctgagagcgtagttttataatacttcacagaataagactaattgtgaaatatttggatgtaagttgatttggatgtccctgattacacaacatctgcatgtaagacaacacactattttcaattatgattttgtcaagttctcaaaatacaggattgacttttaacagaaactgtttctgtgtgctggcataataccatttgtgctattttcttatatttattctgtatattaaaaagggatattaattaactgaaagggtttttgtgcttactttagacaataaagaaattatgaaagtttactcataaatatggtggacagtcatttcataacaaagtatgacctaaatgtctccccaagggtaaagatcattcaagcaaaactatctcctgtatyagtatttattcacctaaatagactgttttggttaaaattttaatgaaaagtcatgcttatattactatataattttgtatatgcatggatatttatctgttcaaagtagagatgtagttgacatgaagggatgtctgcctagttcaca

SEQ ID NO: 561102 - DNA, 596 bp, Homo sapiens
atgaataaatggctatttggagtcctggctccctttgtgcttttatattcctgagagcgtagttttataatacttcacagaataagactaattgtgaaatatttggatgtaagttgatttggatgtccctgattacacaacatctgcatgtaagacaacacactattttcaattatgattttgtcaagttctcaaaatacaggattgacttttaacagaaactgtttctgtgtgctggcataataccatttgtgctattttcttatatttattctgtatattaaaaagggatattaattaactgaaagggtttttgtgcttactttagacaataaagaaattatgaaagtttactcataaatatggtggacagtcatttcataacaaagtatgacctaaatgtctccccaagggtaaagatcattcaagcaaaactatctcctgtatcrgtatttattcacctaaatagactgttttggttaaaattttaatgaaaagtcatgcttatattactatataattttgtatatgcatggatatttatctgttcaaagtagagatgtagttgacatgaagggatgtctgcctagttcaca

SEQ ID NO: 561103 - DNA, 366 bp, Homo sapiens
cccactgccaggcatttcaggatcctagattttagacccttcaaggatatgtgtccatctgggattcaggcatgatggcccatatgtagtggatggtgatgatgggcatggcatcattataagcatgttacagctgtaactcaagggactccatgaggcaggtattgctacacccactatgcagaggacactgagcacagacaactaacttgcccaaggtcrcacagctggaaatggtagagaagctggaatttgaacccagaagctgtgcccctggccacagggcaatcctgcttaaaggcagcacgaggttatgggtgagagcgctgatggcaaggcaggctgcctgggtttagatcctggctc

SEQ ID NO: 561104 - DNA, 581 bp, Homo sapiens
gaagacaaatatctgagtaaatataaatgaacactgactatacaatatgtagtttccagtggattaagaataagatgagaagcaaaactataaaacttctacaaataatacagtaaaactaccttaataaccccagtgggttttcatataaaacctaaacaaattctgttcaccagaaaaacactatcaggatcaaagacccaaatataaggggtaaaactataaaatttgtagaagaaaacataggtataaatctgtgaccgtgaattaggcaatgggtcttagatacaacaccaaatgcaagagtgacaaaaggaaaaaacaaactggacttcaacaaaattcaaaactttgtacatcaaaggatactatcaggaaagtgaaaagaacccacagaatgagagaaaatacctattaagtcatacatctgatgaagaactaatgtccagaatatataaagaattcttagartaacaaaaagacaacccaattaaatgagcaaacaatctaaatgaacatttctctaaaaagatatacaaatggccaatcagcacatgaaaagatgctcaacatcattagtc

SEQ ID NO: 561105 - DNA, 581 bp, Homo sapiens
gaagacaaatatctgagtaaatataaatgaacactgactatacaatatgtagtttccagtggattaagaataagatgagaagcaaaactataaaacttctacaaataatacagtaaaactaccttaataaccccagtgggttttcatataaaacctaaacaaattctgttcaccagaaaaacactatcaggatcaaagacccaaatataaggggtaaaactataaaatttgtagaagaaaacataggtataaatctgtgaccgtgaattaggcaatgggtcttagatacaacaccaaatgcaagagtgacaaaaggaaaaaacaaactggacttcaacaaaattcaaaactttgtacatcaaaggatactatcaggaaagtgaaaagaacccacagaatgagagaaaatacctattaagtcatacatctgatgaagaactaatgtccagaatatataaagaattcttagagtaacaaaaagacaacccaattaaatgagcaaacaatctaaatgaasatttctctaaaaagatatacaaatggccaatcagcacatgaaaagatgctcaacatcattagtc

SEQ ID NO: 561106 - DNA, 514 bp, Homo sapiens
gaacccacagaatgagagaaaatacctattaagtcatacatctgatgaagaactaatgtccagaatatataaagaattcttagagtaacaaaaagacaacccaattaaatgagcaaacaatctaaatgaacatttctctaaaaagatatacaaatggccaatcagcacatgaaaagatgctcaacatcattagtcattaaggatatgcaaatgaaaactacaactagataccacttcacatctacaagaatagctatttttttwaaaaaaaaggaaaataacagatgttggcaaggaggtaggaaaaaatggaacctccatacactgctggtaagaatataaaatggtacagagactttggaaaacagttttgaagtttttcaaaaaatttaaacatagatttaccatatgcccactcctagacatataaagaaaattgtaaaaatacgtcctcacaaaaacgagtacatgaatctcatcacagtacattattaatcatagtcaaaaaatgaac

SEQ ID NO: 561107 - DNA, 444 bp, Homo sapiens
tcacatatgattctgttttttctgatatttggcacatgctagtccatagagacagaraatagtctagtggttgccaggggctggggaaagggggaaatggggagtaactgctagtaagtatggagtttctttttgaaacgataaaaatcttctagagttagagagtggtgatagctgtacaactttatgaatacattaaaagcacttatagcacctatagtcccagatactcaggaggctgttgcaggagaatcgcttgaacctgggaggcagaggttgcagtgagccaagatcgcaccactgcactccagcctgggtgacagagtgagactcgaaatgtggaaaaaaaaatgcacttagtgtacacttagagtggatactgggctaaaagtgaagtgacaggccacaaactaggcaaatcttctatacacatacctgacaagg

SEQ ID NO: 561108 - DNA, 567 bp, Homo sapiens
gaatataaaatggtacagagactttggaaaacagttttgaagtttttcaaaaaatttaaacatagatttaccatatgcccactcctagacatataaagaaaattgtaaaaatacgtcctcacaaaaacgagtacatgaatctcatcacagtacattattaatcatagtcaaaaaatgaacacaactccaatatccatgaactaatgaatggataaacaaaacatagtatactcacgcaatgggattcaggcatataaagtaatgaggtgctgagacaagatacgacatggatgaatcaggacaacatgctaaacaaatgaagccaaacaccaaaggtcacatatgattctgttttttctgatatttggcacatgctagtccatagagacagagaatagtctagtggttgccaggggctggggaaagggggaaatggggagtaactgctagtaagtatrgagtttctttttgaaacgataaaaatcttctagagttagagagtggtgatagctgtacaactttatgaatacattaaaagcacttatagcacctatagtcccagatact

SEQ ID NO: 561109 - DNA, 567 bp, Homo sapiens
gaatataaaatggtacagagactttggaaaacagttttgaagtttttcaaaaaatttaaacatagatttaccatatgcccactcctagacatataaagaaaattgtaaaaatacgtcctcacaaaaacgagtacatgaatctcatcacagtacattattaatcatagtcaaaaaatgaacacaactccaatatccatgaactaatgaatggataaacaaaacatagtatactcacgcaatgggattcaggcatataaagtaatgaggtgctgagacaagatacgacatggatgaatcaggacaacatgctaaacaaatgaagccaaacaccaaaggtcacatatgattctgttttttctgatatttggcacatgctagtccatagagacagagaatagtctagtggttgccaggggctggggaaagggggaaatggggagtaactgctagtaagtatggartttctttttgaaacgataaaaatcttctagagttagagagtggtgatagctgtacaactttatgaatacattaaaagcacttatagcacctatagtcccagatact

SEQ ID NO: 561110 - DNA, 444 bp, Homo sapiens
tcacatatgattctgttttttctgatatttggcacatgctagtccatagagacagagaatagtctagtggttgccaggggctggggaaagggggaaatggggagtaactgctagtaagtatggagtttctttttgaaacgataaaaatcttctagagttagagagtggtgatagctgtacaactttatgaatacattaaaagcacttatagcacctatagtcccagatactcaggaggctgttgcaggagaatcgcttgaacctgggaggcagaggttgcagtgagccaagatcgcaccactgcactccagcctgggtgacagagtgagactcgaaatgtggraaaaaaaatgcacttagtgtacacttagagtggatactgggctaaaagtgaagtgacaggccacaaactaggcaaatcttctatacacatacctgacaagg

SEQ ID NO: 561111 - DNA, 444 bp, Homo sapiens
tcacatatgattctgttttttctgatatttggcacatgctagtccatagagacagagaatagtctagtggttgccaggggctggggaaagggggaaatggggagtaactgctagtaagtatggagtttctttttgaaacgataaaaatcttctagagttagagagtggtgatagctgtacaactttatgaatacattaaaagcacttatagcacctatagtcccagatactcaggaggctgttgcaggagaatcgcttgaacctgggaggcagaggttgcagtgagccaagatcgcaccactgcactccagcctgggtgacagagtgagactcgaaatgtggaraaaaaaatgcacttagtgtacacttagagtggatactgggctaaaagtgaagtgacaggccacaaactaggcaaatcttctatacacatacctgacaagg

SEQ ID NO: 561112 - DNA, 377 bp, Homo sapiens
gtggaaaaaaaaatgcacttagtgtacacttagagtggatactgggctaaaagtgaagtgacaggccacaaactaggcaaatcttctatacacatacctgacaagggacttcagggaatcctaaaaatttcaatgacaaaataggagactatagacaaaagacatgaacaatgcacataaggaacccaaataacccataaacaaatgaaaataagctcagcctccttccaaaccacagagaagactatttcatatccaaatgaaaaaatgatatsaagtaaaggcaagaatgtgcacaaaccagtacccacgtaagttgccagtgggaatgtaaaatggtgttacttcttagcaaatttggtgtcatctattaaata

SEQ ID NO: 561113 - DNA, 375 bp, Homo sapiens
aatttccagtctgctgtaaagayataagcaatattataaaacagataaattttagagtactaattttacttagactatgagaaacctacaatgagggtagttcacgggattacagaaccctaaaatatattaaataatgattaaggaactgtgaaaagtcaatagttctgagccaagaatgcatacaggagataactggacagttgcttcaaaacaccttagtacagatatttcagctaatatacattggtgaaaagcctcatattctgtaatagtatgcactgaatctaagaggccttctgggaaaataagataatggctataccctaaaacctgtacaattctgtaaggaaagcaccaataaaagcaataaca

SEQ ID NO: 561114 - DNA, 588 bp, Homo sapiens
cacccaaaatccactaccctccaacacacatccacacacaccctattaatttccagtctgctgtaaagacataagcaatattataaaacagataaattttagagtactaattttacttagactatgagaaacctacaatgagggtagttcacgggattacagaaccctaaaatatattaaataatgattaaggaactgtgaaaagtcaatagttctgagccaagaatgcatacaggagataactggacagttgcttcaaaacaccttagtacagatatttcagctaatatacattggtgaaaagcctcatattctgtaatagtatgcactgaatctaagaggccttctgggaaaataagatwatggctataccctaaaacctgtacaattctgtaaggaaagcaccaataaaagcaataacaattctaatagacttaataaagttaaagctccagtatcctttgcatctggcatacagtcaatctttggcagctttaagccctacagtttatgattcctctcttaagatataaatccgtgaggtcactggcttccaaaataaaccactatgtttcatctaaataaaat

SEQ ID NO: 561115 - DNA, 588 bp, Homo sapiens
cacccaaaatccactaccctccaacacacatccacacacaccctattaatttccagtctgctgtaaagacataagcaatattataaaacagataaattttagagtactaattttacttagactatgagaaacctacaatgagggtagttcacgggattacagaaccctaaaatatattaaataatgattaaggaactgtgaaaagtcaatagttctgagccaagaatgcatacaggagataactggacagttgcttcaaaacaccttagtacagatatttcagctaatatacattggtgaaaagcctcatattctgtaatagtatgcactgaatctaagaggccttctgggaaaataagataatggctataccctaaaacctgtacaattctgtaaggaaagcaccaataaaagcaataacaattctaatagacttaataragttaaagctccagtatcctttgcatctggcatacagtcaatctttggcagctttaagccctacagtttatgattcctctcttaagatataaatccgtgaggtcactggcttccaaaataaaccactatgtttcatctaaataaaat

SEQ ID NO: 561116 - DNA, 588 bp, Homo sapiens
cacccaaaatccactaccctccaacacacatccacacacaccctattaatttccagtctgctgtaaagacataagcaatattataaaacagataaattttagagtactaattttacttagactatgagaaacctacaatgagggtagttcacgggattacagaaccctaaaatatattaaataatgattaaggaactgtgaaaagtcaatagttctgagccaagaatgcatacaggagataactggacagttgcttcaaaacaccttagtacagatatttcagctaatatacattggtgaaaagcctcatattctgtaatagtatgcactgaatctaagaggccttctgggaaaataagataatggctataccctaaaacctgtacaattctgtaaggaaagcaccaataaaagcaataacaattctaatagacttaataaagttaaagctccagtatcctttgcatctggcatacagtcaatctttggcagctttaagccctacagtttatgattcctctcttaagatrtaaatccgtgaggtcactggcttccaaaataaaccactatgtttcatctaaataaaat

SEQ ID NO: 561117 - DNA, 181 bp, Homo sapiens
ctctccttccttttcaaggctgaacactattccactgtatgcatagacagcattttgttgatccrtccatccatccatggacacttgggttgcttccaccttttggttattgtggatgatgctgctctgaacatggttgtgcaagtatctcttccaggctagccccattatacagaagagc

SEQ ID NO: 561118 - DNA, 246 bp, Homo sapiens
ggcaaatgaatcatttggcattggctgagtatctgctctgtgccagatactaagctgtgatctctagaaagagacatgaactactgacacagtccytgaccccgaagagctcagaatccagtgagcttgatttcttgtaagttagagacagagttcagagcagaagctcaggcaggagaagagaagtaaaatggacacaccagaggcagtgacagccacacaggtgtctggggacactgagtgcag

SEQ ID NO: 561119 - DNA, 246 bp, Homo sapiens
ggcaaatgaatcatttggcattggctgagtatctgctctgtgccagatactaagctgtgatctctagaaagagacatgaactactgacacagtccctgaccccgaagagctcagaatccagtgagyttgatttcttgtaagttagagacagagttcagagcagaagctcaggcaggagaagagaagtaaaatggacacaccagaggcagtgacagccacacaggtgtctggggacactgagtgcag

SEQ ID NO: 561120 - DNA, 246 bp, Homo sapiens
ggcaaatgaatcatttggcattggctgagtatctgctctgtgccagatactaagctgtgatctctagaaagagacatgaactactgacacagtccctgaccccgaagagctcagaatccagtgagcttgatttcttgtaagttagagacagagttcagagcagaagctcaggcagragaagagaagtaaaatggacacaccagaggcagtgacagccacacaggtgtctggggacactgagtgcag

SEQ ID NO: 561121 - DNA, 591 bp, Homo sapiens
tctgcagggaggtcgggccagtggagaggtggcgagacccatgtgtggtcccccaaatcccgcccatgctatgcaatgggggcgaccacacacccgatctgcctgggagggtcctggtgtgcccactgcctcrctgagttatgaggggtgctgcctctcacatctcaccggtatcgcatttgaaggacaaattatgtcttcccttccccaccctgtggacctctgtttcctcatgtgcaagtgggggatgatatgcttacatggttatgcagtgggggtatcgatgggatccttctgtgaataccctgcatccagcgaccacctggagcacacctgcagttcgcaagctgggcttcctgctgcagtgaggggagcaagcactgcctggagccagggagtttctctgaaggaggtgttggaaaggacttgttccagaatttgggcttgtattgggagcttgggggagggttgaaagaagcctttgctccagattggatgctgtcagaggcagggtggattctatcacctggcatcttccccaatcttacctagaaggaaggaagaagacaagaccgaagctaatgctgcaat

SEQ ID NO: 561122 - DNA, 591 bp, Homo sapiens
tctgcagggaggtcgggccagtggagaggtggcgagacccatgtgtggtcccccaaatcccgcccatgctatgcaatgggggcgaccacacacccgatctgcctgggagggtcctggtgtgcccactgcctcgctgagttatgaggggtgctgcctctcacatctcaccggtatcgcatttgaaggacaaattatgtcttcccttccccaccctgtggacctcygtttcctcatgtgcaagtgggggatgatatgcttacatggttatgcagtgggggtatcgatgggatccttctgtgaataccctgcatccagcgaccacctggagcacacctgcagttcgcaagctgggcttcctgctgcagtgaggggagcaagcactgcctggagccagggagtttctctgaaggaggtgttggaaaggacttgttccagaatttgggcttgtattgggagcttgggggagggttgaaagaagcctttgctccagattggatgctgtcagaggcagggtggattctatcacctggcatcttccccaatcttacctagaaggaaggaagaagacaagaccgaagctaatgctgcaat

SEQ ID NO: 561123 - DNA, 591 bp, Homo sapiens
tctgcagggaggtcgggccagtggagaggtggcgagacccatgtgtggtcccccaaatcccgcccatgctatgcaatgggggcgaccacacacccgatctgcctgggagggtcctggtgtgcccactgcctcgctgagttatgaggggtgctgcctctcacatctcaccggtatcgcatttgaaggacaaattatgtcttcccttccccaccctgtggacctctgtttcctcatgtgcaagtgggggatgatatgcttacatggttatgcagtgggggtatcgatgggatccwtctgtgaataccctgcatccagcgaccacctggagcacacctgcagttcgcaagctgggcttcctgctgcagtgaggggagcaagcactgcctggagccagggagtttctctgaaggaggtgttggaaaggacttgttccagaatttgggcttgtattgggagcttgggggagggttgaaagaagcctttgctccagattggatgctgtcagaggcagggtggattctatcacctggcatcttccccaatcttacctagaaggaaggaagaagacaagaccgaagctaatgctgcaat

SEQ ID NO: 561124 - DNA, 575 bp, Homo sapiens
tctcacatctcaccggtatcgcatttgaaggacaaattatgtcttcccttccccaccctgtggacctctgtttcctcatgtgcaagtgggggatgatatgcttacatggttatgcagtgggggtatcgatgggatccttctgtsaataccctgcatccagcgaccacctggagcacacctgcagttcgcaagctgggcttcctgctgcagtgaggggagcaagcactgcctggagccagggagtttctctgaaggaggtgttggaaaggacttgttccagaatttgggcttgtattgggagcttgggggagggttgaaagaagcctttgctccagattggatgctgtcagaggcagggtggattctatcacctggcatcttccccaatcttacctagaaggaaggaagaagacaagaccgaagctaatgctgcaattgacaaagaggtagtggtcatgacatagacacaggggaggggctgtgaggtcatttttgtccatgttttgcatgagctgagccatgatagctaccaagtgaccttgctttgtcttgacccatcatggtcacagagcgac

SEQ ID NO: 561125 - DNA, 453 bp, Homo sapiens
ttctgtgagtgtttctagtaaattcttgaaactcagggtgttctggggaaacccctgaactggcagttggtgtcaaaagtgagaatcatcttatatggcctcttcctttgaactttgcagctggacccaaactctgcacaatttgggccagaagtctyatgttgactttgcagcctaaagtatcttgtagtttgtctaacgctcaataaatttgctttcatcaaatattgtatttgttaccccaaaattaccatcatgttttttttactccaaataactaacattgggagaaatagccagctgaatctgtaactcaacagaaacaagtgatccatataccatataagtggccatttcattttgcctccttccaccaaatcttagcaacctcaaccattgccatgagccactgtaggcctaccggctacaaacaaacaagtatcttttaaaaac

SEQ ID NO: 561126 - DNA, 453 bp, Homo sapiens
ttctgtgagtgtttctagtaaattcttgaaactcagggtgttctggggaaacccctgaactggcagttggtgtcaaaagtgagaatcatcttatatggcctcttcctttgaactttgcagctggacccaaactctgcacaatttgggccagaagtctcrtgttgactttgcagcctaaagtatcttgtagtttgtctaacgctcaataaatttgctttcatcaaatattgtatttgttaccccaaaattaccatcatgttttttttactccaaataactaacattgggagaaatagccagctgaatctgtaactcaacagaaacaagtgatccatataccatataagtggccatttcattttgcctccttccaccaaatcttagcaacctcaaccattgccatgagccactgtaggcctaccggctacaaacaaacaagtatcttttaaaaac

SEQ ID NO: 561127 - DNA, 453 bp, Homo sapiens
ttctgtgagtgtttctagtaaattcttgaaactcagggtgttctggggaaacccctgaactggcagttggtgtcaaaagtgagaatcatcttatatggcctcttcctttgaactttgcagctggacccaaactctgcacaatttgggccagaagtctcatgttgactttgcagcctaaagtatcttgtagtttgtctaacsctcaataaatttgctttcatcaaatattgtatttgttaccccaaaattaccatcatgttttttttactccaaataactaacattgggagaaatagccagctgaatctgtaactcaacagaaacaagtgatccatataccatataagtggccatttcattttgcctccttccaccaaatcttagcaacctcaaccattgccatgagccactgtaggcctaccggctacaaacaaacaagtatcttttaaaaac

SEQ ID NO: 561128 - DNA, 453 bp, Homo sapiens
ttctgtgagtgtttctagtaaattcttgaaactcagggtgttctggggaaacccctgaactggcagttggtgtcaaaagtgagaatcatcttatatggcctcttcctttgaactttgcagctggacccaaactctgcacaatttgggccagaagtctcatgttgactttgcagcctaaagtatcttgtagtttgtctaacgctcaataaatttgctttcatcaaatattgtatttgttaccccaaaattaccatcatgttttttttwctccaaataactaacattgggagaaatagccagctgaatctgtaactcaacagaaacaagtgatccatataccatataagtggccatttcattttgcctccttccaccaaatcttagcaacctcaaccattgccatgagccactgtaggcctaccggctacaaacaaacaagtatcttttaaaaac

SEQ ID NO: 561129 - DNA, 558 bp, Homo sapiens
gtaaattcatgtattatatatacacatgtgtatcagtgagtgtgtgtgcatgcatgtgtgtgtaaatgtaattctattgtgtgtgtaaatgtaattggatgcatcctaatatttatccttacctacaagatttccaagattcatttattatctttagatgatgtgcatttaaagatttaccaaataaaactctaattgtggaaaatatcaagatgttattaaattcatcttctgcacataattgtttctttaaatttatgtttcttgcaaaacttgcagtaatgctcatgcacaaaataattttctaaataaaaataacattttctgtcattaattcttaataattatttctccccaaaaattaatgtgaattaattcwtaattcttaattatagaatagtgttgcccttcagagttctgaaacctttgcatgttgtatacatttcactaactagaacaacttctgaaatattggcattaattaatgtcactctgcaattattgatttcaaagaaattaaatacctttcatattatgaatcacaagggtactttggca

SEQ ID NO: 561130 - DNA, 558 bp, Homo sapiens
gtaaattcatgtattatatatacacatgtgtatcagtgagtgtgtgtgcatgcatgtgtgtgtaaatgtaattctattgtgtgtgtaaatgtaattggatgcatcctaatatttatccttacctacaagatttccaagattcatttattatctttagatgatgtgcatttaaagatttaccaaataaaactctaattgtggaaaatatcaagatgttattaaattcatcttctgcacataattgtttctttaaatttatgtttcttgcaaaacttgcagtaatgctcatgcacaaaataattttctaaataaaaataacattttctgtcattaattcttaataattatttctccccaaaaattaatgtgaattaattcataattcttaattatagaatagtgttgcccttcagagttctgaaacytttgcatgttgtatacatttcactaactagaacaacttctgaaatattggcattaattaatgtcactctgcaattattgatttcaaagaaattaaatacctttcatattatgaatcacaagggtactttggca

SEQ ID NO: 561131 - DNA, 558 bp, Homo sapiens
gtaaattcatgtattatatatacacatgtgtatcagtgagtgtgtgtgcatgcatgtgtgtgtaaatgtaattctattgtgtgtgtaaatgtaattggatgcatcctaatatttatccttacctacaagatttccaagattcatttattatctttagatgatgtgcatttaaagatttaccaaataaaactctaattgtggaaaatatcaagatgttattaaattcatcttctgcacataattgtttctttaaatttatgtttcttgcaaaacttgcagtaatgctcatgcacaaaataattttctaaataaaaataacattttctgtcattaattcttaataattatttctccccaaaaattaatgtgaattaattcataattcttaattatagaatagtgttgcccttcagagttctgaaacctttgcatgttgtatacatttcactaactagaacaacttctgaaatattggcattaattaatgtcactctgcaattattgatttcaaagaaattaaataccwttcatattatgaatcacaagggtactttggca

SEQ ID NO: 561132 - DNA, 562 bp, Homo sapiens
tacttttaagtcaattagaatatgtttgtatcagtgtgtctacagttttacacctgtcaaaatgtacttgaactacaagtaccttgaacaattttgaaatttattattcctctgaaactgattaaaagaattatggtmgagtgaaattctgattggcataatttgggagagaaattattccttggacatcaacctctgccaagatagtttataatgacattgaggctttttgatttacaaaatttgttatataaaaaatactaagacaatgacagataatacacagactttaattaaaattgtactaaaattgaatgtctaaataaattagaagggtacatggtacatctaattgcatgtttatatattttatttgtgcattttattcctagggttgcttttggtttagtttgtaaaacgttcttatttttatgataaagtagtatatactaaatacagaaaaatcaggaaatagaaaatgaagaagaaaacattaactattgtcaaccaaataaaaattgtgcagtctctaagcacatgaactatgtattatttgtacagc

SEQ ID NO: 561133 - DNA, 562 bp, Homo sapiens
tacttttaagtcaattagaatatgtttgtatcagtgtgtctacagttttacacctgtcaaaatgtacttgaactacaagtaccttgaacaattttgaaatttattattcctctgaaactgattaaaagaattatggtcgagtgaaattctgattggcataatttgggagagaaattattccttggacatcaacctctgccaagatagtttataatgacattgaggctttttgatttacaaaatttgttatataaaaaatactaagacaatgacagataatacacagactttaattaaaattgtactaaaattgaatgtctaaataaattagaagggtacatggtacatctaattgcatgtttatatattttatttgtgcattttattcctagggttgcttttggtttagtttgtaaaacgttcttatttttatgataawgtagtatatactaaatacagaaaaatcaggaaatagaaaatgaagaagaaaacattaactattgtcaaccaaataaaaattgtgcagtctctaagcacatgaactatgtattatttgtacagc

SEQ ID NO: 561134 - DNA, 342 bp, Homo sapiens
accataaatacatcttcatatccacaactttctttagatctctctccccgactgatttctgatgcccacccaaacctaaaaggtcagataacacaaaacaaaacagaggagagcctcagattttgagagagacctgtctgcctgaagttsttggggttccatgaggacaatagaggtttctcctaaaatgggttttgtagcaccttctgtttttctttaaggagtcccaggctgtcagaaattaccttagatcctctcatgtgggcactgagtggcaacaagacagactagggaacagtggcaacaaggcagactagggaacagtggcaacaagacagacaa

SEQ ID NO: 561135 - DNA, 342 bp, Homo sapiens
accataaatacatcttcatatccacaactttctttagatctctctccccgactgatttctgatgcccacccaaacctaaaaggtcagataacacaaaacaaaacagaggagagcctcagattttgagagagacctgtctgcctgaagttcttggggttccatgaggacaatagaggtttctcctaaaatgggttttgtagcaccttctgtttttctttaaggagtcccagsctgtcagaaattaccttagatcctctcatgtgggcactgagtggcaacaagacagactagggaacagtggcaacaaggcagactagggaacagtggcaacaagacagacaa

SEQ ID NO: 561136 - DNA, 579 bp, Homo sapiens
ctgaccacagcagtactgtgcacccctggtacccaagttgtgttttttttttaattctattttcctttttttatattttgttttacatgctattttgacaaaggttgtggagccatttctcactaaaaggaactagggctcctgggagaaatggctgactccaggtctagagcagtaaatgcacacaataaacctgcagcatcttgccaaaccagagagcaagtacattctcaaagaccaatggggtcatgtccaaagtwctcaagagccagcttgaaagatgggacaatttgaacttcaataagggcaattaatgcaatcaattaaaacacagaaaatgtctttgaactcacaagtttgtacttattttttttatccctacttgatcaccgttggaagaacaatttaatttagaaaactgttagaggaaccagatcaagcatatatcactttataaactgtaccaccaggtagccaaatagcagaagttttgttgaggggaagtttctctctatagaaacatttcagcgaatacatgaaggaatgacagaatatcaccgttatgcaaccactaatttg

SEQ ID NO: 561137 - DNA, 579 bp, Homo sapiens
ctgaccacagcagtactgtgcacccctggtacccaagttgtgttttttttttaattctattttcctttttttatattttgttttacatgctattttgacaaaggttgtggagccatttctcactaaaaggaactagggctcctgggagaaatggctgactccaggtctagagcagtaaatgcacacaataaacctgcagcatcttgccaaaccagagagcaagtacattctcaaagaccaatggggtcatgtccaaagttctcaagagccagcttgaaagatggracaatttgaacttcaataagggcaattaatgcaatcaattaaaacacagaaaatgtctttgaactcacaagtttgtacttattttttttatccctacttgatcaccgttggaagaacaatttaatttagaaaactgttagaggaaccagatcaagcatatatcactttataaactgtaccaccaggtagccaaatagcagaagttttgttgaggggaagtttctctctatagaaacatttcagcgaatacatgaaggaatgacagaatatcaccgttatgcaaccactaatttg

SEQ ID NO: 561138 - DNA, 579 bp, Homo sapiens
ctgaccacagcagtactgtgcacccctggtacccaagttgtgttttttttttaattctattttcctttttttatattttgttttacatgctattttgacaaaggttgtggagccatttctcactaaaaggaactagggctcctgggagaaatggctgactccaggtctagagcagtaaatgcacacaataaacctgcagcatcttgccaaaccagagagcaagtacattctcaaagaccaatggggtcatgtccaaagttctcaagagccagcttgaaagatgggacaatttgaacttcaataagggcaattaatgcaatcaattaaaacacagaaaatgtctttgaactcacaagtttgtacttattttttttatccctacttgatcaccgttggaagaacaatttaatttagaaaactgttagaggaaccagatcaagcatatatcactttataaactgtaccaccaggtagccaaatagcagaagtttkgttgaggggaagtttctctctatagaaacatttcagcgaatacatgaaggaatgacagaatatcaccgttatgcaaccactaatttg

SEQ ID NO: 561139 - DNA, 579 bp, Homo sapiens
ctgaccacagcagtactgtgcacccctggtacccaagttgtgttttttttttaattctattttcctttttttatattttgttttacatgctattttgacaaaggttgtggagccatttctcactaaaaggaactagggctcctgggagaaatggctgactccaggtctagagcagtaaatgcacacaataaacctgcagcatcttgccaaaccagagagcaagtacattctcaaagaccaatggggtcatgtccaaagttctcaagagccagcttgaaagatgggacaatttgaacttcaataagggcaattaatgcaatcaattaaaacacagaaaatgtctttgaactcacaagtttgtacttattttttttatccctacttgatcaccgttggaagaacaatttaatttagaaaactgttagaggaaccagatcaagcatatatcactttataaactgtaccaccaggtagccaaatagcagaagttttgttgaggggaagtttctctctatagaaacatttcagcgaatacatgaaggaatracagaatatcaccgttatgcaaccactaatttg

SEQ ID NO: 561140 - DNA, 624 bp, Homo sapiens
agttttacaaatttataaagctaaccacctacacaatcaaatatagaatattcccttcacctacacatttattgcacgacctttgccaatgaattcccttcaaccccagaaaagttcaatgcattttgtctttatataatttcaaattttatttacgtggaagcatacaatatttattatttagtatctgccttctttcctctagyatatgataaaaattcactttttttttttttgtacaaaggaatgacaatccttcaattgtaaaaactaaacaacatgccacccaactaatcacattccttagggtatatttctgaaatataagatacattttttaaaagaactttattaaaactcagggctgttaaaagtatatatacaaatacaacactaaaaaataaagttaggtttccaggccgggctcagtggctcacgcctgtaatcccagcactttttgaggccgaggcaggcggatcacgagttcacgagattgagaccatcctggctaacacggtgaaaccccatctccactaaaaatacaaaaaattagcggggcttggtagcctgcgcctgcagtcccatactcgggaggctgaggcaggagaatggcgtgaacccggg

SEQ ID NO: 561141 - DNA, 538 bp, Homo sapiens
ggggtgctcctgggggtgacagaaggcacagtcaccatggaggggtagcgggagggggaggtggccattcctccccaaccagctccagcccaagtgttctcctgactggcaaaatcctactcatccttctaggacctccacccccaggaggccctccatgactgtcacagatggcatttgtggctcctcctcagctctcttgtggtcacyctccagccacactaacctcgctttccccccacacgtcaggcctctgcccatgctggaccttctgcttgggacagcctctccatcaggagataacccttattcatccttccaggctcagttcaaatggtacctcctccatgaagccttccctgatgccacccttggcccctctgccccattctgtcacacactgcctgtgtacccttcccagggcctggcatgcaggaaggagggaaggagccatgtatgcaggagcaaacaaatgaccgagcacctaaaggagagaacacggggccagccagacgagctacccatctgtgtgcaggat

SEQ ID NO: 561142 - DNA, 538 bp, Homo sapiens
ggggtgctcctgggggtgacagaaggcacagtcaccatggaggggtagcgggagggggaggtggccattcctccccaaccagctccagcccaagtgttctcctgactggcaaaatcctactcatccttctaggacctccacccccaggaggccctccatgactgtcacagatggcatttgtggctcctcctcagctctcttgtggtcactctccagccacactaacctygctttccccccacacgtcaggcctctgcccatgctggaccttctgcttgggacagcctctccatcaggagataacccttattcatccttccaggctcagttcaaatggtacctcctccatgaagccttccctgatgccacccttggcccctctgccccattctgtcacacactgcctgtgtacccttcccagggcctggcatgcaggaaggagggaaggagccatgtatgcaggagcaaacaaatgaccgagcacctaaaggagagaacacggggccagccagacgagctacccatctgtgtgcaggat

SEQ ID NO: 561143 - DNA, 458 bp, Homo sapiens
tctgaccatctcagacttcagcatttgctgtcattaatttgggctgctgttttcacagaggaggcacatgggaaatgctacacacacacacacacacacacacacacacacasagctgtctccaaggccgcggacagagtgtgagatcatgaggctgcttcgcctcttcacccgtgagcctgcagcctcatcttctgcagggccccagcagtttccctcctagacaagtggcctgtgtggccacatgtgccctgctgcatccagatttcctgtgggtgacatcgggccggtgggtctctgtcctcgctccaagctcccagccctgtggttggcaggaagtcatcatggaagggacggactagctagcttacaaccaactctgggctccaatcatgatgactggatggaaaaaacaagtcatgtcagccctggccccggcctggaagaacagagaattc

SEQ ID NO: 561144 - DNA, 458 bp, Homo sapiens
tctgaccatctcagacttcagcatttgctgtcattaatttgggctgctgttttcacagaggaggcacatgggaaatgctacacacacacacacacacacacacacacacacagagctgtctccaaggccgcggacagagtgtgagaycatgaggctgcttcgcctcttcacccgtgagcctgcagcctcatcttctgcagggccccagcagtttccctcctagacaagtggcctgtgtggccacatgtgccctgctgcatccagatttcctgtgggtgacatcgggccggtgggtctctgtcctcgctccaagctcccagccctgtggttggcaggaagtcatcatggaagggacggactagctagcttacaaccaactctgggctccaatcatgatgactggatggaaaaaacaagtcatgtcagccctggccccggcctggaagaacagagaattc

SEQ ID NO: 561145 - DNA, 458 bp, Homo sapiens
tctgaccatctcagacttcagcatttgctgtcattaatttgggctgctgttttcacagaggaggcacatgggaaatgctacacacacacacacacacacacacacacacacagagctgtctccaaggccgcggacagagtgtgagatcatgaggctgcttcgcctctkcacccgtgagcctgcagcctcatcttctgcagggccccagcagtttccctcctagacaagtggcctgtgtggccacatgtgccctgctgcatccagatttcctgtgggtgacatcgggccggtgggtctctgtcctcgctccaagctcccagccctgtggttggcaggaagtcatcatggaagggacggactagctagcttacaaccaactctgggctccaatcatgatgactggatggaaaaaacaagtcatgtcagccctggccccggcctggaagaacagagaattc

SEQ ID NO: 561146 - DNA, 458 bp, Homo sapiens
tctgaccatctcagacttcagcatttgctgtcattaatttgggctgctgttttcacagaggaggcacatgggaaatgctacacacacacacacacacacacacacacacacagagctgtctccaaggccgcggacagagtgtgagatcatgaggctgcttcgcctcttcacccgtgagcctgcagcctcatcttctgcagggccccagcagtttccctcctagacaagtggcctgtgtggccacatgtgccctgctgsatccagatttcctgtgggtgacatcgggccggtgggtctctgtcctcgctccaagctcccagccctgtggttggcaggaagtcatcatggaagggacggactagctagcttacaaccaactctgggctccaatcatgatgactggatggaaaaaacaagtcatgtcagccctggccccggcctggaagaacagagaattc

SEQ ID NO: 561147 - DNA, 564 bp, Homo sapiens
gaattctgaagattttataaaacaatgcaggttccggctgctctggaaaaatctgaggagctggcaactgtgggccgccgcctcatgagccaggtgggcaggtcccaggtagtcacagccaatccccttcctaacatctgaccatctcagacttcagcatttgctgtcattaatttgggctgctgttttcacagaggaggcacatgggaaatgctacacacacacacacacacacacacacacacacagagctgtctccaaggccgcggacagagtgtgagatcatgaggctgcttcgcctcttcacccgtgagcctgcagcctcatcttctgcagggccccagcagtttccctcctagacaagtggcctgtgtggccacatgtgccctgctgcatccagatttcctgtgggtgacatygggccggtgggtctctgtcctcgctccaagctcccagccctgtggttggcaggaagtcatcatggaagggacggactagctagcttacaaccaactctgggctccaatcatgatgactggatggaaaaaacaagtcatgtcagcc

SEQ ID NO: 561148 - DNA, 576 bp, Homo sapiens
tttaccatcttgcttttgcatgatttacataccaggaacttacgtaatttgggattggctgtgatttctcaacaagcaccaagaactccagagaaagccctgtggccaccatatcacaaagcacccaggacttcacgatgagtgaccctgaccctaggaggttcccttaaatagatggtaatttctgatggcacattttcttctcagattttgaagccaatacttctttccagaacctaaactatttgatgagtcccccaaaagctcagggccccaggcacggctccacccaccccacctgaccaccaagggcaggccccggccccacacagtaccatggtgatgcccaggctccagacgtcagacttgacattgtagcccttctggttcagctctgggttgatcctctcaggctgcaggagggaagattgaggcgtgaacaccygccccaggtaagctcccatggctaggccttgcctcccaatccccaaactgagcgctcagcttagcccacctgcccatgtgacgggggaggaaactgaggctaggagggcctgggtcatgcttagaagtccc

SEQ ID NO: 561149 - DNA, 373 bp, Homo sapiens
tcctaagatacaaaactcagcattaaagtctgtatacttcaatatcctgcccccttctcatttgtctttactgccttttatgtatgtgttagatgttcaataaattctcttttttaaactgaatttaagccatggagcagtgttttgttgaacaataaatatgatataggacactgttcctccctttcatttatgatccagttcatgaaaaagagaaattctttcattgtgctagaagcttaaartaatgaaaatgccactttctacattacacagaaactgaagggaatcaaggtgaattgcatgagacatagaaaacaagtgggaaagaaatctagcataatttgccctttgtggacctttattatttagc

SEQ ID NO: 561150 - DNA, 373 bp, Homo sapiens
tcctaagatacaaaactcagcattaaagtctgtatacttcaatatcctgcccccttctcatttgtctttactgccttttatgtatgtgttagatgttcaataaattctcttttttaaactgaatttaagccatggagcagtgttttgttgaacaataaatatgatataggacactgttcctccctttcatttatgatccagttcatgaaaaagagaaattctttcattgtgctagaagcttaaagtaatgaaaatgccactttctacattamacagaaactgaagggaatcaaggtgaattgcatgagacatagaaaacaagtgggaaagaaatctagcataatttgccctttgtggacctttattatttagc

SEQ ID NO: 561151 - DNA, 373 bp, Homo sapiens
tcctaagatacaaaactcagcattaaagtctgtatacttcaatatcctgcccccttctcatttgtctttactgccttttatgtatgtgttagatgttcaataaattctcttttttaaactgaatttaagccatggagcagtgttttgttgaacaataaatatgatataggacactgttcctccctttcatttatgatccagttcatgaaaaagagaaattctttcattgtgctagaagcttaaagtaatgaaaatgccactttctacattacacagaaactgaagggaatcaaggtgaattgcatgagacatagaaaacaagtgggaaagaaatctagyataatttgccctttgtggacctttattatttagc

SEQ ID NO: 561152 - DNA, 594 bp, Homo sapiens
atcacaatgaattttagagcattttcatcacttcaaaaagaaaccccaccttctctagctgttaacctcctatgcacccatcccctactcaatcctaagcaaccacaaatctgttttctgtctctatagattttcctattctattttcatctaaatagaatcatacaataggtggccttttgtkcctggctcctttcagttggcataatgctatcaaggttcatgtacgtattggtactttatttctttttataactgtataatattcaatttcatggatataacattttgtttatccaataatatttttattgacatttgagttgtgctcagcctttggctattgtaaatagtgctgctaaaaatacttgtgtacaatttgtgtttgaacacctctttccaatactctgggggtatacctgggaataaatttctgggtcatatgacaattctatgtttaatatatttagaagccatcaaactattttccaaagtggccagttctagccatagagtatctaactgtggttttgatttgtagttacttgatgagtgatgctattgtgtacttttttatgggattattgaccgttc

SEQ ID NO: 561153 - DNA, 453 bp, Homo sapiens
tttggttgcctgatgcttgttttctaatagggtcctcagtaggtgctcccaggaataatactcttggagttcttgcatgttgataattgtttatgacccttatacttgaacatcagtttggctggagacatatctttcttggattgtactttacccctttaataatgtggscatactagtcccttgtcttctggcatgaagtattgatgtaggtaagtctgatgacagtctgattttcctgataagtgacttaatctttttctttctcttttttccttttgtcatgccgtcttgtctaagagtgacttgatcttttcccagattctcaatggcatccatagaatatgtcatagaatatgattctctgttggatgtgccgggtcactttttttttaggtacacaatgttgtttcaagtttttatctatctcaggaaagtgtttttaaattgtag

SEQ ID NO: 561154 - DNA, 520 bp, Homo sapiens
gagtaataaagacattggattcatagaaagaaaactgcagaggcagttagttccatagcttggtggagctccaggttccttccatcctgtgtgtgttggtttttgttcttaggctttttgcctcatagttgcaagatggctgcctcagctccagtcattgcatcatctcacagccttcraaggctggaggcaagggggccagccaatgtgttaagagtctgctcctctcacgtctatctctttataccaggaggtccatctctcccagccttcccttatgtttcattgttgttcagaagtacatcaggaggcagccacagacccccgaattgccatggggagtgggattccctgactggtttggcccagtcaggattcatcctccagagctgagctgtgcaacagaactctctgtgttgatgggaatgttccagatctgtgctgtccaaatgacagccaccagccacaggtggccattgagcacccagaatgtggctcatttgatggaggagtggaattc

SEQ ID NO: 561155 - DNA, 227 bp, Homo sapiens
cagaagtacatcaggaggcagccacagacccccgaattgccatggggagtgggattccctgactggtttggcccagtcaggattcatcctccagagctgagctgtgcaacagarctctctgtgttgatgggaatgttccagatctgtgctgtccaaatgacagccaccagccacaggtggccattgagcacccagaatgtggctcatttgatggaggagtggaattc

SEQ ID NO: 561156 - DNA, 491 bp, Homo sapiens
ggattcatagaaagaaaactgcagaggcagttagttccatagcttggtggagctccaggttccttccatcctgtgtgtgttggtttttgttcttaggctttttgcctcatagttgcaagatggctgcctcagctccagtcattgcatcatctcacagccttcgaaggctggaggcaagggggccagccaatgtgttaagagtctgctcctctcacgtctatctctttataccaggaggtccatctctcccagccttcccttatgtttcattgttgttcagaagtacatcaggaggcagccacagacccccgaattgccatggggagtgggattccctgactggtttggcccagtcaggattcatcctccagagctgagctgtgcaacagaactctctgtgttgatgggaatgttccaratctgtgctgtccaaatgacagccaccagccacaggtggccattgagcacccagaatgtggctcatttgatgg

SEQ ID NO: 561157 - DNA, 620 bp, Homo sapiens
ccagcaacatgagtttcctttcagtttctttaggagcccttctctgccaggtctttcctagctgggccttcgtccttctttactctctaccaggaacgctgttcctggctcattcagrtggctagctcctcctcaaacttaaggtcccagttcaaatgtcatctcagaagagtctttccaaccatcctacatataaggtaagttcccactagttactctcaatcacatcacccttttggttcctttacaggtttatcataatctgaaatggattacgtacttcattttatttgagtatattctgtcttctctcactagaataaaaactacctgtttgattctctataatatttgttgaataaaataaacaaactcccattcatgggtctgatgttttttaaaataaataaacaagaaatatacaagacttatttgtacaggacttatttgaagcaaagtttgaaaatctacagagagacataaaaatctattagaacacaggacagtaagtacataaagatgtcaatttccccaaacttcacctacaatttcagtactcccaatcaatattcagtattcaataaaaatctctatgatttctttttgaatgtcacagaatg

SEQ ID NO: 561158 - DNA, 568 bp, Homo sapiens
ttattggcacgaaaagaagctaagcacatatttaaacaaaagtaaagttaaacagaatgtacaaagtgagcacattaaaatactcgtaagggctgactctggacacactgcctatgggttagccctgttccacaaggagcagcagcaaaaagaaaaaaaaaagaaaaaagaacctataaaattaaattaaattaaattaaattaaattaaaattaaaatattacacacacaaatagggaagactcaacatgaaaatgttaataacttttaactggtaaaactgtaggtaattttttctttcaagcttacttaattcttctataaatgatatacctaggcttaacatttaaaaaaaaatctaacaaatgttagttctttttaaatccttacttctggaggtgggcagttgggagagaatggggagarggagatggaaagagaagtattagttagtagtagtagtcatggtttacactttagaggagaaaaagcaggactagagtcaggggtcctaggttaattccaactcaggaggtactacctaggtcacttaattcttctgaacatc

SEQ ID NO: 561159 - DNA, 505 bp, Homo sapiens
ctcccttgagcttctctgaacccctaggtgacaggggaagaaaccctcagatgggtgatcacggcccttcccgccccctggtcccaggcattgatggggctgtggcatttgcttttccttcctccaggggtcctggctccactcagcttcccactcctcctgccccctccagagcagctgcgtccctgcratcaatatggagctgatcaatctatctgtccctctgcttggctgaggaagccagcaatgatggccaccttgggaccccatgagtgctcctgagactgtggcatgtatcacctcctcactgcacaggtggggaaattgaggcctccagagggtcagggcttcccaaagctcccagcaagtctgtggggtgggaagggctggaacctgctcagctggcttctctttcagacatcacgtctgtgatgcatatggtcctgggtgccctgtgtccccgtggccatgcctcaggggtcctgaagtgctaaaccatgaattc

SEQ ID NO: 561160 - DNA, 629 bp, Homo sapiens
tgtgcttcttttttctttttttttgagacaggggtcttgctctgttgccaggctggaatgcagtggcaccatcatagctcaccaggagccttgaactcctgggctcaagcaatcctcctgcttcagccttccgagtagttgggacttcaggcaaacaccaccatgcctagccagttttttttatttttaatttttttgtagagacagagtcttgctgtgttgctcaggctggtcttgaactcttgtgctcacatcttcctctcaactcagcctcccaaactgctggggctacaggtgtgagccactgtgcccagcctatatgtgcttcttatgtatatcatagattgtggccttactctrtattagttcttgcattgctatttagctttccctacacaggcctcatctctacaactagaccataaactgcttgagggaaagatgtggtcttctatgtctttggatcccttacagtgcttacatagtgcttggtcccaagggagtgctcatagtattcttttttattggcagattctacataacacattgcaaatggtcacaacaatcaagactatagccatagatgtcccagaaataatatctgactatacagagcagcattaccaagc

SEQ ID NO: 561161 - DNA, 629 bp, Homo sapiens
tgtgcttcttttttctttttttttgagacaggggtcttgctctgttgccaggctggaatgcagtggcaccatcatagctcaccaggagccttgaactcctgggctcaagcaatcctcctgcttcagccttccgagtagttgggacttcaggcaaacaccaccatgcctagccagttttttttatttttaatttttttgtagagacagagtcttgctgtgttgctcaggctggtcttgaactcttgtgctcacatcttcctctcaactcagcctcccaaactgctggggctacaggtgtgagccactgtgcccagcctatatgtgcttcttatgtatatcatagattgtggccttactctgtattagttcttgcattgctatttagctttccctacacaggcctcatctctacaactagaccataaactgcttgagggaaagatgtggtcttctatgtctttggatcccttacagtgcttacatagtgcttggtcccaagggagtgctcatagtattcttttttattggcagattctacataacacattgcaaatggtcacarcaatcaagactatagccatagatgtcccagaaataatatctgactatacagagcagcattaccaagc

SEQ ID NO: 561162 - DNA, 645 bp, Homo sapiens
gtgctgggattacaggggtgagccaccaagcccagccagcaagaccctgtctctacaaaaaactaaaaataaaaaacaaattagctgagcaagtcccagctacttgggaagctgaggcaggaggatctcctgagaccaagaggttgaggctgcwgtgagccacgcgcatgccactacactccagcttggccaacagagcgagtccccttctaaaaaaaataataaagtaagaacgctgtacagtttccagtagactactgtgtttaaatactttttttcacatagtgggaataacattcccctttcttacaatcagtttgttcttcaagcttagaagcctatggaggtagcatagttgtaaggtaaaaggaaaccttggtcaattgtaagaatgactatgttgcacttggctttcttcctatactttagagtggaagaaccactctgaaaaatgaagctcttcattttaaaagcatttaaactggggattgcctttacatcctggctccaccacatactagctagttgtaggaccctggacctcggttttcatctgtaaagtggggatagtagcaacacctacctcacaaagttgcagtaaagataaataaatgaacacttagaaagtgcttagagaagtgccta

SEQ ID NO: 561163 - DNA, 645 bp, Homo sapiens
gtgctgggattacaggggtgagccaccaagcccagccagcaagaccctgtctctacaaaaaactaaaaataaaaaacaaattagctgagcaagtcccagctacttgggaagctgaggcaggaggatctcctgagaccaagaggttgaggctgctgtgagccacgcgcatgccactacactccagcttggccaacagagcgagtccccttctaaaaaaaataataaagtaagaacgctgtacagtttccagtagactactktgtttaaatactttttttcacatagtgggaataacattcccctttcttacaatcagtttgttcttcaagcttagaagcctatggaggtagcatagttgtaaggtaaaaggaaaccttggtcaattgtaagaatgactatgttgcacttggctttcttcctatactttagagtggaagaaccactctgaaaaatgaagctcttcattttaaaagcatttaaactggggattgcctttacatcctggctccaccacatactagctagttgtaggaccctggacctcggttttcatctgtaaagtggggatagtagcaacacctacctcacaaagttgcagtaaagataaataaatgaacacttagaaagtgcttagagaagtgccta

SEQ ID NO: 561164 - DNA, 511 bp, Homo sapiens
ggttatcttgggaatccacatttgtgtaatgaagatgctactatctcctaaaacacttttggagctctcacactgaaactgttctcagaattattttaggaatttttttaaaagtcttgtaatccgtattgttacagtttttagatatcatcaacaatcatcagaagtgagttcaacatctcacttccctggaacagagatgyacttaagcaattccagaaactacttttttaaaaaacctttaaaaaagattctgccattatagattagttaatttatcaaactgtgtcaggaactatgccagacacacaagacaagtaagatccaattgagtagggaaacaaaaatgtattcctagaagtgcaaacacaggagggatatctcagtatgtgaataagcatatagctttttatgaaaaataaaatatgtacatcatccaggaggtatctaatgagagcttttttttttttttttttgagatggagttttgctctggtgcccaggctggagt

SEQ ID NO: 561165 - DNA, 588 bp, Homo sapiens
aatgcaactcccatctgaagggaaggcaagttccataaaatgaaaaccaatttggtagcccagccattatgtaattaatttgggcattgccatatgtgagatatccagataattcaaaccaatacatggagtttttctactccattaaawacaaatgagcccagcacactttcttatagttatgtcctgctgtttaaaccataataacttgcaaagagtgtaaaaatgtttttgctcgatgctgttatcagtacaaaatctgtgacatttaaagtatcagttcctatcactgtggcccttcattttaatacttaataaaggtttattcagcaaagttcccttcagtcttctcaatgaaccatgatcatttctggcacatacggaaaacagagcaaactttcttgaattaataaaattaagtctgtcagatttaggccagttgggtattaaatttaaactagaccaaatacaggctgaacatagttgcagcttgtatggatcagatttggcataaaattcagtttgtgatgtaatgtaaattgtcaaaatgatactgcttcaaatttcatgtggtttatttttaaaatg

SEQ ID NO: 561166 - DNA, 469 bp, Homo sapiens
aaaaaaaaaaaaaaaattcagcgttccttccaggtttctgattgggtaactaggagaatggcagggctgtttatcaataggtggagttcagtagtagaatcagaattaaggagcgaggtatttggctcaagccttgagtttgctatgaaatttttgagaggcctttggagagtcagctaatwatgggtctagtttttgtgtacatgttgtgagaataatgtgaaatatctttaaagcattattaaatataattattgttttcaaaaaaaatgtataatatgtaatatgacccctgtaaataacccatagtgaaacaaaaaatattaagcagtcttggcttctgacccctgttctttaaattttctcaaatcagttcagaaggacaaatatttaagagaaaaatatggtaagtacaaattttcctttacatcaacaaattcaagagaaataaaatatgtacagatcaaaa

SEQ ID NO: 561167 - DNA, 467 bp, Homo sapiens
tttaaagcaagatacagaaagatggaaaataaatatacaaagtaaaaaggggatactttcctctaaagtgaaagtaaactcacgtgataaattggagaaaacatccttttcctaagctccaagctgatgttcctacagatttgttttttaacagcctactttcagaacagtttccttttgtccattgtgcaagggttgggaggatggaatacaacagatagaaagtgtgtactgacctctcatctttggggactaaatttcaactgagtccatagattcatgccttcttaattcattactactgaacrgtgaccacataaaatcacaaaaattagtcactcaaggttaaccaaaaccttaggaccacatgggcacaaaactgaattcatcttttaagttcaggagacatcattatctttctgggggcccaaaggtgcatctgactaaaaagatcacattacgcccac

SEQ ID NO: 561168 - DNA, 648 bp, Homo sapiens
gttataattctccatggtgtgaatcattttacaagttgaagaaatccaaaactggaaaaactaaggacctgtagtccatatgtgtgtgtgtctttacagtttttagaagaaacacaaacaatgaatctggctttttctttcttcagcaagctattcagaatacagaaatgcgtgctttccttattgagtcgttattatccttagcttctattttggtatctgctgccaggcagtgggtttctaattacctttgtgaccaataaagaaagtttagaaccagatgttaagctacaaattaatttcagcacaagagcatatatagaaagatatttccaagcattttactcagtttatattcaaatgaaataattcaaatttgtcttcaataaatgtgcrtttcacattttgagtggtgaggaaaatacagaattagaggagaggcttcaagatggctggctgactagaagcatttcatgtccaccttctccacttagaagaaccaaaataatgtatagacagttgcactttgaatacattatcccagacagaatactggaatccaacagagaagtgaccggaaacaccaaaatcagggaaggaaaagggagggagcagcctttctgaccaggttcagatgaaagccaggaa

SEQ ID NO: 561169 - DNA, 648 bp, Homo sapiens
gttataattctccatggtgtgaatcattttacaagttgaagaaatccaaaactggaaaaactaaggacctgtagtccatatgtgtgtgtgtctttacagtttttagaagaaacacaaacaatgaatctggctttttctttcttcagcaagctattcagaatacagaaatgcgtgctttccttattgagtcgttattatccttagcttctattttggtatctgctgccaggcagtgggtttctaattacctttgtgaccaataaagaaagtttagaaccagatgttaagctacaaattaatttcagcacaagagcatatatagaaagatatttccaagcattttactcagtttatattcaaatgaaataattcaaatttgtcttcaataaatgtgcgtttcacattttgagtggtgaggaaaatacagaattagaggagaggcttcaagatggctgrctgactagaagcatttcatgtccaccttctccacttagaagaaccaaaataatgtatagacagttgcactttgaatacattatcccagacagaatactggaatccaacagagaagtgaccggaaacaccaaaatcagggaaggaaaagggagggagcagcctttctgaccaggttcagatgaaagccaggaa

SEQ ID NO: 561170 - DNA, 576 bp, Homo sapiens
aattggcctcttttgacatttcccrtccaaacgcggtggcaatttatacatgtgtcttatagttgtaacatctttgtctttcaaaaattaaattcttgttgcatcagtcatgactgtagactagttagaaatgacaagagctggttattgtctttcaacacaaaagtgtgaaagatccggccagatgcccagaggacatctcagtgactgtctggtagacccagttaggtttaaggacaggaagcctaggtatggaggcccagcagtggcaccactattgatatctaaaagtttatgaaactttcaagaaaatgaagctgagaaatggagttgaaggtgagtatcagtgctacctttgtaagaaatcccatggctggggacagtgaaactccccagagtaagggagagaaagcagtgacctacaatagtttatcatacagccgaacactggtgaaattataaaaaacaatgatgacggtgggaagttacctgttcacagggatgtagccacttttaggagttttggtttttgagacagagtctttctctgtcacccaggctggagtgcagtggtgt

SEQ ID NO: 561171 - DNA, 600 bp, Homo sapiens
agtgaaaatatgcagtatttggttttctgttcctgtgttaattattttataatcatctccaggtgcatccatgtggctacaaaagacatgrcttcattttttacagctgtgtagtattccatggggtatatgtaccacattttctttatccaatgcattgttggtggatacattctatctatttatgtctagtctttacccttctcctcccctccaaaatcattttgagtctcctacaccattagagatttattaataaaaatgcttgacaaatattgttatagttctcattaaccttttatgagtgggcaaaatgaagcttatagaagcaaaatgacttatctaaaacttaataatcagctagttgttgagttggaaccctattacatatttactgacctacctgagcttcctattacattgcaattctgtcttggtcttgatataaatagtaactaaccagtaaggctaaatgaactttcaagaaactaaaactaaaagttattgaataacatgccaagaaacagcaataaatagatgggattgcattgagattgttaactgttgaaagtgctccttctaaactgacttcaaaactat

SEQ ID NO: 561172 - DNA, 566 bp, Homo sapiens
catgccccttagttttcctatctctaacatgatggggtaaacaagatcaatctgagctgacataattatatgcaattacaatgcagtttttttccctgaaggcaataatttattatatttcttgaacttgaaaactgttttgtattttaagaatgcctcctccagtctcctgatgaggatttctctgcagctcttgtttaagaagctctgtatgctagtaagcaccaagtcttttgtaagtcagcactgggctgtaggcaacttccgcttttktgttgtttgtttgctttttctgagacagagttttgctctgttgtccagcctggagtgcagtggcgtgatcttggctcactgcaacctccacttcccaggttcaagcaattctcctgccttggcctcccaagtagctgggattacaggcatgtgccaccatgcctagctaatttttgtgtttttagtagagacagggtttcaccatgttggccaggctggtctcaaattcctcacctcatgatccacctgcctaagcctcccaaagtgttgggattacaggtgtgaaccaccgt

SEQ ID NO: 561173 - DNA, 566 bp, Homo sapiens
catgccccttagttttcctatctctaacatgatggggtaaacaagatcaatctgagctgacataattatatgcaattacaatgcagtttttttccctgaaggcaataatttattatatttcttgaacttgaaaactgttttgtattttaagaatgcctcctccagtctcctgatgaggatttctctgcagctcttktttaagaagctctgtatgctagtaagcaccaagtcttttgtaagtcagcactgggctgtaggcaacttccgcttttttgttgtttgtttgctttttctgagacagagttttgctctgttgtccagcctggagtgcagtggcgtgatcttggctcactgcaacctccacttcccaggttcaagcaattctcctgccttggcctcccaagtagctgggattacaggcatgtgccaccatgcctagctaatttttgtgtttttagtagagacagggtttcaccatgttggccaggctggtctcaaattcctcacctcatgatccacctgcctaagcctcccaaagtgttgggattacaggtgtgaaccaccgt

SEQ ID NO: 561174 - DNA, 369 bp, Homo sapiens
aaactctcagaatcttcttcactatggttgctttcctctaaaagtttcctttcagaaatgagaaattataattcccaatatgaggaatgatcctattgcaaccattgcactaatttgaaatgagggacagtttacctaccctctgctgtttttccttttatatatatataagaggatagcagagtttggtatgggttatcttatatcaaaataatccaaatcttctttaggaactattcatttattcctggaaattagatattttggaggaaatcctactagcyttaaaattggaatcaaacacctcctagaatatttatcatatcatctgtcaagatatatgatttcataatttattagtttaagttt

SEQ ID NO: 561175 - DNA, 556 bp, Homo sapiens
taaaaatgcaaattcccaggcgcttcccaagacccartgaatcagtaactctgggatagggtccggcgctggtggattcacaagacctccagttgattacaccgcatgctaaagtttgagaatcactgcttcagagggatttttgtcttttaaatttgcagagcacgaacaagctactcatataaaatgtttgaataatccccagtctctcaatctggaatactcatagccctggggttcagagcagagtgataagatacctaggaatgtttggtgggattctgctgcttcacactgggttcctggaagccctgggcatattcatccactccttttctgcccctgcatgttcttaggcgtgaaacttcaagaaggcttctcagttctttctacccgtcagggctggccttactagcttgacttaagggagcccacagttctcctgtctccttgtgttacccttcctcctcttttgttaaaagacatctctgatgtaaatgccttgaaaagcagctattgatatacaaactctaactgggtgggggtaatatattaa

SEQ ID NO: 561176 - DNA, 529 bp, Homo sapiens
ttaatatattacccccacccagttagagtttgtatatcaatagctgcttttcaaggcatttacatcagagatgtcttttaacaaaagaggaggaagggtaacacaaggagacaggagaactgtgggctcccttaagtcaagctagtaaggccagccctgacgggtagaaagaactgagaagccttcttgaagtttcacgcctaagaacatgcaggggcagaaaaggagtggatgaatatgcccagggcttccaggaacccagtgtgaagcagcagaatcccaccaaacattcctaggtatcttatcactctgctctgaaccccagggctatgagtattccagwttgagagactggggattattcaaacattttatatgagtagcttgttcgtgctctgcaaatttaaaagacaaaaatccctctgaagcagtgattctcaaactttagcatgcggtgtaatcaactggaggtcttgtgaatccaccagcgccggaccctatcccagagttactgattcactgggtcttg

SEQ ID NO: 561177 - DNA, 330 bp, Homo sapiens
aacatagagatagcattttattctttttttttttttttttggctttgtatgacatgtgaaaagattccagtaggaatgcagagtcatcaatactcaatttggctgaaatcctgacagttgtcaacataacagagacagctatattataggttcctcwacttgcaaacattttctcttgcatttgcagttgtaaagcagattcaaatattttctttcactaccatcaaagagtagggccttacataacaaccatctttgggaggaatttttttttgtgtgtgaaatgaaaccttcttcagggtctactttcccttttgaaatactacattc

SEQ ID NO: 561178 - DNA, 514 bp, Homo sapiens
taattatttcccacacagcaatgctttcttttttttttcaattttaacttagtctcagcttraagagtatttagaaaacaaaaaagcccattgggaaaattagctctgagagacactaaaatacactagcaaacacaggcagtcaccatttctaatataatgtgctcatataaattctatcaaaaaaggctcatcttaaaacatattgttctctttccatagaaataatgttgtaattggggaactgtattcctgagcaggacttgaaattgaataaatcacaaatatgaccaacaaaatgttataaaaccaaagctataaaaactataaaccttcataatcatttaaaatagaaaaattatactattttatagaaattagcagctagaagggattttagaatattgccaagttcaagcccattgttttgtagatgaaaaaaacagatgtctagaaaagatgagtgacatttcttttaatttaccaaagtagcctgtggcaataggcactaaaa

SEQ ID NO: 561179 - DNA, 514 bp, Homo sapiens
taattatttcccacacagcaatgctttcttttttttttcaattttaacttagtctcagcttgaagagtatttagaaaacaaamaagcccattgggaaaattagctctgagagacactaaaatacactagcaaacacaggcagtcaccatttctaatataatgtgctcatataaattctatcaaaaaaggctcatcttaaaacatattgttctctttccatagaaataatgttgtaattggggaactgtattcctgagcaggacttgaaattgaataaatcacaaatatgaccaacaaaatgttataaaaccaaagctataaaaactataaaccttcataatcatttaaaatagaaaaattatactattttatagaaattagcagctagaagggattttagaatattgccaagttcaagcccattgttttgtagatgaaaaaaacagatgtctagaaaagatgagtgacatttcttttaatttaccaaagtagcctgtggcaataggcactaaaa

SEQ ID NO: 561180 - DNA, 605 bp, Homo sapiens
actttctcatgcttagaaccttctctgagaaacagtcacaataagtattcaatatccaaaaacaactctgtaattattgtaagcttcaagaatacatggtggcccaaacaattgtagcaaagattcttaagagaaagtgtgacagtgttgtagaatgtaccatttttataaaagaaaaaaaagaaaatactgtaaaccacaacttctgtaaatgtgcacctgcttctctatgcttcacatttgttgaatttttagtcctcattgattgattgatctaagcctccatcaaacacattaatatactcaggttgcttaggcaccrccatctgagtgtaatacacagccacagaatcaagattacctgatgctatgaaaaccacctcgtatagcttgaactttattctgattcacagtgtagtctcagtggttcattcctttgcaacacctgtatactagaatatgttagtggagcttccaaaatttaactaagaattgatacatctaactggatctgtagatattataggacacacatttacagtgttctattggccttgatgccaggagcactctgcctgtgttttgtgcagaattcatattagagt

SEQ ID NO: 561181 - DNA, 507 bp, Homo sapiens
aaaccatttcatttcccttacctttgcacagtctgtgacacctcttggaatgtcctcacccctcttctagcttttaattttatatttatattgatacrgacaggagacagggaaatactgggtagaggatggtggttctccagcaaaggccccaccctcaagcctggaatgggaacaggtcctaaatgggaacaggcattcctgtttttgtggccaaatgttgccttttggcccaccacacccccctatcctatatccatataaacttcaaatcccaggatccatggcagatgagcagaagagaagaggaacagaaagtcagcgtggcagagaggagtgaagagaaggaatgtctgaacatcgagaggagtgtgactgtggacagtccaatggctgtgggatggccaaactccagaggaagatcatcttcccactctatcctctttccagctccctgtccatctcactgagagccttctccaccactcacaaaacccctgcattcac

SEQ ID NO: 561182 - DNA, 424 bp, Homo sapiens
ctctttttcccttggagcccctttgcccacacaccacgtatagtgatggctttgtgtccttattttatcaatctactctcagaaaagattctgataatctgatgtacacatttctaacttactcatacgtcttaatactttttctatctcaatacatttcaataaacagcaaactctaaaaccaaacaaagaaattcaaaacttggagtctaataaattctttaaggcatcattagtacttcctcggtatcttyacaaaatgcatcgctgcccatttttaatcagagccatagttgggatgaggacagtctggcccagagcacattctccaaaaggggttattttattttattttattttattttatttattttcttttattttttgagatggaatctcactctgttgcccaggctggagtgca

SEQ ID NO: 561183 - DNA, 581 bp, Homo sapiens
gcagatcacctgaggtcaggagttcaagaccagcctagccaacatgatgaaacccagtatctactaaaaatacaaaaattagctgggcatggtggtgggcacctgtaatcccagctacccaggaggctgaggcaggatgaattgcttgaatctgggaggtggaggttgcagtgagctgagatcgtatcacttaaatccagcctgggtgacagaaggagactctgtctcgagagaggaaaaaaaacaaaaacaaaaacctaaacccaaagctttaaggcaagagagtaagaagcaataaaccctgaagtgtgcttattttttagaaaagggtaggttgctcggcagccccttgtgtatgccctttcagtgtgatgacttgggactaacacgtagtttgtaaaccaaatggtcagagcccactagactgaaagctctaagcacttaacaccgtttgctacakagtaggggctttatacatcgttgttgaataaaaatgaactgattaataaaggactgcatgtgaattctgtcacttgcagagttcccagactctgtagacatggcggtggagtcagggatca

SEQ ID NO: 561184 - DNA, 403 bp, Homo sapiens
aaaacaaaacaaaaacaaaaacaaaaacaaaaacaaaaaaaaacccaacaacaacaagaaaaaggttgggagagaagtgcagtatggtggaaagtgcttgaggctcagagctcaagaatgtgagtttgtgtctgatttctacatctttctaagtctttgaccactaataaattacataccctctatgggtttgagttaccctcactgtaaaatgtgtaaataataggtaattcataggatggtttcaatagaaaatgttaatcacaaaaattaattgtttaaaaaatttagagtcttatatttacccactatacytgaggatgcatttaaattatttgagagaaaaagtctcagaacctggaaggaagggacatctggttacaggtcactgttaggtattccc

SEQ ID NO: 561185 - DNA, 569 bp, Homo sapiens
ctgttctgttccattggtctatatatctgttttggtaccagtaccatgggcctcttataagggcctcttttaaaaaaaatcatctaattcatcattttaccagagtctagggcttattcctcagttttaaactgtaatcttgttagttcccatcatttgtgggtacattttctagatatgccaaaatattagtaagggaatccttgcagtttaagtcttgattgggctacggtagttcttctaagtgggactatatgttcaataaggaagcatttgatcagagattcccctttgctgttgcctctttcctcagtttccagcttcactatccttatatagagtatccacccagaaaaagggtactgggcaacttctctgaagaaaactgcagctttatatggacaccccatttccacagtrtgtattagcccgatcctctaatgcctcctttcaacccatagtagaacagaataggtagttttttcatactacctttcatattgaagagtaatatctgggtttgattccttgttctgttatttactagctgagtgaacttgaaattattt

SEQ ID NO: 561186 - DNA, 501 bp, Homo sapiens
gttcttaggaaaatataaggtatttattctacaggttcttgttctggtggtgctctgttgtgtgggcattctttagtgaaaaactccatagatgttctgagaaagagaagcacacagcctgtgatataatttgttgcactttctgcatattgtttttctttaattctcagggctttaatataaagaaatgccccctcactagagggggcaaaatgattgccccaaacacgagctgtggttcttgaagacgtctttgctaaatgaagacactgatcatggtgtttcttaagagagttktagaagaggtggattggggagtcagggatgtttgccctggtttacctgggggccttgaattttaacttagttcatggtctgcttctgtttgcccatggtccccgtaaatgggtcttctgcaaacttatcccatcgcccacctacaaacatgagaagttagctcaggtccttcttgtgaaagctgtaatactctttggagcagag

SEQ ID NO: 561187 - DNA, 609 bp, Homo sapiens
gaaatgttggtttctggcgcaaattcaatagctttccagatagcaactgtacttttaaaatgctgtttgcttttaaaaggcagtttttcagtcaaagggaagaacttactgtttcggtatatttttatgctgcttgtctgcttgctgactcaaagcgaacccccttatgactttcataagtaatattttgagattatcagcgtaatttgtggggtcttcctgcacagaacctgagctctgtttccttttgcatccttagttcccagctgaattaccctggagcagtgtcacagaataaatatctgttgaattgacttgaaatttacattagcagtacatttattactttwaaaaaaacaaaaacttacacgttttttaaaaagttgatgtacgtgcaatcacattttaatcagtgcatcgagttttggcttatgaaggcatgtagactttcttgatcacaatatactaggacagtttggcttgaccgggagggtttctagttttgcagatgtagaattacattttacaaaagcttatatgtttctgataagttaaagaaaaaccaagcttgagtatgcatttctaatatgtttagacattttctcacag

SEQ ID NO: 561188 - DNA, 609 bp, Homo sapiens
gaaatgttggtttctggcgcaaattcaatagctttccagatagcaactgtacttttaaaatgctgtttgcttttaaaaggcagtttttcagtcaaagggaagaacttactgtttcggtatatttttatgctgcttgtctgcttgctgactcaaagcgaacccccttatgactttcataagtaatattttgagattatcagcgtaatttgtggggtcttcctgcacagaacctgagctctgtttccttttgcatccttagttcccagctgaattaccctggagcagtgtcacagaataaatatctgttgaattgacttgaaatttacattagcagtacatttattactttaaaaaaaacaaaaacttacacgttttttaaaaagttgatgtacgtgcaatcacattttaatsagtgcatcgagttttggcttatgaaggcatgtagactttcttgatcacaatatactaggacagtttggcttgaccgggagggtttctagttttgcagatgtagaattacattttacaaaagcttatatgtttctgataagttaaagaaaaaccaagcttgagtatgcatttctaatatgtttagacattttctcacag

SEQ ID NO: 561189 - DNA, 582 bp, Homo sapiens
ccttttccaaccatgtttctgggtcacctggccctgttctgtataccctccccaggggattgttctagccagcacccccggcccatgacacacctgctcaaatcctctccatgaccaaaccaaagaaatgtgcatggtctgtgaggtggggcaggtggtagtgaggagtggaggaattgttatgatataacaagaattcagagactttccagccacatgcaatgtgtgggtcttgtctggatccaacacaacactgtacaaaaacactctgagmcaaatggggaaacttgaaaactggctgattattagtgacattatagaatgattgttcatttttaaggtgcaataatgagattatggtgttttaaaaaatagtctttttgtcttagagatacatcctgaactcctgacaaatgaaataatatagtgtcttgggggttgaattaattaaaataagtcatcagggggagtggagcaatggaaaatagaaatgaaacaagattggccatgtactgataattattgcacctggataacaggtatgaagaggctggttatactattctacttctgtgttaacta

SEQ ID NO: 561190 - DNA, 571 bp, Homo sapiens
ggttctggcttgcccttgcattcactccatagaagagtaagagggacaatgaactccctatggtctcttatttcctcatattactcttctcttctcccaaattctatgtgtgtgtgtgtgtgtgtgtgtgtgtatgtgtgtgtgtgtgtgtgtatgtatgaatatgtgtgtatatatatgtatatatacatatacatacatatccacacatactatatctatctatctatatacacacacaatatacatrtatatatatatacatatatacgttgcccaggctggagttcagtggcatgatcttggctcactgcaaactctgcctcccaggttcaagcaattctcctgcctcagcctcctgagtagctgggactacaggcacgtaccaccacgcctggctaatttttgtatttttagtagagatggggttttgccatgttggccaggccggtcttgaacccctgatctcagataatccacccacctcggcctcccaaagtgctgggattacaggcatgagccatcacatccagccccaataagcatattttatgtattaaagcactacatt

SEQ ID NO: 561191 - DNA, 623 bp, Homo sapiens
ttgtattaataatttaataataattttaatgcctaagtatcctgacaaataaggaaaagccctgcagaagacaagagtaattaaagactttacattcctgcacatgtgtgtgcatgtatgtgtgcacaagtgtgcgtgtgtgcatgtgtgtgtgtgtgtgtgtctgcagggggttgaggyggtacaggagattgataataagcaaatagacaaataaatatgtaactcaggacatgacaaatactgtgagaaacaaggcaggatgaggagctggtgagagacaggtggagagattggttgggaaggtgggaaagtatgtcagctaaggggacctccactgggggtaagcctcggccatgtctccatttcatcaagtgccagaactacaggatgtatcctctctgcagaaatctgtgctttcagtctgccttatttcacttttcctgtatctgcctatactttttttttctttttactctaaaaactgatcttctaacctcagaatcaacagagcagtgcagttttctaagaaaacagcttaactaaagccaatgggcctaaaattaatgcctttaaaatcaattttcataaaaccaacttgctcatggtctatttgccataag

SEQ ID NO: 561192 - DNA, 623 bp, Homo sapiens
ttgtattaataatttaataataattttaatgcctaagtatcctgacaaataaggaaaagccctgcagaagacaagagtaattaaagactttacattcctgcacatgtgtgtgcatgtatgtgtgcacaagtgtgcgtgtgtgcatgtgtgtgtgtgtgtgtgtctgcagggggttgaggtggtacaggagattgataataagcaaatagacaaataaatatgtaactcaggacatgacaaatactgtgagaaacaaggcaggatgaggagctggtgagagacaggtggagagattggttgggaaggtgggaaagtatgtcagctaaggggacctccactgggggtaagcctcggccatgtctccatttcatcaagtgccagaactacaggatgtatcctctctgcagaaatytgtgctttcagtctgccttatttcacttttcctgtatctgcctatactttttttttctttttactctaaaaactgatcttctaacctcagaatcaacagagcagtgcagttttctaagaaaacagcttaactaaagccaatgggcctaaaattaatgcctttaaaatcaattttcataaaaccaacttgctcatggtctatttgccataag

SEQ ID NO: 561193 - DNA, 567 bp, Homo sapiens
tatctaacacaagtaaaccgaggctccaatgaaggtaaatgacttgcccaatgtataactcaggtgcactgtcctcctcttgcctaccgcctgagtccattcaggctgctataacaaaaataccttagactgggtgacttaaacagcaaacatttatatctcgcagttcaggagactgggaagwctgagatcaagttgcttgtagattcggtatgtagtgagggcctgcttcctggttcacagacagctgtcttctcgctgtgtcctcatagggtagaaaagggtgaaagggctctctggggtcttgcttataaaggcattaaatttattcgggagggctccaccctcctgagctaattatctcccaaaggctccatacttcctaataccaccactctgagggctaagatttcaacctatgaattttgggaggaactacggaaggcaatcatctatcaatcttaccttacatattgaaagaggcatttttctctccctctccctctccccacagtctccctctccctctctttccacggtatccctctgatgccgagccaaagctgg

SEQ ID NO: 561194 - DNA, 442 bp, Homo sapiens
actgaagttgctttgttaattttgactgcttcaccagaatataagttttagaaaacagggatattgtttatttgttcattatttatatcatttagaacaatctttgacacataaatagacaataaatgattaatggagaaatgtgatagatagatagataratagatagatagatagatagatagaatatgcaaactgaacctaagaaataaccagaattaggtaggtctattttgacaaaaaattcctagaacacagaatttgagcagattaaagaaagaatactatagaaacaagaaataaaattggaatatagaatcataaaattcagtagtgatataggcaggctgaacttaagttagatggtcactaaggagaccaaagacattattgtgcatatcatcattttcatctttttctgaaaattttctttttctaagcc

SEQ ID NO: 561195 - DNA, 580 bp, Homo sapiens
ctcttttttggttccatatgaactttaaagtagttttttccagttctgtgaagaaagtcattggtagcttgatggggatggcattgaatctataaattaccttgggcagtatggccattttcatgagggacccagcctccgacagtccattctgggtgttggcagagaatcctcagctatcctgttgcaaaactctccttccttttctatcctcggtctcatactctttctctgtgtgaaatgtgcagggatttgtagagcctagaaaagtaatcctgttaggcaagatcaggaaaatgtcgttgcaatcttctaggaacagagttcttccctttcctctgtggtgaggtttcttgctaccacaccgctggtgagcacacaatatttctaagccaacaccaccacctagtggaaatagacatcctctacatgaggcacatttttttttcacagcaataccgcagcttccttttgcaccattagaaatcagactcggccggrcgtggtggttcatgcctgtaatccagcactttgggaggctgaggcgggtggatcatgaggtcaggagatcgagaccatc

SEQ ID NO: 561196 - DNA, 598 bp, Homo sapiens
tgccatctacaaacagaaatttttacttctttcttcccaatttggatgccttttattgctttttcttgtctaattgctttggactggagttccaatactctgttgaatagaagtgtccagaacagacatttttgccttgttcttaatcttagaggaaaagcttccagtttttcactgagtatgccgttagctgtggacttttcctaaacaacctttattatgtgcrggtaatttccttctctttccacttttgagtgttttttttcttttcttttctttttttgtgtgtgaaaggatattgaattttgccaaatgcttttcctgcatcagtggagatggtcatgtgggttttgtcctttattctgtaaatgtggtgtactacattgattttcatatgttgaaccatccttgcatcccagggataaatcccacttgatcatggtgaatgatcttttgagtgtgctgttgaatttattttgctagtatttttttgactacgttcatcagacatattgggtaattatttattttttcttgtagtatttttgcctagctttgatatcacactaatgctgcccctcaaagaatgaccttggaa

SEQ ID NO: 561197 - DNA, 598 bp, Homo sapiens
tgccatctacaaacagaaatttttacttctttcttcccaatttggatgccttttattgctttttcttgtctaattgctttggactggagttccaatactctgttgaatagaagtgtccagaacagacatttttgccttgttcttaatcttagaggaaaagcttccagtttttcactgagtatgccgttagctgtggacttttcctaaacaacctttattatgtgcaggtaatttccttctctttccacttttgagtgtttyttttcttttcttttctttttttgtgtgtgaaaggatattgaattttgccaaatgcttttcctgcatcagtggagatggtcatgtgggttttgtcctttattctgtaaatgtggtgtactacattgattttcatatgttgaaccatccttgcatcccagggataaatcccacttgatcatggtgaatgatcttttgagtgtgctgttgaatttattttgctagtatttttttgactacgttcatcagacatattgggtaattatttattttttcttgtagtatttttgcctagctttgatatcacactaatgctgcccctcaaagaatgaccttggaa

SEQ ID NO: 561198 - DNA, 571 bp, Homo sapiens
taaatatatatatatatatatatatatatatatattttttttttttttttttttttttttttttttttttgcagagacaaggtaggtcttgctatgttgcccaggctggtctcagactcytaggctcaagtgaacctctcacctcagtctcccaaagttctgggattacaggcatgagccaccacgtctggccagtgttaattcttcaatatttggtagaattcttcagtgaagtcttctagtcctgggcttttctttgttgggaggtttttaattaccaactcaatttccttactagttattggtctatttatatcttctatttcttcatgattcagtcttggcaggtttggtgtttctagaaatttatccatttcttataggtcatccagtttgttggtatagttcatagtcttctcttataatcctttcttatctgtagctcagtacctcctatctggagatgcagaattaggaattgaaactataataggccccccttttataatggggtgtccttatttttaccttctcaccttgcaatacccttgtcttgctagtaaagaaagaa

SEQ ID NO: 561199 - DNA, 571 bp, Homo sapiens
taaatatatatatatatatatatatatatatatattttttttttttttttttttttttttttttttttttgcagagacaaggtaggtcttgctatgttgcccaggctggtctcagactcctaggctcaagtgaacctctcacctcagtctcccaaagttctgggattacaggcatgagccaccacgtctggccagtgttaattcttcaatatttggtagaattcttcagtgaagtcttctagtcctgggcttttctttgttgggaggtttttaattaccaactcaatttcyttactagttattggtctatttatatcttctatttcttcatgattcagtcttggcaggtttggtgtttctagaaatttatccatttcttataggtcatccagtttgttggtatagttcatagtcttctcttataatcctttcttatctgtagctcagtacctcctatctggagatgcagaattaggaattgaaactataataggccccccttttataatggggtgtccttatttttaccttctcaccttgcaatacccttgtcttgctagtaaagaaagaa

SEQ ID NO: 561200 - DNA, 561 bp, Homo sapiens
cacgttataacttttatataactcttaagatctttaatttgtatggtatgcattggtacttaagttaaagtattaaagagagaagtcaaaatatttaatagtttataaacaacacaccgataagaaaaaagctacctgaaatatcacagccagacacaaaacgtatatcagaaaatgtacactaagaaaagtaaataagctttataatatttgsattaagatttttttttccaatgatcaagtaaaattataaaaagattttcagctgtgcacggtggctcaggcctgtaatcccagcactttgggaggccgaggtgggtggatcgcgaggtcaggagatcgagaccatcctggttaacacggtgaaaccccgtctctactaaaaatacaaaaaattagccgggcagggtggcaggcacctgtagtcccagctacttgggagtctgaggcaggagaatggtgtgaacccaggaggcagaaattgcagtgagccgagattgcaccactgcactccagcctgggcgacagagctagactccgtctcaaaaaaaaaaaaaaaaa

SEQ ID NO: 561201 - DNA, 564 bp, Homo sapiens
atctcatttgtccatttttgttttgattgtgttatgcttgtggggttttactcaagaagtctttgcccccagaccaacgtcctggagagtttccccaatgttgtttttaatagtttcacagtttgatgtcttagatgtaagtctttaatccattttgatttgattgttttatatgatgagagacaggggtctagtttcactcttctgcatatggatatccagttttcctagcaccatttattgaagtgaccgttcttcctgcaatgtacattcttgacacctttgttgacaatgagttcactgtagatgtatggacttgtttatgggttctccattctgttccattggtctaggtgtctgtttttatggcactaccaaactgttttggtcactattggcttcgtagtataatttgaagttaggtaatgtgattcctcaggttttgttctttttgytcaggatacctttggttattctgcaacttttgtgtttccatataaattttaggattttttttctatttctgtgaaaaatgccattgataatttgataaggactgtattg

SEQ ID NO: 561202 - DNA, 476 bp, Homo sapiens
ggtgaagaaaatggaagacttttacactgttggtgggagtgtaaattagttcagccattacagaagacagtgtggctgttcctgaaaacctagagacagaaataccatttgacacagcaataccattacattatttacccagaggaaaataaattattctgttayaaaggcatgggctgggcatagtagctcatgcctgtaatctcagcactttgagaggccaaggtgggtggatcacttgaggtcagcagtttgagaccaacctggccaacatggtaaaaccccctctctactaaaaatacaaaaattagccagacgtggtggcaggtgcctttaatctcaggtactcaagagtctcagaagggagaatctcttcaacccaggaggtggaggttgccgtgagctgagattgtgccactgcatcccagcttaggtagcagaatgagactctgtctcaaaaaaaaaaaaatgtacat

SEQ ID NO: 561203 - DNA, 669 bp, Homo sapiens
ggctagaaagggaactggaacctaaagtggtggtgtttgtcccagatgacagtgctcctgctctgtcacagcccaggagggttggggagtcagcatgatgagggatgtcccgctaccagatatgaactcagccttccttatttcagtggtaagtttctcagggtctcctttgctcttgaattccagtagcccacagtgaaaacgaaataatgagatatttattggattttctcctttctctttctttctcccatccctcacttatgcatcctaaaatcacctccaaataagctaccaacaggataattcttgcttcaggggaactgaaattaaaatatacgctttcaggatctatgagttaggtggtcctgggagcagtgagtcaaaaccaggaatataatattatcacttaacgactggacttacctacaggtcttaagtgacgtgaacgccrtgaggaaggatcaagtcactggaagaatcccagtgaggcagctattcctcttgtgttagattaaagatgactttccagcttaaataaaacatgaagtaacctctaagtagattagaaaatgaaagaatataaatgcctccagttttccaggaaatgctgcagtatagtcagaatgacaaggcaagctctgacattagccctggtcccttcccgca

SEQ ID NO: 561204 - DNA, 611 bp, Homo sapiens
aaagtcagcctttggaagaataactatatagaacacttccagaggccaaactagtgacaatggatcaaaagaattaaaatattgcatatctggaaattacacagctagaaatatgtagaaaagaaacacaaacatgcggtaagatacagctatggagctgtttgtcgaaattttgttaaaacagtgaaaatctgtaaactgtattaatgtccaacaataaaaaatatttaatgagaggcaaagatgctttgattggttataaagataaagaagttacaatactatgtacagtatgatcctttttttaaagggaggcacatatagaaagaactggaaggatatactgtaagaatttcacgatgtttgtttctgggtagtaggatttgacaattataagatctctgttttcccttcactccccccttttggattatctgtattttttataactctgtccaatagacatataatgtgagacacataattttaaatgttctagtggccacatttaaaaagtagaaagaaayagataaaataatcttcttaagatatttcattttactcaatatatccattactatgtgtaatcgatataaaaatattaatatttt

SEQ ID NO: 561205 - DNA, 314 bp, Homo sapiens
cctgcccaacatggagaaaccccatctctactaaaawacaaaaattagtcgggcatggtggcacacgcctgtagtcctagctactcaggaggctgaggcaagagaatcacttgaaccaggaggcggagactgcagtgagccaagattgcaccactgcactccagcctgggcaacagagagagactctgcctcagaaaaaaaaaaaaaagaaagaaagaataaggaaaaaaaaaaaaaagaaactctaaccctactccagtgttcatctatattttcttccaaaggttttaattttttacttatcacatttaggc

SEQ ID NO: 561206 - DNA, 314 bp, Homo sapiens
cctgcccaacatggagaaaccccatctctactaaaatacaaaaattagtcgggcatggtggcacacgcctgtagtcctagctactcaggaggctgaggcaagagaatcacttgaaccaggaggcggagactgcagtgagccaagattgcaccmctgcactccagcctgggcaacagagagagactctgcctcagaaaaaaaaaaaaaagaaagaaagaataaggaaaaaaaaaaaaaagaaactctaaccctactccagtgttcatctatattttcttccaaaggttttaattttttacttatcacatttaggc

SEQ ID NO: 561207 - DNA, 578 bp, Homo sapiens
  misc_feature 549, 550, 551, 555, 557, 563, 564, 569, 573, 575: n = A,T,C or G
aaaagagaaacaatggattgtccaatatacaaagctggaaccactacacaagcaattgaaagaaaaatataatagtccataactcatrcctggaaaattaaaacttgatcaaatatttaatttttttaaaaaagtaagccataacaattctagaagaaaacattggaaaatgtctttatcatcttggagggtcaaagatctttctaattatggttcaaaactaagatgtcattaaagattgatacatttgatgaaataaacatttttaaaaatttttgcaagcctctctcagaaaagaaaaggaaagggaaaaatacaacaattatctatgggagtagataagaaaaagcccagccgttcaatagaaaaatagacatgggaaatataactgacttttattgaaagtacattgagctgctgttttttatctataagattggcaagaatccaaaagttgtctaaatacattctgttgtcaagggtactgtaataggcatccctcattcattattagtataacaataaaatgcacaatgcttatagagggtnnnttgncnattttnnttgtnattncnaat

SEQ ID NO: 561208 - DNA, 578 bp, Homo sapiens
  misc_feature 549, 550, 551, 555, 557, 563, 564, 569, 573, 575: n = A,T,C or G
aaaagagaaacaatggattgtccaatatacaaagctggaaccactacacaagcaattgaaagaaaaatataatagtccataactcatacctggaaaattaaaacttgatcaaatatttaattttttwaaaaaagtaagccataacaattctagaagaaaacattggaaaatgtctttatcatcttggagggtcaaagatctttctaattatggttcaaaactaagatgtcattaaagattgatacatttgatgaaataaacatttttaaaaatttttgcaagcctctctcagaaaagaaaaggaaagggaaaaatacaacaattatctatgggagtagataagaaaaagcccagccgttcaatagaaaaatagacatgggaaatataactgacttttattgaaagtacattgagctgctgttttttatctataagattggcaagaatccaaaagttgtctaaatacattctgttgtcaagggtactgtaataggcatccctcattcattattagtataacaataaaatgcacaatgcttatagagggtnnnttgncnattttnnttgtnattncnaat

SEQ ID NO: 561209 - DNA, 576 bp, Homo sapiens
tgtagaacccccatccccatgtccatagttattttcaatgtttgtcctagaattgaatggtggatccatttttcccaataatctgggatttgtcaaaagtgttgatgtgggtccggggcttctcccatcagaggtcggcctatttcccctcaccttgccgctgggctggcctagaacttctttggccaataaagtagagtggaagtgacactatgccagttctgggtatagcctttaagaggactggcaatttctttttgtttttcttcaagccttgagcctccatgtaagaagtctrgctaatcagctcaagagaccatgtggagaggccctgaaaccacatggaaaggggaatgggtctggtggacccagccttccaaccataccaccaaggtgccagagatgtgggtgaaccatcttgtctcctacagaccagccagttgccagctgaacatcactgagggattccagccaatggtgaaatgaaggcgtctctcacctgaactcatccagggctaatggaatacaacagagaatggggttggaaaatactagctcaccgctacgtcaaatagc

SEQ ID NO: 561210 - DNA, 554 bp, Homo sapiens
tgtcactgcactccagcctgggcaacagagtgagaccctgtctcaacaacaacaataacaaaatgggtatgtgaaaacttttccygataatgaatctctgcagaccttatgatcaaaaacacaagctaccacttgacaggatgaggtgtgagcataacataccagaaagattttagcatacatgccacagttcagaaatccaatgtgttttgtgaaatgaagtcacaactgggactcatatcccagtaatgctgccatttctcaaaatatctttagaattcctccaatctcctcactttattttaacatctgatattgataaagatatatcacatcgtcatcaggcttggctctggatagagtcctaccatttcaaaaaaaaaaaaaatagatctctcttttttttttttttttgagacgggtttcattcttgttgcccaggctgcagtgcaatggtgcgatctcggctcactgcaaccttcgcctcctgagttcaagcgagtctcctgcctcagcctcctgagtagctgggattacaggcatgtgccaccaca

SEQ ID NO: 561211 - DNA, 554 bp, Homo sapiens
tgtcactgcactccagcctgggcaacagagtgagaccctgtctcaacaacaacaataacaaaatgggtatgtgaaaacttttcccgataatgaatctctgcagaccttatgatcaaaaacacaagctaccacttgacaggatgaggtgtgagcataacataccagaaagattttagcatacatgccacagttcagaaatccaatgtgttttgtgaaatgaagtcacaactgggactcatatcccagtaatgctgccatttctcaaaatatctttagaattcctccaatctcctcactttattttaacatctgatattgataaagatatatcacatcgtcatcaggcttggctctggatagagtcctaccatttcaaaaaaaaaaaaaatagatctctctyttttttttttttttgagacgggtttcattcttgttgcccaggctgcagtgcaatggtgcgatctcggctcactgcaaccttcgcctcctgagttcaagcgagtctcctgcctcagcctcctgagtagctgggattacaggcatgtgccaccaca

SEQ ID NO: 561212 - DNA, 532 bp, Homo sapiens
agaggaaataatctttatttaataacaatgcttaataagaacacttgacaatagatggctgagaaaaccaagaatcaccaaatatttaaataaaaataaaaaataaagaatatcctatctatgaaatgatataaacactaagaaaatagaattaacagaagaaactaaagaaaatgtcaatagccttggtgtccatacaggaataggaatcacaaaaataaccataaaatatttttaaaaataccttttacragcaatactccagaatgtcagaaattaaaaatatcattagcaaaataaaatgtagtaaacagaataaataatataaaagataaaactgatgtctaaagattaccccagaatctgaactgcatgagggggaataataattacattactggatatgagaacaactatttaatagacacatctacttggatgacaatgcttttttttaaatgtcaaatttccagtttattaattttaatacatttctgatcaaaattactcatttctttttgtgcccttattt

SEQ ID NO: 561213 - DNA, 442 bp, Homo sapiens
tcttgtcgattctggatattagtacttagttggatgcatagtttgcaaatattttctcacattcttcaggttatctgttttctcagttatttcttttgctgtgcagaaactttyttgtttaattaagtcccattgtctactttgtttttgctaaatttgcttttgaggtcttagtcacaaattttttgccaaggccaatgtctagaagagtttttccaggtattctatgagtacttttatatcttcaggtattatatttaattctttaattcatcctgagttaattttgtggatggcaacagataggggcccagttttattcctctgcatgtggctttccaattttccctgcactatttattgaaggggatatccttttcccagtgtatgtttttttcaatgttgtcaaacatccattgactgtaggtaggtccctttataa

SEQ ID NO: 561214 - DNA, 368 bp, Homo sapiens
tgggcttcttcagcatttttacttttctaacgaagacatcatggagaggataaatagattggcaagccttttctatgtcttttccaatgctgtctggaatcaatttattgaccacttctttcaagtcatttgtctgcacctctcggrtcatgatttccatcatcttcttccggatttggcggacctgttggtgctgagcataagaggtcttccgtatctgatttttgcgttttttagtaaaaccaacacagaacagacgaagcaagtaaccatcggtagtcttgacatcaacgtgagcttcaatcattgtctgccattttttgaccatggaacacattttgtcacgggtaagatccatgccatggaag

SEQ ID NO: 561215 - DNA, 368 bp, Homo sapiens
tgggcttcttcagcatttttacttttctaacgaagacatcatggagaggataaatagattggcaagccttttctatgtcttttccaatgctgtctggaatcaatttattgaccacttctttcaagtcatttgtctgcacctctcggatcatgatttccatcatcttcttccggatttggcggacctgttggtgctgagcataagaggtcttccgtatctgattkttgcgttttttagtaaaaccaacacagaacagacgaagcaagtaaccatcggtagtcttgacatcaacgtgagcttcaatcattgtctgccattttttgaccatggaacacattttgtcacgggtaagatccatgccatggaag

SEQ ID NO: 561216 - DNA, 620 bp, Homo sapiens
gattttggctaactgagcctttattgtatgcattttacaaagcataatggtagttggcaaaactccatgatctttcattcaataatcttgaatttctacttgccaaatgccatgtaacacatgaattaggtctttaatctcaaggggtttataaactagttgatcccagctggcaaacataaaatatgaatgctgccacttctgcttcttgtgctcatcacaggcaatgctaattgatcacagacctcttgatgcatttagacctggcctcagaatctttcttatcagaaagcttccagttactaccagtaattaaaagttgcttacttgtttaaacctatttgctgcctctgtgctatatgaacgcttactcactcagcataygtggagaaaacatagtggtgtttccaataatgccacaacaaagggccatactgaaatgagtacaaatccacttcaattcactcctttagtgcttccatgcatataaattatattatatggcagagaaacttcatttgttaaatacttgaagctccgttttcatcagctctatatacggtttggaaataacacaaatttaaaaatctaaatatcactaatagatgttaactatatag

SEQ ID NO: 561217 - DNA, 563 bp, Homo sapiens
gattgtttgtcacttgccaagggcacatgtcaacatcgactattatgttacatcaaatttctgatgactggtcttaaataaaatgcttgtgtattacttttactgtaaaactcactgcatataatttgcaatgtttggaaaagtatcagaacctaataatgatctcctacratcttaacagccagggacaatcctattaacttttaagtgtgtttacttcttatgcacctggaagagttcctggcacattatagatactcaataaacgtgttggacaaatataaaaagtgagatcgggctatgtttgccatctattaagttttgcatcctatttttcttcctaactgtcgtccaggctggagtgcagtggcacagtcttggctcactgcaccctctgtctcccgggttcaagcaattctcctgcctcagcctcctgagtagctgggattacaggcgtgcaccacctcacccggctaattttcgtattgttagcagagacagagttttgccatgttggccaggctggtctcaaactcctgacctcaagtgatctgccccccttg

SEQ ID NO: 561218 - DNA, 549 bp, Homo sapiens
tcctcaagctggcacactgtgcaatgtaaattctcaataatataatcaacgtttagtgtgcaataacagaaaagagcattctttgacaaaagctaagaatccagatatctgagcctcgtctcttgcatgctgaagaacagacaatattacaggtcactttctataactcagagaagatgtccgggtgtgctrtaatgccaccctgtaatgtcagtcatcccaagcgcccgtccctgtgcctcgcctgcccctgagaggtgcctccccacctggcacagggcccctcggccgggcccggccaatcttagcttctcgtctttgtgtctctgctcctccttcccttgtacctaaaagtggaggttggtggtaacagacaaaattgtcactgttcctctgcaatgcaacattttattagctgttttaaagaaaaattacaacataaaaagggctgggcgcagtggcttacgcctgtaatcccagcactttgggaggccgaggtgggtggatgacttgaggtcaggatttcgagaccagcctggccaacatggt

SEQ ID NO: 561219 - DNA, 649 bp, Homo sapiens
cattcagtccctgctctcaaaaggcaggagtatttgcctttttctaaaattagcagattccatttcccatctcagtgctcttcacatgtctcctgtttcatgggaacttgtcccaaaatgccctcaacaaagttacaaatgtcatttttcttcagacagaagtagagctgaaataattacttgcggaaactataatagaatagtttcagaaagasagaatgaggaaattacttacaaaaataaaacacattccaaatgtttgtaaactacgtcaaaaacaaagagcaaagaaacaatatgggggggtgcatgatgaagtgggggcatgaggaagagcagggggaggagagctgagcagggtaggggtggcacagcctgagtgtgagcaaatgggaccccgagatgctggagaaaacagaggagaggcagcaaagagcctctacatcccaggtgtcaaaaggctgtcaaaaggctagtgagaggtgcctgtatcgtcaccgggggaaatgagccctcatcaatggcagcattgaaacctgagtctccaaggatgacctgtctggtgtctctgcatcagtgcctccatctgcaacctcagggcatcagtttcctggccagctgggttatttttgccttattagttatttgt

SEQ ID NO: 561220 - DNA, 615 bp, Homo sapiens
aaaaatataactactccaaatttgtataaaatatataatatggtatcaaaaatcatgaatcaaaaattgataaacatataagaaaaatagataaatttatgagcatagtggaagttttctaacactctttaaagatttttttttcaacaaagaggcaagagttcagcatagaaatagaaaagttgaacaatacaatttacacccttgacctaatggttatatacagaacacagcatcaatatctgctgaatacatgttccttttaaaacacaggaaagtttatgaaattgactcctgagccatcaagtttcaaaggattgaaatcacatagtatatattctctggctatcttgcaattcagckagaagtaaaaaccaagaagataactataaaatccccgtatgtttggaaattttaaaaaatatgtgtctaaaacaactatattggttaaacaggaaatcataatgaaaagtagaaaatattttggactaagtgataataaaaatattacatatttttaaattgtaaaatatcgccaaagcagtactaagaggaaatttatactcttacaagcaaatattagagaaaaaaaattggtgaacactgagctaaata

SEQ ID NO: 561221 - DNA, 347 bp, Homo sapiens
gggaaccagtgacagacagccccaagaggtcaagcaagataaaggctaaaacgggcacattgtatttagtgaacgttaaaaggcagcaatggcttggccctcaagtttcttacaattcacatggaaatgtytgggagcctggcataacaaatacatgggaagacttaatagaagcatatgaacatgtaaattttgctgttagcatgtgtacacataagaattaaaataatctggccaggcacagtgactcacgcctgtaatcccagcactttgggaggccacggcagatggatcacctgagttcaggagttcgagaccagcctggccaacatggtgaaaccctgtct

SEQ ID NO: 561222 - DNA, 556 bp, Homo sapiens
gcttgtgcatgcatcatgtagttcttgtgccatggttttcagctccatcaggtcattaaggacctctctacactgttattctagttagccattcgtctactcctttttcaaggtttttagcttttttgcggtgcgtttgaacatcctcctttatctcggagaagtttgttattaccgatcatctgaagccttcgtcactcgacttgtcaaagtcattctccgtccagctttgttccattgctggcaaggagctgcattcctttggaggagaaaaggcactctgatttttrgaattttcagcttttctgctctggtttctccccatctttgtggttttatcttcctttggtctttgatgatggtgatgtacaggtggggttttggtgtggatgtcctttctgcttgttagttttccttctaacagtcaggaccctcagctgcaggtctgttggaatttgctgtaggtccactccagaccctgcttgcctgggtattaccagcggaggctgcagaacagcaaatgttgctgcctaatccttcctctggaagcttcgtc

SEQ ID NO: 561223 - DNA, 556 bp, Homo sapiens
gcttgtgcatgcatcatgtagttcttgtgccatggttttcagctccatcaggtcattaaggacctctctacactgttattctagttagccattcgtctactcctttttcaaggtttttagcttttttgcggtgcgtttgaacatcctcctttatctcggagaagtttgttattaccgatcatctgaagccttcgtcactcgacttgtcaaagtcattctccgtccagctttgttccattgctggcaaggagctgcattcctttggaggagaaaaggcrctctgatttttagaattttcagcttttctgctctggtttctccccatctttgtggttttatcttcctttggtctttgatgatggtgatgtacaggtggggttttggtgtggatgtcctttctgcttgttagttttccttctaacagtcaggaccctcagctgcaggtctgttggaatttgctgtaggtccactccagaccctgcttgcctgggtattaccagcggaggctgcagaacagcaaatgttgctgcctaatccttcctctggaagcttcgtc

SEQ ID NO: 561224 - DNA, 556 bp, Homo sapiens
gcttgtgcatgcatcatgtagttcttgtgccatggttttcagctccatcaggtcattaaggacctctctacactgttattctagttagccattcgtctactcctttttcaaggtttttagcttttttgcggtgcgtttgaacatcctcctttatctcggagaagtttgttattaccgatcatctgaagccttcktcactcgacttgtcaaagtcattctccgtccagctttgttccattgctggcaaggagctgcattcctttggaggagaaaaggcactctgatttttagaattttcagcttttctgctctggtttctccccatctttgtggttttatcttcctttggtctttgatgatggtgatgtacaggtggggttttggtgtggatgtcctttctgcttgttagttttccttctaacagtcaggaccctcagctgcaggtctgttggaatttgctgtaggtccactccagaccctgcttgcctgggtattaccagcggaggctgcagaacagcaaatgttgctgcctaatccttcctctggaagcttcgtc

SEQ ID NO: 561225 - DNA, 535 bp, Homo sapiens
gtgggtgcagcgcaccagcatggcacatgtatacatatgtaactaacctgcacaatgtgcacatgtaccctaaaacttaaagtataataaaaagaaaaatagttaccaaaggtaaaaaaaaaaaaaaaaagaaaaacatatgatttgtcacctgatcttttgttcagattatttaagcaataactaaataatgtcctagactgcactgaattaggtatacattgaaaatcctagcaacatattccacgaaaacaattcttgttcagatgagggaagccttagcatggaatataaaatccaagatttattctagtctgatgtctagctagatgagaaattgaagattacagattgtaaatgacttattcaaggtcacacaatttgtgagcacagccaagaatagaaactctgttctcctaactcccagcgcagggatccttaaactgwatcacactcaatataatcatttctccccctaatacgactgccagagcttgatagattattagataggtgggagtaagtaatttactgt

SEQ ID NO: 561226 - DNA, 418 bp, Homo sapiens
gatgcaatctgactcaggcggcaagcaagccagggaaaggacattcttgcctcatccccacccccagtttattccatttttcttggagctggtaccagttgggtcaacccagtcagttctcccaacctaggaaaaaggaaagaccagaatgggtgaatttaaattggagagatgtcactgaacctcttcccacctcaaacctttgccctggatggggagggaacctaacatttaattttgtactctactggctgttctgcatatattatatcattaaatcttcacaattaccctataggtagactatattataaccacttgattggtaagaaaattgagactcagagagtctcaattgtccacaagccaagaagatagcagaactgggattycaactcaggtccctaggatccaggac

SEQ ID NO: 561227 - DNA, 580 bp, Homo sapiens
gggaggacgaggtaggcaaatcatgaggtcaagagatcgagaccatcctggccaacatggtgaaaccctgtctctactaaaaatacaaaaattagctgagcatggtggtgcatgcctgtagtctcagctgcttgggaggctgaggcaggaaaatcacttgaaccatggaggcagaggttgcagtgtgccaagatcatgccattgcactccagcctgggtgacagagcgagactccgtctcaaaaaaaaaaaaaawtttaagttcctggatagaccaggctgtgacttcagtgcctcgtctctgccacagagaactcactcaggaaatattgaacgaacgggtgaatgagtgagtgaatgagttgatgaatgagtgagtgaatgaatgaatgagagagtgacgcatgaatgagtgaatggatgagtgagcaaatggatgaatgagtgtatgatggatgaatgagcaaatgaatgaatgagtgactgagtgataaatgaataagtgaatgggtgaataagtgagtgaatggatgaattaatgaatggatgggtgaatgaccgaatgggtgaatgagcgaatg

SEQ ID NO: 561228 - DNA, 580 bp, Homo sapiens
gggaggacgaggtaggcaaatcatgaggtcaagagatcgagaccatcctggccaacatggtgaaaccctgtctctactaaaaatacaaaaattagctgagcatggtggtgcatgcctgtagtctcagctgcttgggaggctgaggcaggaaaatcacttgaaccatggaggcagaggttgcagtgtgccaagatcatgccattgcactccagcctgggtgacagagcgagactccgtctcaaaaaaaaaaaaaattttaagttcctggatagaccaggctgtgacttcagtgcctcgtctctgccacagagaactcactcaggaaatattgaaygaacgggtgaatgagtgagtgaatgagttgatgaatgagtgagtgaatgaatgaatgagagagtgacgcatgaatgagtgaatggatgagtgagcaaatggatgaatgagtgtatgatggatgaatgagcaaatgaatgaatgagtgactgagtgataaatgaataagtgaatgggtgaataagtgagtgaatggatgaattaatgaatggatgggtgaatgaccgaatgggtgaatgagcgaatg

SEQ ID NO: 561229 - DNA, 616 bp, Homo sapiens
gcaaattgatgcttagcagaagcccacactagatcttctgtgttcattttgtgattttattacaaatagcatccatactttatcctcaaatactttcctttaaatgctttatttcaaatgtactttgcttttttaaaaaaagaacatttttttctgattataaaaatacttgcttattgcagagaattggaaaattatacaaagtactaagactaaaataaaattacccattatctcattattaaaaaacaaaaccgaaagtcttattatatttttcaggttccctgtcccctcccgcaacacacacacacacacacacacacacacacacacacacacacaccccttctctgtctctgtcaaacacacattgacacagtatttttttttaaactgtgtgagaacttttccttgtcattaagcagacttcaaaaaccagttttgtaagtaaacaaacaaacaaamaaaaaaaacaattttgatggcttatgtaacattctattccactgtttggctataccacgatttatttaaccatttgcttatttacattttattgtattacaagtaataatagaatgtatgtctgtgtatcggtaggtatgagcgtgtgtta

SEQ ID NO: 561230 - DNA, 515 bp, Homo sapiens
ctagcctggtattaggattctcatgacttggagacaacttccattctcactgtcccatctctcacacagactgtgctccaagtataggagagggccaaccccattgtgcatttgcaagtctctgtgtctccaaacatgctgccccctctgcctgctgcctggaatacactctcctctctctcccatctgtgcttattgaaagctccatcttagwgacctacaccatatctctgtgatagcacttatcctgttctgacttgactttttagctttctgtagcctctgtctggatcctgccctagatagtaaagtcccagagagcagagactatatctcaattgaattcttgcccccttacagggttttaacacatggtgggtgcctgtacatgttttccaaattagattctatttttagcactctagtcaccccatattccagacaaacaacgcacacccctggtgggatcaacatgcaaaccacgcagatcacagcatcctgtgcatttaaagata

SEQ ID NO: 561231 - DNA, 388 bp, Homo sapiens
tttacacacacacacacacacacacacacacacacacacacacacaactttgyatttggatttaaatgttcaggactccattgttgccagatttcctgtctcaagactatcaattcatttgaataatcagcaaaatcatcagcctcctttcagcctctaaactggatttaaaagattgacgtttcttaaaactcaaatcgagtcgggctgcaactgcatgcccagagggacctgaatcatacacacactggataatgaaatacacttagattttattagtgggtaattcatgctcagaatcttggaacaataatataattaaataaacaactgggagaaggaaccagataagtcaggaggtaaaattatttagctaaagttagaatgg

SEQ ID NO: 561232 - DNA, 469 bp, Homo sapiens
atgaagcccttcttccttgttgcagctcacaaataagtgtgccctttctcaaaacacgtatgaaacacctcctgcttgtatacctttagcagtagttcctcatattgcctggcatttaaacatttttgtatgcgtacatcttgctttcctacttaaagcaagagcaggaccacatctttttgtatgctctggcacatgactgttggaccactttgatattgctgaattatatagactccttttaaaataatttgaaatataattttggagtatagacatcttgtccagtgcactagacaggtgacctttggctttgttcattaagcatttagtgtcttagaagtgatatgtttactgcagaaaaatttggatagcrtgcaaaaaatgaaacatactatcacaatcctatgatataacttaaaaatttctttatagcttcatggaggtatttgatgaaaattgtatatat

SEQ ID NO: 561233 - DNA, 401 bp, Homo sapiens
agtttaatgtgtcagttgcattctacttttgtgagctttcattctcataaagtctagttcccgaaccctatcaatgttattcttggctgctctattttctcatgctgctggagctcctcctgctgaatccccccaactggtgctatctgcaggatcactgggcagtcttctggggtgaagctagaagcccctgaatcttgtctttttatactactgggkggaaaccaagcagacacaggggtttgctattgttgtagctgtgagcagatggggccactctcagggccctggatccagaatgcggattgaataactagggctttacttctgcagctgctgggagatcataacacccacctggcttgagtcatgtagcaaaggctgagatggctgaggattca

SEQ ID NO: 561234 - DNA, 401 bp, Homo sapiens
agtttaatgtgtcagttgcattctacttttgtgagctttcattctcataaagtctagttcccgaaccctatcaatgttattcttggctgctctattttctcatgctgctggagctcctcctgctgaatccccccaactggtgctatctgcaggatcactgggcagtcttctggggtgaagctagaagcccctgaatcttgtctttttatactactggggggaaaccaagcagacacaggggtttgctattgttgtagctgtgagcagatggggccactctcagggccctggatccagaatgcrgattgaataactagggctttacttctgcagctgctgggagatcataacacccacctggcttgagtcatgtagcaaaggctgagatggctgaggattca

SEQ ID NO: 561235 - DNA, 659 bp, Homo sapiens
ttacatagttgctaaatctagaaatattatgctaacattttttggatatactgcaggaaaagtacactttagataatataatttttctgctagaaggaattttttgtcatctattcaatacccttcttttacagttgagagaattcactttccagagagtttaggtcacttggtgaaaattaaacagtttgtcaacaagttttccaatgtagtggtttaatgtttaaaatgtaatgagtacttatcacaaatttattctgagtggagtataattstgtaagggacattcatcttggaaagcctctaatggctttgtttatagaggttatcaataaaaatatagttttattttattttattctcttctctgtactacagcatacactatgcatccacaagccattgttaaattcaggaaagagaatggtatacacccaaaattttaaggaagataggtgtcatcacatttgatcatgtcttctcacctatattctgtaaatattttattttttaatttgtaataccagcaagatatatgctctctcctttttagatataatatttattactcaactataaatatgaaactgtatatatacatgacatggttatgctctgtgtcccctcccaaacctcatcttgaattgtaatccccaggt

SEQ ID NO: 561236 - DNA, 659 bp, Homo sapiens
ttacatagttgctaaatctagaaatattatgctaacattttttggatatactgcaggaaaagtacactttagataatataatttttctgctagaaggaattttttgtcatctattcaatacccttcttttacagttgagagaattcactttccagagagtttaggtcacttggtgaaaattaaacagtttgtcaacaagttttccaatgtagtggtttaatgtttaaaatgtaatgagtacttatcacaaatttattctgagtggagtataattctgtragggacattcatcttggaaagcctctaatggctttgtttatagaggttatcaataaaaatatagttttattttattttattctcttctctgtactacagcatacactatgcatccacaagccattgttaaattcaggaaagagaatggtatacacccaaaattttaaggaagataggtgtcatcacatttgatcatgtcttctcacctatattctgtaaatattttattttttaatttgtaataccagcaagatatatgctctctcctttttagatataatatttattactcaactataaatatgaaactgtatatatacatgacatggttatgctctgtgtcccctcccaaacctcatcttgaattgtaatccccaggt

SEQ ID NO: 561237 - DNA, 659 bp, Homo sapiens
ttacatagttgctaaatctagaaatattatgctaacattttttggatatactgcaggaaaagtacactttagataatataatttttctgctagaaggaattttttgtcatctattcaatacccttcttttacagttgagagaattcactttccagagagtttaggtcacttggtgaaaattaaacagtttgtcaacaagttttccaatgtagtggtttaatgtttaaaatgtaatgagtacttatcacaaatttattctgagtggagtataattctgtaagggacattcatcttggaaagcctctaatggctttgtttatagaggttatcaataaaaatatagttttattttattttattctcttctctgtactacagcawacactatgcatccacaagccattgttaaattcaggaaagagaatggtatacacccaaaattttaaggaagataggtgtcatcacatttgatcatgtcttctcacctatattctgtaaatattttattttttaatttgtaataccagcaagatatatgctctctcctttttagatataatatttattactcaactataaatatgaaactgtatatatacatgacatggttatgctctgtgtcccctcccaaacctcatcttgaattgtaatccccaggt

SEQ ID NO: 561238 - DNA, 576 bp, Homo sapiens
tagttaccccaaaatattttctaatttcacttttgatttcttccttgtcccattggttgtttgagagtgtgttatttaatttccatgtatgtggcttttttagtatttttttttgctgttgatttatagtttcactcgattctgattggaagatacacttagtatgatttaaaacttttaaaatttgttagtacttgctttatgacctatcaaataattaatcctgtaaaacattctgtgtatgcttgacaagactgtgtactgtcttgcttttgggtaaaatattctctatatgttcataaggttaatttggtctatattttattcatgtcctctgtttccttgttgaatttttctctatatgttcatcagtttttttataattccaagtttatttttttatttttattttrtattatactttaagttctagggtacatgttcacaacgtgccggtttgttacatatgtatacatgtgccatgttggtgtgctgcacccattaaatcgccatttacattaggtatatctcctaatgctattcctccctactcccctcaccccggtgtatgatgtt

SEQ ID NO: 561239 - DNA, 573 bp, Homo sapiens
acctctcttcttttatgacactgagatacataggaaaacaacaggagaataaattccatttgtggctaatgggatgttcaagatgtctcttttgaagataagaatgttatttatgagatccataaatcagagctcagatctgctcatgtttagggggatgttaacagaaagagttaggtaactcatttaggatacatgcctttcttctcaggtggcccaaggtctaaattctgcataattgttgtacgaaaggcctgttacttcacaaaacaaattcgtatttttcctgttaatcataaaagcaaaagatcctgcacagacacaagcaattcaaagacatagaatgcgagtatggcttyacaggccttagaataaaggagattcattccgtacagtgtcagatccaatgtgtcatgccttcttttaatggctctgttccaaccactccctgtgaagcaaatacaatgatagcccatttataggagctcaccttgcaaaataattgacttttctaattggaatcaaggaagcacttatgatatacatatacatagatatacattgtcttctttc

SEQ ID NO: 561240 - DNA, 573 bp, Homo sapiens
acctctcttcttttatgacactgagatacataggaaaacaacaggagaataaattccatttgtggctaatgggatgttcaagatgtctcttttgaagataagaatgttatttatgagatccataaatcagagctcagatctgctcatgtttagggggatgttaacagaaagagttaggtaactcatttaggatacatgcctttcttctcaggtggcccaaggtctaaattctgcataattgttgtacgaaaggcctgttacttcacaaaacaaattcgtatttttcctgttaatcataaaagcaaaagatcctgcacagacacaagcaattcaaagacatagaatgcgagtatggctttacaggccttagaataaaggagattcattccgtacagtgtcagatcmaatgtgtcatgccttcttttaatggctctgttccaaccactccctgtgaagcaaatacaatgatagcccatttataggagctcaccttgcaaaataattgacttttctaattggaatcaaggaagcacttatgatatacatatacatagatatacattgtcttctttc

SEQ ID NO: 561241 - DNA, 520 bp, Homo sapiens
tgttgcccaggctggtctcaaactccaggactcaagcaatctacctgccttggtctccaaaagtgctgggattacaggtatgagccaccacatctggcttttttttttcctttgtaamaaatatgctgttaaaaactaagacagagcagggtgcagtgactcacacctgtaatcccagttacttgggaggctgaggtggaaggattacttgaggccatttcaagatcagcctggaaaacaagacccccgtctctaaaaaaattttgttttaattagttgggcttagtggcataggcctctactcccagctactcaggaggcaggaggatcccttgagcccaggagtttgcagctgcagtgagctatgatcacgctgctgcactccagcctgggtgacagagagaactgtctcattatctcttgtctgccgccatgtaagacgtggcttttgccttccaccacaattgtgaggcctccccagccaagtggaactgtgagtccattaaacttctttttcttt

SEQ ID NO: 561242 - DNA, 437 bp, Homo sapiens
gaattctgtgaggtctcaatgtttcgttgagtagcccagctcagctagaccacccatctcaaactgccataggaaaaccttcagttctgtgaggtctcsatgtttcgtgagtagcccagctcagatagaccacccatctcaaatccatggctgagcctcctctgaatgagggtgtcatgcctatggtgtcaagttcgggcaaagtgaatgccgtggaagatgatgggtccatcatgtgaacaaatcagatttaaaacaccaagaaaagattgtctaaaactttctactcatacatttgctttctagagctaacacattagactgaggctagagaatttagccaaatcactgggcagctgtttcgtagcctcagcagtatcttattcattccatggctttaaattctcatttaacctctccagcccataaattaaata

SEQ ID NO: 561243 - DNA, 500 bp, Homo sapiens
ctgaggctagagaatttagccaaatcactgggcagctgtttcgtagcctcagcagtatcttattcattccatggctttaaattctcatttaacctctccagcccataaattaaatatcctacctcaacttctttctgaattccagactaacatgtccaacttctgcttcaccatcagaacctgagcgtcatcttggcaccctgctttccctcaccccccacattgagtccagcatcatttcctatgattctaccyctaaaagattccttaaatggtgtgtttgtctccctctccactgccacctctgtacttcagtcacctcactgccctcctggtccctggtgcttcctcccatccagcctctctcctttttcaaagtggcagtgaggccatgtcaccttccagctttaacccttcagtggcttctcacaacaaatggagctctatctgtactagattccaattgctgctataacaaattaccaaaaagtcggggacct

SEQ ID NO: 561244 - DNA, 546 bp, Homo sapiens
acaattgacataggaattacattaaaatattaggaagaaacaaggacaaatttagaccttgaatccgaagagataaagcttacttgactttcaaatggagagatgatgaaaacccactcattcastctttcagaacaaaaagacagtcatctgataagagtatgacatggatgaaatgccctacaggggccttggacatctttaatttctgcgattatgtgaaagaggtggactttacagataatggagcagaagccaacattagtaaaaggaatcccaacttcttcccatagaattagaaacatgtgaaagtacaataaacttcttgttcaaattaccagcatcagagagcttcccatttgcatctagaccttgaatttatatttattgatcaagttctaatttgtatgtatattttgtgcatattcaccaataacagttaaaattaattatgtgttatagttaatatatgcacctaccttcttccgttagtgcatcagtaaatgtgttattttgtcatttttccaaagagagtgttgtaggttt

SEQ ID NO: 561245 - DNA, 548 bp, Homo sapiens
ttcttgatcttaaaaagataaaaataagtaatttcttgagcccaggaaatttgagaccagcctgggcaatgtggcaagaccccttttctacacaaaaacacaaaaattagccaggcatggtagcacatacctgtagccgctgctactcggaggctgaggtgagaggatcgcctgagtctgggaagtygaggttacatttaggtgtaattgcattccagcctgggagacagagtgagatcctgtctcaagaaaaaaagaaaaagaaaggaaaaaaaaaaaagtaaagactcaaagttaccctagggtggggagaatgacaaaaaatcatgatagaaatctgagtggtggctacgcaattatttatacagatagctcacaatataaggaaaaaaccttattttttttaaaagaaatcaaggtaagtagaaaataagacgggaagataggcaaacatagtattatttgtagttgcaaatgggttaaactcagatgttcagatggtgcaaacgaaaaatttaaatcccagctacataaagttagaaacacct

SEQ ID NO: 561246 - DNA, 592 bp, Homo sapiens
ctgtctttggatcttttttttccctgttgtgttgcgttggttttaagtgcctgctggtgtcgtcttccaggggatggggaaatagtttcttataagatgatcacttgggtttaatgttgaggacgacgctgttagtttgcagtaatgaccctacacctctaaggtattaaaaaaatgccttttatttaaattttrttaaaggggcagagttttccctctttttaaccacctgatactggctctaaaggttttcccctgagaactgtgtacagggcaggagtgaggggttggtgatagaggtgatgatttcgtgtgttggtagcactgacgtattcaatgttgaatgtattctatgatattttatgattatcctgttacatgttttcagtataatttagcattacttttcagagacgtaccagttggcaataaaaagccttttctgtatttaacactgtgaccgaatctgctggaaatttttctgtccaaataaatttcctgaaggcatacatcttaaaatctggagagtcaccattatttaaatactttgattttgaagctttgattttcttaccttttccccccttaaatg

SEQ ID NO: 561247 - DNA, 592 bp, Homo sapiens
ctgtctttggatcttttttttccctgttgtgttgcgttggttttaagtgcctgctggtgtcgtcttccaggggatggggaaatagtttcttataagatgatcacttgggtttaatgttgaggacgacgctgttagtttgcagtaatgaccctacacctctaaggtattaaaaaaatgccttttatttaaattttgttaaaggggcagagttttccctctttttaaccacctgatactggctctaaaggttttcccctgagaactgtgtacagggcaggagtgaggggttggtgatagaggtgatgatttcgtgtgttggtagcactgacgtattcaatgttgaatgtattctatgatattttatgattatcctgttacatgttttcagtataatttagcattacttttcagagacgtaccagttggcaataaaaagccttttctgtatttaacactgtgaccgaatctgctgkaaatttttctgtccaaataaatttcctgaaggcatacatcttaaaatctggagagtcaccattatttaaatactttgattttgaagctttgattttcttaccttttccccccttaaatg

SEQ ID NO: 561248 - DNA, 592 bp, Homo sapiens
ctgtctttggatcttttttttccctgttgtgttgcgttggttttaagtgcctgctggtgtcgtcttccaggggatggggaaatagtttcttataagatgatcacttgggtttaatgttgaggacgacgctgttagtttgcagtaatgaccctacacctctaaggtattaaaaaaatgccttttatttaaattttgttaaaggggcagagttttccctctttttaaccacctgatactggctctaaaggttttcccctgagaactgtgtacagggcaggagtgaggggttggtgatagaggtgatgatttcgtgtgttggtagcactgacgtattcaatgttgaatgtattctatgatattttatgattatcctgttacatgttttcagtataatttagcattacttttcagagacgtaccagttggcaataaaaagccttttctgtatttaacactgtgaccgaatctgctggaaatttttctgtcyaaataaatttcctgaaggcatacatcttaaaatctggagagtcaccattatttaaatactttgattttgaagctttgattttcttaccttttccccccttaaatg

SEQ ID NO: 561249 - DNA, 584 bp, Homo sapiens
ctatagagtcagaaaagagagrgaggtgtgtttaattgaagcctctctcaattttttcagaaacatggagggattctcttcagtcccttggtttatggttgataactcagtgtaattgaggggcttggctgcagttctcctcagaccttcccatatccatacatgaaaatgttttctttgccactttcctagaacagtgtctgagtcccatcaaggatcatcagtgggtactgcctgcttgcttatcagaaagggctccctaatttattccccttctgcggaggtgccacaataataaacaatcattttatctccaaatgtctcagtggcctgtaaggctgcctgcttctcgaagctgttaagagcctgaatgagaagtaacataatatccttccatgaaagctccaacacttgagtaaggttctgaaatgtttcaatatacctctcagggctgtcagaaaattttcctagatccctttcatttgcttcaaatcttgtaaagaagggggacttgtactctgaagtaatcatatccactaggcatttcctgtaaaggaggaagtgactccagagcgtgtccatat

SEQ ID NO: 561250 - DNA, 618 bp, Homo sapiens
tgaggcaggagaatcgcttgaacccaggaggtgaaggttgcagtgatctgagatcatgccactgcactccagcccaggtgatacagtgagacaccatstcaaaaaaaaaaaaaaaaaaaaaaaaaagaaagaaaaaagaaaatggaagaagaaaaattgaaaacaactaatatattaatcattttgggctatcatacactgagtggcttaaatagcagaagtttatttctcagagttctggaggttggcaagtccaaaatcagggtgctgatatggtcaggttctggtgagagcctgtttcctggctagcagatacagtcatgtgctgcaatatgatatttcagtcaatgataaaccacatatacaatgatggccccaaagaattataatggagctaaaaaattcctatcatctagtgaattgtagctgtcctaacatcacaatgccttactcatgtgtttgtagtgaagctggtgtaaacaaacctactgcactgctggtcatgtaaaaatatatgacatacaattatgtacagtatatacttgataatgataataaacaattctgttattgatgtatgtatttactatactatactatactctgtattgttatttt

SEQ ID NO: 561251 - DNA, 618 bp, Homo sapiens
tgaggcaggagaatcgcttgaacccaggaggtgaaggttgcagtgatctgagatcatgccactgcactccagcccaggtgatacagtgagacaccatctcaaaaaaaaaaaaaaaaaaaraaaaaagaaagaaaaaagaaaatggaagaagaaaaattgaaaacaactaatatattaatcattttgggctatcatacactgagtggcttaaatagcagaagtttatttctcagagttctggaggttggcaagtccaaaatcagggtgctgatatggtcaggttctggtgagagcctgtttcctggctagcagatacagtcatgtgctgcaatatgatatttcagtcaatgataaaccacatatacaatgatggccccaaagaattataatggagctaaaaaattcctatcatctagtgaattgtagctgtcctaacatcacaatgccttactcatgtgtttgtagtgaagctggtgtaaacaaacctactgcactgctggtcatgtaaaaatatatgacatacaattatgtacagtatatacttgataatgataataaacaattctgttattgatgtatgtatttactatactatactatactctgtattgttatttt

SEQ ID NO: 561252 - DNA, 618 bp, Homo sapiens
tgaggcaggagaatcgcttgaacccaggaggtgaaggttgcagtgatctgagatcatgccactgcactccagcccaggtgatacagtgagacaccatctcaaaaaaaaaaaaaaaaaaaaaaaaaagaaagaaaaaagaaaatggaagaagaaaaattgaaaacaactaatatattaatcattttgggctatcatacactgagtggcttaaatagcagaagtttatttctcagagttctggaggttggcaagtccaaaatcagggtgctgatatggtcaggttctggtgagagcctgtttcctggctagcagatacagtcatgtgctgcaatatgatatttcagtcaatgataaaccacatatacaatgatggccccaaagrattataatggagctaaaaaattcctatcatctagtgaattgtagctgtcctaacatcacaatgccttactcatgtgtttgtagtgaagctggtgtaaacaaacctactgcactgctggtcatgtaaaaatatatgacatacaattatgtacagtatatacttgataatgataataaacaattctgttattgatgtatgtatttactatactatactatactctgtattgttatttt

SEQ ID NO: 561253 - DNA, 303 bp, Homo sapiens
aatgccaagcatcgctgaatcaattgctaaatttcaaaaggcatgccctggcttcagatacattaattttctggaataacaagcagtccattttaatgaacataagatastatttccttcatcttaccactcataactgagcttaatgataaaatgtggggtggctcagaaccactggtgggcttcagtggttttctactcaagaacaatgtcaactacagaatgggggttagatacaaatccacagggtgtgcttgctattatcatgaagagcaaaaaagctcctccaggccccccaccatc

SEQ ID NO: 561254 - DNA, 303 bp, Homo sapiens
aatgccaagcatcgctgaatcaattgctaaatttcaaaaggcatgccctggcttcagatacattaattttctggaataacaagcagtccattttaatgaacataagatactatttccttcatcttaccactcataactgagcttartgataaaatgtggggtggctcagaaccactggtgggcttcagtggttttctactcaagaacaatgtcaactacagaatgggggttagatacaaatccacagggtgtgcttgctattatcatgaagagcaaaaaagctcctccaggccccccaccatc

SEQ ID NO: 561255 - DNA, 303 bp, Homo sapiens
aatgccaagcatcgctgaatcaattgctaaatttcaaaaggcatgccctggcttcagatacattaattttctggaataacaagcagtccattttaatgaacataagatactatttccttcatcttaccactcataactgagcttaatgataaaaygtggggtggctcagaaccactggtgggcttcagtggttttctactcaagaacaatgtcaactacagaatgggggttagatacaaatccacagggtgtgcttgctattatcatgaagagcaaaaaagctcctccaggccccccaccatc

SEQ ID NO: 561256 - DNA, 542 bp, Homo sapiens
taaatgatgaattctcctcatttcccttaagcttttataaaaaatatattttgtaacaaacatactgtacatatcctgagtgtggctgaagacaggtatgagccactgcacctggctcaaaagcaggaacttttactcattactaatgggaatgccaaattgtatagcaactttggaagaatgtttggaagtttcttaccaaactaaacatactctttgatatggttttggctgtgtccccacccaaatctcatcttgaattgtagtttccataatccccacatgttgtgagagggacccagtgagaggtaaytgaatcatggtggtggttacccccatgtttttctcatgatagtgagcgagttctcatgagatctgatggttttataagcagcttttcccctttgcacaacacttctccttcctgctaccatgtgaagaagaacattttgcctctcctttcaccatgattctaagtctcctgaggcttcctagccctgtggaacttggagtcaattaaacctctttcctttataacttac

SEQ ID NO: 561257 - DNA, 542 bp, Homo sapiens
taaatgatgaattctcctcatttcccttaagcttttataaaaaatatattttgtaacaaacatactgtacatatcctgagtgtggctgaagacaggtatgagccactgcacctggctcaaaagcaggaacttttactcattactaatgggaatgccaaattgtatagcaactttggaagaatgtttggaagtttcttaccaaactaaacatactctttgatatggttttggctgtgtccccacccaaatctcatcttgaattgtagtttccataatccccacatgttgtgagagggacccagtgagaggtaactgaatcatggtggtggttacccccatgtttttctcatgatagtgagcgagttctcatgagatctgatggttttataagcagcttttcccctttgcacaacacttctccttcctgctaccatgtgaagaagaacattttgcctctcctttcaccatgattctaagtctcctgaggcttcctagccctgyggaacttggagtcaattaaacctctttcctttataacttac

SEQ ID NO: 561258 - DNA, 645 bp, Homo sapiens
tatttaggtgtgaacacaagtttatatttctgctcatttaagcataatattctaataagttagccaaagaaatcagaaaaagagaagcatagtataataaagattttatgagttaaatgtcatatattaatattcataaccagttttttccatacacaatctagtgaatgccataattttttaaagaaaaacataaaattagaaagctaataatggtgactattgacttattgactgcctaaaacatctacatttggactttttagaagatatattatgattttagtactgaaaatagacttcccatattatatattaccgtgtccagtactctttatttctttctrtaagtcccagtttctatctggtatcattttctctcatcttgaacttccttcaacctttcctgcagtgcagatctgctgataagaaaatgtctctatttcaccttagtttttgaagtacatgttcattggttatgcaattacaggttgatgaagattagaaggtccttcccatcccctagtgatttaaagatgtcatttcattgtcttatattcccccatatgtaacgtatctgtctctctggttgttttttttttattattatactttaagttttagggtacatgtgcacaatgtgca

SEQ ID NO: 561259 - DNA, 645 bp, Homo sapiens
tatttaggtgtgaacacaagtttatatttctgctcatttaagcataatattctaataagttagccaaagaaatcagaaaaagagaagcatagtataataaagattttatgagttaaatgtcatatattaatattcataaccagttttttccatacacaatctagtgaatgccataattttttaaagaaaaacatraaattagaaagctaataatggtgactattgacttattgactgcctaaaacatctacatttggactttttagaagatatattatgattttagtactgaaaatagacttcccatattatatattaccgtgtccagtactctttatttctttctataagtcccagtttctatctggtatcattttctctcatcttgaacttccttcaacctttcctgcagtgcagatctgctgataagaaaatgtctctatttcaccttagtttttgaagtacatgttcattggttatgcaattacaggttgatgaagattagaaggtccttcccatcccctagtgatttaaagatgtcatttcattgtcttatattcccccatatgtaacgtatctgtctctctggttgttttttttttattattatactttaagttttagggtacatgtgcacaatgtgca

SEQ ID NO: 561260 - DNA, 645 bp, Homo sapiens
tatttaggtgtgaacacaagtttatatttctgctcatttaagcataatattctaataagttagccaaagaaatcagaaaaagagaagcatagtataataaagattttatgagttaaatgtcatatattaatattcataaccagttttttccatayacaatctagtgaatgccataattttttaaagaaaaacataaaattagaaagctaataatggtgactattgacttattgactgcctaaaacatctacatttggactttttagaagatatattatgattttagtactgaaaatagacttcccatattatatattaccgtgtccagtactctttatttctttctataagtcccagtttctatctggtatcattttctctcatcttgaacttccttcaacctttcctgcagtgcagatctgctgataagaaaatgtctctatttcaccttagtttttgaagtacatgttcattggttatgcaattacaggttgatgaagattagaaggtccttcccatcccctagtgatttaaagatgtcatttcattgtcttatattcccccatatgtaacgtatctgtctctctggttgttttttttttattattatactttaagttttagggtacatgtgcacaatgtgca

SEQ ID NO: 561261 - DNA, 302 bp, Homo sapiens
gcttcttacaggagtataagagtgtgtcatggcatccaagagcagaaatgcaggaatggcttgctactggaacttttcattttattggaacctgtcatcactgttcctccttgagcttttakggtaggcaaataatgacccccccgtcccccaccacacataaggtgtcctaattcctggaacttgtaaaatgctactttatatagcaaaaggaaccttgcaattaaattaaatatcttgagatggagaatttattttggattatccaggtgagctcagtgtaatcacaagagtccttagaa

SEQ ID NO: 561262 - DNA, 457 bp, Homo sapiens
atattgactagctctcctttgtctacatttctaattaacccctcccagaaggctaatagaattttactaaagcttcacactataaataatggaatccaaggtagcagcaakacaacaaaacaaaaattccagttaagagttcagaagccccacccaaagtcattatcatccatttacagccactacattatttcccttgcatctgaccataaattcacaagaattatgactttcagctaggggatatgaaatgggtgggtgagagctttgcaaataatttaatcacagatgaatagcatatgtatgtttatatatgtatgtatgttaaaaggacatatgacatttatatcttatacacagtaaaatttgtatgtatgtatatatgtgtacaagatatatatgtattttgtacatatataatgtatgtgtgtatgcatgtgtgtatgtgtatacatgt

SEQ ID NO: 561263 - DNA, 457 bp, Homo sapiens
atattgactagctctcctttgtctacatttctaattaacccctcccagaaggctaatagaattttactaaagcttcacactataaataatggaatccaaggtagcagcaatacaacaaaacaaaaattccagttaagagttcagaagccccacccaaagtcattatcatccatttacagccactacattatttcycttgcatctgaccataaattcacaagaattatgactttcagctaggggatatgaaatgggtgggtgagagctttgcaaataatttaatcacagatgaatagcatatgtatgtttatatatgtatgtatgttaaaaggacatatgacatttatatcttatacacagtaaaatttgtatgtatgtatatatgtgtacaagatatatatgtattttgtacatatataatgtatgtgtgtatgcatgtgtgtatgtgtatacatgt

SEQ ID NO: 561264 - DNA, 457 bp, Homo sapiens
atattgactagctctcctttgtctacatttctaattaacccctcccagaaggctaatagaattttactaaagcttcacactataaataatggaatccaaggtagcagcaatacaacaaaacaaaaattccagttaagagttcagaagccccacccaaagtcattatcatccatttacagccactacattatttcccttgcatctgaccataaattcacaagaattatgactttcagctaggggatatgaaatgggtgggtgagagctttgcaaataatttaatcacagatgaatagcatatgtatgtttatatatgtatgtatgttaaaaggacatatgacatttatatcttatacacagtaaaatttgtatgtatgtatatatgtgtacaagatatatatgtattttgtacatatataatgtatgtgtgtrtgcatgtgtgtatgtgtatacatgt

SEQ ID NO: 561265 - DNA, 381 bp, Homo sapiens
ccaaaagagaaaactagaattcaaaagaaaagtgacaggaaatacctaaagcaaggaaggaaaaggaagcaaggcagcctgctcagccaggatcatctgggagccaagagtcttcccaatacagggaaaggggaagtgaagaacccttagtggtacacatttcctcaacaaactcctgcattcctagccatgggagagcctgtcgacccttgcaggtcctgaaactaacaragagctaccaagaaattgtaggataaaactgtcgaaagagtgagctcatattgggtcccacacattccctgagacctaagcagctacagcaagcctccaatttagagctctacccacagcagactgcatactgtctggaagcctagcagc

SEQ ID NO: 561266 - DNA, 381 bp, Homo sapiens
ccaaaagagaaaactagaattcaaaagaaaagtgacaggaaatacctaaagcaaggaaggaaaaggaagcaaggcagcctgctcagccaggatcatctgggagccaagagtcttcccaatacagggaaaggggaagtgaagaacccttagtggtacacatttcctcaacaaactcctgcattcctagccatgggagagcctgtcgacccttgcaggtcctgaaactaacagagagctaccaagaaattgtaggataaaactgtcsaaagagtgagctcatattgggtcccacacattccctgagacctaagcagctacagcaagcctccaatttagagctctacccacagcagactgcatactgtctggaagcctagcagc

SEQ ID NO: 561267 - DNA, 381 bp, Homo sapiens
ccaaaagagaaaactagaattcaaaagaaaagtgacaggaaatacctaaagcaaggaaggaaaaggaagcaaggcagcctgctcagccaggatcatctgggagccaagagtcttcccaatacagggaaaggggaagtgaagaacccttagtggtacacatttcctcaacaaactcctgcattcctagccatgggagagcctgtcgacccttgcaggtcctgaaactaacagagagctaccaagaaattgtaggataaaactgtcgaaagagtgagctcatattgggtcccacacattccctgagacctaagcagctacagcaagsctccaatttagagctctacccacagcagactgcatactgtctggaagcctagcagc

SEQ ID NO: 561268 - DNA, 511 bp, Homo sapiens
attatatatgtttattatatcaaaacaaagcctgggattttaaagttttaattaaatataaaattgatgatctatctttctgttatctggataatactctctagwattgttacatttccttcttgatccatagtaatccttttcattactatgcatgcttttcatgagaataaagtgttatcattagattttggcaatgtccaccaatgctgaaagcaattcagaaacagatggagaccaggaggtgtatagatggcaggagtgtgggggagtgggagacagcaaaggagccattcaagttaaaaatattggaacagctgaatcaaagctgagctttattaaagtttccagtttctattatgaaatttggaaatgttactattctgtaattcctctaggggtttctacttgccttttttcagactggagaggaaatggcaagcagccttgttctatcatcagtcccagggagctcttgcatctccagccctcatgctctgtgtgtatgcca

SEQ ID NO: 561269 - DNA, 511 bp, Homo sapiens
attatatatgtttattatatcaaaacaaagcctgggattttaaagttttaattaaatataaaattgatgatctatctttctgttatctggataatactctctagaattgttacatttccttcttgatccatagtaatccttttcattactatgcatgcttttcatgagaataaagtgttatcattagattttggcaatgtccaccaatgctgaaagcaattcagaaacagatggagaccaggaggtgtatagatggcaggagtgtgggggagtgggagacagcaaaggagccattcaagtkaaaaatattggaacagctgaatcaaagctgagctttattaaagtttccagtttctattatgaaatttggaaatgttactattctgtaattcctctaggggtttctacttgccttttttcagactggagaggaaatggcaagcagccttgttctatcatcagtcccagggagctcttgcatctccagccctcatgctctgtgtgtatgcca

SEQ ID NO: 561270 - DNA, 511 bp, Homo sapiens
attatatatgtttattatatcaaaacaaagcctgggattttaaagttttaattaaatataaaattgatgatctatctttctgttatctggataatactctctagaattgttacatttccttcttgatccatagtaatccttttcattactatgcatgcttttcatgagaataaagtgttatcattagattttggcaatgtccaccaatgctgaaagcaattcagaaacagatggagaccaggaggtgtatagatggcaggagtgtgggggagtgggagacagcaaaggagccattcaagttaaaaatrttggaacagctgaatcaaagctgagctttattaaagtttccagtttctattatgaaatttggaaatgttactattctgtaattcctctaggggtttctacttgccttttttcagactggagaggaaatggcaagcagccttgttctatcatcagtcccagggagctcttgcatctccagccctcatgctctgtgtgtatgcca

SEQ ID NO: 561271 - DNA, 511 bp, Homo sapiens
attatatatgtttattatatcaaaacaaagcctgggattttaaagttttaattaaatataaaattgatgatctatctttctgttatctggataatactctctagaattgttacatttccttcttgatccatagtaatccttttcattactatgcatgcttttcatgagaataaagtgttatcattagattttggcaatgtccaccaatgctgaaagcaattcagaaacagatggagaccaggaggtgtatagatggcaggagtgtgggggagtgggagacagcaaaggagccattcaagttaaaaatattggaacrgctgaatcaaagctgagctttattaaagtttccagtttctattatgaaatttggaaatgttactattctgtaattcctctaggggtttctacttgccttttttcagactggagaggaaatggcaagcagccttgttctatcatcagtcccagggagctcttgcatctccagccctcatgctctgtgtgtatgcca

SEQ ID NO: 561272 - DNA, 573 bp, Homo sapiens
ttttagttcgggaagttactattgacatatcttcaggtcaacagattctttcccctgccaccttgagtgtgatagttaattttatgtgtcaatttctggatcgtgggatgcccagctatctggttaaacaatatttctggatgtttctgtgagagtatttctgaagagattagcattagaattggkggactgagaaaagcaggtgcccttccccagtgtaggggtgcattcttcaatttgttcagggcctgactggaacaaaaaagtgaaggaagcctccagcaacttcttaaaatttaccatttaagagtttgcattagtcagagttctccagagaactagaattaataggaaatgtctgtctgtccatctgatatgtgtattaaaaggcattggctcacaccattatggaggctggacagtccaaaatcttggcctgacaggctgaagacccaggacagctgatggtgcagatgaagtggaaggccatctgctggagaagtcagtcttgctctgggaggctgctatttgtgttctattcaggccttcaccttactggatgaggcccaccca

SEQ ID NO: 561273 - DNA, 386 bp, Homo sapiens
agggagctcctaatgtctgggggaacccccattaaataccacaaggaaatcatrgagttattgcaaccaatgcaaaaacccaagtggatggcagtcttacactgccaaagccatcaaaaaggtgaaggagaaatggcaaaaggaaaccgctgggcagacgctgaggccaaaattgctgccaggtggaacttcccgttagaaatacctatggaaggacccttgatatggaacaaccctctccaatagattaagccccagtattccctgaccaaaacagaatggggactttcacaggggcatagttttctcctctaggggtggttaacaacagaagagggaaaggtactcatacctgaagccagccagtggaaaatacttaagaccct

SEQ ID NO: 561274 - DNA, 349 bp, Homo sapiens
ataaatacaacaatcaaacattctccaaggaatgtagacaggcaatttccaaaaaaatagtsatgtgttcaaacagattttcaaacatttctggttagatatttagtcatgggaccctttttgaacatggaaagctgaaagcataaactaaattataaaagtaataatgagatttgcatgttctttttattcttttcagggtccatctttatcaatataaaactatgctcttttttttcaaatttcaactcattagaacatcagcaaaattaaatgaaggtgaaaggctcaataaaacagaagcaagtaaataaatgttacacagagaaagtctgcacgctcttaaaaa

SEQ ID NO: 561275 - DNA, 582 bp, Homo sapiens
cacaagggcctctctaggggatcaaacaacacgggtacctggcttccctcaaaacatacgagaaaaatagagttccaaaaatggaagtcacagtcttttttaactcagtatcagaagtgacaccctttcacctctgctgaattctactggtagaagtaaatcaccaggaacagtccacagttaaggaaagagtattacacagggaagtgacatccaggaggcagagatcattggacaccatcttcaaggctgaatgccacgtggtatcaatgcttttgtgtctggtttctttcattcaacgtattttaarttaatacaatgtgtttgaatatagtagcaagatatcagttttcatttcttttgtatttatatctacttgtagaattacctggtcataggatagatgctgtcctcaactttattaaaaactaccagaccaatttcttacttcttgcttagtaatatatgtgaatttcagttgttctacaaacttgccaacacatttttgtcagtcttatagttttagccattgtgggtatctcattgtggtttaaatttgcatttccctggtgacattatgtt

SEQ ID NO: 561276 - DNA, 591 bp, Homo sapiens
taatatgttcagtgaaaactttatttattaaagctaagatgaaaaggcttttcttcacaggcctgtaagctccccaaattctaaagcctgtgagtttttcttgctctgtatttcatttacatgaacttttccctcaatgttataaattataaatgcttgtggtaaaatgaaaacatggaaacacacaatgaataaatatttcatttaccgaggatttatcactcaatatcttagtgtattacagatagtctcatatttatttaaatgtgagattataataatttggaaacctatcctagttttaaaatactactatagtttatgtcttttcccatttaattaaagttttcaaaataaaatgattgcatgatattccatcatcatatcacaatagtgatagctgctggttattgatatactgatgagccaagcagtaagctaggatctttatgtgaattatataatttattcctaatttgtccttatttgatatgctagaaatttgaggtttctgtgatttcccaaggtaacacagcaagaacaaagctgagatttggatccacrtctttctgactgcgaagtctgtgtgtg

SEQ ID NO: 561277 - DNA, 479 bp, Homo sapiens
gtgtttcccagaaacctttgtgaaaaagctttataatttatttcatagaaatatttatataaaatatttttgtttgtatttaccactgctattaccaccaccaccacccttcatgactacagttccaattacaggatgcaagtttagtcattcctaataaatcattttgccttctttataaggttttgcatataacccttaagatattgttaagcataagtacaaggtctggatggatcaaaatgttgatacttagaaactaagcagcgctagctaatatttcggtctccaagtggacctttgccccaagcaagtgtgctaggttttagtggagraagaataatttaaaatattgttaaaatagatgaaaaggaagagaaatacatataaatcaacatattttaaaatacaaacattaccagattaaaacaccaccaagacccctgcccacacacacacagagaacactgtatccagga

SEQ ID NO: 561278 - DNA, 577 bp, Homo sapiens
caccagcctgggtgacggtatgagactccgtctcaaracaaaacaaaacaaaactcaaatattcttattttgtgctgcccctatgacttccaaaaaccttttcgctattacctgttacttaaagcataatttctgagtacgggtctttgtaatttaatctctgcctgcctcttcagctttatccttgtctaccaaattcctagagtctgtgcaaatatggaaatcaggtaaaagcacggaaacacagatgtgtgtgtatgtgagtgagtgagtgtgcaattgaggtttcatttataaatctaccaaaaatttttcaagactagttaaatatttgctttgtttccaggttgtagacaagtactcattgataatgaaagtacaagacatggatggccagttttttggattgataggcacatcaacttgtatcataacagtaacagattcaaatgataatgcacccactttcagacaaaatgctgtaagtatataatatcaaaatctgcctctgtcttatctgctatcattttttatttaaactgaattaataaaattaatacttcatgaagtatcatac

SEQ ID NO: 561279 - DNA, 408 bp, Homo sapiens
gactagcgggtgaggagaacatatgcgagttcaccaaagagaaaagctgaatgaggcaatgcctcttcctgaycatatctcttactcagataactatataatttattgtccagtaaagggtatattaaaaaatcatattaaaagtcatgcagtgaagttgtccagggaaatcaagacttaacagtctcactctgacaataatgaacagggggattccctcaagatagactaggacatgaccccacactggcaggtagtagtaccagaaaagaacgcatggaaaatctttaccttatgcttgaggtagggaccaggctaaagtgaaagccagacctaaaattctatctaaaataaatccacaatcgaagaaaatatgtggtgtacaggcatagaatgtctttactggat

SEQ ID NO: 561280 - DNA, 489 bp, Homo sapiens
atatctcttactcagataactatataatttattgtccagtaaagggtatattaaaaaatcatattaaaagtcatgcagtgaagttgtccagggaaatcaagacttaacagtctcactctgacaataatgaacagggggattccctcaagatagactaggacatgaccccacactggcaggtagtagtaccagaaaagaacscatggaaaatctttaccttatgcttgaggtagggaccaggctaaagtgaaagccagacctaaaattctatctaaaataaatccacaatcgaagaaaatatgtggtgtacaggcatagaatgtctttactggatcattgaaatagtaagataaattcaactttttacattgttttcttttcctccagttagggcttgaggtttgtctctggagagtgactgtcaattggagccctgcctttctggggttctggtcagggggttgtggatgcttaacatgtgcctttcac

SEQ ID NO: 561281 - DNA, 489 bp, Homo sapiens
atatctcttactcagataactatataatttattgtccagtaaagggtatattaaaaaatcatattaaaagtcatgcagtgaagttgtccagggaaatcaagacttaacagtctcactctgacaataatgaacagggggattccctcaagatagactaggacatgaccccacactggcaggtagtagtaccagaaaagaacgcatggaaaatctttaccttatgcttgaggtagggaccaggctaaagtgaaagccagacctamaattctatctaaaataaatccacaatcgaagaaaatatgtggtgtacaggcatagaatgtctttactggatcattgaaatagtaagataaattcaactttttacattgttttcttttcctccagttagggcttgaggtttgtctctggagagtgactgtcaattggagccctgcctttctggggttctggtcagggggttgtggatgcttaacatgtgcctttcac

SEQ ID NO: 561282 - DNA, 489 bp, Homo sapiens
atatctcttactcagataactatataatttattgtccagtaaagggtatattaaaaaatcatattaaaagtcatgcagtgaagttgtccagggaaatcaagacttaacagtctcactctgacaataatgaacagggggattccctcaagatagactaggacatgaccccacactggcaggtagtagtaccagaaaagaacgcatggaaaatctttaccttatgcttgaggtagggaccaggctaaagtgaaagccagacctaaaattctatctaaaataaatccacaatcgaagaaaatatgtggtgtacaggcatagaatgtctttactggatcattgaaatagtaagataaattcaactttttacattgttttcttttcctccagttagggcttgaggtttgtctctggagagtgacygtcaattggagccctgcctttctggggttctggtcagggggttgtggatgcttaacatgtgcctttcac

SEQ ID NO: 561283 - DNA, 489 bp, Homo sapiens
atatctcttactcagataactatataatttattgtccagtaaagggtatattaaaaaatcatattaaaagtcatgcagtgaagttgtccagggaaatcaagacttaacagtctcactctgacaataatgaacagggggattccctcaagatagactaggacatgaccccacactggcaggtagtagtaccagaaaagaacgcatggaaaatctttaccttatgcttgaggtagggaccaggctaaagtgaaagccagacctaaaattctatctaaaataaatccacaatcgaagaaaatatgtggtgtacaggcatagaatgtctttactggatcattgaaatagtaagataaattcaactttttacattgttttcttttcctccagttagggcttgaggtttgtctctggagagtgactrtcaattggagccctgcctttctggggttctggtcagggggttgtggatgcttaacatgtgcctttcac

SEQ ID NO: 561284 - DNA, 411 bp, Homo sapiens
aaataagcaaatatttatactagttttaatrctgatgtttagacattgtatcttactttagtattgaatattttcacaattattataaatattatctaatattaataatgtacctgttaaaaatatttaaaattttacctttgaattattttattgttgaattaaaattcctttaatatgatagtcaatttctattttatgctttctctatgcatatgcaaattactctatccacttctctatctctatgtagtaacatatgaaaatcaagcctctcttctaatggacatacacgtttgcatatagaatatcagactctttatagcacttaaaatctttaaagacatgaatattgccttttaacaaatatattttagcatgtactgagaatcccctatttatttttaattt

SEQ ID NO: 561285 - DNA, 411 bp, Homo sapiens
aaataagcaaatatttatactagttttaatgctgatgtttagacattgtatcttaytttagtattgaatattttcacaattattataaatattatctaatattaataatgtacctgttaaaaatatttaaaattttacctttgaattattttattgttgaattaaaattcctttaatatgatagtcaatttctattttatgctttctctatgcatatgcaaattactctatccacttctctatctctatgtagtaacatatgaaaatcaagcctctcttctaatggacatacacgtttgcatatagaatatcagactctttatagcacttaaaatctttaaagacatgaatattgccttttaacaaatatattttagcatgtactgagaatcccctatttatttttaattt

SEQ ID NO: 561286 - DNA, 411 bp, Homo sapiens
aaataagcaaatatttatactagttttaatgctgatgtttagacattgtatcttactttagtattgaatattttcacaattattataaatattatctaatattaataatgtacctgttaaaaatatttaaaattttacctttgaattattttattgttgaattaaaattcctttaatatgatagtcaatttctattttatgctttctctatgcatatgcaaattamtctatccacttctctatctctatgtagtaacatatgaaaatcaagcctctcttctaatggacatacacgtttgcatatagaatatcagactctttatagcacttaaaatctttaaagacatgaatattgccttttaacaaatatattttagcatgtactgagaatcccctatttatttttaattt

SEQ ID NO: 561287 - DNA, 391 bp, Homo sapiens
tatgaaaatcaagcctctcttctaatrgacatacacgtttgcatatagaatatcagactctttatagcacttaaaatctttaaagacatgaatattgccttttaacaaatatattttagcatgtactgagaatcccctatttatttttaatttgggctaatcaatatgattattaatattattggattaccaaatttggaaacacactttcatccccaatgtggatatttgttttattttttttgccaatttcttgtcttactgtttcaaatattgttggatattatttttattttatttggcattttagtatcaacatttgtaattgaggtactctacatattttttcttcaatatctggtgggttttatgattactgctatattggatt

SEQ ID NO: 561288 - DNA, 391 bp, Homo sapiens
tatgaaaatcaagcctctcttctaatggacatacacgtttgcatatagaatatcagactctttatagcayttaaaatctttaaagacatgaatattgccttttaacaaatatattttagcatgtactgagaatcccctatttatttttaatttgggctaatcaatatgattattaatattattggattaccaaatttggaaacacactttcatccccaatgtggatatttgttttattttttttgccaatttcttgtcttactgtttcaaatattgttggatattatttttattttatttggcattttagtatcaacatttgtaattgaggtactctacatattttttcttcaatatctggtgggttttatgattactgctatattggatt

SEQ ID NO: 561289 - DNA, 391 bp, Homo sapiens
tatgaaaatcaagcctctcttctaatggacatacacgtttgcatatagaatatcagactctttatagcacttaaaatctttaaagacatgaatattgccttttaacaaatatattttagcatgtactgagaatcccctatttatttttaattkgggctaatcaatatgattattaatattattggattaccaaatttggaaacacactttcatccccaatgtggatatttgttttattttttttgccaatttcttgtcttactgtttcaaatattgttggatattatttttattttatttggcattttagtatcaacatttgtaattgaggtactctacatattttttcttcaatatctggtgggttttatgattactgctatattggatt

SEQ ID NO: 561290 - DNA, 391 bp, Homo sapiens
tatgaaaatcaagcctctcttctaatggacatacacgtttgcatatagaatatcagactctttatagcacttaaaatctttaaagacatgaatattgccttttaacaaatatattttagcatgtactgagaatcccctatttatttttaatttgrgctaatcaatatgattattaatattattggattaccaaatttggaaacacactttcatccccaatgtggatatttgttttattttttttgccaatttcttgtcttactgtttcaaatattgttggatattatttttattttatttggcattttagtatcaacatttgtaattgaggtactctacatattttttcttcaatatctggtgggttttatgattactgctatattggatt

SEQ ID NO: 561291 - DNA, 280 bp, Homo sapiens
atgatttctgaaaatagtggaatcgagtttgaatctagtaagtacatataaataaatgtcttaaaactcctcttatgytagctaattaagaaatattattgtaatagacattagaaaatattttaataaattgagtgcatttcacacgctgaggaaatgatcttacttgcatttgatagttcaattagatacatatatacctataggtagtttaaaatatttctaataaccttatatacttttaaaaagcattgatatatgtttgcactatctggtctat

SEQ ID NO: 561292 - DNA, 280 bp, Homo sapiens
atgatttctgaaaatagtggaatcgagtttgaatctagtaagtacatataaataaatgtcttaaaactcctcttatgctagctaattaagaaatattattgtaatagacattagaaaatattttaataaattgagtgcatttcacacgctraggaaatgatcttacttgcatttgatagttcaattagatacatatatacctataggtagtttaaaatatttctaataaccttatatacttttaaaaagcattgatatatgtttgcactatctggtctat

SEQ ID NO: 561293 - DNA, 486 bp, Homo sapiens
ttgaatctagtaagtacatataaataaatgtcttaaaactcctcttatgctagctaattaagaaatattattgtaatagacattagaaaatattttaataaattgagtgcatttcacacgctgaggaaatgatcttacttgcatttgatagttcaattagatacatatatacctataggtagtttaaaatatttctaataaccttatatacttttaaaaagcattgatatatgtttgcactatctggtctatagagtacacataacaaacatgattatagctcttctgctataaacttcaaatrtctaattaatacaaaaatctagaatgagaagagttctttgcaatttttttttttaccaaatagaatataggaaagatagctgcaaatatacctgacacacttatctgtgagtatggtggtagcctttttattttattttattttgagagagggtctcactttgtcacccaagatggagtgca

SEQ ID NO: 561294 - DNA, 486 bp, Homo sapiens
ttgaatctagtaagtacatataaataaatgtcttaaaactcctcttatgctagctaattaagaaatattattgtaatagacattagaaaatattttaataaattgagtgcatttcacacgctgaggaaatgatcttacttgcatttgatagttcaattagatacatatatacctataggtagtttaaaatatttctaataaccttatatacttttaaaaagcattgatatatgtttgcactatctggtctatagagtacacataacaaacatgattatagctcttctgctataaacttcaaatgtctaattaatacaaaaatctagaatgagaagagttctttgcaatttttttttttaccaaatagaatataggaaagatakctgcaaatatacctgacacacttatctgtgagtatggtggtagcctttttattttattttattttgagagagggtctcactttgtcacccaagatggagtgca

SEQ ID NO: 561295 - DNA, 486 bp, Homo sapiens
ttgaatctagtaagtacatataaataaatgtcttaaaactcctcttatgctagctaattaagaaatattattgtaatagacattagaaaatattttaataaattgagtgcatttcacacgctgaggaaatgatcttacttgcatttgatagttcaattagatacatatatacctataggtagtttaaaatatttctaataaccttatatacttttaaaaagcattgatatatgtttgcactatctggtctatagagtacacataacaaacatgattatagctcttctgctataaacttcaaatgtctaattaatacaaaaatctagaatgagaagagttctttgcaatttttttttttaccaaatagaatataggaaagatagctgcaaatatacctgmcacacttatctgtgagtatggtggtagcctttttattttattttattttgagagagggtctcactttgtcacccaagatggagtgca

SEQ ID NO: 561296 - DNA, 494 bp, Homo sapiens
tggtggtagcctttttattttattttattttgagagagggtctcactttgtcacccaagatggagtgcagtcatgtgatcagagctcactgaagycttcacatactgtgctcaagcgattctcccacctcagtctcctgagtagcagggactgcaagtgcatgacaccatactagctaatttttgtaaagatagggtttcaccatgttgccctggctgatctccatctcctggactcaagagatctggccaccttggcctcccaaagtgctgggattatagttttggggcaccgcgatcagcccagccttaaaaaaggcagactagagatctttatctatgtatatctatatctatctataaaataaacatatgtgttccttatataaaaatatatattattaatattatataaaaatttttttcaaggtagaaatatataaagagggtgcatgtagagcctggggcattgtgtagtgaagctcaaggcctctg

SEQ ID NO: 561297 - DNA, 494 bp, Homo sapiens
tggtggtagcctttttattttattttattttgagagagggtctcactttgtcacccaagatggagtgcagtcatgtgatcagagctcactgaagtcttcacatactgtgctcaagcgattctcccacctcagtctcctgagtagcagggactgcaagtgcatgacaccatactagctaatttttgtaaagatrgggtttcaccatgttgccctggctgatctccatctcctggactcaagagatctggccaccttggcctcccaaagtgctgggattatagttttggggcaccgcgatcagcccagccttaaaaaaggcagactagagatctttatctatgtatatctatatctatctataaaataaacatatgtgttccttatataaaaatatatattattaatattatataaaaatttttttcaaggtagaaatatataaagagggtgcatgtagagcctggggcattgtgtagtgaagctcaaggcctctg

SEQ ID NO: 561298 - DNA, 225 bp, Homo sapiens
ggaaaccccttcctgttgtgggaaaacaggcttccatatgtgtcttattgggaaacacataggcagtttctatgtttttactgmatctatttcagggatatgggaactgaatagtgcccatcaaagtctcacctgatgttggaaattgatctgagagcgcagaaggacagaattctttctttgttcctgggcagcggtggttgagggatcattgtgtggcagcta

SEQ ID NO: 561299 - DNA, 242 bp, Homo sapiens
actatacatagggatgagaacatggagagatatttcgtgagatcacaaagttatggtatggcagaaatagaacgctgagtagagactctgtgttcccaatcattatttctaccaccagctttctattttgatgttaataatgttcttakgtgggaaaccctacatatttgccaatgtttagttcattgacaaagaaatagaaagagcttcaagaacactctaatctttaaaaattaaaatac

SEQ ID NO: 561300 - DNA, 605 bp, Homo sapiens
ttaatttttttcttatgtaataccagagttattaggaaggtattatctaataacactattttcagtgatattttaagtagttgtcctagaaaaattttattttttaaaaatgtatatttaaaaatacattaaatgtgtatatacatcaatcatatgtatcgatttttgtttttcttgaattgcaaatgaaatttttatttttgtgttcctggaataaaataaacttgaatggatcataatatgttattcatgctgcaattcaaggtatttcaatactttaaaaatgttacatttatagttaacagatactgacctataaattttctgtcatataatgatgctgtgagacaatctaagaagaattaaaatttaaattcatgtattcctacttttttctctgttctctaactgtaatrtattttaattacagatggaggaacagatagatgttagataaatagatatacaatagatagatcatccaaaattcttattcttgtggttttatgtagtcagtatttacctctatttttctacatgtttatccttccaatttagttcattacttcctgcacctttgatgtcatatatataaacaggaaata

SEQ ID NO: 561301 - DNA, 408 bp, Homo sapiens
gaggaacagatagatgttagataaatagatatacaatagatagatcatccaaaattcttattcttgtggttttatgtagtcagtatttacctctatttttctacatgtttatccttccaatttagttcattacttcctgcacctttgatgtcatatayataaacaggaaataacacatggtggccgggatgtagagagagccacaggacttgtgaataaaatccacaggcaaggatgtggcgattccttttgcaatattggagggaatgccaaaccctatgtttgctgtggaaaagattatggtagttcctcaaaacatcaaaatggtattgccttatgattcagcagccccacatctcaagatagcataagaattgaaagcagagtcttgaaaaaatatttgcacat

SEQ ID NO: 561302 - DNA, 408 bp, Homo sapiens
gaggaacagatagatgttagataaatagatatacaatagatagatcatccaaaattcttattcttgtggttttatgtagtcagtatttacctctatttttctacatgtttatccttccaatttagttcattacttcctgcacctttgatgtcatatatataaacaggaaataacacatggtggcygggatgtagagagagccacaggacttgtgaataaaatccacaggcaaggatgtggcgattccttttgcaatattggagggaatgccaaaccctatgtttgctgtggaaaagattatggtagttcctcaaaacatcaaaatggtattgccttatgattcagcagccccacatctcaagatagcataagaattgaaagcagagtcttgaaaaaatatttgcacat

SEQ ID NO: 561303 - DNA, 408 bp, Homo sapiens
gaggaacagatagatgttagataaatagatatacaatagatagatcatccaaaattcttattcttgtggttttatgtagtcagtatttacctctatttttctacatgtttatccttccaatttagttcattacttcctgcacctttgatgtcatatatataaacaggaaataacacatggtggccgggatgtagagagagccacaggacttgtgaatraaatccacaggcaaggatgtggcgattccttttgcaatattggagggaatgccaaaccctatgtttgctgtggaaaagattatggtagttcctcaaaacatcaaaatggtattgccttatgattcagcagccccacatctcaagatagcataagaattgaaagcagagtcttgaaaaaatatttgcacat

SEQ ID NO: 561304 - DNA, 408 bp, Homo sapiens
gaggaacagatagatgttagataaatagatatacaatagatagatcatccaaaattcttattcttgtggttttatgtagtcagtatttacctctatttttctacatgtttatccttccaatttagttcattacttcctgcacctttgatgtcatatatataaacaggaaataacacatggtggccgggatgtagagagagccacaggacttgtgaataaaatccacaggcaaggatgtggcgattccttttgcaatattggagggaatgccaaaccctatgtttgctgtggaaaagattatggtagttcctcaaaacatcaaaatggtattgccttatgattcagcagccccacatcycaagatagcataagaattgaaagcagagtcttgaaaaaatatttgcacat

SEQ ID NO: 561305 - DNA, 190 bp, Homo sapiens
tgagacatagaaaacaagtgggaaataaatctagtataacttcccctttgtgtacctttgttatttagcatttgagaaaatgtktcccccaaatatcttcccatcttaattcatgtctataaagtagacatttatgtctcaccttgtcaagaagggcaaactctaacataaacatttcccaaaaatgctt

SEQ ID NO: 561306 - DNA, 600 bp, Homo sapiens
gcttatatttaagtacagtttcaaatgcctagtgcaattagtatttatttctttgtgtattttaaacatgtatataataaatatttttcaggttcaacaatatatatcaatcctacaggctcttataaatattagttaaaatcaattggtaaattcatgtatatatatgcatgcctgtatcagtgagcgtgtgtgcatgtatgtttgtrtaaatgtaattgtatgtgtgtgtaaatgtaattggatgcatccttatatttacccttacctacaagatttccaagattcatttatgatctttagataatgggcatttgaagatttaccaaatacaactgtagtagtggaaaatatcaagatatcattaaattcatcttgtgcacataattgtttctataaatttatgtttcttgcaaagcttgcactaatgctcatgcacaaaataattttctaaataaaaaataaaaacgttttctcagtcattaattcttaaaattatttctccccactaattaatgtgaattaattcttaattcttaattatagaataatgttgcccttcagagtttggaaatttttacatgttgtacacatttcact

SEQ ID NO: 561307 - DNA, 600 bp, Homo sapiens
gcttatatttaagtacagtttcaaatgcctagtgcaattagtatttatttctttgtgtattttaaacatgtatataataaatatttttcaggttcaacaatatatatcaatcctacaggctcttataaatattagttaaaatcaattggtaaattcatgtatatatatgcatgcctgtatcagtgagcgtgtgtgcatgtatgtttgtgtaaatgtaattgtatgtgtgtgtaaatgtaattggatgcatccttatatttacccttacctacaagatttccaagattcatttatgatctttagatratgggcatttgaagatttaccaaatacaactgtagtagtggaaaatatcaagatatcattaaattcatcttgtgcacataattgtttctataaatttatgtttcttgcaaagcttgcactaatgctcatgcacaaaataattttctaaataaaaaataaaaacgttttctcagtcattaattcttaaaattatttctccccactaattaatgtgaattaattcttaattcttaattatagaataatgttgcccttcagagtttggaaatttttacatgttgtacacatttcact

SEQ ID NO: 561308 - DNA, 518 bp, Homo sapiens
acaacttattaatattatagaaaatgctgaacttaacaattaagatacaagtagtgaaaattatagtatttaaggagatctagaaaatttaatctttacctgtaatgtgtgagaagtattagaataatgcttgtgtttctggattggcatcgatttctattgagactggaaacatagtagaagtgagggaaaaagaatttaaattgtggatactttagttttatacctaggagttcgagaaatacattttgttactatcaaagcagttggcacaagagtgtacaaaatttcctaattgtgtctatgtggagaagacatagacaaacagagaatagctaaacagaaatagcaaaaracacaaataaattttacctatatttttaagtaaaagccaattagagaaggaaaacatgaaatttgtgttttatcaaaatttttctctttctcataatatagttgaatatattactggaaaaaatttgaagcactggtatgttcacaaataaaattaaaatata

SEQ ID NO: 561309 - DNA, 521 bp, Homo sapiens
tattgcactacagtattaaatggctaatatacataaaactcctagaacagtgtctgccacataatcaggtattcataaggtcatctattattattatattatatttcagaagatatcactaagagtcataaaattgtctgttacttcctgatctgttttttcaggtggctaaaaatagtttcaatttttaccattaaaaaatgtaratatacttcaggaatatgactattgaaataacatatctaagtgcatatcagcatttcaacagcaatgtgagacatttgaagagtttccttgagcaaatgtgaagcaaatattaatttaaaaattaaagagatcttttaaatatttatgtactcaaattataaatctagtaaagatggcatttcaccttatactagttatttattaataatgagagctgtattttattagcacacttttcttgtaaattgtgtgcatgtggttatatttgtgctgaggtagaaaagtgaaattaatctaaataacactcattttat

SEQ ID NO: 561310 - DNA, 521 bp, Homo sapiens
tattgcactacagtattaaatggctaatatacataaaactcctagaacagtgtctgccacataatcaggtattcataaggtcatctattattattatattatatttcagaagatatcactaagagtcataaaattgtctgttacttcctgatctgttttttcaggtggctaaaaatagtttcaatttttaccattaaaaaatgtagatatacttcaggaatatgactattgaaataacatatctaagtgcatatcagcatttcaacagcaatgtgagacatttgaagagtttccttgascaaatgtgaagcaaatattaatttaaaaattaaagagatcttttaaatatttatgtactcaaattataaatctagtaaagatggcatttcaccttatactagttatttattaataatgagagctgtattttattagcacacttttcttgtaaattgtgtgcatgtggttatatttgtgctgaggtagaaaagtgaaattaatctaaataacactcattttat

SEQ ID NO: 561311 - DNA, 600 bp, Homo sapiens
tttccctttaacttccagatgcaggaggcccttaagtatttcttgtagggccagtccagtgatgataaattcccttagtcattgtctgggaaaggctatttttcttttaattttgaagtatacttttgctgggaatagcagggcaggttttttkattttctttttttttctcagcactttgaatgtatcatcatcacattctctcctggcctgtatgctttctgctgacaaatccgctattagtctcatggggcttcccttacatgtaacttgacacatttctctaactctttttagaagtctctctgtctttgatttttggcagtttgactataatgtgcattgaaaaagacctttttgggttaaatctattttggtgtatttgaagttcctgtatctggatgtctgtgtctcatgcaagacttggggaagttttcagctattatttcattgaatcacttttctatgtctttgcccatctcttctttctgaattccccaaatttgattatttagtgctttatggtgtttcatatgtcacataggctttcctcattctttactatacttcttttcctggctgagttagttcaaaagacct

SEQ ID NO: 561312 - DNA, 599 bp, Homo sapiens
cagggccttatattacctaagtgactcctgttctctgtctcagtagagtctaaagagagctaattctctggacattctacagactattacctttgttcgctgtwttaactgacttcggagtcatagagggattcttaaataagacccaaaaacgtacaaataacacactgatgcatttaaaaacaataaattaaaaattaaagaccaagaagagaatggttgtctgtaattttaggatccagatcatctgatgtagaggaatgaaaggaagcctcaaaagtcagggcctcaaaagtcctggttaggatctatttcttaagcaggatgtttggtaaatacatgttttattatctttgttattgcgtaaacttagcatttacttgttaaatcatcattttatgtatgaaatgttgcacaataagtttttaatgagctggtagagttcttttaaaagaaatgaagataaaattgaaccattatagaaacgaataatgaatcaaagacatagcaatcagcgtaaacatcattggaaacatagaaagctgaaggatgggcttgaaacactcatgaaaaattaaacggaaaagaacataatgttt

SEQ ID NO: 561313 - DNA, 510 bp, Homo sapiens
tcttgcgaatagctatatgtgaatgagtcaaactgttataaatgaacatcagctagaacttgatagtttacaaaatatttgtaattragtgtgtaggctgagttagtataacaaaaaatactttaaaatatagtggttcaaataaagttaatggaaatatttgttttccacataagagcctagaggttatcagagtacacaacagacaaatgaacttgtgttttctcaattagctacccaaatcagtggtgaactgctgaggtagaggtggctacaacaactctccttcaccagatcatcagagacttggggtccctccatcctgctgccttgctgtgttttaaggtgttgtctttgttctggtccaagatatctcacatcggtatatctgctttccagcttttaggaagtaagaatggggagatctggagtggtaacacctttttttttttttttttcaggaactggaactggcgctaattgtttccattcatattctgctagtgaaaa

SEQ ID NO: 561314 - DNA, 650 bp, Homo sapiens
caagggagatccttgtgctgatttcaaggcagaaggtgagcatcagccattttgtagttcccacacattgttgccagtgtgctgactcacctcgttggcaagaagtagcagctgaacctaaattgttttcacctttccttggagcctcctttagcatttctgactcctgggcttcaatttaacttcatgacaacaggcatagcttctgcaggatacatttggcatcaagggcagaggcaagaagataatgctcaatccttccagatgggtttctggctcatgcttatggaatccatcctgcctttggtcttcctcattttacgtctattttcctttccgtctgcacaccctgtgaacttcaagatccatgactatatgaggagagagcagccttacggagactgcttaaccacctcccacaattgtgtaagtcaattcccccaatcccctgtaacaaatttctctctctctctggctgtctctctctctttctgtcacacatacacacacacatacacccctgcccctaytgattcttttctctggctgaaccctgactaatacatggccttttctaccgctgttgcgatttttccttatgaggaagtgctcaatggtcttattttgcattgcatacatacatcatgtcc

SEQ ID NO: 561315 - DNA, 348 bp, Homo sapiens
gtaacagagagtagtatagcccctggcatagcctctttgcatttcctatataaatttttggagaaagaagagaaaaaaatggcaaatacatctaaaagtaagattgacagtagactattttgagtgtcctttyggtgtcctttctgttgtgagtgatagaaatggaacacaagctagattaagcaaaaatggaatttatcggatcataaaactacaaagtctaaagcaggcactggcttctatacataaagatccaggcactcagctgctgacctcaaggcattctctttctccagtgccttgattctgcttgtcactggttagctttactctgcaaccagttccaag

SEQ ID NO: 561316 - DNA, 478 bp, Homo sapiens
gaattctttcaacttttccctactcagtattatgttgactgtgggttcgtcatagatggcttttattacattgaagtatgwcccttttatgctgattttgcgagagtgttaatcataaaggaatgttggattttgtcaaatgctttttctgcatttattgagatgatcatgtgatttttatttttaattctgtttatgtggtatatcacattttttgacttgtgtatgtttaaccatctctgcatccctggtatgaaacccacttgatcacagtggattatctttctgatatgctgttggattcagttagctagtattttgttaaggatttttgcatctatgttcatctgggatattgttttgtagttttctttttttgttatgtccttacctggttttggtattagggtgatactgacttcatagaatgacttagggaggattctctctctgtcttgtggaataacatcaataggat

SEQ ID NO: 561317 - DNA, 560 bp, Homo sapiens
agcacataaacatgcactctcactataaaacaacaggaaaaaaaaaaaatcccttagaggctatagcccatttctctgctcttcatggcaaaagttttcaagagtgttcaaccgatgctgtttccctttcttatctccagttcattcactctttcatgctctgcaaattggcttcggcttccaccatcctcagcttgccatggccacaggttgcttttgggttgctaaatcacttctaacctcactttactcagcttctgagcagtcaccactcaccctgaaaaccaccctcccacttctcttttttctgtgactctttgggtttgtttcagatcacattctcactctcctttgtagcctcttccttttctatctgaactcaaaatgttgggacttttcaaggcttagccagcatcctctccctaagtccactaactgccatggattttaaaaccttaaggctgatgaggtgaaaattcacatctccaggctagacttcttgggtgggatccagactcatcaaaactmaatacctatttaacatctccacttgaattgct

SEQ ID NO: 561318 - DNA, 590 bp, Homo sapiens
ataatgcaaatcaatttctaatcacatatataggacaatgtaggtatcaaacaggaaaaaaatattttatttaaaaaaatatgatttgaagtttagactcaaggcaactcacagagatagaaataaatttgaatgtaaaaaagatgaaagaaaaattggtttaacattttagaggattcgtgttggaggtatactgaaacctttggttaaataaaatagagtccattaaaaaaagactttggatatttggctatgaaattagacataaaactgatagacaatggattactgagaaagggtacaatatcaagaaatttgtgtttgaagaaaacaataasttaatagcactatgaatgagtaggtggccaaggataagtaaataaactatacgtttttctctttaggcttgaactagtaagttcttagattttgtgggaacagtgaagaattaaaagcattgtcatcagagaaaatgtggagagtatgatgtattttatacattcaggtaagtgacaaagaagagaaaggtgttttatcaagtggaataaagaaaggatcaagcaaagacaaatttgttatatttaaagtgc

SEQ ID NO: 561319 - DNA, 534 bp, Homo sapiens
tctgtaacagttctttatcagacataccttttgcaaacagtttctcctattctgtggcttgtcttctcattctgatgacagtgtctttcacagggtattaattttaattgtgatgaaatacagcttatcaatatttttcttttcatggattgtgcgcttttgttgttctaaaaagtcatcactatgccccaggtcatctcttatgttatctcctaaaaggttgtaattgtgcatcttgtatttagattaatgatattttttgaattatattttgaataatctgtgtctagatacatttttaggcacgtggatgtccagttgctccagcaccatttgtgaaaagacgatcttttccccactgtatttcctttgctcctttataaaatgtcagttgactataattatgtargtcttttctggacgctctattttatttgattgatttgtctactctctcaccaataccacagcgtcttgagtactttttggagtaagtcttgaaatcaggtattgtcagcctccaactttgttctt

SEQ ID NO: 561320 - DNA, 643 bp, Homo sapiens
tcaaagccattcaacaagtctctaggaagttccaaacttttccacatcttcctatcttcttctgagcactccaaactgttccaacctctgcctgttatccagttccaaagtcacttccacatttttgggtatctttgtagcagcacaaaattctaccagtaccaatttatctgacatgtaccagtaataaatttaccaaattataccaaaaataaatttatcagacccagtaccaggatctgataaatgccaccaggtagaaagccaagctaatctcatggcttactttattttccttctctcatatactgcagtctagtgctaactattgtctaatttcttaaaacagttatttcatacagttgatcaagygttctcattgtttatattacgaggttaattccagtaccagttacttctttatggccagaagcagaagtagaatattactttttaaaaggctgttgtctcagaaaatgattctctacgatttacttttttaaaagacagtttaggggtttccccactaagtttctataatattttggctttcatttagaggcagaggggaagccaaactttataaagcaggagtccccaacccctgggccatggactggtaccagccttactggtaccagca

SEQ ID NO: 561321 - DNA, 540 bp, Homo sapiens
gtctcaaactcctgacctcagatgatccacccgcttcagcctcccaaagtgctgggattacaggtgtgagccaccacgcccggcctgtattattattattattattattattattactttttyttttttcagacggagtctcgctctgtcacccaggctggagtgcaatggcgtgatcttggctcactgcaacctctgccttctgggttcaagtgattctcctgcctcagcctcccaagtagctgggattacaggtacgtgccaccaagcccagctaatttttgtgtttttagtagagagggggtttcaccatgttggccaggctggtctcaaactcctgacctcgtgatccacccgactcagcctcccaaagtgctgggattacacgccaccgtgcccagctaatttttcttttagtattttttttgtagaaattgggtttctttatgttgtcctgactggtctcaaactcctgagctcaggcaatctgcctgcctcagcctcccaaagttctgggattataggcgtgagtcatcatgc

SEQ ID NO: 561322 - DNA, 582 bp, Homo sapiens
ggtatcatcttggtttccacttctcctccctagctctcttccctggaggtcaggccaccctgcttccccaattatgaaaattccaaatgacaccgaggaatctcagtctcactactttagataaatacatattttttccgttgttgcattttatgattttactaagcaccagatgtaaaacatcctgtcatataagcattcctaacctacctttctagagattaattttaattattatgatctggcattaaaaacatgggtgactatcatttactgagataacacattatttcataatggtggtagatttagaagcaaagcattacagcttaacagaagaaagctaataatgcataaacacctgtttctcaaactctgtgtatccataacccaacttttttgaaaaagaacttgacaaaagtggtggtgctattaagcatagacattcctcattaccaaatagaatttattacatattgtaatgcagtcagttatattataaaaaaatagggctctaagctactgacacactaactwtttaaatgtaaaaacaatcctgagttttattaaaaattacattaa

SEQ ID NO: 561323 - DNA, 573 bp, Homo sapiens
tttgaaaaaacctaagtgtctttcaacagaaaaacagataaagaaaatgtcacacatatacatatactcagccataagaaagaataaccactatggaaaacagtatggagattccttaaagaactaaaagtagaactacggtttgatccagcaatcccactactgaatatctacccagcggaaaagtagtcattatatgaaaaagatactcagataggcatgtttatagcaacacgatttgcagttgcaaaaatttggaattagcccaaatgcccatcaatcaatgagtggataaagaaactgtggtgtatatacacaatggaatactattcagccataaaaaggaatgaattaatgacattcacagccacctggatggaattggaaactattattctaagtgaagtaactcagaaatggaaaatcaaatrtcgtatgttctcactcataagtgggagctaagctatgaggatacaaggaaataagaaggatagaatggactttggggaactggggggaagggtgagaaggcagagagggattaaagactacaaattggcttcagtgtatact

SEQ ID NO: 561324 - DNA, 615 bp, Homo sapiens
gaaaaaaattatacttctttcattcaaagttagtatctctattgggtaaatttttttttaatctttgcacaccatgatctgaatcagaaaatatgtgtgtatgtatagacctacctactttatgctttaattttaatgacaatttgatagataagctaagatgttctactgcacacaagaataaggacttttttaaaaaaactgcttttctctttaactacaattaacaaagctaaatgttgtgttctgtgatgctttatttcttaagaaaagtttccatcagaagtgttgcctcggcagggcgtggttgctcacgcctgtaataccagcactttaggaggccaaggcgggcggatcacttgaggtcgagagttcaagaccagcctagycaacatggtgaaaccctgtctctactaaaaactacaaaaaatagccaggcgtggtggtgggcgcctgtaatcccagctacttaggaggctgagacaggagaattgcttgaaccagggaggtggaggttgcagtgagcccagatcacaccactgcactccagcctggatgataagagtgaaagcccatctcaaaataagaaaaaataaaagtgttgactcaagtcat

SEQ ID NO: 561325 - DNA, 440 bp, Homo sapiens
gaaaatacctagaaattcagctaaccagagagatgaaagatctctacaatgagaattattaaacgctgttcaaagtaatcagagataacaccaaaaaaaaaaaaaatggaaaaacattccatgctcacagataggaagaatcaacattggtaaaatggccatactgttcacagcaatttataggtttaatgctatccgtatcaaactaccattgacattcttcacagaactagaaaattcatayggaaccaaaaaaaagagcccaaaaagacaaggcaatcctaagcaataagcacaaagcaggaggcatcatgctacttgactttaaattatactacagaaatacagtaaccaaaacagcatggtactggcaaaaagaaaaaatagacacatagacaaatggaacagaatagagagcccagaaatatggcaacacacca

SEQ ID NO: 561326 - DNA, 440 bp, Homo sapiens
gaaaatacctagaaattcagctaaccagagagatgaaagatctctacaatgagaattattaaacgctgttcaaagtaatcagagataacaccaaaaaaaaaaaaaatggaaaaacattccatgctcacagataggaagaatcaacattggtaaaatggccatactgttcacagcaatttataggtttaatgctatccgtatcaaactaccattgacattcttcacagaactagaaaattcatacggaaccaaaaaaaagagcccaaaaagacaaggcaatcytaagcaataagcacaaagcaggaggcatcatgctacttgactttaaattatactacagaaatacagtaaccaaaacagcatggtactggcaaaaagaaaaaatagacacatagacaaatggaacagaatagagagcccagaaatatggcaacacacca

SEQ ID NO: 561327 - DNA, 589 bp, Homo sapiens
ctgtttaattttcttcccctttgtaaatacagaatcgtaatcaagaaatctcttgcatggaaattgtttgctattgggaaataagagtatatcttattatcctgaaatttactaacgggaaagtaaaggattattattttgttggtgaaatggatagctccaatwccctgacacagtgtaagaaaaagtgtgggaaaaaataaatctgtataatatgttggttttgtttgtttatagttttgatggtaataacttgctttatttaatttttagtttcaagttaatcaactcaaggaattaagtatttttaaaaatatcattatacatttgcacacctatataagaggaccatcaaaaaacttatcacaatatattatcagatttgaaaataaatattttattaatatccctaaacatcaaaactttaaaaaaaatttgtaattgggatctaaatgagatcaatgtgttcaaattttgaattgcttatgtttaatgattgatatttaattatatatttttatactatctgtttttcttttacaatttattttttgataaaaatgtgaattgtttgcttggtagagtttcc

SEQ ID NO: 561328 - DNA, 553 bp, Homo sapiens
aatgtatatatatatatatatatatatatatatatatatatatatatatatatawaaaataattcaaacccaatagctaactattttttaaaaaaaggagaaatcacaaatacttaaagtaataaatgatgagaggacattaattagataaactgaaagcaaacatgagaaactacatggttcgaatgtaggcgaatacatttgaaaacattgctgacacacaaaaaaagtttgggaaaatataattcaattcctgaatacttatatatattgttatattataattctctatatagtatatatatttgttatatatacccacaatacacacatacacagaggaagatgaatttccattgaagaaatagaaaatattttcttcttctttttttctttctttttttttttttttgagatggagtcttcctctgacacccaggctggagtacagtagcacgatcttggctcaccgcaacctctgcctcctgggttcaagtgattctcctacctcagtctcccaagtagctgggactataggcacccacgaccaggc

SEQ ID NO: 561329 - DNA, 606 bp, Homo sapiens
acctcacatattctgctttgtgtccccaaagctgggccctctaaagtgctctctccagacttcctaactagctggcttttggtaagctttgccattggacgagagggaatagatattaaaaggcaggatgaaggaaaaaagcatgttctgcatctagctctaaaagaagtagttgccgaccttggctctggtgacattgatggggagacagtcatgatctttagcagctgtggcagtagtaggccaaacagaggcccctctttggaggtccagtccagcagcatcagtgctggtttggagactgaattgctgcaggggcatatacaacagcacagcagcaggtgtccgcttatggttccaactcagggtcatttgcagctttctgatctcagtgtaaaaatctgtcatccttcctatactcctatatcactctcctctcctttttcttccttcagagttttcaaaacattaatgccctatcccatgtatggaactgtttgaaacagtcaatacagtttctgtttttatgactatcttctgaatgataaagaaagccwaagttttgatgtccttaataagcacaaataaaaatctttagaaaataag

SEQ ID NO: 561330 - DNA, 569 bp, Homo sapiens
ctttgttatttcattatgtgatttaattaaaaatggaatctattaagcctttttcacattagatgttggtagaaatttttatttttttaacttttattttaggttcagggcacatatgcaggtttgttatataaataaattgcatgtcacagaagtttggtgtacagattattttgccacccacataataagcatagaacctgagaggtgatttttggatcctcatcctcttccctccctctatccttaagcacgccccagtgtctgttgttcctttgtgtccatgtgtactcaatgtttggctcccattatatgtgtgaacatgcagtatttggttttctgttcctacgttagtttactcaggataatggcctccagctccatccacgttgctgcaaaggacatgatctccttgttcttcttatggctgcatagtgttccatggtgyacatgtaccatgttttatctggcccattgttaatgggcatttaggttgatcccattttttgctattgtgaatagtactgcgatgaacatatgtatgcatgtgtttttatggaagagcgatt

SEQ ID NO: 561331 - DNA, 336 bp, Homo sapiens
ttgtagttttaatttagcatgacctgatttttgccagcattgaccattcatctaaaacttgatggtcaatctctgtaataactgttgcagcaaaaggagggctcggctagaagtgaggagaactgggctctgtataccatgtcacctctaattccctgtgggatcttcagaagttatttgatcttcaggttcctcatttgtaaaacaagagaataaatactctcgatgattttcttccaactcaaacaayatgtgattctaattctcttgtgaacaatgacattagtcttgtagaaagggcttcatttattccttttgttttcctagaaatgtata

SEQ ID NO: 561332 - DNA, 562 bp, Homo sapiens
agagaagtttaaaacaaaagacagtgtgacctttgaataatgagagaatggaaaagagaatgttcaaggagcagagatgtgggtgcaaaatggggtacagtgatcaaaaagagaggtaaactctgcaaacactacaacatgaagcctgacaacaaatctagacaagaagctacagcaagtgactaaagggctgtttgagagttcctagaacacaatttgagttgaccaagaatatataagacttacatcatttctttctgaataagatatactagtaggtcagcaaaatccattgatatacttgaactttagcaaagcatgtgacaaattctttcctgatattcacatacacaagatggacctatatgaactagwataagtagagtataagagcttcaagacacagagattataggagtttgaaagaaagagtggttcctattaaaaaaagattccaggaaagtaactgtgtatgggagacaccagtcaattagggcaagaaattagtgtaatcactatcaggataaccttaataacaatagcaataatatgttgagcactt

SEQ ID NO: 561333 - DNA, 374 bp, Homo sapiens
agacaattcaaacataaatatacctacctggaaaagggcagatagacgataaaatgccaacagaatactatgccttcctgaagaataaayttgtgttttatggtatatgttaatgacagagatagaagacagtctcagagggccattgaaggtaactccttagtaaaacgcagatttgagcatcttggaaacactgagatattatgtgtcaggagagtagataatttttttttttttttttttttgagacggagtttcactcttgttgcccaggctggagtgcagtggcgcgatcttggctcactgcaacctccacgtctcgggttcaagcgattctcctgcctcagtcttccaagtagctgggattacagatg

SEQ ID NO: 561334 - DNA, 374 bp, Homo sapiens
agacaattcaaacataaatatacctacctggaaaagggcagatagacgataaaatgccaacagaatactatgccttcctgaagaataaatttgtgttttatggtatatgttaatgacagagatagaagacagtctcagagggccattgaaggtaactccttagtaaaacgcagatttgagcatcttggaaacactgagatattatgtgtcaggagagtagataatttttttttttttttttttttgagacggagtttcactcttgttgcccaggctggagtgcagtggcgcratcttggctcactgcaacctccacgtctcgggttcaagcgattctcctgcctcagtcttccaagtagctgggattacagatg

SEQ ID NO: 561335 - DNA, 503 bp, Homo sapiens
aggatttccaccactgctacatgaatagctaccagaagggctattcattattccagaaaaagtctcagtttcacaatgcattgttcttatagctttgagtaacatactaaagttctaaaaggttatgtctaagaaaaggaagtaaataaaataagatgatctttcttggacaaaattagccattctttattaaaatctataatatttaattacttcattaaattaaaaaatcaaatgtaagcattaataatatttatcacaaagccatattactttctattattttatccagttaggatgtactaaagcagtgcccttttggcccaaacctctggatttaaccactaactactttgcataagaagtataatgtatatttttaaatctmaaacatattcaatgtaagtcatattttaaaacctaaacattgatcaagaccatcctggctaacacggtgaaaccccgtgtcaactaaaaatacaaaaaaattagccgggagtggt

SEQ ID NO: 561336 - DNA, 394 bp, Homo sapiens
aaatcatttagaaataagctatgggccaaaaaactgaaagatcacaagaattagaaatattgagacctgaatgttaatatacatagtatctatcaaaatttttggaatgcaactaaaacagtgcttagagagaattatagtcttaaatgtatatgagacaaaaggctaaaacttcacaattgaaatgtccatcttgggaaatataaatttaaaaaacaagcaaacaacaagttaaacccaaaataagtataaagattaatacagagactaataaaattaaaaaacaagcattcaatatgcaaaatcaacaaaattaaaagtaggttttttwaaaaaaactaataaaaattaggaaatttctaacagaatggattaaaaaaatgctaacagtagg

SEQ ID NO: 561337 - DNA, 535 bp, Homo sapiens
gtgtcacgaagttctcatgccatgattttcagctccatcaggtcactcaaggtcttctctacactgtttattctagttagccattcgtctaatcttttttcaaggtttttagcttccttgcaacgggttcgaacatcctcctttagcttagagaagtttgttattaccaaccttctgaagcctacttctgtcaacttgtcaaagtcattctccatccagctttgttccattgctggagaggagctgcaatcctttggagaagaggcactctgatttttagaattttcagcttttctgctctggtttctccccatcttcgtggttttatctacctttggtctttgatgttggtgacctacagatggggttttggtgtagaygacctttttgttgatgttgatgctattcctttctgtttgttagttttccttctaacagtcaggtccctcagctgcaggtctgttggagtttgctggagttccactccagaccctctttacctgggtatcaccagcagaggctgcagaacagcaaa

SEQ ID NO: 561338 - DNA, 629 bp, Homo sapiens
ctttgtttatctcagtgtacttcctggtgggataggctgtttttaacctgtgctctactccaaacacacagacatagcagagacaaagaccaggactgggtactaggagagggagggaagaataccagaaccaaagcttactgcaaaaaaggcccaaggcatggctccaggaaaaataaatctaaccatgagcatcagcaacatctgaatttttgagctggatttttgtcccattcatccaagaatcttcaaaacttatgtacataatatttttgatgcattcgaaaaaggaggtacagactcatctaaccaacagagctgagattcttcatttagaggccaaagagataactgaccctctgtgrcctctaagtgaagaattctggctctgttggttagatgagtctgtccatcagaagtaacttcttttctgagtggtagtctcacctccctgccttggcgaaaggactggggtctagatgggggaagtgtctatggagcagaaactgttgacatggagtttcttcccaccttactccaaagctgattctgggatctggaatgagggaggccctttgcatcgagcaattgaagaagggagatgggactggtaaatcagaggtcaccca

SEQ ID NO: 561339 - DNA, 629 bp, Homo sapiens
ctttgtttatctcagtgtacttcctggtgggataggctgtttttaacctgtgctctactccaaacacacagacatagcagagacaaagaccaggactgggtactaggagagggagggaagaataccagaaccaaagcttactgcaaaaaaggcccaaggcatggctccaggaaaaataaatctaaccatgagcatcagcaacatctgaatttttgagctggatttttgtcccattcatccaagaatcttcaaaacttatgtacataatatttttgatgcattcgaaaaaggaggtacagactcatctaaccaacagagctgagattcttcatttagaggccaaagagataactgaccctctgtggcctctaagtgaagaattctggctctgttggttagatgagtctgtccatcagaagtaacttcttttctgagtggtagtctcacctccctgccttggcraaaggactggggtctagatgggggaagtgtctatggagcagaaactgttgacatggagtttcttcccaccttactccaaagctgattctgggatctggaatgagggaggccctttgcatcgagcaattgaagaagggagatgggactggtaaatcagaggtcaccca

SEQ ID NO: 561340 - DNA, 561 bp, Homo sapiens
ctaccaggtcttaatataaaacagatcatcgtgttacaagaaaactacaaggagcaagggttatttttgtatgtggcattagagtatattctttgtatttttcacagggaatcagagacattagaatttcccaactgtcaacttagaagttttcttatttagactttaggtttggttcctgtattaactagatatgcaattttagcaagtcttgtcacctctcagagttaaagtttgctcttcaagaagatatgggagttggatcaggtcatctagaaggttatctaaaggacttcttctctgtaagtgaaattacaaagacagctagcatttgttatacataaagaggtaatagatttgtttcttttcctccagaagattatagtactagagagttaagattggggtgaagataactctctaaataaagaagcctgtgctgaaggaaaattaaccagagaagagtgctggagatgagcaattcaaggtgaatactaagagaagaaagtgcttaagtaaagagtagtgttagtgttrgtctctttctggaacacagttctg

SEQ ID NO: 561341 - DNA, 594 bp, Homo sapiens
tgggcagcagaaagtgcaggattgcaaaacttggaaggagagcagggggtccacatgctccccaggctccctcagtcacacagggcagagagtccgtctcgctgtgctgaggaggtccatccacaccatagactcaactacgatggcccaatgtctaacagacatggaattcagtccccaagtgatagaaaaaaaaaatggaatggacaaaatatatgcggataagtgacttaaattccccaaatttgttgcaaaacatctacctagatatctaagaagctcagcaaagcccaaccatagtaaatacagagacaaccacacctcactcagcaaactcttgaaaaccaaagacaaagagaaataaaactaaaaagtcgcaagagaaaaaatatacttataatayataggaaaacaaggatatcaattagagctgacttctcactaacacaatggaagccagaagaaatgggatgaaataatcaaggaataaaagaaaaaatatggcgaacccagaattctctaaccagcaaaaagtatcccccaaaaattaaggtaagagaaatatcttttagataaatgaaaattaagaaaatt

SEQ ID NO: 561342 - DNA, 413 bp, Homo sapiens
taaagatgttgtctaagtccattagggctaccataacaaaataccttagacaaggtgacttataaacaacagaaatttgttgtttataaggctgagaagttcaggatctgagaaggctgagaagttcaggatcaagccaccagcaaagtaaatgtctggtgaggatccagtttctggttaacagataacaccctctcactatgtcttctcatggtaggaggacaaacaggctccccagggcctcttatataagggcactaatcccagtcaggaaggccccaacctaaaggttctacttcttaatactaatgcattggaaattaggtttcaacwtatgagtctagggagacacaaacattcatatcatagcagatacaaatagatcctatttccacttctctttataatcaatc

SEQ ID NO: 561343 - DNA, 380 bp, Homo sapiens
atagtaggtgcctctgctaaaatcacacacagaaaaatgatacttggtgtgatttattrtttacattgtacaagtgccctaaaaatcaacaaaaagtttaaaataaaatgaggtataagttttggagaagaggaagcaaaattactattatgtgcagtcaatacgattattacataaaaaaatcaagaaaagtgacaaattatatttgggctaaaaagataataaagtggtttattacaaaataaacacagataaattattagcttttccatatagtcatggagtaatagcatttaatggtataaataaagtacacatcacaacagaagcaaaatataaaattctataaatataaaaacctctgtttttgagaaaaagga

SEQ ID NO: 561344 - DNA, 380 bp, Homo sapiens
atagtaggtgcctctgctaaaatcacacacagaaaaatgatacttggtgtgatttattatttacattgtacaagtgccctaaaaatcaacaaaaagtttaaaataaaatgaggtataagttttggagaagaggaagcaaaattactattatgtgyagtcaatacgattattacataaaaaaatcaagaaaagtgacaaattatatttgggctaaaaagataataaagtggtttattacaaaataaacacagataaattattagcttttccatatagtcatggagtaatagcatttaatggtataaataaagtacacatcacaacagaagcaaaatataaaattctataaatataaaaacctctgtttttgagaaaaagga

SEQ ID NO: 561345 - DNA, 380 bp, Homo sapiens
atagtaggtgcctctgctaaaatcacacacagaaaaatgatacttggtgtgatttattatttacattgtacaagtgccctaaaaatcaacaaaaagtttaaaataaaatgaggtataagttttggagaagaggaagcaaaattactattatgtgcagtcaatacgattattacataaaaaaatcaagaaaagtgacaaattatatttgggctaaaaagataataaagtggtttattacaaaataaacacagataaattattarcttttccatatagtcatggagtaatagcatttaatggtataaataaagtacacatcacaacagaagcaaaatataaaattctataaatataaaaacctctgtttttgagaaaaagga

SEQ ID NO: 561346 - DNA, 516 bp, Homo sapiens
agacacacctacattaggggcctcataacatgcagtgaccagttcattagtgaaacttcctccaatgagtttcctagaattttaccaattagattagtattcattctcactgcagagcatgggatagaattttacagggaaaaggtgctctctgtatgagaaaaccactctattgtaattctgtgtaaatatgtgtataaaacatttggaaagacgttcccaacatgaaaactctgattatctatgaaaactacaaatgaytatcacttttctaaaaaaatacatttttagtcttggtgtggtagttcatgctacccagcactttgggaggcctaggtgatcacatcacttgagcccaggagttcgagatcagtccagacaacatcaggtgagtccccatctctaaaaaatatgccaaaaaaataaattagtcaggtgtggtggagtgcacctgtggttccagctacatggtgggctgatgcaggaagatcacctgagcctggaaggcagaggttg

SEQ ID NO: 561347 - DNA, 516 bp, Homo sapiens
agacacacctacattaggggcctcataacatgcagtgaccagttcattagtgaaacttcctccaatgagtttcctagaattttaccaattagattagtattcattctcactgcagagcatgggatagaattttacagggaaaaggtgctctctgtatgagaaaaccactctattgtaattctgtgtaaatatgtgtataaaacatttggaaagacgttcccaacatgaaaactctgattatctatgaaaactacaaatgattatcacttttctaaaaaaatacatttttagtcttggtgtggtagttcatgctacccagcactttgggaggcctaggtgatcacatcacttgagcccaggagttcgagatcagtccrgacaacatcaggtgagtccccatctctaaaaaatatgccaaaaaaataaattagtcaggtgtggtggagtgcacctgtggttccagctacatggtgggctgatgcaggaagatcacctgagcctggaaggcagaggttg

SEQ ID NO: 561348 - DNA, 640 bp, Homo sapiens
tagtgaaatggtattgtgttttaattaatttgaaattaaattaaaacaatccctgtttattgctggtttataggaaagctattgacatttgtatattaaccttatatcctgcaattttgctatgattgtttattagtttcagaaattttttcattggttctttcagattttctacatagataaatgtgtcttctgcaattaaagaaaactttatttcttacttcccaatcagcatacttctatttcctcttattgccttactgcattagctagaacttctagtacaatgttgaaaaggtgtggtgagagagaacatcattgccttgtttctgatcttagtgaaaaatctttgagtttgttactataaaagataatgttarctgtagatgttttatagatattctatatcaagtcgaggaaatggttcactatttttagtttactgagagctttaatcaagaatgagcatgggattttgtaaaatcctttgactgtatctattatgtgatttctctattgatgtgataaagtaaattaattatttttgaatattgtactggctttgcatatctgggataaatcccacttggttgttgtaatggttaatattgagtgtcaacttaattaaaagatgcaaagt

SEQ ID NO: 561349 - DNA, 551 bp, Homo sapiens
ttttggtttactttatttttcctttactgacacaactttttttggctttctgtcagagccacagactgttattttcttgtttgcttttgttttgttttgtttttcctatgttgactttggtaaagttcccactaaatggctattgtattaagccttctactttggggccatagtaactgtttgctgattgtggtatagatttataatgttgatttattccagaacatggtataagaataccactttagcatggcctttggctaccagatatgtcactgtgcaaattcattttttagtttattcttacagcttgttgcagttrcatcatcttatggaagatgctcaaaaagaagcatccttagaagatggcccttggtttctaggttagcctatttggaaacttggttgatggtatccagggaatgtggaaattttgaactacctccatgtgactggggatttgggacactcattttcacccatgaatgtcatgtcaatagaaccctgggccattggctataactgaagccaatgtggttccttttgtaaat

SEQ ID NO: 561350 - DNA, 594 bp, Homo sapiens
tgggcagcagaaagtgcaggattgcaaaacttggaaggagagcagggggtccacaygctccccaggctccctcagtcacacagggcagagagtccgtctcgctgtgctgaggaggtccatccacaccatagactcaactacgatggcccaatgtctaacagacatggaattcagtccccaagtgatagaaaaaaaaaatggaatggacaaaatatatgcggataagtgacttaaattccccaaatttgttgcaaaacatctacctagatatctaagaagctcagcaaagcccaaccatagtaaatacagagacaaccacacctcactcagcaaactcttgaaaaccaaagacaaagagaaataaaactaaaaagtcgcaagagaaaaaatatacttataatatataggaaaacaaggatatcaattagagctgacttctcactaacacaatggaagccagaagaaatgggatgaaataatcaaggaataaaagaaaaaatatggcgaacccagaattctctaaccagcaaaaagtatcccccaaaaattaaggtaagagaaatatcttttagataaatgaaaattaagaaaatt

SEQ ID NO: 561351 - DNA, 587 bp, Homo sapiens
gtcccagggctggctgctgcccctctcacaagtagcttaaatggcttagacagcaggctgccacagctgtggggctggctgcccctccccttgggagctcggtaggcttaagcagattccaactgaaaggctgttgagaatctgcacagctcctgggttgggatgctaggccctggtggcgtggtttcacaagtgggatcttctgctctgtgggttgcacagttccatggaaaaagcatggtttccctagctgggtagcacgctcactcaccacctccctagctggggtgagaagactcccttgccccatgtggttctcaggtgggccactgcaccacactgtccttttttcctctccaaggatcacaccagcctcctagtcagttctgatgagagaatctggataccttagttgctggtgaaggattcacatgcttattattattcacatgcttattgktattattcacaagcttattattatggttcttttcaatgagagcctccaaacactgctctttctagatggctatcttggccccaccccaccaaacataggtctttaatacctaattaaggtccaggag

SEQ ID NO: 561352 - DNA, 437 bp, Homo sapiens
aaaaaatattaaaaaccactaagtgtcagagtytactcaagttggtagtgttgtctcatgggtaaaaattagaaaaaaaataaatcactggtgtcatggaacttgtaacctaatggaggaggatagacaacacaaagaaacagaaagatggataatctttcaaactcacaatctcaacaaattgtcctacttaaaactgcaatttcttatcagcagtaagcatttgtcaccagctgacatattatatcttttatttgttgatttgattaatacctttttcctgcagctagaatctgttttatttatttgtaaacccaaggagtatagaatagtgtatattagagaatgggacttctataaatagctgttgaatgaatcagcaaattatatatgttagaaggtgataagtgatagcaaacttaggagaaaacagttgc

SEQ ID NO: 561353 - DNA, 538 bp, Homo sapiens
taagtgtccagaaagaaagaacaattatccataaagagaaaactaggactggtactggtctaatcatcaactctagaagctagaataaaatgcaacaggatctaaactaactgaaaygaaaagcagcagaagttattaaccttttttttttagatggagtctcactctgttttcctggctggagtgcaacggcacgatctcggctcactgcaacctctgctttccaggctcaagcgattctcctgcctcagcctctcgagtagctgggtaaacaggcgcccgccaccatgcccagctaatttttttttttttaagtagagacagggtttcactatggtggccaggctggtctcaaactcctgatctcatgatctgcctgccttggcctcccacagtgctgggattacaggcatgagccaccatgcccagcttagaagttatgaatcttatactcagccgagatacccccgatttgttacgggatggcaaaaagatatttaaggctattcaagattaccaaaattacaccactaaagca

SEQ ID NO: 561354 - DNA, 538 bp, Homo sapiens
taagtgtccagaaagaaagaacaattatccataaagagaaaactaggactggtactggtctaatcatcaactctagaagctagaataaaatgcaacaggatctaaactaactgaaacgaaaagcagcagaagttattaaccttttttttttagatggagtctcactctgttttcctggctggagtgcaayggcacgatctcggctcactgcaacctctgctttccaggctcaagcgattctcctgcctcagcctctcgagtagctgggtaaacaggcgcccgccaccatgcccagctaatttttttttttttaagtagagacagggtttcactatggtggccaggctggtctcaaactcctgatctcatgatctgcctgccttggcctcccacagtgctgggattacaggcatgagccaccatgcccagcttagaagttatgaatcttatactcagccgagatacccccgatttgttacgggatggcaaaaagatatttaaggctattcaagattaccaaaattacaccactaaagca

SEQ ID NO: 561355 - DNA, 514 bp, Homo sapiens
tttccatggggagaaagcatgcaatcagggtctctagtctgtgtgcacacgtgtgtgtgcgcgtgtgtgtgtgygcgcgcgcactcatatgcacagctcagatgtccaggacttgagatgagaatggaaagcaccgaataagaagaaagctgccacacagtaggctgaaggagaatgactacaacctttaggctgaaaaaaaaaaacactacatgctggcgtgtatccttgtggatatgtggaaacacaacaaaaatattggtccatcctggctgcagttttaaaggaaaggaagatctcccggcatcaacatctcttggagatgaacgcactatacatgcaagttcaaatctatcatcttccaccagtcaacccaagctacattccccttccatttattatcaaaggaataagcacttttgtttcccaggcttaactcctcaaaatcatgagcttttcttccctacctttcccttcattcgaactctttcctttcaaaatgtttattgaattc

SEQ ID NO: 561356 - DNA, 590 bp, Homo sapiens
ttttttcttttttttttttgacagagtcttgttttgtcgcctaggctggagtgcagtggtgcaatccgggctcactgcaaccaccgcctcccaggttcaagcaattctcctgcctcagccacccgagtagctgggattacaggcatgcaccaccatgcctggctaatttttgtatttttagcagagacagggtttcaccatgttggccaggctggtctcaaactcctgacctcaggtgatccacctgcctcggcctcccaaagtgctgggattacaggtgtgagccaccacacccagaccaagactcttttctataatagccaggcagcactatcatatcaccccttttaattctctgacattgatatgtgtgttcctctccctttctctcctattcaattgattgtaagcttcatgaagcaagggggactttgctgtttttgttcatgctgggtcatgccgggttatgctgggtctccagtgtttgtaatggctcctacgatatcatggacacccaacacacgcttgggggataamtcaatgaacggcagataagtctgtctcttctcacagtggcttagggttcagat

SEQ ID NO: 561357 - DNA, 541 bp, Homo sapiens
gaattctgtagccctggccgaggcaggttttgctgtaagaaatcttttcagtttagcaccaacatcttcctaggtttcctgtctagacagtgcaaagcagtggaacatgcgagaaacgaaaaagccatggaaagggaggragacatgcttgcaaataggcctcaaaaatggaggtctcccactttattggtatcagaattacttggagagttttttagaagggtagatccccaggccccgcccccacctccaaagtcctgagcagctggaggtacacagtcatttggagggggaggaaaactgatggattctacctgaggcaaaaagatgagggaaaggaacaaagaaaaagggctgaaaaaaggtctataaacacatgggtggaaatgagcaaaagcacagaagaaacataaaataacaaacgtggctcatggagctgagtggaacagcagcagccaggcatatgacctcggtgagaaagcaccatgttgcacgaggcttcataaattctggttctccctggagtctctgcttctagaac

SEQ ID NO: 561358 - DNA, 541 bp, Homo sapiens
gaattctgtagccctggccgaggcaggttttgctgtaagaaatcttttcagtttagcaccaacatcttcctaggtttcctgtctagacagtgcaaagcagtggaacatgcgagaaacgaaaaagccatggaaagggagggakacatgcttgcaaataggcctcaaaaatggaggtctcccactttattggtatcagaattacttggagagttttttagaagggtagatccccaggccccgcccccacctccaaagtcctgagcagctggaggtacacagtcatttggagggggaggaaaactgatggattctacctgaggcaaaaagatgagggaaaggaacaaagaaaaagggctgaaaaaaggtctataaacacatgggtggaaatgagcaaaagcacagaagaaacataaaataacaaacgtggctcatggagctgagtggaacagcagcagccaggcatatgacctcggtgagaaagcaccatgttgcacgaggcttcataaattctggttctccctggagtctctgcttctagaac

SEQ ID NO: 561359 - DNA, 203 bp, Homo sapiens
tgcctgctgggtgcagaggttcacacctgtaatcccagcactttgggaggctgaggcggatggattgcctaagctcaagggttcaagaccagcctaggcaacacggtgaaaccccrtctctactaaaaatacaaaagattagctgcatgtggtggtgggtgcctgtagtcccagctactctggaggctgaaacaggagaattg

SEQ ID NO: 561360 - DNA, 441 bp, Homo sapiens
ccaaatggtctcttaagagagaccaaccaacgggcagaaacactgtgggatggaaggccatgtggagtgtgaggacgcagcacagagactgcyactgtgtccatgttgcctttatcccatctcaccaagctcctcctagagcagctgagaaggccaacaatactccaatcattcctcctgactctagattttcagacaattccgccgtactgatgtttaggtaaaaggagggaggtgcacataagcaggaaagtgttctaacaatgtaggagacttgaaaacctccgagcccagcctaaccaacatggtgaaaccctgactctactaaaaatacaaaattagctgggtgtggtggtgcatgcctgtaatcccagctacttgggaggctgaggcaggagaatcgcttcaacctgggaggcagaggttgcagtgagccgagaa

SEQ ID NO: 561361 - DNA, 441 bp, Homo sapiens
ccaaatggtctcttaagagagaccaaccaacgggcagaaacactgtgggatggaaggccatgtggagtgtgaggacgcagcacagagactgctactgtgtccatgttgcctttatcccatctcaccaagctcctcctagagcagctgagaaggccaacaatactccaatcattcctcctgactctagattttcagacaattccgccgtactgatgtttaggtaaaaggagggaggtgcacataagcaggaaagtgttctaacaatgtaggagacttgaaaacctccgagcccagcctarccaacatggtgaaaccctgactctactaaaaatacaaaattagctgggtgtggtggtgcatgcctgtaatcccagctacttgggaggctgaggcaggagaatcgcttcaacctgggaggcagaggttgcagtgagccgagaa

SEQ ID NO: 561362 - DNA, 548 bp, Homo sapiens
ctccttctccttcccctccccacatccccggcctgcccttatattgcaatctcaactcctctggacagtacttttgagacacacttatttctaccacgcaccttgcgggtcgctgggggtccacgtgggcgtggaagtctctgccttctccgccagacctgcgtgggcaagactgagcatccccaagtccatggagtaccctccgggcccagtgcgctcgctcttctcagcagcactctggacaccctcccagcactggtgaggtgcattctaacctcttaattcttttatttcctttgaaggttttttttttttttttttttttttttttttgagacggagcttcactcttgtctcccaggctggagggcaatggggtgttctcggctcactgcaacctccgcctctcaggttgaagcgattctcctgcctcagcctcccgagaagctgcgattacaggcgcccaccaccacgcctggctaattttttttgtatttttagtagagatgggggtttcrccatgttggccaggctggtctcgaactcct

SEQ ID NO: 561363 - DNA, 561 bp, Homo sapiens
tttattcattttattcaaaacttcatgtctcactcaaaccctgcattttttagtttgtatacaattctaaccagtttagaaaactgatgtaccagctcagtaaatgaaaaacagcaatttcagaggggagaacaggtagagaaggactagataataaccagtaagccaagaagaagacttaggagtagaaatgtaacacttattgagcatttattatgtgacaggtactattagagatgcttaacacacaygccctcacttagttctgcagtggatgtatgctctgcacagcctctgaactcgttcttttgggatatttccgtggtgtaggttttggagacgttggattctgcttccacaagaactctaaaaggagccattttcctttccctttccgtattctttgccaaccaggtggccttccaatgggtgaggtgtactgtgatggcagaaggacaaccagagattgtgttgatgtctcagtgtggcactgaagatctgatagcagcacgccctgtgaaggcgtctacctggacggataactggcttccctgtgttctt

SEQ ID NO: 561364 - DNA, 576 bp, Homo sapiens
aaacgaaaaaagaaacaaaaatgttatgatttggatacatcgtrttaccgtttttttgctgaattttctcctgctgctcccagtttctctaatttgtgtttcagggcaaattatcttttaaaaacacttggtattctcttcctggttcactcatctctaaattttcctctagaaaatctacctcctgtctcagaaaccatacctggaaaattccctttcatctgtcctgggatccatgctttaccaacctgccaccagcccatcttatttactgtctccaggtgagaaggaaagactctttcccacctgggtacaactctccatatttcattgttatgtttatgtttttcagagacagagtctcacactgtcacccaggctggagagcagggactattcaccagcgcaatcacagctcactgtagtctcaaactcctgggctcaaacgatcctcccacttcagcctcctgagcagccaggactacaggtgcacaccaccatacccagttcatatttcactattgatttggtttattaaagaaaaaaactttctctaaagaaatgactaagaatgct

SEQ ID NO: 561365 - DNA, 576 bp, Homo sapiens
aaacgaaaaaagaaacaaaaatgttatgatttggatacatcgtgttaccgtttttttgctgaattttctcctgctgctcccagtttctctaatttgtgtttcagggcaaattatcttttaaaaacacttggtattctcttcctggttcactcatctctaaattttcctctagaaaatctacctcctgtctcagaaaccatacctggaaaattccctttcatctgtcctgggatccatgctttamcaacctgccaccagcccatcttatttactgtctccaggtgagaaggaaagactctttcccacctgggtacaactctccatatttcattgttatgtttatgtttttcagagacagagtctcacactgtcacccaggctggagagcagggactattcaccagcgcaatcacagctcactgtagtctcaaactcctgggctcaaacgatcctcccacttcagcctcctgagcagccaggactacaggtgcacaccaccatacccagttcatatttcactattgatttggtttattaaagaaaaaaactttctctaaagaaatgactaagaatgct

SEQ ID NO: 561366 - DNA, 576 bp, Homo sapiens
aaacgaaaaaagaaacaaaaatgttatgatttggatacatcgtgttaccgtttttttgctgaattttctcctgctgctcccagtttctctaatttgtgtttcagggcaaattatcttttaaaaacacttggtattctcttcctggttcactcatctctaaattttcctctagaaaatctacctcctgtctcagaaaccatacctggaaaattccctttcatctgtcctgggatccatgctttaccaacctgccaccagcccatcttatttactgtctccaggtgagaaggaaagactctttcccacctgggtacaactctccatatttcattgttatgtttatgtttttcagagacagagtctcacactgtcacccaggctggagagcagggactattcaccagcgcaatcacagctcactgtagtctcaaactcctgggctcaaacgatcctcccacttcagcctcctgagcagccaggactacaggtgcacaccaccatacccagttcatatttcaytattgatttggtttattaaagaaaaaaactttctctaaagaaatgactaagaatgct

SEQ ID NO: 561367 - DNA, 544 bp, Homo sapiens
gagagggagagagggagaggaagaaagaaagggtcttcacaagtagctcaaaaacaacatttgtcttccaatcaatctctccagtatattttggtgactaaatatttgactcgacttttgtctccaaatgtgttttccttcctccctcccttcttcctttccttccttccttcttccctcccggacccttctttcttgcctgccttccttctttccytccttcttgctttccttccttcttgccttccttccttccttcctccttccctcccttcctcccttccttgcttccctttttttttcttccctgaggaaaggaatgctttattcatatctttggtccaactaatgaaagcctcaaaaaataaactgttgctaattactcaagtgacttaatgactgaccaccaggatccagaccagattcgagtgtgatttgcattgttggctcatgtctgaactcttcacccttaggctgtatattacagtttgttacaagccacagactttttctattatgctgaaagagcataatttcatgtttt

SEQ ID NO: 561368 - DNA, 504 bp, Homo sapiens
aggaatgctttattcatatctttggtccaactaatgaaagcctcaaaaaataaactgttgctaattactcaagtgacttaatgactgaccaccaggatccagaccagattcgagtgtgatttgcattgttggctcatgtctgaactcttcacccttaggctgtatattacagtttgttacaagccacagactttttctattatgctgaaagagcayaatttcatgttttctgtgtttaagttacgtcactgccatttttaggagaaactgtggtcctgccacccttttccagtagaagagatgcggcccactcacaatgcagattcacctccaatagtgacctcttgagcaaaaaaagaaatccatttccatgttcatttgggcctttggcctgtctactgagtaggcccgcgaggctgaaaaccatgctaattacataagtgatttaatttcgataatgcaagagctgaccatcagatatcaaaccagatttgagagggattt

SEQ ID NO: 561369 - DNA, 595 bp, Homo sapiens
caaacatttacaaaattgaagggagaaaaaacagcaacacaatactaggagatttcaatgccccactttcaataatggatagaaaaatgaaacaaaagatcaataaagcaagtggacatgaccaacaccrtaaaccattggtcctaacagacatatacagaaccaccaaaaaacacggaacattatccatgagagatcacaagttagttcacaaacaagtcttaacaaatttaagaaaattaaaataatataaagtatcttttccaatcatggtggaacaaaactagaaaataatagtaggtgactgaaatattcacatatatgtggaaatttaaaaattcactctttttttctgtttttattttggtttttattttattattatactttaagttctagggtacatgtgcacaacgtgccggtttgttacataggtatacatgtgccatgttggtttgctgcactcattaactcataatttacattaggtatttctcctaatgctatccctcccccttccctcccaccccaccacaggcccctgtgtgtgatgttccccaccctgtgtccaagtgttctcattgttcagttccca

SEQ ID NO: 561370 - DNA, 597 bp, Homo sapiens
ctaattcagtgaaaaggccacatcaggcacagcactccagcttttgggagcatggagagcctgtattttaccctaggatagaaatgtcattttggtggaaagcaaacagacatatgcatataaagtgtggaaatcctggtagttttctaagttgttaagcccaatggcacattcaaatgctgaactagattgtaaacactayggacccttgcctcttgcgatttgcctgtgaacttggataaaccctaacatgaaatatggggaaagttgattgggcctattcacacgggacttgttcttttgaatagaagtctttaagacgacttatatttaaagaatggattaaaaaacttaaatactatcttaatagaatctattggtaacccagtgaatcatactggaaagagtgccttagctaaactagagttgagaatcagcccggttcccaaagttccttagcaaactctattgggttaataattttgtattatccctaggaatagtgacatctgcttcctgggtataacctactggtcaccaagaaaccagactgtttctgtgaggtgcaagaggtctctgcattgcaaacatgaagac

SEQ ID NO: 561371 - DNA, 602 bp, Homo sapiens
agcgattctcctgcctcagcttcccaagtagctggaactacatacatgagccaccatgctgggctaatttttgtatttttaatagagacggggtttcattatgttagccaggctggtcttgaactcctgacctcaggtgatccgcccgcctcggcctcccaaagagctgggattacaggcatgagccaccatgcctggccatgaatttatcatattagatagactttaaatttcatttctttcctggagggttgtataaggtagggcattaatacataaaagaaaaagggagaaacattgctctaggacagcagtcctccccaggctttggtcctccaaggctccagctatcgctggctccttccccatgatggcagccgtaggagtgacaaactgcctacattgctagtccctgggaacctcagcatcccttttttattccttggtcatgcccacactggggtaacagtgctttcacaaaattctcccgatggaaatcattttaattccattttctgctaaaacccyggggatccagattctttttttttcttttttttaagatggagtttccctcttgttccccaggctggagtgcaacg

SEQ ID NO: 561372 - DNA, 506 bp, Homo sapiens
ccactgtactccagcctgggtgacacagcaagactctgtttcaaaaaagaagaagaagtacactataargtttaggatgggacagaaaatcctgccaccaacttattccaaaatggtgttaaaaaaaaaaaagagttctttgtagtgtacttacaatttttctgtaaattcaagattgatttaaagtcagaaaatttttaaaaatttatctctcatgaattttcatacaaaagaaaatttaattttatgaaaactagaacactgataaaatttcaaaaataattttttaggatgccttttgacatatcctgaattgactcacttctttttcaccccttctgttactgcttcactctcagccagatcctctcaccagtgtgttttgtggactcctgctgttgaacttggacctattaccttcacctgtgtccgcctgggacccagtttccacacagcaaccagagtgatctctgaaaaatacaagccagatctcacaattctctgct

SEQ ID NO: 561373 - DNA, 516 bp, Homo sapiens
aagtcaacaaaaataagcaataaggaaatgacttattattcaataaacagtgctgggataacaggctagccatatgcagaagaatgaaactggacttctacctttcaccatgtacaaaaattaactcaaaatggattaaagatttaaatataagacttcaaactacaagaatcctagaaaaaaaactaggaaacaccattctgggcatcacccttaggaaagaatttatgactatgccctcaaaagcaattgcaacaaaaacaaaaattgataagtggaacctaattaaaataaagagcttctgcacagcaaaaagaaactattgacagactaaacagacaacctacagaattggagaaaatattcacaaaccaggcatctgacaaaggtctaatattcaaaatctatatggaacttaaacaactaaacaagcaaaaacagataaccccattaaaagtggacaaaagayatgaacagacatttctcaaaaggagacatacaagcagccaacaaaca

SEQ ID NO: 561374 - DNA, 407 bp, Homo sapiens
caggcgtggtggtgtgtgcctgtaatcccagctactcaggaggtagctgaatcgcttgaatctgggaggcggagagtgcagtgagccaagattgtgccactgcactctgtttcaaataaaaaaaaagatctattgagcccatttgcctcaggaccttccaggtctttgtcattcctgtttccagagtcctgaaggtcataaccatggcccacattccccccattcccaggggagtgtctagactttctgactcaagacaaattaccaaatgtataaatgcccattccgcttaatgactttacttccacttttcacagactctcagatgtggctagaaatagtcccaaaccctgyaatctttcatagagctgagctaaattaagtgggtagtgttcctccagaattcc

SEQ ID NO: 561375 - DNA, 573 bp, Homo sapiens
gaagtcacgggacaggcagcgtattgaagaaaccgcattcctatgctgaattggttccttggtgagggtctttacatttgttggcgtcagccattctgctggatttgaaaaacgccctaagcaattcatgggtaaaatggtctattgtcagagattctatctataggaataatgggttccagatgggtgcaggtagtcagtgtgctattatatgactcttagttagcaactgcaagggagtggtcaaaatgtgccctggtcaatgcctaaagataattctgcctaaaacctgacttgtaattctcgttaatcccgtgatggtggttttacttgccagaaaatggggcattagtggaaattgggcagccaatctaattgcaggaagtgaaggrgagctgctgaaaatgcctctgtatttttttttttttttttttttgagatggagtctggctctgtcgcccaggctggagtgcagtggcgccatcttggctcactgcaagctctgcctcccgggttcatgccattcttctgcctcagcctcccaagtagctgggaccacaggtgcccgccacc

SEQ ID NO: 561376 - DNA, 573 bp, Homo sapiens
gaagtcacgggacaggcagcgtattgaagaaaccgcattcctatgctgaattggttccttggtgagggtctttacatttgttggcgtcagccattctgctggatttgaaaaacgccctaagcaattcatgggtaaaatggtctattgtcagagattctatctataggaataatgggttccagatgggtgcaggtagtcagtgtgctattatatgactcttagttagcaactgcaagggagtggtcaaaatgtgccctggtcaatgcctaaagataattctgcctaaaacctgacttgtaattctcgttaatcccgtgatggtggttttacttgccagaaaatggggcattagtggaaattgggcagccaatctaattgcaggaagtgaaggggagctgctgaaaatgcctctgtatttttttttttttttttttttgagatggagtctggctctgtcgcccaggctggagtgcagtggckccatcttggctcactgcaagctctgcctcccgggttcatgccattcttctgcctcagcctcccaagtagctgggaccacaggtgcccgccacc

SEQ ID NO: 561377 - DNA, 599 bp, Homo sapiens
tctggttcaggatttctcatgaggtttcagtcaagatgctggccaggactgagccatctgaaggctgaaggatctacttccaagtttactcacatgactgttagagggcatcagggcctcattggctatttgtcatccttgaaccctgttgattccaatggggatagcaccatgtccaagaggccaaagaagaaacccagagccagcaaaccagacatagagtgtattgaggacttacacacagaatggcccaggagcgacggcctggacagaaaaaattgctactgttcataaaatgcatgcagtttatacaggaattttcacttggcatccttcayctaacaacctccaccgagttcaagacaaagaacctcagctcagttccttgcacaacctgcattccaaggaaggggccaagggctcagatgtcctttgtataggttggtgcaaaaataattgtgggttttgccatttaaaagtaatggtaaaaactgcaataacatttgcaccaacctaataaagggtaaacttctgggttggccactactggattccttagctgggaactttgaatcaacattcttcttacaccataaggt

SEQ ID NO: 561378 - DNA, 599 bp, Homo sapiens
tctggttcaggatttctcatgaggtttcagtcaagatgctggccaggactgagccatctgaaggctgaaggatctacttccaagtttactcacatgactgttagagggcatcagggcctcattggctatttgtcatccttgaaccctgttgattccaatggggatagcaccatgtccaagaggccaaagaagaaacccagagccagcaaaccagacatagagtgtattgaggacttacacacagaatggcccaggagcgacggcctggacagaaaaaattgctactgttcataaaatgcatgcagtttatacaggaattttcacttggcatccttcacctarcaacctccaccgagttcaagacaaagaacctcagctcagttccttgcacaacctgcattccaaggaaggggccaagggctcagatgtcctttgtataggttggtgcaaaaataattgtgggttttgccatttaaaagtaatggtaaaaactgcaataacatttgcaccaacctaataaagggtaaacttctgggttggccactactggattccttagctgggaactttgaatcaacattcttcttacaccataaggt

SEQ ID NO: 561379 - DNA, 623 bp, Homo sapiens
atggagatatgtccattcactcagtaaatattcatgggatgcttactatgtgccaggtgctgttcaagaatgttcacaatagtagacaaaacagacaaaaatctttgtctccatggagattacattctagtggagaggtgagaaaataaacaaaaacaaatatttaaattataaagtatactagatggtaagtactagatggtaaatccaaaggcagctggatgtgcaagggtggatgggggctgatggtgcaaaaagagtggtcacacttctttaaattctctgagcaggaatgtttgcattaatgactttatrgaggcaaaagagtgagctgcatggatacttggagaaagtacattccagacagaaaggattgcaaatgcaaaagccctggcctgctcaaggaatagccaagggggctggagcaaagtgaacaagggggagaatataggaattaggtcaaagaaagagaaatggccagatcattttggtccttatagaccatagacatgattttgttttgctctgcttttgttactgttttaactttttaaactgaaatacaaagagaaaaactatacgaatcttaaatgtcagctcaatgaattatcataaaatgaaca

SEQ ID NO: 561380 - DNA, 464 bp, Homo sapiens
cccacgattgctccatgtttttatattcttacctctctccacagacctatgatttttcaaataaagtaaaaataaaagggtcattttacagatgcacaaacagcagcagcatgcggaaagtctcaggacatcaccaaaacataatcaagaagttattttgtattaggatcaccatgcataactgagttttcaattacatgtttttaaatttaatcctgccctatgctatcaatatctctattatctgcctctctgtagtctccagtcctctctctgtagttatgaggggtgggctgaggttccagttccaattaacctasctcatcttcctctttttcccacagagtaaacccactttttccagggcaactgcccttgacaatgtcgtgtaagttgctgaaaggcctcagaggaattcgggaatgacacgtcttctgatcccatgagacagaacaaagaacagg

SEQ ID NO: 561381 - DNA, 552 bp, Homo sapiens
  misc_feature 438: n = A,T,C or G
tggtttccttttatttaaatatgtttatgtattttgcattttagaataaaaacatttccttctcgagtgaagattttttttcttttcttttgaggtggtggttaagttctcatgtaataggatagttggttgctattagaaatatgttttttcctttgttatgaaatggaaaattgtcagaaactgataggctgtggttagatgaggtttgctaccaataaagaattatcagggtaaactgaactttcatttaggatgcaaaaatatttgttttgcttggcagcatggcataaaaagaaaatccaagaaacttcttgtttcaggagctgccagttctctctgtggctcaaagaacgtttcgtgtctcagccacaagaatttgccgctggttctgatgttcattgtcttccctcctcacgcacgctatgctttcagctnttggctttacagccctttgctatragatgatgaaagtccttccagggctactcattaactttcccttctacatcttactggtatgaatagtgggagcctttcatctttattgtt

SEQ ID NO: 561382 - DNA, 629 bp, Homo sapiens
tacaggcacccaccaccatgcccgactaatttttgtatttttaattgagacagtgttttaccatgttggtcaggctggtctcaaactcctgacctcaagtgatctgccygccttggcctcccaaagtgctggaattacaggcatgaggcaccgcgtctgtccatagcaactttatgtgtaataggcaaactgggaaatgactcaaatgccattgaaacgtgaatcgatagataaattatggtgtatccattcaatggaatatgacttatcaatgtaaagaaataaactcattctacagttacaacatagatgaatctaaaaataaatatgctgagccaaagaagccagaccaagtaaaaggaggagtacatattatatgattcatttatatggaaatctagaacatgcaaactaatctatagtgacagaaagcactgtcaggatttgcttagtaacaaggtggaacagatgtgtcagagagggattttaaagtgaggaaacttcaggaggtgatggatacatccattatcttgattgtggtgattggttcatatgcatgtacatatatcaaaactaaactatacactttcaatatgtgtagtttttatattattataatatatgtaaaa

SEQ ID NO: 561383 - DNA, 629 bp, Homo sapiens
tacaggcacccaccaccatgcccgactaatttttgtatttttaattgagacagtgttttaccatgttggtcaggctggtctcaaactcctgacctcaagtgatctgcctgccttggcctcccaaagtgctggaattacaggcatgaggcaccgcgtctgtccatagcaactttatgtgtaataggcaaactgggaaatgactcaaatgccattgaaacgtgaaycgatagataaattatggtgtatccattcaatggaatatgacttatcaatgtaaagaaataaactcattctacagttacaacatagatgaatctaaaaataaatatgctgagccaaagaagccagaccaagtaaaaggaggagtacatattatatgattcatttatatggaaatctagaacatgcaaactaatctatagtgacagaaagcactgtcaggatttgcttagtaacaaggtggaacagatgtgtcagagagggattttaaagtgaggaaacttcaggaggtgatggatacatccattatcttgattgtggtgattggttcatatgcatgtacatatatcaaaactaaactatacactttcaatatgtgtagtttttatattattataatatatgtaaaa

SEQ ID NO: 561384 - DNA, 601 bp, Homo sapiens
atttgctttaattaataatttctgaaaattagattcactggcaccttgactttatctgatgtctagcaattatgagttcctatttaaactcataagttgtttcaagtcatagacttcataaatgaagtgaaactggagtcaagatttctctgttctgtgtcatcacagctttgcctttttactagctgggtgaccttagcaagtcacctctctgagccttgtttttttmatttgtaaaatacagattataaacctaccttaaaaaatgttgtaaagatgaaattaacaaaaaatataaaggccctgaatacgctcaacaaaaaaagtttgtttcatttatctacagaacataaaaattgtttttagccttcattttacaaaaacagagatgcccatttttctaatttcagggttatattgtacaatgtcatttcaattgaatgaatcaatggacacattaatttagaagaataatacttaaatttacagccattgacttatttggacaataattgactttatagcagtagaaataatgaaagatacatttgctttcccataaaaatgtgattttagtggagaataacgttcctgaagggat

SEQ ID NO: 561385 - DNA, 561 bp, Homo sapiens
attccatgaaaatggaaattaaaaaagagaaaaagtagctatacttacataagataaaatatatttcaagacaaaaactggataaagagacaaaraatgccattatataataataaaggggtcaattcagcaagaggatataacgattgtaaatatatcttcacccaacactgaagaacccatatatataaagcaaatattattacagctaaagagagatggatcagaagaagataatagctggctactttaacatcctactttcagtattggacagatcttccagacacaaaagcaacaaacactggacttaatatgcactgtagatcaaatgtacctaatagatatttacagaacatttaatccaacagcttcaaaatatacattcttcccctcagcacatggatcattctcaaggattgatcatatggtagcacacaaaacaagtcttaagaaattcaaaaaaattgagaatatatgaagtatcttctctgaccataatggaataaaactagaatcaataacgaggaattttggaaactatacaaacacatggaaatt

SEQ ID NO: 561386 - DNA, 469 bp, Homo sapiens
tgagcaactatatctcaatagattggaaaacctagaataaatgaataaattcctagacacacataacctaccaagattgaaccatgaagaaacccaaaacctgaacagatcaataacaagtaataagattgaagccctaacaaaatgtctctcagcaaagaaagttctgggaactgatggcttcactgtagaattttactgaagacttaagtaagaactaataccaagtctactcaaaactattctaaaaaataaaggaggggggaatacttccaaactcattctacaaggtcaatattagcctgataccaaaatcaggcaaaggtatatcaaaacaagaaaactacaggccagtatscctgatgaatattgatgtaaaaattctcaacaaaatattagcaaaccaaattcaacattacattaaaaagatcgttcatcaggaccaagtcagatttatcccagagatgca

SEQ ID NO: 561387 - DNA, 543 bp, Homo sapiens
ccacccaaagcaatctacagactcagtgcaatccctaacaaaataygaacaacgtgcttcacagaaatagaaaaaaaatcctaaaacttatatagaaccataaaatattcagaatagacaaagccgtccttagcaaaaagaacgaaactacaggaatcacattacctgacttcaaattgtattacagagctatagtaaccaaaacagcatgctactggcataaaaaaaagaccaatggaaaaaaatagagaacacagaaacaaatccatataccaacagtgaactcatttttaacaaaggtgccaagaacatacatttgggaaaggacagtctcttcagtaaagggtgctgggaaaactggatatccatatgcaggaaaatggaactagacccctgtctctcaccatatacaaaaatcaaatcaaaatggattaaagacttattaaatgtaacatctgaaaccatgaaactactaaaagaagactttggggaaactttccaggatattcaatggggcaaatatttcttgagtaataccttata

SEQ ID NO: 561388 - DNA, 610 bp, Homo sapiens
taagcatcgtctggttaactggacaatacattggtgctacaaatattggtttataaagtttccttatccagattcccatgtgttttccttttatgtttccttctcaggaaagggctttatcccattagaaataactgggagttaatatttgtagtggagaaaatcgcctagtcagagcattcaaaagcatggcttcctatacacattgggcatagtggtaggtgggcaaaatattggtcaggtgagcctttaaaaaaaaacagctgtttatgttgtgaaactctattggtgaaccctggaagaaractggaagccagtggagggcatcaaggagagaaagatgatggaacaataacctgcccccacctggcatgatggatggaaagttagcggggccagggatagcacctgaagtagttcaggcaaaagatgatgtgggtgatgatgatgagaacctagattgtagtcaaggaaatagaatagcaggctcaacagaatgacaaccattgaagaagaaaaatcatcaagatcagcaaagagagctttaaaaagtgaccctggactatctagacatagagatgagggcctgatggttgttaattatatttgg

SEQ ID NO: 561389 - DNA, 489 bp, Homo sapiens
ttcttttactgaagcaggaaaggagtggtgtggggagagagtatgcacttcttttaagaaaggatttggtagtatttaaaatgagtggcctacaaggtcaagacagcacaggttccagctgcccctgaaaatcttttcaatgttgsctttaactcaagcctgagtttgggtgggccgtggtttcagagatgacagccatcagtttaacaaagattttaaggcacaaaagatagtttgaaaagacttctgtgatttcaagtgttacagcacaaagtcggcttacttcaaactcattttccagacataatagtacagggataggaactgctacttacagactacttactctgaatagctgctttctatcctgcagcacgtgggagaacagtggagggaaagcaaatgcctcagacccagaacattcaaaggcaccttgtagagaaagactagctccaacggtctgcaagacttggctctaacttgaataac

SEQ ID NO: 561390 - DNA, 596 bp, Homo sapiens
actacttactctgaatagctgctttctatcctgcagcacgtgggagaacagtggagggaaagcaaatgcctcagacccagaacattcaaaggcaccttgtagagaaagactagctccaacggtctgcaagacttggctctaacttgaataactgtgttaaatcacctaagaaaaggatgcgtagatgtgaagggaggttgattttcctagaaactcagaaaaactgtcacctgagctacaactactagcgctcattaatgaaacgttccaaaaagtgcagggtcccattagcaaggtcatttctgcagtgacctgaatgcaycagagtcccaactccctgcctgcaacgatagaaactttgatttatccaaattcccttgttggactttgtcccctccagaaacaccaacgttctgtagaatttagctttccttgcaggtctgagactagggaaagattatgttggtcatgagcacacaagtatcccagcaactggacttgttctatttgctactctcttttgtttaaatattaacaaattttattgaggatctactatgtgtcaggcaccattctaggcactaaggatataataa

SEQ ID NO: 561391 - DNA, 625 bp, Homo sapiens
tttaaggaaaactgggttttgaaagagagattactttctcaaccatataatatgcttcaaatatttgaggaatacaaataataaaaaatatataaatgtctttaactagatcttacaggcaaaatcaattgttttgaaagctacagagaattgtaatgaaactatatcagaatatcttgataacaattaaagtttacattaattttaaaatgctatttttaaaaagttactaaaatgtggtgggaaaagttttccaaaactatgtactttgattgattacatcttttaaaggacatgaaaaggagaaaacatgataaaacacttgaagttatgtagaaactaagaacatgaaaatgtgatgagagaatatttttaatatgcccattttcaataaagaaaaaagaataaatagaatgcacttaaccaggtacaaagtaaagccaagattttagcttatgacygtctttggtcccattcaaaaagtaactggcgaaacaaatgaacaaacaaacaagttcaagatacgaagatcaagatagcatcattcgatctctccttattggaattttattctctggcactactgaatcttcttcatttccatatcatatctagatatgacaaa

SEQ ID NO: 561392 - DNA, 625 bp, Homo sapiens
tttaaggaaaactgggttttgaaagagagattactttctcaaccatataatatgcttcaaatatttgaggaatacaaataataaaaaatatataaatgtctttaactagatcttacaggcaaaatcaattgttttgaaagctacagagaattgtaatgaaactatatcagaatatcttgataacaattaaagtttacattaattttaaaatgctatttttaaaaagttactaaaatgtggtgggaaaagttttccaaaactatgtactttgattgattacatcttttaaaggacatgaaaaggagaaaacatgataaaacacttgaagttatgtagaaactaagaacatgaaaatgtgatgagagaatatttttaatatgcccattttcaataaagaaaaaagaataaatagaatgcacttaaccaggtacaaagtaaagccaagattttagcttatgaccgtctttggtcccattcaaaaagtaactggcgaaacaaatgaacaaacaaacaagttcaagatacsaagatcaagatagcatcattcgatctctccttattggaattttattctctggcactactgaatcttcttcatttccatatcatatctagatatgacaaa

SEQ ID NO: 561393 - DNA, 625 bp, Homo sapiens
tttaaggaaaactgggttttgaaagagagattactttctcaaccatataatatgcttcaaatatttgaggaatacaaataataaaaaatatataaatgtctttaactagatcttacaggcaaaatcaattgttttgaaagctacagagaattgtaatgaaactatatcagaatatcttgataacaattaaagtttacattaattttaaaatgctatttttaaaaagttactaaaatgtggtgggaaaagttttccaaaactatgtactttgattgattacatcttttaaaggacatgaaaaggagaaaacatgataaaacacttgaagttatgtagaaactaagaacatgaaaatgtgatgagagaatatttttaatatgcccattttcaataaagaaaaaagaataaatagaatgcacttaaccaggtacaaagtaaagccaagattttagcttatgaccgtctttggtcccattcaaaaagtaactggcgaaacaaatgaacaaacaaacaagttcaagatacgaagatcaagatagcatcattygatctctccttattggaattttattctctggcactactgaatcttcttcatttccatatcatatctagatatgacaaa

SEQ ID NO: 561394 - DNA, 355 bp, Homo sapiens
gatcaaaaaaattaattttaattcctcgaatctcagttttcttcatctcagcaaatagttcataatttgcctacatgtttgaaccaaaaacctgggacttatccttgattctacccattccttcacttcctatccttgatctaacaagtcttgttagctttccttcaagatagatcccaaagtggtataattttttccagtttttccttcatcttttttcaactactctgatgggaataaaatccaagtttctcctccaagattacaaagattcaarccctacaagatctagtcaatggatggcccagcataccctccttctcttcaaacattcaggtggtgttttctgtggggc

SEQ ID NO: 561395 - DNA, 574 bp, Homo sapiens
tcttggctatgaatctgtggaatctatagttatttgaagcattccagacaaaaaatgagtaaggatggcttctgccacrgggaggtgggtcagaaactcgactggaggtttctccttggtgaactccaagctcaaaatgaaaaagtcttatttaaatgcctccagcctagtgtcagctgtgctctgggtaattaattgaaaaattacatggccagattttagccaaagagaagagaagatatcccagcacaccattcatgccttaagcagatgtgatgatggcagaggtgataagtgagagatcctctagtcaaggaaaggtgggtctcaaaggccaaggttctgttgccccaccccacgtagggcaatatcctactctattgtcattcttgaaggggctgatgtggatctgatgtttaaaataatcagataataaaagataaataatttataataataaaataatataaagaattaaataaatttgattaaagaaagtaacttctttatagtctcaagaatgtttagaaaatcataaagttaaagaagaagcatttggagagataaacgaaac

SEQ ID NO: 561396 - DNA, 591 bp, Homo sapiens
gaatgctcaagttctgtacatgaaaatgtggacctttacacctaaagcaattatattttttctaattttttcaggaaaaattttaaaataatcacaagatatattctgctttgagtttgaattcagagttctgcattaaacatttccctggaaacataaatcagtatctggttccctcaaaaggccaactatcagtcattgggttagttctactacaatgaaatacattgggggaaaactcttgatttactttcatgaaatctataacccagattgatcacaaagcagcagcaagataaatatgtcaagtgggactaagcagtttataaataaaacctgtatgaaaatagaaggcaatacagaaattataatgaagttgatatgtggtggaaagtggggttcatagccttaagatgtcttattaatttttatttctataacaartctaagtaaaatataagaatccagggaaaatgcctagctctacttaacacacacacatcatgctgctgtatatagattgctttggcaaaatgtgaaaaatcaccaaggatgataggaggagtgacaagttagaaacatgaaaaactg

SEQ ID NO: 561397 - DNA, 376 bp, Homo sapiens
tatctttccctgggtaggcaggtgatttggtgatttagcgctggtggcccagggctggcaccgctctgccaactggaggtttctgcttataaattcaaggcagctgcttcagctctcgctctctcctggccatcaggaagggaaaatgggcccaggaaagtcatagccaattgctgtttctttgtttcaattttaatttttagtttttcgttaaataaaaaattagaaacatacataatggtagaaagaataaaattttgacccaccccctcaatatgctcatsacacaggtttaatgattgttagtatcatattcaaattcttatccgtttatttttagatattttaaataaattgcagacgacatagcatttct

SEQ ID NO: 561398 - DNA, 551 bp, Homo sapiens
aaaattaataattctttaataccatctaatatttagtccacatttaattttttcataatgtattatagagtttgtttgtctaaactagaattgatttcctatcacaacctctttatctttgtcagaaatttacttgttagaacaggccacagatcttgtagagtgtcccaccttctgcattggtctgactgcttctccctgctctcgtttaatgtgttcytatgtcccctaattgcccctaaaatgtgctgtctaattaccatgtttaatttcatgtaaactgataattagacttaaaatcttcatgaaactcaggttaaacattttggcaagaatacttcataggtgatgctgtgtactttatgtcatattacatcaggataaacctaatacctgcttgttgtgaattggacaacacattgctattgatgatgaaacctgactacaggtttcaagtgatcacgtttggttgtttttcctcttttggtgtgctactgcacaagtaccaggaaggggtacttggaccctgtgtgaatgttcagttttctatc

SEQ ID NO: 561399 - DNA, 551 bp, Homo sapiens
aaaattaataattctttaataccatctaatatttagtccacatttaattttttcataatgtattatagagtttgtttgtctaaactagaattgatttcctatcacaacctctttatctttgtcagaaatttacttgttagaacaggccacagatcttgtagagtgtcccaccttctgcattggtctgactgcttctccctgctctcgtttaatgtgttcctatgtcccctaattgcccctaaaatgtgctgtctaattaccatgtttaatttcatgtaaactgataattagacttaaaatcttcatgaaactcaggttaaacattttggcaagaatacttcataggtgatgctgtgtactttatgtcatattacatcaggataaacctaatacctgcttgttgtgaattggacaacacattgctattgatgatgaaacctgactacaggtttcaagtgatcaygtttggttgtttttcctcttttggtgtgctactgcacaagtaccaggaaggggtacttggaccctgtgtgaatgttcagttttctatc

SEQ ID NO: 561400 - DNA, 582 bp, Homo sapiens
tctgtgactaggtgttaccataaagcaatctctcaaacattttttctcttaagacaaatgtgtcacaatgacataccataggagatgttctttaacactccaggagacaagggagttactttccaagatagattaattcgctttcttgggaagcttcccctcaggaatcctattcttccaagtacactgctcataattacccaggcaaccagtccattcaagtcatgtagggctaaatagtacaaaagtggactggggaagagtgaaaactatcattgtgtatcttgtataacatatagaaagcaattaaacaagaatgaaagacaagatctgcctaagtagagaaagaggttgagttgggkattacacgatattgagattaagcttaaaattatgtattgtgcattgtgaaaaaaatttatgtattgtgaagtaatttttaaacagtcaagctgataaagtctttattttcataatttacacttttaagttgctttatacaatgttaatttaattcaaaggtatttaatcttaaagatcagttataaagcatacttttctctcccaggacacagatgtggt

SEQ ID NO: 561401 - DNA, 582 bp, Homo sapiens
tctgtgactaggtgttaccataaagcaatctctcaaacattttttctcttaagacaaatgtgtcacaatgacataccataggagatgttctttaacactccaggagacaagggagttactttccaagatagattaattcgctttcttgggaagcttcccctcaggaatcctattcttccaagtacactgctcataattacccaggcaaccagtccattcaagtcatgtagggctaaatagtacaaaagtggactggggaagagtgaaaactatcattgtgtatcttgtataacatatagaaagcaattaaacaagaatgaaagacaagatctgcctaagtagagaaagaggttgagttgggtattacacgatattgagattaagcttaaaattatgtattgtgcattgtgaaaaaaatttatgtattgtgaagtaatttttaaacagtcaagctgataaagtctttattttcataayttacacttttaagttgctttatacaatgttaatttaattcaaaggtatttaatcttaaagatcagttataaagcatacttttctctcccaggacacagatgtggt

SEQ ID NO: 561402 - DNA, 611 bp, Homo sapiens
tagtcaatatggataataatatcatttttactcatatcctgacatagatgtgaagttctsgttatgtaaattaagcaaatatgaataataaaattatttctttaatttttaatgatttgagatcacagagaatgaagctagttctttcccttcaatagcggccatgattttccaaacattcctaacctctaataaagaaaacttcccaaggtacacaaggcctctcttttctctctcaatcaaatatcataattcttgcttgaggttctgtaagttatctccttgaatcttattggtttttattagacatactggcaaatacagagcaaatgtacaacacaaaaaaatttcacaggcacaaactcgtgactgacatttctcctggtgaagaacttacataaatgaagtgggaaaatattttaagaaattaatgcatatactgtctcctaccttatgatataactgcttactgatctcaaacttggcagctcaaagaaagagtgtcatctgcttgaggaatagtttacagtaggagaaaatcatgccacttttttcagcttttaagatcaaggaagatcattgtctattaaataaaaaaatagtggagatat

SEQ ID NO: 561403 - DNA, 517 bp, Homo sapiens
gtcaataggcctctctgagcacattttctcccattcttttgcttgyttctctttttgcacttgtttctcttaaaagttggtgtctcccagggttctagcttccagtcttaacccacttcttttgttccatacaccctccccaccccaaacccaggataatcttgtggtcttcacccataatatatgtattagtgactcccaattcattctcacagtcctggccattctttctggttccctgtagatagacctcctttgctggttactcgtcttttctctgactgttcaatattggagaaccacagggcttagtcattggactttctttccagttatattccctcccttggttatctaattagtctaatggctttaaaccatgtgatgatttccaaattcatatctccagtcaagactttctccctccactctagacctcaatgacccctcaatattgctatttgaaggtctcataggcttctcaaatttaacattgctaaaactgaactcctggaaa

SEQ ID NO: 561404 - DNA, 517 bp, Homo sapiens
gtcaataggcctctctgagcacattttctcccattcttttgcttgtttctctttttgcacttgtttctcttaaaagttggtgtctcccagggttctagcttccagtcttaacccacttcttttgttccatacaccctccccaccccaaacccaggataatcttgtggtcttcacccataatatatgtattagtgactcccaattcattctcacagtcctggccattctttctggttccctgtagatagacctcctttgctggttactcktcttttctctgactgttcaatattggagaaccacagggcttagtcattggactttctttccagttatattccctcccttggttatctaattagtctaatggctttaaaccatgtgatgatttccaaattcatatctccagtcaagactttctccctccactctagacctcaatgacccctcaatattgctatttgaaggtctcataggcttctcaaatttaacattgctaaaactgaactcctggaaa

SEQ ID NO: 561405 - DNA, 517 bp, Homo sapiens
gtcaataggcctctctgagcacattttctcccattcttttgcttgtttctctttttgcacttgtttctcttaaaagttggtgtctcccagggttctagcttccagtcttaacccacttcttttgttccatacaccctccccaccccaaacccaggataatcttgtggtcttcacccataatatatgtattagtgactcccaattcattctcacagtcctggccattctttctggttccctgtagatagacctcctttgctggttactcgtcttttctctgactgttcaatattggagaaccacagggcttagtcattggactttctttccagttatattccctcccttggttatctaattagtctaatggctttaaaccatgtgatgatttccaaattcatatctccagtcaagactttctccctccactctagacctcaatgmcccctcaatattgctatttgaaggtctcataggcttctcaaatttaacattgctaaaactgaactcctggaaa

SEQ ID NO: 561406 - DNA, 566 bp, Homo sapiens
tggtaaaaagcaaaccctgactgctgtataatataccctagggtgcctccactgcactccaggtaataactttgtgcccacataatgctgtgcatgtctctgtgtaaacctctcagagaaatttttggagcagttgcccttgtatgccccactaacctcaacagtctggcaattgctgtgaatttcttcagtgatggggcaagtaataattttccctaggcaatgaggaaaaaagacagatcacaacttaactaacttttctccaaactgtcctttctctttgggccccagccactgctgctgccrtgacaccactgcctagctcacccctcaaaccaatttgtgacaatctttcctggtatgcccgggcaaactcttgattctgtagtttctccaggcaccattgagaggaagggagtcaggacccacttattaaaagtgaagcacagttctttggaagtggggtctctttccttaccatgactcaaattaggaggaggctcacatggtgcttgtaaagtcttattccacccacctgttgagatggtaagaacaatgttactgtt

SEQ ID NO: 561407 - DNA, 588 bp, Homo sapiens
tctttgcaaaatttatgatcagactagtagatacagaaacctgacattggattatcttctatgaattacaaacattgagaagaaacaagttaaaattttcatctagaggaattctaactcctctctagattgctactttttccttttggragtttttaagtttgcatccctctggtaaatttatgtgattaaaaaaaattaaccaaattcccgaactgaagttgcatcctgtctttaagactcacttcatatacgttggcctctatgaaaaatctagtgtgccaaaggcctcggaaacttccatggttgaaatatattctccttttcatctaattaaatgtgcagtgcaccgaaagtaagtttctttttgtctaaaagttgccagcttttcttttaaacaagttaatcttgtttgtatatacctatgtgctacatattaaaatgtaaaaatttattaatttccagcaagtaaaaacaaacataatctcaaccaaattttgttttagcccagtgttactcaaataaaggggtgaaataagagtgcttttaagttattttgaaaaacacacacacatatatcccaataaa

SEQ ID NO: 561408 - DNA, 588 bp, Homo sapiens
tctttgcaaaatttatgatcagactagtagatacagaaacctgacattggattatcttctatgaattacaaacattgagaagaaacaagttaaaattttcatctagaggaattctaactcctctctagattgctactttttccttttggaagtttttaagtttgcatccctctggtaaatttatgtgattaaaaaaaattaaccaaattcccgaactgaagttgcatcctgtctttaagactcacttcatatacgttggcctctatgaaaaatctagtgtgccaaaggcctcggaaacttccatggttgaaatatattctccttttcatctaattaaatgtgcagtgcacmgaaagtaagtttctttttgtctaaaagttgccagcttttcttttaaacaagttaatcttgtttgtatatacctatgtgctacatattaaaatgtaaaaatttattaatttccagcaagtaaaaacaaacataatctcaaccaaattttgttttagcccagtgttactcaaataaaggggtgaaataagagtgcttttaagttattttgaaaaacacacacacatatatcccaataaa

SEQ ID NO: 561409 - DNA, 615 bp, Homo sapiens
gcttgtaatagtttagaaataggttgcttgtaatcacttkggatgtaaaaaggcaaaaaattttacccctgagggatacaaagggaagaaacatgataattgtcctcattatttattccatgacctagacacttacatacatactgacacttcggagatttatttttttcattattcttaaaggaatcatcatcagtgtttactgatagacaatattcctcgtttaaattgtgctaaaatgtaggattacaatcaatcccaggttatttaataaggtagttatagacagaaaaccagttgtttcacatattgcaaatcttcagtgcaacttcacataatccattagggataggcttaccatagtggaagcatcttctttagaaagtgagccatctctaagcatgcagctttaacagggcatctggcatggaggtagaaagcattctgtaaacaaaataaagggttatagaaattctcaatgtccttttacgctatgattctcttattcatgagactatcctctgggggaaaatgatgactggaacttggagcactcaggaatatttgccaaacattgcagaacatttcaaggggtcaagatttatttagctgaag

SEQ ID NO: 561410 - DNA, 600 bp, Homo sapiens
gggtcttaaaattagatttacaatgattctattgaacaaaaaatatgaatctttctcaggataaatttttacttagcccgtgtgtagccrgctatggtaaacgtaatactttgtttcttgtacttactttcctgtggagaattctgtcccttggtgataatggaggacaatttaaggattgtctcagaatatcataatttttgtatgtttcaaagttgctcttaaactttgaaatgaggatcttagagatgaggtcaaatggccttaagacaggatgtgtcattcttcaacactatctctgtagccaatgcaggaaaactgaccaaaatctactctttcacaattagcaaggaggcatgtttgcagctattataatagaattagatattgcatgtgtgttgtaaaaagcctttgcttagaacaattgttcaaacatctatttgactggccaaaacggaaatacagcataattctatttttatggccctctattttaacaaaatgccagttgcatagcaatggaactgtagtatcccccagtttcaaatatgcttagcatcagctggaaagagcttttctctttccacttccacttcactt

SEQ ID NO: 561411 - DNA, 600 bp, Homo sapiens
gggtcttaaaattagatttacaatgattctattgaacaaaaaatatgaatctttctcaggataaatttttacttagcccgtgtgtagccggctatggtaaacgtaatactttgtttcttgtacttactttcctgtggagaattctgtcccttggtgataatggaggacaatttawggattgtctcagaatatcataatttttgtatgtttcaaagttgctcttaaactttgaaatgaggatcttagagatgaggtcaaatggccttaagacaggatgtgtcattcttcaacactatctctgtagccaatgcaggaaaactgaccaaaatctactctttcacaattagcaaggaggcatgtttgcagctattataatagaattagatattgcatgtgtgttgtaaaaagcctttgcttagaacaattgttcaaacatctatttgactggccaaaacggaaatacagcataattctatttttatggccctctattttaacaaaatgccagttgcatagcaatggaactgtagtatcccccagtttcaaatatgcttagcatcagctggaaagagcttttctctttccacttccacttcactt

SEQ ID NO: 561412 - DNA, 626 bp, Homo sapiens
atactggagcagattatatttataattattttgtctttataaaaatggaaaaatgacttaaaagtgggaggtggaggaaaatttgtgatgtgatcatgaagaaggtcaaaatattctcagttctatgtatatttgtaaaccagttcaatacagtacctggattaattattttattatttatactgagctttgactccaaataatttaaataagtctatataaaatatagtaagattattcaaatgttcatagaaaaagtagaaagaaaaaatacaaccccagaaacataaaattaagtcagtaaaagcctagttaaaaatgcattcataaaatgttatttgttttctacagctggataagatattttgcaagaaatgagcagaacaaaaayaaaattaggaaaacaattccatttataatagcaccaaaaagaacaaaattcttacaaataaatttttaaaagcaatatatagtttatactctaaaaactacagaatattgtggaaagaaattacaatatacctaaataaatgataagactttttatgttaatggattggaagataacattgttaagatgacagtattctccaaattgagatacagatttaattcagttcctacca

SEQ ID NO: 561413 - DNA, 519 bp, Homo sapiens
cacttcctgattttaaaatttacttcaaatctatagtaatcaaaacagtatggtattagtctaaaaatagacatatagatcaatgaaatagtccagaaataaaccctcamatttacaataaattaatttttaaaagggtgtcatgaccatccaatgggtagagaatagtgttttcaacaaatggtgctaggtcaactggatattcacattaaaaaattgagttggatacttagcttacaacacacacacacaaattaactcaaaattgatcagagacctaaatataagagcttaaactataaaactcttagaaaacatgtatatcaaactcttaaaaacttaggtataaatctttgttatacctatggatgtgggaatggtttcttagagatgacaccaaagatacaagaaatgaagaaaaaataggtatcatcaaaatcaaactatttcatactcaaattacaccatcaggaaagtgtaaagaactcccatagaatgacagaaaaaatgttcaaagaa

SEQ ID NO: 561414 - DNA, 519 bp, Homo sapiens
cacttcctgattttaaaatttacttcaaatctatagtaatcaaaacagtatggtattagtctaaaaatagacatatagatcaatgaaatagtccagaaataaaccctcaaatttacaataaattaatttttaaaagggtgtcatgaccatccaatgggtagagaatagtgttttcaacaaatggtgctaggtcaactggatattcacattaaaaaattgagttggatacttagcttacaacacacacacacaaattaactcaaaattgatcagagacctaaatataagagcttaaactataaaactcttagaaaacatgtatatcaaactcttaaaaacttaggtataaatctttgttatacctatggatgtgggaatggtttcttagagatgacaccaaagatacaagaaatgaagaaaaaataggtatcatcaaaatcaaactatttcatactcaaattacaccatcaggaaagtgkaaagaactcccatagaatgacagaaaaaatgttcaaagaa

SEQ ID NO: 561415 - DNA, 519 bp, Homo sapiens
cacttcctgattttaaaatttacttcaaatctatagtaatcaaaacagtatggtattagtctaaaaatagacatatagatcaatgaaatagtccagaaataaaccctcaaatttacaataaattaatttttaaaagggtgtcatgaccatccaatgggtagagaatagtgttttcaacaaatggtgctaggtcaactggatattcacattaaaaaattgagttggatacttagcttacaacacacacacacaaattaactcaaaattgatcagagacctaaatataagagcttaaactataaaactcttagaaaacatgtatatcaaactcttaaaaacttaggtataaatctttgttatacctatggatgtgggaatggtttcttagagatgacaccaaagatacaagaaatgaagaaaaaataggtatcatcaaaatcaaactatttcatactcaaattacaccatcaggaaagtgtaaagaacwcccatagaatgacagaaaaaatgttcaaagaa

SEQ ID NO: 561416 - DNA, 529 bp, Homo sapiens
gggatttgctcatgtagttcatctgtatctatatacttgttaaactctgcatagaaactttctgaaggaaataataatgataattattatagctaatcattcccattttctatgttattcaaacatgcctgtatgatgtactaaaattattacttagtactgtacttatgacaaagtaggagctcaaataattctaatttgctgaaaastctacagtctaactgatatgttggaaataatctacatgttatgtcttcataggaacttcatttatgatcattcctttctttccctaaatggtacctaaaaaaagattccatttcacttttattgagcatctactcagtgtaagactattttttttaatgcatggaatgcaagaactgtgatagtaactggcttcatagatcttagcatcaactgtaaggataaggcaagagtatttacaggtaattgtaggtaataaaaactgcaattagaagcacacaaaatattctgtagaattcaaagaaaggagagatcatatcac

SEQ ID NO: 561417 - DNA, 524 bp, Homo sapiens
aaataattctaatttgctgaaaagtctacagtctaactgatatgttggaaataatctacatgttatgtcttcataggaacttcatttatgatcattcctttctttccctaaatggtacctaaaaaaagattccatttcacttttattgagcatctactcagtgtaagactattytttttaatgcatggaatgcaagaactgtgatagtaactggcttcatagatcttagcatcaactgtaaggataaggcaagagtatttacaggtaattgtaggtaataaaaactgcaattagaagcacacaaaatattctgtagaattcaaagaaaggagagatcatatcacattagaagttaaaagaaagatttcatggaatagttgacatatcattcaggcagtgtggcagaaacttctagttgcccacctgaatatccatttaccctttcctttttaggaacagaattctgatttttagctgagctcattgatgcgtgaatagaaagactgcatttcacaggctccctt

SEQ ID NO: 561418 - DNA, 474 bp, Homo sapiens
actcagtttagggagacctgaaaatgaataatgacaaagtacggcaacatcaaaaatatcttatattactataatttgtgcaaatgccaaattaaatgttataagctatctgaaaagaatttttgcactatgagaaagatgacaaagcaatttccacatggyttctactgcctgttcatatttttatactaaaagatacttcctctattgtccacatggcttttaccaacccccacttccacttagaactattagaggaagttgccaaattattatgagtcagttgtttagaaattgaacattatttatacaggtagcctacctaactcacagtgtgcctaaatatggcaataataacactgactccaacattgtactctaagctctctcagaggaaaattcatagcagattcttacttgagatgacaaattacgtctcacggctgtaatctcttccaacacactctcttcagt

SEQ ID NO: 561419 - DNA, 474 bp, Homo sapiens
actcagtttagggagacctgaaaatgaataatgacaaagtacggcaacatcaaaaatatcttatattactataatttgtgcaaatgccaaattaaatgttataagctatctgaaaagaatttttgcactatgagaaagatgacaaagcaatttccacatggtttctactgcctgttcatatktttatactaaaagatacttcctctattgtccacatggcttttaccaacccccacttccacttagaactattagaggaagttgccaaattattatgagtcagttgtttagaaattgaacattatttatacaggtagcctacctaactcacagtgtgcctaaatatggcaataataacactgactccaacattgtactctaagctctctcagaggaaaattcatagcagattcttacttgagatgacaaattacgtctcacggctgtaatctcttccaacacactctcttcagt

SEQ ID NO: 561420 - DNA, 581 bp, Homo sapiens
cataagcaatgaaagagaagggagccctagttgtatcattggggaataaaactaattcattatggccactccgtttcacatgctgggggccygtcctgggtatgtacaagaaaagaaatgtgtgtgaagcaaaaatgtgtctaatgccatctgcagtcatctaaagaccagtgtaaagaagcatgtatttttctgcataagtatcattattattatcaagattatttagtatttgttaatagactgtgagatctagtttaattctttccagtaacaagctagatggccagtgtaaattttcgtagttgattcatccagttggtgccttaatttctgcacaacttctcatcaataggccatagcaaggggtcctcaaatgcaaagaagtaggtttgttggggaaagtgcccattaaattccattgttttcctctttaggatattatgttttgacatttctactgtcctcattgcacaagagttttcagactaaatgtttggtatataaatccaataaggatatgttgaaaactttaactcatacttaaaatgccaccagtttcccaaatctgcactggatta

SEQ ID NO: 561421 - DNA, 581 bp, Homo sapiens
cataagcaatgaaagagaagggagccctagttgtatcattggggaataaaactaattcattatggccactccgtttcacatgctgggggcctgtcctgggtatgtacaagaaaagaaatgtgtrtgaagcaaaaatgtgtctaatgccatctgcagtcatctaaagaccagtgtaaagaagcatgtatttttctgcataagtatcattattattatcaagattatttagtatttgttaatagactgtgagatctagtttaattctttccagtaacaagctagatggccagtgtaaattttcgtagttgattcatccagttggtgccttaatttctgcacaacttctcatcaataggccatagcaaggggtcctcaaatgcaaagaagtaggtttgttggggaaagtgcccattaaattccattgttttcctctttaggatattatgttttgacatttctactgtcctcattgcacaagagttttcagactaaatgtttggtatataaatccaataaggatatgttgaaaactttaactcatacttaaaatgccaccagtttcccaaatctgcactggatta

SEQ ID NO: 561422 - DNA, 581 bp, Homo sapiens
cataagcaatgaaagagaagggagccctagttgtatcattggggaataaaactaattcattatggccactccgtttcacatgctgggggcctgtcctgggtatgtacaagaaaagaaatgtgtgtgaagcaaaaatgtgtctaatgccatctgcagtcatctaaagaccagtgtaaagaagcatgtatttttctgcataagtatcattattattatcaagattatttagtatttgttaatagactgtgagatctagtttaattctttccagtaacaagctagatggccagtgtaaattttcgtagttgattcatccagttggtgccttaatttctgcacaacttctcatcaataggccatagcaaggggtcctcaaatgcaaagaagtaggtttgttggggaaagtgcccattaaattccattgttttcctctttaggatattatgttttgacatttcwactgtcctcattgcacaagagttttcagactaaatgtttggtatataaatccaataaggatatgttgaaaactttaactcatacttaaaatgccaccagtttcccaaatctgcactggatta

SEQ ID NO: 561423 - DNA, 586 bp, Homo sapiens
ttctcgcttctgtaacatgcttccccctgcacagatctccccccaccccacaaaatgcttaaaaggtaacctgaccctttgtttggggctcagtcctttggatgttaattcaaccgggttggtgcccctaaataataatatatatcctcctcaaaccctcggtctctctgattcctaaattatcccactgcatttctgcaagaagttatcctctcttcctctctatcctcttcaagaagagtcactgggcgcagtggctcacgcctgttatcccagcactttgggaggcagaggtgggtggatcacctgaggtcaggagttcgagactagcctgggcaacatggtaaaatcccgtctctactaaaaatacaaaaattagctgggcatggtggcacatgcctgtaattccagctacttgggaggctgaggcatgaaaatcgcttgcacccaagaggtggagtttgcagtgagccaaaatcatgccagtgaactccagcttggacaacagagtgagactctgtctcaaaaaaaamaaaaagaaaaaaaaaatgcgtagatcttttcccaatataggatgaaatgcatc

SEQ ID NO: 561424 - DNA, 646 bp, Homo sapiens
ttttatattttatttgccagaaaagagcatagaggttcagtgaggttaggtttctactttgtatataactgtctctccattaaataatggaggcagcatagatgatacagcatcattaagataaaaatatatttacatatatgtagaagaattttcatgaaatgatatttcaaaaaagtgacagtaagaaaaataaattttaccatatatgctaaataattatattgcaaaatggagcagaactataggtagttatgaaaataatcttgctatattacactcaataataagattttcactgcataatttcctagcatagctttttgttwgatttcctattcacacaaagctgaatttctaattgcagtattctctttattctggaagaaaataatactgaatatcttttgtaattttactataatgtataatgcaagtgctaatctttctgtagaccaagaattaattcgctaatcatttttgtgtttcaggagtttgctggagaacacaaaggatgttggatacttcttgaaagcagtaaaaacaattttgacagaaagataagaatagtctaatttatagtgataaggaaatcctgggcatgaagtctactgctgctggtaaagttggactaacagagttcaat

SEQ ID NO: 561425 - DNA, 646 bp, Homo sapiens
ttttatattttatttgccagaaaagagcatagaggttcagtgaggttaggtttctactttgtatataactgtctctccattaaataatggaggcagcatagatgatacagcatcattaagataaaaatatatttacatatatgtagaagaattttcatgaaatgatatttcaaaaaagtgacagtaagaaaaataaattttaccatatatgctaaataattatattgcaaaatggagcagaactataggtagttatgaaaataatcttgctatattacactcaataataagattttcactgcataatttcctagcatagctttttgtttgatttcctattcacacaaagctgaatttctaattgcagtattctctttattctggaagaaaakaatactgaatatcttttgtaattttactataatgtataatgcaagtgctaatctttctgtagaccaagaattaattcgctaatcatttttgtgtttcaggagtttgctggagaacacaaaggatgttggatacttcttgaaagcagtaaaaacaattttgacagaaagataagaatagtctaatttatagtgataaggaaatcctgggcatgaagtctactgctgctggtaaagttggactaacagagttcaat

SEQ ID NO: 561426 - DNA, 524 bp, Homo sapiens
ataactcattaatcaaagaagacacaaaaaggaaatcataaagtattttgaacamaataaaattaaaggcaaaacatttcaaaatttgtgagatgcacctaaagcagcgctcagcagaaaatcaaagcattggagttccactttgggaaaataaaaaaaaagaccaaattaaattcaaaataagcaaaataaaggaaataaacatcagagggaaattcagtaaaacagaaagacagagtcgatgaaactaaacgtttttgtttcttttcttttttttttttttttcactctgttgcccagactgttgcaatggcaactatcatggctcactgtaacttccagctcctgggctcaagcaatctccctgctttagcctcccaaatagctggtactacaggtacgcaccaccatgcctggctaatttttaaaaactttttgcagagacaaggtcgtgctatgttgcccaggctccaggtcaaaaaatacttccaccttggcttcccaaagtgctgggattataggtg

SEQ ID NO: 561427 - DNA, 524 bp, Homo sapiens
ataactcattaatcaaagaagacacaaaaaggaaatcataaagtattttgaacacaataaaattaaaggcaaaacatttcaaaatttgtgagatgcacctaaagcagcgctcagcagaaaatcaaagcattggagttccactttgggaaaataraaaaaaagaccaaattaaattcaaaataagcaaaataaaggaaataaacatcagagggaaattcagtaaaacagaaagacagagtcgatgaaactaaacgtttttgtttcttttcttttttttttttttttcactctgttgcccagactgttgcaatggcaactatcatggctcactgtaacttccagctcctgggctcaagcaatctccctgctttagcctcccaaatagctggtactacaggtacgcaccaccatgcctggctaatttttaaaaactttttgcagagacaaggtcgtgctatgttgcccaggctccaggtcaaaaaatacttccaccttggcttcccaaagtgctgggattataggtg

SEQ ID NO: 561428 - DNA, 524 bp, Homo sapiens
ataactcattaatcaaagaagacacaaaaaggaaatcataaagtattttgaacacaataaaattaaaggcaaaacatttcaaaatttgtgagatgcacctaaagcagcgctcagcagaaaatcaaagcattggagttccactttgggaaaataaaaaaaaagaccaaattaaattcaaaataagcaaaataaaggaaataaacatcagagggaaattcagtaaaacagaaagacagagtcgatgaaactaaacgtttttgtttcttttcttttttttttttttttcactctgttgcccagactgttgcaatggcaactatcatggctcactgtaacttccagctcctgggctcaagcaatctccctgctttagcctcccaaatagctggtactacaggtaygcaccaccatgcctggctaatttttaaaaactttttgcagagacaaggtcgtgctatgttgcccaggctccaggtcaaaaaatacttccaccttggcttcccaaagtgctgggattataggtg

SEQ ID NO: 561429 - DNA, 557 bp, Homo sapiens
catggagggataaggtggtaggattgcttgagcctgggaggcagaggttgcagtgaaacaagttctcatcactgcactgtagcctgggtgacagagtgagacactgtctcaaaaacaaacaaaacaaaataggaggaggttggactaaaccagtctgcagttctcttccagggtgagaatttaggggacaaatgagcctgcatgatgtgataatatggacatgataggagcagagtagctgaagggatgagaggagacatccaatttttggttcttgatgcgatgggagttktctaataaatttatcatctcacaccaaaagagtgtggagaagcactgaatgttagtttaggagcgttacagtgaaaggctcaggggaaaggcttaggggaaaaggacaaagtggctgtcaagtaaacatactttttaggcatttgatgtgttttgacttttttttttagatactgtgaggaaaaaataacacaatttttgaattaatatgcttccattttagttctattaaaacttttcatttcaagggctattttaaataaatg

SEQ ID NO: 561430 - DNA, 633 bp, Homo sapiens
ataaaactggcagacagatgtaaaatataaatggtagggttaaaacagaaagccaktttggtcaactgtagtctaattcttggcctaatgataaaaattttgaagcagcaaaaatcccctttctcacatttccttttttaattccctaagattattttaggcctatgaaattattttgctttactagtccaatgacttgaatgaataagtaacttcctacatccttgccttcttgtaccatgttataagctcactttatataaaattatttcaattaaaacaaaatattcattcaaaagcattaaaggagtcaaagggggttaacacctagaaatttaagtgggtcagagtcaaaggggttaacacctagaaactgaagtgggtcagtgtcctaaaagacaactagagctttgctttcaattcttaacaccagagaaaaggaatgtttcacacttcattgttattttacaaaataatatttttgtaatgataatccttgtagttattttatttttatgtatattataaaacatagaaggtaatttatacaatgagatataaagtaattttgactaaaagaccaatgctgattttgttgaaataccaacaaagtgctttcttagaaatgccttt

SEQ ID NO: 561431 - DNA, 492 bp, Homo sapiens
gccttccctgtccttaaatgatttctagggggtaaatcatatgttcagggaaggatacagactaggttatgctcctgttgtcttattattactgaaatagatttaatgtctccatgtgtgccaattatcatgtacagaattatcttttaaagttgatttggtacttaaaaatgactctatttcaaactttttttcagggtatgaaggaagagcatgaatggcttctattattttaaaaccaaatacatctttagatttggaaaaagtttatgaacaagttgtaacatttctaccagcttatgcttgtccackatttttaagaattcaggtaattttagtggcggagtttactatcaaatataagacagtaaacaaggaagtagtttaattgcaaaataatattgtatcctttagataacatgtgagttatgtgagaggcgtggcgtgtagagttgatgcagatcgatgccatgtttgaagcctaattataaa

SEQ ID NO: 561432 - DNA, 545 bp, Homo sapiens
tggaagcaacaggaacattcaaactattgaagcatcagttggtggaagatggatttaatccactgaaaatttctgaaccactttacttcatggataacttgaaaaagtcttatgttctactgaccagggaactttatgatcaaataatgttaggggaaataaaactttaagatttttatatctagaactttcatatgctttcttaggaagagtgagaggggggtatatgattctttatgaaatggggaaagggagctaacattaattatgcatgtactatatttccttaatatgagagataattttttaattgcataagaattttaatttcttttaattgatataaacaktagttgattattctttttatctatttggagattcagtgcataactaagtattttccttaatactaaagattttaaataataaatagtggctagcggtttggacaatcactaaaaatgtactttctaataagtaaaatttctaattttgaataaaagattaaattttactgaaatattttatttttatgtatcctg

SEQ ID NO: 561433 - DNA, 615 bp, Homo sapiens
cctgtgactttcaattagacaaagtccttttaaataggatataaaaagcatgagccataaaagaaaaaatacttaataaataaaacaattaaaatgaagaacttatgccctttgaaagacaatcgtaagagaatatttttttaaaagccacagacttsgagaaaatatttgcaaatcacatgttgactttctaggggccaaggagggccctctgaagattcactgaaaaatctacttgcaaaaggcagattaactggagaacaggtgcatatgaaccagatatggtcattcacatctgcagtctcagctactggggagggtgaggcgagagcatggcttgagcccaggaaattgaggctgcagtgagttataatagtgccactgtacttcagcctgggcaaaagagcgaggctccatctcttaaggaaaaaaaaacaaaaggcatacaaatttatttaatgtgtgtatacaggagccttcagaatgcaggcccaaagatacaggagaatcattgatttttattcttagattgaacaaagtatgaacaaccatgtagaaatatgattagacaaaacaggtatgatgtaatgctaatggaccgagtgaggaaaccca

SEQ ID NO: 561434 - DNA, 615 bp, Homo sapiens
cctgtgactttcaattagacaaagtccttttaaataggatataaaaagcatgagccataaaagaaaaaatacttaataaataaaacaattaaaatgaagaacttatgccctttgaaagacaatcgtaagagaatatttttttaaaagccacagacttcgagaaaatatttgcaaatcacatgttgactttctaggggccaaggagggccctctgaagattcactgaaaaatctacttgcaaaaggcagaytaactggagaacaggtgcatatgaaccagatatggtcattcacatctgcagtctcagctactggggagggtgaggcgagagcatggcttgagcccaggaaattgaggctgcagtgagttataatagtgccactgtacttcagcctgggcaaaagagcgaggctccatctcttaaggaaaaaaaaacaaaaggcatacaaatttatttaatgtgtgtatacaggagccttcagaatgcaggcccaaagatacaggagaatcattgatttttattcttagattgaacaaagtatgaacaaccatgtagaaatatgattagacaaaacaggtatgatgtaatgctaatggaccgagtgaggaaaccca

SEQ ID NO: 561435 - DNA, 574 bp, Homo sapiens
ctaatttcttctagaaacattatcatagcacacccagttataatgttttgccagttatctagatattcgttagcccagtcaagttgacacgtaaaattaaccaacacaagtttaccttttattaacttggcacctaaacccactccttaacccatacctaattttcaagtaaataaaataacaaggtcatcgtaccacttgacatgatgtagctatcctgcatacaacagaaaaagcacagacccctttcccaggagagaagataaagtatttgagtgatatttactctttattatctcccataatttaattactgtataattaacatatgtatgttaatatatataaacatatatatttataaagtcaatacatcttatatattatatgagaaaaatagaggaaagaaaacaaaagatattacacacacacatacacacacamaaaaataaaaaacatgtattcagccaacaccgtaactcccttcttggtctgttgactcaaaggcatgaggagcccaagtggccaggtagcagtcttaacttccagtttaatgcaattattgtgatacctc

SEQ ID NO: 561436 - DNA, 574 bp, Homo sapiens
ctaatttcttctagaaacattatcatagcacacccagttataatgttttgccagttatctagatattcgttagcccagtcaagttgacacgtaaaattaaccaacacaagtttaccttttattaacttggcacctaaacccactccttaacccatacctaattttcaagtaaataaaataacaaggtcatcgtaccacttgacatgatgtagctatcctgcatacaacagaaaaagcacagacccctttcccaggagagaagataaagtatttgagtgatatttactctttattatctcccataatttaattactgtataattaacatatgtatgttaatatatataaacatatatatttataaagtcaatacatcttatatattatatgagaaaaatagaggaaagaaaacaaaagatattacacacacacatacacacacaaaaaaataaaaaacatgtattcagccaacaccrtaactcccttcttggtctgttgactcaaaggcatgaggagcccaagtggccaggtagcagtcttaacttccagtttaatgcaattattgtgatacctc

SEQ ID NO: 561437 - DNA, 601 bp, Homo sapiens
gattcaatgcaatccctatcaaaatgccaaaaacattctacacagaaataaaaaataaaatcctaaaatttgtatggaacctcaaaagaccccaaatagctaaagcaatcctgaccaaaaagaatatagctggaggaatcatactacctgatttcaaatatactacaatactatagtaaccagtacagcatggtactggcataaaaacaaacacatagaccaatgaaacagaatagacaacccagaaataaattcaagcacttgacacccaactcattttcgacaaaagaaccaagaacatacatttggaaaaggacaatttctttaataagttgtgctagaaaaactggatattcatatgcagaagggtgtaattagattctcatctttcaccatatacaaaaatcaactcaaaatggattaaagkcttaaatgtaagacttgaaatgatagaactactaaaagaaaacattggggaaacactacagtacattggtctgaggaaagagttttggataagatcaaaagcacaagcaacaaaaacaaaaatagacaaatgagattacatcaagctaaaaatcttctggacagcaaaggaaac

SEQ ID NO: 561438 - DNA, 623 bp, Homo sapiens
taaagtttttggggagtcaaaagttatatgtaaaatttcaactgtatgagggggtcagcactcctaacctctgtgttgttcaaggggcaactgtatgtgtttcataatattacagatagccacatgcaacaacaacaaaaaaaaatgaaatcaatccttatctcacagcatgttcaaaaattgtcaaaatagatcrcaaacctataaatcagctaaaagtctaatgtttgtagaagcaaacagagaaaaaaaatcttggtgatccttggataggcaaagatttttaaaacagcaacaaccataaaagtaaaaatcaataaattgaacttcatcaaaattaaaacactgacacaataaaattattgacacatactcctcaaaacactctgtcaagaaaatgaaaaggcaagtcacagactctgagtaaaatgtatgctaaatacatatttgagaaggaacttgtatctagagtacataaagaactcacataattcagtaagaattgtttttttttttaagtggacaaacaaaattttgcccatttttttaagtggacaaacaaaatttaacagacttcaccaaaaaagatatgtggcaaataaacatatgaaaagatatctaac

SEQ ID NO: 561439 - DNA, 502 bp, Homo sapiens
gatacataaagcaaatattaacagacctaaaaggatagactgcaatacaataatggtacaagacttccacatcccatttttagcaagacagatcatccagaagaaaattatcaaataatcatcagaattaaactgcactctagaccaaatgaacctaaccaacgtttaaagaacatttcatccagctgctgcagagtgcacattcttcttgttggcacatggaacattctctaggatagaccacrtgttaagccaaaaaataaatcaaaaaatttgaaaagtcaaaattatgttatcttttctgaccataattgaataaaactataaatcaatgacaagaggaactttggaaactgtattcaaatacatggaagttaaacaacatgctcttaaacaatcaaagggttcatgaagaaattaaaaaggaaattaaaaaaaatgttttgaaaccatagaaaatggaaacaaaacataccaaaatctatgggatacagaaaaagat

SEQ ID NO: 561440 - DNA, 586 bp, Homo sapiens
ctatgcagccataaaaaagaatgagttcatgtcctttgcagggacaaggatgaagctggaaactcatcattctcagcaaactaacacagaaacagaaaacaaaacactgcatgttctcactcataagtgggagttgaacaatgagaacacatggacacagggaggggaacatcatacactggggcctgttggggtattgggggcaaggggagggagaacattaggacaaatacctaatgcatgcagggcttaaagcctagatgatgggttgatgggtgcagcaaamcaccacggcacatgtatacccatgtaacaaatctgcacattctgcacatgtatcccagaacttaaagaataaaagaaaaaaaaaaaaagaaatagtgcagctgcttactgatacaccttctctgactgctcaaataaaccaatacttcttggccctcagtacgcaggctaatttcattgaaaaggtttttgttcccagaggaattgttaaatgatatgtctgtgtcataattattttaaatagtggaattcatatgaggcatctctgccacagtgatttgcatatagtggacagtcacta

SEQ ID NO: 561441 - DNA, 608 bp, Homo sapiens
aggtgggagcaaggctaaagttcctgtcagtaacatggaatccttttctgtgcctgcatgctcagggcctctttcattctgtttttgactctgttgtaaaagagcctagccactgctgattataattctgctgtgtaatatgcttactcatctcaaagaatcctygtctcaactgattactgttttgtaacccttgcattctgcagggaatcatgcacttcaatccatgctagacataaaatatctgttttgacagtctttgatttcacttaaagggtacagattttaaataatcaaagagggcttatataataaagtttgaggtctcagaagtgctcttctgtcaggaagggggagaagaaaagaagacggcttttttaaaataggatcatagaactagaggatatcatgatcacctagctacaaggcttcagtttacagatgacaaatggcaaaaaaggaggggatgaaagaagctgaagtgacttgcctaaattcatacagctgctcaaaaacagagtctcatctataatttagatctcttaatttccaatgaattttccccttcatcacagctttcagattctttcccccctccttccttcctg

SEQ ID NO: 561442 - DNA, 505 bp, Homo sapiens
tctttccaccatgattgtgaggcatccccagccatgtggaaatgtgagtccattaaacctcyttttctttataaatttcacagtcttgggtatgtcttattatcagtataaaaaaggactaatactgtattcttatttaggttgaatctgttcggtgtttaagaactaactgtacctggatatttatatctttttcaagttttgaaacactttctgttatagtttctttgaataggctttctacccattgctcttgctcagctccctcttgaatggcaataattcttagatttggtcttttgaaataattttctatgtcttgcaggtggtctttattccttttcattctttttttttcctttttctcctctgaatttgtatttttaaatagcaggtctttgaactcactgattctttcctctgcttgcttcattccactgttaagagcctctaatgtgtttttcatctcagccaatatatttcatagttgcaagatttctgtttg

SEQ ID NO: 561443 - DNA, 424 bp, Homo sapiens
gctagtggccttgcacagtggcaggacagatctattaggagcagcaaagtacaggggaaaagcatgtacttttcagacagctatgggtttaaattttgttccaccatttaccagcttcaatttttctctyaaccagtgatgagattaaataacgtatgtagagcccagggcctgggtcataagaactcctcaataagcagtatgactatattctgaggggtgatttatcagtgagccagggtggaaatacctcatttgagtaatcctcaactgttctgcaacattcctagatgtttctggtgtctactttaaacaggaaaaacttcccatgccactttgccatctccacctgaaaactgtttagtagttcagtactataaatatcagttgaataatttaaattcactggttatctttagaattc

SEQ ID NO: 561444 - DNA, 424 bp, Homo sapiens
gctagtggccttgcacagtggcaggacagatctattaggagcagcaaagtacaggggaaaagcatgtacttttcagacagctatgggtttaaattttgttccaccatttaccagcttcaatttttctctcaaccagtgatgagattaaataacgtatgtagagcccagggcctgggtcataagaactcstcaataagcagtatgactatattctgaggggtgatttatcagtgagccagggtggaaatacctcatttgagtaatcctcaactgttctgcaacattcctagatgtttctggtgtctactttaaacaggaaaaacttcccatgccactttgccatctccacctgaaaactgtttagtagttcagtactataaatatcagttgaataatttaaattcactggttatctttagaattc

SEQ ID NO: 561445 - DNA, 424 bp, Homo sapiens
gctagtggccttgcacagtggcaggacagatctattaggagcagcaaagtacaggggaaaagcatgtacttttcagacagctatgggtttaaattttgttccaccatttaccagcttcaatttttctctcaaccagtgatgagattaaataacgtatgtagagcccagggcctgggtcataagaactcctcaayaagcagtatgactatattctgaggggtgatttatcagtgagccagggtggaaatacctcatttgagtaatcctcaactgttctgcaacattcctagatgtttctggtgtctactttaaacaggaaaaacttcccatgccactttgccatctccacctgaaaactgtttagtagttcagtactataaatatcagttgaataatttaaattcactggttatctttagaattc

SEQ ID NO: 561446 - DNA, 549 bp, Homo sapiens
  misc_feature 42: n = A,T,C or G
cagaagtgaaacatctctacaatgaaaactataaaaaactgnttaagaaaattgaatagagcacccataaaaggaaagacattccatgggttgaaagaatcaatattgttaatatgtccatactactcaaagcaatttatagattcaataaaatccttatcaaaataccaatgacattcttcacagaaatagaataaacaattctaggctgggtgcagtggctcacacctataatcccagcactctgggaggccaaggtgggtggatcacctgagttcaggagttcgagaccagcctggccaacatggcgaaaccctgtctctaccaaaaatacaaaaattagccaggcatgtgtgtggaggaaaagttaaatattaaatttgaactcaattgaacatggacacaaacaatggtcactaagtcctgaaacaggttgagtgagccccttgaggcattcatccakcgctgtttcagagaaatctctatttcaatctattcttacacgttagttattaaaaaacaatagacaatcgcaaaaacaagttgtga

SEQ ID NO: 561447 - DNA, 471 bp, Homo sapiens
taatactgaccttactatgcatatggcatttactattaaaaaaaaaaaaagtagtaaccaaggccaagataaacaacctgatacattaaatacatgtgtaataaggagaagattaaatgatttttaatctttaatttttaaagaaaaccctaaaattttagcaataccaccacagctcttacttaaaaagtgctctttacaaaaaataactaagcatatcacacgagaatgaaactcaagtttttycatgtttagttgttttgctagtgactaataaacttctgatcaagacatttaaacccctaatcatttaatcttctataaactcaagattttaaaagtatctaaaactccccaaaaataaatgtaataaactggacatacaacatggaaatgtctaatgcacttttcagaaagttgccacttgggcttaaatgggtaaaaatttacttttgacgtcaaggtgtaaaa

SEQ ID NO: 561448 - DNA, 459 bp, Homo sapiens
taaagaaatgggggctccgagcagtcaagaagaacatgccccaagttattcgtcagtgaggcggaaattgtggtgtmcttgtgtaagttcacattttatactttaccattatactgtgctccaaattatctgatatttactttcaaagcatgtgtagaaagtttactatgatgatgcagagacattgtacagaatccagtcccttgactctcaggtccccagaacactcacttcacgattttgttgacctcttctgtcaacttaaacctggcactctcttggctggctttctctgctctttctgggcactccaaagcttctgtacttacatgctacaattccagtcacaggaagatgctgagttctttagtcccagatccatattcctgagaaaacctaattgcctaggctcaggtcataactctgtatctgtttcagttgattatggctgggcctact

SEQ ID NO: 561449 - DNA, 459 bp, Homo sapiens
taaagaaatgggggctccgagcagtcaagaagaacatgccccaagttattcgtcagtgaggcggaaattgtggtgtacttgtgtaagttcacaktttatactttaccattatactgtgctccaaattatctgatatttactttcaaagcatgtgtagaaagtttactatgatgatgcagagacattgtacagaatccagtcccttgactctcaggtccccagaacactcacttcacgattttgttgacctcttctgtcaacttaaacctggcactctcttggctggctttctctgctctttctgggcactccaaagcttctgtacttacatgctacaattccagtcacaggaagatgctgagttctttagtcccagatccatattcctgagaaaacctaattgcctaggctcaggtcataactctgtatctgtttcagttgattatggctgggcctact

SEQ ID NO: 561450 - DNA, 559 bp, Homo sapiens
agcctggccaacatggtgaaaccctgtctctactaaaactacaaaaattagccgagtgtggtggtgggcgcctgtagtcccagctacttgggaggstgaggcaggagaatcacttgaacccgggaggcagaggttgcagtgagccaggatcgcatgactgcactctattctgggcaatagagggagacaccatctgaaaataaaataaaacaaaatatgcatattttgtgagcatatttctccagcatttctgatctgcattatgcaagccacttgataataccggctccctggcccccagctgctgggagggctccaccagtttcctgctcaccagtcagccctttccaaagctgctgtcaaatggggactgaggaagaaggcttcagtcaatgtgactattgggtcagtctgagtaaacctgttaccctcatgaaatatgttttgagtcttatctttaatcatggaatgaaaggtttttgctttgttaaaacatcttcaagctttgttgtacaggtttggaattgtgatggggatgccagcaaagaatttcctgtac

SEQ ID NO: 561451 - DNA, 556 bp, Homo sapiens
gcaacatggcaagagcctgtctctacaaaaaatagaaataaagttggctgggcatggacatgcacacctgtagtcccggctattcaagaggctaaggcaggaggatttcttgagttcaggaagtcagggttgcagtgagttgtgatctggctactgtactccagctgaggtcagagagtgagaccctgtctcaaaaaaaaaaaaaaaaaaaaaagtctgagagtcagtggatgaagcagaaaagaaaaattaaaaaagaaaataaaacaaaaattttttaaaagggaaaaaaagttttatttaaaaataaaatctgaaatcattgcccatcaagtacatgagtatggcttttgtggctaacagtgttgctcattctccatatttatagtgtctttggtttgcaactggaaagggtaatagtctttgtggcttagaascatatgatgtctttgctccaatagcaatgtatgcttctcctattttatagctgcagatagatatgatacaaacacctggcttcactgtgtactttattttacttacttacttatttatt

SEQ ID NO: 561452 - DNA, 556 bp, Homo sapiens
gcaacatggcaagagcctgtctctacaaaaaatagaaataaagttggctgggcatggacatgcacacctgtagtcccggctattcaagaggctaaggcaggaggatttcttgagttcaggaagtcagggttgcagtgagttgtgatctggctactgtactccagctgaggtcagagagtgagaccctgtctcaaaaaaaaaaaaaaaaaaaaaagtctgagagtcagtggatgaagcagaaaagaaaaattaaaaaagaaaataaaacaaaaattttttaaaagggaaaaaaagttttatttaaaaataaaatctgaaatcattgcccatcaagtacatgagtatggcttttgtggctaacagtgttgctcattctccatatttatagtgtctttggtttgcaactggaaagggtaatagtctttgtggcttagaagcatatgatgtctttgctcmaatagcaatgtatgcttctcctattttatagctgcagatagatatgatacaaacacctggcttcactgtgtactttattttacttacttacttatttatt

SEQ ID NO: 561453 - DNA, 542 bp, Homo sapiens
ctttgtacttttctttgtcatttgacttcttgccaaaatataatcttatcttgcctctgtagtttgacagaaaaacaaaacaatcagcatatttttaaatttgtgatttattatcttargtcccacagaaattgtggtgggtagggaagaaaaaatcttcatctctcacaatcattcaataatcaacccactataaaatttgtctccactcgaacatttccatcccttcttgttcccatgaacactggcatctatgcccaatcatggacggttaatttctggctaaactgtgggatattggaaacatttagtgtaaataaaatgaaaatctatttcaaagtgatattacaaatctcacaaagctgtgaagtgatgtttcaggaattactgaaaaagcctttgactaaagacaaattcaagaaggcttatatataatacaataggttcttcaagagagaatattttgaataccaaaatacttagagttaactttgggaaaactgatgaagtatgaagtttgcaaatatttttggaaaatcagc

SEQ ID NO: 561454 - DNA, 546 bp, Homo sapiens
gtctggcaacagactgttcagtggaaaccttacagaccaggagagagtgaaatatttaaagtgctgaaggaaaaacacttttaccctagaatagtatatccattgaaaatatccttcaaacacaaggaagaaataaagatgttcccagacaaacaaatgctgagggatctcatcaataccaggcctgtcctacaagaaatgctaaagagagtacttcagtcataaagaaaagaacactaatgagcaataaatagtcatctgaaggtacaaaactcaacatttatagtaagcacacagaaaaatacagaatattataaccctgtaactctggtgtataaactactcttattgtatgtagaaagactaaatgatgaactaataaaaayaataactataacacattttcaggacatagtacaataagatgtaaatagaaacaaaaaaattaaaaatgggggaacaaagttaaggtgtagagtttttattaattttctttttccttgtttgtttatgccaatagtgttaagttgttatcaggttaaagta

SEQ ID NO: 561455 - DNA, 546 bp, Homo sapiens
aaaataccaatgtcatttttcacagaattgggaaaaaaaaatcctaaaagtaatatggaaccaaaagagcctgaatagccaaagcaattctaagcaaaaagagcaaagttagacatcacattacctgacctcaaattatactttgaggcaatartaaccaatacagcatggcacttctataaaaatagacacataggtcaaagaaacagaatagagaacccagaaatgaagccacacacctacagccaactgatttttgacaaagttgacagaaacatacactaagaataccattttcaataaatggtgctgggaaaattggattgccatatgcagaagaatgaaattggacccctgtctctcaccacatataaaaattaataatgatgaatcaaagccttaaatgtaatatctgaaactattaaaataactagaataaaacctagggaaacctcttttgaacattggtctactcaaataattctcgattaagacctcaaaatcacaagcaacaaaaacaaaagttgacagatgggacttaataaa

SEQ ID NO: 561456 - DNA, 546 bp, Homo sapiens
aaaataccaatgtcatttttcacagaattgggaaaaaaaaatcctaaaagtaatatggaaccaaaagagcctgaatagccaaagcaattctaagcaaaaagagcaaagttagacatcacattacctgacctcaaattatactttgaggcaataataaccaatacagcatggcacttctataaaaatagacacataggtcaaagaaacagaatagagaacccagaaatgaagccacacacctacagccaactgatttttgacaaagttgacagaaacatacactaagaataccattttcaataaatggtgctgggaaaattggattgccatatgcagaagaatgaaattggacccctgtctctcaccacatataaaaattaataatgatgaatcaaagccttaaatgtaatatctgaaactattaaaataactagaataaaacctagggaaacctcttttgaacattggtctastcaaataattctcgattaagacctcaaaatcacaagcaacaaaaacaaaagttgacagatgggacttaataaa

SEQ ID NO: 561457 - DNA, 584 bp, Homo sapiens
gtgacaaatggtttacttatagcaatttgtttccattttactgaaaatttctacagtcttaaaaaaataaaaagatttttaatggtatttgaacattgttgaaagtgaactgcttgaaatggccaaagctggaatctagaatcattatgctttcccataagatatgaccagaaacgtgacatcctgggtcatggattgctagaaggaattcactcttcagtccactgttcacagaaccgagtgactcyaaggcaagaatttcaagctccactcatcaagacttaccagatagattacttaaaaactctgttctcattctagactaaagtttcaatggtcatttagtttgctataattaatcttttctaagggtctgcctcaagcccagcaagatttgtttttgctgaaatgaaaaaacatcggtttgagattggattctctgtcacctcgcttcctctttctggaatggtactctcatatctctacgtctttctgtttatcttttagcaagtttatcttctctccttggttggacactccacagtgactcaaacccattcatcctgtgccctgactgacttgtt

SEQ ID NO: 561458 - DNA, 573 bp, Homo sapiens
ttaagacaactacagtagaggttaattctattgcagtaggggagatattcgagttcaactccaaatacagtaaggacaagtgggaatttatagccagctatcagaagaaggagatcagtgggtggaaaattactcagaggagacatcacagaaggaagattcttgctaaaggcaggtgaaggacttatacatcaagggtggggaatgagatacttcatcagatataaagggggattagttatcaaaggtagaatgattcttgcaaatctcacttggcaggattctttgcttaaggcaggccaggattgagatctagwtgagaagagggctcagaggagcctaacaagtttggtcaaggacacagcctttgtcaactgtaaatggtattgagtttttaattttggtttccacatgttcatcgttaccataggattaatttgttctaactaatccagcatctcatccatctacaatactatcattcttcctcctccaataaatgaataggattcattttcacatgttgatcttgtattctgcaacttggctgaacttaatagttctagaaagttt

SEQ ID NO: 561459 - DNA, 602 bp, Homo sapiens
ttttcttttgcaggttacctgggatttttaaaaaaatgtagaaaattatgccatctgcaaattgggtagtttctctctttcgttccaatctttatgtctttcattattttttcttgtcttatttcagtggctagaactgccagtactccattgaataggggtgatgagagtgaccacacttgccttgttaccaatctkatgaggaaagcatttagtctttcacaatgaagtatgatttcataatagtattagatttgttgtagatgctctttatcaagatgatagaattcctgtggtgaaaaaccaactcaaactgttttttttttaaattctgttctcatgacaatcaactcacaagacttctgtgaccaaatgtgtggggatttcttgccacacaccaagccagcaatcaattctgcagtggacgccagctaggtgtcctctaattcaattcaattctgacgtgatctaactggagctagcctcagacaccacaggttgaggtgtcagtcccataagattgtcctctctttctcaccagacacaagttcaggcctccaaaatttctgaacagctggcttcaagttgggggttgccatgaa

SEQ ID NO: 561460 - DNA, 614 bp, Homo sapiens
tggttatgatgtataattatttttatatattgttttgttcaatttgctaatataatattyccagttttcttttatccttcttctttttggggtggtggacactgtctgattttggagttagtgtaaatctgactcataaaatgagttacaaaatgtttcatcttctatttttttgtaagattttgtgtaaaattagtgttaattcttctttaaatacttatagagttccccggtgaaacaatctgggcctgagattacttttggaaagttttttaatcccaatttaatttttgaaaactattatagggctatttaggctatctgtttcattttggttgagtgttagtagtctgtggttttcaagaaattagtctatgtcttcgacaattaaatatatatcagtatatatttattttctatatcaccttattatctttttacaggctgtgggagcagcggtgatatttctctttcattcctaatattagttatgtctttctcgtattttgccagttttactagaagattatcattcttattgatttttttctgaagaaaactttttgctttactgactttctgtattatttcttattttgaatttcattgatttc

SEQ ID NO: 561461 - DNA, 377 bp, Homo sapiens
caacacaacactaagtatttgtgtatctaaacatagaaaaggtatggtaaaaatatggtattataatcttacaggaccacttccatatatgtggtctgtcattcaccaaaatgtcatttgacatatgactggacttatattgagactacagatagcagctaaaaaagtcagaagtttgattctggaatattgaattccctattagaaatgcaaatggattgagtggaagttgaatggagatgaaatatatgtttggattcaaaggaaaatatctctgctggtgctacaaatttgggaatcatcaatatatagaaagtaggttatgttaaagctatgatacaggatgaartcactaagagaataagagtaggtagaaa

SEQ ID NO: 561462 - DNA, 608 bp, Homo sapiens
gattcattgatttccatttyttataatttttcatggtataaattcaatgacttttaacaaaaataagtggtcatgtaaccaccacctcacaaaagacatagaacatttccaacaccccagaatgttttctcatgttcctttgtagtcagtcctctccccaacctacagacccagaaaaccattgatctgctgtcactacaattttgccctttctagaattttatggagatggaatcgtactgtacatagtcatttgtttctgtcttatttcacccagcatgatgcttttggaattcgtccatgttgttgtatgtattggtagtttgttcctttttattactaaattatatttcattgcaggaatgtactaccatctgtgtatccattggcaagttggacattatttactgtagttttaatttgcatttccttattactgatggcattatcaatcatatatctatgttctgtgtgtctgcccaatattcttactccttgtcctgttacagactttcttattcatttgctttcttgattctctcaattgtatgcctgttttctattttggtaatttgtgtcttttcccattcttttccacattttacttt

SEQ ID NO: 561463 - DNA, 437 bp, Homo sapiens
ggaagtaaatgttgccaacttcagcattacaagcaggtttcaatgtttctggagaaagtctagtaataagttkggaagagttccaataggttttcattcaactttgtacttaacttacctcaagaagcctttgtctcctctttggaaaaaaaaaatgagaaattattcataccttgttactgagtctacctgatagacagtgggtgtttaacagctattagttttcttaacactccttaaatgattgaaataattctggaagtctggacggctcagcttaccatattttcagagttatctcaaaaaaattatttttagattgctccttttattgtctttgccttttttcattttagcaccattttattatacacttttatatgtttttaaaatattcttgcatttagtataatttgtttttgtaatgtacactgttc

SEQ ID NO: 561464 - DNA, 612 bp, Homo sapiens
gttgtttgtttttttcttgtaaatttttcttaagttccttgtaaattctggatattagaactttgtcagataagtagattgctgtgatggttaatactgtcaactgattgaattgaaagataaaaagtattgatcctgggtgtgtctgtgagggtgttgccaaaggagattaacatttgagtcagtgggctgggaaaggcagacccacccttaatctgggtaggcacaatctaatcagctgccagcgtggctagaatataaacaggcagaaaaatgtgaaaagagagactggcctagcctcccagcctacatctttctcccatgctggatgcttcctgacctcgaacactgggctccaagttcttcagttttggaattcagactggctctccttgctccttagcctgcagatggcatattgtaggaccttatgattgtgtgaaatagtacttaacaaactcccytttatatatataactattccattagttctgatcctctggtgaaccatgactaatacaattataaaagttttctctcattctgtaggtttcctgttcaccctgatgataatttcttttgctctgcagaagctttttagtttaattagat

SEQ ID NO: 561465 - DNA, 511 bp, Homo sapiens
aatctacacaactaggaagctcgatggacctcaaataggataaatgcaaagatattcacaaatagatacatcaccataaaaatgctgaaagcaaagacagtgagaacatcttgaaagcagccagaaaaaaaaaaaaacaatcactgtccaagaatcatgcagatcctgttataagattatcgttccccttaactgctctatagataacaatttaagcactgtaaaatattaagttttccatttgagatattctttcaagaatatctcaagcaggacgtccagcttctgagtgggaaccttcaaggaaactcacaaggaaactcttataagattatccactgacttcagtacaaacaatgagagccagraggcattaggataatatagtcaagtgctcaaagtaagcaaaaaaaaaaaaaaaaaaaaaactgtcaacaaaaaaccctatattcagcaaagctatttttcaaaaatgcaggcaaatagagctttttttttttgaaaatgcagg

SEQ ID NO: 561466 - DNA, 545 bp, Homo sapiens
ccgccctgatctacttacagttgackgggtcggggtgcagggtgggcaattttgtactcatttataattttaaattagttttcctcctccaaatccttcactttatttttaaaaaaataattgtgggctgggcatagttgctcacacccgtaatcctagcactttgggaggccaaggcgagtggatcacctgaggtcaggagttcaagaccagcctggccaacatggtgaaaccccatctctactaaaaatacaaaaattagccgggtgtgatggtgcatacctgtaatcccagctacctgggaggccgaggcaggagaattgctggaactcaggaggcagaggctgcactgagccgagatagtaccactgcactccagcctgggtaacaaagcgagactccatctcaaaaattaattaaataaataaataaataaataaataaataaataaataaataaatgattgtggaagaaatgctcagaaaaaaagtaacaagtatttggaaacaaagcaaagcatagcacagaaaaaaggaggagaagg

SEQ ID NO: 561467 - DNA, 545 bp, Homo sapiens
ccgccctgatctacttacagttgacggggtcggggtgcagggtgggcaattttgtactcatttataattttaaattagttttcctcctccaaatccttcactttatttttaaaaaaataattgtrggctgggcatagttgctcacacccgtaatcctagcactttgggaggccaaggcgagtggatcacctgaggtcaggagttcaagaccagcctggccaacatggtgaaaccccatctctactaaaaatacaaaaattagccgggtgtgatggtgcatacctgtaatcccagctacctgggaggccgaggcaggagaattgctggaactcaggaggcagaggctgcactgagccgagatagtaccactgcactccagcctgggtaacaaagcgagactccatctcaaaaattaattaaataaataaataaataaataaataaataaataaataaataaatgattgtggaagaaatgctcagaaaaaaagtaacaagtatttggaaacaaagcaaagcatagcacagaaaaaaggaggagaagg

SEQ ID NO: 561468 - DNA, 545 bp, Homo sapiens
ccgccctgatctacttacagttgacggggtcggggtgcagggtgggcaattttgtactcatttataattttaaattagttttcctcctccaaatccttcactttatttttaaaaaaataattgtgggctgggcatagttgctcacacccgtaatcctagcactttgggaggccaaggcgagtggatcacctgaggtcaggagttcaagaccagcctggccaacatggtgaaaccccatctctactaaaaatacaaaaattagccgggtgtgatggtgcayacctgtaatcccagctacctgggaggccgaggcaggagaattgctggaactcaggaggcagaggctgcactgagccgagatagtaccactgcactccagcctgggtaacaaagcgagactccatctcaaaaattaattaaataaataaataaataaataaataaataaataaataaataaatgattgtggaagaaatgctcagaaaaaaagtaacaagtatttggaaacaaagcaaagcatagcacagaaaaaaggaggagaagg

SEQ ID NO: 561469 - DNA, 545 bp, Homo sapiens
ccgccctgatctacttacagttgacggggtcggggtgcagggtgggcaattttgtactcatttataattttaaattagttttcctcctccaaatccttcactttatttttaaaaaaataattgtgggctgggcatagttgctcacacccgtaatcctagcactttgggaggccaaggcgagtggatcacctgaggtcaggagttcaagaccagcctggccaacatggtgaaaccccatctctactaaaaatacaaaaattagccgggtgtgatggtgcatacctgtaatcccagctacctgggaggccgaggcaggagaattgctggaactcaggaggcagaggctgcactgagccgagatagtaccactgcactccagcctgggtaacaaagcgagactccatctcaaaaattaawtaaataaataaataaataaataaataaataaataaataaataaatgattgtggaagaaatgctcagaaaaaaagtaacaagtatttggaaacaaagcaaagcatagcacagaaaaaaggaggagaagg

SEQ ID NO: 561470 - DNA, 479 bp, Homo sapiens
ctcacatactttaatatctggctttycaatatgttaatcaaagtgtcttcctatagtttttcattccaaatccttattatatataattattttaagtcaattcatacgaattatcaatgattgcttactatattttttctcttccttagactagctacgaaatattctttgtaagtagttgcaggcatttaagacttaaatatacctatttcaccaggaagagaagaaaagcatctcaaaatcaccccaaatccagcccagtcatagatggcaagcctgccaaatgccgaagtttaaagtaatgagttggtttaatggcaaagcaaagttcacatccctcattctatccccacctaacacctctgcactttccaaagtgcaagaatacataaggcacctagcaaagtacctgacgtgaaggaaggaggtcagtaacactaagtgactcgacctccttaagcaagactccatgtgagaca

SEQ ID NO: 561471 - DNA, 554 bp, Homo sapiens
gacttttcagactggcttctttcacttagtagtatgcatttaagtttccttcatgtctttcatagcgtggtagcttatttttttagcactaaataatattccattgtatcgatgtatcacagtttatttatcaatttatctacttaaggacaccttggttgcttcccagttttggcaattatgaatgaaactgctataaacatctgtgctggttttttgtgtggacataagttttcagctccttagggtaaataccaaggagtgtgattgctggatcatatggtaagaatatgttagttttgaaagaacttgctagactgttttacaaagtggatgttctattttgcattcccaccagcagtgagtaggagttcctgttgctccacattcttgtcagcatttggtggtgttagtgttctggatgttagccattctaatagatgtgtagtgctatctcattgttgtartttgcattttcctgatgacatatgatgtaaagcatcttttatatgctaacttgcatcacccttcttggtgaggtgtctgttagggtc

SEQ ID NO: 561472 - DNA, 601 bp, Homo sapiens
aaaaccaaacactacatgttcttactcataagtgggagttgaacaaagagaacacagggacacagggaggggaataycacacactgggacctttcagcgggtgaggggctaggggagggatagcattaggagaaatacctaatttagatgacacattgatgggtgcagcaaaccaccatgttacgtgtattcctatgtaacaaacctgcacgttctgcacatgtatcccagaacttaaagtataataataataataaaaatacaatcctagggtgacaaagagaaaactatacactgtaacctgtaattttacaatgcagccaaaatgaaactttccttttcaggaaaaatttttgggccataagaagtgatccactgtatgaagtttcaattatgcaagatgagtaagttccagagatctgtacagcaatagtacttctagttaacaatactgtgttataaacatttgctaagaagatagaacttaagtgttcttattataaaaaattaatgaatgaatgagtgagtgaatggataaatagagcaggaggaaacttttggaggtgatggataggtttacagcattgacggtggtggtttc

SEQ ID NO: 561473 - DNA, 601 bp, Homo sapiens
aaaaccaaacactacatgttcttactcataagtgggagttgaacaaagagaacacagggacacagggaggggaatatcacacactgggacctttcagcgggtgaggggctaggggagggatagcattaggagaaatacctaatttagatgacasattgatgggtgcagcaaaccaccatgttacgtgtattcctatgtaacaaacctgcacgttctgcacatgtatcccagaacttaaagtataataataataataaaaatacaatcctagggtgacaaagagaaaactatacactgtaacctgtaattttacaatgcagccaaaatgaaactttccttttcaggaaaaatttttgggccataagaagtgatccactgtatgaagtttcaattatgcaagatgagtaagttccagagatctgtacagcaatagtacttctagttaacaatactgtgttataaacatttgctaagaagatagaacttaagtgttcttattataaaaaattaatgaatgaatgagtgagtgaatggataaatagagcaggaggaaacttttggaggtgatggataggtttacagcattgacggtggtggtttc

SEQ ID NO: 561474 - DNA, 601 bp, Homo sapiens
aaaaccaaacactacatgttcttactcataagtgggagttgaacaaagagaacacagggacacagggaggggaatatcacacactgggacctttcagcgggtgaggggctaggggagggatagcattaggagaaatacctaatttagatgacacattgatgggtgcagcaaaccaccatgttacgtgtattcctatgtaacaaacctgcacgttctgcacatgtatcccagaacttaaagtataataataataataaaaatacaatcctagggtgacaaagagaaaactatacactgtaacctgtaattttacaatgcagccaaaatgaaactttccttttcaggaaaaayttttgggccataagaagtgatccactgtatgaagtttcaattatgcaagatgagtaagttccagagatctgtacagcaatagtacttctagttaacaatactgtgttataaacatttgctaagaagatagaacttaagtgttcttattataaaaaattaatgaatgaatgagtgagtgaatggataaatagagcaggaggaaacttttggaggtgatggataggtttacagcattgacggtggtggtttc

SEQ ID NO: 561475 - DNA, 442 bp, Homo sapiens
  misc_feature 217: n = A,T,C or G
gtcgtttttggttacatggttgaattctatagtggtgaattctgaggtattattgcacccatcacccagacagtgtacactgtacccagtatgtagtcttytatctctcaccccctgtttaccttcccactgagtccctaaagtccattatattactctgtatgtctttctatcttcatagcttagctgctacttgttagtgagaccatacagtatntggtttcccattctggagttatttcacttagaatagtggcctccagctgcatccaagttgctgcaaaagacattttgttccttttaatgcctgagtaatactccatggtatatatatataccacattttctttgtccattctttgatcaatgggcacttaggtcggttccatatctttgcaattgcaaattgtgctgctataaaaatgtgtgtacatatgtcttt

SEQ ID NO: 561476 - DNA, 442 bp, Homo sapiens
  misc_feature 217: n = A,T,C or G
gtcgtttttggttacatggttgaattctatagtggtgaattctgaggtattattgcacccatcacccagacagtgtacactgtacccagtatgtagtcttctatctctcaccccctgtttaccttcccactgagtccctaaagtccattatattactctgtatgtctttctatcttcatagcttagctgctacttgttagtgagaccatacagtatntggtttcccattctggagttatttcacttagaatagtggcctccagctgcatccaagttgctgcaaaagacrttttgttccttttaatgcctgagtaatactccatggtatatatatataccacattttctttgtccattctttgatcaatgggcacttaggtcggttccatatctttgcaattgcaaattgtgctgctataaaaatgtgtgtacatatgtcttt

SEQ ID NO: 561477 - DNA, 610 bp, Homo sapiens
cctgttgttgagtttatatgaacagtgtgtgttctttcgcacaatattacatttgtgaaatttatcagtggtattgttgcatgtagatatatgtaagtatatcttgtacattttcattgatgtataatctattgtgtcaatagaatacaatttatgtattaggcacttaggttgattccacattttggctatggtgaatagtgctacagtaaaacatgggagtgcagatatctcttccatatattgattttgtttcttttggatatatacccagtaatgaaattactggatcatataggtagctctattgttttagtttcttgaggagcctccatgtagttgtccatagtggctatactaatttacattcctactgacartttatgagggttccccttcctccatatccttaccggtatgttattccctatctttttgataaaagccatttaaactggtgtaagatgatatctcatggttttaatttgcatttttctgataatagggatgtggagcattttttcatgtacctgttgtccatttgtttgtcttttttgagaaatgtctattcatatcttttgcccatttataaattgtattattattattt

SEQ ID NO: 561478 - DNA, 503 bp, Homo sapiens
tgaattctctcatctttttttggggaaaagtctttatctctccttcgtatttgaagaaaagcttgctaaatacaatattctcagatggcagttttttctttcagcactttgaaaatatcattctactctcttctcacctgtatggtttctatggagaactctgttgccggacaaattgaagctcttttttatgttattttcttcttttctcttgctgcttttactttgatttttgggagtttgattatataccttgaggtagtcttatttgggtcaaatctatttggttgttctttctgtaccttgatatttacatctttctcaaattttagaaagttttctattatatctttgaataaattgtctatcccttgttcttcctcaactccctcttaattaccaataattcttagatttggtcatttgaggtaatattttatatattgtaggtaatcttcaytttcttcttttttctattttctgattattttcaaattaccttt

SEQ ID NO: 561479 - DNA, 618 bp, Homo sapiens
tgaattttagctattttgattatgtgtgtgtgtgtgtgtgtgtgtrtgtgtatatatatatatatctcaccaaactcaaagctacatagattttcttctatgttattgtataaaattttaaagatttttattttacatttaggtttatgatctgagttaaattttattgaagaatgtaaggtctgttactagattcatttttgttgcacataaatatccaggtgttgcagcactatttgttgaaatgaccatatttttgccatcgaattgccttaacttttttgacaaagatcaatctactctatttgtatgggttcatttctggattctctattttgtttcattatttgtctttttttgtttttgccagtgccagactatcatcttaattactgtagttttttagtaaatgtcaaagacctatagtgttagtactctgacttttttcttcaatgtcgttttggctcttctggtgttttgcttttttgcatgagtttcagaatcagtttttcagtatctgtacaataacttggaattttgagtgatattgcatgcatatacaaatcaagtttagaagaacagagacaaaattgagtcttccttctatgaacacagaat

SEQ ID NO: 561480 - DNA, 636 bp, Homo sapiens
ttgtttttttcttgaaatatttacttataggttttattttttcctgtttttctttattttccaagtattttgcaataagcatgtactactattatcaccagaattaaatgtagtcacaacataaagtgatatgaaaaaaatatatagttagtaaaaaacacacaaaccgcacataatcttttgggccttcacagattcaccacacttggttattattcatattccctacagtatatttayatagacctgtattcaacacggctattttctgtaagcacagttggttagtaaccgtgttataaaatttaatgaacatttactaaaaacctgaaaagtttagttatttgtcttaactccctgtgtccatgtgtgagcaaagacttggatgaaatataaaaatttcagtgaagcataagcccacatatggatacagacttttttgtgtttgtttgctttctggaattatccagaaattgcttcatctgtcactttcactgtaacttctaggggagtataatgccaacaataaaagcatttctatagtgaattaattttatattaaaaatccaaattagttggctttcatcaaaaagaccaaacacttcttaattttcttattcttttctttcttactct

SEQ ID NO: 561481 - DNA, 572 bp, Homo sapiens
ctaagatctctctcactccactctctccactctagatcataagccccatactggcatctatacgcacagatatatatatatatatatatatatatatatatatatatatagtttaaacaaaataatagtaataattatctacaatccccagagacaacatgggagacttttgcttcacgtggccctccctaaccacctgaaagtatgtgatgatgcagagtcttagggaggtgggatccacatttctcaatacataaaaatgataaacactgagggtggtggatagcccagtttccctaatttgatctatatacattctttgcrtgtaacaaacacatgtaccccataaatatgtaaattatcatatatcaataaagggtaaaacaaaacctgcttggggttatcttcaattccctgcccagtggaaagaggagaggcctgactttaggtacccaagaaggcatttcagaaggtctttgactagcacctaaaaacaaagagcataaaagcccccacccccttctccatgccctaaatgtgtgtgtgtgacatcacatatattgataaactct

SEQ ID NO: 561482 - DNA, 619 bp, Homo sapiens
tcgtcattctgcttgactcttcaggctgatttttcttcctcagaaaaaagcaaaggagagaacgaaggaactagtcagggttgcctgggccttgaataacaggctgcagtgccacctgtctactctaatttctccttcatgtggacctgggctattcatagggaaaaatarggttttcctctttctggttttactcttttgttgttactataacacagaaaattaatattgatggaatgtatatgtgaatcaaagcaactagggaatgctctgaaaagaacatgtcataaaacagacaagaaaaaataaatgattaaattactgacattcggtcctagctgaggatctgccctctcagcacttcaggctacatgttggaaaggcattcactttcaatgacaacaaacagttaaactccaaatgcttcaatgccaggaatccatacattagttgtcattagttgtggacttgagcctaattcagggcaaacagtttgatttgtaagagctcactgaatatacgttcttcactgccattcacctgggcatctgctctttcccagttcagagcagcaaaatggagggaaggtgctttttgcttttccagagagctagacaga

SEQ ID NO: 561483 - DNA, 619 bp, Homo sapiens
tcgtcattctgcttgactcttcaggctgatttttcttcctcagaaaaaagcaaaggagagaacgaaggaactagtcagggttgcctgggccttgaataacaggctgcagtgccacctgtctactctaatttctccttcatgtggacctgggctattcatagggaaaaataaggttttcctctttctggttttactcttttgttgttactataacacagaaaattaatattgatggaatgtatatgtgaatcaaagcaactagggaatgctctgaaaagaacatgtcataaaacagacaagaaaaaataaatgattaaattactgacattcggtcctagctgaggatctgccctctcagcacttcaggctacatgttggaaaggcattcactttcaatgacaacaaacagttaaactccaaatgcttcaatgccaggaatccatacattagttgtcattagttgtggacttgagcctaattcagggcaaacagtttgatttgtaagagctcactgaatatacrttcttcactgccattcacctgggcatctgctctttcccagttcagagcagcaaaatggagggaaggtgctttttgcttttccagagagctagacaga

SEQ ID NO: 561484 - DNA, 566 bp, Homo sapiens
ctcgaacacccaggacttgggacattaaaaatcttttaatggcttaagtatatctttgaaggttattgaacaagtcttttagtcatataaagtaatgggagagagtgtaattaacaagcagagccagcctgtcagctcttaccctgtggtaggaaaagaagattctctaagttgcaggagttcctaaatttatcatgatctgttagtggagtcgcctttaatgtcttgcctgaggacacttcatcacacttttattcctctcattttaagcattctgtattaacagaarttaacacatggtgaccaaagaacacattttctatcttttatttcctcaacttctgcaattagaatgatgagatttatcagccggtgtcactgtgcagttgtgactatcagatgggtgtcagatgacattgctgtaagtgattggtatctaccatctagcatcatataatgacaattgcctgcttctgtcacagctgaataaatctgggtggtttttttgttgttgttgttaatcttggtccaacatttcctgtcagtgagattacagataattttat

SEQ ID NO: 561485 - DNA, 566 bp, Homo sapiens
ctcgaacacccaggacttgggacattaaaaatcttttaatggcttaagtatatctttgaaggttattgaacaagtcttttagtcatataaagtaatgggagagagtgtaattaacaagcagagccagcctgtcagctcttaccctgtggtaggaaaagaagattctctaagttgcaggagttcctaaatttatcatgatctgttagtggagtcgcctttaatgtcttgcctgaggacacttcatcacacttttattcctctcattttaagcattctgtattaacagaaattaacacatggtgaccaaagaacacattttctatcttttatttcctcaacttctgcaattagaatgatgagatttatcagccggtgtcactgtgcagttgtgactatcagatgggtgtcagatgacattgctgtaagtgattggtatctaccatctagcatcatataatgacaattgcctgcttctktcacagctgaataaatctgggtggtttttttgttgttgttgttaatcttggtccaacatttcctgtcagtgagattacagataattttat

SEQ ID NO: 561486 - DNA, 585 bp, Homo sapiens
tttctctttttcaatgttttttgaagattaacatgcatgtagaaaggccccaaaattgtaagtatacagcttaatggatttttacaaaatgaacagatctatgcaactaccaccaagatcaagacatagaatattatcacygccccagaagccacctccaaacccctaaattcttgtacatacttagtgcatatatgcatttctgataggcatatacttataataaaattgctgagttattcacctgttcagcttcaaaatatatattttaaagtttttgcaaagtacttgtaccaatttaccttctaaccagaagtgtatgagagttccagttgatttatatcatcaccaacatttgatgttgtcaggcttttaaaaaaaaattttgacaattctgatagatatgtggttatatctccttgtgaaagtaatttgattatctctgatgactagggtgaccataaatcctggtttaagtctgttttcctgacataattattaataatatgcctttcattctcaaaagtgtctaaatttggacaataaatttataattttcctacttatgattaatgaagttgagca

SEQ ID NO: 561487 - DNA, 568 bp, Homo sapiens
gaaaaacaagtaacctcattaaaaagtggggaaaggacatgtaagccggcaacaaatacatgaaaaaaatgyttgacatcactaatcatcagagaaattcaaattaaaaccacaatgagataccattttacaccagttataatagctattattaaaaagtcaaaaaacaacagatattggcaaggaggcggagaaaaggtaatacttatatgctgttgataggaattagtaaatctttatgaaaaacagtatggagatttctcaaagaactaaaaacagaactaccattcaatccagtaatcctactactaggtatatccccaaaaagaaataaatcattatataataaagatacctgcacccatatatttatcacagcactattcataatatcaaagatatggaatcaacataaatgtccatcagtataagactggagagaaagaaaatgttatatatatatccacataatggaatactattctgccataaaaaagaatgaaactatgtcttttgcagtaacatagatggaactggaggccattgtcttaactgaaataattcagaa

SEQ ID NO: 561488 - DNA, 584 bp, Homo sapiens
atgcaaacgggtctaagtgtaacttacagagttccttcaataattatttgtatcacagctaatacttggaaaatcactatggtcatgacaagagtattagagtagaaagggactcctagaaatcacttggtggcaatttttaattaattgaggtgtaatttatatactatataacacaggtcttaagtacttagttcaataaaatttgacagttgttgactcagtatgcaaacacatcaccaattaaaacattgaacatttttatctttccaaaaaggtttttcatggccaggtcaatattgatacgcccccttcacccagaaacaatcttgttcaaatttgtattacagtagcctagttttacctgctctagaacttcataaaaatgaaatgactcattatgcamacttttgtgttgggcttctttagctcaatataatatttttgagataattcatgttgttttgttatcagtatttgattctttttaaaaaatgtctgggccgggcacggtggctcacgcctgtaatcccagcactttgggaggctgaggcgggtggatcacgaggtcaggagatcgagac

SEQ ID NO: 561489 - DNA, 540 bp, Homo sapiens
attcaagtcattctcctgtctcagcctcacgagtagctgggactacaggcacccaccaccacgtccagctaatttttgtatttttagtagagatggggtttcactatgttggccaggctggtctcaaactcctgactgcaaatgatctgcccacctccaaaagtgctaagattacaggtctgagccaccgtgcccagcctttttctagcttttaaaggygtgagcttcgattattgatttgagatcttttttcctaatgtaagaatttagagatagaaatttccctctcagcatttctttagctgtatctcacatattcattttcgtgcacgtgtgtgtatgtgtgtgtgtgtgtgtgtctagataacaagaaatttgaaaataaacagtacactgctaaataacccaaaggcttttgtgtggacacattttttaaaatttctcttgggtattctctaggggtgtaattgttggatcatatggtaattctatgtttaaacacttgaggaactgccagattattttccaaagcaagaatac

SEQ ID NO: 561490 - DNA, 591 bp, Homo sapiens
tatatgtatgtggttatccagttgtcccagaatcacgttgaagagactattctttcatcattgaatggtcttagcatgcttgttgaaaatcagttgaccacagatgtgtgggtttatttcttgactctcaattatattccattgatatgtatgtctatctttatcagtactaaattttcttggttactattgcttcatagttaagtatttctttggatatacccaataatgagactgctgggtcaaatgctaattcaattttaagttctttgagaaattgccagactactttccgtaatggctgaactaattcccattagcagcatgtaagtattcccttttctccacaaygttcctagcatctggttttttttttaaaactttttgatagtagccattctgattgatgtgaaatggtatctcattgtggttttgatttgcatttctctaacgtttagtgatgatgagtattttttcatatgcttgttggctatgtgtatgtcttattctgaaaattgtctgtccatgtcctttgcccacattttcatggagttgtttgttttttgcttgttaatttgtttaagtttttgt

SEQ ID NO: 561491 - DNA, 480 bp, Homo sapiens
agagtggagatgacactctttctgaattttatcatcctaagcagaagctgaatttccctggatatattttccatatagaactcataggatttgctaatctgtagagtgagagagagagagaagtcagtgatgtccccaggattttgggcctaagagactggaataacacattgccgtcaagtgtgttagaaaaagcagcacatggagcacctttggatggggagatcaggcttttaattttgaacatgttgagttttagggctgtaactggaaaccctattgtctctcataacatttccatttctgagtgtgatgcttaaaaacctctgttcttcaaacctccacctttagataaatagcatattttctaaaggaaaggctccctgcacttcccacaggattgtgaatgmataataagggtctcccccatctcaagagggaagaatgatgaggaccttcagacatgcatgcatgaagttg

SEQ ID NO: 561492 - DNA, 227 bp, Homo sapiens
gtgggcattttccacgagatcctggttccaattackcctaattatttgttatgtcctatttgggttttctttttacagatctttaagaaattttcctttggctctgagttgagtcaaaatgttgagttcaactttcatcctaagcaagatagagggcatgaattatggttgaggacttatgcatattttgaccaaatgaaaatgaccactgttgctccagcccaatt

SEQ ID NO: 561493 - DNA, 491 bp, Homo sapiens
ggggtttcaccatgttggtcaggctggtcttgaactcctgacctcaggcaatccacccacctcagcctcccaacatgctgggattacaggcatgagccacagcacccggccaggtgttgaaacttaatggccagtgtgatggtattgaggtgggactctaagaggtatttaggtcaagaggactcctccccttatgaatgggattaaggcccttataaaaggggcttcacaagcattcagctctcttgcccytcactcctgccctgtgaagacatattattcctcccctccaggggatgtagcaccaaggcgccatcttggaagcagagagaccaggtcctctgtagccagcaccttgatatggaacttcccagcctccagagatgtaagaagctgtcttttacagatgaccccatcgcaggtattttgttatagtagcacaaatggacgaagacacccctcattgtcataaatgctgcaacttctacatc

SEQ ID NO: 561494 - DNA, 581 bp, Homo sapiens
cattggcaataaaatcccccacatttaccatctccaatttgtttgtgcaaccttattcctcctggacactgaataagaactcgagtgtcagtgcaaaaggctgtcacactgaccctccactgagccgttaacacttaagccaacygcgaatggcaaagctaaaagagcactgactgtaacactctttctagggcttcagggataatgggcacccccatagatgctgccgcgaggccacatggagttttgctcctgccggtggccaaaagcactcaccccggctcctgcacccactcacctgtgctccccctcctgtgaggggtggaatgcagtgggaccaagcaagtggagtccactctgctggcaccaaagcagctgactatttctagtgcctatgcactccagttcctgcccacgaaaaggtcagggaaatttcctgcttcattggcaccaatttatgacttagtccattcctgctgctatcacaaaagatcttagactgggtaatttataaacagcagaaatttattatctcacagttctgggagctgggaagcccactatcagggagccagtgaatt

SEQ ID NO: 561495 - DNA, 581 bp, Homo sapiens
cattggcaataaaatcccccacatttaccatctccaatttgtttgtgcraccttattcctcctggacactgaataagaactcgagtgtcagtgcaaaaggctgtcacactgaccctccactgagccgttaacacttaagccaaccgcgaatggcaaagctaaaagagcactgactgtaacactctttctagggcttcagggataatgggcacccccatagatgctgccgcgaggccacatggagttttgctcctgccggtggccaaaagcactcaccccggctcctgcacccactcacctgtgctccccctcctgtgaggggtggaatgcagtgggaccaagcaagtggagtccactctgctggcaccaaagcagctgactatttctagtgcctatgcactccagttcctgcccacgaaaaggtcagggaaatttcctgcttcattggcaccaatttatgacttagtccattcctgctgctatcacaaaagatcttagactgggtaatttataaacagcagaaatttattatctcacagttctgggagctgggaagcccactatcagggagccagtgaatt

SEQ ID NO: 561496 - DNA, 567 bp, Homo sapiens
atcctttgagactcagttcaagtgtaatctcttcgaccaggtcatccctgacccacctgccccaggtagcactgcagagcctttcctcgtgtccctgaccttcctggccagaatctcattatggtattgattatgctgaatggcattttgcatttgcgttcccatttgattgggagacctttgagggcagtgacctttcctttgtgtactstgcacttcacaccttgcctggtacatcgtggttgtcaggcagtcaggaagagctggcgccacagaaactgaccacaatcacagagcagttcctttcttgattttctgcccatgtcaaaaaaaaaaaaagctttttttggttgttgttatccttacaatttcactgccttaatttattagacctaattagcaaactaggcttgtgtgactctgctacacctatcgctccttgttttcccttttgccagctctactcaaagttgagcttctccaggagctgccctggtctcatcagcaacctgttcccaccttactatttctcttcaagtgcactggcaatttacacatttggaattc

SEQ ID NO: 561497 - DNA, 621 bp, Homo sapiens
tgtatttctctggaggagtcartgggttttttttttttttggttgtttttgttggtttatttgttctttctcagttgagttattgtgctgtggtggctaggttttctttagaatgcttgcatgttattgattttaatcaacttcatctaacaaaaaccacatgcacaaatctttttgagatacaggttttactccatatactcatctctattgtgagtataattaaagttatttgaggccacacccttagtcttctttctaggaaacatcttattccactgaaagaatctgcctggcactaccttaatccttttagggatatttttacagtttatcttttcacagccttgttttaataacttcagtttttattttagatacatagggtccaagtgcaggtttgttacgtgagtatattgctcttagggatcttgataagtggtatgatagccacactctggtttgaagcttgcctcaagactgagtcttagtggcctttctaactcaaaggttttcttaatttttaactttactgtagaggattaaaaaaaagtttcattttcaacctctttaaactccagcattttggataactccacattcttttgcatttctgcttgc

SEQ ID NO: 561498 - DNA, 621 bp, Homo sapiens
tgtatttctctggaggagtcaatgggttttttttttttttggttgtttttgttggtttatttgttctttctcagttgagttattgtgctgtggtggctaggttttctttagaatgcttgcatgttattgattttaatcaacttcatctaacaaaaaccacatgcacaaatctttttgagatacaggttttactccatatactcatctctattgtgagtataattaaagttatttgaggccacacccttagtcttctttctaggaaacatcttattccactgaaagaatctgcctggcactaccttaatccttttagggatatttttacagyttatcttttcacagccttgttttaataacttcagtttttattttagatacatagggtccaagtgcaggtttgttacgtgagtatattgctcttagggatcttgataagtggtatgatagccacactctggtttgaagcttgcctcaagactgagtcttagtggcctttctaactcaaaggttttcttaatttttaactttactgtagaggattaaaaaaaagtttcattttcaacctctttaaactccagcattttggataactccacattcttttgcatttctgcttgc

SEQ ID NO: 561499 - DNA, 621 bp, Homo sapiens
tgtatttctctggaggagtcaatgggttttttttttttttggttgtttttgttggtttatttgttctttctcagttgagttattgtgctgtggtggctaggttttctttagaatgcttgcatgttattgattttaatcaacttcatctaacaaaaaccacatgcacaaatctttttgagatacaggttttactccatatactcatctctattgtgagtataattaaagttatttgaggccacacccttagtcttctttctaggaaacatcttattccactgaaagaatctgcctggcactaccttaatccttttagggatatttttacagtttatcttttcacagccttgttttaataacttcagtttttattttagatacatagggtccaagtgcaggtttgttacgtgagtatattgctcttagggatcttgataagtggtatgayagccacactctggtttgaagcttgcctcaagactgagtcttagtggcctttctaactcaaaggttttcttaatttttaactttactgtagaggattaaaaaaaagtttcattttcaacctctttaaactccagcattttggataactccacattcttttgcatttctgcttgc

SEQ ID NO: 561500 - DNA, 521 bp, Homo sapiens
tttctgagctcatccctttctcaaagcacacagtcaaatgcaggtggaaagaaccagttcacactatcaacattctgcctcaaaaactccttgcccaaatctgttgcgtatgtatttttttcttgctatctatgttgyttcaggtgacagatttaccaatttttttccagcatattacataggttttcattttttaaaattcaatctcctattttggtttcctagttggtttctgtaaagtttcaaaatagtgtcacattttaaagattttattatagccagtatccttataataatattgttcttgctcaagagtcaggttttcttaagtgactctgcttcaagttgtggtttgggttcatttctgatccaaatgtctctctttataggtccactgggtatccaggacacacattttctatagtggacaggagatgctcagaataagtgagagggaatgttcagtgtctattaaggccacagctcatcacagaaaccatgccattttctcccatatatta

SEQ ID NO: 561501 - DNA, 483 bp, Homo sapiens
gatgctgcaggaacagcaagtagacagaaggcttcactttgcttctccctcttgcagccttcagtctctcttctgccaccgtagcacaggagcctaatgtgaggacagctggctaaggagaaatagggtttcctgagtttcatcccaagcatcataaacaacaaacaaagatgtggtgttgggatccaataacaaatacctatatgctctttacttattttatcagttgataaaattttgtgtcattggtttatctgtttatcaactttttggggggaggaattttaaagtgatgataccaacaaaaaaaaaaaaaaaaaagaagaagaagaaagtgatgatacgtcttccccaagtactttaacaggtgccctgcaaatgacacaacatcactagcacatatgaaaacaataacaaaaagtcaatacttctgtygtaatacagtctatactaaaacatcttcaactgtccccaagatacctc

SEQ ID NO: 561502 - DNA, 560 bp, Homo sapiens
atagcgagactgtgtctttacaaataataataataaaaatattggccaggcatggtggcatacactgaggtgggaggatcacctgcgtcctggcggttgaggcttcagtaagccgtgattgtgccactgcactccagcctgggtgacagagcaagacctcatctcaaaaaaactaaattaaattaaaacagaggattgtccctcctaatcgccttccatatcctgtattttattctcttttacttctttcatccatttattccagtgagaaaaataataataaygatagcacgtattgagtacttactgtaattcatgtgttcttcattcaatactactaaaaaagtacatgtaaagaataacaatcacatgacagatatgattttaagtatacagacatattccaagtatacatgctaggagcatagtttaagaagggttttatggtaaatggcggaactttgccgtttttcagcttttcaagttacttacttcatgtaagtctttggttttttcatctgcaaaatagagatggtaagactttatcttcatgcaggttt

SEQ ID NO: 561503 - DNA, 587 bp, Homo sapiens
tggctgtcccttaaggtaggagagtagagtttggggctctctgattcccactaaggaaactggacctgagttgctgggttgtaactcttccaaggagctcagaacaaaacagtgacatggtcagttgtgcattccacttgcctccaggcccactgagggtgtgaagcagggtggggctggctggagaggagggagagtagcaggctggcctgttggagacatgctccctggtaatgagaggaaatagaaaatgtaattaacatgtctgccaccagaaacaagagctaaatctattactctcctcctcccgcttccrttatgaattattgtgtttcaattacaatttccaaagtatttccttaaggaaatatgttagggttcctcaatgggaaaagagggaatggaaccatgaaagtttaatttattgcagtgcctgcttttagaaaaggaagaagaagatgaaagagagagcggaaaggcaggcaaattgagaggagttggactgggtcacctgcactaggcagagagcagctgggcaagagatgctggaggtgcctgaatatttacgttgtcagttcacaacatct

SEQ ID NO: 561504 - DNA, 536 bp, Homo sapiens
aagtaaatgaaaaaataaacttaggtacattcatacagtggaataatatgaaataatattttgcaataaaaggaatgttctatcaaagccatgccacaaataaagaattaatcttctctgtgtgtcattaagtggaagaagccaatctgaaaaaaggataaatactataaacttaagtttacataatcttttgcaaaaggcaaaacttcagagatggtaagaagtcagtgttccagggttttgggtagggaggagggttaaagaaataaagcaaggggatattttaggtrggggaaactattctgtatgatactggaaggatgactattttacgttatgtatgatcaaaacccatggaaattcacagcacagagaatggaactgaatgtatacaattttgaaaaagaaatcatataggaggttggttcagcaaccttagttctagcaggaaatgcagactgtcacaaagataatctagttgtatttcaaatgtatgagataatctcactgaaggctacagggaaggtgaaggaaga

SEQ ID NO: 561505 - DNA, 536 bp, Homo sapiens
aagtaaatgaaaaaataaacttaggtacattcatacagtggaataatatgaaataatattttgcaataaaaggaatgttctatcaaagccatgccacaaataaagaattaatcttctctgtgtgtcattaagtggaagaagccaatctgaaaaaaggataaatactataaacttaagtttacataatcttttgcaaaaggcaaaacttcagagatggtaagaagtcagtgttccagggttttgggtagggaggagggttaaagaaataaagcaaggggatattttaggtaggggaaaytattctgtatgatactggaaggatgactattttacgttatgtatgatcaaaacccatggaaattcacagcacagagaatggaactgaatgtatacaattttgaaaaagaaatcatataggaggttggttcagcaaccttagttctagcaggaaatgcagactgtcacaaagataatctagttgtatttcaaatgtatgagataatctcactgaaggctacagggaaggtgaaggaaga

SEQ ID NO: 561506 - DNA, 642 bp, Homo sapiens
aatcctacagctttaaggagacatgattaagacgtctctgggttatgaaagggcatttctagcagttaaaagaatgcagttactacagaacggaaacttcaacacacccttttgtaaaaccattgttaatctgccattgccccaactctatggctgctgtttcgctgataagtattttcagattaaagagtgaaagcaaatacatttaccacagacaaaaacacatattaggggacctaactgcctttgaaccgtttgatagcttatctcctacctccagggcattaagctaaagttgcaaggctgcctgacacctgcagaaatagccctgggacaaaaatattttcaggtattcttgcctagtacttgctaaagttagagaacaaaataaaggactcaaagctcctgtgtgtttatggcatgcgagatgcccatcactcagccttcttaccctcatgtcagatttgatctacttttggacaccaaaattgagattccaatcttaaaattcaaagcrgtttggtagagtttgggataggtaggttcattgaatttaaacttcatgggaggaggcataaatatggtttgtttatttgaaggagtcatagaaaaaggagttttctaatggtggtttagaaagta

SEQ ID NO: 561507 - DNA, 563 bp, Homo sapiens
aggatttttttttaaggttaaatgaattaatactgtggaagccaatggtggcagtgtgtaaggaagacagaactgtgcaaagtcagtaatcaaacatgattaaatcatgctgctgcagacaactgttccccagagttagaaaaccaagctaaaaatatgacttcgtaacattctgcacctccggtgcactcattgcacagtctatagctgcagataaaattctaccacgacaaacttaagggtggtaaaaacgacaccccctgccatttcatgttgtgcarttgcaggttaaggcttagcatagaccagaacaaaaaagagccatatgcagattcttcatacacggagtcccttctttgcccctctctcacatagatcataaggggaaatgaaaatagcctggtatataagattaacttctctgggtccaatttttaaaatctgccaatgtataagctagcctattgctcctcagaacttagctttctcttctgttaagtcaaactgataatatatatctctcatgcattaggattaagtgaaaatattacctatgaagtctg

SEQ ID NO: 561508 - DNA, 508 bp, Homo sapiens
tctctatcagctggccctgggtggtcgttgttcatgttactcatcatctgtgttatcagtaggaatgcttccggtattacagaaaggggaccatgcgtcagaaaatggttacaaagtggcraaaactgacctgactggggatgtagtcaaagggcaggaacggagggtgggacaggtcaaggaggtgaccagaaaggcactcaccaggggagcaaaatataaagaggcaccaaaacactcagcggtcctgataaataatattttagtgcaatattttaaaaatcagaatttttgtaaaaatatccaatggtgaagaaaatatcaacattgtaagtaaagatgggatcgcaccctgcccttgccaaactcactcactcacttcatcgtcgttaccttacagccctgagaggaggcagaagccataaagaatgagaccagaggaaaaaacctctcctactcccatttctccaggtttctaggaacaggaatgagggagaagcaagggaat

SEQ ID NO: 561509 - DNA, 570 bp, Homo sapiens
ccaaactgctgggattacaagcatgacccactgcacctggctacaattttccatttacattatttgtaaaacttttacatagaaaaaygttcccataacaaagatcagtttcttggctaaatgcaatagagatggaatgtgaatttacttaagagttgaaaagttaatctaattgttaggaatttggggcaatactttaatggatgatcatgccactacctaggtattttggtattgttattgtaccatatcagttaattagccaccagtgaccattctggtttgaactgaacttcagttatctattctttaatgtacaagtgtacccacctttaatactacagctgttataccttcaacatttcctttccaggccaggcatggtggctcatgcctgtaatctcaacattttgggaggccaaggtgggtggatcacgaggtcaggagttcaagatcagcctgaccaacatggtgaaactccgtatctactaaaaattaaaaaaaaaaaagccaggcatggtgatgcaggcctataatcccagctactcaggaggctgaggcaggagaacc

SEQ ID NO: 561510 - DNA, 292 bp, Homo sapiens
ctcaagattgctttgggcattcgaggtcttctgtggtttcatacacattttagaattgtttttttctatttctgtgaagaatgtcattgatattttgatraggattgcattgaatctgtagatcgctttaggtagtatggacattttaacaatattaattcttccaatccatgaacattggatatctttccatttatttgtatcttcctcaatttctttcatcaacattttatagtctttagtatagagatctttcacctctttggttaaatttattcctaagtatgtagaa

SEQ ID NO: 561511 - DNA, 461 bp, Homo sapiens
cagcaaaactggaagctgaactgtagttcagataaatacacactgaagacataggggaaaagggggtctgatatatgccatctactctcaaatggttcagaaaaaaatatgtacatggaaaatatacatagaaggggatgagagacaggataaagttgatgtaaaatatttagtattgacgatctaggtaaagggtacatgggttmtttgtactattcttgcaacttttctgtaagtttgaaattactttggaatgaaaagaaaaaatattttaataaataaaaaaattgggtttggggttttttttgttttgttttgtttttgtgtgtttttgtttttttttttttttttttttttttttgagacagaattttgctttttcgcccaggctggagtgaagtggcacaatctcatctcactgcaacctccaccccccaggttcaagctattctcctgcctca

SEQ ID NO: 561512 - DNA, 507 bp, Homo sapiens
cccaaaatcatgcctagcaggaagagatgcctctctattgatattccagctgccccacaagcaggtatgtgcctactcattctctgacatgtgtcctaggtttcttgactgtaaaattccgcttaataaataatgtattgagcacctgctatatccagagctctgctgggcactctggaagattagagtttgaagaacacacawtcgttgtcctccagaagttcatggtccagtagggagagaaggtcacaaacagccagaatctacaagatgagaggggctataaaagagagctgagaagagtttcagagccactgagaagatactcattttagtcttggtaacgggaagctttctggagttggtggcatttaagatgaaccacaaatggagcaggaatttaatgaagaggaaaggaccaggacgttcaaatagaggacacagcagagttcagaccagatgcaggaaagggtaagtggtttggtttgctgtgaggtcaggtgcatg

SEQ ID NO: 561513 - DNA, 533 bp, Homo sapiens
aggcacagtggctcacacctgtaatcctagcacttggggaggccgaggcaggtggatcacaaggtcaggagattgagaccatcctggctaacacagtgaaactctgtctctactaaaaatacaaaaaaaaattagccaggcatggtggcacgcgcctgtagtcccagctactcaggaggctgaggcaggagaatcacttgaacctgggaggtggaggttgcagtgagctgagatcacaccactgtactccagtctgggcgacagagcaagactccgtctcaaaatagaaacacatttktatttccatgtatgtcttttttaaaaagctagtgacaaaaccaaactttccaacaaaaaattaacagggaaatgtatggcacatgattaagactggtacctaaaccaaatgtttgtcttaatctctgtcatcagtcatcatcttacttgaatcgtgtgaattgtgtaacttgtaatgaacattctaactaaaactgtttcatgttttctggttcatctactgaaatggcatataa

SEQ ID NO: 561514 - DNA, 555 bp, Homo sapiens
ggtaatcataaatgtatatacattttgcaatacagtctcctcttttaaaatatatgcattttttcataagcagaagactcaaatgttctttttttaatgcaatgctacagtgcaggattttaatctgttatgcattgatatccatgtgtctgaaatgctggatgcaactctatttgaagcaaggcgttgggcactcaagagaccatcttctgtttaatctagagggtgagaatggcctgtccaaccaagtctgtgtccttctttctcccttatactttcattttgctcctgtacctttgaatagatgcgtaaagaacttgtgagaactataagttttatctgcttcagcaagtkctccctatgcagggcatggtggctcacacctgtaatcccaacactttgagaggctgaggctggtggatcccttgagctcaggagtttgagaccagcctggacaacatgacaaaatcatgtttctacacaaaatacaaaaattagcaggacatggtgatgcgtgcctgtagtcccagctactcaggaggctgaggtgggagg

SEQ ID NO: 561515 - DNA, 580 bp, Homo sapiens
  misc_feature 546, 547, 548, 549, 550, 551, 552, 553, 554, 555, 556, 557,558, 559, 560, 561, 562, 563, 564, 565, 566, 567, 568, 569,570, 571, 572, 573, 574, 575, 576, 577, 578, 579, 580: n = A,T,C or G
acaaattggcactcactgggtccaccactgtgactgctggcacctgaacaagccacctggaggcctaaggatcagcctgcctggactcactaccactgatgctcacatatgccacatggggaccaaggactgatctgcctggtgtccctatgcccagcaaaacctcaccacagtcttcactatcaaccacagcctaagccactgaagaactcacagacaccactgatgctgattatagacaaagaagtcctacggagactacactactgcatccacccagctttcaaagccaaagtgctctgcccaaccaatactatagatacatttataggaaaaactcttcctacaaaaaccaacccacaaaactggaataagcaactgtaacaayagatgtacagacatcaatgtaatgacaaaagaaacataaagaaacaaagaaacatgacacctccaaagaaacacaattctccagcaacggattccaatgaaaaagaaatatctgaaatgcctaaaacaattttcaaaatactgatattaaagaaacannnnnnnnnnnnnnnnnnnnnnnnnnnnnnnnnnn

SEQ ID NO: 561516 - DNA, 495 bp, Homo sapiens
tatttaaaaaataccattctgttggtctgttttgcgttgccataaaggaatacctaagactgggtaatttataaagaaaagaggtttatttggctcacagttctgtaggctgtacraggatgacaccagcatctgcttctggtgaggccccaggaagcttccatagtggaaggtgaaggaggagcaggtgtgtcacatggcaaaagagagagcaagagtgagaggaggaggtgccagcctcctttaaacaaccagctcttgcatgaactaacagctgagaactcacttattatcatgaggagggcaccaagctattcatgggggatcctcctccatgaccaaaacatctcctaccaggccccacctccaacatagggtatcacattaacatgagatttgaagggaacaaatctccaaatcataaaacatataaatgttaaataacaaattcgaaaaaatctgtaatatatgactttataaatttatataaatata

SEQ ID NO: 561517 - DNA, 495 bp, Homo sapiens
tatttaaaaaataccattctgttggtctgttttgcgttgccataaaggaatacctaagactgggtaatttataaagaaaagaggtttatttggctcacagttctgtaggctgtacaaggatgacaccagcatctgcttctggtgaggccccaggaagcttccatastggaaggtgaaggaggagcaggtgtgtcacatggcaaaagagagagcaagagtgagaggaggaggtgccagcctcctttaaacaaccagctcttgcatgaactaacagctgagaactcacttattatcatgaggagggcaccaagctattcatgggggatcctcctccatgaccaaaacatctcctaccaggccccacctccaacatagggtatcacattaacatgagatttgaagggaacaaatctccaaatcataaaacatataaatgttaaataacaaattcgaaaaaatctgtaatatatgactttataaatttatataaatata

SEQ ID NO: 561518 - DNA, 522 bp, Homo sapiens
tactaatacaaacgtgtaggcttttaatagtattcaagaaaatctggagaaatgaaattcacaaattttattgaagaccagtactagtaattttctttcataacattctgtaggaatgcttgataagtccgctttggtttcctgttttggtcaggctaaccttaaatgaagagcctggcaactatggaaatgcagaaaagagagagcgagaaaaagaaaagatctatgtaatccttgaccagtaaaatcagctgacaaataatcaggagttgatagaggtcagggtagggacatgaagcaggacacaaagctttattacaaacatactaaatccaggagatttcctacgtgaaggcccatttaattccttatcactgtccagtttgtgtgtgtgtgtgtgtgtrtatatatatatatatataattattttatagataaggaaactgagatttaaggcagtttgattagatcagagttacaaagagccagggtctaaacctgtatattctgactcaaagattt

SEQ ID NO: 561519 - DNA, 561 bp, Homo sapiens
cttctccccgccccgcacccctgctcaggcggcgcgcccccactgccggcctccaggcgcctctcccgagcgcctcgctgtggccaccactccgcaggtgctgagcaaaaggtattcttcctgaatacctgagagtcgcgttgagctccacataaggaagacggatttagggttcggctctcactcgaaaccattctccacgcaggacccaaagcggtttgcaagcaggatttcttagccaccccgtgcagtagcacattcatgaactaatctggcttcgcgtgtaatgtgcttgtatgagagaggagaaaactcggcccacgtatgaatacctaaatacttttcttttttaatgtataaaatacagytggggccgggctcggttgctcacgcctgtaatcccagcactttgggaggctgaggcgggtggatcatgaggtcgggagatcgagaccatcctgactaacacggtgaaaccccgtctctactaaaaatacaaaaattagccaggcgtggtggcgggtgcttgtagtcccagctactcgggaggctgaggcagga

SEQ ID NO: 561520 - DNA, 617 bp, Homo sapiens
tcagggatggatgaagtgacggtaacccaatagtttgaatgtacttaatggcactgaactgtacacttaaaaatcattaagctggtacattttattacaaagtgcatttcaccacaatttaaaataacttttaaaaactaatggaagttcttgtaaatgtctaaaatatcaaatttttaaagctgaaaatggagatgtgattcmatttgtatcataaattaccaaacttagactaaacatattttggtcaaaaaaattttttaattttatttgcatgtgctagatattgtatgaggtacttgagatgcagttgtaaaagaaaaatccataatcctagacctcaaagaacttacaaatatataccacaatgacctggatgagactctttattcagctcataccttcctcctccaacaaatatttaatgagtgccaactatgtgccagtctctctgctacctacgagcccacattagtgaacaaagtagatacagattgcactctcacaggactgccagtctagcaaggaaaaaagataataaacaaaaaattattgtttccctaagccagggtgtggtggcctacgcctgtaatcccagcaatatgggaggccgaggc

SEQ ID NO: 561521 - DNA, 568 bp, Homo sapiens
gtctcagtctgtcatcaggctgaagtgtagtggcacgatcttggctcaccacaacctccacctcccgggctcaagcaattctcctgcctcagcctcctgagtagttgggactgcaggtgtgtgccaccacgcccagctaatttttgtatttttagtagagacagggtttcaccatgttggccaggatggtctcaatctcttgagctcatgatccacccacctcagcctcccaaagtgctgggattacagacgtgagccatcgcgcccggccttattagtttttctaatgagagacttcctatagcaatgtctatacaagtttaacaacattaccwatgaattctatcacttttcttccttatttagctaatgagtatatatttgtgtacatatatacaatatacataaatatatacatatatatgtgtgtgtgtatatatattagtccattctcacactgctgtaaagaactacctgagactgggtaattcataaagaaaaagggtttaattaactcacagtcctgcaagctgtacaggaagcatggctggaaggcctcaggaaactt

SEQ ID NO: 561522 - DNA, 568 bp, Homo sapiens
gtctcagtctgtcatcaggctgaagtgtagtggcacgatcttggctcaccacaacctccacctcccgggctcaagcaattctcctgcctcagcctcctgagtagttgggactgcaggtgtgtgccaccacgcccagctaatttttgtatttttagtagagacagggtttcaccatgttggccaggatggtctcaatctcttgagctcatgatccacccacctcagcctcccaaagtgctgggattacagacgtgagccatcgcgcccggccttattagtttttctaatgagagacttcctatagcaatgtctatacaagtttaacaacattaccaatgaattctatcacttttcttccttatttagctaatgartatatatttgtgtacatatatacaatatacataaatatatacatatatatgtgtgtgtgtatatatattagtccattctcacactgctgtaaagaactacctgagactgggtaattcataaagaaaaagggtttaattaactcacagtcctgcaagctgtacaggaagcatggctggaaggcctcaggaaactt

SEQ ID NO: 561523 - DNA, 568 bp, Homo sapiens
gtctcagtctgtcatcaggctgaagtgtagtggcacgatcttggctcaccacaacctccacctcccgggctcaagcaattctcctgcctcagcctcctgagtagttgggactgcaggtgtgtgccaccacgcccagctaatttttgtatttttagtagagacagggtttcaccatgttggccaggatggtctcaatctcttgagctcatgatccacccacctcagcctcccaaagtgctgggattacagacgtgagccatcgcgcccggccttattagtttttctaatgagagacttcctatagcaatgtctatacaagtttaacaacattaccaatgaattctatcacttttcttccttatttagctaatgagtatatatttgtgtacatatatacaatatacataaatatatacatatatatgtgtgtgtrtatatatattagtccattctcacactgctgtaaagaactacctgagactgggtaattcataaagaaaaagggtttaattaactcacagtcctgcaagctgtacaggaagcatggctggaaggcctcaggaaactt

SEQ ID NO: 561524 - DNA, 596 bp, Homo sapiens
gatagctgtacggtattgtcaatggacttaaagccactgaactgtgtatttaaaaacggttaaggctgggcgtggtaatcctagcactttgggaggccaaggtgggcggatcacctgaggtcaggagtttgagaccagcctggccaacatggcgaaaccccgtctctactaaaaatacaaaaattagccaggcgtggtagcttgcgcctgtaatcccagctactcagaaggctgaggcaggagaatygcttgaacctgggaggcggaggttgcagggagccgagactgtgccactgactccagcctgggtgacagagaaagactccatctcaaaaaaaaaaaaaaaaaaggttaaaatgatgaattctatgacatatatataaaacaataaaaaactcccataaatggtagcatatcacttaaaactgttttgcatctgaattttgtcacaaaataatatgtcttggaggtcacggcttgtatgaatgtactaagtttattcaactagttccctattgatgggtatctatgttgtttcccaatgtttgctcttctgctgacgctaaataatgctgaaataaataatttaagacata

SEQ ID NO: 561525 - DNA, 547 bp, Homo sapiens
ctgttaagtactacttaggagttaattgattctgacaatgcagtgacaacactagcgttgtgcagtgaagaatagcagggagtccaagaccagtctgacttccggttgccccagtggccctaagattgaagtttttgcctacatccagagtccagatttctgtgaaaactgaggaatgttttctgacttccctaaaaagagagaaagtaggcagggtgtggtggctctcgtctgtaatcccagcactttgagaggccgaggcgggcggatcacgaggtcaggagatcgagaccatcctgactaacacggtgaaaccccgtctctactaaaaatacaaaaaaattagccgggtgtggtggcgggcgcctgtagccccagcgactcgagaggctgaggcaggagaatcacttgaacccgggaggcrgagcctgcaatgagccaagatggcgccactgcactccagcctgggagacagagcgagactctgtctcaaaagaaaaaaagagagagagagagaaactaaatctatttaggtatgtttaagtct

SEQ ID NO: 561526 - DNA, 559 bp, Homo sapiens
tattattaagttttggtttgcttaacaaaagtgagatacaatgttttttttaattaaggctattacatycatgtatcttcctgtatgtgcttttaaagtccttataatactgagttacgggctttaactcctaagtctaaaaaggacaccaagtcctgctaaatcttaaacactgacagcaattaaagcctcatcttcaggccctgtagaagatgccaatcaaaataaactgcatttcctgagacataaggcaaaagaattaaagctattaagttcctcaagggcccagtgactatcatggaagtggtggacatgtaagattacaagggccgattttgaaaaataaaatatattcagtttctctataaattaatcattagtgtcaaaggcacactgatgcaaaaccagtatatggccccctgtgtcagattaacaagattttcttgaagcattaaccaactccttaataaaggttataaaaggcctatggaagctatattttataatcaagattaaattttatagattgtttacaaaattttggaaaagaaaagtaatt

SEQ ID NO: 561527 - DNA, 540 bp, Homo sapiens
gcacctgtactcccagctactcaggaagctgaggcaggaggattgcttgagcctgggaggcagaggtttcagtgaaccaagactgcaccactgaactctagcctggtgggctacagagtgacagccagtctcactctgcaatgggaattgcactggatttatcgattgccaaaagcatacgaagaagatacttgcacagttaagtttatagcagcaaaattcgcaactgcaaccagcctaaatgcccatcaagcaatgagtgcataaggaaaatgtgatacacacacacacacacacacacacataaatatctatatatctccccatacacacacacacccaatggaataccgatcagccataaaatggaatgaaatcatggcatttgcagcaacctggatggaaatggagacaattactctaagtgaagtacctcaggaatagaaaaccaaacatcgtatgttctcacttataagaagtgggagmtaagctatgagcatgaaaaggcataagaatgatacaacaactttcatgactagg

SEQ ID NO: 561528 - DNA, 634 bp, Homo sapiens
tatcaagacaattttctgttttccaagctgtaattttttctgacagttttagaaaatagaaacagaacatggggtaatattctatatggatttgattactataatatgttatatagtctaatttcattttttgagcccaaacataattactattctttaatttttgtgtttaaaaactgcattatttaattaattataaaaataaaggcatttgtctttgcatatcatcaagaattattaaatatatgtatgtttttattttaattcataaagatttaaaatgtatttgaaataatttaggcatttcacgacttttcaaggaaaatgttaataaagagaaaaaaattatgaaaactatgttcyctttttctgttaggaacatctattgaaacccttagtgattcaataacacagaaaacgaccagtggtctgaggtgaatctatgttatttatgtatttatttatttatttttgagacaatttatccctctgtcacctaggctgggtgatcatgactcaatacagcctcgacctcccaggctcaagcgatcctcccacctcagcctcctaagtagctgggactacaggtgtgcactaccatgcccagctaatttttgtactttttgtagcaaca

SEQ ID NO: 561529 - DNA, 634 bp, Homo sapiens
tatcaagacaattttctgttttccaagctgtaattttttctgacagttttagaaaatagaaacagaacatggggtaatattctatatggatttgattactataatatgttatatagtctaatttcattttttgagcccaaacataattactattctttaatttttgtgtttaaaaactgcattatttaattaattataaaaataaaggcatttgtctttgcatatcatcaagaattattaaatatatgtatgtttttattttaattcataaagatttaaaatgtatttgaaataatttaggcatttcacgacttttcaaggaaaatgttaataaagagaaaaaaattatgaaaactatgttccctttttctgttaggaacatctattgaaacccttagtgattcaataacacagaaaacgaccagtggtctgaggtgaatctatgttatttatgtatttatttatttatttttgagacaatttatccctctgtcaccyaggctgggtgatcatgactcaatacagcctcgacctcccaggctcaagcgatcctcccacctcagcctcctaagtagctgggactacaggtgtgcactaccatgcccagctaatttttgtactttttgtagcaaca

SEQ ID NO: 561530 - DNA, 533 bp, Homo sapiens
atttgacatttctgataaagggcttcttatctagaatacaaaaaaaaaagaaaaaacccttaagttaacaatgtaaaaatgtgcaaaaaaataaaatctgaacagacaccttatcaaagaagacataaaaatgataagtaaatacatgaaaagataatcaatatcatttgtcattagggaaatgcaaattaaaacaactaagagacaccactacatgtctatgagtggctaaaacccaaaacctgacgattcaattactggtaagggtgggagcaayaggaactctcattcattgctggttggaattaaaaatagtgagaccatttgagaagacagtttgccagttgcacatgaagctaaacatatatttagcatactcaacaatggcattcttttttttttttttttttttttgacggagtctcgctctgtcgcccacgctggagtgcagtggcacaatctcggctcactgcaagctgcgcctcccgggttcacgccattctcctgcctcagcctcccgagtagctgggact

SEQ ID NO: 561531 - DNA, 541 bp, Homo sapiens
aataaatagaaaatatttgcacaaattataagtctgtatcttggtcaatttttgcaaaatgaacatatcctgtccacaagccccagatcaagaaagagaacattgctagtacactgcactccctttgtattgtagttttatataaaagaaaaacaaatttctgtattcttatgtatctgattttttttcactcaatattatgcttgtgaaarttatgtttggtagtgtgtgtagcatacatttttttttatttctgtaccacatagtattccatcgtatgagtctacctcaattcattggtccattcaatttctttctaatttagactatttacaaatcataattttaaaaatattattgttcttttgataaatctatgtaaagatttctatttgctatatacttatgactataacggttggcaattgtgattgctatgtttagctatggtaggtactacccattttccatagtggttctaccaacatgtacaccaaacagtgatctatgggatactctgctgcttcacatgcttgtcaat

SEQ ID NO: 561532 - DNA, 541 bp, Homo sapiens
aataaatagaaaatatttgcacaaattataagtctgtatcttggtcaatttttgcaaaatgaacatatcctgtccacaagccccagatcaagaaagagaacattgctagtacactgcactccctttgtattgtagttttatataaaagaaaaacaaatttctgtattcttatgtatctgattttttttcactcaatattatgcttgtgaaagttatgtttggtagtgtgtgtagcatacatttttttttatttctgtaccacatagtattccatcgtatgagtctacctcaattcattggtccattcaatttctttctaatttagactatttacaaatcataattttaaaaatattattgttcttttgataaatctatgtaaagatttctatttgctatatacttatgactataacggttggcaattgtgattgctatgtttagctatggwaggtactacccattttccatagtggttctaccaacatgtacaccaaacagtgatctatgggatactctgctgcttcacatgcttgtcaat

SEQ ID NO: 561533 - DNA, 570 bp, Homo sapiens
ggtggcttacacctataatcccagcactttgggaggccaaggtgggcagatcacaaggtcaggagttccagtccagcctggtcaatatggtgatacccagtttcaactaaaaatacaaaaattagctgggtgtggtggtgggcgtctgtagtcccggctactcgggaggctgaggcaggagaattgcttgaacctgggaggcggtggttgcagtgagccaagatcatgccacggcactccagcctgggtgacagagctagactctgtctcaaaaaaaaaaaaaatttcaaaaactttccacaccatgcctctgttcactgatgctatcatgttgttcaagaaagtgtttccttatttaatcratctaatgataccctggtcacatggctgaatttgaaagaaggtgcatggcataaacattatttttgatgagaagtaataacagaaccttacagttatttaatctaactttcctgcagtaagcacaagactgttatcaaatgtttgtgaaactaatcagacaaaatttctctagtgatcttgcctttttgttagcataacaatggactg

SEQ ID NO: 561534 - DNA, 619 bp, Homo sapiens
aataaggaaatgtgagatttttaaacttggktttttttccttaaaaaatgttttggctattcaaaatcccctccaatttcatgtgaattttaggattttcccccttatttgccaaaaaaaaaaaaaaaaaaaaaaaaaaaaagaatgctattgggatttgataggaattggattgaatcagtggatgctttggctactatgaacattttaatagtaatccttctgatatattaacatggtcaaaatagtcaaaattcttaacctattctgcaactactacaaaatgaatggtatttcagacactcctaagactagtcattctcaaattttatgtaattgtaaaatacttacatggaaccacagttacatttggctaagtaaaagaaactttggaaacctatccagtttttatccataaaatatgcatatttgttatttaattacagttttaaaaacttctcagcatgataaacaaagccaatgtgaaaagatctcaacacacacacacacacacacacacacacacacctctgtttctttccctctctgcatataatgtctataggtatgtgctatatgttatatgtctcatatatatacacgtacattatatatgcac

SEQ ID NO: 561535 - DNA, 588 bp, Homo sapiens
tggcatgaccttggctcactgcaacctccgcctcctgggttcaagcaattctcctgcctcagcctcctgagtagctgggattacaggtgcatgccacaacacccggttaatttttgtatttttagtacagacgggattttgccatgtgggccagctggtctcgaattcctgtcctcaagtgatctgcccaccttggcctcccaaagtgctggtattacagatgtgagctaccatgcccagctcaatatatcttaaaagaaaaagaaaaagttctcctgctggttctcaagcaaaccacagatatatggtaaggaaaaagtgttacagtaggtagctagtcagacatgagcagagcaggagagggtttctcctkgttccccccccccccactacacccccccttccaccacacacacacaccaggaatgtcaggtgacaggtgagggtcaggcagttgtcaactgtctctctaaaataataattggtcacagacagtgccagggaaaggcagtccccctatagatagaaaaaacctgaaactggtgaccagcagcttcccaataagatttcaggagctgggtgagtgag

SEQ ID NO: 561536 - DNA, 432 bp, Homo sapiens
tctccaacgctatgtattttttatgctatgcctatacatttaatcaagtttcttttggccaaaaatttattttttcatatttcagctttcattgtagggtcatctatactgaatcttttaaaaagtccataagtagatggtcaggctaactacatactgtaaattatatattatttattgtgcattatatattaacttaatttagaagctgcctggaatcaggctgaaaattctcttgccaaacagaggaggagatggataaaggtagagaaccctgaagatggtcatgcttttaaatactaggagtcaastaaattgaaatgagactttcaattatttctcaagatatcctagagaatacgcataactcccaaaaaaattctccagtaccttagaactaaaaatcccatatccagttttgaccttacccct

SEQ ID NO: 561537 - DNA, 634 bp, Homo sapiens
ataccaaccagttttaccatgcttgaattcccctattatattaggcatagtcccactaaacataatatttcaagttttcaagttttagacatattaagattttcaaaaaacataacacttgaaccttgtctaaacattctggaataattttattaaaaatatgaacatacttcatataatttatctcaatcacatttgtcttattttaaaattgattcatattctggaatttgcatttttgttttataagaaagkttatgcattaaagatttttctgaggtggttttatggctcacttttaaagttttctttcctacacataagacattacaaaataattctaaatgtatacaatcctgggaataaatttaacatactgatgtttttcaggggctcaagggtgggagacttcctgaatagaactgtagtcccagtgatttattcattgtgtgatcatggacttactttaattgtggttttctcatctcatttagttttcataaaaagtctctgatataatactataaagttttaagaaaactatgtagtgtatagtttatgttcattctttactgtcatttcatgcttttatgtgtatatacataaatatgttcttataaaatagattttatta

SEQ ID NO: 561538 - DNA, 587 bp, Homo sapiens
actggcaactaaactgtctaaattgatggtatcttatcctattgcaaatgaccttgagccaagataattccatttattttctttataacccagtataataaaaatctagtcatggtggctggagctatgtaaatttaccctccttcagcaatgacagaggttattgctatatggaagaaaaagtgaagcaaattttcaacagtacttaatttactattagaaaataattttgaaacacttcaaaggtgccaaagaaataccactttactaaaactcgggctgaatacaataaagactatatgtgagcaaagtcatcagcattctctacatgctttttctgttattctcttcagtctaagagcacatkgccacatccctccaaagtcagctctgtaagatgttctatccaaaacctataatgaaagtcctgcccaaaattctgcatcctccaactactcagcacacaactatgaaagacatgatgcttagccatttacaatagcctggttttgattccaatttaaagggaagtgtcaatatttatccacaccataaaaacttcatcattttcttgtttattgtcatca

SEQ ID NO: 561539 - DNA, 587 bp, Homo sapiens
actggcaactaaactgtctaaattgatggtatcttatcctattgcaaatgaccttgagccaagataattccatttattttctttataacccagtataataaaaatctagtcatggtggctggagctatgtaaatttaccctccttcagcaatgacagaggttattgctatatggaagaaaaagtgaagcaaattttcaacagtacttaatttactattagaaaataattttgaaacacttcaaaggtgccaaagaaataccactttactaaaactcgggctgaatacaataaagactatatgtgagcaaagtcatcagcattctctacatgctttttctgttattctcttcagtctaagagcacatggccacatccctccaaagtcagctctgtaagatgttctatccaaaacctataatraaagtcctgcccaaaattctgcatcctccaactactcagcacacaactatgaaagacatgatgcttagccatttacaatagcctggttttgattccaatttaaagggaagtgtcaatatttatccacaccataaaaacttcatcattttcttgtttattgtcatca

SEQ ID NO: 561540 - DNA, 621 bp, Homo sapiens
taacatttttagagaaaagcaataaatttcagrtattcaaaacataatatttacaatgtccaacacttagtaaaaaaatactcattaaatgaagaagaaaaatgtgatctgagaataatcaggagaaatgaatccataaatctatgtctggaattgacagatgaaaattttatagcatatgttataaattataaatgtgtttaataattttaaggaaggcataaaaataaaaatagatgctataaggagaaaaaaaggaatttttagtggcaaatatacaattcactgaatagaaatatcagtagattacatattgcagaaaaaaagacaagtgagcttgaagatagggccttcataatagattacatgaatattatagatttttgcatgaagaaatatcaatgccaagaatttttattgcttttctttgtgctccaattaatggttctaaaaaaaaaaaccccaaaataatgattttgtaattcacaaatcatgacagctgagttatggtgtccaatgttaaacaattcatatatacatatatgtctaaattaaacatgtgatcataattatttacatgttaaaaactgttaagatttcaattttaagagtagtgattta

SEQ ID NO: 561541 - DNA, 621 bp, Homo sapiens
taacatttttagagaaaagcaataaatttcaggyattcaaaacataatatttacaatgtccaacacttagtaaaaaaatactcattaaatgaagaagaaaaatgtgatctgagaataatcaggagaaatgaatccataaatctatgtctggaattgacagatgaaaattttatagcatatgttataaattataaatgtgtttaataattttaaggaaggcataaaaataaaaatagatgctataaggagaaaaaaaggaatttttagtggcaaatatacaattcactgaatagaaatatcagtagattacatattgcagaaaaaaagacaagtgagcttgaagatagggccttcataatagattacatgaatattatagatttttgcatgaagaaatatcaatgccaagaatttttattgcttttctttgtgctccaattaatggttctaaaaaaaaaaaccccaaaataatgattttgtaattcacaaatcatgacagctgagttatggtgtccaatgttaaacaattcatatatacatatatgtctaaattaaacatgtgatcataattatttacatgttaaaaactgttaagatttcaattttaagagtagtgattta

SEQ ID NO: 561542 - DNA, 594 bp, Homo sapiens
gtgataaagtatcttatgtctgacccaggagacttatgtcttctaccatcatcaaagaaactgtggcagactaactcattagcttgcaggcgggataaaaatcttacactgtgggcagttcttgacagaagtgtattagttatctattcgtacgaattgtttctgaaacctaattctttttttctttttttttctttkgagacggagtcttgctctgtcgcccaggctggagtgcagtggtgcgatctcggctcactgcgagctctgcctctggggttcacgccattctcctgcctcagcctcccaagtagctgggaccacaggcgcccgccaccacgcctggctaattttttgtatttttagtagagacggggtttcaccgtgttagccagaatggtctcgatttcctgacctcgtgatccgccctcctcagtctcccaaagtgctgggattacaggcgtgagccaccgtaccccaccctctaaaacctaatgatttaaaattatattaggtatctattatctcttataatttctatgattcaggaattcaggtgcagaatagctgggcagttctggcccaggacttctaaat

SEQ ID NO: 561543 - DNA, 594 bp, Homo sapiens
gtgataaagtatcttatgtctgacccaggagacttatgtcttctaccatcatcaaagaaactgtggcagactaactcattagcttgcaggcgggataaaaatcttacactgtgggcagttcttgacagaagtgtattagttatctattcgtacgaattgtttctgaaacctaattctttttttctttttttttctttggagacggagtcttgctctgtcgcccaggctggagtgcagtggtgcgatctcggctcactgcgagctcygcctctggggttcacgccattctcctgcctcagcctcccaagtagctgggaccacaggcgcccgccaccacgcctggctaattttttgtatttttagtagagacggggtttcaccgtgttagccagaatggtctcgatttcctgacctcgtgatccgccctcctcagtctcccaaagtgctgggattacaggcgtgagccaccgtaccccaccctctaaaacctaatgatttaaaattatattaggtatctattatctcttataatttctatgattcaggaattcaggtgcagaatagctgggcagttctggcccaggacttctaaat

SEQ ID NO: 561544 - DNA, 351 bp, Homo sapiens
tgagattgtgcactccagcctcaaaaaaaaaaaaaaaaaaaaaaagaataagtgtgtggcttaataaagggatgaagctgtggatcaagttaaacttaagagagaaggtgcagaaataaagttgagaaaggcagctgaccaagcaagcaaaggataagaatggaagagcagcaaaaagagaagaggagatgaaagactggatgaggcagtgacacggatagaaaggttgcctgggagagctctgaargagactcttattaacccatcttccaacaattgttggagaaacagcaggaaaggtgaaaagaaagggcctatgtaattaaaatcactgtgtcacccagaggcagt

SEQ ID NO: 561545 - DNA, 606 bp, Homo sapiens
cactgtctctggccaatttgataatatatcttcttcagtattttgctcgttagaagacaatgtctcagaaaggagtaggggtattttagccactagaaagaaatatcctttactgaaaagtaacatattttctgtctggtttgtacatttcaatgagcttgaatggcaaaagttcagcattcttgttttcagccaactctggtgcactaataaagctaagtgtaagatcctggctggtagcctaccacaaatcaacttcacggttgctcctaagtcatctatattaccatagaagtttattttaaaaaccatctctccattgccataggaataatcttgggggccataatttctaaaggcatttacacaaactttgcagaaggtacttaagaaatgtgtttacattggaagcattcatatcttcagaatttccagcatttcacttgtgatagagcacacaggaacagaaatagaacgtgagaaataaggttgtgtattaggttgctagggctgccatcacaaaataccacagcctcagtggcttaaacaacaggcatttattttctcacagttttkgttgcaggaaggtcttgaattcagaggttt

SEQ ID NO: 561546 - DNA, 557 bp, Homo sapiens
ttttttttaagtaatgtattatgttgaatcatataaaattgttgmtatttgattatttttgttctagaagaatacaacttcaaaaaatacaattttatcaaatttaggggattggtggcaatgtattgctgccatagaaacaagaggtatttcccaatattgacatggaaaaataaacacatgtgaggctcatcctttggcaataattaaaatgtcttataacacattcacttcaaaattttgatggggctgtcataactggactttttaagttgaaatgatttctattggctcattgagtcacagaaataagaaaaaaaatgaatactgattcattttttttgcttcgtttaaatcttttagtctctttcaaacattcagtttattttaggaatatggtttaaaataccaagttttgcatagacataggaaaagatgtgattttttttcttctatgagacagtgaaatcagtgccacagctgcctcaaatcatagaactgttccctaatgaattgactgtttctccgtatagaattttctgataggcgcattagaa

SEQ ID NO: 561547 - DNA, 611 bp, Homo sapiens
tctggtgattctttaatagttttcttcatttgctactgacaagcawgttgtccattttgagttctttatatggtccttatataaaaggaataattagatatttaaacagattctgtttacataaataaaaaagctataaaggaatttatactcccaactagttgaaaggtaaaagttgaaggccttttaataattagtccttaatgatataatactggatatagtcttatactttcatcacataccttgccaattcctattctgatgtataaaaacgttaactatactattaattaactattatgactgggcgcagtggctcacacctgtaatctcagcactttgggaggccgaggtgggcgaatcactaggccaggagtttgagatcagcctggcaaacatgatgaaaccccatctccactaaaaatacaaaaagttagctgggctagtggcagatgcctgtaatctcaactactcgagaggctgaggtaggagaatcgcttgaaccaggaggtggaggttgcagtgagcggagatcacgccgttgcactccagcctgggcgacagagccagactccgtctcaaaaacaaactaacaaacaaatgaaaaa

SEQ ID NO: 561548 - DNA, 611 bp, Homo sapiens
tctggtgattctttaatagttttcttcatttgctactgacaagcatgttgtccattttgagttctttatatggtccttatataaaaggaataattagatatttaaacagattctgtttacataaataaaaaagctataaaggaatttatactcccaactagttgaaaggtaaaagttgaaggccttttaataattagtccttaatgatataatactggatatagtcttatactttcatcacataccttgccaattcctattctgatgtataaaaacgttaactatactattaattaactattatgactgggcgcagtggctcacacctgtaatctcagcactttgggaggccgaggygggcgaatcactaggccaggagtttgagatcagcctggcaaacatgatgaaaccccatctccactaaaaatacaaaaagttagctgggctagtggcagatgcctgtaatctcaactactcgagaggctgaggtaggagaatcgcttgaaccaggaggtggaggttgcagtgagcggagatcacgccgttgcactccagcctgggcgacagagccagactccgtctcaaaaacaaactaacaaacaaatgaaaaa

SEQ ID NO: 561549 - DNA, 579 bp, Homo sapiens
tttgtggcccagcatgcaaggagcttcaaagtcttcacttcattctagcaactggtataaagctgaaaggctgaagaatcaacaattcttcctagctccatcagtgaaatgaagatgcagggcaaatgagggcacagggcaaggtgatgcccccaaattggagagacagaccactgcattgagaggattattacttacctgagcagaaatacccatgggaaccagggttgggttaggaaaatcagagcagaaattgaattgttggcagcttactgtggacaagactcagagagttaaaacccccaggagagcctagctgaaaygggccttacacttttggtttcacttgcagcaactctaccagtttcccaaggtaaatatcaaagaaaaattgttatgtcttcatcggggaaaaaccaaaggcaatcattgttaaataagccaggaccctttattattctttagtttagcaattctttatttttaatttttgtgggtacatagtaggtgtatatgtatatatacacataatatatctatttatatcatatatttatatctctctctatgtagagacat

SEQ ID NO: 561550 - DNA, 204 bp, Homo sapiens
taaatgccacccctctccaccacccccagcagctggtagcatgatacagagagcatctcttgggcactgaaggcagagagaacacagtaagtgtgaggcatcaaactcagtgctgtcctgttagaacagaaaggagaaccagaccaaactcagctgatgcctgccttggagggagcatttaaacyagccctagccagaaggaaa

SEQ ID NO: 561551 - DNA, 444 bp, Homo sapiens
gattatttaccattttaggaaacttttgttcaggaatgaatttcatccttgcttgattatccttgtagaaggaaacatagcacgatttttgcttcataagcattttattttcagcacgccacagcttagaaatttggttctactaatagcacacatgtaaatggcagagaatgaaactttcaagtaattggcacaggctctaaggaactctgccagaggaaggaagtacagatgctccgccatttacgatggggttacatctggataaacccattcgaaactgaaaatatcgtaagttgaaatgcattgggttacawcctgataaacccattgtaagtcaacaaattgttaaattgaagcattgtaaattgaatcattgtaagctagggaccatctataaaagcatcatttgttcaccacagcccctgggatctcaccacagct

SEQ ID NO: 561552 - DNA, 602 bp, Homo sapiens
aaagctttagtaaaaattaaatggtatgtgcttctcttttgacacagaaaggaaataagaacacataaattagagaaaggacatcaacaaaaaaagtttcacttaaaaggcattttatggctgggcacaagcgctcacgcctgtaatcccagcactcactttgggaggccaacatggtgggggaaaaaaaattgctttagcccaggagttcaagaccagtctgggcaatgtggcaaaaccccgtctctacaaaaaatgcaaaaatcagctggtgtggtggcrtgtgcctgtagtttcagctattcaggagactgagttgggaggatcacttgagccctggaagtcaaagctgcagtgagccaagctcaagccactgcactccagactgggtgatagagtaagaccccgtctcaaaaaaaaaaaaaagttgttttatgttaacatggggaacaataaaaggcagaagcttttgttgaccacttgtattttctaatgaaaataaattttatttccagttgaacttgtcaataatacactttaacatagcagtcccgaaaagagtatcacccttcctgccagagaaataagtatctctactgggg

SEQ ID NO: 561553 - DNA, 509 bp, Homo sapiens
ttcaggcaattcccctgcctcagactcctgagtagctgggattacaggcacctgccctcacacgcagccaatttttkttttttttgtagagatagggtcttgccatgttgtccagcctggtcttgaactcttggcctcaagtggtccacccgccttggcctcccaaagtgctaggattacaggtatgagccaccacacctggccttgtatttttaatgccaaattaggggggtagataatttgatcatttctggctgcagtcattgaaattgagaaatgtgaaaaatttgactattgctgctacaaaaatgtatctctttacaaaatttagtatgatctttttcctcccaagagaaatctctttgaacattacctatctacatagttagaacagacaaaaatattaaagatttgtattgaaaatgtgttaatttgtattctactttctatgtcctacacatacaaatttattcaaaggaattctaatatcagtatgactatttcatctt

SEQ ID NO: 561554 - DNA, 509 bp, Homo sapiens
ttcaggcaattcccctgcctcagactcctgagtagctgggattacaggcacctgccctcacacgcagccaatttttttwttttttgtagagatagggtcttgccatgttgtccagcctggtcttgaactcttggcctcaagtggtccacccgccttggcctcccaaagtgctaggattacaggtatgagccaccacacctggccttgtatttttaatgccaaattaggggggtagataatttgatcatttctggctgcagtcattgaaattgagaaatgtgaaaaatttgactattgctgctacaaaaatgtatctctttacaaaatttagtatgatctttttcctcccaagagaaatctctttgaacattacctatctacatagttagaacagacaaaaatattaaagatttgtattgaaaatgtgttaatttgtattctactttctatgtcctacacatacaaatttattcaaaggaattctaatatcagtatgactatttcatctt

SEQ ID NO: 561555 - DNA, 509 bp, Homo sapiens
ttcaggcaattcccctgcctcagactcctgagtagctgggattacaggcacctgccctcacacgcagccaattttttttttttttgtagagatagggtcttgccatgttgkccagcctggtcttgaactcttggcctcaagtggtccacccgccttggcctcccaaagtgctaggattacaggtatgagccaccacacctggccttgtatttttaatgccaaattaggggggtagataatttgatcatttctggctgcagtcattgaaattgagaaatgtgaaaaatttgactattgctgctacaaaaatgtatctctttacaaaatttagtatgatctttttcctcccaagagaaatctctttgaacattacctatctacatagttagaacagacaaaaatattaaagatttgtattgaaaatgtgttaatttgtattctactttctatgtcctacacatacaaatttattcaaaggaattctaatatcagtatgactatttcatctt

SEQ ID NO: 561556 - DNA, 495 bp, Homo sapiens
gtgagagcatatggattgcaggcactgtgctaagtatgccgtctatctcttcggatcccataacaagctcatgagaatgtgatattagcaccattttatggataagaaaatcgaggctaagttgagtagaatgagttgcacaagttcatgcagttaacagagaggagaaatgggattaarcctgggcccactgaatttataagactgtgtcttctaccactacacacaactgcctaattcttgtatgtgaccaagtagtctctcagaacccaaataaaagtcttacgagtaggtctgattttattgtcattttcaatttctttttttaatcataaactttggtcatcctctacattttaaagaatgacttaaaatctaagagatggctgggcacaatggctcacgcctgtaatctcagcattttgggaggccaaggcaggtggataacttgaggctgggagtttgagaccacctggccaacatggcaaaacattg

SEQ ID NO: 561557 - DNA, 386 bp, Homo sapiens
aaaaaagaattccagggtcatataaatttggaaaacaccatgcactaaacatgtccctcttaaaaagctattgatggctctgaaaagccctgctgtaatcaactttctttcacccagatttcccggatttayttgaccaggcagaaaacctgtttatgaagaaaagtttatggaaatactgccttagtatatttttctggctttgtacctgaaattaagccactccagataaaaaacaaatcagaagaccagaagcactagtttatggtggaaattgggaagtaaggataatgcctcatgcctcaccctggcagtgttagcccaaaggactcacagtttgtttgccttaaggtaaaaataagtgtcaccctaaaaaaataattttt

SEQ ID NO: 561558 - DNA, 386 bp, Homo sapiens
aaaaaagaattccagggtcatataaatttggaaaacaccatgcactaaacatgtccctcttaaaaagctattgatggctctgaaaagccctgctgtaatcaactttctttcacccagatttcccggatttacttgaccaggcagaaaacctgtttatgaagaaaagtttatggaaatactgccttagtatatttttctggctttgtacctgaaattaagccactcyagataaaaaacaaatcagaagaccagaagcactagtttatggtggaaattgggaagtaaggataatgcctcatgcctcaccctggcagtgttagcccaaaggactcacagtttgtttgccttaaggtaaaaataagtgtcaccctaaaaaaataattttt

SEQ ID NO: 561559 - DNA, 444 bp, Homo sapiens
aaaacaactcctttttatctcatactcatatcttattagtctgtattgcagtcarttaaattacctaattagattgacatactcaattgactctggggtataccagaacccaactgttgggaatagaagtatgccagcaaagtagagataagcctgctagctgcaggcatttagtgttacctggacattggggagtatgttttatagaagaaatggagaatcctggttaatccagaaaaccagtttatgtgtgttaacagagcttactttttatttgtgtaggcttaatcatttttaatagtttatatattgtaaaccgtattgggtgcaaaaaaaatgtcaagtaggcctcataaacttagaaaacttttaaacctggaaagggctctagaggtcactgaactaattttaaagctgagggaatagcagatacatcacatgacc

SEQ ID NO: 561560 - DNA, 444 bp, Homo sapiens
aaaacaactcctttttatctcatactcatatcttattagtctgtattgcagtcagttaaattacctaattagattgacatactcaattgactctggggtataccagaacccaactgttgggaatagaagtatgccagcaaagtagagataagcctgctagctgcaggcatttagtgttacctggacattggggagtatgttttatagaagaaatggagaatcctggttaatccagaaaaccagtttatgtgtgttaacagagcttactttttatttgtgtaggcttaatcatttttaatagtttatatattgtaaaccstattgggtgcaaaaaaaatgtcaagtaggcctcataaacttagaaaacttttaaacctggaaagggctctagaggtcactgaactaattttaaagctgagggaatagcagatacatcacatgacc

SEQ ID NO: 561561 - DNA, 323 bp, Homo sapiens
aatttaagtttgcctaataatctaagtcaggtttagaatggaagaagaataatgagctggagtatgagctgagtaaagactgaatggtggtataagtatagcgcgttgggagagtaaagtgactggtcttcttggtgtcaaagatacatattagaacaaggtgaaaatcactatgggttgatctatgatatcagtgctctttaaatctatactgagraattcagacttgataaagaatgaaataacaagtcacatacaggtttgaagcagccaaatgttgtgattaaagcattgtttaaagaagcagtgtatctgcaaaagta

SEQ ID NO: 561562 - DNA, 560 bp, Homo sapiens
cctcgtcacacttgaattgtcagattactttttaaatttttcacaaagtaaaatatgttttttcctagcatcttccatattattcctctcacatttcaataagaacaagacatatgtcctgtaatgaaaacttgccacttacaaattgctgaatttatgacgaatatgcaagtaagaccttacrtacaatcgagactgattattttctttatccctattgtatttttctaatttttaaagcatttacccaaaacttccaagaacttcagatttgttcatctgacaagatcttccctggtttttatggatgaaagcataagcgaatacatctaatttggggcttactatcttattttgttatgtattataactctcttgacaaatttatctgtaatctgcaatgctctctcccatgtttcctgatcatcttcaaggacatcatctgtcaatctaaaattaaatcctctttttaataggatgagagtagagatgatggacaaatctcaaaagatctatatgtcaatcaaaatgtgatcagaaaaatgttcacttcatttcta

SEQ ID NO: 561563 - DNA, 560 bp, Homo sapiens
cctcgtcacacttgaattgtcagattactttttaaatttttcacaaagtaaaatatgttttttcctagcatcttccatattattcctctcacatttcaataagaacaagacatatgtcctgtaatgaaaacttgccacttacaaattgctgaatttatgacgaatatgcaagtaagaccttacgtacaatcgagactgattattttctttatccctattktatttttctaatttttaaagcatttacccaaaacttccaagaacttcagatttgttcatctgacaagatcttccctggtttttatggatgaaagcataagcgaatacatctaatttggggcttactatcttattttgttatgtattataactctcttgacaaatttatctgtaatctgcaatgctctctcccatgtttcctgatcatcttcaaggacatcatctgtcaatctaaaattaaatcctctttttaataggatgagagtagagatgatggacaaatctcaaaagatctatatgtcaatcaaaatgtgatcagaaaaatgttcacttcatttcta

SEQ ID NO: 561564 - DNA, 566 bp, Homo sapiens
acacttggtttgatacaaagtctgcctgtctggcaagcccccaggtgatgctgatgctcctgttttgtagacgtttgagtagcaagggaattgaccaccattctcctggtaacaaaataygaagtttccattcctcactggatgaaactgtcctcggggatggcactgttgaattttcactgttaacttttcactttgttaaactctcacatttaacaaatctgagctctgcaaagacataagtatccctgggaggaataacccattaagctcttgagaggaaagggtattctgatcccaccatttttgggacattttaactacatgtttatggatacaaaaccttttagatcagattatgtaagcattgaaacactttttttttttttttgagatggaatcttgcactgtcacccaggctggagtgtagtggcgcgatctcagctcactgcaagctctgcctcccgggttcaggcaattctcctgcctcagccttccgagtagctgggattacaggcagccgccaccacgcccatctaattttttttttttttttttgtattttt

SEQ ID NO: 561565 - DNA, 565 bp, Homo sapiens
accatatatgcacccaacacaggagcacccagattcataaagcaagttcttagagacctacaaagacacttagattgccacacaataatagtgggagatttcaacatcccactgacagtattagacagattattgaggcagaaaattaacaaagatattcaggacctgaactcagcacytgaccaaatggacttaatagacatctacagaactctccatcccaaaacaacagaatatgtattcttctcatcaccacattgcagtactccaaaattggcgagataattcaaaatttaaaaagtactcagaaaattccaaaaaacccaaaatcataccaaccacactcttggaccacagcacaataaaaatagaaatcaagactaggaaaatcactcaaaaccatacaattgcatgaaaaataaatgatctgctcctgaatgacttttgggtaacaataaaattgaggcagaaatcaagaaattgtttgaacaaagatacgacataccaggacctctgggatacagctaaggcagtaagagggaagtctatagcactaaatgtccaa

SEQ ID NO: 561566 - DNA, 620 bp, Homo sapiens
aagaattgtgacttagttaatatawgttgctttttcaaaaggagaaacagtgtttcccatcattttttaaaattcaggaatagtggtcttttttaattcagattttgaaggtttggtaagtttattgctaatgttggaccacacgcaagagaaagttagacattattttgtgaccagcattgttaagttgtcacattctgaacaaatcccttaaagacctggaactcatttacattttgcataaaatcctgatgggatttatggtttaaactttgactatactctttgtcttgaatttattaatttccttatcaggcttaaaacttgggggaaagtagacttttgcaaaatatttttttaaaccattaagttttatacaaagtccttctcaaaaaccctgtaaaccctctatctttcagagctctttaataaaaacctggggtgaatgtgatttattttttgcttttgtttctggtttgcttgcttttttgagacagggtctcaatctgttaccaaggctgaagtgcagtgacacaacaacagctcactgcagcctcgacctcgcaggctcaagtaagcctccttcctcagcctcctgagtagccaggaccactggtgca

SEQ ID NO: 561567 - DNA, 574 bp, Homo sapiens
gagaaggtttgtattttaaaaaatactggtgctgggcatactggcttgggcctataatttcagctacttgggaggctaacacaggaacatcacttgaggccagaagttccagaccagcctgggcaacatagccagactaggctgggccacatagtgagacccccacctgtaaaaaaaagtgaaaacaaaaacatactgggtaatgtgtagtaactttactgattttatatgtttctatgacaatagaaacaaatgatacgaagcattcttaaccaattttgagtctgtaatggtaaatctgtaaatttagacaagaaagatcgcaataccatatggttgccatatgaagaacaagttcttgatagatgtctttggrgtttccacggctttggataaaagtgccaaagaagtgtataaacatgaaagtgcataaaggtcaccaaaggcgcttatttaaaatgctgactctagggcttggtgcctaaaggtcctgatgtagtagttacagggtgagatccagatattttaattttttaagctcataattttatagtacttgctatatgccaggcag

SEQ ID NO: 561568 - DNA, 523 bp, Homo sapiens
tttaggatactttctttatccttaatctttgcgagtgtgattattataatgccttgaggtagtcttttttggggtaaatttgactggcattctataactttcttgtacttggatattgatatctttctttacgtttgtgaagttctctgttattatctctttgaataaaacttctacccctatctctttctctgcctcctctttaaggccagtaactcttagatttgtccttttgagactattttctaggycttgtaggcatgcttcattgtctttttattcttttttattttgtcttttctgactgtgtattttcaaataggttgtctttgaactcactaattcttttttctgctttaccaattctgctataaagagtctgataaattcttcagtatgccagttgcatttttcagctccagaatttctgcttgattccttttaattatttcaatatctttgttaaatttatctgatagaattctgaatttcttctctgtgttctcttgaatttctttgagtt

SEQ ID NO: 561569 - DNA, 578 bp, Homo sapiens
catgtgctatcgcaactggcttcatattgcttttagttgtcatgtccttttattctgtcagtctgaagtctcagtctttccttgattttcatggctatgacacttttgaagattacagaccagttatttcatagaatattccttaatctgtgtctgatgtttcatcattactacattcaggttatgcatctttgacagaaatatcacagaagcagtactgtgttcttcccattgcatcttatcaagtggcgaacaattttgrtttgttccataatgggtgaggttacgtttgatcagttaaggtggtgcttatcaggcttctacatcgtaaagttacacttttacactatgtaatttctaaaatattttgtggttactttgagataatgtaaataatctgttactatgaaattttaaattttttcatgtatgtactatatcatttggggctcacaaatttgttttattcaatgggttataattcattactttaattattttgccgataaaattgtgccagacttggccagtgttatgtgccttcaagctggcttgcgagtcttggtaacatgtcacca

SEQ ID NO: 561570 - DNA, 578 bp, Homo sapiens
catgtgctatcgcaactggcttcatattgcttttagttgtcatgtccttttattctgtcagtctgaagtctcagtctttccttgattttcatggctatgacacttttgaagattacagaccagttatttcatagaatattccttaatctgtgtctgatgtttcatcattactacattcaggttatgcatctttgacagaaatatcacagaagcagtactgtgttcttcccattgcatcttatcaagtggcgaacaattttggtttgttccataatgggtgaggttacgtttgatcagttaaggtggtgcttatcaggcttctacaycgtaaagttacacttttacactatgtaatttctaaaatattttgtggttactttgagataatgtaaataatctgttactatgaaattttaaattttttcatgtatgtactatatcatttggggctcacaaatttgttttattcaatgggttataattcattactttaattattttgccgataaaattgtgccagacttggccagtgttatgtgccttcaagctggcttgcgagtcttggtaacatgtcacca

SEQ ID NO: 561571 - DNA, 578 bp, Homo sapiens
catgtgctatcgcaactggcttcatattgcttttagttgtcatgtccttttattctgtcagtctgaagtctcagtctttccttgattttcatggctatgacacttttgaagattacagaccagttatttcatagaatattccttaatctgtgtctgatgtttcatcattactacattcaggttatgcatctttgacagaaatatcacagaagcagtactgtgttcttcccattgcatcttatcaagtggcgaacaattttggtttgttccataatgggtgaggttacgtttgatcagttaaggtggtgcttatcaggcttctacatcgtaaagttacacttttacactatgtaatttctaaaatattttgtggttactttgagataatgtaaatamtctgttactatgaaattttaaattttttcatgtatgtactatatcatttggggctcacaaatttgttttattcaatgggttataattcattactttaattattttgccgataaaattgtgccagacttggccagtgttatgtgccttcaagctggcttgcgagtcttggtaacatgtcacca

SEQ ID NO: 561572 - DNA, 578 bp, Homo sapiens
catgtgctatcgcaactggcttcatattgcttttagttgtcatgtccttttattctgtcagtctgaagtctcagtctttccttgattttcatggctatgacacttttgaagattacagaccagttatttcatagaatattccttaatctgtgtctgatgtttcatcattactacattcaggttatgcatctttgacagaaatatcacagaagcagtactgtgttcttcccattgcatcttatcaagtggcgaacaattttggtttgttccataatgggtgaggttacgtttgatcagttaaggtggtgcttatcaggcttctacatcgtaaagttacacttttacactatgtaatttctaaaatattttgtggttactttgagataatgtaaataatctgttactatgaaattttaaattttttcatgtatgtaytatatcatttggggctcacaaatttgttttattcaatgggttataattcattactttaattattttgccgataaaattgtgccagacttggccagtgttatgtgccttcaagctggcttgcgagtcttggtaacatgtcacca

SEQ ID NO: 561573 - DNA, 467 bp, Homo sapiens
taatttttgtatttttttggtagagacagggtttcaccttgttggacagactgggtcttgaactcctgatctcaagtgatctgcccgcctcagcttcccaaagagctgggattatgggcatgagccaccatgcctgtctggtcattcgtatgtcttctttgtagaaatgtctatttgagtcttttgcctatttcttaaccaggttatttgatcttctgttattgagttgtaggagttctttatatattttagatattaactccttatgagatacataatttggaaatatattcttgccttctgcagattgtcttttcactctgttgattgtgttctttgataaataaaagtttttaagttttaggtagttccatttatctatttttgcttttgttttctgtgcttttggtgtcatacccaagaaatattgtcaaatamaatgtcatggacctaattatctatgtttt

SEQ ID NO: 561574 - DNA, 500 bp, Homo sapiens
tcttgccttctgcagattgtcttttcactctgttgattgtgttctttgataaataaaagtttttaagttttaggtagttccatttatctatttttgcttttgttttctgtgcttttggtgtcatacccaagaaatattgtcaaatacaatgtcatggacctaattatctatgttttcttctaagagttttatagtttttggccttatatttagatctttaatccattttaagttaatttttgtatatggtgttatataagggtccaatttttttcctttgcatgtgggtatctaattttcctctcaccatttattgaagagactgtcctttctccattgagtgatgttaggatctttcttgaagatcatctggccgtacatgtgagaacttatttttgggctttctgttctattccagtggttgatatgtctgtrtttattccagtatcacactgttctgatcactgtaactttgaaatatgttttgaaatcaggaagtg

SEQ ID NO: 561575 - DNA, 567 bp, Homo sapiens
accttagactgggtggcttaacagcagacatttatttcctatagttcttgaggctgggaagcccaagatcaaggtgctggcagactcagtgtctggtgagggttctctttctggcttgttaatggctgccttcttgctgtgccttcacgtgggagggatcacctgtttcacatctttctttctttctctttctttctttctctttctttctttctttctttctttctttctttctttctttctttctttctttcyttccttccttccttccttccttccttccttccttccttctctttctttttctttctttctttctttctctttctttctttcttgcttgctttcttgcttgctttctttctttccctttctttctttccttcttactaccttctttccttccttccttccttcttttttttttttttcgacagagtctcactctgtcccccaggctgaagtgcagtggcgtgatcttggctcatgacaaccttctcctgcctcagcctccccagtagctgggattacaggcctgtgccaccactctcagctggtttttttttt

SEQ ID NO: 561576 - DNA, 462 bp, Homo sapiens
actgcactctggcctgggcaaaagagcgagacttcatctcaaaaaaaaaaaaaaaaaattaaagatgtgaataatgcaatattgtcttcaaagtaccacgtagttttccttcacaacagtataccacattgtgtgattacatgaaattattaatatatcacttctaaattgcacttttttttctctaggatcatcactttacccaactcttttggattattattatcagcataaaatatgctataatgtgtctcccatatttttaaaaatctttcctttaacttcacaacttccctcaactgtcaaatttggtctgatccctttcatttaaaaacttcttaaaagcagtttaaaaatttactgcatctaatcctccttccattttctattgaatcattcccatccctatcacattagaaaaacttcttttatcaragtcactagtaatctctacttcatcaa

SEQ ID NO: 561577 - DNA, 494 bp, Homo sapiens
gttctcccctcatcctcctttgagcgtaatttagacaggtcagtcggcataacagtctcctaaccatgaatagcatgacaagtgcctggcccacctggctgagaatcactgttctttactcttctgggagggaagtggtgcctctcatttagtaaactgtttggtcacctttgtcccaccccctactctctacctggcctagggaggccaatttattactcccttcytattgcatcttcaacttttgaactttggtttctcatattattcttttgttgcagtggcaggcatctatttctagttgaatagatagtcttctctttcaaaaattaatatgcaagagaaatgtttaaaattaactttttaaagcaaatgatgataacaattaaggtgtcatttacattttctccatttcttgtgtactgtattttacaattttcttcttttgttgctcagtgacatagaagaactggaatttagatttcagttagtaa

SEQ ID NO: 561578 - DNA, 494 bp, Homo sapiens
gttctcccctcatcctcctttgagcgtaatttagacaggtcagtcggcataacagtctcctaaccatgaatagcatgacaagtgcctggcccacctggctgagaatcactgttctttactcttctgggagggaagtggtgcctctcatttagtaaactgtttggtcacctttgtcccaccccctactctctacctggcctagggaggccaatttattactcccttcttattgcatcttcaacttttgaactttggtttctcatattattcttttgttgcagtggcaggcatctatttctagttgaatagatagtcttctctttcaaaaattaatatgcaagagaaatrtttaaaattaactttttaaagcaaatgatgataacaattaaggtgtcatttacattttctccatttcttgtgtactgtattttacaattttcttcttttgttgctcagtgacatagaagaactggaatttagatttcagttagtaa

SEQ ID NO: 561579 - DNA, 579 bp, Homo sapiens
tggttatttccaagataacgtggatgctaacaattttttgaggaacatttactttcacagaattacaagtccatcttgctgttgccaatcatgttggggaaaatacagtgtttttcttagaaaaccaggcaatctatgtggaaactctcatcccatggtgatctgcctrtacagtctttgtgagatcacttcaatacaaggaatgtaaaataaaaaattaaaataaaaaaatttaatgaattggccaggcatggtggctcatgcctgtaatcccagcactttgggagaccgaggtgggtggatcacgaggtcaggagatcgagaccatcctggctaacacggtgaaaccctgtctctgctaaaaatacaaaaaattagccgggcgtggtggcgggcgcctgtagtcccagctactcgggaggctgaggcaggagaatggtgtgaacctgggaggtggagcttgcagtgagccgagatggcaccactgcactccagcctgggcgacagagcgagactccatctcaaaaaaaaaaaaaaaaaattaatgaattatattatatccctcatccccccaacccc

SEQ ID NO: 561580 - DNA, 579 bp, Homo sapiens
tggttatttccaagataacgtggatgctaacaattttttgaggaacatttactttcacagaattacaagtccatcttgctgttgccaatcatgttggggaaaatacagtgtttttcttagaaaaccaggcaatctatgtggaaactctcatcccatggtgatctgcctatacagtctttgtgagatcacttcaatacaaggaatgtaaaataaaaaattaaaataaaaaaatttaatgaattggccaggcatggtggctcatgcctgtaatcccagcactttgggagaccraggtgggtggatcacgaggtcaggagatcgagaccatcctggctaacacggtgaaaccctgtctctgctaaaaatacaaaaaattagccgggcgtggtggcgggcgcctgtagtcccagctactcgggaggctgaggcaggagaatggtgtgaacctgggaggtggagcttgcagtgagccgagatggcaccactgcactccagcctgggcgacagagcgagactccatctcaaaaaaaaaaaaaaaaaattaatgaattatattatatccctcatccccccaacccc

SEQ ID NO: 561581 - DNA, 579 bp, Homo sapiens
tggttatttccaagataacgtggatgctaacaattttttgaggaacatttactttcacagaattacaagtccatcttgctgttgccaatcatgttggggaaaatacagtgtttttcttagaaaaccaggcaatctatgtggaaactctcatcccatggtgatctgcctatacagtctttgtgagatcacttcaatacaaggaatgtaaaataaaaaattaaaataaaaaaatttaatgaattggccaggcatggtggctcatgcctgtaatcccagcactttgggagaccgaggtgggyggatcacgaggtcaggagatcgagaccatcctggctaacacggtgaaaccctgtctctgctaaaaatacaaaaaattagccgggcgtggtggcgggcgcctgtagtcccagctactcgggaggctgaggcaggagaatggtgtgaacctgggaggtggagcttgcagtgagccgagatggcaccactgcactccagcctgggcgacagagcgagactccatctcaaaaaaaaaaaaaaaaaattaatgaattatattatatccctcatccccccaacccc

SEQ ID NO: 561582 - DNA, 579 bp, Homo sapiens
tggttatttccaagataacgtggatgctaacaattttttgaggaacatttactttcacagaattacaagtccatcttgctgttgccaatcatgttggggaaaatacagtgtttttcttagaaaaccaggcaatctatgtggaaactctcatcccatggtgatctgcctatacagtctttgtgagatcacttcaatacaaggaatgtaaaataaaaaattaaaataaaaaaatttaatgaattggccaggcatggtggctcatgcctgtaatcccagcactttgggagaccgaggtgggtggatcacgaggtcaggaratcgagaccatcctggctaacacggtgaaaccctgtctctgctaaaaatacaaaaaattagccgggcgtggtggcgggcgcctgtagtcccagctactcgggaggctgaggcaggagaatggtgtgaacctgggaggtggagcttgcagtgagccgagatggcaccactgcactccagcctgggcgacagagcgagactccatctcaaaaaaaaaaaaaaaaaattaatgaattatattatatccctcatccccccaacccc

SEQ ID NO: 561583 - DNA, 457 bp, Homo sapiens
actacagttaacagtaatctattgtatatttcaaaatagctaaaagagaattactcaagtgttcccagtataaagaaaagttaaatgtttaagatgacagatatcccaattaccctgatttgatcattacacattataygaatatatcaaaatattacatgcacccccaaaatacacacatctcttatgtatcaataaaaaaagtttattaaaaaataataatagtggaaaacttttctaatctggggatagatagcaacacttagatacagggagcgtatggatttccaaatcaaatttaatccaaaggctgggcatggtgactcacacctgtaatcctagcatttttgggaggccaaagtgggaggatcacttgaggccaagagtttaagaccagcctggtcaacatagtgagacctggtctctacaaaaaaattttaaaaattagccaggcatg

SEQ ID NO: 561584 - DNA, 502 bp, Homo sapiens
ttaatatatttttaaatgaaaattaaacagagggccagagactgtaatgtaatacatggcacaatcacaaatgggaggtggcagttgaagccttttttatacatatgctgaggggctaaaattgttcaagaaatgaggtgttagctaaaattctcagcagcaagcaatgtgactgcaaaattgaaataataataatgttaataataataataacaggcctgtacaaaggattgttgtaaggacaaattatagatgggtgaactgcttttagtatcttggaaggaaggtattatgtaaattccagttctttttattatttttccttgaagattgccaaaaaaaaaaaaaaaaaatcctagtgggtggatgagagcagggattgagggaggaaagggagagaaaataattcaaggatgcaagaaatagctcatttaaagtacttcttggccattacatttgcttcaataaamttctgcctagacatgcagctacgtaggatgtg

SEQ ID NO: 561585 - DNA, 325 bp, Homo sapiens
gaattccagaccctgagtgagccagcaaaaccaatgcagtgtgagccccagtraccagggtaggagcctcagacaaggccccaggctgggaggcactaagacacagggaagaagtggggaggccagggctggaacccaggacactagtaggacctctgatactcccacagtggaccccaatgggtgggaacttgaccttcagacattgatccctcctgaagctgaaacaggcatggctgggtatgcctggggaagaatggggccagctaggcatggtggacactttggttctctggtcccctctgtaagaaagcaccatttcaga

SEQ ID NO: 561586 - DNA, 325 bp, Homo sapiens
gaattccagaccctgagtgagccagcaaaaccaatgcagtgtgagccccagtgaccagggtaggagcctcagacaaggccccaggctgggaggcactaagacacagggaagaagtggggaggccagggctggaacccaggacactagtaggacctctgatactcccacagtggaccccartgggtgggaacttgaccttcagacattgatccctcctgaagctgaaacaggcatggctgggtatgcctggggaagaatggggccagctaggcatggtggacactttggttctctggtcccctctgtaagaaagcaccatttcaga

SEQ ID NO: 561587 - DNA, 298 bp, Homo sapiens
tgaggcaggataattccttgaaaccaggaggtggtaattgcagtgaactgagatcacgtcactgtactccaacttgggcaacagagcaagactccatytgaaaaaaaaaaaaaaaagaaagaggtttaattgccttataggataaacaggaaacatgtcagagtctgcttctgagggggcctcaggaagcttttactcatggcagaaggcaaagcggaagctacctgcatattctgtagaacaatttaattgttcacaggaagcacactcttaaataactagatctcatgataagtca

SEQ ID NO: 561588 - DNA, 555 bp, Homo sapiens
tacatgtggtagaattcagctgtaaattcatctggttgtaagcatttctgattggtargctatttactactgattgaattttagagttcattattggtctgttcagggattcaattattttctggctcagtcttgggaggacgtatttgtccaggaatttatcgatttcttctagattttctagcttgtgtgcatagaggtgttcataatattttctgatacttatttttatgtttctggggtcagtgctaatatctttttggttgtttgtaattgtgttcatatggattttctctatagacctagaggtctatctattatattatttttttaaataaatcaactcctgtaattgttaattttttgaatggtttcttgtgtctctatctccttcagttcagctcttatttggctatttctcatcatctgctagctttgggattggtttcctcttggttccctagttcttttagttgtgatgtcttgttgccaaattgggatctttctaactttttgatgtggatatttagtaccattaattttccttttaacact

SEQ ID NO: 561589 - DNA, 555 bp, Homo sapiens
tacatgtggtagaattcagctgtaaattcatctggttgtaagcatttctgattggtaagctatttactactgattgaattttagagttcattattggtctgttcagggattcaattattttctggctcagtcttgggaggacgtatttgtccaggaatttatcgatttcttctagattttctagcttgtgtgcatagaggtgttcataatattttctgatacttatttttatgtttctgggktcagtgctaatatctttttggttgtttgtaattgtgttcatatggattttctctatagacctagaggtctatctattatattatttttttaaataaatcaactcctgtaattgttaattttttgaatggtttcttgtgtctctatctccttcagttcagctcttatttggctatttctcatcatctgctagctttgggattggtttcctcttggttccctagttcttttagttgtgatgtcttgttgccaaattgggatctttctaactttttgatgtggatatttagtaccattaattttccttttaacact

SEQ ID NO: 561590 - DNA, 555 bp, Homo sapiens
tacatgtggtagaattcagctgtaaattcatctggttgtaagcatttctgattggtaagctatttactactgattgaattttagagttcattattggtctgttcagggattcaattattttctggctcagtcttgggaggacgtatttgtccaggaatttatcgatttcttctagattttctagcttgtgtgcatagaggtgttcataatattttctgatacttatttttatgtttctggggtcagtgctaatatctttttggttgtttgtaattgtgttcatatggattttctctatagacctagaggtctatctattatattatttttttaaataaatcarctcctgtaattgttaattttttgaatggtttcttgtgtctctatctccttcagttcagctcttatttggctatttctcatcatctgctagctttgggattggtttcctcttggttccctagttcttttagttgtgatgtcttgttgccaaattgggatctttctaactttttgatgtggatatttagtaccattaattttccttttaacact

SEQ ID NO: 561591 - DNA, 555 bp, Homo sapiens
tacatgtggtagaattcagctgtaaattcatctggttgtaagcatttctgattggtaagctatttactactgattgaattttagagttcattattggtctgttcagggattcaattattttctggctcagtcttgggaggacgtatttgtccaggaatttatcgatttcttctagattttctagcttgtgtgcatagaggtgttcataatattttctgatacttatttttatgtttctggggtcagtgctaatatctttttggttgtttgtaattgtgttcatatggattttctctatagacctagaggtctatctattatattatttttttaaataaatcaactcctgtaattgttaattttttgaatggtttcttgtgtctctatctccttcagttcagctcttatttggctatttctcatcatctgctagctttgggattggtttcctcttggttccctagttcttttagttgtgatgycttgttgccaaattgggatctttctaactttttgatgtggatatttagtaccattaattttccttttaacact

SEQ ID NO: 561592 - DNA, 591 bp, Homo sapiens
aagaaggaaaatggaataagctgtcctgttaaagcacaaagaccctcagaccgcatagaaacaaactccagctatgtcatttctacaagagactaattaaataaaacacaagaacatgaaaagtttgaatgtcaagcctagaaagaatatgtcaggaaaatattaacaaaaagaaagcaggtctacaaaacaaaacagactttgagggaaaataaaagcattaaaaaagataaagagagtcamtaaataatgctaagaggttcaatttgttaggaacataacaattgaaaactttatttactgaatagtacagcttcaaaatatataaacaaaactggtttgatctatgaagaggcattaataaatccttcactattttaatacagctttcttggttattggcagatcaagtataaaaccatattggcaaggataattgagatttgaacagcataatttaaaagcttttaggacactgcgttggtttgccaccttccccaagtcccaaattcaccccatatacactcccatcactcttgtcctgactttttcattggcttatctcagggtagtccttgatttgggtctgca

SEQ ID NO: 561593 - DNA, 591 bp, Homo sapiens
aagaaggaaaatggaataagctgtcctgttaaagcacaaagaccctcagaccgcatagaaacaaactccagctatgtcatttctacaagagactaattaaataaaacacaagaacatgaaaagtttgaatgtcaagcctagaaagaatatgtcaggaaaatattaacaaaaagaaagcaggtctacaaaacaaaacagactttgagggaaaataaaagcattaaaaaagataaagagagtcaataaataatgctaagaggttcaatttgttaggaacataacaattgaaaactttatttactgaatagtacagcttcaaaatatataaacaaaactggtttgatctatgaagaggcattaataaatccttcactattttaatacagctttcttggttattggcagatcaagtataaaacmatattggcaaggataattgagatttgaacagcataatttaaaagcttttaggacactgcgttggtttgccaccttccccaagtcccaaattcaccccatatacactcccatcactcttgtcctgactttttcattggcttatctcagggtagtccttgatttgggtctgca

SEQ ID NO: 561594 - DNA, 518 bp, Homo sapiens
tttttcttttaaaaaatatgtaattcatatattttgaacttaataattakattccaaatggtcctaatcacaccctgtggatctttagctcttgaggattcaaaactatgagattttacaatcacgttttagatagtaaagattgaatgagtatgttaaggctttcatgaaagaaaaatggaagaaagaataattgaaacaagtaacttaagtggtgggcaagtaaaatctgtaagccaatttctttgtctgtaaaatgaggagaataatagtatttatatgaattctttgttgaatgaacaaagtgagataatttttggaaaatgatgagcaaagtgaatggcaagtagaacagacttcagaaatgttagctatttattatttacacaagaaaagtggaaggtatggtgtactaaatatgacaaatatgacacattcaaacagaaaagaggaaaaaatttctgttatgtagaaaattatcccactacaattttctttatccttatttattaaaaata

SEQ ID NO: 561595 - DNA, 406 bp, Homo sapiens
actttgctgttggtgtttgtattatatttctgccttttttcccgcaaatactgccaccactgccaasacaccaattgatggcagtttaacgataacagagactcatcaaaatttcaattctgtaattcagcagttgaatgactagcctaaaaactatattgtgtcttcttgctagttcaatttaaacatatctttacattttaatcctatcagtaaaccaaattatactagcgctatgttatttatacaaagaaaactatagcaagtaaagagacaattgcctaggaaattaagagtgcagggatgagtgacattcacaatatcttttcagagttattagaatgcttgttatcaattcctcttaaattttactcttattgttgttattaacaaccttattctttca

SEQ ID NO: 561596 - DNA, 587 bp, Homo sapiens
attttttgaataaatattgagtgaaacagagcaaacacctatagtgttcctctctatgttacaaggtatcatttatacattttctcatttttatatatttatgaattttttaaaaaaattatagatgttcactgtattattcctactttaggggctgagacaaagggaaatttgtttttttataaaaaatccttgtctctctatttttatgctataattacaataattaaaaacaatgatcattttattagattggttaattcatattaaaaagaataatcaagggttcttcacattattttctatataataattagtattgtatttttcctaagttctgatccatgtttctgtatagttacacttaaacaatgtcagttgcattccactttatataaattaattgctcaacttctactcataattgcaaaactagccctactaattttatcattgcttatattgctttagctagttcaaataattaacatcacttctgattttattgtattttctaagctatgagacattccattgctggcaaacttartaatagtgccagtggcttcatcatctaatttgaagac

SEQ ID NO: 561597 - DNA, 502 bp, Homo sapiens
tagataaaaccacaaagatggggagaaaccaaagcagaaaagctgaaaattcaaaaaccagagtgcctcttctcctccaaaggatcacagctcctcgccagcagtggaacaaaactggacagagaatgactttgatgagttgacagaagtagacttcagaaggtcagtaataacaaacttctcggagctaaaggagcatgttctaacccatcgcaaggaagttaaaacccttgaaaaaagattagatgaatggctaactagaataaacagtgtagagaagaccataagtgacctgatggagctgaaaaccacagcatgagaactttgtgatgcatgcacaagcttccaagcttcaatagccgattcgatcaaatggaaaaaaggatatcagtgattgaagatcaaattaatgaaacaaagcgagaagrcaagattagagaaaacagtaaaaagaaatgaagaaatcctccaagaaattaggactatgtgaaaagaccaaatc

SEQ ID NO: 561598 - DNA, 579 bp, Homo sapiens
tggttccatttatccaagtctgactaagttggaattcatcattgaagtaggcctatgttgagccttctgaaacaaacctgtgccttatagtgcaaattaattgtattaaaatattataaacatgtcagatgattatgaaatgaatggttggatgctttttaaaagtccgtttacatacaaataactgacacaattatgcaaatcactcaactgaaracactttgaatatcactctctccataggggtttgatgtacaaatgcaattccataagctacttttcttggtggttctcatgtggatggccctgagggcaaattccagttggaaaaacaaccatcattttggcctattcctttttctctataaaaatgggaacgatgtcatctctctaacctgccttacaggattgttaagaggaaaaataagagtatgtccaactgaagtgcatataagtagtatcaatcaaccccaaagggcactttctctggaggagccaccccaagtctggcccctgctgtctcagtccctcggtccatatcagtctcaccttatctcagctgcctctgaaaccccaggc

SEQ ID NO: 561599 - DNA, 531 bp, Homo sapiens
gctatagttaagaacaccccaggaaagacccggagcccctgctaagcactgcacagcctggggtcagcctttggggttcctgtgggctatcrgaatgggtatgcggtcacctgatataatgtaatgacacaagcgtaaccagatgatgcatgtacatatgacatgcatgagctagtgcatctgaaattcaacaatttacagatgtaagttccccagtggccatttatttctgctcatagttcgcatggcctctgaccccagtattgtttatctgtagttccagactacctgacagacaacattttctgtagatcctaatccagatttctggcaactctggagatagtttcctgctgataagcccccttcttccactgcaccccaagtcacagccccctgaagaacatgcctaggatacagagaaaacaatctcatataagcaggaacacagaaactcacaccttaggacagaattcgtctcaactgagatgtattgcttctgtgtacatcaacctgagaacaaagaataat

SEQ ID NO: 561600 - DNA, 515 bp, Homo sapiens
cctactggcaatcagatccttactgcaggcccagaaatggctcctccctgtgaagtatagaagcaccagctttgtaagttttccatttcctcaataaacctattcgttgtgccatgtcaatcaatttaaaccaaaccatgatgcatcataggcagagatccacaagggtccacctcatatgacatgggcctggggaccctgcagaggtaggcagcaagggtatcctggtgtgtgcagggtatgaactatcctggtgtgtgcagggtgtgaactatcgtgtgtgcagggtgtraactatcgtggtgtgtgcagggtgtgaactatcctggtgtgtgcagggtgtgaactggaggaagggggaatatattaggttggtgctgcagtttctgccattgaaaagaaatggcaaaaaccacaaggacttttgcaccaacctaatagtaaagaagaggggatagtgtgcgctaggagtcatgggacttgggacagcagggacggccggaacctcttttggg

SEQ ID NO: 561601 - DNA, 515 bp, Homo sapiens
cctactggcaatcagatccttactgcaggcccagaaatggctcctccctgtgaagtatagaagcaccagctttgtaagttttccatttcctcaataaacctattcgttgtgccatgtcaatcaatttaaaccaaaccatgatgcatcataggcagagatccacaagggtccacctcatatgacatgggcctggggaccctgcagaggtaggcagcaagggtatcctggtgtgtgcagggtatgaactatcctggtgtgtgcagggtgtgaactatcgtgtgtgcagggtgtgaactatcgtggtgtgtgcagggtgtgaactatcctggtgtgtgcagggtgtgaactggaggaagggggaatatattaggttggtgctgcagtttytgccattgaaaagaaatggcaaaaaccacaaggacttttgcaccaacctaatagtaaagaagaggggatagtgtgcgctaggagtcatgggacttgggacagcagggacggccggaacctcttttggg

SEQ ID NO: 561602 - DNA, 597 bp, Homo sapiens
ggtccctcccacaacacgtgggaattctgggagatacaattcaagttgagatttgggtggggacacaaccaaaccatatcaaaggtcaaacttttgttctattcaggctttcaattgattggatgagggccacttacattaggaagagcaatctgctttactcagtatacccattcaaatggtaatctcttccagaaacgccctcacagacaaacccagaatcatgtctaaccaaatatctgggcaccctgttgcccaggcaagttgacacataaaattaaccatcatggggactctctcaacctgttgcaaacatacctcatttggcctgtactgcaattccagctacaggcctcaggatttagctttggtacatcaccctcatcaacacctgcccaatgggtactggttttgtagagatacagtgcaaaaattaaacaagagattccaaacatctcttatgtaaatcacacttcagtaaagaaaaataagcaaaaggagtgaaatgagggcaatgcttctgccatatgacctgcagtgagaycttgcatctcgacaactgtcagaacatccttaatgcatagacagatgcccaac

SEQ ID NO: 561603 - DNA, 602 bp, Homo sapiens
tacaatcagaaaatatttggtataaagaactaacctgcctcttcttacatgtggcataaaattcataccaaggataaaagctaagtgcaaaaacaagtgtggtcagtatcttcctcatcttgtattttttaaatggatgtatatttatatagacatacacatactggctaagatgtattgactgtttacgaggtgctgagcagaatccactcactgccctaactctctagagagccccatgagggacaatgccattatcctcattttgcagatcaggaaactgcggcacaaggaaaccaagtcattcacttaaggctgtgaaaccaacgagtatcagaaagaggttttgaactcakgtcttctgactctagggtacccctcacctcctacagcccccactgtcagtgtcaccccgctgtgagtgcccctctgctgattaaactcccagaagtatagacagtaaaaggttcctagtataaccttggtggtgaaattacaggaagtattaatttttctctgtgttcttgtctacattttctattaaatacatatgcattattttcacaattagagaaaaatccattgtatttaaaacagaacag

SEQ ID NO: 561604 - DNA, 562 bp, Homo sapiens
aatacaagcaatgcttttaataatctgtkcatatgtacttttgtattgttaaaggtatgtttttagggtgcatttctagaaatcggagtgctggatcaaaggataaatacatattttttcttttttacatattgccaaatccccctccataagcgttgttcacttagcttttccaccagtaaagtataagagtacccacttcactagagacttgctaacaatttattgtcaagcttttgaaatcttgcctatctgtgcagttgtgcattggtattgttataatgtacatttctcttaatatgcatgaagtttgagcatcttctcatgttttaaaaaatctagttttacatcaactgtatatatacatatacatatatatgtatatctatataactatagatatatatgtatgtatgtatatgtatggatctatatatctatagatatatatgtatatctatatatctatagatatatatgtatatctatatatctatagatatatatgtatatctatatatctatagatatatatgtatatctatatatctatagatatata

SEQ ID NO: 561605 - DNA, 562 bp, Homo sapiens
aatacaagcaatgcttttaataatctgttcatatgtacttttgtattgttaaaggtatgtttttagggtgcatttctagaaatcggagtgctggatcaaaggataaatacatattttttcttttttacatattgccaaatccccctccataagcgttgttcacttagcttttccaccagtaaagtataagagtacccacttcactagagacttgctaacaatttattgtcaagcttttgaaatcttgcctatctgtgcagttgtgcattggtattgttataatgtacatttctcttaatatgcatgaagtttgagcatcttctcatgttttaaaaaatctagttttacatcaactgtatatatacatatacatatatatgtatatctatataactatagatatatatgtatgtatgtatatgtatgkatctatatatctatagatatatatgtatatctatatatctatagatatatatgtatatctatatatctatagatatatatgtatatctatatatctatagatatatatgtatatctatatatctatagatatata

SEQ ID NO: 561606 - DNA, 566 bp, Homo sapiens
agaatgccagcaaaaaaatctctcttggagattatgtggggatgtaatgaatgtaagactaggcccctgaaaaataagataattaagttgtggctttttattgtgctttcattctgattgcggcctggatcaatgccaaaaaattatgaataagcataatgcctggcacataaaaggtgtttaataaatacctatgaataaataaataatataaagacatgaggtattgaaagccttggatttggatgtcctggatttttacactagctagcactgggactggctgactaagtcaatttaggggacctacttcactgttctgagtctcacttgtgcagttgtgtaccaagaactttagacttggttaaaccaccatcaagtttattgagagcctcctacgtgtatgagcctratggtatccactttaaatatatataatggtatccacttatttaaatataaatataagtatccaaatatttaaatggtatccactttaaatatatataaatacatccactttaaatatatatattatcttcaccttttctaattgtttgctacaa

SEQ ID NO: 561607 - DNA, 600 bp, Homo sapiens
attgcatcaagacaaatatttttaaaataaagtaagtattgttggtttcaaatatgattgtctcaaatataaacaactacacaaatttgaaacatgttggatgaaatggtagaaggaaaacagaggaagagccgaagtaaaaatagaagtgatatacatgagggcatagtgtacgaagcagagggtttattctagaattatatgaagccagtgaaaaagagatcatttggaacatagtattgtgcaattctagtcaatgtaagaggcaatcaaaatgtttcaagggggctgaaatgtttgaaacatgaggacaagtattggcccattcaataccttagagaaaagaaaactatgggaaaatttttttctgagagtatatgcctgagccaaattcttcactcacatacttatacatgggacctaattctgcacttggatatttgtggcaactctgcattctgcagtcttggtgcttgtgtgaaacaggagttaagcatatggcaaacttcagctttcatggaaatgtagcttctgttagcattaaacygctcattagtatgcagtggaactttttaaaaggaaaacaacaatagcgactat

SEQ ID NO: 561608 - DNA, 428 bp, Homo sapiens
cacacacacacacacacacacacacacacactcactttaatttgagtaagattctctctgtctccagcatttggtttgattaagcatttgctctgtgttactacaaaaggayaacttttattatgaaagttaattcatcagatctgatttggtaatagcatattcccttaaatataaaacttaaactccagtgagacagctgtggccttgttcttgcctgggaaccaggaccccagcaaatgtttcgcatgcacatccgtgcctttaagctcttgatgattatctacagcaattaagatgttatgacagctagtgcatccttgattagacccgtaatgaacattctaaatgttaagaaatcaaatggtgaggataagccgcctctttcatggaacaaaagacctttctttaggtcagacaaccactta

SEQ ID NO: 561609 - DNA, 668 bp, Homo sapiens
cctccctccatcacacacacacacacacacacacacacacacacacacactcactttaatttgagtaagattctctctgtctccagcatttggtttgattaagcatttgctctgtgttactacaaaaggataacttttattatgaaagttaattcatcagatctgatttggtaatagcatattcccttaaatataaaacttaaactccagtgagacagctgtggccttgttcttgcctgggaaccaggaccccagcaaatgtttcgcatgcacatccgtgcctttaagctcttgatgattatctacagcaattaagatgttatgacagctartgcatccttgattagacccgtaatgaacattctaaatgttaagaaatcaaatggtgaggataagccgcctctttcatggaacaaaagacctttctttaggtcagacaaccacttagccgtagggcagacatttccccctgtggttgacatgggcagcactgtggactcatggaatggagcttagggatcagctgtcttctctttcacaataaaaagaagaacagaagccccaggagtatctggttagattaattttctgactctagattttatatccagattagattagattttaatttccagattagaaatcattgacttctagatattctgatt

SEQ ID NO: 561610 - DNA, 624 bp, Homo sapiens
aaagaaacaaacaacaactcctgccttgctagaatttactatataatgaatastcatttcagactcaagtaaagttacatgtaaatactagaaggctagcactaacagagcattgcagaaaactacctttctgaaatgctctgttagttcagagcattgaagtaatctttgaaaccacattttcaaagactttacttagaaagccattgttcaaattgttcaatgcctatctttaggatggaaaaaaataaagggttttagcatggttgagagaaatgagaaggaagaaagagttgcagggtaaattcaggatgtatcccaggacagaacagggaaagctagctcacgataaatttaacttctcagagtttcttattaaatgagctagctgcatactcttagaggatcctgagttccacaatggtcttttacttttcaaaagcattcaggacatgaaccagaaaagaaagaattaaaactagtgaaaggagccccatatacatttctgaatccacatgttccttaagaattaaaaaagatgtagtgcatgtaaaagaatctcttttctgagataaactgtaccacatttttctattaaaattaagctccagggatatgagaaaa

SEQ ID NO: 561611 - DNA, 565 bp, Homo sapiens
ggctccatttcacttattttatctacacacacaccacacacacatacacacacacacacacaaacacagcaygagactaagccaaaacaaagtagacaattatgtttctgatggccttctttctggtgcccatattcacttttaatgtccccttgctggttacttttcatggggttcttttagcttcctgtcgattacaattatcggcctcttcccacctctaactgttgcttgttacaattatttgtgttttaaggtaattcatattaaaattagaatttttgtgaggatcaaaagccaaggtaaaaaaatgaaaagcgatcatgctaggggagcaggatttcaggcaggctcattgatctctatttttcacacagaattcccatccaggcttgtagactttgcctactctgttgactttccaggacagttatgcaccaggatgctttagaaaggaaagtacagatgttgacaacagacagacctgagcttgaattctgacattttattctatctagtagctgtgtttctgagcctctgttttctgtaaaatagtaataaatat

SEQ ID NO: 561612 - DNA, 565 bp, Homo sapiens
ggctccatttcacttattttatctacacacacaccacacacacatacacacacacacacacaaacacagcacgagactaagccaaaacaaagtagacaattatgtttctgatggccttctttctggtgcccatattcacttttaatgtccccttgctggttacttttcatggggttcttttagcttcctgtcgattacaattatcggcctcttcccacctctaactgttgcttgttacaattatttgtgttttaaggtaattcatattaaaattagaatttttgtgaggatcaaaagccaaggtaaaaaaatgaaaagmgatcatgctaggggagcaggatttcaggcaggctcattgatctctatttttcacacagaattcccatccaggcttgtagactttgcctactctgttgactttccaggacagttatgcaccaggatgctttagaaaggaaagtacagatgttgacaacagacagacctgagcttgaattctgacattttattctatctagtagctgtgtttctgagcctctgttttctgtaaaatagtaataaatat

SEQ ID NO: 561613 - DNA, 392 bp, Homo sapiens
ggtgtggttgggaggggaggtaatagttacattttttcagtgtatatttctaaamtgttaatatatatgtattgtaatcattttatatgcatgcattaccctaggccctctaaatatgcaaatatcaatacagatagcacaatatggaaaagacattaactttttaaatttgtttttgggtgaaacaggatacaatacggttttttaaaaggcacctgatctttacagattaacttgtttcagtaagataataaagcaatacaaaaccaaattcataattattctctttattattcaaggtttgaaattattcaacacgaagtaacttttcactaagttcttagcacacagcaaatgaacctagtaaccccatacatttaataagaaggaga

SEQ ID NO: 561614 - DNA, 595 bp, Homo sapiens
cttccacttaattttccatatttgtactttattgtcccactattccactttatacatgctcattttcttctacacctgtcctctctatctgatctggtaaattctgggtgctcaacaaaagctgatttccttctgtatgagttgctgtcctctccttccccctgccatctcagttacaggaaagcatcctatcatttgtatattccctcttcatacaggaaattagtgttcatggaaaagcatgtaaaatctaggaaacagacaagtattaagaaagaaaagcagagtgattgaactccaatttcaaaagaagacagcagcaagcaggataccataaaagcatcagagtatctgaaaaagtcagaattgttatacctggaacaatggatgctsagagcctatcagaattcttctagctgagtgcagtggctcatgcctgtaatcctagcactttgggaagccaaggctggcagatcacttgaggtcaggagtttaagaccagcctggccaacatggtgaaaccccatctctacaaaaaaatactacaattagctgggcatggtggcaggtgcctgtaggcccagctactcagaag

SEQ ID NO: 561615 - DNA, 563 bp, Homo sapiens
gatttagtaaaatatattactgtttattatatgtttgttcttcaaggaggtcagaagagtccggaacagactttttttggggcgggaagcaggggaagtggtcaggaaatgaacaagacattaattttatattaatttttggacatttaatggttaaagtcacttaaaatgctaatttgaaacaacatatatgaagtttattaatctagtattttccatttgcatttaaagttaatctttaccaattgaaatattgtaaaaaacttttaagaaaatcctaagaattgaacttttctctaaagtttaatatctacacaatttttagattcttccacataattcatttccaaagacattaaaaaacatttttacactttttraattactaaatcatgaatattattcacaggattgacctagaaattataaatcatataattaaatgaaaattcatatttgccatgctttattcgaacttaacgctgttttgaaagtgaagtcccttaattgtccttaggttttctgggtctctattttataaaatgaaattctaacaaaatgtg

SEQ ID NO: 561616 - DNA, 488 bp, Homo sapiens
aagtctggtctgaagatccccagtgatggaagcctagctctgccagtcactagttatgtgacttgggcagggctcttaatcctctgtgccttggttgaccctccccaacatgaagacaaccctacagcctacctcacagggttttstaaggattgagatagagctagcacagtttctggcaacgaggaaacacttgttaaatggtgactctcctatgaaaatttaacttactccctgcctccaatcgctcccagaccagcatgtaccccatagtgccatatttcaaagggaactcagctctgactttcccatgcccaccaggctccttgtcacctctcaggtggctggggaggcctccagcttgttggcacagcaaacaaggctagtttcccttctgttctggtcttgatgaactacttatagttcccatgaggtaggatgtttgctttcctctcctggttgcaaattctggcctttctgtagggggc

SEQ ID NO: 561617 - DNA, 567 bp, Homo sapiens
  misc_feature 290: n = A,T,C or G
aaattaaaatacattcttaatttgaaacccttttttaatggaaccacagaaaggaatattgattagggcttattagawattgagtttcctattacattccattgcactttaataagcatcctcataaggctttccgggatgcagagtctttccattagagatccgcatggagaagtttatcaagggaggaatttgggatcacccctattgaagagaaagaatggaacagaattggccagagggaaaaattagataatgatacgtctcagtgaaggtctcatatgacccanaagaaaatacaatgttagaatagccttttagaattatcctatggaagtcattggatggtagcttccttgagatgagaccatcactttgggagcagcatctctcttcagccagataattacagagaatgtggacagttgagggctctctgctgacattctcaactttggtcctgaaaatggatgtggatggcacatcacagtgttgagtattgtccactctctgtgtatctcactaactccaccacaattttcgaaactcaaacttgtaagaggaagt

SEQ ID NO: 561618 - DNA, 567 bp, Homo sapiens
  misc_feature 290: n = A,T,C or G
aaattaaaatacattcttaatttgaaacccttttttaatggaaccacagaaaggaatattgattagggcttattagaaattgagtttcctattacattccattgcactttaataagcatcctcataaggctttccrggatgcagagtctttccattagagatccgcatggagaagtttatcaagggaggaatttgggatcacccctattgaagagaaagaatggaacagaattggccagagggaaaaattagataatgatacgtctcagtgaaggtctcatatgacccanaagaaaatacaatgttagaatagccttttagaattatcctatggaagtcattggatggtagcttccttgagatgagaccatcactttgggagcagcatctctcttcagccagataattacagagaatgtggacagttgagggctctctgctgacattctcaactttggtcctgaaaatggatgtggatggcacatcacagtgttgagtattgtccactctctgtgtatctcactaactccaccacaattttcgaaactcaaacttgtaagaggaagt

SEQ ID NO: 561619 - DNA, 567 bp, Homo sapiens
  misc_feature 290: n = A,T,C or G
aaattaaaatacattcttaatttgaaacccttttttaatggaaccacagaaaggaatattgattagggcttattagaaattgagtttcctattacattccattgcactttaataagcatcctcataaggctttccgggatgcagagtctttccattagagatccgcatggagaagtttatcaagggaggaatttgggatcacccctattgaagagaaagaatggaacagaattggccagagggaaaaattagataatgatacgtctcagtgaaggtctcatatgacccanaagaaaatacaatgttagaatagccttttagaattatcctatggaagtcattggatggtagcttccttgagatkagaccatcactttgggagcagcatctctcttcagccagataattacagagaatgtggacagttgagggctctctgctgacattctcaactttggtcctgaaaatggatgtggatggcacatcacagtgttgagtattgtccactctctgtgtatctcactaactccaccacaattttcgaaactcaaacttgtaagaggaagt

SEQ ID NO: 561620 - DNA, 596 bp, Homo sapiens
tgcttttttgaattttcaatagtaggatgattttttatcttgtttcttggcaagcaaatttttacaaggcaaataggatccaacaacaacttcttaggaatgttacacttcttcttaaaataaatttatgtaagtaaggaatacaaaaataagtaacttgttctcttatatgaatgtaggtratattatagtgttagataatacacacaaaagtgttcactaattgacactggtagcatacaaattgtaaagatggaatctatgcctatctatccaagtgtcctatcatgtgatccaaattgatcagttggtttacaacatgcagtagatggtatctataaactataaaagaccaaatatttttaaacaaaattactaaaaatgttgcctctagaaagcttaatagacctcatctcaggaaaaccaggcatttaagagtctttgatagatatttttgccataaagattggtctataatgagattacaaaaaataggcaaattcaaacttcttaattaaaataaaagaggaggaaactaacacacacacacacacatacacacacacacacacccaggcacacatgtacaaacacac

SEQ ID NO: 561621 - DNA, 579 bp, Homo sapiens
acacatgcatgtgtatgttcattgcagcactattcacagtaacaaagacatggaatcaacctaaatgctcatcagtggcagattagataagaaaatatactacatatacaccatggaatactctgcagccattaaaaagaataaaatcatgtctttgctggaacatggatggagctacaggccattatccttagcaaattaatgcaggaacaaacaaccaaatactgcatgttctcacttataagtgggaactaaatgattcgaacacatggacacaaagaggggaacaatagacactagggcctacttgcgggtggaagtgggaggagagagaggatcagaacaaaaaagctattgagtactaggcttagttcctgggtgatgaaatcatctgtacaaaaatcccccgtgacaygagtttacctatataaccaacctacacatgtacccttgaacctaaaataaaggtttttttaaaaaagacgaagagatgggagtggaaagagagatggggttagggagaaaggaaaggtgaaagacgagagataaagaaaagggaacaaaagtccaaagtaagga

SEQ ID NO: 561622 - DNA, 375 bp, Homo sapiens
ctcagtacagtttaatgtataagtaggtacagaaaatatgaacggtttatcagaaggtcccaagaactctcagcgtctagatgcagtctgcacactgcaggtttaataaacgcactatgcagtattttcagcatctacagcagggcccacctggcacgtaattaggcatttgagaatcatttgttaaaataattcagtgttaaaataagagaaaatctcccactggctaaggtatgagcataaatgtatattgtttatgaaagttttagctgttattttatgaccctgtgarttaaaaaacaaaacaaataaaacatgaatttaaagacgccttgaggtgttgtgtaaattggtcccctgtttgaaaaagaatct

SEQ ID NO: 561623 - DNA, 600 bp, Homo sapiens
ttatgtaaatataaacacatatacttattgttttgatcatcactacttttattattcccattccctttctatgtttgattttcttcttactaaaatgtattattttaaaattcttttaaaaagtgtctgtaagttataaatgtactcattcwttcttgtctgaaactgtctttattttgcccttactcttgaatgataatctggctagccatagaaattgaggcaaaacttaacttccctaagttatttaaagacattggtctactgccttctgagaaaaacttgtcacccagcaagtcgtctgtattttctgtctgcatttaagattttctctttgtctttgatgttatacagtttcaccactatgtgtcttagagtggacttatttccatttttcatgttttggattcactgtgtctagaaattatggatttgcatgttctttctttcatggaaaattttcagaacttattactttgaatgtttcctttctccattttttcccctttgctctacatgaaactcctctgcacatgtagtggaccttcataatccatactccacatctcttaaatcatctttcatattatttacctattt

SEQ ID NO: 561624 - DNA, 546 bp, Homo sapiens
caaaacctggtgcttgagcactggcccctaaggcaggccttacagatctcttacactcgtggtgggaagagtttagtgtgaaactggggtggaattgggtgtccacgtatgttcccttttgccttactatatgttctgtcagtttctttcaggaaaatcttcatcttacaacttgtagggctggtgttaacttacgacttcactaactgtgactttgagaagattaaagcagcctatctcagtactatttctaaagacctgattacatatatgagtggggtaagtgaagaagcttttttaaaacaaatgtattttcatcagaggagtcggcatacacacactctacaatttaactttgtaggaaagaaaaataatttagaaaaaatcatggccccacattttgtcaaggattcttacaagtgatattcaaatatctaatctaaaatgattatctagaaattggcacattctaagtgtgcagatgctgatgaggagcaggtattgatagacagcgcgttatgygtcaaaggatgtctatcctttgct

SEQ ID NO: 561625 - DNA, 593 bp, Homo sapiens
tttctctttttgggaatgccaatacccatgttttcacwggagaaggtatacccacccacaacagcatatgtaagaagccagtatcctgatttttttccttactaaaaagctacacacaatgaagtaactatcactgctggtctaaatattgttggtcccttgggccagtgtgttctctgttgcataaatggaaattgtttattctgtgagctattatatgtttttataaaatacttagagagggaattctagaactttttttactcttcctactagagtagtatttccacaattattaccacaaaactttggtccttgaaatgcttacagaagagttgagaaaaacttaccatatggcctgccgggcacgatggctcacgcctgtaatcccagcactttgggaggctgaggtgggtggatcatgaggtcaggagttcaagaccagcctggccaagatggtgaaacctcgtctctactaaaaatgcaaaaattagctgggcgcagtggcagctgcctgtaatcccaactactcaagaggctgaggcaggagaattgcttgaacacaggggcagaggttgcagtgagctgagatc

SEQ ID NO: 561626 - DNA, 593 bp, Homo sapiens
tttctctttttgggaatgccaatacccatgttttcactggagaaggtatacccacccacaacagcatatgtaagaagccagtatcctgatttttttccttactaaaaagctacacacaatgaagtaactatcactgctggtctaaatattgttggtcccttgggccagtgtgttctctgttgcataaatggaaattgtttattctgtgagctattatatgtttttataaaatacttagagagggaattctagaactttttttactcttcctactagagtagtatttccacaattattaccacaaaactttggtccttgaaatgcttacagaagagttgagaaaaacttaccatatggcctgccgggcacgatggctcacgcctgtaatcccagcactttgggaggctgaggtgggtggatcatgaggtcaggagttcaagaccagcctggccaagatggtgaaacctcgtctctactaaaaatgcaaaaattagctgggcgcagtggcagstgcctgtaatcccaactactcaagaggctgaggcaggagaattgcttgaacacaggggcagaggttgcagtgagctgagatc

SEQ ID NO: 561627 - DNA, 413 bp, Homo sapiens
tctccccgcttgttttcccacctggctccaacctcctgtcctgcctttttacttctaygggtgcagcccccgtacctggccctgctccccacacagcacagctgccgccgcccaatgtttccctgctgcgcccaggcctgtgctaggtgaatggaagagcatggcctccttgcacttctgcaaagcagctaatcctgggcccctatgggtggcaacacctgtgtgtgtgtagcagggaactgaaggggggtctggaggtctccaaagatgatgcctcatggaccagggagggtctggctgttgtgtggctgtaggggtccttattcttgggacctgctccaggggaggtgggggagtccagcttggctctgtaaatctggtggttaggtgggtccagtcaccgtgctgaaggt

SEQ ID NO: 561628 - DNA, 585 bp, Homo sapiens
cactgcactctagcctgggtaacagaatgagaccctgtttcagaaaagaaaaaaagaaaagaaaagaaaagaaggaaggaagaaaggaatgagggaaggaaggaagaaaggaatgagggaaggaaggaagaaaggaatgagggaaggaaggaagaaaggaatgagggaaggaaggaaggaaggcaggcaggcaagcsactaggatgttcttagcagggaataacatgttctgtgttttgcaaaagccctatgcatacaaggatcttctgagaaggtgactgggacaccaaggaggaggcgccttcagtcattcagctgatccctgggctgggatcagaaggatagagagaggtggatggctccaggggcattgagaaggaaaggacttgtgaatcggtgtgcaaaacagatatgaaccagttgaaagttcgtgatggaagaaacatgtctatacaagtgaagtgacgaatctgccttctcaagttaaacccttcaaggaggatccggtgggcagacacatcatttatttttcttttcttttgagacaaggtcttgctctgttgcccaggctgcagtgcagtggca

SEQ ID NO: 561629 - DNA, 475 bp, Homo sapiens
aacaagcctattattgcaaccatctttggaaaatacaatctgctgcaatcacctttggaaactaggaaaccaatgcagtattctgaaattcgtaattctgaaaactaatgaatatgaatggaaagaatcaagcatttatcctccctttcctacacatgctatccctctgagtaatcagattgttgatgtgggcagattttatttttataaaaggattctagtaatggaaattccagtaatggaaataaaaggattccagtaatggctgaaagagagacacaataagaaagtgatcagtttgcaactcctaacaacataatgaatctaggcawtgatcatcagtgaatgcatgacattatgcaaaaggcaatcactttacaatggataaatcacattgatgacacttaagcccactaacaaatctgatcacaaaatagtgacaagcagatcttgccaaaataactgaacttgaatt

SEQ ID NO: 561630 - DNA, 569 bp, Homo sapiens
cacgcccggctaatttttgtattttttattagaaacggggtttcaccatgttggccaagctgaccccgaactcctgacctcaggtgatccacctgcctcagtctcccaaactgctgggattagaaacgtgagccactgagcccagccaatagtttttctttaacaaawgacatgtgcacttctcatttgtaaaatatcccatcccagtaaaacagcttttctgggcacacgggacaattcttgtccctcccaacccactttagggaaagaggaacctcaaagagcacagggactttccctggcctccaagtcccttaaattcatccccccaccccatcttctgctcccatttagattcccaacttcattaacctttgtatgaaatactagcaccccagatctaattgtgccgtgcaactagtcagctttacccaatatcctccattaacccagaaacccaagccagcacaaacgaattgagctcccatgtcatttcatttctatcctttctaaatgaactcggcttcaagtgtaggaaaggaggagaaaggctggttgacaataatgaa

SEQ ID NO: 561631 - DNA, 588 bp, Homo sapiens
aaggggagggggtgcaagaacagggagtaggtcacaagatcacatgcttcaaagggcaaaaaggagaacaagatcacatgcttctgaggaaacaggacaagggcaaaatcagaactactgataagggtctatgttcagctgtgcacgtattgtcttgataaacatcttaaaaggaaacagggttygagagcagagaactggtccgaccacaaatttaccagggtggaatttcccaatcctagtaagcctgagggtactgcaggagaccagggcatattttagtccttatctcaaccgcataagacagatactcccagagtggccgtttatatacctccccccagggatgcattccttccccaggtattaattattaatattccttgctaggaaaagaatttagcaatatcttccctacttgcacgtccgtttataggctctctgcaagacgaaaaatatggctctattttgcccgacctcgcaggcagtcagttatggttgtcttcccttgttccctgaaaaacgctgttattctgttctttttcaagttgcactgatttcctattgttcaaacacacatgttttgca

SEQ ID NO: 561632 - DNA, 588 bp, Homo sapiens
aaggggagggggtgcaagaacagggagtaggtcacaagatcacatgcttcaaagggcaaaaaggagaacaagatcacatgcttctgaggaaacaggacaagggcaaaatcagaactactgataagggtctatgttcagctgtgcacgtattgtcttgataaacatcttaaaaggaaacagggtttragagcagagaactggtccgaccacaaatttaccagggtggaatttcccaatcctagtaagcctgagggtactgcaggagaccagggcatattttagtccttatctcaaccgcataagacagatactcccagagtggccgtttatatacctccccccagggatgcattccttccccaggtattaattattaatattccttgctaggaaaagaatttagcaatatcttccctacttgcacgtccgtttataggctctctgcaagacgaaaaatatggctctattttgcccgacctcgcaggcagtcagttatggttgtcttcccttgttccctgaaaaacgctgttattctgttctttttcaagttgcactgatttcctattgttcaaacacacatgttttgca

SEQ ID NO: 561633 - DNA, 618 bp, Homo sapiens
ttaatcttcatatctagtttgataaaaaaagagtggtgttagccacctttgattagcaaatgaggttttaaagtcactattctagtttaaacctaaggattttatctttgagacagagtctcactctgtggcccaggctggagtgcagtggcacaatctcaactcactgcaacctctgcctcccaggttcaagctattctcctgcctcagcctcacaagtagctgggattacaggcgcgtgccactgtgcccagctagtttttgtagttttagtagagatggggcttcaccatgttggctagrccggtcttgaactcctgacctcaggtgatccacctgcctcagcctcccaaagtgctaggattacaggcatgaagccaccgcgcccagccaagaattttactctttattatcaataatgtttcagcatggaacagttattttaatttgcttcaaaataaattagccagattgggcacagtagctcacccctgtaatcccagcactttgggaggccaatgcaggagaatcgcttcagaccaggagtttgagaccaccctgggaaacagtgagtctgctgtctgtacaaaaaaaaataaaaataaaaagtaaaaaaaa

SEQ ID NO: 561634 - DNA, 618 bp, Homo sapiens
ttaatcttcatatctagtttgataaaaaaagagtggtgttagccacctttgattagcaaatgaggttttaaagtcactattctagtttaaacctaaggattttatctttgagacagagtctcactctgtggcccaggctggagtgcagtggcacaatctcaactcactgcaacctctgcctcccaggttcaagctattctcctgcctcagcctcacaagtagctgggattacaggcgcgtgccactgtgcccagctagtttttgtagttttagtagagatggggcttcaccatgttggctagaccggtcttgaactcctgacctcaggtgatccacctgcctcagcctcccaaagtgctaggattacaggcatgaagccaccgcgcccagccaagaattttactctttattatcaataatgtttcagcatggaacagttattttaatttgcttcaaaataaattagccagattgggcacagtagctcacccctgtaatcccagcactttgggaggccaatgcaggagaatcgcttcagaccaggagtttgagaccaccctgggaaacagtgagwctgctgtctgtacaaaaaaaaataaaaataaaaagtaaaaaaaa

SEQ ID NO: 561635 - DNA, 460 bp, Homo sapiens
acacctggcaaattttttttgtatttttagtagagacggggtttcatcatattggccaggctggtcttgaactcctgacctcaggtgattcacccgcctcgacctcccaaagtgctgggattacaggcttgagccaccatgcccggccatggcttgtaatatcttaagaaagaatggaagggaagtatrttttttgagactcacacgttaaaaatacctttggttttttctgataactaatgagtagtttggctaaatataaaactccaggttgaaaatttttccttagaattttgagagcattgacgcactgtcttctacatgtacttactgctcttgcagtctgatgacataatcctccatatactacttttttttctctctcttcaggttaaagaatgttcattttatgtgtagtattctgaaattccacagtgctatgccttgttggccttgttgt

SEQ ID NO: 561636 - DNA, 393 bp, Homo sapiens
catgccaggctaattatagctgctttcaaacaacagaagggttaagttgttgcaacagagactatatggctagtgaagtctaacatatttactactggccatttacagaaaaagtctggactgcaaggaagaccaaaaaaaaaaaaaaaaaaggaaaaagaacaagtttgaagacccctccaacacacacacacacatagacacgctaatggatgggtcaggtagggccactagggcaaacccatccatctctgaaagaaataatcaggacatttgtcttgaggagctggggtcaaaatatctttctgaaaaagcaacattttgattttttccaaaagaaattagaactgttttttayttaggtcctgtgtttaattaagccttacagaaaat

SEQ ID NO: 561637 - DNA, 557 bp, Homo sapiens
agatcttagtggctgaaccaagagatggcaccygggaccttagcagtaaaacccgtccccttttttttgagacagtgtcttactctgttgcccaggctggagtgcagtggtgagcacagctcactgcagcctgaacttcctaggctcaagcctcatcctcctgagtagctgggactacaagcacacaccaccacacctggctattttttgcagagacttggggggggtctcactgtgttgcccaggctgttctcaaactcctggcctcaagcagtcctcccactttggcctcccaaagtgcagggattacaggcgtgagcccccacgccagccggtttgccccttttgcaccaccagcgataaccactcagctcccctacccaagccttagtccttctgtccgtgttgtggaaaccaggtattttcatcagcatttccaaggggactaagtttctcccattccagaggaggaggtgttgaaggatttgttgttcacttagatcattaatgagggtctggaacagtcatctgaagtttgggggaaacgtcacgtctcc

SEQ ID NO: 561638 - DNA, 481 bp, Homo sapiens
gtaatatttcccagagagcagaagatgatggggaggtgtctggacatacattaattagccagcttggtctatttccaggtccatkttttcagaggccaggtttttgttgttgttgttgttgttgtttgtttttttctgccctatttagtaataatatccataattctagaaaagcctgatgttaaatgtaaggtggtctaagcattgaagcaaactttcttcctatctcaaaatcattgagttgttgatgtctaaggctttgagtaaccacttaactctataacaacatcatccctctaggctgggcatggtggctcacacctgtaatcccagcattttgggaggccgacgtgggcagctgatttgaggtcaggatttctagaccagccaatatggcaaaaccctgcctctactaaaaataaaaataaaattagctgggtgtggtggcaggtgcctgtaatcccacctattcaggaggctg

SEQ ID NO: 561639 - DNA, 481 bp, Homo sapiens
gtaatatttcccagagagcagaagatgatggggaggtgtctggacatacattaattagccagcttggtctatttccaggtccatgttttcagaggccaggtttttgttgttgttgttgttgttgtttgtttttttctgccctatttagtaataatatccataattctagamaagcctgatgttaaatgtaaggtggtctaagcattgaagcaaactttcttcctatctcaaaatcattgagttgttgatgtctaaggctttgagtaaccacttaactctataacaacatcatccctctaggctgggcatggtggctcacacctgtaatcccagcattttgggaggccgacgtgggcagctgatttgaggtcaggatttctagaccagccaatatggcaaaaccctgcctctactaaaaataaaaataaaattagctgggtgtggtggcaggtgcctgtaatcccacctattcaggaggctg

SEQ ID NO: 561640 - DNA, 569 bp, Homo sapiens
aggtaacaaataaacacacacctctaaggttatgagggaagcagtgtaggaaaggttagggagccacacaaaatggggcyccaagtaaagtccagattcaggggttgtcaactatagcccttgggtcaaacttggtaccacctgtttttgtaaataaagttttattggaacacagccacacccatttatgtagttgtccccacggtatccatggggatttgtttcaggaccctccaaggataccaatatcaacagatgctgaagtcccttataaaaaaatggcatattatttgcatataacctactcacatcctctcatatactttaagtcatctctagattacttataatactagtacaacacagatgttatgtaaatagttgttacctgtatttttacttgtattatttttaactattgtattgttatttttaatttttttctgggtattttcattcacagttggctgaatccaagggtgtagaacctgtggatacaaagagtcaactgtcttctgtctagggctgcattcatgctacaaaggcagagttgaatagtcaaagcagag

SEQ ID NO: 561641 - DNA, 569 bp, Homo sapiens
aggtaacaaataaacacacacctctaaggttatgagggaagcagtgtaggaaaggttagggagccacacaaaatggggctccaagtaaagtccagattcaggggttgtcaactatagcccttgggtcaaacttggtaccacctgtttttgtaaataaagttttattggaacacagccacacccatttatgtagttgtccccacggtatccatggggatttgtttcaggaccctccaaggataccaatatcaacagatgctgaagtcccttataaaaaaatggcataktatttgcatataacctactcacatcctctcatatactttaagtcatctctagattacttataatactagtacaacacagatgttatgtaaatagttgttacctgtatttttacttgtattatttttaactattgtattgttatttttaatttttttctgggtattttcattcacagttggctgaatccaagggtgtagaacctgtggatacaaagagtcaactgtcttctgtctagggctgcattcatgctacaaaggcagagttgaatagtcaaagcagag

SEQ ID NO: 561642 - DNA, 569 bp, Homo sapiens
aggtaacaaataaacacacacctctaaggttatgagggaagcagtgtaggaaaggttagggagccacacaaaatggggctccaagtaaagtccagattcaggggttgtcaactatagcccttgggtcaaacttggtaccacctgtttttgtaaataaagttttattggaacacagccacacccatttatgtagttgtccccacggtatccatggggatttgtttcaggaccctccaaggataccaatatcaacagatgctgaagtcccttataaaaaaatggcatattatttgcatataacctactcacatcctctcatatactttaartcatctctagattacttataatactagtacaacacagatgttatgtaaatagttgttacctgtatttttacttgtattatttttaactattgtattgttatttttaatttttttctgggtattttcattcacagttggctgaatccaagggtgtagaacctgtggatacaaagagtcaactgtcttctgtctagggctgcattcatgctacaaaggcagagttgaatagtcaaagcagag

SEQ ID NO: 561643 - DNA, 569 bp, Homo sapiens
aggtaacaaataaacacacacctctaaggttatgagggaagcagtgtaggaaaggttagggagccacacaaaatggggctccaagtaaagtccagattcaggggttgtcaactatagcccttgggtcaaacttggtaccacctgtttttgtaaataaagttttattggaacacagccacacccatttatgtagttgtccccacggtatccatggggatttgtttcaggaccctccaaggataccaatatcaacagatgctgaagtcccttataaaaaaatggcatattatttgcatataacctactcacatcctctcatatactttaagtcatctctagattacttataatactagtacaacacagatgttatgtaaatagttgttacctgtatttttacttgtattatttttwactattgtattgttatttttaatttttttctgggtattttcattcacagttggctgaatccaagggtgtagaacctgtggatacaaagagtcaactgtcttctgtctagggctgcattcatgctacaaaggcagagttgaatagtcaaagcagag

SEQ ID NO: 561644 - DNA, 535 bp, Homo sapiens
tctctgcaaattctcagacaggaaaatggatcctagttcgcctgtctgcgacataaaagcacttaacctgagctccagcccttcaatccctgtaaagaacagatgactcagtcttcggtgatacagactgaatgaccaggagatgwaatatcctgcccatttctcatatttcagggactgtcattggaactggaatatcatcagtgctttccttctttcatcacgtgcatattattgcacgcctgctgtataccaggcactgggctgtacgttgaggatacagcagtgagcagaacagacacaacctctgccctaagtggagctttatattctggttaagggagacagagcatacacaagtaaccaaaaaagatacctttatatagtaatatgagctatgaacatattaaaatagggataggtcatcagagccattggtggaggtgtcttctttgggtattaggagggtttttcaggaggtagcctttggtcacaggtccagatgacaagtagtatttaggcagaggaaacagca

SEQ ID NO: 561645 - DNA, 535 bp, Homo sapiens
tctctgcaaattctcagacaggaaaatggatcctagttcgcctgtctgcgacataaaagcacttaacctgagctccagcccttcaatccctgtaaagaacagatgactcagtcttcggtgatacagactgaatgaccaggagatgaaatatcctgcccatttctcatatttcagggactgtcattggaactggaatatcatcagtgctttccttctttcatcacgtgcatattattgcacgcctgctgtataccaggcactgggctgkacgttgaggatacagcagtgagcagaacagacacaacctctgccctaagtggagctttatattctggttaagggagacagagcatacacaagtaaccaaaaaagatacctttatatagtaatatgagctatgaacatattaaaatagggataggtcatcagagccattggtggaggtgtcttctttgggtattaggagggtttttcaggaggtagcctttggtcacaggtccagatgacaagtagtatttaggcagaggaaacagca

SEQ ID NO: 561646 - DNA, 535 bp, Homo sapiens
tctctgcaaattctcagacaggaaaatggatcctagttcgcctgtctgcgacataaaagcacttaacctgagctccagcccttcaatccctgtaaagaacagatgactcagtcttcggtgatacagactgaatgaccaggagatgaaatatcctgcccatttctcatatttcagggactgtcattggaactggaatatcatcagtgctttccttctttcatcacgtgcatattattgcacgcctgctgtataccaggcactgggctgtacgttgaggatacagcagtgagcagaacagacacaacctctgccctaagtggagctttatattctggttaagggagacagagcatacacaagtaaccaaaaaagatamctttatatagtaatatgagctatgaacatattaaaatagggataggtcatcagagccattggtggaggtgtcttctttgggtattaggagggtttttcaggaggtagcctttggtcacaggtccagatgacaagtagtatttaggcagaggaaacagca

SEQ ID NO: 561647 - DNA, 482 bp, Homo sapiens
catgtctgcttctgtttccgattgtctttcatatttcaagtgtccagcatatggtgggtacctgtttgatgaatgactaaatgattgaacaaacagctcgaagactgcagcatggagaatggattacaggaggtgaaacaaggcaaggaggccagtttggttactgaagtagaacaatgttcaaagggggtaggagaaagggaataggttaaggaaatatttgttagatatagctggaaggacttgttggtttgacagttgtgctgcaagagaagaggagaatgaagtcaaccattgctcccaaatttctggcataagtggctaaggagtgagtggtcccacrtgagatgtaaggaaaaggctgaagaacagatctgagtaatgttgctgggttcagggatgacaaccttgggccagagatgctattgaatctgtccgggaggtaactggatatataaattttgaagtctaaaggggaatct

SEQ ID NO: 561648 - DNA, 518 bp, Homo sapiens
aaaataccaaaatcagccaggagtggtgtcacatacctggaatcctagctacttgggaggctgagacaggagaatcacttcagcccaggaggcaaaggctgtagtgagctaagactgtgccaccgcactccagcctgggtgacagagcgagacactgtctcaaaaaaaatttgactgagtccttaatatctgccaggaactaggctggacattgcttatataatgctggccaaaagtcatacctcatcttggaacgctagtgagtgagacggatgataatgaatgaactgcacaaacaagtrtaaaatgacagtcatgataaatgccacgggaggagcttattatggagagatctgactttatcggactttctagaagggagagggacctcaggggagaggcagctgggcataataggagtgaagtgatacttccctttagttctctaacaaaaacacccctatgtgctggaactgtgaaaacggcagaggctatccctgtggttctcaacctggctg

SEQ ID NO: 561649 - DNA, 518 bp, Homo sapiens
aaaataccaaaatcagccaggagtggtgtcacatacctggaatcctagctacttgggaggctgagacaggagaatcacttcagcccaggaggcaaaggctgtagtgagctaagactgtgccaccgcactccagcctgggtgacagagcgagacactgtctcaaaaaaaatttgactgagtccttaatatctgccaggaactaggctggacattgcttatataatgctggccaaaagtcatacctcatcttggaacgctagtgagtgagacggatgataatgaatgaactgcacaaacaagtataaaatgacagtcatgataaatgccacgggaggagcttattatggagagatctgactttatcggactttctagaagggagagggacctcaggggagaggcagctgggcataataggagtgaagtgatacttccctttagttctctaacaaaaacacccctatgtgctggaactgtgaaaacgrcagaggctatccctgtggttctcaacctggctg

SEQ ID NO: 561650 - DNA, 586 bp, Homo sapiens
ggggtctagtctggtgtagcaaaagccttacacatagtaagtcctataatgctcagtcagtttgatttatttttaaagggagtgttatggacattgtagagggcacattctcataagacaatgagtwtgtaatatgttaggtggtgatcagagctgagaaataagaaattttggtaggaggacagggagtggagggtaaggtgttgttaagtaggatatccaaagagagcccccccccggccccaccctgcttttttgagactgtcttgctttgtcacccaagctggagtgcagtgtcctgaccacgcctcactgaagtcttgacctccaggactcaagtgatcctcctacctcaccttttcgagtagctgagactgcaggtgtgtgccaccacacttggctaattgttttgtttttttgtagagataggatcttgttatgttactcagcctggtctcaaattcctaagctcaagcaatcctcctgccttggcttcctgagtcgctgggactgcaggcaggcaccatcatgcccggctaattttttgaagtttttggagtcttggggtcttgctaagtttctcagg

SEQ ID NO: 561651 - DNA, 607 bp, Homo sapiens
acaatgagtttgtaatatgttaggtggtgatcagagctgagaaataagaaattttggtaggaggacagggagtggagggtaaggtgttgttaagtaggatatccaaagagagcccccccccggccccaccctgcttttttgagacwgtcttgctttgtcacccaagctggagtgcagtgtcctgaccacgcctcactgaagtcttgacctccaggactcaagtgatcctcctacctcaccttttcgagtagctgagactgcaggtgtgtgccaccacacttggctaattgttttgtttttttgtagagataggatcttgttatgttactcagcctggtctcaaattcctaagctcaagcaatcctcctgccttggcttcctgagtcgctgggactgcaggcaggcaccatcatgcccggctaattttttgaagtttttggagtcttggggtcttgctaagtttctcaggctgatcttaaactcctgggtcaggtgatcctcccactttggcctcccaaagcactgggattacaagcctaaaccactgtgcctggcccaaagagagcatctttgattagaaaaccaaccgttacctcaagacacatga

SEQ ID NO: 561652 - DNA, 607 bp, Homo sapiens
acaatgagtttgtaatatgttaggtggtgatcagagctgagaaataagaaattttggtaggaggacagggagtggagggtaaggtgttgttaagtaggatatccaaagagagcccccccccggccccaccctgcttttttgagactgtcttgctttgtcacccaagctggagtgcagtgtcctgaccacgcctcactgaagtcttgacctccaggactcaagtgatcctcctacctcaccttttcgagtagctgagactgcaggtgtgtgccaccacacttggctaattgttttgtttttttgtagagataggatcttgttatgttactcagcctggtctcaaattcctaagctcaagcaatcctcctgccttggcttcctgagtcgctgggactgcaggcaggcaccatcatgcccggctaattttttgaagtttttggagtcttggggtcttgctaagtttctcaggctgatcttaaactcctgggtcaggtgatcctcccactttggmctcccaaagcactgggattacaagcctaaaccactgtgcctggcccaaagagagcatctttgattagaaaaccaaccgttacctcaagacacatga

SEQ ID NO: 561653 - DNA, 577 bp, Homo sapiens
gggattaagaactttttttaagctactcagctgccaagggagagagctgtgattctgttcatatcagcttgtttccagcctctaggagtcttcccatcactatactacagttccctggcccactgcagggctgggcagtagtgtcataggcgattaaaataacctggaggctgaggtgcgagtattgcctgagcccaggaaggtgaggctgcagtgagctatgattgcattcattgagccccagcttgggccacagggggagaccccctgtctcaaaaaaattaataaattaaaataaataaataaataaaataatctgggctgggcatggtggctcacgcccgtaatcacagcactttgggaggctgacgtgggaggatcacttgagcccaggagttcgagaccaacctgggtaacatagtsatctcccctctctacaaaaaattttaaaattagccaggtgtggtggtgatgtgtacctgtggtcccagctacttgggagattgaggcagaaggattgcttgaacacaagtgtttgagactagagtgaggtatgatcgtgccactgtgcttcagc

SEQ ID NO: 561654 - DNA, 533 bp, Homo sapiens
tgctttgcacacaactggcactcaatgtatgactgttcccttttccatgcaccgcatcgtatcctgcagctgggaatactccccctgtgaggaaagtcctaaccggaagacacttagcctagcccttggtatacaggtgactctaatgcccccttcccatgactgaacttcaggggccctttactattaatagaaactgtgttcctaattcctctcccactgtgcagtcaatttacctcttaaagcctgacagaggcagcatgcaggaagattgacaacattgctcacactatttgaaggttccactgtgtgttgaaaattgtctaaatggggggataatgaacagtcaccaaattggagctttctgaarctgagaggaaagaaaggctttggagagaggttgccatcttaccaacatattagccagggtagggagatggaggagggatggtgtcagttccccaagcccaagaaaggttggacctgttagagtatgaagcatctgggggccgttcactgttagcagtttatgt

SEQ ID NO: 561655 - DNA, 556 bp, Homo sapiens
ctacacacaatctcaatgaactagaaatcacttatcatctttgtttttcattttttattattaaagagatgggctgggtgcagtggytcacacctgtaatcccagcactttgggaggccaaggcaacagatcatgaggtcagagatcgagaccatcctggctaacatggtgaaaccccatctctactgaaaatacaaatttagccaggtgtggtggtacgtgcctgtagtcccagctactggagaggctgagtcacgagaatcgctgaacccaagaggtggaggttgcagtgaactgagatcacgccactatactccagccaggtgacagagcaagactccatctcaaatatatatatataataaaataaaatagtttagatttacagaaaacttgcaaaggtgatatgaagagctcttgtatcctccttgccctcgtttgtcatttaagtctttcaattaagtagtcaacattacttgctgttagtcaaataaggaaataggcaagtcatggggatttgtctactaacataatggctaatcactgcctcccttta

SEQ ID NO: 561656 - DNA, 556 bp, Homo sapiens
ctacacacaatctcaatgaactagaaatcacttatcatctttgtttttcattttttattattaaagagatgggctgggtgcagtggctcacacctgtaatcccagcactttgggaggccaaggcaacagatcatgaggtcagagatcgagaccatcctggctaacatggtgaaaccccatctctactgaaaatacaaatttagccaggtgtggtggtacgtgcctgtagtcccagctactggagaggctgagtcacgagaatcrctgaacccaagaggtggaggttgcagtgaactgagatcacgccactatactccagccaggtgacagagcaagactccatctcaaatatatatatataataaaataaaatagtttagatttacagaaaacttgcaaaggtgatatgaagagctcttgtatcctccttgccctcgtttgtcatttaagtctttcaattaagtagtcaacattacttgctgttagtcaaataaggaaataggcaagtcatggggatttgtctactaacataatggctaatcactgcctcccttta

SEQ ID NO: 561657 - DNA, 591 bp, Homo sapiens
agaaattgcaggaaacccccactaagactgggtccctgggagtttttaactctgaagctagtcctcactcagcctccagcaattcatcaaaattgccatagtcttcctgrcttcagtggcatcttttcccaaattgccatagtcttcctggcttcagtggcatcttttcccagtaagctgatcttggctgtttctctgtatttgtctattcttctagattttgaagtggtggtttgtcctatgacctccattctctgagggatctaagaaaagtcattgcttttccagtttctatagctttgttgccattttcctgttgtgattttcagtacctacagatttcccttgtggtttatatacacaaacatatacacaatcattaaaaacaattgtattcttctgcttttagatccatccactgccttttcaactgcatttatatttccatcccttgtttttaaacttactaaatatacagaaccagtccaaatgcccatcaatcaacgagtggataaagaaaatgtggtatatatataccatggaatactactcagccacaaaaaggaacaaaataatggcatttgcagcaac

SEQ ID NO: 561658 - DNA, 461 bp, Homo sapiens
  misc_feature 422, 423, 424, 425, 426, 427, 428, 429, 430, 431, 432, 433,434, 435, 436, 437, 438, 439, 440, 441, 442, 443, 444, 445,446, 447, 448, 449, 450, 451, 452, 453, 454, 455, 456, 457,458, 459, 460, 461: n = A,T,C or G
tgccaaagattcctggcatacgtacataccaggccaaataaagattttatgtatactgaggttagttcaatacaaaaatgatagttttacagtgaaaccacacacacaaaccctaagaacttttttaagcctttctttcaattcatctacaagtagaattggatcatttatatgatatgtgccacacggtacatatcatagtaggaaataacaaatcagaattttcttccactatgtagtataaaaatggatataaagtaaatcatggccctattcaaaggtgtttttaataatcagggtccaaaaagtagaagaatgtatatcaaagactaacatgtagtagttttcaacaaatgccaatttctacactaactggatacgttatactgactataaaagcatataatkggttatttttaatnnnnnnnnnnnnnnnnnnnnnnnnnnnnnnnnnnnnnnnn

SEQ ID NO: 561659 - DNA, 476 bp, Homo sapiens
ttcacacaccttggaggccgcacccaaacctgttcaaccatcccacaagcatgagtctgagacactctgggggcacccagttcagaccttcaccttcactgaggtgggacagcttcgttggaggccctgaaaggggktaggtatgtctaatctcagataccctgctgctgctcttcctccatgccgtgctcacatttttcttgtttcaaggactgccagataaagggattccaaatcttttttcttttcctttttttctttcttttttttttttttttgatacaaagtctcgcgctgttgctcaggctggaatctcggctcactgcaacctccgcctcccaggtcccagttcaagcaattctcccacctcagcctcctaaggagctggaattacaggcacgcaccaccacacccgactaatttttgtatttttagtagagatgggatttcaccatgttggttaggctggtctcgaa

SEQ ID NO: 561660 - DNA, 593 bp, Homo sapiens
accaacccaaatgttcatcaatcaatgagtggataaagaaactgtaggagatagatagatgatagatagatagatagatagatgatagacagatgatagatgatagatagatagatgtgtatatatatatcctatatatacagttatttatatatatatatataaaactgtaggatatatatatgatggaatactatgcagccataaaaaggaatgaattaacagaatttgcagttacctggatgagattggagacgattattctaagtgaagtaactcaggaatggaaaaccaaacatcgtgtgttctcactgataygtgggagctaagctatgaggacacaaatgcataagaatgatacaatggatttggggactccgggggaagagtgggagtgggtgagggattaaaagactacaaatatggtgcagtgtatactgctcgggggatgggtgcaccaaaatctcacaaatcaaccctaaagaacttattcatgtaaccaaataccacctgtacaccaataacttatggcaaaataaaaataaaaatgataatagtaataatgaagaaccaataaatcctacacacatgcc

SEQ ID NO: 561661 - DNA, 542 bp, Homo sapiens
tgtgtttgttaatttttaaggcattcacatcatcttttgattattatattgtaaataacacggtattcagaaattttgccttttaaaattttcatgtggttgttaagctactggtggtgtgcaatatttttacaaaagtagacacatgaaaaatatatatgttatattgagtaatatacagttttgcttatatttacytattaaatcaaatgtattcattttatcactcaattcctttgtgctgttacttacttttgtcaactatatctgttaaattttcccttaatttccaatatacattgatctctatgtttaaacactatactgttcggtatgtatgggtatataatctttacatttctttgacatttgtcacttttattatttcattatatcatctctctttttatcctacttgattgtgttcttaaccaccaacaatcttaacgtgaatatggccatttctgtttttttttatttgcatttgcctattgtctctttgtgtactccttcatttagaaattcttgtttatttttatttt

SEQ ID NO: 561662 - DNA, 631 bp, Homo sapiens
atatatgtgtgtgtatagtgcttatttatctagctgcacatagctagataaataaatactttaaaagcacttacaatcaactggaaaaaacataggtaaacaatgtatagaataaatagaaggtatctacatcctctttgtaacagtgaaaatcaaagcattaataacatacyttcaggaattcaaatataaacttattaggataaaacattttttgttaatgttttactgtgaagaaaactttttgaatctttttcaaagttcaattatggtgtatgcttggcaatagagtaacaaaatatatggtccctgtatctttcacaatattttgtgaaagcagaaacttgcttagacaggtgtcataaggaccagataaaagctgaaattgcactgtaagaaatatatccaaggtgaatccactttaggttcctagaaatatagtgcaccaagaagatatgcactcttagttttttgactttttagaactttttagtttttatagtttcattaatatccagagtacgtaataaaaactgaattttgcataactgctttaacactttgtttacaaaatgctcacaaatatgactttaaacaaatggatgtgtttatgtgtttttatcttagaagt

SEQ ID NO: 561663 - DNA, 631 bp, Homo sapiens
atatatgtgtgtgtatagtgcttatttatctagctgcacatagctagataaataaatactttaaaagcacttacaatcaactggaaaaaacataggtaaacaatgtatagaataaatagaaggtatctacatcctctttgtaacagtgaaaatcaaagcattaataacatactttcaggaattcaaatataaacttattaggataaaacattttttgttaatgttttactgtgaagaaaactttttraatctttttcaaagttcaattatggtgtatgcttggcaatagagtaacaaaatatatggtccctgtatctttcacaatattttgtgaaagcagaaacttgcttagacaggtgtcataaggaccagataaaagctgaaattgcactgtaagaaatatatccaaggtgaatccactttaggttcctagaaatatagtgcaccaagaagatatgcactcttagttttttgactttttagaactttttagtttttatagtttcattaatatccagagtacgtaataaaaactgaattttgcataactgctttaacactttgtttacaaaatgctcacaaatatgactttaaacaaatggatgtgtttatgtgtttttatcttagaagt

SEQ ID NO: 561664 - DNA, 631 bp, Homo sapiens
atatatgtgtgtgtatagtgcttatttatctagctgcacatagctagataaataaatactttaaaagcacttacaatcaactggaaaaaacataggtaaacaatgtatagaataaatagaaggtatctacatcctctttgtaacagtgaaaatcaaagcattaataacatactttcaggaattcaaatataaacttattaggataaaacattttttgttaatgttttactgtgaagaaaactttttgaatctttttcaaagttcaattatggtgtaygcttggcaatagagtaacaaaatatatggtccctgtatctttcacaatattttgtgaaagcagaaacttgcttagacaggtgtcataaggaccagataaaagctgaaattgcactgtaagaaatatatccaaggtgaatccactttaggttcctagaaatatagtgcaccaagaagatatgcactcttagttttttgactttttagaactttttagtttttatagtttcattaatatccagagtacgtaataaaaactgaattttgcataactgctttaacactttgtttacaaaatgctcacaaatatgactttaaacaaatggatgtgtttatgtgtttttatcttagaagt

SEQ ID NO: 561665 - DNA, 647 bp, Homo sapiens
taccatctcacacccatcagaatggctactattgaaaagttgaaaaacagatgttggtgargttgtgcaaaaaggaatacttatgcactgctgtaggaatgtaaattagttcagccaccatggaaagcatcgtggcaatttctcaaagagcttaaaacagaattaccatttaagccagcaatctccttattgggtatatacccaaaagaatataaaccattctactataaaaacacgtgcatgtttgctcattgcagcactatttacaatacaaagacatgggatcaacccaaatgcccgtcaatggtagactggatgaataaaatatggtacatatacaccctggaatactacccaggcatagaaagcaataagatggagctggaggctattatcctaagcgaactaatgcagggacagaaaaccaaatagcacatgtcctcacttataagtgggagctaaacattaagcacttatggacacaggtttacttggtggtggagaatggaaggagaggatcaaaaaacttacagatgaaataatatgtaacaccaagcccctatacttgaaatttacctctataacaaacatgtatatgcacccctgaacctgaaataaaactttaaaaattaattattaaataaata

SEQ ID NO: 561666 - DNA, 647 bp, Homo sapiens
taccatctcacacccatcagaatggctactattgaaaagttgaaaaacagatgttggtgaggttgtgcaaaaaggaatacttatgcactgctgtargaatgtaaattagttcagccaccatggaaagcatcgtggcaatttctcaaagagcttaaaacagaattaccatttaagccagcaatctccttattgggtatatacccaaaagaatataaaccattctactataaaaacacgtgcatgtttgctcattgcagcactatttacaatacaaagacatgggatcaacccaaatgcccgtcaatggtagactggatgaataaaatatggtacatatacaccctggaatactacccaggcatagaaagcaataagatggagctggaggctattatcctaagcgaactaatgcagggacagaaaaccaaatagcacatgtcctcacttataagtgggagctaaacattaagcacttatggacacaggtttacttggtggtggagaatggaaggagaggatcaaaaaacttacagatgaaataatatgtaacaccaagcccctatacttgaaatttacctctataacaaacatgtatatgcacccctgaacctgaaataaaactttaaaaattaattattaaataaata

SEQ ID NO: 561667 - DNA, 563 bp, Homo sapiens
tctgtctacaaaaagtacaaaaattagctgggcatggtggcatgcccctgtagtcccagctactcaggaggctgaggtgggaggatcacttgagcccgggaggttgaggctgcagtgggctgtgatcatggctctgcgctccagcctgcgtgacagagtgaaaccctgtctcaagaaaaaaagaaaaatcagtctatttcatacgatattttaatgtgaaacataaaacttttttatgtgaaacatattttattaatattctgattttagaaaatttttgctgtatgtattaacattctatttctttttacattttagaattttggtttgggggctcattttgacagagaagtatttttatttgttcatattctctctttttccactccctgcataggaactagaccctcaaatgagaaccacaacttgcaattagtggcatggcaatgttcctgttggtgattatactggmtatgctgaagatgacttcaagtcaatgggtggtttagttcagttctgtgatataaggatatgtgtgcttcctcgtgccccttcaggcttgc

SEQ ID NO: 561668 - DNA, 563 bp, Homo sapiens
tctgtctacaaaaagtacaaaaattagctgggcatggtggcatgcccctgtagtcccagctactcaggaggctgaggtgggaggatcacttgagcccgggaggttgaggctgcagtgggctgtgatcatggctctgcgctccagcctgcgtgacagagtgaaaccctgtctcaagaaaaaaagaaaaatcagtctatttcatacgatattttaatgtgaaacataaaacttttttatgtgaaacatattttattaatattctgattttagaaaatttttgctgtatgtattaacattctatttctttttacattttagaattttggtttgggggctcattttgacagagaagtatttttatttgttcatattctctctttttccactccctgcataggaactagaccctcaaatgagaaccacaacttgcaattagtggcatggcaatgttcctgttggtgattatactggatatgctgaagatgacttcaagtcaatgggtggtttagttcagttctgtgatataaggatatgtstgcttcctcgtgccccttcaggcttgc

SEQ ID NO: 561669 - DNA, 609 bp, Homo sapiens
agtcaaaatctcctttagtcattacaaaaagtatgtttattgagctatttcaggtcactcgacatttatcaaacccctcagaaatttcctggtgaagaaacagtcctgtgactttagataaaaaattaaagaaaaataaagttatggcaaatggtaacctctcaccatgtaatgacaaaagtggttcaaatccaattcaagtctgttaaaggtcctcagggtttagtaagatgtgtcagcctacaaggtgcaaaagtgagattattgttttcctcactagctaggaactgaggctattctagaagctgaaataatcatttggtaagaggtcattttttttttcattggttgcttatttatttgctatttttattttttagagcagggtctcactctgytacccaggctggggtgccgtggtgcaatcacagctcacttcagccaggaactcccaggctcaagcaatccttccacctcagcccctcgagtagctgggactacaggcatgcaaccccatgctggctaatttttttttttttaatttttgtagagataggatctcgctatgtcattcaggctggtcagaagtcatgttcttaaccacaaaat

SEQ ID NO: 561670 - DNA, 405 bp, Homo sapiens
gaaatactaatatttacaaacagaaatagactgttaaaaccaagaaggaactttctgagtttatttcacaaattaagaaaagctcaatattagaaagtctactaatacaattcatcatattcagagtcctgaggagaaaaatcctttaattgtccacayaggcattaagaagataagtcttagaaacagattccaggttctgatttctgcatgtaagaagcttagaagtagccaggtgcagtggctcatgcctgtaatcccagcactttgggagaccgaggtgggcagatcacctgaagtcagaagttcaagaccaacctggtcaacatggcaaaaccctgtctctactaaaaatacaaaaattaggctgggcatggaggctcacacctgtaaccccagcacttc

SEQ ID NO: 561671 - DNA, 405 bp, Homo sapiens
gaaatactaatatttacaaacagaaatagactgttaaaaccaagaaggaactttctgagtttatttcacaaattaagaaaagctcaatattagaaagtctactaatacaattcatcatattcagagtcctgaggagaaaaatcctttaattgtccacataggcattaagaagawaagtcttagaaacagattccaggttctgatttctgcatgtaagaagcttagaagtagccaggtgcagtggctcatgcctgtaatcccagcactttgggagaccgaggtgggcagatcacctgaagtcagaagttcaagaccaacctggtcaacatggcaaaaccctgtctctactaaaaatacaaaaattaggctgggcatggaggctcacacctgtaaccccagcacttc

SEQ ID NO: 561672 - DNA, 405 bp, Homo sapiens
gaaatactaatatttacaaacagaaatagactgttaaaaccaagaaggaactttctgagtttatttcacaaattaagaaaagctcaatattagaaagtctactaatacaattcatcatattcagagtcctgaggagaaaaatcctttaattgtccacataggcattaagaagataagtcttagaaacagattccaggttctgatttctgcatgtaagaagcttagaagtrgccaggtgcagtggctcatgcctgtaatcccagcactttgggagaccgaggtgggcagatcacctgaagtcagaagttcaagaccaacctggtcaacatggcaaaaccctgtctctactaaaaatacaaaaattaggctgggcatggaggctcacacctgtaaccccagcacttc

SEQ ID NO: 561673 - DNA, 405 bp, Homo sapiens
gaaatactaatatttacaaacagaaatagactgttaaaaccaagaaggaactttctgagtttatttcacaaattaagaaaagctcaatattagaaagtctactaatacaattcatcatattcagagtcctgaggagaaaaatcctttaattgtccacataggcattaagaagataagtcttagaaacagattccaggttctgatttctgcatgtaagaagcttagaagtagccaggtgcagtggctcatgcctgtaatcccagcactttgggagaccraggtgggcagatcacctgaagtcagaagttcaagaccaacctggtcaacatggcaaaaccctgtctctactaaaaatacaaaaattaggctgggcatggaggctcacacctgtaaccccagcacttc

SEQ ID NO: 561674 - DNA, 539 bp, Homo sapiens
actctcattctttcttatagctgaatagtattccattgtgtatatgtaccacattttctctatccagtcatctgttgatggacatttaggttccttccaaatcttggctattataaaccctgctgaagcaaacatgagagtgccaatatgtctttgatttaccaattttatttsttttaggcatatactgagcagtgggattgctagaccatatagtagttctatttatagttatatcaggaacatccaaactgttcttaactgtgctcccaacaacagtgtacaagggttcccttcactccacatactcaccaacatttgtttttgactgacttctgtataaaaacaaccttaactggggtgaaatgatatctcattttgggtttgatttgcatttctatgatgatcagtaatgtggagcaccttttcatttgcctgtttgacatttgcatgtcttcttttcataaatgtctatttaaattttttgtccactctttaattagattattatatattttctatataagtttttgaactca

SEQ ID NO: 561675 - DNA, 600 bp, Homo sapiens
attgttttacttttcaaaaaatcaactttttgtttattagtcttttgcattgttttcttcattttaactttatttacttccgctctaatctttattatttcttctaattttggatttggcttggcctttttcttctaattaattaagatgtattgttaggttatttatttgaagcttttctgttttttatgttggcacttacagttataaattttccttttataatagtacctcttttactatattccataggttttgctatgctgtttccattatcatttgtttcaagaaatttttctattttcttcttaacttttttatcgacctactaatcattcaggagcatattgtttaatatccttgtgtttgtatagtttctgaaattccttttttaattgatttataatttcattccctgtagtcagagaaaatgctcaatattacttcaattttttggaatgtctttagacttgttacttaacatatggtctatccttgagaataacccatgtgctgaggagaaaaatgtatattctgcagctgttggatgaaattttctgtaaatatctagtagkttcatttgttctgtagtgcagatta

SEQ ID NO: 561676 - DNA, 681 bp, Homo sapiens
acaaggttttacataaatagcaagagaaagatgaacttttaaaataaatggtgtttgatgccaaatgctggctagtctgtggagtgctaagaactcttgttaattgctggtgggaatgcaaaatgatacagctattttgaaagacagtttggcaatttctcacaaaactaagcatattcttaccatacgaccagcaattacattccttgatatttgcctaaataagctgaaaacttatgtccacacagaaacctgcacatggatatttatagcagcttcataattgtcaaaatgtggcagcaacatagatgtccttcagcaggtgaatgggtaaacaaactgtggtacatccagacaatggatattattcagcaccaaaaagaaatgaactaccacatcatgaaaacacatggaagaaatgtaaatatatatcattaagtaaaagaagccaatcagaaaagactacatactatatagttccaattatatgacattctggaaaaggtaaaaactactaacatgggtaaaaaattagtggttgccacagtatacrgaggagggaggagggatgaaaggataaataggcagaacacaaagaacttttagggcagtgaaactctcctgaatatactgttgtaactgcagaatcagcccaatctggttcaactttatataatacaa

SEQ ID NO: 561677 - DNA, 576 bp, Homo sapiens
atggtacaggaggaagttttgagggkttttttttttttttttgccttttaagaactgggttttatttttaagaaactctcattggagtctctcaaagaaagtcatgttcaataaaggaagaagataaggaaaatgaggcatagaaggtgaaagaagagaagaagctggcagaagaagagaaggaacaagagaaagagaaattaaaaggaagagctacagtaaaggctgtttgtcatagacataaaacaatagagataatattttccctgaaaaaaatgttggaagtcagctcagaattgaaacttcctttgcacatatttagtgaatgatcccgctctccttgaggaggtaagctggaaattagatatcataatcttcccctctcagttcaaggagcttacattgtttacacgtgatttattgatgaaaggatcaataaccctttctctgtttccagctgttatttcaacagataacagtgtaacctctcttggattcagcaccccagacacataagaaaatgcacagtctactgtccatccccactgcatcccagtctgatcatagacattacag

SEQ ID NO: 561678 - DNA, 637 bp, Homo sapiens
agttattttatgtatgattaactcacttagaaattcacatacagtgtttaagcacatgaaatgaagacaggtagatgagtttccttctgctctaatatgtattaactgggtaaagatgggtaaatttttaatttttttacctcattcttctcatctgttaatcagattgtaataccttctttgtaggactgttggaaagattctgttacatgataaatgtaacttttagcacaatattcaatgctagactgagcttagtatataatggcactaaagataatgcaaattaaaaagtaaaaatattaacatcacaaaataattaaacttttagcagcattgtacccaagtgaccaatgtttttaatcttgaaatgatttcttctcttgacttttgtaacatgtgggtctctatttccttttcctctactgttaccagtggagggtgtccaggttctgggcgtcttgaacaaagaatcrgacaaaatgcacaaacaaagcaaggaaagaatgaagcaacaaaagcggagatttattgaaaatgaaagtacactccgcagggtgggagtgggccgtagcatagggcctcaagagctccgttaaagaatgtcctggggtttaaatataccctctagaggttt

SEQ ID NO: 561679 - DNA, 649 bp, Homo sapiens
aattggaatgtaaaatggtacaattatttkgaaaaacagtttggcaattttttgaaaagttgaccataaacctaccatgtgatattcactcctaggtatttacccaagagaaaagcaaataaatgttttcatacaaaggcttgtacacatgttctttcaaaacagctttatttgtaatagccaaaaactgaaaacaacccaaattccattaacaggtgaatagataaacaaattgtggtatatccatacaatgaaatactactaagtaataaaaagaaagggctattgatacaagcaacgagatgaatatgtctcaaaataattatgctgagtgaaagaagcctgacaaacggactacattctatatgattacatttatataaaccctagaaaatacaaactaatctgtaataatagaaagcagatgagtggttacttggggatggggtcaggatggagacactacaaaggggcccaaggaaacttttcagggtaatgggtatcttgattgtggtgattatatcacaggtgtatacatatgtcaaaacatctcaaactgtatactttaaatatatgcagtctattgtgtgtcaatcatacctcaatgaagttgctttaaacctttatttagtatttttaaggtaatata

SEQ ID NO: 561680 - DNA, 649 bp, Homo sapiens
aattggaatgtaaaatggtacaattattttgaaaaacagtttggcaattttttgaaaagttgaccataaacctaccatrtgatattcactcctaggtatttacccaagagaaaagcaaataaatgttttcatacaaaggcttgtacacatgttctttcaaaacagctttatttgtaatagccaaaaactgaaaacaacccaaattccattaacaggtgaatagataaacaaattgtggtatatccatacaatgaaatactactaagtaataaaaagaaagggctattgatacaagcaacgagatgaatatgtctcaaaataattatgctgagtgaaagaagcctgacaaacggactacattctatatgattacatttatataaaccctagaaaatacaaactaatctgtaataatagaaagcagatgagtggttacttggggatggggtcaggatggagacactacaaaggggcccaaggaaacttttcagggtaatgggtatcttgattgtggtgattatatcacaggtgtatacatatgtcaaaacatctcaaactgtatactttaaatatatgcagtctattgtgtgtcaatcatacctcaatgaagttgctttaaacctttatttagtatttttaaggtaatata

SEQ ID NO: 561681 - DNA, 649 bp, Homo sapiens
aattggaatgtaaaatggtacaattattttgaaaaacagtttggcaattttttgaaaagttgaccataaacctaccatgtgatattcactcctaggtatttacccaagagaaaagcaaataaatgttttcatacaaaggcttgtacacatgttctttcaaaacagctttatttgtaatagccaaaaactgaaaacaacccaaattccattaacaggtgaatagataaacaaattgtggtatatccatacaatgaaatactactaagtaataaaaagaaagggctattgatacaagcaacgagatgaatatgtctcaaaataattatgctgagtgaaagaagcctgacaaacggactacattctatatgattacatttatataaaccctagaaaatacaaactaatctgtaataatagaaagcagatgagtggttacttggrgatggggtcaggatggagacactacaaaggggcccaaggaaacttttcagggtaatgggtatcttgattgtggtgattatatcacaggtgtatacatatgtcaaaacatctcaaactgtatactttaaatatatgcagtctattgtgtgtcaatcatacctcaatgaagttgctttaaacctttatttagtatttttaaggtaatata

SEQ ID NO: 561682 - DNA, 585 bp, Homo sapiens
ttgctcgtgtttactttttctgagcagtgctgaggacttatactctggtccatccaaattcctaatgggccaagtgctccaattatagatgattttgtgaacatccgtagcttctgagctgacgctaggatgattcaggagaagctttggtgtccttcagccggctatgggcaagtgacactgcagaagcatggctgctccaggcttagaatggctttgggcagggctgggtgactttcgcaactctccatgcccctttccccagctggatcttcagaacacagaggccttcaaaggaactggggtccctattggcacttcaacccttggtgggggagtggatggtggtatagatgaaacaggattggcctgtttgggtccatgtaytgataaagctgaagatattgcaggagacagatacataagggttatcgcaccattctccccactttgaatatgagtgaacatttccatagttaaaagttgtgtactattttcttttttgattggagaaaccttctttttctaattggaaagacctttttatgtaccagagacctgagatcgaagcagcttcagagaagc

SEQ ID NO: 561683 - DNA, 585 bp, Homo sapiens
ttgctcgtgtttactttttctgagcagtgctgaggacttatactctggtccatccaaattcctaatgggccaagtgctccaattatagatgattttgtgaacatccgtagcttctgagctgacgctaggatgattcaggagaagctttggtgtccttcagccggctatgggcaagtgacactgcagaagcatggctgctccaggcttagaatggctttgggcagggctgggtgactttcgcaactctccatgcccctttccccagctggatcttcagaacacagaggccttcaaaggaactggggtccctattggcacttcaacccttggtgggggagtggatggtggtatagatgaaacaggattggcctgtttgggtccatgtactgataaagctgaagatattgcaggagacagatacataagggttatcgcacmattctccccactttgaatatgagtgaacatttccatagttaaaagttgtgtactattttcttttttgattggagaaaccttctttttctaattggaaagacctttttatgtaccagagacctgagatcgaagcagcttcagagaagc

SEQ ID NO: 561684 - DNA, 506 bp, Homo sapiens
atgccctgctaatttttttttttttttttgtatttttttgttgttgttgttgttttgtattttttttttttttttgtatttttagtagagacggggtttcactatgttggccaggctggtctcgaactcctaacctcaggtggtccacccgcctcggcctccaaaagtgctaggattacaggcgtgagccaccgcacctggccttggcattcttttgcctcagctaagccccctcaaacccagtttctgtaacctctgcaattgtctacacccttcaagttgctccatctggaggtttttctgcccccacccttttcttaattttatttttatttttatttttcctatttccataatgtttctctcctggaaagaggaccaraatgatgccatttcccaggtacagcctcctctttcctttgtactcaaaatctcaggaaaatatgtttcccccatgatacacacactgcctttaccctcgatggaggtctctgcatttcatgttt

SEQ ID NO: 561685 - DNA, 502 bp, Homo sapiens
cttgaactcctcaaagtcatccatgaggrttggaatcaacttcttccaaactcctgttaatgttgatatttgcccccctcccatgaatcacaaatgttcttaatggcatctagaatggtgaatcctttctaggaggttttcagtatattttgcccagatccatcagaggaatcactatctttggcagctagagccttatgaaatgtatttcttaattaataaaacttgaatgtcaaaattattccttgatccctgagctgcagaatagttgtggtgttagcagacgtgaaaacaacattaatctccttgtacatctccatgacacctcttgaatgcctaggtacattgtcaatgattagtaatgttttgaaatgtatcttttttttctcagcagtaggtctaaacagtctgaagagtgggcttaaaatattcagtaaaccatgctataaacagatgtgttgtcatgcaggcttttttgttccatttgtagagcacgggctga

SEQ ID NO: 561686 - DNA, 555 bp, Homo sapiens
ggagtacatgatattaatctaagttatcttctgtccacaagatttagggaaaatgactaaaacgtaagaggtttgaggtcattcaaataaagagctgaacattagaatcagagtaagtaagagtaggaaaaaaataggtttaatgtgggagaaaattagtcaaatttctgtggggattgtaccacctattagtaggaatagtcagagataatggcatatagtttttatcaaccagggaaaattaataccaccctattttaagtaatagacagcaatgaaacactgagtttccagcatgaccagaaaaccaatcacaaaattctcaagtaggaagccctatgagccccttgaaataaaaaacagtcaaaaagatacttccatgtcacaaatatagatgatattaaatttgtttctctggtatccatggcattatttggaggaaaattcatccataaagccagattgactatcagatttagtgtggaaatacttgaaggatttgagtgtctgctctttggaagggaatgaacagwagcctataaaggggttttggtt

SEQ ID NO: 561687 - DNA, 416 bp, Homo sapiens
ggtggattttccctactcatgcttcctagagatttggtgaggatttgttgagtcatgggacatttcagcttgccaaggtaaggcttcattttggctttgtatggcccttctgggatcactgatgtccctgggccaggttcatttgtatctgaaggagggaggagttagtttggaggcacagtctaagaggagagaagtggagggtgaagaggaggggacagcaactgatctctttatggcatcttatacagagttggcaccttggcaattaggatatcggggaccaaaagctgatgcaccactttaacragatactttgtaaatgtagggcagggtggaggtcagaaacacaggcaggacttccaaaggctgtgggcactgtccctgtgaggctcaagtgacaaggtgggagacag

SEQ ID NO: 561688 - DNA, 603 bp, Homo sapiens
aatgtagggcagggtggaggtcagaaacacaggcaggacttccaaaggctgtgggcactgtccctgtgaggctcaagtgacaaggtgggagacaggattgggtggaggccacagttcttccatgttgaagaactctctagcatcctgaagactgcctacctagagaccaacccagcgatgctggtgctttcttggtagactccttggagaggcagtcgtgaggagtctttgtggtcagtggacaactggggactggaacatggggaagttgggtggttacaactgtaattaatagaccaatctgtggcccacatgagatccacctgaaagaattcttgcccagctctgtgccttcttcctaagatgtggcacccagaatggcaccaaacatgcctagtgaggtttggatcaagagtaagctggcttctctgctatgttttcagtagccttcctgawaacacccagcatttgtttagcttctttagctttagcacgtgtttccaccagtgtcccttaacggagaggatgactatgtcactgaagaagtggaggggctgaaaatggactcagctcttggcccctgtagagactgcaagactccgt

SEQ ID NO: 561689 - DNA, 527 bp, Homo sapiens
gcacacaaggtaaattcaaaggcagaaattgacgtggtattgagacttcctagtgccagcttaggggtgcctgaccctccattcatctgcctgttcttttttctggaaactggggagagtggcaagggcagagtgcattcacacaggacagaaaagagttggccaggctgtacatagacgctggagcattatacaaggctcagtgcttaagagaagacctgagtaagctggcaggggtggaaatacatcaagggcttgcaaattgcctgcctgaaggaaagaaacacagactggttctattctctttacccagtagtaagtaaatctggcatgagagagagagagacagacagacagactctaggaaagaaaaaaagtgagttgtttgacacaaaggggaggttctgtrtctatgttccttatctgaatacagtcagaatccgatggcttcaggttggcctccctaggatggcactttactcccaagtcctggtcattgtcaccaaaacgcagagctccccctgccc

SEQ ID NO: 561690 - DNA, 448 bp, Homo sapiens
ttctagaactagtttcatttatttattttgaatcctttgaataggagtcaaccttgccttcactgatgttattgtgtgtcttacatagcaatatctaaacaaatgagaaaccrtggggagagatcttcaaggtgaaaacatttagaataaagaattgctgtgtttaaaatggcactggcagtataaaagatctaatatctatttcatgtaacagacgaggtccaaaccagggaactcttctctgtaaccaataatttgacctgattacatcatatctttttctctttgccctaaagttgaactttgtatatagaggggctgccaaacacatttacactgtagagaaatgttgttttccaatgtatcacccaagaggttttaattcagatgaaaatgttcaaaaattaaatttctgtatttctttggacctagcttgggatggtttagc

SEQ ID NO: 561691 - DNA, 597 bp, Homo sapiens
tatttgcctatttgctatgggttgaattgtgttccctcaaaaagatatattgaaatatgaatccccagtaccscagaatgtaaccttatttggaaatgaagtcttttagaggtaataggttattaatgtgagccctaattatatgactggtgtccttataaaaaggggaaacagagggcagacacacacagagcaaagactgtgtgaagacacacagggagtagacagccgtgcagctggagtgatgcggctacaggccaaggagcctgaaggatgctggcagacacagaagctagaagagtaaggcaggattctctcttagagacttcagagaacacatggacctgcccacaccttgatttcagacttgcggtctctagaactgtaagatacgaaccatctgttgtgttgagctgcctaatttgtggtgctttgtcacagcatccctaggaaattaatactctgttgaacaaaaatcaaaccagtaacccaaatattttccttcatccatatcaaatgaaacaaggcccaggttgttttggagaaagttttccaagacctttaataaacagataattcctgtgagaaactacccaa

SEQ ID NO: 561692 - DNA, 597 bp, Homo sapiens
tatttgcctatttgctatgggttgaattgtgttccctcaaaaagatatattgaaatatgaatccccagtaccccagaatgtaaccttatttggaaatgaagtcttttagaggtaataggttattaatgtgagccctaattatatgactggtgtccttataaaaaggggaaacagagggcagacacacacagagcaaagactgtgtgaagacacacagggagtagacagccgtgcagctggagtgatgcggctacaggccaaggagcctgaaggatgctggcagacacagaagctagaagagtaaggcaggattctctcttagagacttcagagaacacatggacctgcccacaccttgatttcagacttgcggtctctagaactgtaagatacgaaccatctgttgtgttgagctgcctaatttgtggtgctttgtcacagcatccctaggaaattaatactctgttgaacaaaaatcaaaccagtaacccaaatattttccttcatccatatcaaatgaaacaaggcccaggttgttttggagraagttttccaagacctttaataaacagataattcctgtgagaaactacccaa

SEQ ID NO: 561693 - DNA, 610 bp, Homo sapiens
caaaccccaaacaagataaactcatagaaaaccatgtccagatacatcaaatttaaacttttgggaactgaagataaagaaaaacgtgtgaaagccaccagaaagggaaaacatgacacattacatatggggaaaaacaatttgaaagatggctgatttctcattagacactttagaggccagaggagagtgtcacaacatttttaaagtgtcaggaaaaaagggactgtcarttctgaaattatcattcaggaataaaggcaaaataattgccttctcagatgaaggaaaactaggagacttcattatcagcaggcgtgtttaaaaaaatgctaaaggaagcttttcaaggtggagaaaagtgataacagagggaaacttgaaacttcataaatgaaataaaagcataataaagggtaaatatcttgagaaatagactgattttctgcttttaagtatttaaacatgtatgattatggaaaacaaaaattataacattatttcacagggttctcaatgtatgtagatgtaagatatataaaaactataaaataaagaagggagattaaagaactcaatatgcttgcaaggtttctacattttccttgaa

SEQ ID NO: 561694 - DNA, 497 bp, Homo sapiens
tgtcatattcaatccttaaactaaaaggtgaaaaatgtaattcacagtccaccagctttcttaatcacagccccaccactccacatggatataaaaactgataaaagccaacaacmagaaactatctgcagatgtttaacttcattgtattcaggttagtcatttgccaacaaagtcagattgtccacattgctatctgcttccaattccctgccctgccccagtatctcttaagttctcttaggaaaagcagtaaagatgtctccctgacactaggagggtgaacataatcgcctgagaggccgactatcactagcttaacctcaggaaggattacaatgcacttcactcagttcatctctctctcccttttaactgaattgttaacttgttcatgtttctagtgttggggctcagaaactgatactctaagatatggcactttgacatgctgaactgaaggagcctcaaggtctccctgaccttctccccttcct

SEQ ID NO: 561695 - DNA, 665 bp, Homo sapiens
gcctcctgctcaacttcccacccgatgaggaagcaaatgtatattaggactttacacaatgcctggcacacagttaagtgcttaagaaatattcattcttcacaatgcaaggagctcgtggtagactgtggtctcagccttggccagagcactttcacttactatgttacaactttgtacggtgttctgttctaagaaggaatagttctcccttgaaatgtaaacaccatgaaatcagggactttgttctattcaataatgtattcctagtgctagaggaggatcttaaacatggcagatgctaaaaaaaatctgtattttaaatgtatggataaatgaataaaccattgttggaaaggtattagaaacagtaccttattagaaacagtagttctcaagaaatggattgggaattcagaggaagagctggtaccctatcatggcaggtggcccctagaagagtcatttgaagtcatgtgaccctctggtagatgaatggttcccaagctgtggtgtgggtcctccatgacagcagccttggtctggtccaaatgacatgtgtaggatgagcttacacctgcacaaaatttatggacagcataaggaaaggtaagccaatgttgraaatgcaccaatcacattttgaaaagataagatggtttgtg

SEQ ID NO: 561696 - DNA, 641 bp, Homo sapiens
tgagggatgtgcaggtttgttacgtaggtaaacgtggggcatggtggtttgctgcacagatcaactcatcccctaggtattaagcccagcatcccttagctgttcttcctgatgctctccctcccccgcccccgccgtcagaccccagtgtgtgttgttcccctcccaggtgtccatgtgttctcatcgaggaacatcaacttctaaaatttttctgaatatttatagcccacaaaatgtaaaggacctgaayttccattcatgattttgtaataattatgtttttacataatttcaaaatgctacaattctagatatttaatatttctaatgtactttataaaattgaattcagaaatttacagattcttcttcttatctaatttctattaacgatgaaagaattgaattacccacattgtaattgggaaacataaaaacactaaggatgtaaataatatctactgtacacaacattttaaagaacaattgttaagcaggtaatgcgacagaaagaaaaccagactgagttgcaggagatgggagtcttctgtgtgatcccaggaaagtcacctgacctctctgaacttgaataattcacattatttcactttttgccatacctgcataaacatatttat

SEQ ID NO: 561697 - DNA, 630 bp, Homo sapiens
gtatctctctgacatattgttttcatttcctttggatatataatcagaaatggaattgctgggtcatatggtagttctaattttaattttttgaggaaccctaatacagtttttaataacagctgtagtaatttacattcccaccaacaatatacaggrtttccttttttttttcacagtttcactagcacttgttatcattcatcattctgataatagccattctaacaggtgtgagataatatttcattgtgttttaatttgcatttttctgatcagcagtgatgttgagcattttttcatatacctgttggccattgtatgtcttcttttgaaaaatgtctatccagtttttttttggggggggtgctagatgaactttaatgttcatacttattttatatatatatccaatgaaagtcagccatgaagatgggcacccaactctataaatctttggttttcctctttttaaaatcactttctatgaagttgtgggggatgtataatgaagcagcagttcttttttccagttttgacctgactaggtaaacaatcctctcttgcataatcaaaacaaattttttcataacatttatctcacactcagagaaaatataagtgactaaa

SEQ ID NO: 561698 - DNA, 630 bp, Homo sapiens
gtatctctctgacatattgttttcatttcctttggatatataatcagaaatggaattgctgggtcatatggtagttctaattttaattttttgaggaaccctaatacagtttttaataacagctgtagtaatttacattcccaccaacaatatacaggatttccttttttttttcacagtttcactagcacttgttatcattcatcattctgataatagccattctaacaggtgtgagataatatttcattgtgttttaatttgcatttttctgatcagcagtgatgttgagcattttttcatatayctgttggccattgtatgtcttcttttgaaaaatgtctatccagtttttttttggggggggtgctagatgaactttaatgttcatacttattttatatatatatccaatgaaagtcagccatgaagatgggcacccaactctataaatctttggttttcctctttttaaaatcactttctatgaagttgtgggggatgtataatgaagcagcagttcttttttccagttttgacctgactaggtaaacaatcctctcttgcataatcaaaacaaattttttcataacatttatctcacactcagagaaaatataagtgactaaa

SEQ ID NO: 561699 - DNA, 575 bp, Homo sapiens
gttattatgcagtgagagagagagagagagaatcagagaatggaacccaccttagggctaacaattaaattagagtgggatcttgacatgaatattttttaaaactcctaagatgatttaatgtataactaggcttgtgaaccatagatagaaaattgagactgatacttagctgtttttattttcatttaaaccgtagttattatagatttttaaacaagttgagtgttatgccaatgttcttttaaatatttttaacctgttctgcaaatagacagcaggctataatggctttatctgtttagagcattattttttaaaaagagatatgaggccaggtgtggtgactcacacctgtgaygccagcactttgggaggctgaggcaggaggatcacttgaggccaggagttcgaaactagcctgggcaacatagggagactctgactctacaaaaaataatattaaaaaaattagccaggcatggtggtgcacacttgtagacctagctatttgggaggctgaggagggtcatctgaggccaggagtttgaggttactctgagctataattgtgc

SEQ ID NO: 561700 - DNA, 570 bp, Homo sapiens
gaaaattttattttataccctgggtaaaattaattagttaacttgaagtatggctgagttccttacttgaggaagggtacctctcctatggaaaggtaaaatttaataataaaatataggaaaattaaatccttaaattcagaaataagacaaggatgcctgttatcaaagcttccattatacattattcagaggtcatagtcattagagaaaggcagaaaaactagttataagtaatggggagaaagaaataaaactaccagtcttacataccaaaaatccacaaagctctactgacaaattattagaattaattgcagaatgcaacatgaytacaggatataatctcaaaaaaaaaaaaaacaccccacattgctatcctttatactagtggcaaagagtgaacatttaatttttttaaatgacattaccatagcttcaaaaatcccaaaaccttaggaacaaacctaacacaagttgggctagagatttataaataaacttacacaactctatttaaaggcaattacaaacacttcagtaaatagagatttaaaaaatatttatggg

SEQ ID NO: 561701 - DNA, 610 bp, Homo sapiens
ttttctattcatagaattcaattacaagtatattaaatgcaaaaatcaaagctttaaaatttctagagggaaatattagagaatatgtttataaccctaaataaagtgaatttttaaagaaaacataaaaaactcaaagaaaacagagcggataatataaagaatttaaatttttgtacattgaaagactgtataaataaaagataaagacaatccacagactttgaaggtatatttgcaatgcatgtaattaacaaaaaattagtgtccagaatataagaactaccttcaataagaaaaaaaatttaaaaggacatcaacaggtaattcactgaaaaggaaagtcaaatagacaataaacacacaaaaatattctcagcttactaaaaatcagaaaaatacaaatgagatgctatttcatgcatctgccayattcgatgatacaaaatgtggcaggtaggtgaagtagtggacactcttcatctgctggaaggaacataattggtgcaaccactttgaaaagaaatatggtgctatctaccaaaataaaagatgcacatttttatggcccaacaattttattgtgaggtatatactccataatagaaat

SEQ ID NO: 561702 - DNA, 610 bp, Homo sapiens
ttttctattcatagaattcaattacaagtatattaaatgcaaaaatcaaagctttaaaatttctagagggaaatattagagaatatgtttataaccctaaataaagtgaatttttaaagaaaacataaaaaactcaaagaaaacagagcggataatataaagaatttaaatttttgtacattgaaagactgtataaataaaagataaagacaatccacagactttgaaggtatatttgcaatgcatgtaattaacaaaaaattagtgtccagaatataagaactaccttcaataagaaaaaaaatttaaaaggacatcaacaggtaattcactgaaaaggaaagtcaaatagacaataaacacacaaaaatattctcagcttactaaaaatcagaaaaatacaaatgagatgctatttcatgcatctgccacattcgatgatacaaaatgtggcaggtaggtgaagtagtggacactcytcatctgctggaaggaacataattggtgcaaccactttgaaaagaaatatggtgctatctaccaaaataaaagatgcacatttttatggcccaacaattttattgtgaggtatatactccataatagaaat

SEQ ID NO: 561703 - DNA, 574 bp, Homo sapiens
tgctgccattcccttctggaattacttttcttgacttccatccaccacactcttctagtgttcctcctactgcaaccgcctctccttcttagtctcctttgattaattctcctcctgttctgaacctcccaacagagcaaggcttagtcttcagactttgataccctgccccatgtccccaggtccacttctctgcttctctgcctaaaagcttcctccagctccttcggagcctcaaagtagcagctrcttaagaccctcaggagcatccttcaactggtgaatttaggaattggtggataaacactgaaagttcttatctcttggcaggacaattctccagggtgctctacacagttcctcagagggtacccagtggaactgaactccagtttctctaagtagtaaccagtttatcaatgccccctgtattccttttattggtttgcttcctttccttgtttcacttcccctcttcctcacctgtgtttcccgccactcagttaaattaaagtcattcaacaccttatattaggattgttttcaggagaactcagaactgagatagaacttt

SEQ ID NO: 561704 - DNA, 552 bp, Homo sapiens
attataaactgtgacaagtgttataagacagaaaataataggagaggttagtaagatcccctctcaaaaggtaatggttaagttgattcaaaagataaggaagtcctcatgaagcccatgggtgagaggggaagagctttcccagcttgacggtgaaggtttgcaaatgtcctgaggtggaaaagagctcagtatatttaaggagcctaaagaagacctgttcagttttagtaaaaatagcaaagagagaattgttacaagatgaaacacaatttttattttcrgcaagtagtctggcacttattgatagattggtgtattagtcagtgttctccagagaaaaagaaccaataggagatgacaaataggtagatagatagatagatgatagatagatagatagatagatagatagatagatagatagatagactagaagggatttattatggaaattggctcatgtaattatggagactgagaagtcctatgatatgccatctgcacactggcgaaccaggagagccagtagcagagctccatctaagcctg

SEQ ID NO: 561705 - DNA, 603 bp, Homo sapiens
aagtatgtgatgtgatcattaaggaatattaagtcattcgtgggtaggcctttagtagttattgagtggtactatttttctatttattaatgaaaattatgtgtgtatgatcatatgtgaatatctgtaaatacttacacacaaaaacaccatccaatattatcttcgttttgaaccacaaacacacgatgtatctttaaaaagatacattcaatcataaaaaagtttaaaaataagatattaaattccaatttatttaaatttttatcaaagatctatttctgtttgctaaaggtagggagtctaaatattaagccartcaacttatagatgttaatttattaaatattctcaataattctatgctgtgacacttagaatgtctgttttacaggtgaagaaacaggttcagtggggttcagtcccctgttccacctcacagagctaggcaggatcagaattcaagtctcctttgcacctcactctgctgatttccccaagacttttaaaaattattttcctcttttaggggaactattacactgatgatgcatatttacactcccatatttcaaagctattatctcctcactggctcatgtc

SEQ ID NO: 561706 - DNA, 588 bp, Homo sapiens
agggcttcccttgtccagatctaggaaagattaactgagagttcgacacctttgaaggtctgaaaaaaacatttatcatctagtctctctaaaggctgctgtctgtgaggtttcatctacatatgaagagacttcaaaaagttcttggaaaaatggacttcaaagataaaaattaaaagtgtaaactttcttactcaacataagacacatcaaggttaagacacttgcaagcaatgataccagccatttagtccattcytaaagaactgaagatcctgggaatttcaccgtgtcaatggagtcctttttctgtcattaactgaagaaaactggacaccctttgcagattcttttaagataaggaaacaaaaagatctcagaagtagccaaactgggactgtaaggtggatgcctaataatttccatcaaaactctcacaaaaatgcacttgtttgatgagaggaataagcaggagcatcactgtggagaaggactctctggtgaagctttcctaggcatttttctgctaatgctttgccttattttctcaaacactctcataataagcagatgttgttgttatttggc

SEQ ID NO: 561707 - DNA, 557 bp, Homo sapiens
tggctgttgtttatgttgttaacacaacacaaacttagagcacaaacaacattaattttcttcactagggcacaaacaagattaattttttcctgcaaaattgatgttgatggtctactttggcttcatcttcaacatcatctcatccctttataaaatgagttatccatttgtaaactgttgatttcttaggggcattatctctataaayttgttgtacagaatcaatgatttcaccattcttccactaaagcatcaccatgaattcattgtttgttctttcttcaattttagcagaattcatgttgctctaataagggttcctttcaaactgattctttattcttcttagtgcctcaaactagagcctgttcagtcagaacatgttataacaagttagtgtgagtttactttggtgcaaaaacgattaaaacccatgtaaagtgttttcataatacacatttttcatgaactttttgggtcccctcataacaagaccacctttgctagccaggcctcctcttctctccctcctataacctgtcttgccaccataa

SEQ ID NO: 561708 - DNA, 557 bp, Homo sapiens
tggctgttgtttatgttgttaacacaacacaaacttagagcacaaacaacattaattttcttcactagggcacaaacaagattaattttttcctgcaaaattgatgttgatggtctactttggcttcatcttcaacatcatctcatccctttataaaatgagttatccatttgtaaactgttgatttcttaggggcattatctctataaatttgttgtacagaatcaatgatttcaccattcttccactaaagcatcaccatgaattcattgtttgttctttcttcaattttagcagaattcatgttgctctaataagggttcctttcaaactgattctttattcttcttagtgcctcaaactagagcctgttcagtcagaacatgttataacaagttagtgtgagtttactttggtgcaaaaacgattaaaacccatgtaaagtgttttcataatacacatttttcatgaactttttgggtcccctcataacaagaccacctttgctagccaggcctcctcttctctccctyctataacctgtcttgccaccataa

SEQ ID NO: 561709 - DNA, 565 bp, Homo sapiens
gctccactcctcgcttcagtcccacccgtagtcctacatttattcctggtttcactctagttcaattttccacttgttgttggtccactgtttgcagcagtcagagaacctagctctacctcaaaaagccatcccatgtgtcgcactgaaggaagaacgtttgtcttcactgtcctcgttgtccttacaacattgytttcctcactgggaccttcattttcttcctaataacacataactgcctgccccctgcccccataaaaccatccatttatactggcgtgcagctgtgtttccaaacctgaaaaatgccagaaccttctttaaattaaaaagttctcacttcccccaaaatggatgtcttacaattgccaattaccagtgcaaaagagttctgactttataattaataaaaatattgtattatcacagggataaaaatacgaagctatataaagaatatacaagagaattcacgtgggtctgcagacttctgtttgagaaataccagtatgcagctttaagtgttgtctttcaatgattatttgaattttgacaaagatta

SEQ ID NO: 561710 - DNA, 560 bp, Homo sapiens
acaaatgttgatataaatattagaataaatataaataatataagaaatcttcatttacctatcacccagcttcaacaattaacaatgcgctgccattttgtttgatccaygcccagtaacttcattttttttctcagtatttaaagcaaatcccaggcaccattctatttttcccatcaggatagatgtatctctcagtattaagaacttcctttttcaaaacataatcacaatactagcaacatgtccaacaataattccttgaaatcatttaatgtttagtctatgttaattttgcttttattgtttcaaatatgtcttttattgatttattttcatcaggatctaaacaaggaacacacattgaatttcacccttatgtctcctagaatcttatctataatattttccccttcctttattttactttgcccatgctgttaaaaggtaaactaaggcataaaataattttaaagagtatacttgaacaaacaacaattcataaatgaggcagcttcaaactgtaagtgctttggggtcttccatgaggggacacaaga

SEQ ID NO: 561711 - DNA, 611 bp, Homo sapiens
acttttctgctagctgaaatcaaggacggcaagaagcagaggacatttgacaggaaaagaaatcccactcaacccccaaagagcctttctctgtaatcaaatacaaagccactgggattcatgagaatgtactatgtgcataatgagcatcctgaacataaatttatcggtggacatactcccaaatcaagtaacaaacaaaactatgaggcaaatttctatcgaaaggaagaaacaatgaaaagagaagagagaaaagaggagaaaaatgtgaaattgtcataaaaagaagtattgggtgcagtggctcatgcctgtaattccagcagtttgggaggccaatgtggrcagatcacctgaggtcagaagttcaagaccagcctgaccaacatggagaaaccccatctctacaaaaaatacaaaattagccaggcatggtggcgcgtgcctgtaatcccagctactcaggaagctgatgcaggagaatcacttgaacccagaaggcggaggtcgtggtgagctgagatcacgccattgcactccagcctgggcaacaagagcgatactcagtctcaaaaaaaagaaaaaaaaagaaaaaaaagtatcatata

SEQ ID NO: 561712 - DNA, 592 bp, Homo sapiens
tttcaagtgtcacccagtctggaaagccctctttcctccctcttacccaatgtctcctctttcttcaactcctagtttaagtctttcttctttcatgaatactattcatactcatcttctgactatgaatttctggtgtaaaacttctctaggagagaagtgagtgtgtggtaggcaaattaatagcatgaatcaagaaaaaaagatataggagggttcagcagttgagggaagaatgaatagtttgatgatgctggaatataaaatgcaggttgagaagtggaggagaagcaggccaaaagaatagtttgaatcaaattattaagcctcaagcatataattccaattgttagcagtggtagcactgaaggactttataacgaatggttgagggggatcctattagatttgtgctttagacacgtcactctgcctaataggtagaggatggattgaatggcaaagaggcagcgaagacagcctggatgggaaagagaaggaaaaacatatcaggaaagggcattagctaagtcaaatttagctaagrgacagcagggacagtggccatgtgagctaggcagaaggaacagca

SEQ ID NO: 561713 - DNA, 552 bp, Homo sapiens
gaatgaatgaatgaatgaatgaatgaaaaaaatgtaggtcaagaatacaggttctgtgggaaggaccaaacaaatacttttcagttcagaaaataaaatttaaaaacaaaacaaagaaaatgaatagctgaaattcataataagtcagaaaaggtaattcaaataactttataatgcagtactctgacaatatattctcagtaagatatagtctaaaaataaaacaaatgyaaagaaatcttgacctgagtaggtttttattggtaatgatattggtgttgtttaacaaactattttgtgtataataaagcaattaatatatagatttacattataggaaaaggaagttacaaatatgaaatgagaggaggtgaaaaaagccctgtgacatcatataaacttataatttaatgtgatagaaataataacactcatgaatttatatttctgtttctattcgtatgtattttaggccctttcaaaaggcctaaaagcaataacagccctaactgtacactccaaaatggttaaggcagtaaattctatgttgtg

SEQ ID NO: 561714 - DNA, 611 bp, Homo sapiens
agatctggtaaagctaaagatgttcacaccctagaatccagcaatttgaggcactaggagagacaccctttcaatgtatgcaagaatatatgtagggatgttcactgtggcactcttagcagtaacaaaaataaaaatycaaatagcctgaatgtccatcaacaggagaatgattcaagaaattatggctcacttataccagtaattaaaagggatgaactagagttacattatcaaggtgaatacattcaccaaatataaaaacagagcaacaaaaatcaagttgcagaaggataaatacaatatgacgtcaagtttagaataccccagtaggctgtgtggtgttttatagccagtgctcacacctgtaatctgagctttgggaggcctaggtgggaggatcacttgaagccatgagttcaagaccagactgggcaacagggcaagaccctgtctctacaaaaaataaaaatgattagtctggtgtggtgttgtgaggttttagtctcagctaccagagagggtgagtgaggcaggaggatccattgagcccaggatttcaagtctgcaatgagctatgactgcaccactgcacttcagcctgggtgaca

SEQ ID NO: 561715 - DNA, 521 bp, Homo sapiens
gttcacaccctagaatccagcaatttgaggcactaggagagacaccctttcaatgtatgcaagaatatatgtagggatgttcactgtggcactcttagcagtaacaaaaataaaaatccaaatagcctgaatgtccatcaacaggagaatgattcaagaaattatggctcacttataccagtaattaaaagggatgaactagagttacattatcaaggtgaatacattcaccaaatataaaaacagagcaacaaaaatcaagttgcagaaggataaatacaatatgacgtcaagtttagaataccccagtaggctgtgtggtgttttatagccagtgctcacacctgtaatctgagctttgggaggcctaggtgggaggatcacttgaagccatgagttcaagaccagactgggcaacagggcaagaccctgtctctacraaaaataaaaatgattagtctggtgtggtgttgtgaggttttagtctcagctaccagagagggtgagtgaggcaggaggat

SEQ ID NO: 561716 - DNA, 564 bp, Homo sapiens
agggaagaatgagtccatgcatccacctccccccagccctcagaaaacttagctaagaagatggttgccagaatgagaagagtagttcacattccttcttcattcaaatatttctttgttgcttttgaagatagtaatcaatccagaagagtaaagtccttctaaactcctctcagagattcctggtacatgaggtaggctgtgcatttacactggaaagtaaggctcctagtgataatattataattgtggtagctaacatttattgagtactttctgaggcagagagagattaattatgtaacttgcccaaagttgtatagctggtaagctgtgattctgggctaagcgcctaaacagtttgaacatcaactacttagccaatctgccttctggaacagaataaatatgaacacttagccatacctagatgatcagagaaggcttcctggtaaaggtgcagctcccaatacaagattgtrtccagttcaatagatgaagaagaggtagaagtcaggcccagaacagagaataacatgagcaaatgttccagcctatgaaaca

SEQ ID NO: 561717 - DNA, 576 bp, Homo sapiens
ctaaattatacaatatctttccaatataaaaaagttttgtatttttcgaggtttcagctaaatgtgtttgagctaaatgggtttagcatggatataccatatggatatttgaggtaaatggatttagcatggatatatccatttggatctatcatagactaatccttgttttggactatgaattccagtcttcttatttgtacttctcttctgcgcttgttgaatatttgtggcctgtttctgttaggggcatccatgggtttgatggatgtattgctttgcctccttccagatctttccctgctcaaagtcactgcaaatccgagatgccctccatggcagcctgcttcccacaacttgaaacattgttgttttacattaatgtttgcctagggttactagttcacaacaaatgtgaaaamaaaaatgctagtacttgctgacagggtcatggaggaatttctgaagagaacatctgtcagagggaagactcgccttccacagatgcagcacagccttctttctgtgaagacacgggatttctgtgaaatcctactggggatttcacctactggg

SEQ ID NO: 561718 - DNA, 585 bp, Homo sapiens
caatgttggccaggatggtctcgatctcttgacctcgtgatccgcccacctcggcttcccaaaggcattctctctttattccccaatatagtccctcaaggtcttgccaaaggcctggttagaaagattaaaaaagaaaaaaacacacacasagaaaagaaatgagtctaaaggctgttatccctgtgggtttaatcctcctagataacactgacattttaacaaatgcttttagtgctaaagaggaaatatgtgggaaagtttttaggcatgggccaggtgaatggaatagccgtttatcaaaacatttattagatgtgtgtacttctaaaatgatgccatgcagattgttgcctaatttgtagatctagttcgtgcatcctccatctctctctctctatttctctttctctttctgtttgtccctttctttctgtctgtctctctgcctctatagctctattgccctaactatctcttttcagtgaaatatacttctcccctgccatacaaaagtattgtattactgcatattcttcagtattcccatatagattttatgataacaattctctgaaatgtgta

SEQ ID NO: 561719 - DNA, 604 bp, Homo sapiens
aagcaggttcaaaaaatacatgtaataggaattatgccgttcttattaaagacaaattaggtaattataggcggaaaaaagatatgagatctacaggaacatattaacagtggctgtgttgagtggggagattagaagcaatttttattataatttctgcttttttagagtccccaagctttctacaataaatatacattgttttagtaataggggaagaagtttctcattctctttaaatgtctctaaactctcccgtgaacaaagtcagaccttttgtctccagctgggtgtaagttaccagctgctgtgtccttgacctgtacattcactgcatccctttcaacccatattcttctacattaatccataggctctaagaacctaaagctttctaaacaactcaagtcatggaaacagctgtcggctccttcagtataggtgccaaatccttcccagagttaaagtaataattcggatgcccacctctaaatacaagaactcctgacatgtaaggcatccttcctaactaagcccttcartatttgtccactctctttcaccaatgtccacttacaaattatgcatcatttttttccgcctc

SEQ ID NO: 561720 - DNA, 576 bp, Homo sapiens
ttctgggaagggattttgcaaatgtaaatgaaagtctctaattaattttaagtacgggagattaccctggattatctgggtggcctgacttatcagttagaaagctttaaaagtagggctgaggcttccaaaaaaaaaccgagagggctttgtaactgtyctttcctgagagcttgtcctgtggatttcagacttacaattatgtaacccatttccctataataaatttcttagtatatatatatctgcttctctggttgaaacttgagatacaatatacaattttataattcattcactgaacatgttttcagtattttctcacatccccaattttctgagacttttcatatctgcataagcgtgcataacattttaagaagaaaactatgttcttattattttacatttaagtgatttgcaacttttattgcagataacattgaactgcagatacttgtatgcagatctttgtgtccacaagagattcttagatgaaagaacctgagacccctaagccaaattcatcttcagaaagggtgcatcaatttacattagcatttatatacagtctat

SEQ ID NO: 561721 - DNA, 576 bp, Homo sapiens
ttctgggaagggattttgcaaatgtaaatgaaagtctctaattaattttaagtacgggagattaccctggattatctgggtggcctgacttatcagttagaaagctttaaaagtagggctgaggcttccaaaaaaaaaccgagagggctttgtaactgttctttcytgagagcttgtcctgtggatttcagacttacaattatgtaacccatttccctataataaatttcttagtatatatatatctgcttctctggttgaaacttgagatacaatatacaattttataattcattcactgaacatgttttcagtattttctcacatccccaattttctgagacttttcatatctgcataagcgtgcataacattttaagaagaaaactatgttcttattattttacatttaagtgatttgcaacttttattgcagataacattgaactgcagatacttgtatgcagatctttgtgtccacaagagattcttagatgaaagaacctgagacccctaagccaaattcatcttcagaaagggtgcatcaatttacattagcatttatatacagtctat

SEQ ID NO: 561722 - DNA, 586 bp, Homo sapiens
ggttaagggaacagattgataatgtttactaaagagacccagtcgtgggaatgtcctaatatcccgatatcttgagaacaaagacattcctaattttgctttaaaggtaataatattgattcttgcaaaatatagtaattamgaaaattaatcctttatcacaaactcttacagcacaatacatctccccataatcttttttttatcctgtatataaacaagcattatacctagggtggacgcattcctcctcttgctttcgggaatgccttactctgtctatggagtagctgtgctttcaccactttactttcttaataaacttgcttttgcttcattctgtggactcgccctgaattctttcttgcatgagatccaagaaccccctcttggtgtctggatcaggacacctttcctgtaacattctgaatattagtctcttgtcatgcaggtagtttgcgaatattttctcccatgctgtgggttgtctctttgctttgttgattgtttcctttgctgtgtagaaactttttagcttgatggaatcccattgtccagcttttgctttggttgcctgtgctttgtg

SEQ ID NO: 561723 - DNA, 609 bp, Homo sapiens
aattttaccaattagagtacagtgcttatgtacagttttactttccactcattccaaaaagttatttagtttggcacttttacccccactctcttcagtgaggtcgttttatatatttctaacggaaattcctttgtcatagtctgcattccaacccgggatcccctggwctcttaaatgacttttgaaaattcacacgctttaagtttcactctttgtgctgtaaagttctataaatgttgacaaatgcagtgttaagtatttaccattgcaatatcatacagaagagtttcaccacccaaaaaatagcttcccttgcttcacctattcgaccatctctcttctaaacccctggcaaccatggatctgtttgacgtctctgcagtttttgtttgttttgtttttacccagaatgtcataaaaattggatcatacggtatccaaacttttcagattggcttatttcactttgaaatatgcatttaagatttacccatatttttgcatggcttgatagctcattcctttttattgctaaatattattccattatatgtatgtgtcataatttattgatccactcacctattaaaagacatattagttgct

SEQ ID NO: 561724 - DNA, 468 bp, Homo sapiens
ggaaagattaaattggtgaacgttagaggaagaaactttgagytccaaaacccatcaggttcttccccaccctcacttgggaagctttgccacttgttattccctctgtaaagggttcttctcatggctggttcgttgggatcttcccttccttcaaagcatccttttagagcactgtgtaagcctctttatttacctcatcctgtttatttacctcatcactgtcgtttatttacttggttagctggtgagtcagagagcagcatgatgttggggctaagtgcatgggctgcagcaccttcatgcctgctttaaaccctcgctctgccacttattagccacttatctttggcaagttacttgtgctgtcttcctcacctgtaatgggaaaaacaatagtttccacttcatagacttcttgtaggagtaaatgaattaatatatgtaaagcacctactaactgacgtg

SEQ ID NO: 561725 - DNA, 671 bp, Homo sapiens
gaaattgtaaatattcactgtctcaattgtgagaaggttggaataccaggtaatattatgtaatgttttcatagttaatatttgtaacataagacctacatattgtgaaatagaagagtttaaaccaaaataatctattsttgtaattcaggacatctcaattccatcaatttaaagaattatttaaatgttgcagccaattctaactattataattctataccaccagggaagtgcttccaaacatcatgcatttattaatgcagtcaacaagtatttattgaattcttacaaggttctgtacttcgtgtaggaaaaaaaaataccttactaaaagaacttgtcttactggatcgaaaatcatttattttggtttattttccttgcatttttgattaagcagtctgtaattcaacatcatccatgttaaaacgcaaatgcataaatagctacaggttcaaacacagaaactcctgctacatatcaaggctggtcagacattgtccgcataaagtgtaaggctactgtcaatgttgtgttaatctttttgaattcagaagattaaatgaaccacaatacaagagacagttgagcatttggtgggtaaatatgccaaccaaattatcaaaactcaagtcaaaatcaatgacttaatgtaaacaaagaacaac

SEQ ID NO: 561726 - DNA, 530 bp, Homo sapiens
gagtgagactctgtctcaaaaacaaacaaacaaaaaaaacaaaaaaaggaagcagcaccagcagcaatgctatgtgaataaaaatgaataaggcatactttaagtccataggtgatggttttattagaagcactgtgggcagaaggcacatccccatgccttataaatgtctgtttcagcaagaacatataatagcagtggtgcagtgaagcctaatttatacaaatacgttatcttggaaaagtttttaaaatataaaatatagagagtaaagggggaatatcccaattcactctcctctcttacttctccccttctccgtctatgcacaatcycagtattctccccagaactctcgactagtctttcagcttgtattctttctgccttttcctgtacatttacacccatatatgtgcatataggaatagagcttttaaaaagaaagtgagaatgggctgctatcacaatactgttttacaacttcttattaaaattatttttcttcattaggtctgaaaacattgttt

SEQ ID NO: 561727 - DNA, 583 bp, Homo sapiens
tgtgccaccacacctggataatttttgtattttagtaaagacagtgtttcatcatgttggccagtctggtctcgaactcctggcctcaagtgatccacctgtctcggcctcccaaagtgctgagattacaggtgtgagccaccgtgcctrgcctacctgctaaattttattgcttgaaattagttcacttttattgttgacactctttacgaagagtacttggaggaaagtcttttgaaaagaagacttgtaatatttgttatacctgatgacgcttttgtactatttgttcagtagtaagtctctggcagagtatttgaatggcagccacttcaaaataggcaaattgttccccctactgagcatgtgaaaatgcattcagtatctctgtattttcaaatcttgtctggcaaaaacattagatctgaaaagaggagtaatttcaagattaaagaaagcattgggcaaagactaggaggaccaaggctagtagtgccagcctcagatgatttgcacatgaaagccgcctttccgtctgcagctttatgcatttccaaaagacactcaaatcaggggctcagct

SEQ ID NO: 561728 - DNA, 583 bp, Homo sapiens
tgtgccaccacacctggataatttttgtattttagtaaagacagtgtttcatcatgttggccagtctggtctcgaactcctggcctcaagtgatccacctgtctcggcctcccaaagtgctgagattacaggtgtgagccaccgtgcctagcctacctgctaaattttattgcttgaaattagttcacttttattgttgacactctttacgaagagtacttggaggaaagtcttttgaaaagaagacttgtaatatttgttrtacctgatgacgcttttgtactatttgttcagtagtaagtctctggcagagtatttgaatggcagccacttcaaaataggcaaattgttccccctactgagcatgtgaaaatgcattcagtatctctgtattttcaaatcttgtctggcaaaaacattagatctgaaaagaggagtaatttcaagattaaagaaagcattgggcaaagactaggaggaccaaggctagtagtgccagcctcagatgatttgcacatgaaagccgcctttccgtctgcagctttatgcatttccaaaagacactcaaatcaggggctcagct

SEQ ID NO: 561729 - DNA, 629 bp, Homo sapiens
aaaacatgtatttcagtgctgaactttggttgtaccatattaaagatttagttcaaaaagtttatcaaggatccayttaacacgtcttcacaacataatatatgtaactgtaacatgggggaaagcatacatttttatggattaaaaaaataatagtatgacaccagattcctcctccactagggtctttggaatcaatgaatttcatatttcaagtgagttttcaggatatctgtttgtacagatacgagacagatcttagcatatagtaaattctcagtaagtattgttgattaacttgtggatggtaccacatgaaattgctaatattagatcagttgaaaattgactgcaattagtaaagttggtataacgtacgttcccagttgtgctatttagaattatgatagtattatgctcctacttttctttgatattgagttgtcttggtattgtttattgttttccagagaaatactatagtatccacagaagaattgtgaatacttttttataattttgaactgggacatattgcagatgaggaaggtagaaacatccatttggccttagagggctctgctagtaaaagaactactcagtggtggtttgaaaaatcttgttctggg

SEQ ID NO: 561730 - DNA, 612 bp, Homo sapiens
tggtttgaaaaatcttgttctggggatctgaatttcaaaaatgaaccctaggggagatcaaaatccattttaaacaaagatcaattaagagccaaagtgaaatctaacttgcaaacaacaatttgaagccttgcagcagacttaaggaattcccgctctgactggggaaaagtataaaaatggacctgagagtaccctcttgagggatgatcaagaatggagacagttggaggtgtgctcattaagattcaaaacagcagaaatccatttttggagcagattataacctgtggccaaaaaaaaaaaatgtgtgctgtttgacaactaatggcaatttatacaatcattggaggctggtaaagctccctaatatgttgccaccattatcattgcaaccaaaaaaattctgaagattgtgtggtgatctacgaaagagataaataattactgttatttaaacccaagtgaaacaatgacggcagcagcatattatcaagaaatttaaattatgcatgaaaatgtgatttaaaaacaatgtcctttgggtaacacacaagaacctacactttcacagacaaggactcracctcacatgtcacaagctactaaagc

SEQ ID NO: 561731 - DNA, 567 bp, Homo sapiens
gcgattctcctgcctcagcctcccgagtagttaggattacaggtgcatgccaccacccccggctaatttttgtatttttagtagagacggggtttcactatgttggtcaggctgctctcaaacccttgacctcaggtgatccgtccaccttggcctcccaaagtgctgggattacaggcgtgagccaccgcacccggcctgctatatttctttgattagtatttttctttttcctattattttcctattattttcctattacaggtgtragccactgcacctagccccttcatttcttaattgcacttacccttttactgtctgtatcattagaataaaaacctcatgaatagtgatttttgtctgtttgatttactgctatagttctagcatccagaagagcgcctgaacatattaagacagtaaaatattgaatggattaatgtctacttatttgggtttcatcatttctattttattgtttagcttacttttcaaagtcctaagcaaacttatttaaagtttcagtttattccattattttcatcttgagtggactgaaatttc

SEQ ID NO: 561732 - DNA, 638 bp, Homo sapiens
cttgtagagatgtttcacctcaatggttaagacgtatttcctaggtactgtgtgtgtgtgtgtgtgtgtgtgtgtgtgtgtgtgtgtgtgtgtgtgtgtgtgtgtgtgtctgtaaatgggattgctttcttgatgtggctctcagcttgtatattactggtatattgaaatggtaccagtttttgaacgttgattttgtatcttgaaaccttgctaaaattgtttataaattctaatagccttttggtggagtccttagggtgttgtaagtatagaatcatattgtcagcaaagagaaatagtttgtcttcttttcctatttggatgccttttctttctcttgcctgagtgctctaacacttccagtactgtactgaataggagtcatgagagtgggtatgcttgtcttgttccagttctcagggtactgcatccagtttctgcctatacagtatgatgctggctstgggtttgtcatagagggctcttattatttggaagtatgttcgttcgatgcctagtttgctgagggtttttatcgtgataggatgttagattttatcaaaagcttttttcatgtctattaagatgattatatgatttttatgtttaattctgtttatgtggtgaatcacact

SEQ ID NO: 561733 - DNA, 638 bp, Homo sapiens
cttgtagagatgtttcacctcaatggttaagacgtatttcctaggtactgtgtgtgtgtgtgtgtgtgtgtgtgtgtgtgtgtgtgtgtgtgtgtgtgtgtgtgtgtgtctgtaaatgggattgctttcttgatgtggctctcagcttgtatattactggtatattgaaatggtaccagtttttgaacgttgattttgtatcttgaaaccttgctaaaattgtttataaattctaatagccttttggtggagtccttagggtgttgtaagtatagaatcatattgtcagcaaagagaaatagtttgtcttcttttcctatttggatgccttttctttctcttgcctgagtgctctaacacttccagtactgtactgaataggagtcatgagagtgggtatgcttgtcttgttccagttctcagggtactgcatccagtttctgcctatacagtatgatgctggctctgggtttgtcayagagggctcttattatttggaagtatgttcgttcgatgcctagtttgctgagggtttttatcgtgataggatgttagattttatcaaaagcttttttcatgtctattaagatgattatatgatttttatgtttaattctgtttatgtggtgaatcacact

SEQ ID NO: 561734 - DNA, 587 bp, Homo sapiens
ctgggctgggcgcagtggctcatgcccgcagtcccagcactttgggaggccgaggcaggcggatcgcctgaggccgggagttagagaccagcttgaccaacatggagaaaccccgtctgtactaaaaatacaaaaaaattaccagggcatggtgacgcatgcatgtaatctcagctattcgggaggctgrggcaggagaataacttgaacccaggaggcggaggttgcggtgagccaagattgcgccattgcatgccagcctgggcaacaaaagcgaaactcggcctcaaaaaataaagaaagaaataagatcagctcagggccgggcatgtggcttacgcctgtaatcccagcactttgggaggccgaggtgggcggatcacctgaggtcaggagttcaagaccagcctggccaacatggtgaaaccccgcctctactaaaaatacaaaaattagttgggtgtgctggtacacacctataatcccagctactcgggaggctgaggcagaagaattgcttgaatctgggaggcagaggttgcagtgagccgagatcaccccactgcactccggcctgggcgacagag

SEQ ID NO: 561735 - DNA, 552 bp, Homo sapiens
tattgaatagttatatgtacagtctaaaagccaatttgctgaatgttctattaatatttcattctatcaagaaaagaaaaaagaactgcctgaagttctttttggtatgtagcctgagattcattttctaccattatggttggtgattgttataagaaagaaattaaattctcttcctcccattaagtaatatgcttagagaacctataaacccatttaactatatataaatagcaatcaggcagaagacaagattggagaaaagaatccatttgtaatagcgatgaaacagataaaataccccccaaataaatttgtctgctgatggccacggctctctgaggaatggtattgagtttctcagcatcaccagaagtattgttttctacttgaaatttgaaagtgtaggtgcaatagcacattgctacttttttttttttttgagacgaagttttgctcttgttgcttaggttggagtgcaatggcacaatctcggctcactgcaayctccgcctgctgagttaaagcgattctcctgcctcagcctcccat

SEQ ID NO: 561736 - DNA, 528 bp, Homo sapiens
acgattctattcaattccgttcaatgattccatttgattccatttgatgttgattccattcgattccattttatgatgattccatgcaattccattagattatgactcctttcatttccattcgatgatgattccattcgtttccatccgatgattccattcgattccgttcaatgattattccattcgagtccattcgatgattccattcgattccattcgatgatgattgcattcgagtccatggattattccawtccattccattagatgattccattcgagtccgttcgatgattctcttcgattccattcgataattccgtttttttccgtttgatgttgattccattcgattccattcgatgataattccattcgattctatgcgatgattccattccattccatttgaagatgattccattcgagaccattcgatgattgcattcaattcattcgatgacgattccattcaattccgttcaatgattccatttgattccatttgatgttgattccattcga

SEQ ID NO: 561737 - DNA, 528 bp, Homo sapiens
acgattctattcaattccgttcaatgattccatttgattccatttgatgttgattccattcgattccattttatgatgattccatgcaattccattagattatgactcctttcatttccattcgatgatgattccattcgtttccatccgatgattccattcgattccgttcaatgattattccattcgagtccattcgatgattccattcgattccattcgatgatgattgcattcgagtccatggattattccattccattccattagatgattccattcgagtccrttcgatgattctcttcgattccattcgataattccgtttttttccgtttgatgttgattccattcgattccattcgatgataattccattcgattctatgcgatgattccattccattccatttgaagatgattccattcgagaccattcgatgattgcattcaattcattcgatgacgattccattcaattccgttcaatgattccatttgattccatttgatgttgattccattcga

SEQ ID NO: 561738 - DNA, 528 bp, Homo sapiens
acgattctattcaattccgttcaatgattccatttgattccatttgatgttgattccattcgattccattttatgatgattccatgcaattccattagattatgactcctttcatttccattcgatgatgattccattcgtttccatccgatgattccattcgattccgttcaatgattattccattcgagtccattcgatgattccattcgattccattcgatgatgattgcattcgagtccatggattattccattccattccattagatgattccattcgagtccgttcgatgattctcttcgattccattcgataattccgtttttttccgtttgatrttgattccattcgattccattcgatgataattccattcgattctatgcgatgattccattccattccatttgaagatgattccattcgagaccattcgatgattgcattcaattcattcgatgacgattccattcaattccgttcaatgattccatttgattccatttgatgttgattccattcga

SEQ ID NO: 561739 - DNA, 581 bp, Homo sapiens
gtggcacatgcctgtagtcccagctacttgggaggcgagatgggagaattgcttaaccctggatggggcagaggttgcagtaagctgagattgcaccactgcattccagcctcagtgacagaatgggatcctgtatcaaaaaacaaaacaaaaaacaaagtgacagaagaatagtaaaacaaatgaataaaagaggaaactataatgtaagatttaagagtcaaaactttgaagctataccatctgggttcaaatcccaatttgccactcactagctgtgtgatgcccaatcattaaatagyaatgataacaaagtatatactacagggttgttttgaagaataaatggttgaagtttaagaaatctgcctaatatctggttcatgaaacagtagacactcaataaacataactattattgtatgtatgtatatataaatatacatgaatatatatatacatacaggcataccttattttattacactttgctttattacattacaattcacagatattgtgtgtgtgtggttttacagaaatggaaagttgtggcaagctttctttgagcaagtctattg

SEQ ID NO: 561740 - DNA, 606 bp, Homo sapiens
taattcccaagagaactttgtacctgctttgctgtatacattttttagtattttattggctttgtagtcttttataggctatctaaatgcgtgtaggctgttctgcttgttcaagaataaaccagtttattttcacattgatctggagaatttctgtgttaatggaacatttctttcccccatactggagccattttttgtcatgggggttggtggcagggaatttgggattactagtggctatttagtgggtagaggccagggatattgctaaggatcctacaatgcacaagacagcccccaacaccacagaattatctggccaaaaatatcaacactaacgtgattgagaagccctgctctaggcaaaggtcttaaaaatgagctactggaataaaatattagactaaatttgtaatgcatgctggtggtgtcccaccaggtttccttcaacctattaggtgcacctgctccccagctgctgcagataactgccaatggctcccacctacactattctccagtraattgctctcgactgacaggagccacccttgccaagaggatgcctaggaggtataaccctcctgagagtggctgtcataa

SEQ ID NO: 561741 - DNA, 606 bp, Homo sapiens
taattcccaagagaactttgtacctgctttgctgtatacattttttagtattttattggctttgtagtcttttataggctatctaaatgcgtgtaggctgttctgcttgttcaagaataaaccagtttattttcacattgatctggagaatttctgtgttaatggaacatttctttcccccatactggagccattttttgtcatgggggttggtggcagggaatttgggattactagtggctatttagtgggtagaggccagggatattgctaaggatcctacaatgcacaagacagcccccaacaccacagaattatctggccaaaaatatcaacactaacgtgattgagaagccctgctctaggcaaaggtcttaaaaatgagctactggaataaaatattagactaaatttgtaatgcatgctggtggtgtcccaccaggtttccttcaacctattaggtgcacctgctccccagctgctgcagataactgccaatggctcccacctacactattctccagtarattgctctcgactgacaggagccacccttgccaagaggatgcctaggaggtataaccctcctgagagtggctgtcataa

SEQ ID NO: 561742 - DNA, 471 bp, Homo sapiens
gaatttattaactgtctaggtttatttttctagttgttccctaaccaccaccacctccattctggatattagcatgagtgctctaaatgaacttttcatttcctggaagagaaatatatgtttcagcggacatttaatcaactggtggtttgtggaaaggaggattttgaccttgtaacatagtcttcctgttagttatttcctgagatcrttatgcaacaaaaagggtgtaggaaacagttacaaagttgaactctaaaattctgcattctcggaaaagatatttgaaaacatgaaattaaaacattgagataagccaggtgcagtggctcacgcctgtaatcctagcactttgggaggccgagacagttggatcacccaaggtcaagagttcgagaccagtctggccaacatggtgaaaccttgtctctactaaaaatacaaaaattagcctggtgtgatggcgggcac

SEQ ID NO: 561743 - DNA, 471 bp, Homo sapiens
gaatttattaactgtctaggtttatttttctagttgttccctaaccaccaccacctccattctggatattagcatgagtgctctaaatgaacttttcatttcctggaagagaaatatatgtttcagcggacatttaatcaactggtggtttgtggaaaggaggattttgaccttgtaacatagtcttcctgttagttatttcctgagatcattatgcaacaaaaagggtgtaggaaacagttacaaagttgaactctaaaattctgcattctcggraaagatatttgaaaacatgaaattaaaacattgagataagccaggtgcagtggctcacgcctgtaatcctagcactttgggaggccgagacagttggatcacccaaggtcaagagttcgagaccagtctggccaacatggtgaaaccttgtctctactaaaaatacaaaaattagcctggtgtgatggcgggcac

SEQ ID NO: 561744 - DNA, 653 bp, Homo sapiens
gcaggtgaatcacttgaggtcaggagttcgagaccagcctggccaacatggtaaaaccccatctctacttaaaatacaaaaaaatttagctgggcgtggtggtgcacgcctgtaatcccagctaatctggaggctgaggcaagagaatcacttgaacctgggaggtggaggttgcagtgagccaagacagtaccactgcactccagtctgggcaacaagaacgaaactctgcctcaaaaaaaagaaaaggaaaggaaactttgcctaattgacatttgtaggacactgtatccaatacatcaaaatacacattattttcacacgtatgtggaattttcaccaaaatagaccatatgctggaccatataaagagtctctataaatttcaaaggattgacataatacagagtaccttctttgaccaaaatagaattggcttagaatttaataacaataagatagctgtaaaatcctcagatatatagaaattaatcagctcatttctaaataatgaattgttggaagaaaaataaataagagaaamtttttttgaaataaaaatgagaggcacaacatatgaggatttgtgtgatactactgaagatatagattcatattatatatgtgtgtgtgtatatatatacatatataat

SEQ ID NO: 561745 - DNA, 534 bp, Homo sapiens
cccaaagtgctgggattacaggagtgagccactgtgccctgcctctatcaagacttatttttaagctttgttagagtgggtctattttttttttgtctctattaaggcatcatctctagttcatggccttctggtgtgtcaactgcaaatytgtatgttcatgataatttttcccttttaaatgagcccagactccagtgatttcccagcattgtgtgatctctaaaatctctgaccacctatttagcctcttgatgctgttctctgcttgacctcaaagaatctcacactgcatatgctcaacttaggagctggccaatgacccaagagaaagtttatacatagatttttagcactctgcctacagttctgtcttctccagttatctctccacaaagtcccagctaactttatagcctcaaacactttatttctctgtctctttcacccagtgattgattccactgctgtccttgggctctattaatctgtgttacaatttggaaaatacatttagatgcatggctcaccaac

SEQ ID NO: 561746 - DNA, 534 bp, Homo sapiens
cccaaagtgctgggattacaggagtgagccactgtgccctgcctctatcaagacttatttttaagctttgttagagtgggtctattttttttttgtctctattaaggcatcatctctagttcatggccttctggtgtgtcaactgcaaatttgtatgttcatgataatttttcccttttaaatgagcccagactccartgatttcccagcattgtgtgatctctaaaatctctgaccacctatttagcctcttgatgctgttctctgcttgacctcaaagaatctcacactgcatatgctcaacttaggagctggccaatgacccaagagaaagtttatacatagatttttagcactctgcctacagttctgtcttctccagttatctctccacaaagtcccagctaactttatagcctcaaacactttatttctctgtctctttcacccagtgattgattccactgctgtccttgggctctattaatctgtgttacaatttggaaaatacatttagatgcatggctcaccaac

SEQ ID NO: 561747 - DNA, 534 bp, Homo sapiens
cccaaagtgctgggattacaggagtgagccactgtgccctgcctctatcaagacttatttttaagctttgttagagtgggtctattttttttttgtctctattaaggcatcatctctagttcatggccttctggtgtgtcaactgcaaatttgtatgttcatgataatttttcccttttaaatgagcccagactccagtgatttcccagcattgtgtgatctctaaaatctctgaccacctatttagcctcttgatgctgttctctgcttgacctcaaagaatctcacactgcatatgctcaacttaggagctggccaatgacccaagagaaartttatacatagatttttagcactctgcctacagttctgtcttctccagttatctctccacaaagtcccagctaactttatagcctcaaacactttatttctctgtctctttcacccagtgattgattccactgctgtccttgggctctattaatctgtgttacaatttggaaaatacatttagatgcatggctcaccaac

SEQ ID NO: 561748 - DNA, 641 bp, Homo sapiens
aacaattaaagtgttctaacctatgatatgatctaatttgcaattttaraaaattgtcctgttttctatgtggaaataggcagaaggaagggtcactagagagggcaaagaaatcagtgtggctgccactggaggaatggaggatgatgggtctgtgatgaggacaatgacagtaaagataaaatgagttcagtggattctgggtatgctgcttaagtaggactgaagagcctgcttatggtttagacatgaggcataatagcaaggtaagtaaccaggattttatcttgagcattagcttcatcagctgccaaaacaaataaaatagactgcagggcttaaacaacagaaattattcctcacagtctggaggctgagaagtccacgatcaaggtgccagccaattcatttcctggagaggaccccctttctggtttacacatgactgccttcttgctgtgtcctcacatgatggatagagaaatcatctcttatgtcccttcttataaggacactaatctcatgagggctctaccccatgacctaattacctccaaaagttctgcatacaaacagcatctactgggaataatggcttcaatatataaatttggggggaggcacaaatattcaggccatag

SEQ ID NO: 561749 - DNA, 641 bp, Homo sapiens
aacaattaaagtgttctaacctatgatatgatctaatttgcaattttaaaarattgtcctgttttctatgtggaaataggcagaaggaagggtcactagagagggcaaagaaatcagtgtggctgccactggaggaatggaggatgatgggtctgtgatgaggacaatgacagtaaagataaaatgagttcagtggattctgggtatgctgcttaagtaggactgaagagcctgcttatggtttagacatgaggcataatagcaaggtaagtaaccaggattttatcttgagcattagcttcatcagctgccaaaacaaataaaatagactgcagggcttaaacaacagaaattattcctcacagtctggaggctgagaagtccacgatcaaggtgccagccaattcatttcctggagaggaccccctttctggtttacacatgactgccttcttgctgtgtcctcacatgatggatagagaaatcatctcttatgtcccttcttataaggacactaatctcatgagggctctaccccatgacctaattacctccaaaagttctgcatacaaacagcatctactgggaataatggcttcaatatataaatttggggggaggcacaaatattcaggccatag

SEQ ID NO: 561750 - DNA, 568 bp, Homo sapiens
attgtatgaggagatatgtcaaagattataatgtagaaaatacagatagataaacagtcatgcatgacttaacaaaggggatacattctgagatatgtgtcattagaagtttcattattgtacaaatatgggagagtataattaaacacaaacctagatggtatggcctactacacaacttggctatatggtataagcctaccgctcctgggctacaagcctgtacagcatgtgactttactgagtctgtaagcaattgtaacaaaatggcaagtatgtgtgtatctaaacatatctaaacaraaaaaagctaagagtaaaaaatacagtattatgatttatgaaactactgttgtagatgcagtctgtcatcaaccacacatggtgcatgattatatttccctttattggtcaagataattggagtatgccactccactattcaccacatgaaaagaagtagaaaagaaggaaaatattatgtaaagaagttcacagcagtttcaggaaaaagaacaagagttgagagaaggaaacagagagagatagaagccacaaggtaccattg

SEQ ID NO: 561751 - DNA, 568 bp, Homo sapiens
attgtatgaggagatatgtcaaagattataatgtagaaaatacagatagataaacagtcatgcatgacttaacaaaggggatacattctgagatatgtgtcattagaagtttcattattgtacaaatatgggagagtataattaaacacaaacctagatggtatggcctactacacaacttggctatatggtataagcctaccgctcctgggctacaagcctgtacagcatgtgactttactgagtctgtaagcaattgtaacaaaatggcaagtatgtgtgtatctaaacatatctaaacaaaraaaagctaagagtaaaaaatacagtattatgatttatgaaactactgttgtagatgcagtctgtcatcaaccacacatggtgcatgattatatttccctttattggtcaagataattggagtatgccactccactattcaccacatgaaaagaagtagaaaagaaggaaaatattatgtaaagaagttcacagcagtttcaggaaaaagaacaagagttgagagaaggaaacagagagagatagaagccacaaggtaccattg

SEQ ID NO: 561752 - DNA, 564 bp, Homo sapiens
acccccgaacctaaaataaaagttagggaaaagatataaataaaagtgtttggcacctccccacttgctatsttgctccttctcatcatgcaatgctcctgttcccctttccccttacctcatgattgtaagttccctgaagccctcaccacaagcaatgccagcacgatggttcctgtgcagcctgcagaactgtgagccaattaaatctcttttctttataaattacccagcctcaagtatttctttataacaaagcaagaatggccaaatacatatgaatgtaccactgtttgttaatccatctactatttgaaggatatttgtttccaatttggtcaattatgagtaaaaccactataaacatttgtgtgaatctaggttttcatttcacttctgtaaatacccaagagtgagactaccttgtcaaatgataagtgtatctgctgttttatattaaaaaaaaaataagtagaacatttttgtggtttttttgttgttgttgttacttgtttgtttttgagacagggtctcactctgttgctcaggcttgagtgcagtggc

SEQ ID NO: 561753 - DNA, 564 bp, Homo sapiens
acccccgaacctaaaataaaagttagggaaaagatataaataaaagtgtttggcacctccccacttgctatcttgctccttctcatcatgcratgctcctgttcccctttccccttacctcatgattgtaagttccctgaagccctcaccacaagcaatgccagcacgatggttcctgtgcagcctgcagaactgtgagccaattaaatctcttttctttataaattacccagcctcaagtatttctttataacaaagcaagaatggccaaatacatatgaatgtaccactgtttgttaatccatctactatttgaaggatatttgtttccaatttggtcaattatgagtaaaaccactataaacatttgtgtgaatctaggttttcatttcacttctgtaaatacccaagagtgagactaccttgtcaaatgataagtgtatctgctgttttatattaaaaaaaaaataagtagaacatttttgtggtttttttgttgttgttgttacttgtttgtttttgagacagggtctcactctgttgctcaggcttgagtgcagtggc

SEQ ID NO: 561754 - DNA, 564 bp, Homo sapiens
acccccgaacctaaaataaaagttagggaaaagatataaataaaagtgtttggcacctccccacttgctatcttgctccttctcatcatgcaatgctcctgttcccctttccccttacctcatgattgtaagttccctgaagccctcaccacaagcaatgccagcacgatggttcctgtgcagcctgcagaactgtgagccaattaaatctcttttctttataaattacccagcctcaagtatttctttataacaaagcaagaatggccaaatacatatgaatgtaccactgtttgttaatccatctactatttgaaggatatttgtttccaatttggtcaattatgagtaaaaccactataaacatttgtgtgaatctaggttttcatttcacttctgtaaatacccaagagtgagactaccttgtcaaatgataagtgtatctgctgttttatattaaaaaaaaaataagtagaacatttttgtgktttttttgttgttgttgttacttgtttgtttttgagacagggtctcactctgttgctcaggcttgagtgcagtggc

SEQ ID NO: 561755 - DNA, 454 bp, Homo sapiens
gaacaaagcctccaagaagtctgggattatgttaaacaaccaaacctaagaataattggtgttcctgaggaagaagagaaacctaaagtttggaaaatatatttgggggaataatcgaggaaaacttccccagccttgctagagacctagacatccaaatacaagaagcacaaagaacacttgagaaattctttgcaaaaagatcatcatctaggcacactgtcatcaggttatctaaagttaaggtgaaggaaagaatcttaagagccgtgagacaaaagcactaggtaacctataaaggaaaacctatcagattaacagcaaatttttcagcaggaaccctacaagctagaggggattggggccctatcttcagcctcctcaaacaaaacaattatcgccaagaattttgtatcccrtgaaactaaccatcacgtgtaaaggagagatagag

SEQ ID NO: 561756 - DNA, 557 bp, Homo sapiens
gtcagtcagggagcctgaggtctaattctaggtctgcatctaattagctggtaatctcgggagaaattatttaaattagcttggctttagctttctcatatgtaaactsaaaggattagactaaattattcctgagggtttaaaattccataaatgacataacatctccttttaaaatattatccaagaagaagtaattgtcagatagtgatgatgtgacattttttccagtaaaaagtaaatttggaaggtaggccctgcttttactctagttagtccctccacctcactcttctggctcctcagtaatgtttagcatgcatattccaatagataaaatccctcaaaggtgttcagtttcatttctctgatgtgaaagggcaaatcaaatgaaatggttagagacaatgctcaaaatttaaagctgtatctaagtttcccaactcgattaggccattcttacattgctatgaagaactacctgagactgggtaatttataaagaggtttaattggctcacagttctggaggctgtacgagcatggcactggcatct

SEQ ID NO: 561757 - DNA, 557 bp, Homo sapiens
gtcagtcagggagcctgaggtctaattctaggtctgcatctaattagctggtaatctcgggagaaattatttaaattagcttggctttagctttctcatatgtaaactgaaaggattagactaaattattcctgagggtttaaaattccataaatgacataacatctccttttaaaatattatccaagaagaagtaattgtcagatagtgatgatgtgacattttttccagtaaaaagtaaatttggaaggtaggccctgcttttactctagttagtccctccacctcactcttctgkctcctcagtaatgtttagcatgcatattccaatagataaaatccctcaaaggtgttcagtttcatttctctgatgtgaaagggcaaatcaaatgaaatggttagagacaatgctcaaaatttaaagctgtatctaagtttcccaactcgattaggccattcttacattgctatgaagaactacctgagactgggtaatttataaagaggtttaattggctcacagttctggaggctgtacgagcatggcactggcatct

SEQ ID NO: 561758 - DNA, 581 bp, Homo sapiens
tggccaacatggcaaaaccctgtctctactaaaactacaaaaatttgccaggtatggtggcaggcgcctgtaatcccagctacttggaaggctgaggtaggagaatcacttgaacacaggaggcagaggttgccgtgagccaagattgcgccactgcactgtagcctgggcaacagagccagactccatctcaaaaaaaagaaaaaagtataaggacatgaygagcttcatatatttatttatttaaaatatttttatttaattgtaacttttatattttaatttgtataattctataataatttaaaataatgtctgtgtttaacagctggtatgcaaagttactgaaatttaccaattgcaggtaagcctcagggaggcagctccagtaggcaactgtttcaatccaactcaaaagtggtgtttggttatcagagctaggatgtgggaaggtgaggtttgaattctagctctgctttttactatcagtttaaaaattaaattactgtttgttaaagctcattgtaagctttagcagcggcgtccaatcttttggcttccctgggccacattggaagaat

SEQ ID NO: 561759 - DNA, 581 bp, Homo sapiens
tggccaacatggcaaaaccctgtctctactaaaactacaaaaatttgccaggtatggtggcaggcgcctgtaatcccagctacttggaaggctgaggtaggagaatcacttgaacacaggaggcagaggttgccgtgagccaagattgcgccactgcactgtagcctgggcaacagagccagactccatctcaaaaaaaagaaaaaagtataaggacatgacgagcttcatatatttatttatttaaaatatttttatttaattgtaacttttatattttaatttgtwtaattctataataatttaaaataatgtctgtgtttaacagctggtatgcaaagttactgaaatttaccaattgcaggtaagcctcagggaggcagctccagtaggcaactgtttcaatccaactcaaaagtggtgtttggttatcagagctaggatgtgggaaggtgaggtttgaattctagctctgctttttactatcagtttaaaaattaaattactgtttgttaaagctcattgtaagctttagcagcggcgtccaatcttttggcttccctgggccacattggaagaat

SEQ ID NO: 561760 - DNA, 652 bp, Homo sapiens
  misc_feature 615, 643: n = A,T,C or G
atctactttataactcaaagaagaggagtacagatactgagcaggtacawataccaagaactatttttcttacaccattacatcccaacgacccactacgtcaagctcaattaagcctgcaccctcttctccatcatccttcctatttggtaattactcttttaatacatgtttttaattttgaagttgttgttaaaactcaatttgagaaaagcaaaaaggccccagagctctaaagtatatatgtcccttaaaaatatatatatatatatactgcttgctgacaataaattattttgttaaaaaacttccgtattagaatttccagaaaatttattgtctttatgttcaagttatttagtagtaatctgtgctattaagaagcacataaagcacccattgaaaaagttatctgaagatgatttagagaaatagtttgttctcttagaaagaaatctcttttatgttttaagttcaataagatgatatttatgctcataaattagggtcaaaggcaacattttgttttggtaatttttttgtggatgatgatgtttagtgagaaaggattgacaataaaagcaagaatgtaagaatataagaaataaataatancgaattacatgacctacaatttcattanaattttctt

SEQ ID NO: 561761 - DNA, 599 bp, Homo sapiens
tccaaaaaaaaaaagtgcttattgaaatgtaactgatatagagaaaagtgcataaatcagaatgaatttttacagggcacacatacccacttaaacactacccaaatcaagaaatataatattatcatcatcctagaagcacatttcatatcccttcccaattaatttcctcctgctccagcccaaaggaaaccattatcctgacctctaacaacattgattagttttacatggttkgggattttatatgaatggtaacattcagcacatgcttttgtatctgtcttctgctgttagaatgatccttgctgttgcaactagaagtaattgattcattttctttactttataaatatttcattatgtgaatatacccttttacttattcattctaatgttgatgaccattcagattgagttccatttggaaaagctattaaaaataatggagctacgaacattctcacatttttagcgtatatctagtagaagtgaaaggtcacagggcctacaattgtttttcactaaatattgccagttttctaaagtaattatattaattttcaatcccacaccactgtatgatagttccagttgct

SEQ ID NO: 561762 - DNA, 575 bp, Homo sapiens
tctcaaattcctggcctcaagtgaccctcctgcctcggcctcccaaaggctgggattacaggcataaacctccatgcccaaccatgaagttgctatttttaaagatatttaattgaaaacacagttttaataaatgtatttattcaaaaagagttattcatcatcaaaacacagcctctgcttgcaaggaacccaaaatctgctaggaagagaaagaatamaaataaataactttagtacagtattattctttcaaaatagaatgatttgggcacaaaatcattcagaaagagcagggaaaacttcatcaaaaagataacttttgaccagggtcttaaaaggtaagtaaacattctccaggtagatgggagtgagtcatgataaaagtgtgttgttatctgagaaattcaattccacatggctagaacaaagggtatgagaaactatccttaactgcgaaatctgtaggcagcagatagctaatagaataccttaaacatggtgctaaggaattgtgactttatccaattggtgatgaggaaccagagaagagtttcaatgaagattaataatta

SEQ ID NO: 561763 - DNA, 575 bp, Homo sapiens
tctcaaattcctggcctcaagtgaccctcctgcctcggcctcccaaaggctgggattacaggcataaacctccatgcccaaccatgaagttgctatttttaaagatatttaattgaaaacacagttttaataaatgtatttattcaaaaagagttattcatcatcaaaacacagcctctgcttgcaaggaacccaaaatctgctaggaagagaaagaataaaaataaataactttagtacagtattattctttcaaaatagaatgatttgggcacaaaatcattcagaaagagcagggaaaacttcatcaaaaagataacttttgaccagggtcttaaaaggtaagtaaacattctccaggtagatgggagtgagkcatgataaaagtgtgttgttatctgagaaattcaattccacatggctagaacaaagggtatgagaaactatccttaactgcgaaatctgtaggcagcagatagctaatagaataccttaaacatggtgctaaggaattgtgactttatccaattggtgatgaggaaccagagaagagtttcaatgaagattaataatta

SEQ ID NO: 561764 - DNA, 192 bp, Homo sapiens
gatatttctcccatttgtttttgaaagaagagaaatatggctctgttctgcccggctcaccggcrgtcagagtttaaggttatctctcttattccctgaacaattgctgttatcctgttcttttttcagggtgcccacatttcatattgctcaaacacacatgctgtacaatttgtgtagttaacgcaatta

SEQ ID NO: 561765 - DNA, 519 bp, Homo sapiens
cgcctgtaatcccagcactttgggaggccgaggcaggctgatcacctgaggtaaggagttcgacaccagcctggccaacatggtgaagccctgtctctagaaaaatacgaaaattagctgggcgtgttggtgtgctcctgcaatcccagctactcgggaggctgaggcaggagaatcgcttgatcccaggaggcagaggttgcagtgagctgagaccaagccattgcactccagcatgggcaacaagattgaaactccatctcaaaaaaataaataaatatataaaactttaggtataataaaatgttattaattgaactttcctttcacataggaaaagttgttagcatttgctaagttgtacctttccttgatatttccacattaatatttctcttttctaggagtctctacgagaatatatggcatgttcaactcctttacactgttttttaaacatgtgttgcatgyatgttatgctttcaatattaaaaaaaacaaactgttttggagcaggag

SEQ ID NO: 561766 - DNA, 519 bp, Homo sapiens
cgcctgtaatcccagcactttgggaggccgaggcaggctgatcacctgaggtaaggagttcgacaccagcctggccaacatggtgaagccctgtctctagaaaaatacgaaaattagctgggcgtgttggtgtgctcctgcaatcccagctactcgggaggctgaggcaggagaatcgcttgatcccaggaggcagaggttgcagtgagctgagaccaagccattgcactccagcatgggcaacaagattgaaactccatctcaaaaaaataaataaatatataaaactttaggtataataaaatgttattaattgaactttcctttcacataggaaaagttgttagcatttgctaagttgtacctttccttgatatttccacattaatatttctcttttctaggagtctctacgagaatatatggcatgttcaactcctttacactgttttttaaacatgtgttgcatgcatgttmtgctttcaatattaaaaaaaacaaactgttttggagcaggag

SEQ ID NO: 561767 - DNA, 622 bp, Homo sapiens
actacctgggcttccacgagctatatacaggtttctatcctactttctttctctcttacctcatttctttagacttcctatcatgaggttattgacycatgtaggattttgaaacacatacctggaatctagggacacacacacacacatatacacaccacacacacctcacatggcattgcaggaaaaaatgaactaaaagtgtttgctttcaaaatcagtgataaaattgagttcttaatatacaatgttatagagaggtactgtgtttcataaagacaagaagaataataaaataaatttgacaaaacaatagtcaaaacactaaagctagcggagtatacaaatagaaatagaaacagttgaaaatgtatgagaagacagtcaacctcactaatttctattgaaatgaaataatatgaagagtttgttttgactaccataccggtcaatatgaaaatgttaaattgtcagatatatttctgcctagcaaaccatcccaaaacatggtgacttaaaacaacaactacttatttttttctcatgtctctacttcagagatttgtgcaatcactttttcactccgtgtgccactggtaatcctggctggggccgctcacac

SEQ ID NO: 561768 - DNA, 622 bp, Homo sapiens
actacctgggcttccacgagctatatacaggtttctatcctactttctttctctcttacctcatttctttagacttcctatcatgaggttattgacccatgtaggattttgaaacacatacctggaatctagggacacacacacacacatatacacaccacacacacctcacatggcattgcaggaaaaaatgaactaaaagtgtttgctttcaaaatcagtgataaaattgagttcttaatatacaatgttatagagaggtactgtgtttcataaagacaagaagaataataaaataaatttgacaaaacaatagtcaaaacactaaagctagcrgagtatacaaatagaaatagaaacagttgaaaatgtatgagaagacagtcaacctcactaatttctattgaaatgaaataatatgaagagtttgttttgactaccataccggtcaatatgaaaatgttaaattgtcagatatatttctgcctagcaaaccatcccaaaacatggtgacttaaaacaacaactacttatttttttctcatgtctctacttcagagatttgtgcaatcactttttcactccgtgtgccactggtaatcctggctggggccgctcacac

SEQ ID NO: 561769 - DNA, 589 bp, Homo sapiens
tgaacccgggaggcggagcttgcagtgtgtcgagatcacaccactgcactccagtctgggcgacagagctaggctccatctcaaaaaaaatgaaatgaagtgaaataaaataaaataaaacaatgaccttctatgggcttaatgtattgcacactagtaagtcctttactatttgatctcttgcattactttgcaatgcagtttacccactctgttaaaataaaaacaaaacaaaatatagaatcccttttccaaccctagctaggatgtattactcctacctgagtttctaactaccttctccttatggcttcttgctgttgtttgagacatttcttcctaacayagcatcttgagtgctgatgttttccagagtttcatgtttattccttcctttttatcattcagtaaactacatggttaatttactaattaccatgacctcaatttccacaaatgtgaacattttgccaagtcttcaatagttacgtatggccaattcatacaatgtaaatgtgtcagagataactaactggtgggtgacactcaacattcaattcactcattccaaaggtcttattatgccttc

SEQ ID NO: 561770 - DNA, 597 bp, Homo sapiens
tgtgaatttaaagtatattagcttaatcaaagagtaaatattatgtttctatatcatggtttaatttttcgttagttatcatttataggtctggggtaaaaataaagtatatttaggctagtcatgatggctcacacctgtaatcccagcactttgagaggccaaggtaggaggatggcttaagcacagaagttcgagaccagcctgggaaacatagctagaccctgtatctacaaaaaattctaaaaatacaaaattatcccaggtgtggtggcatgagactgtagtcccagctactggagaggctgaggtgggaggatcacttgatcccaggagttcgatgctgcagtaagctgtgatcacaccactgcactccagcccgggcaacagggcaagaccccatctcaaaaacaaaaagtatattttataattctattgaagacattttggtaagtagaaaaaccatattttcttgtttgctttacacccttccaggtatctattccgaacttcttatgcttattttctgcaatcatgtggttagtaacttcctgattcctcccacccccayatctaaactcaactgatgctggttat

SEQ ID NO: 561771 - DNA, 417 bp, Homo sapiens
tcatcttgtcaaattctctttgggattgtacctgtaatagcattggttctatagattaatttaaggggaactgacatctttacacttttagctaacaatgaatatggtatatcttctcatttacttacttttctttttttttaaracaaggtcttgctctgttgcccaggctggagtacagtggtatgagctcagctcactgcagcctcaacctcccaggctcaaatgatccttccacctcagcttcccaactagctgggaccacaggcacatgccttcatgcttggctgattttgtttattttttgtagaagcagggtctcactatgttgccacagctggtcttgaactcctgggctcaagaaatcctcctgcctcagcctcccaaactgctgggattacaggtgtgagccaccgc

SEQ ID NO: 561772 - DNA, 394 bp, Homo sapiens
caaaacaaacatgacaaggaattctgaggtcaggggacaaggaaccacaagttccctagtgggagactgaggaggcagtgtccttcctgccattggtctactggctaagaaccttcctcagcctgacctttscacattgcactttcagctctgtttgcaattttcctcctttagtgctgagggaatcccagtgtttgatcctgaaatctataggttcctaatgggtggttaaaaaaaacctcagcgagagaagcagaaaatgtttcctcttcctgaaaaactgtagaaaggcaggcaccattctgggtgaggacatggtccttgcaaatgtcttttttatgttttttattttttttattttgagatgaagttttgctcttgttgcccagactgg

SEQ ID NO: 561773 - DNA, 391 bp, Homo sapiens
gagatcattgcactccagtctgggcaacaagagcaaaacttcatctcaaaaaaaaaaaaaaacacacaaagacatttgcaaggaccatgtcctcacccagaatggtgcctgcctttctacagtttttcaggaagacgaaacattttctgcttctctcgctgaggttttctttaaccacmcattaggaacctatagatttcaggatggaacactgggattccctcagcactaaaggaggaaaattgcaaacagagctgaaagtgcaatgtgcaaaggtcaggctgaggaaggttcttagccagtagaccaagggcaggaaggacactgcctcctcagtctcccactttgtgattcttgtcccctgacctcagaattccttgtcatgtttgtt

SEQ ID NO: 561774 - DNA, 394 bp, Homo sapiens
caaaacaaacatgacaaggaattctgaggtcaggggacaaggaaccacaagttccctagtgggagactgaggaggcagtgtccttcctgccattggtctactggctaagaaccttcctcagcctgacctttccacattgcactttcagctctgtttgcaattttcctcctttagtgctgagggaatcccagtgtttgatcctgaaatctataggttcctaatgggtggttaaaaaaaacctcagcgagagaagcagaaaatgtttcctcttcctgaaaaactgtagaaaggcaggcaccattctgggtgaggacatggtccttgcaaatgtcttttttatgttttttwttttttttattttgagatgaagttttgctcttgttgcccagactgg

SEQ ID NO: 561775 - DNA, 394 bp, Homo sapiens
caaaacaaacatgacaaggaattctgaggtcaggggacaaggaaccacaagttccctagtgggagactgaggaggcagtgtccttcctgccattggtctactggctaagaaccttcctcagcctgacctttccacattgcactttcagctctgtttgcaattttcctcctttagtgctgagggaatcccagtgtttgatcctgaaatctataggttcctaatgggtggttaaaaaaaacctcagcgagagaagcagaaaatgtttcctcttcctgaaaaactgtagaaaggcaggcaccattctgggtgaggacatggtccttgcaaatgtcttttttatgttttttattttttttwttttgagatgaagttttgctcttgttgcccagactgg

SEQ ID NO: 561776 - DNA, 548 bp, Homo sapiens
ggtaaggcagggctgatgggttgggacccatccatctcagcctctgccaccasgcacccctggcacagagaaccttttaacactgagtccgtttactgtcactttgaattgtcacagccccacagagaccagcccatagctggacacaccctatctccctaaaataaccagttcaagagcaccagacagtggaagtgctcgtgtcctaagggcttcctgcgggccttcagcaggacaaggttgtggccactagtcctaggagcacagtgccctgagcctaggcaaagcaagcaggcattactcatctaaaacagcatcaggaaagacaccgagaaaccaggatgacttgattttgtatttgtgcagcagcaaactcttgagggacgctagaggtagtagatgtgtctgtgtgactcccaaatatacagcaggagccgatttggcagagagaccccttgccaatgccatgttcagagtggaggtcgacttgagagccactgatctgagcagcatgaagtcccctgacattagcagcatgaagtcccctg

SEQ ID NO: 561777 - DNA, 548 bp, Homo sapiens
ggtaaggcagggctgatgggttgggacccatccatctcagcctctgccaccacgcacccctggcacagagaaccttttaacactgagtccgtttactgtcactttgaattgtcacagccccacagagaccagcccatagctggacacaccctatctccctaaaataaccagttcaagagcaccagacagtggaagtgctcgtgtccyaagggcttcctgcgggccttcagcaggacaaggttgtggccactagtcctaggagcacagtgccctgagcctaggcaaagcaagcaggcattactcatctaaaacagcatcaggaaagacaccgagaaaccaggatgacttgattttgtatttgtgcagcagcaaactcttgagggacgctagaggtagtagatgtgtctgtgtgactcccaaatatacagcaggagccgatttggcagagagaccccttgccaatgccatgttcagagtggaggtcgacttgagagccactgatctgagcagcatgaagtcccctgacattagcagcatgaagtcccctg

SEQ ID NO: 561778 - DNA, 548 bp, Homo sapiens
ggtaaggcagggctgatgggttgggacccatccatctcagcctctgccaccacgcacccctggcacagagaaccttttaacactgagtccgtttactgtcactttgaattgtcacagccccacagagaccagcccatagctggacacaccctatctccctaaaataaccagttcaagagcaccagacagtggaagtgctcgtgtcctaagggcttcctgcgggccttcagcaggacaaggttgtggccactagtcctaggagcacagtgccctgagcctaggcaaagcaagcaggcattactcatctaaaacagcatcaggaaagacaccgagaaaccaggaygacttgattttgtatttgtgcagcagcaaactcttgagggacgctagaggtagtagatgtgtctgtgtgactcccaaatatacagcaggagccgatttggcagagagaccccttgccaatgccatgttcagagtggaggtcgacttgagagccactgatctgagcagcatgaagtcccctgacattagcagcatgaagtcccctg

SEQ ID NO: 561779 - DNA, 588 bp, Homo sapiens
gtgataggtgcagaaaactgcaatgtcagaaaaaaaactgaatcatactaattagaaaaatagatgagtgaggcagaaaactaacaaggaaattctgacttaaattcaacacttcaccaattggacctaataaaaattgacaaaatgttccacccaacaaccacagaagatacattcttttcatttgcacgtggcatatactctaagatcaatcacatatttggccataaagcaagtctcaataactttttttaatgaagaaacaacaccaagcatatttttggaccayggagaataaaaatagaaggcaatatcaagaagatacttcaaaatcacacaataaaatggaaactaaagaacttgtttcttaataacttttgagttaacaaaattaaagcagaaatcaaataattatttaaaataaatgaaaacagagacataatttaccaaaatctctggaatgtagaaaaagcagtattaagaagaaagtttatagtgcttaagtggtttgcctacctcaaaaagctagaatgataccaaattatcaatctaacatcacacctaaaggacctaaaaaaacaagaacaa

SEQ ID NO: 561780 - DNA, 601 bp, Homo sapiens
gttgcattcccaccagcagtgtatcactgttgtcttttcaccgcgtccacaccaacatctgttgttttttgatttctaatagtggccattctggctgcagtgaggtgatatctcactgtggttttattgtacatttccctgatgattagagatatttagcatgtttttatatgcttgtttaccgtttgtacctcttcttttgagaaatgtctattcatgtaatttggccactttccaatggaattatttgcgtttttcctgttgatttgtttgagtttcttgtaggttatagatattagtcgtttgttagcgtcataattttcaaaattttcccattgtataagttgttgtttgatgattatttcttttgctgtgctgaagctttttagtttaattaggtcttatttatttatttwcatttttgttggatttgcttttagggtcttcctcataaatcctttgcctaggccaatgttttcaggtcttaggtttaggcctttcatccatcttgaattaatttttgtatatggtgagagatagagatccagtttcattcttccacatgtggctatctttttttcccagcaccatttattgaata

SEQ ID NO: 561781 - DNA, 546 bp, Homo sapiens
cattgagcctaagagaagcaagttgcccaagaacaaatagctgttcattatggagctaggacttatgcagagttgggacactttctattatgtcatgctaatgctagctaatttactgggtcacagtgcccttgatttatgagtatttcaccttacatttttttcgtctttaattagaagcttaaagagaagtttgtagaatgtactcataagtggatgggataatactattaagttctgatattctgatattgtttgaaatactcttaataattctacatttggtaagtttttttatatcagtattaaaatagtaatttggtttattacatttttatacatagaatttgccagttactttctgactacaaagaaaaacagatgctaaaaatctcttctgaaaacagcaatccaggtaagacttgtgatagtgaattactttagtcagttgtccccaacctttttgacaccagggaccggttttgtggaagacaatttttccatgggctgggggarggtggggatggtttcaggattattcaatca

SEQ ID NO: 561782 - DNA, 556 bp, Homo sapiens
  misc_feature 518, 519, 520, 521, 522, 523, 524, 525, 526, 527, 528, 529,530, 531, 532, 533, 534, 535, 536, 537, 538, 539, 540, 541,542, 543, 544, 545, 546, 547, 548, 549, 550, 551, 552, 553,554, 555, 556: n = A,T,C or G
ctatccagcgcatttaaattcgcttttttcttgattaaaaatttcaccacttgctgtttttgctcatgtacaccaagtagcagtggtgtgaggccatgctgtaaaacaatataaagcaaaaacctatgtaattcaaaaaagtacatattcctcaaccgaagtggaaactttatataagatcttatggacttacacgcatagaagtaaataaaatgtagtcrcttccttctcactcttctgtgctttcccacacgctgctccttcccttggaaacaccccttctctgcctcaccacagtacctctaatcatctcaaaaactcactttaaacatttactgcttccaaggctctttgcttctaaaccagcatttggcatggtgttattggatgataatatttttcccatctaaacaaaaagcttcttgagggcaggggctgtatcttttgtctctatatcctcaaccctaagacaaattgtgtataaagcagaatctgcatgtaaaatatttctttagttnnnnnnnnnnnnnnnnnnnnnnnnnnnnnnnnnnnnnnn

SEQ ID NO: 561783 - DNA, 556 bp, Homo sapiens
tagtgttccaaaatcttcctcacttgaaaagagtttacctcatgaaaccctaactagtgagcccctacagtgcactgaagtgcttttttaaaagattcctaactggattgtaggcaccctttaaactattaggagccgaaatcaacaccaaacagaaagaaatgcaaattctcacattttaattgaaattatatactgtcatatgatagtgttatgtatccagattatctgcgtaagtccagttctaatatattctaatgtgtactaatgacagcagataraattttttaatctgtactgattttctgcaactgaaataaattagaatgttattgtgtttgtgcactaacaccaaaggtcccattctgcaagatatggttcttgtaataggcagttgggttgcttttatgacctggttccctccctgaacagaaacactgaggtcaacgagagaccacaaggcaggatatgtccttaaccttggtatcagtgactgacaatataaaactgtggattttcaatcacaggccatgattactctttaaccatgaatcca

SEQ ID NO: 561784 - DNA, 264 bp, Homo sapiens
gggttcaaataatgtggcagaaagagatcagtgtttgtttcttcttctttgctaccagatctgtactgtgaggcacctttatatcctgtrtagaaccttgggcagtagaaagtcccatatgaaccttcccctgagcagtggctcccagctgtggttggccccttgagtgatctgatttacatgataatgaaaatcgtggaagctacttccatctctagctcaagattttaaaatattttcaaactctagctcacaggaagccat

SEQ ID NO: 561785 - DNA, 264 bp, Homo sapiens
gggttcaaataatgtggcagaaagagatcagtgtttgtttcttcttctttgctaccagatctgtactgtgaggcacctttatatcctgtatagaaccttrggcagtagaaagtcccatatgaaccttcccctgagcagtggctcccagctgtggttggccccttgagtgatctgatttacatgataatgaaaatcgtggaagctacttccatctctagctcaagattttaaaatattttcaaactctagctcacaggaagccat

SEQ ID NO: 561786 - DNA, 264 bp, Homo sapiens
gggttcaaataatgtggcagaaagagatcagtgtttgtttcttcttctttgctaccagatctgtactgtgaggcacctttatatcctgtatagaaccttgggcagtagaaagtcccatatgarccttcccctgagcagtggctcccagctgtggttggccccttgagtgatctgatttacatgataatgaaaatcgtggaagctacttccatctctagctcaagattttaaaatattttcaaactctagctcacaggaagccat

SEQ ID NO: 561787 - DNA, 432 bp, Homo sapiens
gcgtggtggcatgtgcctacaatcccagctacttgggaggctgaggcaggagaatggcttgagtccgggaggtggaggatgcagtgagcagagactgcgccattgcattccagcytgggcgacagagcaagattctgtctcaaaaaaaataaaaaataaaaaagtaaaaaaaggaaattatcaatttacttttctgcatctcgtgtctgcgttagcagaatctgtctcataggagactgtggtagggagaattctaagctaaccctcaacaacccacatcctatgtaattcctccccacaagggtgggagggactgtgaatataatgggctatcagtcttgtgactgtgttaaccatatagcactttaagaaagggagattattgattaaggaagggtgatgtccttgaaagttcagaccaaatcatgggag

SEQ ID NO: 561788 - DNA, 432 bp, Homo sapiens
gcgtggtggcatgtgcctacaatcccagctacttgggaggctgaggcaggagaatggcttgagtccgggaggtggaggatgcagtgagcagagactgcgccattgcattccagcctgggcgacagagcaagattctgtctcaaaaaaaataaaaaataaaaaagtaaaaaaaggaaattatcaatttacttttctgcatctcgtgtctgcgttagcagaatctgtctcataggagactgtggtagggagaattmtaagctaaccctcaacaacccacatcctatgtaattcctccccacaagggtgggagggactgtgaatataatgggctatcagtcttgtgactgtgttaaccatatagcactttaagaaagggagattattgattaaggaagggtgatgtccttgaaagttcagaccaaatcatgggag

SEQ ID NO: 561789 - DNA, 559 bp, Homo sapiens
tttccagtggctgagcttgtggcagagccatgtagagctttttcccatttatcccattggggtagtttgccttccagtggcctggcaactacctggagaagtttccttagagctatggggaggggctggggcttgtacagcagccaacagttgagcttgccttttgtccctgtatttttctttctccttagccctgtcctccttattctgctcttggttacaaaagactgaggagactaatttgaggattttctgcagaggggccatgctttatttcacaagaaaattagaccttcctttttgagggtttgggggttgaatttgtcccagtgctttggaatgcagcctagaagtgagtttgaaggaatagatgggtccsacggaaggactggaaaatgagccactcagggctaacatctcctggggacatgaaccacacattctcttggggcatcccactgaggaaaagggtttcactcatgtctgcttagggacttgggtgcattttctttttttctttcttttttttttttgagatggagtctcgccttgtcaccca

SEQ ID NO: 561790 - DNA, 524 bp, Homo sapiens
ccgtctcttgcctgaaatatgccgagcccggtacggctctgtcgtcccacttcctgctgcggtttccacctcgagctgggctcagctaatttgttgtgacagctgtcggcagccgcccctccgccccgtgacatcccgcaggtttcagaaccgcggcgccgcgggcacagactccgggtccagagcgcgcgccctttcctctgcggccgccgtttcctgaaagggctgcgcgggtgtgaagaacttgctcaatgcgctttgtaggmtccactgttcctctttcggccgcggtgcgccgatggtccggggagcccgcttctcgccccctgccccttccttctcttcccttttctcttttcctctcctgtctctccgcccacccgccgcagccccacaggagaggggtcgcttccctggttgctctcctctcctgtcccttgtgtgtccccttgtcttccctcggtctgcagaagggacggggtggcggctggggagcgtcaggggaagagggcaagagcgtgggc

SEQ ID NO: 561791 - DNA, 433 bp, Homo sapiens
ttttcacttgttgctctcctgtttctacccaaaataattcttaaaaccacatttgtataattttctttcagataggatgaaggagtttgtgtcatgccaaagaaagctagaaaagccagtttaaaaaggcaattcacattttaaaagcatcagagagttgcagaagcagcaaggactagaagaactaaaattccagagaggagagaaccttttggaagtgagttgacggactgcagtcmcattttacctgagagcattttccagtcttgggtgcaggctgataatctgccttaggtccaagcatagggctgctgctgaggtactgggaacccaatgaaacttttgttggtcactcagggttgctgtgacaagactgtagacttgggggacattaaacatatagctgttttttacctctagacattttcagaat

SEQ ID NO: 561792 - DNA, 545 bp, Homo sapiens
aggcccatggtgtgtactacctggctactgctgcttattattcagggtcaagagctccttagtcagcatgtgatgaatcccaccaggagtgggcacttctcttcaagagtgcagggttctttatgaccaaatatgtgtctagaaatattgtccaggagccagggcttagaatgtggaccccatgactgttcccgstgccccatcctactgtggctgaactggcccccaagttgcaagacaaagtcctctttactcttccctctcctctcctcaagcagtaaggaagtagtctctcctggagctgcaagctatgctgcctgggattgggggaggggtggtgcaagcactctattaaccaccctggcaggtgtctcactagatggcatgccccccgcaagccactagctccaagtctagcacaggactaggccttgctaggaattgtcgttcctgtggcctagactgcctttcaaatttatttagaaccccagagcactttagctggtggtggcaaggcttgctgaaactcctgttccaactgctgg

SEQ ID NO: 561793 - DNA, 474 bp, Homo sapiens
gatattccttgccttcccacctctaggcttttttctaaattcacttttatatatttgaatttttgagttttaaaatagtggtttcccctataattgtctgctggattggcactttaaaaaaaaatctrtaaattaaatttggatcagcaaactatgggccaaatatccctgcttctgtaaattgttggaacaaaacttgcttattgatgtgtgtattgtctatagctgctcttgcggtaaaatactttagtagaaaaatgttcagtcaaatgatcaattcataggtaatgtgaatttgcaggtgttctttacctacatagtagagaagctttttgtctctttccgctttccatttttcctctgcagagggaattatgctttattatgcttggagtcggaaaaggaatgtgaagcccttggccttcaactgttggttaccaccgaactgtcacactgtttgtagctacttatgta

SEQ ID NO: 561794 - DNA, 541 bp, Homo sapiens
agaacaaaacaaggatgcttgctttcatcacttctattcaatatagtactggaagttctagccaaacaattaggcaagaaaaaaattaaaaacatccaatttggaaaggagtaagtaaaattacatctgtttgcacttgatcttacatatagaaaatcataaagattccacacaagcacttgatttttcaagttgcctgcttggccctcttccaagtactctactttctctaataaactctcactttycttaaaataaattctctgctgtttaaaaaaaacaaaaaagatttcacacaaaaaagtattagaatgaattcagcaaaatagcgggatacaaagttaacacaaaaatcagttgcatttttatatatactaacaatgaaccatctgaaaaggaaattatgaaaacaattccacttacaatagcatcaaaaagaataaaatacttagcaattaacttaaccaaggaggtagaagacctgtacaatgaaaactacaaaacattctgactggtgtaagatggtatctcattgtggttt

SEQ ID NO: 561795 - DNA, 476 bp, Homo sapiens
acctaattcctttcaacaaaattaattctattaattttaagaaaagtggaaagaatcggtttacctgattttaagatgtattatacaggtacagtaatcaaacaggatatcaatggaagaatagaaaagtagatcaatggacacaatagaaaacctagaaatagacctacgtaaatatgcacaaccaattactgacaaaggtacaaagggattcaatgaaaggatcatcttttcaacaaatggtgttgaagcaaccgaacatctgtagacaataaaatgaaccttgagctcagtctcacactttacacaaaaattaaaatggatcacgggcttaaattcaagctatgaaacttttatttaaaagcataggagctcagctgcagtggtgcatgcctgtaatctcagcactttgggaggctgaggcaggcggatcacctgggatcgggagttcgaratcagcctgaccaagatggtga

SEQ ID NO: 561796 - DNA, 583 bp, Homo sapiens
taactaaatgaggaaacagcctccagcatgatattatgaagccatggcaaatcagtttatcaaggaattccacatgaaacaggaaagctcacatctattgctaagtgaaaaacaaaaaacaaaaaaacaaaaaaaaaacctaattaaggattttgaaaaagaaaagtatgtctgctcaaagaagaaggaggaaggaaaacacatggtcataacatatatgtagctgggagaatgatgaatgattttttttttcctttttaaaaaatacattttgtgccaggcacagtggttcacrcctgcaatttcagcattttgggaggctgaggcaggcagatcactcgagtccaggaattcaagaccagcctgggcaacacagtgaaagctcatctctacaaaaaattagctaggcgtggtggtgggagcctttagtcccagctactcgggaggctgatgtgagagggtcacctgagcccaggaggtggaggttgcagtgagtcatgggttgcgccactgcgctccagcctgggtgacagagtgagaccctgtctcaaaaagtaaaaccaaaacaaacattttgtatttt

SEQ ID NO: 561797 - DNA, 583 bp, Homo sapiens
taactaaatgaggaaacagcctccagcatgatattatgaagccatggcaaatcagtttatcaaggaattccacatgaaacaggaaagctcacatctattgctaagtgaaaaacaaaaaacaaaaaaacaaaaaaaaaacctaattaaggattttgaaaaagaaaagtatgtctgctcaaagaagaaggaggaaggaaaacacatggtcataacatatatgtagctgggagaatgatgaatgattttttttttcctttttaaaaaatacattttgtgccaggcacagtggttcacacctgcaatttcagcattttgggaggctgaggcaggcagatcactcgagtccaggaattcaagaccagcctgggcaacacagtgaaagctcatctctacaaaaaattagctaggcgtggtggtgggagcctttagtcccagctactcgggaggctgatgtgrgagggtcacctgagcccaggaggtggaggttgcagtgagtcatgggttgcgccactgcgctccagcctgggtgacagagtgagaccctgtctcaaaaagtaaaaccaaaacaaacattttgtatttt

SEQ ID NO: 561798 - DNA, 517 bp, Homo sapiens
tgagcaaactatgtttgtatagttttatttattttattttattttatttatgcgtgtatgtgttaagtacctgcaacattttggctatcattcacaatgtgaagacacacaagaatttgccttctgggtgctcacattctgtatagtcaagactagagaatattcagcatttcttggtacttgtggaaatttggagcagaaaagacaggaagctataacaaagtggagagaagagcagatgggggattctggaggtgtttagaactttcccatttcrccttccacttctttgattttttttttctttttaccccctcctcctctttcccaaatccttgtaaggtgctccttagtaaaggctacagagctgactaagcctaagtattttcttgttccttatgagcgtcagtttaggagttagattggaatctttatttggttgtcgattttatccactgaacagtgtgtgtttcctgaccatctgtgggatgtctaagtctctgttctccagaagctt

SEQ ID NO: 561799 - DNA, 569 bp, Homo sapiens
tgggcagtaggaatttttcagctccattagcatctcatgggaccaccgtcatatgcaacacttgacggtactatacctttgtccctcagtttctatggaggattggttccagggcccctcaaacccaaatccagggatatraaatctggggatgctccagttccttgtgtaaaatagtgcagtatttgcatataccctgtgcacatcctcctgtatactttaaatcatctctagattacttacaatacctaacacaatgcctacacatcatttcattctcctgaattcaacgcagtgctgggcatccggcaaatttaagttttgccttttgaaacttggtggaatgtttttccagatattctcaatcctcagttggttgaatccacgaatgggaaacccatcaagggcctactgtaccacagtttgtttaaccattcaccagtttaaggatatgtgagttgtatccaattttggctattaagaatacagttactatgagcatgagtggtgttttgtgtgagtacaattgctcagtgatgtggcatgttaagtatgataagaaactgcca

SEQ ID NO: 561800 - DNA, 506 bp, Homo sapiens
gaacagcacaggaaagacttgcccgctcccactgggtccctcccacaacatatgggaattatgagagctacaattcaagatgagatttgagtggrgacacagccaaaccatatcactctgtatgacttaggatgctttggatagcaataagtagaaaatcctattgaatatgaattaaactccaagagtagttactttttatttaagaagaattatgagttaattcggcaactcgatgatatgattcaagagccaaactttttctgttatcctagctgccatcatctgcgtagatcacattctctttcacagctacaaagcagctgccactgctccaggcatcgcactatcatacaacagcatcttgagcaggaagtagtagaggacagaggcagtttaacctcggtcacccccagcacacatcaccttaagtttcattggccaaaactgggtcacatgatcatgtccagaccagtgactcacaaaggtgaatgagattgctatga

SEQ ID NO: 561801 - DNA, 538 bp, Homo sapiens
tcatgagaacagcacaggaaagacttgcccgctcccactgggtccctcccacaacatatgggaattatgagagctacaattcaagatgagatttgagtggagacacagccaaaccatatcactctgtatgacttaggatgctttggatagcaataagtagaaaatcctattgaatatgaattaaactccaagagtagttactttttatttaagaagaattatgagttaattcggcaactcgatgatatgattcaagagccaaactttttctgttatcctagctgccatcatctgsgtagatcacattctctttcacagctacaaagcagctgccactgctccaggcatcgcactatcatacaacagcatcttgagcaggaagtagtagaggacagaggcagtttaacctcggtcacccccagcacacatcaccttaagtttcattggccaaaactgggtcacatgatcatgtccagaccagtgactcacaaaggtgaatgagattgctatgattggcttagatctgtcttcagtcatt

SEQ ID NO: 561802 - DNA, 538 bp, Homo sapiens
tcatgagaacagcacaggaaagacttgcccgctcccactgggtccctcccacaacatatgggaattatgagagctacaattcaagatgagatttgagtggagacacagccaaaccatatcactctgtatgacttaggatgctttggatagcaataagtagaaaatcctattgaatatgaattaaactccaagagtagttactttttatttaagaagaattatgagttaattcggcaactcgatgatatgattcaagagccaaactttttctgttatcctagctgccatcatctgcgtagatcacattctctttcacagctacaaagcagctgccactgctccaggcatcgcactatcatacaacagcatcttgagcaggaagtagtagaggacagaggcagtttaacctcrgtcacccccagcacacatcaccttaagtttcattggccaaaactgggtcacatgatcatgtccagaccagtgactcacaaaggtgaatgagattgctatgattggcttagatctgtcttcagtcatt

SEQ ID NO: 561803 - DNA, 506 bp, Homo sapiens
gaacagcacaggaaagacttgcccgctcccactgggtccctcccacaacatatgggaattatgagagctacaattcaagatgagatttgagtggagacacagccaaaccatatcactctgtatgacttaggatgctttggatagcaataagtagaaaatcctattgaatatgaattaaactccaagagtagttactttttatttaagaagaattatgagttaattcggcaactcgatgatatgattcaagagccaaactttttctgttatcctagctgccatcatctgcgtagatcacattctctttcacagctacaaagcagctgccactgctccaggcatcgcactatcatacaacagcatcttgagcaggaagtagtagaggacagaggcagtttaacctcggtcacccccagcacacatcaccttaartttcattggccaaaactgggtcacatgatcatgtccagaccagtgactcacaaaggtgaatgagattgctatga

SEQ ID NO: 561804 - DNA, 548 bp, Homo sapiens
tgcaataaactctgcccactgaggaagggaagactatgataatcacagtgacataggatataccatagcctgtgaaggggttaaggaggactccctgttctcaagacccagttttgctctctgggagtacctgtcttttctgtttacctgcatggttttactcaggtggacaacagggtgtgcacctctcctaaaaaagktttcggccatgcatgtctcttgattccagttcccagggttaaacagttgcaaaatcacatgggataaggagactatcccatgtgtgattcatggaatagccatgactcacatgataaggtggataatttgatgtcttaaaagcatattggatactacacagggttcagatcaggacaaaacagcataaacccatttctccctgcccctgcccacccttcacaactataaaccctggaaatcataccaaagagccaaagcagaactctgaagggtgaaagaggaatttgagctggatagagaccttgggaatgaagaaacagcataggagtagtcttacaacccctcct

SEQ ID NO: 561805 - DNA, 548 bp, Homo sapiens
tgcaataaactctgcccactgaggaagggaagactatgataatcacagtgacataggatataccatagcctgtgaaggggttaaggaggactccctgttctcaagacccagttttgctctctgggagtacctgtcttttctgtttacctgcatggttttactcaggtggacaacagggtgtgcacctctcctaaaaaagttttcggccatgcatgtctcttgattccagttcccagggttaaacagttgcaaaatcacatgggataaggagactatcccatgtgtgattcatggaatagccatgactcacatgataaggtggataatttgatgtcttaaaagcatattggatactacacagggttcagatcaggacaaaacagcataaacccatttctccctgcccctgcccacccwtcacaactataaaccctggaaatcataccaaagagccaaagcagaactctgaagggtgaaagaggaatttgagctggatagagaccttgggaatgaagaaacagcataggagtagtcttacaacccctcct

SEQ ID NO: 561806 - DNA, 575 bp, Homo sapiens
agacaaaatgtccaagacacaataaaatatcaccagtcaaaaaaaaaaaaaaaaacacacaagaaaatcacaacttgaataagaaaaaaaaaaacttacaccatcacggtaatgaaacaaatgatggaattttctgtaaagaatttaaaacagtcattattaaaatgcttcaacagtcaggmgcagtggctcactcctgtaatcctagcactttggaagcctgaggtgagtggatcacttgaggtcaggagttcgaaaccagcctggctaacatggtgaaaccctgtctgtactaaaaatacaaaaaaattagcccagcacagtggcaggcacctgcaatcccagctacttaggaggctgaaacagtaaaatcacttgaacctgggagacagaggttgcagtgaaccaaggccgcaccactgcactccagcctgggtgagacagcaagactccatctccaaaaaaaaaaaaaaaaaagcttcaacattcaattacaaaatattttgaaataaatgaaaaaataggaaagaaatagatgttataaaaggccaccaaagggaatttatagatctgaa

SEQ ID NO: 561807 - DNA, 575 bp, Homo sapiens
agacaaaatgtccaagacacaataaaatatcaccagtcaaaaaaaaaaaaaaaaacacacaagaaaatcacaacttgaataagaaaaaaaaaaacttacaccatcacggtaatgaaacaaatgatggaattttctgtaaagaatttaaaacagtcattattaaaatgcttcaacagtcaggcgcagtggctcactcctgtaatcctagcactttggaagcctgaggtgagtggatcacttgaggtcaggagttcgaaaccagcctggctaacatggtgaaaccctgtctgtactaaaaatacaaaaaaattagcccagcacrgtggcaggcacctgcaatcccagctacttaggaggctgaaacagtaaaatcacttgaacctgggagacagaggttgcagtgaaccaaggccgcaccactgcactccagcctgggtgagacagcaagactccatctccaaaaaaaaaaaaaaaaaagcttcaacattcaattacaaaatattttgaaataaatgaaaaaataggaaagaaatagatgttataaaaggccaccaaagggaatttatagatctgaa

SEQ ID NO: 561808 - DNA, 608 bp, Homo sapiens
aatttgttaccacaaaagaatataaagcagcatcaacaaagggggaaaagctcataaaygaagttcagggaagaccaggtggaagcctccaggagtctctttccattgagcttcacgagactcacttaattctcccaatacaagttgtgacatgtgcaaagtgtttccaactggggaagttcattagagactgattcatagcttccaggttcttattgggaactaatcctacaggcagcctctgcctggccctacccaaatttcaaaaggaaagtgaatgcttaggataaacaggctgttgatacaaacagttcaggtgtagggaaccgctttctcatatgtggaaacagtgagagttctgaaatctaagtttctagggtcaacctggtaaacaggcctttcaaaggatagcaatctcagacctcctccttttgtgcagaaaacaataaaataaatcaatgaaacaaaaagcaaattatttgcaaaacatcaagaaaaaatttaaactttttgccaggctgaaaaaatggaaaagctagaagacacgaatgatccatatcaggaatgaaatgggatatcattacataccctgcatcagttaaaaggat

SEQ ID NO: 561809 - DNA, 608 bp, Homo sapiens
aatttgttaccacaaaagaatataaagcagcatcaacaaagggggaaaagctcataaatgaagttcagggaagaccaggtggaagcctccaggagtctctttccattgagcttcacgagactcacttaattctcccaatacaagttgtgacatgtgcaaagtgtttccaactggggaagttcattagagactgattcatagcttccaggttcttattgggaactaatcctacaggcagcctctgcctggccctacccaaatttcaaaaggaaagtgaatgcttaggataaacaggctgttgatacaaacagttcaggygtagggaaccgctttctcatatgtggaaacagtgagagttctgaaatctaagtttctagggtcaacctggtaaacaggcctttcaaaggatagcaatctcagacctcctccttttgtgcagaaaacaataaaataaatcaatgaaacaaaaagcaaattatttgcaaaacatcaagaaaaaatttaaactttttgccaggctgaaaaaatggaaaagctagaagacacgaatgatccatatcaggaatgaaatgggatatcattacataccctgcatcagttaaaaggat

SEQ ID NO: 561810 - DNA, 389 bp, Homo sapiens
taatgacactggctttcccagatgcccacaggagtgaagccygtgctttcaacttggccttcatcacacctgtggtgcggagagtatggcagctgccactctcgtgttcaacccaaccagacccatggaggctctgcctgaaaatacaggtgttatctgctgagcagcaaacgttaactgatgagagacaggagatggaaagaggtaacagataaagcccttttcctctccttgcagcagacctttctgagatgtggtgctccatagaggttctccagtgccatccagcatggccaaaaacccactgtgcttgcagaagtggcatagcagctggagctgggaatacggttccccaggtttgtgttcctcctcccctccctgttcccacc

SEQ ID NO: 561811 - DNA, 442 bp, Homo sapiens
aatcatgcatgcaaatgtatttgcccctactgtctctatcactaggtgctttgcatgaagaactaaataaactacaagactccagggactgtcccatatgctacctggtcattcatcagatccacgatgtgctatgggaggtatacatagacatgaggctgcggtgctgtgatggctaacgttatgtgtcgcctcagctaggctatggcgcccagctgtttggtcaaacaccagtctagatgttgccatgaaggtatttgtcaggattcaacatataaatcaaagtgatcaacattgatttagcaatgttgtgatgtgatcaacgtattartcaatagactttgagtaaagcagatcaccctctaaaatgtgggtgggccttgtccaatcaggtgaaggccataagagcaaagactgaggtttcccgaagaagaaggaattc

SEQ ID NO: 561812 - DNA, 614 bp, Homo sapiens
ttttacttcaatttaagagaagaaaatgaagtggtatttaaatgaaaagaattgctgatcttcaaataaatgttgctttgccacaaaagatattattttgtaaaagagcccctgcaaggctaacaakatatgaaaaacacgaagaagttggagccttcatgtttttaactcacgtctcaatttcagaaggtcttaattatactcgattataaaagatgaggaaatcagcattcttaaactttctcttactacttctcttgatttttcttggtgatatatataatactgacttttccaaggttaggagcatttgcattctattttgtaacaattattcccactggttttatcttttttctatatttaagtggatttgatactcatgagtctttttttataacagcttttactctcctggcagggtttttattttactttttttgtttgcttggctgcatttcatccccaagtcattctccctctcccctctcccctctaaaggtcccgtagacgtattcccgagttcccgccagccgtgacagtctgccacctatataatcaaggggaaacttggctgagtaaacagtttttttttctttttcttagaactttta

SEQ ID NO: 561813 - DNA, 418 bp, Homo sapiens
ctccaggcatcagtgccattaactcagaccagcctctctccacaggccacctgtgtaaccacttaccttcttcctgaaacacctcccatccattcccaccacagtcggtgatgccggcaccactggcttctagaggcacttctgttcccatccactctccacgtggcttctagaaaatggacatgtgaccttttcaatgcctagttaagactctccctgggctcacmtggcttgcaggatcagctcccagctcctgcgagttccctgtcccgtacctccggtttctagccctgtgtcgggggcctgtgccaggagggctcagtgaatgttttctgtgtgcaccagtagctgagcggggtctgtgggcactctaaatgcatgtctgttgatgtaaacactcatagccttcctgtggcct

SEQ ID NO: 561814 - DNA, 602 bp, Homo sapiens
gttagcactccgtcgcagcctccaacacactccagcctaactctcccaccctccgtcaccgaccagccatcccccaccgtgcgaaactctggcacccctaaacctacctgctgctccacaccttcagcctggagcacggctcacccttctccccactgggctgagccagtgggtcgggaggatggaaccccaaccacaggaggggctttgcgggtggctcccccacacgccaccccrttagctggaataagctcgtacggtccagatgcttcagaagatatcagcgatagccaggccccacaggctggtccaccttcccccacccctccgcccccagactcctagcagtagtcccccacaaagtagggagcagatcccagtgggaactgtggagagatctccacccgcactgtggagaacggcagcagggacacctgcagggtcgcgagcactgttgtcggcatccacactgctcacacgatttgaaattcatactttgcctttatattttccttttgaaaatatgtgtgtcatatacctgcttataaaaatacaaacaacacaaatatatgcacaaaaataagaaagcttttccttttcct

SEQ ID NO: 561815 - DNA, 602 bp, Homo sapiens
gttagcactccgtcgcagcctccaacacactccagcctaactctcccaccctccgtcaccgaccagccatcccccaccgtgcgaaactctggcacccctaaacctacctgctgctccacaccttcagcctggagcacggctcacccttctccccactgggctgagccagtgggtcgggaggatggaaccccaaccacaggaggggctttgcgggtggctcccccacacgccaccccattagctggaataagctcgtacggtccagatgcttcagaagatatcagygatagccaggccccacaggctggtccaccttcccccacccctccgcccccagactcctagcagtagtcccccacaaagtagggagcagatcccagtgggaactgtggagagatctccacccgcactgtggagaacggcagcagggacacctgcagggtcgcgagcactgttgtcggcatccacactgctcacacgatttgaaattcatactttgcctttatattttccttttgaaaatatgtgtgtcatatacctgcttataaaaatacaaacaacacaaatatatgcacaaaaataagaaagcttttccttttcct

SEQ ID NO: 561816 - DNA, 597 bp, Homo sapiens
gaattcaggcaagccaccagtaagtttctaaggctatctatggggggtgagattttttttactcagaaacatctatctgctatctcctgggtttcacatccccatagaaaagtgagggtaagaagaaatggaagagaaaaaaaaaactaacaaagaaaaagtcttgtttcttgcctgcctccctcccacccagaggcgatttcagcttctgatgttgttcaggaaagttccggaaggaggggaagctggtcagcaacagtccactcacctgcccaggacccktcaggcactgcacagcctgcttgtgggtgaggccgcacagaatcactccatccacctgcaggagtcggtcacctgggaaagggatagatgtcatgtcatgacctggtgcttgaggctgcaggaggttcccttccaggaggcccctgcccggcacccctccatgcagcctggagaagtgggaaaggaagctgaggtgccaggtgtccccctggagtcagcaggaatcctgcctctctgagcagtctcactcccttcttctcaggcacatcacagatcagggatataaaagcctttctattattggctcacagaatg

SEQ ID NO: 561817 - DNA, 630 bp, Homo sapiens
tttatgcagtttttcgtatatttgatttgtaagctgttatctcttgtattttgagaagaaactctttgtgataccagtgttttaaaattgactgatacttagtttatagcctaacacatgcaaaatattccatgtgttcttaaatatgtggtctgttgttgcacagaggattctgtatgtatctgttagatatactttgtttattatattgttcaagtcctcccttttcttacttctaattgttctatccactaatgaaaatgggatattgaaatcttcaattattattgtaaaactgtttctctcttcatttctgccaatttttgctttgtgtattttgattgttactaggcgtgtaaatgtttataactgttatatgttcttgctgtattgaaccttttatgatakataatgtccttctttgtcatttttaactttttaaaattaaaatcgattttatctgatattaatatagctattcatgctctgttttggttcctgtttgcatggaatatttcttttacttttaacctattcgtgtctttggatctaaagtgagtcctttgtagacagtgtatagttggatcatgtttttattttttaatccattctgccaatctttctttcaat

SEQ ID NO: 561818 - DNA, 575 bp, Homo sapiens
atctggggctgctgtgatcagtggccagttcccagtgctggagaggagaaatttccagtattaaactaaatcaatcatatgcttcactgataacacagtacatagacattattcattaaatgctagttatcacattattaatagttataattatttttaggcatgggatttggtaagtcactaataagttcttgtagatctttgagattctatgattcaatagatagttaagattattatctgtcttacccttatattcatatattatctactctgttctagaaatattctagatagatttttattttaatatttatttttactagtagcaacatttattataaaatagcacatccgttatttgattaataataaagtctttaccccaagtttatagatatgtaaattgatgatacctggtaaaattcaaatgccttcccctcccaaaaaagcaaacaacaacaaaccaacccaacaacaacatccgccactgccaattagtcctttctatgcaatgaaaagcagctagaagkccataagaaaaaaacaaacctttgcttttagaataaactttt

SEQ ID NO: 561819 - DNA, 624 bp, Homo sapiens
caccctccttggcctcccaaagtgctgggattacaggtgcaagccactgtgtccggcctatctcacattttttagactactttctaaaatttcccttttaacactaaatcagtgaaacttccacatgaagacaaactgctagagaaatttaagaactttaggttgtaaaattaaaatgtcatattataaaacactgttgagcaaaagattcttgtgttatttggttattggtcattacaaatttgagtcaggacacaaagctttttgtgctatgatattcagaacagaacacaaatgcttgaaaggattaacatagcacaaaacaatgtctattactacacactgaaaaatgagccatgatctttaccacaaacaagtgactttttgaaagttaaaaacttaatgcctactgagaattaaatttactaattgagaatgattagattcaatggctgaaaactttagtatgtgttatatttataataaatccttcagccatctgactccagtaattttccactcttactcttctccccccttaattcccgcacacactcagattaaatatttcttagaaccttgctayttacagagtgggaccagcagcagcagcagcagcaggag

SEQ ID NO: 561820 - DNA, 500 bp, Homo sapiens
taggacatgcgatattggcacaaggttaggcaaatagatcagggggatataattggaaacttagtaatagacatatatatatatakagagagagagacacttgatatatagcaaaggtgatgctgtagagcagtgaaaaaatgatcttttcaatgatgtggacaattggaaaaaataaagtgtgaccttactccacataatccacaaaaataatttcaaaaggattataaatacggatgtgaaaggtaaaacaataaggcttctagatgatagaatatattatacatttttaaaacaagatgcaagaggctataaggaaaaacattgctgaattagattagtaaaattaagaacttatcttttcatttaattaagaaaatgaacaaacacacagtaagatgggatgacatatttataacacaagagagaactagggctccaatccaggatattaaaaaattactacaaataatacacacacacacacacacacacacaca

SEQ ID NO: 561821 - DNA, 491 bp, Homo sapiens
tggcagcttccggtggtaaagacacctgcccagtgtcaggacgactgccgccagctcctggcctcwaacacctgcctgctcctctctgtgcctccatctccctttctctttgttagcaggtatggtgacctttgtcctacctgctttaagtgggctcttctgagaataagacaaaatattgctcacaaaatgctttttaaaataaaaattgctgtacaaatgccaagtgctattaattcaacaccccagcaatggaaattttcattagctgtgtatcatttacagtcactatcaacatgtatcacatttcaatccttcccatgaacttcaaagctccaaatcccattaaatatattttattttttttttcttttttttcttcttttttttttttttttttaatgttttttttttttttattatactttaagttttagggtacatgtgcacattgtgcaggttagttacatatgtatacatgtgccatgctg

SEQ ID NO: 561822 - DNA, 491 bp, Homo sapiens
tggcagcttccggtggtaaagacacctgcccagtgtcaggacgactgccgccagctcctggcctctaacacctgcctgctcctctctgtgcctccatctccctttctctttgttagcaggtatggtgacctttgtcctayctgctttaagtgggctcttctgagaataagacaaaatattgctcacaaaatgctttttaaaataaaaattgctgtacaaatgccaagtgctattaattcaacaccccagcaatggaaattttcattagctgtgtatcatttacagtcactatcaacatgtatcacatttcaatccttcccatgaacttcaaagctccaaatcccattaaatatattttattttttttttcttttttttcttcttttttttttttttttttaatgttttttttttttttattatactttaagttttagggtacatgtgcacattgtgcaggttagttacatatgtatacatgtgccatgctg

SEQ ID NO: 561823 - DNA, 496 bp, Homo sapiens
gtttcacataagaaacagttaaggaagttatagatatttcccctgaggaagaaaaatgttcacagatctatgcatttgaagggctgttaggtgagacaaataggaggcttatttcctcttagtcataaagagtgtttcccaaagggtggttctaatagatgattttagacggtgtaagaactaacatatttcatgttaattgttattttctcatttaagtgtgtattagaaaaaaaaaaccagtacatctagtaacacaaaatttttacttatagtaaggcatatatactctccattaacatacacctaatttttataagacagttttcaaagaaaaatataagcaaataaaagtccagatgatttatgactacaagaactttgaagcctgtttatgattgcaactgtaaagttttattggagacaaatgactacttatcactagaatccttcaatmacctctaacaaacatgtcaaggatgctagggaaagggtt

SEQ ID NO: 561824 - DNA, 439 bp, Homo sapiens
cactaataacatctgtgattcaaaaaggaggtaaaaatatcaacattaacaggagtttagaagaagttgattccaaccctgatggatgaatttgagagattcagcagagaaagtaactatagatgtggtggaaagagctagagaaatagaactaaaagtggaacctgaagatgtgactgaattgctgcaatttcatgatagactctaaagtgtgagacgttgctacttatggatgagcaaaaaaagtgattgcttgagatggcatccactcctggtgaaraggctgtgaacattgttgaaatgacagcaaagaatttagaatatgaatttgagaggatttactcaaattttgaaaaacgttctactttggataaaaggctatcaaagagcatcacatgctacagaaatatctttcatgaaaggaagagtcaatccatgt

SEQ ID NO: 561825 - DNA, 575 bp, Homo sapiens
tacaaatagaaacaacaacaaataaaaacctgggggaatggaattaaaatatacggactttattagatttctctttgtttatttgtttgtttatgcaatcagtttaaaatgatgggctattcaatagtatttgtaagcctcatttcaacctcaaatcaaaaaacattcaaaaaatacacaaaaaataaaaggaaagtaattaaaatataccactacagagaataatctttactaaaagaaaaaataaggaaagaaagaaggaagagtagaccacgwaacaaccagaaaacaaataataaaatgttgggtgtaagtctgtacttatcaataataatattgaatgtaaatggactaaactctccaatcaaaacacatagagtgattagatggataaagaaaaagacccaatgatctgttgcctacaggaaatgcatatcacctacaaagccacacatagactgaaaacaaagggatggacaaagatattccatgtcaatggaaaccaaaaagagcagcagtagtagttataattacaaaagacataatagattcaaagaaaaaaataactgtaagaa

SEQ ID NO: 561826 - DNA, 549 bp, Homo sapiens
agatattccatgtcaatggaaaccaaaaagagcagcagtagtagttataattacaaaagacataatagattcaaagaaaaaaataactgtaagaagtgacgaagaaggttactatataatgataaaggggcctgttgggaacaggcccccaaatctggccataaactgtccccgaacctggctataaacaaaatctctgtagcactgtgacatgttcatgatggccatgacgcccacactgaaggttgtgggtttactggaatgagggcaaggaacacctggcccacccagtgtggaaaatcgcttaaaggcgytcctaaaccacaaacaatggcatgagcgatctgtgccttaaggacatgttcctgctgcagataactagctagagcccatccctttgtttcagcccattcctttgtttcctgtaaggaatacttttagttaatctataatctgtagaaacaatgctcatcactggcttgatgtcaataaatatgtgggtaaatctctgttcagggctgtcatctctgaaggctgtgagtcccctga

SEQ ID NO: 561827 - DNA, 609 bp, Homo sapiens
atgatggccatgacgcccacactgaaggttgtgggtttactggaatgagggcaaggaacacctggcccacccagtgtggaaaatcgcttaaaggcgctcctaaaccacaaacaatggcatgagcgatctgtgccttaaggacatgttcctgctgcagataactagctagagcccatccctttgtttcagcccattcctttgtttcctgtaaggaatacttttagttaatctataatctgtagaaacaatgctcatcactggcttgatgtcaataaatatgtgggtaaatctctgttcagggctgtcatctctgaaggctgtgagtcccctgatttcccactccaygctttatatttctgtgtgtgtgtttaattcctctagcaccactggattagggtctccaagactgagctggtctcggcagggtccattaggcaagagcatttaacaattgtaaatatatatgcaccccacactggagcacctacacatataaagcaattattgtagctgaagagagaaacagaccataatacaataatagctagacattttaagaacccaatttcagcattggggagaacttccacacaggaacttaacaagaaa

SEQ ID NO: 561828 - DNA, 601 bp, Homo sapiens
ttatatttctgtgtgtgtgtttaattcctctagcaccactggattagggtctccaagactgagctggtctcggcagggtccattaggcaagagcatttaacaattgtaaatatatatgcaccccacactggagcacctacacatataaagcaattattgtagctgaagagagaaacagaccataatacaataatagctagacattttaagaacccaatttcagcattggggagaacttccacacaggaacttaacaagaaaacatcagacttratctgctctataaaccaaataaacctaatagatatttacagaacattttatccaactgctatagaatgtatattttactcctgagaacatgggtcattctcaaaaatagaccagatattaggtcaccaaacaaatcttaaaatattcaaaaattgaaataatatcaaacatcttctctgactacaatggaataaaacaagaaatccataacaagaggaattttagaaactataaaatcacatggaaattaaacaatatgctcctgaatgatcagtgggtaaataaagaaattaagaagaaaattttaaaaattcttgaaacagctgat

SEQ ID NO: 561829 - DNA, 548 bp, Homo sapiens
gcatgttctcacttataagtgagaactaaatattgatcgcacatgaacacaaaatgggaacaatagacactacggagtgaaaagggagggactgtgagtggaaaaactatgtatttggtactatgtacctgggtgcgatatactcagataacaaacctgcaaatatatccctgtatctaaaataaaagttgaaattttgtaaaacgtataatgggagtagcagtggcagacatagggggaaaagaggtacgaagaatttttgaaaaaatgttggctgaaactttctgaattttatgaaaaacacaaatctacatatatagaaagctcaacaaaatccaagtagaataaatacagacatccacactgagacacattattctcaaataaaaagaaaatcaaagaattagccaatagtagatctgccaaaataaattaaaagaaatctcttaggactaaataaaakagcccaacacagtaactaaaaaaatccatattagaagacaaatagcatatgtaaaattaactacaaagttaaatataaaagacaa

SEQ ID NO: 561830 - DNA, 562 bp, Homo sapiens
ctccagtgcctaaaacagtgcctggtacttagtgggcactcaataaatatttgcttaagtaatgaaaattttttccaattgtacctaaatgatcatctgtaaaaggtttttagaagtacttcaaaaacaatggcttaacgacctgtatggatcctctctccagagaaacaatcaaaactcgtaaaatcattttaaaaaccaaacaagtaatttaaagtttctgtaaattgtcttaaccatatrcagtaagtggagaaacagttagttaaataaatctactaaagctttgtaagaacaatgagagtctgtgacatttaggccacaaaatgttcccttttaccacacagctcttatctggaaagtgacatccaggaaaacaggattctcaatcccttcaagtatttgtctagggttatgtgtattagtcagggttctctaaagggatagaactaatagggtagatgaatatgtgaaggggagtttattaggagaattgactcacacgatcacaaggtgaagacacacgatagcctgtctgcaagctaggagcaaggaagcaagt

SEQ ID NO: 561831 - DNA, 547 bp, Homo sapiens
tcatgcttcttccaagtccctgatcatttagccaaaccattggctgcagcccattaatcagtatataatcacacatctggccttttctccttccaagctgtgtaaycatgtgcactgctcaatgctctgcccactggaaagatttccctttgccactgtttttcagggatgttatagaaaggggctgtagtgctgcagctgtccacttttgggtggtgcctgcatatcatgcaaagccatctgtaaaccaggcccttgtcttccctttctttgtcaactgatcatagggaactccccatgaggccatgggtgcaaactcagggagagaaggcagagtggcaggaatggggaccatgggcatttgaaccacttcgtcgtgcaacttaccaaaatcttaactattataaacagtgctacaacaaacatgagagtgcaaatatcccttcaatataataattttatttgtttgggcatatacccagtaatgcaattactggagtatgtggaagctcgacttttacttttttgaggaaactccaaactattc

SEQ ID NO: 561832 - DNA, 612 bp, Homo sapiens
ccttcctttttaattctcccactcaaatggaaatagaagttgggaggatgagtctagggggatacaaaagaaagcatctttgatgtctaaaactgaaaaccactgagcatctagagatacttctcctagaattacttttgagttagagaccatttggtwtattggaaaactgcctcatttataatttgcaggtcctggactagcctgtattttccattgctttctttaacaggtaaaatgggagtgttttcgggggagatacaggatattaataacccatgctttcgaaatttttaaatcaaaggccgaagtccccttttgacctctggccaaagaggaaacttccttctacaaggataactagaagcatacttgagctaaattaatataggcattgccgttatgactttttgtggtattactgaggtccagacctctggattaatgaaaaggtatgtgggaagtttatcctggtgtgtagtttccttgaggcatacgatcatatttggaaaaggaggtattggccctggaagaaaggttaactgaacccctagtttaaacaaaatatctctaccaaaaaggggcatatgatattctaacatcaccaaaaat

SEQ ID NO: 561833 - DNA, 612 bp, Homo sapiens
ccttcctttttaattctcccactcaaatggaaatagaagttgggaggatgagtctagggggatacaaaagaaagcatctttgatgtctaaaactgaaaaccactgagcatctagagatacttctcctagaattacttttgagttagagaccatttggtatattggaaaactgcctcatttataatttgcaggtcctggactagcctgtattttccattgctttctttaacaggtaaaatgggagtgttttcgggggagatacaggatattaataacccatgctttcgaaatttttaaatcaaaggccgaagtccccttttgacctctggccaaagaggaaacttccttctacaaggataactagaagcatacttgagctaaattaatataggcattgccrttatgactttttgtggtattactgaggtccagacctctggattaatgaaaaggtatgtgggaagtttatcctggtgtgtagtttccttgaggcatacgatcatatttggaaaaggaggtattggccctggaagaaaggttaactgaacccctagtttaaacaaaatatctctaccaaaaaggggcatatgatattctaacatcaccaaaaat

SEQ ID NO: 561834 - DNA, 654 bp, Homo sapiens
tacccagttccaaagtcacttccacattttcaggttatctttatagcagtgtcccactcctggtaccaatttactgtattagtcaattttcacatgctattaaaaacacctaagactgagtaatttataaagggaagaggtttaatttcttygaagttctgcatgactggggaggcgtcaggaaacttccaatcacatcttacatggtggcaggagagaaagtgaagggaaaagagtcttttataaaagtattagatttctttcttttttttttcttttgagacagagtccagctctgttgcccaggctggagtgcagtggcacgatctcggctcactgcaagctccgccttccgggttcacgcccttctcctgcctcagcctcccgagtagctgggaccacaggtgcctgccatcacacccggctaatttttctatttttagtagagacggggtttcactgtgttagccaggatggtctcgatctcctgaccttgtgatccgcctgtttcagcctcccaaagtgctgggattacaggtgtgagctgccgcgctcggccaaaattattagatttcttgagatctcactcactatcacgagaacgacatgggggaaagtgctcccatgatccaattgcttcctaccagatccctc

SEQ ID NO: 561835 - DNA, 566 bp, Homo sapiens
aaaaccttgaagttagcagaggttggttcgtgaggtttaaggaaagaaaccatctccataacctaaaagtgcaaagtaaatcagcaagcacttatatacaagctacaggaagttattcctaagttctagctaaaataattgacaaaaatggttatactaaggaacagattttcaatgtagataaaacaaccttatactggagaaagatgccatgtaaaattttcatagctaaagagggtaaatcaatgcctgacttcaaagcttcaaaggacaggttgactctattgttaaaaataaatgcagctgattactttatacaraagccaatgcccagtcaccattctgaaaatcctagagcctgtattctatctgtactctataattggaataacaaatcctggatgacaacacatccatttgtagcatgttttactacatttttaaagcctactgttgagacttgattctcaaaaaaaaatttcttcaaaatactactgctcattgagaatgcacctggtcaccaaagagctctgatggatatatgaaaggaaattaatattgtttat

SEQ ID NO: 561836 - DNA, 526 bp, Homo sapiens
ttatcctttaaaatcagaaaagtacattgagatcagctgttaaaagattttaaacaaatgtaagctactattgcattgaaaaaaattataaaactgttttttttttttaaaaaagagtatcccatgctcattgtataagtcaaatggcacaaagatacctaaaaattgctatagcatctcggttaacatgttagtaattaatgctgagagtctagccatatttctatatctgttttctttctatacctgttttgagcatatccttagctattttctggtgctcaatgacaaaattccaatgtaattatcctaggataagagttacaaatacataatggagaagtgttagcttacctaataaaagcatttatagtattttaagaggtttgattttaactttctagaagtaaaattttataaacattactattattttttattgatacataataattgtacatatttatggggcacatacgatattttgatatatgcrtacaatgtgtaaggatcaaatcaggctatt

SEQ ID NO: 561837 - DNA, 277 bp, Homo sapiens
actttcagcattggaaagatcttctgtacagaaaattaaaacaataacaacaacaacattgkccttaatctgcactatagaatagatgtattgaatagatatttacagaacattacatccatgagctacagaatacactttcttctccttagcacatagattattctcaaggacaggccatatgttaagtcacaaaacaagactaaaacattaaaaaaaattgaagtaatattgagcactttccctgaccacaggggaataaagctaaaaatccata

SEQ ID NO: 561838 - DNA, 277 bp, Homo sapiens
actttcagcattggaaagatcttctgtacagaaaattaaaacaataacaacaacaacattgtccttaatctgmactatagaatagatgtattgaatagatatttacagaacattacatccatgagctacagaatacactttcttctccttagcacatagattattctcaaggacaggccatatgttaagtcacaaaacaagactaaaacattaaaaaaaattgaagtaatattgagcactttccctgaccacaggggaataaagctaaaaatccata

SEQ ID NO: 561839 - DNA, 546 bp, Homo sapiens
ttaatgtccattgtattttattacagacaatttatctactctcctgaagatgctgcaacttataagccatatctataggaattaatttattgataaaattattggtcttttataaatagacaaaccagataatgtaaaatcttgaatgacaagttatctttatgagtatgaattaacttattctaattaataaataacctcaagcctaacwaaaatacatgtctttatttttttcaaagttcatgtaacatatttggcagcatgctgattaaataagaaaatatcctcttaaaataaataaaatattttataagaagtagtcactttttaagaaattatacatagtgtggagtttaattgagagtttaaacagatatcatgtattgaaagctacaaatatatatctcttatgaactaatgggacaattttcttttatataggtaacacatatccaattaaaggagtagagaaacagaaataaattaataagaacaatacacttattttcccataatatcaccattttcccaaagaattactgttgt

SEQ ID NO: 561840 - DNA, 625 bp, Homo sapiens
caaattatccctgtttgcagattatatgatctcatatttcgcaaaacataaagactttattaaaaaaactgtttgaactagcaaattcactatagttgcaggatacttaatcaacatacaaaaatcagtaacatttctgtatatcaacagtgtaaaatctgaaaaagaaatataaagttatcccaattaaaatagccacaaataaaagtaaatgcttatcaacttaaccaaagaagtgaaatttctctctaataaagaccataaaatgttgattaaaaaaattgaacaggacaccaaaaactggaaaggtaattyatgttcatggattggaagaatcaatattgtttaaatgaccatactactcaaagcaatctacagcttcaatgcaatccctgtcaaaataccaatgacattcttcaaaactagagaaagacaactctaaaacttatatggaaccacaaaggacccagaatagccaaagctatcctaatggaaaaaaaaaatgggatcccattacctgacttcaaattatactgcagagttattgtgaccaaaacagcatgttactggcataaaaacagaaacaaagactaatggaacagaatagaggacccagaaacaaatc

SEQ ID NO: 561841 - DNA, 575 bp, Homo sapiens
tcctaggccgactaagaatccctaagcctagctgggaaggtgaccacatccacctttaaacatggggcttgcaacttagctcacacccgaccaatcaggtaggaaagagagatcactaaaatgctgattaggcaaaaacaggaggtaaagaaatagccaatcatctattgcctgagagcacaaccggagggacaatgatcgggatataaacccaggcattcaagccggcaatggctaccctctttgggtcccctccctttgtatgggagctctgttttcactctattaaatcttgcaactgcactcttctggtccgtgtttgttagggctcaagctgagcttctacttgccttccaccactgctgtttgcagtcatcgcagacccgccgctgacttccatccctccggatatggcagggtgtccgctgtgctcctgatccagggaggcgcccattgccgctcctgatcaggctrgaggcttgctgttgttcctgcatggctaagtgcctgggtttgtcctaatcaagctgaacactagtcactgggttccatggttctcttccatgacccacggc

SEQ ID NO: 561842 - DNA, 575 bp, Homo sapiens
tcctaggccgactaagaatccctaagcctagctgggaaggtgaccacatccacctttaaacatggggcttgcaacttagctcacacccgaccaatcaggtaggaaagagagatcactaaaatgctgattaggcaaaaacaggaggtaaagaaatagccaatcatctattgcctgagagcacaaccggagggacaatgatcgggatataaacccaggcattcaagccggcaatggctaccctctttgggtcccctccctttgtatgggagctctgttttcactctattaaatcttgcaactgcactcttctggtccgtgtttgttagggctcaagctgagcttctacttgccttccaccactgctgtttgcagtcatcgcagacccgccgctgacttccatccctccggatatggcagggtgtccgctgtgctcctgatccagggaggcgcccattgccgctcctgatcaggctggaggcttgctgttgttcctgcatggctaagtgcctgggtttgtcctaatcaagctgaacacyagtcactgggttccatggttctcttccatgacccacggc

SEQ ID NO: 561843 - DNA, 606 bp, Homo sapiens
agtccacatgttggtctcagaagcaaaaccaaggaatggctgggaaaagcacagtggccagaccctatagcggatttgacccctgaaggaacaataaagtcacaacaatcagccctccaaaatccagaagataggcacaaagaggcacgaaaatgagcaactcctctgttaaatatcattccttcagtgttgcaaatggttgtggattggaatcaagtccaacaatgccaacrgaacccaagtgaatcagttttagattatttcacacattttgataaaactttaagacaatattgtgggatgtcagtggattgctttgaaaaaaattaaaatgatatataattaaatgcaaatttattacatggactagaggatgatttagtctcccttctctaatgtcacatgacaaattgggccaaggccagaactaatgaacaagtttacatagcttaccaattatcctgcactatgataaaaaggaaaaacagaagattgcccaagttatgcacttacagctaaagtaagtaacttctcaaacctctcagccacagaaatattttaagctccctcggtttgaggactcctccctcccagtctgttactact

SEQ ID NO: 561844 - DNA, 623 bp, Homo sapiens
ttaccatttgtcaggttaagttcctccactgcaggctctaaatatgacaggctcagtcagtcccatatgtttctaatatgctctggggcccctgttaatcttttgggccgtgatctcctcagcatccataatgcccatatctctttttcatcaaaaggtaaacattttttagaattagagccagaggagcaaaaataccaaattaaaaaaacatcctgacaatgtaccacgatttagtgctagtaatgttaaaatgtcatcttgtgaccaggaaaatgaaacagaaacagagaaggaaatattaagagagaagagagaacattggaataaagagcagaaaagagtaaaactctttttagygtcctcaatcttcctgtaaaccccagaagcagagcacttgctcaaggatgtccactcccacttatagtctcagtcaaatacagatatagggaaaatattctcagccactccaattaaggtagagataaacccaaggaaacccctacccaaccttgaacaatatcctctacaacaggcagccataaatggaattgcccctatcatataagattttctgaaaaagggactcaatttttcctgcacacacgcctgcagcagcccta

SEQ ID NO: 561845 - DNA, 427 bp, Homo sapiens
ttgtttcccctgccccattttgtctatgttatcttatgtaaaatgcagattccctgcatttttcctctaccccatttgtctgtcaccttatgtaaaaaaaaattcagattcactgagacagacaaagtcatgaatatttttctttacccttctcttacataaaaattgtgtacttctcaayatcccaccctttctcctttaagtttggagccctcaaaatcatctttggagaaaggcatagacctgtctcctgggtgcacctgcttaactttggcaaataaacctcctaaaatgattgagacttgtttcattatttttctcgactgacacctccaaacagcaatgttctgcaatgttctccaataagagtttttcaccaggctgagctggctaaaatgacagaaatgtatttcagaatatggatagg

SEQ ID NO: 561846 - DNA, 557 bp, Homo sapiens
ctcaataaataatatgtccaaaaaaccctacatctaacattatacttactggtgagaaacttaaagctttcttactaagatcatgtcctctcttactgctatttttcaacattatactcgaagtcctagttaatgcaataaggcaaaaaatgaaataaaaggcataaaaattgggaataaagaaatcaaactgtctttgtttgcagatggcatacttgtatgtgtagaaaatgtagatgaatagacggtaaacagctggaactaataagtaattattgtaaagtcacggaacacaggttaatatacaaaagtcaattgcttttcaatataccagcaataaacaagtagaatttgaaatttaaaacacaatgtcatttacattactgccccyaaaatgagatatgtataaatctaacaaaatatgtgcaatatctagatgaggaaaacaacaaaactctgatgaaagaaattaaaaataaactaaataaattgggatacatttcattgccaattcttctcaacttgatctatagattcaagaaattcatatcagcatc

SEQ ID NO: 561847 - DNA, 454 bp, Homo sapiens
cactactgactaaagtggtcttgagtcttaaataaacatgaaaggctgtccaggccacagtaattggaacaaccaggcaatttctagtgctgatctgggtacagagccagtggacttcaggggcatgtaacctagtgggacatcagccagggaggctaagggagygcttggatcaccccttaccatccaaccccaggcagaacagctcacagctctgaagagacccctttcttccatgtaagaagaaacagaagagtaaagaggactattgtgtcttataatttggataccagctcagccacagtagtatagagcactggcagagtcataagtccaacaatccctgccctggctcttgggtgacatttccagatgaaccctgggccagcagaaaacccactgccttgaaggaaaaaatccagtcctagcaggatttatcacctgctgactaaag

SEQ ID NO: 561848 - DNA, 611 bp, Homo sapiens
gtttatcaactattttatatatatatatatayatatatatatatgaagttcattaacatatatatgaggcgaaatttattaactcacacaatcacaaggtcctaaaataggccatcctaaaataggccatctgcaaactgaggagcaaggagtgccagtccaagtccccaaactgaaaaacttggaatccgacgttagagggtaggaagcatccagcacgggagaaagatgtatgctggaaggctaggccagcctagccttttcagctttttctgcctgctttatattctagctgcactggcagctgattagatagtacccacccagattaatggtgagactgtctttctcagctcactgaattaaattttaatttcttttggcaacaccctcacagacacacccaggaacaatactttgcatgcttccatccaatcaagttgacactcagtattaaccatcacattttcttagtctgttcaggctgctataacaagacatatattgacaggcttgtataaaacagaagaatatttctcacagtttaggatgtggggaagtccaagacactggcagatttggtgactaataaaagcctacttttccatagc

SEQ ID NO: 561849 - DNA, 465 bp, Homo sapiens
ctcataacacttggttctatccttgtattgctgaaagaggcacagagagattaaaaaaaaaaagtcttgaaacaccaacatcactcttcctccatcccacagcagtggcaatatgggctggagagcatttctgtgtgctggggtagggagagtaaaaaaatgtgaggcattgaactcagtgttgtcttcttaaagcagaaaaaaaaaaaamcaaaaaaaaaacacagaccaaactcagctgatgcccacccagggaggaagcatttaaagcagccctagacagaggacaatcactaatcccaggggtctgaacttgacttcccacaaacctcgccaccacactactaacatgctctgtgatctaaataaacttgaagggcagtctaggccatagaaactgaaagttataggtgagttctggtgatgaaatgggtgcagtgacaatagactggggaagcggcacat

SEQ ID NO: 561850 - DNA, 404 bp, Homo sapiens
agaccataccagagagattaaacagaacaatgatacataatatttgtacatatttatggaatacatgaaataataccatttaacaaatgtatagaatrtgaatagtcaagctggggcatttagggtattcatcccttcaggtatttattatctctatgtgtcaggaacatttagagttctgtgttctagctattttgaaatatataatacattgttgttaactataatcaccctactttgctactgaacattgaatcatttcttctatccaactgtatttttgtacccattaaccaacttctattcatttcctccccacacttcccaacctcaagtatccatcattctactctctacttccacgagatgcactttttagttcctgtgtctgagtgaaaacatgc

SEQ ID NO: 561851 - DNA, 545 bp, Homo sapiens
ctccctatatctagatttcagaaattattaatctgttttgttattttaaaaatgctatataagaggaacaatacaaaatgtaaattttggggcataagcatatgtcactcagcataatttctatgagatccaaaaaaatgtataaagtaatagttttgaaatataagattccacctgaatatcccatttgcacattatttatactcctttttacatacttttaaaataagaataatggaaaaataatataagatacacataatttctgtgaagtctgctttacagtttattaaattatcttcagatgttaagcagaaacctatattaaaatatttggttttaaagatactctctaagggagttgtatgcaagacataatagtagacctaaagattgaggttctgagaatttaaggcctrctcctttggttggtgctcatcctctttggttaataagtaatcagttgtggtttcatttaatcagagttattccatattaaattattgttttgccacttttagggaaagttttaccacaagaatgta

SEQ ID NO: 561852 - DNA, 404 bp, Homo sapiens
agaccataccagagagattaaacagaacaatgatacataatatttgtacatatttatggaatacatgaaataataccatttaacaaatgtatagaatgtgaatagtcaagctggggcatttagggtattcatcccttcaggtatttattatctctatgtgtcaggaacatttagagttctgtgttctagctattttgaaatatataatacattgttgttaactataatcaccctactttgctactgaacattgaatcatttcttctatccaactgtatttttgtacccattaaccaacttctattcatttcctccccacacttcccarcctcaagtatccatcattctactctctacttccacgagatgcactttttagttcctgtgtctgagtgaaaacatgc

SEQ ID NO: 561853 - DNA, 404 bp, Homo sapiens
agaccataccagagagattaaacagaacaatgatacataatatttgtacatatttatggaatacatgaaataataccatttaacaaatgtatagaatgtgaatagtcaagctggggcatttagggtattcatcccttcaggtatttattatctctatgtgtcaggaacatttagagttctgtgttctagctattttgaaatatataatacattgttgttaactataatcaccctactttgctactgaacattgaatcatttcttctatccaactgtatttttgtacccattaaccaacttctattcatttcctccccacacttcccaacctcaagtatccatyattctactctctacttccacgagatgcactttttagttcctgtgtctgagtgaaaacatgc

SEQ ID NO: 561854 - DNA, 515 bp, Homo sapiens
atatcaggcaacagtgtgcagtaatctctgagaaagaaaaataatagtaagttgaatcctattatcgctccaatttacttcctggaaaaaaatccaggacacaacacaggtatgggaaggtaaaacagagcctagcaactttatgagttgaggaaacattgttgggggtccagagactccaaggcagctggagttaataaaaaatagtgccacaaaaaaatggcctgcatagcagccttcagaaatagtgcaaaagttctcctttggatcttcattacacttctcaaaaaaagatatacaaatggccaagaaacagaaaaaaaaaaaaagccaaacaccactaataatcaggaaaatgcaaattaaaactacaatgagatgggaactgaccccagccacaatgcccattattaaaaaatcaaaaaacaaycgatgttagtatggatatgacgaaaagggaatgcttatacactgctggtagaaatgtaatttagtacaacctctatggaaaaaag

SEQ ID NO: 561855 - DNA, 594 bp, Homo sapiens
gaagaggaaaaagtgggaggatggtgggaaataaaaaccacatattggttacaatgtacactatctgggtgattggtacaccaaaatttcagacttcaccactatacaattcatccatgtaaccaaraaccatctgtatcccaaaagctattgaaataaaaacatagatatacaaaaatgtttaaaagaatgcacagactcccattgctcttgcttaaagtttagttgtttttcttagtagatacttctaaatctatttgtctatttaatttccagagccccataatatttgatttgacaattttattaagttttataattgttttcatggaaaggatctgtcgatctcttcactctcccttgtctggatgtctcactctaccttgtcatttatttttcattttctatatacaaatataaaacatagacttctgtgtttgtgatcagtgagagaaaataatttgcaatttatttattttctattttcttaattcttcatggttatggcaactaaagccaacaaatcagcttttaaaaattgttgacttacggatccaagtaaacacacttttgcttttggaatagcattggaaa

SEQ ID NO: 561856 - DNA, 500 bp, Homo sapiens
ttgactaacctaaattcgtaatcaaggtggaggttcttaaagttaaaatagtggtttatcaaagattatgaagaaaagccacttttttttttctttgtttgccctttttcaaatctaaggtgtgttaaaaacatctctgggaacattttttttaaacactcaacttccttgaaggtaaaatattgtgccactgggttttcatmctgagtattactttgaattgttcagaactagatgtatgtgataattaaggtttctatttttttaagtgtcatggttatctaagaaaatggtagtttattttttttaaatggtgatttaaggaaaatagggatgaccacatataatggtagctcatttcttttactttagagaagctgttctcaaattttattacataaaagaatcataagacatgctcattaaaaatacagttttctaaagttttccattgcaggtttctaatgaaagagtttgagtcccagaaacttgcaattttt

SEQ ID NO: 561857 - DNA, 500 bp, Homo sapiens
ttgactaacctaaattcgtaatcaaggtggaggttcttaaagttaaaatagtggtttatcaaagattatgaagaaaagccacttttttttttctttgtttgccctttttcaaatctaaggtgtgttaaaaacatctctgggaacattttttttaaacactcaacttccttgaaggtaaaatattgtgccactgggttttcatcctgagtattactttgaattgttcagaactagatgtatgtgataattaaggtttctayttttttaagtgtcatggttatctaagaaaatggtagtttattttttttaaatggtgatttaaggaaaatagggatgaccacatataatggtagctcatttcttttactttagagaagctgttctcaaattttattacataaaagaatcataagacatgctcattaaaaatacagttttctaaagttttccattgcaggtttctaatgaaagagtttgagtcccagaaacttgcaattttt

SEQ ID NO: 561858 - DNA, 210 bp, Homo sapiens
gattcatttcatgggtgtctggactctgatttgagtcaacaatttcatttcaaaatatttattgagtgcctaccatgtgacaggcaaatttctagctttggaaatagagcaatgtagggtttcattttagtggagcaatacagacataacaaatatgtagattttataatrttataagacattaaaggatatgaagtaataaaataaaag

SEQ ID NO: 561859 - DNA, 647 bp, Homo sapiens
ggtggcattagtattaatatcatgaattccagtccatcttgtagttgcaattcaaattcattgacgaaggtaaaattcaaagtaagaaattgctgggagtaagtatgttagagagcatacttattgtcttcagctatatgaaaaaatcttaaaataacaccctaaataaacctaattctgaaacaccaaaccattggcatattgcactgttttgcaaagagaatacaaaatgatagacaattctactaattgccactgaaacgtacctttatgttacaggactacaatctcaacctaaayttgacaggtgtatgccatgaaagactgctattatgatcaaaaggttaataacatttcagcaacatcataaattctcaggattatgtagttcagcatatgggcctgcaaaagatgatgtcagtctcaaaaccactacagcgtggaaatgacttcattgagcaatacagatggattcattctagtattgtaaagtcaacatagttgaacactggctacatcacagtatacattactgtagtctggatcaagttgtgatgaagtaatttcccttaagtttagtacttagaaaacctatagggtgatctccttggacttgatttgagagcagccttccattcacctactgc

SEQ ID NO: 561860 - DNA, 647 bp, Homo sapiens
ggtggcattagtattaatatcatgaattccagtccatcttgtagttgcaattcaaattcattgacgaaggtaaaattcaaagtaagaaattgctgggagtaagtatgttagagagcatacttattgtcttcagctatatgaaaaaatcttaaaataacaccctaaataaacctaattctgaaacaccaaaccattggcatattgcactgttttgcaaagagaatacaaaatgatagacaattctactaattgccactgaaacgtacctttatgttacaggactacaatctcaacctaaacttgacaggtgtatgccatgaaagactgctattatgatcaaaaggttaataacatttcagcaacatcataaattctcaggattatgtagytcagcatatgggcctgcaaaagatgatgtcagtctcaaaaccactacagcgtggaaatgacttcattgagcaatacagatggattcattctagtattgtaaagtcaacatagttgaacactggctacatcacagtatacattactgtagtctggatcaagttgtgatgaagtaatttcccttaagtttagtacttagaaaacctatagggtgatctccttggacttgatttgagagcagccttccattcacctactgc

SEQ ID NO: 561861 - DNA, 580 bp, Homo sapiens
tcaaaagcagcatatgtaggtgaccatgagtatgatgtttaatttgcataatattttaattctgctaaaattgtttgcaaatttctaaatgttggtagtcaactaatttctatgttctattgtttttgtctctttaatgagaatactaacactcattccacatttatgttgctaaatggaactcaatgcttttgtgactagtctacctatttcatagatttatatttcagttgattttttagaatttacttgggcaaacaataaatatttagtaagcacttactatatgcaatacattgtgccagttwtagtgtataatacaatgacaaaaagagacggaattactttcttgaaggatatgaatgtctagaggaatttgacttctataaaaacatatttgtgatataaagaagactccaaaatgtactaaaatagaggcacaacatgtttttttgtgcattctgaaaagaaatattagatttagatatgtaaataaaaaataaattctatggaagggatggtatttgggcagaaaatggaagcactgataagattaagaggcagcgctaggccaaaagag

SEQ ID NO: 561862 - DNA, 580 bp, Homo sapiens
tcaaaagcagcatatgtaggtgaccatgagtatgatgtttaatttgcataatattttaattctgctaaaattgtttgcaaatttctaaatgttggtagtcaactaatttctatgttctattgtttttgtctctttaatgagaatactaacactcattccacatttatgttgctaaatggaactcaatgcttttgtgactagtctacctatttcatagatttatatttcagttgattttttagaatttacttgggcaaacaataaatatttagtaagcacttactatatgcaatacattgtgccagttttagtgtataatacaatgacaaaaagagacggaattrctttcttgaaggatatgaatgtctagaggaatttgacttctataaaaacatatttgtgatataaagaagactccaaaatgtactaaaatagaggcacaacatgtttttttgtgcattctgaaaagaaatattagatttagatatgtaaataaaaaataaattctatggaagggatggtatttgggcagaaaatggaagcactgataagattaagaggcagcgctaggccaaaagag

SEQ ID NO: 561863 - DNA, 573 bp, Homo sapiens
tgagcagctgaacctggatttgggtacaaggaaaaggaggaaaaggagggattggtcttgctgtcttgaggttgaagaggtggaaaagatggaagaggaggctaaaaaggcaggcacagtcagagtaactttygttgacaaaaatctgcttataaatggaaccactcagttcaaacccattttgttccagggtcagctgtgtagttttactatttaattgcaaagacactggtgttaaaccagcttgagtcaaatcttagctgtggctctgctagcaaaattacttctccaagtgacagtttacacatctataaaaaggcattttaataatacctgtctttccaggattgttgtggaaataaatttaagaaataaattttaaaaattaatataatgggattccatatagatggctcgatgtacattacatactggtgtgattggtttcctaaactgctgctttaatacgtctgaaactctctccatcacgaagaaaaatcacagtaattgctttgcctgaaaattatacttgcaatacaaattcctaaatattctgatggtatgccttatgac

SEQ ID NO: 561864 - DNA, 561 bp, Homo sapiens
cagtcatggcaagacccattgcctgctgactaaagagacattaggccttgaataactagcagagctactcagtagtacaccctatgggccttgggtaagactcagattgaccagcttcaagtgagatgcagcaaattcctagctgtgatgactacagtgagagactccatcagcttgtgtaaagcagaaaaaaatgtaaaggggactttgtcttgcaccttaagtacaagctcagcaacagtggggtagagcaccaagcagggtcttggggttcctgattccaagatttggctcttggatggaatttctggaccagcccagattcaaagggggagcccactaccctgaagtttgagtcccagaactggcaacatccacyacaaggtgattgaagaacacttggacattaaattaatgtcagtggtagcttagcagtactctccatgggctataggtgatgtcggccacggggcgaggctcctctgcctataaaaataggaggaaaaagtaggaaggactgcatactatggtttgagtgtcagctcagtcacagtacaatag

SEQ ID NO: 561865 - DNA, 561 bp, Homo sapiens
cagtcatggcaagacccattgcctgctgactaaagagacattaggccttgaataactagcagagctactcagtagtacaccctatgggccttgggtaagactcagattgaccagcttcaagtgagatgcagcaaattcctagctgtgatgactacagtgagagactccatcagcttgtgtaaagcagaaaaaaatgtaaaggggactttgtcttgcaccttaagtacaagctcagcaacagtggggtagagcaccaagcagggtcttggggttcctgattccaagatttggctcttggatggaatttctggaccagcccagattcaaagggggagcccactaccctgaagtttgagtcccagaactggcaacatccactacaaggtgattgaagaacacttggacattaaattaatgtcagtggtagcttagcagtactctccatgggctataggtgatgtcrgccacggggcgaggctcctctgcctataaaaataggaggaaaaagtaggaaggactgcatactatggtttgagtgtcagctcagtcacagtacaatag

SEQ ID NO: 561866 - DNA, 561 bp, Homo sapiens
cagtcatggcaagacccattgcctgctgactaaagagacattaggccttgaataactagcagagctactcagtagtacaccctatgggccttgggtaagactcagattgaccagcttcaagtgagatgcagcaaattcctagctgtgatgactacagtgagagactccatcagcttgtgtaaagcagaaaaaaatgtaaaggggactttgtcttgcaccttaagtacaagctcagcaacagtggggtagagcaccaagcagggtcttggggttcctgattccaagatttggctcttggatggaatttctggaccagcccagattcaaagggggagcccactaccctgaagtttgagtcccagaactggcaacatccactacaaggtgattgaagaacacttggacattaaattaatgtcagtggtagcttagcagtactctccatgggctataggtgatgtcggccacggggcgaggctcctctgcctataaaaataggaggaaaaagtaggaaggactgcatactatggtttgagkgtcagctcagtcacagtacaatag

SEQ ID NO: 561867 - DNA, 484 bp, Homo sapiens
gtgcaaacaaacgggaaaacttaggaaaaatgaataaattcctggaaacatactatctccccatattgaaccaggaagaaatggaaacagtgaacagaccaataatgagttccaaaattaaattataataaaaagcctatgaacaagaatgagtcctggacaagatggattaacagccaaattctgccaggtgtrtaaagaaaaactggcaccaaccatactaaaattattccaaagtaatgaaaagaagggacttcttcttagcttatttcatgaggccaacatcatttggataacaagacctggcagaggcacagtaacaacaaagaaaagataccttcaggccaatatccttgatgaacatagatgcaaaaattctcaacaatatactagcaaaccaaatccagcagcacatcaaaaagctaatccaccacaataaagtagcctttttctatgaaatgcaagattggtgcatttcaacctt

SEQ ID NO: 561868 - DNA, 421 bp, Homo sapiens
tgagtgaaagtatttgcaaactaggcattggacaaaggtctaaatctaaaagaaacttaaataaacaagcaaaaaaaaaataataataagcccattaagaaatgggaaaatgacatgaaaagctacttctttaaagatgacttagatgtggccaacaaggaaaaaaaacagctgaacatcactaatcactagttaaatgcaaatgaaaaccacaatgacataccatattgcaaaagtcaaaatggctatcattaaaaagtcaaaaaagacagataggggtagaaagtttattaaaagagctcataacaggtaacttctcagacctagataaacatacaaatattcgagtacaaaaaggttatagaacaccaagcagatttaacccaaagaccayttgaaggcatttaataatcaaactttc

SEQ ID NO: 561869 - DNA, 591 bp, Homo sapiens
ctcatgacatgcagttgacccttgtaaaaaacttgcacatgtgcccccgagtctaaaatataagttgggaaaaataaaaattaatggtcaaagacctcgaatagacatttttccaaagacagtgggtaatgacatttgaaaagatgctaaacattattagttactagattaattaaaataaatataaaatttaggttttttttacattttaagatgactactttttttattgttatttttaattgacacagggttttgctctgttgcccaggctagagtgcagtggtgcaattacagctcactgcaatgtcaacctcccaagctcaatcaattaacctgcctcagcctccaaagtagctggaactacagatayatgccaccatgcctggctaatttgtgtacttttgtagagacagggtttctgcatgttgcccaggctggtctcaaactcctgggctcaagctaactgcctgcctcagcctcacaaagttttgggattacaggtgtgagctatcatgccaaacttacaattattttttaaattaaaattttaaaaaaagtgtacagagatgtgcagaaattgaaaccctg

SEQ ID NO: 561870 - DNA, 570 bp, Homo sapiens
ttatacaactgaaaaatacaataactatttgaaaaaactaattagagggcataaattaattagttaacttaggacaaggtactcctggaatacttttttttttttttttttttttgagacrgagtctcgctctgtcacccagactggagtgcaatggcacaatcttggctcactacaacctctgcttcccaagttcaagtgattctcctgcctcagcctcctgagtagctgagattacaggtgtgcaccaccacacccgggtaatttttgtatttttagtggagacagggtttcaccatgttggtcaggctggtctcaaactcctgacctcgtgatctgcccacctcagcctcccaaagtgctgggattacaggcatgagccaccgcacccagccaaggaataattttaaaaatgattttaaaaatgaaaatagcctaagggacttataggaacccatcaagtggaccagtatacacattatgagaatactaaaataagaacaaagaaagatatagggagcttgtttgaagaaataatggttgaaaatgttccaaatatgatgaaataaa

SEQ ID NO: 561871 - DNA, 570 bp, Homo sapiens
ttatacaactgaaaaatacaataactatttgaaaaaactaattagagggcataaattaattagttaacttaggacaaggtactcctggaatacttttttttttttttttttttttgagacagagtctygctctgtcacccagactggagtgcaatggcacaatcttggctcactacaacctctgcttcccaagttcaagtgattctcctgcctcagcctcctgagtagctgagattacaggtgtgcaccaccacacccgggtaatttttgtatttttagtggagacagggtttcaccatgttggtcaggctggtctcaaactcctgacctcgtgatctgcccacctcagcctcccaaagtgctgggattacaggcatgagccaccgcacccagccaaggaataattttaaaaatgattttaaaaatgaaaatagcctaagggacttataggaacccatcaagtggaccagtatacacattatgagaatactaaaataagaacaaagaaagatatagggagcttgtttgaagaaataatggttgaaaatgttccaaatatgatgaaataaa

SEQ ID NO: 561872 - DNA, 515 bp, Homo sapiens
tttggaaatgggtaataggcagaggttgaaacagtttagagagctcagaaaaacacagaaagatgtgggaacgtttggaacttcctggagacttgttgaatgcttttgaccaaaatgctaatagtgatatggatgataaagtccaggctgaggtggtctcagatagagatgagaaacttatgtttaaaatggaagcagaacataaaagtttgggaaatttgaagcctgaccatgaagtagaaaataaaacccaattttttgaaaagaaattgaagccactgcagaaatttgcagcagtaaagaggaactgaatgttaatacacaaaacaatggggaaaatgtcttcagatcatgtcaamgatctgaggcaggtccttccatcacaggccaggagccctaggaggcaacaatggtttcatggttgaggcccagggccccactgctctatgaagtcttgggactaggtgtcctgcatcccagctgctccagatccagctgtggctaaaaggggccaa

SEQ ID NO: 561873 - DNA, 588 bp, Homo sapiens
aaccccaatacaataatagctagagacttcagcaacccactttcagcagcagacacataatccagatagtaaaatcaacaaataaacattggacttaatctgcactatggaccaaatagacctaatagatatttacaaagaatttcatcaaaaagccacagaatacaaattctacacctcagcccctgggttattctcaaggatagaccatatgttaggtcacaaaataactcttaaaataagctctccccaaataaaattatatcaggtattttctctgacgataatagaataaaactagaaatcactaacagaaaaaactttggaaactatacaaacacagagaaattaaaatatgctcctgaatgactggtgggccaatacagaagttaagaaaaaaatttaaaatgttcttgaaagaaatgaaaaacrtagctatgaataagtgaaagaagtactaagaaggtttatagcaataagtgcctacatcaaaaaaagtttaaaaaaaaactccaaataaactattgatgtatcatatagaactagaaaagagcaaaccaaacccaaaattagaagaaaaaaataaaa

SEQ ID NO: 561874 - DNA, 588 bp, Homo sapiens
aaccccaatacaataatagctagagacttcagcaacccactttcagcagcagacacataatccagatagtaaaatcaacaaataaacattggacttaatctgcactatggaccaaatagacctaatagatatttacaaagaatttcatcaaaaagccacagaatacaaattctacacctcagcccctgggttattctcaaggatagaccatatgttaggtcacaaaataactcttaaaataagctctccccaaataaaattatatcaggtattttctctgacgataatagaataaaactagaaatcactaacagaaaaaactttggaaactatacaaacacagagaaattaaaatatgctcctgaatgactggtgggccaatacagaagttaagaaaaaaatttaaaatgttcttgaaagaaatgaaaaacatarctatgaataagtgaaagaagtactaagaaggtttatagcaataagtgcctacatcaaaaaaagtttaaaaaaaaactccaaataaactattgatgtatcatatagaactagaaaagagcaaaccaaacccaaaattagaagaaaaaaataaaa

SEQ ID NO: 561875 - DNA, 571 bp, Homo sapiens
gtacaataaaatgaatataatatataatawtaaggggaatatatatattatattcacatatatatgtatatgttccagatgtataggaatctacacgtggcattgtcctttaatgccagttatcactcagggagacacagctgaaataagaactggaagatctaacacaaagacatgaaatgaaaggtgggaacagcctaatatcaataatatgggtctgccagtcaagaaatgtgcagagtcagccaggcatggtggctcacatctgtaatccccgcactttgggaggccgaggcgggtggatcacctgaggtcaggagttcgagaccaccctggccaacatggagaaacccccgtttctactaaaaatacaaaaattatccaggcatggtggcacatgcctgtaatcccagctactccagaggctgagacaagacaatcacttgaacccgggaaacagcggttacagtgagccaagattgcaccactgcactccagcctaggtgacaaagtgagactcaagaaaagaaaagaaatgtgcataatacatagatctaagcaaggtagaggg

SEQ ID NO: 561876 - DNA, 581 bp, Homo sapiens
ggatatgtaatttatattcctctttgaactttcttgaagtagggtcaaactatataaatttcttgtagctagactgaatagcgaacatctctccaggtctatggatcagaagtaatccttttaatacccacatcatatttcctgttattaatttaccatgattttctaaatcgttcccttatggatggatttgtcctttttcctcctgactgtaatgctcataaagcattttatgcagtatctgacacaaagtaagcacacaaaaaatgctaggtattactattgataaacttgactaagttgaaaagcactagagccaaaatttggrcacatttctgtctgtctccgaagcctacgtgctgacattgttgttctaactctcctccttcctctgctctgccagctccctctcttcctactcctctttttctaattgtttaagtcactttgccacactttctagtcactttgccacagttgacgaaccactgaaaatcctcttatatggatctgtgaattgaaatctattgtctaaatgaggcctgttaataatatttcattaatttgaccaacatttaagt

SEQ ID NO: 561877 - DNA, 509 bp, Homo sapiens
aaaattacatataaaaacttgtcagatgcacctaaactgttgcttaaaggaaacttacaaccttaagtgcatatattagaaatgaagagtgacgaaaaatgaatgagcaagcaaataccttaaaaactggaaaaggaatagtaaaataaatccagagaaatcrgaacaggggaaataataatataagaatagaaattaatgtgctagaaaataggggatctatcaagtcagaagttgattttttgaaaatgctaataaaaatgatgaacctctggcaagacaataaaagctggtacaaataactcatctaaggaataaaattgaggacctctcttttgttaaatgacataagcaggaggccattatcctgagactgtctctacactttgagttcttacataataaactgcaacctaatttagtatactacataaacaaactgaaacctaacttaggagctttttttttgtaattaatagctaaatttccaccaaatcataaatagccaa

SEQ ID NO: 561878 - DNA, 582 bp, Homo sapiens
ctgtgtattgcctctgcactttgttgattatttaatttgctatgcagaaactttttaacttgatgtgatcccttttgctcatttttgctttggttgcctatgcttgtggggtatgacttaagaaatctttgcccagaccaatgtcatggagagttttcttaatgttttcttttaatagtttcatagtttgatgtcttagatttaagtctttaatctattttgtttttatttttgtatatggcaagatataggggtctagtttcttccgcatatggatatctacttttcccagtaccatttgttgaagagactgtcctttctgcaatgtatgttcttgacacttttattgaaaatgaattcactgtagatgtgtggatttgtttctgggttctctattctgttctgttgttctrtgtgtctgtttttatgccagtaccattctgttttagttactatagctctgtagtataattttaagtcagataatgtgattcctccagttttgttctttttgctcagaatagctctggctattctgggtcttttgtggtttcatgtaaattttaggattatattttatta

SEQ ID NO: 561879 - DNA, 582 bp, Homo sapiens
ctgtgtattgcctctgcactttgttgattatttaatttgctatgcagaaactttttaacttgatgtgatcccttttgctcatttttgctttggttgcctatgcttgtggggtatgacttaagaaatctttgcccagaccaatgtcatggagagttttcttaatgttttcttttaatagtttcatagtttgatgtcttagatttaagtctttaatctattttgtttttatttttgtatatggcaagatataggggtctagtttcttccgcatatggatatctacttttcccagtaccatttgttgaagagactgtcctttctgcaatgtatgttcttgacacttttattgaaaatgaattcactgtagatgtgtggatttgtttctgggttctctattctgttctgttgttctgtgtgtctgtttttatgccagtaccattctgttttagttactatagctctgtagtataattttaagtcagataatgtgatycctccagttttgttctttttgctcagaatagctctggctattctgggtcttttgtggtttcatgtaaattttaggattatattttatta

SEQ ID NO: 561880 - DNA, 513 bp, Homo sapiens
gattcctccagttttgttctttttgctcagaatagctctggctattctgggtcttttgtggtttcatgtaaattttargattatattttattaacatatttctgtgaagaatgtcattggtattttgataggaactgcattaaatctatagattgctttgggtagtaaggatattttaacaatattgatttttccaatccatgaacatggaatatctttccattttttggtgtcctctttaatttcttgcatcagtgtttatagtgtttctttcatcagtgtttatagttttcattgtagagatcttttactcctttgattaagtttattcctgggtattttatttgtagctgttgtagacgagattactatcttgatttctttttcagattgttcactgttggcatatacaaatgctactgatttttgtatgttgattttgtatactacaatttcactgaatttgcttattacagagagactaaagatagttaggtccattaccaaatgtgt

SEQ ID NO: 561881 - DNA, 503 bp, Homo sapiens
gcggtagctgactttgtaatcccagcactttgggaggcagaggcaggaaaatggcttgagctcaggagttcaaaaccagcctgggcagcctgtctataccaaaaaaaaatacaaaaattacctggcgatggtggcgtgcacctgcacctacttgggatgctgaagtgagaggatcacaagccccagatgtggaggttgcagtgagctgagatcgcaccactgccctccattctaggcaacagagccrggccctgtatcaaaaaaaaaaaaattagtaacatttatatacactaacagtgaacaatctgaaaaagaaatcaagaaagcaatttcatttatccatacaaggaaaattataacacactggaaaaagaagttgaagagaacacacaccaaaaaatggaaagatatttcatgctcaaggattgacagaattaatatttttaaaatgacagtactatccaaagcaatttatagattcagtgcaatcctcatgaaaagac

SEQ ID NO: 561882 - DNA, 370 bp, Homo sapiens
attcttttccaaatcctgccttcccctataggaatcatgtacacggtctcaggaatattcttcacattcctccttcagcacccaccccaacattttctgcttctgaaagcctttgggtacttttgtacttcgattggttggaatgaaaaacaagaaggagttttaaaagcttatttaggtctataactatattttacataacaaaattcatacatgcaagtaacaaagtacacaaaatataggtgaaagcaatgttaaagtgccacacaagttttaataaattaatgactttttatttgaagcagaagaggatgaaccgccctccccscaaaaagtcaaaagacttcagttatcctgggaagaaagttct

SEQ ID NO: 561883 - DNA, 593 bp, Homo sapiens
aaaaatgagaggaaacaggagagaagggacaaggcaggargaaaaggagatggctgggattactcacctcaaattgggcagccttcacaggatcagtggaattggctgtggggaaaaagaaaaagattagccagggcactgctgttgaaaagggcctgcccacgctgatgctgaggctgcaaaaccataaccagactcaaagcaaggactgctgaccccttgacacagtcctgtaaggccaagggctaagtaaatatggcctcatgtacccacccttggggtcacccagccacaagccttccccatgggccacactggtggagggaagcagtcacttgggccacactcttttcagggaattgctgagctttcctagaagcaaaccagacagcttggggatctgagatactggggaagacgtggagcagggtgttcagcatcagagtgaagtaaagtccagatttttgctgaccacatcaggaagagaaggctgagggccatttccacattgtccaaatgtagtgcatctttgttggaactttgaagaatatagtactccatggcattaaaaaggaagacagaaagagaaagta

SEQ ID NO: 561884 - DNA, 593 bp, Homo sapiens
aaaaatgagaggaaacaggagagaagggacaaggcaggaggaaaaggagatggctgggattactcacctcaaattgggcagccttcacaggatcagtggaattggctgtggggaaaaagaaaaagattagccagggcactgctgttgaaaagggcctgcccacgctgatgctgaggctgcaaaaccataaccagactcaaagcaaggactrctgaccccttgacacagtcctgtaaggccaagggctaagtaaatatggcctcatgtacccacccttggggtcacccagccacaagccttccccatgggccacactggtggagggaagcagtcacttgggccacactcttttcagggaattgctgagctttcctagaagcaaaccagacagcttggggatctgagatactggggaagacgtggagcagggtgttcagcatcagagtgaagtaaagtccagatttttgctgaccacatcaggaagagaaggctgagggccatttccacattgtccaaatgtagtgcatctttgttggaactttgaagaatatagtactccatggcattaaaaaggaagacagaaagagaaagta

SEQ ID NO: 561885 - DNA, 593 bp, Homo sapiens
aaaaatgagaggaaacaggagagaagggacaaggcaggaggaaaaggagatggctgggattactcacctcaaattgggcagccttcacaggatcagtggaattggctgtggggaaaaagaaaaagattagccagggcactgctgttgaaaagggcctgcccacgctgatgctgaggctgcaaaaccataaccagactcaaagcaaggactgctgaccccttgacacagtcctgtaaggccaagggctaagtaaatatggcctcatgtacccacccttggggtcacccagccacaagccttccccaygggccacactggtggagggaagcagtcacttgggccacactcttttcagggaattgctgagctttcctagaagcaaaccagacagcttggggatctgagatactggggaagacgtggagcagggtgttcagcatcagagtgaagtaaagtccagatttttgctgaccacatcaggaagagaaggctgagggccatttccacattgtccaaatgtagtgcatctttgttggaactttgaagaatatagtactccatggcattaaaaaggaagacagaaagagaaagta

SEQ ID NO: 561886 - DNA, 593 bp, Homo sapiens
aaaaatgagaggaaacaggagagaagggacaaggcaggaggaaaaggagatggctgggattactcacctcaaattgggcagccttcacaggatcagtggaattggctgtggggaaaaagaaaaagattagccagggcactgctgttgaaaagggcctgcccacgctgatgctgaggctgcaaaaccataaccagactcaaagcaaggactgctgaccccttgacacagtcctgtaaggccaagggctaagtaaatatggcctcatgtacccacccttggggtcacccagccacaagccttccccatgggccacactggtggagggaagcagtcacttgggccacactcttttcagggaattgctgagctttcctagaagcaaaccagacagcttggggatctgagatactggggaagacgtggagcagggtgttcagcatcagagtgaagtaaagtccagatttttgctgaccacatcaggaagagaaggctgagggccatttccacattgtccaaatgtagtgcatctttgttrgaactttgaagaatatagtactccatggcattaaaaaggaagacagaaagagaaagta

SEQ ID NO: 561887 - DNA, 590 bp, Homo sapiens
caggtggtgggaacccccatttataactggttggtcaaaagcacaggtaaaacaacctggggcttcatcctggagtatcagaagtgtcttgtgagactgagcccttcacttgtgtcacctgatgctatttccagttagatagtgttggaattcaattgaatttgagcagaagtcccaatccccagacctgtagttgtcagtgacctcttaggaactgggctgcacagcrggaagtgaggggcaggtggggagcaaagctttatctgtatttacagtagatccccatggctcacatcaccgcctgagctcctcctcctatcagatcagctgtggcattaaattatcacaggagcatgaaccctattgtgaagtacgcatgcaagggatctaggttgcattctccttatgagaatctaatgcctgatgacctggcattgtctcccatcaccctagatgggactgtctagttgcaagaaaacaagctcggggctccccctgattctacattatggtaagttgtataattacttcattaaatattacactgtaataataatagaaatgaagtgcacaataaatgtaatgcactt

SEQ ID NO: 561888 - DNA, 590 bp, Homo sapiens
caggtggtgggaacccccatttataactggttggtcaaaagcacaggtaaaacaacctggggcttcatcctggagtatcagaagtgtcttgtgagactgagcccttcacttgtgtcacctgatgctatttccagttagatagtgttggaattcaattgaatttgagcagaagtcccaatccccagacctgtagttgtcagtgacctcttaggaactgggctgcacagcaggaagtgaggggcaggtggggagcaaagctttatctgtatttacagtagatccccatggctcacatcaccgcctgagctcctcctcctrtcagatcagctgtggcattaaattatcacaggagcatgaaccctattgtgaagtacgcatgcaagggatctaggttgcattctccttatgagaatctaatgcctgatgacctggcattgtctcccatcaccctagatgggactgtctagttgcaagaaaacaagctcggggctccccctgattctacattatggtaagttgtataattacttcattaaatattacactgtaataataatagaaatgaagtgcacaataaatgtaatgcactt

SEQ ID NO: 561889 - DNA, 642 bp, Homo sapiens
ctttcctcattcttgggcataggctgaactaactttgggagaaacttagtttatagtttgtggtttaaagcaaagatgataacagccctttcccagggcagacctcctttttttctgaagactagattgtctttgtaggactaacattagccacaagattggaaattatggtttaggaatcatgcaggtggaggctacaagattctgacccttcctaagcactgatcctaagatcggtgcttgagatattttgcagaccctgcacttgatggatcacctggcaacacccagatcaataaactggctcatctgatcttgtggtgcccacccaggaactgactcagaacaagaagacagcttcaacttcctgtgatttcatccctgaccaatcaacactcctggctcactggcttcccctccaccaaccaagttgtccttaaaaactctgctccccgaatrctctggaagactgatttgagtaataataaaactccagtctctggctcagtcagctctgcatgaattactctttctctattgcaattcccctgtcttgatgaatcagctctgtctagttaccatcctccacttctcctttcttattgtgtcacttagggctctgggttataaacaactttatca

SEQ ID NO: 561890 - DNA, 642 bp, Homo sapiens
ctttcctcattcttgggcataggctgaactaactttgggagaaacttagtttatagtttgtggtttaaagcaaagatgataacagccctttcccagggcagacctcctttttttctgaagactagattgtctttgtaggactaacattagccacaagattggaaattatggtttaggaatcatgcaggtggaggctacaagattctgacccttcctaagcactgatcctaagatcggtgcttgagatattttgcagaccctgcacttgatggatcacctggcaacacccagatcaataaactggctcatctgatcttgtggtgcccacccaggaactgactcagaacaagaagacagcttcaacttcctgtgatttcatccctgaccaatcaacactcctggctcactggcttcccctccaccaaccaagttgtccttaaaaactctgctccccgaatgctctggaagactgatttgagtrataataaaactccagtctctggctcagtcagctctgcatgaattactctttctctattgcaattcccctgtcttgatgaatcagctctgtctagttaccatcctccacttctcctttcttattgtgtcacttagggctctgggttataaacaactttatca

SEQ ID NO: 561891 - DNA, 642 bp, Homo sapiens
ctttcctcattcttgggcataggctgaactaactttgggagaaacttagtttatagtttgtggtttaaagcaaagatgataacagccctttcccagggcagacctcctttttttctgaagactagattgtctttgtaggactaacattagccacaagattggaaattatggtttaggaatcatgcaggtggaggctacaagattctgacccttcctaagcactgatcctaagatcggtgcttgagatattttgcagaccctgcacttgatggatcacctggcaacacccagatcaataaactggctcatctgatcttgtggtgcccacccaggaactgactcagaacaagaagacagcttcaacttcctgtgatttcatccctgaccaatcaacactcctggctcactggcttcccctccaccaaccaagttgtccttaaaaactctgctccccgaatgctctggaagactgatttgagtaataataaaactccagtctctggctcagtcagctctgcatgaattactctttctctattgcaattcycctgtcttgatgaatcagctctgtctagttaccatcctccacttctcctttcttattgtgtcacttagggctctgggttataaacaactttatca

SEQ ID NO: 561892 - DNA, 729 bp, Homo sapiens
atgatgtcattatgtgaccctctaacccaatgattcctctttccgctgtattatacacatattcattaatcacaaacttgattcattattgggaataatagaatacagatagactagagtttacttttttcttcaaaaaaattgttttctttggaagtcacctttgcatatcagattgtgaagtgagcagtatagagagagaaacaagagaacaaatttaattgtaatttcattatgcttatgacatggttattttattttaggaataaaataacacagtgatgacaaagagttgatttaatctcttcattagggaagtcctgatatttactggaaatatcttattagctactagcttaatttatatatagcaaaatgtaacaaaagtatatttgttttaaaaatcattaygctaatgtagactttcttccaaattttaactatattttatccttcataacttaatccgaatctttttttttcacttggaaatatttttatttatatttcaatgtaaatagagtcccctgcttcaaaatttctttttttaattattattattatactttaagttttaaggtacatgtgcacaatgtgcaggttagttacatatgtatacatgtgccatgctggtgtgctgcacccattaactcgtcatgtagcattaggtatatctcctagtgctatccctccccactctccccaaccccacaacagtccccagagtgt

SEQ ID NO: 561893 - DNA, 729 bp, Homo sapiens
atgatgtcattatgtgaccctctaacccaatgattcctctttccgctgtattatacacatattcattaatcacaaacttgattcattattgggaataatagaatacagatagactagagtttacttttttcttcaaaaaaattgttttctttggaagtcacctttgcatatcagattgtgaagtgagcagtatagagagagaaacaagagaacaaatttaattgtaatttcattatgcttatgacatggttattttattttaggaataaaataacacagtgatgacaaagagttgatttaatctcttcattagggaagtcctgatatttactggaaatatcttattagctactagcttaatttatatatagcaaaatgtaacaaaagtatatttgttttaaaaatcattatgctaatgtagactttyttccaaattttaactatattttatccttcataacttaatccgaatctttttttttcacttggaaatatttttatttatatttcaatgtaaatagagtcccctgcttcaaaatttctttttttaattattattattatactttaagttttaaggtacatgtgcacaatgtgcaggttagttacatatgtatacatgtgccatgctggtgtgctgcacccattaactcgtcatgtagcattaggtatatctcctagtgctatccctccccactctccccaaccccacaacagtccccagagtgt

SEQ ID NO: 561894 - DNA, 729 bp, Homo sapiens
atgatgtcattatgtgaccctctaacccaatgattcctctttccgctgtattatacacatattcattaatcacaaacttgattcattattgggaataatagaatacagatagactagagtttacttttttcttcaaaaaaattgttttctttggaagtcacctttgcatatcagattgtgaagtgagcagtatagagagagaaacaagagaacaaatttaattgtaatttcattatgcttatgacatggttattttattttaggaataaaataacacagtgatgacaaagagttgatttaatctcttcattagggaagtcctgatatttactggaaatatcttattagctactagcttaatttatatatagcaaaatgtaacaaaagtatatttgttttaaaaatcattatgctaatgtagactttcttccaaattttaactatattttatccttcataacttaatccgaatctttttttttcacttggaaatatttttatttatatttcaatgtaaatagagtcccctgcttcaaaatttctttttttaattattattattatactttaagttttaaggtayatgtgcacaatgtgcaggttagttacatatgtatacatgtgccatgctggtgtgctgcacccattaactcgtcatgtagcattaggtatatctcctagtgctatccctccccactctccccaaccccacaacagtccccagagtgt

SEQ ID NO: 561895 - DNA, 590 bp, Homo sapiens
tcactcaaaactgcacaactacatggcaactgaacaacatgctcctgaatgactactgggtaaataacgaaattaaggcagaaataacgaagctctttgaaaccaatgagaataaagagacaacgtaccagaatctctgagacacagctaaaacagtgtttacaggaaaatttatagcactaaatgctcacaggagaaagtgggaaagatttaaattgacaccctaacatcacgattaaaagaactagagaagcaaaagcaaacaaattcaaaaggtagcagaagacaaagctggaagatcaaagatttttaaaagggaggaaaataattgagacattttgcaataaatccaccacaatatattttgtttacaaagttctttaaaatattgagctgagcctttatcctattaagtgccttgaggaacacagacacatagtctaacttcctttctccatgaattttagtattagatttatatctttataggatatattcctccaccattcctctcatgagttcytaccatcctagtgactttactctgtaagctattcatcaagattcctattcatatttgacttgcagaa

SEQ ID NO: 561896 - DNA, 209 bp, Homo sapiens
gtatatgccaacaaactggaatatctgtaaataatgtaaaaatcctcaggtacatacaactacaaagattgaaccatgaagaaatccaaaacctgaasagaccaataacaagtaacaagatctaagtaaatcaaaagtcttccagtaaagaaaatcctgagacccaatggcttcactgcagaattttaccaaatatttaaagaagaaat

SEQ ID NO: 561897 - DNA, 569 bp, Homo sapiens
agaacatgtaaactttagtcaataattgtaaattttaaaataactaaaagggtctaattgaattgtttataacacaaaggataaatgcttgaggagatggataccccatttttatgatgtggttattatgtattgcaagtctgtatcaaaatatctcatgtaacccacaaatatatacacctactatgtacccacaaaaattaaaacgttttaaaattatttttaaaaatgaaaattacactctaaatgacacttagaaaaatatacagttcatagacygagagaaaatatctgcaaattgtatatctaatacaaggctcttaaccaaaatacataaagaatacttacaactgagtaataagaccaactacctaacttaaaatgagtaaaatatttgaatatttcacaaaaataagacatataaatgaccaataagcatatgaaagagtatttgtgatcattagtccttacagaaatacaatttaaaaccacaatgagacacacccactggctgtaataaaaaggcagctaattctacaagctggtgaagatgtggagaaactacaaca

SEQ ID NO: 561898 - DNA, 432 bp, Homo sapiens
aaggcaaaagtggaagattaattaaaacatagaatatttagcaataaagtatgagatgaaaataattgaacagaaaagcagagtacaatgttgcagaaaaaaaaataagtgtatagaacacatagaaacaaatgttmtaaaataaagtacggagagaaaagactgaaaaaaaaaacagcaatgatctgtgggacaatataaaacagtctaccatacatattattggaattacagaaaaaagaaagctaggcaggggaatgataaaaacatttatataaatagtggctgaaaattttcaaaatttgttataaactaaatctgtaaatccaagaagctcagactaaatgaacatcaagagaattacaaaaacagcaaacaaagaaaaacaataacaaaaacactataccaggacacattacatcaaatttatgg

SEQ ID NO: 561899 - DNA, 432 bp, Homo sapiens
aaggcaaaagtggaagattaattaaaacatagaatatttagcaataaagtatgagatgaaaataattgaacagaaaagcagagtacaatgttgcagaaaaaaaaataagtgtatagaacacatagaaacaaatgttataaaataaagtacggagagaaaagactgaaaaaaaaaacagcaatgatctgtgggacaatataaaacagtctaccatacatattattggaattacagaaaaaagaaagctaggcaggggaatgataaaaacatytatataaatagtggctgaaaattttcaaaatttgttataaactaaatctgtaaatccaagaagctcagactaaatgaacatcaagagaattacaaaaacagcaaacaaagaaaaacaataacaaaaacactataccaggacacattacatcaaatttatgg

SEQ ID NO: 561900 - DNA, 560 bp, Homo sapiens
atttttatttttaaaaccctatacagtttaagtcctcaaatttaatccacctattaaaagcraagcttttaaaaagtagcctgttattcaattccattcctcttaaaaagtatccatacagcagggaatgttagggagttaacaaaataaagcattatcttcaccttgtgaaagaaacatataggaaagcatcaggaatcacaactttttagacttgtgatagctggacagggtcttagaatggactcctctcattttagagacttaaaaatagagatgtaaaatattctacttctagttttgtgattggaacattcaaattcccaatccatcatttttttcctttcattaaatatgatgagacatacaatgttcttacttcactgcctggcacagagatagtgcctaataattgctgctaatgctatataatagacagcaacagatagacatgaatatacacatagatggatacacaaatgcatacacaaatgttgagggtaagaaaagaggtgaagtggagttacaaggtagggttaatgagtttggggctattttcc

SEQ ID NO: 561901 - DNA, 560 bp, Homo sapiens
atttttatttttaaaaccctatacagtttaagtcctcaaatttaatccacctattaaaagcgaagcttttaaaaagtagcctgttattcaattccattcctcttaaaaagtatccatacagcagggaatgttagggagttaacaaaataaagcattatcttcaccttgtgaaagaaacatataggaaagcatcaggaatcacaactttttagacttgtgatagctggacagggtcttagaatggactcctctcattttagagacttaaaaatagagatgtaaaatattctacttctagttttgtgattggaacattcaaattcccaatccatcatttttttcctttcattaaatatgatgagacatacartgttcttacttcactgcctggcacagagatagtgcctaataattgctgctaatgctatataatagacagcaacagatagacatgaatatacacatagatggatacacaaatgcatacacaaatgttgagggtaagaaaagaggtgaagtggagttacaaggtagggttaatgagtttggggctattttcc

SEQ ID NO: 561902 - DNA, 504 bp, Homo sapiens
atacttaatcttatttctcagtattaaaatgttttctattttttgtatcataaataataagtaaatttaattatacacaaatcttttccaagtttttgactatttccttcaattatatttttaaaagtaaatttactaaatgtatgaacaaattttaaaagatcaatgtgttaattgctgttacaaaaacgctattgatgtatggtacttattttgaagcaggtttctttatgacactgcaatcatttccaggtwtttttttccccaattatttctcttatcttagaaatgcccagttatccttcacaacttggatcccagaatgctggcagttaggtttataccctctgtgcaggaggtgggtagactgcagcctagggagtttgaggagacaaagaacaaaaaagctaaagttaccatcatccaagtttccctaataaaatagccttgccagctgaccagcaatgaggttcttagttgacagtgaccattcattagtgcaga

SEQ ID NO: 561903 - DNA, 504 bp, Homo sapiens
atacttaatcttatttctcagtattaaaatgttttctattttttgtatcataaataataagtaaatttaattatacacaaatcttttccaagtttttgactatttccttcaattatatttttaaaagtaaatttactaaatgtatgaacaaattttaaaagatcaatgtgttaattgctgttacaaaaacgctattgatgtatggtacttattttgaagcaggtttctttatgacactgcaatcatttccaggtattttttyccccaattatttctcttatcttagaaatgcccagttatccttcacaacttggatcccagaatgctggcagttaggtttataccctctgtgcaggaggtgggtagactgcagcctagggagtttgaggagacaaagaacaaaaaagctaaagttaccatcatccaagtttccctaataaaatagccttgccagctgaccagcaatgaggttcttagttgacagtgaccattcattagtgcaga

SEQ ID NO: 561904 - DNA, 587 bp, Homo sapiens
actatatttgcaacaattttggtcacaactggggcttggctttattttttttatgttcccagttataagggaaatgtgggtaaaatgtagtaacccagttggctgcagcaatctacaggcattaatcatgattagaaattccaacagattgctactgattttgccacagtcactctaaaccatgtaaatrtcttcctctccatgtacgctctcaccaatttccacagatatttcccagtcacccaatttttcagtaaacattatgcctaattctagtccgaggcagcaggcaattttctgacataagtcctggtaacagctgcaggtaaagattttgctatttggcactttgaccatctagttggcaacatttcactcaagcaacactgcttgcgatgcagacaaaatcaaagtcataccacagactaagttactaattgctttgtgttgttactctattatttttcactggttatgttttgactacataattattgttcactgtacaatcaagtagcacacaactatcattttacctttttcttcaaaataaaaagaaattgtcttgaattaattttgaatataga

SEQ ID NO: 561905 - DNA, 593 bp, Homo sapiens
gatcaggagtttgagaccggtgttatcaacatggtgaaaccccatctccactaaaaatacaaaaattagccagatgtggtgacaggcacctgtaatcccaggtactcaggatgctgaggcaggagaatcacttgaacctgggaggctaggttgcggtgagccgagatcgcaccattgcactccagcctgggagacagagtgagattgtgtctcaaaaaaaaaaaaaaaaaaaagaattggtatgtactgcatttacacatttttaaaattgagtatagaaggtttgggatcatgtgtattattcagattacatcagaagtactaaagattcaagcaaaaaatgcactcattcaggaaaacccaatttatagatgcttgagctgagaaattccaagagaaggttataaggctattaattatatttgaagcctacaaagtttagttctacttgtgtttaatgatgtgtcttagtaatataatgtattaraaaacagccctaaatatgatctctatatagggtaatcattttccatcctttcactttgtgaaaacagatgaaaggtttttggatttggggttattttaattttact

SEQ ID NO: 561906 - DNA, 608 bp, Homo sapiens
ggtgtagacagggaaaggagaggcgttggtcaaatagtacaaagtttcatttggacaagagaaatagatcctggtgatctattgcacagtatgatgtctgtagttagtaataaggtattgtaggccaggtgcagtggctcacacctataatctcagtgctttgggaggccaaggtagaaggattgcttgtggccagtagttcgagactagcctggtgtattagtcagtgttctctagatagaaggattgcttgtggccagtagttcgagactagcctggtgtattagtcagtgttctctagagggacagaagtaacaggatacatgtatatataaaagggagtttattaaggaatattgactcacatgatcacaaagtgaggtttcacaataggccatctccacactgaggagcamggaagccagtctgagtcccaaagctgaagaacttggagtctgatgtttgagggcaggaaccatccagcacaggagaaagatggaggccagaagactacatcagtctagtctttccatgttcttttgtctgcttttattctggctgtgctggcagctgattagattgtgcccaccccgattgagggtaggtct

SEQ ID NO: 561907 - DNA, 412 bp, Homo sapiens
ttctgtttttccattcattaaaaatatctattagggaatttaccactatgtggtacgcattatagtaatgtgtgtatatatcttccatctctgggaacctccaaatatttcaatgacagtgtctcctctatatttttatcctcctattatgtctatccctcatgcgcatacacagtagatgcctaataaatgttcacaccaaattgtttacttgactatacataaggggtcttcaaaaagtttgtgaaaaatgtgtatcatgaaaaaaactatgcacagatttcaaaaaacatttgcaccaaaataaacccatactaacatgttataacatgtctgaacaggatctagtctgaggccctaggaaccattaagacatccatttgaaaasagcctgtatcagagcaacatgaat

SEQ ID NO: 561908 - DNA, 404 bp, Homo sapiens
gaaacaaatcagtatttcaaaaaaatgtagacagtcctcaacttacaatggtcaacagggtttttctactttacaatggtgaaaaagcactgtgcattcagtagaaatcatacttcgaatttttaaattttgaacttttctcaagytagtgatatgaggtatgatactcttacaagagatactcaacactttattagaaaataggctttgtgttagatgattttgcccaattgtaggctaataaaagtgttctgagcacatttaaggtaggctagggtaaactatgatgtttagtaggctagatgtattaaatgccttactgacttacaataatttcaatttatgatggacttatgaggacataaccccactgtaaggagcatctgtacagataagatggagta

SEQ ID NO: 561909 - DNA, 565 bp, Homo sapiens
caagaccccaactttaaaaaaaaaaaaaagttgggagaagaactactggtgacatagaaatcaggtttcagacctacacttctagcaacaaatggttttctctcattcctatgccattgaagcccgggatacttcactctcttcactcctagaggtcccctgcaagtgccaagcctatgtcaagtattctgcaaagctcagctcaaaccaaccccccaaattattggtaacaattatccctcctaatgagcttcagttttggaaagggatctttgaggcatagggctaactttttaactcaaaaaaatatatatatatttaggccaggcayggtggctcacgcctgtaatcccagcactttgggaggctgaggtgggtggatcatgaggtcaggagatagagaccatcctggctaacacggtgaaaccccatctctactaaaaatacaaaaaattagccgggtgtggtggcacatgcctgtagtcccagctactcaggaggctgaggcaggagaatcgctttaacccaggaggcggaggttgcagtgagccgagatcgcaccact

SEQ ID NO: 561910 - DNA, 626 bp, Homo sapiens
ccctgattaaaaactggaaacgttaaragacttgaagatttctgctctctgcacctgcttaactcttcctcttgcccttactaaattttagctgctttctttttggctaatttcacaatgttcaaaagtctattggaaaaaaagaaacccacaaagcaccatagataaaaactttgagatggggaaaaagaaaaatactggtttgatctgctcccttcctctcccagaacccaggaaaatgcccagtacacaagaagcaaggaagggaaggataaaaaaaggagggagggaattagttctggatgaaatgtcagaaaaatggccaccatgaaggccccagtcaaccaatcacttcctcttcttgggtctcctgatggaatgttttcatctttgggaaaatctttccacctttatctcttctagaactgtaaaaatgacaggatgagccagggcagtgtctcatgcctataatcccagcactttgggaggctgaggaagaaggatcacttgaggccaggagttcaagaccagcctgggcaacatagatctctacaaaaaattctaaaaagtaaattagccaggcaaggtggtacatgcctgtagttccagttattcaggaggttgag

SEQ ID NO: 561911 - DNA, 386 bp, Homo sapiens
acatttctgtagggtttaataaytttccttatatcttccacagaaattttatgtttattttttttctcaattttaatcaaatttgactacaatctgtgtagtacaaatccatgtattttcctcaaaaatttatgcatttcagcaacttttttttattatatcttaaattctggggtacatgcgcagaacgtgtagatttgttacatagatatacatgtgccatgatggtttgctgcacccatcaacccgttatctacattaggtatttcttctaatgggatccttccccaagcaccccaatccctgacagaccccagtgtgtgatggtcccctccctgtgcccatatattctcattgttcagctcccacttataagtgagaacatg

SEQ ID NO: 561912 - DNA, 611 bp, Homo sapiens
tatctagttcaggaatcttttttttccccctcatttctttctcccaaggggatttcagttttcaagcataagttcacgtattaaagcaacatttagtaatgtaggaggtggattttcctgagtgtattctgctggccacttctcagatatagattgtcttgtgcatgacaagggtgttgtgcatgacaagartgttgtgcatgacaagcgtattgggtattggtgtctgctgcatctgctgcattgtacaggtcctactatgatgttagattcattcatatggcttaacttacatcctatgaaaatgtcctcctttttcaaatctgagagtttttcctctcttctgacccttgcagccactcacatattcttcttgcttgcaaggcagaatccagagactctcacaaggtaggcaagactttaaattgctcttaggaccaaacaactgtccttcatcaatcactactctattactctggtacctaaagatactgattaactggaaatgtttcttataaccaactattaaaagaaatgccatttcaaagagagaacatatcacttcagataacaaaaccagggcaaatgtatggtacctcatctgccttcaa

SEQ ID NO: 561913 - DNA, 619 bp, Homo sapiens
tgttgcccaggctggcctcgacctcctgagctcaggcaatccacccacctcggcctcccaaagagctaggattataggcatgagccactgtgcccagccaacattagctccaattttaaataaaaatgtaatatattattgttatgccttcatggaccctaaataatatgtttcaacatattttaaattcaagagtaagaatctaaaagaaaagtcaaatattgactgggttgttttagaatttgtgatggttaattttgtgtttcaatttgactgggctattgtgcctagttgtttggtgaaactcttagtctagaatttgctgtgagggtatattgtagatgtaattagcatttataatcagttgactttaagtcaagcagattactctcactaatgtggctaggctttatccaattggtgcaaggccttaagagcaaaaattgaggcttcccagacaagaaataatcctgccttatgattataacagaaatkctgtgtgagtactcagcctgcaggtctattctgtagattttggactcaagatcaattgttaccttctagcctgccagctgccctacaggtttttgacttgccagtccccatagtcatgcaagtc

SEQ ID NO: 561914 - DNA, 554 bp, Homo sapiens
gcatgccaccacgcccagctaatttttgtaatttttgtagagacggggtttcaccatgttggccacgatggtcttgatctcttgacctcatgatctgcctccctcagcttcccaaagtgctgggattacagatgtgagccaaaattctttagttaaatatattctctatgttggtacacaaaggtactagtgttctagattaagctattttgtaaaactcttaatatgaaaaaagtgttgttgagagggagcatccacatgaataaatggagacaaaattttggaaatgtttgccaatattttttatgtggaaaatatgtttgaggatttattgtctggatgcatggtactgtggcaaatgagatgatcagtttgtcaaacactactcaaagggmcatctctttgtaaaataaaatgctgtgatattggatgctgtggttgaatattttggtaaatgcctaatactacttccttctaaaataagtgaataattactaggtttactattttgtttgtttgaacatataataatgcacttttactatataatgtgt

SEQ ID NO: 561915 - DNA, 469 bp, Homo sapiens
gatcctcctgcttcctctttataaagactgtttagattatattgggtctacttgcacaatccaggataattgccacatctcaagattctaaatttaataacaaaactccctttcgccatataaagtaacattcacaggttmcagggataagaacatgaaaatatttggggcccattattcaaaattacagcattgcttccctatccaaataaaagaacacaataaatttaaagaaactgcacttttctatgccagtggaagagggcagtcttgaactaagaaacctagttagacccccactctttctcgtatgagtgaaataactggtattgctggtccctggggaaataaaattgggaagtgaacagaaagtagaagatagcatcgatacaatggttcagaaagaagaaaaactcagaaaacatttcaaattatgaaatttctttcaccaaatataaattcaaggcat

SEQ ID NO: 561916 - DNA, 594 bp, Homo sapiens
ttttaacaattttagtaggtgtacttccttaattcagagcatcatgacatcttccctgaatcattacagcctcttgccctctgccctcttccataccttgtctgtatgctatactttaagatrctactcaggtctgtgatatctttccacatttcttgccacctaaaaaactctcaccttccgcagaatttgccactctctcttcagcaccacgtccatattccataacagacataccttggaggtgctcctattcctgtgcttatcagtttaactatctcactgcacagtaatggttttctgcctgtttcctactgcagattgttagcttgaggtcaagggctaggttttattcatcttttcatgcccagttcgttttacactcagcacagagcctgacacataaaaaggacttattgtttctgaaggatggagtgaaagaaacccctgagtttccacttaaggtgaacttgatatttctaattattacaagactcttcaaaaaaattttaatgagttgaggatatgctctatgtccaattttatctatacaatgaataacgatattttctgttttcattttcttttcaaaag

SEQ ID NO: 561917 - DNA, 634 bp, Homo sapiens
aatattttcagggctagtttcttttcattagtacatgttaagcatttctcttctacaatgtgtttaatatctacacattattatatcacaattatgagccataatttttatatccatctgccactgatattttattttcagtattctacctttaatcatgaaccttactttttgtatgcacttctgattatttccatggaacacattcactgagttataattgttgggtcacagggaactgctctgtcatttgaaatctgggaagcaggaaccatattgtaatgcgcctcatttataaacaggaccaccatgccatctgcagatggcactatgtgagcacctgactaaggtgggccaggtgctcttcatggtttttaactttgaggctaaaaagctggttttatgggccttcctaatcatattcatcttttagtacttgaccccttcctctggcttcttaagaagttaatgaatttaaaaatcaatactaaaaatgtttaaggtcataaatatcttctacttgctttacaaaggaagaaaaaacaccctggcctcacgaagcctttagtcctgcttaaattcattcacactttgtaggattatttcrtattcttgaggtgggatattgaattat

SEQ ID NO: 561918 - DNA, 550 bp, Homo sapiens
acctggctgtattttttttttttttttttttttttatagagatgagatcttgctatgttgcccaggctggtatcaaattctggtctcaagcaatcctcctgcctcagggtctcataatttataaragaaattaataacccttttggaaattaaaaacataaatagaaaaacaaaaaaaattggatgaggagggttagaacataaaggaggaaattgtctgtgatgtaaagcacagtcaacaaaagggacagatcatctcagaaaagaaatgtcaaagaaaaaaatccaggagtgctaacatttggataagagaaaaatattaagaagaaattattttggagaataagaaaaaattatcaggcctgactttgtattggaaggttgatcctataaattctaagctgaatattggtaagaagacaccaagaaattttagaacctaaaattttttaggcctccaagcctctagatggaagaactcacttgcagactcaaggcgccagctgccattaaccttgtcatcagcaacaccaaaccattcccttacaac

SEQ ID NO: 561919 - DNA, 600 bp, Homo sapiens
gaagaaaacaaaaacacatataattgtagaatttgtgtaatttctctgacctttataccacccatatccatcaaattaatagtttttctctttatgttaagctgtgtaaacaaatccaagtccacttctctttcacatattttgcaggtaagtgtgagagttttaatttattcatatagaaaatactctaaagctcgaaatatatctataaggcattcaattttggttctacgtgcttagcctgatttgtcatttctaaaggaatgtttaacttgggaattttctggtttaagctacagacatgtttattcaggtttttgcttgtctgtttagggtattgtaaggctcctgggaagatttgtatatataaacttatttgctgtgcacttaggaaagatgaatgaactgagagatagatccctttggatcttgtcttttytcttcctctcctttctctcccttttgtctacccctctccctctctccacttccctctctctcactccctcttcctccaccttctttctttctcctgctccctccctccctctctttcctctccattttgaaataagaaggattcatggcaacctgcacagg

SEQ ID NO: 561920 - DNA, 599 bp, Homo sapiens
tgatttagggtatctggcagaagaaatttctaagcagcaaagcattcaagaggtgacttgggtgctgttaaaggcattcagttttataagagaagcagagcataaaagttcagaaaatttgcagcctgacaatacaatagaaaagaaaaacccatattctgaggagaaattcaagcaggctgcagaaatttgtctaagtaatgaggagctgaagtcaatccctaagacaatagggaaaatgtctccagggcatgtctgaggtcttcacgcagcccctcccatcacaggcccagaggcctaggagaaaatgtttttgtgggtgaggcccaggatccctgtgctgtgtgcagcctagggacttggtgccctgcgtcccagccactccagctgtggctgaaaggggctagtgtagagcttgggccttggcttcagatagtgcaagccccaagccttggtagcttccacatggcattaagcctgtgagtgcgcagaagtcaagaatttgggtttgggaacctctatctagatgatttcagatgtatggaaacacctagatacccaggcagaagtttgmtgcaggggcagggctttcatggaga

SEQ ID NO: 561921 - DNA, 597 bp, Homo sapiens
gagagatgagacagagagaaattactagctcatttttttttctttcaacaaagaggcactaggctcagccttgtgactataaacacacataagatgattagtcttattgaaagaattcagagtctggttagggagaaatacacatagataataatgaaacaatgtggtaaatgcaatgattgagagatttacatagtaatgagtgggagtaactagccaagtcagaatgtttgtaaaagatagggagagggatattagtcagggatataactgagatgtttcttgggagaaattggaatgacaaagatagcatttcctctaaaagtaaagtcctgagcaaaatcatggaggcragacagactaaggggtgaatatggagctataagcagtttgcattctgtaacctggtaaaccaggcagagactgccaggctgaaaaaagcaatgaggcaatgaggtatactttgtgttccattttaaagaaaaaatgttttcctaataagatattaaagaatcgaaatgtttacaagcattggagctacactgttaagatctgtgtgctcattgttccactgcccttccagatccattcttcacc

SEQ ID NO: 561922 - DNA, 480 bp, Homo sapiens
gatatcctgatatctggagaacaaaggcattcctaattttgctttaaagataatgatattgattcttgcaaactatataactaagaaaattaatcctttatcacaaacctttgtagcagagcacatctccccatgatctctttttatcatatatacacaagcgttgtacctagggtggatgcattcctcctcttactttcgagaatgtcctactctatggagcagctgtacttttaccactttactttcttaataacagccttscttttgctttgcactgtggactcgctttgaattctttcttgagcgagatccaagaaccctctcttggggtctggattgggatcactttcctgcaactaaagctttgagggttgacaggagatcaagagagaagtgtaacatctcaaagtcatcttagtcatcattttcagatcttaattaatgtgcaaaatatctaagaaaccagagaacactaac

SEQ ID NO: 561923 - DNA, 481 bp, Homo sapiens
tccccatgatctctttttatcatatatacacaagcgttgtacctagggtggatgcattcctcctcttactttcgagaatgtcctactctatggagcagctgtacttttaccactttactttcttaataacagccttgcttttgctttgcactgtggactcgctttgaattctttcttgagcgagatccaagaaccctctcttggggtctggattgggatcmctttcctgcaactaaagctttgagggttgacaggagatcaagagagaagtgtaacatctcaaagtcatcttagtcatcattttcagatcttaattaatgtgcaaaatatctaagaaaccagagaacactaacttggaaaatactataaaaaacaattcttcctcctggagagaaatacatgacgctcaagtagtttgattttataattccttagatagttaggtaattacttacaaatgatcatcagaaatttgaaataa

SEQ ID NO: 561924 - DNA, 556 bp, Homo sapiens
ataatttcaggttttgtattatatggtatgaggtaggatraaagttcattctgtatttggctatccaattgtttcagcagtgttcattgatgagacttttctttcctattgaattgcctttacactgttgttaaaaattaatcatagatatgtgggtatatttctgaagtctctgttctattgcactgatgtgtttatttatctttaacccaacatgcaatacttcattgtcttatctactgtagctttataggaagtctttaagttaggtaacatttgttctccaactttgattttttttttttttcaaagttgtttgggctactttatgtcttctgcatttttctatgaattttagaagcagttaatttctacaacaaggttactagaattttactagaattgcattaaatctacaggtcattttaaggagaaattacattttaacaatatggagtctttcaattcatgaatacagtacatctctctgtttcttttggttttctatctctttcagtatattttgcaagtttaaatgtagtggtatttctcatat

SEQ ID NO: 561925 - DNA, 537 bp, Homo sapiens
ccatatacgataaacctatagataacattctcaatgataaaaattggatagcttttcttctaagatcagggacaagagaagaatgtccactcttaccacttctttttaacatagtgctgtaagtcctattcagagcaattaggcaagggaaaaataaaaataaaatttatcctaataggaaagaaagaggtgaaattatccctatttaccaacatcatgatctcatayatgaaaaaactctaaagaccacaagaaactgttagaaccgataaatgaattcagtaaaattacaggatgcaaaataaacattaaaaaaccagcagcatttccatatactaataacgaactatctgaaaaagatattaagaaaacaacaacatttacaatagcaacaaaaaaattaaacacttaggtgcaaatttaaccaaggaggtaaaatacctgtataccacaaactacaaaacactgatagaataaactgaagaaagcacaagaaaaggaaatatattccatgctcatgaattacaagaattaata

SEQ ID NO: 561926 - DNA, 581 bp, Homo sapiens
ttaaaaattgagacatactacatattttaaattaattaattttaaattaatttcaccagaaatttatgcgctcaaactttattttttaattttggcatgtatgctaaaaataygttttcagtatttaccacaataaaatggtatttaattccaaataccttttcctcagaaaatataattagtttggaagaaattcagatgaaaatgcttcacacgacatcacactgatgtcaaccatgtatttaatggcataactaactcctgctcatattttaacgtcaaaccatgaggcagtaaatgaacataagcccatacaaatattttcataataataaagattgtatgtgctttctactgaaatagatctctataatattgtggtttttatttattataaggtatgtgagtgattataactattaattgtagatactctaatataacatcttattgtacaaaataaaagaagataaaactgctgtgaaattttaatgcaaaatttattgttttgctgtcatctagtggtagtaaagtatatgatacatatgctataaaagtgaattaagatccctactttctac

SEQ ID NO: 561927 - DNA, 552 bp, Homo sapiens
gtttctgactatttgattaattgacatggccttacttagcagttaatctaagattatcaaattactgtgacaaagacagaagaagggaggttagagactaaattaaaactctagttgatatagtgtttgatttacagagtatttgcatttgctgtagtaccaagaaataagatgttatcgctaaatactattgtattggatgaatatgacattattggccatattgcctacagaaactagattgctatcagtattttgattgattatatacaataattgaaaagcagaattttatttagttgcaaatgcattttacaactacttttgaaaattgtatatccattggaagaaattattattatggaacatgaagagcaggaaaatggggaagagggctaaatagttattgtaagagcttttcctataatgtttaatttcccatattatttcctctgcctggyttatctctttgtgtcttaatgaaactatacttttcagactgacttaaccatctttatcattttctgtttttaatgtattgccacctcctcc

SEQ ID NO: 561928 - DNA, 604 bp, Homo sapiens
ctcatatatattttaaggttrtgatataattaaagagaatttctttcttaaattgacctcactttttataacacaagtttgtattctatgtattgccatctccagaatttactagctgttcaatcttgggcaaatcactaaagctctctctactttgaattcctcatgtataacataggcataataacaaatgaacttcacaaggttggtaggcaaattcaatgaattaaacttttgaagctggtggaagaatgtttggccagtgcttgaaggtttctgcaatacctgttagttcttagaagggttgatattttacaaggaccaccttctggggatggaatgttttccaaaccccttctttttgacaagccatgttttgtctgtccttgctcaaattttgcataagaattgctttttccataaccaaatcttataaattgcttcatttctttaacaacggaaattggttacaatttacaaaattgagcagggatgtggaatttattttttaatctattttttaatggatagaatattgaaagattgcttttagacaaaagtatgcttttatgtaatttaaacaaactatacctaagtattgtag

SEQ ID NO: 561929 - DNA, 583 bp, Homo sapiens
tttgaagtgaaagtcatcaatgatctaaggacatgtgttcccttcagatgtcacagttgctttggttttgtcagtcagggaattcactttttatggttggattttactgctgtttagatgcttgtttgatttgagaacatcttaaatttaaatgaacataccagtgctaacgcagtcagaaaagactgagtttattcctagatagaatggcaaaatattatatcaaagtgcagaccacagctttcagygctcactatcaacttacaaaattactaaaaacaagaataattcccaaatgtctttgttaatgttatatcacacatctgtgtcatcagcaaaccaaattctgttaacagagagaattcactgatatatattgttataaagccagaccacactagattgagaaaatagtttacctaattcaagtttttttgtcttgctatcaaaacatcatctcgggaggcggaggtggttggcttatgaggtcaggagatcaagaccatcctggctaacacagtgaaaccccatctctactaaaaatacaaaaaattagctgggtgtggtggcgggcacctgtagt

SEQ ID NO: 561930 - DNA, 580 bp, Homo sapiens
ctcttaatgattataatatttatgttttgatatgttaagaaaatgttaacttgtacatattatagttaaacaacatatgttaaaacaagttcagtatacatacactatgcaatcatttatctccattgtttaggatgatttcagactttatgtgatttaaaatttttttgcattcttttcttatckctctcctaacacacacacacacacacacacacacacacacacgcactcacacaccccagtgtgctgtgaaggttaattccagcagtcccggacttactctgaacttattgccacagttcttgtatgtcactaacactggtaaagtcatggaacatactgatgtatagtatttctttggaatatggatacaaggaatttcagcttgtcagcattattgattgaacagcaagtaatatggtttggctctgtgtccccactcagatctcatctcaaattgttatctccacgcgttaagagagggaggtaattggatcatgagggcagtttctcctatgctgttctcgtgatagtgagtgagttctcatgagatctgatggttttataagcgtctggc

SEQ ID NO: 561931 - DNA, 548 bp, Homo sapiens
gccgaatagctatggttcagctccaggctacaggtcagcttcaaatcttctaagaaaagtgtcttcttatttttgagatgcaggctaaagagcagtaacctatttgggacctaagagagggagaaagtaagcaagtgagtggaattgtacggaatgtttctcaaagtcccagtgtggtcctgtcacctacagtaatatttccttggccaaaaaggaaatatttttaagccttaaaataaggaaaataggtaggcttctatatgaataccgtgattcacacgcaaacaggaaaagatgtctcatcctctcattggagacaaaaatagaatatgacacagatgtcaaactcctcactcatctccaattttaccgtgtttcatgccccaggacataaaaacctctcaggaacaaaataagcgagtattttagattatgatatttgcatgtggaagcatccttaattaattaatgaagccatttggattccacaggactgtcagttttctctctcttattccttttacyattcttattcttattattggctc

SEQ ID NO: 561932 - DNA, 512 bp, Homo sapiens
agtcaagctctgtaaaatatttgaagatatttattctgagtcaaatatgagtgacccatgacctatgacagggatccccaacccttggtccatgagccagtattagtccatggcctattaggaactgaaccacacagcaggaggtgaggggcatgcaagtgaaggaagcttcatcatctccacatcactcacattactgcctgagagctgcctcctgtcagatcagwggcagcattagattctcacagaagcccaagtcccatcgtgaactgcacacaaaaaggatctatgttgcatgctccttatgagactctaatgcctgatgatctgtcactgtcttccatcacccccagatgggattgaaagggcctttacaaaattatgactgagacagtgaaagaaatctaacttaattgactgcatcttgcttctaacctctaagctgtccttgttcattcctgggcataggctgaactaactttgggagaaacctagtttatagtttaaaacga

SEQ ID NO: 561933 - DNA, 512 bp, Homo sapiens
agtcaagctctgtaaaatatttgaagatatttattctgagtcaaatatgagtgacccatgacctatgacagggatccccaacccttggtccatgagccagtattagtccatggcctattaggaactgaaccacacagcaggaggtgaggggcatgcaagtgaaggaagcttcatcatctccacatcactcacattactgcctgagagctgcctcctgtcagatcagaggcagcattagattctcacagaagcccaagtcccatcgtgaactgcacacawaaaggatctatgttgcatgctccttatgagactctaatgcctgatgatctgtcactgtcttccatcacccccagatgggattgaaagggcctttacaaaattatgactgagacagtgaaagaaatctaacttaattgactgcatcttgcttctaacctctaagctgtccttgttcattcctgggcataggctgaactaactttgggagaaacctagtttatagtttaaaacga

SEQ ID NO: 561934 - DNA, 561 bp, Homo sapiens
ctctgtagcacaaaacattccaatagatttttatgtcacttaaagtgaaatccaaactctttgatttggctatacagtcctacaagctctggcccctgattccactctgacttagacatgacttccctcaaagttgctctctgtgctgcagtcacgcaggcctcctcgctattcttcaaccaagttgagtccatttaacttttgcctttgcagttgcctttctctcatgaatgtttgtggccactacataatttgtaacatttttccttcagttatatgctgacattatgctttcagtccttcttttactattctatatagaaggaaaagcccattctttgttctkcttagtttctgttctcggcattccacttttccatttaatgtattaccagatgtcagagtacatgtcttatttgtttatcatttatcttccccaactagaacataagttcctctaaaagtaacatcttcattgtgctcccagctgctaccacattgtctaacacatattagatgttcagtaagtatttctggaatgaattaatgaatgtgttttct

SEQ ID NO: 561935 - DNA, 561 bp, Homo sapiens
ctctgtagcacaaaacattccaatagatttttatgtcacttaaagtgaaatccaaactctttgatttggctatacagtcctacaagctctggcccctgattccactctgacttagacatgacttccctcaaagttgctctctgtgctgcagtcacgcaggcctcctcgctattcttcaaccaagttgagtccatttaacttttgcctttgcagttgcctttctctcatgaatgtttgtggccactacataatttgtaacatttttccttcagttatatgctgacattatgctttcagtccttcttttactattctatatagaaggaaaagcccattctttgttcttcttagtttctgttctyggcattccacttttccatttaatgtattaccagatgtcagagtacatgtcttatttgtttatcatttatcttccccaactagaacataagttcctctaaaagtaacatcttcattgtgctcccagctgctaccacattgtctaacacatattagatgttcagtaagtatttctggaatgaattaatgaatgtgttttct

SEQ ID NO: 561936 - DNA, 477 bp, Homo sapiens
catgttggccaggatggtcttgatctcttgacctcatgatccgcccaccgtggcctcccaagatgctgggattacaggcgtgagccattgcgcctggcttctaattactrtttatttgcttgtgctttcattataataccagtagcataaaaagttgtcagcaggataattggcaaaaagtgatgaaaaattataataagtaactcttttgaagatttgtgatgtgctaagcactgcttttagtatattgcatgtattaaatcttatgttttacatcaactttactgagtactctaattacctcattttacaggaaagtaaactgaaacatgaaatattaaagaaaccatcaaatatgatagcagtaagtggcaaaactgggtgtctaatataaccagtgtgtatttccagaacacatgtcctgaaccactgtgatataccatctccagtttaatattttctaagaatgaggctcca

SEQ ID NO: 561937 - DNA, 517 bp, Homo sapiens
ggatggtcttgatctcctgacctcgtgaaccgcctgcctcagcctcccaaagtgctggattacaagcgtgagccaccgcgcccagctccttattttttaaatgcaaaaatgtgatttaaatgtgcattgaagtaggaaaccaaatccaacatatacattctgttggaagaattgttccacgtgttcagttttcaatttgataagcatttggtggatattttaatttaactttaataattgatctctcagcttaacaggggaataattcactaaacgtatgtggattgatgttcccttcaaatacacttttctctaagtgaaaactcattgattctactacctaaatctacaattataagaatcatagatgtgtatgttattaaaaacacatggtaggcaggatgcggtggcttacgcctgtaatcccagcactttgagaggctgagacggatggatcacctgaggtcaggagttcgagaccmgcctgaccaacatggagaaaggctgtttctaccaa

SEQ ID NO: 561938 - DNA, 569 bp, Homo sapiens
tgtggtttggaatgggaacttatgtttaaaagggcaacagagcataaaagttcagaaaatttgcagcctgacaatgtagtagaaaagaaaagcccattttctgaggagaaattcaagcctgcagtagaaaattgcataagtaacgaggaaccaaacgttaattgctgagacaatgaggaaaatggccccagggcatgtcagagaccttcctggcaggctgtsccatcaaaagcccagaggcctaggaggaaaaaacggttttatggactggacctggggcctccctgctctgtgcagcctagggactgggtgccctgagtcctaggcttccagtgatggctaaaagtggccaagttacagttcagaccatggcttctgagggtgcaaaccctaagacttggcagcttccatgtggtgttgagcctgttggtgcacagaaatcaagaattgaggtttgggaacctctgtctagatttcagacaatgcaaggaaatgcctggatgtctaggcagacaagtgctgcaggggaggaaccctcatggagaacctctgctaggtcagtgtggaag

SEQ ID NO: 561939 - DNA, 539 bp, Homo sapiens
ggtgcagcagaccaccatggcacatgtatacctatgtaacaaacctgcacattctgcacatgtatgccagaacttgaagtatatatataaatacaatgaaaggttatgtttattctctgcaactggratattctaaaatttaagtaagaagtgagtctcaaattgtacctatggaagactacttaaaacttactatttagaattcatacttacacaccaactagtacaacaccatttatgggtgaggggttctaaattactttattgttacatacacattttacattttaaaataaatttttagagtagtcactatgttccaggaatttgagtagtagtcggataattcttgtctaattcattgtgttaggtatacagcagggaacctgacagacaaaaatctggtggcaagttagtcgaaagactaggcttggagtacgaaattcattcagttatgccctcctacccatttggcgccccctttaaaggaattgtagacctattaaaataaagagaaaaggtagtgagtaaaaaagtcc

SEQ ID NO: 561940 - DNA, 539 bp, Homo sapiens
ggtgcagcagaccaccatggcacatgtatacctatgtaacaaacctgcacattctgcacatgtatgccagaacttgaagtatatatataaatacaatgaaaggttatgtttattctctgcaactgggatattctaaaatttaagtaagaagtgagtctcaaattgtacctatggaagactacttaaaacttactatttagaattcatacttacacaccaactagtacaacaccatttatgggtgaggggttctaaattactttattgttacatacacattttacattttaaaataaatttttagagtagtcactatgttccaggaatttgagtagtagtcggataattcttgtctaattcattgtgttrggtatacagcagggaacctgacagacaaaaatctggtggcaagttagtcgaaagactaggcttggagtacgaaattcattcagttatgccctcctacccatttggcgccccctttaaaggaattgtagacctattaaaataaagagaaaaggtagtgagtaaaaaagtcc

SEQ ID NO: 561941 - DNA, 539 bp, Homo sapiens
ggtgcagcagaccaccatggcacatgtatacctatgtaacaaacctgcacattctgcacatgtatgccagaacttgaagtatatatataaatacaatgaaaggttatgtttattctctgcaactgggatattctaaaatttaagtaagaagtgagtctcaaattgtacctatggaagactacttaaaacttactatttagaattcatacttacacaccaactagtacaacaccatttatgggtgaggggttctaaattactttattgttacatacacattttacattttaaaataaatttttagagtagtcactatgttccaggaatttgagtagtagtcggataattcttgtctaattcattgtgttaggtatacagcagggaacctgacagacaaaaatctggtggcaagttagtcgaaagacyaggcttggagtacgaaattcattcagttatgccctcctacccatttggcgccccctttaaaggaattgtagacctattaaaataaagagaaaaggtagtgagtaaaaaagtcc

SEQ ID NO: 561942 - DNA, 539 bp, Homo sapiens
ggtgcagcagaccaccatggcacatgtatacctatgtaacaaacctgcacattctgcacatgtatgccagaacttgaagtatatatataaatacaatgaaaggttatgtttattctctgcaactgggatattctaaaatttaagtaagaagtgagtctcaaattgtacctatggaagactacttaaaacttactatttagaattcatacttacacaccaactagtacaacaccatttatgggtgaggggttctaaattactttattgttacatacacattttacattttaaaataaatttttagagtagtcactatgttccaggaatttgagtagtagtcggataattcttgtctaattcattgtgttaggtatacagcagggaacctgacagacaaaaatctggtggcaagttagtcgaaagactaggcttggagtacgaaattcattcarttatgccctcctacccatttggcgccccctttaaaggaattgtagacctattaaaataaagagaaaaggtagtgagtaaaaaagtcc

SEQ ID NO: 561943 - DNA, 526 bp, Homo sapiens
aaagaattgcagatgatatatcaatttayttagagctgaagctgctggaatcataaactggtaaaaacacaaaaatcatattttgaggaatttctaggtactgaatgtgatctgccctggaagtgagaaactcttaggggctacagtatgagataacacctgcacatttataggttttcttccagaaaccccaacaggctcccaaagtaaagacttgagaaagatcccagtgtggctctggcagggggacagaaagagtaatcattgggaaatatactcagagttctccatagcaaaagcccactacccagggaaaaagactttactagtgccttattcctccagggaagggaatttttcccattccaccctcttctagacttcttgtctcatctaaaacaagaaggaactgaaaaacacttgtgaaggtcacaagccagggatagaggccactaatagactgagatttaatcacagcattacagaacacttcaccttcccaacaactcaccaccatactgacaag

SEQ ID NO: 561944 - DNA, 585 bp, Homo sapiens
atgagacagtcattcccagatgtctgatacctttcacctttccaaggggttccagctgatgcataatgctagcaacagctattcatttggaagaggatgttgcaatgactcaatctctgcacttaagcttcccttttatagaagaagtttgcaggtcctgagattttatgttttcctcttaagagccagactcagatatgacccagatgtcaaaattattggacagaaaatttacaagaacaatcattaatatgttatgggctctagtggaaaaagtacactacatgtaagaacagaagagtaatgtggtctgagagatggaatccataagagagaataaaaagaaaatgcyaaaaatcaagaacattacaacagaaatgaagcaagtctttgatggagcatcagtagactggatatgacagagtaaagtataatgagtttgaagataaatcaataaaaatttcccaaacgtaaatgcacagagaaaaaataatggaaaaataacacagagcaaaacattcaagaaccatggggcaatttcagtagttatgatatacctgtaagaggaataccagaaagagaaga

SEQ ID NO: 561945 - DNA, 563 bp, Homo sapiens
attttggtcaagtttaggttttagtacaggagcagctaaccatccctcatcttcagcaccatgacaggcagccatacctgtgttccatgagaagctcatatgtagcttacagaagccaggatatatcaaaagcatgctgttctcaaaatattagagacaggtgtgcagattccaaattgctctttccaatctcagaagggtagacaaaaagttcggtggctatttttgttgtaccctaccccttttttgtaagcctctgcacctctgcctgaagtaacttccagaggatttaaagagctagtgtttttccctatcctccattaatgtttatctctgtaccttttgggagccagacaataaayatgagaacattcaaaagtaactacatatgtgaagaaaataagaaagatctcacatgcccaaggactagtgcaggctcagggaagatatgagaagacctgaagtttacacctcagactactcttcagcataaagacagcctacaataatgaaaaagacaaaacaaatacacaaaaaagagcaatccctgggaaagacggaca

SEQ ID NO: 561946 - DNA, 554 bp, Homo sapiens
tgtacttttgtgcttcacttgcccagrgggaaaaatagcatacttgatgatagagaatgcttttgtatagaatgtggaaagatgcctagcattagctgagacatagtcaacgagaggagaatcagatattttgttcacaccggcagctcaaatcaaagagtgaggaacataatactggccactggagaacctggcagcatcatcaattcaggcataataccataaagaaattaggaagccaggcgtggtggctcacgcctataatcccagcactttggaaggccaaggcaagtgcatcacctgaggtcgggagttcgaggccagcctgaccaacatggagaaagcctgtctctactaaaaatacaaaattagccaggcgtggtgtctggtgcctgtaatccctgctactcgggaggctgaagcaagagaatcgcttgaactcaggaggtagaggtagcggtgagccgggatcattccattgcacttcagcctggccaataagaatgaaactctgtttcaaaaaaaaaaaagaaagaaagaaaaagaaaaagaaa

SEQ ID NO: 561947 - DNA, 554 bp, Homo sapiens
tgtacttttgtgcttcacttgcccagggggaaaaatagcatacttgatgatagagaatgcttttgtatagaatgtggaaagatgcctagcattagctgagacatagtcaacgagaggagaatcagatattttgttcacaccggcagctcaaatcaaagagtgaggaacataatactggccactggagaacctggcagcatcatcaattcaggcataataccataaagaaattaggaagccargcgtggtggctcacgcctataatcccagcactttggaaggccaaggcaagtgcatcacctgaggtcgggagttcgaggccagcctgaccaacatggagaaagcctgtctctactaaaaatacaaaattagccaggcgtggtgtctggtgcctgtaatccctgctactcgggaggctgaagcaagagaatcgcttgaactcaggaggtagaggtagcggtgagccgggatcattccattgcacttcagcctggccaataagaatgaaactctgtttcaaaaaaaaaaaagaaagaaagaaaaagaaaaagaaa

SEQ ID NO: 561948 - DNA, 392 bp, Homo sapiens
tcctcactcttcaatttcatgtagtctgtcttcattcacgtgggcccccgagctgtcccaaccccgagctgtccataaggtaacaaggatgtcctaactaatgaatcccaatggactcctctctcccttatgatctggccttacatctccacagcataaccctccctccttccttcacgtctgtggtactactttttctcctagttactatcctattcctcggagatttctctctccatctccttcctggacttctgtttccctgtgttcttcagtgttactattccctaggtttggtcctcggccagctctttacaggctatcttgcctacatcctggggtgaattaactcacgctcctggcttcgyctgactgattgttgagaggattca

SEQ ID NO: 561949 - DNA, 636 bp, Homo sapiens
tggctgaggtcagcatcaacagtcataaatcatgctgatagcaggtacctttaatatgatgtgatgaaaatggtagttcacccctgcagtcttcctcccaaaccccataacctcagtctaattaaaaaaaattctaatagaggaacatactacaatagacttgagaatcatttctcaaaactaggaaagtctgcaaacctatcacagtggagaggaacctaaggataaataaaygtaatagagtatcctagatgggatcctggacagtaacagaacattagctagacccacatgtgcatgccaaggccatggcaaaggtctaaataattgatccagtggaaattgaaataaatgatggaccttagttaagaataatgtatcgatattgattcattagttgtaacaaatgtaccatactgaggcaaaatgttaaaaacaggggaaatggtgtgagggttggtgggggaggacatgagaactctctatactatctgttcaatagttctgtaagtctaaaactattctaaaaattaggcctattaatttttttttaaataatgcagcttcagctgggcacactgccaaaatcctaacatataaaattctaaattcatacacttaagagaagttaggata

SEQ ID NO: 561950 - DNA, 436 bp, Homo sapiens
taggtgaagtgggcaggggccaaggggctggatggacccacaggctggagggtggaagttgttggtgggggtcctgaagagctggaagggtcctccagggggcagctgtggagggagsagcttctctctgggcttgcctcagggggcacagccttggtctgggtgctaggaagagaggagacaaggaagattggggtgggggatggtggtgggccaccccatgccccagcattattcagttcagtaagacaagacaaggggacagggactcagggttgatttattagtcctgggggagaagtgagaggtgaggaggccaggggctcgaagtctgcgccctcagcctacctcatggagaccattctctcattcactcattttccacactctcaaaaaacaattggcaggctgctacatgctaggccctgtgctagac

SEQ ID NO: 561951 - DNA, 436 bp, Homo sapiens
taggtgaagtgggcaggggccaaggggctggatggacccacaggctggagggtggaagttgttggtgggggtcctgaagagctggaagggtcctccagggggcagctgtggagggagcagcttctctctgggcttgcctcaggggscacagccttggtctgggtgctaggaagagaggagacaaggaagattggggtgggggatggtggtgggccaccccatgccccagcattattcagttcagtaagacaagacaaggggacagggactcagggttgatttattagtcctgggggagaagtgagaggtgaggaggccaggggctcgaagtctgcgccctcagcctacctcatggagaccattctctcattcactcattttccacactctcaaaaaacaattggcaggctgctacatgctaggccctgtgctagac

SEQ ID NO: 561952 - DNA, 581 bp, Homo sapiens
aatggttatgatcttcccctcttttatagattaaaacattgccagcgttcagagacattaagaaatctgcttgaggtcgcccaccaagtgtgtagttagtcccaactggggactatttgagtctagagcccgggccctttcttcaccttaggtaatctctccttttaggaatgctcttctgaaaaattccagcctgctttgctaacattgttggtcaaaggactttggtttatgactaggtgggaggctattggtcccttctgcacacatttgctgtgggtctatggggaaccaggacagggcggcctactggggaggggcagaagtcccaggggaggtttacaaaggtatggtgcctgccaggctccggcccaaactgtgtgaatgttaccaactgcatccactgctcrctgtgctcaccgccctcaccagccctctaagccctactctgcttccttttacccttcagggatcttgacaccgcaacctctccacctctgtccccagcctttggcaggaagctgaaagagaggcctgtgtcttcacaaagccccaggaggaaagcaggggctgagaggaat

SEQ ID NO: 561953 - DNA, 535 bp, Homo sapiens
ggaggcaggctttgggcctctcaaaggatgctggggaggtagcatccagaaggtggccatcaggaagttacccgaggcaagaaaactgttttgagccttactctgggcacactttgttccagatatggatggttacccatgttattttatttcctctccagatgattctgtgaagcaggtacacctcattttatagatgagggccagagagagaagggacacagccagtaaggggtgaagttcatttggaatccacccaccccccatcccatcttctgacaaagccgaggggaagggcaggggccggcttgcttatgtttcatkgatccagcttcaggggcagcattccggaaacagaatgaggtctgagatgtgcggccctcgtgggtggagcctctgccagggctgtgatcccagggttgcggtggctccacgtgtggttcggagggtctttcctcccctgcagccccttccctctttctcctcagtgagaatcccaacttgcagccatctcgttctcagggctggtcccagg

SEQ ID NO: 561954 - DNA, 350 bp, Homo sapiens
gaattcctgtgtccacctttgaaagttttctatttccttcatcattcccaccagaatccattgtcacattgcaatctgttccttagrgctaagagaactgagaatgcttattattttttttttgaatggggttcaaagaagagtgacaaagtgagagagtgcgtggctgatggaatcttaatttttgtgctgctgcttttgctgcttaggaattttgctgatcatcagtggcttcctcgctgagctgcaggtaactgaggtcgatggatatttgactttctgtgcatgagccaaaatctcgcctgatatttgcttcagtattttgctttcattcttttgcagaaacattc

SEQ ID NO: 561955 - DNA, 350 bp, Homo sapiens
gaattcctgtgtccacctttgaaagttttctatttccttcatcattcccaccagaatccattgtcacattgcaatctgttccttagggctaagagaactgagaatgcttattattttttttttgaatggggttcaaagaagagtgacaaagtgagagagtgcgtggctgatggaatcttaatttttgtgctgctgcttttgctgcttaggaattttgctgatcatcagtggcttcctcgctgagctgcaggtarctgaggtcgatggatatttgactttctgtgcatgagccaaaatctcgcctgatatttgcttcagtattttgctttcattcttttgcagaaacattc

SEQ ID NO: 561956 - DNA, 541 bp, Homo sapiens
gaaacagaaagtcagtgaaaggctttgaactgagaattgatatggcctgattaatatatattaaggatcattctggctgcaatgtgaagaactgatatagggcagatatgagtgcaagcagacaaygatgaggctattgcaattgcccaggggaaagaatatggtgggttgaccctttggggtaatagtggaagtggtgagaaatattaattctgctttaggagaagccttttatatgaatcctgagatccattaacttcttgtgcaatgtggtgaaaatccttctcttgcatatcaggtgtatttcaacaattagtgtcccacagaaagaatggtggaacctcagagttggaagggtcttagaagcaggacatctagtggaggaagagtgaaaacagagatacttggtccgatcttcaagcttgtgtagctcttacattttgataggggggaaaggaggaaactgatgcctcaataaatgttagtttatctggaattcacagtggtcccaggctagggaatctaaaggtggagactgcat

SEQ ID NO: 561957 - DNA, 541 bp, Homo sapiens
gaaacagaaagtcagtgaaaggctttgaactgagaattgatatggcctgattaatatatattaaggatcattctggctgcaatgtgaagaactgatatagggcagatatgagtgcaagcagacaacgatgaggctattgcaattgcccaggggaaagaatatggtgggttgaccctttggggtaatagtggaagtggtgagaaatattaattctgctttaggagaagccttttatatgaatcctgagatccattarcttcttgtgcaatgtggtgaaaatccttctcttgcatatcaggtgtatttcaacaattagtgtcccacagaaagaatggtggaacctcagagttggaagggtcttagaagcaggacatctagtggaggaagagtgaaaacagagatacttggtccgatcttcaagcttgtgtagctcttacattttgataggggggaaaggaggaaactgatgcctcaataaatgttagtttatctggaattcacagtggtcccaggctagggaatctaaaggtggagactgcat

SEQ ID NO: 561958 - DNA, 644 bp, Homo sapiens
atatcaactgaaaaataaaggatccaagaaaacaacatttacatcttaggcaaagacaggctactttaccttggtagtagagtagggcttccttttcacacgctttttggaaggcttcttcaagtcacctaggggatgtggagggacacagcatggctgtcagttcattggcagtgctactcatgaatgactcagggactggaacttaggggcgtgcctggttaacaagcatggaatgagcttctcctggaccatcttcttcacggaccaaggaaggcaaagaaagagcagcaaggaaatgagagtagagcccttggctttccaggtaatggcaaatgaaagcaacgtgaaataatcaactccaaawgaacaaatgctaaaatacatgctaggattcaaccacagcatcctgtcacttcttcagaccctttaaaagcccagcaggactgccactaccttcttgacatctaccaagtccctttcaacctccacagacccacatacactgctactgcatttatcatggagggtatagggttctgccttgtttatgtgtgaattttttaaaaactagatttaataccatgcaccagcattaattgtatttatttcttttcttggttatgaaaataatcagtcaggca

SEQ ID NO: 561959 - DNA, 584 bp, Homo sapiens
attattgctcacaactccccactccactgctgcaagcccttaccagactgaagcaacttctaggagatagaaaaggccagaaccccatttcccttccccttcattgttctcttttccttttttgggagccaaacattaaagactaggacactcaaaagcaatggcatacccagaggaaattaaagttaccacacatccttggagagaggagtgtgtgcccagggaaaggagcagcttcagacctgagaagacctcaagcttacaactcaggttgatcctcagcatggagacaacctacaacaatgtaaaacataacaaaaccccaaaacagcaaaccytgaggaagaggagagtctcatctccagagttactgcattattatattcaagtgtccagttttcaatacaaaacacaaggcatacaaaaaacaagaaaatatggtatttcaaaggaaaaacaacaacagaaactgttccagagaaagaccagatggtaacctactacacaaatactttaaaacaactttcttaaagatggtcaaagaactgaaggaagatgtggagaaagtcagtaaaattatgtgt

SEQ ID NO: 561960 - DNA, 432 bp, Homo sapiens
cagtctgtatgtcttccgcatctataattatagtagcagaagagaatggtgagcctggggcactgcaagatcctaaatcaaagattaaggcatattaactctaccctcgctggaaagtggtcagttgtattttaaaaagctttacaatagactttctaataatgagagttgaagcaaagtttccacctaaccctgtaattaaattcaccagaagaccccatttcccattatccagacgaccaaggctttgccgaacaccaccgtccctgccctctaggagaggtcatccaaggccagcaatgaaacagtcaatcaatttgcaaatggacgggaggacactgacaggatgtgttcactgggggtaggtgtctactsggggagagaggccaggcaagtctgtccttgttttcagtctagcaggagtgaagggga

SEQ ID NO: 561961 - DNA, 335 bp, Homo sapiens
aaattttacagtcttttttgtataatgcccccaaaaggaaatcttgattttcacttaagatttgatttgaagtaagtcatgatttagaacagcagataaaatgcattagggtaaagtattatgtaaaggtaaggtgaagagatactggtttctacttcaggaggtagcttatatttgtttgctttaattaattaattmattcattcatttttgagatggagtctcgctctgttacccgggccggagtgcagtggcacaatcttggctcactggaacctccgcctcccgggtttaagcaattctcatgccttagcctcccgagtagctgggattac

SEQ ID NO: 561962 - DNA, 335 bp, Homo sapiens
aaattttacagtcttttttgtataatgcccccaaaaggaaatcttgattttcacttaagatttgatttgaagtaagtcatgatttagaacagcagataaaatgcattagggtaaagtattatgtaaaggtaaggtgaagagatactggtttctacttcaggaggtagcttatatttgtttgctttaattaattaattcattcattcatttttgagatggagtctcgctctgttacccgggccggagtgcagtggcacaatcttggctcactgsaacctccgcctcccgggtttaagcaattctcatgccttagcctcccgagtagctgggattac

SEQ ID NO: 561963 - DNA, 335 bp, Homo sapiens
aaattttacagtcttttttgtataatgcccccaaaaggaaatcttgattttcacttaagatttgatttgaagtaagtcatgatttagaacagcagataaaatgcattagggtaaagtattatgtaaaggtaaggtgaagagatactggtttctacttcaggaggtagcttatatttgtttgctttaattaattaattcattcattcatttttgagatggagtctcgctctgttacccgggccggagtgcagtggcacaatcttggctcactggaacctccgcctcccgggtttaagcrattctcatgccttagcctcccgagtagctgggattac

SEQ ID NO: 561964 - DNA, 619 bp, Homo sapiens
tgcagttgctcttcaaattgtcattcctttattttctatttctacctacctcctgatgttagctcaggttcctgctaccaaggtgtcttgcaaaaaaatttggtgactattactctaagtgaagcctttgatactttctcttaatacaatggttaaacctctaacaacgtagactaatgaggaagattagtttgaattagtaaaatgtctgaattaccaaatatttttcaagaacttcactgttattacttttaagtaaatactgtaactcaaactaggctaatagaatgcctaataaagatccttaggggatcctgctttaggagagaaataagaatgatttgcaattagtgcaccaattgtttatgtaaatggaatttctgaaatactagactgagcttgaaaaccgtttgttcccttaagtattttaaatagtccctacggaacccctgtgcatgctggtagttgtttatatgctgtatagagacctgtttcatgaagacataactcaaccttatatcatcagtatcagaaattccaagttagtgatggccaggatcctcaccttccaagattagattagatctctctgccaaaygcttccatagcacatgcaatt

SEQ ID NO: 561965 - DNA, 449 bp, Homo sapiens
ttgtctgttgtaacactaatcaatacatttaacaaatatatgatgtattctgctatatgctttgccagtgtgtgaaatggaggagacataaccctcatctttgtgtagtttataggctagcaaagaagtcaggcagtaaacaaataaatgcatttataattaattacaatcctgaagttagattgtacttttgtaagtaatggtttaatcaactagattttaagttccattaagataggggttacttctgtgttgtttgtcatggtgtcccaaatccttccttagcctactgcctggcatagagtaaatattaagttgagctttattgccattttgataggtcagaagcagtcgaatgtcaataatgtcacatagttcaacctaatagttgytcagtcaatatgtattgaatgttgaatgcatgttgtaatcagtgatcctatggtagg

SEQ ID NO: 561966 - DNA, 402 bp, Homo sapiens
ctgctgggacacagactagttagagaaaggaaaaataaacaaatgatagtatgtrtattaataaaagaactagcaacacccactgcttagttgtgataataaaaactggacattaatataggcagaaaaacagaacagccttgatatggttaaccctttgacactggcaaacactgtgaccagtgctgcccacactggaagctcctgcatccctcttcctcatgtttccttcagcattaaggagcaacaagggagacagccagttcatagttccttacgcatggagccaaaggaccttcaatgtacaaggtctgagcaaggacccgcagccacatgtgcttcctgcttcagcagtgccccgtgggtctcagagctacccaaaggcctatccttccgagaggt

SEQ ID NO: 561967 - DNA, 587 bp, Homo sapiens
actctctacatatctacattgtttgcagattttacaataatcatttattcttgcatggctgatcattgttaaccaatacaaataaaataataaagaaatgacccacattttatgttgggagtttgatctgccatttatcaagtatggaatcttgaacaargggttaaacatctgaatgtctccatcacttcatctctaaagtgggggtgctcacacccactgggctcccccacccaggttggtgccggactctccctgggcccccctgttctctcaccagccacatccattctccccccagaggcgctagtgactgttcgtggctttccattcccaccacgtttgtctctaaccccagtggcagatcagtgtaagaacacagctgagtgcttctcacctccttgccccttcaagggctcctcaccacccaccagatcaggtgcaaacttccaagccttactggatccccttccacattctgagctccgcctgccttcccatcgctatccttccccacctgcctccctggtagagaaaagcagagtgtgtgatgctgtctgaatgctgagcacggccttttgcagcca

SEQ ID NO: 561968 - DNA, 587 bp, Homo sapiens
actctctacatatctacattgtttgcagattttacaataatcatttattcttgcatggctgatcattgttaaccaatacaaataaaataataaagaaatgacccacattttatgttgggagtttgatctgccatttatcaagtatggaatcttgaacaaggggttaaacatctgaatgtctccatcacttcatctctaaagtgggggtgctcacacccactgggctcccccacccaggttggtgccggactctccctgggcccccctgttctctcaccagccacatccattctccccccagaggcgctagtgactgttcgtggctttccattcccaccacgtttgtctctaaccccagtggcagatcagtgtaagaacacagctgagtgcttctcrcctccttgccccttcaagggctcctcaccacccaccagatcaggtgcaaacttccaagccttactggatccccttccacattctgagctccgcctgccttcccatcgctatccttccccacctgcctccctggtagagaaaagcagagtgtgtgatgctgtctgaatgctgagcacggccttttgcagcca

SEQ ID NO: 561969 - DNA, 587 bp, Homo sapiens
actctctacatatctacattgtttgcagattttacaataatcatttattcttgcatggctgatcattgttaaccaatacaaataaaataataaagaaatgacccacattttatgttgggagtttgatctgccatttatcaagtatggaatcttgaacaaggggttaaacatctgaatgtctccatcacttcatctctaaagtgggggtgctcacacccactgggctcccccacccaggttggtgccggactctccctgggcccccctgttctctcaccagccacatccattctccccccagaggcgctagtgactgttcgtggctttccattcccaccacgtttgtctctaaccccagtggcagatcagtgtaagaacacagctgagtgcttctcacctccttgccccttcaagggctcctcaccacccaccagatcargtgcaaacttccaagccttactggatccccttccacattctgagctccgcctgccttcccatcgctatccttccccacctgcctccctggtagagaaaagcagagtgtgtgatgctgtctgaatgctgagcacggccttttgcagcca

SEQ ID NO: 561970 - DNA, 499 bp, Homo sapiens
ggtgagggaaacatatttaaattagatcgtggtgttgggtgcacacagtatcaatttaataaagcatcaaattstagaccttttcagtgggcaaactttatggtgggttcacacccaatataggtgttaaaaataatgttacggaaattcttgtcgggtttttaacaagccaagagatatgctgtgaaagcagcattaattcaagtggttgtcacaggtcacttaaagttaatcagatagttgtcctacaaatatagggtgaatgttattcatgaatttcctgaatctattgcaataatcacatttttttccattaaactcttgaggtagctaattttatttattgcattttcaatgttaatctactatttcatatgttgagattaactcacattagtcagaatttaaagtattttaaaatatcacagaatttaatttaccttatctggttttggtttcaagactatagtagccatttcatttaattgtacatgtaggg

SEQ ID NO: 561971 - DNA, 499 bp, Homo sapiens
ggtgagggaaacatatttaaattagatcgtggtgttgggtgcacacagtatcaatttaataaagcatcaaattctagaccttttcagtgggcaaactttatggtgggttcacacccaatataggtgttaaaaataatgttacggaaattcttgtcgggtttttaacaagccaagagatatgctgtgaaagcagcattaattcaartggttgtcacaggtcacttaaagttaatcagatagttgtcctacaaatatagggtgaatgttattcatgaatttcctgaatctattgcaataatcacatttttttccattaaactcttgaggtagctaattttatttattgcattttcaatgttaatctactatttcatatgttgagattaactcacattagtcagaatttaaagtattttaaaatatcacagaatttaatttaccttatctggttttggtttcaagactatagtagccatttcatttaattgtacatgtaggg

SEQ ID NO: 561972 - DNA, 499 bp, Homo sapiens
ggtgagggaaacatatttaaattagatcgtggtgttgggtgcacacagtatcaatttaataaagcatcaaattctagaccttttcagtgggcaaactttatggtgggttcacacccaatataggtgttaaaaataatgttacggaaattcttgtcgggtttttaacaagccaagagatatgctgtgaaagcagcattaattcaagtggttgtcacaggtcacttaaagttaatcagatagttgtcctacaaatatagggtgaatgttattcatgaatttcctgaatctattgcaataatcacatttttttccattaaactcttgaggtagctaattttatttattgcattttcaatgttaatctactatttcatatrttgagattaactcacattagtcagaatttaaagtattttaaaatatcacagaatttaatttaccttatctggttttggtttcaagactatagtagccatttcatttaattgtacatgtaggg

SEQ ID NO: 561973 - DNA, 499 bp, Homo sapiens
ggtgagggaaacatatttaaattagatcgtggtgttgggtgcacacagtatcaatttaataaagcatcaaattctagaccttttcagtgggcaaactttatggtgggttcacacccaatataggtgttaaaaataatgttacggaaattcttgtcgggtttttaacaagccaagagatatgctgtgaaagcagcattaattcaagtggttgtcacaggtcacttaaagttaatcagatagttgtcctacaaatatagggtgaatgttattcatgaatttcctgaatctattgcaataatcacatttttttccattaaactcttgaggtagctaattttatttattgcattttcaatgttaatctactatttcatatgttgagattaactcacattagtcagaatttamagtattttaaaatatcacagaatttaatttaccttatctggttttggtttcaagactatagtagccatttcatttaattgtacatgtaggg

SEQ ID NO: 561974 - DNA, 602 bp, Homo sapiens
tgttcctttaagccttaagtttggggcttttttttttacaccaatatataactaatgtagacacctgcagtccctaagattgaatgcaaaattgtgttacatacacatgagtgtgttcttctgggaaaagagtccataaacttcaaaagattctcaaaggaatccaagacccaaaaagattaagaaacattgcatcagacaataaattgtcaatgagcaaggtcctgtccttttagattgggttttgaaatcacccatcccacaaatatatgataccacttaactagtttttcaagatattycttgttcaaagatgctcccactttttctttgtgctcaagtcctagataaacctggctaggggcaggaggtatgattcaggagttagtgagccgggagggctcactgtgcctgggaaagccagcttctcatgaatttttggaatatgccttggctcagaaacctacctctctaggcacaggatccaacttatacgttcaagatgcgtgactgagcatgtgaaagtgtcagagggatcgacctcaccattttacatctacttttccagttgtggcccctacaatcatcaaggctcattcggc

SEQ ID NO: 561975 - DNA, 602 bp, Homo sapiens
tgttcctttaagccttaagtttggggcttttttttttacaccaatatataactaatgtagacacctgcagtccctaagattgaatgcaaaattgtgttacatacacatgagtgtgttcttctgggaaaagagtccataaacttcaaaagattctcaaaggaatccaagacccaaaaagattaagaaacattgcatcagacaataaattgtcaatgagcaaggtcctgtccttttagattgggttttgaaatcacccatcccacaaatatatgataccacttaactagtttttcaagatatttcttgttcaaagatgctcccactttttctttgtgctcaagtcctagataaacytggctaggggcaggaggtatgattcaggagttagtgagccgggagggctcactgtgcctgggaaagccagcttctcatgaatttttggaatatgccttggctcagaaacctacctctctaggcacaggatccaacttatacgttcaagatgcgtgactgagcatgtgaaagtgtcagagggatcgacctcaccattttacatctacttttccagttgtggcccctacaatcatcaaggctcattcggc

SEQ ID NO: 561976 - DNA, 514 bp, Homo sapiens
aaatgatgattccaagagcaggagagaccatagagtgggaaaaggaaaggaagaaataatgattcaagccagctctttggcccctcgtcatctctcattcagtgttggaaatttttggtaattgaaatttaccaaatttaaatgtgtgtgtggcggctggtgtgtgtgtgtgtgtgtgtgtgtgtgtgttgctagcttttggaaatagcagatttggtaattcatatttccaaaagctgtaagtacaaacacacacttaaatatttacagattgcttagaagttcacagtgtactaaaatttatattaataaaattctattgattggaccacctaaagtctgttccataccagtctctcttttcccctccaaccacagatgctggatggttttcctgtctcctcttgaagatagcagtgtatttgtgagccaggtctsgcccatcaggcataaaaagggacaaatggagctggcatggcctttcttctttcactcggccctcttttccgttgaa

SEQ ID NO: 561977 - DNA, 547 bp, Homo sapiens
ggagtcaggttaggtcgacctgtcttaatgttccaaaatagagtttgtgggacaagaaaagaaagtagctgaaaacatgattggacatacaagtaatagawtttcttcctccaccctctaaaagtaattctttattggatcatcttgttttattttccttagggtattataatgatcagatattttcttctttttttttgttcacacttttattgtctattttacctaaaacaagatatttccatggctgtgtaacttaccactgattctctagtgactagaagaattagactcttaaaagtattgttaggctgggcgtggttgctcatgcctgtaatcccagcactttgggaggccaaggcgggcagatcatgaggtcaggagttcaagaccagcctggccaatatggtgaaaccccatctctacttaaaatacaaaaaattagctgggtgtggtgcctgaagtcccagctactgaagaggctgaggcaggagaatcgtttgaacccaggaggtggaggttgcagagagccaagatcacgccactg

SEQ ID NO: 561978 - DNA, 547 bp, Homo sapiens
ggagtcaggttaggtcgacctgtcttaatgttccaaaatagagtttgtgggacaagaaaagaaagtagctgaaaacatgattggacatacaagtaatagaatttcttcctccaccctctaaaagtaattctttattggatcatcttgttttattttccttagggtattataatgatcagatattttcttctttttttttgttcacacttttattgtctattttacctaaaacaagatatttccatggctgtgtaacttaccactgattctctagtgactagaagaattagactcttaaaagtattgttaggctgggcgtggttgctcatgcctgtaatcccagcactttgggaggccaaggcgggcagatcatgaggtcaggagttcaagaccagcctggccaatatggtgaaaccccatctctacttaaaatacaaaaaattagctgggtgtggygcctgaagtcccagctactgaagaggctgaggcaggagaatcgtttgaacccaggaggtggaggttgcagagagccaagatcacgccactg

SEQ ID NO: 561979 - DNA, 591 bp, Homo sapiens
actagaaaagcaagagaaaaaaaacccgaaattagtaaaaggaaagaaataataaaaatcagtgtagaattaaataaaactgaggctgaaaaatgcacaagatcaacaaaacaaaagttccttagacccaaataaataaaatcagaactgaaaaaggaaatgtcacaatgaataccacagacataaaaaggatcttaggagactactatgaaccactgtacaccaatagattcaaaaacctagaggaaatggatgaattcctggacaatctatcaagattgaactaagaaaaaaatagaaaaccttaacagactaataacaaataatgagactgaaccactatttactattaagactttttatttaagcaacaaaatacttaaattaaaagtcctccaaaaaataaaattcaacactggatggcttcactactaaatttttcaaacctttaaaaaagaattaataccaattctcctccagctattccaaaaacttgaagcagagggaattatttytaattcattctatgagaccagcataaccctgataccaaaaccagagaaggacccaatttttttaaaaaagaaaggt

SEQ ID NO: 561980 - DNA, 426 bp, Homo sapiens
gtggtatgcaaacatagaagattttattatgatttcttagtgtataactataaaatgtgagaggtctcagaggtaccatgaaagaccatgcagcctctgagtctttgtgaatttgcgtgcgtgtgcgtgtgtgtgtgtgtgtgtgtgtgtgtgtgagagagagagagagagagagagagagagagagagaaagagacggagagagagagaraaagagaagacttgtcctggagagaaacctatccctacggctgcctcagattctaacttcctatcaccagataaattccctttcagtatttccctcatacattttttacttatggggcctctgagtgagtttctattccttataaccaaaacaaaaaaacaaaaacaaaacaaacaaaaacctcattcattagaaaatagaaaaaaaaactttaa

SEQ ID NO: 561981 - DNA, 306 bp, Homo sapiens
tcttcccccctttgtattattttgctgctagattactgtactgatagtggataattttatcataatttccctcacaaatctacaaaatatcaaaggctctaaacttattttccaaatgtcttttaatgagcctcagttgtaatgccccaaaaataagatctttgccagtaaatgacctttttttttttgtctctttgtattggatttctgggcacttccaccatttcccaatatgttttaaatgatttatttggtccttataactttaaatctccaygtcactttggttacctgagggggtgaaag

SEQ ID NO: 561982 - DNA, 450 bp, Homo sapiens
tttaattgactcacagttctgcatggctggggagacctcaggaaacttacacttgtggcraaaggcaaaggggaagcaaggcatgtcttacatggcagcaggagagaaagagtgaagtaggaagtggatataaataacacttttaaactatcagatcttgtgagaactcactcactatcatgggaacagcaaggggaaatccacccccatgatccagtcacctcccaccagacctctgacaagtggggattacaattcaagatgagatttgggtggggacacagaaccaaaccatatcacatagatatatagctgataaaaagacagatgctataaagtgataaaagctgtgaaaagaagaaagtgtagcacaagcacaaagaaaccaataggaagagagagcaactgtgggcatctttaaatcgggtattcagacagccctgacagagt

SEQ ID NO: 561983 - DNA, 450 bp, Homo sapiens
tttaattgactcacagttctgcatggctggggagacctcaggaaacttacacttgtggcaaaaggcaaaggggaagcaaggcatgtcttacatggcagcaggagagaaagagtgaagtaggaagtggatataaataacacttttaaactatcagatcttgtgagaactcactcactatcatgggaacagcaaggggaaatccacccccatgatccagtcacctcccaccagacctctgacaagtggggattacaattcaaratgagatttgggtggggacacagaaccaaaccatatcacatagatatatagctgataaaaagacagatgctataaagtgataaaagctgtgaaaagaagaaagtgtagcacaagcacaaagaaaccaataggaagagagagcaactgtgggcatctttaaatcgggtattcagacagccctgacagagt

SEQ ID NO: 561984 - DNA, 497 bp, Homo sapiens
ctttttgctttttttcccctctacggttttgtgtattttcaatagcttctctttattataagaaaacagggttgacatttttgggtcattgtgctccttgccatctgccacagaaactttgacaygggaacgagagaggcaccatgtcaagctggcaggattctgagggtgattttaaatccgaaaaattccatctctgtatctcttggtctcattttaaatggccacattttcctgtgaaagtctgccttttgtctctttggctttttttttctttttgtttttcttcctgtagcttttcccctgtggttttccatttggccttcccacatcacaaatctaattgggaaaaatggacaaaaatgcccaagagggtggtgatggtgcctacccatgtgacctccaacactctacagcctcctaggctttatgccaggggagtcttccagggcttgtcttggataaagaggagaatttcatttgctcctgtgtggttg

SEQ ID NO: 561985 - DNA, 220 bp, Homo sapiens
agacctgcaaggctggctttaagagcacaaggagggaaagtaacgaaagggctggactactataaaagttrcaaatacgtagttagaccaatagatttatataatcaggtttttgtcatgtaatttattaaatattacagaaacacaactaagaatatcaagtatttctctggctcttgacagaaaaaaatcagttgacttaaccctttgctgtcaaaag

SEQ ID NO: 561986 - DNA, 220 bp, Homo sapiens
agacctgcaaggctggctttaagagcacaaggagggaaagtaacgaaagggctggactactataaaagttgcaaatacgtagttagaccaatagatttatatartcaggtttttgtcatgtaatttattaaatattacagaaacacaactaagaatatcaagtatttctctggctcttgacagaaaaaaatcagttgacttaaccctttgctgtcaaaag

SEQ ID NO: 561987 - DNA, 220 bp, Homo sapiens
agacctgcaaggctggctttaagagcacaaggagggaaagtaacgaaagggctggactactataaaagttgcaaatacgtagttagaccaatagatttatataatcaggtttttgtcatgtaatttattaamtattacagaaacacaactaagaatatcaagtatttctctggctcttgacagaaaaaaatcagttgacttaaccctttgctgtcaaaag

SEQ ID NO: 561988 - DNA, 456 bp, Homo sapiens
agaacaattcagatgattattcagacattattttatgaaatatttattgagcacccactatgagccagaagctgtacttaggagaagagtcaacagtttcaggagtsatgagtgtccccaaggagaagggcagggaggtaggactgcagtgggcagagccagagaggcttcctgcgagacgtgacttgaggtagagagttgaagaagactctgagttactccaaggaagtggagaagcaagaaagcgtgccaggcagagggaacagcacctgctggagcactcatgggaaggagggtggggtgagaaactggagaaagccccatggatgaagcagagacagaaagagctgccggggggaggtggccaccccatgaggagctgggttttcacttcaaatgcaagcaggagaaactcaggggaatttttcttttaaacaccttaattaaggtgtcatt

SEQ ID NO: 561989 - DNA, 456 bp, Homo sapiens
agaacaattcagatgattattcagacattattttatgaaatatttattgagcacccactatgagccagaagctgtacttaggagaagagtcaacagtttcaggagtgatgagtgtccccaaggagaagggcagggaggtaggactgcagtgggcagagccagagaggcttcctgcgagacgtgacttgaggtagagagttgaagaagactctgagttactccaaggaagtggagaagcaagaaagcgtgccaggcagagggaacagcacctgctggagcactcatgggaaggagggtggggtgagaaactggagaaagccccatggatgaagcagagacagaaagagctgccggggggaggyggccaccccatgaggagctgggttttcacttcaaatgcaagcaggagaaactcaggggaatttttcttttaaacaccttaattaaggtgtcatt

SEQ ID NO: 561990 - DNA, 478 bp, Homo sapiens
tgaaggtcgaatcgtatcccatttggcctgtgtctcagtacccagggcccgggatctgtgtgcagggctggggggctacggatcctctctaggagtctcagctttgacactgagtcatcttttgaaagtacgtatatgataataaaggtaatcatttttgagtacttastgtgtgccaggcacagagctagacccctcccatgcatttgctcatttagtcctcacaataactcagtggggtaggtagcatttttatccccattttacagacaaggctctctgatgctcagaacacccaaggaacctgtccacatttcccagctgtggagcagcagagcctgcaataaacacagattggaaagccccccttgctttaagcaagtgctggttaatgtcctacaataggactgttatgagcactacatttcatagtgcaggagagaagagcattggctaatggggctttctcaggaattcc

SEQ ID NO: 561991 - DNA, 304 bp, Homo sapiens
atgtatttggggttggaattcctacaaagccccattcttaactgttattatttgacctgtctggcaattccttggaaaatcctactcccaatgcttgtctgtatttgacctgtgttacaactctttcagtataaacacacttttgcccagggatatttgttgaaataatctgtggcagttgctcgaggtagtgaaaggatgagttgaccaaamcacttttaaaaaagcttattggacccacctattaaagctttggaaagatctgacattttcctgggaatctagaaggggccctcacatgcag

SEQ ID NO: 561992 - DNA, 590 bp, Homo sapiens
ccactattctcattacaatcagaatgctggttacaatggcagcatctcctaacatcatgcccgcgctcatagaacagcaactacacagctttccaatgcatgcaatacttttctcactaagaaatttgtcaatttctcaatgccttagtcaaccaggcatcctaaggtccctctaaagagagcacagtgggatgtaaatgtttacattgtacacgataactttgttacaacattacgttcttcctaagccttttattcttttacataaattcaggtagtaagcttctaaaaataatgcatagttttatagtatactgttggtgaaaacttgaatattcatttgggaatactgagtgatggattttgttcttgtgttcagtacaaactcaatttagtgtatggggtgtgggacttatcaataaagttgtacttgctttgatctgtgtcagctgtacattattaaatagtcatccttacatctttttatttttgcttttgcatctctagaccttaagtttcaagaaatattaatccactttctcagtgacacacacacasacacacacaagcacacacacacacactttgtc

SEQ ID NO: 561993 - DNA, 602 bp, Homo sapiens
tgggagatatacctaatgctagatgacacattagtgggtgcagcgcaccagcatggcacatgtatacatatgtaactaacctgcacaatgtgcacatgtaccctaaaacttagagtataatwaaaaaaaaaaaaaaaaaagatgcaagttttaaatatgttttcttaggcagcaacatacaaaataaaaacatgttgattttgatcattttcattagttactaacatttaaaaaataaagagctttataaaatgacagaagcagaatggattattatgaaaaaagtaaatgaacacattgaggtacatatttctctatttgaaattggtattaaaacagagaactacgttcacaaagacagaaatcgttagagcttatgttagacttacctgggctatatagaataatgactcttattccatataaaaattcttatatttttatcttagtaataattcatgtctagaagtatcagattctgtttcatattagtaaacgtttaacatgtgagtagactgtctgaccaattatgatgttagtttatttgagctgctcaaagaactatgaaatgggatagataagaggcaattacgaattccacc

SEQ ID NO: 561994 - DNA, 567 bp, Homo sapiens
ttgcattttttagcaccagaattcattaatttttgttaattattttaatctctttgttaaatttatctgatagaattctgaatttttttctctgttatcttgaatttcattgaacttccttaaaacagccattttgaattctctgtctgaaaagtcacaaagctctgtcactccaggattggtcactggtgmcttttagtctgtttggtgaggtcatgttttcctggatggtcttaatacttgtggatgtttgtcaatgtttaggcattgaacagttaggtacttattgtagtcttcatgatctgggcttgtttgtacccctctttcctggaaaagttttccaagtattcaaaggaattgaatgttgtgatttaaatcttcggtcaatgcagccatatatacattagggggcaccccaagcccagtaatgctgtgaccttgcagcctgttagaggtactgccctggtggccttgggtaagatccaggaaatttccttgtattacaagacagagactcttgttctcttcctttacttttcgctaaacgaatggagtatctctttctac

SEQ ID NO: 561995 - DNA, 605 bp, Homo sapiens
tgccatccctaatctctctttcgcactcagaatgataattccagtggtctactaaatatatctgcttggatggtccagaggcaacttatttatgtattcatgcattcattcattcactcattcatcattcatatacttaatatatttattgagtattgcctaatgtgccaggctctgtattaggccctagagacacagggatgaaaagaaagcacagtctctctgctgtcctggaaattgcatgtccacaatttcagagatagatgctgaagctgaaccatttaattatacatgcattgggtgccataaatcaaagtgcagagtgttaygcagtaagtacaaaagaagctcctaacttagctttggtgtttcagaaaatgattctctgtgccgggcatggtggctcatgcctataaactccatctctactaaaaatataaaaattagctgggtgtggtggtgggcacctgtaatcctagctactcgggaggctgagggaggagaatcgcttgaacctaggaggtggagattgcagtgagccaagatcgtgccactgcactccagcctgtgcaacaaagtgagactccatctcaaaaaaaaaaaga

SEQ ID NO: 561996 - DNA, 585 bp, Homo sapiens
tcgctggtttggtagtggtgaattctctcaggatttgtttgttcaaaaaagactattcttcatttatgaatcttagtttcactggatataaaattatttgctgataattgtattgtttaaggaggctaaagataggaccccaatcccttctagcttgtagggtttttgctgagaaatccgctgttaatctgataggttttcctttataggttacctgatacttttgcccaacaactcttaagattctctcctttgtcttgactttagataacctgattactatgtgcctaggcaatgatctttttgtgatgaatttcccaggtgttctttgagcttcttgcatttgaatgtctagatctctagcaaggccagggaagtttttcttgattatttcctcaaatattccaaacttctagatttctcttcttttttgggaacactaattactgttagatttgrccttttaacataatcccaaatttcttggaggctttgttcatttttttatatattttttgtctttgtcagattaggttaattcaaatgccttgtctttgagctctgaagttctttcttctacctctt

SEQ ID NO: 561997 - DNA, 585 bp, Homo sapiens
tcgctggtttggtagtggtgaattctctcaggatttgtttgttcaaaaaagactattcttcatttatgaatcttagtttcactggatataaaattatttgctgataattgtattgtttaaggaggctaaagataggaccccaatcccttctagcttgtagggtttttgctgagaaatccgctgttaatctgataggttttcctttataggttacctgatacttttgcccaacaactcttaagattctctcctttgtcttgactttagataacctgattactatgtgcctaggcaatgatctttttgtgatgaatttcccaggtgttctttgagcttcttgcatttgaatgtctagatctctagcaaggccagggaagtttttcttgattatttcctcaaatattccaaacttctagatttctcttcttttttgggaacactaattactgttagatttggccttttaacataatcccaaatttcttggaggctttgttcatttttttatatattttttgtctttgtcagattaggttaattcaaatgccytgtctttgagctctgaagttctttcttctacctctt

SEQ ID NO: 561998 - DNA, 363 bp, Homo sapiens
tttctggggaactagtatggtcatttggaggtaagccgacactctagcttttcaagatgccagagttcttgccctagctctttctcatcttcgtgagctgatgttccttcaatctttgaggttgttgagctttggatggctttttttttgtaaatcctatttgatgtccttgaaggtttgattgtggtgtaaggkgagttcagttgactcgctttatttctggaggaatttagtggggaaaggatcagttcaggactcctggactgcatgctctaactctgggtggtgggtattgggtcctagcttggttctatcaccccagagcctagaaacctgctgtgctgaaggggccaaggttccctg

SEQ ID NO: 561999 - DNA, 605 bp, Homo sapiens
gactgctctctactaaaaaaygtaataagcttttgaagttcaaaacggatttctggagaaaattctatgtctgtatttctggatccatcacctcgaatcttattttctttcttagttaattgaaataggtagctttctcatggaacctctaatgtcttcttaacacgtaacaaaactacctttagggatttaaggcaaggtttgagagctcccttctatgtcctctctaataatgaggtattagatgtgagagtttctttgtttgttaccccatatgtttatagttcaaatactctcagagaatgtttaagagtagaattttctgccttaaatgtggtacctctttgtctttgagagttttattccttttttcaatcagaagaagctacagtccttagctccttcttgaagagtacgaccattatttaggcaggcttagcgccctttcaggaacttgaaagacttaatcccacgctcagattgttcaggagctactctactttttaaaatttttcctgaattacctctaattaggcaatgggaacacataaatcaattagttctcatgtcagtgacatgaaaaagggtcactgcactcattctaa

SEQ ID NO: 562000 - DNA, 534 bp, Homo sapiens
aaaattgctattgtataaatttttaatcatgctgtataatttattttgaaattacaaataacacgaaaaaagataagagcttttgtgcttgatgaaagaaggcaatgcattttaaaattctgagaaacactkccctagtctataaattcataaataacttcttctaccttggccaataaatataatttggtctaataaacattacttaaacctatttatgcaagccactgtactagacactctgggcagttcccacaatcaaaggtttataattgccaaattaaatgcacattcatgtactttttttccatcttgcaaaactgaaactgtatacccattgaacaactcccctcttctccctccctcaaccactggcaaccaccattcaactttctgtttctaagagtttgactactatagatacctcatgtaagtagaatcatatagtatttgtcattttgtgactggcttcttttgtgtagcataatatccttaaggttcattcatgttataccatatgataggatgtccttt

SEQ ID NO: 562001 - DNA, 615 bp, Homo sapiens
gggaggccaaggcgggcatatcacttgaggtcaggagttcaagaccagcctggccaacatggtgaaactccatytctactaaaaacacaaaaaattagctgggcttggtggtgcttgcctgtaattccagctactcaggaggctgaggcacaataaccgcttgaacccaggaggcggaggttacagttgatattgtaccactgcactccagactgggcaacagaggcggaccctgtctcaaaaacaaaagaaaaaaagaagttgagtgcacttttaaactcagagagacccaccagatttcagaaatgtgtttacaagggttctttttctttttttctccacagtaggggcaagtatatctttaaccgtgtagatttattacctatttcagagtgaatgccaaagttttctgaatgagagctttacttgatcctggaagaattccatgccaattgaacactggttgcattccataaaatgataggagcaagtcaggaggaaagacagctgtaatattcaattgtctgtaaccaatgtgttaggagtcaccgtctttcatctagacggtacagttgcatttttaaaatgacatctattaccacattagaggcaacc

SEQ ID NO: 562002 - DNA, 445 bp, Homo sapiens
ctgcccagcaagacctgtgttggacttttgatacacagaactacaagattataagttggtcttgtttcaagcctctgaagttgtggtcatttattacagcggcaacagaaaacaaatacaccctttctagggaccattttgcactgtcatcacatcagcaattgacgagattgttcccccacatyttcacaaacagaatgtgttgctagtctttgagatttttgccaatctgatgattggtgagaaagagtatctcagtgcaactataatttgcactattctttttatgaatgagattgaacatcttaacatttatatttatttgtattaaaggaatgtttgttcatgtttgttgcccatatttctattggattgttgatattttttaaatcaagttctaagagtttattcatgtgatgaagaccttatatatgatagcagttgc

SEQ ID NO: 562003 - DNA, 589 bp, Homo sapiens
gcatgctgatgcaagggatgggcttccaaggccttgggcagctctatccctgtggctctacagggtacaacccctttggctgctttcagggactggtgtttagtgcttgctgtttttccaggtacatggtgcaagctgttaatggatctactattctggagtctgggggatggtggccctcttccactaggcagtgccccagtggggactctgtgtgggggctccaatcccacattttccttctgcactgccctagcagaggttctctatgaggactctgcccctgctgcagacttctgcctggacatccaatccatacctcctctgaaatctcggcagaagctcccaaagctcaactcttgtcttctgtgcacccgcaggccaaacaccatgtggaagctgccaaggtttggggcttgcactctctgaagcaatggcctgagctgtacgttggcmcattttagccaggcaggagctggagcagctgggacatagagcaccacatcccaaggctgcacagagcagtgggatcctgggcccggatcatgaaaccattttcctctcttagacctccaggcctgtgatggga

SEQ ID NO: 562004 - DNA, 558 bp, Homo sapiens
agatactgcaaacatacagaaacacatgcaaatttgaaacacagagagcttttaaaaattaactagatcctaggggcagggatggacactggtatttttagaagctctccayagtctgaaatgggaataaaaagtagaacccatctgacctataacccaaaaaagacaggaaatagaggaagtagaggaaacccaaaacacacaaatcttaagactatagtttaagcagacttgcatgttcggcattatgctaagacaaatatatagtcctatggtttagactgaacactgaaagcaagctacagccaattagacattggttgtaaatattactgctgttacatttatatccatggagcagtgcaccacagtattcagtattcattctctaacagcttgagaggggaaatgagacagaggataaaccagggtaataattatcagcttgggggagtgggggtgggtagttatctactcagactaactggcaaaagccgggctgtgattcacacaagaagctgttgtagtccaggaagagtcatatgctctctcaaaagg

SEQ ID NO: 562005 - DNA, 558 bp, Homo sapiens
agatactgcaaacatacagaaacacatgcaaatttgaaacacagagagcttttaaaaattaactagatcctaggggcagggatggacactggtatttttagaagctctccacagtctgaaatgggaataaaaagtagaacccatctgacctataacccaaaaaagacaggaaatagaggaagtagaggaaacccaaaacacwcaaatcttaagactatagtttaagcagacttgcatgttcggcattatgctaagacaaatatatagtcctatggtttagactgaacactgaaagcaagctacagccaattagacattggttgtaaatattactgctgttacatttatatccatggagcagtgcaccacagtattcagtattcattctctaacagcttgagaggggaaatgagacagaggataaaccagggtaataattatcagcttgggggagtgggggtgggtagttatctactcagactaactggcaaaagccgggctgtgattcacacaagaagctgttgtagtccaggaagagtcatatgctctctcaaaagg

SEQ ID NO: 562006 - DNA, 512 bp, Homo sapiens
gttgcccaggttggtgttgaactcctgctttggccttccacagtgctgggattacagatgtgcgccaccatgcctggacttctttgttgttttgaaaaccaatcagaatgtattgaaataaatacgaggttacttgtacagattgcttatcacagcttatagcacatagacatgatttttagggctgggcgttgtggctcattgtctgtaatcccagcactttgggaggccaaggcaggcgcatcacttgagatcaggaattcgagaccatcctggctaacacggtgaaaccccatctctactaaaaatataaaaaattagccgggcatggtggcacatgcctgtagtcccagctactcgggaggctgaggcaggagaatcgcttgtatccgggaggcggagattgcagtgagtcgagatcgcgccactgcactccagcctgrgtgacagagcgagactccgtcccaaaaaaaaaaaagatttttaatgttcataggtgtctacatggtcgt

SEQ ID NO: 562007 - DNA, 504 bp, Homo sapiens
aaaatactttagcagaaaacagatgcaccgggcacacacacacacacacacacgtttggaatgcctactaaagaaagcatccacaaaactgaatgaaagatgtactcaaaaggttaaagaaaggaaaatgatgtatctacaaggggaatgtaccaaccaaaagcagatagtgtgrtatcagttactctaggaggaaaggcaacttctgaatttcagtgggttttctgggaagcaagcggtactctttttaatattcaattcatcaagggtcccagaggcaaattaatggagttgcagaatctatgtctgcaatagtctagtgtccacatgagcaaaggacccctgtcaatgttgcacaagaatgactgcctccatcagagcaagttagggccttcatcaggagaagcctgaagactccggctcctataaaactgcagcccaatcacaaggctgtatggaagttacgtgtcttgtggtgaaaataatggtataaacttattgaac

SEQ ID NO: 562008 - DNA, 504 bp, Homo sapiens
aaaatactttagcagaaaacagatgcaccgggcacacacacacacacacacacgtttggaatgcctactaaagaaagcatccacaaaactgaatgaaagatgtactcaaaaggttaaagaaaggaaaatgatgtatctacaaggggaatgtaccaaccaaaagcagatagtgtggtatcagttactctaggaggaaaggcaacttctgaatttcagtgggttttctgggaagcaagcggtactctttttaatattcaattcatcaagggtcccagaggcaaattaatggagttgcagaatctatgtctgcaatagtctagtgtccacatgagcaaaggacccctgtcaatgttgcacaagaatgrctgcctccatcagagcaagttagggccttcatcaggagaagcctgaagactccggctcctataaaactgcagcccaatcacaaggctgtatggaagttacgtgtcttgtggtgaaaataatggtataaacttattgaac

SEQ ID NO: 562009 - DNA, 568 bp, Homo sapiens
aaacagtttaaaaattatcaatattttaatatttattattactatggaaggtaagtgtatgagttttcaaggtttttaaaacatttacaatagagccaataaactagtcaaaaattaatatatttttagaaagtttataaacactcagaataataagtttttataaaattgcatagacattatcctggtatttcaaatttactttctttccccccagaatattcctaaaatgatcaagtctaacattcatttcattaggctgtaagcaaagatttctatgcttactcaggccacaggagacctagaattcattgtgttctttgcaagataatgtaaaatgttaattgataaaaatgactaaatataaaatttaataatatttacatttaatgtyttaatagattctagatcacaaatagcaatatagggtgaagcagggagagataaaatattaaacttcacttttaaaagtcttttgcacttctgtatttagccatgacagagtgacaaagatcacacctgacctcctaccgtaaacaactataaagctgaataaaacatacaaaat

SEQ ID NO: 562010 - DNA, 556 bp, Homo sapiens
gaattctggccctctctcttctacttctgccctcctttctgtctaataatccccaggccaagaaagaataggcttaggcaaataattataatagttgagcctccttttattcttagatacttataggacaataagaacagataaagcgrttctgaagactatagtatgtatactcaggtgctgtatcattgaatcattttcagtatgacatgaacttcactggccttttacaatcaggattagaagtagtgccacagtgcataacattgagggcataagggtatcattagaataagttttactgctattttatcagtcatccaatcataaaatctctactcactatctttaagctatttacaaatgtcaatctcactgtctagggaacagcttgttatgaagtattcactgtaactgtcacatttaactgccaatgacagtaaaatgaaagtctgtcttaattactgtcttgtttcatttctcatttgccatgcctctttctaggaaagtaaattatacagtgtccaatctcagaagattatttaaaacataaggt

SEQ ID NO: 562011 - DNA, 567 bp, Homo sapiens
atttcccagccccacttgaaggcacagacccagtcactacaatacactaagccagcagagcccagcctggcgccacagcccagcaggaaacacagcatggagactaatggcagcagggcttcccctactgcccctggcctcggccctcgcctcctgtgatccccagtgtcacccttctaactgatcatcagtgagactgcctctgtggcagccacagactccatttcaggcgtccccaggccaacccctttcttaaggttctccccaacaccactagataagtgctgccacccacctctcagcccctctacctgcaacatcacagtcaacagcagacgcaggaagagcggctggattcaaaagtgagaggggaaaggtgagagggcaccatgctggagtcagggtttcagaatgacgattctccattctggagagaagcaacccagycacggagctgagaggcaaagggaccagccaaagagagtggtcgtatcctgctggggacagacacctacctggagaagcaatccctgttctgaggcagagttgcctggagctgcagagctg

SEQ ID NO: 562012 - DNA, 600 bp, Homo sapiens
ggcatcaaggctccaggtatagctgaaagcattctgtatgtagtgaaggcatggatcaaggaaaagtaaaagaggtgtaagggaacagccttgtccaacttgttaggcatgcagaagtcaggagaaaaaagcctgcagataagttaaatccggtgggcatggagggacctgaagccaaagcagagtcagsttagtttggtaaaggatccattgaaggtttttttttagcagcagagtcagatgggagcagtgctttttaggactacataaattagtggaaagagactggaaactagggtcacatacttctctgtgacagtgagtgccagtttacctacaaaaccagtgacattatcttctagacctactgacatggcctcgtctgattctctgcttttcagttgtgttcttacctctaggtgagaaaactgagtttcttcctacagtgaggtttcccctattccttcacctctgaaatttggaaactaagttgccctctgacagttcaagcattaaaaaaaacccaacatatagtaattaaggtaatagaggaagtcaatctggcctagagtagtatctctcaaaatttgtttggcctca

SEQ ID NO: 562013 - DNA, 600 bp, Homo sapiens
ggcatcaaggctccaggtatagctgaaagcattctgtatgtagtgaaggcatggatcaaggaaaagtaaaagaggtgtaagggaacagccttgtccaacttgttaggcatgcagaagtcaggagaaaaaagcctgcagataagttaaatccggtgggcatggagggacctgaagccaaagcagagtcagcttagtttggtaaaggatccattgaaggtttttttttagcagcagagtcagatgggagcagtgctttttaggactacataaattagtggaaagagrctggaaactagggtcacatacttctctgtgacagtgagtgccagtttacctacaaaaccagtgacattatcttctagacctactgacatggcctcgtctgattctctgcttttcagttgtgttcttacctctaggtgagaaaactgagtttcttcctacagtgaggtttcccctattccttcacctctgaaatttggaaactaagttgccctctgacagttcaagcattaaaaaaaacccaacatatagtaattaaggtaatagaggaagtcaatctggcctagagtagtatctctcaaaatttgtttggcctca

SEQ ID NO: 562014 - DNA, 429 bp, Homo sapiens
aattttaccttctgggcctcagtttccytccttttttttttttttttttttttccctgagacagggtctctctctgttgcccaggctggagtgcaatggtacaatcttggctcactgcaacctccgcctcctgggttcatgcaagtctcctgcctcagcctcctgagtagctgggattacaggcatgcaccaccagctaagttttgtatttttagtagagatggggtttcactatattggccaggctggtctcgaactcctgacctcaggtgatcctcccgccttggcttcccaaaatgtcaggattacaggtatgagccaccatgcctggccagtttctttcttcataagatgattttgaaggcccctttcggctctgatagtctaggatactatgcacctgggtcaattggttttaagcactttcaa

SEQ ID NO: 562015 - DNA, 574 bp, Homo sapiens
gggttcatgcaagtctcctgcctcagcctcctgagtagctgggattacaggcatgcaccaccagctaagttttgtatttttagtagagatggggtttcactatattggccaggctggtctcgaactcctgacctcaggtgatcctcccgccttggcttcccaaaatgtcaggattacaggtatgagccaccatgcctggccagtttctttcttcataagatgattttgaaggcccctttcggctctgatagtctaggatactatgcacctgggtcaattggttttaagcacttycaaggcttgctttcctgtcattttcagtctagaaagtttaacttccagggctggcctaaaggtagagcttatttttaaaagggagggctagttctgattcaacagtagacctaagtgtttggttggacttggatctgcttcaaatttccaggagacatgaagcataatgacgtgtaatccttaagacctagacccttactctcccagagaggagctggaaacagaccgcttactgagggatgcataagggagtacctgtctggggtttcaccagtgttgt

SEQ ID NO: 562016 - DNA, 582 bp, Homo sapiens
gacgtgtttgcttccccttccgacatggttgtaagtttcccgaggtcttcccggccctgtggaactgtgagtcaattaaacctctttccttattaaattacccagtctcgggtatgtctttattagcagcatgagtacagactaatacaatccattttcatccaactgggcctggacccagagctgctgaggcgctaaagcatgatacaactgtcaagtgatttaggccgactcgatttactcaacttgtttttctgcttccaccatcatcaatgtggagggttgtttctattctgattactggatcatactttttggtaaattttccgaggttaaagaaaaagcaattgtctttggccctacgtaacttctggcgtatttaatggcagaggctcttagttccctcttctctccccaacatcttagtgctcagttcctacctcttttgagtatctcctggggttactctgaaccctggagtgggcccttgccctctgttttgctgctcagcagctgacsctcttgctgtgttggggatcaaactttctctcctttggcaaagtgtgggaggtagaacccggg

SEQ ID NO: 562017 - DNA, 410 bp, Homo sapiens
tttctttaaaaaaactaaacatgcaactgttatacaaccmaggaatttcagccacttgcatttataacagagaaatgaaaacttatgttcatgcaaaacctttatacaactgttcatagtagcttgtttgtaatagccaaaacttggaaacaactcagatgtcctttcactgggtgcataataattaaaagaactgatgcacacctatcatacactgctattaagcaataaaaaggaacaaattattgataaacacagtaacctgtaggaatctccggaaaattatcctgagtaaaaaagccaatcctagacatagacaatgtggtacatttacaccatggaatactatgcagacattaaaaagaacgaaaccatgtctttgcagcaacacagatggagctggaggccat

SEQ ID NO: 562018 - DNA, 570 bp, Homo sapiens
aaaccaaggcaccagtctccaaatattattcttctggctctaaatgtcctgccctggtcatgcaatcaccctttctttccagggcattctgaggaatcatccccacaatggcctttctctctttgacgtctttagtttgcctaactcatatcttactgtggcaattaagagtggggaagctaagctgtttcacatattgtactaaattcacccaaaggctcacttgacttagatggcagataatacattgttttttttttttcaccatttcccagtaaggtcacctccccttcacagctcatttacagaattgaccttcctgggcctccaaagtagccaaattacacctgcctcatgtcaccagccccttccacatttccagtcctctttggtaaatcattcagaagcccttcagcaagctgcttatctagagtgatatgaggacacttttacaayattaaaaatagtttaaatgtatgttaagagaagccaacataacttcacatgggaaagaagagaaggaatctaacatttagcaagcacctactatgggcagaacattatgttcag

SEQ ID NO: 562019 - DNA, 602 bp, Homo sapiens
caatttagcttactgtttgcattgctaggccctggaggtagcatgtcacagggaaaggatgcaggatctgcagctggcaagccctgcattcaaatcctggctctgtcacttagttgtaatcattaatagttaataattattgagttaagtcattttatagaggagaaaactgasacagagagtttagtaacttggccaaggtcacagtaagtgccaggcaggatttgcttctatatctgtgtaatacctcttaacccttaagccatattacctttttgatatggtttggatttgtgtccccacccaaatctcatggagattggaggaggggtctggtgagaggtgattggatcatgcaggtggattttacgcttgctgttctcatgatagtgcgtaagttctcatgatatctgatcgattaagtgggtgtaacacctctcccttagtgttctcctgccaccatgtaagacatgccttgcttcccctttgccatctaccatattgtacatttcctgaggccttcccaaccgtgtggaactgtaagtcaattaaacctctttcctttataaattacccagtctctggtagttctttataccagt

SEQ ID NO: 562020 - DNA, 602 bp, Homo sapiens
caatttagcttactgtttgcattgctaggccctggaggtagcatgtcacagggaaaggatgcaggatctgcagctggcaagccctgcattcaaatcctggctctgtcacttagttgtaatcattaatagttaataattattgagttaagtcattttatagaggagaaaactgacacagagagtttagtaacttggccaaggtcacagtaagtgccaggcaggatttgcttctatatctgtgtaatacctcttaacccttaagccatatyacctttttgatatggtttggatttgtgtccccacccaaatctcatggagattggaggaggggtctggtgagaggtgattggatcatgcaggtggattttacgcttgctgttctcatgatagtgcgtaagttctcatgatatctgatcgattaagtgggtgtaacacctctcccttagtgttctcctgccaccatgtaagacatgccttgcttcccctttgccatctaccatattgtacatttcctgaggccttcccaaccgtgtggaactgtaagtcaattaaacctctttcctttataaattacccagtctctggtagttctttataccagt

SEQ ID NO: 562021 - DNA, 602 bp, Homo sapiens
caatttagcttactgtttgcattgctaggccctggaggtagcatgtcacagggaaaggatgcaggatctgcagctggcaagccctgcattcaaatcctggctctgtcacttagttgtaatcattaatagttaataattattgagttaagtcattttatagaggagaaaactgacacagagagtttagtaacttggccaaggtcacagtaagtgccaggcaggatttgcttctatatctgtgtaatacctcttaacccttaagccatattacctttttgatatggtttggatttgtgtccccacccaaatctcrtggagattggaggaggggtctggtgagaggtgattggatcatgcaggtggattttacgcttgctgttctcatgatagtgcgtaagttctcatgatatctgatcgattaagtgggtgtaacacctctcccttagtgttctcctgccaccatgtaagacatgccttgcttcccctttgccatctaccatattgtacatttcctgaggccttcccaaccgtgtggaactgtaagtcaattaaacctctttcctttataaattacccagtctctggtagttctttataccagt

SEQ ID NO: 562022 - DNA, 385 bp, Homo sapiens
tgtactgaatactgtaggcaactgtaatacaaaggttagtacttgtgtatctaagcatatcaaaacaaagaaaaggtacagtaaaactatggtataaaagatttgaaaaatggtactcctatacggtgcacttaacatatatggagcttgcagggctggaagttgctctgggtgggtcagtgagtgagtggtgagtgaatgtgaaggtctaggacattactgtacactacagtagactttataaacactgtataattatgccgtactaaatttatctttgaaattttttctttcttcagtaakaaattaaccttagcccactataactttttataaactttaagctgttataaactttaaatttttaaaactcttttgggataat

SEQ ID NO: 562023 - DNA, 560 bp, Homo sapiens
gatggaagataggagataaacagatgggagatatcaagagaggtaaaaaaaaattatggaagctctaatgaaatggtccaacagaagtttaacaggaatttaaaaaaaaaagtaagaatagagagaatcagggacaggcaatattggaagagataatgactgaaaattctaatagttgaaagacacaagtcctttggttaaaaaaaaaaaaaaagcaaaaccaagaatacatgagcaggataaatagaacaaatcctcatctaatactgtcatagaattaactgtagaatagagaaaataggagaaacaaataacaagaggacagtagaatgacaacagagattctgtcggctctagtggatatcccaagtgtaatctcagcctccaaaaactcctcttatgggccagcatcaaaatactgcaataaattcacatgcaagaattgtggacccttggaaattatgtcaatagaagcgcaaacaagtatttctgggaaacaccttgtttttaagtgagaaaagttatgtcacaaaaacgtwgtcttgtatattttcaagaca

SEQ ID NO: 562024 - DNA, 645 bp, Homo sapiens
acacacacacacacaattccagatgaactgaactttaatgtcaatgacaaagctttacaacttttaattgataagagaatatcttcatgaccttggatagtgaaggatttcttaaataagtctcaaaaagtataattgtatagggaaaattaattaattcatctagattaaaatgaagaatttatgtttatcaaagacatcataaaatagtgaccaggcaattcataaagaagacatgtaagtatattaaactaacacaaagttagtgccctgaatatatacagatcagctatcaatcagtaagaaaaatagtcccttttaaaataccttttaaaaaatgagtaaaagacctgaatgaccattttacacagggacaaaatgatggtcaacagacacgaaaatattcttaagcttacacaatataaaggaaacacaattgaaaaccacagtgagatayttcatttcatactccctgtaatggtaacaattaaagtgcttgatagtgtcacttgctaccaagaatgtggagcaatgggggcactcacatattgttactgggtttaaaaattggaacaatacttttgggaacatagtgcatttatcttataaagatgaccatgactatacccctttgattatcaaaat

SEQ ID NO: 562025 - DNA, 356 bp, Homo sapiens
aaacactctcaaaaatccacttgagtaggcttttatctttttcaactgtcactcttgctcaggtctttatttaatatattttatcctttttatatcttacaatatctctatttccccattatgtaggttctatakaagtcagagaagttagtaagttaaaggaaaagcaagaatcctctcattctggaaaggtagggttctgggaaaaagataacaaaatttataacatagtgagatttttattttacatcgtaacttttttttattttatatatatatatattttttattatactttaagttctagggtacctgtgcacaacgtggtttgttacatatgtatacatgtgacatgt

SEQ ID NO: 562026 - DNA, 356 bp, Homo sapiens
aaacactctcaaaaatccacttgagtaggcttttatctttttcaactgtcactcttgctcaggtctttatttaatatattttatcctttttatatcttacaatatctctatttccccattatgtaggttctatagwagtcagagaagttagtaagttaaaggaaaagcaagaatcctctcattctggaaaggtagggttctgggaaaaagataacaaaatttataacatagtgagatttttattttacatcgtaacttttttttattttatatatatatatattttttattatactttaagttctagggtacctgtgcacaacgtggtttgttacatatgtatacatgtgacatgt

SEQ ID NO: 562027 - DNA, 356 bp, Homo sapiens
aaacactctcaaaaatccacttgagtaggcttttatctttttcaactgtcactcttgctcaggtctttatttaatatattttatcctttttatatcttacaatatctctatttccccattatgtaggttctatagaagtcagagaagttagtaagttaaaggaaaagcaagaatcctctcattctggaaaggtagggttctgggaaaaagataacaaaatttataacatagtgagatttttattttacatcgtaacttttttttattttatatatatatatattttttattatactttaagttctakggtacctgtgcacaacgtggtttgttacatatgtatacatgtgacatgt

SEQ ID NO: 562028 - DNA, 319 bp, Homo sapiens
taggcttttatctttttcaactgtcactcttgctcaggtctttatttaatatattttatcctttttatatcttacaatatctctatttccccattatgtaggttctatagaagtcagagaagttagtaagttaaaggaaaagcaagaatcctctcattctggaaaggtagggttctgggaaaaagataacaaaatttataacatagtgagatttttattttacatcgtaacttttttttattttatatatatatatattttttattatactttaagttctagggtacmtgtgcacaacgtggtttgttacatatgtata

SEQ ID NO: 562029 - DNA, 354 bp, Homo sapiens
tttatctgtagcagaacagataatgaattttgaaaagtggaaaatattttcttcttgttaaggaagctgtacctatcccagttggaaacatagmtatgggcaagagccagagaattctcaggtgcacacagatcttgccctcctttccatacctcagaagttcaattaccagcatcctttcagctgcaaccagaatttaactcaatggttatctggaatgagatagaacaaatgataccttaagagatacaagtgttttatacaatgagtaaaaaagtctatgataagcacattaaaacatgtttattatgcagcagaacaaataagcaaatatctcttagagtacagtttttc

SEQ ID NO: 562030 - DNA, 632 bp, Homo sapiens
gggcttcttgccctttgtgagcttaaaatttaaagtggtcatataaatgcgacatgattataagtaaatggcataaagaaaacagaacctaattaggacaagttccattacactaaataacattaccatgaatgatttatatgccacaaatactagcttatttatttcaactattacttaataataaagtttaccttgcttgggaagagaaggatcatatactagctagagataattgcttaagtttctaatgctctttcctggttggcagaatttggaaatggcagggaaggagaaagcagagagatttcagaatctcttcagacaccactgcacaaaaagagtgtggtagtgtgaaactatttgcagtgggttatagaggaaattctcagagataactaaaaagaaaaaagacatagaaagaatgaagaccaggaataagacagtagtgtcctctgaattatrttggtctacatgtatgatgagaacactaatattatatggtgcaagttaagctggtttttcagaatattaataaaacactaaagacttgaggaatggttctgtttcagttgcatcccaacctacttgcccccatcaagtgtccagatttcaaacattatcatctcagg

SEQ ID NO: 562031 - DNA, 582 bp, Homo sapiens
gaaaattttcttcccggagttctttttgtctcgtcaagtttgggctcttaaatagtataattctctgtgttaattgtctgtgtctattataatttgaacacaatttttgcttttgaccagcagattacactcagaatattgtcttctgttaaatttcaacattctctgctccatttgtgtggttttctacttctgagatatttataatagattattcctcttccatataktattctattctctataatgtgtgtgctcttttccttgttattcaacttttaaaaaggcaagtttgtcttctacataattttttttctcaggtgtgtctagtctgttcattgatattttgaatttcttaattagcttttatactgcagctcatttggctgtcaggtttgcttttgcacttaagaattattattcattttagtctgttatcaattgtcttatgtttcagctctgatattttgtttaatatacttactacattctttgctaatgagtggctctcttggggaattttcttctgcttcttggacttattttccatattggattatttatctgacttattagcatgtt

SEQ ID NO: 562032 - DNA, 582 bp, Homo sapiens
gaaaattttcttcccggagttctttttgtctcgtcaagtttgggctcttaaatagtataattctctgtgttaattgtctgtgtctattataatttgaacacaatttttgcttttgaccagcagattacactcagaatattgtcttctgttaaatttcaacattctctgctccatttgtgtggttttctacttctgagatatttataatagattattcctcttccatatattattctattctctataatgtgtgtgctcttttccttgttattcaacttttaaaaaggcaagtttgtcttctacataattttttttctcaggtgtgtctagtctgttcattgatattttgaatttmttaattagcttttatactgcagctcatttggctgtcaggtttgcttttgcacttaagaattattattcattttagtctgttatcaattgtcttatgtttcagctctgatattttgtttaatatacttactacattctttgctaatgagtggctctcttggggaattttcttctgcttcttggacttattttccatattggattatttatctgacttattagcatgtt

SEQ ID NO: 562033 - DNA, 535 bp, Homo sapiens
tctgggcaacatggccaaaccccaattccacaaaaaatacaaaaaattagctgggcatggtggcacatgcctgcggtcccagttactcatgaggctgaggcaggaggattgtttgagcctgggaggtggaggttgcagtcagccaagattggaccacttcactccagtctgggtgacctgggtgacagagtaagaccttgcctcaaaaaaaaaaaaaaaaaaaaaaaaaaagctttgacatataaataggattgagtgaagaagtcccagatttctccccataaaagattcagactaccaaaatttcacatttggaatataatctaraagtgtctcatcctgcctgatctgctgcaattcagttagttcatttgtcttcattataatttgtgtggatcaggctaattaactataatttattctgtgaatttctgtgtaattaatataatttactttggctgtaggcagctaaaaatgatatgccaagctctttttgtcagaaactttaccaacatttatcttggattcaattact

SEQ ID NO: 562034 - DNA, 550 bp, Homo sapiens
tgcaacctccatctcccaggttcaagcaattctcctgcctcagccttcggagtagctgggactgcaggtgcatgccaccatgcccagctaatttttgtatatttagtaggacagggtttcaccatgttggccaggctggtcttaaactcctaacctcaggtgatcctccctcctcagcctcccaaaatgctgggattacaggtgctagtattgatttttaaagacatgagccactgtgctctgcctcggtatttgttatataatttttctttatggtctttctctcccatagagcgataaatcattcatgacaaaatactttcaataaatgttaactaaataaatgaatgaataagtaaatatagatgtaaagaatgtaatactctggctgacatagacatcagctgtttttgtttgtttttacccaccaagaataaaatgaaatttcaatcacrgatatttaggataaagatgataatcggctccaaaatcactttgttcttttggagcccttaaaacaccagagttcccaaaatatgtgaattgcttg

SEQ ID NO: 562035 - DNA, 569 bp, Homo sapiens
aattgggacttatctacctggccaaattgtgttwgccccaatatgtatggaaaagaggaggaggcaaagaagggaatcccatagcatcaaataacaaaggtagggggcaaattgcattgctcaaggtgagaacccagagtccccaagccaccagagagctcactcagcagtggggaaaccaaagaaaaatgttcaggcagctgcttgtctgccactgcagtaagctgcttgggtcaagggtccaagactcccagtaaaaataaacaaggcagcttattggaactagtggaagaaggttagcactagtattgatggggagactttttttttttttttgcatctcttactggggacagttaggactttctcattgtcaatggccctcttgctcattgtaggcacactgattctggcccagggctggtgagttcagggctcttttctgggcatcccagacacagattttgtgacattttctcaagacaggtaacccccagagggaagggattaaagcaactgttaacaattgctctttttgggtatttctttggtttcattttttgtttgtt

SEQ ID NO: 562036 - DNA, 576 bp, Homo sapiens
aatgaacggaatccgctgaagaattctacatagctactatagcctctagttatgaatagagatggtggcaactgtgaactcttccaaaaatgtttcatcaattaatgtacatacaaacagatgggtgaatgatttggtgggtgaatagaaatgcaacattagatgagacatagctcaatatgtggaggtgtagaaaaataatgttatatttaattaattttattatattttatttgtaaaaaagaaagcacaaaattcagagaacatactctgtctaaaaaggttatttcttaagttactctttgctttaaaagcttcgtgaaggtctcctacttgtaaaagataccatgctggcagatatgttttactaatctgttctaactrtgtgattacaaaataccattcagcccagtaaatttgcatttgccttattaatatggccaatgccagactttgttcatgggcatctcacactccctttgctgtttcctaaggaccagacttagaatacggggatctattttaaaagatataattgaaaactactttctgatattaatttctataaaatttaat

SEQ ID NO: 562037 - DNA, 568 bp, Homo sapiens
aaacaaaaacataaagtggggaaaggacaccctattcaacaaatggagctgggataattggcaagctacatgtagaagaatgaaactggattctcatctctcaccttaaacaaaaatcaacctaagatggatcagagacataaatcattggagaaacccttctagacactgtcttaggcaatacttcatgacaagaacccaaagaaaacacaacaaaaacaaagataaatagatgggacctaattaaacaataaagcttctgcacagcaaaagaaataatcagcagagtaaacagacaacccacagagtgggagaaaatctttgcaagctatacatctgacaaaggattaatatccagaatctacaamaaactcaaacaaatcaccaagaaaaaccaattaatcccatcaaaaagtgggctaaggacatgaacaggcaattctcagaagaacatatacaaatggccaacaaacatataaaaatatgctcagtatcactaattatcagggaaatgtgaatcaaaaccacaatgcaataccaccttactcataatcaaaaaattaaaaaa

SEQ ID NO: 562038 - DNA, 615 bp, Homo sapiens
cacaatggaatactattaagccataaataagaaggaaatcctgctatttaaaataacatgggtgaacctagaggacattatgttaggtgaaataagtcagacataggaagacaaacacctcacaattcactcatatgtggaatcttaaaaagttgatctcatagaaatagagagtagsatggtggttaccagaggctgagctgttgtgtgttggtggggagaaggggcagttggggagatgttagtcaacggatacaaaattatagttcaataaaaggaataagttcacgggatctattaaacagcatgcggactagagttaattatgatatggtgtattcttaaaatacataatcacatcagagtggatattaagtgtacttactacaaaaatgattatttgaggtaatccatatttaattagctagatttggctatttcactatgtatatatacttcaaatcattatgttatataaaacaaatacataaaattttatctaaataaatagatgaaatacataaataagtttgaaaaaaattatttctcactcttctaaaggctagaagttcgaggtcaatgtgctagcagtttcagtgcttggtgaaggtttgg

SEQ ID NO: 562039 - DNA, 558 bp, Homo sapiens
acattccttggctcatggccacttctttcattttcaaatcaaacacgatagtattttcaaataagtctctgacttttacattattagcttcctctgtcacatataaagaccctggtgatttaaattggatcgacccagataatccaggataatctccccattgcaatattcttaatcacatctggaaagttctggaacataatgtaacatattcacaggttctggggattagaatgtgaatatcttcaggagttattctgcctaccacatcagttatagggaaaccatagtaaaggactggtgcaaatattaaatctgtctaaacacagaaataagacatatattgtataatttcagcaataaattagaatatgcatattataaatagaatagaatgtacatataaattttgaacatataaaatataattttttgataaaatgagtaattaaaatatatatwttttttccattagaaaaatttttttttcttttattattatactttaagttttagggtacatgtgcacattgtgcaggttagttacatatgtataca

SEQ ID NO: 562040 - DNA, 577 bp, Homo sapiens
aaactaagccaaagtagaatagacataaaaagtcctcaacacttcaacttcctatccttcaagaagtatacctcgcaaagctcatttgagagaggaaragctttcctccaccctctgttttacagcgctgaggcttctcatcacatttctatgacttgtagcttaaatccatgttacatggtaactggcattgttagtgcttctcttttaacacagtaggaattaatcaatttggtggtgtatttaattaattctatcactagaggattgtaaaattacatatatgaatacctcactttagaggccacttaatttttttccaaggggatatttgactacatttcacttgtgtcttatttaatgattttataatttaaaccctaaattataaatctagaatttagaaagtatatttccccactggattacatttttggaaatattattttatatgtgcacaaatattacaaaatcactgtagacacctgaaaactatattatcttttaaaggcaatatttacattaaactggtataacaaaattgtttggtgcatttttttccagtacattttgtata

SEQ ID NO: 562041 - DNA, 594 bp, Homo sapiens
actggtataacaaaattgtttggtgcatttttttccagtacattttgtatatattacatgtttaaccttttttattcagcaaataatttttgagtatctactaagtgctaggttctgcaytactaactgaatttaaagagtgaaataacagacatggtctcagacaataaaaattaacattaggtcacctatttatatattttaaaatggtaattatgaaaactttttgagatttttaactagataacattataataatacacttgatgttgttaatatttgccagtgagcaaaaaagaaaataaaaagatggttttattcaatatacactttaaaattgcagaaaatagtcaagtttctctgctttgcagttgaatgtctatgtggttttctccgcaacttgccttttgtggagtgaacaattattcttccagcccaataaaggcagaagagtaacaataaatctaatattttaagtgcttctcaaaagatagtaaacatattacttcagaatactgagttcaataagttgacctacaaaaaaagccaaactgacagtattactgaataaggaaaggcccaaagagacaaaat

SEQ ID NO: 562042 - DNA, 609 bp, Homo sapiens
actggtataacaaaattgtttggtgcatttttttccagtacattttgtatatattacatgtttaaccttttttattcagcaaataatttttgagtatctactaagtgctaggttctgcattactaactgaatttaaagagtgaaataacagacatggtctcagacaataaaaattaacattaggtcacctatttatatattttaaaatggtaattatgaaaactttttgagatttttaactagataacattataataatacacttgatgttgttaatatttgccagtgagcaaaaaagaaaataaaaagatggttttattcaatatacactttaaaattgcagaaaatagtcaagtttctctgctttgcrgttgaatgtctatgtggttttctccgcaacttgccttttgtggagtgaacaattattcttccagcccaataaaggcagaagagtaacaataaatctaatattttaagtgcttctcaaaagatagtaaacatattacttcagaatactgagttcaataagttgacctacaaaaaaagccaaactgacagtattactgaataaggaaaggcccaaagagacaaaataatttttattttgta

SEQ ID NO: 562043 - DNA, 609 bp, Homo sapiens
actggtataacaaaattgtttggtgcatttttttccagtacattttgtatatattacatgtttaaccttttttattcagcaaataatttttgagtatctactaagtgctaggttctgcattactaactgaatttaaagagtgaaataacagacatggtctcagacaataaaaattaacattaggtcacctatttatatattttaaaatggtaattatgaaaactttttgagatttttaactagataacattataataatacacttgatgttgttaatatttgccagtgagcaaaaaagaaaataaaaagatggttttattcaatatacactttaaaattgcagaaaatagtcaagtttctctgctttgcagttgaatgtctatgtgkttttctccgcaacttgccttttgtggagtgaacaattattcttccagcccaataaaggcagaagagtaacaataaatctaatattttaagtgcttctcaaaagatagtaaacatattacttcagaatactgagttcaataagttgacctacaaaaaaagccaaactgacagtattactgaataaggaaaggcccaaagagacaaaataatttttattttgta

SEQ ID NO: 562044 - DNA, 609 bp, Homo sapiens
actggtataacaaaattgtttggtgcatttttttccagtacattttgtatatattacatgtttaaccttttttattcagcaaataatttttgagtatctactaagtgctaggttctgcattactaactgaatttaaagagtgaaataacagacatggtctcagacaataaaaattaacattaggtcacctatttatatattttaaaatggtaattatgaaaactttttgagatttttaactagataacattataataatacacttgatgttgttaatatttgccagtgagcaaaaaagaaaataaaaagatggttttattcaatatacactttaaaattgcagaaaatagtcaagtttctctgctttgcagttgaatgtctatgtggttttctccgcaacttgccttttgtggagtgaacaattattcttccagcccaataaaggcagaagagtaacaataaatctaatattttaagtgcttctcaaaagatagtaaacatattayttcagaatactgagttcaataagttgacctacaaaaaaagccaaactgacagtattactgaataaggaaaggcccaaagagacaaaataatttttattttgta

SEQ ID NO: 562045 - DNA, 466 bp, Homo sapiens
gctaagtccaaaagacataaattattttatactaataactactaatattttattcattaaaatataaaggtcaaagatttcaaaatgatctttaaatgattaataacatgttgatctttttcttctttctgtaaacctttttgagtcttaamaatactaaactatacaagcaatattaaatagtatataaacttggattaaaatattcaaatttactagaatgtggacattggaaagaatgaaaataaacagaagcataaagcagcagatataaaattaagaaagcaactaagagtgtttaaagtacatattcatctgtagtctaatgtctaccataaacaatgactcttctcagtaaaacacaaattgttcatgaagggaaaaagcatgttgtattagagaatattcaacataatttttttagtactaacttgtgcctggagtattattgttttttctattatga

SEQ ID NO: 562046 - DNA, 566 bp, Homo sapiens
tattaaatagtatataaacttggattaaaatattcaaatttactagaatgtggacattggaaagaatgaaaataaacagaagcataaagcagcagatataaaattaagaaagcaactaagagtgtttaaagtacatattcatctgtagtctaatgtctaccataaacaatgactcttctcagtaaaacacaaattgttcatgaagggaaaaagcatgttgtattagagaatattcaacataatttttttagtactaacttgtgcctggagtattattggtttttctattatgaacttatgcacttgttaatttttttcataaaaattatatgtacaactccattcaaaagcagtttttggtgggttttttttttttgagacagagttttgctcttttcacccaggctggagggcaatgstgcgaatttggctcacagcaacctagcaacttttgcctcccaggttcaggtgattctcttgcctcagcctctcgagtggttaggactacaagcatgcaccaccatgcctggctaattttgtgtttttagtagagacatggttttgcc

SEQ ID NO: 562047 - DNA, 566 bp, Homo sapiens
tattaaatagtatataaacttggattaaaatattcaaatttactagaatgtggacattggaaagaatgaaaataaacagaagcataaagcagcagatataaaattaagaaagcaactaagagtgtttaaagtacatattcatctgtagtctaatgtctaccataaacaatgactcttctcagtaaaacacaaattgttcatgaagggaaaaagcatgttgtattagagaatattcaacataatttttttagtactaacttgtgcctggagtattattggtttttctattatgaacttatgcacttgttaatttttttcataaaaattatatgtacaactccattcaaaagcagtttttggtgggttttttttttttgagacagagttttgctcttttcacccaggctggagggcaatgctgcgaatttggctcacagcaacctagcaacttttgcctcccaggttcaggtgattctcttgcctcagcctctcgagtggttaggactacaagcaygcaccaccatgcctggctaattttgtgtttttagtagagacatggttttgcc

SEQ ID NO: 562048 - DNA, 592 bp, Homo sapiens
gggaaaaagcatgttgtattagagaatattcaacataatttttttagtactaacttgtgcctggagtattattggtttttctattatgaacttatgcacttgttaatttttttcataaaaattatatgtacaactccattcaaaagcagtttttggtgggttttttttttttgagacagagttttgctcttttcacccaggctggagggcaatgctgcgaatttggctcacagcaacctagcaacttttgcctcccaggttcaggtgattctcttgcctcagcctctcgagtggttaggactacaagcatgcaccaccatgcctggctaattttgtgtttttagtagagacatggttttgccatgttgaccaggctggtcttgaactcctgacctgaggtaatccacccatcttggcctcccaaagtgctgggtatgggcaagagccaccatacctggcctcagaagcagtttttaaaagcaaacacartataacactaaagttgaaaaatctatgctcacccaaggatgccaggtttaataaattatttatagaatactgcatcaaaaataagataataacccaaaatata

SEQ ID NO: 562049 - DNA, 592 bp, Homo sapiens
gggaaaaagcatgttgtattagagaatattcaacataatttttttagtactaacttgtgcctggagtattattggtttttctattatgaacttatgcacttgttaatttttttcataaaaattatatgtacaactccattcaaaagcagtttttggtgggttttttttttttgagacagagttttgctcttttcacccaggctggagggcaatgctgcgaatttggctcacagcaacctagcaacttttgcctcccaggttcaggtgattctcttgcctcagcctctcgagtggttaggactacaagcatgcaccaccatgcctggctaattttgtgtttttagtagagacatggttttgccatgttgaccaggctggtcttgaactcctgacctgaggtaatccacccatcttggcctcccaaagtgctgggtatgggcaagagccaccatacctggcctcagaagcagtttttaaaagcaaacacagtataacacyaaagttgaaaaatctatgctcacccaaggatgccaggtttaataaattatttatagaatactgcatcaaaaataagataataacccaaaatata

SEQ ID NO: 562050 - DNA, 560 bp, Homo sapiens
agagtgcaatatcaggctgggtgcggtggcttatgcccgtaatcccagcactttgggaggccatggtgggtggatcacctgaggtcaggagttcgagaccagcctggacaacaaggtgaaactcttgactgtactaaaaatacaaaaattagccaggcatcgtggtatgcacctgtagtcctagctacttgggaggctgagacaggagaatcacttgaacctgggaggtggaggttgcagtgaaccgagatcatgccacctcactccagcatcagtaacagaatgagatgccatctcaaaaaaagaaaagagtctaatatcggtatacacagataatatactgaatgaaacaaatagaataatttgaagaggtatcttgatgaacaaggagtcattagaaaggttgtattcatgtctttgaaggaaattgcaatgtgagaaattaatactttgactactatactaamagtttattgctaacatgtattgagttattaacgtgtgttaggcagagtaccatataatttacaagtgttatctcatttattgtaggtaaaatg

SEQ ID NO: 562051 - DNA, 538 bp, Homo sapiens
tggatattgctcttttttggtgattttgattttttttattttagaaaactaataaattgactcttcttggtactgactcgggttttatagaagaaaaagtaattaaattatgtatatttacctttrtctcattttttctcttttaaatttactttaattgacatataataaatgtacatgttatggggtacagagtgatattttgatatatttatgcaatgcgtaaagatcaagtcagagtcattatcatatccattaccttaaatcatgtattatttctttgcagtgagaatattcaaaatcttttattttagttatttgaaaacacacaataaattcccgttaactacagtcacccaacagtgctgtagagaactagaacttcttccttctctccagctgtaattttgtatgtattaaccacatttttcttatactcttctttctcctactctttccaggatatggtaaccaaaactctactatctacttctacgagattaaacattttagcttccatacataagtgagaacacgt

SEQ ID NO: 562052 - DNA, 560 bp, Homo sapiens
ttatagaagaaaaagtaattaaattatgtatatttacctttgtctcattttttctcttttaaatttactttaattgacatataataaatgtacatgttatggggtacagagtgatattttgatatatttatgcaatgcgtaaagatcaagtcagagtcattatcatatccattaccttaaatcatgtattatttctttgcagtgagaatattyaaaatcttttattttagttatttgaaaacacacaataaattcccgttaactacagtcacccaacagtgctgtagagaactagaacttcttccttctctccagctgtaattttgtatgtattaaccacatttttcttatactcttctttctcctactctttccaggatatggtaaccaaaactctactatctacttctacgagattaaacattttagcttccatacataagtgagaacacgtagttatgtggtgtttatgtttctatgccaggcttatttcacctaacataatgccctccacttgcattcttgttgccacaaataacaggattttgttctttattatg

SEQ ID NO: 562053 - DNA, 560 bp, Homo sapiens
ttatagaagaaaaagtaattaaattatgtatatttacctttgtctcattttttctcttttaaatttactttaattgacatataataaatgtacatgttatggggtacagagtgatattttgatatatttatgcaatgcgtaaagatcaagtcagagtcattatcatatccattaccttaaatcatgtattatttctttgcagtgagaatattcaaaatcttttattttagttatttgaaaacacacaataaattcccgttaactacagtcacccaacagtgctgtagagaactagaacttcttccttctctccagctgtaattttgtatgtattaaccacatttttcttatactcttctttctcctactctttccaggatatggtaaccaaaactctactatctacttctacgagattaaamattttagcttccatacataagtgagaacacgtagttatgtggtgtttatgtttctatgccaggcttatttcacctaacataatgccctccacttgcattcttgttgccacaaataacaggattttgttctttattatg

SEQ ID NO: 562054 - DNA, 560 bp, Homo sapiens
ttatagaagaaaaagtaattaaattatgtatatttacctttgtctcattttttctcttttaaatttactttaattgacatataataaatgtacatgttatggggtacagagtgatattttgatatatttatgcaatgcgtaaagatcaagtcagagtcattatcatatccattaccttaaatcatgtattatttctttgcagtgagaatattcaaaatcttttattttagttatttgaaaacacacaataaattcccgttaactacagtcacccaacagtgctgtagagaactagaacttcttccttctctccagctgtaattttgtatgtattaaccacatttttcttatactcttctttctcctactctttccaggatatggtaaccaaaactctactatctacttctacgagattaaacattttagcttccatacataagtgagaacacgtagttatgtggtgtttatgtttctatgccaggyttatttcacctaacataatgccctccacttgcattcttgttgccacaaataacaggattttgttctttattatg

SEQ ID NO: 562055 - DNA, 560 bp, Homo sapiens
ttatagaagaaaaagtaattaaattatgtatatttacctttgtctcattttttctcttttaaatttactttaattgacatataataaatgtacatgttatggggtacagagtgatattttgatatatttatgcaatgcgtaaagatcaagtcagagtcattatcatatccattaccttaaatcatgtattatttctttgcagtgagaatattcaaaatcttttattttagttatttgaaaacacacaataaattcccgttaactacagtcacccaacagtgctgtagagaactagaacttcttccttctctccagctgtaattttgtatgtattaaccacatttttcttatactcttctttctcctactctttccaggatatggtaaccaaaactctactatctacttctacgagattaaacattttagcttccatacataagtgagaacacgtagttatgtggtgtttatgtttctatgccaggcttatttcacctaacataatrccctccacttgcattcttgttgccacaaataacaggattttgttctttattatg

SEQ ID NO: 562056 - DNA, 444 bp, Homo sapiens
aaattcccgttaactacagtcacccaacagtgctgtagagaactagaacttcttccttctctccagctgtaattttgtatgtattaaccacatttttcttatactcttctttctcctactctttccaggatatggtaaccaaaactctactatctacttctacgagattaaaaattttagcttccatacataagtgagaacacgtagttatgtggtgtttatgtttctatgccaggtttatttcacctaacataatgccctccacttgcattcttgttgccacaaataacaggattttgttctttattatgactaaatartattccattatatatgtatgtcacatttctttatccattcatctgttgatggacacttttgttgattccatatcttggctattgtgaatagtgctgtaataaacatcggggtgcaggtaagtct

SEQ ID NO: 562057 - DNA, 633 bp, Homo sapiens
cattttatctcatttcatctcatcccatctcatctcatcatttcatatcatctcatcatttcatcaaatctcatctcatttccatttcattttcattatttcatttcatcatttcatttcactatttcatttcatttcatctaatttcatttaattcattatgtcatttcatataatctcatttcatttcatctcatatttttgatatcatttttcatctcatttcatctcaattcatctcatcatttcatctcctcatctcatcatttcctcctttcattacaacatttcatctcatttcttctcatctcatttcaatttcattatttcatctcatttcattatttcacctaatttcattatktcatctcatctcatctcagttcatctgatctcatttcatctcagcatttcatctcatcatttttcatctcatcatttttcatctcatcatttaatctcatttcatttcatttgatctcatcatttcagctcatttcaagtcacatctattcatttcatcatttcatttcaacatttcatcatttcatcgcatcatttcatctcatctttcactttcatttcaatatcatttcatcatttcatttcatctcatttcattatttcattatt

SEQ ID NO: 562058 - DNA, 633 bp, Homo sapiens
cattttatctcatttcatctcatcccatctcatctcatcatttcatatcatctcatcatttcatcaaatctcatctcatttccatttcattttcattatttcatttcatcatttcatttcactatttcatttcatttcatctaatttcatttaattcattatgtcatttcatataatctcatttcatttcatctcatatttttgatatcatttttcatctcatttcatctcaattcatctcatcatttcatctcctcatctcatcatttcctcctttcattacaacatttcatctcatttcttctcatctcatttcaatttcattatttcatctcatttcattatttcacctaatttcattatgtcatctcatctcatctcagttcatctgatctcatttcatctcagcatttcatctcatcatttttcatctcatcatttttcatctcatcatttaatctcatttcatttcatttgatctcatcatttcagctcatttcawgtcacatctattcatttcatcatttcatttcaacatttcatcatttcatcgcatcatttcatctcatctttcactttcatttcaatatcatttcatcatttcatttcatctcatttcattatttcattatt

SEQ ID NO: 562059 - DNA, 633 bp, Homo sapiens
cccatctcatctcatcatttcatatcatctcatcatttcatcaaatctcatctcatttccatttcattttcattatttcatttcatcatttcatttcactatttcatttcatttcatctaatttcatttaattcattatgtcatttcatataatctcatttcatttcatctcatatttttgatatcatttttcatctcatttcatctcaattcatctcatcatttcatctcctcatctcatcatttcctcctttcattacaacatttcatctcatttcttctcatctcatttcaatttcattatttcatctcatttcattatttcacctaatttcattatgtcatctcatctcatctcagttcatctgatctcatttcatctcagcatttcatctcatcatttttcatctcatcatttttcatctcatcatttaatctcatttcatttcatttgatctcatcatttcagctcatttcaagtcacatctattcatttcatcatttcatttcaacatttcatcatttcatcgcatcatttcatctcatctttcamtttcatttcaatatcatttcatcatttcatttcatctcatttcattatttcattatttcatttcatttcatctcatcatt

SEQ ID NO: 562060 - DNA, 602 bp, Homo sapiens
aaataaaatgcaagatttgaaaactgattggctggggcatgaggaaaaggcaggtctttaaggtcaatccctgttttgctttgttaggggttggttttatcacatattgtagaacatgtcatttcagttttgaacatcttgagttaaattgtcctaacatatcttatgaatttgattttcttccctgggaagctaatatttcaaaaactgaaagagtatatagatttccaacttgtatccaatttataaaactatctctaggctgctgatttcaggaggaggctcatgaatattctctttgcagagaatatatcaggagttaacaacagcttcaatatttgtggacgaccagttaactaartcacctcttagtgtatttagatgggaaatcttagctgaagatattcaataatgaaccaacagtgactaaaaaattcaacatttaagtatatttcattgtaattaatttgaattgaagtagcagctagtatttactacattgaacaatgcaaataagaggaaaaaattaataaccatctctaataccacatgccaaaatcctcatcaatttattctagctaaaggagttgatcagaagcagc

SEQ ID NO: 562061 - DNA, 602 bp, Homo sapiens
aaataaaatgcaagatttgaaaactgattggctggggcatgaggaaaaggcaggtctttaaggtcaatccctgttttgctttgttaggggttggttttatcacatattgtagaacatgtcatttcagttttgaacatcttgagttaaattgtcctaacatatcttatgaatttgattttcttccctgggaagctaatatttcaaaaactgaaagagtatatagatttccaacttgtatccaatttataaaactatctctaggctgctgatttcaggaggaggctcatgaatattctctttgcagagaatatatcaggagttaacaacagcttcaatatttgtggacgaccagttaactaaaycacctcttagtgtatttagatgggaaatcttagctgaagatattcaataatgaaccaacagtgactaaaaaattcaacatttaagtatatttcattgtaattaatttgaattgaagtagcagctagtatttactacattgaacaatgcaaataagaggaaaaaattaataaccatctctaataccacatgccaaaatcctcatcaatttattctagctaaaggagttgatcagaagcagc

SEQ ID NO: 562062 - DNA, 646 bp, Homo sapiens
ttatcacatattgtagaacatgtcatttcagttttgaacatcttgagttaaattgtcctaacatatcttatgaatttgattttcttccctgggaagctaatatttcaaaaactgaaagagtatatagatttccaacttgtatccaatttataaaactatctctaggctgctgatttcaggaggaggctcatgaatattctctttgcagagaatatatcaggagttaacaacagcttcaatatttgtggacgaccagttaactaaatcacctcttagtgtatttagatgggaaatcttagctgaagatattcaataatgaaccaacagtgactaaaaaattcaacatttaagtatatttcattgtaattaatttgaattgaagtagcagctagtatttactacattgaacaatgcaaataagaggaaaaaattaataacyatctctaataccacatgccaaaatcctcatcaatttattctagctaaaggagttgatcagaagcagcagttgaaagcaccaactaaaccagctggggttggttcactgtcattctctcagaaccatctcttctctgaacaaaacaagtacaggagttcattgtgaatctgcattctccttgcctattttaaggttttgatgttgacg

SEQ ID NO: 562063 - DNA, 505 bp, Homo sapiens
atttcagttttgaacatcttgagttaaattgtcctaacatatcttatgaatttgattttcttccctgggaagctaatatttcaaaaactgaaagagtatatagatttccaacttgtatccaatttataaaactatctctaggctgctgatttcaggaggaggctcatgaatattctctttgcagagaatatatcaggagttaacaacagcttcaatatttgtggacgaccagttaactaaatcacctcttagtgtatttagatgggaaatcttagctgaagatattcaataatgaaccaacagtgactaaaaaattcaacatttaagtatatttcattgtaattaatttgaattgaagtagcagctagtatttactacattgaacaatgcaaataagaggaaaaaattaataaccatctctaataccacawgccaaaatcctcatcaatttattctagctaaaggagttgatcagaagcagcagttgaaagcaccaactaaacca

SEQ ID NO: 562064 - DNA, 453 bp, Homo sapiens
gaaccaacagtgactaaaaaattcaacatttaagtatatttcattgtaattaatttgaattgaagtagcagctagtatttactacattgaacaatgcaaataagaggaaaaaattaataaccatctctaataccacatgccaaaatcctcatcaatttattctagctaaaggagttgatcagaagcagcagttgaaagcaccaactaaaccagctggggttrgttcactgtcattctctcagaaccatctcttctctgaacaaaacaagtacaggagttcattgtgaatctgcattctccttgcctattttaaggttttgatgttgacgcaaatttgtgaaatccctcctgtggtgtgatatttcgttttccttgctttgtgttaggacaagaatgcttcagctcttaatttaaaattatgtttctccctcctaggttgagtgaacttagaat

SEQ ID NO: 562065 - DNA, 646 bp, Homo sapiens
ttatcacatattgtagaacatgtcatttcagttttgaacatcttgagttaaattgtcctaacatatcttatgaatttgattttcttccctgggaagctaatatttcaaaaactgaaagagtatatagatttccaacttgtatccaatttataaaactatctctaggctgctgatttcaggaggaggctcatgaatattctctttgcagagaatatatcaggagttaacaacagcttcaatatttgtggacgaccagttaactaaatcacctcttagtgtatttagatgggaaatcttagctgaagatattcaataatgaaccaacagtgactaaaaaattcaacatttaagtatatttcattgtaattaatttgaattgaagtagcagctagtatttactacattgaacaatgcaaataagaggaaaaaattaataaccatctctaataccacatgccaaaatcctcatcaatttattctagctaaaggagttgatcagaagcagcagttgaaagcaccaactaaaccagctggggttggttcactgtcrttctctcagaaccatctcttctctgaacaaaacaagtacaggagttcattgtgaatctgcattctccttgcctattttaaggttttgatgttgacg

SEQ ID NO: 562066 - DNA, 453 bp, Homo sapiens
gaaccaacagtgactaaaaaattcaacatttaagtatatttcattgtaattaatttgaattgaagtagcagctagtatttactacattgaacaatgcaaataagaggaaaaaattaataaccatctctaataccacatgccaaaatcctcatcaatttattctagctaaaggagttgatcagaagcagcagttgaaagcaccaactaaaccagctggggttggttcactgtcattctctcagaaccatctcttctctgaacaaaacaagtacaggagttcattgtgaatctgcattctccttgcctattttaaggttttgatgttgacrcaaatttgtgaaatccctcctgtggtgtgatatttcgttttccttgctttgtgttaggacaagaatgcttcagctcttaatttaaaattatgtttctccctcctaggttgagtgaacttagaat

SEQ ID NO: 562067 - DNA, 494 bp, Homo sapiens
aggcgagccatggtgtcgcaggctctaggtgtctcctcctcctcctggcacagagcagctgggcgtgcaaaaccagaaaagcctagggaaagatgtgaggggtggaagggttagagcctcaacttgtcatgccggccactgggtgsgaggggccagtttcagcaaaggcactcacacccaccctacaaagtccagcctctccttttggcccaagctgggcaggaactggggtctggggtgggtgctggagacaccacagcatccagctccccactccacaggaaccattgggcccactggggctgcactcctcggggagcaggagaagcagaaaaattcagacccagccagccctccacacccaggtgccaattcctgttccggacgcctccacgcacagggccctgtcccccgtggtgtccccaggggtgcctggcagcctctgaggcacagacccacagtacacaggcccaggaaccacggtgggtgtgggg

SEQ ID NO: 562068 - DNA, 494 bp, Homo sapiens
aggcgagccatggtgtcgcaggctctaggtgtctcctcctcctcctggcacagagcagctgggcgtgcaaaaccagaaaagcctagggaaagatgtgaggggtggaagggttagagcctcaacttgtcatgccggccactgggtgcsaggggccagtttcagcaaaggcactcacacccaccctacaaagtccagcctctccttttggcccaagctgggcaggaactggggtctggggtgggtgctggagacaccacagcatccagctccccactccacaggaaccattgggcccactggggctgcactcctcggggagcaggagaagcagaaaaattcagacccagccagccctccacacccaggtgccaattcctgttccggacgcctccacgcacagggccctgtcccccgtggtgtccccaggggtgcctggcagcctctgaggcacagacccacagtacacaggcccaggaaccacggtgggtgtgggg

SEQ ID NO: 562069 - DNA, 364 bp, Homo sapiens
gtctcttggctgagctttaaaaagaaatagcgtttaggctaaaaagggaactgctacctctcctaaaatcagaaagatgttacagtaattctccattctctagaattatcaagaagcacctttgtgatgatttacttttgctcytgcgagtgtgagcccgtgtagtcgtggaaccatcaattagaatggtggctttctgatcccaaagtcactcgttctgaaaacaatattttccataaatttgaaagtgagaagttttgatcttgccattcccaagtaactctcttaataagaggcatcagcatgcttcagtgacagctgtcaccttccattgctgagagtcatctttgagttctctatttca

SEQ ID NO: 562070 - DNA, 364 bp, Homo sapiens
gtctcttggctgagctttaaaaagaaatagcgtttaggctaaaaagggaactgctacctctcctaaaatcagaaagatgttacagtaattctccattctctagaattatcaagaagcacctttgtgatgatttacttttgctcctgcgagtgtgagcccgtgtagtcgtggaaccatcaattagaatggtggctttctgatcccaaagtcactcgttctgaaaacaatattttycataaatttgaaagtgagaagttttgatcttgccattcccaagtaactctcttaataagaggcatcagcatgcttcagtgacagctgtcaccttccattgctgagagtcatctttgagttctctatttca

SEQ ID NO: 562071 - DNA, 642 bp, Homo sapiens
tttaataattttatgttaaactccctctatacttacaatatgaattagataattcagaataaacattccattggaaaaagctacacaatttgttataaaacatccttaaaagcatcagaaaattaatacagcaatgaagaattacaggaccaaattaagaatggtatgaaagcctgtttgtgacgcttatgtttgggttatctctttatttgagtgactataaatctcaaaagagaactaaagggagaaataaccrtatctactaacatgctaagggtacttaaacatctcttagtaattgagaaaattgaaagaaaagaaaaaagagaaagggagaaagagagacagcgaaagggataatgaaggagagaaagaagaagagaaaggaagaggaagaaaagtaaaaaggaggaggagggggaaggaagaaggaagaaaggtgaaaagaaagaatggtaaactttttaacaacataatttatccttctagaatatgaatgttggtctatttgatgatgtcccacagattcattagtctctgctcattgtttattttttattctttctgtttctcagagtattttccattttcttctcttcaagttcatggcttcctctgtgtgtgcaaatatactcttaaatc

SEQ ID NO: 562072 - DNA, 583 bp, Homo sapiens
aaattaatacagcaatgaagaattacaggaccaaattaagaatggtatgaaagcctgtttgtgacgcttatgtttgggttatctctttatttgagtgactataaatctcaaaagagaactaaagggagaaataaccgtatctactaacatgctaagggtacttaaacatctcttagtaattgagaaaattgaaakaaaagaaaaaagagaaagggagaaagagagacagcgaaagggataatgaaggagagaaagaagaagagaaaggaagaggaagaaaagtaaaaaggaggaggagggggaaggaagaaggaagaaaggtgaaaagaaagaatggtaaactttttaacaacataatttatccttctagaatatgaatgttggtctatttgatgatgtcccacagattcattagtctctgctcattgtttattttttattctttctgtttctcagagtattttccattttcttctcttcaagttcatggcttcctctgtgtgtgcaaatatactcttaaatccctctggtgatttttaaatttttatcattgtagttttccactccagaatttgttatctct

SEQ ID NO: 562073 - DNA, 583 bp, Homo sapiens
aaattaatacagcaatgaagaattacaggaccaaattaagaatggtatgaaagcctgtttgtgacgcttatgtttgggttatctctttatttgagtgactataaatctcaaaagagaactaaagggagaaataaccgtatctactaacatgctaagggtacttaaacatctcttagtaattgagaaaattgaaagaaaagaaaaaagagaaagggagaaagagaracagcgaaagggataatgaaggagagaaagaagaagagaaaggaagaggaagaaaagtaaaaaggaggaggagggggaaggaagaaggaagaaaggtgaaaagaaagaatggtaaactttttaacaacataatttatccttctagaatatgaatgttggtctatttgatgatgtcccacagattcattagtctctgctcattgtttattttttattctttctgtttctcagagtattttccattttcttctcttcaagttcatggcttcctctgtgtgtgcaaatatactcttaaatccctctggtgatttttaaatttttatcattgtagttttccactccagaatttgttatctct

SEQ ID NO: 562074 - DNA, 642 bp, Homo sapiens
tttaataattttatgttaaactccctctatacttacaatatgaattagataattcagaataaacattccattggaaaaagctacacaatttgttataaaacatccttaaaagcatcagaaaattaatacagcaatgaagaattacaggaccaaattaagaatggtatgaaagcctgtttgtgacgcttatgtttgggttatctctttatttgagtgactataaatctcaaaagagaactaaagggagaaataaccgtatctactaacatgctaagggtacttaaacatctcttagtaattgagaaaattgaaagaaaagaaaaaagagaaagggagaaagagagacagcgaaagggataatgaaggmgagaaagaagaagagaaaggaagaggaagaaaagtaaaaaggaggaggagggggaaggaagaaggaagaaaggtgaaaagaaagaatggtaaactttttaacaacataatttatccttctagaatatgaatgttggtctatttgatgatgtcccacagattcattagtctctgctcattgtttattttttattctttctgtttctcagagtattttccattttcttctcttcaagttcatggcttcctctgtgtgtgcaaatatactcttaaatc

SEQ ID NO: 562075 - DNA, 524 bp, Homo sapiens
aggaggaggagggggaaggargaaggaagaaaggtgaaaagaaagaatggtaaactttttaacaacataatttatccttctagaatatgaatgttggtctatttgatgatgtcccacagattcattagtctctgctcattgtttattttttattctttctgtttctcagagtattttccattttcttctcttcaagttcatggcttcctctgtgtgtgcaaatatactcttaaatccctctggtgatttttaaatttttatcattgtagttttccactccagaatttgttatctctttgctgatattcctactttttaatattttttctgattcctttatttctttgtttatgttttccttttgacatttgagtataatgaagacagttgttttaaagtctttgtctggtaagtttgatgtctgggtttctttagggatattttctgtcactttattttgttcctttgaatgagccacactttcccattctttgtatgccttgtaacgttttttgaaaactgga

SEQ ID NO: 562076 - DNA, 642 bp, Homo sapiens
tttaataattttatgttaaactccctctatacttacaatatgaattagataattcagaataaacattccattggaaaaagctacacaatttgttataaaacatccttaaaagcatcagaaaattaatacagcaatgaagaattacaggaccaaattaagaatggtatgaaagcctgtttgtgacgcttatgtttgggttatctctttatttgagtgactataaatctcaaaagagaactaaagggagaaataaccgtatctactaacatgctaagggtacttaaacatctcttagtaattgagaaaattgaaagaaaagaaaaaagagaaagggagaaagagagacagcgaaagggataatgaaggagagaaagaagaagagaaaggaagaggaagaaaagtaaaaaggaggaggagggggaaggaagaaggaagaaaggtgaaaagaaagaatggtaaactttttaacaacataatttatccttctagaatatgaatgttggtctatttgatgatgtcccacarattcattagtctctgctcattgtttattttttattctttctgtttctcagagtattttccattttcttctcttcaagttcatggcttcctctgtgtgtgcaaatatactcttaaatc

SEQ ID NO: 562077 - DNA, 524 bp, Homo sapiens
aggaggaggagggggaaggaagaaggaagaaaggtgaaaagaaagaatggtaaactttttaacaacataatttatccttctagaatatgaatgttggtctatttgatgatgtcccacagattcattagtctctgctcattgtttattttttattctttctgtttctcagagtattttccattttcttctcttcaagttcatggcttcytctgtgtgtgcaaatatactcttaaatccctctggtgatttttaaatttttatcattgtagttttccactccagaatttgttatctctttgctgatattcctactttttaatattttttctgattcctttatttctttgtttatgttttccttttgacatttgagtataatgaagacagttgttttaaagtctttgtctggtaagtttgatgtctgggtttctttagggatattttctgtcactttattttgttcctttgaatgagccacactttcccattctttgtatgccttgtaacgttttttgaaaactgga

SEQ ID NO: 562078 - DNA, 574 bp, Homo sapiens
gatactgatttctgatgtttacttgcttatttgctgcattttttcttttcttttcttcctttgttttttttttttaattcacagaacaggcagtggtgacatgcatgacaggcatttgggatcagatgttgctgatccagaagcctaggtgtggccattttgtcatggcaactgttaagcaagtaaatagggtagagtagtcatctgacttatctccagcgatgttcagtttgttttgaatttctactctgtgacacttctgctctgaagccaagcatagatagatggtacctttcgttcaactcccaagttttcatttctctcaaatgaagttaagaggttttwaaaatagaaacacatcgatgtgagccattttcagactggatgggtttcctgaaccttgtctttttaatgctttacttctgctcttttagatcaatttctaagcgccaagaagagctattactcctttctcctagcagagaattctctaagatagaaaatgacacatgtagtcattgtataaattcttttattttcctgtaagcatcttgaccctctactatttgcagct

SEQ ID NO: 562079 - DNA, 404 bp, Homo sapiens
  misc_feature 1, 2, 3, 4, 5, 6, 7, 8, 9, 10, 11, 12, 13, 14, 15, 16, 17,18, 19, 20, 21, 22, 23, 24, 25, 26, 27, 28: n = A,T,C or G
nnnnnnnnnnnnnnnnnnnnnnnnnnnntggcttggctggcttggctggctggcttgctaggttttgctgcctgggctcggctgtctggctgggctgtctggctggttggctggcttggctggcttggctgggtggccggcttggctggcttggctgactggcttggctgggttggccagcttcgcgaggggcttgggtctcttggtttcctgggttggctgtctggctggttggctggcttggctggcttggctgggtggcyggcttggctggcttggctgactggcttggctggtttggccagctttgcgtggacttgggtctcttggctggcttggctgggtggctggctggcttggctgggtggctggtttggctggctgactggctgggctggctgggc

SEQ ID NO: 562080 - DNA, 404 bp, Homo sapiens
  misc_feature 1, 2, 3, 4, 5, 6, 7, 8, 9, 10, 11, 12, 13, 14, 15, 16, 17,18, 19, 20, 21, 22, 23, 24, 25, 26, 27, 28: n = A,T,C or G
nnnnnnnnnnnnnnnnnnnnnnnnnnnntggcttggctggcttggctggctggcttgctaggttttgctgcctgggctcggctgtctggctgggctgtctggctggttggctggcttggctggcttggctgggtggccggcttggctggcttggctgactggcttggctgggttggccagcttcgcgaggggcttgggtctcttggtttcctgggttggctgtctggctggttggctggcttggctggcttggctgggtggctggcttggctggcttggctgactggcttggctggtttggccagctttgcgtggacttgggtctcttggctggcttkgctgggtggctggctggcttggctgggtggctggtttggctggctgactggctgggctggctgggc

SEQ ID NO: 562081 - DNA, 404 bp, Homo sapiens
  misc_feature 1, 2, 3, 4, 5, 6, 7, 8, 9, 10, 11, 12, 13, 14, 15, 16, 17,18, 19, 20, 21, 22, 23, 24, 25, 26, 27, 28: n = A,T,C or G
nnnnnnnnnnnnnnnnnnnnnnnnnnnntggcttggctggcttggctggctggcttgctaggttttgctgcctgggctcggctgtctggctgggctgtctggctggttggctggcttggctggcttggctgggtggccggcttggctggcttggctgactggcttggctgggttggccagcttcgcgaggggcttgggtctcttggtttcctgggttggctgtctggctggttggctggcttggctggcttggctgggtggctggcttggctggcttggctgactggcttggctggtttggccagctttgcgtggacttgggtctcttggctggcttggctgggtggctggctggcttggctggstggctggtttggctggctgactggctgggctggctgggc

SEQ ID NO: 562082 - DNA, 614 bp, Homo sapiens
atatacaaatatttttgtacttttgtttatactatatacacagatgtagttagctatttatgttatatataatatatcaacatgatgtatattcttatattcctctggagactcacagtcttcttaatacactgtcttctgaccaaactcttccagacaaatcagctgttgcagtatatatatatatttattttttaatagctagtattttacactgtggctcatgcctgtaatcccagcattttgggaggccgaggcgggtggatcacctgaggtcaggaatttgagaccatcctggctaacacagtgaaaccccatctctactaaaaatacaaaaattgattgggtgtggtggtgcatgcctgtaatcccagctactcgggaggctgaggcaggagaatcgcttgaacccaggaggcagaggttgcagtgagccgagatcgtgttgctgcactccagcctgggcaacagagcgagacttcatctcacacacacaaaacagcttacactgatgtatttatattacgtgtagctgtatataaatatttttgtacttatattctatatattataaaakattatataaaattatacatgtataataaaatgttaca

SEQ ID NO: 562083 - DNA, 480 bp, Homo sapiens
agatgggggagttgggatggacgcgttgaccagtgaggactttcctttgctggttttgaggtgtcttagcccagaagctaagatgggaagtgattctggagcaggtgagctgatcacaagcctgagccaagaatccatggagctcataaatagcagaagccaggaccctgtgcaaatccttctgaaatattctccatttactgggmtcctaggggtggggaagaaaaattccctgacatttcggcctcagggaaagagagagacaccccactggccggaagcctctgctatttttcagaagacagctggggcatcaccctttcccaaatgacggtgattttcagagtggttcactttttggagagacatttctgccctggagatccatacatattgaacccaaatgaatattttttaataaaaaaaattaaactttagaaagttcaatattgaggcagctacgagtatgaattcctcatt

SEQ ID NO: 562084 - DNA, 594 bp, Homo sapiens
ggttcactttttggagagacatttctgccctggagatccatacatattgaacccaaatgaatattttttaataaaaaaaattaaactttagaaagttcaatattgaggcagctacgagtatgaattcctcatttttcctaaatgcatgttgtcaaaatttgtattgcatttagtaactacttatgtttctaatgtatataaggttacacaatgttttcttctttttctgctcctcagggtcagaatttgaaataaaagttttggaaagaaaaaacactcttgtctgtttgtgcaaaaataaaataacccatattttaagaatattttaaaataaatacaaattttgtgtgggggggttgcttataagaattcttcatatcctaaatcaaagatagatcttgttattaaccagaaaacaaaatgtgtgtgtataaatgtacaacactcttacactcacacaaacacaggcacacatgcacacacacacattcaygcactcactgatgtactcacacaaacacaggcattcatgtataaatacacacataagcgtgtatttatagaaatataattatgcacatacaatatataatt

SEQ ID NO: 562085 - DNA, 229 bp, Homo sapiens
attcctatttctccacatcytctccagcacctgttgtttcctttttaatgatcacatgagctcccttcttccagtgaagttgacaggatttcacaaggccagaggcccactggcactctcaactaccagagataatagaaggtcccaaggggcaattagcacattttgcccccagtcacctttggtggtagctatgtaatcccagtatttttaagaacaaaagagttag

SEQ ID NO: 562086 - DNA, 631 bp, Homo sapiens
acttggaaaaaatgaattgaaaatataaactttatgtctcaacataagctccatcaagttcaagacacttgtataagtcatgctacagccatttagcccatccttaaggaactgaaggtcctgagaatttaaccatatcaatgcagtcttttacacattaactgaaaagggtatcctttacagattaagattacgaaacaaaaagaagttaggaggagccaaatcaggactgtaatgatttcccatcaaaattctcccaaaattgcccttgatgacaggaataaccagaagcattgtcatggtggaggaggactctgctgaaattttcccaagaattttctgctaaagctttgggtaactttctcaaaaccctctcataataagcagatgttaccattctttggtcctcctgaaagtcaacaaggraagtgccttgagccccaaaatactgttgctatgagttgtgctcttgactggtctgcttttgctttgactgacccacttccacttcttggtagccattgctttgattgtgctttgtcttcaggatagtactacgaaatccatgtttcataacttgttgcaacttttcgaacaaatgcttcaggatcttgatcccactgtttaaagg

SEQ ID NO: 562087 - DNA, 578 bp, Homo sapiens
tgtcttggctgtgccctggctctggccctgccccggccccaaccatagacctgccctggttggtcgtgccctaccttaaccctgtgctaccctgggcctgctccaccctgccctggccctgccctccctttggccctgccctgaccctgccttggccctcacactggccctagcacagacctggtcctatgtgtggcctwggcctggcattgacccctgctcctgaccccggtcctgccatggccctgccctgccaatgaccctggcagccctgaccctggccctgtcttgccctggccctgaactggccctgccctgaccctggccctgaagtagatttgcaggtgtcttgtccctgatgtaacctggtcttaccatggccctgtccctcccctggctctgtcctggccttctgctgaccctgacccagaccttggtcctgccccagccttgtcctagatctgagcatggccatgcatcttccctggaccagcactggcactggcatgggccctggccctgacccttcgctacttaaggccataccctggcccagccctggtcctgaccctgtcctg

SEQ ID NO: 562088 - DNA, 490 bp, Homo sapiens
ttttggtccttgtctgtttctgccttgtattatgactgttgaatattagccttatcatccagaagagattttagacttcttaggctcagggactggatctagttcatcttgcttttggggaaatttgacaccattgcagggtggcccaaattcctgttctgaaattggttgttttagggaagttaatggttttgtgactctgtgaatgacagtgaatctggtgctatttaaaacaaggcacwaagtgttattttaggatattgacttacacaggctaaaaagtattatacacatgagcctttacctgtgttttcctacagtcaaagcccccttttttgttcctcacttctttttctcctccatccttttttctcccttcttccttccctctttctcctttcctttcttcctcttccctccctccctattccctccccttcccttttctctcccttttcttcctttttttcttttttttgagatggagtct

SEQ ID NO: 562089 - DNA, 499 bp, Homo sapiens
gagcatggccatgcatcttccctggaccagcactggcactggcatgggccctggccctgacccttcgctacttaaggccataccctggcccagccctggtcctgaccctgtcctggccctaatttggcctggctctaccctggcatgctattctggccctagccctgaccctgtccctgtccctgtyctggccccagccccattgctggtcctgccacggcccttgtcctgacattgccctttcctggttctggccctggccctgtcccagccctgctctggccctggtctgaaccctggccctgcaatagacctgccttggtcctgcccagaccctggctctggccctacctctgccctggccatacccttgccctggcctggaccccagtcctggtccttgtcctgccccagccgtggccctggccctgccctgcctgtgccctgttctatcctgggctggcctgccatggcctggtcttgccattgccctgcccta

SEQ ID NO: 562090 - DNA, 491 bp, Homo sapiens
cactggcactggcatgggccctggccctgacccttcgctacttaaggccataccctggcccagccctggtcctgaccctgtcctggccctaatttggcctggctctaccctggcatgctattctggccctagccctgaccctgtccctgtccctgtcctggccccagccccattgctggtcctgccacggcccttgtcctgacattgccctttcctggttctggccctggccctgtcccagccctgctctggccctggtctgaaccctggccctgcaatagacctgccttggtcctgcccagaccctggctctggccctacctctgccctggccatacccttgccctggcctggaccccagtcctggtccttgtcctgccccagccgtggccctggccctgccctgcctgtgccctgttctatcctgggctgscctgccatggcctggtcttgccattgccctgccctagcctgccctgcttgtgccctag

SEQ ID NO: 562091 - DNA, 619 bp, Homo sapiens
agcatataaagttctatgccaaagcatgtttggcctgacaagttgggctgtcacttccttttgacaagactttcatttttatcagctttaaatgcatgtgtcattactattctggttaggtaacataattatcccactgcagaatatataaatttcaaaagagtcttgtggatatttgatgccttttcctctgaaaacaattgaattgttttcagaccacttttatttcagtaagataaatgtaatccttcctttaattgtaatgtagaatttaagagcatattgaaatgaaaagaaaagctcaacactacctatattttgaaagttataagagactagataagttggattttatgtttcttgtggtaccgaatagaaacaaaggtcattcaaactaagtttgaatgagaattaagtttaatggctcacttgctaaacctgrgttgcacaatcctcacaattccttagggatgtggcaaggtcatccttaaatgtaaagttcttgctcacttaatggaaagcactgtagatacataaataacattgttacctgtcttagtgggtcagtataaaagacgggggtggtggtatatgtgagaatagtgaaatttatagctag

SEQ ID NO: 562092 - DNA, 598 bp, Homo sapiens
agttttgaggcccttgtgacttttaagaggtattatgagtcactttaacaagttagtgtttgtgacatagtttcaatttcttatgtgaaagatagtatttcagttgtaaatgttctyttaatattctggagagctactctttcctagcccctctgttttactgactttaaaagttgtttacagtttgtttcatgttcaaatgtagggttttagtaattccttggggtggggggcaggaatgggcagaaggccattgtctctaattttccttttcccaactttcactttcttttttctatggattacatgtcaaggtgggtgagaaaaatggtggggattgagaaaagggagcaatttattttttgtaggggaggtccaaaataaagtcacttaaggaatctgtcataaaatttaaatatatgatgaagcttgtgcaaggggattataagaactgattttactttaacccttcctgctttataaaaagatcttgttgatggcaaaaagacaaacgctttagcaaactgtactgtacaccttgcatttgtttgtattaatattagttgttttattttttaatatggagtctcactctgtt

SEQ ID NO: 562093 - DNA, 598 bp, Homo sapiens
agttttgaggcccttgtgacttttaagaggtattatgagtcactttaacaagttagtgtttgtgacatagtttcaatttcttatgtgaaagatagtatttcagttgtaaatgttcttttaatattctggagagctactctttcctagcccmtctgttttactgactttaaaagttgtttacagtttgtttcatgttcaaatgtagggttttagtaattccttggggtggggggcaggaatgggcagaaggccattgtctctaattttccttttcccaactttcactttcttttttctatggattacatgtcaaggtgggtgagaaaaatggtggggattgagaaaagggagcaatttattttttgtaggggaggtccaaaataaagtcacttaaggaatctgtcataaaatttaaatatatgatgaagcttgtgcaaggggattataagaactgattttactttaacccttcctgctttataaaaagatcttgttgatggcaaaaagacaaacgctttagcaaactgtactgtacaccttgcatttgtttgtattaatattagttgttttattttttaatatggagtctcactctgtt

SEQ ID NO: 562094 - DNA, 598 bp, Homo sapiens
agttttgaggcccttgtgacttttaagaggtattatgagtcactttaacaagttagtgtttgtgacatagtttcaatttcttatgtgaaagatagtatttcagttgtaaatgttcttttaatattctggagagctactctttcctagcccctctgttttactgactttaaaagttgtttacagtttgtttcatgttcaaatgtagggttttagtaattccttggggtggggggcaggaatgggcagaaggccattgtctctaattttccttttcccaactttcactttcttttttctatggattacatgtcaaggtgggtgagaaaaatggtggggattgagaaaagggagcaatttattttttgtaggggaggtccaaaataaagtcacttaaggaatctgtcataaaatttaaatatatgatgaagcttgtgcaaggggawtataagaactgattttactttaacccttcctgctttataaaaagatcttgttgatggcaaaaagacaaacgctttagcaaactgtactgtacaccttgcatttgtttgtattaatattagttgttttattttttaatatggagtctcactctgtt

SEQ ID NO: 562095 - DNA, 561 bp, Homo sapiens
ccttttttttttttttacagattsaatgcattaagtcaatttattacttatgatgaatttatttatgtatttattttcgctatcacaagtagaaaaagcctataagttgctatgccaaaaacctgcctctagatggcaaacaaaccccgcaatacacaaaagagagccaaattcttagaaaccctgggaaaggaagagggctactgtcccattaacaacttggagcccttaagccaagaatgaggtggaacatctgggaggagacacaagggtgcggagtagtggggaacctgctctgtgctctgagactgaaagcccagccttgcctctcaccgctgccttgactgtgtccccatctgctgtgaagtgaatggtgtcttctaaattcgtgctgagccctaattgctgaaaactgtaagacatgcaatggggggattatgtgcatcttcccgacaccaacatgatgctcaggaaggagacttcttgttttctcttaggattcttttactaaccaagattttgcctctactgcatatttccctttgctgattgtccctccct

SEQ ID NO: 562096 - DNA, 561 bp, Homo sapiens
ccttttttttttttttacagattcaatgcattaagtcaatttattacttatgatgaatttatttatgtatttattttcgctatcacaagtagaaaaagcctataagttgctatgccaaaaacctgcctctagatggcaaacaaaccccgcaatacacaaaagagagccaaattcttagaaaccctgggaaaggaagagggctactgtcccattaacaacttggagcccttaagccaagaatgaggtggaacatctgggaggagacacaagggtgcggagtagtggggaacctgctctgtgctctgagactgaaagcccagccttgcctctcaccgctgccttgactgtgtccccatctgctgtgaagtgaatggtgtcttctaaattcgtgctgagccctaattgctgaaaastgtaagacatgcaatggggggattatgtgcatcttcccgacaccaacatgatgctcaggaaggagacttcttgttttctcttaggattcttttactaaccaagattttgcctctactgcatatttccctttgctgattgtccctccct

SEQ ID NO: 562097 - DNA, 465 bp, Homo sapiens
tccctcccttttgacagaagatggcccagggcattcactactaagtctcaacctcttacccaaagccctcagtctagtgttgctctttccttcgtgctatttttgtttctttcttttcttgtaatcatcttggcaataaaataatcagttttttctttctacctattaaagatgttaccttagttaattacaggggtttccttcagaatgataaatggtctttcaaaatgatgtaaagagatctaaatccgtgtgctccagaacttgaatgaagctctgtctagcacgggtgccagtgactctcccagagtgctccatgcagctggacccacagagtccctctgtgctgtcatatcacccactgccttctgtgaatgagatattctgattagaatcctggtggatgctatttgagccagtgcccccacaactcctacgaaagcygaggaccacaggcccctgaag

SEQ ID NO: 562098 - DNA, 583 bp, Homo sapiens
aaatcaaagtattttccccaagatattgttatttaatgtattgaaaaatgcctctgcaaagctggttcttgtgggaaaaatctacattctgtagagactcctttttaagtctctttcctgacccagagagatttaactaagagtttggcaccttttaagtctrctaagaaacaattacaatctattctctctgaagcctgctacctggaggctccatctgcatgatgcaaccttggctccaaaaccctttttctaaacccagaaactcccttgtgttgattacaggtcattagataaactctttcaaccacctatgaaatctttgaatccacctataacctggaagtccccaacatcccccctccttcgggctgtcctgccttttcatgtcaaagcaatgtacagcttacacgtattgattgatatcttatgtctccctaaaacgtgtaaaaccaacctgtagcccgacgacctttgacacacgttctcaagacctcctgaggctgtttcactgatatttctttaactttgaccaagtaaatttctaaactgattgagacttttctcagatacttatttgttt

SEQ ID NO: 562099 - DNA, 496 bp, Homo sapiens
gaaaactctttatagcaataagataccaatgtgacagataccacgtcctaagagaaatcaaagtattttccccaagatattgttatttaatgtattgaaaaatgcctctgcaaagctggttcttgtgggaaaaatctacattctgtagagactcctttttaagtctctttcctgacccagagagatttaactaagagtttggcaccttttaagtctactaagaaacaattacaatctattctctctgaagcctgctacctggaggctccatctgcatgatgcaaccttggctccaaaaccctttttctaaacccagraactcccttgtgttgattacaggtcattagataaactctttcaaccacctatgaaatctttgaatccacctataacctggaagtccccaacatcccccctccttcgggctgtcctgccttttcatgtcaaagcaatgtacagcttacacgtattgattgatatcttatgtctccctaaa

SEQ ID NO: 562100 - DNA, 496 bp, Homo sapiens
gaaaactctttatagcaataagataccaatgtgacagataccacgtcctaagagaaatcaaagtattttccccaagatattgttatttaatgtattgaaaaatgcctctgcaaagctggttcttgtgggaaaaatctacattctgtagagactcctttttaagtctctttcctgacccagagagatttaactaagagtttggcaccttttaagtctactaagaaacaattacaatctattctctctgaagcctgctacctggaggctccatctgcatgatgcaaccttggctccaaaaccctttttctaaacccagaaactcccttgtgttgattacaggtcattagataaactctttcaaccacctatgaaatctttgaatccacctataacctggaagtccccaayatcccccctccttcgggctgtcctgccttttcatgtcaaagcaatgtacagcttacacgtattgattgatatcttatgtctccctaaa

SEQ ID NO: 562101 - DNA, 583 bp, Homo sapiens
aaatcaaagtattttccccaagatattgttatttaatgtattgaaaaatgcctctgcaaagctggttcttgtgggaaaaatctacattctgtagagactcctttttaagtctctttcctgacccagagagatttaactaagagtttggcaccttttaagtctactaagaaacaattacaatctattctctctgaagcctgctacctggaggctccatctgcatgatgcaaccttggctccaaaaccctttttctaaacccagaaactcccttgtgttgattacaggtcattagataaactctttcaaccacctatgaaatctttgaatccacctataacctggaagtccccaacatcccccctccttcgggctgtcctgccttttcatrtcaaagcaatgtacagcttacacgtattgattgatatcttatgtctccctaaaacgtgtaaaaccaacctgtagcccgacgacctttgacacacgttctcaagacctcctgaggctgtttcactgatatttctttaactttgaccaagtaaatttctaaactgattgagacttttctcagatacttatttgttt

SEQ ID NO: 562102 - DNA, 521 bp, Homo sapiens
agaaaaatgttttctgtctcttgttgaaattgacagcaaacacaaaaacacagaactacttgggagaacagaggacagtgatacactagggaagtaaaacacaccccttccccttgcattggtttcctgttgctgctgtaacaaattaccacaactttactgctccacatmacacaagtgtattatcttacatttctggaggtcagaagtctcaatgaagtaaaatcaaggagtaatagggctctattcattctaggcttcaagagagagaatccaatgtcgagcattccatctttctgatgttcccacattcctagcagcatggccccttcctccatcactccagtttccctgtccattgtcccaggtcctctctggctgttaccttcctccctccctattgtaaggacccttgtgattatgatggtctcacccagataattcaggatattctcctgacctcaaaattctcaaccatgtctgccaagttatttttgacttgttcataagtaatgatcata

SEQ ID NO: 562103 - DNA, 521 bp, Homo sapiens
agaaaaatgttttctgtctcttgttgaaattgacagcaaacacaaaaacacagaactacttgggagaacagaggacagtgatacactagggaagtaaaacacaccccttccccttgcattggtttcctgttgctgctgtaacaaattaccacaactttactgctccacatcacacaagtgtattatcttacatttctggaggtcagaagtctcaatgaagtaaaatcaaggagtaatagggctctattcattctaggcttcaagagagagaatccaatgtcgagcattccatctttctgatgttcccacattcctagcagcatggccccttcctccatcactccagtttccctgtccattgtcccaggtcctctctggctgttaccttcctccctccctattgtaaggacccttgtgattatgatggtctcacccagataattcaggataytctcctgacctcaaaattctcaaccatgtctgccaagttatttttgacttgttcataagtaatgatcata

SEQ ID NO: 562104 - DNA, 519 bp, Homo sapiens
tattactgtcaacagagtgacagtacccctcccacagcgttacaagtcataacataatccccaaggaagcagatgtgtgaggctgggctgccccaatgctccttcyggtgcctctatctgctgagggaagttctcaaactcagtcaggtttggaaagtcattgggagattttcctagaggaggccagggaggttcctctgaaccctaagcctctttcaccctcatccccagcagaaaagatgtgacaatgcctgtcctgactgaataaagaagagagataagtccaactgaggagtctgtgttatgggataatcggaatttgtacagcaaaagagaagctattctcagtatttcaaggagaaattattcaagttgaataaattagagcctaaaccacagtctttccgaagcctatggaatgttattcatgaagcaggtactagacacaggggattctcaggtgctacttcagaagccagggtgcacctgcccctggtggtatgtgctgaacaccgtgtg

SEQ ID NO: 562105 - DNA, 462 bp, Homo sapiens
tgaaagtgcaatgtgcaaaggtcaggctgaggaaggttcttagccagtagaccaagggcaggaaggacactgccctcttcagtctcccactttgtgattcttgtcccctgacctcagaattccttgtcatgtattgtctccaagggaagggtttgaattacagaatttaaggctagagtgggcctcgtgcagttaacattaaccctctctctccttygctggccgaggtgaagtccaggaacatgtagttctgatgtccactctctcgggggatcaccagttcacccatctcacccggcaagctgggccctagtttggtgacaggcatcttccacccacctgggaggcagggttcaatactctgcctctgaccttgtttccttcttctgccatctgcttaggcagccagaaggggttgtccagccagcacctgggctttggccctcctcaagaaggtggagg

SEQ ID NO: 562106 - DNA, 462 bp, Homo sapiens
tgaaagtgcaatgtgcaaaggtcaggctgaggaaggttcttagccagtagaccaagggcaggaaggacactgccctcttcagtctcccactttgtgattcttgtcccctgacctcagaattccttgtcatgtattgtctccaagggaagggtttgaattacagaatttaaggctagagtgggcctcgtgcagttaacattaaccctctctctcctttgctggccgaggtgaagtccaggaacatgtagttctgaygtccactctctcgggggatcaccagttcacccatctcacccggcaagctgggccctagtttggtgacaggcatcttccacccacctgggaggcagggttcaatactctgcctctgaccttgtttccttcttctgccatctgcttaggcagccagaaggggttgtccagccagcacctgggctttggccctcctcaagaaggtggagg

SEQ ID NO: 562107 - DNA, 462 bp, Homo sapiens
tgaaagtgcaatgtgcaaaggtcaggctgaggaaggttcttagccagtagaccaagggcaggaaggacactgccctcttcagtctcccactttgtgattcttgtcccctgacctcagaattccttgtcatgtattgtctccaagggaagggtttgaattacagaatttaaggctagagtgggcctcgtgcagttaacattaaccctctctctcctttgctggccgaggtgaagtccaggaacatgtagttctgatgtccactctctcgggggatcaccagttcacccatctcacccggcaagctgggccctagtttggygacaggcatcttccacccacctgggaggcagggttcaatactctgcctctgaccttgtttccttcttctgccatctgcttaggcagccagaaggggttgtccagccagcacctgggctttggccctcctcaagaaggtggagg

SEQ ID NO: 562108 - DNA, 527 bp, Homo sapiens
ccacccacctgggaggcagggttcaatactctgcctctgaccttgtttccttcttctgccatctgcttaggyagccagaaggggttgtccagccagcacctgggctttggccctcctcaagaaggtggaggaagtttcaggcacctggctcctcaggtgtctgccatccaggtgctcttcaggcctgcccagaagagctctcttgatccagctagaactggccagaactgactcactcaggaatgtgtagactttgacatcaggggctgctttaatttgcacaatttccaaatacctcttttttcttctttttctgatgagtcatctccctagacttgcattttaaagagatagatagttatcagattccagagaagacatggtagaacatttatatgtcaaagacacagagctgagactttagttttagatactataatttgcctaaaccaaaaaggaaggtgtaggtaaagttctagtcaagacaggatggccaggaaaaacaccttaaaccaagggacggcttg

SEQ ID NO: 562109 - DNA, 462 bp, Homo sapiens
tgaaagtgcaatgtgcaaaggtcaggctgaggaaggttcttagccagtagaccaagggcaggaaggacactgccctcttcagtctcccactttgtgattcttgtcccctgacctcagaattccttgtcatgtattgtctccaagggaagggtttgaattacagaatttaaggctagagtgggcctcgtgcagttaacattaaccctctctctcctttgctggccgaggtgaagtccaggaacatgtagttctgatgtccactctctcgggggatcaccagttcacccatctcacccggcaagctgggccctagtttggtgacaggcatcttccacccacctgggaggcagggttcaatactctgcctctgaccttgtttccttcttctgccatctgcttaggcagccagaagkggttgtccagccagcacctgggctttggccctcctcaagaaggtggagg

SEQ ID NO: 562110 - DNA, 527 bp, Homo sapiens
ccacccacctgggaggcagggttcaatactctgcctctgaccttgtttccttcttctgccatctgcttaggcagccagaaggggttgtccagccagcacctgggctttggcmctcctcaagaaggtggaggaagtttcaggcacctggctcctcaggtgtctgccatccaggtgctcttcaggcctgcccagaagagctctcttgatccagctagaactggccagaactgactcactcaggaatgtgtagactttgacatcaggggctgctttaatttgcacaatttccaaatacctcttttttcttctttttctgatgagtcatctccctagacttgcattttaaagagatagatagttatcagattccagagaagacatggtagaacatttatatgtcaaagacacagagctgagactttagttttagatactataatttgcctaaaccaaaaaggaaggtgtaggtaaagttctagtcaagacaggatggccaggaaaaacaccttaaaccaagggacggcttg

SEQ ID NO: 562111 - DNA, 527 bp, Homo sapiens
ccacccacctgggaggcagggttcaatactctgcctctgaccttgtttccttcttctgccatctgcttaggcagccagaaggggttgtccagccagcacctgggctttggccctcctcaagaaggtggaggaagtttcaggcacctgrctcctcaggtgtctgccatccaggtgctcttcaggcctgcccagaagagctctcttgatccagctagaactggccagaactgactcactcaggaatgtgtagactttgacatcaggggctgctttaatttgcacaatttccaaatacctcttttttcttctttttctgatgagtcatctccctagacttgcattttaaagagatagatagttatcagattccagagaagacatggtagaacatttatatgtcaaagacacagagctgagactttagttttagatactataatttgcctaaaccaaaaaggaaggtgtaggtaaagttctagtcaagacaggatggccaggaaaaacaccttaaaccaagggacggcttg

SEQ ID NO: 562112 - DNA, 455 bp, Homo sapiens
cgcctcggcctcccagagtgctgggattacaggcatgagccactgcacatggccagattttactctttttatgtgtaaaggatagataagcatgcggtacataaacagatacatctatgatattaatatttaatgagggggatgggagctattgggggaaatgtctaaaaaggatcctgagcagtggcacacacctgcagtctcaggtactcaggaggctgaagcaggaggatcgcttgagcctaggagtttgaggccagcctgagcaacatagtgagacactatctctctctttctctttttttttttttttttttttttttttttgagacagagtctcgctcagtagcccaggctggagtgcggkggcttgatttcggctcactgcaacctccacctcccaggttcaagtgattctcatgcctcagcttcccgagtagctgggattacaggtg

SEQ ID NO: 562113 - DNA, 455 bp, Homo sapiens
ttttaaaatgattatataattttatattcctatcaccaatgcataatagttccagtagcatctcatcctaatcaacacttgctttgataagacatttttaatataaccatgctaatggatataaagttatatcaaattatagttttaacttacatttctttaaagattaatgatgctgagcatctttccacatatgttttttagttaaatgtctgartcttttttattttaattttaattttaagttctggggtacatgtgccagatgtgcaggtttgttacataggtaaacgtgtgctatggtgatttgctgcacctatcaatccatgacctatgtattaagcccagcatacattagctatttttttctaatgctctccttcccaccgacccacactccaacaggccccagcatgtgttgtttccctccctgtgtccatgggctctcattgttc

SEQ ID NO: 562114 - DNA, 549 bp, Homo sapiens
gagaataaagacattttacttccttctttcctatctttatattaaataatttacttttatttcctgatartactgcagaagctaccagtaagatgtggataagatgagatatttttgtcctattcccaatcttagagagttgtattagtccattctggtactaatataaagagctgcctgagactctgtaatttataaaggaaagaggctcagttgactcacagttcggtagggttggggagggctcaggaaacttacaatcattacagaaggtgaagcaaacacgtccttctttacatggtggaaggaaggagaagtgctcagcaaagggggaaaagctccttataaaacgatcagttcttgtgagaactcactcactatcacaagaacagcatgggggtcaccgcccccatgattcaattatttcccaccaggtccctcccatgacacaagattatggggactacaattcaagatgggatttgagtggagacacaaagcccaaccatatcagagagaaagcactctcattatctagaatgatacgag

SEQ ID NO: 562115 - DNA, 552 bp, Homo sapiens
ctcgctctgtcacccaggctggagtgcaggggtgccatctcggctcactgcaagctccgcctcctgggctcacaccattctcctgcctcagcctctcgagtagctgcgactacaagcacccacccaccatgcctggctaatttttttttttttttttttttttttttttttttagtaggacggggtttcaccatgttagccaggatggtctcgatctcctgacctcgtgatctacccacctctgcctcccaaagtgctgagattacaggcgtgagccaccaagcccggccaaatctgtgtaatgttttaaraactcctgaagcattttgccaccatacactgccacaattttcaccataagtgtatgagtcagtctacatcctcattaaaacttgttattatgtgtcttttttaattatagccatcctagtgcgtgtaaagttatgtttttctgattatttgaacttatctgatggctaatgatgagcattttacatatgctcacaagctatctttatatcttttttggagaaatgtttttgctcatttaaa

SEQ ID NO: 562116 - DNA, 530 bp, Homo sapiens
ctccccactttccagttagttgtcaatgctctgtccagcatggcctttcacgcctgggcatgatcctatcacaaccccatctgaaactcttcggcggtttcccattacctggggggagaagtccaaatgctggggtgtggcattcatgcccttcatgaccttgaatgaagtggcctagaggaagcgtttgagtgcatgcctgtgtgaatctagtcttggctgtgctagttgtgtgaccttgagcagcttactccttcctcatttgtaaaatggggtaataatgagacctattccaactaccagagggagctggggcccggggggccaggagggaacacatgttctgtgtggctggtgkggggcagtggggaggagtgagaggtgttggcaggacaaggagttcgggttaggtgcacagctgcccttagagccctcagggccaaatggagaagccagagggttccaggaatgccattcctccaggctcaccagccccagaggcaaggaatgtagggttcttcttgcgccca

SEQ ID NO: 562117 - DNA, 571 bp, Homo sapiens
atttgagattatactaataacttgttcttttcaaacttgtgcccgctaattttaacattcgttggtggatcttgtctgtaccacttattactgtggtgtttgcctgatggtagtttgtcttcgttcttctacacttattaactggaattattctgtaaggaaasgctgccctttgccccatcatttattagattacttagcactttgttccagctttggccattgggagtgccttgagattggctcccatgttcttttgacaactgttcttttttttgggcactttctcactttctggcatgagaagatgctccaaactcatcttgtagcttccctgcttcaacctgggaatgagccatttttctaaggatcatggtgcctttttactggagaatggtgcttagaagctgagatcctagcagagctgtccatgctcctgggttgtcccttgttgaggctctctcatcagcagacaggctaggaaatatacgcatgtctgctaacccacgcgtggacatgcatgtgtatttctgtgtctatctgtttgtatgcagattaaagtcctgagttt

SEQ ID NO: 562118 - DNA, 545 bp, Homo sapiens
tacatgattattattttttacagaatttagacattgagaaaaattctatatatttacttgcatagttaaaatttctgatctcctccattcctttgcataggtccatattggcttctgataggctttcctaaacattacttatagtttgggtgtgtgggtgatatttcctttcaccttttgtatgtttgaaaaartttttattatgccttaaaaagccagcattattgagatataattcacatgccacacaattcacccatttaaagtatacatcaatattttttagtacattcctagaattttgcaaccatcactatactcaattatggaacgttgttgtcaccacaaaaataaaccccctacccattagcagtcactccctatttcctccaacccccttagccttaaggaatcactaatatgttttctgtctctagatttgcttgttctgcacatttagtgtaaatggcatcatataatatgtgagattttgtgactggcttctctcacagcagaatgtttttaaggttcattcatatagtggt

SEQ ID NO: 562119 - DNA, 545 bp, Homo sapiens
tacatgattattattttttacagaatttagacattgagaaaaattctatatatttacttgcatagttaaaatttctgatctcctccattcctttgcataggtccatattggcttctgataggctttcctaaacattacttatagtttgggtgtgtgggtgatatttcctttcaccttttgtatgtttgaaaaagtttttattatgccttaaaaagccagcattattgagatataattcacatgccacacaattcacccatttaaagtatacatcaatattttttagtacattcctagaattttgcaaccatcactatactcaattatggaacgttgttgtcaccayaaaaataaaccccctacccattagcagtcactccctatttcctccaacccccttagccttaaggaatcactaatatgttttctgtctctagatttgcttgttctgcacatttagtgtaaatggcatcatataatatgtgagattttgtgactggcttctctcacagcagaatgtttttaaggttcattcatatagtggt

SEQ ID NO: 562120 - DNA, 562 bp, Homo sapiens
aaatctgtgtgtgaacatgtgcggtataaatttaggagtggaactgtgtagtcatatggtaactctacgtttaacattttgagaaactgctagactagtttccaacgtggctgcttcattttacattccaatcagcagtagtatataaaggttccaatttctgcatgtcctcactgacactttttttttttttttctgagagrgggtctcattctgttgcccagtctggagtgcagtggtgcagtcatagctcactgcaaccccggactcctcaagccatcctcccacttcaacctcccaaatgtctgtggttacaagtgtgtgctatcacgtctgactgcctttttgatgatagccattctggtgggtgtgagtggtatgtgattgtggtttgatttgcatttccctgatggttaatgatgttgattgtctttcatgtgcttattgatcatttatatatatttttgtagaaatgactattcatatcctttgcccatttttaattgctttatttttccctttattatggagttgtaagaattctttatgtaacctgggtaca

SEQ ID NO: 562121 - DNA, 562 bp, Homo sapiens
aaatctgtgtgtgaacatgtgcggtataaatttaggagtggaactgtgtagtcatatggtaactctacgtttaacattttgagaaactgctagactagtttccaacgtggctgcttcattttacattccaatcagcagtagtatataaaggttccaatttctgcatgtcctcactgacactttttttttttttttctgagagggggtctcattctgttgcccagtctggagtgcagtggtgcagtcatagctcactgcaaccccggactcctcaagccatcctcccacttcaacctcccaaatgtctgkggttacaagtgtgtgctatcacgtctgactgcctttttgatgatagccattctggtgggtgtgagtggtatgtgattgtggtttgatttgcatttccctgatggttaatgatgttgattgtctttcatgtgcttattgatcatttatatatatttttgtagaaatgactattcatatcctttgcccatttttaattgctttatttttccctttattatggagttgtaagaattctttatgtaacctgggtaca

SEQ ID NO: 562122 - DNA, 547 bp, Homo sapiens
cttcatggaccaaacaaccataactagtgcaaatcataaaaaaaccccagacaaccgtttaaagtctctggaaattgtcttaaggctacacagcaaatgaaacatttattaaagaaaatgtgtcaaatctgggtaagaacaggagcatctgtagcactggagctgtgactggttcacctgccccacccccccgcccccaacccagagtccaagaagacagggttctctctctctagctcccaatcaaggcatcttgacatgatgcccctkggaggagcaggttgccagcactgctcacccccacgcagctctgcgctgcaggggccgagctccaggcaggagcgaggggttggcttccaacatggtccttgagaaggcgaggcactacttgtccacagcctcatccctgcctgctgagagccacgcactgggcagctcctggccctctcgatgcccactggcacagcagaccatgagctccagggcacactcaaatcccccacctccgtgagactactggataaggttccaggaagcgagagagtcc

SEQ ID NO: 562123 - DNA, 547 bp, Homo sapiens
cttcatggaccaaacaaccataactagtgcaaatcataaaaaaaccccagacaaccgtttaaagtctctggaaattgtcttaaggctacacagcaaatgaaacatttattaaagaaaatgtgtcaaatctgggtaagaacaggagcatctgtagcactggagctgtgactggttcacctgccccacccccccgcccccaacccagagtccaagaagacagggttctctctctctagctcccaatcaaggcatcttgacatgatgccccttggaggagcaggttgccagcactgctcacccccacgcagctctgcgctgcaggggccgagctccaggcaggagcgaggggttggcttccaacatggtccttgagaaggcgaggcactacttgtccacagcctcatccctgcctgctgagagccacgcactgggcagctcctggccctctcgatgcccactggcacagcagaccatgagctccagggcacactcaaatsccccacctccgtgagactactggataaggttccaggaagcgagagagtcc

SEQ ID NO: 562124 - DNA, 516 bp, Homo sapiens
tccgccttttggctctttgctttcttctgtctcattactgcattatttctttttcctcctttgctacctccttttgtcttaaatggatgttttaaatataatattgtaacttctttactcatttaaaaaagtgtacttttgagttattttctttttggttctctaggacttatatatatataccttaatgtggaatctatttcagatttatactagcttaattccaataagatatagaaacttactcctatattgctcccttctcttccctcttttttttgggctattactgttatacatatgacatctacgtatgttacaaacccaacaatacactgatgtaatgattgctttatatgatctcatgtcttttaaagaagccaagagaccaaagaacacaaatggatttattgggttttaaaaatagtaacrttattatttaccatttctgattcttttcatttcctcctatggctctgagttactatctgctctctttttcttatgccacttcct

SEQ ID NO: 562125 - DNA, 575 bp, Homo sapiens
ccaaaaattgaggaattttggtctctaggaaagaccaaacaaagaatgcatagttgaaaggaacaagaaaaaaggttgggggctagtgggacaaattctggaaagagtttttatgtccttgtatttaggtctagctatgggagaggaagttgggtgatatcckctcatcagcatggggtcccttggaaggtggttttgtgccctgtccccacccccatgctacccctgatgcctagaatgggaacttctcctcacacctataaccgcatcaataccacttcttacaaaataggcttgcttgacatagatataatgtaagaaccatagtttattccaaactttgaaacaaggattttgagagtcctccacgccagagcattttctgtaagccccctttgggggaagggaggtaactttgattaatgagggcccagaagttataaagcctcgtgagatcaagggatccctgaggaaatgatagctgtgttggatttttgctttttagagaagcaaaaatagagaagagaagacaactccatgctgtctatactggtgattaataaacatggcatatt

SEQ ID NO: 562126 - DNA, 575 bp, Homo sapiens
ccaaaaattgaggaattttggtctctaggaaagaccaaacaaagaatgcatagttgaaaggaacaagaaaaaaggttgggggctagtgggacaaattctggaaagagtttttatgtccttgtatttaggtctagctatgggagaggaagttgggtgatatccgctcatcagcatggggtcccttggaaggtggttttgtgccctgtccccacccccatgctacccctgatgcctagaatgggaacttctcctcacacctataaccgcatcaataccacttcttacaaaataggcttgcttgacatagatataatgtaagaaccatagtttattccaaactttgaaacaaggattttgagagtcctccacgccagagcattttctgtaagccccctttgggggaagggaggtaactttgattaatgagggcccagaagttataaagcctygtgagatcaagggatccctgaggaaatgatagctgtgttggatttttgctttttagagaagcaaaaatagagaagagaagacaactccatgctgtctatactggtgattaataaacatggcatatt

SEQ ID NO: 562127 - DNA, 398 bp, Homo sapiens
tccgcaaacagcccctgccatggaaaatcaccgagaagggccctgcagggaaacagactccagggttggcaattgatgtgtagtttatttttcastggggagcattgatcattcctgcaggagtgaatgggtccaggcccacctcccatgagctcatgagattcctttacaaacctagtgaccagctcccttgggccaggaagccccgtccctctctctggggtctgtcaccctagccagagaccaaggctgccttctactgtggaatctctagtggttacaaacaaaattctctttggaatacctggtgagtagttgtcaaaattttatttaattcatcaacaaacaacaggctgggtgtggtggctcatgtctgaaaaaccaccaacaacagacta

SEQ ID NO: 562128 - DNA, 398 bp, Homo sapiens
tccgcaaacagcccctgccatggaaaatcaccgagaagggccctgcagggaaacagactccagggttggcaattgatgtgtagtttatttttcagtggggagcattgatcattcctgcaggagtgaatgggtccaggcccacctcccatgagctcatgagattcctttacaaacctagtgaccagctcccttgggccaggaagccccgtccctctctctggggtctgtcaccctagccagagaccaaggctgccttctactgtggaatctctagtggttasaaacaaaattctctttggaatacctggtgagtagttgtcaaaattttatttaattcatcaacaaacaacaggctgggtgtggtggctcatgtctgaaaaaccaccaacaacagacta

SEQ ID NO: 562129 - DNA, 652 bp, Homo sapiens
aggtgcattccccagctctgtcagaactcgttagacacatcccgtagccggtgtcagccatggaggaggacagggcagattctggggagagcaagcagtatctcatgagattcccatttcatttgaggcctrtgtgttatattcaagcaaggagtgtgtggggggcttctgtcgtacaacaaaaggggataggtcacttctgtaggcacagtgttaagaagaatttgaggactaaggttctcaaaggcatttacccagctatccccatcccaaatctcagaatcctgttccttccctgttagggcccagaccctgccacgggaactttatcaatcaaggccaataaagagaagttatggggagactgatttaggatcaatattaaaaaaaaaaacacttatatcttgtcagaagttgtttttagaagaattttctgtttagagccaactcccctaccccaccccctagacaaggtgcttgaggaggtggtgagcctgccagcgtggagctgtgtggttggcagtcaggcaagggtgtgtgagaggccacctggccataccgtcttctttcactaatcccagaactgatggagctgatggctggctggtcagatgtccccttgctctctcactgcttcaccgtggtcctctct

SEQ ID NO: 562130 - DNA, 518 bp, Homo sapiens
tgcagcctcaacctcccaagctcaagtgatcctcccacctcagcctcctgagtgcctggaactacaggctaatttttaatattttttagagacaggtctcgctatgttgtccaggctggtcttgaactcctggcctcaagcgatcctcttgctttggcctcccaaagtgttggaattacaggtgtgagccactgtgcctgccctcaatttattttatttatttttttcttgagacrgagtctcactctgtcacccaggctggagtgcagtggcgtgatcttggcttactgcaactgctacctcccaggttcaagcaattctcctgcctcagcctcccgagtagctgggactacaggtgtgcaccaccatgcccggctaatttttgtatttttagtagagacggggtttcaccatgttggccagggtggtcttgaacatctgacctcaggtgatccacctgccttagcctcccaaagtggtgtgattacaggcgtgagtcattgcacctggcctcgatt

SEQ ID NO: 562131 - DNA, 518 bp, Homo sapiens
tgcagcctcaacctcccaagctcaagtgatcctcccacctcagcctcctgagtgcctggaactacaggctaatttttaatattttttagagacaggtctcgctatgttgtccaggctggtcttgaactcctggcctcaagcgatcctcttgctttggcctcccaaagtgttggaattacaggtgtgagccactgtgcctgccctcaatttattttatttatttttttcttgagacggagtctcactctgtcacccaggctggagtgcagtggcgtgatcttggcttactgcaactgctacctcccaggttcaagcaattctcctgcctcagcctcccgagtagctgggactacaggtgtgcaccaccatgcccrgctaatttttgtatttttagtagagacggggtttcaccatgttggccagggtggtcttgaacatctgacctcaggtgatccacctgccttagcctcccaaagtggtgtgattacaggcgtgagtcattgcacctggcctcgatt

SEQ ID NO: 562132 - DNA, 536 bp, Homo sapiens
tgttgtagcagcatgatatagtctggtatctgtctccacccaaatctcagttgaattgtaatccccaatgctggaggtggggcctggtgggaggtgtttggatcatggggacggacccctcatggtttggtgctgtctttgagacagtgagttctcctgagatttggtcttttttgagactgagtcttgctctgttgccaggctggagtgcagtggtgtgaccttggctcactgcaacctctgcctcccagattcgagcaattcccatgcctcaggctcctgagtagctgagactacaggcatgcrccactaggcccagctaatttttttttttttttgtattttagtagagatggggtttcaccatgttggccaggatggtcttgatctcctgacctcgtgatccgcccgcctcggcctcccaaagtgctgggattacaggcataagccaccgcgcccgaccaagatttggtcatttaaaagtgtgtggcatctccccactctacacactctctctcttgctcctgcttcaccat

SEQ ID NO: 562133 - DNA, 536 bp, Homo sapiens
tgttgtagcagcatgatatagtctggtatctgtctccacccaaatctcagttgaattgtaatccccaatgctggaggtggggcctggtgggaggtgtttggatcatggggacggacccctcatggtttggtgctgtctttgagacagtgagttctcctgagatttggtcttttttgagactgagtcttgctctgttgccaggctggagtgcagtggtgtgaccttggctcactgcaacctctgcctcccagattcgagcaattcccatgcctcaggctcctgagtagctgagactacaggcatgcaccactaggcccagctaatttttttttttttttgtattttagtagagatggggtttcaccatgttggccaggatggtcttgatctcctgacctcgtgatccgcccgcctyggcctcccaaagtgctgggattacaggcataagccaccgcgcccgaccaagatttggtcatttaaaagtgtgtggcatctccccactctacacactctctctcttgctcctgcttcaccat

SEQ ID NO: 562134 - DNA, 603 bp, Homo sapiens
cacctaaactgtttgtacaacaacatggctcatgctaagcacctgcctttcttctgggagtttggaattttggtgtatgctaggcagacaccagctcctgataaaaaccctgagcaccaagtctctatgagcttccctggtagacagcattgtacacgtgtcatcacaactaattgttgagggaatccagtagtgactccctcttgtttctgctggaagagaactcttggaagctcatgcctggtttcttccaacttcacctcatgtacctttcccctttgcagattttgctctgtatccttttctttaagtcttagccaagggtmtgactgtgtactgagtcctgtgagttcctctggagagtcacagaaccttggggtggtcttggggacccctgacaaacctgttgagggactttctcagagaagggcccttcttcagggcctgatggaatcgatgtctcttcagattcctgcataagaggaggaatcagacccaaaggctagtctaaggtcagcctggctccctgctctggccatacacagcctgttctaccctgctatctatgtggcaaactgaggcccagggagggcaggacttgcc

SEQ ID NO: 562135 - DNA, 603 bp, Homo sapiens
cacctaaactgtttgtacaacaacatggctcatgctaagcacctgcctttcttctgggagtttggaattttggtgtatgctaggcagacaccagctcctgataaaaaccctgagcaccaagtctctatgagcttccctggtagacagcattgtacacgtgtcatcacaactaattgttgagggaatccagtagtgactccctcttgtttctgctggaagagaactcttggaagctcatgcctggtttcttccaacttcacctcatgtacctttcccctttgcagattttgctctgtatccttttctttaagtcttagccaagggtatgactgtgtactgagtcctgtgagttcctctggagagtcacagaaccttggggtggtcttggggacccctgacaaacctgttgagggactttctcagagaagggcccttcttcagggcctgayggaatcgatgtctcttcagattcctgcataagaggaggaatcagacccaaaggctagtctaaggtcagcctggctccctgctctggccatacacagcctgttctaccctgctatctatgtggcaaactgaggcccagggagggcaggacttgcc

SEQ ID NO: 562136 - DNA, 375 bp, Homo sapiens
taggaacctgacaacttctgccaaatcctgttcctgcccccaccctcaccccaggtcttttagatgttgatagtatgagtgtgtgccagttccttgtttttgattgctgcttgcttttctccttcacttattggtttttgtttttttgttttgctttgtctgattatgtattgggacactctgccatctttctccaaaagcctccctgcgtatcttttwaaaaaatacaatttcctaggctcaacacagagctatagaattagattcccttaggggagggccacagaaatttatatttttataaaacttccaaggcgttctaacaatcagccaagtctgggatccattttaagtttcccctaagattctttccag

SEQ ID NO: 562137 - DNA, 593 bp, Homo sapiens
ctgagaagataattgatttttttttgttttatgattatttgcgggcactggttctctttccattagcctggataattgagggaagactgtaaagagtattaatatcacggccaaggtcactcagctggctcctgctgccattccaacccaaaggctgaattactatggcttttactaataataacaagaacaataaataacatgagtgattataaagccagggaactctgcaattacctcaacaattaacacatcccttcgtgaaacacagaacagaaaaaattttcaaaggttcaagttagaaaacttctgcattctgtttggtgcaagtgacagtcagaaaagggccttgtttgagggtatgcagtgtgagagtatgcagtgtgagggtatacatgaggtctgcagtatgcagtgcagtgtgagggtatgcagtgtgaggtgtgcagtatgcagcgtgagggtatgcagtgtgaggtctggggtatgcagtgtgagggtgtgcagtgtgaggtctggcrtatgcagtgtgagggctggggtatgcagtgtgagggtgtgcagtgtgagggtgtgcagtgtgaggtctggag

SEQ ID NO: 562138 - DNA, 635 bp, Homo sapiens
aggccgaagcgggcggatcacgaggtcaggagatcgagaccacggtgaaaccccgtctctcctaaaaatacaaaaaaaaaattagccgggcatggtggcgggcgcctgtagtcccagctacttgggaggctgaggcaggagaatggcgtgaacccaggaggcggagcttgcagtgagccgagattgcgactgcactgcagcctgggcgacagagcgagactctgtctcaaaaaaaaawaaataaataaaataataataataataagtaagcttatcctcgttcctacacaaagagtacaacaataatatattccaaaacaataaagcaaaataagtgaaattatcccaagtaatctaaataagaaggctttcaatgaactgggctactgttggaaccaagctgatatgaagttgctagctgattccaatgcatccagaattagaatactgatccagatttttacattacccatcccttctgtttcttttgagctgcagcaagagattactggttggttcacagaaacaagcagttagtctaaattgcaggaaaaaaacgtaaaagcaactgatgagattagaatataataacaagtgtaccatacatagctcttgaaacttaatttttctctctc

SEQ ID NO: 562139 - DNA, 611 bp, Homo sapiens
aaaactattcttttcaaaatattactgctcattgacaatgcacctagtcactcaagagctctgatggagatctgcaaggagattaacgttttcatgcccgcactccatggatcaaggagtcattttgatctgcaagtcttattaagaaatccattttggccgggcgcagtggctcacgcctataatcctagcactttgggaggccgaggcaggcggatcatgaggtcaggagatagagaccatcccggctaacacggtgaaaccttgtctctactaaaaatacaaaaaattagccgggcatggtggcgggcgcctgtagtcccagctactcgggaggttgaggtgggagaatggcgggaacccagaagatggagcctgcagcgagctgagccgaaatcatgccactgcactccagcctgagtgacagatcaagactccgtctcaaaaaaaaaaaaaaaaaaaaaaaaatccatttttagggctacaggtgccatacataatgattccgtgaatgggtctgggcaaagtaagttggaaaacttttggaaagaattcaccattctgratgtcattaagaacataaatgattcataggaggaggtcaaaatatc

SEQ ID NO: 562140 - DNA, 503 bp, Homo sapiens
gctgcctcactgtcactgcacccagctgttctgggagcatgtactattaaaagaaacttgtctatccagactcctctgcagtttacaaaatgccaatgcgcactgaatatctcatcaatctcagtaactatagacagaagagttacatagcacagaagctgttacttccccaaagtcaaatgatgaataactgatagaattcaaatcctaatccagaccttttgactacaaaactggaattctttccacttcctttgttctatgtagaccctcagtartgttaataatacaaggttaattattgaaatagttgttattctcattctacttcttaggaaattaagatgtcaaaactttttaaaacagaccagcttaaaaaattgtataagaattgaatggcattgaatttttggccataaaaaatatgtatataaattgaagccccactttttgccatatgtcacaactctaatactaggaactgatgttagtaagtggactaa

SEQ ID NO: 562141 - DNA, 539 bp, Homo sapiens
ggtggatggcttgaggccaagagttctagaccaggctggccaacatggtgaaaccccttctctactaaaattataaaaactagctgggtgttgtggcgtgtgcctgtaatcccagctacttgggaggctgaggcaggagaattgcctgaacctgggaggtagaggttgcagtgagctgacactggccccaatgcactccaacctgggtgacacagtgagactctgtctcaaaaaaaaaaaaaaaaaaaagtaatttgttttgagtcagcacccttggagtttatccacctaagagagaaacaaagaaatcaaaatttaaaaatgcaaatccctccagagtttccagagtttgcaaatattttaaatgtgctgaagcagcgctggattatagtgggagcaagcctccaaaatggtccccaatgatcctctcttcctagtattcagatccttgcatagtctccttccacattgtgccagacttggtctgygtgaacagtagtatacagcagaaacaacagtaggtcacctctgagattagg

SEQ ID NO: 562142 - DNA, 581 bp, Homo sapiens
taaaaatcagcaaacatgcaaaattgtcatcatcatgtatgagagtcagatagaaaagcaaacattacatttagactccctgatattgaaattataagataagcaatacttagcattgtgcatatgaaatatatttatggcttttaaaaattaataaactgagaaagccataaaatctattcaaaatcatgagagagctttgaaaaataaccatataaaatgtttatatgtatatatgtacatatgcgtgtgtttgtactatatatttgtatacatatccatacatgcatatatacctacatataagacataataattcaattaattattaaatagctgattaaagaaaaatgacagattcactaatggatctgcaaaaattacctagaatgcagcccagaggcacaagtcagaaaatatgaagaattcaagaggtaaggagaatattatgagtaattctaccaaacatctaatgggattccagaagaagagactacaaagagaaaaggaagaagatatttgaccagataataaaaagcaagtctttatgactaatgaaatrgatcaatccaaagtaagat

SEQ ID NO: 562143 - DNA, 514 bp, Homo sapiens
cataaatattatagtcatcacaaagtatcattaaaaaattgttgatgtttatcagtcatataagaagaaaactacattacccctgtcccgaagtagcagatattatcttgacagtagtaagtaaactagcaaaatgtctaagataaaatgctccaatttggattgaagaaactgagctatctgtctttgcttctaataaaaaatccttctcatcatatttccaagcctgctgtatgaattcatgtttacatattatgctacatcaatgaaaatatgaatgatattttacatatacrtatatgtatgtatgcatgtatctatgtgtgtgtatgtgtgcgggttcatacatacacatgcacacaggtgtatatataaatatgatgcacaaatttgaaattgtacagtattttatggatattttcttagtaaatgttcacagcaaaataacattgagggtcgtgtattagtatcgacattctaaagatgagaaagaacaggctaacaacaaatgcat

SEQ ID NO: 562144 - DNA, 568 bp, Homo sapiens
cagctgacatgacctgtcacatcttcatgtgggtcattctctacaaagagtttaaaagcattgtattagtccattttcatgctgctaataaaggcctactccagactgggcaatttacaaaagaaagaggtttaatggacttacaattccatatggctggggaggcctcaaaatcatggtagaaggcaaggaggagcaaatcacatcttacatggatggtggtaggcaaaaagagacagcttgtgcagggaaacacacccttataaaaccatcagatcccrtgagacttattcactatcatgaaaacagcacaggaaagacctgcacctattcttcaattacctcccaatgggtcactcccacaacatgtgggaattatgtgagtacaattcaagatgagatttgggtgaagacacagagccaaaccatatcattctactcctggcccctgtcaaatctcatgtcctcacacttcaaaatcaatcatgcctttccaacagcctcccaaagtcttaactcatttcagcattaactcaaaagtccacagtccaaagtctcatttgagaca

SEQ ID NO: 562145 - DNA, 584 bp, Homo sapiens
cagatagcattccttagtctctttgtaataccttcgtgctcccacctgggtgtcctctcattctccactggttcattctcaccagcacrcaagtgtacactgcagagcctcctgaacagctctcttgggactttacattctcatgagccaagactacttttctccctttccctgttccaaattttgatcttcctgttgtgatcttctcttttgccaaatttctctccagtcaattctttctgtttccttatttctcttttactgttgtttccacttcagcctgcgttcacagaaagggcttctgtcagagtcagtagacattcacgtgtcggcaacttccatgaatgccattttagaccatttcatctcatctgactcaactgttctcacaggcgtttctggcatagaaaatcatctctttttcttggttctctgtccttgcatttcatgatttcgcattctgctagttgacttcccgctgcttttacctcccttgtctccccaaaccccaatttttcctggtgacttttgaagctaatggaattgtgaacacttttctttcttagagcttggtgctgtccctt

SEQ ID NO: 562146 - DNA, 549 bp, Homo sapiens
tacactgtgcagcagggcagttctgtcatgttcttatccaaataaacaatgtatttctctataaaagcaaacatgacctcaaactctaaatcatttgagtgaattcactgatgcttttaattaagttgtatattaagtttattgtaaacttaatataaaataataaaatatatgaatttaaataaaataaaatatatgaatttaaaagacttattagaacactgaggaaatggttagaagagtaagtaatggtgagtgagaggtagtagtagaactatttgaagaataaaagcattccgtgggcccctggatttcccagtaatgatctctggactgtggaaaattctttctaccttaaaggagagaaagtatttaatctgtattaaatactagatgcaccggcttgatctgagcctattccattcacctgaagttgaatttatctaaaaaaaagaatgaaggatcatgcagaagagtaaatgcaaacgaaacacatggctgagcatttatgagctctcrgtaggcctgaaaatgcaaaattcagcttgg

SEQ ID NO: 562147 - DNA, 477 bp, Homo sapiens
aagaccagcctggccaatgtggtgaaacccccatctctactaaaaatacaaaagttagccgggcgtggtgacacgtgcccagctattgagaagctgagacatgagaatcgcttgagcctgggaggtgaaggttgcagtgagccaaaattgcaccactgcactccagcctgggtaasagaagctaactctgtctcaaataaataaataaataaaaacaattttttatcagcagccttgacgacaggatcattaatgaaataattctgaggaacagactcgctacatgcataattttatagaaaatgaagctgatttaaagtgtataaatgatgcagggtgtgatcaatttaagacttgaacccaacattcatggctccaaatgcagtgctcattttcctgtgcaattacacatggttttggacaaaggtcttcgtgttctattttattcatacaataatttcaatttaattaacctca

SEQ ID NO: 562148 - DNA, 477 bp, Homo sapiens
aagaccagcctggccaatgtggtgaaacccccatctctactaaaaatacaaaagttagccgggcgtggtgacacgtgcccagctattgagaagctgagacatgagaatcgcttgagcctgggaggtgaaggttgcagtgagccaaaattgcaccactgcactccagcctgggtaacagaagctaactctgtctcaaataaataaataaataaaaacaattttttatcagcagccttgacgacaggatcattaatgaaataattctgaggaacagactcgctacatgcataattttatagaaaatgaagctgatttaaagtgtataaatgatgcagggtgtgatcaatttaagacttgaacccaacattcatggctccaaatgcagtgctcattttcctgtgcaattacacatggttttggacaaaggtcttcgtgttctattttattcatayaataatttcaatttaattaacctca

SEQ ID NO: 562149 - DNA, 564 bp, Homo sapiens
ttagttctgtttagaaataactcaaacaatagctttatattttattttcacattaaaaatcagatttgcttcagcctcaaagagtgtgtttatataaaattaaatgagcattgacagtgagctgyctttttttttctaaataagaaaagggttaaacacataaagtgtattttctgtgtgtgctattttcaatacctgaagtctttggaagtctaattctgttgttttttaatttctgctgactctccctaataatggcttattttcatgcaaattttgaaagattggggaaaacccaattaatgtgaagctctgtttaaaaaatgtgaaggactgaggttatggattttttgaggagaatattttttcctctctaccactttgggtgctgtaatttactctctcatatctgttctaacttacctcccaccttggagatgcctgatgccttctctcctgtactgttaaatctcaatactctggatcaccgtgaatcattggttctcagtgcatctgctagctccagagtgtactgttcaaccttcaggcttctgctagtgaact

SEQ ID NO: 562150 - DNA, 594 bp, Homo sapiens
caatattatgagacaacgcaaacagttttccaaagtcatcatatcatatatacatatatatatgtattgcatttccactatgagtgtgttagagtgaactttattctacatccttggtaacacttgatattattgaatcttttaattttagccattttgatgagtgtgtagttttaatttcattttccggttggctaatgagattggttatttttttatatgtttatyggccatttagacattctgttttgtaagtccatattcaaattgtgtgtttgcttttcatctaggttccccttttacttctaaattttgagagtacaaattacctgatagtgtgtcaaatttttccccactgctatataacgtcatatttgtaaacaaacaaacaaacacctcaacaaatacaaattcatgggtccatttctagggctctgtagcttgtttcaatagtattctgtcctaagtcctgatacccagagaagcaagtcctcctgatttgttcttcaaaaatatcttggatgttcttgaacctttatctttccatattaattttacaattagcttttcagtttacacatgcatacacacaca

SEQ ID NO: 562151 - DNA, 449 bp, Homo sapiens
tttttgtgtctattgaagtgattattgtctttgtccttcttcctgttaatgtaacatataacatatcacatttactgaattatatgtaaatcatctttgcatccctgaagtgarttccacttgaccacagtgaatgatctttttcatttgctattaaattcaatttgccagcattttgttgaagagatttgcatcaatgaccactagggatgctggactattgttttcatttttcattacttgtctggttttggtattagaacagtgttgacctcatagaatgagtttgtaagtattccttcttcaattttctgaaatggtttgagaatatttggtttataataattagtttttctttaagtgtttaatagagtttcgtagtgaaatcaggtcctgagtttctcttgaatgggtaattttttattactgattcaatttcctcactcatt

SEQ ID NO: 562152 - DNA, 449 bp, Homo sapiens
tttttgtgtctattgaagtgattattgtctttgtccttcttcctgttaatgtaacatataacatatcacatttactgaattatatgtaaatcatctttgcatccctgaagtgagttccacttgaccacagtgaatgatctttttcatttgctattaaattcaatttgccagcattttgttgaagagatttgcatcaatgaccactagggatgctggactattgttttcatttttcattacttgtctggttttggtattagaacartgttgacctcatagaatgagtttgtaagtattccttcttcaattttctgaaatggtttgagaatatttggtttataataattagtttttctttaagtgtttaatagagtttcgtagtgaaatcaggtcctgagtttctcttgaatgggtaattttttattactgattcaatttcctcactcatt

SEQ ID NO: 562153 - DNA, 533 bp, Homo sapiens
cggttccctgcacaagctctctttgcctgccgccatctacataagaagtgacttgctcctccttgccttctgccatcattgtgatgactccccagccatgtggaagtgtgagtccaattaaacccctttcttctgtaaattgcccagtctcaggtatgtctttatcagcagcattaacatagggacagactaatatagggacacactgcctcctgagcaactgacactccaaagccttgcctcttatgaatgtggcatccaaatttactctacctttgttattgagaaatcccaagctaagaaatgaaacactgatactacactgggaraagtactaaagtagtaatcgtaagctaatgcaaacctattctctgaagaaacttaaactaactggatcacaggatagaaaaataaaattacaatgaaaagcaaaacttaccggagaaatcgcagaatgaaaaaatgaattggattatttaaaacaactaaaatgaacttttagaaataaaaaaactagtatagttttttattaa

SEQ ID NO: 562154 - DNA, 569 bp, Homo sapiens
gtttttcaattcatacaaaactgtatccaggccatcatcaataattctaaatgacagatgtttcttctaacaaccccacaatatcaccccttaccacaaaatcttccttcagcttaatctctcccactctaggttcccatgccacccctaatcctgctcaaagcagccctgaraaacatcgcccattatctctccataccacccccaaacattttcaccgtcccaacactctgccagggtgggatctgagtcttccgactaatatcagaagccaggattgtgaggcctctgagcccaaccctatgcgcactgatagtcgcctgtgtgactgtgcgacgtacaaatttagatggccggttcctgcgtttagtgatgagtttccgagcacaaggtctcgtgaaaagggcctgttcttaccttcactgatgacatcgtctcgtgaacttccttctacctggctcatcttggctcaaaagctcccctactgagcaccttgtgacccccactcctgcccgccagagaacaacccccctttgactgtaattttcctttacctacccaaatcttat

SEQ ID NO: 562155 - DNA, 619 bp, Homo sapiens
tgtttcaaacacaatgttacctagaatttggttcatagcatcagtatcacttgggagcttttaaaaaatgtagagtcgcatgcaccatgtagaactcccaaatccaatctgtgtttttaacaggttattcaagccatttgtatgcacttaaggtttgagaagcatttcttgaaggcattactctactaaatagttattagttgcatctctagtctctcccttggctgactctgtttcactaaaaaataataaataaaaattattaccctgaaataccatcctcaatgccttccttccctcccctcaaacagataaacaaacaatgatgaacaaacacagttctcaataatatagtcatacattcatttactcatttatttattaaaaaaaattattctctaataagtattgactgtgtcagacattctctgtgcactggaaatgcagtggagagcagcggagacatgggctcttccttaaaagatttttgaataaactagaggagacggacaattaagtaaataattaatctcaagtttgattattcctctaagagaggaagcatatagtacacatatgcacatgcaatgmgatcatattcattagttcaagaaaactg

SEQ ID NO: 562156 - DNA, 548 bp, Homo sapiens
ggattttagaatcaagtagactcatgttcacatatgttctttatactcaccgtatgacaaaacacaattatgtgaccttcataagccttcgttttctcacctatatctgcaacattaaaacctactgaaatggctccattgtctggggaaacacccagggtcctttgtctcgcaccaagaaaattagtgacactgacacacacatggagtggattaaggagcagaaagtttaatatgcaagaaggaagagaacagctccctggcacagagggaggagggctccaaacagaataacacaccttgcgcaggaggacaggtarggggttgggggggcagtaaggggcaggggggagcagttggttatattgagaggcttgaggaggtggtgtctgattgcatagagcccaaacagggcaaacgggattgatttgaccaggtgtgtcattcacatagcaaaaagactggccctccaagcctaaccttttattatacaaatgaggcttctacctggctgtgccatgacacctgcacatgtggggacaaagaaa

SEQ ID NO: 562157 - DNA, 384 bp, Homo sapiens
ttggtccagggggtcaggaagcggcacctgccacccagaggtgagtaaaatgcagaaaaccactgccagtagtcccagatgcctacaagccctgggctaataacagttaaggaaacatgaaagrggctgcagattcatctgttggaagcccacacacctgttgcagcctcagcttttcaaacctggcacagacacatcttctcagctgtatcctaaagcctgttggcaaaggcatttcagaaatatagtccctaggcttctaaggcctaagatacagagaagagcataaaaggtgctaggaacaaggccgggcatggtggctcacgcctgtaatcccagcactttggaaggccaaggcgggtggatcacctgaggtcgggaatt

SEQ ID NO: 562158 - DNA, 624 bp, Homo sapiens
tacacagattaactgatgaaaccctaatgtcctatgtgatattcctgtagaaaatatttcataggaagtatccatgtttctgcacaatagggatttctttctccatatgagactccaaacaggttccctgtcaaaaggggttgtaaagacctccccactccaattgttttagcaggcaaaggacttgatctgcagactcaaaggcaggcagctagcaaggagaaagcacagtagcttaggaaaaagagagactgtagcatgtggtcaaatttgtttatgagtaaagcaggtaaccaggaatttgccaagcattttggaatgaattaaatccttcagtgaagataaaggtaccgtaataagaactattcatgttggaagagtgtctttaaagctagccaccaacaatttctcacctccctgtacacacgtttctcttrcatcaagaggtggattctgcctgtaatctcagcactttgggaggctgaggcaggaggattgcttcagcccagcaatttgagaccagcctaggcaacatagccctgtctctacaattttttttttaattaaccaggtatggtggtgcatgcctgtagtcccagctactcaggaggctgagatgagatc

SEQ ID NO: 562159 - DNA, 582 bp, Homo sapiens
caggatggtgcccttgtgatccgcctgccttgacctcacaaagtgctgcgattacaggcatgagccaccgcgcccagccaataatttcttaaaaatatatttgttattttgataaattgcatattaacactacctataatggtaattcagtccagagagatttctttgatacctggagccatatggtcacagaaaattttaaaaattaatttcaatttatatgcatgcttttgtcgtagataattatgagtggtcaataaaagaatttcaggcattgaatatatcacattaacataatataatgtagggaaagtagaatggaaatacaagtttaagcagtaaatggagtaattttttgcctgttaaagatgagcttgttcgtgtatgtttaaattgaattatgtttgatatgaaattgctatggcatttagattccatgggaaacattgttagaagtcatgtaagagctttccttttaaatcatagatgacacaaacaaatggaaaamcttccaatgctcatgaattggaagactcgatatgttaaatggccatactgcccaaagcaatctacagattcaac

SEQ ID NO: 562160 - DNA, 577 bp, Homo sapiens
agtgcagtggcacggtctcagttcactgcaacctctcccaggttcaagcaattctcatgcctcakcctcccaagtagctgggattacaggtgcacgccaccatgcccagctaatttttctatttttaatagagacggggtttcaccatgttggccaggatggtctcgaactcctgacctcaggtgatctgcccgccttggcctcccaaagtgctgagattacaggtgtgagctaccacgcccagccttactcctctatttttctaacccattccttcctcccccagcccaccacaagagatgaggaatgactaagtttattgatgagagtacaggaaattcactaagtcacatctgccagtgaacagacgtcctcctctcttcaacctcctcctgcagactatgcagaatctatcttctcaaagcaatcctctctctctttttttcaccccttccacacctataagggcatgctcaagcaggtcaggacccgatctgagaatccagatttttctctgtcttgctccctccttaaagttatactagagtgtgttggtgccaaaattttgattcagggt

SEQ ID NO: 562161 - DNA, 569 bp, Homo sapiens
ataattattattacagctgaccaccatggcacatgtctgtagtcctaactactccggaggttgaggtgggagtatcgcttgagaccaagagttctgggctgtagagcgctaggctgatagggtgtctatcctaagtttggcatcaatatgttgatctcctgagagtgatggaccaccagtttgctgaagaagagctgaaccagcccatgttgagaatagggcacatcaaaactcctgtgctgatcactagtggaattgtgcttgtgtgcttgtgaataacmactgtactcaagtcagagcaacatagtgagacttggtctctaaaataataataattattactattatcgcataactttaaaaaagaataatataatacttatttcataataatagtttttacacaataataattgtgtttcttttatggaattaatatttaaaaataatattttaaaatataaaagggatccttattgaaggtttaagaaataatatggttcaatggaaagataatcaaattgagaacagaatgtattctagtccagattctgctgttaatatgtttg

SEQ ID NO: 562162 - DNA, 569 bp, Homo sapiens
ataattattattacagctgaccaccatggcacatgtctgtagtcctaactactccggaggttgaggtgggagtatcgcttgagaccaagagttctgggctgtagagcgctaggctgatagggtgtctatcctaagtttggcatcaatatgttgatctcctgagagtgatggaccaccagtttgctgaagaagagctgaaccagcccatgttgagaatagggcacatcaaaactcctgtgctgatcactagtggaattgtgcttgtgtgcttgtgaataaccactgtactcaagtcagagcaacatagtgagacttggtctctaaaataataataattattactattatcgcataactttaaaaaagaataatataatacttatttcataataatagtttttacacaataataattktgtttcttttatggaattaatatttaaaaataatattttaaaatataaaagggatccttattgaaggtttaagaaataatatggttcaatggaaagataatcaaattgagaacagaatgtattctagtccagattctgctgttaatatgtttg

SEQ ID NO: 562163 - DNA, 530 bp, Homo sapiens
aggtcaggagattgagaccatcctggctaacacgatgaaacccccatctctactaaaaatacaaaaaattagctgggcrtggtggtaggcgcctggagtcccagctactggggaggctgaggcaggagaatggcgtgaacccgggaggcggagcttgtagtgagccaagatcaagccactgcactccagcctgggagatagggcgagactccgtctcaaaaaaacaaacaaacaaaaaaacaaacaaactatacgataggtgcatttggaaggaccaactgtgttaagaatttgcttaggtcttaatgtgggaatttgtgtagctaatttactttacaaaatagaaaataagggctaatcatgattatatagatttaaacttaaatgattagtgtcaaaacctgtaactcaaagaaatgcttttactttttgtttatttttactgatactttaataacttggaaacaatttacagtagccaatgctttttccaacctaaatgtaataattggtacatttattttatggtg

SEQ ID NO: 562164 - DNA, 530 bp, Homo sapiens
aggtcaggagattgagaccatcctggctaacacgatgaaacccccatctctactaaaaatacaaaaaattagctgggcgtggtggyaggcgcctggagtcccagctactggggaggctgaggcaggagaatggcgtgaacccgggaggcggagcttgtagtgagccaagatcaagccactgcactccagcctgggagatagggcgagactccgtctcaaaaaaacaaacaaacaaaaaaacaaacaaactatacgataggtgcatttggaaggaccaactgtgttaagaatttgcttaggtcttaatgtgggaatttgtgtagctaatttactttacaaaatagaaaataagggctaatcatgattatatagatttaaacttaaatgattagtgtcaaaacctgtaactcaaagaaatgcttttactttttgtttatttttactgatactttaataacttggaaacaatttacagtagccaatgctttttccaacctaaatgtaataattggtacatttattttatggtg

SEQ ID NO: 562165 - DNA, 530 bp, Homo sapiens
aggtcaggagattgagaccatcctggctaacacgatgaaacccccatctctactaaaaatacaaaaaattagctgggcgtggtggtrggcgcctggagtcccagctactggggaggctgaggcaggagaatggcgtgaacccgggaggcggagcttgtagtgagccaagatcaagccactgcactccagcctgggagatagggcgagactccgtctcaaaaaaacaaacaaacaaaaaaacaaacaaactatacgataggtgcatttggaaggaccaactgtgttaagaatttgcttaggtcttaatgtgggaatttgtgtagctaatttactttacaaaatagaaaataagggctaatcatgattatatagatttaaacttaaatgattagtgtcaaaacctgtaactcaaagaaatgcttttactttttgtttatttttactgatactttaataacttggaaacaatttacagtagccaatgctttttccaacctaaatgtaataattggtacatttattttatggtg

SEQ ID NO: 562166 - DNA, 531 bp, Homo sapiens
aaatgttcaacatcactaatcattagagaaatgcaaatcaaaaccacaataagataccatctcacacaagtcagaatggctattattaaaaagccataaaacaacagatgttggcaaagctgtagagaaaaatgaatggttatacactgttggtaggaatgtaaattagctcagtcactgtgaacagcagtttggaggtttttcaatgagcttaagacagaattactattcaacccagcaatcctgttactgggtatatacgcaaaaaatatataattatattgtaaaaacacatgtactcatatgtgcatcacagcacaattcacaatagcaaagacatggaatcaacctaggtttccagcaatggtagattagaaaaagaaaatgtgatacatatataccatgaaatactatgcagccatataaaggaaaaagtcatgtcctttgcagcaccatgtatggatrgagtgggaggacataatcctaagcgaattaatgcaggaacagaaaactgaatactgcatgctctca

SEQ ID NO: 562167 - DNA, 365 bp, Homo sapiens
tgtatttgcatagcttgataatacgttcattattgctgaatagtatttcattatatacatgtaccactctctctttatccatttacctcttaagggacatattagttacttcaagttttagacaattatgaataggtctgccatagatatccacatgcaggtttttatgtgttctattttttaaatcagttggataaatacctaaaagcatggtttgtagttcataaggtaagraagtgtttaactttgtaagaaactgtcaaactatcctattgtaatagtttgtcctttaatacatgttgtataggagtgtgaaagaagaaatttttgccttgtttccaaggacatcagtaggaaagcatcca

SEQ ID NO: 562168 - DNA, 471 bp, Homo sapiens
gaattcacagcactcaatgctaagacccagggctctcccttcttcctcacctcttcagagctctctctccccttttctaattcactggagagaaggctggtgtcatgcctgagtcctccccagcttcagaattatcaaaatcatagattggagcaataaatgccttttagcaaaattgcatcccaataagcctttttgaaagcctaaaatgttgtgttgaggtgagatattcctctttagacctttgccccactctacccacccccaggggagtggarttgagcacggacacccagctgatggtgggaccttggcagcctaccagtagtaccctgcattgcatggctggcaaggtccaggcagtccacccctaaaccaaagaagtcacagagccctaccccagtgaggagcctctgtcaattgatatgcaccaggcaccagcaagagaggagggagcgacagaggactcag

SEQ ID NO: 562169 - DNA, 646 bp, Homo sapiens
attgcaaaccacatatctgttaagaggttaagatctaaaatttataaagaactcttgcaactcaatagcagaaaagcagataaaccaattgaaaagtgagcaaaagacctgaacagacatttctccaaagaaggcataagaatggccaataggtatatacaaaggtgctcaatatcactaatcataaggaaaatgcaaactaaaaccactgtgagttatcacctcacacccgtaaagacagctactatcaaaaggcaagagatgacagatgagggtgtggagaaaagaggaccttagttcattgttgatgggagagaagactgatacagaagactgacacatttccagctagtatggaaaagagaaaggagattcttaaagaaattaaaaaatagtactacatgacctagcaatgccactcctggatacatacccaaaggagataaaatcatcaccttgtaaagagatctgaactcccattttcgttgcagcagtattcacaagagccaggaaagctatagaacaaatttaatgtccatcaatggacaaatggataaaaaaagtggtgtttacacacacacacacacacayacacacacacacacccaatggaatattattcagacttgaaaagaagaggtttttg

SEQ ID NO: 562170 - DNA, 457 bp, Homo sapiens
aaagtatcttggaatagtgtatgttcccagtactgcacaggagcagattgttaagtcagcttgcagaatagtcacggtaagaagctgttacataagcaaaccaaatagttctgaattcttggttgaaacgatactgatgaaccaattacaatgggatggaaagaaggaatgaatagaaagagtgtgcctgaagttgtggggkgtgtgtgtgtgtgtttgtgtatgtgtatgcttgtaaaataaataaatacatttggcagaaaacaaaaggtggaaaattcaattggctaataaaaaaccaatgatagcaaaaataaaaataataaggaacatcaattgaccaaataaagtggtcttgcaagtgtgataataatttaccacttcttgaaactgctgcaaataacgggctagaagaatcttattttaccgacatccaagacagagaagataaaacaca

SEQ ID NO: 562171 - DNA, 545 bp, Homo sapiens
ccaggcccagataatttttgtatatttagtagagatggggtttcatcatgttggccaggatggtctcaatctcttgamcttgtgatcctcccgcctaggcctctcaaagtgctgggattacaggcgtgaaatattttaaattaggtgctgtggggattcattatacttttctctcagcttttgaatacttttgtaattattataaaagagataacttcggagtttctagtttagaaatcttgcagtaagccagacaaaaaacaataaaaactggaaacataagaataatgaggagaataacaaggagagaatggatatactattaaatagaattggcagaagattgtgacctgtggagataagaagggtggagaggccaaagatgactccatagttctagttgagatgacttggtagattgtggttgtcaccactgaaacatgagacacatgggaaaaacaggtacaattaacttagatgggagcatagaagaatacatacggcacagaggatgatgagttgtatctagagagattaaatttacc

SEQ ID NO: 562172 - DNA, 545 bp, Homo sapiens
ccaggcccagataatttttgtatatttagtagagatggggtttcatcatgttggccaggatggtctcaatctcttgaccttgtgatcctcccgcctaggcctctcaaagtgctgggattacaggcgtgaaatattttaaattaggtgctgtggggattcattatacttttctctcagcttttgaatacttttgwaattattataaaagagataacttcggagtttctagtttagaaatcttgcagtaagccagacaaaaaacaataaaaactggaaacataagaataatgaggagaataacaaggagagaatggatatactattaaatagaattggcagaagattgtgacctgtggagataagaagggtggagaggccaaagatgactccatagttctagttgagatgacttggtagattgtggttgtcaccactgaaacatgagacacatgggaaaaacaggtacaattaacttagatgggagcatagaagaatacatacggcacagaggatgatgagttgtatctagagagattaaatttacc

SEQ ID NO: 562173 - DNA, 528 bp, Homo sapiens
ctcagagttctcttctccagcaaactccacctgcctccgggtatcagtcaccagacatgaaggcctggcagcaaggagcgataggaaacaacaagtaagggggcagtttttatatatgagcatccttgatactgtgataaatccttgatactgataaatgctacagtggttgaacctcaggaacattatgtaaagtgaaagaaggccggacacaaaaggccacatatggctacatttatatgacgtttccccgttcccccgtttatgtgtggagacagaaagcagcacrtaagaacagccatgctttcatgggctgattgtattcacaggctaagtagaagattattggctacttccatttgcataatggaaagaactaaattttatattatcagcaaagaaaaatgatttttaaatcttataagtatcaagtcacttctaaggcaaatttgtgtgctgacagtacagaaaagtgatctaggtccccaacctttccatcctaacctgagcacacctgcagaatatgat

SEQ ID NO: 562174 - DNA, 579 bp, Homo sapiens
gaattctttaaacaaaagaacagcctgcaggtacagataagggaacttgcatagaggggcttgcctaagacatgcccacagctgaacagataagaaagsgtacgcaggtgactttcccagccatgcctgcaatggaaaattccatcccctgactcatgcacagtaaggggaacaaagcaatatggaatagctcaaggtaagagcccccatgcacactaggaggattgggtggagctagcataaatttgcatcttatgcaaatgagacacctagtcctcttcagtttcttataaaagcctttgcatttaactgtaaaaatggcaaccctcttccaggctccctctccacagcagagagctttcttctttcacttattaaactttcgctccaacttcaccgtttgtgtccaggctccttaattttcctggttgtgaaacaaagaaatgcaggtgatacccggcaatgagaaactgctacattgcagtgcattggcaaaacagtaacattgtggtgcattggcaaaactgtaacattttagtgcattggcagggaaaggaaacattggaaagttgagtagga

SEQ ID NO: 562175 - DNA, 579 bp, Homo sapiens
gaattctttaaacaaaagaacagcctgcaggtacagataagggaacttgcatagaggggcttgcctaagacatgcccacagctgaacagataagaaagcstacgcaggtgactttcccagccatgcctgcaatggaaaattccatcccctgactcatgcacagtaaggggaacaaagcaatatggaatagctcaaggtaagagcccccatgcacactaggaggattgggtggagctagcataaatttgcatcttatgcaaatgagacacctagtcctcttcagtttcttataaaagcctttgcatttaactgtaaaaatggcaaccctcttccaggctccctctccacagcagagagctttcttctttcacttattaaactttcgctccaacttcaccgtttgtgtccaggctccttaattttcctggttgtgaaacaaagaaatgcaggtgatacccggcaatgagaaactgctacattgcagtgcattggcaaaacagtaacattgtggtgcattggcaaaactgtaacattttagtgcattggcagggaaaggaaacattggaaagttgagtagga

SEQ ID NO: 562176 - DNA, 579 bp, Homo sapiens
gaattctttaaacaaaagaacagcctgcaggtacagataagggaacttgcatagaggggcttgcctaagacatgcccacagctgaacagataagaaagcgtacgcaggtgactttcccagccatgcctgcaatggaaaattccatcccctgactcatgcacagtaaggggaacaaagcaatatggaatagctcaaggtaagagcccccatgcacactaggaggatkgggtggagctagcataaatttgcatcttatgcaaatgagacacctagtcctcttcagtttcttataaaagcctttgcatttaactgtaaaaatggcaaccctcttccaggctccctctccacagcagagagctttcttctttcacttattaaactttcgctccaacttcaccgtttgtgtccaggctccttaattttcctggttgtgaaacaaagaaatgcaggtgatacccggcaatgagaaactgctacattgcagtgcattggcaaaacagtaacattgtggtgcattggcaaaactgtaacattttagtgcattggcagggaaaggaaacattggaaagttgagtagga

SEQ ID NO: 562177 - DNA, 580 bp, Homo sapiens
aaattctaatgtctgagtgtataccatcaatcataattaagatttttatgttaagttattgtaaaccacagaaataaccaaatttctttgtcaattgtgttcttgactgtaactaccctggacatttcatcattcacagataattgttatcttactttaatcctcttcaaagattggttcataatcagctataggactttgacaggtgccctcaaatgcaagtttctaatcagtttgtagattatgacattggaataaaggaaaagtgctcaggacccatgaagagctgaaatgttcatgaatatcgagcaaaacaacagttaaaaaaacgggctttttaaagtttttgctcaaaatgttgctgatccttgttttttttttcagaatcaagraaacttatcttaagctatttacagcctttcgtaattacataaggcatactcctgtaaacaaaatttggagcatgcttgcttctttctgcctggcttctccagaatttggaagctgggagtattcttaacttatggcagtatagttgtttgcctctgtgcaataatgatctattttcttttacaacagg

SEQ ID NO: 562178 - DNA, 460 bp, Homo sapiens
tttccccactcttcttaagcaactgagatggagtcaccagtgctgggaagtctcctattgctcaatggtattcctggtgtgatgcagccgactcactgtgtgcagtcacttgggaggagcctgggcttccctccagggatctagagctgctctctagttaagtacatacccaactaagggcagactcacctggcaggataggagggtggcaaaaactggatgaaacagagtgaagatttaagaccagggattcaagagctatttccaaatcacaaaaaggcaaagagattttacattcttkgtgttcacaccagaatgtcactgataacatgaaaaagtaaggccaggtgtggtggctcacctctgcagtcccagcactttgggaggccaaggcaggcagataacttgagctcaggagttcaagaccagtctgggcaacatagtgagaccctatctctac

SEQ ID NO: 562179 - DNA, 554 bp, Homo sapiens
tcacctgttctgggtcttaatggagtgatttatgtcttcatttttactgtgttgaatactgagtcatcttaagtttttatcccactttcaatacttgatatagaagtaataagagatgccaaaaaaaaaacacatgaatttcaaaccttgtttatctctttyccactttgtagcagcaagcccagtattcttttgatagttagaagcagttatcccagccagtagcctaacctccctatgtgtttgttcaatgtcatggggcatctaccatgtccaggaggcagtttaaacttccaattaaatgtaatcattgtatatccataggcaaaatcatatttcctttgaaaactaaaatcttcaaacccacatagcttaaaattttttgaatcttaaggaagaatcgtttgagtggattattagctttagaataacaaaagtattcccactagcatgccttggtttccagagttgatagtctcactatggaagaaatatccctatatgttgaacactgattcaaataaaagtatgatgccctttcttgaaggatagga

SEQ ID NO: 562180 - DNA, 403 bp, Homo sapiens
tggtgtaattctatctctattcctggcttctgcttaaatgggtaattaagtccatgaatcacacctatgatctctttatcaaatggttattcagccacattcttagtgttctctaaagaacaagctttctcatttttgtatcatagataaactgagaatttttcaaatctctgagttcttgttcctttttaatcaccaattccatcttcaattcatctatttcctctcatattttaytacaatcataaaaagaacctaagctgcaccttcaatgctttgcttagaaatttcttctgctaaacattttattgcttacaacttctacctgccacaaaatactagaacacaacttaggtaagttatttgccacattataacaagtcttagcttcctccagtttcca

SEQ ID NO: 562181 - DNA, 403 bp, Homo sapiens
tggtgtaattctatctctattcctggcttctgcttaaatgggtaattaagtccatgaatcacacctatgatctctttatcaaatggttattcagccacattcttagtgttctctaaagaacaagctttctcatttttgtatcatagataaactgagaatttttcaaatctctgagttcttgttcctttttaatcaccaattccatcttcaattcatctatttcctctcatattttactacaatcataaaaagaacctaagctgcaccttcaatgctttgcttagaaatttcttctgctaaacattttattgcttacaacttctacctgccacraaatactagaacacaacttaggtaagttatttgccacattataacaagtcttagcttcctccagtttcca

SEQ ID NO: 562182 - DNA, 453 bp, Homo sapiens
tctaatccattccactgtttttttttttttggtctgtttttatgcagcactatgttgttttggttactatagctctttagtataatgtgaaatcaggtatgcgattcctccagttttgttctttttgcttaggatagttttggctattctgtgtcctttgtggtttcatataaaatttagattttttttcctattcctatraagaatgtcattggtattttgatagagagtgcactgaatctgtagattgctttggataatatggcatttttaaacaatattgattcctccaatccatgaaaataaaatattttttcaattttttggtgtcctgttaaagttttcattatagagatctttcacttatttggttaagttaattcctaggtatttaattttatgtgtggctattgtaaatgagattactttttcattttttttacagattgctca

SEQ ID NO: 562183 - DNA, 550 bp, Homo sapiens
tgccagcacagcagtctgaagtcaaacgggcacgatcaagcttgctgggggtaggggcatccgccattactaaggctttagtaggtgcttttcccctggcagtgctaaggaggctgggaggtctggactgggcagaactcaccacagcgcggcaaagtggcagtggccagactgcttttctagattcctcctcactgggcagggattctgtgaagtaaaggtaacagccccagtcaggagctcacagagaaaacccccatctccctaggtagagcaccagggggaaggggcagctatgggcgcagcttcaggggatttaatggttctcacctgccggctctgaagagaatagctgatcctggcaagagggattctcccagcacagtgcaccagctctgctaagggacaaactgcttcctcaagtgggtccctgacccccgtgcttcctgactgggagagatctcccaacagggttggacagacacctcatacaggagagctccgactgacatcaggccrgtacccctctgggacgaagcttccagaggaa

SEQ ID NO: 562184 - DNA, 587 bp, Homo sapiens
ttttggtattttatgggcacacagtaggaaacattaacggctgttactttcaaagaaatgggaagtcacattcctagttgacatggtaacatgcaaagctccaagccaatttctaatctttaatagattttatttagggttttgagtgttttccctactgaaataaaatcttcttttttttttctcagttgatttgctgtatgtaattctgaataaatacagaaaagtccatggaggaaaatgcattaaatgctcagtcggctttgttcctattaggtttcttaatgtttcatagcctactagttttagtcaaggtacaacttcyatgaagcataaattctcatcagcaccctacaaatcctcctaaatactactggcttctctttagaaccctaccattccattaccagttattctccacaatatgaaacatttgtctaaatgtagagctatggtaagtataatagtattcatgactgaggagtatcattcagtttttggactccacatgtactgagacaggtgttagatcttacaagtattatgaaagataacattaacataatcagaatgacataaagcctaag

SEQ ID NO: 562185 - DNA, 626 bp, Homo sapiens
tttattttttgtgaacataaaacatttcaagtgtctactattttacctccagatggaagtagggaaatgtattagatagcttatcctcttccttcctttgaattacatttaggactgtagttcacatctctgtgatcatgttactcccagagaatttattacatatcacttaaaaaatgttaaacgttcatagattatttaatattataaataacaaatgattaacatagcawtacataaattcattcaaaggattatgagaactgcttcaaatattttctttctatattgcagcactaagtattcttaagcactttgaatttctgtacctacaaatgaaacacagtcagctctgaggtgaaacatggcaaatagtatttttagactggaaatgatctaacaatgacatacagaggatatgaaacaatatggtgtgcatcaaagctgagttctcattaagtatattactatttgtaaatgtaaccacagaagtgaaaataattaaattatgacaatatcagttaaactttttacatatgtcatcactaaatacaaacaaatctaacttatctaatatattatctttcccattaactgtaagctagatagaaattgtatcattgtat

SEQ ID NO: 562186 - DNA, 519 bp, Homo sapiens
catatagccaggtttttaatggaattattgatcatcagtatcacttttaatataattcatgatgtaaaatsagaaatattaagtacattttataactctgactatatatgcaaaataaagtgaataaatgaatcacttatctatagcaagttaaatatagttacagagttctggatacatatgaggtacataatatacaccatttgttgaaacagtgaatatatatataccctttcttatccaaataaagtccttaattctcttttctattttatatagacacaaacacacaacacacagtgttaatcatttattgacttgtttgtccctgcaaacaaaggaagtggtggtaatagtcccttaccataatcctacaacttatgtccatttaaatcacttccaaactttttttttttttttagatggggtctcactctgtcgcccaggctggagtgcaatggcatgatctcggctcactgcaacctccacccccgggttcaagtgattctcctgcctcag

SEQ ID NO: 562187 - DNA, 519 bp, Homo sapiens
catatagccaggtttttaatggaattattgatcatcagtatcacttttaatataattcatgatgtaaaatgagaaatattaagtacattttataactctgactatatatgcaaaataaagtgaataaatgaatcacttatctatagcaagttaaatatagttacagagttctggatacatatgaggtacataatatacaccatttgttgaaacagtgaatatatatataccctttcttatccaaataaagtccttaattctcttttctattttatatagacacaaacacacaacacacagtgttaatcatttattgacttgtttgtccctgcaaacaaaggaagtggtggtaatagtccctyaccataatcctacaacttatgtccatttaaatcacttccaaactttttttttttttttagatggggtctcactctgtcgcccaggctggagtgcaatggcatgatctcggctcactgcaacctccacccccgggttcaagtgattctcctgcctcag

SEQ ID NO: 562188 - DNA, 519 bp, Homo sapiens
catatagccaggtttttaatggaattattgatcatcagtatcacttttaatataattcatgatgtaaaatgagaaatattaagtacattttataactctgactatatatgcaaaataaagtgaataaatgaatcacttatctatagcaagttaaatatagttacagagttctggatacatatgaggtacataatatacaccatttgttgaaacagtgaatatatatataccctttcttatccaaataaagtccttaattctcttttctattttatatagacacaaacacacaacacacagtgttaatcatttattgacttgtttgtccctgcaaacaaaggaagtggtggtaatagtcccttaccataatcctacaacttatgtccatttaaatcacttccaaactttttttttttttttagatggggtctcactctgtcgcccaggctggagtgcaatggcatgatctcggctcactgcaacctccaccccygggttcaagtgattctcctgcctcag

SEQ ID NO: 562189 - DNA, 463 bp, Homo sapiens
atccccagcactttgggaggccgaggcaggtgaatcatttgagatcaggctcccactgattctacattatggtgacttgtacaattatttcattatatattacagtatrctaataatataaataatgtacacaataaatgtaacgtgcttgaatcatcctgaaatcatttcccaccaccacccttggtcggtggaaaaattgtcttccacaaaacagtccctggtgccaaaaaggctggggactgttgatgtaaattacttaagccataataggaattcattaaggggaatagattattatggtttaataggaataaagtatgtattaaccaaatttatccaaaattttatctgggcttttatgttaatcatcatcataataaataatagttaataggcaataaattcttttctttttttagagtgtgctttttttttaaatttattaaaaaaattttttggg

SEQ ID NO: 562190 - DNA, 463 bp, Homo sapiens
atccccagcactttgggaggccgaggcaggtgaatcatttgagatcaggctcccactgattctacattatggtgacttgtacaattatttcattatatattacagtatgctaataatakaaataatgtacacaataaatgtaacgtgcttgaatcatcctgaaatcatttcccaccaccacccttggtcggtggaaaaattgtcttccacaaaacagtccctggtgccaaaaaggctggggactgttgatgtaaattacttaagccataataggaattcattaaggggaatagattattatggtttaataggaataaagtatgtattaaccaaatttatccaaaattttatctgggcttttatgttaatcatcatcataataaataatagttaataggcaataaattcttttctttttttagagtgtgctttttttttaaatttattaaaaaaattttttggg

SEQ ID NO: 562191 - DNA, 463 bp, Homo sapiens
atccccagcactttgggaggccgaggcaggtgaatcatttgagatcaggctcccactgattctacattatggtgacttgtacaattatttcattatatattacagtatgctaataatataaataawgtacacaataaatgtaacgtgcttgaatcatcctgaaatcatttcccaccaccacccttggtcggtggaaaaattgtcttccacaaaacagtccctggtgccaaaaaggctggggactgttgatgtaaattacttaagccataataggaattcattaaggggaatagattattatggtttaataggaataaagtatgtattaaccaaatttatccaaaattttatctgggcttttatgttaatcatcatcataataaataatagttaataggcaataaattcttttctttttttagagtgtgctttttttttaaatttattaaaaaaattttttggg

SEQ ID NO: 562192 - DNA, 512 bp, Homo sapiens
gtactgataatacaaaaattagccaggtgtgatggagggtgcctgtagwcccagctactcaggaagctgaggccggagaatcgcttgatcccgggagcggagtttgcagtgagctgagattgtgccactgtactctagcctgggtgacagagccagatttcgtctcagagaaaaaaaaaaaaaaaaaagcgaaatggagttggttaggtcagatttttttcactgtcattgtcataatttttgcaaaggtggtttcactcccagaaaatacgtattttttattttgacctgtggctataccaggtagcagtagtgggctggagcaattacttttgctctgttctctataatttctctcatggcagtttctttcaatcttgtggcttcagatagctccttgaattaaatgaatatcaatttatttcaaggtgtcttgagagcttccctagcctagtgtagtggctttgtgcagagtgagcttacataaagtggaactacatttcccagaattc

SEQ ID NO: 562193 - DNA, 538 bp, Homo sapiens
ggaaataacgagggcagcctgggcaacatggtgaaacctcgtctgtactgataatacaaaaattagccaggtgtgatggagggtgcctgtagtcccagctactcaggaagctgaggccggagaatcgcttgatcccgggagcggagtttgcagtgagctgagattgtgccactgtactctagcctgggtgacagagccagatttcgtctcagagaaaaaaaaaaaaaaaaaagcgaaatggagttggttaggtcagatttttttcactgtcattgtcataatttttgcaaaggtggtttcactcccaraaaatacgtattttttattttgacctgtggctataccaggtagcagtagtgggctggagcaattacttttgctctgttctctataatttctctcatggcagtttctttcaatcttgtggcttcagatagctccttgaattaaatgaatatcaatttatttcaaggtgtcttgagagcttccctagcctagtgtagtggctttgtgcagagtgagcttacataaagtggaa

SEQ ID NO: 562194 - DNA, 567 bp, Homo sapiens
caagggtgtcatgccaccagtcaaaaggtactttgcttaaactggcattctttaacatgcatgttgtagtggtaagtacttcatttcatacagccacagttattaatactttgctaagggctacccagctgctaaaaactgctgttatctcatactgagaatgctagttctatacctttgctctcaggctgtgaggaaggggtgctagtccaaaaggccatgggattagatttaaaaaggctaaaattaaatcctagaaaataaagaatatttcattttttaacattttaggaaacaaaatgaatatgcttttaaaacataaaaagccagaatccctcaatttataccaccaatctgtcttacatattcatttatccctgtagtttcattctttgctcmtttaatacatgagcaagactgacatacaacacataaaatgagaacatctcaatatcatattttttttttttttttggagacaaagtctcagtcactcagtcaggctggagtgcagtggcatgatttcagctcactgctacctccatctcctgtgctcaagcgatcctc

SEQ ID NO: 562195 - DNA, 567 bp, Homo sapiens
caagggtgtcatgccaccagtcaaaaggtactttgcttaaactggcattctttaacatgcatgttgtagtggtaagtacttcatttcatacagccacagttattaatactttgctaagggctacccagctgctaaaaactgctgttatctcatactgagaatgctagttctatacctttgctctcaggctgtgaggaaggggtgctagtccaaaaggccatgggattagatttaaaaaggctaaaattaaatcctagaaaataaagaatatttcattttttaacattttaggaaacaaaatgaatatgcttttaaaacataaaaagccagaatccctcaatttataccaccaatctgtcttacatattcatttatccctgtagtttcattctttgctcctttaatacatgagcaagactgacatacaacacataaaatgagaacatctcaatatcatrttttttttttttttttggagacaaagtctcagtcactcagtcaggctggagtgcagtggcatgatttcagctcactgctacctccatctcctgtgctcaagcgatcctc

SEQ ID NO: 562196 - DNA, 567 bp, Homo sapiens
caagggtgtcatgccaccagtcaaaaggtactttgcttaaactggcattctttaacatgcatgttgtagtggtaagtacttcatttcatacagccacagttattaatactttgctaagggctacccagctgctaaaaactgctgttatctcatactgagaatgctagttctatacctttgctctcaggctgtgaggaaggggtgctagtccaaaaggccatgggattagatttaaaaaggctaaaattaaatcctagaaaataaagaatatttcattttttaacattttaggaaacaaaatgaatatgcttttaaaacataaaaagccagaatccctcaatttataccaccaatctgtcttacatattcatttatccctgtagtttcattctttgctcctttaatacatgagcaagactgacatacaacacataaaatgagaacatctcaatatcatatttttttttkttttttggagacaaagtctcagtcactcagtcaggctggagtgcagtggcatgatttcagctcactgctacctccatctcctgtgctcaagcgatcctc

SEQ ID NO: 562197 - DNA, 639 bp, Homo sapiens
ccctgcaatctcagcactttgggaggccaaggcgggtggatcacatgasgccaggagtttgagaccagtctgaacaacatggtgaaatcccatctctattaaaagtacaaaaattatctgggcgggatggcatgcacctggaagtcccagctacttgtggggctgaggtgggaggatggcttgagcctgggaggcagaggttgctgtgagccaagatcgtgccactgcactccaacctgtgtgacagagtgagaccctgtctcagaaaaaataacactttacagtttatcagcaaacaggaaagtcttgctaggcaatgtaattgattagttccgtgccctggattctgggctcttaactgtatgagcactgtaggtgtgagcagcaacaattaagaagctgcagaggtaaaggtataagggcagtgattgaggatgtctaccaagcagatttcagcaagtgtgtttcaagaagtatgcagcaatctgaaatacctaatcctgaaaaattgctagaatctagtcttttaattttggccagtatttagcagtagtttggccctctactctaaattaataaaaaataagtagtactatattatgagctgtgttatctaacagtttatcttagctagtagca

SEQ ID NO: 562198 - DNA, 476 bp, Homo sapiens
cacctggaagtcccagctacttgtggggctgaggtgggaggatggcttgagcctgggaggcagaggttgctgtgagccaagatcgtgccactgcactccaacctgtgtgacagagtgagaccctgtctcagaaaaaataacactttacagtttatcagcaaacaggaaagtcttgctaggcaatgtaattgattagttccgtgccctggattctgggctcttaactgtatgagcactgtaggtgtgagcagcaacaattaagaagctgcagaggtaaaggtataagggcagtgattgaggatgtctaccaagcagatttcagcaagtgtgtttcaagaagtatgcagcaatctgaaatacctaatcctgaaaaattkctagaatctagtcttttaattttggccagtatttagcagtagtttggccctctactctaaattaataaaaaataagtagtactatattatgagctgtgt

SEQ ID NO: 562199 - DNA, 566 bp, Homo sapiens
ctgactggtcacactaggggggcattttgttaccaaggccttgaaaataataaccaacactgcatacatgagggatgctagaagaaaggtctgagagccactcttcctggcactgaaggaaacagggcccatcagagcaaacaagtaccttttacctctctcatctccttggaagcaaatgtttataatctctggttttgtgtaaagtttrtaatagtatttttcattcaggttgctacctattagtggatggtgaaattaatttggtggatcacattcagaatatttttttaaaatcaaaagaatacaagctgggctcagtgactcacacctgtaagcccaacagtttgagaagaccaggcaggaggattgcttgagaacaggagttcagaatcagcctgagcaacatggcgagaccctatgtctacaaaaattttaaaatatgcccgttctggtggcatgtgcccatagtcctagctactcgggaggctaaggcagcaggattctttgttataaggagttcgaggctgcagtcgaacttctggtcgaaatcctggtcacgccac

SEQ ID NO: 562200 - DNA, 578 bp, Homo sapiens
taaaagttacaaggtaaacaggaaagaatggaatcatttcattgtgaaattgtttctaagtgttttaaatgctcttttgtgatttttattttttttttagtattctcccaaaacaccacctcgatggrcagaagatcagaattctttactgaaaatgattcgccaagaagtaaaggccattatggtaagtcacttaatttctctagctgtactttttattccaagattccttccctggccactctctcactttttttctgaagctggtcagaatgtccccttgccatccaaatagtatggcaaggggacattttggtctttttttttttttttttttaagacagggtcttgttgtgcaggctggagtacagtggtatgatcacagcttactgcggcttcgacctcctagctcaagagagcctcttggcttagcctgccacgaagccaggactacagacagtcacacgccactaggcccagctaattgtattttttgtagagatgggatttttccatgttgcccagggtggccttgaactcctggctcaaacaatcctcctgcttcagcctcccaaagt

SEQ ID NO: 562201 - DNA, 578 bp, Homo sapiens
taaaagttacaaggtaaacaggaaagaatggaatcatttcattgtgaaattgtttctaagtgttttaaatgctcttttgtgatttttattttttttttagtattctcccaaaacaccacctcgatggacagaagatcagaattctttactgaaaatgattcgccaagaagtaaaggccattatggtaagtcacttaatttctctagctgtactttttattccaagattccttccctggccactctctcactttttttctgaagctggtcagaatgtccccttgccatccaaatagtatggcaaggggacattttggtctttttttttttttttttttaagrcagggtcttgttgtgcaggctggagtacagtggtatgatcacagcttactgcggcttcgacctcctagctcaagagagcctcttggcttagcctgccacgaagccaggactacagacagtcacacgccactaggcccagctaattgtattttttgtagagatgggatttttccatgttgcccagggtggccttgaactcctggctcaaacaatcctcctgcttcagcctcccaaagt

SEQ ID NO: 562202 - DNA, 361 bp, Homo sapiens
cataaaaagaaggaacactatctaatccaagttatcaaaatagcaatagtacttctcgtattatgcgcaatatgattgtttgtytctaatgcagaaaaaaaataaagacaacaatatcgtcaggtttaaattctaagcagacaaaaaaattctttacaaaaaagtacatatagaatgatgaaagtaggcatgcttaaaagaaaaaggctaagagcaaagtaggactcaatgttcaaagagatttatagtaacatgtcattgctattttgggaggtttaacaatatattttaacattttaaaggtgcaacagcactactaagaaatataaaaataaaaaaatctactatgagaaaaaagctt

SEQ ID NO: 562203 - DNA, 361 bp, Homo sapiens
cataaaaagaaggaacactatctaatccaagttatcaaaatagcaatagtacttctcgtattatgcgcaatatgattgtttgtttctaatgcagaaaaaaaataaagacaacaatatcgtcaggtttaaattctaagcagacaaaaaaattctttacaaaaaagtacatatagaatgatgaaagtaggcatgcttaaaagaaaaaggctaagagcaaagtaggactcaatgttcaaagagatttatagtaacatgtcattgctattttgggaggtttaacaatatattttaacattttaaaggtgcaacagcactaytaagaaatataaaaataaaaaaatctactatgagaaaaaagctt

SEQ ID NO: 562204 - DNA, 441 bp, Homo sapiens
gaattctaagcaaatagtctgcagaactagtgatggatcatgaagcaaataaataatacgatttgtctgcatatgatgtagatgtcctcttggagtagacatatcaaaagaagttggagaagcttccataaaagtaccacaattaaaaatggagatatgatttctgttgttcaaaaaagtccctaaaggtagtattaaggttaaaattaagtttttattgttttgtgtatcaaattgtagaagatatataatattaattattcatcaacattttatttttttttttmtatttgatgttttacctgctcttctgagatactataatgtgttaaaagtcttacaagggaagatagtttttttcttttaattattaaaaaccaaaataaaacatcttttgagaaaggaatgtattgatgctggcaggtagaaaggaagctttga

SEQ ID NO: 562205 - DNA, 536 bp, Homo sapiens
ctaaagatttgcagttagaaaacctgtcttggatgctaacatgtttttctacctatttacttttaatatgggggtgatgaaaataatactacctgattgtcaaccttacaggcttgttataaacatcagatgaggtataaaggcataagcaagtgtcttataacttgtaaaattctgtattaatgaagaaatcctcatagataatggagtttttatgaggtagaaggggcttatgtgcaaagtactaagtttttacaaataagtaaacgtttttctgggcctccaaattgttgtaattttcaagttttcacaaaatgacatatttattaatttgaggtgttaatctcaattttatacctgaaatgctgccattgccttctcagtttcaactgttgattcaagaaaacgttcraaaatagatatggtcattattccactttccaatattaagtattgttgaaagcgattattgaaggcaaaaagtgttaatgcatagcctgctcttaagcaaatatcctaaaaataggagaaacagg

SEQ ID NO: 562206 - DNA, 571 bp, Homo sapiens
caatttttggtattcacatttccttagcatgtaatacaggtgcctgtcttcggcgtacggataaacccagaaggccamgagcaaaaatcgtgattaactttaaagagtttaacttgcaccccttgtatgatgccacaggatacaatactataaaccgccactcacacaagatgagttacagttgccatgggttaaatctgctgcctggaaaacaaattttaagtcctccacccagaagggtctggggaatgggacgcaacaaagaccaagccagaacaccccggagcccagacctgctcagaaaacgcgttccacgtgtgcgcgcccgcaagcccggcttcgcttcccgccccgcgtaggcgcccttagctgccctatagcgttcgcgcccggaccaggacgagtagaggggacggggccctcgagccatcgaggatataataaatacccgttagtcacaccacactaccttcctgctagcgcgaggcaggcaattaccatccactagccgcaagcagccagcgtctcacccgatgcgcaggcccaaccccgcacccgcacccgcacccag

SEQ ID NO: 562207 - DNA, 622 bp, Homo sapiens
agtttaacttgcaccccttgtatgatgccacaggatacaatactataaaccgccactcacacaagatgagttacagttgccatgggttaaatctgctgcctgraaaacaaattttaagtcctccacccagaagggtctggggaatgggacgcaacaaagaccaagccagaacaccccggagcccagacctgctcagaaaacgcgttccacgtgtgcgcgcccgcaagcccggcttcgcttcccgccccgcgtaggcgcccttagctgccctatagcgttcgcgcccggaccaggacgagtagaggggacggggccctcgagccatcgaggatataataaatacccgttagtcacaccacactaccttcctgctagcgcgaggcaggcaattaccatccactagccgcaagcagccagcgtctcacccgatgcgcaggcccaaccccgcacccgcacccgcacccagcacgcacgcgcgcgggcagagcggttgcagagagcgcggcactgagtccgcctcgcccgggggcaacgtgagattggcgctgctcgcagccaatccgctggcagcgagtctgtccgggaaagcttccgcaagctgcgcagccgggcctgagggcgt

SEQ ID NO: 562208 - DNA, 622 bp, Homo sapiens
agtttaacttgcaccccttgtatgatgccacaggatacaatactataaaccgccactcacacaagatgagttacagttgccatgggttaaatctgctgcctggaaaacaaattttaagtcctccacccagaagggtctggggaatgggacgcaacaaagaccaagccagaacaccccggagcccagacctgctcagaraacgcgttccacgtgtgcgcgcccgcaagcccggcttcgcttcccgccccgcgtaggcgcccttagctgccctatagcgttcgcgcccggaccaggacgagtagaggggacggggccctcgagccatcgaggatataataaatacccgttagtcacaccacactaccttcctgctagcgcgaggcaggcaattaccatccactagccgcaagcagccagcgtctcacccgatgcgcaggcccaaccccgcacccgcacccgcacccagcacgcacgcgcgcgggcagagcggttgcagagagcgcggcactgagtccgcctcgcccgggggcaacgtgagattggcgctgctcgcagccaatccgctggcagcgagtctgtccgggaaagcttccgcaagctgcgcagccgggcctgagggcgt

SEQ ID NO: 562209 - DNA, 275 bp, Homo sapiens
atggtagccactaccctaatgtggttattgaactcacgtgagatgctccagaaatattaaatgaataaattaaaatttgattgatcatagatagtcccctgatatgttcctgaaaacctgtacaaaaagctctgtatccaaaaggtgaacttaaagaagtcatgagggatgtttcatttcagayagctaaataaataaggtctttattatatctattatattttctgtcattttgtgcatgtcctataaggtgctttctatttatcattaaattg

SEQ ID NO: 562210 - DNA, 611 bp, Homo sapiens
gcataatgatgaatctggaaaaaacactgatgattgtttaaatcaccagataagtattggtgactttggttatggtcattgtagtagtgaaatttctaacattgataaaaacactaagaatgcatttcaggacatttcaatgagtaatgtatcatgggagaactctcagacggaatatagtaaaacttgttttataagttccgttaagcacacccagtcagaaaatggcaataaagaccatatagatgagagtggggaaaatgaggaagaagcaggtcttgaaaactcttcggaaatttctgcagatgagtggagcaggrgaaatatacttaaaaattcagtgggagagaatattgaacctgtgaaaattttagtgcctgaaaaaagtttaccatgtaaagtaagtaataataattatccaatccctgaacaaatgaatcttaatgaagattcatgtaacaaaaaatcaaatgtaatagataataaatctggaaaagttacagcttatgatttacttagcaatcgagtaatcaagaaacccatgtcagcaagtgctctttttgttcaagatcatcgtcctcagtttctcatagaaaatcctaagactagtt

SEQ ID NO: 562211 - DNA, 612 bp, Homo sapiens
gcagacttctggatccccaggaatacataggagcttttcaaagcctctggatatcttacaccccatgtctttcttttmcatttttagttgagttcttatttgccctagaaataatgatattgcagcattaggcaattgcaaaggtaaacaattgctgctgactcttcaacaatgccctaggggtataactgagctctctgggtcagatccaatagccatgacataaatacggatttcttggggaactgcaggtcacagtgacaatgctctagggttgtcttcttgagaagtttcaaaaccagcctttcccttttggtggctgcaaggcagctggttttccaggctaccacaccatgttggtgggaaagatgagatgagagatatcaagttaaaatgccatagcccttgctattctaaccaagtttcagtcatttttcttttgtaaacacttttcagagcgtcatgaactttggctaatttctggaattttgaaaaagttgactttgataattttgccagtattcttgttactttaatggaggaattttttttttttttttttttttttttgagacaagtctgtctctgtcccacaggctggagtgcagtggc

SEQ ID NO: 562212 - DNA, 612 bp, Homo sapiens
gcagacttctggatccccaggaatacataggagcttttcaaagcctctggatatcttacaccccatgtctttcttttacatttttagttgagttcttatttgccctagaaataatgatattgcagcattaggcaattgcaaaggtaaacaattgctgctgactcttcaacaatgccctaggggtataactgagctctctgggtcagatccaatagccatgacataaatacggatttcttggggaactgcaggtcacagtgacaatgctctagggttgtcttcttgagaagtttcaaaaccagcctttcccttttggtggctgcaaggcagctggttttccaggctaccacaccatgttggtgggaaagatgagatgagagatatcaagttaaaatgccatagcccttgctattctaaccaagtttcagtcatttttcttttgtaaacacttttcagagygtcatgaactttggctaatttctggaattttgaaaaagttgactttgataattttgccagtattcttgttactttaatggaggaattttttttttttttttttttttttttgagacaagtctgtctctgtcccacaggctggagtgcagtggc

SEQ ID NO: 562213 - DNA, 573 bp, Homo sapiens
acctataagaatacatcacgagataaggtgctaaatgccaagtgatttgtcctgacggttactctcatgagaaattagtgagaggaaggtctctgaagcttgagaatgtctccaaagatttcttagagcatctgagatcattactaacccttgatgacagtagagtacttaataaaaggggagaagaagggaaaggagtttggatggacgaacagcataagcaacattctggaattttctttaatgctctcatgaatgcattcttggaattttctaatatgtaaacattattttgtrgccaactgacttcaattatatgtagaaccatccaaaagtctcctctcaggtaggtaattctgaatgtatatttctgaatttccaaattagaaatttagagttagaaattttgagtttctcagccagacgaggtggctcacgcctgtattcccagcactttgggaggccgagggcggcggatcacgaggtcaggagatcgagaccatcctggctaacacggtgaaaccccgtctctactaaaaatacaaaaaattagccaggtgtggtggcgggcac

SEQ ID NO: 562214 - DNA, 512 bp, Homo sapiens
cacacatattgatttaattaagattaatttctctgaaaataatactttacaagaaacatttcattgttaaaattgcactttcttacaacagctacctcagaatgcatatatggtawgaatataacttttaagcaattctttttgaatttcacttcttagataaatacataatttataagctataatttatcctcattgaatgtccaagggctttatattttttttttgctgagctgtttcaaaccactctgccttggtgacattcataaaggtgcagctggccatatgggctgttggctaaatgattctgcaatgagatttgaatttatctagaacttgtttcattctgaaatcctggattcaggctctcatttggctccctatatacatcatttaattgaagaaaaagcttggcttttccaataactattctaaaagtataattgacagtaagctacaatttagttagtttgtatttgcatttgtgattttcctgtcatatgtggactgtt

SEQ ID NO: 562215 - DNA, 520 bp, Homo sapiens
atgctaagtgaaataagccaggcagagaaaaaaatatattgcatgatctcacttatatgtggaatctgaaaacatcagttaaactcagaagcagagtgtagaataatggttgctaggggttgttggggtggaggaaatgggtgctattagtcaaagggtacaaagtttcagttacacaggatgaataaattctggggagcatggtgactatagttaatatactaacatactatactgtatacttaaaatttgctaagaaagtagatcttaagtgttcccaccacacacaaaggttcactatgtgaggtgatacatatgttaattaacttgattctgtaatcatttcacaatgtacatgtttatagaaatatcatgtacaaatggggagatggtagtcaaacaaacagcataaacaatttttattcatcaattatacctcaatgctgagaaaaaataaaagtaggaaataataaaacaaaataaacgrcaaataatcaacaaagtaaagaaaaaagaaacc

SEQ ID NO: 562216 - DNA, 525 bp, Homo sapiens
cttggccaactgcaacttccatctcctgggttcaagtgattctcctgcctcagcctcccgagtagttgggattacaggcatgcaccacaacacctggctgattttgtatttttgtattttttttttttttttaagtagagatggggtttctccttgttrgtcaggctggtctccaactcctggcctcaggtgatccacctgccttggcctcttggcctgccaaagtgctggaattataggcgtgagtcaccacatctggcagacaatggattcttctaatccatgagtatggaatggttttccaacaaaattctattttgaatgtcagaaactaaattagtttttatttctcattacatttggggatcaaaagtggtttttctctttctcaaatctttgaagaagttataagattttaaagactaaaaaaatacttgaaattcctgtaggaattcctgtaggataatatacagaagattttataattgcaaactcagttattatgaagtacctgtcaccaagggt

SEQ ID NO: 562217 - DNA, 609 bp, Homo sapiens
aaaagtttatagcataatgcctactcaagagtggaaagatttcaataaacaacctacaatgcaagacgagtcacacctaaaattagtataagaagataaataataaagataagaggagaactaaatgaaatagagactgaaaaaatttaccaagaagtgtatttttaaaaaattgacttttggaaaagataagcaaaaacaataaaccattagctattaaaaacaagagaaaaagagagatgatccaaataaatgaaatcaggaacaataaaaggagactttacaactgataccacagaaatacaaagtattattggagactattawgaacatctatacactaacaaatagaaaaacctagaggaaattaataaattcctagaacatgcaacttacaaaggttgaaccatgaagaaatagaaaccctgaatggaccaataacaagtaacaaggattcaatcagtaataaaaatctcccaacaaagaaaagccctggattgctttactgttgaattttaccaacatatgaggaagaattaacaccaattctcaaactttttttaaaaaatggaataggtggaaattttttaactcattctataaggccag

SEQ ID NO: 562218 - DNA, 556 bp, Homo sapiens
acttggacacagggcgggaacgtcacacacaaggacctgttgggggatggggggctggaggagggatagcattaggagaaatacctaatgtaaatgacaagttgatgggtgctgcaaaccaacatggcacatgtatacctatgtaacaaatttgcatgttgtgcacatgtaccctagaacttaaagtataataataaaaaaagaaattggaaaaataatttatgaagaaaatgagattgttaataaggagaccaaaatttctgaagaaggaccaaagagatattctrggatgagaataaaataactgaaataaaaaaaattcactacagagtttgaattacagatttcagtaggaataacaaataatcagtagacatgaagataggtaaattaaaattatatagtattagaaacagattaaaaaatgaagaaaaactgttgagcctaagatacttttgggatatcattgaatgcaccaacatacaaatgatgggagtatcagaaagagaggagagaaagaaagaggcaaaaataaggttagaaaaaatattggcca

SEQ ID NO: 562219 - DNA, 545 bp, Homo sapiens
aatatcttgaatgtagagacagcttcaagatgctgactagaggcatcgggcacttgccttctccagacagaagaaacaaaacttaaccaaatagataatcacatttcagataaaacatctagtagagaacaccggagtccaaaagagaaatatctgagacacasaaggggaagaaagcaaggggttagcttggccaagattggctgtgagcccataggggctcctttttgcagagaaagggtaagtgggataccctcattggcttacatcctcactgtggactgctgcaatcccaaccattggagagctcctgtacccacattaaccctaagactagtgtgggtgttcatctggagacccaatgagggcattgtaccagatagaaaatgcactgggtcacacacactcctgagatctaagtggctacagcatggcaccactgtgagagcctagccatcaccattctgcatcctgctctgggaacaacagctgtcccatctccacatcctgggaacctctgtttatatcccctggtgtccacccag

SEQ ID NO: 562220 - DNA, 632 bp, Homo sapiens
atgttaatgagcaataagaaattatctgaagatacaaaactcactggtaatagtaagtacatagaaaagcagagaatattagaacactgttaagtgtggtatgtaaatacttttatcctaagtagaaagagcgcttaaccaatcaaaaatattaactacaaaatttttcaagacatagtccaatgtgacataaatagaaacaacagaaagttaaaaaggagaaggacaaagttgacgcatagagtwgttattagttttctttttgtttatatgtttgcttgtttatgcaaacagtgttaagttgttagggtaaaataatgggttataaaatagtatttttaagcctcatggtaacctcaaaccaaaaaacatacaatagatacacaaaaaataaaaaagcaagaaactaaatcatatcaccagagaaaattaccttaattaaaggaagacaggaaggaaagaaggaaggaagagaagactagaaaaccacaaaataattaataaaatggtagaagtaagttcttatttatcaacaatatcattgaatgtaaatggactaaactctcccgtcaaaagacatagaaaagctgaattattgaatcaatgaaaaaacaagacccattgaccccttg

SEQ ID NO: 562221 - DNA, 562 bp, Homo sapiens
agaatacaagaactcacctgtgagcaaatagcccccagagctggggacatagtaggaggcttgtggcggagcaataaccttcagacacccaaataatgacagataccactcaggagtctgtcagatcttagaaatgattacttttgctattctcaagtttttaaataaaatctctgcccccaggactgctcctagaaagactggctctatgcctgcttgctcaccaggtcaaataaccaacacaaaacactcctttatattcctgaagcatttactgtgagactcagtgaatcaaaggtctcaggcattcccatgcctagcaggttaaatgaatcctgcctgagagcttttccttgcagctagcttctggtaatgcagcagtgaacaaaagacagccactgcccgtatggaacttacagttcatcaatcagggagmcatcaaacaatatatatattttaaaagcaattgtcaattatttcaagtgcacagagctttgtaaaagagaaaaatgaaacctgaagcatatagacagggagatctttctacttatctattcatcta

SEQ ID NO: 562222 - DNA, 556 bp, Homo sapiens
aagcatattacatttcttgtccactttatttctattattattacattgtaatatataatgaaataattatataacccatcataatgtagaatcagtgggagctcagcaactagatgatcccatctgggagtgatgggagacagtgacagataatcaggcattagattctcataagaagtgtgcaacctagatccctcacatgcacaattcacaatagggttcatgctcctatgagaacctaatgctgacattgacctgacaggaggcagagcttaggcggtaatgcaagcaatggagagcagctataaatacagatgaagcttgctcacctactactcacctcctgctgtgcagcccagttcctaacaggccacagactagtattggtccatggctcatgggttggagacccctggtctcgatcatygaccattggcaatcaactcaaccttcagcccctctcctcttcctggaaggtggaactaaagttgcgacactgtaatacatagttggcaaccatcccaaagctatctgagacacccccacccccctctag

SEQ ID NO: 562223 - DNA, 437 bp, Homo sapiens
cctggggcgagtgtgtgatcattcaggactgactgaatgcatgatcgctgagcacatgcaaagaacaaactaagagcatacatgcctgtgcacagttagcaccaaggaaaccagagtgaggagytgactgacttaatgagtgtgtttgtgaataaccgtgggaacacagactttgcttccaagattcttatcaagagttccagacaggccaggcgcggtggcccacgcctataatcccagcactttgggagtccgaggtgggcggatcacgaggtcaggagatcgagaccatcccgactaatacggtgaaaccccgtctctacttaaaaaatgcaaaaaaattagccaggtgtagtggcaggtgcctgtagtcccagctactcgggaggctgaggcaggagaatggcgtgaacctgggaggcggagcttgcagtgag

SEQ ID NO: 562224 - DNA, 534 bp, Homo sapiens
aattacagtttaggggttgggcagtctctggtctcaagagtctgaacctccccagattgctcctagggattctacatcactattgtaaaacctaagatcagtgcttgggatattgtgcagaccctgcactggatggatcagctgacaccacccagacctgaaatctggctcaaccagttctgccatcccacccaggaacagaaggcagcaagaaaaactcacttcgaccccctrtgattccatctccaagctgaccaatcagcactccccacttcccaagcccctaccctccaaattatctttaaaaaccctaatccctgaataatcaggaagactgatttgagtaataataaaactctggtctcccgcacagccaactctgcatgaattactctttcttcattgcaattcccctgtcttgataaattggctctgtttaggcagtgggcaaggtgaacccactgggtggctacaatatgtgcatatggtacaaaggaaatcctagggagagccaataaagggaaaagtgcaaat

SEQ ID NO: 562225 - DNA, 567 bp, Homo sapiens
ggttgtggtgagctgagattgtgccgttgcactccagcctgggcaacaagagtgaaactctgtcaaaaaaaaaaaaaaaaaaaaaaaaagacatattcaggactgggtaatttataaagaaaaagaggtttaatggactgacagttccacatggctggggaggcctcacaatcatgatggaaggtgaaaggcacgtcttacatggtggcaggtaagcraggctgagagccaagtgacaggggaaaccccttataaaaccatcagatctcatgagatttattcattaccatgagagcagtatgggggaaaccacccccatgattcaattatctcccaccgggtccttcccacaacatgaaggaattatgggagctacaattcaggatgagatttgggtggggacacagccaaactatagcagactctgagggctaatctcctcccattccttctccttcccctgtttcaagcttgctcttacttttcccctatctgtctcagtctggggtcatcagaagcagaccttaaggtgagggtgtgtgggtgacaggtggaggatgcactccc

SEQ ID NO: 562226 - DNA, 567 bp, Homo sapiens
ggttgtggtgagctgagattgtgccgttgcactccagcctgggcaacaagagtgaaactctgtcaaaaaaaaaaaaaaaaaaaaaaaaagacatattcaggactgggtaatttataaagaaaaagaggtttaatggactgacagttccacatggctggggaggcctcacaatcatgatggaaggtgaaaggcacgtcttacatggtggcaggtaagcgaggctgagagccaagtgacaggggaaaccccttataaaaccatcagatctcatgagatttattcattaccatgagagcagtatgggggaaaccacccccatgattcaattatctcccaccgggtccttcccacaacatgaaggaattatgggagctacaattcaggatgagatttgggtggggacacagccaaactatagcagmctctgagggctaatctcctcccattccttctccttcccctgtttcaagcttgctcttacttttcccctatctgtctcagtctggggtcatcagaagcagaccttaaggtgagggtgtgtgggtgacaggtggaggatgcactccc

SEQ ID NO: 562227 - DNA, 444 bp, Homo sapiens
gaattccagcctgggcaacatagtgagtcctcatctctacaaaaaaatcaaaacatgaggccgagcacagtggctcatacctataatctcagcactttgggaggccgagacaggtggatcacctgaggtcaggagttcgagaccagcctggccaacatggtaaaactctgtctctattaaaaatacaaaaattagctgggcatggtggcacatgactgtagtcgcagctactcaggaggctgaggcaggagaattatttgaacctgggaagcagagattgcartgagccaagattgtgccactgcactccagcttgggcaacagagtgagactctgtctcaaaaaaaaaaaaaaaagcagggggggatagtggagcaagaggattgcttgagcccagaaggttgaggcagcaatgagctgtgatcgtgccaaagtactcctgct

SEQ ID NO: 562228 - DNA, 608 bp, Homo sapiens
gtcttaaaaaaaaaaattaatccttgatgtgttcaaatctgaggctgattcttttcttttgatagtatgaatagtgaaacacacaaactagaaaaaaagaaatgtaccaaagattttcctccattcaaaaataccayaagaaagacaatattagtttattatgacacttgaggtgtaaaatgtcagagaagaatgctctagagcttggttcttgtaccaaaaacaaccagtaaactggaaaaacaacaagaatcaactatcttccaagtatggaacctaattagacactaaaaacaaccaggaaagtgcttcatgcagaggctgctgatcttgactcacatgggcaaaccagtagctaccattccccatttctcagctttgccacaacagtaaggaatagcagcccccatctctggagcgacttattagtgccatagcaggcagtgggagaattttgtcctccaaaaattcaagtttgaatattttggtcagtttggcagatcactgagagacaggcacagaggcagatgcttgcctttatttaggccctctggggctaccgggcaggggaggcgcacctgcatctactggaagatctaataagacag

SEQ ID NO: 562229 - DNA, 534 bp, Homo sapiens
tcgaattcattcttgactagagcctgtatgcctcttccagggacatggaaactcttaaaggatttcttatgatcttcactaaataccttaagaagaatgccaaccagtgcccttttgtgtactgggacatatactcgtgattaaaacaggtaacatgaactctgactttaaaatgtattgtagatataaatgctctaagctagaaaaggttttccacatccacagtcaatgatgggagcctttcattcctcagaaataatccctttttaggtcatcaagaaagggtacaactgctgcagctcatgatgcaatatcttcatgagcccagagcacatacaaatcytaagggaactaccatagtacagcgctcattcttggcaccagaacaaatgaaacacactctatcctgcacacacctgccagagcaggccactttcctcttctgtgagatttaaaaagctccccaaaatgttattactcccatccccaatacacagaaaatagggaaaaggctgtttccagttcttggccttt

SEQ ID NO: 562230 - DNA, 524 bp, Homo sapiens
gtccctcccttgacacatggggataatgagattatggggattacaattcaaggtgagatttggggtggggacacagccaaaccatatcaggcattgtttctaccacttatggctctgctccttgttccaaataaaaagtgcctcaggtctcaccatgcaatgtcccaaggataccagcaggtctccagcattatgtccctgtacaggatcttctgagtgtcatccaggtcctkccactcctcccaggtgaagtcaacagccacatctttaccaatcctggtaatggcacatttcccctcaactcaagtcatcagcctcctgaatgcttcctccccatggactcataattgagatcaacatatgtgttggataaagccatagctcttgaaagactgtactggagacatcatttcttcttgctttggaaacaaatagagaactctagaagcatcacttcacagatgaagaatccaaccccagaccagcagagaagtgcctagaaatcaaggggtccagaaaggatg

SEQ ID NO: 562231 - DNA, 619 bp, Homo sapiens
aattatacctttggtgagcatttagtacttacttattggcaagcctatttctcaaaactcatcagttatcatttgtagactattttttaaaaaagatacagacattcaagrtgttgtatttaatatgtgtgtataaatatatacgtgtttatattaacatatattttctaaagtaaatataaactattttatatagaatacacacacagaaaagcataaatcagaagtgtacaactaaatgaactttcacaaattgaacacacctatgtaaccatcagccaaccaaagagaacattattatcaaccaagaaaactccctcataactccctctagtttataaccccatgtgttaattaatttaaacatacagattagttttatcaaattttaactaatgaaatcatacatatttatctacagcgttacatgtgattttgtttattctcaatctgtacacagctgtatcatgttccattatgtgactctgccacaattatttcatccattatactctaggtatatatttgggtattgagcataataaacgactagctaattaatcattatatctctgatattgaaaatttttttttaaatttaaaaacatatactttataa

SEQ ID NO: 562232 - DNA, 593 bp, Homo sapiens
cacaaggtccggagtttgagaccagcctgaccaatatggtgaaaccccatctctactaaaaatacaaaaaktagcctgccatggtggcacgtgcctgtaatcccagctactcgggaggctgaggcagaagaatcacttgaacccaggaggcagaggttgcagtgaactgatattgcaccactacactccagcccgggcaacagagtgagattctgtctcaaataaaaaaaattaaaaaaaaagaaagaaaaagaaaaatcttttcttgagagaaaaaaagaatgtagagatggggaaagaataatgtttggctaataaaatcagaaatatactactctaaacagaagtgtctcaaattattccaaaaagtgagtggatatgtcatgtccatatagcaggaaaaaaaatgtgatctcaggtgaacagaaaaaggagaaaaggaaattttcctctcagtgtcatattttttaaaagacctagcctttgggaaaagttgataaaatgctttaacctgacatctcaatagtaataatggtaacaacaagtaatatcctaacattaaaaggtggtgatggggaagggaaaatcaatcc

SEQ ID NO: 562233 - DNA, 593 bp, Homo sapiens
cacaaggtccggagtttgagaccagcctgaccaatatggtgaaaccccatctctactaaaaatacaaaaagtagcctgccatggtggcacgtgcctgtaatcccagctactcgggaggctgaggcagaagaatcacttgaacccaggaggcagaggttgcagtgaactgatattgcaccactacactccagcccgggcaacagagtgagattctgtctcaaataaaaaaaattaaaaaaaaagaaagaaaaagaaaaatcttttcttgagagaaaaaaagaatgtagagatggggaaagaataatgtttggctaataaaatcagaaatatactactctaaacagaagtgtctcaaattattccaaaaagtgagtggatatgtcatgtccatatagcaggaaaaaaaatgtgatctcaggtgaacagaaaaaggagaaaaggaaattttcctctcagtgtcatattttttaaaagacctagcctttgggaaaagttgataaaatgctttaacytgacatctcaatagtaataatggtaacaacaagtaatatcctaacattaaaaggtggtgatggggaagggaaaatcaatcc

SEQ ID NO: 562234 - DNA, 554 bp, Homo sapiens
acctgtcactattagttgaggctgatagaaaggttaacaaattataacactaaccattttctcatgtttaaattaaatccttttgaacatatcatttagagttgtccttaccaataattagctgtatgaaagtgtgaatgtttcgaaagctgttttgtatggggtcaaaaagaccatgctgactcagttttgcattmtcagccttaatttctctttgtcagcctattttggtcatttgttcaaacgtttacttgttatgagaactggggaaatggcataggaccttattgtttactttgaagactagtgcttgggtgtaaccctgaccgattggttgtcctttgacactcagattttccatctgtaatatgataattcccttttcttttttactctgatgacattatataaagaatatataaatttagaatgtcattgtttctaatgatatttccaaataacagtttccttcttcaagcaaatacttatgttatatatagtattattccattttgttcccacgctaattgctttggaatttttctaaaatagaa

SEQ ID NO: 562235 - DNA, 554 bp, Homo sapiens
acctgtcactattagttgaggctgatagaaaggttaacaaattataacactaaccattttctcatgtttaaattaaatccttttgaacatatcatttagagttgtccttaccaataattagctgtatgaaagtgtgaatgtttcgaaagctgttttgtatggggtcaaaaagaccatgctgactcagttttgcattctcagccttaatttctctttgtcagcctattttggtcatttgttcaaaygtttacttgttatgagaactggggaaatggcataggaccttattgtttactttgaagactagtgcttgggtgtaaccctgaccgattggttgtcctttgacactcagattttccatctgtaatatgataattcccttttcttttttactctgatgacattatataaagaatatataaatttagaatgtcattgtttctaatgatatttccaaataacagtttccttcttcaagcaaatacttatgttatatatagtattattccattttgttcccacgctaattgctttggaatttttctaaaatagaa

SEQ ID NO: 562236 - DNA, 554 bp, Homo sapiens
acctgtcactattagttgaggctgatagaaaggttaacaaattataacactaaccattttctcatgtttaaattaaatccttttgaacatatcatttagagttgtccttaccaataattagctgtatgaaagtgtgaatgtttcgaaagctgttttgtatggggtcaaaaagaccatgctgactcagttttgcattctcagccttaatttctctttgtcagcctattttggtcatttgttcaaacgtttacttgttatgagaactggggaaatggcataggaccttattgtttactttgaagactagtgcttgggtgtaaccctgacygattggttgtcctttgacactcagattttccatctgtaatatgataattcccttttcttttttactctgatgacattatataaagaatatataaatttagaatgtcattgtttctaatgatatttccaaataacagtttccttcttcaagcaaatacttatgttatatatagtattattccattttgttcccacgctaattgctttggaatttttctaaaatagaa

SEQ ID NO: 562237 - DNA, 603 bp, Homo sapiens
catccaactttttctatttctcttgataattacatttttatttctaaataatgtaaatgtataaccacttctggatttaaaaatttgtacttattatttattgctttcccaacacagaaggggagaattggatctttcaccaccctctctccctccacccaccgtaccataaatatttccttcccccaatctaatatagttatttaatacttttgattagatagygtatctgttattgttgccatgcaaatgttaacagtcaagctgtaatgattacatttctgttcttgaataactttttgttttccctgggatcaatctttgctcattttggttgtttgtttaatatgtaataaatacataattcatcttcagactccttaacaaaattatcaaactcccctcagtaaagttgaacacatgaggtagtctgtgtgtcctaatgagttcttcctaggatgaatacccgccaggaggcttcaaccagccttgtccctgggctgctcactctccaaggttcactacactgccatgaccttgggatttcccttcactctaatcccaagaaatcatgcctttgaaccatgttagattttctgtttc

SEQ ID NO: 562238 - DNA, 654 bp, Homo sapiens
ccagtcctgcagagggaatgaactggatcgggcaccaaggaacscagacacagcccaaggctcagggcagaagcacaggaacagctgacagggaagacctggacttgccagtccactgcccatggacttgaactcagcaggacatacattttgcagaacagagtgagcatgaggctgccttagaaaatatctcctacaggacatgcctcagcacccagcctagcactctggtctcactgatgcttctgaagacagataagttcttaatcccttcagcatttggggggacattcaggagtacacaaaagtccagaaggcctggtcctttcccttgaggggcttaaatccaacaggaaagaaaggaaatgtccacagatgactgaaatacagagcacaaagaaaaagcaccataaaaaaaaaatggccaacaagtgctatgggagatgagaccactgccacctagggaaactgagaaacacttcccagaagaggccattaaaaattaagaaatagagccggcgcgatggctcacacctgtaatcccagcactttgggagactgagacgggtggattacttgaggccaagagttcaagaccagcctggccaacatggcaaaaccccgtctctactcaaaatgcaaaaattagccggg

SEQ ID NO: 562239 - DNA, 478 bp, Homo sapiens
ttgtctaaaaaaaaaaaaaaatccaggaagtcattaaagctataccaatgatgtctttgaagtggaccaaaatccaaaaaaattatactaggtggaattctattaaaaagtctcatgatgcccactcttacagaactaaagtgtcccgcctttatctagaggggaaaaacaaaaaaacacagaaacttatttttctggtagtaaagacctgctggtttaagctttcctctcagctgaggattcctagagctgcagaccaggaggtatggtgttggcaatcagtttagagactaatgagctatggtaaaggctgctagttgttccccagtagcttctgtctcctgctttcttaataatagaacaaaatcctgacttttaaccaggcacctagctaaaagaygacattttccagcctcctatttaactagcgtgatcatagactaaattctgtctagtgagatggaagtgttgcatgaaa

SEQ ID NO: 562240 - DNA, 566 bp, Homo sapiens
aagcttgtgcatgtgtcactagttcttgtgccatggttttcagctccatcaggtcatttaaggtcttctttacactgtttattctaattggccattcatctaatcttttttcaaggtttttagcttccttgtgatgggttcaaacatactcctttagctcagagaagtttgttattatcgactttctgaagcctacttctgagaactcatcaaagtcattctccgtcctgctttgttccattgctggcaaggagctgcaatcctttggaggagaaggggygctctggtttttagaattttcaacttttctgctctggtttctccccatctttgtggttttatttacctttggtctttggtgatggtgacctacagatggggttttggtgtggatgtcctttttgttgacattgatgctattcctttctgtttgttggttttccttctaacggtcaggtccctcagctgctggtctgttggagtttgctggaggtccactccagaccctgtttgcctgggtttcaccagcggaggctgcagaacagcaaatattgcagaacagaaaa

SEQ ID NO: 562241 - DNA, 566 bp, Homo sapiens
aagcttgtgcatgtgtcactagttcttgtgccatggttttcagctccatcaggtcatttaaggtcttctttacactgtttattctaattrgccattcatctaatcttttttcaaggtttttagcttccttgtgatgggttcaaacatactcctttagctcagagaagtttgttattatcgactttctgaagcctacttctgagaactcatcaaagtcattctccgtcctgctttgttccattgctggcaaggagctgcaatcctttggaggagaaggggtgctctggtttttagaattttcaacttttctgctctggtttctccccatctttgtggttttatttacctttggtctttggtgatggtgacctacagatggggttttggtgtggatgtcctttttgttgacattgatgctattcctttctgtttgttggttttccttctaacggtcaggtccctcagctgctggtctgttggagtttgctggaggtccactccagaccctgtttgcctgggtttcaccagcggaggctgcagaacagcaaatattgcagaacagaaaa

SEQ ID NO: 562242 - DNA, 566 bp, Homo sapiens
aagcttgtgcatgtgtcactagttctygtgccatggttttcagctccatcaggtcatttaaggtcttctttacactgtttattctaattggccattcatctaatcttttttcaaggtttttagcttccttgtgatgggttcaaacatactcctttagctcagagaagtttgttattatcgactttctgaagcctacttctgagaactcatcaaagtcattctccgtcctgctttgttccattgctggcaaggagctgcaatcctttggaggagaaggggtgctctggtttttagaattttcaacttttctgctctggtttctccccatctttgtggttttatttacctttggtctttggtgatggtgacctacagatggggttttggtgtggatgtcctttttgttgacattgatgctattcctttctgtttgttggttttccttctaacggtcaggtccctcagctgctggtctgttggagtttgctggaggtccactccagaccctgtttgcctgggtttcaccagcggaggctgcagaacagcaaatattgcagaacagaaaa

SEQ ID NO: 562243 - DNA, 608 bp, Homo sapiens
tttttttgaataattgttctttggtaagttttgctgcctttcttatcttttttcttttaccaatgtggtgccaggtaggattcagtgcaagcaaatgatggggaattgcagttagagttgttcctatggcctgtggattcccaggaaactgagtttctcatcctctcttttgggaagtaaaagcacttacctcagcaagtgttggtgggtgaaagtagtagcatgacatgttgcatatgctctttwatcaggttattccagagagttattcattggtctctccctttttaaaactagcccgtataggtctggattttaataaaagtgacttggcattaaggtatgagctccccaagtatactgagagtgatcaagggttcaaaaacctgaccagacaaaagtaacctatcagtctttaaaaaatataaagcaaaaaaccacacacttaaatttaaaacataacactgatatctaaattcaagtttgtggtatctaacttcatatctaaagtgaactatattcttcagctactttaccagtaagtctgatgtccaaataaaaagtaaatttgatttagatttaaaatcttttctttagaattttttttg

SEQ ID NO: 562244 - DNA, 540 bp, Homo sapiens
acatatacctatgtaacaaacctacacattcttcacttgtatcctggaacttcaagtacaattttttaagaagccagtgatgcacatcatttttgtcatattaatgttcggcactgtattcgtcagtgttctctagagagatagaactaattttatatatatatcctatatactatatatacctatatatatcaaatatatattttatatatatatatmtctcaaggggagtttaataagtagtattaactcacatgatcacaaggtcccacaataggccatctacaagctgaggagcaaggaagcctgtctgagtcccaaagctgaagaacttggagtgtgatatttgagggcaggaagcatccagcataggagcatggtgtaggctgggagcctaagccagtctaaccttttcatgttgtttctgcctgctttatgttctgaccatgctggcagctgattagatggtgcccacccagattaagggtgggtctgcctttctcaacctactgactcaaatgttaatcttctttggcaaca

SEQ ID NO: 562245 - DNA, 584 bp, Homo sapiens
tagcctatccctaaaaaactgagggtcctggaaatgtaaccatttcaatgtcatctttttatattattaacttaagaaaaataggtgctcttaaaatatttttttaagatttgaaaacaaaaagaagtcagaagcctaatcaggtgaatggcaaatgcctaataggagctacattaggtgtaacgtgaatgcctactaatttcctattgaaactcttgcagcattgcccttgtttaacaagaggaatgagcaaaatcattgtcacagtggaaaaggtctacctggcgacamtttcttgggcgtttttctgctaaagtgcttgctaagtttctgaaaccacacccataaccagatgttatggttcttttttttttttttttttttttttttgagatgaagtctcactcttgtccctcaagctggagtgtaatggtgtaatctaggctcactgcaacatccacctcctggattcaagcaattctcctgcctcagccccctgagtagttgggattacaggtgcctgacaccacacctggctagtttttgtatttttagtagagatggggtttcaccatgttggccag

SEQ ID NO: 562246 - DNA, 446 bp, Homo sapiens
cattgaaagatctgctcttgattggtcattatggctccagcctgtattcccagcactttgggaggccaaagcaggcagatcacttgagaccaggagtttgagaccagcctggccaacatagcaaaagcctgtatytactaaaaatacaaaaatctagctgggcatggtggcacatgcctgtaatcccatactcaggaggctgaggcatgagaatcactggaacccgggaggtagaggctgcagtgagccaagattggacaaccacactccagcctcattgactgagggacactctgtctcagaaaaaaaaaaaaaaaaaaaaaaaaaccggaaggaaaaagaaccctctgctcttgacctgggcataatggtttttacactcattcaggggaaattggctcaactttaatttgttagtcaaaattgtgtaagctgaaccagttgaa

SEQ ID NO: 562247 - DNA, 446 bp, Homo sapiens
cattgaaagatctgctcttgattggtcattatggctccagcctgtattcccagcactttgggaggccaaagcaggcagatcacttgagaccaggagtttgagaccagcctggccaacatagcaaaagcctgtatctactaaaaatacaaaaatctagctgggcatggtggcacatgcctgtaatcccatactcaggaggctgaggcatgagaatcactggaacccgggaggtagaggctgcagtgagccaagattggacaaccacactccagcctcattgactgagggacactctgtctcagaaaaaaaaaaaaaaaaaaaaaaaaamcggaaggaaaaagaaccctctgctcttgacctgggcataatggtttttacactcattcaggggaaattggctcaactttaatttgttagtcaaaattgtgtaagctgaaccagttgaa

SEQ ID NO: 562248 - DNA, 460 bp, Homo sapiens
tgcttttacaccattccacaaattgataagctgtactttcatttttgtttacttcaaaatacatttaaattaatttcgagccattttatttttgtgttatttggaaatatgttgtttaatccctaaatattttgaactttccacctttctttatgttattgatttctagttcaattccattgcagtctgagaacacagcttgtgtaacttatattcctttaaatgtgtttaggtgtaaggatttcctcccccagaatatagtctatactgatgaatcttacatgtgagcttcagaaaaatgtgtattttgctgttgttggataaagtagtctgcaaatttcagttagatccaattaattaatggtggtatatcattactgattatttgcctgctatgtctatcagtaacttaamaaagaggtgcaggaagttttgtggtttttgttttatttgtttgttt

SEQ ID NO: 562249 - DNA, 592 bp, Homo sapiens
ctgccttctttcagtgaggccctgtgagagtcctctaatttttgaagctttgctggattccagttcaccatcaggatagaaggaaatgagaacatttttgttccttgctataaggaagtagcttaaagcaatctctctccaaatgtccttctgcctctcatttcccacctgcaccccaacacacaggcaccaggaaatctcagcaggacagccaagtgcttcatgcagaagcaattagacaaggttataagattctcttcaccttctcctccatgttccccgcagcttatgcagccttcggggtaagcaggaagcagtagagaatccaccaagctcacagaacctctcccagcaagcaaatcatttcaatgtatcacatttaaagtaattcaccagttagaattcaggcctgccaacataccgaatctttctccctatgttgttcaatacataacacttaatagacactttacctataaactcctactttgggagggggtgtgttttaggctccaaatgactgggagttaattcttcatsgaaaaattaatggaattgcagtgagacaaccttatttttgcaaaaaaaaaaa

SEQ ID NO: 562250 - DNA, 536 bp, Homo sapiens
ttccagtctttgtggaatgctaatctggacatgcataaatgaaaattccacagactggacaaagaataacttccaaggtattaacagttaaataatcccaaaactcacacagaccttggagatattcaagttactacctgtagactggagagattcagtgaagacctcaggcattaataatgcttacatggacttggcacagtggctcatgcctttaatcccagcactttggtaggctgagatgggcagatcatttgaggtcaagagttcgagaccagcctgaccaacatggtgaaaacccgtctctactaaaaatacaaaaaaattagctgggcaaggtggcacatgcctgcagtcccagctactcaggaggctgaggcaagagaatcgcttgaacctcagaggtggaagttgcagtgagcagagatcacactgctgcactccagttgggcaacagagcgagactcyatctcaaaaataaataaataaataaaaaatttaaatgcttacatgaaaagccacacttcaatagcagg

SEQ ID NO: 562251 - DNA, 618 bp, Homo sapiens
tttattgaaatagcaaaattattatttaaaattaacatacttaatggaacaaaagctagtagcaaaaatgtatgaatatccattataaaaacacttaggatcatttaatttacctactagctatctagtaaaatcaagttttattttttcaaattttatttgcattctttcatagttgagaatttgcaatgtatctcaattacagaagcaagcttatctcactgcttatcaatattctcacccttaaagtgagaatattatgcttactctacccatctcacagatcaaacaaaataagttgtgatacagaataatgttaccttgtagggcagaaaaaattcctgtaaggtaatatacagctttctgtgctaaccttataactctaaacataaactaaaatatyacagtaacatgattatcagttataattattaattgcatgattatagtgatattaattataaaacattccataaaattatgaaggaatttcttagtggcatcgtcatccttctaatgccaaaatacttcttttgaaagtcatccatgtcatttattttattagtgctatatagaatatatttaaaaccttctgatttgctccacaatagatataaa

SEQ ID NO: 562252 - DNA, 537 bp, Homo sapiens
aaagttgaaaatttgtagaaacaaataatgatggaaccacaacatatcaaacttacggaatacagcaaaagcagtactaagagggacttttatagctataactgcctacataaaaaataaataggaaaactttaaacaatctaatgatccatcttaaagaactagaaaagcaggagcaaactgaactaaaaattagtagaagaaaataaataataaagatcagaaaagaaataaatgaaattgaaataaaatacaaaaggtcaataaaacaaaaagttttttttttgaaaagttaataaaaattccgtayaaacctttagccagatattttttaaaaaagaaggaagatccacataaataaaatcaggaatgaaaaaggagatattacaactgatattgcagtaatccaaaggatcattagtggctactctgagcagctatatgccaataaattggaaaaatctagaagaaatggaaaaattcctagacacatacaaattaacccaggaagaaatacaaaacctgaacagaccaaca

SEQ ID NO: 562253 - DNA, 426 bp, Homo sapiens
ctcggccaggtgaggtggctcacatctataatcccatcactttgggaggccgagacaggcagactgcctgaggtcaggagttcaagaccagcctggccaacatggagaaaccccatctctactaaaaatacaaaaatagctgggcatggtgccatgtgcctgtaatccctgctactcagtaggctgaggcaggagaaacccttgaacctgggaggcggaggttgcagtgagccaagatagcaccattgcactcwagcctgggcaacaagagcaaaactacgtctcaaaaaaaaaaacctgtgaagcacaaaatttatagcagaaagacaatatatgattgcatatatatatatatacacacactatacataacatatatattacatagatgcaatacatgatttatatgaaaagaagtggatttgt

SEQ ID NO: 562254 - DNA, 532 bp, Homo sapiens
agcaagatgctgagagatttcatcrtgctactcaaaacagcatgcaatttaaagtttaggaattgtttatttctggagtttttcatttaatatttttagactgtggttgactgtgggtaacttaaactgctacaagtgaaaccacgaataagtggtggacttttgaggagtctcagtcacatgactcgtttttcacgacatgtctccaagcaccaaaataagcttgtaaagtcacattctctagctttccaaaaactgtgcagatacacaatttgataggcaataatagactctctctccaaattgctaaagttatttacaattgaaaatctgacacaaatacagattaaggagaaactaacagaattcaatttcacaaaataatttatttcttgattctcagccagttagtagtcatgtaaaacctatctatgataagaaaacaggattgaatagggctataaccaggaaggttaaacttggataattgcacaattgcattaaaaccatctatcaagtctaaatgcctacc

SEQ ID NO: 562255 - DNA, 529 bp, Homo sapiens
agagaatgttccttaaatgagggagagattcacatttgacacatracctggccattcagaccagatactgtctcccaccttactctgtcttcttggcttaacataaattcctcgaaataaccacaatattcattatgattatggaactattgcctgaggccccctaaattagcttcacttttcaattcaggacagtttccagaactcctaaccttcacagggacccccttgagtgatgcctttctaagctcatacagaacttgaaaatgggattcaggtaaaaaggtatgcttttataacagtggaatatcagtcagagggcaaaatgattgaatagcagtggtgctggaatgagctttcactggctcagaaaagccaagtgtgcacatctctttgccgatgctgtgtttagatatgtcacattggtgacttgaaattgtctttaagtagtatttgccaccatagaaatcaatgagcgccatgaatcttagctttctttttcttttctttcttttctgtttttttaggg

SEQ ID NO: 562256 - DNA, 529 bp, Homo sapiens
agagaatgttccttaaatgagggagagattcacatttgacacataacctggccattcagaccagatactgtctcccaccttactctgtcttcttggcttaacataaattcctcgaaataaccacaatattcattatgattatggaactattgcctgaggccccctaaattagcttcacttttcaattcaggacagtttccagaactcctaaccttcacagggacccccttgagtgatgcctttctaagctcatacagaacttgaaaatgggattcaggtaaaaaggtatgcttttataacagtggaatatcagtcagagggmaaaatgattgaatagcagtggtgctggaatgagctttcactggctcagaaaagccaagtgtgcacatctctttgccgatgctgtgtttagatatgtcacattggtgacttgaaattgtctttaagtagtatttgccaccatagaaatcaatgagcgccatgaatcttagctttctttttcttttctttcttttctgtttttttaggg

SEQ ID NO: 562257 - DNA, 520 bp, Homo sapiens
aatacctgaggctgtgtaatttattttttaatggtttatttggctcagagttccactacctgaaagattgagtacctagttaaggcttcaggctgcgtccacccatggtggaaggcaaaggggacccagggtgtgcagacctcatgcagcaaaagaggaagcagggggagcagaggaggtgccgggtgatttttaacaacaagctatcttgagaactaatagagtgacaactcactcacataccaccatcaaggggagaawgtaatctatttatgaaaaatctgcccccatgaacaaaacatttcccattaggcttcaccttcaacactagggataaaatttcaacgtgggatttggaggggatgaacattcaaactatagcaagagtttttcataggaatgtaaggtttatttgacttgaaaatcaatcaatgtgacttgctcttttaacagaacaaacgagcaaaataagatagtattttcaaaagatgcagaaaaagtattggcaaaatttaacatc

SEQ ID NO: 562258 - DNA, 302 bp, Homo sapiens
  misc_feature 256, 257, 258, 259, 260, 261, 262, 263, 264, 265, 266, 267,268, 269, 270, 271, 272, 273, 274, 275, 276, 277, 278, 279,280, 281, 282, 283, 284, 285, 286, 287, 288, 289, 290, 291,292, 293, 294, 295, 296, 297, 298, 299, 300, 301, 302: n = A,T,C or G
cccattggtgattctggaacacattgtttaatttttatgtattagcacaggtttcaaaattcctcttgttattgatttttaattttattctcttgtggtctgagaagacgcttgatatggtkttgagatttttaaatttgttgagacttgttttgtggcctaacatatagtctgtcctagataatgttccatgtgctgatgagaggaatatgtattttgcagaatgtgtatatgcattatggatgaaatattctgnnnnnnnnnnnnnnnnnnnnnnnnnnnnnnnnnnnnnnnnnnnnnnn

SEQ ID NO: 562259 - DNA, 644 bp, Homo sapiens
tatttttgactacctgaaaattagccctatttagggaaatggagttagaagaaggcttagtggaatatatagagcttgggtacgagtgataagcctcaaagaagtattataaaaattattggctaagagtaagggtaaatcataaagtcaggagttggaccaagactgttcagattccatgcttattatctttcatctacacatactttctcttaagtgaaaacagattcatagactaagtccctatttttagcactaacattattatcatgctcaacacaagactgcccaaatatatttctaggagttaggcatgttgcaaaaaagtgaaaatgacagatatggtgtgctgcttccagactagctattttcttccatctccgtcatgggacataatttctatatatgggcaaagcctatctttgtatacagtccatcagaagcagcycagctagtcatcaaagctcataagctaaagagacaacacttacacaagaacaattcatggttcagagctgattaatcacacctaattagctggcctactaattgatcccggaggctgtcaccatttaacctctggtaaacgggctcaatactttcaaactcttctggagatgaatgagtagaaactccattggttg

SEQ ID NO: 562260 - DNA, 533 bp, Homo sapiens
tgaaggcctatgcttcaaatcccagctttatttatgtacawgctgagtattttatatgatatttatgatgattaattgtagttgtcaatttgactagactaagagatacccagacggctgggcaaacattatttcagggtatgtctggaaaggagttgctggaaaagattgggacttcaatcagtggactgagggagattcacctttatctaatacgggcaggcatcaaccaatccattggaggcctggatagatcaaaagggcagaaaggtaaatttgctctcttttctggagctggaaaatctatcttctcctgcccttagacagcagatgtacttcaagttctccagtctttggactctgggatgtgcaccaatggccctctgggttcgcaggcctctggcttctaactgaaagttatgttacctggttttcaggccttcagacttagactaagccatgctactagctttcctggttctccaccttataggaggcacactgtgggacttctcagcctacataattgtgtg

SEQ ID NO: 562261 - DNA, 451 bp, Homo sapiens
aaaattagacagcactgccaatatcacctgaaatctgtaaatccttttaaagttgcaactatttcagtgagaagtggcacaatttttcagacctttgttctcgtctcttatgaccaatgcatgctcattgcttcttcatgccctatacccatgtccctgccacttccccaagccacagccatagagacctggtccaaaaaaagctaatcttaacattaacccaagaaagtcttattaatgaaaaggtttgctaaaagcactctatttattaattatttggccttagagaagtgtgaaatccacacatttgaagtgctaaacaccgctagtttataatgaagaatctttaatgatgcaatgctgccgatttctggttttttgactcaaaggtatgactgcctagattcttctgaggaaactggactwatgagctgtgtgaacttgggaaact

SEQ ID NO: 562262 - DNA, 398 bp, Homo sapiens
tgtggaaagtagtgtcatgattcctcaaagagccaaaaaaaaaaaaaaaaaaaagaactatcattcaacctagcaatcccagtactgcatatatacccagaggaatataaatcattctaccataaagacayatggatgcgaatgttcattgcagcactattcacacaatagccaagacatggaatcaacccaaatgcctgtcaatgacattggatagagaaaatgcagtacatatataccatggaatactatgcagccataaaaaagaacaagaccacgtcctttgcaggaatatgagtgaagctggaggccattatccttagcaaactaatgcaggaacagaaaaccaaataccaaatgttctcactcataagtgggagctaaatgatgagaacaca

SEQ ID NO: 562263 - DNA, 521 bp, Homo sapiens
aaagcacctaccgatttccaagaaattggaagtmacatgaagaaaaattgtccagtaacaatagcaaagtccttttcacagggcttaagagtgcaacctcagcactttgcatattgatggcagagaggagaaaaaaacccacatgctgtaaaacacgggtgttggacggaaacaccactacaggagtctgagaaagggaggcagccagagaaacaaggccaggtgcaggggctcagacccgaaatcccagcacaagaaacagggctgggcgccggggcttacacccgaaatcccagcacaagaaacagggccgggcaaggggactcacacccaaaatcccagcgtgagaaacagggccaggcgtggaggctcatagctgaaatcccatcgtgagaaacagggccagtgtggaggctcacacccgaaatcccagcacaagaagggcgtaaaggcaggtgcctgtggtcccagcaacttgggaggctgaggcagagggatcacttgagcccaggaagccgagg

SEQ ID NO: 562264 - DNA, 521 bp, Homo sapiens
aaagcacctaccgatttccaagaaattggaagtcacatgaagaaaaattgtccagtaacaatagcaaagtccttttcacagggcttaagagtgcaacctcagcactttgcatattgatrgcagagaggagaaaaaaacccacatgctgtaaaacacgggtgttggacggaaacaccactacaggagtctgagaaagggaggcagccagagaaacaaggccaggtgcaggggctcagacccgaaatcccagcacaagaaacagggctgggcgccggggcttacacccgaaatcccagcacaagaaacagggccgggcaaggggactcacacccaaaatcccagcgtgagaaacagggccaggcgtggaggctcatagctgaaatcccatcgtgagaaacagggccagtgtggaggctcacacccgaaatcccagcacaagaagggcgtaaaggcaggtgcctgtggtcccagcaacttgggaggctgaggcagagggatcacttgagcccaggaagccgagg

SEQ ID NO: 562265 - DNA, 521 bp, Homo sapiens
aaagcacctaccgatttccaagaaattggaagtcacatgaagaaaaattgtccagtaacaatagcaaagtccttttcacagggcttaagagtgcaacctcagcactttgcatattgatggcagagaggagaaaaaaacccacatgctgtaaaacacrggtgttggacggaaacaccactacaggagtctgagaaagggaggcagccagagaaacaaggccaggtgcaggggctcagacccgaaatcccagcacaagaaacagggctgggcgccggggcttacacccgaaatcccagcacaagaaacagggccgggcaaggggactcacacccaaaatcccagcgtgagaaacagggccaggcgtggaggctcatagctgaaatcccatcgtgagaaacagggccagtgtggaggctcacacccgaaatcccagcacaagaagggcgtaaaggcaggtgcctgtggtcccagcaacttgggaggctgaggcagagggatcacttgagcccaggaagccgagg

SEQ ID NO: 562266 - DNA, 546 bp, Homo sapiens
tttaatgtacatttttcttggttaaaatctatttcttgtataaacagtttgggttaaatgaactgcttagtcaactgtaaaatgcccttgtgtagtcatacttcttttcatttcaactctttatatgaaaaaactgtgtatttgaaagcttcttatagaattaacacttctatttggagattaaaagaatgttcaaactagagtcttggggaatacgatacacctccacacctatctcatgttttaaatttagaaactcgtgacccagcaaatggcagctataagaaacatctattccaggccaggctctgcggcttatgcctgtaatcccagcactttgggaggcygaagtgagcaaatcacaaggtcaagagattgagaccatcctggccaacatggtgaaaacctgtctctactaaaaatacaaaaattagctgggcgtagtggtgcacacctgtagtcccagctactcaggaggctgaggcaggagaatcgcttgaacctgggaggcggaggttgcagtgagtggaggtcgtgccactgcac

SEQ ID NO: 562267 - DNA, 677 bp, Homo sapiens
tatgtgtcaatgtccttagttatgagatctcaatgttctgggctcttctttttcatagcccaggacttctaggtccattggtctgtgtagtttatccaagtctttttctcctaccgaggcatataaaacatctaaatttcctgcagaccataaccagttcatgagaaaaaggaagcattatcctggtatttctctttgtctaactaagccattctacctttttactgttctacaagcactacactttggcactgaagtttttttcaaagttccaaatagaaatcaagtgctttctgattgggattctcctgaaggctatcatgtaaccctaatctgggccaacattgtgaggagtggttataaggaactcacttaaatagaaggatcttaygtgatttagaaatcccactagtgggcaaatatccaaagaaaattaaatcagaatgtcaaaggaatatctacactcccatgttcatggcagcattattcacaatagccaggatatagattaaagctaaacgtccatcaatctttgaatgaataaagaacatttgttacacatacaaggaaatactattcagccataaaaagaacaaaatcttgacatttgcagcaacatggatgaacctggattatgttatgttaagtgaagtaagctaggcacagaaagacaaaga

SEQ ID NO: 562268 - DNA, 626 bp, Homo sapiens
tgttattcccatcaaactaccactgacattcttcacagaattagaaaaaaaattactttaaatctcatatggaatcaaaatctccatatagccaagacaatcctaarcaaaaagagcaaagctgaaggcatgacactacctgacttcaaactatactacaaggccacagtaaccaaaacagcatggtactggtaccaaaaacagacatatagatcaatggaacagaaaggagacctcagaaacaaacaacaccacacacctgcaaccatctgatcttcgccaaacccaacaaaaacaagcaatggagaaaggactacagcactctgccaccaggctcagctttttttttatttttggagagataaggtcacattatgttgcccaggctggtctctaactcctgtgttcaaatgatcctcccacctcccacgttagcctcccaaaattctgggatcaacatacttgaggaactctacttggctttattatgtgtttattgtctgctccccctaactagaatgtaagtttcttgagggtagagattatcttatttttgtctttatttgttccttaacttctgtacatgtggggcctaaaagatctctgtcatgtgagagcttctcgat

SEQ ID NO: 562269 - DNA, 626 bp, Homo sapiens
tgttattcccatcaaactaccactgacattcttcacagaattagaaaaaaaattactttaaatctcatatggaatcaaaatctccatatagccaagacaatcctaaacaaaaagagcaaagctgaaggcatgacactacctgacttcaaactatactacaaggccacagtaaccaaaacagcatggtactggtaccaaaaacagacatatagatcaatggaacagaaaggagacctcagaaacaaacaacaccacacacctgcaaccatctgatcttcgccaaacccaacaaaaacaagcaatggagaaaggactacagcactctgccaccaggctcagctttttttttatttttggagagataaggtcacattatgttgcccaggctggtctctaactcctgtgytcaaatgatcctcccacctcccacgttagcctcccaaaattctgggatcaacatacttgaggaactctacttggctttattatgtgtttattgtctgctccccctaactagaatgtaagtttcttgagggtagagattatcttatttttgtctttatttgttccttaacttctgtacatgtggggcctaaaagatctctgtcatgtgagagcttctcgat

SEQ ID NO: 562270 - DNA, 578 bp, Homo sapiens
ctcactgcaacctctgcctctcaggttcaagcaattmtcctgcctcagcttcccaagtagctgagattacaggtgtgtgccaccacacccagaaaattttctgtatttgtggtagagatgggatttcacagtgttggcaagactgatctcaaactcctggcctcaagtgatctgcctgctttggccgcccaaaatgctaggattacaatcatgatccatcatggttggccaatactagatacttttaatatcagtgttttcgtcttgtcagcatcaaatagtcatttatgaaccactttatataacacagttgagtaatctgaggagttaatttatagttagtaatgctttcacacttcagaggtactccataattgaaaataaattttgtatctgtgaatggcttgagagcattgatgtggactaaataaccctacctggtttctcttaatcatgaggttgtattggcattgtgtcaagttgttagtacagagtattgagaacagagtctcctgggtgtctgctgagggctggaactctcctcaaggttggtgaatggcctcatgtcactggtgtcc

SEQ ID NO: 562271 - DNA, 578 bp, Homo sapiens
ctcactgcaacctctgcctctcaggttcaagcaattctcctgcctcagcttcccaagtagctgagattacaggtgtgtgccaccacacccagaaaattttctgtatttktggtagagatgggatttcacagtgttggcaagactgatctcaaactcctggcctcaagtgatctgcctgctttggccgcccaaaatgctaggattacaatcatgatccatcatggttggccaatactagatacttttaatatcagtgttttcgtcttgtcagcatcaaatagtcatttatgaaccactttatataacacagttgagtaatctgaggagttaatttatagttagtaatgctttcacacttcagaggtactccataattgaaaataaattttgtatctgtgaatggcttgagagcattgatgtggactaaataaccctacctggtttctcttaatcatgaggttgtattggcattgtgtcaagttgttagtacagagtattgagaacagagtctcctgggtgtctgctgagggctggaactctcctcaaggttggtgaatggcctcatgtcactggtgtcc

SEQ ID NO: 562272 - DNA, 578 bp, Homo sapiens
ctcactgcaacctctgcctctcaggttcaagcaattctcctgcctcagcttcccaagtagctgagattacaggtgtgtgccaccacacccagaaaattttctgtatttgtggtagagatgggatttcacagtgttggcaagactgatctcaaactcctggcctcaagtgatctgcctgctttggccgcccaaaatgctaggattacaatcatgatccatcatggttggccaatactagatacttttaatatcagtgttttcgtcttgtcagcatyaaatagtcatttatgaaccactttatataacacagttgagtaatctgaggagttaatttatagttagtaatgctttcacacttcagaggtactccataattgaaaataaattttgtatctgtgaatggcttgagagcattgatgtggactaaataaccctacctggtttctcttaatcatgaggttgtattggcattgtgtcaagttgttagtacagagtattgagaacagagtctcctgggtgtctgctgagggctggaactctcctcaaggttggtgaatggcctcatgtcactggtgtcc

SEQ ID NO: 562273 - DNA, 578 bp, Homo sapiens
ctcactgcaacctctgcctctcaggttcaagcaattctcctgcctcagcttcccaagtagctgagattacaggtgtgtgccaccacacccagaaaattttctgtatttgtggtagagatgggatttcacagtgttggcaagactgatctcaaactcctggcctcaagtgatctgcctgctttggccgcccaaaatgctaggattacaatcatgatccatcatggttggccaatactagatacttttaatatcagtgttttcgtcttgtcagcatcaaatagtcatttatgaaccactttatataacacagttgagtaatctgaggagttaatttatagttagtaatgctttcacacttcagaggtactccataattgaaaataaattttgtatctgtgaatggcttgagagcattgatgtggactaaataaccctacctggtttctcttaatcatgaggttgtattggcattgtgtcaagttgttagtacagagtaytgagaacagagtctcctgggtgtctgctgagggctggaactctcctcaaggttggtgaatggcctcatgtcactggtgtcc

SEQ ID NO: 562274 - DNA, 620 bp, Homo sapiens
aaatcctgcatctcatttggatatttttttagtggtacctgatagaggtgtttctaaattatagtagaaatgccatcaaaactagggaatctgaaaaacaaatgttaggagttaaaggctctgtaaccatgaagaactgagttttgtgtattcttctgaggagaaggaatgcagactattgtctgttcttcaacctacagcaagacagtcctcctcaactgttgccccagtccaccccattgccacgtccaactactagttagtactaataaatttagtaatcttcccatcttaccgcagaggactcaatttgcaactcaatacctcaatcatgatgtcttccatgctgccatgaagtttgccaattataatagytgaaactaaacattgaatctggctatgtactagaaaacatcacagaaggatctacattctctttaaatacaactattgagaacatttatcttcaactaatttgcattaatgaacactgctaagtagccatgtttacaagctgtgaaggtgtaaccttgtcccacagtaactctgaattgaagccaagattttaatcagaacaggctatcaattttgcccaaagaagcatttattgcttaatatag

SEQ ID NO: 562275 - DNA, 570 bp, Homo sapiens
tctactgagctaccctaccactacactacacccaaacttacagcaggttggaaaaacacctccctcacttccatctttacagacacttgcacaacctgccagtgagatttacttctgcccaggcagagtgtctccaatgttattaatcttctctccatgagtgagatctagcttaaatgccttctaatgtcatctgtcattactctgactttacattctatcagataaactggattggaccatgtatgggagggaattccttgatgaagttaatggaygggagatggttcctgcatgtaaaatcaggacaagataactaggtgggcttagacaactttattaagcctgtatgcaacagagaggggccatctcaagaaaaacgttccagggataacaaatcttcagccaaatcaccctactggtaaatagctcaagcttcagtccccaaaaatgattagctgaagaacatagtgaggaagtgagaaaagatgtcaaagggactcactcatgcagaaagagagggtccatctgagctaaataagatttaaaccaccctaggctttattacct

SEQ ID NO: 562276 - DNA, 478 bp, Homo sapiens
tatgggtgcgaattgtgtcacccccaaaattatcattttaaggagaatgtttttagatatacgttatataaatgtgaattttattagtggttacatcttattttgtttttatattggcaaatgttcttgttagaactatttaacgagtctctcctattgatccagaagcatagaaactttttttcttcttttccaaagtaatttcgaatttcctctcatttagtttcagtgctgtagttgagtgaktatacaattgctcagtggaaactggatagaattgtatttcttaggagactgttttataaatgtaccttcgaagtgaatttcatgaataaatgttccatttccttcctttactagtttcaagatgatatttcaattgttgctgtttaacaacttctccataacgtgaatgtagtaagagttttacaagagtaatcttgaaattggagatattagaaactcaaagtatattttt

SEQ ID NO: 562277 - DNA, 598 bp, Homo sapiens
agtagtaatgtgacctgaagcaatatcacctcatttctgcaattttcactttccccatctgtgaggtagtaaaaacaggatcctccttatacagctgtggtgagaacttackagaaaatatttctaaaaaattctttgggaactatgaacgcctgtgcaaatattaattccccctcattgttatcccatctactctttatacagaagctgtcttatcactgaatcaaagaacaactttctgacaatattagtagatttccattcattctgaagatttcaattgggtccagtgtatctaccatttactgataaagtagtttcattaatctaggctgctcttctagagtgatgtggcaagttggatgatgactgaattcagttaaatgtggagtatttcatgtacataagtcctgtaagacagtgtcttcaggaatcataattcaggcctccaacatccataaattttggggaattgttttaggcagtaatatctaaaataaattactgactcaactcttcatttcacttttcaaaagatataattttggctttgggggcagatatttagaatcttctctggtcagagccatgacaaggg

SEQ ID NO: 562278 - DNA, 598 bp, Homo sapiens
agtagtaatgtgacctgaagcaatatcacctcatttctgcaattttcactttccccatctgtgaggtagtaaaaacaggatcctccttatacagctgtggtgagaacttacgagaaaatatttctaaaaaattctttgggaactatgaacgcctgtgcaaatattaattccccctcattgttatcccatctactctttatacagaagctgtcttatcactgaatcaaagaacaactttctgacaatattagtagatttccattcattctgaagatttcaattgggtccagtgtatctaccatttactgataaagtagtttcattaatctaggctgctyttctagagtgatgtggcaagttggatgatgactgaattcagttaaatgtggagtatttcatgtacataagtcctgtaagacagtgtcttcaggaatcataattcaggcctccaacatccataaattttggggaattgttttaggcagtaatatctaaaataaattactgactcaactcttcatttcacttttcaaaagatataattttggctttgggggcagatatttagaatcttctctggtcagagccatgacaaggg

SEQ ID NO: 562279 - DNA, 598 bp, Homo sapiens
agtagtaatgtgacctgaagcaatatcacctcatttctgcaattttcactttccccatctgtgaggtagtaaaaacaggatcctccttatacagctgtggtgagaacttacgagaaaatatttctaaaaaattctttgggaactatgaacgcctgtgcaaatattaattccccctcattgttatcccatctactctttatacagaagctgtcttatcactgaatcaaagaacaactttctgacaatattagtagatttccattcattctgaagatttcaattgggtccagtgtatctaccatttactgataaagtagtttcattaatctaggctgctcttctagagtgatgtggcaagttggatgatgactgaattcagttaaatgtggagtatttcatgtacataagtcctgtaagacagtgtcttcaggaatsataattcaggcctccaacatccataaattttggggaattgttttaggcagtaatatctaaaataaattactgactcaactcttcatttcacttttcaaaagatataattttggctttgggggcagatatttagaatcttctctggtcagagccatgacaaggg
